United States Patent Application Publication US 2025/0084491 A1 - sequence listing, part 17

SEQ ID NO: 313437 - DNA, 75 bp, synthetic construct
  source 1..75: mol_type = other DNA
gaaaatgcagggtgaaatccgcgtcatccttgaagggggcggtggccgtgttaaaagcgtcaccatgaaccagcc

SEQ ID NO: 313438 - DNA, 75 bp, synthetic construct
  source 1..75: mol_type = other DNA
atagcttataaggaagaaaaggtaagtctgtcaaactatctgctaaccttccttgttgcatattccgggcggcga

SEQ ID NO: 313439 - DNA, 75 bp, synthetic construct
  source 1..75: mol_type = other DNA
acggctcgtctggctaacagcaatgtcagcgatacacagccaatgacgtttgtggcggataaagacagagcggtt

SEQ ID NO: 313440 - DNA, 75 bp, synthetic construct
  source 1..75: mol_type = other DNA
taaagacagagcggttgtcgttctacaaacatcgaaagcggaaatcattgggaatggcgtggatgagacgaccct

SEQ ID NO: 313441 - DNA, 75 bp, synthetic construct
  source 1..75: mol_type = other DNA
ttagcacatcaattaatgtcaatgctgatgcgtctacggcacatctcactttgctacatgcactttttgatacag

SEQ ID NO: 313442 - DNA, 75 bp, synthetic construct
  source 1..75: mol_type = other DNA
gttagcgtgaacaattatggtgtcagtgatacgaaacaggtgacgttgattgccgatgctggtaccgcaaaacta

SEQ ID NO: 313443 - DNA, 75 bp, synthetic construct
  source 1..75: mol_type = other DNA
tgtttacctctttctcagggagtttagtctccaggatttccggggcggttcatacggcctctgtgagctctggtt

SEQ ID NO: 313444 - DNA, 75 bp, synthetic construct
  source 1..75: mol_type = other DNA
ggaggccgacaatacattgtttccctggaaaacggggcgcatggctctgttcaaacatctgaatattttcatgtg

SEQ ID NO: 313445 - DNA, 75 bp, synthetic construct
  source 1..75: mol_type = other DNA
ctgcgtgatgcgtccggtgagaaacgtatcaaaggtgaaaaagacggtcgtattctcatgaatgttggtctcaac

SEQ ID NO: 313446 - DNA, 75 bp, synthetic construct
  source 1..75: mol_type = other DNA
atgctgattatatctatcacggcaacattaacgggaatctggacgtgcttcagcatcatgagacgaaaaaagaga

SEQ ID NO: 313447 - DNA, 75 bp, synthetic construct
  source 1..75: mol_type = other DNA
ggtgctgaagcaggctaccgctgtcatgtcactgaggatacctggattgagccacaggcagaactggtttacggt

SEQ ID NO: 313448 - DNA, 75 bp, synthetic construct
  source 1..75: mol_type = other DNA
ttggcaccagagactacagctcccactcctggtatgccggtgcggaagtcggttaccgttatcatgtaactgact

SEQ ID NO: 313449 - DNA, 75 bp, synthetic construct
  source 1..75: mol_type = other DNA
atttattgttaatagttttgcaagcgtacaatatgagaatatttctgttgtattgtcaaaacgaagagacattat

SEQ ID NO: 313450 - DNA, 75 bp, synthetic construct
  source 1..75: mol_type = other DNA
agtctttggcaaagttgcaaaatttaatccaaaaagtttttaattccttcagttgggaaggaccaaagcaacacc

SEQ ID NO: 313451 - DNA, 75 bp, synthetic construct
  source 1..75: mol_type = other DNA
taacgccagaaggggcgacgttaagtggcggaaaagtgagaactaactcttcaggtcaggctccagtcgttctga

SEQ ID NO: 313452 - DNA, 75 bp, synthetic construct
  source 1..75: mol_type = other DNA
tggcagcctcgaaggatccggtgattgccgacaataacgatctcacgacactaacagcaacagtcgctgatacag

SEQ ID NO: 313453 - DNA, 75 bp, synthetic construct
  source 1..75: mol_type = other DNA
tcgaaacggatgctcagggtaaggcagaagttcttgtgaccagcaccattgcaggaacgaaagtaattacagcta

SEQ ID NO: 313454 - DNA, 75 bp, synthetic construct
  source 1..75: mol_type = other DNA
tcaaaagatgagatcacaggtaatggcgtcgatagcgcaacgctaactgcaacggttaaagatcagttcgacaat

SEQ ID NO: 313455 - DNA, 75 bp, synthetic construct
  source 1..75: mol_type = other DNA
gtcaatattgcgcccgatgccagcaacgcgcaggtcaccctgaacatccctgctcaacaggtggtgacgaataac

SEQ ID NO: 313456 - DNA, 75 bp, synthetic construct
  source 1..75: mol_type = other DNA
gtatcgcaacgctgatccctgtattgaatggtgttcatcaagctggtctgagtaccacaatacaattcactcgcg

SEQ ID NO: 313457 - DNA, 75 bp, synthetic construct
  source 1..75: mol_type = other DNA
gtctgaataccacgatagaattcattagcgcgggaaccagaccaatgaccggtacagtatcagtgaatggtgcaa

SEQ ID NO: 313458 - DNA, 75 bp, synthetic construct
  source 1..75: mol_type = other DNA
aaacggcagcggtgctggggcccgatgcgcagcaaaaagcgctcgcctatcaacgctacttcgatcgcaacgtgg

SEQ ID NO: 313459 - DNA, 75 bp, synthetic construct
  source 1..75: mol_type = other DNA
atcctatcgaggtgacggtagaactgagagatgaaaatgacaaacctgttaaggagcaaaaacagcaactgaata

SEQ ID NO: 313460 - DNA, 75 bp, synthetic construct
  source 1..75: mol_type = other DNA
acgctgggtaacaataatgccagcgatgcgcaaccagtcaccttcgtggcggataaggacagcgcagttgtcgtt

SEQ ID NO: 313461 - DNA, 75 bp, synthetic construct
  source 1..75: mol_type = other DNA
agtgaatagccacgacgggagcgccacagctacgctgaccagtttgaaaaatggtgattatacggttacggcctc

SEQ ID NO: 313462 - DNA, 75 bp, synthetic construct
  source 1..75: mol_type = other DNA
gttcccgaggcatcgggtcactgtacagtgaatggggagatatggggcattacacgactgaagctggttttcaat

SEQ ID NO: 313463 - DNA, 75 bp, synthetic construct
  source 1..75: mol_type = other DNA
gccgtcaagttttaacatggtcattagtcaggatacggtttctacgaataggcagggtatagctgaggtcaccat

SEQ ID NO: 313464 - DNA, 75 bp, synthetic construct
  source 1..75: mol_type = other DNA
ttaattataaaggcgagaaaaaacttatcgcgttcagggccggttcaggaacaattggtataaaaaaagatggaa

SEQ ID NO: 313465 - DNA, 75 bp, synthetic construct
  source 1..75: mol_type = other DNA
gtttcaattgttgtcgcaattgctatcgccaccattggaattgaaaccaaaggtgtctccgttgaaagtttaagt

SEQ ID NO: 313466 - DNA, 75 bp, synthetic construct
  source 1..75: mol_type = other DNA
catgctggtgatggataaaattccgcgtaaaacaatgggtgtggggctattaatcctgattgcggtgctcggata

SEQ ID NO: 313467 - DNA, 75 bp, synthetic construct
  source 1..75: mol_type = other DNA
agatgttaagacggaagaacaacggcttattaatcctctcggatttgaagctgtcagctatcgtgtagacgcgga

SEQ ID NO: 313468 - DNA, 75 bp, synthetic construct
  source 1..75: mol_type = other DNA
atggagaagcaacaagaaaggccgcggcgttgccggttttccataggctccgcccccctgacaagcatcacagaa

SEQ ID NO: 313469 - DNA, 75 bp, synthetic construct
  source 1..75: mol_type = other DNA
tatcttcattacaagataaagaagatgatgttgacgaacttaaatactccgccgaggactttgactccttaacag

SEQ ID NO: 313470 - DNA, 75 bp, synthetic construct
  source 1..75: mol_type = other DNA
ttttgcgctggcgatgggaaaaccattgagaaacttaagcaatggtggctggctgagccgtttgacccagagaac

SEQ ID NO: 313471 - DNA, 75 bp, synthetic construct
  source 1..75: mol_type = other DNA
gtgggacttaaagccagttttggtactgaattcagcaaaatgaggaatctcaccgaacggcttaaagccgctggg

SEQ ID NO: 313472 - DNA, 75 bp, synthetic construct
  source 1..75: mol_type = other DNA
cctctcaggcggtttattcccgccagtcaaagtcagcactggcgtcagccctcgatggtgtccgattcactgaat

SEQ ID NO: 313473 - DNA, 75 bp, synthetic construct
  source 1..75: mol_type = other DNA
ggaggggacattcagcgagtccacaggagccagtcaggattcggctcgctggggggtgggtaaacctttatatca

SEQ ID NO: 313474 - DNA, 75 bp, synthetic construct
  source 1..75: mol_type = other DNA
acatattttgggaatggcttgagccatctctaacctttatttccacaaatcaaatcttaagtggtgctgttgcta

SEQ ID NO: 313475 - DNA, 75 bp, synthetic construct
  source 1..75: mol_type = other DNA
ttggctgcaacagtaagagcggatataccatatcaaacatttagagactttgcagagaataaaggttcgtttttt

SEQ ID NO: 313476 - DNA, 75 bp, synthetic construct
  source 1..75: mol_type = other DNA
acttattctggggctaatccccatacttggcggtgagatgatcgggcgtgtgctcttttatggcctgcacatgac

SEQ ID NO: 313477 - DNA, 75 bp, synthetic construct
  source 1..75: mol_type = other DNA
tctgacgctcaaatcagtggtggcgaaccccgacaggactataaagatcccaggcgtttccccctggtagctccc

SEQ ID NO: 313478 - DNA, 75 bp, synthetic construct
  source 1..75: mol_type = other DNA
gtacaacggtattttctttgcaaaaaatggcggaactcttgacctgaacggatataatcagtctttcaataaaat

SEQ ID NO: 313479 - DNA, 75 bp, synthetic construct
  source 1..75: mol_type = other DNA
ccttcagatttggaacactacatcttgaaaattccgatttttccatcggtcgtaatgccaatgtaatgggagaca

SEQ ID NO: 313480 - DNA, 75 bp, synthetic construct
  source 1..75: mol_type = other DNA
caactcagggtgacagtggttcagccctctttgtatatgacaacgaaaagaaaaaatgggttgtcgccggaactg

SEQ ID NO: 313481 - DNA, 75 bp, synthetic construct
  source 1..75: mol_type = other DNA
ccgagcagagccggattgctgaaatccccgtagttgcagccgggattcttgatgaactgattagctgcgaacagt

SEQ ID NO: 313482 - DNA, 75 bp, synthetic construct
  source 1..75: mol_type = other DNA
tgctgcaactgattcaggtgctgtaataaccaatacgtcaaccaaaaaatccattttatccctgaataatactgc

SEQ ID NO: 313483 - DNA, 75 bp, synthetic construct
  source 1..75: mol_type = other DNA
acaactacacgcacgttcaggtcggggtcgacaaaaaacatgagctggacggactggatttgtttaccggtttca

SEQ ID NO: 313484 - DNA, 75 bp, synthetic construct
  source 1..75: mol_type = other DNA
cctacatgaaagtactacacggtatttttaaaaatctttatcaggattccgtttccctaatgcaggtttccgcaa

SEQ ID NO: 313485 - DNA, 75 bp, synthetic construct
  source 1..75: mol_type = other DNA
atccggtcaaaattattgacctcgcccaccgtatgattgccttacaaggactttcagttcgcgatgataaaaatc

SEQ ID NO: 313486 - DNA, 75 bp, synthetic construct
  source 1..75: mol_type = other DNA
ggtttaccggtgtcactccgctgttatggccgcgtttatctcattccacgcctgacactcagttccgggaaggca

SEQ ID NO: 313487 - DNA, 75 bp, synthetic construct
  source 1..75: mol_type = other DNA
ccgtgattacagcacgcattcatggtatgccggtgcagaagcgggctaccgctatcatgtcactgaggatgcctg

SEQ ID NO: 313488 - DNA, 75 bp, synthetic construct
  source 1..75: mol_type = other DNA
gcccattgttccgcaaactgaccgaagcctgtattgctcaccagacagcggaaaccggttcggcaaccttgctgg

SEQ ID NO: 313489 - DNA, 75 bp, synthetic construct
  source 1..75: mol_type = other DNA
attctaatacgccaataaaaggaaacttagcgctaaataatatctggcagagtgaggggcataccttaattgata

SEQ ID NO: 313490 - DNA, 75 bp, synthetic construct
  source 1..75: mol_type = other DNA
tgtagtagtatttttgaagcgtcaaaaaatgatggtgccaaggacagggaaagatcatcagaagtacactttttg

SEQ ID NO: 313491 - DNA, 75 bp, synthetic construct
  source 1..75: mol_type = other DNA
gacctgatgaatcttaaatgggatgctttgtatgttcttgtcaatgccattgtaaatggcgaagtcatatcaaaa

SEQ ID NO: 313492 - DNA, 75 bp, synthetic construct
  source 1..75: mol_type = other DNA
ttggtattgtcggtgaagtcgatggtgatgaccccgcagtattcaggccaatacaaaaatacatcaatggcacat

SEQ ID NO: 313493 - DNA, 75 bp, synthetic construct
  source 1..75: mol_type = other DNA
gataacgaatggcatcctcatagtgtgatgggttatcgctcgccacgggaatatctgaggcagcggaccagtaat

SEQ ID NO: 313494 - DNA, 75 bp, synthetic construct
  source 1..75: mol_type = other DNA
tcacactaaacttttttgccaattatcgagcgttagccagcggtgttcggccaggtgtggcgaaagcggatgcga

SEQ ID NO: 313495 - DNA, 75 bp, synthetic construct
  source 1..75: mol_type = other DNA
ttgatgctcagctacgagcattgggtgcgccaacaggcgctatagacggtgtttacaacgaatgggagggattgc

SEQ ID NO: 313496 - DNA, 75 bp, synthetic construct
  source 1..75: mol_type = other DNA
catcttttggtgccatttttcgccgttctgaagaatgcctgcatatcatccctacacgagagaatgagggggaaa

SEQ ID NO: 313497 - DNA, 75 bp, synthetic construct
  source 1..75: mol_type = other DNA
gtgtaatcagccaacagattcaagaaattgatccagagtatgtaatgcatgttggtaatctattacatctagatg

SEQ ID NO: 313498 - DNA, 75 bp, synthetic construct
  source 1..75: mol_type = other DNA
ccttagaaatatcgtgcctgtgttaacatataaacttttatttaaaggggaattaatatgtaagatggatttaaa

SEQ ID NO: 313499 - DNA, 75 bp, synthetic construct
  source 1..75: mol_type = other DNA
ggtgcttcaacccgtccagtagttgcagagttaggcgatgaggcaggatggcatttctatagccagcgaaataca

SEQ ID NO: 313500 - DNA, 75 bp, synthetic construct
  source 1..75: mol_type = other DNA
ctgtgtttaatttgaggcatgagtatgtgaactcgacttcgcgattcttggttaatttcatgaatagcatcaaaa

SEQ ID NO: 313501 - DNA, 75 bp, synthetic construct
  source 1..75: mol_type = other DNA
tcgccgttctgaagaatgcctgcatatcatccctacacgagagaatgagggagaaaatggtaatatagggccatt

SEQ ID NO: 313502 - DNA, 69 bp, synthetic construct
  source 1..69: mol_type = other DNA
atgaataacacagacacattagaaaaaataatcagacaccaaaaaaacaaagaccccgcatatcccttt

SEQ ID NO: 313503 - DNA, 75 bp, synthetic construct
  source 1..75: mol_type = other DNA
atgaatatagctaatttcaactgggagagttatctcgcgaaaattcagaggcaatcatacgctgtaataggcttg

SEQ ID NO: 313504 - DNA, 75 bp, synthetic construct
  source 1..75: mol_type = other DNA
atagaattagacagtagagtaagattgtttgagggaactttcaatattaatcacgacataaatgatgtcttagaa

SEQ ID NO: 313505 - DNA, 75 bp, synthetic construct
  source 1..75: mol_type = other DNA
acaatttagttttgaaagattttgtgaatggattaatgatgtaaaaactaatttagaaggcgctaacaaagtatc

SEQ ID NO: 313506 - DNA, 75 bp, synthetic construct
  source 1..75: mol_type = other DNA
ctctgtcagagataaatgaatatttagccactcatccggtattgattgagcgcgatgaatttgaagcagtgatct

SEQ ID NO: 313507 - DNA, 75 bp, synthetic construct
  source 1..75: mol_type = other DNA
agtgatgaatttgaagcagtgatctttgcgctggatgatcagtatgtttctcaatccaaaactgttgatgggata

SEQ ID NO: 313508 - DNA, 75 bp, synthetic construct
  source 1..75: mol_type = other DNA
catggaagatatccctgttgctgattgtagtgagttggtcaactatgtacattcctttaactctcttacatccga

SEQ ID NO: 313509 - DNA, 75 bp, synthetic construct
  source 1..75: mol_type = other DNA
accaaaagcgcacagaactacagactactattgacactctgaagcgtaaaacttcactcactgacaaggaactac

SEQ ID NO: 313510 - DNA, 75 bp, synthetic construct
  source 1..75: mol_type = other DNA
gaaaatacatgaaggtgttacgactttatttcattttgtatgtaaacaccttccagagttgacaaggcaaaattt

SEQ ID NO: 313511 - DNA, 75 bp, synthetic construct
  source 1..75: mol_type = other DNA
ctgatttattacccagaaggtaataatgatggtagccctgaagctgttattaaagagattaaagaatggcgagct

SEQ ID NO: 313512 - DNA, 75 bp, synthetic construct
  source 1..75: mol_type = other DNA
tagaagaaaaactcagatcatgtcaagtggaaagtattagtgtagctgcaaaatattttagatcgcgctcatctg

SEQ ID NO: 313513 - DNA, 75 bp, synthetic construct
  source 1..75: mol_type = other DNA
cgtgctggtggtaattccaagtcagcagccttcaaagcctggaaagcccgaatcagggaaggtgtgacaccagaa

SEQ ID NO: 313514 - DNA, 75 bp, synthetic construct
  source 1..75: mol_type = other DNA
gcataacgtgacaggaagtacggtgattgccgctcatgaaggcaaagcgccgcagcagatcatcattatggcgca

SEQ ID NO: 313515 - DNA, 75 bp, synthetic construct
  source 1..75: mol_type = other DNA
atgaagtagttcttcctgtcatcgttgacggctatcactgggcctgtaatcaggaccgtatgtggaacctgaacg

SEQ ID NO: 313516 - DNA, 75 bp, synthetic construct
  source 1..75: mol_type = other DNA
aaacgtgctgataaacagctttgaaagccgttataacgccagcgaacagggaacggttgagttcacgatcaacgt

SEQ ID NO: 313517 - DNA, 75 bp, synthetic construct
  source 1..75: mol_type = other DNA
cgggacaccatccggcagcctggacacaaaccgtaacagcatgacagagcaggccatgccgcagctgtaccgcac

SEQ ID NO: 313518 - DNA, 75 bp, synthetic construct
  source 1..75: mol_type = other DNA
cgcccacgatatcgtattagcgcaggctgaggtttcgcaggtcagcgctgcgcgcgagaatctggcgttgcggcg

SEQ ID NO: 313519 - DNA, 75 bp, synthetic construct
  source 1..75: mol_type = other DNA
ctggggaattttcctcggggttatctactttttgatgattatccacgggatttttatctactctctccgtggttt

SEQ ID NO: 313520 - DNA, 75 bp, synthetic construct
  source 1..75: mol_type = other DNA
tttgtccgcagaaacaatatccccgatccggtttttgttccgggtggccgcagcgtggaggtgatcagtgagcag

SEQ ID NO: 313521 - DNA, 75 bp, synthetic construct
  source 1..75: mol_type = other DNA
gtcatggtgcgaaccaccgaaccggcactggtcacgctgtaccgtgccaccggcaacagccgccgctggcagtat

SEQ ID NO: 313522 - DNA, 75 bp, synthetic construct
  source 1..75: mol_type = other DNA
tcgttgccctgtattgtttcaaatatcccgggaaacaggagtataatcaggcatacagttgatggctatctcttt

SEQ ID NO: 313523 - DNA, 75 bp, synthetic construct
  source 1..75: mol_type = other DNA
agcgatgagtgatcttgaccgaagaaaagaagctctgaatatagacagatataagtcaaaagaaagcttggatgg

SEQ ID NO: 313524 - DNA, 75 bp, synthetic construct
  source 1..75: mol_type = other DNA
ctgattcagacctgttttgccctgttctggatgctggcggcattagtggtgatgctacgtgcgacccggcgttgc

SEQ ID NO: 313525 - DNA, 75 bp, synthetic construct
  source 1..75: mol_type = other DNA
taattctcaacatcgtcggctggtcgcttttgccaaactgcacgatcgccaccaggcgcaggcattgcaagctaa

SEQ ID NO: 313526 - DNA, 75 bp, synthetic construct
  source 1..75: mol_type = other DNA
aatatcttcaattgatactacgaatgataaaaatctctcacatgaggtaactttatatcgctggcatcgtttggg

SEQ ID NO: 313527 - DNA, 75 bp, synthetic construct
  source 1..75: mol_type = other DNA
gaatgcacgatgtccaggcaatgaccgaaaccatcagcgataaggtgtccgccctggaaaatgccgtttccggca

SEQ ID NO: 313528 - DNA, 75 bp, synthetic construct
  source 1..75: mol_type = other DNA
tgccgcctccctgaaggaagctattaaacgcttaaccgcagatggttctattcgtattggcaacaacaacaagga

SEQ ID NO: 313529 - DNA, 75 bp, synthetic construct
  source 1..75: mol_type = other DNA
cacgatgcctacctgagcgattttctgatgtgtaatcggggatttcgtgtctcaccatcttggtcagaaaataaa

SEQ ID NO: 313530 - DNA, 75 bp, synthetic construct
  source 1..75: mol_type = other DNA
aaactgcactgttttccaatacccgtgaaatctcgctggagcgggcgctgctttataccgccagccatcggcaaa

SEQ ID NO: 313531 - DNA, 75 bp, synthetic construct
  source 1..75: mol_type = other DNA
ctcatgttgtgggtgagaaccgcaacatcatcgaggtggaaaccgtcgctaaagagtggcgtattcgtctgggcg

SEQ ID NO: 313532 - DNA, 75 bp, synthetic construct
  source 1..75: mol_type = other DNA
ttgttatatgattaagtcaagactgggattagacgagctcttaagatatgcggcttcagatttcaaaaagatatt

SEQ ID NO: 313533 - DNA, 75 bp, synthetic construct
  source 1..75: mol_type = other DNA
tgatattagactcctatgttgtcagtctggcatcaatcccactaaatactcatcttcatttgctcagagatttaa

SEQ ID NO: 313534 - DNA, 75 bp, synthetic construct
  source 1..75: mol_type = other DNA
gcgggcatcttggggtggggtatagcaacggtgctggtatggaatccccgtggaacgcggtggctggtgtgaact

SEQ ID NO: 313535 - DNA, 75 bp, synthetic construct
  source 1..75: mol_type = other DNA
ataaaacgctggaaagtaaccgcgtgaaaaaggcgttaaaagaccttcagaatgggccttacaacctactctata

SEQ ID NO: 313536 - DNA, 75 bp, synthetic construct
  source 1..75: mol_type = other DNA
ctcagtaacccaaatggtggaaattccccggggccactgaaagttgtttttgatttcattggccctaatggcagc

SEQ ID NO: 313537 - DNA, 75 bp, synthetic construct
  source 1..75: mol_type = other DNA
ttcgatcaggctgtagagggtcaacctctgatctgtctggtgaacgtctccgcaggcgatgacaagacaatcgtt

SEQ ID NO: 313538 - DNA, 75 bp, synthetic construct
  source 1..75: mol_type = other DNA
gtgatcgtcaccgataagcgcacctataacatcgtcctccatttcatcggtgaagaaacgaagaaaaatgcagac

SEQ ID NO: 313539 - DNA, 75 bp, synthetic construct
  source 1..75: mol_type = other DNA
gctgtcgccggtgtggctacccacattgttgtcgcgcctgacgaaacctatatcactcatgcttttggcgattct

SEQ ID NO: 313540 - DNA, 75 bp, synthetic construct
  source 1..75: mol_type = other DNA
gaaggcactaaaccgcatgacagcgattgaagttaacgacctgctaccgaagacagaacatacggagttgccaga

SEQ ID NO: 313541 - DNA, 75 bp, synthetic construct
  source 1..75: mol_type = other DNA
gttgctgctgagggggaggtgagtacgccggtgatacgtcctgatgcaggtgatgattcatctgtggctgtctcc

SEQ ID NO: 313542 - DNA, 75 bp, synthetic construct
  source 1..75: mol_type = other DNA
cttttttgtggggggggaatatggcagtacggatttcaggtgtactgaaagatggcgcaggtaagccgatacaaa

SEQ ID NO: 313543 - DNA, 75 bp, synthetic construct
  source 1..75: mol_type = other DNA
aacggtgctacagcgcaggcgctaaccatcaacaaagatgaggttaactcaactgccgatttagtaattagaaaa

SEQ ID NO: 313544 - DNA, 75 bp, synthetic construct
  source 1..75: mol_type = other DNA
ttaacgcgttctggttcttctgaaaatgtgtccattgggtttaagttagacaacgtgaaccaaaagtatcttgga

SEQ ID NO: 313545 - DNA, 75 bp, synthetic construct
  source 1..75: mol_type = other DNA
acaaaactgcaccattcagctaaaggccaggcgcaacagcaccacggtggtggtgaacacagtggcctcagaaaa

SEQ ID NO: 313546 - DNA, 75 bp, synthetic construct
  source 1..75: mol_type = other DNA
cgaatgctgcagcgtcacaaaaatctgcagccacttctgcatccaccgcgaccacgaaagcgtcagaagctgcca

SEQ ID NO: 313547 - DNA, 75 bp, synthetic construct
  source 1..75: mol_type = other DNA
ctggcgctgatgcgtgaaggcgtacggatgaaagcattgctggctaaatctgatgaacttggcctgacggttgat

SEQ ID NO: 313548 - DNA, 75 bp, synthetic construct
  source 1..75: mol_type = other DNA
agaaaagcactaattaaaacacaaaacaaacataaaaatgatcttcttgaattaagtagactagctggggagaca

SEQ ID NO: 313549 - DNA, 75 bp, synthetic construct
  source 1..75: mol_type = other DNA
ttctcaatatccaaaagcatccatttatgtgctctccttcatgcaatacaatgtttacattcatggggctgggac

SEQ ID NO: 313550 - DNA, 75 bp, synthetic construct
  source 1..75: mol_type = other DNA
agatgcattcgggacaatgcttgtaatgcggaccacgcgctcagttaatttgacagaagcgggagaacggctgca

SEQ ID NO: 313551 - DNA, 75 bp, synthetic construct
  source 1..75: mol_type = other DNA
cataaaaaagattgatcatagagcccccccctataaatatctagctttagatgaaaaatcaatattatctgtgaa

SEQ ID NO: 313552 - DNA, 75 bp, synthetic construct
  source 1..75: mol_type = other DNA
tcggccgcgacaggtattcaaccccagcagcgggtggatctgcataacccggaggtgctgaagtcagtcatggcg

SEQ ID NO: 313553 - DNA, 75 bp, synthetic construct
  source 1..75: mol_type = other DNA
tggacttggcaacgtaacgaacgatgcgcaggtaaaaaaaaccggtgatacaatgaccggtgacttgacaatcaa

SEQ ID NO: 313554 - DNA, 75 bp, synthetic construct
  source 1..75: mol_type = other DNA
cttgtcgatcagataccagagaagcaaaagagtcgctatcatatcaatgaagatgcattgattacacttccttct

SEQ ID NO: 313555 - DNA, 75 bp, synthetic construct
  source 1..75: mol_type = other DNA
aatggggtattgctaatattgaactcttgattgagtttgtacggcaaaatggttttgttgttgaaaaagctgaac

SEQ ID NO: 313556 - DNA, 75 bp, synthetic construct
  source 1..75: mol_type = other DNA
tcccggtttgcgctttgagaactttgacgacatcgtgagtcgttgcactactgcaatgttaaaactggaacaacc

SEQ ID NO: 313557 - DNA, 75 bp, synthetic construct
  source 1..75: mol_type = other DNA
taggattaccatccgaacaagcccataagctgttcatccagtcattggtttggcgctcccgacaaagtgtagtgg

SEQ ID NO: 313558 - DNA, 75 bp, synthetic construct
  source 1..75: mol_type = other DNA
cgcaattcagatatcaaaggttgggttcggaccgatgatttgtcaccttatgaagcttgtctgattcgaactgac

SEQ ID NO: 313559 - DNA, 75 bp, synthetic construct
  source 1..75: mol_type = other DNA
aacctacaagtgatcatctatggtcagtcgacgtccgtaaagtcgacctgaccgatgtacgcgacatcaccgcag

SEQ ID NO: 313560 - DNA, 75 bp, synthetic construct
  source 1..75: mol_type = other DNA
ctatgcttataggagccttcggtcttggcggcagcggtgttggtttggataataaaatgaccgatcaggagctac

SEQ ID NO: 313561 - DNA, 75 bp, synthetic construct
  source 1..75: mol_type = other DNA
tgctacgtgtagaatctactcgtaaaactacgggttcagattatgcgatcatgcaaacgctgattggcagcgaca

SEQ ID NO: 313562 - DNA, 75 bp, synthetic construct
  source 1..75: mol_type = other DNA
taacctcgacgactccatcaaaattaggtggcgggcgtgttgacgtgcttggaagtacgtcagattacaacagca

SEQ ID NO: 313563 - DNA, 75 bp, synthetic construct
  source 1..75: mol_type = other DNA
ttttccgccttcacatgccgggaccattaccgtttatgaaggttccagaccaggtacgctgaatgattttctgac

SEQ ID NO: 313564 - DNA, 75 bp, synthetic construct
  source 1..75: mol_type = other DNA
caaggagttagcgctaaccgaagattcagttacctcaaacgctgacattatcctaaaaaatagtgatgatggttc

SEQ ID NO: 313565 - DNA, 75 bp, synthetic construct
  source 1..75: mol_type = other DNA
aatatagactacgacagtggtagggtgaaggtttacgctggtaatgacaggagacttgatgatggtacttttaac

SEQ ID NO: 313566 - DNA, 75 bp, synthetic construct
  source 1..75: mol_type = other DNA
ggggccggaaggctgaaaaagtttcagaagaccataaaggcgaaacccccatcatctttcctcgaaacttggcgg

SEQ ID NO: 313567 - DNA, 75 bp, synthetic construct
  source 1..75: mol_type = other DNA
gttcggcatcaccggcgccatcgtctgcgcctcaaaactggcctttatgggctggggtctgggtattcgcgagct

SEQ ID NO: 313568 - DNA, 75 bp, synthetic construct
  source 1..75: mol_type = other DNA
gttcggcatcaccggcgccattgtctgcgcctccaaactggcctttatgggctggggactgggtattcgcgagct

SEQ ID NO: 313569 - DNA, 75 bp, synthetic construct
  source 1..75: mol_type = other DNA
ctggtttaatgatggcaatcccacttgggatgacggtgatggcgaagacctgcatctcaaagaagtaacccactg

SEQ ID NO: 313570 - DNA, 75 bp, synthetic construct
  source 1..75: mol_type = other DNA
gtggcacagatagccatcgcatgggctattgcgaaaggtacccttcccctcgttggtgcgactaaagtccatcac

SEQ ID NO: 313571 - DNA, 75 bp, synthetic construct
  source 1..75: mol_type = other DNA
aaaaccaaggttgtatttggcacctacccggagatatcccttgcggaagctcgcaggcttcacgcagaagcgcgt

SEQ ID NO: 313572 - DNA, 75 bp, synthetic construct
  source 1..75: mol_type = other DNA
agaaaatacattacaaaaaaaatcttaaaccaattatcttaacttataaggatattctttttaagaacttggcat

SEQ ID NO: 313573 - DNA, 75 bp, synthetic construct
  source 1..75: mol_type = other DNA
gctgcgggaaaaatgggatgagctttccctgcgcttatcgccgtccgtcagcacgtacacagaaaaacgcgaaga

SEQ ID NO: 313574 - DNA, 75 bp, synthetic construct
  source 1..75: mol_type = other DNA
cgtcgatagcgcaacgctaactgcaacggtcaaagatcagttcgacaatgaggtgaataatcttccggtaacctt

SEQ ID NO: 313575 - DNA, 75 bp, synthetic construct
  source 1..75: mol_type = other DNA
cggtattaagcggatcggcaacttccttcaacaatcaaaacaccgcaaaaacggatgttaatggtctggcgactt

SEQ ID NO: 313576 - DNA, 75 bp, synthetic construct
  source 1..75: mol_type = other DNA
ggttggataagctgtagtgatcgaatgccagaaatgggagagcgacaatactatgtgttagcagctgactttaaa

SEQ ID NO: 313577 - DNA, 75 bp, synthetic construct
  source 1..75: mol_type = other DNA
gacttgtcgaatgctcatgctatcattgcgcatttggaaggttttgttaataaacaggaatatcttatatgtgaa

SEQ ID NO: 313578 - DNA, 75 bp, synthetic construct
  source 1..75: mol_type = other DNA
aatgggatgagctttccctgcgcttatcgccgtccgtcagcacgtacacagaaaaacgcgaagacccgtacttca

SEQ ID NO: 313579 - DNA, 75 bp, synthetic construct
  source 1..75: mol_type = other DNA
cttccccacgtcatttggtctatttttgagagtgcttttggctggcaggaagcggcaggcggcgcggcgggatat

SEQ ID NO: 313580 - DNA, 75 bp, synthetic construct
  source 1..75: mol_type = other DNA
caaacaccttgaaagtattgcccgcagtcgtggtctccccccaaaaaaactgctgaatgaaatgattgagcaggc

SEQ ID NO: 313581 - DNA, 75 bp, synthetic construct
  source 1..75: mol_type = other DNA
caaacaccttgaaagtattgcccgaagtcgtggtctccacccaaaaaaactgctgaatgaaatgattgagcaggc

SEQ ID NO: 313582 - DNA, 75 bp, synthetic construct
  source 1..75: mol_type = other DNA
caaacaacttgaaagtattgcccgaagtcgtggtctccccccaaaaaaactgctgaatgaaatgattgagcaggc

SEQ ID NO: 313583 - DNA, 75 bp, synthetic construct
  source 1..75: mol_type = other DNA
aggttggggggctattggtgatggtgttcatgatgatacatcagctctatcagaattactttctgttgcaacagg

SEQ ID NO: 313584 - DNA, 75 bp, synthetic construct
  source 1..75: mol_type = other DNA
caaacagcttgaaagtattgcccggagtcgtggtctccccccaaaaaaactgctgaatgaaatgattgagcaggc

SEQ ID NO: 313585 - DNA, 75 bp, synthetic construct
  source 1..75: mol_type = other DNA
caaacaccttgaaagtattgcccggagtcgtggtctccgcccaaaaaaactgctgaatgaaatgattgagcaggc

SEQ ID NO: 313586 - DNA, 75 bp, synthetic construct
  source 1..75: mol_type = other DNA
actggcggcggtgtatgaccgcagcaatacacaggtgcgcagctttacttacgatgataaataccggggccggat

SEQ ID NO: 313587 - DNA, 75 bp, synthetic construct
  source 1..75: mol_type = other DNA
taagagacaatgaatatcttattgataaaattaatgaacttaaacctagtaacgataaaacaagatttttaaggt

SEQ ID NO: 313588 - DNA, 75 bp, synthetic construct
  source 1..75: mol_type = other DNA
tactctctgatgagattaaagaattaccatctacaatgacagaactatactcaaaatacagtgagatagtattgg

SEQ ID NO: 313589 - DNA, 75 bp, synthetic construct
  source 1..75: mol_type = other DNA
ttaacggcaaattacgcacgtaccggagggcaggtgactgcagggaatgtgcaatcgattattgccgtgactttt

SEQ ID NO: 313590 - DNA, 75 bp, synthetic construct
  source 1..75: mol_type = other DNA
ggaaatattgccgcagtacaggcactgattgacgctaatctgatcgactggcaacggcttcgccaatcgacagga

SEQ ID NO: 313591 - DNA, 75 bp, synthetic construct
  source 1..75: mol_type = other DNA
atggctttaatcccaataaaaaataagtttaatttattttggcaaataaaatatctaatttttaaactgaagatt

SEQ ID NO: 313592 - DNA, 75 bp, synthetic construct
  source 1..75: mol_type = other DNA
ggggctggcaatggtggtcgggccgtggattggtctgaatatggcgcgctgggaggcctttaatatggctttctg

SEQ ID NO: 313593 - DNA, 75 bp, synthetic construct
  source 1..75: mol_type = other DNA
gccactcaatagaatcactgctttttattagggtgcttcatggtattaccttcggggttatcactacggtaaaag

SEQ ID NO: 313594 - DNA, 75 bp, synthetic construct
  source 1..75: mol_type = other DNA
tatggtgtaggtaaggttgttcaagggccactggagaaagtaattaatcctaactggaaaaactgggaatggctc

SEQ ID NO: 313595 - DNA, 75 bp, synthetic construct
  source 1..75: mol_type = other DNA
tgttcaaggcaaacgtaagccaggcactgattttcaggaaacactcactgatatctatgcggaatatatcgctaa

SEQ ID NO: 313596 - DNA, 75 bp, synthetic construct
  source 1..75: mol_type = other DNA
aattttatcaggacgtgttcgcgcagttcagaggaccgataccgccagtgctgtggatactcaaccaagtggaca

SEQ ID NO: 313597 - DNA, 75 bp, synthetic construct
  source 1..75: mol_type = other DNA
accgaatgatttatctgctgggtgcactattagtggtagtggctggggggggctatgcgctgcaaatgaagggga

SEQ ID NO: 313598 - DNA, 75 bp, synthetic construct
  source 1..75: mol_type = other DNA
aaggttgatggtgaaaatctggactccggtatatatcaagtaatgaattctgtaccgcttgaagaaaaagagaaa

SEQ ID NO: 313599 - DNA, 75 bp, synthetic construct
  source 1..75: mol_type = other DNA
cagaggaatggttgtgatggtaaattagtgcatataattgatttggggtatgagcttgaagatattgaatcactg

SEQ ID NO: 313600 - DNA, 75 bp, synthetic construct
  source 1..75: mol_type = other DNA
gattatcccttaagtgatgaaagggaaagcatggtttcctttgaatttagcaataataaggatttgcagagtgtt

SEQ ID NO: 313601 - DNA, 75 bp, synthetic construct
  source 1..75: mol_type = other DNA
ataacctccactgctcgctttaataatgatagtgatgattttgaagaactgcacaaaatcacgcttatggtattt

SEQ ID NO: 313602 - DNA, 75 bp, synthetic construct
  source 1..75: mol_type = other DNA
attatgcccgcctgggaacaactattgctgcatgtattcgccaacccaaaagtaaaaagaagcaccatattctga

SEQ ID NO: 313603 - DNA, 75 bp, synthetic construct
  source 1..75: mol_type = other DNA
tgtgttttttgcgtatcgtcagcccgccagtgcagtttgttattttagccttgactacgtgaccgcaggggaaga

SEQ ID NO: 313604 - DNA, 75 bp, synthetic construct
  source 1..75: mol_type = other DNA
atatctatgctgactatgttgctaaacaccacgtagcgtatcagcgcactaaagagagcgtgttggcggcttctt

SEQ ID NO: 313605 - DNA, 75 bp, synthetic construct
  source 1..75: mol_type = other DNA
taatgtcacaacgtctggtcaacaactcgtacaaagtgatgagatgactagacataaaattgcagcgagaaaatt

SEQ ID NO: 313606 - DNA, 75 bp, synthetic construct
  source 1..75: mol_type = other DNA
tataaattagtggaaattgtttggagtggcgaaccacttactcctattaatactggtttgcaagatagacatatc

SEQ ID NO: 313607 - DNA, 75 bp, synthetic construct
  source 1..75: mol_type = other DNA
ctgatccgctgctgctggcacatatgaccgctgacgctgtagctattcctaaacttgctaagggggcaggtgttt

SEQ ID NO: 313608 - DNA, 75 bp, synthetic construct
  source 1..75: mol_type = other DNA
gtatggttttagtgatcgcttcggttggcagcttcttgctgcggaaaagagtaatggaacctcaacacaaaactc

SEQ ID NO: 313609 - DNA, 75 bp, synthetic construct
  source 1..75: mol_type = other DNA
gctggacggggcgatgctgaccttcggcggccataaaggctcggcgctggcggcgatggtggaactgttcgccgg

SEQ ID NO: 313610 - DNA, 75 bp, synthetic construct
  source 1..75: mol_type = other DNA
gcgcataataattgatgactgctgtgagcagacgccttcatcactgcgtgcaggcgcccgtcgttatacacgtct

SEQ ID NO: 313611 - DNA, 75 bp, synthetic construct
  source 1..75: mol_type = other DNA
accagtagacgtacaagggaaaagggtgcaaggcacggactacgagcaaaccgttaccgacctgtacaccgagta

SEQ ID NO: 313612 - DNA, 75 bp, synthetic construct
  source 1..75: mol_type = other DNA
tgttaacgttgttacagagaatagccagatggtggtaaaccacggtgtcgccttctctgttcaaatcactgttaa

SEQ ID NO: 313613 - DNA, 75 bp, synthetic construct
  source 1..75: mol_type = other DNA
actaacattgatgttgttaaactggtagatccgctacaccttgcacatatgaccgcagacgctgtagctgtgcct

SEQ ID NO: 313614 - DNA, 75 bp, synthetic construct
  source 1..75: mol_type = other DNA
gcgacttttggatgtgactattaatcctttagttgctttgtggtttgccaccgaagataatgaagataaagtata

SEQ ID NO: 313615 - DNA, 75 bp, synthetic construct
  source 1..75: mol_type = other DNA
agaagaaataaaaaggcacagcttgagcgtgataaacagcttagcgaacagcaaaaacaagcggcgttggcgaaa

SEQ ID NO: 313616 - DNA, 75 bp, synthetic construct
  source 1..75: mol_type = other DNA
gtttctcttctgaacataacgtgactaaacgtgaacagggtaaagaatttttagtagagatcccctacttcctgc

SEQ ID NO: 313617 - DNA, 75 bp, synthetic construct
  source 1..75: mol_type = other DNA
tgattttacatatgcaataaaagataattatcccgtaggtaataaaatggaacatgcagtatcttttatgtttag

SEQ ID NO: 313618 - DNA, 75 bp, synthetic construct
  source 1..75: mol_type = other DNA
agtaacgcactcgatcgctggcatctcggcctgatggctggctatgccaacagcaagagccacacacattccagc

SEQ ID NO: 313619 - DNA, 75 bp, synthetic construct
  source 1..75: mol_type = other DNA
tactggcctgctgccgcagatattcccgtggcgagcgataacccagtgcactatgcggatgccattcgttataat

SEQ ID NO: 313620 - DNA, 75 bp, synthetic construct
  source 1..75: mol_type = other DNA
gcgatgctggaacaattgagtgaagactacattcgtaccgcccgggccagcggcttgcccggctggtatatcgtt

SEQ ID NO: 313621 - DNA, 75 bp, synthetic construct
  source 1..75: mol_type = other DNA
attctggcgagtttctgtttgcgtccgggttatatttccacgctaatgagtgctgatggcgttattaccgctgcg

SEQ ID NO: 313622 - DNA, 75 bp, synthetic construct
  source 1..75: mol_type = other DNA
aatattcaggcggcaaataccctgtttaatacccgactgcatgaccgtctgggagaaacacaatacaccgacctg

SEQ ID NO: 313623 - DNA, 75 bp, synthetic construct
  source 1..75: mol_type = other DNA
tggaggaaatatcgatttagacggtttttcacaaaccttaaatgcgctggatttggcaggtacggcaacgctatc

SEQ ID NO: 313624 - DNA, 75 bp, synthetic construct
  source 1..75: mol_type = other DNA
accacattcgtaccgcccgggccagcggcttgcccggctggtatatcgttctatgttatgcgctacccaatgcat

SEQ ID NO: 313625 - DNA, 75 bp, synthetic construct
  source 1..75: mol_type = other DNA
gtgaccttctggagtattttacgccaacgctgctgggggctggtgctcgtggtggcgggcgtctgcgtgattacg

SEQ ID NO: 313626 - DNA, 75 bp, synthetic construct
  source 1..75: mol_type = other DNA
aaccagaggctataggtattagtggattaagaccttggcgagaccagtattctaatttttgtacgaaaactaaaa

SEQ ID NO: 313627 - DNA, 75 bp, synthetic construct
  source 1..75: mol_type = other DNA
aagagttgcgtatatttttcccggcgacgctggagctggctttttgtgccctgctgctggcactcttgattggca

SEQ ID NO: 313628 - DNA, 75 bp, synthetic construct
  source 1..75: mol_type = other DNA
ttgggctgggcgtccggtgctggaagagttgcgtatatttttcccggcgacggaaggcttgatgactggctggat

SEQ ID NO: 313629 - DNA, 75 bp, synthetic construct
  source 1..75: mol_type = other DNA
tgctggcgctactgattggcatcccactgggcatactctctgccgtctggcgtaatcgctggctggatcatctgg

SEQ ID NO: 313630 - DNA, 75 bp, synthetic construct
  source 1..75: mol_type = other DNA
tggggcactgctctatgcacgcatgaaaagtgggcaagctgtgctggcgatgactgcactggtggttattgctgc

SEQ ID NO: 313631 - DNA, 75 bp, synthetic construct
  source 1..75: mol_type = other DNA
tcacaccaactgcagcagcccgaagccgattccgccattcagcgggaagccgatcgggtagtcccggaaaacacc

SEQ ID NO: 313632 - DNA, 75 bp, synthetic construct
  source 1..75: mol_type = other DNA
aaaacgttcctcaaccctatgagccccatgaaattgaagatcatatttttaaagatggtgcccgtacctacccag

SEQ ID NO: 313633 - DNA, 75 bp, synthetic construct
  source 1..75: mol_type = other DNA
aacggatagggcagcatttacataacctgctgaatgcaagtttacaggcagatattgaacctcttaaatgtgcaa

SEQ ID NO: 313634 - DNA, 75 bp, synthetic construct
  source 1..75: mol_type = other DNA
tgattttacatatgcaataaaagatagttatcctttgagtaataaaatggaacatgcagtatcttttatgtttag

SEQ ID NO: 313635 - DNA, 75 bp, synthetic construct
  source 1..75: mol_type = other DNA
ttactacagtcgagacgagctgatagcaatgctggtggaccgtgatttgaataatcagttacgtcgagcctttgc

SEQ ID NO: 313636 - DNA, 75 bp, synthetic construct
  source 1..75: mol_type = other DNA
cgaccgaagttaagaggaacagtatcgcttgggggcatcacaggccaaaatgtgagcacgtttggagttacgatc

SEQ ID NO: 313637 - DNA, 75 bp, synthetic construct
  source 1..75: mol_type = other DNA
acgccgatggcagcatcagtattgaaaaagcagtcgccattaacgaagcatttcagatttcccgccagttctggg

SEQ ID NO: 313638 - DNA, 75 bp, synthetic construct
  source 1..75: mol_type = other DNA
ttaccgtctttactcagagcgcagttggcgcgtttattctgttgctgattggcggcaccctggggcagattgaca

SEQ ID NO: 313639 - DNA, 75 bp, synthetic construct
  source 1..75: mol_type = other DNA
tccagttggttcactgctcaggttgtactgctagctgtcggcattgtcggtgtggtggcctgggtacgactcaaa

SEQ ID NO: 313640 - DNA, 75 bp, synthetic construct
  source 1..75: mol_type = other DNA
ttggagaatacatctagatgcattaagaaaagctcgcaaggataaacactgtgggtgtacatatgatgtcagttt

SEQ ID NO: 313641 - DNA, 75 bp, synthetic construct
  source 1..75: mol_type = other DNA
agagttggcaggatttcagcatgtaggatttgttgagttaaacaagcatgcatgtgattctttgcgacttaattt

SEQ ID NO: 313642 - DNA, 75 bp, synthetic construct
  source 1..75: mol_type = other DNA
gttactctgaagatcacgcgcagatcaaagagtgggcaccgttagtgatggaagggcgcgatccgcaacagaaat

SEQ ID NO: 313643 - DNA, 75 bp, synthetic construct
  source 1..75: mol_type = other DNA
ggatgatgctcacatctgggattgccgcatcacaaaggtctggggagagaaggggcagatcattatcggggagtg

SEQ ID NO: 313644 - DNA, 75 bp, synthetic construct
  source 1..75: mol_type = other DNA
tatagatcatagagatataattccaaaagaataccttccaacatttaattctcatgttatagaggcgtatcttca

SEQ ID NO: 313645 - DNA, 75 bp, synthetic construct
  source 1..75: mol_type = other DNA
gtgccaatgatatatcacaaaaaggatgctctaatattaacatgcaaaatgaagaactaaacaaaacattatcaa

SEQ ID NO: 313646 - DNA, 75 bp, synthetic construct
  source 1..75: mol_type = other DNA
gggcgttttgatcaggaaggccagtaccaggattaccagcgcacgcagtatgaagtgtatgactaccccggacgt

SEQ ID NO: 313647 - DNA, 75 bp, synthetic construct
  source 1..75: mol_type = other DNA
agatcgctggcataaaagacctgcgacggcggcatattgggctttcaaagccgaagtgcgcctgcttggaatcaa

SEQ ID NO: 313648 - DNA, 75 bp, synthetic construct
  source 1..75: mol_type = other DNA
cgaggatagccatgtctgggacggacgggttaccaaaatctggggagaaaccgggcaaatcattattgaggaggc

SEQ ID NO: 313649 - DNA, 75 bp, synthetic construct
  source 1..75: mol_type = other DNA
gatcctgctcgccaccgcaggctgcaactacatcatggggatgccgctgggtgatgacatcatgctcaactacca

SEQ ID NO: 313650 - DNA, 75 bp, synthetic construct
  source 1..75: mol_type = other DNA
aaggaagcgcagcgtcagcgcaccgaagagaaagctggtcgccaacggcgtgctgcgcgccgtaatgaacttaag

SEQ ID NO: 313651 - DNA, 75 bp, synthetic construct
  source 1..75: mol_type = other DNA
gctgatgtaaacacaaatactcgtgggatctatgtggtaagtaatactggaggtgtttggtatattccgggtgga

SEQ ID NO: 313652 - DNA, 75 bp, synthetic construct
  source 1..75: mol_type = other DNA
atcgccctgttcaacgttggcggcgagttttatgccattaacgatcgttgcagtcatggtaatgcgtcgatgtca

SEQ ID NO: 313653 - DNA, 75 bp, synthetic construct
  source 1..75: mol_type = other DNA
atgaatcgaatttatgcgtgtcccgttgcggatgtgccggagggtgaggctctccggatcgatacctcgcccgtc

SEQ ID NO: 313654 - DNA, 75 bp, synthetic construct
  source 1..75: mol_type = other DNA
actggcagataaatactgtcccggactgaatgcagccagttatgaagtttataataagtttatgattaaccggag

SEQ ID NO: 313655 - DNA, 75 bp, synthetic construct
  source 1..75: mol_type = other DNA
gatttttaaataatgatgaatataaatggcagtcgaaaaagatcactgatatttcaaaaacgtttatcggtttag

SEQ ID NO: 313656 - DNA, 75 bp, synthetic construct
  source 1..75: mol_type = other DNA
atgttaattttatatttattttgcagccaaacaggataaacatcagtcaggacaaagacgtaaaatttaagatga

SEQ ID NO: 313657 - DNA, 75 bp, synthetic construct
  source 1..75: mol_type = other DNA
tggatgcgatttatcccattgtttatcttgactgtattgttctgaaagtacggcaggacagccgggttatcaaca

SEQ ID NO: 313658 - DNA, 75 bp, synthetic construct
  source 1..75: mol_type = other DNA
gccacaaaaatactctgcctttgagttggcttttgaatttggtcaccgggttattgctgaattaatccttaatac

SEQ ID NO: 313659 - DNA, 75 bp, synthetic construct
  source 1..75: mol_type = other DNA
gaggcggttcatcgtcagctatggccattccgaagctggcccgcactctacgcttctcaggcgatgataccggta

SEQ ID NO: 313660 - DNA, 75 bp, synthetic construct
  source 1..75: mol_type = other DNA
ttttgctgcgggctggcagaatctggcctggtgtctggcgttacccgctgcgggggcattgctctggcgtgatgc

SEQ ID NO: 313661 - DNA, 75 bp, synthetic construct
  source 1..75: mol_type = other DNA
cgttagtgtatggttttattttgatagttttgctatcggtatctttaatcctttattcaattggacgtaccataa

SEQ ID NO: 313662 - DNA, 75 bp, synthetic construct
  source 1..75: mol_type = other DNA
atccgtcttcacattgtttgcgatgtccctgatgaacttattgatttcacgtttgaatggaaagggcagccatgg

SEQ ID NO: 313663 - DNA, 75 bp, synthetic construct
  source 1..75: mol_type = other DNA
ttgatcagtatctttttgaaggggaaacggtatgcattggccgaaaagggactattgataagccattttactaca

SEQ ID NO: 313664 - DNA, 75 bp, synthetic construct
  source 1..75: mol_type = other DNA
tttatctgagcaaaacaaaatttccagctttctctccacccttgacgataaaatcgccgctaaaaaagcagaact

SEQ ID NO: 313665 - DNA, 75 bp, synthetic construct
  source 1..75: mol_type = other DNA
gtgatgttgagcaaaccggagtatgactgggaatgtcgcggattctgggtcaatgaaggtccggctgtcgtgatg

SEQ ID NO: 313666 - DNA, 75 bp, synthetic construct
  source 1..75: mol_type = other DNA
tacgcgcttaaaattgattcgctgggatgaaagtgggatgcctgactttggcatccctcctgcggagacttactg

SEQ ID NO: 313667 - DNA, 75 bp, synthetic construct
  source 1..75: mol_type = other DNA
gccagccatcccggtcatgctgtggaactggggcttggccaacctgaccggccggttacgtactgcgcccgagga

SEQ ID NO: 313668 - DNA, 75 bp, synthetic construct
  source 1..75: mol_type = other DNA
aaacggcgttcgcctggcatgctggccattatcggactacggcagccgctgggcatctgcgcttcactcgcttca

SEQ ID NO: 313669 - DNA, 75 bp, synthetic construct
  source 1..75: mol_type = other DNA
actatcagcacctgagttcagcgggtgagtgggatatttctggtacctatgccgccaatgattacagttccgtca

SEQ ID NO: 313670 - DNA, 75 bp, synthetic construct
  source 1..75: mol_type = other DNA
catcgccgcagttcaaccaatgagcctcggctgatggtcagcaccgacggcgtggcaaatattccggttcagggt

SEQ ID NO: 313671 - DNA, 75 bp, synthetic construct
  source 1..75: mol_type = other DNA
attcggggcgagttatttatcagaaaaaagtcccgccaggcccgtttatcattgatgacatcaatcagtctgtcc

SEQ ID NO: 313672 - DNA, 75 bp, synthetic construct
  source 1..75: mol_type = other DNA
atgcaacctacgtactggattataaataagcgttattgggcggcatcactgccgcctttcttaaaatatttatct

SEQ ID NO: 313673 - DNA, 75 bp, synthetic construct
  source 1..75: mol_type = other DNA
gcaaacaagtggatgccaccaacagcacgatttcgctcgccgcttatcgcttctcagatcgtcattttcacagct

SEQ ID NO: 313674 - DNA, 75 bp, synthetic construct
  source 1..75: mol_type = other DNA
gacgatcagtcaatcaggccgcgtcatttaccagaaaaaagtcccgccaggcccgtttattattgatgacctcaa

SEQ ID NO: 313675 - DNA, 75 bp, synthetic construct
  source 1..75: mol_type = other DNA
tacccgcgccagaacggactggccgtggccctgcgcgagctgggccggatcgagcgcacgctgttcatcctggac

SEQ ID NO: 313676 - DNA, 75 bp, synthetic construct
  source 1..75: mol_type = other DNA
tatatcccttatctatgtgcctttgcttttttatcccttctttttttggcagtaataataaaatatgatgtttcc

SEQ ID NO: 313677 - DNA, 75 bp, synthetic construct
  source 1..75: mol_type = other DNA
tgggaaggctgggtcatatccctccggcagaagcagaaaaagcttattatacttccatcagaaacgatgatctgg

SEQ ID NO: 313678 - DNA, 75 bp, synthetic construct
  source 1..75: mol_type = other DNA
tacagcaaacaagtgaatgccactaacagcacgatttccctcgccgcttatcgtttctccgatcgtcattttcac

SEQ ID NO: 313679 - DNA, 75 bp, synthetic construct
  source 1..75: mol_type = other DNA
ccgtccacaaggcagtagcagcaacaccaacctgaacgcttatggtactgccggtattaacatgggggcatggcg

SEQ ID NO: 313680 - DNA, 75 bp, synthetic construct
  source 1..75: mol_type = other DNA
cattacgacagtcagcaccggctggtgcactacacgcggacacaatatgcagagccgctggtcgaaagtcgctat

SEQ ID NO: 313681 - DNA, 75 bp, synthetic construct
  source 1..75: mol_type = other DNA
agaaatgctcttcaattttgatcaggccagtcagcaactgaatatcaccatcccacaggcctggctggcgtggca

SEQ ID NO: 313682 - DNA, 75 bp, synthetic construct
  source 1..75: mol_type = other DNA
cagcacgctcgccaatatgtggggccatatgagtgaaacgtttaaggccagtaacggcattgtgtttaaacgccc

SEQ ID NO: 313683 - DNA, 75 bp, synthetic construct
  source 1..75: mol_type = other DNA
atgaggggataggggtaaaaacaccgctgtacattactgctaccggtatgagtactcccttgacgcaagatgtca

SEQ ID NO: 313684 - DNA, 75 bp, synthetic construct
  source 1..75: mol_type = other DNA
ccagcgttagctgcatcctgttatcaatgtgtgctgcttttcctgtgcaggccgataactctggcatatggcaaa

SEQ ID NO: 313685 - DNA, 75 bp, synthetic construct
  source 1..75: mol_type = other DNA
caagccgattatcaggtggcgaatactcaacgacaggaatcgcaactagcgatgctaagccgtcttgaactgtca

SEQ ID NO: 313686 - DNA, 75 bp, synthetic construct
  source 1..75: mol_type = other DNA
ataatccgacttccactactcagtggatgaatatgattacaggagcattagagtacggcgccccgtcatctctcc

SEQ ID NO: 313687 - DNA, 75 bp, synthetic construct
  source 1..75: mol_type = other DNA
ttagggttaagtcccgcagatgtagcgctaataagaagaaaagatcaactaaaccatcaaagagcatgggatata

SEQ ID NO: 313688 - DNA, 75 bp, synthetic construct
  source 1..75: mol_type = other DNA
tccaatattttcgacggcttttcttataccggcgcggcactggcaagtgacgatcggatgttaccgtgggagcta

SEQ ID NO: 313689 - DNA, 75 bp, synthetic construct
  source 1..75: mol_type = other DNA
ttcgtcagtcgttaccacggttaaaccagtgcgtcgattttagctcccggcctgaaattctcttcatttttgatc

SEQ ID NO: 313690 - DNA, 75 bp, synthetic construct
  source 1..75: mol_type = other DNA
ggtgtccccggacgggctggagagccgccgggcatatgatgaaccgggcaggctggtatcggagacatcgcgctg

SEQ ID NO: 313691 - DNA, 75 bp, synthetic construct
  source 1..75: mol_type = other DNA
atgaagagaacccgtattacctgcaccagccataccgtctgccggggcagcagcatgatgaggaatcagggctgt

SEQ ID NO: 313692 - DNA, 75 bp, synthetic construct
  source 1..75: mol_type = other DNA
tgacaccacacgtatccagacggtctaccagccggggagcttcacgccgctcatccgtatcgagacagagaacgg

SEQ ID NO: 313693 - DNA, 75 bp, synthetic construct
  source 1..75: mol_type = other DNA
tcgcggtatgccggggcatcagacatatactgacgccagttgcatggattatttgtactgcactggttgcataca

SEQ ID NO: 313694 - DNA, 75 bp, synthetic construct
  source 1..75: mol_type = other DNA
gggttgccagaaagatattgcagagaagatacaaaaacagggaggtgattatttattcgcggtaaaaggaaacca

SEQ ID NO: 313695 - DNA, 75 bp, synthetic construct
  source 1..75: mol_type = other DNA
ggtgaaacacatctcgattttttgaagcaatatggtgattttgaaaatggtattcctgttcacgatactattgcc

SEQ ID NO: 313696 - DNA, 75 bp, synthetic construct
  source 1..75: mol_type = other DNA
aaactggcacgcgatggttttatcgttaacgacgcgctggctgacgatctcaaaacctacggcagtgaagtgctg

SEQ ID NO: 313697 - DNA, 75 bp, synthetic construct
  source 1..75: mol_type = other DNA
atggtggcgtctgtcgatgccactgccacccaagtgggggtagatattctaaaggagggcgggaatgccgttgat

SEQ ID NO: 313698 - DNA, 75 bp, synthetic construct
  source 1..75: mol_type = other DNA
gcacttgatgccagatactcgagggaattagccgatgcgagagctgaaaatgaaactctgcgtgctgatgttgcc

SEQ ID NO: 313699 - DNA, 75 bp, synthetic construct
  source 1..75: mol_type = other DNA
cagatggacgtttttgtcagcgacatgcagaacaagctgaatgatggagaatcgctcgaaacctcctcgctctcc

SEQ ID NO: 313700 - DNA, 75 bp, synthetic construct
  source 1..75: mol_type = other DNA
tacgcagtgacgcctatcttggtaagctgaaaatcaccgtcagcgtaccgcagtcactggatttcaccaccgtac

SEQ ID NO: 313701 - DNA, 75 bp, synthetic construct
  source 1..75: mol_type = other DNA
tggtttatcagtatgacctgaagcagttcatgtcagacggctattcgaagaaagtcatgctgctggaagccaacc

SEQ ID NO: 313702 - DNA, 75 bp, synthetic construct
  source 1..75: mol_type = other DNA
gtgtacttcaaagtgacctccaactccgtgatgaactccttcttcattccgcgtctgggtagccagatttatgcc

SEQ ID NO: 313703 - DNA, 75 bp, synthetic construct
  source 1..75: mol_type = other DNA
ggaacatacatgggagcgtacgattgagaacatactcgacctgagaccggataaccgtctgttcgaattcaccgc

SEQ ID NO: 313704 - DNA, 75 bp, synthetic construct
  source 1..75: mol_type = other DNA
caccaccgcaccgaccatcggtaaaaaatggtacgtgtacgataacgcgatactgaaccagcttgagcatcgcct

SEQ ID NO: 313705 - DNA, 75 bp, synthetic construct
  source 1..75: mol_type = other DNA
tcgctgcatgagtggaaccgccgccgtccggcctatcgagacctggaagctgtgtggaacggcaaaaccacccag

SEQ ID NO: 313706 - DNA, 75 bp, synthetic construct
  source 1..75: mol_type = other DNA
tgcataaatatacactaggcttactggctaaagaggatgttataagccttaagggctttgttggacatgctttat

SEQ ID NO: 313707 - DNA, 75 bp, synthetic construct
  source 1..75: mol_type = other DNA
ttttttggcgtccgggaaaaaagagaagtacaacgttgatattaagtgtaggggcgccaagctcaccatttatta

SEQ ID NO: 313708 - DNA, 75 bp, synthetic construct
  source 1..75: mol_type = other DNA
atttggagggtgattttttattaaggttacaaaaaaaatatggttgtgagttaataactaagttcctgatggaag

SEQ ID NO: 313709 - DNA, 75 bp, synthetic construct
  source 1..75: mol_type = other DNA
aaaacagtttctgggctcgtcgtacattcttgaccgtcttggcctgaaaccggaaaaagattaccgctttctggg

SEQ ID NO: 313710 - DNA, 75 bp, synthetic construct
  source 1..75: mol_type = other DNA
gatcattttctcaacggtatacgggttgcggtgaagcagaaagtggttgcagctgacgatgtcaaagtctttttc

SEQ ID NO: 313711 - DNA, 75 bp, synthetic construct
  source 1..75: mol_type = other DNA
gcgcaaaacggaacggtggtcgccgagggtgattatggattccgcctcacgaccgcaccaggtgatggtttgtac

SEQ ID NO: 313712 - DNA, 75 bp, synthetic construct
  source 1..75: mol_type = other DNA
agcccttagcactgtgaaagccaaaggggtttgttactcagttgatgagcttaagctggtaatcaaatgggctgt

SEQ ID NO: 313713 - DNA, 75 bp, synthetic construct
  source 1..75: mol_type = other DNA
gataggcaaatcatcgctgttcacgacaaaaggcgatcagccatggttaacactggactggatacttaacccgaa

SEQ ID NO: 313714 - DNA, 75 bp, synthetic construct
  source 1..75: mol_type = other DNA
cattgatgttgtgactttttttaatttggcgtttaacgaaacgcagcaagatgtcgttatgcgtaacccgaatct

SEQ ID NO: 313715 - DNA, 75 bp, synthetic construct
  source 1..75: mol_type = other DNA
ggaatgaaattggtgtaatcccaccaatggatatggagcatccaaccagcgcctatcgctccccatataagacag

SEQ ID NO: 313716 - DNA, 75 bp, synthetic construct
  source 1..75: mol_type = other DNA
ttcactttgataacgatgttatgcgggtacagcagattcgtaacatgggagtgctggagggggatgaaccggtaa

SEQ ID NO: 313717 - DNA, 75 bp, synthetic construct
  source 1..75: mol_type = other DNA
cagcagatcctcgacaaaatggcctacctgacgatatggcagggcgatgacgtacagcgccgggtgaaaggggtg

SEQ ID NO: 313718 - DNA, 75 bp, synthetic construct
  source 1..75: mol_type = other DNA
ttcgtcgtcgtaaccgtcaggctgctggaacccaggcggcaaccatgggcgcaactggcgcagatctttccactg

SEQ ID NO: 313719 - DNA, 75 bp, synthetic construct
  source 1..75: mol_type = other DNA
ggcccatgggccggggccgtcctctacagccaggacgccagactcgccggcaagggaatggatatccactttgac

SEQ ID NO: 313720 - DNA, 75 bp, synthetic construct
  source 1..75: mol_type = other DNA
acatatcccgagatttgtatgaggctagtgaggtcgatggcgcaactaagtggcaacagtttaaggaaattacat

SEQ ID NO: 313721 - DNA, 75 bp, synthetic construct
  source 1..75: mol_type = other DNA
cagagcaaaaagcgcgtgtaaacggtattaatgatctgtttgccatgtttggcgggcgttatcagtcgttgcagg

SEQ ID NO: 313722 - DNA, 75 bp, synthetic construct
  source 1..75: mol_type = other DNA
aaagttattgaaatgaaagctctttgcccggactgccatcaaccgttgcaggtgttaaaagcctgcggtgcggta

SEQ ID NO: 313723 - DNA, 75 bp, synthetic construct
  source 1..75: mol_type = other DNA
gcttataagattggtggtggagagtggaacccatttactcaaactgatcctgcacctatcggagcagcagccgga

SEQ ID NO: 313724 - DNA, 75 bp, synthetic construct
  source 1..75: mol_type = other DNA
tgttgacgaagagatgttaaataatgccattgatttactgatttatttacccgctgaataccgctatcgaatgcg

SEQ ID NO: 313725 - DNA, 75 bp, synthetic construct
  source 1..75: mol_type = other DNA
cggccgcgccgggaataacttcgataccagcgagccgctcaccttttccggggatatgtacgtgctggtgaccga

SEQ ID NO: 313726 - DNA, 75 bp, synthetic construct
  source 1..75: mol_type = other DNA
tacacccttagggcctcgcgctcgttcgctgatgcagtggcgcatacctggctgattatgggcgagcagccggta

SEQ ID NO: 313727 - DNA, 75 bp, synthetic construct
  source 1..75: mol_type = other DNA
gagcaacaactgaataatatgatggctgccgtttcggttgcgctgcagcctctggtcagggttgtaccaatgacg

SEQ ID NO: 313728 - DNA, 75 bp, synthetic construct
  source 1..75: mol_type = other DNA
tgcgctgcagcctctggtcagggttgtaccaatgacggcagttgaatgggctgatcaaaattattatctgcctaa

SEQ ID NO: 313729 - DNA, 75 bp, synthetic construct
  source 1..75: mol_type = other DNA
aaacgcccgcgccggtggggagcctcggccccggctggaaaaatgcctgcggatatccgcttacagctgcgcgat

SEQ ID NO: 313730 - DNA, 75 bp, synthetic construct
  source 1..75: mol_type = other DNA
atgaagaatgatcttcacctcgtctgcccgcactgccagtccatcaaccgcgtaccgactgcgaagctatcggaa

SEQ ID NO: 313731 - DNA, 75 bp, synthetic construct
  source 1..75: mol_type = other DNA
gtattcaatacggaacgacgggagaggtgaaactttctgatctgataggaaccggcctgattggtgggattactg

SEQ ID NO: 313732 - DNA, 75 bp, synthetic construct
  source 1..75: mol_type = other DNA
gggcttattaatgccggtggcgctctcggactgaaagcgatgggcgatatcaacaatatcagtgccacgattacc

SEQ ID NO: 313733 - DNA, 75 bp, synthetic construct
  source 1..75: mol_type = other DNA
acaaggagaaggagcagaggcgtctgcagacagtggggcttatcagtgacattggcagtcaggtggcggatatcg

SEQ ID NO: 313734 - DNA, 75 bp, synthetic construct
  source 1..75: mol_type = other DNA
tccccgtcgaatgagcgtgatggaagaactcaatcaggtatgcgctgacatgaaacgggataaaaaacatcgcca

SEQ ID NO: 313735 - DNA, 75 bp, synthetic construct
  source 1..75: mol_type = other DNA
ttaaccagggcgtgtcttttggggaagatccctttgccaccggaaatctgccattacagcgcgtctggataggga

SEQ ID NO: 313736 - DNA, 75 bp, synthetic construct
  source 1..75: mol_type = other DNA
tatcaaggagaaataagtggagatgatccattcatttctgccatattaagtaaggctggtgccggtgctggttat

SEQ ID NO: 313737 - DNA, 75 bp, synthetic construct
  source 1..75: mol_type = other DNA
ttaaatttaaaatttggtctgatacgtttctaggtgttgctctctggacattcatttgggcaatttgcgcgacga

SEQ ID NO: 313738 - DNA, 75 bp, synthetic construct
  source 1..75: mol_type = other DNA
ccagcaatatcatatagcttctgtaatctccatcataatatttatcttcttatcggttatagcaatatggcaatt

SEQ ID NO: 313739 - DNA, 75 bp, synthetic construct
  source 1..75: mol_type = other DNA
attggctggctaatctagccagctcaacccaactttgcaagaaaaatatgcgaaaaaaatcagccttggcgctgt

SEQ ID NO: 313740 - DNA, 75 bp, synthetic construct
  source 1..75: mol_type = other DNA
caggcgctgccggaagaactccgcttaagtccgcatcgttatctggcgacaaacagtccgcaggggccgtggtgg

SEQ ID NO: 313741 - DNA, 75 bp, synthetic construct
  source 1..75: mol_type = other DNA
gtaagttttacattattagccaagcgctatcattttatgaaagtcttccaattcttgtgcattggtttggcattg

SEQ ID NO: 313742 - DNA, 75 bp, synthetic construct
  source 1..75: mol_type = other DNA
agaattaagagcttgtactggttctggatctaatactaaagccaaattagagaaaagaatcgctcttgggaagaa

SEQ ID NO: 313743 - DNA, 75 bp, synthetic construct
  source 1..75: mol_type = other DNA
ggcagacagtgccggagcatcacgccccgctctggcagcaggtcagtcaggtggaacatcgaccactgagtacct

SEQ ID NO: 313744 - DNA, 75 bp, synthetic construct
  source 1..75: mol_type = other DNA
ggatggcgaaccagatcacgtccatctgttaattaactatccccccaaactggcgatatccagtctggtaaacaa

SEQ ID NO: 313745 - DNA, 75 bp, synthetic construct
  source 1..75: mol_type = other DNA
aatctttgcctgccagggcatcgaactgagccgtgcattactctccaactgggttgacgcatgctgtcagttaat

SEQ ID NO: 313746 - DNA, 75 bp, synthetic construct
  source 1..75: mol_type = other DNA
atggaaaatctatatattaacggcagaaagattgatagcttcggtgactggtcgcaacagattgaacatccagct

SEQ ID NO: 313747 - DNA, 75 bp, synthetic construct
  source 1..75: mol_type = other DNA
caaataaggcatcttatctctcttatggatctggtgtttctgcaggtagtactttagttatgaatttaaataagg

SEQ ID NO: 313748 - DNA, 75 bp, synthetic construct
  source 1..75: mol_type = other DNA
aaaaccaatacatttaatgggtattttatcattgatacaaaagcaccaacaaacttgacagtagaagtggaagat

SEQ ID NO: 313749 - DNA, 75 bp, synthetic construct
  source 1..75: mol_type = other DNA
aaggaaagtctggtattggtgtcttaggtattactaatagtacaatattaacccacacatcaaatatatttgact

SEQ ID NO: 313750 - DNA, 75 bp, synthetic construct
  source 1..75: mol_type = other DNA
ttgacggtcgagaagttgggcctgtaagggcaattggtgaagattataaagttttagaattaaaaggagttgtat

SEQ ID NO: 313751 - DNA, 75 bp, synthetic construct
  source 1..75: mol_type = other DNA
ctcattaattgaagatgctttcgatttagctaaagctttcttaagttcattaacatatggaatgacaaaaagttc

SEQ ID NO: 313752 - DNA, 75 bp, synthetic construct
  source 1..75: mol_type = other DNA
aatgcagatggattgtgagattagacagaagcattaattctgacatcaacataattgtaaggatgaatagcctta

SEQ ID NO: 313753 - DNA, 75 bp, synthetic construct
  source 1..75: mol_type = other DNA
taagacaatatgcaaggaaattacaaatagtgaagtaacaatatctgaaaataaactcattacgatcaataaaag

SEQ ID NO: 313754 - DNA, 75 bp, synthetic construct
  source 1..75: mol_type = other DNA
agaagcaaccgcacctgtagaatttgagggtgttacgcaagcaggctctcatgttcagttatccgttggcgatga

SEQ ID NO: 313755 - DNA, 75 bp, synthetic construct
  source 1..75: mol_type = other DNA
aaatgcctgatatctgcaaaactgaagcactacttgagcttgagcgtgaatattacccactgctgaaagcacaaa

SEQ ID NO: 313756 - DNA, 75 bp, synthetic construct
  source 1..75: mol_type = other DNA
tttataataaaaaatttgaagaaagcactacattacagacaatattgagtgaaaaacataccttaaaaaaaatga

SEQ ID NO: 313757 - DNA, 75 bp, synthetic construct
  source 1..75: mol_type = other DNA
tcgttactggaagaaagtgcccatcaccagttatgccactcagggaactaaaatccagatccgcttacaggatat

SEQ ID NO: 313758 - DNA, 75 bp, synthetic construct
  source 1..75: mol_type = other DNA
gacaaacggaggacggaagatcggcactcattgagttcggaaaaattaacttgaccgacacctattttgcgccag

SEQ ID NO: 313759 - DNA, 75 bp, synthetic construct
  source 1..75: mol_type = other DNA
tacgtgagagtggttggctggagggggccagactcgtcgtttaaggctcactggaagcaattagcagattcaaaa

SEQ ID NO: 313760 - DNA, 75 bp, synthetic construct
  source 1..75: mol_type = other DNA
atgaacagacgatggcttactttatgtatatcagttctggggctattcgttgccggaatatcacagggaatatca

SEQ ID NO: 313761 - DNA, 75 bp, synthetic construct
  source 1..75: mol_type = other DNA
gatggatgatgatactagtttaccacagtccttctttaatgaggtaataagtgctatcaataataatccagatat

SEQ ID NO: 313762 - DNA, 75 bp, synthetic construct
  source 1..75: mol_type = other DNA
aatttcagtatttattcagcagacaaagatagagactcatcatatcgagacacgatgaatatcgtgtcagctata

SEQ ID NO: 313763 - DNA, 75 bp, synthetic construct
  source 1..75: mol_type = other DNA
ttaatttccgggcctggatccaggcgcaaagcggtcgtgatgtaaccatcggtgatttcaccgccagcctgacag

SEQ ID NO: 313764 - DNA, 75 bp, synthetic construct
  source 1..75: mol_type = other DNA
tgccggttgtgtttaagctgaaagactgcaaagggccggcgggatacaacgtcaaagtcaccctcaccggaacgg

SEQ ID NO: 313765 - DNA, 75 bp, synthetic construct
  source 1..75: mol_type = other DNA
ccccgatacggcgatgacgctggttggtcaaccgggcatcgcgaagttaacccccggaggaaatgcagcggggtg

SEQ ID NO: 313766 - DNA, 75 bp, synthetic construct
  source 1..75: mol_type = other DNA
tagctggcagcaatgagcttatgacacaagatccagtattggcgcaggttgtagaggccacaactagtattgaag

SEQ ID NO: 313767 - DNA, 75 bp, synthetic construct
  source 1..75: mol_type = other DNA
tcggctgaaattccagtacgaccctgcacaacctcaattaggtccattgagtccctttgttatcgatttggatcc

SEQ ID NO: 313768 - DNA, 75 bp, synthetic construct
  source 1..75: mol_type = other DNA
atggatagtaaaactaaaggtgcatggataatacatcatactggaaaacttcagaaagtaacctcccaagttagc

SEQ ID NO: 313769 - DNA, 75 bp, synthetic construct
  source 1..75: mol_type = other DNA
ggtattgatagtgttgataacttcgctgtcgttctatcgcctgactcaataaatgcaccttgggtagtcaatgaa

SEQ ID NO: 313770 - DNA, 75 bp, synthetic construct
  source 1..75: mol_type = other DNA
aacgaagatactcaggcactgaaagtattgtgtatggaatttgaggtgtttttgaaagacagaatatctgaggca

SEQ ID NO: 313771 - DNA, 75 bp, synthetic construct
  source 1..75: mol_type = other DNA
tgcgctggatgacgggctattactataaggtcattaaccagaacaatcgccgcgtcacaatcggcctgaacaaca

SEQ ID NO: 313772 - DNA, 75 bp, synthetic construct
  source 1..75: mol_type = other DNA
tatgttttaatttaattaattttgtcataaacatgattgtagggattatactaactccttatttaataaagcata

SEQ ID NO: 313773 - DNA, 75 bp, synthetic construct
  source 1..75: mol_type = other DNA
ttcgtcaatgagatcacactggagcctgagctgtttaccggtggattggccgaagccatgcagtcggtaattgag

SEQ ID NO: 313774 - DNA, 75 bp, synthetic construct
  source 1..75: mol_type = other DNA
gaattatgcctatcttctaagttatattctatatggtgtagtaattataacgaatgtccgaagatttctaaaata

SEQ ID NO: 313775 - DNA, 75 bp, synthetic construct
  source 1..75: mol_type = other DNA
cacgcagccagctggcgaaactgcccgccaccgacaatacctcactgaatacacagcggcgcgtggcgctggtac

SEQ ID NO: 313776 - DNA, 75 bp, synthetic construct
  source 1..75: mol_type = other DNA
gcagcgacgtgatgacaccgccgcccgcgcggcgtatcagaatgtcctgacgcgggagccagctaacgttgatgc

SEQ ID NO: 313777 - DNA, 75 bp, synthetic construct
  source 1..75: mol_type = other DNA
ctgttccagcaggcgcgcaatgtcgataacgccgacagctatgcggtactggggctgggtgatgtgacgatggca

SEQ ID NO: 313778 - DNA, 75 bp, synthetic construct
  source 1..75: mol_type = other DNA
ctccgggcaacaccgggaaaaaatggggcggcgtgcgtgccgacggcgtggggctaagcctgagctacgataaag

SEQ ID NO: 313779 - DNA, 75 bp, synthetic construct
  source 1..75: mol_type = other DNA
ctccggcacaagcgtggcggttggctggcgcaacgacacctggagctgggatattggcaccacaccgatgggatt

SEQ ID NO: 313780 - DNA, 75 bp, synthetic construct
  source 1..75: mol_type = other DNA
gcttagcggtgaccagttaaccggtaaaaatgtcgaagataactggcgcgtgcgctggatgacgggctattacta

SEQ ID NO: 313781 - DNA, 75 bp, synthetic construct
  source 1..75: mol_type = other DNA
tcatctctcttatttcgtctgttttttctgttccgctttacgcaaaaaatagaatagatttaatgcaatctgcaa

SEQ ID NO: 313782 - DNA, 75 bp, synthetic construct
  source 1..75: mol_type = other DNA
gcttttataaataaaaatcattttagtggatttgatacttcatataaacttttagaagatcttcctctatggcta

SEQ ID NO: 313783 - DNA, 75 bp, synthetic construct
  source 1..75: mol_type = other DNA
ggcacaacctgtgcaggcaccgcgaaaatggattatcagggaaatgcctggaaactggtaccggcgggcacctgc

SEQ ID NO: 313784 - DNA, 75 bp, synthetic construct
  source 1..75: mol_type = other DNA
ccttatacctatacggtgactgccagcgatgcggctggaaacaaaaccactataaatggtaattttactattgat

SEQ ID NO: 313785 - DNA, 75 bp, synthetic construct
  source 1..75: mol_type = other DNA
acggcgactttccagcaggaagttgcggagtctattcttgcggggattaaagcgtattttgccgatggggcgacg

SEQ ID NO: 313786 - DNA, 75 bp, synthetic construct
  source 1..75: mol_type = other DNA
gctgggtgggccgtcagctgtccgcgcgtatgatgtgggagatggttcggtggacagtggtgtggtggcaaccgg

SEQ ID NO: 313787 - DNA, 75 bp, synthetic construct
  source 1..75: mol_type = other DNA
gcagtgacgttgccggcccttagcacacctgagctgacgttgcctgcagcggccgacggtcaggccggagcgccg

SEQ ID NO: 313788 - DNA, 75 bp, synthetic construct
  source 1..75: mol_type = other DNA
ttgctggtgccgatgagtggcaggaaattgaagattttggacatgaaagactggaatggctaaagaaatatggtg

SEQ ID NO: 313789 - DNA, 75 bp, synthetic construct
  source 1..75: mol_type = other DNA
agtgcattctcgaacgaaaatggtgttgtactggggcaggtgaaaacggaagccaaaagtaatgaggttacagcc

SEQ ID NO: 313790 - DNA, 75 bp, synthetic construct
  source 1..75: mol_type = other DNA
ggtagcgggttaaattccggctggcatctgaacttgataggtatgctcgacagtatggggcttccgccttctgcc

SEQ ID NO: 313791 - DNA, 75 bp, synthetic construct
  source 1..75: mol_type = other DNA
gtcgaaaccggagcatggaaagacgctgttgactgggtgctcaaagaggcttgccaggctgtaaacattggtacc

SEQ ID NO: 313792 - DNA, 75 bp, synthetic construct
  source 1..75: mol_type = other DNA
gtacgggtaatatatgtagatctccaattggagaaagatatttacaaagtttacttccacataaaaaaatatcct

SEQ ID NO: 313793 - DNA, 75 bp, synthetic construct
  source 1..75: mol_type = other DNA
tattgcaccagaagcacgtggaaaaacaatgcttctaggtcattggataggtatgaaggagataccagatccata

SEQ ID NO: 313794 - DNA, 75 bp, synthetic construct
  source 1..75: mol_type = other DNA
catggaaaagttaatggaaattaattcacggatagaagattttgataaccatggcgataatgtgataaataatca

SEQ ID NO: 313795 - DNA, 75 bp, synthetic construct
  source 1..75: mol_type = other DNA
tcaaagatatactctgtaaatcaagacccgaatgtgggtaagctggttggtgcatatctgtttatgcagtcattt

SEQ ID NO: 313796 - DNA, 75 bp, synthetic construct
  source 1..75: mol_type = other DNA
tgataaatacgttgctgatgatatagataaatatttaaaacttagtaattgcaatttacttaaggaaggtgcgaa

SEQ ID NO: 313797 - DNA, 75 bp, synthetic construct
  source 1..75: mol_type = other DNA
gatgattgtgctattgatccttcaaccaattggttaagtggtaattttgctgcgaatacccagattagaattcct

SEQ ID NO: 313798 - DNA, 75 bp, synthetic construct
  source 1..75: mol_type = other DNA
tctggtatttcaaacagcaaaacatttcacttccactttaattttaatgatttgcgagctctttacagcagttat

SEQ ID NO: 313799 - DNA, 75 bp, synthetic construct
  source 1..75: mol_type = other DNA
cttaaggatgaaacagagagattggagaaagagtatgaacaagaaaatacacttaatgatgtagttcaaaatatc

SEQ ID NO: 313800 - DNA, 75 bp, synthetic construct
  source 1..75: mol_type = other DNA
tttccggcgcaatgacagtctgtgccgtctgttgaagacccggtcttcattcaggccttaccccattttcgcttt

SEQ ID NO: 313801 - DNA, 75 bp, synthetic construct
  source 1..75: mol_type = other DNA
ccctggctttgaccgtcgtcaggtaaacgcactgctgatgtgcgatgagtctccctgcgtaatcgcccccgccag

SEQ ID NO: 313802 - DNA, 75 bp, synthetic construct
  source 1..75: mol_type = other DNA
aatactagaaaaggctggaaattccttagaaaaaatgctgatgcgtctcatgatgttttcagttttttaaataac

SEQ ID NO: 313803 - DNA, 75 bp, synthetic construct
  source 1..75: mol_type = other DNA
caggtgtcgagtaaaactaaataatgaaatacctatttacggcgtgtttaaagagtgttttctgtatcgatgtga

SEQ ID NO: 313804 - DNA, 75 bp, synthetic construct
  source 1..75: mol_type = other DNA
ggcggtcgttatataaatgataaatacgttgctgatgatatagataaatatttaaaacttagtaattgcaattta

SEQ ID NO: 313805 - DNA, 75 bp, synthetic construct
  source 1..75: mol_type = other DNA
tgctgttcagaatgggtcaggagcaggataaacttctgcacaaacggctctataatgcgcttcgctatgctattc

SEQ ID NO: 313806 - DNA, 75 bp, synthetic construct
  source 1..75: mol_type = other DNA
aataaaaatcaaaaagatgataatattgatagttttaataacatgcaaaagatttttttagcattgaatgaattt

SEQ ID NO: 313807 - DNA, 75 bp, synthetic construct
  source 1..75: mol_type = other DNA
ttacggcaggatgctgggaaccatttggcttgatggttatgacataaacgcctcaatggtagacagcggctatgc

SEQ ID NO: 313808 - DNA, 75 bp, synthetic construct
  source 1..75: mol_type = other DNA
actttttgtcccgaactcgaatcgttaggcgcatatttttgttagtttatttgatttcaaatgtttacgcctata

SEQ ID NO: 313809 - DNA, 75 bp, synthetic construct
  source 1..75: mol_type = other DNA
agggctttatgggcattgtggatacggatgcgtttcatgaatcggtgaacagttacctcacgccggaaaaaacgt

SEQ ID NO: 313810 - DNA, 75 bp, synthetic construct
  source 1..75: mol_type = other DNA
ggtttcagagttggcacctattgtatcatatttaagatacgtgcttactaaagctgacgaatcgggtatgagacg

SEQ ID NO: 313811 - DNA, 75 bp, synthetic construct
  source 1..75: mol_type = other DNA
catacgcactctgttgcgattggctcacatggacacaccatcaccgttaacgctgctggtaacgcggaaaacacc

SEQ ID NO: 313812 - DNA, 75 bp, synthetic construct
  source 1..75: mol_type = other DNA
ctcatagtgtcagcggcacagctgcatctgcaggtgctcacgcacatactgtcggtattggtgctcatacgcact

SEQ ID NO: 313813 - DNA, 75 bp, synthetic construct
  source 1..75: mol_type = other DNA
atcaatattgtacgtggtcagcttgttcctggtggtcggttgggtgtgaagatttacaaaattgagagtgagtga

SEQ ID NO: 313814 - DNA, 75 bp, synthetic construct
  source 1..75: mol_type = other DNA
caagaaaatacacttaatgatgtagttcaaaatatcagtcgttggctaaaagaaaatgaaaatatagtggaagct

SEQ ID NO: 313815 - DNA, 75 bp, synthetic construct
  source 1..75: mol_type = other DNA
aatgcaaaagatatttttagtgttgaatgaatttaaggatagatcgaaaataaattacagggattatagagaagt

SEQ ID NO: 313816 - DNA, 75 bp, synthetic construct
  source 1..75: mol_type = other DNA
gcgtggcgacatgaccgctgcccggacagtggcccggaacagcggacaggatgcgtggcttgacgggcaactgaa

SEQ ID NO: 313817 - DNA, 75 bp, synthetic construct
  source 1..75: mol_type = other DNA
aggccagtaagctgctgatgctgatcaaacagtcgggcagaagctaccgggagctgatggacgagcagcgtcgtt

SEQ ID NO: 313818 - DNA, 75 bp, synthetic construct
  source 1..75: mol_type = other DNA
catttatgcattacgttccggcaatgacggagaacaataccgaagcctggaataaagatgtgttacctcccgtct

SEQ ID NO: 313819 - DNA, 75 bp, synthetic construct
  source 1..75: mol_type = other DNA
atcgttggacccgcaagagatattacttggggtgaggggcttgttgcatattctgcattctatcaccgagcacaa

SEQ ID NO: 313820 - DNA, 75 bp, synthetic construct
  source 1..75: mol_type = other DNA
tacattgctccacaaaaacgaataattttaaaatcagatcgatttcctgaaaatattcacgatggcgcaagggtt

SEQ ID NO: 313821 - DNA, 75 bp, synthetic construct
  source 1..75: mol_type = other DNA
acggttaccctgatggcgggagtcaatcccgtaggaggaagtatgtgggtcgacattgaggctccggaaggagtg

SEQ ID NO: 313822 - DNA, 75 bp, synthetic construct
  source 1..75: mol_type = other DNA
ggccgataagactacggcgaccatctccagtattgaggtgattggcaaccgtgcagtggcggatggcaaaaccaa

SEQ ID NO: 313823 - DNA, 75 bp, synthetic construct
  source 1..75: mol_type = other DNA
ctacatcgaacggtttaaccgcacggtgcgctacgactggctgggccattacctgtttgagtcactgaatgaact

SEQ ID NO: 313824 - DNA, 75 bp, synthetic construct
  source 1..75: mol_type = other DNA
agcttttttaccggccaaggagtcttgttcaagggcgtaatggcgcggagaaaaggatgaaactgattcaaaaaa

SEQ ID NO: 313825 - DNA, 75 bp, synthetic construct
  source 1..75: mol_type = other DNA
tggtgtcactactttccctgatgctgtgcagtcaggccatggctgctttcactctgagtggaacccgctttatct

SEQ ID NO: 313826 - DNA, 75 bp, synthetic construct
  source 1..75: mol_type = other DNA
cgaatctaaattcgttgcggatgataaaaacgcggtactcaccgcatcatctgatatgcaatctctggtggcgga

SEQ ID NO: 313827 - DNA, 75 bp, synthetic construct
  source 1..75: mol_type = other DNA
tggctaatggacaatcgactaaccaggtaaccctgaccgttgtggacacctatggtaacccgttgcaggggcaag

SEQ ID NO: 313828 - DNA, 75 bp, synthetic construct
  source 1..75: mol_type = other DNA
aaccgtcactgcagaactgcgggccacgatgatggatgtggcaaactccaccctgagcgctaacgagccgtcagg

SEQ ID NO: 313829 - DNA, 75 bp, synthetic construct
  source 1..75: mol_type = other DNA
atgccgaagctaaatggacaggatgcggcagcaaatgcggcaaaagtaaccgtggtggctgatgcgttatcttca

SEQ ID NO: 313830 - DNA, 75 bp, synthetic construct
  source 1..75: mol_type = other DNA
ggcaagcctgacgggtgctgcgtctgaaggggcgactgtttctggttggaccgaaaaaggtgatggttcctatgt

SEQ ID NO: 313831 - DNA, 75 bp, synthetic construct
  source 1..75: mol_type = other DNA
tgatacgccgacaaatatgttgttcactcagggggcaatacatcgtacagacgatcgtactcagtcaaatattgg

SEQ ID NO: 313832 - DNA, 75 bp, synthetic construct
  source 1..75: mol_type = other DNA
aatcatgaaacgcctggacgatgtttgcggcaaagcaggatggcgcaatgaagcgcgctgccgttcagtggggaa

SEQ ID NO: 313833 - DNA, 75 bp, synthetic construct
  source 1..75: mol_type = other DNA
ctgataaagaattacgcgaagccagaattcgattacgtgaattggaaaaagagtttatccgtaaagataaaaccc

SEQ ID NO: 313834 - DNA, 75 bp, synthetic construct
  source 1..75: mol_type = other DNA
cgaaagctgaggcaatgggtgtggcgctgtctgatatcaaccagacaatttccaccgccttcggcagcagctacg

SEQ ID NO: 313835 - DNA, 75 bp, synthetic construct
  source 1..75: mol_type = other DNA
gatttagccaatctttctgatgcaagaaatactcaactcaaaataaagcttgatttggacggaaagaagattaat

SEQ ID NO: 313836 - DNA, 75 bp, synthetic construct
  source 1..75: mol_type = other DNA
acgagcgaagtaacccatgcgactgatgctgcaggctcagcacgcgcagccagcacatcagccgggcaggccgcg

SEQ ID NO: 313837 - DNA, 75 bp, synthetic construct
  source 1..75: mol_type = other DNA
gtctaaagttttttggctagaaggaaaatattgtaaagccatttcttattattataagtatttacttgttaaatt

SEQ ID NO: 313838 - DNA, 75 bp, synthetic construct
  source 1..75: mol_type = other DNA
gattttttgttgattacgatgatttaatgctaaagcagttacaggattctgcaacaaaattaattttatcgtgca

SEQ ID NO: 313839 - DNA, 75 bp, synthetic construct
  source 1..75: mol_type = other DNA
tcatacagtgcggaatgattgctgtcaccacacccgattatttaacagaaacaggcttgcaccgaagtcggtgaa

SEQ ID NO: 313840 - DNA, 75 bp, synthetic construct
  source 1..75: mol_type = other DNA
cttgtgaaaataaatggcacaaaccaggagcagcttaaccgtatatacacttctcttgccgttattcagaatatg

SEQ ID NO: 313841 - DNA, 75 bp, synthetic construct
  source 1..75: mol_type = other DNA
aatttaaaaagtctgttagaagcctttaactccgaagctattgaaagtttgaagctggacagatatgcgtccaga

SEQ ID NO: 313842 - DNA, 75 bp, synthetic construct
  source 1..75: mol_type = other DNA
gtatcagtcgttggctaaaagaaaatcaagttatggtggaaactattaagaaaattaattctgagcataacatgg

SEQ ID NO: 313843 - DNA, 75 bp, synthetic construct
  source 1..75: mol_type = other DNA
agattttcaacttaatgatgaaactataaaatatattatagataatgttttgtacaatagaaaaaaagatatagc

SEQ ID NO: 313844 - DNA, 75 bp, synthetic construct
  source 1..75: mol_type = other DNA
tcttgctgcaaacactcaggttaaaattcctgtttatatgtcctatagaggagctatagctgaaaatgatatttt

SEQ ID NO: 313845 - DNA, 75 bp, synthetic construct
  source 1..75: mol_type = other DNA
ataataggctcataaagattggttttgtgaattctttggttatcatagcaaattctggtccggcaattgataccg

SEQ ID NO: 313846 - DNA, 75 bp, synthetic construct
  source 1..75: mol_type = other DNA
aacacgatagaggagaagatacattctcttttaaaaaaatgggccgatgaaataaaggttgatcgaagtgattat

SEQ ID NO: 313847 - DNA, 75 bp, synthetic construct
  source 1..75: mol_type = other DNA
gaaatatagagactacagagataaatttaatgagttctctgcgtatattctacaaatgaagttagcaattaataa

SEQ ID NO: 313848 - DNA, 75 bp, synthetic construct
  source 1..75: mol_type = other DNA
actgatccactggggttagaacgagttataagtgtatatgggcctcccgctccagaccgggcaggtgctgaaact

SEQ ID NO: 313849 - DNA, 75 bp, synthetic construct
  source 1..75: mol_type = other DNA
gcaggcacctgaacctcccgcagcttgaccgggactacgactggaacgacaacggacagctaatccgcatcagcg

SEQ ID NO: 313850 - DNA, 75 bp, synthetic construct
  source 1..75: mol_type = other DNA
cagaccgtatcacccggcgcacggtgaacggcgacccggcggaacagtggcagtatgatgaacacgggtggctaa

SEQ ID NO: 313851 - DNA, 75 bp, synthetic construct
  source 1..75: mol_type = other DNA
aaaactagaaagatatggtctgatttatacaattacaaaggataattataaaatattaaggatatcaccagttgt

SEQ ID NO: 313852 - DNA, 75 bp, synthetic construct
  source 1..75: mol_type = other DNA
ataaggttaaagagtattatgagttaatgtcatttgatgaagtccttgatgcagggaatattgttgtttcggcag

SEQ ID NO: 313853 - DNA, 75 bp, synthetic construct
  source 1..75: mol_type = other DNA
agaaataatggctcttgcaatgaataatgcaaggagcggcgacaaatggttaattactaaatcacttgatgattt

SEQ ID NO: 313854 - DNA, 75 bp, synthetic construct
  source 1..75: mol_type = other DNA
aacgcgaattattttcgttggttctgttattcatctgttcagtggaacgattacttttctggctcgcgtgtgttt

SEQ ID NO: 313855 - DNA, 75 bp, synthetic construct
  source 1..75: mol_type = other DNA
ttaaaaaagatagctccaaagtcttctagttattatatcaatgctgaagttcatttggctgacgaattgtctcat

SEQ ID NO: 313856 - DNA, 75 bp, synthetic construct
  source 1..75: mol_type = other DNA
taaaaaaatccctaggactttgtatcggtagcgattggatgtcagggaaagtgagagtctctcctacagtgaaga

SEQ ID NO: 313857 - DNA, 75 bp, synthetic construct
  source 1..75: mol_type = other DNA
ctgtacgtgcttataggaatatggttgaacgagcaaaaaagaaacgcttgtcacaggaaaagacaaataacgaat

SEQ ID NO: 313858 - DNA, 75 bp, synthetic construct
  source 1..75: mol_type = other DNA
gcaatgagctggagaccctgtatgaactggccctgaaaatgggcatcagcgatgcgccataccgccgtggtgcac

SEQ ID NO: 313859 - DNA, 75 bp, synthetic construct
  source 1..75: mol_type = other DNA
atgcacagggcaagggtgagaccatcggtacgtcacacatccagtctgcgatgctggaactgggtcacagcaatc

SEQ ID NO: 313860 - DNA, 75 bp, synthetic construct
  source 1..75: mol_type = other DNA
cttcactatggcgcgttcttttaaagcggttgccaatggcaaaatttatatcggtaaaattgacactgacccggt

SEQ ID NO: 313861 - DNA, 75 bp, synthetic construct
  source 1..75: mol_type = other DNA
ggcggccgtattcaaccgggccaacatgaagacggacgagtacaaaatgacgtacgaggctactcttccaggcgg

SEQ ID NO: 313862 - DNA, 75 bp, synthetic construct
  source 1..75: mol_type = other DNA
ggcgacattctcagccctattttcaaagttgtcggcgcggtcttctcgttccttgctcccaagccggcgatcgcc

SEQ ID NO: 313863 - DNA, 75 bp, synthetic construct
  source 1..75: mol_type = other DNA
agtacgtgacggaatggatgtgtatcgggattggcaagtacaattatgagtctgtgcgctactcagaatcgagcc

SEQ ID NO: 313864 - DNA, 75 bp, synthetic construct
  source 1..75: mol_type = other DNA
gtgtcgtcgccggtccatttggtttaatcatttcctattctattgctgcgggcgtagttgaagggaaactgattc

SEQ ID NO: 313865 - DNA, 75 bp, synthetic construct
  source 1..75: mol_type = other DNA
gtgtggtgttgcgacgcaattgctcgcagcgtatatttttctatttgatgagtacaatgagaagaaagcatccgc

SEQ ID NO: 313866 - DNA, 75 bp, synthetic construct
  source 1..75: mol_type = other DNA
tgtgcagagtttctttaccaccctgtctaacacggttaaacaagcgaataaagatatcgatgccgccaaattgaa

SEQ ID NO: 313867 - DNA, 75 bp, synthetic construct
  source 1..75: mol_type = other DNA
cattaacgctgctggatatccggtatataacggacagattgccaagtttgtaactgtgcaaggccattctatggc

SEQ ID NO: 313868 - DNA, 75 bp, synthetic construct
  source 1..75: mol_type = other DNA
tcaacaacgcttccgggaaactgctggcgttagatagccagttaaccaatgatttttcagaaaaaagcagctatt

SEQ ID NO: 313869 - DNA, 75 bp, synthetic construct
  source 1..75: mol_type = other DNA
aagctcacaaagtttcaacaacgcttccgggaaactgctggcgttagatagccagttaaccaatgatttttcaga

SEQ ID NO: 313870 - DNA, 75 bp, synthetic construct
  source 1..75: mol_type = other DNA
tagaatgctatcagaagagttgaaaattttagaaaaaaatggagggacgaataaaaatataataattactgacat

SEQ ID NO: 313871 - DNA, 75 bp, synthetic construct
  source 1..75: mol_type = other DNA
ctgaatgctcaggtgtctgcagtgggagacccccacgccattaagatgtataccctgtcgaatccgtcattagtg

SEQ ID NO: 313872 - DNA, 75 bp, synthetic construct
  source 1..75: mol_type = other DNA
tatgtcaggcgataagggaggggatggttgatctggcgttgatgctggtgtccaacattatgctgccagaggatt

SEQ ID NO: 313873 - DNA, 75 bp, synthetic construct
  source 1..75: mol_type = other DNA
gtaaagtggagaagctgcttacactcagtcagtccgtacaaaccaagcgcctgtatctgttttttgccagtttct

SEQ ID NO: 313874 - DNA, 75 bp, synthetic construct
  source 1..75: mol_type = other DNA
aaaaaaattgctactgaagaaattaccactaaacaaagtactgctgaaaaattattgccaacgcaattattgaat

SEQ ID NO: 313875 - DNA, 75 bp, synthetic construct
  source 1..75: mol_type = other DNA
ttattaataaaatcacccccaaaaaaattgatactgaagaagttgctactaaacaaagtactgctgaacaaatta

SEQ ID NO: 313876 - DNA, 75 bp, synthetic construct
  source 1..75: mol_type = other DNA
tggcgctgctgtggcgacactcaaacgctgaagtcgcagagattaccggccgcagtattgatgaggtcggagata

SEQ ID NO: 313877 - DNA, 75 bp, synthetic construct
  source 1..75: mol_type = other DNA
gcgctaaccaaaatgcgtgtcgcggcactggatgcgcaaaaagcgacgccgccgaagctggaaggcaaatcatcg

SEQ ID NO: 313878 - DNA, 75 bp, synthetic construct
  source 1..75: mol_type = other DNA
ttgtaccacacctaccattaatcttcgaaaatgaagctaatgggattcttcaggatctggcctgtaccccatcgc

SEQ ID NO: 313879 - DNA, 75 bp, synthetic construct
  source 1..75: mol_type = other DNA
ttatgattgaagaaccagaagctcatttacatccggaaattcaaataaaattaacagagatatttgcaaaattaa

SEQ ID NO: 313880 - DNA, 75 bp, synthetic construct
  source 1..75: mol_type = other DNA
ttaaatacgcgcaaaatggctggttaataaaactgcgggctggcgtttatgcgcgcgcaggacgagaaccagact

SEQ ID NO: 313881 - DNA, 75 bp, synthetic construct
  source 1..75: mol_type = other DNA
tctcaggaatttcaggatctgccagacggtgctgagacgacgcttacagacaatatggaaaccctcaacgacaat

SEQ ID NO: 313882 - DNA, 75 bp, synthetic construct
  source 1..75: mol_type = other DNA
atgcgtaaaagcctgttagctattcttgcagtctcctcgttggtattcagttcggcgtcgtttgccgctgatctg

SEQ ID NO: 313883 - DNA, 75 bp, synthetic construct
  source 1..75: mol_type = other DNA
aaaattgatactgaagaagttgctactaaacaaagtactgctgaacaaattactgacaacgcaattattgaatga

SEQ ID NO: 313884 - DNA, 75 bp, synthetic construct
  source 1..75: mol_type = other DNA
tgtacaaggcgttagctaaactggaggacgaggggaaaatcgtcaaagaggcagcgacaaggagcgggattaata

SEQ ID NO: 313885 - DNA, 75 bp, synthetic construct
  source 1..75: mol_type = other DNA
aacaaaaagcggcaggcggacgtccggcacgattcaaagtagaacagcttgagcaatggcttaaggagcaaggcg

SEQ ID NO: 313886 - DNA, 75 bp, synthetic construct
  source 1..75: mol_type = other DNA
caaatatggttcgagttggaaattattaatgcacttgccttgtctgaatgggaaagtgccggtcgtccggaaaac

SEQ ID NO: 313887 - DNA, 75 bp, synthetic construct
  source 1..75: mol_type = other DNA
ggcgcacaagactgtccacgaccgtatcgccacagcaggacgtttctgcgaacgcctgatggagctgaacattca

SEQ ID NO: 313888 - DNA, 75 bp, synthetic construct
  source 1..75: mol_type = other DNA
cacctggtcgccactggatgtacaaggcgttagcaaagctggaggatgaagggaagatcgtcaaagaggcagcga

SEQ ID NO: 313889 - DNA, 75 bp, synthetic construct
  source 1..75: mol_type = other DNA
caaaagcgatattgtagacaaaccagttaatcaacaaatcgagaccaagggcgacgctattgtaggagaaccagt

SEQ ID NO: 313890 - DNA, 75 bp, synthetic construct
  source 1..75: mol_type = other DNA
accccggacggtgctaacccggacggtgctaacccggacggtgctaacctggacggtgctatcctggacggtgct

SEQ ID NO: 313891 - DNA, 75 bp, synthetic construct
  source 1..75: mol_type = other DNA
aaaggtagcaatgatatcctttatgagagacctgggtggaatgctaacctgggcggtgctaccccggacggtgct

SEQ ID NO: 313892 - DNA, 75 bp, synthetic construct
  source 1..75: mol_type = other DNA
tggcaacatcaacgcctcagaatactttactggggctatcgacgagaatgagagagaaaagtttatcaatagcct

SEQ ID NO: 313893 - DNA, 75 bp, synthetic construct
  source 1..75: mol_type = other DNA
ggacattatcaatgtccgtgttttcttttttcgaattaagaataaaaaaaccgcctggcgcggcggttaaagatg

SEQ ID NO: 313894 - DNA, 75 bp, synthetic construct
  source 1..75: mol_type = other DNA
atccggatggaagttatgcaccagaaagatcgctttttcctgattttgataaggttgataaaatgaaagttaaaa

SEQ ID NO: 313895 - DNA, 75 bp, synthetic construct
  source 1..75: mol_type = other DNA
tgtgggagacgttacgtcatctgttctggtcagataaacagactgaggcttataaacttctgttcaatttcgtga

SEQ ID NO: 313896 - DNA, 75 bp, synthetic construct
  source 1..75: mol_type = other DNA
tatctcatgctttttcaatgcaatggatgtttttggtatatattatgacgcaagattagaatcaagaaaaaatac

SEQ ID NO: 313897 - DNA, 75 bp, synthetic construct
  source 1..75: mol_type = other DNA
ggaggttatctttttggtttttattttataaaactattatacggagatagttatattgcggcatattatccaatg

SEQ ID NO: 313898 - DNA, 75 bp, synthetic construct
  source 1..75: mol_type = other DNA
tcaacccagttggagagtaatgcatggttcagttcgacaccctgtcgggcaaagatttcactctgacgatacagt

SEQ ID NO: 313899 - DNA, 75 bp, synthetic construct
  source 1..75: mol_type = other DNA
gcgtagccgttgcccgtccggttgtgttgctgtattcgctgcccgtattcgtcagggggaaacctatgcacaata

SEQ ID NO: 313900 - DNA, 75 bp, synthetic construct
  source 1..75: mol_type = other DNA
taatcgaagaggccaaattaaaaatagcgattacgaaatgttacccccattcagggatggcacggatagagggtg

SEQ ID NO: 313901 - DNA, 75 bp, synthetic construct
  source 1..75: mol_type = other DNA
cgacggactggtgctggtggatttgtgttacctgaaggcgaaccgctatcagcggtatattgaggcgcatttaat

SEQ ID NO: 313902 - DNA, 75 bp, synthetic construct
  source 1..75: mol_type = other DNA
atgaataatttcttaactttccatgcagaagcaacgcctgacggcgtaaacatcatgtaccgcagcaacgatggc

SEQ ID NO: 313903 - DNA, 75 bp, synthetic construct
  source 1..75: mol_type = other DNA
catcacgtgattatgtggcgctggctgatagcaacagcattcatcaatgaaatgagaaaggaaaacggcaccgtc

SEQ ID NO: 313904 - DNA, 75 bp, synthetic construct
  source 1..75: mol_type = other DNA
ccttggtttaccgtttatccggatgttggcaatctgaccgcatggggtaatgaactggaaagtgagctggtaaag

SEQ ID NO: 313905 - DNA, 75 bp, synthetic construct
  source 1..75: mol_type = other DNA
caccgggaggaaggtctcagtatttatagtctctatgacagccgcggcaggctgacagggcagaaggatgcgcag

SEQ ID NO: 313906 - DNA, 75 bp, synthetic construct
  source 1..75: mol_type = other DNA
aagacggaatcggggtaacgcggagaataacgcgaaaccggtacggtcagcttcggaccttcacggactgctcgg

SEQ ID NO: 313907 - DNA, 75 bp, synthetic construct
  source 1..75: mol_type = other DNA
accagacaaagtcattgaagcttaaaccggtcgcgttgccgaaagtggcaagccagcttcctgatgaactggggt

SEQ ID NO: 313908 - DNA, 75 bp, synthetic construct
  source 1..75: mol_type = other DNA
tttctcgcaaaacctgatggccgaggtcagtgtattcaatccggcgcttctggaaatcgaccatcaatccggagt

SEQ ID NO: 313909 - DNA, 75 bp, synthetic construct
  source 1..75: mol_type = other DNA
ccgtcatccgccaatacattgaacaacagcaaacacctggtcaggtggaaaaccgcgccttatatccccgccctg

SEQ ID NO: 313910 - DNA, 75 bp, synthetic construct
  source 1..75: mol_type = other DNA
atgatactttggtctgtgaaaaaagaaaccgatatccgccgcggaaggcattgtgttttcctgaggcatgttcac

SEQ ID NO: 313911 - DNA, 75 bp, synthetic construct
  source 1..75: mol_type = other DNA
atgatactttggtctctgaaaaaagaaaccgatatccgacgaggaaggcattgtgttttcctgaggcatgttcac

SEQ ID NO: 313912 - DNA, 75 bp, synthetic construct
  source 1..75: mol_type = other DNA
atgaaaatgaacgtaaccgccaccgtcagtcatgcgctcggccactggccgcgtattctcccggcgctggggatt

SEQ ID NO: 313913 - DNA, 75 bp, synthetic construct
  source 1..75: mol_type = other DNA
ggtcgggctgggttatgacgtcaaagtcggaaataacgttaccttcaccgttggtaaaacgaaaaaggatgatac

SEQ ID NO: 313914 - DNA, 75 bp, synthetic construct
  source 1..75: mol_type = other DNA
atgctgaaaccattggcaacaatcagatgattgcggttaccaacaatcagatacagacggtgggtgtcaaccaga

SEQ ID NO: 313915 - DNA, 75 bp, synthetic construct
  source 1..75: mol_type = other DNA
ataacccgtaatgctgatcgcagtcagagtggtaaggcatatattaattatctggagaatggagggcttttagag

SEQ ID NO: 313916 - DNA, 75 bp, synthetic construct
  source 1..75: mol_type = other DNA
gtggtattgaccttctggatggaggggaaggtaatgactatctgaatggtggttttggtaatgatatttatgttt

SEQ ID NO: 313917 - DNA, 75 bp, synthetic construct
  source 1..75: mol_type = other DNA
ttcggcctgtcagaaagcaggtgcatgtatttttggatatgagtaagcgtgcagcaagaaccgtattgacgggga

SEQ ID NO: 313918 - DNA, 75 bp, synthetic construct
  source 1..75: mol_type = other DNA
atgatactttggtctttgaaaaaagaaaccgatatccggcgtggaaggcattgtgttttcctgaggcatgttcac

SEQ ID NO: 313919 - DNA, 75 bp, synthetic construct
  source 1..75: mol_type = other DNA
atgatactttggtctatgaaaaaagaaaccgatatccgtcgtggaaggcattgtgttttcctgaggcatgttcac

SEQ ID NO: 313920 - DNA, 75 bp, synthetic construct
  source 1..75: mol_type = other DNA
taccacctttgtgatggtaatggaaacagcgtagtcatttaccaacataaatatcctgtttctctacataagaaa

SEQ ID NO: 313921 - DNA, 75 bp, synthetic construct
  source 1..75: mol_type = other DNA
cggtaactgagtctgacggcacttcatcgcaggtggcgatttactccaatggcacggcggggattgtggtttacc

SEQ ID NO: 313922 - DNA, 75 bp, synthetic construct
  source 1..75: mol_type = other DNA
gccacatttgcggctggtgggcaatgtgatcagtgtgctggcttgctggttggctgtcagcctttgggttctatg

SEQ ID NO: 313923 - DNA, 75 bp, synthetic construct
  source 1..75: mol_type = other DNA
aaaccggctcgctgaagtcatcaaccgaacagaaagttattaccacaacgaagaaagctgtaccggtaaaacaga

SEQ ID NO: 313924 - DNA, 75 bp, synthetic construct
  source 1..75: mol_type = other DNA
gccgcggttacgtttcctgcaacggtttccgcacctcccgtaacacccgccgtcgtcaaatccgcattcagcact

SEQ ID NO: 313925 - DNA, 75 bp, synthetic construct
  source 1..75: mol_type = other DNA
tattttgctgcgaataaagtcaatgatgatgatataaatatcatctgcataaatgttggttttattgaaaatata

SEQ ID NO: 313926 - DNA, 75 bp, synthetic construct
  source 1..75: mol_type = other DNA
agttattaactaactctggctttatatacagcacaactctattattattctcattagaatgcatgaagcttagaa

SEQ ID NO: 313927 - DNA, 75 bp, synthetic construct
  source 1..75: mol_type = other DNA
agtagcagaaaaattgtcagaaaagttgagtcttatctgcagcatcagtactcctttaagattgaaaatccggtg

SEQ ID NO: 313928 - DNA, 75 bp, synthetic construct
  source 1..75: mol_type = other DNA
atcgttataaactgaaattaaatggtacgtaccgcattaaaaatacgcaaccattaaatacagcgaagcccggta

SEQ ID NO: 313929 - DNA, 75 bp, synthetic construct
  source 1..75: mol_type = other DNA
acgctatccccagcacggcaaccttttgcggcgttactgatccctgaacgcccggatattgccaatgctatggcg

SEQ ID NO: 313930 - DNA, 75 bp, synthetic construct
  source 1..75: mol_type = other DNA
aacaattaccgctcttatccagaaaactggcagcaggcttttgctgagttacaaatgcaagttaagggtaatcaa

SEQ ID NO: 313931 - DNA, 75 bp, synthetic construct
  source 1..75: mol_type = other DNA
tacatcgaagcgtggatctctggcaacggctgtgtgccgatttatggcctgatggaagatgcggcgacggctgaa

SEQ ID NO: 313932 - DNA, 75 bp, synthetic construct
  source 1..75: mol_type = other DNA
gaaattcaccagacagtgtctggtgaattcaaacaactggagaattggcagacactgtctgcagaatctttaaat

SEQ ID NO: 313933 - DNA, 75 bp, synthetic construct
  source 1..75: mol_type = other DNA
tttttatctttattttcaatacattgaaattcaccagacagtgtctggtgaattcaaacaactggagaattggca

SEQ ID NO: 313934 - DNA, 75 bp, synthetic construct
  source 1..75: mol_type = other DNA
aaagtagcgtggtttcgggaggaaatcgccacactttaccagtcagccgtcagtgaagcgctgacagccttcggg

SEQ ID NO: 313935 - DNA, 75 bp, synthetic construct
  source 1..75: mol_type = other DNA
cataagtttcccggacagatttcaggtggtcagcagcaacgcgttgccattgcgcgttcgctgtgtatgaagccg

SEQ ID NO: 313936 - DNA, 75 bp, synthetic construct
  source 1..75: mol_type = other DNA
ttcgttaatttaatacccaatttaagagcattgacacctgcagaacagttagcaaaagctatcaagcaagtagga

SEQ ID NO: 313937 - DNA, 75 bp, synthetic construct
  source 1..75: mol_type = other DNA
caatcagttatttgttgtgtccaacgtcgaaccggacagccatggcggctcgcgtcttgtcctcaatgtggtaaa

SEQ ID NO: 313938 - DNA, 75 bp, synthetic construct
  source 1..75: mol_type = other DNA
attttcatagagtaattggaagattaaatgagacactggttattaatccatatacacttaacctctatagatctt

SEQ ID NO: 313939 - DNA, 75 bp, synthetic construct
  source 1..75: mol_type = other DNA
aaagcggaatatgaatgggaaaaaaggcgaggcgatcattggtgatggatttcgctgcgtggttaatgagctgaa

SEQ ID NO: 313940 - DNA, 75 bp, synthetic construct
  source 1..75: mol_type = other DNA
tcgctacgaccgccaaactatttttggccttgtccgtgaacgtccgatcgacattcacaaagaccctgtggcact

SEQ ID NO: 313941 - DNA, 75 bp, synthetic construct
  source 1..75: mol_type = other DNA
acaggcaaccttaccctgctgcgccgccttaaccgctcttcagccatcacagttgaagaacagcgccagtcacgg

SEQ ID NO: 313942 - DNA, 75 bp, synthetic construct
  source 1..75: mol_type = other DNA
ggataccgaagtgctcaacgaccgtaccaccaccgtaaaacacgatcatcgcgaaaccgtaaaaaatgaccagac

SEQ ID NO: 313943 - DNA, 75 bp, synthetic construct
  source 1..75: mol_type = other DNA
cgatgcgtcggaccgtatcacccggcgcacggtgaacggtgaaccggcggagcagtggcagtatgacgaccacgg

SEQ ID NO: 313944 - DNA, 75 bp, synthetic construct
  source 1..75: mol_type = other DNA
tcagggtgcgccacgggttatgaatacgatgaagacggcaacctgacggcggtgacggacgcggaggggaaaacg

SEQ ID NO: 313945 - DNA, 75 bp, synthetic construct
  source 1..75: mol_type = other DNA
agcgtgacggcgcgggactatatctggaatgcggacggtgaggtcggcggcatcaatgacaaactgcgcggttgc

SEQ ID NO: 313946 - DNA, 75 bp, synthetic construct
  source 1..75: mol_type = other DNA
gcgtcaattgtgaatatgaagaagaagacccgatagaagcgcgttacgcgctgggccatctacgcagaggatggg

SEQ ID NO: 313947 - DNA, 75 bp, synthetic construct
  source 1..75: mol_type = other DNA
ttctggctatggggtctctctccgcgatagctggaggcggtaattctgaacgaccgccttccgttgcagcagggg

SEQ ID NO: 313948 - DNA, 75 bp, synthetic construct
  source 1..75: mol_type = other DNA
atacccttgataagcttgttgagctcagaactagaaaaaaaaagaataaacatgataaacgatctgaagagtata

SEQ ID NO: 313949 - DNA, 75 bp, synthetic construct
  source 1..75: mol_type = other DNA
atgaatcttgccctaagaaagattatatatgatccaattagttatattcatcctcaacgagtaagcttgaataat

SEQ ID NO: 313950 - DNA, 75 bp, synthetic construct
  source 1..75: mol_type = other DNA
tacccgggtctattacctgaaatatgctaaagccacaaatctggtcgaagtattgaccggcgtttccgaaaagct

SEQ ID NO: 313951 - DNA, 75 bp, synthetic construct
  source 1..75: mol_type = other DNA
ttgatgtcatcggcacagagaagcagcaaattattcatctggaatatgcgtcagcggaagatctcgccgaaattt

SEQ ID NO: 313952 - DNA, 75 bp, synthetic construct
  source 1..75: mol_type = other DNA
tgtggctgattataaaaagaatggtgggatcaccagcgcgaatcctgcctgggatatgtttagcgcctacaatgg

SEQ ID NO: 313953 - DNA, 75 bp, synthetic construct
  source 1..75: mol_type = other DNA
cgggcgccggtgctgtgtggaaatccgcccaccctttccgggcgccggagccgtgtgggaatccgcccaccttgc

SEQ ID NO: 313954 - DNA, 75 bp, synthetic construct
  source 1..75: mol_type = other DNA
ttaacttgtcggcactgcactttcgcagtaatcagctgcctaatcaggtgtctgatgcaatgcaagcctggggta

SEQ ID NO: 313955 - DNA, 75 bp, synthetic construct
  source 1..75: mol_type = other DNA
gttggcaaaaaccgtgactacctgctttctaccgcccacaatgcgatggatttcattcgcaaaaacggcggtaac

SEQ ID NO: 313956 - DNA, 75 bp, synthetic construct
  source 1..75: mol_type = other DNA
ccctgtttttaaactcttttctgaaagcgctttcccgtcagactgcattgatcttccaattgataaagttgttaa

SEQ ID NO: 313957 - DNA, 75 bp, synthetic construct
  source 1..75: mol_type = other DNA
gattttcctcaacaatactagctactgttgttgctctttttgtccccacactcacctttgcttatgattttagca

SEQ ID NO: 313958 - DNA, 75 bp, synthetic construct
  source 1..75: mol_type = other DNA
atccgcccaccttaccgggcgccggtgccgtgtgggaatcagcccaccttgccgggcgccggtgctgtgtggaaa

SEQ ID NO: 313959 - DNA, 75 bp, synthetic construct
  source 1..75: mol_type = other DNA
caggctatgtttgagcacgttgcagataaattcgctgctcggatcaatgaatgggaaaaggagcatggcaaaaat

SEQ ID NO: 313960 - DNA, 75 bp, synthetic construct
  source 1..75: mol_type = other DNA
aaaaataatgatcactgattattcatcagtagcatttgaaatggcgtacttgaataaaccagtctgttattatca

SEQ ID NO: 313961 - DNA, 75 bp, synthetic construct
  source 1..75: mol_type = other DNA
caaatggcgcagaacgtcaccgcatgaagccccgcccacaacggggatcctttctctgtataaccgtggcgatcg

SEQ ID NO: 313962 - DNA, 75 bp, synthetic construct
  source 1..75: mol_type = other DNA
aggtagccaatatgacgggctaccgggattcccttgatcccgttgtggcaagtgagtctgcatatctccagtgcc

SEQ ID NO: 313963 - DNA, 75 bp, synthetic construct
  source 1..75: mol_type = other DNA
cttccggtggctgaacaaggggtgcatttgtgggagatcgcccaggtggaacgggaactaaatcaagggggaagc

SEQ ID NO: 313964 - DNA, 75 bp, synthetic construct
  source 1..75: mol_type = other DNA
attaccatgatactgcacaccgcttggcagatgagcacgaacggcacgacgcttaatccgcttcatccggataga

SEQ ID NO: 313965 - DNA, 75 bp, synthetic construct
  source 1..75: mol_type = other DNA
ataatattaatagcaatgatatctttacagggcaaactggcataaacatttatatggcagcttatttctttgcta

SEQ ID NO: 313966 - DNA, 75 bp, synthetic construct
  source 1..75: mol_type = other DNA
gccccttatattattgagccgatgaattgtctggcatcccgtgaatatgatgcggtggtgtttgtcggaccggcc

SEQ ID NO: 313967 - DNA, 75 bp, synthetic construct
  source 1..75: mol_type = other DNA
ggatacgccgcgatgtctccggtattcttcgtgccccacgtcgtatgcaggtggccgatgcggtcagctcatata

SEQ ID NO: 313968 - DNA, 75 bp, synthetic construct
  source 1..75: mol_type = other DNA
acagctggtttataaactgctgacggcggaacaggactatgaagctacaggcagtgaagaaacgctgaaagccgt

SEQ ID NO: 313969 - DNA, 75 bp, synthetic construct
  source 1..75: mol_type = other DNA
aacgtaagagtgagctgctcgaacgacgcgctgaagacgtgccgaagcgatctgtaccagatggcgtgctcttta

SEQ ID NO: 313970 - DNA, 75 bp, synthetic construct
  source 1..75: mol_type = other DNA
gcagatgatatacaaattcctgactgctgagcaggaatatgagtccacccagagtgaagagacgttgaaaacggt

SEQ ID NO: 313971 - DNA, 75 bp, synthetic construct
  source 1..75: mol_type = other DNA
atggctcggcagctggttttacgatgagctgacctatgaggaacgttcacccgatggaaaatggagcaaaccggg

SEQ ID NO: 313972 - DNA, 75 bp, synthetic construct
  source 1..75: mol_type = other DNA
agaaaccagtgcatttgtcgaacgcgtggcagacatcagccagcatatggccgcactggcgctggaacaggagaa

SEQ ID NO: 313973 - DNA, 75 bp, synthetic construct
  source 1..75: mol_type = other DNA
atcctgaaaattcattcctcaatattttgctaatacaaacacgccgggcgctggcagccagtaccggcgtctttt

SEQ ID NO: 313974 - DNA, 75 bp, synthetic construct
  source 1..75: mol_type = other DNA
cttattgagcaaacgctcatcactcatcctgaaaattcattcctcaataccttgctaatacaaacacgccgggcg

SEQ ID NO: 313975 - DNA, 75 bp, synthetic construct
  source 1..75: mol_type = other DNA
ccgacgaacaggctttagctgaaaccgacatcattaccttgctcaacgccactttacatatctgtatcgatgatt

SEQ ID NO: 313976 - DNA, 75 bp, synthetic construct
  source 1..75: mol_type = other DNA
tttgatatcaataacaaacttcatatcataaagaataaaattccgattcttaaaaataatttatatataaaaaac

SEQ ID NO: 313977 - DNA, 75 bp, synthetic construct
  source 1..75: mol_type = other DNA
caccctcagcagtaatctgagctataacttcggcgtctataacaaccagttgcgtaacggcgggagcaacacatc

SEQ ID NO: 313978 - DNA, 75 bp, synthetic construct
  source 1..75: mol_type = other DNA
ggtgatctccgttccggcttatttcagcgatgaacaacgcaagcatacccgtttagcagcggagttagccgggtt

SEQ ID NO: 313979 - DNA, 75 bp, synthetic construct
  source 1..75: mol_type = other DNA
tcaccgattcagcaacactcctgccctctgttgaacaggccctgaacgaggtccggatgatacactacctccggc

SEQ ID NO: 313980 - DNA, 75 bp, synthetic construct
  source 1..75: mol_type = other DNA
gccctggattgaacgtgcgcgtcaggacgttcgcgatctccgtcatcttcaacttctgcgacagaccagtacaga

SEQ ID NO: 313981 - DNA, 75 bp, synthetic construct
  source 1..75: mol_type = other DNA
caattatattatctgtggcaagtggctccgtgctggctgacaaccattcattttctgtcggttatgcacagagta

SEQ ID NO: 313982 - DNA, 75 bp, synthetic construct
  source 1..75: mol_type = other DNA
gtgcgggtctggcgctggctgccgtacctgcacaggcattcgtcacctatcaggacattgtgagcgccgccacca

SEQ ID NO: 313983 - DNA, 75 bp, synthetic construct
  source 1..75: mol_type = other DNA
ttgattcggttgcagaagggatagagtcgcaggagcaagttacttgtctgaaagaccttggagttaattatcttc

SEQ ID NO: 313984 - DNA, 75 bp, synthetic construct
  source 1..75: mol_type = other DNA
tgttcctggtggggttgattacatcagcggccaggatcagaagtggtggcctgctgctgccggtattgctgcata

SEQ ID NO: 313985 - DNA, 75 bp, synthetic construct
  source 1..75: mol_type = other DNA
cggactacgacaacgctcagatccagcaactgatgcaacttatcagcctgtgccgccagcgacggctgcgggagg

SEQ ID NO: 313986 - DNA, 75 bp, synthetic construct
  source 1..75: mol_type = other DNA
aatattcatatcccggcgctttccgttaacttgtcggcactgcactttcgcagtaatcaactgcctaatcaggtg

SEQ ID NO: 313987 - DNA, 75 bp, synthetic construct
  source 1..75: mol_type = other DNA
cgataaccgcattcgtttacaacagttgctatggaaaaccgcccgcgatcaggatgaatttctgctgttgacgcg

SEQ ID NO: 313988 - DNA, 75 bp, synthetic construct
  source 1..75: mol_type = other DNA
gtgccgtgtgggaatccgcccaccttgccgcgcgccggtgctgtgtggaaatccgcccaccttgccgggcgccgg

SEQ ID NO: 313989 - DNA, 75 bp, synthetic construct
  source 1..75: mol_type = other DNA
gaagctttggggatataaacgcgaagaggtcattggcaataacatcgatatgctgattccccataatttgcgccc

SEQ ID NO: 313990 - DNA, 75 bp, synthetic construct
  source 1..75: mol_type = other DNA
acggtttattcctctggcagaagaaattggtgaaatcgaaaacattggcaactgggtcatcactgaagcttgccg

SEQ ID NO: 313991 - DNA, 75 bp, synthetic construct
  source 1..75: mol_type = other DNA
gtaacattctcgcggccatgtgcagcagtccgccgtttcatgaaatgggcgaaatcatctgccgtaatatcgaat

SEQ ID NO: 313992 - DNA, 75 bp, synthetic construct
  source 1..75: mol_type = other DNA
agcacgaaattctgtgtttgtggctactcaataaaataaattctttctttcgctgcgaatactcaaatgttgatc

SEQ ID NO: 313993 - DNA, 75 bp, synthetic construct
  source 1..75: mol_type = other DNA
aagtgctggcaaacgcaaaactgcctgatgcgctacgcttatcaggcctacgtgaactctgcaatatattgaatt

SEQ ID NO: 313994 - DNA, 75 bp, synthetic construct
  source 1..75: mol_type = other DNA
taaacaactttcaacggcatcaatacatattaccccagaatcgatgcacaagaagatctttatcaataccccgag

SEQ ID NO: 313995 - DNA, 75 bp, synthetic construct
  source 1..75: mol_type = other DNA
gtgatgaggctaccggacggatgcgacaatggggtacgcttgtgataagtgaatccgatggtcaggcgttatcac

SEQ ID NO: 313996 - DNA, 75 bp, synthetic construct
  source 1..75: mol_type = other DNA
atgaataaggccatcactgatgtcggaccggggaaactcaatctgggcggctgtaccattgaagtgatgggaaca

SEQ ID NO: 313997 - DNA, 75 bp, synthetic construct
  source 1..75: mol_type = other DNA
tgagtcaatgctggaagcaacagaagatgatcgtcatccaggttgcccggtatttgctggtatggaattgccgga

SEQ ID NO: 313998 - DNA, 75 bp, synthetic construct
  source 1..75: mol_type = other DNA
gtagagtatgacgaatggggcaacctgctgagtgaggataacccgcacagggaaagatcatcagaagttcacttt

SEQ ID NO: 313999 - DNA, 75 bp, synthetic construct
  source 1..75: mol_type = other DNA
ttacggcggcggatattggtcgtatgaatgtgactaaagaagagcgtgataaattgcgtcagaaagtacccggtt

SEQ ID NO: 314000 - DNA, 75 bp, synthetic construct
  source 1..75: mol_type = other DNA
gcaacacatcattttaaatttactgaaattgagaaagcttatgatgtatttaaaaatgctactgattacaatgca

SEQ ID NO: 314001 - DNA, 75 bp, synthetic construct
  source 1..75: mol_type = other DNA
aagaaagagaaacgtgttctggctgtggagcatgagcacatcatgcaggtaacgcagcctgaattgctgatcgaa

SEQ ID NO: 314002 - DNA, 75 bp, synthetic construct
  source 1..75: mol_type = other DNA
cctttcagtaagcgagcctgagaaatgccgttataggtggcgacctctctcgggcggcttttctgtgagacaggc

SEQ ID NO: 314003 - DNA, 75 bp, synthetic construct
  source 1..75: mol_type = other DNA
tacaacggcaatttactttagatgatgtgtccggcgcagaatttaaccaacaaaaaaatacgcttctggtgctgt

SEQ ID NO: 314004 - DNA, 75 bp, synthetic construct
  source 1..75: mol_type = other DNA
aagaaacagtgaattatttcacaaaaaagtctcatcggtagcgaatacgttcgggcttagaaaaaccataaatga

SEQ ID NO: 314005 - DNA, 75 bp, synthetic construct
  source 1..75: mol_type = other DNA
atgtaagttatgatattctcagtggagaggagattaaactcgataaccagtatttatctgaagaaagtattatat

SEQ ID NO: 314006 - DNA, 75 bp, synthetic construct
  source 1..75: mol_type = other DNA
ctggagggcaatatcctgtttatggtagcaacgggattgtaggctcccatgacaaatataacagcgaagactcgc

SEQ ID NO: 314007 - DNA, 75 bp, synthetic construct
  source 1..75: mol_type = other DNA
ccgctggcgcggggaactctttcccccatgcgggaagcgcgtgcgatttcgcggtttatccccgctggcgcgggg

SEQ ID NO: 314008 - DNA, 75 bp, synthetic construct
  source 1..75: mol_type = other DNA
atgtgcagcgttgtcctcgcggcttttacccggtcaaaacagcgttacgatgcagcacgcctgacggatgaactg

SEQ ID NO: 314009 - DNA, 75 bp, synthetic construct
  source 1..75: mol_type = other DNA
cctgcaagccgaatgaaagcagcgaaggagcatcgagttcctctgtctgatgctgctgttgccttgttaaaagct

SEQ ID NO: 314010 - DNA, 75 bp, synthetic construct
  source 1..75: mol_type = other DNA
gccgcaaatcagcggcatcgcacagactaacgccacggtcacgataagccattctggtcgcgtgatttaccagaa

SEQ ID NO: 314011 - DNA, 75 bp, synthetic construct
  source 1..75: mol_type = other DNA
gtggcaaaccgtgagcctgtcaccattcatcctgacgatgctcaggcgcgtggcatacaagatggcgatactgtt

SEQ ID NO: 314012 - DNA, 75 bp, synthetic construct
  source 1..75: mol_type = other DNA
ttaattgatagcaaactcttttttacgcggttaacaaatacgttcctcgaaatggttatatgtaccggctctaat

SEQ ID NO: 314013 - DNA, 75 bp, synthetic construct
  source 1..75: mol_type = other DNA
atcgacagtatcagcgaaacgctggccgccacgcctaaagccgtgaaagcggcctacgatctggctaatggaaaa

SEQ ID NO: 314014 - DNA, 75 bp, synthetic construct
  source 1..75: mol_type = other DNA
gtgccgaatgaagactatattcatagtaatagttggtctgaacttgctcaaaatattttaaataaagcatgttca

SEQ ID NO: 314015 - DNA, 75 bp, synthetic construct
  source 1..75: mol_type = other DNA
gtactgcctgttccgtggatggtgtgcaaacccgcaattgtggtcacacgtcacgcagtccgctggattcgctgg

SEQ ID NO: 314016 - DNA, 75 bp, synthetic construct
  source 1..75: mol_type = other DNA
cgatcgtcggcaaattaagtgaccgcttaatggctaaagttgaatctaccttcaccgcatatcgcctgtgggaac

SEQ ID NO: 314017 - DNA, 75 bp, synthetic construct
  source 1..75: mol_type = other DNA
ggaaggcccggtaaatacccctgaaggcggctatgtcattatggacaaactcattgaagatcagggatgtccaca

SEQ ID NO: 314018 - DNA, 75 bp, synthetic construct
  source 1..75: mol_type = other DNA
aatacctcattagcaacattcactacgataaagaaactggggttttcaagaagataattaaatcaaataatgggg

SEQ ID NO: 314019 - DNA, 75 bp, synthetic construct
  source 1..75: mol_type = other DNA
ccatgccaatgcgggcgcgtatattggcggcccggtggcggaaggcgatccggatatctgggatcgggtgttaaa

SEQ ID NO: 314020 - DNA, 75 bp, synthetic construct
  source 1..75: mol_type = other DNA
atgagaccactatccaacctcaatacgagcgcagcaacctatattccaccgcagcaactcccgagtagttgtctg

SEQ ID NO: 314021 - DNA, 75 bp, synthetic construct
  source 1..75: mol_type = other DNA
taaaagactctggatatagaagtttacatttagtttattcttttcagaatgagaagcatgttaatttaaatgggt

SEQ ID NO: 314022 - DNA, 75 bp, synthetic construct
  source 1..75: mol_type = other DNA
actgaatatttaactagagaagcaaattcaataaatcaaaattgtttaatatcatcaagaattaaacgactccca

SEQ ID NO: 314023 - DNA, 75 bp, synthetic construct
  source 1..75: mol_type = other DNA
aggcagtaaagatgcaattttaaactatcaaatacccattccttgccccagcgccccggaaaaatcccttgccat

SEQ ID NO: 314024 - DNA, 75 bp, synthetic construct
  source 1..75: mol_type = other DNA
ataatggtaaaaaactcccattgggcgccatagtacaagttaatggcaatggcagaaatattaatggaattgtcg

SEQ ID NO: 314025 - DNA, 75 bp, synthetic construct
  source 1..75: mol_type = other DNA
gaatcgctttaatgaaaatatggagtcaggtagtacagataaaatgataattccctcgagaggaacattaatccc

SEQ ID NO: 314026 - DNA, 75 bp, synthetic construct
  source 1..75: mol_type = other DNA
tcagatcaggttgtatatgaaacaaatgttcctccaggagaatttgaactaaaagacttcagcatatataacggt

SEQ ID NO: 314027 - DNA, 75 bp, synthetic construct
  source 1..75: mol_type = other DNA
acttgcaggccataacagtatctacgctagctgtgcaatccattgattttgcacaattttgtaggctggataagg

SEQ ID NO: 314028 - DNA, 75 bp, synthetic construct
  source 1..75: mol_type = other DNA
aaaacactatcaataagttggagtcattacccggcctttgatatgagtctgcactttattacgctactgcgtgaa

SEQ ID NO: 314029 - DNA, 75 bp, synthetic construct
  source 1..75: mol_type = other DNA
cctttgatatgagtctgcactttattacgctactgcgtgaacagctcgatattccccttttcgacagcgatctga

SEQ ID NO: 314030 - DNA, 75 bp, synthetic construct
  source 1..75: mol_type = other DNA
ctcggtttatccccgctggcgcggggaacactaaaccaccagccagaccaccaattaccacaccggtttatcccc

SEQ ID NO: 314031 - DNA, 75 bp, synthetic construct
  source 1..75: mol_type = other DNA
cccgctggcgcggggaacaccagaggcaaccgacgcggattcagtaggaaagcgatttatccccgctggcgcggg

SEQ ID NO: 314032 - DNA, 75 bp, synthetic construct
  source 1..75: mol_type = other DNA
gagagcgtattaaggttatttaccttcctcaagtcttcgttaaaatgagattggggggagagagcacgaaacttg

SEQ ID NO: 314033 - DNA, 75 bp, synthetic construct
  source 1..75: mol_type = other DNA
aacactcggccagcgtccaggctggcacccgatattccggtttatccccgctggcgcggggaacacctgccgact

SEQ ID NO: 314034 - DNA, 75 bp, synthetic construct
  source 1..75: mol_type = other DNA
ggatgaagataaacaaccaggcgaaccgatcccgaataatcagccagccattctgacagaagatcaaaaagagtt

SEQ ID NO: 314035 - DNA, 75 bp, synthetic construct
  source 1..75: mol_type = other DNA
aagctggtcaaagtggctcacgtaacaatttctcaatgggaaagagatgaaacacagccagcggggaagagatta

SEQ ID NO: 314036 - DNA, 75 bp, synthetic construct
  source 1..75: mol_type = other DNA
ctgaaggtaccgcgcagcggcgattttgttcgccagagcccgggggtgcagggggccgcggcgattggccgcccc

SEQ ID NO: 314037 - DNA, 75 bp, synthetic construct
  source 1..75: mol_type = other DNA
cttatcagcaaagggaaaagtggagaaataaaaggatttaaaagcaaaaaagataacagcacatattcaatgatt

SEQ ID NO: 314038 - DNA, 75 bp, synthetic construct
  source 1..75: mol_type = other DNA
ccgtgatgatgcggaacgttttgcgggtgaggcagaaaacagcgcacagtcatcaggcacatcgcgggatgaatc

SEQ ID NO: 314039 - DNA, 75 bp, synthetic construct
  source 1..75: mol_type = other DNA
cgtcatggacgagacgaaaacaaaagcgccactggacagcccggcattcaccggcacgcccaccacaccaacccc

SEQ ID NO: 314040 - DNA, 75 bp, synthetic construct
  source 1..75: mol_type = other DNA
cttgctatacgcattttagcagactgtaaaaaaattattagtccagaatatctttactatgcattatcgtcggat

SEQ ID NO: 314041 - DNA, 75 bp, synthetic construct
  source 1..75: mol_type = other DNA
tcccacgtgaaatcgagttgcgccagaaacaatacgaatactaccgtgatttactgttcagtttcccaaaacctg

SEQ ID NO: 314042 - DNA, 75 bp, synthetic construct
  source 1..75: mol_type = other DNA
tataccttagacaaaaatgatttactcatggcaagaactggggcaacctttggtaaaacaatgatttttgaagaa

SEQ ID NO: 314043 - DNA, 75 bp, synthetic construct
  source 1..75: mol_type = other DNA
atacatgatccgaatggaatgacacttctttgctcccaatgcaatcaaaaaagagctcgtggtagactttcagca

SEQ ID NO: 314044 - DNA, 75 bp, synthetic construct
  source 1..75: mol_type = other DNA
gcagaaacaacccggcttaacgctgtgctggattacattgacgcagtgacggcaacagataccagcaccgcgccg

SEQ ID NO: 314045 - DNA, 75 bp, synthetic construct
  source 1..75: mol_type = other DNA
ctttctccggggattatctccgcgtaactgacaacaaggggaaaacgcacgatgtgctgaccggaagtgatgacg

SEQ ID NO: 314046 - DNA, 75 bp, synthetic construct
  source 1..75: mol_type = other DNA
gccgtttggggcgatggtgacatcagagagtagccagagtagcggcattgttgcggataatggtcaggtttacct

SEQ ID NO: 314047 - DNA, 75 bp, synthetic construct
  source 1..75: mol_type = other DNA
caaaagatgcaaaagtcgaaaaccagacgggggtgcgtaccgactggcgcggttatgccgtgctgccttatgcca

SEQ ID NO: 314048 - DNA, 75 bp, synthetic construct
  source 1..75: mol_type = other DNA
gttgagcgtcttgatatgttgtatgaaggggtcaggatgaaaggagataaagatctgctggaagttttgaaccgc

SEQ ID NO: 314049 - DNA, 75 bp, synthetic construct
  source 1..75: mol_type = other DNA
tgctggcaggactatccggtaatagttgacggtgatgaagcgcaggaggcggagaaaacaaacgcctgggaaaag

SEQ ID NO: 314050 - DNA, 75 bp, synthetic construct
  source 1..75: mol_type = other DNA
aagtgattatgccatccgactcggtggcgatgaattctgcatcattcttgtcgattcgacgccgcaaattgcagc

SEQ ID NO: 314051 - DNA, 75 bp, synthetic construct
  source 1..75: mol_type = other DNA
aaaaacgaagtacgtcgcgcttataatcgctcggtttatttagaaaaacgtaagcaactaatgaatgattggggg

SEQ ID NO: 314052 - DNA, 75 bp, synthetic construct
  source 1..75: mol_type = other DNA
atgttccgtcctttcagggctggtgaatatgctgacctgggtggtgttgccgggactgtgcagaatgtacatata

SEQ ID NO: 314053 - DNA, 75 bp, synthetic construct
  source 1..75: mol_type = other DNA
tatcgctgcacggatgatttctggtgtgctgaataatctgatgctgggcaggaatattgatgccacagtggcgca

SEQ ID NO: 314054 - DNA, 75 bp, synthetic construct
  source 1..75: mol_type = other DNA
cgatgatcctctttccgatgacgccggagcaaaagacgaaagtcgggacaccggtagttccgcgcagcaaggttg

SEQ ID NO: 314055 - DNA, 75 bp, synthetic construct
  source 1..75: mol_type = other DNA
gcaggagccgaatggctggaagaccgtcaccacacagtttgaaccgccccgggtttcctggagagtgttttatct

SEQ ID NO: 314056 - DNA, 75 bp, synthetic construct
  source 1..75: mol_type = other DNA
tgatcaggatggcaccctgagccgtcgcttcgggctgacctggataccggcagtggtgcgtcaggacgggagttc

SEQ ID NO: 314057 - DNA, 75 bp, synthetic construct
  source 1..75: mol_type = other DNA
ctcaaaatgggataaatggaacggcgatatggcgctcggctggacgcctgataaagataccctgattgaactgac

SEQ ID NO: 314058 - DNA, 75 bp, synthetic construct
  source 1..75: mol_type = other DNA
cacgttacgatattggtgtgtcgaaatacttaggaataacaaagaattacatttattattgctgaataaatgtgc

SEQ ID NO: 314059 - DNA, 75 bp, synthetic construct
  source 1..75: mol_type = other DNA
atggaaattgatttttcatactctcctgaaacgatagaacgaagattcgaaataattggatgcaaaactatttca

SEQ ID NO: 314060 - DNA, 75 bp, synthetic construct
  source 1..75: mol_type = other DNA
agaggcggaactctaaatatcaatattcctgggcgtagcgctcttcttttagggaaaacaggagaaccgctgaac

SEQ ID NO: 314061 - DNA, 75 bp, synthetic construct
  source 1..75: mol_type = other DNA
cagacttgttcgtcaacattcaaagcgaattggcgcgtttatgtggattaagcctcgtctggaaagttgtgatca

SEQ ID NO: 314062 - DNA, 75 bp, synthetic construct
  source 1..75: mol_type = other DNA
gctaaccgttttacggcaaatattaaaggtctgactcaggcttcccgtaacgcgaatgatggtatttctgttgcg

SEQ ID NO: 314063 - DNA, 75 bp, synthetic construct
  source 1..75: mol_type = other DNA
ggctctagcgggtacccagcctcaagcaggtaatttaaaggaagtcacaacggtgaaagggaagggggctattga

SEQ ID NO: 314064 - DNA, 75 bp, synthetic construct
  source 1..75: mol_type = other DNA
cagaccaccgaaggcgcgctgtccgaaatcaacaacaacttacagcgtgtgcgtgaactgacggtacaggccact

SEQ ID NO: 314065 - DNA, 75 bp, synthetic construct
  source 1..75: mol_type = other DNA
ttggataacctacaaaggaaagctaccaggaagaattactggttctctgaagactcctccggaatcacaacctta

SEQ ID NO: 314066 - DNA, 75 bp, synthetic construct
  source 1..75: mol_type = other DNA
tgatgcaactaagcttgcagtggctgctaaagatttagctcaagggaataagattgtctacgaaggtatcgaatt

SEQ ID NO: 314067 - DNA, 75 bp, synthetic construct
  source 1..75: mol_type = other DNA
tttcttctattcaggcagaaattactcaacgtctggaagaaattgaccgtgtatctgagcaaactcagtttaacg

SEQ ID NO: 314068 - DNA, 75 bp, synthetic construct
  source 1..75: mol_type = other DNA
cttcaactctacaaatgaaagtgggactcctcctactgcagcgacggaagtaactactgttggccgcgatgtaaa

SEQ ID NO: 314069 - DNA, 75 bp, synthetic construct
  source 1..75: mol_type = other DNA
ttatgacggcaccaacgcaactgcattcactgctaaaactgctacttatactgatgcttctggtaatactcagac

SEQ ID NO: 314070 - DNA, 75 bp, synthetic construct
  source 1..75: mol_type = other DNA
aaggtctgactcaggcttcccgtaacgcgaatgatggtatttctgttgcgcagaccactgaaggtgcgctttctg

SEQ ID NO: 314071 - DNA, 75 bp, synthetic construct
  source 1..75: mol_type = other DNA
aggttccgcaactgccaaccttggtgctgttagcttagtaaaactgcaggattccaagggtaatgataccgatac

SEQ ID NO: 314072 - DNA, 75 bp, synthetic construct
  source 1..75: mol_type = other DNA
ataagtattttactgaattaaaaagtaaattaacgcaaagtgagtttgaacaacttatgtttaccaatgcgaaaa

SEQ ID NO: 314073 - DNA, 75 bp, synthetic construct
  source 1..75: mol_type = other DNA
aagtgtccaacatgtcgaaagcgcagatcatccagcaggcaggtaactccgtgctgtctaaagcgaaccaggtac

SEQ ID NO: 314074 - DNA, 75 bp, synthetic construct
  source 1..75: mol_type = other DNA
cccgtttccatgattatggtctcttcagtgaactcacctggaatacttctgatttaagtaaggtcgtgggtggcg

SEQ ID NO: 314075 - DNA, 75 bp, synthetic construct
  source 1..75: mol_type = other DNA
tggcgcagcgctggcgattgttctgggcatcggtattcccggcgttcccgaaagcgggtttataccggcaaacgc

SEQ ID NO: 314076 - DNA, 75 bp, synthetic construct
  source 1..75: mol_type = other DNA
tatagagaaaggtgcgcttcatattagtcatgccgatatttatgaggctctagctttttccaaagcagcaggtag

SEQ ID NO: 314077 - DNA, 75 bp, synthetic construct
  source 1..75: mol_type = other DNA
cttcgcaacgcctgccgccggatcgctattttactgaaatcaccgttagccatcggatggaggttgtgaaagagt

SEQ ID NO: 314078 - DNA, 75 bp, synthetic construct
  source 1..75: mol_type = other DNA
gtcggtgcggtactgacgatattaaccttcctggtgcatatcacccttggcgtgtggtggtggaatatgctgatc

SEQ ID NO: 314079 - DNA, 75 bp, synthetic construct
  source 1..75: mol_type = other DNA
attccctggtggatggagacgacggggatgcacatttactggcgcaggatctgtccgcgtttcttattgctgaaa

SEQ ID NO: 314080 - DNA, 75 bp, synthetic construct
  source 1..75: mol_type = other DNA
cgacgtcgggcgttgtgctgtttgggattgcgctggtgtttaccttcaatgcgctggtgtccattatgcagtttg

SEQ ID NO: 314081 - DNA, 75 bp, synthetic construct
  source 1..75: mol_type = other DNA
cgctgttcctcgcccacatcgggctgatgcagtcagaactgcatctggtggtggtgatgttactgagtttgacgg

SEQ ID NO: 314082 - DNA, 75 bp, synthetic construct
  source 1..75: mol_type = other DNA
cggggaactcataagccccggcatcagttgcagccgcggacgcggtttatccccgctggcgcggggaactcgccc

SEQ ID NO: 314083 - DNA, 75 bp, synthetic construct
  source 1..75: mol_type = other DNA
tgctgtttaatacacaactgattttagtttttattatttttttgatattatcagttcttgacaggagaagaaaac

SEQ ID NO: 314084 - DNA, 75 bp, synthetic construct
  source 1..75: mol_type = other DNA
ctgatgctgccggggaaaggcgtaacgaaaaaacagcctccgttaccggatagcaagcaggctgaatgaagttta

SEQ ID NO: 314085 - DNA, 75 bp, synthetic construct
  source 1..75: mol_type = other DNA
ctgatgctgccggggaaaggcgtaacgaaaaaacagcctccgttaccggaaagcaagtaggctgaatggagttta

SEQ ID NO: 314086 - DNA, 75 bp, synthetic construct
  source 1..75: mol_type = other DNA
ctgatgctgccggggaaaggcgtaacgaaaaaacagcctccgttaccggaaagcaagaaggctgaatgtagttta

SEQ ID NO: 314087 - DNA, 75 bp, synthetic construct
  source 1..75: mol_type = other DNA
cgatttttgtactggaaggacttcttgagcagcagacagggctgaatccagttgagatcatgacagacacggcgg

SEQ ID NO: 314088 - DNA, 75 bp, synthetic construct
  source 1..75: mol_type = other DNA
tccgtaaagtcatcggcggcggaacaaaaacagatccagagccagctggatagcctggtgttgggtgaacattct

SEQ ID NO: 314089 - DNA, 75 bp, synthetic construct
  source 1..75: mol_type = other DNA
cgttatctgttctcttgatgggtatatcggctttaagttatgcggaccctcccgccggtaaagttcatttcaatg

SEQ ID NO: 314090 - DNA, 75 bp, synthetic construct
  source 1..75: mol_type = other DNA
aaataaaataaatagccaatctatttgcgaagataaagagttcgctggtttaatatgtaaggataatagtggcag

SEQ ID NO: 314091 - DNA, 75 bp, synthetic construct
  source 1..75: mol_type = other DNA
gagatgtctctgaacattgaggatggtaatgaagaaaagcaatctgtaagtggcaatgaagacagtgttttgcca

SEQ ID NO: 314092 - DNA, 75 bp, synthetic construct
  source 1..75: mol_type = other DNA
ttgcaaatgaagcctgctgtagatattcttcatgtactatctccatcagcatctactgctaagcatatcaatttt

SEQ ID NO: 314093 - DNA, 75 bp, synthetic construct
  source 1..75: mol_type = other DNA
tatcagagtgttgtcctgcgcctcggggatacattcgagaaccccagccttcgcacaacggctgaaagaaattat

SEQ ID NO: 314094 - DNA, 75 bp, synthetic construct
  source 1..75: mol_type = other DNA
atgatgatttatgaaaaattgaaagccatgagaaaggctgaggggctttcacaacaaaatgtatgtcaacttctt

SEQ ID NO: 314095 - DNA, 75 bp, synthetic construct
  source 1..75: mol_type = other DNA
aaccgcagaaatcgcggggcagatctccccgcctctctctcttgatggctcctgctcttcggagggcgttcagga

SEQ ID NO: 314096 - DNA, 75 bp, synthetic construct
  source 1..75: mol_type = other DNA
atgactaaaaatactagtttttcccccgaaatccgtcagcgggcgattcgtatggttctggaaagtcagagcgaa

SEQ ID NO: 314097 - DNA, 75 bp, synthetic construct
  source 1..75: mol_type = other DNA
caacgtgaacccggcgatctgttcgttattcgcaacgcgggcaatatcgtcccttcttacgggccagaacccggt

SEQ ID NO: 314098 - DNA, 75 bp, synthetic construct
  source 1..75: mol_type = other DNA
ttaaattccagcgcgaggcatttccgaagcgggaagccttatttaaacagctggcgacacagcaaagcccgcgca

SEQ ID NO: 314099 - DNA, 75 bp, synthetic construct
  source 1..75: mol_type = other DNA
gcaaactcatccatcggtgcgcctggcgctcgaagaggggcggatcgccctgcacggctgggtctacgacattga

SEQ ID NO: 314100 - DNA, 75 bp, synthetic construct
  source 1..75: mol_type = other DNA
acgcgcaaatgggcttacagggcgattcgtcagggctggccagcgttctcacagtggcttgaagcggtgatccag

SEQ ID NO: 314101 - DNA, 75 bp, synthetic construct
  source 1..75: mol_type = other DNA
cgggatgctacttgctcttgtcactggacaacgtttaagcgatatctgcaatttgaaattctctgatatctggga

SEQ ID NO: 314102 - DNA, 75 bp, synthetic construct
  source 1..75: mol_type = other DNA
taccgctctcgctacgctgcgagatgttggatattacactggcgcaggtgatcaagcgatgcagggatcgggtcg

SEQ ID NO: 314103 - DNA, 75 bp, synthetic construct
  source 1..75: mol_type = other DNA
tgtaactggtcatggtggccctcatggacttgatgcacagaaacctatcccaccaagccaattactgaaggcttt

SEQ ID NO: 314104 - DNA, 75 bp, synthetic construct
  source 1..75: mol_type = other DNA
cgatggctaacagcaaatcaccctacaagaaagaggcactagagcttctcgcgcaatcgcaacagcaaatccgtg

SEQ ID NO: 314105 - DNA, 75 bp, synthetic construct
  source 1..75: mol_type = other DNA
ccttgtcagacctgatttcaggcggttctgttgagatctattcctgtgattctgatacgaccaactgcctgagtg

SEQ ID NO: 314106 - DNA, 75 bp, synthetic construct
  source 1..75: mol_type = other DNA
tctgcatatcgaacaggaaaaaaccggcagcaaaatagccattcctctttctcttcgtttgaatgtaatcaactg

SEQ ID NO: 314107 - DNA, 75 bp, synthetic construct
  source 1..75: mol_type = other DNA
atggcagccagaccgcgtaagaataatgtttcagtccctaacttatatccgctttatagccgaaaggtaaataaa

SEQ ID NO: 314108 - DNA, 75 bp, synthetic construct
  source 1..75: mol_type = other DNA
cggaattgattggggtgatggaactccagcaactttccatgaacaaagatctttatctgagcgcctttataggga

SEQ ID NO: 314109 - DNA, 75 bp, synthetic construct
  source 1..75: mol_type = other DNA
ggattaatataccaaatctctattgcaagctggataagcgtaacagcaaaacctactggcaatatcgtcaccctt

SEQ ID NO: 314110 - DNA, 75 bp, synthetic construct
  source 1..75: mol_type = other DNA
aatttccgctgtcgtcggaaaccttcgtcctcaaccaaattaccgcgtttattgatatgggctttgaggtggaga

SEQ ID NO: 314111 - DNA, 75 bp, synthetic construct
  source 1..75: mol_type = other DNA
cacacatctccggtaaaatgcgcaaaaactacatccgcatcctaacgggcgacaaagtgactgttgaactgaccc

SEQ ID NO: 314112 - DNA, 75 bp, synthetic construct
  source 1..75: mol_type = other DNA
acgacgatgtgctgaaaaagatccgcactctggattgttcccctgagttttgtgcccgcaattttgcggagacat

SEQ ID NO: 314113 - DNA, 75 bp, synthetic construct
  source 1..75: mol_type = other DNA
ttgagcgagctttagaaggcataacatcagtctcggtacaaaaaaaaacaaatgacacatatactttaaaatccg

SEQ ID NO: 314114 - DNA, 75 bp, synthetic construct
  source 1..75: mol_type = other DNA
ttctcccagttagtccggaaatgctctatatatataagaggtgatgtatcacatacagatattgttgaattgggg

SEQ ID NO: 314115 - DNA, 75 bp, synthetic construct
  source 1..75: mol_type = other DNA
taaaaaaatacagaactataaatcactatccaaattaatgaaaggcttagccagtgagtgtatgtcaggattaag

SEQ ID NO: 314116 - DNA, 75 bp, synthetic construct
  source 1..75: mol_type = other DNA
cctcaaaaacaccatcatacactaaatcagtaagttggcagcatcaccctgaattaccaggccgcaccaatgctt

SEQ ID NO: 314117 - DNA, 75 bp, synthetic construct
  source 1..75: mol_type = other DNA
gcacaccgcgtggtgatgcaaccgtgctgattgttaacgataaaagtcaggttgaagcgcgccctgtcgttgcca

SEQ ID NO: 314118 - DNA, 75 bp, synthetic construct
  source 1..75: mol_type = other DNA
atacgcttctgccgggtatgtttgtgcgcgcccggattgatgaaggtgtacaacctgatgccattcttattccgc

SEQ ID NO: 314119 - DNA, 75 bp, synthetic construct
  source 1..75: mol_type = other DNA
gatgctcgacgacgcggatgtcttcctgttgccatcggtaacgggcgcggatggcgatatggaaggcattccggt

SEQ ID NO: 314120 - DNA, 75 bp, synthetic construct
  source 1..75: mol_type = other DNA
atgatccgcaaccaacatattgattctgcaatttcgggacgttacactgttccagcaccttataaagcgggggcc

SEQ ID NO: 314121 - DNA, 75 bp, synthetic construct
  source 1..75: mol_type = other DNA
tttggtgaccggtatttccacccctgtacgtctcaccaccaataaggtcgtggaaagccttggtggtgagttatt

SEQ ID NO: 314122 - DNA, 75 bp, synthetic construct
  source 1..75: mol_type = other DNA
atatcagcaactgttccgccgtggcgacctgatgctaccgataagcgatctgtgggccggaaggctgcaaaaaat

SEQ ID NO: 314123 - DNA, 75 bp, synthetic construct
  source 1..75: mol_type = other DNA
ccgcgaccgcaaactctatacgctcgatggcaagccgctggggcatgaaattccctacctacgcgggccgggaaa

SEQ ID NO: 314124 - DNA, 75 bp, synthetic construct
  source 1..75: mol_type = other DNA
agcgcccgcaacgccgctggaaatcatctccgtcgcacgcttaaccgaaaaaaaggcctgcatgtggcgatcgaa

SEQ ID NO: 314125 - DNA, 75 bp, synthetic construct
  source 1..75: mol_type = other DNA
gcattacggcgaagttccaccagggtataaccctgctcttgcaacgaagcaacccagaaggaaaattagccgtca

SEQ ID NO: 314126 - DNA, 75 bp, synthetic construct
  source 1..75: mol_type = other DNA
tgcgcgccgaaggtgaaacgctcgcgacgcagcagattaaactgcgcgacgttgcaccgaacagcgaagccccct

SEQ ID NO: 314127 - DNA, 75 bp, synthetic construct
  source 1..75: mol_type = other DNA
gtggtcagcggggatcttccgcgatgtttatctgatcggaaaacaactaacacatattaacgatttcaccgttcg

SEQ ID NO: 314128 - DNA, 75 bp, synthetic construct
  source 1..75: mol_type = other DNA
tctggtataaattcggcggcgactacggcgactatcccaacaactataacttctgtcttgatggtttgatctatt

SEQ ID NO: 314129 - DNA, 75 bp, synthetic construct
  source 1..75: mol_type = other DNA
acagcagcgccattgatcatctggcaattgaaaaactgaccagcgccagctttgcttttactgtcgaacagccgc

SEQ ID NO: 314130 - DNA, 75 bp, synthetic construct
  source 1..75: mol_type = other DNA
tgctataaccacgctggaatatactctgtttgatggcgagcgcgtggtgcacagcagcgctattgatcatctgat

SEQ ID NO: 314131 - DNA, 75 bp, synthetic construct
  source 1..75: mol_type = other DNA
gacgccactctgtcctgcgaagtggtactggaaaatctcgccgcctcccctgctataaccacgctggaatatact

SEQ ID NO: 314132 - DNA, 75 bp, synthetic construct
  source 1..75: mol_type = other DNA
aaaactctgactcgcctcgcgcaggagtatgaaatcccgctggcgcagaccgtggcgcggggggggggggggggg

SEQ ID NO: 314133 - DNA, 75 bp, synthetic construct
  source 1..75: mol_type = other DNA
ggtaaccgaacgggcgatgcgcggcgaactcgattttaccgccagcctgcgcagccgtgtggcgacgctgaaagg

SEQ ID NO: 314134 - DNA, 75 bp, synthetic construct
  source 1..75: mol_type = other DNA
tgtattgacgaaattgccaaactggccggaaccggcgagatggtggcggaagtaaccgagcgggcgatgcgcggc

SEQ ID NO: 314135 - DNA, 75 bp, synthetic construct
  source 1..75: mol_type = other DNA
gggtaacggacctggcgggctgacggaataccagaacgtcttctataagcacgattgcattcaggggcattatgt

SEQ ID NO: 314136 - DNA, 75 bp, synthetic construct
  source 1..75: mol_type = other DNA
cccgcgaaaccagcagcctgtttctgcctttaagcggtcagtggaatttccatttttttgatcatccgctgcaag

SEQ ID NO: 314137 - DNA, 75 bp, synthetic construct
  source 1..75: mol_type = other DNA
ccaacgatatgcgtgactacgcagagcttctggacaaggttgagtctgttctgatccctgcttatgcagagaaaa

SEQ ID NO: 314138 - DNA, 75 bp, synthetic construct
  source 1..75: mol_type = other DNA
ccgtgcatcggtttcaccatggggattaacggcgaatacgaccaggtggcgtattacggacgcgggccgggcgaa

SEQ ID NO: 314139 - DNA, 75 bp, synthetic construct
  source 1..75: mol_type = other DNA
tctgattaacagcgaacttgatattccaggcctgagcgcagcccgtaaagctatgcgtatgcaaaaaaataatgc

SEQ ID NO: 314140 - DNA, 75 bp, synthetic construct
  source 1..75: mol_type = other DNA
tttgcggccaggtcgcaacaccgtttcgcgccgatgtgttcatcgctcattttggtccagcgggggtaaccgcag

SEQ ID NO: 314141 - DNA, 75 bp, synthetic construct
  source 1..75: mol_type = other DNA
atatcagcaactgtttcgccgtggcgacctgatgttaccgataagcgatctgtgggccggaaggctgcaaaaaat

SEQ ID NO: 314142 - DNA, 75 bp, synthetic construct
  source 1..75: mol_type = other DNA
tgattgatgttttcaaagaggcgcagcactacggagaagtacctcctggctataacccagcattagccactaaac

SEQ ID NO: 314143 - DNA, 75 bp, synthetic construct
  source 1..75: mol_type = other DNA
tgatggatgctgaaacatggctgacggctgaggaagcgaaagaaaaaggatttattgatgaaatttatccggcag

SEQ ID NO: 314144 - DNA, 75 bp, synthetic construct
  source 1..75: mol_type = other DNA
gcctcacagattggctttatcccgaatcagacgggaaccgggctggaaatgaaagccattgccgcctgcgtgctg

SEQ ID NO: 314145 - DNA, 75 bp, synthetic construct
  source 1..75: mol_type = other DNA
caataggtctggcgcgggtgtttgcggtttctggttcgttgggcgtggaactgtttgatggcgaagatccatttg

SEQ ID NO: 314146 - DNA, 75 bp, synthetic construct
  source 1..75: mol_type = other DNA
tgctccgtgaagagttcgagcaatttccggcggagaaaatcgaggccgtttgtcatgccattgccgctcacagtt

SEQ ID NO: 314147 - DNA, 75 bp, synthetic construct
  source 1..75: mol_type = other DNA
gttgtctgagcataatgcggttaagctgatgtttgatgttaatagccttgatattgtcaagcggggtgagatgtt

SEQ ID NO: 314148 - DNA, 75 bp, synthetic construct
  source 1..75: mol_type = other DNA
atctccgtcgcacgcttaaccgagaaaaaaggcctgcatgtggcgatcgaagcctgccgtcagttgaaagagcag

SEQ ID NO: 314149 - DNA, 75 bp, synthetic construct
  source 1..75: mol_type = other DNA
ctgtttgatggcgaagatccgttcgcacagcatcgcccgcttgatgataaacgctacgcgctggatcatttccag

SEQ ID NO: 314150 - DNA, 75 bp, synthetic construct
  source 1..75: mol_type = other DNA
ctaaaatcgtccaggatgcggatcggctggaagccctgggggcgattggcctggcgcgcgtgtttgccgtttcag

SEQ ID NO: 314151 - DNA, 75 bp, synthetic construct
  source 1..75: mol_type = other DNA
tgccgtgggatacttttttgacctggcgttgcagacagcggtgccgggcatgaagtcagtgaaggattttatgca

SEQ ID NO: 314152 - DNA, 75 bp, synthetic construct
  source 1..75: mol_type = other DNA
agatttccgctttgttaagcagtatccagaataaagcagtggctgatgaaaaactgacggatcaggagaaagggt

SEQ ID NO: 314153 - DNA, 75 bp, synthetic construct
  source 1..75: mol_type = other DNA
gtgaaatcctggtatctgcttgctggtcagggaagtgatacaatcgaagtcgcttatctcgatggtattgatacc

SEQ ID NO: 314154 - DNA, 75 bp, synthetic construct
  source 1..75: mol_type = other DNA
gcgtaaggttcgcgccggggcggaatataaatatgtcaccattaaagatcgcggtgagccgattgcactggccac

SEQ ID NO: 314155 - DNA, 75 bp, synthetic construct
  source 1..75: mol_type = other DNA
gcgctgatgtatggcggacaggccactatctttggctgtacatccacgggggactgtctcaagacacgcaaccgc

SEQ ID NO: 314156 - DNA, 75 bp, synthetic construct
  source 1..75: mol_type = other DNA
gcgctgcagactgccgtaccggggatgaaacaggttaaggattttatgcagaagctggccagcgacctcaacaac

SEQ ID NO: 314157 - DNA, 75 bp, synthetic construct
  source 1..75: mol_type = other DNA
ggttctgctgaaagatggttcccgaattgattatgacacgcttgtcgttgccactggggccacgcacgcttattt

SEQ ID NO: 314158 - DNA, 75 bp, synthetic construct
  source 1..75: mol_type = other DNA
tgccgagcgctggaagccctggcgttcttatgcgctgttgcatatctggtatacggaaggctggcaaccagacga

SEQ ID NO: 314159 - DNA, 75 bp, synthetic construct
  source 1..75: mol_type = other DNA
acagcgatttccgggaatgacaccggcacaaatccgccgttatgccgagcgctggaagccctggcgttcttatgc

SEQ ID NO: 314160 - DNA, 75 bp, synthetic construct
  source 1..75: mol_type = other DNA
aaagcctgaaaggatagcgcccagcgaatctgtagctaataccgccccggctgaaaatgaaaccgaggagaagaa

SEQ ID NO: 314161 - DNA, 75 bp, synthetic construct
  source 1..75: mol_type = other DNA
gacggcgatgatgaagagagtaatagcgccagtgatcttgaggcgtatgccgctatgatggcctttggcggtgaa

SEQ ID NO: 314162 - DNA, 75 bp, synthetic construct
  source 1..75: mol_type = other DNA
gtcattatcggaatatacccgtcagtccctggagaaactgggagtggaagtcagttttggccaaccggtaacgga

SEQ ID NO: 314163 - DNA, 75 bp, synthetic construct
  source 1..75: mol_type = other DNA
tattctgcgggcaattatggaaggggggaccgccagagtttatcactgcaacgattctgataaatgcctgaaagt

SEQ ID NO: 314164 - DNA, 75 bp, synthetic construct
  source 1..75: mol_type = other DNA
tgtcagtaaagcgaaggaagatatttcctcaattaacgtaaaagtatcaacgcttcagactgatatggacagtgc

SEQ ID NO: 314165 - DNA, 75 bp, synthetic construct
  source 1..75: mol_type = other DNA
cacattacaaagtgcggcaaacaaaataaaaagtgcttttggcgctattctggcaagtggtgttttagcggtcat

SEQ ID NO: 314166 - DNA, 75 bp, synthetic construct
  source 1..75: mol_type = other DNA
aaaatgatccgcaacgcgcatctgaagcgggtaaaaaaggcggtcaacaaagcggtggtaataaatcaggcaaat

SEQ ID NO: 314167 - DNA, 75 bp, synthetic construct
  source 1..75: mol_type = other DNA
gtacaggtcgcaatgcgaaaatgacaggcgtgactggggattctaaggattgattgccgaggaagtgggagaaat

SEQ ID NO: 314168 - DNA, 75 bp, synthetic construct
  source 1..75: mol_type = other DNA
cgcttcagactgatatggacagtgcaaagcaggatatcagtaccagatacacaaaaacagaagtggataataagc

SEQ ID NO: 314169 - DNA, 75 bp, synthetic construct
  source 1..75: mol_type = other DNA
agcttttgaggctggccggcgctacgccaacacagcatacctggtggatttacaggaaatgcagggggataacct

SEQ ID NO: 314170 - DNA, 75 bp, synthetic construct
  source 1..75: mol_type = other DNA
atgtagggacaggggcgaatcagatacctgatatgggtagcttcacgctttctgtttcaggtactggatatcaaa

SEQ ID NO: 314171 - DNA, 75 bp, synthetic construct
  source 1..75: mol_type = other DNA
atgccatttgcttgttatttctgcattttcataaacgttggtttgggagaagtggcaaagaggaatgtggggaca

SEQ ID NO: 314172 - DNA, 75 bp, synthetic construct
  source 1..75: mol_type = other DNA
ttatgagtaacgcgatggggtacttttttgaccttgccctgcagacaacggtgcccgaaatcaaaaccgcgaaag

SEQ ID NO: 314173 - DNA, 75 bp, synthetic construct
  source 1..75: mol_type = other DNA
ccacggcagcagctccaacgagcaggatcctcgtcgcttgccaaaaggcttaacgccgcagacgttacgcacgct

SEQ ID NO: 314174 - DNA, 75 bp, synthetic construct
  source 1..75: mol_type = other DNA
gatcatggcaaccttgttgcagccgatctaagtattgaagggctggatattgcacgtaaggcaatgctgctgcaa

SEQ ID NO: 314175 - DNA, 75 bp, synthetic construct
  source 1..75: mol_type = other DNA
ttttgaacatatcagtaattcagcgtggcgtgtggcaaccagtgatatctcatatcaatacagattcagttatat

SEQ ID NO: 314176 - DNA, 75 bp, synthetic construct
  source 1..75: mol_type = other DNA
ggcattaaaagcgttaggcatgccgttgaaacgggcagaggcactgattcactggcaaatgcggcgctggagggc

SEQ ID NO: 314177 - DNA, 75 bp, synthetic construct
  source 1..75: mol_type = other DNA
gcctggctgaaagaaaaaggggcatttgaccagccttactggatgatgaaggcatcactgcttgcgtcaatgaat

SEQ ID NO: 314178 - DNA, 75 bp, synthetic construct
  source 1..75: mol_type = other DNA
agaaagcgaaaaacggtgatgatatcccggataaggtgaagtttctgaacaccgtgggagcagccagagtatacg

SEQ ID NO: 314179 - DNA, 75 bp, synthetic construct
  source 1..75: mol_type = other DNA
cggctcagacgcattacaaatacggtacgtcagggttttttgctgggtgataccaatgagcagatcgcaagaaaa

SEQ ID NO: 314180 - DNA, 75 bp, synthetic construct
  source 1..75: mol_type = other DNA
acacaccggccttccataacacgccggtttttctcgaggccgaagaacctcttgctgaatacgcacctggtatgc

SEQ ID NO: 314181 - DNA, 75 bp, synthetic construct
  source 1..75: mol_type = other DNA
tgtcagaaccgtcattacagacggtgacacttcggactattaaggggagttacgggacatttttctgggaagcga

SEQ ID NO: 314182 - DNA, 75 bp, synthetic construct
  source 1..75: mol_type = other DNA
gcctggctgaaagaaaagggggcatttgaccagccttactggatgatgaaggcatcactgcctgcggaatttaat

SEQ ID NO: 314183 - DNA, 75 bp, synthetic construct
  source 1..75: mol_type = other DNA
ttactacaggccgctgcagatgacgtttgatggctctcactggcgcaccgttggtgttggtgagtatgtgtcgtc

SEQ ID NO: 314184 - DNA, 75 bp, synthetic construct
  source 1..75: mol_type = other DNA
tagtgattacatattcttgatgatcgcatcaccaaactctgaacatttcagcagtttagcgccttccatcagacg

SEQ ID NO: 314185 - DNA, 75 bp, synthetic construct
  source 1..75: mol_type = other DNA
atttgaaattctctgatatctgggacgacatgttgcacattactcaggaaaaaaccggttcaaaacttgctattc

SEQ ID NO: 314186 - DNA, 75 bp, synthetic construct
  source 1..75: mol_type = other DNA
tctggttggtatctcttctgatgcactttacgccgctgcaatggcgcgaccattccagggacgactgctcagtga

SEQ ID NO: 314187 - DNA, 75 bp, synthetic construct
  source 1..75: mol_type = other DNA
gtactacaccacagtgtcgaatcagggatcgcctcaaatatacgctggataataaacctattggtcacaaagtgc

SEQ ID NO: 314188 - DNA, 75 bp, synthetic construct
  source 1..75: mol_type = other DNA
caaccgggccacagggagcaaaaggggataaaggtgatcccggccctcagggaccaaagggggatactggcgctc

SEQ ID NO: 314189 - DNA, 75 bp, synthetic construct
  source 1..75: mol_type = other DNA
ggtttttctcgaggccgaagaacctcttgctgaatacgcacctggtatgcgaactccggcttaccggcaaataat

SEQ ID NO: 314190 - DNA, 75 bp, synthetic construct
  source 1..75: mol_type = other DNA
ggctacgagcaggtcgaagtgaccaaagcctctggcgataaaggcgtggacgtgattggtcaggtgcaggtcggc

SEQ ID NO: 314191 - DNA, 75 bp, synthetic construct
  source 1..75: mol_type = other DNA
tttattcagaacacgccagccttccataacacaccgatgcttctggaagccgaagaaccccttgccgaatacgca

SEQ ID NO: 314192 - DNA, 75 bp, synthetic construct
  source 1..75: mol_type = other DNA
cgtcagcaaatcaagcgcatgatccacgacctggaagcgaccggcattcgcaaaattctgcaaattgaactggcg

SEQ ID NO: 314193 - DNA, 75 bp, synthetic construct
  source 1..75: mol_type = other DNA
atgtataccctgaactggcagccgccgtatgactggtcgtggatgttgggatttctcgccgcccgtgcggtgagc

SEQ ID NO: 314194 - DNA, 75 bp, synthetic construct
  source 1..75: mol_type = other DNA
atgacggaagatttatttggtgatttgcaggatgacaccatcctggcacatcttgacaatcccgcagaggatacg

SEQ ID NO: 314195 - DNA, 75 bp, synthetic construct
  source 1..75: mol_type = other DNA
ggcaaatcatcagtgcaatagacaacatgactcacagtgagcaggaaaaagttgcgcaatttttgtcacgcgaag

SEQ ID NO: 314196 - DNA, 75 bp, synthetic construct
  source 1..75: mol_type = other DNA
atgctcagttatcgccacagctttcacgctggcaaccacgccgacgtccttaaacataccgttcagagcctgatc

SEQ ID NO: 314197 - DNA, 75 bp, synthetic construct
  source 1..75: mol_type = other DNA
gatggggcctccggggaaagatggcgcaacttcgctggttagtgggctgcgtatcggagggaagaaagaagtcgc

SEQ ID NO: 314198 - DNA, 75 bp, synthetic construct
  source 1..75: mol_type = other DNA
acaggccccgctggtccgcggggagcgcagggaccgaaaggggagaaaggcgaccccggtcccagaggtgagcgt

SEQ ID NO: 314199 - DNA, 75 bp, synthetic construct
  source 1..75: mol_type = other DNA
gtttaatccttatcgacccgccgtatgaaatgaaaacggattatcaggcggtggtcagcggcatcaacgaggggt

SEQ ID NO: 314200 - DNA, 75 bp, synthetic construct
  source 1..75: mol_type = other DNA
tatctggcagcaagacgatttgcctgcagagctggaggcgtacatcaatgtggtaaaacactttaaccgtagcgg

SEQ ID NO: 314201 - DNA, 75 bp, synthetic construct
  source 1..75: mol_type = other DNA
ttgctgcgttctgaatttcagaaagacagccgtgcgcgcgtagaaaaagccgacggcttcctgcagcttaaagct

SEQ ID NO: 314202 - DNA, 75 bp, synthetic construct
  source 1..75: mol_type = other DNA
tgaaataaagacaatcacacatccgcacttcggtgataaaccggtaaaggtgttcgcgataaaggtaaatattga

SEQ ID NO: 314203 - DNA, 75 bp, synthetic construct
  source 1..75: mol_type = other DNA
gtggctaacctgcaacttgccgtaaaaggtgaatacttcgatgccatgattcgtggcgagaaaaccgaggagtat

SEQ ID NO: 314204 - DNA, 75 bp, synthetic construct
  source 1..75: mol_type = other DNA
tgaaatcaagacaatcacacatccccacttcggtgataaaccggtaaaggtatacgcgataaaggtaaatatcgg

SEQ ID NO: 314205 - DNA, 75 bp, synthetic construct
  source 1..75: mol_type = other DNA
aaggtgaatacttcgatgccatgattcgaggagagaaaacggaagagtatcgactgtgtaatgactactgggata

SEQ ID NO: 314206 - DNA, 75 bp, synthetic construct
  source 1..75: mol_type = other DNA
tgaaatcaagacaatcacacatccgcacttcggcgataaaccggtaaaggtttacgcgataaaggtaaatatcgg

SEQ ID NO: 314207 - DNA, 75 bp, synthetic construct
  source 1..75: mol_type = other DNA
acgattccagccgcagagttgatgttccgtatgacggatatgaagtgaagacaatcacacatccgcacttcggtg

SEQ ID NO: 314208 - DNA, 75 bp, synthetic construct
  source 1..75: mol_type = other DNA
ccgaagcgcgacgattccagtcgcagaattgatgttccgtatggcggatatgaaataaacacaatcacacatccc

SEQ ID NO: 314209 - DNA, 75 bp, synthetic construct
  source 1..75: mol_type = other DNA
tgaaatcaagacaatcacacatacacacttcggagataaaccggtaaaggtgttcgcgataaaggtgaatatcgg

SEQ ID NO: 314210 - DNA, 75 bp, synthetic construct
  source 1..75: mol_type = other DNA
atggctaacctgcaacttgccgtcaaaggtgaatacttcgatgccatgattcgtggagagaaaacagaagaatat

SEQ ID NO: 314211 - DNA, 75 bp, synthetic construct
  source 1..75: mol_type = other DNA
acccaaaactctctgatggtaagacgttattccacgcagaccacaagaacctggccaccggtgctatttccgtta

SEQ ID NO: 314212 - DNA, 75 bp, synthetic construct
  source 1..75: mol_type = other DNA
ctattgccattggtgatgtgaatattactaaatcgcttgaggacgctgttaacgcgcttaatacatcaagtttag

SEQ ID NO: 314213 - DNA, 75 bp, synthetic construct
  source 1..75: mol_type = other DNA
catcagcaaataaggccagcacagccagcgcagttgctgctttggtgatgcgccgcgcgataaatgcactctatc

SEQ ID NO: 314214 - DNA, 75 bp, synthetic construct
  source 1..75: mol_type = other DNA
cctcctgattatcacaaagggatatccgaagcgcgacgattccagtcgcagaattgatgttccgtatggtggata

SEQ ID NO: 314215 - DNA, 75 bp, synthetic construct
  source 1..75: mol_type = other DNA
tgttgaagttatcaaaaaaaaatctctgcaatttttgactgttataatattgactctgtttatatatggggtgat

SEQ ID NO: 314216 - DNA, 75 bp, synthetic construct
  source 1..75: mol_type = other DNA
gtgaaaataaataacaacaaaataaaatcatttattttttttatatcaatatttctttactttttcaaaagtgtt

SEQ ID NO: 314217 - DNA, 75 bp, synthetic construct
  source 1..75: mol_type = other DNA
gctccaaccgccggccgcgcgctgggccgaggccgtggcgcgtgtcggcgtaccggccgtcgtcacacgcgctac

SEQ ID NO: 314218 - DNA, 75 bp, synthetic construct
  source 1..75: mol_type = other DNA
attagattacacagcggttactttactgaataatcaacgagttggtaatgtaaaacagagctgtgaatatgacag

SEQ ID NO: 314219 - DNA, 75 bp, synthetic construct
  source 1..75: mol_type = other DNA
ggatctggagaataatactgtagttgccctggtgttagacgcaaattattaccgtgatgcacagacgctggagaa

SEQ ID NO: 314220 - DNA, 75 bp, synthetic construct
  source 1..75: mol_type = other DNA
gtttctgggactttgtcggaagaaggctgttttgattcactcgaattactggatctggaaaataataccgtggtc

SEQ ID NO: 314221 - DNA, 75 bp, synthetic construct
  source 1..75: mol_type = other DNA
agtggttgaaatcgcacaccattccactcttcactgcagatcacaatgctatcgttgagtgggcaaaaacaattc

SEQ ID NO: 314222 - DNA, 75 bp, synthetic construct
  source 1..75: mol_type = other DNA
cgactggaaacctcacactgtgaatgaaaagtttgatggtgggtggcgtccatcaattcacatgccgcgatgggc

SEQ ID NO: 314223 - DNA, 75 bp, synthetic construct
  source 1..75: mol_type = other DNA
cggtaacgttggtgatcgcatatgggtacgtgaagcgtgggcgatattaggcaatgaggatggttgcagtgtgga

SEQ ID NO: 314224 - DNA, 75 bp, synthetic construct
  source 1..75: mol_type = other DNA
ttaagagcatcgttagtaagtgacgattcacgtatacttttaatgtccgctccttcagaggaggagcatggacac

SEQ ID NO: 314225 - DNA, 75 bp, synthetic construct
  source 1..75: mol_type = other DNA
taaagccattaagctgagtgctgaggattcaccatttattacccaagaatatcttgatcattttgccgaaaggta

SEQ ID NO: 314226 - DNA, 75 bp, synthetic construct
  source 1..75: mol_type = other DNA
atcagatatgccgaagacaatgcgcttttcgatgcctgatggtagtgaatggacaatgccattacgagtgatagc

SEQ ID NO: 314227 - DNA, 75 bp, synthetic construct
  source 1..75: mol_type = other DNA
ccgaagcgcgacgattccagtcgcagaattgatgttccgtatgacggatatgaagtgaagacaatcacacatcca

SEQ ID NO: 314228 - DNA, 75 bp, synthetic construct
  source 1..75: mol_type = other DNA
ctgcgttccgcactttatcccattattggcgagcgcatatacggacctgtaggccatgcggttgatattttcgcc

SEQ ID NO: 314229 - DNA, 75 bp, synthetic construct
  source 1..75: mol_type = other DNA
ttaatgcctgcattaatagcaaatagctcagtgactcgctctctaatgtcattatttggttccaaaaaaatttct

SEQ ID NO: 314230 - DNA, 75 bp, synthetic construct
  source 1..75: mol_type = other DNA
gtcagtgacagagccgggaattttcagcgggatcatcgatatgccagctggcggtggtcatatcaccctgagttt

SEQ ID NO: 314231 - DNA, 75 bp, synthetic construct
  source 1..75: mol_type = other DNA
gcagcttccaacttgataacggctggcggtttaataaagaggctttattgtatacacctaaggatcataaagatg

SEQ ID NO: 314232 - DNA, 75 bp, synthetic construct
  source 1..75: mol_type = other DNA
tttcgtctgattcgccagcataccgtgacgccgattgcggtcggtgaagtgtttaacagtatctgggactgcaaa

SEQ ID NO: 314233 - DNA, 75 bp, synthetic construct
  source 1..75: mol_type = other DNA
gcggcgctgcactttgatctgtgggtccccaatttcggtgtccaggaatacatgggttattccgaacaaatgctc

SEQ ID NO: 314234 - DNA, 75 bp, synthetic construct
  source 1..75: mol_type = other DNA
ggataaagccagctcttataatgggccgattttacacgcagataaacaatcagtatatcagcaggtaggtaagca

SEQ ID NO: 314235 - DNA, 75 bp, synthetic construct
  source 1..75: mol_type = other DNA
gttcttgtcatgaacggccagcgcgtgctgcaaagcgaagaagcaggcaaatggaaaaatgacaacgttgataaa

SEQ ID NO: 314236 - DNA, 75 bp, synthetic construct
  source 1..75: mol_type = other DNA
tttatccgggcacagatactctcatcaatactgccgggatcagggataaaaatttactggaagagtttgagcgcg

SEQ ID NO: 314237 - DNA, 75 bp, synthetic construct
  source 1..75: mol_type = other DNA
aaaaagtaaccgcctcaattgaagaggcgaccagcaaattcaacgccaaggctgaggatgctcttaaggaggcgc

SEQ ID NO: 314238 - DNA, 75 bp, synthetic construct
  source 1..75: mol_type = other DNA
ttcggggcgttggttggtgaaagagttaatttttttattgtaaataaaataccaataagattaataacgatcata

SEQ ID NO: 314239 - DNA, 75 bp, synthetic construct
  source 1..75: mol_type = other DNA
tcgccaacataccgtcacacccatcgcggtgggtgaagtcttcaacagcatctgggactgcaaacaactgattga

SEQ ID NO: 314240 - DNA, 75 bp, synthetic construct
  source 1..75: mol_type = other DNA
cagccatttctgccattgatatggcgttgtgggatatcaaagctaaagcggcaaatatgccattgtatcaactgc

SEQ ID NO: 314241 - DNA, 75 bp, synthetic construct
  source 1..75: mol_type = other DNA
atcacacatccgcactttggcgataaaccggtaatggtgttcgctcttagggtaaataccagcactgaatgtcaa

SEQ ID NO: 314242 - DNA, 75 bp, synthetic construct
  source 1..75: mol_type = other DNA
atcacacatccgcactttggcgataaaccggtaatggtgttcgctcttacggtaaatagcagcactgaatgtcaa

SEQ ID NO: 314243 - DNA, 75 bp, synthetic construct
  source 1..75: mol_type = other DNA
atcacacatccgcactttggcgataaaccggtaaaggtgttcgctcttatggtaaataacagcactgaatgtcaa

SEQ ID NO: 314244 - DNA, 75 bp, synthetic construct
  source 1..75: mol_type = other DNA
tgttcgctataaaggtgaatatcagcactgaatatcaatccgcacaacacaaggtcaagaatgttcagagtgatt

SEQ ID NO: 314245 - DNA, 75 bp, synthetic construct
  source 1..75: mol_type = other DNA
atcacacatccgcactttggcgataaaccggtaagggtgttcgctcttacggtaaatatcagcactgaatgtcaa

SEQ ID NO: 314246 - DNA, 75 bp, synthetic construct
  source 1..75: mol_type = other DNA
atcacacatccgcactttggcgataaaccggtaacggtgttcgctcttagggtaaatatcagcactgaatgtcaa

SEQ ID NO: 314247 - DNA, 75 bp, synthetic construct
  source 1..75: mol_type = other DNA
tgatggtgaccatgcgacctgaaatgcccctgcagggcgcggctgcggttctggctgacaccctgcctgcggtgg

SEQ ID NO: 314248 - DNA, 75 bp, synthetic construct
  source 1..75: mol_type = other DNA
atggctaacctgcaacttgccgttaaaggtgaatacttcgatgccatgattcgcggggagaaaacggaagagtat

SEQ ID NO: 314249 - DNA, 75 bp, synthetic construct
  source 1..75: mol_type = other DNA
gcggcgctgcattttgacctctgggtgccaaactttggcgttcaggagtacatgggctattccgaacaaatgctt

SEQ ID NO: 314250 - DNA, 75 bp, synthetic construct
  source 1..75: mol_type = other DNA
tgggcaaccgggatatggctgacacactggcccgcattgccgccgcaggtggtcgtgcggttctgtccggtgaca

SEQ ID NO: 314251 - DNA, 75 bp, synthetic construct
  source 1..75: mol_type = other DNA
cggcttgcctccctcagtgatgcgtatgtggcgctctcaaggatgaagcagcatgtgcaggtgtataccgatgat

SEQ ID NO: 314252 - DNA, 75 bp, synthetic construct
  source 1..75: mol_type = other DNA
gtgcagatttatacgtcactgtcagaagaagacgcacatgcgcgtcttgcccgttctccactgtaccggcaggcc

SEQ ID NO: 314253 - DNA, 75 bp, synthetic construct
  source 1..75: mol_type = other DNA
gaagtgatggcgtggtttaccgtatcaccacctcactgaccggtaaggccggtacgctgaatgtcagtgtggaag

SEQ ID NO: 314254 - DNA, 75 bp, synthetic construct
  source 1..75: mol_type = other DNA
tgtctatgccccggcgacagggactcatacgggtgtgtggcacccggcaggcaatgagcagggacccgctgcaac

SEQ ID NO: 314255 - DNA, 75 bp, synthetic construct
  source 1..75: mol_type = other DNA
gcaatgagcagggacccgccgcaacgacggagagcgcgtgcgcgaaacggcgttgccccttacatcccggcggcc

SEQ ID NO: 314256 - DNA, 75 bp, synthetic construct
  source 1..75: mol_type = other DNA
gcgccaaaggcaaagccggtaaatccacggatttatatatcaccgaagacagccgaactgaaacaggctattact

SEQ ID NO: 314257 - DNA, 75 bp, synthetic construct
  source 1..75: mol_type = other DNA
cggtgatgttcagcgggtggcggattatatccgcagtcatgatgatccggcgaccggccagcctgtcggacagcc

SEQ ID NO: 314258 - DNA, 75 bp, synthetic construct
  source 1..75: mol_type = other DNA
ttctggggtgtcatgcgtaaacccgcctcacggggtgacgggccggttcagctgatgctgaccacggatgcgggg

SEQ ID NO: 314259 - DNA, 75 bp, synthetic construct
  source 1..75: mol_type = other DNA
taagcaggagaacaacaaaacagacagtaatgagagcatcagaaaaaagaagagcagtagcagtagcagtagcag

SEQ ID NO: 314260 - DNA, 75 bp, synthetic construct
  source 1..75: mol_type = other DNA
gtttttgcctgcttttgggcaaaaacttttgtgggatgtgcatttcacccctggactggcggagacggttgtggc

SEQ ID NO: 314261 - DNA, 75 bp, synthetic construct
  source 1..75: mol_type = other DNA
atggcaccggacacaacaacgggcagggacccgccgcaacgacgtgaagcgcggtttgcgaaacggcgttgcccc

SEQ ID NO: 314262 - DNA, 75 bp, synthetic construct
  source 1..75: mol_type = other DNA
agatggcgaaccttatgcggttgaagccagtgagttcgtgaaaccgggtaaaggtcaggcattcgctcgcgttaa

SEQ ID NO: 314263 - DNA, 75 bp, synthetic construct
  source 1..75: mol_type = other DNA
gacagtcagtgcggcaggttgtggctgtatcagcccccggcgacaggggcttaaacaggtgcagggcaccggaca

SEQ ID NO: 314264 - DNA, 75 bp, synthetic construct
  source 1..75: mol_type = other DNA
ttgacgttttgcggggacctgccttttgtttcctccagtattcaccatcacctgtttgagaaccttcgccgcaag

SEQ ID NO: 314265 - DNA, 75 bp, synthetic construct
  source 1..75: mol_type = other DNA
acgctacaggcgacgattcaggatggcgttatctggttatcggatgacaggaataatctggaagtgaacttaact

SEQ ID NO: 314266 - DNA, 75 bp, synthetic construct
  source 1..75: mol_type = other DNA
gctggctgcaggatgagccatccggaaaagtgaacaagctgcgctaccgtgccagccagaccttacgcgggctcc

SEQ ID NO: 314267 - DNA, 75 bp, synthetic construct
  source 1..75: mol_type = other DNA
gagctagtggtgaaacgcgcccgtgaaaaagtcgaacacgaatttaatcagcgggtgataaatcaacggctagcc

SEQ ID NO: 314268 - DNA, 75 bp, synthetic construct
  source 1..75: mol_type = other DNA
caaaactgcgtgaactgggggtcatcaatggcaaaattgccactgtctttcacggtattgatatctccagccggg

SEQ ID NO: 314269 - DNA, 75 bp, synthetic construct
  source 1..75: mol_type = other DNA
ctggggaaaattccacatttgcgtacgccggggctgctggtaatggacatggactctacagccatccagattgaa

SEQ ID NO: 314270 - DNA, 75 bp, synthetic construct
  source 1..75: mol_type = other DNA
acggaagtcaccatccgtcacgctgacctgatgggagtattctgcatcctctctggcagcctgaatcagaagtaa

SEQ ID NO: 314271 - DNA, 75 bp, synthetic construct
  source 1..75: mol_type = other DNA
gctggttacaggatgaaccggtgagtacgggcgcgaagtttcgtcatcgcgcagtcagcacgctgcgcgggttac

SEQ ID NO: 314272 - DNA, 75 bp, synthetic construct
  source 1..75: mol_type = other DNA
gaaagcgatcctcgacgacgcggatgtcttcctcctgccatcggtaacgggcgcggatggcgatatggaaggtat

SEQ ID NO: 314273 - DNA, 75 bp, synthetic construct
  source 1..75: mol_type = other DNA
atgaaggtcggcttctttttactgaagtttccgctgtcgtcggaaaccttcgttcttaaccaaattaccgcgttt

SEQ ID NO: 314274 - DNA, 75 bp, synthetic construct
  source 1..75: mol_type = other DNA
gtggtttgtgtgccgatgatgagccggaagcgtggctgcgtaacgatcatttgggcattgatttgtggattgagc

SEQ ID NO: 314275 - DNA, 75 bp, synthetic construct
  source 1..75: mol_type = other DNA
gatttgatgttacccatcagtgagttgtgggcaaaacggctacagggcatgggctgcccgagcgccaaaatcgcc

SEQ ID NO: 314276 - DNA, 75 bp, synthetic construct
  source 1..75: mol_type = other DNA
ccgagcatagcggtattccggaactgatagacgccaacgcctccggctggctggtggcggagaacgacgctccgg

SEQ ID NO: 314277 - DNA, 75 bp, synthetic construct
  source 1..75: mol_type = other DNA
gttaatctcggttctgattttgataccagcaccatcaaaaaaggcgatccggtatacgttgtcgtctccactgat

SEQ ID NO: 314278 - DNA, 75 bp, synthetic construct
  source 1..75: mol_type = other DNA
cagtcagtgcggcaggttgtggctgtatcagcccccggcgacagggactcatacgggtgtgtggcacccggcagg

SEQ ID NO: 314279 - DNA, 75 bp, synthetic construct
  source 1..75: mol_type = other DNA
agcaaactggatatttcagtcaactggcaaggtgcggcaaaagcgtattcctttgatgaggtgattgtcgatagt

SEQ ID NO: 314280 - DNA, 75 bp, synthetic construct
  source 1..75: mol_type = other DNA
atgctaaccgtgagcgggaatgaacaggtaaccatagcaaggaacattagcggcgtaattcttaagctgagtggc

SEQ ID NO: 314281 - DNA, 75 bp, synthetic construct
  source 1..75: mol_type = other DNA
aaaaccctgacccgcctcgcgcaggagtatgaaatcccgctggcgcagaccgtggcgattggcgatggagccaat

SEQ ID NO: 314282 - DNA, 75 bp, synthetic construct
  source 1..75: mol_type = other DNA
atgccgttaaaatgtcctaagtgtggtagccgaaatacagtgacagaaactgccggaaagatagcagaagtgact

SEQ ID NO: 314283 - DNA, 75 bp, synthetic construct
  source 1..75: mol_type = other DNA
aaactatttggattccttgaacagtgtgaaaggaataatgcgccagtgcttatctgtatggactgtgggtattat

SEQ ID NO: 314284 - DNA, 75 bp, synthetic construct
  source 1..75: mol_type = other DNA
gtgattcttaagctgagtggcattacacttgtggtttatcagtgtatccataacaccttcatcagccagattgag

SEQ ID NO: 314285 - DNA, 75 bp, synthetic construct
  source 1..75: mol_type = other DNA
tatcctgaataatactgaagaaatatcggctccagttcatgtatttaccctcaatactggccgaaaggcaaaatt

SEQ ID NO: 314286 - DNA, 75 bp, synthetic construct
  source 1..75: mol_type = other DNA
cggcagtaccgcaagacttgattgctctgttcccggttcagtcggagttgtcatttagtgactataaaatgcttt

SEQ ID NO: 314287 - DNA, 75 bp, synthetic construct
  source 1..75: mol_type = other DNA
ttatgagcaagaaaaaaaattatataataacaataaaaaaatagaaaatctttatatatcaccagtagatacaac

SEQ ID NO: 314288 - DNA, 75 bp, synthetic construct
  source 1..75: mol_type = other DNA
gccatacaacctcctcagccggaagttatagaggatgaggaaaagcagcgcctcgagctgatgcgggaaaaaatg

SEQ ID NO: 314289 - DNA, 75 bp, synthetic construct
  source 1..75: mol_type = other DNA
cctccgaatcaggtagaaagcgatacctttgttgatcagcataacaacggtcgtgaccaggcatctcttacgcca

SEQ ID NO: 314290 - DNA, 75 bp, synthetic construct
  source 1..75: mol_type = other DNA
ttgagcttattactgctgatgacaatctttctgaagacgaggttaaaaacagtattatgcggcttataaccaagg

SEQ ID NO: 314291 - DNA, 75 bp, synthetic construct
  source 1..75: mol_type = other DNA
atgccgttaaagtgccctaagtgcggtagtcggaatacagtcacagaaactgccggaaatatagcaaaggtgact

SEQ ID NO: 314292 - DNA, 75 bp, synthetic construct
  source 1..75: mol_type = other DNA
ggaaaaactggcgcaccattcgcgacggcaagatctgtgcgattgatttacagccagaagatgtagcagcgaccg

SEQ ID NO: 314293 - DNA, 75 bp, synthetic construct
  source 1..75: mol_type = other DNA
agattgacatgaccacacgggggcaggtatcgcaggcagataaatatattgccgggctacaggatgttgcggctc

SEQ ID NO: 314294 - DNA, 75 bp, synthetic construct
  source 1..75: mol_type = other DNA
atggacggcaaagaatgcgtcgctatgggttttgccgaccaggtcaccccctctcttcaggctatggcctgtatc

SEQ ID NO: 314295 - DNA, 75 bp, synthetic construct
  source 1..75: mol_type = other DNA
ttgtgggctgttcatttaccctggacagtcagtgcggcaggttgtggctgtatcagcccccggcgacagggactc

SEQ ID NO: 314296 - DNA, 75 bp, synthetic construct
  source 1..75: mol_type = other DNA
agcaaactggatatttcggtcaactggcaaggggcggcaaaagcgtattccttcgatgaagtgattgttgacagt

SEQ ID NO: 314297 - DNA, 75 bp, synthetic construct
  source 1..75: mol_type = other DNA
atgaatctgtccatctctcaaaaagcgacaatgacaagtattgagatcgcggagctggtgggtaagcgtcctgac

SEQ ID NO: 314298 - DNA, 75 bp, synthetic construct
  source 1..75: mol_type = other DNA
aagtcgtaactaaagaatatacctttgctgttgatggtgctccgatcaaacaggaagtgtttaccgctggtggtt

SEQ ID NO: 314299 - DNA, 75 bp, synthetic construct
  source 1..75: mol_type = other DNA
gaagttaaatccttctcttctcagtataaccgtaagctggtagggaagctgaacgttcctgatctgactcttacg

SEQ ID NO: 314300 - DNA, 75 bp, synthetic construct
  source 1..75: mol_type = other DNA
attctcgccgatggtaaaaccggcgacggttgcggcttgctgttacaaaaaccggatcgctttttcgcatcgttg

SEQ ID NO: 314301 - DNA, 75 bp, synthetic construct
  source 1..75: mol_type = other DNA
gtcatcatctttacccaaaatgaatacgtcggcgtttacagtggccccactaacgcttctcaggaaatagcctcc

SEQ ID NO: 314302 - DNA, 75 bp, synthetic construct
  source 1..75: mol_type = other DNA
taccgattacgatggcagtaacaaatccacaatgtaccattaataatgggcaaggattacctgccaccgttcagc

SEQ ID NO: 314303 - DNA, 75 bp, synthetic construct
  source 1..75: mol_type = other DNA
atcattgttgtcattgtaacgcaatgcaaggtgattttatgatgtttaatgagccagggggcgtgttcttccctg

SEQ ID NO: 314304 - DNA, 75 bp, synthetic construct
  source 1..75: mol_type = other DNA
gctgaccgggatgtgtcactggcggcgggtaaccatgttgatgttcttgctgccaccagtacagatacgtcctgg

SEQ ID NO: 314305 - DNA, 75 bp, synthetic construct
  source 1..75: mol_type = other DNA
ctatggcgggtccgggtggtatgaaactcatgccgtggcccccacggtcactgccgggaacagtctgatgctttc

SEQ ID NO: 314306 - DNA, 75 bp, synthetic construct
  source 1..75: mol_type = other DNA
ctttctgctgaggctgaacgactggaaaaccgggcgtcatttatcctggcgaatggggatatcgcactttcgggc

SEQ ID NO: 314307 - DNA, 75 bp, synthetic construct
  source 1..75: mol_type = other DNA
aaaaacaacgggcaggaacagcagcagtggcggtggcgtgggtgtcagtatcggtgccggtggtaacggtgccgg

SEQ ID NO: 314308 - DNA, 75 bp, synthetic construct
  source 1..75: mol_type = other DNA
agggtagtaacgggcgctggctgacggcggacgacctctccctccggggcaaaacactgaataccgcagggacca

SEQ ID NO: 314309 - DNA, 75 bp, synthetic construct
  source 1..75: mol_type = other DNA
gcgaaagaaaccagcgacagccgtctggcggcactgaaaggaacacaggcggttctgtctggtgtacaggccggt

SEQ ID NO: 314310 - DNA, 75 bp, synthetic construct
  source 1..75: mol_type = other DNA
ctgcgggatcttgcagattggcagtaacggcatgtctttttgggcatttcgcgacgatttgcaacgactgaatta

SEQ ID NO: 314311 - DNA, 75 bp, synthetic construct
  source 1..75: mol_type = other DNA
aaaagccgcctgtcagtgccagttattttgattaaaccgagcggctacgatgtgttacaggcactggcaaaagcc

SEQ ID NO: 314312 - DNA, 75 bp, synthetic construct
  source 1..75: mol_type = other DNA
tatgaaactcatgccgtggcccccacggtcactgccgggaacagtctgatgctttccgccggtcgtgatgtgaac

SEQ ID NO: 314313 - DNA, 75 bp, synthetic construct
  source 1..75: mol_type = other DNA
cggcgtcctgtggccaaccgtaccagcgccctttctgaggatcgtcatatcctataccagcgcctatgatcaaac

SEQ ID NO: 314314 - DNA, 75 bp, synthetic construct
  source 1..75: mol_type = other DNA
gctcaattacatgctgccggagcagtactcagcggcatcgtgtcttgccaatctgcaattttatgaaccgcgcac

SEQ ID NO: 314315 - DNA, 75 bp, synthetic construct
  source 1..75: mol_type = other DNA
aatgctaaaaggatggaagtattagaaaaacaaatccataatattgagcgttctcaagatatggctcgtgtatta

SEQ ID NO: 314316 - DNA, 75 bp, synthetic construct
  source 1..75: mol_type = other DNA
gatctaatcgcctgggttatggattctgccagtgaggtcgatgccgagatcatcctgcatatttcagccaatgcg

SEQ ID NO: 314317 - DNA, 75 bp, synthetic construct
  source 1..75: mol_type = other DNA
gttgtttttgatgcagctccaagtttagattcagaggctggatatcgccatcaggaagagttgaggaaaaaaagt

SEQ ID NO: 314318 - DNA, 75 bp, synthetic construct
  source 1..75: mol_type = other DNA
gctggcggttttatggccttgttggttttggggcaatagcgctgctatccgctggcgtatgggcattacaatact

SEQ ID NO: 314319 - DNA, 75 bp, synthetic construct
  source 1..75: mol_type = other DNA
gcgtttattctggtgattgccgtagtcgtgcagttcaccgagatggtggtgcgtaaaaccagcccggtactttat

SEQ ID NO: 314320 - DNA, 75 bp, synthetic construct
  source 1..75: mol_type = other DNA
gcctttattctggtgattgctgtggtcgtgcagttcaccgagatggtggtacgtaaaaccagcccggtgctttac

SEQ ID NO: 314321 - DNA, 75 bp, synthetic construct
  source 1..75: mol_type = other DNA
cggcgtggcgttgctgaatatcaatctcgggcacaatttcttgcagtcggcgctgtacggtttttccgccgctgt

SEQ ID NO: 314322 - DNA, 75 bp, synthetic construct
  source 1..75: mol_type = other DNA
accgggtcaggcgccacgtgaaacggctccgtcgtataccgatgaaaaacagtttctgggctcatcgtattttct

SEQ ID NO: 314323 - DNA, 75 bp, synthetic construct
  source 1..75: mol_type = other DNA
gcgtcaagggcagttcactgctgcaacatggtacagggcggctgtacagtgcaggcaacctgctgcttgacgctc

SEQ ID NO: 314324 - DNA, 75 bp, synthetic construct
  source 1..75: mol_type = other DNA
caccggcagtgccgacgttaaaggaaccacgctgaataataccggtacgcttcagggtgcggacctgctggtgaa

SEQ ID NO: 314325 - DNA, 75 bp, synthetic construct
  source 1..75: mol_type = other DNA
taaagtcagtcacagtggaatcagtctgagcggtggtggcagcttcggggataaatttcagggtaacatgccggg

SEQ ID NO: 314326 - DNA, 75 bp, synthetic construct
  source 1..75: mol_type = other DNA
ctgagccatggtataaggtctatcgccaggtctcgccggatgtgacagaagccagtggcacctctccggcaggtc

SEQ ID NO: 314327 - DNA, 75 bp, synthetic construct
  source 1..75: mol_type = other DNA
cagggctggccggcggtctaaccggaaacagcaccgcatcagcagcagtgggagcacagagcgggaagaatgctg

SEQ ID NO: 314328 - DNA, 75 bp, synthetic construct
  source 1..75: mol_type = other DNA
taatgatatcaacattgccgcaaacctgataagtgggagcaaaagtcagtccggtttctggcacactgatgacaa

SEQ ID NO: 314329 - DNA, 75 bp, synthetic construct
  source 1..75: mol_type = other DNA
cgttatcagcgggaacaacgtgcagcttgcgggtggcaatattaccaacagcggcggcagcatcaacgcacagaa

SEQ ID NO: 314330 - DNA, 75 bp, synthetic construct
  source 1..75: mol_type = other DNA
agaaagagcagaagcgtctgcaggaagcgcaggttatcagccagattagcggtcagatgagtaacatcgtcatga

SEQ ID NO: 314331 - DNA, 75 bp, synthetic construct
  source 1..75: mol_type = other DNA
catttcgagccttcaggacagcgaccgttacgacagcagacaaaacagcgtggccgcaggtggaagcttcacgtt

SEQ ID NO: 314332 - DNA, 75 bp, synthetic construct
  source 1..75: mol_type = other DNA
ggatgtcacggcatcctctgtttctgccgggcacagcgccctgctttctgcaggtaacgacctgagtctgaatgc

SEQ ID NO: 314333 - DNA, 75 bp, synthetic construct
  source 1..75: mol_type = other DNA
agcagcaatagctggtgctacaggtaatgccagtaaggataccgggaatgataatagctgggataccggtggtgg

SEQ ID NO: 314334 - DNA, 75 bp, synthetic construct
  source 1..75: mol_type = other DNA
tcagccagccagatggtggcctcaaatgcaatagccggtgcggcgaacgcacttaccggtatgtccggcagcagt

SEQ ID NO: 314335 - DNA, 75 bp, synthetic construct
  source 1..75: mol_type = other DNA
atacccgcgactttacccagagcggccgcactggcgcaaagggcaaagtggatatcacggccagcgggaaactga

SEQ ID NO: 314336 - DNA, 75 bp, synthetic construct
  source 1..75: mol_type = other DNA
agcgggaagaatgctgttgagaataatgcgctcagtctgccaccaggaatggtgagttatggtcaggcggttgcc

SEQ ID NO: 314337 - DNA, 75 bp, synthetic construct
  source 1..75: mol_type = other DNA
tgcagccggtggtgcatttggtaactggctggatgggaaggatccattatctggtgctgcgatgagtggtggtac

SEQ ID NO: 314338 - DNA, 75 bp, synthetic construct
  source 1..75: mol_type = other DNA
tgcagggaatccggggcagatactggctggcggtctgaatccggcagtggcacagcttataaaacaggctaccgg

SEQ ID NO: 314339 - DNA, 75 bp, synthetic construct
  source 1..75: mol_type = other DNA
aagtcactgcagatgtcggcaacaacctgaccatttcgagccttcaggacagtgaccgttacgacagcagacaga

SEQ ID NO: 314340 - DNA, 75 bp, synthetic construct
  source 1..75: mol_type = other DNA
gtgcagatcttaagttcctgaaagacaatataacccaaggtgatcgtctgctgtctgttatcactgatccaactt

SEQ ID NO: 314341 - DNA, 75 bp, synthetic construct
  source 1..75: mol_type = other DNA
gttaagacccgttttaccagcagtatcaataacggaacaaccactgcacatgcaggtagtgtcagtccggtggtc

SEQ ID NO: 314342 - DNA, 75 bp, synthetic construct
  source 1..75: mol_type = other DNA
cacggtactgagcagcagcgggattgcgatgaatgccagcggcagcctgcaggcaggcggggacgtcagcctgac

SEQ ID NO: 314343 - DNA, 75 bp, synthetic construct
  source 1..75: mol_type = other DNA
tgatggtctgttgcagggcgccggtgcactggcgcttgcaggcgacaccctctcacagggtagtaacggacgctg

SEQ ID NO: 314344 - DNA, 75 bp, synthetic construct
  source 1..75: mol_type = other DNA
tcgtcagaacagtgtcaccaacagtggcacgctcaccggggtcgccacactgacgcttgccgcccgtatgacatc

SEQ ID NO: 314345 - DNA, 75 bp, synthetic construct
  source 1..75: mol_type = other DNA
ggcggtgctggtgtttgatggacgcctgcgttgtgcgctggaacgtaatctgcggcggcaaaaatatgcccgctt

SEQ ID NO: 314346 - DNA, 75 bp, synthetic construct
  source 1..75: mol_type = other DNA
accagaccggtaccgcgtactggtgctgttgcgcattccggcatggtggaacgattttatcgcgggcctcgtgct

SEQ ID NO: 314347 - DNA, 75 bp, synthetic construct
  source 1..75: mol_type = other DNA
cagcgttgccgggaaaatactcaccgtcagttccggcagcctgaacaacggcgggacactggttgccgggcgcga

SEQ ID NO: 314348 - DNA, 75 bp, synthetic construct
  source 1..75: mol_type = other DNA
gtgccacacagcgctttctcagcagccagaacatcacaacagtaaccggtgctgataatccggcaggccgcattg

SEQ ID NO: 314349 - DNA, 75 bp, synthetic construct
  source 1..75: mol_type = other DNA
gaaggtgcaggtcttgaaatgatctataacccgaaaacgggacaagttggtcatattcaaccagtcaaggttaaa

SEQ ID NO: 314350 - DNA, 75 bp, synthetic construct
  source 1..75: mol_type = other DNA
cctgttccggcggatgcgacggaagaacagcggcaggcatatctggcaaaactgcgtgatacgccggaatacaaa

SEQ ID NO: 314351 - DNA, 75 bp, synthetic construct
  source 1..75: mol_type = other DNA
gacctgagtctgaatgcagtcagggaaagcaaaaacagtcgcaacggcaggtcagaaagtcatgaaagccacgca

SEQ ID NO: 314352 - DNA, 75 bp, synthetic construct
  source 1..75: mol_type = other DNA
aacggtctcgtccggtggaacccttggaatgtctgcgggtaatgatatcaacattgccgcaaacctgataagcgg

SEQ ID NO: 314353 - DNA, 75 bp, synthetic construct
  source 1..75: mol_type = other DNA
ttgagatagcaaaacagacgcttaaaaacagtaaagatccggcagagcgtgaaaaggcacagcagaaatatgatg

SEQ ID NO: 314354 - DNA, 75 bp, synthetic construct
  source 1..75: mol_type = other DNA
cattgccagtggcgatgtggctggcgcggctgctggagctggtgccgggaagaacgttgttgagaataatgcgct

SEQ ID NO: 314355 - DNA, 75 bp, synthetic construct
  source 1..75: mol_type = other DNA
gagactgcggcgatattcagaataaatatgctgtattaagcgcagagaaccgacagaaattacacattgatgtgg

SEQ ID NO: 314356 - DNA, 75 bp, synthetic construct
  source 1..75: mol_type = other DNA
ggtggcgggctgagtatcttcgccagcattaacggctccaaaggcagtgagaaaggcaacggcacgacctggacc

SEQ ID NO: 314357 - DNA, 75 bp, synthetic construct
  source 1..75: mol_type = other DNA
ttcgatatcacggtcggcagacatacccaactggatggtgcggttatcgcctccactgccacagcggataaaaac

SEQ ID NO: 314358 - DNA, 75 bp, synthetic construct
  source 1..75: mol_type = other DNA
taacggacgctggctgacggcgggcgacctctccctccggggtaaaacactgcataccgcagggaccacgcaggg

SEQ ID NO: 314359 - DNA, 75 bp, synthetic construct
  source 1..75: mol_type = other DNA
atagatcgtgctctgggtgaagatatcccgatcaaaatggtctacgatctgacggcgacttttgcgcagcaaatg

SEQ ID NO: 314360 - DNA, 75 bp, synthetic construct
  source 1..75: mol_type = other DNA
gttattatgagaaattatgggagcaaggcagacctgcgccattcgtgcaagcaagagaagtgttgaatagcaatc

SEQ ID NO: 314361 - DNA, 75 bp, synthetic construct
  source 1..75: mol_type = other DNA
agcgcccaggttggctgggtaacattggtgtggaagtaatgaccagtgatgaagccaaagcctatgttcagcagt

SEQ ID NO: 314362 - DNA, 75 bp, synthetic construct
  source 1..75: mol_type = other DNA
agcaggcgcagcaacgggagagctggcagccagagcgattgccggaatgctgtatccgggcgtgaagcagtcaga

SEQ ID NO: 314363 - DNA, 75 bp, synthetic construct
  source 1..75: mol_type = other DNA
ggtttcaccattggcagcagtaagacaacgcacgaccgccgcgaggccgggacaacgcagagtcagagtgccagt

SEQ ID NO: 314364 - DNA, 75 bp, synthetic construct
  source 1..75: mol_type = other DNA
tgcaggtaaaggtgccggtatcagcgcctttgccagcgttaatgcggcaaaaggcagcgagaaaggtaacggtac

SEQ ID NO: 314365 - DNA, 75 bp, synthetic construct
  source 1..75: mol_type = other DNA
aaatttgagcagaagaaaagcgggctgacggttgccctttccggcacggtgggcagtgccatcaataatgcggtc

SEQ ID NO: 314366 - DNA, 75 bp, synthetic construct
  source 1..75: mol_type = other DNA
cttctattacatcagaaatgacggggactgaactacaaaaagtcattaatgataaattgaagaaaggagagcgtg

SEQ ID NO: 314367 - DNA, 75 bp, synthetic construct
  source 1..75: mol_type = other DNA
cacgctcactatgcaggttgctcgtctgcttgatcctcaccccaaaacatttggcggcaaaattcgccagctctg

SEQ ID NO: 314368 - DNA, 75 bp, synthetic construct
  source 1..75: mol_type = other DNA
aagaaatgataaatgtctggccgctaccgctggaaccctggctgcccgcatcagaacgtcgcgctgtgcgcttac

SEQ ID NO: 314369 - DNA, 75 bp, synthetic construct
  source 1..75: mol_type = other DNA
ggcggaagcggcacataaaatcatcgtgatgtatgcaggccaggtggtggaaacgggcgatgcgcacgccatctt

SEQ ID NO: 314370 - DNA, 75 bp, synthetic construct
  source 1..75: mol_type = other DNA
gcggctggattgcactggtcgccgcgcccgttttgctttttcttgccgcatggggagcagataaactctggcctc

SEQ ID NO: 314371 - DNA, 75 bp, synthetic construct
  source 1..75: mol_type = other DNA
atcgctggccggaacgtgccgaagccgcgcgtaataaagtgctcgaacggatggctgcgcaaggtgtgtggtccc

SEQ ID NO: 314372 - DNA, 75 bp, synthetic construct
  source 1..75: mol_type = other DNA
ctgctgatgcttctttgcctgtgcaaaccagtggtggcgcaggtgaacgctggtggtttcttaatggtgagccgt

SEQ ID NO: 314373 - DNA, 75 bp, synthetic construct
  source 1..75: mol_type = other DNA
gaagaaatccgggctggaaaaaccggaacttgaggcattttttcgggatatgaccagagggaagcagaagagctg

SEQ ID NO: 314374 - DNA, 75 bp, synthetic construct
  source 1..75: mol_type = other DNA
gcaaaatggctgaactgctgaatgatgcacatccggaatggagtttaagaacctgtgaaagacgcattgagcatt

SEQ ID NO: 314375 - DNA, 75 bp, synthetic construct
  source 1..75: mol_type = other DNA
gaaaggaaacggtctggcggcttgcctccggctcactccccaaagcgtggtttactgagccatggtataaggtct

SEQ ID NO: 314376 - DNA, 75 bp, synthetic construct
  source 1..75: mol_type = other DNA
tccggcttcgcgtctggatgtttacccgcatcagctttccggcggcatgagtcagcgcgtgatgatcgccatggc

SEQ ID NO: 314377 - DNA, 75 bp, synthetic construct
  source 1..75: mol_type = other DNA
gccagcgcgtgatgatcgccatggcgattgcctgtcggccaaaactgctgattgccgatgaaccgaccaccgcgc

SEQ ID NO: 314378 - DNA, 75 bp, synthetic construct
  source 1..75: mol_type = other DNA
acccgccgtcagcgggcgattgacctgttgaatcaggtcggtattcccgatccggcatcgcgtctggatgtttac

SEQ ID NO: 314379 - DNA, 75 bp, synthetic construct
  source 1..75: mol_type = other DNA
gtatcgcacacaatgacgaaatcagctatcaatgaagcactgcgcagtatgaaaaaatcgggtattgaaaaagct

SEQ ID NO: 314380 - DNA, 75 bp, synthetic construct
  source 1..75: mol_type = other DNA
tatggcaaaacgccgctggaactggcgcgggaacggggctttgaagagattgcgcagttactgattgccgcaggt

SEQ ID NO: 314381 - DNA, 75 bp, synthetic construct
  source 1..75: mol_type = other DNA
agaccaaccatgttggctggacgccgctgctggaagcgattgtgctgaacgatggcgggattaaacagcaggcga

SEQ ID NO: 314382 - DNA, 75 bp, synthetic construct
  source 1..75: mol_type = other DNA
gctgctggaagcgattgtgcttaatgatggcgggattaaacagcaggcgattgtccagttattgctggaacacgg

SEQ ID NO: 314383 - DNA, 75 bp, synthetic construct
  source 1..75: mol_type = other DNA
gtatttcagaggaagcttttaacgagcttaccagaattaaacgagcaactaacttgcctcatcagactgttatgc

SEQ ID NO: 314384 - DNA, 75 bp, synthetic construct
  source 1..75: mol_type = other DNA
tttcagaggaagcttttaacgagcttgccagaattaaacgagctactaacttgcctcatcagactgttatgcagc

SEQ ID NO: 314385 - DNA, 75 bp, synthetic construct
  source 1..75: mol_type = other DNA
gtgcttcgttttctctggaaggtaatcacattaccaacacttcatggtctaaaatgtcgcaggctgcacgttttc

SEQ ID NO: 314386 - DNA, 75 bp, synthetic construct
  source 1..75: mol_type = other DNA
tgcatggcaactgtattatatttttaaagccaatggatattcactcttatcactgtgaaggtttagtctgggaac

SEQ ID NO: 314387 - DNA, 75 bp, synthetic construct
  source 1..75: mol_type = other DNA
acgccgcctgtttctacgctacatcggcaagacgccaaaagaatattatcttgatgctcgcctggagctggcgtt

SEQ ID NO: 314388 - DNA, 75 bp, synthetic construct
  source 1..75: mol_type = other DNA
ccaggattgatccttccagtgctcgcatgcgtcttcacattgagaatcgacttgcagcatttgataggcatcagc

SEQ ID NO: 314389 - DNA, 75 bp, synthetic construct
  source 1..75: mol_type = other DNA
gtagattttctcggtcagaaacagctccagcgctggagcgatgaacggaaagccgcagtgagaaggcgcaatatg

SEQ ID NO: 314390 - DNA, 75 bp, synthetic construct
  source 1..75: mol_type = other DNA
gtgagtattgatgatgtcaggaacatgatacagcggtatcgcgatgcggaaatggcggtactggagggaaaatct

SEQ ID NO: 314391 - DNA, 75 bp, synthetic construct
  source 1..75: mol_type = other DNA
cactgtgaaggtttagtctgggaacagtactggatggaatttacccccaccagtatgatggatattcccgtcggt

SEQ ID NO: 314392 - DNA, 75 bp, synthetic construct
  source 1..75: mol_type = other DNA
gtacgcactgaaacaggtcaccagaacgctgagcgagatgatgcattttagcgtctgcccaataacacggactta

SEQ ID NO: 314393 - DNA, 75 bp, synthetic construct
  source 1..75: mol_type = other DNA
tcccggctcgttgaggtcgcttctcatacatggaattctcactacggtattcaggctaatgccaccggcagctta

SEQ ID NO: 314394 - DNA, 75 bp, synthetic construct
  source 1..75: mol_type = other DNA
gccagtgcaccggctatcgcggcttatcagcaagcaggctttagcgggagtctgagcgaaattcgacaaaacccg

SEQ ID NO: 314395 - DNA, 75 bp, synthetic construct
  source 1..75: mol_type = other DNA
gatcgcaatattgatgtgctaattcagcgggtgaaagatatgcaaatatcaaccgtgtatttgcaggcatttgct

SEQ ID NO: 314396 - DNA, 75 bp, synthetic construct
  source 1..75: mol_type = other DNA
tgatcaacggcaagcaaaaaagctggctggcgcattgtactgatgcagaggcactaaaaattgatagtgttatag

SEQ ID NO: 314397 - DNA, 75 bp, synthetic construct
  source 1..75: mol_type = other DNA
gcgttacgcattgatggggtgataagtaaagcgcttgcacgttatcctggattgattgatatcctgcggcaaagg

SEQ ID NO: 314398 - DNA, 75 bp, synthetic construct
  source 1..75: mol_type = other DNA
gcaaaatggctgaattgttgaatgaggttcaccctgagtggtgctatgcaatgccgcaatcgtatagatatgtgg

SEQ ID NO: 314399 - DNA, 75 bp, synthetic construct
  source 1..75: mol_type = other DNA
gggaaagaaaactaacagagcaaaaggttgattatgattctttgatacacgatatgtccagatatcgtgaattgt

SEQ ID NO: 314400 - DNA, 75 bp, synthetic construct
  source 1..75: mol_type = other DNA
ggctaaatcttgctgaatatatgctctatctaccgatgcgtgatgcattctcttccggggatctaaaaaccgttt

SEQ ID NO: 314401 - DNA, 75 bp, synthetic construct
  source 1..75: mol_type = other DNA
gctgccatttgagtctcaggtaggtatatcgattgatagctatgtagattttaaagtatttacaaaagaattata

SEQ ID NO: 314402 - DNA, 75 bp, synthetic construct
  source 1..75: mol_type = other DNA
ccattgaagagttaaaaaaactagggtatgacatgttttttacgctcgagtctgggctggcgtcagcaaaccagc

SEQ ID NO: 314403 - DNA, 75 bp, synthetic construct
  source 1..75: mol_type = other DNA
gaaaaatggtcagcatcaggctatttcttcgcaacaactcgctcactggatgagcctattacaactgaatggagt

SEQ ID NO: 314404 - DNA, 75 bp, synthetic construct
  source 1..75: mol_type = other DNA
cacgctggaaagtgtctggctccaggggaaactgcgtatgtgggggcgttggtcgtatattggcggcggtaagac

SEQ ID NO: 314405 - DNA, 75 bp, synthetic construct
  source 1..75: mol_type = other DNA
atgaagcggttaaacagaccacggattacggtttcggtcagtcgacctgtgttggtatcggcggcgacccgatcc

SEQ ID NO: 314406 - DNA, 75 bp, synthetic construct
  source 1..75: mol_type = other DNA
aagtgaaactggatgaagcaggcgttcgtatgatcggcccgaactgcccaggcgttatcactccgggtgaatgca

SEQ ID NO: 314407 - DNA, 75 bp, synthetic construct
  source 1..75: mol_type = other DNA
gggggtgtttgaggccagcgctattgatctgcatatccacagcccgggcggtgatgtgatgcaggggtttgccat

SEQ ID NO: 314408 - DNA, 75 bp, synthetic construct
  source 1..75: mol_type = other DNA
tcacaaaccaggtaaagtgggcatcgtttcccgttccggtacactgacctatgaagcggttaaacagaccacgga

SEQ ID NO: 314409 - DNA, 75 bp, synthetic construct
  source 1..75: mol_type = other DNA
cgcctctgttatctacgtaccagcaccgttctgcaaagactccattctggaagctatcgatgcaggcatcaaact

SEQ ID NO: 314410 - DNA, 75 bp, synthetic construct
  source 1..75: mol_type = other DNA
ccgttctgcaaagactccattctggaagctattgatgcaggcatcaaactgattatccccatcactgaaggcatc

SEQ ID NO: 314411 - DNA, 75 bp, synthetic construct
  source 1..75: mol_type = other DNA
gatccgcaacgcgcatctgaagcgggtaaaaaaggcggtcaacaaagcggtggtaataaatcaggaaaatcctga

SEQ ID NO: 314412 - DNA, 75 bp, synthetic construct
  source 1..75: mol_type = other DNA
ttacagctttctcgccaacagttgcagttactggaaaaaatgcctctctctgtacccggagacgatgcgccataa

SEQ ID NO: 314413 - DNA, 75 bp, synthetic construct
  source 1..75: mol_type = other DNA
ctggctggttccagacaaacacggcgcttcaagactaacccctataaaacatgccatcaatggagagcttgaaat

SEQ ID NO: 314414 - DNA, 75 bp, synthetic construct
  source 1..75: mol_type = other DNA
cgaaatgttcgaaaaagatccgcagaccgaagcgatcgtgatgatcggtgagatcggcggtagcgccgaagaaga

SEQ ID NO: 314415 - DNA, 75 bp, synthetic construct
  source 1..75: mol_type = other DNA
aagccgttgctgccactggcgctaccgcttctgttatctatgtaccagcgccgttctgcaaagactccattctgg

SEQ ID NO: 314416 - DNA, 75 bp, synthetic construct
  source 1..75: mol_type = other DNA
taaaggcggcaccacccaccttggcctgccggtgttcaacaccgtgcgtgaagcagtagctgccactggtgccac

SEQ ID NO: 314417 - DNA, 75 bp, synthetic construct
  source 1..75: mol_type = other DNA
tttttagtcatcctgtttacctctttctcagggagtttagtctccaggatttccggggcggttcaatacatcctc

SEQ ID NO: 314418 - DNA, 75 bp, synthetic construct
  source 1..75: mol_type = other DNA
agcatggttgtactttaaggctgggggggtaggaggaggtataatgggaataggaatttctctatttcgatattt

SEQ ID NO: 314419 - DNA, 75 bp, synthetic construct
  source 1..75: mol_type = other DNA
gcgctggttttacaactggaaatccattcacatgccgatacattcccggcctctgcgggctggcatccgtggttt

SEQ ID NO: 314420 - DNA, 75 bp, synthetic construct
  source 1..75: mol_type = other DNA
actttacgtatgcccctggcttcaccgtggccctggcaaggggaagtgattcagacttttttgctggagaacgat

SEQ ID NO: 314421 - DNA, 75 bp, synthetic construct
  source 1..75: mol_type = other DNA
tccgaaattattatagcttcaaagaaacctaaagaaataaccttctccacaataaatgattttggggggaaaacg

SEQ ID NO: 314422 - DNA, 75 bp, synthetic construct
  source 1..75: mol_type = other DNA
tgatgcacgaaatcccaaatggatcgagttttcaactgttaatgataaaggtggaacaacaccacccataaaaat

SEQ ID NO: 314423 - DNA, 75 bp, synthetic construct
  source 1..75: mol_type = other DNA
tatgttgatcgaaaaactcttaacctggacgtttctgtgctcttcgatatgccaagcccaactatgcgcatcctc

SEQ ID NO: 314424 - DNA, 75 bp, synthetic construct
  source 1..75: mol_type = other DNA
gctggccactcagctacagcagcagatgcaggctgccaatgcggaacgcgtgaacgccgtctctgccgtgttcga

SEQ ID NO: 314425 - DNA, 75 bp, synthetic construct
  source 1..75: mol_type = other DNA
cgggcgatggcgactggctccagcttgttcgtgagaacgtgagctggataagcctgcgtgaagacgccaagcaca

SEQ ID NO: 314426 - DNA, 75 bp, synthetic construct
  source 1..75: mol_type = other DNA
ccttactttttggaaggaatgtaccggagaattatctcttcgtagatggcaatagcctgggttattaccaccaac

SEQ ID NO: 314427 - DNA, 75 bp, synthetic construct
  source 1..75: mol_type = other DNA
gcatgatggtgccaggataacctcgttaaaggcatttggttctgaagtattacgccaatggcagccgcagcgcag

SEQ ID NO: 314428 - DNA, 75 bp, synthetic construct
  source 1..75: mol_type = other DNA
tctgcgccgcaaaatgctgctggccacactgtggaacaccggtgcgcgcattaatgaagcactggcgctgacgcg

SEQ ID NO: 314429 - DNA, 75 bp, synthetic construct
  source 1..75: mol_type = other DNA
gtggaacaccggtgagcgcattaatgaagcactggcgctgacgcgggggatttttcgcttgcgcctccgtatccg

SEQ ID NO: 314430 - DNA, 75 bp, synthetic construct
  source 1..75: mol_type = other DNA
tgcacaaaatatggacagcgtttggttgccgtctgttgatgatttactggcttgtgactggtttgtagtggagtg

SEQ ID NO: 314431 - DNA, 75 bp, synthetic construct
  source 1..75: mol_type = other DNA
agtggtggatgaaaccgccgacctcgcccgtgctgctcagtccatcgtcaaaggcgcttctttcgataacaacat

SEQ ID NO: 314432 - DNA, 75 bp, synthetic construct
  source 1..75: mol_type = other DNA
tgggcacgactactgcggcggcaaacctttatcttaatcctgaccctgcaatttcgtctgtactgcggtcaacat

SEQ ID NO: 314433 - DNA, 75 bp, synthetic construct
  source 1..75: mol_type = other DNA
aagcgttttatttatggaatttggccacgactacagcggcggcaaacctttatcttaatcctgaccccgcaattt

SEQ ID NO: 314434 - DNA, 75 bp, synthetic construct
  source 1..75: mol_type = other DNA
gctgcccgtcgtgcgcgtcgccaacgtggcggatgccattgcgctggcggtgaaactggaaggcggttgccacca

SEQ ID NO: 314435 - DNA, 75 bp, synthetic construct
  source 1..75: mol_type = other DNA
gcctgactttaattgaaaacgcgccctggggcgtggtggcttcggtgacgccttccactaacccggcggcaaccg

SEQ ID NO: 314436 - DNA, 75 bp, synthetic construct
  source 1..75: mol_type = other DNA
cgccgttcatgagatgggcgttttcgcgtccctggatgacgccgttgcggcagccaaaattgcccagcaagggtt

SEQ ID NO: 314437 - DNA, 75 bp, synthetic construct
  source 1..75: mol_type = other DNA
gtacaggtcgcaatgcgaaaatgacaggcgtgactggggcttctacggattgattgccgaggaagtgggagaaat

SEQ ID NO: 314438 - DNA, 75 bp, synthetic construct
  source 1..75: mol_type = other DNA
gtacaggtcgcaatgcgaaaatgacaggcgtgactggggtttctagggattgattgccgaggaagttggagaaat

SEQ ID NO: 314439 - DNA, 75 bp, synthetic construct
  source 1..75: mol_type = other DNA
gtacaggtcgcaatgcgaaaatgacaggcgtgactggggattctagggattgattgccgaggaagtaggagaaat

SEQ ID NO: 314440 - DNA, 75 bp, synthetic construct
  source 1..75: mol_type = other DNA
aaagcaggatatcagcaccagatacacaaaaactgaagttgataataagctgaaaaacaaactggaagtgaacga

SEQ ID NO: 314441 - DNA, 75 bp, synthetic construct
  source 1..75: mol_type = other DNA
gtacaggtcgcaatgcgaaaatgacaggcgtgactgggggttctagggattgattgccgaggaagtgggagaaat

SEQ ID NO: 314442 - DNA, 75 bp, synthetic construct
  source 1..75: mol_type = other DNA
gtacaggtcgcaatgcgaaaatgacaggcgtgactggggcttctagggattgattgccgaggaagtcggagaaat

SEQ ID NO: 314443 - DNA, 75 bp, synthetic construct
  source 1..75: mol_type = other DNA
ccaccatgaccatcaccacgccgactggtgaaggtgtaaccagcgcgcgcacgtttgtccgtctgcgtcgctgtg

SEQ ID NO: 314444 - DNA, 75 bp, synthetic construct
  source 1..75: mol_type = other DNA
gagacatcaccacgttaaagggagatgtcagtaaagccaaggaagatatttcctcaattaacggaaaagtatcaa

SEQ ID NO: 314445 - DNA, 75 bp, synthetic construct
  source 1..75: mol_type = other DNA
ggtttcccgctggccgaaggtattaaggccacaatgagtggtttccgtctgacgatgatcactgattcaacgacg

SEQ ID NO: 314446 - DNA, 75 bp, synthetic construct
  source 1..75: mol_type = other DNA
tgccgaaggtgtaatgtacgaacgtctggttgaaccgccccgggaatcctggagactaaacttcctgagaaagag

SEQ ID NO: 314447 - DNA, 75 bp, synthetic construct
  source 1..75: mol_type = other DNA
tgcaggattcgcaaactgacgccggtaacattgagcaggaatataaggatgcggtagaggcggcagtagcggata

SEQ ID NO: 314448 - DNA, 75 bp, synthetic construct
  source 1..75: mol_type = other DNA
tggcggagtttgagcgcgaactgattgctgaaagaacgactgcaggtctggcatcagcaagagcccgtgggcgga

SEQ ID NO: 314449 - DNA, 75 bp, synthetic construct
  source 1..75: mol_type = other DNA
acacttcacgctcaattagtctgtaaaaacgtcaaaaagagtgttttatcaacagaaaaacggaggtctgacaga

SEQ ID NO: 314450 - DNA, 75 bp, synthetic construct
  source 1..75: mol_type = other DNA
cacgccaggcgttgagtgtctctctccgcaggtgctgaccggcgacaacggcctgactttaattgaaaacgcgcc

SEQ ID NO: 314451 - DNA, 75 bp, synthetic construct
  source 1..75: mol_type = other DNA
cgcaagtgctgactggcgacaacggcctgaccctaattgaaaacgcaccctggggcgtggtggcttcggtgacgc

SEQ ID NO: 314452 - DNA, 75 bp, synthetic construct
  source 1..75: mol_type = other DNA
atgaatcaacaggatattgaacaggtggtgaaagcggtgctgctgaaaatgcaaagcagtgatacaccgcccacc

SEQ ID NO: 314453 - DNA, 75 bp, synthetic construct
  source 1..75: mol_type = other DNA
cggcggcaatcggccttaaagttccggaacaaacgcgactgctgtttgtagaaaccaccgcagaacatccgtttg

SEQ ID NO: 314454 - DNA, 75 bp, synthetic construct
  source 1..75: mol_type = other DNA
gctggggctgggcggggaaggctggaccaccatgaccatcaccacgccaaccggtgaaggggtaaccagcgcgcg

SEQ ID NO: 314455 - DNA, 75 bp, synthetic construct
  source 1..75: mol_type = other DNA
gaacttgccgtcagtgaaacaggcatgggtcgcgttgaagataaattttccaaaaacgttgctcaggcgcgcggt

SEQ ID NO: 314456 - DNA, 75 bp, synthetic construct
  source 1..75: mol_type = other DNA
tatcattgataactactacggtggtcgtaccgataacctgagtgaacaggaacgtcagcaaatcagcatgctggc

SEQ ID NO: 314457 - DNA, 75 bp, synthetic construct
  source 1..75: mol_type = other DNA
tggaatatctggccgtgtactggggtaagggtgccacggtacctgatgaataccgtatccgtacaggcgatacgg

SEQ ID NO: 314458 - DNA, 75 bp, synthetic construct
  source 1..75: mol_type = other DNA
gctttccgccggtcgtgatgtgaacagcaggctgccggtgtggctgcggaaaataacgtgtccatccgggccggg

SEQ ID NO: 314459 - DNA, 75 bp, synthetic construct
  source 1..75: mol_type = other DNA
gctatccataaccaggcagactataaagccagccataccggaatcagtttatcgggtggctcagggatgtcagcc

SEQ ID NO: 314460 - DNA, 75 bp, synthetic construct
  source 1..75: mol_type = other DNA
ccagtgacacgttgacaacacagggacagataaccgccgggcagaatctcacggccagcgccaccacgctgacac

SEQ ID NO: 314461 - DNA, 75 bp, synthetic construct
  source 1..75: mol_type = other DNA
cgaatatttaacacggaatggattgtctcacagtacagcagaaggaagccaagccatgctgaccagtcttcaaag

SEQ ID NO: 314462 - DNA, 75 bp, synthetic construct
  source 1..75: mol_type = other DNA
ccattctgggcggcgcagtggcggcaatgcagggtaataatgtcgctgccggtgcagcaggcgcagcaacgggag

SEQ ID NO: 314463 - DNA, 75 bp, synthetic construct
  source 1..75: mol_type = other DNA
ccttccggcaacaatggatacctggttccgtccacggacccggacagtccgtatctgattacggtgaacccgaaa

SEQ ID NO: 314464 - DNA, 75 bp, synthetic construct
  source 1..75: mol_type = other DNA
tcacaacgaagcggattataaagtcagtcacagtggaatcagtctgagcggtggtggcagcttcggggataaatt

SEQ ID NO: 314465 - DNA, 75 bp, synthetic construct
  source 1..75: mol_type = other DNA
ggaacgctgactgccggtaaaggcaacagtgttttcagcgcacagcgtcttttccttaacgcaccgggttcactt

SEQ ID NO: 314466 - DNA, 75 bp, synthetic construct
  source 1..75: mol_type = other DNA
cagggaaatgccaccaccatcacggcaggacaactcacaaacggcgggcatctgcagggcgaaacgctgacgctg

SEQ ID NO: 314467 - DNA, 75 bp, synthetic construct
  source 1..75: mol_type = other DNA
aaaaccgtacaactggaaagcgtgagtggcaacatcagcaatatcacccggcgtcagcaatggaatgcgggcagt

SEQ ID NO: 314468 - DNA, 75 bp, synthetic construct
  source 1..75: mol_type = other DNA
ggcaggcaggaactcggttgagaataattatcttagcgtgtctgaaaagacagagcttgagatagcaaaacagaa

SEQ ID NO: 314469 - DNA, 75 bp, synthetic construct
  source 1..75: mol_type = other DNA
cagtattatcagcggtcagaatgtgcacctggcaggagggaatgtcactaacagtggcagtaccctgatggcgca

SEQ ID NO: 314470 - DNA, 75 bp, synthetic construct
  source 1..75: mol_type = other DNA
gacagtctggcggtgaagcaggcaatagatcgtgctctgggtgaagatatcccgatcaaaatggtctacgatctg

SEQ ID NO: 314471 - DNA, 75 bp, synthetic construct
  source 1..75: mol_type = other DNA
cggcgacagtgtgatgctgagtgcaggtcgggatgtgagcagtcaggcggcaggcatcgcagcggaagacaacat

SEQ ID NO: 314472 - DNA, 75 bp, synthetic construct
  source 1..75: mol_type = other DNA
tgccatcaataatgcggtcaccagtgcacaggagacgaaggagagcagtgacagtcgtctgaaagccctgcaggc

SEQ ID NO: 314473 - DNA, 75 bp, synthetic construct
  source 1..75: mol_type = other DNA
cgtaggaattgcgatgggcagtgcattttttactgatggaccgaatgcaggagctattggaggtgctgccgcagg

SEQ ID NO: 314474 - DNA, 75 bp, synthetic construct
  source 1..75: mol_type = other DNA
ttacattgctgaatgccctgaccaaccagaccagcggtgtgcttctcagccagaacgtatcagcgctttccgcac

SEQ ID NO: 314475 - DNA, 75 bp, synthetic construct
  source 1..75: mol_type = other DNA
tgacggaacacaggctgccagagacatcctcaccctgaacgccagtgaaaagctcacccacagcgggaaaagcag

SEQ ID NO: 314476 - DNA, 75 bp, synthetic construct
  source 1..75: mol_type = other DNA
tgaacaaaccggaatgtttgccggagatggtggcttcgacattacagtgggcagacatacccaactggagggtgc

SEQ ID NO: 314477 - DNA, 75 bp, synthetic construct
  source 1..75: mol_type = other DNA
aacaattaagtaaaatcgttgatgctaatcttaaggtcgtagcgaaaggtaatgttgatggagctaagtttactg

SEQ ID NO: 314478 - DNA, 75 bp, synthetic construct
  source 1..75: mol_type = other DNA
caccatccggaaccatcacggcgatatgctggcgggtgacagcctggtgatgcagaaagatgtcagtggtgccgc

SEQ ID NO: 314479 - DNA, 75 bp, synthetic construct
  source 1..75: mol_type = other DNA
cagtgacagtcgtctgaaagccctgcaggccacaaagacagcgctgtctggtgtgcaggccggacaggctgcggc

SEQ ID NO: 314480 - DNA, 75 bp, synthetic construct
  source 1..75: mol_type = other DNA
agtgaatggcgattcgctcagcaacggtggcgaaatcagtggggttaacgacctgaacgtgacactcagtggtaa

SEQ ID NO: 314481 - DNA, 75 bp, synthetic construct
  source 1..75: mol_type = other DNA
gttgaaaatcagcacggtacgccctgcaacgggcacggggcatgcaatatcacaatggatacgctttattattac

SEQ ID NO: 314482 - DNA, 75 bp, synthetic construct
  source 1..75: mol_type = other DNA
tatagcgacgaaacattttgccagccaggcatgttgtacaataaagaggatggtttattttatgatgataaataa

SEQ ID NO: 314483 - DNA, 75 bp, synthetic construct
  source 1..75: mol_type = other DNA
ttaccagcatccattatggtgtcactggtcgtccggtttatcgttaccgtattcaggcagagcattactcattac

SEQ ID NO: 314484 - DNA, 75 bp, synthetic construct
  source 1..75: mol_type = other DNA
accaggcggaactggaccagctaattcatggcagttcatccaacgaacaggatacgcgtcgtctgccgaaaggct

SEQ ID NO: 314485 - DNA, 75 bp, synthetic construct
  source 1..75: mol_type = other DNA
tcaggaaatcagtacccactttgtttccatcgagcaactcattgctgacttcctccatgatgtagaatccattcg

SEQ ID NO: 314486 - DNA, 75 bp, synthetic construct
  source 1..75: mol_type = other DNA
aaaccgatgatgacgggactggcgcatttgggccatttggtgatttatctcctgtttattgcgctgccagtgatt

SEQ ID NO: 314487 - DNA, 75 bp, synthetic construct
  source 1..75: mol_type = other DNA
catgattcatgtttcctgtggcatctcaattctcgtgctgatggttgttcgtcttttgttaaggcttaaataccc

SEQ ID NO: 314488 - DNA, 75 bp, synthetic construct
  source 1..75: mol_type = other DNA
gggaattatctctgggtgaattatcctggtgggcggtctgcaatcaggtggcggatgcgctacccagaggcagca

SEQ ID NO: 314489 - DNA, 75 bp, synthetic construct
  source 1..75: mol_type = other DNA
cgtgaccagacctccgaatcacttgagcaacttgctcaccaaaacttgtcagcatggatgattgacgtcatcgcc

SEQ ID NO: 314490 - DNA, 75 bp, synthetic construct
  source 1..75: mol_type = other DNA
gtgaattatctctggctgaatttcctggtgggcggtccgcaatcagctggcggacgcgctaccggaagcggtatt

SEQ ID NO: 314491 - DNA, 75 bp, synthetic construct
  source 1..75: mol_type = other DNA
aagccaaagagattatcttcaatagcgatacgcctatcgacctgatattgctcgatatctatatgcaaaaagaga

SEQ ID NO: 314492 - DNA, 75 bp, synthetic construct
  source 1..75: mol_type = other DNA
aaaatattagtttaattgatatcaaatcagatcgcaaagcaattgaatgcctatttaaggataaaaaagagttat

SEQ ID NO: 314493 - DNA, 75 bp, synthetic construct
  source 1..75: mol_type = other DNA
ttcacacccaccagccacagaacccagcacaggaaaaggcggtggtcagcattaccgttgatccggagtctccgg

SEQ ID NO: 314494 - DNA, 75 bp, synthetic construct
  source 1..75: mol_type = other DNA
ggggagctggagatcctgctgccgcgttaccagtcagatccacgcccggtttatgcgttgtataccgaaaaagat

SEQ ID NO: 314495 - DNA, 75 bp, synthetic construct
  source 1..75: mol_type = other DNA
gcacgtctgacgggtgagctcgtcagcgccgcgggcagcaaagtcacctcaaacggtgaaatggcgctcagtgca

SEQ ID NO: 314496 - DNA, 75 bp, synthetic construct
  source 1..75: mol_type = other DNA
aactggataatacgggaagtcatcttcttgccagcgagtttgtcagcctgtcgggttcacaactgaataatcagt

SEQ ID NO: 314497 - DNA, 75 bp, synthetic construct
  source 1..75: mol_type = other DNA
aaacaactctccgtcagcagccagggtgatattaccaacggcgccacattgcagggcaacggtatcacgctgaat

SEQ ID NO: 314498 - DNA, 75 bp, synthetic construct
  source 1..75: mol_type = other DNA
cttttctgactctttcggaagtaggagttcgtaggctcgttggaagggatatcgatgaaggagatattccatatt

SEQ ID NO: 314499 - DNA, 75 bp, synthetic construct
  source 1..75: mol_type = other DNA
gacggttcatgattcggtccggcagcagggaacagacatgaccagtggcggtgacatcacggttactgccggacg

SEQ ID NO: 314500 - DNA, 75 bp, synthetic construct
  source 1..75: mol_type = other DNA
acctgaacatgaacgcgatacaggccggagaacgtcgtcgctatggcgggtccgggtggtatgaaactcatgccg

SEQ ID NO: 314501 - DNA, 75 bp, synthetic construct
  source 1..75: mol_type = other DNA
agaagtgctcatcccaggattacgcgtagaattttgccgcattaatggcctgcgtggaccaacagcggcaaatgt

SEQ ID NO: 314502 - DNA, 75 bp, synthetic construct
  source 1..75: mol_type = other DNA
agaagtgcttataccaggattacgtgtggaattttgccgcgtaaatggcctgcgaggaccaacagcggcaaatgt

SEQ ID NO: 314503 - DNA, 75 bp, synthetic construct
  source 1..75: mol_type = other DNA
tccgacctacaagatcgtgaaaattcaatatattgcaggaagtatgtaggcctgataagcgtagcgcatcaggca

SEQ ID NO: 314504 - DNA, 75 bp, synthetic construct
  source 1..75: mol_type = other DNA
agtcagggggacaccacgctgaaagcagccaccacggacaaccggggcagtctgctttcggccggcacgctctcc

SEQ ID NO: 314505 - DNA, 75 bp, synthetic construct
  source 1..75: mol_type = other DNA
gttgatccttacgtttatccagcaacctaactattcgcagcgtcttgattggcatggcgtggcgctgcgtgctgg

SEQ ID NO: 314506 - DNA, 75 bp, synthetic construct
  source 1..75: mol_type = other DNA
tcaattctcgtgctgatggtcgttcgtcttttgttaaggctgaaatacccaaccccgccgattatacctaagcca

SEQ ID NO: 314507 - DNA, 75 bp, synthetic construct
  source 1..75: mol_type = other DNA
tgctaacctttctgtcagcccctacattatatagcccaccggagactgctttccttgctgttattttcttttgca

SEQ ID NO: 314508 - DNA, 75 bp, synthetic construct
  source 1..75: mol_type = other DNA
tcctgccgaatccgcggcaacgcgcgccgagacagcagcaaaacgggcagaggatattgcatccgccgtggcgct

SEQ ID NO: 314509 - DNA, 75 bp, synthetic construct
  source 1..75: mol_type = other DNA
ttcagcggaatccgcggcaacgcgcgccgagacagcagcaaaacgggcagaggatattgcatccgccgtggcgct

SEQ ID NO: 314510 - DNA, 75 bp, synthetic construct
  source 1..75: mol_type = other DNA
atcaagggcaaacccgccagtgggcgtgctgtattatcacaggaacaggacgggattaaatcacatactcacagc

SEQ ID NO: 314511 - DNA, 75 bp, synthetic construct
  source 1..75: mol_type = other DNA
tataacaacggatatccaacaacgtatggaaatatcattcacctgaaagggatgacagccgttggcgaaggtgag

SEQ ID NO: 314512 - DNA, 75 bp, synthetic construct
  source 1..75: mol_type = other DNA
tttgcagccgcttcccgatgtgtggataccgtttaacgattcactggatatgcttgctggcttttcgcctggtta

SEQ ID NO: 314513 - DNA, 75 bp, synthetic construct
  source 1..75: mol_type = other DNA
gtctgcttcaaaagatgaggcgaccagacaagcgtcagcagcgaatggcagagccacgacagcaacgacgaaggc

SEQ ID NO: 314514 - DNA, 75 bp, synthetic construct
  source 1..75: mol_type = other DNA
aaacaagtaacgcaggggggcactctcacacagtaaatattggcgcacacacacactccgttgcgataggttcac

SEQ ID NO: 314515 - DNA, 75 bp, synthetic construct
  source 1..75: mol_type = other DNA
agaatacgctgggcggtcattcacttgcgctggggaggggcgacacaggcctgaaacaaaacggcgacggtaatc

SEQ ID NO: 314516 - DNA, 75 bp, synthetic construct
  source 1..75: mol_type = other DNA
taccgctgaatccgcggcaacgcgcgccgagacagcagcaaaacgggcagaggatattgcatccgccgtggcgct

SEQ ID NO: 314517 - DNA, 75 bp, synthetic construct
  source 1..75: mol_type = other DNA
gtctgcttcaaaagatgaggcgaccagacaagcgtcagcagcgaatggcagtgccacgaccgcatcgacgaaggc

SEQ ID NO: 314518 - DNA, 75 bp, synthetic construct
  source 1..75: mol_type = other DNA
gtctgcttcaaaagatgaggcgaccagacaagcgtcagcagcgaatggcagtgccacgactgcaccgacgaaggc

SEQ ID NO: 314519 - DNA, 75 bp, synthetic construct
  source 1..75: mol_type = other DNA
ttaaggccgcgtatgacctggctaacgggaaatacaccgcacaggatgcaacgacagcacagaaagggatcgttc

SEQ ID NO: 314520 - DNA, 75 bp, synthetic construct
  source 1..75: mol_type = other DNA
ggacaaattcgccagttggtatcccggttgtacgatagacgctcagagtagagggacgttatccgctatggcagc

SEQ ID NO: 314521 - DNA, 75 bp, synthetic construct
  source 1..75: mol_type = other DNA
ggttcgtttactaaaagatgtcctgccggtagggtacagtctgaatgcctcaacggtgaggaatcatttatgccg

SEQ ID NO: 314522 - DNA, 75 bp, synthetic construct
  source 1..75: mol_type = other DNA
ccatcccagaaccggcacactttccactgcgtcccaggtaaaaaaactccgccgtgtccttgagaagcagaaggt

SEQ ID NO: 314523 - DNA, 75 bp, synthetic construct
  source 1..75: mol_type = other DNA
atatgttcttgagacacaagtcaaaagcgtctcctcatgcatatcatatgcaacattaaacatgggtacaataat

SEQ ID NO: 314524 - DNA, 75 bp, synthetic construct
  source 1..75: mol_type = other DNA
cttgagacacaagtccggagcgcctcctcatgcatatcatatgcaacattaaatatgggtacaataatggcggca

SEQ ID NO: 314525 - DNA, 75 bp, synthetic construct
  source 1..75: mol_type = other DNA
aatctcagggacctccagttcggtatgtaccctgagtcaactcatgtgctggactggtttcatataaccatgagg

SEQ ID NO: 314526 - DNA, 75 bp, synthetic construct
  source 1..75: mol_type = other DNA
gagtgccgcagctggttctgcaagtgcggcggcttcttctgccactgcatcagccaacagtcaaaaagctgcaaa

SEQ ID NO: 314527 - DNA, 75 bp, synthetic construct
  source 1..75: mol_type = other DNA
gcacgttgatggtcgcaggtttaatacaagcacttttaaagacacctatcagtatggttctacagctgtcggaag

SEQ ID NO: 314528 - DNA, 75 bp, synthetic construct
  source 1..75: mol_type = other DNA
cctcaacaggcaggtatatctgaacttgttttgcgtgcaggtaatggtaatccgaaggggattactggtgcttta

SEQ ID NO: 314529 - DNA, 75 bp, synthetic construct
  source 1..75: mol_type = other DNA
gttggcgcaacgttcctgaccatgctcaacacgctgggtaacgccaacaccttctgggtgtatgcggctctgaac

SEQ ID NO: 314530 - DNA, 75 bp, synthetic construct
  source 1..75: mol_type = other DNA
atcccgcgcccgtctgggcgcgggattgtgggattgccgcttcattgacctttgtctgcctggcatttctgatag

SEQ ID NO: 314531 - DNA, 75 bp, synthetic construct
  source 1..75: mol_type = other DNA
ctggtgaatattccttatggttcacttgctaccgcgatgacccaacaaccacaatccccccccccccccggggcg

SEQ ID NO: 314532 - DNA, 75 bp, synthetic construct
  source 1..75: mol_type = other DNA
ggcgtctgcttcaaaagatgaggcggccagacaggcgtcagcagcgaagggcagcgccacgacggcatccgcgca

SEQ ID NO: 314533 - DNA, 75 bp, synthetic construct
  source 1..75: mol_type = other DNA
gccaacgatattctccggtaagattgatgtgttcccaggggataggagaagtcgcttgatatctagtatgacgtc

SEQ ID NO: 314534 - DNA, 75 bp, synthetic construct
  source 1..75: mol_type = other DNA
ggcagtcagtaatattttgcaggaactggaaagcgaaaaacgggtggtgaatatcgacgatgaaagccagacgcg

SEQ ID NO: 314535 - DNA, 75 bp, synthetic construct
  source 1..75: mol_type = other DNA
cgccgcctgaaaatgggcaaaatcgacgccgtcggcctggtgttccccgtgcgtcccgcgccgttgaatagcaac

SEQ ID NO: 314536 - DNA, 75 bp, synthetic construct
  source 1..75: mol_type = other DNA
atgaacttcagagcacgtattttttattacttttctttaaaaaaagagaaagaggaggataaaggtttaacatta

SEQ ID NO: 314537 - DNA, 75 bp, synthetic construct
  source 1..75: mol_type = other DNA
ctgcctttgaacaaaatatctcggcactggcgctggccgcgcaggtgatccctgggcatatcattcatatcacct

SEQ ID NO: 314538 - DNA, 75 bp, synthetic construct
  source 1..75: mol_type = other DNA
gattcctgtaatgactacaccgatattatcagtcattacctggggaagaactggggaattttcctcggggttatc

SEQ ID NO: 314539 - DNA, 75 bp, synthetic construct
  source 1..75: mol_type = other DNA
atacgccatcagagcagttttatccgcctggcgcaccaatcccgtggccatcggataccgttccgtctggttatg

SEQ ID NO: 314540 - DNA, 75 bp, synthetic construct
  source 1..75: mol_type = other DNA
atactgtcggtattggtgcacacacgcactccgttgcgattggttcacatggacacaccatcaccgttaacgctg

SEQ ID NO: 314541 - DNA, 75 bp, synthetic construct
  source 1..75: mol_type = other DNA
agcgcacatcgacagggtttacaaattttgcctgggtcaatacatctggtgatacttacgatatttacgttgcaa

SEQ ID NO: 314542 - DNA, 75 bp, synthetic construct
  source 1..75: mol_type = other DNA
atgaaagtagtaagcccttatgaagaattaaaaagctggtttagtctcgaaaactatgagcagttaaaatcactt

SEQ ID NO: 314543 - DNA, 75 bp, synthetic construct
  source 1..75: mol_type = other DNA
tttcactcaggagattaggggcgaagatcacattaaagatacagacaggcccgtagcagagaagtcattaaatgg

SEQ ID NO: 314544 - DNA, 75 bp, synthetic construct
  source 1..75: mol_type = other DNA
catcagcacactgtcggtattggtgcacacacgcactccgttgcgattggctcacatggacacaccatcaccgtt

SEQ ID NO: 314545 - DNA, 75 bp, synthetic construct
  source 1..75: mol_type = other DNA
accgatgattttgtcagattattagaaggtcgagtaaattcagaaactcatttaggtaaagttgggagcggtggt

SEQ ID NO: 314546 - DNA, 75 bp, synthetic construct
  source 1..75: mol_type = other DNA
gatagtacagctcagcagtgcgatcgacagcacttccgagtcactggcggcaacgccaaaagcagtaaaatcagc

SEQ ID NO: 314547 - DNA, 75 bp, synthetic construct
  source 1..75: mol_type = other DNA
gagcgatgtaacctgacgctggtaggtttttgtaagccgggacgggcgacgatttatactcatccgcaacgattg

SEQ ID NO: 314548 - DNA, 75 bp, synthetic construct
  source 1..75: mol_type = other DNA
gcatggatgttgttccctcgtgtaatggtctggaagtgcaaattgagctttccagccgtcgctttatggggttga

SEQ ID NO: 314549 - DNA, 75 bp, synthetic construct
  source 1..75: mol_type = other DNA
tgcccaccaaccggggcagattggctactccattatcgacagcaaagcgatcggccactttatgccgccagtttt

SEQ ID NO: 314550 - DNA, 75 bp, synthetic construct
  source 1..75: mol_type = other DNA
caagaactatcggcggcgtggccttcgatggatctgcgaacataaatttgcctggtgtaaacacggcaggtaatc

SEQ ID NO: 314551 - DNA, 75 bp, synthetic construct
  source 1..75: mol_type = other DNA
tggcaccacgtttggtcgcatcgctggtaaagaagccgctcaggcagcacgcaaggagacgcatcatgaagcagc

SEQ ID NO: 314552 - DNA, 75 bp, synthetic construct
  source 1..75: mol_type = other DNA
tagcgttgatcctgactccggctctttgtgccaccatgctgaaaccgattgccaaaggcgatcacggggaaggta

SEQ ID NO: 314553 - DNA, 75 bp, synthetic construct
  source 1..75: mol_type = other DNA
ttcatgatgcccgtgtccagcggggggaattaccctcaaatgaaattgcagttcgtggtctgaccagcgcgaacc

SEQ ID NO: 314554 - DNA, 75 bp, synthetic construct
  source 1..75: mol_type = other DNA
cgctccagggaacgtcagctcacccctaaagagagatccctggatagcatgacgcccgagcagaaaaacgcgtca

SEQ ID NO: 314555 - DNA, 75 bp, synthetic construct
  source 1..75: mol_type = other DNA
cgttgcgttggtctacaacggcatttcgcacgtagtgatgatggcatcgcccaaagaccttgaactgtttgcgct

SEQ ID NO: 314556 - DNA, 75 bp, synthetic construct
  source 1..75: mol_type = other DNA
cgttgcgctggtctacaacggcatttcgcatgtggtgatgatggcgtcgcccaaagaccttgagtactttgcgct

SEQ ID NO: 314557 - DNA, 75 bp, synthetic construct
  source 1..75: mol_type = other DNA
ttttatatgctgggtgttggtcacgcaacaattgccagagagttgggtattacagacagagcatctgaggatcga

SEQ ID NO: 314558 - DNA, 75 bp, synthetic construct
  source 1..75: mol_type = other DNA
caggatgcgctgactcagctcgccgccgtgctggcggtgggtagccagatgctgtggccggatgatgcgctgcat

SEQ ID NO: 314559 - DNA, 75 bp, synthetic construct
  source 1..75: mol_type = other DNA
aaaacggtgctaatacctcgttcgttaaccgcattgccgacacctctctgccactggatgaactggttgccgatc

SEQ ID NO: 314560 - DNA, 75 bp, synthetic construct
  source 1..75: mol_type = other DNA
gctgcccgatggtaattgattacctgattgatctggcgacccgtagccgtcgccgcctgatgattcgtctggtga

SEQ ID NO: 314561 - DNA, 75 bp, synthetic construct
  source 1..75: mol_type = other DNA
gcaaaaatggcaggccttgccaatgctggaacaaccggtcgcggctggtgaaatgtcacccgttatcaacccggc

SEQ ID NO: 314562 - DNA, 75 bp, synthetic construct
  source 1..75: mol_type = other DNA
cgattcttcagcactgactgaacaagtagtaatagatgtactggcctcggcgttcgacagcgcaggccagcgttg

SEQ ID NO: 314563 - DNA, 75 bp, synthetic construct
  source 1..75: mol_type = other DNA
caactcggcagggttagatctcgccaacgaacaccgtctggcgtcactctcctctgctctgctcaacagtgcgct

SEQ ID NO: 314564 - DNA, 75 bp, synthetic construct
  source 1..75: mol_type = other DNA
gcatgtcggtaacctgtacgttaaccgtaatatggtgggcgcagtggttggggtgcaaccgttcggcggcgaagg

SEQ ID NO: 314565 - DNA, 75 bp, synthetic construct
  source 1..75: mol_type = other DNA
cgcttccggttatggtctgacgcttggcgttcatacgcgtattgatgaaaccattgcccaggtcactggctcggc

SEQ ID NO: 314566 - DNA, 75 bp, synthetic construct
  source 1..75: mol_type = other DNA
cggtcactgctgtagaaaaattggcgcaacaggaagggcaaacagggctaccgcatccgaaaattccgctgccgc

SEQ ID NO: 314567 - DNA, 75 bp, synthetic construct
  source 1..75: mol_type = other DNA
aaattttgccacagtcggtttcccgtgcggctatcaccgccgcctatcgccgcccggaaaccgaagcggtttcta

SEQ ID NO: 314568 - DNA, 75 bp, synthetic construct
  source 1..75: mol_type = other DNA
ccggggccaacgggtgaacgtaatacctggacgttgctgccgcgtgagcgcgtgttgtgtattgccgatgatgaa

SEQ ID NO: 314569 - DNA, 75 bp, synthetic construct
  source 1..75: mol_type = other DNA
aaactggcgtatcaactggccgataaactgcgtaatcaaaaaaatgccagtggtcgcgcaggtatggttcagggg

SEQ ID NO: 314570 - DNA, 75 bp, synthetic construct
  source 1..75: mol_type = other DNA
atccctgaagcgaataaatttcttagcttgttaatgatgccacttatgtttatctcttgcgtgatgcatccactt

SEQ ID NO: 314571 - DNA, 75 bp, synthetic construct
  source 1..75: mol_type = other DNA
atgatttcaaagtactgcagactgagcagccctcgctctgatttaattattaaaacccatccgcatgcagagatt

SEQ ID NO: 314572 - DNA, 75 bp, synthetic construct
  source 1..75: mol_type = other DNA
gctggcaaagggagggattcagctccccgtactggatcctgagagcgcgattttgatagcacttgaaagagctgt

SEQ ID NO: 314573 - DNA, 75 bp, synthetic construct
  source 1..75: mol_type = other DNA
cgtcttgatgtggattcaccggtgaccttaatggctgagctggggcacggcctgttcggcgcgccgggcatcgaa

SEQ ID NO: 314574 - DNA, 75 bp, synthetic construct
  source 1..75: mol_type = other DNA
accagaagaacaggttgatccgcgcaaagcggcagttgccgcggctattgcccgcgctcaggccaaaaaagccgc

SEQ ID NO: 314575 - DNA, 75 bp, synthetic construct
  source 1..75: mol_type = other DNA
tgggatcatgtgaacatgcctttcgagcgtgcacgtgagttgttggatggggtattggattggcgagcaatcaaa

SEQ ID NO: 314576 - DNA, 75 bp, synthetic construct
  source 1..75: mol_type = other DNA
attgtgctggctactggcggcggctctgtgaaatcccgtgaaacgcgtaaccgtctttccgctcgtggcgttgtc

SEQ ID NO: 314577 - DNA, 75 bp, synthetic construct
  source 1..75: mol_type = other DNA
ggagcaacctggcatgcctgccagcctggcttctgccgtgaataacgagttcgtacctgacgtggagattagcgt

SEQ ID NO: 314578 - DNA, 75 bp, synthetic construct
  source 1..75: mol_type = other DNA
atcttttcattttcattaggtatcgttttttgtgtgctgagcagtttattcaaggaagcagataagtttctgagt

SEQ ID NO: 314579 - DNA, 75 bp, synthetic construct
  source 1..75: mol_type = other DNA
gaaatcagcagtgggtgccaatatgggattgttttgttatagacaagtgactccatttgctacctttattgcacg

SEQ ID NO: 314580 - DNA, 75 bp, synthetic construct
  source 1..75: mol_type = other DNA
ctgacggcgctgttcggccatatggggcttgagctggacccggtaagcgctgacgaacaagagcgtgccggctac

SEQ ID NO: 314581 - DNA, 75 bp, synthetic construct
  source 1..75: mol_type = other DNA
tttgatgaaaaagaaaatattaagattggcacagagtatttgcaatactggatagataaagaagcaacaattgag

SEQ ID NO: 314582 - DNA, 75 bp, synthetic construct
  source 1..75: mol_type = other DNA
atgaaattaattaagacatatagcgagaatataacatggcagataaatccgaaaagaaaaaagaaaccacaaata

SEQ ID NO: 314583 - DNA, 75 bp, synthetic construct
  source 1..75: mol_type = other DNA
cgtgggcgcgcaactgacgggtgatgatcgcgtgcgcggggtgatgtttaccggttcaaccgaagtcgctacgtt

SEQ ID NO: 314584 - DNA, 75 bp, synthetic construct
  source 1..75: mol_type = other DNA
tatttctcggtatgttgttgcaggcgatgcagcagtttaccggtatgaacatcatcatgtactacgcgccacgta

SEQ ID NO: 314585 - DNA, 75 bp, synthetic construct
  source 1..75: mol_type = other DNA
aaatcgaaaaaacaagcggctactggcgtgccaaagggttcaagcagtccggcgtactggaacgactggaacgtg

SEQ ID NO: 314586 - DNA, 75 bp, synthetic construct
  source 1..75: mol_type = other DNA
tgaaaaagatatcagcagtgataaggcagtaatcgctgcgtgcagtaacggacaggcagccagcgcagcttgtgc

SEQ ID NO: 314587 - DNA, 75 bp, synthetic construct
  source 1..75: mol_type = other DNA
cgggctactatagaatgtataagagcgcaccatcatcatcagccatcctcgacatgctcaaacgcgccaaacgcg

SEQ ID NO: 314588 - DNA, 75 bp, synthetic construct
  source 1..75: mol_type = other DNA
tgaattatgcattacaacaaaatccgttatcaaatcaagttcaaatgaaagcaaaattgaagctgaatcaaaatg

SEQ ID NO: 314589 - DNA, 75 bp, synthetic construct
  source 1..75: mol_type = other DNA
agaggattgaaccactcgggagaaataagtatttatggtgattttcgttatgatatagctaaattatcacattca

SEQ ID NO: 314590 - DNA, 75 bp, synthetic construct
  source 1..75: mol_type = other DNA
cgccagcgaacgttatcgcacgcagttagagaataccgaaattcagtggctggaagcacagcgccgtcaatctga

SEQ ID NO: 314591 - DNA, 75 bp, synthetic construct
  source 1..75: mol_type = other DNA
gtgacaatcgggttaagtttccttgatttcaccctcgcctttacgctgggcggcattatgttactgacgcttttc

SEQ ID NO: 314592 - DNA, 75 bp, synthetic construct
  source 1..75: mol_type = other DNA
cttgtcgccatcaatcgcatcagatgcatgtgaaaaagctgggaaggctaaaggcaatgataaacacataaaggt

SEQ ID NO: 314593 - DNA, 75 bp, synthetic construct
  source 1..75: mol_type = other DNA
caggctgctgtgaacacagcaactaaaactaatatgccatatggagagcgaattacggttgatagctggcaatta

SEQ ID NO: 314594 - DNA, 75 bp, synthetic construct
  source 1..75: mol_type = other DNA
aatgtatcgagtgggaaagtaagtagtatttattatattttacaagtgcctgatacttgggccggttcttcagat

SEQ ID NO: 314595 - DNA, 75 bp, synthetic construct
  source 1..75: mol_type = other DNA
tgccagcgatcgttatcgcacgcaattagagaatacagaaattcaatggctggaagcgcaacgccgtcaatctga

SEQ ID NO: 314596 - DNA, 75 bp, synthetic construct
  source 1..75: mol_type = other DNA
gtgaaatggtgctatttatgggcttcgctaagtctggtaaatcgacggcgatgggggagttttccatcaacgcca

SEQ ID NO: 314597 - DNA, 75 bp, synthetic construct
  source 1..75: mol_type = other DNA
ggcgaaagcggaaaatataaccgctcaaccgtttgatgcggtgatcttccacggtgattcggatcagcttcgcgc

SEQ ID NO: 314598 - DNA, 75 bp, synthetic construct
  source 1..75: mol_type = other DNA
tgcccgcgaatggcaaagtggcacctttgtcgccccgacgctgatcgaactggatgattttgccgaattgcaaaa

SEQ ID NO: 314599 - DNA, 75 bp, synthetic construct
  source 1..75: mol_type = other DNA
accgactccggcagaggaaccacaccagccattcctcgactttgccgagcaaattttgccccagtcggtttcccg

SEQ ID NO: 314600 - DNA, 75 bp, synthetic construct
  source 1..75: mol_type = other DNA
gcaaaccgtccagaattgcaggcgttatgtaacgcaatatggcgagttggcgcaggcaggaacacaacgattgtt

SEQ ID NO: 314601 - DNA, 75 bp, synthetic construct
  source 1..75: mol_type = other DNA
cccgacaaagccacccgtgacgcgttaattcgcgacaaaatcagcaacggtaactggcagtcacacattggtcgt

SEQ ID NO: 314602 - DNA, 75 bp, synthetic construct
  source 1..75: mol_type = other DNA
cgagccactgtacgagcaggtcaccgggaaagttgccgacggtaaacttaaccgaccgtgtcgtatttatgcccc

SEQ ID NO: 314603 - DNA, 75 bp, synthetic construct
  source 1..75: mol_type = other DNA
atgaccgaactttgccacacaggacgagggttgtctgaagagttcgacgacgacttccagaatagactcgctgcc

SEQ ID NO: 314604 - DNA, 75 bp, synthetic construct
  source 1..75: mol_type = other DNA
ctgtaccaaaaaggctgggcaaagcgcgaaatggtgctcttcatggggttcgctaaatccggtaaatcgaccgca

SEQ ID NO: 314605 - DNA, 75 bp, synthetic construct
  source 1..75: mol_type = other DNA
ttcacgtaaccagaaaggcggcgtaagcatccgcgttaagcagaacctcgaacaaatgcgattcatcgaacgcat

SEQ ID NO: 314606 - DNA, 75 bp, synthetic construct
  source 1..75: mol_type = other DNA
tgctgactgaaaagcttgggaaaatctcatcggaagaggggatgacgacacagcaagaaaaaagaaatggctgca

SEQ ID NO: 314607 - DNA, 75 bp, synthetic construct
  source 1..75: mol_type = other DNA
tggtacagaagcaaattgaaagcctctgggctcaactggagcagttgttaaggcagcaggcagagaaaaagaatg

SEQ ID NO: 314608 - DNA, 75 bp, synthetic construct
  source 1..75: mol_type = other DNA
taagttttggtattgggactcgcctgacctgcgatatcccccaggtaaaacccctgaatattgtcattaagttgg

SEQ ID NO: 314609 - DNA, 75 bp, synthetic construct
  source 1..75: mol_type = other DNA
cagattggcggctttaaagcgatgctgggtgatgtcgcagcgcaggtattgttgctgcaaagccgtgacctggat

SEQ ID NO: 314610 - DNA, 75 bp, synthetic construct
  source 1..75: mol_type = other DNA
gtcttgccgtcctgctagcaggatgtggcgatgatggcatctatggcaactatgttaatcaacagttcggcgtca

SEQ ID NO: 314611 - DNA, 75 bp, synthetic construct
  source 1..75: mol_type = other DNA
actgctgttgatcccaatgtcttacgttcagacgccattgcaacttgggattttacgttttttgctcggtgccgc

SEQ ID NO: 314612 - DNA, 75 bp, synthetic construct
  source 1..75: mol_type = other DNA
ggcgaagccggagatactgagttcctgaaggaagtcaaaggagcttaccaggcacagttacagaactcaccatat

SEQ ID NO: 314613 - DNA, 75 bp, synthetic construct
  source 1..75: mol_type = other DNA
gcggactcccttacggggttattcagcatcgctggatttttgctgatttatgcccgagtctgtaccacactggtt

SEQ ID NO: 314614 - DNA, 75 bp, synthetic construct
  source 1..75: mol_type = other DNA
tcacaatactggtttcgccggattttcatttgcggatggtgccctcatccacatccagctctcgtccgagcacag

SEQ ID NO: 314615 - DNA, 75 bp, synthetic construct
  source 1..75: mol_type = other DNA
cccgaaactggtactcagcctgtttgtcaccacgttaatcatccaggtggcgacaggctcaattgcccccattct

SEQ ID NO: 314616 - DNA, 75 bp, synthetic construct
  source 1..75: mol_type = other DNA
tccgtcgccagcgggagatgcggctggtataatgcaggggaagttactctttaacagtggaaaaaagcgcgtcgg

SEQ ID NO: 314617 - DNA, 75 bp, synthetic construct
  source 1..75: mol_type = other DNA
atgtttcagtccctaacttatatccgctttatagccgaaaggtaaataaagtctattggcggtataagcatccaa

SEQ ID NO: 314618 - DNA, 75 bp, synthetic construct
  source 1..75: mol_type = other DNA
aacgccaatgctcttatcgccacacaagtaccgcgtaataaaagcggctgggcgctgggtacgctctccaccggc

SEQ ID NO: 314619 - DNA, 75 bp, synthetic construct
  source 1..75: mol_type = other DNA
gcaacttggcattacaggccactcggccctgaatatgtggtccggcatagtcttcagtattacctttttattctc

SEQ ID NO: 314620 - DNA, 75 bp, synthetic construct
  source 1..75: mol_type = other DNA
ccaaatcgccggacgcattttcagctataaccagtcgtttcgcgatattggcaacgttacggggccgttgatggg

SEQ ID NO: 314621 - DNA, 75 bp, synthetic construct
  source 1..75: mol_type = other DNA
atcgcctcggtggtcagcgctgtacagatgctgatcaacgcctacgcctttggcctgtatcaatcattagggatt

SEQ ID NO: 314622 - DNA, 75 bp, synthetic construct
  source 1..75: mol_type = other DNA
gaacaatccaggaaagaagctctcaagtcttatctcacaacctatggatgggtgacgcttggcgcgtggtatcag

SEQ ID NO: 314623 - DNA, 75 bp, synthetic construct
  source 1..75: mol_type = other DNA
tcctcgacttcactgatgacagaatcagctaaaaccgccagtggtaattacactgtcacggtatccaatggcagc

SEQ ID NO: 314624 - DNA, 75 bp, synthetic construct
  source 1..75: mol_type = other DNA
cttcaatgggctgagcgatcaggatgtcagcggtatctatgacgcccagaaaaaagcgctcggcacgatgattaa

SEQ ID NO: 314625 - DNA, 75 bp, synthetic construct
  source 1..75: mol_type = other DNA
cagttcaattcgctgaccggtattttcagtcttgctggtttcttgctgatatacgccagaatttgtacaaccact

SEQ ID NO: 314626 - DNA, 75 bp, synthetic construct
  source 1..75: mol_type = other DNA
ttgccggtggcaaagattcaattcttgtaaaattctttaactcactaacaggtgccgcttcgatgcttaccgcgc

SEQ ID NO: 314627 - DNA, 75 bp, synthetic construct
  source 1..75: mol_type = other DNA
atttggtaaattcatagatttgacgacaagtgctatttcaacactaaatgccttacttgaggccttagcgccccc

SEQ ID NO: 314628 - DNA, 75 bp, synthetic construct
  source 1..75: mol_type = other DNA
atttattggcctgggactgatgctggcaggaaaatacctgattgatgaaagaatgaaaaagcgccgtactgaagc

SEQ ID NO: 314629 - DNA, 75 bp, synthetic construct
  source 1..75: mol_type = other DNA
gtgagcgaaattaaagacgttattgttcaggggttatggaagaacaactccgcactggttcagttgcttggcctc

SEQ ID NO: 314630 - DNA, 75 bp, synthetic construct
  source 1..75: mol_type = other DNA
tgcgctggtccagttgctcggcctttgtccgctgctggcggtcacgtccactgccaccaacgccctgggtttagg

SEQ ID NO: 314631 - DNA, 75 bp, synthetic construct
  source 1..75: mol_type = other DNA
atgaaatggatagtcaaaatgctgaggaccccaacacactaatatccaagttattagaacagtcatttggaatta

SEQ ID NO: 314632 - DNA, 75 bp, synthetic construct
  source 1..75: mol_type = other DNA
acaatgaaaaatataggtgattatactctaaccgccgttgaaacaacttatagtacatatattgcggcgcaagcc

SEQ ID NO: 314633 - DNA, 75 bp, synthetic construct
  source 1..75: mol_type = other DNA
gctgtgaaatatctcattgatgaaaaaatgaaaaagcgccgcgctgaagcaatcgccgaacgcggcttgccgaac

SEQ ID NO: 314634 - DNA, 75 bp, synthetic construct
  source 1..75: mol_type = other DNA
aagttgatctcagccgttgatgtaagggatatagcacaattgcttgatgagtatatagctgccggacaaccaaga

SEQ ID NO: 314635 - DNA, 75 bp, synthetic construct
  source 1..75: mol_type = other DNA
tggatgttctgataccaggaaggcttcagacaaaaagccgggtggagccgctgtcctctggttcaagcgtggtga

SEQ ID NO: 314636 - DNA, 75 bp, synthetic construct
  source 1..75: mol_type = other DNA
tggatgttctgataccaggaaggcttcagacaaaaagccgggtgcagccgctgttctctgggtcaagcgtggtga

SEQ ID NO: 314637 - DNA, 75 bp, synthetic construct
  source 1..75: mol_type = other DNA
tggatgttctgataccaggaaggcttcagacaaaaagccgggtgtagccgctgtcctctggatcaagcgtggtga

SEQ ID NO: 314638 - DNA, 75 bp, synthetic construct
  source 1..75: mol_type = other DNA
agccgtgacctggatctggaagccagcgccgctgcgcatccggttcgtgtcgcacaaaaattacgcgcaggataa

SEQ ID NO: 314639 - DNA, 75 bp, synthetic construct
  source 1..75: mol_type = other DNA
ccgtagtcacttgggcaatcttcttcagtaagagcgttgagttcttcaatcagaagcgtcgcctgaaacgcgaac

SEQ ID NO: 314640 - DNA, 75 bp, synthetic construct
  source 1..75: mol_type = other DNA
cagattggcggctttaaagcgatgctgggtgatgttgcagcgcaggtattgttgttgcaaagccgtgacctggat

SEQ ID NO: 314641 - DNA, 75 bp, synthetic construct
  source 1..75: mol_type = other DNA
ttccgatgatacgcctttgtcgggtggatgttctgaaaccaagaaggcttcagacaaaaagtctggtggatccgc

SEQ ID NO: 314642 - DNA, 75 bp, synthetic construct
  source 1..75: mol_type = other DNA
gccaacaagcgtgtgcgtgcaaccaccctgcattatttctggtgtcgggagtttggcaaggaaaaaggcaggaaa

SEQ ID NO: 314643 - DNA, 75 bp, synthetic construct
  source 1..75: mol_type = other DNA
cattcagacgccggaaggggtgacggagaaggattatcagttcctgccgtcgaaaaatgaccatttcgtgagcgg

SEQ ID NO: 314644 - DNA, 75 bp, synthetic construct
  source 1..75: mol_type = other DNA
tggatgttctgataccaggaaggcttcagacaaaaagccgggtgtagccgctgtactctggctcaagcgtggtga

SEQ ID NO: 314645 - DNA, 75 bp, synthetic construct
  source 1..75: mol_type = other DNA
cattatcacgtgatattactgctcaacaaagatacttggtgttcactcggggatttcagcgaaccgtcttcgctg

SEQ ID NO: 314646 - DNA, 75 bp, synthetic construct
  source 1..75: mol_type = other DNA
acaaagatacctggtgctcgctcggggatttcagcgaaccatcttcgctggcgacgatgatcctggaggcatggt

SEQ ID NO: 314647 - DNA, 75 bp, synthetic construct
  source 1..75: mol_type = other DNA
gtagcgctctgcatcttgagccctggcagggtaatggactggttcatttttccaggcggacgcctttccgtaaac

SEQ ID NO: 314648 - DNA, 75 bp, synthetic construct
  source 1..75: mol_type = other DNA
gctcctagctttggtcactgggcagcgtttgggagatatatccaaaatgaaatttagtgatatttgggaagatca

SEQ ID NO: 314649 - DNA, 75 bp, synthetic construct
  source 1..75: mol_type = other DNA
tccgcgaagtgaacgctaactcactggctcgttacctgctggtagccagcgccattggttctctttataagatga

SEQ ID NO: 314650 - DNA, 75 bp, synthetic construct
  source 1..75: mol_type = other DNA
tcgtgtagtgttatcgaaccccgcaacgctccctccgcgtacgcatcgcttgctgttggtggaactggaaggtga

SEQ ID NO: 314651 - DNA, 75 bp, synthetic construct
  source 1..75: mol_type = other DNA
aacgaacgaagccgaagccattgctattgccactgaagccaatacacgcctagctgagcaaagaactcgacagat

SEQ ID NO: 314652 - DNA, 75 bp, synthetic construct
  source 1..75: mol_type = other DNA
tgccgtgactatgcagtcagtgcatacttagtgcatttttttcgttcaacttcacaagcagagcgcggagcgcag

SEQ ID NO: 314653 - DNA, 75 bp, synthetic construct
  source 1..75: mol_type = other DNA
ctcttcgcctcaatgcgattaactggagtttacgcgatgttgtagcgcgctgccgagactatgcggttagcccat

SEQ ID NO: 314654 - DNA, 75 bp, synthetic construct
  source 1..75: mol_type = other DNA
ttgcccgcattaactggtcgggagccgctgcggtcaacatcgacacgctgcgcgcattacacctgaaacacaatt

SEQ ID NO: 314655 - DNA, 75 bp, synthetic construct
  source 1..75: mol_type = other DNA
ttactgttttgagcagaatggcgtgtttgagcgggtgttacgcgagctggagtttaacgttcgcagcttgttagg

SEQ ID NO: 314656 - DNA, 75 bp, synthetic construct
  source 1..75: mol_type = other DNA
tccgtgctaccagcaaaagtagcggtagataatacgaaaaataaacaagcagcacagacttttggcgctgttctt

SEQ ID NO: 314657 - DNA, 75 bp, synthetic construct
  source 1..75: mol_type = other DNA
gcattaccgccgcgtacccatcgtttgttgttggtggagctggaaggcgaacactggattgccgatgtcggtttc

SEQ ID NO: 314658 - DNA, 75 bp, synthetic construct
  source 1..75: mol_type = other DNA
ggagagtatcggttgttgcaggagggtgatgattgggtgttgcagtttaatcatcatcagcattggcagtcgatg

SEQ ID NO: 314659 - DNA, 75 bp, synthetic construct
  source 1..75: mol_type = other DNA
ttcgtttagtgcctgacatcgtgcaagccacgtcgcacggagagtatcgcctgcgacaggaaaatgacgactgga

SEQ ID NO: 314660 - DNA, 75 bp, synthetic construct
  source 1..75: mol_type = other DNA
gtgcgccggttgcaccagcgcccggcctgcgccgacgccagtgattgtccacaacgcctgcccgaaagtgagcct

SEQ ID NO: 314661 - DNA, 75 bp, synthetic construct
  source 1..75: mol_type = other DNA
ttgtgttgttatcactggcggtggtcggtctgtttctgacgaagcatgaaaacgccagactgcgcgcctcactgg

SEQ ID NO: 314662 - DNA, 75 bp, synthetic construct
  source 1..75: mol_type = other DNA
ttgtgttgttatcactggcggtggcggggctgtttctggcgaagcatgaaaacgccagcctgcgcgcctcgctgg

SEQ ID NO: 314663 - DNA, 75 bp, synthetic construct
  source 1..75: mol_type = other DNA
ctcataaatcccttaatgggttatacattgacaaccatttatcaggtcctatctctgatttagatcagcgtgtat

SEQ ID NO: 314664 - DNA, 75 bp, synthetic construct
  source 1..75: mol_type = other DNA
agcgcgagaaaaccatcacgaggttacttaatgaaaacgaggattttcgccgctggtacggcgctgacctgcctg

SEQ ID NO: 314665 - DNA, 75 bp, synthetic construct
  source 1..75: mol_type = other DNA
atgtcaaagctgatgattgtgctggtcgtgttgttatcgctggcggtgtccggtctgtttctggtgaaacacaaa

SEQ ID NO: 314666 - DNA, 75 bp, synthetic construct
  source 1..75: mol_type = other DNA
gattggcatgctgaaaaatcagctcaatgtcgcgggtacgctcgcccgacgtaatgaatccgcgcaggtggcact

SEQ ID NO: 314667 - DNA, 75 bp, synthetic construct
  source 1..75: mol_type = other DNA
gagcgcaaaatctcgccaacaagtcgagcacgattacattgccagcctgaatatggctaaagagctttctatggt

SEQ ID NO: 314668 - DNA, 75 bp, synthetic construct
  source 1..75: mol_type = other DNA
tgcaggggaacttgagatcgaggcctcggtgaaaaactctcagaagacggtcaaggtgaaattcaacgcggatgc

SEQ ID NO: 314669 - DNA, 75 bp, synthetic construct
  source 1..75: mol_type = other DNA
cggtctgtttctggcgaagcataaaaacgccagcctgcgcacctcactggacagggcaaacaacgtagccagcga

SEQ ID NO: 314670 - DNA, 75 bp, synthetic construct
  source 1..75: mol_type = other DNA
atgtcaaagctgatgattgtgctggtcgtgttgttatcgctggcggtggcggggctgtttctggcgaagcatgaa

SEQ ID NO: 314671 - DNA, 75 bp, synthetic construct
  source 1..75: mol_type = other DNA
ctccgccgcccgttgtatacaacgcctgtccgaaggtgagcctctgcccgatgccgggaagcgagcccgtcacta

SEQ ID NO: 314672 - DNA, 75 bp, synthetic construct
  source 1..75: mol_type = other DNA
cccgtattacaggcttatcccgtattacaggcttatcacgtgtgacagtcagtctctgggtgtgttcaggaacat

SEQ ID NO: 314673 - DNA, 75 bp, synthetic construct
  source 1..75: mol_type = other DNA
tgatgcctgaaagcgaactgattggcgtgaccgtgtcgcgttccgttgccgatcaattgccgaaagtggttaacc

SEQ ID NO: 314674 - DNA, 75 bp, synthetic construct
  source 1..75: mol_type = other DNA
gccaacgccgctcgaatatctgccgcgcttttctgattatcttggacgggaaattttcatcaaacgggatgacgt

SEQ ID NO: 314675 - DNA, 75 bp, synthetic construct
  source 1..75: mol_type = other DNA
gtcaggctctgcatctgccccatatgcagaatttcgacggtgtctttgatgccaaaatcgatctgatcgataaca

SEQ ID NO: 314676 - DNA, 75 bp, synthetic construct
  source 1..75: mol_type = other DNA
ggaaggcattctgcttgatcctgtgtataccggaaaagcgatggcggggctgattgacggtatcagtcagaaacg

SEQ ID NO: 314677 - DNA, 75 bp, synthetic construct
  source 1..75: mol_type = other DNA
attcagtctaaccatgtgcgccagactgccgcagtggccgcaaaacttggtctgcattgcgtggcgctgctggaa

SEQ ID NO: 314678 - DNA, 75 bp, synthetic construct
  source 1..75: mol_type = other DNA
aaagatgaagggccgattctgtttattcataccggcggtgcgcctgcgctgttcgcctatcatccccacgtttag

SEQ ID NO: 314679 - DNA, 75 bp, synthetic construct
  source 1..75: mol_type = other DNA
acattccaacagaaaacaaactaacacttggtattatatttttaattattttattcttactgtatttcggcatat

SEQ ID NO: 314680 - DNA, 75 bp, synthetic construct
  source 1..75: mol_type = other DNA
gggatagagaatggatacagcaggtggtcgctttactggttgggcatggtgcgtttactctctacccagcattaa

SEQ ID NO: 314681 - DNA, 75 bp, synthetic construct
  source 1..75: mol_type = other DNA
cttgttgccagtgggttgtcaccaaagaaatcacctaagccagtactgtctgtgcctgtagcatcgctccgtcgt

SEQ ID NO: 314682 - DNA, 75 bp, synthetic construct
  source 1..75: mol_type = other DNA
ctgtggcaattttagcgtcattcaccctggcaggatgccagtcaaatgctgacgatcatgccgccgatgtttatc

SEQ ID NO: 314683 - DNA, 75 bp, synthetic construct
  source 1..75: mol_type = other DNA
tgctgacgatcatgccgccgatgtttatcaaaccgatcaactgaataccaaacaagaaactaaaaccgttaatat

SEQ ID NO: 314684 - DNA, 75 bp, synthetic construct
  source 1..75: mol_type = other DNA
caaatctgcttacccgaaacttgcagccgcttatccgtcaggcgtgatccctgatatgcgtggctggacgattaa

SEQ ID NO: 314685 - DNA, 75 bp, synthetic construct
  source 1..75: mol_type = other DNA
aagccagatgcaccgcagtttagtggtgccgccagcacggggacagagcgaccttcagcaggagactggacagaa

SEQ ID NO: 314686 - DNA, 75 bp, synthetic construct
  source 1..75: mol_type = other DNA
agagtttgctttggtcaaaataccacatttgaccaatcagcaaattaccaatttttcattaactagcagatttaa

SEQ ID NO: 314687 - DNA, 75 bp, synthetic construct
  source 1..75: mol_type = other DNA
gtggaagatgctgggagatctaggagaaaatctggattcgaaaaggaaacccattaccagcggtctgagggaagc

SEQ ID NO: 314688 - DNA, 75 bp, synthetic construct
  source 1..75: mol_type = other DNA
cagtcagaaattgttcggattctggataagtttactgcacttaccgctgagcttaccgctgagcttaacatgcgt

SEQ ID NO: 314689 - DNA, 75 bp, synthetic construct
  source 1..75: mol_type = other DNA
ggctggaacactgagccctcttaacctaaaaagaattatgcacactccagaaggaggggatagaagaaattggcc

SEQ ID NO: 314690 - DNA, 75 bp, synthetic construct
  source 1..75: mol_type = other DNA
gctgagcttaccatgcgtaaaaaacagtacaactactatcgtgataaattgctgagttttgaagagggtggggtt

SEQ ID NO: 314691 - DNA, 75 bp, synthetic construct
  source 1..75: mol_type = other DNA
atacgccagaatttgtacaaccactgtagctgccatatttgcccttcaggcctacctacctgatcatgttattaa

SEQ ID NO: 314692 - DNA, 75 bp, synthetic construct
  source 1..75: mol_type = other DNA
tcgtttttatggtgtgttgaaaagtaacgttttcaggataagaaaatcgattctgatgttggtggtttttgttct

SEQ ID NO: 314693 - DNA, 75 bp, synthetic construct
  source 1..75: mol_type = other DNA
aaaagtaacgttttcaggataagaaaatcgattctgatattggtgaactttgttcttgtggcagagttatctgta

SEQ ID NO: 314694 - DNA, 75 bp, synthetic construct
  source 1..75: mol_type = other DNA
ctcagggctggatcacgctgggcgcgtggtatcagacatttgcgaccgcaaaccagagactggaaagcattgcca

SEQ ID NO: 314695 - DNA, 75 bp, synthetic construct
  source 1..75: mol_type = other DNA
tataccaccgtcagggtgctttcgactgccggcagcaactccatttttggtcgactagttaataccgttacgggc

SEQ ID NO: 314696 - DNA, 75 bp, synthetic construct
  source 1..75: mol_type = other DNA
acatctacctgatagacagcatgatcaggcctctgttgatggtgttcgggttcttttttgcatcggtcgccatcg

SEQ ID NO: 314697 - DNA, 75 bp, synthetic construct
  source 1..75: mol_type = other DNA
acaaatggcgatgtattggttattcgttgcatagatagctcaataaataccagatatctatatcagattttggca

SEQ ID NO: 314698 - DNA, 75 bp, synthetic construct
  source 1..75: mol_type = other DNA
tgtttattacgttataagagtcgatgacattctcattgcgcgcattcttcatcagctgatggaacctcgccgtca

SEQ ID NO: 314699 - DNA, 75 bp, synthetic construct
  source 1..75: mol_type = other DNA
cggtgatgcagagcgaatactgtctggcggtgaatactggcaacgtcagaagacgctgctgacagaaagggaagt

SEQ ID NO: 314700 - DNA, 75 bp, synthetic construct
  source 1..75: mol_type = other DNA
ggcaggctggtattccgttgctcagaagccacgatgccagaaaacttgaaccgccccgggaatcctggagactaa

SEQ ID NO: 314701 - DNA, 75 bp, synthetic construct
  source 1..75: mol_type = other DNA
tacccgtacggcaacccgtaaggcgaaactcaccgaactggcacaacgctggctggttaagcgtgttggaggtgc

SEQ ID NO: 314702 - DNA, 75 bp, synthetic construct
  source 1..75: mol_type = other DNA
aaccaactggctaatggacagtctgctaaccagataaccctgaccgtcgtggacagctatggtaacccgttgcag

SEQ ID NO: 314703 - DNA, 75 bp, synthetic construct
  source 1..75: mol_type = other DNA
ggattatcagttcctgccgtcgaaaaatgaccatttcgcgagcgggaaaatcacgcgtacatttagtaccaacaa

SEQ ID NO: 314704 - DNA, 75 bp, synthetic construct
  source 1..75: mol_type = other DNA
ggcaggctggtataccgttgctcagaagccacgatgccagaaaactgctgcagatgaccggagaatggctgaata

SEQ ID NO: 314705 - DNA, 75 bp, synthetic construct
  source 1..75: mol_type = other DNA
atgcgtgtgcagaactggctgagagtggtcttgtcagttcctcctgggttcagggcgatgcaattttttgtgtaa

SEQ ID NO: 314706 - DNA, 75 bp, synthetic construct
  source 1..75: mol_type = other DNA
aaaggaaaccaatgggtgaacctattaccttcacgttttacgaactttgccaggatctaggctggtcttacaatg

SEQ ID NO: 314707 - DNA, 75 bp, synthetic construct
  source 1..75: mol_type = other DNA
caggcggggcttgagcttatcggaaacgctgaaggttgccgacgtgatccatacatgtgcccggcgggggtatgg

SEQ ID NO: 314708 - DNA, 75 bp, synthetic construct
  source 1..75: mol_type = other DNA
gatattttgttcggcactaccggaccacgcggcgggaagaaagatggtgtggtgcaaacaatggcaaaaagcgcc

SEQ ID NO: 314709 - DNA, 75 bp, synthetic construct
  source 1..75: mol_type = other DNA
tataatgtggctattgatgatgctataaaatcagtaaggaatgttgggggtagattagaggaggaattagatatg

SEQ ID NO: 314710 - DNA, 75 bp, synthetic construct
  source 1..75: mol_type = other DNA
attgcggtacgtcgtgcaggtgtcatcccgattttattggcagcatttacgtcaggttcttttcctgaacgttga

SEQ ID NO: 314711 - DNA, 75 bp, synthetic construct
  source 1..75: mol_type = other DNA
gaattttttgttcatgtctggggaaatggagccaacttcgacaacacgattttgcgccgttcatacgaacggcag

SEQ ID NO: 314712 - DNA, 75 bp, synthetic construct
  source 1..75: mol_type = other DNA
tcgcctgccgtgcgctggggctggataccggcccgatgtcgggttttgaccgtcaacacgttgacgacgcctttt

SEQ ID NO: 314713 - DNA, 75 bp, synthetic construct
  source 1..75: mol_type = other DNA
tggaaaacatgcagcagaactactccagcgggcagtatggaatgaaaaatgttcatccagcaatctggtactcca

SEQ ID NO: 314714 - DNA, 75 bp, synthetic construct
  source 1..75: mol_type = other DNA
gcagctggttaaagagatcacttctactgatgatttctaccgtctgggtaaagaactggctctgcagagcggtct

SEQ ID NO: 314715 - DNA, 75 bp, synthetic construct
  source 1..75: mol_type = other DNA
cgcagaagccggtgacgttgcgaacgccatcctcgacggtactgacgcagtaatgttgtctggtgaatccgcaaa

SEQ ID NO: 314716 - DNA, 75 bp, synthetic construct
  source 1..75: mol_type = other DNA
acgcgcacgcattccgttcaccagtgacatggatgacataacgctcgttccgttcacgaagtcgctggggcacgg

SEQ ID NO: 314717 - DNA, 75 bp, synthetic construct
  source 1..75: mol_type = other DNA
atttatccactggtgattagctggtttgccgatggtcgtctgaaaatgcacgaaaacgccgcgtggctggatggt

SEQ ID NO: 314718 - DNA, 75 bp, synthetic construct
  source 1..75: mol_type = other DNA
catcggtgcatttcgtcaccgatgaactggacggtggcccggttattttacaggcgaaagtcccggtatttgctg

SEQ ID NO: 314719 - DNA, 75 bp, synthetic construct
  source 1..75: mol_type = other DNA
gaagaaacgatcccgtgaatgtcagtataaacggcctgatgtactcagggccgttgcaccgaatcaagtctggag

SEQ ID NO: 314720 - DNA, 75 bp, synthetic construct
  source 1..75: mol_type = other DNA
tatgggtaaaccgttttgtaaactggtacaactttgaacataaacacagtgggatcaaatacgttacgccagccg

SEQ ID NO: 314721 - DNA, 75 bp, synthetic construct
  source 1..75: mol_type = other DNA
ctcttgccgacagaggggtttatatcgcttcagaatcaactttttatcgcgtattaaaatcagctaaccaactga

SEQ ID NO: 314722 - DNA, 75 bp, synthetic construct
  source 1..75: mol_type = other DNA
atgaatattgtggtgcttatttccggcaacggaagtaatttgcaggcaattattgacgcctgtaaaaccaacaaa

SEQ ID NO: 314723 - DNA, 75 bp, synthetic construct
  source 1..75: mol_type = other DNA
tctcgagttcaacaacgacaaccgtaaactgcgtattaccgaagcggtttgccgtggcgctgttgaaactgcgga

SEQ ID NO: 314724 - DNA, 75 bp, synthetic construct
  source 1..75: mol_type = other DNA
cacggcttgcagttaaacagtcgtgaactgccggatcatctgccgctgtatctggagtacctggcgcagctgccg

SEQ ID NO: 314725 - DNA, 75 bp, synthetic construct
  source 1..75: mol_type = other DNA
ctcgacgatatcgacagtatgccgttccgcccaagctggatttacccgtcagtcgctgaaatcgacgttatctga

SEQ ID NO: 314726 - DNA, 75 bp, synthetic construct
  source 1..75: mol_type = other DNA
gtgatgccgatgttcacgcgtatcaaacaggaaaatggatgggatcatttgaatgatctgcgcgaaaaattcaat

SEQ ID NO: 314727 - DNA, 75 bp, synthetic construct
  source 1..75: mol_type = other DNA
atttaaataacctggaaacagatcgcgatgaggagggtaactatctggcttttggatataacgttgacactcctg

SEQ ID NO: 314728 - DNA, 75 bp, synthetic construct
  source 1..75: mol_type = other DNA
aaagagatattccgagccagtatcgctttttcaaaatgtttaccaatctggcactggttatagatcagttaaccg

SEQ ID NO: 314729 - DNA, 75 bp, synthetic construct
  source 1..75: mol_type = other DNA
aatgacattgaatgtttcgtctttgaaagagatattcctagccagtatcgcttttcaaaatgtttaccaatctgg

SEQ ID NO: 314730 - DNA, 75 bp, synthetic construct
  source 1..75: mol_type = other DNA
ggctcagaaaggtgatgttgtggtcatggtttctggcgcactggtaccgagcggcactactaacaccgcatctgt

SEQ ID NO: 314731 - DNA, 75 bp, synthetic construct
  source 1..75: mol_type = other DNA
cacgtgcggtgcgtaaatacttcccggatgcaaccatcctggcgctgaccaccaacgaaaaactgcacatcagct

SEQ ID NO: 314732 - DNA, 75 bp, synthetic construct
  source 1..75: mol_type = other DNA
ctcgcgcagtgcgtaaatacttcccggatgccaccattctggcgctgaccactaacgaaaaaacggctcaccaac

SEQ ID NO: 314733 - DNA, 75 bp, synthetic construct
  source 1..75: mol_type = other DNA
gccagaaacggaaaaaaccagcccggatatgaaacaacctgagccagtagtgcaacaggaaccggaaatagcctg

SEQ ID NO: 314734 - DNA, 75 bp, synthetic construct
  source 1..75: mol_type = other DNA
ccgtcaccctctgttcaggataaaccagccagcactgacaataccaacatcaacggcgaagacatgactgagatt

SEQ ID NO: 314735 - DNA, 75 bp, synthetic construct
  source 1..75: mol_type = other DNA
tcctgggattgacctggaatcaggagttagccgcgacaatcgaccgactggaatcactggatcgaagtgagctgc

SEQ ID NO: 314736 - DNA, 75 bp, synthetic construct
  source 1..75: mol_type = other DNA
ctgagcgctggagcaaacagttgcgtgactgggaactcattcaggcagtttatctgaatccagaaaaagaagcgg

SEQ ID NO: 314737 - DNA, 75 bp, synthetic construct
  source 1..75: mol_type = other DNA
ggctgcatcaatcatgcaatgctggcagcacaggccgtacagcaggcagggctaacactcgcaggctgggtggcg

SEQ ID NO: 314738 - DNA, 75 bp, synthetic construct
  source 1..75: mol_type = other DNA
tcggattcgttcatgtttgcagagtgggtaacgcaggaacaactgccggtgattctggtcgttggggtaaaactg

SEQ ID NO: 314739 - DNA, 75 bp, synthetic construct
  source 1..75: mol_type = other DNA
atatcatcagcgcgcaagagggcaggccaattgacccattggtgatgagcgccggattacgtgcgctggaacacc

SEQ ID NO: 314740 - DNA, 75 bp, synthetic construct
  source 1..75: mol_type = other DNA
cccttgctgtctcattcccccgacactgtcgaaaaggaaatcgatgatctcaccgcacgcctgttggctccccga

SEQ ID NO: 314741 - DNA, 75 bp, synthetic construct
  source 1..75: mol_type = other DNA
aagagttataacggagcaaacgatgagtttttatccgcccatgagcattatagacatcagcgatataaagaatgt

SEQ ID NO: 314742 - DNA, 75 bp, synthetic construct
  source 1..75: mol_type = other DNA
acatcatcagcgcgcaagagggcaggccgatagaatcatcggtaatgagcgccggattacgcgcgcttgaacaac

SEQ ID NO: 314743 - DNA, 75 bp, synthetic construct
  source 1..75: mol_type = other DNA
tgccctgactcgactttatcaggaataccgcgaggcgttgttatctcctgaacaagatcttcatcgccatgctga

SEQ ID NO: 314744 - DNA, 75 bp, synthetic construct
  source 1..75: mol_type = other DNA
tgccctgacccgactttatcaggaataccgcgaggcgttgttatctcccgaacaagatcttcatcgccatgctga

SEQ ID NO: 314745 - DNA, 75 bp, synthetic construct
  source 1..75: mol_type = other DNA
cggtttgaagtcaatcggtgatggctggggacgtacatggcaacttgttccgttcggcggtgcgtccactgaccc

SEQ ID NO: 314746 - DNA, 75 bp, synthetic construct
  source 1..75: mol_type = other DNA
gtcgaagcgcctgcgaattcccgggaaacataaccagcaaggcaaggccatcacagattacgatccctatgctta

SEQ ID NO: 314747 - DNA, 75 bp, synthetic construct
  source 1..75: mol_type = other DNA
tgtgcgcggcatattccctgatgcatctgaattgcagtttatccctaccggtcttactgacgaggcaatgaaacg

SEQ ID NO: 314748 - DNA, 75 bp, synthetic construct
  source 1..75: mol_type = other DNA
tccttttccctttaacggagagtcctcccaacaggatctgggttcattgcgtgacctgatcactgaagccgatac

SEQ ID NO: 314749 - DNA, 75 bp, synthetic construct
  source 1..75: mol_type = other DNA
aaatggcctgatgacagcggaagggaacgccaacaacgaacggtttgatttcgagttacagtgtggctggatgcc

SEQ ID NO: 314750 - DNA, 75 bp, synthetic construct
  source 1..75: mol_type = other DNA
tcctgccaaatagcccgcgctggctggcggaaaaggggcgtcatattgaggcggaagaagtgttgcgtatgctgc

SEQ ID NO: 314751 - DNA, 75 bp, synthetic construct
  source 1..75: mol_type = other DNA
accaccacaaactgggtgtcgaacatgattatcggcgcgaccttcctgactctgctcgatagcattggtgcggca

SEQ ID NO: 314752 - DNA, 75 bp, synthetic construct
  source 1..75: mol_type = other DNA
tataaattttacggctcgaaaaatggaattgagttatcaactctaactcatatgcctggtacgccttggtcacaa

SEQ ID NO: 314753 - DNA, 75 bp, synthetic construct
  source 1..75: mol_type = other DNA
acgctttttgaaaacggctgcctggccgaggaacaaggtttaaccacctttgaagagttaatccgcgtattgggg

SEQ ID NO: 314754 - DNA, 75 bp, synthetic construct
  source 1..75: mol_type = other DNA
cactgtatctctctgaaatggcgagtgaaaacgtgcgtggcaagatgatcagtatgtaccagttaatggtcacgc

SEQ ID NO: 314755 - DNA, 75 bp, synthetic construct
  source 1..75: mol_type = other DNA
acgccgcgggtgcaggaaaggtggtgtatgtgggtaaccagctgcgtggctacggtaatctcatcatgattaaac

SEQ ID NO: 314756 - DNA, 75 bp, synthetic construct
  source 1..75: mol_type = other DNA
gcgcgactgaacggcatttcccccccttacaccattgaagttggtcagaaactaaaactgggtggggcgaaaagt

SEQ ID NO: 314757 - DNA, 75 bp, synthetic construct
  source 1..75: mol_type = other DNA
aactggaatgctggatgttaatgaaatgacgggatccattgttttcttgctgtcagatcaatcaagatatgttac

SEQ ID NO: 314758 - DNA, 75 bp, synthetic construct
  source 1..75: mol_type = other DNA
caccgactatttgcaacagtgcctgaataaatcgctcatcattttcggcatcgtcaacataacctcggacagttt

SEQ ID NO: 314759 - DNA, 75 bp, synthetic construct
  source 1..75: mol_type = other DNA
cgcggacaaaaaccaggggaaggctacaatattcagcaaatgctggagatcctcacggcgcaaaatgtacccgtg

SEQ ID NO: 314760 - DNA, 75 bp, synthetic construct
  source 1..75: mol_type = other DNA
catttccagattcgataccgtgctacggcaattgatccgctgcgttacttgccgcctcagggcagcaagccaaaa

SEQ ID NO: 314761 - DNA, 75 bp, synthetic construct
  source 1..75: mol_type = other DNA
tgatatggaaaagctgattagtgcgtatcgacggattctacgacaggggaatcatgcgctgacggttattgttgg

SEQ ID NO: 314762 - DNA, 75 bp, synthetic construct
  source 1..75: mol_type = other DNA
atggataatatacatgacacgctttcaggattacgccgactggatattgataaacgctgggattttttacacttt

SEQ ID NO: 314763 - DNA, 75 bp, synthetic construct
  source 1..75: mol_type = other DNA
gtaaacagttttccattaagcgactcaatgaaatggagatttatccgggagtgaccttttcagaagagttagagg

SEQ ID NO: 314764 - DNA, 75 bp, synthetic construct
  source 1..75: mol_type = other DNA
accgttatggtcgcattgtcggtcatgtgttcacgacgaacggcacggatgccagccgctttatggttcagtctg

SEQ ID NO: 314765 - DNA, 75 bp, synthetic construct
  source 1..75: mol_type = other DNA
atgggaatgattggctattttgcggaaatcgactcagaaaagattaaccaactgcttgagtcagctgaaaaacct

SEQ ID NO: 314766 - DNA, 75 bp, synthetic construct
  source 1..75: mol_type = other DNA
gacacgctttcaggattacgccgactggatattgataaacgctgggattttttacactttgggctgacaggcacc

SEQ ID NO: 314767 - DNA, 75 bp, synthetic construct
  source 1..75: mol_type = other DNA
aatatatctgaaacagttgagatggttatcatcgctttattaatgatactaatgactctgtctttttatctttgt

SEQ ID NO: 314768 - DNA, 75 bp, synthetic construct
  source 1..75: mol_type = other DNA
gttcgcgatccgcttagcgataaaattcgtgaacttgttgcggtcagcagcagtgaacaacgcgtaaccgccctg

SEQ ID NO: 314769 - DNA, 75 bp, synthetic construct
  source 1..75: mol_type = other DNA
aactccgaccagatatttaccctaatcccaccgatggcttgcctgctggatataaggctaacactgcatatgctc

SEQ ID NO: 314770 - DNA, 75 bp, synthetic construct
  source 1..75: mol_type = other DNA
atgaagaaatatataccagtggtattatttgttttttcatgtcaggttttttctgctgatattcatggacgggtt

SEQ ID NO: 314771 - DNA, 75 bp, synthetic construct
  source 1..75: mol_type = other DNA
tatttatcttttcatggccggtattgtctgcatatattcatggacgggttgttcgtgtactggacggtgatacca

SEQ ID NO: 314772 - DNA, 75 bp, synthetic construct
  source 1..75: mol_type = other DNA
atccggctggtcactggatgtattcgttatacgatttactcgacaattcagtgttcgtggtttgtttctttgcct

SEQ ID NO: 314773 - DNA, 75 bp, synthetic construct
  source 1..75: mol_type = other DNA
cggttactgtcacatattttcagcgagatcgttatggtcgtattctcgggcaggtttatgcaccagacggaatga

SEQ ID NO: 314774 - DNA, 75 bp, synthetic construct
  source 1..75: mol_type = other DNA
aacgcctattgaagcggcgcactttggtaaaagcattgaagattatcgcatgttctggatggaagacccgacgcc

SEQ ID NO: 314775 - DNA, 75 bp, synthetic construct
  source 1..75: mol_type = other DNA
aacgcctattgaagcggcgcgctttggtaagagcattgaagattatcgcatgttctggatggaagacccgacgcc

SEQ ID NO: 314776 - DNA, 75 bp, synthetic construct
  source 1..75: mol_type = other DNA
acgttgggatgactggtttgccgatccgattgaccttgccgatgcccgtgaactggtgacagatacgcggcaatt

SEQ ID NO: 314777 - DNA, 75 bp, synthetic construct
  source 1..75: mol_type = other DNA
taccaaattttggcgttcaggagtacatgggctattccgaacaaatgcttgaagttttcccgcacagctggcgct

SEQ ID NO: 314778 - DNA, 75 bp, synthetic construct
  source 1..75: mol_type = other DNA
gctgttttgattcactcgaattactggatctggaaaataataccgtggttgccctggtactggacgccaattatt

SEQ ID NO: 314779 - DNA, 75 bp, synthetic construct
  source 1..75: mol_type = other DNA
aacgcccattgaggcggcacgctttggcaaaagtattgaagattatcgcctgttctggatggaagatccgacacc

SEQ ID NO: 314780 - DNA, 75 bp, synthetic construct
  source 1..75: mol_type = other DNA
attaagccgtctgatatcccaacattgaagggctacaccgcccgcctggtggatcagaaatggctgcgactcgcg

SEQ ID NO: 314781 - DNA, 75 bp, synthetic construct
  source 1..75: mol_type = other DNA
cacaggggcaatatggatatgaaatcacaaaaggtctttcagccgttaatgttcagaacagtcagtttacgttta

SEQ ID NO: 314782 - DNA, 75 bp, synthetic construct
  source 1..75: mol_type = other DNA
gcaaccaactttattctccagccgtatgacgtggtttacgtcaccaccgcaccggttgctcgctggaaccgtctg

SEQ ID NO: 314783 - DNA, 75 bp, synthetic construct
  source 1..75: mol_type = other DNA
agaaatcagcaaaagcattaacccaacgttgggatgactggtttgccgatccgattgaccttgccgatgcccgtg

SEQ ID NO: 314784 - DNA, 75 bp, synthetic construct
  source 1..75: mol_type = other DNA
tcatcacagggttttgtgatggcattgtgatttatcgttatcttgagatttttgaaaccgcaagcgggtgtcgac

SEQ ID NO: 314785 - DNA, 75 bp, synthetic construct
  source 1..75: mol_type = other DNA
gggaaatcctctgggtcattgtctgcatttcattttcagcaacgctgattgctcttcttctttctatggcatgga

SEQ ID NO: 314786 - DNA, 75 bp, synthetic construct
  source 1..75: mol_type = other DNA
tacggggggggaaagttttacgctggtgtgaagcaacagggtgggtagtgaccccgcacgagattgatagcagta

SEQ ID NO: 314787 - DNA, 75 bp, synthetic construct
  source 1..75: mol_type = other DNA
caacgataatggcaagctggatattcgtttaagcggcccgtggcgtgaagtcatcctctgggaagttcctttgct

SEQ ID NO: 314788 - DNA, 75 bp, synthetic construct
  source 1..75: mol_type = other DNA
atccatcagcctgaacttcaatctctctgacaacgataacctgaacctctcactcaacaatagcgtattgaacta

SEQ ID NO: 314789 - DNA, 75 bp, synthetic construct
  source 1..75: mol_type = other DNA
cgcatattggttcagccactcatgagacgcgttatggcatggctgcctgtgccgtggataatttgattaatgcgt

SEQ ID NO: 314790 - DNA, 75 bp, synthetic construct
  source 1..75: mol_type = other DNA
atgttagataaaattgaccgtaagctgctggccttactgcagcaggattgcaccctctctttgcaggcactggct

SEQ ID NO: 314791 - DNA, 75 bp, synthetic construct
  source 1..75: mol_type = other DNA
attcgcttaagcggcccatggcgtgaagttatcctctgggaggttccgttgttggcggtaatcagcgaactggtg

SEQ ID NO: 314792 - DNA, 75 bp, synthetic construct
  source 1..75: mol_type = other DNA
atctcaactggctgcgcgagttccgctttaacccggaacaggtcaccgtcaccaacgataacggtaagctggata

SEQ ID NO: 314793 - DNA, 75 bp, synthetic construct
  source 1..75: mol_type = other DNA
ttctggttgaaatattcagcttaactctgcttgcgcaaatgaacgcagcacgctggtcgccgcaagtcgaactga

SEQ ID NO: 314794 - DNA, 75 bp, synthetic construct
  source 1..75: mol_type = other DNA
ctttgtcagtttgttgatttgtactgttgcgggcttgctggtaagaaaactttcacagcgcgcattcagcgatct

SEQ ID NO: 314795 - DNA, 75 bp, synthetic construct
  source 1..75: mol_type = other DNA
ggtttttttctttatttccggctatttgattcgccgctatatcgacagcgtaccgtggggaaattgtctcgataa

SEQ ID NO: 314796 - DNA, 75 bp, synthetic construct
  source 1..75: mol_type = other DNA
aaagctggcgaatggaccgcaaatattggcccggactggtacggcaccgacgttcaccataaaacactgggcatt

SEQ ID NO: 314797 - DNA, 75 bp, synthetic construct
  source 1..75: mol_type = other DNA
tgattaaagaccttaaaaatataagagaaaaggccaccatatatacacatgcctaccactacattgatgatgaaa

SEQ ID NO: 314798 - DNA, 75 bp, synthetic construct
  source 1..75: mol_type = other DNA
gaaagtgatatagccagcaatgcactaaaccactggctacagtgtatacacaaaacagacattattgttctgtct

SEQ ID NO: 314799 - DNA, 75 bp, synthetic construct
  source 1..75: mol_type = other DNA
agtgcttgggttttggcgcatggcgggcgaatacgattatctgatgcgcgtccaggtcgcggacatgaaacgtta

SEQ ID NO: 314800 - DNA, 75 bp, synthetic construct
  source 1..75: mol_type = other DNA
cgttctcggtggcgcgtgcagcctggcaagatctcacgtcgggtcgggtcatttccggcggcagcacgctcacca

SEQ ID NO: 314801 - DNA, 75 bp, synthetic construct
  source 1..75: mol_type = other DNA
gcggaagccgctgtcagcgaagccctgcgcgacctggccttctggctgtaccgccagctggaaaacaagtacgac

SEQ ID NO: 314802 - DNA, 75 bp, synthetic construct
  source 1..75: mol_type = other DNA
cccgtttctggttatcgacctgattgtcgccagcgtattgatggcgatggggatgatgatgctgtcgccgctgat

SEQ ID NO: 314803 - DNA, 75 bp, synthetic construct
  source 1..75: mol_type = other DNA
gtagcaacatctggcatgaacataacctacgctgaggttgatgtcaccaatgaacaatctgtcactgattttttt

SEQ ID NO: 314804 - DNA, 75 bp, synthetic construct
  source 1..75: mol_type = other DNA
ttggcggcaaaattcgccagctctggcgcgcgttgcaactggagtggcatctgtctaagcgtgaaattctgacct

SEQ ID NO: 314805 - DNA, 75 bp, synthetic construct
  source 1..75: mol_type = other DNA
gtcagtttggctttgccagcgccgtaccattgttgaatcaggtcaataatatcttactgtcgcgcagtgcgaatc

SEQ ID NO: 314806 - DNA, 75 bp, synthetic construct
  source 1..75: mol_type = other DNA
cactatactgatgatgaaaaatgcgttatggcaccacgctcatctctgccctctctgaagctaactgttctgcag

SEQ ID NO: 314807 - DNA, 75 bp, synthetic construct
  source 1..75: mol_type = other DNA
tcagaaaaaattatcgatctgcttctgagtggttacggttatatcaggcatgacggctatgttcagggatatgga

SEQ ID NO: 314808 - DNA, 75 bp, synthetic construct
  source 1..75: mol_type = other DNA
aaagccttaacaatataagacaaaatgccaccatatatgttcacgcataccactatactgatgatgaaaaatgcg

SEQ ID NO: 314809 - DNA, 75 bp, synthetic construct
  source 1..75: mol_type = other DNA
acgaccagatggactcagacgccgctgtggatgaggccctgctcataaacgaatacacctttaccgaaggcggtc

SEQ ID NO: 314810 - DNA, 75 bp, synthetic construct
  source 1..75: mol_type = other DNA
ccttttttatcctatgttaatacattcaggcatgaatacctttgttatattattaaatattcaaaatattttata

SEQ ID NO: 314811 - DNA, 75 bp, synthetic construct
  source 1..75: mol_type = other DNA
ttataaaaaagaattatttaccccctgcgtgtgtacatctttatttttctgcctgatgcatccgcaatattataa

SEQ ID NO: 314812 - DNA, 75 bp, synthetic construct
  source 1..75: mol_type = other DNA
ggcaaatactaaaaatatagagtttaagacattaaagagcaggcaggaatttttgagtgcagtaattaatcttaa

SEQ ID NO: 314813 - DNA, 75 bp, synthetic construct
  source 1..75: mol_type = other DNA
atgattagatatagtggagtatttctatcgctgttaatgatttcaggttgtgcaaccgatgctttgaaaaatgaa

SEQ ID NO: 314814 - DNA, 75 bp, synthetic construct
  source 1..75: mol_type = other DNA
atgattagatatagtggaatatttctatcgctgttaatgctttcaggttgtgcaactgaagcattgaaaaacgaa

SEQ ID NO: 314815 - DNA, 75 bp, synthetic construct
  source 1..75: mol_type = other DNA
agcaacggccgaatcatccctgtggggcgtcggcaaaccgctgtataacgatctgcttacccgtacaaaagccgc

SEQ ID NO: 314816 - DNA, 75 bp, synthetic construct
  source 1..75: mol_type = other DNA
aaactgctgatcacggatatcaccagtaaccaggacacctaccccgtgctgattgagtatgtgacggtggatatc

SEQ ID NO: 314817 - DNA, 75 bp, synthetic construct
  source 1..75: mol_type = other DNA
aaaaacaaaaactactggcttcacttgaggtcgttaacagtatgagctcctatgtggagttgttgacggtgggta

SEQ ID NO: 314818 - DNA, 75 bp, synthetic construct
  source 1..75: mol_type = other DNA
tgactggtcggacagtcatcgcgatgaagctgacgatttttacagacagcaggctgatattaaatattattcatt

SEQ ID NO: 314819 - DNA, 75 bp, synthetic construct
  source 1..75: mol_type = other DNA
aaagaacgccgtcgtatatggcgaaagttgcatctggcagttgacagcaacacacatgaaatcatctgtgcagac

SEQ ID NO: 314820 - DNA, 75 bp, synthetic construct
  source 1..75: mol_type = other DNA
ttcttcacgaggcagacctcagcgctattctgaccttgccatcacgactgtgctggtcattaaacgcgtattcag

SEQ ID NO: 314821 - DNA, 75 bp, synthetic construct
  source 1..75: mol_type = other DNA
agaaacaaacctacgaattattaatagagtaatttcaaaattgacacctctttttgaaaaacaagaacctgagca

SEQ ID NO: 314822 - DNA, 75 bp, synthetic construct
  source 1..75: mol_type = other DNA
tgtaaatgttgggtatgagggaactaaagcagatatatatggaaaacattcggtcaatggatttactgttggagt

SEQ ID NO: 314823 - DNA, 75 bp, synthetic construct
  source 1..75: mol_type = other DNA
aaaaattgggcctgctaaaaaactagtcatcgaaccaaagacacggcttaatattattacaggtgataacgggct

SEQ ID NO: 314824 - DNA, 75 bp, synthetic construct
  source 1..75: mol_type = other DNA
tttaacgaagcgtcgggagcgaccgcaggctcgtccctgtggggggcggataaaccgctgtatcatgacctggtc

SEQ ID NO: 314825 - DNA, 75 bp, synthetic construct
  source 1..75: mol_type = other DNA
ggtttaagttgccgggttcactggtgccgaatcagtttgccctgggcatttactggcagttgtcgtccctgccgg

SEQ ID NO: 314826 - DNA, 75 bp, synthetic construct
  source 1..75: mol_type = other DNA
gggtgtggacaagccgttgtataaggaccttatcggtcgaacaaaagcagcactgaagaagaacccgaaaaatgt

SEQ ID NO: 314827 - DNA, 75 bp, synthetic construct
  source 1..75: mol_type = other DNA
cttctgcaggcggtcatactgaagccgtaacaagaatggtggccggatatgatgcgaacagtggcagtggtgtat

SEQ ID NO: 314828 - DNA, 75 bp, synthetic construct
  source 1..75: mol_type = other DNA
ctggattacgttcgcctggcatttgatgaatttgacgaactggctggcgaccgcgcgtatgcagacgataaagct

SEQ ID NO: 314829 - DNA, 75 bp, synthetic construct
  source 1..75: mol_type = other DNA
gccgcttcaaagcttaaaaaattcacttcaagggttaaaccaatcatttctaggatcaagccacacagaaataac

SEQ ID NO: 314830 - DNA, 75 bp, synthetic construct
  source 1..75: mol_type = other DNA
taatgttaacccgtggtgagttgcttttctctcgagccttaattttatgtgagggtgttacagaagaacaattaa

SEQ ID NO: 314831 - DNA, 75 bp, synthetic construct
  source 1..75: mol_type = other DNA
ctgacaatatttattacaataggtcaggtctttattgatagtggttttagtgccgctctcattcgaaaaaatgaa

SEQ ID NO: 314832 - DNA, 75 bp, synthetic construct
  source 1..75: mol_type = other DNA
tcacgggggcaaaagcgacgtatcctgtactgcttgatacggtcactgtcaaagtgaaagaaagcgaagcagcgg

SEQ ID NO: 314833 - DNA, 75 bp, synthetic construct
  source 1..75: mol_type = other DNA
caactgggcacatttggtgcgtttgaccataactggcatacggttgttttccgctttgcgggaaataacagcgaa

SEQ ID NO: 314834 - DNA, 75 bp, synthetic construct
  source 1..75: mol_type = other DNA
taaaccgctgtatcatgacctggtcagcagaacccgtgcggccctgaagaaaaatccgaagaacgtgctgttatc

SEQ ID NO: 314835 - DNA, 75 bp, synthetic construct
  source 1..75: mol_type = other DNA
accactgtctgcatgatgtgcaggatatgagtaacctgaatcatcctgaagcggaccttaataaagggcagtacg

SEQ ID NO: 314836 - DNA, 75 bp, synthetic construct
  source 1..75: mol_type = other DNA
gctatcgggtattatggttccggtggacgaacggatgcgaagagctggacaacatccgatcgtaaaacccacttt

SEQ ID NO: 314837 - DNA, 75 bp, synthetic construct
  source 1..75: mol_type = other DNA
atgtcagtttcaaaacgttcacccggggtgaaagattccaccgggctgaaggtctttggtgaaggcgaatggaaa

SEQ ID NO: 314838 - DNA, 75 bp, synthetic construct
  source 1..75: mol_type = other DNA
aaatcatctgtgcaaacctgtcgctgaacaatgtgacggactcagaagccttcccgggtcttatccggcagactc

SEQ ID NO: 314839 - DNA, 75 bp, synthetic construct
  source 1..75: mol_type = other DNA
aaaaaatgcggcattctggaagacagaccatccacgcaacgaggcggttgccgcgctcaaggcaggagaactgga

SEQ ID NO: 314840 - DNA, 75 bp, synthetic construct
  source 1..75: mol_type = other DNA
ctgagacagcggcaaaacgggcagaggatattgcatccgccgtggcgcttgaggatgcgagcacgacgaaaaagg

SEQ ID NO: 314841 - DNA, 75 bp, synthetic construct
  source 1..75: mol_type = other DNA
aggaaattccgcgaaggcggcaaaaacgtccgagacgaacgctaagtcttctgagacggcagcggaacagagtgc

SEQ ID NO: 314842 - DNA, 75 bp, synthetic construct
  source 1..75: mol_type = other DNA
aggaaattccgcgaaggcggcaaaaacgtcagagacgaacgccaggtcttctgaaacggcagcgggacagagcgc

SEQ ID NO: 314843 - DNA, 75 bp, synthetic construct
  source 1..75: mol_type = other DNA
atttcgtggtgatggaacccactgccactccgctacagcagctgcgctatgacaactctgtttctttagtcgaca

SEQ ID NO: 314844 - DNA, 75 bp, synthetic construct
  source 1..75: mol_type = other DNA
atgtggggccaaatgaagttatctagactctattctaacaagcctgacttgttcgatcccgtggagtttgtccag

SEQ ID NO: 314845 - DNA, 75 bp, synthetic construct
  source 1..75: mol_type = other DNA
gagtgccggcgcgcaataccgtggccttacggatcgctagccttgacccgcgcaaggtcatccgccggcgggaag

SEQ ID NO: 314846 - DNA, 75 bp, synthetic construct
  source 1..75: mol_type = other DNA
gtctgtgcagacctgtcgctgaataacgtcacggactcagaagccttcccgggccttatccggcagactcacaga

SEQ ID NO: 314847 - DNA, 75 bp, synthetic construct
  source 1..75: mol_type = other DNA
tttaactgctgccgcagtccgttgctacgcatgggagggatcgccattgggctatgtgtcggctatatcgcatcg

SEQ ID NO: 314848 - DNA, 75 bp, synthetic construct
  source 1..75: mol_type = other DNA
cgtattcagacacagtcagcaggtgctcatacccactcgctgtctggtactgcagcaagttctggcgcacatgca

SEQ ID NO: 314849 - DNA, 75 bp, synthetic construct
  source 1..75: mol_type = other DNA
agctgttcggaggttcactgacactgcgtgactacgatggtcaggttgcagaggctatggccctggtacgagcgc

SEQ ID NO: 314850 - DNA, 75 bp, synthetic construct
  source 1..75: mol_type = other DNA
atgccattgtccgcaccttatgccacgtgcagtaagtcgtgtttccggaacaacagggctttcggcgcgcatctg

SEQ ID NO: 314851 - DNA, 75 bp, synthetic construct
  source 1..75: mol_type = other DNA
caggttgaccctgcgggctgcacagggttttattgattccatttttacactgatgaatgttccgttgcgctgccc

SEQ ID NO: 314852 - DNA, 75 bp, synthetic construct
  source 1..75: mol_type = other DNA
tatgtataggtatttttgcacagtattatatatccttgttgataaatacatactatacagggaaactcagcagct

SEQ ID NO: 314853 - DNA, 75 bp, synthetic construct
  source 1..75: mol_type = other DNA
tccagcgcaggaacggcatcaacaaaggccactgaagcctcaaaaagtgctgccgctgcagagtcctcaaaaagc

SEQ ID NO: 314854 - DNA, 75 bp, synthetic construct
  source 1..75: mol_type = other DNA
gcgtcagcggcagcagagagtgcgacaacggcatcaacgaaggcgacggaagcggcagacagtgcgacggaggct

SEQ ID NO: 314855 - DNA, 75 bp, synthetic construct
  source 1..75: mol_type = other DNA
atcagcatctgtggcgtcgactaaagcatcggaggcagccacatcagcgtccagtgcctctgcatctaaggatgc

SEQ ID NO: 314856 - DNA, 75 bp, synthetic construct
  source 1..75: mol_type = other DNA
ctggcagttgacagcaacacacatgaaatcatctgtgcagacctgtcgctgaaggggtctgacgctcagtggaac

SEQ ID NO: 314857 - DNA, 75 bp, synthetic construct
  source 1..75: mol_type = other DNA
agaaattgctgaacgaagcagaaaatcactacctgttttagatgatattgaaaaagaaatcatgcgaatttccag

SEQ ID NO: 314858 - DNA, 75 bp, synthetic construct
  source 1..75: mol_type = other DNA
cccgccgtcacacgccgggattatcaccgtatatgaggactcaaagccgggcacactgaatgatttcctcggtgc

SEQ ID NO: 314859 - DNA, 75 bp, synthetic construct
  source 1..75: mol_type = other DNA
atttaaatatttgatattctatccgggaaattttccttcattacgatttaaaaaatattctggattttcatctaa

SEQ ID NO: 314860 - DNA, 75 bp, synthetic construct
  source 1..75: mol_type = other DNA
caataggtgcattccacattgcagaacagcaagttgacggtacaagtgactacatcaaggatggagagtggccta

SEQ ID NO: 314861 - DNA, 75 bp, synthetic construct
  source 1..75: mol_type = other DNA
ttctgtatttttgtttttctgccctgactgacctgcagaaagctgatgaaagaaaaaatgatgaaaggaatgaag

SEQ ID NO: 314862 - DNA, 75 bp, synthetic construct
  source 1..75: mol_type = other DNA
ctcatgtgagtacaataaagtaaaatataatggttccttattcaagcttatattattgaaagaaggttttgatgc

SEQ ID NO: 314863 - DNA, 75 bp, synthetic construct
  source 1..75: mol_type = other DNA
atatgattatttatcaactaattccacccttccgtctcattatattgatataagtaataagatcataaaatatgt

SEQ ID NO: 314864 - DNA, 75 bp, synthetic construct
  source 1..75: mol_type = other DNA
catgttgatgctgttatcaatatttactcaaatatatttatgccggccatgcttttagggaaaccaatttttagc

SEQ ID NO: 314865 - DNA, 75 bp, synthetic construct
  source 1..75: mol_type = other DNA
gatacttgctgctgctttcgttattttttactccggtgtgctcctgtttattctgtatttttgttttctgccctg

SEQ ID NO: 314866 - DNA, 75 bp, synthetic construct
  source 1..75: mol_type = other DNA
ttctgtatttttgtttttctgccctgactgacctgctgaaaaccgatgaaagaaaaaatgatgaaaggaatgaag

SEQ ID NO: 314867 - DNA, 75 bp, synthetic construct
  source 1..75: mol_type = other DNA
ttctgtatttttgtttttctgccctgactggcctgcagaaaactgatgaaagaaaaaatgatgaaaggaatgaag

SEQ ID NO: 314868 - DNA, 75 bp, synthetic construct
  source 1..75: mol_type = other DNA
gatgcttgccgctgctttcgttatcctttactccggtgtgctctgtttattctgtatttttgtttttctgccctg

SEQ ID NO: 314869 - DNA, 75 bp, synthetic construct
  source 1..75: mol_type = other DNA
ccggtaattatctggtcgtgggatacggtaaaagaaaccactgcaggtgagatacttgctgctgctttcgttatt

SEQ ID NO: 314870 - DNA, 75 bp, synthetic construct
  source 1..75: mol_type = other DNA
ttctgtattgttgtttttcttcactggtcgacctgctgaaaccggatgaaagaaaaaatgatgaaaggaatgaag

SEQ ID NO: 314871 - DNA, 75 bp, synthetic construct
  source 1..75: mol_type = other DNA
atgatcgctaataagctatttgataatccattcgttccatttgatcataaaacttctatcaataattcaagtgcg

SEQ ID NO: 314872 - DNA, 75 bp, synthetic construct
  source 1..75: mol_type = other DNA
gggaagaggggactgaactggcacatgccaccggtccacgtcagtggcaggccgatgcgttccgagagatacgtg

SEQ ID NO: 314873 - DNA, 75 bp, synthetic construct
  source 1..75: mol_type = other DNA
tacgtcaggcaagtaagttacgcgttgtttttgcgacagatgaagagcttgcagcacatgaagcccgtctcgatc

SEQ ID NO: 314874 - DNA, 75 bp, synthetic construct
  source 1..75: mol_type = other DNA
ggaaggagagacacaacagcaacaaggtgaagcaacaattcagcgcattgtgcgtcaggcaagtaagttacgcgt

SEQ ID NO: 314875 - DNA, 75 bp, synthetic construct
  source 1..75: mol_type = other DNA
atgttcaactcatgcaagacatggctgaggctgggcggcatgctggatgaccaggaaacagcggacgacctgtcg

SEQ ID NO: 314876 - DNA, 75 bp, synthetic construct
  source 1..75: mol_type = other DNA
tggcgttcgggaacccgacgcgtaacaccgggcgtttccgtgaatgtttccgcaagtacaaacaccgctggaagt

SEQ ID NO: 314877 - DNA, 75 bp, synthetic construct
  source 1..75: mol_type = other DNA
gtcgaagcgtctgcgaattcccgggcagcagaaccagcaaggcaaggcgcttaccgagtacgatccatatgctta

SEQ ID NO: 314878 - DNA, 75 bp, synthetic construct
  source 1..75: mol_type = other DNA
aggtcttaaatctgttggcgataactgggggcgcaactggacgctgataatgttcggcagcggtacggcagatcc

SEQ ID NO: 314879 - DNA, 75 bp, synthetic construct
  source 1..75: mol_type = other DNA
gttgtccctcaagttcaatttgtaaatcaggataatggaaaagacatcatgggtaggcatgcccattatggtgaa

SEQ ID NO: 314880 - DNA, 75 bp, synthetic construct
  source 1..75: mol_type = other DNA
tttattttaaacgaaagttttataaaaatgaaatcactaaaagtatttgggataaaggcagagagttgtatgtaa

SEQ ID NO: 314881 - DNA, 75 bp, synthetic construct
  source 1..75: mol_type = other DNA
acagcgacttctttaaagtacgtgttcgcggtctattcccatcgacatcagaagtccagttcatacctcaggcat

SEQ ID NO: 314882 - DNA, 75 bp, synthetic construct
  source 1..75: mol_type = other DNA
gcctgacgcaaccagctgttggcagggttatcactccggcacaggtccagcacgctgctgtagttcttggcgtcg

SEQ ID NO: 314883 - DNA, 75 bp, synthetic construct
  source 1..75: mol_type = other DNA
gcacctgaatacaaagtcaggctgaaggacagcaggaagattttacaggacaaggacgaggtgaaagaattgctt

SEQ ID NO: 314884 - DNA, 75 bp, synthetic construct
  source 1..75: mol_type = other DNA
tactccggtgtgctcctgtttattctgtatttttgtttttctgccctgactgacctgcagaaacctgatgaaaga

SEQ ID NO: 314885 - DNA, 75 bp, synthetic construct
  source 1..75: mol_type = other DNA
tgcattgagttctgcgatggaaagcaggaagaagaaagaagataagaaaaggagtgctgaaaataaattaaacga

SEQ ID NO: 314886 - DNA, 75 bp, synthetic construct
  source 1..75: mol_type = other DNA
tggtggtgtctatgatatggataacatcagcgtggtaacacctaaaaggcatattgatattcaccgaggtaaata

SEQ ID NO: 314887 - DNA, 75 bp, synthetic construct
  source 1..75: mol_type = other DNA
gatccaatggctggcggccacagaatgtggcaaatggctgggcttaaagctcagcgggcacagacggatgtaaat

SEQ ID NO: 314888 - DNA, 75 bp, synthetic construct
  source 1..75: mol_type = other DNA
acggttacgcccggctgatggatgccgactttgaagcagacgagatagccgacacgctggaaggcatggaaggcg

SEQ ID NO: 314889 - DNA, 75 bp, synthetic construct
  source 1..75: mol_type = other DNA
ggtattatggaggataaaggccggactgccgttcctgcgggatttacctttggtggtggttcacatgaagcggtg

SEQ ID NO: 314890 - DNA, 75 bp, synthetic construct
  source 1..75: mol_type = other DNA
atgagtggtggagatggaaaaggtccgggtaatacaggcctggggcatagcggcggtaaacccagtgggaatgtg

SEQ ID NO: 314891 - DNA, 75 bp, synthetic construct
  source 1..75: mol_type = other DNA
gtcagcgctaatgtacggctggttgattttcagtccacgcagccgctcgcgggatactgggggaatgaggttgct

SEQ ID NO: 314892 - DNA, 75 bp, synthetic construct
  source 1..75: mol_type = other DNA
gtacggttatcggtgaaggtggttctggtggtgcgctggcgattggcgtgggcgataaagtgaatatgctgcaat

SEQ ID NO: 314893 - DNA, 75 bp, synthetic construct
  source 1..75: mol_type = other DNA
aaatatgctgcaatacagcacctattccgttatttcgccggaaggttgtgcttctatcctctggaagagcgcgga

SEQ ID NO: 314894 - DNA, 75 bp, synthetic construct
  source 1..75: mol_type = other DNA
ttgctgatgcaaaggctgaaataaaacaattcgagcgatttgcccgagaaccaatggctgctggtcaccgaatgt

SEQ ID NO: 314895 - DNA, 75 bp, synthetic construct
  source 1..75: mol_type = other DNA
cggactcggaatcgaatatggttattatcatgttgatattaatctcgtttatttggtttgatgaaaaatgtaccc

SEQ ID NO: 314896 - DNA, 75 bp, synthetic construct
  source 1..75: mol_type = other DNA
cccaatgggatgaaatgatgcgaatggagggctcactaaagcttgggaccatccatgcatcagaacttaattcgt

SEQ ID NO: 314897 - DNA, 75 bp, synthetic construct
  source 1..75: mol_type = other DNA
ggaacaggcggtaatctgtcagcagtagctgcgccagtggcatttggttttccggcactttccactccaggagct

SEQ ID NO: 314898 - DNA, 75 bp, synthetic construct
  source 1..75: mol_type = other DNA
caaacatcacggtgaaacagactctgccggataacggggaagcccgcatcaccctgaagacggccctgatggttg

SEQ ID NO: 314899 - DNA, 75 bp, synthetic construct
  source 1..75: mol_type = other DNA
atgaagaaaacaatgatggcagccaccctggttttaagtgcgttcagtatccggtcagcactggccgctgaatac

SEQ ID NO: 314900 - DNA, 75 bp, synthetic construct
  source 1..75: mol_type = other DNA
agggagccgaacgaagtaagctgaaaaaagaaatcatcctggaacgtaaaaaacgattgcgagaaaagaacggta

SEQ ID NO: 314901 - DNA, 75 bp, synthetic construct
  source 1..75: mol_type = other DNA
gcacatccgctgctcctcgcactggaagacaccaccaccattaacttcagccacagtacagcatttgatgactag

SEQ ID NO: 314902 - DNA, 75 bp, synthetic construct
  source 1..75: mol_type = other DNA
cgtatatcacggtgaagcaggtgctgccggataacggggaagcccgtatcaccctgaagacggtcctgatggttg

SEQ ID NO: 314903 - DNA, 75 bp, synthetic construct
  source 1..75: mol_type = other DNA
acggaaagagagtggcactcagcgccagacagcagggtgaggatgtggtgataagcgtacctgaggcacagaagc

SEQ ID NO: 314904 - DNA, 75 bp, synthetic construct
  source 1..75: mol_type = other DNA
cgaaagatcctgagcttagtaaaaatttaaacccaagcaataagtctagtgtttcaaaaggttattctccgttta

SEQ ID NO: 314905 - DNA, 75 bp, synthetic construct
  source 1..75: mol_type = other DNA
taaatggctggatgatgcaggtaaagattcaggagcgccaattccagatcgcattgctgataagttgcgtgataa

SEQ ID NO: 314906 - DNA, 75 bp, synthetic construct
  source 1..75: mol_type = other DNA
tacccgcagatgatattactgaatcacctgtcagttcattacctctcgataaggcaacagtaaacgtaaatgttc

SEQ ID NO: 314907 - DNA, 75 bp, synthetic construct
  source 1..75: mol_type = other DNA
cgcttgaaatggttggcaagaaaaagattcgagcaggtattcaccaggtaacaatccgcaaaccgtcagaaattg

SEQ ID NO: 314908 - DNA, 75 bp, synthetic construct
  source 1..75: mol_type = other DNA
acaatccgcaaaccgtcagaaactgtagaaatcatcgactcaagcgcccttcctcctgaatacgttgagtttgaa

SEQ ID NO: 314909 - DNA, 75 bp, synthetic construct
  source 1..75: mol_type = other DNA
agcattatggcgtatatagcgtcatcgcttgaaatggttggcaagaaaaagattcgagcaggtattcaccaggta

SEQ ID NO: 314910 - DNA, 75 bp, synthetic construct
  source 1..75: mol_type = other DNA
cgaagcggcggcgcgtgctgcgtacctgaaagctaaagccagataccatccctcaacgccagccgatttgttgca

SEQ ID NO: 314911 - DNA, 75 bp, synthetic construct
  source 1..75: mol_type = other DNA
cgaagcggcggcgcgtgctgcttatctaaaagcaaaagccagataccatcccacaacgcctgccgacttgttaag

SEQ ID NO: 314912 - DNA, 75 bp, synthetic construct
  source 1..75: mol_type = other DNA
cgagtaccggacaacgcttggcgataccgatacaaaagaaattcccctgacgatttccgcgctctggtcggttta

SEQ ID NO: 314913 - DNA, 75 bp, synthetic construct
  source 1..75: mol_type = other DNA
gaaagtatggggaataccgatgcggtttttaccatggatgtcatcctgaagttacttgaaaatcgcgcagttaac

SEQ ID NO: 314914 - DNA, 75 bp, synthetic construct
  source 1..75: mol_type = other DNA
gttgccctgcgactggatggcaagcagtaccagctaaaagcccatcgcgtagcgtggattcttgcgcatggtgct

SEQ ID NO: 314915 - DNA, 75 bp, synthetic construct
  source 1..75: mol_type = other DNA
cgaagcggcggcgcgtgccgcgtacctgaaagttaaagccagataccatccctcaacgccagccgatttattgca

SEQ ID NO: 314916 - DNA, 75 bp, synthetic construct
  source 1..75: mol_type = other DNA
agatgcggtgatcatggcgtttggctttcgcccgcacagcatggaatggctggcaaaacacagcgtcgagctgga

SEQ ID NO: 314917 - DNA, 75 bp, synthetic construct
  source 1..75: mol_type = other DNA
gtggtatggaacgcgcaaggcactactgacgccagcggcaacgttgatgtcacgatgactaaaaatgcctacacc

SEQ ID NO: 314918 - DNA, 75 bp, synthetic construct
  source 1..75: mol_type = other DNA
aatcagtcaggtacgttctacaataccgggaaaatgttgctatccaactcttcccatagcggcgtactaaatttc

SEQ ID NO: 314919 - DNA, 75 bp, synthetic construct
  source 1..75: mol_type = other DNA
tggcgatattgtccgtggttccgatctggtggtgaccgctattgccgaaggtcgtaaagcggcagatgggattat

SEQ ID NO: 314920 - DNA, 75 bp, synthetic construct
  source 1..75: mol_type = other DNA
gacgatctgctgagtgattacgatgccgtattccttggcgtcgggacttatcagtcaatgcgcggcgggctggaa

SEQ ID NO: 314921 - DNA, 75 bp, synthetic construct
  source 1..75: mol_type = other DNA
ccagcaacccgaaaatctttgctggcggcgatatcgtccgtggttccgatctggtcgttaccgctattgccgaag

SEQ ID NO: 314922 - DNA, 75 bp, synthetic construct
  source 1..75: mol_type = other DNA
gaaagtatggcagagaccgacgcggttttcgccattgataccatactgaaattcatgaaacaccgcgcagttaat

SEQ ID NO: 314923 - DNA, 75 bp, synthetic construct
  source 1..75: mol_type = other DNA
aacaagaagttgatccatcgattcgtaatagtgctcagggcgtattcctgatgatggctaatggttttggttgta

SEQ ID NO: 314924 - DNA, 75 bp, synthetic construct
  source 1..75: mol_type = other DNA
ctgtataaagaaaaaaaagtggggttgattatgagcctgactgatgaaaaattgctgcattctacgtggaaagcc

SEQ ID NO: 314925 - DNA, 75 bp, synthetic construct
  source 1..75: mol_type = other DNA
cgaccgctatatcgatcgttttgccgctaagcatgaagcacagctgttttgtgaagagaaaagcgtggagtctgc

SEQ ID NO: 314926 - DNA, 75 bp, synthetic construct
  source 1..75: mol_type = other DNA
ctggatgcgtacaactggaaagaggatggcatcagcgataaaggcgtgatgctgaacttcaagaaaacgttctaa

SEQ ID NO: 314927 - DNA, 75 bp, synthetic construct
  source 1..75: mol_type = other DNA
tcggcgtgaagtacagcagcaaagaaagttcgctgaatctggatgcgtacaactggaaagaggatggcatcagcg

SEQ ID NO: 314928 - DNA, 75 bp, synthetic construct
  source 1..75: mol_type = other DNA
catgctgctcggggcagaactacaaattaccgggatgtttggtaatacatttctccacagttttgagagtgttcc

SEQ ID NO: 314929 - DNA, 75 bp, synthetic construct
  source 1..75: mol_type = other DNA
gctcagatgtctcggcgctgatgcagcttgccagcaaaacgggcggcggcctgacgtcgcttcccgccaatgaag

SEQ ID NO: 314930 - DNA, 75 bp, synthetic construct
  source 1..75: mol_type = other DNA
ggccaggtgcatccgcaaacagctcccgcgcgtgcggtgctggaaaaagagggttttcgctaccgtaactatatc

SEQ ID NO: 314931 - DNA, 75 bp, synthetic construct
  source 1..75: mol_type = other DNA
ttttcaagggaaagcgcacccgccatgtgatgttgtttgatgaactgcctcagctgtttggcaagaatgactatt

SEQ ID NO: 314932 - DNA, 75 bp, synthetic construct
  source 1..75: mol_type = other DNA
gcacggatgttgcggcgttgatgcagcttgccagtaaaacggggggcggcttgacgtcgttacccgccaatgaag

SEQ ID NO: 314933 - DNA, 75 bp, synthetic construct
  source 1..75: mol_type = other DNA
gaacacggctattcaccgttctggcaaagcctcggtaaacgcttcttttcgatggattttagccgcgccgatttt

SEQ ID NO: 314934 - DNA, 75 bp, synthetic construct
  source 1..75: mol_type = other DNA
gcgtttgatattaaccgccgcacaactggatgccctgaaatgccacgccggggatcgcgttcgtctggtgcgcct

SEQ ID NO: 314935 - DNA, 75 bp, synthetic construct
  source 1..75: mol_type = other DNA
ttaatgtcaacggtagtgataacaatgtcactctggacggtaagttaacggttgttgctgacagtgaacttacta

SEQ ID NO: 314936 - DNA, 75 bp, synthetic construct
  source 1..75: mol_type = other DNA
tctacgaaggcatcgacaacgaggggaatatggttcgcgtccctgctggctctattgccgctccggctacatcgg

SEQ ID NO: 314937 - DNA, 75 bp, synthetic construct
  source 1..75: mol_type = other DNA
ttcaggatttggtgagtttgttgatcaccttgggatggctgctcttggtccgattgattacttcaatgttcagga

SEQ ID NO: 314938 - DNA, 75 bp, synthetic construct
  source 1..75: mol_type = other DNA
ctctcggccatgagaagtacttcgatatcaaagatcgaatggaggggcgtcgacttgaaggagaaagaaatcagt

SEQ ID NO: 314939 - DNA, 75 bp, synthetic construct
  source 1..75: mol_type = other DNA
acgaccattcattcatcctgctgcttaactctttaaagatattaccggaaacagaagtaggcgagcttcatttgt

SEQ ID NO: 314940 - DNA, 75 bp, synthetic construct
  source 1..75: mol_type = other DNA
gaataagtatttcttaggtgatggaatgactgatattgccaaaaggaacattgaaaattggaccaaagaatgcga

SEQ ID NO: 314941 - DNA, 75 bp, synthetic construct
  source 1..75: mol_type = other DNA
cgtgttggcgttaatcctcatgacgtcgctcagatgtaccaacagaacccgcggcagttcggcgaatttgtcgat

SEQ ID NO: 314942 - DNA, 75 bp, synthetic construct
  source 1..75: mol_type = other DNA
taatgcgttctacgaaggcatcgacaacgaggggaatatggttcgcgttcctgccagttcaatcgcagcgcctgc

SEQ ID NO: 314943 - DNA, 75 bp, synthetic construct
  source 1..75: mol_type = other DNA
atcggtctgcaggctctgcagggaataacaagcataatgcaaggattgcagcaatatgatcagcagaagcaagag

SEQ ID NO: 314944 - DNA, 75 bp, synthetic construct
  source 1..75: mol_type = other DNA
ctgactcgcgtcggtgttgatcctaataacgttgctcagatgtatcagcagaatccttcaggatttggtgagttt

SEQ ID NO: 314945 - DNA, 75 bp, synthetic construct
  source 1..75: mol_type = other DNA
caagggatatgggtgcaagcggtatcaacaccgtggcagaggcgaaaatgtactttcagggtatgccgcaggttg

SEQ ID NO: 314946 - DNA, 75 bp, synthetic construct
  source 1..75: mol_type = other DNA
gtaggacttcaggcgcttcagggcattagctcactcgcccaggtgtaccagcaaggacagcaacagcagcgacag

SEQ ID NO: 314947 - DNA, 75 bp, synthetic construct
  source 1..75: mol_type = other DNA
aacatcgtctgcatcagcacaaaactatgccatgaagaaggatatcgacgcgatcgcaaatgcagatgcttctgc

SEQ ID NO: 314948 - DNA, 75 bp, synthetic construct
  source 1..75: mol_type = other DNA
tctatttgataatcgtactcatggtgacgacggcaattttgtcagcctttggcgtcagtgcgaaaaacccgaccg

SEQ ID NO: 314949 - DNA, 75 bp, synthetic construct
  source 1..75: mol_type = other DNA
tacttacagtgggccaaggaaaaatgctacggccgttaataaacagggtggtgtaataacggtttataatgctgg

SEQ ID NO: 314950 - DNA, 75 bp, synthetic construct
  source 1..75: mol_type = other DNA
ctatttcacgactaaaggcggtagtgcggttaataatggtacgattactgcgaaagtcatggaacaagaaagtgt

SEQ ID NO: 314951 - DNA, 75 bp, synthetic construct
  source 1..75: mol_type = other DNA
cgatggagacgaggaagaccagttaatcagcggatacattgccgcatcgcttgaggcgtgccagatacacatagg

SEQ ID NO: 314952 - DNA, 75 bp, synthetic construct
  source 1..75: mol_type = other DNA
acgacggcgacaacgccatcagcaacggcggcaccggcacacaaattaacggtgacgaagccaccgtgaacaaca

SEQ ID NO: 314953 - DNA, 75 bp, synthetic construct
  source 1..75: mol_type = other DNA
tggatgtcagcggcggcggtcacgggattgatatcaccggcgacagcgccacggtggacaacaagggcggtatga

SEQ ID NO: 314954 - DNA, 75 bp, synthetic construct
  source 1..75: mol_type = other DNA
agaaaaataccaatgtgacttgtccggcagaccctggaaaactcagtccagaagagcttaaacgcttaccctctg

SEQ ID NO: 314955 - DNA, 75 bp, synthetic construct
  source 1..75: mol_type = other DNA
ttgaattcggccctggtgtgcgttacgacaaatataccgacaatgccagtgaaacccagccgctgggctatgcct

SEQ ID NO: 314956 - DNA, 75 bp, synthetic construct
  source 1..75: mol_type = other DNA
tggcttacaacgtcacatggaactctgaacctccagagtctgcaccggaacataccgaccgtcggacaaccttat

SEQ ID NO: 314957 - DNA, 75 bp, synthetic construct
  source 1..75: mol_type = other DNA
gattattttgattgtttcaaaggtacaccaagagcattgtggtttgctcaccattatatttttgaatacccagta

SEQ ID NO: 314958 - DNA, 75 bp, synthetic construct
  source 1..75: mol_type = other DNA
acgatccggcggtgcatgaagcgccgctggttatcggccatccggcgcatgacgctccggcctacggctgggtga

SEQ ID NO: 314959 - DNA, 75 bp, synthetic construct
  source 1..75: mol_type = other DNA
ggcttagtaaatattttaaaaatcgctaaggcttgcccaagatatacatttcatattattggtgatggaccagat

SEQ ID NO: 314960 - DNA, 75 bp, synthetic construct
  source 1..75: mol_type = other DNA
ttgacgtgggtagcaaggtgaggcaaaccattcaggaacttggcggaaccatgcctgaggagttgccgaccccgc

SEQ ID NO: 314961 - DNA, 75 bp, synthetic construct
  source 1..75: mol_type = other DNA
ttttttattggaagtgaggtagagataacagttgagttctctgaaggctcaatcatcgcgaaaatcaccgcttac

SEQ ID NO: 314962 - DNA, 75 bp, synthetic construct
  source 1..75: mol_type = other DNA
aagtggtcgctgacggcaatgacagcgccaccatgaccgcgacagttcgggatgcaaaaggcaacctgctcaatg

SEQ ID NO: 314963 - DNA, 75 bp, synthetic construct
  source 1..75: mol_type = other DNA
agaaaaagcaaaggaggagtgtcgctcatttagtgcagaagtaattaaacgggtgatggacagcctgaagagaga

SEQ ID NO: 314964 - DNA, 75 bp, synthetic construct
  source 1..75: mol_type = other DNA
ccaggttgagcaattgatgaacctggcagagaaattcgacgttgaatacgacggttggggtacttactttgaaga

SEQ ID NO: 314965 - DNA, 75 bp, synthetic construct
  source 1..75: mol_type = other DNA
atccagttcgctacgttcggtttcccgttccacgccgggaacggaagttgtactggaagcaccgaaaggttggac

SEQ ID NO: 314966 - DNA, 75 bp, synthetic construct
  source 1..75: mol_type = other DNA
gctgggactaatgaaattggtgcgggtccggttgtttatcgcacggggataattattattcagttatttgttccc

SEQ ID NO: 314967 - DNA, 75 bp, synthetic construct
  source 1..75: mol_type = other DNA
gcagtccgcgaaaaaggatgatcggtcgttcagtaatgaggtattgaggagactaaaggagtcagtagctaagga

SEQ ID NO: 314968 - DNA, 75 bp, synthetic construct
  source 1..75: mol_type = other DNA
gaacgcgcccgggggtttacccacgcctttccgttatgcatggggcggtcaaatatctcggctacgctgatgaac

SEQ ID NO: 314969 - DNA, 75 bp, synthetic construct
  source 1..75: mol_type = other DNA
cgctgtttttttcagatcttttatcactggcctggcccgatttctttgccagaccgatgttaaaccttttaggtt

SEQ ID NO: 314970 - DNA, 75 bp, synthetic construct
  source 1..75: mol_type = other DNA
gaccaaaaacagctggagcaatacccgctgcgcattggtttgtccacgctggtgagcgtcaataccactaaccgt

SEQ ID NO: 314971 - DNA, 75 bp, synthetic construct
  source 1..75: mol_type = other DNA
tacgttccacgccggtagcagtaagtaccgctcgtgaaatcagcctggaacccgtcaataaactgatcgacgata

SEQ ID NO: 314972 - DNA, 75 bp, synthetic construct
  source 1..75: mol_type = other DNA
gtcactcaggcggttaactccctcgtcacagcactgaaactgcctgacgaatccgcaaaggccaatgaagttctg

SEQ ID NO: 314973 - DNA, 75 bp, synthetic construct
  source 1..75: mol_type = other DNA
gaaccaattattccgctgtggaaagatgacagcgtgctggcctgggtgcgcctgattggctgcggcctgctggcg

SEQ ID NO: 314974 - DNA, 75 bp, synthetic construct
  source 1..75: mol_type = other DNA
gtggtggtcgccgacgggcgcatcgcctggcagggtaagaccgatgagttgttgagcggtaaggcgagtgcttcg

SEQ ID NO: 314975 - DNA, 75 bp, synthetic construct
  source 1..75: mol_type = other DNA
atgttaaaactgactgatatcacctggctttatcaccatttgccgatgcgttttagcttaacggtagaacgcggc

SEQ ID NO: 314976 - DNA, 75 bp, synthetic construct
  source 1..75: mol_type = other DNA
tgtcgctggacgcggtggagagcgcgcgggtgcatctggcgctcaacgaagaaagctcgtttgtggtcagcgatg

SEQ ID NO: 314977 - DNA, 75 bp, synthetic construct
  source 1..75: mol_type = other DNA
tcaccaactacatccgtggcaaggtactggagatgattgtggtggggatagccacctggctggggttcttgcttt

SEQ ID NO: 314978 - DNA, 75 bp, synthetic construct
  source 1..75: mol_type = other DNA
ctgttcacgctacccggcgacctcagccaacatgtgcatctcaagccgacgggcactgttgcaaatagtcggtgg

SEQ ID NO: 314979 - DNA, 75 bp, synthetic construct
  source 1..75: mol_type = other DNA
cctgaccgagctcggccacccagagctttttcagcggctggattgggtgtccgacacccagggagacggtgcggg

SEQ ID NO: 314980 - DNA, 75 bp, synthetic construct
  source 1..75: mol_type = other DNA
gccgggatcgacgcccagcgtggtgacaatctctccttatcgttactcaactttgtaccgcaggcggtgcctgtc

SEQ ID NO: 314981 - DNA, 75 bp, synthetic construct
  source 1..75: mol_type = other DNA
actacggcgcgaagctgaatatggaccaggtgaacgccattgtgcatctggtttccggcagtattccggggctgc

SEQ ID NO: 314982 - DNA, 75 bp, synthetic construct
  source 1..75: mol_type = other DNA
ggtacggaagaaaatcgctcgccggaagcgttatccaaacacagcgaaagcaagcgcgattactcttacgaccgc

SEQ ID NO: 314983 - DNA, 75 bp, synthetic construct
  source 1..75: mol_type = other DNA
gatccttaaagacatccaggacaaaacccgcgccagcgtggcgaacgtgctggattcgctggtcggcagcgggaa

SEQ ID NO: 314984 - DNA, 75 bp, synthetic construct
  source 1..75: mol_type = other DNA
tcaggcgggaaatctgctgaccgacggcattggcgcgggcgaggcggtttctgccgctacccgtaaacgcgatca

SEQ ID NO: 314985 - DNA, 75 bp, synthetic construct
  source 1..75: mol_type = other DNA
gtttccggcagtattccggggctgcacgccagcaaagtcagcgtggttgatcaggcgggaaatctactgaccgac

SEQ ID NO: 314986 - DNA, 75 bp, synthetic construct
  source 1..75: mol_type = other DNA
atgaagcaggtgctggaggtgatggaacctccgacaatcgtgttttaccgtttcttgatggcgagtattggcctt

SEQ ID NO: 314987 - DNA, 75 bp, synthetic construct
  source 1..75: mol_type = other DNA
cttaatcggcttggtgctcattgtggacttgacgatgtattccccccagacggtaagcatagcgaaaacagcata

SEQ ID NO: 314988 - DNA, 75 bp, synthetic construct
  source 1..75: mol_type = other DNA
tgttaaagtgctgaagttcgaccgcgaacgtacccgtgtatctctgggcctgaaacaactgggcgaagatccgtg

SEQ ID NO: 314989 - DNA, 75 bp, synthetic construct
  source 1..75: mol_type = other DNA
tcgtcaacgtgggcgacgaaatcattgttaaagtgctgaagttcgaccgcgaacgtacccgtgtatccctgggcc

SEQ ID NO: 314990 - DNA, 75 bp, synthetic construct
  source 1..75: mol_type = other DNA
agacaaagccatagcagcattgcaggtattaccggatacgccatggcgagaagcattaatcggcctcgcacacat

SEQ ID NO: 314991 - DNA, 75 bp, synthetic construct
  source 1..75: mol_type = other DNA
attgctgtactggctgcacgagctgttggctatgagggaaatgcgcatgtcaccattgccgccctgatcgagttt

SEQ ID NO: 314992 - DNA, 75 bp, synthetic construct
  source 1..75: mol_type = other DNA
attgcgtgtgagttaacacacgaagcacagggatattcagcatcgctctcgtcgcaattgctgcacggtaaggag

SEQ ID NO: 314993 - DNA, 75 bp, synthetic construct
  source 1..75: mol_type = other DNA
agcaggcggtgaggggctgcaatatccgtctgactgatgaacccgtgctgtttaaaacaggtctgtcggcctcca

SEQ ID NO: 314994 - DNA, 75 bp, synthetic construct
  source 1..75: mol_type = other DNA
gtatccagatcgacggtgacaaggccatcgtcaataacgaaggcgagagcaccatcaccaacggtggcaccggca

SEQ ID NO: 314995 - DNA, 75 bp, synthetic construct
  source 1..75: mol_type = other DNA
taatgcaggtacgatcacaggtaaagtgacggaacaacatagcgtatttaacaagtattcaacgggcacatcgaa

SEQ ID NO: 314996 - DNA, 75 bp, synthetic construct
  source 1..75: mol_type = other DNA
tggatcagaagcgcaacaacgttgttgtttctcgtcgtgccgttatagaatccgaaaacagcgcagagcgcgatc

SEQ ID NO: 314997 - DNA, 75 bp, synthetic construct
  source 1..75: mol_type = other DNA
gagcagttcaaaaacgcccaaggcgagctggaaatccaggtaggtgacgaagttgacgttgctctggacgcagta

SEQ ID NO: 314998 - DNA, 75 bp, synthetic construct
  source 1..75: mol_type = other DNA
atttcagcatctatattcactattgtcggtttatgggtcggttttttatatccgaatgcaatgaatagtattgtt

SEQ ID NO: 314999 - DNA, 75 bp, synthetic construct
  source 1..75: mol_type = other DNA
tggcgcgcgtttgcctgggggcggaaaaaatcccgagcatcaacgtttctaaacaccgtctggacgttcagttcg

SEQ ID NO: 315000 - DNA, 75 bp, synthetic construct
  source 1..75: mol_type = other DNA
ttgaaagtgtggtggtaataatgctttcaactgtcattgttatggggatacaggttagcataggtaatgtcatta

SEQ ID NO: 315001 - DNA, 75 bp, synthetic construct
  source 1..75: mol_type = other DNA
aagcaaatatgagcttttaaaaaaagatgaatcgaaaggaaaagcagcatatcatttctataaaaaagtattact

SEQ ID NO: 315002 - DNA, 75 bp, synthetic construct
  source 1..75: mol_type = other DNA
gaaacgcaaaacagctttttgatgggcggaaccccaaaatcgcaggacttttcactcacgctcgaatattatgga

SEQ ID NO: 315003 - DNA, 75 bp, synthetic construct
  source 1..75: mol_type = other DNA
atcaggcgctaggcgatcgctacgatctctacaacgacttaccacgtgaggagcgaatccacgcactgaatgcag

SEQ ID NO: 315004 - DNA, 75 bp, synthetic construct
  source 1..75: mol_type = other DNA
cagggtgatattcgcgtcgccagtttgccgggctacggcgcaaccttcacccttattttaccgttcaacccacag

SEQ ID NO: 315005 - DNA, 75 bp, synthetic construct
  source 1..75: mol_type = other DNA
gccagtttgccgggctacggcgcaaccttcacccttattttaccgatcaacccgcagggaaatcagactgtatga

SEQ ID NO: 315006 - DNA, 75 bp, synthetic construct
  source 1..75: mol_type = other DNA
accggaatccagggttcttgatatttgtgccggaaccggtggttttttgatttcagcgatgcaacagatgctaaa

SEQ ID NO: 315007 - DNA, 75 bp, synthetic construct
  source 1..75: mol_type = other DNA
tactatgcggatggtataaagcgcgatgcaaaaaaggccgcttttgtatccctcgccggaccagtaagcgaagcc

SEQ ID NO: 315008 - DNA, 75 bp, synthetic construct
  source 1..75: mol_type = other DNA
tttgtaataaaggtaatttgatgaaaacaaaaaaattgatgatggttgcactggtcagttccactctggcccttt

SEQ ID NO: 315009 - DNA, 75 bp, synthetic construct
  source 1..75: mol_type = other DNA
aaatatccgcttaaggatgcacagcgtgcgcatgcgattctggaaagccgggcgacgcaaggttccagcctgttg

SEQ ID NO: 315010 - DNA, 75 bp, synthetic construct
  source 1..75: mol_type = other DNA
agtgggcaaaagccctgggcgcgaaacttatcggcaccgtaggaaccgcgcaaaaagcgcagagcgcgctaaaag

SEQ ID NO: 315011 - DNA, 75 bp, synthetic construct
  source 1..75: mol_type = other DNA
gggcgcatacagctctgtacataacgttaatgccgataaagccgcgattctgccagcagcaatttcttttgagca

SEQ ID NO: 315012 - DNA, 75 bp, synthetic construct
  source 1..75: mol_type = other DNA
aacgttaagaatgaaggcttcggcatgctggcaatgagcggcgggaccgttgtaaaccaggggacaattaatctc

SEQ ID NO: 315013 - DNA, 75 bp, synthetic construct
  source 1..75: mol_type = other DNA
cagcataggggaccaaccgtccacctcacacctgtcgttaaccggcgttaccatcgggggggaaaacaatactgt

SEQ ID NO: 315014 - DNA, 75 bp, synthetic construct
  source 1..75: mol_type = other DNA
ttgcaacagaaaggtgatattaccgttaacggtgcggggcacggcgttgaagtcagcggtagtaaggcgacaatc

SEQ ID NO: 315015 - DNA, 75 bp, synthetic construct
  source 1..75: mol_type = other DNA
gaaggggcgaaaacctttgaaccgcgcgaagggctgaaaatcaccccgtatgccggtgtgaaactgcgtcacacg

SEQ ID NO: 315016 - DNA, 75 bp, synthetic construct
  source 1..75: mol_type = other DNA
catcagatgtccttcgacaatggcatgaactggaataacgcgctgcgttacgatattcatcaactggacagcagc

SEQ ID NO: 315017 - DNA, 75 bp, synthetic construct
  source 1..75: mol_type = other DNA
gacggtggtgatacacctgttccaccagatgacggtggtgatacacctgttccaccagatgacggtggtgataca

SEQ ID NO: 315018 - DNA, 75 bp, synthetic construct
  source 1..75: mol_type = other DNA
tgacctggcaaactatggcgacgaaacgcttaatggcgacgttacacaaacggctggatattcaaccaacctgat

SEQ ID NO: 315019 - DNA, 75 bp, synthetic construct
  source 1..75: mol_type = other DNA
aacagtccaccggggtgaccattacaggtgatgataataccattgatatcaccggtgatatggtcgttgatcaaa

SEQ ID NO: 315020 - DNA, 75 bp, synthetic construct
  source 1..75: mol_type = other DNA
ccggattgttacaatcgataaatggctccgggaatacagaaaagttgtcgacgcagtaacagtcctggaattctt

SEQ ID NO: 315021 - DNA, 75 bp, synthetic construct
  source 1..75: mol_type = other DNA
gagctacgcgaagagccagcgtacggcaagcctggcaggcgcaggcagtcagcactttaatgtcgatgacggtca

SEQ ID NO: 315022 - DNA, 75 bp, synthetic construct
  source 1..75: mol_type = other DNA
gactttaacctgaatatgaacagtggcagcgaaacggcggtggacagcatcgtcgggttgaaactggattacgca

SEQ ID NO: 315023 - DNA, 75 bp, synthetic construct
  source 1..75: mol_type = other DNA
attgccctggccggagcgatgcatgtcggggattttgccaccgggctggaggtgatgggtaagaacaatgatctg

SEQ ID NO: 315024 - DNA, 75 bp, synthetic construct
  source 1..75: mol_type = other DNA
gcacctctgaaacgctggccgccacaccaaaggccgtcaaggctgcatatgacctggctgccggcaaggcccccg

SEQ ID NO: 315025 - DNA, 75 bp, synthetic construct
  source 1..75: mol_type = other DNA
gccatcagcaacggcggcaccggcacgcaggttaacggcgacgaagccaccgtaaacaataacggcaacaccacc

SEQ ID NO: 315026 - DNA, 75 bp, synthetic construct
  source 1..75: mol_type = other DNA
aacgtagacgtcacgatgaccaaaaacgcctatacggatgttgtgacggattcttcagttaataatgtcgctcag

SEQ ID NO: 315027 - DNA, 75 bp, synthetic construct
  source 1..75: mol_type = other DNA
agcctggcgacgatgggtgtgaaatacagcagccaggaaagtgcgttgcaggtagatgcattccactggaaagaa

SEQ ID NO: 315028 - DNA, 75 bp, synthetic construct
  source 1..75: mol_type = other DNA
tcatttcacgggcaacttgccgagaatgccttcgaacatttcagcttcgataaattgtttatgggcaccgacggc

SEQ ID NO: 315029 - DNA, 75 bp, synthetic construct
  source 1..75: mol_type = other DNA
atgaaacctcgtcagcgtcaggccgccattctggagtacctgcaaaagcaggggaaatgctcggttgaagaattg

SEQ ID NO: 315030 - DNA, 75 bp, synthetic construct
  source 1..75: mol_type = other DNA
cggacaaaagaaacgccccacagccggggcttctgcaatgactgcgggaacgttattccggcacagcgccttgcg

SEQ ID NO: 315031 - DNA, 75 bp, synthetic construct
  source 1..75: mol_type = other DNA
atattcttggacaggatcataaaatttctaaccagcgcaaaatagtcactgaaggtgacaaaaccagcgtgataa

SEQ ID NO: 315032 - DNA, 75 bp, synthetic construct
  source 1..75: mol_type = other DNA
gataacgggagtgccagctgcctcgctgacggcaaaaggcaccgtacaactgagcagcgccacggacagtcaatc

SEQ ID NO: 315033 - DNA, 75 bp, synthetic construct
  source 1..75: mol_type = other DNA
gacgcgacactgacagctaaggggttcacccaactgagcagtgccaccaacagcacctctgaaacgctggccgcc

SEQ ID NO: 315034 - DNA, 75 bp, synthetic construct
  source 1..75: mol_type = other DNA
cacgggaacgatggctgtaatggccgacggtaagtcgcttatcagtggcagcttcctgctttataacgaagcagg

SEQ ID NO: 315035 - DNA, 75 bp, synthetic construct
  source 1..75: mol_type = other DNA
aacgccacgctggaaggtgggccgaatctgagctatgtgaaaagtcaacgtactgcgagcatttcgggcgcggga

SEQ ID NO: 315036 - DNA, 75 bp, synthetic construct
  source 1..75: mol_type = other DNA
gtgtccatcaatggcgacagtgcgacgttgaccaatacgggcgatattgacgtcagcaattcggctaccggattc

SEQ ID NO: 315037 - DNA, 75 bp, synthetic construct
  source 1..75: mol_type = other DNA
gtgtttctcgtcggctggaatatgagtatcaccgacataacgataaattacgttctgataatgcaggcagagatg

SEQ ID NO: 315038 - DNA, 75 bp, synthetic construct
  source 1..75: mol_type = other DNA
gtgagcggcggcggtcacggtattgatatcaccggcgacagcgcaacggtggacaacaaaggcggtatgaccgtc

SEQ ID NO: 315039 - DNA, 75 bp, synthetic construct
  source 1..75: mol_type = other DNA
gataaacggtgacaaagccatcgtcaacaacgacggcgacagcacgatccttgatggcggcaccggaacccgcat

SEQ ID NO: 315040 - DNA, 75 bp, synthetic construct
  source 1..75: mol_type = other DNA
gcgataaagacactcagtatgtgtcactggcctatacggagcgattaaaagaagcaaaactgcaggcatcaacag

SEQ ID NO: 315041 - DNA, 75 bp, synthetic construct
  source 1..75: mol_type = other DNA
gttacgcgctttcatggcggtgcggcgaaaataatgtccggtaatagtgaaaccgagacccaggaagtcgggttt

SEQ ID NO: 315042 - DNA, 75 bp, synthetic construct
  source 1..75: mol_type = other DNA
atggctggcttaccgaacagcagtaatgcgctgcaacagtggcatcacttgtttgaagctgaagggacaaaacgc

SEQ ID NO: 315043 - DNA, 75 bp, synthetic construct
  source 1..75: mol_type = other DNA
tgcggctggtgtttgtcgatggacgttacgtgcccgcactgagcgatgcaactgaaggcagcggatatgaagtga

SEQ ID NO: 315044 - DNA, 75 bp, synthetic construct
  source 1..75: mol_type = other DNA
ataatggtgttacaggcggttacagccagttctttggcctgaaacatcagatgtccttcgacaatggcatgaact

SEQ ID NO: 315045 - DNA, 75 bp, synthetic construct
  source 1..75: mol_type = other DNA
taataacggaaaagttatccaggacggcgatctggatgtcagcggcggcggtcacggcattgatatcaccggtga

SEQ ID NO: 315046 - DNA, 75 bp, synthetic construct
  source 1..75: mol_type = other DNA
gacggctgataatgcagcagatcactttttcgacccttccgtgggcattcgtgtttcgggaaacagtaatgacct

SEQ ID NO: 315047 - DNA, 75 bp, synthetic construct
  source 1..75: mol_type = other DNA
gctggtagggatggcagtgtataaaggtgctacggcaataaacgaccaaactggtgtaatcaatattaatgttga

SEQ ID NO: 315048 - DNA, 75 bp, synthetic construct
  source 1..75: mol_type = other DNA
cagaagggcggcggcatcaacagcctggcaagtgtcggcgtgaagtacagcagcaaagaaagttcgctgaatctg

SEQ ID NO: 315049 - DNA, 75 bp, synthetic construct
  source 1..75: mol_type = other DNA
tgcacaaacaccacagattataaaggcagaaagtagctctgaggtcataaataacggtaatgttgatatctggaa

SEQ ID NO: 315050 - DNA, 75 bp, synthetic construct
  source 1..75: mol_type = other DNA
gaatcgtacttcctgcaccgaaggaattcagtcctgaatcattgccgcgcaaatttaatatggctgctgtcggtg

SEQ ID NO: 315051 - DNA, 75 bp, synthetic construct
  source 1..75: mol_type = other DNA
gatctatagttggcaacagctataggcaaaatgtggttaataccggaagtatgacagtcacggctgatggtacat

SEQ ID NO: 315052 - DNA, 75 bp, synthetic construct
  source 1..75: mol_type = other DNA
accattgagtactacgtcgaagcgaaagagggaggagacaaacagcggattgcgcaggcgcagttgagcattgac

SEQ ID NO: 315053 - DNA, 75 bp, synthetic construct
  source 1..75: mol_type = other DNA
ggatcacgttatcaaaagcgcgtttgcatcacgcgatgagctgcgcgccagataaagaactctgtttcgttcttt

SEQ ID NO: 315054 - DNA, 75 bp, synthetic construct
  source 1..75: mol_type = other DNA
gcaccgagataaacggtgacaaagccatcgtcaacaacgacggtgacagcacgatccttgatggcggcaccggaa

SEQ ID NO: 315055 - DNA, 75 bp, synthetic construct
  source 1..75: mol_type = other DNA
aaaggcggcatgactgtcaccgatccggattccatcggtattcagatcgacggcgacaaggcggttgtcaataac

SEQ ID NO: 315056 - DNA, 75 bp, synthetic construct
  source 1..75: mol_type = other DNA
atccggattccatcggtattcagatcgacggcgacaaggcagttgtcaataacgaaggtgacaacgccatcagta

SEQ ID NO: 315057 - DNA, 75 bp, synthetic construct
  source 1..75: mol_type = other DNA
cggtcaaaacagcgttacggtgcaccacgcctgacggatgaactgcgtgctcagggttaccactttaacgtaaaa

SEQ ID NO: 315058 - DNA, 75 bp, synthetic construct
  source 1..75: mol_type = other DNA
atccatggagaacactttatcagccgggaaataatgcgggcaacggtgtttaattatatcgaatgtgattacaat

SEQ ID NO: 315059 - DNA, 75 bp, synthetic construct
  source 1..75: mol_type = other DNA
gtactgccaatcgaaaaaattgacattattattaccgatgatgctgtgtcagaggtggataaactggcattgcag

SEQ ID NO: 315060 - DNA, 75 bp, synthetic construct
  source 1..75: mol_type = other DNA
cataatcagattaaattcctgtttgattcacgaggttttccactggcgtatattacctgggcatatcttgaggct

SEQ ID NO: 315061 - DNA, 75 bp, synthetic construct
  source 1..75: mol_type = other DNA
cggcgacgaagccaccgtgaacaataacggcagcaccaccgttgacggcaaggattccaccggcaccgagatcgc

SEQ ID NO: 315062 - DNA, 75 bp, synthetic construct
  source 1..75: mol_type = other DNA
acagttgggaatggtcaggagtgtatatttacgcagtcattaccattttgctgacaacattttcactggccttac

SEQ ID NO: 315063 - DNA, 75 bp, synthetic construct
  source 1..75: mol_type = other DNA
attattattggtctgagtgggttttgtggtgatgtggtgatgtcagctatcaagcgcgattttggtgtgaaggat

SEQ ID NO: 315064 - DNA, 75 bp, synthetic construct
  source 1..75: mol_type = other DNA
acgatagcagcaattaaagatcagctttgtggtcagtggcgttcagtgggtatcatgtctgatgaagccggtata

SEQ ID NO: 315065 - DNA, 75 bp, synthetic construct
  source 1..75: mol_type = other DNA
atacacagggctttttacgtaccgtttcccagttgcactggagtctgatgaccaccgtatttgccttcagccatg

SEQ ID NO: 315066 - DNA, 75 bp, synthetic construct
  source 1..75: mol_type = other DNA
acctgatgaatctgaactgcagcagaaggacgccgaggagctgttcgactggctcattgaggagtgccgcggaga

SEQ ID NO: 315067 - DNA, 75 bp, synthetic construct
  source 1..75: mol_type = other DNA
ctgaataaagaactccgcaaaggcgcggatgagtcagaaaccctcagacaactggaagtacttcagaaaaacagt

SEQ ID NO: 315068 - DNA, 75 bp, synthetic construct
  source 1..75: mol_type = other DNA
ttttttcctgacgcttgccgagtccggagaacgaaaaaccgcagtggacaaattattaatgaagcccctgtatca

SEQ ID NO: 315069 - DNA, 75 bp, synthetic construct
  source 1..75: mol_type = other DNA
gatcccaacccactccatcgccagatagcagcagcgatcaaagcggtatccgattccggcgttccctgttatttc

SEQ ID NO: 315070 - DNA, 75 bp, synthetic construct
  source 1..75: mol_type = other DNA
cgcattgccgcgcgaatgcgcgcgaacagtaaagaagccaacagcagtaaatcgctggcgatcatggacgttaac

SEQ ID NO: 315071 - DNA, 75 bp, synthetic construct
  source 1..75: mol_type = other DNA
aacctgcttttcgtgtcgtgttgggtgcctggcatacggaaggttcgatggtgaaagtcacggcagatgacgttg

SEQ ID NO: 315072 - DNA, 75 bp, synthetic construct
  source 1..75: mol_type = other DNA
tgtctccttccggacccttaagccagtttcggggacatgtttcaaaaaaaacagaaaacattgcgagaattgctg

SEQ ID NO: 315073 - DNA, 75 bp, synthetic construct
  source 1..75: mol_type = other DNA
atgactgaatataatacggccttcaatgaagtagacttgcttatgaatgagatgcttgaaaaattaaatatatca

SEQ ID NO: 315074 - DNA, 75 bp, synthetic construct
  source 1..75: mol_type = other DNA
gacgcaatcattcgagaggttgagttaaaggaggcatggctcacaagggtcttggggaactcagccgatcctgac

SEQ ID NO: 315075 - DNA, 75 bp, synthetic construct
  source 1..75: mol_type = other DNA
aaatggcgttcagttggtattatgtcagatgaagccggtattatatttgatggatataccctgtctgagttgcct

SEQ ID NO: 315076 - DNA, 75 bp, synthetic construct
  source 1..75: mol_type = other DNA
cggcttcgttgtattgggaacatccaccagtcgaatgattaaatcagaattcagcgaactaatcgaattgatata

SEQ ID NO: 315077 - DNA, 75 bp, synthetic construct
  source 1..75: mol_type = other DNA
gctgcagctgctggctcaccaccaggcgggctaccgcgagatcggccccttcgtcgcctcgctgcatgaatggga

SEQ ID NO: 315078 - DNA, 75 bp, synthetic construct
  source 1..75: mol_type = other DNA
ggcacattacctcttcttgcgccgttgactctgctgaagcattatctgggtgagtatcctaatgattacttgctt

SEQ ID NO: 315079 - DNA, 75 bp, synthetic construct
  source 1..75: mol_type = other DNA
tctcgatttcatgacaggaatgaccggcggcgcaggtaacccggcaattggtgctgatgttcgcagccgattaac

SEQ ID NO: 315080 - DNA, 75 bp, synthetic construct
  source 1..75: mol_type = other DNA
ctcgttcggtgctgaacatggcgttcagtggtctggcgatacgaaattaaacgaggaatttataaaacgctgggg

SEQ ID NO: 315081 - DNA, 75 bp, synthetic construct
  source 1..75: mol_type = other DNA
tatcaggcagataagggagatacagcctgatagcaaaagcccgctgataatcaccatccaggagaaaacccgctc

SEQ ID NO: 315082 - DNA, 75 bp, synthetic construct
  source 1..75: mol_type = other DNA
atgcccgccccgtgtcaggaaaaattatattctccagtgtggcccggggcgtttcagaaacagaaaaaaactgaa

SEQ ID NO: 315083 - DNA, 75 bp, synthetic construct
  source 1..75: mol_type = other DNA
gcaggcgctgaaaaaagctcgccgtaaggcacatacgtcgatagctaacactcgccgccgtaagtctatccgcat

SEQ ID NO: 315084 - DNA, 75 bp, synthetic construct
  source 1..75: mol_type = other DNA
ccccagatagccagtttaaagttgtctgatgtctctggtatttttacctcgggttatcactacaataagctgaga

SEQ ID NO: 315085 - DNA, 75 bp, synthetic construct
  source 1..75: mol_type = other DNA
gagagttaatgataataatttaattcatattggtactgcagatctcagaaaagcaagtgctttaaagttatttat

SEQ ID NO: 315086 - DNA, 75 bp, synthetic construct
  source 1..75: mol_type = other DNA
gctcgactggctcattgaggagtgccgcggagaatgcccgccccgtgtcaggaaaaattatattctccagtgtgg

SEQ ID NO: 315087 - DNA, 75 bp, synthetic construct
  source 1..75: mol_type = other DNA
gtacacagatgaatataaaaaattatttgcgttacctgatgaatctgaactgcagcagaaggacgccgaggagct

SEQ ID NO: 315088 - DNA, 75 bp, synthetic construct
  source 1..75: mol_type = other DNA
aacctgctttccgcgtcgtgctgggagcctggcataccgaaggttcgatggtgaaagtcacggcagatgacgttg

SEQ ID NO: 315089 - DNA, 75 bp, synthetic construct
  source 1..75: mol_type = other DNA
tctggcgcggaatttaacccacaaaaaaatacgttgctggtgttgtcacatgagtcacgcgccctgcaggaagtg

SEQ ID NO: 315090 - DNA, 75 bp, synthetic construct
  source 1..75: mol_type = other DNA
aagattatttactatgatatcaatatttatgcccttttttggagttttatggttgcttgtacattagtgacaatt

SEQ ID NO: 315091 - DNA, 75 bp, synthetic construct
  source 1..75: mol_type = other DNA
accgttaactgcgggagccgctgtctgttacgtttgcatatgaaagatgacaccgtgtactgggtggagtctgat

SEQ ID NO: 315092 - DNA, 75 bp, synthetic construct
  source 1..75: mol_type = other DNA
aatgaagtttacttgtctgcatccttcactgataacatggcctgtataccaaactggcccttacaagaatttccg

SEQ ID NO: 315093 - DNA, 75 bp, synthetic construct
  source 1..75: mol_type = other DNA
cacaaagatcccccctttctataacggttcatttgagactccccttgactccctcttcaaaattgaagaccatca

SEQ ID NO: 315094 - DNA, 75 bp, synthetic construct
  source 1..75: mol_type = other DNA
caccattcctctggattttgtgaaagatctcgagactatcgaatatattggtgataataaattcgtcatcagtga

SEQ ID NO: 315095 - DNA, 75 bp, synthetic construct
  source 1..75: mol_type = other DNA
agaaataggttcaaaaacaaaaggctttaaaatcattgcaataaacccagatttttattatcctcgtaaaaggtg

SEQ ID NO: 315096 - DNA, 75 bp, synthetic construct
  source 1..75: mol_type = other DNA
tctaaattcagttggctggatttcctatgctaatcaggaatacacagttacgagagctggtagtttagaggtaac

SEQ ID NO: 315097 - DNA, 75 bp, synthetic construct
  source 1..75: mol_type = other DNA
ttcggcagacgacggcatcgcagcgcttgagaagtggttcgaagaaattggtacgccaacacgtcttgaacagct

SEQ ID NO: 315098 - DNA, 75 bp, synthetic construct
  source 1..75: mol_type = other DNA
gtcctgtacggaacaggcgtagatggcggaaacatcaccaactcgaacgtcccgtaccgtctgatgaactcttgc

SEQ ID NO: 315099 - DNA, 75 bp, synthetic construct
  source 1..75: mol_type = other DNA
ggcgcactggcctgtgcgattgcctgggtactgattactgaaaacatggtcgatcagccatttctcgacaaataa

SEQ ID NO: 315100 - DNA, 75 bp, synthetic construct
  source 1..75: mol_type = other DNA
tgggacgaagccctggataccatcagtgataatcttcggcggatcctaaaagattacggcaatgaggctgtacat

SEQ ID NO: 315101 - DNA, 75 bp, synthetic construct
  source 1..75: mol_type = other DNA
agcctcaagatacctaactccaagttattgtaaaataatcgaccccagctatttcgtgaatgaactttgcgataa

SEQ ID NO: 315102 - DNA, 75 bp, synthetic construct
  source 1..75: mol_type = other DNA
gcaatagccaacaaccgacaaatacccaacagcagcagagtcaatccggatcatatacctcaaaatcaggcattc

SEQ ID NO: 315103 - DNA, 75 bp, synthetic construct
  source 1..75: mol_type = other DNA
cacactttctggttttttaaagagaaaaatccgattgaggtctacaaagttggtgatgctgccaacttactgatt

SEQ ID NO: 315104 - DNA, 75 bp, synthetic construct
  source 1..75: mol_type = other DNA
cccctgaacaactacgtaaacaggcacaggaaatgttgcgacaggcggaacaactggaaaaaacaggtgtaacaa

SEQ ID NO: 315105 - DNA, 75 bp, synthetic construct
  source 1..75: mol_type = other DNA
gttgccgttgacggtaagggtagtttatttaagatgtcacaaatcatcaatgccatcggcataaaaacaaggatt

SEQ ID NO: 315106 - DNA, 75 bp, synthetic construct
  source 1..75: mol_type = other DNA
agcaaatgcgattcaggtttgtaaggattctaatggaaccatagcaaggaagactatatctgaaaaaatcgaaga

SEQ ID NO: 315107 - DNA, 75 bp, synthetic construct
  source 1..75: mol_type = other DNA
gcgaccgatttaggccatacgctgattttaaacagtgaaagccagctgccagacagcggcagtgaggaccaggtc

SEQ ID NO: 315108 - DNA, 75 bp, synthetic construct
  source 1..75: mol_type = other DNA
atgccaatatagcccggcgtgacaaatttcgcgaaatgatgcgatcacccgcctaccagtggaagaagcctgcgc

SEQ ID NO: 315109 - DNA, 75 bp, synthetic construct
  source 1..75: mol_type = other DNA
tttgaagaaacgacgctttcggctatcgccagccgtatcgcacaaactcacggcctaaagctggtgggcaaaatc

SEQ ID NO: 315110 - DNA, 75 bp, synthetic construct
  source 1..75: mol_type = other DNA
attttgtaaatgaactttgcgataaagcagatgaaaatatgatccttgatatgcttgatgccattcatcgccatc

SEQ ID NO: 315111 - DNA, 75 bp, synthetic construct
  source 1..75: mol_type = other DNA
ttgaacaacagagcaatcactgtttcaccggaacaacttcgtcggcaggcgcaggagatgcttcgttgtgctgaa

SEQ ID NO: 315112 - DNA, 75 bp, synthetic construct
  source 1..75: mol_type = other DNA
cggccaccagctcagcccggcagaattgcgggaattaaggcgccagctggcagagggccctgtaatagccaggcg

SEQ ID NO: 315113 - DNA, 75 bp, synthetic construct
  source 1..75: mol_type = other DNA
atgacaccacgagaaatcgagctgctgaccattgccaagctggagcatgacggccaccagctcagcccggcagaa

SEQ ID NO: 315114 - DNA, 75 bp, synthetic construct
  source 1..75: mol_type = other DNA
agtgcgaggacaaatcgtcgatgctcaggcctgttttaatctaaattccatcaatcagggggggggagatcagaa

SEQ ID NO: 315115 - DNA, 75 bp, synthetic construct
  source 1..75: mol_type = other DNA
tacggcagccacaaagatgaacgaaggctggacccgagcattaccgtatgcaatcggtggttcatgtctatttaa

SEQ ID NO: 315116 - DNA, 75 bp, synthetic construct
  source 1..75: mol_type = other DNA
aacgctcaattcacttatattaatcatggtgatgcttacgctcctggctggcgacgagactacaatacgaaaaac

SEQ ID NO: 315117 - DNA, 75 bp, synthetic construct
  source 1..75: mol_type = other DNA
cgttgatgatagcgtggccgatcccacgcccttcggcgaggtgcggcagcgcgcctacaagatcatgcctcgcga

SEQ ID NO: 315118 - DNA, 75 bp, synthetic construct
  source 1..75: mol_type = other DNA
ggaattactgcagcggcgaccccgtactggttgggagagcgtggcggcgtttcttgacgcgccaccgcttaagga

SEQ ID NO: 315119 - DNA, 75 bp, synthetic construct
  source 1..75: mol_type = other DNA
aaatacattacgggaatcgcaaggagcgctactggccgcgctatttctaaaagatcaggatatttttccggcaat

SEQ ID NO: 315120 - DNA, 75 bp, synthetic construct
  source 1..75: mol_type = other DNA
ccgtcacggggtgccggaaacggacttagtggaaagcggaatgacaggcggtggtggtggtgctatggtgagcgg

SEQ ID NO: 315121 - DNA, 75 bp, synthetic construct
  source 1..75: mol_type = other DNA
attcctgttgctgatgctgctcagattcttggtcaggccagggctatgatgcaggatatcaaaaactataaagaa

SEQ ID NO: 315122 - DNA, 75 bp, synthetic construct
  source 1..75: mol_type = other DNA
tgcggtttcttttgagtcaccggaatataccgcagacgtcgatgcgatgggtacgctgcgcctgctggaggcgat

SEQ ID NO: 315123 - DNA, 75 bp, synthetic construct
  source 1..75: mol_type = other DNA
tgttcagacatggaatggccccggctggtctgacaggtcaggttatgtcgttacgggttcagttaacggaaaccg

SEQ ID NO: 315124 - DNA, 75 bp, synthetic construct
  source 1..75: mol_type = other DNA
tgccgataatattggtggtgtttattacagaccaattcaaaaaaatattaatggcacatggtataacgtatcgag

SEQ ID NO: 315125 - DNA, 75 bp, synthetic construct
  source 1..75: mol_type = other DNA
atcgttcagcgcgtgatggttacggattcgaagctgactggtcagaattttacaccacaacacgcaagccatcag

SEQ ID NO: 315126 - DNA, 75 bp, synthetic construct
  source 1..75: mol_type = other DNA
gtttggccggcggttcgagccgcgcttcaccgacctcaacgcgcaattgaaagaactctactgcgctgacgatcc

SEQ ID NO: 315127 - DNA, 75 bp, synthetic construct
  source 1..75: mol_type = other DNA
tcggctccggcaacatcggtaccgatttgatgataaaaattctgcgtcacggcgtgcatctggaaatggctgtga

SEQ ID NO: 315128 - DNA, 75 bp, synthetic construct
  source 1..75: mol_type = other DNA
cggtgtatgtattgagcgacgaagcttcacaagatgatatcgaagcctcaatcaatgaaatggctgaggcggtgc

SEQ ID NO: 315129 - DNA, 75 bp, synthetic construct
  source 1..75: mol_type = other DNA
agtttcacgtgtggcgcgtgttcattacgccgaaattatcgcttctatcgccagtaaatctgccggacctggcac

SEQ ID NO: 315130 - DNA, 75 bp, synthetic construct
  source 1..75: mol_type = other DNA
ctgccagtagcaaaactcaccccgaattcatgggcagggatatttatcgcaatgaatacggtagccacatgacga

SEQ ID NO: 315131 - DNA, 75 bp, synthetic construct
  source 1..75: mol_type = other DNA
gaccgcattcggtcagtcctccacggagatcatccgttccgcatggcatattcgcggcgcactggacgggctgag

SEQ ID NO: 315132 - DNA, 75 bp, synthetic construct
  source 1..75: mol_type = other DNA
attaatgagatggcggtggcggtacaggcctacgtgccgggctatcgcctgaaacagcgtgtccagtttgaagtc

SEQ ID NO: 315133 - DNA, 75 bp, synthetic construct
  source 1..75: mol_type = other DNA
tgagggattctatgtggatgataaggccattcgtcccaatgaatttgttaacttaagtcataatgagataaaaaa

SEQ ID NO: 315134 - DNA, 75 bp, synthetic construct
  source 1..75: mol_type = other DNA
atactgacggtgcgtaaggatgcagccttcggcgtcacggtgaatggggtttccgcagctcctggggagagcaaa

SEQ ID NO: 315135 - DNA, 75 bp, synthetic construct
  source 1..75: mol_type = other DNA
gcgatcttcgagttcgacaagctcatccgcagcatctacacgcttcgctacctgcgcgatccgcaactggaacgc

SEQ ID NO: 315136 - DNA, 75 bp, synthetic construct
  source 1..75: mol_type = other DNA
ttggaaagattaatatacatacacttcctgtaatcattgactggcttaatgaaaataatatcccgtacgatgaag

SEQ ID NO: 315137 - DNA, 75 bp, synthetic construct
  source 1..75: mol_type = other DNA
tacaaatgattatactaaagttaaaccaaaactaaaagttgttaaaaaattgtatgaatttaaaaaaatgggatt

SEQ ID NO: 315138 - DNA, 75 bp, synthetic construct
  source 1..75: mol_type = other DNA
tagatttagataacaccatatcttttaatttatcaggaaaatattcacatgcaactccaaacaaaaaactaattg

SEQ ID NO: 315139 - DNA, 75 bp, synthetic construct
  source 1..75: mol_type = other DNA
ttacccgggctatccgcagagatatacgcgcacttacgcaataaatggaatgatgtccctgtagttgggactata

SEQ ID NO: 315140 - DNA, 75 bp, synthetic construct
  source 1..75: mol_type = other DNA
cgccgctggtgggattattcctcatcgcttcgctatttcagctactctttgcttctgacgtcgcagcattatgtg

SEQ ID NO: 315141 - DNA, 75 bp, synthetic construct
  source 1..75: mol_type = other DNA
ctgctatcggtctgaaagacgtaaccactggtgacaccctgtgtgacccggatgcgccgatcattctggaacgta

SEQ ID NO: 315142 - DNA, 75 bp, synthetic construct
  source 1..75: mol_type = other DNA
gttgatctgtatttacagtcttgtgtggaggatggaaaggaacctgataccccgtttaaaggtgtgtttaacgtc

SEQ ID NO: 315143 - DNA, 75 bp, synthetic construct
  source 1..75: mol_type = other DNA
tcgatgaaagtttatcagttgccggaagccactcgtggcgcgcgcggtcgtccgatcgtcaacctgctgccgctg

SEQ ID NO: 315144 - DNA, 75 bp, synthetic construct
  source 1..75: mol_type = other DNA
gacgaatacaaagagctgctggatcagatcgcggaactgttgcgtattcttggtagcgccgatcgtttgatggaa

SEQ ID NO: 315145 - DNA, 75 bp, synthetic construct
  source 1..75: mol_type = other DNA
gtcgacgctggcgtggtatcaggaaaatccagacagcccaaacgctgagcgggattgtgatgcggctttggctgc

SEQ ID NO: 315146 - DNA, 75 bp, synthetic construct
  source 1..75: mol_type = other DNA
ctaatgttattgcagaagcaataaaagccggaggttctcttgatgattttcttatatctcaggatacatcatctt

SEQ ID NO: 315147 - DNA, 75 bp, synthetic construct
  source 1..75: mol_type = other DNA
cttatcagttcgttgatgtcagtggttttgaccacgagggaacttcacgcgatttattgaaaaccctgaacccgt

SEQ ID NO: 315148 - DNA, 75 bp, synthetic construct
  source 1..75: mol_type = other DNA
tggcgcaggtacaggaacggttcgccgtcactctttcctttttcgacgtgatggaggatgccagcgtgcgcgcgt

SEQ ID NO: 315149 - DNA, 75 bp, synthetic construct
  source 1..75: mol_type = other DNA
atttaggcacggttgaacccgattttgaaaataatgtcctgtatggaaaactagcgtttattcgggacctggtaa

SEQ ID NO: 315150 - DNA, 75 bp, synthetic construct
  source 1..75: mol_type = other DNA
ccgtcaccgtggtgactcaggtagaagtggataaaaacgatccggggtttgtccatcccaccaagcccatcggtg

SEQ ID NO: 315151 - DNA, 75 bp, synthetic construct
  source 1..75: mol_type = other DNA
agtgattatcaccacgcctgaatgcctgtccgcggcactgcgtggcgaaacaggcacccatattatccactccca

SEQ ID NO: 315152 - DNA, 75 bp, synthetic construct
  source 1..75: mol_type = other DNA
ttctgccggtgaccgagtttgaagaaggcgtgaaagtcttcatggcgacagctaacggcactgtgaagaaaaccg

SEQ ID NO: 315153 - DNA, 75 bp, synthetic construct
  source 1..75: mol_type = other DNA
atattgcgatggctgaagcgggtattccgcgcggtaccggaatgggcatgggctacggcggctgcggtggtggcg

SEQ ID NO: 315154 - DNA, 75 bp, synthetic construct
  source 1..75: mol_type = other DNA
gattgggaaagtcgggagatacgcttagaggcgtttaaacacgccctaactgtgttgagtagcggagaatacata

SEQ ID NO: 315155 - DNA, 75 bp, synthetic construct
  source 1..75: mol_type = other DNA
cgtctggcgaaaattgcccatgaactgatggctgatctcgaaaaagagacggtcgatttcgttgataactatgac

SEQ ID NO: 315156 - DNA, 75 bp, synthetic construct
  source 1..75: mol_type = other DNA
ggctgaccgcacagatcaaaaaggatatggcccggcgattaactgaaggcatggcccgtggtttaaacccactgg

SEQ ID NO: 315157 - DNA, 75 bp, synthetic construct
  source 1..75: mol_type = other DNA
cgtacccgtgtatttgaagagatgcgcgggctgaccgcacagatcaaaaaggatatggcccgacgattaaccgaa

SEQ ID NO: 315158 - DNA, 75 bp, synthetic construct
  source 1..75: mol_type = other DNA
ttagatgagttacgggtgaaacgggatatcgcgatggctgaagcgggtattccgcgcggagccggaatgggcatg

SEQ ID NO: 315159 - DNA, 75 bp, synthetic construct
  source 1..75: mol_type = other DNA
ttggcgcggtacaggtagatgattgcgatcagatcatgatgatcaccgatgccggtacgttggtacgtactcgcg

SEQ ID NO: 315160 - DNA, 75 bp, synthetic construct
  source 1..75: mol_type = other DNA
ccgcgcccgtgctgaagtggaagttgacgccaaaaccggacgtgaaactattatcgtccacgaaattccgtatca

SEQ ID NO: 315161 - DNA, 75 bp, synthetic construct
  source 1..75: mol_type = other DNA
gcgtgacgagtctgacaaagacggtatgcgcatcgtgattgaagttaaacgcgatgcggtcggtgaagtggtgct

SEQ ID NO: 315162 - DNA, 75 bp, synthetic construct
  source 1..75: mol_type = other DNA
tgacgccaaaaccggacgtgaaaccattatcgtccacgaaattccgtatcaggtaaacaaagcgcgcctgatcga

SEQ ID NO: 315163 - DNA, 75 bp, synthetic construct
  source 1..75: mol_type = other DNA
tggtgaacggttcttccggtatcgccgtaggtatggcaaccaacatcccgccgcacaacctgacggaagtcatca

SEQ ID NO: 315164 - DNA, 75 bp, synthetic construct
  source 1..75: mol_type = other DNA
agagttcggcgtgcgtgatggtctgtactacctgaccgaacagcaagctcaggcgattctggatctgcgtttgca

SEQ ID NO: 315165 - DNA, 75 bp, synthetic construct
  source 1..75: mol_type = other DNA
ctgttcctgagtgaagccaaaggccatgcgaaaccttacactgcgccggtcgctgcgacagcaccggttgccgcc

SEQ ID NO: 315166 - DNA, 75 bp, synthetic construct
  source 1..75: mol_type = other DNA
gactgcgaatgcggttctgctgggggcgatcctcggtggcatgatgtgtactgacatgggcggtccggtaaacaa

SEQ ID NO: 315167 - DNA, 75 bp, synthetic construct
  source 1..75: mol_type = other DNA
caatgggtctggcaacaatggtggcgcgtcgcaaattcgacaaagcgcagcaggaaggtggcaaagccgctctgg

SEQ ID NO: 315168 - DNA, 75 bp, synthetic construct
  source 1..75: mol_type = other DNA
gtcacgctgaatgccgataatttcatcgtgagggataacggccccggtgtgacaccagaggcactggcgagaatt

SEQ ID NO: 315169 - DNA, 75 bp, synthetic construct
  source 1..75: mol_type = other DNA
cgacgcagctcacgaacttcgtagcccgttaacggcgctgaaagtgcaaaccgaagttgcgcagctctctgacga

SEQ ID NO: 315170 - DNA, 75 bp, synthetic construct
  source 1..75: mol_type = other DNA
atcgcgctactcgtctggttgatcaactgctcacgctatcgcggctggactcactggataaccttcaggacgtcg

SEQ ID NO: 315171 - DNA, 75 bp, synthetic construct
  source 1..75: mol_type = other DNA
atgacaatggtctttttattgatgggtttatttccatagagaaagttaatttgatattagctgctactttttttg

SEQ ID NO: 315172 - DNA, 75 bp, synthetic construct
  source 1..75: mol_type = other DNA
ttcatataaattatcaaaaacaatggttatcgttaatgattatttgaaaatgctttcaagtgattatagcagtat

SEQ ID NO: 315173 - DNA, 75 bp, synthetic construct
  source 1..75: mol_type = other DNA
ttgataagaaggattacctcagggctttactatgtgatacgcaaccaggtgactgtcccatcatcttttcaaatg

SEQ ID NO: 315174 - DNA, 75 bp, synthetic construct
  source 1..75: mol_type = other DNA
aaaaaatatgagtttcggaaaaatatttttagaaataaaaatgttgatacgatagttatttacgcaacgatgccg

SEQ ID NO: 315175 - DNA, 75 bp, synthetic construct
  source 1..75: mol_type = other DNA
acaagctctgaaggtgaaagcgggtcaaaacgcgatggatgccaccgtattagaaatcaccaaagacggcgtccg

SEQ ID NO: 315176 - DNA, 75 bp, synthetic construct
  source 1..75: mol_type = other DNA
ccagtcgctaccttcaggagatgagccttcccgcagacgacatgctccaggcatcaacaaatcccagcgctcgct

SEQ ID NO: 315177 - DNA, 75 bp, synthetic construct
  source 1..75: mol_type = other DNA
gtgaatctacctgatttttttactgttcttgcctgtggtattggtggggctctggccggacattttatcgtgaat

SEQ ID NO: 315178 - DNA, 75 bp, synthetic construct
  source 1..75: mol_type = other DNA
gccgatgggcgaaaaagtgaatgctttttatggccttaccggcgacgggaaaacggcggtgattgagatggcggc

SEQ ID NO: 315179 - DNA, 75 bp, synthetic construct
  source 1..75: mol_type = other DNA
ggatggcggcgaagggacggtggaggcgatggttgccgcgacggacggtaacatcgtgaagcttgaagtctgtgg

SEQ ID NO: 315180 - DNA, 75 bp, synthetic construct
  source 1..75: mol_type = other DNA
aaagtcacattggaagagtattttggagatcatcaaatcgatctcattgctattcccacaaccagcggatccggc

SEQ ID NO: 315181 - DNA, 75 bp, synthetic construct
  source 1..75: mol_type = other DNA
aaatattgcctgcgccattaaaataggtcagggaattaaaaactgccccttacctttaaagcggatgcgatttat

SEQ ID NO: 315182 - DNA, 75 bp, synthetic construct
  source 1..75: mol_type = other DNA
acatcgtgaagcttgaagtctgcgggccgatgggcgaaaaagtgaatgctttttatggccttaccggcgacggga

SEQ ID NO: 315183 - DNA, 75 bp, synthetic construct
  source 1..75: mol_type = other DNA
aggcgctggcggctaacggtggcaatttagcgcgcgtggcaagcattgagatggaggagtgcgatccgcgcctgg

SEQ ID NO: 315184 - DNA, 75 bp, synthetic construct
  source 1..75: mol_type = other DNA
aaacgaagtgatcgcggcctttgtgcaggataagcccgccatcgaacgaggtctgttcgatgaagagctgatccc

SEQ ID NO: 315185 - DNA, 75 bp, synthetic construct
  source 1..75: mol_type = other DNA
ctcaatgtcctcgatcctgacaagaagacgattatccatattcccaacgtcaattcgcgcgagagtacgaaggat

SEQ ID NO: 315186 - DNA, 75 bp, synthetic construct
  source 1..75: mol_type = other DNA
gaaggttttgactggatttggtgcgaacatgcgctgaccgttggctaccgtgccagcctgactgagatcgtgcag

SEQ ID NO: 315187 - DNA, 75 bp, synthetic construct
  source 1..75: mol_type = other DNA
gcgaggttactccggatccagatattgatatactgacttccggcgcggcgcgttttaaagcctttaagcccgacg

SEQ ID NO: 315188 - DNA, 75 bp, synthetic construct
  source 1..75: mol_type = other DNA
aataacctctctatgccaatttaataataaacgagtcggtattgtcaccgatgattttatgatgtcatcaggtaa

SEQ ID NO: 315189 - DNA, 75 bp, synthetic construct
  source 1..75: mol_type = other DNA
gaaggtttcgactggatctggtgcgaacatgcgttgaccgttggttaccgtgccagcctgactgagatcgtgcag

SEQ ID NO: 315190 - DNA, 75 bp, synthetic construct
  source 1..75: mol_type = other DNA
gcaatctctgcttcaaacatattggtttgtcaagtgggatgagttagatattgtgaaaatgattgagaaaaaaga

SEQ ID NO: 315191 - DNA, 75 bp, synthetic construct
  source 1..75: mol_type = other DNA
gcgtggacgcggttatcgacaaagatctctctaccgcgctactggcccgtgaaattcacgccgacattctggtga

SEQ ID NO: 315192 - DNA, 75 bp, synthetic construct
  source 1..75: mol_type = other DNA
gattgtttatcgtcagacgaaaggagatttcattgaattcggtaagcgaatgacaggtaaatcaaaagcgtatat

SEQ ID NO: 315193 - DNA, 75 bp, synthetic construct
  source 1..75: mol_type = other DNA
atgtccagaaaaacaaaatttaaaggcaccgcagcttctcgccgtagagcccgtcgcgcaaatctgcaaagtcag

SEQ ID NO: 315194 - DNA, 75 bp, synthetic construct
  source 1..75: mol_type = other DNA
ctgaaattgatgaactggagttgcaccgggctattgttgcgctcagcgagaaaatgaaagcggtggatgagaatg

SEQ ID NO: 315195 - DNA, 75 bp, synthetic construct
  source 1..75: mol_type = other DNA
ggatgtggacgctggtattgatcgtaacggcgtgtttaacctttttattaagaaatttcagtcacctacattgct

SEQ ID NO: 315196 - DNA, 75 bp, synthetic construct
  source 1..75: mol_type = other DNA
cgtactgacgcgggagattaccaaagcgtggacgcggttatcgacaaagatctctctaccgcgctgctggcccgt

SEQ ID NO: 315197 - DNA, 75 bp, synthetic construct
  source 1..75: mol_type = other DNA
tgtacgacctgattgatcaactgcgccgcgaactggattgtggcgtattaatggtttctcacgatctgcatctgg

SEQ ID NO: 315198 - DNA, 75 bp, synthetic construct
  source 1..75: mol_type = other DNA
gtgttatcaagcgccacggaaaactgcgtatcggctacgtgccgcaaaagctctatctcgacaccacgttgccac

SEQ ID NO: 315199 - DNA, 75 bp, synthetic construct
  source 1..75: mol_type = other DNA
atccttcctgcactgaaacgggtacaggccgggcatctgattgatgcgccaatgcaaaaactctcaggcggtgaa

SEQ ID NO: 315200 - DNA, 75 bp, synthetic construct
  source 1..75: mol_type = other DNA
atgagagcagaagtgataactctgacaacgttgaccagaaaatatgaaggttcaacttgtcttccgaacgtagcc

SEQ ID NO: 315201 - DNA, 75 bp, synthetic construct
  source 1..75: mol_type = other DNA
cgacattaaccagaaaatatgaaggctctacttgtcttccaaacactgcactttacgcagctggctatcgcaaat

SEQ ID NO: 315202 - DNA, 75 bp, synthetic construct
  source 1..75: mol_type = other DNA
atgcgagctgaagtagtcacgataacgacattaaccagaaaatatgaaggctctacttgtcttccaaacactgca

SEQ ID NO: 315203 - DNA, 75 bp, synthetic construct
  source 1..75: mol_type = other DNA
atgaagaacacaagtaagttccagaatgtagtgattgtcactattgtcggttggcttgtgttgtttgtctttctg

SEQ ID NO: 315204 - DNA, 75 bp, synthetic construct
  source 1..75: mol_type = other DNA
atggcctggatagttggttttatttcccagaaaggtggtgtgggcaaaagcactaaagcgagagcgttagcgcgt

SEQ ID NO: 315205 - DNA, 75 bp, synthetic construct
  source 1..75: mol_type = other DNA
gcctgttaatggcgctggtggtatctgcactggtcatcaactgggcgatgattagcctggcgcatatgaaattcc

SEQ ID NO: 315206 - DNA, 75 bp, synthetic construct
  source 1..75: mol_type = other DNA
gaatctaaagacttctttactcaagcggttgaatctaaagacaaacaagctctttggattctgcttaacgaaaag

SEQ ID NO: 315207 - DNA, 75 bp, synthetic construct
  source 1..75: mol_type = other DNA
ccaagttagtcttttcgttaagccgtgtgggcactgaggcagaagaggctgaagccagggcatatataagtgaag

SEQ ID NO: 315208 - DNA, 75 bp, synthetic construct
  source 1..75: mol_type = other DNA
cgtcgccgtctggctgccggcttaccccctgctgcttcagttgagttgtttgggacagcaaagcaggctatcgag

SEQ ID NO: 315209 - DNA, 75 bp, synthetic construct
  source 1..75: mol_type = other DNA
caaaactggtcttcgctttaagccgggtaggtaccgaagcggaagagctggatgctcgtgcatatatcagtgaag

SEQ ID NO: 315210 - DNA, 75 bp, synthetic construct
  source 1..75: mol_type = other DNA
tgctgtgcccgttcatcgattggtcgctggattaactggtccacgctgtcgggtattgaaggcctgaagtcattg

SEQ ID NO: 315211 - DNA, 75 bp, synthetic construct
  source 1..75: mol_type = other DNA
ccgtttggtgcagccaccagcattacgctgactatcgtaatgggcctgatgttgctggtttactggcgcgcttct

SEQ ID NO: 315212 - DNA, 75 bp, synthetic construct
  source 1..75: mol_type = other DNA
acattctgctgccgtttatggtgatgccactctattccagtattgaaaaactggataaacctttactggaagcgg

SEQ ID NO: 315213 - DNA, 75 bp, synthetic construct
  source 1..75: mol_type = other DNA
aagttaccggaaaagctaaactgaacttcactaaatccggcaatccttactttgctgtattctttaacagccacg

SEQ ID NO: 315214 - DNA, 75 bp, synthetic construct
  source 1..75: mol_type = other DNA
gtctaaaacggagaagccaagtctccaggaccttcacaaggcaacagaaattcctgaatcaacgatcaagagaca

SEQ ID NO: 315215 - DNA, 75 bp, synthetic construct
  source 1..75: mol_type = other DNA
ccggtcttttatgaagatgaagtggatatccatcttcatcccaaaatcggtgcggactggcaactgctcggacag

SEQ ID NO: 315216 - DNA, 75 bp, synthetic construct
  source 1..75: mol_type = other DNA
taacattacgatagacgatacggcttacaccgataataacggctatgcgtacgttaaccttatcagcacccagcc

SEQ ID NO: 315217 - DNA, 75 bp, synthetic construct
  source 1..75: mol_type = other DNA
agaatgagaaaggaagcgcggaatttgtagaaccgacgcaacaaaatactgatgcacatggtgttgccacaatca

SEQ ID NO: 315218 - DNA, 75 bp, synthetic construct
  source 1..75: mol_type = other DNA
gggtagaactgaaagacgacaacaataaaccggttgaatatcaagaagacgcgttggtaaaagccgtcactgtcg

SEQ ID NO: 315219 - DNA, 75 bp, synthetic construct
  source 1..75: mol_type = other DNA
aatggcttcaggcatgcgacggaaacagggttcaggaatacgttaagctggaacgattgcagaacgcactgtctg

SEQ ID NO: 315220 - DNA, 75 bp, synthetic construct
  source 1..75: mol_type = other DNA
atgcgcaaccatttagctgtattcgagcgatatggaatagccccaaacgatagctctaccacaattcaggcactg

SEQ ID NO: 315221 - DNA, 75 bp, synthetic construct
  source 1..75: mol_type = other DNA
cgtgcttatttcggtgaatttcgatagctctctggctgaaccgctaatatgctccgcacgctataccggaagcac

SEQ ID NO: 315222 - DNA, 75 bp, synthetic construct
  source 1..75: mol_type = other DNA
taaaaaataatgttcaaaactctttatgtggtctgggtgacaaaatacgccgcctgaccgccggagtttgtttat

SEQ ID NO: 315223 - DNA, 75 bp, synthetic construct
  source 1..75: mol_type = other DNA
taagccagaaagattctctgttatccgttaatccgctaaccgtggctgcagataaaaaatcgactaccacattga

SEQ ID NO: 315224 - DNA, 75 bp, synthetic construct
  source 1..75: mol_type = other DNA
tgaaagtgaattttgtggcacctggtggctcgcaactggacaacacgaccgccacaacagaccagtccggtattg

SEQ ID NO: 315225 - DNA, 75 bp, synthetic construct
  source 1..75: mol_type = other DNA
agcgggtgagtttacagttacggcgacgctgaccagaaataataccgttgcttatcagcaagtcacttttattgg

SEQ ID NO: 315226 - DNA, 75 bp, synthetic construct
  source 1..75: mol_type = other DNA
tcagattaagtgcgcagccaacagctcacattacgataggcgatacggcttacaccgataataacggttatgcgt

SEQ ID NO: 315227 - DNA, 75 bp, synthetic construct
  source 1..75: mol_type = other DNA
aagtggccggacggcgcagtctggccggtagtcgttatgacctgattgatcgcaacaacaacatcgttctggaat

SEQ ID NO: 315228 - DNA, 75 bp, synthetic construct
  source 1..75: mol_type = other DNA
aaagccttctgggatattgattataacagtggcgaacgttaccgctttgggcatgtgacctttgaaggatcacaa

SEQ ID NO: 315229 - DNA, 75 bp, synthetic construct
  source 1..75: mol_type = other DNA
cattcgttctttatgcgcaatatcgagacagtgagttttttgatgttgtccgcaatggtgaggagttcttcgaaa

SEQ ID NO: 315230 - DNA, 75 bp, synthetic construct
  source 1..75: mol_type = other DNA
attgcgctgatggtgatcccggaaaacgggatattgcgcgatccgattaatcacaccgtgatgccatcccccttt

SEQ ID NO: 315231 - DNA, 75 bp, synthetic construct
  source 1..75: mol_type = other DNA
tactgccagcgctaatggttaaaatggcatcgcatgtgaatgcccgctacgccagttatatggtgctgtttattg

SEQ ID NO: 315232 - DNA, 75 bp, synthetic construct
  source 1..75: mol_type = other DNA
tcgaattgttcattaaaaatccgcttgaaaacggtcttactcgtggagaacaaatggaactggcacgtattgctc

SEQ ID NO: 315233 - DNA, 75 bp, synthetic construct
  source 1..75: mol_type = other DNA
tcgaattgttcattaaaaatccgcttgaaaacggacttactcgtggtgaacaaatggaactggcacgtattgctc

SEQ ID NO: 315234 - DNA, 75 bp, synthetic construct
  source 1..75: mol_type = other DNA
tcgaattgttcattaaaaaaccgcttgaaaacggacttactcgtggagaacaaatggaactggcacgtattgctc

SEQ ID NO: 315235 - DNA, 75 bp, synthetic construct
  source 1..75: mol_type = other DNA
ggcgtcagtgcgaaaaacccgaccgatggtacgccggtggtggtgaaaaacctgctcagtgtggaaggattacac

SEQ ID NO: 315236 - DNA, 75 bp, synthetic construct
  source 1..75: mol_type = other DNA
ccatcgttttgtgacacgcggcacgctgggctggattgaaaccggtgatttcgacaaagtaccgccggatctgcg

SEQ ID NO: 315237 - DNA, 75 bp, synthetic construct
  source 1..75: mol_type = other DNA
ccatcgctttgtcactcgcggcacgctgggctggattgaaaccggtgacttcgacaaagtaccgccggatttacg

SEQ ID NO: 315238 - DNA, 75 bp, synthetic construct
  source 1..75: mol_type = other DNA
gttgctttcctctttcttatgcatgtttattgccagcggttccgcaatctggtcgattctggcccccattttcgt

SEQ ID NO: 315239 - DNA, 75 bp, synthetic construct
  source 1..75: mol_type = other DNA
tatggctgctgatgttgctggcgtggtatcttgtgggcctgccgataggtccgggtatttacccacgtttgtctt

SEQ ID NO: 315240 - DNA, 75 bp, synthetic construct
  source 1..75: mol_type = other DNA
ggtgtcgtatcgctactttttattgctgcgattgcgctgatggtgatcccggaaaacgggatattgcgcgatccg

SEQ ID NO: 315241 - DNA, 75 bp, synthetic construct
  source 1..75: mol_type = other DNA
gaaaccgataatacatggtcgatagacgttaccgccgaggatgtaaaaggtaacctgtcacggcatgaacaaagc

SEQ ID NO: 315242 - DNA, 75 bp, synthetic construct
  source 1..75: mol_type = other DNA
ggcgacctcggtgtggaaattggcgacccggaactggtcggcattcagaaagcgttgatccgtcgtgcgcgtcag

SEQ ID NO: 315243 - DNA, 75 bp, synthetic construct
  source 1..75: mol_type = other DNA
cgggtgttggtgattacctgaccgtgttgacggcgcagcgcagcttgtggagcgcacagcaggagctgctggcac

SEQ ID NO: 315244 - DNA, 75 bp, synthetic construct
  source 1..75: mol_type = other DNA
ctaaatgcgcccttaacctctgctcacagggaagctttggatcgtttgcttgaatcatcagacaatcagccttcc

SEQ ID NO: 315245 - DNA, 75 bp, synthetic construct
  source 1..75: mol_type = other DNA
ggctgatcggtgttgatgctattcgaggggctgcaatgagagtaatcggtaacaagtttggtggctctaaggagt

SEQ ID NO: 315246 - DNA, 75 bp, synthetic construct
  source 1..75: mol_type = other DNA
ggaaaatccagcaccccggtgctggaggtgcgtaatttaagtcgtcatggggaatatctaaatattaacttgcgg

SEQ ID NO: 315247 - DNA, 75 bp, synthetic construct
  source 1..75: mol_type = other DNA
tcctgatgaccggccaggagtttgaatatcaggtgcgagagttgtggcagggaaaatccagcaccccggtgctgg

SEQ ID NO: 315248 - DNA, 75 bp, synthetic construct
  source 1..75: mol_type = other DNA
tggggcgtattcttcgccattccattggcaacgctgatcaaagcggtgattcacgcctggcctgatggacaaatc

SEQ ID NO: 315249 - DNA, 75 bp, synthetic construct
  source 1..75: mol_type = other DNA
gtgtggaaggagatgaatcaacaaatcaccaactatatccgcggcaaagtgctggagatgatcgtggtggggatc

SEQ ID NO: 315250 - DNA, 75 bp, synthetic construct
  source 1..75: mol_type = other DNA
tcggactgaactattcgctgctgctggcggtgctggtcggcttctcagtgcttattccgtacattggcgcatttg

SEQ ID NO: 315251 - DNA, 75 bp, synthetic construct
  source 1..75: mol_type = other DNA
gtcttcaacaaacaggaaggttaatccagttaaaattaaagcagtatattgatatcggacaggctttatctgagg

SEQ ID NO: 315252 - DNA, 75 bp, synthetic construct
  source 1..75: mol_type = other DNA
tggtgactattcccgtagtgggggtggcgctattccagtttggagcaggcactgaattctggagttgctttgcgg

SEQ ID NO: 315253 - DNA, 75 bp, synthetic construct
  source 1..75: mol_type = other DNA
ggcggtgctggtcggcttctcggtacttattccgtacattggcgcatttgtggtgaccattccggtggttggcgt

SEQ ID NO: 315254 - DNA, 75 bp, synthetic construct
  source 1..75: mol_type = other DNA
aacttgacgctttgaaaagcggtcgtatcgccttgctgttttgtttacctgttatggaactggggctggaatggc

SEQ ID NO: 315255 - DNA, 75 bp, synthetic construct
  source 1..75: mol_type = other DNA
ggcaggggtgatcctgctgtttatgctggtgcttggctacatccagcaatatggctatggcattgagtttattac

SEQ ID NO: 315256 - DNA, 75 bp, synthetic construct
  source 1..75: mol_type = other DNA
tgcctggaagtactctgctatagcctggtggtcaatcactttagctttgggctgtttgataatgcgcccgtgatc

SEQ ID NO: 315257 - DNA, 75 bp, synthetic construct
  source 1..75: mol_type = other DNA
gtggccacgttgcgtggcctttttatttccaacacagcacccgcaaataatcgcgaggtgagagatgacgaaatg

SEQ ID NO: 315258 - DNA, 75 bp, synthetic construct
  source 1..75: mol_type = other DNA
gcgtctgcctgttcgtattgaactggaccagaaacagctggaacaatacccgctgcgtatcggtttatccacgct

SEQ ID NO: 315259 - DNA, 75 bp, synthetic construct
  source 1..75: mol_type = other DNA
agtaccgcgcgtgaaatcagcctggcacctgtcaataaactgatcgacgatatcgtaaaagctaacgctggctaa

SEQ ID NO: 315260 - DNA, 75 bp, synthetic construct
  source 1..75: mol_type = other DNA
catgacgatgtcgcccgcgtcgttgaagctgcgggtggtgaagtatgcatgacgcgcgccgatcatcaatcaggc

SEQ ID NO: 315261 - DNA, 75 bp, synthetic construct
  source 1..75: mol_type = other DNA
atgcacaatgcccctcattcctggcctgacttactggaactcttacaaagttggtggcgtggagatacgccgctg

SEQ ID NO: 315262 - DNA, 75 bp, synthetic construct
  source 1..75: mol_type = other DNA
actggcctgatctgctggagttgctgcagagctggtggcgcggagacacgccgctgggggccgtgctgctctcag

SEQ ID NO: 315263 - DNA, 75 bp, synthetic construct
  source 1..75: mol_type = other DNA
ttacccggcaccatttgtggtagacgatgaatgggaagacgatatagggctggttcataatcaacgtattgttca

SEQ ID NO: 315264 - DNA, 75 bp, synthetic construct
  source 1..75: mol_type = other DNA
tcgttatggctggtttgcgcatcgcctattttggcggtggtggtggctggaagcgaaaaacgctcgagattttgc

SEQ ID NO: 315265 - DNA, 75 bp, synthetic construct
  source 1..75: mol_type = other DNA
tggacttggtccagagctggtggcgtggagacacaccgctgggtgcagtgattatgtcgatcgttatggctggtt

SEQ ID NO: 315266 - DNA, 75 bp, synthetic construct
  source 1..75: mol_type = other DNA
ggctgatcggcgtcgatgctattcgtggtgctgcaatgagagtaatcggcaacaaatttggtagctcgaaggagt

SEQ ID NO: 315267 - DNA, 75 bp, synthetic construct
  source 1..75: mol_type = other DNA
ctggcccgcacacgcagctcgcgcaaaatattgtcacttcctggctgactggcggacgcttcatcgaactaaaaa

SEQ ID NO: 315268 - DNA, 75 bp, synthetic construct
  source 1..75: mol_type = other DNA
aatatcctgttctggtcagagtctacccgaccctccgtcttcccgatttgcgcggtgagtttatccgtggatggg

SEQ ID NO: 315269 - DNA, 75 bp, synthetic construct
  source 1..75: mol_type = other DNA
accaaaagcggtcaaggctgcatacgacctggcagccggcaaggcgccggacagccacactcacccgtggagtca

SEQ ID NO: 315270 - DNA, 75 bp, synthetic construct
  source 1..75: mol_type = other DNA
agaacgataaatactggaacaacgtcaatccggcggaaatctatcaacgtaaaggcgatatctctatcacgctgg

SEQ ID NO: 315271 - DNA, 75 bp, synthetic construct
  source 1..75: mol_type = other DNA
atacgctgaataaattactccaggatgacgcatttttagcccgccacggcttacaggaaaaacgcgaatgcttgc

SEQ ID NO: 315272 - DNA, 75 bp, synthetic construct
  source 1..75: mol_type = other DNA
gagttaattcagcacgatatcgattttgttgccgatcacggtgtgaaatttgagtatggctgctcaccggaactg

SEQ ID NO: 315273 - DNA, 75 bp, synthetic construct
  source 1..75: mol_type = other DNA
accaaaagcggtcaaggctgcatacgacctagcagccggcaaggcgcccgccagccacactcacccgtggagtca

SEQ ID NO: 315274 - DNA, 75 bp, synthetic construct
  source 1..75: mol_type = other DNA
accaaaagcggtcaaggctgcatacgacctagcagccggcaaggcgccagacagccacactcacccgtggagtca

SEQ ID NO: 315275 - DNA, 75 bp, synthetic construct
  source 1..75: mol_type = other DNA
ccacaccgaaagcggtcaaggctgcatacgatctggcaaacggaaaacaaccggcagatgccacgctcactgctc

SEQ ID NO: 315276 - DNA, 75 bp, synthetic construct
  source 1..75: mol_type = other DNA
accaaaagcggtcaaggctgcatacgacctcgcagccggcaaggcgcccgacagccacactcacccgtggagtca

SEQ ID NO: 315277 - DNA, 75 bp, synthetic construct
  source 1..75: mol_type = other DNA
accaaaagcggtcaaggctgcatacgaccttgcagccggcaaggcgccggtcagccacactcacccgtggagtca

SEQ ID NO: 315278 - DNA, 75 bp, synthetic construct
  source 1..75: mol_type = other DNA
accaaaagcggtcaaggctgcatacgacctagcagccggcaaggcgccgggcagccacactcacccgtggagtca

SEQ ID NO: 315279 - DNA, 75 bp, synthetic construct
  source 1..75: mol_type = other DNA
aaaggttgggatgaatataagcaacgctggcacaaaccagccggttctggttcacgccatccggttgccgtgatt

SEQ ID NO: 315280 - DNA, 75 bp, synthetic construct
  source 1..75: mol_type = other DNA
cattctgacgtggtgatgtctctggaaagacagactgatttacttgaggctgcaggcaacgtattaaaacaacgc

SEQ ID NO: 315281 - DNA, 75 bp, synthetic construct
  source 1..75: mol_type = other DNA
agcgtgggatgaataccttaaagcctggtttgccttgcatctgcttgaagccctgttccagccttcagaatcagg

SEQ ID NO: 315282 - DNA, 75 bp, synthetic construct
  source 1..75: mol_type = other DNA
tgcatgcgcgagctggaaggctccgacgcctgggggcttgaccatgttgacgtcgaacgactgaacagactggca

SEQ ID NO: 315283 - DNA, 75 bp, synthetic construct
  source 1..75: mol_type = other DNA
gggtatttttgctggcaaaagcatggattcctatttgatgctgaacttgatgccgcactttaaacgcgttttctc

SEQ ID NO: 315284 - DNA, 75 bp, synthetic construct
  source 1..75: mol_type = other DNA
tacctctttctcagggagtttggtctccaggattcccggggcggttcagtggataaatgcttattacaacgttta

SEQ ID NO: 315285 - DNA, 75 bp, synthetic construct
  source 1..75: mol_type = other DNA
ctgtctcgcgcctttgatggcaaactgccgatttcttattccggtggcgccagccaactgaccatccgcgatatt

SEQ ID NO: 315286 - DNA, 75 bp, synthetic construct
  source 1..75: mol_type = other DNA
gtcacactgtttgaacgcgaagctaacgccggcggcgtggtgaaaaatatcattccccaattccgtattcctgct

SEQ ID NO: 315287 - DNA, 75 bp, synthetic construct
  source 1..75: mol_type = other DNA
caaaccagcgggttctggttctcgccatccggttgccgtcattggcgcgggtcctgcgggtctggctgcaggtta

SEQ ID NO: 315288 - DNA, 75 bp, synthetic construct
  source 1..75: mol_type = other DNA
gaagcattgcaagatggcgtggagttccgtttcctgaacaacccagaacgttttgatgctgatggcaccttgacg

SEQ ID NO: 315289 - DNA, 75 bp, synthetic construct
  source 1..75: mol_type = other DNA
gggcaccgataaaaacagcggcgtaaaacttgcgggcgataaccaaaatgtctggaaatccctccccttcctgcg

SEQ ID NO: 315290 - DNA, 75 bp, synthetic construct
  source 1..75: mol_type = other DNA
atgaaatcgaagccatttgccgctacatgctggaagaaaaagagctgaacacctttgtgaaactcaacccgacct

SEQ ID NO: 315291 - DNA, 75 bp, synthetic construct
  source 1..75: mol_type = other DNA
aggtcgtccgcatggtttcctgcggaagttcgggttgagccgtattaaggtccgtgaagccgctatgcgcggtga

SEQ ID NO: 315292 - DNA, 75 bp, synthetic construct
  source 1..75: mol_type = other DNA
tagatattcggggcgttgatttacaaggcgttaagttggacaactaccaggcatcgttgctcatggagcgacttg

SEQ ID NO: 315293 - DNA, 75 bp, synthetic construct
  source 1..75: mol_type = other DNA
tctctccggcggcgagttttcgactttcgactggcgagcagcgaacttcacacattgcgatctgaccaattcgga

SEQ ID NO: 315294 - DNA, 75 bp, synthetic construct
  source 1..75: mol_type = other DNA
gccatttttaaaagctgtgatttatccatggcggattttcgcaatgccagtgcgctgggcattgaaattcgccac

SEQ ID NO: 315295 - DNA, 75 bp, synthetic construct
  source 1..75: mol_type = other DNA
caaacatgctgatggtaaattcactccagaaggaaggcagagaatgcttgctgacttaaaaaatatacatcaaat

SEQ ID NO: 315296 - DNA, 75 bp, synthetic construct
  source 1..75: mol_type = other DNA
ctggtttgcaactaccgagtcggcaataaagcattgcggaccaatcgtggcttccgcttcaataaccgcattttt

SEQ ID NO: 315297 - DNA, 75 bp, synthetic construct
  source 1..75: mol_type = other DNA
gccattttcaaaagctgtgatttatcaatggcagatttccgcaacgtcagcgcattgggcattgaaattcgccac

SEQ ID NO: 315298 - DNA, 75 bp, synthetic construct
  source 1..75: mol_type = other DNA
tcgaattgttcattaaaaagccgcttgaaaacggacttactcgtggggaacaaatggaactggcacgtattgctc

SEQ ID NO: 315299 - DNA, 75 bp, synthetic construct
  source 1..75: mol_type = other DNA
tcgaattgttcattaaaaacccgcttgaaaacggccttactcgtggagaacaaatggaactggcacgtattgctc

SEQ ID NO: 315300 - DNA, 75 bp, synthetic construct
  source 1..75: mol_type = other DNA
tcgaattgttcattaaaaacccgcttgaaaacggacttactcgtggcgaacaaatggaactggcacgtattgctc

SEQ ID NO: 315301 - DNA, 75 bp, synthetic construct
  source 1..75: mol_type = other DNA
acagttatgtgaatatttagtccaaaatggcatgggggttgcgaaggtaagtacatatgaaatctatgaaataga

SEQ ID NO: 315302 - DNA, 75 bp, synthetic construct
  source 1..75: mol_type = other DNA
tcgaattgttcattaaaaagccgcttgaaaacgggcttactcgtggagaacaaatggaactggcacgtattgctc

SEQ ID NO: 315303 - DNA, 75 bp, synthetic construct
  source 1..75: mol_type = other DNA
tcgaattgttcattaaaaagccgcttgaaaacggtcttactcgtggtgaacaaatggaactggcacgtattgctc

SEQ ID NO: 315304 - DNA, 75 bp, synthetic construct
  source 1..75: mol_type = other DNA
attttcttatcgaggaacgagctgattatattgatgaggatacgataaaaaataatactatcagatctggagagt

SEQ ID NO: 315305 - DNA, 75 bp, synthetic construct
  source 1..75: mol_type = other DNA
atgacatcccggaatgtaccaccagttatgactagaaaaaaagtgctttgttttgtctttcgttatgattctcat

SEQ ID NO: 315306 - DNA, 75 bp, synthetic construct
  source 1..75: mol_type = other DNA
gtgcgagcacgcgcacccgcacaagccgcgccgcgaacgactcacgcactgtccggcagaagctctaccagtgca

SEQ ID NO: 315307 - DNA, 75 bp, synthetic construct
  source 1..75: mol_type = other DNA
gacgctgggagatattggtgatgtaaggatgtgcaagcgcatcctcaagaatgagactctgcctgaaggggatgt

SEQ ID NO: 315308 - DNA, 75 bp, synthetic construct
  source 1..75: mol_type = other DNA
agatggcccgggcaggcgtaccacgtggaactcgctgtgatgatcatgaacaccgcggtggtggtcatatgatgg

SEQ ID NO: 315309 - DNA, 75 bp, synthetic construct
  source 1..75: mol_type = other DNA
ccattctacctccgaagaaaagtatcaagttcggcggtcaggaataccccatcgttgaaatgacagttggtctgt

SEQ ID NO: 315310 - DNA, 75 bp, synthetic construct
  source 1..75: mol_type = other DNA
atgcaattcaaaaggcaataaaaaaggcaaaatgtcgtgacataattcttataacagagccagactttttaatag

SEQ ID NO: 315311 - DNA, 75 bp, synthetic construct
  source 1..75: mol_type = other DNA
gttgcgcccagggcagtggagtaacgacgtaccggcgttgcgcgaaatattgcaacgcacaggcatgttggacgg

SEQ ID NO: 315312 - DNA, 75 bp, synthetic construct
  source 1..75: mol_type = other DNA
tgcagcgaacgggaatgctcgaaggcggaccgaaaattgcgctccctggcgatgaaacacccgctgatgcagtcg

SEQ ID NO: 315313 - DNA, 75 bp, synthetic construct
  source 1..75: mol_type = other DNA
atgctatagcgcaggcaaggtttcctgggtatgatggcattccggatgacttgaaagagttatttaaattctcag

SEQ ID NO: 315314 - DNA, 75 bp, synthetic construct
  source 1..75: mol_type = other DNA
caacatcaggaaaacgaagattatcgtaccttacccgagcgatcccagtaaatcactcgcggagcaaaaccgtgt

SEQ ID NO: 315315 - DNA, 75 bp, synthetic construct
  source 1..75: mol_type = other DNA
tatctagaaaactatttaatgaatttaaagaaaaatatagttatcctaaagttggtgaagtattgatttctgcca

SEQ ID NO: 315316 - DNA, 75 bp, synthetic construct
  source 1..75: mol_type = other DNA
aggtttggctacagctagttgcattcaagaaagtggcgttattttaggcggcgatattttgattattagatgctc

SEQ ID NO: 315317 - DNA, 75 bp, synthetic construct
  source 1..75: mol_type = other DNA
tcatgtttccggaaacccgaagtttgaatatgccaatatggttgaagatatcagagagaaggtgtcggttgagat

SEQ ID NO: 315318 - DNA, 75 bp, synthetic construct
  source 1..75: mol_type = other DNA
atcaaacagttgaacaagttatagatttaataatttccccaaaagctacagataatccagttttattgaaactgg

SEQ ID NO: 315319 - DNA, 75 bp, synthetic construct
  source 1..75: mol_type = other DNA
taggaaaaatagttatgtatactcttgatggtatagagttagaactatccacgaataaagtaaggcccgtagtcg

SEQ ID NO: 315320 - DNA, 75 bp, synthetic construct
  source 1..75: mol_type = other DNA
gaatatgcgaatatggtcgaagatatcatggaaaaagtgtcatcggaaatggagagattctttccaaaaaatgat

SEQ ID NO: 315321 - DNA, 75 bp, synthetic construct
  source 1..75: mol_type = other DNA
cgcgacttcagtaacgttggcccgatggtccgcgccagcggacacgctcgcgatacccgcgccgatcacccgttt

SEQ ID NO: 315322 - DNA, 75 bp, synthetic construct
  source 1..75: mol_type = other DNA
gaagcgcagatggaacgaaaagaatcagcatttaatcaggcagagtttaataaacttcttcttgaatgtgttgta

SEQ ID NO: 315323 - DNA, 75 bp, synthetic construct
  source 1..75: mol_type = other DNA
gaattggtggagttcaaggaagaattttatctaagatagctaatgtaattaaatttcctgtcatcgatacagcat

SEQ ID NO: 315324 - DNA, 75 bp, synthetic construct
  source 1..75: mol_type = other DNA
tggttgctttgctgagtggttgtggcagcatcattagccgcaccataccgggacaggggcatggcaaccaatatt

SEQ ID NO: 315325 - DNA, 75 bp, synthetic construct
  source 1..75: mol_type = other DNA
cgcggcagtggttttgcccgtgatttgcgctttgatcacccctacgccgactacggcaatattcccaaaacgctg

SEQ ID NO: 315326 - DNA, 75 bp, synthetic construct
  source 1..75: mol_type = other DNA
atactatgataatcagagactcaatggtgatgtcaaaacgttatcaatactgggggaaggagaaaggctggaata

SEQ ID NO: 315327 - DNA, 75 bp, synthetic construct
  source 1..75: mol_type = other DNA
acagattatgacgtcactcctgcttatggaaaaaatgtctacaaaataattcaagagcatagtattaattatgat

SEQ ID NO: 315328 - DNA, 75 bp, synthetic construct
  source 1..75: mol_type = other DNA
acaacaagatataaagacgtttaaagcacatcttcacatggaaaatgagagaagagacgcctggaaaaaagttga

SEQ ID NO: 315329 - DNA, 75 bp, synthetic construct
  source 1..75: mol_type = other DNA
tcatatagcaggtaatccaaaatttgaatatgcaaatatggttgaagatatcagggagaaggtatcaattgagat

SEQ ID NO: 315330 - DNA, 75 bp, synthetic construct
  source 1..75: mol_type = other DNA
cgctttgtgctgtggctgcgcagatactggttggtctttttaccggaaactgggcttacggagcgatagccggtt

SEQ ID NO: 315331 - DNA, 75 bp, synthetic construct
  source 1..75: mol_type = other DNA
tgatccacgtgcttgggatgtggcaagcctgatggattttgcggtgccggtggtagcgtgtctgctggtctggct

SEQ ID NO: 315332 - DNA, 75 bp, synthetic construct
  source 1..75: mol_type = other DNA
tgggatgtggcaagcctgatggattttgctgtgccggtggtggcgtgtctgctgatctggctgttgatccgttaa

SEQ ID NO: 315333 - DNA, 75 bp, synthetic construct
  source 1..75: mol_type = other DNA
ttagtcatcctgtttacctctttctcagggagtttagtctccaggatttccggggcggttcaaaaagacttcaca

SEQ ID NO: 315334 - DNA, 75 bp, synthetic construct
  source 1..75: mol_type = other DNA
tgttagctacgttttgcgcgttattcacagcaactctccaggccgccgatgtcactatcactgttaatggtcggg

SEQ ID NO: 315335 - DNA, 75 bp, synthetic construct
  source 1..75: mol_type = other DNA
cacccaggcagaatatcgctggattgaaatgttcgggcatggcaagcgtatgaatatgccgtggtggggggggtt

SEQ ID NO: 315336 - DNA, 75 bp, synthetic construct
  source 1..75: mol_type = other DNA
tgacccgcgcgtgtgggatatggcaagtctgatggattttgctgtgccggtggtggcgtgtctgctgatctggct

SEQ ID NO: 315337 - DNA, 75 bp, synthetic construct
  source 1..75: mol_type = other DNA
gatgtggcaagcatgatggattttgctgtgccggtggtggcgtgtctgctggtctggctgttggttaatcgctaa

SEQ ID NO: 315338 - DNA, 75 bp, synthetic construct
  source 1..75: mol_type = other DNA
tgatcctcgcgcgtgggatgtagcaagcctgatggattttgctgtgccggtggtggcgtgtctgctgatctggat

SEQ ID NO: 315339 - DNA, 75 bp, synthetic construct
  source 1..75: mol_type = other DNA
aactgggcttacggggcgatagccggttgtacgttcttcattgcgcgtgaacacacccaggcagaatatcgctgg

SEQ ID NO: 315340 - DNA, 75 bp, synthetic construct
  source 1..75: mol_type = other DNA
gtggcaagcctgatggattttgctgtgccggtggtggcgtgtctgctggtctgggtatttatccgttcaacataa

SEQ ID NO: 315341 - DNA, 60 bp, synthetic construct
  source 1..60: mol_type = other DNA
gattttgctgtgccggtggtggcgtgtctgctggtctggctgttggttaatcgtgggtga

SEQ ID NO: 315342 - DNA, 75 bp, synthetic construct
  source 1..75: mol_type = other DNA
cggcgcggttgaaacacgcaaacgttgcaaaatcgtcgccggtcagacagtgagttttgcaggccacagcgtaca

SEQ ID NO: 315343 - DNA, 75 bp, synthetic construct
  source 1..75: mol_type = other DNA
aacatgaaaccaataacattcactcagctatgataaataacctattacaggaagttgatatagcccttggtaaaa

SEQ ID NO: 315344 - DNA, 75 bp, synthetic construct
  source 1..75: mol_type = other DNA
ttatgacttatcagggcgagtccattaaccttatttcactggatcacgaatacccagagtcctgtcttcaaaatg

SEQ ID NO: 315345 - DNA, 75 bp, synthetic construct
  source 1..75: mol_type = other DNA
ccgtcagaaataaaaaaagcaataaaagaaaaatggcctgaaatggaggctgactataatagaataattagtggt

SEQ ID NO: 315346 - DNA, 75 bp, synthetic construct
  source 1..75: mol_type = other DNA
atcaatatgggtgtcgcagaagtattgcaggcgaccggaaacatgctgctaccggggctgtggatggcgttatga

SEQ ID NO: 315347 - DNA, 75 bp, synthetic construct
  source 1..75: mol_type = other DNA
tacgtccggtgattcgcaacagcggcgcggggctgaatgtacgggctgacaaagccgaagccaataaatgcgacc

SEQ ID NO: 315348 - DNA, 75 bp, synthetic construct
  source 1..75: mol_type = other DNA
tggtgataaaaccgctggcgcggcgtcagtggatattggtgaattctaccaggtaactattcagcatcgtaagga

SEQ ID NO: 315349 - DNA, 75 bp, synthetic construct
  source 1..75: mol_type = other DNA
cagccattacccaggagatgattgatacatccgagcgtattaaccgcacgatcggcattgatatttcagactctg

SEQ ID NO: 315350 - DNA, 75 bp, synthetic construct
  source 1..75: mol_type = other DNA
gtaacggagcagcattttcttctgaaaagtacccaaatctggcaaaggtttacccaacgttaaaattacctgatt

SEQ ID NO: 315351 - DNA, 75 bp, synthetic construct
  source 1..75: mol_type = other DNA
atggcgacattttctttaggtaaacatccgcacgttgagctgtgcgacttgctgaaactggaaggctggagcgaa

SEQ ID NO: 315352 - DNA, 75 bp, synthetic construct
  source 1..75: mol_type = other DNA
ccgctagctgcatcaatgaatttgcgagtgatgtcccgcaaagcgtcttcttttccattgatacgtcgctggcta

SEQ ID NO: 315353 - DNA, 75 bp, synthetic construct
  source 1..75: mol_type = other DNA
acgttgtcagggggacgctatcagtgaaacatggctgtatcagtatttcccgccagcgccggataaacgtcagta

SEQ ID NO: 315354 - DNA, 75 bp, synthetic construct
  source 1..75: mol_type = other DNA
ggttggtaattttaatataataggtgcattgggagcaaaaaacatactatcatttagtcaattaccagaaagttt

SEQ ID NO: 315355 - DNA, 75 bp, synthetic construct
  source 1..75: mol_type = other DNA
ttcaacagaaaatgtaaaattatcaggagatctttcatataacagagggaaaaatattggaaatgatccaaagct

SEQ ID NO: 315356 - DNA, 75 bp, synthetic construct
  source 1..75: mol_type = other DNA
aataagtttagatatattgaaacaatatattgatacgcaccatataacagcaaaagaacatgaaaaaataaaatt

SEQ ID NO: 315357 - DNA, 75 bp, synthetic construct
  source 1..75: mol_type = other DNA
cctaaaaaaccaagcacgtattttggaaaaacttcgggctgatgcatctccagcagttcaagataatatatctga

SEQ ID NO: 315358 - DNA, 75 bp, synthetic construct
  source 1..75: mol_type = other DNA
tactatcattggttcaaactatggttctaatacatttattggcaatgattctgataatcaatttattcttggacg

SEQ ID NO: 315359 - DNA, 75 bp, synthetic construct
  source 1..75: mol_type = other DNA
tttggttgaaataatgaataaaaatactgagattgttacaggtaataaaaatattaagataattattcctgcatt

SEQ ID NO: 315360 - DNA, 75 bp, synthetic construct
  source 1..75: mol_type = other DNA
atgatgatgacctgcatgttcctagttttgatggggggaatagaggggaaagatgccgggaactatctttatcag

SEQ ID NO: 315361 - DNA, 75 bp, synthetic construct
  source 1..75: mol_type = other DNA
ataacctgctcttcaactggcgccatcaataccggaaaggtggcctgctgccttccggaaaaaatatgccggcac

SEQ ID NO: 315362 - DNA, 75 bp, synthetic construct
  source 1..75: mol_type = other DNA
ctacattccattctaatgtagaagagtatcataagcttttcaataatgtcgtatcaaaaggttctacggataaat

SEQ ID NO: 315363 - DNA, 75 bp, synthetic construct
  source 1..75: mol_type = other DNA
atatatactcaaagaatacggtggaatatatacagattatgacgtcactcctgcttatggaaaaaatgtctacaa

SEQ ID NO: 315364 - DNA, 75 bp, synthetic construct
  source 1..75: mol_type = other DNA
tctctctgttatcgtcgacaagataaaaaaacttgaccctaaagatatattttctcctatcgacactatgataat

SEQ ID NO: 315365 - DNA, 75 bp, synthetic construct
  source 1..75: mol_type = other DNA
taaaacacttgtctgtagatgacataatttctataggtggaattattcagagtgaaataagaagaactctgcatc

SEQ ID NO: 315366 - DNA, 75 bp, synthetic construct
  source 1..75: mol_type = other DNA
gataacctgctcttcaactggcgccatcaataccggaaaggtggcctgctgccttccggaaaaatatgccggcac

SEQ ID NO: 315367 - DNA, 75 bp, synthetic construct
  source 1..75: mol_type = other DNA
aggaaatatctcgcctgttacctgagtggtctctgtgcaatctggtctgccagttacaggctctaaaaggtgttg

SEQ ID NO: 315368 - DNA, 75 bp, synthetic construct
  source 1..75: mol_type = other DNA
cactggaacatgcgcggcgctaactttattgccgtacatgaaatgctggatggcttccgtaccgctctgattgat

SEQ ID NO: 315369 - DNA, 75 bp, synthetic construct
  source 1..75: mol_type = other DNA
ctgctgatttaaccgcagaaaagttcgccacagcaatccgaaaccactggcacgtggagaataagctgcactggc

SEQ ID NO: 315370 - DNA, 75 bp, synthetic construct
  source 1..75: mol_type = other DNA
acggcaggctgattgatacggcgagccttaaacaggcaataaaatactggcgcaaccacactttgcgtatgggct

SEQ ID NO: 315371 - DNA, 75 bp, synthetic construct
  source 1..75: mol_type = other DNA
ttcctcgaccatgttgcgaaaaatcaccccgcgccgcaggcgcctcgctatatctacaaacttgagcaggcgctg

SEQ ID NO: 315372 - DNA, 75 bp, synthetic construct
  source 1..75: mol_type = other DNA
ccgtggaacgcgaaagttccggtgcaacgtgcgatgcagtggatgccaataagccagaaagccggtgcagcctgg

SEQ ID NO: 315373 - DNA, 75 bp, synthetic construct
  source 1..75: mol_type = other DNA
gatattataaaaaccaggggaccgcgcaaaacatccagttagagctacaggatgacagtggcaacacattgaata

SEQ ID NO: 315374 - DNA, 75 bp, synthetic construct
  source 1..75: mol_type = other DNA
tcgcggctttgcgatgaccagcagcattaccaccatgatggccagttgcctcgcggttttcgcgccagagacgat

SEQ ID NO: 315375 - DNA, 75 bp, synthetic construct
  source 1..75: mol_type = other DNA
aaagagaatctgcgggtaatcctgaccggagccggaacctcggcatttatcggtgacatcatcgcgccgtggctc

SEQ ID NO: 315376 - DNA, 75 bp, synthetic construct
  source 1..75: mol_type = other DNA
tgcgtggcagtctcctttcggtccataatagcagaacaaaagaaagagccagaaatgacggtcagatattatatc

SEQ ID NO: 315377 - DNA, 75 bp, synthetic construct
  source 1..75: mol_type = other DNA
aatcagcgcatttcccgttgcaggtcagagcattgacagtaaacggtggcgccacgcaaggaaccattcaggcag

SEQ ID NO: 315378 - DNA, 75 bp, synthetic construct
  source 1..75: mol_type = other DNA
tgcacagtttccaccaccaatgccacggttgatctcggcgatctttattctttcagtctgatgtctgccggggcg

SEQ ID NO: 315379 - DNA, 75 bp, synthetic construct
  source 1..75: mol_type = other DNA
gtggtctctgtgcaatctggtctgccagttacaggcccttaaaggtgttggtcagctaaccgcaataaccctagt

SEQ ID NO: 315380 - DNA, 75 bp, synthetic construct
  source 1..75: mol_type = other DNA
tggagtacaaagacagcggtaagaaagatgcaaacggtcgtgcggttctggtgaaacaggaagaggtgattaaca

SEQ ID NO: 315381 - DNA, 75 bp, synthetic construct
  source 1..75: mol_type = other DNA
aatcaaaaatgatcatcgggacgcaatttctcttgccaggttactgcgggctggtgaacttacccctgtctggat

SEQ ID NO: 315382 - DNA, 75 bp, synthetic construct
  source 1..75: mol_type = other DNA
tatattaccgaccggactctgtaacacaatattccaagatattgcatggaaagctcaacaacgattgtgttctcg

SEQ ID NO: 315383 - DNA, 75 bp, synthetic construct
  source 1..75: mol_type = other DNA
gtggttaaacggatttatacggcagacgaacagcaacaacaggccgaatcacaaaaggccgcattgctttccgaa

SEQ ID NO: 315384 - DNA, 75 bp, synthetic construct
  source 1..75: mol_type = other DNA
gcccacacaggcacatacgctctaaatggtgggaacagagaatggatgaagtttttactgagatttatatcaatc

SEQ ID NO: 315385 - DNA, 75 bp, synthetic construct
  source 1..75: mol_type = other DNA
gagtgagcggatatcgaataaatcgctggggctggctggcgtatcccgcaacggtacgcggaaagccattacgcc

SEQ ID NO: 315386 - DNA, 75 bp, synthetic construct
  source 1..75: mol_type = other DNA
attatggtacgattaacaacgaagcccaggctgtacgtcgattatttcagaaattgcagggactttacggaaaca

SEQ ID NO: 315387 - DNA, 75 bp, synthetic construct
  source 1..75: mol_type = other DNA
gctaaacgagacagcagagttgcccgacagcgaattctgagcatgctattgcgaacagacaaacgttatgcagga

SEQ ID NO: 315388 - DNA, 75 bp, synthetic construct
  source 1..75: mol_type = other DNA
cgaattctgagcatgctattgcgaacagacaaacgttatgcaggaaagcactggaccggcaaacatcgaacctgg

SEQ ID NO: 315389 - DNA, 75 bp, synthetic construct
  source 1..75: mol_type = other DNA
tcgcgattttccaatcccaaacagctcatggcttttctgggactggtgccaggtgaatattccagtggaaacagt

SEQ ID NO: 315390 - DNA, 75 bp, synthetic construct
  source 1..75: mol_type = other DNA
cctgacctgactcatgaagctatgcgggatctaatcagagcccgtgcagcagctaaacgagacagcagagttgcc

SEQ ID NO: 315391 - DNA, 75 bp, synthetic construct
  source 1..75: mol_type = other DNA
cagggaccttacggaaacattctttcctgctatgaaggtgatccctgtagttttgggctatatcatcaactcaca

SEQ ID NO: 315392 - DNA, 75 bp, synthetic construct
  source 1..75: mol_type = other DNA
atttaaccgctgagaaattcgccacagcgatccgaaatcactggcacgtggagaataagctgcactggcgtctgg

SEQ ID NO: 315393 - DNA, 75 bp, synthetic construct
  source 1..75: mol_type = other DNA
gacgtttgaacccttactgtgcccgtgcgatggaaggggcggcttcgctctgccagacccgtgcgcatacggaaa

SEQ ID NO: 315394 - DNA, 75 bp, synthetic construct
  source 1..75: mol_type = other DNA
agcagaaaccgcaggcgctgactctggcatggtgtgacgaagatggtattgtgatggtatttgatgcacaggcag

SEQ ID NO: 315395 - DNA, 75 bp, synthetic construct
  source 1..75: mol_type = other DNA
ttgggttgttgaaggcaccattcactcagaccaaattgctggtggggtttttattatagaaataggcaaaaatga

SEQ ID NO: 315396 - DNA, 75 bp, synthetic construct
  source 1..75: mol_type = other DNA
ctgcttcccgtgacgttaacgccggagccggataataaaatcccggcccccgcacaggaaccagagcagataaat

SEQ ID NO: 315397 - DNA, 75 bp, synthetic construct
  source 1..75: mol_type = other DNA
actgcgctcacactggccgacaccctgtttggcggtgaaaaatcccttatcaccatcaacctctccgaatatcag

SEQ ID NO: 315398 - DNA, 75 bp, synthetic construct
  source 1..75: mol_type = other DNA
cgccctgctggcggtacttaaccgctttaccgaaaacgtgacggaaaaagcccgcagcgggcgaatcgacccggt

SEQ ID NO: 315399 - DNA, 75 bp, synthetic construct
  source 1..75: mol_type = other DNA
aaaatcgtcaacgactacaccggtgaaggctggaacgaccaggttgatgacgaactcggtaattttgactatctg

SEQ ID NO: 315400 - DNA, 75 bp, synthetic construct
  source 1..75: mol_type = other DNA
gcgtatgcccttattttgctgcgggaaaatggcgtcccttcagtgttctaccctgatctgtacggtgctcattac

SEQ ID NO: 315401 - DNA, 75 bp, synthetic construct
  source 1..75: mol_type = other DNA
atcgcgtccgaatgtgcatatcgctctttacagccaaccaccggcgacccagattgaaggcctgcgccagcgcag

SEQ ID NO: 315402 - DNA, 75 bp, synthetic construct
  source 1..75: mol_type = other DNA
aaaaccatacaaaatcatggaattaccaacaagttggattgttgaaggcaccattgaatcagaccaaattgctgg

SEQ ID NO: 315403 - DNA, 75 bp, synthetic construct
  source 1..75: mol_type = other DNA
gcgtatgccttaattttgttgcgggaaaatggcgttccttcggtgttctatccggacctctacggtgcgcattac

SEQ ID NO: 315404 - DNA, 75 bp, synthetic construct
  source 1..75: mol_type = other DNA
gggtattcggtcggctacgactcctacgatttatttgatttaggcgagtttgatcaaaaaggcagcatccccacc

SEQ ID NO: 315405 - DNA, 75 bp, synthetic construct
  source 1..75: mol_type = other DNA
cctgctgaaacaggcctggatggtggcctcattacagggagaagaacatatccgcagcgtgcatctgctgggtgc

SEQ ID NO: 315406 - DNA, 75 bp, synthetic construct
  source 1..75: mol_type = other DNA
gtgctgtgagctggttctgccggccggaactctcaggctgaaaggtgaactgacaccggcgttattacagacact

SEQ ID NO: 315407 - DNA, 75 bp, synthetic construct
  source 1..75: mol_type = other DNA
acaccgtccgacagtctgtgctgtgagctggttctgccggccggaactctcaggctgaaagatgaactgacaccg

SEQ ID NO: 315408 - DNA, 75 bp, synthetic construct
  source 1..75: mol_type = other DNA
tcaacagtttgtagtatgtttgtgcgcttccgcaaagctggcctttcatggcctctgcccgcaggtatgtcggag

SEQ ID NO: 315409 - DNA, 75 bp, synthetic construct
  source 1..75: mol_type = other DNA
tggcacgtggagaataagctgcactggcgtctggacgtggtaatgaatgaagacgactgcaaaataagaagagga

SEQ ID NO: 315410 - DNA, 75 bp, synthetic construct
  source 1..75: mol_type = other DNA
cacccgcaaattacgtgacggatggaaacgactcatcgacgtacttaatcagccaggagtcccaaaaaatggatc

SEQ ID NO: 315411 - DNA, 75 bp, synthetic construct
  source 1..75: mol_type = other DNA
acccgtatccgttcacagctcgcttccctcggtatggaaaaacaggcactgctggaagatattgccgttggtcat

SEQ ID NO: 315412 - DNA, 75 bp, synthetic construct
  source 1..75: mol_type = other DNA
ttatctgacagaacgtcagctaccggacaaggccgttgacctgcttgataccgctgctgcccgtgtgcggatgag

SEQ ID NO: 315413 - DNA, 75 bp, synthetic construct
  source 1..75: mol_type = other DNA
tgtgtacgatgccctgacatcagcctgcctgctgccggatacgggcgcccggaatgtggagagtctgctgaacca

SEQ ID NO: 315414 - DNA, 75 bp, synthetic construct
  source 1..75: mol_type = other DNA
aactggcgccatcaataccggaaaggtggcctgctgccttccggaaaaaatatgcctgcactgcttcccgtgacg

SEQ ID NO: 315415 - DNA, 75 bp, synthetic construct
  source 1..75: mol_type = other DNA
agatctggggcgcagttcatttttaatggacactatcgtatgaaacaccggacctggatcactgaagctttacgt

SEQ ID NO: 315416 - DNA, 75 bp, synthetic construct
  source 1..75: mol_type = other DNA
ccgcaggcgctggctctggcatggagtgacgaagacggtatggtgattgagctgcggcaggaatgcgcgttatga

SEQ ID NO: 315417 - DNA, 75 bp, synthetic construct
  source 1..75: mol_type = other DNA
acccgcgcaatcgtcatcacagtcgctacgatctcgccacgctttgtcaggtgaatcctgaactggcgcaattcc

SEQ ID NO: 315418 - DNA, 75 bp, synthetic construct
  source 1..75: mol_type = other DNA
acccgcgcaaccgtcatcacagccgctacgatctcgccacgctctgtcaggtgaatcctgaactgaagcaatttc

SEQ ID NO: 315419 - DNA, 75 bp, synthetic construct
  source 1..75: mol_type = other DNA
gtcatcgccgctttcccggagttcctgttcagcaagcagacaaattgacccaattacgtcgcttagcctgtaggg

SEQ ID NO: 315420 - DNA, 75 bp, synthetic construct
  source 1..75: mol_type = other DNA
tttaagttttattaaagggaaaaatattgtcatctttggtgggaacagtggtattggattggaaatacaaaagga

SEQ ID NO: 315421 - DNA, 75 bp, synthetic construct
  source 1..75: mol_type = other DNA
aaaagcagagtcgctttattgcctggacctttatgaacgacgagcagcgccgccgttttgtcaatcgccagcgtt

SEQ ID NO: 315422 - DNA, 75 bp, synthetic construct
  source 1..75: mol_type = other DNA
ttatccgctgattggcgtacatgaatatggctggcgttttaccggtagtgaaaccagcagccaggcgttaagcag

SEQ ID NO: 315423 - DNA, 75 bp, synthetic construct
  source 1..75: mol_type = other DNA
agcgcctgttctttagaatggcaaaacaccgtcgcccaggcgatcagtcagatcgacggcctgaaaacaacatag

SEQ ID NO: 315424 - DNA, 75 bp, synthetic construct
  source 1..75: mol_type = other DNA
ctactgatgtaataatacaccttcaacagattgatattgaaggtaatgactccaacttattgatagtgttttatg

SEQ ID NO: 315425 - DNA, 75 bp, synthetic construct
  source 1..75: mol_type = other DNA
ttgaaacgcagggccgcacgtccgtgggcgagttgcgtgaaggcgaaggcggtggaggatccagtacgatgccac

SEQ ID NO: 315426 - DNA, 75 bp, synthetic construct
  source 1..75: mol_type = other DNA
gcggaactgaggctgattgcggagaaggtgaagaaggggtatgtggagcaagcgaaggataattctttgcaacct

SEQ ID NO: 315427 - DNA, 75 bp, synthetic construct
  source 1..75: mol_type = other DNA
ccacatattccagaatggcggcaaccattaattgctatgttattacccgaaaaaccagaaattgcacatgaaatt

SEQ ID NO: 315428 - DNA, 75 bp, synthetic construct
  source 1..75: mol_type = other DNA
acagattgatattaaatgggattatgcgaataatgtcattattattctgccgtctggcattgcacctgactactt

SEQ ID NO: 315429 - DNA, 75 bp, synthetic construct
  source 1..75: mol_type = other DNA
ttgcttcttgaccccaaagatgttgcccttacaagccttaaagtgttaggctcaaacagaacagggcttattgtt

SEQ ID NO: 315430 - DNA, 75 bp, synthetic construct
  source 1..75: mol_type = other DNA
gtcgtactggtggtgacatttgcgaacgtcttcaccatcattcagcctgtggttgaagccggagactgggacagc

SEQ ID NO: 315431 - DNA, 75 bp, synthetic construct
  source 1..75: mol_type = other DNA
gtcatgtatcactcgatcgcctgcaccagatacgcgaaatactcagcaacgcagcagcacaaagcgacggcggta

SEQ ID NO: 315432 - DNA, 75 bp, synthetic construct
  source 1..75: mol_type = other DNA
tcttcttctcgctgttagcgatggcgatttaccagaactattgcagcagagtggcaaaaaatccgcagtgggcgg

SEQ ID NO: 315433 - DNA, 75 bp, synthetic construct
  source 1..75: mol_type = other DNA
atggttccgttaacctcggcaatattacctatgtgctgatgaagagcctcggggtgacgctgggtaacgcactgc

SEQ ID NO: 315434 - DNA, 75 bp, synthetic construct
  source 1..75: mol_type = other DNA
gctatttttgcctatggcggaattgaagcggttggtggtctggtcgataaaacggaaaatccagaaaagaacttt

SEQ ID NO: 315435 - DNA, 75 bp, synthetic construct
  source 1..75: mol_type = other DNA
cgccgttgaaagcaatcatccaggggacgccgaaagcattgtggccggaaccaatgacgcgtctgaacgcgatgg

SEQ ID NO: 315436 - DNA, 75 bp, synthetic construct
  source 1..75: mol_type = other DNA
aaagaattatcttgaagaacactccggacggtgtgacacggatttcagaaaattattatgtctttatgattactt

SEQ ID NO: 315437 - DNA, 75 bp, synthetic construct
  source 1..75: mol_type = other DNA
tctgagctgacccgtcacattcaacgcctggaccgcctctgtccggcggcaaccaccggcctttttggcggcgca

SEQ ID NO: 315438 - DNA, 75 bp, synthetic construct
  source 1..75: mol_type = other DNA
ttgctccttgatcctaaagatgtagctctcacaagccttaaagtgctaggttcgaacagaacagggcttattgtt

SEQ ID NO: 315439 - DNA, 75 bp, synthetic construct
  source 1..75: mol_type = other DNA
atgtctggctggcggatgagtcccaggccgagcgcgtgcgggcggagctggcgcgttttctcgaaaacccggcag

SEQ ID NO: 315440 - DNA, 75 bp, synthetic construct
  source 1..75: mol_type = other DNA
gcctgcgtggtggtgtttatcgccatgcaaattctcggcgatcaggaagtgatgttatggctggcttggccattc

SEQ ID NO: 315441 - DNA, 75 bp, synthetic construct
  source 1..75: mol_type = other DNA
aaagatcattgaagaatgcggacgcaaagccgttctgctgccaggcgatttaagtcgcccgttcgctggttcacg

SEQ ID NO: 315442 - DNA, 75 bp, synthetic construct
  source 1..75: mol_type = other DNA
tcaggaacaaccctctttcgtagcagaaacccgtgcggctgacaaaaatacagatgctgttttaccatggctggc

SEQ ID NO: 315443 - DNA, 75 bp, synthetic construct
  source 1..75: mol_type = other DNA
tccgcgcaaagccgccgtcgaagccgctatcgcccgcgccaaagcgcgcaagctggaacagcaacaggctaatgc

SEQ ID NO: 315444 - DNA, 75 bp, synthetic construct
  source 1..75: mol_type = other DNA
catattggcgctgaaggtgagttgtgcgttagcgtcggcgataaagtattgcgcggccagccgcttacccgtggt

SEQ ID NO: 315445 - DNA, 75 bp, synthetic construct
  source 1..75: mol_type = other DNA
aaaaaaataaaatctgggacttcaacggcggtattcatccaccggaaatgaaaacccagtccaacggtacgcctc

SEQ ID NO: 315446 - DNA, 75 bp, synthetic construct
  source 1..75: mol_type = other DNA
gattgctgccgctctggcgcgggtgaaagagaaacaggcccaggctacacagcctattgtgattaaagcgggcga

SEQ ID NO: 315447 - DNA, 75 bp, synthetic construct
  source 1..75: mol_type = other DNA
cgggcgaacgcccggataacagtgcaattattgcagcacgggaagcccgtaaagcgcaagccagagcgaaacagg

SEQ ID NO: 315448 - DNA, 75 bp, synthetic construct
  source 1..75: mol_type = other DNA
tttctctgcgggtgattccaaccaaatatccttctggcggtgctaaacaattaacctacattctgaccgggaagc

SEQ ID NO: 315449 - DNA, 75 bp, synthetic construct
  source 1..75: mol_type = other DNA
gaaatttcgtatgctggccgaatattcccgtagccagatgacaaaagttgtcgttgatattgaacctcatatcat

SEQ ID NO: 315450 - DNA, 75 bp, synthetic construct
  source 1..75: mol_type = other DNA
agagcgcctggaagtttccggcaccgtcaccattgccgaccgcatggctaaggcccgccgtcgcgtgaaagagcg

SEQ ID NO: 315451 - DNA, 75 bp, synthetic construct
  source 1..75: mol_type = other DNA
gcagtcaaggccagtgtcatgatgcgtgatgagcgtatccagaaacggatcgccgaactgatggaagagcgtaac

SEQ ID NO: 315452 - DNA, 75 bp, synthetic construct
  source 1..75: mol_type = other DNA
actgcagcaataaatattactgcattaggtgccagaggtcatctggcgacaccatcggaagttaatctttttctt

SEQ ID NO: 315453 - DNA, 75 bp, synthetic construct
  source 1..75: mol_type = other DNA
atttaatggatggcacttacgtcagtaatattgcctttggcccaaatcaaattgcagcaatgaaaaaagccagtt

SEQ ID NO: 315454 - DNA, 75 bp, synthetic construct
  source 1..75: mol_type = other DNA
caaactttgcattcacccggatactggtgttatccattctgtttcggaagatgtttcagccctttatccggcagg

SEQ ID NO: 315455 - DNA, 75 bp, synthetic construct
  source 1..75: mol_type = other DNA
ttgaagcagctatcgcccgcgccaaagcgcgcaagctggaacagcaacaggctaatgcggaaccagaagaacagg

SEQ ID NO: 315456 - DNA, 75 bp, synthetic construct
  source 1..75: mol_type = other DNA
caaagagcgcctggaggtttccggcaccgtcaccatcgccgaccgcatggccgccgctcgccgccgcgtcaaaga

SEQ ID NO: 315457 - DNA, 75 bp, synthetic construct
  source 1..75: mol_type = other DNA
tgtcatcgaccatcatgaacatgaacgaggattcgatagagacaatcctcaaaaaaattaaatggcctgacaagg

SEQ ID NO: 315458 - DNA, 75 bp, synthetic construct
  source 1..75: mol_type = other DNA
ccagaagaacaggttgatccgcgcaaagctgccgtcgaagcggctattgcacgcgccaaagcgcgcaagctggaa

SEQ ID NO: 315459 - DNA, 75 bp, synthetic construct
  source 1..75: mol_type = other DNA
tgatcagaaaggcagcatccctactaaatatggcgataaagcacaactgctggccgccattgacgccctgaaacg

SEQ ID NO: 315460 - DNA, 75 bp, synthetic construct
  source 1..75: mol_type = other DNA
aaaattgttaacgactacaccggtgaaggctggaacgatcaggttgatgatgaactcggtaatttcgattatctg

SEQ ID NO: 315461 - DNA, 75 bp, synthetic construct
  source 1..75: mol_type = other DNA
tttgatctgtcatcgaccatcatgaacatgaacgaggattcgatagagacaatcctcaaaaaaattaaatggcct

SEQ ID NO: 315462 - DNA, 75 bp, synthetic construct
  source 1..75: mol_type = other DNA
gttgattatcaacgctgctgagtgcgagccgtacattaccgccgatgaccgtttgatgcaggattgcgcggctca

SEQ ID NO: 315463 - DNA, 75 bp, synthetic construct
  source 1..75: mol_type = other DNA
gggctttaccttaccgtggctggatgtacctgtcgtaaagattaccaactgccttttggctccctctgccaatga

SEQ ID NO: 315464 - DNA, 75 bp, synthetic construct
  source 1..75: mol_type = other DNA
agcctattgtgatcaaagctggcgaacgtccggataacagcgcaattattgcagcacgggaagcgcgtaaagcgc

SEQ ID NO: 315465 - DNA, 75 bp, synthetic construct
  source 1..75: mol_type = other DNA
aaccgattgtgattaaagcgggcgaacgcccggataacagcgcgattattgcggcacgggaagcccgtaaagcac

SEQ ID NO: 315466 - DNA, 75 bp, synthetic construct
  source 1..75: mol_type = other DNA
ggcgaagcaatcgctcgcccgggcaacgtctgggcacggctggggacgccagtgcgtcatttattgaatgacgcc

SEQ ID NO: 315467 - DNA, 75 bp, synthetic construct
  source 1..75: mol_type = other DNA
agccgctatcgcccgcgccaaagcgcgcaagctggagcagcaacaggctaatgcggagccagaagaacaggttga

SEQ ID NO: 315468 - DNA, 75 bp, synthetic construct
  source 1..75: mol_type = other DNA
tcctggtggatgaagtatttccgtgcaccgtgggaggcgttttggtgctacgaccatcgcagatggtgtgatgag

SEQ ID NO: 315469 - DNA, 75 bp, synthetic construct
  source 1..75: mol_type = other DNA
agtaataaaaatattaataatatggttaatataacaccacacgttgggcggcatacttgggctaatatcactctt

SEQ ID NO: 315470 - DNA, 75 bp, synthetic construct
  source 1..75: mol_type = other DNA
ttgatccaaggaaacaacaaccttcactcaagactgagcattcacagcgacaaatcgaactgaccgaagatgact

SEQ ID NO: 315471 - DNA, 75 bp, synthetic construct
  source 1..75: mol_type = other DNA
aaaggccagctgccgattaaggtagtccatgacgccaccgccgcaggatggaatatcctcaaccagcagcctgcc

SEQ ID NO: 315472 - DNA, 75 bp, synthetic construct
  source 1..75: mol_type = other DNA
tatatatcatctttttttgataagtatggatatgtagaacgatattctcttccttattcatctgatataaatatt

SEQ ID NO: 315473 - DNA, 75 bp, synthetic construct
  source 1..75: mol_type = other DNA
cgcgtgtagaggaacttgaaaaagagaacgctggcctcaaaaaaatgctggcccgggcagaaagggagttgtccg

SEQ ID NO: 315474 - DNA, 75 bp, synthetic construct
  source 1..75: mol_type = other DNA
acaagggaattatatcatcttcattgtatgaaagggcgcttaataccttgataaatatccgtgatttattgcagg

SEQ ID NO: 315475 - DNA, 75 bp, synthetic construct
  source 1..75: mol_type = other DNA
atgcgtaagctggcgggtaacctgaagcaatccaacacgttgctgattttcatcaaccagatccgtatgaaaatt

SEQ ID NO: 315476 - DNA, 75 bp, synthetic construct
  source 1..75: mol_type = other DNA
tgtacgctttgatgcgagctatcttcatctgctggagcagtgttcgcgacatgaaaacaaagccattcgcgccac

SEQ ID NO: 315477 - DNA, 75 bp, synthetic construct
  source 1..75: mol_type = other DNA
caaagaaaaacctacaacttgctagaagataatgtttatgacgaagacttcacattcaaagatctattcaactga

SEQ ID NO: 315478 - DNA, 75 bp, synthetic construct
  source 1..75: mol_type = other DNA
atgaatttgtttttattaaaggctcaggtaagttaactccattaacttacgatgcaattataacattttataagg

SEQ ID NO: 315479 - DNA, 75 bp, synthetic construct
  source 1..75: mol_type = other DNA
aggctggtgcaacaccggtttatctggaaaccgcacgtaacccgtatggttttatcggtggtattgatgcgcact

SEQ ID NO: 315480 - DNA, 75 bp, synthetic construct
  source 1..75: mol_type = other DNA
ttatccagcgcgccaatccgcagctttatgatctgctgaccaacggcgtgctgcaggggcggctggattttgata

SEQ ID NO: 315481 - DNA, 75 bp, synthetic construct
  source 1..75: mol_type = other DNA
ttttctcagaaagacccatatttaaagctcctgaggctgaaagaatacttcgtgagcaatattctatcgccgccc

SEQ ID NO: 315482 - DNA, 75 bp, synthetic construct
  source 1..75: mol_type = other DNA
tattggagcttcggcatccgatacaatatattcagcaaaagacattttgctgaatcttgaagtgggtagttttaa

SEQ ID NO: 315483 - DNA, 75 bp, synthetic construct
  source 1..75: mol_type = other DNA
atgcattcagtttcttttgtctgtctatagtggtcataattgtatgggtggaattaaagcaaacattgtttcatg

SEQ ID NO: 315484 - DNA, 75 bp, synthetic construct
  source 1..75: mol_type = other DNA
caaggctgcatatgacctggctaacgggaagtatacagcccaggatgcaaccacgacacaaaaagggatagttca

SEQ ID NO: 315485 - DNA, 75 bp, synthetic construct
  source 1..75: mol_type = other DNA
gcatacaagagttggaaccctgttaggggcagttaagtataacttcgttaagcttgctaatactcataaaattta

SEQ ID NO: 315486 - DNA, 75 bp, synthetic construct
  source 1..75: mol_type = other DNA
atattgaccaaatcgaatggaaattgattgaacttcccactaaaaattttttaactatcggggataatgctactt

SEQ ID NO: 315487 - DNA, 75 bp, synthetic construct
  source 1..75: mol_type = other DNA
gcgcgtctggaagaactggcaccttacgtcaaatcctgtgcagaagagatatccgctgaactgggctggggtaag

SEQ ID NO: 315488 - DNA, 75 bp, synthetic construct
  source 1..75: mol_type = other DNA
tcgtgctggtggaggagttgcgcgaacgaggcatcaactttcgtagtctgacggattcaattgataccagtaccc

SEQ ID NO: 315489 - DNA, 75 bp, synthetic construct
  source 1..75: mol_type = other DNA
ggccaatcgcccatcaaactggttcgcgatacgacggttgcaggctacaacatcctcaataatcgcagcgcgacc

SEQ ID NO: 315490 - DNA, 75 bp, synthetic construct
  source 1..75: mol_type = other DNA
cattgataactatagcaagtgtcaaaaactaatttctattagtagtgaaaaacaaatatttaaatggacaaaaaa

SEQ ID NO: 315491 - DNA, 75 bp, synthetic construct
  source 1..75: mol_type = other DNA
attctgtcgcgataattaccccgatcatacagatgctcgcggtaagatccggctgggttttccccaaagataaga

SEQ ID NO: 315492 - DNA, 75 bp, synthetic construct
  source 1..75: mol_type = other DNA
taaaaatattattcccttccctatctgccattatatccttattagggcttaaaacagggtggacttataaaaaag

SEQ ID NO: 315493 - DNA, 75 bp, synthetic construct
  source 1..75: mol_type = other DNA
gcattgttgatgttgcgcctgacgcgctggctcagcctgtgccataaggcgcgggatcgggtatccggccgcatc

SEQ ID NO: 315494 - DNA, 75 bp, synthetic construct
  source 1..75: mol_type = other DNA
caaccgccttccagtgacaacgtggaggcgctggagcagcagtattattcccagtgcctgcagacgctgattgag

SEQ ID NO: 315495 - DNA, 75 bp, synthetic construct
  source 1..75: mol_type = other DNA
cgtggaggcgctggagcagcagtattattcccagtgcctgcagacgctgattgagtccattgaactgttactgga

SEQ ID NO: 315496 - DNA, 75 bp, synthetic construct
  source 1..75: mol_type = other DNA
cggcagatccgcgttatctggcggccagctggcaggcaggccataccggcagtggcctgcattatcgccgttatc

SEQ ID NO: 315497 - DNA, 75 bp, synthetic construct
  source 1..75: mol_type = other DNA
cagtatgatggatattcccgtcggtcagcaaagcgttatttataatggcgaaatttataatcaggaactcaccga

SEQ ID NO: 315498 - DNA, 75 bp, synthetic construct
  source 1..75: mol_type = other DNA
acatgctcgcagttgcgctggatttcggccgcaccatggtggaaggcatttcagtgttttctccggccaagggaa

SEQ ID NO: 315499 - DNA, 75 bp, synthetic construct
  source 1..75: mol_type = other DNA
atgtggaactttttgcgacgaacccgaaaaaaccagaaatcaggacgtgacgtaagagaagtgggctggcggtcc

SEQ ID NO: 315500 - DNA, 75 bp, synthetic construct
  source 1..75: mol_type = other DNA
gtctaattgggctcatactgatgatctttacttcagtattcggttttgcgaatagcccttcggcttattatttaa

SEQ ID NO: 315501 - DNA, 75 bp, synthetic construct
  source 1..75: mol_type = other DNA
atttgtcacctgaagcgtcattgtcgctgggcgtatggtttgcgcgtattaccggactttcgatgttcctcgctt

SEQ ID NO: 315502 - DNA, 75 bp, synthetic construct
  source 1..75: mol_type = other DNA
ataccggtgcgttctttacgctttgctattcaccgctgaaagccatcatccaggggacgccgaaagcgttgtggc

SEQ ID NO: 315503 - DNA, 75 bp, synthetic construct
  source 1..75: mol_type = other DNA
cgagcatgcagagtggtcacagatcaccttcgggaatgtcggtccgattggcccgctgaaacacctcagcaaaga

SEQ ID NO: 315504 - DNA, 75 bp, synthetic construct
  source 1..75: mol_type = other DNA
cgttctcaacattcctctatggtagcgacatgactcagcactggagtattgccgggctggagcctacgcaagttg

SEQ ID NO: 315505 - DNA, 75 bp, synthetic construct
  source 1..75: mol_type = other DNA
cggagactgggacagcacattgtggatgattggcggccctgtcttcttctcgctgttagcgatggcgatttacca

SEQ ID NO: 315506 - DNA, 75 bp, synthetic construct
  source 1..75: mol_type = other DNA
ctgtatcttcagcagcagaactacagtctggaggcgctgtcccgtcgtgatgcccgtgaggatccgttcgcgtct

SEQ ID NO: 315507 - DNA, 75 bp, synthetic construct
  source 1..75: mol_type = other DNA
gccacggagcgccgatagttggtgcggacaacgttgttgaatccggcaacggaaggagtatgggtatctggcgtg

SEQ ID NO: 315508 - DNA, 75 bp, synthetic construct
  source 1..75: mol_type = other DNA
ggagtccggctccggtttttgtgttgccatataaggccgatgtttgttacagctatttaagtctggagttcaaat

SEQ ID NO: 315509 - DNA, 75 bp, synthetic construct
  source 1..75: mol_type = other DNA
ttctgctgctgtatgtcatcaatatgggtgtcgcagaagtattacaggcaaccggaaacatgctgctgccggggc

SEQ ID NO: 315510 - DNA, 75 bp, synthetic construct
  source 1..75: mol_type = other DNA
catcccgaaaaacagcttgtcctgcagtcgatgaagaacatgccatccgcgttgcgccaggacgtactcgatgat

SEQ ID NO: 315511 - DNA, 75 bp, synthetic construct
  source 1..75: mol_type = other DNA
taaccgttcagttttacagaatctggttcagggccttctggataattggtgcattaacctttatatacctatcaa

SEQ ID NO: 315512 - DNA, 75 bp, synthetic construct
  source 1..75: mol_type = other DNA
cttatgaacaagggcaggctgaagattaccgacaatatcttatcgatcacgctaaagagtttggccttaatcccg

SEQ ID NO: 315513 - DNA, 75 bp, synthetic construct
  source 1..75: mol_type = other DNA
agacgcgccagcgtcgcatcaggcattgtgtacagagcggcggatgaggcaaaaacgccttatccgcccgaataa

SEQ ID NO: 315514 - DNA, 75 bp, synthetic construct
  source 1..75: mol_type = other DNA
actgatgtacagggaatacgtcgggaaaagcggcagggagatactgcccgtctctgtcgtcgtcctaatgcgcag

SEQ ID NO: 315515 - DNA, 75 bp, synthetic construct
  source 1..75: mol_type = other DNA
cggggcaaaatacagccccacgacgttttcaccggtggatgcgcagacggtggaacaactgaaaatgacggctga

SEQ ID NO: 315516 - DNA, 72 bp, synthetic construct
  source 1..72: mol_type = other DNA
atggtgttgtgtccgttaggtgcggttaatcaaattttttccggatgcggcgtgaacgccttatccgaccta

SEQ ID NO: 315517 - DNA, 75 bp, synthetic construct
  source 1..75: mol_type = other DNA
gtgattatgatccggatgtactgcagcaggcggtgaatgatgcggttgcgaatattccggtaccggcggacggca

SEQ ID NO: 315518 - DNA, 75 bp, synthetic construct
  source 1..75: mol_type = other DNA
atacacaggggatccgccgtgaaaaacggcagggggatattgcccgtctctgtcgtcgtcccaatgcacagcaga

SEQ ID NO: 315519 - DNA, 75 bp, synthetic construct
  source 1..75: mol_type = other DNA
catcaccaacgctacatacacgagggagtattggtaacacaggtgggagcgaaacccgtccacgaaatattgcat

SEQ ID NO: 315520 - DNA, 75 bp, synthetic construct
  source 1..75: mol_type = other DNA
tacatcaaaagataaactcccttattttacaggggaagatcgggctgccttaactgcactgacaagtgttgggcg

SEQ ID NO: 315521 - DNA, 75 bp, synthetic construct
  source 1..75: mol_type = other DNA
cagggccaggaacgcggtgcaaaagaatggcgataccttgtccggcgggattacttttgaaaacgactcaatcct

SEQ ID NO: 315522 - DNA, 75 bp, synthetic construct
  source 1..75: mol_type = other DNA
gtaactctgcggaacctagtgattactctggtaacggcgaagctaatgatgtagctctgtatttcagtgatagtg

SEQ ID NO: 315523 - DNA, 75 bp, synthetic construct
  source 1..75: mol_type = other DNA
gaaacgacccgaattttgcgaccaccatgactaacgcgcttgcgggtaagcaaccgaaagatgccaccctgacgg

SEQ ID NO: 315524 - DNA, 75 bp, synthetic construct
  source 1..75: mol_type = other DNA
gcacgtctgaaacgctggccgccacaccaaaggccgtcaaggcggcatacgaccttgcagccggcaaggcccccg

SEQ ID NO: 315525 - DNA, 75 bp, synthetic construct
  source 1..75: mol_type = other DNA
ttcagcaaagcggcttaagcaagccattgtgaaacatgagcaatcacgtaatcatcccgatgcaactttaacctc

SEQ ID NO: 315526 - DNA, 75 bp, synthetic construct
  source 1..75: mol_type = other DNA
gcgtgaccagaacgttattatgggacgtaatgcggtatccactcatggtgctcaggctttgctccgtcaggacca

SEQ ID NO: 315527 - DNA, 75 bp, synthetic construct
  source 1..75: mol_type = other DNA
cgctatgtaaaagatgttcgcctgggtacgcgagttgttcaattgatggcgcgtggtggtcgttatgaaaaagcc

SEQ ID NO: 315528 - DNA, 75 bp, synthetic construct
  source 1..75: mol_type = other DNA
cactaggtggtagctctattgttcttggtgataatgataccggatttaaacagaatggagacggtattcttgatg

SEQ ID NO: 315529 - DNA, 75 bp, synthetic construct
  source 1..75: mol_type = other DNA
accgatggtcaggcgtacatggacaataacggtaactggctttgtggctcgcaagttattcctggcaactatggc

SEQ ID NO: 315530 - DNA, 75 bp, synthetic construct
  source 1..75: mol_type = other DNA
acgcattcgtgggagcagataacaaatgtgcctgtagcttcactgacagtaaggggaatcactcagctcagtagt

SEQ ID NO: 315531 - DNA, 75 bp, synthetic construct
  source 1..75: mol_type = other DNA
atgagcacaaaattcagaaccgttatcaccactgccggtgcagcaaagctggcagcggcaaccgcaccgggaggg

SEQ ID NO: 315532 - DNA, 75 bp, synthetic construct
  source 1..75: mol_type = other DNA
cagcattttcttctgaaaagtacccaaaactggcaagggcttaccccaccaataaattaccagacttacgcggtg

SEQ ID NO: 315533 - DNA, 75 bp, synthetic construct
  source 1..75: mol_type = other DNA
cgccgtccggcaaggtgcaattaacggtagatttaccagtcaatacagaacggaatcctcagaggggaatgaaac

SEQ ID NO: 315534 - DNA, 75 bp, synthetic construct
  source 1..75: mol_type = other DNA
acggcacgatctcaacctattatttgaaccatgattatgcagacagtactgctaatcagcttgatatcagtaatt

SEQ ID NO: 315535 - DNA, 75 bp, synthetic construct
  source 1..75: mol_type = other DNA
atgaatttgataacagcccgcaggatattgccctgctgcgcaatatttgtagtggcacactaaatttggccacct

SEQ ID NO: 315536 - DNA, 75 bp, synthetic construct
  source 1..75: mol_type = other DNA
taaatgggatgctttgtctgttcttgttaaagcccttttcagcagtgaagtaaaaatatcgacagtcaatgcact

SEQ ID NO: 315537 - DNA, 75 bp, synthetic construct
  source 1..75: mol_type = other DNA
ctgaatacgttgaacgagttagcggcggcgctgggaaacgacccgaattttgcgaccaccatgactaaagcgctt

SEQ ID NO: 315538 - DNA, 75 bp, synthetic construct
  source 1..75: mol_type = other DNA
agtaccacaacaaaagacctgatgaatcttaaatgggatgctttgtatgttcttgtcaatgccattgtaaatggc

SEQ ID NO: 315539 - DNA, 75 bp, synthetic construct
  source 1..75: mol_type = other DNA
aatatagcgggtgtttattacagacccgtccaaaagtatataaatggcacctggtataatgtagcgagcgtttaa

SEQ ID NO: 315540 - DNA, 75 bp, synthetic construct
  source 1..75: mol_type = other DNA
cgattaccggattaagaatcattggtgaagtagatggcgatgatgaagccatcttcaggccgatacaaaagtaca

SEQ ID NO: 315541 - DNA, 75 bp, synthetic construct
  source 1..75: mol_type = other DNA
tacagcatatccatcagggaaactacctgatctccgcggtgagtttattcgtggctgggatgacgggcgcggtat

SEQ ID NO: 315542 - DNA, 75 bp, synthetic construct
  source 1..75: mol_type = other DNA
atggctacgttgataccgatcatctgactattaactcctacagtactgttgcgttgaccgaatctactgggtggg

SEQ ID NO: 315543 - DNA, 75 bp, synthetic construct
  source 1..75: mol_type = other DNA
gcgctgtttcgatggggcgtggccttaatgtttcaggggagacgctttcagaccgttttgctattaacagcagta

SEQ ID NO: 315544 - DNA, 75 bp, synthetic construct
  source 1..75: mol_type = other DNA
ccacaaagaatgtaacgtttaatttatggggtgcttcaacccgtccagtagttgcagagttaggcgatgaggcag

SEQ ID NO: 315545 - DNA, 75 bp, synthetic construct
  source 1..75: mol_type = other DNA
gcaacgattacagagaatggcgtacaaagtgacacaaacagctggacgactgtctcacagagttttatgactcaa

SEQ ID NO: 315546 - DNA, 75 bp, synthetic construct
  source 1..75: mol_type = other DNA
tttctaaagccgtagtagatggtcttggtggcggtgagagcaaatatacccgtgcccagcgtttacgttatttcc

SEQ ID NO: 315547 - DNA, 75 bp, synthetic construct
  source 1..75: mol_type = other DNA
aatcattccacatgggggataaaaatgttgtcgttgtccttggtatatataattatcaggttccatcaatgctgt

SEQ ID NO: 315548 - DNA, 75 bp, synthetic construct
  source 1..75: mol_type = other DNA
gtgcagttgatggcgatgatccggcagtattcagaccaatacaaaaatacatcaatggcacatggtataacgtcg

SEQ ID NO: 315549 - DNA, 75 bp, synthetic construct
  source 1..75: mol_type = other DNA
ctgaacgagttagcggcggcgctgggcaacgacccgaattttgcgaccaccatgactaacgcgcttgcgggtaag

SEQ ID NO: 315550 - DNA, 75 bp, synthetic construct
  source 1..75: mol_type = other DNA
ggcggtaatggatgaaacgaacaagaaagcgcccttaaatagtcctgcactgaccggaacgccaacaacgccaac

SEQ ID NO: 315551 - DNA, 75 bp, synthetic construct
  source 1..75: mol_type = other DNA
atgcgccctacgtccctcaacttggcattacatctgtcatcaacgtcgggctcaatgtcagatacagatatcgag

SEQ ID NO: 315552 - DNA, 75 bp, synthetic construct
  source 1..75: mol_type = other DNA
atggacgaagtcaagaaaattgaacattataaaattttaaacacagacacatccgagaattctgctgcggattta

SEQ ID NO: 315553 - DNA, 75 bp, synthetic construct
  source 1..75: mol_type = other DNA
gtttcgtcagatgagtttgtgcatgttaatattgctagcgctggtgaataaagttagtgaaaacaataagaaacg

SEQ ID NO: 315554 - DNA, 75 bp, synthetic construct
  source 1..75: mol_type = other DNA
gtggcgccgagcgcaatcgccgccgtggtttccacaatattcaggtactgtacaatcgcttgcagtacacattgt

SEQ ID NO: 315555 - DNA, 75 bp, synthetic construct
  source 1..75: mol_type = other DNA
ccgatagtcaggattttatcgatcccagtttcgacttcgttcgcgaaacgcgcaacgagcatcgcgttcgtcagc

SEQ ID NO: 315556 - DNA, 75 bp, synthetic construct
  source 1..75: mol_type = other DNA
ctccgggcctttgtaagagcaatgaatcagggaatgggggttcacgagttaaaaagtaatgttagcggtgccagc

SEQ ID NO: 315557 - DNA, 75 bp, synthetic construct
  source 1..75: mol_type = other DNA
ctcagtagcgccaccaacagcacgtctgaaacgcaggctgtaacgccgaaagcagtaaaggccgcgtatgacctt

SEQ ID NO: 315558 - DNA, 75 bp, synthetic construct
  source 1..75: mol_type = other DNA
atttatgattggcggtctgggaaataagcaatttggcatctacatgattaataattcaaggacagccaatggcac

SEQ ID NO: 315559 - DNA, 75 bp, synthetic construct
  source 1..75: mol_type = other DNA
agaaaatgagggggaaaatggcgatatagggccactacgcccctttacgcttaatctcagaactggtcgcataac

SEQ ID NO: 315560 - DNA, 75 bp, synthetic construct
  source 1..75: mol_type = other DNA
ccagcccgacatttagcggaacccccaaagcgccaacgccagcggcggggaataataccacgcaggttgcgacca

SEQ ID NO: 315561 - DNA, 75 bp, synthetic construct
  source 1..75: mol_type = other DNA
acgctacgacggcacaaaaagggatagtccagctcagtagtgccaccaacagcacgtctgaaacactggccgcga

SEQ ID NO: 315562 - DNA, 75 bp, synthetic construct
  source 1..75: mol_type = other DNA
tgttagcctgtaatgttgctggtgactcgatagcaagtgcaattgcgggtgttaaaagattaaatgatcgcgata

SEQ ID NO: 315563 - DNA, 75 bp, synthetic construct
  source 1..75: mol_type = other DNA
aaacagacccgtctggggcatgaggtgtggcgacacactgttaatcgcgtcatcctggacgcaacacatcagaac

SEQ ID NO: 315564 - DNA, 75 bp, synthetic construct
  source 1..75: mol_type = other DNA
gacaacggcaatgaatatttcaaatggagaagccgccatggcaccacaacaaaagacctgatgaatcttaaatgg

SEQ ID NO: 315565 - DNA, 75 bp, synthetic construct
  source 1..75: mol_type = other DNA
cgccactaacagcacgtcagaaatgcaggctgccacaccaaaggcagtgaaggcggcatatgaccttgcagcagg

SEQ ID NO: 315566 - DNA, 75 bp, synthetic construct
  source 1..75: mol_type = other DNA
ggatattcttgcgaaatcgaacgttgctgccgttatcgaatacctcggtttgcagaaaacagtaaacaaggctgg

SEQ ID NO: 315567 - DNA, 75 bp, synthetic construct
  source 1..75: mol_type = other DNA
tcggcgatggcggcggaatattgccaacgccggacgcaaagcagacagcactggtaaatgagaaacgccgggctg

SEQ ID NO: 315568 - DNA, 75 bp, synthetic construct
  source 1..75: mol_type = other DNA
ttcaaatggagaagcaaacaaagcaccacaacaaaagacctgatgaatcttaaatgggatgctttgtatgttctt

SEQ ID NO: 315569 - DNA, 75 bp, synthetic construct
  source 1..75: mol_type = other DNA
ttcaggatacaggttccaactctgccgataatatagcgggcgtttattacagacccgttcaaaagtatataaatg

SEQ ID NO: 315570 - DNA, 75 bp, synthetic construct
  source 1..75: mol_type = other DNA
aagaaagttcgctgaatctggatgcgtacaactggaaagaggaaggcatcagcgacaaaggcgtgatgctgaact

SEQ ID NO: 315571 - DNA, 75 bp, synthetic construct
  source 1..75: mol_type = other DNA
tggatttgttaccattaaaccgctggctaattatggtacagaaatactgaacggcgatgtcgatgccaacctatg

SEQ ID NO: 315572 - DNA, 75 bp, synthetic construct
  source 1..75: mol_type = other DNA
tgacgctggcggcaaaagatctaaaagtggtcgggcagaaagcgacgggcataaacgtttctggcgatgcgaata

SEQ ID NO: 315573 - DNA, 75 bp, synthetic construct
  source 1..75: mol_type = other DNA
atcccgactctggatgaaaatggcgatatagccagcgaagcttattggcagacgaattccccgtatctgatgggc

SEQ ID NO: 315574 - DNA, 75 bp, synthetic construct
  source 1..75: mol_type = other DNA
ggcgcaggaacctatggcgtttctacagcaaaaggcacggctatcaatgccggagaaattaacgtcgatagtttt

SEQ ID NO: 315575 - DNA, 75 bp, synthetic construct
  source 1..75: mol_type = other DNA
ctggcacggaaatcaatggtaataacggaaaagttatccaggatggcgatctggacgtcagcggcggcggtcacg

SEQ ID NO: 315576 - DNA, 75 bp, synthetic construct
  source 1..75: mol_type = other DNA
caggggacgattaacctcgaaaaaaatggtaattatgacgatagtctggcagcaaatactctggtagggatggct

SEQ ID NO: 315577 - DNA, 75 bp, synthetic construct
  source 1..75: mol_type = other DNA
tttaataacgatgtcagtagcataacagggttagtcgctcaatcgaatagcacaattatcaatactgacagcggc

SEQ ID NO: 315578 - DNA, 75 bp, synthetic construct
  source 1..75: mol_type = other DNA
tcgaaaatgcctctacggggattattaactccatggtgaaattggcaccaaatgctgtaatagataatgctggct

SEQ ID NO: 315579 - DNA, 75 bp, synthetic construct
  source 1..75: mol_type = other DNA
caaattacggtatcaagcggtcttctggaaaataccagcggtggcatcatcaataacttagggaaggtgcgaata

SEQ ID NO: 315580 - DNA, 75 bp, synthetic construct
  source 1..75: mol_type = other DNA
cactgatctataccggtggcgatacgattacacgaagcggagaaactgtaacgctaaataaatctgctgctgtga

SEQ ID NO: 315581 - DNA, 75 bp, synthetic construct
  source 1..75: mol_type = other DNA
gaaggcgagagcaccatcaccaacggcggcaccggcacgcagattaacggtgacgacgccacggcgaataacagc

SEQ ID NO: 315582 - DNA, 75 bp, synthetic construct
  source 1..75: mol_type = other DNA
aattacggtaccatttgcacgctgggcgtttgtgaaaattccagtgagtataacccgaccgatccggcagttagc

SEQ ID NO: 315583 - DNA, 75 bp, synthetic construct
  source 1..75: mol_type = other DNA
aacatcagtgggttggtgatttcaggggatgaaaatagcgttaccttacggggtggtattcaacttttcggtgaa

SEQ ID NO: 315584 - DNA, 75 bp, synthetic construct
  source 1..75: mol_type = other DNA
gggattcgcgttgttggagatgggggcgaaatttctctggctggccgtatggatgttggggattattcaaccggt

SEQ ID NO: 315585 - DNA, 75 bp, synthetic construct
  source 1..75: mol_type = other DNA
ctacacgctgacggcaaaagatggccgaaaaaccattgtgactgagtgggaaaaccatgaagagactcataccgc

SEQ ID NO: 315586 - DNA, 75 bp, synthetic construct
  source 1..75: mol_type = other DNA
cggtgaatgcctggaaatgttcttccgggtctgccgtaatgaataatcaggccggtggaaaagtagagaaaataa

SEQ ID NO: 315587 - DNA, 75 bp, synthetic construct
  source 1..75: mol_type = other DNA
actgggtaatattggctttgccagggctactggtgaagagtcgctagctgtaaataataacaacgtaacgatttc

SEQ ID NO: 315588 - DNA, 75 bp, synthetic construct
  source 1..75: mol_type = other DNA
aggtgtgattaacggccaggttacgacgtcaaataataacgccggtagccgggcaattaacgatggcactatcaa

SEQ ID NO: 315589 - DNA, 75 bp, synthetic construct
  source 1..75: mol_type = other DNA
acgggatgagctggaataacgccctgcgttatgatgttcataacctcgacagcagccgtgccgtagcctacggcg

SEQ ID NO: 315590 - DNA, 75 bp, synthetic construct
  source 1..75: mol_type = other DNA
ggaataataacgcgcaactggtcaataagggcattattaatctgggaacggaaggcacgaccgataccggcctga

SEQ ID NO: 315591 - DNA, 75 bp, synthetic construct
  source 1..75: mol_type = other DNA
gagtgaaggcgagattaatttcgatcatgataacgccagcgccgtgaaattcacgcacaccaactatgtcgcgca

SEQ ID NO: 315592 - DNA, 75 bp, synthetic construct
  source 1..75: mol_type = other DNA
caggcgttctataacgatggcaccgggactattgttaactacggaactatctgtacttttggtatatgccaggat

SEQ ID NO: 315593 - DNA, 75 bp, synthetic construct
  source 1..75: mol_type = other DNA
accgagactggctgggcagatgccaccgggttgaatacaggcacaatcaacgtcaacaatgaaggttttggtatg

SEQ ID NO: 315594 - DNA, 75 bp, synthetic construct
  source 1..75: mol_type = other DNA
gccgtatgccggagtgaaactgcgccacacgctggaaggcggttatcaggaacgcaacgccggtgactttaacct

SEQ ID NO: 315595 - DNA, 75 bp, synthetic construct
  source 1..75: mol_type = other DNA
taatcatcatgacgatccgtctccggtgccggatgatggcggcgacacacctgtcccgccggatgatggcggtga

SEQ ID NO: 315596 - DNA, 75 bp, synthetic construct
  source 1..75: mol_type = other DNA
gaacaggcaatgcaagagcagcgactggcgcgaaaaattgcgctaaagctctctggttgcgtcagagcagacaaa

SEQ ID NO: 315597 - DNA, 75 bp, synthetic construct
  source 1..75: mol_type = other DNA
acagcaacaaagtggcgcaagtgcaggcgatgctggcgtccggcagcccgcaagtggacactgaacagttagcca

SEQ ID NO: 315598 - DNA, 75 bp, synthetic construct
  source 1..75: mol_type = other DNA
ggcgatgctggcctccggtagcccgcaagtggacaccgaacagttagccagcgacatgctgagttttttccacaa

SEQ ID NO: 315599 - DNA, 75 bp, synthetic construct
  source 1..75: mol_type = other DNA
tgtttgccgtcctgacgctgctcgccgcctggctgtggtggaaatggttgtcgcggcgggtgcgcgaacaaaagc

SEQ ID NO: 315600 - DNA, 75 bp, synthetic construct
  source 1..75: mol_type = other DNA
tgggtatttgttaaattcatcggaaaccacaaggaatacgatgctattgatgctgataccatcgaactggagtaa

SEQ ID NO: 315601 - DNA, 75 bp, synthetic construct
  source 1..75: mol_type = other DNA
gaaacaaaggcggcaaagatgatccggaatcatgcgttccaggcgggggcacgaacttatcccggtcataccgga

SEQ ID NO: 315602 - DNA, 75 bp, synthetic construct
  source 1..75: mol_type = other DNA
gtttcttgggtgagaaaagtaaatcacttgaagagcgcctgaacgacccagaaaccctagaagtgttcaaaagac

SEQ ID NO: 315603 - DNA, 75 bp, synthetic construct
  source 1..75: mol_type = other DNA
taactgcgctaaaaaatatatcggagaccgcaaacagagccattcaggatgcaacaaatgaaggaatgattgggc

SEQ ID NO: 315604 - DNA, 75 bp, synthetic construct
  source 1..75: mol_type = other DNA
ccggaaacaatacatgagagaagttgctaccaggttgcgtgaggagggcgtatcacggcctgatatctgcaggat

SEQ ID NO: 315605 - DNA, 75 bp, synthetic construct
  source 1..75: mol_type = other DNA
ctgctgcatgcatttgtgaaaaagacgcaaaagacaccaacaaaagctattgaaatcgccaggatgcgcctgaag

SEQ ID NO: 315606 - DNA, 75 bp, synthetic construct
  source 1..75: mol_type = other DNA
accagacgatctgcgaggtcgcatgaccaggctaattgaacgactggagaaagagggaaacaaacttaagatgcc

SEQ ID NO: 315607 - DNA, 75 bp, synthetic construct
  source 1..75: mol_type = other DNA
tttggtataagcgatgccactgtggaacggtatatcgccaatcatagcaatgaactcaagagcaatggttatcga

SEQ ID NO: 315608 - DNA, 75 bp, synthetic construct
  source 1..75: mol_type = other DNA
acagcgagctatggtgggcgattcagaacggttatatgacggttaaagccgcaggggttcgtgtccgtgaaatag

SEQ ID NO: 315609 - DNA, 75 bp, synthetic construct
  source 1..75: mol_type = other DNA
taacttcatcgcgcagaatgacggcacgatgaatatcagcggtactaatgctgtggctatggaaggtgataagaa

SEQ ID NO: 315610 - DNA, 75 bp, synthetic construct
  source 1..75: mol_type = other DNA
taacgccacgtttatgaacgtgggtgatatttctgccagcaatgcagggacgggagttcaggttattggcgacgc

SEQ ID NO: 315611 - DNA, 75 bp, synthetic construct
  source 1..75: mol_type = other DNA
cacccggttcgcgcctgctgcaacagttgattgattacgatctgctggtccgccgtactttgcttgcctggcacc

SEQ ID NO: 315612 - DNA, 75 bp, synthetic construct
  source 1..75: mol_type = other DNA
tgccgctttgcaaagcattgcaggcgctacagtgaccaataattcggcgatcaccgggaaagtcatgcagcaatc

SEQ ID NO: 315613 - DNA, 75 bp, synthetic construct
  source 1..75: mol_type = other DNA
tgcaggaaaagatggctggagtgcgaacgccacgctggaaggcgggccgaacctgagctacgcgaagagccagcg

SEQ ID NO: 315614 - DNA, 75 bp, synthetic construct
  source 1..75: mol_type = other DNA
ggggttcaggttattggtgatgcaggtgatatttcacttgcaggtggaatgtatgtaggtgacttttccaccggc

SEQ ID NO: 315615 - DNA, 75 bp, synthetic construct
  source 1..75: mol_type = other DNA
gaaaacttatctctgtcagtatgctattgcagcgatacagaatggcaaaattggtgctttacgtgtgctgggtag

SEQ ID NO: 315616 - DNA, 75 bp, synthetic construct
  source 1..75: mol_type = other DNA
gtttgccgttgttccgtgtcagtggtggcgcattatagggagttattccggcctgacaagaggaaatttaaaata

SEQ ID NO: 315617 - DNA, 75 bp, synthetic construct
  source 1..75: mol_type = other DNA
ctggacagtatcccgcaaggggaacgcagccgccttaaccgggccgcactgacggcaggtctggcattatacaga

SEQ ID NO: 315618 - DNA, 75 bp, synthetic construct
  source 1..75: mol_type = other DNA
gtagaaaaactgtctgaaggcattcgtctgttcgccgttgatcaacgcaaactggaagatcttcttgccgccaaa

SEQ ID NO: 315619 - DNA, 75 bp, synthetic construct
  source 1..75: mol_type = other DNA
cccgacagcaaaaagcagttgtgagggagggagtttctgtgcctcttgttcttgaacaacagatacctgtagtga

SEQ ID NO: 315620 - DNA, 75 bp, synthetic construct
  source 1..75: mol_type = other DNA
agtttataacgatacagacaacgaatatatcatcacagcacgggttatcagatcagatggacggggagagactcc

SEQ ID NO: 315621 - DNA, 75 bp, synthetic construct
  source 1..75: mol_type = other DNA
acgccagtggcccgaaccagaagtgggcaggagacatcacgtacttacgtacagatgaaggctggctgtatctgg

SEQ ID NO: 315622 - DNA, 75 bp, synthetic construct
  source 1..75: mol_type = other DNA
tacaatcggtggcggcggcacagttggtgtggcggcctcagtccggaacaatttgaaaacaagaacctcgcttag

SEQ ID NO: 315623 - DNA, 75 bp, synthetic construct
  source 1..75: mol_type = other DNA
tctatcgagtgtgattacaatcgctggcgtcgtcacagtgcctgtggcggtctcagcccggaacaatttgaaaac

SEQ ID NO: 315624 - DNA, 75 bp, synthetic construct
  source 1..75: mol_type = other DNA
ttcacacggaccgtcggaggccagtactgttcagcagattatcaggcgcaactgaagcggcataatctgcgtgga

SEQ ID NO: 315625 - DNA, 75 bp, synthetic construct
  source 1..75: mol_type = other DNA
attatcaggcgctgctgaagcgacacaacctgcgtggcagtatgagtgcgaaaggctactgttatgacaatgcct

SEQ ID NO: 315626 - DNA, 75 bp, synthetic construct
  source 1..75: mol_type = other DNA
ggtgtttaattatatcgagtgtgattacaatcgctggcgtcgtcacagtgcctgtggcggtctcagcccggaaca

SEQ ID NO: 315627 - DNA, 75 bp, synthetic construct
  source 1..75: mol_type = other DNA
gaaggtggaatgtatccacagggaacgctttagcagccgggaaataatgcgggcaacggtgtttaattatatcga

SEQ ID NO: 315628 - DNA, 75 bp, synthetic construct
  source 1..75: mol_type = other DNA
attatatcgagagtgattacaatcgctggcgtcgtcacagtgcctgtggcggtctcagcccggaacaatttgaaa

SEQ ID NO: 315629 - DNA, 75 bp, synthetic construct
  source 1..75: mol_type = other DNA
gccctgcagatggcgctgtggtggcgtaagaggccccggaacgttatcgtttgtcacgaacggtgcaatagtgat

SEQ ID NO: 315630 - DNA, 75 bp, synthetic construct
  source 1..75: mol_type = other DNA
cgggaaataatgcgggcaacggtgtttgaaccgccccgggaatcctggagactaaacttcctgagaaagaggtaa

SEQ ID NO: 315631 - DNA, 75 bp, synthetic construct
  source 1..75: mol_type = other DNA
agttcaatccggatgctccggatgagcgttgggtaacggacataacctacataaggacccacgaaggctggctgt

SEQ ID NO: 315632 - DNA, 75 bp, synthetic construct
  source 1..75: mol_type = other DNA
tggcccgaaccagaagtgggcaggagacatcacgtacttacgtacagatgaaggctggctgtatctggcagtggt

SEQ ID NO: 315633 - DNA, 75 bp, synthetic construct
  source 1..75: mol_type = other DNA
cagggttaccactttaacgtaaaaacagtggcggcaagcctgcgccgtcaggggctgagggcaaaagcctcccag

SEQ ID NO: 315634 - DNA, 75 bp, synthetic construct
  source 1..75: mol_type = other DNA
tgtgagctggtctggtatttcacggaaggactcaaagccccgcgctggctgcgtaccgccgacggcgtaaaattt

SEQ ID NO: 315635 - DNA, 75 bp, synthetic construct
  source 1..75: mol_type = other DNA
ggagcaaaccctgaccgggctgctgtgtgagctggtctggaatttcacggaaggactcaaatccccgcgctggct

SEQ ID NO: 315636 - DNA, 75 bp, synthetic construct
  source 1..75: mol_type = other DNA
tcccttcaatgccaccacggatttcaccgtcctggccgactactgcgcccgcttcgccgaaaccctgatagaaac

SEQ ID NO: 315637 - DNA, 75 bp, synthetic construct
  source 1..75: mol_type = other DNA
ttatcttgatgagcgtaaagtgatgatgcaggaatgggcggataagcttgagggatgggtaaaaagcactgccaa

SEQ ID NO: 315638 - DNA, 75 bp, synthetic construct
  source 1..75: mol_type = other DNA
ttcgtcgcacatacaaccatgcaacttatcttgatgagcgtaaagtgatgatgcaggaatgggcggataagcttg

SEQ ID NO: 315639 - DNA, 75 bp, synthetic construct
  source 1..75: mol_type = other DNA
ttcacctcgggaattaacctggatgttgataacaacagcccgtactacccgattcgttcaaaagtgactggctaa

SEQ ID NO: 315640 - DNA, 75 bp, synthetic construct
  source 1..75: mol_type = other DNA
aaggttgctgctacgataatgcctgcgtggaaagcttctttcattcgctgaaagtggaatgtatccatggagaac

SEQ ID NO: 315641 - DNA, 75 bp, synthetic construct
  source 1..75: mol_type = other DNA
gaaagcgacccgcaagtactgtccggtcagttaccgtgagcacggcttgcccgtgtcagagaatctgcagaaaca

SEQ ID NO: 315642 - DNA, 75 bp, synthetic construct
  source 1..75: mol_type = other DNA
tttgaattataaagtagctaaggtagtcgccgactcccctagtggtaagaaatataatatcgaagtatttttgat

SEQ ID NO: 315643 - DNA, 75 bp, synthetic construct
  source 1..75: mol_type = other DNA
attatatcgaatgtgattacattcgctggcggcggcacagttggtgtggcggtctcactcgggaacaatttgaaa

SEQ ID NO: 315644 - DNA, 75 bp, synthetic construct
  source 1..75: mol_type = other DNA
attatatcgaatgtgattacattcgatggcggcggcacagttggtgtggcggtctcaatccggaacaatttgaaa

SEQ ID NO: 315645 - DNA, 75 bp, synthetic construct
  source 1..75: mol_type = other DNA
gtcgccacgcatgacggcgcaactggcgtgcgatgtcatgcagatggcgctgtggcggcgtaagagcccccggca

SEQ ID NO: 315646 - DNA, 75 bp, synthetic construct
  source 1..75: mol_type = other DNA
tttagaggcgcagaatgtgtggataacctacaaaggaaagctaccaggaagaattactggttctctgaagactcc

SEQ ID NO: 315647 - DNA, 75 bp, synthetic construct
  source 1..75: mol_type = other DNA
aggaattgcagcagcaggcagaaaaccggaaagccagacttcttgcagatgctgaatccgtgattttgccgctgg

SEQ ID NO: 315648 - DNA, 75 bp, synthetic construct
  source 1..75: mol_type = other DNA
gtgattaaacgcatttatacggcagaggaattgcagcagcaggcagaaaatcggaaagccagacttcttgcagat

SEQ ID NO: 315649 - DNA, 75 bp, synthetic construct
  source 1..75: mol_type = other DNA
cgggtaacgctaaaacactggaacagtatgagttaacaaagaagcacggagtcatctggctttactctgaggacg

SEQ ID NO: 315650 - DNA, 75 bp, synthetic construct
  source 1..75: mol_type = other DNA
ttgtcgccatcaccagagatgcctccacgcttaatcccgaaggttttagcgtcgtcgaggttcccgatataacgg

SEQ ID NO: 315651 - DNA, 75 bp, synthetic construct
  source 1..75: mol_type = other DNA
atgcagcatttgataaatataacggcaggtaatccaaaaacggttgaacaatatcaattgacaaaggactttgat

SEQ ID NO: 315652 - DNA, 75 bp, synthetic construct
  source 1..75: mol_type = other DNA
gagatctgggaacgctacagtgttctggtcagtcgtgtagaaccagcaaatcctgaatggccggaaataccgcaa

SEQ ID NO: 315653 - DNA, 75 bp, synthetic construct
  source 1..75: mol_type = other DNA
ttgtcgccatcactaaagatgcctccacgcttaaccctgaaggttttagcgtcgttgaggttcccgatataacag

SEQ ID NO: 315654 - DNA, 75 bp, synthetic construct
  source 1..75: mol_type = other DNA
gaatcatgggaacgctacagcgttctggtcagccgtgtagatacggcaaagcctgaatggccacaaaagcctgaa

SEQ ID NO: 315655 - DNA, 75 bp, synthetic construct
  source 1..75: mol_type = other DNA
atgcagcatttaaagaacattaaatcaggtaatccaaaaacaaaagagcaatatcagctaacaaagaattttgat

SEQ ID NO: 315656 - DNA, 75 bp, synthetic construct
  source 1..75: mol_type = other DNA
gaactaattacatgctgaattcggaaactccggccagttggggcaagtcggtaaatatggatattcccgaaaccg

SEQ ID NO: 315657 - DNA, 75 bp, synthetic construct
  source 1..75: mol_type = other DNA
tcaacgccgtcttttacggcaagtccgactggctgaacatcccgacagaaattcacctgacgacaccgcttgccg

SEQ ID NO: 315658 - DNA, 75 bp, synthetic construct
  source 1..75: mol_type = other DNA
acgaacagcaacaacaggccgaatcacaaaaggccgcgttactttccgaagcagaaagcgttattcagccactgg

SEQ ID NO: 315659 - DNA, 75 bp, synthetic construct
  source 1..75: mol_type = other DNA
aacagacgaggaacgcacacgactggaagcatgggaacgctacagtgttctggtcaaccgtgtggatacggcaaa

SEQ ID NO: 315660 - DNA, 75 bp, synthetic construct
  source 1..75: mol_type = other DNA
atggcttacgatgaaaacaatattatcgttgccatcacccgggatgcctcaacgcttaatccggcgggattaagt

SEQ ID NO: 315661 - DNA, 75 bp, synthetic construct
  source 1..75: mol_type = other DNA
aacgcttaaccctgaaggttttagcgttgttgaggttcctgatattacctccaaccgacgtgctgacgactcagg

SEQ ID NO: 315662 - DNA, 75 bp, synthetic construct
  source 1..75: mol_type = other DNA
taaatggatgtttaaggatggtgccgtgattaagcggatttatacggcagatgaacaggagcaacaggcagaatc

SEQ ID NO: 315663 - DNA, 75 bp, synthetic construct
  source 1..75: mol_type = other DNA
ccgtaattttagatgcgcagaatgtgtggataacctacaaaggaaagctaccaggaagaattactggttctctga

SEQ ID NO: 315664 - DNA, 75 bp, synthetic construct
  source 1..75: mol_type = other DNA
agcgcgctgtcaggctgaatatggcgacggatgaggagcgtagccgactggaagcatgggaacgctacagtgtta

SEQ ID NO: 315665 - DNA, 75 bp, synthetic construct
  source 1..75: mol_type = other DNA
ccgggaatccgaaaacaccggaacaataccagctaactaaaaaagcgggcgtggtatggctcttttgcgaagatg

SEQ ID NO: 315666 - DNA, 75 bp, synthetic construct
  source 1..75: mol_type = other DNA
tatattctgttattcatcattgccaccctctttctgttaccgggtagcgtactggtgatcgccggaggaattgtc

SEQ ID NO: 315667 - DNA, 75 bp, synthetic construct
  source 1..75: mol_type = other DNA
tatattctgttattcatcattgccaccctctttctgttaccaggaagcatactggtgatcgctggaggaatagtt

SEQ ID NO: 315668 - DNA, 75 bp, synthetic construct
  source 1..75: mol_type = other DNA
gcatgggaacgctacagtgttctggtcagccgtgtggatacggcaaatcctgaatggccacaaaagcctgaataa

SEQ ID NO: 315669 - DNA, 75 bp, synthetic construct
  source 1..75: mol_type = other DNA
gagcggatttttcggttatagcctctatattctgttattcatcatcgccaccctctttctgttgccgggtagcat

SEQ ID NO: 315670 - DNA, 75 bp, synthetic construct
  source 1..75: mol_type = other DNA
ttgcctgtcttatttttgcgctggtcatttacgctatccacgctttcggtttattcgagctgctcaccgatttac

SEQ ID NO: 315671 - DNA, 75 bp, synthetic construct
  source 1..75: mol_type = other DNA
ctcatgaaggcattacgctgcgctttatttcagaactctgtctggcgggcctggcgctgtttatactcgtccagc

SEQ ID NO: 315672 - DNA, 75 bp, synthetic construct
  source 1..75: mol_type = other DNA
atgttgaagatggtactatttcagacaccagtaaagatgcggttaacggttcccagttgaaagaaaccaaagacg

SEQ ID NO: 315673 - DNA, 75 bp, synthetic construct
  source 1..75: mol_type = other DNA
tgttaatatggctgctggtgaaataaaagaaaacagcaccgatgccatcaacggctcacagctttatacgatcag

SEQ ID NO: 315674 - DNA, 75 bp, synthetic construct
  source 1..75: mol_type = other DNA
tttgccgtatggcgatgagccagatccgatcacccatctgcaaactgtcgcccgcatcatgcttattattattct

SEQ ID NO: 315675 - DNA, 75 bp, synthetic construct
  source 1..75: mol_type = other DNA
cgcgctgggcgcagattccattgcggatttagacaataccgtctctgtcggcaatagttcattaaaacgcaagat

SEQ ID NO: 315676 - DNA, 75 bp, synthetic construct
  source 1..75: mol_type = other DNA
ccgctgtttcagctttccgcaacgtaacaacagcagccgctggatttttgggaatcggcgccgggttgtatggaa

SEQ ID NO: 315677 - DNA, 75 bp, synthetic construct
  source 1..75: mol_type = other DNA
tggcacggttgttgttaacagtaacccgacaacagttgatgctcttaccagaagtgtcaatcagcaagttagccg

SEQ ID NO: 315678 - DNA, 75 bp, synthetic construct
  source 1..75: mol_type = other DNA
atcaaactgaacgtcgcccgtcatcagcaaggtcaaccattgtctttaccagcacatgttgccgatgctttccgc

SEQ ID NO: 315679 - DNA, 75 bp, synthetic construct
  source 1..75: mol_type = other DNA
gcctgcgcttcctcgcctttggtgaaacgcatctggctgacgtgttagtgagtaagcagttccataaagcgaaca

SEQ ID NO: 315680 - DNA, 75 bp, synthetic construct
  source 1..75: mol_type = other DNA
gcagaaaaactgccgctgcatattccgtttgctattgagttgtatgacaacgagggcaaagtaatcccgttgcag

SEQ ID NO: 315681 - DNA, 75 bp, synthetic construct
  source 1..75: mol_type = other DNA
ctgctggaagtggcaaaaaacatctgtgaatgtagcaaaccgcacatcgccaacggtccggtgcatgataaaatt

SEQ ID NO: 315682 - DNA, 75 bp, synthetic construct
  source 1..75: mol_type = other DNA
agcggctggcgcattcagcgccgcgcacggcaccgatgccaccagcaaaatcaccaacgtcaccgctggcgacca

SEQ ID NO: 315683 - DNA, 75 bp, synthetic construct
  source 1..75: mol_type = other DNA
tgaagatggtactatttcagacaccagtaaagatgcggttaacggttcccagttgaaagaaaccaaagacgatgt

SEQ ID NO: 315684 - DNA, 75 bp, synthetic construct
  source 1..75: mol_type = other DNA
attgccactaacaccagtaatattgccgataacactgccaacattgctaccaacaccagtaatattgccgataac

SEQ ID NO: 315685 - DNA, 75 bp, synthetic construct
  source 1..75: mol_type = other DNA
gttagtgcaatatcagaaggcgatagaagtatagcactgggtgcctcttcgtattcattgggccaatactcaatg

SEQ ID NO: 315686 - DNA, 75 bp, synthetic construct
  source 1..75: mol_type = other DNA
atgctattagtaagtcagtagcggataatcttggtggaggagcgaccgtcaattcacagggcgtcgtgacttccc

SEQ ID NO: 315687 - DNA, 75 bp, synthetic construct
  source 1..75: mol_type = other DNA
agtattacaggtggtgtaaatgctattgctcttggacaaggcagttatgccggtttagaaaatggcactgcaatt

SEQ ID NO: 315688 - DNA, 75 bp, synthetic construct
  source 1..75: mol_type = other DNA
ggaatccggcgacgggcagttacagcgttgccagcgaaacggcgaagagccgtggcaaaaaaagcgggcgcagta

SEQ ID NO: 315689 - DNA, 75 bp, synthetic construct
  source 1..75: mol_type = other DNA
ctgactgagacggtgactaatcttggtgaggatgcgctgaaatgggataaggacaatggtgtcttcactgcagct

SEQ ID NO: 315690 - DNA, 75 bp, synthetic construct
  source 1..75: mol_type = other DNA
accagcaaaatcaccaacgttaaagatggcgacctgacggctggcagcactgatgccgttaacggctctcagctg

SEQ ID NO: 315691 - DNA, 75 bp, synthetic construct
  source 1..75: mol_type = other DNA
cgctgaaatgggataaggacaatggtgtcttcactgcagctcatggcaacaataccgccagcaaaatcaccaaaa

SEQ ID NO: 315692 - DNA, 75 bp, synthetic construct
  source 1..75: mol_type = other DNA
attgcgctgggaaatgccgctaaggctgctggtattatgagcatcggtctcggtgataatgccaatgcgtcacaa

SEQ ID NO: 315693 - DNA, 75 bp, synthetic construct
  source 1..75: mol_type = other DNA
gacaaaataaatggaccgcaggcccattcattagacattactaacgaaagaaggtttgctgataacagaaccatg

SEQ ID NO: 315694 - DNA, 75 bp, synthetic construct
  source 1..75: mol_type = other DNA
gaaaaatggtatttatggcaatgttggcgacgccttagcggatctaaacacgaatacgatacaatgggacaacct

SEQ ID NO: 315695 - DNA, 75 bp, synthetic construct
  source 1..75: mol_type = other DNA
aggcacaacgggtacagggagtgttgctgtcggggcaagagctaatgccggagtggggagtactgcaattggctt

SEQ ID NO: 315696 - DNA, 75 bp, synthetic construct
  source 1..75: mol_type = other DNA
ggtgaccttaaggatgatgccctgctgtggaatgacgctaaaaatgcattcagtgcagctcatgacaaggataca

SEQ ID NO: 315697 - DNA, 75 bp, synthetic construct
  source 1..75: mol_type = other DNA
ttgcagtttgcggaagacgccagcccgatggcgcacccaatccgcccggatatggtcattgagatgaacaacttc

SEQ ID NO: 315698 - DNA, 75 bp, synthetic construct
  source 1..75: mol_type = other DNA
acttggctcatgttccgtcaatgccggagagactatcgaggtcgatctgggcgacgtatttgcggctaactttcg

SEQ ID NO: 315699 - DNA, 75 bp, synthetic construct
  source 1..75: mol_type = other DNA
caatagtcgtggctcatatcaggttaactattgcatgtggctcatgtggtggacgctcgcgcgacccgccgaagt

SEQ ID NO: 315700 - DNA, 75 bp, synthetic construct
  source 1..75: mol_type = other DNA
catttcatcagttttcgagttggcagtagcgacacttagagctgatagtgatcctgtctggcccgtgcgcaaggc

SEQ ID NO: 315701 - DNA, 75 bp, synthetic construct
  source 1..75: mol_type = other DNA
gaccgggtcatatgctgaatggtgacaatacagacgaaaataaacagcatgatcttcaacttttcccgtataaat

SEQ ID NO: 315702 - DNA, 75 bp, synthetic construct
  source 1..75: mol_type = other DNA
cagcagctaatacggcagcagcaatagccggtgctacaggtaatgccagtaaggataccgggaatgataatagct

SEQ ID NO: 315703 - DNA, 75 bp, synthetic construct
  source 1..75: mol_type = other DNA
caactgtaaacatccagttgcagacgagtgagaataacagctcatggaccactatttatgatagtggcgcactgg

SEQ ID NO: 315704 - DNA, 75 bp, synthetic construct
  source 1..75: mol_type = other DNA
taacgacgcatccaacacctttgagctgatcgccaaagagtggctgcagatgaaagactgggccgaaattaccaa

SEQ ID NO: 315705 - DNA, 75 bp, synthetic construct
  source 1..75: mol_type = other DNA
ttatcttgatgagcgtaaagtgatgatgcaggaatgggctgatatgttggacaaatgggtagcaggattcaagta

SEQ ID NO: 315706 - DNA, 75 bp, synthetic construct
  source 1..75: mol_type = other DNA
ttcgtcgcacatacaaccatgcaacttatcttgatgagcgtaaagtgatgatgcaggaatgggctgatatgttgg

SEQ ID NO: 315707 - DNA, 75 bp, synthetic construct
  source 1..75: mol_type = other DNA
ctgccaagccgaaagaaaaactctatcgactcaatgatttcaacggtctctacctcgaagtgaaacccaatggca

SEQ ID NO: 315708 - DNA, 75 bp, synthetic construct
  source 1..75: mol_type = other DNA
atgctcactgatacgcaatgccgcactgctaaagcgaaagaaaaactctatcggctcaatgatttcaacggtctc

SEQ ID NO: 315709 - DNA, 75 bp, synthetic construct
  source 1..75: mol_type = other DNA
ttatcttgatgagcgaaaggttatgatgcaggaatgggctgataagcttgaagaatgggtaggaagcgcgcgcag

SEQ ID NO: 315710 - DNA, 75 bp, synthetic construct
  source 1..75: mol_type = other DNA
caacgataatgtggcaaccaacaccaccaatatcgccacgaataccaccaacatcaccaacctgactgacgctgt

SEQ ID NO: 315711 - DNA, 75 bp, synthetic construct
  source 1..75: mol_type = other DNA
ggtgcatgtggctgatgctttccgcgcggtgctgttggatgaaaaaatcgatccggcactggcggcagaaattct

SEQ ID NO: 315712 - DNA, 75 bp, synthetic construct
  source 1..75: mol_type = other DNA
gcgctttctatggggcatatggcgaaggcgaatggactatacagcctggcaatgggtgcaggaagtgctacttcg

SEQ ID NO: 315713 - DNA, 75 bp, synthetic construct
  source 1..75: mol_type = other DNA
ctgggagacaacgccagcgctggtgaaaccaactccatcgctataggtcaaggcagcgaggcaagcaaacttgat

SEQ ID NO: 315714 - DNA, 75 bp, synthetic construct
  source 1..75: mol_type = other DNA
ccgtaacccgcaggtagcttcacgtctgattgaaccgctgattcgcctgaaacgttatgatgccaaacgtcagga

SEQ ID NO: 315715 - DNA, 75 bp, synthetic construct
  source 1..75: mol_type = other DNA
atgattgttgcggtggacttcttcaacatgggcgcgatggagaataaaggtctgaatatctttaactccaaatat

SEQ ID NO: 315716 - DNA, 75 bp, synthetic construct
  source 1..75: mol_type = other DNA
cctgccgcgactggttccagctcagcctgaaagaaggtttaaccgtcttccgcgatcaggaattcagctctgacc

SEQ ID NO: 315717 - DNA, 75 bp, synthetic construct
  source 1..75: mol_type = other DNA
taacaccaccaatatcaccaacctgactgacgctgttaacggtctcggtgacgactccctgctgtggaacaaagc

SEQ ID NO: 315718 - DNA, 75 bp, synthetic construct
  source 1..75: mol_type = other DNA
atgcatcacccaaattaaacaaccctcaactattggctataatatacttaataccttttggatacttgattgtag

SEQ ID NO: 315719 - DNA, 75 bp, synthetic construct
  source 1..75: mol_type = other DNA
cgcaaaattgttaatatggctgccggtgccataagcaacaccagtaccgatgccatcaacggctcacagctttat

SEQ ID NO: 315720 - DNA, 75 bp, synthetic construct
  source 1..75: mol_type = other DNA
gagcgtcttgatgaagtgaaatctcgcgctgctgctgaaaggttcatgagggatttgctaaagcactataaaggc

SEQ ID NO: 315721 - DNA, 75 bp, synthetic construct
  source 1..75: mol_type = other DNA
gccgcagcaataaccccctgccccagagacaaaccgccatcacccgccggtaaactctgtggaaagagcaatgtg

SEQ ID NO: 315722 - DNA, 75 bp, synthetic construct
  source 1..75: mol_type = other DNA
gagttgcctgtaaaaattgagtttgttcttggtaagaaaataattaatctttatgaaatagacgatctctgtgca

SEQ ID NO: 315723 - DNA, 75 bp, synthetic construct
  source 1..75: mol_type = other DNA
acggtcaggtatcaacgaaaacggctgaatccagtttcgtggcggatgataaaaatgcggtactcaccgcaacat

SEQ ID NO: 315724 - DNA, 75 bp, synthetic construct
  source 1..75: mol_type = other DNA
agcttgccgtagtggggagtcgggcgcattcatggtatggcgaacgctggggacgattattttgcgaaactctgg

SEQ ID NO: 315725 - DNA, 75 bp, synthetic construct
  source 1..75: mol_type = other DNA
ccctgaaaattcattttattcaccagatcagcaagacgtggcattgccatttcctgagctcctggctaacgtagg

SEQ ID NO: 315726 - DNA, 75 bp, synthetic construct
  source 1..75: mol_type = other DNA
gtgcgattcttgtgacggaaccggaagaaattctggaaaacttgcaatttggattgcactggttgccagacgccc

SEQ ID NO: 315727 - DNA, 75 bp, synthetic construct
  source 1..75: mol_type = other DNA
ttcgcaagacattcggcaatcgctatgacctgacgcgagatgttgacggtttctactgtcgtgaaattgtgaaac

SEQ ID NO: 315728 - DNA, 75 bp, synthetic construct
  source 1..75: mol_type = other DNA
gggtgcgccagcgttacagcaaccgctacgacctctctagggatcaggaagggttctactgccgggaagtggtta

SEQ ID NO: 315729 - DNA, 75 bp, synthetic construct
  source 1..75: mol_type = other DNA
agccctgaaaattcattttattcaccagatcagcaagacgtggcattgccatttcctgagctcctggctaacgta

SEQ ID NO: 315730 - DNA, 75 bp, synthetic construct
  source 1..75: mol_type = other DNA
aagaaaaaatgactaaaatgccaaccggtgctgtggatgcgttaaagcaagaattaacccgacgcatcagtaaac

SEQ ID NO: 315731 - DNA, 75 bp, synthetic construct
  source 1..75: mol_type = other DNA
acaattttaagatccgtggataaagagtctgctcaaaagttcgttcaggaaacgctgaaggaagtctgggaaacc

SEQ ID NO: 315732 - DNA, 75 bp, synthetic construct
  source 1..75: mol_type = other DNA
cgcattaatcgctatggcactgtgcctgatctcagccttcgctggcggtcatgtgggcttaatagccctgacttt

SEQ ID NO: 315733 - DNA, 75 bp, synthetic construct
  source 1..75: mol_type = other DNA
tgcgccagcgttacggcaatcgctatgacctgacaagggatgttgatggctactactgccgcgaaattgtgaaac

SEQ ID NO: 315734 - DNA, 75 bp, synthetic construct
  source 1..75: mol_type = other DNA
caaaatgggcggtttcaacctgaaataccgctatgaagaagacaacagcccgctgggtgtgatcggttctttcac

SEQ ID NO: 315735 - DNA, 75 bp, synthetic construct
  source 1..75: mol_type = other DNA
acagttcgtctctaatactggcgatgatcttgacgtgattggcgtggcgtttgaggcaggaatggcatgtgttca

SEQ ID NO: 315736 - DNA, 75 bp, synthetic construct
  source 1..75: mol_type = other DNA
caattaagcaaatggttgccaacgataaaaaggtgacagtctcaaatttgagtgggatttttcaggtaaccgaag

SEQ ID NO: 315737 - DNA, 75 bp, synthetic construct
  source 1..75: mol_type = other DNA
ctctctgacaatcaccgaaaaagggtatttccactctccggcgaccggacagttaatgctcgatcacccgatggt

SEQ ID NO: 315738 - DNA, 75 bp, synthetic construct
  source 1..75: mol_type = other DNA
aagctacactccctgtctatgatcgcaataatctgataccgcgaattgttcatttaggttttggcgcatttcacc

SEQ ID NO: 315739 - DNA, 75 bp, synthetic construct
  source 1..75: mol_type = other DNA
attcagaaggcagtacaaagtagtgctgaagggacagcgcgcgtccagtcattgctggcaattaaggcgatcttt

SEQ ID NO: 315740 - DNA, 75 bp, synthetic construct
  source 1..75: mol_type = other DNA
acagcgtgatgacatcattatgtatcgccagactggcgaactgaaatatggcctcaactacccggatgcaaaggg

SEQ ID NO: 315741 - DNA, 75 bp, synthetic construct
  source 1..75: mol_type = other DNA
tgcaaagtcaggtttattatacgaggttaatccttccccggcattcaaagagaaaatagtcccctttgcatggga

SEQ ID NO: 315742 - DNA, 75 bp, synthetic construct
  source 1..75: mol_type = other DNA
gcatttacggtgatgtcatgcgataacatgcctgagaatggtcatgttatgcgtgacgttgtcacttcttatgcg

SEQ ID NO: 315743 - DNA, 75 bp, synthetic construct
  source 1..75: mol_type = other DNA
tccagtagtaccgttatggaattgctcaaattgttgcaggaccgtagtgacctgacgttgctaactaactcggcg

SEQ ID NO: 315744 - DNA, 75 bp, synthetic construct
  source 1..75: mol_type = other DNA
gaagcgattcatgttctggctcagtcagaaattaaagtcgtttcaacgggtggggaactaaacaaaaatacactt

SEQ ID NO: 315745 - DNA, 75 bp, synthetic construct
  source 1..75: mol_type = other DNA
cttgatattaacagcggcgcgctggactctaacgaagcggaagctgaaatcaaaaagacaatgatccgtcaggcg

SEQ ID NO: 315746 - DNA, 75 bp, synthetic construct
  source 1..75: mol_type = other DNA
tttgcaagattacgctaaccgattaattgcacgctatagcaacccggcgttacgtcatcgaacctggcagattgc

SEQ ID NO: 315747 - DNA, 75 bp, synthetic construct
  source 1..75: mol_type = other DNA
cgacgctgaaagtgcagggcgttgatttgcaagattacgctaaccgattaattgcacgctatagcaacccggcgt

SEQ ID NO: 315748 - DNA, 75 bp, synthetic construct
  source 1..75: mol_type = other DNA
atgtttgagtcttatatggcagaacgtcttcgccgccgctgggtgcgcctgcgcttatatcgtttccccggttct

SEQ ID NO: 315749 - DNA, 75 bp, synthetic construct
  source 1..75: mol_type = other DNA
agcgcggtgctgccactgtgttcgcaacatcccggtcagtgtggccttttccctctggagaaaagtctggatgcg

SEQ ID NO: 315750 - DNA, 75 bp, synthetic construct
  source 1..75: mol_type = other DNA
ctttggcatgactattgcggcggcggcagaaatgcccgcgctgattatggcagaagtgacgcccgaacgtgtgcg

SEQ ID NO: 315751 - DNA, 75 bp, synthetic construct
  source 1..75: mol_type = other DNA
gatctttcggttaaatcggcgcaatttctggagggggaatttcttgcatgtttactgcgggaaagtaagcgtaac

SEQ ID NO: 315752 - DNA, 75 bp, synthetic construct
  source 1..75: mol_type = other DNA
cggtctgatgacctgttatgacttacgctttccagagctggcgctggcacaggcattacagggagctgaaatcct

SEQ ID NO: 315753 - DNA, 75 bp, synthetic construct
  source 1..75: mol_type = other DNA
accagtaagaccaatccggttgccccctttgaaccagaagtcaaacgtcaggctgtcatggcactctgtacacga

SEQ ID NO: 315754 - DNA, 75 bp, synthetic construct
  source 1..75: mol_type = other DNA
gttgccgttgaacattatcttaaccacggctgctgcctggcgtttaccagcagaactctgggttatccctgcacc

SEQ ID NO: 315755 - DNA, 75 bp, synthetic construct
  source 1..75: mol_type = other DNA
acaggctgatagcgacgctgatgaaggcgcgacaggaaaaccgtctggagcgccagctgcagcagctgagttatg

SEQ ID NO: 315756 - DNA, 75 bp, synthetic construct
  source 1..75: mol_type = other DNA
ccagcttgatattgtagaaatcctcactgtccagcgtaatggtgaagatacagcattaagctgtcggttgaccct

SEQ ID NO: 315757 - DNA, 75 bp, synthetic construct
  source 1..75: mol_type = other DNA
gtcgcgtcatgcctatcatgcatgaaatctcgcatttacccggtggtcataagcctttgaattttattcataaac

SEQ ID NO: 315758 - DNA, 75 bp, synthetic construct
  source 1..75: mol_type = other DNA
atcctgctgggccctcctggtgtcggaaaaactcatctggccatagctcttggagtgaaagcggtggatgcggga

SEQ ID NO: 315759 - DNA, 75 bp, synthetic construct
  source 1..75: mol_type = other DNA
gcgtcgcgtcatgcctatcatgcatgaaatctcgcatttacccggtggtcataaacctttgaattttgttcataa

SEQ ID NO: 315760 - DNA, 75 bp, synthetic construct
  source 1..75: mol_type = other DNA
gccgcgcttcaccgtcagtattggcgtggcgcatcacgaaggaaatgaaagtatcgatgaactgtttaaacgggt

SEQ ID NO: 315761 - DNA, 75 bp, synthetic construct
  source 1..75: mol_type = other DNA
ccatgaaacaatgtgtcagaaacacacctgggaaattaatatgcttgggcgtcgcgttatgcctgtcatgcatga

SEQ ID NO: 315762 - DNA, 75 bp, synthetic construct
  source 1..75: mol_type = other DNA
aggctatcttccgatgaacagagaggaagccagcctgttcttccggctactgaaccgtcgatatgaaaaagcgag

SEQ ID NO: 315763 - DNA, 75 bp, synthetic construct
  source 1..75: mol_type = other DNA
atttattacggaatgagtggtgggattattgctcatgctgatggcatcacctttggacagccgctgggcgacaca

SEQ ID NO: 315764 - DNA, 75 bp, synthetic construct
  source 1..75: mol_type = other DNA
aagcatctctcagcagcttggaaattacggtacgacatttttcagtgccagtcgccaaagttactggaacacgtc

SEQ ID NO: 315765 - DNA, 75 bp, synthetic construct
  source 1..75: mol_type = other DNA
gacgctaacccacaataataagccgctgccgtttggggcgatggtgacatcagagagtagccagagtagcggcat

SEQ ID NO: 315766 - DNA, 75 bp, synthetic construct
  source 1..75: mol_type = other DNA
aatgggcttcgtgatagagagcgaaacgctggcacagttaattgataaacgctttattcagagccagtatgatgc

SEQ ID NO: 315767 - DNA, 75 bp, synthetic construct
  source 1..75: mol_type = other DNA
aattgctccgctatggcgtggaattatatgaactcaagccgacgcgtgaacaaagtagtacgttacacgatcgcg

SEQ ID NO: 315768 - DNA, 75 bp, synthetic construct
  source 1..75: mol_type = other DNA
atcggcgtgttcaggtgccgcttacccgtggtcagacggtggcgctggcttcgtggatcttctgggccggtgaaa

SEQ ID NO: 315769 - DNA, 75 bp, synthetic construct
  source 1..75: mol_type = other DNA
gtcgcgacttatcgtaacactgatttcttcggtctggtaaatggtctgaacttcgcggtgcagtatcaaggtaac

SEQ ID NO: 315770 - DNA, 75 bp, synthetic construct
  source 1..75: mol_type = other DNA
atgtctaaaggccgtgacctgcacgctgccggtggtgcagacaacccggcaggtgttgatgataaagatctggtt

SEQ ID NO: 315771 - DNA, 75 bp, synthetic construct
  source 1..75: mol_type = other DNA
gtcaacttgggaagaaatgacctgcttattcgcaccttccttagatctttatggcaaagttgatggcctgcacta

SEQ ID NO: 315772 - DNA, 75 bp, synthetic construct
  source 1..75: mol_type = other DNA
ataagccgctgccgtttggggcgatggtgacatcagagagtagccagagtagcggcattgttgcggataatggtc

SEQ ID NO: 315773 - DNA, 75 bp, synthetic construct
  source 1..75: mol_type = other DNA
cctggctgataacgtcgatttagataacgcggttgctaacgttgttcccactcgtggggcgatcgtgcgagcaga

SEQ ID NO: 315774 - DNA, 75 bp, synthetic construct
  source 1..75: mol_type = other DNA
taattcctgccctgctctccgcaggagctgctcatgcggcagaaatttataataaagacggcaataaattggatc

SEQ ID NO: 315775 - DNA, 75 bp, synthetic construct
  source 1..75: mol_type = other DNA
tttgactgcggtgaaggcacccagcatcagctactgcataccgcctttaaccctggaaaactggacaagattttt

SEQ ID NO: 315776 - DNA, 75 bp, synthetic construct
  source 1..75: mol_type = other DNA
gatgataaaggctgtcagcacttgttacacgaatgtcggtcgattttcccggcaaccgaactggcgagcgatttc

SEQ ID NO: 315777 - DNA, 75 bp, synthetic construct
  source 1..75: mol_type = other DNA
aaggttgtcagcacctgttacgtgaatgcaggtcaattttcccggcgactgaactggcgaatgatttcaccgtgt

SEQ ID NO: 315778 - DNA, 75 bp, synthetic construct
  source 1..75: mol_type = other DNA
aactgtttctgaattacctgcgaaagaaggatgtggaactaaacgatatcaaccgtaccaccgttacaggctggc

SEQ ID NO: 315779 - DNA, 75 bp, synthetic construct
  source 1..75: mol_type = other DNA
cagcgggcgtgccgacccgaacgcgtaatgtcacggcgatattgctaaatctgcaacatccaacacaagcagggc

SEQ ID NO: 315780 - DNA, 75 bp, synthetic construct
  source 1..75: mol_type = other DNA
cgatcatctctttggtttacccggcttgctgtgcagtcgttctatgtctggtattgtccaacccttaacgattta

SEQ ID NO: 315781 - DNA, 75 bp, synthetic construct
  source 1..75: mol_type = other DNA
cagattgtggccgccctgatggcaatcgacgcgggactggagcggctgcggcatgcggtgctggaaaaagggggg

SEQ ID NO: 315782 - DNA, 75 bp, synthetic construct
  source 1..75: mol_type = other DNA
gtggaaaacgaacagaaagcgattctgctgattgtgcgccgccttgccgaaactggcgagatggtgattggcagc

SEQ ID NO: 315783 - DNA, 75 bp, synthetic construct
  source 1..75: mol_type = other DNA
tgcgtatcgccacctttggcggcgtacaacctgccgcgctggcggaactgaccgaagttctcaatggccttctcg

SEQ ID NO: 315784 - DNA, 75 bp, synthetic construct
  source 1..75: mol_type = other DNA
atggaattaatttttttaggtacttcggccggtgtgccaacccgtacgcgcaatgtcacggcaatattgcttaac

SEQ ID NO: 315785 - DNA, 75 bp, synthetic construct
  source 1..75: mol_type = other DNA
taaccgcatatccactggaacatccgctggaatgttacggctatcgcgtagaagaacatgataaacctggtgcgt

SEQ ID NO: 315786 - DNA, 75 bp, synthetic construct
  source 1..75: mol_type = other DNA
tgtatgcagaactctcgttatacatttcattatactggctttccccctggcgatatcgatgaacgaagttggatg

SEQ ID NO: 315787 - DNA, 75 bp, synthetic construct
  source 1..75: mol_type = other DNA
cgttgcttttaacgctcttgctgacgatgctaatcaggggtccggtaaaattacttttaaaggtgaagttatcga

SEQ ID NO: 315788 - DNA, 75 bp, synthetic construct
  source 1..75: mol_type = other DNA
atatcagggcgatatgcgtgacctgacacgcgaacaggcactggaaatccttgaggcggattactggttcggacc

SEQ ID NO: 315789 - DNA, 75 bp, synthetic construct
  source 1..75: mol_type = other DNA
gatggtgatgttaacagcactgaactgtacacagggtgaacgctatctggagctggcggaaaaacgcgaagccaa

SEQ ID NO: 315790 - DNA, 75 bp, synthetic construct
  source 1..75: mol_type = other DNA
accgggcgaagccatacgccgcgcagccgaagggctggaagagctgggaatgactcactttaaggcgttaaaggt

SEQ ID NO: 315791 - DNA, 75 bp, synthetic construct
  source 1..75: mol_type = other DNA
tattgagcttctacgctaccctgaaatagagaaaggcttatcaatcaataaaaaatcaaatttaaggcgtaaaac

SEQ ID NO: 315792 - DNA, 75 bp, synthetic construct
  source 1..75: mol_type = other DNA
acgcagggcgaacgctatctggagctggcggagaagcgcgaggcgaatgagtcgtttgtctacggctggatgaaa

SEQ ID NO: 315793 - DNA, 75 bp, synthetic construct
  source 1..75: mol_type = other DNA
cgcaagcaggctctggaaatcctcgaggctgattactggtatggtccacgcttcgatcaagtggcggccgtctca

SEQ ID NO: 315794 - DNA, 75 bp, synthetic construct
  source 1..75: mol_type = other DNA
agaaaggaaagtgtttcattctctgagacacggagtagcacagcttcttgatcgaaatcaaattccagaagacag

SEQ ID NO: 315795 - DNA, 75 bp, synthetic construct
  source 1..75: mol_type = other DNA
tatatgcagcccttttttgaaggaaaaaggacgtttgtcaggagtctgcatacaagtaaccttcgtgttgcacgt

SEQ ID NO: 315796 - DNA, 75 bp, synthetic construct
  source 1..75: mol_type = other DNA
ccagcattacagagcgtgctgatggtaaacgctctacgtggcacacgcagagatttacaagagctaaacgaaagg

SEQ ID NO: 315797 - DNA, 75 bp, synthetic construct
  source 1..75: mol_type = other DNA
aaaataatggcagtggtgaaaaacgtttctttgtgttgggttatgccgttaataaacgtgggttaaccaaacatg

SEQ ID NO: 315798 - DNA, 75 bp, synthetic construct
  source 1..75: mol_type = other DNA
ggaatcggggaaaagacggcgaacgggtaatgctgacggccctgaactgtacgcagggcgaccgttatctggacc

SEQ ID NO: 315799 - DNA, 75 bp, synthetic construct
  source 1..75: mol_type = other DNA
actttcacgcttaatgcggatgagcaaaaagacatgcgtatacacggaagggttgtcgcctctttggctgtgagg

SEQ ID NO: 315800 - DNA, 75 bp, synthetic construct
  source 1..75: mol_type = other DNA
ttcaaacacctctcccagcgcgaagtgcaaagcctgagtgcggcgatggcgaacatcacgcagatctccaacaag

SEQ ID NO: 315801 - DNA, 75 bp, synthetic construct
  source 1..75: mol_type = other DNA
atttgaatacagcgataatgctgcacattataaaatgatgatgggagaatattataaggctctgccgaatgatga

SEQ ID NO: 315802 - DNA, 75 bp, synthetic construct
  source 1..75: mol_type = other DNA
acgctgacggtcgatgagctggaaaccagcaacagcgcctatgcgatgcgtacaaacctttctgaatcagacaaa

SEQ ID NO: 315803 - DNA, 75 bp, synthetic construct
  source 1..75: mol_type = other DNA
tatcgcttacataaaaaaaaacagagaaaatctgaacatcacactttcagattttgaacttgaacaaatcatttc

SEQ ID NO: 315804 - DNA, 75 bp, synthetic construct
  source 1..75: mol_type = other DNA
cagactgactgaccaggcctggcatgtggtgatggtggaggctgttcattatatggaagtggactggcgcgacag

SEQ ID NO: 315805 - DNA, 75 bp, synthetic construct
  source 1..75: mol_type = other DNA
caggcgggcgacggtgacgccatcagccgctggacgccatatgacaagcccgtggtatcagcacagaaagaactg

SEQ ID NO: 315806 - DNA, 75 bp, synthetic construct
  source 1..75: mol_type = other DNA
acttcttataccggaggtattgatgctcctgcagcctcagccagcatgtataacaccttatggagagtaaacgga

SEQ ID NO: 315807 - DNA, 75 bp, synthetic construct
  source 1..75: mol_type = other DNA
atgattgcgtcaatattaacgtttatgggtggcgtggcattcggattcattatttgcctgtttatggtgattatg

SEQ ID NO: 315808 - DNA, 75 bp, synthetic construct
  source 1..75: mol_type = other DNA
actttcgagatctataaagtcttttgctcatggtctattttttcgctgtgggcatttttcggctggtatacctta

SEQ ID NO: 315809 - DNA, 75 bp, synthetic construct
  source 1..75: mol_type = other DNA
aaggcaaaagcgcgggatttttactgctggggttaacctgcggcatgggggtgatgactaaaggttttctcgccc

SEQ ID NO: 315810 - DNA, 75 bp, synthetic construct
  source 1..75: mol_type = other DNA
gcaacataaaacggagttggtggctctggggaacacgattgctaagggatatttcaaaaaacctgaatcattaaa

SEQ ID NO: 315811 - DNA, 75 bp, synthetic construct
  source 1..75: mol_type = other DNA
tgcatggttttagccgggaacactacaatcagctgaagaagtttagcccgggggtattacgtgaaattattgctg

SEQ ID NO: 315812 - DNA, 75 bp, synthetic construct
  source 1..75: mol_type = other DNA
ggaatcctggctaaatgaactgttttttgctgtgattgcgccgctataccgggttgtccccggacaatcagaaca

SEQ ID NO: 315813 - DNA, 75 bp, synthetic construct
  source 1..75: mol_type = other DNA
gatgcctcactggatgccttcgaacgcttctttaaaccggatggcatactggataccttctaccagcagaacctg

SEQ ID NO: 315814 - DNA, 75 bp, synthetic construct
  source 1..75: mol_type = other DNA
acttcaaagctcgcatggaatccctggctaaaaatgcaacaccaggtaacgtccaggcgcagacaaactatgtcc

SEQ ID NO: 315815 - DNA, 75 bp, synthetic construct
  source 1..75: mol_type = other DNA
caccatgaccggatatgcaggcggagttcagcgaaaagagtggttattgcgccacgaaggttatcttttgctgta

SEQ ID NO: 315816 - DNA, 75 bp, synthetic construct
  source 1..75: mol_type = other DNA
gcgcggataaccagacgtttcgcgtcatgctcggtgacatcaactacacgattaaagtcgtatggcgggacgagg

SEQ ID NO: 315817 - DNA, 75 bp, synthetic construct
  source 1..75: mol_type = other DNA
cctgctggaagatatcctcgaaacccgcgataccgccagtggtattgagacactcaactttatggaaccgcagag

SEQ ID NO: 315818 - DNA, 75 bp, synthetic construct
  source 1..75: mol_type = other DNA
catccacaaattatcgccaccattctggtgcatctgaagcgcgcccaggccgccgatattctggcgttgttcgat

SEQ ID NO: 315819 - DNA, 75 bp, synthetic construct
  source 1..75: mol_type = other DNA
ttgagcaagaagctgaacagtttgccgcactgaatatcaacgccaacgattatctgcgttcggtattggtcaaag

SEQ ID NO: 315820 - DNA, 75 bp, synthetic construct
  source 1..75: mol_type = other DNA
taacgaacttaatcaggactggagcgagcgccgggctgatttttgcctgatgcagagcatgcgcgaaaagcgtaa

SEQ ID NO: 315821 - DNA, 75 bp, synthetic construct
  source 1..75: mol_type = other DNA
atgtcatttaaatatcgggacagtccgctttattaccgggctgcgagggaggccttgcgccttgagcagtccggc

SEQ ID NO: 315822 - DNA, 75 bp, synthetic construct
  source 1..75: mol_type = other DNA
ggctttgcaccttgaacagtccggcgggtacgaccgggcgatgcaggtctgggccaaagcgaacgtcggtttgat

SEQ ID NO: 315823 - DNA, 75 bp, synthetic construct
  source 1..75: mol_type = other DNA
cccgtccccctcaccatgggctggcgctgctgtgtgggatgtttgcacttgccgccattatcctgcgtctttatc

SEQ ID NO: 315824 - DNA, 75 bp, synthetic construct
  source 1..75: mol_type = other DNA
atgcagtttatccagaataacaggacaaaaataagcgcagacttgcttcaaaagaataaactgtatcttaaagaa

SEQ ID NO: 315825 - DNA, 75 bp, synthetic construct
  source 1..75: mol_type = other DNA
atgtcatttaaataccgggacaatccactttattacagggctgcaagggaagctttgcgacttgaacaatccggc

SEQ ID NO: 315826 - DNA, 75 bp, synthetic construct
  source 1..75: mol_type = other DNA
ccgccattatccgcagcgtatcctgcgggagctggctccgcgctatctcacatggggaggcagcagctgtgtgga

SEQ ID NO: 315827 - DNA, 75 bp, synthetic construct
  source 1..75: mol_type = other DNA
ccgcagcgcatcctgcgcgaactggcaccgcgatatctcacatggggaggcagcagttgtgtggcatctgattaa

SEQ ID NO: 315828 - DNA, 75 bp, synthetic construct
  source 1..75: mol_type = other DNA
tggcgcagttcatgcctgccactgccgactggataagtcagctgatgccgggacttaacagccgtgagccgttta

SEQ ID NO: 315829 - DNA, 75 bp, synthetic construct
  source 1..75: mol_type = other DNA
gccgttgggttaatgcttggcgaattacgattcggtctgctcttctccctcgttcctgcctgttgcaatattgcg

SEQ ID NO: 315830 - DNA, 75 bp, synthetic construct
  source 1..75: mol_type = other DNA
atgaactggcctcaaatcaccctcatcatcctgcttgcctttggtctgggcgtaaccgccatcagacacggagaa

SEQ ID NO: 315831 - DNA, 75 bp, synthetic construct
  source 1..75: mol_type = other DNA
ccgcagcgcatcctgcgcgaactggcaccacgatatctcacatggggaggcagcagttgtgtggcatctggttaa

SEQ ID NO: 315832 - DNA, 75 bp, synthetic construct
  source 1..75: mol_type = other DNA
aaagatgtggaaccatctaaatacgtacatgttactgactacttaaatgatatatttgaaaaatcaaattgtatt

SEQ ID NO: 315833 - DNA, 75 bp, synthetic construct
  source 1..75: mol_type = other DNA
tggctatgatgggaaacattatggcgttactaaagagaattttatggttgtagaacaagggagttctcagggaag

SEQ ID NO: 315834 - DNA, 75 bp, synthetic construct
  source 1..75: mol_type = other DNA
cgacttatcgtaatactgatttcttcggtctggtaaatggtctgaacttcgcggtgcagtatcaaggtaacaacg

SEQ ID NO: 315835 - DNA, 75 bp, synthetic construct
  source 1..75: mol_type = other DNA
tgtggcggcttcttcagtcaggctaacgcggctcaacctccgcgagctgccctgcagtatcgcgatgaggtgatc

SEQ ID NO: 315836 - DNA, 75 bp, synthetic construct
  source 1..75: mol_type = other DNA
acggtggtcagggatgggttaatcgggataaaaaactggccgcatccaaagggttagatgccaccatctggtttg

SEQ ID NO: 315837 - DNA, 75 bp, synthetic construct
  source 1..75: mol_type = other DNA
gtgaaccattattttatattaattatggctatgatgggaaacattatggcgttcctaaagagaacttcatggttg

SEQ ID NO: 315838 - DNA, 75 bp, synthetic construct
  source 1..75: mol_type = other DNA
agtgctatcagcaaatgcatatgctttccgcgcaaaataatactgattacaagcggatgctgcgtattttccagg

SEQ ID NO: 315839 - DNA, 75 bp, synthetic construct
  source 1..75: mol_type = other DNA
gttcccaaattcagtcagggatatcagagcattcaggattgaacagtggtctgacttcacttcgtctataaaggg

SEQ ID NO: 315840 - DNA, 75 bp, synthetic construct
  source 1..75: mol_type = other DNA
ttccgcgtcttattgacaccattattggttgtttgattgctttcggcggaactgtctggctgtggccgcagtggc

SEQ ID NO: 315841 - DNA, 75 bp, synthetic construct
  source 1..75: mol_type = other DNA
ctggaaaaaatcgcccgccagcatccggataaccctgtagggcaattctgctactggcatttcagccgcatcgcc

SEQ ID NO: 315842 - DNA, 75 bp, synthetic construct
  source 1..75: mol_type = other DNA
accgcaatccatgcgcaattactcacgcatgaaaaatcaggttacggtaagtattaaccagcctctgaaatatga

SEQ ID NO: 315843 - DNA, 75 bp, synthetic construct
  source 1..75: mol_type = other DNA
gtgactataaaaccaactaaaaattatcataatcatctgacccgtatcgctacgttttgcgcgctgctgtattgc

SEQ ID NO: 315844 - DNA, 75 bp, synthetic construct
  source 1..75: mol_type = other DNA
tattggccgaaacggcaccatgaccggatatgcaggcggagttcagcgaaaagagtggttattgcgccacgaagg

SEQ ID NO: 315845 - DNA, 75 bp, synthetic construct
  source 1..75: mol_type = other DNA
agtttattgttgagcatattaatgccatgaccacgctggcgcgggaacaccgggcattgccacctgaactggcac

SEQ ID NO: 315846 - DNA, 75 bp, synthetic construct
  source 1..75: mol_type = other DNA
actgtctggctgtggccgcagtggcagagcgggttattgcgtaaaaacgcccatgacgctttagaagcctatcag

SEQ ID NO: 315847 - DNA, 75 bp, synthetic construct
  source 1..75: mol_type = other DNA
ctgcgcgtgctggctgatgacattctttaccatcgcctgccaacgcgttttacgatggaaaagcaaattggcgca

SEQ ID NO: 315848 - DNA, 75 bp, synthetic construct
  source 1..75: mol_type = other DNA
caaaatggctatggtgcgactcgcttgcggattgtgaatcgttccgtcggaactgtcgttgggttaatcattgca

SEQ ID NO: 315849 - DNA, 75 bp, synthetic construct
  source 1..75: mol_type = other DNA
ctgtataactcattgaatcaggcgatgcaggaaccggcgtttaacagccattatctggcagatatgaaactgtgg

SEQ ID NO: 315850 - DNA, 75 bp, synthetic construct
  source 1..75: mol_type = other DNA
agtcactaagtctgctgtaccgtgaactggcagattattgtgaagccaaatacagcctgcttacccagcacaccg

SEQ ID NO: 315851 - DNA, 75 bp, synthetic construct
  source 1..75: mol_type = other DNA
tctgaaatacgacgctaacaacatctacctggctggtcagtacacccagacctacaacgcaactcgcgtaggttc

SEQ ID NO: 315852 - DNA, 75 bp, synthetic construct
  source 1..75: mol_type = other DNA
gtgcccgcagtgacagaggatacgctggcgaaaatcgaacaacttaccggagtgcgcgatcctgctggcgttgcc

SEQ ID NO: 315853 - DNA, 75 bp, synthetic construct
  source 1..75: mol_type = other DNA
tctttcctgatgtctaaaggcaaggatttggtcggtaccgacggtgataaagatctggttaaatacgccgatgtt

SEQ ID NO: 315854 - DNA, 75 bp, synthetic construct
  source 1..75: mol_type = other DNA
tctttcctgatgtctaaaggcaaagacttaaccggaactgacggtgataaagatctggttaaatacgcagatgtt

SEQ ID NO: 315855 - DNA, 75 bp, synthetic construct
  source 1..75: mol_type = other DNA
tgggaaaccactatggacccggaaagccgtcgtatgctgcgcgttaccgttaaagatgcgattgctgccgaccag

SEQ ID NO: 315856 - DNA, 75 bp, synthetic construct
  source 1..75: mol_type = other DNA
tggtctgaactttgctgctcagtatcagggtaaaaatgaccgtactgacgtaactcaagctaatggtgatggttt

SEQ ID NO: 315857 - DNA, 75 bp, synthetic construct
  source 1..75: mol_type = other DNA
tgtgaaccttttcgtcagtgggtcattgaagatagttttgtcgccggacgccctgaatgggaaaaagcaggcgcc

SEQ ID NO: 315858 - DNA, 75 bp, synthetic construct
  source 1..75: mol_type = other DNA
gtgggatattccgatctgcttttgcgatggtttaccggctacgtggaacgctcgcaaccagccgaaaacggtttt

SEQ ID NO: 315859 - DNA, 75 bp, synthetic construct
  source 1..75: mol_type = other DNA
gaaagtggccggtgccgtggatgttgatgtggggggagtcctgacagaaaagattgccgcattgcgtaaatcggt

SEQ ID NO: 315860 - DNA, 75 bp, synthetic construct
  source 1..75: mol_type = other DNA
ccagaagggacgctggttgaggttgcattcacgggaggcagaccggataaaccctttatcaggcagacgctgccg

SEQ ID NO: 315861 - DNA, 75 bp, synthetic construct
  source 1..75: mol_type = other DNA
ccatgtactcagaaacccgcaatatgacgccatacggtaactcagcaaacaccatcgctaacaaaacccaaaact

SEQ ID NO: 315862 - DNA, 75 bp, synthetic construct
  source 1..75: mol_type = other DNA
cgacgcctcaggacagagctgccgaacctcggtaaagagcagatttttgttcgcctgaagccctggtgcgcataa

SEQ ID NO: 315863 - DNA, 75 bp, synthetic construct
  source 1..75: mol_type = other DNA
ttgtcaaaaagcgaaccaccaaacccccgcaggccaaagcactaccgtccggtaaagacaggagagctcattggg

SEQ ID NO: 315864 - DNA, 75 bp, synthetic construct
  source 1..75: mol_type = other DNA
atgggcgacgccgttgaaccgcgtcgtgcgtttatcgaagagaacgccctgaaagcggcgaatattgatatttaa

SEQ ID NO: 315865 - DNA, 75 bp, synthetic construct
  source 1..75: mol_type = other DNA
ggtggtagataacgctatcgacgaagcgctcgcgggtcactgtaaagaaattatcgtcactattcatgctgataa

SEQ ID NO: 315866 - DNA, 75 bp, synthetic construct
  source 1..75: mol_type = other DNA
cgcgaaaatcgtggttggcaaaattatcgatgctgcccgtgcccgtgaagctgcgcgtcgcgcgcgtgaaatgac

SEQ ID NO: 315867 - DNA, 75 bp, synthetic construct
  source 1..75: mol_type = other DNA
gcacggcagccagtggaagtttgatgtccacaccaatgccgagcaaaacctgttcgagccgattgttcgcgtgcg

SEQ ID NO: 315868 - DNA, 75 bp, synthetic construct
  source 1..75: mol_type = other DNA
gtctggttgacggtcttgattttgctgttcagtatcagggtaaaaacggtagtgctcatggcgaaggtatgacca

SEQ ID NO: 315869 - DNA, 75 bp, synthetic construct
  source 1..75: mol_type = other DNA
accgatatgttcccggaatttggtggcgactcctcggcgcagaccgacaactttatgaccaaacgcgccagcggt

SEQ ID NO: 315870 - DNA, 75 bp, synthetic construct
  source 1..75: mol_type = other DNA
cagcttcgagcaggcgctggactggctggtgaaagagtctcgtcgcggcctctccatccagcgttataaaggtct

SEQ ID NO: 315871 - DNA, 75 bp, synthetic construct
  source 1..75: mol_type = other DNA
atgggcgacgccgttgaaccgcgccgtgcgtttattgaagagaacgccctgaaagcggcgaatattgatatttaa

SEQ ID NO: 315872 - DNA, 75 bp, synthetic construct
  source 1..75: mol_type = other DNA
cgtggcttgctggaagaagatgcgtttatcgaacgtggcgagcgtcgtcagccggtagccagcttcgagcaggcg

SEQ ID NO: 315873 - DNA, 75 bp, synthetic construct
  source 1..75: mol_type = other DNA
ttgttcaccacgctgatgggcgacgccgttgaaccgcgccgtgcgtttattgaagagaacgccctgaaagcggcg

SEQ ID NO: 315874 - DNA, 75 bp, synthetic construct
  source 1..75: mol_type = other DNA
ataagatgcttgcttcccaggaagtggcgacgcttatcaccgcacttggttgtggtattggtcgtgacgaataca

SEQ ID NO: 315875 - DNA, 75 bp, synthetic construct
  source 1..75: mol_type = other DNA
ccgtcgtaaaggcgcgctggacttagctggcctgccgggcaaactggcggactgtcaggagcgcgacccggcgct

SEQ ID NO: 315876 - DNA, 75 bp, synthetic construct
  source 1..75: mol_type = other DNA
tgtctgagtacaacgcgacgcagaaaatgatcaatcgtatggagcgtcgttatccgaaagcaatgctgaaagagc

SEQ ID NO: 315877 - DNA, 75 bp, synthetic construct
  source 1..75: mol_type = other DNA
ggcacagctttcgggtggtcagcaacagcgcgtcagcatcgcgcgggcattgatgaacggcggtcaggtaattct

SEQ ID NO: 315878 - DNA, 75 bp, synthetic construct
  source 1..75: mol_type = other DNA
cgcgtgtggttgccttacagcacgatgtccgggcgagttatgggacagtcgtggcttaactcaattaccgtaaga

SEQ ID NO: 315879 - DNA, 75 bp, synthetic construct
  source 1..75: mol_type = other DNA
tgtcagcggttttaacgaggcgctgacgatggcatggcgggcgctggcagcgaataaaatgcgtactttactgac

SEQ ID NO: 315880 - DNA, 75 bp, synthetic construct
  source 1..75: mol_type = other DNA
cttttggtgaaagcctggtggcttatcgcccgcctatcgacacccgtagcgtcagtgagatgcgccagataccgc

SEQ ID NO: 315881 - DNA, 75 bp, synthetic construct
  source 1..75: mol_type = other DNA
cccgcgtttgtccgaaaccaacgcatatgattggcggttacgcgcagctggcctggggctttaactactacggca

SEQ ID NO: 315882 - DNA, 75 bp, synthetic construct
  source 1..75: mol_type = other DNA
ggcgctggcagcgaataaaatgcgtactttactgaccatgctggggattattatcggtattgcgtcggtggtttc

SEQ ID NO: 315883 - DNA, 75 bp, synthetic construct
  source 1..75: mol_type = other DNA
tcatgaagtcccggatttctggtattgggcagatggtgatccggagtggggagactggacacgcccacaatctgg

SEQ ID NO: 315884 - DNA, 75 bp, synthetic construct
  source 1..75: mol_type = other DNA
aagctacctgccggtaatgacctactgcgacaaccaggccttgcgtgaagagatgtatcgtgcttacagcacccg

SEQ ID NO: 315885 - DNA, 75 bp, synthetic construct
  source 1..75: mol_type = other DNA
ggatcagggggcgaaaatcctcgaaactctggcagaaatcaagaaactggttgccgtggtgccgtctccgtcctg

SEQ ID NO: 315886 - DNA, 75 bp, synthetic construct
  source 1..75: mol_type = other DNA
ttgacagcgccgaggcggaacagcaactcacgcgtttactttcactgcgccacggaaagaaggatttctttacct

SEQ ID NO: 315887 - DNA, 75 bp, synthetic construct
  source 1..75: mol_type = other DNA
tattggacgaaacggcacgatgacaggatatgcaggcggagtgcagcgaaaagagtggttattgcgccatgaagg

SEQ ID NO: 315888 - DNA, 75 bp, synthetic construct
  source 1..75: mol_type = other DNA
atgctgagattacttgaagaaaaaattgtcacgccactgggtccactgtgggtgatttgcgatgagcaatttcgc

SEQ ID NO: 315889 - DNA, 75 bp, synthetic construct
  source 1..75: mol_type = other DNA
ggcagcgatgctaaaacctggctgctggctcaggccgattttctggtgaaactcgccggacggaagctgtggagc

SEQ ID NO: 315890 - DNA, 75 bp, synthetic construct
  source 1..75: mol_type = other DNA
cctggatcggttgctacatcactcaaccacgctgaatatcaaaggagagagttaccggttaaaagagaaacgtaa

SEQ ID NO: 315891 - DNA, 75 bp, synthetic construct
  source 1..75: mol_type = other DNA
acaggctggttgccacgctgataaaggcgaagcaggaaaatcgtcttgaacgtcagctgcagcaactgagttatg

SEQ ID NO: 315892 - DNA, 75 bp, synthetic construct
  source 1..75: mol_type = other DNA
accgcctgaaaatggaacacctgagctatcacgttgaaaatctgcttgagcaggcagcaaagcaggaactgaact

SEQ ID NO: 315893 - DNA, 75 bp, synthetic construct
  source 1..75: mol_type = other DNA
aaaaaaaatagttgacgatgaaatatggaaagagaaaattcttggaaaagaagatgcaagcgttgccgaaatcat

SEQ ID NO: 315894 - DNA, 75 bp, synthetic construct
  source 1..75: mol_type = other DNA
cggcgtgaagccggaagaagtggactggcaggacaacggtctggaaggcaagctggatctggtggtgacgctgga

SEQ ID NO: 315895 - DNA, 75 bp, synthetic construct
  source 1..75: mol_type = other DNA
gctacttcaaacagaagggtgacacctttgccgatgggcatggccagcttctcaataccaaccgtgactgggagg

SEQ ID NO: 315896 - DNA, 75 bp, synthetic construct
  source 1..75: mol_type = other DNA
caggttatcgcgttctggtttattattatgttccttgttgtcgctattatatcgacaggattaatttacctatac

SEQ ID NO: 315897 - DNA, 75 bp, synthetic construct
  source 1..75: mol_type = other DNA
caggtaaaaacataacccttgggagattcaacaccattgatgaagcggctatagcttataaggcagcaaacatgg

SEQ ID NO: 315898 - DNA, 75 bp, synthetic construct
  source 1..75: mol_type = other DNA
gtgacgggaccggcaggcgaggaaatcttctgtgatgaacatggccgcgtgcgggtgaaatttaactgggaccgt

SEQ ID NO: 315899 - DNA, 75 bp, synthetic construct
  source 1..75: mol_type = other DNA
ccgtccagagcccgtgccggggaatttgccagtctgacgaacgcggattttgtcgcggctgttttcgtagtcggg

SEQ ID NO: 315900 - DNA, 75 bp, synthetic construct
  source 1..75: mol_type = other DNA
catccgcaggcgaacctgaaccgggaatggcaggtggtggcgagcgatcttcacggcgaacagccgcaggcggta

SEQ ID NO: 315901 - DNA, 75 bp, synthetic construct
  source 1..75: mol_type = other DNA
ttatcgaccaggctaaactggaggaggaaatgggcgacctgctgtttgccacggttaatctggctcgccatttag

SEQ ID NO: 315902 - DNA, 75 bp, synthetic construct
  source 1..75: mol_type = other DNA
ttgaactaccaccattttctaaaatcctgccagagcatgttgttcccgctgtaaccaaagcgttgagcgattgcc

SEQ ID NO: 315903 - DNA, 75 bp, synthetic construct
  source 1..75: mol_type = other DNA
aattacttggcactgaacaacggacttcaggtttccagagtattgatactcaaatgagcagtgactttaagggta

SEQ ID NO: 315904 - DNA, 75 bp, synthetic construct
  source 1..75: mol_type = other DNA
tgatctgagtccgtcagggtacggcagcgatcttattgttaccatcgaagaatccgatggctcaaagcggacatt

SEQ ID NO: 315905 - DNA, 75 bp, synthetic construct
  source 1..75: mol_type = other DNA
cgtgatatcgcctcgctgcgttctcaactcattcttggtgagtcttatacaacgggcgaaacctttgattctgtc

SEQ ID NO: 315906 - DNA, 75 bp, synthetic construct
  source 1..75: mol_type = other DNA
tgctgcttttaacggtgggatgaatttaggtgcatggcgactgcgtgcctcaggcaactacaactggatgaccga

SEQ ID NO: 315907 - DNA, 75 bp, synthetic construct
  source 1..75: mol_type = other DNA
gctgccatgctttcatataacgttaatggttatcacagtgaaagccctggcagaaaaaatgacagtatttatgcc

SEQ ID NO: 315908 - DNA, 75 bp, synthetic construct
  source 1..75: mol_type = other DNA
agtcggtacagtgaaggtaaccctacgctacccggtatttacgacgtaaatgtttatgttaatgatcaacccgtc

SEQ ID NO: 315909 - DNA, 75 bp, synthetic construct
  source 1..75: mol_type = other DNA
tgttgggggttatgccagctatgaatcaccgtggggaaccctggcaggttcagtttctgcaaatagcgataacag

SEQ ID NO: 315910 - DNA, 75 bp, synthetic construct
  source 1..75: mol_type = other DNA
aagttatttgaaaataccaaaacctcgctcaatatcgcggcttatcgttattcaacgcagaattatctggggctt

SEQ ID NO: 315911 - DNA, 75 bp, synthetic construct
  source 1..75: mol_type = other DNA
ttattccattggctacagcaatagtgcctcctggggcagctatagcattagtgctcagcgttcctggaatgaaga

SEQ ID NO: 315912 - DNA, 75 bp, synthetic construct
  source 1..75: mol_type = other DNA
ttgttcgcggcatcgaacaggaaggaaatatacgaattacctggattgaagagggcaaaccagtcagttgttttg

SEQ ID NO: 315913 - DNA, 75 bp, synthetic construct
  source 1..75: mol_type = other DNA
agttcagggacaatcggcaattatgaatatcgtgcgaagcgatggtaaaaatattccatttgcagcggatattta

SEQ ID NO: 315914 - DNA, 75 bp, synthetic construct
  source 1..75: mol_type = other DNA
tcaacaaagcccagaagcagaaaaaaatagcacaatctattattctgaatggaattcggtgtcagattcagtaac

SEQ ID NO: 315915 - DNA, 75 bp, synthetic construct
  source 1..75: mol_type = other DNA
gtaagcacggcaaacacattcgtgtgccggttctgccagaagaagaggcgctcattaagcgcaatgcagatgcgg

SEQ ID NO: 315916 - DNA, 75 bp, synthetic construct
  source 1..75: mol_type = other DNA
ccggtgaatggtaaaccggcgctgtttacgcatgacgaagtaatcacgctgttccacgagttcggtcatggtctg

SEQ ID NO: 315917 - DNA, 75 bp, synthetic construct
  source 1..75: mol_type = other DNA
cagaaaaaagcggttgataacgcactgcgtgattttgaactttctggcatcggcctgccgaaagaaaaacagcag

SEQ ID NO: 315918 - DNA, 75 bp, synthetic construct
  source 1..75: mol_type = other DNA
aatctctgccagccgttggcggaagtggacgatgtgctggggcgtatcttctccccggtcagccacctgaactcg

SEQ ID NO: 315919 - DNA, 75 bp, synthetic construct
  source 1..75: mol_type = other DNA
tcgcgtactacagcgaaaaacaaaaacagcacctctacagcatcagcgacgagcagctgcgtccgtacttcccag

SEQ ID NO: 315920 - DNA, 75 bp, synthetic construct
  source 1..75: mol_type = other DNA
ccggtgaatggtaaaccggcgctgttcactcacgacgaagtgatcactctgttccacgagttcggtcacggcctg

SEQ ID NO: 315921 - DNA, 75 bp, synthetic construct
  source 1..75: mol_type = other DNA
ccggtaaatggtaaaccggcgctgtttacccatgacggagtgatcaccctgttccacgagttcggtcacggcctg

SEQ ID NO: 315922 - DNA, 75 bp, synthetic construct
  source 1..75: mol_type = other DNA
gatctcacctcgttgtctgttgaggtggtcacttttttgttgaagaagtcggtgcttgccggtttaccgactgcc

SEQ ID NO: 315923 - DNA, 75 bp, synthetic construct
  source 1..75: mol_type = other DNA
gcgatgatgatcgtgatcccccgcatctccagtccggcactgactacacaggaaattgcagagatggacccggca

SEQ ID NO: 315924 - DNA, 75 bp, synthetic construct
  source 1..75: mol_type = other DNA
gatggacccggcagatctcactgccatgtcggttgaggttgtcacttttttgttgaagaagtcggtgcttgccgg

SEQ ID NO: 315925 - DNA, 75 bp, synthetic construct
  source 1..75: mol_type = other DNA
ctcaccgctatgtcggttgaggttgtcacttttttgttgaagaagtcggtgcttgccggtttaccgacagcctga

SEQ ID NO: 315926 - DNA, 75 bp, synthetic construct
  source 1..75: mol_type = other DNA
ccgctggcagatggatggctggcgcaacaacgcagaagtggcgcgcggaacaagccgttcgccggagatatggcc

SEQ ID NO: 315927 - DNA, 75 bp, synthetic construct
  source 1..75: mol_type = other DNA
gcgatgataaccgtgatcccccgcatctccagtccggcactgacttcacaggaaattgcagagatggacccggca

SEQ ID NO: 315928 - DNA, 75 bp, synthetic construct
  source 1..75: mol_type = other DNA
aggtacgggattttataatgtattgcgcgaagtggtgaaacactacagacgcggggaatctgtaatcaaggaaga

SEQ ID NO: 315929 - DNA, 75 bp, synthetic construct
  source 1..75: mol_type = other DNA
acattcaatttttcaatcacccaaaaatgtgtcagtctttttatatggttgcttttattccctttttatggcttc

SEQ ID NO: 315930 - DNA, 75 bp, synthetic construct
  source 1..75: mol_type = other DNA
tattagatcgattaaggattgaaatagtacctcttgagatacttcagaaaacaggcgttattggtgtatttatat

SEQ ID NO: 315931 - DNA, 75 bp, synthetic construct
  source 1..75: mol_type = other DNA
aattaccattcagcaaaaaaaaaaatagacaaaaaatactttatcaaaacatacataatagaatcaatgagaaac

SEQ ID NO: 315932 - DNA, 75 bp, synthetic construct
  source 1..75: mol_type = other DNA
ccattttatcatctgttgcacaggaaagagggccagctcccggacgataaatgtgacgccctgccgctgcgggca

SEQ ID NO: 315933 - DNA, 75 bp, synthetic construct
  source 1..75: mol_type = other DNA
ccgcatgtggtttcagagccgaaaataccggctgaaccgcgtaaaaaacgggatatcagtaagttggttgcggag

SEQ ID NO: 315934 - DNA, 75 bp, synthetic construct
  source 1..75: mol_type = other DNA
gcggggaatctgttattaaggaagagtgggtgaaggaactatgtcagcattgtcatggtaagggagaagtcagca

SEQ ID NO: 315935 - DNA, 75 bp, synthetic construct
  source 1..75: mol_type = other DNA
ttaccaaaatattactccccaaaatctccaaaattgagtgatgacgcaccggcgacaggctcgggtggtttaaca

SEQ ID NO: 315936 - DNA, 75 bp, synthetic construct
  source 1..75: mol_type = other DNA
cggcgtgcagagggtgtaagggtaaaggtattgtcctggatgaaaaaagaacccggcttcatggcacgcctgttt

SEQ ID NO: 315937 - DNA, 75 bp, synthetic construct
  source 1..75: mol_type = other DNA
tattagatcgattaaggatagaaatagtacctcttgagattcttcagaaaacaggtgttattggtgtatttacat

SEQ ID NO: 315938 - DNA, 75 bp, synthetic construct
  source 1..75: mol_type = other DNA
atgagccagaaaaccctgtttacaaagtctgcagtcgcagtggcacttatctccacccaggcctggtcggcaggc

SEQ ID NO: 315939 - DNA, 75 bp, synthetic construct
  source 1..75: mol_type = other DNA
tcagagcgtgaagatcaacgaaggtccatatcaatttgagtctgaaggtaaagcctggctgttcgggactaactt

SEQ ID NO: 315940 - DNA, 75 bp, synthetic construct
  source 1..75: mol_type = other DNA
aagggcagttgattgccgaaattgacgacctacctcagtgtaacgatttgcgtaatgccgaagctgcactcaacg

SEQ ID NO: 315941 - DNA, 75 bp, synthetic construct
  source 1..75: mol_type = other DNA
aacaattgagtaacactttcaatgaattaaggtttagtttactgttgcctgcagatctacccaaagggcgctatg

SEQ ID NO: 315942 - DNA, 75 bp, synthetic construct
  source 1..75: mol_type = other DNA
atgaacgagaaaactttaggtcaacgaattagagaaagacgcaaacaggttggtttaagtcaaaacgatttaagt

SEQ ID NO: 315943 - DNA, 75 bp, synthetic construct
  source 1..75: mol_type = other DNA
ttggccactgcgatctgaaagacaacctcgacaacattttgaagatgatcgatctcggcgcgtatgtgcagttcg

SEQ ID NO: 315944 - DNA, 75 bp, synthetic construct
  source 1..75: mol_type = other DNA
tgccggtctgaaccactggtatcacctcgatatgaattatcgtggtctgatcaacatgctgattttctgcggttg

SEQ ID NO: 315945 - DNA, 75 bp, synthetic construct
  source 1..75: mol_type = other DNA
tgacaaaatcgtccgctctacccacggggtaaactgcaccggctcctgcagctggaaaatctacgtcaaaaacgg

SEQ ID NO: 315946 - DNA, 75 bp, synthetic construct
  source 1..75: mol_type = other DNA
cggtgaaatccctgaaagagggttcaatccgttttgctgcggaacagccggaaaacggcaaaaaccatccgcgta

SEQ ID NO: 315947 - DNA, 75 bp, synthetic construct
  source 1..75: mol_type = other DNA
gcgctttgatgacgggctggagttcacgccagccataaagattggctgcatgatgtttatcgctcacctgtatga

SEQ ID NO: 315948 - DNA, 75 bp, synthetic construct
  source 1..75: mol_type = other DNA
ctgacttataccctgcttgaaagcctgctctgtgaaatcgagttcgcgctgaaagaagatgacctgcgtttcaat

SEQ ID NO: 315949 - DNA, 75 bp, synthetic construct
  source 1..75: mol_type = other DNA
cctaacccagaaaaccgactccgtattgccatgacagcgcaggttacactccttattgaagaagccaaaaacaca

SEQ ID NO: 315950 - DNA, 75 bp, synthetic construct
  source 1..75: mol_type = other DNA
acaccattggcaagaacagttactacccggacgaaaagcgtattgcgatgcttcatgcactacgcgaccgtgggt

SEQ ID NO: 315951 - DNA, 75 bp, synthetic construct
  source 1..75: mol_type = other DNA
gaattagaagataaagttgaaaactttaatcgtttatttgaagagttactggttaccagaaagaaactaaccccc

SEQ ID NO: 315952 - DNA, 75 bp, synthetic construct
  source 1..75: mol_type = other DNA
taggcttaagtcaaaacggtttaagcaaagctgctggcgtatctggctcatcaatttcattatgggaaagtgacc

SEQ ID NO: 315953 - DNA, 75 bp, synthetic construct
  source 1..75: mol_type = other DNA
agctggtaccagacctgacggattatcagtggtacaaaggatatgcagatgtcattgataaactggttacaaagt

SEQ ID NO: 315954 - DNA, 75 bp, synthetic construct
  source 1..75: mol_type = other DNA
ctcctggttcaggacgcagagccaaacttcgatgtaaatggcaactctccggtaactcaggatggttggataagc

SEQ ID NO: 315955 - DNA, 75 bp, synthetic construct
  source 1..75: mol_type = other DNA
tattgaacccttgcttgaccgcttaccgggcagtctttccgggggcgaaaaacagcgcgtggcgattggtcgggc

SEQ ID NO: 315956 - DNA, 75 bp, synthetic construct
  source 1..75: mol_type = other DNA
agcccgtgggccagggatgaactggcaatcaaacctgacctgtggctatacgcgcaaattaaaagtgtgtcgata

SEQ ID NO: 315957 - DNA, 75 bp, synthetic construct
  source 1..75: mol_type = other DNA
gcgctatgtattagctgctgatttcaaaaataactattggcccaacataccaaacactcaggttggcgtatatgg

SEQ ID NO: 315958 - DNA, 75 bp, synthetic construct
  source 1..75: mol_type = other DNA
cgccgcgaccaggagaacgaggaaattgcgctaacggtagggaagctgcgcgttgagctggaagctgcagagaag

SEQ ID NO: 315959 - DNA, 75 bp, synthetic construct
  source 1..75: mol_type = other DNA
cgccgcgaccaggagaacgaggatattgcgctaacggtagggaagctgcgtgttgagctggaagcatcagagaag

SEQ ID NO: 315960 - DNA, 75 bp, synthetic construct
  source 1..75: mol_type = other DNA
aagccttggggtaacctcatttggtatccgcgtattcagcacttcctctgtgagtcacgttgcaatctatttggg

SEQ ID NO: 315961 - DNA, 75 bp, synthetic construct
  source 1..75: mol_type = other DNA
tgtctctgcgtttaagccagaaacgcagttacagtatgttgggcacctgaagccagggatttatatcaaggcggg

SEQ ID NO: 315962 - DNA, 75 bp, synthetic construct
  source 1..75: mol_type = other DNA
ggatattccgcgtaaacgcgaactgttgccttatctgcaacggctgacacgggaaatcaacattccgatgttgta

SEQ ID NO: 315963 - DNA, 75 bp, synthetic construct
  source 1..75: mol_type = other DNA
ttgccgaaagagcaacaaagcagcattctgaaagtaacggtactggaacatcatccgcgttacgcgatgaccgcg

SEQ ID NO: 315964 - DNA, 75 bp, synthetic construct
  source 1..75: mol_type = other DNA
agcccgtgggccagggatgaactggcgatcaaacctggcctgtggctatacgcgcaaattaaaagtgtctcgata

SEQ ID NO: 315965 - DNA, 75 bp, synthetic construct
  source 1..75: mol_type = other DNA
taatagagataattaagcgcaatataacggttatggatcgttatactgatttagtaactgcacaaatggatctgg

SEQ ID NO: 315966 - DNA, 75 bp, synthetic construct
  source 1..75: mol_type = other DNA
gtagtggataccacgcactcgtttaatctggcgctggttatcgcggcctgtgtgacgttcaccggggcgctgtgt

SEQ ID NO: 315967 - DNA, 75 bp, synthetic construct
  source 1..75: mol_type = other DNA
tttattaactattcatcattcaataaactttatgttgcgattacaagggctaaatatcaggttgcttttgtgact

SEQ ID NO: 315968 - DNA, 75 bp, synthetic construct
  source 1..75: mol_type = other DNA
gaaaaaggtcaaatacttgctgatgtattaaaggagcagaagaaaggtgatttcagtatagatgtgaaagtagta

SEQ ID NO: 315969 - DNA, 75 bp, synthetic construct
  source 1..75: mol_type = other DNA
tggctatcaccggcgcggcaggagccaggggaatttatgccatgaccaacagccagatcgacctcacgagcgatc

SEQ ID NO: 315970 - DNA, 75 bp, synthetic construct
  source 1..75: mol_type = other DNA
accacgctggcacgacgtcatgtccagaagctggtaccagacctgaccgattatcagtggtataaggggtatgcg

SEQ ID NO: 315971 - DNA, 75 bp, synthetic construct
  source 1..75: mol_type = other DNA
ttgcgggtaataaaccgcaacggattcgtcgtattcagacagtaacgctggttttattatttatggcggggatcg

SEQ ID NO: 315972 - DNA, 75 bp, synthetic construct
  source 1..75: mol_type = other DNA
taaaatagagatttttggaacaccgtatggggctcctgatgatattctaacaaaaaatttaacttttaggaggaa

SEQ ID NO: 315973 - DNA, 75 bp, synthetic construct
  source 1..75: mol_type = other DNA
cgttggagtgcgcctgcgttggttgtcgcaattcttcatgaacgtatggaccttatggtcagactaacagagagg

SEQ ID NO: 315974 - DNA, 75 bp, synthetic construct
  source 1..75: mol_type = other DNA
ttccacattgcagaacagcaagttgacggcacaagtgactatctcaaggatggagaatggcctattgataatgga

SEQ ID NO: 315975 - DNA, 75 bp, synthetic construct
  source 1..75: mol_type = other DNA
gttttgtaaaaatgatgatggaagtgtatgtggaaaagtaattgaatggttcttctttgaagaaaaatccatatt

SEQ ID NO: 315976 - DNA, 75 bp, synthetic construct
  source 1..75: mol_type = other DNA
atttacttagtcctaatacacacacaactaatattttattagataggtatgatatatctaatatatttagtgggg

SEQ ID NO: 315977 - DNA, 75 bp, synthetic construct
  source 1..75: mol_type = other DNA
aagaaagaaagggcagcgatatttaaatacttggcatggaactcctataaaatttcttggaaaagatattaaaga

SEQ ID NO: 315978 - DNA, 75 bp, synthetic construct
  source 1..75: mol_type = other DNA
ggcgtgttcagagtggaacgacattcgcgataccgtcggcaataacattggggtgtacgacaaccccaatgattt

SEQ ID NO: 315979 - DNA, 75 bp, synthetic construct
  source 1..75: mol_type = other DNA
accgtatggtaatgctgttcaccaacagccataccatccgcgacgttattctgttcccggcgatgcgtccggtaa

SEQ ID NO: 315980 - DNA, 75 bp, synthetic construct
  source 1..75: mol_type = other DNA
cgcactggaacatggcttaccgccgacagccggtctgggaattggtatcgaccgtatggtaatgctgttcaccaa

SEQ ID NO: 315981 - DNA, 75 bp, synthetic construct
  source 1..75: mol_type = other DNA
cgccgctggaagagaaggtgtttattgccgccgcgcttgcgcataaccagaccgggcgcccaatctccacgcata

SEQ ID NO: 315982 - DNA, 75 bp, synthetic construct
  source 1..75: mol_type = other DNA
ttggtcactgcgatctgaaagacaacctcgacaacattttgaagatgatcgatctcggcgcgtacgtgcagttcg

SEQ ID NO: 315983 - DNA, 75 bp, synthetic construct
  source 1..75: mol_type = other DNA
atcggctccagcgaaggaaagattacgccgctagaagagaaggtgtttattgccgccgcgctggcgcataaccag

SEQ ID NO: 315984 - DNA, 75 bp, synthetic construct
  source 1..75: mol_type = other DNA
agactagcagatgatgtaaggctattgcgtcaggaggaacaggaaaggcgaaaaaatatagaaaagctaattcag

SEQ ID NO: 315985 - DNA, 75 bp, synthetic construct
  source 1..75: mol_type = other DNA
agaaaccagactggcagatgatgtaaggctcttgcgccaggaggaacgggaaaggcggaaaaatatagaaaagtt

SEQ ID NO: 315986 - DNA, 75 bp, synthetic construct
  source 1..75: mol_type = other DNA
aggctggcagatgatgtaaagctattgcgccaggaggaacaggaaaggcggaaaaatatagaaaagttaattcag

SEQ ID NO: 315987 - DNA, 75 bp, synthetic construct
  source 1..75: mol_type = other DNA
aaagaccatactgccatcacgcctctgtccgggttgatgaaaaagagcgtcaggtccggtgcaaaatatgcggtg

SEQ ID NO: 315988 - DNA, 75 bp, synthetic construct
  source 1..75: mol_type = other DNA
atggaaataaaaccagaagatgagttaagcaatattgttttatttccggtaaaagaggatgacccacgtaatcag

SEQ ID NO: 315989 - DNA, 75 bp, synthetic construct
  source 1..75: mol_type = other DNA
gttaattttctttatgagccatcggaaagaccatattgccatcacgcctctgtccgggttgagaaaaagagcgtc

SEQ ID NO: 315990 - DNA, 75 bp, synthetic construct
  source 1..75: mol_type = other DNA
tgccgctgcgctggcgcataaccagaccggacgcccgatctccacgcatacttcgttcagcaccatggggctgga

SEQ ID NO: 315991 - DNA, 75 bp, synthetic construct
  source 1..75: mol_type = other DNA
ttttgtttacttcactctttcaagaccctgcatttatatccgcactaacatctgcattctggcaatctcttcaca

SEQ ID NO: 315992 - DNA, 75 bp, synthetic construct
  source 1..75: mol_type = other DNA
cgtaaccacggactttcaccgcgcgatcctgtgatgaattatccggcgatggcgcaggatctgctggatacgctg

SEQ ID NO: 315993 - DNA, 75 bp, synthetic construct
  source 1..75: mol_type = other DNA
actggcacaatttccacaggcacgggcgcatgtgattgcaggcgcgggtcactgggtacacgcagaaaaaccgga

SEQ ID NO: 315994 - DNA, 75 bp, synthetic construct
  source 1..75: mol_type = other DNA
ttaactatcagcgtgataacgagatggccacctgggcgatggcggaaatcacgtatcagatcacatatacaaatt

SEQ ID NO: 315995 - DNA, 75 bp, synthetic construct
  source 1..75: mol_type = other DNA
accggcgattcgcttgacgaagattcgtggcaggcggttgttcacatcgaggtatttcttaaagcctccagcccc

SEQ ID NO: 315996 - DNA, 75 bp, synthetic construct
  source 1..75: mol_type = other DNA
atgactatcagcgggatgatgaaatggccacctggggttcagtcgatttcacgtacttaatcacctattcaattt

SEQ ID NO: 315997 - DNA, 75 bp, synthetic construct
  source 1..75: mol_type = other DNA
tcaagttatccatcattcactgttttattatcttaaggatgatggaaatagaaggttttttaatgataataaaac

SEQ ID NO: 315998 - DNA, 75 bp, synthetic construct
  source 1..75: mol_type = other DNA
tggttggaccttaagaaaattgagatttgtgcgaatgcacttaaccgttaccagtcagtaattaaaaacatgtta

SEQ ID NO: 315999 - DNA, 75 bp, synthetic construct
  source 1..75: mol_type = other DNA
ctggaagcctttaactctgccgttgacaaccggctggcagaactgacaatgaacaaactttacgatcgcgcgccg

SEQ ID NO: 316000 - DNA, 75 bp, synthetic construct
  source 1..75: mol_type = other DNA
acccgcaccacggtaaaccgtctgcccatagcagcctgtggcatgctatctggttgattatccatctgattgccg

SEQ ID NO: 316001 - DNA, 75 bp, synthetic construct
  source 1..75: mol_type = other DNA
actggttggtttttcattactgttgggcgggcgcaaatttgccacccaatatatgaatctgtttggtattaaaca

SEQ ID NO: 316002 - DNA, 75 bp, synthetic construct
  source 1..75: mol_type = other DNA
ttgaagtcagtttgatttcagctttaatggcaaccggcgacgccgcgccaacgctaatgcgtgatacgctctatt

SEQ ID NO: 316003 - DNA, 75 bp, synthetic construct
  source 1..75: mol_type = other DNA
cagttgtggagccgtttgactggatgctctcagtggcgaaaagggaaaccagactggcagatgatgtaaggctat

SEQ ID NO: 316004 - DNA, 75 bp, synthetic construct
  source 1..75: mol_type = other DNA
gctggaaaatctacgttaaaaagggtctggtgacctgggaaaaccagcagactgactatccgcgcactcgcccgg

SEQ ID NO: 316005 - DNA, 75 bp, synthetic construct
  source 1..75: mol_type = other DNA
gctggaaaatctacgttaaaaagggtctggtgacctgggaaaaccatcagactgactagccgcgcactcgcccgg

SEQ ID NO: 316006 - DNA, 75 bp, synthetic construct
  source 1..75: mol_type = other DNA
gctggaaaatctacgttaaaaatggtctggtgacctgggaaaaccagcagactgactagccgcgcactcgcccgg

SEQ ID NO: 316007 - DNA, 75 bp, synthetic construct
  source 1..75: mol_type = other DNA
aagatcttctttgctaaaacaatatctcaggactacggattaaaatgtattcaggaattctatgcagctctagaa

SEQ ID NO: 316008 - DNA, 75 bp, synthetic construct
  source 1..75: mol_type = other DNA
ccgatctggttgattcgctgggtcaggaaaacaacccggaatggaaaaccgtcgcctttaatacgcaaggtgaaa

SEQ ID NO: 316009 - DNA, 75 bp, synthetic construct
  source 1..75: mol_type = other DNA
caccgccctggtgaccaccgtttatgatctgacgctggcaaactatggtctggaacgtggcctgaacgacgttaa

SEQ ID NO: 316010 - DNA, 75 bp, synthetic construct
  source 1..75: mol_type = other DNA
cggtgaaatccctgaaagagggttccatccgttttgcggcagaacaaccagaaaacggtaaaaaccacccgcgca

SEQ ID NO: 316011 - DNA, 75 bp, synthetic construct
  source 1..75: mol_type = other DNA
ttatccggccacttacgaacgctttacctctatcggcccgctgatggagaaaatcggtaacggcggtaaagggat

SEQ ID NO: 316012 - DNA, 75 bp, synthetic construct
  source 1..75: mol_type = other DNA
tggtatctttacagcgccaaccgcctgaaatacccgatgatgcgcaaacgcctgatgaaaatgtggcgtgaagcg

SEQ ID NO: 316013 - DNA, 75 bp, synthetic construct
  source 1..75: mol_type = other DNA
acaccgacatgccgatgctggtgatgctggaagaacgcgacggttactacgctgcgggtcgtatgctgcgcgctg

SEQ ID NO: 316014 - DNA, 75 bp, synthetic construct
  source 1..75: mol_type = other DNA
gacctgatcccaggtaaaactgcaccgcacattatggtcgtagagcgcgattatccggcaacttacgaacgcttt

SEQ ID NO: 316015 - DNA, 75 bp, synthetic construct
  source 1..75: mol_type = other DNA
acatcattttgccgacggcgacctggtacgaaaaagacgacatgaatacttcggatatgcatccgtttattcacc

SEQ ID NO: 316016 - DNA, 75 bp, synthetic construct
  source 1..75: mol_type = other DNA
gctggcctgcttcctggggcagaaagtgtttggcctggataagcacaccagctggttgatcggtgccggtagcag

SEQ ID NO: 316017 - DNA, 75 bp, synthetic construct
  source 1..75: mol_type = other DNA
tgctgggtacgaaggcgcagattcagtttagtgccggatcgctttcgctcaatgatgttcctgccaccaatgtac

SEQ ID NO: 316018 - DNA, 75 bp, synthetic construct
  source 1..75: mol_type = other DNA
tcgtggtttaagcgaaagagaagcaatgctgaagttagcagaatggctacaaagattgagcattgttattgaaga

SEQ ID NO: 316019 - DNA, 75 bp, synthetic construct
  source 1..75: mol_type = other DNA
gaagccatatgatacttaccgaatataagctagaccacaaaaccaataaatcgcgctcagtatatttgctccggc

SEQ ID NO: 316020 - DNA, 75 bp, synthetic construct
  source 1..75: mol_type = other DNA
atggaaataaaaccagaagatgagttaagtaatattgttttatttccggcaaaagaggatgacccacgtaatcag

SEQ ID NO: 316021 - DNA, 75 bp, synthetic construct
  source 1..75: mol_type = other DNA
gaggtaacgtggaaataaaaccagaagatgagttaagtaatattgttttatttccggtaaaagaggatgacccac

SEQ ID NO: 316022 - DNA, 75 bp, synthetic construct
  source 1..75: mol_type = other DNA
agcttgcgcaacatgaccttcagtaaagatgactggcagacacaggaaggcaaactgtcgatgaacgccagcgag

SEQ ID NO: 316023 - DNA, 75 bp, synthetic construct
  source 1..75: mol_type = other DNA
atgagccagacgcagatccagagcctgaccgcattttttaaagagaacgtcccgccccgcgcaatgaagtcattt

SEQ ID NO: 316024 - DNA, 75 bp, synthetic construct
  source 1..75: mol_type = other DNA
atgagccagacgcagatccagagcctgaccgcattttttaaagagaatgtcccgccccgtgcgatgcggtcattt

SEQ ID NO: 316025 - DNA, 75 bp, synthetic construct
  source 1..75: mol_type = other DNA
atcgcgattttcctctacccggcaatgtatccgctgatgacccaatggtttagcccggaaacgttcggtatctac

SEQ ID NO: 316026 - DNA, 75 bp, synthetic construct
  source 1..75: mol_type = other DNA
atggataattacgggggcttcaagccaacaatttcgcttgatgattttcctcgtggtttaagcgaaagagaagca

SEQ ID NO: 316027 - DNA, 75 bp, synthetic construct
  source 1..75: mol_type = other DNA
ggcagggcaagcgctggtcactggttgagccggaaatctggacggcgctgaccgcaacgatttacggcgtggatg

SEQ ID NO: 316028 - DNA, 75 bp, synthetic construct
  source 1..75: mol_type = other DNA
gaaattatcatacttgatttctcgaatggggatagccccagatataattatttccttaatggcatctacagccgt

SEQ ID NO: 316029 - DNA, 75 bp, synthetic construct
  source 1..75: mol_type = other DNA
cggtgagtatgtgggtcactcgctgcctgatggaaggcatgagctttatgctgcccctccagtgtcagcagtacc

SEQ ID NO: 316030 - DNA, 75 bp, synthetic construct
  source 1..75: mol_type = other DNA
ctgataactcgtaatggtgagattgaagtgcttcggaagtgggcagaagaactggaggcacgggaggtggctttg

SEQ ID NO: 316031 - DNA, 75 bp, synthetic construct
  source 1..75: mol_type = other DNA
tggcaggatgcgccagttgaaggcagcagcaaagctgctgcatacgctacaggttggaacgcttgccgcgctgcc

SEQ ID NO: 316032 - DNA, 75 bp, synthetic construct
  source 1..75: mol_type = other DNA
cagcgtacttaacctggacggccagttagtggactacagccagggacgcaactacaccgcccatctggtctggcc

SEQ ID NO: 316033 - DNA, 75 bp, synthetic construct
  source 1..75: mol_type = other DNA
aaaggacaaggcgagtacgctacaggccgtgtaccagcaactgaccgagctgcaccgttacctgctggcgatcca

SEQ ID NO: 316034 - DNA, 75 bp, synthetic construct
  source 1..75: mol_type = other DNA
gtgcatgtggataccgaagataacccgttcaccggcggtctgttcagccagttccgtttaccagatacgttgtat

SEQ ID NO: 316035 - DNA, 75 bp, synthetic construct
  source 1..75: mol_type = other DNA
cccccggtgctgagccggttaagtggtataaaaatagttatggtggcagggtcgctgtataccgaattgcagact

SEQ ID NO: 316036 - DNA, 75 bp, synthetic construct
  source 1..75: mol_type = other DNA
atgaaagtcaacgccagcggcgggattgacggcagcgatgcgttaatggggccgaaggttcaggccaatgatatc

SEQ ID NO: 316037 - DNA, 75 bp, synthetic construct
  source 1..75: mol_type = other DNA
gttgcgttaaaaaaggatgcatcccaatattcaggttatttacttcttgcgttaatagtgagcaccatagcgttc

SEQ ID NO: 316038 - DNA, 75 bp, synthetic construct
  source 1..75: mol_type = other DNA
gatttatatggctcacgcgttccatgccttcaggcaacaatgcatggactgccagttgcgacacgaccgaagatc

SEQ ID NO: 316039 - DNA, 75 bp, synthetic construct
  source 1..75: mol_type = other DNA
gcatatctcaatttggcagaattaggtattggaattgcagctgccagcgtattatataaaccgctcagcgagaat

SEQ ID NO: 316040 - DNA, 75 bp, synthetic construct
  source 1..75: mol_type = other DNA
acggcaggggtggtaaacgctattgctgcatatcatctggaactgctgcaggaacaggcacggctgaaaatctga

SEQ ID NO: 316041 - DNA, 75 bp, synthetic construct
  source 1..75: mol_type = other DNA
acaccctatgataaaccggtcattaatgcgcaacatgaactgagcaagctgcccatataccagcgtgtctaccag

SEQ ID NO: 316042 - DNA, 75 bp, synthetic construct
  source 1..75: mol_type = other DNA
caacctgacgctgagaacccgcatcaggcgtctggcccgaaaaacaatctgcttctcacgttcaattgagctgca

SEQ ID NO: 316043 - DNA, 75 bp, synthetic construct
  source 1..75: mol_type = other DNA
cttactggctgacggcgtgattacgcgccgtttcctcgttccaacaccctttcgcccggcaacagcaattactga

SEQ ID NO: 316044 - DNA, 75 bp, synthetic construct
  source 1..75: mol_type = other DNA
gagtgattaacgcgatggcgcggcggagcgccaatttcattggccgcctctcttgtgaagcgccgattctgttca

SEQ ID NO: 316045 - DNA, 75 bp, synthetic construct
  source 1..75: mol_type = other DNA
gtgacatattcgattggcattgattctggctcaaccgccaccaaagggatcttactggcagacggcgtgattacg

SEQ ID NO: 316046 - DNA, 75 bp, synthetic construct
  source 1..75: mol_type = other DNA
cgccgtttcctcgttccaacaccctttcgcccggcaacagcaattactgaagcctgggaaactctgcgcgaaggg

SEQ ID NO: 316047 - DNA, 75 bp, synthetic construct
  source 1..75: mol_type = other DNA
ctggcactgcttacacccttcaacatcggcatgctcaccagcgatgactgggacagctatggccgggtggtgccg

SEQ ID NO: 316048 - DNA, 75 bp, synthetic construct
  source 1..75: mol_type = other DNA
atgaactggataaagataaccgttggggcctaacctatcgttcagaagtgaaaattgactttgaaggagattaca

SEQ ID NO: 316049 - DNA, 75 bp, synthetic construct
  source 1..75: mol_type = other DNA
gcagttcttcgatgagcatcaggcgacctacccgacccggagctgtgtgcaggttgcgcgtttgccgaaagatgt

SEQ ID NO: 316050 - DNA, 75 bp, synthetic construct
  source 1..75: mol_type = other DNA
atgcacccgcagctatcggtccgtatgttcagggcgttgatctgggcagtatgatcatcacctccggtcagatcc

SEQ ID NO: 316051 - DNA, 75 bp, synthetic construct
  source 1..75: mol_type = other DNA
gacagcaaagtgattcagcttgatgatgacggtaacctgtgcgatttcctgatgaatgacaaatgcgcggcgggc

SEQ ID NO: 316052 - DNA, 75 bp, synthetic construct
  source 1..75: mol_type = other DNA
aaagctccattaacccaaatctgaacaatattttgggtaacatgggcttaccgtatggcacgatgggggcaaccc

SEQ ID NO: 316053 - DNA, 75 bp, synthetic construct
  source 1..75: mol_type = other DNA
cagttggagtcaattccaggaactgaaagcgaaaggagactctggtcaaacgctgttctataaagacgaaggttt

SEQ ID NO: 316054 - DNA, 75 bp, synthetic construct
  source 1..75: mol_type = other DNA
gtcaaaaagtgaacattattgaatctaaaattgctgggttagggttcctacaggcgatcatagctagaatggcta

SEQ ID NO: 316055 - DNA, 75 bp, synthetic construct
  source 1..75: mol_type = other DNA
atgaaatcaaaggacgtcatttttgatgaaatcctcggaaaagagggtggctacgtcaatcatccggacgataaa

SEQ ID NO: 316056 - DNA, 75 bp, synthetic construct
  source 1..75: mol_type = other DNA
acgcgcgggcaggcgctggaaatactcgaggcggattactggtacggcccacgttttgaccaagtggcaaatttg

SEQ ID NO: 316057 - DNA, 75 bp, synthetic construct
  source 1..75: mol_type = other DNA
atatcagggcgatatgcgtgacctgacgcgcgggcaggcgctggaaatactcgaggcggattactggtacggccc

SEQ ID NO: 316058 - DNA, 75 bp, synthetic construct
  source 1..75: mol_type = other DNA
cgcggtttgcttgctcttgcctcatccggggagctgaaaacccgtcaggacgtcactgaggcgctggaaagcgca

SEQ ID NO: 316059 - DNA, 75 bp, synthetic construct
  source 1..75: mol_type = other DNA
tctctgatagcctgccggaaacgaaacaggcgcttgcagagagcgtcacacgcgggatagacgctctttatcatg

SEQ ID NO: 316060 - DNA, 75 bp, synthetic construct
  source 1..75: mol_type = other DNA
ttcagcaagctcgaaaaatctgtaagcaaggctgtgacatcaaacgagacgaaaatcaaagacgctatagccctg

SEQ ID NO: 316061 - DNA, 75 bp, synthetic construct
  source 1..75: mol_type = other DNA
gcggcaggctgtacccggatatggatacagacggacgcatcggacctcgcaccatcagtgcattgcgcgccttcc

SEQ ID NO: 316062 - DNA, 75 bp, synthetic construct
  source 1..75: mol_type = other DNA
tgtacacagggcgaccgctatctgacgctggcagagaaacgcgaggctaacgaatcgtttgtttatggctggctg

SEQ ID NO: 316063 - DNA, 75 bp, synthetic construct
  source 1..75: mol_type = other DNA
atcgaaatcaaattccagaagacaggatcgcccttctgaggtgtactggcaatagcggacactaccatttgttct

SEQ ID NO: 316064 - DNA, 75 bp, synthetic construct
  source 1..75: mol_type = other DNA
acgcgcgggcaggcgctggaaatactcgaggcggattactggttcggaccacgttttgaccaggtggcaactctg

SEQ ID NO: 316065 - DNA, 75 bp, synthetic construct
  source 1..75: mol_type = other DNA
tcgaggcggattactggttcgggccacgttttgaccaggtcgccgcattatcccctgatattgccgcagagttgt

SEQ ID NO: 316066 - DNA, 75 bp, synthetic construct
  source 1..75: mol_type = other DNA
cgctggctgaacgttttcaacctgcaaggcaaattgttcccggatatggacgcagacgggcgtatcggcccccgc

SEQ ID NO: 316067 - DNA, 75 bp, synthetic construct
  source 1..75: mol_type = other DNA
agaagagcacgcaggccatgctgtcagagaggaacagcggcgtgcagctctcgacctgcggcgagcagagacgcc

SEQ ID NO: 316068 - DNA, 75 bp, synthetic construct
  source 1..75: mol_type = other DNA
agaagagcacgcaggccatgctgtccgagaggaacagcggcgtgcagctctcgacctgcggagagcagagacgcc

SEQ ID NO: 316069 - DNA, 75 bp, synthetic construct
  source 1..75: mol_type = other DNA
agcgtttgagccggtagtgcagcgtcatgagatggccgtggccgcagaacgggcgcacgagcaacggcagcacga

SEQ ID NO: 316070 - DNA, 75 bp, synthetic construct
  source 1..75: mol_type = other DNA
cgtggcagaccgtggtgaacgggcgactggggctgcacgacccgaacgcaccggagaaccggcgcgcgctggtga

SEQ ID NO: 316071 - DNA, 75 bp, synthetic construct
  source 1..75: mol_type = other DNA
tcttacgagtcacggatcttaccccgcaacaagccacagaaatcaccgcgttcgccaacaaaattaaagatagcg

SEQ ID NO: 316072 - DNA, 75 bp, synthetic construct
  source 1..75: mol_type = other DNA
cccgtctcacaaatggattgcgttaaaattggcctctacatacttggatatcttgctcaaaaaacgccctgggta

SEQ ID NO: 316073 - DNA, 75 bp, synthetic construct
  source 1..75: mol_type = other DNA
atgaacagtaaagaaagtttgcgcagaagatttttacaactgatgacagaaaacgttaaatcagagttacttctt

SEQ ID NO: 316074 - DNA, 75 bp, synthetic construct
  source 1..75: mol_type = other DNA
cgaatgggagagcgccttcgtggaattgcagaagatgttttcgcttacgcaacgggacaacgcgatgctgaacga

SEQ ID NO: 316075 - DNA, 75 bp, synthetic construct
  source 1..75: mol_type = other DNA
ggatacaggcgaacctggaagaaatcaggaagcaggaagagacattgcagaaactgaacgcgaagacatggggcg

SEQ ID NO: 316076 - DNA, 75 bp, synthetic construct
  source 1..75: mol_type = other DNA
aaagcagtatcagcatcgccgacccggagggggggcgaaacatccgactgaagggagccatctatgagcaatctt

SEQ ID NO: 316077 - DNA, 75 bp, synthetic construct
  source 1..75: mol_type = other DNA
gggcgcacgagcaacggcagcacgaaaaggaactgacggaagcgcgttcccggcagcgaagctatgacggtccgt

SEQ ID NO: 316078 - DNA, 75 bp, synthetic construct
  source 1..75: mol_type = other DNA
gcaggaaagccgtattgcggcgaacatcctggctatcagggaccaggaagagacgctggcgaaactccgggaaaa

SEQ ID NO: 316079 - DNA, 75 bp, synthetic construct
  source 1..75: mol_type = other DNA
tccctgataacctgccggaaacgaaacaggcgcttgctgagggcgttactcgcgggatagacgcactttaccatg

SEQ ID NO: 316080 - DNA, 75 bp, synthetic construct
  source 1..75: mol_type = other DNA
cggttaagacagcgtatgaccttgctaacgggaaatacactgcacaggatgccaccacggcgcggaaaggtcttg

SEQ ID NO: 316081 - DNA, 75 bp, synthetic construct
  source 1..75: mol_type = other DNA
ctctgccgataacattggtggcgtatattacaggccagtacagaaatatattaacgggacatggtataacgtggc

SEQ ID NO: 316082 - DNA, 75 bp, synthetic construct
  source 1..75: mol_type = other DNA
cgataacattggtggcgtatattacagaccggttcagaaatacattaacgggaagtggtacaacgtggcgcaggt

SEQ ID NO: 316083 - DNA, 75 bp, synthetic construct
  source 1..75: mol_type = other DNA
cggctgcattatctggctgaccgggccagcatcaccggcaagttcagtgaccccgaatgccggaagctggatgaa

SEQ ID NO: 316084 - DNA, 75 bp, synthetic construct
  source 1..75: mol_type = other DNA
tcgtaatgtgacaccttgctttggcgctcgtctggtacaggagggaaatcgactgcactatctggctgaccgggc

SEQ ID NO: 316085 - DNA, 75 bp, synthetic construct
  source 1..75: mol_type = other DNA
acggttttacctgcgaagccgacacccttggcagttgcggctacgtgtacatcgcggtttatcccactcaacgct

SEQ ID NO: 316086 - DNA, 75 bp, synthetic construct
  source 1..75: mol_type = other DNA
gaaacgcttgcggcaacgccaaaggcggttaagacagcgtatgaccttgctaacgggaaatacactgcacaggac

SEQ ID NO: 316087 - DNA, 75 bp, synthetic construct
  source 1..75: mol_type = other DNA
cgtatggtcatcatcgtcagcagtgtggcctcagtggcgctgaccattgacaccacaacggtgatggcaacgcag

SEQ ID NO: 316088 - DNA, 75 bp, synthetic construct
  source 1..75: mol_type = other DNA
attacggcacaaaaaccacaaatagcgcaggagctcattcacacaatatacctgttggtcacactggcgcgggga

SEQ ID NO: 316089 - DNA, 75 bp, synthetic construct
  source 1..75: mol_type = other DNA
gaaacgctggctgcaacaccaaaagcggtgaagtctgcctatgacaatgctgaaaaacgtcttcagaaagatcag

SEQ ID NO: 316090 - DNA, 75 bp, synthetic construct
  source 1..75: mol_type = other DNA
atgctccggcatttattcgttcacgacgggatacgaccgacgcaaactggtcgccgtgggcgcagctttacacct

SEQ ID NO: 316091 - DNA, 75 bp, synthetic construct
  source 1..75: mol_type = other DNA
ggagttatacgaggcgtataacaacggatatccaacaacgtatggaaatatcattcacctgaaagggatgacagc

SEQ ID NO: 316092 - DNA, 75 bp, synthetic construct
  source 1..75: mol_type = other DNA
aggtattaacgccgccagtccgaacaaagagctggcgaaagagttcctcgaaaactatctgctgactgacgaagg

SEQ ID NO: 316093 - DNA, 75 bp, synthetic construct
  source 1..75: mol_type = other DNA
ggagaatgtgatccttgatcgccgtgttttcaattttaacgacgaacagtatgcagagttcatcgatatgctcga

SEQ ID NO: 316094 - DNA, 75 bp, synthetic construct
  source 1..75: mol_type = other DNA
tggtgccaccaaagtcatcaccaaaagtccgcacgaagcctggggcatcccgactgccgctgccaacattcaggg

SEQ ID NO: 316095 - DNA, 75 bp, synthetic construct
  source 1..75: mol_type = other DNA
agtccgcacgaagcctggggaatcccgactgccgctgccaacattcaggggctgaaagcctcccgccagatgctc

SEQ ID NO: 316096 - DNA, 75 bp, synthetic construct
  source 1..75: mol_type = other DNA
tgcctactgttcaggctggcaactatccggtaactccggatggttggataagctgtagtgagagaatgccggata

SEQ ID NO: 316097 - DNA, 75 bp, synthetic construct
  source 1..75: mol_type = other DNA
tggatgcgtgatgacgcagatggtcgtgagtataacgctcgcaatgaattttctggtggagggggaggaattcca

SEQ ID NO: 316098 - DNA, 75 bp, synthetic construct
  source 1..75: mol_type = other DNA
atgaagagttcatcgaaatgcttgatgctccggttgctgatgagactgccatcgaaaaactgctggcgaggaaac

SEQ ID NO: 316099 - DNA, 75 bp, synthetic construct
  source 1..75: mol_type = other DNA
ttgaggtacttcggggagatagtgttgagaaggcctctcgggtatggtctggtaatgaacgtgatcaggagttgc

SEQ ID NO: 316100 - DNA, 75 bp, synthetic construct
  source 1..75: mol_type = other DNA
ctgattactccatcgcagaggcggcctttaacaaaggtgaaacggcgatgaccatcaacggtccgtgggcatggt

SEQ ID NO: 316101 - DNA, 75 bp, synthetic construct
  source 1..75: mol_type = other DNA
aaaaacaaacacatgaatgcggatactgattactccatcgcagaggcggcctttaacaaaggtgaaacggcgatg

SEQ ID NO: 316102 - DNA, 75 bp, synthetic construct
  source 1..75: mol_type = other DNA
gcatcaaccgcgaaccgtttggcccactaacgggtacgctgatcccgccgtttatctcgcactctatcgcgataa

SEQ ID NO: 316103 - DNA, 75 bp, synthetic construct
  source 1..75: mol_type = other DNA
atgcacccgtatactatgtgctggcgcaagttaagtttacgcctatcaaggcgatgaaaaagtatgtcgatgaca

SEQ ID NO: 316104 - DNA, 75 bp, synthetic construct
  source 1..75: mol_type = other DNA
aaactgcctaaatctgtcgttgctcttttttctcatcccggtgaactatctgcccgttcaggtgatgtacttcaa

SEQ ID NO: 316105 - DNA, 75 bp, synthetic construct
  source 1..75: mol_type = other DNA
tgattctgaaaccctcgcggcaacgccaaaagcagtgaagtctgcctatgacaatgctgaaaaacgtcttcagaa

SEQ ID NO: 316106 - DNA, 75 bp, synthetic construct
  source 1..75: mol_type = other DNA
acaacgactggccaaaagacactttgctgcaatttggcctgtacgcctcgcctgatattcaaaccgaccttcagc

SEQ ID NO: 316107 - DNA, 75 bp, synthetic construct
  source 1..75: mol_type = other DNA
ggccagaattttatgcaggcgctgaccggcgcaatgaaggggcgcttctcccgctacaccagtgatgagcagaag

SEQ ID NO: 316108 - DNA, 75 bp, synthetic construct
  source 1..75: mol_type = other DNA
ccgttcagcaggcgacagagcgtgccggtgcgggtaataccgccgcactcgccatgcagcaggctgaagcgttga

SEQ ID NO: 316109 - DNA, 75 bp, synthetic construct
  source 1..75: mol_type = other DNA
ccttgaccctggctctcttgagcgttatcagcgccgtgttgagcgtgagcagggtaacgaatttctgattccacc

SEQ ID NO: 316110 - DNA, 75 bp, synthetic construct
  source 1..75: mol_type = other DNA
gaagatccgcgccgcaggttatgaagcatggcgaaatgctattctcccgcgccttgatgagcgcacttttgacgg

SEQ ID NO: 316111 - DNA, 75 bp, synthetic construct
  source 1..75: mol_type = other DNA
gatctggtttggtcatgccgcaagttttgcgggcgatatgatgacgggcagtcgcggtttacgcggaagcttttt

SEQ ID NO: 316112 - DNA, 75 bp, synthetic construct
  source 1..75: mol_type = other DNA
tgccgccaagaatcaaaggaagagccagggtaaaaggcgatgctggaaggtatcacattcttggagttctgtggc

SEQ ID NO: 316113 - DNA, 75 bp, synthetic construct
  source 1..75: mol_type = other DNA
tgataatgtggaacaggcactgagacattcatctgatggcctgattctccggctactggatatacacgaggtcgg

SEQ ID NO: 316114 - DNA, 75 bp, synthetic construct
  source 1..75: mol_type = other DNA
gtcgcgccagaagcgattctcgcaggagtgattaacgcgatggcgcggcggagtgccaatttcattgctcgtctc

SEQ ID NO: 316115 - DNA, 75 bp, synthetic construct
  source 1..75: mol_type = other DNA
ctcgtggtgtagtgaatgagttaaaacatatgggggcagttcgtatttttcgcctttcaggatgggaagatgttg

SEQ ID NO: 316116 - DNA, 75 bp, synthetic construct
  source 1..75: mol_type = other DNA
gcaatcacgatcaccgtggccgtgatctggattggctataagaccctgtggaaaggcgagagcctgtcgcagtgc

SEQ ID NO: 316117 - DNA, 75 bp, synthetic construct
  source 1..75: mol_type = other DNA
caacatggcgaagagcgtgatatcttcgagcgtctctatgcagtgcggctcgaccgcctacgcagtctcccagac

SEQ ID NO: 316118 - DNA, 75 bp, synthetic construct
  source 1..75: mol_type = other DNA
tcatgctggctgcggccagtcgtctggcgagtctgtcaactgaaacggagaccacaacggtggatgaagaactgt

SEQ ID NO: 316119 - DNA, 75 bp, synthetic construct
  source 1..75: mol_type = other DNA
gaatgcctatatgtctacggccttatgttcaggcaccagaggcggcaaaaaatatctcagaaagtttcgtggtgg

SEQ ID NO: 316120 - DNA, 75 bp, synthetic construct
  source 1..75: mol_type = other DNA
gccacatacaaacctgcgaacaatggcatgacatggacacatcaggcaccgtccgggtgtgtatattccggcatt

SEQ ID NO: 316121 - DNA, 75 bp, synthetic construct
  source 1..75: mol_type = other DNA
ggaaatataccgcacaggacgccactacagcgcgaaaaggtcttgtccagctcagtagtgccaccaacagcacgt

SEQ ID NO: 316122 - DNA, 75 bp, synthetic construct
  source 1..75: mol_type = other DNA
tgattctgaaacgctggccgcaacaccaaaagcggtgaagtctgcctatgacaatgctgaaaaacgtcttcagaa

SEQ ID NO: 316123 - DNA, 75 bp, synthetic construct
  source 1..75: mol_type = other DNA
ggcttgctactgcggcagacaggtttccgtattttacggggaatgatgttgccagtctggcaaccctgacagaag

SEQ ID NO: 316124 - DNA, 75 bp, synthetic construct
  source 1..75: mol_type = other DNA
caaaatataccgctcaggacgccacgacggcacgaaaagggatagtccagctcagtagtaccaccaacagcacgt

SEQ ID NO: 316125 - DNA, 75 bp, synthetic construct
  source 1..75: mol_type = other DNA
gaagctgtcggaaatgctcaatggcgacttcgttcactttgaagaaggaacgcacgtctgcctcaacccgttcga

SEQ ID NO: 316126 - DNA, 75 bp, synthetic construct
  source 1..75: mol_type = other DNA
aatccgcacgaaggtcgagtcatcgcttcaaactgttggcctgcgtccccgaacaatgacggcggtgaactacat

SEQ ID NO: 316127 - DNA, 75 bp, synthetic construct
  source 1..75: mol_type = other DNA
cggtggacgtcaacgccatcgaccaatttgtgaaacaaggcatgagcatccctgaggctatcaaggctgtgatgc

SEQ ID NO: 316128 - DNA, 75 bp, synthetic construct
  source 1..75: mol_type = other DNA
ctcagtagcgccacaaacagcgattctgaaacgcttgcggcaacgccaaaggcggtaaaggcagcatatgacctc

SEQ ID NO: 316129 - DNA, 75 bp, synthetic construct
  source 1..75: mol_type = other DNA
ctggcgtgagtctcggtttgaacttatggaggataagttcgttgctctgccaatgttcctcaactgcctgccatt

SEQ ID NO: 316130 - DNA, 75 bp, synthetic construct
  source 1..75: mol_type = other DNA
taagcctatctgcgagcagatcttcgattacggcaccgacgtggaagtcagtaagaacggcatcaggctgggtga

SEQ ID NO: 316131 - DNA, 75 bp, synthetic construct
  source 1..75: mol_type = other DNA
gggccgacgctgaaagaaaaagggctgatttttgttggtctggatatcatcggcgaccgtctgactgaaattaac

SEQ ID NO: 316132 - DNA, 75 bp, synthetic construct
  source 1..75: mol_type = other DNA
cgcgcccatacccgcacgctgaacgtgaagcagaactacgaagagtggttttcattcgtcggtgaacaggatctg

SEQ ID NO: 316133 - DNA, 75 bp, synthetic construct
  source 1..75: mol_type = other DNA
ctcagacattttatataaagccaggtcagtttatctggagctacctgggaacatttttatttatgttgggcggct

SEQ ID NO: 316134 - DNA, 75 bp, synthetic construct
  source 1..75: mol_type = other DNA
gccggtaccgtactgcctggcgcgtattccgcagggggggcgaaacccgtggcaatctggctgccggtggtcgcg

SEQ ID NO: 316135 - DNA, 75 bp, synthetic construct
  source 1..75: mol_type = other DNA
gccggttccgtactgcctggcgcgtattccgcagggggcgaaacccgtggcaatctggctgccggtggtcgcggt

SEQ ID NO: 316136 - DNA, 75 bp, synthetic construct
  source 1..75: mol_type = other DNA
gactggaaaatcgcccgccaggtagggccgacgctgaaagaaaaagggctaatttttgttggcctggatattatc

SEQ ID NO: 316137 - DNA, 75 bp, synthetic construct
  source 1..75: mol_type = other DNA
ttgcccgggaagtgaaagcgccccgtgaacggctgaagtatgcactggaggcgggtttactggtgactgcactgg

SEQ ID NO: 316138 - DNA, 75 bp, synthetic construct
  source 1..75: mol_type = other DNA
ccgtgaacgactgaagtatgcgctggagacgagattgcaggtgaccgcactggacggcctgttctggttcggcag

SEQ ID NO: 316139 - DNA, 75 bp, synthetic construct
  source 1..75: mol_type = other DNA
caaccagaaactggtgtatgtcttccaaacgtagctctttacgcagcaggctaccggaaatcaaaacaactgacg

SEQ ID NO: 316140 - DNA, 75 bp, synthetic construct
  source 1..75: mol_type = other DNA
gtacgcgaatgagtttggacataagcaaccagaaactggtgtatgtcttccaaacgtagccatttacgcggcagg

SEQ ID NO: 316141 - DNA, 75 bp, synthetic construct
  source 1..75: mol_type = other DNA
cttcgggaagaatggggcctcagccagaaaaatgtggtgttcaacgataaacggtttggctgcgtgtacagcctg

SEQ ID NO: 316142 - DNA, 75 bp, synthetic construct
  source 1..75: mol_type = other DNA
agaaaaatgtggtgttcaacgataagcgatttggctgcgtgtacagcctgaaggccagtctttccggtgtgccgg

SEQ ID NO: 316143 - DNA, 75 bp, synthetic construct
  source 1..75: mol_type = other DNA
ggatggacgtctgccgaataccaactatcgtaacaatagtcagggtgtatctccggaaaccatcgttttggcctc

SEQ ID NO: 316144 - DNA, 75 bp, synthetic construct
  source 1..75: mol_type = other DNA
tacgccaggtatggaaatcacttatattgggatttcaggatgataatgttcattgtgactttgatccagccggta

SEQ ID NO: 316145 - DNA, 75 bp, synthetic construct
  source 1..75: mol_type = other DNA
cctttaacctgccgcttgcacagtgggcaccaaactggttcaaaccgaccggagattgtggctatgacgcgccaa

SEQ ID NO: 316146 - DNA, 75 bp, synthetic construct
  source 1..75: mol_type = other DNA
tatataaaacaatatattcaacaactatatctgcatggctagaaaatcgttttggtataactaaagatcaatatt

SEQ ID NO: 316147 - DNA, 75 bp, synthetic construct
  source 1..75: mol_type = other DNA
aaccaaagataaattgcaccagagcggttactctctctctggtggtcagcaacagcgtctgtgtattgcgcgtgg

SEQ ID NO: 316148 - DNA, 75 bp, synthetic construct
  source 1..75: mol_type = other DNA
actgaaatgagtttgtcgctggaaggtattggcgcagtgctgcaaatggatgatgactacaccgttatcaattcg

SEQ ID NO: 316149 - DNA, 75 bp, synthetic construct
  source 1..75: mol_type = other DNA
acgccgctacaaatttgccattcgtcgtctggcgcaaaccaacagcgaagatgttttctcgctggcaatgacggc

SEQ ID NO: 316150 - DNA, 75 bp, synthetic construct
  source 1..75: mol_type = other DNA
gattctgcttcagcagggcggtcaggttaaggactcctttggcgggataataccaacattccgggccttactggg

SEQ ID NO: 316151 - DNA, 75 bp, synthetic construct
  source 1..75: mol_type = other DNA
acagttttatcattatgatgacattgacggggttggccctggtcatcatcgttaatgctacattaatgagtgaac

SEQ ID NO: 316152 - DNA, 75 bp, synthetic construct
  source 1..75: mol_type = other DNA
aatgattgtgttatggtcaggcattatctcgcatggacgaaataagctccttgaattggcggggaaatgccatag

SEQ ID NO: 316153 - DNA, 75 bp, synthetic construct
  source 1..75: mol_type = other DNA
tatatgcagatcgtttaaaagttcaaaactatcgaggttataggaaaaataaatcttatttaaaagataattctg

SEQ ID NO: 316154 - DNA, 75 bp, synthetic construct
  source 1..75: mol_type = other DNA
catgctgacacagatcctgctgaaacaggcgatggtaggcctggtggattcagcgacaaccgcgctgggatttgc

SEQ ID NO: 316155 - DNA, 75 bp, synthetic construct
  source 1..75: mol_type = other DNA
cggcaatcagaacccccgcaggtgcccgtgccaccgatacggccagtgcccagacgctggagctacagacacagc

SEQ ID NO: 316156 - DNA, 75 bp, synthetic construct
  source 1..75: mol_type = other DNA
atatataccggtatcatctgtctcaccgtattcgtcgcgtggttgggaatgaaagcacatcatcgccatatcagc

SEQ ID NO: 316157 - DNA, 75 bp, synthetic construct
  source 1..75: mol_type = other DNA
tctggtgctttattcgccggggctggtgcatccactgaaagtcgatgtagatgcttcggtggtcgataatgtgcc

SEQ ID NO: 316158 - DNA, 75 bp, synthetic construct
  source 1..75: mol_type = other DNA
gtgaatgacgctatccctcgcccgcaggcgaaaacccgtaaggcgctgacgccgctattagaaatccgtaacctg

SEQ ID NO: 316159 - DNA, 75 bp, synthetic construct
  source 1..75: mol_type = other DNA
aacagaacatcgcctttggcctgaaacaggacaagttaccaaaagcggaaattgccagccgggtcaacgagatgc

SEQ ID NO: 316160 - DNA, 75 bp, synthetic construct
  source 1..75: mol_type = other DNA
gtaagcaaattaaaacggggtaaatttgaacttgaagggccaggaggtagcattaaagaatgtgaaggatggtat

SEQ ID NO: 316161 - DNA, 75 bp, synthetic construct
  source 1..75: mol_type = other DNA
gtctgacataccgaaaaggattaaaggttatattcaccaggcgattggtgacgtgtctttaggttatgccttatt

SEQ ID NO: 316162 - DNA, 75 bp, synthetic construct
  source 1..75: mol_type = other DNA
ggggcgcatcgccattatgaatcgtgggaaatttgtccagattggcgaaccagaagagatctacgagcatccgac

SEQ ID NO: 316163 - DNA, 75 bp, synthetic construct
  source 1..75: mol_type = other DNA
attgccagccgggtcaatgagatgctcgggctggtgcatatgcaggagttcgccaaacgcaaaccgcatcagctt

SEQ ID NO: 316164 - DNA, 75 bp, synthetic construct
  source 1..75: mol_type = other DNA
catcaatatgatgtttcagtcttacgcgctgtttccgcatatgaccgtggaacagaacatcgcttttggcctgaa

SEQ ID NO: 316165 - DNA, 75 bp, synthetic construct
  source 1..75: mol_type = other DNA
tctggcaaccaagggagcagaggccggaggtaattgacaggagccttgcgccgggatgcgtatgttctccccgga

SEQ ID NO: 316166 - DNA, 75 bp, synthetic construct
  source 1..75: mol_type = other DNA
cggaagaaatttatgagcatccgactacccgctacagcgctgagtttattggttcggttaatgtttttgaagggc

SEQ ID NO: 316167 - DNA, 75 bp, synthetic construct
  source 1..75: mol_type = other DNA
cgctatcgtaaaggattacccacctggggcgatgaagtgcgcttgtgctgggatgcagacagttgtgtggtgctg

SEQ ID NO: 316168 - DNA, 75 bp, synthetic construct
  source 1..75: mol_type = other DNA
cggaagagatctatgagcatccgaccacccgctacagcgccgaatttattggctcagtcaacgtattcgaagggc

SEQ ID NO: 316169 - DNA, 75 bp, synthetic construct
  source 1..75: mol_type = other DNA
aaccgcgagtttccgttagaacaaaacagaagattgtatgcctgggatattctgcagaaaaaacagtctgacata

SEQ ID NO: 316170 - DNA, 75 bp, synthetic construct
  source 1..75: mol_type = other DNA
tgccggatacataccggtatcatctgtctcatcgtattcgccggttgtttgggattgaaaagacatcatcgccat

SEQ ID NO: 316171 - DNA, 75 bp, synthetic construct
  source 1..75: mol_type = other DNA
tgccggatacataccggtatcatctgtctcatcgtattcgccggttgattgggaatgaaaagacatcatcgccat

SEQ ID NO: 316172 - DNA, 75 bp, synthetic construct
  source 1..75: mol_type = other DNA
ccaggatgcgttgtcggcgaacctggtgagattaaaaaggttgtggtgaaggttaaggctgatttaatggcttaa

SEQ ID NO: 316173 - DNA, 75 bp, synthetic construct
  source 1..75: mol_type = other DNA
tggatggcctgttctggttcggtagccagcgcattgctgcagatatacagagactgagaaaatctggtatgagga

SEQ ID NO: 316174 - DNA, 75 bp, synthetic construct
  source 1..75: mol_type = other DNA
tgccggatacataccggtatcatctgtctcatcgtattcgccggttggttgggagtgaaaagacatcatcgccat

SEQ ID NO: 316175 - DNA, 75 bp, synthetic construct
  source 1..75: mol_type = other DNA
tgccggatacataccggtatcatctgtctcatcgtattcgccggttgcttgggactgaaaagacatcatcgccat

SEQ ID NO: 316176 - DNA, 75 bp, synthetic construct
  source 1..75: mol_type = other DNA
gagtgggaagagggaaaacatcaaatccctgacaccattcgtgtccgcgattatcgcggcaagctggtagttcca

SEQ ID NO: 316177 - DNA, 75 bp, synthetic construct
  source 1..75: mol_type = other DNA
tgcgtccatctggaagaaaaagagtgggatcgccttagcgaaactcaatccagcatcgctttctgtccgacctcc

SEQ ID NO: 316178 - DNA, 75 bp, synthetic construct
  source 1..75: mol_type = other DNA
cgattacgccacgcttcgccccgacctcatctcctgaacagatggcgatggcgcaacgcctgaaagaagaatatc

SEQ ID NO: 316179 - DNA, 75 bp, synthetic construct
  source 1..75: mol_type = other DNA
taccgtctgccggattacatcctgcgttacaggacgcgttaacgctggcattagctgccagaccgcaagaaaaag

SEQ ID NO: 316180 - DNA, 75 bp, synthetic construct
  source 1..75: mol_type = other DNA
ggtgaaccgcataaaccaggatgcgttgtcggcgaacctggtgagattaaaaaggtggtagtgaaggttaaggcc

SEQ ID NO: 316181 - DNA, 75 bp, synthetic construct
  source 1..75: mol_type = other DNA
ctatgagcctgtcatcaacaacagttatcagtgtcaacgccaagattattggccgttttggggatgcggacgatt

SEQ ID NO: 316182 - DNA, 75 bp, synthetic construct
  source 1..75: mol_type = other DNA
gttggcagctatttgctgaaagcggggaaacctgtcgcgcgcgcgaactggaacagtgcctggaagattttttat

SEQ ID NO: 316183 - DNA, 75 bp, synthetic construct
  source 1..75: mol_type = other DNA
tcctcgccataacaggcgcgttatatctcccctggcgtcttgtgcgcgacggttacaaagaactggtgcagatgt

SEQ ID NO: 316184 - DNA, 75 bp, synthetic construct
  source 1..75: mol_type = other DNA
ttgctgcattgtgcgggcctctggcttgtcctgctgctatggcgcaggagttcatcatccagccagcccctgtga

SEQ ID NO: 316185 - DNA, 75 bp, synthetic construct
  source 1..75: mol_type = other DNA
atgcggagccagaagaacaggtcgatccgcgcaaagccgccgtcgaagcggctattgcaccgcgccaaagcacgc

SEQ ID NO: 316186 - DNA, 75 bp, synthetic construct
  source 1..75: mol_type = other DNA
gcgtcggcgtatcccgctggtgcctctcaggaggaagttgaaagactgatggtcaagaccaatgacgcaattttg

SEQ ID NO: 316187 - DNA, 75 bp, synthetic construct
  source 1..75: mol_type = other DNA
aaaggctctatcaaaagatagcgaatcttattattaagctcatcaatgataatgtgtttccaccaggtagctttt

SEQ ID NO: 316188 - DNA, 75 bp, synthetic construct
  source 1..75: mol_type = other DNA
tggtgagtccggcggtggtgagtccggtggtggtgagtccggtggtggtgagtctggcggtggtgagtccggtgg

SEQ ID NO: 316189 - DNA, 75 bp, synthetic construct
  source 1..75: mol_type = other DNA
atggcgcttctactttagctgattctgaattgggaattgaaaaggattctcacggtgctttatgggaagcatttt

SEQ ID NO: 316190 - DNA, 75 bp, synthetic construct
  source 1..75: mol_type = other DNA
atgggaggctttcttaaataaaggtgctatgttgcccaatttacctaatggtaatggttgttctgattttattat

SEQ ID NO: 316191 - DNA, 75 bp, synthetic construct
  source 1..75: mol_type = other DNA
actgctggcattggggagagttactactcattacctgacgtggtagcccacctgaacagcctgaaagagtcctac

SEQ ID NO: 316192 - DNA, 75 bp, synthetic construct
  source 1..75: mol_type = other DNA
gaagagcgcatggcagatccgcagactccggaaaactccggtgatgagcaaccggcaggtaatgctaccgttaac

SEQ ID NO: 316193 - DNA, 75 bp, synthetic construct
  source 1..75: mol_type = other DNA
tgtagctgacccctctgataaaccctcaaccccccaaaatggtggtggtgagtctggcggtggtgagtccggtgg

SEQ ID NO: 316194 - DNA, 75 bp, synthetic construct
  source 1..75: mol_type = other DNA
aaccgatgataacggtaacgaacaaacaattgttttagatggtaattgtgtatttggtgagtgggaactgacaac

SEQ ID NO: 316195 - DNA, 75 bp, synthetic construct
  source 1..75: mol_type = other DNA
ccgaacagcgtggcaaagagattgaatatcgcattggcgctgacgcacgcgctgccagagttatcgccgccgcta

SEQ ID NO: 316196 - DNA, 75 bp, synthetic construct
  source 1..75: mol_type = other DNA
gcatagcaacaacttatacccggaaaaacggcaaagtttatctcaatgggcaaaaaacattcattactggcgcca

SEQ ID NO: 316197 - DNA, 75 bp, synthetic construct
  source 1..75: mol_type = other DNA
attggcttattaggtattcccgaagagtttgggggggtgcctaccgatatgatgacgcaggtgctggtactggag

SEQ ID NO: 316198 - DNA, 75 bp, synthetic construct
  source 1..75: mol_type = other DNA
tctgcttactgggtttccattgccctcacgcaggattttggagagagcgatggcctgtggaatgcctacggtaaa

SEQ ID NO: 316199 - DNA, 75 bp, synthetic construct
  source 1..75: mol_type = other DNA
gttctgcgaaagaaatagcagtcccctggtttgaaaccatggggaaacaggttgggttatcgaaacgtactaccg

SEQ ID NO: 316200 - DNA, 75 bp, synthetic construct
  source 1..75: mol_type = other DNA
cctgaatatagacccttccgccacggctgatatctacggtgattatgacgcgggggataccggttttgatgctgt

SEQ ID NO: 316201 - DNA, 75 bp, synthetic construct
  source 1..75: mol_type = other DNA
ccccttccggtgagcctgtgtggcgggagatcgccagagcttccgcgcgagctgcgctgaacctgagtcaaaaag

SEQ ID NO: 316202 - DNA, 75 bp, synthetic construct
  source 1..75: mol_type = other DNA
ggaatgggttggtctccggacgagctggatcgggacggtattttactgctcagtacactcggtggcttacgcggc

SEQ ID NO: 316203 - DNA, 75 bp, synthetic construct
  source 1..75: mol_type = other DNA
gtggcgttaacgcctgcgctgcaacctattgatggcgtggcggtgagttatatcgatgctgccgtggcgttgggt

SEQ ID NO: 316204 - DNA, 75 bp, synthetic construct
  source 1..75: mol_type = other DNA
tagagatgaaattagatatacagcagaaattcttaaagaaatgaagaaagcccacgaagaagagattaaaaaaga

SEQ ID NO: 316205 - DNA, 75 bp, synthetic construct
  source 1..75: mol_type = other DNA
atgtccacattacgcctgctcatctctgactcttacgacccgtggtttaacctggcggtggaggagtgtattttt

SEQ ID NO: 316206 - DNA, 75 bp, synthetic construct
  source 1..75: mol_type = other DNA
ttaccataaaggtgtggcgaaggtttatctgtccgagaaaagtgcgatttacgatatcaaacatgacaagatcaa

SEQ ID NO: 316207 - DNA, 75 bp, synthetic construct
  source 1..75: mol_type = other DNA
aaatcgcatcctggagcgcttcgcagggattgcaaagctcagtgtaatgcggctttcttttggttatatctcaac

SEQ ID NO: 316208 - DNA, 75 bp, synthetic construct
  source 1..75: mol_type = other DNA
gcattccttcgatgaaagccattctcggcgcgggtaaaaaaccggtaaatcagtggcaggcaagtgatattggct

SEQ ID NO: 316209 - DNA, 75 bp, synthetic construct
  source 1..75: mol_type = other DNA
gtcacctccgatattaacgtgccacgcattccttcgatgaaagccattctcggcgcgggtaaaaaaccggtaaat

SEQ ID NO: 316210 - DNA, 75 bp, synthetic construct
  source 1..75: mol_type = other DNA
tggcgatatcgctacgtgaaaaaaggcgttacggactctcagggggagccgtgggttggtgactggaaatatgta

SEQ ID NO: 316211 - DNA, 75 bp, synthetic construct
  source 1..75: mol_type = other DNA
ccgaaacagcgcgaacgtcagcgcatcgtgattgaaggcgacggcgaagaacagatcgccgcatttgctgaaaat

SEQ ID NO: 316212 - DNA, 75 bp, synthetic construct
  source 1..75: mol_type = other DNA
aggttccggcgacctttatgcccagcaggttggcttgctggtcggagaaattctgcaactgatcttacccagcaa

SEQ ID NO: 316213 - DNA, 75 bp, synthetic construct
  source 1..75: mol_type = other DNA
caaacagaacgtaagcacatcattctcgataacgattcgccggaggccattgccgagctggcggaacatctgaag

SEQ ID NO: 316214 - DNA, 75 bp, synthetic construct
  source 1..75: mol_type = other DNA
ggagcatcgagttcctctgtctgatgctactgttgccttgttaaaggctttaccacgctttaagggtatcaattt

SEQ ID NO: 316215 - DNA, 75 bp, synthetic construct
  source 1..75: mol_type = other DNA
ggagcatcgagttcctctgtctgatgatgctgttgccttgttaaaagctttaccacgctttaagggtataaattt

SEQ ID NO: 316216 - DNA, 75 bp, synthetic construct
  source 1..75: mol_type = other DNA
tcgacattccgtgattgggctggtgaaacgaccaactacccgcgtgaagtaattgaacatgcgttagctcaccag

SEQ ID NO: 316217 - DNA, 75 bp, synthetic construct
  source 1..75: mol_type = other DNA
ttggcagataaggcagaggctgcgtatcaacgtgggacattatggcctaagcggatggcgttgatggatgagtgg

SEQ ID NO: 316218 - DNA, 75 bp, synthetic construct
  source 1..75: mol_type = other DNA
gtgcgcttctatgaacaggttaagagtgaaaatccgccagtcgaaaccggagcatggaaagacgctgttgactga

SEQ ID NO: 316219 - DNA, 75 bp, synthetic construct
  source 1..75: mol_type = other DNA
gtgttaccgtcaagtgaagtcggagtttgaagaagcagtagagtctgctgctaaattaccctcatctacacggga

SEQ ID NO: 316220 - DNA, 75 bp, synthetic construct
  source 1..75: mol_type = other DNA
ccttcgatgctgaacctgtttgtcgagtatctggagatgaaacaggatcctcgtttgaccgcctcattgcgatta

SEQ ID NO: 316221 - DNA, 75 bp, synthetic construct
  source 1..75: mol_type = other DNA
tagccgtgaacatgtcggtaaagttgcttacatagaatctgatattgactactactttggcggatttatgggggt

SEQ ID NO: 316222 - DNA, 75 bp, synthetic construct
  source 1..75: mol_type = other DNA
aaaacctatttatctggaaaaattgctggatggggttgaggttgagtggttgccattgggggaagtctcagcctt

SEQ ID NO: 316223 - DNA, 75 bp, synthetic construct
  source 1..75: mol_type = other DNA
tcgcgccttcgaacgtattggcggtacggtgttgggttcgatattaggtcttatcgctctgcaactggagttaat

SEQ ID NO: 316224 - DNA, 75 bp, synthetic construct
  source 1..75: mol_type = other DNA
agacctcatatgccagtcagaataaccaggttattcgcctgcaggaatttactgtcagaaacggcaacactacct

SEQ ID NO: 316225 - DNA, 75 bp, synthetic construct
  source 1..75: mol_type = other DNA
atattcgccgcagctatcccgcgggtgacgagcaggtcgaggtgctgaagggcatcagcctggatatttatgctg

SEQ ID NO: 316226 - DNA, 75 bp, synthetic construct
  source 1..75: mol_type = other DNA
gataaatttactgcacttaccgctgagcttaccgctgagcttaccgctgagcttaacatgcgtaaaaaacagtac

SEQ ID NO: 316227 - DNA, 75 bp, synthetic construct
  source 1..75: mol_type = other DNA
atgcattaccaaccaaaacaagatttactcaatgatcgtattatcctggtgaccggtgccagcgacggaattggt

SEQ ID NO: 316228 - DNA, 75 bp, synthetic construct
  source 1..75: mol_type = other DNA
cgtgaagccgcgatgacgtatgcacgctatggtgcgacagtgattcttttgggccgtaatgaagaaaaattacgt

SEQ ID NO: 316229 - DNA, 75 bp, synthetic construct
  source 1..75: mol_type = other DNA
cgctgttttactatacatccaactttgcgccatttagggaaaccggagcggctgtataaaactggagatctggtg

SEQ ID NO: 316230 - DNA, 75 bp, synthetic construct
  source 1..75: mol_type = other DNA
aaaagcctgactgaatataatcgaatctatcagtcagcattttcaccgaacttacttgaacggccacatctggaa

SEQ ID NO: 316231 - DNA, 75 bp, synthetic construct
  source 1..75: mol_type = other DNA
tccgaagattgccatcaactggcacagcgcattgccgttaattatccgcgtctggacggcgttctgcataatgcc

SEQ ID NO: 316232 - DNA, 75 bp, synthetic construct
  source 1..75: mol_type = other DNA
ggcgatgacagccgccgtaaaaccggcatgacctttgacacccaaccgggccgtaaaccaggaatttcccaatga

SEQ ID NO: 316233 - DNA, 75 bp, synthetic construct
  source 1..75: mol_type = other DNA
atgccgtgaaaatgcgtgggctgattgcgcccgccagcaaagaaacccgtattccaaaatcgatatatgaaggta

SEQ ID NO: 316234 - DNA, 75 bp, synthetic construct
  source 1..75: mol_type = other DNA
atggcgaagcggcgatgtgatcctcggctctttactggcaatgttgtttaccggtatctggccacaacgggcgtt

SEQ ID NO: 316235 - DNA, 75 bp, synthetic construct
  source 1..75: mol_type = other DNA
tgcgcggcggctatgtttctttgcggttggctggcgctgggcaagaaaccgtatcaaggtttattgattggggtg

SEQ ID NO: 316236 - DNA, 75 bp, synthetic construct
  source 1..75: mol_type = other DNA
gtgaagctggtgacagtggttcccccttgtttggctgggatacaaccattaacaaatggactttggttggagtat

SEQ ID NO: 316237 - DNA, 75 bp, synthetic construct
  source 1..75: mol_type = other DNA
tggactggacatatctactgcagttatggcaccggctcttccgctcagtgatgacaaggtcgccagggtgaaagc

SEQ ID NO: 316238 - DNA, 75 bp, synthetic construct
  source 1..75: mol_type = other DNA
acttcagggtataaaaattatcaggaacttttacagcgtgatgatatagaggcagtttttattttcacctcaacg

SEQ ID NO: 316239 - DNA, 75 bp, synthetic construct
  source 1..75: mol_type = other DNA
aaactgtattgtcgagtacaagcttcctgaagtttctcctggtaccttactgaaccagcagacagcaatctgtcg

SEQ ID NO: 316240 - DNA, 75 bp, synthetic construct
  source 1..75: mol_type = other DNA
ctcatcccgatgacaacaacagccacccctggtgggggctgccctgcaccgtgacgccctgtttcggggcacgtc

SEQ ID NO: 316241 - DNA, 75 bp, synthetic construct
  source 1..75: mol_type = other DNA
tgggcagaattttactcgatttatccgatgaggtgattaagcgacttgatgatctcaaagtgcagcgcaatcttc

SEQ ID NO: 316242 - DNA, 75 bp, synthetic construct
  source 1..75: mol_type = other DNA
cttaatgaatgcccggataatggtgaaggtggaagcaaccagtcaattattagtcagataatcagcaaatacgga

SEQ ID NO: 316243 - DNA, 75 bp, synthetic construct
  source 1..75: mol_type = other DNA
ggctggcgggtgggctgaacttatatgcttatgcgcctaatccgctgaaatatattgatccactcggattaaaaa

SEQ ID NO: 316244 - DNA, 75 bp, synthetic construct
  source 1..75: mol_type = other DNA
tgggagacggggtatcaggtctggggtaacacgatacaggagaaggaccacggcagggtggagcagaacctgcgc

SEQ ID NO: 316245 - DNA, 75 bp, synthetic construct
  source 1..75: mol_type = other DNA
tcagcgttgggatatgcatggcagtgttaatggcacaaacctgaataacggtaaaaatctgacctttctcggttc

SEQ ID NO: 316246 - DNA, 75 bp, synthetic construct
  source 1..75: mol_type = other DNA
acaacagcaatggtgaaattgttgctgtatctgagttgacgactaagaagagcaagggaaaaaataagaaattta

SEQ ID NO: 316247 - DNA, 75 bp, synthetic construct
  source 1..75: mol_type = other DNA
gtattgaccagacattgtggaagcttaactcgtcttctcaaatgcaaaatctggcactatctaacagccagcttg

SEQ ID NO: 316248 - DNA, 75 bp, synthetic construct
  source 1..75: mol_type = other DNA
gatgatgagtggtgatattactgccggctcaaaagcgacaattaatattggtgttagtacgaaccaaggttctcc

SEQ ID NO: 316249 - DNA, 75 bp, synthetic construct
  source 1..75: mol_type = other DNA
gaacgctgatcagacttgggtagggggcggtattattgtcaatggtgatcataccgtgaactggcaaattaacgg

SEQ ID NO: 316250 - DNA, 75 bp, synthetic construct
  source 1..75: mol_type = other DNA
atgaataaaatatacgcagtaaaaaggaacgcaaagggcgagatggttgttgtttcagaaattagtaaaggcata

SEQ ID NO: 316251 - DNA, 75 bp, synthetic construct
  source 1..75: mol_type = other DNA
aaacggcgaaacccttcttcgtgatgcctccggtgagaaacgaatcaagggagaaaaagatggtcgtatgctgat

SEQ ID NO: 316252 - DNA, 75 bp, synthetic construct
  source 1..75: mol_type = other DNA
ggaacagcaaaggcgaggcggctgtcgtttcagaagttagtgagggtataagaaaacgagtcatctcacgaatat

SEQ ID NO: 316253 - DNA, 75 bp, synthetic construct
  source 1..75: mol_type = other DNA
ctcaatgacggtaatggcgcgaaaaccacgccatcattcgggcagtcaaaagcgacaaatgccgctgatcagagc

SEQ ID NO: 316254 - DNA, 75 bp, synthetic construct
  source 1..75: mol_type = other DNA
tcagtatgacgcagcttaacctgaacaatgcggatttcagtctagcgagaaatgccagtctcagtacgctgatta

SEQ ID NO: 316255 - DNA, 75 bp, synthetic construct
  source 1..75: mol_type = other DNA
gaaaattgatggctccgggattaatggtggaagcctgaatactggtgatggcgcagttattctggctcagagacc

SEQ ID NO: 316256 - DNA, 75 bp, synthetic construct
  source 1..75: mol_type = other DNA
cagggagataattcctgggacatgcatggtcagaaggacttagatctcaattatgggaaaaatctgacattttct

SEQ ID NO: 316257 - DNA, 75 bp, synthetic construct
  source 1..75: mol_type = other DNA
tgtttagtagttttacccgctcagcactcgcgctggcggatggcgcgaatctgacggcgacatcgggactgatct

SEQ ID NO: 316258 - DNA, 75 bp, synthetic construct
  source 1..75: mol_type = other DNA
gatcttgaggtgcagcgtaatcttcctcgtacggagctattacgggaagcggtagatcaatacctggtaaatcaa

SEQ ID NO: 316259 - DNA, 75 bp, synthetic construct
  source 1..75: mol_type = other DNA
gcgaggttcaccgctgcaatattcgccgaaccatccgttcgctggtaaccggcgatcgcgtggtctggcgcccgg

SEQ ID NO: 316260 - DNA, 75 bp, synthetic construct
  source 1..75: mol_type = other DNA
gcgttgctggggctgcaaaaagagatcctgaccaacgatgtctctgacaactcggggctcggtcagcacaccacg

SEQ ID NO: 316261 - DNA, 75 bp, synthetic construct
  source 1..75: mol_type = other DNA
ctcggggcttggtcagcacaccacgaccgccgctcggctgtatcacttcccgcacggcggtgatgtgattgattc

SEQ ID NO: 316262 - DNA, 75 bp, synthetic construct
  source 1..75: mol_type = other DNA
cgtcgtgccgctgattgaccgggggctgcgggttcaggaatcggagctgcgggaccggttcggttttgctgaacc

SEQ ID NO: 316263 - DNA, 75 bp, synthetic construct
  source 1..75: mol_type = other DNA
ccagtgatgacgatgctgacgtgcaactggcggacgccatccgtgcactgatggaagccccgcaaatccccgaac

SEQ ID NO: 316264 - DNA, 75 bp, synthetic construct
  source 1..75: mol_type = other DNA
tgtcaaagggatcgtggaggcggtgcatgagcgtacttcggtattgacgcgcccggatttctacgacggcgtaaa

SEQ ID NO: 316265 - DNA, 75 bp, synthetic construct
  source 1..75: mol_type = other DNA
aaattttgatgcagaaattggtcggaagattgcccggcagaatgctgtaaacaaaatctggatgctcgaaggtta

SEQ ID NO: 316266 - DNA, 75 bp, synthetic construct
  source 1..75: mol_type = other DNA
agcagcaaacggggctgaccccccagcgttaccttaaccgcctgcggttgatgaaagcgcgccatctgttacgcc

SEQ ID NO: 316267 - DNA, 75 bp, synthetic construct
  source 1..75: mol_type = other DNA
ctactccgctacgtcctcgtcagagtgcttgttgtctttaaattgttcggtcgcacatggacgcttgaccttaag

SEQ ID NO: 316268 - DNA, 75 bp, synthetic construct
  source 1..75: mol_type = other DNA
acctcctgactttctgcgtactggtgctgaagaatggcttcaccgtcaccggagagagtgcctgtgcaagcccgg

SEQ ID NO: 316269 - DNA, 75 bp, synthetic construct
  source 1..75: mol_type = other DNA
gaaagttaaagtgggcatgggaacggatatcggtgccggaaccactttcaacatgctgcaaacgctaaacgaagc

SEQ ID NO: 316270 - DNA, 75 bp, synthetic construct
  source 1..75: mol_type = other DNA
agtttggctctgctgacattttgtgtattgactctacaaaatggcttcaccgtcaccggtgaaagcgcctgtgca

SEQ ID NO: 316271 - DNA, 75 bp, synthetic construct
  source 1..75: mol_type = other DNA
ggggcagaccatgaccacagataacggcagttcgcgttcacaggcggacgtgcacaatcaggtgcgcatggacat

SEQ ID NO: 316272 - DNA, 75 bp, synthetic construct
  source 1..75: mol_type = other DNA
gactatctggccaacatcttccgggtcggcggtgttgatcaactgactgactaccgtatcaatatcgggggctga

SEQ ID NO: 316273 - DNA, 75 bp, synthetic construct
  source 1..75: mol_type = other DNA
agggtgagatcaagtggaacagcttttaccgcgacgcgatgctgtctgccgcgaacccgtataagtcgctggcgc

SEQ ID NO: 316274 - DNA, 75 bp, synthetic construct
  source 1..75: mol_type = other DNA
cgggcaaggtcgcatcatggccgacagcagcggtagcgggatttctgaacatggcatcgcttattttcacaacct

SEQ ID NO: 316275 - DNA, 75 bp, synthetic construct
  source 1..75: mol_type = other DNA
gagtacgctgattatctatctggtgtcgattccattaggtattcgcaaagccgttcataacggcagccgctttga

SEQ ID NO: 316276 - DNA, 75 bp, synthetic construct
  source 1..75: mol_type = other DNA
ccgtatgttcagattaaacgagagcattgatcaggctctacaccatttcttaagcaaagaaggtgataaaaatga

SEQ ID NO: 316277 - DNA, 75 bp, synthetic construct
  source 1..75: mol_type = other DNA
gaggaggtcaaactgcctgacgtctccatgaccatgcaggagcataaggcgttggggatggtgggcaaggtggaa

SEQ ID NO: 316278 - DNA, 75 bp, synthetic construct
  source 1..75: mol_type = other DNA
atatcgacacataacggcgtcgataatctgtttaatcagtacattcaggatgcgcgcgaggggcgcaaggattac

SEQ ID NO: 316279 - DNA, 75 bp, synthetic construct
  source 1..75: mol_type = other DNA
ccagtgatgacgatgccgacgtgcagctggcggacgccatccgggcgctgatggacgctccgcaaattcccgaac

SEQ ID NO: 316280 - DNA, 75 bp, synthetic construct
  source 1..75: mol_type = other DNA
ggtatcgagccggtggtggtggctgccagtgacgacgatgccgatgtgcagctggcggatgccatccgtgagctg

SEQ ID NO: 316281 - DNA, 75 bp, synthetic construct
  source 1..75: mol_type = other DNA
attgaagcctgcccggaagtgcatgacctgaaactggcggcccgcttcaccactcgcacccccgccaactggaag

SEQ ID NO: 316282 - DNA, 75 bp, synthetic construct
  source 1..75: mol_type = other DNA
cccgcaagaggcgtggaccattcctgcccgtttttataccgatcagaacgcctttgaacacgaaaaagagaacgt

SEQ ID NO: 316283 - DNA, 75 bp, synthetic construct
  source 1..75: mol_type = other DNA
gcaaaaaactgattccgtcaagtgaaccccgtcagattgatcttcaggaagaagcaaccaaacttggtgtcgaga

SEQ ID NO: 316284 - DNA, 75 bp, synthetic construct
  source 1..75: mol_type = other DNA
ggacaatcagagagcagatgaaataaaggctttaaaaatattattattcagcatcatcagaaatatgcctcatga

SEQ ID NO: 316285 - DNA, 75 bp, synthetic construct
  source 1..75: mol_type = other DNA
aataatgaggcgctcaatagattatgcctggagataactgacgctatgttaaacacaacgagaatcgttgattag

SEQ ID NO: 316286 - DNA, 75 bp, synthetic construct
  source 1..75: mol_type = other DNA
tttaccagagcggatgtatatcaacagctaaaagaaaacaaactccatgcaatcaccctggtatggcatgggaaa

SEQ ID NO: 316287 - DNA, 75 bp, synthetic construct
  source 1..75: mol_type = other DNA
gtctgatctccgcgttcgctatcggttcttatggtctgggtagcctgggtttcaaatttatcgacacgcagctgc

SEQ ID NO: 316288 - DNA, 75 bp, synthetic construct
  source 1..75: mol_type = other DNA
caaattgcaggaacgttttggtgttaaacgcgtcaccatggcttccggcattttgctgggattaggcttcttcct

SEQ ID NO: 316289 - DNA, 75 bp, synthetic construct
  source 1..75: mol_type = other DNA
tagtggcgttaatgccggcgttggaacccattgatggcgaggcattgaattatattgatgcagcagttgcgctgg

SEQ ID NO: 316290 - DNA, 75 bp, synthetic construct
  source 1..75: mol_type = other DNA
aagcctgttcagcggttattgctgaatgacctgaacgttaatgcagccaaaaaagctctttcaaaattgcaggac

SEQ ID NO: 316291 - DNA, 75 bp, synthetic construct
  source 1..75: mol_type = other DNA
gataatgtaagcgcacatactggtatcattccttcggcagaaccgcgaaatcttgataagcttacttcaaaagag

SEQ ID NO: 316292 - DNA, 75 bp, synthetic construct
  source 1..75: mol_type = other DNA
aattaaaggctttaaatccaaagctggaaaatcatttgaggcagcgcttgtaattgacaaagaacaaaaacgggt

SEQ ID NO: 316293 - DNA, 75 bp, synthetic construct
  source 1..75: mol_type = other DNA
tatctccggttgaattttggattgatgggcaacccacgccctatgaagcagataaaccattacctgtcggaaagg

SEQ ID NO: 316294 - DNA, 75 bp, synthetic construct
  source 1..75: mol_type = other DNA
tgatgatgctttttatgctcctgatttttttgagaaggtgattcaatcaaatatcaaaaaagaaaccgttctttc

SEQ ID NO: 316295 - DNA, 75 bp, synthetic construct
  source 1..75: mol_type = other DNA
ggcgcacgcactccacctcacccgtggagaactccttaattactaaccttagctttgttgtgaaccgccccggga

SEQ ID NO: 316296 - DNA, 75 bp, synthetic construct
  source 1..75: mol_type = other DNA
cttcggcggcacaatcacggtgttcccttcactggtcagcgagttctttggacttaataatctggcgaaaaacta

SEQ ID NO: 316297 - DNA, 75 bp, synthetic construct
  source 1..75: mol_type = other DNA
ttaacggtctcggtgacgactccctgctgtggaacaaaacagctggcgcattcagcgccgcgcacggcactgacg

SEQ ID NO: 316298 - DNA, 75 bp, synthetic construct
  source 1..75: mol_type = other DNA
acgctactgcgggggcattcagtgccgcgcacggtactgatgccaccagcaaaatcaccaacgtcaaagacggtg

SEQ ID NO: 316299 - DNA, 75 bp, synthetic construct
  source 1..75: mol_type = other DNA
acgtttacgtccacaggatccaaacgctcctggatttgcagctaaccagcaacgctgggagaaaatgcaggccaa

SEQ ID NO: 316300 - DNA, 75 bp, synthetic construct
  source 1..75: mol_type = other DNA
aggctgagaaaggccggaatgccggtggtgactacgaccgtggaggtgcacgataacctgacgggaacaacccgc

SEQ ID NO: 316301 - DNA, 75 bp, synthetic construct
  source 1..75: mol_type = other DNA
gaggcgggcttactggtgaccgcactggatggtctgttctggttcggcagccagcgcattgcggctgatgtcctg

SEQ ID NO: 316302 - DNA, 75 bp, synthetic construct
  source 1..75: mol_type = other DNA
tggcgttgacactggcacatcaactgagttcaccaccacaggccgggcagcattcttcttccggccggataaccc

SEQ ID NO: 316303 - DNA, 75 bp, synthetic construct
  source 1..75: mol_type = other DNA
atgagtttctcgtttattaattcggcaggccagtatcaactcgaggctaaaaaatacgttcgccgcatcagagat

SEQ ID NO: 316304 - DNA, 75 bp, synthetic construct
  source 1..75: mol_type = other DNA
tttaaatttatcgacacgcacctgctcgaaacggtgggtctggaaaaaacctttgttatttggggcgcgattgta

SEQ ID NO: 316305 - DNA, 75 bp, synthetic construct
  source 1..75: mol_type = other DNA
cttcggcggtacaatcacggtgttcccgtcactggtcagcgagttctttgggcttaataatctggcgaaaaacta

SEQ ID NO: 316306 - DNA, 75 bp, synthetic construct
  source 1..75: mol_type = other DNA
atgcaaatacaggcattgaggcaggctaatgagctgagaaatcagtaccgccagcagtatgcggaccagcttagc

SEQ ID NO: 316307 - DNA, 75 bp, synthetic construct
  source 1..75: mol_type = other DNA
ttcctgaaagtgaggaaaggaataaattatcctttcaactccagcagtctatgcagtcttattacaatcaggcac

SEQ ID NO: 316308 - DNA, 75 bp, synthetic construct
  source 1..75: mol_type = other DNA
gcaataaagatggatatactcctccagatctgaccaaaccattcggttatggttcagccaattaccttccgagca

SEQ ID NO: 316309 - DNA, 75 bp, synthetic construct
  source 1..75: mol_type = other DNA
ccctcccgcagcgtgacacgctcgccctaaggatatttatcgatacatcatccgtggaagtatttattaacgacg

SEQ ID NO: 316310 - DNA, 75 bp, synthetic construct
  source 1..75: mol_type = other DNA
tggtgaactgatcaacaataaatttgccggacttatcagcaagcaaccgcagcacattctggatatgtgcaccgg

SEQ ID NO: 316311 - DNA, 75 bp, synthetic construct
  source 1..75: mol_type = other DNA
ccgccgtatgtcgatgcggaagatatgtccgacctgccaaacgaataccgccacgagccggaactgggcctggca

SEQ ID NO: 316312 - DNA, 75 bp, synthetic construct
  source 1..75: mol_type = other DNA
ggcgatggtgtgtttatgctcaccaaagcgcagcttattgcggcacgagaacattttggtatttataaagattaa

SEQ ID NO: 316313 - DNA, 75 bp, synthetic construct
  source 1..75: mol_type = other DNA
cactggagagatttccacactccccgtctcaacaaaattgtcaccgaggttacacctctggatataaccaatgcg

SEQ ID NO: 316314 - DNA, 75 bp, synthetic construct
  source 1..75: mol_type = other DNA
ttttgctgaaaataaaggactttttaaaccaggcaccgtgaacttctctttttatgataaacagggcaatgtcgt

SEQ ID NO: 316315 - DNA, 75 bp, synthetic construct
  source 1..75: mol_type = other DNA
ggcgatggtgtgtttatgctcaccaaagagcagcttattgccgcacgagaacatttcgcgatttataaagattaa

SEQ ID NO: 316316 - DNA, 75 bp, synthetic construct
  source 1..75: mol_type = other DNA
gtaaaaccgcctcgttcaatgaagagggccgtatgcacctgacggtttctctgctgattgactgtaatggcgaaa

SEQ ID NO: 316317 - DNA, 75 bp, synthetic construct
  source 1..75: mol_type = other DNA
cgaggaagaattacagcgtagcgtgcctgaaatcgccgcccgctatcgtcgccagctaaaagcccgtctcagtgc

SEQ ID NO: 316318 - DNA, 75 bp, synthetic construct
  source 1..75: mol_type = other DNA
ttgcatctgctccaatgcagcaacaccgcctgtcggcagtggaatgaacatgtacgatcggcttgctgtcttacg

SEQ ID NO: 316319 - DNA, 75 bp, synthetic construct
  source 1..75: mol_type = other DNA
aattactaattgcaattaaccaacttccaccgtcgcaaagtaccacagataaacaacagttacgtttttcagccc

SEQ ID NO: 316320 - DNA, 75 bp, synthetic construct
  source 1..75: mol_type = other DNA
agaatacgggttcacggaaggcgtggattatgaggttgttgaatatttgagccgacccgatccggtgagcgcaaa

SEQ ID NO: 316321 - DNA, 75 bp, synthetic construct
  source 1..75: mol_type = other DNA
cgcagcgttacgccgggaactgaaagcccgtatcaccgttgccagctactttaagccgatgtgtgccgcgctgga

SEQ ID NO: 316322 - DNA, 75 bp, synthetic construct
  source 1..75: mol_type = other DNA
aaaacctatacccttaccgcctttaatttcagccgttccggaaagcagattgtgttcagcgtggcagcccctgaa

SEQ ID NO: 316323 - DNA, 75 bp, synthetic construct
  source 1..75: mol_type = other DNA
agggcgcacgcattcttaaccagacaatgccgcaggttgctgcgaaactgggtgattcagtcactatctggcatc

SEQ ID NO: 316324 - DNA, 75 bp, synthetic construct
  source 1..75: mol_type = other DNA
tggacatggatagcacgcgcgttacccgaagatgcagagacggggggaggcctcatggttgcggtgattcagtta

SEQ ID NO: 316325 - DNA, 75 bp, synthetic construct
  source 1..75: mol_type = other DNA
catacggaaaaacgcatgcatactggagcggcgtattcgccatgacgctttgcgtgtttgtgctgatcgcttctg

SEQ ID NO: 316326 - DNA, 75 bp, synthetic construct
  source 1..75: mol_type = other DNA
tccgcgatcctaaagtgtggcgtgaagccgacacatggtggatggtagtcggggcgaaagacccaggcaacacgg

SEQ ID NO: 316327 - DNA, 75 bp, synthetic construct
  source 1..75: mol_type = other DNA
atgacgcaatctcgattgcatgcggcgcaaaacgcactagcaaaacttcacgagcgccgaggtaacactttctat

SEQ ID NO: 316328 - DNA, 75 bp, synthetic construct
  source 1..75: mol_type = other DNA
tggtgatggcaggcggtactggtggacatgtgttcccggggctggcggttgcgcaccatttaatggctcagggat

SEQ ID NO: 316329 - DNA, 75 bp, synthetic construct
  source 1..75: mol_type = other DNA
caacacccaaagtgaaactttatccactgacagcataaaaactttaatatacacgattctcgataagttaataag

SEQ ID NO: 316330 - DNA, 75 bp, synthetic construct
  source 1..75: mol_type = other DNA
aagcgctactgattactgaagtgctaccaaatgattcattaattaaaatagataaggaaattaatttcaactata

SEQ ID NO: 316331 - DNA, 75 bp, synthetic construct
  source 1..75: mol_type = other DNA
tgagtcagcaggtgacgtactcctgtgaacggaagaaaacgggtaacgggcagatttgcggtggtgagtttttct

SEQ ID NO: 316332 - DNA, 75 bp, synthetic construct
  source 1..75: mol_type = other DNA
gtatgcactgctcagcggctttttccacccacggcctgatattgctgtacggtgggttattccagattgcaccgt

SEQ ID NO: 316333 - DNA, 75 bp, synthetic construct
  source 1..75: mol_type = other DNA
atcatttatcaaaaatatttctacaactgatttcaatgaagaaagaaagattaaatttgaattatttttattagc

SEQ ID NO: 316334 - DNA, 75 bp, synthetic construct
  source 1..75: mol_type = other DNA
agcaaggtcgataagttacttcatgaaattagttcttatccgaatacagataaagcaagagctgctgaaacaata

SEQ ID NO: 316335 - DNA, 75 bp, synthetic construct
  source 1..75: mol_type = other DNA
tcccgctcagttccctaacgggcgttggcgcagcgcttagtaacaaactggcgaaaatcaacctgcataccgtgc

SEQ ID NO: 316336 - DNA, 75 bp, synthetic construct
  source 1..75: mol_type = other DNA
cgaaaacccggagcgtctgggtctggcgcagttacaccagctgcgcgggcgcgtaggtcgtggcgcggtggcttc

SEQ ID NO: 316337 - DNA, 75 bp, synthetic construct
  source 1..75: mol_type = other DNA
aataacttccgcaactggtttgcaccgctcggtatcgaagtgggctggctcgccggtaagcagaaaggtaaagcg

SEQ ID NO: 316338 - DNA, 75 bp, synthetic construct
  source 1..75: mol_type = other DNA
tcccgctcagttccctaacgggcgttggcgcggcgcaaagtaacaagctggcgaaaatcaacctgcataccgtgc

SEQ ID NO: 316339 - DNA, 75 bp, synthetic construct
  source 1..75: mol_type = other DNA
gcatccggcacaacgtcgtctgattctggaagaactgctggcgcacaacctcagtatgttggcgttacgcgctgg

SEQ ID NO: 316340 - DNA, 75 bp, synthetic construct
  source 1..75: mol_type = other DNA
tattcacgaacgttatccccagcaggcaaaagccctgatagaacgctggatgccggagacggaacgctattcgaa

SEQ ID NO: 316341 - DNA, 75 bp, synthetic construct
  source 1..75: mol_type = other DNA
actgtcattgaagtcggtgttgatgtacccaatgccagtctgatgattatcgaaaacccggagcgtctgggtctg

SEQ ID NO: 316342 - DNA, 75 bp, synthetic construct
  source 1..75: mol_type = other DNA
acctgcgccattgaagaactcctgccgccggaactgtcacaaggaatgatgacgctaccggaagcgttgcgcact

SEQ ID NO: 316343 - DNA, 75 bp, synthetic construct
  source 1..75: mol_type = other DNA
taccccatcggagaactactgccgggcgtttatgccacggtggaaggcgaagtgctgaactgcaatatctccttc

SEQ ID NO: 316344 - DNA, 75 bp, synthetic construct
  source 1..75: mol_type = other DNA
gcatccggcacaacgccgtctgattctggaagaactgctggcgcacaacctcagcatgttggcgttacgcgctgg

SEQ ID NO: 316345 - DNA, 75 bp, synthetic construct
  source 1..75: mol_type = other DNA
cggaagttcagcgcctggcgcgacatattcacgaacgttacccacaacaggcaaaagccctgatagaacgctgga

SEQ ID NO: 316346 - DNA, 75 bp, synthetic construct
  source 1..75: mol_type = other DNA
cgggccgccgtgtgctggcctatggagaagcaaagcgcggtaaatacggtgcagagatgatccacccggaatacc

SEQ ID NO: 316347 - DNA, 75 bp, synthetic construct
  source 1..75: mol_type = other DNA
ccgtaacgacatcattgaccgcgtgcgtcacgcctgcatgactgaaggacgtcaggcttactgggtttgtacgtt

SEQ ID NO: 316348 - DNA, 75 bp, synthetic construct
  source 1..75: mol_type = other DNA
cgaaggtgaatcaggtacagatttaccaaatgaaacggacaaaaattcaccagaaaacacgggatctgatgctga

SEQ ID NO: 316349 - DNA, 75 bp, synthetic construct
  source 1..75: mol_type = other DNA
tactggaacagtgaagaagttaaggagtacatcaaatcgctggcatacagttacgcgcacggtattaaagtacct

SEQ ID NO: 316350 - DNA, 75 bp, synthetic construct
  source 1..75: mol_type = other DNA
gccggtgcgctggaaattatcgtctatgcgggtgccattatggtgctgttcgtgtttgtggtgatgatgctcaac

SEQ ID NO: 316351 - DNA, 75 bp, synthetic construct
  source 1..75: mol_type = other DNA
ttctcggtcacgaaggggctggcgttgtggttgaagtcggtgaaggcgtgaccagcgttaaacctggcgaccatg

SEQ ID NO: 316352 - DNA, 75 bp, synthetic construct
  source 1..75: mol_type = other DNA
caaccggggcgctgtccgcactgaaaaccacagagcgcccgaaagacagcgcagggcaggcaattgatctcgaca

SEQ ID NO: 316353 - DNA, 75 bp, synthetic construct
  source 1..75: mol_type = other DNA
gtgcaactggtcccgcgtctgtggggcaatgaacccggcgtcctggccggtcgcttgtgtaaccgttcggtgacg

SEQ ID NO: 316354 - DNA, 75 bp, synthetic construct
  source 1..75: mol_type = other DNA
gtattccttgaagaaacgcttagcgagcacaagcgcaccatcagctataagctccccgtctataacgcctttggc

SEQ ID NO: 316355 - DNA, 75 bp, synthetic construct
  source 1..75: mol_type = other DNA
tattcacgaacgttacccacagcaggcaaaagccctgatagaacgctggatgccagaaacagaacgctactcgaa

SEQ ID NO: 316356 - DNA, 75 bp, synthetic construct
  source 1..75: mol_type = other DNA
atgaccgccacgccgatcccccgcacgctggcaatgactgcgtatgccgatctcgatacctcggtcattgatgaa

SEQ ID NO: 316357 - DNA, 75 bp, synthetic construct
  source 1..75: mol_type = other DNA
gcctgatagccatacttgcgaccttgcgagtgatcacccataccaatccggtacacgcattgctgtacctgatta

SEQ ID NO: 316358 - DNA, 75 bp, synthetic construct
  source 1..75: mol_type = other DNA
cgtgttcgtggtgatgatgctcaacctgggcggttcagaaatcgaacaggaacgccagtggctgaaaccgcaggt

SEQ ID NO: 316359 - DNA, 75 bp, synthetic construct
  source 1..75: mol_type = other DNA
ccacgatattgaaatcgaagtggcggtattcctcgaagaaacgcttactgagcataagcgtaccatcagctataa

SEQ ID NO: 316360 - DNA, 75 bp, synthetic construct
  source 1..75: mol_type = other DNA
tgagcaagttacgcagcgttgccgaaaaaggtgttatcaagcgcgccgatagttacaaggtgctttactccgaac

SEQ ID NO: 316361 - DNA, 75 bp, synthetic construct
  source 1..75: mol_type = other DNA
agtaccccttgtagaagatcctatctacaaagtagttgggaatagtgagcgcatttttggttacgatataagcct

SEQ ID NO: 316362 - DNA, 75 bp, synthetic construct
  source 1..75: mol_type = other DNA
ttctgagggaaggtgagtttactggcctgaaccctttccagttagatgaaataaaaatggcaacggatgataacg

SEQ ID NO: 316363 - DNA, 75 bp, synthetic construct
  source 1..75: mol_type = other DNA
gcaaacaacaattcgtgtattgttacctaatcctaatgcaaaatggcagcattataaggaaattggaataacaag

SEQ ID NO: 316364 - DNA, 75 bp, synthetic construct
  source 1..75: mol_type = other DNA
caatctcaatgattggggataacaaactaatggctacggttaagatagcgggttatccatatgaactagcggatg

SEQ ID NO: 316365 - DNA, 75 bp, synthetic construct
  source 1..75: mol_type = other DNA
atccgatgttattcggcatagactttaagcagtcgatgcgattaccaatgatgatgttgggtgcgcaatacttcg

SEQ ID NO: 316366 - DNA, 75 bp, synthetic construct
  source 1..75: mol_type = other DNA
gataaatattgtgtttcttatacccttcgttcattccctgcaaagattaagcctggtgcgcttgattttattcta

SEQ ID NO: 316367 - DNA, 75 bp, synthetic construct
  source 1..75: mol_type = other DNA
cattgcccgattcagtttcattcgctcaacttgacgccatcctttatgccaacagaaagaaggaattaacagagc

SEQ ID NO: 316368 - DNA, 75 bp, synthetic construct
  source 1..75: mol_type = other DNA
gtgacctatatcggtatcgactcaaccggcgttggtcacggggtttatgagaacgtgaaagcgttctttcctgcc

SEQ ID NO: 316369 - DNA, 75 bp, synthetic construct
  source 1..75: mol_type = other DNA
aatgcccaggcgatgtacagtcaactggaaggactgggaatgacgcaacagcaggcatcaggctggattgcccag

SEQ ID NO: 316370 - DNA, 75 bp, synthetic construct
  source 1..75: mol_type = other DNA
aaatttgtggcccatttgggttatcggtactgcaaaacgatgggtacatgaatgaatctgcgaatttcctttcat

SEQ ID NO: 316371 - DNA, 75 bp, synthetic construct
  source 1..75: mol_type = other DNA
acacttttgaatgtatcggtaacgtcaacgttatgcgtgcggcgctggaaagtgctcaccgtggctggggccagt

SEQ ID NO: 316372 - DNA, 75 bp, synthetic construct
  source 1..75: mol_type = other DNA
ggcgctgttcacaacacagcgaaagtacagcctggagattctgtcgctatttttggtcttggcgcaatcggtctg

SEQ ID NO: 316373 - DNA, 75 bp, synthetic construct
  source 1..75: mol_type = other DNA
ccgcttacgcaagagcagttaaagcaatcgctcaaagcagggcgtatggattatgaaatgtgctggcttatctct

SEQ ID NO: 316374 - DNA, 75 bp, synthetic construct
  source 1..75: mol_type = other DNA
gtcgcaaattgcgctggtggcgattccgggtaatgactccaacttattgatagtgttttatgttcagataatgcc

SEQ ID NO: 316375 - DNA, 75 bp, synthetic construct
  source 1..75: mol_type = other DNA
ccgcgctcaatttctatggttataaccatgaaacgatgtgccagaaacatacctgggaaattaatatgctcgggc

SEQ ID NO: 316376 - DNA, 75 bp, synthetic construct
  source 1..75: mol_type = other DNA
gctttgtatcgagcgaaaaatgatggacgcaaccgcgtgctggcggcataagccacggatgcgtctcgtgatcaa

SEQ ID NO: 316377 - DNA, 75 bp, synthetic construct
  source 1..75: mol_type = other DNA
ttctggtgtgcggtcgctacgaaggtatagatgagcgcgtgatccaaaacgaaattgacgaagaatggtcaatcg

SEQ ID NO: 316378 - DNA, 75 bp, synthetic construct
  source 1..75: mol_type = other DNA
tccgtttcccggtttattccgggagtactgggacatgaagcctcagcaacggaagattcctttgctgaaggattg

SEQ ID NO: 316379 - DNA, 75 bp, synthetic construct
  source 1..75: mol_type = other DNA
tccgtcagtcttactgtcgggcaaccatgctgagatacgtcgctggcgtttgaagcagtcgctgggccgtacctg

SEQ ID NO: 316380 - DNA, 75 bp, synthetic construct
  source 1..75: mol_type = other DNA
gatcccaaaaaagccttcaccctgtggtgggtcgactccagtaagcccggcattaagattaacccgctgcataaa

SEQ ID NO: 316381 - DNA, 75 bp, synthetic construct
  source 1..75: mol_type = other DNA
cggtgacaaggaatacgcagaagtgcttgttgccataaccgaacttacaaatacattgcgtaaacagttaatgga

SEQ ID NO: 316382 - DNA, 75 bp, synthetic construct
  source 1..75: mol_type = other DNA
caaatgccgcaattgatgaagagggtacggcgctaaactcaatcaaaaaccttgttcaaaacggtgaagtgtttc

SEQ ID NO: 316383 - DNA, 75 bp, synthetic construct
  source 1..75: mol_type = other DNA
ggctttgccgaatgcgcattcgaagatgccgcccgctatgccaaccaacgtatcgcttttggtaagcccattggt

SEQ ID NO: 316384 - DNA, 75 bp, synthetic construct
  source 1..75: mol_type = other DNA
gctggtgctggcgcgcgatccgcaaccgaaagatcccaaaaaagccttcaccctgtggtgggtcgactccagtaa

SEQ ID NO: 316385 - DNA, 75 bp, synthetic construct
  source 1..75: mol_type = other DNA
gcatcggcggcggtactgacgaaataatgatttatgttgcgggccgacaaatcctgaaagattaccagaataaat

SEQ ID NO: 316386 - DNA, 75 bp, synthetic construct
  source 1..75: mol_type = other DNA
attgtgtgaattgctattaaagattacaggtgaagatatccatcaggcgagagaatacgagagtcttcaccagtt

SEQ ID NO: 316387 - DNA, 75 bp, synthetic construct
  source 1..75: mol_type = other DNA
agatgaaagtgttattagttcagttattgaatttctttcatctggaagtaataaaacattactcataacagataa

SEQ ID NO: 316388 - DNA, 75 bp, synthetic construct
  source 1..75: mol_type = other DNA
ttgacgacgtgactaattttcactcttttcagaatataaatgaaggtaatactgaaataaaaaacgtcatccgta

SEQ ID NO: 316389 - DNA, 75 bp, synthetic construct
  source 1..75: mol_type = other DNA
tgaccggtaataatttgaatgttgaaaaaccagcacctgttgcttcagctacgccatcaccagctgtgaatgtta

SEQ ID NO: 316390 - DNA, 75 bp, synthetic construct
  source 1..75: mol_type = other DNA
gtgaaagaagtggtgctggatgatgaaaatggctaccagatacggttgacgcctcaattaacgggtaaaggccag

SEQ ID NO: 316391 - DNA, 75 bp, synthetic construct
  source 1..75: mol_type = other DNA
actccaagacagcagaagaattatacgagtggtatctggatgataaattaattataaatcgaagatacggtgatg

SEQ ID NO: 316392 - DNA, 75 bp, synthetic construct
  source 1..75: mol_type = other DNA
aaaatggcaagttttctaggttaattctactcaatttaattactaaaaccatgaaaattatatttgataatcgaa

SEQ ID NO: 316393 - DNA, 75 bp, synthetic construct
  source 1..75: mol_type = other DNA
gaagatttcggtaagcctgagcgcattgtcaccgcgctggacatcatgaccgaaggcccgctgggtggcgcggca

SEQ ID NO: 316394 - DNA, 75 bp, synthetic construct
  source 1..75: mol_type = other DNA
tgcgttcgacaagcactgggtaggttcaaccgcgacggtcgccaaagtgtcgaacatgatcactccgcccgaacg

SEQ ID NO: 316395 - DNA, 75 bp, synthetic construct
  source 1..75: mol_type = other DNA
cagatagtctatgtttttgatgaatggcaagccagatcactcacagacaatattgagtacatagatctcggtatt

SEQ ID NO: 316396 - DNA, 75 bp, synthetic construct
  source 1..75: mol_type = other DNA
ttattgtccggctggaatgtttatattgatgatgtaactaattttcattcttttcagaatattaatgagggtaat

SEQ ID NO: 316397 - DNA, 75 bp, synthetic construct
  source 1..75: mol_type = other DNA
gccagtcctactaacgaagatctcagtcctgaggaaagggacgccatgtacgagaagtacgaaaaagcagtacaa

SEQ ID NO: 316398 - DNA, 75 bp, synthetic construct
  source 1..75: mol_type = other DNA
gctggtttacggggtatgtggagcgatcgcagcccgctgaaaacggttttcagcgtctgttcattcgtgagctgg

SEQ ID NO: 316399 - DNA, 75 bp, synthetic construct
  source 1..75: mol_type = other DNA
gcacgggctatcagctttttgccagtctgggccgtgcattttcagtgacggattatctttggtatcagttgccgg

SEQ ID NO: 316400 - DNA, 75 bp, synthetic construct
  source 1..75: mol_type = other DNA
accagaagctctacgcctggctgccgagttggcagaacagaaaatgcagttggaacaacagctggtggccgcagc

SEQ ID NO: 316401 - DNA, 75 bp, synthetic construct
  source 1..75: mol_type = other DNA
gcctcaattaacgggtaaaggccagcagtggttgacgcgtaaactgctcgatgctggcttgttaaaaccggtggc

SEQ ID NO: 316402 - DNA, 75 bp, synthetic construct
  source 1..75: mol_type = other DNA
taatgacacgatggcgatcacatggacgccgagaaaccgcgcaacgggtaaacctttgcagaaaacaccggcgca

SEQ ID NO: 316403 - DNA, 75 bp, synthetic construct
  source 1..75: mol_type = other DNA
aaaacagcgggatcggtgtcagtgtacccgatgtgtcttacagcgatactccgatcccccatttcacccataacg

SEQ ID NO: 316404 - DNA, 75 bp, synthetic construct
  source 1..75: mol_type = other DNA
gcacgggttatcagttgctgaataatctgggcagagcattcagtattcaggattacatctggtaccagttgccgg

SEQ ID NO: 316405 - DNA, 75 bp, synthetic construct
  source 1..75: mol_type = other DNA
agcaggtcagtgccggggattttagccaggccgtgaaaggtaacaggctggccagcattgaaggaaacgaagaaa

SEQ ID NO: 316406 - DNA, 75 bp, synthetic construct
  source 1..75: mol_type = other DNA
gactaatgacacgatggcgatcacatggacgccgagaaaccgcgcaacgggtaaacctttgcagaaaacaccggc

SEQ ID NO: 316407 - DNA, 75 bp, synthetic construct
  source 1..75: mol_type = other DNA
cccgtagaaatcccgtcagagttcagccagggggctgctggtggtaactctgtgacattaccagtgatccagact

SEQ ID NO: 316408 - DNA, 75 bp, synthetic construct
  source 1..75: mol_type = other DNA
gatggggagggttacgaaatcttcgtaacccctatggataagaaaaaaggtggagcggatcaggtagttatagta

SEQ ID NO: 316409 - DNA, 75 bp, synthetic construct
  source 1..75: mol_type = other DNA
atgaaatagccgaagcgatcgccttgcatactgcctgtatgccgacacgggagatccccggcgcaattgctaact

SEQ ID NO: 316410 - DNA, 75 bp, synthetic construct
  source 1..75: mol_type = other DNA
cggacatagcaggacagcagtccattaaagtgggcggtgctgtagccgtggaggttggcgaaagcctgactgaaa

SEQ ID NO: 316411 - DNA, 75 bp, synthetic construct
  source 1..75: mol_type = other DNA
actggataagccttgggcggtgcaagttctggccgtaaccagtggtggggcgtggttcgcagtggacctgcaagt

SEQ ID NO: 316412 - DNA, 75 bp, synthetic construct
  source 1..75: mol_type = other DNA
tggagaactttaaattctggatggagaaaaacggctggctggtggttgataaatcgcagttactggaaaggctga

SEQ ID NO: 316413 - DNA, 75 bp, synthetic construct
  source 1..75: mol_type = other DNA
tccatttcaatagccacggtcaggttgagttcacggaaaaagtcccagccgacgcaatggtgtgcaccctggagc

SEQ ID NO: 316414 - DNA, 75 bp, synthetic construct
  source 1..75: mol_type = other DNA
tgcgggtgactttaagtcactcacaaaatcccatctctcccaaaactcgctccctcatcctctggacagaacgcg

SEQ ID NO: 316415 - DNA, 75 bp, synthetic construct
  source 1..75: mol_type = other DNA
tcgcgagaacatggggcgcgagcgcatccgtagcgaagttttgcgccaccagcatccgggtatgagctttggtgc

SEQ ID NO: 316416 - DNA, 75 bp, synthetic construct
  source 1..75: mol_type = other DNA
aactggaagactgctatttcagacaaaaggatccgtcagcgccagcttcatgccagaaaagttacgacacgcgag

SEQ ID NO: 316417 - DNA, 75 bp, synthetic construct
  source 1..75: mol_type = other DNA
ggtaaacactttttcaaggttgttggtgatgagttgaaaaatttgcgggttactttaagtaactcacaaacgcct

SEQ ID NO: 316418 - DNA, 75 bp, synthetic construct
  source 1..75: mol_type = other DNA
cgttctttcattaacaaactcccttcagcttctgcgcaagcggctcgtgaagttgttcaaaaaatatttggttaa

SEQ ID NO: 316419 - DNA, 75 bp, synthetic construct
  source 1..75: mol_type = other DNA
agtttccagatgaaccaacgctatcgaaaaaggcacttgatgcaattcaagctaaacgtgccgagcaaaaaagcg

SEQ ID NO: 316420 - DNA, 75 bp, synthetic construct
  source 1..75: mol_type = other DNA
gatatcaacaaatggggtatcgaccatacctttgaatgcatcggtaacgtcaacgtgatgcgtgcagcgctggaa

SEQ ID NO: 316421 - DNA, 75 bp, synthetic construct
  source 1..75: mol_type = other DNA
tatcgttatgaccactcagatttctgtcgaaactctttccccaattacacacaaccaaattcccgttatcactac

SEQ ID NO: 316422 - DNA, 75 bp, synthetic construct
  source 1..75: mol_type = other DNA
gtctgcgaagggtctggacgtggacgaagtggtgaagatgtacacctctgcgtttccagatgaaccaacgatctc

SEQ ID NO: 316423 - DNA, 75 bp, synthetic construct
  source 1..75: mol_type = other DNA
catgcaggaaccggtaaatcttctcttcctacgcagctatgtgccctgctaaatcgaccactgatccgcgcccag

SEQ ID NO: 316424 - DNA, 75 bp, synthetic construct
  source 1..75: mol_type = other DNA
gcgcgtgccgatgcgtgagatccagcttagcccgacgctaatcggcggcagcaaagaacagccgcagtacgaaga

SEQ ID NO: 316425 - DNA, 75 bp, synthetic construct
  source 1..75: mol_type = other DNA
atgacaactaaaatttctgtcgaaactctttccccgatcacttacaaccagattcctgttattaccaccgaactt

SEQ ID NO: 316426 - DNA, 75 bp, synthetic construct
  source 1..75: mol_type = other DNA
tcatgccaaaatgctggaaaccgatcaggcgtgggaagtgttcgaaaaacttgaagactgttatttcagccacaa

SEQ ID NO: 316427 - DNA, 75 bp, synthetic construct
  source 1..75: mol_type = other DNA
tcccatcacttacacatcaacaccttcctgttataacgacagaacttctggctgagctgtacggaacagagcgcc

SEQ ID NO: 316428 - DNA, 75 bp, synthetic construct
  source 1..75: mol_type = other DNA
cccggtgagtggatgtcgctggtcggtcttaatgccgatgattttccgccagccaatgaaccggtaattgcgaaa

SEQ ID NO: 316429 - DNA, 75 bp, synthetic construct
  source 1..75: mol_type = other DNA
gccagtacttcaccccgcgtccgctgattaaaaccattattcatctgctgaaaccgcagccgcgtgaagtggtgc

SEQ ID NO: 316430 - DNA, 75 bp, synthetic construct
  source 1..75: mol_type = other DNA
gacacgaagccatgcgcaattttatgcgaaaacgctggcattaaccgaagccacgcctgaactctctgggttaag

SEQ ID NO: 316431 - DNA, 75 bp, synthetic construct
  source 1..75: mol_type = other DNA
atcttacctgggaagcgttccgcgacaccctgctggaacaagccgagcaaggtgtggattacttcactatccatg

SEQ ID NO: 316432 - DNA, 75 bp, synthetic construct
  source 1..75: mol_type = other DNA
aaagtcgcccatttttgctccatgtgtgggccgaaattctgctcgatgaaaattagccaggaagtgcgtgattac

SEQ ID NO: 316433 - DNA, 75 bp, synthetic construct
  source 1..75: mol_type = other DNA
tgcgtaacagcccggtgccaatcggtactgtgccgatctaccaggcactggagaaggttaatgggatcgctgaag

SEQ ID NO: 316434 - DNA, 75 bp, synthetic construct
  source 1..75: mol_type = other DNA
tggaacggtttaaattctatctggagcaacacggctggatcgttgcccgtaaagaacaactagtggaaaggctga

SEQ ID NO: 316435 - DNA, 75 bp, synthetic construct
  source 1..75: mol_type = other DNA
cgcaggcgaacctgaaccgggaatggcaggtggtggcaagtgaactgcacggcgaacagccacaggcggtgccgg

SEQ ID NO: 316436 - DNA, 75 bp, synthetic construct
  source 1..75: mol_type = other DNA
tactttaagtaagtcacaaaatcccatctctcccaaaacccgcttcctcatcctatggacagaacgcggagctgc

SEQ ID NO: 316437 - DNA, 75 bp, synthetic construct
  source 1..75: mol_type = other DNA
aaaaaccaatttaccgttagtgtaaatcagccgttgagttttgcttatgaggattacggttcactctttttatct

SEQ ID NO: 316438 - DNA, 75 bp, synthetic construct
  source 1..75: mol_type = other DNA
tatcgatgacagcttgcgtcatgaacccaatatggcacaggcctctttttactacggtttcaataatttattcac

SEQ ID NO: 316439 - DNA, 75 bp, synthetic construct
  source 1..75: mol_type = other DNA
ttccgttggtggatatcttagctatgactccacatggggaggtttttccgcttctgcttctgccagcaccgataa

SEQ ID NO: 316440 - DNA, 75 bp, synthetic construct
  source 1..75: mol_type = other DNA
gtgccttcacgattgatgacatcagcccatccggcttcggctctgaactgttagtgactattgaagaagctgatg

SEQ ID NO: 316441 - DNA, 75 bp, synthetic construct
  source 1..75: mol_type = other DNA
gtaaacctgtcacttgccttgctcattaccagcagagcgcagcaccagaaaaaatagcgcaatctattattttga

SEQ ID NO: 316442 - DNA, 75 bp, synthetic construct
  source 1..75: mol_type = other DNA
tgttattgatgatttaagcccatcaggctacggcagcgatctcattatcacaatcgaagaatctgatggcataaa

SEQ ID NO: 316443 - DNA, 75 bp, synthetic construct
  source 1..75: mol_type = other DNA
ccgaacagcctgtcactttacttgccagagaaggcgacgaaggagactgcctggatctggcaaagtcatacgaaa

SEQ ID NO: 316444 - DNA, 75 bp, synthetic construct
  source 1..75: mol_type = other DNA
ggttataaaatctatgaaaccaccgtaccacccggtgaatttgttatagacgacattagcccctccggctttggt

SEQ ID NO: 316445 - DNA, 75 bp, synthetic construct
  source 1..75: mol_type = other DNA
ggcccaaccacaaactctgggaagcagcaataccttattacttaacaatcttacctgtcaggtagcaaatcacta

SEQ ID NO: 316446 - DNA, 75 bp, synthetic construct
  source 1..75: mol_type = other DNA
ggacattagcggaatcgaaaatgatgtagaaatgaaatctaccagtacaattgccgtccctcgtcagggcgctgt

SEQ ID NO: 316447 - DNA, 75 bp, synthetic construct
  source 1..75: mol_type = other DNA
aacgatgctctgacattaatcgatgaagtaaaacatccggaacaggacctcgaaccgcaaaacatgcgtaactac

SEQ ID NO: 316448 - DNA, 75 bp, synthetic construct
  source 1..75: mol_type = other DNA
tgaaaaattaccaaaactatgttgatccttccttgtgggaaaacggtatcaacgcggccatgttgtcttacaacg

SEQ ID NO: 316449 - DNA, 75 bp, synthetic construct
  source 1..75: mol_type = other DNA
gggagcaggaatatcatgcccggatacgcgcggagacaggtgagcgtatccggcgggaatggtatgagcagtgcc

SEQ ID NO: 316450 - DNA, 75 bp, synthetic construct
  source 1..75: mol_type = other DNA
gtggacaagttgctggaagtcacgccacgccatcctgaagtactgcgtctggcggagcaggcttatatccgcacc

SEQ ID NO: 316451 - DNA, 75 bp, synthetic construct
  source 1..75: mol_type = other DNA
atgctaaaagtgttattgctctttgtgttgctgattgcaggcatcgtcgtcggcccaatgattgccggacaccag

SEQ ID NO: 316452 - DNA, 75 bp, synthetic construct
  source 1..75: mol_type = other DNA
gaagccgcgcaacaacgtggtgatgaagcacgcgccaaccaacatctggaacgcgcagcagagctggccggcaat

SEQ ID NO: 316453 - DNA, 75 bp, synthetic construct
  source 1..75: mol_type = other DNA
aaattatcatcgacggcctgaaacaccagtatgacgatcgtttgctactgccgatcccacgcctgaaaaccaaca

SEQ ID NO: 316454 - DNA, 75 bp, synthetic construct
  source 1..75: mol_type = other DNA
gaagccgcgcaacagcgtggtgatgaatcgcgcgccaatcagcatctggaacgcgcggcggaactggcgggcaat

SEQ ID NO: 316455 - DNA, 75 bp, synthetic construct
  source 1..75: mol_type = other DNA
atgctaaaagtgttattgctctttgttttgctgattgcggggatagtggttggcccgatgattgccggacaccag

SEQ ID NO: 316456 - DNA, 75 bp, synthetic construct
  source 1..75: mol_type = other DNA
agcatcgcaaaggtgcggcaaaatggtatgcggaaaacgaaagcggcaattactaccacgcaacacaaccgcgta

SEQ ID NO: 316457 - DNA, 75 bp, synthetic construct
  source 1..75: mol_type = other DNA
tcaacctgacgggaaccgtgctgcataccaaccttgggcgagctttacaggcggaagccgcggtggaagccgttg

SEQ ID NO: 316458 - DNA, 75 bp, synthetic construct
  source 1..75: mol_type = other DNA
taaagaggtggtggtgtctcgtggcgaactggtggagatcggcggcgcgtttcgtatccctgacgtcatgcgtca

SEQ ID NO: 316459 - DNA, 75 bp, synthetic construct
  source 1..75: mol_type = other DNA
gcgatggtagtgctgtttgccattgagtggctactgcggcggatcttccgcacaggcgcacacacccgtgggtgg

SEQ ID NO: 316460 - DNA, 75 bp, synthetic construct
  source 1..75: mol_type = other DNA
ttttgctgattgcggggatagtggttggcccgatgattgccggtcatcagggttacgtgctgatccagaccgaca

SEQ ID NO: 316461 - DNA, 75 bp, synthetic construct
  source 1..75: mol_type = other DNA
agcgaaggtttgcgtaactggtggaaaaaccaaagccggaaaacgcgtcatcaggtggcgttgcaggtggcaatg

SEQ ID NO: 316462 - DNA, 75 bp, synthetic construct
  source 1..75: mol_type = other DNA
tggggcagcttcagcgtcaacctgcaacgtagctggaatgaagacggcgagaaagatgacgcgatgtacgtcagt

SEQ ID NO: 316463 - DNA, 75 bp, synthetic construct
  source 1..75: mol_type = other DNA
aaattaagcccgacagcgatctcgtcaacgatcttggcctggagtcaatcaaagtgatggatctcttaatgatgc

SEQ ID NO: 316464 - DNA, 75 bp, synthetic construct
  source 1..75: mol_type = other DNA
acggccactcgtaccggtgtggttggtggctccttttcctaccgcaccacaaacgtgaacaccaatttagtgtcc

SEQ ID NO: 316465 - DNA, 75 bp, synthetic construct
  source 1..75: mol_type = other DNA
attgtcttcgcggtggtgctggtaacgctggggaaatatctctttcctgcaaaacccgttgtcgcccccatcatt

SEQ ID NO: 316466 - DNA, 75 bp, synthetic construct
  source 1..75: mol_type = other DNA
ctatctggaccggagagccgagcgtgatttatggcaacgtccgtaacgatggcttgattgataacctgccgcaag

SEQ ID NO: 316467 - DNA, 75 bp, synthetic construct
  source 1..75: mol_type = other DNA
gaatatgccagcacaatcatgaacgctatctggactggcgagccgagtgtgatttatggcaacgtccgtaacgat

SEQ ID NO: 316468 - DNA, 75 bp, synthetic construct
  source 1..75: mol_type = other DNA
atgaaatccaccacagttatcagccagcagattaacaaagtgcagtcagccattatggcacttaaggcgacgaat

SEQ ID NO: 316469 - DNA, 75 bp, synthetic construct
  source 1..75: mol_type = other DNA
atgcgtttccgccagttgttaccgctttttggcgcgctgtttgcgttgtatatcatttggggctcaacctatttt

SEQ ID NO: 316470 - DNA, 75 bp, synthetic construct
  source 1..75: mol_type = other DNA
ggtcatcccgatgctgttttatcacggtagccgtagcccttatccctggtctttgtgctggctggacgaatttgc

SEQ ID NO: 316471 - DNA, 75 bp, synthetic construct
  source 1..75: mol_type = other DNA
atgacaaacttcacaaccagcacgccgcatgacgcattatttaaatcctttctcacccaccctgacaccgcgcgg

SEQ ID NO: 316472 - DNA, 75 bp, synthetic construct
  source 1..75: mol_type = other DNA
agatgctggcggcaggcgtggtgttaatgatcgcatcgatgattgcgggtgaaaaactgacggcgctcccttccc

SEQ ID NO: 316473 - DNA, 75 bp, synthetic construct
  source 1..75: mol_type = other DNA
ggcctccgttaatgatggcgggcgttcgattcctggcagccggtattttattgctggcatttttgctactgcgcg

SEQ ID NO: 316474 - DNA, 75 bp, synthetic construct
  source 1..75: mol_type = other DNA
gtaggaatgatggcgggcgccattgagatgctggcggctggagtggtgttaatgatcgcgtcgatgattgcaggt

SEQ ID NO: 316475 - DNA, 75 bp, synthetic construct
  source 1..75: mol_type = other DNA
ggcattgacgaaatatatgctcttgttgacgacttgattgccgcccacggcgactggctgccaggctggttgcac

SEQ ID NO: 316476 - DNA, 75 bp, synthetic construct
  source 1..75: mol_type = other DNA
gaacgatgccctgacgttacaggatgatgccagacacagctcgccagacgagcaacgcacaatggggaattatca

SEQ ID NO: 316477 - DNA, 75 bp, synthetic construct
  source 1..75: mol_type = other DNA
cgccctcaacgtggacaacctggatgaagatgtggaactgaaaagcaccagcaccgtcgcgatcccgcgccaggg

SEQ ID NO: 316478 - DNA, 75 bp, synthetic construct
  source 1..75: mol_type = other DNA
cctcctataacgcattgaaagagacggaaagcctgaaaaccatcagtggtttcaccagctatgagtcaccctggg

SEQ ID NO: 316479 - DNA, 75 bp, synthetic construct
  source 1..75: mol_type = other DNA
tgtccgcgtgtttgtaaacggtcaggcgacgtccagcttagaaattccgtttgtggatattggcgaaaacagtgc

SEQ ID NO: 316480 - DNA, 75 bp, synthetic construct
  source 1..75: mol_type = other DNA
ctggggctaaacgacgcgttaacgctgattaattcagccaatcatcctgatgaagaggactactcgggtattgtc

SEQ ID NO: 316481 - DNA, 75 bp, synthetic construct
  source 1..75: mol_type = other DNA
gcaactacctggggctcaatgacgcactgaatctacaggatgatgccaaacatctacccgccaacgaacagcaga

SEQ ID NO: 316482 - DNA, 75 bp, synthetic construct
  source 1..75: mol_type = other DNA
gcaactaaagttttgcctggtgctgatttaagaacgtatgttgattttaagaacagcacggttcatgttgactca

SEQ ID NO: 316483 - DNA, 75 bp, synthetic construct
  source 1..75: mol_type = other DNA
caggataaaattgtcggttttctctacctcggcacgccgcagttgaaagcatctacgtcgattaacgtcccggac

SEQ ID NO: 316484 - DNA, 75 bp, synthetic construct
  source 1..75: mol_type = other DNA
atcttggtacgccacaactgaaagcgtcaacgtcgataaacattccggacccgacaccgtttgtgacttattttt

SEQ ID NO: 316485 - DNA, 75 bp, synthetic construct
  source 1..75: mol_type = other DNA
tcgtggaacaaatattttgcaccgaccgaaacgtcactcaacattgcggcctatcgctactcgacaaaaaactat

SEQ ID NO: 316486 - DNA, 75 bp, synthetic construct
  source 1..75: mol_type = other DNA
tgcgccccggcgtgggcaaatgggacatcagcgcgggtgaaatcaaaaaagatgagctgaaggacaagcccaatc

SEQ ID NO: 316487 - DNA, 75 bp, synthetic construct
  source 1..75: mol_type = other DNA
caggataaaattgtcggttttctctacctcggcacgccacaactgaaagcatctacgtcgataaacgtcccggac

SEQ ID NO: 316488 - DNA, 75 bp, synthetic construct
  source 1..75: mol_type = other DNA
gtaaaaagccagtattagaatcaaatacgattaacgccgttcctgagtctgctcgccacggctcgccatccagtc

SEQ ID NO: 316489 - DNA, 75 bp, synthetic construct
  source 1..75: mol_type = other DNA
cgtgacgaacggctggtgttaatcaatccggagcttttagaaaaaagcggcgaaacaggcattgaagaaggttgc

SEQ ID NO: 316490 - DNA, 75 bp, synthetic construct
  source 1..75: mol_type = other DNA
ccgttttaaaggtgaacccacatcactgtaccgccgccgtatcgcccacgcctttgtcaatgcacaggacgccgg

SEQ ID NO: 316491 - DNA, 75 bp, synthetic construct
  source 1..75: mol_type = other DNA
ttttctgcggctatgttgccatttcttcaggatcgtgatgcccaggccgtacagcgtcagcgtattgccgataac

SEQ ID NO: 316492 - DNA, 75 bp, synthetic construct
  source 1..75: mol_type = other DNA
ggtgcggttcacaacactgcgaaagtacaaccaggtgacacggttgctatttttggcctgggtggtattggcctt

SEQ ID NO: 316493 - DNA, 75 bp, synthetic construct
  source 1..75: mol_type = other DNA
ataacggacgacttaaagagggcgatcaaattgtccaaaatgcccgaactttgagtaaatggaatctggcgcttc

SEQ ID NO: 316494 - DNA, 75 bp, synthetic construct
  source 1..75: mol_type = other DNA
tccgctaaccaccaccatgttgtcggtgcctggcgcgaagactgtgcgtggtttctcgcagtttggcgactctta

SEQ ID NO: 316495 - DNA, 75 bp, synthetic construct
  source 1..75: mol_type = other DNA
catgcacacatgaaggccggttcgttaaccggcctttctattgggtacgtcctgaaagactgggaatacgaccgg

SEQ ID NO: 316496 - DNA, 75 bp, synthetic construct
  source 1..75: mol_type = other DNA
aaatgttccttcaggtattgctgcggtggtcgtcgccaccgttccgctctttaccctctgcttcagccgtttatt

SEQ ID NO: 316497 - DNA, 75 bp, synthetic construct
  source 1..75: mol_type = other DNA
gatgggcgcactgtttctcagcatctggggcacatggacgataattaacacgccggtcgatgcgctgcctgacct

SEQ ID NO: 316498 - DNA, 75 bp, synthetic construct
  source 1..75: mol_type = other DNA
cgcgcagcggtttttactatttcgcgcaaggctggaaactcgtttcacaacctgggattcggcgttttgtcattt

SEQ ID NO: 316499 - DNA, 75 bp, synthetic construct
  source 1..75: mol_type = other DNA
tttatgcaactcgatgtctggatcccgactctcatgagttatgttccggactggttacaatggctgagctatctg

SEQ ID NO: 316500 - DNA, 75 bp, synthetic construct
  source 1..75: mol_type = other DNA
atcaccacctccgaagggcaaagctacggtatgttctttgccctggcggctaacgaccgtgccgctttcgataac

SEQ ID NO: 316501 - DNA, 75 bp, synthetic construct
  source 1..75: mol_type = other DNA
tgcgctgtcactggcgacattcatgcaggtgctagactccaccattgctaacgtggcgatccccactatcgccgg

SEQ ID NO: 316502 - DNA, 75 bp, synthetic construct
  source 1..75: mol_type = other DNA
cgtgattacattctggaaccctctgccggcaccggggccatactgcgggcgattcgggataccgcgccgggggcc

SEQ ID NO: 316503 - DNA, 75 bp, synthetic construct
  source 1..75: mol_type = other DNA
ttcgcctgaagggtaaaccggtgtcctatgtggtaccgctggcgtttgtgaaaatccggagaagacacttaccgt

SEQ ID NO: 316504 - DNA, 75 bp, synthetic construct
  source 1..75: mol_type = other DNA
tgtatcagcctcgcttatatgctctacttcggcgcgattgttttgctgccgcaattgttgcaggaagtctacggc

SEQ ID NO: 316505 - DNA, 75 bp, synthetic construct
  source 1..75: mol_type = other DNA
gcgcaactttaccattggctgcttgtgtatcagcctcgcctatatgctttacttcggcgctattgttttacttcc

SEQ ID NO: 316506 - DNA, 75 bp, synthetic construct
  source 1..75: mol_type = other DNA
cctctgcgccggtagggattattccggtgatcctgtcgccgattattggccgcttcgcgcataaactggatatgc

SEQ ID NO: 316507 - DNA, 75 bp, synthetic construct
  source 1..75: mol_type = other DNA
aaaaccgcgatgcgcaggccgttcagcgccagcgcgtggccgataactttcccggcagcgatgcctattacaact

SEQ ID NO: 316508 - DNA, 75 bp, synthetic construct
  source 1..75: mol_type = other DNA
tgacgatgctgctgctggctgcctttagtgttcaggctgcctgcaactggcctgcctgggagcagttcaaaaagg

SEQ ID NO: 316509 - DNA, 75 bp, synthetic construct
  source 1..75: mol_type = other DNA
gaggaagtggtgacggtgcctgggctgggttccatgttgttaccgggcaaagtgggttttgctgaggataacagc

SEQ ID NO: 316510 - DNA, 75 bp, synthetic construct
  source 1..75: mol_type = other DNA
cacaaaaagcacgactgttagcgcgtttcaaaccgatggcgacattaacgactaagaacggttatccgccggaga

SEQ ID NO: 316511 - DNA, 75 bp, synthetic construct
  source 1..75: mol_type = other DNA
tgcctccaacgctggcgcagtatttcacccgctttggcgcgccgtggactacgctgcgcgaaaccaatcagcgct

SEQ ID NO: 316512 - DNA, 75 bp, synthetic construct
  source 1..75: mol_type = other DNA
gaggaagtggtgaccgtaccggggctcggttcaatgctgttgccaggtaaagtcggttttgccgagaaaacgatc

SEQ ID NO: 316513 - DNA, 75 bp, synthetic construct
  source 1..75: mol_type = other DNA
attgtcttcgcggtggtactagtcacgttaggaaaatatcttttaccggcaaaacccgttattgcgccagttatt

SEQ ID NO: 316514 - DNA, 75 bp, synthetic construct
  source 1..75: mol_type = other DNA
tctgctggcggcaaaaattaatgcaacctctgcgctgccggtgaccgcatcggtggccagcgacggcacgaccat

SEQ ID NO: 316515 - DNA, 75 bp, synthetic construct
  source 1..75: mol_type = other DNA
tggccgggccgcctgatgaaccagttacgcatctttgcggtgctgaaccagttcaggctgaacagccgcagcgat

SEQ ID NO: 316516 - DNA, 75 bp, synthetic construct
  source 1..75: mol_type = other DNA
acggagagacctggctgctgccgctggcagatgatgacagcagcatgacgacggccacaggcagtatatctgttg

SEQ ID NO: 316517 - DNA, 75 bp, synthetic construct
  source 1..75: mol_type = other DNA
tggtgccgctggcgaaggcattggcgaaagcgatgtccgcgtcaattttggcggtgtcaccttcttctccggcga

SEQ ID NO: 316518 - DNA, 75 bp, synthetic construct
  source 1..75: mol_type = other DNA
gagcgctggcgcagtcggtccgcaacgatccggcgagacccacccagacgctgtcggtgtccggtgtgctggccc

SEQ ID NO: 316519 - DNA, 75 bp, synthetic construct
  source 1..75: mol_type = other DNA
ggcggcgagcggcagctacggcgagctggcggacaagggagaaagccgcaacgaccggcacatgaccctctgggg

SEQ ID NO: 316520 - DNA, 75 bp, synthetic construct
  source 1..75: mol_type = other DNA
tgatctgtggctttatatgaaaaataacgtcccatctgattttgaaagagcatgtcagcatgaaaaagagataca

SEQ ID NO: 316521 - DNA, 75 bp, synthetic construct
  source 1..75: mol_type = other DNA
taccaagaagagaattcaagcataatccagaaagactaaatgttatttcttccggtggtggtactcaaagtaacg

SEQ ID NO: 316522 - DNA, 75 bp, synthetic construct
  source 1..75: mol_type = other DNA
gcgccagcaaatcaaaaacgtcggcgatcgcccgctgttgtggagcacactgggccagtcactgatgaagcacgg

SEQ ID NO: 316523 - DNA, 75 bp, synthetic construct
  source 1..75: mol_type = other DNA
taatgaccccggacgcccgctacaaagtctgcctgtttatggcgtgctggcaccggacctggcggatcgctttga

SEQ ID NO: 316524 - DNA, 75 bp, synthetic construct
  source 1..75: mol_type = other DNA
ctgacactccggctcagattgccactgcgctggtcgcggcgattacccgcaaaacggaactgccggtgacagctg

SEQ ID NO: 316525 - DNA, 75 bp, synthetic construct
  source 1..75: mol_type = other DNA
attccgcagcgagtttcctcttcggataccgtcggtgagctgacaggaaaagggggaattctgcaggccatgatg

SEQ ID NO: 316526 - DNA, 75 bp, synthetic construct
  source 1..75: mol_type = other DNA
gcggcgtcaccttcttctccggcgaccatctctatgccgacaataccgggattattctttctgaagatccgctgg

SEQ ID NO: 316527 - DNA, 75 bp, synthetic construct
  source 1..75: mol_type = other DNA
cctgcgtattgctcaggagatgctggagagaggtttagaccgagagttagttctgacgctgacccgactttcgcc

SEQ ID NO: 316528 - DNA, 75 bp, synthetic construct
  source 1..75: mol_type = other DNA
tatatttatgtagtgatagagcaccaaagtaagccggaagaattaatggcttttcgcatgatgcgttattccatt

SEQ ID NO: 316529 - DNA, 75 bp, synthetic construct
  source 1..75: mol_type = other DNA
atgcatctgcttactcatccattgcctgtcacggcgcatgtctcattgttagatgacgactatctcactccggcc

SEQ ID NO: 316530 - DNA, 75 bp, synthetic construct
  source 1..75: mol_type = other DNA
tagttgctgaagatattgagagctataaaataacaaaaatgcatctcttgaagatgatggcaatcattagaaatc

SEQ ID NO: 316531 - DNA, 75 bp, synthetic construct
  source 1..75: mol_type = other DNA
gatcccaatgctgttttatcatggttgcagaagtccttatccttattcactctgctggcttgatgaatttgctga

SEQ ID NO: 316532 - DNA, 75 bp, synthetic construct
  source 1..75: mol_type = other DNA
ttactgtagtgccggatgacgagattatgcaacaccgtaaaatggcattgctggagttaattcagaaacatattc

SEQ ID NO: 316533 - DNA, 75 bp, synthetic construct
  source 1..75: mol_type = other DNA
gttgttttgctcattaccaacaaaacacgacatcagaaaaaatagcacaatctattattcttaacgggcttcgtt

SEQ ID NO: 316534 - DNA, 75 bp, synthetic construct
  source 1..75: mol_type = other DNA
ctgcagtcggactggcgtttgctgtttccgggtgttccagtgattacgtcatggcgaccaaagatggccgtatga

SEQ ID NO: 316535 - DNA, 75 bp, synthetic construct
  source 1..75: mol_type = other DNA
ctcaaactgtattgtcgagtacaagcttcctgaagtttctcctggtaccttactgaaccagcagacagcaatctg

SEQ ID NO: 316536 - DNA, 75 bp, synthetic construct
  source 1..75: mol_type = other DNA
atgcatccgcttactcatccactgcctgtcacggcgcatgtctcattgttagataagaactctctcactccagcc

SEQ ID NO: 316537 - DNA, 75 bp, synthetic construct
  source 1..75: mol_type = other DNA
cgtcattgtggatagcgccgtatgtggactcagatgatgtatatcaccagccagcaacggttctttttgtcgtaa

SEQ ID NO: 316538 - DNA, 75 bp, synthetic construct
  source 1..75: mol_type = other DNA
ctttgctcttaaccgggtgtgcgggcacagagaccgaatttcaatgtaatgccacgacgtcggatacctgtatga

SEQ ID NO: 316539 - DNA, 75 bp, synthetic construct
  source 1..75: mol_type = other DNA
catggatgcagattaccaaatcacctggctgtaagtaaccacagagaactttacctgactgtggggggcgagttg

SEQ ID NO: 316540 - DNA, 75 bp, synthetic construct
  source 1..75: mol_type = other DNA
gaaagctgaaactcccggcggcgtatgtggtaccgggggatgattctccgggagaaaacaaaagccagaccgact

SEQ ID NO: 316541 - DNA, 75 bp, synthetic construct
  source 1..75: mol_type = other DNA
cagttcaaaaatctgccggaggtcggaaagctgaaactcccggcggcgtatgtggtaccgggggatgattctccg

SEQ ID NO: 316542 - DNA, 75 bp, synthetic construct
  source 1..75: mol_type = other DNA
tacttcatgtgtcgcgcacaatgcccacgttgtttacctctacatggctgaaattcaccgcgtttggttagaaca

SEQ ID NO: 316543 - DNA, 75 bp, synthetic construct
  source 1..75: mol_type = other DNA
tatgaccgaattaacgatgcggcatttcttgcccgtcttattcattcgtcgctgaactcttcagaggtaaggggg

SEQ ID NO: 316544 - DNA, 75 bp, synthetic construct
  source 1..75: mol_type = other DNA
tagatagaattcgaaaccttgaatgctccgctgaatttgctgaacacaattttgtgttaagtggttatatcgacg

SEQ ID NO: 316545 - DNA, 75 bp, synthetic construct
  source 1..75: mol_type = other DNA
gaaggctgttacctcttctttggccgttgccgaatatttctgcaagcagcacaaaaacgttattcaaaaaatcca

SEQ ID NO: 316546 - DNA, 75 bp, synthetic construct
  source 1..75: mol_type = other DNA
cgactacatcaacgatggtgtattcgttgccgggctggtggactcggaactgaacgaaaagcataaggaggtgcg

SEQ ID NO: 316547 - DNA, 75 bp, synthetic construct
  source 1..75: mol_type = other DNA
atgacgccctacaaggaacggcatttacaacttacgcagtgcagcgtatccgtggcgctatgctggatgaacttc

SEQ ID NO: 316548 - DNA, 75 bp, synthetic construct
  source 1..75: mol_type = other DNA
attctggtcatgagcaatggtctcgtttccggaattgtcgatacaaaaacaacaacgcaaaacgaaattctgcgt

SEQ ID NO: 316549 - DNA, 75 bp, synthetic construct
  source 1..75: mol_type = other DNA
gcgatacccagtgggttattgactcgatgcgggtaaaaacgccaggtcaccgtacgcagattggctcactctctg

SEQ ID NO: 316550 - DNA, 75 bp, synthetic construct
  source 1..75: mol_type = other DNA
agtgcgtaacctgacgtcactgcgccagccgtcgattcgcgatgtctcgtttgatctgcataaaggggagatcct

SEQ ID NO: 316551 - DNA, 75 bp, synthetic construct
  source 1..75: mol_type = other DNA
gccagggtgcagtaaaagacgcgtgcgatgccatcactacctttaatccgaagctcgaaaagcccgttaccgaaa

SEQ ID NO: 316552 - DNA, 75 bp, synthetic construct
  source 1..75: mol_type = other DNA
tggcaatgggctttactggcaaacgtgcagcccggttcaaagaggcatacatcaacgcctttaaccagatggaga

SEQ ID NO: 316553 - DNA, 75 bp, synthetic construct
  source 1..75: mol_type = other DNA
tgtctctgcaccttataaagcgggtgccgggcgtggaaacccgaaattcaatatagagcacaaccgcgctcatgc

SEQ ID NO: 316554 - DNA, 75 bp, synthetic construct
  source 1..75: mol_type = other DNA
gttgccaacttcttctccaagcgtcatgacgatgtgctgaaaaagatccgcactctggattgttcccctgagttt

SEQ ID NO: 316555 - DNA, 75 bp, synthetic construct
  source 1..75: mol_type = other DNA
gcgcgttagcgtcttttttgttgctacaactcagctatacccaaattatggtgggctgggtgggggcaccgaaag

SEQ ID NO: 316556 - DNA, 75 bp, synthetic construct
  source 1..75: mol_type = other DNA
attgcatacggaggctgccatcatggctacagtcccaacttccccatacctgaaaattgaagttgtcaacggcaa

SEQ ID NO: 316557 - DNA, 75 bp, synthetic construct
  source 1..75: mol_type = other DNA
atgattgttctccaaaatattgattcctcaatttcgggacgttacactgttctggcaccttataaagcgggtgcc

SEQ ID NO: 316558 - DNA, 75 bp, synthetic construct
  source 1..75: mol_type = other DNA
gtgcaggggcatcgcaagatgcgccgggttcttctgtgaccggttacgccaaccctgtacgtctcaccacctctg

SEQ ID NO: 316559 - DNA, 75 bp, synthetic construct
  source 1..75: mol_type = other DNA
ttgagtgtgacggaccaccaacacattgattctgccattccgggacgttacactgttcaggcaccttataaaacg

SEQ ID NO: 316560 - DNA, 75 bp, synthetic construct
  source 1..75: mol_type = other DNA
tggaagtggacggcctgccaccggacgcgtttgcggtggtttcctttcatctcacccagtcactctcttcacttt

SEQ ID NO: 316561 - DNA, 75 bp, synthetic construct
  source 1..75: mol_type = other DNA
accgatcaaggaggctgccatcatggctactgtcccaacttccccattcctcaaaatcgaagtcgtcaacggcaa

SEQ ID NO: 316562 - DNA, 75 bp, synthetic construct
  source 1..75: mol_type = other DNA
attgccatcgttgatggtcaggctgttacttcatccctggctgttgccaacttcttctccaaacgtcatgacgat

SEQ ID NO: 316563 - DNA, 75 bp, synthetic construct
  source 1..75: mol_type = other DNA
tcattcactgcccgcaatttttcggtgagtgattacaccgattgcacaggccgcaaactaccttgctatcaaata

SEQ ID NO: 316564 - DNA, 75 bp, synthetic construct
  source 1..75: mol_type = other DNA
cattcattacagccagggacgtaactatttctgctggcggtatcgctactctacaagaagaaatcgaccttgaag

SEQ ID NO: 316565 - DNA, 75 bp, synthetic construct
  source 1..75: mol_type = other DNA
ctttcctacaacctcaatggatatcacagtgaaagtccaggcagaacaaatgacagtatctatgcggcattcaac

SEQ ID NO: 316566 - DNA, 75 bp, synthetic construct
  source 1..75: mol_type = other DNA
cgcgtggttgcgctctccagccgcccgtctaacctgcgtggtcgtcagggggttattgtcattgatgaagcggcg

SEQ ID NO: 316567 - DNA, 75 bp, synthetic construct
  source 1..75: mol_type = other DNA
gttggcggcataaaatcaccagaaattatgagcctatgtctccttgtaaacttctgccattttgtgtggcccttg

SEQ ID NO: 316568 - DNA, 75 bp, synthetic construct
  source 1..75: mol_type = other DNA
gttactgccagcagtttgacccgttactgaagcgtgtaaccgcacagttggggctggatgttttcccgtataccc

SEQ ID NO: 316569 - DNA, 75 bp, synthetic construct
  source 1..75: mol_type = other DNA
gcggatgcgtcaggaagacgctatctacggcggggagatgagggcgcaccattacttccgcgatttcgcctactg

SEQ ID NO: 316570 - DNA, 75 bp, synthetic construct
  source 1..75: mol_type = other DNA
gttcacggatatttaatggattcctacgcaatgaaagcggcaacgcaaattgcattgggggataattttggttat

SEQ ID NO: 316571 - DNA, 75 bp, synthetic construct
  source 1..75: mol_type = other DNA
tccagaagtaatgagccggcctgatgcgcgaaccaattgttcagcttgccctgtttcccggaatttttctatgtc

SEQ ID NO: 316572 - DNA, 75 bp, synthetic construct
  source 1..75: mol_type = other DNA
agaatttatacgcgaatatgtaagcgatgtaacaaaagaatattcgttatgtatacctggcgtagtcagtcggca

SEQ ID NO: 316573 - DNA, 75 bp, synthetic construct
  source 1..75: mol_type = other DNA
gcgcatggttatcccgcgcgttgattgagtcgcgcatgtcaccggacacgccggtactgcgttttacctgtccgc

SEQ ID NO: 316574 - DNA, 75 bp, synthetic construct
  source 1..75: mol_type = other DNA
acaattttgtcattttcctgtcaccggaaaatcagagcctggagggtaaagttggcggcataaaatcactaaaaa

SEQ ID NO: 316575 - DNA, 75 bp, synthetic construct
  source 1..75: mol_type = other DNA
aattatacgtgagtatgtgaacgacgtaacgaaagaatatgcgttatgtataccagatatggttaatctgagggg

SEQ ID NO: 316576 - DNA, 75 bp, synthetic construct
  source 1..75: mol_type = other DNA
tcttatacgcgaatatgtaagcgatgtaacaaaagaatattcgttatgtatacctggcatagtcagtcggcacga

SEQ ID NO: 316577 - DNA, 75 bp, synthetic construct
  source 1..75: mol_type = other DNA
tttgacggtaacgtaaaatctttagctgaagccgaaggcgtggatagaaatattatcagccgatgtattaataca

SEQ ID NO: 316578 - DNA, 75 bp, synthetic construct
  source 1..75: mol_type = other DNA
ggcatccccttctccgacccactcgcggatggcccgaccattcaaaacgcgactctgcgtgcttttgcggcagga

SEQ ID NO: 316579 - DNA, 75 bp, synthetic construct
  source 1..75: mol_type = other DNA
actggcaggagctgaaagagggtttctccgtggttgtcatactgagtaacgggcgtgatgagcgcggtcagtttg

SEQ ID NO: 316580 - DNA, 75 bp, synthetic construct
  source 1..75: mol_type = other DNA
ccgggatgaagcccgtaagtgtcacgaacggtgcaatagtgatccacacccaacgcctgaaatcagatccagggg

SEQ ID NO: 316581 - DNA, 75 bp, synthetic construct
  source 1..75: mol_type = other DNA
taccgggagcgtaactatttctgctggtggcatcaccacccagcaagaagaaatcgaccttgaagcagccgactt

SEQ ID NO: 316582 - DNA, 75 bp, synthetic construct
  source 1..75: mol_type = other DNA
agtggaaaggcgaaaagcaattctgctggttagttctcgctggaagcgtcaatttacacggcattcacgttcctt

SEQ ID NO: 316583 - DNA, 75 bp, synthetic construct
  source 1..75: mol_type = other DNA
ggtggaacggcgaaaaccaattctgctggctggttcctgaaggacagtacccggcacgaatggaagccattaagg

SEQ ID NO: 316584 - DNA, 75 bp, synthetic construct
  source 1..75: mol_type = other DNA
gttgcaggcccggtatactttttcctttggacactacttcgacccgaaattgttaggctatgcctccctgcgtgt

SEQ ID NO: 316585 - DNA, 75 bp, synthetic construct
  source 1..75: mol_type = other DNA
tcgaaatccaaaactgaaagcttcctcgcctaaaatcaaaaacgatgttatcgaagaagcgagtaaacaagaaca

SEQ ID NO: 316586 - DNA, 75 bp, synthetic construct
  source 1..75: mol_type = other DNA
ggttgagatcactggcccccgcctggatatggataacgatttcaagacctgggtggggatcattcattcctttgc

SEQ ID NO: 316587 - DNA, 75 bp, synthetic construct
  source 1..75: mol_type = other DNA
agcaaagcgcgatgaagctaaaaagctcttagtgcagggtatagatccgaaaactgaacagaaacaagctcacgc

SEQ ID NO: 316588 - DNA, 75 bp, synthetic construct
  source 1..75: mol_type = other DNA
ggcgtttattcgtgacgaggctaacattacgctggttgccgattccccactgcgcgctttgctgatagatttgcc

SEQ ID NO: 316589 - DNA, 75 bp, synthetic construct
  source 1..75: mol_type = other DNA
ggcgcttaatatgggcaagcagcaattaatcgcctcgccagagggtgcgatgggaagcctgcaattacgccagca

SEQ ID NO: 316590 - DNA, 75 bp, synthetic construct
  source 1..75: mol_type = other DNA
gacgtctgatgtaaaccgtgatgatcgtcgtaacaccaagattgttgatcctaccggctcaatggctcagcgcat

SEQ ID NO: 316591 - DNA, 75 bp, synthetic construct
  source 1..75: mol_type = other DNA
gagcaggttcagggcattcgtgaagagcgcgccaaacaggcacaagccgcacaggcaatggcaatggggcaggcc

SEQ ID NO: 316592 - DNA, 75 bp, synthetic construct
  source 1..75: mol_type = other DNA
cgcttattgaccgcgttttctccatcatggcgcgcaagaacatgcttcctccaccgccggacgttatgcagggta

SEQ ID NO: 316593 - DNA, 75 bp, synthetic construct
  source 1..75: mol_type = other DNA
gccggtgacttacaggatgacctgcccgcgagtttagataccgcaaccagtcgtgctcatacccaacaattccac

SEQ ID NO: 316594 - DNA, 75 bp, synthetic construct
  source 1..75: mol_type = other DNA
ctaccggttcaatggctcagcgcattctgtccagcggcatgatgtccggcatcaccagcccggcccgcccatggt

SEQ ID NO: 316595 - DNA, 75 bp, synthetic construct
  source 1..75: mol_type = other DNA
ctcgacgtgttgaccggtcaggatggtttcaaacctgcatacctggtaaacccgaataccgccgacctgctggct

SEQ ID NO: 316596 - DNA, 75 bp, synthetic construct
  source 1..75: mol_type = other DNA
gcgctgactatcgtgggcaccatgaacatgatcggcgtgaaatggttcgcggagatggaattctggtttgcgctg

SEQ ID NO: 316597 - DNA, 75 bp, synthetic construct
  source 1..75: mol_type = other DNA
accggacgtattttacgctcaatggcaatgggcggttctgcaccaagttttatggcgaaaatgagtcgccagcat

SEQ ID NO: 316598 - DNA, 75 bp, synthetic construct
  source 1..75: mol_type = other DNA
attactggggcgcgtttggcggcgtgccgcaatgggtatttgcactcgctgcgctgaccatcgttggcaccatga

SEQ ID NO: 316599 - DNA, 75 bp, synthetic construct
  source 1..75: mol_type = other DNA
agatgaccaggacgtgatccgcacaatgcctttcccgattggcagctactacctggctaacagcccgcgcggcag

SEQ ID NO: 316600 - DNA, 75 bp, synthetic construct
  source 1..75: mol_type = other DNA
attaaagtgctcgctattgtgatcttcctggtggtgggtacggtgttcctcggtagtggtcagccgctggatggt

SEQ ID NO: 316601 - DNA, 75 bp, synthetic construct
  source 1..75: mol_type = other DNA
atcgcggcactgccggttatcggtattctgctggttgtgggttggtttggtgtgcgtaaacgcgttgccgaagtt

SEQ ID NO: 316602 - DNA, 75 bp, synthetic construct
  source 1..75: mol_type = other DNA
tggcttccacgaagtcattgcgcaaaccgggcgtttcaaggtatatcgcgcgattatgacccgccaggcgaagaa

SEQ ID NO: 316603 - DNA, 75 bp, synthetic construct
  source 1..75: mol_type = other DNA
gcactggtgcaatggcggtgctggaggatgacgaggacatcattcgtacaatgccattcccgataggaagttact

SEQ ID NO: 316604 - DNA, 75 bp, synthetic construct
  source 1..75: mol_type = other DNA
gcatgaacgatatgttcaataagtcgaatctctaccagtctcttccgcagttatacggaagcctcggcacataca

SEQ ID NO: 316605 - DNA, 75 bp, synthetic construct
  source 1..75: mol_type = other DNA
tgatcgaaatgaaagaagaaaagcttctgatgttggggccggttctggagcgtctgaacgacgaatgtcttaatc

SEQ ID NO: 316606 - DNA, 75 bp, synthetic construct
  source 1..75: mol_type = other DNA
ggcggggtttttggggcggttggttacatcatcgcctggggggtgaaccagattccggccttcccgtccggcaat

SEQ ID NO: 316607 - DNA, 75 bp, synthetic construct
  source 1..75: mol_type = other DNA
atggccaacagtacccattatcgaatagtgcattacgaactgcaggatattatatggaataatattctgcagttt

SEQ ID NO: 316608 - DNA, 75 bp, synthetic construct
  source 1..75: mol_type = other DNA
ggaatgttggtgatacagaatcgatcgctaagttaaaaaataatatcatatctggatgtaccggaacattacata

SEQ ID NO: 316609 - DNA, 75 bp, synthetic construct
  source 1..75: mol_type = other DNA
cctcgggtctgggtcgtgaaggttcgaagtatggcatcgaagattacttagaaatcaaatatatgtgcatcggtc

SEQ ID NO: 316610 - DNA, 75 bp, synthetic construct
  source 1..75: mol_type = other DNA
tgtcgaaagaagagacgttcggccccctcgccccgctgttccgttttaaagatgaagccgatgtgattgcacaag

SEQ ID NO: 316611 - DNA, 75 bp, synthetic construct
  source 1..75: mol_type = other DNA
aacaacactgcacaggttaattaaagcaggtgacctgtccacctgtagcggtgaacgtaatgcaaaaatggtaga

SEQ ID NO: 316612 - DNA, 75 bp, synthetic construct
  source 1..75: mol_type = other DNA
ttaacagcgcctacttcgtcgatctgttcatgatgttgcagaacatcaatacccgctcaatgcctgttgaagcgg

SEQ ID NO: 316613 - DNA, 75 bp, synthetic construct
  source 1..75: mol_type = other DNA
cattgaccgcgatacatcgaagctggatagcaagaacaagccattcaaatcggtttattacgaggttggtggcga

SEQ ID NO: 316614 - DNA, 75 bp, synthetic construct
  source 1..75: mol_type = other DNA
cgccaaagtgtcgaaagaagagacgtttggccccctcgccccgctgttccgttttaaagatgaagccgatgtgat

SEQ ID NO: 316615 - DNA, 75 bp, synthetic construct
  source 1..75: mol_type = other DNA
ttggcggcgtgccgcagtgggtctttgcgctcgctgcacttaccatcgttggcaccatgaatatgatcggtgtga

SEQ ID NO: 316616 - DNA, 75 bp, synthetic construct
  source 1..75: mol_type = other DNA
gcagcaaaggctctgaagagtattacgttacgcaccttgtgcagacggcaaagtacagtaccaagaatgacacgg

SEQ ID NO: 316617 - DNA, 75 bp, synthetic construct
  source 1..75: mol_type = other DNA
cagacttaatctgacaagtcgcactattactcagaatgcgacggtaagaaaggctatggaacagctgcgagagat

SEQ ID NO: 316618 - DNA, 75 bp, synthetic construct
  source 1..75: mol_type = other DNA
ttttgtgcccgcaattttgcggagacatcgatttcggtaaatcaaccgaacggcggtacacgcaagctcccttgc

SEQ ID NO: 316619 - DNA, 75 bp, synthetic construct
  source 1..75: mol_type = other DNA
cgcgcctgatggctcaagccgtcccacgctgtcactgagtgcactgctgaagcagtatggtatccgcctgacagc

SEQ ID NO: 316620 - DNA, 75 bp, synthetic construct
  source 1..75: mol_type = other DNA
ctggactttatgcgccgggagttaaacctgtctaactcttcagtgcttggtgcctgtcagaaactccaggaggct

SEQ ID NO: 316621 - DNA, 75 bp, synthetic construct
  source 1..75: mol_type = other DNA
aaaaattatccgggcaggctgctgacaagatgcaggctggtgtgattctgctggactttatgcgccgggaattaa

SEQ ID NO: 316622 - DNA, 75 bp, synthetic construct
  source 1..75: mol_type = other DNA
tggtttctgcccggaaattgaacgcggcgaagtgaaccttgtgaaaaccaccggtctgcatgcggcgggtaaagg

SEQ ID NO: 316623 - DNA, 75 bp, synthetic construct
  source 1..75: mol_type = other DNA
gtgaatacactgacgcatcaggccgcaaactaccttgctatcaaataacccgcgacggctttgcgtttcttgcta

SEQ ID NO: 316624 - DNA, 75 bp, synthetic construct
  source 1..75: mol_type = other DNA
aaattggcgtttccggtggtggaagttatccattgcatacggaggctgccatcatggctacgatccctgccttag

SEQ ID NO: 316625 - DNA, 75 bp, synthetic construct
  source 1..75: mol_type = other DNA
atgaagaccattctacctgcagtattgtttgccgctttcgccaccacctccgcctgggcggcagagagcgtccag

SEQ ID NO: 316626 - DNA, 75 bp, synthetic construct
  source 1..75: mol_type = other DNA
ctcgcctgcgtagtcagtgtccttgcattatctttgatagtagccgtgaagcgttagtagcaggtttgaaagcgg

SEQ ID NO: 316627 - DNA, 75 bp, synthetic construct
  source 1..75: mol_type = other DNA
ctgggaacgctttgtgactgattctctgagctggctcggtcagttcgatatggtctgtgtcagcggaagcttacc

SEQ ID NO: 316628 - DNA, 75 bp, synthetic construct
  source 1..75: mol_type = other DNA
gtgggcagtaaccagatcattaacgtgggttctgttcaggtggaaacgattggacttgttcgtgcgctgaccgtg

SEQ ID NO: 316629 - DNA, 75 bp, synthetic construct
  source 1..75: mol_type = other DNA
ttcgatatggtaaccagcgcaccggaaaaattatccgggcaggctgctgacaagatgcaggctggcgtgatcctg

SEQ ID NO: 316630 - DNA, 75 bp, synthetic construct
  source 1..75: mol_type = other DNA
aaaaattatccggacaggctgctgacaagatgcaggctggtgtgattctgctggactttatgcgccgggagttaa

SEQ ID NO: 316631 - DNA, 75 bp, synthetic construct
  source 1..75: mol_type = other DNA
cccgcgtacagtgctgctttcttgtctgtccggactggggttattactgctggcaatgaacccgatgctgcaagc

SEQ ID NO: 316632 - DNA, 75 bp, synthetic construct
  source 1..75: mol_type = other DNA
aggtacagatgatcgccattggcggcgcgattggcaccggcttgtttttaggtacaggagcccgactgcaaatgg

SEQ ID NO: 316633 - DNA, 75 bp, synthetic construct
  source 1..75: mol_type = other DNA
accaacacccagaatttgggtgttgacccggtgagtgtgattcatgggggaaatgaacggggaacgtatgtctgc

SEQ ID NO: 316634 - DNA, 75 bp, synthetic construct
  source 1..75: mol_type = other DNA
acgtatgtctgcaaagaactggtgtatgcctatgcaatgtggatcagcccgtcattccatctgaaggtgatccgt

SEQ ID NO: 316635 - DNA, 75 bp, synthetic construct
  source 1..75: mol_type = other DNA
acctgtctaactcttcagtgcttggtgcctgccagaaactccaggaggctgttggcttaccgaatctgggcaccg

SEQ ID NO: 316636 - DNA, 75 bp, synthetic construct
  source 1..75: mol_type = other DNA
tcaagagcgcccacgggcagaactttgcccgctggcagatggacggctggcgaaacaacgcagaaaccgcgcggg

SEQ ID NO: 316637 - DNA, 75 bp, synthetic construct
  source 1..75: mol_type = other DNA
ctgcaaggaactggtgtatgcctatgcaatgtggatcagcccgtcattccatctgaaggtgatccgtactttcga

SEQ ID NO: 316638 - DNA, 75 bp, synthetic construct
  source 1..75: mol_type = other DNA
atgccggtttatcagcaaaccaaagatgccaacttttctattcagataggattggtgtggtgctttgtcgaagcg

SEQ ID NO: 316639 - DNA, 75 bp, synthetic construct
  source 1..75: mol_type = other DNA
ggtcatcaccccgaccgcagccacccccctcagtaccagcaggatggacacggcgaaggcgacagaggccaccgg

SEQ ID NO: 316640 - DNA, 75 bp, synthetic construct
  source 1..75: mol_type = other DNA
cttcaggaggctgttggcttaccgaatctggcaccgcgctatgccattgatgctcctgctgacgcgcctgatggc

SEQ ID NO: 316641 - DNA, 75 bp, synthetic construct
  source 1..75: mol_type = other DNA
atgaatacaacatttgcactcgttctgacagttcatcttgtttccggcgaatctcttgagctggtgacaggctta

SEQ ID NO: 316642 - DNA, 75 bp, synthetic construct
  source 1..75: mol_type = other DNA
ctgacccgcagtatcggcggcaaaagtgcactggactgggcgatgaagcaggatttccgttgcggttgctggttg

SEQ ID NO: 316643 - DNA, 75 bp, synthetic construct
  source 1..75: mol_type = other DNA
tttactgaagatgccattaataagagaaaacacgaacgggagctattaaataaaatatgcattctttcaatgctg

SEQ ID NO: 316644 - DNA, 75 bp, synthetic construct
  source 1..75: mol_type = other DNA
cggaagtcgtcaccgggcatacggatgttatctgctccaccagtatcagacacattgtgaccgtacgaaacgccg

SEQ ID NO: 316645 - DNA, 75 bp, synthetic construct
  source 1..75: mol_type = other DNA
tcccgtttcataagcacgatgtcgatcgcgatacaatgatgaataccgttgcgccggtatgggatggcaacgaaa

SEQ ID NO: 316646 - DNA, 75 bp, synthetic construct
  source 1..75: mol_type = other DNA
ggcatcaattgaaagttcaggtctttgcgcatttaacccctctaggatggagcgagaaataaaactaaagcaagg

SEQ ID NO: 316647 - DNA, 75 bp, synthetic construct
  source 1..75: mol_type = other DNA
gggactgcgcatatctcgtttaagcggcctgaactggtcgataaactgaacgacatcattgtccggcactatctg

SEQ ID NO: 316648 - DNA, 75 bp, synthetic construct
  source 1..75: mol_type = other DNA
gaaaacacgaacgggagttattaaatcaaatttgcattgtttcaatgctggcccgtttacgtctgatgcaaaaag

SEQ ID NO: 316649 - DNA, 75 bp, synthetic construct
  source 1..75: mol_type = other DNA
taaccagccggtgcatttcgatggctaccgggtggatgaccagactacgttcgcgctcgattatctgaaaaagcg

SEQ ID NO: 316650 - DNA, 75 bp, synthetic construct
  source 1..75: mol_type = other DNA
tacgctggctgaaatcgacagccgatgacaatcaaatccaccgtatcgcccgcaacgctggtggtcacgcaactc

SEQ ID NO: 316651 - DNA, 75 bp, synthetic construct
  source 1..75: mol_type = other DNA
aagaggttgcgggtcagttctggcagcaattgcgtgaacaacaactgccattcttctcgttaccagggactttgt

SEQ ID NO: 316652 - DNA, 75 bp, synthetic construct
  source 1..75: mol_type = other DNA
tttccggagagccagttgatattgcagtcagtgttcacaggacaatgcaggagtgtgtgactgcagcaaccgaac

SEQ ID NO: 316653 - DNA, 75 bp, synthetic construct
  source 1..75: mol_type = other DNA
gtgataacaggtgtctggaaatataggggcaaatccatcattcttgataacctctgtaacagtaagcgcagcgta

SEQ ID NO: 316654 - DNA, 75 bp, synthetic construct
  source 1..75: mol_type = other DNA
atacccaacagagcatgttgctgctgtgtattagcctggcagtgctgggattcttcctcggtatagaagtacaga

SEQ ID NO: 316655 - DNA, 75 bp, synthetic construct
  source 1..75: mol_type = other DNA
atgcgcagcaacctgaatatggaatcttcccgctgggcgcgggccaatcgacgtttaaaagcgatcaatacgcta

SEQ ID NO: 316656 - DNA, 75 bp, synthetic construct
  source 1..75: mol_type = other DNA
gcaagggatgcgtagcaacctgaatatggagtcctcccgctgggcacgcgccaatcgacgtttaaaagcgatcaa

SEQ ID NO: 316657 - DNA, 75 bp, synthetic construct
  source 1..75: mol_type = other DNA
gagctggcgcagctgcgccatctggctacgcgcctggtgcgtggctggacccaccttgaaagacagaaaggcggg

SEQ ID NO: 316658 - DNA, 75 bp, synthetic construct
  source 1..75: mol_type = other DNA
gctgggattcttcctcggtatcgaagtgcagaaacggcggctgggatcgatgggggcgttagccagtaccattaa

SEQ ID NO: 316659 - DNA, 75 bp, synthetic construct
  source 1..75: mol_type = other DNA
tattgctgtgtattagcctggcagtgctgggatttttcctcggtatagaagtacagaaacggagattgggctcga

SEQ ID NO: 316660 - DNA, 75 bp, synthetic construct
  source 1..75: mol_type = other DNA
acaaggcatgcgcagcaacctgaatatggaatcttcccgctgggcgcgggccaatcgacgtttaaaagcgatcaa

SEQ ID NO: 316661 - DNA, 75 bp, synthetic construct
  source 1..75: mol_type = other DNA
tatcctcgctggtacgaatagaaaactcgtacgcgtgggggctggccggttataccgcgctgatcattgtgatca

SEQ ID NO: 316662 - DNA, 75 bp, synthetic construct
  source 1..75: mol_type = other DNA
gccggactggagcattgccctgctgcgctatttcaacccggttggcgcgcatccgtcgggcgatatgggcgaaga

SEQ ID NO: 316663 - DNA, 75 bp, synthetic construct
  source 1..75: mol_type = other DNA
aagagttattgcctggaccggggaacgggaaacacctgtcaccatttatagctgggtcgcggcggcaacacgtta

SEQ ID NO: 316664 - DNA, 75 bp, synthetic construct
  source 1..75: mol_type = other DNA
ccattcaaccggaaccgctgctggccccgcagtttgccgttgaacgttgcagtgaaattgtcattggcattgtgt

SEQ ID NO: 316665 - DNA, 75 bp, synthetic construct
  source 1..75: mol_type = other DNA
cgcatggtggcgatcgactttatctacgggacgctggcagcgctgccgttagggctgctctactttttggtgatt

SEQ ID NO: 316666 - DNA, 75 bp, synthetic construct
  source 1..75: mol_type = other DNA
tatcgacggtggcgttgtcatgcttggcgtgcgtaccagcaaaatgcggaaggccagcatgactgagcttatcga

SEQ ID NO: 316667 - DNA, 75 bp, synthetic construct
  source 1..75: mol_type = other DNA
gcccgtgatgatagccgacgccgagcaggggtacatcatccagcaactggtggcggcgttgtatcaatccgcaga

SEQ ID NO: 316668 - DNA, 75 bp, synthetic construct
  source 1..75: mol_type = other DNA
cgtgactcaatggaagaatgcatggctgccgcagcggaacagaaaatccccggtaactgttatccggttgataaa

SEQ ID NO: 316669 - DNA, 75 bp, synthetic construct
  source 1..75: mol_type = other DNA
actgcgcatatcacgtttaagcggccagagctggttgataagctaaatgatatcgtggcgaagcactttcctggg

SEQ ID NO: 316670 - DNA, 75 bp, synthetic construct
  source 1..75: mol_type = other DNA
cattttcccaggcatttgtaccgattctggcggaatataaaagtaagcagggtgaagacgccacgcgggtctttg

SEQ ID NO: 316671 - DNA, 75 bp, synthetic construct
  source 1..75: mol_type = other DNA
tactggcagttgcgtaagcagaaaatctttaccccgcaacccggctggatggcgtttctgttgcgtctggtggtg

SEQ ID NO: 316672 - DNA, 75 bp, synthetic construct
  source 1..75: mol_type = other DNA
gccgggatgctcgccgcgccgtgggtgatcatggtgaccgcgccgggttttgctgacacggccgacaaatttgcc

SEQ ID NO: 316673 - DNA, 75 bp, synthetic construct
  source 1..75: mol_type = other DNA
ctggttttctcctcgtggcgaactgttcgtctggcaaattcgcctgccacgtacgctggctgtattgctggttgg

SEQ ID NO: 316674 - DNA, 75 bp, synthetic construct
  source 1..75: mol_type = other DNA
ctgcctattggcgtggtcaccgcaacgttgggtgcgccggtgtttatctggttattgttaaaagcaggacgttag

SEQ ID NO: 316675 - DNA, 75 bp, synthetic construct
  source 1..75: mol_type = other DNA
cttcctggctgtgctctggcaggcgctacggcattgctactcgccgatattgtcgctcgtctggcactgatttcc

SEQ ID NO: 316676 - DNA, 75 bp, synthetic construct
  source 1..75: mol_type = other DNA
cggtaactgttatccggtcgataaagttattcgcatggataataacgaagtcccggcaggacttaaaacagcacc

SEQ ID NO: 316677 - DNA, 75 bp, synthetic construct
  source 1..75: mol_type = other DNA
ctggcgcagttgcgccatctggctacgcgcctggtgcgtggctggacccaccttgaaagacagaaaggcgggata

SEQ ID NO: 316678 - DNA, 75 bp, synthetic construct
  source 1..75: mol_type = other DNA
atgacgtgggctatctacttttccacctctgttgatttacgtcagctgatgtactggatgatgggcggttttggc

SEQ ID NO: 316679 - DNA, 75 bp, synthetic construct
  source 1..75: mol_type = other DNA
gaaaagttttgccagcggcaatcacgatgaatacaaccgcttgatggattgggggctgcgtctttgtttcttgct

SEQ ID NO: 316680 - DNA, 75 bp, synthetic construct
  source 1..75: mol_type = other DNA
ttcaccacaaaaaacaacggtgcagacactgttaaatccccaatgggaatgtttgactccaatgagattgataac

SEQ ID NO: 316681 - DNA, 75 bp, synthetic construct
  source 1..75: mol_type = other DNA
gtttatgcgccgctcagaagaaaaatcgtttgataaatttactgagataggccgccacgcatgggaggtgattaa

SEQ ID NO: 316682 - DNA, 75 bp, synthetic construct
  source 1..75: mol_type = other DNA
ctgccgcggcagagcaaaaaattcccgggaactgttatcctgtcgacaaagttattcgcatgaacaataacgaaa

SEQ ID NO: 316683 - DNA, 75 bp, synthetic construct
  source 1..75: mol_type = other DNA
atgtcggactacaccttcaacatgggtcccctgcgtagtgcgatccatattcagcttcacacccataacgccacc

SEQ ID NO: 316684 - DNA, 75 bp, synthetic construct
  source 1..75: mol_type = other DNA
tacaaaactctctaccaatcacataccggattcagaaaactgatgaaggtaaaggtcagttctatataaacgtat

SEQ ID NO: 316685 - DNA, 75 bp, synthetic construct
  source 1..75: mol_type = other DNA
tacaaaattctttgccaatcacctaccggatacagaaaactgatgataataacggccagttctacataaacgtat

SEQ ID NO: 316686 - DNA, 75 bp, synthetic construct
  source 1..75: mol_type = other DNA
gaacggtcgctttgttgccggagctctggcgctggggttcgtcagcctgccgttgctggcgtggatcgcccagtc

SEQ ID NO: 316687 - DNA, 75 bp, synthetic construct
  source 1..75: mol_type = other DNA
acttgcgctggcggttgtgacggtcgctggcatgctcgccgcaccgtgggtgatcatggtgaccgcgccaggctt

SEQ ID NO: 316688 - DNA, 75 bp, synthetic construct
  source 1..75: mol_type = other DNA
tcgtgctggcggggattgctgcgtactttgctgcactggcggtactgggcttcaaagttaaagagtttgcccgcc

SEQ ID NO: 316689 - DNA, 75 bp, synthetic construct
  source 1..75: mol_type = other DNA
cgatgtgaacggtgattccatcgataacggtactgaagggtctgcggtacgtgttggtctgggtactcagttcag

SEQ ID NO: 316690 - DNA, 75 bp, synthetic construct
  source 1..75: mol_type = other DNA
gtgaacgttgatcagttcgatactgaagctttccgtactgacaaactggaactgaccagcggcaacatcgctgac

SEQ ID NO: 316691 - DNA, 75 bp, synthetic construct
  source 1..75: mol_type = other DNA
gctgcggcaacggttatctcatcgcacgcgtatttatggatgaccgccgggttaagtatttatgctttcggtatt

SEQ ID NO: 316692 - DNA, 75 bp, synthetic construct
  source 1..75: mol_type = other DNA
gcgctggccggtcgcctactggagagtgccgcccaggagaacgaaccgttctggcgtctgccgctggcggagttc

SEQ ID NO: 316693 - DNA, 75 bp, synthetic construct
  source 1..75: mol_type = other DNA
taccgtaaagcgccggttgaacagtggtctgcgggcgcaacagggctgggtgtacgcacgattgctaatctgtta

SEQ ID NO: 316694 - DNA, 75 bp, synthetic construct
  source 1..75: mol_type = other DNA
ccgcgtttatggactcaatgaagtcagacatgggcggtgcggcaacggtttctggggcactggcatttgccatta

SEQ ID NO: 316695 - DNA, 75 bp, synthetic construct
  source 1..75: mol_type = other DNA
agatggcattaatggtccggtggattttaatgtgtttaatggcacagaggaggagttgcaggcattcgttgatgg

SEQ ID NO: 316696 - DNA, 75 bp, synthetic construct
  source 1..75: mol_type = other DNA
ctgattcactatcaggcggctgatggccgtgctaccacagagtggttcggtgagtcgatgctgattgcgatggag

SEQ ID NO: 316697 - DNA, 75 bp, synthetic construct
  source 1..75: mol_type = other DNA
acggcggcgggcttcctgtcgcactttgttgagaactatcagcaaggttggctgcacattgactgctcagcgact

SEQ ID NO: 316698 - DNA, 75 bp, synthetic construct
  source 1..75: mol_type = other DNA
cgctggaatctgcaaccgctactgcaaagtgctcagttgacaggaatgactgtcacaatcaaatccagtacctgt

SEQ ID NO: 316699 - DNA, 75 bp, synthetic construct
  source 1..75: mol_type = other DNA
actgggaaggtggagtatacaaaatataatgatgacgatacctttacagttaaagtgggagataaagaattattt

SEQ ID NO: 316700 - DNA, 75 bp, synthetic construct
  source 1..75: mol_type = other DNA
gtttggtcgctataccggtgccaaagggatattcctgaccggtaatactggggtgtcacattcgcaggccgtatt

SEQ ID NO: 316701 - DNA, 75 bp, synthetic construct
  source 1..75: mol_type = other DNA
caccgcaatcaattgccgtctaactttgccgaactgaacaacaccggaagcgcggcgtatccggcaggcgcgagc

SEQ ID NO: 316702 - DNA, 75 bp, synthetic construct
  source 1..75: mol_type = other DNA
gggtgcgtgacaccatcaacgcaccggcagaagaattgggaccatcgcaactggcacagcgtgctgttgatctga

SEQ ID NO: 316703 - DNA, 75 bp, synthetic construct
  source 1..75: mol_type = other DNA
attgacggtctgggcatcaagcatgttcagttaagcggtgaaggctgggatgcggatcgctgctgggcattctgg

SEQ ID NO: 316704 - DNA, 75 bp, synthetic construct
  source 1..75: mol_type = other DNA
atgcagctgagaatcaccagtcgaaaaaaattcaccgctttattatgcgttcttgggctaatttccatcattgca

SEQ ID NO: 316705 - DNA, 75 bp, synthetic construct
  source 1..75: mol_type = other DNA
cgccaataaaaattattaccggtatggtcagcgccatggtgggattaatgatggtgttatttggtgggtttcaat

SEQ ID NO: 316706 - DNA, 75 bp, synthetic construct
  source 1..75: mol_type = other DNA
gacgacagacaccttcagtaagccaggtgcgcagtccgccgatgcggggaaatatacctgcgtggtgaccgattc

SEQ ID NO: 316707 - DNA, 75 bp, synthetic construct
  source 1..75: mol_type = other DNA
gaatatcgtgtacaccaaaataatatcagtattttggcttgtattacttatcagctcatgcatcagcatacgtaa

SEQ ID NO: 316708 - DNA, 75 bp, synthetic construct
  source 1..75: mol_type = other DNA
cgtctaacctgcgtggccgtcaggggatcatcgttgtggatgaagccgcattccatgagcagttacgcgagctgc

SEQ ID NO: 316709 - DNA, 75 bp, synthetic construct
  source 1..75: mol_type = other DNA
ggatggcatcggtgtacaaattctacggtgccggtgcatcggaggagcttgactgtgttccggccaacggtggcg

SEQ ID NO: 316710 - DNA, 75 bp, synthetic construct
  source 1..75: mol_type = other DNA
cgtctgcctgcgtaccgggaaagaatggtcggaagcatccgagcaggcgtggatggcatcggtgtacaaattcta

SEQ ID NO: 316711 - DNA, 75 bp, synthetic construct
  source 1..75: mol_type = other DNA
tgagtcaatgctggaagcaacagaagatgatcgtcatcctggttgtccggtatttgctggtatggaattaccgga

SEQ ID NO: 316712 - DNA, 75 bp, synthetic construct
  source 1..75: mol_type = other DNA
gataaacgtcatcctggctgccctgtttttgcctgtattgatttgccagaaggcgcggtacttgaagacgacaaa

SEQ ID NO: 316713 - DNA, 75 bp, synthetic construct
  source 1..75: mol_type = other DNA
atgcgctcttgggctaatttccatcgttgcaatttatccgcgtcagacggtgaatttttctattcgacagcaatt

SEQ ID NO: 316714 - DNA, 75 bp, synthetic construct
  source 1..75: mol_type = other DNA
aaatctaagcagtgacaatataaaatatagtcttaatattatacaatactcgctgaatcgtcatttgccgacgtg

SEQ ID NO: 316715 - DNA, 75 bp, synthetic construct
  source 1..75: mol_type = other DNA
aaataaaaatcttcatctttttattttcatgcatctctattatatttttgttactgcatgaaaataatgtaatat

SEQ ID NO: 316716 - DNA, 75 bp, synthetic construct
  source 1..75: mol_type = other DNA
tgagtcaatgctggaagcaacagaagataagcgtcatcctggttgtccggtatttgccggtatggaattaccgga

SEQ ID NO: 316717 - DNA, 75 bp, synthetic construct
  source 1..75: mol_type = other DNA
gcaacatattaatgagccagagaaaatgctggcggcactgaaagcttttgtacaaccgatgaaagcggcgacacg

SEQ ID NO: 316718 - DNA, 75 bp, synthetic construct
  source 1..75: mol_type = other DNA
gccgcagtgggtctttgcgctcgctgcactgaccatcgttggcaccatgaatatgatcggtgtgaaatggtttgc

SEQ ID NO: 316719 - DNA, 75 bp, synthetic construct
  source 1..75: mol_type = other DNA
tatatggagttatggactggtgaagggcttgccgcaaatagcacccgtgcaggaacaaaccctggtatactggct

SEQ ID NO: 316720 - DNA, 75 bp, synthetic construct
  source 1..75: mol_type = other DNA
acgtatcgtgacggttatatcagagataaccaggacgatatcgcattaccactcaaactaatacttgggctagta

SEQ ID NO: 316721 - DNA, 75 bp, synthetic construct
  source 1..75: mol_type = other DNA
tcagcagagtatggggttgttgatcagcgagattttttcgagaaagatattgctaaccaaagcaatcttgaaggg

SEQ ID NO: 316722 - DNA, 75 bp, synthetic construct
  source 1..75: mol_type = other DNA
cgattacccgaacgggacttataccatcgcggcgctgccgattatcggtattctgctggttataggttggtttgg

SEQ ID NO: 316723 - DNA, 75 bp, synthetic construct
  source 1..75: mol_type = other DNA
tatggcgaaaatgagtcgtcagcatgtgccgtatgccgggattctggcgacactggttgtgtatgtcgtcggcgt

SEQ ID NO: 316724 - DNA, 75 bp, synthetic construct
  source 1..75: mol_type = other DNA
agtgttaaaagcttgtggttctgtggactatttttgccaacatgggcacggtttaatatctaaaaaacgcgttga

SEQ ID NO: 316725 - DNA, 75 bp, synthetic construct
  source 1..75: mol_type = other DNA
gaacccgctaaaacagcccgaaccaatgacgaaatatcaggtctgggaggacgactggatggttgatgagtgttt

SEQ ID NO: 316726 - DNA, 75 bp, synthetic construct
  source 1..75: mol_type = other DNA
atcccttattccttaatcaatgcctggaatagcagtccaggacctgatccgcaaaacagcgatgaggtccgttat

SEQ ID NO: 316727 - DNA, 75 bp, synthetic construct
  source 1..75: mol_type = other DNA
cgataaagccattaccgcccaaatcaatgcttgggccttcaacaatcaatccatcctgaaagaacgcgcgcggca

SEQ ID NO: 316728 - DNA, 75 bp, synthetic construct
  source 1..75: mol_type = other DNA
gcgatttttaaccacaacgtgacggctatcgccattgtgatgacgctgtttgtgggcggtttcctgctctccacg

SEQ ID NO: 316729 - DNA, 75 bp, synthetic construct
  source 1..75: mol_type = other DNA
gtgccgtatgccgggattctggcgacactggttgtgtatgtcgtcggcgtattcctcaactatctggtgccgtca

SEQ ID NO: 316730 - DNA, 75 bp, synthetic construct
  source 1..75: mol_type = other DNA
taatcgtaggtcaagctcaaaaggttaaaacacttaaaacctttaaaaagggcctattgcaacagatttttccta

SEQ ID NO: 316731 - DNA, 75 bp, synthetic construct
  source 1..75: mol_type = other DNA
gttttggcgcttttaaaacggcgatgagcagtaatattgagctggttagtgctgaagtcatgaaacagggacgct

SEQ ID NO: 316732 - DNA, 75 bp, synthetic construct
  source 1..75: mol_type = other DNA
gtgatgaatcagggcatacgtcgtcagtaccacattatgattgccttactttgtgctatcagcgatttggtcctg

SEQ ID NO: 316733 - DNA, 75 bp, synthetic construct
  source 1..75: mol_type = other DNA
atgcgcgtaacggataagcaacgcgggtttacattactggaaattatggtggtgattgtcattatcggcgtactt

SEQ ID NO: 316734 - DNA, 75 bp, synthetic construct
  source 1..75: mol_type = other DNA
agccggtgctgacgcgctggagttaggcatccccttctccgacccactggcggatggcccgacgattcaaaacgc

SEQ ID NO: 316735 - DNA, 75 bp, synthetic construct
  source 1..75: mol_type = other DNA
aagagtccgcgcccttccgccaggccgcgttgcgtcataatgtcgcacctatctttatttgcccgcctaatgccg

SEQ ID NO: 316736 - DNA, 75 bp, synthetic construct
  source 1..75: mol_type = other DNA
accgccaaagcgcagcgcattatcaatttcgtggtgggctgcgtgatgtggtttatcgctctacaactggcgaaa

SEQ ID NO: 316737 - DNA, 75 bp, synthetic construct
  source 1..75: mol_type = other DNA
aacgccaggtgatgtcaataataactctttatataaagagttatcagtctattactcatgcaaaaataaagctct

SEQ ID NO: 316738 - DNA, 75 bp, synthetic construct
  source 1..75: mol_type = other DNA
ttacgggaaagtagcctggtaaaagccacacgcggcccgggtggtggatatatcccgacaaaagaaaattacagt

SEQ ID NO: 316739 - DNA, 75 bp, synthetic construct
  source 1..75: mol_type = other DNA
attggcatcattacatgcgccaagtttcaagcacaggtgtacgccatgaccgaatgaacatcagtaataacgcat

SEQ ID NO: 316740 - DNA, 75 bp, synthetic construct
  source 1..75: mol_type = other DNA
gcatttatctctcccggactcacctcgatgcggcctttgacgacaatggccgacagataaatccgctgctgacgc

SEQ ID NO: 316741 - DNA, 75 bp, synthetic construct
  source 1..75: mol_type = other DNA
accttgcctggtgcggcctgattgccctggcgctggcccggcaggacggcggcgtccggtcggctgctcaggcaa

SEQ ID NO: 316742 - DNA, 75 bp, synthetic construct
  source 1..75: mol_type = other DNA
tggcaggctgagcctgagtctgatgcctccctgccccaccagttttcactgatggcccggcagggagtgccagga

SEQ ID NO: 316743 - DNA, 75 bp, synthetic construct
  source 1..75: mol_type = other DNA
tatgctctatctgcgtaaccacaacccggcaacctttgtgttgatcccggtatttatcgtggtgaccaaggtcat

SEQ ID NO: 316744 - DNA, 75 bp, synthetic construct
  source 1..75: mol_type = other DNA
tctgctgtatttcagaaaccataatcctgccacattccttctgatcccggtatttattgtggtgaccaaagttgt

SEQ ID NO: 316745 - DNA, 75 bp, synthetic construct
  source 1..75: mol_type = other DNA
ttgcgtgatcatctctcagaactcaatgaggatgacgcaaataaattaattaggcatgcaaaaagtaaaggcacg

SEQ ID NO: 316746 - DNA, 75 bp, synthetic construct
  source 1..75: mol_type = other DNA
ttaaccggtgcgaaagacccggcactgcgtcagatcccgttgctgaaacaactggttgcaggcgtggatgtgccg

SEQ ID NO: 316747 - DNA, 75 bp, synthetic construct
  source 1..75: mol_type = other DNA
tggcgtgcgcggcgtaatagttggtcgggcattactggaaggtaaattcaccgtgaaggaggccatcgcatgctg

SEQ ID NO: 316748 - DNA, 75 bp, synthetic construct
  source 1..75: mol_type = other DNA
tggcggaaatgtacaacatcagccgcactacagtgcgtcatattctcagccacttacgcgaatgcggcgtcttaa

SEQ ID NO: 316749 - DNA, 75 bp, synthetic construct
  source 1..75: mol_type = other DNA
acccttacccggcaatgtcctggctttatcccgatcggggagactttattgccgtggtcggcagaatgcaggata

SEQ ID NO: 316750 - DNA, 75 bp, synthetic construct
  source 1..75: mol_type = other DNA
tttttaccaaccctgggtcaatgcattaccgccaacgccccgacacgcaagtcctgagcaattagaaaaaacagt

SEQ ID NO: 316751 - DNA, 75 bp, synthetic construct
  source 1..75: mol_type = other DNA
tggtagccaggattacccttacccggcaatgtcctggctttatcccgatcggggagactttattgccgtggtcgg

SEQ ID NO: 316752 - DNA, 75 bp, synthetic construct
  source 1..75: mol_type = other DNA
gcttcgcttgagcgtccagtaaaattaatgatagcactggagatgattggctattacgactctgcgcctggtagc

SEQ ID NO: 316753 - DNA, 75 bp, synthetic construct
  source 1..75: mol_type = other DNA
ttatatcattactactatcgcttacttttattattttttaccaaccttgggtcaatgcattaccgccaacgcccc

SEQ ID NO: 316754 - DNA, 75 bp, synthetic construct
  source 1..75: mol_type = other DNA
acaccgctttttatcgtaataaacaataccacttgcccggtgataccgcagacagattaaattatcagaaaatgg

SEQ ID NO: 316755 - DNA, 75 bp, synthetic construct
  source 1..75: mol_type = other DNA
gtgcaggttggcggcggcgtgcgtagcgaagaagatgtggcggcgttacttgaagcaggcgttgcgcgcgtggtg

SEQ ID NO: 316756 - DNA, 75 bp, synthetic construct
  source 1..75: mol_type = other DNA
acggttctgaagcatttcccttcttacgtagcatactaccgggcattggttgctgcctgtacggcgctgcctgta

SEQ ID NO: 316757 - DNA, 75 bp, synthetic construct
  source 1..75: mol_type = other DNA
ggcggcagcgatcgtggatggcgtagtaggccagggctaccgggcccggttctacagcgcaggtttgcttttcct

SEQ ID NO: 316758 - DNA, 75 bp, synthetic construct
  source 1..75: mol_type = other DNA
tgttcgagttaatagcgcatcgctatgaacgtgggagcctggtgataaccagtaaccatccgttcgtaagcgtca

SEQ ID NO: 316759 - DNA, 75 bp, synthetic construct
  source 1..75: mol_type = other DNA
aaatatacattaacattcaactctctaaactatggaggatacgaaatggaaccggtaacaataaccattaatgct

SEQ ID NO: 316760 - DNA, 75 bp, synthetic construct
  source 1..75: mol_type = other DNA
cacagcgccgaacagtggcaactcaacgttgaaaagctcgatgcgcaagggattatggcccgctggccagaaata

SEQ ID NO: 316761 - DNA, 75 bp, synthetic construct
  source 1..75: mol_type = other DNA
tggtcctccgcgcgcaaacgctgtgggatgaactttcccgccacaacgaagatgatcccatttttgtacgctctg

SEQ ID NO: 316762 - DNA, 75 bp, synthetic construct
  source 1..75: mol_type = other DNA
cgagaacgtgcgccagctgacgcccgcaatcatggccgtgctgcctctggagtatcgccatcgacttcttcccga

SEQ ID NO: 316763 - DNA, 75 bp, synthetic construct
  source 1..75: mol_type = other DNA
ctggcgctggatgtccgtattgacgagcaaggcaacaagcaggtggcggtcagcggctggcaagagaactcgggc

SEQ ID NO: 316764 - DNA, 75 bp, synthetic construct
  source 1..75: mol_type = other DNA
aacagggtaacaagcaggtagcggtaagcggctggcaggagaattctggcgttaccctggaggagctggtggata

SEQ ID NO: 316765 - DNA, 75 bp, synthetic construct
  source 1..75: mol_type = other DNA
agcaaattgctgcccctctcccctgccggactggcgcgctatcgtcagggcgaattactcaaccgcgtggtggcg

SEQ ID NO: 316766 - DNA, 75 bp, synthetic construct
  source 1..75: mol_type = other DNA
ttgccagttgccaaaacgctaagcgaatacgacttcagtcaggtgccggaactgaatggagctcagttccggcaa

SEQ ID NO: 316767 - DNA, 75 bp, synthetic construct
  source 1..75: mol_type = other DNA
atccatcacggatatatgttcgaactgaaaggggaaagctacaggaaaaagacagcgaaggcggtaacaagcgtg

SEQ ID NO: 316768 - DNA, 75 bp, synthetic construct
  source 1..75: mol_type = other DNA
cgtgcacgctgcggattgggactggagcgcaatagctgagaatatggcgcacgctcacccgattggattagtgca

SEQ ID NO: 316769 - DNA, 75 bp, synthetic construct
  source 1..75: mol_type = other DNA
caggtgctgttgctatggctctggtttcttttggtgcgaatgcggatcctgcagcagtaacactacctgtaaacc

SEQ ID NO: 316770 - DNA, 75 bp, synthetic construct
  source 1..75: mol_type = other DNA
cgatattaacagcggggcgtgcgcggtacgtaaccaggcgattatgctggcgcaaggggaatacatcaccgggat

SEQ ID NO: 316771 - DNA, 75 bp, synthetic construct
  source 1..75: mol_type = other DNA
aaccgcctgagcgtcttcctcgcccataaacagcaactggtcactcacgcctttttgtacgctaacgactacgtt

SEQ ID NO: 316772 - DNA, 75 bp, synthetic construct
  source 1..75: mol_type = other DNA
tttcagaattcgaaactatcgaacaagaaaacagttacaacgaatggttgcgcgctaaagtagcgtcaagccttg

SEQ ID NO: 316773 - DNA, 75 bp, synthetic construct
  source 1..75: mol_type = other DNA
ctattgctttttcattgtgtgctgttgcacatgcagctgatcaaggtcacgggattattaattttaaaggaacag

SEQ ID NO: 316774 - DNA, 75 bp, synthetic construct
  source 1..75: mol_type = other DNA
cagtcgcagccacactggcttcatttagtacacaggcagcaaatcaaggacagggtgtagtaaacttcaaaggtg

SEQ ID NO: 316775 - DNA, 75 bp, synthetic construct
  source 1..75: mol_type = other DNA
cttcagcagtttgtcatcgaactcaacgatcgccgcgtacagtacacgcgcaacgattttaactccggagcatgc

SEQ ID NO: 316776 - DNA, 75 bp, synthetic construct
  source 1..75: mol_type = other DNA
actgacactttcgcgatgctcgacgccttccgcgctaatgaaaatggcgctgcgccactaccgttgacggcaaac

SEQ ID NO: 316777 - DNA, 75 bp, synthetic construct
  source 1..75: mol_type = other DNA
gtagcggcaagcagattgtgctctccacgctggcgctggttcaggcatcctctgaacttggcgaactgaaacgct

SEQ ID NO: 316778 - DNA, 75 bp, synthetic construct
  source 1..75: mol_type = other DNA
cgcaataaacgcatgacctggcgcaccttgttgacgctgctatcggtgcgtaacggcaaacgtctggctgaagga

SEQ ID NO: 316779 - DNA, 75 bp, synthetic construct
  source 1..75: mol_type = other DNA
tgaaacgccgcctgccgcaacggttgtcgcccaggagggcgaagatgaatatcagttgattgtgcgcgtgctgaa

SEQ ID NO: 316780 - DNA, 75 bp, synthetic construct
  source 1..75: mol_type = other DNA
tgcgttttattcttgccttttcgttcacattactgacagcggcagatatcagtatcagtttgtattcatggtgta

SEQ ID NO: 316781 - DNA, 75 bp, synthetic construct
  source 1..75: mol_type = other DNA
ctcagtgaggggattgtagagatgttccgtgtcgacccggatctgaccgcgccgctgatggctatggtcacttcg

SEQ ID NO: 316782 - DNA, 75 bp, synthetic construct
  source 1..75: mol_type = other DNA
ttatcactgactacatcgcttcgcgaaggcaacccaagatcgaagcctttgaaaaagaagcagcaaagcgtgttc

SEQ ID NO: 316783 - DNA, 75 bp, synthetic construct
  source 1..75: mol_type = other DNA
ccgaactgcgcgggcgaaatatattgatgagttgatcgatttgctgttcatgcaggcatccgcttttcagcaaga

SEQ ID NO: 316784 - DNA, 75 bp, synthetic construct
  source 1..75: mol_type = other DNA
tttcaatagggcggcttcaggcatcatagcccggatgacttacctgctgaaggttgacacaaataatgttcatat

SEQ ID NO: 316785 - DNA, 75 bp, synthetic construct
  source 1..75: mol_type = other DNA
tcgcgaagaggggccttttgtggtccgcctggctcgtgaaccaggtaagcgagaaagccgctatatgcatctttt

SEQ ID NO: 316786 - DNA, 75 bp, synthetic construct
  source 1..75: mol_type = other DNA
ggtaaatggcactcacagccagatattcgtttccctaatcttgcagagatgcattatggaggtggaaatcaacag

SEQ ID NO: 316787 - DNA, 75 bp, synthetic construct
  source 1..75: mol_type = other DNA
gcccgctgttttccagttcgctggcacaggcgatgtatgaaaagctaactgccgtgcgctttagtgaggaatcga

SEQ ID NO: 316788 - DNA, 75 bp, synthetic construct
  source 1..75: mol_type = other DNA
tgtcctctgttggcggtcacgtccactgccactaacgctctgggtttaggacttgcgactacgctggtactgacg

SEQ ID NO: 316789 - DNA, 75 bp, synthetic construct
  source 1..75: mol_type = other DNA
taaaaactcggatgtgctgtgggcaatcatcaaccagcctgaaaatgttcacgagcacatcaaacatctggccga

SEQ ID NO: 316790 - DNA, 75 bp, synthetic construct
  source 1..75: mol_type = other DNA
cagatcatcgccccgcaataccgcatgacgaggtgatggctgaaatggaaaatcttattgctcaaattgctgcga

SEQ ID NO: 316791 - DNA, 75 bp, synthetic construct
  source 1..75: mol_type = other DNA
cgctaacgaaagctatttaaacacagcatcgttggcgaaagtcgccactgacgccattggcaacgccgccgcact

SEQ ID NO: 316792 - DNA, 75 bp, synthetic construct
  source 1..75: mol_type = other DNA
acatgcgcagtatttttgccttacgcggcgatttcaatcgctcagcttcgggcactatcgccaggatgacctact

SEQ ID NO: 316793 - DNA, 75 bp, synthetic construct
  source 1..75: mol_type = other DNA
aactttggctggatccgtggcgaagcctctcagatgagacttttaaacaggagcgtgagaaaaacgactggcaag

SEQ ID NO: 316794 - DNA, 75 bp, synthetic construct
  source 1..75: mol_type = other DNA
acgaactgctttacagcggtattgcccggtgccgggtacatctggggataggcaaccacaagaccttgctgcaca

SEQ ID NO: 316795 - DNA, 75 bp, synthetic construct
  source 1..75: mol_type = other DNA
gtgaaaacgttatctcaacaagagatgaaaaaaaatctgaaggagatgaaaaatctggcagtcgcagggaaactg

SEQ ID NO: 316796 - DNA, 75 bp, synthetic construct
  source 1..75: mol_type = other DNA
atgatagtgaaagcaaagcgtttccgtatcggggtggaaggtgccaccaccgatgggcgcgaaatccagcgtgaa

SEQ ID NO: 316797 - DNA, 75 bp, synthetic construct
  source 1..75: mol_type = other DNA
atgaatcaaccaatacacaatgcttactggttatcccgctttgaaagtattctcaacagtgccctggcgcaacac

SEQ ID NO: 316798 - DNA, 75 bp, synthetic construct
  source 1..75: mol_type = other DNA
tcgggagtttggcaaggaaaaaggcaggaaacattatcacgtgatattactgctcaacaaagatacctggtgctc

SEQ ID NO: 316799 - DNA, 75 bp, synthetic construct
  source 1..75: mol_type = other DNA
tgaaacgaagttgcatgatggttcaggtcaacgtaattatggttgcagtcgtgggccggggcgtttactggatgg

SEQ ID NO: 316800 - DNA, 75 bp, synthetic construct
  source 1..75: mol_type = other DNA
agacagccctgcaggcacagctgaccgcctttgacgaactggtggacaagctgagccatgaagacagccgccagg

SEQ ID NO: 316801 - DNA, 75 bp, synthetic construct
  source 1..75: mol_type = other DNA
agtcttttttcatcactgaggaagtggaggccggactgatcgcggccgggcatttgtttgagctacagccgattg

SEQ ID NO: 316802 - DNA, 75 bp, synthetic construct
  source 1..75: mol_type = other DNA
ccgtacaagccaatgagcgaaaacacaaccaaccgggcgctgcgcctgatggggtatgacacgaaaactgaaatc

SEQ ID NO: 316803 - DNA, 75 bp, synthetic construct
  source 1..75: mol_type = other DNA
gtgcataaggccgtggaactggtcgccactgagcagcaaaacctgagcacgcgcaccgaaaaatccctgtctgag

SEQ ID NO: 316804 - DNA, 75 bp, synthetic construct
  source 1..75: mol_type = other DNA
tgctgaggaaatcacggaaggtccgctggcaggcaagatggcgctgtatgccgatgttgagccaacggagtctct

SEQ ID NO: 316805 - DNA, 75 bp, synthetic construct
  source 1..75: mol_type = other DNA
agactgccctgcaggcacagcagaccgcctttaacgaactggtggacaagctgagccatgaagacagccgccagg

SEQ ID NO: 316806 - DNA, 75 bp, synthetic construct
  source 1..75: mol_type = other DNA
tcctggggcgtgatgatcaggatctactgctggcggcgaaggggattgctcagggcaatatattattccgtggcg

SEQ ID NO: 316807 - DNA, 75 bp, synthetic construct
  source 1..75: mol_type = other DNA
gctattcaacggtcagccagcagccaccgatgctgcgcggttgactgtcgttgcgggggagatgtcatcagcgaa

SEQ ID NO: 316808 - DNA, 75 bp, synthetic construct
  source 1..75: mol_type = other DNA
taatggcgacgggacctggactgcgcagatttctctcggcactacggcgggtgaattagaggttatgccgaagct

SEQ ID NO: 316809 - DNA, 75 bp, synthetic construct
  source 1..75: mol_type = other DNA
ataagttggagtcattaccacaaaggcaatgcctcgaaacgtgtgcagacagaagtggttattagcggagctggt

SEQ ID NO: 316810 - DNA, 75 bp, synthetic construct
  source 1..75: mol_type = other DNA
ccttaacgctgggatcggctgcaggtcagttgtctgtcatgccacgcgtgaacggccaaaatgccgttgctcagc

SEQ ID NO: 316811 - DNA, 75 bp, synthetic construct
  source 1..75: mol_type = other DNA
tctgacactgagcgccgggcataagcagggcaagagtggtgagaatgacactcgctttggcctggaagttaacta

SEQ ID NO: 316812 - DNA, 75 bp, synthetic construct
  source 1..75: mol_type = other DNA
aagcagagttgcaggtggtttccgtgactgccggaacctatgagatcacggcgtcggcaggaaatgaccagcctt

SEQ ID NO: 316813 - DNA, 75 bp, synthetic construct
  source 1..75: mol_type = other DNA
ttgtgcgtgctttcagcgagcagtatcagctgggcacattacaacaaacgctgaagtttgttgccggtccgcttg

SEQ ID NO: 316814 - DNA, 75 bp, synthetic construct
  source 1..75: mol_type = other DNA
cagacaaaaagtctggtgaagccgctgttctctggatcaagcgtggtgatgtggaagcgatgcagaaagccctgg

SEQ ID NO: 316815 - DNA, 75 bp, synthetic construct
  source 1..75: mol_type = other DNA
tgagacgaagcagcatgacggttctggtcaacgtaattatggttgcagtcgtgggccggggcgtttactggatgg

SEQ ID NO: 316816 - DNA, 75 bp, synthetic construct
  source 1..75: mol_type = other DNA
tggatactgatggtaacccggtgacgggagaggccagccgcttgcgatttgttccgcaagacactaatggtgtca

SEQ ID NO: 316817 - DNA, 75 bp, synthetic construct
  source 1..75: mol_type = other DNA
aaaaacgcggtgctcgctgcatctccagagcgtgtagattctctggtggcggacgggaagactactgcaacactg

SEQ ID NO: 316818 - DNA, 75 bp, synthetic construct
  source 1..75: mol_type = other DNA
tgtgaccagcaagacggggaatacagtaacaaccaatgcggcaggaaaagtggacattgagcttatgtcaacggt

SEQ ID NO: 316819 - DNA, 75 bp, synthetic construct
  source 1..75: mol_type = other DNA
atccgcaataaaaggatgaactggcgcacgctgctgacgctgctttctgttcgtaacagtaagcgtctggccgac

SEQ ID NO: 316820 - DNA, 75 bp, synthetic construct
  source 1..75: mol_type = other DNA
gtaagcgagggtatagcgtcgctcttccgcctcatgccggagcaggcaggcccactgatgacgatggttacatcg

SEQ ID NO: 316821 - DNA, 75 bp, synthetic construct
  source 1..75: mol_type = other DNA
aatggcggcacgtgcgcagcatgcggttcagccacggttgagcatgggaaatactacggtaactgctgataataa

SEQ ID NO: 316822 - DNA, 75 bp, synthetic construct
  source 1..75: mol_type = other DNA
ttacggtgactgatgccaataacaacctgttgaaggatagcgacgtgacgctgactgccagctcggaaaatttag

SEQ ID NO: 316823 - DNA, 75 bp, synthetic construct
  source 1..75: mol_type = other DNA
aatgacctgtcacgggataatccaaagtggtcagactggaaaatcagggggcaggaactgctgaacagcaggaag

SEQ ID NO: 316824 - DNA, 75 bp, synthetic construct
  source 1..75: mol_type = other DNA
ctcagtgaggggattgtagagatgttccgtgtcgacccagacctgaccgcgccgctgatggccatggtcacttcg

SEQ ID NO: 316825 - DNA, 75 bp, synthetic construct
  source 1..75: mol_type = other DNA
aaattattcacctctatggaagtctgcccaaagtttgctgatacgggcaaagcctacctggtcgggctggctgcc

SEQ ID NO: 316826 - DNA, 75 bp, synthetic construct
  source 1..75: mol_type = other DNA
gaactggattcattactgcgttgtttaagaatttcccgcgccgaatctgccattatcatgacagcacctgccagc

SEQ ID NO: 316827 - DNA, 75 bp, synthetic construct
  source 1..75: mol_type = other DNA
gcgccgatcgcacggcgttaacgcttgacggtcagagccgtattcaaatgcttgctaacggtaatgagcaaagac

SEQ ID NO: 316828 - DNA, 75 bp, synthetic construct
  source 1..75: mol_type = other DNA
cagggcaagagcggtcagaatgacacccgtttgggcctggaaattaactaccggattggcgaacctctggaaaaa

SEQ ID NO: 316829 - DNA, 75 bp, synthetic construct
  source 1..75: mol_type = other DNA
cctcggggcgtcaaaccgcttgcagacggtaatatcatggtgaacgccgacaaggagggtaaagcggaactgaaa

SEQ ID NO: 316830 - DNA, 75 bp, synthetic construct
  source 1..75: mol_type = other DNA
tgccgcgagtgaacggccaaaatgccgttgctcagccactggtgctgaacgttgcaggtgacgcatctaaggctg

SEQ ID NO: 316831 - DNA, 75 bp, synthetic construct
  source 1..75: mol_type = other DNA
agtgtttagcggtgccgccagcacggggagtgagcgtccttcagcaggaaactggacagagaaaggtaatggggt

SEQ ID NO: 316832 - DNA, 75 bp, synthetic construct
  source 1..75: mol_type = other DNA
caggaagaacgcctgtctgagatggagactaccttgcaggcacaacaagccgcctttaacgaactggtggataag

SEQ ID NO: 316833 - DNA, 75 bp, synthetic construct
  source 1..75: mol_type = other DNA
ttcctgcaaccaggcaacttacgaaaaactgatggcggcaggggcggatgtctttatcgtcggcacttccggcct

SEQ ID NO: 316834 - DNA, 75 bp, synthetic construct
  source 1..75: mol_type = other DNA
gcctgattgatgaaatccgccgtcatggcatgaaagtggggctgattcttaatccggaaacgccggttgaggcca

SEQ ID NO: 316835 - DNA, 75 bp, synthetic construct
  source 1..75: mol_type = other DNA
tgcggtgtcgtttgccttcaacgtgggaacgggcaatgcctgcagttccacgctggtgaaattactcaatcagcg

SEQ ID NO: 316836 - DNA, 75 bp, synthetic construct
  source 1..75: mol_type = other DNA
ctgaaagcagcacaggattacgacatcttcctgcggatggtggtggagtacggcgaaccgtggaaagtggaagag

SEQ ID NO: 316837 - DNA, 75 bp, synthetic construct
  source 1..75: mol_type = other DNA
ttgctccacctcctgggaacaactgcaacagtacgtcaccgccctcaacgatccgcgtatcacctacattcacaa

SEQ ID NO: 316838 - DNA, 75 bp, synthetic construct
  source 1..75: mol_type = other DNA
tgccgcacataacccgctggcaaaccgtaagcagaatcctgaaaacctttttaccgctgccgaagaaacgcagat

SEQ ID NO: 316839 - DNA, 75 bp, synthetic construct
  source 1..75: mol_type = other DNA
ctgaaatgctgacattcagcgccagtgcagcccataacccgctggcaaaccgcaagcagaatcccgccaatcttt

SEQ ID NO: 316840 - DNA, 75 bp, synthetic construct
  source 1..75: mol_type = other DNA
ggggtatgacacgaaaactgaaatctgcgggcatggactcagggcaatggcctgtagcgccctggtggagtcgga

SEQ ID NO: 316841 - DNA, 75 bp, synthetic construct
  source 1..75: mol_type = other DNA
cggcgctgtttaccaaaaaagagcagtccgatgacgcccggttctcagatgtgcataaggccgtggagctggtcg

SEQ ID NO: 316842 - DNA, 75 bp, synthetic construct
  source 1..75: mol_type = other DNA
gtcattcccggcaaaaccattacggaacgacaggcagcagaaggactgatttccaacgtgctgcgtgtggagcgg

SEQ ID NO: 316843 - DNA, 75 bp, synthetic construct
  source 1..75: mol_type = other DNA
tgaacgacaaagacacgctgaaagccggaaaactcaccatcgactacgactacacgccagtgccgccacttgaaa

SEQ ID NO: 316844 - DNA, 75 bp, synthetic construct
  source 1..75: mol_type = other DNA
tgcagcccataaaccgcttaacccgtcgctggcccgcgacattatcgaaggtatccgcgccaaaatgcgcagcct

SEQ ID NO: 316845 - DNA, 75 bp, synthetic construct
  source 1..75: mol_type = other DNA
aagagataagcacactggggtatggaccagaagaaattcatttcctggtaagatttttttattctggtctaaaaa

SEQ ID NO: 316846 - DNA, 75 bp, synthetic construct
  source 1..75: mol_type = other DNA
acggtaaatcaggcttctggcgcattacagaaaaaacagaacggcgcagatattccaggaaaagataccttcacc

SEQ ID NO: 316847 - DNA, 75 bp, synthetic construct
  source 1..75: mol_type = other DNA
ccagcacatcagcccgtgaggcggcaacccgtgcgactgatgctgcaggctcagcacgtgccgccagcacgtcag

SEQ ID NO: 316848 - DNA, 75 bp, synthetic construct
  source 1..75: mol_type = other DNA
gtaagcgagggtatagcttcgctgttccgcctcatgccggagcaggtagggccactgatgacgatggttacatca

SEQ ID NO: 316849 - DNA, 75 bp, synthetic construct
  source 1..75: mol_type = other DNA
gattgttgttttttataatagtgaccatttatatttttgtttttatattttctcttgacagtggcagtgagttgg

SEQ ID NO: 316850 - DNA, 75 bp, synthetic construct
  source 1..75: mol_type = other DNA
ttagctacatcatcaaatcattgattgaggctggatattcaattgaagacaaactctatttgttacgcattggag

SEQ ID NO: 316851 - DNA, 75 bp, synthetic construct
  source 1..75: mol_type = other DNA
aatcgcgttattactgacgtggcgattaaaaaacggcctccggaacacgtccctgaggccgcctcatcatcttaa

SEQ ID NO: 316852 - DNA, 75 bp, synthetic construct
  source 1..75: mol_type = other DNA
gcagaatcagggggcggcgttggcaacatacactgtgtttatggatttatcgctgggcgtgaccggaccactggc

SEQ ID NO: 316853 - DNA, 75 bp, synthetic construct
  source 1..75: mol_type = other DNA
tttatcacgctgttttatgacgctaaaggttgggacggtgcggctttcgcgctgacgctgtttagctgtgcgttt

SEQ ID NO: 316854 - DNA, 75 bp, synthetic construct
  source 1..75: mol_type = other DNA
atgttcgacttggttcacagcaatattatggagtgaacaactggcaaacatggaatttccagtgcccttcaggtc

SEQ ID NO: 316855 - DNA, 75 bp, synthetic construct
  source 1..75: mol_type = other DNA
cagggctatcccggcgcggtcagctttggttatttgctgactgaacagcagggattcccggtaccatgtattcat

SEQ ID NO: 316856 - DNA, 75 bp, synthetic construct
  source 1..75: mol_type = other DNA
aaacgttgtagagacggtttatcttgctttatctgaccatgcacgcctgtttggatttaccgctgaagatattat

SEQ ID NO: 316857 - DNA, 75 bp, synthetic construct
  source 1..75: mol_type = other DNA
caccgactatttgcaacagtgccccggcaaggatgtcaagcgtccgcaactggaagcgctgataagcttcgcccg

SEQ ID NO: 316858 - DNA, 75 bp, synthetic construct
  source 1..75: mol_type = other DNA
gtccaagggctgacacaacggggcgtgcgcatggagttcgtcaaagaagggctgaagttcaccggcgaggactca

SEQ ID NO: 316859 - DNA, 75 bp, synthetic construct
  source 1..75: mol_type = other DNA
atcgtccaagggctgacacaacggggcgtgcgcatggagttcgtcaaagaagggctgaagttcaccggcgaggac

SEQ ID NO: 316860 - DNA, 75 bp, synthetic construct
  source 1..75: mol_type = other DNA
aaccatcggcgttgctgtttctaccggctgctgggcgcatcgtcgcggcacactgctggttcatgccgatctcac

SEQ ID NO: 316861 - DNA, 75 bp, synthetic construct
  source 1..75: mol_type = other DNA
ggcggtcgtgctgtcgtttatcctcacactgttgctcggctttgaggatattcctgttgaggaagcggctgccga

SEQ ID NO: 316862 - DNA, 75 bp, synthetic construct
  source 1..75: mol_type = other DNA
caggaagtcgtcagcctgctgccgggagatatgcagcccgcacagcccgtgggtaaacccaaactcacgctgcgt

SEQ ID NO: 316863 - DNA, 75 bp, synthetic construct
  source 1..75: mol_type = other DNA
cacgctcggtgatagcggcactgggcggcgttgataacatctcggcagtcacgcactgtatgacgcgtttgcgct

SEQ ID NO: 316864 - DNA, 75 bp, synthetic construct
  source 1..75: mol_type = other DNA
acaatggggaaatttaccctgcgcgaacatcttgccgggctgcggaacaacgaccaactgctgctgatgctggtc

SEQ ID NO: 316865 - DNA, 75 bp, synthetic construct
  source 1..75: mol_type = other DNA
gtttcggtaggcttaccgtggatggtagatctcttcggtcagggcaacgctgcacgcggctatcaactgggcgtc

SEQ ID NO: 316866 - DNA, 75 bp, synthetic construct
  source 1..75: mol_type = other DNA
acagacgtttttggattaactccggcgctggttggcacgctgtttattgcactgcgcgtgtttgatgccatctcc

SEQ ID NO: 316867 - DNA, 75 bp, synthetic construct
  source 1..75: mol_type = other DNA
tggataaactaaaacagctaaaggatgccgaaacatcgtcgatgggaaaaatcatctaccacacgatgttcgata

SEQ ID NO: 316868 - DNA, 75 bp, synthetic construct
  source 1..75: mol_type = other DNA
ggctgctgggcgcatcgtcgcggcacgctgctggttcatgccgatctctcctttgaaaatctgtctcacacccgg

SEQ ID NO: 316869 - DNA, 75 bp, synthetic construct
  source 1..75: mol_type = other DNA
gcggcagagctggagctacgcctggaagaaggactcaaccgtctggggattggtccacaagggctgactggcaac

SEQ ID NO: 316870 - DNA, 75 bp, synthetic construct
  source 1..75: mol_type = other DNA
agcatcaagcgcctgatggatcttggttgctatcgcggtttgcgtcatcgtcgtggtttcccggttcgcggtcag

SEQ ID NO: 316871 - DNA, 75 bp, synthetic construct
  source 1..75: mol_type = other DNA
tggcgacattgagaaagcagtgtttaacattgatggtctttataaccacatcgacaaagtgaaaaacgcttgcaa

SEQ ID NO: 316872 - DNA, 75 bp, synthetic construct
  source 1..75: mol_type = other DNA
ttatcattgaagcagtgccggaagctggcgacattgagaaagcagtgtttaacattgatggtctttataaccaca

SEQ ID NO: 316873 - DNA, 75 bp, synthetic construct
  source 1..75: mol_type = other DNA
tgattgcggcggtattgggtctggttggttgcaatgaggataatgaaaaagcgcctatagtgaccaatcaagagc

SEQ ID NO: 316874 - DNA, 75 bp, synthetic construct
  source 1..75: mol_type = other DNA
gctgccgagtcgctggggccaaatgcatcctggagccagttcaatgtggcccacactgacgagacggaaagttgg

SEQ ID NO: 316875 - DNA, 75 bp, synthetic construct
  source 1..75: mol_type = other DNA
ctcaggccggaactgtgcttcagcctcacggtgcaggctggtcacggtcgattcgatttgcgtcatcagttcaag

SEQ ID NO: 316876 - DNA, 75 bp, synthetic construct
  source 1..75: mol_type = other DNA
tatcatacatggcgtgaattagcagatgcctttgagctggatatccatgactttagcgtctcggaagtgaaccgc

SEQ ID NO: 316877 - DNA, 75 bp, synthetic construct
  source 1..75: mol_type = other DNA
tcgagagaggaattgcttaagcgaaagagtttctgctctgttaatgataacaaatatctgaatgcgatgtggcgg

SEQ ID NO: 316878 - DNA, 75 bp, synthetic construct
  source 1..75: mol_type = other DNA
tcgagagaggaattgcttaaaagaaagagtttcggttctgttaatgacaacaaatatctgaatgctatgtggcgc

SEQ ID NO: 316879 - DNA, 75 bp, synthetic construct
  source 1..75: mol_type = other DNA
ggcaaggggaaggcccgacatgtcagaccgaaggcacgttatggggaggcaatctcgcgatgctgatttcactga

SEQ ID NO: 316880 - DNA, 75 bp, synthetic construct
  source 1..75: mol_type = other DNA
tcgagagaggaattgcttaagagaaatagtttcggttctgttaatgacaacaaatgtctgaatgcgatgtggcgg

SEQ ID NO: 316881 - DNA, 75 bp, synthetic construct
  source 1..75: mol_type = other DNA
tcgagagaggaattacttaagcgaaactcgtttccatcagtgaatcaaaacaaacatctgaatgcgatgtggcgc

SEQ ID NO: 316882 - DNA, 75 bp, synthetic construct
  source 1..75: mol_type = other DNA
tcgagagaggaattgcttaagagaaattcttttccgtcagtaaatcaaaacaaatatctgaatgcgatgtggcgt

SEQ ID NO: 316883 - DNA, 75 bp, synthetic construct
  source 1..75: mol_type = other DNA
agtttgataatcatattcctgaaaatggttaccgtattgaaggttatttatgtaatgcgaacaatgcaaaagaat

SEQ ID NO: 316884 - DNA, 75 bp, synthetic construct
  source 1..75: mol_type = other DNA
cctttttcctcggtgtcagtgaactggccttaccgatggcgcaacaattacagaaaaaaatgtcttatgaagatg

SEQ ID NO: 316885 - DNA, 75 bp, synthetic construct
  source 1..75: mol_type = other DNA
gaatatgccactgtggatatgttgccggagctgcttgtttcgccgccctggatgaccaaagagaaaaagaaaaat

SEQ ID NO: 316886 - DNA, 75 bp, synthetic construct
  source 1..75: mol_type = other DNA
aatcttaagcaagctgtggctatgggaaggcaaagcagaaagctatggctgggggagtaattcaacacaggaagc

SEQ ID NO: 316887 - DNA, 75 bp, synthetic construct
  source 1..75: mol_type = other DNA
gacgcttggtaccgtcatgggacaggcggcccgcaaaaactccgcaaaattccagaaatcactgatcgccaaagc

SEQ ID NO: 316888 - DNA, 75 bp, synthetic construct
  source 1..75: mol_type = other DNA
atgacgaaaaataagtatgcaacggtcgattttgaccaggttaatgaaaaggggctgaaatcccttatcgcggcg

SEQ ID NO: 316889 - DNA, 75 bp, synthetic construct
  source 1..75: mol_type = other DNA
acagccatgacgggctgttcctcaacgcccagaagctgaacgataaagcgattttgctcagttctattaattcac

SEQ ID NO: 316890 - DNA, 75 bp, synthetic construct
  source 1..75: mol_type = other DNA
agaacgatgatggatcaatcgcggatggccttgaatgaagcgcatctggtacagacgaagctgattgaaggcgat

SEQ ID NO: 316891 - DNA, 75 bp, synthetic construct
  source 1..75: mol_type = other DNA
gcaatcaggttcgtgaggaaattgaatctctggtaacagaaaggaggcaggagggagaaactgaaaatgatgcca

SEQ ID NO: 316892 - DNA, 75 bp, synthetic construct
  source 1..75: mol_type = other DNA
atctctggtaacagaaaggaggcaagagggggtgacggaaaacgatgctacggtatcgtctgttacttcaatgct

SEQ ID NO: 316893 - DNA, 75 bp, synthetic construct
  source 1..75: mol_type = other DNA
tggctataatgtatttggttttatcatcgccgcttatgtttcatacaataccaacagatggttctatgaaaaaga

SEQ ID NO: 316894 - DNA, 75 bp, synthetic construct
  source 1..75: mol_type = other DNA
gctcattaactgaaaagtggaagtaccgcttttcgttttatgatgaacatggcttccctggattttggggtgcaa

SEQ ID NO: 316895 - DNA, 75 bp, synthetic construct
  source 1..75: mol_type = other DNA
gataatgaagtcatcaaaagatccatagcaaaatttgcagaagaccaggtaagtattttctttcctgaagaggaa

SEQ ID NO: 316896 - DNA, 75 bp, synthetic construct
  source 1..75: mol_type = other DNA
cggtatttaatacactgccgatgatgggtaaagccagcccggttagtctgggagtaccttctgaagcgaccgcaa

SEQ ID NO: 316897 - DNA, 75 bp, synthetic construct
  source 1..75: mol_type = other DNA
ccagaggctcagcctgcaccgcatcaatggcagaaaatgccattctggcagaaagtccgtccgtgggcggcacag

SEQ ID NO: 316898 - DNA, 75 bp, synthetic construct
  source 1..75: mol_type = other DNA
aaacaattgaagaaagatgttcgtgctatcgccagccagcaaattacccgtctggaacaggctatgtgccagcgc

SEQ ID NO: 316899 - DNA, 75 bp, synthetic construct
  source 1..75: mol_type = other DNA
tgccgaagtgttgcacttggtggatctgaccggggcaaaagatccggcaaaacgtcaaatcccgctgattaaaac

SEQ ID NO: 316900 - DNA, 75 bp, synthetic construct
  source 1..75: mol_type = other DNA
ctgtttcgcgcaaaccgcctccttatggaggcatataccgaaattctggaactggatgcgtgctttaaagattga

SEQ ID NO: 316901 - DNA, 75 bp, synthetic construct
  source 1..75: mol_type = other DNA
cccgaaacgccggtatttaatacactgccgatgatgggtaaagccagcccggtaagcctgggagtaccttctgaa

SEQ ID NO: 316902 - DNA, 75 bp, synthetic construct
  source 1..75: mol_type = other DNA
ctgcggatatgttgccggagctgtttgccgttccaccgtgggtaataaataagaaaaagaatgcaatccccgtat

SEQ ID NO: 316903 - DNA, 75 bp, synthetic construct
  source 1..75: mol_type = other DNA
cttatctgaatgtcgtccgcaacctgtgactaatgaatgtgaatatgccactgcggatatgttgccggagctgtt

SEQ ID NO: 316904 - DNA, 75 bp, synthetic construct
  source 1..75: mol_type = other DNA
cataaacgcgcggtttacgggctggatgtgttagccagtatcggcagtgatattgcgctgatgctgcttaatggc

SEQ ID NO: 316905 - DNA, 75 bp, synthetic construct
  source 1..75: mol_type = other DNA
gccgccctggatgactaaagagaaaaagaaaaattcgccggtgtttgatcttcctgtactgccagttccttctgt

SEQ ID NO: 316906 - DNA, 75 bp, synthetic construct
  source 1..75: mol_type = other DNA
tttagggcttgatagcagtggctcgctgacactggatttcggcccacgtcaatttaccgttggttttgacgaaac

SEQ ID NO: 316907 - DNA, 75 bp, synthetic construct
  source 1..75: mol_type = other DNA
attcgctgtggtctggaaagtgccgttgaaatcgccctttttgcccttcaactcaaatataaaccagtaaaaggc

SEQ ID NO: 316908 - DNA, 75 bp, synthetic construct
  source 1..75: mol_type = other DNA
tcgcggcgggtgctctggcactgggcatgagcgccgctcacgctgatgacaacaacacattgtacttctataact

SEQ ID NO: 316909 - DNA, 75 bp, synthetic construct
  source 1..75: mol_type = other DNA
tggtttcgcatggttagatacaggcacgcacgatagcctaattgaggcgggaagtttcgttgaaactgtacaaaa

SEQ ID NO: 316910 - DNA, 75 bp, synthetic construct
  source 1..75: mol_type = other DNA
gctctggcactagattgtatccaataactcgtggtgtatcaaaacaactattaccaatctatgataaaccaatga

SEQ ID NO: 316911 - DNA, 75 bp, synthetic construct
  source 1..75: mol_type = other DNA
tatgacaacgatgtaatagatattgctaaatatattgagccttcttcacgaggtgaacttgaaattactactgtg

SEQ ID NO: 316912 - DNA, 75 bp, synthetic construct
  source 1..75: mol_type = other DNA
tggtgttgtgcttgaaagaacggtacgggagctacgcggcgaggcttgcttcagcctggaagaaaaccctccggc

SEQ ID NO: 316913 - DNA, 75 bp, synthetic construct
  source 1..75: mol_type = other DNA
attctccgccagatttgcaaccgtggtggagagtctggcgccgcggacatttgtttactcaattgatgagctctt

SEQ ID NO: 316914 - DNA, 75 bp, synthetic construct
  source 1..75: mol_type = other DNA
ttttatactagcgaagtagtagaatacgctaagcttgtgaagccttcttctcggggggagctcgaaataacatcg

SEQ ID NO: 316915 - DNA, 75 bp, synthetic construct
  source 1..75: mol_type = other DNA
ctttcctgtagataagcccaccagcaattacatcggcgcaggacgtcgttttcttatatccccattgccgcgtga

SEQ ID NO: 316916 - DNA, 75 bp, synthetic construct
  source 1..75: mol_type = other DNA
gaaggtgaagtctttgccagcaacgtcttttccgaggtgaaaggtcgttttgatatgatcatctccaacccgccg

SEQ ID NO: 316917 - DNA, 75 bp, synthetic construct
  source 1..75: mol_type = other DNA
gattgcgatactttgatttactactggccgaagaacaaaccggaagcccagttccagttgatgaatttactttct

SEQ ID NO: 316918 - DNA, 75 bp, synthetic construct
  source 1..75: mol_type = other DNA
gatataaagtacgagacccagaaagatttggtgtggttgaatttgataatgataataaagctgtatcaatagaag

SEQ ID NO: 316919 - DNA, 75 bp, synthetic construct
  source 1..75: mol_type = other DNA
atttctataacggttctgccgttcgcctgtgctggaagcatgatgcggaatacatgatgaagggatacggcaagc

SEQ ID NO: 316920 - DNA, 75 bp, synthetic construct
  source 1..75: mol_type = other DNA
gcgttaggtggtgaggattctctcgttcactgggttagcaccaacattcacgattgccaggcgcatgataagcgc

SEQ ID NO: 316921 - DNA, 75 bp, synthetic construct
  source 1..75: mol_type = other DNA
caacgagatcatcaacgcctgtggatattcaccctttttattagagccagtgaactagccttaccaatggcgcag

SEQ ID NO: 316922 - DNA, 75 bp, synthetic construct
  source 1..75: mol_type = other DNA
gcactggcgtgcgcagttaccacgcgctgtgacggttgtattgccttccacgctgacgctgccgttaaagccggc

SEQ ID NO: 316923 - DNA, 75 bp, synthetic construct
  source 1..75: mol_type = other DNA
ctatattgctaatattttttcttcccttacttgttttatatcaaccttacgtcagcgcatttcctccttcaccgc

SEQ ID NO: 316924 - DNA, 75 bp, synthetic construct
  source 1..75: mol_type = other DNA
cattgtttattgatttaggcgcgcagaaacgtcctaccgtcatttctgttgttggcgctggagggaaaaccagtc

SEQ ID NO: 316925 - DNA, 75 bp, synthetic construct
  source 1..75: mol_type = other DNA
aatacttaagcaaagcctgtcaaaaacatcccgctgcggctattgccgcttatgcaactttgctggcaatacatg

SEQ ID NO: 316926 - DNA, 75 bp, synthetic construct
  source 1..75: mol_type = other DNA
cgtcgggttactgcattaatcagcacgccgcgcagcgcggtattcaacgcctgacggatgcaggtcatcaggtca

SEQ ID NO: 316927 - DNA, 75 bp, synthetic construct
  source 1..75: mol_type = other DNA
accctcccgttgggcgcacatgctatcctcaaaaacgccaaaaacggtacacaattgacgattagcggtcatcct

SEQ ID NO: 316928 - DNA, 75 bp, synthetic construct
  source 1..75: mol_type = other DNA
tccgcgcagaagtggcggaagtcgccaacagcatgtgtgacctgcgtgcggcgctgaatggtatggagcaccgct

SEQ ID NO: 316929 - DNA, 75 bp, synthetic construct
  source 1..75: mol_type = other DNA
tgaacgtctgacgcggcagacactctttcgtattaactcgttgtttatggcggcgtacaacgaaattcttgagct

SEQ ID NO: 316930 - DNA, 75 bp, synthetic construct
  source 1..75: mol_type = other DNA
acccaaactcacgctgcgtcgcattggtgcggggatcctcgatgcgctgatcggcaccatgtcaccgctgatccc

SEQ ID NO: 316931 - DNA, 75 bp, synthetic construct
  source 1..75: mol_type = other DNA
aagttggcgccgaaaatatccatcgttggtcgcagtttgctgatattactgggttaacaccagatgcaaccttgc

SEQ ID NO: 316932 - DNA, 75 bp, synthetic construct
  source 1..75: mol_type = other DNA
aacgtaccgcaaggttgtcggcgagtctggttcattaaccgtttttctcaatgtgagaatgcgattgcgcaaagc

SEQ ID NO: 316933 - DNA, 75 bp, synthetic construct
  source 1..75: mol_type = other DNA
ttaaccggcgcgaaagacccggcgctgcgccagatccctttgctgaaacagctggttgcgggcgtgaacgtaccg

SEQ ID NO: 316934 - DNA, 75 bp, synthetic construct
  source 1..75: mol_type = other DNA
acctgatgttttagctgcgctggcaacattatttgatagcgagccgctggaagaatatcccgctaaaatcgcccc

SEQ ID NO: 316935 - DNA, 75 bp, synthetic construct
  source 1..75: mol_type = other DNA
gcggagaaaaaatatacgaaaaaattccggcgccacaaagcgccgttgatgccctgctacgcttcgattttccag

SEQ ID NO: 316936 - DNA, 75 bp, synthetic construct
  source 1..75: mol_type = other DNA
cttttcttaaccagatagtcaaagaagataactactctggtgagggaaatattctggcaatttttggtagcgccg

SEQ ID NO: 316937 - DNA, 75 bp, synthetic construct
  source 1..75: mol_type = other DNA
cgaattagcattaccgatggcgcagcgattacagaaaaaaatgtctgctgaagatgcccgaaaatggctggctaa

SEQ ID NO: 316938 - DNA, 75 bp, synthetic construct
  source 1..75: mol_type = other DNA
gcggaactaaagcttatcgcagagaaaacgaaaaaaggctatgtggaaaatgcttcagcaaacgtgcatatcccc

SEQ ID NO: 316939 - DNA, 75 bp, synthetic construct
  source 1..75: mol_type = other DNA
caggaaacatcggtattccgcatgtgctggaaatatctcctgaatccgccgctgcatttgggcaaatttatgctg

SEQ ID NO: 316940 - DNA, 75 bp, synthetic construct
  source 1..75: mol_type = other DNA
ccataacaaaggaagcagacactggcagttgtacgcactctgcttcctacccactcagcatgctatttcttttct

SEQ ID NO: 316941 - DNA, 75 bp, synthetic construct
  source 1..75: mol_type = other DNA
aactgacgccgttaacctcttcaaacaattgaagaaagatgtgcgcgccattgccagccagcagattgatcgtct

SEQ ID NO: 316942 - DNA, 75 bp, synthetic construct
  source 1..75: mol_type = other DNA
ctgcggatatgttgccagagctgtttacttcgccaccgtgggtaataaataagaaaaagaatgcagtacccgtat

SEQ ID NO: 316943 - DNA, 75 bp, synthetic construct
  source 1..75: mol_type = other DNA
gaaagcgtaaaaatcacctcgccagatgatcgctacggtaaacaacctttacttactttttccatgctcgacgac

SEQ ID NO: 316944 - DNA, 75 bp, synthetic construct
  source 1..75: mol_type = other DNA
cgatcaaaaaagcaagctgggagaaacacttaataccgcttacaccggagcaacaaatactgtggcatcttggtt

SEQ ID NO: 316945 - DNA, 75 bp, synthetic construct
  source 1..75: mol_type = other DNA
atgtgttagccagtatcggtagcgacattgcgcttatgttgcttaatggcattgcgcaaaagattaaattcgttg

SEQ ID NO: 316946 - DNA, 75 bp, synthetic construct
  source 1..75: mol_type = other DNA
acgtggtagttaccaccttgctgataacgaacgtaatgtccatgaattgtcacgctgggacggacgtctctgcca

SEQ ID NO: 316947 - DNA, 75 bp, synthetic construct
  source 1..75: mol_type = other DNA
ctactttggtaagttttggaagattgaaaggttttcaggtcatagcaatgtctggttaaagatcagcccaggaac

SEQ ID NO: 316948 - DNA, 75 bp, synthetic construct
  source 1..75: mol_type = other DNA
caggatctttatggttgtagagtaaacggaaaaatcaaagaaaatatagataaaaactcagaatcatttataaca

SEQ ID NO: 316949 - DNA, 75 bp, synthetic construct
  source 1..75: mol_type = other DNA
cagaccgcttcgggcagttcattacctgttgctggagccggaggccgggaaagaattcagacgaggagacaaagt

SEQ ID NO: 316950 - DNA, 75 bp, synthetic construct
  source 1..75: mol_type = other DNA
tcgcccagctaatgggcagcggcgtcggggaaattaccgctgtggtagtgcgctactacggcggcatattgcttg

SEQ ID NO: 316951 - DNA, 75 bp, synthetic construct
  source 1..75: mol_type = other DNA
gtgcgccggatgattctcaacagctgggtttctctgacgacggggagccggcgggaacggcaggtaaaccgatgc

SEQ ID NO: 316952 - DNA, 75 bp, synthetic construct
  source 1..75: mol_type = other DNA
agctggcacggattgcgctggcatcactggcagcagagccggtggcaaagattatagctcattacccattaggag

SEQ ID NO: 316953 - DNA, 75 bp, synthetic construct
  source 1..75: mol_type = other DNA
attgaccaggctggatccctgcgtggtctgtcgctgtctgatgtgctgaatctgaaagcggataccatgttaaag

SEQ ID NO: 316954 - DNA, 75 bp, synthetic construct
  source 1..75: mol_type = other DNA
attgaacaggctggatccctgcgtggtctgtcgctgtctgatgtgctgaatctgaaagcggataccatgttaacg

SEQ ID NO: 316955 - DNA, 75 bp, synthetic construct
  source 1..75: mol_type = other DNA
ggaataacaccatggcggatgatgtgacggcatgtgaggatatggctgccgaacgtggcgtaaaactgacccgac

SEQ ID NO: 316956 - DNA, 75 bp, synthetic construct
  source 1..75: mol_type = other DNA
attgagcaggctggatccctgcgtggtctgtcgctgtctgatgtgctgaatctgaaagcggataccatgttgacg

SEQ ID NO: 316957 - DNA, 75 bp, synthetic construct
  source 1..75: mol_type = other DNA
attgaccaggctggatccctgcgtggtctgtcgctgtctgatgtgctgaatctgaaagcggataccatgttgagg

SEQ ID NO: 316958 - DNA, 75 bp, synthetic construct
  source 1..75: mol_type = other DNA
attgaccaggctggatccctgcgtggtctgtcgctgtctgatgtgctgaatctgaaagcggataccatgttcacg

SEQ ID NO: 316959 - DNA, 75 bp, synthetic construct
  source 1..75: mol_type = other DNA
cgctactacggcggcatattgctgggcaccggtgggttagtgaaagcgtatggcggcggcgtgaatcaggcgctg

SEQ ID NO: 316960 - DNA, 75 bp, synthetic construct
  source 1..75: mol_type = other DNA
gcgtaagctggcagatgatatcaacgttctctataccgccattaagctgtatctggcgcggatgccaaaagagga

SEQ ID NO: 316961 - DNA, 75 bp, synthetic construct
  source 1..75: mol_type = other DNA
taaacatctggatgtcagcgcgctggatacgcccacgcttgctctggcgaacgccgcgcgcgaaaccctgcgcat

SEQ ID NO: 316962 - DNA, 75 bp, synthetic construct
  source 1..75: mol_type = other DNA
tgggcggagattatcgaaatgtcgctcaaccttgaacaggcctccgatatcgtcgagcgcatggggagtgaaatt

SEQ ID NO: 316963 - DNA, 75 bp, synthetic construct
  source 1..75: mol_type = other DNA
ctgattggcgcgatgttcgccattatcagctactccagccttgccgcggtactgctgactgcgactctgactgct

SEQ ID NO: 316964 - DNA, 75 bp, synthetic construct
  source 1..75: mol_type = other DNA
atctggcgcggatgccaaaagaggaactggcagaagaagagtcgcgccgctgggcggagatcattgaaatgtcgc

SEQ ID NO: 316965 - DNA, 75 bp, synthetic construct
  source 1..75: mol_type = other DNA
atcgccgctattcccacgctcacgtcgatcgcctgcatcagcaaaacgtgcagagcattgaaaccagttcgctac

SEQ ID NO: 316966 - DNA, 75 bp, synthetic construct
  source 1..75: mol_type = other DNA
ggtcggttttagtgatttgatggcgaacttcgcccgtaatcaacaagccacggtactgattcgtggcctgcgtgc

SEQ ID NO: 316967 - DNA, 75 bp, synthetic construct
  source 1..75: mol_type = other DNA
actccagattgtgtgttaatgattttggcgagtaatgaatatgatgagtctgattatattcgtgactatgaagaa

SEQ ID NO: 316968 - DNA, 75 bp, synthetic construct
  source 1..75: mol_type = other DNA
gagagagatgcataatttctctgaagactgtgtcctgatggtattggctagtgattattatgatcctgatgatta

SEQ ID NO: 316969 - DNA, 75 bp, synthetic construct
  source 1..75: mol_type = other DNA
tgccacaccccgatttgcagccgccaggctgccgtggttcaggtaaacgcctgttcgataaagcattacccaacg

SEQ ID NO: 316970 - DNA, 75 bp, synthetic construct
  source 1..75: mol_type = other DNA
gaatgctggcagcgctcaggatcacgccagcgatagtgaaactggcgagacggcagatcccttaattacggtgaa

SEQ ID NO: 316971 - DNA, 75 bp, synthetic construct
  source 1..75: mol_type = other DNA
acgcagatgttcgatcacgttattctggcgattgccgccagccccagtaaaaaaccgatgtttaccctggaagag

SEQ ID NO: 316972 - DNA, 75 bp, synthetic construct
  source 1..75: mol_type = other DNA
taaaacttacccaaccaattgagcgaagcggcgaaaaaatcacgtatgtggagatcaccggagctattgagcagg

SEQ ID NO: 316973 - DNA, 75 bp, synthetic construct
  source 1..75: mol_type = other DNA
gatttcgacccatctgttaggttctaacgcctcaagcgttatccgccacgccaatctgccggtgctggtcgttcg

SEQ ID NO: 316974 - DNA, 75 bp, synthetic construct
  source 1..75: mol_type = other DNA
gatttcgacccatctgttaggttctaacgcctcaagcgttatccgccacgctaatctgcctgtactggtcgttcg

SEQ ID NO: 316975 - DNA, 75 bp, synthetic construct
  source 1..75: mol_type = other DNA
agaaacggaacagaacgaccaaaaagcggaacaaaacagcccaaatgcgttacaagacgagccagaaacgaaaca

SEQ ID NO: 316976 - DNA, 75 bp, synthetic construct
  source 1..75: mol_type = other DNA
ctctgcgagatttgtcgctgtctgatgtgctgaatctgaaagcggaatccatgtttacgctgctgtcacgcgtga

SEQ ID NO: 316977 - DNA, 75 bp, synthetic construct
  source 1..75: mol_type = other DNA
aaagagaccagttttcataataaaaaaacatgtacaaggaataatcctcttcgtttcatctatgttggaaggatt

SEQ ID NO: 316978 - DNA, 75 bp, synthetic construct
  source 1..75: mol_type = other DNA
aatgtcgtcacgcgattttattcagttgtgcgctgtagctgtaaattttatgagcgagccagactctggcgcgaa

SEQ ID NO: 316979 - DNA, 75 bp, synthetic construct
  source 1..75: mol_type = other DNA
gtggcggttcgcactccggcaacgtggcggccagtgaactggcacagcttggcctgctggatatcctctcttccg

SEQ ID NO: 316980 - DNA, 75 bp, synthetic construct
  source 1..75: mol_type = other DNA
accagcggaaatcaccgcgtatcgatgggcgtcagattaatgtttacgtcattcagtaccagcaggagggaaccg

SEQ ID NO: 316981 - DNA, 75 bp, synthetic construct
  source 1..75: mol_type = other DNA
ggacatcgaccggaagaattagtgatagacagacatgttattgctgtagccagtgatgtgccgcttaatcttgat

SEQ ID NO: 316982 - DNA, 75 bp, synthetic construct
  source 1..75: mol_type = other DNA
aatcagagcgcaactgatactctctcgtcgccagtaccagaaactgatgcagtggaaacggcaattccggacaac

SEQ ID NO: 316983 - DNA, 75 bp, synthetic construct
  source 1..75: mol_type = other DNA
gtaagcgcctgcaagtcgccgccacctgtgcaaagtcaacgaccggagccagcggcatgggcgatggagaaagct

SEQ ID NO: 316984 - DNA, 75 bp, synthetic construct
  source 1..75: mol_type = other DNA
ctggctgatattggtgaacgtgaaggatggcgcacacttaaagctggtggggtaaatgtcacgaccaaaagcagc

SEQ ID NO: 316985 - DNA, 75 bp, synthetic construct
  source 1..75: mol_type = other DNA
aatttcaacccatctgttaggttctaacgcttccagcgtgatccgccacgcccatctgcctgtattagtcgttcg

SEQ ID NO: 316986 - DNA, 75 bp, synthetic construct
  source 1..75: mol_type = other DNA
caccgagttgcaccgctacctgctggcaatccagaacgcgcctgtaccagggaaatcggcgctgaaagccgtgca

SEQ ID NO: 316987 - DNA, 75 bp, synthetic construct
  source 1..75: mol_type = other DNA
aaaactctctgccaaagaacgggaggaagccctggcagagccggattaccagttactcacccgcctcgggcatga

SEQ ID NO: 316988 - DNA, 75 bp, synthetic construct
  source 1..75: mol_type = other DNA
cagtggcgcaatgacctaccgcgtgcataccgatacggaagataacccgttcagtggtgggttgttcagccagtt

SEQ ID NO: 316989 - DNA, 75 bp, synthetic construct
  source 1..75: mol_type = other DNA
ccgcaggcattactggcagagcctaacctggcaacggagagccggacctggctgaccagcagtcgccgccgcctg

SEQ ID NO: 316990 - DNA, 75 bp, synthetic construct
  source 1..75: mol_type = other DNA
agcgccagttgaccgagcagtatatcagcgactacaccgccacctggcgggctgggatggacaatctgaatatcc

SEQ ID NO: 316991 - DNA, 75 bp, synthetic construct
  source 1..75: mol_type = other DNA
ctcgggcatgaattcgccccggaaaacagtaccctggcagtacagaaagacaaagaaagcacgatgcaggccgtg

SEQ ID NO: 316992 - DNA, 75 bp, synthetic construct
  source 1..75: mol_type = other DNA
ctgtgggaacatgccctcggctggctgaaagaaaagcgcgcgcgccagccgctgaacgggattattctgacactc

SEQ ID NO: 316993 - DNA, 75 bp, synthetic construct
  source 1..75: mol_type = other DNA
gaaggcgtgttaagccgctggctgctgctgaagaataacgtcatgccagaggcggcaaccggtaccacggccgaa

SEQ ID NO: 316994 - DNA, 75 bp, synthetic construct
  source 1..75: mol_type = other DNA
tggtcacccagactcacacccgcgcgtctttattcagtttttcccgccagatgcagggaagccgtgaaccgctgg

SEQ ID NO: 316995 - DNA, 75 bp, synthetic construct
  source 1..75: mol_type = other DNA
cacctttgtgctggccgtggcggcaaacgtgccggtcgatcagatccagcgtcagtttatccagcagtcgaaaat

SEQ ID NO: 316996 - DNA, 75 bp, synthetic construct
  source 1..75: mol_type = other DNA
tccagaacgcgccagtgccagggaaatcggcgctgaaagccgtccagctacgtcttgaccagaacagcagcgacc

SEQ ID NO: 316997 - DNA, 75 bp, synthetic construct
  source 1..75: mol_type = other DNA
agcgacgctgaccgggcagagattcagcgtcagctgactgaacagtatctcagtgactacaccgctacctggcgg

SEQ ID NO: 316998 - DNA, 75 bp, synthetic construct
  source 1..75: mol_type = other DNA
aattgggatcgaggttatccctgcgcatgtcactgaatatctgaacaaggtgctgattgaaaccgatcatgccaa

SEQ ID NO: 316999 - DNA, 75 bp, synthetic construct
  source 1..75: mol_type = other DNA
actgcggtcgccattcctattggtatcctcatcgcgttgggattcaacccactgaaagccgcaattgcttcactg

SEQ ID NO: 317000 - DNA, 75 bp, synthetic construct
  source 1..75: mol_type = other DNA
atcgatctggaaactgctggcggagtcattgatcgggacaccattaaatggtggtttaagcaatcacgcgaagcg

SEQ ID NO: 317001 - DNA, 75 bp, synthetic construct
  source 1..75: mol_type = other DNA
attcaaaaccgcttattacgactaccgctatcacgttcaggatgcattctacagtgacggttatgaagcacagtt

SEQ ID NO: 317002 - DNA, 75 bp, synthetic construct
  source 1..75: mol_type = other DNA
gattttcatgatgggcgaagaagcaaaactggcaggccagcaggaatatcaccgcaatctgaggaccctggctga

SEQ ID NO: 317003 - DNA, 75 bp, synthetic construct
  source 1..75: mol_type = other DNA
ggcggcggcaactgtcctgactgcggcgcggtgatgggcgacgcaacgtatcagaaaacctttaatgaagaaaat

SEQ ID NO: 317004 - DNA, 75 bp, synthetic construct
  source 1..75: mol_type = other DNA
aatctgaaccagtagcgcaacaggaaccggaaaaagtctgtgccgcctgcggtcagagcggcggcggcaactgcc

SEQ ID NO: 317005 - DNA, 75 bp, synthetic construct
  source 1..75: mol_type = other DNA
atcactaagaaaagaaccctagtcagttttggtagttatcccgcagtaagcctcgcagatgcccgacaaaaaaga

SEQ ID NO: 317006 - DNA, 75 bp, synthetic construct
  source 1..75: mol_type = other DNA
atgtatgaacaggcaaaaaatattcacgcggcactgcaaaacaataccgatgcagcaaggctactcaaccacccg

SEQ ID NO: 317007 - DNA, 75 bp, synthetic construct
  source 1..75: mol_type = other DNA
cgatctccacaaactggtgcgtgatactgacagcgttttccctaatccaggcaattcaagcttggggctgatgac

SEQ ID NO: 317008 - DNA, 75 bp, synthetic construct
  source 1..75: mol_type = other DNA
ggaacttggtcgacaggagtatcgccggacgctacgccagataaacgaagccctagagacaaacaactggccagc

SEQ ID NO: 317009 - DNA, 75 bp, synthetic construct
  source 1..75: mol_type = other DNA
aaatgcgcgacaaaatgaaccagaagcgcaacaggaaccggaaaaagtctgcgccgcctgcggtcagactgacgg

SEQ ID NO: 317010 - DNA, 75 bp, synthetic construct
  source 1..75: mol_type = other DNA
ccggtgacgcacgtttcacgcgacgaactccaggcattacacattgcacgagctgaagaactaccagctgttact

SEQ ID NO: 317011 - DNA, 75 bp, synthetic construct
  source 1..75: mol_type = other DNA
ctgtgctaatgatgttttcaaccaatccatttatgctttcattcccaggggtaacaattactttgtttattttat

SEQ ID NO: 317012 - DNA, 75 bp, synthetic construct
  source 1..75: mol_type = other DNA
ccagagctgtgctcgactatacaggggcggatgccctgatgataggccgcgcagctcagggaagaccctggatct

SEQ ID NO: 317013 - DNA, 75 bp, synthetic construct
  source 1..75: mol_type = other DNA
ataagttggaaaagaaatatggatttgatgacattcaaatccaaaacgtattagataaaatatatggtaagctaa

SEQ ID NO: 317014 - DNA, 75 bp, synthetic construct
  source 1..75: mol_type = other DNA
tgaacgttttccctccagcatcagatctatagttcttgacggcgtcgttgatattgatgatttaaatgataattt

SEQ ID NO: 317015 - DNA, 75 bp, synthetic construct
  source 1..75: mol_type = other DNA
cctgagttgttatgcggatatctatctgtaccgttaaaatataccgacacaggtggggatatttcagatgaaaat

SEQ ID NO: 317016 - DNA, 75 bp, synthetic construct
  source 1..75: mol_type = other DNA
agtatatcttcagatgatctcatatcattaacgacagagcttctgttatggcgctcatcatggccaacacttgca

SEQ ID NO: 317017 - DNA, 75 bp, synthetic construct
  source 1..75: mol_type = other DNA
tgatgggcgacgcaacatatcaggaaacattcgatgacgagaatcaggttgaagttcgggaaaatgagccggaga

SEQ ID NO: 317018 - DNA, 75 bp, synthetic construct
  source 1..75: mol_type = other DNA
ccgcaaccatcttgcgcaatggcagatgaacaggcaacggctgaaacagtggaaccggatgcaactgaacatcat

SEQ ID NO: 317019 - DNA, 75 bp, synthetic construct
  source 1..75: mol_type = other DNA
gcatgtttcacgcgacggactccaggcattacacattgctcgggctgaagaactaccggctgttactgccctggc

SEQ ID NO: 317020 - DNA, 75 bp, synthetic construct
  source 1..75: mol_type = other DNA
ctgcgtgggcggatcattcacagctatgttctggaaacggataagttcgctgatgaatatgctattccggtaccg

SEQ ID NO: 317021 - DNA, 75 bp, synthetic construct
  source 1..75: mol_type = other DNA
aatcctgtcgatgccgataaattgcttgctgcatcacgtggtgaatttgttgacggaattagcgacccgaacgat

SEQ ID NO: 317022 - DNA, 75 bp, synthetic construct
  source 1..75: mol_type = other DNA
ggcaaaaaatattcacgcggcactgcaaaacaatactgacgcggcaagactactcaaccacccggaacgcaaatc

SEQ ID NO: 317023 - DNA, 75 bp, synthetic construct
  source 1..75: mol_type = other DNA
ggagacaaacaactggccagcaccgattaccgaaagttataccgacgaattaaacgactttgatcttcgtcgtct

SEQ ID NO: 317024 - DNA, 75 bp, synthetic construct
  source 1..75: mol_type = other DNA
tcgtggttgcgtccgtgaaagaagcaccaattggtatagaggctactccccaccgtgtcaccgaatacctgaata

SEQ ID NO: 317025 - DNA, 75 bp, synthetic construct
  source 1..75: mol_type = other DNA
agcagcacgatgctgaaggatgcccgtatcagcctgatgtattaccacgggcggcacattgccggaactattccg

SEQ ID NO: 317026 - DNA, 75 bp, synthetic construct
  source 1..75: mol_type = other DNA
gaaacgaaacagcctgaaccagtggcgcaacaggaagtggaaaaagtttgcaatgcctgcggtcagtctggcggg

SEQ ID NO: 317027 - DNA, 75 bp, synthetic construct
  source 1..75: mol_type = other DNA
aaaagcacagtccatcgtttattgcagggattacaatcctgcggctatgtgacgaccgcgcctgcagcaggtagt

SEQ ID NO: 317028 - DNA, 75 bp, synthetic construct
  source 1..75: mol_type = other DNA
tgttgctgcaccagtatttgatattcacggacgggtgccgtatgccgtatctatctctctttctacgtcgcgtct

SEQ ID NO: 317029 - DNA, 75 bp, synthetic construct
  source 1..75: mol_type = other DNA
aacttggtcgacaggaatatcgccggacgctacgccagataaacgaagccctggagacaaacaactggccagcac

SEQ ID NO: 317030 - DNA, 75 bp, synthetic construct
  source 1..75: mol_type = other DNA
ggcgcagcaggactggcaaaccttcggcgtggacgccccggtaatcacaggcttcctgagtcactgaagctacgt

SEQ ID NO: 317031 - DNA, 75 bp, synthetic construct
  source 1..75: mol_type = other DNA
accttgcgcggatgccaaaagaggagctggcagaagaagagtctcgacgctgggcggaaatcattgaaatggcgc

SEQ ID NO: 317032 - DNA, 75 bp, synthetic construct
  source 1..75: mol_type = other DNA
gtgttaacgctgcttcacctgctttctgccgtcgccctgctggtctgggggactcatattgttcgaacaggcgta

SEQ ID NO: 317033 - DNA, 75 bp, synthetic construct
  source 1..75: mol_type = other DNA
acagctatgttctggaaacggataaattcgctgatgaatatgccattccggtaccggttcctgaatatgtggtta

SEQ ID NO: 317034 - DNA, 75 bp, synthetic construct
  source 1..75: mol_type = other DNA
tgcaacaacaggaagcggagaaagtttgcaccgcctgcggtcagactggcggcggctactgccctgattgtggcg

SEQ ID NO: 317035 - DNA, 75 bp, synthetic construct
  source 1..75: mol_type = other DNA
acccgaagtgggtgaaggggatccagactcgcgacactgaggaccagaatcaatccaaagtggaacaaaatgagc

SEQ ID NO: 317036 - DNA, 75 bp, synthetic construct
  source 1..75: mol_type = other DNA
ccgcgacaaattcatcgccatgcctggcgggatggattattcccgcgccatcgtggttgcttccgtaaaagaagc

SEQ ID NO: 317037 - DNA, 75 bp, synthetic construct
  source 1..75: mol_type = other DNA
gaacgccataacgccctgcacgatgcgcgttaccaggcaaaatacgtttcagccatctggcaaaaactgatcccg

SEQ ID NO: 317038 - DNA, 75 bp, synthetic construct
  source 1..75: mol_type = other DNA
tcgatgcagacaaattgctggctgcctctcgtggggagttcgttgaaggcatcagcgacccaaccgacccgaaat

SEQ ID NO: 317039 - DNA, 75 bp, synthetic construct
  source 1..75: mol_type = other DNA
caggaactgcgggcagaactccatgaagcccggaaaaacattccatcaaaaaatcctgtcgatgccgataagttg

SEQ ID NO: 317040 - DNA, 75 bp, synthetic construct
  source 1..75: mol_type = other DNA
gctggctacgatgaagatgacttcaaaaaacctgttcgcgtcaatttgcccattgttgatgacctcccgccagaa

SEQ ID NO: 317041 - DNA, 75 bp, synthetic construct
  source 1..75: mol_type = other DNA
gaggagaatatgctactcccgatttctggccaggagctgcccattcgttggcttgcgcaacacggcagcgaaaaa

SEQ ID NO: 317042 - DNA, 75 bp, synthetic construct
  source 1..75: mol_type = other DNA
gcgaggcggcagatcccttaattgcggtgaacggtcatcacaaaagcacatccaccagcagagtgtggattcacc

SEQ ID NO: 317043 - DNA, 75 bp, synthetic construct
  source 1..75: mol_type = other DNA
caggatgatgaagaaaaaccgcaaccatctggaacaacggcagatgaacaggcaacggctgaaacaatggaaccg

SEQ ID NO: 317044 - DNA, 75 bp, synthetic construct
  source 1..75: mol_type = other DNA
ggcaggagatcccctgcccgtggcgttacaccaatgatcgtgatgtaagaacgattgttgccctggggctggtga

SEQ ID NO: 317045 - DNA, 75 bp, synthetic construct
  source 1..75: mol_type = other DNA
gggtactgactgaaacagaccacgctacccccgacccgatgattgtggccattgcctgcggtcgctcctctgccc

SEQ ID NO: 317046 - DNA, 75 bp, synthetic construct
  source 1..75: mol_type = other DNA
gaaccggatacaactgaacataatcaggacacgcagtcgatggatgctcagccacagataaattctgttgatgcg

SEQ ID NO: 317047 - DNA, 75 bp, synthetic construct
  source 1..75: mol_type = other DNA
atttgagggtgaacgccataatgccctgcacgatgcgcgttaccaggcaaaatacgtttcagctatctggcaaaa

SEQ ID NO: 317048 - DNA, 75 bp, synthetic construct
  source 1..75: mol_type = other DNA
ttgaggttaaaaaacaatgagcacaaaaccactcttcctgttacggaaagcgaaaaatcatccggtgaacctgac

SEQ ID NO: 317049 - DNA, 75 bp, synthetic construct
  source 1..75: mol_type = other DNA
gcgacgcaggcgcaaaaactggggctgcgggcagaatatggtatcgattaccagctattgcaggcggcgaaacaa

SEQ ID NO: 317050 - DNA, 75 bp, synthetic construct
  source 1..75: mol_type = other DNA
tcattacacctggcctgctatcgatatctctcttcccggcaatcgccattttcatctgattggcagtattcatat

SEQ ID NO: 317051 - DNA, 75 bp, synthetic construct
  source 1..75: mol_type = other DNA
gcgacgcaggcacaaaaactggggctgcgggcagaatatggtatcgattaccagctattgcaggcggcgaagcaa

SEQ ID NO: 317052 - DNA, 75 bp, synthetic construct
  source 1..75: mol_type = other DNA
cgctgaaaggtccttccattatgcctggtgggcagaaagaagcctatgaactggttgcgccgatcctgactaaaa

SEQ ID NO: 317053 - DNA, 75 bp, synthetic construct
  source 1..75: mol_type = other DNA
cagtactgcctgcaaacctgatccaggcgcagcgtgactatttcggtgcgcatacctataagcgcattgataaag

SEQ ID NO: 317054 - DNA, 75 bp, synthetic construct
  source 1..75: mol_type = other DNA
ccggggcgctatgtggtcgcggtcggtgcgttacatctgtatggagaagggaatttgccacaaatgttgcgctaa

SEQ ID NO: 317055 - DNA, 75 bp, synthetic construct
  source 1..75: mol_type = other DNA
cgcaaaaagaaacggcggctattttcgatctttactcacacttgctttccgatacgcgtctgcgtcgcgaactgt

SEQ ID NO: 317056 - DNA, 75 bp, synthetic construct
  source 1..75: mol_type = other DNA
cgggcgatctgtcgcacgcgtgaaatacttgttgcgacgcattgattttactgaggcggaaaatcttgcccagcg

SEQ ID NO: 317057 - DNA, 75 bp, synthetic construct
  source 1..75: mol_type = other DNA
agtatcaggggatgctgcaaatgttcaatgataaacccgtcaccttgcgtacgctggatgtcggagcagataagc

SEQ ID NO: 317058 - DNA, 75 bp, synthetic construct
  source 1..75: mol_type = other DNA
caacataaacccgtgattgaactggaaggggcagaaaaccagattgccatgttgctccagctccctgacaaagga

SEQ ID NO: 317059 - DNA, 75 bp, synthetic construct
  source 1..75: mol_type = other DNA
tccatgtcttggttggcgtgggatccgcattacgctcgatcagccggagatctttttgattcaggtacgggcgat

SEQ ID NO: 317060 - DNA, 75 bp, synthetic construct
  source 1..75: mol_type = other DNA
cgcagagtgggcggtgaaaacggtcattgaaaaatttgccgaacagttcgccacactaagcgatagctatctcaa

SEQ ID NO: 317061 - DNA, 75 bp, synthetic construct
  source 1..75: mol_type = other DNA
aacaagacagctacagcctttgaccgtctgacagatggactatcgaatcaggctattttgggcttctttgatggc

SEQ ID NO: 317062 - DNA, 75 bp, synthetic construct
  source 1..75: mol_type = other DNA
acacgctgttaaatcgtgcaagattatttggcggtcagcatttggttattgctcagcagtcactggatagattat

SEQ ID NO: 317063 - DNA, 75 bp, synthetic construct
  source 1..75: mol_type = other DNA
tctcccacctcgcccgctggatgcgcatagcgcatttattcttggtcagcaaattgcgcgtttacatcaatggag

SEQ ID NO: 317064 - DNA, 75 bp, synthetic construct
  source 1..75: mol_type = other DNA
atgaaatgttacttattaaaagaaaactactgtctattgatgctattactattttctttattaacatattcaacg

SEQ ID NO: 317065 - DNA, 75 bp, synthetic construct
  source 1..75: mol_type = other DNA
ggtaataccttcttccaggacactatccgtcgtaaccgcgagctttctgcagaaggttttaacttcattggtacc

SEQ ID NO: 317066 - DNA, 75 bp, synthetic construct
  source 1..75: mol_type = other DNA
tggtgggcagaaagaagcctatgaactggttgcaccgatcctgaccaaaatcgccgcagtggctgaagacggtga

SEQ ID NO: 317067 - DNA, 75 bp, synthetic construct
  source 1..75: mol_type = other DNA
cgctgaaagggccttccatcatgcctggtgggcagaaagaagcctatgaactggttgctccgatcctgaccaaaa

SEQ ID NO: 317068 - DNA, 75 bp, synthetic construct
  source 1..75: mol_type = other DNA
gcaggctttatcgcaaaaatgtcgtctgcattagataagaactatcagagaattaatgccatacttaccgcactt

SEQ ID NO: 317069 - DNA, 75 bp, synthetic construct
  source 1..75: mol_type = other DNA
cggtacagtttattcactctatacgccatcagagcagttttatccgcctggcgcaccaatcccgtggccatcgga

SEQ ID NO: 317070 - DNA, 75 bp, synthetic construct
  source 1..75: mol_type = other DNA
aaacctgtggtacggggatttattgccgggcggaatgtacaaagtctgtatacaggtaccagccagatttgctcc

SEQ ID NO: 317071 - DNA, 75 bp, synthetic construct
  source 1..75: mol_type = other DNA
cctggacaacaagcaacatacatatttagaggtaaaaacaacccacaaaatagaatagcaatcaggcttggtggc

SEQ ID NO: 317072 - DNA, 75 bp, synthetic construct
  source 1..75: mol_type = other DNA
acgattaagggcaaacccgccagtggtcgtgccgtattgtctcaggaacaggacggcattaaatcgcacacccac

SEQ ID NO: 317073 - DNA, 75 bp, synthetic construct
  source 1..75: mol_type = other DNA
gttacgcaattcccaaaccacgcatcggtatcatgctggaagtaccttcaatggtatttatgctgccgcatctgg

SEQ ID NO: 317074 - DNA, 75 bp, synthetic construct
  source 1..75: mol_type = other DNA
gaagccgcatcacttcattcagtatttatacaaccgtcaaaatgaggcgaatttcgccaccacttttgacgacac

SEQ ID NO: 317075 - DNA, 75 bp, synthetic construct
  source 1..75: mol_type = other DNA
gctgatgaacgtggcgcacgccatcggggaagatcgttgcagcatctttgcgcaggacatctcgcagaaatcctc

SEQ ID NO: 317076 - DNA, 75 bp, synthetic construct
  source 1..75: mol_type = other DNA
ggagaatctggagagtttgtttagccagtcgcgcgagatggaggtggagattaaaaagcagatggcggggctgaa

SEQ ID NO: 317077 - DNA, 75 bp, synthetic construct
  source 1..75: mol_type = other DNA
acgtcttcgcggtcaaaaccgacggcggcgcgaaagtggtgctgtttgaacgcctcagccagtacatcgccgacg

SEQ ID NO: 317078 - DNA, 75 bp, synthetic construct
  source 1..75: mol_type = other DNA
ggggaagatcgttgcagcatctttgcgcaggacatctcgcagaaatcctccagcctgctgcgtctgaacctgatc

SEQ ID NO: 317079 - DNA, 75 bp, synthetic construct
  source 1..75: mol_type = other DNA
agcgcgctgaaacgctttgactacatcgtctccaacccgccgtttaagatggatttcagcgactttcgcgacgat

SEQ ID NO: 317080 - DNA, 75 bp, synthetic construct
  source 1..75: mol_type = other DNA
aggtggtttcactggtatcgtcgccaccctggataccggtcgccccggtccggtgatggctttccgtgtcgatat

SEQ ID NO: 317081 - DNA, 75 bp, synthetic construct
  source 1..75: mol_type = other DNA
tggttttaccaaaacacccgccggacgtttctaccatgactactatggtgaaaatctgttccgcaccgacatggg

SEQ ID NO: 317082 - DNA, 75 bp, synthetic construct
  source 1..75: mol_type = other DNA
atcacctccgcgttcgctggcaacgattgcgcttataccactttcccggctctgtgctgacggactaccgaatac

SEQ ID NO: 317083 - DNA, 75 bp, synthetic construct
  source 1..75: mol_type = other DNA
caaagcaaaatccagggacaaaatggagatttaccagttgttcctgcaacacattattttctcgttaaaaccgga

SEQ ID NO: 317084 - DNA, 75 bp, synthetic construct
  source 1..75: mol_type = other DNA
cgataaaccgctggcagaaaatctgcgcgatgctgaacggctggtggaactggcggcgcggaaaaaactgggtaa

SEQ ID NO: 317085 - DNA, 75 bp, synthetic construct
  source 1..75: mol_type = other DNA
accctggataccggtcgccccggtccggtgatggctttccgtgtcgatatggacgcgctggatctcagtgaagag

SEQ ID NO: 317086 - DNA, 75 bp, synthetic construct
  source 1..75: mol_type = other DNA
agtcaccccccatgccgctggtgacggcgatttttgatagcttcaatgaatccggggtaaattcaccgatactga

SEQ ID NO: 317087 - DNA, 75 bp, synthetic construct
  source 1..75: mol_type = other DNA
aatctttactgaatggaataacggcgaacttagcagctatcttatcgatatcactaaagatattttctccaaaaa

SEQ ID NO: 317088 - DNA, 75 bp, synthetic construct
  source 1..75: mol_type = other DNA
tgcttctgagcaatatgactggaatcttaactacggtgaaatagccagaattttccgggccggctgtattattcg

SEQ ID NO: 317089 - DNA, 75 bp, synthetic construct
  source 1..75: mol_type = other DNA
ccgctgcataccgaacagccgccacaaatttacgacggctatcagtcagtttcaccgctaccgtcagatttcctc

SEQ ID NO: 317090 - DNA, 75 bp, synthetic construct
  source 1..75: mol_type = other DNA
acaccccagcttcaaatatatcccctccgtaaaagaagaacgtttccgtgcgtttttaggcgtgccaattattca

SEQ ID NO: 317091 - DNA, 75 bp, synthetic construct
  source 1..75: mol_type = other DNA
atcctggccgttgatcgcaacaacacccgggtcgcgaacatttatgacagccttcatcctgcaatgttacgtgct

SEQ ID NO: 317092 - DNA, 75 bp, synthetic construct
  source 1..75: mol_type = other DNA
cgcattacgctcgatcagccggagatcttcttgatccaggtgcgggcgatgctgcgtgctaatgccgctacgggc

SEQ ID NO: 317093 - DNA, 75 bp, synthetic construct
  source 1..75: mol_type = other DNA
agccagcaggcgacaaagctgagtttatcgagaaagttcgtcgtgcgctgtatctgggcaaaatcgtttcttacg

SEQ ID NO: 317094 - DNA, 75 bp, synthetic construct
  source 1..75: mol_type = other DNA
ttttcaaactcatcgagcaaggcatcaaaggcaacgcaaatgcatttacactcctatgcagaaagatgattaaca

SEQ ID NO: 317095 - DNA, 75 bp, synthetic construct
  source 1..75: mol_type = other DNA
ttcgataacgcgctctctacaactccacagcccaacacctggcaacgtcgctggtcaactttttttgctgaacaa

SEQ ID NO: 317096 - DNA, 75 bp, synthetic construct
  source 1..75: mol_type = other DNA
cggattggctggcagttggaactggcagcagagaaagggatcgctttcggcaatatcgacgccatcgtcgagcat

SEQ ID NO: 317097 - DNA, 75 bp, synthetic construct
  source 1..75: mol_type = other DNA
cttcaaacaaattgccgatgactaccaacaggcgctgcgcgatgtcgttgcttatgcggtacagaacggtatccc

SEQ ID NO: 317098 - DNA, 75 bp, synthetic construct
  source 1..75: mol_type = other DNA
gaggaaatcttctgtgatgaacatggccgcgtgcgggtgaaatttaactgggaccgctataacccgtcaaactag

SEQ ID NO: 317099 - DNA, 75 bp, synthetic construct
  source 1..75: mol_type = other DNA
ttcaacattgccagctacgcgttattggtgcatatgatggcgcagcagtgcgatctggaagtgggtgattttgtc

SEQ ID NO: 317100 - DNA, 75 bp, synthetic construct
  source 1..75: mol_type = other DNA
acagcaaccatatggatcaaactcatctgcaattaagccgcgaaccgcgtccgctgccgaagttgattatcaaac

SEQ ID NO: 317101 - DNA, 75 bp, synthetic construct
  source 1..75: mol_type = other DNA
tgctgtggtttttgcagggtgataccaacattgcgtacctgcatgaaaacaatgtcaccatctgggatgaatggg

SEQ ID NO: 317102 - DNA, 75 bp, synthetic construct
  source 1..75: mol_type = other DNA
ccataatttcccctcaaagggcacgattcctgacagaagggatttctttgaaactccccgactttataacgggaa

SEQ ID NO: 317103 - DNA, 75 bp, synthetic construct
  source 1..75: mol_type = other DNA
cacctgcgttccattatccatgaactgctgtggttcctgcagggcgacactaacattgcttacctgcacgaaaac

SEQ ID NO: 317104 - DNA, 75 bp, synthetic construct
  source 1..75: mol_type = other DNA
gtaaacccgaatccatcttcgactaccgtttcgaagactttgagattgaaggctacgatccgcatccgggcatta

SEQ ID NO: 317105 - DNA, 75 bp, synthetic construct
  source 1..75: mol_type = other DNA
cgccgcaaagcagcaagtgactcaaaccatgaatgcgggcgtcgtttccagcggtgaagttacgtcggcagagct

SEQ ID NO: 317106 - DNA, 75 bp, synthetic construct
  source 1..75: mol_type = other DNA
acgcggtgtgccggtgaatattttgcaacaatggggatggcctgaattaccgttgactggcgacggcaatattca

SEQ ID NO: 317107 - DNA, 75 bp, synthetic construct
  source 1..75: mol_type = other DNA
tggaatataccttgccgaaaaactggcaacagttgtggatggaaacgacacccggttggttaaacagcctgcaac

SEQ ID NO: 317108 - DNA, 75 bp, synthetic construct
  source 1..75: mol_type = other DNA
tttgtgactaaatatgcaaaatcttttattcctggtgaacagcagatgccagcacaactctatcagtatccaata

SEQ ID NO: 317109 - DNA, 75 bp, synthetic construct
  source 1..75: mol_type = other DNA
atatcagcgaacttagcgcatttaccgagaaaggtattctggaagctacagccagcgtttcgcaaacgccgcagc

SEQ ID NO: 317110 - DNA, 75 bp, synthetic construct
  source 1..75: mol_type = other DNA
tgctgaaaagcagcaagtgactcaaaccatgaatgctggtgtggtttccagcggtgaagtcacgtcaacggagcc

SEQ ID NO: 317111 - DNA, 75 bp, synthetic construct
  source 1..75: mol_type = other DNA
agtggctggctaaagtcaaaaataaaaaaagttttcaggacaaaagcctgtgtgatgaaactgtcgatgtggcaa

SEQ ID NO: 317112 - DNA, 75 bp, synthetic construct
  source 1..75: mol_type = other DNA
tctttctttgccctgggtaacgttgatacgccgaatgtagtgctgatcggggaagggctggcgacagtcatatcc

SEQ ID NO: 317113 - DNA, 75 bp, synthetic construct
  source 1..75: mol_type = other DNA
gttgcttaacgtgccgatggagaagtccacgcagtttcacgaatacagcacaggaaaggcgcacgcagacgcgtt

SEQ ID NO: 317114 - DNA, 75 bp, synthetic construct
  source 1..75: mol_type = other DNA
atggaagaccagatcatcaacgatctgaacgacacccgcatcaaacgccagggtatttccctctctggcggcgac

SEQ ID NO: 317115 - DNA, 75 bp, synthetic construct
  source 1..75: mol_type = other DNA
gtggcactggaaaaaactacgctgctgaaaaaactgatcccggcattatgcgccagagggatccgtccagggctg

SEQ ID NO: 317116 - DNA, 75 bp, synthetic construct
  source 1..75: mol_type = other DNA
catggctggactgaaggatgatgcggaacgcggtaacagtctggtgatcaaccttccggcgaagacaaatttcac

SEQ ID NO: 317117 - DNA, 75 bp, synthetic construct
  source 1..75: mol_type = other DNA
gagagcgggagaggatggaaaatcaagaccccacgccttaagaaccttaatggagcgcaattatgggcctacggg

SEQ ID NO: 317118 - DNA, 75 bp, synthetic construct
  source 1..75: mol_type = other DNA
aagcactttcgccattcggaagaatgctgtgcccttgaaacctatcttcacaagtgcggcaaagaagcattcttc

SEQ ID NO: 317119 - DNA, 75 bp, synthetic construct
  source 1..75: mol_type = other DNA
tgcatccgcgtggggaagacgtaccggtggcaggggaaattaaagccgacttacgcaccgtcagccatattgtta

SEQ ID NO: 317120 - DNA, 75 bp, synthetic construct
  source 1..75: mol_type = other DNA
ggggcatgtcctggcccacgatgtctggattacaggtaaacaggcagagaacaacgttaccgcagagattggtta

SEQ ID NO: 317121 - DNA, 75 bp, synthetic construct
  source 1..75: mol_type = other DNA
tcacgtaagcaatactgcaactcgtgttttcacgtggataatattatgcagatgttcacaggtgtagtttcatca

SEQ ID NO: 317122 - DNA, 75 bp, synthetic construct
  source 1..75: mol_type = other DNA
aaaatgagtgggaagtgttaaaaaaatctcctcagtatgattattacaaggcaatgaaaaaaggaagtgtgtttt

SEQ ID NO: 317123 - DNA, 75 bp, synthetic construct
  source 1..75: mol_type = other DNA
gctgaaatcttgttagaaaataatccgatgaaaagaagttttttattttttaaatatttaaacaatacgcagaat

SEQ ID NO: 317124 - DNA, 75 bp, synthetic construct
  source 1..75: mol_type = other DNA
gcggcggtagggcagagtcgactgattcaactgtgggaacagctgttttcgatttatggcattcacgtcggcaga

SEQ ID NO: 317125 - DNA, 75 bp, synthetic construct
  source 1..75: mol_type = other DNA
gtggcattgtgtgatgtgcgggcagcattttcccgggaaaaagttctgtgaagcctgtggcacggggatctattc

SEQ ID NO: 317126 - DNA, 75 bp, synthetic construct
  source 1..75: mol_type = other DNA
gtggcattgtgtgatgtgtgagcagttttttcatgggaagaaattctgtgaggcctgtggtacggggatttattg

SEQ ID NO: 317127 - DNA, 75 bp, synthetic construct
  source 1..75: mol_type = other DNA
cagagcggtatgtacaaagtatgtttacagctaccagccagacttgttcctggactgtggaagtgcgagcactta

SEQ ID NO: 317128 - DNA, 75 bp, synthetic construct
  source 1..75: mol_type = other DNA
aatatccggcagtgtttctgcctttcctgccatggccggttgattctgcagacagatgctcagggggcgtggttt

SEQ ID NO: 317129 - DNA, 75 bp, synthetic construct
  source 1..75: mol_type = other DNA
gctgaatccggagaagtcccacccttacattgaggatatggcgatgtttttatcgccattaccgatcgtgctgga

SEQ ID NO: 317130 - DNA, 75 bp, synthetic construct
  source 1..75: mol_type = other DNA
ctgaatccggaaaagtcccacccttacattgaggatatggagatgtttttatcgccattaccggtcgtgctggag

SEQ ID NO: 317131 - DNA, 75 bp, synthetic construct
  source 1..75: mol_type = other DNA
atgaaaaacgacgtcatctcaccggaatttgatgaaaacggccgtcctctgcgccgtatccgtagttttgtacgc

SEQ ID NO: 317132 - DNA, 75 bp, synthetic construct
  source 1..75: mol_type = other DNA
cccaaactggggttggtctacaaactgacgccatcggtatccttatttgctaattattcgcaaacatttatgccg

SEQ ID NO: 317133 - DNA, 75 bp, synthetic construct
  source 1..75: mol_type = other DNA
caggtggtcaatacggttagcgatcaggttctggaaaatcagaatgcgacgacgctggatgaagcgctttataac

SEQ ID NO: 317134 - DNA, 75 bp, synthetic construct
  source 1..75: mol_type = other DNA
cgcaacagaaggcggcctgcgtggtgctgaatccggaaaaatcccatccttacattgatgatatggcgatgtttt

SEQ ID NO: 317135 - DNA, 75 bp, synthetic construct
  source 1..75: mol_type = other DNA
gtggcattgtgtgatgtgcgagaggctttttcatgggaagaagttctgtgaaacctgtggtacggggatttattg

SEQ ID NO: 317136 - DNA, 75 bp, synthetic construct
  source 1..75: mol_type = other DNA
gacagatgctcagggggcgtggtttgagcacgatttacatgccctgactgcgcaacagaaggcggcctgcgtggt

SEQ ID NO: 317137 - DNA, 75 bp, synthetic construct
  source 1..75: mol_type = other DNA
atataaaaagaactgcaaaaaataatgctatagtcaacgatgacatggcaaaaagaactgcgcatcattcacttt

SEQ ID NO: 317138 - DNA, 75 bp, synthetic construct
  source 1..75: mol_type = other DNA
cattgcctcgcgtaatcgatacgctaatcggatgtgccattgcatgggcagcggtaagttacatctggccagact

SEQ ID NO: 317139 - DNA, 75 bp, synthetic construct
  source 1..75: mol_type = other DNA
tacgatttggctctcgccaacgggcaactgatggcgacactgaatcagacgaaactctcgttgctgactcgccta

SEQ ID NO: 317140 - DNA, 75 bp, synthetic construct
  source 1..75: mol_type = other DNA
tgggttattgattgcattactgccagagattggtcgtctgcaacgccagattacagtcccaacatccgggcgaac

SEQ ID NO: 317141 - DNA, 75 bp, synthetic construct
  source 1..75: mol_type = other DNA
cccaaaaagttggacagttaaacacgaggcatataggtctgattccgatattcaattggagtcagaccttttaat

SEQ ID NO: 317142 - DNA, 75 bp, synthetic construct
  source 1..75: mol_type = other DNA
ttttcagaagcaatcagcgtgattttggtaatggtaccgtagttgtcaaaaacaatgcagtaaacggcggagatt

SEQ ID NO: 317143 - DNA, 75 bp, synthetic construct
  source 1..75: mol_type = other DNA
tgatgacgcagtttgctatgttgatgacgcgttacatcatcaacctgctgatgaagaacgcgtcaatcaggcatt

SEQ ID NO: 317144 - DNA, 75 bp, synthetic construct
  source 1..75: mol_type = other DNA
aacggggaacgcgccgtaccctgcattactactttgtcgcgcaggatattcacgaacgtgccagctcttcccata

SEQ ID NO: 317145 - DNA, 75 bp, synthetic construct
  source 1..75: mol_type = other DNA
gactggcgggacgtttgcgtaacctcatcattacgctgttctgcttttttatcgcctcggcctcagtagaattgc

SEQ ID NO: 317146 - DNA, 75 bp, synthetic construct
  source 1..75: mol_type = other DNA
caaaaaattagtaatttgcagatagataataaaactgcaacagcttcaaataaagagcgggaaagtatatccatc

SEQ ID NO: 317147 - DNA, 75 bp, synthetic construct
  source 1..75: mol_type = other DNA
tacgaactggctctcgccaacgggcaactaatggcgacgctgaaccagacgaagctctcattgctgactcgctta

SEQ ID NO: 317148 - DNA, 75 bp, synthetic construct
  source 1..75: mol_type = other DNA
tgggatttctgctcaacaatttacgtgccattgatgcccaactggccacaattgaatcagaacaggcccaggcgc

SEQ ID NO: 317149 - DNA, 75 bp, synthetic construct
  source 1..75: mol_type = other DNA
gcggcattgaccgatctcgatgaccggctggcgggacgtctgcgtaacctcatcattacgctgttctgctttttt

SEQ ID NO: 317150 - DNA, 75 bp, synthetic construct
  source 1..75: mol_type = other DNA
gaccgtcgcgtgaaggaacgcatgataatgtcgcggaacaacaactacacacggctggccactgcctcaccctga

SEQ ID NO: 317151 - DNA, 75 bp, synthetic construct
  source 1..75: mol_type = other DNA
cccgttcccgggggctgcgtcggcgcatgccaccggtactgcgccgacgtgccattgatgcgctgctgcaggggc

SEQ ID NO: 317152 - DNA, 75 bp, synthetic construct
  source 1..75: mol_type = other DNA
tgcgcaaaaagcaggggctggatgcgctgggtatggatgaactgatagcgagagcctggcgttttgtgcgcgagc

SEQ ID NO: 317153 - DNA, 75 bp, synthetic construct
  source 1..75: mol_type = other DNA
gttggcgcgaaagttagcaggcaaaatgcaggtgatcgcgctggataaaaagcaccagcatggtactgaaggttt

SEQ ID NO: 317154 - DNA, 75 bp, synthetic construct
  source 1..75: mol_type = other DNA
acggttattttatctttggcggtgcctatcccatgaaagacggtcagacgcgtttcacgacgctaaaagagaaaa

SEQ ID NO: 317155 - DNA, 75 bp, synthetic construct
  source 1..75: mol_type = other DNA
ctatccaatgaaagacggtcagacgcgtttcacgacgctgaaagagaaaatgagcgcctttcagttccagtttgg

SEQ ID NO: 317156 - DNA, 75 bp, synthetic construct
  source 1..75: mol_type = other DNA
gtggcggcgcgaatggtgcgcgtctggcattggctccacagcgcgactgggaagttaatgccgcagcagcacgtg

SEQ ID NO: 317157 - DNA, 75 bp, synthetic construct
  source 1..75: mol_type = other DNA
ccagggcttaggctggaaaagtgattttggttccggtgtcggtgccgatgccattacttcaggcctggaagtggt

SEQ ID NO: 317158 - DNA, 75 bp, synthetic construct
  source 1..75: mol_type = other DNA
caaattagattactacggcctgaaaaaagatctgaaagccctgctgacagaatctcaaccgtggtggcctgccga

SEQ ID NO: 317159 - DNA, 75 bp, synthetic construct
  source 1..75: mol_type = other DNA
gtcgcagccgcaaacgccttatcgtaagcgcatagagctggagaagaaacggcactgtggcgagtatctgctgcg

SEQ ID NO: 317160 - DNA, 75 bp, synthetic construct
  source 1..75: mol_type = other DNA
agccgcgtggaatgggaaaacaggctgcgcaaaaagcaggggctggatgcgctgggtatggatgaactgatagcg

SEQ ID NO: 317161 - DNA, 75 bp, synthetic construct
  source 1..75: mol_type = other DNA
agggcctggcgttttgtgcgcgagcgtttccgcagttatcaggcagagcttaagtcccacggcatgaaacgtgcc

SEQ ID NO: 317162 - DNA, 75 bp, synthetic construct
  source 1..75: mol_type = other DNA
gaagggcggtgcttttcgtcacgtgcgcgcggaagacctctccgctcatttaatgcgtagtctactggcgcgtaa

SEQ ID NO: 317163 - DNA, 75 bp, synthetic construct
  source 1..75: mol_type = other DNA
gcgtcgacgggctattgatgcgctgctgcaggggctgtgtttccactatgacccactggccaaccgcgtccagtg

SEQ ID NO: 317164 - DNA, 75 bp, synthetic construct
  source 1..75: mol_type = other DNA
atgctcaacgagctggatgaagaaccgtcaccgcgtcgtcgtccacgcaaacgcgcaccacgtcgtgagggtacc

SEQ ID NO: 317165 - DNA, 75 bp, synthetic construct
  source 1..75: mol_type = other DNA
tcgcgctggcgatgaacgatgtgctggacgaagcctgccgttcgctggcgataccgaaacgtctgactacgctaa

SEQ ID NO: 317166 - DNA, 75 bp, synthetic construct
  source 1..75: mol_type = other DNA
ccggaaaactctccatcacccgtgccacccgggctctgacgttcctgtcagagctgggactgattacctaccaga

SEQ ID NO: 317167 - DNA, 75 bp, synthetic construct
  source 1..75: mol_type = other DNA
cacccgagccctgacgttcctgtcagagctggggttgattacctaccagacggaatatgacccgcttatcgggtg

SEQ ID NO: 317168 - DNA, 75 bp, synthetic construct
  source 1..75: mol_type = other DNA
ctgcaggggctgtgttttcactatgacccgctggccaaccgcgtccagtgctccatcaccacgctggccattgag

SEQ ID NO: 317169 - DNA, 75 bp, synthetic construct
  source 1..75: mol_type = other DNA
tgatggaacgcaaagacgttcagtttggtctggcgacgatgtgtatcggtctgggtcagggtattgcgacggtgt

SEQ ID NO: 317170 - DNA, 75 bp, synthetic construct
  source 1..75: mol_type = other DNA
cgatggcgctgcagccatgctggtgatgagtgaaagccgcgctcgtgaattaggtcttaagccacgcgcccgcgt

SEQ ID NO: 317171 - DNA, 75 bp, synthetic construct
  source 1..75: mol_type = other DNA
gcagaagtgccgcattctgtcccggcggtcaccgtcaatcgcttgtgcggttcatccatgcaggcactgcatgac

SEQ ID NO: 317172 - DNA, 75 bp, synthetic construct
  source 1..75: mol_type = other DNA
cgagccgatcccacgcctggcaaccttactgaacgatatcccaccggcacgtctgtttgaagaatcgctgaaact

SEQ ID NO: 317173 - DNA, 75 bp, synthetic construct
  source 1..75: mol_type = other DNA
gctgccgctgattagcggcgttgtgctggtggcgctcatttcgccggtcatgctgggaggtctggtattcagcgg

SEQ ID NO: 317174 - DNA, 75 bp, synthetic construct
  source 1..75: mol_type = other DNA
attcgtgatgagttcaaacaaagcgaaggcgatcctcatgtcaaagggcgaattcgtcagatgcagcgagctgcc

SEQ ID NO: 317175 - DNA, 75 bp, synthetic construct
  source 1..75: mol_type = other DNA
cgaaagagctgttcgaaggccgtgaccgcgaaaccggcgaagtgaaatacacagccagccgtgcggatctggtat

SEQ ID NO: 317176 - DNA, 75 bp, synthetic construct
  source 1..75: mol_type = other DNA
gttgggatcgtgattgttatcgcaaaaggtgacgttgtcacaactgacgttatctttaaacccgttctccctgct

SEQ ID NO: 317177 - DNA, 75 bp, synthetic construct
  source 1..75: mol_type = other DNA
caaaacgcaccgggtattgcggcaatgaaagcggccgggtattcggctcctgtttcgccgttgattgtatttact

SEQ ID NO: 317178 - DNA, 75 bp, synthetic construct
  source 1..75: mol_type = other DNA
tatattgcccctgaattttcgtttgctcacagtctgagcgttgcactccccctttttctggtgacgatggcatcg

SEQ ID NO: 317179 - DNA, 75 bp, synthetic construct
  source 1..75: mol_type = other DNA
gtctggctggcgacgaaggcttttgcgccacgttatgccgtaatcgcggctatggttgtcggaattttggtggta

SEQ ID NO: 317180 - DNA, 75 bp, synthetic construct
  source 1..75: mol_type = other DNA
gccattaccggaatgatggcagccctaccggttagctggatccagatgctggctggtctggcgctgttaagcacc

SEQ ID NO: 317181 - DNA, 75 bp, synthetic construct
  source 1..75: mol_type = other DNA
ggcgctggggctggcaatgggcgtcagtacgctggctctgacattatggtatcgcgtacctgttctcaccgcatg

SEQ ID NO: 317182 - DNA, 75 bp, synthetic construct
  source 1..75: mol_type = other DNA
ggcgctgccaagtctgctgttggcactggtgctggtggcgattttcggcccgtcgattggtaacgccgcgctggc

SEQ ID NO: 317183 - DNA, 75 bp, synthetic construct
  source 1..75: mol_type = other DNA
atgtcacaggttactgaaaataaagtgattagcgcgccggtaccgatgacccctttacaggagttctggcactat

SEQ ID NO: 317184 - DNA, 75 bp, synthetic construct
  source 1..75: mol_type = other DNA
attaacctttgtcgccctgccgcattacgtccgtttgacgcgcgctgccgtgctggtggaagtgaaccgcgacta

SEQ ID NO: 317185 - DNA, 75 bp, synthetic construct
  source 1..75: mol_type = other DNA
gcgcattattccgcactcgcttgcggcggcaatgcttgccgggattttattacgctttggtttacaggcgtttgc

SEQ ID NO: 317186 - DNA, 75 bp, synthetic construct
  source 1..75: mol_type = other DNA
atgcgtctgttttctattcctccacccacgctactggcggggtttctggcggtattaattggctacgccagttca

SEQ ID NO: 317187 - DNA, 75 bp, synthetic construct
  source 1..75: mol_type = other DNA
cagttctgtcagccctgaaggcaaatattgctgagcgggttacctggtttgacggtcgtccggtttttattgatg

SEQ ID NO: 317188 - DNA, 75 bp, synthetic construct
  source 1..75: mol_type = other DNA
ccggacaaagatcaccgttggctggccgccgccgcggctggcgtcttttatttactggcgggtttatttggcagt

SEQ ID NO: 317189 - DNA, 75 bp, synthetic construct
  source 1..75: mol_type = other DNA
atccatgtggcgttcttacgctcgctgggtaaacgtcaccggatgccgccactgttgcgccgccgggccatcgat

SEQ ID NO: 317190 - DNA, 75 bp, synthetic construct
  source 1..75: mol_type = other DNA
gcgaggttgagcgccgcgtgcaggagcgcatgctgctgtcgcgcggaaacaactacacgcgactggccactgtcc

SEQ ID NO: 317191 - DNA, 75 bp, synthetic construct
  source 1..75: mol_type = other DNA
gtaaaggtgccggaacgctgaagttctgcgaaaaactgatggaaaaggcggtgggcttcacttcccgttttgatt

SEQ ID NO: 317192 - DNA, 75 bp, synthetic construct
  source 1..75: mol_type = other DNA
atgcccgttccatcagggcggtcacgaccagagcgcaggtggggcacaaccacgcgcgactggtggccaaatcaa

SEQ ID NO: 317193 - DNA, 75 bp, synthetic construct
  source 1..75: mol_type = other DNA
atcgatctgaaattcgcgattgcggattctggtctgtctgtcagcgaactggtatcggtggcctgggcgtctgct

SEQ ID NO: 317194 - DNA, 75 bp, synthetic construct
  source 1..75: mol_type = other DNA
caagttagattactatggtctgaaaaaagatctgaaagcattgctgacagaatctcaaccgtggtggccggcaga

SEQ ID NO: 317195 - DNA, 75 bp, synthetic construct
  source 1..75: mol_type = other DNA
tttaaccctggctactggcagatggcggccagcgaagtctttgcgataggggcggaaaagactcgccccttctta

SEQ ID NO: 317196 - DNA, 75 bp, synthetic construct
  source 1..75: mol_type = other DNA
aacattttgatattgaggaaattaccgatgtggatagcaccgtaaaccgggaggtgtataccatttgggtttatg

SEQ ID NO: 317197 - DNA, 75 bp, synthetic construct
  source 1..75: mol_type = other DNA
cacaggagacttcaggccgagctgttgcatcagttttcgcaccgttttgccactgaacttaagacctcttttctg

SEQ ID NO: 317198 - DNA, 75 bp, synthetic construct
  source 1..75: mol_type = other DNA
ggctggataccctgggcatggatgaactgatagcgaaagcctggcgttttgtgcgtgagcgtttccgcagttacc

SEQ ID NO: 317199 - DNA, 75 bp, synthetic construct
  source 1..75: mol_type = other DNA
actatcgatcgagttcgagttgcaattccggaagaacttggaaagttaatcttactgtataagtacctagttgga

SEQ ID NO: 317200 - DNA, 75 bp, synthetic construct
  source 1..75: mol_type = other DNA
gcctgatgatagaaaatggcattcaacgttgggcatctaaactatgtccaaaaattgatgctaatgaaaataaaa

SEQ ID NO: 317201 - DNA, 75 bp, synthetic construct
  source 1..75: mol_type = other DNA
tgagtgtgaagaaaaagcccagcggcaggcgggtgatttttgcctcggcgtttggcaatgcgctcgaattttttg

SEQ ID NO: 317202 - DNA, 75 bp, synthetic construct
  source 1..75: mol_type = other DNA
atcaagaaaactgccgcccgtaaagccagtcaggaaatgcgcgcacttgccaatcatgtatacagcaaaatgggt

SEQ ID NO: 317203 - DNA, 75 bp, synthetic construct
  source 1..75: mol_type = other DNA
aaaaagggggagttggcaaaacttccactctggttcatctggcgtttgatttttcggaaagaggcaagcgggtag

SEQ ID NO: 317204 - DNA, 75 bp, synthetic construct
  source 1..75: mol_type = other DNA
cgcgatggtgttcaccattgccctgatgagcctcggcacgttgatgattggcatcgcgccgacatatgcaacggc

SEQ ID NO: 317205 - DNA, 75 bp, synthetic construct
  source 1..75: mol_type = other DNA
gcattgcgccgacgtatgcgacggcgggctattggggaacggcaactctggtacttgctcgtttgattcagggtg

SEQ ID NO: 317206 - DNA, 75 bp, synthetic construct
  source 1..75: mol_type = other DNA
gcatcgcaccgacgtatgaaacggcgggctattggggaaccgcgacgctggtgctagcgcgtctaattcagggcg

SEQ ID NO: 317207 - DNA, 75 bp, synthetic construct
  source 1..75: mol_type = other DNA
tgttgcccggatcgccagagagcacggtatcaatgataactgtcaacgacggatgaaaagtgatccacttatatc

SEQ ID NO: 317208 - DNA, 75 bp, synthetic construct
  source 1..75: mol_type = other DNA
tcagcttgacgccatcctttatgccaacagaaagaaggaattaacagagcctcaaatcagcgaaggcacatggcg

SEQ ID NO: 317209 - DNA, 75 bp, synthetic construct
  source 1..75: mol_type = other DNA
tttattgcatccggtatcgcatggccattgcccgattcagtttcattagctcagcttgatgccatcctttatgcc

SEQ ID NO: 317210 - DNA, 75 bp, synthetic construct
  source 1..75: mol_type = other DNA
ggaaattctgtaactataaaatcaggggtttttatctgggatggagttagagttcatgataatgtgtttattggt

SEQ ID NO: 317211 - DNA, 75 bp, synthetic construct
  source 1..75: mol_type = other DNA
atggccgtcattggttatatccgcgtatcaacaatcgaccagaacagcgatttacagcgtaatgcactcataagt

SEQ ID NO: 317212 - DNA, 75 bp, synthetic construct
  source 1..75: mol_type = other DNA
cacaatacatacgctttttcagcgatttcttgcatccggtatcgcatggccattgcccgattcagtttcattcgc

SEQ ID NO: 317213 - DNA, 75 bp, synthetic construct
  source 1..75: mol_type = other DNA
gcatcgcaccgacgtatgaaacggcgggctattggggaaccgcaacgctggtgctggcgcgtctaattcagggcg

SEQ ID NO: 317214 - DNA, 75 bp, synthetic construct
  source 1..75: mol_type = other DNA
tcgtaagcacaacgcaagccgtcgctctatgatgcgtactttcatcaagaaagtatacgcagctatcgaagctgg

SEQ ID NO: 317215 - DNA, 75 bp, synthetic construct
  source 1..75: mol_type = other DNA
gaagtacacggatgaatatcgtgaggtgacgataccgcactcacagttccggttcagtatgaacggtctgaaact

SEQ ID NO: 317216 - DNA, 75 bp, synthetic construct
  source 1..75: mol_type = other DNA
aaaagttcgatttattcaacaaagccgtttgccttatctgcgcttgcgctgacctctacttccgtattcgcagct

SEQ ID NO: 317217 - DNA, 75 bp, synthetic construct
  source 1..75: mol_type = other DNA
tcgcctcgattccggcactgtgtggttttgcgggcggcgtgctgggaggtgtcttctcggattatctgatcaaac

SEQ ID NO: 317218 - DNA, 75 bp, synthetic construct
  source 1..75: mol_type = other DNA
tcacgtattacatcggtttaccggatgaagagacattctcgctgccggatgcccgctactgccctggcgccattg

SEQ ID NO: 317219 - DNA, 75 bp, synthetic construct
  source 1..75: mol_type = other DNA
ctgttatcagactgcaggcccgctctgcttaccataatggtgagcgctcctccgttcgcaagaaacgtccgcgcc

SEQ ID NO: 317220 - DNA, 75 bp, synthetic construct
  source 1..75: mol_type = other DNA
ttgatcttgaggatgagattaacgagatcttgcaagaagatgcggcaagaattcacttttcatttcatgcagcat

SEQ ID NO: 317221 - DNA, 75 bp, synthetic construct
  source 1..75: mol_type = other DNA
atgagtctcggtacgctgatgatcggcattgcgccaacatatgcgacggcgggatattggggaacagcgacgctg

SEQ ID NO: 317222 - DNA, 75 bp, synthetic construct
  source 1..75: mol_type = other DNA
tctgctcctgcaacataaggcgactattgttaatggcgttttactcgctattggtagcacggtcgcggtaatgac

SEQ ID NO: 317223 - DNA, 75 bp, synthetic construct
  source 1..75: mol_type = other DNA
ggtactgttaaatttactggtgagatcgtagacgcagcatgcgtactgtctgttgattctcagaaccaggaagtt

SEQ ID NO: 317224 - DNA, 75 bp, synthetic construct
  source 1..75: mol_type = other DNA
tgaaaaaggccaatgtgagctttagtggtgtcggcgatgcaattaaatctgatctggtttctgttagcactgaag

SEQ ID NO: 317225 - DNA, 75 bp, synthetic construct
  source 1..75: mol_type = other DNA
ctggaagattgcgataccaccacgatgaaaaaagccaatgtgagctttagtggtgttggtgatgcagataaatct

SEQ ID NO: 317226 - DNA, 75 bp, synthetic construct
  source 1..75: mol_type = other DNA
tgaagcgcgaaatcgaccgtcgtgtgaaggaacgcatgataatgtcgcggaacaacaactacacacggctggcca

SEQ ID NO: 317227 - DNA, 75 bp, synthetic construct
  source 1..75: mol_type = other DNA
ctaactggtatgagcgtgaaacctgggatctgtttggcattactttcgacggtcacccgaacctgcgccgcatca

SEQ ID NO: 317228 - DNA, 75 bp, synthetic construct
  source 1..75: mol_type = other DNA
gcgccgcagccgtgtggtatgggaaaacaaacagcgcaaaaagcaggggctggataccctgggtatggatgaact

SEQ ID NO: 317229 - DNA, 75 bp, synthetic construct
  source 1..75: mol_type = other DNA
ataaagcgtgcccgtgcgcgtcgtgatgcgaacagggaacgtcaggatatcgtcaccctggtgaaacggcagctg

SEQ ID NO: 317230 - DNA, 75 bp, synthetic construct
  source 1..75: mol_type = other DNA
gacttacacggcatggacgagcgtttgcgcacacaccgcgaagggttacctgccgccgatttttccgttttctac

SEQ ID NO: 317231 - DNA, 75 bp, synthetic construct
  source 1..75: mol_type = other DNA
tgcaacatatcgaaaccctgatcccccacttcctgcaagtgtcgtggggtccggtgatgcctgccaatgaatctt

SEQ ID NO: 317232 - DNA, 75 bp, synthetic construct
  source 1..75: mol_type = other DNA
ttcttacgagaaagccgcgctgcgtaacaccatcctgattggccgttccaaaggcgttgccgcctacggcgcgaa

SEQ ID NO: 317233 - DNA, 75 bp, synthetic construct
  source 1..75: mol_type = other DNA
aaaacgtgcccgtgcgcgtcgtgatgcgaacagggaaccacggcagcctggcggctgcaaatcgtggtgtggcag

SEQ ID NO: 317234 - DNA, 75 bp, synthetic construct
  source 1..75: mol_type = other DNA
cacccgggccctgacgttcctgtcagagctgggactgattacttaccagacggaatatgacccgcttatcgggtg

SEQ ID NO: 317235 - DNA, 75 bp, synthetic construct
  source 1..75: mol_type = other DNA
ctcccgttttgatttcgctattcatgtggcgcatgcccgttcgcgtggtctgcgtcgacgcatgccaccggtgct

SEQ ID NO: 317236 - DNA, 75 bp, synthetic construct
  source 1..75: mol_type = other DNA
gtggcgcatgcccgttcgcgtggtctgcgtcgacgcatgccaccggtgctgcgtcgacgggctattgatgcgctc

SEQ ID NO: 317237 - DNA, 75 bp, synthetic construct
  source 1..75: mol_type = other DNA
ggtgtttacaccccgtgaaggtgccggaacgctgaagttctgcgaaaaactgatggaaaaggcggtgggcttcac

SEQ ID NO: 317238 - DNA, 75 bp, synthetic construct
  source 1..75: mol_type = other DNA
gccaccggtgctgcgtcgacgggctattgatgcgctcctgcaggggctgtgtttccactatgacccgctggccaa

SEQ ID NO: 317239 - DNA, 75 bp, synthetic construct
  source 1..75: mol_type = other DNA
atccgcggcagcctggtgtctgacctgattgtttatctgggcagtatcgattttgttatgtcagatgtggaccgc

SEQ ID NO: 317240 - DNA, 75 bp, synthetic construct
  source 1..75: mol_type = other DNA
taggttagggctagaagatgccagagggcagcttattttcgaatacgttcgaatgattaaagaattaaacccaaa

SEQ ID NO: 317241 - DNA, 75 bp, synthetic construct
  source 1..75: mol_type = other DNA
aaccgtgtccagtgctccatcaccacgctggccattgagtgcgggctggcgacagagtccggtgcaggaaaactc

SEQ ID NO: 317242 - DNA, 75 bp, synthetic construct
  source 1..75: mol_type = other DNA
cgcagccgtgtggtatgggaaaacaaacaacgcaaaaagcaggggctggataccctgggcatggatgaactgata

SEQ ID NO: 317243 - DNA, 75 bp, synthetic construct
  source 1..75: mol_type = other DNA
ctaaaaatactcattcaaggagtcttctcaatcaagttctgatcagtgaaaaaaacattaacacaaaagatggct

SEQ ID NO: 317244 - DNA, 75 bp, synthetic construct
  source 1..75: mol_type = other DNA
atatatataatttggggacaggtaaaggatattccgttcttgaattggtaaatacctttgaaacaataacaggaa

SEQ ID NO: 317245 - DNA, 75 bp, synthetic construct
  source 1..75: mol_type = other DNA
gtcatctctgttaataaaactggagaagggatttcgccgggaatgcttcaaacggcaatagggatggagatttca

SEQ ID NO: 317246 - DNA, 75 bp, synthetic construct
  source 1..75: mol_type = other DNA
ttttaggctcaattccgtgggatcgtaaaacagttacgccagcgagtttgtggctccatccgggcctggaattaa

SEQ ID NO: 317247 - DNA, 75 bp, synthetic construct
  source 1..75: mol_type = other DNA
tcgggtgctacattccgaccgatatcacgttcacaccggcactgtttgctgctctcgatgtatcagaggaggcag

SEQ ID NO: 317248 - DNA, 75 bp, synthetic construct
  source 1..75: mol_type = other DNA
cggaatatgacccgcttatcgggtgctacattccgaccgacatcacgttcacaccggctctgtttgccgcccttg

SEQ ID NO: 317249 - DNA, 75 bp, synthetic construct
  source 1..75: mol_type = other DNA
gcgaacagggaacgtcaggatatcgtcaccctggtgaaacggcagctgacgcgtgaaatctcggaagggcgcttt

SEQ ID NO: 317250 - DNA, 75 bp, synthetic construct
  source 1..75: mol_type = other DNA
gaaaacagacagcgcaaaaagcagggactggatgcactgggtatggatgaactgatagcgaaagcctggcgtttt

SEQ ID NO: 317251 - DNA, 75 bp, synthetic construct
  source 1..75: mol_type = other DNA
cgttttgattttgccgtttatgtggcgcatgcccgttcgcgggggttgcggcgacgcatgcccccggcgctgcgt

SEQ ID NO: 317252 - DNA, 75 bp, synthetic construct
  source 1..75: mol_type = other DNA
gtgcgttatgaagtgggtctggcatggggtgtggctgctgtggcgccacgtcattccgccatcatcatgggttaa

SEQ ID NO: 317253 - DNA, 75 bp, synthetic construct
  source 1..75: mol_type = other DNA
aacgggaagtacacagcccaggatgcaaccacgacacaaaaagggatagttcagctcagtagcgacaccaacagc

SEQ ID NO: 317254 - DNA, 75 bp, synthetic construct
  source 1..75: mol_type = other DNA
ggcgcagcgtgactattttggtgcgcatacttataaacgtactgataaagatggcgtattccatacgaaatggat

SEQ ID NO: 317255 - DNA, 75 bp, synthetic construct
  source 1..75: mol_type = other DNA
tcgtcgcatcctgttaatggtgaaagcaggtgcaggcacggatgctgctattgattccctcaagccatacctcga

SEQ ID NO: 317256 - DNA, 75 bp, synthetic construct
  source 1..75: mol_type = other DNA
ctggttccttactatacagtacaagagttcgttgaatccctcgaaacaccacgccgtatcctgttgatggtgaag

SEQ ID NO: 317257 - DNA, 75 bp, synthetic construct
  source 1..75: mol_type = other DNA
gatgaaattattgcaaagcgaaaagaaaagcgacaatgttttgatgtctgtatattagactctgttactaataaa

SEQ ID NO: 317258 - DNA, 75 bp, synthetic construct
  source 1..75: mol_type = other DNA
ccagcagaacaacaaatccggcaccccggcattttgcaacctgattggcgatcccaaaatcccgcaacgtgccag

SEQ ID NO: 317259 - DNA, 75 bp, synthetic construct
  source 1..75: mol_type = other DNA
tatgagtggacaaagttaaaatataaaagaaagttaggtccagcagagattggttgtacattaagtcatctcagt

SEQ ID NO: 317260 - DNA, 75 bp, synthetic construct
  source 1..75: mol_type = other DNA
tggcgtggaaagcagataatcggatactgtttgtcgcaaaagaacgacgccctgcaggcatgtttgcctatcagc

SEQ ID NO: 317261 - DNA, 75 bp, synthetic construct
  source 1..75: mol_type = other DNA
gggaactgggaggccagtggcaagaaagtaaatcacttttttaccactggccttctgctttcaggcgcttgttaa

SEQ ID NO: 317262 - DNA, 75 bp, synthetic construct
  source 1..75: mol_type = other DNA
tttctgagtctgagttaaagtcgatcttgaccttaactgaacgtttcacatggaacgttgcaaggccaattattg

SEQ ID NO: 317263 - DNA, 75 bp, synthetic construct
  source 1..75: mol_type = other DNA
aactggctggcgataaagcagagttcgttgagaaagtgcgtcgcgcactgtacctgggtaaaatcgtctcctacg

SEQ ID NO: 317264 - DNA, 75 bp, synthetic construct
  source 1..75: mol_type = other DNA
tcactaaagatatcttcactaaaaaagatgaagacggtaactacctggtcgatgtgattctggatgaggcagcta

SEQ ID NO: 317265 - DNA, 75 bp, synthetic construct
  source 1..75: mol_type = other DNA
cattgaaaggaccttccattatgcctggcggacagagagaagcctatgaattggttgctcctattctgtctaaaa

SEQ ID NO: 317266 - DNA, 75 bp, synthetic construct
  source 1..75: mol_type = other DNA
cgaaggctttaacttcatcggtaccggtgtttccggcggtgaagagggcgcgctgaaaggtccttccattatgcc

SEQ ID NO: 317267 - DNA, 75 bp, synthetic construct
  source 1..75: mol_type = other DNA
caaaggcgacatcatcattgatggcggcaatactttcttccaggataccatccgtcgtaaccgtgaactgtctgc

SEQ ID NO: 317268 - DNA, 75 bp, synthetic construct
  source 1..75: mol_type = other DNA
cgaaggctttaacttcatcggtaccggtgtctccggtggtgaagaaggcgcgctgaaaggtccttccattatgcc

SEQ ID NO: 317269 - DNA, 75 bp, synthetic construct
  source 1..75: mol_type = other DNA
cattgagaaagttcgtcgtgcgctttatctgggtaagattgtttcttacgctcagggcttctcacagctacgtgc

SEQ ID NO: 317270 - DNA, 75 bp, synthetic construct
  source 1..75: mol_type = other DNA
cgctctccaatgaagagttggcacaaaccttcactgaatggaacgaaggcgagctgagcagctacctgattgata

SEQ ID NO: 317271 - DNA, 75 bp, synthetic construct
  source 1..75: mol_type = other DNA
tatttgctcgttatatctcttcgctaaaagaccagcgtgtagccgcgtcgaaagtgctgagtggtccgcaggctc

SEQ ID NO: 317272 - DNA, 75 bp, synthetic construct
  source 1..75: mol_type = other DNA
gcgtactacgatagctaccgcgctgcggtactgccggcgaacctgattcaggctcagcgtgactacttcggcgcg

SEQ ID NO: 317273 - DNA, 75 bp, synthetic construct
  source 1..75: mol_type = other DNA
ccgctgtcgctgattaccgagtctgtgtttgcacgatacatctcttctctgaaagatcagcgcgttgccgcatct

SEQ ID NO: 317274 - DNA, 75 bp, synthetic construct
  source 1..75: mol_type = other DNA
ttgctgcggttgctgaagatggcgaaccatgtataacttacatcggtgctgacggtgcgggtcactacgtgaaga

SEQ ID NO: 317275 - DNA, 75 bp, synthetic construct
  source 1..75: mol_type = other DNA
atggcacgatgattaaggccggaagttcactcgtagagggggggactgcgaatggaacaatcattgatggtggca

SEQ ID NO: 317276 - DNA, 75 bp, synthetic construct
  source 1..75: mol_type = other DNA
gaacataaatacccgcaaacgcaaaccaccagagcgcgtaaaccgggaagaagccgcaatggcgacgcctcgcgc

SEQ ID NO: 317277 - DNA, 75 bp, synthetic construct
  source 1..75: mol_type = other DNA
aaataccataattaatggtggcacacagaatattaataatcatggtattgccacgggcaccaatatcaacagcgg

SEQ ID NO: 317278 - DNA, 75 bp, synthetic construct
  source 1..75: mol_type = other DNA
cttattattctgcatgtgatatttatgtatcgtcctctaagtgggaaggctttggtttggttgtagctgaggcta

SEQ ID NO: 317279 - DNA, 75 bp, synthetic construct
  source 1..75: mol_type = other DNA
caaagaaacaactttgtttatggcaggcgcaaagagagcgcatgaatgagcgagaatttctttcctgcccatccg

SEQ ID NO: 317280 - DNA, 75 bp, synthetic construct
  source 1..75: mol_type = other DNA
ctggggctttgagggtgtcgcgcgtaaaggttatatcgctaacactctgacgccgaatgtcggtgatgcaaactc

SEQ ID NO: 317281 - DNA, 75 bp, synthetic construct
  source 1..75: mol_type = other DNA
gtggtgtctaacccggttgttcgtctgtatgaacaagacgcgctgcggatgggtaaaaaagagcagttcccgtat

SEQ ID NO: 317282 - DNA, 75 bp, synthetic construct
  source 1..75: mol_type = other DNA
taaagcagttgtacatcacctgctcactccacagaaaacagaaaatatatcctgcccaggaaatgctgaagtaga

SEQ ID NO: 317283 - DNA, 75 bp, synthetic construct
  source 1..75: mol_type = other DNA
tctcttccgggagcaagcaggttgttgagaaaggaggtacggcaactggcagcaatattcgcgccggaggcacgc

SEQ ID NO: 317284 - DNA, 75 bp, synthetic construct
  source 1..75: mol_type = other DNA
ttcctgcaataaactgccagcaatcagatacagggattcaggaaaacataactgaaaagcaacgggtattaaata

SEQ ID NO: 317285 - DNA, 75 bp, synthetic construct
  source 1..75: mol_type = other DNA
agtatatcttcagatgaactcatatcattaacgacagagcttcttctatggcgctcatcatggtcaacgcttgca

SEQ ID NO: 317286 - DNA, 75 bp, synthetic construct
  source 1..75: mol_type = other DNA
atgcgtgtgataatgaagcctttaagaaggactttagtattatttatcttttctgtttttctttgcggaactgtg

SEQ ID NO: 317287 - DNA, 75 bp, synthetic construct
  source 1..75: mol_type = other DNA
atccttatatcaattttgactggccggtcacaaatcttcgggaatcatgggatattatcggttttgatccacgag

SEQ ID NO: 317288 - DNA, 75 bp, synthetic construct
  source 1..75: mol_type = other DNA
acgattcaaaaccgcttattacgactaccgctatcacgttcaggatgcattctacagtgacggttatgaagcaca

SEQ ID NO: 317289 - DNA, 75 bp, synthetic construct
  source 1..75: mol_type = other DNA
gttccacgtatgccctattacagcttgcttggaaatctcgatatatttttaagcacagatacagctcagttttct

SEQ ID NO: 317290 - DNA, 75 bp, synthetic construct
  source 1..75: mol_type = other DNA
atgaaaaaatatatttatattgacactaatattataagtgatttcaaatctttcacacctgaaaaatggcaatca

SEQ ID NO: 317291 - DNA, 75 bp, synthetic construct
  source 1..75: mol_type = other DNA
cgcagcccttacggaagaaaaggaggcagaggcgctggccggagagctgcatgatgttaaaaacgagcttttgat

SEQ ID NO: 317292 - DNA, 75 bp, synthetic construct
  source 1..75: mol_type = other DNA
aaaacagggggacacaaaagacactattacaaaagaaaaaagaaaagtgaaccgccccgggaatcctggagacta

SEQ ID NO: 317293 - DNA, 75 bp, synthetic construct
  source 1..75: mol_type = other DNA
ttcattttttgtgcctataacaacaaaaaaacaatcgtcaataaaatgattgagcacagcatcattaaatggatt

SEQ ID NO: 317294 - DNA, 75 bp, synthetic construct
  source 1..75: mol_type = other DNA
agaaattaacagcacgtcaggaactcgatctctttcgtgccaccgatgacgtgatggatttgcccctggagttga

SEQ ID NO: 317295 - DNA, 75 bp, synthetic construct
  source 1..75: mol_type = other DNA
tcaaacagaaaaccattgccggtgagattggttcttccaccatgccgcataaagttaacccgatcgacttcgaaa

SEQ ID NO: 317296 - DNA, 75 bp, synthetic construct
  source 1..75: mol_type = other DNA
gccagcacaactattgaatgcggacgttatccggttgaaattttcatgatgggcgaagaagcaaaactggcaggt

SEQ ID NO: 317297 - DNA, 75 bp, synthetic construct
  source 1..75: mol_type = other DNA
cagaaactgcgggcagaactccatgaagccgggaaaaacattccgcccaaaaatcctgtcgatgcagacaaatta

SEQ ID NO: 317298 - DNA, 75 bp, synthetic construct
  source 1..75: mol_type = other DNA
atcaataacctctcccacgcattaatgctgaaaaccgcgcgtgatgaagtgatcctgccgtactggcgtcaacta

SEQ ID NO: 317299 - DNA, 75 bp, synthetic construct
  source 1..75: mol_type = other DNA
gaagaagatgcggcgcgaatcaaaaccattgagcgtaccactaaccacgacgttaaagcggttgagtatttcctg

SEQ ID NO: 317300 - DNA, 75 bp, synthetic construct
  source 1..75: mol_type = other DNA
ccgtacgagaagttgaaagagctgactcgcggtaaacgcgttgatgccgaaggcatgaagcaatttattgacggc

SEQ ID NO: 317301 - DNA, 75 bp, synthetic construct
  source 1..75: mol_type = other DNA
ttttggtggtatggctgctgatgttgctggcgtggtatcttgttggtctgccgataggtccggggatttccccac

SEQ ID NO: 317302 - DNA, 75 bp, synthetic construct
  source 1..75: mol_type = other DNA
gctgttaatcttggcgcggaactcccggctttcgcgggtagtcttgtcagtctgatagtaatagtctttatggcg

SEQ ID NO: 317303 - DNA, 75 bp, synthetic construct
  source 1..75: mol_type = other DNA
atgaagactatacgaggcgttggactaattaccctgatgtgtggtgtcagtacattaattccccagtatctggtg

SEQ ID NO: 317304 - DNA, 75 bp, synthetic construct
  source 1..75: mol_type = other DNA
tcccgcaaaattatgaaccacagtcttgaggggatagatcgagtatacgatcgacacgattatatagacgagatg

SEQ ID NO: 317305 - DNA, 75 bp, synthetic construct
  source 1..75: mol_type = other DNA
actgcctgttgcccagtgtttcagcccctgttttgccgtcggtaccccgctacatacgtggcaactggttagcca

SEQ ID NO: 317306 - DNA, 75 bp, synthetic construct
  source 1..75: mol_type = other DNA
tcatttgggacgcagcgcccttgatgccgtaacgttgatgaccactggcaccaacttcctcaacgaacatattat

SEQ ID NO: 317307 - DNA, 75 bp, synthetic construct
  source 1..75: mol_type = other DNA
cgatctggtgcgtgtctggaacaaacgtggtcagattctgacaggcgcggtggtgactgacgggatcaaaaaagg

SEQ ID NO: 317308 - DNA, 75 bp, synthetic construct
  source 1..75: mol_type = other DNA
tttccgcgccgatccggtgaaaaatgcgctgggtacgccaagcggcaaaattgaaatctattcaaaaacgctgga

SEQ ID NO: 317309 - DNA, 75 bp, synthetic construct
  source 1..75: mol_type = other DNA
gcgttgatgttagggattgcgcacaccttgatggtacaaggtaagcacgataaggccttcctggaaaaatacacc

SEQ ID NO: 317310 - DNA, 75 bp, synthetic construct
  source 1..75: mol_type = other DNA
gaaattgaaaggctgacattctcaaataaagatgttgttttaacatttctattattttcatactacaattatatt

SEQ ID NO: 317311 - DNA, 75 bp, synthetic construct
  source 1..75: mol_type = other DNA
agcattaaaactgattcatgagcaacacgatcgcattcgcaaagctaacggaccatcggccatttttgccggatc

SEQ ID NO: 317312 - DNA, 75 bp, synthetic construct
  source 1..75: mol_type = other DNA
gctttggtttctcttatcattactccaacggtggcaatccaacacgcgttggtggcgtactgccggaaatgtctg

SEQ ID NO: 317313 - DNA, 75 bp, synthetic construct
  source 1..75: mol_type = other DNA
cgcttatctctgctgataaccagacgtcggccagagatcgctgttcattgtattttgatacatgttttgccgcac

SEQ ID NO: 317314 - DNA, 75 bp, synthetic construct
  source 1..75: mol_type = other DNA
gaagaaaccggtgttccggcggcactggttaccgcatggctgggtcgccacggcattgtgcccacccgtaccacc

SEQ ID NO: 317315 - DNA, 75 bp, synthetic construct
  source 1..75: mol_type = other DNA
gaagagacaggcgtacctgccgcactggttaccgcatggcttggccaccacggcatcgtgccaactcgcaccacc

SEQ ID NO: 317316 - DNA, 75 bp, synthetic construct
  source 1..75: mol_type = other DNA
actgctgggtaatgcatccgggcgaaagctggcacggctttaaagatatcccggacaactggagtatgctcgacc

SEQ ID NO: 317317 - DNA, 75 bp, synthetic construct
  source 1..75: mol_type = other DNA
tggattgcaccctataacccggcggaacagttccgcgatgcactgctcgccccgccagcctggcaggaaggcggc

SEQ ID NO: 317318 - DNA, 75 bp, synthetic construct
  source 1..75: mol_type = other DNA
atggttaccaaaatcccggtcttaggagcgggatttttgttgtgcacagaaaacccccagctaggctgggggttc

SEQ ID NO: 317319 - DNA, 75 bp, synthetic construct
  source 1..75: mol_type = other DNA
acaagtaagctatttacgctcactgcaatcctgggatcatcatttccctggttttgaacacgaaacggaaggcac

SEQ ID NO: 317320 - DNA, 75 bp, synthetic construct
  source 1..75: mol_type = other DNA
agtgaaagcccgctgaccaaagacaaagccgggcaaaaaccgtcttactgcgtggtgaccaactgcacctatgac

SEQ ID NO: 317321 - DNA, 75 bp, synthetic construct
  source 1..75: mol_type = other DNA
tctctctgatgaagcagttccttagctggtgtgccttccaggggatgatcgacgtgtcaccgttaaacgatatgt

SEQ ID NO: 317322 - DNA, 75 bp, synthetic construct
  source 1..75: mol_type = other DNA
ggaacgaccagaactgatggagcttgagccatttacaccccgagatttgcgccgtactgcgcgtagttacttccc

SEQ ID NO: 317323 - DNA, 75 bp, synthetic construct
  source 1..75: mol_type = other DNA
cgtgaaggtcgtggggcgattaacttctcccgctttaaccaggcctacatgatgcatgccaccacctccccgctg

SEQ ID NO: 317324 - DNA, 75 bp, synthetic construct
  source 1..75: mol_type = other DNA
ccacccacaaattgctgaatgcattgtcgcaggcctcttacattcatgtgcgtgaaggccgcggtgcgattaact

SEQ ID NO: 317325 - DNA, 75 bp, synthetic construct
  source 1..75: mol_type = other DNA
agcgacatccatgaatattcctgggccgctccgggtcaccagggcggcgtcggtttcaccaaaacgcctgccgga

SEQ ID NO: 317326 - DNA, 75 bp, synthetic construct
  source 1..75: mol_type = other DNA
gctggtgacgctggcggcgatgttagggcagattggtacaccgggcggcggttttggtttctcttatcattactc

SEQ ID NO: 317327 - DNA, 75 bp, synthetic construct
  source 1..75: mol_type = other DNA
ctggttccttattatacggtaaaggagtttgttgaatcacttgaaactcctcgtcgtatcctgttaatggtgaag

SEQ ID NO: 317328 - DNA, 75 bp, synthetic construct
  source 1..75: mol_type = other DNA
ggtgtttccggtggtgaagagggcgcgttgaaaggtccttccattatgccgggtgggcagaaggaagcctatgaa

SEQ ID NO: 317329 - DNA, 75 bp, synthetic construct
  source 1..75: mol_type = other DNA
acctgtctaacgaagagctggcgaccatcttcaccgagtggaatgaaggcgagctgagcagctacctgatcgaca

SEQ ID NO: 317330 - DNA, 75 bp, synthetic construct
  source 1..75: mol_type = other DNA
cttggttccactgccattgctaatttgcgcggaaaacagtctgtattgtttaaagtgaatgaatccggcactgaa

SEQ ID NO: 317331 - DNA, 75 bp, synthetic construct
  source 1..75: mol_type = other DNA
gttgatgtaaaaattactaaatccaaaatggcgccggttaaatggaatggtgaagaacaactggctcttggccct

SEQ ID NO: 317332 - DNA, 75 bp, synthetic construct
  source 1..75: mol_type = other DNA
tcgctaacctgctgctggctccgtacttcaaacaaattgccgacgactaccagcaagctctgcgtgatgttgtag

SEQ ID NO: 317333 - DNA, 75 bp, synthetic construct
  source 1..75: mol_type = other DNA
ttagttgctccgattctgaagcagattgctgcggttgctgaagacggtgagccatgtgtcacctatatcggtgct

SEQ ID NO: 317334 - DNA, 75 bp, synthetic construct
  source 1..75: mol_type = other DNA
catcgagaaagttcgtcgtgcgctgtatctgggtaaaatcgtttcttacgctcagggcttctctcagctgcgtgc

SEQ ID NO: 317335 - DNA, 75 bp, synthetic construct
  source 1..75: mol_type = other DNA
ttagttgctccgattctgaagcagattgctgcggtagctgaagacggcgagccatgtgtgacctatatcggtgct

SEQ ID NO: 317336 - DNA, 75 bp, synthetic construct
  source 1..75: mol_type = other DNA
ctggttgcgcctatcctgactaaaatcgctgccgtggcagaagacggcgagccatgcgttacttatattggtgcc

SEQ ID NO: 317337 - DNA, 75 bp, synthetic construct
  source 1..75: mol_type = other DNA
ggcgcagcgtgactacttcggtgcgcatacgtataaacgtacagataaagaaggtgtgttccataccgaatggat

SEQ ID NO: 317338 - DNA, 75 bp, synthetic construct
  source 1..75: mol_type = other DNA
agtttgttgaatcccttgaaacaccacgccgtatcctgttgatggtgaaggctggggctggtacagatagcgcca

SEQ ID NO: 317339 - DNA, 75 bp, synthetic construct
  source 1..75: mol_type = other DNA
cgtcagtatcgtcaggtacgttatgaagttgggctggcatggggcgtttcgtcagtgaaacctgcgcatagctgt

SEQ ID NO: 317340 - DNA, 75 bp, synthetic construct
  source 1..75: mol_type = other DNA
tggagcgtcaccacgggcaggtggaatatgtggctgacccggcggcgctgcagtacctgcagagtctggaatacg

SEQ ID NO: 317341 - DNA, 75 bp, synthetic construct
  source 1..75: mol_type = other DNA
gagttaagtggtgcttctgttccgtttgattttgatgttcacgccatgatttcctgtgatgatgcgcctgcgctg

SEQ ID NO: 317342 - DNA, 75 bp, synthetic construct
  source 1..75: mol_type = other DNA
gctgatgattggtatgcctgattacgacaactatgtcgaacatatgcgggttaaccatcccgatcaaacgccgat

SEQ ID NO: 317343 - DNA, 75 bp, synthetic construct
  source 1..75: mol_type = other DNA
tcaggctttgaagaacaggaaattatagagcaatcatacctgttttgtgccgggttttacattaaataccagcct

SEQ ID NO: 317344 - DNA, 75 bp, synthetic construct
  source 1..75: mol_type = other DNA
attaataactggcaaagcaaatatgaccagcttcgtaaggaaagagaggcttacgctgctgtcagtgagaaaatt

SEQ ID NO: 317345 - DNA, 75 bp, synthetic construct
  source 1..75: mol_type = other DNA
atgcagcgggatttgtcctgattttaatttgcgttattctctgggggatttatgtggcggtcagggcgctgataa

SEQ ID NO: 317346 - DNA, 75 bp, synthetic construct
  source 1..75: mol_type = other DNA
caatatcctgctgggcaaagcggaagtggtggtggtcaacgagaagtacggcctgcgcgtgctggagtttaacac

SEQ ID NO: 317347 - DNA, 75 bp, synthetic construct
  source 1..75: mol_type = other DNA
ttccaggaggtatgggaacgtatgaaggttaacgagaagattaaaaatctgttttttctgtctcgttgctacggt

SEQ ID NO: 317348 - DNA, 75 bp, synthetic construct
  source 1..75: mol_type = other DNA
gaaagccatcagccagtatatcgatggtgtacgccagcagattgaacctgtgatggattatttcgaacgcctggt

SEQ ID NO: 317349 - DNA, 75 bp, synthetic construct
  source 1..75: mol_type = other DNA
gccagccgtgcaatgcaacggattgttgattccgcctggagatttaaggcgaagactctgttggctggtgtaacg

SEQ ID NO: 317350 - DNA, 75 bp, synthetic construct
  source 1..75: mol_type = other DNA
cctgctgggcaaagcggaagtagtggtggtcaacgagaagtacggcctgcgcgtgctggagtttaacacccgcga

SEQ ID NO: 317351 - DNA, 75 bp, synthetic construct
  source 1..75: mol_type = other DNA
ccggggattttggcctcaccgatgacgttgcgcctgtcacgaaatccgccgacgccgaaacgctggtcacccgcc

SEQ ID NO: 317352 - DNA, 75 bp, synthetic construct
  source 1..75: mol_type = other DNA
atagaggagcgcgatccgcgtctggtgagctgccatatcgaagtcgcgtgcgatgtcgataacccgctggtaggg

SEQ ID NO: 317353 - DNA, 75 bp, synthetic construct
  source 1..75: mol_type = other DNA
aaaacgcggcgtggcgattcgtgaagcgttcaaccagatacaccgttacagcaaagagagttttaacagcgaaaa

SEQ ID NO: 317354 - DNA, 75 bp, synthetic construct
  source 1..75: mol_type = other DNA
ctttattgataaagtcttctttgtggtcgacaggaaagacctcgattaccagaccatgaaggaatatcagcgttt

SEQ ID NO: 317355 - DNA, 75 bp, synthetic construct
  source 1..75: mol_type = other DNA
gctgaatgttctggtgaactacagcgtttttgacagtagtcagacgctactggtgatgcgaccgtaccagattgc

SEQ ID NO: 317356 - DNA, 75 bp, synthetic construct
  source 1..75: mol_type = other DNA
cgctggatattctgattacgtggctgcaggacaatatcgactgcgaatcgggaattatcttcgacaacgatgagg

SEQ ID NO: 317357 - DNA, 75 bp, synthetic construct
  source 1..75: mol_type = other DNA
aaatggtcgcgcctgtagacggcaccattggtaaaatctttgaaaccaaccacgcgttctctatcgaatctgata

SEQ ID NO: 317358 - DNA, 75 bp, synthetic construct
  source 1..75: mol_type = other DNA
tttatttccgtaaaatctcagtcggcgatgctggccaacgttcgggaacagcttcagaacctcaatggtgtggtg

SEQ ID NO: 317359 - DNA, 75 bp, synthetic construct
  source 1..75: mol_type = other DNA
gctccaggattatcgttctgcctataacgatattcgcgactggcagcgccgtgagaaagaagctgagaaaaaaga

SEQ ID NO: 317360 - DNA, 75 bp, synthetic construct
  source 1..75: mol_type = other DNA
aactggaacaacggttccctgaccctgccaatattgaaagtgaaaaagagaagaaagacttcgttaaactgtttg

SEQ ID NO: 317361 - DNA, 75 bp, synthetic construct
  source 1..75: mol_type = other DNA
cgacaaatagcaaggacgcactaccgcgtaagctagcgtgggggcaaatggtcacgttgatcgcgctggctatcg

SEQ ID NO: 317362 - DNA, 75 bp, synthetic construct
  source 1..75: mol_type = other DNA
cgattcgtctccctgctgaacgcaagattcaggattatcgttctgcctataacgatattcgtgactggcagcgcc

SEQ ID NO: 317363 - DNA, 75 bp, synthetic construct
  source 1..75: mol_type = other DNA
aaagcctattatgcgacgtttaaacggttacaagaggaagcagctaataaatcggctacctataaaccgctgcgt

SEQ ID NO: 317364 - DNA, 75 bp, synthetic construct
  source 1..75: mol_type = other DNA
gttgataaaagaagaaaatctcaatgaagaagcgaccaaacgctatattcgcacgtctttaaaacgcgaatacgc

SEQ ID NO: 317365 - DNA, 75 bp, synthetic construct
  source 1..75: mol_type = other DNA
attgctggtttacaccggccgtgaagtgtcggtggtacaggcgcgtcccatttggttcagttacgcctttccggt

SEQ ID NO: 317366 - DNA, 75 bp, synthetic construct
  source 1..75: mol_type = other DNA
tttacgtatgagcacgagagggcttctgttgacttttgtatgctatggaatataattaaaggttttttgttttta

SEQ ID NO: 317367 - DNA, 75 bp, synthetic construct
  source 1..75: mol_type = other DNA
aggtagtggtactctgtgtccttcgaaccctaacattcgaatcattgatggtgcgagtttctatgagcttgtcac

SEQ ID NO: 317368 - DNA, 75 bp, synthetic construct
  source 1..75: mol_type = other DNA
gtaaaaaatctactgctgaatctatcgtatacagtgcgctggagaccctggctcagcgctctggtaaatctgaac

SEQ ID NO: 317369 - DNA, 75 bp, synthetic construct
  source 1..75: mol_type = other DNA
gtactggtgtggttggagggatgatcactgctacgatactggcaatcttttatattcctctcttctatatgttaa

SEQ ID NO: 317370 - DNA, 75 bp, synthetic construct
  source 1..75: mol_type = other DNA
aggaagcggtggaaggcgttgcaacgtcacaggccgacattatcgaccgttttaatgtgctggaaacccgccatc

SEQ ID NO: 317371 - DNA, 75 bp, synthetic construct
  source 1..75: mol_type = other DNA
gatgacgccagtttctcccgtattcaggaagcggtggaaggcgtcgcaacgtcacaggccgacattatcgaccgt

SEQ ID NO: 317372 - DNA, 75 bp, synthetic construct
  source 1..75: mol_type = other DNA
atgcctgccgggtttacccactttctactggtaaccagtaacaacatgaaatcattaaccacggaaactgctctg

SEQ ID NO: 317373 - DNA, 75 bp, synthetic construct
  source 1..75: mol_type = other DNA
atgcctgccgggtttacccactttcaactggtaaccagtaacaacatgaaatcattaaccacggaaacagctctg

SEQ ID NO: 317374 - DNA, 75 bp, synthetic construct
  source 1..75: mol_type = other DNA
aagattttgatcaacaattgttctggcgcacgttttcaggaggagtcttccatcgacgtatctctgtgaacagcg

SEQ ID NO: 317375 - DNA, 75 bp, synthetic construct
  source 1..75: mol_type = other DNA
cactggatattctgattacgtggctgcaggacaatattgactgcgacccggggattatcttcgacaacgatgagg

SEQ ID NO: 317376 - DNA, 75 bp, synthetic construct
  source 1..75: mol_type = other DNA
atgcctgccgggtttacccactttcgactggtaaccagtaacaacatgaaatcattaaccacggaaacggctctg

SEQ ID NO: 317377 - DNA, 75 bp, synthetic construct
  source 1..75: mol_type = other DNA
atgcctgccgggtttacccactttccactggtaaccagtaacaacatgaaatcattaaccacggaaaccgctctg

SEQ ID NO: 317378 - DNA, 75 bp, synthetic construct
  source 1..75: mol_type = other DNA
tccttttttcaataaaaattcaatatcctgaaaaatggtataaaggcattgcttaccgtttgctctccgtgctgg

SEQ ID NO: 317379 - DNA, 75 bp, synthetic construct
  source 1..75: mol_type = other DNA
ttatgacgccacgaaaaccttcggtaacatcgtcacattccgtaacctggagcaggcaaccatcgatgccatcac

SEQ ID NO: 317380 - DNA, 75 bp, synthetic construct
  source 1..75: mol_type = other DNA
ggcagtaagcagcgtggatgccgcgaaagcctattacgcgacgtttaaacggttacaagaggaagccgctaataa

SEQ ID NO: 317381 - DNA, 75 bp, synthetic construct
  source 1..75: mol_type = other DNA
tgataagtacatcaaagctgagcaaacaggcgacagctatcagagcgaatcggacctggaacgtgaactgattca

SEQ ID NO: 317382 - DNA, 75 bp, synthetic construct
  source 1..75: mol_type = other DNA
tcacggagcaatatctggacaacccgagtgatggcattctggataagacccgtaaaatccatatcgactatattt

SEQ ID NO: 317383 - DNA, 75 bp, synthetic construct
  source 1..75: mol_type = other DNA
ggaccttcttaatcagggttatgagtttatctccgttaagtcaccgactgcgatgctggcgaatgtgcgggacca

SEQ ID NO: 317384 - DNA, 75 bp, synthetic construct
  source 1..75: mol_type = other DNA
tcttcgtggtcgacaggaaagacctcgattaccagaccatgaaggaatatcagcgtttttcgccagacagcgtca

SEQ ID NO: 317385 - DNA, 75 bp, synthetic construct
  source 1..75: mol_type = other DNA
agcgaagaactggtcaaaaccggaaagcggtgggtatatctggcacaccacgggttccggtaaaaccctgaccag

SEQ ID NO: 317386 - DNA, 75 bp, synthetic construct
  source 1..75: mol_type = other DNA
agcgaagaactggtcaaaaccggaaagcggtgggtatatctggcacactaccggttctggtaaaaccctcaccag

SEQ ID NO: 317387 - DNA, 75 bp, synthetic construct
  source 1..75: mol_type = other DNA
actacagcgtttttgacagtagtcagacgctactggtgatgcgaccgtaccagattgccgccaccgagcgcattc

SEQ ID NO: 317388 - DNA, 75 bp, synthetic construct
  source 1..75: mol_type = other DNA
tttatttccgtaaaatcacagtcggcaatgctgtctaatgttcgggaacagcttcagagcctcaatggtgtgatg

SEQ ID NO: 317389 - DNA, 75 bp, synthetic construct
  source 1..75: mol_type = other DNA
aacaaaattatcgtcaccactattcagaaacttaataacctgatgaaagcagaaagcgacctgcctgtatacaat

SEQ ID NO: 317390 - DNA, 75 bp, synthetic construct
  source 1..75: mol_type = other DNA
atgaacagggagccgcccggtttttgtctgctctcgaaaactggaattgcccgtggtctggcctggtatctccct

SEQ ID NO: 317391 - DNA, 75 bp, synthetic construct
  source 1..75: mol_type = other DNA
cgtaaaatccatatcgactatatctgtgatttcacgtttgatgacggtcgtctggaaaacatctatctggtagat

SEQ ID NO: 317392 - DNA, 75 bp, synthetic construct
  source 1..75: mol_type = other DNA
aaagcttattacacgacgtttaaaatgctacaggaagaagcagagaagaaatctggcagctataaacgccttcgg

SEQ ID NO: 317393 - DNA, 75 bp, synthetic construct
  source 1..75: mol_type = other DNA
atattcccggtggcaactctccggtaactccggatggttgggttatggtgccgaaggagccaactcaggccatga

SEQ ID NO: 317394 - DNA, 75 bp, synthetic construct
  source 1..75: mol_type = other DNA
tgcttcagaagaatgctaataacacaccagaatgcgacaacctagttacagagttagcaatgtgggttaaacggt

SEQ ID NO: 317395 - DNA, 75 bp, synthetic construct
  source 1..75: mol_type = other DNA
ggtatttcctggcggggaatgtctgcacaaaacagagctgcaataccacataccaaaactcaccgcgtgcaaaac

SEQ ID NO: 317396 - DNA, 75 bp, synthetic construct
  source 1..75: mol_type = other DNA
gtgagaaagaagctgagaaaaaagagaaatcaaccactgactgggatgacgtggtttttgaggtcgatttgctga

SEQ ID NO: 317397 - DNA, 75 bp, synthetic construct
  source 1..75: mol_type = other DNA
gatgtcacaattctggtcaacggcctgccactggtgcaaatcgaactcaaaaagcgcggcgtggcgattcgtgaa

SEQ ID NO: 317398 - DNA, 75 bp, synthetic construct
  source 1..75: mol_type = other DNA
gaccttctcatcgtggtgggaatgttcttaaccggctttgatgccccgacgctgaacactctgtttgttgacaaa

SEQ ID NO: 317399 - DNA, 75 bp, synthetic construct
  source 1..75: mol_type = other DNA
accatgaactgggcgaaatcagacaacacgctgattaaagacctcaaagactttaccgccacctttttccagaaa

SEQ ID NO: 317400 - DNA, 75 bp, synthetic construct
  source 1..75: mol_type = other DNA
gatctgttaattgtcgtggggatgtttttaaccggcttcgatgctccaacattgaacacgctattcgtcgataaa

SEQ ID NO: 317401 - DNA, 75 bp, synthetic construct
  source 1..75: mol_type = other DNA
acaagctcgccgggttgatagcggccctttctcctgccgggcggcgtcggatgaccgtcgacatagcgaagaaac

SEQ ID NO: 317402 - DNA, 75 bp, synthetic construct
  source 1..75: mol_type = other DNA
acgccgtatcaggcgcgaaagccacagccgctcagggcaaaaagaggtcgaataaaacggacgatgtttcagaag

SEQ ID NO: 317403 - DNA, 75 bp, synthetic construct
  source 1..75: mol_type = other DNA
gacaaccggcagaaactgagccttattcagacgcagcttgcacaactaatggtacctgccacagaaaaccatact

SEQ ID NO: 317404 - DNA, 75 bp, synthetic construct
  source 1..75: mol_type = other DNA
atctgaccggtattttcatgacctggcgtagagcgcgtggctttattaaacaagagaaagtcgttctcgcagaat

SEQ ID NO: 317405 - DNA, 75 bp, synthetic construct
  source 1..75: mol_type = other DNA
ttccactcaccattttaattgctgtttgtgtgccgggtaatcaggtgctgccgtttggcgaccttgccaccatcg

SEQ ID NO: 317406 - DNA, 75 bp, synthetic construct
  source 1..75: mol_type = other DNA
ggctcaaggataaaccatcaccaaaaagcgccgaagttgaatatccacaacgtcagcttttgggctttaccgaag

SEQ ID NO: 317407 - DNA, 75 bp, synthetic construct
  source 1..75: mol_type = other DNA
gaacagcagcaggtttataccctggcacgcattgaaaatcagattgttgacgatctgcgtgacagactcaatgag

SEQ ID NO: 317408 - DNA, 75 bp, synthetic construct
  source 1..75: mol_type = other DNA
cgctttacaacatgtttttactacgggaaaaggtgagtgagctatcagcgcggattgactggttacacgatgact

SEQ ID NO: 317409 - DNA, 75 bp, synthetic construct
  source 1..75: mol_type = other DNA
ggtggacggaagcaacttttgtattcagcaagagaacgcgcagttgatgagcttcagatgtatctgcctgggatc

SEQ ID NO: 317410 - DNA, 75 bp, synthetic construct
  source 1..75: mol_type = other DNA
agccagtgcgaaataagaaagggcggataaagcgggaaatgtttgcgaaattacgcacaaaccgatttatgaaag

SEQ ID NO: 317411 - DNA, 75 bp, synthetic construct
  source 1..75: mol_type = other DNA
atgaatagtctgttaatactcctttacgttgttgtatggcgtgtctgcaccattcttcgggtaatcgcaccagtg

SEQ ID NO: 317412 - DNA, 75 bp, synthetic construct
  source 1..75: mol_type = other DNA
atggacgtttacgaagatctatacctccagacaaacacccgtactttttattttctgaaaaacggcgtcgtatat

SEQ ID NO: 317413 - DNA, 75 bp, synthetic construct
  source 1..75: mol_type = other DNA
tcccactcaccattttaattgctgtttgtgtgccgggtaatcaggtgctgccgtttggcgatcttgccaccatcg

SEQ ID NO: 317414 - DNA, 75 bp, synthetic construct
  source 1..75: mol_type = other DNA
atcagccgcgttttgccggtgatgacctgccgtctaacccggtagcttgtgcgctagcgattgctgacaagatgg

SEQ ID NO: 317415 - DNA, 75 bp, synthetic construct
  source 1..75: mol_type = other DNA
cggcaccgttcaatggtttgcggctccgcgtcgtctggcgctgaaagtggctaacctggcggaagcccagcctga

SEQ ID NO: 317416 - DNA, 75 bp, synthetic construct
  source 1..75: mol_type = other DNA
gcgtcacgatggcgaagcggaagacgtagccgtcgcgctgaatgagcagtatcagccgcgctttgccggtgatga

SEQ ID NO: 317417 - DNA, 75 bp, synthetic construct
  source 1..75: mol_type = other DNA
tcgtgaaatcgaaaaacgtggcccggcaattgctcaggcgttcgatgctgaaggtaaaccgagtaaagcggcaga

SEQ ID NO: 317418 - DNA, 75 bp, synthetic construct
  source 1..75: mol_type = other DNA
cctgccgtccaacccggtagcctgtgcgttggcgatcgctgacaagatggatactctggcgggtatcttcggtat

SEQ ID NO: 317419 - DNA, 75 bp, synthetic construct
  source 1..75: mol_type = other DNA
cggaagaaattaaactggcgatgcaggtggtcgtattgcgcgacaagctggagccgtacttcgctgaaggtcgtt

SEQ ID NO: 317420 - DNA, 75 bp, synthetic construct
  source 1..75: mol_type = other DNA
atgtgaggatggcattatttttaaccatttcgattcgtcatttgaatcatggttgttttcttcctgttccgacgt

SEQ ID NO: 317421 - DNA, 75 bp, synthetic construct
  source 1..75: mol_type = other DNA
tctcaaagcttgctcactgtaataagagcggtaataaaaactttagatccagatgagtttaggaatgtttctctt

SEQ ID NO: 317422 - DNA, 75 bp, synthetic construct
  source 1..75: mol_type = other DNA
tcgcggcgggctatcgtcaaccgttatgcttctggctaccggaaagtgcgttggcaacagggtatcgtcggcagg

SEQ ID NO: 317423 - DNA, 75 bp, synthetic construct
  source 1..75: mol_type = other DNA
atggtcttcgagttcaccgacactcagggcgttatggggatgcactacgcacgtcacgatggcgaagcggaagat

SEQ ID NO: 317424 - DNA, 75 bp, synthetic construct
  source 1..75: mol_type = other DNA
tggtcgctacctcgctggcaaaactgccgatcccgaaactgatgcgttggggcgcatctgacgtgcattttgtgc

SEQ ID NO: 317425 - DNA, 75 bp, synthetic construct
  source 1..75: mol_type = other DNA
tcctttgctgcgaactttactgcggagctggataacgctggcctcgcacacggcaccgttcaatggtttgctgct

SEQ ID NO: 317426 - DNA, 75 bp, synthetic construct
  source 1..75: mol_type = other DNA
aatgaaaggggaattacgactggcatcaacgatgaccaggaatgcctgtgtggtactgcaattcagactaacgga

SEQ ID NO: 317427 - DNA, 75 bp, synthetic construct
  source 1..75: mol_type = other DNA
ttgtggcaggtctgtgacaacggtgattatcagtccgggcgcgtcctgcaaagcgtcggctgcctgctgccggaa

SEQ ID NO: 317428 - DNA, 75 bp, synthetic construct
  source 1..75: mol_type = other DNA
atgaaatcattaaccacggaaaccgcactggatattctgattgcgtggctgcaggacaatatcgactgcgaatcc

SEQ ID NO: 317429 - DNA, 75 bp, synthetic construct
  source 1..75: mol_type = other DNA
tataaaggtttagatgagttggtatcaccgaaacatagccgatttaaggattactgcgcgtactttgttaatata

SEQ ID NO: 317430 - DNA, 75 bp, synthetic construct
  source 1..75: mol_type = other DNA
ctgccctgtattgaacaggcgaggaaggatatccataccctgcgccagttgcagcttctgcaacagaaccggtga

SEQ ID NO: 317431 - DNA, 75 bp, synthetic construct
  source 1..75: mol_type = other DNA
ggaattatctttgacaacaatgaggataaaacggattcagcagcactgtttccctgtatcgaacaggccagagag

SEQ ID NO: 317432 - DNA, 75 bp, synthetic construct
  source 1..75: mol_type = other DNA
tggtaacttgtcagttggatgaacaacaaatgtcatcactgctttatgagagagatgatttaagtgccattgatt

SEQ ID NO: 317433 - DNA, 75 bp, synthetic construct
  source 1..75: mol_type = other DNA
aaaacattcgaatatactgaaaaaacactcaaggaatatcggaacgagccaaagaagactcgacacgatattgtg

SEQ ID NO: 317434 - DNA, 75 bp, synthetic construct
  source 1..75: mol_type = other DNA
gttcctgcgccagtggtgagtgtggcgcgtcaggtatccacgctgccgcagcacaacgaggcaaatacagaactg

SEQ ID NO: 317435 - DNA, 75 bp, synthetic construct
  source 1..75: mol_type = other DNA
tgaccggcgggagtgttctggcgctgtcttccacgttcggtgcgctgtcactgacgctcgggctgattgcggggc

SEQ ID NO: 317436 - DNA, 75 bp, synthetic construct
  source 1..75: mol_type = other DNA
ttatggtggagtggtaaaacagaccgtagcggcacgcgtaaacgtgcgaacgggtgaggtcgattcgatactaga

SEQ ID NO: 317437 - DNA, 75 bp, synthetic construct
  source 1..75: mol_type = other DNA
gaaaaactaattaaagataatatgaacgatgattcatcttataaacatgtgtcaacggtatatcatctggttttg

SEQ ID NO: 317438 - DNA, 75 bp, synthetic construct
  source 1..75: mol_type = other DNA
atacatttcagagtaattttagtggttgggatggttcttatcgtccattggaaaaactaattaaagataatatga

SEQ ID NO: 317439 - DNA, 75 bp, synthetic construct
  source 1..75: mol_type = other DNA
cgctggatattctgattgtgtggctgcaggacaatatcgactgcgaatcgggaattatctttgacaacgatgagg

SEQ ID NO: 317440 - DNA, 75 bp, synthetic construct
  source 1..75: mol_type = other DNA
acacttcaggaggcaaaagcagggctagccctatactttggtgtcaatgaagaaaatattcaaataactatacaa

SEQ ID NO: 317441 - DNA, 75 bp, synthetic construct
  source 1..75: mol_type = other DNA
aacgcacaagtcaaaaacaaaattaaacgagtggatcgtctgcttggtaatgaattgcttcatcatgatagccat

SEQ ID NO: 317442 - DNA, 75 bp, synthetic construct
  source 1..75: mol_type = other DNA
aatcattaaccacggaaacagcgctggatattctgattgcgtggctgcaggacaatattgactgcgaatcaggga

SEQ ID NO: 317443 - DNA, 75 bp, synthetic construct
  source 1..75: mol_type = other DNA
agtttacccggcgcgccgaactggaaacatcactccatgccgttgatttagcacagatgttcagtgcggcctggg

SEQ ID NO: 317444 - DNA, 75 bp, synthetic construct
  source 1..75: mol_type = other DNA
atccttcaggcatcctccaccagcacggcgaatcgctatgccagaacagtaaaacttcgactaatgacgctggat

SEQ ID NO: 317445 - DNA, 75 bp, synthetic construct
  source 1..75: mol_type = other DNA
attcttcaggcgtcctccacgagtacggcaaatcgttatgcccgaaccttaaggctgcgattgatgaccctggat

SEQ ID NO: 317446 - DNA, 75 bp, synthetic construct
  source 1..75: mol_type = other DNA
acggattcagcagcactgttgccctgtatcgaacaggccagagaggataccgataaacataaactctttacaaaa

SEQ ID NO: 317447 - DNA, 75 bp, synthetic construct
  source 1..75: mol_type = other DNA
atcattaaccactgaaacagcgctggatatcctcattgcgtggctgcaggacaatatcgactgcgaatcgggaat

SEQ ID NO: 317448 - DNA, 75 bp, synthetic construct
  source 1..75: mol_type = other DNA
atagaacggattcggcagcactgttgccctgtatcgaacaggccagagaggatgtccgtaccctgcgtcagctac

SEQ ID NO: 317449 - DNA, 75 bp, synthetic construct
  source 1..75: mol_type = other DNA
atgaaatcattaaccacggaaaccgcactggatattctgattgcgtggctccaggacaatatcgactgcgaatcg

SEQ ID NO: 317450 - DNA, 75 bp, synthetic construct
  source 1..75: mol_type = other DNA
atcattaaccacggaaacagcgctggatattctgattgcgtggctgcagggcaatatcgactgcgaatcgggaat

SEQ ID NO: 317451 - DNA, 75 bp, synthetic construct
  source 1..75: mol_type = other DNA
ataagacggattcagcagcactgttgccctgcatcgaacaggcccgggaggatgtccgtgctcttcgtcatctgc

SEQ ID NO: 317452 - DNA, 75 bp, synthetic construct
  source 1..75: mol_type = other DNA
gaaggaaaatacagatgcgttggtgaagatggaatgccatcatgggcagatattccaccaccaacacatgaggaa

SEQ ID NO: 317453 - DNA, 75 bp, synthetic construct
  source 1..75: mol_type = other DNA
aaatacagaggtgtcatcgacggaatgccagcatggattgatattccaccaccaactcatgaggaacaaattgcc

SEQ ID NO: 317454 - DNA, 75 bp, synthetic construct
  source 1..75: mol_type = other DNA
gcgaagcgtttctgcatgcctttaccgggcaacctctgccggatgatgccgatctgcgtaaagagcgcagcgacg

SEQ ID NO: 317455 - DNA, 75 bp, synthetic construct
  source 1..75: mol_type = other DNA
gctggattatctggaagcactggacctggtggatacgtccagtgcgccagatattgaatggcctacacctccggc

SEQ ID NO: 317456 - DNA, 75 bp, synthetic construct
  source 1..75: mol_type = other DNA
gctggattatctggaagcactggatctggtggatacatccagtgcgccagatattgaatggcctactcctccggc

SEQ ID NO: 317457 - DNA, 75 bp, synthetic construct
  source 1..75: mol_type = other DNA
gctggattatctggaagcactggaactggtggatacttccagtgcgccagatattgaatggcctactcctccggc

SEQ ID NO: 317458 - DNA, 75 bp, synthetic construct
  source 1..75: mol_type = other DNA
gttgtgataccggtacgctggcaatgttcaacgtgtcagcgctggtattgtggcgctgttccctggtgctggtcc

SEQ ID NO: 317459 - DNA, 75 bp, synthetic construct
  source 1..75: mol_type = other DNA
tggcgctgttccctggtgctggtccccccccgtgaatcttcctgcgtcccctccggtcagccggcactttgtcat

SEQ ID NO: 317460 - DNA, 75 bp, synthetic construct
  source 1..75: mol_type = other DNA
tccgatgcttgaacagatggtgaaggaggcggtaagccatatccctgttccgcgtgacggtcgtgactacgatcc

SEQ ID NO: 317461 - DNA, 75 bp, synthetic construct
  source 1..75: mol_type = other DNA
atgagcaccagtaataacatgggtagaaccacacaggctcaaccaaagcccggtgtaaatgtctgcatagtaaaa

SEQ ID NO: 317462 - DNA, 75 bp, synthetic construct
  source 1..75: mol_type = other DNA
aggatggtaatgtgatttatgtgaagaagcgtgtgaatgcgctgggtgcggtggtcacctatgcatacgcgacaa

SEQ ID NO: 317463 - DNA, 75 bp, synthetic construct
  source 1..75: mol_type = other DNA
cgtatcacgggactgtgttgattgatggtaaggaagtcaggatcgctaatcccaaacaggctattgatcatggca

SEQ ID NO: 317464 - DNA, 75 bp, synthetic construct
  source 1..75: mol_type = other DNA
gctggattatctggaagcactggagctggtggatacctccagtgcgccagatattgaatggcctacacctccggc

SEQ ID NO: 317465 - DNA, 75 bp, synthetic construct
  source 1..75: mol_type = other DNA
tcgtgcgagagtttaatattcaatgttgaagaagaaaaaaaacttgaaaatataactatggatgaaataatttta

SEQ ID NO: 317466 - DNA, 75 bp, synthetic construct
  source 1..75: mol_type = other DNA
acgtattatgagtgaggaaggactcactcctcgcgaagccacacgtaaatcgatggggcaaatccagggcgcact

SEQ ID NO: 317467 - DNA, 75 bp, synthetic construct
  source 1..75: mol_type = other DNA
ccggctctgtgtgccacgctacttaagccactgaaaaaaggtgagcatcacgggcaaaaaggcttttttgcctag

SEQ ID NO: 317468 - DNA, 75 bp, synthetic construct
  source 1..75: mol_type = other DNA
ttaaaaagcagctaaaatcatctattttgtctaacgctgatttgaataaaaaagcccgtttaatggactccattt

SEQ ID NO: 317469 - DNA, 75 bp, synthetic construct
  source 1..75: mol_type = other DNA
cttgcatgcaacgctgttaaaaaaaattgagactgttcctgacccaatatctagtaattatattttagaattaaa

SEQ ID NO: 317470 - DNA, 75 bp, synthetic construct
  source 1..75: mol_type = other DNA
taatgagtccaaggtactcttacgagagtctataaaactagacagatatgatgtactgacaagatctttaaggta

SEQ ID NO: 317471 - DNA, 75 bp, synthetic construct
  source 1..75: mol_type = other DNA
gtgcagttctacctgccggaaggtcgctggacacacctgtggcacaacgatgagctcgacggtagtcgctggcat

SEQ ID NO: 317472 - DNA, 75 bp, synthetic construct
  source 1..75: mol_type = other DNA
tggtcaatcatccccagtgtgtctcttttgaagtgggatcggagaaagtctccaaagtgcagttcagcgttgaga

SEQ ID NO: 317473 - DNA, 75 bp, synthetic construct
  source 1..75: mol_type = other DNA
gacgtttgaccttgaggccgctccatcgggtaacgatgcccccgcctggctgaccgaaccggaacctgaaatcaa

SEQ ID NO: 317474 - DNA, 75 bp, synthetic construct
  source 1..75: mol_type = other DNA
cttaaccatattcctgacaccactgagcaattcatggtcagatctgaaattaatggagttgaagccaaaaaataa

SEQ ID NO: 317475 - DNA, 75 bp, synthetic construct
  source 1..75: mol_type = other DNA
gtttgaagtgggatcggagaaagtctccaaagtacagttcagcgttgagggtgaatatctcgaatactttgttat

SEQ ID NO: 317476 - DNA, 75 bp, synthetic construct
  source 1..75: mol_type = other DNA
cagtggtttaacggttgtgatccacagaaaatgcataaccattatgcatacatctacaacgaactggtatggaac

SEQ ID NO: 317477 - DNA, 75 bp, synthetic construct
  source 1..75: mol_type = other DNA
atgtgcgtccgatgcttgagcagatggtgaaagaggccgtaagccatatccctgctccgcgtgatggtcgtgatt

SEQ ID NO: 317478 - DNA, 75 bp, synthetic construct
  source 1..75: mol_type = other DNA
cttcggtaaacagtatcagttgatccccggtgtggcgctgacgccggagcagatggcgctgctgacgtcagatat

SEQ ID NO: 317479 - DNA, 75 bp, synthetic construct
  source 1..75: mol_type = other DNA
atcaagtggcagtggcttcattaggtctattggcaaaggatattggcgttgcagctatttcctttatgcgtcgca

SEQ ID NO: 317480 - DNA, 75 bp, synthetic construct
  source 1..75: mol_type = other DNA
atttctgcggaggcagtgagtggtgacggacagattttatcccgggatcgcctgacggttcatgtgaccgacgat

SEQ ID NO: 317481 - DNA, 75 bp, synthetic construct
  source 1..75: mol_type = other DNA
ttactgctgaacaagtcgaatcattaactaaaattattaatgagataatatcaggtagtgaaaaaagtgttaatg

SEQ ID NO: 317482 - DNA, 75 bp, synthetic construct
  source 1..75: mol_type = other DNA
tctttaataaagcccgtggcatgctgatggttgtggctgacattgcccggcgcggacggggcggaaatacacgtc

SEQ ID NO: 317483 - DNA, 75 bp, synthetic construct
  source 1..75: mol_type = other DNA
ggcggggatataaaggtacacggcagtgatgtggtggcgaaaaaggatatcagcctgaccggtcagtctgttgcg

SEQ ID NO: 317484 - DNA, 75 bp, synthetic construct
  source 1..75: mol_type = other DNA
taaagggcgtctgattgccgggcggcatatcctgctggatacggcagcgctgaccagccgggaagggctgatttc

SEQ ID NO: 317485 - DNA, 75 bp, synthetic construct
  source 1..75: mol_type = other DNA
atgtttaaatccttattaatcagtaagatgtatggtcgccacagtgcccaaattgctgaaatcgctgaaagcgag

SEQ ID NO: 317486 - DNA, 75 bp, synthetic construct
  source 1..75: mol_type = other DNA
atgtgcaataacccacgtccggacgcagcagccgccgcgctcactacgctgatgcacgcgctgattgatatttca

SEQ ID NO: 317487 - DNA, 75 bp, synthetic construct
  source 1..75: mol_type = other DNA
tgaaaaccgcaatgtcagataacactgccgggctgatcactgccctgcgggggctggcaatcaccggcgggcaac

SEQ ID NO: 317488 - DNA, 75 bp, synthetic construct
  source 1..75: mol_type = other DNA
acagacgctggttaaccgtgacagcggggagcacggggggatccgggcgcagggggatctgtcccttctcagcgg

SEQ ID NO: 317489 - DNA, 75 bp, synthetic construct
  source 1..75: mol_type = other DNA
ggaaaatactcagtcagggcgatttgacactgaatactgcggtgatccgcaatcagcacgggctgttgcaggcag

SEQ ID NO: 317490 - DNA, 75 bp, synthetic construct
  source 1..75: mol_type = other DNA
ccgcgtgatggtcgtgattatgatccggatgtactgcagcaggcggtgaatgatgcggtcgggaaaataccggta

SEQ ID NO: 317491 - DNA, 75 bp, synthetic construct
  source 1..75: mol_type = other DNA
caccccggatgatgtgcatccgatgcttgaacagatggtgaaggaggcggtaagccatattcctgttccgcgtga

SEQ ID NO: 317492 - DNA, 75 bp, synthetic construct
  source 1..75: mol_type = other DNA
cggcagacggtaaaagtatcaccccggatgatgtgcgtccgatgcttgaacagatggtgaaggaggcggtaagcc

SEQ ID NO: 317493 - DNA, 75 bp, synthetic construct
  source 1..75: mol_type = other DNA
gatgtgcgtccgatgcttgaacagatggtggaaggaggcggtaagccatattcctgttccgcgtgatggtcgtga

SEQ ID NO: 317494 - DNA, 75 bp, synthetic construct
  source 1..75: mol_type = other DNA
tggtcgtgactatgatccggatgttctgcagaaggcggtgaatgatgcggtcgcaaatattccgcagccggcaga

SEQ ID NO: 317495 - DNA, 75 bp, synthetic construct
  source 1..75: mol_type = other DNA
tggccagcgtacggaaaaaacattttccctgccggtgatgctctaccgcggtgtgttcagagccggtgaaaccta

SEQ ID NO: 317496 - DNA, 75 bp, synthetic construct
  source 1..75: mol_type = other DNA
cggtaccggcggacggcaaaagtatcacccccgatgatgtgcgtccgatgcttgagcagatggtgaaagaggctg

SEQ ID NO: 317497 - DNA, 75 bp, synthetic construct
  source 1..75: mol_type = other DNA
tgttcagagccggtgaaacctaccaccccggcgatacggtgacgtgggggggctcgctgtggcactgcaacagta

SEQ ID NO: 317498 - DNA, 75 bp, synthetic construct
  source 1..75: mol_type = other DNA
cgccgacaccgcgacgaaattgaaaacagctcgaacaatcaacggggtgggatttgatggttctaaagatattac

SEQ ID NO: 317499 - DNA, 75 bp, synthetic construct
  source 1..75: mol_type = other DNA
tccgatgcttgagcagatggtgaaagaggccgtaagccatatccctgctccgcgtgatggtcgtgattatgatcc

SEQ ID NO: 317500 - DNA, 75 bp, synthetic construct
  source 1..75: mol_type = other DNA
tccccggggcacgtatgccacacaccagggcggactctggcgggcgtatgaaaaaacgcacgggatgcggggatg

SEQ ID NO: 317501 - DNA, 75 bp, synthetic construct
  source 1..75: mol_type = other DNA
ccggtgatgctctaccgcggtgtgttcagagccggtgaaacctaccaccccggcgatacggtgacgtgggggggc

SEQ ID NO: 317502 - DNA, 75 bp, synthetic construct
  source 1..75: mol_type = other DNA
cgcgtgatggtcgtgactacgatccggatgttctgcagaaggcggtgaatgatgcggtcgcaaatattccgcagc

SEQ ID NO: 317503 - DNA, 75 bp, synthetic construct
  source 1..75: mol_type = other DNA
actggtgcgggcgaggcgaagaactggacactgtgcctgcgcaatgttgtgaaagtaaatggtctgcaagacggt

SEQ ID NO: 317504 - DNA, 75 bp, synthetic construct
  source 1..75: mol_type = other DNA
gcctgaaagcgaaagggctaaaaatctgcgtctggattaacccctatatcgggcaaaaatcccctgtctttaaag

SEQ ID NO: 317505 - DNA, 75 bp, synthetic construct
  source 1..75: mol_type = other DNA
gggacggcggcacaagtactgaacaggcgtataaaaatatcccgttctatatgactaaccgtggttatggggtac

SEQ ID NO: 317506 - DNA, 75 bp, synthetic construct
  source 1..75: mol_type = other DNA
tactgacgcactgaacagggcaaaacaacagacaggccagcacgatgacccatacggggatgaaataccgtttta

SEQ ID NO: 317507 - DNA, 75 bp, synthetic construct
  source 1..75: mol_type = other DNA
gcaggttatcgcagacagcgtaatcagtgcgcgatcggtgcgaccgggcggcaataaaggccaacaggggcaggc

SEQ ID NO: 317508 - DNA, 75 bp, synthetic construct
  source 1..75: mol_type = other DNA
aaggcacggcattccagctctttaatctacaagacgggcatgaagccatctgtgaagtgcccgctgctgacggtt

SEQ ID NO: 317509 - DNA, 75 bp, synthetic construct
  source 1..75: mol_type = other DNA
cgttaatcctgacagtgatgattttccgcaaaggcttgcactggcgaaagcgaaagcggcggcaatgatttccgc

SEQ ID NO: 317510 - DNA, 75 bp, synthetic construct
  source 1..75: mol_type = other DNA
cctgtgcgaaatggctggcgctcggcctgcttgttgtggttaacagcagttatgctgcctcccgggtgaaaacag

SEQ ID NO: 317511 - DNA, 75 bp, synthetic construct
  source 1..75: mol_type = other DNA
ctcagagcatgttgttgcgggtttttattacaacagtggtgaggaaaagatgtttggtgacgccggagatgcaga

SEQ ID NO: 317512 - DNA, 75 bp, synthetic construct
  source 1..75: mol_type = other DNA
ggcggctagtggacgacccgcaggtaaaacagaccagcaagggcacaccgatgacgctggcgcgtatggcggtat

SEQ ID NO: 317513 - DNA, 75 bp, synthetic construct
  source 1..75: mol_type = other DNA
cgctgccatgcagtcaggcgcaggacgggcaggcgacgttatggctgtcggtcctggcatttggcaaacaagccg

SEQ ID NO: 317514 - DNA, 75 bp, synthetic construct
  source 1..75: mol_type = other DNA
ccgaggcactggaatgctacgacgacctcgatccagccagcgagaacatccaggcggaactagccattgccaagg

SEQ ID NO: 317515 - DNA, 75 bp, synthetic construct
  source 1..75: mol_type = other DNA
tggcagacaggctgacgcactggcaaaacaccacaaaggcgaactggtgagcgtggccggtaacatgcaggtgag

SEQ ID NO: 317516 - DNA, 75 bp, synthetic construct
  source 1..75: mol_type = other DNA
ttaattactccgtatttgataccagtgacacgctactgattatgcgcccctaccagattgcagccactgaacgta

SEQ ID NO: 317517 - DNA, 75 bp, synthetic construct
  source 1..75: mol_type = other DNA
gtactcaataacaaagtgctacctgtaaccatttacaacgttgtaccattcaataaaagattctgggatttaatc

SEQ ID NO: 317518 - DNA, 75 bp, synthetic construct
  source 1..75: mol_type = other DNA
gtcatcgcatttggcaaacaggccgacttcctggctaacatcaaaaaggcgatgttgccagcgtatccggcacga

SEQ ID NO: 317519 - DNA, 75 bp, synthetic construct
  source 1..75: mol_type = other DNA
caatgctgtccaatgttcgggaacagcttcagagcctcaatggtgtgatgtttaatgacagcgagtggcggcgct

SEQ ID NO: 317520 - DNA, 75 bp, synthetic construct
  source 1..75: mol_type = other DNA
ttgaaatcaccggtaagtcagtctgtcttgacgtactgattcagtggattgaagggaatgatgcatcccggtacc

SEQ ID NO: 317521 - DNA, 75 bp, synthetic construct
  source 1..75: mol_type = other DNA
ggaggcattgattcaggaagagaatctcaatcacgatgctgccaggcgttatatcagtgcgtcactcaagcgtga

SEQ ID NO: 317522 - DNA, 75 bp, synthetic construct
  source 1..75: mol_type = other DNA
gtcctggcgtttggcagacaggccgatgcactggcaaagcaccagaaaggcgaactggtgagcgtggcgggtaac

SEQ ID NO: 317523 - DNA, 75 bp, synthetic construct
  source 1..75: mol_type = other DNA
gtgatggcatttggtaagcaggccgacttcctggctaaacatcaaaaaggcgacgttgccagcatatctggcgtg

SEQ ID NO: 317524 - DNA, 75 bp, synthetic construct
  source 1..75: mol_type = other DNA
aaaccgcagggtaatgaaaaagcggatgcacgctcgctggtgcgttttatttatccgccgcgagataaaggaaaa

SEQ ID NO: 317525 - DNA, 75 bp, synthetic construct
  source 1..75: mol_type = other DNA
aagcactggcaaggcaccgcaagggtgaactcctgaccgtggcgggtaacatgcaggtcagccagtggaccggac

SEQ ID NO: 317526 - DNA, 75 bp, synthetic construct
  source 1..75: mol_type = other DNA
cccttccgtgcagccaggcagatgacggaacggcgacgatgtggttatccgacctggcatttggcagacaggccg

SEQ ID NO: 317527 - DNA, 75 bp, synthetic construct
  source 1..75: mol_type = other DNA
cactgccctgcagtcagtcggatgacggtctggcgacgttgtggttatctgtcctggcgtttggcagacaagccg

SEQ ID NO: 317528 - DNA, 75 bp, synthetic construct
  source 1..75: mol_type = other DNA
gttggtggcgagaagtggctgctggggtctgtctgtgagcggggtaattgcggtgaccattatctgaaaatactg

SEQ ID NO: 317529 - DNA, 75 bp, synthetic construct
  source 1..75: mol_type = other DNA
gcaggcgtgaaaagcgatgttaccccggcactgagcgaaatgatgcagatgaaaattaataatttgtccatctga

SEQ ID NO: 317530 - DNA, 75 bp, synthetic construct
  source 1..75: mol_type = other DNA
cagaacggttcttgaaaatcaactttcgatcagtgaaggcgcttcccgattatcccttcctgaaggcactttagg

SEQ ID NO: 317531 - DNA, 75 bp, synthetic construct
  source 1..75: mol_type = other DNA
cggcagcggcaccagcaccaactaaagaagaagtgttactaacagagattcgcgatttgttgaaagagcaaaata

SEQ ID NO: 317532 - DNA, 75 bp, synthetic construct
  source 1..75: mol_type = other DNA
tctagccagtggcgcagactggcgttgcgccgcgcttcaggttgcccggtatgcggaggaagcaatgcagatcct

SEQ ID NO: 317533 - DNA, 75 bp, synthetic construct
  source 1..75: mol_type = other DNA
gccgcacggcgggcgtggttggcccggtggtcggggttatgggcactttgcaggcactggaagccattaagttat

SEQ ID NO: 317534 - DNA, 75 bp, synthetic construct
  source 1..75: mol_type = other DNA
tcttcaagttttagtgagaaatttttatatatttacgataagcttagagtgaaattatcgaaaaaaatatcatta

SEQ ID NO: 317535 - DNA, 75 bp, synthetic construct
  source 1..75: mol_type = other DNA
gagtttgtggttggctacggcatcgattacgcacagcgttaccgtcatctgccgtatatcggcaaagtggtgctg

SEQ ID NO: 317536 - DNA, 75 bp, synthetic construct
  source 1..75: mol_type = other DNA
ttatctgctggatattgcccttcaggcaagtccttttctcgccagcatattggagcgtgatcaatattgatcagc

SEQ ID NO: 317537 - DNA, 75 bp, synthetic construct
  source 1..75: mol_type = other DNA
ttattagaagcccgattgaagcctatttcagatagccttttagagattacagccaatcagaaatctaaatttcga

SEQ ID NO: 317538 - DNA, 75 bp, synthetic construct
  source 1..75: mol_type = other DNA
cctgcaccaactaaagaagaagtattactgacagaaattcgtgatttgctgaaagagcagaataaccgctcttaa

SEQ ID NO: 317539 - DNA, 75 bp, synthetic construct
  source 1..75: mol_type = other DNA
agggcgcatcttcaaaagtgaacgcggctatctggaacaactgggcggccagattggtgttgcggcactttctgc

SEQ ID NO: 317540 - DNA, 75 bp, synthetic construct
  source 1..75: mol_type = other DNA
acaatgggttaccgccgccagaaaagggctcggtactcctggttcccgcacgctggctgaactggaatctgggta

SEQ ID NO: 317541 - DNA, 75 bp, synthetic construct
  source 1..75: mol_type = other DNA
atggcgacgggtgtcggcagtatcgccgttgtcagcgccattactcaagccgcagactggcgtttggcaacggca

SEQ ID NO: 317542 - DNA, 75 bp, synthetic construct
  source 1..75: mol_type = other DNA
ggcgcaggtggaaaaaattggagtcaaggctgccgaggagatcgggcaactcgtcgccgtcgcgcgtgaagaact

SEQ ID NO: 317543 - DNA, 75 bp, synthetic construct
  source 1..75: mol_type = other DNA
aggcaatatcaccaccatcttctgtacttatgacgccgacaccttaagcaaagatccggcagatggtcgtaaagt

SEQ ID NO: 317544 - DNA, 75 bp, synthetic construct
  source 1..75: mol_type = other DNA
cgattgcaatcgccggtagtcagaaagagctagcgaagcgatgtggtaaggcccaatccacggtctgtgactggt

SEQ ID NO: 317545 - DNA, 75 bp, synthetic construct
  source 1..75: mol_type = other DNA
gctgccggtgtcgcaaaaacggcagcagatgcaatgcgctgtgatcctgatgctggtgataatgaaaacggatac

SEQ ID NO: 317546 - DNA, 75 bp, synthetic construct
  source 1..75: mol_type = other DNA
agcgcaggtggaaaaaatcggagtcaaagccgccgaggagatcgggcaactcgtcaccgtcgcgcgtgaagaact

SEQ ID NO: 317547 - DNA, 75 bp, synthetic construct
  source 1..75: mol_type = other DNA
caggcagaaggcagcggagaaaatccccttgtgtcgtcactggatgccctggctaaggtcgaacaaatcggcatc

SEQ ID NO: 317548 - DNA, 75 bp, synthetic construct
  source 1..75: mol_type = other DNA
gaagctcgccttgagcgagatatattaaaaaaagcaactgcgtattttgcccaggagtcgctgaaaaatacgcgt

SEQ ID NO: 317549 - DNA, 75 bp, synthetic construct
  source 1..75: mol_type = other DNA
ttggcagcatcaccggccagccgtatagataattatcctgaactacgcgctcgtattgaacaacatcttagtgaa

SEQ ID NO: 317550 - DNA, 75 bp, synthetic construct
  source 1..75: mol_type = other DNA
gggtgaggcgttaaaagatgcggttgcacaagccgatgtggtgctcgactgtaccgacaatatggcgactcgcca

SEQ ID NO: 317551 - DNA, 75 bp, synthetic construct
  source 1..75: mol_type = other DNA
gctgtcgacggaaagatccaggcgtatgaatttcgtccagatctaccagaacttttcccacacccaagcttagcg

SEQ ID NO: 317552 - DNA, 75 bp, synthetic construct
  source 1..75: mol_type = other DNA
cgccgtaatgatgataaacgtcaggcgcaacaagaagcgaaggcgctgaatgttgaagagcaatctgttcaggaa

SEQ ID NO: 317553 - DNA, 75 bp, synthetic construct
  source 1..75: mol_type = other DNA
ctgcacaacctgggctgttgagccgcttcttcggcgcactgaaagcgctgttcagcggtggtgaagaaaccaaac

SEQ ID NO: 317554 - DNA, 75 bp, synthetic construct
  source 1..75: mol_type = other DNA
gattatagaaatttcactttccgctatcactactatggggactcgtcaaggacatacagccattatatttccaca

SEQ ID NO: 317555 - DNA, 75 bp, synthetic construct
  source 1..75: mol_type = other DNA
gactgccgaataatcttcttccatggcaaaccgcgaccgcgtgaagtgtcagaggattggcttcctctcattagc

SEQ ID NO: 317556 - DNA, 75 bp, synthetic construct
  source 1..75: mol_type = other DNA
gcaaaccgcgacctcgcgaagtgtcagaggattggctttcccttattagctcattttttgagcaaaaatcagaat

SEQ ID NO: 317557 - DNA, 75 bp, synthetic construct
  source 1..75: mol_type = other DNA
gttgtcggcggtggacgacgcatttacggcagacatggaagatgctcagaacgacgagtccgtcacaaaggatga

SEQ ID NO: 317558 - DNA, 75 bp, synthetic construct
  source 1..75: mol_type = other DNA
accccgccggatgcgacagccacgttacaggccatgcagtcctgtcggcgggagtccgcggcgctggagcggctt

SEQ ID NO: 317559 - DNA, 75 bp, synthetic construct
  source 1..75: mol_type = other DNA
ttacaactccacatgtaactattgaacgctatagtgaacttactggtttgtcggtggagactatcaacgacatgt

SEQ ID NO: 317560 - DNA, 75 bp, synthetic construct
  source 1..75: mol_type = other DNA
gctgccgctggtgcgcggcgtggtagtcggcttgaaccagatcccgcgcgatgtgctggagagcgccagagcgat

SEQ ID NO: 317561 - DNA, 75 bp, synthetic construct
  source 1..75: mol_type = other DNA
tgattgcgctggtgctctatgccttgctgccgctggtgcgcggcgtggtagtcggcttgaaccagatcccgcgcg

SEQ ID NO: 317562 - DNA, 75 bp, synthetic construct
  source 1..75: mol_type = other DNA
ccgtgccttcggtagcgctctttggcctgttgattgcgccgcttgccgcgctggttacggcctttccgtggctgg

SEQ ID NO: 317563 - DNA, 75 bp, synthetic construct
  source 1..75: mol_type = other DNA
tccgtggctgggaacgcttggcatagcgggaacgggcatgacgcctgcactgattgcgctggtgctctacgcctt

SEQ ID NO: 317564 - DNA, 75 bp, synthetic construct
  source 1..75: mol_type = other DNA
tgtcattcagaccgtgccttccgtggcgctctttggcctgctgattgcgccgcttgccggactggttacggcctt

SEQ ID NO: 317565 - DNA, 75 bp, synthetic construct
  source 1..75: mol_type = other DNA
attgatttagtgttgctcggggtgatcccggtgattgtactggcggtgcttaccgacgcgctgttcgatttgctt

SEQ ID NO: 317566 - DNA, 75 bp, synthetic construct
  source 1..75: mol_type = other DNA
gatgaactggaagccgcctggcaccagcaacaggcgctggtacaggagattattacgctacgccagcagttactg

SEQ ID NO: 317567 - DNA, 75 bp, synthetic construct
  source 1..75: mol_type = other DNA
gatgttgcaccgacgcaaaccaccgttttcgccggagcagttaaaagcgttgatggatgcgaataaatcaaatta

SEQ ID NO: 317568 - DNA, 75 bp, synthetic construct
  source 1..75: mol_type = other DNA
tagctgtcccatccatttcggttgaaaagtacagtgaactcacagggttatctgtagacactatcaacagtatgc

SEQ ID NO: 317569 - DNA, 75 bp, synthetic construct
  source 1..75: mol_type = other DNA
agagaaaaggtaatgatcaaccttgctgctctcaccgttgatgcacttactgattgcaatgttgtattcaactag

SEQ ID NO: 317570 - DNA, 75 bp, synthetic construct
  source 1..75: mol_type = other DNA
gttacagaattatgtgcagaccaacctctataacctgctttattccagtaccacgaaagttccccagactgaagc

SEQ ID NO: 317571 - DNA, 75 bp, synthetic construct
  source 1..75: mol_type = other DNA
cacctatgaaaccctgactaccaatcaggcggcggcgctggatgccaaaaactgcaacgtatttgtgtactacca

SEQ ID NO: 317572 - DNA, 75 bp, synthetic construct
  source 1..75: mol_type = other DNA
gcaggttcagtttctgcaaatagcgataacagtcgtcaagtgtctctcagcaccgacggtggttttgtattgcat

SEQ ID NO: 317573 - DNA, 75 bp, synthetic construct
  source 1..75: mol_type = other DNA
ctgttctaccaggcgttcgacaagggcgagatggcagacggcgaaggccgcctgattgactgtaagaatatcgtc

SEQ ID NO: 317574 - DNA, 75 bp, synthetic construct
  source 1..75: mol_type = other DNA
ttcttcctcacctccaacctcggctatcaggtgattgtcgaacacgccgatgacccggaaaccatgcaggaagcc

SEQ ID NO: 317575 - DNA, 75 bp, synthetic construct
  source 1..75: mol_type = other DNA
gtcggcggcagacggcacgttcacagcagatgtggaagatgctctggacgacgagtccgtcacagaagatgaaac

SEQ ID NO: 317576 - DNA, 75 bp, synthetic construct
  source 1..75: mol_type = other DNA
ggttgagtggctgaaagaaagctggctgctggcgtcggcagaaatgcagcacagcgagctgcgcggcggcgtgtt

SEQ ID NO: 317577 - DNA, 75 bp, synthetic construct
  source 1..75: mol_type = other DNA
atgctcgaatcggtcatcgacggcgacatgctgccgccgctctcgctgctgctgttgcagaagatggcagccaac

SEQ ID NO: 317578 - DNA, 75 bp, synthetic construct
  source 1..75: mol_type = other DNA
tctcgtctcctgtgccggtcattctgtttatcgacgaagcgcataccctgattggcgcgggaaatcaggccggag

SEQ ID NO: 317579 - DNA, 75 bp, synthetic construct
  source 1..75: mol_type = other DNA
atctttcgttaatgaaagagtatgccaaccgtcaggatgtattcgatgatgcactggctcaacatctggcactgc

SEQ ID NO: 317580 - DNA, 75 bp, synthetic construct
  source 1..75: mol_type = other DNA
actatcgtgaacaaattaccgatggtttagaaaatgccccgcagacatttatcggcctgctgaatggtaaaaact

SEQ ID NO: 317581 - DNA, 75 bp, synthetic construct
  source 1..75: mol_type = other DNA
gaccatcacgcggatgattttgccgagcaactggcgaaagcgtgcccaaaaggtatcgatatttattatgaaaac

SEQ ID NO: 317582 - DNA, 75 bp, synthetic construct
  source 1..75: mol_type = other DNA
ggcatttttgtaagtcgtacgcccaccgctactgctatcgacaacaatttcatcatcagtgtcggtctgaaacaa

SEQ ID NO: 317583 - DNA, 75 bp, synthetic construct
  source 1..75: mol_type = other DNA
attcagggtgaagtcgataaagactggaactctgttgaaattgacgtcaaacagatccgcaaagtaaatccgtaa

SEQ ID NO: 317584 - DNA, 75 bp, synthetic construct
  source 1..75: mol_type = other DNA
gattcaaaagcgaatgaaagagcttggcattgcccattttgctcaacgcggtacacctcgtagttctgtaaagtt

SEQ ID NO: 317585 - DNA, 75 bp, synthetic construct
  source 1..75: mol_type = other DNA
gacaggttgcgcaggcacgcagaacgcgccacggccagcgccgtcagtccggcttataccgcagacgctgaccat

SEQ ID NO: 317586 - DNA, 75 bp, synthetic construct
  source 1..75: mol_type = other DNA
gaccatcacgcggatgattttgccgaacaactggcgaaagcgtgcccaaaaggtattgatatctattatgaaaac

SEQ ID NO: 317587 - DNA, 75 bp, synthetic construct
  source 1..75: mol_type = other DNA
tttagaaaatgccccacagacttttattggcctgttagaaggtaaaaacttcggcaaagtcgttattcgtgtggc

SEQ ID NO: 317588 - DNA, 75 bp, synthetic construct
  source 1..75: mol_type = other DNA
tcgctgggtgtgctagggatgccaggctttaccgcttatatggggctgctggatatcggtcagcctaaagagggc

SEQ ID NO: 317589 - DNA, 75 bp, synthetic construct
  source 1..75: mol_type = other DNA
gaaacgctggtggtagctgcggcgacaggaccagtaggggcgacggtggggcaaatcggcaaacttaaaggttgc

SEQ ID NO: 317590 - DNA, 75 bp, synthetic construct
  source 1..75: mol_type = other DNA
gtgacggctgcaaacaaaaccaatcccgtgagcctgctactattgatggattcatgccaaaagcacaggagagca

SEQ ID NO: 317591 - DNA, 75 bp, synthetic construct
  source 1..75: mol_type = other DNA
aacaactggcgaaagcgtgcccaaaaggcgttgatatctattatgaaaacgtgggcggtaaagtatttgatgcgg

SEQ ID NO: 317592 - DNA, 75 bp, synthetic construct
  source 1..75: mol_type = other DNA
gaagcgatatactcacactgacgggggcatcgactgcaaccggagtcgggctgagaatatacaaaaacactgaca

SEQ ID NO: 317593 - DNA, 75 bp, synthetic construct
  source 1..75: mol_type = other DNA
taacaaggttctggcgtgttaccaacgcgaagctaacaaggaaatagctcgtctattaaatattccgcaggagtt

SEQ ID NO: 317594 - DNA, 75 bp, synthetic construct
  source 1..75: mol_type = other DNA
catcagcaccagcaaactaaacgaagctatcgtcaaaaacaggccttttttgcctgttcacgttgctcacagaaa

SEQ ID NO: 317595 - DNA, 75 bp, synthetic construct
  source 1..75: mol_type = other DNA
acatacctcatccctcatggctttcctgtcatgagctgcaaactttgctcaatgctactttccttccactttctg

SEQ ID NO: 317596 - DNA, 75 bp, synthetic construct
  source 1..75: mol_type = other DNA
gaagggaagtcttttgaaagaaaagatgatagttcattacacctgattactaacaagattctggcgtgttaccaa

SEQ ID NO: 317597 - DNA, 75 bp, synthetic construct
  source 1..75: mol_type = other DNA
tggcaaagatatttaccttgggttatgtggattttagcaaacgctccaacgaagcgggtagaaatatgatggctc

SEQ ID NO: 317598 - DNA, 75 bp, synthetic construct
  source 1..75: mol_type = other DNA
cgcgaagctaacaaggaaatagctcgtctattaaatattccgcaggagttaaataattctcaggacggtgatgct

SEQ ID NO: 317599 - DNA, 75 bp, synthetic construct
  source 1..75: mol_type = other DNA
gtatggcaatgctggcccgcatgagtttgctgccatgctggaagccgcgatggcggaaaatcctcaagccgaaat

SEQ ID NO: 317600 - DNA, 75 bp, synthetic construct
  source 1..75: mol_type = other DNA
ggtgcacccagatgtactggaaggaaagaaaacaggttatttcgccgatctgcgcgccacgcaacgagtacgttt

SEQ ID NO: 317601 - DNA, 75 bp, synthetic construct
  source 1..75: mol_type = other DNA
ttaccttatgtacttgatgaggtggggaccagtattggttattcggcgtcaactgtctggcaatatccacgggga

SEQ ID NO: 317602 - DNA, 75 bp, synthetic construct
  source 1..75: mol_type = other DNA
tttacgtcgtgacctcccaatacggctttgaagccttgctggcaggaaaaccagtaacatgtttcggccagccct

SEQ ID NO: 317603 - DNA, 75 bp, synthetic construct
  source 1..75: mol_type = other DNA
ctttctctgctgcgtcctgttccgcaaaacgtcgatgctatcgccgtgtggggacatcgccccagcgcggcgaaa

SEQ ID NO: 317604 - DNA, 75 bp, synthetic construct
  source 1..75: mol_type = other DNA
cagcaatggctagccgaagcgcaacaaaaatcactgccgttatggcgaatggaagatggttttctgcgttcatcc

SEQ ID NO: 317605 - DNA, 75 bp, synthetic construct
  source 1..75: mol_type = other DNA
tgctttgctcattgaacagcgtgacggtgatgaagcactggcaataaagcagcagacagatccggttgttgagtt

SEQ ID NO: 317606 - DNA, 75 bp, synthetic construct
  source 1..75: mol_type = other DNA
tgacacttcacgaagcgctacgcctggatttgattgaagcctatatggcgcgggaaattacgctggcagaagtgg

SEQ ID NO: 317607 - DNA, 75 bp, synthetic construct
  source 1..75: mol_type = other DNA
cttgatattccgggggtggaaaccctttttaatacccgtaaaaccaatgacccaattgactgcacacgttcaaag

SEQ ID NO: 317608 - DNA, 75 bp, synthetic construct
  source 1..75: mol_type = other DNA
aacagacggatccggttattgagttttgccagttcctgaattttctggaggaagcgcgcggcctgatgatgggtg

SEQ ID NO: 317609 - DNA, 75 bp, synthetic construct
  source 1..75: mol_type = other DNA
tccggtgatttgctgccgttcgctaatggcgtgcttgacctgaaaacaggggaattttccccgcactcgcctgat

SEQ ID NO: 317610 - DNA, 75 bp, synthetic construct
  source 1..75: mol_type = other DNA
gtggtggtgattccggcaaatacacgaccagaaatagtctttaccgcatctatctggccttcatggcatacacag

SEQ ID NO: 317611 - DNA, 75 bp, synthetic construct
  source 1..75: mol_type = other DNA
ctggctgatgagcaactgaaaaacatcatcgattaccggatcattgatgaagatcgtcagtgtgtgcgtgtttac

SEQ ID NO: 317612 - DNA, 75 bp, synthetic construct
  source 1..75: mol_type = other DNA
agttcacgcgctgacgcacccggaagagcaggatgagacgtggacagatcggcacggaagcgccagcgacgcggt

SEQ ID NO: 317613 - DNA, 75 bp, synthetic construct
  source 1..75: mol_type = other DNA
gatttttgggttccggtaagcacactggatcttagtcgtgaaatggtggctatttacgaagaaaacggaacatcg

SEQ ID NO: 317614 - DNA, 75 bp, synthetic construct
  source 1..75: mol_type = other DNA
atcaccacacacaacggcattgagtacacgccgccagtaccaggtgagaatatccgcgacaacgcgccaaacttt

SEQ ID NO: 317615 - DNA, 75 bp, synthetic construct
  source 1..75: mol_type = other DNA
gcggtggcgattcagtgaagtacacgaccagaaacagcctttaccgcgtctatctggcgtttatggcgtacgcag

SEQ ID NO: 317616 - DNA, 75 bp, synthetic construct
  source 1..75: mol_type = other DNA
cggcgggagcggaaagagtacattcacgcacatagccagccttctggcagggaaacagaacacggtaagcgctga

SEQ ID NO: 317617 - DNA, 75 bp, synthetic construct
  source 1..75: mol_type = other DNA
cggcgtttatgatgcagatatcagtggcgcatcgacattaatcctccactttaatatgaatgcggggagttgccc

SEQ ID NO: 317618 - DNA, 75 bp, synthetic construct
  source 1..75: mol_type = other DNA
tggagatgaactccatcagaaagcccgagaactggtcatccctcagtcatcggcaggtaatatcattgctctcgc

SEQ ID NO: 317619 - DNA, 75 bp, synthetic construct
  source 1..75: mol_type = other DNA
aaccgaacacggtgagcgccgagatgacatcgcttgatgatgctggtgggcgtgcgcaggttgtcgggagccgcc

SEQ ID NO: 317620 - DNA, 75 bp, synthetic construct
  source 1..75: mol_type = other DNA
cgcggcggggtatggtgtccggtcagcacaatggaactgagccgcgaaatggtggcgatttattcagaacataaa

SEQ ID NO: 317621 - DNA, 75 bp, synthetic construct
  source 1..75: mol_type = other DNA
cctgagccaacaccagaaccggagccagaacctgttcctacgaaaacgggttatctgaccctgggcggaagcctg

SEQ ID NO: 317622 - DNA, 75 bp, synthetic construct
  source 1..75: mol_type = other DNA
atacgccgcctgtagattctggaacagggtctttgccggaagtgaaacctgatccaacaccaaacccggagccga

SEQ ID NO: 317623 - DNA, 75 bp, synthetic construct
  source 1..75: mol_type = other DNA
tggtcaacttcatagacgatgctcatttccgccgcgtatggaagcacccaaagaaaaccatcaactctcgccaga

SEQ ID NO: 317624 - DNA, 75 bp, synthetic construct
  source 1..75: mol_type = other DNA
tagtggagaccaaaaagattggtcagaagctggcggcggcagatattcaggatgcgaatttttaccccgaaggga

SEQ ID NO: 317625 - DNA, 75 bp, synthetic construct
  source 1..75: mol_type = other DNA
gctaccggaaaagattgcggctgaaatccccgttattatccgccgattgctggcgaactttaccgaccctgaaaa

SEQ ID NO: 317626 - DNA, 75 bp, synthetic construct
  source 1..75: mol_type = other DNA
ctggcgacgagactacaacacgaaaaaccagcagcctgcatttgctttagggcaaacaggaagcactgtcggaaa

SEQ ID NO: 317627 - DNA, 75 bp, synthetic construct
  source 1..75: mol_type = other DNA
ttccgtttcgacaatatcgtcagtgaggccgacaaagacagggagctaccggaaaagattgcggctgaaatccct

SEQ ID NO: 317628 - DNA, 75 bp, synthetic construct
  source 1..75: mol_type = other DNA
tagtggagatcaaaaagattggtcagaagctggcggcggcaggcgtacaggacgcaaatttttaccccgaaggaa

SEQ ID NO: 317629 - DNA, 75 bp, synthetic construct
  source 1..75: mol_type = other DNA
atgaaactggcaccgaacgtaaaaaaacagcctcgcggaataaaaaacaaagacacagaggtaattatttttgcg

SEQ ID NO: 317630 - DNA, 75 bp, synthetic construct
  source 1..75: mol_type = other DNA
ggtctgagaaagtcgaacatcataaatctggaatggcaacaaatcgacatgcagcgacgagttgcctgggtgaat

SEQ ID NO: 317631 - DNA, 75 bp, synthetic construct
  source 1..75: mol_type = other DNA
tggcaaaatcaatatatatgaatatattaataatgaacagttgggaaaattaaatcctccggaagatttacgtat

SEQ ID NO: 317632 - DNA, 75 bp, synthetic construct
  source 1..75: mol_type = other DNA
tttgatgattctgcaaagatagagcatgcatgctccgtaataaatcatattaattttcgtcgcgatcagtctaaa

SEQ ID NO: 317633 - DNA, 75 bp, synthetic construct
  source 1..75: mol_type = other DNA
ggttaaataattcgcaggggttaaataattcgcaggagttaaatgattctcaggagttaaatgattctcaggact

SEQ ID NO: 317634 - DNA, 75 bp, synthetic construct
  source 1..75: mol_type = other DNA
ctttagctttgttaatggacaggcgattgaatacagcaccagccgtcagccatcgcgagaaagcgccgcacgtag

SEQ ID NO: 317635 - DNA, 75 bp, synthetic construct
  source 1..75: mol_type = other DNA
aataattaattttgatgcgagcatgaatattatttgcggaccaaatgggatcgggaaaaccacaattttagattc

SEQ ID NO: 317636 - DNA, 75 bp, synthetic construct
  source 1..75: mol_type = other DNA
tctatcaattaattaagaagtatgagggcgaacagctgtatcttaatgagttaggatatgtttatggtaatgaag

SEQ ID NO: 317637 - DNA, 75 bp, synthetic construct
  source 1..75: mol_type = other DNA
tgctttatcggaattgccggacctcaccgctcaacggaaaacattgcgtgattttcttgatgccattcgtgatga

SEQ ID NO: 317638 - DNA, 75 bp, synthetic construct
  source 1..75: mol_type = other DNA
ctgactttttgttactttgtatcatttttataattgtgtcattactcactgacttaatatatatatgtatatgtt

SEQ ID NO: 317639 - DNA, 75 bp, synthetic construct
  source 1..75: mol_type = other DNA
gagaaaaggatctaaaggaaacaaagcaaatatcccttttttaataccgatgctcaatccaaaggcctttttgtt

SEQ ID NO: 317640 - DNA, 75 bp, synthetic construct
  source 1..75: mol_type = other DNA
cgtggctgggatgtcaaagaaagcgcggtgatggcgattaccgccaacgaactggataccgcccgccgccgtaca

SEQ ID NO: 317641 - DNA, 75 bp, synthetic construct
  source 1..75: mol_type = other DNA
ggtattggtattaacggtgtggatgcggtgagcgaactgtctaaagcacaggcaaccggcttctacggttccctg

SEQ ID NO: 317642 - DNA, 75 bp, synthetic construct
  source 1..75: mol_type = other DNA
ttaagattgccgtgccggatggcgaaaagacgctgaacgccatcgacagtctggctgccagcggtgcgaaagggt

SEQ ID NO: 317643 - DNA, 75 bp, synthetic construct
  source 1..75: mol_type = other DNA
aaacgaatatttctcatcgaggagtgcattactgttcagactaaatctggcgacggtggttgataaaggacaacc

SEQ ID NO: 317644 - DNA, 75 bp, synthetic construct
  source 1..75: mol_type = other DNA
tggattccggtctgcgcccggttgtagacagcgttaacgcaattcgcgtaccgcaggattacgttacgcaaagcg

SEQ ID NO: 317645 - DNA, 75 bp, synthetic construct
  source 1..75: mol_type = other DNA
agtccgcctcgcctgagcagcgccaggcggttcgcgagaaaatgcagactaacccacagaaccagcagcgaagag

SEQ ID NO: 317646 - DNA, 75 bp, synthetic construct
  source 1..75: mol_type = other DNA
tctcgcctggacggggtgggctattaccatggtcttttatctactgaccgttattgccttctggatgacccgtaa

SEQ ID NO: 317647 - DNA, 75 bp, synthetic construct
  source 1..75: mol_type = other DNA
cggtcaggaagatgcacattgacagcaagacagcatggctatcagcttgtcgtcgtgcaggagttgaaaatttcc

SEQ ID NO: 317648 - DNA, 75 bp, synthetic construct
  source 1..75: mol_type = other DNA
ccgcgcattccgcgttgaaacaggctgatgatctgaaacccgtgtttgatcaggcattcaccaaagtggtgacaa

SEQ ID NO: 317649 - DNA, 75 bp, synthetic construct
  source 1..75: mol_type = other DNA
cgccagctgatgcattgcaaccgttgattccggcggcacaaactttcacgcaacaactggtgatggttggagact

SEQ ID NO: 317650 - DNA, 75 bp, synthetic construct
  source 1..75: mol_type = other DNA
accctggtcttttatctgctgaccgttattgccttctggatgacccgtaatcagatggcgcaacaggtatcagta

SEQ ID NO: 317651 - DNA, 75 bp, synthetic construct
  source 1..75: mol_type = other DNA
gttaatcgccgcaatggtgtatccgcaggggatttttccagtactggcagcatctggtgtctgggtagcctgtct

SEQ ID NO: 317652 - DNA, 75 bp, synthetic construct
  source 1..75: mol_type = other DNA
tgaaatactgaccgaagatgcagaacgtctatttgctgaatttaaacactgggcagatgagaaaatccgtgaaca

SEQ ID NO: 317653 - DNA, 75 bp, synthetic construct
  source 1..75: mol_type = other DNA
caggggatttttccggtcatggcagcgtccggtgtttgggtagcctgtctgctgacatggggggcaattacggta

SEQ ID NO: 317654 - DNA, 75 bp, synthetic construct
  source 1..75: mol_type = other DNA
atctttgctgaagaccattacccgaaaagaaaacgtatttatcagttgggtgatgcgattgctgattgtcgtaag

SEQ ID NO: 317655 - DNA, 75 bp, synthetic construct
  source 1..75: mol_type = other DNA
tctcgcctggacggggtgggccattaccctggtcttttatctgctgaccgttattgccttctggatcactcgtaa

SEQ ID NO: 317656 - DNA, 75 bp, synthetic construct
  source 1..75: mol_type = other DNA
cagcgcgtttttaacaccgaggatgaccaaaaccatgaccgagatggaaaaacagcttctgagcgccttagagag

SEQ ID NO: 317657 - DNA, 75 bp, synthetic construct
  source 1..75: mol_type = other DNA
gctgatagacggctgcgactttgcccgcgcctatacctccggcgtgctgtcgtttcaggagccggacattgcaga

SEQ ID NO: 317658 - DNA, 75 bp, synthetic construct
  source 1..75: mol_type = other DNA
attatctgcatttaatttcaaagatcatgatgtatatgcaaaaataaaatcaaaagaaaagctaattcctagtcc

SEQ ID NO: 317659 - DNA, 75 bp, synthetic construct
  source 1..75: mol_type = other DNA
cccagcgacctggaagtgctgcttaatcacagccagttaacactggcgcagcagatgcgagctgagaagttgcgg

SEQ ID NO: 317660 - DNA, 75 bp, synthetic construct
  source 1..75: mol_type = other DNA
tctaccccagtcagcttttctgcaacgtagcggcgaaagcaaataccaatgacagactgaatgcagatttaaact

SEQ ID NO: 317661 - DNA, 75 bp, synthetic construct
  source 1..75: mol_type = other DNA
ggattacctgctgggaaaagaccggcagcgcgaacaggccagcgtactgcgcggcaatcctgaacatgtgcgtga

SEQ ID NO: 317662 - DNA, 75 bp, synthetic construct
  source 1..75: mol_type = other DNA
cattcgtcaatgatctatccagtaccccgttacaggcgttagtgtccgtaacaaagcagaaaaaagaggttattg

SEQ ID NO: 317663 - DNA, 75 bp, synthetic construct
  source 1..75: mol_type = other DNA
tgccgttgctggcatttttaggtccatccaacattacaaatgcatcgactaaaaccccgataccgtcgtcccagc

SEQ ID NO: 317664 - DNA, 75 bp, synthetic construct
  source 1..75: mol_type = other DNA
aagcatcctcggcacgattttgcaggaaaacggggtgaccgattggagaccgctgttcagcgagccgcatccttc

SEQ ID NO: 317665 - DNA, 75 bp, synthetic construct
  source 1..75: mol_type = other DNA
aatcagcagaaccgtggctccagctgatttccgcagtgatcattattggcaccgcgttctggatgttctggcgta

SEQ ID NO: 317666 - DNA, 75 bp, synthetic construct
  source 1..75: mol_type = other DNA
gccagcggtcgtccgacagttgtgctttctgactcacagcaggttaatccggataatatttcgtggggataccgt

SEQ ID NO: 317667 - DNA, 75 bp, synthetic construct
  source 1..75: mol_type = other DNA
tatttcaccaaagagttgaaaatttacccaggagaaaacttcgatatcagtaccatacagaaaacgactatgagg

SEQ ID NO: 317668 - DNA, 75 bp, synthetic construct
  source 1..75: mol_type = other DNA
gtcgctgtactgcggcgagcgcctgcgtggtatggggtgtaaagggagaacagcaatggcgagccgaagcgcagc

SEQ ID NO: 317669 - DNA, 75 bp, synthetic construct
  source 1..75: mol_type = other DNA
cttgctagacagaacatcttggcatcacgtaacaagcaacttgaaaatgttaagttgtatctctcaagagagctt

SEQ ID NO: 317670 - DNA, 75 bp, synthetic construct
  source 1..75: mol_type = other DNA
gagcgatgaagaactccgtgaaattgccagacagaacatcttggcatcacgtaacaagcaacttgaaaatgttaa

SEQ ID NO: 317671 - DNA, 75 bp, synthetic construct
  source 1..75: mol_type = other DNA
cgtcggtagatgcttttgtacatttaggctatttgctgggtgaaggtaagcgtcgtctgagtaccgtctggtccc

SEQ ID NO: 317672 - DNA, 75 bp, synthetic construct
  source 1..75: mol_type = other DNA
gtctttgtgactcctgaacctcaagagatgcccgatatctgcaagggtgaatcactacttgagcttgaaaagaaa

SEQ ID NO: 317673 - DNA, 75 bp, synthetic construct
  source 1..75: mol_type = other DNA
gctagacagaacatcttggcatcacgtaacaagcagcttgatagtgctaagttgtatctctcaagagagcttcag

SEQ ID NO: 317674 - DNA, 75 bp, synthetic construct
  source 1..75: mol_type = other DNA
atgcaatcagctattgaaccgtcagaatttgagattcaggatgaattgtcacagaaaccatttgtttattaccaa

SEQ ID NO: 317675 - DNA, 75 bp, synthetic construct
  source 1..75: mol_type = other DNA
catcgccctccttcctgcatcattcggaacagggcgctcagcgcctgtcagagctgccgatccatatcaacaccc

SEQ ID NO: 317676 - DNA, 75 bp, synthetic construct
  source 1..75: mol_type = other DNA
cccagcgatctggaagtgctgctgaatcatagccagctaacgctggcgcagaagatgcgagctgaaaaattacgc

SEQ ID NO: 317677 - DNA, 75 bp, synthetic construct
  source 1..75: mol_type = other DNA
cgctgattatcaggcactggacgccgatattattcaatgcattcagcgcgcagatgaagtgcacaccatgacatc

SEQ ID NO: 317678 - DNA, 75 bp, synthetic construct
  source 1..75: mol_type = other DNA
ttcaggatgaattgtcacagaagccgtatgtttacttcacatacgaagacaatgatggttttggtacttttccag

SEQ ID NO: 317679 - DNA, 75 bp, synthetic construct
  source 1..75: mol_type = other DNA
acaattactggccaggtactagatcttggaggtggtcaaccttctgctgttgccgcacatttggtgttcaagaat

SEQ ID NO: 317680 - DNA, 75 bp, synthetic construct
  source 1..75: mol_type = other DNA
tctatatgataatccatcattatccaactctgatattcagttgttggcgacaaatcaattgattagttatcatgt

SEQ ID NO: 317681 - DNA, 75 bp, synthetic construct
  source 1..75: mol_type = other DNA
cggtgcagatagtgcgactggactgggaatagaaatattggataacaatgatgtggcgattgccattaatggtga

SEQ ID NO: 317682 - DNA, 75 bp, synthetic construct
  source 1..75: mol_type = other DNA
aaaaccacccgttacgaatacggtgcattcgatctgctcacggctctggtgcgtcctgacggcgagcggctggcg

SEQ ID NO: 317683 - DNA, 75 bp, synthetic construct
  source 1..75: mol_type = other DNA
gtataacgaggacggcctggtcacccgctgtatcgatccgctggggcgggaagaaattaccgtctggaataatgc

SEQ ID NO: 317684 - DNA, 75 bp, synthetic construct
  source 1..75: mol_type = other DNA
atgcagatgaacggcgccatgctttctgcgatgggcatggatgatattggcgaggatatgtacaacatgggcgga

SEQ ID NO: 317685 - DNA, 75 bp, synthetic construct
  source 1..75: mol_type = other DNA
tgcgtttatgtctgtggtagcgtcactcccggggattggtgatgcggcagccgctggcaggatggcagttaaagg

SEQ ID NO: 317686 - DNA, 75 bp, synthetic construct
  source 1..75: mol_type = other DNA
agcacaaaggctggcggcatcagacacaccgcatcaacccggacacaggaaagccggaagagggaaaatttgtcc

SEQ ID NO: 317687 - DNA, 75 bp, synthetic construct
  source 1..75: mol_type = other DNA
ctgtatgacaaggcgtacaacctgacggtaatatcagactcgctgcggggatcagccttcaacaatatgacggtt

SEQ ID NO: 317688 - DNA, 75 bp, synthetic construct
  source 1..75: mol_type = other DNA
ttccctatgcagtgatcgcttacatgggcgatgccgtacaaattgtgccgtcagtgaaagccaacggatacccgg

SEQ ID NO: 317689 - DNA, 75 bp, synthetic construct
  source 1..75: mol_type = other DNA
acgacaaggcgtacagcctgacggtaatatcagactcgctgcggggttcggccttcaacaatatgacggcgaacg

SEQ ID NO: 317690 - DNA, 75 bp, synthetic construct
  source 1..75: mol_type = other DNA
aggacggattgtggattgtggtcagcctgtgcccggacgtctgcaaaaccccgatgggaagcgccactccgccgg

SEQ ID NO: 317691 - DNA, 75 bp, synthetic construct
  source 1..75: mol_type = other DNA
cccgtttggcaggcgcatcagcaaacggtgtaccaaccgtgataagtccggaatggatttccactggaatggcga

SEQ ID NO: 317692 - DNA, 75 bp, synthetic construct
  source 1..75: mol_type = other DNA
tcggcctgcgtccgtccatcgcttatctgcagtctaaaggtaaggatcctggtatgtggggtaaccaggatttgg

SEQ ID NO: 317693 - DNA, 75 bp, synthetic construct
  source 1..75: mol_type = other DNA
ctgttgcgccagacggcggcatcacgcagaccgaacaggatatgctgggtcgcctgctgagtgtgaaagatccac

SEQ ID NO: 317694 - DNA, 75 bp, synthetic construct
  source 1..75: mol_type = other DNA
ttttccctgacaggcacaggcacttacctgctgtccgctcttcatgataactacggcaaccggattgattttatc

SEQ ID NO: 317695 - DNA, 75 bp, synthetic construct
  source 1..75: mol_type = other DNA
tcaggacaagatggttggtcgccagcaggatcagcaaagaattaacgaaacaatccgtaataatgacatgacaaa

SEQ ID NO: 317696 - DNA, 75 bp, synthetic construct
  source 1..75: mol_type = other DNA
tttgtccccaaatcagtctgaaaaatcagccagagcagctatcaaaacaatcataaaaaccactgagatggctca

SEQ ID NO: 317697 - DNA, 75 bp, synthetic construct
  source 1..75: mol_type = other DNA
gcaggttcgagatctgatgaccaaatatcctggtcaattagagaagattcagtctggtatgaaatgggctgacga

SEQ ID NO: 317698 - DNA, 75 bp, synthetic construct
  source 1..75: mol_type = other DNA
gatcagcgagaagcggctgtcgatagcgctccagggcagggtgcgttaccagctcaagaccccgtggcgcaatgg

SEQ ID NO: 317699 - DNA, 75 bp, synthetic construct
  source 1..75: mol_type = other DNA
cagccatccagtcaggtgatcggcagcaggttcgagatctgatgaccaaatatcctggtcaattagagaagattc

SEQ ID NO: 317700 - DNA, 75 bp, synthetic construct
  source 1..75: mol_type = other DNA
aagcatcctcggcacgattttgcaggaaaacggggtgaccgactggagtccgctgttcagcgagccccatccttc

SEQ ID NO: 317701 - DNA, 75 bp, synthetic construct
  source 1..75: mol_type = other DNA
actctatcggaaagattagaaatcagcttgaaagcaagttgagcactgttaaaaaacagtttgattatcaggagc

SEQ ID NO: 317702 - DNA, 75 bp, synthetic construct
  source 1..75: mol_type = other DNA
tgacaacaataaggatagtttttgtatctacgatggtgcaattagtaaaattagctcagcccagcttgttactta

SEQ ID NO: 317703 - DNA, 75 bp, synthetic construct
  source 1..75: mol_type = other DNA
aaaaagatgatattcagcgtggaattgcagatattcaatggatgttacatcatcactattatccatcacccggac

SEQ ID NO: 317704 - DNA, 75 bp, synthetic construct
  source 1..75: mol_type = other DNA
aagcatcctcggcacgattttgcaggaaaacggggtgaccgagtggagaccgctgttcagcgagcctcatccttc

SEQ ID NO: 317705 - DNA, 75 bp, synthetic construct
  source 1..75: mol_type = other DNA
ctcgtgctgacagacaggccgccgctcagggcgctgttgatacgttcagcactgcgcttgattctctcaacgaga

SEQ ID NO: 317706 - DNA, 75 bp, synthetic construct
  source 1..75: mol_type = other DNA
gcatggggttcattgatgaagaccagcgcaattctatcggcaccttagcggctggcgctcgccttgcatcatcat

SEQ ID NO: 317707 - DNA, 75 bp, synthetic construct
  source 1..75: mol_type = other DNA
cagcgccgggtgaaaggtgtggtgacctggtttgaactgggggagaacgacaaaaaccagatgctgtacagcatg

SEQ ID NO: 317708 - DNA, 75 bp, synthetic construct
  source 1..75: mol_type = other DNA
ctctgttcatgcttcagaaaatgtgaacacaactgaaaaccgccagttcctgaagcagcaggaaacactgagtca

SEQ ID NO: 317709 - DNA, 75 bp, synthetic construct
  source 1..75: mol_type = other DNA
agaaagacaaaccacagcagggggccgtgtattttgtgtcgttttccatacccgaagaggggctgaaacggatgc

SEQ ID NO: 317710 - DNA, 75 bp, synthetic construct
  source 1..75: mol_type = other DNA
cagttgcaggcatgggcagagcagcaagtcagggcgaatccccttcagcattccgataaccagtttctcgatgaa

SEQ ID NO: 317711 - DNA, 75 bp, synthetic construct
  source 1..75: mol_type = other DNA
tactgcagaaaatcgcccgtgagcatcagctgaagatgacgatcgacttcgatcgccatacggtcatggtttcac

SEQ ID NO: 317712 - DNA, 75 bp, synthetic construct
  source 1..75: mol_type = other DNA
ccagcagtttctctcccttgaatttgcgcaggtgctggacaaaatggcctacagtggcagcagcaccataaactg

SEQ ID NO: 317713 - DNA, 75 bp, synthetic construct
  source 1..75: mol_type = other DNA
gcttgagcgtctgaagaaattaatctggctggcggcgcaggatgtcagggggaggattactgggcgtgacgtcta

SEQ ID NO: 317714 - DNA, 75 bp, synthetic construct
  source 1..75: mol_type = other DNA
tgcaatgaaacacatttttcatcggctggatagtgaagctttattgttagtggagagaacacgttcaaaacaaaa

SEQ ID NO: 317715 - DNA, 75 bp, synthetic construct
  source 1..75: mol_type = other DNA
tcttgatgaggcgcagctcaagccatattttgaattaaacacggtgttgaatgaaggtgtattctggaccgcgaa

SEQ ID NO: 317716 - DNA, 75 bp, synthetic construct
  source 1..75: mol_type = other DNA
atgaataaccagtatttacagtttgttcgtgagcaactcatgattgccactgcagatctcagtgggtcgacaaaa

SEQ ID NO: 317717 - DNA, 75 bp, synthetic construct
  source 1..75: mol_type = other DNA
tcaattgccctggtcagtcctgttgagtttgcaacatcatcgtggcggcgtacccttctggaactggaagaacat

SEQ ID NO: 317718 - DNA, 75 bp, synthetic construct
  source 1..75: mol_type = other DNA
atgaataaccagtatttacagtttgttcgtgagcagctcattatcgccaccgctgatttgagtggggcaacaaaa

SEQ ID NO: 317719 - DNA, 75 bp, synthetic construct
  source 1..75: mol_type = other DNA
cgtgtattttgtgtccttctccattccggaagaggggctgaaacggatgctgggtgaaacccggcgttacggtat

SEQ ID NO: 317720 - DNA, 75 bp, synthetic construct
  source 1..75: mol_type = other DNA
aagtaccgtcgacaccctgaatatcatcagcaccggggtgcaggatatgcagcaggtgctggcgcaactccgcgt

SEQ ID NO: 317721 - DNA, 75 bp, synthetic construct
  source 1..75: mol_type = other DNA
atgaagctctggcccacgcttggcgtcgctttccttctgattgccggatggggaacatccatgcgtctgtcgtgg

SEQ ID NO: 317722 - DNA, 75 bp, synthetic construct
  source 1..75: mol_type = other DNA
cagaactcgccactaccagcgccgtcagtccggcttataccgcagacgctgaccataccggtaatgcctcctccc

SEQ ID NO: 317723 - DNA, 75 bp, synthetic construct
  source 1..75: mol_type = other DNA
aatcaaatcatccggactaccagcctggcgactgggtgctgggctacagcggctggcaggactacgacatatcca

SEQ ID NO: 317724 - DNA, 75 bp, synthetic construct
  source 1..75: mol_type = other DNA
gcaaatcggcaaactaaaaggttgccgcgtggtgggtgttgccggtggcgcggaaaaatgtcgccatgccacaga

SEQ ID NO: 317725 - DNA, 75 bp, synthetic construct
  source 1..75: mol_type = other DNA
acgaagcacaggccagcaccctgaaaagtaccgtcgacacactgaatatcatcagtgccggggtacaggatatgc

SEQ ID NO: 317726 - DNA, 75 bp, synthetic construct
  source 1..75: mol_type = other DNA
ttctgcccatgcttcggaaaatgtgaatacgcccgaaaatcgccagttcctgaagcagcaggaaacactgagtca

SEQ ID NO: 317727 - DNA, 75 bp, synthetic construct
  source 1..75: mol_type = other DNA
aacaatgacctgaagactaccgctgaagccgtgttgtctctggtaaaagatggcgcgaccgatggtgttcagatc

SEQ ID NO: 317728 - DNA, 75 bp, synthetic construct
  source 1..75: mol_type = other DNA
cccgaagaggggctgaaacggatgctgggcgaaacccggcattacggtattccggccacgctgcggggcatggtg

SEQ ID NO: 317729 - DNA, 75 bp, synthetic construct
  source 1..75: mol_type = other DNA
tcgccctgacagcaggactgtttatctctgttcatgcttcagaaaatatgaacacaactgaaaaccgccagttcc

SEQ ID NO: 317730 - DNA, 75 bp, synthetic construct
  source 1..75: mol_type = other DNA
ggtgttctgcagccaggggcacgacatcatccggggaaatctgcgcgtcaggcaggcgctggagaaagtggccac

SEQ ID NO: 317731 - DNA, 75 bp, synthetic construct
  source 1..75: mol_type = other DNA
gacaggcgctggagaaagtggccgccacaggggactgccggcaggtggctcagggactgctggacggcaccgggg

SEQ ID NO: 317732 - DNA, 75 bp, synthetic construct
  source 1..75: mol_type = other DNA
atgaatagccagtatttacagtttgttcgtgagcaactcatgattgccactgcggatctcagtgggtcgacaaaa

SEQ ID NO: 317733 - DNA, 75 bp, synthetic construct
  source 1..75: mol_type = other DNA
ggtgcgtcgtctggaggaacaaaatacgatattaaaaaaggctaccgcgctcttgatatcagactccctgaatag

SEQ ID NO: 317734 - DNA, 75 bp, synthetic construct
  source 1..75: mol_type = other DNA
tgacggaactggaagatgcagaacggaaaatcacagtatacaccctcttatcatggatgtgggcattattcaccc

SEQ ID NO: 317735 - DNA, 75 bp, synthetic construct
  source 1..75: mol_type = other DNA
gtgaagaactttgaagagactgagaagccaactgattttgatattgaagtggaaattagacaaaacccattcgta

SEQ ID NO: 317736 - DNA, 75 bp, synthetic construct
  source 1..75: mol_type = other DNA
gctggagaaatttcatgccagcgactgtacgctgtataacaatatcagcccgtctatggatcactggttatgtgc

SEQ ID NO: 317737 - DNA, 75 bp, synthetic construct
  source 1..75: mol_type = other DNA
ttacggcgttgctgggcgcagaggcagaaaacatcgatctcttcgaccgtatgcaactggaacacgttatcgcta

SEQ ID NO: 317738 - DNA, 75 bp, synthetic construct
  source 1..75: mol_type = other DNA
cgctaccatcttgagctaatgccacaggttggtgttagaagcattaaggagttttgggatgaattttccactaaa

SEQ ID NO: 317739 - DNA, 75 bp, synthetic construct
  source 1..75: mol_type = other DNA
acctttgtgtctcctgagcctcaagaaatgcctgatatctgcaaaactgaagcactatttgagcttgagcgtgaa

SEQ ID NO: 317740 - DNA, 75 bp, synthetic construct
  source 1..75: mol_type = other DNA
aggctgataacagacagccagcttacgaaagagttaatttaaacggtggttcacatccacttctaaaaatgcaag

SEQ ID NO: 317741 - DNA, 75 bp, synthetic construct
  source 1..75: mol_type = other DNA
gtcgaaagattgatagcttcggtgactggtcgccacagactgaacatccagctatcactatccagcgcaaagaac

SEQ ID NO: 317742 - DNA, 75 bp, synthetic construct
  source 1..75: mol_type = other DNA
gaattaaacttgatattgcttacgacaatgtgaagaactttgaagagactgaaaagccaactgattttgatattg

SEQ ID NO: 317743 - DNA, 75 bp, synthetic construct
  source 1..75: mol_type = other DNA
atcgtctttgtgtctcctgagcctcaagaaatgccagatatctgcaaaactgaagcattacttaatcttgagcgt

SEQ ID NO: 317744 - DNA, 75 bp, synthetic construct
  source 1..75: mol_type = other DNA
gaatattacccactgctgaaagcacaaagaattaaacttgatattgcttacgacaatgttaagaacttcgaagaa

SEQ ID NO: 317745 - DNA, 75 bp, synthetic construct
  source 1..75: mol_type = other DNA
tgcaggtcgcctacaaagacaaagagctgctgttgaaggctctggagggagttggcgttgttgttgaaaacgaaa

SEQ ID NO: 317746 - DNA, 75 bp, synthetic construct
  source 1..75: mol_type = other DNA
tcatccgtctggcaatggcgggccgggcggatgcccgtcgcctttcttatcgggaactcatcagggatctgaaac

SEQ ID NO: 317747 - DNA, 75 bp, synthetic construct
  source 1..75: mol_type = other DNA
atgtcatttctcgacgctaaatcgtacgatacgctttttggattacctgaactttatgaggatgcacttccccgg

SEQ ID NO: 317748 - DNA, 75 bp, synthetic construct
  source 1..75: mol_type = other DNA
tgctgtttgcccatccggaatctcaggactcggtggcaaaccgggtactgcttaaaccggccacgcagctcagca

SEQ ID NO: 317749 - DNA, 75 bp, synthetic construct
  source 1..75: mol_type = other DNA
cataaagcctggttgttgtggtgttacggcggaaacatttgctgggagcatcagatcgcgataacgcagtgggtg

SEQ ID NO: 317750 - DNA, 75 bp, synthetic construct
  source 1..75: mol_type = other DNA
cagttactgacaatggggaagaaccggcatcgaaagtaacccactggatgccgctgccagaaccgccgcaggagg

SEQ ID NO: 317751 - DNA, 75 bp, synthetic construct
  source 1..75: mol_type = other DNA
ggctgcggcttgtcatggcctgaaattaccgttataaaaacagacaatatcattgtctttcaggtagttatatgt

SEQ ID NO: 317752 - DNA, 75 bp, synthetic construct
  source 1..75: mol_type = other DNA
atgaagaataaacttaagaaatattttggttatctcttgattgtcgccctcacttataacgtagctattagacct

SEQ ID NO: 317753 - DNA, 75 bp, synthetic construct
  source 1..75: mol_type = other DNA
gccagcgttatgccacgctttccggcaccaacacgccgcgtgattttgtcgaatttccgtcgcaaatcaacgaac

SEQ ID NO: 317754 - DNA, 75 bp, synthetic construct
  source 1..75: mol_type = other DNA
agtatttgatggcgggaataaagaactctggcccgccattattgaatggatgatggatagcatgaaccgtctgga

SEQ ID NO: 317755 - DNA, 75 bp, synthetic construct
  source 1..75: mol_type = other DNA
ttatcaaatagcgcggcagtgtggccgaagtttgtctgttttggctcgccagatatcaagtagcacggctgaatc

SEQ ID NO: 317756 - DNA, 75 bp, synthetic construct
  source 1..75: mol_type = other DNA
gtgggtaggatcaatgttcctgatggcgactcattctgggaatttggtgttaatgaaaaattgcttgataaagct

SEQ ID NO: 317757 - DNA, 75 bp, synthetic construct
  source 1..75: mol_type = other DNA
ctgcttacgtcctttgggcttgaactcccggctatgaccgtggatgaacaattgctcaggacactggcgggggtc

SEQ ID NO: 317758 - DNA, 75 bp, synthetic construct
  source 1..75: mol_type = other DNA
tgtagaagtggcaagtgttgaagagggtgttcgcctgatggacgcactggctgattatgacgcctttcagtatga

SEQ ID NO: 317759 - DNA, 75 bp, synthetic construct
  source 1..75: mol_type = other DNA
gcgcgatgaagaattaaaagaaaaaattcaaaatcttataattaatttgtttgaaggggagtgttatgatcctga

SEQ ID NO: 317760 - DNA, 75 bp, synthetic construct
  source 1..75: mol_type = other DNA
aatactcaactcatggagcaattaaaagtatgggcaaaaaataatgatgaaagtgataatgttcgcgttgtgggg

SEQ ID NO: 317761 - DNA, 75 bp, synthetic construct
  source 1..75: mol_type = other DNA
tccagcggtaccggtcgttttttctctgatatcgcagactcatataaaccaatcatcgttagtgtgaaaggcata

SEQ ID NO: 317762 - DNA, 75 bp, synthetic construct
  source 1..75: mol_type = other DNA
cccctacaaatatcaaagaatcgctcaatgataacgctgaccgtttttataagatgtttcgcattcataccacgg

SEQ ID NO: 317763 - DNA, 75 bp, synthetic construct
  source 1..75: mol_type = other DNA
gccaacatgaagctgtgggacgagtgggaagaactcatccgcaacaaacagccggaagcagcggaggcactttac

SEQ ID NO: 317764 - DNA, 75 bp, synthetic construct
  source 1..75: mol_type = other DNA
tgctcatggttttgtggtgattagtgatactgcggaatttgtctataaaacgaacaattattacagtcaacaagc

SEQ ID NO: 317765 - DNA, 75 bp, synthetic construct
  source 1..75: mol_type = other DNA
cctgaactacaaattaattggccagtagatggagagttaagtctttctaaaaaagatatgaaacaacctaaattt

SEQ ID NO: 317766 - DNA, 75 bp, synthetic construct
  source 1..75: mol_type = other DNA
gagaatctatctattatttggcctagaaaaaatgaattaaacttgtcaaataaagatcagcaacatcctattttt

SEQ ID NO: 317767 - DNA, 75 bp, synthetic construct
  source 1..75: mol_type = other DNA
aatgctaacggccttgagatgtgggatgagagccttaccgatgaagatttatcagagatggggcttactgatcgc

SEQ ID NO: 317768 - DNA, 75 bp, synthetic construct
  source 1..75: mol_type = other DNA
cgatatcgaacagatcccttcgatgtattcagctctgaaatatcagggcaaaaaactgtacgaatacgcgcgtca

SEQ ID NO: 317769 - DNA, 75 bp, synthetic construct
  source 1..75: mol_type = other DNA
atggcggttaaattagaagtaattatctataccaatgaaaaaggcgcgacttttacccggattacagggagttat

SEQ ID NO: 317770 - DNA, 75 bp, synthetic construct
  source 1..75: mol_type = other DNA
accccttccacccattgtccgattcaacgagggagttcatgcagaaggagatcctgaacacgatgcatgaaaaat

SEQ ID NO: 317771 - DNA, 75 bp, synthetic construct
  source 1..75: mol_type = other DNA
gcacaccagtcagaacgtctgcctgaaggtttttatatgccccggactgctgaggagctgatgtccacactgcac

SEQ ID NO: 317772 - DNA, 75 bp, synthetic construct
  source 1..75: mol_type = other DNA
atagatcgtattatcaacgtattcagacacagtcagcaggtgctcatacccactcgctgtctggtactgcagcaa

SEQ ID NO: 317773 - DNA, 75 bp, synthetic construct
  source 1..75: mol_type = other DNA
ctactgcgtccccccaaaactttacgcctattatcgggaactcgctgaagatgccgaattaaacgctgttgctga

SEQ ID NO: 317774 - DNA, 75 bp, synthetic construct
  source 1..75: mol_type = other DNA
ccgcaacggggaaaccgtaaaagcctatctgttgagagtgatgttacctgccatcaggaaaattgacgacgcatc

SEQ ID NO: 317775 - DNA, 75 bp, synthetic construct
  source 1..75: mol_type = other DNA
ttcttccttgggactgacgacctcggacgcgatgttttaagccgtttactgagcggggctgcgccaaccgtaggc

SEQ ID NO: 317776 - DNA, 75 bp, synthetic construct
  source 1..75: mol_type = other DNA
tccggatgaagccgggcgttacagcatggacgttgagtacgggcagtacagcgttattctgttggtggagggatt

SEQ ID NO: 317777 - DNA, 75 bp, synthetic construct
  source 1..75: mol_type = other DNA
taacggcacctttgccttcagaaaccactgtgcagtctgaaggcgatgtgccatctgagagccagccagaaacat

SEQ ID NO: 317778 - DNA, 75 bp, synthetic construct
  source 1..75: mol_type = other DNA
ccggccacgacaacagatgcgacgggcagcacccggcagatgacctggagccgctacgggcagttgctggcgttc

SEQ ID NO: 317779 - DNA, 75 bp, synthetic construct
  source 1..75: mol_type = other DNA
cagtcagcatcttccagcgcaggaacggcatcaacaaaggccagtgaagcatcgaaaagtgctgctgctgcagag

SEQ ID NO: 317780 - DNA, 75 bp, synthetic construct
  source 1..75: mol_type = other DNA
gcatctgcaggtgcacacgcacatactgtcggtattggtgctcatacgcactccgttgcgattggctcacatgga

SEQ ID NO: 317781 - DNA, 75 bp, synthetic construct
  source 1..75: mol_type = other DNA
gataacttgtcgtgcaaaaaactttttgccacagacgaaattgtagcgcgtggtggtaatcagattcgaatgata

SEQ ID NO: 317782 - DNA, 75 bp, synthetic construct
  source 1..75: mol_type = other DNA
caggagctgactggctgacagcgattgagatgtataaaccaacagtgcgcatcgtggaagttaatgtgccacgcg

SEQ ID NO: 317783 - DNA, 75 bp, synthetic construct
  source 1..75: mol_type = other DNA
cggcggaatccgcggcaacgcgcgccgagacagcagctaaacgggcagaggatattgcatccgccgtggcgcttg

SEQ ID NO: 317784 - DNA, 75 bp, synthetic construct
  source 1..75: mol_type = other DNA
cgtattatcaacgtattcagacacagtcagcaggtgctcatacccactcgctgtctggtactgcagcaagtgctg

SEQ ID NO: 317785 - DNA, 75 bp, synthetic construct
  source 1..75: mol_type = other DNA
tcatggtaatggtattcgttggccaggaggcggcggttctgcgttagcattttatgatggcggtgggttcactta

SEQ ID NO: 317786 - DNA, 75 bp, synthetic construct
  source 1..75: mol_type = other DNA
gtcagttgtggatacctgaaggatttgctcatggatttttggtacttagtgatttagcagaagttttatataaaa

SEQ ID NO: 317787 - DNA, 75 bp, synthetic construct
  source 1..75: mol_type = other DNA
ggtgacagtacggtggatgtcgctaaccgcctgattgactggtgccagtcgcgcggtgaagcggttatcgccagt

SEQ ID NO: 317788 - DNA, 75 bp, synthetic construct
  source 1..75: mol_type = other DNA
cttcaacagccacaacgaaggctggcgaagccactgagcaggccacggcagcagcgaggtcagcttccgcagcga

SEQ ID NO: 317789 - DNA, 75 bp, synthetic construct
  source 1..75: mol_type = other DNA
gtcgcgatctccatcaggaagatgaacctctgccactgaccctactgggtggctatattgtaatggtgaataaac

SEQ ID NO: 317790 - DNA, 75 bp, synthetic construct
  source 1..75: mol_type = other DNA
gcgtcttgataacgtgattctggtgaagcgcgaagatcgccagccagtgcacagcttcaagctgcgcggcgcata

SEQ ID NO: 317791 - DNA, 75 bp, synthetic construct
  source 1..75: mol_type = other DNA
ccgcttctgcgggtaaccacgcgcagggcgtcgcgttttcttccgcacggttaggcgtgaaggcgctgatcgtca

SEQ ID NO: 317792 - DNA, 75 bp, synthetic construct
  source 1..75: mol_type = other DNA
aggcaattccgcgaaggcggccaaaacgtctgagacaaacgctaagtcctctgaaacggcagcagaacagagtgc

SEQ ID NO: 317793 - DNA, 75 bp, synthetic construct
  source 1..75: mol_type = other DNA
tgagcgggggccacaggggttacaggggccaccgggtcctgccggagagagagggccggcaggcgaagccggacc

SEQ ID NO: 317794 - DNA, 75 bp, synthetic construct
  source 1..75: mol_type = other DNA
acgtggtgaacagggcatacaggggccagttggtgcaaccggaccggcggggccgagaggagagcagggtattca

SEQ ID NO: 317795 - DNA, 75 bp, synthetic construct
  source 1..75: mol_type = other DNA
aatttgtatacaaaactacgaattattatagccccaaatcagaacgttcaataaactatgccgactcacagataa

SEQ ID NO: 317796 - DNA, 75 bp, synthetic construct
  source 1..75: mol_type = other DNA
tggttatgccctgatgcaggggcagacttttgacaaatctgcttacccgaaacttgcagtggcttatccgtcagg

SEQ ID NO: 317797 - DNA, 75 bp, synthetic construct
  source 1..75: mol_type = other DNA
atttgggtacgaaaaccacatcgtcgtttgattacggcactaaatccacgaataacaccggggcgcatacgcaca

SEQ ID NO: 317798 - DNA, 75 bp, synthetic construct
  source 1..75: mol_type = other DNA
ggcagctggcagtgcgacggcggcagctcagagcaaaagtacggcggaatccgcggcaacgcgcgccgagacagc

SEQ ID NO: 317799 - DNA, 75 bp, synthetic construct
  source 1..75: mol_type = other DNA
catgatgaaaaaaagctttatttccatcgtagttaacttattttcaattattagcgtcacggtactggctgcatg

SEQ ID NO: 317800 - DNA, 75 bp, synthetic construct
  source 1..75: mol_type = other DNA
gagaccattgggattacctggccggaaatcgacagcgagatcctcacctctgccaaagacagcgttgccaaatcc

SEQ ID NO: 317801 - DNA, 75 bp, synthetic construct
  source 1..75: mol_type = other DNA
acgtctgagacaaacgctaagtcctctgaaacggcagcagcacagagtgcctccgcagcagcaggctcaaaaaca

SEQ ID NO: 317802 - DNA, 75 bp, synthetic construct
  source 1..75: mol_type = other DNA
accaacttttggtcaatgggaaggcgttattttaagtgcagaaaataaacgtcagttctggatccctgaaggttt

SEQ ID NO: 317803 - DNA, 75 bp, synthetic construct
  source 1..75: mol_type = other DNA
aaattcctgaagtactcattattgagccacagatatttagtgacgagcgtgggtacttttttgaaagcttcaatc

SEQ ID NO: 317804 - DNA, 75 bp, synthetic construct
  source 1..75: mol_type = other DNA
tggcagtggatatccgtcgttcatcacctacctttggtaaatgggttggagcggtgctcagcgcagagaataaac

SEQ ID NO: 317805 - DNA, 75 bp, synthetic construct
  source 1..75: mol_type = other DNA
ggaaagtcggcagaaagcgccgcatcatccgcttcaacagccacaacgaaggctggcgaagccactgaacaggcc

SEQ ID NO: 317806 - DNA, 75 bp, synthetic construct
  source 1..75: mol_type = other DNA
ggtggggagtatggggcattatggcgtaatgatggcgctaaaacttacctgctgcttaccaatcaaggtgatgtt

SEQ ID NO: 317807 - DNA, 75 bp, synthetic construct
  source 1..75: mol_type = other DNA
cgagacagcggcaaaacgggcagaggatattgcatccgccgtggcgcttgaggatgcaagtacgacgaaaaaggg

SEQ ID NO: 317808 - DNA, 75 bp, synthetic construct
  source 1..75: mol_type = other DNA
aggaaaatatgactctggattgaaatcaatagtttggtcagattataaaaatcaaaaattgactgacacgatgtc

SEQ ID NO: 317809 - DNA, 75 bp, synthetic construct
  source 1..75: mol_type = other DNA
gcaaaaggccatcagaaagcgattattgtttaccaggatacgttgcagacaggaaaatatgacactgcactgaaa

SEQ ID NO: 317810 - DNA, 75 bp, synthetic construct
  source 1..75: mol_type = other DNA
ctgaaatcaacagtgtggtcagattataaaaatcaaaaactaactgacacaatgtcattacgttttttggttcgc

SEQ ID NO: 317811 - DNA, 75 bp, synthetic construct
  source 1..75: mol_type = other DNA
gtgtattattctcgctgcttgcaggatgtgcctctgaatctcctattgatgaaaaaagaaaaaactcaaaccgca

SEQ ID NO: 317812 - DNA, 75 bp, synthetic construct
  source 1..75: mol_type = other DNA
atgatgcaaccggactggcaccccgccgatattatcaaacagggaacatcgctggctgaggtttcacgcagggcc

SEQ ID NO: 317813 - DNA, 75 bp, synthetic construct
  source 1..75: mol_type = other DNA
tcccgcagcgcgggactggcgttcgccacgctggcatacgcgatgacccgctcctggccgcgcggtgaaaaactc

SEQ ID NO: 317814 - DNA, 75 bp, synthetic construct
  source 1..75: mol_type = other DNA
attgaccagcgcttccgtcaggactttggggatgttgtttataagtataagggcagcgataagaacgatactgta

SEQ ID NO: 317815 - DNA, 75 bp, synthetic construct
  source 1..75: mol_type = other DNA
atggtggggtttggtaataaatacattgccgctcaatttggcatttctccaggccttgccgcaaccgttaatgcg

SEQ ID NO: 317816 - DNA, 75 bp, synthetic construct
  source 1..75: mol_type = other DNA
ttttgcgttacttctttattggtgaatccgcaatgtgggccgcacgcgtcgggcgttaccaggaagcgtgcgaca

SEQ ID NO: 317817 - DNA, 75 bp, synthetic construct
  source 1..75: mol_type = other DNA
gaactgcgttcgggggtgtgctggcgggcgttgctgcggcaagctcacaggagcgcgtggcggcaaagcaggtgt

SEQ ID NO: 317818 - DNA, 75 bp, synthetic construct
  source 1..75: mol_type = other DNA
tatgtgcagccacatttttactggctggctgtgcaccacactcacctattgatgcaaaaaaaacgggtgcgtccg

SEQ ID NO: 317819 - DNA, 75 bp, synthetic construct
  source 1..75: mol_type = other DNA
tgtctggcagcacttttatgacgataacttctccggcacggatttcaccactcactatgtggtgctcggttttcg

SEQ ID NO: 317820 - DNA, 75 bp, synthetic construct
  source 1..75: mol_type = other DNA
ccgctggcccaaaggtgaaagattgattgcagaagcgttagatgttgcgcctgagaacatctggccttcacgcta

SEQ ID NO: 317821 - DNA, 75 bp, synthetic construct
  source 1..75: mol_type = other DNA
atgcctgaagagcatcatctctcatcattttccaccgttccgctggaagcgctacgtgacgagtattttgttaca

SEQ ID NO: 317822 - DNA, 75 bp, synthetic construct
  source 1..75: mol_type = other DNA
tcgttgcacactacatgacactctgggcggcagacagccgggcgatgctggctggcggtccgggcggttcaacca

SEQ ID NO: 317823 - DNA, 75 bp, synthetic construct
  source 1..75: mol_type = other DNA
tgacaaggtaagtgtcagttatgacatcagcacgacgctgaatcctgatgcaggcttctggaataacacccgata

SEQ ID NO: 317824 - DNA, 75 bp, synthetic construct
  source 1..75: mol_type = other DNA
cttgatgacgccggacaatggctgcgttcgcgtgtggtgtggttagggatgcgtcagcctccacgcggcttaatc

SEQ ID NO: 317825 - DNA, 75 bp, synthetic construct
  source 1..75: mol_type = other DNA
ttcttcctggggactgacgacctcggacgcgacgttttaagccgtttattgagcggcgctgcgcctaccgctggc

SEQ ID NO: 317826 - DNA, 75 bp, synthetic construct
  source 1..75: mol_type = other DNA
gtagcgtttgccggaccgagtttgtcccacgctatgtttgctgtctggctggcgctgctgccgcgtatggtacgt

SEQ ID NO: 317827 - DNA, 75 bp, synthetic construct
  source 1..75: mol_type = other DNA
ctcataaaaaaactgaacgcttaaaaactgaatttatcgggctgattgatactgtacggccagcactaaacgaca

SEQ ID NO: 317828 - DNA, 75 bp, synthetic construct
  source 1..75: mol_type = other DNA
tggaggccgcatttgagcggctgacgatggcggaactggggctgcgtctgccgataacagcaggccagttttacg

SEQ ID NO: 317829 - DNA, 75 bp, synthetic construct
  source 1..75: mol_type = other DNA
atcccgcagatattattgctggcttgcggaaaaaaggtacgtcaatggcggcggaatctcgcagaaacggtttaa

SEQ ID NO: 317830 - DNA, 75 bp, synthetic construct
  source 1..75: mol_type = other DNA
ccggtttctggaacagcaccgcctacgggcgcgagttctactggtggtggtcgatgttcggcgctggtggcaggc

SEQ ID NO: 317831 - DNA, 75 bp, synthetic construct
  source 1..75: mol_type = other DNA
accatgatactttgcaagctggaaaatatgacactgcactgaaatcaatcgtgtggtcagattataaaaatcaaa

SEQ ID NO: 317832 - DNA, 75 bp, synthetic construct
  source 1..75: mol_type = other DNA
tatgcttattgatctcgcttctcgcgggatgttcctctaaatctcctattgatgcaaagaaaaaaaactccccag

SEQ ID NO: 317833 - DNA, 75 bp, synthetic construct
  source 1..75: mol_type = other DNA
aaaccgctttgggcaaaagcgggcatttattattggcatggggctgtgcaccatcggtgctgcagcggtagctat

SEQ ID NO: 317834 - DNA, 75 bp, synthetic construct
  source 1..75: mol_type = other DNA
atgtcaggagtctgttacttcatcctaataaagaaaccgataaattttcaatttcttaaggatttcttaatatta

SEQ ID NO: 317835 - DNA, 75 bp, synthetic construct
  source 1..75: mol_type = other DNA
catgtcttctggatatgtttaccgcatcgacacattccagccatatgtcgataaagccttattttttaaacatgt

SEQ ID NO: 317836 - DNA, 75 bp, synthetic construct
  source 1..75: mol_type = other DNA
catttttctttcagatgtttctaaacactggaaattgagagatttagctgattatctttacatgagcgagagctt

SEQ ID NO: 317837 - DNA, 75 bp, synthetic construct
  source 1..75: mol_type = other DNA
tatggttttgaagttcgcaaaaacggcgtattaatcgcatccagagaaactaaaggggccattcccggtagttac

SEQ ID NO: 317838 - DNA, 75 bp, synthetic construct
  source 1..75: mol_type = other DNA
atgctgatgtcattcctgtcacgtctttccattatgctgcctgttacactggctgaaatagcagttatttatctc

SEQ ID NO: 317839 - DNA, 75 bp, synthetic construct
  source 1..75: mol_type = other DNA
gtcattgaacacacgccatctgatacagattcaaagatatgggatacacgaaaaacatccccggcaacagtcctt

SEQ ID NO: 317840 - DNA, 75 bp, synthetic construct
  source 1..75: mol_type = other DNA
gtgggattatgcttgctcttgtcggttgtgctacaaaacctgtctcaaatgaacaagccactcctgttcctgaaa

SEQ ID NO: 317841 - DNA, 75 bp, synthetic construct
  source 1..75: mol_type = other DNA
gattcatttattaaactgatgttatcattttcagttcccatgattatcggtatattcttatgtgatatggggttt

SEQ ID NO: 317842 - DNA, 75 bp, synthetic construct
  source 1..75: mol_type = other DNA
tgattcatcttctatcactggcgttatcttgtaccaatttatctctgtgatctttgttattcatggtgggataca

SEQ ID NO: 317843 - DNA, 75 bp, synthetic construct
  source 1..75: mol_type = other DNA
ttgcttatccagatttattaataagtatgatagataatataaattcacaaaatcatatacatccagattttaagg

SEQ ID NO: 317844 - DNA, 75 bp, synthetic construct
  source 1..75: mol_type = other DNA
tgttgcgtaaattgatccctcaaaacgccatagcgagatacatcggtgttacgccacaagcggtgaatctgtggt

SEQ ID NO: 317845 - DNA, 75 bp, synthetic construct
  source 1..75: mol_type = other DNA
atggctacagtcagtgccggagatggttaccctgtcgccatccttaaccggaatcagccggcattctactgtgtg

SEQ ID NO: 317846 - DNA, 75 bp, synthetic construct
  source 1..75: mol_type = other DNA
tttctgaaagtgaaaatatagagatttcagtaattgataataaatcaaagttttttggaattgatagccgattca

SEQ ID NO: 317847 - DNA, 75 bp, synthetic construct
  source 1..75: mol_type = other DNA
gccggggttaactcgtcagggaattacgtcgcatttatcgcgcctaaaccctatgagtgtgacaacagactggaa

SEQ ID NO: 317848 - DNA, 75 bp, synthetic construct
  source 1..75: mol_type = other DNA
ggatgagtaccgaaaaagggcgccaggcactgctgaatcagctctacaggctcactcagggtgcaagcgaaatgg

SEQ ID NO: 317849 - DNA, 75 bp, synthetic construct
  source 1..75: mol_type = other DNA
tgcgtccggatcgcaactgcttcgggccggggtcaactcgtcagggaattacgtcgcgtttatcgcgcctaaacc

SEQ ID NO: 317850 - DNA, 75 bp, synthetic construct
  source 1..75: mol_type = other DNA
aaaataggcagaagggtgtatcctggaaagaacttataactgatagtatcaatagtgacccatactctgcaggac

SEQ ID NO: 317851 - DNA, 75 bp, synthetic construct
  source 1..75: mol_type = other DNA
cgtgaaaggaaatttattagtattaataaagataacttcagtgaagttatgtcatcaatgaaaccatcagtggat

SEQ ID NO: 317852 - DNA, 75 bp, synthetic construct
  source 1..75: mol_type = other DNA
ataaagcccgacctccacgagtacagataacctacgatgttgaaaccggggatgccgaaacagcgaaagagttac

SEQ ID NO: 317853 - DNA, 75 bp, synthetic construct
  source 1..75: mol_type = other DNA
gcttttactgaattatttttcagaatttgtaaagcaggtggaataattattgccattttacccggaggttttatc

SEQ ID NO: 317854 - DNA, 75 bp, synthetic construct
  source 1..75: mol_type = other DNA
ttgaaaaagaagcaaaattaaattctattccagtaattgaagggagaatggtttcacaatatcgatttggctgta

SEQ ID NO: 317855 - DNA, 75 bp, synthetic construct
  source 1..75: mol_type = other DNA
aaatattactgaatggaggctatttttatcattatacgactccggaattaaatggtgtgataaactctcgggctg

SEQ ID NO: 317856 - DNA, 75 bp, synthetic construct
  source 1..75: mol_type = other DNA
ctgcagccctccagcgcccagcttctctggatcctggacatctacggcttcttcgtcgccggcttcctgatcacc

SEQ ID NO: 317857 - DNA, 75 bp, synthetic construct
  source 1..75: mol_type = other DNA
ttcggcagcgtcggcctggtggtctaccggcaggcgctgaccagcgcggcgctgcccggcctgccggccgatgcg

SEQ ID NO: 317858 - DNA, 75 bp, synthetic construct
  source 1..75: mol_type = other DNA
caaataagacttcacggtgaaagtagatctacgatcacacgagacacagttttatctgtaatggcaagccgtaca

SEQ ID NO: 317859 - DNA, 75 bp, synthetic construct
  source 1..75: mol_type = other DNA
cagccgctggctgatgtccggactgaaatcgcccggcaggtgaacagcggggagctgattcagctggattcggtt

SEQ ID NO: 317860 - DNA, 75 bp, synthetic construct
  source 1..75: mol_type = other DNA
gcaatacgtcagggtaaacttcctgacggtaccgatctctccaggatggtcaatggcgtgaataaacaccgcagc

SEQ ID NO: 317861 - DNA, 75 bp, synthetic construct
  source 1..75: mol_type = other DNA
cagaagaacgtacgttcaccgtgctggagccgctccgggtgccggacaacgccctgcgtgcagctgaaacctttg

SEQ ID NO: 317862 - DNA, 75 bp, synthetic construct
  source 1..75: mol_type = other DNA
ccggatttatacgccgcttgcgcctgagcaggctgcgcgcaaagtggaaagtgtgtctgcggtgcgcctggccag

SEQ ID NO: 317863 - DNA, 75 bp, synthetic construct
  source 1..75: mol_type = other DNA
gccagacgctgattgctgacagtgcggaagccgcgctgcgactggctcaggagaatccggagagcggggtggtga

SEQ ID NO: 317864 - DNA, 75 bp, synthetic construct
  source 1..75: mol_type = other DNA
gcccactgagcgggccgtgaagctggcccacgattatgtggaggggaccggtgccggaacgagtgcttcccggac

SEQ ID NO: 317865 - DNA, 75 bp, synthetic construct
  source 1..75: mol_type = other DNA
cgcctgacgctgaaggtctcgcagcttgacggcagctggagcctgtaccgcagccggacgctggcagtttcagag

SEQ ID NO: 317866 - DNA, 75 bp, synthetic construct
  source 1..75: mol_type = other DNA
agctgggcagggagcagatgacaatccgggtgctggagcctgtgtggctggacagcaaaacccgtcatcagcgcg

SEQ ID NO: 317867 - DNA, 75 bp, synthetic construct
  source 1..75: mol_type = other DNA
cgcggaggcgcgcaggccctgcgtgagcgcacggaagacgtggccatgatggcccgttcacagggccgtgaggtg

SEQ ID NO: 317868 - DNA, 75 bp, synthetic construct
  source 1..75: mol_type = other DNA
cagccggacgctggcagtttcagagggggatcgcgtcagggcgctgggtcgtgagctgaagggggccatcaaagc

SEQ ID NO: 317869 - DNA, 75 bp, synthetic construct
  source 1..75: mol_type = other DNA
agatgcgggaggccggggtggaggcacgcacgctggccagtttcctcagtgaaacccgtcaggccattcaggcag

SEQ ID NO: 317870 - DNA, 75 bp, synthetic construct
  source 1..75: mol_type = other DNA
ggatgctgagcaggctgtcagtctggccatcccgcgcgcacagcagggacaggtacacctcagtgaaattaccct

SEQ ID NO: 317871 - DNA, 75 bp, synthetic construct
  source 1..75: mol_type = other DNA
aagcccggtggccattctcagcggtcgcggaggtgcgcagaccctgcgtgagcgcacggaagacgtggccatgat

SEQ ID NO: 317872 - DNA, 75 bp, synthetic construct
  source 1..75: mol_type = other DNA
atatccagccacaggacagtgcgcacgcgtttatggagatgtcagctgctggggcaacgctatatacgctggcag

SEQ ID NO: 317873 - DNA, 75 bp, synthetic construct
  source 1..75: mol_type = other DNA
atatcgccgataacaaatttttcaacggcgaaacatcaccgctcttttcgcaaagccaggccaaactggcgcgcc

SEQ ID NO: 317874 - DNA, 75 bp, synthetic construct
  source 1..75: mol_type = other DNA
ggatgataattgctggacgctaacacctgacggtcacggcggcctgaaacgtactcaagaaagcacactcctcca

SEQ ID NO: 317875 - DNA, 75 bp, synthetic construct
  source 1..75: mol_type = other DNA
gcacggcaaaatcaccttctctgatggtcgcatcctgcgtaccaccaaaacgcgtcacccgcgtggttttatgca

SEQ ID NO: 317876 - DNA, 75 bp, synthetic construct
  source 1..75: mol_type = other DNA
gcaagaagcgaaacgagcggcaaagctggcgagcggtttagggttacgtagctttaaccttgatttgatgcatgg

SEQ ID NO: 317877 - DNA, 75 bp, synthetic construct
  source 1..75: mol_type = other DNA
ggatgcagaaatcaccatggaagcgaacccaggcacggtagaagccgatcgctttgttgattatcagcgtgctgg

SEQ ID NO: 317878 - DNA, 75 bp, synthetic construct
  source 1..75: mol_type = other DNA
aacccggagagtggggtggtgatacgcctgcacggcgaagagcgcctgctcaatgccgcgcggctgaccggggga

SEQ ID NO: 317879 - DNA, 75 bp, synthetic construct
  source 1..75: mol_type = other DNA
tgtcctggagccgctgcgggtgccggataacgccctgcgagcagctgaaacctttgcggagtacaccggcgcggt

SEQ ID NO: 317880 - DNA, 75 bp, synthetic construct
  source 1..75: mol_type = other DNA
cgcaggtacgtgagcagatactgcgtaccgaacgcgaatgggtggtgaacatgccggaaaaagagatagagatgg

SEQ ID NO: 317881 - DNA, 75 bp, synthetic construct
  source 1..75: mol_type = other DNA
ctctgaaatacaaaacacccgatgacgttcatcaggcgttttacagacagaaaagtgtcaacgtatatcaggact

SEQ ID NO: 317882 - DNA, 75 bp, synthetic construct
  source 1..75: mol_type = other DNA
cgggagctgtaagcagtaataagagtaatgtatatcttactgcaggcatcgcacgggaaggggatatgtcattgt

SEQ ID NO: 317883 - DNA, 75 bp, synthetic construct
  source 1..75: mol_type = other DNA
tacacggacaaccttgaggactggcagcaacaggtccggcagtctgacggcggcaaaaccgcccacgacctgctg

SEQ ID NO: 317884 - DNA, 75 bp, synthetic construct
  source 1..75: mol_type = other DNA
aatcgccccttccgcacataaaattggcgcatcgagcgcaattgaagcactgcatcgccaggtcgtcagcggtct

SEQ ID NO: 317885 - DNA, 75 bp, synthetic construct
  source 1..75: mol_type = other DNA
aacggcgttgaggatcgtttgaaatcccgcttcggctgggggctgactgtggcgatcgaaccgccagagctggaa

SEQ ID NO: 317886 - DNA, 75 bp, synthetic construct
  source 1..75: mol_type = other DNA
gccgggcgaagtggcgttctttatcgccaagcgtctacgatctaacgtacgtgagctggaaggggcgctgaaccg

SEQ ID NO: 317887 - DNA, 75 bp, synthetic construct
  source 1..75: mol_type = other DNA
agttagagttttttccagtatcgattttccgattcgtttggtggtaacccaccattatattcgtgcggtcttagt

SEQ ID NO: 317888 - DNA, 75 bp, synthetic construct
  source 1..75: mol_type = other DNA
cctgcacagcggttttggcattgccagaatcacagcggtggctggtgatggactgacagcaactgccgatgtggt

SEQ ID NO: 317889 - DNA, 75 bp, synthetic construct
  source 1..75: mol_type = other DNA
agcaactactaccgcgccaatactgctggcaagaccggaacacttcgcccttcgcataccgagggaatgtcgtgg

SEQ ID NO: 317890 - DNA, 75 bp, synthetic construct
  source 1..75: mol_type = other DNA
gcgataacacgctggccttgtacgcgccaaaccgttttgtcctcgactgggtacgggacaagtacctcaataata

SEQ ID NO: 317891 - DNA, 75 bp, synthetic construct
  source 1..75: mol_type = other DNA
gggcctggaatcttctaaatccgatcaaccgtgtatttatcgctgtcacgcaggattaaccgatttctcaattcc

SEQ ID NO: 317892 - DNA, 75 bp, synthetic construct
  source 1..75: mol_type = other DNA
ggtttaatgcgtgggtaaaccaacaacggatggccagcgctcgtgagttactgtgccatagtgactggagcatcg

SEQ ID NO: 317893 - DNA, 75 bp, synthetic construct
  source 1..75: mol_type = other DNA
gctgccgcatgagcgatcgttgtggggggctggaagcctctaaatccgatcaaccttgtatttatcgttgccatg

SEQ ID NO: 317894 - DNA, 75 bp, synthetic construct
  source 1..75: mol_type = other DNA
gtgagcgatttcatcaacaatgtaagtgtagattcaattggtcaacgcaacagttatgtgaaaacatggggttgc

SEQ ID NO: 317895 - DNA, 75 bp, synthetic construct
  source 1..75: mol_type = other DNA
tgaatatacagcatctgcgacggtcgcatagccttcgccatggcaggcgtcataccccgcaaaggcgaaagaggt

SEQ ID NO: 317896 - DNA, 75 bp, synthetic construct
  source 1..75: mol_type = other DNA
gtggatgaggtcgcctttaaaaaaggacatcgttatataacggtgatctccgatcgcgatggtcgtgcgctggcc

SEQ ID NO: 317897 - DNA, 75 bp, synthetic construct
  source 1..75: mol_type = other DNA
cattaaattcacgcagagcgccgatgttctgacgctggtgcatcccgcataccctccgaaagaactgcgccgcta

SEQ ID NO: 317898 - DNA, 75 bp, synthetic construct
  source 1..75: mol_type = other DNA
ctgaaccttttaccctcggtattgagctggaaatgcaggtggttaatccgccgggctacgatcttagtcaggact

SEQ ID NO: 317899 - DNA, 75 bp, synthetic construct
  source 1..75: mol_type = other DNA
cttcaatgctgattgacgcggttaaaaatgagatcacggccggagaggtaaagcacgatatcaccgaaagtatgc

SEQ ID NO: 317900 - DNA, 75 bp, synthetic construct
  source 1..75: mol_type = other DNA
gcccgtcaacgtgaaaccaataacctccgggcaatatatcgctggcacccggcatttgccgacggcgattttatt

SEQ ID NO: 317901 - DNA, 75 bp, synthetic construct
  source 1..75: mol_type = other DNA
cgcactttatcgccctttctgccgcatcgccgtatatgcagggaacggatacacgttttgcctcctcacgaccga

SEQ ID NO: 317902 - DNA, 75 bp, synthetic construct
  source 1..75: mol_type = other DNA
tgcatcgccaggtcgtcagcggtctgaatgaagcgcagctgatgcgcgatttcgtcgccgatggtggctcgctga

SEQ ID NO: 317903 - DNA, 75 bp, synthetic construct
  source 1..75: mol_type = other DNA
acataaaattggtgcatcgagcgcgattgaggccctgcatcgccaggtcgtcagcggtctgaatgaagcgcagct

SEQ ID NO: 317904 - DNA, 75 bp, synthetic construct
  source 1..75: mol_type = other DNA
atggaaaaacattacgtcggttctgaaattggtcaattgcgtagtgttatgctgcaccgcccaaatttaagtctg

SEQ ID NO: 317905 - DNA, 75 bp, synthetic construct
  source 1..75: mol_type = other DNA
tgcggggaggcgtggggacaacaaccatcaccgccgcattagcctggtcattacaaatgctgggagaaaatgtcc

SEQ ID NO: 317906 - DNA, 75 bp, synthetic construct
  source 1..75: mol_type = other DNA
tattgaagaggctgacaagaaatacggcatcagttatcaacgacagaaagaactctcaggcatcgcatcatcagt

SEQ ID NO: 317907 - DNA, 75 bp, synthetic construct
  source 1..75: mol_type = other DNA
cggccttgctgttcttctacggcaaggtgctgtgcacggatctgccctggcagggcatcaacgaagaccagaacc

SEQ ID NO: 317908 - DNA, 75 bp, synthetic construct
  source 1..75: mol_type = other DNA
ctgttgagctgcctaaacaccgctcctgtatgcatcttgacaccgttatgactcatatcgatatcgacaccttct

SEQ ID NO: 317909 - DNA, 75 bp, synthetic construct
  source 1..75: mol_type = other DNA
gtactctcggttgaacgggcaggtgaagagcatgacatcttcgcaaatacgctgcgcgatcagggggtggaagtc

SEQ ID NO: 317910 - DNA, 75 bp, synthetic construct
  source 1..75: mol_type = other DNA
gtgttccatttgatggttctactgatatcactttaaccgctgcgcatgttgccgctttcgcaagaagggcaacag

SEQ ID NO: 317911 - DNA, 75 bp, synthetic construct
  source 1..75: mol_type = other DNA
tatacctcgccaacatattcagcgagtaagccttccagcgttaccggtggtgttgtttatacgatgtatagctca

SEQ ID NO: 317912 - DNA, 75 bp, synthetic construct
  source 1..75: mol_type = other DNA
ctgaccctactgggtggctatattgtaatggtgcataaacccgcgccatccatgccagtaatccatgacgttccg

SEQ ID NO: 317913 - DNA, 75 bp, synthetic construct
  source 1..75: mol_type = other DNA
ccatgtcagaaataaaagatttggttgataacattgacacctttgttcctcaaggtgcacctaaaaataattact

SEQ ID NO: 317914 - DNA, 75 bp, synthetic construct
  source 1..75: mol_type = other DNA
cgcactccgttgcgattggttcacatggacacaccatcaccgttaacgctgctggtaacgcggaaaacaccgtca

SEQ ID NO: 317915 - DNA, 75 bp, synthetic construct
  source 1..75: mol_type = other DNA
tgaacggtaatgcattaacagcaacaaagctgcaaacgccaagacgggtttctggtgttgagtttgatggttcca

SEQ ID NO: 317916 - DNA, 75 bp, synthetic construct
  source 1..75: mol_type = other DNA
ctattcgcctgcgcggagaagcactgcgagataatccaggccttgtagcccttaccactgctgagcgctggaacg

SEQ ID NO: 317917 - DNA, 75 bp, synthetic construct
  source 1..75: mol_type = other DNA
tattcatcatcggaacgcgctattcattccattctgatgagtaataaaggcgataccgtagacagcgtattctat

SEQ ID NO: 317918 - DNA, 75 bp, synthetic construct
  source 1..75: mol_type = other DNA
acacgtaagcaaaatctggaaacagagaaaatccaagcgcaaatagcagtaactcaggcccaggcagaagcagac

SEQ ID NO: 317919 - DNA, 75 bp, synthetic construct
  source 1..75: mol_type = other DNA
ctcaccactgctgagcgttgggacgataagctacccgataccatgatccccggcagtacagttccgtttatctct

SEQ ID NO: 317920 - DNA, 75 bp, synthetic construct
  source 1..75: mol_type = other DNA
acggatacatatgccgatgcggatggtggcgttccctggaatgccgaatcaggcgcttacaatgtcacccgctct

SEQ ID NO: 317921 - DNA, 75 bp, synthetic construct
  source 1..75: mol_type = other DNA
gagctgtgggaagaaaccggcatcagcgcgcaaccgcaacactttattcgtatgcatcagtggattgcgccagat

SEQ ID NO: 317922 - DNA, 75 bp, synthetic construct
  source 1..75: mol_type = other DNA
cgctacaaaaaatggaaaaactgtcgtcgcgtcttgataacgtgattctggtgaagcgcgaagatcgccagccag

SEQ ID NO: 317923 - DNA, 75 bp, synthetic construct
  source 1..75: mol_type = other DNA
atggctgactcgcaacccctgtcaggcgccccggaaggtgccgaatatttaagagctgtgctacgtgcgccggtc

SEQ ID NO: 317924 - DNA, 75 bp, synthetic construct
  source 1..75: mol_type = other DNA
ggcgaagtgctgcttcatggcgcgaactttgacgaagcgaaagcgaaagcgatcgaactgtcacagcagcagggg

SEQ ID NO: 317925 - DNA, 75 bp, synthetic construct
  source 1..75: mol_type = other DNA
atggctgactcacaacccctgtccggtgctccggaaggtgccgaatatttaagagcggtgctgcgcgcgccggtc

SEQ ID NO: 317926 - DNA, 75 bp, synthetic construct
  source 1..75: mol_type = other DNA
gcgtggggctgtttgctgaaggtgttgcggtaaaacgcatcggcgatgagactttccgcctgtgtcgggagtacc

SEQ ID NO: 317927 - DNA, 75 bp, synthetic construct
  source 1..75: mol_type = other DNA
aagtgattgccgtggaagcggaagactccgcctgcctgaaagcggcgctggatgcaggtcatccggttgatctgc

SEQ ID NO: 317928 - DNA, 75 bp, synthetic construct
  source 1..75: mol_type = other DNA
tcagctggtttaatcccgaagatcttgccactaagcgtaaagcgatggcccgtggactacgaaaaattttgctcg

SEQ ID NO: 317929 - DNA, 75 bp, synthetic construct
  source 1..75: mol_type = other DNA
tgctgagtcagtcagaaaagaggtgaatactaatgttaaagggagccggcgggagcaacgtcgccgccgctgttt

SEQ ID NO: 317930 - DNA, 75 bp, synthetic construct
  source 1..75: mol_type = other DNA
tacaccgacggttgtgtcttttgatatgaagggcacggtcgatcagttcaccgaccaggcgggggcacagtccct

SEQ ID NO: 317931 - DNA, 75 bp, synthetic construct
  source 1..75: mol_type = other DNA
taaccacgcgcagggcgtcgcgttttcttctgcgcggttaggcgtgaaggccctgatcgttatgccaaccgccac

SEQ ID NO: 317932 - DNA, 75 bp, synthetic construct
  source 1..75: mol_type = other DNA
cgaaacccggttgaatgagttgggttacgattgccacgacgaaaccaataacccggcgttcaggttctttttggc

SEQ ID NO: 317933 - DNA, 75 bp, synthetic construct
  source 1..75: mol_type = other DNA
aaaactacgacggcaccaccggatcgtttgccgatctgctgcgtctggttgctgcgatcgacgggatcgatcgta

SEQ ID NO: 317934 - DNA, 75 bp, synthetic construct
  source 1..75: mol_type = other DNA
ggacgagtcgctactggcgtggagcggtgccaacaaagcctggtttggtcgcccgacgcatccgggtaatgtcat

SEQ ID NO: 317935 - DNA, 75 bp, synthetic construct
  source 1..75: mol_type = other DNA
gtgctgtggcggccagacagaagacggtcgcgacgcaactaacgatctgagctacatgtgtatggaagcgactgc

SEQ ID NO: 317936 - DNA, 75 bp, synthetic construct
  source 1..75: mol_type = other DNA
cactgtttaatcagaaattccatccggcagctctgaaaggcgatgagggattacaccatctggcagccctactgc

SEQ ID NO: 317937 - DNA, 75 bp, synthetic construct
  source 1..75: mol_type = other DNA
tggacgtctggccggccagccgcttcctgatggagtatcgcctagcagaggcatggatacaaaaggtccaaccgc

SEQ ID NO: 317938 - DNA, 75 bp, synthetic construct
  source 1..75: mol_type = other DNA
cgagctgctggaagaactggccccgaataaaccgcacggtgtggcgcactatcgcgatctgatcacctttgtcgc

SEQ ID NO: 317939 - DNA, 75 bp, synthetic construct
  source 1..75: mol_type = other DNA
gtgccggatttattggctcggcgctggtgcgttatatcatcaacgaaacaagtgatgcggtggtggtggtcgata

SEQ ID NO: 317940 - DNA, 75 bp, synthetic construct
  source 1..75: mol_type = other DNA
acggtacgctctataatcagaaattcctgccgtcttctttggctggcgagaacggtctgcgcaacttcagcggcc

SEQ ID NO: 317941 - DNA, 75 bp, synthetic construct
  source 1..75: mol_type = other DNA
agcaatatgaaacttccgcttacgccaaaccaggttatcagtgccagcacaatctcaactactggcgatttggcg

SEQ ID NO: 317942 - DNA, 75 bp, synthetic construct
  source 1..75: mol_type = other DNA
gctttgtcgattatcagcgtgctggtgtgaaccgcatctccattggcgtacagagttttagcgaagaaaagctga

SEQ ID NO: 317943 - DNA, 75 bp, synthetic construct
  source 1..75: mol_type = other DNA
gggcgcattctgcgcaccaccaaaacgcggcacccgcgtggttttatgcaggggcgttatctggaaagcctgcgt

SEQ ID NO: 317944 - DNA, 75 bp, synthetic construct
  source 1..75: mol_type = other DNA
ttttcaaatagttatgatggttattatttgcttgataaagatagcaaattatttgcaaatgagatggcagaaaga

SEQ ID NO: 317945 - DNA, 75 bp, synthetic construct
  source 1..75: mol_type = other DNA
gcgcttggcgatctgcgccaggccattgaactgaatccgccgcatctttcctggtatcaactgaccatcgaaccc

SEQ ID NO: 317946 - DNA, 75 bp, synthetic construct
  source 1..75: mol_type = other DNA
ctcaccgaatgtgcggattactggcagataacggaacatgggaagttgtttttaaattcactgctggaactgttt

SEQ ID NO: 317947 - DNA, 75 bp, synthetic construct
  source 1..75: mol_type = other DNA
gtcgttggcaccagtcgcgcaaagcgatcgctttgcctttgagaaagttgatatctgcgatcgggcagagttggc

SEQ ID NO: 317948 - DNA, 75 bp, synthetic construct
  source 1..75: mol_type = other DNA
aaattgcttattgccagatgggaactgacagcagaacaggctgttacacagcagctaaaaaatgaggtgtcaaaa

SEQ ID NO: 317949 - DNA, 75 bp, synthetic construct
  source 1..75: mol_type = other DNA
ggcgaagagcgcgagacggcgattggcctaaccaaagataaacagggcgacagcaaagtccgcatcgatggtact

SEQ ID NO: 317950 - DNA, 75 bp, synthetic construct
  source 1..75: mol_type = other DNA
atgtccctcacccgcttgttgatccgcgatttccgcaatatcgaaaccgcggatctcgctttatctcccggcttt

SEQ ID NO: 317951 - DNA, 75 bp, synthetic construct
  source 1..75: mol_type = other DNA
caggaactgcaaaccaaaacacttcgtgtcggtaagcgtgtgtatcgggttgttcacgagacgggagtgcgaaaa

SEQ ID NO: 317952 - DNA, 75 bp, synthetic construct
  source 1..75: mol_type = other DNA
agtaagatcgctcccaaaggaagcacagagcggagtggtgcatcaagtaaaagacgaaataaaaacaaaagaaat

SEQ ID NO: 317953 - DNA, 75 bp, synthetic construct
  source 1..75: mol_type = other DNA
tgtatttttgccctcagtaagctggcaatggcgttatccagtacgcttgattccatccctttatccatgcaacga

SEQ ID NO: 317954 - DNA, 75 bp, synthetic construct
  source 1..75: mol_type = other DNA
catatactgaagccgatctgttccgaattaaattcacgcaaagcgccgacgtgcttacgctggttcatccggcat

SEQ ID NO: 317955 - DNA, 75 bp, synthetic construct
  source 1..75: mol_type = other DNA
tatcaaagcgggcaacgctatccgctggagatgattggcgattttaactggccttttacaaagggtgtcatctaa

SEQ ID NO: 317956 - DNA, 75 bp, synthetic construct
  source 1..75: mol_type = other DNA
attggtggtcacaacgagcgtaagaatctcgaggttgtggaaaccatctgcgagctgctggaagaactggccccg

SEQ ID NO: 317957 - DNA, 75 bp, synthetic construct
  source 1..75: mol_type = other DNA
gccggacatttggaggcctgtctcatcttgaaggccagaccgtaaacattctctctgatgcgaacgtggaaccac

SEQ ID NO: 317958 - DNA, 75 bp, synthetic construct
  source 1..75: mol_type = other DNA
tggctcgagcaatgtcccaccaattgccgtggcgaatattgctctgttcgtccaggagaaaggcagtgttgtccg

SEQ ID NO: 317959 - DNA, 75 bp, synthetic construct
  source 1..75: mol_type = other DNA
ttcgcatacagaaggcacatcatgggatggctggggcggatccggtgatgatgatactggcattgagtgggagta

SEQ ID NO: 317960 - DNA, 75 bp, synthetic construct
  source 1..75: mol_type = other DNA
tggaaaccggagaaacgcgcctacggcttcgtagtgcgcaattttgccgtgtccgtcattgccctgtctgccagt

SEQ ID NO: 317961 - DNA, 75 bp, synthetic construct
  source 1..75: mol_type = other DNA
actgcagatccggtgttgtaccggagtgatggtggagtgctgccggtacagttacgaatccgtgatgcagaaacc

SEQ ID NO: 317962 - DNA, 75 bp, synthetic construct
  source 1..75: mol_type = other DNA
aactgacccgccagacgcacaagcgccgctttgtggcgactggcggcgcactcaaagacgtactgaagctcgatc

SEQ ID NO: 317963 - DNA, 75 bp, synthetic construct
  source 1..75: mol_type = other DNA
ccttcatcatggttttctggtgttgcttacgttaagcaagctcgttgggtggaactttggagggattgcttgcgg

SEQ ID NO: 317964 - DNA, 75 bp, synthetic construct
  source 1..75: mol_type = other DNA
gttggttgtttctgacgttaacagtcaggaactgcgcgatcgatgatttgggggaaacgctgacagccatgaatt

SEQ ID NO: 317965 - DNA, 75 bp, synthetic construct
  source 1..75: mol_type = other DNA
cggcgtttaagcgaatggaaaagcgaaaggagctatcacctgttcaggggtggatcagggctacggaggtgacgc

SEQ ID NO: 317966 - DNA, 75 bp, synthetic construct
  source 1..75: mol_type = other DNA
ctctggaacggttcaaattttatctggaacaacgcggctggatcgttgccagtaaagagcaactggtggaacgac

SEQ ID NO: 317967 - DNA, 75 bp, synthetic construct
  source 1..75: mol_type = other DNA
gtgaagaattaaaaaatttgcgacttactttaagtaagtcacaaaatcacatctctcccaaaacccgctccctca

SEQ ID NO: 317968 - DNA, 75 bp, synthetic construct
  source 1..75: mol_type = other DNA
atcaggcgtgggatgtgttcgaaaaactggaagactgctatttcagccagtgcgagaaaaatactggcaaacaag

SEQ ID NO: 317969 - DNA, 75 bp, synthetic construct
  source 1..75: mol_type = other DNA
ggtttattgcgtttcgggtggtctaccctcaaggaaaccggagaaacgcgtctgaggctgcgtgaggcgcatttc

SEQ ID NO: 317970 - DNA, 75 bp, synthetic construct
  source 1..75: mol_type = other DNA
ccctcgtcgtcgttacttactctaacgtccctgtaataacaacagggttattggcacatctatacaaaactgaag

SEQ ID NO: 317971 - DNA, 75 bp, synthetic construct
  source 1..75: mol_type = other DNA
gaaaaactggaagagtgctatttcagacaaaaggatccgtcagcgccagcttcatgccagaaaagttacgacacg

SEQ ID NO: 317972 - DNA, 75 bp, synthetic construct
  source 1..75: mol_type = other DNA
cgaggctgtggccaatattgctgaacagctacaaagcgccgttgctgaaaccctgaaatactccgttaaaccgga

SEQ ID NO: 317973 - DNA, 75 bp, synthetic construct
  source 1..75: mol_type = other DNA
ttgctgactgggcggcttcccggcagggatgtaccgttggcgggaaatctgacagtgtcagggataaagccagcg

SEQ ID NO: 317974 - DNA, 75 bp, synthetic construct
  source 1..75: mol_type = other DNA
cagtcacaggtgcaggtacagcaggatgcgctgctggttgtcgatcgtcagatgagctacatgcgtcagcagctt

SEQ ID NO: 317975 - DNA, 75 bp, synthetic construct
  source 1..75: mol_type = other DNA
gactatatcggttacgacatcctgctgcagtacattcaggagctgatacagcaggcccgggcgatggtggccacg

SEQ ID NO: 317976 - DNA, 75 bp, synthetic construct
  source 1..75: mol_type = other DNA
aaaacagacgaaatagcaaggcactctgaaaccagcctcacctacggacaactccggcaatggagtgatctgagt

SEQ ID NO: 317977 - DNA, 75 bp, synthetic construct
  source 1..75: mol_type = other DNA
acaaagaactgaaagaatttattatgacgctcaccggtacgctgatttttggggaagacagcgagattacccccc

SEQ ID NO: 317978 - DNA, 75 bp, synthetic construct
  source 1..75: mol_type = other DNA
gaggattatttcctcagactcaggtgtcacagcagaaggtctgtcaggacattgccggtgagagcaatatttttg

SEQ ID NO: 317979 - DNA, 75 bp, synthetic construct
  source 1..75: mol_type = other DNA
tgacggatcaggagaaagggtttatctccagcaccaccattccggtattcaaatacctggtcgatccgcagatgc

SEQ ID NO: 317980 - DNA, 75 bp, synthetic construct
  source 1..75: mol_type = other DNA
ctgccatctttctgacaggtatcgccgcgctgcctgcgcaggccgacgtcaacggcgacctgaacggcttctttg

SEQ ID NO: 317981 - DNA, 75 bp, synthetic construct
  source 1..75: mol_type = other DNA
gtggtctggtttgtctgctggcaattttcgcaccgtccttccttctgattgtgggagcattgccgttctgggaaa

SEQ ID NO: 317982 - DNA, 75 bp, synthetic construct
  source 1..75: mol_type = other DNA
tgatctcaaccggtaattatccccagtcgacaatggatatgatcatggaaaatctcaaccaggcgagtgtgcaga

SEQ ID NO: 317983 - DNA, 75 bp, synthetic construct
  source 1..75: mol_type = other DNA
ttcggtgggggggcagatggacaaagtgcaggataaagccagcgataaggacaaagagcgtgtgatgaagaacat

SEQ ID NO: 317984 - DNA, 75 bp, synthetic construct
  source 1..75: mol_type = other DNA
gcagcaaaaggtctgccaggacatcgccggcgagagcaacatttttgcggactgggcggcttcccgtcagggctg

SEQ ID NO: 317985 - DNA, 75 bp, synthetic construct
  source 1..75: mol_type = other DNA
gagaagagcaccaacaagctttccgcaaaagaagcaaacagccttgtatggttatgggattatgctaaccgctca

SEQ ID NO: 317986 - DNA, 75 bp, synthetic construct
  source 1..75: mol_type = other DNA
gtctgacgggaaatgcaggtccacagggtccaaagggagataccggtgcggcaggcccggcaggcccacagggac

SEQ ID NO: 317987 - DNA, 75 bp, synthetic construct
  source 1..75: mol_type = other DNA
tgataagggagagcgcggtgacaccggccctgtcggggcaaccggcgaacggggaccggcaggtgatgctggtcc

SEQ ID NO: 317988 - DNA, 75 bp, synthetic construct
  source 1..75: mol_type = other DNA
aaagatgccacacgggttcagggtttttttcagcatttgcaggtcaggtttggtgacgggccgtggcaggatgtc

SEQ ID NO: 317989 - DNA, 75 bp, synthetic construct
  source 1..75: mol_type = other DNA
tgctctttggccttgcgccgctggcggcgtttgatctcgccttgcattgacgtaatgatgaattgtgatgtgctt

SEQ ID NO: 317990 - DNA, 75 bp, synthetic construct
  source 1..75: mol_type = other DNA
cctttgacgccggttacgccaaccccgttcagtccaccgccagcgaaattggcgtttcctgcggtggaaattctt

SEQ ID NO: 317991 - DNA, 75 bp, synthetic construct
  source 1..75: mol_type = other DNA
gggagagaccggtctgacgggagatgcaggtccacagggtccaaagggagataccggtacggcaggcccggcagg

SEQ ID NO: 317992 - DNA, 75 bp, synthetic construct
  source 1..75: mol_type = other DNA
ggggccggcgagcattattgagacaaacagccatggctggttcccggatacagatggcgcactcatcaccggact

SEQ ID NO: 317993 - DNA, 75 bp, synthetic construct
  source 1..75: mol_type = other DNA
ggctggcccggtgggggcaaccggacctcagggaccgaagggcgacccggggggagacacaaatccgtttttcgc

SEQ ID NO: 317994 - DNA, 75 bp, synthetic construct
  source 1..75: mol_type = other DNA
agcagtcagaggaagcgtcctcgtcctcggcctctgcggccgctcaaaaagccagtgagtcattacaaagtgcaa

SEQ ID NO: 317995 - DNA, 75 bp, synthetic construct
  source 1..75: mol_type = other DNA
tattgagacaaacagccatggctggttcccggatacagatggcgcactcatcaccggactgacctttcttgaccc

SEQ ID NO: 317996 - DNA, 75 bp, synthetic construct
  source 1..75: mol_type = other DNA
tggtggaagaagcggcgcgtcacgctgaggaggcgaagaagaatgccggagaggcggagacatcagcgaggaatg

SEQ ID NO: 317997 - DNA, 75 bp, synthetic construct
  source 1..75: mol_type = other DNA
gggccgaaaggcgacaggggagagcggggagagaccggtctgacgggaaatgcaggtccacagggtccaaaggga

SEQ ID NO: 317998 - DNA, 75 bp, synthetic construct
  source 1..75: mol_type = other DNA
acctcacaccacggcgctgatagtgattattctgattctttggccttgcggcgctggcggcgtttgatctcgcct

SEQ ID NO: 317999 - DNA, 75 bp, synthetic construct
  source 1..75: mol_type = other DNA
gaacagccggaagagaccgctgaaacagtttccccggtacaacgtctggcacatctcactgccgaactggacgcc

SEQ ID NO: 318000 - DNA, 75 bp, synthetic construct
  source 1..75: mol_type = other DNA
tgaaggcggcgtactgaccgaagcgattcgccagaaaccgtactcggtggtgctgctcgatgaagtagaaaaagc

SEQ ID NO: 318001 - DNA, 75 bp, synthetic construct
  source 1..75: mol_type = other DNA
cctgatgaccctcgaacagggtaaaccgctggctgaagcgaaaggcgaaatcagctacgccgcctccttcattga

SEQ ID NO: 318002 - DNA, 75 bp, synthetic construct
  source 1..75: mol_type = other DNA
gattcctgttattaccaccgaacttttggcgcagctttatggcacagaaattctgaacatccaggttaacttcac

SEQ ID NO: 318003 - DNA, 75 bp, synthetic construct
  source 1..75: mol_type = other DNA
ccttctggcacgatttagcggctccggtcattgctggcattctcgccagcctgatcgtgaactggctgaacaagc

SEQ ID NO: 318004 - DNA, 75 bp, synthetic construct
  source 1..75: mol_type = other DNA
gacgccttgcaggccgctgcgacactgagcgagcgttatctctccgggcgtcagttgccggacaaagccattgat

SEQ ID NO: 318005 - DNA, 75 bp, synthetic construct
  source 1..75: mol_type = other DNA
agacggcagaaagtgcagccggtaatgcagccagggatgcaacgaccgcaacagaaaaagcccgggagtcagcag

SEQ ID NO: 318006 - DNA, 75 bp, synthetic construct
  source 1..75: mol_type = other DNA
atgatgaccgtgaacacgggcagtcgcttacagcacaactgcgtctggggccggcagacatcctggagtcagatg

SEQ ID NO: 318007 - DNA, 75 bp, synthetic construct
  source 1..75: mol_type = other DNA
ccgctatcggctcctttattccgctatcaccagcagcttaaacagcagctcgacccttgcggcgtgtttaacccc

SEQ ID NO: 318008 - DNA, 75 bp, synthetic construct
  source 1..75: mol_type = other DNA
acgtccgcgaggaatgccggcatatcagccagtaaggcggaagcgagcgccgcaaatgctgacacttcagcaggg

SEQ ID NO: 318009 - DNA, 75 bp, synthetic construct
  source 1..75: mol_type = other DNA
tcagcaggggatgcatcggagtcagcccggcaggcggcagaaagtgcagcctcagcaaagaagtcagaggaagcg

SEQ ID NO: 318010 - DNA, 75 bp, synthetic construct
  source 1..75: mol_type = other DNA
ggagataccggtgcagcaggcccggcaggcccacagggaccgaaaggagaaacaggtgcggctggcccggtgggg

SEQ ID NO: 318011 - DNA, 75 bp, synthetic construct
  source 1..75: mol_type = other DNA
gcaactattactgatatgcaggtgcgccagcgcgatgttgctgcgctcgatgcaaaatactcgagggaattagcc

SEQ ID NO: 318012 - DNA, 75 bp, synthetic construct
  source 1..75: mol_type = other DNA
gcaaaatactcgagggaattagccgatgcgagagctgaaaatgaaactctgcgtgctgatgttgccgctggtcgt

SEQ ID NO: 318013 - DNA, 75 bp, synthetic construct
  source 1..75: mol_type = other DNA
cccgataattataacattaacaaaaatgatgtactgaggttactgaaagcaaaaaactctgatccgagatctaat

SEQ ID NO: 318014 - DNA, 75 bp, synthetic construct
  source 1..75: mol_type = other DNA
ttcgatatgatcaaaaccgttggcgatggtgcaaaaggctccagcagttcatttgtggctatcggtcaggttatt

SEQ ID NO: 318015 - DNA, 75 bp, synthetic construct
  source 1..75: mol_type = other DNA
ggtcagagtgaacatgatgagcctcggcttaaatggaatgacacagaatttctaacactcccaagttatgaacgg

SEQ ID NO: 318016 - DNA, 75 bp, synthetic construct
  source 1..75: mol_type = other DNA
ttcaaggctaaaaaaaatagcaaataaagaattgcttcctgaaaaatacgatctgaactactatactcatgaatg

SEQ ID NO: 318017 - DNA, 75 bp, synthetic construct
  source 1..75: mol_type = other DNA
cttgaggccgaagaccgcccgctgcccgagtatgtgcgcgaggagttcgagacctacctgcgctgcggcgtgctc

SEQ ID NO: 318018 - DNA, 75 bp, synthetic construct
  source 1..75: mol_type = other DNA
tatttgataacaaagaggacgcgattggtgttcttgataagccggtagctgtttacaacctttcaggtgtgaaag

SEQ ID NO: 318019 - DNA, 75 bp, synthetic construct
  source 1..75: mol_type = other DNA
acaaaaattttcgccgaatgaggggcgtttaagctcaatcacgttgtcaacgctggtttctaagtgtggtcagag

SEQ ID NO: 318020 - DNA, 75 bp, synthetic construct
  source 1..75: mol_type = other DNA
gagctggagctggcgaacgcgacaattactgatatgcagatacgccagcgtgatgtcgctgcacttgatgccaga

SEQ ID NO: 318021 - DNA, 75 bp, synthetic construct
  source 1..75: mol_type = other DNA
atgattgccgaagcgttaaaagctgatgggatggaagaaatttatttttctggcgacaaaaaagcggaatttgtc

SEQ ID NO: 318022 - DNA, 75 bp, synthetic construct
  source 1..75: mol_type = other DNA
aagccttgtttacctacgtcaaagagcggaagtacaccttttgtacgccggggcatatgggcggcaccgcatatc

SEQ ID NO: 318023 - DNA, 75 bp, synthetic construct
  source 1..75: mol_type = other DNA
ccggacccggaagggatgatccgccgcctgaaagcgaaagggctgaaaatctgcgtctggattaacccctatatc

SEQ ID NO: 318024 - DNA, 75 bp, synthetic construct
  source 1..75: mol_type = other DNA
ccctgaaactgaataacctggtcgataaaggtctggtcgatcgactgtatgcggcctccagttccggcgtgccgg

SEQ ID NO: 318025 - DNA, 75 bp, synthetic construct
  source 1..75: mol_type = other DNA
tccaatcgagttgcaaatgattaaaatatcaaataactacaataaaaatcatactggtgcatggagtgcgcaata

SEQ ID NO: 318026 - DNA, 75 bp, synthetic construct
  source 1..75: mol_type = other DNA
tcttttggcacagtaacgaatcaagaggtaaatgctgcaaaagcgtaccagaaaataaaaagtgtaaccgcagat

SEQ ID NO: 318027 - DNA, 75 bp, synthetic construct
  source 1..75: mol_type = other DNA
tattttctgtaccaaaacataatggcagggaaaatcaagatagcgtgctttatccacttcaaacaccaaatggtt

SEQ ID NO: 318028 - DNA, 75 bp, synthetic construct
  source 1..75: mol_type = other DNA
ttcacgccaaactattcttgatctcacgtaaagaaaacggcgaagtcgtgcgttacgcacacatcgggacgggga

SEQ ID NO: 318029 - DNA, 75 bp, synthetic construct
  source 1..75: mol_type = other DNA
gagttacaggcgcgtttcgatgaagaagccaatattcattgggcaaaacgactgactgaagcgggcgtgcacgtg

SEQ ID NO: 318030 - DNA, 75 bp, synthetic construct
  source 1..75: mol_type = other DNA
acgtactggcaacacgattactgtgactggtgcgggcgaggcgaagaactggacactgtgcttgcgcaatgttgt

SEQ ID NO: 318031 - DNA, 75 bp, synthetic construct
  source 1..75: mol_type = other DNA
tttgagcggctggatcttggcgttggcgaaacagtttacggtctgggagagcgctttactgccctggtgcgcaat

SEQ ID NO: 318032 - DNA, 75 bp, synthetic construct
  source 1..75: mol_type = other DNA
ggcctccgtcggtgcgcagaaattcccggtacactggggtggcgactgttacgctaactacgaatcaatggcgga

SEQ ID NO: 318033 - DNA, 75 bp, synthetic construct
  source 1..75: mol_type = other DNA
gtacaccaatcgagcttgccaatggttcatatccaattgagttgcaaatgattaaaatgtcaggtaactacaata

SEQ ID NO: 318034 - DNA, 75 bp, synthetic construct
  source 1..75: mol_type = other DNA
ggttgcattctatctatcgtcattggggcgctacttgtcgccggacctgaaatgatgagtcgcagccagaaacag

SEQ ID NO: 318035 - DNA, 75 bp, synthetic construct
  source 1..75: mol_type = other DNA
gtgcagttctacttgccggaaggtcgctggacacacctgtggcacaacgatgaactcgatggtagtcgctggcat

SEQ ID NO: 318036 - DNA, 75 bp, synthetic construct
  source 1..75: mol_type = other DNA
aaaaagccgcagtggcggcgtatattacaagctgagacggggtacaacgaaccagacgtgtttgcggtttgccat

SEQ ID NO: 318037 - DNA, 75 bp, synthetic construct
  source 1..75: mol_type = other DNA
cgacttcttcaaacctgccctgctggcgcgtatggaagtggtgccgtatctgccgctgtcgaaagagacgctcgc

SEQ ID NO: 318038 - DNA, 75 bp, synthetic construct
  source 1..75: mol_type = other DNA
acagtgacggtcagtcagagcaacagcctgaatcagcgcgtacagaatatgataaagaatatttctgacaaactg

SEQ ID NO: 318039 - DNA, 75 bp, synthetic construct
  source 1..75: mol_type = other DNA
cagcgttttgttaagcagattatgagcaatgctgccggttacttttttgaccttgccctgcagacaacggtgccg

SEQ ID NO: 318040 - DNA, 75 bp, synthetic construct
  source 1..75: mol_type = other DNA
gagtcagagtcagagtcagagtcagagtcagagcaggataataccggtgccgaaccggctgatgaagctggcagc

SEQ ID NO: 318041 - DNA, 75 bp, synthetic construct
  source 1..75: mol_type = other DNA
ctggataccttctaccagcagaacctgaagctgtttatcgacaatgacctgagtctggaggatggcgataacagc

SEQ ID NO: 318042 - DNA, 75 bp, synthetic construct
  source 1..75: mol_type = other DNA
acgccaggcgctgaccgtggagagttatcccggtggacgttccgccgaaggctatcccagcttctccccgatgct

SEQ ID NO: 318043 - DNA, 75 bp, synthetic construct
  source 1..75: mol_type = other DNA
gggtcgtgttcttctcagggctggcagctctgcctgctcaggcggacgtcaacggcgatctgaacggcttcttca

SEQ ID NO: 318044 - DNA, 75 bp, synthetic construct
  source 1..75: mol_type = other DNA
cagctgacggactatatcggatacgacatcatgctccagtacattcaggaactgcttcagcaggcccgggccatg

SEQ ID NO: 318045 - DNA, 75 bp, synthetic construct
  source 1..75: mol_type = other DNA
ggggaagacagcgagattacccccctgccggcgcgtaccactgaccgcgatatcctccgggcaattatggagggg

SEQ ID NO: 318046 - DNA, 75 bp, synthetic construct
  source 1..75: mol_type = other DNA
gaaccactgaccgctcaattatccgggccatgatggaaggcggcacagcaaaaatttatcactgcaacgattctg

SEQ ID NO: 318047 - DNA, 75 bp, synthetic construct
  source 1..75: mol_type = other DNA
gataaagccagcgacaaggataaggagcgggtgaccaaaaacatcaacatcatgtggaatgcgctttccaaaaac

SEQ ID NO: 318048 - DNA, 75 bp, synthetic construct
  source 1..75: mol_type = other DNA
tcccccggacgcaggtgtcccagcagaaagtctgtcaggacattgccggtgagagcaatatttttgctgactggg

SEQ ID NO: 318049 - DNA, 75 bp, synthetic construct
  source 1..75: mol_type = other DNA
agcaaggacagggcgctcaagtcacagatagcaaaactgctcaccagtattcagaacaaggcgctcagtgattct

SEQ ID NO: 318050 - DNA, 75 bp, synthetic construct
  source 1..75: mol_type = other DNA
tccaaaaacaggatgcttgatggtaacaaagagctgaaagagttcattatgacgctcactggtacgctgattttt

SEQ ID NO: 318051 - DNA, 75 bp, synthetic construct
  source 1..75: mol_type = other DNA
gagaatctgaatcaggcacagcaacagattgctgttttccaggggcaggtaaaggtccagcaggatgcactgctg

SEQ ID NO: 318052 - DNA, 75 bp, synthetic construct
  source 1..75: mol_type = other DNA
ttatgagtaacgctatggggtacttttttgaccttgccctgcagacaacggtgccggaaattaaaacggcaaaag

SEQ ID NO: 318053 - DNA, 75 bp, synthetic construct
  source 1..75: mol_type = other DNA
gaaagaatttattatgacgctcaccggtacgctgatttttggggaagacagcgagattacccccctgccggcgcg

SEQ ID NO: 318054 - DNA, 75 bp, synthetic construct
  source 1..75: mol_type = other DNA
acgattctgataaatgcctgaaagtggtggcagacacaccggtgaccatcagccgggataatgcactgaagtctc

SEQ ID NO: 318055 - DNA, 75 bp, synthetic construct
  source 1..75: mol_type = other DNA
caggctgccgggtatgcttacggtggctccctgtacgcccgtactcaggtcaaaaatatccagctgatttccatg

SEQ ID NO: 318056 - DNA, 75 bp, synthetic construct
  source 1..75: mol_type = other DNA
catcaatatcatctgggactcgctgtccaaaaacaggatgcttgacggtaacaaagagctgaaggaattcatcat

SEQ ID NO: 318057 - DNA, 75 bp, synthetic construct
  source 1..75: mol_type = other DNA
cgacattaacagtatgaacctcagttcctgccaggcggcacaggggattatcggcgggcttttcccccggacgca

SEQ ID NO: 318058 - DNA, 75 bp, synthetic construct
  source 1..75: mol_type = other DNA
tgataagcatgtacaaaatgctgttcgataacatactgatggataataagtcagatattcctgttgatttgctga

SEQ ID NO: 318059 - DNA, 75 bp, synthetic construct
  source 1..75: mol_type = other DNA
cgcagcttatccagcagcggcattattttttccagaggcggtcagccagaaccactgaccgctcaattatccggg

SEQ ID NO: 318060 - DNA, 75 bp, synthetic construct
  source 1..75: mol_type = other DNA
cagtgacacgcctctggatgacaaggaaaaaggctttatttccagtaccaccatccccgtcttcaaatacttggt

SEQ ID NO: 318061 - DNA, 75 bp, synthetic construct
  source 1..75: mol_type = other DNA
cacacagccgggcgtctggcaggggcaggccgccggttatgcttacggtggctccctgtatgcccgtactcaggt

SEQ ID NO: 318062 - DNA, 75 bp, synthetic construct
  source 1..75: mol_type = other DNA
cgcaaactatcgcccgttttcgtgaacgctttaatgcccccgtggaagttctgcattctggcctgaacgacagcg

SEQ ID NO: 318063 - DNA, 75 bp, synthetic construct
  source 1..75: mol_type = other DNA
ggaagatcataacaatcagcacgcgccgctgttcctgcaacaactgcgtaatctgatcctctccagcccgctggc

SEQ ID NO: 318064 - DNA, 75 bp, synthetic construct
  source 1..75: mol_type = other DNA
aaccgccgtggctttgcgcctgcactgctgtgccacgactgtggctggattgccgaatgcccacgttgcgatcac

SEQ ID NO: 318065 - DNA, 75 bp, synthetic construct
  source 1..75: mol_type = other DNA
gggtaaacagggcgaagtggtgctgcaaacgcaccatccggaacatcctctgttgcaaacgttgctctataaagg

SEQ ID NO: 318066 - DNA, 75 bp, synthetic construct
  source 1..75: mol_type = other DNA
agcgagcaaatcccgattattcttggctccgcaacgcccgcgctggaaacgttatgcaacgtccagcagaaaaaa

SEQ ID NO: 318067 - DNA, 75 bp, synthetic construct
  source 1..75: mol_type = other DNA
gccgtatgcgccagcatttacaggccgacaaccaggttatcctctttcttaaccgccggggttttgcgcctgcgc

SEQ ID NO: 318068 - DNA, 75 bp, synthetic construct
  source 1..75: mol_type = other DNA
cagtcagcgtccggtgccgcgccagtgcccttcctgcggttccacgcacctggtacccgtggggctgggcaccga

SEQ ID NO: 318069 - DNA, 75 bp, synthetic construct
  source 1..75: mol_type = other DNA
atggtgccggaaatcggcctgacaccgcaaactatcgcccgttttcgtgaacgttttaatgcccccgtggaagtt

SEQ ID NO: 318070 - DNA, 75 bp, synthetic construct
  source 1..75: mol_type = other DNA
gttaaagccgggtgtcgcgtgcgcgtgccgtttggcaaacagcaggagcgcatcggggttgtggtatcagttagc

SEQ ID NO: 318071 - DNA, 75 bp, synthetic construct
  source 1..75: mol_type = other DNA
cgcatgatgcagctgccgccgtggaccagccatgtgattgtgcgtgcggaagatcataacaatcagcacgcgccg

SEQ ID NO: 318072 - DNA, 75 bp, synthetic construct
  source 1..75: mol_type = other DNA
gtcacacttgtggcgttactggacgtggacggtgcgctgttttctgccgatttccgttcggcagaacgtttcgcc

SEQ ID NO: 318073 - DNA, 75 bp, synthetic construct
  source 1..75: mol_type = other DNA
cagtcagcgtccagtaccgcgccagtgtccgtcctgcggctctacccatctggtgccggtgggtctgggcaccga

SEQ ID NO: 318074 - DNA, 75 bp, synthetic construct
  source 1..75: mol_type = other DNA
cgcctgacgcgtcgggcggggaatgcgcgtccggcaattcaacacgtgctggatttaaaaggtcagaaggtgcag

SEQ ID NO: 318075 - DNA, 75 bp, synthetic construct
  source 1..75: mol_type = other DNA
gtgcagaactgcacaatccagctgaaagcaaaacgtaacagtaccacggtggtggtgaacacggtggcctcagaa

SEQ ID NO: 318076 - DNA, 75 bp, synthetic construct
  source 1..75: mol_type = other DNA
aggggcccgccggccctcaggggccgaagggggataagggagagcgcggtgacaccggccctgtcggggcaaccg

SEQ ID NO: 318077 - DNA, 75 bp, synthetic construct
  source 1..75: mol_type = other DNA
cgaataccccagcgacagggcgcccgtaccggcaacgaagccatgaccacggcggactgggcaccaatggcggac

SEQ ID NO: 318078 - DNA, 75 bp, synthetic construct
  source 1..75: mol_type = other DNA
aacaggtgcggctggcccggtgggggcaaccggacctcagggaccgaagggcgacccgggggagacacaaatccg

SEQ ID NO: 318079 - DNA, 75 bp, synthetic construct
  source 1..75: mol_type = other DNA
atttcggcagcactgagaaagtagccgaattttttggcatcaccagtgaggccgtttaccagtggcgtaatcgcc

SEQ ID NO: 318080 - DNA, 75 bp, synthetic construct
  source 1..75: mol_type = other DNA
gaaacaggtgcggctggcccggtgggggcaaccggacctcagggaccgaagggcgacccgggggagacacaaatc

SEQ ID NO: 318081 - DNA, 75 bp, synthetic construct
  source 1..75: mol_type = other DNA
gcggggcagttcctggttacgtgacctgatttactggtatatgccaacagccctgctgcgcggtatttttcataa

SEQ ID NO: 318082 - DNA, 75 bp, synthetic construct
  source 1..75: mol_type = other DNA
ctggctgagcggcgaatgatgcagctaccgccgtggaccagccatgtgattgtgcgtgcggaagatcataacaat

SEQ ID NO: 318083 - DNA, 75 bp, synthetic construct
  source 1..75: mol_type = other DNA
gcgatattctggtgtggaacccggtactggaagatgcgtttgagctttcctccatggggatccgtgtagatgccg

SEQ ID NO: 318084 - DNA, 75 bp, synthetic construct
  source 1..75: mol_type = other DNA
tcggcggcggtatcggccagtctcgtttgaccatgctgctgctgcaactgccgcatatcggccaggttcagtgtg

SEQ ID NO: 318085 - DNA, 75 bp, synthetic construct
  source 1..75: mol_type = other DNA
cgccgtcacatgccgggaccatcaccgtgtatgaagattctcaaccggggacgctgaatgattttctcggtgcca

SEQ ID NO: 318086 - DNA, 75 bp, synthetic construct
  source 1..75: mol_type = other DNA
atgatgacatcaaaatatctgtttggtattggtgcagcggttctggtttatttcgggattaaaaaactgaaaaaa

SEQ ID NO: 318087 - DNA, 75 bp, synthetic construct
  source 1..75: mol_type = other DNA
ttttactgttagaagctgattttatattaaaagttgcaaatgatgctaactcgcattatggtaaattttctgtac

SEQ ID NO: 318088 - DNA, 75 bp, synthetic construct
  source 1..75: mol_type = other DNA
gtttaggggaggaaattcgaaacttcttttagagttagtcagtaaaacagaagtttttaaacattttgagataaa

SEQ ID NO: 318089 - DNA, 75 bp, synthetic construct
  source 1..75: mol_type = other DNA
gccagtgacaatgttcacgctaacagccgcgcctattttctcgctgagaagcgtaccggagtacccggattatga

SEQ ID NO: 318090 - DNA, 75 bp, synthetic construct
  source 1..75: mol_type = other DNA
attaggtagcgcactatttgccagggctgcggaaaaagaaatgaccattggcgcaatataccttgatactcaggg

SEQ ID NO: 318091 - DNA, 75 bp, synthetic construct
  source 1..75: mol_type = other DNA
gcgacactcggcgcggtaaaagcggtacgtaatcaaaatcaggccggaaaaattgctgttttcggttcggatatg

SEQ ID NO: 318092 - DNA, 75 bp, synthetic construct
  source 1..75: mol_type = other DNA
ttatcagcacggaaggggcaacagaatggtgcgcagaatacgatgagtggggcaacctgctgaatgaagagaacc

SEQ ID NO: 318093 - DNA, 75 bp, synthetic construct
  source 1..75: mol_type = other DNA
cttgatgacgccggtcaatggctgcgttcgcgtgtggtgtggttagggatgcgtcagccgccacgcggcttaatc

SEQ ID NO: 318094 - DNA, 75 bp, synthetic construct
  source 1..75: mol_type = other DNA
cttgatgacgccggtcagtggctacgttctcgcgtggtgtggcttggtatgcgccagccgccgcgcggattaatc

SEQ ID NO: 318095 - DNA, 75 bp, synthetic construct
  source 1..75: mol_type = other DNA
aagcaatcgaccgtttcatccgcatatcaccttattgcgcgacgccagcgaggcggtgacaatcccgccgccagg

SEQ ID NO: 318096 - DNA, 75 bp, synthetic construct
  source 1..75: mol_type = other DNA
gattaccgctggctgacgccggacgcactgctcgccagtgacaatgttcacgctaacagccgcgcctattttctc

SEQ ID NO: 318097 - DNA, 75 bp, synthetic construct
  source 1..75: mol_type = other DNA
ccgataacagcaggccagttttacggtgtctggcagcacttttatgacgataacttctctggcacggatttcacc

SEQ ID NO: 318098 - DNA, 75 bp, synthetic construct
  source 1..75: mol_type = other DNA
ggggtatcattcagtaagatcatacttgatgagaggatgcaaatggctgaatatttactctgcactcgttgttat

SEQ ID NO: 318099 - DNA, 75 bp, synthetic construct
  source 1..75: mol_type = other DNA
tacactaaatcagtaagttggcagcatcaccgtacaaatgataatgttccaggcttgctttccctgataactgca

SEQ ID NO: 318100 - DNA, 75 bp, synthetic construct
  source 1..75: mol_type = other DNA
atgtctgcacaacccgtcgatatccaaatttttggccgttcactgcgtgtgaactgcccgcctgaccaaagggat

SEQ ID NO: 318101 - DNA, 75 bp, synthetic construct
  source 1..75: mol_type = other DNA
aacattctgcgttactgcctcgatgatattttcaaaggcttctttgattatgacgcgctgaatgcctattcaatg

SEQ ID NO: 318102 - DNA, 75 bp, synthetic construct
  source 1..75: mol_type = other DNA
atggtcggtgcgttctttatcgatattgtcaatgcgctagtgattaagctctacctgatgttgccgatttttgcg

SEQ ID NO: 318103 - DNA, 75 bp, synthetic construct
  source 1..75: mol_type = other DNA
atgtcgggagacgagaataaacttaagaaatatcgtttcccggaaacactgaccaaccagagccgctggtttgcc

SEQ ID NO: 318104 - DNA, 75 bp, synthetic construct
  source 1..75: mol_type = other DNA
tgtcgggagacgagaataaacttaagaaatatcgtttcccggaaacactgaccaaccagagccgctggtttggcc

SEQ ID NO: 318105 - DNA, 75 bp, synthetic construct
  source 1..75: mol_type = other DNA
tgaatcagcggttgcaagatctgaaagaacgcactagagtcacaaatactgaacagttggtcttcattgctgcat

SEQ ID NO: 318106 - DNA, 75 bp, synthetic construct
  source 1..75: mol_type = other DNA
actcggcaaacgcgatatttatcagcgtagcggcatccagtttctacccttcaatacgatctatcagttgcgtgc

SEQ ID NO: 318107 - DNA, 75 bp, synthetic construct
  source 1..75: mol_type = other DNA
agatttctcgcaactgcatattgtcggcggcggctgccagaacacgctgctcaaccagctatgtgccgatgcctg

SEQ ID NO: 318108 - DNA, 75 bp, synthetic construct
  source 1..75: mol_type = other DNA
gggtcagcgtgtgggcctgcccgttgcttatcgcgatagccgcaccaatggcctaatggcgcaggcacaacaaca

SEQ ID NO: 318109 - DNA, 75 bp, synthetic construct
  source 1..75: mol_type = other DNA
tgaaccaacaggtttactaagaataaactcttcccgtgttgcagcaaggatgcttgttgagcctcatatctgcga

SEQ ID NO: 318110 - DNA, 75 bp, synthetic construct
  source 1..75: mol_type = other DNA
cgcgggccgcattgtcccagaatttaaaatctcttgaggaacgtcttaacaccaagctgatataccgtacgaccc

SEQ ID NO: 318111 - DNA, 75 bp, synthetic construct
  source 1..75: mol_type = other DNA
cggtttatcgaagtgtttgtcgatacgccgttggcgatttgtgaagctcgcgatccaaaaggtttatataaaaaa

SEQ ID NO: 318112 - DNA, 75 bp, synthetic construct
  source 1..75: mol_type = other DNA
gcactgcgtcgctttgaacaaatggtggaagaggcagcgcgtcacgccggggaggcgaagaagaatgccggagag

SEQ ID NO: 318113 - DNA, 75 bp, synthetic construct
  source 1..75: mol_type = other DNA
acgctgaatgattttctcggtgccatgacggaggatgatgcccgtccggaggcactgcgacgttttgaactgatg

SEQ ID NO: 318114 - DNA, 75 bp, synthetic construct
  source 1..75: mol_type = other DNA
gcgtcagtctgttggtggagggatttccgccgtcacacgccgggattatcaccgtgtatgagggctcaaagccgg

SEQ ID NO: 318115 - DNA, 75 bp, synthetic construct
  source 1..75: mol_type = other DNA
gcggcgcgtcacgctgaggaggcgaagaagaatgccggagaggcggagacgtcagcgaggaatgccggcatatca

SEQ ID NO: 318116 - DNA, 75 bp, synthetic construct
  source 1..75: mol_type = other DNA
ggaggagatacaggtccggcaggtccgcaggggccgaaaggcgacaggggagagcggggagagaccggtctgacg

SEQ ID NO: 318117 - DNA, 75 bp, synthetic construct
  source 1..75: mol_type = other DNA
cggagtcagcccggcaggcggcagaaagtgcagcctcagcaaagcagtcagaggaggcgtcctcgtcctcggcct

SEQ ID NO: 318118 - DNA, 75 bp, synthetic construct
  source 1..75: mol_type = other DNA
atttgcaggtcagatttggcgacgggccgtggcaggatgtcaaggggatggatgaagtgggcagtgatacaggca

SEQ ID NO: 318119 - DNA, 75 bp, synthetic construct
  source 1..75: mol_type = other DNA
atggctggttcccggatacagatggcgcactcatcaccggactgacctttcttgaccccaaagatgccacacggg

SEQ ID NO: 318120 - DNA, 75 bp, synthetic construct
  source 1..75: mol_type = other DNA
ccggtgggggcaaccggacctcagggaccgaagggcgacccgggggagacacaaatacggttccgtctggggccg

SEQ ID NO: 318121 - DNA, 75 bp, synthetic construct
  source 1..75: mol_type = other DNA
gccgccgcagagtcttcaaaaagcgcggcagccaccagtgccggtgcagcgaaaacgtcagaaacgaatgccgca

SEQ ID NO: 318122 - DNA, 75 bp, synthetic construct
  source 1..75: mol_type = other DNA
gccgcaaaaacgtctgagacgaatgcggataacagcgcacaggcggcagcagactcacaaactgcatcggcaaac

SEQ ID NO: 318123 - DNA, 75 bp, synthetic construct
  source 1..75: mol_type = other DNA
acgaccgcagcagaaaaagcccgggagtcagcagaaagcgcacagtcagcggaacaaagcaggatagcggcggaa

SEQ ID NO: 318124 - DNA, 75 bp, synthetic construct
  source 1..75: mol_type = other DNA
agcgtcaccctgctggttgaaggttttccgccttcacatgccgggaccattaccgtctatgaaggttccagacca

SEQ ID NO: 318125 - DNA, 75 bp, synthetic construct
  source 1..75: mol_type = other DNA
tcgtagccaacgacagtacctgaatatgcaaaatggtgctaattttggcccctggcgattacgtaactattctac

SEQ ID NO: 318126 - DNA, 75 bp, synthetic construct
  source 1..75: mol_type = other DNA
gcgatttagaagtcacgattgaagaaagtgacggtacacaacgtcgctttatccagccttattcttcattaccca

SEQ ID NO: 318127 - DNA, 75 bp, synthetic construct
  source 1..75: mol_type = other DNA
ggtcctcaggggccgaagggtgataagggagagcgcggtgacaccggccctgtcggggcaaccggcgaacgggga

SEQ ID NO: 318128 - DNA, 75 bp, synthetic construct
  source 1..75: mol_type = other DNA
tccgtctggggccgggaaacattattgagacaaacagccatggctggttcccggatacagatggcgcactcatca

SEQ ID NO: 318129 - DNA, 75 bp, synthetic construct
  source 1..75: mol_type = other DNA
agataccggtgcggcaggcccggcaggcccacagggaccgaaaggagaaacaggtgcggctggcccggtgggggc

SEQ ID NO: 318130 - DNA, 75 bp, synthetic construct
  source 1..75: mol_type = other DNA
tggtggaagaagcggcgcgtcacgctgaggaggcgaagaagaatgccggagaagcagagacgtccgcgaggaatg

SEQ ID NO: 318131 - DNA, 75 bp, synthetic construct
  source 1..75: mol_type = other DNA
aacgcatcccggcagacttatatattgtttatgaaacgcagcaggtgacgcccgcgctggttaaactgctagcgg

SEQ ID NO: 318132 - DNA, 75 bp, synthetic construct
  source 1..75: mol_type = other DNA
gcgcgccgcacaacggagacggtgattgtcaccacggtggcgtatggtcagccgggggaaaccggcagttacagt

SEQ ID NO: 318133 - DNA, 75 bp, synthetic construct
  source 1..75: mol_type = other DNA
cgcaacagaaaaagcccgggagtcagcagaaagcgcacagtcagcggaacaaagcaggatagcggcggaagacgc

SEQ ID NO: 318134 - DNA, 75 bp, synthetic construct
  source 1..75: mol_type = other DNA
gaggcatcggagtcagcccggcaggcggcagaaagtgcagcctcagcaaagcagtcagaggatgcgtcctcgtcc

SEQ ID NO: 318135 - DNA, 75 bp, synthetic construct
  source 1..75: mol_type = other DNA
gcgttattctgttggtggagggattcccgccgtcacagccgggattatcaccgtatatgaggactcaatccgggc

SEQ ID NO: 318136 - DNA, 75 bp, synthetic construct
  source 1..75: mol_type = other DNA
cggggcccgcgggtcctcagggaccgaagggcgacccgggggagacacaaatacggttccgtctggggccgggaa

SEQ ID NO: 318137 - DNA, 75 bp, synthetic construct
  source 1..75: mol_type = other DNA
gtacgctgaatgattttctcggtgccatgacggaggatgatgcccgtccggaggcactgcgtcgctttgaactga

SEQ ID NO: 318138 - DNA, 75 bp, synthetic construct
  source 1..75: mol_type = other DNA
gcaaaacgtaacagcaccacggtggtggcgaacacggtggcctcagaaaatccggatgaagccgggcgttacagc

SEQ ID NO: 318139 - DNA, 75 bp, synthetic construct
  source 1..75: mol_type = other DNA
cccgcgggtcctcaggggccgaagggtgataagggagagcgcggtgacaccggccctgtcggggcaaccggcgaa

SEQ ID NO: 318140 - DNA, 75 bp, synthetic construct
  source 1..75: mol_type = other DNA
gacacttcagcaggggaggcatcggagtcagcccggcaggcggcagaaagtgcagccgctgcaaagcagtcagag

SEQ ID NO: 318141 - DNA, 75 bp, synthetic construct
  source 1..75: mol_type = other DNA
gtcagcgaactgaatgcactgggtgatatcacccacattaatctccatatcaattcaccgggtggcgatgtcttt

SEQ ID NO: 318142 - DNA, 75 bp, synthetic construct
  source 1..75: mol_type = other DNA
ggtgatccgggagtagcaggtccagcaggtccggcggggccacagggaccgaagggagacacaggagccccgggc

SEQ ID NO: 318143 - DNA, 75 bp, synthetic construct
  source 1..75: mol_type = other DNA
cagcatttgcaggtcaggtttggtgacgggccgtggcaggatgttaaggggctgaatgaagtgggcagtgataca

SEQ ID NO: 318144 - DNA, 75 bp, synthetic construct
  source 1..75: mol_type = other DNA
tgaccccaaagatgccacacaggttcagggttttttcagcatttgcaggtcaggtttggtgacgggccgtggcag

SEQ ID NO: 318145 - DNA, 75 bp, synthetic construct
  source 1..75: mol_type = other DNA
cctttgaggagcttattgccgaaaccggcagtgcttttctttgtgcagagctgggtatttacggtgatgttcaac

SEQ ID NO: 318146 - DNA, 75 bp, synthetic construct
  source 1..75: mol_type = other DNA
atggcagtacagatttcaggtgtactgaaagatggtgcgggaaaaccaatacagaactgcaccattcaactgaaa

SEQ ID NO: 318147 - DNA, 75 bp, synthetic construct
  source 1..75: mol_type = other DNA
accgtgtatgaagattctcaaccgggtacgctgaatgattttctcggtgccatgtcggaggatgacgtccggccg

SEQ ID NO: 318148 - DNA, 75 bp, synthetic construct
  source 1..75: mol_type = other DNA
gtacttgtatatagtattgctgatgagattgttttagttgcatttggtaatcaatatttagattctgccattctt

SEQ ID NO: 318149 - DNA, 75 bp, synthetic construct
  source 1..75: mol_type = other DNA
tcagcaggggatgcatcggagtcagcccggcaggcggcagaaagtgcagccgctgcaaagcagtcagaggaggcg

SEQ ID NO: 318150 - DNA, 75 bp, synthetic construct
  source 1..75: mol_type = other DNA
gctcatcaccggactgacctttcttgaccccaaagatgccacacaggttcaggggctgtttcagcatttgcaggt

SEQ ID NO: 318151 - DNA, 75 bp, synthetic construct
  source 1..75: mol_type = other DNA
gcaaccggacctcaggggccgaagggcgacccgggagagacgcaaatacggttccgtctggggtcgggaaacatt

SEQ ID NO: 318152 - DNA, 75 bp, synthetic construct
  source 1..75: mol_type = other DNA
gaggcggagacgtccgcgaggaatgccggcatatcagccagtcaggcagaagagaacgctgcaaatgctgacact

SEQ ID NO: 318153 - DNA, 75 bp, synthetic construct
  source 1..75: mol_type = other DNA
gataaaggagagcgtggtgacaccggccctgtcggggcaaccggcgaacggggaccgggaggagatacaggtccg

SEQ ID NO: 318154 - DNA, 75 bp, synthetic construct
  source 1..75: mol_type = other DNA
ggagaaccggggcccgcgggtcctcaggggccgaagggagataaaggagagcgtggcgacaccggtcctgtcggg

SEQ ID NO: 318155 - DNA, 75 bp, synthetic construct
  source 1..75: mol_type = other DNA
caggggttttttcagcatttgcaggtcagatttggcgacgggccgtggcaggatgtcaaggggatggatgaagtg

SEQ ID NO: 318156 - DNA, 75 bp, synthetic construct
  source 1..75: mol_type = other DNA
cggggaccggcaggtgatgctggtccggcaggcccgcaggggccgaaaggtgacaggggagagcggggagagacc

SEQ ID NO: 318157 - DNA, 75 bp, synthetic construct
  source 1..75: mol_type = other DNA
ggacctcccgggccaaagggagaaccggggcccgcgggtcctcaggggccgaagggagataaaggagagcgtggc

SEQ ID NO: 318158 - DNA, 75 bp, synthetic construct
  source 1..75: mol_type = other DNA
tgaaagacggcacaggaaaaccaatacagaactgcaccattcaactgaaagccagacggaacagcaccacggtgg

SEQ ID NO: 318159 - DNA, 75 bp, synthetic construct
  source 1..75: mol_type = other DNA
gtggagacacgacgcctcttcccgacagcctgactgtccgcaacgcagagtccagggaggcatcaggcggtctgg

SEQ ID NO: 318160 - DNA, 75 bp, synthetic construct
  source 1..75: mol_type = other DNA
atgccggcatatcagccggtcaggcagaaaagagcgctgcacatgctgacacttcagcaggatatgcatcggagt

SEQ ID NO: 318161 - DNA, 75 bp, synthetic construct
  source 1..75: mol_type = other DNA
agcagtcagaggatgcgtcctcgtcctcggcttctgcggccgctcaaaaagccagtgagtcattacaaagtgcag

SEQ ID NO: 318162 - DNA, 75 bp, synthetic construct
  source 1..75: mol_type = other DNA
agcgctgcgaagtggagcaggtgcttgagatcattgcggatcagctgaatcctgccccgcgctatcgccgtctgt

SEQ ID NO: 318163 - DNA, 75 bp, synthetic construct
  source 1..75: mol_type = other DNA
cagatcaaacagaaagcccaggaactcgggctgccgtactggcagctggaagatggctttatcggttatatcggc

SEQ ID NO: 318164 - DNA, 75 bp, synthetic construct
  source 1..75: mol_type = other DNA
tacgacgcctgcacacagctgccagcgttcattgccgcagcgccagaaaatcaacaagataaaatttcagcctga

SEQ ID NO: 318165 - DNA, 75 bp, synthetic construct
  source 1..75: mol_type = other DNA
ccagccccgcgctatcgccgcctctatatggtgggcttctcgctgtggaagcgcgcctttatgcgcgccttctgc

SEQ ID NO: 318166 - DNA, 75 bp, synthetic construct
  source 1..75: mol_type = other DNA
tggtctacctgacgctggtggcctatccgcgttatatcgactggcagagcggcctgtggatgagcccggagcagt

SEQ ID NO: 318167 - DNA, 75 bp, synthetic construct
  source 1..75: mol_type = other DNA
gttcgaggcgctggtgcaaggggtgaaggtcaccacctggggccagccgttctacagcggctgggggctgactga

SEQ ID NO: 318168 - DNA, 75 bp, synthetic construct
  source 1..75: mol_type = other DNA
ccgtgggcgcaattcgttattgacggcaatggacagggacgcgttgcctggcgcttgccggagcagagttcaacc

SEQ ID NO: 318169 - DNA, 75 bp, synthetic construct
  source 1..75: mol_type = other DNA
cggttgaagcggcaaactttccgcaggatcgttttcagcccaccaccattgtgaacaccgatgatgccatctttg

SEQ ID NO: 318170 - DNA, 75 bp, synthetic construct
  source 1..75: mol_type = other DNA
atgtcatctcgtttgattattgcgttgattatcatgctcttagccccgggtgtgcaggcacacaatttcgtcact

SEQ ID NO: 318171 - DNA, 75 bp, synthetic construct
  source 1..75: mol_type = other DNA
cactacccgcaagttccgctggtgccgcaggaagagccggcccgcaacaaggtgctggaaattgtctatgccatc

SEQ ID NO: 318172 - DNA, 75 bp, synthetic construct
  source 1..75: mol_type = other DNA
ccatgggcgcaattcgttattgacggcaatggacagggacgcgttgcctggcacttgccggagcagagttcaacc

SEQ ID NO: 318173 - DNA, 75 bp, synthetic construct
  source 1..75: mol_type = other DNA
cacggcggcgcataatttcatcaatgggaagcaggttacgcctgtttatatccaggaaggcggcgagctactgct

SEQ ID NO: 318174 - DNA, 75 bp, synthetic construct
  source 1..75: mol_type = other DNA
tagcgcaaggtttaccgccagcagtggtacaacacaggttaggtatcagcaaagccaccttctatcgactaaaga

SEQ ID NO: 318175 - DNA, 75 bp, synthetic construct
  source 1..75: mol_type = other DNA
cggtcaaccgctgtcgatcaagcaagaagaagttcacgttcgcggccatgcggtggaatgccgtatcaacgccga

SEQ ID NO: 318176 - DNA, 75 bp, synthetic construct
  source 1..75: mol_type = other DNA
aacgtgcgtcagggcgaacctttaggtttaggccactccattttgtgtgcacgacccgccattggtgacaatcca

SEQ ID NO: 318177 - DNA, 75 bp, synthetic construct
  source 1..75: mol_type = other DNA
cggtagcaggtcttggtatgcacatgttgcctgccacaaaagcgatccctaaagagatgctaccgatcgttgaca

SEQ ID NO: 318178 - DNA, 75 bp, synthetic construct
  source 1..75: mol_type = other DNA
atcaacctgactacgtggtgctggcgaagtatatgcgggtattaacgccggaatttgtggcacgcttcccgaata

SEQ ID NO: 318179 - DNA, 75 bp, synthetic construct
  source 1..75: mol_type = other DNA
tattggtaaccacgatactttacgttctctggttgagcgttttgatattccgtttgagctggtaagccatgaagg

SEQ ID NO: 318180 - DNA, 75 bp, synthetic construct
  source 1..75: mol_type = other DNA
cgttgatctgcagatccgcatcatgaatgacgagaacttccagcatggtggcactaacatccactatctggagaa

SEQ ID NO: 318181 - DNA, 75 bp, synthetic construct
  source 1..75: mol_type = other DNA
gtgaaccttgccatccgcatagaataattcgtatggtggatgcggtgtacacagtttcatcgcaggttggctttg

SEQ ID NO: 318182 - DNA, 75 bp, synthetic construct
  source 1..75: mol_type = other DNA
ttagcacgtttactggatgatccaagaccgcgtattttgcttgtggatcaagtagcgggagacttgtcaatttct

SEQ ID NO: 318183 - DNA, 75 bp, synthetic construct
  source 1..75: mol_type = other DNA
agtacaggagaagttagcaattagcaaagccaccttctaccgactaagacatcttaatcagatccctgatatttg

SEQ ID NO: 318184 - DNA, 75 bp, synthetic construct
  source 1..75: mol_type = other DNA
ctgtccgccgggcgtgaccattatgaacgtgcgtcagggcgaacctttaggtttgggccactccattttatgtgc

SEQ ID NO: 318185 - DNA, 75 bp, synthetic construct
  source 1..75: mol_type = other DNA
gaacgcactcagccaggtgcatgggggcgtattcagctgactgatgccatcgctgaactggcgaaaaaacagtcc

SEQ ID NO: 318186 - DNA, 75 bp, synthetic construct
  source 1..75: mol_type = other DNA
cggtcgtaatgcttaataacgcatttgaacaagtagaagtggcgatcgttaaaggctttgatgatgcattcaaaa

SEQ ID NO: 318187 - DNA, 75 bp, synthetic construct
  source 1..75: mol_type = other DNA
aagccgagaaaagcggcctggaaaggagtcatcttgaggcggcattaaacattaaaccgggccatacgctaggcg

SEQ ID NO: 318188 - DNA, 75 bp, synthetic construct
  source 1..75: mol_type = other DNA
gggctacatgcaggcattcgttaagtacggcctacgtaacctgaaggaaggaccgaagttccgtaagagcattga

SEQ ID NO: 318189 - DNA, 75 bp, synthetic construct
  source 1..75: mol_type = other DNA
gaaatcgttctggtaacgcatgcttccaagaacgcagttgagaaccacttcgacacctcttacgaactcgaatcg

SEQ ID NO: 318190 - DNA, 75 bp, synthetic construct
  source 1..75: mol_type = other DNA
cgccgaactggcgaagaaacagtccgttgatgcgatgctgatgagcggcgacagctacgactgtggtaagaaaat

SEQ ID NO: 318191 - DNA, 75 bp, synthetic construct
  source 1..75: mol_type = other DNA
aatgctaaaagcggcgagagcggaaggctttttctgtattcatcgcttgtttattgttgattcgatttcatttca

SEQ ID NO: 318192 - DNA, 75 bp, synthetic construct
  source 1..75: mol_type = other DNA
cgacacctcttacgaactcgaagcgctgctggagcagcgtgttaaacgtcaactgctggcggaagtgcagtccat

SEQ ID NO: 318193 - DNA, 75 bp, synthetic construct
  source 1..75: mol_type = other DNA
acgcatgccgggcgatctctccgaatactccgccatccagaccaaaaagccaatggtggctgaaggccaggtggc

SEQ ID NO: 318194 - DNA, 75 bp, synthetic construct
  source 1..75: mol_type = other DNA
ctgctggagcagcgtgttaaacgtcaactgctggcggaagtgcagtccatttgtcctcctggcgtgaccatcatg

SEQ ID NO: 318195 - DNA, 75 bp, synthetic construct
  source 1..75: mol_type = other DNA
ttctactgaatttatagtgatgcgaggtactcctcaagtacattatttgtatgtagcttgtttagcccgagaaag

SEQ ID NO: 318196 - DNA, 75 bp, synthetic construct
  source 1..75: mol_type = other DNA
caatgaatgaataccgatataatttcagcctgaacagtattaaaggtatgtggcccgaactggctttaccggggg

SEQ ID NO: 318197 - DNA, 75 bp, synthetic construct
  source 1..75: mol_type = other DNA
caaccgcaaacgctggattccgacctgatggccgtagggcgctatgtgctttccgctgacatttgggccgaactg

SEQ ID NO: 318198 - DNA, 75 bp, synthetic construct
  source 1..75: mol_type = other DNA
tgctggacaacgcaagcgccgacccgctgcgctacaaccttgccgccatggtagcgcgtttcaacgaaaccgggc

SEQ ID NO: 318199 - DNA, 75 bp, synthetic construct
  source 1..75: mol_type = other DNA
attatccagactaaagaagcgctggagacagaagggcaggtgagccgcatcgttgagttcatcgaaaaaccggat

SEQ ID NO: 318200 - DNA, 75 bp, synthetic construct
  source 1..75: mol_type = other DNA
ttcatgtcgatttgctggaaggcgcgtcaaataaagaagtggtgattcagtttttgaaactggtgaccgaagcgg

SEQ ID NO: 318201 - DNA, 75 bp, synthetic construct
  source 1..75: mol_type = other DNA
tatttcccgtatcgaaatgtatggtcacggtgctggatatacggcagatgaagtattggcacttgcccaaatggc

SEQ ID NO: 318202 - DNA, 75 bp, synthetic construct
  source 1..75: mol_type = other DNA
aagatgaccaccagcaatatctacataaaaacccgtatggttattgcggaattggtgggatcggcgtttgcctgc

SEQ ID NO: 318203 - DNA, 75 bp, synthetic construct
  source 1..75: mol_type = other DNA
tggtttcccccgccgatgctcttgtcgggcgtaataccccgatgcctgtagccacgttgcatgcagtcaacggtc

SEQ ID NO: 318204 - DNA, 75 bp, synthetic construct
  source 1..75: mol_type = other DNA
gcatgtttatcgcgaactggttaaccgtctccacgatacagcgatcaagtgtgctggcacccagcaattacgaga

SEQ ID NO: 318205 - DNA, 75 bp, synthetic construct
  source 1..75: mol_type = other DNA
tattgatgcactattggttcataagatggccagggctttattgccgctggtggatgctggcgatacaagcgaggg

SEQ ID NO: 318206 - DNA, 75 bp, synthetic construct
  source 1..75: mol_type = other DNA
catcgccggtttgctgattggcaagccgttgggtattagtttgttctgctggctggcgctgcgtttgaaactggc

SEQ ID NO: 318207 - DNA, 75 bp, synthetic construct
  source 1..75: mol_type = other DNA
gaacgcactcaacctggtgcatgggggcgtattcagctgactgatgctattgccgaactggcgaaaaaacagtcc

SEQ ID NO: 318208 - DNA, 75 bp, synthetic construct
  source 1..75: mol_type = other DNA
gggctgggtgacggagaaaatccgccaaccgctgattgctggcgggctggtgtgcgatgaagaagatgcgcgtaa

SEQ ID NO: 318209 - DNA, 75 bp, synthetic construct
  source 1..75: mol_type = other DNA
agataatgccagcctgcaactggcaatcgactctgaatgccagtttatttccgtgttgtacggcaatatctgcac

SEQ ID NO: 318210 - DNA, 75 bp, synthetic construct
  source 1..75: mol_type = other DNA
tcgccagataaccaccgagatcgccaacgctacaccgttttattatgccgaagatgaccaccaacaatatctgca

SEQ ID NO: 318211 - DNA, 75 bp, synthetic construct
  source 1..75: mol_type = other DNA
acaagctgggcttcgcctccaataccacacagtcgggcgtctggcaggggcaggctgccggctatgcttacggcg

SEQ ID NO: 318212 - DNA, 75 bp, synthetic construct
  source 1..75: mol_type = other DNA
ctcattacagacgcacctgagttgcggggcctataccagtttgttggggcgtagctattccggtggtggtgctgg

SEQ ID NO: 318213 - DNA, 75 bp, synthetic construct
  source 1..75: mol_type = other DNA
gcgatgttgaagcaacggacacagcaacttatcgacatcattagtaatactgacaatgactactgcatgtgtggt

SEQ ID NO: 318214 - DNA, 75 bp, synthetic construct
  source 1..75: mol_type = other DNA
tccgggcgcagggggttgagatgctggcaaaaaatcatcagagtatcgtcaatgcacttaagggagattctttat

SEQ ID NO: 318215 - DNA, 75 bp, synthetic construct
  source 1..75: mol_type = other DNA
aggtcaggcatattgcgtaaaagatggagtgcaagttaatcccatgtatgcaagagggtggaatgactatcgcgc

SEQ ID NO: 318216 - DNA, 75 bp, synthetic construct
  source 1..75: mol_type = other DNA
tgtgtgcaaaatcagacagttccgcaaaccgccggcgaacaggccgtgctggcgcaacgtatcgttgacaagatc

SEQ ID NO: 318217 - DNA, 75 bp, synthetic construct
  source 1..75: mol_type = other DNA
gtgaaaaaattacgtatcggcgtagtgggattaggtggcattgcgcaaaaagcgtggttaccggtgctggcggca

SEQ ID NO: 318218 - DNA, 75 bp, synthetic construct
  source 1..75: mol_type = other DNA
taaacgcgggcgtacatgtttgtgtcgataaaccgctggcggaaaatttgcgcgatgctgagcgcctggtggagc

SEQ ID NO: 318219 - DNA, 75 bp, synthetic construct
  source 1..75: mol_type = other DNA
attctctgccatcgctcatctataccgatttcaaacgcctttctccttactacgactttatctccgtcgggcgca

SEQ ID NO: 318220 - DNA, 75 bp, synthetic construct
  source 1..75: mol_type = other DNA
cgaaatcaccattgtcggtgaactgccgccgcaaacggcgaaacgcattgccgagaatattaagttcggggcagc

SEQ ID NO: 318221 - DNA, 75 bp, synthetic construct
  source 1..75: mol_type = other DNA
ggaaatcaccattgttggtgaactgccaccgcaaacggcgaaacgaattgccgagaatattaagtttggggcagc

SEQ ID NO: 318222 - DNA, 75 bp, synthetic construct
  source 1..75: mol_type = other DNA
tggatggttttctgaaaggtaaatgcatcccacgagatttaaatgttaacgaaacaaacgctgaatatctggtgc

SEQ ID NO: 318223 - DNA, 75 bp, synthetic construct
  source 1..75: mol_type = other DNA
cgaaatcaccattgttggtgaactgccaccgcaaacggcgaagcgcattgccgagaatattaagtttggggcagg

SEQ ID NO: 318224 - DNA, 75 bp, synthetic construct
  source 1..75: mol_type = other DNA
atgaagcaactttggtttgccatgtcattagtgacaggtagcctgctattctctgctaacgcctcggcgacaccc

SEQ ID NO: 318225 - DNA, 75 bp, synthetic construct
  source 1..75: mol_type = other DNA
ggccggagttgctgcaatgattatcaacgatgctctgcaccacagcgaaaccccagccaccgatgctttcctggc

SEQ ID NO: 318226 - DNA, 75 bp, synthetic construct
  source 1..75: mol_type = other DNA
gcggcaatgcatgaaactattgaagccgttcggagtgttgcggataactccagtggaattgccgggtggcatttg

SEQ ID NO: 318227 - DNA, 75 bp, synthetic construct
  source 1..75: mol_type = other DNA
gtcgagcggttcgttaacatttggagattgctacatatcacttaacgagttcgccgaccagcttcgcaaaggagg

SEQ ID NO: 318228 - DNA, 75 bp, synthetic construct
  source 1..75: mol_type = other DNA
gaagaagttcacgttcgcggccatgcggtggaatgtcgtatcaacgccgaagatccgaacaccttcctgccaagt

SEQ ID NO: 318229 - DNA, 75 bp, synthetic construct
  source 1..75: mol_type = other DNA
gccaagatttcggctctgtccgaagaccagcagaaagcgattgagtcaattaagcaggctgattcggctgttaag

SEQ ID NO: 318230 - DNA, 75 bp, synthetic construct
  source 1..75: mol_type = other DNA
aatgaagcgcatccgattgatggcctgtctggtgaatatgcggagaaatcccttgaagaatgggcggaacagatt

SEQ ID NO: 318231 - DNA, 75 bp, synthetic construct
  source 1..75: mol_type = other DNA
agaaacggcgttgcgggagtgccgttctgctggaatcacgattgataaccttgaggccaagtgcgcggcgctggc

SEQ ID NO: 318232 - DNA, 75 bp, synthetic construct
  source 1..75: mol_type = other DNA
tgctcggtggcgtgtaccagaaaaaaagcgaaagtatggttggccctttgacacgccagtgcatccaacaggtgc

SEQ ID NO: 318233 - DNA, 75 bp, synthetic construct
  source 1..75: mol_type = other DNA
cggcacattgagcgcctggcggattatcccaccgtggcgattggcggtatcagtctggcgcgcgcgcctgcggtg

SEQ ID NO: 318234 - DNA, 75 bp, synthetic construct
  source 1..75: mol_type = other DNA
taccttttcgtttaggactgtacccggtggtggacagcgtacagtggatcgaacgtctgttggatgcaggcgtac

SEQ ID NO: 318235 - DNA, 75 bp, synthetic construct
  source 1..75: mol_type = other DNA
agcaccagcaccgggcattaccccggaactgcgtcgctacatcggcgaacgttgcgctaaagcgtgtgttgatat

SEQ ID NO: 318236 - DNA, 75 bp, synthetic construct
  source 1..75: mol_type = other DNA
ggaaaaaaaccgcgccattgctaagcgcattggttatccggtgattatcaaagcctctggcggcggcggcggtcg

SEQ ID NO: 318237 - DNA, 75 bp, synthetic construct
  source 1..75: mol_type = other DNA
atcttcattggcccaaaagcagaaactattcgcctgatgggcgacaaagtgtcagcaattgccgcgatgaaaaaa

SEQ ID NO: 318238 - DNA, 75 bp, synthetic construct
  source 1..75: mol_type = other DNA
gttatcgacatgcacgcctcgataaccgtcctcttgcacaattgttgcaaatggatggcccgcgccgggaagtgg

SEQ ID NO: 318239 - DNA, 75 bp, synthetic construct
  source 1..75: mol_type = other DNA
cgattgagtcaattaagcaggctgatgcagctgttaagttggcacacgagaagttttcggcgctggcggcggaga

SEQ ID NO: 318240 - DNA, 75 bp, synthetic construct
  source 1..75: mol_type = other DNA
cggtgtccgggctggacgatggcgactgcgttacggtgaaagaggcgactgacgctctgctgcattgtgcggaac

SEQ ID NO: 318241 - DNA, 75 bp, synthetic construct
  source 1..75: mol_type = other DNA
ggctgacccgcgacgtaaaacgcggcgactatatctggctttcggatgcgatgggggaattcacctgcgacgata

SEQ ID NO: 318242 - DNA, 75 bp, synthetic construct
  source 1..75: mol_type = other DNA
ggtaaaaaaatgggctatatgcaggcttttgtgaagtacgggcttcgcaatctcaaggaaggagcgaagttcaga

SEQ ID NO: 318243 - DNA, 75 bp, synthetic construct
  source 1..75: mol_type = other DNA
cgcagggcgtggagatgtttgcggagtgtgcatacacgcttgaacatcatgatcacgcagtagccttcgccgctg

SEQ ID NO: 318244 - DNA, 75 bp, synthetic construct
  source 1..75: mol_type = other DNA
gctaatgaaccgcacccgattgatggcctgtccagtgaatatgcggagaaatccctagaagaatgggcggagcag

SEQ ID NO: 318245 - DNA, 75 bp, synthetic construct
  source 1..75: mol_type = other DNA
agatcatcaatattcaccattcattcctgccagcgtttatcggcgcacgtccttatcaccaggcctatgaacgtg

SEQ ID NO: 318246 - DNA, 75 bp, synthetic construct
  source 1..75: mol_type = other DNA
cgtgacgtcgagaaaaacgtattaagccgcgcgctttaccaggtactggcacagcgggtctttgtttacggcaac

SEQ ID NO: 318247 - DNA, 75 bp, synthetic construct
  source 1..75: mol_type = other DNA
gactggatgtggaaatcgcggcagttattggtaaccacgatactttacgctctttggtggaacgttttgatattc

SEQ ID NO: 318248 - DNA, 75 bp, synthetic construct
  source 1..75: mol_type = other DNA
cctggcttcgcgtaccgtgatgacctgtggcccggctccgtatatggattgggtggaacaggaagtgaaagcact

SEQ ID NO: 318249 - DNA, 75 bp, synthetic construct
  source 1..75: mol_type = other DNA
gcgtgaagattattggcgcaaccgctcactatgtgaatgacaatctggacgaaggcccaatcatcatgcaggacg

SEQ ID NO: 318250 - DNA, 75 bp, synthetic construct
  source 1..75: mol_type = other DNA
tctctggttgagcgttttgatattccgtttgagctggtaagtcatgaaggattaagtcgcaacgagcacgatcaa

SEQ ID NO: 318251 - DNA, 75 bp, synthetic construct
  source 1..75: mol_type = other DNA
acagctacgactgcggtaaaaaaatgggttatatgcaggcgtttgtgaagtatggactgcgtaacctaaaagaag

SEQ ID NO: 318252 - DNA, 75 bp, synthetic construct
  source 1..75: mol_type = other DNA
aatcagacaccccagccaccgatgctttcctggctgaagtccgggctaaggcgtttgatgacctttgcgcggcgt

SEQ ID NO: 318253 - DNA, 75 bp, synthetic construct
  source 1..75: mol_type = other DNA
aaaatcagtacgcatcagagacatcatcgtctcagcccgcttgttcagggagcagattcgcaaggaggccgccca

SEQ ID NO: 318254 - DNA, 75 bp, synthetic construct
  source 1..75: mol_type = other DNA
ttaccaagaacaacaacggctgctcgccagcgatggaagacgacagaagctttgtgtacgagatgacgcagcaca

SEQ ID NO: 318255 - DNA, 75 bp, synthetic construct
  source 1..75: mol_type = other DNA
gtcgaaatcccagccaccgatgctttcctggctgaagtgcgggcgcagggcgtggatgctgctatagaagctgca

SEQ ID NO: 318256 - DNA, 75 bp, synthetic construct
  source 1..75: mol_type = other DNA
atatagcactgaaatctgcacaccctcagcaattcggtcagaaaatgatggatgcattggttgcattggttgcat

SEQ ID NO: 318257 - DNA, 75 bp, synthetic construct
  source 1..75: mol_type = other DNA
ttgccgccgggcatgagatggcttcggaactgaaagcagaatgtggtgccgttgatatgcgtaatgtggcaaagc

SEQ ID NO: 318258 - DNA, 75 bp, synthetic construct
  source 1..75: mol_type = other DNA
gggctatatgcaggcgttcgtgaagtatggattacgcaacctgaaagaaggggcgaagttccgcaaaggcattga

SEQ ID NO: 318259 - DNA, 75 bp, synthetic construct
  source 1..75: mol_type = other DNA
ttctgccgatatttggcctgaactggagcgtactcaacctggagcatggggacgtattcagttgactgatgccat

SEQ ID NO: 318260 - DNA, 75 bp, synthetic construct
  source 1..75: mol_type = other DNA
gacgtattcagctaactgacgcaattgccgaactggcgaaaaaacagtccgttgatgcgatgttaatgacgggtg

SEQ ID NO: 318261 - DNA, 75 bp, synthetic construct
  source 1..75: mol_type = other DNA
tgccaacagtggaaactgatccagctcttgaaacaattcgtatcgccatatcaccacaaaaaaccactccagcta

SEQ ID NO: 318262 - DNA, 75 bp, synthetic construct
  source 1..75: mol_type = other DNA
tgctgcatcagagcgctggggtagcggatacgtattcgacgagctcaatgacttcgccgcccagcttcgcaaagg

SEQ ID NO: 318263 - DNA, 75 bp, synthetic construct
  source 1..75: mol_type = other DNA
gccagccaccgacgctttcctggctgaaatacgtgcggaggcgcgcaacgaggggattaactataccgcaagccg

SEQ ID NO: 318264 - DNA, 75 bp, synthetic construct
  source 1..75: mol_type = other DNA
cccgtaaaattacagattttgaagaacgtatgatgtttatgccgaaatttttcgggcaatactggtattttgtag

SEQ ID NO: 318265 - DNA, 75 bp, synthetic construct
  source 1..75: mol_type = other DNA
cccgtaaaattaccgattatgaagaacgcctgatgtttatgccgaaatttttcggccaatactggcattttgttg

SEQ ID NO: 318266 - DNA, 75 bp, synthetic construct
  source 1..75: mol_type = other DNA
tgcagttgctggagtcaggcacgctctatgtcgccagattcaatgacgacggttccggcgactggctgccgctaa

SEQ ID NO: 318267 - DNA, 75 bp, synthetic construct
  source 1..75: mol_type = other DNA
gaagcagctcaggcctgggccgatgctgacccgtacgtagcggcaggagtctatgaacacgtttcagtgaaacca

SEQ ID NO: 318268 - DNA, 75 bp, synthetic construct
  source 1..75: mol_type = other DNA
atctccccacagcatgtatctgcacgagttcaggaactggaaaacctgactatcagtgaactaccaccgctgcga

SEQ ID NO: 318269 - DNA, 75 bp, synthetic construct
  source 1..75: mol_type = other DNA
tatcagtgaactaccaccgctgcgattgggctttctcgtttctcgccgttatgaagggcgacaggagcaagagct

SEQ ID NO: 318270 - DNA, 75 bp, synthetic construct
  source 1..75: mol_type = other DNA
gcggatgacttgactgacccatctccggcaaccacctttgcgcaccttgacgcaaccgtggtactgagccgtcag

SEQ ID NO: 318271 - DNA, 75 bp, synthetic construct
  source 1..75: mol_type = other DNA
atcaaaaattaaacataaaattagccatgatgtttttgaaccttatcccgcagcgttacatggtcaatttgattc

SEQ ID NO: 318272 - DNA, 75 bp, synthetic construct
  source 1..75: mol_type = other DNA
aagattccgaagaaggcttaacacatatactctcagagcatttcgagaatgttaaaaccaaggttcaaggggtga

SEQ ID NO: 318273 - DNA, 75 bp, synthetic construct
  source 1..75: mol_type = other DNA
tgccgccgtgacgctggcgggggataatcgcgttgtggtctatatgggcgacgatcagaaatttgaatacatcta

SEQ ID NO: 318274 - DNA, 75 bp, synthetic construct
  source 1..75: mol_type = other DNA
gaagaaataattataagctgcatagaaacatggagggcaggagctaatattgtaaactggcgtggaagaagatgg

SEQ ID NO: 318275 - DNA, 75 bp, synthetic construct
  source 1..75: mol_type = other DNA
ggatgtaaaagacctcgaacacccgattgaagtcccggtaggtaaagcgactctgggccgtatcatgaacgtact

SEQ ID NO: 318276 - DNA, 75 bp, synthetic construct
  source 1..75: mol_type = other DNA
ttgaggcgcgtcttgatgcagaagtggatgccattctggatgaactgctgggcgcaccgactgttccggagccgg

SEQ ID NO: 318277 - DNA, 75 bp, synthetic construct
  source 1..75: mol_type = other DNA
ccctggacatgcagattgaagatatgtggcgcgatgcgcgatgggccatatcggacatccggggcgtgaaacgga

SEQ ID NO: 318278 - DNA, 75 bp, synthetic construct
  source 1..75: mol_type = other DNA
atgagtatggttgccagaaccaacccctgccccgcagaggacgacatcaccgataccgatgatggtgatacccgt

SEQ ID NO: 318279 - DNA, 75 bp, synthetic construct
  source 1..75: mol_type = other DNA
acctggaccacggcagtagcttgtcatcagtgtgaagatgcaccctgcgcgaatgtttgccctgtggacgctatt

SEQ ID NO: 318280 - DNA, 75 bp, synthetic construct
  source 1..75: mol_type = other DNA
atgagtatggttgccagaactgaacccggacccgcagaggacgacatcaccgataccgatgatggcgatacccgc

SEQ ID NO: 318281 - DNA, 75 bp, synthetic construct
  source 1..75: mol_type = other DNA
agcggggagaaattttccactttaaccccggttcggtgagcattccgaaaggcggttttccggcaagctacggca

SEQ ID NO: 318282 - DNA, 75 bp, synthetic construct
  source 1..75: mol_type = other DNA
ccgataaccgcgccgtggcaacaggtattactggaaaaacaacgtctgtttttgacgcatggtcatctttttggc

SEQ ID NO: 318283 - DNA, 75 bp, synthetic construct
  source 1..75: mol_type = other DNA
caattattggaaaattggcgattgaatcttccgagagacctaaatctgcatcccttccaggttgtagagcaattt

SEQ ID NO: 318284 - DNA, 75 bp, synthetic construct
  source 1..75: mol_type = other DNA
gcgttggtggaaccgaaagaataaaaaagcgctggccttggattcgttttacgaagcattcaatcttaacagcct

SEQ ID NO: 318285 - DNA, 75 bp, synthetic construct
  source 1..75: mol_type = other DNA
agcgaacaacctgaggcacaacccggtggtgaggaacaagcaaatgatgttctgcagccggaaccagcaaccatg

SEQ ID NO: 318286 - DNA, 75 bp, synthetic construct
  source 1..75: mol_type = other DNA
tttgacctgccggatgagccaacaggccatgacgcgccttcatggctgactgagccgacgccacagattaacggg

SEQ ID NO: 318287 - DNA, 75 bp, synthetic construct
  source 1..75: mol_type = other DNA
gcgggttatgcggaagtagcagcagcgaatctagatgacattcttactgcaacactcgcattgttagaaagctgt

SEQ ID NO: 318288 - DNA, 75 bp, synthetic construct
  source 1..75: mol_type = other DNA
cttttttatcggggattaccaggtctttatgcctgtatagatcccgattgtaatcaacgtttgggtaaccatagc

SEQ ID NO: 318289 - DNA, 75 bp, synthetic construct
  source 1..75: mol_type = other DNA
aaaattagccatgatgtttttgaaccttatcccgcggcgttacatggtcaatttgattccatttccatgttttac

SEQ ID NO: 318290 - DNA, 75 bp, synthetic construct
  source 1..75: mol_type = other DNA
cgattgtcgacatggtgcgtttctctccggcgcaactggatgccgaagcgctgattaatctgctgcgcccgctga

SEQ ID NO: 318291 - DNA, 75 bp, synthetic construct
  source 1..75: mol_type = other DNA
gctgacgaagcgccgggtaaaaactggctgttcttcggcaacccacactttacggaagatttcctctaccaggtg

SEQ ID NO: 318292 - DNA, 75 bp, synthetic construct
  source 1..75: mol_type = other DNA
atgacgacacaggtcccaccttccgcgttgcttccgttgaacccggagcaactggcacgccttcaggcggccacg

SEQ ID NO: 318293 - DNA, 75 bp, synthetic construct
  source 1..75: mol_type = other DNA
cgcgtatttatcgaacataacgataacttccgcctgccagccaatccagaaaccccggtgattatgattggccca

SEQ ID NO: 318294 - DNA, 75 bp, synthetic construct
  source 1..75: mol_type = other DNA
aactctgaaaaagacgttcgccatatcgaaattgacttaggtgactctggcctgcgttaccagccgggtgacgcg

SEQ ID NO: 318295 - DNA, 75 bp, synthetic construct
  source 1..75: mol_type = other DNA
cattacgctgcgacgacgccgattgtcgatatgttgcgtttctctccggcacaactggacgctgatgcgttcatc

SEQ ID NO: 318296 - DNA, 75 bp, synthetic construct
  source 1..75: mol_type = other DNA
tggtgttgtaataagctgatttgttttatatccgacagaaatgtcagttcagtggataacagactgcattgtttt

SEQ ID NO: 318297 - DNA, 75 bp, synthetic construct
  source 1..75: mol_type = other DNA
cttgtcgctattcagcaggttaacgacctgggaaagacgaactcagcgcagaagacgaattctggtgtgaattag

SEQ ID NO: 318298 - DNA, 75 bp, synthetic construct
  source 1..75: mol_type = other DNA
ctgtcagccgcgggaaagattgatggtgttgccggacgtatcgcatcatccatttgtgatgagaacgggaatcct

SEQ ID NO: 318299 - DNA, 75 bp, synthetic construct
  source 1..75: mol_type = other DNA
gccgggaacgaccttctccaaccctgaccagcgcggcgactacgattccgaaaacaaggccgccctgacgctgcg

SEQ ID NO: 318300 - DNA, 75 bp, synthetic construct
  source 1..75: mol_type = other DNA
acagccgcactatggcggcatcgtggaacggatcatcggcacggcgatgcagatgattcacgacgaactgccggg

SEQ ID NO: 318301 - DNA, 75 bp, synthetic construct
  source 1..75: mol_type = other DNA
gttttatttatgttattttctctcgtttattttatcatgatatttctgacagttatattcacatgtaatctgatt

SEQ ID NO: 318302 - DNA, 75 bp, synthetic construct
  source 1..75: mol_type = other DNA
ttgatgctgatgtcgaatatcaggcagccgccagcgaatggcgcgcccgcgtggttgatgttctgaagtcccgcg

SEQ ID NO: 318303 - DNA, 75 bp, synthetic construct
  source 1..75: mol_type = other DNA
gatcacgctggcctttcgcgccaccatcaaaaatcaacgtatatatgaaacactgggtgaattccctcatctctg

SEQ ID NO: 318304 - DNA, 75 bp, synthetic construct
  source 1..75: mol_type = other DNA
aaatcaggcgatgttagtgctgaaggcttgcgcatagtgctggaggccgggattcgcgaaccggtgattatgcga

SEQ ID NO: 318305 - DNA, 75 bp, synthetic construct
  source 1..75: mol_type = other DNA
tggctggcagtacagcaagagttattacccctggtgaaagccattacccctttcagcgatcgtgctgatcgtacc

SEQ ID NO: 318306 - DNA, 75 bp, synthetic construct
  source 1..75: mol_type = other DNA
ggaacaccttcttccacactttctggaacatttaggtaacaaccatctggatattggtgttggcactgggtttta

SEQ ID NO: 318307 - DNA, 75 bp, synthetic construct
  source 1..75: mol_type = other DNA
tttgacctgccggaggagccaacaggctatgccgcgccttcatggctgactgagccgacgccacagattaacggg

SEQ ID NO: 318308 - DNA, 75 bp, synthetic construct
  source 1..75: mol_type = other DNA
tttgacctgccggaggagccaacaggccatgtcgcgccttcatggctgactgagccgacgccacagattaacggg

SEQ ID NO: 318309 - DNA, 75 bp, synthetic construct
  source 1..75: mol_type = other DNA
aagcgccagaaatacctgccaaagaaattatctggaaaagtgaacggttgaaaaattcacgccgtgtatggattt

SEQ ID NO: 318310 - DNA, 75 bp, synthetic construct
  source 1..75: mol_type = other DNA
gtgacggcgttaaaagtaggaagtgagagctggtggcagtcgaaacatggcccggaatggcagcgtctgaatgac

SEQ ID NO: 318311 - DNA, 75 bp, synthetic construct
  source 1..75: mol_type = other DNA
cggcactggtaaaagagattgttgaattgctgtggttgaaaggcgatgagcctgtcactgttgatggcaaaacgc

SEQ ID NO: 318312 - DNA, 75 bp, synthetic construct
  source 1..75: mol_type = other DNA
aagcccccgataactcagctaaagaaataacctggaaaagtgaacggttgggaaattcacgtcgtgtatggattt

SEQ ID NO: 318313 - DNA, 75 bp, synthetic construct
  source 1..75: mol_type = other DNA
ttaccaccggcgatgcaacagcagaagaacgcccgctggcagttttgctcgatggcgaattttgggcgcagagta

SEQ ID NO: 318314 - DNA, 75 bp, synthetic construct
  source 1..75: mol_type = other DNA
gtctggcagtggacgacacaactcaatgccaactggcgcggcagctactgctttattcctaccgaacgcgatgac

SEQ ID NO: 318315 - DNA, 75 bp, synthetic construct
  source 1..75: mol_type = other DNA
atttcttggggcctctattggtcgttatgcaaaccgtatcgccaatagtcgttatacctttgacgatgaaaccgt

SEQ ID NO: 318316 - DNA, 75 bp, synthetic construct
  source 1..75: mol_type = other DNA
agtctgacgtgcgcaatcacaagttgcagattctggcggacgaatatctgccggttgatgaaggcggcattccgc

SEQ ID NO: 318317 - DNA, 75 bp, synthetic construct
  source 1..75: mol_type = other DNA
actccggcaacttcctcggcggcacgccgtcgcggggaactgaaccttacgccgactggcaaggactggcgctgg

SEQ ID NO: 318318 - DNA, 75 bp, synthetic construct
  source 1..75: mol_type = other DNA
gtgaaacatctgcatcgattctttagcagtgatgcctcgggaggcattattctcataattgccgctatcctggcg

SEQ ID NO: 318319 - DNA, 75 bp, synthetic construct
  source 1..75: mol_type = other DNA
tgtgccagcccggaatgctatcaggatcaggccgcgtttctgggggcctctattggtcgttatgccaaccgcatc

SEQ ID NO: 318320 - DNA, 75 bp, synthetic construct
  source 1..75: mol_type = other DNA
tgccgacgacgatcagcgcaaagtgaaaggttacgatcacgcgttcttgttacaggccaaaggcgatggcaagaa

SEQ ID NO: 318321 - DNA, 75 bp, synthetic construct
  source 1..75: mol_type = other DNA
ctgtctggtgaaataaccggctatgcccgcgagatcagctcactcagagcgctggtcgctaaactgcagagaatg

SEQ ID NO: 318322 - DNA, 75 bp, synthetic construct
  source 1..75: mol_type = other DNA
gaaggtgtgagtctgaactacctggcaatgtttacattgataactctgttcattggtctggcgttataccgaact

SEQ ID NO: 318323 - DNA, 75 bp, synthetic construct
  source 1..75: mol_type = other DNA
taatattcatggtcgttggtaaaaccttccctgaaatgcaaaaggtcctgccgatactgcttaagccgctgtatt

SEQ ID NO: 318324 - DNA, 75 bp, synthetic construct
  source 1..75: mol_type = other DNA
tattatttttataaacctgttacttacatagagttgatcaaaattattctttccaaacccaaagtaaaagtcatt

SEQ ID NO: 318325 - DNA, 75 bp, synthetic construct
  source 1..75: mol_type = other DNA
ctgccgctgtaccgtcagtcggaaatctatgcccgccagggcgtggagctgcaccgcaatacgatggggcgctgg

SEQ ID NO: 318326 - DNA, 75 bp, synthetic construct
  source 1..75: mol_type = other DNA
cgcagttgcaactcacctcaatggccggagagacagcgccgaaaacatcagactctcccgtccgcaaagcacttc

SEQ ID NO: 318327 - DNA, 75 bp, synthetic construct
  source 1..75: mol_type = other DNA
tatctttattgccagcctggcctttggtagcgtagatccagaactgattaactgggcgaaactcggtatcctggt

SEQ ID NO: 318328 - DNA, 75 bp, synthetic construct
  source 1..75: mol_type = other DNA
ggtgccaatgcattaacgctggcagcaattagctgcgtactctactccgccgtcgcagcaccgtttaagtcgttg

SEQ ID NO: 318329 - DNA, 75 bp, synthetic construct
  source 1..75: mol_type = other DNA
acgattttattctgggtccagatcttgttgttacgactattggccattttcagggtgggatcaacgttccacgat

SEQ ID NO: 318330 - DNA, 75 bp, synthetic construct
  source 1..75: mol_type = other DNA
cctgtgaggcatttcactggaatgcaaaacaacctgacggaacgatagagaaaaaattcctttgtcgttcgaaaa

SEQ ID NO: 318331 - DNA, 75 bp, synthetic construct
  source 1..75: mol_type = other DNA
tgaggatatacaggatgagaagattagattttcaataccggatgtttatcggcaggtgattgcaggtaaattcta

SEQ ID NO: 318332 - DNA, 75 bp, synthetic construct
  source 1..75: mol_type = other DNA
ttcctgttgatgtactgcttgatattgccggttattttacgggattgtgtgattatgctgcacaaatcaatccag

SEQ ID NO: 318333 - DNA, 75 bp, synthetic construct
  source 1..75: mol_type = other DNA
cggtatatatacagatttccggtctgggatgtgctcatgtatttagtggcactgagcctcaggatgtattcaaat

SEQ ID NO: 318334 - DNA, 75 bp, synthetic construct
  source 1..75: mol_type = other DNA
gattactcaattaccacaccatcaggacgtattgtaactcctcccgccagtagatgctggcaggtttctgaaaaa

SEQ ID NO: 318335 - DNA, 75 bp, synthetic construct
  source 1..75: mol_type = other DNA
ctgaagaacgcttaactaaagctttcgagcaatggtggccaagtttagagcgtgagttagataacattcaagata

SEQ ID NO: 318336 - DNA, 75 bp, synthetic construct
  source 1..75: mol_type = other DNA
cgtactcgcggtactgaatatctgtggtgttcgtcgcacgggcgtttatattctggttggcgtggtactgtggac

SEQ ID NO: 318337 - DNA, 75 bp, synthetic construct
  source 1..75: mol_type = other DNA
tgacctccatcctgccattagggatcatcgctggtttgctgattggcaagccactgggtattagtctgttctgct

SEQ ID NO: 318338 - DNA, 75 bp, synthetic construct
  source 1..75: mol_type = other DNA
tggctgctgatggcgttgaaattggactggctgatgaggtgtgtcctcctgacgctgcgttcaaaaacttacttg

SEQ ID NO: 318339 - DNA, 75 bp, synthetic construct
  source 1..75: mol_type = other DNA
cagataacttccaagataacatgaaaaattatcttgaaatcactggacaaactgaagatggaaatcgcttaagca

SEQ ID NO: 318340 - DNA, 75 bp, synthetic construct
  source 1..75: mol_type = other DNA
caagatccacgatgtacacgttcgtcatccaacgacagtaacggcagaagcgctcagtcgtatcggtgcgctgta

SEQ ID NO: 318341 - DNA, 75 bp, synthetic construct
  source 1..75: mol_type = other DNA
attactgcaagaaatcgcccagcgttataaccagccggaagtaaccgatgcggtgaacgctctacttgcgctcga

SEQ ID NO: 318342 - DNA, 75 bp, synthetic construct
  source 1..75: mol_type = other DNA
gtcgaaccattgcgggaagttgaacctggcaggaaacgcctggtatttgatgagaatctgcgaccgaaacagtaa

SEQ ID NO: 318343 - DNA, 75 bp, synthetic construct
  source 1..75: mol_type = other DNA
gcagacgttgcatcaagttgagccattgcgggaagttgaaccgaacaggcagcgcctggtatttgatgagaatct

SEQ ID NO: 318344 - DNA, 75 bp, synthetic construct
  source 1..75: mol_type = other DNA
accggcctgctgcctgcggcgctcggcaaagccggtgaagcacaggataacgcccgcgctgccttgcgtatgctt

SEQ ID NO: 318345 - DNA, 75 bp, synthetic construct
  source 1..75: mol_type = other DNA
aaaagatgcgcgtaccgtcgccgcccagcaggtagcaaggctggaatccgccatgtgcctgcgccgccgctggtc

SEQ ID NO: 318346 - DNA, 75 bp, synthetic construct
  source 1..75: mol_type = other DNA
aaagctatggctgggggagtaattcaacacaggaagcgcagttctccgtactcgatgccatcaccgccagcgagc

SEQ ID NO: 318347 - DNA, 75 bp, synthetic construct
  source 1..75: mol_type = other DNA
gattctcctgtccgtatcacccgcgcgtctcaggcaacagaactctgggggcgtggctccatgattgcgcagatg

SEQ ID NO: 318348 - DNA, 75 bp, synthetic construct
  source 1..75: mol_type = other DNA
aaaatcaaaagcaccatttattactactcctcctctttttaggttggaaggtaaacagacaagtcgaattcgtat

SEQ ID NO: 318349 - DNA, 75 bp, synthetic construct
  source 1..75: mol_type = other DNA
atttcagcaggtgcattctggccggatattgtgctgcgtgagctgcgtctggcggtacgactgccggggcgcgtg

SEQ ID NO: 318350 - DNA, 75 bp, synthetic construct
  source 1..75: mol_type = other DNA
agaaagccgctgttcatgctctctttttacgagagttaaaaacacgttttggtaaatatcgccttggatatttat

SEQ ID NO: 318351 - DNA, 75 bp, synthetic construct
  source 1..75: mol_type = other DNA
atttttgaacctaaacagggttatattagattagtacaaattagagattttaaatccgataaatatgcgacgtac

SEQ ID NO: 318352 - DNA, 75 bp, synthetic construct
  source 1..75: mol_type = other DNA
acagcgaagtttaccggcgagtgttccgtgcatgatgtccggctgaattattattccggtgaagtcacgccagcc

SEQ ID NO: 318353 - DNA, 75 bp, synthetic construct
  source 1..75: mol_type = other DNA
gcattattggaatttggggatattgacaacattgccgatggagaaagcagtaaaagcatggaatgcccttactca

SEQ ID NO: 318354 - DNA, 75 bp, synthetic construct
  source 1..75: mol_type = other DNA
tacagtctgctggtcacctgcaagctgaacgaagtggagccggaggactggttgcgcgaagtgatcgtgaagctc

SEQ ID NO: 318355 - DNA, 75 bp, synthetic construct
  source 1..75: mol_type = other DNA
ctctctcagatgtgtccattacagataaagacggttcgatcacatggaatccttattcagaatcacttcatgact

SEQ ID NO: 318356 - DNA, 75 bp, synthetic construct
  source 1..75: mol_type = other DNA
ctgggggacatcgactttccgtttgacgcattcagcgcatcggcagagacagccagcactgacgcaacaaactca

SEQ ID NO: 318357 - DNA, 75 bp, synthetic construct
  source 1..75: mol_type = other DNA
atccacccgcagcgacatctggcagactacagcggtatcctgcaggccgatgcgtacgcgggttataacgccctc

SEQ ID NO: 318358 - DNA, 75 bp, synthetic construct
  source 1..75: mol_type = other DNA
agaaaccgaatgctccgtctgcagcggcaaactgaaaccgctgggagaaagcatctctgaacaactggatatcat

SEQ ID NO: 318359 - DNA, 75 bp, synthetic construct
  source 1..75: mol_type = other DNA
tttgacctgccggatgagccaacaggcaatgccgcgccttcatggctgactgagccgacgccacagattaacggg

SEQ ID NO: 318360 - DNA, 75 bp, synthetic construct
  source 1..75: mol_type = other DNA
atgaccatcagataacgttgaaaattgataccgtgcgaacagacctgccggacagttctcctgtttgtttgaatg

SEQ ID NO: 318361 - DNA, 75 bp, synthetic construct
  source 1..75: mol_type = other DNA
cagttacgtcgcttagcctgtggcgtgtcgcaacgggataacaaaacagctacatttgacttcagcgcctgtact

SEQ ID NO: 318362 - DNA, 75 bp, synthetic construct
  source 1..75: mol_type = other DNA
tgcggagaatgctacatcgaaacatactcgaacggtaacgaaatctctcgaattatctgacttttctaccatcat

SEQ ID NO: 318363 - DNA, 75 bp, synthetic construct
  source 1..75: mol_type = other DNA
ggatcagctttcagatgcggtcgtggcggccattaaggatgctgaggcttcaatggggggataccaggaggcctt

SEQ ID NO: 318364 - DNA, 75 bp, synthetic construct
  source 1..75: mol_type = other DNA
gagtcgtctcgatgtggacgagttctcctatggtgtgcctgtcgagcggtacgtgttcgatgccatccgccgcct

SEQ ID NO: 318365 - DNA, 75 bp, synthetic construct
  source 1..75: mol_type = other DNA
aagttgttggtgatgttgaggacgctgagattgagttcgttgatcctgaggaagccgatgacggtgacgaccaag

SEQ ID NO: 318366 - DNA, 75 bp, synthetic construct
  source 1..75: mol_type = other DNA
atattctgaccggaagcgcaaagtcttttgctgatttaaacgcgcaggttgagcaactcagcaagcgttgctcag

SEQ ID NO: 318367 - DNA, 75 bp, synthetic construct
  source 1..75: mol_type = other DNA
cctcacacaaaccaaaaacacgcaagattccaaaatggtgtattgaccgtatcccttctgatgctcaaatcatag

SEQ ID NO: 318368 - DNA, 75 bp, synthetic construct
  source 1..75: mol_type = other DNA
atgtttgaagagcgtttagagactattcggtctgtttgtgaaaacttaaagttacaagccaatccagccttaaga

SEQ ID NO: 318369 - DNA, 75 bp, synthetic construct
  source 1..75: mol_type = other DNA
aagcagctgaagctggagcagcgtggtaatgatacctggctgaaaaacccgacgccgtattacatggctattgtt

SEQ ID NO: 318370 - DNA, 75 bp, synthetic construct
  source 1..75: mol_type = other DNA
aagacttacggtggccaagtgtggattgataacaccaaccaagggagtggtgtttatatggttccccagccaccg

SEQ ID NO: 318371 - DNA, 75 bp, synthetic construct
  source 1..75: mol_type = other DNA
gggcacagctctgccaaaggaccgtgagtccctgttctggcttaacgtccaggaagtgccaccaaaaccgaaagt

SEQ ID NO: 318372 - DNA, 75 bp, synthetic construct
  source 1..75: mol_type = other DNA
gagatgctgaaaaaaggccatatcgagatcaaccgtgttgagtaccttcagctgcaggaagaatttgcacgcaga

SEQ ID NO: 318373 - DNA, 75 bp, synthetic construct
  source 1..75: mol_type = other DNA
ccccctcggtcggagccctggtccttcctgtcatctatcgggcgattaaaactcactatccacagcttttactgc

SEQ ID NO: 318374 - DNA, 75 bp, synthetic construct
  source 1..75: mol_type = other DNA
caggaggtttccagtggtggcagtgctaccagcaccaccattaatggcgggttccaggaggtttccagtggtggc

SEQ ID NO: 318375 - DNA, 75 bp, synthetic construct
  source 1..75: mol_type = other DNA
gcagtgtaaccaccacgaccatttaccgtggtggggagcagagtattactaatgcaggccttgctaccgggacca

SEQ ID NO: 318376 - DNA, 75 bp, synthetic construct
  source 1..75: mol_type = other DNA
ccgaaggacgcgttctggagctacaccagggtatgcgtaagccgtctgagttagaggccacgtttgcgcgcctgg

SEQ ID NO: 318377 - DNA, 75 bp, synthetic construct
  source 1..75: mol_type = other DNA
ggcggggattgagatgccggattttcatcgcgaggatgactggtggcgtcacggtcagaatctctatctggataa

SEQ ID NO: 318378 - DNA, 75 bp, synthetic construct
  source 1..75: mol_type = other DNA
agcgatgtgaatctgggtaaaaaggtgaatggaaacatcagcgtggatgctgtaaatgactggggtggagttcag

SEQ ID NO: 318379 - DNA, 75 bp, synthetic construct
  source 1..75: mol_type = other DNA
gtggcctatggcggtcaggtgtgggtggataatgttggtaaggacaccactgtctccatggtgccgaccccgccg

SEQ ID NO: 318380 - DNA, 75 bp, synthetic construct
  source 1..75: mol_type = other DNA
tggcgtccctgttatccctgagtctgtgcagccaggcgatggcggcatttaccatcagcggtacacgctttatct

SEQ ID NO: 318381 - DNA, 75 bp, synthetic construct
  source 1..75: mol_type = other DNA
ccgctttgtgaagcgtggtgcacgcccgttattgctgacgacgcttatcgatccgcgccatatgctggtcttcgg

SEQ ID NO: 318382 - DNA, 75 bp, synthetic construct
  source 1..75: mol_type = other DNA
agcgatgtgaatttaggcaaaaaagtcagcggaaaagtgactgtggatgccatcaatgactggggcggggttcag

SEQ ID NO: 318383 - DNA, 75 bp, synthetic construct
  source 1..75: mol_type = other DNA
aactgctagtgtcctgccatcagacagagaatccttgttctggctgaatgttcaggagattcctccgaagccaaa

SEQ ID NO: 318384 - DNA, 75 bp, synthetic construct
  source 1..75: mol_type = other DNA
aaacaaccatctgaactatcaggaactttcctgatctggctgattgcataccaaaacaactttcgctacgttgct

SEQ ID NO: 318385 - DNA, 75 bp, synthetic construct
  source 1..75: mol_type = other DNA
gtggttgccggtggagttactactggcgctcggcatcgtgccttacggtgtggcggacaccatcaattatcgtct

SEQ ID NO: 318386 - DNA, 75 bp, synthetic construct
  source 1..75: mol_type = other DNA
gcgcgtacccgcagtctggttctatggtgcgacgctttctgcaatgcactttgtgcgtattctggataacgccat

SEQ ID NO: 318387 - DNA, 75 bp, synthetic construct
  source 1..75: mol_type = other DNA
gtgacgaaggtgctgagcaacgggaaggaagtgacgctgtcgggggaggcccagaaggcggtggcgatgctggcg

SEQ ID NO: 318388 - DNA, 75 bp, synthetic construct
  source 1..75: mol_type = other DNA
atgagcggcttacctcttatttcgcgccgccgactgttaacggcgatggcgctttctccgttgttatggcagatg

SEQ ID NO: 318389 - DNA, 75 bp, synthetic construct
  source 1..75: mol_type = other DNA
gaccgaaatgaaaccgtcatttatggtctggtcggcaggttacggcccttcgccagaaatgctggcgcgcattgc

SEQ ID NO: 318390 - DNA, 75 bp, synthetic construct
  source 1..75: mol_type = other DNA
gcggaaaagcatttagcgcaatatgaagactttatccgcagcatgaaaccccgctttgtgaagcgaggagcgcgt

SEQ ID NO: 318391 - DNA, 75 bp, synthetic construct
  source 1..75: mol_type = other DNA
cgccacggagaatatttacagatacgaccaaaagcagcgaatgcgaaggccctgaccgaagccattggttcccga

SEQ ID NO: 318392 - DNA, 75 bp, synthetic construct
  source 1..75: mol_type = other DNA
gggcttcctgaaaaaagtaaccggggtcgaccgcgactgggcagcaccctgccggagacttattctctggtgtaa

SEQ ID NO: 318393 - DNA, 75 bp, synthetic construct
  source 1..75: mol_type = other DNA
atccggtaaacattaaccacgtcattcactattcagatcacaaagcggtgaatgccttacgctatgccctcagct

SEQ ID NO: 318394 - DNA, 75 bp, synthetic construct
  source 1..75: mol_type = other DNA
gttcacaaaccgggaaaaatgaacgcagcacgcttgtgatcatcattaccccgactttcccgtcaggaggcaata

SEQ ID NO: 318395 - DNA, 75 bp, synthetic construct
  source 1..75: mol_type = other DNA
aatgatgtttcactacagattgaggctggcgaaacgctggcactggtaggcgagtcaggttccggcaagagcgtt

SEQ ID NO: 318396 - DNA, 75 bp, synthetic construct
  source 1..75: mol_type = other DNA
agtgggcgagtccggttccgggaaaagtacgacgggactggcgctgctgcgactgattaattctcagggcagcat

SEQ ID NO: 318397 - DNA, 75 bp, synthetic construct
  source 1..75: mol_type = other DNA
atgtggcatcgttcttggttgcagcaggcttcctgaaaaaagtcaccgggggcgaccgcgactggacagcaccct

SEQ ID NO: 318398 - DNA, 75 bp, synthetic construct
  source 1..75: mol_type = other DNA
acaccatgtcgaataacacccgcatgatggctgacgctatcgcccaggggattgcggaaaccgacccgcgcgtgg

SEQ ID NO: 318399 - DNA, 75 bp, synthetic construct
  source 1..75: mol_type = other DNA
cgatccggcaaaaggcgagccaatgcaggacgttgcgccaggaacgccgtggagtgaagtcccggataacttcct

SEQ ID NO: 318400 - DNA, 75 bp, synthetic construct
  source 1..75: mol_type = other DNA
acggcaaacagctcatttttgtcgaaacgccaatgctgcactggccggacagcatgatgacttacctgacgggcg

SEQ ID NO: 318401 - DNA, 75 bp, synthetic construct
  source 1..75: mol_type = other DNA
gttttatctgacatcggcgaggcgctggaagcgcgctttgtgctggaagataagctgattctgctggtgcttgat

SEQ ID NO: 318402 - DNA, 75 bp, synthetic construct
  source 1..75: mol_type = other DNA
tggaagcgcgctttgtgttggaagataagctgattctgctggtgcttgatgccgctcgcgtcaaacatcctgctt

SEQ ID NO: 318403 - DNA, 75 bp, synthetic construct
  source 1..75: mol_type = other DNA
attcttcataagctggaaggcaacgggcaactcgcgcgcgccgcgaagatttggccgcaactcgaagccaatact

SEQ ID NO: 318404 - DNA, 75 bp, synthetic construct
  source 1..75: mol_type = other DNA
tgctggagatattcgttttcatggcgaatcgctacttcatgccagcgagcaaacgttgcgcggcgtacgcggtaa

SEQ ID NO: 318405 - DNA, 75 bp, synthetic construct
  source 1..75: mol_type = other DNA
cccgcaactctgaatcacgggccatcagctacgcgctgaaagttatcagattactgtatccgtcagtggagtggg

SEQ ID NO: 318406 - DNA, 75 bp, synthetic construct
  source 1..75: mol_type = other DNA
attaattatggcaatagtagtatccggtcgtatgttaggtattaattatgatcatacttctttcgaactaatcaa

SEQ ID NO: 318407 - DNA, 75 bp, synthetic construct
  source 1..75: mol_type = other DNA
tctggtcgcctattgggtgtcaatgatgatcatgacgctttcgtactaatcaataaaaagaaaaacggaacttac

SEQ ID NO: 318408 - DNA, 75 bp, synthetic construct
  source 1..75: mol_type = other DNA
atgtctcaacctcgcccattgccctctccccccgaaactgaagcgcagttattagcgcaagcacagcaactttct

SEQ ID NO: 318409 - DNA, 75 bp, synthetic construct
  source 1..75: mol_type = other DNA
ggttcctgaacaagcgagcaaggaagcggctaaataccaaactattcaggattcagccatacccaaaaagcagtt

SEQ ID NO: 318410 - DNA, 75 bp, synthetic construct
  source 1..75: mol_type = other DNA
atggaaggctggcagcgcgcatttgtcctgcatagtcgcccgtggagcgaaaccagcctgatgctggatgtcttc

SEQ ID NO: 318411 - DNA, 75 bp, synthetic construct
  source 1..75: mol_type = other DNA
gaattattaattgccgatgaaccaaccaccgcgctggacgtctctgtccaggcgcagattttacagctgttgcgc

SEQ ID NO: 318412 - DNA, 75 bp, synthetic construct
  source 1..75: mol_type = other DNA
aacacgccaccgttatccggcggagttctctggtggtcagcggcaacgtattgcgattgccagggcattaattct

SEQ ID NO: 318413 - DNA, 75 bp, synthetic construct
  source 1..75: mol_type = other DNA
tgcgatggccctattaacacgcccggaattattgattgccgatgagccaaccaccgcgctggatgtctccgtcca

SEQ ID NO: 318414 - DNA, 75 bp, synthetic construct
  source 1..75: mol_type = other DNA
gtggtgaaaagcgtcagttttacgcttcgggcgggtgaaacgctgggtttagtgggcgagtccggctccggcaaa

SEQ ID NO: 318415 - DNA, 75 bp, synthetic construct
  source 1..75: mol_type = other DNA
tgcgcgaactgcaaggcgagctgaatatgggcatgctgtttattactcataacctcagcattgtcagaaaactgg

SEQ ID NO: 318416 - DNA, 75 bp, synthetic construct
  source 1..75: mol_type = other DNA
agcacgacgggactggcgctgctgcgactgattaactctcagggcagcatcgtctttgacggtcagccactgcaa

SEQ ID NO: 318417 - DNA, 75 bp, synthetic construct
  source 1..75: mol_type = other DNA
ccgctgttgtgttttaccgccgctgccacgcgcttgcgtctctcaacgttagggaaggtgcgaataagcaggtca

SEQ ID NO: 318418 - DNA, 75 bp, synthetic construct
  source 1..75: mol_type = other DNA
taccgctccctttccggactggcaagtattcgttaccagggcgaccggcatatctttgatattgcctggtgggga

SEQ ID NO: 318419 - DNA, 75 bp, synthetic construct
  source 1..75: mol_type = other DNA
tgtgtttgcccaacaaattgctgtaccggaactacaccaacaggtgaccgatcttactgatacattaagtttacc

SEQ ID NO: 318420 - DNA, 75 bp, synthetic construct
  source 1..75: mol_type = other DNA
aaatcagggaacattacaccgataccgctggtttcaccgatcatgtctttgccctgatgcatctgttgggatttg

SEQ ID NO: 318421 - DNA, 75 bp, synthetic construct
  source 1..75: mol_type = other DNA
ttctggcgatttgtggcgtgctggtccaactctggacttttggttcattgccgatcatcgcgctggggctggcgt

SEQ ID NO: 318422 - DNA, 75 bp, synthetic construct
  source 1..75: mol_type = other DNA
ggcggtgaacaatcatcatatgctggaagcgagtctgggatactttatcaatccgctggttaacatattgctggg

SEQ ID NO: 318423 - DNA, 75 bp, synthetic construct
  source 1..75: mol_type = other DNA
aacttctggataatcagtgccgttgcagagcaactgggcgtgttatctgtgaaggctgattttacccgtccacac

SEQ ID NO: 318424 - DNA, 75 bp, synthetic construct
  source 1..75: mol_type = other DNA
gcaaagtggcattggcagcgcttcccgccgttgaggtaaacccgcccgcccccgcagtgaactgtctctttacac

SEQ ID NO: 318425 - DNA, 75 bp, synthetic construct
  source 1..75: mol_type = other DNA
cgatgcgctgctggattttggcgacgggcataaaattaagcgtagcgccaaaccgggttggtatatttatcacag

SEQ ID NO: 318426 - DNA, 75 bp, synthetic construct
  source 1..75: mol_type = other DNA
gtggttaccgacctgcaagcggcgaagattatcagggatatattgatccctgccttcaaaagtgatgacctgatg

SEQ ID NO: 318427 - DNA, 75 bp, synthetic construct
  source 1..75: mol_type = other DNA
caactgggccaacaggccagagatatcgtgcttgatcagcacacatggcagcatcggttgaagcaaataaaaagt

SEQ ID NO: 318428 - DNA, 75 bp, synthetic construct
  source 1..75: mol_type = other DNA
ttctattcactttgtggtgccttcctgggcttgcccagcaaattgctgtgccggaactgcgccaacaggtgaccg

SEQ ID NO: 318429 - DNA, 75 bp, synthetic construct
  source 1..75: mol_type = other DNA
tcaaccagccatatggggcaaaacccgatatcgctgaatttactgctgatcgctgccggtattgtcactaccgta

SEQ ID NO: 318430 - DNA, 75 bp, synthetic construct
  source 1..75: mol_type = other DNA
ggcgctgcgcgatcatacgcataatccgccgatccgcgtgtttgaatctggttcgatcctgctttatctggcgga

SEQ ID NO: 318431 - DNA, 75 bp, synthetic construct
  source 1..75: mol_type = other DNA
atcccggcgctgcgcgaccatacccataatccaccgatccgcgtgtttgagtctggatcgattctgctttatctg

SEQ ID NO: 318432 - DNA, 75 bp, synthetic construct
  source 1..75: mol_type = other DNA
caacgggccgctgaacgagcagttgcatgagcgccatgacgccagtgatttcgagacgaatacggaagataagcg

SEQ ID NO: 318433 - DNA, 75 bp, synthetic construct
  source 1..75: mol_type = other DNA
gcaaagtctttcatcaattgcacaggcttatgtcgaaggtgctattgaaacatctcacaacgaaagtgatgttca

SEQ ID NO: 318434 - DNA, 75 bp, synthetic construct
  source 1..75: mol_type = other DNA
gtgcaggttaaatcaggggatgagtttattactggttggattacacgaacatacacaaagcctcttaaggcttga

SEQ ID NO: 318435 - DNA, 75 bp, synthetic construct
  source 1..75: mol_type = other DNA
cccgacaacgacacagaacgccggggagcaggccggaaatttgccgaaacgctgcgcggtaatgcggccacccat

SEQ ID NO: 318436 - DNA, 75 bp, synthetic construct
  source 1..75: mol_type = other DNA
ttcgtcgcggcgtgcgcgtcctgctggataatgccaccgccaccatcaacccagggcagaaagtcggcctggtgg

SEQ ID NO: 318437 - DNA, 75 bp, synthetic construct
  source 1..75: mol_type = other DNA
ccagctctggacttttggttcgctgccaatcatcgcgctgggactggcatttagttttgccttctacggcctggt

SEQ ID NO: 318438 - DNA, 75 bp, synthetic construct
  source 1..75: mol_type = other DNA
ttatctgtttgctattgctgacagttctaccagccatatggggcaaaacccaatgtcgctgaatttactgctgat

SEQ ID NO: 318439 - DNA, 75 bp, synthetic construct
  source 1..75: mol_type = other DNA
actgcggagctgaataataaccagagccagagtgtaccgttagatacgtctgctaccgaaacccagacgactaca

SEQ ID NO: 318440 - DNA, 75 bp, synthetic construct
  source 1..75: mol_type = other DNA
aaaatgaagcacttaccaccggcgctcgcttgcgtaatgcccgtgaacaacttggacttagccagcaagccgttg

SEQ ID NO: 318441 - DNA, 75 bp, synthetic construct
  source 1..75: mol_type = other DNA
ccatctcggttcacgagggattgagtacgatctactcccctggtgccagcaacagcagatgccggtgatggctta

SEQ ID NO: 318442 - DNA, 75 bp, synthetic construct
  source 1..75: mol_type = other DNA
ttccaacgacggcacccgtgagtatctggaaaatctcaatggtatctataacttacactttgtcagcgaaccaga

SEQ ID NO: 318443 - DNA, 75 bp, synthetic construct
  source 1..75: mol_type = other DNA
atctcagctccctgagcacgattgtggacggcgcccgccagcttctcacagaactcgatacaaagcagcaggcct

SEQ ID NO: 318444 - DNA, 75 bp, synthetic construct
  source 1..75: mol_type = other DNA
ggacagtatgcaggacgtgatcagggaaacactcgatgagctgaagcaggatcagaaacatgagtccccccataa

SEQ ID NO: 318445 - DNA, 75 bp, synthetic construct
  source 1..75: mol_type = other DNA
agcgtctggccgccgtgcggaacaaaatccggcagcagaatgaagtcgtcctcgacaggttacgcgagtatcgtc

SEQ ID NO: 318446 - DNA, 75 bp, synthetic construct
  source 1..75: mol_type = other DNA
catccgctggcggtgtggatgccccgccagtacaacaacatatcatttctgtgatggagggcgggcgggaggcct

SEQ ID NO: 318447 - DNA, 75 bp, synthetic construct
  source 1..75: mol_type = other DNA
atggacctgcttcccggcgtggagctgtccgttaatgatggccaggccggcgtgcacacgctcgtggtgtttgct

SEQ ID NO: 318448 - DNA, 75 bp, synthetic construct
  source 1..75: mol_type = other DNA
taaaatcatccgggcgatgaaaccccgtacgcaatttatctttgccactcacaatgccaatattccagtgctggg

SEQ ID NO: 318449 - DNA, 75 bp, synthetic construct
  source 1..75: mol_type = other DNA
ccatttattatattcataattgcatcatctgtttttaaatatttacacttatcaaaaggagtaataagcataaga

SEQ ID NO: 318450 - DNA, 75 bp, synthetic construct
  source 1..75: mol_type = other DNA
agcagaattaataaataaagcaaaacatggagaagccgtctcatttacagtgctccctccatggttaactcttga

SEQ ID NO: 318451 - DNA, 75 bp, synthetic construct
  source 1..75: mol_type = other DNA
actttaccattgctaattataatattttcaatggcaaaaccacaattgacagactcggcacctcaattgccaaca

SEQ ID NO: 318452 - DNA, 75 bp, synthetic construct
  source 1..75: mol_type = other DNA
ccgccagatagcattcgagggagccggttcgctcggtggaaccgtggtgaaattatctccggaactgaacaccct

SEQ ID NO: 318453 - DNA, 75 bp, synthetic construct
  source 1..75: mol_type = other DNA
gaatattcagacggaaagatccatgctgccggcggaggagtggatgctccccttgtacaacagcacatcatttct

SEQ ID NO: 318454 - DNA, 75 bp, synthetic construct
  source 1..75: mol_type = other DNA
ctctggctgaacagggataaactgccggggattatcagcggttctgcagagacattcagcgtgtatctggaacag

SEQ ID NO: 318455 - DNA, 75 bp, synthetic construct
  source 1..75: mol_type = other DNA
gccagtacaacaacatatcatttctgtgatggagggcgggcgggaggcctttgagcggcgcagggaagtttacgg

SEQ ID NO: 318456 - DNA, 75 bp, synthetic construct
  source 1..75: mol_type = other DNA
ctgcctgtggctgattcaccgttcacggcactgaagctggagaacggctgggtggaaacgcccgggcattccgtc

SEQ ID NO: 318457 - DNA, 75 bp, synthetic construct
  source 1..75: mol_type = other DNA
aacccggatgcccttgccctggtggatagtgtgtatcaccggattgccggtatcagcaaggatgacgggctgata

SEQ ID NO: 318458 - DNA, 75 bp, synthetic construct
  source 1..75: mol_type = other DNA
tatattggcgtcgtgccgccgcaaatcatgggctgggataaagctaatttatccggaaaagtgacggtgaatgat

SEQ ID NO: 318459 - DNA, 75 bp, synthetic construct
  source 1..75: mol_type = other DNA
atttaatcgctatctggcgctacagggaaaatctaaaacaaaagcgtatataaggctcaagtcactcgataagaa

SEQ ID NO: 318460 - DNA, 75 bp, synthetic construct
  source 1..75: mol_type = other DNA
gtgcatcctactggagtaatctggttattttacgttttagtgataaaggaaatgggaaggaaggaagggccggta

SEQ ID NO: 318461 - DNA, 75 bp, synthetic construct
  source 1..75: mol_type = other DNA
accatggtggggagcagagtattaccaatgcaggtcttgcgaccggatccatcattagtggcggggagcagctag

SEQ ID NO: 318462 - DNA, 75 bp, synthetic construct
  source 1..75: mol_type = other DNA
actgcgcatccaggaattactcggggtggtcattatcatcattccaaaaatgagaaatttattgtcatccgagga

SEQ ID NO: 318463 - DNA, 75 bp, synthetic construct
  source 1..75: mol_type = other DNA
ctcctcggatggtacgtcggcgtttcttgaagggcttagtggggaacaccggttacggtttgtcagcgagccgga

SEQ ID NO: 318464 - DNA, 75 bp, synthetic construct
  source 1..75: mol_type = other DNA
gccaaaatgtataaagccggttatgcatttaaaaaactcaatggtctggtgtctgaattttccatgggtggggta

SEQ ID NO: 318465 - DNA, 75 bp, synthetic construct
  source 1..75: mol_type = other DNA
ataccgaagtggtcgataaagacggaaaaaaacagacgctgaagattggctatattggcgtcgtgccgccgcaaa

SEQ ID NO: 318466 - DNA, 75 bp, synthetic construct
  source 1..75: mol_type = other DNA
taactcctttatagcaactttctgccatcgcattgcaaatgatgaagctattacaattaatgatccttcagcagt

SEQ ID NO: 318467 - DNA, 75 bp, synthetic construct
  source 1..75: mol_type = other DNA
ggcaactgaaagcggatataaagctgttgcaccaatttattcaactactgttggtgaagttgcagaattaattta

SEQ ID NO: 318468 - DNA, 75 bp, synthetic construct
  source 1..75: mol_type = other DNA
ccatctaccgggcgattaaatcacgctatccacatctattactgcgtaatcagtcgattaatgatgccgagcttc

SEQ ID NO: 318469 - DNA, 75 bp, synthetic construct
  source 1..75: mol_type = other DNA
taatttgatatttaagggaaactttaatcataacggcaattttgttattgctgatgatattgtgccttcaaaggg

SEQ ID NO: 318470 - DNA, 75 bp, synthetic construct
  source 1..75: mol_type = other DNA
ttatatctcaggatactcatcttgttctgattatgagtgatacatctaatcggttcaatgtcgctgtaatgctcg

SEQ ID NO: 318471 - DNA, 75 bp, synthetic construct
  source 1..75: mol_type = other DNA
cacagaatactaggtgagatactgccgctgactgtcaagctggcagtatcctccacattttttataaatctaagg

SEQ ID NO: 318472 - DNA, 75 bp, synthetic construct
  source 1..75: mol_type = other DNA
gcccaggcatcaaacgtaaaagtaacagccagaatcactattcgataccgggaagatatccaggagaaagaccgt

SEQ ID NO: 318473 - DNA, 75 bp, synthetic construct
  source 1..75: mol_type = other DNA
atggatgtcaatgaacttagagagttacttatcaagtataatggccttcaaaatactgatgaagtctatacgttt

SEQ ID NO: 318474 - DNA, 75 bp, synthetic construct
  source 1..75: mol_type = other DNA
gcggaaatgggctatgtattttcggccttcgcatggctttatacgttatgccagatccccggcggttggttctta

SEQ ID NO: 318475 - DNA, 75 bp, synthetic construct
  source 1..75: mol_type = other DNA
cgggcgtggcctgagcggtgacgatcgcgcgcggtttgccgggaaaaaggtttatgagattgccatctcccaggc

SEQ ID NO: 318476 - DNA, 75 bp, synthetic construct
  source 1..75: mol_type = other DNA
cgcttatccagcgaagagattgccgctgccgattacgtcattctcgctaccgggcgtggcctgagcggtgacgat

SEQ ID NO: 318477 - DNA, 75 bp, synthetic construct
  source 1..75: mol_type = other DNA
acacggtatttctgcggcttctgaagcctttggcgtgtcctgccgcacgctttactggtggcgtcagttactgaa

SEQ ID NO: 318478 - DNA, 75 bp, synthetic construct
  source 1..75: mol_type = other DNA
tatcaaagcgcgatcaacaaggcccttcatgcaggccgaaagatttttttaactataaacgctgatggaagcgtt

SEQ ID NO: 318479 - DNA, 75 bp, synthetic construct
  source 1..75: mol_type = other DNA
gtgttccatcgtaaactgatcggtgtctatcttgggcaatttgcggtggcttctacactgtggtttttcttaacc

SEQ ID NO: 318480 - DNA, 75 bp, synthetic construct
  source 1..75: mol_type = other DNA
gcctctctgccacaaaatgttcggaagagtcgcagggcatcgttactgctggcgatgtcgccacgtaagcaagcc

SEQ ID NO: 318481 - DNA, 75 bp, synthetic construct
  source 1..75: mol_type = other DNA
cgttctgctggaatcacgattgataaccttgaggccaagtgcgcggcgctggcagcggagagtgtggggatgaag

SEQ ID NO: 318482 - DNA, 75 bp, synthetic construct
  source 1..75: mol_type = other DNA
atgaatcttttagttaaaagaaacgttgaagagtttttaagattgttgggaaatgatttttatttatttgataat

SEQ ID NO: 318483 - DNA, 75 bp, synthetic construct
  source 1..75: mol_type = other DNA
tgagcgtacgcagggagtgattgaacatatttttgtctacgataataaattgtgcttaagttgtttgttaaccaa

SEQ ID NO: 318484 - DNA, 75 bp, synthetic construct
  source 1..75: mol_type = other DNA
tgttgaatgcggagacttgatcaccagcactggcgctaaatatgaatcaggagatgatatttatgttgttatgag

SEQ ID NO: 318485 - DNA, 75 bp, synthetic construct
  source 1..75: mol_type = other DNA
gttgtcgtgcttattacggcgggatgtatcagaaacatacgacgcatcacttgcgtcacagagacttgctcaagg

SEQ ID NO: 318486 - DNA, 75 bp, synthetic construct
  source 1..75: mol_type = other DNA
ctttatggaagcgcggaatgtttcggagaacccgcagaacacttttgtaatgcacgttgacgacattatggcggc

SEQ ID NO: 318487 - DNA, 75 bp, synthetic construct
  source 1..75: mol_type = other DNA
atgcgcaatacactcatacccatcttcattgcgatatgcttgtttataaccggtgtcactattttgaacatccag

SEQ ID NO: 318488 - DNA, 75 bp, synthetic construct
  source 1..75: mol_type = other DNA
tggacgggtaaattccacagaatatcatttcagtattatctataaccaaccgccgctatttaatttcaccagact

SEQ ID NO: 318489 - DNA, 75 bp, synthetic construct
  source 1..75: mol_type = other DNA
gaccagcatatccgcggggcgctcaatgtgccgttgaagggggtgaaatatactttgcgcgtggggaatagcatt

SEQ ID NO: 318490 - DNA, 75 bp, synthetic construct
  source 1..75: mol_type = other DNA
gtcgggaagggacattgcggggagttgaggtgttagcccgctggaaacaacctcacggtggatatatatcacccg

SEQ ID NO: 318491 - DNA, 75 bp, synthetic construct
  source 1..75: mol_type = other DNA
caacgcctgaagagatcctgcgacgggcaataaataatggggagatcgtccctttttaccaacctgtggtaaatg

SEQ ID NO: 318492 - DNA, 75 bp, synthetic construct
  source 1..75: mol_type = other DNA
ctctggtattccgcaaaagcagagagcctggcgggggcgaagtacgccgccaacaacattaatcatattcttgag

SEQ ID NO: 318493 - DNA, 75 bp, synthetic construct
  source 1..75: mol_type = other DNA
ctgacttactacgttatcggaccggtgatgtccgacctcatgggcgggttgctgcacttcctgaacaccattcct

SEQ ID NO: 318494 - DNA, 75 bp, synthetic construct
  source 1..75: mol_type = other DNA
gctgccgaacattcctggtatggagttaaccgacaacctgatggcgtttgtcgaacgtaagctcttcaccctgaa

SEQ ID NO: 318495 - DNA, 75 bp, synthetic construct
  source 1..75: mol_type = other DNA
ggcgctggcacagatttccggtcttgatgccaacagcgaggttgtatccgaggcggtaaccgcttataaagcaat

SEQ ID NO: 318496 - DNA, 75 bp, synthetic construct
  source 1..75: mol_type = other DNA
ctggaatatggtctgccacataaaaacctgattgaaggtattgccgctgcaatgcacttccgcagtgaagatgat

SEQ ID NO: 318497 - DNA, 75 bp, synthetic construct
  source 1..75: mol_type = other DNA
ttcaggtaccagaatcccccgacgccccggaagcgctgccggggtgtcgttccatttctgatgatgacctgtgcg

SEQ ID NO: 318498 - DNA, 75 bp, synthetic construct
  source 1..75: mol_type = other DNA
gtagaaaccttcagcgaatggattgtcgataaaacccagttcaaaggcacactgccaaatattcctggtatggag

SEQ ID NO: 318499 - DNA, 75 bp, synthetic construct
  source 1..75: mol_type = other DNA
gaaaatccgcgcggtggtaaaaggtgcgatggaagaaagcggcgcggtactgatcaagcgttacggctttgacgc

SEQ ID NO: 318500 - DNA, 75 bp, synthetic construct
  source 1..75: mol_type = other DNA
aactaacgatccgctggaagtgacggtagaaactttcagcgaatggattgtcgataaaacgcagttcaaaggcgc

SEQ ID NO: 318501 - DNA, 75 bp, synthetic construct
  source 1..75: mol_type = other DNA
aagcagcagcaatgtcagcaatcgttagatcagctccaaagccaactcacacaggattaatggcgacaggtgttt

SEQ ID NO: 318502 - DNA, 75 bp, synthetic construct
  source 1..75: mol_type = other DNA
tccgattgatggcctgtccggtgaatatgcagagaaatcccttgaagaatgggcggaacggcttcgcaaaggagg

SEQ ID NO: 318503 - DNA, 75 bp, synthetic construct
  source 1..75: mol_type = other DNA
ggaacgtattgctccggcaatcgccaaagggctggtgaaacgtaaagaacaaggtaatgaatccccgctgaacat

SEQ ID NO: 318504 - DNA, 75 bp, synthetic construct
  source 1..75: mol_type = other DNA
ctaccgccgttggcccggttgtgctggaacgtattgctccggcaatcgccaaagggctggtgaaacgtaaagaac

SEQ ID NO: 318505 - DNA, 75 bp, synthetic construct
  source 1..75: mol_type = other DNA
gtcggtgaaaccgagcaggtagataccgtttccggcgtcaatgccgtcagcagcattggtgatgatgtcgttgat

SEQ ID NO: 318506 - DNA, 75 bp, synthetic construct
  source 1..75: mol_type = other DNA
tgcaacattctcatgacttgagcattatgcatatgaaaatcgtgcaagcgaacgccatcgatattttggaccgct

SEQ ID NO: 318507 - DNA, 75 bp, synthetic construct
  source 1..75: mol_type = other DNA
gattttcaccagtcagcaaaatatccgcagcgagatatcgagctggtgcggcatcttcatcagtgcggtatgtcc

SEQ ID NO: 318508 - DNA, 75 bp, synthetic construct
  source 1..75: mol_type = other DNA
ggcgtaccccgacgggaaattgccgaaaagtttgggatgaagttgggtgcagtgaataactacgtttatttcgac

SEQ ID NO: 318509 - DNA, 75 bp, synthetic construct
  source 1..75: mol_type = other DNA
atgaacgaaaacacaacactgaacgcactgatttgtcgtcacgcccgcaaggcgctgtcgggcgagcgaatggca

SEQ ID NO: 318510 - DNA, 75 bp, synthetic construct
  source 1..75: mol_type = other DNA
cgcctctgatcggtctgatggcggcaaccgggatcctgaaaggtatgctggctctggcgctcacttttcagtgga

SEQ ID NO: 318511 - DNA, 75 bp, synthetic construct
  source 1..75: mol_type = other DNA
atgcccggacgtgaaatcgccagaaaatttggaataccgctgcgcacggtgaataactacgtttatttcgacagg

SEQ ID NO: 318512 - DNA, 75 bp, synthetic construct
  source 1..75: mol_type = other DNA
cagagcgatattgagctggtgcgacagttgcatcagcgtggcgtgtccaggagagaaattgccagaaaattcgga

SEQ ID NO: 318513 - DNA, 75 bp, synthetic construct
  source 1..75: mol_type = other DNA
ctacggcacaataccaatcgccaaacataggtgcattaggagcgctggccggagccggtgcagctcaggggggtc

SEQ ID NO: 318514 - DNA, 75 bp, synthetic construct
  source 1..75: mol_type = other DNA
agtagcgtggtgcgtgaagcgcaggactggctgtgcgacagaaaacttgtggatatcacagatattctccggtga

SEQ ID NO: 318515 - DNA, 75 bp, synthetic construct
  source 1..75: mol_type = other DNA
atgccgatctggcctggattcgacagcaactggtcgatgccgcctggtttgtccgtgccacactggaagcgcatg

SEQ ID NO: 318516 - DNA, 75 bp, synthetic construct
  source 1..75: mol_type = other DNA
cgatctgacctggattcgccagcaactggtcgatgccgcctggtttgtccgtgccacactggaagcgcatgggat

SEQ ID NO: 318517 - DNA, 75 bp, synthetic construct
  source 1..75: mol_type = other DNA
tattgtttcttctcaggagattaaaaactgtcggaacgggtgctgaacgagcctgtgtcttacccggatggggga

SEQ ID NO: 318518 - DNA, 75 bp, synthetic construct
  source 1..75: mol_type = other DNA
attgtagaaattagcccagggcgcccaattacttttgtcgttcaaaaaggggcgacaatacctacaaacctgaca

SEQ ID NO: 318519 - DNA, 75 bp, synthetic construct
  source 1..75: mol_type = other DNA
caaccttctgcacaaactgccggttctggctgctgctttttggattctggttgctgttttcgcgtggcaagcggc

SEQ ID NO: 318520 - DNA, 75 bp, synthetic construct
  source 1..75: mol_type = other DNA
gcgcgagtgaaacctttatatgacgagttcaaggcaaaagatgcgcagtcagccaaaaaccttgagcaagtagaa

SEQ ID NO: 318521 - DNA, 75 bp, synthetic construct
  source 1..75: mol_type = other DNA
tgatgttgataaatctgcgttcaaagcgcgagtgaaacctttatatgacgagttcaaggcaaaagatgcgcagtc

SEQ ID NO: 318522 - DNA, 75 bp, synthetic construct
  source 1..75: mol_type = other DNA
atgagcagaaaatcgcagcgttccagagttgaggtgtttcgcaaggatttcattacccttgcccgggagtgtggc

SEQ ID NO: 318523 - DNA, 75 bp, synthetic construct
  source 1..75: mol_type = other DNA
ccttcagtaaggttgaaaaaaataatcccggtgttgcggcagtaatgcaactttcttatgttcttggactgagga

SEQ ID NO: 318524 - DNA, 75 bp, synthetic construct
  source 1..75: mol_type = other DNA
tgatggctgttgttgttcttggcctggctatgcttgaggataccaactggggttacgcattgctcgctatcccga

SEQ ID NO: 318525 - DNA, 75 bp, synthetic construct
  source 1..75: mol_type = other DNA
taatcacgaggatgtggaatggtcatctgttgctgcaggttttaagggattaattccttcgaaagtaaaatcccg

SEQ ID NO: 318526 - DNA, 75 bp, synthetic construct
  source 1..75: mol_type = other DNA
ccaggtgaaattttctcgtgtacgtggtgctgaagttaaagatatttcaagattcgataatatctattgtgatca

SEQ ID NO: 318527 - DNA, 75 bp, synthetic construct
  source 1..75: mol_type = other DNA
tggcgggactttgggcttttgtaatttgtttgggggcagcccatggcgcttcgcagcttgagtttcctttctggc

SEQ ID NO: 318528 - DNA, 75 bp, synthetic construct
  source 1..75: mol_type = other DNA
atgaaagcacttcgtcctctgacggcatcgcttatgctgttaaccagttgtttattaatatctaataccacactg

SEQ ID NO: 318529 - DNA, 75 bp, synthetic construct
  source 1..75: mol_type = other DNA
accccggtatgccagaagctgccaaccgggaacgcaatgcgaagatgattacgatcccagtatcattctggtcct

SEQ ID NO: 318530 - DNA, 75 bp, synthetic construct
  source 1..75: mol_type = other DNA
atgcgtaatattcagatggttctggagcgttggggagcatgggcggcgagtgatagttctggagtagactattcg

SEQ ID NO: 318531 - DNA, 75 bp, synthetic construct
  source 1..75: mol_type = other DNA
atgccgggatggaaaaaaaataccgttgccaccggaagaattccggaaggcatttacagaggtggaaaaaaagaa

SEQ ID NO: 318532 - DNA, 75 bp, synthetic construct
  source 1..75: mol_type = other DNA
aggaaatcacctcgcctgagccagatgctgaatataagcagatcgtcagctattggcgaggcggttgctgtagtc

SEQ ID NO: 318533 - DNA, 75 bp, synthetic construct
  source 1..75: mol_type = other DNA
ggcttcagcgggtataacgagctggagtccctgctgcgtgagcgggggtacgttatcagcaaatccgctatccat

SEQ ID NO: 318534 - DNA, 75 bp, synthetic construct
  source 1..75: mol_type = other DNA
gccttttactgatgtggaggggtgtgagccatttgaattaaccacaaatatccgcacagtcattcagccagagaa

SEQ ID NO: 318535 - DNA, 75 bp, synthetic construct
  source 1..75: mol_type = other DNA
ggcgcaaattccggatacgccaatctactgtactgccaacgccatcgactcaattaatggtcatcaccatcatcc

SEQ ID NO: 318536 - DNA, 75 bp, synthetic construct
  source 1..75: mol_type = other DNA
aagcgtggtcttcgaacgcctggcacagcatcactgacgcttaacgctgatcctaaaaataccagccacatcatg

SEQ ID NO: 318537 - DNA, 75 bp, synthetic construct
  source 1..75: mol_type = other DNA
aaaaaggggcttaaaacgcctgcggccgcaaccgtcgggcttaacgctgatccgacgaacgccagccacattatg

SEQ ID NO: 318538 - DNA, 75 bp, synthetic construct
  source 1..75: mol_type = other DNA
aaactaccaataccagcaagtctacatggacaatataactccatgttttttgataacattcaattatggttacca

SEQ ID NO: 318539 - DNA, 75 bp, synthetic construct
  source 1..75: mol_type = other DNA
aatgccaaatatttcgaagtgagattggtaaaaatgcgtttatagttacaaccgaatatattgacgaaattctaa

SEQ ID NO: 318540 - DNA, 75 bp, synthetic construct
  source 1..75: mol_type = other DNA
ccagactgaattgtttgagtccattgtccagttacaggaggcggaggacggcgagattgatccgcaggagcgtgt

SEQ ID NO: 318541 - DNA, 75 bp, synthetic construct
  source 1..75: mol_type = other DNA
gccgccctcaacgccgagaaaattgcccgcaaaggtggcctttcagccgatgcagtgctggcgttgcgccgtgaa

SEQ ID NO: 318542 - DNA, 75 bp, synthetic construct
  source 1..75: mol_type = other DNA
aatgtggccacgctgtcccgcgcctccgtcaacctgaagaagtttcagaccgaagtccgcaccagagcacagcag

SEQ ID NO: 318543 - DNA, 75 bp, synthetic construct
  source 1..75: mol_type = other DNA
agaacaaaaaacttaagagaaaacatgatagattcatgggcatattttagtgagcaattaaaaaacagattatta

SEQ ID NO: 318544 - DNA, 75 bp, synthetic construct
  source 1..75: mol_type = other DNA
tccgccgaaggtgcagcagctgctgcgcctgccccggcagaagagaagaaagaagcagctccggcagcagcacct

SEQ ID NO: 318545 - DNA, 75 bp, synthetic construct
  source 1..75: mol_type = other DNA
gtcaacttgaagttaaatacccatataatgcgcctacttatcagcctttgggacgttgggacggtatttttcact

SEQ ID NO: 318546 - DNA, 75 bp, synthetic construct
  source 1..75: mol_type = other DNA
ttgcgaagtgcgttctggtttcgcctgaagacgcaccatcaaaagcattagacatctgttggacgttcggttccg

SEQ ID NO: 318547 - DNA, 75 bp, synthetic construct
  source 1..75: mol_type = other DNA
ctgagtacggcctgacagagtcaggaggcgttgtcttattctccgcaccaaaacgtgggcgctcagtaagtcttt

SEQ ID NO: 318548 - DNA, 75 bp, synthetic construct
  source 1..75: mol_type = other DNA
acccacccgcattccgccaatgaaaggcgatgaatggcgcgagttctgttggtggctggaccacctcagaggtta

SEQ ID NO: 318549 - DNA, 75 bp, synthetic construct
  source 1..75: mol_type = other DNA
gttacattgaattgattaccgatgcgttgtcctgggcgatgacccactttgacgaactgggatataactgcaaaa

SEQ ID NO: 318550 - DNA, 75 bp, synthetic construct
  source 1..75: mol_type = other DNA
cgcgttcataccctgggggaccgccgttacattgaattgattaccgatgcgttgtcctgggcgatgacccacttt

SEQ ID NO: 318551 - DNA, 75 bp, synthetic construct
  source 1..75: mol_type = other DNA
gaacgtgggcgctcagtaagccttttgcctgaagcatcattatttgttttacgtaaaagcactattctccccaga

SEQ ID NO: 318552 - DNA, 75 bp, synthetic construct
  source 1..75: mol_type = other DNA
tcccaattcgtaagagtttcactgacgtattgagctacgccactgattcttttgcagtcgtagaaggccgtgttt

SEQ ID NO: 318553 - DNA, 75 bp, synthetic construct
  source 1..75: mol_type = other DNA
atgattattgatttagacgctctatttccaagtcgaaagacttttatagatctggtcagttattgtactgatccg

SEQ ID NO: 318554 - DNA, 75 bp, synthetic construct
  source 1..75: mol_type = other DNA
attaaatttgcctctgaagtgatgcttgcagagtgtgttctcgtgtcgccagatgaagctgcgtcaaaagcctta

SEQ ID NO: 318555 - DNA, 75 bp, synthetic construct
  source 1..75: mol_type = other DNA
ggaggcccaagttctactgcagatatagaactgatcaaagttgttggtgtgcatggaccagtacatgcaacttac

SEQ ID NO: 318556 - DNA, 75 bp, synthetic construct
  source 1..75: mol_type = other DNA
tgcctgaagcatcattatttgttttacgtaaaagcaccattctccccagagtggcgcagcttgcgcaaaaacttc

SEQ ID NO: 318557 - DNA, 75 bp, synthetic construct
  source 1..75: mol_type = other DNA
acccacacgcattccgccaatgaaaggcgacgaatggcacgagttctgttggtggctggaccacctcagaggcta

SEQ ID NO: 318558 - DNA, 75 bp, synthetic construct
  source 1..75: mol_type = other DNA
gcttggtcaggacctcagaaacatttaatgcaagcaatgtctgatgaacatgatgccctagccgattacataatc

SEQ ID NO: 318559 - DNA, 75 bp, synthetic construct
  source 1..75: mol_type = other DNA
taattgattcagtaaaaaatgaccttcgccccaaattagcatctataaaaacatactcagcagtggcttctttta

SEQ ID NO: 318560 - DNA, 75 bp, synthetic construct
  source 1..75: mol_type = other DNA
ttccaaattatgctgcatctattatgggaggcgctccatctggtggggtagggagtatgtccaggcttttaggaa

SEQ ID NO: 318561 - DNA, 75 bp, synthetic construct
  source 1..75: mol_type = other DNA
cgtctccaggggaattttgcccgctagtaccgtttgttgaaggcgataaactcagcccgcgtctggtgacgaata

SEQ ID NO: 318562 - DNA, 75 bp, synthetic construct
  source 1..75: mol_type = other DNA
ttctggttgatggtcgcttgatctacacagccaacgacctgaaagtaggtctgttccaggacacttctgcattct

SEQ ID NO: 318563 - DNA, 75 bp, synthetic construct
  source 1..75: mol_type = other DNA
atcctatacgaaagaagaccttcttgcctctggtcgcggagaactgtttggtgcgaaaggcccgcaattgccagc

SEQ ID NO: 318564 - DNA, 75 bp, synthetic construct
  source 1..75: mol_type = other DNA
agatacgggctaaaacgaccaaatggtattgaggcatattttgctaagaaacatcccaaagtatatgaagacttt

SEQ ID NO: 318565 - DNA, 75 bp, synthetic construct
  source 1..75: mol_type = other DNA
tgaggaggatgtgttagagaattttgcctctcttatctgccagcagaagaataccagaacagcaggggcatcatt

SEQ ID NO: 318566 - DNA, 75 bp, synthetic construct
  source 1..75: mol_type = other DNA
tgatccttctgagaaagaagacgaatctaatgaaatattgaatgtttccgaaatcatccttgaagaagaaacaca

SEQ ID NO: 318567 - DNA, 75 bp, synthetic construct
  source 1..75: mol_type = other DNA
tgtttagaacaattgataccgcgacacaatctcagatggcaaatatgaatactgtcatgtctgttatggggattg

SEQ ID NO: 318568 - DNA, 75 bp, synthetic construct
  source 1..75: mol_type = other DNA
ggagacggaagaaacacctgtttcatcaaatgaaaaggtagctaatgataatgaggaggatgtattagtgaattt

SEQ ID NO: 318569 - DNA, 75 bp, synthetic construct
  source 1..75: mol_type = other DNA
tgcggcagcgatttttgcgaattgtccggccctgaacaatgaccagttagatcagatcatcaactgggttcagca

SEQ ID NO: 318570 - DNA, 75 bp, synthetic construct
  source 1..75: mol_type = other DNA
aatattttctcgtcaacatacctcatggatagtcccacttgttatcggaattatcatctttattgttgcaccata

SEQ ID NO: 318571 - DNA, 75 bp, synthetic construct
  source 1..75: mol_type = other DNA
gaacttctcactacgctaagctccatcactaaaccagtatcagagtttgtttttgccggacgcaacgataagaag

SEQ ID NO: 318572 - DNA, 75 bp, synthetic construct
  source 1..75: mol_type = other DNA
taactctttctgtatttatggctgcattgatgctttgtgtagcagaacccgcatttgctgatgatgtatccacta

SEQ ID NO: 318573 - DNA, 75 bp, synthetic construct
  source 1..75: mol_type = other DNA
acagccagcgcattgcgatggaacaaaagctgaagcacagccaggcgctgggcaccacggaaagcatgcacctgc

SEQ ID NO: 318574 - DNA, 75 bp, synthetic construct
  source 1..75: mol_type = other DNA
tcgccatatattaaccaacagcgtttaaatacactaaatcctccggaaaatttacgtatagcaatagaaaaattt

SEQ ID NO: 318575 - DNA, 75 bp, synthetic construct
  source 1..75: mol_type = other DNA
atatagcgtactagacaatggtgatttatcacattgcttggctttaataactatatcagatagtacctcatggga

SEQ ID NO: 318576 - DNA, 75 bp, synthetic construct
  source 1..75: mol_type = other DNA
acatagacaatatgcctctgcgtgaagaacctgactgcattattaacgagctgaatttgtattcaaaaaaattaa

SEQ ID NO: 318577 - DNA, 75 bp, synthetic construct
  source 1..75: mol_type = other DNA
cccaggttctggtcagtgccctgacccacgacgaggcaaaaaataaaacgttcgagctggtggctgaacgaggtg

SEQ ID NO: 318578 - DNA, 75 bp, synthetic construct
  source 1..75: mol_type = other DNA
gaatcgtcatgcttcagggggacagacgccatgcgggaacgccggaagatggtgttatctcccgggagcaaatcg

SEQ ID NO: 318579 - DNA, 75 bp, synthetic construct
  source 1..75: mol_type = other DNA
aattgaacatgtggaaattaaaccactcgaagtacactgcccatcgatagctaggctgtgcaaattagtctcata

SEQ ID NO: 318580 - DNA, 75 bp, synthetic construct
  source 1..75: mol_type = other DNA
atacctgcccaacttacacagaatccaccaatgaaaataacaataatgaagttaatggattagtacaagagttca

SEQ ID NO: 318581 - DNA, 75 bp, synthetic construct
  source 1..75: mol_type = other DNA
ggctgctgaacaaggtgcgtcatacaaaatcaccagcgcccgggttgaaaacagggtttatatgacagcagaatt

SEQ ID NO: 318582 - DNA, 75 bp, synthetic construct
  source 1..75: mol_type = other DNA
atgaattatcagaacgacgatttacgtatcaaagaaatcaaagagttacttccacctgtcgcattgctggaaaaa

SEQ ID NO: 318583 - DNA, 75 bp, synthetic construct
  source 1..75: mol_type = other DNA
taaggtcaagcgataccgctcttacagaggagaagtagggcaaaccgcccctaatgttctccaaagagatttcaa

SEQ ID NO: 318584 - DNA, 75 bp, synthetic construct
  source 1..75: mol_type = other DNA
atgttcgctaattttggcagcaaggtaaccattttagaagcagcttcgctgtttttgcctcgggaagaacgggat

SEQ ID NO: 318585 - DNA, 75 bp, synthetic construct
  source 1..75: mol_type = other DNA
gcaccttttactatcacctgaaagcgcttaaatcttcggataaatatgaagagattaaaagcagaatcatagaga

SEQ ID NO: 318586 - DNA, 75 bp, synthetic construct
  source 1..75: mol_type = other DNA
tttatcgctttattgtggcggctgcggggtatgtcgtgttctttttattgaggaatagtgtcggatgcttggcgt

SEQ ID NO: 318587 - DNA, 75 bp, synthetic construct
  source 1..75: mol_type = other DNA
gtgccgatgatgatgggcgcaacggcgcttgatctctacaaaagctggggcttcctgacaaccggcgatatcccg

SEQ ID NO: 318588 - DNA, 75 bp, synthetic construct
  source 1..75: mol_type = other DNA
gctgtggccgggtttctcccgttccggggccaccatttcaggtgggatgctgatgggcgtgagccgttacgctgc

SEQ ID NO: 318589 - DNA, 75 bp, synthetic construct
  source 1..75: mol_type = other DNA
acgacagcggtctgccagcggcgggtgaatttctcgatatgatcaccccgcagtatctcgctgacctgatgagct

SEQ ID NO: 318590 - DNA, 75 bp, synthetic construct
  source 1..75: mol_type = other DNA
caatatctcgctgacctgatgagctggggcgcaattggcgcacgtaccaccgaatcgcaggtgcaccgcgaactg

SEQ ID NO: 318591 - DNA, 75 bp, synthetic construct
  source 1..75: mol_type = other DNA
acgatccgcatatggataatagcttccagatcaacgacggtctgcgtatagcccgtaaattgctgcttgatatta

SEQ ID NO: 318592 - DNA, 75 bp, synthetic construct
  source 1..75: mol_type = other DNA
ggttgatttggcgtatcgctttatgcgaaaggcgatgaaattgttcggggcgactctgcgggcctgcatctcgga

SEQ ID NO: 318593 - DNA, 75 bp, synthetic construct
  source 1..75: mol_type = other DNA
ggttgatttggcgtatcgctttatgcgaaaggcgatgaaattgttcggggcgcactctgcgggcctgcatctcgg

SEQ ID NO: 318594 - DNA, 75 bp, synthetic construct
  source 1..75: mol_type = other DNA
atttggaagtgctaaagtattcaccaattatctggtcggtgaaatagtcgccgattttctagatgataacgaaaa

SEQ ID NO: 318595 - DNA, 75 bp, synthetic construct
  source 1..75: mol_type = other DNA
aaaaaaaacaaaaagaacatttgatggccaagcgtaaggagtacattcgcgttcggctagaatcttgtaaaacaa

SEQ ID NO: 318596 - DNA, 75 bp, synthetic construct
  source 1..75: mol_type = other DNA
acaacactggtgtttaatgccaatggcgttctgacctcaaatccaacagcgaatatttccactggcgcaattaac

SEQ ID NO: 318597 - DNA, 75 bp, synthetic construct
  source 1..75: mol_type = other DNA
tgctcatgatatgagtatctactttgtgaagaccggggataataactgggatgtttacactcaggatagcagcga

SEQ ID NO: 318598 - DNA, 75 bp, synthetic construct
  source 1..75: mol_type = other DNA
gcccagcgtaactatcagtccaacgcccagactatcaaaacccaggaccagatcctcaacacgctggttaactta

SEQ ID NO: 318599 - DNA, 75 bp, synthetic construct
  source 1..75: mol_type = other DNA
ggtctggcatccgaaggcgacaacgtctggtctgcgacgcaatcttctggcgtggcgctgttggggacagccggg

SEQ ID NO: 318600 - DNA, 75 bp, synthetic construct
  source 1..75: mol_type = other DNA
gacaacactggaatttaatgctaatggcacattagtggatggtgcgatggcgaataatatcgcaaccggcgcaat

SEQ ID NO: 318601 - DNA, 75 bp, synthetic construct
  source 1..75: mol_type = other DNA
aacggttcttacaatgtagcgattagcgccagtaacggtggtacacaactggttgcccagccgctgcagtttgct

SEQ ID NO: 318602 - DNA, 75 bp, synthetic construct
  source 1..75: mol_type = other DNA
gtgcccgtcgatcgtcgttggaattatcagaaacctgatcaacgtcgaatcaaaatagcactgccatatgtcgta

SEQ ID NO: 318603 - DNA, 75 bp, synthetic construct
  source 1..75: mol_type = other DNA
agtttagttttatccgtcctgaagtgagtggggtgacgggatggctattttcgcaacttgaactgtttgatctgc

SEQ ID NO: 318604 - DNA, 75 bp, synthetic construct
  source 1..75: mol_type = other DNA
acctatgatgccaatcgaattgtgaaatgcggcttctatgacgaatacaacttttatggcggtactcaccgaact

SEQ ID NO: 318605 - DNA, 75 bp, synthetic construct
  source 1..75: mol_type = other DNA
cgccggtaacctcaatggtcagaaagccacggtgaaaggcgatataaccagcgaagacggctggcttatcaccag

SEQ ID NO: 318606 - DNA, 75 bp, synthetic construct
  source 1..75: mol_type = other DNA
ggtgggcttggcgcgataacaacagggaaagatagtcaggggaaactcccgcccgccgtttactggctgacatag

SEQ ID NO: 318607 - DNA, 75 bp, synthetic construct
  source 1..75: mol_type = other DNA
ggggagatggattcactcgtgcgtgatgccggatttgataaatgcacacaacggattgatgagtggggtatttta

SEQ ID NO: 318608 - DNA, 75 bp, synthetic construct
  source 1..75: mol_type = other DNA
gtgttctacagccgtaacggacaatttaagctggatgaaaaccgtaacctggtgaatatgcaaggtttacagctg

SEQ ID NO: 318609 - DNA, 75 bp, synthetic construct
  source 1..75: mol_type = other DNA
cactcggcaaagccggtgaatcccaggataacgcccgtgccgctttacgtatgttgattgaaaatggttatccgt

SEQ ID NO: 318610 - DNA, 75 bp, synthetic construct
  source 1..75: mol_type = other DNA
gggccgctggtcgttaatcatggaaatcgatgaaggttttgcggtcggcatgtcgccagccgaactcagtgccga

SEQ ID NO: 318611 - DNA, 75 bp, synthetic construct
  source 1..75: mol_type = other DNA
ggcgaaccacaggatggaggctggatcggatggatgatcaaacctttgggtcgctggtcgttaatcatggaaatc

SEQ ID NO: 318612 - DNA, 75 bp, synthetic construct
  source 1..75: mol_type = other DNA
atgatatacacgatcttttcgacgcaaacatgattgccattcatccggtgacgttggaggttaacattctcgctg

SEQ ID NO: 318613 - DNA, 75 bp, synthetic construct
  source 1..75: mol_type = other DNA
atgcatttatccgatgcttgtccgatatgtggtgatacggaattatatcgctattattttctggtaaaaacgcaa

SEQ ID NO: 318614 - DNA, 75 bp, synthetic construct
  source 1..75: mol_type = other DNA
gcgttcactgcattaggtgttcttggcaacgatgacaccgcccgcaaactgacgccattaatccgcgcctggcct

SEQ ID NO: 318615 - DNA, 75 bp, synthetic construct
  source 1..75: mol_type = other DNA
agcgaaggataattctttgcaaccttcccaaacggtaacggactctctcaaggtagcggacttatccaccattat

SEQ ID NO: 318616 - DNA, 75 bp, synthetic construct
  source 1..75: mol_type = other DNA
tcatatcactcaaataatgatgcgataagcataaagtatatttattacttcctaaaaataaatgaaggatatttc

SEQ ID NO: 318617 - DNA, 75 bp, synthetic construct
  source 1..75: mol_type = other DNA
gtctcccgcgtgaaatcgagttgcgccagaaacaatacgaatactaccgtgatttactgttcagtttcccgaaac

SEQ ID NO: 318618 - DNA, 75 bp, synthetic construct
  source 1..75: mol_type = other DNA
ctgttaccaccgttccgccagcttgatcgtaacagttacgcgctgacagaagccgagcgcaacgccagcgaactg

SEQ ID NO: 318619 - DNA, 75 bp, synthetic construct
  source 1..75: mol_type = other DNA
tatcaccgacggatgctgccgccttcgggcagctttttgccgactacgaactgttaccaccgttccgccagcttg

SEQ ID NO: 318620 - DNA, 75 bp, synthetic construct
  source 1..75: mol_type = other DNA
ctactgatgtaataatacaccttcaacagattgatattaaatgggattatgcgaataatgtcattattattctac

SEQ ID NO: 318621 - DNA, 75 bp, synthetic construct
  source 1..75: mol_type = other DNA
tgagtttgtccgttttgctgccagcgacagccaggtcgggctggaagaggtggtagtgatcgcgcagagcgtcgg

SEQ ID NO: 318622 - DNA, 75 bp, synthetic construct
  source 1..75: mol_type = other DNA
ctgaacagtgttggctggcgcggtattcgccagcgcaaaacccatttacaaatgctgattaaacaagccgttgcc

SEQ ID NO: 318623 - DNA, 75 bp, synthetic construct
  source 1..75: mol_type = other DNA
atgggatgcccgagggcatggacaaacttcggggcccgtggttatagcccatctcttgcgcgttcagtgcgggat

SEQ ID NO: 318624 - DNA, 75 bp, synthetic construct
  source 1..75: mol_type = other DNA
agcgatgcggcggcgattacgctccccacgcaacttctgatatcaggcgatgactatgtggtgcatcgccaaccg

SEQ ID NO: 318625 - DNA, 75 bp, synthetic construct
  source 1..75: mol_type = other DNA
ctacaccgggcagccgtggcacccacaactggagctgattgccggggtgttaaccagtcataaagatggtaaacc

SEQ ID NO: 318626 - DNA, 75 bp, synthetic construct
  source 1..75: mol_type = other DNA
tcagcggatcgctggcggctcctttcaggtggacccgtgccattatcgccggttgatttggcgtatcgctttatg

SEQ ID NO: 318627 - DNA, 75 bp, synthetic construct
  source 1..75: mol_type = other DNA
aaaagcaattgatcgagcgggaattgctgccgctctcgcgaatggtggatcaattcggagcgtagcaaaagattt

SEQ ID NO: 318628 - DNA, 75 bp, synthetic construct
  source 1..75: mol_type = other DNA
gccagttggttgaaggtacgcagcggattttctttgcccaacttgccgatccgaatacgcagcagttctacgcgg

SEQ ID NO: 318629 - DNA, 75 bp, synthetic construct
  source 1..75: mol_type = other DNA
attaggctacctggtggagaaaacatctgcgggcgcggcagcgtcggtggaatcgctgaaaaacgtcagcgacta

SEQ ID NO: 318630 - DNA, 75 bp, synthetic construct
  source 1..75: mol_type = other DNA
ggtggttgatgaggatatttgtatcggctgtcgctactgccatatggcctgcccctacggcgcgccacagtacaa

SEQ ID NO: 318631 - DNA, 75 bp, synthetic construct
  source 1..75: mol_type = other DNA
ccgcgcgcgcatttcacaaaacccaatatcgttatcaaacctaacgccaacagccgcccgaccggcgataccact

SEQ ID NO: 318632 - DNA, 75 bp, synthetic construct
  source 1..75: mol_type = other DNA
gggaatatgatgctcacagtgcttgcagcagtggcacaaatggaacgtgaaatgatgcttgagcggcaacgtgag

SEQ ID NO: 318633 - DNA, 75 bp, synthetic construct
  source 1..75: mol_type = other DNA
gctgccaggcttttatcacgacacgttgggtgaagagaacagggcgcaggcatttgaaaaaatgcaaagctttat

SEQ ID NO: 318634 - DNA, 75 bp, synthetic construct
  source 1..75: mol_type = other DNA
acatgacggtgcgcctgcgccggaaggttgtgcgcgagtacggtattaaatcgctggtggaagcgccagtcacct

SEQ ID NO: 318635 - DNA, 75 bp, synthetic construct
  source 1..75: mol_type = other DNA
ggctgtctcttggcgattacacaggtctgactcccttccctgaacttattaatcagcaatgggtccgccgctacg

SEQ ID NO: 318636 - DNA, 75 bp, synthetic construct
  source 1..75: mol_type = other DNA
actggcccatttcggcattggcgctcagcgttttgttctacaagatggcgtctgggccattcgcaggagccgaag

SEQ ID NO: 318637 - DNA, 75 bp, synthetic construct
  source 1..75: mol_type = other DNA
cagaggccgaggcgctgcgtctgtacctagaggaacttagggcggcgcaggacggggagaacggccccgccagcg

SEQ ID NO: 318638 - DNA, 75 bp, synthetic construct
  source 1..75: mol_type = other DNA
atgcagcagcgaatagagggagcgtgggggcagcaggatgaaacgtgttgtgatgccggtacgctggtattgtgc

SEQ ID NO: 318639 - DNA, 75 bp, synthetic construct
  source 1..75: mol_type = other DNA
cggcttgccagctgggatggttcgcccgcgctggcagaaagatcagccgccactgctgcccattgaaacgaactg

SEQ ID NO: 318640 - DNA, 75 bp, synthetic construct
  source 1..75: mol_type = other DNA
tacggcagtgaaccaacctgtttcgttagtcgccggaaatttccttttctaagctgcctgtacggcagtgaacgc

SEQ ID NO: 318641 - DNA, 75 bp, synthetic construct
  source 1..75: mol_type = other DNA
gatctccacgccaaaggtttagccgtccgcgtggttgacattgccgcagggcatggcgctatgtactggatgcac

SEQ ID NO: 318642 - DNA, 75 bp, synthetic construct
  source 1..75: mol_type = other DNA
ccatcagcggatcgatggcggctcctttctggtggacccgtgccattatcgccggttgatttggcgtatcgcttt

SEQ ID NO: 318643 - DNA, 75 bp, synthetic construct
  source 1..75: mol_type = other DNA
ttgtatcatttgggggttaggtatttcacttgctgtttaccttacggcaggcatttctggcgcccatctgaaccc

SEQ ID NO: 318644 - DNA, 75 bp, synthetic construct
  source 1..75: mol_type = other DNA
tgctgccattttgtgtggcgcaattagcgggtgcctttggtggtgcggttctggcatattctctctacagcagtt

SEQ ID NO: 318645 - DNA, 75 bp, synthetic construct
  source 1..75: mol_type = other DNA
ctggcatattttttatacagcaatttgtttgccgattttgaatctgctcacaatatggttcgtggtagtgcagaa

SEQ ID NO: 318646 - DNA, 75 bp, synthetic construct
  source 1..75: mol_type = other DNA
tgcgaagagaaagtggtggccctgacgctggacgacaaacgccgcgagcaacaagaaagcgccacggcgaaagcg

SEQ ID NO: 318647 - DNA, 75 bp, synthetic construct
  source 1..75: mol_type = other DNA
cccatcatcggcggtcttgaaattcaggatattgagccgatgcaactactggaagtaatccgcagatttgaagat

SEQ ID NO: 318648 - DNA, 75 bp, synthetic construct
  source 1..75: mol_type = other DNA
tttacaaccatgctcagtatctcgataagcgcagggagatgatgcagtggtgggcggactggcttgatgagaagg

SEQ ID NO: 318649 - DNA, 75 bp, synthetic construct
  source 1..75: mol_type = other DNA
gccaacggcggatctgtgcgcgggatttacaaccatgctcagtatctcgataagcgcagagaaatgatgcagtgg

SEQ ID NO: 318650 - DNA, 75 bp, synthetic construct
  source 1..75: mol_type = other DNA
cgggttacgtggtttgccggactgccacgctgaacgggtgggagcatgtgcctgatcaccgcggcgagacggtat

SEQ ID NO: 318651 - DNA, 75 bp, synthetic construct
  source 1..75: mol_type = other DNA
gatgctcctggctcatacaaaactggttatgcaatctgccgttctgcagattttaactcatgggaatatgtgcca

SEQ ID NO: 318652 - DNA, 75 bp, synthetic construct
  source 1..75: mol_type = other DNA
cggtgaatgaataccacgtcggcgcctggcttcagaacgtcagccacaaagacgggaaggtgacgggcgacatgt

SEQ ID NO: 318653 - DNA, 75 bp, synthetic construct
  source 1..75: mol_type = other DNA
atgacacaggtaaaattaaacagtgaatttattgccacggaacccggcttcattaccgtttataactacaacgga

SEQ ID NO: 318654 - DNA, 75 bp, synthetic construct
  source 1..75: mol_type = other DNA
gattgatgctgcaatggcttccattagtctgattcagctgaaattacaggccggacggaaactgacgcaggcaga

SEQ ID NO: 318655 - DNA, 75 bp, synthetic construct
  source 1..75: mol_type = other DNA
cgcaagctgtatttgtctccagtaatagatctcttcaacaacgaagttatttcttacagcctttcggaaagacca

SEQ ID NO: 318656 - DNA, 75 bp, synthetic construct
  source 1..75: mol_type = other DNA
aaagttttacgctacacagccctaagaacgaaagagcttcgttccatgcaatggaagaacgtcgattttgaaaac

SEQ ID NO: 318657 - DNA, 75 bp, synthetic construct
  source 1..75: mol_type = other DNA
tacctttatgtccctgtatccgggaaaaaggtatggcagcttcgctacaagattgacggtaaggagaaaatcctg

SEQ ID NO: 318658 - DNA, 75 bp, synthetic construct
  source 1..75: mol_type = other DNA
ggaagtaatccgcagatttgaagatcgcggggcaatggagcgagccaacaaagcacgcagaagatgcggcgaggt

SEQ ID NO: 318659 - DNA, 75 bp, synthetic construct
  source 1..75: mol_type = other DNA
attggtatgattatgtaattaacaaattgacgatgttaacggggctcacgaaaaaagatgtacttgattttatcg

SEQ ID NO: 318660 - DNA, 75 bp, synthetic construct
  source 1..75: mol_type = other DNA
gaagctgatacgcattgagatacagatggcagaagggtttattgatggctgcctttcaatgcttgatattaaact

SEQ ID NO: 318661 - DNA, 75 bp, synthetic construct
  source 1..75: mol_type = other DNA
ttgcaaagaagcggaaatgttcagacggaacagtacgaaaagatatgcaaacagctatggggtttattgatggct

SEQ ID NO: 318662 - DNA, 75 bp, synthetic construct
  source 1..75: mol_type = other DNA
agcgttggggggcatgggcggcgagtgatagttctggggtagactattcgcctatagctgctgggtttaaagggc

SEQ ID NO: 318663 - DNA, 75 bp, synthetic construct
  source 1..75: mol_type = other DNA
gagcaattaacaaagcgcggcgtgtctgtgcatttccataaagaagactttaagacaggaaagaactctcccgca

SEQ ID NO: 318664 - DNA, 75 bp, synthetic construct
  source 1..75: mol_type = other DNA
gcaagaaagtgccacggcgaaagcgcagaaagcggcggatgacatcgccgttcagtgctggctgcggcataagtt

SEQ ID NO: 318665 - DNA, 75 bp, synthetic construct
  source 1..75: mol_type = other DNA
taaaggcacgctgggcgtggactacaagccaggaaactggacgttcaatctgaacagcgatttccagtccagcca

SEQ ID NO: 318666 - DNA, 75 bp, synthetic construct
  source 1..75: mol_type = other DNA
gaaactggacaattatgtggtcgacggctcaggtttttacgcgggtaaactggttctcaaaaacgatcggctgtt

SEQ ID NO: 318667 - DNA, 75 bp, synthetic construct
  source 1..75: mol_type = other DNA
tattgatgctctaaatcaatatcaaggtcatattcttgttatggattgtcatggaaaccatgatggcaatgggag

SEQ ID NO: 318668 - DNA, 75 bp, synthetic construct
  source 1..75: mol_type = other DNA
atagaaaattattcataaccgaaactatgtgctatagccaaattggatttccagatgcaatcacaattagtctta

SEQ ID NO: 318669 - DNA, 75 bp, synthetic construct
  source 1..75: mol_type = other DNA
ttgccagaacaagaaagaagagcgaaaaggcaatacgaattgagatacagattgctgaaggatttattgacggat

SEQ ID NO: 318670 - DNA, 75 bp, synthetic construct
  source 1..75: mol_type = other DNA
attatgatagacggttgtgttgctcgtttgcggaaatataaaccagaagaatatgagttggttattgctcacttt

SEQ ID NO: 318671 - DNA, 75 bp, synthetic construct
  source 1..75: mol_type = other DNA
tcgcgaagaaacgcaggtgctcagatggaactataagaaaggagctgcaaactgcattaggctttattgatggat

SEQ ID NO: 318672 - DNA, 75 bp, synthetic construct
  source 1..75: mol_type = other DNA
gaaatactatccaggacagccagggcaggtatttgatgattattacggcggtaaaatctggtgtgcgacagtact

SEQ ID NO: 318673 - DNA, 75 bp, synthetic construct
  source 1..75: mol_type = other DNA
ctcacggtggcggagcttgaagatcggttagcaccggatctcggtctggatgataacggttcgctgctgctggat

SEQ ID NO: 318674 - DNA, 75 bp, synthetic construct
  source 1..75: mol_type = other DNA
aaaaatcacataaattctgggcggtggagcagcagggaaacgagctgcatatcagttggggcaaagtcagtacca

SEQ ID NO: 318675 - DNA, 75 bp, synthetic construct
  source 1..75: mol_type = other DNA
ccatctatcggagaaaaagtctcaggaggccttaccttcccgacgttttcctggggatgctgtaagcgaaccaca

SEQ ID NO: 318676 - DNA, 75 bp, synthetic construct
  source 1..75: mol_type = other DNA
ggttagcaccggatctcggtctggatgataacggttcgttgctgctggattttggcccacgccagttcaccgtca

SEQ ID NO: 318677 - DNA, 75 bp, synthetic construct
  source 1..75: mol_type = other DNA
cgccttcaacaaactcaaaaccctacgacaagacgcccgtagctggctgctgaaatacccggaacacgccattac

SEQ ID NO: 318678 - DNA, 75 bp, synthetic construct
  source 1..75: mol_type = other DNA
ctggaaccagccactagttgcgttattgttgccagaaaaaccagaagtagctcatgaaattgccagacgtctttg

SEQ ID NO: 318679 - DNA, 75 bp, synthetic construct
  source 1..75: mol_type = other DNA
gggctccctgaaaaaggtcatctcagcgttgtatggggacctgataataaagacagatgttcatttacatatcat

SEQ ID NO: 318680 - DNA, 75 bp, synthetic construct
  source 1..75: mol_type = other DNA
tgccaataccgattcatcgacggctgctatcggacatcttcatcaggcagaaaatgtgattgtcagtcgcagcat

SEQ ID NO: 318681 - DNA, 75 bp, synthetic construct
  source 1..75: mol_type = other DNA
cgccctgatgcagcttaacggcatcgcccagaaactgaaattcaaagccttacaggagcgggcgaaagaaaaaat

SEQ ID NO: 318682 - DNA, 75 bp, synthetic construct
  source 1..75: mol_type = other DNA
agcgagtgagctggcacccgctgtcgctcgcgccttcaacaaactcaaaaccctacgacaagacgcccgtacctg

SEQ ID NO: 318683 - DNA, 75 bp, synthetic construct
  source 1..75: mol_type = other DNA
gatgctgttgtagaactctggcagaggggagattattctgcgctaatcagcgaatttaaaaccttctggcactcc

SEQ ID NO: 318684 - DNA, 75 bp, synthetic construct
  source 1..75: mol_type = other DNA
ctctggacgcgcccggtattaaaagcaaacgcccaatcactgccagataacgccctcctccacctcggtgaaatg

SEQ ID NO: 318685 - DNA, 75 bp, synthetic construct
  source 1..75: mol_type = other DNA
ggattttatatggtcagaggaaaaacagtccaaactgattgagtcatgcttgatgcggattcctctgcctgtttt

SEQ ID NO: 318686 - DNA, 75 bp, synthetic construct
  source 1..75: mol_type = other DNA
cgccctggcaaagactggtcacggttgccgactatgcgccgccgttaagtccgcttatccaccagcttaagtttt

SEQ ID NO: 318687 - DNA, 75 bp, synthetic construct
  source 1..75: mol_type = other DNA
ggctatgccgaatgccgctggcgttaggtcattgggggatttgttcggtctgctcacgcgccgcccgtacagata

SEQ ID NO: 318688 - DNA, 75 bp, synthetic construct
  source 1..75: mol_type = other DNA
atggcgcatatacaactggtcaagcaaacatcttctggtttacttctcccggcaacgccggagagttgcgatttt

SEQ ID NO: 318689 - DNA, 75 bp, synthetic construct
  source 1..75: mol_type = other DNA
tggatcctgtaccgaaaattttcctctccggaacaggtcgaaaatgtggccgcgcagctactggagtttgcgtaa

SEQ ID NO: 318690 - DNA, 75 bp, synthetic construct
  source 1..75: mol_type = other DNA
ggcgacgccggagagttgcgattttttgcatcaaatcaaaataggtgagtggatacacgcagactttaagcgtgt

SEQ ID NO: 318691 - DNA, 75 bp, synthetic construct
  source 1..75: mol_type = other DNA
tccccgggccaacagtaccaccatggtgaccttcacaacaaaaacggggaaagccatgttgtttgatgtgaagat

SEQ ID NO: 318692 - DNA, 75 bp, synthetic construct
  source 1..75: mol_type = other DNA
ttgttccgtatgtcacaccttacgaaaagaattatatcagtatcgacccgacagcgctggctgcggatgtggaac

SEQ ID NO: 318693 - DNA, 75 bp, synthetic construct
  source 1..75: mol_type = other DNA
tccgtttggtgtgacggccagtaatgaccttggtgacacatttaccgttattcatgctgatggtgccggtggggc

SEQ ID NO: 318694 - DNA, 75 bp, synthetic construct
  source 1..75: mol_type = other DNA
atgatgtcgttaccaccggaagtaccgtcgcagagattgcgcagttgcttttacgcaatggtgcggcgactgtcc

SEQ ID NO: 318695 - DNA, 75 bp, synthetic construct
  source 1..75: mol_type = other DNA
gggaggccggttatttgtacgtgacctggatgctgaaaaagggatgctcaggatagtctggggaagcgggcagaa

SEQ ID NO: 318696 - DNA, 75 bp, synthetic construct
  source 1..75: mol_type = other DNA
tgacagttgtgtcattcactatagtgcgtccggagaaaatgccaggggaaatgctgttccggaaaaccatcatgt

SEQ ID NO: 318697 - DNA, 75 bp, synthetic construct
  source 1..75: mol_type = other DNA
ttaaagcttgatgatgctgttgttcttcaggtgaaatatgagtgcttttctggttacgattctgtaagtactttt

SEQ ID NO: 318698 - DNA, 75 bp, synthetic construct
  source 1..75: mol_type = other DNA
tttcacctaagattaacttatgtaacagtgtggacgtattgaccaattcattcgggacagttattagtggtagac

SEQ ID NO: 318699 - DNA, 75 bp, synthetic construct
  source 1..75: mol_type = other DNA
atgctgcgcttgccggtgtcaatgaagtcattctccgtgatatggggatcagcgccgtcattacgtccggagaac

SEQ ID NO: 318700 - DNA, 75 bp, synthetic construct
  source 1..75: mol_type = other DNA
acgaggccatgtcgcgagctgatagcgctatccgtggtgtgatgggcacagaggcaaaggtgatgtcaggcgctt

SEQ ID NO: 318701 - DNA, 75 bp, synthetic construct
  source 1..75: mol_type = other DNA
gagtcccgcgctggcattggcctgtctgtaatcgtggttcctactaatacccttaagcgtcagattctccgccag

SEQ ID NO: 318702 - DNA, 75 bp, synthetic construct
  source 1..75: mol_type = other DNA
tctcggtgagtacggcggcgtccagttcgctttttcacgaatggagagccgttatcagcagtcgggtatttttca

SEQ ID NO: 318703 - DNA, 75 bp, synthetic construct
  source 1..75: mol_type = other DNA
gcaccggctgcgtggcggcgaaattgtcgctctggacgatcagtacacttttttgcaacgtatcccgcgcagcca

SEQ ID NO: 318704 - DNA, 75 bp, synthetic construct
  source 1..75: mol_type = other DNA
tcactcgatctgccgaaaccggaacagggaccggaaaccattaatcaggttaccgagcataagatgtctgccgag

SEQ ID NO: 318705 - DNA, 75 bp, synthetic construct
  source 1..75: mol_type = other DNA
gtgacattcgtggctgtaccaccggcgttcacctgcagtttgcctttctggttaacggtggtgaaatccgccaga

SEQ ID NO: 318706 - DNA, 75 bp, synthetic construct
  source 1..75: mol_type = other DNA
cgactattgcattgactgaactgggtgatgaagttcgcggggcaaatatcgatcagttgattcaccgctattcga

SEQ ID NO: 318707 - DNA, 75 bp, synthetic construct
  source 1..75: mol_type = other DNA
atcatctggaaggtatgtcgatccttcgttatacgtaccgctcactggcaaaggcggcagaaatgcgtgaaggaa

SEQ ID NO: 318708 - DNA, 75 bp, synthetic construct
  source 1..75: mol_type = other DNA
aaaatctggtaaaaagtcacgtaagcaaggctttaagtggcgaaaaaatgaaaaaagggcactgttgcaaagtta

SEQ ID NO: 318709 - DNA, 75 bp, synthetic construct
  source 1..75: mol_type = other DNA
cgcagggaagcctgtgaaaatcacgatgtggcacaaggctatttttcggtgagtctgcggaaattactggaaacc

SEQ ID NO: 318710 - DNA, 75 bp, synthetic construct
  source 1..75: mol_type = other DNA
gcacgccgtgccggaatcgacaaccgggcagaatgcttttctcaaagcctgccgcgagttcctgatttgtgatga

SEQ ID NO: 318711 - DNA, 75 bp, synthetic construct
  source 1..75: mol_type = other DNA
taaccagccggaagtaaccgatgcggtgaacgctctacttgcgctcgatcccttagataatcacccgacaaaaat

SEQ ID NO: 318712 - DNA, 75 bp, synthetic construct
  source 1..75: mol_type = other DNA
aacttctggcacaaaaagatcaaaagcgttggcgcatgatgctaatgacaatgcttatctcacaaccaacattag

SEQ ID NO: 318713 - DNA, 75 bp, synthetic construct
  source 1..75: mol_type = other DNA
aaaaatcacataaattctgggcggtggagcagcagggaaacgagctgcatataacttggggtaaagtcggcacca

SEQ ID NO: 318714 - DNA, 75 bp, synthetic construct
  source 1..75: mol_type = other DNA
aactcgccgttcaatagcagtgacgaaagcggcggagcactgccgttctggcaacagcaagtgtttatcgatcag

SEQ ID NO: 318715 - DNA, 75 bp, synthetic construct
  source 1..75: mol_type = other DNA
cgcgtacatctggcaatgccgaaaccgtctttattcgtccgtgaacaaaaatccccttctgcatcggtgacggta

SEQ ID NO: 318716 - DNA, 75 bp, synthetic construct
  source 1..75: mol_type = other DNA
ctggagccgggatacacctcgctgctgaaagccccccgacaggaggactcggagcagaatgaacagggcacacag

SEQ ID NO: 318717 - DNA, 75 bp, synthetic construct
  source 1..75: mol_type = other DNA
acgaaactttaaaacctgtagtgcgcgacgcaaacggcaaagtcctgaaagatttgcccaaaccaaaccagagcg

SEQ ID NO: 318718 - DNA, 75 bp, synthetic construct
  source 1..75: mol_type = other DNA
aacatctggtggtggatttcagccacggtaactgccagaagcagcaccgtcgccagttagaagtttgtgaggata

SEQ ID NO: 318719 - DNA, 75 bp, synthetic construct
  source 1..75: mol_type = other DNA
agctgggcgtccctaccgcgactgagttcctcgatatggtgaccggtcagtttattgctgatttaatcagttggg

SEQ ID NO: 318720 - DNA, 75 bp, synthetic construct
  source 1..75: mol_type = other DNA
gctttgatgaaaccttaaaaccgtttgtgcgcgatgcttccggcagccgcctgaaagacctgcccaaaccaaaca

SEQ ID NO: 318721 - DNA, 75 bp, synthetic construct
  source 1..75: mol_type = other DNA
ggtgaaagccgcctgtaccgccgactcactggctgaatttacctgggatctgtttaccgcctggcagaccgctgg

SEQ ID NO: 318722 - DNA, 75 bp, synthetic construct
  source 1..75: mol_type = other DNA
cagaacaagcatacacattacttttcagccattattaaaccatgcacattgtgttaccccctttgacgttcgact

SEQ ID NO: 318723 - DNA, 75 bp, synthetic construct
  source 1..75: mol_type = other DNA
cctgttgaaggaaaaagagaatatccgtaaccagcttgccggcatcaatcagaagatagcggaagagaaaagaaa

SEQ ID NO: 318724 - DNA, 75 bp, synthetic construct
  source 1..75: mol_type = other DNA
cggtaaacaagcatccgaacttgctaaggagctggcttctgtatctcaagggaaacagattaagagtgtggatga

SEQ ID NO: 318725 - DNA, 75 bp, synthetic construct
  source 1..75: mol_type = other DNA
aagatcgtgcagcgattgccgcagcccttgagtctgtgaagctgtctgatatatcgtctaatctgaacagattca

SEQ ID NO: 318726 - DNA, 75 bp, synthetic construct
  source 1..75: mol_type = other DNA
aacaggctgaaaaacggcagaaggatgcgcagaacgcagacaagaaggccgctgatatgcttgctgaatacgagc

SEQ ID NO: 318727 - DNA, 75 bp, synthetic construct
  source 1..75: mol_type = other DNA
gccgctgatattacacgacaggagttcagactcctgcaggcagagctgagagaatacggattccgtactgaaatc

SEQ ID NO: 318728 - DNA, 75 bp, synthetic construct
  source 1..75: mol_type = other DNA
aagtgatatcgaaaaaagggacaaggaaatcacagcgtacaaaaacacgctcagcgcgcagcagaaagagaatga

SEQ ID NO: 318729 - DNA, 75 bp, synthetic construct
  source 1..75: mol_type = other DNA
gagaaatatggtaactgtaagccttgcggaccgtttcggcaatgttgttcctggttatgctgtcacattgtcttt

SEQ ID NO: 318730 - DNA, 75 bp, synthetic construct
  source 1..75: mol_type = other DNA
aaatatggtaactgtaagccttgcggaccgtttcggcaatgttgttcctggttatgctgttacgttgtccttacc

SEQ ID NO: 318731 - DNA, 75 bp, synthetic construct
  source 1..75: mol_type = other DNA
acactctgagcttttatgctcttaaccaggcagaaggagtcgagtttgggactgtaacggaaaaagacggtgtct

SEQ ID NO: 318732 - DNA, 75 bp, synthetic construct
  source 1..75: mol_type = other DNA
aagcggaatacgccagacagcgcgcctacatgttgcagcagtgggccgatatgattgattcatggattgacgggg

SEQ ID NO: 318733 - DNA, 75 bp, synthetic construct
  source 1..75: mol_type = other DNA
caccgtcaacaaaaacagcgtaccaaacgatccgaagagcccgtttgtaacttccggtattcgcgtgggtactcc

SEQ ID NO: 318734 - DNA, 75 bp, synthetic construct
  source 1..75: mol_type = other DNA
ttaaaatttaccagcagcaggtcgcgaaaaacgccaaagcgatggtagaagtgttcctggagcgtggttacaaag

SEQ ID NO: 318735 - DNA, 75 bp, synthetic construct
  source 1..75: mol_type = other DNA
ataccagcgcagcttacacagaatccatcaatgaaaataacaatgatgaagttaatatattagtacaagagctca

SEQ ID NO: 318736 - DNA, 75 bp, synthetic construct
  source 1..75: mol_type = other DNA
tagatactataagcacaatgatctctgcttttgcagcactgctaacagcagttgctacgtttttcttgtggagag

SEQ ID NO: 318737 - DNA, 75 bp, synthetic construct
  source 1..75: mol_type = other DNA
gctgattcgtcttttacactggatggagattcgtcgccgacgatctctgctgatagccaatccacttatccgata

SEQ ID NO: 318738 - DNA, 75 bp, synthetic construct
  source 1..75: mol_type = other DNA
gagatgtaaattcgtggaatgttggagccacagtccaggataacagaggcaatgtttccaactatgccgttatga

SEQ ID NO: 318739 - DNA, 75 bp, synthetic construct
  source 1..75: mol_type = other DNA
ttcagaatgctcgttatctaaatccggatcaaactggcaactaacagcttacccaccttcaatagctagttatcg

SEQ ID NO: 318740 - DNA, 75 bp, synthetic construct
  source 1..75: mol_type = other DNA
ggaaaaatagcaaatggacaacagatcccattgccatctggtttttctgccagccagtgtacctggagtgtcagt

SEQ ID NO: 318741 - DNA, 75 bp, synthetic construct
  source 1..75: mol_type = other DNA
caaccacatgttgttgtgactcttgaaccaaactcttgggctgctttttattttgacattaatatcgctaatact

SEQ ID NO: 318742 - DNA, 75 bp, synthetic construct
  source 1..75: mol_type = other DNA
ggtcagcggctgatccatgcccacggcgacgctgctgcacttcatcagggatggaaagcggtccagaacgtactg

SEQ ID NO: 318743 - DNA, 75 bp, synthetic construct
  source 1..75: mol_type = other DNA
ctggagcgtgagaacaaccagctgaaagaacagcagaacggctggcaggaacgtctgcaggccctgctgggtcgc

SEQ ID NO: 318744 - DNA, 75 bp, synthetic construct
  source 1..75: mol_type = other DNA
tcaagtgacagagccgaggaacaacgagcacgtgaagagtggtatcagaccactgcaaagaaatgggataaagaa

SEQ ID NO: 318745 - DNA, 75 bp, synthetic construct
  source 1..75: mol_type = other DNA
atgattttcctttctcaggcacaaatcgatgcgttactgctggaagatatccagggcggtgacctgaccacgcga

SEQ ID NO: 318746 - DNA, 75 bp, synthetic construct
  source 1..75: mol_type = other DNA
tttattacctccgcgccttattacgcgacaccggctgacattaaagtcagtctgcaacccgcagcctctatttaa

SEQ ID NO: 318747 - DNA, 75 bp, synthetic construct
  source 1..75: mol_type = other DNA
tcgatgcgttacttctggaagatatccagggcggtgacctgaccacgagagcattaaatattggacaccagcatg

SEQ ID NO: 318748 - DNA, 75 bp, synthetic construct
  source 1..75: mol_type = other DNA
caaggaaatgcaatcactggtgataacactctgagcttttatgctcttaaccaggcagaaggagtcgagtttggg

SEQ ID NO: 318749 - DNA, 75 bp, synthetic construct
  source 1..75: mol_type = other DNA
tttttatcggccgcaacggcaacgtcggtgaaattggtcatattcaggttgaaccgctgggagaacgctgccact

SEQ ID NO: 318750 - DNA, 75 bp, synthetic construct
  source 1..75: mol_type = other DNA
gcgtaactacgcattccacaagcgttttttcaaactcctgcaactgggattcgattactggactccggtcggtgg

SEQ ID NO: 318751 - DNA, 75 bp, synthetic construct
  source 1..75: mol_type = other DNA
tttttcaaactcctgcaactcggattcgattactggactccggtcggtggggcgatcactcctcgcgaacgaaaa

SEQ ID NO: 318752 - DNA, 75 bp, synthetic construct
  source 1..75: mol_type = other DNA
gattcgacgtgctggtcaacggctcacgcgcccatctgccgcaggcgcgggcgcgctatcaatcggcgctgctgc

SEQ ID NO: 318753 - DNA, 75 bp, synthetic construct
  source 1..75: mol_type = other DNA
ccggctggcgcgcgccgcccgctatactccacaggattgccatacgctcaacaatgacggcagcctgcgccagtc

SEQ ID NO: 318754 - DNA, 75 bp, synthetic construct
  source 1..75: mol_type = other DNA
actccacaggattgccatacgctcaacaatgacggcagcctgcgccagtcggtcgacacgctgctgacgctgatc

SEQ ID NO: 318755 - DNA, 75 bp, synthetic construct
  source 1..75: mol_type = other DNA
cgagcatatttatccggacggtagccgtgggcgcagggcgaaatccatctcgtttgcgaatatggacgaaaccga

SEQ ID NO: 318756 - DNA, 75 bp, synthetic construct
  source 1..75: mol_type = other DNA
gaatgggtaaccattcaggctggattttacaccgagcatttttatccggacggtagccgcgggcgtcgggcgaaa

SEQ ID NO: 318757 - DNA, 75 bp, synthetic construct
  source 1..75: mol_type = other DNA
tgtgcgaatcagtaggccgggaacatacgccagctctgagcgaagccgcagagcaatatctgaatacagttgcga

SEQ ID NO: 318758 - DNA, 75 bp, synthetic construct
  source 1..75: mol_type = other DNA
tacgccagctctgagtgatgccgcggaacaatatctgaataccgttgcgacacgcagaacccgggatatggcatt

SEQ ID NO: 318759 - DNA, 75 bp, synthetic construct
  source 1..75: mol_type = other DNA
cccgtgatacggcattgctggctttccgcgagtgggtaaccattcaggccggattttacaccgagcatatttatc

SEQ ID NO: 318760 - DNA, 75 bp, synthetic construct
  source 1..75: mol_type = other DNA
cgcccagcaaatggtgcacagaaagaacccttattaccgcaactggactgaaatcaggaaccattgccagagcaa

SEQ ID NO: 318761 - DNA, 75 bp, synthetic construct
  source 1..75: mol_type = other DNA
cgtggtggtcaacggctcacgcgcccatctgccgcaggcgcgggcacgctatgcatcggcgctgctgcccatctg

SEQ ID NO: 318762 - DNA, 75 bp, synthetic construct
  source 1..75: mol_type = other DNA
aactggacacaggatgagagctatattccgccgttactggcgtttaacgcccatgacgggctggtacagcgtctg

SEQ ID NO: 318763 - DNA, 75 bp, synthetic construct
  source 1..75: mol_type = other DNA
gatgctggagtccgggagctgcatgatttatgcgccgggaaccatgggcgacctgaaacctgaactgtttgcggt

SEQ ID NO: 318764 - DNA, 75 bp, synthetic construct
  source 1..75: mol_type = other DNA
cggttctgattccgtagaatctgccgctcgtgaaatcgcttacttcttcggtgaaggcgaagtgtgtccgcgcac

SEQ ID NO: 318765 - DNA, 75 bp, synthetic construct
  source 1..75: mol_type = other DNA
caggtaatgcagcttcggaattcagcacctatgaaagtggttatcactggattaaggccaaaataacgaatagca

SEQ ID NO: 318766 - DNA, 75 bp, synthetic construct
  source 1..75: mol_type = other DNA
ctggtcgttggcggtctgttgctgattgccgccgaatgcctgaagccgaaagagccgcgtgcgccggggctggac

SEQ ID NO: 318767 - DNA, 75 bp, synthetic construct
  source 1..75: mol_type = other DNA
ttgcctggtctattctctcttctcataatacgtccggaaatatggataaacttaaaattaagtttgattcattag

SEQ ID NO: 318768 - DNA, 75 bp, synthetic construct
  source 1..75: mol_type = other DNA
tttttggccccggctggaaagcgccttctgatatccgcttacagatacgcgatgatgcactggtactcaacgaca

SEQ ID NO: 318769 - DNA, 75 bp, synthetic construct
  source 1..75: mol_type = other DNA
gtcgttattgcacttccccacatgcagcccggcgtgattaatgttgagcaggaaggtgtcagtgcagacagaccc

SEQ ID NO: 318770 - DNA, 75 bp, synthetic construct
  source 1..75: mol_type = other DNA
gcgaaggtgttttgctctcccctcagcagtttcagcagcagactgaatgggagtcttttcgcagtgccggtattt

SEQ ID NO: 318771 - DNA, 75 bp, synthetic construct
  source 1..75: mol_type = other DNA
ccatgacgggctggtacagcgtctggacacgctgctgttgcagctacgggccaaatgtcagcgcctgatggcgat

SEQ ID NO: 318772 - DNA, 75 bp, synthetic construct
  source 1..75: mol_type = other DNA
ggccgggagccccgatgatgtgtctgaggtggtgaatgtggcgctgagcggggtcattatccgtccggttacgca

SEQ ID NO: 318773 - DNA, 75 bp, synthetic construct
  source 1..75: mol_type = other DNA
gaggtggtgaatgtggcgctgagcggggtcattatccgtccggttacgcatgtaccggcggccattccgctccgg

SEQ ID NO: 318774 - DNA, 75 bp, synthetic construct
  source 1..75: mol_type = other DNA
aaaccgggatgttatttggcgcaacgctgatggccaacaccaccgacgtggtggcacagaacggcgacctggcca

SEQ ID NO: 318775 - DNA, 75 bp, synthetic construct
  source 1..75: mol_type = other DNA
attccgaaacgtaccgtgcatatcatcgatatgacgaatcccacactggtgctgcgggtggataatgtgccgacc

SEQ ID NO: 318776 - DNA, 75 bp, synthetic construct
  source 1..75: mol_type = other DNA
cgtacacatcattgaacagtcacgtaatgcgctggtattcggcggatttctgctactggaacacggttggcagca

SEQ ID NO: 318777 - DNA, 75 bp, synthetic construct
  source 1..75: mol_type = other DNA
tggctgtccaatgccatcccgtttattgctgcgggtctggtgtttggtctgtggcgcgtggtttcacaggcaggt

SEQ ID NO: 318778 - DNA, 75 bp, synthetic construct
  source 1..75: mol_type = other DNA
tgtatgccatcctgaactatgctatggcgttctacctgaaaggtgagacaaaagggatgaatttctcactgtcga

SEQ ID NO: 318779 - DNA, 75 bp, synthetic construct
  source 1..75: mol_type = other DNA
gtttatctgcagagctggccaccactgtatgccattctgaactacgccatgtcgtattacctgaaaggcgaaacg

SEQ ID NO: 318780 - DNA, 75 bp, synthetic construct
  source 1..75: mol_type = other DNA
ccgttgccgcattgtttgccgacggtaacgccccacagcgggtgatggatgtcgctgctgcaccaggctcaaaaa

SEQ ID NO: 318781 - DNA, 75 bp, synthetic construct
  source 1..75: mol_type = other DNA
ggcgaaggtgtggtacgtaaagatcccgatgcgctgaaaaactggtcaccagaaagcaatcaggagatcgcagcc

SEQ ID NO: 318782 - DNA, 75 bp, synthetic construct
  source 1..75: mol_type = other DNA
ttaaactgggatgaaaacctgcgcctctggcagcgtgacaaagaactgtggttgttcccggtgggcattgaagcc

SEQ ID NO: 318783 - DNA, 75 bp, synthetic construct
  source 1..75: mol_type = other DNA
gaattctggtcgttgccgttatttgtttcgccagcgaccttaattccgcgcccggatacggagtgtctggtggag

SEQ ID NO: 318784 - DNA, 75 bp, synthetic construct
  source 1..75: mol_type = other DNA
cctgcaattaaccgctccttatggctggacgcttacgccaattccgtggtgtgaagaaggtttctggattgaacg

SEQ ID NO: 318785 - DNA, 75 bp, synthetic construct
  source 1..75: mol_type = other DNA
ttgcgccgcagcattcgcgttaatacgctgaaaatctccgttgctgatttcctgcaattaaccgctccttatggc

SEQ ID NO: 318786 - DNA, 75 bp, synthetic construct
  source 1..75: mol_type = other DNA
agccaggtacagagtctcagtaacagcatcagtcatggcagccagctggtcggtagtcagctgacacagtgggca

SEQ ID NO: 318787 - DNA, 75 bp, synthetic construct
  source 1..75: mol_type = other DNA
gcgactaaccgcgacttgcgcgaagaggtgctggcagggcgatttcgtgctggcttgtttcatcgcctgagtgtg

SEQ ID NO: 318788 - DNA, 75 bp, synthetic construct
  source 1..75: mol_type = other DNA
aaaacctgcgtgaagcgacagaagcgttccagcgtgaaaccattcgccaggcactggcacaaaatcatcacaact

SEQ ID NO: 318789 - DNA, 75 bp, synthetic construct
  source 1..75: mol_type = other DNA
gttgtttgccgggcaaaacctgatcggcgcattgacgctcgacgggatgcagcccgatcagttcgatgttttcag

SEQ ID NO: 318790 - DNA, 75 bp, synthetic construct
  source 1..75: mol_type = other DNA
ctgggaaaaaatcgctggcggaagcggtcatcgcgaaagcaaaagctaaccgtcagcagcgttttttcttccacg

SEQ ID NO: 318791 - DNA, 75 bp, synthetic construct
  source 1..75: mol_type = other DNA
atgagccgagtaactagcagccaacgaagaggcagtttgaaggatgaagtgtatatgaattttttagctcacctg

SEQ ID NO: 318792 - DNA, 75 bp, synthetic construct
  source 1..75: mol_type = other DNA
ttctttcccgccactggtcgcagctgtcgccggactttccgctacaggaatttgtctgttatgcccgcgagcaag

SEQ ID NO: 318793 - DNA, 75 bp, synthetic construct
  source 1..75: mol_type = other DNA
tacagatttaaacatagaggattctagctcagaggaattcctttcagataatacactcgagaaagacgaaaattc

SEQ ID NO: 318794 - DNA, 75 bp, synthetic construct
  source 1..75: mol_type = other DNA
taatacggtgtgttgtccgtactgtggttctgtcgaccccttcggctattaccggaatacggacaggatcttcac

SEQ ID NO: 318795 - DNA, 75 bp, synthetic construct
  source 1..75: mol_type = other DNA
actgcgggcggagcgggaacaactggcgcaggcatttgtggatgagaaactgaaaccccagctggagcaggaatt

SEQ ID NO: 318796 - DNA, 75 bp, synthetic construct
  source 1..75: mol_type = other DNA
gcctgcgcgcggatgctggaaaccgacgtcgccaacctgcatcggctggcgaaacgtctgggattgaaggattaa

SEQ ID NO: 318797 - DNA, 75 bp, synthetic construct
  source 1..75: mol_type = other DNA
ttgaagcggtgaaacagacgcagatgatcggtctgtcgccaggcatgacgcaattgaaaaaagagattgagattg

SEQ ID NO: 318798 - DNA, 75 bp, synthetic construct
  source 1..75: mol_type = other DNA
ttgtaatttatattatatacataattcatatgttcatggtcttttatttattcacctgaattataactgtgcatt

SEQ ID NO: 318799 - DNA, 75 bp, synthetic construct
  source 1..75: mol_type = other DNA
gggtgatggatgtggcggctgcgccgggatcaaaaaccacgcagattgctgcgagtatgaataatgaaggcgcga

SEQ ID NO: 318800 - DNA, 75 bp, synthetic construct
  source 1..75: mol_type = other DNA
tgaaattcaagggtgaagaatacctgggcgagatccgaaaagaaaaagctcacatcttgcgtgatgtcggcctcg

SEQ ID NO: 318801 - DNA, 75 bp, synthetic construct
  source 1..75: mol_type = other DNA
tgatactttttatcagcttcgcataaaaccaaacgctctcgaactgattaaagaatatgtgaataatgatcctac

SEQ ID NO: 318802 - DNA, 75 bp, synthetic construct
  source 1..75: mol_type = other DNA
taccctgctagggctgggaagcgtgctgatggctaccagcgccataacaacagcggtgggactgggaatattaat

SEQ ID NO: 318803 - DNA, 75 bp, synthetic construct
  source 1..75: mol_type = other DNA
tgaagcatgggaaagccgcgaatttggtaaagcgattcgtgaaatcatggcgctggctgatctggctaaccgcta

SEQ ID NO: 318804 - DNA, 75 bp, synthetic construct
  source 1..75: mol_type = other DNA
cctgagcgatacgggtagcggtggctatcctgcgtgtaaggagtggtggtccgatggcgatacggggctgaaaaa

SEQ ID NO: 318805 - DNA, 75 bp, synthetic construct
  source 1..75: mol_type = other DNA
aaggagttcctccagatacgtaaagccggttgggacaaagaccttccggtaaaaggtgtccttctggccggtgta

SEQ ID NO: 318806 - DNA, 75 bp, synthetic construct
  source 1..75: mol_type = other DNA
catggctacattcgtcttgtgaatgacggtaaagacccatggtatacgttgtttggcgctgcatttgtctgggtg

SEQ ID NO: 318807 - DNA, 75 bp, synthetic construct
  source 1..75: mol_type = other DNA
atgccttaatcgcggtactcagctacctggtgctggtgggcgatatcaagcgtattgagctgaaacctgtcgcgg

SEQ ID NO: 318808 - DNA, 75 bp, synthetic construct
  source 1..75: mol_type = other DNA
atgtcgattctgaaagcgggctttgtggcttccgttccggcggtttgcggttttatcggcggtgtgctgggtggg

SEQ ID NO: 318809 - DNA, 75 bp, synthetic construct
  source 1..75: mol_type = other DNA
aatagcactgattgtgatggcattatttgccgctgtattatttagcatggtgactgtatttatctggcgctgctg

SEQ ID NO: 318810 - DNA, 75 bp, synthetic construct
  source 1..75: mol_type = other DNA
tgatactttttatcagcttcgcataaaaccaaacgctctcgaactgattaaagaatatgtgaataacggtggtgt

SEQ ID NO: 318811 - DNA, 75 bp, synthetic construct
  source 1..75: mol_type = other DNA
ctgattactcttgccaagactgatagcgttgctaatcgtcgtctggcattcgctcgtactcgtgataacgagatc

SEQ ID NO: 318812 - DNA, 75 bp, synthetic construct
  source 1..75: mol_type = other DNA
accatcaccatattgataacgcggtacagaagaatctggccaaagccccaaagcgctctggcaccaagatcccgg

SEQ ID NO: 318813 - DNA, 75 bp, synthetic construct
  source 1..75: mol_type = other DNA
gaactgaaaaactaccttaccagtctgtgtgcagaggaaggggtaactcaggcagagttgatagaaaggcttatt

SEQ ID NO: 318814 - DNA, 75 bp, synthetic construct
  source 1..75: mol_type = other DNA
aacgacggtgctgccgctctggtgattatggaagaatctgcggcgctgtgcattggcggcggtcagggaattgcg

SEQ ID NO: 318815 - DNA, 75 bp, synthetic construct
  source 1..75: mol_type = other DNA
cggccttcgataaagcaggaacagtcaccgccgggaacgcgtcaggtattaacgacggtgctgccgctctggtga

SEQ ID NO: 318816 - DNA, 75 bp, synthetic construct
  source 1..75: mol_type = other DNA
atgctcgtggcccaacacaccgtttatttcccggacgcctttctgacacaaatgcgcgaagcaatgccttcgacg

SEQ ID NO: 318817 - DNA, 75 bp, synthetic construct
  source 1..75: mol_type = other DNA
ggcgaaggcgtggtgcgtaaagatcccgatgcgctaaaaaactggtcaccagaaagcaatcaggaaatcgcagct

SEQ ID NO: 318818 - DNA, 75 bp, synthetic construct
  source 1..75: mol_type = other DNA
ctcaagccgcaccaacatcagatgatgtgttagtcacttttcaacatcaaccgctcggcttagctaaacgcattg

SEQ ID NO: 318819 - DNA, 75 bp, synthetic construct
  source 1..75: mol_type = other DNA
cgtaatcctgcgcgatggcctgatgtgcgccacccatggttatcatatggggattaccgccgaaaacgtggctaa

SEQ ID NO: 318820 - DNA, 75 bp, synthetic construct
  source 1..75: mol_type = other DNA
caggatgaactggcgctacattcacagcataaagcggcagccgcaattgagtccggtgcttttacagccgaaatc

SEQ ID NO: 318821 - DNA, 75 bp, synthetic construct
  source 1..75: mol_type = other DNA
ttccccgtgaactggatgaacaacaaaaaacggcactggcggcggagattaccgacgtcattattcgccatctga

SEQ ID NO: 318822 - DNA, 75 bp, synthetic construct
  source 1..75: mol_type = other DNA
tgccccccgcattgatgggtatggggccagtacctgccacgcaaaaagcgttacaactggcggggctgcaactgg

SEQ ID NO: 318823 - DNA, 75 bp, synthetic construct
  source 1..75: mol_type = other DNA
tcatatggggattaccgccgaaaacgtggctaaagagtacggaattacccgtgaaatgcaggatgaactggcgct

SEQ ID NO: 318824 - DNA, 75 bp, synthetic construct
  source 1..75: mol_type = other DNA
tgaagcatttgccgcgcagttccttgccgttgggaaaaccctgggctttgatcctgagaaagtgaatgtcaacgg

SEQ ID NO: 318825 - DNA, 75 bp, synthetic construct
  source 1..75: mol_type = other DNA
gcataccttcaatgaagacaatattatgatgggtaaagtatcccttaaaactggtggtactaacggttatttcaa

SEQ ID NO: 318826 - DNA, 75 bp, synthetic construct
  source 1..75: mol_type = other DNA
caagctggcgctaatgccgatgctaaaattgatgcaatgcataagcaaatcactaccgaaacagggcagacggtc

SEQ ID NO: 318827 - DNA, 75 bp, synthetic construct
  source 1..75: mol_type = other DNA
cttgttggtaagaacatgacgatccgtgatggtattctcgataagggcaacattaaagaagaataccgtaaagtg

SEQ ID NO: 318828 - DNA, 75 bp, synthetic construct
  source 1..75: mol_type = other DNA
acagaagcctactaatttcagaattaaggcaactggtgaaaccatctatggtaagaacgttactttgacatggga

SEQ ID NO: 318829 - DNA, 75 bp, synthetic construct
  source 1..75: mol_type = other DNA
caacccgtagatcgggtagtgcgaccgatgttgttgtgatggtcgctaaaaaagccacttctggtatttctattc

SEQ ID NO: 318830 - DNA, 75 bp, synthetic construct
  source 1..75: mol_type = other DNA
gacgatcaggacaaagaagcactggaagacctgattggtttacaagaccgcttagatgaaactatcgcggatgct

SEQ ID NO: 318831 - DNA, 75 bp, synthetic construct
  source 1..75: mol_type = other DNA
ggtgtctgtgtggaagagatgtgtagatggtattgaagtcgttagccttgaaagatatttgggtaaattcgacta

SEQ ID NO: 318832 - DNA, 75 bp, synthetic construct
  source 1..75: mol_type = other DNA
ggtgtctgtgtggaaacggtgcattgatggtattgaggttgtaagcatcgaacggtatttaggcacgtttgatta

SEQ ID NO: 318833 - DNA, 75 bp, synthetic construct
  source 1..75: mol_type = other DNA
caaatactgcattgtctttagcaaaacagcatttaggctcagattgggacgaccgctatactggtaatggcattg

SEQ ID NO: 318834 - DNA, 75 bp, synthetic construct
  source 1..75: mol_type = other DNA
gttgagtttcgcacgggtaagaatcctaacaccgctttgtcactggcaaaacgtcatttaggatcagactggaac

SEQ ID NO: 318835 - DNA, 75 bp, synthetic construct
  source 1..75: mol_type = other DNA
ggtaagaacatgacgatccgtgatggtgtactggacaaaggcaacattaaagaagaataccggaaagttttagaa

SEQ ID NO: 318836 - DNA, 75 bp, synthetic construct
  source 1..75: mol_type = other DNA
aggtagcagtagacgtttgcggccttaaaatccgtaaccttgaaaccaatgctattgaggctagcactaacggcg

SEQ ID NO: 318837 - DNA, 75 bp, synthetic construct
  source 1..75: mol_type = other DNA
gtaaccatcgtgaagacggcccggcatgtatggcggcttgcccgactcatgcgctgatttgtgtcgatcgtaata

SEQ ID NO: 318838 - DNA, 75 bp, synthetic construct
  source 1..75: mol_type = other DNA
atgttaggagcgatagaaaaacgctttggcgataaagtaccggaacagtccatccagtggctgacagataacggt

SEQ ID NO: 318839 - DNA, 75 bp, synthetic construct
  source 1..75: mol_type = other DNA
ctggcggtatggcgttacagtggctgctggggccactttccgacagaattggccgcaggccggtgctgattaccg

SEQ ID NO: 318840 - DNA, 75 bp, synthetic construct
  source 1..75: mol_type = other DNA
ctttaagctatatcccaatgatgagttgggtggctgtctcgccggtgatcctgattgacgcaggcggcttaacga

SEQ ID NO: 318841 - DNA, 75 bp, synthetic construct
  source 1..75: mol_type = other DNA
gctttgctggccgtcatccaggaagtcaacgatctgggaaagactacgaactcacaggagaagacgagttctggt

SEQ ID NO: 318842 - DNA, 75 bp, synthetic construct
  source 1..75: mol_type = other DNA
atgcaacttactctcgatacgttaaaagaaaccggtgcctttaccgggcgtcccgtgaaaaaagaaattaagtgg

SEQ ID NO: 318843 - DNA, 75 bp, synthetic construct
  source 1..75: mol_type = other DNA
aaaggttcgtgaaaacgatgaaggaagactatatcgcgttcatgccgaaaccgaatgtaagaacggcattgcata

SEQ ID NO: 318844 - DNA, 75 bp, synthetic construct
  source 1..75: mol_type = other DNA
tctggcgaccattattgaccgtcgtttaaccggcaaacgcctgttcaacgctcaactttatccgcagggtaagac

SEQ ID NO: 318845 - DNA, 75 bp, synthetic construct
  source 1..75: mol_type = other DNA
actatgcaatgggcgacctcttcgccggtgccgtccaccttcattggtgcgctgattatttctatcgttgctggt

SEQ ID NO: 318846 - DNA, 75 bp, synthetic construct
  source 1..75: mol_type = other DNA
ggcattttccaccaatgcagatgataaaataattctgaaacatatcagcgtctcgtcagtatcagcatcaccgac

SEQ ID NO: 318847 - DNA, 75 bp, synthetic construct
  source 1..75: mol_type = other DNA
tatggcgttacagtggctgctggggccgctttccgacaggattggccgcaggccggtgctgattaccggggcgct

SEQ ID NO: 318848 - DNA, 75 bp, synthetic construct
  source 1..75: mol_type = other DNA
atcatgggcggtgtgatcctcgcattcagtcaattgattgcttatacctggctgaaaattcccgctgatatcggc

SEQ ID NO: 318849 - DNA, 75 bp, synthetic construct
  source 1..75: mol_type = other DNA
tctggcgaccattatcgatcgtcgcttaactggcaaacgcttgttcaacgcccagctttatccgcagggtaaaac

SEQ ID NO: 318850 - DNA, 75 bp, synthetic construct
  source 1..75: mol_type = other DNA
gtttcaactgaccttgcacggtgagcgttatcggctggcagcgcggatcgatgtagaagacaacgggccaggcat

SEQ ID NO: 318851 - DNA, 75 bp, synthetic construct
  source 1..75: mol_type = other DNA
gcgtcacaagatccgtttgcaggtcgatggcggcctgaaaacgggtgtcgatatcatcaaagcagcgattcttgg

SEQ ID NO: 318852 - DNA, 75 bp, synthetic construct
  source 1..75: mol_type = other DNA
ggtagccgcgaactggacgacgacacgcttgccagctaccagaaacaatttaactacagcgcggaagagctggat

SEQ ID NO: 318853 - DNA, 75 bp, synthetic construct
  source 1..75: mol_type = other DNA
tagtgcgtactgcaatacacgcactggcccgtatgcagcaccgtggcgcgattctcgccgatggtaaaaccggtg

SEQ ID NO: 318854 - DNA, 75 bp, synthetic construct
  source 1..75: mol_type = other DNA
tgcagcaggcggtacagagcggcgagtacagcgactatcaggaatacgcgaagctggttaacgagcgcccggcaa

SEQ ID NO: 318855 - DNA, 75 bp, synthetic construct
  source 1..75: mol_type = other DNA
acgactacttccgccagcagtttgcccaggtcactaatccgccaatcgacccactgcgtgaagcgcatgttatgt

SEQ ID NO: 318856 - DNA, 75 bp, synthetic construct
  source 1..75: mol_type = other DNA
taactacagcgcggaagaactggactctgtgatccgtgtgctgggcgaaaacggtcaggaagcggtcggttcgat

SEQ ID NO: 318857 - DNA, 75 bp, synthetic construct
  source 1..75: mol_type = other DNA
cgtcagcagcgttttttcttccacggtcagttcaatcccacactgtggctggctctgctgagtggtggcattaag

SEQ ID NO: 318858 - DNA, 75 bp, synthetic construct
  source 1..75: mol_type = other DNA
gtcggtggataaaaacaacattgccttctttagcccgaactatctgcaaggctggcggcgggcgttggctattgc

SEQ ID NO: 318859 - DNA, 75 bp, synthetic construct
  source 1..75: mol_type = other DNA
gtggtggtatcaaacccagccagttttactggcatatctggggggcagatctctatgaggtctccagcgggctga

SEQ ID NO: 318860 - DNA, 75 bp, synthetic construct
  source 1..75: mol_type = other DNA
accgtggtagaaggcattggcgacaacggctgtgaatatatgacgggcggtattgtctgtattctgggtaaaacc

SEQ ID NO: 318861 - DNA, 75 bp, synthetic construct
  source 1..75: mol_type = other DNA
accggaatacagaccgtatcgttaccatactgctggcgctgattattgtggtcctgctgactactgtcagcgtca

SEQ ID NO: 318862 - DNA, 75 bp, synthetic construct
  source 1..75: mol_type = other DNA
ttggcgatacggtaaaagtggtggtaccgatgggatatccgcctaataacgaagcgtacatcgaggaagttcgtc

SEQ ID NO: 318863 - DNA, 75 bp, synthetic construct
  source 1..75: mol_type = other DNA
tgggagctggggcttgttgaaacccaacaggcgctggttgccaacggcttgcgtcataagatccgtttgcaggtt

SEQ ID NO: 318864 - DNA, 75 bp, synthetic construct
  source 1..75: mol_type = other DNA
caccgaaaacaacccgccgtttgataacggcctgctgaacgcgcagttgctgcaacaggcgaaaccgtttgtcga

SEQ ID NO: 318865 - DNA, 75 bp, synthetic construct
  source 1..75: mol_type = other DNA
aaaccttgtcgattgtgggctggcgtgatgtccccactaacgaaggcgtgctgggtgaaatcgccctctcctctc

SEQ ID NO: 318866 - DNA, 75 bp, synthetic construct
  source 1..75: mol_type = other DNA
aggatttagcgcagcttattttcgacctgaaacaggttaacccgaaagcgatgatctccgtcaaactggtttctg

SEQ ID NO: 318867 - DNA, 75 bp, synthetic construct
  source 1..75: mol_type = other DNA
taccaaagttattatcgaacaggcggaccggctgcgaaatctggtcgaccgtctgttgggaccgcaactgcccgg

SEQ ID NO: 318868 - DNA, 75 bp, synthetic construct
  source 1..75: mol_type = other DNA
tgtacggttgattcgtgattacgaccccagcctgccagaactggcgcacgatccggatcagattgagcaagtact

SEQ ID NO: 318869 - DNA, 75 bp, synthetic construct
  source 1..75: mol_type = other DNA
ctgggcagatcctcaactcgctgattaacagtattttgttaattgatgacaacctggcgatccattacgccaacc

SEQ ID NO: 318870 - DNA, 75 bp, synthetic construct
  source 1..75: mol_type = other DNA
tgggaactcggcctggtggaaacccaacaggcgctggttgccaacggtttacgtcataaaattcgtttgcaggtt

SEQ ID NO: 318871 - DNA, 75 bp, synthetic construct
  source 1..75: mol_type = other DNA
gcgtacctggtcaatgccgacgtcattcagattaaagtcgcccagggcgcgaagccgggcgaaggcggtcaattg

SEQ ID NO: 318872 - DNA, 75 bp, synthetic construct
  source 1..75: mol_type = other DNA
atatcatcaaagcagccatcctcggcgcggaaagtttcggtttcggcactggcccaatggtggcgctcggctgta

SEQ ID NO: 318873 - DNA, 75 bp, synthetic construct
  source 1..75: mol_type = other DNA
atacgcgaagctggttaatgagcgtccggcaaccacgctgcgcgatctgctggcaattacgccgggtgaaaacgc

SEQ ID NO: 318874 - DNA, 75 bp, synthetic construct
  source 1..75: mol_type = other DNA
tcgtctgtatgccgctggccgcgcgggtgaacgttttggcgtgcgtaactccggtgcgattaccgtggtagaagg

SEQ ID NO: 318875 - DNA, 75 bp, synthetic construct
  source 1..75: mol_type = other DNA
cccagacgcacggcgatcaggggctggctgccgatccgattaaagcgtacttcaacggcaccgcaggccagagtt

SEQ ID NO: 318876 - DNA, 75 bp, synthetic construct
  source 1..75: mol_type = other DNA
gcgcttaatggagcgcgtgctggataatttgctcaataacgccctgcgctactgtcattcaacggttgaaaccag

SEQ ID NO: 318877 - DNA, 75 bp, synthetic construct
  source 1..75: mol_type = other DNA
ggaagcagcggcgcaacgatttggcgatgggcatctcaatgaacgtattcactttgatgatggttcgagttttga

SEQ ID NO: 318878 - DNA, 75 bp, synthetic construct
  source 1..75: mol_type = other DNA
agagatggatttaaatctctcttttgatctgcgcgtcgaaccgttgagtaaatatcatctcgatgaaatctccat

SEQ ID NO: 318879 - DNA, 75 bp, synthetic construct
  source 1..75: mol_type = other DNA
ccagcgaactgggtggtgcccgcttctcgtttagctggccgttatggcataacatcccgcaatttacctctgcct

SEQ ID NO: 318880 - DNA, 75 bp, synthetic construct
  source 1..75: mol_type = other DNA
ttttgcaacgcatcccacgcagccactacgtgctggccgtcggtcccgttccttatctctattacctccatcaaa

SEQ ID NO: 318881 - DNA, 75 bp, synthetic construct
  source 1..75: mol_type = other DNA
gtcgccctggacgatcagtacacttttttgcaacgtatcccgcgcagccactacgtgctggcagttggtcctgtt

SEQ ID NO: 318882 - DNA, 75 bp, synthetic construct
  source 1..75: mol_type = other DNA
aaggtttccagccattctttgcctgtcagagtcgggttcgtgatttgggacgtcgcgaatacagtaaaggaaggt

SEQ ID NO: 318883 - DNA, 75 bp, synthetic construct
  source 1..75: mol_type = other DNA
aatatcatcaataagttacgtgatgaaggtttccaggcattctttgcctgtcagagtcgggttcgtgatttggga

SEQ ID NO: 318884 - DNA, 75 bp, synthetic construct
  source 1..75: mol_type = other DNA
taaccactgcgaagatccggcttgtactaaagtctgcccgagcggtgcgatgcataaacgtgaagatggttttgt

SEQ ID NO: 318885 - DNA, 75 bp, synthetic construct
  source 1..75: mol_type = other DNA
acgccttggcgtcgcatttaaccagatggcggacaatatcaacgccttgattgccagcaaaaaacagcttattga

SEQ ID NO: 318886 - DNA, 75 bp, synthetic construct
  source 1..75: mol_type = other DNA
tcgtcctgctaaatacaaatatacagatgaaaacggcaacgagcagacttggacaggtcaaggccgcactcctaa

SEQ ID NO: 318887 - DNA, 75 bp, synthetic construct
  source 1..75: mol_type = other DNA
gatattatcgggcaggttatcgagggagcgtatgaagtgcccggtgtctttgataaggtcactgataatatggag

SEQ ID NO: 318888 - DNA, 75 bp, synthetic construct
  source 1..75: mol_type = other DNA
tatctggacgcactggaactggtcgacacttccggtgcgcctgatattgaatggcctacgcctccggaaactcag

SEQ ID NO: 318889 - DNA, 75 bp, synthetic construct
  source 1..75: mol_type = other DNA
aatatcgaaaccctaaggaatgatccccatcttacaactttcataattgctgcttgcatgatgtcgaaaaaaagt

SEQ ID NO: 318890 - DNA, 75 bp, synthetic construct
  source 1..75: mol_type = other DNA
aatgacatcggcaatacgcttcagtttatcaggcagaacaatgatattgagcgttcaggcgctaacaatgttggg

SEQ ID NO: 318891 - DNA, 75 bp, synthetic construct
  source 1..75: mol_type = other DNA
agagggggcagcggcatttgcggcagcggctggaattaatacaaacgccaaaaaattaatgagtgttagggaaaa

SEQ ID NO: 318892 - DNA, 75 bp, synthetic construct
  source 1..75: mol_type = other DNA
aaacttttgctgatttaatcgcactcaggcaagcagtcgtagctctaatcaacttgttgccggagaaggaaaagg

SEQ ID NO: 318893 - DNA, 75 bp, synthetic construct
  source 1..75: mol_type = other DNA
tatcctggcggatgtttgtcaatggcaatataggggcgatggatgtatgtattctggcggtccggtggctactga

SEQ ID NO: 318894 - DNA, 75 bp, synthetic construct
  source 1..75: mol_type = other DNA
agaaataactattaatcttaggtattctgattttatttcacaaaaatatggctataaatcagacaggcttaaaag

SEQ ID NO: 318895 - DNA, 75 bp, synthetic construct
  source 1..75: mol_type = other DNA
gacgcctgaacaaataattacccctcgtcgttgggaggataaacagaacgatctctggacgacatggcagcgtgt

SEQ ID NO: 318896 - DNA, 75 bp, synthetic construct
  source 1..75: mol_type = other DNA
gagaatatgataaaaggtggattatcggggcgaagtgcctccggtaaaaataccagaacaagagccattacaggc

SEQ ID NO: 318897 - DNA, 75 bp, synthetic construct
  source 1..75: mol_type = other DNA
ggagcgtatgaagtgctcggtgtctttgataaagtcactgaaaatatggagacaatgaaagagatacatcttaac

SEQ ID NO: 318898 - DNA, 75 bp, synthetic construct
  source 1..75: mol_type = other DNA
gccgcgtcagccgcgatccgttctggtgccgtaacgtgctcagcccgtcgaagctgcgggaaaaatgggatgagc

SEQ ID NO: 318899 - DNA, 75 bp, synthetic construct
  source 1..75: mol_type = other DNA
gaaaataaaacgccagtgacgcctgaacagataattactccccgtcgtcgggaggataaacagaacgatctctgg

SEQ ID NO: 318900 - DNA, 75 bp, synthetic construct
  source 1..75: mol_type = other DNA
cgaagtgcctccgggaaaaataccaggacaagagccattacaggtattgatggtgatataagaatcaacaaggcg

SEQ ID NO: 318901 - DNA, 75 bp, synthetic construct
  source 1..75: mol_type = other DNA
gtcaccaccgccgacattctgacaccacgacgccgggaggattacggtaaggacctgtggagtgcttatcagacc

SEQ ID NO: 318902 - DNA, 75 bp, synthetic construct
  source 1..75: mol_type = other DNA
cattgccagagttaaggatgagcttgaaggagagacctacgaaattttcgtaggtcagaaaaacggcgcagaaat

SEQ ID NO: 318903 - DNA, 75 bp, synthetic construct
  source 1..75: mol_type = other DNA
aaaaagaagtacgcaacaacgacttcattgcacgcatcaaagatgagcttgagggggagggttacgaaattttcg

SEQ ID NO: 318904 - DNA, 75 bp, synthetic construct
  source 1..75: mol_type = other DNA
ggtagaaagcttccgatacaataatcggggagtacggaagattgaagaaatcctggacgcggagaacaacgcaga

SEQ ID NO: 318905 - DNA, 75 bp, synthetic construct
  source 1..75: mol_type = other DNA
tggcctgtggaataaggtgaagttttacctttcaaacgcatcgaattacacattcgacgacattaaccgggctat

SEQ ID NO: 318906 - DNA, 75 bp, synthetic construct
  source 1..75: mol_type = other DNA
gaaacagaacgactattactatggcgtatcgcgtcgtgaatctgcgcgcagcggtctggagcggtataaagccga

SEQ ID NO: 318907 - DNA, 75 bp, synthetic construct
  source 1..75: mol_type = other DNA
acctcttcgacttcctccctaaccttgcaccggaagctaaacaggtcgttgccgccagtctggttaatcccgtcg

SEQ ID NO: 318908 - DNA, 75 bp, synthetic construct
  source 1..75: mol_type = other DNA
actgagtacgagattaaaaccaacggagagaacgatccgatgaaagaactgattatcaatgcgctgcaagccgct

SEQ ID NO: 318909 - DNA, 75 bp, synthetic construct
  source 1..75: mol_type = other DNA
tagtgcaaaaattaaacaacacaacatctgaaactatctccatgacctacaaacaagccctccgcgtcgccgcgc

SEQ ID NO: 318910 - DNA, 75 bp, synthetic construct
  source 1..75: mol_type = other DNA
tattttttgtgctttctgctaatgccacgccagttgaagagcctaacactatcgtgtacccacgatgcatgaaaa

SEQ ID NO: 318911 - DNA, 75 bp, synthetic construct
  source 1..75: mol_type = other DNA
ttcagaccagcacgtaaacgtatcttcatatatggggagacactcaaaggtgaagaccccagcaaatacattaga

SEQ ID NO: 318912 - DNA, 75 bp, synthetic construct
  source 1..75: mol_type = other DNA
ttgataaagtcactgaaaatatggagacaatgaaagagatacatcttaacagtgacgaacaacatttatttggca

SEQ ID NO: 318913 - DNA, 75 bp, synthetic construct
  source 1..75: mol_type = other DNA
aatatcatcaataagttacgtgatgaaggtttccagccgttctttgcctgtcagagtcgggttcgtgatttagga

SEQ ID NO: 318914 - DNA, 75 bp, synthetic construct
  source 1..75: mol_type = other DNA
ttacttgctgccggtcgctggttgctggtactgctggtggcgtggctgctgtggcggaaagcggtacgcccgcag

SEQ ID NO: 318915 - DNA, 75 bp, synthetic construct
  source 1..75: mol_type = other DNA
gcaccggggaaatgtggtggagacagttattgaaggggcttacgaggtggtgggcgtgtttgaccggattgagga

SEQ ID NO: 318916 - DNA, 75 bp, synthetic construct
  source 1..75: mol_type = other DNA
gcaccggggaaatgtggtggagatagtcattgaaggggcttacgaggtggtgggcgtgtttgaccggattgagga

SEQ ID NO: 318917 - DNA, 75 bp, synthetic construct
  source 1..75: mol_type = other DNA
cgggaaatggaaggtaaatttgtcgaatggggcaaacctccaacgcttgacggcatgacaggtcacgctggcgag

SEQ ID NO: 318918 - DNA, 75 bp, synthetic construct
  source 1..75: mol_type = other DNA
ctgacatgcacgtgtaacagttatttttggggccgaactttgcgcgaggacttgccgggccgcttttttacgata

SEQ ID NO: 318919 - DNA, 75 bp, synthetic construct
  source 1..75: mol_type = other DNA
tcaaatgtggacagacgctcaaaaaaactaaacagaaatatggccattatggattaggggtagatcagcatcaaa

SEQ ID NO: 318920 - DNA, 75 bp, synthetic construct
  source 1..75: mol_type = other DNA
gagctgcactgatggtcaggtatgaagatgaaaataaaacgccggtgacgcctgaacagataattactccccgtc

SEQ ID NO: 318921 - DNA, 75 bp, synthetic construct
  source 1..75: mol_type = other DNA
aagtcgatcgcaccattcgtcataccaaaatgaacgtgggcgatgtgcaacgtctgtcagtcgcggtcgtggtga

SEQ ID NO: 318922 - DNA, 75 bp, synthetic construct
  source 1..75: mol_type = other DNA
atgctgcaaaccagatacgtcgtgaccgtccactgacacatgaagagctgatgcaccatgtgccggggatttttg

SEQ ID NO: 318923 - DNA, 75 bp, synthetic construct
  source 1..75: mol_type = other DNA
gggaaggctttcagccgttcttcgcctgccagacccgtgtgcgcgaccagagccgccgggaatataccaaacata

SEQ ID NO: 318924 - DNA, 75 bp, synthetic construct
  source 1..75: mol_type = other DNA
ttcaggtgagcaagattgagcaacttaccaacgaggttaaacgtttcaccctggtttctcccgatggcaaactgc

SEQ ID NO: 318925 - DNA, 75 bp, synthetic construct
  source 1..75: mol_type = other DNA
ctggtggcaaccgatggcaaaccgctgcctgcgttcaccggaggaagtcacatcattgtgcagatgagcgatggt

SEQ ID NO: 318926 - DNA, 75 bp, synthetic construct
  source 1..75: mol_type = other DNA
agtacgcgcctgtttgcgcggtcggtccatccgtcggcgtattaatcatcccgaccgcttgaattacccaatgaa

SEQ ID NO: 318927 - DNA, 75 bp, synthetic construct
  source 1..75: mol_type = other DNA
caattgcatgatttttcagtcatctgggatgaagatcatgatgagcgaatcattaacgtaatcgaaaacatttac

SEQ ID NO: 318928 - DNA, 75 bp, synthetic construct
  source 1..75: mol_type = other DNA
tgatacgctgcattttgagcagtttgcaattgaagacaaaactggcgatgcatttacactggtacttgcccgttc

SEQ ID NO: 318929 - DNA, 75 bp, synthetic construct
  source 1..75: mol_type = other DNA
cactgctgagttcgccactcgatacgtctcgttatcagattgccgttcgactggaagaaaattcgcgcggtggtt

SEQ ID NO: 318930 - DNA, 75 bp, synthetic construct
  source 1..75: mol_type = other DNA
tacaggctgccaccgcaacgttagccgcaggctcaggtttcggctatatacattacctggaacccggctggcttg

SEQ ID NO: 318931 - DNA, 75 bp, synthetic construct
  source 1..75: mol_type = other DNA
atgcaggaaataacactggcagaagcctcactgcaagcgcaacaggtagaagtaatcagccgcatgattgagcgc

SEQ ID NO: 318932 - DNA, 75 bp, synthetic construct
  source 1..75: mol_type = other DNA
attatcgatgaagacgaagccaaagccacattagacgcactgcgccaaatggattacgacattaccagcgcgtga

SEQ ID NO: 318933 - DNA, 75 bp, synthetic construct
  source 1..75: mol_type = other DNA
aaaaattcgaacgcaaaccgatttactggatcctaagtgaagtcgcgaaacgtcttggccctgacgtctatcaaa

SEQ ID NO: 318934 - DNA, 75 bp, synthetic construct
  source 1..75: mol_type = other DNA
attctttttcttgccgacctccattattcccgctttgttccgctgaccttaatttcagaagccattaaccttggc

SEQ ID NO: 318935 - DNA, 75 bp, synthetic construct
  source 1..75: mol_type = other DNA
tattgggaacctggctggcttgaattaatccgtcaccgcctcgccttttttaaagacaacgctgctcctttcaaa

SEQ ID NO: 318936 - DNA, 75 bp, synthetic construct
  source 1..75: mol_type = other DNA
gaactctggcttgccgggatgcttatctcagcagaaattatcagtattgaacccgctacaaacatacggctctga

SEQ ID NO: 318937 - DNA, 75 bp, synthetic construct
  source 1..75: mol_type = other DNA
gcccaggcaccggcatcgcgccgttccgcgcctttatgcagcaacgtgctgccgacgaagcaccgggtaaaaact

SEQ ID NO: 318938 - DNA, 75 bp, synthetic construct
  source 1..75: mol_type = other DNA
aagtctggggccatagagattccaagttcaagtacctgatggtgatcaacgacgacaaccaaaaacgtgttcttg

SEQ ID NO: 318939 - DNA, 75 bp, synthetic construct
  source 1..75: mol_type = other DNA
cctatacccagacccatgacgaaatatctacacctgccattggccccgtcctggttactcaacatgccatcgatc

SEQ ID NO: 318940 - DNA, 75 bp, synthetic construct
  source 1..75: mol_type = other DNA
tggcaggcgatgaagattgaattagagcaacctcgtccggcatcattaccggtgccagctcctgcaattcaggta

SEQ ID NO: 318941 - DNA, 75 bp, synthetic construct
  source 1..75: mol_type = other DNA
ggaagtgattgccgaatttggtggcatggacaccgaagcggcggatgaatttttaagtgagctgcgcgtagagcg

SEQ ID NO: 318942 - DNA, 75 bp, synthetic construct
  source 1..75: mol_type = other DNA
atgaaatccacaccagcccgtatagcaaaggccgcgcgggggggggggagcctctctgttaaccagaaaattacc

SEQ ID NO: 318943 - DNA, 75 bp, synthetic construct
  source 1..75: mol_type = other DNA
gctgaaagatgaacagtcggtgcatcagattgccgctgaacgccgcgtctggatccaggtggtgaaaggcaatgt

SEQ ID NO: 318944 - DNA, 75 bp, synthetic construct
  source 1..75: mol_type = other DNA
atgttccggcgggcgagtttcagataatgagtgcgggtacgggtattcgtcactcagagtacaacccaagtagca

SEQ ID NO: 318945 - DNA, 75 bp, synthetic construct
  source 1..75: mol_type = other DNA
accagcgatggtctggcaatctgggatgagcaggcgatttccatccatgctgatagcgacagtgaaatcctgctg

SEQ ID NO: 318946 - DNA, 75 bp, synthetic construct
  source 1..75: mol_type = other DNA
acgaagcagaaaacagcgcgtcaggcgacgaactgaatcgttctccgttgatgtcagagggcacggcaaaggcct

SEQ ID NO: 318947 - DNA, 75 bp, synthetic construct
  source 1..75: mol_type = other DNA
cgtgagctgaataaacaccgggaaattgtcatgcagattaccgattcatccagcagtattgcatcggaaaagtga

SEQ ID NO: 318948 - DNA, 75 bp, synthetic construct
  source 1..75: mol_type = other DNA
ggtaaaagatgagcagtcgatacatcagattgccgctgaacgccgcgtctggatccaggtagtaaaaggcaatgt

SEQ ID NO: 318949 - DNA, 75 bp, synthetic construct
  source 1..75: mol_type = other DNA
accaccctggctgggataccctggataacagcaacggcatcgtctgggatatggcctggttgtatcgttacacca

SEQ ID NO: 318950 - DNA, 75 bp, synthetic construct
  source 1..75: mol_type = other DNA
tccctgcattttctctgcccgtttttccactgactcgcgcaattctctcagttactggtgcctccctgttaacgc

SEQ ID NO: 318951 - DNA, 75 bp, synthetic construct
  source 1..75: mol_type = other DNA
ggggtacgcaccggtgatacgggggcggcaggcatggccaccgatcccaccattatcgcggaatatgcagcacta

SEQ ID NO: 318952 - DNA, 75 bp, synthetic construct
  source 1..75: mol_type = other DNA
gtaaaggaatgcttcgtgaggatgttgcagagttggcaaatttaccacttacagagattgataagctaattaacc

SEQ ID NO: 318953 - DNA, 75 bp, synthetic construct
  source 1..75: mol_type = other DNA
ccattaaacttggtgaggtcactgtcgcttattgccaggaagacgtaaccctggaagcggttgatttcgtccgtg

SEQ ID NO: 318954 - DNA, 75 bp, synthetic construct
  source 1..75: mol_type = other DNA
atgtcccgttttcgtcgtgtaaatattgacggcaaatccgttactgaaaccgcagtatctgccgcagcacttaaa

SEQ ID NO: 318955 - DNA, 75 bp, synthetic construct
  source 1..75: mol_type = other DNA
agaccaggctatcaagctgggcgaagtaaccgtagctttctgccaggaaaacgtcaccttagaagacgttgattt

SEQ ID NO: 318956 - DNA, 75 bp, synthetic construct
  source 1..75: mol_type = other DNA
cccagcgtcttctgagtaaaggaatgtctcgggaagacgttgcagaggtgacaactttacctcttacagaggttg

SEQ ID NO: 318957 - DNA, 75 bp, synthetic construct
  source 1..75: mol_type = other DNA
aggaatgtctcgggaagacgttgcagaggtgacagctttatctcttgcagagattgataagctaattaactctaa

SEQ ID NO: 318958 - DNA, 75 bp, synthetic construct
  source 1..75: mol_type = other DNA
tcgcttattatctctccatctcctgtaaccattgcgatgaccccgcatgtacaaaagtctgccccagcggcgcaa

SEQ ID NO: 318959 - DNA, 75 bp, synthetic construct
  source 1..75: mol_type = other DNA
atggagtgggctcaacaccagtcagagccgcatgtacacgcaataatcatggtgaacgaaagaagcattaatggg

SEQ ID NO: 318960 - DNA, 75 bp, synthetic construct
  source 1..75: mol_type = other DNA
atggaattatacgataaagacgcgagtctatccacaaaatcacaagccgtaatcaatcacatcaatggtcgcaca

SEQ ID NO: 318961 - DNA, 75 bp, synthetic construct
  source 1..75: mol_type = other DNA
cagtgatagcggtcaccaaagaggcagagacagagcgcagggaattactatcctcacagataataaactcgaaca

SEQ ID NO: 318962 - DNA, 75 bp, synthetic construct
  source 1..75: mol_type = other DNA
aacgtaattaacccacttaaacaaacttcaatcaaagaagcgattgatcaagaacgtctccgcagagaaagagca

SEQ ID NO: 318963 - DNA, 75 bp, synthetic construct
  source 1..75: mol_type = other DNA
ccactgcggataataatcgtatcgttacaattgaagacgtttacacaatcgcattctcgcaaccaattcacaccg

SEQ ID NO: 318964 - DNA, 75 bp, synthetic construct
  source 1..75: mol_type = other DNA
taacctggtggtcggaaaacatgacttcgctgacgtggaaaacaagttcaaagagatgggatttgatcgcgtctt

SEQ ID NO: 318965 - DNA, 75 bp, synthetic construct
  source 1..75: mol_type = other DNA
tgcgttgctgattgaggcagaccctggctacaccgcacgggtagtcctggaagagctctgtaacctgctggggct

SEQ ID NO: 318966 - DNA, 75 bp, synthetic construct
  source 1..75: mol_type = other DNA
ggaacgcgcgattctcaccgcaagatgaaagataaatttgtgcgctgggataacccgccgacgctggacggcatg

SEQ ID NO: 318967 - DNA, 75 bp, synthetic construct
  source 1..75: mol_type = other DNA
ccaatgcggataataatcgcatcgtaactggccgggacatttacgaaatcgcattcacaccaccaattcacgcca

SEQ ID NO: 318968 - DNA, 75 bp, synthetic construct
  source 1..75: mol_type = other DNA
atagaaaggggattgccatttaacaccaacacacgacgtgttccagccaaagaaggttgcgattgggtgctaaag

SEQ ID NO: 318969 - DNA, 75 bp, synthetic construct
  source 1..75: mol_type = other DNA
atgaaagaagaattaacccttacagaaatttcccgcttatacggctatacaattaacgccgctaagaaatggtta

SEQ ID NO: 318970 - DNA, 75 bp, synthetic construct
  source 1..75: mol_type = other DNA
atacacgacgcgtaccagccaaagaagggacagaatgggtcttgaagaacatcattaatccgctcaaagaaactt

SEQ ID NO: 318971 - DNA, 75 bp, synthetic construct
  source 1..75: mol_type = other DNA
tgacctacgcccatctggagtgtgatatttgcgtgctgtatggcgcggcgggtctgggtaaaagcatgattctga

SEQ ID NO: 318972 - DNA, 75 bp, synthetic construct
  source 1..75: mol_type = other DNA
cgatatggctgatattgaagaacgtatttctgcctttgtgacccgtgaatgggaaaaggaaaacaaccgccgtat

SEQ ID NO: 318973 - DNA, 75 bp, synthetic construct
  source 1..75: mol_type = other DNA
aattatctaaaatgtatgggtattcccttccggctgttcagaaatggcgtgatcgtggtcttccgtataatacga

SEQ ID NO: 318974 - DNA, 75 bp, synthetic construct
  source 1..75: mol_type = other DNA
ggattttgcgcaggcgaccagccttgcggttgtcgtggttaatattcacggcgatgaaatttccgagctgtttaa

SEQ ID NO: 318975 - DNA, 75 bp, synthetic construct
  source 1..75: mol_type = other DNA
cgaagggcgtcaggagccgtgcgggaactgcgatatctgcctcgatccgccgaaacagtacgacggttcaaccga

SEQ ID NO: 318976 - DNA, 75 bp, synthetic construct
  source 1..75: mol_type = other DNA
tggtcgttcgctgtttaccgtctcggtgggcgggcagccaaaatattccgacggctttgggccaaaaccggcaga

SEQ ID NO: 318977 - DNA, 75 bp, synthetic construct
  source 1..75: mol_type = other DNA
ctccacgcagtaaaagccgtgatggatgatcatacctgcgcggtcgttgttgagccgattcagggagagggcggc

SEQ ID NO: 318978 - DNA, 75 bp, synthetic construct
  source 1..75: mol_type = other DNA
tgtcttattagccgttgatgaagcgcattgtatttcccaatggggtcacgatttccgcccggaatatgccgcgct

SEQ ID NO: 318979 - DNA, 75 bp, synthetic construct
  source 1..75: mol_type = other DNA
gaacgcctgatgctggataacttccttgagcatctggcgcactggaatcctgtcttattagccgttgatgaagcg

SEQ ID NO: 318980 - DNA, 75 bp, synthetic construct
  source 1..75: mol_type = other DNA
aggggcagttgcaggatatcgaacgtcataaactcaatgcgatgggcgcgtttgccgaagcgcaaacttgccgtc

SEQ ID NO: 318981 - DNA, 75 bp, synthetic construct
  source 1..75: mol_type = other DNA
ggaccggcgatctgtttgcttatatgcactacggcgtgacgccggatattctgacctctgcgaaagcgctaggtg

SEQ ID NO: 318982 - DNA, 75 bp, synthetic construct
  source 1..75: mol_type = other DNA
gcggtacgcagtgtcagttgccgggtggcagaagatgcgcagcgtatcagggcggcgctgaccacaaccggtcag

SEQ ID NO: 318983 - DNA, 75 bp, synthetic construct
  source 1..75: mol_type = other DNA
cgggtggcagaagatgcgcggcgtatccgtgcggcgctgactaccaccggtcagacgttactgacccgccagacg

SEQ ID NO: 318984 - DNA, 75 bp, synthetic construct
  source 1..75: mol_type = other DNA
ctggaaggcattcaggcgaaacgccagcgttttgttgaccatttgcagaagattgatcagcagtacgatgtgttt

SEQ ID NO: 318985 - DNA, 75 bp, synthetic construct
  source 1..75: mol_type = other DNA
gcaccggcgatctgtttgcttatatgcactatggcgtgacgccggatattctgacttccgcgaaagcgttaggtg

SEQ ID NO: 318986 - DNA, 75 bp, synthetic construct
  source 1..75: mol_type = other DNA
cgcgtggtgtttatgaactccggcacggaagctaacgaaaccgcctttaaactggcacgccattacgcctgtgtg

SEQ ID NO: 318987 - DNA, 75 bp, synthetic construct
  source 1..75: mol_type = other DNA
ttatcacgcagggctggaaaatgatgtccgtgccgatgtgcaggaaaaatttcagcgcgatgacctgcaaatagt

SEQ ID NO: 318988 - DNA, 75 bp, synthetic construct
  source 1..75: mol_type = other DNA
cgcatcgccgtgttctgcgaaggacgactgacgcaaatcctgacgaatcgcgatgacatgagcgaagaggagatt

SEQ ID NO: 318989 - DNA, 75 bp, synthetic construct
  source 1..75: mol_type = other DNA
ccgcttatttgcaacaagggctggggctgaagaagggcgatcgcgttgcgctgatgatgcctaacttattgcaat

SEQ ID NO: 318990 - DNA, 75 bp, synthetic construct
  source 1..75: mol_type = other DNA
aatacaccggcggcaccactggtgtggcgaaaggcgcgatgctgactcaccgcaatatgctggcgaacctggaac

SEQ ID NO: 318991 - DNA, 75 bp, synthetic construct
  source 1..75: mol_type = other DNA
aacgcgatgaaggagaatgtcagcaaccttgcgcacgaaacggtttttgaggtgcgcaacgtcaccagccgtgac

SEQ ID NO: 318992 - DNA, 75 bp, synthetic construct
  source 1..75: mol_type = other DNA
aaggacgactgacgcaaatcctgacgaatcgcgatgacatgagcgaagaggagattatggcatgggctttaccac

SEQ ID NO: 318993 - DNA, 75 bp, synthetic construct
  source 1..75: mol_type = other DNA
catcactgaaagccgccgggataacggttttttccccaacttttccatcgctcagaacatggcgatcagccgcag

SEQ ID NO: 318994 - DNA, 75 bp, synthetic construct
  source 1..75: mol_type = other DNA
ccggtcgcgattgcctggtcgtcatgcccactggtggcggaaaatccctttgctatcaaatccctgccttattgc

SEQ ID NO: 318995 - DNA, 75 bp, synthetic construct
  source 1..75: mol_type = other DNA
tggatcaactgcaagccaacggtgtagcggcggcgtgccttaactcgacgcaaaaccgagagcagcagcttgaag

SEQ ID NO: 318996 - DNA, 75 bp, synthetic construct
  source 1..75: mol_type = other DNA
gtccgtgccgacgtgcaggaaaaattccagcgtgatgacctgcaaattgtggtggctaccgtggccttcggcatg

SEQ ID NO: 318997 - DNA, 75 bp, synthetic construct
  source 1..75: mol_type = other DNA
gttgtatccgggtaaagagctggtggtgacggcattgccgctgtatcacattttcgcattgaccattaactgcct

SEQ ID NO: 318998 - DNA, 75 bp, synthetic construct
  source 1..75: mol_type = other DNA
ctggtggagtttcgtgatgagttaccgaaatctaacgtcggaaaaattttgcgacgagaattacgtgacgaagcg

SEQ ID NO: 318999 - DNA, 75 bp, synthetic construct
  source 1..75: mol_type = other DNA
ctttctgctggcggcggtatgcccgttcaacaggtggtggctgaacgttgggtgaaactgaccggacagtatctg

SEQ ID NO: 319000 - DNA, 75 bp, synthetic construct
  source 1..75: mol_type = other DNA
tttcccgaaaaatatgtatcagaagctgttgaaagatattccggggcaggtttatacgccgccgcagttggggac

SEQ ID NO: 319001 - DNA, 75 bp, synthetic construct
  source 1..75: mol_type = other DNA
tattctgcgggaggtggtcctggaggcacgggatgaaatccgcagcatggcggatgccctggcaaaaatcagggg

SEQ ID NO: 319002 - DNA, 75 bp, synthetic construct
  source 1..75: mol_type = other DNA
atgcaaaccatcaccatcgccccacccaagcgcagctggttctcgcttctgagctgggccgttgttctcgccgtg

SEQ ID NO: 319003 - DNA, 75 bp, synthetic construct
  source 1..75: mol_type = other DNA
gcggtacgaagcatctgttaccaggtggcagaagatgcgcggcgtatccgggcggcgctgaccaccaccggtcag

SEQ ID NO: 319004 - DNA, 75 bp, synthetic construct
  source 1..75: mol_type = other DNA
aagatacgcggcgtatccgggcggcgctgaccacaaccggtcagacgttactgacccgccagacgcgccgctttc

SEQ ID NO: 319005 - DNA, 75 bp, synthetic construct
  source 1..75: mol_type = other DNA
cccctgctggctcgatgaagatgacgaaaacctgcccgtggtgctcgatgccatcctgaaccaaggagcacgttt

SEQ ID NO: 319006 - DNA, 75 bp, synthetic construct
  source 1..75: mol_type = other DNA
tctttcccgtatgccggtgaatggctgacggaggaagaaatcagggcagtttttgatgcggtgcgcaatgcagta

SEQ ID NO: 319007 - DNA, 75 bp, synthetic construct
  source 1..75: mol_type = other DNA
ggctgtacttgcggcggtgcgcgatgcggtacgcagtgtcagttgccgggtggcagaagatgcacggcgtatccg

SEQ ID NO: 319008 - DNA, 75 bp, synthetic construct
  source 1..75: mol_type = other DNA
cactgatttatcgccacgcccgtaacctgctgctggcgcagggctggccggaggagactgatgttgatcagcgag

SEQ ID NO: 319009 - DNA, 75 bp, synthetic construct
  source 1..75: mol_type = other DNA
gcatcaacggcaacatatatcaacaaatctggcgaactgaaaacggcggaaattaatgagccacgatttgaaaaa

SEQ ID NO: 319010 - DNA, 75 bp, synthetic construct
  source 1..75: mol_type = other DNA
gaatggctgaccgaagacgaaatcagggcagttcttgatgcggtgcgcgatgctgtatgcagtgtcagttgccgg

SEQ ID NO: 319011 - DNA, 75 bp, synthetic construct
  source 1..75: mol_type = other DNA
gtttgaccgggatattctgcgggaggttgttctggaggcacgggatgaaatccgcagcatggcggatgcactggc

SEQ ID NO: 319012 - DNA, 75 bp, synthetic construct
  source 1..75: mol_type = other DNA
acgtgcggctggatgcgccccggctggcgacgttacttatcaaccgtcacggcggcgtactgccgccgcacctgg

SEQ ID NO: 319013 - DNA, 75 bp, synthetic construct
  source 1..75: mol_type = other DNA
acgctgaatgcactgatttgtcgccacgcccgtaacctgctgctggcgcagggctggccggaagagacggatgtt

SEQ ID NO: 319014 - DNA, 75 bp, synthetic construct
  source 1..75: mol_type = other DNA
gcatttacgtgcggctggatgcgccccggctggcgacgttacttatcaaccgtcacggcggcgtactgccgccgc

SEQ ID NO: 319015 - DNA, 75 bp, synthetic construct
  source 1..75: mol_type = other DNA
acttgcggcggtgcgcgatgcaatacgaagcatctgttacaggtggcagacgatgcgcggcgtatccgggcggcg

SEQ ID NO: 319016 - DNA, 75 bp, synthetic construct
  source 1..75: mol_type = other DNA
tgtgctgcgtataccggatgaaccgccccgccgctggtttgaccgtgatgttctgcgggaggtggtccgggaagc

SEQ ID NO: 319017 - DNA, 75 bp, synthetic construct
  source 1..75: mol_type = other DNA
acgccaaaacggtgctgcaaaaagtcactttcttgccgattaaccaggaatctgctgccactaaacgctatctcg

SEQ ID NO: 319018 - DNA, 75 bp, synthetic construct
  source 1..75: mol_type = other DNA
tggcagaagatacgcggcgtatccgggcggcgctgaccaccaccggtcagacattgctgacccgccagacgcgcc

SEQ ID NO: 319019 - DNA, 75 bp, synthetic construct
  source 1..75: mol_type = other DNA
gaaaatctgcccgtggtgctcgatgccatcctgaaccggggcgcacgtttttcggcggtggaaatgtatctggtc

SEQ ID NO: 319020 - DNA, 75 bp, synthetic construct
  source 1..75: mol_type = other DNA
tgcgtataccggatgaaccgccccgccgctggtttgacagggatattctgcgggaggtgatcctggaggcacggg

SEQ ID NO: 319021 - DNA, 75 bp, synthetic construct
  source 1..75: mol_type = other DNA
cccctgctggctcgatgaagacgatgaaaacctgcccgtggtgctcgatgccatcctgaaccggggcgcacgttt

SEQ ID NO: 319022 - DNA, 75 bp, synthetic construct
  source 1..75: mol_type = other DNA
aagatgcgcggcgtatccgggcggcgctgaccacaaccggtcagacgttgctgacccgccagacccgccgctttc

SEQ ID NO: 319023 - DNA, 75 bp, synthetic construct
  source 1..75: mol_type = other DNA
acggatgttgaccagcggaacccgaagtatccgggctggatcagcatttatgttctgctggatgcgccccggctg

SEQ ID NO: 319024 - DNA, 75 bp, synthetic construct
  source 1..75: mol_type = other DNA
ctggtcagtgagtgtgtggagcatatcctgtccagtgggctggcctgcgatgtgctgcgtataccggatgaaccg

SEQ ID NO: 319025 - DNA, 75 bp, synthetic construct
  source 1..75: mol_type = other DNA
gttctgcgggaggtggtccgggaagcccgggctgaaatccgcagcatggcggatgccctcgcaaaaatccggggc

SEQ ID NO: 319026 - DNA, 75 bp, synthetic construct
  source 1..75: mol_type = other DNA
aaattaacgcgcgacagggcgctggcaattgcgcgtagtcatggaattgccgcaacgaccaatccgggtttgaat

SEQ ID NO: 319027 - DNA, 75 bp, synthetic construct
  source 1..75: mol_type = other DNA
gaggaaggaaaattaggcgctgagaatttactcaagcgaatgagtgaagccgaaaagaaaaatactctactggtt

SEQ ID NO: 319028 - DNA, 75 bp, synthetic construct
  source 1..75: mol_type = other DNA
acccccgcggaaatgttatctgccgactatatccgccaacagtttcagcaaatgggctatcgcagcgatattcga

SEQ ID NO: 319029 - DNA, 75 bp, synthetic construct
  source 1..75: mol_type = other DNA
aatctggatggcgctgcgcactgaaggggcggcgaaatttatcgctatctggtggtgtctgctggcatttatcgc

SEQ ID NO: 319030 - DNA, 75 bp, synthetic construct
  source 1..75: mol_type = other DNA
atggtactgttcttcaaaggtgcattgtgtaactggctggtttgcctggcaatctggatggcgctgcgcactgaa

SEQ ID NO: 319031 - DNA, 75 bp, synthetic construct
  source 1..75: mol_type = other DNA
aaattaacccgtgatcgagcgctggcaattgcgcataatcatgggattgcagcgacaacaaatccaggtttgaat

SEQ ID NO: 319032 - DNA, 75 bp, synthetic construct
  source 1..75: mol_type = other DNA
cgctggttgtcttcttcgcgttctacaagatttacgacatctatgcggcaactgcggcgctaatcgtcgccacgg

SEQ ID NO: 319033 - DNA, 75 bp, synthetic construct
  source 1..75: mol_type = other DNA
gaactgcaggtaaggttgcgtatccgatttgataaatatgacggtagcgcaacaacttttcttggtgatgcgtat

SEQ ID NO: 319034 - DNA, 75 bp, synthetic construct
  source 1..75: mol_type = other DNA
gatcagccacaaaatccggcgttacgcctgcaggttatgtcggctgtgtatgtggcactgagtcgctgggagcca

SEQ ID NO: 319035 - DNA, 75 bp, synthetic construct
  source 1..75: mol_type = other DNA
attagtatgacctggatgatcctctgcctggcaggggcggtggctgtcggcttctttggtatcgcttactttaac

SEQ ID NO: 319036 - DNA, 75 bp, synthetic construct
  source 1..75: mol_type = other DNA
atggtattgaatataccgaagcagatattaatggttttgccgagtcagataccaaagatatgtttgataccgatg

SEQ ID NO: 319037 - DNA, 75 bp, synthetic construct
  source 1..75: mol_type = other DNA
ttaactgtgccattggttacttctttgtttcgatggaaattattccaccggttgcttatgccgtgccctggacta

SEQ ID NO: 319038 - DNA, 75 bp, synthetic construct
  source 1..75: mol_type = other DNA
gtctggctacgagcactctatcgctaacatgacgctgttcgcgctctcctggttcggcaaccacagcgaagccta

SEQ ID NO: 319039 - DNA, 75 bp, synthetic construct
  source 1..75: mol_type = other DNA
aaagagtctatgccaagagccttagacatagcaaaattcatagactccgatgaggctgcatttccaaactcaatc

SEQ ID NO: 319040 - DNA, 75 bp, synthetic construct
  source 1..75: mol_type = other DNA
atccagctggctaaccggctggatgtggacgaacgcaccatccgcaaggggaaatccggcgagaccagtatggta

SEQ ID NO: 319041 - DNA, 75 bp, synthetic construct
  source 1..75: mol_type = other DNA
gaaatccggcgagaccagtatggtattcaccacctggtgctgcctgtgctggctggccgggctgggaatgctgct

SEQ ID NO: 319042 - DNA, 75 bp, synthetic construct
  source 1..75: mol_type = other DNA
gccattatccgcagcgcatcctgcgcgaactggcaccgcgatatctcacatggggaggcagcagttgtgtggcat

SEQ ID NO: 319043 - DNA, 75 bp, synthetic construct
  source 1..75: mol_type = other DNA
ggtggcaacggcagggaaaaccatgagcactattgttgatgccgtcgcgagtgtcacacatatcatgcaggaaat

SEQ ID NO: 319044 - DNA, 69 bp, synthetic construct
  source 1..69: mol_type = other DNA
cgtctgtggtcagtctctgggggaagtgcgtgttccgcaccggggaaatgtggtggacagagtcattga

SEQ ID NO: 319045 - DNA, 75 bp, synthetic construct
  source 1..75: mol_type = other DNA
cccatatcatatgactcaagatgaaaacccactccgcgctgccatgattgtctttctcatgatgcagagaatcca

SEQ ID NO: 319046 - DNA, 75 bp, synthetic construct
  source 1..75: mol_type = other DNA
attgggttattggtatgctacgccgaaacgaatcgtccggttgcggacaaatttaatcaaactgaaacggctgcc

SEQ ID NO: 319047 - DNA, 75 bp, synthetic construct
  source 1..75: mol_type = other DNA
ggtggtgtctgctggcgtttatcgcttctggttacgagcactcagttgccaatatgacgctgttcgccctctcct

SEQ ID NO: 319048 - DNA, 75 bp, synthetic construct
  source 1..75: mol_type = other DNA
ccgccatgcgtcagcttaacagcactggctggatgcataaccggctacggatgatttcagccagttttctggtga

SEQ ID NO: 319049 - DNA, 75 bp, synthetic construct
  source 1..75: mol_type = other DNA
agcaaccgcaggcactggagggcggggcgggtagcatctggcttaatgagctgatctggcgcgagttctaccgcc

SEQ ID NO: 319050 - DNA, 75 bp, synthetic construct
  source 1..75: mol_type = other DNA
tgtaaagctggattatccagagccgattgtcgatcacaaagaagccagattacgaacgctggcagcgtatgaggc

SEQ ID NO: 319051 - DNA, 75 bp, synthetic construct
  source 1..75: mol_type = other DNA
tgaaagaaggtgcgcaggtagatctgaccgccaaccagttgacgctggcaaccgcgaaacagacattaacttata

SEQ ID NO: 319052 - DNA, 75 bp, synthetic construct
  source 1..75: mol_type = other DNA
ctgccagtgattatgagcagatcgattatgatctgcgaatggtattggcactgctgcaaaccgatgaggagctgc

SEQ ID NO: 319053 - DNA, 75 bp, synthetic construct
  source 1..75: mol_type = other DNA
cgtatcatacagtgctggcgcaagcatcagggatataatgagaccgccagtgctactatcgtttgcgcaggtacg

SEQ ID NO: 319054 - DNA, 75 bp, synthetic construct
  source 1..75: mol_type = other DNA
atgatttatttatggatgtttctcgctctgtgtatcgtttgtgtcagcggatatattggccaggtactaaatgta

SEQ ID NO: 319055 - DNA, 75 bp, synthetic construct
  source 1..75: mol_type = other DNA
gagcaaccacctgtttggcgtcggcgagggctatgggccgacgctggttctgctcgatgaggtccacacctacag

SEQ ID NO: 319056 - DNA, 75 bp, synthetic construct
  source 1..75: mol_type = other DNA
taatgttgaacaatgggaaacactttcattctggcaagggatgagagagtttgcgccggggagactgtcaaaacg

SEQ ID NO: 319057 - DNA, 75 bp, synthetic construct
  source 1..75: mol_type = other DNA
cgatcggcagaagtttaagcgttattacaccccgcttattaacctcattgaagaggtgttgaatggggggagaaa

SEQ ID NO: 319058 - DNA, 75 bp, synthetic construct
  source 1..75: mol_type = other DNA
tatgatgcgcagatgttttagcgtggaagctcgtcgtattggagcagaaaaaactctgcatcaacaggcgagaac

SEQ ID NO: 319059 - DNA, 75 bp, synthetic construct
  source 1..75: mol_type = other DNA
gctactggcagagtttttgaaagataagtgtggcgttgaagaatgccggttaaatctgcaatcaacagaagatag

SEQ ID NO: 319060 - DNA, 75 bp, synthetic construct
  source 1..75: mol_type = other DNA
gcttgaaagttgatttagatgagaaagtggcgaatttatctatcagccacaagcagatgctggaaattgccaaaa

SEQ ID NO: 319061 - DNA, 75 bp, synthetic construct
  source 1..75: mol_type = other DNA
cgccgccattattggtatggtcatcatagccagcggtattatcattatgaatctgttctcaaaaatgggcagtga

SEQ ID NO: 319062 - DNA, 75 bp, synthetic construct
  source 1..75: mol_type = other DNA
cccgcagtttagcattgagcaaatttcaccgtcagtggctattctcgactctgacgacggaatggggcattcggc

SEQ ID NO: 319063 - DNA, 75 bp, synthetic construct
  source 1..75: mol_type = other DNA
gtaatcggatcttcaagttactggggctgcagcctgttggtgaagtctggggagtaggacgcagactgacggaaa

SEQ ID NO: 319064 - DNA, 75 bp, synthetic construct
  source 1..75: mol_type = other DNA
tgggaaaaaccatcaaggttgttaaaccgtcgaaggtcatgaccactcgggccgacattcgccggatcaatgata

SEQ ID NO: 319065 - DNA, 75 bp, synthetic construct
  source 1..75: mol_type = other DNA
aaggcatcggtgtggtggcagaagtgggtccaggtgtcacctcattaaaaccaggcgatcgtgccagcgtggcgt

SEQ ID NO: 319066 - DNA, 75 bp, synthetic construct
  source 1..75: mol_type = other DNA
actttctgctgttacagcacgaagatgaagtgtttctggcgcagcgtccgccaagcggattgtggggtggcttat

SEQ ID NO: 319067 - DNA, 75 bp, synthetic construct
  source 1..75: mol_type = other DNA
ggcgtggaacggtttaatcaggcgatgatggatttgggcgcgatgatttgcacgcgttcgaagccgaaatgttcg

SEQ ID NO: 319068 - DNA, 75 bp, synthetic construct
  source 1..75: mol_type = other DNA
ttagtgacttaagtgaagttgttgatgattttatttcttttttgaatgattcaaatctattgatagataataata

SEQ ID NO: 319069 - DNA, 75 bp, synthetic construct
  source 1..75: mol_type = other DNA
ttgagggattaaggaatagtagtgaaaaatttaaagccagagtgttggctgagtatgaaaataatacatcagaag

SEQ ID NO: 319070 - DNA, 75 bp, synthetic construct
  source 1..75: mol_type = other DNA
gcagcttttacatggactttctaaatttaactatttatatggagctaatggtgcaggtaaaacaactataagtaa

SEQ ID NO: 319071 - DNA, 75 bp, synthetic construct
  source 1..75: mol_type = other DNA
aaagatgccgtgggtgcgcatcatgttgctggttattcttacttgcttgcttttctatatgtggcgaattccggt

SEQ ID NO: 319072 - DNA, 75 bp, synthetic construct
  source 1..75: mol_type = other DNA
ctgtaccgctcatggtttggcagttatttacgcttctggcagaaacatcatgccatgccacgtggagcgaaaccg

SEQ ID NO: 319073 - DNA, 75 bp, synthetic construct
  source 1..75: mol_type = other DNA
attgagattgcaatcttcgaatatataaatggcttttataatccacgccgaagacattcaacactcggctctgat

SEQ ID NO: 319074 - DNA, 75 bp, synthetic construct
  source 1..75: mol_type = other DNA
ggcgtggaacggtttaatcaggcgatgatggatttaggcgcgatgatttgtacgcgctcgaagccgaaatgttcg

SEQ ID NO: 319075 - DNA, 75 bp, synthetic construct
  source 1..75: mol_type = other DNA
ttgccgccgccaacaatagctggtcgctttatccgggcaaaaaaccgaaacagacgctgccggagcgcaccggct

SEQ ID NO: 319076 - DNA, 75 bp, synthetic construct
  source 1..75: mol_type = other DNA
ttgctggttattcttacttgcttgcttttctatatgtggcgaattccggtgattgatgaaaagcaagaaaagcac

SEQ ID NO: 319077 - DNA, 75 bp, synthetic construct
  source 1..75: mol_type = other DNA
aatttgaaaatactagcaagtattgccttgcacagcgatataattcttttgtggattacgaagtaaaaaaaaata

SEQ ID NO: 319078 - DNA, 75 bp, synthetic construct
  source 1..75: mol_type = other DNA
tcgggtacttggataaagaaaaaatcgatcattgttataatatttcagatatagtttgttttccctctaggttag

SEQ ID NO: 319079 - DNA, 75 bp, synthetic construct
  source 1..75: mol_type = other DNA
gggcgtagatgttccggtttatggcgttccaatcaatacccgtgaagcccttggcgttctgcactttaaaggctt

SEQ ID NO: 319080 - DNA, 75 bp, synthetic construct
  source 1..75: mol_type = other DNA
aaacgcgattcctgaatatccagcttctgcagaacagcatggatgcgccgaaaatcatcggatctttcccttgta

SEQ ID NO: 319081 - DNA, 75 bp, synthetic construct
  source 1..75: mol_type = other DNA
gcgacatgaagaagtggaaaggcgttggctacgactttgaaatcgtgaaagccgaagagcttcaggaatatctgg

SEQ ID NO: 319082 - DNA, 75 bp, synthetic construct
  source 1..75: mol_type = other DNA
atgctggctggtttgcacatcctgatgatcttctgaatgatgttgcagagccagagccagagccagagccagagc

SEQ ID NO: 319083 - DNA, 75 bp, synthetic construct
  source 1..75: mol_type = other DNA
ggtgttattagccgttgatgaagcgcactgtatctcccaatgggggcacgatttccgcccggaatacgctgccct

SEQ ID NO: 319084 - DNA, 75 bp, synthetic construct
  source 1..75: mol_type = other DNA
aacctgctgaaacgtacgtaccggcgtaggcaccagaatgtgatgcagaaaaggaataaccctatgatgacgcta

SEQ ID NO: 319085 - DNA, 75 bp, synthetic construct
  source 1..75: mol_type = other DNA
tttattgcttcggtcttgtgtgctttcggaatggcatcagacatcagtccgattagcagggcttttaagtatgcg

SEQ ID NO: 319086 - DNA, 75 bp, synthetic construct
  source 1..75: mol_type = other DNA
gattatccggtgaaggttcgcaaacttatccgccgtttgcgccgtatccgcatcgaccgactaattagccgcatc

SEQ ID NO: 319087 - DNA, 75 bp, synthetic construct
  source 1..75: mol_type = other DNA
acccttgatccatccccagacaatatgcggcgcgttggtcgtggccgccgtcgccgtggtgtttgttattgcatg

SEQ ID NO: 319088 - DNA, 75 bp, synthetic construct
  source 1..75: mol_type = other DNA
tttgcaaacggtggtgtcggtcttgggctggcagtgaatcttgatgtcgaaagtaacatcaatatttctaacaac

SEQ ID NO: 319089 - DNA, 75 bp, synthetic construct
  source 1..75: mol_type = other DNA
tctgtttccttccggggttagcatttgctgcgaatcctggcggtatcacgcttcagtgtggtggctacaaattag

SEQ ID NO: 319090 - DNA, 75 bp, synthetic construct
  source 1..75: mol_type = other DNA
cactacacatataacggcacctacaataatgccgctgactctcatgttgtggatgtttacaacatgggcacggct

SEQ ID NO: 319091 - DNA, 75 bp, synthetic construct
  source 1..75: mol_type = other DNA
agcaggtattacgctgactcagagttatgagtgggaagatatcgacgacaacactgtcagtactggtgtaaacag

SEQ ID NO: 319092 - DNA, 75 bp, synthetic construct
  source 1..75: mol_type = other DNA
gataacgccatgcaaaccactgcaacattcgacaattccacactgatgggcgatgtattcttctcaagtaatttt

SEQ ID NO: 319093 - DNA, 75 bp, synthetic construct
  source 1..75: mol_type = other DNA
gatgcttttttttgtaaaaaaacaagcattaacaatgatgactgcataaagaaaacatacaacaagaatatctat

SEQ ID NO: 319094 - DNA, 75 bp, synthetic construct
  source 1..75: mol_type = other DNA
tcatttcaggcaaaaaaaatatgcctggcatgatacagtgcccctgatactttgtgttgctgctgctatcgcctg

SEQ ID NO: 319095 - DNA, 75 bp, synthetic construct
  source 1..75: mol_type = other DNA
ctgcctacatctactcttctgctcacttcgcgaacaacgtctttgttgacggtagcttgagctactctcacttca

SEQ ID NO: 319096 - DNA, 75 bp, synthetic construct
  source 1..75: mol_type = other DNA
ttcctgaatgtccaactgctgcagaatagcatggacgcgccgaaagttatcggctctttcccatgcaaaaaagtt

SEQ ID NO: 319097 - DNA, 75 bp, synthetic construct
  source 1..75: mol_type = other DNA
gggttcgagtatatccatcgaccgggcaccgaaacgcgtttcctgaacgtccagcttctgcagaacagcatggac

SEQ ID NO: 319098 - DNA, 75 bp, synthetic construct
  source 1..75: mol_type = other DNA
gtaccgaaacgcgtttcctgaacgtccaactgctgcagaacagcatggacgcgccgaaaatcatcggctctttcc

SEQ ID NO: 319099 - DNA, 75 bp, synthetic construct
  source 1..75: mol_type = other DNA
aatctcgctttctgaacgtccagcttctgcaaaacagcatggatgcgccgaagattatcggatccttcccctgcg

SEQ ID NO: 319100 - DNA, 75 bp, synthetic construct
  source 1..75: mol_type = other DNA
tcctgaatgtccagcttctgcagaacagcatggatgcgccgaaaatcataggatctttcccttgtaaaaaagtgg

SEQ ID NO: 319101 - DNA, 75 bp, synthetic construct
  source 1..75: mol_type = other DNA
ttgcaatgcgcaggttacaagctggagctaattcctgattcaatgtttaggattaatggggaatacgttacgtca

SEQ ID NO: 319102 - DNA, 75 bp, synthetic construct
  source 1..75: mol_type = other DNA
tgatcaccgcaaggctgaaataacggttggaaagatttttgataaggtgccgccgtctgtctggcgactcgtgaa

SEQ ID NO: 319103 - DNA, 75 bp, synthetic construct
  source 1..75: mol_type = other DNA
cgctcaatcatgtgctcgacggttatcaccgcttccgccgatacgctccacgcatgttgcgcctgctcgatctgc

SEQ ID NO: 319104 - DNA, 75 bp, synthetic construct
  source 1..75: mol_type = other DNA
gcgccagttcgagcctggctcgaactcttcgtcggccaaccggctgctcgaccggctcgaatatctgcaacgcat

SEQ ID NO: 319105 - DNA, 75 bp, synthetic construct
  source 1..75: mol_type = other DNA
gtatcgggaggcagggggaaattcgcgatcgcacgacagaggggcagcactaccgaatcgctgggctcaatttat

SEQ ID NO: 319106 - DNA, 75 bp, synthetic construct
  source 1..75: mol_type = other DNA
agtgggaagcggcgattgctgatgccatagtcgaaacccatgacaggatcgtaggaaaaacctggcgggaagcga

SEQ ID NO: 319107 - DNA, 75 bp, synthetic construct
  source 1..75: mol_type = other DNA
gctaccggttcgctccgcgcatccgcgacctgccatccaaacggctctacgcgttcaatccgtcggccgccccgg

SEQ ID NO: 319108 - DNA, 75 bp, synthetic construct
  source 1..75: mol_type = other DNA
aggaatggctggcagaccggcaagctcgcctcgacatgcggttgcgcgagcttggccgtgccgctcgcgcaggca

SEQ ID NO: 319109 - DNA, 75 bp, synthetic construct
  source 1..75: mol_type = other DNA
atgttaacagtgtgtttatcacttggggttgcgatgacgacgaacgcgcattttagaggtgaagaattgaagaag

SEQ ID NO: 319110 - DNA, 75 bp, synthetic construct
  source 1..75: mol_type = other DNA
atgttaacagtatgtttatcacttggggttgcgatgacgacgaacacgcattttagaggtgaagaattgaagaag

SEQ ID NO: 319111 - DNA, 75 bp, synthetic construct
  source 1..75: mol_type = other DNA
gtagcgccctgcacaacggctaccggatgcagtacgtcaaaccagaactggtgccggaagatttagctttcctgc

SEQ ID NO: 319112 - DNA, 75 bp, synthetic construct
  source 1..75: mol_type = other DNA
gtggatgcgctggttaatcgtagtcgccgcgcccctaaccttaagaaccgtaccgatgagctaactgagcaggcc

SEQ ID NO: 319113 - DNA, 75 bp, synthetic construct
  source 1..75: mol_type = other DNA
atcaaaaatggctggttacacaccggcgacatcgcggtgatggatgaagaaggattcctgcgcattgtcgatcgt

SEQ ID NO: 319114 - DNA, 75 bp, synthetic construct
  source 1..75: mol_type = other DNA
gtatgatattgattatcatagtggtagcatcggtttgccggtgccgtcgacggaagccaaactggtggatgatga

SEQ ID NO: 319115 - DNA, 75 bp, synthetic construct
  source 1..75: mol_type = other DNA
atgatgctggcttatgggtaattctttgcccgcgcgtggcgaaaactcatccaaaggtcattagctggagttacg

SEQ ID NO: 319116 - DNA, 75 bp, synthetic construct
  source 1..75: mol_type = other DNA
atgcttcaaatgaaaggttcaaaaatgaagataaatagcatccaatggccagtaacattctttgcaacatcattt

SEQ ID NO: 319117 - DNA, 75 bp, synthetic construct
  source 1..75: mol_type = other DNA
caactgctaagcacggtcgacgatgacaacgatgcaaatctgcttttcgtgaagtcagaaatcataaagttacga

SEQ ID NO: 319118 - DNA, 75 bp, synthetic construct
  source 1..75: mol_type = other DNA
acgatgacaacgatgcaaatctgcttttcgtgaagtcagaaatcataaagttacgaagagagagagaaatcgacg

SEQ ID NO: 319119 - DNA, 75 bp, synthetic construct
  source 1..75: mol_type = other DNA
aaaacattaatcgcttttgtcgtatctgttatcacatttatagcaggtgaagcaaatttcgaaattataaaagtt

SEQ ID NO: 319120 - DNA, 75 bp, synthetic construct
  source 1..75: mol_type = other DNA
ctgcaacccttggttcttcttttatcttttttaattcaaagatagagcatctcgcatcaggaatagcatttccat

SEQ ID NO: 319121 - DNA, 75 bp, synthetic construct
  source 1..75: mol_type = other DNA
gttgttaatagcaattataaacataacaacaatgataaatattatttgctttaatctaaatctaaatggttcagc

SEQ ID NO: 319122 - DNA, 75 bp, synthetic construct
  source 1..75: mol_type = other DNA
gatgatattacgcacagaaatctacgcgacggcctgtattatcggcggtattgtccacgctacagctcattacac

SEQ ID NO: 319123 - DNA, 75 bp, synthetic construct
  source 1..75: mol_type = other DNA
ttaatgctggaatattataaagttgagaaggcaatttgtatttacacgaacagaaaagtttcccatgccctgaat

SEQ ID NO: 319124 - DNA, 75 bp, synthetic construct
  source 1..75: mol_type = other DNA
atgaatattaacgctggccatgagataacctcaaaagcccgtattatacatcagattcaactaattagaggcatc

SEQ ID NO: 319125 - DNA, 75 bp, synthetic construct
  source 1..75: mol_type = other DNA
tttcctttgtgctgacggatctggaacgcctcgatccggttcgagtaatgattgaaaactacgaacctggtaagg

SEQ ID NO: 319126 - DNA, 75 bp, synthetic construct
  source 1..75: mol_type = other DNA
atgaaggtagaaaaaatagatgttctttcctttgtgttgacagagctggagcgtctcgatccggttcgagtgatg

SEQ ID NO: 319127 - DNA, 75 bp, synthetic construct
  source 1..75: mol_type = other DNA
tttgtcggcattggcgtgaatggtaatgactccaacttattgatagtgttttatgttcagataatgcccgatgac

SEQ ID NO: 319128 - DNA, 75 bp, synthetic construct
  source 1..75: mol_type = other DNA
ctgccagtggccccgctcggcctgaaagccgccccggcgatattttccgggataaatacggaagtcagataacgg

SEQ ID NO: 319129 - DNA, 75 bp, synthetic construct
  source 1..75: mol_type = other DNA
gataaatacggcagcacgataacgattaaaaccgtcgatgattttcgtgtgacctatatccgcgaaggttatgcg

SEQ ID NO: 319130 - DNA, 75 bp, synthetic construct
  source 1..75: mol_type = other DNA
atgcaagtagaaatctttggcgacgagacgccgggtgcagtgtttgaaggcacgtatatcgttctgcccgcgaag

SEQ ID NO: 319131 - DNA, 75 bp, synthetic construct
  source 1..75: mol_type = other DNA
catgcggtagccgacctcggtgcgttaagtggcgatctcgaccgtctggcgcgcgggcgtaaagcgcgggtgcaa

SEQ ID NO: 319132 - DNA, 75 bp, synthetic construct
  source 1..75: mol_type = other DNA
cccgcgaagatgcggtggagtttttcgccaagctggggtttgtgaatcagggagaaatcaccacaccaactacca

SEQ ID NO: 319133 - DNA, 75 bp, synthetic construct
  source 1..75: mol_type = other DNA
acaggccgcaccacacaaacagcccaccagcaacgcaaaggcacgggcgaacattcagaaaatgaaaaacatgat

SEQ ID NO: 319134 - DNA, 75 bp, synthetic construct
  source 1..75: mol_type = other DNA
ggcgttaaataaaacccgtaccgttgacgtagatatgtggaactactggcattttgcccttgctggtacgttggt

SEQ ID NO: 319135 - DNA, 75 bp, synthetic construct
  source 1..75: mol_type = other DNA
tggattgcgactaaaatcgcgccgtttattaccggaatggcgaaagacgttaacttcaaatttgccgaaggctcc

SEQ ID NO: 319136 - DNA, 75 bp, synthetic construct
  source 1..75: mol_type = other DNA
gatcccggtgattattgccgacctgtggattgctaccaaaatcgcgccgtttattaccggaatggcgaaagacgt

SEQ ID NO: 319137 - DNA, 75 bp, synthetic construct
  source 1..75: mol_type = other DNA
tagcaaaccgattagcggaaaaccccatgcggtagccgaccttggtgccttaagtggcgatctcgaccgtctggc

SEQ ID NO: 319138 - DNA, 75 bp, synthetic construct
  source 1..75: mol_type = other DNA
cagcaaaccaatcagcggtaaaccacacgcggtagccgacctcggtgccttaagcggcgatctcgaccgtctggc

SEQ ID NO: 319139 - DNA, 75 bp, synthetic construct
  source 1..75: mol_type = other DNA
ggaaaccggcaatcagaatccgcaccacacgttgtttgccgggagtttattctcactggcgacgctcaccggttg

SEQ ID NO: 319140 - DNA, 75 bp, synthetic construct
  source 1..75: mol_type = other DNA
gcaatgcgatggcgcgaaataaatatatttattgccttgctgaaagcgcaatggttgtacgtgcgggaatgaccg

SEQ ID NO: 319141 - DNA, 75 bp, synthetic construct
  source 1..75: mol_type = other DNA
aggtatgggaggatgcgcgccggataaaggcggcgctgaccacgcgcggggaaacgctgttttatcgccagaccc

SEQ ID NO: 319142 - DNA, 75 bp, synthetic construct
  source 1..75: mol_type = other DNA
cagctacagatgagcgtttcgtccatcagtcagacggtatcaaaactggaagatgagttgcaggtaaagctgtga

SEQ ID NO: 319143 - DNA, 75 bp, synthetic construct
  source 1..75: mol_type = other DNA
gtttttctattgttgccattttttacacgagtacgactcttgcggctcctaaaggtatctgtactccggataatg

SEQ ID NO: 319144 - DNA, 75 bp, synthetic construct
  source 1..75: mol_type = other DNA
tcctggccagtggcctcgtctgcgatgtgctgcgtataccggatgaaccgccccgccgctggtttgacagggata

SEQ ID NO: 319145 - DNA, 75 bp, synthetic construct
  source 1..75: mol_type = other DNA
ctgtccggcagtcagtggcagtcgctgccggtacttccggcagacggaacgcaggtgtctttcccgtatgccggt

SEQ ID NO: 319146 - DNA, 75 bp, synthetic construct
  source 1..75: mol_type = other DNA
gcctggtggtgaaggaaagcgatcacccctgctggctcgatgaggacgacgaaaacctgcccgtggtgctcgatg

SEQ ID NO: 319147 - DNA, 75 bp, synthetic construct
  source 1..75: mol_type = other DNA
ctcgggatatcttattaccgcgaacgaaaataaggttggaacgacatttaacaccactgtaactaatggatcctc

SEQ ID NO: 319148 - DNA, 75 bp, synthetic construct
  source 1..75: mol_type = other DNA
ggcatggcataaccggcgacggcaatgcgcaagatgggatgcgatgggcagagagccgtgctttgctgctcatgg

SEQ ID NO: 319149 - DNA, 75 bp, synthetic construct
  source 1..75: mol_type = other DNA
ttcttgcggatgcgcatatccgctacagcaagccgattagcggtaaacctcatgcggtagccgacctcggtgcct

SEQ ID NO: 319150 - DNA, 75 bp, synthetic construct
  source 1..75: mol_type = other DNA
acgttgctgacccgccagacgcgccgctttcgcctggttgtgaaggaaagcgatcacccctgctggctcgatgaa

SEQ ID NO: 319151 - DNA, 75 bp, synthetic construct
  source 1..75: mol_type = other DNA
tgaacaacctgattattttcgcgccgcaacgcgcttttgaccaacgatctgatatcttttattaccgtgtgatcc

SEQ ID NO: 319152 - DNA, 75 bp, synthetic construct
  source 1..75: mol_type = other DNA
gccaaagaagccgaagaaaaagtcggagcatggctggattatgctaccgactgcttttttggcaagtggggactt

SEQ ID NO: 319153 - DNA, 75 bp, synthetic construct
  source 1..75: mol_type = other DNA
tgaaggaacagccggttcatttaaccagtccgtatctgcattgcgcaaaaagaacgtgcaggcaattggcgctat

SEQ ID NO: 319154 - DNA, 75 bp, synthetic construct
  source 1..75: mol_type = other DNA
aatttatctctctggcactggctgaatgggcagagatacacgcagtaaaactggagttcatccagccgggtaagc

SEQ ID NO: 319155 - DNA, 75 bp, synthetic construct
  source 1..75: mol_type = other DNA
ctatgtcgttaatggtaagtacttgatctacaccaagagtattaaatccattgatgcgatggcagaccttatccg

SEQ ID NO: 319156 - DNA, 75 bp, synthetic construct
  source 1..75: mol_type = other DNA
taagcaggcaagcgaagtctttgcagtattgattaataaagataaagcggccggcatttctttatttgatgctaa

SEQ ID NO: 319157 - DNA, 75 bp, synthetic construct
  source 1..75: mol_type = other DNA
tggctggcttgaactgtggggcgcatgggtttattcaggtcgtcttgaaaagcgcatgagcagcgtaatagcgaa

SEQ ID NO: 319158 - DNA, 75 bp, synthetic construct
  source 1..75: mol_type = other DNA
gagataccagcagaaaaaatattaggcgcaccagagtggaaagactacaaccccaaatactctggagccacatat

SEQ ID NO: 319159 - DNA, 75 bp, synthetic construct
  source 1..75: mol_type = other DNA
ctggcatgccagcctcttcccgtgggggtttcagaatgccctcatctggggggcggtctgggccacattttacgg

SEQ ID NO: 319160 - DNA, 75 bp, synthetic construct
  source 1..75: mol_type = other DNA
tggtatcagcgcagcttatctcctcgtcgtcatttgtactacagcaccagatacccgttattgctggtctggggc

SEQ ID NO: 319161 - DNA, 75 bp, synthetic construct
  source 1..75: mol_type = other DNA
aatcatttaattatctatcagtcagcacagtatgctcagaaaaagagcctttgcctgattacccggaagctttat

SEQ ID NO: 319162 - DNA, 75 bp, synthetic construct
  source 1..75: mol_type = other DNA
atgggatggcctgtacccgatattccagaaagaaaaatgctacctgagcctgtttatcgacgctggattatatta

SEQ ID NO: 319163 - DNA, 75 bp, synthetic construct
  source 1..75: mol_type = other DNA
gatacattagctgtaaataatggctctcaggtaaatgttactgattcctctctggtctcagataccattggttta

SEQ ID NO: 319164 - DNA, 75 bp, synthetic construct
  source 1..75: mol_type = other DNA
tgtgaatgttgatcagttcgatactgaagctttccgtactgataaactggaactgaccagcggcaacattgctga

SEQ ID NO: 319165 - DNA, 75 bp, synthetic construct
  source 1..75: mol_type = other DNA
atttcgacaccgtctttaaaggcgatactgttaacggtaccatttctacttattacttgaatcatgattacgcta

SEQ ID NO: 319166 - DNA, 75 bp, synthetic construct
  source 1..75: mol_type = other DNA
gcagacatcgccacttggtataatcgaaaatctttttccgtcattaaagaaaattatgacatcatcgaactgttc

SEQ ID NO: 319167 - DNA, 75 bp, synthetic construct
  source 1..75: mol_type = other DNA
agcaaaaaatgccaatagagttaataaaaacctggtgttacctgatgaatatatcgctctagagtttaaaggtat

SEQ ID NO: 319168 - DNA, 75 bp, synthetic construct
  source 1..75: mol_type = other DNA
atctaagagagcaattgcatcctactatcacgcgactgcaaagccacgcaagatgtgtggacgcggtggcgaggg

SEQ ID NO: 319169 - DNA, 75 bp, synthetic construct
  source 1..75: mol_type = other DNA
ggtcgggtgaatcagcgttttggtatgggctatgtggtggaagtgattcgcggtgctaataaccagcgtatccgc

SEQ ID NO: 319170 - DNA, 75 bp, synthetic construct
  source 1..75: mol_type = other DNA
gcgtggaagattatgcgcaagatatccaccttcatccgttctacatcatccatagccacgaagatttcatcgaac

SEQ ID NO: 319171 - DNA, 75 bp, synthetic construct
  source 1..75: mol_type = other DNA
gcttcaatcacatcttcttcgatggagagggcactgcaggtacattcaaccagtcagtgtcggcgcttcgtaaga

SEQ ID NO: 319172 - DNA, 75 bp, synthetic construct
  source 1..75: mol_type = other DNA
ttttagcggcggggcacgccgttcttgcctgtggagggatggtgcagtcaggccgcccgttgaagcaggaaccca

SEQ ID NO: 319173 - DNA, 75 bp, synthetic construct
  source 1..75: mol_type = other DNA
gtgagcggtgcgctgtcgctggtaagctacgatgtgcaaatctctccgcttaacgcgatttggctgattacgctc

SEQ ID NO: 319174 - DNA, 75 bp, synthetic construct
  source 1..75: mol_type = other DNA
ctgggcggtaatgcaccgctgtggtgggggatcgcgctgctggtgctcggcatgatcaccgcgtttgtcggtggt

SEQ ID NO: 319175 - DNA, 75 bp, synthetic construct
  source 1..75: mol_type = other DNA
gcctgctaacaccaccgtttctcaaccaatgatcacgttgctgctgattgcctgcccgctgctgccattcatcat

SEQ ID NO: 319176 - DNA, 75 bp, synthetic construct
  source 1..75: mol_type = other DNA
tgggctatgtggtggaagtgattcgcggcgctaataaccagcgtatccgcgactatggtcatgacaaactaaaag

SEQ ID NO: 319177 - DNA, 75 bp, synthetic construct
  source 1..75: mol_type = other DNA
gcctgctaatacaaccgtttctcaaccaatgatcacgttgctgctgattgcctgcccacttctgccattcatcat

SEQ ID NO: 319178 - DNA, 75 bp, synthetic construct
  source 1..75: mol_type = other DNA
gctgggcattttaaccctgtcactgctgggtggtaacgcaccgctgtggtgggggatcgcgctgctggtgctcgg

SEQ ID NO: 319179 - DNA, 75 bp, synthetic construct
  source 1..75: mol_type = other DNA
aaacaagcaagaacttggtttgggctggcatgcaagaatgggcataaggaaggttgcgaacgttatgaaaataac

SEQ ID NO: 319180 - DNA, 75 bp, synthetic construct
  source 1..75: mol_type = other DNA
agggattctacgctttctaggttgaaatcagcaggtgaaaacggagatgtagaagctcagtatgcgttggggctc

SEQ ID NO: 319181 - DNA, 75 bp, synthetic construct
  source 1..75: mol_type = other DNA
atatcacccacattaatctccacatcaactcaccgggtggcgatgtctttgaaggcatcgccatttttaatgccc

SEQ ID NO: 319182 - DNA, 75 bp, synthetic construct
  source 1..75: mol_type = other DNA
ctgcgcaaaatgatgttgatgcgcaatttttgcttggggagatgtatgacgatggtctcggggtaagccaagact

SEQ ID NO: 319183 - DNA, 75 bp, synthetic construct
  source 1..75: mol_type = other DNA
ttggtatgaaaaagccgctgaccaaaatgatccgcgtgcgcaggccaaactcggtgtgatgtatgcaaatggtct

SEQ ID NO: 319184 - DNA, 75 bp, synthetic construct
  source 1..75: mol_type = other DNA
agaacaaaatttcgccaatgctcagtttaatcttggtatgctctattacaaaggtgagggagttaatcaaaactt

SEQ ID NO: 319185 - DNA, 75 bp, synthetic construct
  source 1..75: mol_type = other DNA
gtccggacaaccatactgcgacctggggaatcaactatacaaaaatattggtttgtctgtgggcatttttactgt

SEQ ID NO: 319186 - DNA, 75 bp, synthetic construct
  source 1..75: mol_type = other DNA
ttttcaggaactgcaactctccagcaaactggcagttcatgatgtgctgaccaatatttataatcggcgctactt

SEQ ID NO: 319187 - DNA, 75 bp, synthetic construct
  source 1..75: mol_type = other DNA
atccgccccgatgacatcttcgcgcgtctggaaggtgaagagttcggtttactatttaccgaattgaatgctgcc

SEQ ID NO: 319188 - DNA, 75 bp, synthetic construct
  source 1..75: mol_type = other DNA
gcgggtggtcagggtgaggcggatatttatatttatgacgagattggtttctggggagttaccgcgaagcagttt

SEQ ID NO: 319189 - DNA, 75 bp, synthetic construct
  source 1..75: mol_type = other DNA
gtgccggaactgaacaacagcgtcagcaggccaccgacagccagcatgaagaataaatcctggttcaggatgctg

SEQ ID NO: 319190 - DNA, 75 bp, synthetic construct
  source 1..75: mol_type = other DNA
tttatatttatgacgagattggtttctggggagttaccgcgaagcagtttgtcagcgaactgaatgctctgggtg

SEQ ID NO: 319191 - DNA, 75 bp, synthetic construct
  source 1..75: mol_type = other DNA
agctggatcgccattggcctgacattaggcgcgtggatcaactggaaactggtggccgggcggttgcgtgtgcat

SEQ ID NO: 319192 - DNA, 75 bp, synthetic construct
  source 1..75: mol_type = other DNA
caacgtctgggctatgacgaattcctcggcaaaggtacgctgactgtttccgaaattttcttcacctccccaagt

SEQ ID NO: 319193 - DNA, 75 bp, synthetic construct
  source 1..75: mol_type = other DNA
ggctctgcaccagaacgcggagataacgctattttcaaaatgggcccgattcttggcgaattacaagaactgtcc

SEQ ID NO: 319194 - DNA, 75 bp, synthetic construct
  source 1..75: mol_type = other DNA
ccgttggtattggtaacatcaaaaactgggaattcgacccgtacgaaggtatggaaaccgatgaacttatcggcg

SEQ ID NO: 319195 - DNA, 75 bp, synthetic construct
  source 1..75: mol_type = other DNA
cctgtatatcccaatcattattttgattgtgaactctttcaacagctcgcgctttggcatcaactggcagggttt

SEQ ID NO: 319196 - DNA, 75 bp, synthetic construct
  source 1..75: mol_type = other DNA
gctttggcatcaactggcagggttttaccactaaatggtatagcctgctgatgaacaacgacagcctgttacagg

SEQ ID NO: 319197 - DNA, 75 bp, synthetic construct
  source 1..75: mol_type = other DNA
cgagttatgaaattctgccgttaaaaatttattcgatggtcaaagtcggcgtatcgccggaagttaacgcgctgg

SEQ ID NO: 319198 - DNA, 75 bp, synthetic construct
  source 1..75: mol_type = other DNA
ttgaagaaatatattgatacgaactacataacagcaaaagaacatgagaaaataaaattacttataaatgaaatt

SEQ ID NO: 319199 - DNA, 75 bp, synthetic construct
  source 1..75: mol_type = other DNA
ttcgctggtgctgtacgccgaacacgagtttaacgcttccacctttaccagccgggtgattgcgggcactggctc

SEQ ID NO: 319200 - DNA, 75 bp, synthetic construct
  source 1..75: mol_type = other DNA
agtgatcaaacaaaagagcatcgaaaacgtggatatgctcaaagggctgaactttgttgccattatctcactgat

SEQ ID NO: 319201 - DNA, 75 bp, synthetic construct
  source 1..75: mol_type = other DNA
cgttgcgctgtagcagatagctgcgccgtctctattgaccgccgtctgacctggggcgaaacctgggaaggcgcg

SEQ ID NO: 319202 - DNA, 75 bp, synthetic construct
  source 1..75: mol_type = other DNA
atgaatatcagcacagaaacccgtgaaattctgcgtaattacaaggccgtgattaatacgcggcgtcgtgagatg

SEQ ID NO: 319203 - DNA, 75 bp, synthetic construct
  source 1..75: mol_type = other DNA
tggtggagttcaaggaagaattttatctaagataactaatgtaattaaatttcctgtcatcgatacagcattaaa

SEQ ID NO: 319204 - DNA, 75 bp, synthetic construct
  source 1..75: mol_type = other DNA
tctggatgaatataattacaccatctggtatatcagccgcggtattgaggtttccagtaaactgtttgtggtttc

SEQ ID NO: 319205 - DNA, 75 bp, synthetic construct
  source 1..75: mol_type = other DNA
gcggtttgcgaaacggcgttgcgccttacatcccggcggccttttgccgggatgccaggagcgcaggccacggcg

SEQ ID NO: 319206 - DNA, 75 bp, synthetic construct
  source 1..75: mol_type = other DNA
tgtatcagcccccggcgacagggactcaaacaggtgcagggcaccggacacaacaacgagcagggacccgccgca

SEQ ID NO: 319207 - DNA, 75 bp, synthetic construct
  source 1..75: mol_type = other DNA
caggcaggagaacaacagaactgacagtaatcagggcagcagtaatcagagtcagaacaggaggaaaaagagaat

SEQ ID NO: 319208 - DNA, 75 bp, synthetic construct
  source 1..75: mol_type = other DNA
acaattgctgtttacctttggcgtagagccaaatattggcaaagaaaaaccgacctttgtgtaccactttccagc

SEQ ID NO: 319209 - DNA, 75 bp, synthetic construct
  source 1..75: mol_type = other DNA
accctgagttcactatgctggagtggtatcgaccgcactatgatatgtaccggttgatgaacgaggtggacgatc

SEQ ID NO: 319210 - DNA, 75 bp, synthetic construct
  source 1..75: mol_type = other DNA
agcccggaatatcacatgaaacgcctgctggtagcaggttgtggtcccgtattccagttatgccgcagcttccgt

SEQ ID NO: 319211 - DNA, 75 bp, synthetic construct
  source 1..75: mol_type = other DNA
gatctggcagaacattgcgaattcgaagaagtggcgcatctgctgatccacggcaaactgccgacccgtgacgaa

SEQ ID NO: 319212 - DNA, 75 bp, synthetic construct
  source 1..75: mol_type = other DNA
gcgaaaactggaatcgccgacgccgttcaccgtcaactcagtgggctctgctggcgccagaaagaacaacctccg

SEQ ID NO: 319213 - DNA, 75 bp, synthetic construct
  source 1..75: mol_type = other DNA
cgtgcctggtgccgttcgttccgcgtcgtaagccagacggcaaaggctatcagttgatcatgctgccgccagagt

SEQ ID NO: 319214 - DNA, 75 bp, synthetic construct
  source 1..75: mol_type = other DNA
caggccacggcgcgacaagggtggcgcgaccgttccggtcgctgcaaacccggggttttgcgtcagggatggaag

SEQ ID NO: 319215 - DNA, 75 bp, synthetic construct
  source 1..75: mol_type = other DNA
ttcgctggtgctgtacgccgaacacgagtttaacgcctccacctttaccagccgggtgattgcgggcaccggctc

SEQ ID NO: 319216 - DNA, 75 bp, synthetic construct
  source 1..75: mol_type = other DNA
cgtgcgtaccgtgctggaagccttaccagcggcatcgcacccgatggatgtcatgcgcaccggcgtttccgcgct

SEQ ID NO: 319217 - DNA, 75 bp, synthetic construct
  source 1..75: mol_type = other DNA
caacatcctatcgaccagaacctgattgacgccctggaagttggtatgcctgactgttccggcgtggcgttaggt

SEQ ID NO: 319218 - DNA, 75 bp, synthetic construct
  source 1..75: mol_type = other DNA
cgggatgttctggctgatgttgcttattatttctgcaaaaatggcgcattcactctggcgctatatctccttttc

SEQ ID NO: 319219 - DNA, 75 bp, synthetic construct
  source 1..75: mol_type = other DNA
atgctgcttattatttctgcaaaagtggcgcattcactctggcgttatttctccttttctgcggaatatacggtg

SEQ ID NO: 319220 - DNA, 75 bp, synthetic construct
  source 1..75: mol_type = other DNA
atgcaaaaacgttcgataaaaaagacgtgcaattaatcagccagcaaaactggtttggcaaatatcagcccgtcg

SEQ ID NO: 319221 - DNA, 75 bp, synthetic construct
  source 1..75: mol_type = other DNA
gactatgccttatatgtcgtagattactgcccgaataataatactgcgagttggggtattaactacaccaagatt

SEQ ID NO: 319222 - DNA, 75 bp, synthetic construct
  source 1..75: mol_type = other DNA
gtgtatgtggatggcgttgccgcctcgatggcatctgtgattgcgatggccggtgatacggtcattatgccggaa

SEQ ID NO: 319223 - DNA, 75 bp, synthetic construct
  source 1..75: mol_type = other DNA
gcagtacaccgacgaccagtccgaagaataattcctggttcaggatgcaggctggtcaccagagtgacgcggata

SEQ ID NO: 319224 - DNA, 75 bp, synthetic construct
  source 1..75: mol_type = other DNA
caaccgcgaccatgtgatgctgcgctatcagggtaaaaccgaacgtctgagtctggcagaggaggaacgcccccc

SEQ ID NO: 319225 - DNA, 75 bp, synthetic construct
  source 1..75: mol_type = other DNA
ggatcgcctttggtgccagacccggcgcggttattgaagaaggcggcaaacagcaggtctatttgcagggtgaac

SEQ ID NO: 319226 - DNA, 75 bp, synthetic construct
  source 1..75: mol_type = other DNA
caaaagcttccccagcgtgcactgacgccctggctgaaattgcatcagcaaaaacaaaacaatgctgttctgtca

SEQ ID NO: 319227 - DNA, 75 bp, synthetic construct
  source 1..75: mol_type = other DNA
atgctgcttattatttctgcaaaagtggcgcattcactctggcgctatttctccttttctgcggaatatacggcg

SEQ ID NO: 319228 - DNA, 75 bp, synthetic construct
  source 1..75: mol_type = other DNA
agtgacgaagcaaagcaagctgttgctgaacctgctgtcagtgcgccagttgagatcccgactgccgtgcgtcag

SEQ ID NO: 319229 - DNA, 75 bp, synthetic construct
  source 1..75: mol_type = other DNA
gggattgtcggttatgcagtgaagccgggggcagatcgttctctgttcgatgccagcggtttcaaggaaggcgat

SEQ ID NO: 319230 - DNA, 75 bp, synthetic construct
  source 1..75: mol_type = other DNA
acggcgattacactttcgggcagggtgacaacaccttccttatcgacagcccggagtgcgttgcccaggccgtaa

SEQ ID NO: 319231 - DNA, 75 bp, synthetic construct
  source 1..75: mol_type = other DNA
atgaaaattaccgtattgggatgcggtgccttagggcaattatggcttacagcactttgcaaacagggtcacgac

SEQ ID NO: 319232 - DNA, 75 bp, synthetic construct
  source 1..75: mol_type = other DNA
tggaattgcccgaatggtgaattacgtcatcatccgcaagaaattatgcagatatgcgaagaagtcgcggcagtg

SEQ ID NO: 319233 - DNA, 75 bp, synthetic construct
  source 1..75: mol_type = other DNA
tctatgagcctggatatcccacgccttgtgctggatggcattgaagtggtcggttcgctggtcggcacgcgccag

SEQ ID NO: 319234 - DNA, 75 bp, synthetic construct
  source 1..75: mol_type = other DNA
aaagtatgcggtcctgtttgggagtctgtgcaaccagtaatatggccgatcattggtgagttggttaagaaaggg

SEQ ID NO: 319235 - DNA, 75 bp, synthetic construct
  source 1..75: mol_type = other DNA
tccgagctggagacagcggtaaaagacctgggcaaagcggtgtcttataagggaatgtatggcgatgtggccatc

SEQ ID NO: 319236 - DNA, 75 bp, synthetic construct
  source 1..75: mol_type = other DNA
aacactcatgcacgcggtctgcgcacctatggctgtattcaggatgcagatgcattgagtgagggtattaatgcg

SEQ ID NO: 319237 - DNA, 75 bp, synthetic construct
  source 1..75: mol_type = other DNA
gtcaaggagaagctggatacccgtcgcggctctcattccgagctggagacagcggtaaaagacctgggcgaagcg

SEQ ID NO: 319238 - DNA, 75 bp, synthetic construct
  source 1..75: mol_type = other DNA
gttgctgataatattcataaaaagaaaaatattaatattatccatcaacatactaaaaatatactctccgctaag

SEQ ID NO: 319239 - DNA, 75 bp, synthetic construct
  source 1..75: mol_type = other DNA
tctgacaacatcaaaacagggatagaaccactcgacgaaatgttaggcggcattaacgctactgatctggtgctt

SEQ ID NO: 319240 - DNA, 75 bp, synthetic construct
  source 1..75: mol_type = other DNA
cttgaggtcgtaaaagagacgatgaaagattttgattcccggtattcaaaattaaaggtaacgaaagacaagatt

SEQ ID NO: 319241 - DNA, 75 bp, synthetic construct
  source 1..75: mol_type = other DNA
aaagagttgcgcgtgccagtagctgcgctggctcagttatcccgccgcgttgaggaacgaccgaacaagcgccct

SEQ ID NO: 319242 - DNA, 75 bp, synthetic construct
  source 1..75: mol_type = other DNA
cggcgagtcttgatttgttgcgacaagcggactgcgacacaggacaaggcttcctgttcgccaagccgatgccgg

SEQ ID NO: 319243 - DNA, 75 bp, synthetic construct
  source 1..75: mol_type = other DNA
ggcccgcgccgcgtccgcttgcatccagtcaatgcaacaacgtccggcgacaagccgattctccccacgaaataa

SEQ ID NO: 319244 - DNA, 75 bp, synthetic construct
  source 1..75: mol_type = other DNA
gctggtcggtgatgagattggtaatgaaaatttcgtaccgctaatgcaaacggcgcgatcgtgcccgtctgctgc

SEQ ID NO: 319245 - DNA, 75 bp, synthetic construct
  source 1..75: mol_type = other DNA
acgcttcttgagcctgtaataaatgaactgcaagaaatagacatcttgcacgacagatataaagagccacacacc

SEQ ID NO: 319246 - DNA, 75 bp, synthetic construct
  source 1..75: mol_type = other DNA
tagaccatgcatacagcgcacttgcttacagtgaaaacatgcttgaaatattgcgcttatggcttgaaacgcttg

SEQ ID NO: 319247 - DNA, 75 bp, synthetic construct
  source 1..75: mol_type = other DNA
tgatgattgtatacccgcaagtggatatatatcatcgttgctgaactatttaaaaaaaatgaatagtaaaagcgt

SEQ ID NO: 319248 - DNA, 75 bp, synthetic construct
  source 1..75: mol_type = other DNA
gcgaatacatggagattatcgtttcaaaaaaccgtcacggaaaaaccgggactgtttaccagcgttttgacgaca

SEQ ID NO: 319249 - DNA, 75 bp, synthetic construct
  source 1..75: mol_type = other DNA
aatgattgactacatcgggttaatgaagctggctaaggccgaacgtcacgatctcgctgtagggcaattgtcgtg

SEQ ID NO: 319250 - DNA, 75 bp, synthetic construct
  source 1..75: mol_type = other DNA
atgcgtgatatttacctcgaaacaatagaccgcgcatttcttgcactttctcacagtgaaagcatgatggaaata

SEQ ID NO: 319251 - DNA, 75 bp, synthetic construct
  source 1..75: mol_type = other DNA
aagcagcaaaaaccagtgaaaccaatgcaaagacaagcgagactgcagcggcgaactcggcgaaagcatcggcag

SEQ ID NO: 319252 - DNA, 75 bp, synthetic construct
  source 1..75: mol_type = other DNA
taccaaaagagatggctacgcctgcagagttcgctgaatgggaaggtatctcccgtggctctgtttaccagaaaa

SEQ ID NO: 319253 - DNA, 75 bp, synthetic construct
  source 1..75: mol_type = other DNA
aactgacaccggtggctgttgcagcaggtcgccgtctctctgaacgcctgtttaataacaagccggatgagcatc

SEQ ID NO: 319254 - DNA, 75 bp, synthetic construct
  source 1..75: mol_type = other DNA
ccgttttggcggcaatctggcattaacgctgggaacctttggtggggtttatattgctggcggtatcgtgccgcg

SEQ ID NO: 319255 - DNA, 75 bp, synthetic construct
  source 1..75: mol_type = other DNA
tagccatctggaaattattaacgattttaccgctgtatcaatggcgatcccgatgctgaaaaaagagcatctgat

SEQ ID NO: 319256 - DNA, 75 bp, synthetic construct
  source 1..75: mol_type = other DNA
agattgttgatgaaatctgcgattttgtggtgaatcaacaggctgttttcctcggcggtcactacatcttacagg

SEQ ID NO: 319257 - DNA, 75 bp, synthetic construct
  source 1..75: mol_type = other DNA
ggccgcgtattcatcctttacctcaagtacaaaaaagaccaagcaagcaaaaacatggacaagtctgcattcaat

SEQ ID NO: 319258 - DNA, 75 bp, synthetic construct
  source 1..75: mol_type = other DNA
gcatctggtacatgtcgataaacgctggattagtttaccgggcgaaggcggtcacgttgattttgcgccaaacag

SEQ ID NO: 319259 - DNA, 75 bp, synthetic construct
  source 1..75: mol_type = other DNA
tgtcgctgttttgcgtcattatgggccgttttggcggcaatctggcgctcaatctcgggacatttggcggcgtgt

SEQ ID NO: 319260 - DNA, 75 bp, synthetic construct
  source 1..75: mol_type = other DNA
atacgctgaaagcccagcggctggctgaggagataaataataaacgggaggcgatatgcacaaagcatctcctgt

SEQ ID NO: 319261 - DNA, 75 bp, synthetic construct
  source 1..75: mol_type = other DNA
ttgacgaaaatgaccgagccatcgttgcccgcacgtccagtcaggacgtcggggtcgatcctagagcggaagtgg

SEQ ID NO: 319262 - DNA, 75 bp, synthetic construct
  source 1..75: mol_type = other DNA
cataaaaaacatgtggctctgatcgaaccgaagttccacgaaatggaagatgaaggggctgaatatctgctggca

SEQ ID NO: 319263 - DNA, 75 bp, synthetic construct
  source 1..75: mol_type = other DNA
cgattcgagcaaaatctcaccgagaaaagcaactcgcaactgtactggcatacccggtttaacccagacgatcag

SEQ ID NO: 319264 - DNA, 75 bp, synthetic construct
  source 1..75: mol_type = other DNA
ctgatggaaaacgcggcgaagcaatttaacaacattggcgcaacgactcctgtcgttccatttcgtattttgctg

SEQ ID NO: 319265 - DNA, 75 bp, synthetic construct
  source 1..75: mol_type = other DNA
gccctttattcaggggctgaaagagtttgcgccggggcgcatttccaagcgctatgccgtttactccgacaatga

SEQ ID NO: 319266 - DNA, 75 bp, synthetic construct
  source 1..75: mol_type = other DNA
gcggctcccctcttccagcgagctccaggaggccttaaatgcgatacgtaaggccagcagccatccgcagcgccg

SEQ ID NO: 319267 - DNA, 75 bp, synthetic construct
  source 1..75: mol_type = other DNA
ttggcggctggggaatggggctgattgtgccgctgattagcgcggcaattgcctattctattgccgatcgtcccg

SEQ ID NO: 319268 - DNA, 75 bp, synthetic construct
  source 1..75: mol_type = other DNA
tttgcgcttttttgtggctggcggtaagtcacgctttggctgcggatagcacgattactatccgcggctatgtca

SEQ ID NO: 319269 - DNA, 75 bp, synthetic construct
  source 1..75: mol_type = other DNA
cctgtttaaagagaccgacattctggacatgatagataggcacagcgcgatcctgactcaggatctcagtgatga

SEQ ID NO: 319270 - DNA, 75 bp, synthetic construct
  source 1..75: mol_type = other DNA
cgtgaaatttgtcggctcaatcatccctccgtttggcatcacactttcgttcttactgacacgccataaatacac

SEQ ID NO: 319271 - DNA, 75 bp, synthetic construct
  source 1..75: mol_type = other DNA
gaacgcgacgaagagtttgacgaactgagcgatcaaaagctgaaagatgaagagatcactttcaccctcgaataa

SEQ ID NO: 319272 - DNA, 75 bp, synthetic construct
  source 1..75: mol_type = other DNA
tgccttaaccgctacggcgtgtttgcccgctcccatgccgcgcctacgcagtcggcatggacctataaaattcgc

SEQ ID NO: 319273 - DNA, 75 bp, synthetic construct
  source 1..75: mol_type = other DNA
gaacctggcattatcctttctcccctggcaccaccagcgatgaccgtattaacaccgattactggcaggatttac

SEQ ID NO: 319274 - DNA, 75 bp, synthetic construct
  source 1..75: mol_type = other DNA
atgtcaaaactaccgtacactggaaacgccactggcaacgggcgcggatggcccatgagttcgcttatggagaac

SEQ ID NO: 319275 - DNA, 75 bp, synthetic construct
  source 1..75: mol_type = other DNA
ttggcagctaataacggtggctggcagtgggcggcttctacgggtactgatgcagcgccgtattttcgtattttc

SEQ ID NO: 319276 - DNA, 75 bp, synthetic construct
  source 1..75: mol_type = other DNA
atgagcgggcgcgggatgtgcaggttgagagaactctgcgtaacgtggtgtgtgaaggatttgatgacagcgtga

SEQ ID NO: 319277 - DNA, 75 bp, synthetic construct
  source 1..75: mol_type = other DNA
atgtcaaaaccagcgaacactggaaacgacactggcaacgggcgcggatggcccatgagttcgcttatggagaac

SEQ ID NO: 319278 - DNA, 75 bp, synthetic construct
  source 1..75: mol_type = other DNA
cttctgaagaattaaccctacccggcaatcatgcagcggcatctgctgatggcttagttgtcgataatgccaacg

SEQ ID NO: 319279 - DNA, 75 bp, synthetic construct
  source 1..75: mol_type = other DNA
aatggaacatcaaagctcaggacgctcgcagtaaagcagtggcagagcaaggtcgcaagactcaggagtacaccc

SEQ ID NO: 319280 - DNA, 75 bp, synthetic construct
  source 1..75: mol_type = other DNA
ccgggtggctcctgagttaccagcacaaccaaacgttaatgatttctttggtgatgacgctttgtacagcaagta

SEQ ID NO: 319281 - DNA, 75 bp, synthetic construct
  source 1..75: mol_type = other DNA
atttggttagacaggaatgcccatccatcacggcttatacagcgaatgaaacgcgagttcccctcgaagcggaag

SEQ ID NO: 319282 - DNA, 75 bp, synthetic construct
  source 1..75: mol_type = other DNA
cccacccggggatttgtgatgtctgtcagtctgctttagggggactctttccatccggtagtttccttcctcccc

SEQ ID NO: 319283 - DNA, 75 bp, synthetic construct
  source 1..75: mol_type = other DNA
cgctggggccgtatattggtgcacaaattacgggggccgacttaacgcgcccgttaagcgataatcagtttgaac

SEQ ID NO: 319284 - DNA, 75 bp, synthetic construct
  source 1..75: mol_type = other DNA
gtgccagggaaagcggtgcatgagccgtggaagtgggcgcagaaagcaggtgtgaagctggattatccgcaaccg

SEQ ID NO: 319285 - DNA, 75 bp, synthetic construct
  source 1..75: mol_type = other DNA
aagccatttatcgttttaacgggtctgatctaagattttttacccgctttgatcatcaattttcgccagcgaaaa

SEQ ID NO: 319286 - DNA, 75 bp, synthetic construct
  source 1..75: mol_type = other DNA
gcatttatcgaattattcaaaccagtatacgatgcctatgaagctcaccttaaagagcagcgcgagatggacttc

SEQ ID NO: 319287 - DNA, 75 bp, synthetic construct
  source 1..75: mol_type = other DNA
aatgtgaacataacctcagcacgcatccgctttacgatctgtggggtatttggcgtcgacgtgctaataaaatat

SEQ ID NO: 319288 - DNA, 75 bp, synthetic construct
  source 1..75: mol_type = other DNA
tgaacaggccgccctgacaaaatttgccaataaaaaaggctatccactgacgctgcgtcattaccgtctgtttgt

SEQ ID NO: 319289 - DNA, 75 bp, synthetic construct
  source 1..75: mol_type = other DNA
gttatgagaacatcacacttgaggagtacgagcggagagtcgatgccgcaaaacaatgtacagcgatcatgcagg

SEQ ID NO: 319290 - DNA, 75 bp, synthetic construct
  source 1..75: mol_type = other DNA
agttctccgatggtgatgcataatggtttgcaaagaatatgcgcgaacccagaatgtcaggagatagaaattgtc

SEQ ID NO: 319291 - DNA, 75 bp, synthetic construct
  source 1..75: mol_type = other DNA
catcagcgttttgcggcttatgttggtctggtgcctagacagtcaggcactggagggaaggttcgactaccggga

SEQ ID NO: 319292 - DNA, 75 bp, synthetic construct
  source 1..75: mol_type = other DNA
cctcgctcgctttcattgccgccagctacggcgctttggcttaatcaccagagcgccggaagcgattacctctta

SEQ ID NO: 319293 - DNA, 75 bp, synthetic construct
  source 1..75: mol_type = other DNA
aattcgtctgcacgcgtgctggcgttgtatatcgctacaccacgccagtgggcgacgcataacatgtcgccgcgt

SEQ ID NO: 319294 - DNA, 75 bp, synthetic construct
  source 1..75: mol_type = other DNA
cggcgaaactgccgcgtactgaaggtctgaccggctccgatcgccgcgaattccttgcacaggccaaagagattg

SEQ ID NO: 319295 - DNA, 75 bp, synthetic construct
  source 1..75: mol_type = other DNA
tggtaaacgtgagcaaagccagctgctgggcgtacgtttgcgttcagaaggtaaagattattacgcaatccgcgc

SEQ ID NO: 319296 - DNA, 75 bp, synthetic construct
  source 1..75: mol_type = other DNA
cgctgcaggttattatgttgcgatccgtcatggtcgtagctataccacgcgttatatgcacttgcgtaagattct

SEQ ID NO: 319297 - DNA, 75 bp, synthetic construct
  source 1..75: mol_type = other DNA
caactgaagacttaaccctgtccggcaatcaagcagcggcatctgctgatggctcagttgttgataatgccaacg

SEQ ID NO: 319298 - DNA, 75 bp, synthetic construct
  source 1..75: mol_type = other DNA
tgtatatcgctacaccacgccagtgggcggcgcataatgtgtcgccgcgtcaggctgaatttatcaatgcacaac

SEQ ID NO: 319299 - DNA, 75 bp, synthetic construct
  source 1..75: mol_type = other DNA
ccgagcagattaatgccgatggactggtgatcctcaccgatgctgatgcggtatatgaaaactggggaacgccgc

SEQ ID NO: 319300 - DNA, 75 bp, synthetic construct
  source 1..75: mol_type = other DNA
ggggcaacgccttactccagcgcggcgaagcgctgacggcagaaaatcaatatcgcaatattgccagtgctgtac

SEQ ID NO: 319301 - DNA, 75 bp, synthetic construct
  source 1..75: mol_type = other DNA
tgagagaacgctgcgtaacgtggtgtgtgaaggatttgacgacagcgtgatcctgccgccgggggcggtgatgac

SEQ ID NO: 319302 - DNA, 75 bp, synthetic construct
  source 1..75: mol_type = other DNA
atgactacccatctggtctggtttcgccaggatttacgtcagcacgataatctcgcgctggctgccgcctgccgc

SEQ ID NO: 319303 - DNA, 75 bp, synthetic construct
  source 1..75: mol_type = other DNA
gccaggatttacgtcagcacgataatctcgcgctggctgccgcctgccgcaattcgtctgcacgcgtgctggcgt

SEQ ID NO: 319304 - DNA, 75 bp, synthetic construct
  source 1..75: mol_type = other DNA
atgagggttagatttcgctggaaagcagagcaagtaacgccattcagagagccatcaatgccgctgcaggttgag

SEQ ID NO: 319305 - DNA, 75 bp, synthetic construct
  source 1..75: mol_type = other DNA
aatggccgtttacagcgtgaattctccttttattcccactttcaaaaaagcccttcagttaaagggggttattca

SEQ ID NO: 319306 - DNA, 75 bp, synthetic construct
  source 1..75: mol_type = other DNA
ggcttgttacggaaggcgggattattgttgcgggcagtcttcttctgaccggggctatctggcttgcgcagcagc

SEQ ID NO: 319307 - DNA, 75 bp, synthetic construct
  source 1..75: mol_type = other DNA
ggggctatctggcttgcgcagcagcagattgatgaatcagttttacaggtcaggcaaagcctgcgtgaagcgttt

SEQ ID NO: 319308 - DNA, 75 bp, synthetic construct
  source 1..75: mol_type = other DNA
ttgagagttcgctttatctggaaagctcggcaattgacaccattcagagagccgtcaatgccattagaggtagaa

SEQ ID NO: 319309 - DNA, 75 bp, synthetic construct
  source 1..75: mol_type = other DNA
gcaccagccgtttgtccgccagcctggcaacgggcgggttatcgcctcgccagtgtttgcatcgcctgttggcgg

SEQ ID NO: 319310 - DNA, 75 bp, synthetic construct
  source 1..75: mol_type = other DNA
tatgcggtgttctctaaagtgaccatcgcgccagacgacgagcgtgtgctgcttggtgttgccggttttcaggcg

SEQ ID NO: 319311 - DNA, 75 bp, synthetic construct
  source 1..75: mol_type = other DNA
gtgaactgccttcgaaggaaaaacaggtagtcagagaaggtgtgacgacactactttggtttgaacacccagcag

SEQ ID NO: 319312 - DNA, 75 bp, synthetic construct
  source 1..75: mol_type = other DNA
gacagcatcttccgcgtgcgtgacgatgcgaatacattgcgtatcgagccactgccgtattcgctcgaagagtaa

SEQ ID NO: 319313 - DNA, 75 bp, synthetic construct
  source 1..75: mol_type = other DNA
gcatcgtcagcttttccgcacgttggtgtccattaatgcgcttgaggcgatccgtttctatgtaagttttgcatg

SEQ ID NO: 319314 - DNA, 75 bp, synthetic construct
  source 1..75: mol_type = other DNA
gtgctaatgatgcaaccaaagagcctatgttcctcggacaatctgtcaacgtggcacgttacgatcagcaaaaat

SEQ ID NO: 319315 - DNA, 75 bp, synthetic construct
  source 1..75: mol_type = other DNA
gcttggtgttgccggttttcaggcacgcgccgcgctggcgaatctctttagtgaactgccttcgaaggaaaaaca

SEQ ID NO: 319316 - DNA, 75 bp, synthetic construct
  source 1..75: mol_type = other DNA
ccgtgctgtccgcctgcgtacttctgactggctgtcaggggcagcaaaaactgctgcagcgggatgcggctgttc

SEQ ID NO: 319317 - DNA, 75 bp, synthetic construct
  source 1..75: mol_type = other DNA
accccgaggccaccggcacgctcagcgacacggaccatctgtggaacagcgtgagggatattctgttaacaccgc

SEQ ID NO: 319318 - DNA, 75 bp, synthetic construct
  source 1..75: mol_type = other DNA
ctcgatgcgccacaaaacgacgtgacacgtctgcagtgcatgagcgcggtggttatggcgctcgcacagtgggag

SEQ ID NO: 319319 - DNA, 75 bp, synthetic construct
  source 1..75: mol_type = other DNA
atcttgatggtttgaattatgaatctttacacaaggacgtggatgatgttctggcgaaagccgccgcgcgcgatg

SEQ ID NO: 319320 - DNA, 75 bp, synthetic construct
  source 1..75: mol_type = other DNA
caactggaggtggacgatgttcagcgtgtggtttgccacagcctgcgggcggggtatcagttaccggcaggccag

SEQ ID NO: 319321 - DNA, 75 bp, synthetic construct
  source 1..75: mol_type = other DNA
gactggctgtcaggggcagcaaaaactgctgcagcgggatgcggctgttccggtaccgtcggtgacggtcagcaa

SEQ ID NO: 319322 - DNA, 75 bp, synthetic construct
  source 1..75: mol_type = other DNA
ctgctgcgtatgaaaaacggtatctatggtcactcccgtttttgcaacaccgattttgacgacaagttggcttgc

SEQ ID NO: 319323 - DNA, 75 bp, synthetic construct
  source 1..75: mol_type = other DNA
tgtgcctgcggcgatcagtgcggtgatgttaaccctgctgattaccgtggttcgccagtcgacctctgtccctga

SEQ ID NO: 319324 - DNA, 75 bp, synthetic construct
  source 1..75: mol_type = other DNA
atgttaaccctgctgatcaccgtggttcgccagtcgacctctatccctgactcactgcctcacgcaggtgttgtg

SEQ ID NO: 319325 - DNA, 75 bp, synthetic construct
  source 1..75: mol_type = other DNA
ccgccgcggcgcgctggtgacgctgatgttttgcggctttacgctgggttcggcgtttggcgggattgtcagtgc

SEQ ID NO: 319326 - DNA, 75 bp, synthetic construct
  source 1..75: mol_type = other DNA
tgatgattggcttaagccaggatggattatggctgatggcgctggcgattttcggcaccggcattggcattagcg

SEQ ID NO: 319327 - DNA, 75 bp, synthetic construct
  source 1..75: mol_type = other DNA
caaaaaatgaaaacaataaaatcggctttttatggaatcattgatggaattgcaggtcgatttggccctctaaaa

SEQ ID NO: 319328 - DNA, 75 bp, synthetic construct
  source 1..75: mol_type = other DNA
cgataaagcacgcaccagcgaagatattaacgacgcactgaattaccgcaccgtcaccaaaaacatcattcagca

SEQ ID NO: 319329 - DNA, 75 bp, synthetic construct
  source 1..75: mol_type = other DNA
atggcacaacctgccgctattattcgtataaagaaccttcgtttacgtacgtttatcggaattaaggaagaagaa

SEQ ID NO: 319330 - DNA, 75 bp, synthetic construct
  source 1..75: mol_type = other DNA
caccatgaaaatgcttaccggattgctgcccgccagcgaaggtgaggcgtggctgttcgggcaaccggttgatcc

SEQ ID NO: 319331 - DNA, 75 bp, synthetic construct
  source 1..75: mol_type = other DNA
actgatttcagccaaaaaacactacaactgcttggtgatgcgggggctgatacaatgcaaattataatggggatt

SEQ ID NO: 319332 - DNA, 75 bp, synthetic construct
  source 1..75: mol_type = other DNA
ttgttaatcagactgccggtaatgactctaacttattgatagtgttttatgttcagataatgcccgatgactttg

SEQ ID NO: 319333 - DNA, 75 bp, synthetic construct
  source 1..75: mol_type = other DNA
tttcttggtcgccagttgagcggcaactcacgcctgctccgccacgtcctggaaacgaaaactgaaaaagttgtg

SEQ ID NO: 319334 - DNA, 75 bp, synthetic construct
  source 1..75: mol_type = other DNA
ctgggtcaccgccgcgttccagattggcggtacgttgggcgcgctggcgctgggcatgttgatggacaagttcaa

SEQ ID NO: 319335 - DNA, 75 bp, synthetic construct
  source 1..75: mol_type = other DNA
gtgacgactgcggcggccatccatccagtcatcggttcgtctgagaatgacgtgcaactgcgcacgcgacacccg

SEQ ID NO: 319336 - DNA, 75 bp, synthetic construct
  source 1..75: mol_type = other DNA
agattgttgatgaaatctgcgattttgtggcgaatcagcaggcggttttcctcggtggtcactacatcctgcagg

SEQ ID NO: 319337 - DNA, 75 bp, synthetic construct
  source 1..75: mol_type = other DNA
ggtcagtggtattcaggcggctattgataaactgacagagccgcaggtcaaaattgtctctttgaccatcaccga

SEQ ID NO: 319338 - DNA, 75 bp, synthetic construct
  source 1..75: mol_type = other DNA
atgtaccgtgacgaactaattgctcgtgtaatagataaaaatggtaacgatatgaaatacaagcatttaatcctg

SEQ ID NO: 319339 - DNA, 75 bp, synthetic construct
  source 1..75: mol_type = other DNA
cgcaacgcgctcgcttatctggcttactccgacaaagttgtagaaggttcgccgaaaaacgcgattagcgcggtt

SEQ ID NO: 319340 - DNA, 75 bp, synthetic construct
  source 1..75: mol_type = other DNA
tggtagtgctttgcttaacccgaaagacataaagcttaataaatacggcaacctgccgcgtaataagctctctca

SEQ ID NO: 319341 - DNA, 75 bp, synthetic construct
  source 1..75: mol_type = other DNA
ggttaaacgtatgattgatcatgctaacgctatttcacttgaagttaatatttccgcattggcgattgcagaggc

SEQ ID NO: 319342 - DNA, 75 bp, synthetic construct
  source 1..75: mol_type = other DNA
atgaatatcagcacggaaacccgcgaaattctgcgtaaatacaaagccgtgattaatgcgcggcgtcgtgagatg

SEQ ID NO: 319343 - DNA, 75 bp, synthetic construct
  source 1..75: mol_type = other DNA
atggttttgacaccgcggctatcggctttatcgcccctgatattcgcactcactggcaactcaccgcaggcgatc

SEQ ID NO: 319344 - DNA, 75 bp, synthetic construct
  source 1..75: mol_type = other DNA
taaagcccgatgccagcattcctgacggcgatacggagctgctgcgcgattacgtaaaaaagttgttgagatatc

SEQ ID NO: 319345 - DNA, 75 bp, synthetic construct
  source 1..75: mol_type = other DNA
tatttagactcgctcaaaaagaagaagagtcgaaagaactgtgcgcgcaggtggaggcactggagattattgtta

SEQ ID NO: 319346 - DNA, 75 bp, synthetic construct
  source 1..75: mol_type = other DNA
tatttaagcttgcccaaaaagaagaagagtcgaaagaactgtgcgcgcaggtagaagctttggagattatcgtca

SEQ ID NO: 319347 - DNA, 75 bp, synthetic construct
  source 1..75: mol_type = other DNA
atggtgatctatacctacactacttccatctcaatatggaatattggggatacgtggacatcattgatgactgtt

SEQ ID NO: 319348 - DNA, 75 bp, synthetic construct
  source 1..75: mol_type = other DNA
atttcccagagcgggcagacctgtgcgctgctctctaaagtcttcccgacccgttcccataccgtatcagcgcag

SEQ ID NO: 319349 - DNA, 75 bp, synthetic construct
  source 1..75: mol_type = other DNA
cgaagtattaccggagccaggcggcacgcgactgcggcagcagctgaccgtaccggtcacgcactgttgcatacc

SEQ ID NO: 319350 - DNA, 75 bp, synthetic construct
  source 1..75: mol_type = other DNA
cctgggtaaagaagttctcgaatcccgtctgccgggtatcctggagctttcccgtaccttcgctcacgttgatcc

SEQ ID NO: 319351 - DNA, 75 bp, synthetic construct
  source 1..75: mol_type = other DNA
ggcggcaactcgctgctggacctggtggtctttggtcgcgcggcaggtctgcatctgcaagagtctatcgccgag

SEQ ID NO: 319352 - DNA, 75 bp, synthetic construct
  source 1..75: mol_type = other DNA
gcagtggtcggttgtaccgcactgtgcatcgaaactggtgaagtggtttacttcaaagctcgtgctaccgtgctg

SEQ ID NO: 319353 - DNA, 75 bp, synthetic construct
  source 1..75: mol_type = other DNA
taacaccggcgatggcgtcggcatggctatccgtgcaggtgtacctgtgcaggatatggaaatgtggcagttcca

SEQ ID NO: 319354 - DNA, 75 bp, synthetic construct
  source 1..75: mol_type = other DNA
tcggtctggaaaagtactgtcgcggaggaatttacggcgattacttcaacagtaagaaaccgtcactggatgaca

SEQ ID NO: 319355 - DNA, 75 bp, synthetic construct
  source 1..75: mol_type = other DNA
cggagtttatgcaactgcgcaattatctctccgtcttcccgttcatgatgccggaagggctgtggagtgatatct

SEQ ID NO: 319356 - DNA, 75 bp, synthetic construct
  source 1..75: mol_type = other DNA
tgaaccaggtggctaaccgtgtagttgcagggctggtttctgccggtctctggtccaggcgtgtgaataaacacg

SEQ ID NO: 319357 - DNA, 75 bp, synthetic construct
  source 1..75: mol_type = other DNA
ttcggcggtgagcaggcggcacgtactgcggcggcggctgaccgtaccggtcatgcactgttgcacacgctttac

SEQ ID NO: 319358 - DNA, 75 bp, synthetic construct
  source 1..75: mol_type = other DNA
tggagaccagtttgctgaaggctgggtgctggccgttatcagtgaaatacagtccttcgccttgaccgatgacga

SEQ ID NO: 319359 - DNA, 75 bp, synthetic construct
  source 1..75: mol_type = other DNA
acagcctctggccccttctggtggcgctgccgatcatactcggagcggcggtagcgctgctcaggaaacaggagc

SEQ ID NO: 319360 - DNA, 75 bp, synthetic construct
  source 1..75: mol_type = other DNA
aagcccgcgctaccgtgctggcgactggcggggcagggcgtatttatcagtccaccactaacgcccacattaaca

SEQ ID NO: 319361 - DNA, 75 bp, synthetic construct
  source 1..75: mol_type = other DNA
gaggatttgaaaaagctgaggccagtctgaggctggaaggtatggaccctagcggaacccccctttatgaaggta

SEQ ID NO: 319362 - DNA, 75 bp, synthetic construct
  source 1..75: mol_type = other DNA
gagatccgccgtgagttaaagtactacgcgcatcttggtcgccggttaaaagactggagtggaataccgcgctat

SEQ ID NO: 319363 - DNA, 75 bp, synthetic construct
  source 1..75: mol_type = other DNA
tactggatctccaggaaaacaatattggagtcgttggccagggtagtcgcctttttattcgcgtagatgaaattc

SEQ ID NO: 319364 - DNA, 75 bp, synthetic construct
  source 1..75: mol_type = other DNA
cgtaagttaagcctggagccattaatcgctcaccgtggaagctttgaaagcttcgcccaggcggtgcgtgacatc

SEQ ID NO: 319365 - DNA, 75 bp, synthetic construct
  source 1..75: mol_type = other DNA
agacgatttgcagtgcccactaccgggcagttgatagctggcagggtgggaatctttaccgctcaataccgtcag

SEQ ID NO: 319366 - DNA, 75 bp, synthetic construct
  source 1..75: mol_type = other DNA
agcctcacgaggggcaaattgccgcatggacggcggcaatagaagagcgtttccatgcggtatgttgtggtcgcc

SEQ ID NO: 319367 - DNA, 75 bp, synthetic construct
  source 1..75: mol_type = other DNA
taattttattgctgaacaacgagctgacttaccaactaatataaaagatattcaaagcctgtatcaaaaaaatga

SEQ ID NO: 319368 - DNA, 75 bp, synthetic construct
  source 1..75: mol_type = other DNA
gaaagaagatctggctgtgctggcgaagcgtctggaagatcagcaacgtagccgcgatccgcaactgcaagtggt

SEQ ID NO: 319369 - DNA, 75 bp, synthetic construct
  source 1..75: mol_type = other DNA
acgctgcccgctgacaatcagcaaaaagcgcagaccaccgcagaaaacatcattaatacgctggttattcagtaa

SEQ ID NO: 319370 - DNA, 75 bp, synthetic construct
  source 1..75: mol_type = other DNA
atggcaaaagcaccacgtaaaaccgctgaatttgttgatgcggctggcaatgaagttgttaccgaaaacccgaac

SEQ ID NO: 319371 - DNA, 75 bp, synthetic construct
  source 1..75: mol_type = other DNA
tgtttatatcatttcgaatattggttcgtttggtgagaatgtctttaaaattggcatgacccgacggctggagcc

SEQ ID NO: 319372 - DNA, 75 bp, synthetic construct
  source 1..75: mol_type = other DNA
acaacaacccattaattccacattctctggagaaggatacaaccctgaacaatttgatttagcgcaacaacaact

SEQ ID NO: 319373 - DNA, 75 bp, synthetic construct
  source 1..75: mol_type = other DNA
ttaatcatgcagataacaataaagttggggttgtgtatcttgatttggataattttaaaaaggtcaacgacgcct

SEQ ID NO: 319374 - DNA, 75 bp, synthetic construct
  source 1..75: mol_type = other DNA
ttttcactgacctgaaacaggtactccaggaacttaaatttgagtattgccctattgatgtcgagctgactgaaa

SEQ ID NO: 319375 - DNA, 75 bp, synthetic construct
  source 1..75: mol_type = other DNA
gtgaagtacgcagtctggaagccctggtacgctggcagtctcccgaacgtggcttaattccccctctggacttta

SEQ ID NO: 319376 - DNA, 75 bp, synthetic construct
  source 1..75: mol_type = other DNA
ggtgttacggatagaaataaagagcgatctctttatgtaagaaatcaagctgaactaaaagtattatttgttgga

SEQ ID NO: 319377 - DNA, 75 bp, synthetic construct
  source 1..75: mol_type = other DNA
acgggatcaatgagcggcaaggatttttgtttgccaaaccgatgcccgccgtcgccttcgaacgctggtataaac

SEQ ID NO: 319378 - DNA, 75 bp, synthetic construct
  source 1..75: mol_type = other DNA
ccaggaactcaattttgaatactgccctatagatgttgaactgacggagagttgcctgattgagaatgatgaact

SEQ ID NO: 319379 - DNA, 75 bp, synthetic construct
  source 1..75: mol_type = other DNA
atgagaggcaaggtttcttgtttgcaaaaccgatgcccgctgtcgcttttgaacgctggtataaacgttatctga

SEQ ID NO: 319380 - DNA, 75 bp, synthetic construct
  source 1..75: mol_type = other DNA
ggcatccaggcgcaataaccgtgtattttttcgaagcggcaatgcatatgaagtcgaactgtggataccaacacg

SEQ ID NO: 319381 - DNA, 75 bp, synthetic construct
  source 1..75: mol_type = other DNA
gataatttacaggatgcaaatcagatccaactgtatcatggtgctccttatatctttacatttggggatgtggac

SEQ ID NO: 319382 - DNA, 75 bp, synthetic construct
  source 1..75: mol_type = other DNA
ttctgaagcacattccgcaatagtgattctggatagccgagggaatatccagcgttttaatcggttatgcgaaga

SEQ ID NO: 319383 - DNA, 75 bp, synthetic construct
  source 1..75: mol_type = other DNA
tctgtccatctggtgggacgaaaaatcaataagcgcgaatggggtggcaacgcgtcggcatggcatgacacacca

SEQ ID NO: 319384 - DNA, 75 bp, synthetic construct
  source 1..75: mol_type = other DNA
tctgcacgtcagctcgccgatcaaaccattttcaccgccctgaaacaggttctccaggaactcaattttgaatac

SEQ ID NO: 319385 - DNA, 75 bp, synthetic construct
  source 1..75: mol_type = other DNA
tggtactggcagaccaggaaggctgggaccggtatgaagccgcaaaatggctgaccatgcgccgctggctggaag

SEQ ID NO: 319386 - DNA, 75 bp, synthetic construct
  source 1..75: mol_type = other DNA
atatgccgagcgccacggagcttatcgcccacggtcgtgaagtggatgaaattcgccagatcatcggtgctgacg

SEQ ID NO: 319387 - DNA, 75 bp, synthetic construct
  source 1..75: mol_type = other DNA
tccgctggtactgggaaaacgtgatattgacgagaaccgtacagaatatatggtcgcttccgaaagcgtagcgct

SEQ ID NO: 319388 - DNA, 75 bp, synthetic construct
  source 1..75: mol_type = other DNA
atgtgcgttaccctggctggcagctccagcgcctctgaagcgcagccgttttacgttaactctccgtatggcatt

SEQ ID NO: 319389 - DNA, 75 bp, synthetic construct
  source 1..75: mol_type = other DNA
ccaattccggaaacctcttgtgatatcgcgctggaaatcgcccgtattctgggcaaaccgtaccgccagggcttc

SEQ ID NO: 319390 - DNA, 75 bp, synthetic construct
  source 1..75: mol_type = other DNA
aatcgcacagaatatatggtcgcttccgaaagcgttgcgctcgataccctgggctttgagttcctgcgtgatgtc

SEQ ID NO: 319391 - DNA, 75 bp, synthetic construct
  source 1..75: mol_type = other DNA
gtatgcctgtgtggcgatgattatcggccacggtatggttgctttccgcgatcctaacgggattcgtccgctggt

SEQ ID NO: 319392 - DNA, 75 bp, synthetic construct
  source 1..75: mol_type = other DNA
aaatctgcgaaagctgtccggcgacatcattgaccttcatgtttgcccgaccggtgatctggtgctgttcatcac

SEQ ID NO: 319393 - DNA, 75 bp, synthetic construct
  source 1..75: mol_type = other DNA
gcctatgaacatacttccggccactactgcaataccgtctactgtgctgtgcgcgaactctctatcagatcagaa

SEQ ID NO: 319394 - DNA, 75 bp, synthetic construct
  source 1..75: mol_type = other DNA
tcagcgaacgcgtacattttattcataatgatgcggcgggttacgtcgccaatgaaaaatgtgacgtagcagcct

SEQ ID NO: 319395 - DNA, 75 bp, synthetic construct
  source 1..75: mol_type = other DNA
ccacgtttgttactcgtttctccagtgctgaactaaattatgtgacacgctggatcctttataacggcgagcaac

SEQ ID NO: 319396 - DNA, 75 bp, synthetic construct
  source 1..75: mol_type = other DNA
aactagcgtgtcttttctcgattgttgataacgagtgtgattttttttcatcaatatgtgtatcaacatccatca

SEQ ID NO: 319397 - DNA, 75 bp, synthetic construct
  source 1..75: mol_type = other DNA
gatgaagaactgctgtgtgtcggatcttttaactggttcagtgctacacgggaagataagtatcaacgatacgat

SEQ ID NO: 319398 - DNA, 75 bp, synthetic construct
  source 1..75: mol_type = other DNA
tttgcgcaaatccagcaggcggtaattacccagatgctgcaggcaccgcaaacgctcggcgaagaagcatcgaag

SEQ ID NO: 319399 - DNA, 75 bp, synthetic construct
  source 1..75: mol_type = other DNA
agatagctaaaacacaaatgcctgttactgcgcataaaacatctgacagtaacaggggggtactgcatttgaata

SEQ ID NO: 319400 - DNA, 75 bp, synthetic construct
  source 1..75: mol_type = other DNA
gtgcagtcggcgcttgagtgggggaaaatgcatgcctggcaggtacagcaagctgttcagtgttcgcaatatgcc

SEQ ID NO: 319401 - DNA, 75 bp, synthetic construct
  source 1..75: mol_type = other DNA
cgctggcactggttctaatgttgctggttttgggcagcttgctgctacagggaatgagccaacaggatcgcagtt

SEQ ID NO: 319402 - DNA, 75 bp, synthetic construct
  source 1..75: mol_type = other DNA
ttagaagaagaaatagaaaaagatatatacacttcgtgtattagcgaaaatgaacaaaaaacggtcaatcagggg

SEQ ID NO: 319403 - DNA, 75 bp, synthetic construct
  source 1..75: mol_type = other DNA
gatgctgaacaatggcgcaagctatcagctactgtaaacgctgccgacgtggtggaagcatttaacagcacgttt

SEQ ID NO: 319404 - DNA, 75 bp, synthetic construct
  source 1..75: mol_type = other DNA
cggtatgaatggtatctcactggcggatgagttattgatgcgggataatttttttgtggcggatgaaagccgcca

SEQ ID NO: 319405 - DNA, 75 bp, synthetic construct
  source 1..75: mol_type = other DNA
cattggcactggttctgatgttgctgatattaggtagtttgctgctacaaggaatgagccagcaagatcgcagtt

SEQ ID NO: 319406 - DNA, 75 bp, synthetic construct
  source 1..75: mol_type = other DNA
aacattgttttttcgccacgcggctggagcgatttttgtccgctgaaagagagggcgttatgtcagcttccctga

SEQ ID NO: 319407 - DNA, 75 bp, synthetic construct
  source 1..75: mol_type = other DNA
tctcaggggctctcattgccgtcgttatggcgactggctacgagaaccccttgacttcagttcacgaaatcgaga

SEQ ID NO: 319408 - DNA, 75 bp, synthetic construct
  source 1..75: mol_type = other DNA
tcagtcattgcgccgccaggccatcgttcagtcggcgctggcgtgggggaaaatgcactcctggcagacgcagcc

SEQ ID NO: 319409 - DNA, 75 bp, synthetic construct
  source 1..75: mol_type = other DNA
ttgatggaaaaattgttttttcgccacgcggctggagcgatttttgtccgctgaaagagggggcgttatgtcagc

SEQ ID NO: 319410 - DNA, 75 bp, synthetic construct
  source 1..75: mol_type = other DNA
tttgctgatggccagttatgacggtgtttcattgtggcgaacagggaatgtcattaatggacaaactgttttttc

SEQ ID NO: 319411 - DNA, 75 bp, synthetic construct
  source 1..75: mol_type = other DNA
gagtacctaagcctatcaacatttgccgggtaactaagtttgatgggtatttggctgatgctgaacaatggcgca

SEQ ID NO: 319412 - DNA, 75 bp, synthetic construct
  source 1..75: mol_type = other DNA
gttgcgcatattgcacctcagtatcgccaccttgatatcgaggccctgaaaaataatacggcgaacgatctacaa

SEQ ID NO: 319413 - DNA, 75 bp, synthetic construct
  source 1..75: mol_type = other DNA
gcgctacacaaagtcagtatgcaacattatgatctgcttattactgacgttaatatgccgaatatggatggtttt

SEQ ID NO: 319414 - DNA, 75 bp, synthetic construct
  source 1..75: mol_type = other DNA
caaggtcaaggaaggtgaacttgatgctctggtcgcgacacagttaaattcgcgttacatgatcgaccattacta

SEQ ID NO: 319415 - DNA, 75 bp, synthetic construct
  source 1..75: mol_type = other DNA
caatatgcatatgcacccgattcttctggcctggttggtggcacttattctgcatgctgcagtgggctccgctac

SEQ ID NO: 319416 - DNA, 75 bp, synthetic construct
  source 1..75: mol_type = other DNA
aaagatataaatataatatatttgcttgataaatggagtaaattacggaagtatagagtgttaataagatttttc

SEQ ID NO: 319417 - DNA, 75 bp, synthetic construct
  source 1..75: mol_type = other DNA
agcgtcgcttaatgtcgcaaataaaaaattgcccgtcgtcgtcattcgggtcggcgatgactctatagatgtact

SEQ ID NO: 319418 - DNA, 75 bp, synthetic construct
  source 1..75: mol_type = other DNA
atctacacggacgtacaacgcaacattgaagagattgaacgcattctaaggggcgtacaggacgttacagagaac

SEQ ID NO: 319419 - DNA, 75 bp, synthetic construct
  source 1..75: mol_type = other DNA
ttcgtattagtttcaagagacacgctttcattatttctcccgatgctcaaggaggaggcattaaagcttcatgta

SEQ ID NO: 319420 - DNA, 75 bp, synthetic construct
  source 1..75: mol_type = other DNA
ttcatcgaaattggtttgttcgaatgttctcaaggccacataacttgcctaaagttattaaaaaggctggaccaa

SEQ ID NO: 319421 - DNA, 75 bp, synthetic construct
  source 1..75: mol_type = other DNA
cagagacatgaatgtccagggctgtcagggatggctctacaggcgtgtgggagctgatgaattatccgcgattac

SEQ ID NO: 319422 - DNA, 75 bp, synthetic construct
  source 1..75: mol_type = other DNA
tattccatactgaggtcgggaacccaatgcacaaactagtgctgttgaagttagctgataacgctaatgataacg

SEQ ID NO: 319423 - DNA, 75 bp, synthetic construct
  source 1..75: mol_type = other DNA
cggacgtacaacgcaatatagaagagattgaacgcattctaaggggcgtagaggacgttacagaggatgtaccag

SEQ ID NO: 319424 - DNA, 75 bp, synthetic construct
  source 1..75: mol_type = other DNA
aagcctgattaccaggcattagctgacacgcttaagcgcgccttcaaacaactggataaaactttccttgatgat

SEQ ID NO: 319425 - DNA, 75 bp, synthetic construct
  source 1..75: mol_type = other DNA
cggtgctcgtccggttgatctgcatatttccggccttgagcagttaggcgcaaccatcaagctggaagaaggtta

SEQ ID NO: 319426 - DNA, 75 bp, synthetic construct
  source 1..75: mol_type = other DNA
ggcgaggactggattagcctggatatgcatggcaaacgtccgaaggctgttaatgtgcgtaccgcgccgcatccg

SEQ ID NO: 319427 - DNA, 75 bp, synthetic construct
  source 1..75: mol_type = other DNA
acaacatgcgtgaagacgaaggtctggctgaccgtgctaccttcgttgttgacccgcagggtatcatccaggcta

SEQ ID NO: 319428 - DNA, 75 bp, synthetic construct
  source 1..75: mol_type = other DNA
gattatcaggcattagctgacacgcttaagcgtgccttcaaacaactggataaaactttccttgatgatttgtaa

SEQ ID NO: 319429 - DNA, 75 bp, synthetic construct
  source 1..75: mol_type = other DNA
gcaagccttagctccggtagaaggcaagccggattatcaggcattagctgacacgcttaagcgtgccttcaaaca

SEQ ID NO: 319430 - DNA, 75 bp, synthetic construct
  source 1..75: mol_type = other DNA
tcagtttatgcgaggcgattggcacactcgaattgctgaagcagtcactgattgaaagcgcgaaagagtcatcag

SEQ ID NO: 319431 - DNA, 75 bp, synthetic construct
  source 1..75: mol_type = other DNA
tgattcgctgatgttgatacaccgtgacctgtttgaacgtgaagagttccggcgggatattgaagagcgggcaga

SEQ ID NO: 319432 - DNA, 75 bp, synthetic construct
  source 1..75: mol_type = other DNA
atcctgattgtctggaagcgaacagtctacgccgatgtgacatggctgaatgactcgctggtgttgatacaccgc

SEQ ID NO: 319433 - DNA, 75 bp, synthetic construct
  source 1..75: mol_type = other DNA
agaccggcacgttcctggtcgctgcggcgatctctcgcggtaaaattatctgccgtaacgcccagccagataccc

SEQ ID NO: 319434 - DNA, 75 bp, synthetic construct
  source 1..75: mol_type = other DNA
ttatcacatcgatcgtggctacgaacgcattgaagacaaactgcgcgctttaggtgcaaatattgagcgtgtgaa

SEQ ID NO: 319435 - DNA, 75 bp, synthetic construct
  source 1..75: mol_type = other DNA
tcagtttatgcgaggcgattggcacactcgaattgctgaagcagtcattgattgaaggtgcaaaagagttcttaa

SEQ ID NO: 319436 - DNA, 75 bp, synthetic construct
  source 1..75: mol_type = other DNA
agtcatgaacatatcaaaagcgcactgctgtctgttttcaatgattttctgactgataacaacttttcagtaagc

SEQ ID NO: 319437 - DNA, 75 bp, synthetic construct
  source 1..75: mol_type = other DNA
tttgggcgtgaactttctcatttcggtttacatgagttctgtaatatccagacggtgtggaaagaccggatctga

SEQ ID NO: 319438 - DNA, 75 bp, synthetic construct
  source 1..75: mol_type = other DNA
ggaaggtaactactatccgccaacggttctggctaatgtcacccccgaaatgacggcgtttcgtgaagagctttt

SEQ ID NO: 319439 - DNA, 75 bp, synthetic construct
  source 1..75: mol_type = other DNA
tcgcgactggcgcgagacgagcatagattaccgggcgaagaaactgcgtgatatcgctaaggctctgcgtacgcg

SEQ ID NO: 319440 - DNA, 75 bp, synthetic construct
  source 1..75: mol_type = other DNA
agatcacgccaaaacgatcggtagcggttaagtctgtcgtggttgtacctcaacctgccggtgcttacatggatg

SEQ ID NO: 319441 - DNA, 75 bp, synthetic construct
  source 1..75: mol_type = other DNA
aaggagcttttccctaagagcaggatcgtactgcccaacgaatccgtggcatccaatgccaggggcttctggttc

SEQ ID NO: 319442 - DNA, 75 bp, synthetic construct
  source 1..75: mol_type = other DNA
ctgtaattattactacgtcaccttatgccgaagaccttttccgcttcactttgagcctgattcacttctacctga

SEQ ID NO: 319443 - DNA, 75 bp, synthetic construct
  source 1..75: mol_type = other DNA
cctttcagcgaccattttcaccaccgacgaaacacaggccagacagatggcggcacgtctggaatgcggtggggt

SEQ ID NO: 319444 - DNA, 75 bp, synthetic construct
  source 1..75: mol_type = other DNA
accgtgaatggggaattaccagcgaaaacgaacatcggtttatggtctttggaaaggtcttaatcagtcagtcac

SEQ ID NO: 319445 - DNA, 75 bp, synthetic construct
  source 1..75: mol_type = other DNA
tggggacagtatgtgtccaaccattgagccaggagatctcatcttcgttgatgtcagtatcaatcagtttgatgg

SEQ ID NO: 319446 - DNA, 75 bp, synthetic construct
  source 1..75: mol_type = other DNA
gctggtgttgacgatatcgaaaacgcgcttcagctggcagcagcaggctttcgcgactggcgcgaggcaaatata

SEQ ID NO: 319447 - DNA, 75 bp, synthetic construct
  source 1..75: mol_type = other DNA
ttaaacatgcgccgaatgtgatgggctgtgctcagctcattgcccaggtgtttaaagatgcgggtatcccacaag

SEQ ID NO: 319448 - DNA, 75 bp, synthetic construct
  source 1..75: mol_type = other DNA
atcgaagatgggattgcttcggcatttaccgaacgttttgtagcggctgcggcagcgttgaaaatgggcgatccc

SEQ ID NO: 319449 - DNA, 75 bp, synthetic construct
  source 1..75: mol_type = other DNA
atgacagagaaacacgctaaaaaatcacactcacccgccatcgatttaaccgaacagggatctgttgtgaagttc

SEQ ID NO: 319450 - DNA, 75 bp, synthetic construct
  source 1..75: mol_type = other DNA
taaccctgtcactgctgggcggtaatgcaccgctgtggtgggggatcgcgctgctggtgctcggcatgatcaccg

SEQ ID NO: 319451 - DNA, 75 bp, synthetic construct
  source 1..75: mol_type = other DNA
atctttcaggaattgaaagagctttcttgaattttattacaagttatggtcttggtattggttttcaacaaatgg

SEQ ID NO: 319452 - DNA, 75 bp, synthetic construct
  source 1..75: mol_type = other DNA
ataatttgatgccatatacgcaacaaagcatacttaatacagtaaaaaacaatcagttaccagaggatatcaaaa

SEQ ID NO: 319453 - DNA, 75 bp, synthetic construct
  source 1..75: mol_type = other DNA
gaaacacagtttaaggcgctgctctatccgttcggcaactatctttgcattgccttcctcggcatgattttgctg

SEQ ID NO: 319454 - DNA, 75 bp, synthetic construct
  source 1..75: mol_type = other DNA
gctgatgtgcacgatggatgatatgcgcttgtcagcgatcctgctgccggtgtggattgtattcctgtttgtggc

SEQ ID NO: 319455 - DNA, 75 bp, synthetic construct
  source 1..75: mol_type = other DNA
atttccacgtcgaaccatttgtcggcgcaaatttgcaaccagaggcccttgccttcaatggcattgatccgaacg

SEQ ID NO: 319456 - DNA, 75 bp, synthetic construct
  source 1..75: mol_type = other DNA
ttgctgatctctttcatcctgccgcaaaaatggaccagcgcggcggttgtcacgcctccagaacctgttcagtgg

SEQ ID NO: 319457 - DNA, 75 bp, synthetic construct
  source 1..75: mol_type = other DNA
ttttacaccgtttaaatatcagttgcgtccgtcattacccgtaaaaaagacggtcagggtaaggcgattattgtg

SEQ ID NO: 319458 - DNA, 75 bp, synthetic construct
  source 1..75: mol_type = other DNA
atggtcaggccgttaaagatgaccccgatttctctatttctctcggcgcagacggtattgaacgcaaactggaaa

SEQ ID NO: 319459 - DNA, 75 bp, synthetic construct
  source 1..75: mol_type = other DNA
atggtggcttgtggtggtgtgttgttgcgtcatgcgatggcatccagaaaacaggatgccatgatggcagaccac

SEQ ID NO: 319460 - DNA, 75 bp, synthetic construct
  source 1..75: mol_type = other DNA
gggatggtggcttgtggtggtgtgctgttgcgccatgcgatggcatccagaaaacaggatgccatgatggcagac

SEQ ID NO: 319461 - DNA, 75 bp, synthetic construct
  source 1..75: mol_type = other DNA
cgcagaccgttttgagcgggtatatcgattatatctctgcgttggtggtgaaagagtcgatagaaaacggtgatg

SEQ ID NO: 319462 - DNA, 75 bp, synthetic construct
  source 1..75: mol_type = other DNA
caactgataatacattaaatatttgtgaagaatttcaagtatcatatccctcaattataaatatacttccaagcg

SEQ ID NO: 319463 - DNA, 75 bp, synthetic construct
  source 1..75: mol_type = other DNA
gttcgggcaaatcgcaaaccgcatttgcgttgatgggcctgttggctgccaacggacgtattggcggatcggcaa

SEQ ID NO: 319464 - DNA, 75 bp, synthetic construct
  source 1..75: mol_type = other DNA
ttaataaaggcggtgtcataacagttattaatgaattaataaattgtcaagtgaatgatgacactatcgacagta

SEQ ID NO: 319465 - DNA, 75 bp, synthetic construct
  source 1..75: mol_type = other DNA
tgcgatgaaaaacatatcccgatcctgattgtctggaagcgcacggtatacgccgatgtaacatggctgaatgac

SEQ ID NO: 319466 - DNA, 75 bp, synthetic construct
  source 1..75: mol_type = other DNA
tcgtcccaaaaacaccccgatgtcgtcccagaatgttgtaatgtcgtcccacttcgcggaacgtgttttgaatta

SEQ ID NO: 319467 - DNA, 75 bp, synthetic construct
  source 1..75: mol_type = other DNA
accaatggcatcctgcaaatgtcaaaaggcgcagaaatgcgctataccctgcagaaaccagtaggtcagcgcatt

SEQ ID NO: 319468 - DNA, 75 bp, synthetic construct
  source 1..75: mol_type = other DNA
gtggtgggtggttggtgtctgtgtggcagcaacctgtatggcatgtctggtactgacactggtgatgttctgtgc

SEQ ID NO: 319469 - DNA, 75 bp, synthetic construct
  source 1..75: mol_type = other DNA
atgtttggttcctccgacactagtatagttctgtacggtactgatgtggtgaatgtcgtaagcgtaagacaaaaa

SEQ ID NO: 319470 - DNA, 75 bp, synthetic construct
  source 1..75: mol_type = other DNA
tgagtgcagagcctgttgcgggctgggggcgtcatctgtcctggatacgtgaactgagggcagaaatgtccggtg

SEQ ID NO: 319471 - DNA, 75 bp, synthetic construct
  source 1..75: mol_type = other DNA
tgatgctgaaatcggttgctcccgaccgattgcggaaggcgaacactggatggcccgcgaacgctatattggtgt

SEQ ID NO: 319472 - DNA, 75 bp, synthetic construct
  source 1..75: mol_type = other DNA
cagaccaaccgaaaacaccggggaggtgattacccgctggcagaggaaatccggtttttttgatgtcagccataa

SEQ ID NO: 319473 - DNA, 75 bp, synthetic construct
  source 1..75: mol_type = other DNA
atgcccggctggcagagaatgtgggcgtaagggatttcaggatgttactgatgatcggactggacagagaggttg

SEQ ID NO: 319474 - DNA, 75 bp, synthetic construct
  source 1..75: mol_type = other DNA
ggtcgatgtgtgtgaagataaaaacgcaacactacattcgccgcagcagcgaatggaaacgttaatcagccaggc

SEQ ID NO: 319475 - DNA, 75 bp, synthetic construct
  source 1..75: mol_type = other DNA
atggtatatcggcctgatggtaccaccattaatgctggcctgctgactcaggaaaaagcattagatgtgtcgccg

SEQ ID NO: 319476 - DNA, 75 bp, synthetic construct
  source 1..75: mol_type = other DNA
caacgagacgcaagccccaacgtaatacactctacctgccctcagcttctcgtgaggaactggataaaattgctc

SEQ ID NO: 319477 - DNA, 75 bp, synthetic construct
  source 1..75: mol_type = other DNA
ctcactgtgggcacaatggtatatcggcctgatggtaccaccattaatgctggcgctgctgactcaggaaaaagc

SEQ ID NO: 319478 - DNA, 75 bp, synthetic construct
  source 1..75: mol_type = other DNA
cgttaatcagccaggcgctggttccggttgtgcaggcactagaagcgacgggagagatcaacggcaaacttatct

SEQ ID NO: 319479 - DNA, 75 bp, synthetic construct
  source 1..75: mol_type = other DNA
ttgaagatgttatctggcgaacgcatctcaaaccgcaagatccaacgcttgcacaagcggtacgtgcgacgatcg

SEQ ID NO: 319480 - DNA, 75 bp, synthetic construct
  source 1..75: mol_type = other DNA
gtcggggaggcgaatttattatcgacaccgtggaggctgtacgctttgttcctttagtgaaaggggaactagcct

SEQ ID NO: 319481 - DNA, 75 bp, synthetic construct
  source 1..75: mol_type = other DNA
cagacatggttgaactggctaacgaatggcaccagaacctgatcgaatctgcagctgaagcttctgaagagctga

SEQ ID NO: 319482 - DNA, 75 bp, synthetic construct
  source 1..75: mol_type = other DNA
cagtacctcattaaaaaatattccagtcaggctattgaggagctgataaacgaagacgatgacgacttcgatgac

SEQ ID NO: 319483 - DNA, 75 bp, synthetic construct
  source 1..75: mol_type = other DNA
tcctacagaagttcgtgttgaagttgaaaaaattgcaattgaaataagtttcaagagggggagacgtatctctga

SEQ ID NO: 319484 - DNA, 75 bp, synthetic construct
  source 1..75: mol_type = other DNA
tgctcacccgtttcctcggtcgtaacgacaccgagcgtcgaattatgattgactccatcgcaccacactgggacg

SEQ ID NO: 319485 - DNA, 75 bp, synthetic construct
  source 1..75: mol_type = other DNA
attctgctctacaccgcctggtgctactggaaaatgttcggtcgtatcaccaaagaagatattgaacgtaacacc

SEQ ID NO: 319486 - DNA, 75 bp, synthetic construct
  source 1..75: mol_type = other DNA
gaaactgggcggcggcacggttttacagcagaaatttggttccaccaatgaattacgcgcgggcgtgaatggcgg

SEQ ID NO: 319487 - DNA, 75 bp, synthetic construct
  source 1..75: mol_type = other DNA
caacaaaaatttggttccaccagcgaattacgcgcgggagttaacggtggttctggtatcgctttaaccggtagc

SEQ ID NO: 319488 - DNA, 75 bp, synthetic construct
  source 1..75: mol_type = other DNA
ggcacaggcaactgccgcaccaatcgcagacgttgcagaacaaccccagcagcaaactgttgacggcgttgccag

SEQ ID NO: 319489 - DNA, 75 bp, synthetic construct
  source 1..75: mol_type = other DNA
ggacggggaagctgtatatcgtgcgggatgtgcagccggacagccacggcggcacgcgtcttgaactgaacaggg

SEQ ID NO: 319490 - DNA, 75 bp, synthetic construct
  source 1..75: mol_type = other DNA
atgaccggaccggttgactgggacaaaaacctgctgtccccgttgttcggggtgtttggtgaggaatgcgaacac

SEQ ID NO: 319491 - DNA, 75 bp, synthetic construct
  source 1..75: mol_type = other DNA
ggcatgacgaccaacaatccaacgctgcaaaccacgccaaccgatgaccagttcaccaataatggcggtcgtgtc

SEQ ID NO: 319492 - DNA, 75 bp, synthetic construct
  source 1..75: mol_type = other DNA
ccggaagatgaagcgcgcgatgcagcacgtcatattcgtgaccagggcaaacaagcgccgctggtgctgatcccg

SEQ ID NO: 319493 - DNA, 75 bp, synthetic construct
  source 1..75: mol_type = other DNA
tcccttgatttactacgtgcgttaattgctcaggaaccactgctcggcgcgaaagaaaaacagcagaatatcgac

SEQ ID NO: 319494 - DNA, 75 bp, synthetic construct
  source 1..75: mol_type = other DNA
caatatcttattaagacatactctcaacaagccatccaagaactcattcagggagccgatacaggcaacgatgaa

SEQ ID NO: 319495 - DNA, 75 bp, synthetic construct
  source 1..75: mol_type = other DNA
cgccagttcccgcagtgcacaaggctccgctggacctgatttccgacttgagatggaaggattacagtacagcga

SEQ ID NO: 319496 - DNA, 75 bp, synthetic construct
  source 1..75: mol_type = other DNA
acacctgccgatttagatcaaaaccagcaggcgcgttactggcaggcaaaaatcgatgccagtcaggggcgtcct

SEQ ID NO: 319497 - DNA, 75 bp, synthetic construct
  source 1..75: mol_type = other DNA
ccagcgaatccatccgcagaactgaaaatctacgatacctcatcacaaccgcttagccagatcttaagccaggtt

SEQ ID NO: 319498 - DNA, 75 bp, synthetic construct
  source 1..75: mol_type = other DNA
atgagcaaatacacacacctgtcaggggtttcgttaattaataatgctctgttaaataaaggtacggcattttca

SEQ ID NO: 319499 - DNA, 75 bp, synthetic construct
  source 1..75: mol_type = other DNA
cagcagaacacctttgttccgtgccataatcgccagcgttgtgctgttcgtaatggcaacgattggcttctctct

SEQ ID NO: 319500 - DNA, 75 bp, synthetic construct
  source 1..75: mol_type = other DNA
tctttctgcaagaacactatattttaaggatattgaagtattaagcttaacattatatatatctaataagggggg

SEQ ID NO: 319501 - DNA, 75 bp, synthetic construct
  source 1..75: mol_type = other DNA
agtatatttttaggttataatggccaagcaaattatatactctatttaacaagagaaattgccaccataactgat

SEQ ID NO: 319502 - DNA, 75 bp, synthetic construct
  source 1..75: mol_type = other DNA
caccagtatttgaaacgggtgcgtcgtcggggaggcgaatttattatcgatatcgtggaggccgtgcgctttgtc

SEQ ID NO: 319503 - DNA, 75 bp, synthetic construct
  source 1..75: mol_type = other DNA
catcatcacagccgatcaccaatttgcatctgcaaaatgaagctatccgttttgccgatcttaatttacccgccg

SEQ ID NO: 319504 - DNA, 75 bp, synthetic construct
  source 1..75: mol_type = other DNA
cggtttggtgatgctgcaggtcaggacacccggcagtgggtgaaggtgaatcatgagagcgggctggggctgtgc

SEQ ID NO: 319505 - DNA, 75 bp, synthetic construct
  source 1..75: mol_type = other DNA
gcgggcggcggcgctgcgggcggtatgggtattgcggcggcggtattcctcaatgcggatattaaaccgggtatt

SEQ ID NO: 319506 - DNA, 75 bp, synthetic construct
  source 1..75: mol_type = other DNA
ggcggtaaagcgccgctgggtgtggcgtcagtggcgaagaaattaaatgtcccggtgattgggattgctggcgta

SEQ ID NO: 319507 - DNA, 75 bp, synthetic construct
  source 1..75: mol_type = other DNA
cactggtgatcaccggggaagggcgcatcgactcgcaaacggcaggcggtaaagcgccgctgggcgtggcgtcgg

SEQ ID NO: 319508 - DNA, 75 bp, synthetic construct
  source 1..75: mol_type = other DNA
atatgcatgctgatagtggaatgccttatctttatgcaaagctcccgaaaaatatttctgcaaagagtatatctt

SEQ ID NO: 319509 - DNA, 75 bp, synthetic construct
  source 1..75: mol_type = other DNA
cgcaaaaaggggcaacgccggagatggtcgaagagctggaacaggggctgcaaaattacgcccgtgttttacaac

SEQ ID NO: 319510 - DNA, 75 bp, synthetic construct
  source 1..75: mol_type = other DNA
gatggtcgaagagctggaacaggggctgcaaaattacgcccgtgttttacaacagcaaactgaaatcaacgtctg

SEQ ID NO: 319511 - DNA, 75 bp, synthetic construct
  source 1..75: mol_type = other DNA
atgtgcgcttttttattgagcttagtgctgcctgcacaggccaccagctttaccgaatatctgccaatgagtgac

SEQ ID NO: 319512 - DNA, 75 bp, synthetic construct
  source 1..75: mol_type = other DNA
aactttgcaacagtgcccgccgatgcgctcaagccgtggattgcgcggcgtgaacgctggccgtcctttctgatc

SEQ ID NO: 319513 - DNA, 75 bp, synthetic construct
  source 1..75: mol_type = other DNA
gtctgccccgctgaagttcatggcggtgtccgattacaaaaagtgcgaacggttcctgacgggttttttcctgga

SEQ ID NO: 319514 - DNA, 75 bp, synthetic construct
  source 1..75: mol_type = other DNA
ccgcttaacgccatgacactggcgcaatggtcatcaccgaatgcgctacgttctctactggcggtctattccgat

SEQ ID NO: 319515 - DNA, 75 bp, synthetic construct
  source 1..75: mol_type = other DNA
cctcaagagcagaagcggtaccggctgatctgatatcctggaccgaaggcaacgcgattgtggccacaggcagcc

SEQ ID NO: 319516 - DNA, 75 bp, synthetic construct
  source 1..75: mol_type = other DNA
cgttgtgactgacggggaacgtattcttggactgggagaccagggcattggcgggatgggtatcccggttggaaa

SEQ ID NO: 319517 - DNA, 75 bp, synthetic construct
  source 1..75: mol_type = other DNA
cctgccgacataaaagacagacattatcttcgcagaccctgctttttgtcggggcggggtctgcaggatgcggga

SEQ ID NO: 319518 - DNA, 75 bp, synthetic construct
  source 1..75: mol_type = other DNA
agtcgtggtgtatgggctagcgtgaatggtgaaggtcagcgcgttcctggattccgggtgcaggctgtcgatacc

SEQ ID NO: 319519 - DNA, 75 bp, synthetic construct
  source 1..75: mol_type = other DNA
atggcgaaggtcaacgtgttcccggattccgggttcaggctgtcgataccattgctgccggagatacttttaatg

SEQ ID NO: 319520 - DNA, 75 bp, synthetic construct
  source 1..75: mol_type = other DNA
tgaatcaacgggtgtggcgctgatttttgttaatggcgaaggagagaatgtcattggtattcatgccggcgccaa

SEQ ID NO: 319521 - DNA, 75 bp, synthetic construct
  source 1..75: mol_type = other DNA
cgttctgtgttgccgtgtcattcctgccagcggcaaaggctgaggtgtcaggacgtggaaacagctatgattccc

SEQ ID NO: 319522 - DNA, 75 bp, synthetic construct
  source 1..75: mol_type = other DNA
ttcctgtatgtcttatattttcagttactggttttgttcatgcggaaatagccggaaaaggttcagtcagcgaca

SEQ ID NO: 319523 - DNA, 75 bp, synthetic construct
  source 1..75: mol_type = other DNA
attccgggtgcaggctgtcgataccattgctgccggagatacctttaacggcgcgttaatcacggcgttgctgga

SEQ ID NO: 319524 - DNA, 75 bp, synthetic construct
  source 1..75: mol_type = other DNA
cacttactttggtgtcaatattagctgtaatatttacatatattggctattatctttatcgcaaacattctggcg

SEQ ID NO: 319525 - DNA, 75 bp, synthetic construct
  source 1..75: mol_type = other DNA
accctgatgaattaaaactcgtttatgaaaagtgccaaaagagtggtgatgctactgaaaactgcaagaatgcaa

SEQ ID NO: 319526 - DNA, 75 bp, synthetic construct
  source 1..75: mol_type = other DNA
cattcgtggcctgttctgcggcggcacgctgtgtgacgaaaccatgttcgcggtgatggaaaaacacggcgatgt

SEQ ID NO: 319527 - DNA, 75 bp, synthetic construct
  source 1..75: mol_type = other DNA
cccggaactgatgtttcaggattatgagggattcccggggaatatggcctctgaatgccatatcaactgggcctg

SEQ ID NO: 319528 - DNA, 75 bp, synthetic construct
  source 1..75: mol_type = other DNA
atcaagaaactcagttttccgaaaatctgtctgccgatcatcgtgacgttatcggcggtgctaaatttcgcgatt

SEQ ID NO: 319529 - DNA, 75 bp, synthetic construct
  source 1..75: mol_type = other DNA
cgtataacccgatggcgaccattatcggttcctaccagaacgtgatgctctatcaccagagccctaactggatgg

SEQ ID NO: 319530 - DNA, 75 bp, synthetic construct
  source 1..75: mol_type = other DNA
gccgctcgcgaagcgcgtcaggcgctgcaaaatgacctcaacgtgatgctgttttccgataacgtctcggttgaa

SEQ ID NO: 319531 - DNA, 75 bp, synthetic construct
  source 1..75: mol_type = other DNA
attattgcgttgccacaggtgcgtaaaaattacccttttgagggggttgtagagtggcatcggaaagagtttttt

SEQ ID NO: 319532 - DNA, 75 bp, synthetic construct
  source 1..75: mol_type = other DNA
actattgcgttgccgcaggtgcgtaaaaattacccttatgaggtgtttgtagagtggcatcggaatgaggttttt

SEQ ID NO: 319533 - DNA, 75 bp, synthetic construct
  source 1..75: mol_type = other DNA
tgatgctctccggcgtgaaacaggaacatctcgacctgcatacgctaaaccagccgttaattgctgatgtgcgcg

SEQ ID NO: 319534 - DNA, 75 bp, synthetic construct
  source 1..75: mol_type = other DNA
ctggaaaacgatccgcaaactgaaatcattgtgcttatctccaaaccgcctgcgcctgcggtggcccgcaaagtg

SEQ ID NO: 319535 - DNA, 75 bp, synthetic construct
  source 1..75: mol_type = other DNA
gcaggggctacagtttgctcgcggcagcaaagaagcggcgctgaaagcggtaatgctctccggcgtgaaacagga

SEQ ID NO: 319536 - DNA, 75 bp, synthetic construct
  source 1..75: mol_type = other DNA
agggattcccggggaatatggcctcggaatggcatatcaactgggcctgggttgaaggcgtccgccgggcacggg

SEQ ID NO: 319537 - DNA, 75 bp, synthetic construct
  source 1..75: mol_type = other DNA
gctgacttcgccttccttttacatggattccattttttaaaagaagatggtgtaatggcaatcatcctgcctcat

SEQ ID NO: 319538 - DNA, 75 bp, synthetic construct
  source 1..75: mol_type = other DNA
ggcggttgcttccagtaatcgacagcatcgtccggcgctggagttaaagcgtatccctgagttgcttgacaaaat

SEQ ID NO: 319539 - DNA, 75 bp, synthetic construct
  source 1..75: mol_type = other DNA
gtatccctgagttacttgagaaaatagacggctataccggcaggccgctaacccgctgggcaaccgaacttactc

SEQ ID NO: 319540 - DNA, 75 bp, synthetic construct
  source 1..75: mol_type = other DNA
catataaaaaaaattattgatgcttacaagttccgcaaagaggagccacgctacgcacgtcgcgtcagcatggaa

SEQ ID NO: 319541 - DNA, 75 bp, synthetic construct
  source 1..75: mol_type = other DNA
attggtctgcctgcaaatctgttcttctctactggtattccggtatgtattctggtgctgaaaaaatgtaaaaaa

SEQ ID NO: 319542 - DNA, 75 bp, synthetic construct
  source 1..75: mol_type = other DNA
acctggcagctgtacacactgacttgctcgttgtggagaagcaaattggtgcggcaaaagaacggtacaaccaat

SEQ ID NO: 319543 - DNA, 75 bp, synthetic construct
  source 1..75: mol_type = other DNA
acgttggaacctggcataaatacaactgtggaagcatcgctggccgctggtttgacctgaccacgtttgatgatg

SEQ ID NO: 319544 - DNA, 75 bp, synthetic construct
  source 1..75: mol_type = other DNA
gcccgtccaaattcccctcccgccttatgtcggcgggagtaccctttggaagttaagatggcctctgaatgccat

SEQ ID NO: 319545 - DNA, 75 bp, synthetic construct
  source 1..75: mol_type = other DNA
tctgttgttgcacctgctgtatacgttggaacctggcacaaatacaactgtggaagcatcgccggacgctggttt

SEQ ID NO: 319546 - DNA, 75 bp, synthetic construct
  source 1..75: mol_type = other DNA
ccaaccaaaaatggtcggaagatcatgctaatcgtgtaaaaaagagcctggaggacaatatcttcccgacaattg

SEQ ID NO: 319547 - DNA, 75 bp, synthetic construct
  source 1..75: mol_type = other DNA
gagcgcctgaagaaagattttgaggagcgtcacaccgggcttggcaatgctcaccgcccgatgatccttgagatg

SEQ ID NO: 319548 - DNA, 75 bp, synthetic construct
  source 1..75: mol_type = other DNA
cctgaactgatgtttcaggattatgagggattcccggggaatatggcctctgaatgtcatatcaactgggcctgg

SEQ ID NO: 319549 - DNA, 75 bp, synthetic construct
  source 1..75: mol_type = other DNA
aatttaacgcaggtatggcgtcgatacatgaacatcggttacaccatttaaagggggacaatacggatggcaatg

SEQ ID NO: 319550 - DNA, 75 bp, synthetic construct
  source 1..75: mol_type = other DNA
gagttataaaaagtctttaatgaatagactgtatgtcagtaatgatatacagttattttacaaaggtctattatt

SEQ ID NO: 319551 - DNA, 75 bp, synthetic construct
  source 1..75: mol_type = other DNA
ccgggactatctacaacctgcccgagctcattaataaccagtgggtgaggcgctacgacctcaccatcacgctgt

SEQ ID NO: 319552 - DNA, 75 bp, synthetic construct
  source 1..75: mol_type = other DNA
ggtaacggtgatttgctgcttctatggccctctgggggccaacactgcatcaactttccgcgcgggaatattcgt

SEQ ID NO: 319553 - DNA, 75 bp, synthetic construct
  source 1..75: mol_type = other DNA
attctgctctacaccgcctggtgttactggaaaatgtttggtcgtatcaccaaagaagatattgaacgtaacacc

SEQ ID NO: 319554 - DNA, 75 bp, synthetic construct
  source 1..75: mol_type = other DNA
aaattaagcctgtccggacggctggcaataaaaattattgcagaaccaccggataagcgccgccgtgacctggac

SEQ ID NO: 319555 - DNA, 75 bp, synthetic construct
  source 1..75: mol_type = other DNA
caacgcgggcgcagcaggcagatgaatgtaaggtgggaaactgcgggcgcgtctggcatgttggttttttctttg

SEQ ID NO: 319556 - DNA, 75 bp, synthetic construct
  source 1..75: mol_type = other DNA
ataattcacagatattgcaaaatgctcaggtcaaaaataaaataaaacgtgttgatcgtctgctcggtaatgaat

SEQ ID NO: 319557 - DNA, 75 bp, synthetic construct
  source 1..75: mol_type = other DNA
gtagtatttatcacgaaggaaacactttcattatttctcccgatgctcaaggaggaggcattaaatcttcatacg

SEQ ID NO: 319558 - DNA, 75 bp, synthetic construct
  source 1..75: mol_type = other DNA
agccactaacgaaagtgtgagacaggcagataactcgaactcttattatttcgacggccctcaaaatacagaaaa

SEQ ID NO: 319559 - DNA, 75 bp, synthetic construct
  source 1..75: mol_type = other DNA
ggtatctaacccctgtcggggatgctcctgagtacgataaggagctggaaaagcaactgagtcgctgggtaagag

SEQ ID NO: 319560 - DNA, 75 bp, synthetic construct
  source 1..75: mol_type = other DNA
acaagaagccaatatatgcttctttgcgtcaatcagcatactgacgtcgataattaagttcgtctatgacaaaaa

SEQ ID NO: 319561 - DNA, 75 bp, synthetic construct
  source 1..75: mol_type = other DNA
ctgttgagacgttacacaatgaaaactaccctgcgggaacaagagttattgttacagacatgcaaggaataactc

SEQ ID NO: 319562 - DNA, 75 bp, synthetic construct
  source 1..75: mol_type = other DNA
cagcaccatgatgaacgcaagtctgacaatgtgggatgcaacttccagccagctgacgcttaacgtcatgacctg

SEQ ID NO: 319563 - DNA, 75 bp, synthetic construct
  source 1..75: mol_type = other DNA
atgaccagaatcactgaagaacgcatatcggagattatcgcccgtattgaaatgtatggtcacggtgctggatat

SEQ ID NO: 319564 - DNA, 75 bp, synthetic construct
  source 1..75: mol_type = other DNA
ggatcgatcgcgctactcgtctggttgatcaactgctcacgctatcgcggctggactcactggataaccttcagg

SEQ ID NO: 319565 - DNA, 75 bp, synthetic construct
  source 1..75: mol_type = other DNA
aaagatcaatggcgctttatctggatgacatcacctgatggtaaatatcgcatcgttgtcggccaggaatgggaa

SEQ ID NO: 319566 - DNA, 75 bp, synthetic construct
  source 1..75: mol_type = other DNA
gtgccgatggcggcccgtcaggcggggttaagcttctcgcagttggtagtacgaattctggaactggcggactaa

SEQ ID NO: 319567 - DNA, 75 bp, synthetic construct
  source 1..75: mol_type = other DNA
taccggtcgcgccgtgggtagcgttaacccgcgcagagtttgaaaaaggcctgagcgataagcagttagcagaaa

SEQ ID NO: 319568 - DNA, 75 bp, synthetic construct
  source 1..75: mol_type = other DNA
gctttcaatggataaactacgcagcaaactgctgtggcaaggtgctggtttaccggtcgcgccgtgggtagcgtt

SEQ ID NO: 319569 - DNA, 75 bp, synthetic construct
  source 1..75: mol_type = other DNA
cagtccacaaggtagcgtagtggatgtcaccctgaatgccgataatttcatcgtcagagacaacggccccggcgt

SEQ ID NO: 319570 - DNA, 75 bp, synthetic construct
  source 1..75: mol_type = other DNA
ggaagctgttacctgaaaattcagagcaacggcagaaagcgcaagatgtatatgggatccgcaaggcggagctta

SEQ ID NO: 319571 - DNA, 75 bp, synthetic construct
  source 1..75: mol_type = other DNA
tgacgatgcgcgagatcctgatactgacgcatacgctaagcagacagggcagcagcctcgccagcagaaaacccc

SEQ ID NO: 319572 - DNA, 75 bp, synthetic construct
  source 1..75: mol_type = other DNA
ttaaaacacggtcacgtagatgatgatgcgctgacctttgcagtctttactcacgacggcaacatggttcttaac

SEQ ID NO: 319573 - DNA, 75 bp, synthetic construct
  source 1..75: mol_type = other DNA
ctgctttccagctttgtcgcctggaaacaaacaacggataacgtcgatgagttgttcgacacccaactgatgctg

SEQ ID NO: 319574 - DNA, 75 bp, synthetic construct
  source 1..75: mol_type = other DNA
ggcgctggcgctgcgtatgcgtgaccctgactcggaaaaaccactaaacgcgactggcgtacccagcgaagtgcg

SEQ ID NO: 319575 - DNA, 75 bp, synthetic construct
  source 1..75: mol_type = other DNA
caataacccgatgcactttaccgaccgcagcggcggcgtttcccgtcgccgggtgatcctgcatttcccggagca

SEQ ID NO: 319576 - DNA, 75 bp, synthetic construct
  source 1..75: mol_type = other DNA
caacggggtactcgatacccaaagcggcctgttcagcccgcacagtaaatcacactggctgcgcacgttgtgcga

SEQ ID NO: 319577 - DNA, 75 bp, synthetic construct
  source 1..75: mol_type = other DNA
tttgatttttgtggctatctggaaatgctgccgcagaccaacgggatgtttataggtaatgccagcatcgtcccg

SEQ ID NO: 319578 - DNA, 75 bp, synthetic construct
  source 1..75: mol_type = other DNA
acaggcatacagaccaacctcgacctgacggatgaaagcagcaccgactggctgccgaagtgtgacgatccggca

SEQ ID NO: 319579 - DNA, 75 bp, synthetic construct
  source 1..75: mol_type = other DNA
gccggttgccccggaggtgattgcggctgcagaagcagaaacggaggttgaccgccaggcggcggccgcgctggc

SEQ ID NO: 319580 - DNA, 75 bp, synthetic construct
  source 1..75: mol_type = other DNA
cttctcactgatacgcctgcctgaccaggagaaatggagcggtgacggggcaggacttaaggccatcactggcgg

SEQ ID NO: 319581 - DNA, 75 bp, synthetic construct
  source 1..75: mol_type = other DNA
gcgactatcgagacgctggaatccccccgcgaacgcgcggcgctgattggcttctcgctgatacgtctgcctgac

SEQ ID NO: 319582 - DNA, 75 bp, synthetic construct
  source 1..75: mol_type = other DNA
gcgcattctcccggcgctgggggtaacggtcatcaaaaaccgtcatcaggcctgtccggtgtgtggcggctccga

SEQ ID NO: 319583 - DNA, 75 bp, synthetic construct
  source 1..75: mol_type = other DNA
ctggcagctctttctcgaagtgaccgggccgggtggcagcgggaaaagtattctggctgaaattgcgaccatgct

SEQ ID NO: 319584 - DNA, 75 bp, synthetic construct
  source 1..75: mol_type = other DNA
tgtcctccgtgaacctcctttctctggcaagccttgcccgtcagaaatatccggcctgtcagattgtcctcgccg

SEQ ID NO: 319585 - DNA, 75 bp, synthetic construct
  source 1..75: mol_type = other DNA
ggtcaaaggtgcatgccataccattgaaggacaaaaacaggccggaaaacgcctgtggattgcggagggttatgc

SEQ ID NO: 319586 - DNA, 75 bp, synthetic construct
  source 1..75: mol_type = other DNA
catgcagacgttcagcgacccgatgaccgcgcgcacactgctccagtcgcagcagaactccgacgaggcactcag

SEQ ID NO: 319587 - DNA, 75 bp, synthetic construct
  source 1..75: mol_type = other DNA
taacggctaccgcaacccgctgagcatgaagtcattcagccaggcgctggaaagcattctgcgcgagtacggcct

SEQ ID NO: 319588 - DNA, 75 bp, synthetic construct
  source 1..75: mol_type = other DNA
gatagccccggaggaacgcgatactcagctcaaagagaaaattgccagtgagctggcggtgatcgttcgccagct

SEQ ID NO: 319589 - DNA, 75 bp, synthetic construct
  source 1..75: mol_type = other DNA
cacactggctgcgcacgctctgtgatgtcgattttaccccgccggtcgagggtgaaacactggaaactcacgccc

SEQ ID NO: 319590 - DNA, 75 bp, synthetic construct
  source 1..75: mol_type = other DNA
accgcaaagcggcggccgcgctggcggtcaggctcatggagaaagcccgcccggccaccggcaatgcctacctca

SEQ ID NO: 319591 - DNA, 75 bp, synthetic construct
  source 1..75: mol_type = other DNA
aatccgtctgaggccgcccggaaggtgaacgccgtcaccggtaatctgtcgccggttgccccggaagcgattgcg

SEQ ID NO: 319592 - DNA, 75 bp, synthetic construct
  source 1..75: mol_type = other DNA
ttatggtgctggctaaccgctatgactggcagctgtttctggaagtcactggccccggaggaagcggcaaaagta

SEQ ID NO: 319593 - DNA, 75 bp, synthetic construct
  source 1..75: mol_type = other DNA
tttgatttttgcggctaccttgaagtcctgcctgacaccacgggcatgtttatgggtaatgctaacattgtccca

SEQ ID NO: 319594 - DNA, 75 bp, synthetic construct
  source 1..75: mol_type = other DNA
ccacggctacaggaacaccctgagcctcaccatgttcggtaaggggctgccagctatgctgaaagagtacgggct

SEQ ID NO: 319595 - DNA, 75 bp, synthetic construct
  source 1..75: mol_type = other DNA
ttacggcgaagcgctggccgtggacgcaaatggccagctcctgtcccgctatgaggccggtatatggaaaatcat

SEQ ID NO: 319596 - DNA, 75 bp, synthetic construct
  source 1..75: mol_type = other DNA
agcgatatagttctccttaacaatgatgccctattaacccgtaattcattggttgcaatgcagcaggttgcttat

SEQ ID NO: 319597 - DNA, 75 bp, synthetic construct
  source 1..75: mol_type = other DNA
tttcttccgtgaacctcctttctctggccagccttgcccggcagaagcatccggcctgtcagattgtccttgctg

SEQ ID NO: 319598 - DNA, 75 bp, synthetic construct
  source 1..75: mol_type = other DNA
ctgattattccgcagcaggacgccccggcacggcggctgattggctttcgcaacggcgtgcttgataccaaaagc

SEQ ID NO: 319599 - DNA, 75 bp, synthetic construct
  source 1..75: mol_type = other DNA
actggtcgagaaggtgttcggtgtatcagcctctgaggccgccgggaaggtgaacgccgtgaccggcaacctgcc

SEQ ID NO: 319600 - DNA, 75 bp, synthetic construct
  source 1..75: mol_type = other DNA
gcgctttcttccgtgaatctcctttctctggccagccttgcccggcagaagcatccggcctgtcagattgtcctt

SEQ ID NO: 319601 - DNA, 75 bp, synthetic construct
  source 1..75: mol_type = other DNA
ggtcggcggcaacggcgcaaaagtgattgtcgccatcaataaagataaaaacgcgccaatcttcaactatgccga

SEQ ID NO: 319602 - DNA, 75 bp, synthetic construct
  source 1..75: mol_type = other DNA
caacgaaaacatcgtgttgctggggccatccggcgtgggaaaaacgcatctggcaatagcaatgggatatgaagc

SEQ ID NO: 319603 - DNA, 75 bp, synthetic construct
  source 1..75: mol_type = other DNA
gcgggttagcgttcgctcaggaaaagatcaacagcccgctggcgatcattacccttgcacccggtgttcaggaac

SEQ ID NO: 319604 - DNA, 75 bp, synthetic construct
  source 1..75: mol_type = other DNA
aattatgccgactacggtctggtgggcgatatctacaaagtcgtccctgccctgattagccagttgagccgctaa

SEQ ID NO: 319605 - DNA, 75 bp, synthetic construct
  source 1..75: mol_type = other DNA
gggccgtacggtacagtactgagcaacccgccatatggtgaacgtctggacagcgaaccggcgctgattgcgcta

SEQ ID NO: 319606 - DNA, 75 bp, synthetic construct
  source 1..75: mol_type = other DNA
tgcacctgcgtggttaccgtgatcgtgcgggaattgcaccgatcaaggaaactttggcggcggctattgtgatgc

SEQ ID NO: 319607 - DNA, 75 bp, synthetic construct
  source 1..75: mol_type = other DNA
acccgccatacggagaacgtctggacagcgaaccagcgctgattgcgctgcatagtctgctggggcgaatcatga

SEQ ID NO: 319608 - DNA, 75 bp, synthetic construct
  source 1..75: mol_type = other DNA
aatttgtcgatggtaaacctcatcaattagaactgattgatgccaaaactggacagttactcaagcaagtcacga

SEQ ID NO: 319609 - DNA, 75 bp, synthetic construct
  source 1..75: mol_type = other DNA
caacccgccatacggggaacgtctggacagcgaaccggcgctgattgcgctgcatagcctgctgggtcggatcat

SEQ ID NO: 319610 - DNA, 75 bp, synthetic construct
  source 1..75: mol_type = other DNA
aggctttgaagccacataacgccagtcctttcgacacaatgagtgaagcagaattcacagcgatgagtgtcagcg

SEQ ID NO: 319611 - DNA, 75 bp, synthetic construct
  source 1..75: mol_type = other DNA
aagcgccatattcaacccgtattccagcggtggtgcttgccgtcaataacaatgccatgtcgttcagcgacagaa

SEQ ID NO: 319612 - DNA, 75 bp, synthetic construct
  source 1..75: mol_type = other DNA
tatcaaacgtgatgctgattcagcttttgatttttgcggctaccttaaagtcctgcctgacaccacgggcatgtt

SEQ ID NO: 319613 - DNA, 75 bp, synthetic construct
  source 1..75: mol_type = other DNA
ccgtgaaggctgcccgcggtcactgggcgcggattttgccagcgctgggtatgaacatactgaaaaatcgccatc

SEQ ID NO: 319614 - DNA, 75 bp, synthetic construct
  source 1..75: mol_type = other DNA
catgcagcgtttcagcgatccgatgagcgccagaacattgcttcagtcgcagcagaattctgatgaggctctcac

SEQ ID NO: 319615 - DNA, 75 bp, synthetic construct
  source 1..75: mol_type = other DNA
ttacagggatgcgctggcggttgatccgaacgggcagcttttatcccgctatgagtctggggcgtggaaagtgat

SEQ ID NO: 319616 - DNA, 75 bp, synthetic construct
  source 1..75: mol_type = other DNA
ttgccgatgaacagagaggaagccagcctgttcttccggctactgaaccgtcgatatgaaaaagcgagcatcata

SEQ ID NO: 319617 - DNA, 75 bp, synthetic construct
  source 1..75: mol_type = other DNA
cgatgcattcactcagaatggcgaagaagccacccgacaggcaatttatgaagctataaaaccagccgttgccag

SEQ ID NO: 319618 - DNA, 75 bp, synthetic construct
  source 1..75: mol_type = other DNA
taatggctataaaaataccctcagcctgacaatgtttggcaaagggctacctgttatgctgaaggaatacgggct

SEQ ID NO: 319619 - DNA, 75 bp, synthetic construct
  source 1..75: mol_type = other DNA
gaagagatatcttctacaacaccgcctgtgcctgttagaaaaaaacataaaggaataatggggttagcgttagcc

SEQ ID NO: 319620 - DNA, 75 bp, synthetic construct
  source 1..75: mol_type = other DNA
gtgccaggagagatatcttcgacaacaccgcctgtgcctgttagaaaaaaacataaaggactgatggggttagcc

SEQ ID NO: 319621 - DNA, 75 bp, synthetic construct
  source 1..75: mol_type = other DNA
tggcagaatagcgatattaatagcgcgatgtatcagaatttagagaagttgttaaatactgtgcaaaagtgctga

SEQ ID NO: 319622 - DNA, 75 bp, synthetic construct
  source 1..75: mol_type = other DNA
atgaaaaaaattaagtttgttatcttttctggcatcttgggtatcagcctgaatgcctttgcgggtggtagcggt

SEQ ID NO: 319623 - DNA, 75 bp, synthetic construct
  source 1..75: mol_type = other DNA
tacacctgacgccccgcaactggtaaaagaatccgttaatagtccaagaataaaaatatttcatctgagttctgg

SEQ ID NO: 319624 - DNA, 75 bp, synthetic construct
  source 1..75: mol_type = other DNA
aaagagtcaattaacagtccaagaataaaaatatttcatcttagttctggaaaagaaaataattccgtaccgtta

SEQ ID NO: 319625 - DNA, 75 bp, synthetic construct
  source 1..75: mol_type = other DNA
gagcgctcagcgcggcgcagacttgccccggactacgtgctgagttttgccggtcgcattccctgcggaggtgaa

SEQ ID NO: 319626 - DNA, 75 bp, synthetic construct
  source 1..75: mol_type = other DNA
ttacgccagcgctggcagcggcgttctcagcaggtcataacattgttgtttgtccgttctccacccaggaggcga

SEQ ID NO: 319627 - DNA, 75 bp, synthetic construct
  source 1..75: mol_type = other DNA
tcaactgacagtgaccgcccggaccaaaggtacctgggggaatgatatcaccctgtcggtatccaccactgcaac

SEQ ID NO: 319628 - DNA, 75 bp, synthetic construct
  source 1..75: mol_type = other DNA
tctaaatctcaggataaacatgcgcttttccccatttttactgcgagttggcgagctaatcgtataaagaataaa

SEQ ID NO: 319629 - DNA, 75 bp, synthetic construct
  source 1..75: mol_type = other DNA
tatttcaacactgcgatatgtcagcattctggcaattgcgtacgtggcaacggcaagttatttaatctcaaatga

SEQ ID NO: 319630 - DNA, 75 bp, synthetic construct
  source 1..75: mol_type = other DNA
tctcaaacgaaagccgtggatcatgccggatgaagtcgacgtcgccactgtggttaaagtgattgatacgtgccc

SEQ ID NO: 319631 - DNA, 75 bp, synthetic construct
  source 1..75: mol_type = other DNA
tcagtatgtatgcaaggctttaatgaagggaaagtaaggggtgtgtctgtctccggggtattttattataatgac

SEQ ID NO: 319632 - DNA, 75 bp, synthetic construct
  source 1..75: mol_type = other DNA
tctccagtggagtggctgacggataatggttcatgctaccgggctaatgaaacacgccagttcgcccggatgtag

SEQ ID NO: 319633 - DNA, 75 bp, synthetic construct
  source 1..75: mol_type = other DNA
ggcgaaggatagttgtattgatcactacgtcaagacttataccaagtcagcatcatcggcatctgatattgctga

SEQ ID NO: 319634 - DNA, 75 bp, synthetic construct
  source 1..75: mol_type = other DNA
atgaaggaattattgctgttatcggtatttttgatatccgcttgctcgacatcctatgatgtttatgacggtgtt

SEQ ID NO: 319635 - DNA, 75 bp, synthetic construct
  source 1..75: mol_type = other DNA
gaaagggaaatcaatggaatcggaaataccagtgatgactgggacgttgatgaatgctgcgcgcgattaatgatt

SEQ ID NO: 319636 - DNA, 75 bp, synthetic construct
  source 1..75: mol_type = other DNA
aaataagggcactacagagtattggtcgtaatggttgtatttattttaatggaacccccggtgaaattattccgt

SEQ ID NO: 319637 - DNA, 75 bp, synthetic construct
  source 1..75: mol_type = other DNA
tgaaccgaagaacacggcggtgcggagtccggagagtaacggaatagcagagagcttcgtgaaaacggtaagcgc

SEQ ID NO: 319638 - DNA, 75 bp, synthetic construct
  source 1..75: mol_type = other DNA
cagggcatacaaaccaatctcgcgttaagagaggaaagcaacgccgactggctgccgaaatgtgatgacccccta

SEQ ID NO: 319639 - DNA, 75 bp, synthetic construct
  source 1..75: mol_type = other DNA
tgtggatttcaccccgccggtggaaggggaaacgctggaaacccacgcccccgcgttctggcgctggcttgaccg

SEQ ID NO: 319640 - DNA, 75 bp, synthetic construct
  source 1..75: mol_type = other DNA
ccagtatgtatgcaaggccttaatgaagggaaagtaaggggggtgtctgtctccggggtattttattataaggac

SEQ ID NO: 319641 - DNA, 75 bp, synthetic construct
  source 1..75: mol_type = other DNA
cagcaaacaggtggaagcattccgctacaactcaaaaggagttgaagtattgagaaatctagttaatgtttctac

SEQ ID NO: 319642 - DNA, 75 bp, synthetic construct
  source 1..75: mol_type = other DNA
caggactcaaggccatcaccggcggcgatgcagtttcagttgacccgaaataccagaatccgtactcaacgcata

SEQ ID NO: 319643 - DNA, 75 bp, synthetic construct
  source 1..75: mol_type = other DNA
ctggcagctctttctcgaagtgaccggtcccggcgggagtggcaaaagtattctggctgaaatcgcgaccctgct

SEQ ID NO: 319644 - DNA, 75 bp, synthetic construct
  source 1..75: mol_type = other DNA
tgtgcattttgagtttaatacccggctggccgttaacacgttgccgggtaacgaacagcgtgttctggtgattgg

SEQ ID NO: 319645 - DNA, 75 bp, synthetic construct
  source 1..75: mol_type = other DNA
gaaagttatggattgtattattgctgaccataatgctgatatatgtgtgttatgcgggagtcctgacgatattac

SEQ ID NO: 319646 - DNA, 75 bp, synthetic construct
  source 1..75: mol_type = other DNA
ccagcagcgccgtcgtttaaaagaagccgaaggcgcacgggccaatatcgcagccctcaaggccatactaaaaaa

SEQ ID NO: 319647 - DNA, 75 bp, synthetic construct
  source 1..75: mol_type = other DNA
gctggtgctggtgatgggctgtgccttcggcgcatttatggggcttctgatcgacgccctgaagatcccggcatt

SEQ ID NO: 319648 - DNA, 75 bp, synthetic construct
  source 1..75: mol_type = other DNA
catggtcgtgacgctattgattcggctggcggctattcgttggcatcttaagctaccgacgtttgcgctggatga

SEQ ID NO: 319649 - DNA, 75 bp, synthetic construct
  source 1..75: mol_type = other DNA
agcagaactccgacgaggcactaagtatcaagcgcgacgctgacccgacctttgatttttgtggctatctggagg

SEQ ID NO: 319650 - DNA, 75 bp, synthetic construct
  source 1..75: mol_type = other DNA
gtaccagcatgcagagtgtgcaattctgatttgctgggagtgtttgagtataacctgaagaaatttcttacggaa

SEQ ID NO: 319651 - DNA, 75 bp, synthetic construct
  source 1..75: mol_type = other DNA
gtggtggcgtcgggacggtgcttgggacgctttttggcgtggcaattcagggactgattcagacttacataaact

SEQ ID NO: 319652 - DNA, 75 bp, synthetic construct
  source 1..75: mol_type = other DNA
tttgagcggtggcgttggaacggtattagggacgctttttggcgtggcgattcagggactgattcagacttacat

SEQ ID NO: 319653 - DNA, 75 bp, synthetic construct
  source 1..75: mol_type = other DNA
ccctgccgcagaccagcggcatgtatatggggaacgccagtatcatcccgcgcaattaccgtaaatacctctatc

SEQ ID NO: 319654 - DNA, 75 bp, synthetic construct
  source 1..75: mol_type = other DNA
agccttgcatggaaaatccctggcggcggtcgcttaagtgcgatggggctgctgatgctggcggtggtggttatc

SEQ ID NO: 319655 - DNA, 75 bp, synthetic construct
  source 1..75: mol_type = other DNA
ttgtttatttttattgccttacagcgtgggttaacggtgctgtgggagaatcgtcagagttcgccagtgacgcgg

SEQ ID NO: 319656 - DNA, 75 bp, synthetic construct
  source 1..75: mol_type = other DNA
gtgggttaacggtgctgtgggagaaccgtcagagttcgccagtaataagagtgagtccggaaaatacaataaaag

SEQ ID NO: 319657 - DNA, 75 bp, synthetic construct
  source 1..75: mol_type = other DNA
gactgaatgacaacttttttgaagcggggggcggctcaatccagatcgtgctgttgcatcgccgtattgaggaga

SEQ ID NO: 319658 - DNA, 75 bp, synthetic construct
  source 1..75: mol_type = other DNA
ccgcatggatactgattcttactggcctggcgacatgcctcagtgcgggggcagccctggctgccctgctgatgc

SEQ ID NO: 319659 - DNA, 75 bp, synthetic construct
  source 1..75: mol_type = other DNA
cagggttcgaaactggtgaataacgccgccgcgaccatgatcgatattgtcagttcggtgacccgcgtgaacgac

SEQ ID NO: 319660 - DNA, 75 bp, synthetic construct
  source 1..75: mol_type = other DNA
cgccggagctgatgattatctgagtaaaccatttggtatcggcgaattacaggcccgtctgcgcgtcgcgttacg

SEQ ID NO: 319661 - DNA, 75 bp, synthetic construct
  source 1..75: mol_type = other DNA
accgacgtggctatcatgagcccagtgtttcagtcggggtatgatgttagtgacctttttgatgagcatgtgaca

SEQ ID NO: 319662 - DNA, 75 bp, synthetic construct
  source 1..75: mol_type = other DNA
aacccgtaagccagatttgattattctcgatctcggcctgcccgatggcgatggaattgagtttatccgcgacct

SEQ ID NO: 319663 - DNA, 75 bp, synthetic construct
  source 1..75: mol_type = other DNA
ccggcacggatcgtgtttacccgcacggcagaaggaaaagaacgtccgcgcccgtcaccgctatcgtcgcctggg

SEQ ID NO: 319664 - DNA, 75 bp, synthetic construct
  source 1..75: mol_type = other DNA
gacgttggaggcaccaggcgaaccggaacgccggaagcaatacagcaagagctgctgcaacacattgacaaggtt

SEQ ID NO: 319665 - DNA, 75 bp, synthetic construct
  source 1..75: mol_type = other DNA
tttcagccgactactgcgccgctgtattcagctatctggcggaagacctcctgtctcttcaggatctcatccagc

SEQ ID NO: 319666 - DNA, 75 bp, synthetic construct
  source 1..75: mol_type = other DNA
cgtcgtcacatccagactgaaatcgatcgcagactcacccgcgctgcacacatcgcctttatcatgcaatccaac

SEQ ID NO: 319667 - DNA, 75 bp, synthetic construct
  source 1..75: mol_type = other DNA
ctcgatctcggtctgcccgacggtgatgggattgagtttatccgcgacctgcgccagtggagcgcggtgccggtg

SEQ ID NO: 319668 - DNA, 75 bp, synthetic construct
  source 1..75: mol_type = other DNA
catggcaaaccgcaaacagcaccgcgctatcgcggagcgtcgtcacatccagactgaaatcaaccgcagactttc

SEQ ID NO: 319669 - DNA, 75 bp, synthetic construct
  source 1..75: mol_type = other DNA
atcaatatgctgcatgagcgcagccacgcgctatcgaacatctattccgcctctgttttcagctatctggcggat

SEQ ID NO: 319670 - DNA, 75 bp, synthetic construct
  source 1..75: mol_type = other DNA
gtcaggagcggtacactgcatcgggcgttgagtgctactggctggtccgcaaggagacattcatgactttaggca

SEQ ID NO: 319671 - DNA, 75 bp, synthetic construct
  source 1..75: mol_type = other DNA
ggaccttccgttaccatgaagacgtcagccagagtcacgagtcttatttgtgggggaacacctcgtttttactag

SEQ ID NO: 319672 - DNA, 75 bp, synthetic construct
  source 1..75: mol_type = other DNA
gaatgtatctctgctgcctggtcatgagtcaggtttgtatgagaaattgcatgatgatagaagaaataataacta

SEQ ID NO: 319673 - DNA, 75 bp, synthetic construct
  source 1..75: mol_type = other DNA
aagttgtccatcaatatggctaatcttcagttcgacactgttcaacctgctgaaacccggcagcggaaaaacaaa

SEQ ID NO: 319674 - DNA, 75 bp, synthetic construct
  source 1..75: mol_type = other DNA
agatgggtataatgctctcagactgaatcaggttggaggaaaccccggaacgataacagtttatgctttttctga

SEQ ID NO: 319675 - DNA, 75 bp, synthetic construct
  source 1..75: mol_type = other DNA
tgaatttactccgcaaaatctgattaataaagggacaatgtctacatctaaaggttctgtttttcaaacatcaat

SEQ ID NO: 319676 - DNA, 75 bp, synthetic construct
  source 1..75: mol_type = other DNA
agatgacaaacatgatctcatatcagggacttgttcgcaccttccctagattttatgactggatggattaccctg

SEQ ID NO: 319677 - DNA, 75 bp, synthetic construct
  source 1..75: mol_type = other DNA
acgtcgcaaggcagaacgaatcgactacgaatccttcctgaacgcctacaacaccgaagtcggtgacagactgcc

SEQ ID NO: 319678 - DNA, 75 bp, synthetic construct
  source 1..75: mol_type = other DNA
cactgaatttaacccagcacaaacccaatacttcattttaaataacggctctgtcggtttagcaggtcgggtact

SEQ ID NO: 319679 - DNA, 75 bp, synthetic construct
  source 1..75: mol_type = other DNA
ctggctcaggtagtgaaagagattaagcgtcagcaagactactttgtctttactgaatttaacccagcgcaaaca

SEQ ID NO: 319680 - DNA, 75 bp, synthetic construct
  source 1..75: mol_type = other DNA
ggtcaatatcgcagtacgtccgcacttcaaatacatgggggcttcatttgaattatccctggtcggacgtctgga

SEQ ID NO: 319681 - DNA, 75 bp, synthetic construct
  source 1..75: mol_type = other DNA
aatcgatggtgcggttgcactgattatggcgatcggtcgggcaatgctcaaagaacccgacgatttcctctcatc

SEQ ID NO: 319682 - DNA, 75 bp, synthetic construct
  source 1..75: mol_type = other DNA
tccccttcatgtgcaattattgatgaatatcacgagcatcagactgatgcactttatacaacgatgactaccggg

SEQ ID NO: 319683 - DNA, 75 bp, synthetic construct
  source 1..75: mol_type = other DNA
aagcactttaaccggtgggtaagtgcaaaaacggttttttatgacctgcaaagatggatggctgctgcggataaa

SEQ ID NO: 319684 - DNA, 75 bp, synthetic construct
  source 1..75: mol_type = other DNA
cagcgaaccagtatgcaagagatgttgttggcgggaagatccttgcttgtcagttaactgtgcttgcctgtcaaa

SEQ ID NO: 319685 - DNA, 75 bp, synthetic construct
  source 1..75: mol_type = other DNA
gtgctacttgaaaaacaacaagcacagctaaagagtcaactcgaaactattcaaaaacaacaaactggcataata

SEQ ID NO: 319686 - DNA, 75 bp, synthetic construct
  source 1..75: mol_type = other DNA
ctggtattgaatatatggaggatggtcttcccgatccggtgaaagccatggggcggatcctggtggaaaacctct

SEQ ID NO: 319687 - DNA, 75 bp, synthetic construct
  source 1..75: mol_type = other DNA
aaagcggctaaccgttttgcggtgccactaccaccccgactggtggtgaataatgataatgagggcaacggatga

SEQ ID NO: 319688 - DNA, 75 bp, synthetic construct
  source 1..75: mol_type = other DNA
tttatgtgatttgtgcgctttctggattcagtgaaacattgataccgaatacattgagaaaccttgaaaccaaat

SEQ ID NO: 319689 - DNA, 75 bp, synthetic construct
  source 1..75: mol_type = other DNA
accggcagtactcaagacaagcatcaatggtttgcctttcttcgcccatctgtcggacgagtgcagcactgcgcc

SEQ ID NO: 319690 - DNA, 75 bp, synthetic construct
  source 1..75: mol_type = other DNA
aaaatcagcccggtcagtgagtcacccatcgaccccttcggggcgaccgggttgtcacatgaccttgctgatgaa

SEQ ID NO: 319691 - DNA, 75 bp, synthetic construct
  source 1..75: mol_type = other DNA
ggaaggagagaaagcaaaacaaaatagatggcgcggtaggactaatgatgggagtcgggcgagccatgctgaacg

SEQ ID NO: 319692 - DNA, 75 bp, synthetic construct
  source 1..75: mol_type = other DNA
tcattgatgaatatcacgagcatcagaccgatgcactttaccagacgatgcaaaccgggatgggggcacgtcgtc

SEQ ID NO: 319693 - DNA, 75 bp, synthetic construct
  source 1..75: mol_type = other DNA
gcaattggtcgttgcatgctatttgagaaagaaggcacgctgtctgaccacattgagtcctacgggatccgctcg

SEQ ID NO: 319694 - DNA, 75 bp, synthetic construct
  source 1..75: mol_type = other DNA
tgaccctgagcggcgaaagctaccgcttgaaggacaagaggaaggcgggagtggtcaggaaaaattccaaacccg

SEQ ID NO: 319695 - DNA, 75 bp, synthetic construct
  source 1..75: mol_type = other DNA
taaagcgcgcagcccggtgtttgcggcggtgtatcaccacagcttgctggcgggtacacatcgtcatgccattga

SEQ ID NO: 319696 - DNA, 75 bp, synthetic construct
  source 1..75: mol_type = other DNA
gtcggcctcgcgcgattttgaaaccaacgtcgatgtgctcaacaacgtgaaaagtatgcagcaaagcctgctgaa

SEQ ID NO: 319697 - DNA, 75 bp, synthetic construct
  source 1..75: mol_type = other DNA
agtgttacagcgcctgggacaacaggacttgatatctattctggagggaaaactgaaccgccccgggaatcctgg

SEQ ID NO: 319698 - DNA, 75 bp, synthetic construct
  source 1..75: mol_type = other DNA
tcatcgaactgatagtcgctgccctcttattattattgaaaatgctcacctgaatcaccgccgcatacttgatga

SEQ ID NO: 319699 - DNA, 75 bp, synthetic construct
  source 1..75: mol_type = other DNA
aacgctatgaaccgcattcgccgctcgccgatgctaacggggatgtctggtatcccgacgtcaacgtggtggaac

SEQ ID NO: 319700 - DNA, 75 bp, synthetic construct
  source 1..75: mol_type = other DNA
taaagcgcgcagcccggtgtttgcggcggtctatcaccacagcttgctggcgggaacgcatcgccatgccattga

SEQ ID NO: 319701 - DNA, 75 bp, synthetic construct
  source 1..75: mol_type = other DNA
ctatatagagagttttttgtccacattaaaatctcagagaactagttcacctggtatttattgtggtttttctaa

SEQ ID NO: 319702 - DNA, 75 bp, synthetic construct
  source 1..75: mol_type = other DNA
gacatatggtgtctccatgggagcatatggtgctatgcgatatgctgagcagcttaatgcatcaggtacaattag

SEQ ID NO: 319703 - DNA, 75 bp, synthetic construct
  source 1..75: mol_type = other DNA
aggaacaacaggctgaattactggagcgccagattaacgcggcaagggtaaaacattgcggtgtttctgcgctgg

SEQ ID NO: 319704 - DNA, 75 bp, synthetic construct
  source 1..75: mol_type = other DNA
aacgaatttgtgaatagccaggttcgccagcatccggtactcgccagctactcagattcatctattgcaaaaatg

SEQ ID NO: 319705 - DNA, 75 bp, synthetic construct
  source 1..75: mol_type = other DNA
gacaaaaacgatgaatccttattagtggatttttcgatagatgatacgatgctcgaatttgacccgtttggaaca

SEQ ID NO: 319706 - DNA, 75 bp, synthetic construct
  source 1..75: mol_type = other DNA
ttaaattatgcaaaacaaataactgaacactctattaaacctgtccttatacttggtgatagtatttggatttcg

SEQ ID NO: 319707 - DNA, 75 bp, synthetic construct
  source 1..75: mol_type = other DNA
gatctccttttaaccgccagagttctgaaacggatagctttattatgtcggggcgatcgcagaaagctggcgctt

SEQ ID NO: 319708 - DNA, 75 bp, synthetic construct
  source 1..75: mol_type = other DNA
cgacacgggctggacggctgattttgattacctgctgagggaagattcgttaacgggagtacgggaagggaagtt

SEQ ID NO: 319709 - DNA, 75 bp, synthetic construct
  source 1..75: mol_type = other DNA
attggtataagccaagtcagctaaacacaaaagacaatatacaaaagacaataaatacaaataccaccttacccc

SEQ ID NO: 319710 - DNA, 75 bp, synthetic construct
  source 1..75: mol_type = other DNA
atggaaacggttggtcagcgcattaaagccctacgcagggttacaaaaacctctcaaaaagaactgggtaagttc

SEQ ID NO: 319711 - DNA, 75 bp, synthetic construct
  source 1..75: mol_type = other DNA
gggtgtcgccagcagcgcagccgcgaactgctgacgcggatggcttgcttcccgggcatcaagaccctggaggac

SEQ ID NO: 319712 - DNA, 75 bp, synthetic construct
  source 1..75: mol_type = other DNA
cagttcggcgcgttcaagactgcgactgtgcctgtgtggttggcaggcatccttgatggcacataccaatatcgc

SEQ ID NO: 319713 - DNA, 75 bp, synthetic construct
  source 1..75: mol_type = other DNA
tttcaaaccgagcttccttggagtgtactgtgaatgcagcgctggaccgtcgtattggtctgcgtgtcgggttcc

SEQ ID NO: 319714 - DNA, 75 bp, synthetic construct
  source 1..75: mol_type = other DNA
ctgattcggcctggtgcgatcaggcagtaagagcggggctggcatgtaaaagtgggaatgctgtcagcgccagtg

SEQ ID NO: 319715 - DNA, 75 bp, synthetic construct
  source 1..75: mol_type = other DNA
gaaaatgtcgccggaaggggagagtaccattacgcgtgatagcagcgaggaagagattctctggctggaaacgat

SEQ ID NO: 319716 - DNA, 75 bp, synthetic construct
  source 1..75: mol_type = other DNA
agtgaggcgctaagcgtgttatacggcgtatgggggtacgaggtcccagccgattcggcctggtgcgatcaggca

SEQ ID NO: 319717 - DNA, 75 bp, synthetic construct
  source 1..75: mol_type = other DNA
ttgatgggacaaacgaggctactgtaaaaaaacttgtcatcgatgggcctcaaaagttcttagttcccttaaatc

SEQ ID NO: 319718 - DNA, 75 bp, synthetic construct
  source 1..75: mol_type = other DNA
cccggtaccccaacatcccgatcaatggtaattgcctcatcattggtgtagtcaaaggagttcaatacgaactct

SEQ ID NO: 319719 - DNA, 75 bp, synthetic construct
  source 1..75: mol_type = other DNA
atgcgaaggattccggtgatatcctgggttcaggctggacagtttacagaatgtaaagcagcagaagttttcagc

SEQ ID NO: 319720 - DNA, 75 bp, synthetic construct
  source 1..75: mol_type = other DNA
cgctattgaatgacctgaaacgggaattcaatactgccatcattatgatcacccacgatctgggtgtggtggcgg

SEQ ID NO: 319721 - DNA, 75 bp, synthetic construct
  source 1..75: mol_type = other DNA
gaatttttccctacgtgccggagaaacgctgggcattgtaggtgagtctggttcgggtaaatcgcaaactgcatt

SEQ ID NO: 319722 - DNA, 75 bp, synthetic construct
  source 1..75: mol_type = other DNA
tggaaatttgtaatagtgcgccggcgctggaagagttcactcctggccgtctgcgtgcctgctttaaatcggtgg

SEQ ID NO: 319723 - DNA, 75 bp, synthetic construct
  source 1..75: mol_type = other DNA
ggctcaacggtttgatcaagatgtccaaccggttaggtcggggttatagctatgagatcatccgtgcaaagacgt

SEQ ID NO: 319724 - DNA, 75 bp, synthetic construct
  source 1..75: mol_type = other DNA
cttcttatgtatcaagaatgttgtacccagaggggaaaaagggaaaaaaacggatcgctgatgatatggtggaga

SEQ ID NO: 319725 - DNA, 75 bp, synthetic construct
  source 1..75: mol_type = other DNA
acgctgggcatcgtaggtgagtctggttcgggtaaatcgcaaactgcatttgcgttgatgggcctgttggctgcc

SEQ ID NO: 319726 - DNA, 75 bp, synthetic construct
  source 1..75: mol_type = other DNA
gtattggatcccaaaatcttacagcgaaaacgatgcttacaatcagtgcgtcgccgtcatttcaaaaaattttgg

SEQ ID NO: 319727 - DNA, 75 bp, synthetic construct
  source 1..75: mol_type = other DNA
atgttgttgcataattcatcatctgcaacaaatatacctttggctaattttatttctcatttgaatgatgatgtt

SEQ ID NO: 319728 - DNA, 75 bp, synthetic construct
  source 1..75: mol_type = other DNA
ggccacaggaaattatgtggttgccgcgatgcccattgtgcggggaggaaagctggaagctggcaatgtcaaact

SEQ ID NO: 319729 - DNA, 75 bp, synthetic construct
  source 1..75: mol_type = other DNA
cgtgtaatgattgcgatggcgctgttatgtcgacctaaattgctgattgccgatgagccgacaactgcgctggat

SEQ ID NO: 319730 - DNA, 75 bp, synthetic construct
  source 1..75: mol_type = other DNA
ttttagatgatttgaatagtgaaaagagcattgtttataatgcatctcgacaaaacccagtacatttttcatatg

SEQ ID NO: 319731 - DNA, 75 bp, synthetic construct
  source 1..75: mol_type = other DNA
tcaatatcgttggttcacaaaagaaactaggcgctgcctgcgaagtttcacagcaggccgtctataagtggcttc

SEQ ID NO: 319732 - DNA, 75 bp, synthetic construct
  source 1..75: mol_type = other DNA
actattacgaagatgtcagccagaaccacgaagattatctgtggggtaatacggcctggatgctggcatgcaata

SEQ ID NO: 319733 - DNA, 75 bp, synthetic construct
  source 1..75: mol_type = other DNA
ttcgctcaatagcctgatcctgacggtagagcaaattttatggggcatgttattcgggctgatgtttcagtttct

SEQ ID NO: 319734 - DNA, 75 bp, synthetic construct
  source 1..75: mol_type = other DNA
cgatcctgctgttttttgccatggacgggcatctgctgctggtgagcgtgctgtataagggcttcacctactggc

SEQ ID NO: 319735 - DNA, 75 bp, synthetic construct
  source 1..75: mol_type = other DNA
gacaaaggaatttgcttatagtcaacagggtaaggttgaaatattattttggggtatgatgatgaccccagagag

SEQ ID NO: 319736 - DNA, 75 bp, synthetic construct
  source 1..75: mol_type = other DNA
cttgcaccgtgggcgttggggctttagcggctgggcgcagcatgatgaagctatctggcaggaagtgaaagcgga

SEQ ID NO: 319737 - DNA, 75 bp, synthetic construct
  source 1..75: mol_type = other DNA
aacaacccgcaaacttcctggatgttggcggtggcgcaacccaggagcgcgtcagtgaagcctttcggctgattg

SEQ ID NO: 319738 - DNA, 75 bp, synthetic construct
  source 1..75: mol_type = other DNA
cggtcaataaactggccgtggacagcatgattgcagatatcgatgaacgcatcagtcgccagatggatggcatca

SEQ ID NO: 319739 - DNA, 75 bp, synthetic construct
  source 1..75: mol_type = other DNA
tgaaggtccggcctacaccaaatggcgcgccctgcgtgactcggaagattcgcgctatttagggcttacggcacc

SEQ ID NO: 319740 - DNA, 75 bp, synthetic construct
  source 1..75: mol_type = other DNA
aaatggcgcgccctgcgtgactcggaagattcgcgctatttagggcttacggcaccccgcttcctgcttcgccag

SEQ ID NO: 319741 - DNA, 75 bp, synthetic construct
  source 1..75: mol_type = other DNA
tttaacaaaagggaatataaaatatttaaatgtgacgataataatcgccggatgtgtatcaatccccgtatgtta

SEQ ID NO: 319742 - DNA, 75 bp, synthetic construct
  source 1..75: mol_type = other DNA
ggaacttaatacctggatccgccagtatgttgccgaccaggaaaacccaccagcagacgtacgcagtcgcaagcc

SEQ ID NO: 319743 - DNA, 75 bp, synthetic construct
  source 1..75: mol_type = other DNA
tggcgcacgcaccattcctgtcctctgtctccccagaatttatgggcctgacgtcctggaccgaactacctaata

SEQ ID NO: 319744 - DNA, 75 bp, synthetic construct
  source 1..75: mol_type = other DNA
agggttaaccaaggatggttatgtattacaagctattactgccgacaacaaatatatatacttgttgagcggagg

SEQ ID NO: 319745 - DNA, 75 bp, synthetic construct
  source 1..75: mol_type = other DNA
actccaccagaaggaatcatgcacttccgcgatcctaaagtgtggcgtgaagccgacacatggtggatggtagtc

SEQ ID NO: 319746 - DNA, 75 bp, synthetic construct
  source 1..75: mol_type = other DNA
ctggaatgcggctgtatattgataaccaatctgagcgacttgttttgtggcggtattacccacacgagaatttag

SEQ ID NO: 319747 - DNA, 75 bp, synthetic construct
  source 1..75: mol_type = other DNA
tctcacttatctacaccggacacgtctggctcgatggtgcaggtaatgacgatgcaattcgcgaagtacaatgtc

SEQ ID NO: 319748 - DNA, 75 bp, synthetic construct
  source 1..75: mol_type = other DNA
cagttactgaaaaccgacaacggctctgaatttgcagggaaaatgctggatacgtgggtgtacgaaagagggatc

SEQ ID NO: 319749 - DNA, 75 bp, synthetic construct
  source 1..75: mol_type = other DNA
cagagcaggaggataaaccccgtcgccgtgaggcggctgcaataccacagccggacgaaaacaatccggagatgc

SEQ ID NO: 319750 - DNA, 75 bp, synthetic construct
  source 1..75: mol_type = other DNA
tctcctggtattgaatatatggaggatggtcttcccgatccggtgaaagcgatggggcgtcttctggtggagaac

SEQ ID NO: 319751 - DNA, 75 bp, synthetic construct
  source 1..75: mol_type = other DNA
gattccgatagcaacaggtgagcgttcttatactcgctggggatatcgtgatttactggaaaaacaatcaattgc

SEQ ID NO: 319752 - DNA, 75 bp, synthetic construct
  source 1..75: mol_type = other DNA
tgtttaacggcgaagtcacgctgcgcaacgtgcaggaaggtggcgtgctggcctcgcttcgacttcaccgtcact

SEQ ID NO: 319753 - DNA, 75 bp, synthetic construct
  source 1..75: mol_type = other DNA
acattgaaattattaccaggtcaatggcaagacattaatttgaccctgaagggtgtatcgcccaataacctggga

SEQ ID NO: 319754 - DNA, 75 bp, synthetic construct
  source 1..75: mol_type = other DNA
gttgccacacaccaagggggagtgggcattcaagaggatgcccatcacgctggaaccgtggcagctctttgtgat

SEQ ID NO: 319755 - DNA, 75 bp, synthetic construct
  source 1..75: mol_type = other DNA
aaagcggctaaccgttttgcggtgccaccaccaccccgactggtggtgaataacgataatgagggcaacggatga

SEQ ID NO: 319756 - DNA, 75 bp, synthetic construct
  source 1..75: mol_type = other DNA
ttgcgctggcgctcatgtccgggaaaaacaaaacagcgtcagccattgcggcaggttattcggcgaagacggcca

SEQ ID NO: 319757 - DNA, 75 bp, synthetic construct
  source 1..75: mol_type = other DNA
tgatgatccgacattgcaatggggtgtgtatgatacggtgacgaaaacctttttctcgttaagcaaagaggcctc

SEQ ID NO: 319758 - DNA, 75 bp, synthetic construct
  source 1..75: mol_type = other DNA
caaggtaaacagaaccactattcgcgcatggaccaaacaggggatgccctatcttaatgcggatcgcggaaagtc

SEQ ID NO: 319759 - DNA, 75 bp, synthetic construct
  source 1..75: mol_type = other DNA
gagaaatccgagttggtcattcagcaggcagatttagcgagcgacgatgcagaacgctatcagggacaaatttgc

SEQ ID NO: 319760 - DNA, 75 bp, synthetic construct
  source 1..75: mol_type = other DNA
cggtgcgtccgcagcaaattaaatttgaagtgactgaacatgcatttcttgatgttgacaaaatgacgccgatta

SEQ ID NO: 319761 - DNA, 75 bp, synthetic construct
  source 1..75: mol_type = other DNA
aaaaggagttgtaaattattttgtacttggtaaaggagctaatcagattacggcttgttcctttcagaatccaac

SEQ ID NO: 319762 - DNA, 75 bp, synthetic construct
  source 1..75: mol_type = other DNA
caacccatacttcgaggctaatgccgggggggcagaccttgctatagataatactgggacgcgacctgtaacggt

SEQ ID NO: 319763 - DNA, 75 bp, synthetic construct
  source 1..75: mol_type = other DNA
cttaattatgatgattaccctgccgactttgtaggtgctccgggtgtccgctgtttttactcaggcgagaacatg

SEQ ID NO: 319764 - DNA, 75 bp, synthetic construct
  source 1..75: mol_type = other DNA
attggctactctaacttgcataaccttaaatcattgaatgtcgatattttgaaaatcgacaaatcgtttgttgaa

SEQ ID NO: 319765 - DNA, 75 bp, synthetic construct
  source 1..75: mol_type = other DNA
cgaagtggcaattgatgattttggtattggctactctaacttgcataaccttaaatcattgaatgtcgatatttt

SEQ ID NO: 319766 - DNA, 75 bp, synthetic construct
  source 1..75: mol_type = other DNA
attttggggagtcttgttctgctattactctggctacgtattcgacaaaactatttgtctcccaaacgcaaattg

SEQ ID NO: 319767 - DNA, 75 bp, synthetic construct
  source 1..75: mol_type = other DNA
tccggcagagtttattccgctggcagaaaaggaggggatgatagaacaggtaactgattatgttattgataatgt

SEQ ID NO: 319768 - DNA, 75 bp, synthetic construct
  source 1..75: mol_type = other DNA
gtttctattaacctgtcggcctccgattttcatacgtcacggttgatagcgcgaaccaatcagaaaacagagcaa

SEQ ID NO: 319769 - DNA, 75 bp, synthetic construct
  source 1..75: mol_type = other DNA
ctttttctcgttaagcaacgaggcctcggcagcaacgttttctccgctgattcatttgaatgatttaaccgtaca

SEQ ID NO: 319770 - DNA, 75 bp, synthetic construct
  source 1..75: mol_type = other DNA
gtttcgatgcaatcactattactcaaagcaggtttaaacacagaacaggttgcgcaactggagtccgaaaatgaa

SEQ ID NO: 319771 - DNA, 75 bp, synthetic construct
  source 1..75: mol_type = other DNA
caatcctaccgctgcgcagcgcattgaatatgttgtcggttccaatgaggacctgacaggtaagctcatttacac

SEQ ID NO: 319772 - DNA, 75 bp, synthetic construct
  source 1..75: mol_type = other DNA
ggctcacatagccagaacgaatcacaggagccacaaccgccggtagatgagttcacagcagcgaggttgtcataa

SEQ ID NO: 319773 - DNA, 75 bp, synthetic construct
  source 1..75: mol_type = other DNA
cctgattaacttcatggccaactggcgcgcgttaaaacaggtacttcaacacggcgatccacgtcgtgtcgcgtg

SEQ ID NO: 319774 - DNA, 75 bp, synthetic construct
  source 1..75: mol_type = other DNA
ctgaaaaagcagggcagcatgtacatcatgaacagcacggaaaacatgccctttatcgatctccagtgccgcaag

SEQ ID NO: 319775 - DNA, 75 bp, synthetic construct
  source 1..75: mol_type = other DNA
ggcgaaagtgaaaaaaagaaagacgggtaaccggtcaaaacgatgccgggttagcgaagttgaccccgatctcat

SEQ ID NO: 319776 - DNA, 75 bp, synthetic construct
  source 1..75: mol_type = other DNA
gattcaattagatatcggtagatatcaatttgttggtgttattgatacaatcaatagttacgtcaaaagcaagaa

SEQ ID NO: 319777 - DNA, 75 bp, synthetic construct
  source 1..75: mol_type = other DNA
gtgagttggaagttttaaagaaacatattgactcaggagatattagaattccgtcactatggcagggattaaaac

SEQ ID NO: 319778 - DNA, 75 bp, synthetic construct
  source 1..75: mol_type = other DNA
caatggaaagggatcattcagaatattcaggaagacgtgcaggaagttatgcgtatgtatttccctgaagaggat

SEQ ID NO: 319779 - DNA, 75 bp, synthetic construct
  source 1..75: mol_type = other DNA
aatcgcgttcgtcgttgccaacgctgtctattaccagagaaattatgtctctgttcaacgatcacgccagtggaa

SEQ ID NO: 319780 - DNA, 75 bp, synthetic construct
  source 1..75: mol_type = other DNA
tctttcccgcctcgtatgctgatgagcaacgggaagtgatcttcacaccacctgccggtaagccaccgctgttta

SEQ ID NO: 319781 - DNA, 75 bp, synthetic construct
  source 1..75: mol_type = other DNA
tgcctatcgcctgcgtgaagcccaggctgaaggccaatactgcactgccgaagttgccatcgcactgttagatat

SEQ ID NO: 319782 - DNA, 75 bp, synthetic construct
  source 1..75: mol_type = other DNA
tacgcaaaaagtgcttgccgatctggctgctgctgagcaggagctggaacaagcttttgagcgttgggagtatct

SEQ ID NO: 319783 - DNA, 75 bp, synthetic construct
  source 1..75: mol_type = other DNA
gatctttatgccgaaagggtttaccgagcacagctttgccgattatgacatgtacttttcgctgaaccgcgccac

SEQ ID NO: 319784 - DNA, 75 bp, synthetic construct
  source 1..75: mol_type = other DNA
ggcactggattcagcgaaggcaatgatattctttggtcgcaggcttggcataaagattgagaacttcgttgcaat

SEQ ID NO: 319785 - DNA, 75 bp, synthetic construct
  source 1..75: mol_type = other DNA
acgctttcctctttcagagtcaaccctgaatttcaggatttttctcttcaaccgaaccggctgtttgtgtgaagt

SEQ ID NO: 319786 - DNA, 75 bp, synthetic construct
  source 1..75: mol_type = other DNA
ccgatgtggccgagtttatgatgttgcagatgcttaaccgcagccagatgcacttcactcaccgcacgcacctgc

SEQ ID NO: 319787 - DNA, 75 bp, synthetic construct
  source 1..75: mol_type = other DNA
gaaattaatgctcaccatcgcgatatcagcctgatggtgaatgccgccggtatcttcatgcccaaaggatttacc

SEQ ID NO: 319788 - DNA, 75 bp, synthetic construct
  source 1..75: mol_type = other DNA
gtggcaaacactattctcttcctgttgtctgacaaaacctcatgggtgacgggcgctatctgggatgtcgatgcg

SEQ ID NO: 319789 - DNA, 75 bp, synthetic construct
  source 1..75: mol_type = other DNA
tttgctctacctactgatatgcctattgaggatggggcttttattgaaccgattaccgttggcctgcatgctttt

SEQ ID NO: 319790 - DNA, 75 bp, synthetic construct
  source 1..75: mol_type = other DNA
aaccattggcctgctggccattcagtgcgctgtcgcgctgggagcaaagagtgtgacggcgatcgacattagttc

SEQ ID NO: 319791 - DNA, 75 bp, synthetic construct
  source 1..75: mol_type = other DNA
cttcaaacgccctgtttggttcactgcaatcgaccacggcgcagcaaatcaacgtctctgacaccctgctggtgg

SEQ ID NO: 319792 - DNA, 75 bp, synthetic construct
  source 1..75: mol_type = other DNA
caagttaatgtcacttccagatcatggaagatgcccactatgttctcaaagagtagtatcgacattagatcatca

SEQ ID NO: 319793 - DNA, 75 bp, synthetic construct
  source 1..75: mol_type = other DNA
tctgctggcagccgatgtgcgcctggcgctgcggcgcagcattacccatccgttcgttcgcaagcaggagctgac

SEQ ID NO: 319794 - DNA, 75 bp, synthetic construct
  source 1..75: mol_type = other DNA
atggttcagcgattgctgtttttcgttctgaccatcctggttgttaaacgtatatcatcccttccgcttcgcctg

SEQ ID NO: 319795 - DNA, 75 bp, synthetic construct
  source 1..75: mol_type = other DNA
gtgatgaggtagtcgataaaatcaatgccatagttgaaaagagaagagctgagggtgcgaaggaaaaagatatta

SEQ ID NO: 319796 - DNA, 75 bp, synthetic construct
  source 1..75: mol_type = other DNA
gtaaatggctttgtcagtgtttcccttacgggcgtgatgggaaacgcatacgtaagcaatttgctaccaaaggtg

SEQ ID NO: 319797 - DNA, 75 bp, synthetic construct
  source 1..75: mol_type = other DNA
taccgatttcacctcaattgcaggctatgcttcctaaaaaacgaggagcgctattttcaccatgttatgaggctt

SEQ ID NO: 319798 - DNA, 75 bp, synthetic construct
  source 1..75: mol_type = other DNA
tgcagaattgacagacgtgcttacacaaatgattaatgcgcataaaaccacaattcgtttgggtcatgaacgcat

SEQ ID NO: 319799 - DNA, 75 bp, synthetic construct
  source 1..75: mol_type = other DNA
cagaagtacggcagaggactaaggttatcacccttagagtaaataacagaatcgcaaacgaaatcaggcggcgag

SEQ ID NO: 319800 - DNA, 75 bp, synthetic construct
  source 1..75: mol_type = other DNA
ttccaggtatttatatgaattaatccgacttggtcggatgcagaagaaattatttgataagggaaagcggccgaa

SEQ ID NO: 319801 - DNA, 75 bp, synthetic construct
  source 1..75: mol_type = other DNA
tgaggtatgcgcattttgccccaaaccaccttgatgctgcggtagcacttaacccgttcgataaccgccaagagg

SEQ ID NO: 319802 - DNA, 75 bp, synthetic construct
  source 1..75: mol_type = other DNA
cagatttgccgtaaacctggatgccttatcgcgtagcggtgtaaaggtcaacccggatgtcttaatgctcgcacg

SEQ ID NO: 319803 - DNA, 75 bp, synthetic construct
  source 1..75: mol_type = other DNA
cttccgcgcagattatttaatcaccagtataggtgccattgaacatgacggcaccctactggaatttgatgtcaa

SEQ ID NO: 319804 - DNA, 75 bp, synthetic construct
  source 1..75: mol_type = other DNA
tttataagaatcaggatattgaagtgatggtgccgggaggcactttacgcgctcataacggcgggattatcggcc

SEQ ID NO: 319805 - DNA, 75 bp, synthetic construct
  source 1..75: mol_type = other DNA
ctcaacactgcaatggaaaatattcataagtatgttgaagacccggctcagaaaaaattactgcgggaaggtgat

SEQ ID NO: 319806 - DNA, 75 bp, synthetic construct
  source 1..75: mol_type = other DNA
acccggatcgcgaaggacaactgttggttgatgagattctggatgaagcgggatgtaaaaaaccggtactgcgtt

SEQ ID NO: 319807 - DNA, 75 bp, synthetic construct
  source 1..75: mol_type = other DNA
gcgtgaagatgatcttcccattatcccggaaaaatggattatcagtcctcgtgaagatgcagaaaaacagctcaa

SEQ ID NO: 319808 - DNA, 75 bp, synthetic construct
  source 1..75: mol_type = other DNA
ttgaggcgatttgctcccggttgggggatccgcttgcttctcaatttgataaaaacatgtttgccacctacaggg

SEQ ID NO: 319809 - DNA, 75 bp, synthetic construct
  source 1..75: mol_type = other DNA
tcacaggattgcagcgtggaagcagaactgggccgcctgggcggtgttgaagatgacatgagcgttgacgccgaa

SEQ ID NO: 319810 - DNA, 75 bp, synthetic construct
  source 1..75: mol_type = other DNA
ttggggtgtctgttatttattcatgagaccttaccggaaaataacaggggctcatcattgctattaaccggacga

SEQ ID NO: 319811 - DNA, 75 bp, synthetic construct
  source 1..75: mol_type = other DNA
ttggcggagaaacactgttaaaaatgagtctggcaattacggtgtgttatacgctggcattgctggttgctctca

SEQ ID NO: 319812 - DNA, 75 bp, synthetic construct
  source 1..75: mol_type = other DNA
ggttaaagcctggtttgcggaaaatccgcagggtaatgatcctcgttattatatgcgcgtcggaggtgatgctgc

SEQ ID NO: 319813 - DNA, 75 bp, synthetic construct
  source 1..75: mol_type = other DNA
gtagacatccctctggtactgcatggcgccagcgatgtcccggatgaatttgttcgctggactattaaactgggt

SEQ ID NO: 319814 - DNA, 75 bp, synthetic construct
  source 1..75: mol_type = other DNA
tcgcaggattgcagcgtagaagcggagctgggacgactgggcggcgtggaagatgatatgcatgttgatgctgaa

SEQ ID NO: 319815 - DNA, 75 bp, synthetic construct
  source 1..75: mol_type = other DNA
gatattcctgggttttgtacctttatggaacacgaactggttgctaaagagacggatggactgccttatcgttat

SEQ ID NO: 319816 - DNA, 75 bp, synthetic construct
  source 1..75: mol_type = other DNA
atgaataacaatgaaccagatactctgcctgatcccgcgataggctatatcttccagaatgatattgtggcgtta

SEQ ID NO: 319817 - DNA, 75 bp, synthetic construct
  source 1..75: mol_type = other DNA
ttggcgtaccagtgatgttgattggtacccctaaagcacgagagatttttgaggctgatttgcggtctgcacgta

SEQ ID NO: 319818 - DNA, 75 bp, synthetic construct
  source 1..75: mol_type = other DNA
taaaaggggctcatcattgctattaaccggacgaagcgtggtgcagaaccgccgttttatgcgcttttgcctgat

SEQ ID NO: 319819 - DNA, 75 bp, synthetic construct
  source 1..75: mol_type = other DNA
ctcatcattactattaaccggacgaagtgtggtgcagaaccgccgtttcatgcgtttttgcctgattcaaagttt

SEQ ID NO: 319820 - DNA, 75 bp, synthetic construct
  source 1..75: mol_type = other DNA
ttctattgctcgtgacaaatatcagggagtaacgttgacccagttttttgcgctgttaatgacggtgaatggcct

SEQ ID NO: 319821 - DNA, 75 bp, synthetic construct
  source 1..75: mol_type = other DNA
acccagaatttttaaaaatggtgcacattattatccaataacgttaggccatgaatttgaatttagcggctatat

SEQ ID NO: 319822 - DNA, 75 bp, synthetic construct
  source 1..75: mol_type = other DNA
ggtgggatccggtgttgatgatttacaccctggcgatgcggttgcctgtgtgccgttattaccctgttttacttg

SEQ ID NO: 319823 - DNA, 75 bp, synthetic construct
  source 1..75: mol_type = other DNA
ataaggggaacaagtccgggctggtagcgaatgatatcattaagggtattcctttgatttgccttcttgatagcg

SEQ ID NO: 319824 - DNA, 75 bp, synthetic construct
  source 1..75: mol_type = other DNA
catttaacagcagcgaaatgagtgcgccacaaatgcaggctgttttacgcgaactgcgctttaatcagcttatcc

SEQ ID NO: 319825 - DNA, 75 bp, synthetic construct
  source 1..75: mol_type = other DNA
tgcaaacatttaacagccttgaaatgagcgcgccgcaaatgcagggcgttttacgcgagctgcgctttaatcagc

SEQ ID NO: 319826 - DNA, 75 bp, synthetic construct
  source 1..75: mol_type = other DNA
cgctcaccgtggaagctttgaaagcttcacccaggcggtgcgtgacatcgctcgtaatgccatgccgggcaaagt

SEQ ID NO: 319827 - DNA, 75 bp, synthetic construct
  source 1..75: mol_type = other DNA
ttgtctttctggcgaatcaggggaaagctattcatattgatgaacctgtggtgacgccaatgcaggcgcggcaaa

SEQ ID NO: 319828 - DNA, 75 bp, synthetic construct
  source 1..75: mol_type = other DNA
ttgtctttctggcgaatcagggaaaggctattcatatcgatgagcccgtagtgacgccaatgcaggcacggcaaa

SEQ ID NO: 319829 - DNA, 75 bp, synthetic construct
  source 1..75: mol_type = other DNA
cggggtgagtttattcgtggctgggatgatgggcgtggagtggacagtgggcgagcgttattgagtgctcagagc

SEQ ID NO: 319830 - DNA, 75 bp, synthetic construct
  source 1..75: mol_type = other DNA
gacggtggtgaaagtatggactgggccaatgcccgcccggtgcaggttctgattaatggggtctggcggaatgta

SEQ ID NO: 319831 - DNA, 75 bp, synthetic construct
  source 1..75: mol_type = other DNA
agaagccttgcgaaacgatggggggcactgactgaagagttgaatgaactggacgaatcgctggataaactgacc

SEQ ID NO: 319832 - DNA, 75 bp, synthetic construct
  source 1..75: mol_type = other DNA
cgttttcttattaaaaatagtatttatgttgttgaagttaaccgaccagaccgctcaaaacgccgccttgaagga

SEQ ID NO: 319833 - DNA, 75 bp, synthetic construct
  source 1..75: mol_type = other DNA
tcggtggtgtcattgagaaggccgggataaaactgaataaagaggaacacgaccagttatataaagccatattat

SEQ ID NO: 319834 - DNA, 75 bp, synthetic construct
  source 1..75: mol_type = other DNA
ccgagtgggtttttacagctgtgatgctgttcgtcggcgataatctctcatcactaagggaagcactacatgacc

SEQ ID NO: 319835 - DNA, 75 bp, synthetic construct
  source 1..75: mol_type = other DNA
gtgcgctgggtatcggcgttcagaacgcgctgggcggaaactcaattgctttcggggataacgatacaggtataa

SEQ ID NO: 319836 - DNA, 75 bp, synthetic construct
  source 1..75: mol_type = other DNA
gttcagcgtgatggcgacaccatgaccggggaactgaaaatccgtggtgttaatgcgctgaggattttcaacgaa

SEQ ID NO: 319837 - DNA, 75 bp, synthetic construct
  source 1..75: mol_type = other DNA
gatggctctggagtggtttcgctgaagatagactggatcattgaacgttatcaattgccccaaagctatcagcgt

SEQ ID NO: 319838 - DNA, 75 bp, synthetic construct
  source 1..75: mol_type = other DNA
tccttctgctggcgagtttttatcactcgccaggcaattttcaggcgcatttccattgccagaggtggggcgaat

SEQ ID NO: 319839 - DNA, 75 bp, synthetic construct
  source 1..75: mol_type = other DNA
caggaaatcgctgatcagcaggccgcactccggcaaaaattttgcccggtgtggcgcttttgctacaagggagcc

SEQ ID NO: 319840 - DNA, 75 bp, synthetic construct
  source 1..75: mol_type = other DNA
cactgcgaccgttcagcattaacctgcggacgggtgaagtttcaatgtctcacccggtatctgttggcggcggct

SEQ ID NO: 319841 - DNA, 75 bp, synthetic construct
  source 1..75: mol_type = other DNA
cataaagtgtctgttggcggtggttctcaggtcaatggtgcgctgggtatcggcgttcagaacgcgctgggcgga

SEQ ID NO: 319842 - DNA, 75 bp, synthetic construct
  source 1..75: mol_type = other DNA
gcctggagccattaatcgctcaccgtggaagctttgaaagcttcgcccaggcggtgcgtgacatcgctcgtaatg

SEQ ID NO: 319843 - DNA, 75 bp, synthetic construct
  source 1..75: mol_type = other DNA
caaggatgaggctgttgaaaacctcggattaaaacccacggtggacaaggcaaaaaatgccgttcagcgtgatgg

SEQ ID NO: 319844 - DNA, 75 bp, synthetic construct
  source 1..75: mol_type = other DNA
gtaaaacccttcgtgaactggggatgatcagcgacagaggtacgtttatcgcgtacggacgttatcccgacacct

SEQ ID NO: 319845 - DNA, 75 bp, synthetic construct
  source 1..75: mol_type = other DNA
attaatgtgcaggaaaccggaagtaattcggcagataacatcggtggcgtgtattaccgaccgcttcagaaactg

SEQ ID NO: 319846 - DNA, 75 bp, synthetic construct
  source 1..75: mol_type = other DNA
ccggaaatcagccaggattttcacgatttaatttcaccagtaactctgtgggtgatggtgtgaattttgttgcag

SEQ ID NO: 319847 - DNA, 75 bp, synthetic construct
  source 1..75: mol_type = other DNA
gtttatacagcggaccgggaagtctcaaggtacttagccgtttctctcataaacacatctggattatttgcgatg

SEQ ID NO: 319848 - DNA, 75 bp, synthetic construct
  source 1..75: mol_type = other DNA
tggcggtgatgggctttgcggaattgtttatcgacccggttgccatgtcgcaaattacgcgcattgaaatccccg

SEQ ID NO: 319849 - DNA, 75 bp, synthetic construct
  source 1..75: mol_type = other DNA
ggcgatgggctttggcctggcggcggttggcatgatcgcgggtctggttatcttcttatgtggcaatcgtcattt

SEQ ID NO: 319850 - DNA, 75 bp, synthetic construct
  source 1..75: mol_type = other DNA
gcgtcgggcgaaacatattcatgctttaagcaaatggcttcaggattatcagccagatgttgttatttgtattga

SEQ ID NO: 319851 - DNA, 75 bp, synthetic construct
  source 1..75: mol_type = other DNA
gtgaaacatctgacagaaatggtgagacagcacaaagcgggcaaaacaaatggaatttatgccgtttgttccgca

SEQ ID NO: 319852 - DNA, 75 bp, synthetic construct
  source 1..75: mol_type = other DNA
ccactgcagtgaaaaaaggcgattgtcttgccacccgtggcaaaatgcataatgcatcgacgcttgcaggaatag

SEQ ID NO: 319853 - DNA, 75 bp, synthetic construct
  source 1..75: mol_type = other DNA
atgaaaaacaccgccagaccgtcagcgggtcgtgccccggggaaaggagaagtgggcacacagaccgggcgcacg

SEQ ID NO: 319854 - DNA, 75 bp, synthetic construct
  source 1..75: mol_type = other DNA
ccaccaaggctatgtattttttcatcttcacgttttagcgcagccctacaagagaacaacgcaacttctttgcct

SEQ ID NO: 319855 - DNA, 75 bp, synthetic construct
  source 1..75: mol_type = other DNA
aacaagaggcgatgatttcaggctgcaatggtttttattttggcaacgagtcaccgacattccagatggaattaa

SEQ ID NO: 319856 - DNA, 75 bp, synthetic construct
  source 1..75: mol_type = other DNA
gtttatcgacccggttgccatgtcgcaaattacacgcattgaaatccccggcgtgaccggtgtattaaccggcat

SEQ ID NO: 319857 - DNA, 75 bp, synthetic construct
  source 1..75: mol_type = other DNA
tggcagtgatgggctttgccgaactgtttatcgatccggtagccatgtcgcaaattacgcgtattgaaatccccg

SEQ ID NO: 319858 - DNA, 75 bp, synthetic construct
  source 1..75: mol_type = other DNA
gtgcctctttcttgtggttatctgtgttgttaacgcactggctatgtttgttatccctgaaaaattcagtctgca

SEQ ID NO: 319859 - DNA, 75 bp, synthetic construct
  source 1..75: mol_type = other DNA
atgaaaatagcgtttatcggcgaagctgtttcaggatttggcggtatggaaacagtcattcgagatgttattacc

SEQ ID NO: 319860 - DNA, 75 bp, synthetic construct
  source 1..75: mol_type = other DNA
gattgcgcagagcaacgcgctggtaactattgaacaaaacggttttgtcgtttaccagaaggaggttccgccagg

SEQ ID NO: 319861 - DNA, 75 bp, synthetic construct
  source 1..75: mol_type = other DNA
ccctttgattggggtgatgacgttacgacgcctcgtcggcaaatatatatgtctaactcaacgacgtttgatgat

SEQ ID NO: 319862 - DNA, 75 bp, synthetic construct
  source 1..75: mol_type = other DNA
atgactgagtcagccgagaagtatttccccgcttattcgcaccttcctcagtattacagtgactataaagcgtcg

SEQ ID NO: 319863 - DNA, 75 bp, synthetic construct
  source 1..75: mol_type = other DNA
ccggcacaacagcacaaaatcacatgccggaacaggataccgtctccggtgagcatgagggacaataccagtggg

SEQ ID NO: 319864 - DNA, 75 bp, synthetic construct
  source 1..75: mol_type = other DNA
ataccctcgcagcaagtcaggcgtatgacgagaatcatcatgaagagaaacgctttaatatttttatctcgattc

SEQ ID NO: 319865 - DNA, 75 bp, synthetic construct
  source 1..75: mol_type = other DNA
ttgaagagctggaaaatggttacgttccgccagaaaactgggagcggggaatcaatgcgttttatacgtcttatt

SEQ ID NO: 319866 - DNA, 75 bp, synthetic construct
  source 1..75: mol_type = other DNA
ccctgagcgactcaccactcttcgacgtaatacagtcaaagaagaatttggggccgacattacagtctcaaccgc

SEQ ID NO: 319867 - DNA, 75 bp, synthetic construct
  source 1..75: mol_type = other DNA
aaacgcccttcttgaactcaaaggtgaaacacgacctgttgttggccggggaccagcagatcaggtactcatgtt

SEQ ID NO: 319868 - DNA, 75 bp, synthetic construct
  source 1..75: mol_type = other DNA
tatggtagagaattgaagattgataatcgaattgtctggcatggttggcaaaaacatccatgggaggtagtgcgt

SEQ ID NO: 319869 - DNA, 75 bp, synthetic construct
  source 1..75: mol_type = other DNA
tccaataacttgcaacggataagctataccctcgcagcaagtcaggcttatgacgagaatcatcatgaagaaaaa

SEQ ID NO: 319870 - DNA, 75 bp, synthetic construct
  source 1..75: mol_type = other DNA
tgtcaccgatgcaagaagaagaaatagcctacagagctataaacttctgtaatgctattggtcttacagcctcaa

SEQ ID NO: 319871 - DNA, 75 bp, synthetic construct
  source 1..75: mol_type = other DNA
tctctagacgcgatgctggatttaaagcaagaaaagatgcactggacattgcttcagattatgaaaacatttctg

SEQ ID NO: 319872 - DNA, 75 bp, synthetic construct
  source 1..75: mol_type = other DNA
gcaaaatcaatacgttcgtgaaatgcgaaaatatggcgtacgaggtttacgttatgatgcggcaaaacactcaaa

SEQ ID NO: 319873 - DNA, 75 bp, synthetic construct
  source 1..75: mol_type = other DNA
gaagcgttatcacaaaccgtcagtggtttaggtcgcttattaaattatacgctttgtgaaatgaccaaaagttaa

SEQ ID NO: 319874 - DNA, 75 bp, synthetic construct
  source 1..75: mol_type = other DNA
gtgatttatggctcggtgggcgcagtagaagaagcgttatcacaaaccgtcagcggtttaggtcgcttattaaat

SEQ ID NO: 319875 - DNA, 75 bp, synthetic construct
  source 1..75: mol_type = other DNA
agctagcggcgactcagaagaaatatctcgtgaaagagttgaaaaataatcgaggtaatgcaatgaaggtgatag

SEQ ID NO: 319876 - DNA, 75 bp, synthetic construct
  source 1..75: mol_type = other DNA
cgaggtaatgcaatgaaggtgatagaaaaatacccaatgtatttccaagaaagaatgtcagagttgatagaagat

SEQ ID NO: 319877 - DNA, 75 bp, synthetic construct
  source 1..75: mol_type = other DNA
aaacaggggctaagctcgccattccgctgacgctaacgattgacgcgctcaatatctcattggccgatacactat

SEQ ID NO: 319878 - DNA, 75 bp, synthetic construct
  source 1..75: mol_type = other DNA
ccaatatttgataccagacctctccgcgccgccatgattgtctttctcctgatgcaggaggccaataatgcttag

SEQ ID NO: 319879 - DNA, 75 bp, synthetic construct
  source 1..75: mol_type = other DNA
aggtttcagagcaaattttggtggattgttataaacgtggtggcgatattttacgtggcctgagttgctattatt

SEQ ID NO: 319880 - DNA, 75 bp, synthetic construct
  source 1..75: mol_type = other DNA
aggtctcagagcaaattttggtggactgttataaacgtggtggcgacattttacgtggtctgagttgctattatt

SEQ ID NO: 319881 - DNA, 75 bp, synthetic construct
  source 1..75: mol_type = other DNA
atggcccgttcagctaaacctcgcaaacaaaaatccagcagacaatccacccgctcagctcccctgttgcgatgg

SEQ ID NO: 319882 - DNA, 75 bp, synthetic construct
  source 1..75: mol_type = other DNA
atgtttgaccgttaccgtcttatatcactggcgctgacagataatgaagccgggcttttttttcccgacttcgcc

SEQ ID NO: 319883 - DNA, 75 bp, synthetic construct
  source 1..75: mol_type = other DNA
ctgatttattcaacaaagcctccattcattaaagatccagtaacaaaagaacgtaaacaaatccatccagaagat

SEQ ID NO: 319884 - DNA, 75 bp, synthetic construct
  source 1..75: mol_type = other DNA
tttgcccgtgagattgattttgagcagttgctcgaaatgcaggaaaaactgaatgttgttattgatgaacgtcgt

SEQ ID NO: 319885 - DNA, 75 bp, synthetic construct
  source 1..75: mol_type = other DNA
ccatgcgtctttttttgtgtctttgcctttgtgcacctgttacctgtacagcggtttctttactgttgtagctat

SEQ ID NO: 319886 - DNA, 75 bp, synthetic construct
  source 1..75: mol_type = other DNA
acggtcttgagacacttattcgcgctcatctggctggcagaactggccatatcagaacctgtgaaacccgtcagc

SEQ ID NO: 319887 - DNA, 75 bp, synthetic construct
  source 1..75: mol_type = other DNA
atgggaaaaataaaatattggctaatagcaggatttattatacttctttcgattgtttacattacgaccattcaa

SEQ ID NO: 319888 - DNA, 75 bp, synthetic construct
  source 1..75: mol_type = other DNA
caccgttcgcgagattcgcgccaattcagaatataccgattcaatggtcggctttaaaactcccgttttaaatga

SEQ ID NO: 319889 - DNA, 75 bp, synthetic construct
  source 1..75: mol_type = other DNA
cggcagccgggcgtaggaacccgtgtaatctaacggcgacacaacacgcgccaggcgtggttttttgtgtcgtag

SEQ ID NO: 319890 - DNA, 75 bp, synthetic construct
  source 1..75: mol_type = other DNA
ccacccatgagcgtaggaactccggtggtagcgttacccgctatctaacggaggttgccattatggctacagtcc

SEQ ID NO: 319891 - DNA, 75 bp, synthetic construct
  source 1..75: mol_type = other DNA
gatggatatctttatgtcgagcaaagcaaaacaggcgtaaaaattgccatcccaacaactgaaccgccccgggtt

SEQ ID NO: 319892 - DNA, 75 bp, synthetic construct
  source 1..75: mol_type = other DNA
gaagatgctgaacgaaaagcggctgaacgtaaggaactggaagctaaataccaacaggcagctaactacattatt

SEQ ID NO: 319893 - DNA, 75 bp, synthetic construct
  source 1..75: mol_type = other DNA
gtctggtcgtgggcgtgcgccaaaaccaattgctgaagcactggctggcggtcgctcccttgaagagtttctcat

SEQ ID NO: 319894 - DNA, 75 bp, synthetic construct
  source 1..75: mol_type = other DNA
aagaacgtcgtgaagatgctgaacgtgaagcggctgaacgagcagagcgtgaacggaaacgtcaggaactgcttc

SEQ ID NO: 319895 - DNA, 75 bp, synthetic construct
  source 1..75: mol_type = other DNA
ccaattgatgaagcgttgaaagccgggcgttctcttgatgagtttctcatcaaaaaagatgcttccagctctgtt

SEQ ID NO: 319896 - DNA, 75 bp, synthetic construct
  source 1..75: mol_type = other DNA
atgagtgaaaatgaaacatttgatgcaacacgaaagctactcctgaatattcgctctgttcgtgtttttgcgcga

SEQ ID NO: 319897 - DNA, 75 bp, synthetic construct
  source 1..75: mol_type = other DNA
ctggtgggcagcagtggcggtcagggtcggccttcactctatttcgaaattcgccgccagggtcaggcggtcaat

SEQ ID NO: 319898 - DNA, 75 bp, synthetic construct
  source 1..75: mol_type = other DNA
ctggcggtaaaaaggtattaacgccggatgattttcagggtgagaactacatcagcctttcccgtactgacagct

SEQ ID NO: 319899 - DNA, 75 bp, synthetic construct
  source 1..75: mol_type = other DNA
aatcgccgcagcactgaatacaccaaccacaaccattaatgcggagctacgccgtctctggcgcagcggttcagt

SEQ ID NO: 319900 - DNA, 75 bp, synthetic construct
  source 1..75: mol_type = other DNA
atgcataaatcagaaaatgaaaaaatagattctattctggatgaacatgagcagatgttcagaaaacagggttct

SEQ ID NO: 319901 - DNA, 75 bp, synthetic construct
  source 1..75: mol_type = other DNA
gcgacaacggtgttggtcccgggactactttaggtcttggttcactaataacttcattactgtcaatagccgtaa

SEQ ID NO: 319902 - DNA, 75 bp, synthetic construct
  source 1..75: mol_type = other DNA
ctcatccggggtgtagcggcggagagatcgccgcagcactgaataccccaaccacagccattaatgctgagttac

SEQ ID NO: 319903 - DNA, 75 bp, synthetic construct
  source 1..75: mol_type = other DNA
tcgaagaagcctgcctgagatggcttgaggaaaaagccgacaagaaatccatcgattccgataaatccagaatcg

SEQ ID NO: 319904 - DNA, 75 bp, synthetic construct
  source 1..75: mol_type = other DNA
ctggcgattgaattacaccaggatattccggaagaagagaaaccgcagcgcatcgccatcaacaacaatccggcg

SEQ ID NO: 319905 - DNA, 75 bp, synthetic construct
  source 1..75: mol_type = other DNA
tttacgccagtggcccgaaccagaagtgggcaggagacatcacgtacttacgtacagatgaaggctggctgtatc

SEQ ID NO: 319906 - DNA, 75 bp, synthetic construct
  source 1..75: mol_type = other DNA
gagcacaacatcgacgacagcggcttcaccacgcggcttgagctggaattaaaaattcctgaatggatagcacaa

SEQ ID NO: 319907 - DNA, 75 bp, synthetic construct
  source 1..75: mol_type = other DNA
tcgggatgaacaggatatccggcgtctctggcaggagaaagtggatgcaatgcaggagtctgccacccgtcagcg

SEQ ID NO: 319908 - DNA, 75 bp, synthetic construct
  source 1..75: mol_type = other DNA
atggcaaagaaccgtagccgtcgtctgcgtaaaaaaatgcacatcgacgagttccaggaattaggattttcggtg

SEQ ID NO: 319909 - DNA, 75 bp, synthetic construct
  source 1..75: mol_type = other DNA
gaagcatgcgcgccatggtggcgcgcatgcttaagggttactctgtttttattcttgcttattattcccgttgtt

SEQ ID NO: 319910 - DNA, 75 bp, synthetic construct
  source 1..75: mol_type = other DNA
gacaaaggcgtagtgtcctactttcccaaaactaaggaggctgcactccagatcgtaaatcaaattgaatctcga

SEQ ID NO: 319911 - DNA, 75 bp, synthetic construct
  source 1..75: mol_type = other DNA
agagcgagcaacaaacgctgttatacgaacaacgcgcccagcaggcgaagctgacccaggcgctgaacgagcgta

SEQ ID NO: 319912 - DNA, 75 bp, synthetic construct
  source 1..75: mol_type = other DNA
aggcagtgcgcgacaggcagaaagaagcgacgcgcaaaggcaccacctacaaaccaaccgaaagcgaaaaatcgc

SEQ ID NO: 319913 - DNA, 75 bp, synthetic construct
  source 1..75: mol_type = other DNA
tccttaacctgctggaagcacaggggtatgccgtcgtaccgatggaaaacgacgtgctgaaggtggtgaaatcca

SEQ ID NO: 319914 - DNA, 75 bp, synthetic construct
  source 1..75: mol_type = other DNA
cgccgcacaactggatgccgcattccgtcagggcgagcataccggtattcagctgattcttagcggtgaagaaag

SEQ ID NO: 319915 - DNA, 75 bp, synthetic construct
  source 1..75: mol_type = other DNA
ctaagtgaactgcgcgctaacgaatcccgtctgcgtaatagcatcgcccgtgcggaagcggcagcaagagcgcgc

SEQ ID NO: 319916 - DNA, 75 bp, synthetic construct
  source 1..75: mol_type = other DNA
tgcggaagccgcggcgaaagcgcgtgctgaacgtgaagcgcgtgaagcccaggcggttcgcgaccgccagaaaga

SEQ ID NO: 319917 - DNA, 75 bp, synthetic construct
  source 1..75: mol_type = other DNA
atcgccgccagcaaacacagtaatgccctgattgttaccgcgccgcaggacatcatgcagtcgctgcaaagcgtg

SEQ ID NO: 319918 - DNA, 75 bp, synthetic construct
  source 1..75: mol_type = other DNA
agcgcaaactgaaaaccaccgtactggctaacgacggcgaactgatcgtgctcggcggtctgatggacgaccagg

SEQ ID NO: 319919 - DNA, 75 bp, synthetic construct
  source 1..75: mol_type = other DNA
ctgaagaggtgatcccgctggataacgcctcggcttcggaaatcgcccgcgtgctggaaagcctgactaaaaaca

SEQ ID NO: 319920 - DNA, 75 bp, synthetic construct
  source 1..75: mol_type = other DNA
aattacgatccctccaacgtgattatgcttaccggacgcgcctcggttgtggaacggctgacggaagtgatccag

SEQ ID NO: 319921 - DNA, 75 bp, synthetic construct
  source 1..75: mol_type = other DNA
acaccgcgcagccgatattgcctgcgcaaaatcaggccttaccgccagaagttcgtgcgttccttaatgccggga

SEQ ID NO: 319922 - DNA, 75 bp, synthetic construct
  source 1..75: mol_type = other DNA
ggtgaaatccagcgccgcgaaagtcgagccgctgccgctggtcggtgaaggcagcgacaactacgcgggcgatga

SEQ ID NO: 319923 - DNA, 75 bp, synthetic construct
  source 1..75: mol_type = other DNA
acattctacaggtggtgtcgaatttttcaatattctaaataaagtcattgaatctaaaagtcaggcgggaggggt

SEQ ID NO: 319924 - DNA, 75 bp, synthetic construct
  source 1..75: mol_type = other DNA
taaatcatcgtggcttaatttttgtttgtcacttgcaggtatcactgttatttattttatattattatttatggt

SEQ ID NO: 319925 - DNA, 75 bp, synthetic construct
  source 1..75: mol_type = other DNA
gagcgcaggatgctggatggaagctgtagaaccatatcataagcgtgcaatagataactggtacgatacaaccgt

SEQ ID NO: 319926 - DNA, 75 bp, synthetic construct
  source 1..75: mol_type = other DNA
taatcttttacagattaaatattttggacattccactggcggtgttgagttttttaacatgcttaataaagtcat

SEQ ID NO: 319927 - DNA, 75 bp, synthetic construct
  source 1..75: mol_type = other DNA
gtgaatatcgttgaatgctatatgccagtatttaaactcatatcatctgttaaagtctttccagaagaatatggt

SEQ ID NO: 319928 - DNA, 75 bp, synthetic construct
  source 1..75: mol_type = other DNA
gaataaatcatcgatatttaatatttttttgccacttgcagttatcattgtttattattttgtgttgttgcttat

SEQ ID NO: 319929 - DNA, 75 bp, synthetic construct
  source 1..75: mol_type = other DNA
gtttaccgatatgggaacaggcatcatgctggattcccgacgcaagatcggcccaaaaggcaagttccgtccttt

SEQ ID NO: 319930 - DNA, 75 bp, synthetic construct
  source 1..75: mol_type = other DNA
gaaaatacattgatgataaagatgcgaaaaagcacgccgtcgtcaatggagtccttatggttcatcgcggatggg

SEQ ID NO: 319931 - DNA, 75 bp, synthetic construct
  source 1..75: mol_type = other DNA
gtgcctggacgcggattcactcttctggaaatcatgctggtgattttccttatcggccttgccagtgcgggcgtg

SEQ ID NO: 319932 - DNA, 75 bp, synthetic construct
  source 1..75: mol_type = other DNA
gcaatatcccatgattgaagtgaatgggaattgccgcattatcggcgttgttgtagacgccaaaatcaccaacct

SEQ ID NO: 319933 - DNA, 75 bp, synthetic construct
  source 1..75: mol_type = other DNA
ttctttcgcaaagtgtctcaggcgctggctggtttcttccccggctggatgctgacgcaaattggctatgtgccg

SEQ ID NO: 319934 - DNA, 75 bp, synthetic construct
  source 1..75: mol_type = other DNA
ctttccgcgcaattgccggtaaccgcccactgttcattctgtgcattgccaacctctgcactttaggggcgttta

SEQ ID NO: 319935 - DNA, 75 bp, synthetic construct
  source 1..75: mol_type = other DNA
cagagttttcttctatgatatttgaattaggtatgttctttatggcatacatatgcttgagattatcgatgcaaa

SEQ ID NO: 319936 - DNA, 75 bp, synthetic construct
  source 1..75: mol_type = other DNA
gtttatgctcggcgtctttcttgttctgaattcgatcggcttgttatttcgagcaaaactggcatgggcaatcag

SEQ ID NO: 319937 - DNA, 75 bp, synthetic construct
  source 1..75: mol_type = other DNA
taaagatcattttattgtttgcggacattcgattctcgccatcaatacgattctgcaactgaatcaacgcggaca

SEQ ID NO: 319938 - DNA, 75 bp, synthetic construct
  source 1..75: mol_type = other DNA
gccacaatacttacgcattgaaatgagcggtcaacatgttgaaatgagcggtcaacatgctcgattgattcgtga

SEQ ID NO: 319939 - DNA, 75 bp, synthetic construct
  source 1..75: mol_type = other DNA
caagaactgattttgtgctcttttgaagcacgtaaccaaacagggcttaacggccctgttttatcgctgactcgt

SEQ ID NO: 319940 - DNA, 75 bp, synthetic construct
  source 1..75: mol_type = other DNA
tcaaccatctgaagatgacagtaaaaaatcacatgatgtaagaatgaaggaattaaaaacatttttaaacaaaga

SEQ ID NO: 319941 - DNA, 75 bp, synthetic construct
  source 1..75: mol_type = other DNA
atgacattgttgcgaggtggcctgatagcggcaattttgtgtgcattgctcacggtcttatgcgcatggatacaa

SEQ ID NO: 319942 - DNA, 75 bp, synthetic construct
  source 1..75: mol_type = other DNA
cccctcactttgaagggatcggagctataaaaatggtgttatccggcttcctcaaatttaggttttcgaaagaat

SEQ ID NO: 319943 - DNA, 75 bp, synthetic construct
  source 1..75: mol_type = other DNA
gatggcgctgccgtatacggattttgtggcaatgatgctggcggagtcggaagagaggaagcgatgttatggcaa

SEQ ID NO: 319944 - DNA, 75 bp, synthetic construct
  source 1..75: mol_type = other DNA
actataatctatttattccatcatgcatagcatggttaatatcattattttttctatatcaatcaagaaatcttt

SEQ ID NO: 319945 - DNA, 75 bp, synthetic construct
  source 1..75: mol_type = other DNA
tttaattatcaatattgataataaatcctctgatccgtatggacaaagaaccggggaaaccattcttgattcaga

SEQ ID NO: 319946 - DNA, 75 bp, synthetic construct
  source 1..75: mol_type = other DNA
ccggttggcagttaagtttgcctgcggcccgtgcttttatccttggcgatagagcgcaaaatattagccgtaaag

SEQ ID NO: 319947 - DNA, 75 bp, synthetic construct
  source 1..75: mol_type = other DNA
tcaatgaaatgagtgccgcactcaagcgtcgcttcgattttgaaactgtctttccgattatggatttcgcccagg

SEQ ID NO: 319948 - DNA, 75 bp, synthetic construct
  source 1..75: mol_type = other DNA
actctgcggagcaaagtgaatgctgggcggtgaaactggcgcacgatggcgcgttatctctcaatcaatgtgatg

SEQ ID NO: 319949 - DNA, 75 bp, synthetic construct
  source 1..75: mol_type = other DNA
cgcaagaagcacgtaaccagttggttgtctcggtaccgagtggaaacttcggtgatttaacggcaggcctgctgg

SEQ ID NO: 319950 - DNA, 75 bp, synthetic construct
  source 1..75: mol_type = other DNA
gacagcggagcaccctgaattcaaaaaaatcatgatcaacgatgtactgcctccgacacatgaccgtcacttttt

SEQ ID NO: 319951 - DNA, 75 bp, synthetic construct
  source 1..75: mol_type = other DNA
atgcgaataagctgtatcaggtggcgctttttactgctgccaaccgcaaccgctcgatggtttaatatccttact

SEQ ID NO: 319952 - DNA, 75 bp, synthetic construct
  source 1..75: mol_type = other DNA
cgcaggaggcgcggaaccagttggttgtctcggtgccaagcggtaacttcggtgatttaactgcaggcctgctgg

SEQ ID NO: 319953 - DNA, 75 bp, synthetic construct
  source 1..75: mol_type = other DNA
aacgataccgtgccacgtttcctccgcgacgggcagtggtcacccaaagcgactcaggcgacgttatccaatgcg

SEQ ID NO: 319954 - DNA, 75 bp, synthetic construct
  source 1..75: mol_type = other DNA
ttcgttacccgcagcgcgaagatcctctcagcgtttattggcgatgagatcccgcaggacgcactggaagagcgc

SEQ ID NO: 319955 - DNA, 75 bp, synthetic construct
  source 1..75: mol_type = other DNA
ggcttacagtatgcccgctgcaatcccggctccatgtcgtactgcgcccaaaacacgggcaccaaaacagttcgg

SEQ ID NO: 319956 - DNA, 75 bp, synthetic construct
  source 1..75: mol_type = other DNA
gcacctctcttcgctgatatcctgcttggcaaggggtacacaaatacggtctgctgcgacttcatgaagtggtct

SEQ ID NO: 319957 - DNA, 75 bp, synthetic construct
  source 1..75: mol_type = other DNA
actctatcactccagacaccggtattgactaccggcaggaaatgaatgttatccacgaaattgtggccgaatgcg

SEQ ID NO: 319958 - DNA, 75 bp, synthetic construct
  source 1..75: mol_type = other DNA
ggttagggtggtctcccgtggatgtgatggcgctgccgtatgaggattttgtgacaatgatgctggcagagtcgg

SEQ ID NO: 319959 - DNA, 75 bp, synthetic construct
  source 1..75: mol_type = other DNA
cgctgaactcttggggcaccaacagatcctggtcgtaacacccgagaaactactttacgcccttcggcacgctcc

SEQ ID NO: 319960 - DNA, 75 bp, synthetic construct
  source 1..75: mol_type = other DNA
gaggacaacgtaggttatcagttcgacaaaatcgtcatgaacccaccctactctctcggtcgtcacagagagcac

SEQ ID NO: 319961 - DNA, 75 bp, synthetic construct
  source 1..75: mol_type = other DNA
gggatagcaagagcacgggatgcaggaaaatgtttcggtcgcccagcaatattaaatgaagagcaaaaacagaag

SEQ ID NO: 319962 - DNA, 75 bp, synthetic construct
  source 1..75: mol_type = other DNA
tcaagtacaaccgagacagcaaaggcgagcgtcacgtaatagttaacagcgtcctgatggtcaaacagggcaaga

SEQ ID NO: 319963 - DNA, 75 bp, synthetic construct
  source 1..75: mol_type = other DNA
tcaagtacaaccgagacagcaaaggcgaacgtcacgtaatagttaacggcgtcctgatggtcaaacagggcaaga

SEQ ID NO: 319964 - DNA, 75 bp, synthetic construct
  source 1..75: mol_type = other DNA
atgaacgccacaattcaaacgataccagatcttcttattcagacacgaggcaatcagaccgaagttgcgaggatg

SEQ ID NO: 319965 - DNA, 75 bp, synthetic construct
  source 1..75: mol_type = other DNA
cgtcgtcaggggcgctggctgcctgtttccacggcccggttaccgacgcaggtcacagtgccgaaacaggtgcag

SEQ ID NO: 319966 - DNA, 75 bp, synthetic construct
  source 1..75: mol_type = other DNA
ggcagacactcggtgtgctaatcgacgcgcctggctatcagtttatgcagcgtcgtcaggggcagtggttgcccg

SEQ ID NO: 319967 - DNA, 75 bp, synthetic construct
  source 1..75: mol_type = other DNA
tcctctttatttgcatgcctacgcttttcatttaaatatgcggctggaaagagtattgccggctgatttacttga

SEQ ID NO: 319968 - DNA, 75 bp, synthetic construct
  source 1..75: mol_type = other DNA
tgcagtcaggaagtattggcatcgatcgcaaagatattgaaaaggtatttaccgggcgtaccgtattgtcgagca

SEQ ID NO: 319969 - DNA, 75 bp, synthetic construct
  source 1..75: mol_type = other DNA
ggcccaaactctcaaatacatggaggatgtaatgtcggccaattcacatttataaatatatcaagtgtcttatat

SEQ ID NO: 319970 - DNA, 75 bp, synthetic construct
  source 1..75: mol_type = other DNA
cggactaaattatataagataatgggctgtagttcgcatgagatggtgcagctcccaatagagatagaggttagc

SEQ ID NO: 319971 - DNA, 75 bp, synthetic construct
  source 1..75: mol_type = other DNA
attccggggaagctatgggagttcaaaacaggtcatacaatctgtttcaggatagcccatccaagggctatgcgc

SEQ ID NO: 319972 - DNA, 75 bp, synthetic construct
  source 1..75: mol_type = other DNA
gcggcctggttctctatgctggaggcgacacgttcgattcggcattgccaggctggagattgcggctcattgcac

SEQ ID NO: 319973 - DNA, 75 bp, synthetic construct
  source 1..75: mol_type = other DNA
tatggcaccaccaacctcaaatcacgtagccgcttcacgcaatatcatttcaggctggcccgggagcttaatatc

SEQ ID NO: 319974 - DNA, 75 bp, synthetic construct
  source 1..75: mol_type = other DNA
aaattggataaaatatttgacgactatatgtattatagtgaacaggcaaacctagtctccgggaaatttgtcatc

SEQ ID NO: 319975 - DNA, 75 bp, synthetic construct
  source 1..75: mol_type = other DNA
tttcctaatattaaaaggagagaaaactatgggaaatgtcgacaggatcaccacattctttgatgtcaaggaggg

SEQ ID NO: 319976 - DNA, 75 bp, synthetic construct
  source 1..75: mol_type = other DNA
tgtgatcctaagaccaggagagagttataaaaatggcagtatcgtcgctgtaatagttccagatccacttacaaa

SEQ ID NO: 319977 - DNA, 75 bp, synthetic construct
  source 1..75: mol_type = other DNA
gagaaccaaacaccctccttttcaaatggttcggtgaagacaataaaataccgcccaatagggaaaggaggtgcg

SEQ ID NO: 319978 - DNA, 75 bp, synthetic construct
  source 1..75: mol_type = other DNA
aacataacaatggcattattgatgaaaatgatttattcttaaaaatgcataagtggctgttctcaaaacttgatg

SEQ ID NO: 319979 - DNA, 75 bp, synthetic construct
  source 1..75: mol_type = other DNA
atatgtattatagtgaacaggcaaacctagtctccgggaaatttgtcatcgaaaattatgcatcagcatataaaa

SEQ ID NO: 319980 - DNA, 75 bp, synthetic construct
  source 1..75: mol_type = other DNA
ttcaaatgcaagcaggattgaaagtgtaatccaatcaaagctcattaaatcttttgatttgagaggtttttttaa

SEQ ID NO: 319981 - DNA, 75 bp, synthetic construct
  source 1..75: mol_type = other DNA
cccttccaatggcaaagtactgttatttaaatgcaagcaggattgaaagtgtaatccaatcaaagctcattaaat

SEQ ID NO: 319982 - DNA, 75 bp, synthetic construct
  source 1..75: mol_type = other DNA
aatttcggctctctttatggcttgttaacctctgaatatgaacaatttagtggcgttcatggaattggcgtggcg

SEQ ID NO: 319983 - DNA, 75 bp, synthetic construct
  source 1..75: mol_type = other DNA
tgcggcggtgttgataggtatcccggttgggatcgcgatgggactaagcccgacaacgcgtggcattctggatcc

SEQ ID NO: 319984 - DNA, 75 bp, synthetic construct
  source 1..75: mol_type = other DNA
ttcggtctgtttgtgaaaacttaaagttacaaaccaaaccaaagctacgaactggaaatcaacgtcgagttatca

SEQ ID NO: 319985 - DNA, 75 bp, synthetic construct
  source 1..75: mol_type = other DNA
acagatccttaaggaactcccttcatggagtatctatgtttcagccgaaaatctgcatactatacttcctacgtc

SEQ ID NO: 319986 - DNA, 75 bp, synthetic construct
  source 1..75: mol_type = other DNA
actgctggatatgagcagcagggggatttttaccccggaaatggtggtgagaaagacaagccatgctgtagccga

SEQ ID NO: 319987 - DNA, 75 bp, synthetic construct
  source 1..75: mol_type = other DNA
cggcggtgggcgtagtcgggtgttgcgtaatggtggtgttttcgaacaagcgggcgttaacttttctcacgttca

SEQ ID NO: 319988 - DNA, 75 bp, synthetic construct
  source 1..75: mol_type = other DNA
ttaaacagtttctgctcaaccttcaggatacaatttgtcagcagctgagcgccgtcgatggcgcagagtttgtcg

SEQ ID NO: 319989 - DNA, 75 bp, synthetic construct
  source 1..75: mol_type = other DNA
cgttatgcttttgaatgtgcagacatttgtgatgctgaggcgatgtcgcgtattttcgccactcaccagcctgat

SEQ ID NO: 319990 - DNA, 75 bp, synthetic construct
  source 1..75: mol_type = other DNA
aatgccgccactggtacgctgggagtacgattatcaaccggaagaaggcagtccggaagcagcgttgagcgagtt

SEQ ID NO: 319991 - DNA, 75 bp, synthetic construct
  source 1..75: mol_type = other DNA
aatgccgccgctggttcgctgggagtatgattatcagccagaagatggcagtccggaagcggcgttgagtgagtt

SEQ ID NO: 319992 - DNA, 75 bp, synthetic construct
  source 1..75: mol_type = other DNA
atgaagcccgacgcacaccaggttaaacagttcctgctcaaccttcaggacacaatttgccagcaactgagcgcc

SEQ ID NO: 319993 - DNA, 75 bp, synthetic construct
  source 1..75: mol_type = other DNA
agcgcagtaaccagcggcgatttcgtcggtgcctgctttgttatcggtgagctgaaaggggcgcaaaacatcgct

SEQ ID NO: 319994 - DNA, 75 bp, synthetic construct
  source 1..75: mol_type = other DNA
atccttcaaatgcgacagttttcaaaaaaccgccgtgtcaatcaagcggcgctttcaatgcaaactggaattatc

SEQ ID NO: 319995 - DNA, 75 bp, synthetic construct
  source 1..75: mol_type = other DNA
gattgctgaacagcctgatactaacgtcacgctggtatctaataagcgtacctatattttctttcttcaatctgt

SEQ ID NO: 319996 - DNA, 75 bp, synthetic construct
  source 1..75: mol_type = other DNA
caggttttattggatctgctgtcgtccgtaatatcattaagaatactcaggattctgtagttaatgttgataaat

SEQ ID NO: 319997 - DNA, 75 bp, synthetic construct
  source 1..75: mol_type = other DNA
ccggcagtactttatcgactgcggtatcgaccctgaaactatgaccggcgaagcgacgcaggaacgtctcaagtt

SEQ ID NO: 319998 - DNA, 75 bp, synthetic construct
  source 1..75: mol_type = other DNA
acgcgcgagcaggctgatgatgtattcaaagcgaaatttccaggaataatcgactacaaggtaaaagctacccct

SEQ ID NO: 319999 - DNA, 75 bp, synthetic construct
  source 1..75: mol_type = other DNA
gatgtgattcttagcccctatgataaacgttctcccggttggtcaatgttcaacgagatacgcgatgactttgac

SEQ ID NO: 320000 - DNA, 75 bp, synthetic construct
  source 1..75: mol_type = other DNA
agggttaactactattttgtgatattttatataatcccgataatttatgttattaaatacactgttaagaataga

SEQ ID NO: 320001 - DNA, 75 bp, synthetic construct
  source 1..75: mol_type = other DNA
aattattattaattcttactatgttattgcttgttgcatattattattctagcgattatcttctgtttagacttg

SEQ ID NO: 320002 - DNA, 75 bp, synthetic construct
  source 1..75: mol_type = other DNA
ttccgtcgatgcagctcgttggacactcttgaaaaagtatttgataacttacgcgataagctatcaggtaaagaa

SEQ ID NO: 320003 - DNA, 75 bp, synthetic construct
  source 1..75: mol_type = other DNA
atgccattctatttcaggaaggagtgtccgttaaactcaggctacctcactgaactgaaggaaattccaaagcta

SEQ ID NO: 320004 - DNA, 75 bp, synthetic construct
  source 1..75: mol_type = other DNA
aacgagcacagcgcgaagcaaaagaggcagcagaacgagctgaaagagaaaagcaggcggcaattgaagcagaac

SEQ ID NO: 320005 - DNA, 75 bp, synthetic construct
  source 1..75: mol_type = other DNA
acagcgcgaagcaaaagaggcagcagaacgagctgaaagagaaaagcaggcggcaattgaagcagaacgccgaaa

SEQ ID NO: 320006 - DNA, 75 bp, synthetic construct
  source 1..75: mol_type = other DNA
gcgttagaggcattaaacctcagtttgcaagcggtaactgaaccgggcgattgggtgatagtagagaatccttgt

SEQ ID NO: 320007 - DNA, 75 bp, synthetic construct
  source 1..75: mol_type = other DNA
caccggctgtgcagtcaccaaagcgcagaagcagcagtgacagcgaagtgaaaacggaggacgcccatggcagct

SEQ ID NO: 320008 - DNA, 75 bp, synthetic construct
  source 1..75: mol_type = other DNA
ttgctggggacatttgccgtccttgccgcctttggcttctcgataaacacactaacgatgttcggatggtactcg

SEQ ID NO: 320009 - DNA, 75 bp, synthetic construct
  source 1..75: mol_type = other DNA
atgaccaaaattaaaattctggcactcagtatgctagccgctatatcacttaatactgcccatgctgaaagttca

SEQ ID NO: 320010 - DNA, 75 bp, synthetic construct
  source 1..75: mol_type = other DNA
tatttttgatatgttgcaggccagtcgcgaaccgtcggtcgttccgtttgcctcggcctttcccgacccgcgact

SEQ ID NO: 320011 - DNA, 75 bp, synthetic construct
  source 1..75: mol_type = other DNA
cccgaagacatggagctggatttttccattggcggccgcaagaaggtggacgtagctatcttccatcatggcaag

SEQ ID NO: 320012 - DNA, 75 bp, synthetic construct
  source 1..75: mol_type = other DNA
gctccattggcgacgttgagctggttatttttgtcgttgaaggcacccgttggacgccggacgatgaaatggtgc

SEQ ID NO: 320013 - DNA, 75 bp, synthetic construct
  source 1..75: mol_type = other DNA
acatcaccgatcgctcacagcgttttatggcgtctgaaatcatccgcgaaaaactgatgcgtttcctcggcgctg

SEQ ID NO: 320014 - DNA, 75 bp, synthetic construct
  source 1..75: mol_type = other DNA
gagctgtgggtgaaagtgaaatctggctgggccgatgacgaacgcgcattgcgtagtctcggttatgttgacgat

SEQ ID NO: 320015 - DNA, 75 bp, synthetic construct
  source 1..75: mol_type = other DNA
gttatcaaacctattctcagctgattaaggtttatggccgggatatggctcaaactattctggctaacatgcgtt

SEQ ID NO: 320016 - DNA, 75 bp, synthetic construct
  source 1..75: mol_type = other DNA
aaggcgaagttgagcgtaaagaatccgatcctcagaagccctggattgtccgtaaacgccgcgacgttaaagttg

SEQ ID NO: 320017 - DNA, 75 bp, synthetic construct
  source 1..75: mol_type = other DNA
cgcctgatgaacaaagcggcgagcagctctattggcgacgttgagctggtgatttttgtcgtagaaggcacccgc

SEQ ID NO: 320018 - DNA, 75 bp, synthetic construct
  source 1..75: mol_type = other DNA
cgtgaaacagttcctcgtctagtgcaacggttacaaaattctggtttcgaatttacacaagctcaaatagctaac

SEQ ID NO: 320019 - DNA, 75 bp, synthetic construct
  source 1..75: mol_type = other DNA
cgaaaaccttcgggggatcctacgtcagtcatggaagcggcagttctgggcaggccctaaagagcagtttgaagt

SEQ ID NO: 320020 - DNA, 75 bp, synthetic construct
  source 1..75: mol_type = other DNA
gtttcgtggaacggaccttgacccgcaatgaaaagatcgaagacaacgatctgccgatcattgctgagaagtacc

SEQ ID NO: 320021 - DNA, 75 bp, synthetic construct
  source 1..75: mol_type = other DNA
gtgttggtaaatcaacaatctttgctgaaatgatgaaaggttgcttgatgcgaggcaagatgcagcgggttgcgt

SEQ ID NO: 320022 - DNA, 75 bp, synthetic construct
  source 1..75: mol_type = other DNA
gatagcagcaaatgcaattataataccttgctcaagtgatggttcttcggctcgagcagtggataacctaagcca

SEQ ID NO: 320023 - DNA, 75 bp, synthetic construct
  source 1..75: mol_type = other DNA
ctctcaaatacccacaccctgtcgaaacttttcgtcaatttttagtcgaatccggatttgatgttaccggagaag

SEQ ID NO: 320024 - DNA, 75 bp, synthetic construct
  source 1..75: mol_type = other DNA
aatttggcgcgctgatccatactattccggccgcggtgattggtggtgcatcaattgttgtgttcgggctgattg

SEQ ID NO: 320025 - DNA, 75 bp, synthetic construct
  source 1..75: mol_type = other DNA
gccgggagctggcagcaaagtatccgggagacgcgccgctgatgctggttatctggtccccggaagaaattcagg

SEQ ID NO: 320026 - DNA, 75 bp, synthetic construct
  source 1..75: mol_type = other DNA
cggcctcgccgtcccggaatgcgttacccgccgacaggcggtggttaatcaggcccgagccctgctgaaaaacaa

SEQ ID NO: 320027 - DNA, 75 bp, synthetic construct
  source 1..75: mol_type = other DNA
cgtggtgattgccgcgacgggctttagcggtcagggcattaacccaaatatcagcatcgcgctgggcgggattat

SEQ ID NO: 320028 - DNA, 75 bp, synthetic construct
  source 1..75: mol_type = other DNA
tggcgcgctgatccataccattcctgcaccggtgattggtggtgcttcaattgttgtgttcgggctgattgccgt

SEQ ID NO: 320029 - DNA, 75 bp, synthetic construct
  source 1..75: mol_type = other DNA
tttgtgccatagaagcgattcatcgtcacgccccccccctacgggctggtgtggttcgatcgcagttatcacgcg

SEQ ID NO: 320030 - DNA, 75 bp, synthetic construct
  source 1..75: mol_type = other DNA
atctggtccccggaagaaattcaggccctcgctgacggaatggatatttccctgtccgatcatgaaatcaggacc

SEQ ID NO: 320031 - DNA, 75 bp, synthetic construct
  source 1..75: mol_type = other DNA
tatttcttccgccgcggcgatggagattatcagcaacgtgagcgaaaaccgccaggtgaccgtcccggctgaact

SEQ ID NO: 320032 - DNA, 75 bp, synthetic construct
  source 1..75: mol_type = other DNA
ccctcgctgacggaatggatatttccctgtccgatcatgaaatcaggatcgtcctggcgtgtctggaggacatcc

SEQ ID NO: 320033 - DNA, 75 bp, synthetic construct
  source 1..75: mol_type = other DNA
cgtcccggaatgtgttacccgccgtcaggcggtggttaatcaggcccgcgccctgttgaaaaacaacacacacga

SEQ ID NO: 320034 - DNA, 75 bp, synthetic construct
  source 1..75: mol_type = other DNA
gccgtcccggaatgcgtcacccgccgacaggcggtggttaatcaggcccgcgccctgctgaaaaacaacacacgc

SEQ ID NO: 320035 - DNA, 75 bp, synthetic construct
  source 1..75: mol_type = other DNA
gtcctggcgcgcctggaggacatcccggaagaccagcggatggagtccggtatttcttccgccgcagcgatggag

SEQ ID NO: 320036 - DNA, 75 bp, synthetic construct
  source 1..75: mol_type = other DNA
tatttctgcaaagtgtttcgccagacttatcagattaccccgcaggcatttcgccagcagattgcagaaaacaag

SEQ ID NO: 320037 - DNA, 75 bp, synthetic construct
  source 1..75: mol_type = other DNA
gtccggaacagattcaggactgcatccgtcacacaatgaatcgtctcggactgaccggtcaccagttcatggcgg

SEQ ID NO: 320038 - DNA, 75 bp, synthetic construct
  source 1..75: mol_type = other DNA
aagttgccgtttgtgatatccgtaatcctgaacgtttttccgtgccgttgtctgattttggtcacgagtggagca

SEQ ID NO: 320039 - DNA, 75 bp, synthetic construct
  source 1..75: mol_type = other DNA
ctttgcatatcagctttttcatttgtactactttatgttggatatttaaacgaattatttataaaaaataatctt

SEQ ID NO: 320040 - DNA, 75 bp, synthetic construct
  source 1..75: mol_type = other DNA
ttctgcaaagtttttcgccagacgtatcaggtgactccgcaggtatatcgtcagcaaattagtgaaaatgtagca

SEQ ID NO: 320041 - DNA, 75 bp, synthetic construct
  source 1..75: mol_type = other DNA
cgtgagctgctgtgccatagtgactggagtatcgccagtatcgcgcgtaatttaggcttctcacaaaccagttat

SEQ ID NO: 320042 - DNA, 75 bp, synthetic construct
  source 1..75: mol_type = other DNA
ccaccacctgcgatggtcacggcctccatcctggagcgccgtggcgacacagcagcccttacccggctacaggat

SEQ ID NO: 320043 - DNA, 75 bp, synthetic construct
  source 1..75: mol_type = other DNA
aaatctcggtcagattcggtgcgccagactcgtgcgcctaatccccacgacaatacagttatttttgcaaagttt

SEQ ID NO: 320044 - DNA, 75 bp, synthetic construct
  source 1..75: mol_type = other DNA
gcaaacagtgctttcagtagaaatgctggaagataaacgcgatcagcatcaaattttaaccgacgctgtgctggc

SEQ ID NO: 320045 - DNA, 75 bp, synthetic construct
  source 1..75: mol_type = other DNA
cggcagaacccacagttgagtgctcggtgccgtatgagtgatcgttgtggtggtctggaggcttcgaaattggac

SEQ ID NO: 320046 - DNA, 75 bp, synthetic construct
  source 1..75: mol_type = other DNA
tcttcgtaaacgcatcaagaaaacgctccctctttcacttttcaaatctattgattttaagcaggctagcgattg

SEQ ID NO: 320047 - DNA, 75 bp, synthetic construct
  source 1..75: mol_type = other DNA
caaaggccagctttttaacccgggttttttcatatccaaaaaactaaacttcaattcagacagagagtggttcaa

SEQ ID NO: 320048 - DNA, 75 bp, synthetic construct
  source 1..75: mol_type = other DNA
ggtatcagtatttattttataacccgcctctcaatacaccaagagattgcggtaaagtggagcagcatgattacc

SEQ ID NO: 320049 - DNA, 75 bp, synthetic construct
  source 1..75: mol_type = other DNA
atgtacggaacatgcgaaacgctatgccggcagctggcagcaaagtattcgggagacacgcctctgatgctggtt

SEQ ID NO: 320050 - DNA, 75 bp, synthetic construct
  source 1..75: mol_type = other DNA
ggtgccaaggagtcttcttacaaccctgccgcagtaagctccgccggggctgtaggattgactcaggtcatgcct

SEQ ID NO: 320051 - DNA, 75 bp, synthetic construct
  source 1..75: mol_type = other DNA
agttgtcaacaacatgctattcagcaagaacaaatcggaaattaagactctgtataactcagttggtcgtgttgg

SEQ ID NO: 320052 - DNA, 75 bp, synthetic construct
  source 1..75: mol_type = other DNA
gaagcgagaagccagttggttcagagatttgctgataaattcggtgagtatgatccagcggttgttattgacagc

SEQ ID NO: 320053 - DNA, 75 bp, synthetic construct
  source 1..75: mol_type = other DNA
gtgactgatgaggtcttcgaatctgccgccagcattgtttttgatcaggcggaaaaccgcatgcataccatcaaa

SEQ ID NO: 320054 - DNA, 75 bp, synthetic construct
  source 1..75: mol_type = other DNA
taaggccagtcgttctttatctgttggtgaatatcagtatttattactacttgcaaatatgcatccgtcttacag

SEQ ID NO: 320055 - DNA, 75 bp, synthetic construct
  source 1..75: mol_type = other DNA
cttgttcgttactgtttgcccttgtacgatgatcggtgtagtcaatggtgtagttaattttgatagccgggaaat

SEQ ID NO: 320056 - DNA, 75 bp, synthetic construct
  source 1..75: mol_type = other DNA
aggtaaggcattacctatttatggcaaaggggatcaaattcgcgattggctgtatgttgaagatcatgcgcgtgc

SEQ ID NO: 320057 - DNA, 75 bp, synthetic construct
  source 1..75: mol_type = other DNA
cggcgggcgtagccgggtgttgcgtaatggtggtgttttcgaacaggcgggcgtcaacttttctcacgtccacgg

SEQ ID NO: 320058 - DNA, 75 bp, synthetic construct
  source 1..75: mol_type = other DNA
ggcgcaccgagtctatcctgatgtcaatgccgccgctggtacgctgggagtacgattatcagccagaagatggca

SEQ ID NO: 320059 - DNA, 75 bp, synthetic construct
  source 1..75: mol_type = other DNA
gtaccatcatcagcctattcgtactaaccgcctcctcagtcaatcacgctcaagaaaaagattttgatcctgaag

SEQ ID NO: 320060 - DNA, 75 bp, synthetic construct
  source 1..75: mol_type = other DNA
cggtataaatttgagcatgcggatatttgcgacagcgttgcaatagccaatatttttgcacatcaccaaccagat

SEQ ID NO: 320061 - DNA, 75 bp, synthetic construct
  source 1..75: mol_type = other DNA
atgaggtgtatggtgacttaccccatccggatgaagtaaatagcaatgaaacgttgccgctatttacggaaatga

SEQ ID NO: 320062 - DNA, 75 bp, synthetic construct
  source 1..75: mol_type = other DNA
ctggccggaagcctcactggttaccgaatgccgcgcgctggcacagaaacatggcggaaatatcaccctgacgga

SEQ ID NO: 320063 - DNA, 75 bp, synthetic construct
  source 1..75: mol_type = other DNA
cactacctgttaagggatgtcaggtcgttacgattacagcaaatgaaacttatcggattcgcaccggaagagaac

SEQ ID NO: 320064 - DNA, 75 bp, synthetic construct
  source 1..75: mol_type = other DNA
ggcctttccatgactggatgagcatagcggattttcaggatttcgctgatcagtggtttgctgctgcgctgggca

SEQ ID NO: 320065 - DNA, 75 bp, synthetic construct
  source 1..75: mol_type = other DNA
ggtgtgagttatcctgccagtaaagcgggaggcgaaggattgattcgtgggctggcaaaagagttaggaccaaaa

SEQ ID NO: 320066 - DNA, 75 bp, synthetic construct
  source 1..75: mol_type = other DNA
atgtacggaacatgcgaaacgctatgccggtagctggcagcaaagtattcgggagacacgcccctgatgctggtt

SEQ ID NO: 320067 - DNA, 75 bp, synthetic construct
  source 1..75: mol_type = other DNA
atgtacggaacatgcgaaacgctatgccggaagctggcagcaaagtatgcgggagacacgccactgatgctggtt

SEQ ID NO: 320068 - DNA, 75 bp, synthetic construct
  source 1..75: mol_type = other DNA
ccttcttgaccgcatccatacgcatggattcgacagcgctatcaggtactacttgagcgaacagcgacaacgaaa

SEQ ID NO: 320069 - DNA, 75 bp, synthetic construct
  source 1..75: mol_type = other DNA
taattttgatggcgataagttcgcagctgttattaaagatgtgccttttatgcaggaaaaaccagcgaagcgtct

SEQ ID NO: 320070 - DNA, 75 bp, synthetic construct
  source 1..75: mol_type = other DNA
gcaaagatattagcatcaaaaaactatattctctggaggatggtaagactggtaaatagaaaaaagaataaacgt

SEQ ID NO: 320071 - DNA, 75 bp, synthetic construct
  source 1..75: mol_type = other DNA
ccgccagcattgtttttgatcaggcggaaaaccgcatgcacaccatcaaagcggtgatggtcgcgacactcagta

SEQ ID NO: 320072 - DNA, 75 bp, synthetic construct
  source 1..75: mol_type = other DNA
tcatttgcgcacgaaagaatctactcttctgtgatgcagttatacaaaggtaaccggaaagaagaaattcataca

SEQ ID NO: 320073 - DNA, 75 bp, synthetic construct
  source 1..75: mol_type = other DNA
aatattgcatcttcattttactatttcatgctctattatagtaagaaaatagcgcgtaagcatttttccaaataa

SEQ ID NO: 320074 - DNA, 75 bp, synthetic construct
  source 1..75: mol_type = other DNA
aaaaatggtgatacgtttaacgcttttatttacttcattaaatttaaattaaataagtataaaagaaaactattt

SEQ ID NO: 320075 - DNA, 75 bp, synthetic construct
  source 1..75: mol_type = other DNA
catccccctcatccccgaaaaatcgccagaggctcgtcaaccgtctttattgacggcctgcccgccgccagaacc

SEQ ID NO: 320076 - DNA, 75 bp, synthetic construct
  source 1..75: mol_type = other DNA
ccttgtcgggttattcgcgaaataaacgaccgggataagcactattatttcggtgatgctgccaacttactgatt

SEQ ID NO: 320077 - DNA, 75 bp, synthetic construct
  source 1..75: mol_type = other DNA
attaaagaaatgtttgccacggtaggggaaaacgcctgggtagaaccccccgtctatttctcttacggttccaac

SEQ ID NO: 320078 - DNA, 75 bp, synthetic construct
  source 1..75: mol_type = other DNA
caacagccgcaacagccggtgtctcctgccatcaacgataagaagtcagatgcaggtgtgaatgttccggcaggg

SEQ ID NO: 320079 - DNA, 75 bp, synthetic construct
  source 1..75: mol_type = other DNA
tccggatatccagcagcagatgcagcgccgtgaagaggtgaatatcaacgtgcaccgggagcgcggggaggatgt

SEQ ID NO: 320080 - DNA, 75 bp, synthetic construct
  source 1..75: mol_type = other DNA
cttaccgaccaaaaggtcaaagagaagcgggctatgaagcagcaaaaggcgatgttaatcgccctgatcgtcatc

SEQ ID NO: 320081 - DNA, 75 bp, synthetic construct
  source 1..75: mol_type = other DNA
ttgtgattggcgcggcgatggcggcggtggccggcgtgttgctcggccagttctacggcgtaattaatccctaca

SEQ ID NO: 320082 - DNA, 75 bp, synthetic construct
  source 1..75: mol_type = other DNA
aactctaagcgcctgattgcactcatctcggcaatcggtatgtccatcttcctgcaaaactacgtcagcctgacc

SEQ ID NO: 320083 - DNA, 75 bp, synthetic construct
  source 1..75: mol_type = other DNA
aatggcgagcctgcttggcatcaacaccgaccgggtgattgctttgacctttgttattggcgcggcgatggcggc

SEQ ID NO: 320084 - DNA, 75 bp, synthetic construct
  source 1..75: mol_type = other DNA
tggcgttccttgtcgggttattcgcgaaataaacgaccgggataagcactattatttcaaagattataaagttga

SEQ ID NO: 320085 - DNA, 75 bp, synthetic construct
  source 1..75: mol_type = other DNA
gccgtcttgctgctgcgttcaatcacggatttatcaataagtctttgcgtgaagttttcgacgttacgcgcatga

SEQ ID NO: 320086 - DNA, 75 bp, synthetic construct
  source 1..75: mol_type = other DNA
aatggcgagcctgcttggcattaacaccgaccgggtgattgcgctgacctttgtgattggcgcggcgatggcggc

SEQ ID NO: 320087 - DNA, 75 bp, synthetic construct
  source 1..75: mol_type = other DNA
aagtggtggatatggccgcttatgaggcatggcaacaggaaaatcatccggacatccagcagcagatgcagcgtc

SEQ ID NO: 320088 - DNA, 75 bp, synthetic construct
  source 1..75: mol_type = other DNA
ggttcggctacaagctgattaaaggaactcacttcgtacgctacagcgaaatgaagttcccgcagaacgataaga

SEQ ID NO: 320089 - DNA, 75 bp, synthetic construct
  source 1..75: mol_type = other DNA
atgatgattatcggtatcttcaaaggtgcgcagcctgtgggctggagcaactggacgataggtgaagcaccgttt

SEQ ID NO: 320090 - DNA, 75 bp, synthetic construct
  source 1..75: mol_type = other DNA
cagtctcggtgaactggctgcatatatgccggtttccggttcgtttgccacttacggtcagaactatgttgaaga

SEQ ID NO: 320091 - DNA, 75 bp, synthetic construct
  source 1..75: mol_type = other DNA
catcgtcgtttataactatgatggtgagacacgggaatatatttccgaatcaactgaatatcttgctgtgggtgt

SEQ ID NO: 320092 - DNA, 75 bp, synthetic construct
  source 1..75: mol_type = other DNA
gcgcacagcctgcgggctggagcaactggacaatcggcgaagcaccatttgctggtggttttgcggcaatgatcg

SEQ ID NO: 320093 - DNA, 75 bp, synthetic construct
  source 1..75: mol_type = other DNA
tcgcctggctggggattgctatcagccactatcgtttccgtcgcggctatgtattgcagggacacgatattaacg

SEQ ID NO: 320094 - DNA, 75 bp, synthetic construct
  source 1..75: mol_type = other DNA
gaggcgctgatgaaataataaacaataccacatccgatgccgaaaaagctggggcagttattggtacgggcttag

SEQ ID NO: 320095 - DNA, 75 bp, synthetic construct
  source 1..75: mol_type = other DNA
tactaaaaacttgccgcaaaacagcaatatcggcccgcagagtcgctctccagattatccattccaatattatct

SEQ ID NO: 320096 - DNA, 75 bp, synthetic construct
  source 1..75: mol_type = other DNA
ttccggccggggggatcgagccggagctgaaaatgaaaccggaagaagagatggaacagcaactgccacccggga

SEQ ID NO: 320097 - DNA, 75 bp, synthetic construct
  source 1..75: mol_type = other DNA
ggatgatgatgctgggaaccatctgggttattggcgatatcattatcggaatgtttgttttctttactcgcccga

SEQ ID NO: 320098 - DNA, 75 bp, synthetic construct
  source 1..75: mol_type = other DNA
ggtgcagttattggtacaggcttaggtttaattaccattggaagcttatgggttattggcgatatcattatcgga

SEQ ID NO: 320099 - DNA, 75 bp, synthetic construct
  source 1..75: mol_type = other DNA
atggcattaatcaaatgtcctgaatgccagaaagaggtaagcgattcagcattgtattgccctgcttgtggtaaa

SEQ ID NO: 320100 - DNA, 75 bp, synthetic construct
  source 1..75: mol_type = other DNA
gtcgtgcctgcgcggaagatctgaaaatggcgagtctgcttggcattaacaccgaccgggtgattgcgctgacct

SEQ ID NO: 320101 - DNA, 75 bp, synthetic construct
  source 1..75: mol_type = other DNA
atgagaacaggatgtgaaccgacccggtttggtaatgaagctaagaccattattcacggtgatgcgcttgccgaa

SEQ ID NO: 320102 - DNA, 75 bp, synthetic construct
  source 1..75: mol_type = other DNA
atgaatcctttccctggtttatcaaacgtgcgcacagtccatccagagggctttacagtgtacatatcaacccat

SEQ ID NO: 320103 - DNA, 75 bp, synthetic construct
  source 1..75: mol_type = other DNA
ggatgccggtgatgaaaaagggtatgaatcctttccttggtttatcaaacgtgcgcacagtccatccagagggat

SEQ ID NO: 320104 - DNA, 75 bp, synthetic construct
  source 1..75: mol_type = other DNA
tgagaaccacccgacgcaaaaaccggaagccttactgaaacgcattattctcgcctcttccggtgatgctgccaa

SEQ ID NO: 320105 - DNA, 75 bp, synthetic construct
  source 1..75: mol_type = other DNA
atgagaacaggatgtgaaccgacccggtttggtaatgaagctaagactattattcatggtgatgcacttaccgag

SEQ ID NO: 320106 - DNA, 75 bp, synthetic construct
  source 1..75: mol_type = other DNA
ccagcgggcgaaaattcattggtattgagattaacagcgagtacatcaagatgggacttcgacggctggatgtcg

SEQ ID NO: 320107 - DNA, 75 bp, synthetic construct
  source 1..75: mol_type = other DNA
ggtcaatctgccgctgcatctgcgtgacggtaccggcgcagacaatgccgccggaaagccgctggctgctgctga

SEQ ID NO: 320108 - DNA, 75 bp, synthetic construct
  source 1..75: mol_type = other DNA
cagagcggcatcgcggatgtggcggaatttatgatgttgcagttgcttaaccgtaaccagacccggtttacccat

SEQ ID NO: 320109 - DNA, 75 bp, synthetic construct
  source 1..75: mol_type = other DNA
agcgtttccgggccatgaatgatttatcctggggatttaccgaactcactctcaacaatgaactgctggcacagg

SEQ ID NO: 320110 - DNA, 75 bp, synthetic construct
  source 1..75: mol_type = other DNA
atgaatcttttccctggtttatcaaacgagcgcacagcccatccagagggctttacagcgtacatatcaacccat

SEQ ID NO: 320111 - DNA, 75 bp, synthetic construct
  source 1..75: mol_type = other DNA
acgtgcgcacagcccatccagagggctttacagcgtacatatcaacccttatctgattcccttcttcatcgggtt

SEQ ID NO: 320112 - DNA, 75 bp, synthetic construct
  source 1..75: mol_type = other DNA
gatggcatctggcaggccgatgtccatgacacggagttgttacagtctgcaacctttgtgctggctgtggcggca

SEQ ID NO: 320113 - DNA, 75 bp, synthetic construct
  source 1..75: mol_type = other DNA
ccgggtaacgtctgggattttccgcgcgtgcgttatttgatggatgaatatggtgatgctgccaacttactgatt

SEQ ID NO: 320114 - DNA, 75 bp, synthetic construct
  source 1..75: mol_type = other DNA
tggcaattatgtccaccgctgaagccgtgaacgtggcccacgccgtaggcgtccgcgcctgggtttttagcgaat

SEQ ID NO: 320115 - DNA, 75 bp, synthetic construct
  source 1..75: mol_type = other DNA
gcgcgggagagcctgccgatctggtggactgtattgcaggcaccatcgtcaaagataacgaagaagatcgcgctc

SEQ ID NO: 320116 - DNA, 75 bp, synthetic construct
  source 1..75: mol_type = other DNA
aaagataacgaagaagatcgcgcgcgcctgcgccgttacttcgaacaacgtgttgctacacataaagaagctcac

SEQ ID NO: 320117 - DNA, 75 bp, synthetic construct
  source 1..75: mol_type = other DNA
caacccaaaggttgcactggagctacttggtgaaattaagcgcctggaggacacaaatattgatgctatgtgccg

SEQ ID NO: 320118 - DNA, 75 bp, synthetic construct
  source 1..75: mol_type = other DNA
ctgcaaacagcaggtgtttttgctgcaggatttctgatgcgcccaataggcggttggctatttggccgcatagcc

SEQ ID NO: 320119 - DNA, 75 bp, synthetic construct
  source 1..75: mol_type = other DNA
atagcactttgagattagcaagcatctttaatgtatcagaagccgctatgcattggcgcttaaagagcttaggaa

SEQ ID NO: 320120 - DNA, 75 bp, synthetic construct
  source 1..75: mol_type = other DNA
gtttctgctgccatttctgatcgtctttaaaataagcctggcggagatggcgcgcgctattccaccttataccga

SEQ ID NO: 320121 - DNA, 75 bp, synthetic construct
  source 1..75: mol_type = other DNA
atgagtacacttgaacctcctgtccagccgggcgggttgaaactgtggcttacgcagtggcagatgaagcacggg

SEQ ID NO: 320122 - DNA, 75 bp, synthetic construct
  source 1..75: mol_type = other DNA
gtaattttctgcaactgaccgacgatccgctctatttcgatgcttatctccagtcgttacaggtggcggcgattt

SEQ ID NO: 320123 - DNA, 75 bp, synthetic construct
  source 1..75: mol_type = other DNA
gttcgagcctggtttttagcgaatcgcgcaggtgagcctgccgacctggtggactgtattgccggaaccatcgta

SEQ ID NO: 320124 - DNA, 75 bp, synthetic construct
  source 1..75: mol_type = other DNA
tactggagcttctggtctgtactttccgtgatctacgcgccagtggcgaaaagaaaacgtcgatggataccctga

SEQ ID NO: 320125 - DNA, 75 bp, synthetic construct
  source 1..75: mol_type = other DNA
atttcgataaatataagaaccgtatattagggtcaggaattgactgtaaaaaatatccgtggctatatttttcac

SEQ ID NO: 320126 - DNA, 75 bp, synthetic construct
  source 1..75: mol_type = other DNA
atgagcaatgccattaacgaaattgacaataccgatttagtgttcgtcttcgggtacaacccggcagattcccac

SEQ ID NO: 320127 - DNA, 75 bp, synthetic construct
  source 1..75: mol_type = other DNA
tcaactaccagactcggaaaaaaccatattaatcaatgagatatcagcaagagttgagaacttcaacaaactatt

SEQ ID NO: 320128 - DNA, 75 bp, synthetic construct
  source 1..75: mol_type = other DNA
aatttattgccacaaagacaggagagattaccgtttataactatgacagtgagacacgggagtatatttctgcat

SEQ ID NO: 320129 - DNA, 75 bp, synthetic construct
  source 1..75: mol_type = other DNA
gttatcgcatcagcgagctgccgcaccgcgcagcgcatggcgaagtgcgtgccgcgtacattatgggcgaagatc

SEQ ID NO: 320130 - DNA, 75 bp, synthetic construct
  source 1..75: mol_type = other DNA
gtgaaagatccggctaaccgcgagaaattcgccaaagcctggggtgtagaaagtctgccagcccataccggttac

SEQ ID NO: 320131 - DNA, 75 bp, synthetic construct
  source 1..75: mol_type = other DNA
tatcgtctgcgatccgcgtaaaattgaaaccgcgcgcattgctgacatgcacatcgcactgaaaaacggctcgaa

SEQ ID NO: 320132 - DNA, 75 bp, synthetic construct
  source 1..75: mol_type = other DNA
ctggattttcggtgcgccgcctgcgggtgaaatcacggtagatgaaggggcaaccgccgccattcttgaacgcgg

SEQ ID NO: 320133 - DNA, 75 bp, synthetic construct
  source 1..75: mol_type = other DNA
gcgccgcctgcgtgacctgcacatagggatatttgaagatctggaagaacgcgaactattcaagatctacgggga

SEQ ID NO: 320134 - DNA, 75 bp, synthetic construct
  source 1..75: mol_type = other DNA
taaagagcattattacgattgcgatatgaatgctctggctgaagatatccaggtcctggaagtggaaccgttcat

SEQ ID NO: 320135 - DNA, 75 bp, synthetic construct
  source 1..75: mol_type = other DNA
aaaaatagcacatcaaacagttgaacaagttatagatttaataatttccccaaaagctacagataatccagtttt

SEQ ID NO: 320136 - DNA, 75 bp, synthetic construct
  source 1..75: mol_type = other DNA
catcattgacaatgatatcagataagagcggaaatcctattaatatatatgatataaaagatgtcgatacactaa

SEQ ID NO: 320137 - DNA, 75 bp, synthetic construct
  source 1..75: mol_type = other DNA
aatgcacttaagtgttctgccacatggctgctttttggtgacgaagaccaggcaccaactccggtagacgaatta

SEQ ID NO: 320138 - DNA, 75 bp, synthetic construct
  source 1..75: mol_type = other DNA
accgtaacaagcaacaggctggcgtgaccgctggaaaaccaaaactcgacctgacaaacactgactggatttacg

SEQ ID NO: 320139 - DNA, 75 bp, synthetic construct
  source 1..75: mol_type = other DNA
attcaaaaagtgccacagtctatttctgttgtgaccgccgaagagatggcgctgcatcagccgaagtcggtaaaa

SEQ ID NO: 320140 - DNA, 75 bp, synthetic construct
  source 1..75: mol_type = other DNA
cgtctgactggtattgcgcgttcagccaatgctcagcagaagggggcagaagagcagcgttatgctattgctcca

SEQ ID NO: 320141 - DNA, 75 bp, synthetic construct
  source 1..75: mol_type = other DNA
aaaaaagtttacccaaatcaggtaaaggcgtttacccgaatcaggtaaacacaaaagacaaactaacaaaagaca

SEQ ID NO: 320142 - DNA, 75 bp, synthetic construct
  source 1..75: mol_type = other DNA
gtggatcactattgcaccgttcgtgacaccaagcgacagtttaaagtgctgcttgccattctgcgtaaaacctat

SEQ ID NO: 320143 - DNA, 75 bp, synthetic construct
  source 1..75: mol_type = other DNA
agaaaaaatacgatttctctaccccgtacaccatttctggtattcaggcgctggtgaaaaaggtaacgaaggcac

SEQ ID NO: 320144 - DNA, 75 bp, synthetic construct
  source 1..75: mol_type = other DNA
ccgcacaccctccgccactcgttcgcgacggccttgctccgcagggcactgttgcaaatagtcggtggtgataaa

SEQ ID NO: 320145 - DNA, 75 bp, synthetic construct
  source 1..75: mol_type = other DNA
ttgcaactgcgggtcaaggatctggatttcgatcacggcacgatcatcgtgcgggagggggcactgttgcaaagt

SEQ ID NO: 320146 - DNA, 75 bp, synthetic construct
  source 1..75: mol_type = other DNA
atttcgatcacggcacgatcatcgtgcgggagggcaagggctccaaggatcgggccttgatgttacccgagagct

SEQ ID NO: 320147 - DNA, 75 bp, synthetic construct
  source 1..75: mol_type = other DNA
ggagttcttgcttttacaatcatccagataattactattcaagtagtgatgagcgttgggaatgcccaatcttcg

SEQ ID NO: 320148 - DNA, 75 bp, synthetic construct
  source 1..75: mol_type = other DNA
tgcgatttgattatttaatatatgagctaatcagccgttgtaatatatgggcaggagcaacagaacacctcaatt

SEQ ID NO: 320149 - DNA, 75 bp, synthetic construct
  source 1..75: mol_type = other DNA
ccaggccgagggccgcagcggcgttgcgcttcccgacgcccttgagcggaagtatccgcgcgccgggcattcctg

SEQ ID NO: 320150 - DNA, 75 bp, synthetic construct
  source 1..75: mol_type = other DNA
agttggcggtgccggagtgcgctcaccgcttgatgcgctgccgcccctcactagtgaggcactgttgcaaatagt

SEQ ID NO: 320151 - DNA, 75 bp, synthetic construct
  source 1..75: mol_type = other DNA
gcgccttcaaacgtgccgtagaacaagcaggcatcacgaagcccgccacaccgcaaccctccgccactcgttcgc

SEQ ID NO: 320152 - DNA, 75 bp, synthetic construct
  source 1..75: mol_type = other DNA
gtgctgaaagttggcggtgccggagtgcgctcaccgcttgatgcgctgccgcccctcactagtgctgtctcttga

SEQ ID NO: 320153 - DNA, 75 bp, synthetic construct
  source 1..75: mol_type = other DNA
tcgatgcggatatcggttttggttcttcggcttttaacgttgcccgcacagtgaaatcgatgattaaagccgggg

SEQ ID NO: 320154 - DNA, 75 bp, synthetic construct
  source 1..75: mol_type = other DNA
atgcgaaaaccgatcctgattttgtgatcatggcgcgcaccgatgcgctggcggtagaggggctggatgcggcga

SEQ ID NO: 320155 - DNA, 75 bp, synthetic construct
  source 1..75: mol_type = other DNA
agttggcggtgccggagtgggcactgttgcaaagttagcgatgaggcagccttttgtcttattcaaaggccttac

SEQ ID NO: 320156 - DNA, 75 bp, synthetic construct
  source 1..75: mol_type = other DNA
cagataattactattcaagtagtgatgagcgttgggaatgcccaatcttcgttggattgacgtttttcgatgtta

SEQ ID NO: 320157 - DNA, 75 bp, synthetic construct
  source 1..75: mol_type = other DNA
actacgttcgtgcagtactggcaggcattggtattgattttgatgaaacagagatgtttatcagtgtctctcatt

SEQ ID NO: 320158 - DNA, 75 bp, synthetic construct
  source 1..75: mol_type = other DNA
gataacaatatcgttccggtaatcaatgagaacgatgctgtcgctacggcagagattaaagtcggcgataacgat

SEQ ID NO: 320159 - DNA, 75 bp, synthetic construct
  source 1..75: mol_type = other DNA
atgctgctgacccgtgctgatatggaagaccgagaacgcttcctgaacgcccgcgacaccctgcgtgcgttgctc

SEQ ID NO: 320160 - DNA, 75 bp, synthetic construct
  source 1..75: mol_type = other DNA
atgatggtgcagcacctgaaaagacggccattaagccgctatcttaaagactttaaacacagccagacccattgc

SEQ ID NO: 320161 - DNA, 75 bp, synthetic construct
  source 1..75: mol_type = other DNA
ccattaaaacggctgacgacctgaaaggtaaaaaagtcggtgtcggtctgggaaccaactatgaagagtggttgc

SEQ ID NO: 320162 - DNA, 75 bp, synthetic construct
  source 1..75: mol_type = other DNA
aaacatcttggcgttgaggcgtcactaaaaccgaccaaatgggacggtatgctggcgtcgctggactctaaacgc

SEQ ID NO: 320163 - DNA, 75 bp, synthetic construct
  source 1..75: mol_type = other DNA
tgcattcgcatcggcttaaatggcgctggccgctctcgcgtcaggtgaccttaagcattggcacgttagcggttt

SEQ ID NO: 320164 - DNA, 75 bp, synthetic construct
  source 1..75: mol_type = other DNA
tgctggctggccaaacgcatttaccgctgctccggttgtgggagaggtgctaaacaatcgatcatcgagtaaaag

SEQ ID NO: 320165 - DNA, 75 bp, synthetic construct
  source 1..75: mol_type = other DNA
tattatcgttgtttcctaaaggaaatacttgagagctatgaaaaatctagcagcatagatgtaaatagagagttc

SEQ ID NO: 320166 - DNA, 75 bp, synthetic construct
  source 1..75: mol_type = other DNA
agaaactatgtgctcgtctccatatgcgacaggagggatgttttaaagagtttgtctcgttcacacatgataatg

SEQ ID NO: 320167 - DNA, 75 bp, synthetic construct
  source 1..75: mol_type = other DNA
gtcaccaatcctggctcccgtccctggctaatgcaggcctggcttgaaaatgaaaacggtgtcagggaggggcat

SEQ ID NO: 320168 - DNA, 75 bp, synthetic construct
  source 1..75: mol_type = other DNA
gagttgtcctgtgacatccgtcagggaggaatgttgatgctgcataaccgtggtcggcattatgtgacattgacg

SEQ ID NO: 320169 - DNA, 75 bp, synthetic construct
  source 1..75: mol_type = other DNA
gcgcatctgtatggtcatgttgctggcgctgcacgtgctttcaatatttccccgctctactggaaaaaataccgt

SEQ ID NO: 320170 - DNA, 75 bp, synthetic construct
  source 1..75: mol_type = other DNA
cttaatctggttgatgacggtgttatcgaatggaatgacccggaggtcgtgagggcgctcagaggtgcattaaaa

SEQ ID NO: 320171 - DNA, 75 bp, synthetic construct
  source 1..75: mol_type = other DNA
gatggcgacgaaagaggtgcgtattttcatgaaaggagatcactcaataacttccatcgagatcgggtaataaca

SEQ ID NO: 320172 - DNA, 75 bp, synthetic construct
  source 1..75: mol_type = other DNA
gagggatatgttctggcagttgatggtcgatctctcgcgccaggacaaagtgactatcttcatctccacccactt

SEQ ID NO: 320173 - DNA, 75 bp, synthetic construct
  source 1..75: mol_type = other DNA
gttcgaacggctgcggtaaatccaccaccatgaaaatgcttaccggactgctgcccgccagcgaaggtgaggcgt

SEQ ID NO: 320174 - DNA, 75 bp, synthetic construct
  source 1..75: mol_type = other DNA
ccgcaacgatgggagcttgaggcgctggcgcgtggcgcgaccgtaaattatgacgggaaaaaattcacgtatccg

SEQ ID NO: 320175 - DNA, 75 bp, synthetic construct
  source 1..75: mol_type = other DNA
tggcgagctcgataaagataccggcaagccgctcaaagataccgccgccgctgttactgcatgggcgtcaacgtg

SEQ ID NO: 320176 - DNA, 75 bp, synthetic construct
  source 1..75: mol_type = other DNA
gactgtcagggtcgcccgtagcccgtcggatgacgttaacgagtacgaggaagaagtcgagagagtggtcggcat

SEQ ID NO: 320177 - DNA, 75 bp, synthetic construct
  source 1..75: mol_type = other DNA
ctgagaagaccaaaccgtcagcaaagaaacggaagtccgttaaaaccgcatgaaatagcgccatcggccagactg

SEQ ID NO: 320178 - DNA, 75 bp, synthetic construct
  source 1..75: mol_type = other DNA
tgaggttaatgactacgaggaagatatcgagagggtggtcggtatttacgcgcctcacctcggcgcgcgtcacgt

SEQ ID NO: 320179 - DNA, 75 bp, synthetic construct
  source 1..75: mol_type = other DNA
catatgatgcttttttgtaatccgcgccagcgtaaccagattatcgaaatcatgcgtcgctatgcgctcaaagag

SEQ ID NO: 320180 - DNA, 75 bp, synthetic construct
  source 1..75: mol_type = other DNA
ctttgactttaaaaagcggcatcgccgcgcctcggagtcctgtcaataactgtggaaagttcaccggcggtgacg

SEQ ID NO: 320181 - DNA, 75 bp, synthetic construct
  source 1..75: mol_type = other DNA
cggtcacgacaaagcagagcgggaagtacgaattaatgaactgctgaccagcaccggtttagcaccgtttcgcga

SEQ ID NO: 320182 - DNA, 75 bp, synthetic construct
  source 1..75: mol_type = other DNA
ctgatctgtttcgccaacagcaaggtgagatttggtttattgaagaggaaatagctgacgataccgataatatgc

SEQ ID NO: 320183 - DNA, 75 bp, synthetic construct
  source 1..75: mol_type = other DNA
tactcaagcgcaacggtaaaggagccatactacgcccggttatcacggcacacgggcatttcagaatactgaaaa

SEQ ID NO: 320184 - DNA, 75 bp, synthetic construct
  source 1..75: mol_type = other DNA
cccacgcgccgcgtcagggatttagcctgcgccgtctgtttagctacagccgccgcgaagcgctggaactgcgac

SEQ ID NO: 320185 - DNA, 75 bp, synthetic construct
  source 1..75: mol_type = other DNA
atcagctttatcgtcagccgactatcgaaaacctgaagctgatgatggatatcttcgttttcgataccagcgatt

SEQ ID NO: 320186 - DNA, 75 bp, synthetic construct
  source 1..75: mol_type = other DNA
aactggccggagcgcgtcggcaaactggtgctgatgggcggcggtacgggcggcatgagtttgtttacgccgatg

SEQ ID NO: 320187 - DNA, 75 bp, synthetic construct
  source 1..75: mol_type = other DNA
gttatccggcactgcactgtcgggcatgtggaagttacccgccgttgtttgacgaacaacaatttcgtgactggt

SEQ ID NO: 320188 - DNA, 75 bp, synthetic construct
  source 1..75: mol_type = other DNA
tgttccggcggtgatcccgcttctgctgatgatgattccgtcgatgttaagcgcccttagcgtagtgcgggaaaa

SEQ ID NO: 320189 - DNA, 75 bp, synthetic construct
  source 1..75: mol_type = other DNA
cgtgagccagcattatggaaaaaccgttgcgctgaacaatatcacactcgatattccggcccgctgtatggtcgg

SEQ ID NO: 320190 - DNA, 75 bp, synthetic construct
  source 1..75: mol_type = other DNA
cggtggcaattgagatcccacccaatttcgggcgcgatatcgcgcgtggtacgcctgtggaactcggtgtctgga

SEQ ID NO: 320191 - DNA, 75 bp, synthetic construct
  source 1..75: mol_type = other DNA
caccatgaaaatgctcaccggactgctgcccgccagcgaaggtgaggcgtggctgttcgggcaaccggttgatcc

SEQ ID NO: 320192 - DNA, 75 bp, synthetic construct
  source 1..75: mol_type = other DNA
cccgttactttatcgaacagccgccgctcaccagttatgacgagcttgatcgccggatgcgtgcgggcgatatca

SEQ ID NO: 320193 - DNA, 75 bp, synthetic construct
  source 1..75: mol_type = other DNA
ttcctgcgcgagttgctgagatgagcgagcgttttaagctcaacgatgttgaagatgcactgccggaatccctgc

SEQ ID NO: 320194 - DNA, 75 bp, synthetic construct
  source 1..75: mol_type = other DNA
cgctgtttacggatgaggcgcaggctcacctctatggtcatgttgctggcgctgcacgtgctttcaatatttccc

SEQ ID NO: 320195 - DNA, 75 bp, synthetic construct
  source 1..75: mol_type = other DNA
gctgaagtcgccatcaaggagagtgagcgttttaatggcatcccgcgctttcagtgcctgttgccgagccgattc

SEQ ID NO: 320196 - DNA, 75 bp, synthetic construct
  source 1..75: mol_type = other DNA
gcaacatggtgttgaaagtggcatggcaagccgatcagcatcagtcactgcgcaccagcgcggcgctggcaaaac

SEQ ID NO: 320197 - DNA, 75 bp, synthetic construct
  source 1..75: mol_type = other DNA
gttaaagcccgaaaacggtggttcagacagtaaactcatggatttgcccctatatttccagacatctgttatcac

SEQ ID NO: 320198 - DNA, 75 bp, synthetic construct
  source 1..75: mol_type = other DNA
ctcacggttctggtcgattcaggagtgcgttccggggtggacgttatccggatgcttgcccttggcgcaaaaggg

SEQ ID NO: 320199 - DNA, 75 bp, synthetic construct
  source 1..75: mol_type = other DNA
acattattgttgttgcgccggacaccagtccgcgaggcagtcatgtcgcagatgccgaccgttacgatctcgggc

SEQ ID NO: 320200 - DNA, 75 bp, synthetic construct
  source 1..75: mol_type = other DNA
agcataaccaggatccaatggcagtagataaactggcggaaggtatccgtaagtttgctgttgaccaggaaaaac

SEQ ID NO: 320201 - DNA, 75 bp, synthetic construct
  source 1..75: mol_type = other DNA
accaccagcaatacagtggtggcggtaaacctcagagcaacgccaataacgaacctccaatggactttgacgacg

SEQ ID NO: 320202 - DNA, 75 bp, synthetic construct
  source 1..75: mol_type = other DNA
ggtatggaaactgcgaagtggcgtaggcctaatgctagtggtaattggggaattgtatctgcggttaaatgggat

SEQ ID NO: 320203 - DNA, 75 bp, synthetic construct
  source 1..75: mol_type = other DNA
tctctttatcggaaccgtccatgggttctgtttgcgccatctgttgatgccctatggacgactggccgatttgcc

SEQ ID NO: 320204 - DNA, 75 bp, synthetic construct
  source 1..75: mol_type = other DNA
ggatgccatgtatgaattgggaaaatattatttaaccaacaatgatgatcctgaaaataacgctgaggctattca

SEQ ID NO: 320205 - DNA, 75 bp, synthetic construct
  source 1..75: mol_type = other DNA
caacttgctaaggcgttatctttccttgagaaaaaagatctcagctcacgaatgtgctttgaagaagcgttatta

SEQ ID NO: 320206 - DNA, 75 bp, synthetic construct
  source 1..75: mol_type = other DNA
actgtgaaaaaccctcactactgtttccatttacagccttgacgtgcgacgaaactctaatttttagtggtgcgg

SEQ ID NO: 320207 - DNA, 75 bp, synthetic construct
  source 1..75: mol_type = other DNA
gtgctttgtggtgttggcgacccgacgctgacgactaatatccttggaacgtcatgggcaatgccggtcgcgctg

SEQ ID NO: 320208 - DNA, 75 bp, synthetic construct
  source 1..75: mol_type = other DNA
accgggagagcagaccgccaccagcatactgaagcagcgcacaaaaaatcttgcgccgctgcctcacgcccacca

SEQ ID NO: 320209 - DNA, 75 bp, synthetic construct
  source 1..75: mol_type = other DNA
tgcgcactctggaatgagcggcccgaacgcggcaatgcgccgctacttgcaggcggtaacgcatccgcaatgggc

SEQ ID NO: 320210 - DNA, 75 bp, synthetic construct
  source 1..75: mol_type = other DNA
tctgataatacttcatcgtttctcgacaaagcgcgtggctttttacgcgataaaacggattcacaggcacatgag

SEQ ID NO: 320211 - DNA, 75 bp, synthetic construct
  source 1..75: mol_type = other DNA
gtcagaacagccttaaagaaacgcgtaggctggaaagttaaggcttggcaggctgagtctgcgccaaccaataaa

SEQ ID NO: 320212 - DNA, 75 bp, synthetic construct
  source 1..75: mol_type = other DNA
tgagcggcaaaaaacgctggcaagcaagctttggcctggaagagcgtactgccgaaaaaacgccagtacgccagc

SEQ ID NO: 320213 - DNA, 75 bp, synthetic construct
  source 1..75: mol_type = other DNA
tctatgaacacgatctcacgctgaaagataagctcttttcgtcactcttagatcagcccgcgcaggcagcgctgt

SEQ ID NO: 320214 - DNA, 75 bp, synthetic construct
  source 1..75: mol_type = other DNA
tgatacggctaaacgctcaagacctcattatagaaaacaccaccgggaatggattaagaccgccaatgaacggct

SEQ ID NO: 320215 - DNA, 75 bp, synthetic construct
  source 1..75: mol_type = other DNA
tgtcatggtgatgctgccagaaacgggcgctgaccgtcacgggcgcacctttctgatgcgcctgcaggacaaaat

SEQ ID NO: 320216 - DNA, 75 bp, synthetic construct
  source 1..75: mol_type = other DNA
tttcttattaccccggcccgcaggcgcgtatttactatgcggaaatgttggcgaaaatgagtcggttacgtgaag

SEQ ID NO: 320217 - DNA, 75 bp, synthetic construct
  source 1..75: mol_type = other DNA
caggcagcgtatgcccgccgctatgtcaacaaatggccgcaggccacagcacatgaatacctgacacgaaaaggc

SEQ ID NO: 320218 - DNA, 75 bp, synthetic construct
  source 1..75: mol_type = other DNA
ttaaccgaagagctggcgattgccgagaccaatcaaaaccattatgcgttagctaacgaactggcgcgccttggg

SEQ ID NO: 320219 - DNA, 75 bp, synthetic construct
  source 1..75: mol_type = other DNA
ttgaactgctttgctgtattcacgcttatcgctccggacaagagcgatactggatttttattatcttctgttttc

SEQ ID NO: 320220 - DNA, 75 bp, synthetic construct
  source 1..75: mol_type = other DNA
cgatgccgaaatgctgtcgatggtgggtaaaggctgcattatgggcagcgcgcatcagcgcctgaaagatctgca

SEQ ID NO: 320221 - DNA, 75 bp, synthetic construct
  source 1..75: mol_type = other DNA
aatctgatttttgctcataacctggatcgcgacattgccagcgatctgtttggcgtagtcaacgacaatccggac

SEQ ID NO: 320222 - DNA, 75 bp, synthetic construct
  source 1..75: mol_type = other DNA
ttttgaacaactggtgaataaaacttgtatggcttggccattggcgggaacgctcgattttggtcggataggata

SEQ ID NO: 320223 - DNA, 75 bp, synthetic construct
  source 1..75: mol_type = other DNA
acagcgccgggctgtgggagttgtcgaaacctggagcgtagcagcctgtattgacgctgccgatcgtgctgttaa

SEQ ID NO: 320224 - DNA, 75 bp, synthetic construct
  source 1..75: mol_type = other DNA
agcgccaatgttgagttactggtcggcaaaacgctatgccccggaaaatttctgctgatgctcggtggcgatgtc

SEQ ID NO: 320225 - DNA, 75 bp, synthetic construct
  source 1..75: mol_type = other DNA
tgcgattcccatgaaaaacttctgccactggagcaagcgattaacgctcgctggggcgatcgcgtcaatgtcagt

SEQ ID NO: 320226 - DNA, 75 bp, synthetic construct
  source 1..75: mol_type = other DNA
cacgaagacggaactggcgaccatcaacatgatgggccgcggactggcgctgaactgccgggcccgctttatgca

SEQ ID NO: 320227 - DNA, 75 bp, synthetic construct
  source 1..75: mol_type = other DNA
taataaattaggttacatgcaggcatttgtcgaatacggtattcgtcacaatacactgggtactgaatttaaagc

SEQ ID NO: 320228 - DNA, 75 bp, synthetic construct
  source 1..75: mol_type = other DNA
tgcgcaacgattcgaacgcgaaaaacctgtggtggaccactcagggtggcggcgtgtatgcgacgtcatcgcttg

SEQ ID NO: 320229 - DNA, 75 bp, synthetic construct
  source 1..75: mol_type = other DNA
aactgcgccaggctgcggaatcgatgaagcgttcctatgttgcaaacgatcctgaaaaggcgagcgatgaagcgc

SEQ ID NO: 320230 - DNA, 75 bp, synthetic construct
  source 1..75: mol_type = other DNA
tgaacctgccggtgattatcgacaatagccaaccatacgctgcgcagtaccctgagaactcccacgcaataccga

SEQ ID NO: 320231 - DNA, 75 bp, synthetic construct
  source 1..75: mol_type = other DNA
tggcagcctctacgagatcgagaatcagtttatggagtacgtgccatctactgcgaagaaatcacctgaccggct

SEQ ID NO: 320232 - DNA, 75 bp, synthetic construct
  source 1..75: mol_type = other DNA
tgctttatccatatttccgagcatattaggttttggcattggtgtgtttgttgttgtttttgcccttccgaatca

SEQ ID NO: 320233 - DNA, 75 bp, synthetic construct
  source 1..75: mol_type = other DNA
gaacgccgcgatctcgggctagatgatggctctttctggcctgtgctagaaggtatcccggcaacagatatgttc

SEQ ID NO: 320234 - DNA, 75 bp, synthetic construct
  source 1..75: mol_type = other DNA
atgaccaacgcagagttaaaacttgatttatttctaaaatcctatcatccatctcatcgatttgtctataaggca

SEQ ID NO: 320235 - DNA, 75 bp, synthetic construct
  source 1..75: mol_type = other DNA
cgtaaagtggtgttctgcggtacgtttgacgccaaaggcagcaagattgatgtaacgccagatggcttgcatatc

SEQ ID NO: 320236 - DNA, 75 bp, synthetic construct
  source 1..75: mol_type = other DNA
ccagccagaagcaaattgatgaaatgttcaacgcttatgctcgcggtgagccgaaggacgatctgccgaccggca

SEQ ID NO: 320237 - DNA, 75 bp, synthetic construct
  source 1..75: mol_type = other DNA
gtcatctttcgcacttctacagcgtcgcccaacatgcggttctttgcagccagttggtgccgcaggaatttgctt

SEQ ID NO: 320238 - DNA, 75 bp, synthetic construct
  source 1..75: mol_type = other DNA
taactcatactacaaaaatgaagctgtttataattattcactttttaatcattatccaaaaacatgctttattac

SEQ ID NO: 320239 - DNA, 75 bp, synthetic construct
  source 1..75: mol_type = other DNA
acggtcacgatggcacatggattgcccacccaggccttgcggatacggcaatggcggtattcaacgacattctcg

SEQ ID NO: 320240 - DNA, 75 bp, synthetic construct
  source 1..75: mol_type = other DNA
tgggtgcggagggtactttctggtgttttatttacttttgttttaagtttgttgattgtgacatttttcagagat

SEQ ID NO: 320241 - DNA, 75 bp, synthetic construct
  source 1..75: mol_type = other DNA
tgccgatctcatcatgctggcaaccgaacgccgcgatctcgggcttgatgatggctctttctggccagtactgga

SEQ ID NO: 320242 - DNA, 75 bp, synthetic construct
  source 1..75: mol_type = other DNA
atgctcaaacgcattattgccggacattttacctggtcgcccaagatgcaggaactggtgaaaagcaatgctatt

SEQ ID NO: 320243 - DNA, 75 bp, synthetic construct
  source 1..75: mol_type = other DNA
cggtgccggacgtccggggctttttacccacgttgggctgggatcgtttgttgatccacgcaatggcggcggtaa

SEQ ID NO: 320244 - DNA, 75 bp, synthetic construct
  source 1..75: mol_type = other DNA
atgtcatttattaaaattttttccgggaagcatttttattatgacaagataaataaaaatgacatcgttattaac

SEQ ID NO: 320245 - DNA, 75 bp, synthetic construct
  source 1..75: mol_type = other DNA
gcttgcttcacgtctggcagtgcaaacgacgcctgttatcgtcatcatgcagcgcatccactacgatgatttgtc

SEQ ID NO: 320246 - DNA, 75 bp, synthetic construct
  source 1..75: mol_type = other DNA
tagtgcaaccgcctgtatttttgcggctgaagtcgccatcaaggagagtgagcgttttaatggcatcccgcgctt

SEQ ID NO: 320247 - DNA, 75 bp, synthetic construct
  source 1..75: mol_type = other DNA
atgatgttaaatcccgaacggggagaacagtcaaaacatgttggatagcgcatgtaaagtcattgcatgggctaa

SEQ ID NO: 320248 - DNA, 75 bp, synthetic construct
  source 1..75: mol_type = other DNA
cagcgccgaaagccgggtttatccttgccctgatcaatgggctgcggagatcgagcaatcaatgagaaatctggg

SEQ ID NO: 320249 - DNA, 75 bp, synthetic construct
  source 1..75: mol_type = other DNA
tggttgaaactacttaccctgttttccgtggtgtggttgataacatcaatatttctattgaatacaacgaagatg

SEQ ID NO: 320250 - DNA, 75 bp, synthetic construct
  source 1..75: mol_type = other DNA
ccgatggtatccaccgatcctatgttggaaacgagaacgatctattcttctctcgtgccgggaagtggaatagcg

SEQ ID NO: 320251 - DNA, 75 bp, synthetic construct
  source 1..75: mol_type = other DNA
agtgtaaaaacgaatcagaatttcagcttaatagtatctgggaagttctagataaaaacgctcgtagtcatgcct

SEQ ID NO: 320252 - DNA, 75 bp, synthetic construct
  source 1..75: mol_type = other DNA
agcgcaacggtaagggagccatactacgcccggttatcacggcacacgggcatttcagaatactgaaaatccgct

SEQ ID NO: 320253 - DNA, 75 bp, synthetic construct
  source 1..75: mol_type = other DNA
caacatataattcgtcatcgactatacatcagagtattgaatctgtaatttcgcaaacctatacaaattgggaat

SEQ ID NO: 320254 - DNA, 75 bp, synthetic construct
  source 1..75: mol_type = other DNA
tgcatatcttccgcgactgtggtcactgggcgcagtgggaacatgccgacgctttcaatcaattggtgctgaatt

SEQ ID NO: 320255 - DNA, 75 bp, synthetic construct
  source 1..75: mol_type = other DNA
aatctcacaggaaaccgtaaagttgtttcttccggtggtgaagattcagtttggttaggctggaaagatgattac

SEQ ID NO: 320256 - DNA, 75 bp, synthetic construct
  source 1..75: mol_type = other DNA
tctatttgcagggaatatcaaaaaaaagattcaagagttgttctcatttcaaatgagaagaattatggggctggt

SEQ ID NO: 320257 - DNA, 75 bp, synthetic construct
  source 1..75: mol_type = other DNA
aaaaaattcaaccacctgaatttgtcaattatcatcaattaatgaaatctaatgtgatcggttgcttgactgctg

SEQ ID NO: 320258 - DNA, 75 bp, synthetic construct
  source 1..75: mol_type = other DNA
ctgatggtatccaccgatcctatgttggaaacgagaacgatctattcttctcccgtgccgggaagtggaactcag

SEQ ID NO: 320259 - DNA, 75 bp, synthetic construct
  source 1..75: mol_type = other DNA
atactccgacaacctggcattacttaattcctcgacagtcagaagcatggtttgttcgcaggaataccaaaagct

SEQ ID NO: 320260 - DNA, 75 bp, synthetic construct
  source 1..75: mol_type = other DNA
gtggcccatgaagatccgcaacgatgccaactcaaaatcgatgtggtggactgaatacggtggcggcgtgtatgc

SEQ ID NO: 320261 - DNA, 75 bp, synthetic construct
  source 1..75: mol_type = other DNA
atgttgacaatcaaagaacgagttattcagtccaaatgcgaaaaagatggcctgtttttcaatcgctacttctat

SEQ ID NO: 320262 - DNA, 75 bp, synthetic construct
  source 1..75: mol_type = other DNA
tgatgacccattaaagcccgctgacgcttactctgatgtgatgcgggataaggtaaagaacaactacaacgacac

SEQ ID NO: 320263 - DNA, 75 bp, synthetic construct
  source 1..75: mol_type = other DNA
ttcagtcaaaatgtgaaaacgatggcctgttcttcaaccgctatttctacaagcaagcaaacggtacgaagatgt

SEQ ID NO: 320264 - DNA, 75 bp, synthetic construct
  source 1..75: mol_type = other DNA
cggaacagggcggcgggatatatgccgcatcgtcacacggtcagattacgggttttcgtgctggttacatggagc

SEQ ID NO: 320265 - DNA, 75 bp, synthetic construct
  source 1..75: mol_type = other DNA
acgtatacggcgggtggcaaaccgatttatcaatgtgccgccggagggatttttcccacagggcatgccggagga

SEQ ID NO: 320266 - DNA, 75 bp, synthetic construct
  source 1..75: mol_type = other DNA
gttggttgctggaaagaataatgtcgccggaatattatcggcgccgttttgagggctggcaggcgtttgtcgagc

SEQ ID NO: 320267 - DNA, 75 bp, synthetic construct
  source 1..75: mol_type = other DNA
cgaataccgaagagaaggagatcaacaacaacgggatcaacgtaaccgtttctaacgttcgcgaggaatacatta

SEQ ID NO: 320268 - DNA, 75 bp, synthetic construct
  source 1..75: mol_type = other DNA
gttatttgaattgtggcaacgtaactttactcaatattggaaaatgaaaatatataccgtctctgtccaatggga

SEQ ID NO: 320269 - DNA, 75 bp, synthetic construct
  source 1..75: mol_type = other DNA
agaacacggcgaacgcgtgcgttatcttcactcggacatcgataccgtcgagcgtatggaaatcatccgcgattt

SEQ ID NO: 320270 - DNA, 75 bp, synthetic construct
  source 1..75: mol_type = other DNA
agaaaatccatgagctggaagctcagatgatgaaacacgcacaaaatctggaattcgaggaggctgcgcaaattc

SEQ ID NO: 320271 - DNA, 75 bp, synthetic construct
  source 1..75: mol_type = other DNA
gttgaccttgctcagaacggtatcaggccgcagcgatgggagcttgaggcgctggcgcgtggcgcgactgtaaat

SEQ ID NO: 320272 - DNA, 75 bp, synthetic construct
  source 1..75: mol_type = other DNA
gtatatcagcgcgcagggtggggcaaatgtcccgcgcgattgtcagactgtcagggttgcccgtagcccgtcgga

SEQ ID NO: 320273 - DNA, 75 bp, synthetic construct
  source 1..75: mol_type = other DNA
gaaaccgttttcaggcaaaacaccttaaccggggcggtgctgcggggtatatcgcgaaatacatttcaaaaaaca

SEQ ID NO: 320274 - DNA, 75 bp, synthetic construct
  source 1..75: mol_type = other DNA
ctgagaacgccaaaccgtcagcaaagaaacggaagcccgttaaaaccacatgaaattgcaccatcggccagactg

SEQ ID NO: 320275 - DNA, 75 bp, synthetic construct
  source 1..75: mol_type = other DNA
tctggcagagcgtgaccactatgcgcgcctgcctggaatgaatgacaaggagctgaaaaagtttgccgcccgtat

SEQ ID NO: 320276 - DNA, 75 bp, synthetic construct
  source 1..75: mol_type = other DNA
caccggtggtgatacttcgttaccggctcccacaccttctgagcacgccgcagcagtgcttaatctggttgatga

SEQ ID NO: 320277 - DNA, 75 bp, synthetic construct
  source 1..75: mol_type = other DNA
ccgcgctggcaaagctggaaagcctcgatgaagtcactgaagcctattacacaactggccactacagcatcttta

SEQ ID NO: 320278 - DNA, 75 bp, synthetic construct
  source 1..75: mol_type = other DNA
tcctgcgtataatcttgatgaccttcgccgttttgccttacaggacgaccgcccatcccttgtcagatacattga

SEQ ID NO: 320279 - DNA, 75 bp, synthetic construct
  source 1..75: mol_type = other DNA
tcgtgttattaccttcatgatagtgaaattgactttacgattttaaagcacagcataatagataaagacaaaaac

SEQ ID NO: 320280 - DNA, 75 bp, synthetic construct
  source 1..75: mol_type = other DNA
cgtcgtatggaactgatgaacactatcgccgggattgaacgctacgcggccagcgttggtgatgtggggatgttt

SEQ ID NO: 320281 - DNA, 75 bp, synthetic construct
  source 1..75: mol_type = other DNA
aaaccgcactcatgcggtgatggggatggaagacgcgggtaaatccgtctggcggaactacccgaagcagccctg

SEQ ID NO: 320282 - DNA, 75 bp, synthetic construct
  source 1..75: mol_type = other DNA
atgagtatgattcacgacagtaaagcggaagatctggagtctaaaggcctgtaccggagagcggcggcccggtgg

SEQ ID NO: 320283 - DNA, 75 bp, synthetic construct
  source 1..75: mol_type = other DNA
cactgtgcatcacgaaattcacttcaccgtacaggaaggtctcgatgccatccgcgacgtgatttatcacattga

SEQ ID NO: 320284 - DNA, 75 bp, synthetic construct
  source 1..75: mol_type = other DNA
aaaaaaacacgcgtgattcgtgtacctgacaaaccttcattaaatgatctgctggctattggtgtaggcaatact

SEQ ID NO: 320285 - DNA, 75 bp, synthetic construct
  source 1..75: mol_type = other DNA
cgaaagatttgattaatggtgaaattgttgctatcggagatgaaggatcatttataacagtaaactcatgcatgc

SEQ ID NO: 320286 - DNA, 75 bp, synthetic construct
  source 1..75: mol_type = other DNA
gcgtatcttcgtggccgctataccctgccgctggcagaagtcccgacggtgctgcgggacattgccattacgctg

SEQ ID NO: 320287 - DNA, 75 bp, synthetic construct
  source 1..75: mol_type = other DNA
gcccaactggacgttcgcaaccgcgccgctattgaagagatgctggcatcgcttcctgccgagtggtgcaatatt

SEQ ID NO: 320288 - DNA, 75 bp, synthetic construct
  source 1..75: mol_type = other DNA
gtgggtggcgactctcccggctcacgttaacatcaatactctggaaatgatgccagttacccagagctatgccgg

SEQ ID NO: 320289 - DNA, 75 bp, synthetic construct
  source 1..75: mol_type = other DNA
ggcggtaacgcctgattcgtccagtgacttaccccgactttctattaattctttttcacaacttggctttgacgt

SEQ ID NO: 320290 - DNA, 75 bp, synthetic construct
  source 1..75: mol_type = other DNA
atgtgttcaatttttggcgtattcgatatcaaaacagacgcagttgaactgcgtaaaaaagcactcgagctgtca

SEQ ID NO: 320291 - DNA, 75 bp, synthetic construct
  source 1..75: mol_type = other DNA
gccaaagcgattgagtgggatgaagcgttcaagaaaatggacgatccatcgggtcgtgcagtcggtgttcaccag

SEQ ID NO: 320292 - DNA, 75 bp, synthetic construct
  source 1..75: mol_type = other DNA
cctcagaaatgaaagccctggtgccagtttgccgcacgattaaagagttcccggcggggagctatttgtggagtc

SEQ ID NO: 320293 - DNA, 75 bp, synthetic construct
  source 1..75: mol_type = other DNA
atgtactgcaccctggaggatttgcttgagcaggtgccggagcggacgcttatcgagctcaccagcgaagagatg

SEQ ID NO: 320294 - DNA, 75 bp, synthetic construct
  source 1..75: mol_type = other DNA
gagcttgaggcgctggcgcgtggcgcgaccgtaaattacgacgggaaaaaatttaggtattttatagttaatgag

SEQ ID NO: 320295 - DNA, 75 bp, synthetic construct
  source 1..75: mol_type = other DNA
caataaagaccgttctccttatgccagtaaacatgccattcgtgatgtgcgtgcacgccgccaggcaaatctgga

SEQ ID NO: 320296 - DNA, 75 bp, synthetic construct
  source 1..75: mol_type = other DNA
aaagccgggtttactgccgtttttgatgctgagaatcaggaatggattcacagtgaagaccatcgcggtgaggtg

SEQ ID NO: 320297 - DNA, 75 bp, synthetic construct
  source 1..75: mol_type = other DNA
gcacggcgctgaaaaacaaaacgcaggaactgacgaagaaaaacagtcagttggtcggcctgtccattctgaccg

SEQ ID NO: 320298 - DNA, 75 bp, synthetic construct
  source 1..75: mol_type = other DNA
atgataaaatatatcttttcactcaccattattttttccgcttctctctgtgccgcacagattcaggggcacgtc

SEQ ID NO: 320299 - DNA, 75 bp, synthetic construct
  source 1..75: mol_type = other DNA
cgctggttcttgccttgcttggctggcaatcgtggcagttgaacaaggcccggcagacgattgagctgcagggac

SEQ ID NO: 320300 - DNA, 75 bp, synthetic construct
  source 1..75: mol_type = other DNA
cttatcagcctgtccattctggctgaaaccaacaaccgggagcaggcgcggctctacgccgaagcagaacagacc

SEQ ID NO: 320301 - DNA, 75 bp, synthetic construct
  source 1..75: mol_type = other DNA
aacgcgctctggcagcacttcacgacactgcaagggaacggcagaagcagaagtttctggagggattttttattg

SEQ ID NO: 320302 - DNA, 75 bp, synthetic construct
  source 1..75: mol_type = other DNA
tgccgttcaaattcagggactcgttattcgtgtgctggacggagatactctggagatattacaggcccggcaccc

SEQ ID NO: 320303 - DNA, 75 bp, synthetic construct
  source 1..75: mol_type = other DNA
ccggcgggcaatacggcgctctgcaccgtgggtaaaagtggcaatgacctgcattaccgtggctacgatattctt

SEQ ID NO: 320304 - DNA, 75 bp, synthetic construct
  source 1..75: mol_type = other DNA
aagtggcgcatctgctgatccacggcaaactgccgacccgtgacgaactcgccgcttacaaaacgaaactgaaag

SEQ ID NO: 320305 - DNA, 75 bp, synthetic construct
  source 1..75: mol_type = other DNA
tccgcaagcgggtggaaaacaaagaagtggtcattggttttggtcatccggtttataccatcgccgacccgcgcc

SEQ ID NO: 320306 - DNA, 75 bp, synthetic construct
  source 1..75: mol_type = other DNA
ccggcggcgtcgcacccgatggatgtcatgcgcaccggcgtttccgcgctcggctgcacactgccagaaaaagag

SEQ ID NO: 320307 - DNA, 75 bp, synthetic construct
  source 1..75: mol_type = other DNA
gctctacgccgaagcagaacagaccagcgcactgctgagacaacgacaacgccggatggaggaactgaaacgtga

SEQ ID NO: 320308 - DNA, 75 bp, synthetic construct
  source 1..75: mol_type = other DNA
ggaatcattaaagcggaaggcaatatgacctccggcgatgcgcacctggcggtgaatttcccgctgctgctggaa

SEQ ID NO: 320309 - DNA, 75 bp, synthetic construct
  source 1..75: mol_type = other DNA
ggaggaagtatgtgggtcgacattgaggctccggaaggagtgacggagaaggattatcaattcctgccgtcgaag

SEQ ID NO: 320310 - DNA, 75 bp, synthetic construct
  source 1..75: mol_type = other DNA
gaacttgattttataattgatagtgaatcattgtctgtaggcagaccgtggcctaataaatgtttatgggttgga

SEQ ID NO: 320311 - DNA, 75 bp, synthetic construct
  source 1..75: mol_type = other DNA
atttcctaaagcgtagtgatagaaatgaatcgcctgtttctcttattgggaaaatagtcgatcttgctataaggg

SEQ ID NO: 320312 - DNA, 75 bp, synthetic construct
  source 1..75: mol_type = other DNA
gctaataaattaaaaccaaatagccaagttggtgttaatgctgctcttgatggctataaatcttttaatgcttta

SEQ ID NO: 320313 - DNA, 75 bp, synthetic construct
  source 1..75: mol_type = other DNA
ttacccggaagggacaaccacgttagcaccggctaatgcctggcaaaaatggaatggtaaggcgtgggtggatga

SEQ ID NO: 320314 - DNA, 75 bp, synthetic construct
  source 1..75: mol_type = other DNA
acttcacacaattcagtctgaacgattaaacaccgatttctctttattcaaaagacaaccatccattaatggcgc

SEQ ID NO: 320315 - DNA, 75 bp, synthetic construct
  source 1..75: mol_type = other DNA
tttttcatcgcatggctaataaatgtagcctgaaatccatttccatacctgaacttgattttataattgacagcg

SEQ ID NO: 320316 - DNA, 75 bp, synthetic construct
  source 1..75: mol_type = other DNA
gccagccagaccatcagcacgcaggcagacgagctgcagagcaaaagccaagcactggcaaagagcaacagccag

SEQ ID NO: 320317 - DNA, 75 bp, synthetic construct
  source 1..75: mol_type = other DNA
tacacctgggatattgaagatatggggttaatttatcatcaggttaatacttatatagaagataatgagtttgat

SEQ ID NO: 320318 - DNA, 75 bp, synthetic construct
  source 1..75: mol_type = other DNA
tgatatggtttcacaggaaattcttttaaatggttcttttgataagtggagtaacagggttcattcagcttatga

SEQ ID NO: 320319 - DNA, 75 bp, synthetic construct
  source 1..75: mol_type = other DNA
gcttcacaccattcagcctgaacgattaaacaccgatatctctttattcagaagacaaccatccattaatggcgc

SEQ ID NO: 320320 - DNA, 75 bp, synthetic construct
  source 1..75: mol_type = other DNA
agaagctacgcgaactggcatttgccctgcaacgaatggcaacacctcaaaaattactggcatttcgcgcaatgc

SEQ ID NO: 320321 - DNA, 75 bp, synthetic construct
  source 1..75: mol_type = other DNA
accactgggttcacctggcgaaccggaaacaccggaagcaatgcagcgagagctgctgcaacacatcgacaacgt

SEQ ID NO: 320322 - DNA, 75 bp, synthetic construct
  source 1..75: mol_type = other DNA
atcatgaaatcaaggatttttgcgcgacgctggagtcaccaggtgaatcagaaacgccggaagcaatgcagcagg

SEQ ID NO: 320323 - DNA, 75 bp, synthetic construct
  source 1..75: mol_type = other DNA
gtgtcaggactgttccaaaagaacattgtcattgatgatgcggcagctctgcaacgcacactgtttaagttgatg

SEQ ID NO: 320324 - DNA, 75 bp, synthetic construct
  source 1..75: mol_type = other DNA
gcgctctaccaatcgtggccgcagcctatggtgaaaaactcggtgtcaaagtcgccatcggtaacgatgacgcat

SEQ ID NO: 320325 - DNA, 75 bp, synthetic construct
  source 1..75: mol_type = other DNA
tacgcgaactggcatttgccctgcaacgaatggcaacacctcaaaaattactggcatttcgcgcaatgctctcgc

SEQ ID NO: 320326 - DNA, 75 bp, synthetic construct
  source 1..75: mol_type = other DNA
cgttctatcattgcggatatcgtggtgaaaatcccggtgaccgctgagggcctggcagccattaaaatgttaaaa

SEQ ID NO: 320327 - DNA, 75 bp, synthetic construct
  source 1..75: mol_type = other DNA
ggcgctggcctggctgaaagatgtcatgaacggcaatgtgccggtaggtgtggatacgaacggagcggcccctga

SEQ ID NO: 320328 - DNA, 75 bp, synthetic construct
  source 1..75: mol_type = other DNA
tcgaataattatttatcttttttcaattattgattatggtaatattcttgttaacttctctcaatcaaaagtagc

SEQ ID NO: 320329 - DNA, 75 bp, synthetic construct
  source 1..75: mol_type = other DNA
atgcagaaaccgcaccgaaactgatgcgtctgatcgatatgctggaggattgcgacgacgtgcaggaagtttacc

SEQ ID NO: 320330 - DNA, 75 bp, synthetic construct
  source 1..75: mol_type = other DNA
atggaagcagctctggaagcaggtgctgaagacgttgtgacctatgatgacggcgcgattgatgtctacactgca

SEQ ID NO: 320331 - DNA, 75 bp, synthetic construct
  source 1..75: mol_type = other DNA
ccatcatctacgaaggttacggtcctggcggcacggcaatcatgattgaatgtctgtctgacaaccgcaaccgta

SEQ ID NO: 320332 - DNA, 75 bp, synthetic construct
  source 1..75: mol_type = other DNA
cggtcattacgaacacgtcacagataaagaggctccggcctccattctgactgggttctgcttgtactggctgca

SEQ ID NO: 320333 - DNA, 75 bp, synthetic construct
  source 1..75: mol_type = other DNA
ttcgacaatctggtgaccgtctctttggcccaaaccatccctataaggctattgatctcggacgacatcgccgtt

SEQ ID NO: 320334 - DNA, 75 bp, synthetic construct
  source 1..75: mol_type = other DNA
caacggcctgcaggcagccctgttccggacagccgggaattactatcagggcgtgatgcggctgggcgggcacgg

SEQ ID NO: 320335 - DNA, 75 bp, synthetic construct
  source 1..75: mol_type = other DNA
cagtacggctgaaacaccgcatccggaagcgccggtcacggcaaaagctgaagccccccgggccgacagaccgga

SEQ ID NO: 320336 - DNA, 75 bp, synthetic construct
  source 1..75: mol_type = other DNA
gtgaagaaccaccaggaaaacttcgcccgggagagagcgtgactgccgtactgcacaattttggtcgtgctgaat

SEQ ID NO: 320337 - DNA, 75 bp, synthetic construct
  source 1..75: mol_type = other DNA
cgtgaatttgaagccgaactgtcacaaccggaaaaaaacgagtcacaacaggaatccggcacttcaccagaaata

SEQ ID NO: 320338 - DNA, 75 bp, synthetic construct
  source 1..75: mol_type = other DNA
cacagcagtgaacatgaaccggcaccttctttgcctcctgcaccacctgaagtgcagccgtcactctccggtaac

SEQ ID NO: 320339 - DNA, 75 bp, synthetic construct
  source 1..75: mol_type = other DNA
cttttcaggaaatcaccattgaagaactgaacgtcacggtgaccgctcatgaaatggagatggcgaaactgcgcg

SEQ ID NO: 320340 - DNA, 75 bp, synthetic construct
  source 1..75: mol_type = other DNA
aactttgcaacagtgccccccgacgactatcctcacatggatgctgtctgggggtatttggcccatgaagcagcc

SEQ ID NO: 320341 - DNA, 75 bp, synthetic construct
  source 1..75: mol_type = other DNA
agtcaccttttttggtggcaaccggaaccagccagtgttcagtgtcgtgaagcatggagatacggttcagaatcg

SEQ ID NO: 320342 - DNA, 75 bp, synthetic construct
  source 1..75: mol_type = other DNA
ctgctggagcgctggttaccccggccgcaggaactgtcgatggatgccggcgatccggtcaccgaatttgctcag

SEQ ID NO: 320343 - DNA, 75 bp, synthetic construct
  source 1..75: mol_type = other DNA
gcagctggcagcagagacatccctgcagccggatgtaccgggtgcaggtgatgacggataccctggctatgacgt

SEQ ID NO: 320344 - DNA, 75 bp, synthetic construct
  source 1..75: mol_type = other DNA
caatccatactggcggttgacggaaagcagcgatgttttgcgcttttctaccaccgaaaccacagaacctgatcg

SEQ ID NO: 320345 - DNA, 75 bp, synthetic construct
  source 1..75: mol_type = other DNA
aaaagatttaggactacaaaaatctaatgtttcaagagcattcaaagagttattcgaaaagaaaatattgattcg

SEQ ID NO: 320346 - DNA, 75 bp, synthetic construct
  source 1..75: mol_type = other DNA
agaaacaggttttattgcctgtcacgaataatgatcctgccagtgtctatctcattcagtcatggatagaaaatg

SEQ ID NO: 320347 - DNA, 75 bp, synthetic construct
  source 1..75: mol_type = other DNA
accggggatatcagttttcagacaatcaatgattacggtgcattaactccgcgtattaaggcaaccatgcagtaa

SEQ ID NO: 320348 - DNA, 75 bp, synthetic construct
  source 1..75: mol_type = other DNA
gaagcacttgtcaggtttcatgcgggtgataaaaaccatgaaacattattgcttcgtgccaacgaagggatgaat

SEQ ID NO: 320349 - DNA, 75 bp, synthetic construct
  source 1..75: mol_type = other DNA
gccgtcgcgatatcgccctgggtggacagggcgcaccgctggtgccagcgtttcatcatgcattgctggctcatc

SEQ ID NO: 320350 - DNA, 75 bp, synthetic construct
  source 1..75: mol_type = other DNA
atgacacagggcaggcgggaggataaatgtccgtctgcccgtgcaggaaaaagaccgcgcgccggtggcgctgaa

SEQ ID NO: 320351 - DNA, 75 bp, synthetic construct
  source 1..75: mol_type = other DNA
ctgaccgcgcgtgaagcgaaagttctgcgtatgcgtttcggtatcgatatgaacaccgaccacacgctggaagaa

SEQ ID NO: 320352 - DNA, 75 bp, synthetic construct
  source 1..75: mol_type = other DNA
tggcgcgtggtgcaattgtgaactatggcgcaaaagaatttcattaccatgttcagaaggcgtgggaagcatttt

SEQ ID NO: 320353 - DNA, 75 bp, synthetic construct
  source 1..75: mol_type = other DNA
caaggtgttttatccacgattaaccgcctgccttactttttgcgctcgctgtttacttcacgctatgactacatc

SEQ ID NO: 320354 - DNA, 75 bp, synthetic construct
  source 1..75: mol_type = other DNA
ggcgcaaccaagaaagacttcgacaacaccgtcgctattcacccgacggcggcagaagagttcgttactatgcgt

SEQ ID NO: 320355 - DNA, 75 bp, synthetic construct
  source 1..75: mol_type = other DNA
atggcacaagtgatctttaatgaagagtggatggttgaatacggtctgacacttcgcactggtttgggtgcccga

SEQ ID NO: 320356 - DNA, 75 bp, synthetic construct
  source 1..75: mol_type = other DNA
tgaaattgcaccatcggccagactgagccggtctgaacgattgcaaatcacccgtatccgcgttgaccttgctca

SEQ ID NO: 320357 - DNA, 75 bp, synthetic construct
  source 1..75: mol_type = other DNA
tgaaatagcgccatcggccaggctgacccggtcggagcgtatgcaaattacccgtatccgtgttgaccttgctca

SEQ ID NO: 320358 - DNA, 75 bp, synthetic construct
  source 1..75: mol_type = other DNA
catgttgatggatgcgtggatctggcgtcaggccggtaaaccttacgataaagacgctgagtgggcgcggggggg

SEQ ID NO: 320359 - DNA, 75 bp, synthetic construct
  source 1..75: mol_type = other DNA
ctgaccgagaagctaaaagccagccagccgtcgaacatcgcgtcgcaggctgaagaaacgccaccgccacattat

SEQ ID NO: 320360 - DNA, 75 bp, synthetic construct
  source 1..75: mol_type = other DNA
cggaagatgagcgtgatgcccttctggctcaggtcagtgcccggacaggggaatgggaagaagacctgctgctgg

SEQ ID NO: 320361 - DNA, 75 bp, synthetic construct
  source 1..75: mol_type = other DNA
tggtgtgggtcggtaaggacgtgacaggcattgaaccccgtaacgccagtgttattgaggttcaggatattaccg

SEQ ID NO: 320362 - DNA, 75 bp, synthetic construct
  source 1..75: mol_type = other DNA
ccaaatgaataaatttaaaaattcaaaagcggagactgaagtctttactaacgcatttaatttatattgcataaa

SEQ ID NO: 320363 - DNA, 75 bp, synthetic construct
  source 1..75: mol_type = other DNA
aaaggcaatatggccacactcgccaggatggatttgacgcccacagcgtttagaattgtgctttatctcttctca

SEQ ID NO: 320364 - DNA, 75 bp, synthetic construct
  source 1..75: mol_type = other DNA
attcatttaacttttatcgtgcagggagtaaaacaaaatcagttaaaaactccagaagacgatatcctgcagacg

SEQ ID NO: 320365 - DNA, 75 bp, synthetic construct
  source 1..75: mol_type = other DNA
gaataatgagtctgcataatgagcgcattgcagatattgcactacatgaaaaggaagaaaagaaaccggaaattg

SEQ ID NO: 320366 - DNA, 75 bp, synthetic construct
  source 1..75: mol_type = other DNA
atgacacagggctggcgggaggataaatgcccgtctggccgcgcagggaaaaaaccgcgcgtcggtggcgctgaa

SEQ ID NO: 320367 - DNA, 75 bp, synthetic construct
  source 1..75: mol_type = other DNA
atgacacagggctggcgggaggataaatgcccgtctgcccgcgcggggaaaagaccgcgcgtcggtggcgctgaa

SEQ ID NO: 320368 - DNA, 75 bp, synthetic construct
  source 1..75: mol_type = other DNA
gcgaaatcgctgcaggcgatggatttcagtgtcatcactgataaaacctcatacaacgccattgaatggcccgtc

SEQ ID NO: 320369 - DNA, 75 bp, synthetic construct
  source 1..75: mol_type = other DNA
atatcagatgacaaaacaatatgatgtcacctggcttttttcggaagacgacaaaaactggtatgaagaacagaa

SEQ ID NO: 320370 - DNA, 75 bp, synthetic construct
  source 1..75: mol_type = other DNA
tgtcagaaatcacatcaccttccctgtgattattctctttttcttcctgctctgattctgactactgcagtgttg

SEQ ID NO: 320371 - DNA, 75 bp, synthetic construct
  source 1..75: mol_type = other DNA
atcaccactgtgctagataaccgtctgatgagtctgacgctggcggacaatcggggctttgaagcggaccagctt

SEQ ID NO: 320372 - DNA, 75 bp, synthetic construct
  source 1..75: mol_type = other DNA
attttcgtgaaacgctgaatccccgccgtgaaaaatcgtggcacaagaccaccgtcggggaagtggtgaaggaaa

SEQ ID NO: 320373 - DNA, 75 bp, synthetic construct
  source 1..75: mol_type = other DNA
aaggggcattcacggtggacgagattgaacacactggcgcaccggaccgcctgactatccgggcgcgaagtgctg

SEQ ID NO: 320374 - DNA, 75 bp, synthetic construct
  source 1..75: mol_type = other DNA
tcagttccgtattgctgaccgcgaggcgtatacgggggtgcgcgcctactggcttgatcttaattacgggaaaaa

SEQ ID NO: 320375 - DNA, 75 bp, synthetic construct
  source 1..75: mol_type = other DNA
attttcgtgaaacgctgaatatccgccgtgaaaagtcgtggcacaagaccaccgttggggaagtggtgaaggaaa

SEQ ID NO: 320376 - DNA, 75 bp, synthetic construct
  source 1..75: mol_type = other DNA
atctgttattcatccggcagggacagggtaaaagcgccagcggtaaaccactaccggtgatcactatcacacgta

SEQ ID NO: 320377 - DNA, 75 bp, synthetic construct
  source 1..75: mol_type = other DNA
atcccgcaggtcaccataacccgcagcgacggcgaccgccatcattttgcgattgctgaccgtggagcctacacc

SEQ ID NO: 320378 - DNA, 75 bp, synthetic construct
  source 1..75: mol_type = other DNA
taaggtgacacattttctgaataatagcggcttcacgacgtccttagagcttgaggtcaggctttctgatgtgga

SEQ ID NO: 320379 - DNA, 75 bp, synthetic construct
  source 1..75: mol_type = other DNA
acaaaggcaacaaaactccggcattcagcatcagcattgaaggcaaggatatcaccactgtgctggaaaaccgcc

SEQ ID NO: 320380 - DNA, 75 bp, synthetic construct
  source 1..75: mol_type = other DNA
caaaggcaaaaaaaaccaaagcccaaaaagagccggaagcgcgcgagggtgaatacatggccggtgaggccgata

SEQ ID NO: 320381 - DNA, 75 bp, synthetic construct
  source 1..75: mol_type = other DNA
gcgacggtgtcagtgaaagcggggaagttgctgtttctgaaagccggtagcgcgacgacggccagcggcaaacca

SEQ ID NO: 320382 - DNA, 75 bp, synthetic construct
  source 1..75: mol_type = other DNA
ggcactgggtaaagacctgtctgataaacccgtagagcatatagaccagactaatgagagtgacggcagttttct

SEQ ID NO: 320383 - DNA, 75 bp, synthetic construct
  source 1..75: mol_type = other DNA
cgagcacaccattgataacagcggctttaccacgcagcttgagcttgaagcaaaaatcccggaatggatagcgga

SEQ ID NO: 320384 - DNA, 75 bp, synthetic construct
  source 1..75: mol_type = other DNA
cgctggcgggcaatatgaatatcaatctggcttcagagcctatcggtcatgatcgtaaaggcgatccggtatatc

SEQ ID NO: 320385 - DNA, 75 bp, synthetic construct
  source 1..75: mol_type = other DNA
tgggcatcctgccgctggaatttccgcaaggcgtgacgcgtaaaacgttagggctaatcggggaagagaagattg

SEQ ID NO: 320386 - DNA, 75 bp, synthetic construct
  source 1..75: mol_type = other DNA
tcaagcggcaaccgtgggtcaaagcgtcgctggcaccaggctcgaaagtcgtttctgattatctggcaaaagcga

SEQ ID NO: 320387 - DNA, 75 bp, synthetic construct
  source 1..75: mol_type = other DNA
gcgataacctcgtgcaccaacacctctaacccaagtgtgctgatggccgcaggcttgctggcgaaaaaagccgta

SEQ ID NO: 320388 - DNA, 75 bp, synthetic construct
  source 1..75: mol_type = other DNA
tacatgcgtttaagcgggcgcagtgaagatcaggtcgagttggtcgaaaaatatgccaaagcgcagggcatgtgg

SEQ ID NO: 320389 - DNA, 75 bp, synthetic construct
  source 1..75: mol_type = other DNA
attcaccgctcgaatttaattggcatgggcatcctgccgctggaatttccgcaaggcgtgacgcgtaaaacgtta

SEQ ID NO: 320390 - DNA, 75 bp, synthetic construct
  source 1..75: mol_type = other DNA
caagggtgctgatgcaggactttaccggcgtacctgccgttgttgatctggcggcaatgcgcgaagcggttaaac

SEQ ID NO: 320391 - DNA, 75 bp, synthetic construct
  source 1..75: mol_type = other DNA
acaggattcaaaagcgacattgataaacagaactggattatagccaaggcggaacacaccatcgatggaagcgcg

SEQ ID NO: 320392 - DNA, 75 bp, synthetic construct
  source 1..75: mol_type = other DNA
cggagaagtagtgttacgaacctggcaggtggcacaccggatgaaagttcagcgcggcccgttaccggaagaaag

SEQ ID NO: 320393 - DNA, 75 bp, synthetic construct
  source 1..75: mol_type = other DNA
tggattgcttatccggatacgctcgtcggtactgactcgcacactactatgatcaacggtcttggcgtactgggg

SEQ ID NO: 320394 - DNA, 75 bp, synthetic construct
  source 1..75: mol_type = other DNA
tgtaccacctgtattggtaactctgggccactgcccgatcctatcgaaacggcaatcaaaaaaggcgatttaacc

SEQ ID NO: 320395 - DNA, 75 bp, synthetic construct
  source 1..75: mol_type = other DNA
gtccgcgtctgctcggtattcgtgtggttattgccgaatcgtttgaacgtattcaccgttcgaatctaattggta

SEQ ID NO: 320396 - DNA, 75 bp, synthetic construct
  source 1..75: mol_type = other DNA
tcgctctgctcgcccaggcgctggaaaatggccgcgatagccactgtttaaccttttgcggagatccgctgcaac

SEQ ID NO: 320397 - DNA, 75 bp, synthetic construct
  source 1..75: mol_type = other DNA
accttgcctgctgtattccagatggatgaaatccttcacgcactgcgcgaccatattgtcggtctgaactgcggt

SEQ ID NO: 320398 - DNA, 75 bp, synthetic construct
  source 1..75: mol_type = other DNA
acgaaatccttcacgcgctgcgcgaccatattgttggtctgaactgcggtcgctgggattacatcttcagctata

SEQ ID NO: 320399 - DNA, 75 bp, synthetic construct
  source 1..75: mol_type = other DNA
atggcggttttcaacgacatcctcggctcccgcaaaaatcagcttgaggtgatgcgcgaacaagacgcgccgatt

SEQ ID NO: 320400 - DNA, 75 bp, synthetic construct
  source 1..75: mol_type = other DNA
ggcgtgctacaacgcaacgccaacggcgaactggaagtgtcgaccaccggacatcagggttcgcatatttttagt

SEQ ID NO: 320401 - DNA, 75 bp, synthetic construct
  source 1..75: mol_type = other DNA
aaaatattcgtcgccgtggtgaagatatttctgcaggagctgttgtcttcccggcaggtactcgtctgaccaccg

SEQ ID NO: 320402 - DNA, 75 bp, synthetic construct
  source 1..75: mol_type = other DNA
ccagggtttgataactccgcaatggatggttacgcggtacgtttggccgatatcacctccggacaaccgctgccc

SEQ ID NO: 320403 - DNA, 75 bp, synthetic construct
  source 1..75: mol_type = other DNA
tgctcgcaatattaaccatggttcctttcatcattgtgattggtattatgatcgcaccagtattccagcagttaa

SEQ ID NO: 320404 - DNA, 75 bp, synthetic construct
  source 1..75: mol_type = other DNA
tggaaggggcagccgcttttcccgaaaggggcattcacggtggacgagattgaacacaccggcgcaccggatcgc

SEQ ID NO: 320405 - DNA, 75 bp, synthetic construct
  source 1..75: mol_type = other DNA
catcattttgcgattgctgaccgtggagcctataccggcgtaacggcaaagtggttacacaccaaagacccgaag

SEQ ID NO: 320406 - DNA, 75 bp, synthetic construct
  source 1..75: mol_type = other DNA
aacctgccataaacgcggcgcatttgcgatgggcggcatggcggcgtttattccgagcaaagatgaagagcgcaa

SEQ ID NO: 320407 - DNA, 75 bp, synthetic construct
  source 1..75: mol_type = other DNA
gctcccgtaaaaaccagcttaaggtgatgcgcgaacaagacgccccgattacagccgatcaactgctggcacctt

SEQ ID NO: 320408 - DNA, 75 bp, synthetic construct
  source 1..75: mol_type = other DNA
ggcagtggatccatcatcaaaaaacgttgagcaatggcaaaccggttaccaaagccttgttccgccagatgctgg

SEQ ID NO: 320409 - DNA, 75 bp, synthetic construct
  source 1..75: mol_type = other DNA
actaagaagcagaagaaagagccagaagcgaagcagggcgattacctggtgggtacggatgaaaacgttctggta

SEQ ID NO: 320410 - DNA, 75 bp, synthetic construct
  source 1..75: mol_type = other DNA
cagcatcagtattgagggcagggatatcaccactgtcttggataatcgcctgatgagtctgacgctgacggacaa

SEQ ID NO: 320411 - DNA, 75 bp, synthetic construct
  source 1..75: mol_type = other DNA
aactgttgtttctcaaagcggggcagggggtgacggccagcggtaaaaaaatcccgcagattaccatcacccgca

SEQ ID NO: 320412 - DNA, 75 bp, synthetic construct
  source 1..75: mol_type = other DNA
gtacacgccggacagtaatgtcatcaccgacatacgttcggactgttttggtgagccgctgacgtatcaacttga

SEQ ID NO: 320413 - DNA, 75 bp, synthetic construct
  source 1..75: mol_type = other DNA
accttttgtggcgaaccgctgcaacaggcacaagtgctttacgcactatggcttggtgcgaatctgcaggccaaa

SEQ ID NO: 320414 - DNA, 75 bp, synthetic construct
  source 1..75: mol_type = other DNA
gcgacggcgatcgccatcattttgcgattgctgaccgtggagcctacaccggtgtaacggcaaaatggctacaca

SEQ ID NO: 320415 - DNA, 75 bp, synthetic construct
  source 1..75: mol_type = other DNA
acaaaggcaacaaaactcccgcattcagcatcagtattgagggcagggatatcaccactgtcttggataatcgcc

SEQ ID NO: 320416 - DNA, 75 bp, synthetic construct
  source 1..75: mol_type = other DNA
aaacccgtggatcatatagaccagactaatgagagtgacggcagttttttgatgcggctggcgcgccagtacggt

SEQ ID NO: 320417 - DNA, 75 bp, synthetic construct
  source 1..75: mol_type = other DNA
cagtatcagtattgagggcagggatatcaccactgtgctggataaccgtctgatgagtctgacgctgacggacaa

SEQ ID NO: 320418 - DNA, 75 bp, synthetic construct
  source 1..75: mol_type = other DNA
tgggcctctctgctgggtgactcgctaatcgtggctatcactgattgtgccgatgatcagattgccttgccgctc

SEQ ID NO: 320419 - DNA, 75 bp, synthetic construct
  source 1..75: mol_type = other DNA
acgctgaaaaagaactgaaattaaactcagtctttcacagcgcgctgggatgggcctctctgctgggtgactcgc

SEQ ID NO: 320420 - DNA, 75 bp, synthetic construct
  source 1..75: mol_type = other DNA
cccgcgaacctgcgaagaaagaaagcgccacggtgaagcgtaagcgcagaactaagaagcagaagaaagagtcag

SEQ ID NO: 320421 - DNA, 75 bp, synthetic construct
  source 1..75: mol_type = other DNA
tagccgcgcggcacaagctgaaggtggcactgggtaaagacctgtcggataagcccgtggaacatatagaccaga

SEQ ID NO: 320422 - DNA, 75 bp, synthetic construct
  source 1..75: mol_type = other DNA
ttcggattcagtttgtcgctgatcctgctgccgttagtactggttgggctgaaaaccattgctgcacgttttgtg

SEQ ID NO: 320423 - DNA, 75 bp, synthetic construct
  source 1..75: mol_type = other DNA
cggtcacgcgctgcaaccggcggggatcattctgctggtgattggtgcaggcggcgtgttcaaacaggtgctggt

SEQ ID NO: 320424 - DNA, 75 bp, synthetic construct
  source 1..75: mol_type = other DNA
atgcataaaataccctttgatgttcttattcattctgaaaacgcattaattaaagcgcgcgaaatgaatgtgttg

SEQ ID NO: 320425 - DNA, 75 bp, synthetic construct
  source 1..75: mol_type = other DNA
atgccagtggtttaaatcaaaccttgcagcactacagtactgaacataactctattgctgagacttttaatttgt

SEQ ID NO: 320426 - DNA, 75 bp, synthetic construct
  source 1..75: mol_type = other DNA
gtgcgcatcattcagggttctgcaaccgttgcctgtttaacggcggtgggactggtgatgccggttattgaacaa

SEQ ID NO: 320427 - DNA, 75 bp, synthetic construct
  source 1..75: mol_type = other DNA
gcggcggcaatagcaaacttaaagataaaaacaggtcaattgaagcagttatgcaagaagttaataaccacgaag

SEQ ID NO: 320428 - DNA, 75 bp, synthetic construct
  source 1..75: mol_type = other DNA
tgggtggtggatatggatctggagaagttctttgaccgggtagatcacagactcctgatgacgcgtctggccaga

SEQ ID NO: 320429 - DNA, 75 bp, synthetic construct
  source 1..75: mol_type = other DNA
atatgaatcaggcgataaagaggtcgtggttcagaggactgggcttaatatcactgctggaacatcacaggcagt

SEQ ID NO: 320430 - DNA, 75 bp, synthetic construct
  source 1..75: mol_type = other DNA
atgcataaaatcccttttgaagtattaatccactctgaaaacgcattaattaaagcgcgcgaaatgaatgcgttg

SEQ ID NO: 320431 - DNA, 75 bp, synthetic construct
  source 1..75: mol_type = other DNA
tgtctcttgcggaaaagatagatcactttgtcttgtctgaatctatcttttacagagggatcaaagaactcatcg

SEQ ID NO: 320432 - DNA, 75 bp, synthetic construct
  source 1..75: mol_type = other DNA
cgatagagacagtacaattgaggaagttatagaaaaagttagtaaccaagaagatatagatgtgttaatcgcaag

SEQ ID NO: 320433 - DNA, 75 bp, synthetic construct
  source 1..75: mol_type = other DNA
agccgtgagttccgcgttcgcgcagctgatgcacaaacaacattacgtagcgggttaggtggtgtactgatgggc

SEQ ID NO: 320434 - DNA, 75 bp, synthetic construct
  source 1..75: mol_type = other DNA
gattgacgccatcatgtcatcgctttccattacggaaaaacgtcagcaagaaatagccttcaccgacaaactgta

SEQ ID NO: 320435 - DNA, 75 bp, synthetic construct
  source 1..75: mol_type = other DNA
cacccaggagacatttggtaacgaacactgggcgccaaaaggcattgaaatcgtctcttatcaggggcaggacaa

SEQ ID NO: 320436 - DNA, 75 bp, synthetic construct
  source 1..75: mol_type = other DNA
cagggcaccacccaggagacgttcggtaacgaacactgggcaccaaaaggcattgaaatcgtctcgtatcagggg

SEQ ID NO: 320437 - DNA, 75 bp, synthetic construct
  source 1..75: mol_type = other DNA
atcactctggcacggggtcgtgccgacctgtatcccgaaatgcacggcagggtaacaggttttaaaagcgaggtg

SEQ ID NO: 320438 - DNA, 75 bp, synthetic construct
  source 1..75: mol_type = other DNA
acctgtcggataaacccgtggagcatatagaccagaccaatgagagtgacggcagttttctgatgcggctggcgc

SEQ ID NO: 320439 - DNA, 75 bp, synthetic construct
  source 1..75: mol_type = other DNA
cgacgcgtacacgggcgtaactgcatactggcttgatctcaactttggcaagaaaccatccactaccgtcaagaa

SEQ ID NO: 320440 - DNA, 75 bp, synthetic construct
  source 1..75: mol_type = other DNA
aataatgctatacgcaacccgcggaataatgattaatctgcccgttgagcaggctgtggatatattcggagaaat

SEQ ID NO: 320441 - DNA, 75 bp, synthetic construct
  source 1..75: mol_type = other DNA
agcagaactctggcgagtagacagactgggggatatgccagatgtcactttcgaagaagcctgcctgagatggct

SEQ ID NO: 320442 - DNA, 75 bp, synthetic construct
  source 1..75: mol_type = other DNA
gctgggaattgttctggcgggtggatgtgccaccgggacctggtatcgcgcgggggagggattgatcggcagttg

SEQ ID NO: 320443 - DNA, 75 bp, synthetic construct
  source 1..75: mol_type = other DNA
ctctggttcttgcattctccagcgttacggcggcctttgcggctattccgcaaaatattcgcatcggtactgacc

SEQ ID NO: 320444 - DNA, 75 bp, synthetic construct
  source 1..75: mol_type = other DNA
cgcagcggttaagcgccatcgtggataaagacttctcagactccagctacggcttcaggccgggccgcagcgcgt

SEQ ID NO: 320445 - DNA, 75 bp, synthetic construct
  source 1..75: mol_type = other DNA
cggcagaaattgcagaggcgctggcggtaacggattaccaggcccgctattacctgttattactggaaaaagcag

SEQ ID NO: 320446 - DNA, 75 bp, synthetic construct
  source 1..75: mol_type = other DNA
atgaagaatgaaatactggaatttctgaacaggcatgatggagggaaaacggcagaaattgcggaggcgctggcg

SEQ ID NO: 320447 - DNA, 75 bp, synthetic construct
  source 1..75: mol_type = other DNA
gttcagcgctcaccattaagacggggcatggcaacatactggtttctgaaaggagaaaagcaggtgggacaaaac

SEQ ID NO: 320448 - DNA, 75 bp, synthetic construct
  source 1..75: mol_type = other DNA
tgtggttcagcgctctcccttaagccgaggcatggcaacatactggtttctgaaaggagagaggcaggcgggcca

SEQ ID NO: 320449 - DNA, 75 bp, synthetic construct
  source 1..75: mol_type = other DNA
tgtggttcagcgctctcccttaagtcgaggcatggcaacatactggattctgaaaggagagaggcaggcggggca

SEQ ID NO: 320450 - DNA, 75 bp, synthetic construct
  source 1..75: mol_type = other DNA
cgcagaaattgcggaggcgctggcggtaacggattaccaggcacgctattacctgttattactggaaaaagaagg

SEQ ID NO: 320451 - DNA, 75 bp, synthetic construct
  source 1..75: mol_type = other DNA
ctcggggataaatccgcatttgatagcttagtggaaaaaaataaattaggtgttttgattaatttagggataact

SEQ ID NO: 320452 - DNA, 75 bp, synthetic construct
  source 1..75: mol_type = other DNA
tagagggtgaaaaaatatgttctttaatcagtaaatattacccagagttttgggatttcgaatccattaattatg

SEQ ID NO: 320453 - DNA, 75 bp, synthetic construct
  source 1..75: mol_type = other DNA
gtggagcgaattgcagggcggtgagtggattgcttacccggatacgcttgtcggcaccgactcgcacaccacgat

SEQ ID NO: 320454 - DNA, 75 bp, synthetic construct
  source 1..75: mol_type = other DNA
ccgacacgctgatgctgtgtgcctcctgggtcgcccagacggatctttcggagttctttaagaaatggaatccgg

SEQ ID NO: 320455 - DNA, 75 bp, synthetic construct
  source 1..75: mol_type = other DNA
caagaaattcaatcgcaaaagaaagaataaccatgatatgtcagactatatatctcgtctctatgaggaatcgtc

SEQ ID NO: 320456 - DNA, 75 bp, synthetic construct
  source 1..75: mol_type = other DNA
ataataaaaagagatgatacacttgatgaagaaatatatattggcgttgtctgtaaagtcggaaaaatcacccaa

SEQ ID NO: 320457 - DNA, 75 bp, synthetic construct
  source 1..75: mol_type = other DNA
tgtggttcagcgctctcccttaaggcgaggcatggcaacatactggattctgaaaggagagaggcaggcgggtca

SEQ ID NO: 320458 - DNA, 75 bp, synthetic construct
  source 1..75: mol_type = other DNA
ctgcaacatctacctaagcagccggaaagcgggcgagcatctgctgaagaacatcagggcgttcgtggagaacaa

SEQ ID NO: 320459 - DNA, 75 bp, synthetic construct
  source 1..75: mol_type = other DNA
acactgttaattactgtatttgtcaacaataaggaaaattccgagtttcatgaatggataaactcacactgtgaa

SEQ ID NO: 320460 - DNA, 75 bp, synthetic construct
  source 1..75: mol_type = other DNA
cttgctcgatccgattatcgaagtgcgtccggtagcgacccaggtcgatgatcttctttcggagattcgcctgcg

SEQ ID NO: 320461 - DNA, 75 bp, synthetic construct
  source 1..75: mol_type = other DNA
ggatcaaacggaaactgcggtgcctgttgtggcggcagtggaagaggccgggaacccggacgaagaacctgcaac

SEQ ID NO: 320462 - DNA, 75 bp, synthetic construct
  source 1..75: mol_type = other DNA
ataacgagagaaaaccagatgctggcttatcagcgcgtggtggaaaacaaaggcgcggcgggggtggataacctc

SEQ ID NO: 320463 - DNA, 75 bp, synthetic construct
  source 1..75: mol_type = other DNA
gtgaaagcgacaatcaatgccctgatgccagtgctgcgtggatggataagctacttcaggctgacggaagtcaga

SEQ ID NO: 320464 - DNA, 75 bp, synthetic construct
  source 1..75: mol_type = other DNA
cggaagatctcacggaatatctcgaagaacacggcgagcgcgtgcgttatcttcactcagatatcgacaccgtcg

SEQ ID NO: 320465 - DNA, 75 bp, synthetic construct
  source 1..75: mol_type = other DNA
aggcgaggcatggcaacatactggcttctgaaaggagagaagcaggcgggacaaaactgttcttccacaacttaa

SEQ ID NO: 320466 - DNA, 75 bp, synthetic construct
  source 1..75: mol_type = other DNA
tcgctgacgatattactgtcgcgccggaatatctggaggagagcaacggtcaggcatgggcgcgcggcggtgcgg

SEQ ID NO: 320467 - DNA, 75 bp, synthetic construct
  source 1..75: mol_type = other DNA
cggccagtggcgacacaggttgatgatcttctttcggagattcgtcagcgagcggcaattaacgaacgcgtactg

SEQ ID NO: 320468 - DNA, 75 bp, synthetic construct
  source 1..75: mol_type = other DNA
agcggctgacccagcgtacccagtttgatctggagatgatgaacgagctgggctactgttcggggattgagaact

SEQ ID NO: 320469 - DNA, 75 bp, synthetic construct
  source 1..75: mol_type = other DNA
cgatggaggagatcaaagaagagctggccgccagacgcaaagtgctgttggaaaacaacaaactgctggaagagc

SEQ ID NO: 320470 - DNA, 75 bp, synthetic construct
  source 1..75: mol_type = other DNA
aatagctcttacaggatgcacaccaaagaccagcctggaacgacatacccggcattatgtttatgcttcagatga

SEQ ID NO: 320471 - DNA, 75 bp, synthetic construct
  source 1..75: mol_type = other DNA
ttcaaagaggaattcgtattaatggtgatagtctcacccaatattgtagtgaaaacgccaggagtgcttcagcgt

SEQ ID NO: 320472 - DNA, 75 bp, synthetic construct
  source 1..75: mol_type = other DNA
atatgtatcttatcgccctgataactgtggcagcagccctcacagcctgtaccccaaaaaccagcctggaacaac

SEQ ID NO: 320473 - DNA, 75 bp, synthetic construct
  source 1..75: mol_type = other DNA
ggcagaaggcgttgaattaattgaaatcgcgccgggcgtggagattgaccgcgacattctgccgttcatggcttt

SEQ ID NO: 320474 - DNA, 75 bp, synthetic construct
  source 1..75: mol_type = other DNA
atgcgtaagataacaaccgccgggacactggcggagcaaattcaggacggtgcggttattgctattagcggtaac

SEQ ID NO: 320475 - DNA, 75 bp, synthetic construct
  source 1..75: mol_type = other DNA
atctgtatcttatatccctgataactgtggctgcagccctcacggcctgtaccccgaaaggcagtgtggaacaat

SEQ ID NO: 320476 - DNA, 75 bp, synthetic construct
  source 1..75: mol_type = other DNA
ctctttatgatggtcaccctgccagggcgataaaccatcatctccccctgcgcgcaggaactggcctcaaacccc

SEQ ID NO: 320477 - DNA, 75 bp, synthetic construct
  source 1..75: mol_type = other DNA
ccacgatcattgaatgggacagcaatattcccgcattttcagtactgatggaggaggttaagcgtgcagactatc

SEQ ID NO: 320478 - DNA, 75 bp, synthetic construct
  source 1..75: mol_type = other DNA
caaaagcactggtctgggcatcatatctggatgtgcgtcgcaacaaggaagcccccggatgcgacgggcagactt

SEQ ID NO: 320479 - DNA, 75 bp, synthetic construct
  source 1..75: mol_type = other DNA
atctgtatcttatatccctgataactgtggttgcagccctcacggcctgtaccccgaaaggcagtgtggaacaac

SEQ ID NO: 320480 - DNA, 75 bp, synthetic construct
  source 1..75: mol_type = other DNA
cggttttgatcctaacttttccacccagaaggccgacacaacacgaatgatggtgcctttttttcggcagttctg

SEQ ID NO: 320481 - DNA, 75 bp, synthetic construct
  source 1..75: mol_type = other DNA
gaataccgcacatctgcagcgggtggcggccctggttgaccgctatcagccgcattcattttcagagcatctggc

SEQ ID NO: 320482 - DNA, 75 bp, synthetic construct
  source 1..75: mol_type = other DNA
cttcctcgaaattgcgcaaaacgcccgtaaagtggtgttctgcggtacgtttgacgccaaaggcagcaagattga

SEQ ID NO: 320483 - DNA, 75 bp, synthetic construct
  source 1..75: mol_type = other DNA
taacgacgctattgaactggttagtcatccggtacgtcgcctgattgcccgtcgggcagcacgcgaactggtagc

SEQ ID NO: 320484 - DNA, 75 bp, synthetic construct
  source 1..75: mol_type = other DNA
ctggatcaattcgagttctacagcggcggcggcatcgacattacgttcctcggcatgggcgagatggatcaacat

SEQ ID NO: 320485 - DNA, 75 bp, synthetic construct
  source 1..75: mol_type = other DNA
ccgaacgcgcggtttttcagttaacgacagaaggtgttgaattaattgagattgccccgggcgtggagattgacc

SEQ ID NO: 320486 - DNA, 75 bp, synthetic construct
  source 1..75: mol_type = other DNA
aaagagccagtcagttgcttaactgactggcattactcaaagggggggtatttttctttgagccaggttaatgtg

SEQ ID NO: 320487 - DNA, 75 bp, synthetic construct
  source 1..75: mol_type = other DNA
agcaatatcaacttcggcgtgcagtgggcgtcgaaagatgccggattaatgcagtttgctaacggtacgcagatc

SEQ ID NO: 320488 - DNA, 75 bp, synthetic construct
  source 1..75: mol_type = other DNA
gcggcgagaaccagcctgcgacgctgaaatctcaaattgtcgccgacgaacgcaccaacagtgtgattgtcagtg

SEQ ID NO: 320489 - DNA, 75 bp, synthetic construct
  source 1..75: mol_type = other DNA
ttttagcgccgcctacgcacagcaaagcggtcaggaagtgttgtatatcactgaacgtgcagtattccagttaac

SEQ ID NO: 320490 - DNA, 75 bp, synthetic construct
  source 1..75: mol_type = other DNA
ggcggcggtatggtggaagccgaccatattctggctgctattgaagcgcgtttcctgcaaaccggacacccgcgc

SEQ ID NO: 320491 - DNA, 75 bp, synthetic construct
  source 1..75: mol_type = other DNA
gcccagtcagctcaaatccctaaactggtcacccaggtggaaaaaattacctttagcgccgcgtacgcacagcaa

SEQ ID NO: 320492 - DNA, 75 bp, synthetic construct
  source 1..75: mol_type = other DNA
atgacgcgtttttcggctgcgcccgtaacgctgacgcgattatcccttcgctggatcaattcgagttctacagcg

SEQ ID NO: 320493 - DNA, 75 bp, synthetic construct
  source 1..75: mol_type = other DNA
ccggtgcgccgtctgattgcccgtcgggcggcacgcgaactggtggctggcgcttctaccaactttggctttggt

SEQ ID NO: 320494 - DNA, 75 bp, synthetic construct
  source 1..75: mol_type = other DNA
cgcggcacttatgccgatccgcgtggcaacgttagcctcgaagaagaagcgattgatatggatagctattcgatg

SEQ ID NO: 320495 - DNA, 75 bp, synthetic construct
  source 1..75: mol_type = other DNA
cacgaatgagtgatgcaacaaggctgaagaacaggttatcggagcgcttctcggaagtcgggctggtcctgaatg

SEQ ID NO: 320496 - DNA, 75 bp, synthetic construct
  source 1..75: mol_type = other DNA
tctgtcgctttgctggccatctttcgcacttctacagggtcgcccaacatgcggttctttgcagccagctagtgc

SEQ ID NO: 320497 - DNA, 75 bp, synthetic construct
  source 1..75: mol_type = other DNA
gattgcactggtcacctatatggtgatgagcgcgatcatgcgttcaccgcacgcggctgggcttaacaaattcct

SEQ ID NO: 320498 - DNA, 75 bp, synthetic construct
  source 1..75: mol_type = other DNA
aatgcatgatgcaacagaagcgtattgccaggacatcccggcgccactgaaacgccttcttcctgactataaacg

SEQ ID NO: 320499 - DNA, 75 bp, synthetic construct
  source 1..75: mol_type = other DNA
tctgtcgctttgcgggccatctttcgcacttctacagggtcgcccaacatgcggtactttgcagccagctcgtgc

SEQ ID NO: 320500 - DNA, 75 bp, synthetic construct
  source 1..75: mol_type = other DNA
tctgtcgctttgccggccatctttcgcacttctacagggtcgcccaacatgcggtactttgcagccagctggtgc

SEQ ID NO: 320501 - DNA, 75 bp, synthetic construct
  source 1..75: mol_type = other DNA
tctgtcgctttgctggccatctttcgcacttctacagggtcgcccaacatgcggtgctttgcagccagcttgtgc

SEQ ID NO: 320502 - DNA, 75 bp, synthetic construct
  source 1..75: mol_type = other DNA
tcggcaaaaacctacgagggtttgaaaatcgccaaagagaaaggcattgagttcgagcagattagcttaatggtt

SEQ ID NO: 320503 - DNA, 75 bp, synthetic construct
  source 1..75: mol_type = other DNA
ggaagcatttttattatgacaggataaataaagacaacatcgatattaacgatatcgcggtttccctttcaaata

SEQ ID NO: 320504 - DNA, 75 bp, synthetic construct
  source 1..75: mol_type = other DNA
gaacgccgagatctcgggctagatgatggctctttctggcctgtgctagaaggtatcccggtaacagagatgttc

SEQ ID NO: 320505 - DNA, 75 bp, synthetic construct
  source 1..75: mol_type = other DNA
tgccaggacatccccgcaccactgaaacgccttcttcctgactataaacggatggaagaaaaaatagacgcagta

SEQ ID NO: 320506 - DNA, 75 bp, synthetic construct
  source 1..75: mol_type = other DNA
ttacgcgcgcatcgggcggttttgccatgctggcagtcgatcagcgcgaagccatgcgcatgatgtttgccgcgg

SEQ ID NO: 320507 - DNA, 75 bp, synthetic construct
  source 1..75: mol_type = other DNA
gcaattctgctaccgccaggtggttgagcaaaacgcaattgccaaaagctgcgccatgatcgtcgctgccgatga

SEQ ID NO: 320508 - DNA, 75 bp, synthetic construct
  source 1..75: mol_type = other DNA
acagcgtcgcccaacatgcggtgctttgcagccagctggtaccgcaggaatttgcttttgaagcgttaatgcatg

SEQ ID NO: 320509 - DNA, 75 bp, synthetic construct
  source 1..75: mol_type = other DNA
gtaacgctggcccatgtgatcgctgaatgccggaaggttaagcgtcagcgtggtgttgtcggccttgtggcgatc

SEQ ID NO: 320510 - DNA, 75 bp, synthetic construct
  source 1..75: mol_type = other DNA
tgatggcattgtggtttctaaccacggtggccgccagctggatggcgtgctttcttctgcccgtgcactgcccgc

SEQ ID NO: 320511 - DNA, 75 bp, synthetic construct
  source 1..75: mol_type = other DNA
tagcgaaattacgcaagattcgctggtgcaagggctggataaagaattgcctgcggcactagctccgatggcgaa

SEQ ID NO: 320512 - DNA, 75 bp, synthetic construct
  source 1..75: mol_type = other DNA
caaaagcactggtctgggcatcatatctggatgtgcgtcgcaacaagggagcccccggatgcgacggacagactt

SEQ ID NO: 320513 - DNA, 75 bp, synthetic construct
  source 1..75: mol_type = other DNA
ctcggttggcctggtggcaattgactatttgacgctgatgaagaccgaatcggcagagcgtagggatattgcgta

SEQ ID NO: 320514 - DNA, 75 bp, synthetic construct
  source 1..75: mol_type = other DNA
gcaacaggaacagcatacgccctgatggataacggttcagtgactgatgtcagcgcagaggatgctgccagacgt

SEQ ID NO: 320515 - DNA, 75 bp, synthetic construct
  source 1..75: mol_type = other DNA
tggcggcagacggcgtgtcgcagcgcaaatataactatatgcgcgccgaacagatctatcgcgatgagcaaggct

SEQ ID NO: 320516 - DNA, 75 bp, synthetic construct
  source 1..75: mol_type = other DNA
actgccagctttaaagatacagatttgaaatcattcatcgaaaccgtcggtgctaatcttaataaaaccatcgtg

SEQ ID NO: 320517 - DNA, 75 bp, synthetic construct
  source 1..75: mol_type = other DNA
tctgtcgctttgcaggacatctttcacacttctacagcgtcgcccaacatgcggtgctttgcagccagctggtgc

SEQ ID NO: 320518 - DNA, 75 bp, synthetic construct
  source 1..75: mol_type = other DNA
aggcggtgacacatccgcaatgggcgtgggatgtgggcctgaacggtcgtccgcatgatttaggtaatatctcag

SEQ ID NO: 320519 - DNA, 75 bp, synthetic construct
  source 1..75: mol_type = other DNA
ccgcatgatttaggtaatatctcggcttacctcggcaaaccaaccggactggaagattacatcggctggctgggg

SEQ ID NO: 320520 - DNA, 75 bp, synthetic construct
  source 1..75: mol_type = other DNA
ttccagctttatgtgctgcgcgatcgcggctttatgcgtaacgcgctggagcgagcaaaagcagcgggttgttcg

SEQ ID NO: 320521 - DNA, 75 bp, synthetic construct
  source 1..75: mol_type = other DNA
catctcctactggttggttaacaacaggtaataacggtgagtcaataacgacagctcagttagttactttgttgc

SEQ ID NO: 320522 - DNA, 75 bp, synthetic construct
  source 1..75: mol_type = other DNA
ttatggttctgttggcctgggtactgcaaatgctcttggtggtaactctatcgtccttggcgataatgatactgg

SEQ ID NO: 320523 - DNA, 75 bp, synthetic construct
  source 1..75: mol_type = other DNA
acgggcaaccagaacacaaccggaaacgcggcgtctgcaacgaaattacaaacggcaagaactattggtggtgtt

SEQ ID NO: 320524 - DNA, 75 bp, synthetic construct
  source 1..75: mol_type = other DNA
cactcaaggggcaaccatttagttataagggaacaggtggtgccatttttgttagcatgttacttattatggtcg

SEQ ID NO: 320525 - DNA, 75 bp, synthetic construct
  source 1..75: mol_type = other DNA
tttatgatgcagatatcagtggcgcatcgacattaatcctccactttaatatgaatgcggggagttgccctgctg

SEQ ID NO: 320526 - DNA, 75 bp, synthetic construct
  source 1..75: mol_type = other DNA
ggatagtggtgcatataacgccctgattggcggtgcatctgcattaattcttcactttaatataaatgctggtag

SEQ ID NO: 320527 - DNA, 75 bp, synthetic construct
  source 1..75: mol_type = other DNA
ccgctggatcattgcagaaaaaccagaacggcgcagatattccaaacaaagataaatttacgcaaacaataggtg

SEQ ID NO: 320528 - DNA, 75 bp, synthetic construct
  source 1..75: mol_type = other DNA
ttacttatataaaccatggtgcagattacgccccaggctggcggcgcgactacagcacaaaaaaccagcaacctg

SEQ ID NO: 320529 - DNA, 75 bp, synthetic construct
  source 1..75: mol_type = other DNA
acaggtgcagggaactggacaacggcacaattgattgaatggctggattctcaaggggcattcaatcacccatac

SEQ ID NO: 320530 - DNA, 75 bp, synthetic construct
  source 1..75: mol_type = other DNA
caagttgcagacagcatgtactatcaacggtgtctcgtttgatggttctaaaaatattgagctaacggctgaaaa

SEQ ID NO: 320531 - DNA, 75 bp, synthetic construct
  source 1..75: mol_type = other DNA
ctcgaacaatcaacggggtgggatttgatggttctaaaaacattgagctaacggcggaagatttaaatcttgaac

SEQ ID NO: 320532 - DNA, 75 bp, synthetic construct
  source 1..75: mol_type = other DNA
aaaccagcagtctgcatttgctttagggcaaacaggaagcactgtcggaaatgataaagctgttggctggaactg

SEQ ID NO: 320533 - DNA, 75 bp, synthetic construct
  source 1..75: mol_type = other DNA
tggggcagtctgaggcaggtggtgagcttatattgcaatattacccacagattatggcttcctacttcctgtatt

SEQ ID NO: 320534 - DNA, 75 bp, synthetic construct
  source 1..75: mol_type = other DNA
gcagggtgacccataatctcggtgggaatggcttcacaacggctgtagagcttgaggtgatgctttcggatgtag

SEQ ID NO: 320535 - DNA, 75 bp, synthetic construct
  source 1..75: mol_type = other DNA
aattaaggggatcgtcagcgctggcggtgattctggttcatgggggagttatggaactcaaactgctgctggagc

SEQ ID NO: 320536 - DNA, 75 bp, synthetic construct
  source 1..75: mol_type = other DNA
gcatgaataaccagatcgcagcgggtcaggaagggcaggtgcgcgaatacgccagggtgatgaaggacaccaaat

SEQ ID NO: 320537 - DNA, 75 bp, synthetic construct
  source 1..75: mol_type = other DNA
gctgggccgctcgctggatgttgatgccaataccaacggtcaggtagtgatccgtgatagcgccatcaacgaagg

SEQ ID NO: 320538 - DNA, 75 bp, synthetic construct
  source 1..75: mol_type = other DNA
gcttccggcggcctttttaccgggcgacagtttactggtattggtcggcgtgttgattgcgaaaggcgcgatggg

SEQ ID NO: 320539 - DNA, 75 bp, synthetic construct
  source 1..75: mol_type = other DNA
ccgcccggaataaattaacggccagcgtcgcggattctcttgccgggataaaaattccgcatatcgaccagtcgc

SEQ ID NO: 320540 - DNA, 75 bp, synthetic construct
  source 1..75: mol_type = other DNA
gaagaaaaaaacggtgaagacgccggaagccagggagggtgaatacatggtcggtgaggatgacaacgtgtttgc

SEQ ID NO: 320541 - DNA, 75 bp, synthetic construct
  source 1..75: mol_type = other DNA
attccgcaaatgacgttgacccgtagcgacggtgaccgtcatcagtttgctatcgctgaccgtggggcttatacc

SEQ ID NO: 320542 - DNA, 75 bp, synthetic construct
  source 1..75: mol_type = other DNA
aggctttaagcgcgtcatagacgagcagtcttggttaatcagtaaggtaactcacaatctgaataataatggatt

SEQ ID NO: 320543 - DNA, 75 bp, synthetic construct
  source 1..75: mol_type = other DNA
aagcccgtggagcatatagaccagactaatgagagtgacggcagttttctgatgcgactggcgcgacagtacggt

SEQ ID NO: 320544 - DNA, 75 bp, synthetic construct
  source 1..75: mol_type = other DNA
attttcgggaaacgctgaatacccgccgtgaaaaatcgtggcacaagaccacagttggggaagtggtgaaggaaa

SEQ ID NO: 320545 - DNA, 75 bp, synthetic construct
  source 1..75: mol_type = other DNA
aaataaagaaaggaaatatctctcgttgttttttgttatacaaatagtatttcttgcaaaatcatcaatggccat

SEQ ID NO: 320546 - DNA, 75 bp, synthetic construct
  source 1..75: mol_type = other DNA
gtggtgcatcgacattaatcctccactttaatatgaatgcggggagttgccctgctgtacagttccgcgtgaatt

SEQ ID NO: 320547 - DNA, 75 bp, synthetic construct
  source 1..75: mol_type = other DNA
gcgtagtagcgagactccttacatcaaacataggagcctttcacatggctgtatccgcacgcccttactttgtct

SEQ ID NO: 320548 - DNA, 75 bp, synthetic construct
  source 1..75: mol_type = other DNA
gcagcaacagaaggcgaagcacgcgcccagctgccgcacgcacatcttatttttgtcgcccgtattcgccagggg

SEQ ID NO: 320549 - DNA, 75 bp, synthetic construct
  source 1..75: mol_type = other DNA
gctgccactgagcgcgaagcacgcgcccagctgccgcacgcacatcttatttttgtcgcccgtatccgtcaggag

SEQ ID NO: 320550 - DNA, 75 bp, synthetic construct
  source 1..75: mol_type = other DNA
taaaaaaaggacagctaggtgttttccttttcgttttaacaccaatattatttacagcagttcctatggctatga

SEQ ID NO: 320551 - DNA, 75 bp, synthetic construct
  source 1..75: mol_type = other DNA
ctgatgctgtgtaaaacgtcgcggttgctggcgtggccgtggagtttgctgttcggtatcaatcggtgccatcgt

SEQ ID NO: 320552 - DNA, 75 bp, synthetic construct
  source 1..75: mol_type = other DNA
taacgctgggaaccgggacaaactgcgaaccgccacaatggttgtggcaacggcaaggagatacaaatgaagcaa

SEQ ID NO: 320553 - DNA, 75 bp, synthetic construct
  source 1..75: mol_type = other DNA
aaaactctctgaaggcatccgcctgttcgccgttgatcaacgcaaactggaagatcttcttgccgtcaaactata

SEQ ID NO: 320554 - DNA, 75 bp, synthetic construct
  source 1..75: mol_type = other DNA
ttctcaaaatcgtacccggtcgcgtgtcaacagaagttgatgcacgcctctcttttgataaagaaaagagtattg

SEQ ID NO: 320555 - DNA, 75 bp, synthetic construct
  source 1..75: mol_type = other DNA
acgactactataaacagcaccgctacgaaaccattgtgatgggtgcgagcttccgccgtaccgagcaaatccttg

SEQ ID NO: 320556 - DNA, 75 bp, synthetic construct
  source 1..75: mol_type = other DNA
gaggattcattttatcaaattatatcatcaattatatcggaaggtttagattggaatgatgataaagtcgtttct

SEQ ID NO: 320557 - DNA, 75 bp, synthetic construct
  source 1..75: mol_type = other DNA
tatgaacacctggcaaaatggcttatttatttcggtagtttatttgaagtaaaaggaaccaactttgagaaaaaa

SEQ ID NO: 320558 - DNA, 75 bp, synthetic construct
  source 1..75: mol_type = other DNA
tcttttgataaagaaaagagtattgagaaagcgcgtcatctggtggatttgtaccagcagcagggcgttgagaaa

SEQ ID NO: 320559 - DNA, 75 bp, synthetic construct
  source 1..75: mol_type = other DNA
tacaaaaagcatggtcattagctcaggaagccggtttagaggtaaaagctggcaatgtatttagcggcgacattt

SEQ ID NO: 320560 - DNA, 75 bp, synthetic construct
  source 1..75: mol_type = other DNA
tgatggcctgctgcatgtggcggaatgcaatccaggctctaacgtaacgtttcttccgttagcgcggtttaagcg

SEQ ID NO: 320561 - DNA, 75 bp, synthetic construct
  source 1..75: mol_type = other DNA
ggcggcctcgaccgggaggcgcgtcaaatgatgcttaccctggagcgctgcgacccctgcgaaggggctggcgta

SEQ ID NO: 320562 - DNA, 75 bp, synthetic construct
  source 1..75: mol_type = other DNA
taacggccaattgcatgtcgcagagtgcaacccaggagtgaacgttaccttccttcctgtctcgcgtttcaaacg

SEQ ID NO: 320563 - DNA, 75 bp, synthetic construct
  source 1..75: mol_type = other DNA
tggtcgacagttgcatttatctcgtggctggagaataacggagctttccgacatccatactggatgtgtaaaggg

SEQ ID NO: 320564 - DNA, 75 bp, synthetic construct
  source 1..75: mol_type = other DNA
ggtctggacaactgcgcaatttatttcgtggctggagagtcagggagcatttaaccatccttactggatgtgcaa

SEQ ID NO: 320565 - DNA, 75 bp, synthetic construct
  source 1..75: mol_type = other DNA
aaactgcgcctggtacctcttctcgcccgattctgtcggcaaaagaagcgcagaatttcgatgctcaacactatt

SEQ ID NO: 320566 - DNA, 75 bp, synthetic construct
  source 1..75: mol_type = other DNA
ctgccgttaaccctgatctctatgtgaaccttgacgaacagcgcgagggatacgccccgtttgaatcacgcggct

SEQ ID NO: 320567 - DNA, 75 bp, synthetic construct
  source 1..75: mol_type = other DNA
agccaaacgcttaaccagaatcgaagacaacgcccgcgcggctctgttggtgaacgccgttggcttcgcaggcat

SEQ ID NO: 320568 - DNA, 75 bp, synthetic construct
  source 1..75: mol_type = other DNA
tgtgaatcttgatgaacaacgcgagggatacgcgccgattgaatcacggggctggggtgtgctgacgcagaacct

SEQ ID NO: 320569 - DNA, 75 bp, synthetic construct
  source 1..75: mol_type = other DNA
ataccaaagctgagtcatattgtcatgtcatcaacaacccatttctcgaagacgaggatgagattgtaagcttta

SEQ ID NO: 320570 - DNA, 75 bp, synthetic construct
  source 1..75: mol_type = other DNA
aataaacaatctagatgagtatacaatcactcaggtgtatgactacctccttaacttatcatggcattatccaat

SEQ ID NO: 320571 - DNA, 75 bp, synthetic construct
  source 1..75: mol_type = other DNA
gtttggcgacacggtatacgataacctgatctttccctggcagatccgtaatcaacagcctgacccggctatttt

SEQ ID NO: 320572 - DNA, 75 bp, synthetic construct
  source 1..75: mol_type = other DNA
atgcatctcacgggcactccatcgcttctgcggggggggaataaagtcgcttacctttatcctcgttgtgcctac

SEQ ID NO: 320573 - DNA, 75 bp, synthetic construct
  source 1..75: mol_type = other DNA
tataattaatgaacctcagcaacgtggctcatcttatagagtgatagaatcgatagaaaatactgattttattta

SEQ ID NO: 320574 - DNA, 75 bp, synthetic construct
  source 1..75: mol_type = other DNA
tcagattagtgaaataacggaatctagttggatgtcatcagaagaacaacatgcaaaaaaaattcaggctctcga

SEQ ID NO: 320575 - DNA, 75 bp, synthetic construct
  source 1..75: mol_type = other DNA
atgcaattattagttttgtacatcagattaatgaaataactgaagccagctggatgtcagctgaagaacaacatg

SEQ ID NO: 320576 - DNA, 75 bp, synthetic construct
  source 1..75: mol_type = other DNA
ccaatattcgcatagcccaacactcagaagattagttaactattacatagacaatttaccagaaactgatataaa

SEQ ID NO: 320577 - DNA, 75 bp, synthetic construct
  source 1..75: mol_type = other DNA
tttgctttccagccaattgacccgcattttacgcacccacgcagcaatgagcgtacttgggcatggtttgctgcg

SEQ ID NO: 320578 - DNA, 75 bp, synthetic construct
  source 1..75: mol_type = other DNA
aatattaaacatgatagtaagacaatgcaagcaacataaatcaaccattaataaaagaataatagactccatatc

SEQ ID NO: 320579 - DNA, 75 bp, synthetic construct
  source 1..75: mol_type = other DNA
ttccagcctttatccagtgaaaatccaaacaagatactatataataccaaagaagtagagttaacaaaagaatcg

SEQ ID NO: 320580 - DNA, 75 bp, synthetic construct
  source 1..75: mol_type = other DNA
gggtcgtgttgagtgtcagttgattctgtccaagcatctaaaagggcttacgttgggtaaggattcggtaattgt

SEQ ID NO: 320581 - DNA, 75 bp, synthetic construct
  source 1..75: mol_type = other DNA
aaataggatccgataatagaaaatccattttctttagagatttcataaaagataaccgagagcatgagttcaata

SEQ ID NO: 320582 - DNA, 75 bp, synthetic construct
  source 1..75: mol_type = other DNA
tattgatgaaaaaggtaaccttattgaaccacaaaaggagtcatcagaagaaactctcccaccagaaaaaatact

SEQ ID NO: 320583 - DNA, 75 bp, synthetic construct
  source 1..75: mol_type = other DNA
ggattattactaacatcaaacgcatcaggaactttaagcaataactataatcaacacaacgccaataatatagcc

SEQ ID NO: 320584 - DNA, 75 bp, synthetic construct
  source 1..75: mol_type = other DNA
ataaaaagtgggagaattgaaccagaatacacaacagatattagtgttgccgaccgatttagccgcggacatcac

SEQ ID NO: 320585 - DNA, 75 bp, synthetic construct
  source 1..75: mol_type = other DNA
atgttgttgtgcaataatgtatttatacaaatggctgcctatggtatgcagtacgaaggcgcaaaaaatcagttc

SEQ ID NO: 320586 - DNA, 75 bp, synthetic construct
  source 1..75: mol_type = other DNA
ttcacgtagtgcgccactactttttgataatctatacggtaaggaatccatatcagtaacactagaatcaaacaa

SEQ ID NO: 320587 - DNA, 75 bp, synthetic construct
  source 1..75: mol_type = other DNA
tcaatactcacacagccctacattcagaagattagttaattattacatcgacaacctatcggatattgatattaa

SEQ ID NO: 320588 - DNA, 75 bp, synthetic construct
  source 1..75: mol_type = other DNA
gtgatggaatgcaggaacgatttagggaactctatgaagtatatttaaaaaatgaaaaagtttatcctgtcacac

SEQ ID NO: 320589 - DNA, 75 bp, synthetic construct
  source 1..75: mol_type = other DNA
tccagaatactaacgattatacacttgggaaattattttcacagtcattcccattgtttagtgtagcatataatg

SEQ ID NO: 320590 - DNA, 75 bp, synthetic construct
  source 1..75: mol_type = other DNA
gcattgtgcgcgaccatgaaaagcgcctgaatgaagatcttcccgttggtggctatgatgccgttgatctccagg

SEQ ID NO: 320591 - DNA, 75 bp, synthetic construct
  source 1..75: mol_type = other DNA
tatttttaaagaattaaccccacaggcaatggcacattcttcagaatcatttcagcatatatctgttgggaagga

SEQ ID NO: 320592 - DNA, 75 bp, synthetic construct
  source 1..75: mol_type = other DNA
ttatcatgggcggaaacacactataaagcacaaagtcatattgagaatcacattcaggattgtgaattactaggc

SEQ ID NO: 320593 - DNA, 75 bp, synthetic construct
  source 1..75: mol_type = other DNA
cagaaacgctttaatgataatatagtacaccatatatcaaaaaaaataatcaaaaacaacgaattatcaccacat

SEQ ID NO: 320594 - DNA, 75 bp, synthetic construct
  source 1..75: mol_type = other DNA
aacatcatcgccttatattaaatgagattgtagcgcagtgcgaacattaccagaggcactttaataataatgtag

SEQ ID NO: 320595 - DNA, 75 bp, synthetic construct
  source 1..75: mol_type = other DNA
gttataacacaaccagaaaatcattatatgcaaactgtgaggcataagctttcacacactgcaccactacttttt

SEQ ID NO: 320596 - DNA, 75 bp, synthetic construct
  source 1..75: mol_type = other DNA
tcactataaaaaaatcgcacttaatggactattactagcctcaggaatatttaaaacattaaacaacaactacaa

SEQ ID NO: 320597 - DNA, 75 bp, synthetic construct
  source 1..75: mol_type = other DNA
gcacagaactacagaccactatcaacactatgaagcgtaaaacttcactcagtgacaagggattaccccaactca

SEQ ID NO: 320598 - DNA, 75 bp, synthetic construct
  source 1..75: mol_type = other DNA
ctggcacagccagaaattgccaacaatcccgaactttatcaggagaaagtgacggaagccttctttagcgccctg

SEQ ID NO: 320599 - DNA, 75 bp, synthetic construct
  source 1..75: mol_type = other DNA
cagattgacggcgaagcctggcatcagtttagtcaaaaatataatgctcaaactcaggcgctgctggcacagcca

SEQ ID NO: 320600 - DNA, 75 bp, synthetic construct
  source 1..75: mol_type = other DNA
attgccgggaaagaaaatccgtggattaaaagcggtcagagcgtcatcttcaacgaatcggttgatcatggtccc

SEQ ID NO: 320601 - DNA, 75 bp, synthetic construct
  source 1..75: mol_type = other DNA
tgaaatagagaatgatgttaatggtctgaaaataaaagttcaggatatcgacggtaaggtatcagagataatcgg

SEQ ID NO: 320602 - DNA, 75 bp, synthetic construct
  source 1..75: mol_type = other DNA
cagggtgaaagtgcgctgaatctgtcgctgttcctgaaagatccggcaacgactaaagaagcgccgcaaacgctg

SEQ ID NO: 320603 - DNA, 75 bp, synthetic construct
  source 1..75: mol_type = other DNA
aaaatgccactggaagattttgttggtatgtttgcgatgccggcattaaacgttccggctgtaccggcaataccg

SEQ ID NO: 320604 - DNA, 75 bp, synthetic construct
  source 1..75: mol_type = other DNA
gcaaacgcagccaccttgaagacggctaccgcagccttgagaacaagaaattccaggactacacaggtgaagacg

SEQ ID NO: 320605 - DNA, 75 bp, synthetic construct
  source 1..75: mol_type = other DNA
ggtcaaagccggttttgtgggcgaggcctggacccgcgccacagagcaggaaaaacgccgcgagggcaacaccac

SEQ ID NO: 320606 - DNA, 75 bp, synthetic construct
  source 1..75: mol_type = other DNA
actcaaaacccgcgcacagagtagcccgcagttgcgtggctggttgcagacccgccaggacttacatgcttttgc

SEQ ID NO: 320607 - DNA, 75 bp, synthetic construct
  source 1..75: mol_type = other DNA
gacttcaaatcatggtgtgggatcgtttatgcattgtctaaccgtccgctcgactcggaaggtcagttggtgctg

SEQ ID NO: 320608 - DNA, 75 bp, synthetic construct
  source 1..75: mol_type = other DNA
cgtggctgaatatggtcgccaaccttgggctatcggtgaagtgctgccgacagctgtagcgaactcgtcactgac

SEQ ID NO: 320609 - DNA, 75 bp, synthetic construct
  source 1..75: mol_type = other DNA
attcccactatgtaggggatattttcggcgcgccgctggcaatcgaaggtctgatggccttcttcctcgaatcca

SEQ ID NO: 320610 - DNA, 75 bp, synthetic construct
  source 1..75: mol_type = other DNA
ttccgtacctatgacgttatcggaagatgagatcgcccgtctcaaaggtattaatgaagatctctcgttagaaga

SEQ ID NO: 320611 - DNA, 75 bp, synthetic construct
  source 1..75: mol_type = other DNA
tgtacgcttgattttcaaactgctgttagatggtgaaagtctgcataacattgcacgtcacctacaaagcaacgg

SEQ ID NO: 320612 - DNA, 75 bp, synthetic construct
  source 1..75: mol_type = other DNA
gcgggccgtgagaacggggaaatggtcgatgaaatagccatgaatccggtgtatttctccatacgcaccatcaag

SEQ ID NO: 320613 - DNA, 75 bp, synthetic construct
  source 1..75: mol_type = other DNA
tttttttaatgagaagctattcagcaacgagctgccgccatgcctgataacgttgcagcgtgagaagcgaacgta

SEQ ID NO: 320614 - DNA, 75 bp, synthetic construct
  source 1..75: mol_type = other DNA
accatacctacaaacccgttaccgctaaatgatggaacatcaatctttgaaattgctgagaaaaatcttttgaat

SEQ ID NO: 320615 - DNA, 75 bp, synthetic construct
  source 1..75: mol_type = other DNA
ggggatgattgacgtggggaatgatggagaagcagaggggaagattgcatctctacagcatgaggttgaaattgt

SEQ ID NO: 320616 - DNA, 75 bp, synthetic construct
  source 1..75: mol_type = other DNA
accatacctacaaacccgttaccgctaaatgatgggtcaccaatctttgaaattgctgagaaaaatcttttgaat

SEQ ID NO: 320617 - DNA, 75 bp, synthetic construct
  source 1..75: mol_type = other DNA
tgaaggtgcagattcaaccagacgacaaaacgacctgttcaagcagtggctgaagaagaatggcgatgctcaaat

SEQ ID NO: 320618 - DNA, 75 bp, synthetic construct
  source 1..75: mol_type = other DNA
ggtcagcggtcagttgaaaacgctgtcggtggcgattggcgataaagtaaaaaaagatcagcttttaggggttat

SEQ ID NO: 320619 - DNA, 75 bp, synthetic construct
  source 1..75: mol_type = other DNA
actgaaatggctgttaaacaggcgcagattggcaccattgatgcgcaaatcaaacgcaatcaggcctctctcgac

SEQ ID NO: 320620 - DNA, 75 bp, synthetic construct
  source 1..75: mol_type = other DNA
gctacccgcgaagatatcgtcaaaatgcgtcaggcattgcaactggaagagcgtgagctggcttccagcgcgccg

SEQ ID NO: 320621 - DNA, 75 bp, synthetic construct
  source 1..75: mol_type = other DNA
gcttgatgtcacgcggacggtggtacgtgaagcgctgatcatgctggagatcaaagggctggtggaagtgcgccg

SEQ ID NO: 320622 - DNA, 75 bp, synthetic construct
  source 1..75: mol_type = other DNA
tgaacatcttgaaacagaagccttgatgaatcgcattattgctcatggtatcgagattcacactctacaggatgg

SEQ ID NO: 320623 - DNA, 75 bp, synthetic construct
  source 1..75: mol_type = other DNA
tcaccgattcacaccagtggaacaccttgctaagtttgcataacgcgcaattttatttactacaacgcacgccag

SEQ ID NO: 320624 - DNA, 75 bp, synthetic construct
  source 1..75: mol_type = other DNA
catggtggcgtgtggcttcctgcttctggcaatcatcgcgctctctttctggagtgtcatccgcaaccgcattgg

SEQ ID NO: 320625 - DNA, 75 bp, synthetic construct
  source 1..75: mol_type = other DNA
acgctcggtatggcgttcctgctggccattatggaaacggtctacttcctctccggcaaacagatttataaagat

SEQ ID NO: 320626 - DNA, 75 bp, synthetic construct
  source 1..75: mol_type = other DNA
aggttttcaacatatcgactatgcacttggctgcacgggccatgttgattgtgaagtgcggatgctacgcgaact

SEQ ID NO: 320627 - DNA, 75 bp, synthetic construct
  source 1..75: mol_type = other DNA
caggagacgggcaagcaggtgctgttgattacccacgatatagaagaagcggtgtttatggcgactgaactggtt

SEQ ID NO: 320628 - DNA, 75 bp, synthetic construct
  source 1..75: mol_type = other DNA
ccgattatggcggcaaaccggcactggaagatatcaacctgacgctggaaagcggcgagcttctggtagttctgg

SEQ ID NO: 320629 - DNA, 75 bp, synthetic construct
  source 1..75: mol_type = other DNA
tggaagagctgaagaacttccgtcagttgcactccaaaactccgggccacccggaagtgggttacaccgcaggtg

SEQ ID NO: 320630 - DNA, 75 bp, synthetic construct
  source 1..75: mol_type = other DNA
atgtccacggcgcgccgctgggcgaggctgaagtggcggcaacgcgtgaagcgctggactggccgtatccaccgt

SEQ ID NO: 320631 - DNA, 75 bp, synthetic construct
  source 1..75: mol_type = other DNA
atgccaaccttcattaaacttcattcatggaaaccttacactctgaaatcatctatgattttagagataataact

SEQ ID NO: 320632 - DNA, 75 bp, synthetic construct
  source 1..75: mol_type = other DNA
gcgctgtacggtattccgctgccgtggattgctgtagaagcgggctggttcgttgccgaatatggtcgccaaccg

SEQ ID NO: 320633 - DNA, 75 bp, synthetic construct
  source 1..75: mol_type = other DNA
aaaaggattattggtattgccatggcctgggttggtcatgtgcgaggaggaatggggtatgtcgccgtttttgcc

SEQ ID NO: 320634 - DNA, 75 bp, synthetic construct
  source 1..75: mol_type = other DNA
caactattttggttatgactccagtacttgttcctttaattaaacaagctggtatagatcccgtatatttcggtg

SEQ ID NO: 320635 - DNA, 75 bp, synthetic construct
  source 1..75: mol_type = other DNA
gctcccggtcgatggtggctttgatgatgagggcaatttgaccaaagaacctggcattatcgagaaaaatcgccg

SEQ ID NO: 320636 - DNA, 75 bp, synthetic construct
  source 1..75: mol_type = other DNA
ccatcgccgtaatgccgccgtggggcgcaaaagagtgtcgcatcggcactaacccgctgatcgtcgccattcctt

SEQ ID NO: 320637 - DNA, 75 bp, synthetic construct
  source 1..75: mol_type = other DNA
accctgctggccgaaaaccgccgtaacggcatcaccgttgatgacagcgtgtgggcaaaaatccaggcgttataa

SEQ ID NO: 320638 - DNA, 75 bp, synthetic construct
  source 1..75: mol_type = other DNA
tttcacaaatttttattgccattgaagtggacaagcttatcgacggtcccacccgcgatgccaagctgcaacgca

SEQ ID NO: 320639 - DNA, 75 bp, synthetic construct
  source 1..75: mol_type = other DNA
agtgggacattgataataattatcgtgatgcgcttcttgattatactgaagaattggataaactgtatgacatag

SEQ ID NO: 320640 - DNA, 75 bp, synthetic construct
  source 1..75: mol_type = other DNA
ggcaaattactgctcttgagaaaaaactttctgcactacatactctacagcaactaaccgaaagaacggatagtc

SEQ ID NO: 320641 - DNA, 75 bp, synthetic construct
  source 1..75: mol_type = other DNA
gtcgcatcggcaccaacccactgatcgtcgctattccctcttcacccatcaccatggtcgatatgtcgatgtcga

SEQ ID NO: 320642 - DNA, 75 bp, synthetic construct
  source 1..75: mol_type = other DNA
caggcggcggaaaaaggctatattggcatttgctggaccaactccatcgccgtaatgccgccgtggggcgcaaaa

SEQ ID NO: 320643 - DNA, 75 bp, synthetic construct
  source 1..75: mol_type = other DNA
tttactaccctgctggccgaaaaccgccgtaacggcatcactgttgatgacagcgtgtgggccaaaatccaggcg

SEQ ID NO: 320644 - DNA, 75 bp, synthetic construct
  source 1..75: mol_type = other DNA
ggattacgttaccagtgccgaacgcgcagacgaaaaccaggccattcgtttacccggccacgaatttaccactct

SEQ ID NO: 320645 - DNA, 75 bp, synthetic construct
  source 1..75: mol_type = other DNA
agtagacaagcttatcgacggcgcgacccgcgacgccaaactgcaacgcatcatggattacgttactaccgctga

SEQ ID NO: 320646 - DNA, 75 bp, synthetic construct
  source 1..75: mol_type = other DNA
aatgatggatcgcgccattgaactggcggcgaatcacgggattggtctggtcgcattacgcaatgctaaccactg

SEQ ID NO: 320647 - DNA, 75 bp, synthetic construct
  source 1..75: mol_type = other DNA
cgcttcattcaacaactggataacggcgatatcattcctgacgcccaacccaaacgtataaccagcctcggtgcc

SEQ ID NO: 320648 - DNA, 75 bp, synthetic construct
  source 1..75: mol_type = other DNA
tttattagtcgcagaaaacaatagactaagaggggcattggattttgctaacgtacacctacataatgagataat

SEQ ID NO: 320649 - DNA, 75 bp, synthetic construct
  source 1..75: mol_type = other DNA
ccgccagcatgatgggatcgggctattttacatcgctcgcccgttcactgtttccaccgctgatacctgaaacgg

SEQ ID NO: 320650 - DNA, 75 bp, synthetic construct
  source 1..75: mol_type = other DNA
tggcagtcggtggcgcgtcgatgggcgcgatgacggcactggggattaccgctcgccaccccacggtgaaatgta

SEQ ID NO: 320651 - DNA, 75 bp, synthetic construct
  source 1..75: mol_type = other DNA
gctgtttggtgaagcctcgcgtcagctgatggcgggcggcgccctgcaggtcttcattatcagcagcggaggtgc

SEQ ID NO: 320652 - DNA, 75 bp, synthetic construct
  source 1..75: mol_type = other DNA
tctgtttatttataccaaaaccgaatacgaggcgctgttccgccagtgcggtttttccacgctgaccagcgtacc

SEQ ID NO: 320653 - DNA, 75 bp, synthetic construct
  source 1..75: mol_type = other DNA
tccgtttgcgcaaacttaccgccaccgataatcctgctattgccagcgtcatccgccaggtgtccgcagagtacg

SEQ ID NO: 320654 - DNA, 75 bp, synthetic construct
  source 1..75: mol_type = other DNA
atgaatgttgtcgcttctcccgcactccgtttgcgcaaacttaccgtcgccgataatcctgctatcgcccacgtc

SEQ ID NO: 320655 - DNA, 75 bp, synthetic construct
  source 1..75: mol_type = other DNA
tggtatgcagtacgaaggcgcaaaaaatcagttcatggaattatatgataaatatctgcaacaccctaatgtaaa

SEQ ID NO: 320656 - DNA, 75 bp, synthetic construct
  source 1..75: mol_type = other DNA
ctgagcaaagctgagcttactgctgacttaatgtggttgtcagttaaccgaacagatgaagaatctgctgaacaa

SEQ ID NO: 320657 - DNA, 75 bp, synthetic construct
  source 1..75: mol_type = other DNA
tctttatctgtgcaaaataatagcattggtttagcttgttgtcagatacatattccggtgggttcagagaacata

SEQ ID NO: 320658 - DNA, 75 bp, synthetic construct
  source 1..75: mol_type = other DNA
gcagtccccgagcgcgtctgggtgggtaatcaccttaaggtggtgcgctatcgcgtcaccaacaataccgggatg

SEQ ID NO: 320659 - DNA, 75 bp, synthetic construct
  source 1..75: mol_type = other DNA
cattctggaaaccgaacgcggcctcaacttctcggtacaggccgtgccacgtgcgggcgcggggcgaaccatccg

SEQ ID NO: 320660 - DNA, 75 bp, synthetic construct
  source 1..75: mol_type = other DNA
cagcagcgtggcggtggcactggaagggcggtcgggtcagcaggtgcatcttctgctgacggtaagtggtcatga

SEQ ID NO: 320661 - DNA, 75 bp, synthetic construct
  source 1..75: mol_type = other DNA
cgactatctccgcaccgcccatcgaactggttgaaattgagcggctgcgttaccaggagatgccgatatccgctt

SEQ ID NO: 320662 - DNA, 75 bp, synthetic construct
  source 1..75: mol_type = other DNA
tgggggaaattccggaagggtggactctatctgaaattggagcgcaaatcgatattgctggtggggcaacgccat

SEQ ID NO: 320663 - DNA, 75 bp, synthetic construct
  source 1..75: mol_type = other DNA
ccttattgtaatattgatgccaaaaacaaaagtaagtacaaccttgaaattggtgatattgttattgccagaacg

SEQ ID NO: 320664 - DNA, 75 bp, synthetic construct
  source 1..75: mol_type = other DNA
ttattatttattacaaacaatagattttcatgcttacagtgataaggctgctgttcctggtattaataggaatca

SEQ ID NO: 320665 - DNA, 75 bp, synthetic construct
  source 1..75: mol_type = other DNA
ataaaccaattcaatatcgctataacgaagcattaaatgatttaaacagttataccaattctaatagcgtgactt

SEQ ID NO: 320666 - DNA, 75 bp, synthetic construct
  source 1..75: mol_type = other DNA
ttgcattatattttttgtactctctgtcatttgtaattgccgcatatgcattttatattaatagtattcatgact

SEQ ID NO: 320667 - DNA, 75 bp, synthetic construct
  source 1..75: mol_type = other DNA
acgtacatctacataatgagataattgaagcagggtcactgaaaggtctgatgggaattatttccatccttttcc

SEQ ID NO: 320668 - DNA, 75 bp, synthetic construct
  source 1..75: mol_type = other DNA
ccggaagccacgctgcactacctgcagaatctgcttgagcactcccgccaggacgcggcagttcgtcaaaagacc

SEQ ID NO: 320669 - DNA, 75 bp, synthetic construct
  source 1..75: mol_type = other DNA
atgtttaatcatatatttacccaggtcaaacgttcagaaaataaaaaaatggcggaaatcgctcaattcctgcat

SEQ ID NO: 320670 - DNA, 75 bp, synthetic construct
  source 1..75: mol_type = other DNA
gtgtaaaacgttcagaaaataaaaaaatggcggaaatcgcccaattcctgcatgaaaatgatttgagcgttgaca

SEQ ID NO: 320671 - DNA, 75 bp, synthetic construct
  source 1..75: mol_type = other DNA
aatgtaatagatctacgaggaaaagatatgggaacatatattgatgctaatggagcatgctgggctcctagactg

SEQ ID NO: 320672 - DNA, 75 bp, synthetic construct
  source 1..75: mol_type = other DNA
gaagtggaccttcttatagtatgagtagttccacatccagtgcaaacagcggcggtgatgctgccaacttactga

SEQ ID NO: 320673 - DNA, 75 bp, synthetic construct
  source 1..75: mol_type = other DNA
tgcggtggaatcgccggaaatattattaagtgcgtcgctatcagcgaatctgttcgcggtgaaggactggcgctg

SEQ ID NO: 320674 - DNA, 75 bp, synthetic construct
  source 1..75: mol_type = other DNA
ataacattaatttcatgaaggctactgctactaagaatgaaattgaaaaatatacacttaaaaaaggtgatgtaa

SEQ ID NO: 320675 - DNA, 75 bp, synthetic construct
  source 1..75: mol_type = other DNA
cttcaccttagcaacgggcgcaacaagatttggcttatcagttggtggcataaattatgctcacttcagtattcc

SEQ ID NO: 320676 - DNA, 75 bp, synthetic construct
  source 1..75: mol_type = other DNA
tcatccgcaagaatatatccaaaaaactcggttctttatgctatgtatgcttctataggtgaatgcagcattgct

SEQ ID NO: 320677 - DNA, 75 bp, synthetic construct
  source 1..75: mol_type = other DNA
agataccgcgattcactgacgtcagcctccggcagtatgaaacgcccgaaaagaatgcttgttaccggatattgt

SEQ ID NO: 320678 - DNA, 75 bp, synthetic construct
  source 1..75: mol_type = other DNA
gacttctgcctccggcagtatgaaacgcccgaaaagaatgcttgttaccggatattgttgtcggagatgtaaagg

SEQ ID NO: 320679 - DNA, 75 bp, synthetic construct
  source 1..75: mol_type = other DNA
tgaaggaagagaaaaaagccctgatgcagcagttactgaccgggaaacgtcgtgtcaaagtagaagctgaagaag

SEQ ID NO: 320680 - DNA, 75 bp, synthetic construct
  source 1..75: mol_type = other DNA
ggggaaaagtttttatccagaggtaatgcgcttagatccgcgcactaccagaccgtggttgttaggcgtgaagtc

SEQ ID NO: 320681 - DNA, 75 bp, synthetic construct
  source 1..75: mol_type = other DNA
atctggtcggcgcgtaactcgtgcagcacagtgctggtggggattgtgttggggccagccgcagccgggttattt

SEQ ID NO: 320682 - DNA, 75 bp, synthetic construct
  source 1..75: mol_type = other DNA
tcgtgtgccggtaaagggatgacgcccgccatgtttggcgtactggtgattgtgcaatcgtacgccaagtcgatc

SEQ ID NO: 320683 - DNA, 75 bp, synthetic construct
  source 1..75: mol_type = other DNA
tgattaaacaggaagactttttcaagaaaacagtcgcatcagatacccttgatggttatttcttattaaaaaaag

SEQ ID NO: 320684 - DNA, 75 bp, synthetic construct
  source 1..75: mol_type = other DNA
cagtagcttcagatacccttgatggttatttcttattaaagaaaggtcagtttgcgtacaataaaagttattcta

SEQ ID NO: 320685 - DNA, 75 bp, synthetic construct
  source 1..75: mol_type = other DNA
attccgcaatgtcgtctcattttccttctcgctggatatcgtcagcggcgcggtggcgattgtcggcggcattgc

SEQ ID NO: 320686 - DNA, 75 bp, synthetic construct
  source 1..75: mol_type = other DNA
ttgaactgttcgtgttggtagggctgcctgctgccgcaagcgtgatcaactttgtggtgctgacctctgcggcgt

SEQ ID NO: 320687 - DNA, 75 bp, synthetic construct
  source 1..75: mol_type = other DNA
gattggcccttatttatcgattctgcaattgggcaaagatttagaacgcttcaaaaacatggtgctggttcacgc

SEQ ID NO: 320688 - DNA, 75 bp, synthetic construct
  source 1..75: mol_type = other DNA
tcactaaagtgcagaactggaccgacgccctgtttagtctcaccgttcacgctcccgtgcttccgtttaccgccg

SEQ ID NO: 320689 - DNA, 75 bp, synthetic construct
  source 1..75: mol_type = other DNA
tgttcccgtaaccagcggaggcaattttgcccgcactgccggctttgctgtgtcgttggatggtgttggtataca

SEQ ID NO: 320690 - DNA, 75 bp, synthetic construct
  source 1..75: mol_type = other DNA
gccgccagcagcgatctgggatatttgcaagtcagcggcagccaactgaaacaggatttcctcggtctgccacat

SEQ ID NO: 320691 - DNA, 75 bp, synthetic construct
  source 1..75: mol_type = other DNA
cactggaagatgacactcgccaggcgctgctggttaccccgctgtggtttatcgcgctggggctgggctggttgt

SEQ ID NO: 320692 - DNA, 75 bp, synthetic construct
  source 1..75: mol_type = other DNA
caaaatcgtcgccatcgtgtcgctgattgtcgtcggcctggtcatggtggcgatgcactttcagtcaccgaccgg

SEQ ID NO: 320693 - DNA, 75 bp, synthetic construct
  source 1..75: mol_type = other DNA
taagaaggtactcaccgatccggccttcgcctatatgtggactggttacatcaaagttattgccgtgcatagcct

SEQ ID NO: 320694 - DNA, 75 bp, synthetic construct
  source 1..75: mol_type = other DNA
atatgaaagcccggggcggcaaacgacttgaacgggtcccggaaactatcatgagcgaagttcttggtcgcctgt

SEQ ID NO: 320695 - DNA, 75 bp, synthetic construct
  source 1..75: mol_type = other DNA
atcttttggtcagctgtttggcttttctgttattgccatgatgacatttatgttcattgtaaacaaatttatcta

SEQ ID NO: 320696 - DNA, 75 bp, synthetic construct
  source 1..75: mol_type = other DNA
gcgcagtcgaagccgcagcaagctgcgccggttgctcgtgccgctgacgcgccaaaaccgacggcggagaaaaaa

SEQ ID NO: 320697 - DNA, 75 bp, synthetic construct
  source 1..75: mol_type = other DNA
gcagagacggtacgtgctcagctggcgttcgaaggttttgactcgaaaattaccaccaacaatggctggaatcgt

SEQ ID NO: 320698 - DNA, 75 bp, synthetic construct
  source 1..75: mol_type = other DNA
ctaattgaagttccgtggaatgagcagacgccggaacagcgccagcaaacgctacaacgccagcgtcaggcgcag

SEQ ID NO: 320699 - DNA, 75 bp, synthetic construct
  source 1..75: mol_type = other DNA
cgggttatttaaaatcgccatgacattcttcgacgccgccggaacgccagcgggtttactgggtaaaagttttta

SEQ ID NO: 320700 - DNA, 75 bp, synthetic construct
  source 1..75: mol_type = other DNA
gaatggggtgaggtttagtggggagtggaagagagtaaaactgggtgcgatagccgatatgaacagtggaggtac

SEQ ID NO: 320701 - DNA, 75 bp, synthetic construct
  source 1..75: mol_type = other DNA
gaaaaaactcgcctgcctgagagatgagaaaaaagccctgatgcaacagctactgactggcaaacgtcgtgttaa

SEQ ID NO: 320702 - DNA, 75 bp, synthetic construct
  source 1..75: mol_type = other DNA
ggagtggaagcaagatgttaatcttggctctattattaatatatccaaaggagttcaaattaacaaaaacacttt

SEQ ID NO: 320703 - DNA, 75 bp, synthetic construct
  source 1..75: mol_type = other DNA
aaatttagtgtgccactacaagggcaggagcctgtgccggatatgaccggtgttgtggataccacctttgatgac

SEQ ID NO: 320704 - DNA, 75 bp, synthetic construct
  source 1..75: mol_type = other DNA
atcagaagccaatattcatagaaatattggtaggattcgtagcaaccagcatgagtatcttttccattatctacg

SEQ ID NO: 320705 - DNA, 75 bp, synthetic construct
  source 1..75: mol_type = other DNA
aaaaactggaggagctttgctcacttgatgcgccgattacatatggtgttttaaaacccggagagtatttttgcg

SEQ ID NO: 320706 - DNA, 75 bp, synthetic construct
  source 1..75: mol_type = other DNA
gcagatttgagggagagggaaagtactgtttatcgactacgaaagactgaactggcacaaagcatcgccggcctt

SEQ ID NO: 320707 - DNA, 75 bp, synthetic construct
  source 1..75: mol_type = other DNA
cgcgattatatatctaatgccgctgttcatactaggaaaagaacagttatatgtcttgatatcaccaatttttat

SEQ ID NO: 320708 - DNA, 75 bp, synthetic construct
  source 1..75: mol_type = other DNA
atatcaccaatttttatcccagcattagtaaaaaagatgtttgttctatttttaaaaatttaatgcgtttttctc

SEQ ID NO: 320709 - DNA, 75 bp, synthetic construct
  source 1..75: mol_type = other DNA
cagaccggactacgacgacaacccgcaccgcgattgcccgcagttcgtgccagaggattacgtgccgcaagcgcc

SEQ ID NO: 320710 - DNA, 75 bp, synthetic construct
  source 1..75: mol_type = other DNA
cttgcctgaaagatgagaaaaaagctctgatgcagcagttactgacagggaaacgtcgtgtcaaagtagaagctg

SEQ ID NO: 320711 - DNA, 75 bp, synthetic construct
  source 1..75: mol_type = other DNA
cggcaacacttccccgtgacaggcaggttatctccccggcagaaaccgaatgccccgtctgcagcggcaaactga

SEQ ID NO: 320712 - DNA, 75 bp, synthetic construct
  source 1..75: mol_type = other DNA
gaaggggcggatgccaatgcctctgtcaccggtaatgaatccacggtgccgatgcagttgcgtatcaccggcctg

SEQ ID NO: 320713 - DNA, 75 bp, synthetic construct
  source 1..75: mol_type = other DNA
gtgggttagatgtactaggtgctgcaaaggttgatagggacagtgttaacggactggataagtttaagttaaggg

SEQ ID NO: 320714 - DNA, 75 bp, synthetic construct
  source 1..75: mol_type = other DNA
cggcaaaaccattgatatgccgattaaggggcatgtcagcttccggggtaaaaacggtatcaagggcgaagtggt

SEQ ID NO: 320715 - DNA, 75 bp, synthetic construct
  source 1..75: mol_type = other DNA
gatgaccagcgtcgtattgaaaagctgggacaggataatgctgccctggcagagcaggtgaaagccctgggtgca

SEQ ID NO: 320716 - DNA, 75 bp, synthetic construct
  source 1..75: mol_type = other DNA
tcggtgacggaaaagcttctcaccaacagtcagttgcagaaaaaagcgctgatgcagcaattgcttactgggaag

SEQ ID NO: 320717 - DNA, 75 bp, synthetic construct
  source 1..75: mol_type = other DNA
tttagaactttccaagaaagattttgaaactttaagcttttcttgcccatttattaaagagcaacaaaaaatcgc

SEQ ID NO: 320718 - DNA, 75 bp, synthetic construct
  source 1..75: mol_type = other DNA
atttgtattagggcaagacactgtcttaattaaagcaatccatgcagattggcggtttatttactacacattaca

SEQ ID NO: 320719 - DNA, 75 bp, synthetic construct
  source 1..75: mol_type = other DNA
tgggctggaagcctggggggatgtgtccagtgagcgtgccatcgtgcgtacccgcaatatcagctgcctgaagga

SEQ ID NO: 320720 - DNA, 75 bp, synthetic construct
  source 1..75: mol_type = other DNA
aacgcaaacagtacctgtggctggggattgtggttgtcggtacggtctccgcgattggtggtgcattgtatctgt

SEQ ID NO: 320721 - DNA, 75 bp, synthetic construct
  source 1..75: mol_type = other DNA
cggatatgaccggtgtggtggatacgacctttgatgacaaggtgcgtcagcatgccaccacagagatgcaggtga

SEQ ID NO: 320722 - DNA, 75 bp, synthetic construct
  source 1..75: mol_type = other DNA
gtgccggatatgaccggtgtggtggataccacctttgatgacaaggtgcgtcagcatgccaccacagagatgcag

SEQ ID NO: 320723 - DNA, 75 bp, synthetic construct
  source 1..75: mol_type = other DNA
ccctgccgtatattccgtccgggagctttgcaaaatccgtcctgattgagggggcagatgccaatgcctctgtca

SEQ ID NO: 320724 - DNA, 75 bp, synthetic construct
  source 1..75: mol_type = other DNA
gacggcgttttatcccggtaatggagtcacgccaccaccacaggtgacgtaccagtctgtgccggtacctaaccg

SEQ ID NO: 320725 - DNA, 75 bp, synthetic construct
  source 1..75: mol_type = other DNA
atgaatctggaatctattcttaaattccacttcccaaaatcaccgcgtttgtcagatgaaagccgtggcacatcc

SEQ ID NO: 320726 - DNA, 75 bp, synthetic construct
  source 1..75: mol_type = other DNA
aaaaataccgggttttctatgaagacgccatagcggagctattcaaagaagagggccgcgcggaaagtgaaatca

SEQ ID NO: 320727 - DNA, 75 bp, synthetic construct
  source 1..75: mol_type = other DNA
gctatggcaaaagattatgaatacgttatggaactggacgaggccaaacgcaatgatctcattattcttgttgcc

SEQ ID NO: 320728 - DNA, 75 bp, synthetic construct
  source 1..75: mol_type = other DNA
gtttatcattcgtgttgatgaacaacgttgtggtatcagccgcgatgctctgatggaagcgttaaaagaaagagg

SEQ ID NO: 320729 - DNA, 75 bp, synthetic construct
  source 1..75: mol_type = other DNA
ttttcatttcacgccatcaaaaatattacctgcgcagaaggtgggctggtggtaaccgatgatgaaaatcttgcc

SEQ ID NO: 320730 - DNA, 75 bp, synthetic construct
  source 1..75: mol_type = other DNA
tccactttcccaaatcaccgcgattgtcagacgaaagcaggggaacatcacctgatgcacttaatacgacggatg

SEQ ID NO: 320731 - DNA, 75 bp, synthetic construct
  source 1..75: mol_type = other DNA
tatttcaccggctggacttactggttctgctgggttgtaaccggtatggcagacgtggtggcgatcacggcttat

SEQ ID NO: 320732 - DNA, 75 bp, synthetic construct
  source 1..75: mol_type = other DNA
gaaatcactgccgcgcgcgatcaactccattcctgttcgcatcatcatgttctacgtcttcgcgctgattgtgat

SEQ ID NO: 320733 - DNA, 75 bp, synthetic construct
  source 1..75: mol_type = other DNA
tgtggaagcgtcattcgcgcatttgtggaatgacggcggctggttcccgaaaggcttaagtggcttctttgccgg

SEQ ID NO: 320734 - DNA, 75 bp, synthetic construct
  source 1..75: mol_type = other DNA
gcggaagaagcactgaaactaatcggcgaactgtacgccattgagcacgaaatacgcgggttgccggtgtctgaa

SEQ ID NO: 320735 - DNA, 75 bp, synthetic construct
  source 1..75: mol_type = other DNA
aagatgcagaaaaagcggcatgtgatttattcgatatgacaatggggattatccaggagtaccggaacaaggagc

SEQ ID NO: 320736 - DNA, 75 bp, synthetic construct
  source 1..75: mol_type = other DNA
gaaatcactgccacgcgcgattaactccattccgatccgtatcattatgttctacgtcttcgcgctgattgttat

SEQ ID NO: 320737 - DNA, 75 bp, synthetic construct
  source 1..75: mol_type = other DNA
gccgccgcgaaattgcccagcaatacctgcaggcgatgcaatctctcccctttcaaccattaaatcttcctgtat

SEQ ID NO: 320738 - DNA, 75 bp, synthetic construct
  source 1..75: mol_type = other DNA
ggcgaagcctggacccgcgccacagagcaggaaaaacaccgccagggcaacaccacggagctgttagtgacgcag

SEQ ID NO: 320739 - DNA, 75 bp, synthetic construct
  source 1..75: mol_type = other DNA
atgagcaggttgcgcgttttccggcagacaggatggtttatcgcaggcctggtggcgggcttccccgccagtgcc

SEQ ID NO: 320740 - DNA, 75 bp, synthetic construct
  source 1..75: mol_type = other DNA
agacaggatggtttatcgcgggcctgatggcgggcttacccgccagtgccgcgcccgcagaaacatcgtcaatgg

SEQ ID NO: 320741 - DNA, 75 bp, synthetic construct
  source 1..75: mol_type = other DNA
aggcctcgacacaatggaatgaggcactcaaaacccgcgcacagagtagcccgcagttgcgtggctggttgcaga

SEQ ID NO: 320742 - DNA, 75 bp, synthetic construct
  source 1..75: mol_type = other DNA
aaacgctgatggtggataccggcgcagacaacgccgccggaaagctgacctttaacattgacgggctggcaaggg

SEQ ID NO: 320743 - DNA, 75 bp, synthetic construct
  source 1..75: mol_type = other DNA
tgcgtggacaatatcacccggatgcaggtggcgctgatgcaccctctggatgtccatgatatcgccgtcaccctg

SEQ ID NO: 320744 - DNA, 75 bp, synthetic construct
  source 1..75: mol_type = other DNA
atgcctctgaatcatcagaggagtcgctgtcagatacggcaaatgcactggctgaaaatgcccggaatgccggtg

SEQ ID NO: 320745 - DNA, 75 bp, synthetic construct
  source 1..75: mol_type = other DNA
atgctaatccgcgaccaggacaaaggtaaacgcacacgccttgaggatggttaccgctcgctggagaacaagaag

SEQ ID NO: 320746 - DNA, 75 bp, synthetic construct
  source 1..75: mol_type = other DNA
gtattacaaaggccgacatatcggcgcgaaaggtaccgctattttttcgtttcacgccatcaaaaatattacctg

SEQ ID NO: 320747 - DNA, 75 bp, synthetic construct
  source 1..75: mol_type = other DNA
tagccgctgcaacagcgacaccttcggatgcggcagccacgttacagtccatgcggtcctgtcggcgggagcctg

SEQ ID NO: 320748 - DNA, 75 bp, synthetic construct
  source 1..75: mol_type = other DNA
tgtgactggcgcgatgttcatcctcggtatcagcgcatggtatatgctgaaaggtcgtgacttcgccttcgcaaa

SEQ ID NO: 320749 - DNA, 75 bp, synthetic construct
  source 1..75: mol_type = other DNA
taaagtcaaattgttgcgtaatggtgaaacacgcgagcgtgaagtgacgattggcgcacgtaacgataccgatgt

SEQ ID NO: 320750 - DNA, 75 bp, synthetic construct
  source 1..75: mol_type = other DNA
ctcgccaccgtgaaaatgttcggtgagatggagttctggtttgcgatgatcaaaatcgtcgccatcgtgtcgctg

SEQ ID NO: 320751 - DNA, 75 bp, synthetic construct
  source 1..75: mol_type = other DNA
caattagcggagcagcaacgcctggctcagcagtcgcgtacgactgaacaaagctggcagcagcagacgcgtacg

SEQ ID NO: 320752 - DNA, 75 bp, synthetic construct
  source 1..75: mol_type = other DNA
cgatgatgctgatgaaaaatatgagccgcagttttatatatctgtttataatccatcatgtccacaaaaggttat

SEQ ID NO: 320753 - DNA, 75 bp, synthetic construct
  source 1..75: mol_type = other DNA
tgatgatgctgatgaaaaatatgagccgcagttttatatatctgtttataatccatcatgcccacaaaaggttat

SEQ ID NO: 320754 - DNA, 75 bp, synthetic construct
  source 1..75: mol_type = other DNA
gcaggggtcggatctggcctgtctggtgcgccgcttaaagcatcatatcggtgttgatgacaagcgttttgcctg

SEQ ID NO: 320755 - DNA, 75 bp, synthetic construct
  source 1..75: mol_type = other DNA
ttgaccaactacaaaatgctcgactacctgctgatgcgccctggcgatcagccgctctggcgttacaaccagccc

SEQ ID NO: 320756 - DNA, 75 bp, synthetic construct
  source 1..75: mol_type = other DNA
ttctcgaacgccagctggcagctttttgtatggataactgggtgaaaaccggtgtaccagaatccgctatctgta

SEQ ID NO: 320757 - DNA, 75 bp, synthetic construct
  source 1..75: mol_type = other DNA
acgaagtttgacagtttcagaaggatgtttgtttgtattatgttgtcatcagcatggtccggagtgatgtggttt

SEQ ID NO: 320758 - DNA, 75 bp, synthetic construct
  source 1..75: mol_type = other DNA
ggaaaatcagcaatatgctggatattggcgccagttacggcctgatccatgccgatgctaaacgcaaagacatcg

SEQ ID NO: 320759 - DNA, 75 bp, synthetic construct
  source 1..75: mol_type = other DNA
atttgaaaaataaaaaaggcagctacagccattattccgattacagcgacggtgccgggttacaactggcagccg

SEQ ID NO: 320760 - DNA, 75 bp, synthetic construct
  source 1..75: mol_type = other DNA
tacccgcgaagatatcgtcaaaatgcgtcaggcattgcaactggaagagcgtgaactggcttccagcgcgccggg

SEQ ID NO: 320761 - DNA, 75 bp, synthetic construct
  source 1..75: mol_type = other DNA
cgtgaagcgctgatcatgctggagatcaaagggctggtggaagtgcgccggggtgccggtatctatgttcttgat

SEQ ID NO: 320762 - DNA, 75 bp, synthetic construct
  source 1..75: mol_type = other DNA
gggttcagaagaatatttatctgtattatgttgtcatcagtatggtccggagtgatgtggttttttataaggggg

SEQ ID NO: 320763 - DNA, 75 bp, synthetic construct
  source 1..75: mol_type = other DNA
ttttgccagacgaaccgtttgtctttggtggtttactcgatagctgtaactcatcgcagcaatttattgagctgg

SEQ ID NO: 320764 - DNA, 75 bp, synthetic construct
  source 1..75: mol_type = other DNA
gtaatgcggtgaagatggctaccggtgttgcaatcaatacactgccgctaacgccaaaacgattatatgaagaat

SEQ ID NO: 320765 - DNA, 75 bp, synthetic construct
  source 1..75: mol_type = other DNA
tgtacgtagccctatcgcacatggttatgctgtaagtattaatgatgaacaagccaggagtttgccgggcgtcct

SEQ ID NO: 320766 - DNA, 75 bp, synthetic construct
  source 1..75: mol_type = other DNA
gccgcgcatcgcatcaacccggagatgaaagtcggttgtatgctggcgatggtgccgctctatccttactcctgt

SEQ ID NO: 320767 - DNA, 75 bp, synthetic construct
  source 1..75: mol_type = other DNA
tctggcctacgaagcccggcagtgtgaggtatttcaggggcagacacccgacatgccagaaacagccggtcccgc

SEQ ID NO: 320768 - DNA, 75 bp, synthetic construct
  source 1..75: mol_type = other DNA
ctggagcgatgcgcggttatggcgcgccacaagtcgtatttgccgttgagtcaatgcttgatgacgccgcgacag

SEQ ID NO: 320769 - DNA, 75 bp, synthetic construct
  source 1..75: mol_type = other DNA
gaaaccgtgggggttccggtcagcgacgttcgcgttatttcaacccaagataccgacgttacgccgttcgatccc

SEQ ID NO: 320770 - DNA, 75 bp, synthetic construct
  source 1..75: mol_type = other DNA
gcaatttacttaaacaaagcatgatgtcgacaggcaatgtccagcaaacaatcgatgcggcagattaccagatcg

SEQ ID NO: 320771 - DNA, 75 bp, synthetic construct
  source 1..75: mol_type = other DNA
gtattggtcgcgccggtcgtaaagatggtaacgcgttaaacattaccgtggcagaagggaacccgcacgatcagt

SEQ ID NO: 320772 - DNA, 75 bp, synthetic construct
  source 1..75: mol_type = other DNA
aaggtgaaattattgcggaagccgatctcgcctggccatcacaaaaatgggcattgattattgataatcaagaat

SEQ ID NO: 320773 - DNA, 75 bp, synthetic construct
  source 1..75: mol_type = other DNA
caagcttggcggcattccggtgaaagtttcccttagccgtgaagagtgtttcctcgcaacccgtccccgccacgc

SEQ ID NO: 320774 - DNA, 75 bp, synthetic construct
  source 1..75: mol_type = other DNA
ttcgcttgccatcgcatgaaattactccttttcgggcaacgctctttttaatcttgttgatatgtgccgctctgg

SEQ ID NO: 320775 - DNA, 75 bp, synthetic construct
  source 1..75: mol_type = other DNA
cgctggaactagacccagtagaaattcgtttacgtaatgccgctcgtgaaggcgatgcaaatccactcacgggca

SEQ ID NO: 320776 - DNA, 75 bp, synthetic construct
  source 1..75: mol_type = other DNA
cccggtggtgccagggctaagtaaaatcgcctggcaagagattgaccgtcgcgctgaacggatgcacattccggc

SEQ ID NO: 320777 - DNA, 75 bp, synthetic construct
  source 1..75: mol_type = other DNA
catttctccttcggagcatcttacgcgctataaccactctcgttttttcctattcccatgcagatgaagcactac

SEQ ID NO: 320778 - DNA, 75 bp, synthetic construct
  source 1..75: mol_type = other DNA
ttctttatctgttgcccacaaagaatatattagaatgagagataatagcattcaggcgaaatgtatttgtcataa

SEQ ID NO: 320779 - DNA, 75 bp, synthetic construct
  source 1..75: mol_type = other DNA
caatggggcagacgctgtttggttcgctcaatccggtgcgcaccggtgggccgatgcaggtcagcattgcttttg

SEQ ID NO: 320780 - DNA, 75 bp, synthetic construct
  source 1..75: mol_type = other DNA
agcaggagtcaaattatcaggcagatccggctgttccgggcttaagcaagatcgcctggcaagagattgaccgtc

SEQ ID NO: 320781 - DNA, 75 bp, synthetic construct
  source 1..75: mol_type = other DNA
attaaatcgccaaacggcaaaagttacagcgaacggttagattccgtgcgtacagaaaagcagttaagcgcgatt

SEQ ID NO: 320782 - DNA, 75 bp, synthetic construct
  source 1..75: mol_type = other DNA
agttccagaactattggatttatcaatgtaataaaatagatcgacttataagcctgtgtgatctaacaaataaaa

SEQ ID NO: 320783 - DNA, 75 bp, synthetic construct
  source 1..75: mol_type = other DNA
cagcgtgactggcaattaatggctggcaacgaggaggcgcaggctaaatgcgttcaggtaatgaacatcagagtt

SEQ ID NO: 320784 - DNA, 75 bp, synthetic construct
  source 1..75: mol_type = other DNA
ggtcattccggtgattttaagagagtgtgcctggcatcagttgccattcggcagcatcatggcagcgacaatcga

SEQ ID NO: 320785 - DNA, 75 bp, synthetic construct
  source 1..75: mol_type = other DNA
accagaggtcttagtcggggtcgattcagaaatacagctttattagatggttatagaaattacatcgatggaaag

SEQ ID NO: 320786 - DNA, 75 bp, synthetic construct
  source 1..75: mol_type = other DNA
gaataataaatggatagcacaattcggaaatccagaaaagggtgattgtatcatacctcttgtttttgaaaattc

SEQ ID NO: 320787 - DNA, 75 bp, synthetic construct
  source 1..75: mol_type = other DNA
ccagccatacggagctatcccattgactaatttacatgctctaactgcaagaacggtaatagatcttattatgga

SEQ ID NO: 320788 - DNA, 75 bp, synthetic construct
  source 1..75: mol_type = other DNA
tccaactggaaagcccgaaaattacccgcaatctgactacggcctggtttgcgaagcgcgtagatgaacggcggg

SEQ ID NO: 320789 - DNA, 75 bp, synthetic construct
  source 1..75: mol_type = other DNA
ataagcaggggaacagttatatttctgattttaccagtaatcctgaaggtgcattaagtagtcaggcgaaaaatc

SEQ ID NO: 320790 - DNA, 75 bp, synthetic construct
  source 1..75: mol_type = other DNA
aggcgcaggtgacaaagccgcagattcagcagacacaggacgtgacccaggataccatgttccttttggggagtg

SEQ ID NO: 320791 - DNA, 75 bp, synthetic construct
  source 1..75: mol_type = other DNA
tttcagaagcattaccaaactgaaccagaacgttttcaaattcttccccctggtatctatcctgacagaaaatac

SEQ ID NO: 320792 - DNA, 75 bp, synthetic construct
  source 1..75: mol_type = other DNA
tggagtgaatgcagattaaatatctcattgctgatgcttgatattgagcatcttgcgcgcggtaaggggctgcgt

SEQ ID NO: 320793 - DNA, 75 bp, synthetic construct
  source 1..75: mol_type = other DNA
tggagtgaatccagatttaacatctcattgctgatgcttgatattgagcatcttgcgcgcggtaaggggctgcgt

SEQ ID NO: 320794 - DNA, 75 bp, synthetic construct
  source 1..75: mol_type = other DNA
gatattgaacttgcggcaggcgatctggcgaagatcctcgatgccaaatttgccgatatcgcccgccgcgattaa

SEQ ID NO: 320795 - DNA, 75 bp, synthetic construct
  source 1..75: mol_type = other DNA
gttaaagcaccgggcttcggtgatcgtcgtaaagcaatgctccaggatatcgctactctgaccggtggtactgta

SEQ ID NO: 320796 - DNA, 75 bp, synthetic construct
  source 1..75: mol_type = other DNA
gtaacgacgctcgtgtgaaaatgctgcgcggcgtaaacgtgctggcagatgcagtgaaagttaccctcggtccga

SEQ ID NO: 320797 - DNA, 75 bp, synthetic construct
  source 1..75: mol_type = other DNA
cccgttcatcctgctggctgacaagaaaatctccaacatccgtgaaatgctgccggttctggaagccgttgcaaa

SEQ ID NO: 320798 - DNA, 75 bp, synthetic construct
  source 1..75: mol_type = other DNA
gcggtatgcggttacgcgcattatattgccgatgccaattgtggaacggttatcgctgaacctttctcccaggaa

SEQ ID NO: 320799 - DNA, 75 bp, synthetic construct
  source 1..75: mol_type = other DNA
caggttggatcagattttggccgtaaaggtgtagatcgctcaattgaagctttggcatcgttaccggaatcatta

SEQ ID NO: 320800 - DNA, 75 bp, synthetic construct
  source 1..75: mol_type = other DNA
atcgatactggaaaaactctaactcggtggccagtttttgttgaccacttcaccgatattgatacgcatcgacgg

SEQ ID NO: 320801 - DNA, 75 bp, synthetic construct
  source 1..75: mol_type = other DNA
tttgtcagcagcagggcagggctgcggtactggaggtgacacagaagcgggagaaaacggctgcgccgctctgtt

SEQ ID NO: 320802 - DNA, 75 bp, synthetic construct
  source 1..75: mol_type = other DNA
ggtggtggagccgttcggctttctgatccgcattattgagtggtggcagaccggagaggtaccgggcacgtttcg

SEQ ID NO: 320803 - DNA, 75 bp, synthetic construct
  source 1..75: mol_type = other DNA
caacaccactggagcgccgactggcgcgaacctgcagcgggatttctgatctgcaggtgccactgcgtgacttgt

SEQ ID NO: 320804 - DNA, 75 bp, synthetic construct
  source 1..75: mol_type = other DNA
gtttgacccattgacaaatacaacgtatgtatatcttaacccaaaatttctttctgtaaacattacaacatggtg

SEQ ID NO: 320805 - DNA, 75 bp, synthetic construct
  source 1..75: mol_type = other DNA
tgctgatcgtcagcctcgacgtggcgcaggcctggctgcatcagccgggcaaaatcagccacggcttgctgagcg

SEQ ID NO: 320806 - DNA, 75 bp, synthetic construct
  source 1..75: mol_type = other DNA
gctttaaaaaatgcaaatcatgtcagcaagttaaaccctttgaacagtttggaaaagagctcaagggcaagtttg

SEQ ID NO: 320807 - DNA, 75 bp, synthetic construct
  source 1..75: mol_type = other DNA
atgaatagtctgctgccgccgggttcaacaccactggagcgccgactggcgcaaacctgcagcgggatttctgat

SEQ ID NO: 320808 - DNA, 75 bp, synthetic construct
  source 1..75: mol_type = other DNA
gcaggaccagggcataacagaagaaacctatctggagctggagcgcctgatcggtgacgccaaaccgtgcagccg

SEQ ID NO: 320809 - DNA, 75 bp, synthetic construct
  source 1..75: mol_type = other DNA
gcgcaggaaacaatacaagaatccattttacaagaaaatattgtataagtacgggaacacagggaaagtatgaat

SEQ ID NO: 320810 - DNA, 75 bp, synthetic construct
  source 1..75: mol_type = other DNA
aacggcggaaatcggctactggctggacgagtcccatcagggacaggggattatttctcaggcgctgcaggcgtt

SEQ ID NO: 320811 - DNA, 75 bp, synthetic construct
  source 1..75: mol_type = other DNA
ctgcaggtgccgctgcgtgacttgtggaatccggcgacctgtccggtcagcttcctgccttatctcgcctgggcg

SEQ ID NO: 320812 - DNA, 75 bp, synthetic construct
  source 1..75: mol_type = other DNA
accattatttccggcggcaccgcttatgagggcggggcggtccatgttattgacacgatgagagtgaacccatga

SEQ ID NO: 320813 - DNA, 75 bp, synthetic construct
  source 1..75: mol_type = other DNA
tgggcgcagccacctacaccggcgaagaaatcacgatctacccgtatatcaacgaaaccattatttccggcggca

SEQ ID NO: 320814 - DNA, 75 bp, synthetic construct
  source 1..75: mol_type = other DNA
gtcagcatcaccacactgccacacatgctcgctcccctgtcaccggccctgcagtacatcctcgcccgcagtaac

SEQ ID NO: 320815 - DNA, 75 bp, synthetic construct
  source 1..75: mol_type = other DNA
atccggtgctgtatgagtccggaataacacctccgttatgtgaagtcagtgcaccagaacctgatgcgggtggga

SEQ ID NO: 320816 - DNA, 75 bp, synthetic construct
  source 1..75: mol_type = other DNA
cggctgtggctgtctgccctggatgaggccagcgtccgggaggcgctggcaaacattctgcccggtgagcagacg

SEQ ID NO: 320817 - DNA, 75 bp, synthetic construct
  source 1..75: mol_type = other DNA
ggcaaaaggcgatgaatgtcgtcctgctgaagctgaactcaaagagatgcagaccacgccaccgcgtcattatac

SEQ ID NO: 320818 - DNA, 75 bp, synthetic construct
  source 1..75: mol_type = other DNA
acgcaactgggaagagaactggtggcggcattgccggactctctgacaaatccgggtatgacggctttatgggaa

SEQ ID NO: 320819 - DNA, 75 bp, synthetic construct
  source 1..75: mol_type = other DNA
tgtgccggcaggcaggcaaggcgacggtatgtacggtaaatgaaacgaaaggaaaagcattgccgccgctgccgt

SEQ ID NO: 320820 - DNA, 75 bp, synthetic construct
  source 1..75: mol_type = other DNA
gctcagcaggtgctggatattgcgcaggctttgtatgaaacctacaaagcaaccacgtaccctcgtaccgattgc

SEQ ID NO: 320821 - DNA, 75 bp, synthetic construct
  source 1..75: mol_type = other DNA
acattgtaaaaacctgtacggtcagggatttgaagaatgattttgtgaactgcgatgagaaaggtgagggacaat

SEQ ID NO: 320822 - DNA, 75 bp, synthetic construct
  source 1..75: mol_type = other DNA
cgcgtcatttcttgtggtgggccaacccggcagtgaaagggggtgaagggcatcagagcgtcttcccgccggatg

SEQ ID NO: 320823 - DNA, 75 bp, synthetic construct
  source 1..75: mol_type = other DNA
gtcaccgcgggtggtactctgggaaattgacctgacggtacagggtggtgagcggtattttttctgcaatgagct

SEQ ID NO: 320824 - DNA, 75 bp, synthetic construct
  source 1..75: mol_type = other DNA
tatgcagaaacagctgcagtggacccgccatctggttgacaaagggaggagtgatacagtgaagattaccgcgcc

SEQ ID NO: 320825 - DNA, 75 bp, synthetic construct
  source 1..75: mol_type = other DNA
cgtctcaggcgaaagatattgcgcgggttctcggcatcagcaaacggggacagggatttatcagcggtggcaata

SEQ ID NO: 320826 - DNA, 75 bp, synthetic construct
  source 1..75: mol_type = other DNA
tgacggcgctaaaacttgatgctctgaaaaccgccatgaacgccattaacgcaaaaatagaagctgccggaagtg

SEQ ID NO: 320827 - DNA, 75 bp, synthetic construct
  source 1..75: mol_type = other DNA
aaagccatttcagaaagtactcaggcacaactagggaacctgaaaaactcttggaataccacgcttgatagtatt

SEQ ID NO: 320828 - DNA, 75 bp, synthetic construct
  source 1..75: mol_type = other DNA
ggtttagatatcgctgaactgcaatcacagtttgctggtttcggtgcttcagctaaagagtctatgggtattcaa

SEQ ID NO: 320829 - DNA, 75 bp, synthetic construct
  source 1..75: mol_type = other DNA
aactttgctcttgataatttaaaccctgaagcggctaagaatccgaacttacaccaatcaggtattggaacagag

SEQ ID NO: 320830 - DNA, 75 bp, synthetic construct
  source 1..75: mol_type = other DNA
tatcacaggtgacatggttaatagcaatgctcaacttgcaatgactattagtgaactatcacgcaaggtagacgc

SEQ ID NO: 320831 - DNA, 75 bp, synthetic construct
  source 1..75: mol_type = other DNA
aacaacgcttttaaacagtttaggtggaagcggtaaaagtcttggtgaatctcttggtagcttgatgagcgatat

SEQ ID NO: 320832 - DNA, 75 bp, synthetic construct
  source 1..75: mol_type = other DNA
tccgtttcacaagtcaggttaatgacgctattaataccccaagacaatcaagaccaagaagagttactggtgacc

SEQ ID NO: 320833 - DNA, 75 bp, synthetic construct
  source 1..75: mol_type = other DNA
atggtgacagaaaacaaaaagaatcaggaattcaaaatcagaaaaattaaacggaatattgagcgcagttgtgat

SEQ ID NO: 320834 - DNA, 75 bp, synthetic construct
  source 1..75: mol_type = other DNA
attcactaaccgatattagttacagggtacgagcgttctttgatgaggtgacattagcttatcgttcactaaatg

SEQ ID NO: 320835 - DNA, 75 bp, synthetic construct
  source 1..75: mol_type = other DNA
gtgaagtccggtttactggcgggcggaatcggtattctggtggcgctcgcggtgttgatcgtcggcaagccgctc

SEQ ID NO: 320836 - DNA, 75 bp, synthetic construct
  source 1..75: mol_type = other DNA
caagcttcgtgactttaatcctatgcttgagaagtattttaagagccaatattacagcttaagcagtaaatccaa

SEQ ID NO: 320837 - DNA, 75 bp, synthetic construct
  source 1..75: mol_type = other DNA
atctacgtgaaacactttctaagtttaacaagaccaccagcaaaaataatcacagtgaaaatgcttcaaatggtt

SEQ ID NO: 320838 - DNA, 75 bp, synthetic construct
  source 1..75: mol_type = other DNA
tatgtcattccgtatacgttatgggcgtttgcaggtggatttcttatcgtatacgtcaggaaccctttgaatgaa

SEQ ID NO: 320839 - DNA, 75 bp, synthetic construct
  source 1..75: mol_type = other DNA
aaaggttctgaaaatggtctgcaagattttacacgaagcttaacaacgcttttaaatagtttagatggaagtggt

SEQ ID NO: 320840 - DNA, 75 bp, synthetic construct
  source 1..75: mol_type = other DNA
gagaagttggctcagttgaatgcttcagtccgagaagcaattgctaaagttagaggccatacatctgggattaac

SEQ ID NO: 320841 - DNA, 75 bp, synthetic construct
  source 1..75: mol_type = other DNA
atacaaaggtgattcatctaagccaatagttctatcgctgactggtttaatggtgcaactaataaaattgctaac

SEQ ID NO: 320842 - DNA, 75 bp, synthetic construct
  source 1..75: mol_type = other DNA
gtagctggaggcttgttaaaccttgcaaacgctgttacttcattcggtgatgctgttaataaagctaaagctggc

SEQ ID NO: 320843 - DNA, 75 bp, synthetic construct
  source 1..75: mol_type = other DNA
gatggtgaaatgcagaaggttgccagccaaccaccagcgctatccatagagactgcaccaaagagtgaacctccc

SEQ ID NO: 320844 - DNA, 75 bp, synthetic construct
  source 1..75: mol_type = other DNA
ctggcagtcaaataccagttagcaccaccagcacaaacgcacgtcaaaactcaggacctgggggtggttaagcaa

SEQ ID NO: 320845 - DNA, 75 bp, synthetic construct
  source 1..75: mol_type = other DNA
attaccaaagtaatgattgtcggtatggcaactgatgtgattaatgccattgtcaaaccgttctatgaacgtcag

SEQ ID NO: 320846 - DNA, 75 bp, synthetic construct
  source 1..75: mol_type = other DNA
cgaattagcggcaacagagcaatcacagcagcttattcagctaatatgagcaagctaaaaggctttgaccctatt

SEQ ID NO: 320847 - DNA, 75 bp, synthetic construct
  source 1..75: mol_type = other DNA
tccgtttcacaagtcaggttaatgacgctattaatcctccaagacagccaagacagccacgaattagcggcaaca

SEQ ID NO: 320848 - DNA, 75 bp, synthetic construct
  source 1..75: mol_type = other DNA
tgctgccatgaatcttgctaacttccagcatccagaattaaacaacattaagcaagattcagcattaacgagtgc

SEQ ID NO: 320849 - DNA, 75 bp, synthetic construct
  source 1..75: mol_type = other DNA
tgttactgctcaaaaggctgcaaatgtagctggaggcttgttaaaccttgcaaacgctgttacttcattcggtga

SEQ ID NO: 320850 - DNA, 75 bp, synthetic construct
  source 1..75: mol_type = other DNA
aaacggaaattgaggatactttaaagccacttagacagccaagacagccacgaattagcggaaacagagcaatca

SEQ ID NO: 320851 - DNA, 75 bp, synthetic construct
  source 1..75: mol_type = other DNA
tctttgatgaggtgacattggcttaccgttcactaaatgacactcagaaaaaaattgttgacggtttatctgatg

SEQ ID NO: 320852 - DNA, 75 bp, synthetic construct
  source 1..75: mol_type = other DNA
gatcctgtcgttagcaccgacattaaggacttttttccgtcgccatttattggtctataacggagtcggagaaaa

SEQ ID NO: 320853 - DNA, 75 bp, synthetic construct
  source 1..75: mol_type = other DNA
agcattaggatctcgtttattgttttctcccctgagaaattctatagctgattctgtcgattccagagatattcc

SEQ ID NO: 320854 - DNA, 75 bp, synthetic construct
  source 1..75: mol_type = other DNA
gaggtcgctgcagatcctgtttatagcgtcattcagaatttttcacggaatgctccagttaccggagggttaatg

SEQ ID NO: 320855 - DNA, 75 bp, synthetic construct
  source 1..75: mol_type = other DNA
gcaacctgatcaaattaatggaacgccagaaaggtatagggcgcgacgatatccagatcgcagataatcgcccta

SEQ ID NO: 320856 - DNA, 75 bp, synthetic construct
  source 1..75: mol_type = other DNA
aggccaaacagcaagccattgaaaataatgctcaggcgcaaaaaaaatatgatgaacaacaagctaaacgccagg

SEQ ID NO: 320857 - DNA, 75 bp, synthetic construct
  source 1..75: mol_type = other DNA
ccatgataaggggccacttgatattctcaatacgcaaattggaccctctgcatttcgtgttgaagcgcaggcaga

SEQ ID NO: 320858 - DNA, 75 bp, synthetic construct
  source 1..75: mol_type = other DNA
cttatgcgcttctggcaagcagcggcggattgcgtttaggtatgggaggattaacgagtggtggcgagagcgcag

SEQ ID NO: 320859 - DNA, 75 bp, synthetic construct
  source 1..75: mol_type = other DNA
ggggctggctacggtcttagtggcgcgttgattcttggtggaggcattggtcttggtgttaccactcttcttcat

SEQ ID NO: 320860 - DNA, 75 bp, synthetic construct
  source 1..75: mol_type = other DNA
tgatcagggggggcttgatactcttaacaaggctattggctctacggtatttcgtgttgaaattcaggaggatgg

SEQ ID NO: 320861 - DNA, 75 bp, synthetic construct
  source 1..75: mol_type = other DNA
atgtatgtcgatgaggaggaatgtccgcgaacagcgatttctttcggggaggctgttgctgaggatattcgtgaa

SEQ ID NO: 320862 - DNA, 75 bp, synthetic construct
  source 1..75: mol_type = other DNA
gaacgtcagttgaaaacgaaaccgctgctgaaatccctggaaagctggctgcgtgaaaagatgaaaaccctgtcg

SEQ ID NO: 320863 - DNA, 75 bp, synthetic construct
  source 1..75: mol_type = other DNA
atgtaaaataattacaacaatacataactatgtatttcaagacctttattactcatatggtttggttaaatcctt

SEQ ID NO: 320864 - DNA, 75 bp, synthetic construct
  source 1..75: mol_type = other DNA
cggaaatgcacatccgtcagggatattaaaagatgatgttgttgcacaaatagaagagcaggctaaagctgccgg

SEQ ID NO: 320865 - DNA, 75 bp, synthetic construct
  source 1..75: mol_type = other DNA
aagtgcggggattcaaagcacttatgcgcgtctggcgctaagtggtggattacgccatgacatgggaggattaac

SEQ ID NO: 320866 - DNA, 75 bp, synthetic construct
  source 1..75: mol_type = other DNA
ccctgaagaaattgaaggagttgtagagggaattgaggcatttaaagagctattgccgttacaactgaataaatg

SEQ ID NO: 320867 - DNA, 75 bp, synthetic construct
  source 1..75: mol_type = other DNA
gttgatggccgacaaaaccttgccttttggcgagaatggcgaccatatcaccatcaatctgattgattttgacaa

SEQ ID NO: 320868 - DNA, 75 bp, synthetic construct
  source 1..75: mol_type = other DNA
gcgtcaaaacacacgaatattaagcttccatcacaaactcatgatggattaaaaactccgtatgcaactgtcaga

SEQ ID NO: 320869 - DNA, 75 bp, synthetic construct
  source 1..75: mol_type = other DNA
aaaatggaattatcgaccgtttaaaagatttaagcggagtcaagtgggaatactgccacggtgagaacctgccta

SEQ ID NO: 320870 - DNA, 75 bp, synthetic construct
  source 1..75: mol_type = other DNA
tattcgcgatgatattgacgagttggtcatggacgagcacgctatttttaccctgaccgctaaagagcaggaaca

SEQ ID NO: 320871 - DNA, 75 bp, synthetic construct
  source 1..75: mol_type = other DNA
ttatggccgcgcaggaatgcctgccgaccaacgagaagcgcgatgaattcgctgccagctttggtgtgttatcca

SEQ ID NO: 320872 - DNA, 75 bp, synthetic construct
  source 1..75: mol_type = other DNA
ggttataatgttcaaaacacccaagtcataaataatcgaaccatcaacaataattatacaaagcaaaattctaat

SEQ ID NO: 320873 - DNA, 75 bp, synthetic construct
  source 1..75: mol_type = other DNA
cgcgctacagcatgcatcgcttgcgccactggattgccctgccgatcggctttgctttgttctggcatgacacct

SEQ ID NO: 320874 - DNA, 75 bp, synthetic construct
  source 1..75: mol_type = other DNA
taagtgagcaagagttttctagcttacagtcccttgatcctgaaggtaaaaacaaatttgtatttactggaggcc

SEQ ID NO: 320875 - DNA, 75 bp, synthetic construct
  source 1..75: mol_type = other DNA
atttcttttccggctgcggcggaaccagtgtaggcctaaaagcggtgggaatggaaattattttcggtttagata

SEQ ID NO: 320876 - DNA, 75 bp, synthetic construct
  source 1..75: mol_type = other DNA
tcttttccggttgtggtggaaccagccaaggtttccatcaagctggaatggatattgtttttggcctcgatttcg

SEQ ID NO: 320877 - DNA, 75 bp, synthetic construct
  source 1..75: mol_type = other DNA
aggaataggatttgttatctggtcatttttcacacattatcaagaaatttatcccattttaagaacaggtgcttt

SEQ ID NO: 320878 - DNA, 75 bp, synthetic construct
  source 1..75: mol_type = other DNA
tatgaaaaacatctgctgtcgatgaaagataacgatcagactgccaacctcggcgcgctgattgatgctggcgta

SEQ ID NO: 320879 - DNA, 75 bp, synthetic construct
  source 1..75: mol_type = other DNA
tggcctattcgggtcagtgctacatttctcatgcgcaaacagggcgtagcgccaaccgtggcgattgctcgcagg

SEQ ID NO: 320880 - DNA, 75 bp, synthetic construct
  source 1..75: mol_type = other DNA
cagattgtgctggcgcgagagctgaatcttgagcagatccgcgcgattcaccaggccacggacgcgaccattgaa

SEQ ID NO: 320881 - DNA, 75 bp, synthetic construct
  source 1..75: mol_type = other DNA
agaaaggcgaccactgcattgtccacacctgtaacgattctgtagcaaggcatcagatcgaaccctttgccagcg

SEQ ID NO: 320882 - DNA, 75 bp, synthetic construct
  source 1..75: mol_type = other DNA
gggtgatgaaaggcggtacttatacccctgcacaaaccgtaacgttgggagatgagacgtatcaggtgatgagcg

SEQ ID NO: 320883 - DNA, 75 bp, synthetic construct
  source 1..75: mol_type = other DNA
cgccgcactggtcatcgccaccagtgcaatggcgcaggatgatttaaccattagcagccttgcaaagggcgaaac

SEQ ID NO: 320884 - DNA, 75 bp, synthetic construct
  source 1..75: mol_type = other DNA
gtttaacgcatcttacgttaaagcaccgaacagccaggctgttactgctggtcacgttaccactaacgcactgta

SEQ ID NO: 320885 - DNA, 75 bp, synthetic construct
  source 1..75: mol_type = other DNA
ccgaacagccaggatgtgacttctggtcacgttaccactaacgcactgtacaccattacggtgatgctgccaact

SEQ ID NO: 320886 - DNA, 75 bp, synthetic construct
  source 1..75: mol_type = other DNA
gatttacgtatgctgaccagtcgcctggcatccagctcattaaataatacgccgttcttgtcgccggaagagaca

SEQ ID NO: 320887 - DNA, 75 bp, synthetic construct
  source 1..75: mol_type = other DNA
gaatcaatgaaaaagaaaggctttcgcattaagcctgccgggaaagccaagtccggcttaccgctcgacagccat

SEQ ID NO: 320888 - DNA, 75 bp, synthetic construct
  source 1..75: mol_type = other DNA
ttagcgaggtggatcaagcgggaaacgggcatcagcgccctgcgctggctcagtactgaacaggcaagcagtgtt

SEQ ID NO: 320889 - DNA, 75 bp, synthetic construct
  source 1..75: mol_type = other DNA
atgctagaagtagaattgcggggaattgagcattcaagaaatgtaccaccacataaatataaaatcacagatggt

SEQ ID NO: 320890 - DNA, 75 bp, synthetic construct
  source 1..75: mol_type = other DNA
ggtactggtgatatgtcgcgttcacgtaagaagagctttaactggtacaaagaagtgattgccagcaacggcgag

SEQ ID NO: 320891 - DNA, 75 bp, synthetic construct
  source 1..75: mol_type = other DNA
gattacacgcgcatccttgcaccgatggcgggtgaagttacgcaaatcactaccctgcaagggcaaacggtgatt

SEQ ID NO: 320892 - DNA, 75 bp, synthetic construct
  source 1..75: mol_type = other DNA
acggctaaaaccaatctcgattacacccgcatcgttgccccgatggccggggaagtcacgcaaataaccactctg

SEQ ID NO: 320893 - DNA, 75 bp, synthetic construct
  source 1..75: mol_type = other DNA
gtgaagaaacgttacgttattgcgctggtgatagtcatcgccgggctgattgcgttatggagaattctcaacgcg

SEQ ID NO: 320894 - DNA, 75 bp, synthetic construct
  source 1..75: mol_type = other DNA
ttggcaatttgtcgggcgattgtggatgtacacggcggcaccattaccgcgttcaaccgaccggaaggtggtgcc

SEQ ID NO: 320895 - DNA, 75 bp, synthetic construct
  source 1..75: mol_type = other DNA
tcgatctcttttttatcgccccacgcggcacgctcgccgtctctgatgtgcaatatctgctgaccttcgcggtga

SEQ ID NO: 320896 - DNA, 75 bp, synthetic construct
  source 1..75: mol_type = other DNA
ttgcagccgttaacacatccgcaaggaatgacgccgtgggacgatgccatcgcgcagtggagttttgataaaggc

SEQ ID NO: 320897 - DNA, 75 bp, synthetic construct
  source 1..75: mol_type = other DNA
caaaatggaagacggcgatctggatgtactgcgcgaaggcacctgcgattatctcggcttcagctattacatgac

SEQ ID NO: 320898 - DNA, 75 bp, synthetic construct
  source 1..75: mol_type = other DNA
aatgttttcgtacttccatcgcctggacgcgcatttttccaaaaggcgatgaagctcagccaaacgaagaagggc

SEQ ID NO: 320899 - DNA, 75 bp, synthetic construct
  source 1..75: mol_type = other DNA
agtggaaacgtcgcggatttaacatcaaaatggaagacggcgatctggatgtgctacgcgaaggcacctgcgctt

SEQ ID NO: 320900 - DNA, 75 bp, synthetic construct
  source 1..75: mol_type = other DNA
caggcgcaaattggcaccattgacgcgcaaatcaagcgcaatcaggcctctctcgatacggctaaaaccaatctc

SEQ ID NO: 320901 - DNA, 75 bp, synthetic construct
  source 1..75: mol_type = other DNA
ttgtgcgccccggtgatttacagcaaagcgtgctggcgaccggaaagctggacgcgctgcgtaaggttgacgtgg

SEQ ID NO: 320902 - DNA, 75 bp, synthetic construct
  source 1..75: mol_type = other DNA
gcccatattgaagagatgaaaaaagcagtgacttacgatggcgtggatctgatgggctacacaccgtggggctgc

SEQ ID NO: 320903 - DNA, 75 bp, synthetic construct
  source 1..75: mol_type = other DNA
acaatgaagttgccgccaaaaaagcattgtctcctgcggctatcctggcgctggaaaaagagtacgccaacaaaa

SEQ ID NO: 320904 - DNA, 75 bp, synthetic construct
  source 1..75: mol_type = other DNA
ttcgccgccgggctggcacctgactgcgcaataaccgtgcatactcaggcagatacgtcacgtcccgatccgtta

SEQ ID NO: 320905 - DNA, 75 bp, synthetic construct
  source 1..75: mol_type = other DNA
ttgacgccccatccaccgcaaaaacaggcgtatggtgtgacattacccacttcagtgctgtttatcgccggacac

SEQ ID NO: 320906 - DNA, 75 bp, synthetic construct
  source 1..75: mol_type = other DNA
gcgaaagaaacgcgcagggcatgtgttcgctggcggggtttacgcaaatcgtgaatgaagcgcgcataccggcat

SEQ ID NO: 320907 - DNA, 75 bp, synthetic construct
  source 1..75: mol_type = other DNA
ccttcggtgaatctgcaccggcagagcagttgttcgaagagttcggcttcaccgttgacaacgttgttgcgaaag

SEQ ID NO: 320908 - DNA, 75 bp, synthetic construct
  source 1..75: mol_type = other DNA
gtgaaagcgcgcgtggtttccatgccgtctaccgacgcattcgacaagcaggacgcggcttaccgtgaatccgta

SEQ ID NO: 320909 - DNA, 75 bp, synthetic construct
  source 1..75: mol_type = other DNA
accatgaataatgtaaagattaacggaaaaagtattacatctattaaggattttatggtttcaccattttcaaca

SEQ ID NO: 320910 - DNA, 75 bp, synthetic construct
  source 1..75: mol_type = other DNA
aaaaattctcaataaaaaacctgagggcgcagttgataatacgggagcgttttacttaaaaggaaatattacata

SEQ ID NO: 320911 - DNA, 75 bp, synthetic construct
  source 1..75: mol_type = other DNA
tgtgtccgttacttttagcaccactgatggcaatggccgataatcctaaaacaccagcaaccgcaacagccagca

SEQ ID NO: 320912 - DNA, 75 bp, synthetic construct
  source 1..75: mol_type = other DNA
atagcaaccaatgattccactcatggtgtcgatgtttctcttgtggaaccgttgaaacttactgatagtgcttca

SEQ ID NO: 320913 - DNA, 75 bp, synthetic construct
  source 1..75: mol_type = other DNA
ctccatgctgatctacagcctgctgcacctcaccggttacgatctgccgatggaagaactgaaaaacttccgtca

SEQ ID NO: 320914 - DNA, 75 bp, synthetic construct
  source 1..75: mol_type = other DNA
ccggagctgaagctggaaagtgtggtgattgtcagtcgtcatggtgtgcgtgcgcccaccaaagccacgcaactc

SEQ ID NO: 320915 - DNA, 75 bp, synthetic construct
  source 1..75: mol_type = other DNA
ggatgctgcttaccgtgaatccgtactgccgaaagcggttactgcacgcgttgctgtagaagcgggtattgctga

SEQ ID NO: 320916 - DNA, 75 bp, synthetic construct
  source 1..75: mol_type = other DNA
cgaagatggcccgactcaccagccggtagaacagatcgcttctctgcgcgtgaccccgaacatgtctacatggcg

SEQ ID NO: 320917 - DNA, 75 bp, synthetic construct
  source 1..75: mol_type = other DNA
ctctcctcttccagcctgaaacgctggagtgcggaaaactcggtaaccatgagcagcaaagtcagtgggctgaat

SEQ ID NO: 320918 - DNA, 75 bp, synthetic construct
  source 1..75: mol_type = other DNA
taataaagtcatcgaaacttttgaatcgatggggctgcgttttggccgcgatgttaatgcctataccagctatga

SEQ ID NO: 320919 - DNA, 75 bp, synthetic construct
  source 1..75: mol_type = other DNA
cgcatcgattactgtagaagaacaaaatgaacctgtggcacaggtttcactgtggaatcgttatgattcccggac

SEQ ID NO: 320920 - DNA, 75 bp, synthetic construct
  source 1..75: mol_type = other DNA
ggtcatcgttacaaaatgctcaaattcaagcgttgagaacgctcgatcaacgcccggcagagaaattcgctcagc

SEQ ID NO: 320921 - DNA, 75 bp, synthetic construct
  source 1..75: mol_type = other DNA
ttgccgactacgcagaaacaaaatctgcaacaagtgatggcaatcttcagtgaatggagtaatgccgcaaccttt

SEQ ID NO: 320922 - DNA, 75 bp, synthetic construct
  source 1..75: mol_type = other DNA
cagctttctaaacgcctgtggccacaaattaccgtgcaaagcctggcgaaaaaatggcagcaattaagaaagaac

SEQ ID NO: 320923 - DNA, 75 bp, synthetic construct
  source 1..75: mol_type = other DNA
caggatgaaaagttaattaccgggcaactggacaatggcttgcgatatatgatttatccgcatgctcatccaaag

SEQ ID NO: 320924 - DNA, 75 bp, synthetic construct
  source 1..75: mol_type = other DNA
gcgtgataaaacgccgctatcgctaaaaacgccgcctggagaggtaaaactgacactggcagaatgtgaggagag

SEQ ID NO: 320925 - DNA, 75 bp, synthetic construct
  source 1..75: mol_type = other DNA
ctgacgccacataatccgcaaaggcagagctatggtgttacgctaccgacttcgctgctgtttattgccgggcat

SEQ ID NO: 320926 - DNA, 75 bp, synthetic construct
  source 1..75: mol_type = other DNA
tagcgaatgaagtgatggttaagcgtctggctaaagggatcagtgagcaagaactgaacgaataccagcaaaacg

SEQ ID NO: 320927 - DNA, 75 bp, synthetic construct
  source 1..75: mol_type = other DNA
attaaccagcgaatcacccacagcacgattaacgacaatatttgggcatcgctacaaaatgctcaaattcaggcg

SEQ ID NO: 320928 - DNA, 75 bp, synthetic construct
  source 1..75: mol_type = other DNA
ggcgttgaaaacgctcgaccagcgtccagcggagaaattcgcccagcagatgtatgagacgcgctatgctgatga

SEQ ID NO: 320929 - DNA, 75 bp, synthetic construct
  source 1..75: mol_type = other DNA
atctttcgatgaaattgaagctattcgcaaaaaaaataccagtggggaatgggcagcatcagcaatacttgagca

SEQ ID NO: 320930 - DNA, 75 bp, synthetic construct
  source 1..75: mol_type = other DNA
cgatctcagggccagatgttgatcgcccgcgaccaggggctgttgtgggatcaaacctcaccgttccccatgcaa

SEQ ID NO: 320931 - DNA, 75 bp, synthetic construct
  source 1..75: mol_type = other DNA
gggaaacctttggtgaactgaagctgttccggtatccggatggcacgcttttcaataccttctatcgcagtagcg

SEQ ID NO: 320932 - DNA, 75 bp, synthetic construct
  source 1..75: mol_type = other DNA
caccaaagctgcgtttaatcagatggtgcaagggcataagctgcctgcctgggtgatgaaaggcggtacttatac

SEQ ID NO: 320933 - DNA, 75 bp, synthetic construct
  source 1..75: mol_type = other DNA
aatggtatgcctcatttggctccatcgcagccttcaaaaaaagagtcgtcatctaaaaaatatgatttacctgtt

SEQ ID NO: 320934 - DNA, 75 bp, synthetic construct
  source 1..75: mol_type = other DNA
tcaaatggaatgccggttttaagtcaggcgcaaaaaccggcgacaaaatccagaacgcaggaatattcagtaccc

SEQ ID NO: 320935 - DNA, 75 bp, synthetic construct
  source 1..75: mol_type = other DNA
aaaaattggcaatgatgggctatatgaagaatatacccttgtgctatcgattgatttttttgttgagcttttcaa

SEQ ID NO: 320936 - DNA, 75 bp, synthetic construct
  source 1..75: mol_type = other DNA
tttcgattatattgcaaatattgacaatgtcagaaattattaagtctgcggccttatcatttttagtatttcttg

SEQ ID NO: 320937 - DNA, 75 bp, synthetic construct
  source 1..75: mol_type = other DNA
cgaagaacgcgacattgagctgataaagggccttagggcagacctgcgtgaggcgggtgagagtaatattggtat

SEQ ID NO: 320938 - DNA, 75 bp, synthetic construct
  source 1..75: mol_type = other DNA
ggtatatcgttgccaacctagagccccaggggaatattgatctcgctgacctggttaaccgtctgggattgtcgt

SEQ ID NO: 320939 - DNA, 75 bp, synthetic construct
  source 1..75: mol_type = other DNA
tatctcgctaattacatgtcttcggggtctgcccctcaagaaactgtcgatttatttttagagaatcttgacact

SEQ ID NO: 320940 - DNA, 75 bp, synthetic construct
  source 1..75: mol_type = other DNA
atcgcattcaccatgaattagtgcacgtacatgaaaaaaacttactaacatgcttagcccaaaactttacagtca

SEQ ID NO: 320941 - DNA, 75 bp, synthetic construct
  source 1..75: mol_type = other DNA
cgtggatgatgcgctctccattgatggtaaaacagtgctgttcgcggcgttgagcggcagcctggaaaaccatcc

SEQ ID NO: 320942 - DNA, 75 bp, synthetic construct
  source 1..75: mol_type = other DNA
tccaagattattttttgatccctctgggtgtcgagaaagatggtgatgtaagtatttcgattcttaatgggaaga

SEQ ID NO: 320943 - DNA, 75 bp, synthetic construct
  source 1..75: mol_type = other DNA
gaccgttccggtcgcgccgcctctgtcgcgccgtggcctgcgctccaggcatcccggcaaaaagacgccgggatg

SEQ ID NO: 320944 - DNA, 75 bp, synthetic construct
  source 1..75: mol_type = other DNA
cccgcgccgggaaaagacagcacgccggtggcgctgaaaggggccgcgcttacgcgccgcccctttcattacgcg

SEQ ID NO: 320945 - DNA, 75 bp, synthetic construct
  source 1..75: mol_type = other DNA
gtactggaaggttgcttgaaacaggctgaatttctcaacggtgcttatgatgatgtgaatatatacgcacgtatc

SEQ ID NO: 320946 - DNA, 75 bp, synthetic construct
  source 1..75: mol_type = other DNA
acgtggaaaacggtgcagggcaatatgatgttgcatcaacgtggctacgccaaaatgttcatgatttaccgggag

SEQ ID NO: 320947 - DNA, 75 bp, synthetic construct
  source 1..75: mol_type = other DNA
atgatcgccaccgactggcggcaaatgggccatacgctctccctgcaatccgttgatatcccgctggcggatccg

SEQ ID NO: 320948 - DNA, 75 bp, synthetic construct
  source 1..75: mol_type = other DNA
attggtatcgaccgaatgattatgctgtttacaaacagtcatactattcgcgacgttattctcttcccggcgatg

SEQ ID NO: 320949 - DNA, 75 bp, synthetic construct
  source 1..75: mol_type = other DNA
cgtcgccacccgtgcacggaacgaactgataaggggtttgataacaaccgagaagagaaaaacacaggatgaaca

SEQ ID NO: 320950 - DNA, 75 bp, synthetic construct
  source 1..75: mol_type = other DNA
ttagtcttagtcaatatcttatcaaatctgggcttggaaagcgcattcaatcgaaaggcaattacaatgcacttg

SEQ ID NO: 320951 - DNA, 75 bp, synthetic construct
  source 1..75: mol_type = other DNA
cgcacatttctccggcttgctctacaccatctcaaccctgttttttgccgatccggagttaaccccggacagttt

SEQ ID NO: 320952 - DNA, 75 bp, synthetic construct
  source 1..75: mol_type = other DNA
taagcgatgccaaaccatgtagccgccacatgatcggcatgtccatcaatctgcagaccagcggcccgcattggg

SEQ ID NO: 320953 - DNA, 75 bp, synthetic construct
  source 1..75: mol_type = other DNA
aagaagctgatgaggcacgacgacagattatatcagatgcattgatttcagaggtggccgggatagttgactttg

SEQ ID NO: 320954 - DNA, 75 bp, synthetic construct
  source 1..75: mol_type = other DNA
gtggcgaaacgctcgaacacgcggtggaagtgagtaagacctccatcacgaccgttgcgatgctggaaatgactc

SEQ ID NO: 320955 - DNA, 75 bp, synthetic construct
  source 1..75: mol_type = other DNA
tcaggtatatgttccgaaagggaaaatactggaaaatcttatcagagacatgcgcatctggcatgattttgatgg

SEQ ID NO: 320956 - DNA, 75 bp, synthetic construct
  source 1..75: mol_type = other DNA
agaacaggaaagagaattgagagacttacaccatctgagttggtattgttaaactcaaaagttatgttttttaga

SEQ ID NO: 320957 - DNA, 75 bp, synthetic construct
  source 1..75: mol_type = other DNA
aacatttataatattggttgttatatggacatcaattccattagcgatatcatctgtcatcttatggccaaaagc

SEQ ID NO: 320958 - DNA, 75 bp, synthetic construct
  source 1..75: mol_type = other DNA
gtaacgatccgctctggcagggagtaaaggcggttgtagaaaaaaggatcctgtttctaagcgggttacctttcg

SEQ ID NO: 320959 - DNA, 75 bp, synthetic construct
  source 1..75: mol_type = other DNA
catcctgcgcccgttcctgtacggtggcgcattgctgggattttctggcgcattgttgtcattaattttgtcaga

SEQ ID NO: 320960 - DNA, 75 bp, synthetic construct
  source 1..75: mol_type = other DNA
cctataaaacggtgtataaagccatcagacgcatgcgtaaactagagcaccgcaagcatcaactggatttatttg

SEQ ID NO: 320961 - DNA, 75 bp, synthetic construct
  source 1..75: mol_type = other DNA
gttgccgccgcgttatgcgccgttatcaccttaattgccatgcagtggctgatggcgtttgatgccgccaacctg

SEQ ID NO: 320962 - DNA, 75 bp, synthetic construct
  source 1..75: mol_type = other DNA
ccagcgagcagtttattgcttctacttttcatgcccgcagtcaggtgttgttacctgatgacaacggtatattac

SEQ ID NO: 320963 - DNA, 75 bp, synthetic construct
  source 1..75: mol_type = other DNA
ataatacgggcagcgaaaaactggttcgggcggcggcgcggctggcgtcaaggctggggagcgtctggcacgctg

SEQ ID NO: 320964 - DNA, 75 bp, synthetic construct
  source 1..75: mol_type = other DNA
ttgtaaatattttaaaattaaagcatggcgaactgttgtagaaataagaaaatattatagtctttctccaattaa

SEQ ID NO: 320965 - DNA, 75 bp, synthetic construct
  source 1..75: mol_type = other DNA
aaatattacaactacgataatgagaagttttccacagcaatatttaatggagagaaatgggagttttttactttc

SEQ ID NO: 320966 - DNA, 75 bp, synthetic construct
  source 1..75: mol_type = other DNA
ggcaattctcagcgccttacgtctggcgcaggagctgggcgcggagacggcaacactttctgatccagcggaaga

SEQ ID NO: 320967 - DNA, 75 bp, synthetic construct
  source 1..75: mol_type = other DNA
taggcgaagagcaccgcgccgcagaacaagccaatctcgccagccgcttcgttggtgaagctcaggcattcgcca

SEQ ID NO: 320968 - DNA, 75 bp, synthetic construct
  source 1..75: mol_type = other DNA
ctagtgatatagacagtattgaactatctgtagttcatccgtacactctttataaaaatattttcaaatcatctt

SEQ ID NO: 320969 - DNA, 75 bp, synthetic construct
  source 1..75: mol_type = other DNA
ctgctttcatccggccctggccgcgtgctggagcggctgccgctcaactttgctcgccgctttgttgccggggaa

SEQ ID NO: 320970 - DNA, 75 bp, synthetic construct
  source 1..75: mol_type = other DNA
gtctggcagctttccggtggtcagcgtcaacgggtgggaattgcccgcgcgctggcggctaatcctcagttgtta

SEQ ID NO: 320971 - DNA, 75 bp, synthetic construct
  source 1..75: mol_type = other DNA
atgttacaaaacccaattcatttgcgtctggagcgcctggaaagctggcagcacgtcactttcatggcttgctta

SEQ ID NO: 320972 - DNA, 75 bp, synthetic construct
  source 1..75: mol_type = other DNA
gactgtatgtcttcaggttacacggggcatccggcgttgtttacggccatggtgaaacagttccgtaccgatcta

SEQ ID NO: 320973 - DNA, 75 bp, synthetic construct
  source 1..75: mol_type = other DNA
ccggttaatgcggggatcctgattgtgccgtgcagtcgtggtggctctgcgtttaccgatcgtgatgagggtacc

SEQ ID NO: 320974 - DNA, 75 bp, synthetic construct
  source 1..75: mol_type = other DNA
tcgcaacgtcagcgaactgaccacccgttatggtgtcactttcaatacggtatacaaagccattcgccggatgcg

SEQ ID NO: 320975 - DNA, 75 bp, synthetic construct
  source 1..75: mol_type = other DNA
atgaaacagatgaaagagcaggatttattcgaagacttccgggacgacagcgttctggaataccttaacgattac

SEQ ID NO: 320976 - DNA, 75 bp, synthetic construct
  source 1..75: mol_type = other DNA
aaataccagccggatttgttttacccctccccgaacctgcctcaccccgttcgtcgtccgccacgacgcccttaa

SEQ ID NO: 320977 - DNA, 75 bp, synthetic construct
  source 1..75: mol_type = other DNA
tttcagaatgaagggctgctaccgtggcgcaatgtacgggacaacgtggcgttcggcctgcaactggcaggtgtt

SEQ ID NO: 320978 - DNA, 75 bp, synthetic construct
  source 1..75: mol_type = other DNA
cacgagacgggcaagcaggtgctgttgattacccacgatatcgaagaggcggtgtttatggcgacggagctggtg

SEQ ID NO: 320979 - DNA, 75 bp, synthetic construct
  source 1..75: mol_type = other DNA
acagatattttgcaaaaaacttttctacaattgataaatatattggaaaaaatgtttctatattaagagtggctg

SEQ ID NO: 320980 - DNA, 75 bp, synthetic construct
  source 1..75: mol_type = other DNA
ccgcctgtatatcggtatcgccttctataaagtgggtgaaccttcaaagatagagccagactggatgattaacgg

SEQ ID NO: 320981 - DNA, 75 bp, synthetic construct
  source 1..75: mol_type = other DNA
tccgatcttatgactggcaagattggtgaagatccaggttacgatccgctgcaatttatgctcgacgaagcccac

SEQ ID NO: 320982 - DNA, 75 bp, synthetic construct
  source 1..75: mol_type = other DNA
gcaattctggcagatcagaaaacacagacgcggcggattataaagcctcaatatagttcggatgaatggtctata

SEQ ID NO: 320983 - DNA, 75 bp, synthetic construct
  source 1..75: mol_type = other DNA
cgacaaactggatcatctgcaacgtctcggtataaacacggtctttttccaggtcaagccggacggtaccgcact

SEQ ID NO: 320984 - DNA, 75 bp, synthetic construct
  source 1..75: mol_type = other DNA
aattagcgattagaagaccagcgatactggttgcactggcacttttactgtgtagttgcaaaagcacgcctccag

SEQ ID NO: 320985 - DNA, 75 bp, synthetic construct
  source 1..75: mol_type = other DNA
aaattagcggcaccatcttgttccgtgaggactatctgaataaaccgcagactcaacaagcggtcagctatctgc

SEQ ID NO: 320986 - DNA, 75 bp, synthetic construct
  source 1..75: mol_type = other DNA
aacctttcgtgatgaactgtttgaacattacaaatcacatcgcccgccaatgccggatgatctacgagtgcaaat

SEQ ID NO: 320987 - DNA, 75 bp, synthetic construct
  source 1..75: mol_type = other DNA
gataaagatatggcgcagctggtgacgccaaatattacgcttatcaacaccatgacgaataccatcctcggaccg

SEQ ID NO: 320988 - DNA, 75 bp, synthetic construct
  source 1..75: mol_type = other DNA
tggtgtttgaagttcacaaagacgatctcgatgtggtggcgaagaagatccatcaactgatggaaaactgtactc

SEQ ID NO: 320989 - DNA, 75 bp, synthetic construct
  source 1..75: mol_type = other DNA
gataattatcgtgcgatgccaacgcttagtgagttttttcaccagacctatgttccgttcatcaagcgccataaa

SEQ ID NO: 320990 - DNA, 75 bp, synthetic construct
  source 1..75: mol_type = other DNA
aaccgatatcggaaccccgatgggcatatgaaaaaatactggcacagtgcggtatagacaagaaggtaatgactc

SEQ ID NO: 320991 - DNA, 75 bp, synthetic construct
  source 1..75: mol_type = other DNA
ttgatgaaaatacgctgaaagaatggattacgaagctggaaaaagcgccggtatttgcttttgacaccgaaaccg

SEQ ID NO: 320992 - DNA, 75 bp, synthetic construct
  source 1..75: mol_type = other DNA
aaacacttgttacccatgcgatgaaagtcgtgtatcaggcctcgcaggctgtgggtatacacggaatgttcgtgg

SEQ ID NO: 320993 - DNA, 75 bp, synthetic construct
  source 1..75: mol_type = other DNA
agcttgaagaggataaaatgggagagcagttatcgattccctatccgggcagcccgtttaattctggaggacatt

SEQ ID NO: 320994 - DNA, 75 bp, synthetic construct
  source 1..75: mol_type = other DNA
atgctttacgagcagtttggtgatttgaaattcaaatacaggaacagggagttctggtgcagagggtactacgtc

SEQ ID NO: 320995 - DNA, 75 bp, synthetic construct
  source 1..75: mol_type = other DNA
ataaagcaccagcttgaagaggataaaatgggagagcagttatcgattccctatccgggcagcccgtttacgggc

SEQ ID NO: 320996 - DNA, 75 bp, synthetic construct
  source 1..75: mol_type = other DNA
gcgctggcgggcgcgggggaatttacggtcgcccatccctcatgccatctgctgaccaatatcgcggtggtggag

SEQ ID NO: 320997 - DNA, 75 bp, synthetic construct
  source 1..75: mol_type = other DNA
ttcatagttctgtgcagcaggccgcagcgctggtgccggactatggtgcgctgatgtcctggcggatcgtgcttt

SEQ ID NO: 320998 - DNA, 75 bp, synthetic construct
  source 1..75: mol_type = other DNA
tctcattcattctgcttctggcaggggaattaatcggtcgcggcgtattctatggtttgcatatgaccgtgggga

SEQ ID NO: 320999 - DNA, 75 bp, synthetic construct
  source 1..75: mol_type = other DNA
acggtaactcgttacgtgcgctggtgaaatatctcgataacatgagcgaagaagagattcttgagctgaatatcc

SEQ ID NO: 321000 - DNA, 75 bp, synthetic construct
  source 1..75: mol_type = other DNA
cacaaaaccctaaaacaattgagcaataccagctggcgcgacagcataaatttttattgtggctgttctccgatg

SEQ ID NO: 321001 - DNA, 75 bp, synthetic construct
  source 1..75: mol_type = other DNA
atccagctggttggtaacaacgatcgttctttgttctatccaacaaaatctatcgaaaaattgttcgaagaataa

SEQ ID NO: 321002 - DNA, 75 bp, synthetic construct
  source 1..75: mol_type = other DNA
taaatcacttcctgcttggtcttggcgtgactcagccgaagctggataaagtgactggcgaaaccggtgaagcca

SEQ ID NO: 321003 - DNA, 75 bp, synthetic construct
  source 1..75: mol_type = other DNA
aatgcactctgccaccagcgatgccctgcaggatgacggcttcctttttcagctttatctgcctgatggcgatga

SEQ ID NO: 321004 - DNA, 75 bp, synthetic construct
  source 1..75: mol_type = other DNA
gcgctgttatgccacgacacctttactcatccgcaaccgaccgcgccagaagtacaaaaaccgactctacactaa

SEQ ID NO: 321005 - DNA, 75 bp, synthetic construct
  source 1..75: mol_type = other DNA
accgggcaacggccgcagaagtgtttggtttgccgctagaaaccgtcaccagcgagcaacgccgcagcgcgaaag

SEQ ID NO: 321006 - DNA, 75 bp, synthetic construct
  source 1..75: mol_type = other DNA
atctgaaagggaaaagcagtctgatgctttacgagcagtttggtgatttgaaattcaaatacaggaacagggcgt

SEQ ID NO: 321007 - DNA, 75 bp, synthetic construct
  source 1..75: mol_type = other DNA
atgagcgtatccggctttatgggatatctgaaagggaaaagcagtctgatgctttacgagcagtttggtgatttg

SEQ ID NO: 321008 - DNA, 75 bp, synthetic construct
  source 1..75: mol_type = other DNA
ggtgaaaatgctgaattagctcgttatcatcaagataaagaggttattctgcatgattgtaaggaagagatggga

SEQ ID NO: 321009 - DNA, 75 bp, synthetic construct
  source 1..75: mol_type = other DNA
tgccggggtgattgtgctgcaaggtttgtctctggcgtctattcactcatccgtgcaacaagccagcgcactggt

SEQ ID NO: 321010 - DNA, 75 bp, synthetic construct
  source 1..75: mol_type = other DNA
gtctgggatgctggctgtgtccgttaatccgtcgccatgaacctcacgttatcgggcttgtgctggggttaatcc

SEQ ID NO: 321011 - DNA, 75 bp, synthetic construct
  source 1..75: mol_type = other DNA
cccacgataattattggtcgcaaaggcagcgttggtgctattacctgggctcctgacggaggttggatcattgat

SEQ ID NO: 321012 - DNA, 75 bp, synthetic construct
  source 1..75: mol_type = other DNA
gacgaatgcgacgcagcaacaatcaccgaagaaggttgtccggtggcactaactgcaaaccgtttaactaccttt

SEQ ID NO: 321013 - DNA, 75 bp, synthetic construct
  source 1..75: mol_type = other DNA
aatcacttcctttacatggtatcgctaaccagtccatcgaccctacgtggtaagaccgcaaaggttggattgctt

SEQ ID NO: 321014 - DNA, 75 bp, synthetic construct
  source 1..75: mol_type = other DNA
aaactaagccaatcacacgaccgcaacgtcaaaacatcgccagacgcccaaatagaggccgtagctgggtaacat

SEQ ID NO: 321015 - DNA, 75 bp, synthetic construct
  source 1..75: mol_type = other DNA
ttcgttgatgaatttatccaggctgtgaaacaacgctggccggacgtgctgttgcagtttgaagacttcgcacaa

SEQ ID NO: 321016 - DNA, 75 bp, synthetic construct
  source 1..75: mol_type = other DNA
attccaatcggtaaactgtcgctctataccgcctgtggcggcatcagcccggcgtatacccttccggtggtgctg

SEQ ID NO: 321017 - DNA, 75 bp, synthetic construct
  source 1..75: mol_type = other DNA
ggcggtgttcgtaacgaaggtcttgactgctttaactacggttattgtgcgcgtctgcaagttctagagaaaatc

SEQ ID NO: 321018 - DNA, 75 bp, synthetic construct
  source 1..75: mol_type = other DNA
gaatgggaaaaagacctgctgctgggattaatcagtgacgaagacagggagaaactgaaagcgtaccgcatttac

SEQ ID NO: 321019 - DNA, 75 bp, synthetic construct
  source 1..75: mol_type = other DNA
ggcgctgaacgccttctggcgcgtattcgtggcgaatctgtgacacctaaaatgttagatttaggtttcaccttg

SEQ ID NO: 321020 - DNA, 75 bp, synthetic construct
  source 1..75: mol_type = other DNA
ggcgctgaacgcctgctggcgcgtattcgtggcgaatctgtgacaccgaaaatgttagatttaggtttcaccttg

SEQ ID NO: 321021 - DNA, 75 bp, synthetic construct
  source 1..75: mol_type = other DNA
agccagtcgccgtgcctcgatatcgccgtcggttttgataactttgaagcggcacgccagatgaccaccgccatt

SEQ ID NO: 321022 - DNA, 75 bp, synthetic construct
  source 1..75: mol_type = other DNA
cgaagctcgagcaaaacaaagaagttgcttatctctcataccagctggcgacgattaaaaccgacgttgaactgg

SEQ ID NO: 321023 - DNA, 75 bp, synthetic construct
  source 1..75: mol_type = other DNA
catctgacccggattacattcgtcacgcaccgtcaatgcttgagattttaagtaaagcattccccactattatta

SEQ ID NO: 321024 - DNA, 75 bp, synthetic construct
  source 1..75: mol_type = other DNA
agccacggctggcgagcgtgctgacgccgcgtgagcggatgggcagcattggcgctgaacgcctgctggcgcgta

SEQ ID NO: 321025 - DNA, 75 bp, synthetic construct
  source 1..75: mol_type = other DNA
tgtttatgggcggcccgttactgggttacctgttgctgagtctggctggcgtcgatggctgggcgatgcgtctgc

SEQ ID NO: 321026 - DNA, 75 bp, synthetic construct
  source 1..75: mol_type = other DNA
gtggctggtggtgacgatggttcttggcgtagtctttgtctggatgatggtgcgtgtctataacagcatcgatac

SEQ ID NO: 321027 - DNA, 75 bp, synthetic construct
  source 1..75: mol_type = other DNA
ttcaccgatgcgcgcttttaactcgctcaaccgggtaggggcttcagcactcagtaacgaaatcgccagcggttc

SEQ ID NO: 321028 - DNA, 75 bp, synthetic construct
  source 1..75: mol_type = other DNA
cgtcctgttaccttctctcaccaaccaggttttcgcggaagtattacgcggaatcgaaagcgtcaccgacgcgca

SEQ ID NO: 321029 - DNA, 75 bp, synthetic construct
  source 1..75: mol_type = other DNA
aatataatgcaacagctgatgtaccaactaaatggctggtatggtgcaaacggtggcgtgctacctcagtacttc

SEQ ID NO: 321030 - DNA, 75 bp, synthetic construct
  source 1..75: mol_type = other DNA
atgcagggcgcagagctggcgactattcatagttctgtgcagcaggccgcagcgctggtgccggactatggtgcg

SEQ ID NO: 321031 - DNA, 75 bp, synthetic construct
  source 1..75: mol_type = other DNA
gggtttacacagcgaatggcgtactgctgttagtgtcacgccaacgttagatctgaattattatcacgatcccca

SEQ ID NO: 321032 - DNA, 75 bp, synthetic construct
  source 1..75: mol_type = other DNA
tcaggaaacgtgttgcggatttggcggcacgttctctgtaaaaatggcggagatctctggtgaaatggtgaagga

SEQ ID NO: 321033 - DNA, 75 bp, synthetic construct
  source 1..75: mol_type = other DNA
aggtaaggtctcgctcaacctggaaatcgaaccgtttgatgagaaccgagtgaaaatcaaacacaaactctcata

SEQ ID NO: 321034 - DNA, 75 bp, synthetic construct
  source 1..75: mol_type = other DNA
gcggatatggactgcgctgtgaaaaactcgacaagcccctgaatcttggctggggactggacaatagcgcggtgt

SEQ ID NO: 321035 - DNA, 75 bp, synthetic construct
  source 1..75: mol_type = other DNA
taaattaggggtagtcgatgtaggtgccagtttgcaagggagagcggtgtatcacccatcttgtagcctggcccg

SEQ ID NO: 321036 - DNA, 75 bp, synthetic construct
  source 1..75: mol_type = other DNA
gccgaaaaggttgccgcgcgtatgcaggatctcacctcttttattgttaataaattaggggtagtcgatgtaggt

SEQ ID NO: 321037 - DNA, 75 bp, synthetic construct
  source 1..75: mol_type = other DNA
ttgaagatcagattggcgaacttctcggcgcgaaagtggttgtcctgctggtgggtgaacgtccggggttagggc

SEQ ID NO: 321038 - DNA, 75 bp, synthetic construct
  source 1..75: mol_type = other DNA
ctgaaagcacagtgcgttgctaatccggacgtacaggtcgttgtctccgatggtctgtctactgacgcgatcacc

SEQ ID NO: 321039 - DNA, 75 bp, synthetic construct
  source 1..75: mol_type = other DNA
ctgcaggaagaccagggacaattactgactcttgccggtgaacctgacggaaaactccgcgcagcaggtcattaa

SEQ ID NO: 321040 - DNA, 75 bp, synthetic construct
  source 1..75: mol_type = other DNA
gtgaactacgaagagatcctgccgccgctgatggcgggcctgaaacaggccgggctgaaagtcggcacgccattc

SEQ ID NO: 321041 - DNA, 75 bp, synthetic construct
  source 1..75: mol_type = other DNA
gaagcaaagtgcgccaccaccacctgtgcggcaccggtgacctcggaaagctgcgcgctggatttaggttctgcg

SEQ ID NO: 321042 - DNA, 75 bp, synthetic construct
  source 1..75: mol_type = other DNA
tttgttcgttatggtcgcgtgaagattgaagaccagattggcgaacttctcggcgcgaaagtggtgattctgctg

SEQ ID NO: 321043 - DNA, 75 bp, synthetic construct
  source 1..75: mol_type = other DNA
cggatgacaaaaccgctaccgggcgtattgtgcaacaggcaaaagaagaggcgcgcgtttttttacgccagaaaa

SEQ ID NO: 321044 - DNA, 75 bp, synthetic construct
  source 1..75: mol_type = other DNA
gagtggacaccaccacgttcggcaaactggcctggctggtgccgttctatctgtggcggcgggcgaaaactctcg

SEQ ID NO: 321045 - DNA, 75 bp, synthetic construct
  source 1..75: mol_type = other DNA
actgaatattgcgctggggtatctggatgaacgacggctccgtaaatccggcgttgataccgccgcctttggctg

SEQ ID NO: 321046 - DNA, 75 bp, synthetic construct
  source 1..75: mol_type = other DNA
ctggcggaaatactgaaacaaagtgaagttcccccggcccttccgggtcaccgcattcccggaggcgttgtctgg

SEQ ID NO: 321047 - DNA, 75 bp, synthetic construct
  source 1..75: mol_type = other DNA
ttctgattatttcggtggcctgcgcaatcgggattatgcgaattattaattcagtaaaaaagattgaacgctttt

SEQ ID NO: 321048 - DNA, 75 bp, synthetic construct
  source 1..75: mol_type = other DNA
taaagaaattgccgataagttattgcttagcaataaaacagttagtgcgcataaatctaatatttatggcaagct

SEQ ID NO: 321049 - DNA, 75 bp, synthetic construct
  source 1..75: mol_type = other DNA
acgctggcatttgcccctttgattgggtacatacttgagatgtggactgccgagctgaacggtatgtcatttgaa

SEQ ID NO: 321050 - DNA, 75 bp, synthetic construct
  source 1..75: mol_type = other DNA
agcagtacgggtcggaccggtatgcagtgaactgcatattgccccgtcaacgtattaccactgtcagcaacagcg

SEQ ID NO: 321051 - DNA, 75 bp, synthetic construct
  source 1..75: mol_type = other DNA
aagaagattgattcttacttcaaggccaaaggtgtagaaattgaagggttacaggagttagcggcagttgcgaat

SEQ ID NO: 321052 - DNA, 75 bp, synthetic construct
  source 1..75: mol_type = other DNA
ccgttagaaaagcgaggatcgatactgacagtactcttctgactatgtctcaagaactgggcactacgccagcgt

SEQ ID NO: 321053 - DNA, 75 bp, synthetic construct
  source 1..75: mol_type = other DNA
ccggaagctatcgaagccattatggatggcatgaactggctgaacctggagtgggatgaaggtccgtactaccag

SEQ ID NO: 321054 - DNA, 75 bp, synthetic construct
  source 1..75: mol_type = other DNA
gaggtgttggcggcggtcacaataccggtcgtggcggaaggtaatatcgataccccggaacgcgccgcacgttgc

SEQ ID NO: 321055 - DNA, 75 bp, synthetic construct
  source 1..75: mol_type = other DNA
actgtttgttccgatcagtgtcctcagaggatggtcacagggttgcggtaactggctccctgaattccattatgg

SEQ ID NO: 321056 - DNA, 75 bp, synthetic construct
  source 1..75: mol_type = other DNA
tgcagacatttattggggagctggacggcggcgtatttgaaaccaaaatcggcgcagttctcagtgaagtcgctt

SEQ ID NO: 321057 - DNA, 75 bp, synthetic construct
  source 1..75: mol_type = other DNA
tgctgaccaatatcgccgtggtggaacgtttcttgtcggtgcggtttagtctggtggaggcggatggcgtaacgc

SEQ ID NO: 321058 - DNA, 75 bp, synthetic construct
  source 1..75: mol_type = other DNA
caaaccacgctgttacgtcacggtttttaccctgccggaggcggcgtggtggcaacagaagtctcgccggtggca

SEQ ID NO: 321059 - DNA, 75 bp, synthetic construct
  source 1..75: mol_type = other DNA
tgttgaccaatatcgcggtggtggagcgttttttgccagtgcggtttagtctgactgaagcagacagcgtaacgc

SEQ ID NO: 321060 - DNA, 75 bp, synthetic construct
  source 1..75: mol_type = other DNA
gagcagtttgatgatttgaaattcaaatacaggaacaggaagttctggtgcagagggtactacgtcgatacggtg

SEQ ID NO: 321061 - DNA, 75 bp, synthetic construct
  source 1..75: mol_type = other DNA
agcaccagcttgaagaggataaaatgggggagcagttatcgattccatatccgggcagcccgtttacgggccgta

SEQ ID NO: 321062 - DNA, 75 bp, synthetic construct
  source 1..75: mol_type = other DNA
cggtagtgccggaagctgcatgttggtgctgcaaacggtgttgcctgcgctgtggtttgccgatggaccttctcg

SEQ ID NO: 321063 - DNA, 75 bp, synthetic construct
  source 1..75: mol_type = other DNA
ccgaagtggtggctgcgcagttagtgcaagaggtgaaacgttacctggcgagcccggcggcggtaggggaatatc

SEQ ID NO: 321064 - DNA, 75 bp, synthetic construct
  source 1..75: mol_type = other DNA
tcatttaacaccttgcaacttggcgagcgcgggaacattgtgcggatgcgtggtgaggtgctattagctggtgtg

SEQ ID NO: 321065 - DNA, 75 bp, synthetic construct
  source 1..75: mol_type = other DNA
cggtagcgcaggtagctgcatgttggtgctgcaaacggtattgcccgcgctatggtttgccgacgggtcttcgcg

SEQ ID NO: 321066 - DNA, 75 bp, synthetic construct
  source 1..75: mol_type = other DNA
gcgcacagggcgaaggcggcggacagatcctgcgctcggcgctgagcctgtcgatgataaccggccagccattta

SEQ ID NO: 321067 - DNA, 75 bp, synthetic construct
  source 1..75: mol_type = other DNA
ggcaacggaagtctcgcccgtggcatcgtttaacaccttgcaacttggcgagcgcgggaacattgtgcagatgcg

SEQ ID NO: 321068 - DNA, 75 bp, synthetic construct
  source 1..75: mol_type = other DNA
gtgctgcaaacggtgctgcccgcgctgtggtttgccgatggaccttcgcgtgttgaagtgagcggcggcaccgat

SEQ ID NO: 321069 - DNA, 75 bp, synthetic construct
  source 1..75: mol_type = other DNA
gtactacgtcgatacggtgggtaagaacacggcgaagatacaggattacataaagcaccagcttgaagaggataa

SEQ ID NO: 321070 - DNA, 75 bp, synthetic construct
  source 1..75: mol_type = other DNA
cgcaagtcgtggacactattggcgcaggtgatagccatgctggtggcgtgcttgccggactggcctccggtctcc

SEQ ID NO: 321071 - DNA, 75 bp, synthetic construct
  source 1..75: mol_type = other DNA
gcgaacgcagtactgatgtgcaggcatttattggggagctggacggcggcgtatttgaaaccaaaatcggcgcag

SEQ ID NO: 321072 - DNA, 75 bp, synthetic construct
  source 1..75: mol_type = other DNA
atgggggacgaaaagagcttagcgcacacccgctggaactgtaaatatcacatagtttttgcgccaaaataccga

SEQ ID NO: 321073 - DNA, 75 bp, synthetic construct
  source 1..75: mol_type = other DNA
tgctgcctgaattaacctcgcgtcagccagttatggtgattggcgcggcggtcattgatgtgatcgccgacgctt

SEQ ID NO: 321074 - DNA, 75 bp, synthetic construct
  source 1..75: mol_type = other DNA
ctcggtcagggagtatgggcggagattattcgcaaccggatggcgaaagagggattaatcagcctcatcgataac

SEQ ID NO: 321075 - DNA, 75 bp, synthetic construct
  source 1..75: mol_type = other DNA
cgcaagtcgtagacacaattggcgcgggcgatagccacgcaggtggcgtactggccgggctggcatctggtctgc

SEQ ID NO: 321076 - DNA, 75 bp, synthetic construct
  source 1..75: mol_type = other DNA
aagtttttgtttttatttcgccttgatttaaatagaaaattagcattgcgtttccttaaagggcaaaataaactt

SEQ ID NO: 321077 - DNA, 75 bp, synthetic construct
  source 1..75: mol_type = other DNA
aaagctgtgtgagtggaaaagcgtacggattcttgaagctgaatgctgtgcagatcatatccatatgcttgtgga

SEQ ID NO: 321078 - DNA, 75 bp, synthetic construct
  source 1..75: mol_type = other DNA
atgatggcggggaaatccccgcttttttctgccggtccccggacagagcacaaaggaagtcgccgccggctccgc

SEQ ID NO: 321079 - DNA, 75 bp, synthetic construct
  source 1..75: mol_type = other DNA
accgcccggtgtcgcggaatatgtgaacaacggaggaaatcccatgcagtatgcgaaacctgtcactctgaatgt

SEQ ID NO: 321080 - DNA, 75 bp, synthetic construct
  source 1..75: mol_type = other DNA
aaccatttcttgttcgttaaagaaggtattaaaagattttcattaggcgaagcacttgccgatttaaatgaaaat

SEQ ID NO: 321081 - DNA, 75 bp, synthetic construct
  source 1..75: mol_type = other DNA
acattatgggcgaaattgcttctgcttctgatgagcagagccgtggtatcgatcaggttggcttagcggttgctg

SEQ ID NO: 321082 - DNA, 75 bp, synthetic construct
  source 1..75: mol_type = other DNA
ctgcaccaggcgattgtcgatgcgattgtccaaagcgatggcgacgcggcatttaaagcttgtcaggcgctgcta

SEQ ID NO: 321083 - DNA, 75 bp, synthetic construct
  source 1..75: mol_type = other DNA
tcaatacgttaatggccgaaatggcggcattaaaagagaactttcgccgtgaacgctggatcgaagtcgatatgg

SEQ ID NO: 321084 - DNA, 75 bp, synthetic construct
  source 1..75: mol_type = other DNA
atggatcagaacaatattggcagcggttcaaccgtcgccgagctgatgcagagtgccactatttcgttgaaacac

SEQ ID NO: 321085 - DNA, 75 bp, synthetic construct
  source 1..75: mol_type = other DNA
cggtgatgtgcgcaacggggccaatgccatctatagcggtgccagcgaaatcgccaccggcaataacgatctctc

SEQ ID NO: 321086 - DNA, 75 bp, synthetic construct
  source 1..75: mol_type = other DNA
ggcagtgttccggattcagcaacagcagcaacagcagcgtgaaacatcggctgtggtaaaaaccgtgacgccagc

SEQ ID NO: 321087 - DNA, 75 bp, synthetic construct
  source 1..75: mol_type = other DNA
tgctctggtggaccctatgtcgtctccgagaatgacgagcattttgtcattggaagtctggttggaataatgtct

SEQ ID NO: 321088 - DNA, 75 bp, synthetic construct
  source 1..75: mol_type = other DNA
tgaatgagacaacaatttcgacattccctggtgaagtttcaggcatttggcctttaaattgctcaaatcattctc

SEQ ID NO: 321089 - DNA, 75 bp, synthetic construct
  source 1..75: mol_type = other DNA
tatcccgtcagcaatacacttaaactttacgtcaaatttcttaaccatcaaggactggtgaacgaagagcctgtt

SEQ ID NO: 321090 - DNA, 75 bp, synthetic construct
  source 1..75: mol_type = other DNA
cgtacagcggtacgcgaagcggtcaaaacgttaacggcaaaagggatggttttaccgcgaccgcgaattggtacc

SEQ ID NO: 321091 - DNA, 75 bp, synthetic construct
  source 1..75: mol_type = other DNA
atctgcgagaattgagcagtttcttagcatctatagtcaaacaatgcaacatataccatttataggttatggatt

SEQ ID NO: 321092 - DNA, 75 bp, synthetic construct
  source 1..75: mol_type = other DNA
ttcaagagttatttggagtaagtccaatatctaaagttctttcagataagttagaacaacttcaagatattattg

SEQ ID NO: 321093 - DNA, 75 bp, synthetic construct
  source 1..75: mol_type = other DNA
ggccggggcggccatctccgccggtgccgggaatgaggttgcaaggtggctggcggagtgtgaggtgccattccg

SEQ ID NO: 321094 - DNA, 75 bp, synthetic construct
  source 1..75: mol_type = other DNA
catatcagaaaagagacgaggtctatcagacaattttagaaaatatacctattgatgcaagttactccttacctc

SEQ ID NO: 321095 - DNA, 75 bp, synthetic construct
  source 1..75: mol_type = other DNA
ggtacttcttatactgcatcagaaatttctatcaaacgtgttcctgatgggctgtgtcgagttagtaactcattg

SEQ ID NO: 321096 - DNA, 75 bp, synthetic construct
  source 1..75: mol_type = other DNA
accggtgattacagcaaccagcatattgtgccgatgaagcaggctgtcgctccgcaatttgaagcgcgaaacgat

SEQ ID NO: 321097 - DNA, 75 bp, synthetic construct
  source 1..75: mol_type = other DNA
gaacggaaggctatggtgtggagttcgggctggaaaactatgatcacatggcagatttagcgcgaaggatcaaag

SEQ ID NO: 321098 - DNA, 75 bp, synthetic construct
  source 1..75: mol_type = other DNA
gggaactggtgaacctctatcgggtggtcaagcatcatctggaagaatttattcgccagttcaaatgggcgctgg

SEQ ID NO: 321099 - DNA, 75 bp, synthetic construct
  source 1..75: mol_type = other DNA
atccgaaagttcttttagcagagaatgttcgagggttgctaaatcatgatgatggacgaactttagaaacaataa

SEQ ID NO: 321100 - DNA, 75 bp, synthetic construct
  source 1..75: mol_type = other DNA
cctacctggatgatatcgccgtgaagcagtggcgggaaaaatcgcggcagcttgcggagcggggagacctgaccc

SEQ ID NO: 321101 - DNA, 75 bp, synthetic construct
  source 1..75: mol_type = other DNA
gggaggattatttaaagtaaaaatgccgattacctttaagttgaaggaggctttgttgaataaatcgaacttttg

SEQ ID NO: 321102 - DNA, 75 bp, synthetic construct
  source 1..75: mol_type = other DNA
aaacgttacccaggtgatgccagaaaacgcgcacgaactggcacagccgtagtgacttttaccgttaacgcggaa

SEQ ID NO: 321103 - DNA, 75 bp, synthetic construct
  source 1..75: mol_type = other DNA
ggcggacaaagttcctgccgatcaactgcgtaaaggtgacatcgtggctggtagaagctggcgatattatcccct

SEQ ID NO: 321104 - DNA, 75 bp, synthetic construct
  source 1..75: mol_type = other DNA
agcaagcgtatcagaaagggatatatctattaccagcagcggtacgaccactgttacatggtcgtaccttaagaa

SEQ ID NO: 321105 - DNA, 75 bp, synthetic construct
  source 1..75: mol_type = other DNA
aggcttgagcatgtatgggtgcgtcgcagtcgcggtggtttctacaaaaacaccggcacgacgatccattatgag

SEQ ID NO: 321106 - DNA, 75 bp, synthetic construct
  source 1..75: mol_type = other DNA
ctgaaatcctgggcaatacgaaaaaatgcggcaccgggacagattgctctggcatggctcctggcccgtaaagcc

SEQ ID NO: 321107 - DNA, 75 bp, synthetic construct
  source 1..75: mol_type = other DNA
ggtgaccagctgccaccagaagttatccaggtactgaaagatcgcggtcagccgatgactatccataacctcatc

SEQ ID NO: 321108 - DNA, 75 bp, synthetic construct
  source 1..75: mol_type = other DNA
cctgatagtgatgtcagacgatccgaacgatgaaacagagaaactggcagaggccattaatgcggagtttgctga

SEQ ID NO: 321109 - DNA, 75 bp, synthetic construct
  source 1..75: mol_type = other DNA
atttcgttagaggaagttgctgagaatgctcagctaaagcaaaagctaagagctaatgctttcacattgcttacg

SEQ ID NO: 321110 - DNA, 75 bp, synthetic construct
  source 1..75: mol_type = other DNA
ccccggaagagcagcaggccgctcagcagcaacaggcccaggagcagcaacaacaggaactgcagatgcgcgaaa

SEQ ID NO: 321111 - DNA, 75 bp, synthetic construct
  source 1..75: mol_type = other DNA
caggattcaggtgcgacgtcaggcgtggctatcagtaacctggtggagcagggggccacaacccttgcggaaatc

SEQ ID NO: 321112 - DNA, 75 bp, synthetic construct
  source 1..75: mol_type = other DNA
gaatgaatggcttcagcgtgaacgccgtcgtgtgctgcttcaggtggtttattaccgtacattcgagcgtcttcc

SEQ ID NO: 321113 - DNA, 75 bp, synthetic construct
  source 1..75: mol_type = other DNA
cgccgggttactggctgaagcatcggtggttatccgccgtatgaaagggttgaaacgggcaacggtgaaaaaagt

SEQ ID NO: 321114 - DNA, 75 bp, synthetic construct
  source 1..75: mol_type = other DNA
caggaaagcgaggacacacgcgccaccttactggctgaagcctcgctggtcatgcgtaacatgctggggcacaga

SEQ ID NO: 321115 - DNA, 75 bp, synthetic construct
  source 1..75: mol_type = other DNA
gaagcggtactgtccgtaaaaccggctctggttcactgaccgttggcaataatgctgtctggaccgggcagactg

SEQ ID NO: 321116 - DNA, 75 bp, synthetic construct
  source 1..75: mol_type = other DNA
tgtcagccggaatgaggttttctgggactggctgagccgggaggctgatttaagtgactgccgctggctgatgcg

SEQ ID NO: 321117 - DNA, 75 bp, synthetic construct
  source 1..75: mol_type = other DNA
ctgaatccggcccgaaaaaatcagaaaagcgttgctgatgttttccgggttgaacaggattttcaggttgccagc

SEQ ID NO: 321118 - DNA, 75 bp, synthetic construct
  source 1..75: mol_type = other DNA
gggacaggaaagcatggaaacccgtgcggggttactggctgaagcatcggtggtgatccgccgtatgaaagggct

SEQ ID NO: 321119 - DNA, 75 bp, synthetic construct
  source 1..75: mol_type = other DNA
agacgaattggttgcggcgttggaatccgcagagaagcgcattgcagaactggaagcacgggaaatatcgctccc

SEQ ID NO: 321120 - DNA, 75 bp, synthetic construct
  source 1..75: mol_type = other DNA
attacagcgacattcctgcttctggtagcgaagcatggtctgacgccacacgcggcaattttttgccagatccag

SEQ ID NO: 321121 - DNA, 75 bp, synthetic construct
  source 1..75: mol_type = other DNA
cccgcacaactggactttcgataacggctatatgcatccgggagacaaaccgggtcttggcatcgaatttgatga

SEQ ID NO: 321122 - DNA, 75 bp, synthetic construct
  source 1..75: mol_type = other DNA
acgttaaagcgactttttaaggatcctgaacaggttaaattcggcagtgtgttcgcggtggcgaatgttcttgga

SEQ ID NO: 321123 - DNA, 75 bp, synthetic construct
  source 1..75: mol_type = other DNA
tgccagagcggcgcaagctattagtcgctggcgccggtattgccgccgcctcgctgattccgcacgtatcagcgg

SEQ ID NO: 321124 - DNA, 75 bp, synthetic construct
  source 1..75: mol_type = other DNA
atgagcatggttaaacataaacgaggggcaccctctacactcgatgtgcagcatgaggccgaactgaaggcactg

SEQ ID NO: 321125 - DNA, 75 bp, synthetic construct
  source 1..75: mol_type = other DNA
atgagcatggttaaacataaacgagggacaccctctacactcgatgtgcagcatgaggccgaactgaaggcgctg

SEQ ID NO: 321126 - DNA, 75 bp, synthetic construct
  source 1..75: mol_type = other DNA
aaaagcgcatgactggcgctgactggctgacagcgattgagatgtacaaaccaactgtgcgcatcgtggaagtta

SEQ ID NO: 321127 - DNA, 75 bp, synthetic construct
  source 1..75: mol_type = other DNA
agcggtcgtgtggtttatgtcggttacgccaaacagccagtgagttatcagagtgcgcagttcctgatgaaagaa

SEQ ID NO: 321128 - DNA, 75 bp, synthetic construct
  source 1..75: mol_type = other DNA
aagccttgctcaccccaggcgaagttgcgaaacgcagtggtgtggcggtatcgacgctgcatttttatgagagca

SEQ ID NO: 321129 - DNA, 75 bp, synthetic construct
  source 1..75: mol_type = other DNA
cgtgatgtgttgcgatatgtcgcaattatcaaaattgctcagcgtattggcattccgctggcgaccattcgtgaa

SEQ ID NO: 321130 - DNA, 75 bp, synthetic construct
  source 1..75: mol_type = other DNA
ccggggggtattgaaatggaaattaccggggaagcggttaacaccgaacaggaaaatccgcccagcacaaagcga

SEQ ID NO: 321131 - DNA, 75 bp, synthetic construct
  source 1..75: mol_type = other DNA
gcgtttggtgtgttgcccgaagggcatacgttaagtgcgaaagagtggaaacagctatcttcgcaatggcgagaa

SEQ ID NO: 321132 - DNA, 75 bp, synthetic construct
  source 1..75: mol_type = other DNA
tcggcgctgcacttctatgaaagcaaaggattgattaccagtatccgcaatagcggtaatcagcggcgatataag

SEQ ID NO: 321133 - DNA, 75 bp, synthetic construct
  source 1..75: mol_type = other DNA
tcacgcagtgactgcccgttgcgtaaccctggcgaccgtttaggagaggaaggaacaggcgcgcgtttgttggaa

SEQ ID NO: 321134 - DNA, 75 bp, synthetic construct
  source 1..75: mol_type = other DNA
gatcccgcccaaaatgagcgtatcaggctttatgggatatctgaaagggaaaagcagtctgatgctttacgagca

SEQ ID NO: 321135 - DNA, 75 bp, synthetic construct
  source 1..75: mol_type = other DNA
acacccgatggaactgtaaatatcacatagtatttgcgccaaaataccgaagacaggtgttctacagagagaagc

SEQ ID NO: 321136 - DNA, 75 bp, synthetic construct
  source 1..75: mol_type = other DNA
atggaacttaatgaaaggaatattacgatgaatataaaaattgctgctttaacgctggctattgccagcggtatt

SEQ ID NO: 321137 - DNA, 75 bp, synthetic construct
  source 1..75: mol_type = other DNA
gtttggtgatttgaaattcaaatacaggaacagggagttctggtgcagagggtattacgtcgacctgaaccgccc

SEQ ID NO: 321138 - DNA, 75 bp, synthetic construct
  source 1..75: mol_type = other DNA
gaacacggcgaagatacgggaatacataaagcaccagcttgaagaggataaaacgggcagcccgtttacgggccg

SEQ ID NO: 321139 - DNA, 75 bp, synthetic construct
  source 1..75: mol_type = other DNA
ggtactatgtcgatacggtgggtaagaacacggcgaagatacgggaatacataaagcaccagcttgaagaggata

SEQ ID NO: 321140 - DNA, 75 bp, synthetic construct
  source 1..75: mol_type = other DNA
catcaggtcatcgatcactttctggttatgcgtatctgtctggagccgcaagcttgcctactggctgcaacggtt

SEQ ID NO: 321141 - DNA, 75 bp, synthetic construct
  source 1..75: mol_type = other DNA
ggacaattaaccagaaaaaggctgcggccccttccgggcagaaggcatctgattcgccggttaatccgtctgata

SEQ ID NO: 321142 - DNA, 75 bp, synthetic construct
  source 1..75: mol_type = other DNA
cgtttttcaccaaccgggtgacaaaagcactgggaatgactctggcgctgatgatgacctgtcagagtgcgatgg

SEQ ID NO: 321143 - DNA, 75 bp, synthetic construct
  source 1..75: mol_type = other DNA
acaaggtaagcagacactaagagttattgttgcatcggaccatttaccccaagacaaggagtcagtgtattggtt

SEQ ID NO: 321144 - DNA, 75 bp, synthetic construct
  source 1..75: mol_type = other DNA
tttcgtggactcatcgaacggacgagctacaaacgtgatctaccgtttttgcactaggtggcaaaacctatgcgc

SEQ ID NO: 321145 - DNA, 75 bp, synthetic construct
  source 1..75: mol_type = other DNA
tgttaaagccggatcgctaattaaattgcatcccttccaacgtggaatgatggacgcgatcaccgaagaccgtag

SEQ ID NO: 321146 - DNA, 75 bp, synthetic construct
  source 1..75: mol_type = other DNA
gctccaatccttccggtaaaagacacaagaacgggcggttttacccttaaaattctgggcgtaaacaaccttaag

SEQ ID NO: 321147 - DNA, 75 bp, synthetic construct
  source 1..75: mol_type = other DNA
ggacgattaataagaagaaaccgacagcatcggaagcagcaaaaacggaggaagcagataccgtagagcagaaat

SEQ ID NO: 321148 - DNA, 75 bp, synthetic construct
  source 1..75: mol_type = other DNA
agcgtcttccggggagaaggtatctgattcgtcggttaatttgcctgataaagcagataaagcagataaaaaata

SEQ ID NO: 321149 - DNA, 75 bp, synthetic construct
  source 1..75: mol_type = other DNA
gctgggggagcaatttggagtgagtcgtaccgcagtgcgggaagcggtcaagacgttgacagcaaaaggaatggt

SEQ ID NO: 321150 - DNA, 75 bp, synthetic construct
  source 1..75: mol_type = other DNA
ggacgattaaccagaagaaatcagcaatatcgtctgcacagaagtcatctgatacagagggtaattcatctgata

SEQ ID NO: 321151 - DNA, 75 bp, synthetic construct
  source 1..75: mol_type = other DNA
gcacagaaactgctgatgttcatgccgggtgatgaagtgccggtgaaaggcaacgtggcgaaagtggattcgctg

SEQ ID NO: 321152 - DNA, 75 bp, synthetic construct
  source 1..75: mol_type = other DNA
ggacaattaaccagaaaaaaacgccagcgacttccgagcagaaggtatctgattcgccggttaatttgtctgata

SEQ ID NO: 321153 - DNA, 75 bp, synthetic construct
  source 1..75: mol_type = other DNA
ccagcccgctgacgcaacgtgaatggcaggtactggggctgatctactctggttacagcaatgagcaaattgccg

SEQ ID NO: 321154 - DNA, 75 bp, synthetic construct
  source 1..75: mol_type = other DNA
tgatagcgacttcctttttcatatgcaggggaagccgttgtttcgctttgcctcttcgcttatcgaagactattt

SEQ ID NO: 321155 - DNA, 75 bp, synthetic construct
  source 1..75: mol_type = other DNA
tatcattgacctgctataccaacaccgtgtcgatccggatgtacctattgaagatgttgcgggaacagtgaagga

SEQ ID NO: 321156 - DNA, 75 bp, synthetic construct
  source 1..75: mol_type = other DNA
gtcaggctatcgagctcattcgcgcagcggttgaacgtggcgtcaccttcttcgataccgctgaagtgtatggcc

SEQ ID NO: 321157 - DNA, 75 bp, synthetic construct
  source 1..75: mol_type = other DNA
gcgagttgattaccgatgtgcctgataaagagatgctcgggctgaacattgtggaatttgctggtgatgatgagg

SEQ ID NO: 321158 - DNA, 75 bp, synthetic construct
  source 1..75: mol_type = other DNA
caaacagatgctcgggctgaacattgttgaatttgccggagacgatgaagcacttatcgatcagcaggtgaatgc

SEQ ID NO: 321159 - DNA, 75 bp, synthetic construct
  source 1..75: mol_type = other DNA
gcgctgcatgaagcggtgattagcggtcgtttcactgcggataaacctgcgatgttgattggcacggcggcggga

SEQ ID NO: 321160 - DNA, 75 bp, synthetic construct
  source 1..75: mol_type = other DNA
gtaaagcatggttgggtaaagcaagtgagtgattggccattctcaacgttccatcgcgatgtcgcgcgagggtta

SEQ ID NO: 321161 - DNA, 75 bp, synthetic construct
  source 1..75: mol_type = other DNA
tctattacagtattgcggaagaaagtgcactcactaatttcacatacgacaaactggtatatgttattgctgaca

SEQ ID NO: 321162 - DNA, 75 bp, synthetic construct
  source 1..75: mol_type = other DNA
ataaaaatcagtttattgattataaaaatgatccattaagggctaatcaatacagtgtcgcggccaaaatattta

SEQ ID NO: 321163 - DNA, 75 bp, synthetic construct
  source 1..75: mol_type = other DNA
cagccagctgctggcgtcattgatttttgtgacgttgattattggaacgcactgggcgaagggacatacgcagtt

SEQ ID NO: 321164 - DNA, 75 bp, synthetic construct
  source 1..75: mol_type = other DNA
tcaaagggggaacctggtttttcacggtgaatttacggaatcgtcgaagccaacttttgactacccagtaccaga

SEQ ID NO: 321165 - DNA, 75 bp, synthetic construct
  source 1..75: mol_type = other DNA
atcgccatcatgttgattatatttatataaatccagtgaaacatggctgggtaaagcaggtgagtgattggccat

SEQ ID NO: 321166 - DNA, 75 bp, synthetic construct
  source 1..75: mol_type = other DNA
aactgcctgaatccggcgtcagtttgcggacgttaattgcccgcacgcgcaatagctggcatgcgaataaaggcg

SEQ ID NO: 321167 - DNA, 75 bp, synthetic construct
  source 1..75: mol_type = other DNA
gaccgacaacagtatttatcaacttcttcccgatgcagtggtatttccacgttcaaccgcagatgtggcgctgct

SEQ ID NO: 321168 - DNA, 75 bp, synthetic construct
  source 1..75: mol_type = other DNA
cggtggtttgttgtggggcgagcacggcaaaggttttcgcgccgaatacagcccggcgtttttcggtgaggaact

SEQ ID NO: 321169 - DNA, 75 bp, synthetic construct
  source 1..75: mol_type = other DNA
atcgccagccagcaagcaggtgtgatcggctggcaggtatgcagtgagctggcaggtgttgagcgtatttatgcg

SEQ ID NO: 321170 - DNA, 75 bp, synthetic construct
  source 1..75: mol_type = other DNA
ttttaatgtaattgatagcgttaataatttaggcctcggagtaactccaaagctcgatgaaatcatgaagaaatc

SEQ ID NO: 321171 - DNA, 75 bp, synthetic construct
  source 1..75: mol_type = other DNA
tcccctgcgtataattatccagcaattgcaaaaaaattcttaaaaacagatatttggtatgatgagtcacttctt

SEQ ID NO: 321172 - DNA, 75 bp, synthetic construct
  source 1..75: mol_type = other DNA
gatggctttaggtttagaaaaagccggtttaaaatctgttttactaaatgaaattgactcccatgcttgtaagac

SEQ ID NO: 321173 - DNA, 75 bp, synthetic construct
  source 1..75: mol_type = other DNA
agaaggtctcgatgcaccgatgatgaaagtggacgcggtgaagcgcggtacattcgaccggcagatccccattgc

SEQ ID NO: 321174 - DNA, 75 bp, synthetic construct
  source 1..75: mol_type = other DNA
ctcggcaaacatgacgctggaacagcttgaagctctcaatgcagagcagaaagcgcgcacggtgttggtggtgca

SEQ ID NO: 321175 - DNA, 75 bp, synthetic construct
  source 1..75: mol_type = other DNA
taacgatgagatgaccgagttcgacctgacgcgcattctgacgggttcagaagggacgctggcctttattaccga

SEQ ID NO: 321176 - DNA, 75 bp, synthetic construct
  source 1..75: mol_type = other DNA
aatgtgcccgtcgatgaagataacccagaatcgtatccattcaccgaaagggcgcgcgacgctggtgcgcgaatg

SEQ ID NO: 321177 - DNA, 75 bp, synthetic construct
  source 1..75: mol_type = other DNA
tgcgtaccgccggaacatctggcggattatattgctgaatttcgcgcactgctcgacagtcacggtttaagctat

SEQ ID NO: 321178 - DNA, 75 bp, synthetic construct
  source 1..75: mol_type = other DNA
cgcacttgagtcacagccagtggctacagtcagcggtgaatcatggtatttctttggtcactgtaccgaagttac

SEQ ID NO: 321179 - DNA, 75 bp, synthetic construct
  source 1..75: mol_type = other DNA
cctatgacttcgacttcggtttaagtctgggtgctgcatattctaattctgaccgtactgacaatcaggttcaca

SEQ ID NO: 321180 - DNA, 75 bp, synthetic construct
  source 1..75: mol_type = other DNA
aactttgaagttgttgctcagtatcagttcgactttggtctgcgcccgtccatcgcttacctgcaatctaaaggt

SEQ ID NO: 321181 - DNA, 75 bp, synthetic construct
  source 1..75: mol_type = other DNA
ggtgaaacagcagaagcatggaccgttggtgctaaatacgacgctaataacgtttacttagcagctatgtatgct

SEQ ID NO: 321182 - DNA, 75 bp, synthetic construct
  source 1..75: mol_type = other DNA
aacgatcctctgttattgcaggaaagccaggacgctgttcgtcaggtagctgcggcacaaggattcgaagaacac

SEQ ID NO: 321183 - DNA, 75 bp, synthetic construct
  source 1..75: mol_type = other DNA
aacgccagtctgcccatacgccactgcgtgcgttgtttgataagcatcgggtatggcagaaccgccggggcatga

SEQ ID NO: 321184 - DNA, 75 bp, synthetic construct
  source 1..75: mol_type = other DNA
tagatggttttctgaaaggtaaatgcatcccacgagatttaaaggttaacgaaacaaacgctgaatatcttgtcc

SEQ ID NO: 321185 - DNA, 75 bp, synthetic construct
  source 1..75: mol_type = other DNA
ttgctgacgaagcgcactggcggcggctcgcctcacgcttcggcgtgcgtatgccctcggcgtatgttcccggct

SEQ ID NO: 321186 - DNA, 75 bp, synthetic construct
  source 1..75: mol_type = other DNA
atgttggggcaaatcggcacacccggcggcggttttggtctttcttaccattttgccaatggtggtgaccccacg

SEQ ID NO: 321187 - DNA, 75 bp, synthetic construct
  source 1..75: mol_type = other DNA
cgccgaatgggcggcagagatttgtggtgttggcgcagcgaaaatccgcgagctggcggctcttttccaccaaaa

SEQ ID NO: 321188 - DNA, 75 bp, synthetic construct
  source 1..75: mol_type = other DNA
cctgctggacaacgacgatgatttctacaaagaaaacggcatcgctaccgatgatatcgtagctgtaggtttagt

SEQ ID NO: 321189 - DNA, 75 bp, synthetic construct
  source 1..75: mol_type = other DNA
ttgattacaaaatcaacctgctggacaacgacgacgacttctacaaagcaaacggcatcgctaccgatgatatcg

SEQ ID NO: 321190 - DNA, 75 bp, synthetic construct
  source 1..75: mol_type = other DNA
tactgctactcgtctcgcatttgcgggtttaggttttggtcagaacggtaccttcgactatggtcgtaactacgg

SEQ ID NO: 321191 - DNA, 75 bp, synthetic construct
  source 1..75: mol_type = other DNA
tccgcgcacagctcaatgaagggctgcgcgcggcgtaccttcttcttggtaacgatcccctgttgctgcaggaaa

SEQ ID NO: 321192 - DNA, 75 bp, synthetic construct
  source 1..75: mol_type = other DNA
acacagaaaagtgctgacagtagcctgattattgacggaaacattaatacgcacaatgacattactgtacggaat

SEQ ID NO: 321193 - DNA, 75 bp, synthetic construct
  source 1..75: mol_type = other DNA
aacgggttcagccagtcgtttaagaagattgcggcaactgatgttggtaccattatcaccaatacttctgataaa

SEQ ID NO: 321194 - DNA, 75 bp, synthetic construct
  source 1..75: mol_type = other DNA
gacagcggttccggattttatctttatgacaatcagagaaaaaaatgggtcattcttggaacaacatatggtaaa

SEQ ID NO: 321195 - DNA, 75 bp, synthetic construct
  source 1..75: mol_type = other DNA
cagaagatccgtgtggtgcggagcaaggtttctccgggcgtgaagtgatggcagagttccgtcgcgcaactggcc

SEQ ID NO: 321196 - DNA, 75 bp, synthetic construct
  source 1..75: mol_type = other DNA
tattctgggaacattgacaggaaaagtattctccagtaaggactcctgggctttttttgcccgatatgatcagaa

SEQ ID NO: 321197 - DNA, 75 bp, synthetic construct
  source 1..75: mol_type = other DNA
gtatcctcaaataagggctcctgggctttttttgcccgatatgaccagaatacagtcgataccctgaaaaatact

SEQ ID NO: 321198 - DNA, 75 bp, synthetic construct
  source 1..75: mol_type = other DNA
gaccaggataaagaagataacctggacaaaaccacacacataccgctggctacaggtttgctgggtggctttgat

SEQ ID NO: 321199 - DNA, 75 bp, synthetic construct
  source 1..75: mol_type = other DNA
gagcatgatgaccagtacagcaaatcgcagttactgtgggcatcctcatgctacgtactgaatgccatccatcca

SEQ ID NO: 321200 - DNA, 75 bp, synthetic construct
  source 1..75: mol_type = other DNA
aagtcaccacgacccgcgacgaactgacgttattgcggcagtgcccggtattgctggagcgtgaggtctctgacc

SEQ ID NO: 321201 - DNA, 75 bp, synthetic construct
  source 1..75: mol_type = other DNA
taccccacaatcaactccagaagataaaaaaataactggtccaaccctaatagaaacaaaaatgagtggcgatat

SEQ ID NO: 321202 - DNA, 75 bp, synthetic construct
  source 1..75: mol_type = other DNA
tttgtgaaaaggattatgtttcaggcatacagcaacaggaaaactcagccaataaaaataataatacagattata

SEQ ID NO: 321203 - DNA, 75 bp, synthetic construct
  source 1..75: mol_type = other DNA
agacagcaatgcaagcagccacgccttcagtggtaaaaccaaatccgtggggggagggttgtacgcttcagcact

SEQ ID NO: 321204 - DNA, 75 bp, synthetic construct
  source 1..75: mol_type = other DNA
agccacaggaatggaaaactccttgcagagcgcggttcgcgaccaggttcacagcaatacgcgggtacgatttcc

SEQ ID NO: 321205 - DNA, 75 bp, synthetic construct
  source 1..75: mol_type = other DNA
ccggttccgccgccgtcagtcccgcagggcggcatgaacgggttcagtaccgaccagatgctcaaccagctgggc

SEQ ID NO: 321206 - DNA, 75 bp, synthetic construct
  source 1..75: mol_type = other DNA
atgaaaaaggttattgcggtttcagcgcttacaatggcaggcatgttttcggcccagactctggctgatgaggat

SEQ ID NO: 321207 - DNA, 75 bp, synthetic construct
  source 1..75: mol_type = other DNA
tcagcatgccaccacagagatgcaggtgacggcagcgcagatgcagaagcagtatgaggaaatccgtcgtgaact

SEQ ID NO: 321208 - DNA, 75 bp, synthetic construct
  source 1..75: mol_type = other DNA
atgacgcaacgggatgttttgtggggctggaagcctggggggatgtgtccagtgaacgtgccattgtacgcaccc

SEQ ID NO: 321209 - DNA, 75 bp, synthetic construct
  source 1..75: mol_type = other DNA
gcaaaagcatccggctggcgaaccattaaaaacgctgcaatctttccgtacagcccaggataacggcgatgtcga

SEQ ID NO: 321210 - DNA, 75 bp, synthetic construct
  source 1..75: mol_type = other DNA
gcccgccatgccagcgaaattcgccagcatgtgctgaacaccacccgactggtgaataatttgctggatatggcg

SEQ ID NO: 321211 - DNA, 75 bp, synthetic construct
  source 1..75: mol_type = other DNA
gccaccgtcattaatgtactgagtttcgacctcttttttattgccccacgcgggacactcgccgtctctgacgtc

SEQ ID NO: 321212 - DNA, 75 bp, synthetic construct
  source 1..75: mol_type = other DNA
gctatcatgtctcccgcttgtactctcctatcaactctatcaaatcaattgttgccgactttgccgaagcacatt

SEQ ID NO: 321213 - DNA, 75 bp, synthetic construct
  source 1..75: mol_type = other DNA
atttgtcgggcgatagtggatgtacacggcggcaccattaccgcattcaaccgaccggaaggtggtgcctgtttt

SEQ ID NO: 321214 - DNA, 75 bp, synthetic construct
  source 1..75: mol_type = other DNA
ctgtatctgcttggcgtcgtggtggtggcactattttacggacgctggccttcggtggttgccaccgtcatttaa

SEQ ID NO: 321215 - DNA, 75 bp, synthetic construct
  source 1..75: mol_type = other DNA
ctggcattgatgttttcactaccgtcaacgttcagcatctggaaagcctgaacgatgtggtcagcggcgtcaccg

SEQ ID NO: 321216 - DNA, 75 bp, synthetic construct
  source 1..75: mol_type = other DNA
catggggcgcgggatttgttgacggtatcggtcagggaatggagcgcgcctcccagccggctgtcgggctgggtg

SEQ ID NO: 321217 - DNA, 75 bp, synthetic construct
  source 1..75: mol_type = other DNA
caggttgaattgccgccatttgctgagttctggcaagccaatcagttaattgagatgccggaaaacccggacagc

SEQ ID NO: 321218 - DNA, 75 bp, synthetic construct
  source 1..75: mol_type = other DNA
gctctggaaaaccctggcggtgcataccaacacaatggcatgaaccgtcacttcccggatattcgttttatctgg

SEQ ID NO: 321219 - DNA, 75 bp, synthetic construct
  source 1..75: mol_type = other DNA
atcaacacaacggtatggaccgacatttcccggatattcgttttatctggtgggcgggcggtgccaactttactc

SEQ ID NO: 321220 - DNA, 75 bp, synthetic construct
  source 1..75: mol_type = other DNA
gcgctggcatggctagaaaaatacaacggtccggaactgacacttacagcgtttgaaccaccggccagctcataa

SEQ ID NO: 321221 - DNA, 75 bp, synthetic construct
  source 1..75: mol_type = other DNA
tgagatgccggaaaacccggacagcgagcggtttattcgcttcgctgatttttgccgcgatccgcaggcgcatcc

SEQ ID NO: 321222 - DNA, 75 bp, synthetic construct
  source 1..75: mol_type = other DNA
ggtaacacggcgctggcgtggctggaaaaatacacggggcctgaacttaaacttacagcgtttgatccgcctgcc

SEQ ID NO: 321223 - DNA, 75 bp, synthetic construct
  source 1..75: mol_type = other DNA
aagtcttatggcggcgctggatattcagatgattgtaaaaacgtattgaaggcatccctcagaattaaagacccg

SEQ ID NO: 321224 - DNA, 75 bp, synthetic construct
  source 1..75: mol_type = other DNA
ttacaagttgaacgtcgagatatgcgacaagggattatgctacgttcttggatggatcagcatgtgttaccagcg

SEQ ID NO: 321225 - DNA, 75 bp, synthetic construct
  source 1..75: mol_type = other DNA
aaggggcatgtcagcttccggggtaaaaacggtatcaagggcgaagtggtgatgcgtaacggcaaaatcctcggc

SEQ ID NO: 321226 - DNA, 75 bp, synthetic construct
  source 1..75: mol_type = other DNA
gaaacagcagaagcatggaccgttggtgctaaatatgacgctaataacgtttacttagcagctatgtatgctgaa

SEQ ID NO: 321227 - DNA, 75 bp, synthetic construct
  source 1..75: mol_type = other DNA
ggtgagttggggcgtaaggatctgataaaaatcgaaaataccttcctgaccgacgctcaggttaatcaactggcc

SEQ ID NO: 321228 - DNA, 75 bp, synthetic construct
  source 1..75: mol_type = other DNA
cacgtcaaaaagctggttcggcttcggcggtggggaaagtgctgagcgtgaccgctccatgctgctcgtgctcgt

SEQ ID NO: 321229 - DNA, 75 bp, synthetic construct
  source 1..75: mol_type = other DNA
aaacgatgatgattttggggctgcgacaacaacggcgcttcgcgcaaaaacaacagacgcatcaattggccgcta

SEQ ID NO: 321230 - DNA, 75 bp, synthetic construct
  source 1..75: mol_type = other DNA
tgcaggcaaaagcgggcgtttcggtagctcaggcgcagtatgacttgatgctcgcgggatatcgcgatgaagaaa

SEQ ID NO: 321231 - DNA, 75 bp, synthetic construct
  source 1..75: mol_type = other DNA
aagtcaccacgacccgtgatgagctggcgttattacggcagtgcccggtattgctggagcgtgaagtttccgacc

SEQ ID NO: 321232 - DNA, 75 bp, synthetic construct
  source 1..75: mol_type = other DNA
gctttctgctgctggagtgtacggaactgggcgaatgtacgcagagtcacggaggcagcaatggcgactcccttt

SEQ ID NO: 321233 - DNA, 75 bp, synthetic construct
  source 1..75: mol_type = other DNA
ctggagtgtacggaactgggcgaatgtaggcagagtcacggaggcaacaatgacgacttcctttttgcacgttga

SEQ ID NO: 321234 - DNA, 75 bp, synthetic construct
  source 1..75: mol_type = other DNA
gtcagcagcaggcactggcttatgacgacccgcacggcaggctggtgattggcggtattggctcaacgcgggcac

SEQ ID NO: 321235 - DNA, 75 bp, synthetic construct
  source 1..75: mol_type = other DNA
agcgtaagagcgaccggtcgcaatgaagcgatgggtaaattgctggagaaaataggcgcagagtttgtccaggcg

SEQ ID NO: 321236 - DNA, 75 bp, synthetic construct
  source 1..75: mol_type = other DNA
atgaaggtactggttaccggcgccaccagcggcttaggtcgaaacgcggttgaatttttatgccgaaaaggcatc

SEQ ID NO: 321237 - DNA, 75 bp, synthetic construct
  source 1..75: mol_type = other DNA
gtcagctaaagagccgccgctaacccactacggcgtctccaagttgaattttgactttacgctggatattacgcg

SEQ ID NO: 321238 - DNA, 75 bp, synthetic construct
  source 1..75: mol_type = other DNA
cagaggacgcatttattgcccgttaccgtccgatgtatatcaggcagacagggcaggctacgggggcaggctgta

SEQ ID NO: 321239 - DNA, 75 bp, synthetic construct
  source 1..75: mol_type = other DNA
cagcggtgattgatgcccagccggaacacggcgaaactgttgccgattgtcttaaccggttgctggggcaggttc

SEQ ID NO: 321240 - DNA, 75 bp, synthetic construct
  source 1..75: mol_type = other DNA
tatttctccagcaacgcttcggcaatcgcctgagtttctgcatccgcttcgccgttatataacgtcgggcggaaa

SEQ ID NO: 321241 - DNA, 75 bp, synthetic construct
  source 1..75: mol_type = other DNA
gctttctgctgctggagtgtacggaactgggcgaatgtacgcagagtcacggaggcaacaatgacgactcccttt

SEQ ID NO: 321242 - DNA, 75 bp, synthetic construct
  source 1..75: mol_type = other DNA
tatgcaagccatatcaataacgcctctggcttgtatatttatcgcatcgtgcatgatttccgtgagatcgctgta

SEQ ID NO: 321243 - DNA, 75 bp, synthetic construct
  source 1..75: mol_type = other DNA
gtattcaaaaataaaatttctataaatgatttatggattaccgcacaggatataaggcgacttcttgactgtggt

SEQ ID NO: 321244 - DNA, 75 bp, synthetic construct
  source 1..75: mol_type = other DNA
tatatgaaaactgatagcaagtcagcaagcgcttggttcgataccagaaaggcaaactccaccacatccatgatg

SEQ ID NO: 321245 - DNA, 75 bp, synthetic construct
  source 1..75: mol_type = other DNA
agcaacagttagccgatgtgctggaaggccactacatcagcgagaaacgttttttgctggaagcgcaagtctgtc

SEQ ID NO: 321246 - DNA, 75 bp, synthetic construct
  source 1..75: mol_type = other DNA
gtcagcaagattgccaaaagcgcatcagcaccgcgataaatgaagtggtacttcatccaggcaaagtggcgcata

SEQ ID NO: 321247 - DNA, 75 bp, synthetic construct
  source 1..75: mol_type = other DNA
tgaagaagggaagatctattgcggcgttcaacttcacggcgcaccgggcggtgatggtgcaatggcgataactgg

SEQ ID NO: 321248 - DNA, 75 bp, synthetic construct
  source 1..75: mol_type = other DNA
tgtcacaggcggggcttcccgctggcgtgaaaaatattctgctgcgcccggaatgttcgttacgggcgttatccg

SEQ ID NO: 321249 - DNA, 75 bp, synthetic construct
  source 1..75: mol_type = other DNA
cgtgatggtgctgatggaaaacagcgccacgcgactgaaacgctatgccgaatcgctgaaaaaatttcgtcatcc

SEQ ID NO: 321250 - DNA, 75 bp, synthetic construct
  source 1..75: mol_type = other DNA
cgccatcacccattacatcaccattcgttaccgccgggggatcaccgctgattatgaggtggtctgcggtgacag

SEQ ID NO: 321251 - DNA, 75 bp, synthetic construct
  source 1..75: mol_type = other DNA
aattgccaataaaaacagaaacgaaaatagcagcaatattaaacaatgcgcataagaggccgagcgaaagaacac

SEQ ID NO: 321252 - DNA, 75 bp, synthetic construct
  source 1..75: mol_type = other DNA
cacttagcagtatctaatattgaagagcttaatgaggcacttacagctcaaatacttgatgacggctatgaggat

SEQ ID NO: 321253 - DNA, 75 bp, synthetic construct
  source 1..75: mol_type = other DNA
gtgaatggataattccaaccaatgttagggatatatattctcaaggaacccttgctggttatctacgccgaaaaa

SEQ ID NO: 321254 - DNA, 75 bp, synthetic construct
  source 1..75: mol_type = other DNA
ctcgatattacacgcgcgcaggaagagttaggttatcagccagtcatcaccctggatgaaggcatcgaaaaaact

SEQ ID NO: 321255 - DNA, 75 bp, synthetic construct
  source 1..75: mol_type = other DNA
cggctccacctctgaatttacgccgggatatgtcaagcccaagcacttagcatggctttctgaggctttcgtgta

SEQ ID NO: 321256 - DNA, 75 bp, synthetic construct
  source 1..75: mol_type = other DNA
attttcagaacgccgggttagaagttcttgaggtgactgctccagaccggatggagcgacgcaaacggggtaaaa

SEQ ID NO: 321257 - DNA, 75 bp, synthetic construct
  source 1..75: mol_type = other DNA
gccctgttcccgtatcttcaggaaaaacgaatcgttatcgacttaaccggggtggagatcgtgctgcaaatagtg

SEQ ID NO: 321258 - DNA, 75 bp, synthetic construct
  source 1..75: mol_type = other DNA
tattaaaaacttgccgaaaaacagcaatatcagcccgcagagtcgctctccagattatccattctaatattatct

SEQ ID NO: 321259 - DNA, 75 bp, synthetic construct
  source 1..75: mol_type = other DNA
cgggtaaaattactgctattgatacgcactggatctggcaggaaggcaatcagcgtctgaccaaagaaccgtttg

SEQ ID NO: 321260 - DNA, 75 bp, synthetic construct
  source 1..75: mol_type = other DNA
ggcgtaggggaaattcccggcggcgagaaaatccgtaaaacgctggaagatgcgattccgctggtggtgggtaaa

SEQ ID NO: 321261 - DNA, 75 bp, synthetic construct
  source 1..75: mol_type = other DNA
cgcttcccacaggcgcgtattaccctcgatcctaacggtgcctggtcgctgaacgaagcgattaaaattggtaaa

SEQ ID NO: 321262 - DNA, 75 bp, synthetic construct
  source 1..75: mol_type = other DNA
tacgctgcattgcagttacgaagaattttgtgaaacctggccgcaggtgggctatacccaaaatttggtcactat

SEQ ID NO: 321263 - DNA, 75 bp, synthetic construct
  source 1..75: mol_type = other DNA
gggtgtagaaatcgatatggatcaagtgatgaaagcccatgagctgtatcagaaacacgggcttggcgcgcgtga

SEQ ID NO: 321264 - DNA, 75 bp, synthetic construct
  source 1..75: mol_type = other DNA
atggcgacacaatccagtcctgttattactgatatgaaagtcattccggtggcgggtcatgacagtatgctgatg

SEQ ID NO: 321265 - DNA, 75 bp, synthetic construct
  source 1..75: mol_type = other DNA
agattatccattcaaatattatctctgccccggatgaattacgtgaacagctcagaaatatgacgcgcatgcagc

SEQ ID NO: 321266 - DNA, 75 bp, synthetic construct
  source 1..75: mol_type = other DNA
cagacttgccgaaaggtcaggcactgcatgttttacgccataccttcgcaacacatttcatgatcaacggcggga

SEQ ID NO: 321267 - DNA, 75 bp, synthetic construct
  source 1..75: mol_type = other DNA
ttagtcgccctgccatctgccgtatgctggggggaattagcaggggaacgttttatttatggcgtaaaaagtggg

SEQ ID NO: 321268 - DNA, 75 bp, synthetic construct
  source 1..75: mol_type = other DNA
cggggcgtcatgtatcgctatcaggatgtaatgcggttctttgatgagattggtttgacgtcagccaaagataat

SEQ ID NO: 321269 - DNA, 75 bp, synthetic construct
  source 1..75: mol_type = other DNA
ttcggtcagtgccttacccgatgctggatatgatcgcccgcagtatggaacgtttaggacgcaaatcagcaaaag

SEQ ID NO: 321270 - DNA, 75 bp, synthetic construct
  source 1..75: mol_type = other DNA
cagagtaccttcaggacgccatttctcttaatccgctaagaggtggtactgaggccgagagtgtccacatagtgt

SEQ ID NO: 321271 - DNA, 75 bp, synthetic construct
  source 1..75: mol_type = other DNA
gttacagaactttcatgacaagccatggcaggctaagccagctgatcagcggcgattatcagagctgcttgatgc

SEQ ID NO: 321272 - DNA, 75 bp, synthetic construct
  source 1..75: mol_type = other DNA
aagcgcttcacagttgctgatcactgccggagacaatcctcaacggttaagatcagaatcaggatttgcggcact

SEQ ID NO: 321273 - DNA, 75 bp, synthetic construct
  source 1..75: mol_type = other DNA
cacgattgatgctgaatgtgccgctcacgccgcatgctccggaataagaactgtcacacccaaaacgcgcaatgg

SEQ ID NO: 321274 - DNA, 75 bp, synthetic construct
  source 1..75: mol_type = other DNA
cgtgtagccgaaggacatacaaaaatggaagcgatacgctgtctaaagcgatatatctcccgcgaagtttacacg

SEQ ID NO: 321275 - DNA, 75 bp, synthetic construct
  source 1..75: mol_type = other DNA
attatttaacaaatcccgacgctcacgccagtcaggaataaaccgatccatatgcaaccggaagcgagcattatg

SEQ ID NO: 321276 - DNA, 75 bp, synthetic construct
  source 1..75: mol_type = other DNA
gatatctatttacgtcagcaatgcgatgtgttttggctcggctataccatcagtcccgcttatactcgccaggga

SEQ ID NO: 321277 - DNA, 75 bp, synthetic construct
  source 1..75: mol_type = other DNA
agtgacacgattgatgctgaatgtgccgctcacgccgcattctccggaataagaaccgtcacacccaaaacgcgc

SEQ ID NO: 321278 - DNA, 75 bp, synthetic construct
  source 1..75: mol_type = other DNA
acagccggtcgatgcgccctcaccggctaaagtgttacccgaaaactggtggcaacatcctgctgcattaggtgc

SEQ ID NO: 321279 - DNA, 75 bp, synthetic construct
  source 1..75: mol_type = other DNA
ctgcgctggtggtgattgatttacaggaaggcattttgccttttgccggtggcccacatactgccgaggatgttg

SEQ ID NO: 321280 - DNA, 75 bp, synthetic construct
  source 1..75: mol_type = other DNA
ggtcaaggcaatgtgaaagtaagaatggatgatgttctacctcaattccgttcagttaaagaattaagaggccac

SEQ ID NO: 321281 - DNA, 75 bp, synthetic construct
  source 1..75: mol_type = other DNA
tgaagcggattttcccgctttgacgcatgccaatgtcccgttgccggtggtgagtgcgtgctatcaactcgaact

SEQ ID NO: 321282 - DNA, 75 bp, synthetic construct
  source 1..75: mol_type = other DNA
ggcaacatcctgctgcattaggtgcaactgacagtgatatcgaaatcatcaaacgtcaatggggtgcgttttacg

SEQ ID NO: 321283 - DNA, 75 bp, synthetic construct
  source 1..75: mol_type = other DNA
gtgtttctggtgcgtgttggctggtctgccgattacgccgaagcattaaaacagccggttgatgccccttccccc

SEQ ID NO: 321284 - DNA, 75 bp, synthetic construct
  source 1..75: mol_type = other DNA
gtcttgccgcgcagcctgccaccaccacgctccagttctccgtagatgaggcgctggccattgatgtgctgatcc

SEQ ID NO: 321285 - DNA, 75 bp, synthetic construct
  source 1..75: mol_type = other DNA
gcgtatcaggctggccccggagtcattcaccaatgccggaagccgtggtgcataccgttttcatgctatgggggc

SEQ ID NO: 321286 - DNA, 75 bp, synthetic construct
  source 1..75: mol_type = other DNA
accaggttgaactggtgacaccggcactgagggtggtggcagaaaacgaatgggcaaactgtacggcgatcacac

SEQ ID NO: 321287 - DNA, 75 bp, synthetic construct
  source 1..75: mol_type = other DNA
atgacatttttacagctgattttattgtatttctgcacggtggtctgtgcgttatatctggtgagtggcgggtat

SEQ ID NO: 321288 - DNA, 75 bp, synthetic construct
  source 1..75: mol_type = other DNA
gaaaaattgatgatgcagcggctgagaaactcagcaaaacaacacaggctgcctcatttccgaacgaaccaaccc

SEQ ID NO: 321289 - DNA, 75 bp, synthetic construct
  source 1..75: mol_type = other DNA
tggccgaatcgcgcacgtccgcgatgcgtctggccgcgtcaccgccgttgaatgctacacccgcgaagggttgtt

SEQ ID NO: 321290 - DNA, 75 bp, synthetic construct
  source 1..75: mol_type = other DNA
gtgtgctgtatctcctttcgggtgggtacagggcagtgcgcgattgctggcgcaggcagattgacaaaagggccg

SEQ ID NO: 321291 - DNA, 75 bp, synthetic construct
  source 1..75: mol_type = other DNA
gcgcagcatcgtgcagaagctgatcgacgagttgaatattgactgtcgtattcgttccgtcccttacccgatgct

SEQ ID NO: 321292 - DNA, 75 bp, synthetic construct
  source 1..75: mol_type = other DNA
agtggtcagtgccagaaggtaacttctgggatgatgaaaaattcagcgtcgccttgcctctcgcctcgatcgctg

SEQ ID NO: 321293 - DNA, 75 bp, synthetic construct
  source 1..75: mol_type = other DNA
ccgctttccatgaaaactttggtgaaggcgatcgctgtgatttagacacgacttaccgttttaacagtcgtatcg

SEQ ID NO: 321294 - DNA, 75 bp, synthetic construct
  source 1..75: mol_type = other DNA
gcagatgccagtttcggtggtgcaatgggggttgtgatcttctttcttgtttcagggtacatcatcacccacgta

SEQ ID NO: 321295 - DNA, 75 bp, synthetic construct
  source 1..75: mol_type = other DNA
tagattacatgcgtgtaattgcgttctcccttgtggtgttaggtcataagttcaacaaagatttatcttcgttgg

SEQ ID NO: 321296 - DNA, 75 bp, synthetic construct
  source 1..75: mol_type = other DNA
gctgttgcctggggtgtgcgtaactttattcatatctcttctccctccctgtacttcgattatcaccaccatcgc

SEQ ID NO: 321297 - DNA, 75 bp, synthetic construct
  source 1..75: mol_type = other DNA
actgcgagagagaggggataacgcaggctcagttcgttgagaaaatcatcaaagatgaactgcagagactggata

SEQ ID NO: 321298 - DNA, 75 bp, synthetic construct
  source 1..75: mol_type = other DNA
agagatcaaagttttcgtcagaccagaactgaaaaactaccttaccagtctgtgcgcagaggaaggggtaactca

SEQ ID NO: 321299 - DNA, 75 bp, synthetic construct
  source 1..75: mol_type = other DNA
atgtcgcagacagaaaatgcagtgacttcctcatcaggtacaaagcgagcatacagaaaaggcaatcctctgacg

SEQ ID NO: 321300 - DNA, 75 bp, synthetic construct
  source 1..75: mol_type = other DNA
catgcgctggcgctgcatattattcagcagggcagcaaaaaagttccgatagtcagcaaactggaaaatgatacc

SEQ ID NO: 321301 - DNA, 75 bp, synthetic construct
  source 1..75: mol_type = other DNA
gcgtataccgaagccatgcttaccgagtatgcggattttttccgccaggtcgagtcttcaccgctgaatccggcg

SEQ ID NO: 321302 - DNA, 75 bp, synthetic construct
  source 1..75: mol_type = other DNA
attactggcgattcattgtaagcgcggcctggtatggggcgagctggagtttgtactgcctgatgaaaaagtggt

SEQ ID NO: 321303 - DNA, 75 bp, synthetic construct
  source 1..75: mol_type = other DNA
gtgctctccccggttcccggcaccgtagaactgtatccgctgctcagtaccggcctgccggacgacagcatcctc

SEQ ID NO: 321304 - DNA, 75 bp, synthetic construct
  source 1..75: mol_type = other DNA
atcacccgtcttgcagtctggcccgtaagttgggggtgaaggatgagccacttacgctcctgaaaaatgtgcgcg

SEQ ID NO: 321305 - DNA, 75 bp, synthetic construct
  source 1..75: mol_type = other DNA
aaatggccgaaatatccggcgagatggtgaaagaaaaggttgcgcacctgatggaagtccgccctgagtatttaa

SEQ ID NO: 321306 - DNA, 75 bp, synthetic construct
  source 1..75: mol_type = other DNA
taaaaagttacccgatgtatctggctgaagaacctgaatgggcattacgtgccgaaaaggttgccgcgcgtatgc

SEQ ID NO: 321307 - DNA, 75 bp, synthetic construct
  source 1..75: mol_type = other DNA
tccaggcggcgctgaaagagtctggtttgacggcaaaagatattgatgccgtggcctataccgcaggcccaggat

SEQ ID NO: 321308 - DNA, 75 bp, synthetic construct
  source 1..75: mol_type = other DNA
tggacggctgaaaatgttcaccacgctattcaggcaacagcggatgagctggaagtgggtatgggaaaagtcggt

SEQ ID NO: 321309 - DNA, 75 bp, synthetic construct
  source 1..75: mol_type = other DNA
gggctggtcccacggcgatcaggaaatcttcactcgtgaagagatgatcaaatacttcactctgaatgccgtcag

SEQ ID NO: 321310 - DNA, 75 bp, synthetic construct
  source 1..75: mol_type = other DNA
actacattaacgcactgccgccggagtatgtggctacccacttacagtggcacatcgagcaggaaaatatcgata

SEQ ID NO: 321311 - DNA, 75 bp, synthetic construct
  source 1..75: mol_type = other DNA
ggaaatcacccacgttatccgtggcgaagaccatatcaacaacacgccacgccagatcaacattcttaaagccct

SEQ ID NO: 321312 - DNA, 75 bp, synthetic construct
  source 1..75: mol_type = other DNA
atgagtatatttatctcatggcttgtcctgattatttcggtggtctgcgccattgggattatgcaaattattcat

SEQ ID NO: 321313 - DNA, 75 bp, synthetic construct
  source 1..75: mol_type = other DNA
cggtcagcctgcgatcaatagcggttatatcaaagaagcgattccagggatgaaaaatctgatcgccgcactgga

SEQ ID NO: 321314 - DNA, 75 bp, synthetic construct
  source 1..75: mol_type = other DNA
gattccaaaatgtggcttgaagcaaataaagcgatgaaatcagctatcaaccttccgtggtatcgcaggaaatga

SEQ ID NO: 321315 - DNA, 75 bp, synthetic construct
  source 1..75: mol_type = other DNA
atgctgaacgatttaggcgttgatccgcatgtcgtggagcagcttacaggccaccagatgccaggaatgcagcga

SEQ ID NO: 321316 - DNA, 75 bp, synthetic construct
  source 1..75: mol_type = other DNA
gcctggaacgttccggcgattccggtacaccatatggaagggcatctgttagcaccgatgctggaagataacccg

SEQ ID NO: 321317 - DNA, 75 bp, synthetic construct
  source 1..75: mol_type = other DNA
tgtgctcgccgtactttatcgcgcctgtcaccgcgtaaactctccaccatgaaagcgccagtcatttttgccaat

SEQ ID NO: 321318 - DNA, 75 bp, synthetic construct
  source 1..75: mol_type = other DNA
cacggcatgttgcagggttactgctcaacgcgtcattcgctctccagctgtgtaattgccgaagaaaatggcgat

SEQ ID NO: 321319 - DNA, 75 bp, synthetic construct
  source 1..75: mol_type = other DNA
tctggaagaagcagtttccactgcgctggagttggcctcaggcaaatcggacggtgcggaagttgccgtcagcaa

SEQ ID NO: 321320 - DNA, 75 bp, synthetic construct
  source 1..75: mol_type = other DNA
ttctgccggactggctgaccattgaagagcatccgcatctgctgaaagggctggcatcgacgccattcgacagcg

SEQ ID NO: 321321 - DNA, 75 bp, synthetic construct
  source 1..75: mol_type = other DNA
aattcaatagcgatggcgcgctggggatcactgtttatcaccagaaccgcaaaggtagcgcatcgtctaccgatt

SEQ ID NO: 321322 - DNA, 75 bp, synthetic construct
  source 1..75: mol_type = other DNA
cattcgacagcgaaggtgtgcgcaccgagcgtcgcgatattattaaagatggcatcctgactcagtggctgctga

SEQ ID NO: 321323 - DNA, 75 bp, synthetic construct
  source 1..75: mol_type = other DNA
gtggcctatactgcaggccctggattagtcggtgcgctgttggttggcgcaacggtcgggcgttcgctggcgttt

SEQ ID NO: 321324 - DNA, 75 bp, synthetic construct
  source 1..75: mol_type = other DNA
agcgccgatgctggaagataacccgccggaatttccgtttgtcgcgctgctggtttccggcggtcatacgcagtt

SEQ ID NO: 321325 - DNA, 75 bp, synthetic construct
  source 1..75: mol_type = other DNA
gaccgtggggcgttctctggcgtttgcctgggacgttccggcgatcccggtacaccatatggaagggcatctgtt

SEQ ID NO: 321326 - DNA, 75 bp, synthetic construct
  source 1..75: mol_type = other DNA
gtttacctttcctggtgcaaacagaagtcatctacaatcaagcaacactggtgttgctgttgacgcgggtataaa

SEQ ID NO: 321327 - DNA, 75 bp, synthetic construct
  source 1..75: mol_type = other DNA
cgattagcgccaccgtatcagttccgacaaaacaatctcaatccatcccaataactttagcagggagaacaatcg

SEQ ID NO: 321328 - DNA, 75 bp, synthetic construct
  source 1..75: mol_type = other DNA
cgggcgaagctggcggaaatgatgaaaaacgccgcggcgaagtgttctacgcgcgtccggaattttgtactgata

SEQ ID NO: 321329 - DNA, 75 bp, synthetic construct
  source 1..75: mol_type = other DNA
acttcatggaaataaatcactcacgaataacatcgtatgagattgcggattacatgatccgcactaaatctcttc

SEQ ID NO: 321330 - DNA, 75 bp, synthetic construct
  source 1..75: mol_type = other DNA
ggaaggctacaccaaaatcccaacctggatcatgcagggctatgccacgctggcagatgaagccgtcgagcaaat

SEQ ID NO: 321331 - DNA, 75 bp, synthetic construct
  source 1..75: mol_type = other DNA
gttgagtttggtaatgtattcatcaataagatcgatggggtaggttataaacaacccattgattactcgcttgtt

SEQ ID NO: 321332 - DNA, 75 bp, synthetic construct
  source 1..75: mol_type = other DNA
cttaaagtgtctgtttctatcttcggtcgtgcgacccctgtagagctggacttcagccaggttgaaaaagcttaa

SEQ ID NO: 321333 - DNA, 75 bp, synthetic construct
  source 1..75: mol_type = other DNA
accggatctctggagacagccatctttgccagggtgattaaagaaggttattcagggctgcgcattgagctttct

SEQ ID NO: 321334 - DNA, 75 bp, synthetic construct
  source 1..75: mol_type = other DNA
gatgtcgataagcgcgatgtttatctgcgcttaaaggctatcgctgtgtctaagtattcgtctgttttgattgat

SEQ ID NO: 321335 - DNA, 75 bp, synthetic construct
  source 1..75: mol_type = other DNA
gccggtaaaacaaagcggcgtgcaactcgcgccagcggaatttaacgccagtatgacgatggtggtggattacca

SEQ ID NO: 321336 - DNA, 75 bp, synthetic construct
  source 1..75: mol_type = other DNA
attgccgggtttggcatccgtatcgaaaacgccgccgataactcccttttttccattggtgaaaataactggacg

SEQ ID NO: 321337 - DNA, 75 bp, synthetic construct
  source 1..75: mol_type = other DNA
tggatgcgccaccgccctgtaccgtgaccggtagtgcagtggagtttggcgatgtgctgatcgccagtattgatg

SEQ ID NO: 321338 - DNA, 75 bp, synthetic construct
  source 1..75: mol_type = other DNA
agagtgggtgaaggtaactggtctgattttaatgctaaccagttgcccaacctcacagcggtgccggtaaaacag

SEQ ID NO: 321339 - DNA, 75 bp, synthetic construct
  source 1..75: mol_type = other DNA
gtgttgatgatctgcggatgcagcttaaaggcaccactaccgtgattaacggggaaactgtcattgcgacggaaa

SEQ ID NO: 321340 - DNA, 75 bp, synthetic construct
  source 1..75: mol_type = other DNA
ttaagggcacaaccaccacaatcaatggcgaaacggtgttaagcacgggaattaccgggtttggcattcgtattg

SEQ ID NO: 321341 - DNA, 75 bp, synthetic construct
  source 1..75: mol_type = other DNA
gggcctttgttccttgagagagccgtacagatcagtgagaaacagttcactcagacgatagctgaagcggcaagg

SEQ ID NO: 321342 - DNA, 75 bp, synthetic construct
  source 1..75: mol_type = other DNA
cgatgccaacgggcggattggcaaagacgatccggcgcacatcaacgacgtaatcgtcgaagctgccatcagtac

SEQ ID NO: 321343 - DNA, 75 bp, synthetic construct
  source 1..75: mol_type = other DNA
atacggcagcgacatcatcccgcaggaaggggcgatggtcagcggctacgatccgcagcgcggtgagcaggttat

SEQ ID NO: 321344 - DNA, 75 bp, synthetic construct
  source 1..75: mol_type = other DNA
gctccatgcgctgcactaccaccaaaccaacgtacagagcgtgcaagccaacattgcccagaccgagttcaatgc

SEQ ID NO: 321345 - DNA, 75 bp, synthetic construct
  source 1..75: mol_type = other DNA
atagaagcatttacgcaattgactgtactaagatcgaagcaccagcatggaataagctaacggcctttgcaaata

SEQ ID NO: 321346 - DNA, 75 bp, synthetic construct
  source 1..75: mol_type = other DNA
tgacctgattacccaacagtacgaacaaagtaataaacaaaagttttatgtaccttgtccacactgtaaccactc

SEQ ID NO: 321347 - DNA, 75 bp, synthetic construct
  source 1..75: mol_type = other DNA
caggtgctttttcggttgaaaagaaattgcttgaattactggaaaaacaatctggtctccatacgtctgtggatt

SEQ ID NO: 321348 - DNA, 75 bp, synthetic construct
  source 1..75: mol_type = other DNA
tccgtcaggccatcagtgatgccgaagcggaaattgattcgtttctgtcccgccgctaccagctgccgctggggg

SEQ ID NO: 321349 - DNA, 75 bp, synthetic construct
  source 1..75: mol_type = other DNA
tagcggaacagttgaagaaattaatcgtcatttggatgcaggaaaacctgcaatgatttatttctcatcaaaacc

SEQ ID NO: 321350 - DNA, 75 bp, synthetic construct
  source 1..75: mol_type = other DNA
actcatacctcacctgaactcgggattagaccacaggacttaatcaaccaaagactactcgtcgattgtgattta

SEQ ID NO: 321351 - DNA, 75 bp, synthetic construct
  source 1..75: mol_type = other DNA
gaatggatttggcgggactcaggaagcaggctgatgaggcacttccggaacatattgacgtctggctgaaaaaac

SEQ ID NO: 321352 - DNA, 75 bp, synthetic construct
  source 1..75: mol_type = other DNA
ccttacttccaccagatgaccgggccgcctgggaaaatgccctgacttcatttctggatgagccggaatgtgcac

SEQ ID NO: 321353 - DNA, 75 bp, synthetic construct
  source 1..75: mol_type = other DNA
ggagcaggaaggatgtcgaactcgggttactgttgtgccgcctggctttgatttccaggaattatacgttgattc

SEQ ID NO: 321354 - DNA, 75 bp, synthetic construct
  source 1..75: mol_type = other DNA
tgttgccagtgcggaaacaaaacccgtcgacctggaactcagggtcagggtggatgcgccaccgccctgtaccgt

SEQ ID NO: 321355 - DNA, 75 bp, synthetic construct
  source 1..75: mol_type = other DNA
gcactggatttaagcaccgttactgacgaagcctccttttactccatcaactggccggagcgtcccgatgccgca

SEQ ID NO: 321356 - DNA, 75 bp, synthetic construct
  source 1..75: mol_type = other DNA
gcgatggatttcagcgccattactgataaagcctcatataacgccattgagtggcccgtctctccggaaacctct

SEQ ID NO: 321357 - DNA, 75 bp, synthetic construct
  source 1..75: mol_type = other DNA
gcgatggatttcagcgccattactgataaagcctcatataacgccattgagtggcccgtttctccggaaatctct

SEQ ID NO: 321358 - DNA, 75 bp, synthetic construct
  source 1..75: mol_type = other DNA
cggcaaaatggcgtaggcccaatgccagtggcaactggggtatagtttcagcagtgcggtgggataaactgaaat

SEQ ID NO: 321359 - DNA, 75 bp, synthetic construct
  source 1..75: mol_type = other DNA
gtctgattcatctgaagatagtgacccggaattactggttccttatgcagctgatggctcgtgttttcatcccgg

SEQ ID NO: 321360 - DNA, 75 bp, synthetic construct
  source 1..75: mol_type = other DNA
tcttggccgctaatgggccatgtttaagctcagagctggctgacattttggttgagcaatttggtcttacgcctg

SEQ ID NO: 321361 - DNA, 75 bp, synthetic construct
  source 1..75: mol_type = other DNA
ctacgccagcgagttagagcgcaggcttgatattcagcttgagcgtatagacgaaaagaaccccgacgggatagg

SEQ ID NO: 321362 - DNA, 75 bp, synthetic construct
  source 1..75: mol_type = other DNA
ccggtacaagtacctaggcgtaccccaaagaaacaccgcgcccgcgtctatatgctgcgtactggtatagaggga

SEQ ID NO: 321363 - DNA, 75 bp, synthetic construct
  source 1..75: mol_type = other DNA
tggacagaaaatgacattcttcgctactgccgcctgtcttctggtcgtaactatgcaacagagttagaacgccag

SEQ ID NO: 321364 - DNA, 75 bp, synthetic construct
  source 1..75: mol_type = other DNA
tttcaccattgtggaagtggatgaactaccggatggcttttgtatagaagcgcgctggtattacaaagacggtga

SEQ ID NO: 321365 - DNA, 75 bp, synthetic construct
  source 1..75: mol_type = other DNA
tgccgtggtgatgttctgaaagtgatcactcatgttaaccatcttgcgaacataaatgatcacaacggactttct

SEQ ID NO: 321366 - DNA, 75 bp, synthetic construct
  source 1..75: mol_type = other DNA
ttcaagcactagcgtgcgatcccgactccgacattttatctgtactcatgaaggccaaaatgattgcagtgaagc

SEQ ID NO: 321367 - DNA, 75 bp, synthetic construct
  source 1..75: mol_type = other DNA
aatgacctagatctgatggttccatacgcggccgatggttcgtgttttcaccctgggctagcgagttcgagagat

SEQ ID NO: 321368 - DNA, 75 bp, synthetic construct
  source 1..75: mol_type = other DNA
agtagcctgccgattagcgatctttctactcatatcatcctcaaaaatgctgacctgcgcctgcaaccgctgaaa

SEQ ID NO: 321369 - DNA, 75 bp, synthetic construct
  source 1..75: mol_type = other DNA
gcgcagggacgttataacggtgaaccgctcactggtacgggaaaaataggcggtatgctggcgctgcgtggcgaa

SEQ ID NO: 321370 - DNA, 75 bp, synthetic construct
  source 1..75: mol_type = other DNA
cttttgataccgagaatgcgttgatcaatgttaccggcacggcaagttttgcttcggaacagctggatttgacta

SEQ ID NO: 321371 - DNA, 75 bp, synthetic construct
  source 1..75: mol_type = other DNA
tgcagctcaaaggcaacacgactgttatcaacggggaaacagttctcagcacggatatcgcaggcctaggggtgc

SEQ ID NO: 321372 - DNA, 75 bp, synthetic construct
  source 1..75: mol_type = other DNA
acggttctcagcacggatatcgccggcctgggggtgcggatagaaaacgccgccgacaactccctgtttgcagtt

SEQ ID NO: 321373 - DNA, 75 bp, synthetic construct
  source 1..75: mol_type = other DNA
ctgcgcctgcaaccgctgaaatttggcatggcgggcggcagcattgcggcgaatattcatctggaaggcgataaa

SEQ ID NO: 321374 - DNA, 75 bp, synthetic construct
  source 1..75: mol_type = other DNA
tccggtgaagcagagcggtgtggaactgatggcatcggagtttaacgcgaccatgaccatggtggtggactacca

SEQ ID NO: 321375 - DNA, 75 bp, synthetic construct
  source 1..75: mol_type = other DNA
gtttcgaagccgtgccggtgaaacaaagcggcacacagcttacggcatcagagtttagcgcaaccatgacaatgg

SEQ ID NO: 321376 - DNA, 75 bp, synthetic construct
  source 1..75: mol_type = other DNA
ttttagtcatcctgtttacctctttctcaggaagtttagtctccaggattcccggggcggttcatagttatatga

SEQ ID NO: 321377 - DNA, 75 bp, synthetic construct
  source 1..75: mol_type = other DNA
aagaaaaggtgggcgattacgtttttggcctgaaagcacaagggcgctataacggcgaaccactcatggggacgg

SEQ ID NO: 321378 - DNA, 75 bp, synthetic construct
  source 1..75: mol_type = other DNA
attgcgacttttgactggaatcgtctcaaaccgaccatcaaccagaaagtctctgcggaattgaatcgccccttc

SEQ ID NO: 321379 - DNA, 75 bp, synthetic construct
  source 1..75: mol_type = other DNA
ccccatgtacacgcggaagacatcattcttggcaatccaccggatattcccgaagtcacaatggtgcatttgccg

SEQ ID NO: 321380 - DNA, 75 bp, synthetic construct
  source 1..75: mol_type = other DNA
ctccagcgaaccgggcgcgctgtcgccgttgatggacaaaggcgagcaactggcctgggtctggcgtagcaaagc

SEQ ID NO: 321381 - DNA, 75 bp, synthetic construct
  source 1..75: mol_type = other DNA
ccgaccattggcgtagcgaaaaaacggctctgcggtaaattcgaaccgctctccagcgaaccgggcgcgctggcc

SEQ ID NO: 321382 - DNA, 75 bp, synthetic construct
  source 1..75: mol_type = other DNA
atggatctcgcgtcattacgcgctcaacaaatcgaactggcttcttctgtgatccgcgaggatcgactcgataaa

SEQ ID NO: 321383 - DNA, 75 bp, synthetic construct
  source 1..75: mol_type = other DNA
ccgggatggcatggctggtggatgggcgttatgaaaccatctcgatggcgatcagcagtatgatcggcgatgtca

SEQ ID NO: 321384 - DNA, 75 bp, synthetic construct
  source 1..75: mol_type = other DNA
gaaatcctcttctcacgcgccaaagtctggaacggtgagaagtgggcgtgtgtcaccatcgtcggcgggcatacc

SEQ ID NO: 321385 - DNA, 75 bp, synthetic construct
  source 1..75: mol_type = other DNA
tttaagcgcaagggacgtggtctcgaacccagcgagctgggagagctggtctatcgctatgccgataaaatgttc

SEQ ID NO: 321386 - DNA, 75 bp, synthetic construct
  source 1..75: mol_type = other DNA
tggcggtcggcaactcgctggcggcggtacatgccggagcacggcaggtagaaggtgcgatgaacgggatcggtg

SEQ ID NO: 321387 - DNA, 75 bp, synthetic construct
  source 1..75: mol_type = other DNA
cgaccgggcatgagtcaaaatgtccgtttttgtctgagaagggaacatgctcaatctacaattaccgcccgctgt

SEQ ID NO: 321388 - DNA, 75 bp, synthetic construct
  source 1..75: mol_type = other DNA
agcagaccccgtatctttccgtagtggatattctgcgagcaaggcgctctaccggattgctaaaagccaaggtga

SEQ ID NO: 321389 - DNA, 75 bp, synthetic construct
  source 1..75: mol_type = other DNA
atatcctgcttgagataacctcgctggtagataacgcattggatctggctgaaattacagaagaatattcacact

SEQ ID NO: 321390 - DNA, 75 bp, synthetic construct
  source 1..75: mol_type = other DNA
atatcctgctggaaataaccacgctggtagataacgctttggatcttgctgaaattacagaagaatattcacact

SEQ ID NO: 321391 - DNA, 75 bp, synthetic construct
  source 1..75: mol_type = other DNA
ggttctaatgatatcgctactgccgccgtcaaactggtatgcggcgaagaagttaaagcagaagccgccaacggt

SEQ ID NO: 321392 - DNA, 75 bp, synthetic construct
  source 1..75: mol_type = other DNA
atgtttgattcgactttaaatccgttatggcagcgttacatcctcgcagttcaggaggaagtaaaaccggcgctg

SEQ ID NO: 321393 - DNA, 75 bp, synthetic construct
  source 1..75: mol_type = other DNA
agtcggtgaaacggcgagtggtatgccggatccgacgttgccggaggtgtccggaggtcgtggcagggtggacga

SEQ ID NO: 321394 - DNA, 75 bp, synthetic construct
  source 1..75: mol_type = other DNA
gccgagtcaaaactctgaacacccggcagataaatgtccttaagggggaacagcgtcgtgtgagtggcagtgccc

SEQ ID NO: 321395 - DNA, 75 bp, synthetic construct
  source 1..75: mol_type = other DNA
gcagtgcccgggtttccctcaagcgtcgtatctggctgagggatgccggacagtgctgtctctgtgggcgtgtgg

SEQ ID NO: 321396 - DNA, 75 bp, synthetic construct
  source 1..75: mol_type = other DNA
aatcaatattctttttacttcccgccaaatgattatcgaaacctttatttgtccggtaagtagtatcagcaatcc

SEQ ID NO: 321397 - DNA, 75 bp, synthetic construct
  source 1..75: mol_type = other DNA
ctttgtggacgcgtggttgacctttgtgacagtgaactcgatcaccgcattgcacttcagtttggtggtggtaat

SEQ ID NO: 321398 - DNA, 75 bp, synthetic construct
  source 1..75: mol_type = other DNA
gtaccgaatgccatcgacaaaagtctgctcgtgaagcggcgagtgatatgccggacccgacgctgccggaggtgt

SEQ ID NO: 321399 - DNA, 75 bp, synthetic construct
  source 1..75: mol_type = other DNA
tggtggcgacgtcaccataaagcggaagaaaaccgccaaccgggggaagcgcaggtattgctggtctggcgcgat

SEQ ID NO: 321400 - DNA, 75 bp, synthetic construct
  source 1..75: mol_type = other DNA
cgttaatgaagtgccgttcgaagcgattcgcttcattctcgattctgcaaagttaaatggcgcgctatcgcagga

SEQ ID NO: 321401 - DNA, 75 bp, synthetic construct
  source 1..75: mol_type = other DNA
agttaaactgtgcattatcgcgggaaggtttgagtggcaactgggggctgcatattggcgcaacgctggaaaaac

SEQ ID NO: 321402 - DNA, 75 bp, synthetic construct
  source 1..75: mol_type = other DNA
atccggcgaaaaaaacgatcgcccggacaccgccccccgtctcatgcagagaaaaaattcccgtttcaggccagt

SEQ ID NO: 321403 - DNA, 75 bp, synthetic construct
  source 1..75: mol_type = other DNA
aaaggcggcgttcaggtttttgagtaccgccgccgcccgctccacggcaaagtggcattgatggacgatcactgg

SEQ ID NO: 321404 - DNA, 75 bp, synthetic construct
  source 1..75: mol_type = other DNA
gttgatccgcccgcacaaccgacaatggaaacgcaggatcgggtagaaactgaaaacacgggggtaaaaccctga

SEQ ID NO: 321405 - DNA, 75 bp, synthetic construct
  source 1..75: mol_type = other DNA
agatatccttcatgccaggagagcatacggattaatgaacagttgttcgtatcgggaagtaagtaatattgttct

SEQ ID NO: 321406 - DNA, 75 bp, synthetic construct
  source 1..75: mol_type = other DNA
cagattaaaaatagtagtcaaattaccgggattgtcggcgataatggacaactttatctctcaggattgccttta

SEQ ID NO: 321407 - DNA, 75 bp, synthetic construct
  source 1..75: mol_type = other DNA
ttattggctatcgttattcaacccagggcttttacactttaagtgatacgacataccaacaaatgtcagggactg

SEQ ID NO: 321408 - DNA, 75 bp, synthetic construct
  source 1..75: mol_type = other DNA
tgtttaaacaggcgcaactcgatgtggtgatcctggaagtggggttaggcggtcgcctggatgcgactaacattg

SEQ ID NO: 321409 - DNA, 75 bp, synthetic construct
  source 1..75: mol_type = other DNA
accgatcatcgccgacgaagcgcgtactttcggtatggagggtctgttccgtcagattggtatttacagcccgaa

SEQ ID NO: 321410 - DNA, 75 bp, synthetic construct
  source 1..75: mol_type = other DNA
atcgcgccaacaggcaaaaaactggtggtaagtgacttgtcgaacattgaaggccgtatgctggcatggctggcg

SEQ ID NO: 321411 - DNA, 75 bp, synthetic construct
  source 1..75: mol_type = other DNA
gaaggcgttgaagtgatgctgttcgcatgggctatcaacgacgggccagtaaacgtatgggatatcactgccggt

SEQ ID NO: 321412 - DNA, 75 bp, synthetic construct
  source 1..75: mol_type = other DNA
atacgatgcctgttgctgttcagccaggagcttttctgccatccgcgagccagtgtgacagctgatgaagtatgt

SEQ ID NO: 321413 - DNA, 75 bp, synthetic construct
  source 1..75: mol_type = other DNA
aggttatcgcgccgttctcgggcgaagtcgcctccatttttcaaaccaaacacgccatcggtctgctgagcgaca

SEQ ID NO: 321414 - DNA, 75 bp, synthetic construct
  source 1..75: mol_type = other DNA
gctggttaacgacgcagcaggcgacctataaaatctggtttgccgccagcgatgcgctgttcttctttttcccgc

SEQ ID NO: 321415 - DNA, 75 bp, synthetic construct
  source 1..75: mol_type = other DNA
cggtacgctggaaaacctgccgttaccgcttgtcccacaaccgaatgccgcaacggcgctggctgcgctgcgtgc

SEQ ID NO: 321416 - DNA, 75 bp, synthetic construct
  source 1..75: mol_type = other DNA
ttgctgagattgaatcggcacgcggtgatatttccctgacctattttgaatacggcacgttgtcggcgctgtggc

SEQ ID NO: 321417 - DNA, 75 bp, synthetic construct
  source 1..75: mol_type = other DNA
tacggtacgctgtcggcgttgtggctgttcaaacaggcacaacttgacgtagtgattctggaagtagggctgggc

SEQ ID NO: 321418 - DNA, 75 bp, synthetic construct
  source 1..75: mol_type = other DNA
gtgcgttctgccatgcaacgctgagaaatgacatcctgccagacgatgaatggcggaggctgtggcgtcgcttat

SEQ ID NO: 321419 - DNA, 75 bp, synthetic construct
  source 1..75: mol_type = other DNA
gggggctataacttccagtgggcgtggtcgagtgcatgggcttgtgcgcaggatttagttgaagcaaagtcgtcc

SEQ ID NO: 321420 - DNA, 75 bp, synthetic construct
  source 1..75: mol_type = other DNA
aggctggtcaatgcctatgagtcttcactggcgttgccggaactgcaatggcgagacattgagggtgagttacat

SEQ ID NO: 321421 - DNA, 75 bp, synthetic construct
  source 1..75: mol_type = other DNA
accgaccagccgggattcagcacttgtccccgctctcagttaataaacagtattgatatcctccgggctcgccgg

SEQ ID NO: 321422 - DNA, 75 bp, synthetic construct
  source 1..75: mol_type = other DNA
tgcttgaaatgagcgggccatgcatctcttcggatcttgcagagagaattcagtggcaacatccctcaatgtccc

SEQ ID NO: 321423 - DNA, 75 bp, synthetic construct
  source 1..75: mol_type = other DNA
gtgcgagaagggcaatgtgaccttcagattgcgtagcgaagtgctgagcgtggcgaaggatgatacaggcttcac

SEQ ID NO: 321424 - DNA, 75 bp, synthetic construct
  source 1..75: mol_type = other DNA
atggtaaaaaaccagggcgcaaaatcctcatgtctggcggtggacgttgcaactttaccaacctttatgttgaac

SEQ ID NO: 321425 - DNA, 75 bp, synthetic construct
  source 1..75: mol_type = other DNA
ttgtgaccgtaagtttaacggtaatattactaaactgtatgtccgtctgggccgcaggtaaaggtggggtaggac

SEQ ID NO: 321426 - DNA, 75 bp, synthetic construct
  source 1..75: mol_type = other DNA
tttagattattgtatttctgacagtgaaagcccaagaacatgtgaaatattatatggggtattaaatactggaga

SEQ ID NO: 321427 - DNA, 75 bp, synthetic construct
  source 1..75: mol_type = other DNA
catatcagtatgaaaccggttttcgaacactgcatcaagctcatactgatattatattgtttgcgactcaattag

SEQ ID NO: 321428 - DNA, 75 bp, synthetic construct
  source 1..75: mol_type = other DNA
tgatattctccgggctcgcagggcaaccggcctgatgacccggaacaattacagaatggtaaataacattaccca

SEQ ID NO: 321429 - DNA, 75 bp, synthetic construct
  source 1..75: mol_type = other DNA
tttcagttaatggttatggggacagaacattttcgcacgtagataccgatgcaaaaattaacgaggtatgcgagt

SEQ ID NO: 321430 - DNA, 75 bp, synthetic construct
  source 1..75: mol_type = other DNA
aaataggtggaaaggtagttaaaaatcaaatgatttccccctttgataaataccaattttctctgccaaaggggg

SEQ ID NO: 321431 - DNA, 75 bp, synthetic construct
  source 1..75: mol_type = other DNA
ttcgaacgcaaaccgatttactggatcctgagtgaggtcgcgaaacgtcttggacctgacgtctatcaaaagttc

SEQ ID NO: 321432 - DNA, 75 bp, synthetic construct
  source 1..75: mol_type = other DNA
taccggaacatctgactttactgaaacaagcacaaaagccaatactacctgcaccagtgccagtgccagtgccag

SEQ ID NO: 321433 - DNA, 75 bp, synthetic construct
  source 1..75: mol_type = other DNA
cagcgagctggagaaagtccacaaactcactcaaaccacatctgcaatcagtagtcatagtcaggagaaaagaaa

SEQ ID NO: 321434 - DNA, 75 bp, synthetic construct
  source 1..75: mol_type = other DNA
acgtagaaccttcccactgcaactgtttggtttccattacaaatcccgtactcactcgacctacggcaatattga

SEQ ID NO: 321435 - DNA, 75 bp, synthetic construct
  source 1..75: mol_type = other DNA
gatcccaatggccattttgtcgcctacaaagcatttcgtgacgaccccgaggcaaatccacttaaaacgccttcc

SEQ ID NO: 321436 - DNA, 75 bp, synthetic construct
  source 1..75: mol_type = other DNA
ttactggatcctgagtgaagtcgcgaaacgtcttggacctgacgtctatcaaaagttcacagaaggtcgcacgca

SEQ ID NO: 321437 - DNA, 75 bp, synthetic construct
  source 1..75: mol_type = other DNA
ccacaggcgtcgtttgcaggcgtggcttttattactcggtcatattgttgtggttctcaggcgtagaggaatctc

SEQ ID NO: 321438 - DNA, 75 bp, synthetic construct
  source 1..75: mol_type = other DNA
agaaaatccatcagcttgaagaaaaaattcgtctggaaagacaacaggagacagtgggtatcatccagctcagga

SEQ ID NO: 321439 - DNA, 75 bp, synthetic construct
  source 1..75: mol_type = other DNA
atccaaacttggaaaggcatactcttgggtaaatcttcaaaagcagcttaactacaacccagatcacttagaagc

SEQ ID NO: 321440 - DNA, 75 bp, synthetic construct
  source 1..75: mol_type = other DNA
gcaatgttagaagacaggactggcgaaaaatgcccaaagacgatcatacaggaagctatagatacactcattacc

SEQ ID NO: 321441 - DNA, 75 bp, synthetic construct
  source 1..75: mol_type = other DNA
gcttctacgttcagatgtcagtaaacctgtttggcacaattctctgcgtctgcctgctggtgagagtctacctat

SEQ ID NO: 321442 - DNA, 75 bp, synthetic construct
  source 1..75: mol_type = other DNA
ttcatctgcacctgttagcacccgttcctttcacagccactcattctcctcaggaacaatcagttaggaataacc

SEQ ID NO: 321443 - DNA, 75 bp, synthetic construct
  source 1..75: mol_type = other DNA
gcgttcttcatcatcgtcgtcatcttcctcttcatcctcttttgacaatgataatttcagcggcggcggcggttc

SEQ ID NO: 321444 - DNA, 75 bp, synthetic construct
  source 1..75: mol_type = other DNA
gtgagctatttaagtcactcatttctaaccggcggttaatatatacattaactcgtcgtgaagtgattagccggt

SEQ ID NO: 321445 - DNA, 75 bp, synthetic construct
  source 1..75: mol_type = other DNA
gcttctcaaacgtacgctgggcgggcaaaccggcgatacgctgggagcagccatagagcttggtgaactggtctt

SEQ ID NO: 321446 - DNA, 75 bp, synthetic construct
  source 1..75: mol_type = other DNA
atgagtaaattattttgggcgatgctctcttttattacgcgtctgcctgtaccgcgtcgctggtcccagggactg

SEQ ID NO: 321447 - DNA, 75 bp, synthetic construct
  source 1..75: mol_type = other DNA
ctggtgcagatagctttattttcgggcatacgccagtaaacagcccgaaatctttctggaaccagcactacatag

SEQ ID NO: 321448 - DNA, 75 bp, synthetic construct
  source 1..75: mol_type = other DNA
tcctgatggcaacgtgaataactggctaatgaatggcggacaatggttcttcatgctggacactgatcaggaaat

SEQ ID NO: 321449 - DNA, 75 bp, synthetic construct
  source 1..75: mol_type = other DNA
ggcgaccttatcgatcgcggcaccgaaaatgttaaatgcttggagctattgcagatgccatggttcagagcggtt

SEQ ID NO: 321450 - DNA, 75 bp, synthetic construct
  source 1..75: mol_type = other DNA
ggaagcatcatggtggttctgatgactggcgtacaccgtatcgtttatttcgtaatctgcatcgtgagtttagtt

SEQ ID NO: 321451 - DNA, 75 bp, synthetic construct
  source 1..75: mol_type = other DNA
atacaggaacacaccccgcaaaccgaaagttgaagttacccagacaatctattgtggtgacacaatgcttttact

SEQ ID NO: 321452 - DNA, 75 bp, synthetic construct
  source 1..75: mol_type = other DNA
tcctcttcatcctcttttgacaatgataatttcagcggcggcggcggttcatctggcggcggtggcgcctccggg

SEQ ID NO: 321453 - DNA, 75 bp, synthetic construct
  source 1..75: mol_type = other DNA
acaaaatgcagaaacagctaaaagaggttgagagagcaacagaggcattaaacggaagttatgatgtccacttcg

SEQ ID NO: 321454 - DNA, 75 bp, synthetic construct
  source 1..75: mol_type = other DNA
gcatgacacgctattaccacgattcaccgatgatattcacaatcagtcatgggttagtgaaaaggtcttctgtaa

SEQ ID NO: 321455 - DNA, 75 bp, synthetic construct
  source 1..75: mol_type = other DNA
ctttagaactgagccacgtaagcatgaaattacgcagatggtttgctgtgctgacacgctattaccgttaaccat

SEQ ID NO: 321456 - DNA, 75 bp, synthetic construct
  source 1..75: mol_type = other DNA
cagaaggctcgcagagcttctcagaagctatgggaagagcattcttcacaaaacccatatgaccttctcaaatat

SEQ ID NO: 321457 - DNA, 75 bp, synthetic construct
  source 1..75: mol_type = other DNA
tagactatccatttgaagcaccgctcaaggaatcatttattgaaagtataatccaaatagaatttaattctaatt

SEQ ID NO: 321458 - DNA, 75 bp, synthetic construct
  source 1..75: mol_type = other DNA
ttttaagaatgagaaagggcaatgttcctctaaattataatgttcaccataaactatctctagatgatggtggta

SEQ ID NO: 321459 - DNA, 75 bp, synthetic construct
  source 1..75: mol_type = other DNA
ccgaccgcgtccgtctgtgctacccgcacgtcaaggtgtacgacgcggccaccaacagcgaacggctggagccgc

SEQ ID NO: 321460 - DNA, 75 bp, synthetic construct
  source 1..75: mol_type = other DNA
ggctctggcgggacgaggcccggaaggcaccattaactttaataccagctctgaccgtgtccgcctgtgctaccc

SEQ ID NO: 321461 - DNA, 75 bp, synthetic construct
  source 1..75: mol_type = other DNA
gtaccggcatgaagctgcttaacgacagcttcaacctgtttggctacttcgccaaaattctgattgccccggtat

SEQ ID NO: 321462 - DNA, 75 bp, synthetic construct
  source 1..75: mol_type = other DNA
tagaaataatgatgatttcataaaccctgatctacaagaacggttagtgatcggggatgatagcatttcaatatt

SEQ ID NO: 321463 - DNA, 75 bp, synthetic construct
  source 1..75: mol_type = other DNA
ggattgggttagcaacgagcaactttccgaattaaccgggatattgccgcacaagtgttctgctgcaaaaagtgt

SEQ ID NO: 321464 - DNA, 75 bp, synthetic construct
  source 1..75: mol_type = other DNA
agaaccgactttcaggtgcaaatcgtaacacactcattgcgggaggaattatggcaaacactgctgagatattca

SEQ ID NO: 321465 - DNA, 75 bp, synthetic construct
  source 1..75: mol_type = other DNA
ggtggtaatgaggagacgaatctctggacgctctgtaccgaatgccatcgacaaaagtctgctcgtgaagcggcg

SEQ ID NO: 321466 - DNA, 75 bp, synthetic construct
  source 1..75: mol_type = other DNA
caacatcagcaatgagagtatcacttttgacgctaacaaccaggcgaagctcgctcaccgcaatgtgcgtaacgt

SEQ ID NO: 321467 - DNA, 75 bp, synthetic construct
  source 1..75: mol_type = other DNA
cagcatcagcaatgagagtatcacttttgattccaacaaccaggcaaaactggctcatcgtgcggtgcgcaatgt

SEQ ID NO: 321468 - DNA, 75 bp, synthetic construct
  source 1..75: mol_type = other DNA
tacctgaatcaggtaagaaaagtttacctaaatcaggtaaaggcgtttacccgaatcaggtaaacacaaaagaca

SEQ ID NO: 321469 - DNA, 75 bp, synthetic construct
  source 1..75: mol_type = other DNA
tgatttatcttttatcgtcgccagttccgcaacaatatctggagatcttcgctgatatttatatcaaccttgatg

SEQ ID NO: 321470 - DNA, 75 bp, synthetic construct
  source 1..75: mol_type = other DNA
aacccagtgaactgggggaactggtctatcgctatgccgataaaatgttcacgttaagccaggaaatgctggata

SEQ ID NO: 321471 - DNA, 75 bp, synthetic construct
  source 1..75: mol_type = other DNA
ggaagagcgtttgcaaggaaaattatttaagcgcaaaggacgggggctggagcccagcgaattgggcgaactggt

SEQ ID NO: 321472 - DNA, 75 bp, synthetic construct
  source 1..75: mol_type = other DNA
atgtctcatatcaattacaaccacttgtattacttctggcatgtctacaaagaaggctctgtggttggcgcagcg

SEQ ID NO: 321473 - DNA, 75 bp, synthetic construct
  source 1..75: mol_type = other DNA
aggtgggacagcatattcacattattgccagtcgtatcgatattactgatggaaagttgtatcttggaaaaaatg

SEQ ID NO: 321474 - DNA, 75 bp, synthetic construct
  source 1..75: mol_type = other DNA
acagcaaaagcatcacagactcagtagatgggttcctttactacaacggctcatagagcttctcagaagctatgg

SEQ ID NO: 321475 - DNA, 75 bp, synthetic construct
  source 1..75: mol_type = other DNA
acatttttaaaaaccactgagagaaaggaaagtatcagtgaaaaacttgctgaactcgaactgcaactcagagaa

SEQ ID NO: 321476 - DNA, 75 bp, synthetic construct
  source 1..75: mol_type = other DNA
acacggtggacgcactttgctggcgtcattacaggcgcacgcagggtgtcacggagcaggtactgaaggcaaatc

SEQ ID NO: 321477 - DNA, 75 bp, synthetic construct
  source 1..75: mol_type = other DNA
atgaaagtgcgagcgcatcagtatgacacggtggatgcactttgctggcgtcattacgggcgtacacagggtgtc

SEQ ID NO: 321478 - DNA, 75 bp, synthetic construct
  source 1..75: mol_type = other DNA
atgtcgttaacaacaccggagtatgtgcgttgtgcaatgccgtttggcgcaaatgatcattgcgactttgcagca

SEQ ID NO: 321479 - DNA, 75 bp, synthetic construct
  source 1..75: mol_type = other DNA
acaccgtggattcgctctgttttcggtactacggcacgacgcagggcgtcaccgaaaaggtgctggatgccaacc

SEQ ID NO: 321480 - DNA, 75 bp, synthetic construct
  source 1..75: mol_type = other DNA
atgaaagtgcgtgcgcatcagtatgacacagtggacgcgctttgctggcgtcattacgggcgcacgcagggggtc

SEQ ID NO: 321481 - DNA, 75 bp, synthetic construct
  source 1..75: mol_type = other DNA
tgaggcgattattaacagcgcccgtgcgacgtccagttccagttttttgcagtgcagtagcattattcgcattac

SEQ ID NO: 321482 - DNA, 75 bp, synthetic construct
  source 1..75: mol_type = other DNA
cagttctgtttatgacggctaacatggcgaatgctgcaactctggataatacatcttccgtaaaagctgactttg

SEQ ID NO: 321483 - DNA, 75 bp, synthetic construct
  source 1..75: mol_type = other DNA
ctggcgcaagcgcgaaaaacccgtggggcggctccgttacaatcaccacctcttcggataaatactccttcaatg

SEQ ID NO: 321484 - DNA, 75 bp, synthetic construct
  source 1..75: mol_type = other DNA
tgcatcagtgccttatgggatcacttttattgagaaacattttacactggataaaaattttgaaggtccagatca

SEQ ID NO: 321485 - DNA, 75 bp, synthetic construct
  source 1..75: mol_type = other DNA
ctttactgtttatgagcggcagcattgctaatgcagcaactttggggaatcaatcatctgttaatgctgatttta

SEQ ID NO: 321486 - DNA, 75 bp, synthetic construct
  source 1..75: mol_type = other DNA
gctgttgcaacatatgaaggtttctccatccgcgtacataaatacgcagatggcgatgccaacgtgcaaaaaatg

SEQ ID NO: 321487 - DNA, 75 bp, synthetic construct
  source 1..75: mol_type = other DNA
ttcgttgtctggttgcactagccaagtttatttcgaagggaacgataaaaactcagagggactgcctcaagccac

SEQ ID NO: 321488 - DNA, 75 bp, synthetic construct
  source 1..75: mol_type = other DNA
gccgggctttacctaccgcgcacgtagcggtaaatcgacctactaccggctggaaaccttcctgttagaaggcag

SEQ ID NO: 321489 - DNA, 75 bp, synthetic construct
  source 1..75: mol_type = other DNA
tctactgagctgggcggcgatgctgttcgctgccgggattggtattgatctgatgttcttctccgttgctgagcc

SEQ ID NO: 321490 - DNA, 75 bp, synthetic construct
  source 1..75: mol_type = other DNA
tgttagcggcaacgctctatattgtctttgtggtctgcattgcctgttcgcgctttggttcggtgaaactcgggc

SEQ ID NO: 321491 - DNA, 75 bp, synthetic construct
  source 1..75: mol_type = other DNA
gctcctaaagcagaatatcaaataaaagttaccggtaatgaagagactcaattagagatgactcgtaagttagag

SEQ ID NO: 321492 - DNA, 75 bp, synthetic construct
  source 1..75: mol_type = other DNA
atacctaactttgataatttacatatatctcagaaacgagaacttgtttctatgtggataggtaaagagaaggaa

SEQ ID NO: 321493 - DNA, 75 bp, synthetic construct
  source 1..75: mol_type = other DNA
gtgccgaaatatggtgagatcgtcatcgacattaaccatgtgccgatgctggccaatgcattcgataaagcccgg

SEQ ID NO: 321494 - DNA, 75 bp, synthetic construct
  source 1..75: mol_type = other DNA
tagcgggcagcagtacagttacgtacttctcgaaaacgtagaagttatggttgatgaagcctgccgcgcagccat

SEQ ID NO: 321495 - DNA, 75 bp, synthetic construct
  source 1..75: mol_type = other DNA
tgggtaaaggatgccacagacaggatgaaaacatgagtttttcactctctttagggcaaatcttttgccattctc

SEQ ID NO: 321496 - DNA, 75 bp, synthetic construct
  source 1..75: mol_type = other DNA
ccggtaaacagttcagctggaaggaccaggggatgagcctgtccatgaaggacaaggactacaatccgctgattg

SEQ ID NO: 321497 - DNA, 75 bp, synthetic construct
  source 1..75: mol_type = other DNA
aagtgggttaccgctatcatgtcacagaggatgcctggattgagccacaggcggaactggtctatggtgctgtat

SEQ ID NO: 321498 - DNA, 75 bp, synthetic construct
  source 1..75: mol_type = other DNA
ttacggtcagtaacccaacaccttatttcattaccctgacagacctgaaaataggtggaaaagtagttaaaaatc

SEQ ID NO: 321499 - DNA, 75 bp, synthetic construct
  source 1..75: mol_type = other DNA
acatggacgatgacgcctgcgttttccacatgatggggcagccgcaagaaacgcgtcacattgtgatgcataacg

SEQ ID NO: 321500 - DNA, 75 bp, synthetic construct
  source 1..75: mol_type = other DNA
gtggacgtaagacagagcatccacagtgcgcacgcaaaaacgctggatacccaagggctgcgcaatgaatttttg

SEQ ID NO: 321501 - DNA, 75 bp, synthetic construct
  source 1..75: mol_type = other DNA
ccgtattgtcagcggacggccggttgtggtgctgcaggacagtcatcagattgagggggaccgcatccgctgggg

SEQ ID NO: 321502 - DNA, 75 bp, synthetic construct
  source 1..75: mol_type = other DNA
cgattggtcaccaccttggggttatcgattgcctggaagcggcgctcacctgcccgtgggatgaatatctggcat

SEQ ID NO: 321503 - DNA, 75 bp, synthetic construct
  source 1..75: mol_type = other DNA
gcgttgaaaaccctgcgcgagaacggaacttacaacgaaatctacaaaaaatggttcggtactgaaccgaaataa

SEQ ID NO: 321504 - DNA, 75 bp, synthetic construct
  source 1..75: mol_type = other DNA
ccggagagaatacgggggaatcaggtgagtaccgtgatgagacccggtggctgctgacaggataccggagtacgg

SEQ ID NO: 321505 - DNA, 75 bp, synthetic construct
  source 1..75: mol_type = other DNA
tcagtcatatcacacctgttgtcagggctgaacaggggacgggcggcacggcctggcagctgaatgttgtgcagc

SEQ ID NO: 321506 - DNA, 75 bp, synthetic construct
  source 1..75: mol_type = other DNA
gagcagtgaggcggttgcggctgcattgcgaaagcagggtgataattctgttctgacgcggccggtatcatttac

SEQ ID NO: 321507 - DNA, 75 bp, synthetic construct
  source 1..75: mol_type = other DNA
gtgccaaccgcgataccgcaccgcgaccgctggggcttcaggatcgcctgagctggaaaaaacgtctctcgcgcc

SEQ ID NO: 321508 - DNA, 75 bp, synthetic construct
  source 1..75: mol_type = other DNA
cctggcctccggacctggctgagtttgtggcgctgatttcggaaagcggggccaacccgtttggtctgactgtgg

SEQ ID NO: 321509 - DNA, 75 bp, synthetic construct
  source 1..75: mol_type = other DNA
ttgtgaccgtaagtttaacggcaatattgctaagctgttcgtccgcatgggcggcaggcaacggtggggttggac

SEQ ID NO: 321510 - DNA, 75 bp, synthetic construct
  source 1..75: mol_type = other DNA
cggtcaaacatttcgagaaggtatgaccgcgaaaaatcctaaaactggtcagaaaattatttacaggaacggaca

SEQ ID NO: 321511 - DNA, 75 bp, synthetic construct
  source 1..75: mol_type = other DNA
tgtggcactgatttcgaaaagcggagccaatccattcggtctgacggtggatgctgtgatggaggagtaccgccg

SEQ ID NO: 321512 - DNA, 75 bp, synthetic construct
  source 1..75: mol_type = other DNA
cgttcaaaggggattgagcgccagatgaccgaaggggaattaaaacggcttgcagaacggcaactgacgaaatgg

SEQ ID NO: 321513 - DNA, 75 bp, synthetic construct
  source 1..75: mol_type = other DNA
atgctgtgatggaggagtaccgccgctggcgcaatgagtcctggcgatatgacggaagtgataagtacccgtggc

SEQ ID NO: 321514 - DNA, 75 bp, synthetic construct
  source 1..75: mol_type = other DNA
tagcaatgatgattattccggccgttttatgagtaacccaatgattcctgctgaatttacgaatgtcactcatgc

SEQ ID NO: 321515 - DNA, 75 bp, synthetic construct
  source 1..75: mol_type = other DNA
aggcttactcggctgctgattttcgccgcgatgcgctggcggaaatggccgatatcaccgcggcggggcggatcc

SEQ ID NO: 321516 - DNA, 75 bp, synthetic construct
  source 1..75: mol_type = other DNA
aattttaccagtagagttgataagcgttgattctgcccttatttacaaagggatggatatcgggacggcgaagcc

SEQ ID NO: 321517 - DNA, 75 bp, synthetic construct
  source 1..75: mol_type = other DNA
actcaggcggttttcttgctggtatcggtgggcaaaactcaaatgcgccaaaggcaagcgatgtaagtgaggcgt

SEQ ID NO: 321518 - DNA, 75 bp, synthetic construct
  source 1..75: mol_type = other DNA
aaccgcggctacgactacggtcgcgccggttgagtccaacgcggagcagattcgcgcggacgccgcatcgagcga

SEQ ID NO: 321519 - DNA, 75 bp, synthetic construct
  source 1..75: mol_type = other DNA
tgctggcatgaccatggataatctaagaacgcttctaaaaaagactttgcagcggcacgcacccaattttttggg

SEQ ID NO: 321520 - DNA, 75 bp, synthetic construct
  source 1..75: mol_type = other DNA
tgagtgttccgccagtgcgacgacaactggaaggggcgaaacacccgcaagggccaacgccaattgaacggctga

SEQ ID NO: 321521 - DNA, 75 bp, synthetic construct
  source 1..75: mol_type = other DNA
gcgggtcagtctctatggcatggccgggatggcgtacacccgctggtctgacagtgttcaggattaccggcgtga

SEQ ID NO: 321522 - DNA, 75 bp, synthetic construct
  source 1..75: mol_type = other DNA
tgtggcgctgatttcggaaagcggagccaatccattcggtctgacggtggatgctgtgatggaggagtaccgccg

SEQ ID NO: 321523 - DNA, 75 bp, synthetic construct
  source 1..75: mol_type = other DNA
atggagcgttgtcgggcgggtgaaacatggcctcctgacctggcagagtttgtggcgttgatttcggaaagtggg

SEQ ID NO: 321524 - DNA, 75 bp, synthetic construct
  source 1..75: mol_type = other DNA
tctttttcgggttatctgacgcatcgcttaaccggcgagtttaaagacaatatcgccaactattttggtcagtag

SEQ ID NO: 321525 - DNA, 75 bp, synthetic construct
  source 1..75: mol_type = other DNA
cccgtagagaccgtggccattgatattgcttatgaaggctccggcagtggcgactggcgcactgacggcttcatc

SEQ ID NO: 321526 - DNA, 75 bp, synthetic construct
  source 1..75: mol_type = other DNA
atgcggcatttatacgcaaccatattattctggaccacactgctgacaggaattgcccttcctgcacaggctgaa

SEQ ID NO: 321527 - DNA, 75 bp, synthetic construct
  source 1..75: mol_type = other DNA
ccgggcgggtgaaacgtggcccccggacctggctgagtttgttgcactgatttcggagagtggggcaaatccatt

SEQ ID NO: 321528 - DNA, 75 bp, synthetic construct
  source 1..75: mol_type = other DNA
atggaccgctgccgggcgggtgaaacatggcctccggacctggctgagtttgtggcgctgatttcggaaagcggg

SEQ ID NO: 321529 - DNA, 75 bp, synthetic construct
  source 1..75: mol_type = other DNA
gcggtgccggtacgattactgtcgatggtcaatgctatgaaatcggtcaccgcgacgccctgtatgttggtaaag

SEQ ID NO: 321530 - DNA, 75 bp, synthetic construct
  source 1..75: mol_type = other DNA
gacggaagcgataaatatccgtggcctcagcctgtgctgtatcacatttgcctcgagatgcgttcaaaggggatt

SEQ ID NO: 321531 - DNA, 75 bp, synthetic construct
  source 1..75: mol_type = other DNA
ggcgacaactggcggcacccaaacgcccgtcgggaccaacgccaattgagttgctgaaacaggagtatgaacgcc

SEQ ID NO: 321532 - DNA, 75 bp, synthetic construct
  source 1..75: mol_type = other DNA
gacgaaatggacaaagcatgttggtaacgggatgagtgttccgccagtgcgacgacaactggaaggggcgaaaca

SEQ ID NO: 321533 - DNA, 75 bp, synthetic construct
  source 1..75: mol_type = other DNA
ttggctacggcgtgctaccggatgacggcggcctggtgctgggcggcctgccgaaagtttctcgctctattaact

SEQ ID NO: 321534 - DNA, 75 bp, synthetic construct
  source 1..75: mol_type = other DNA
gcgtcgatgcgctggtggcgcaacgtgcggcggtcgaagcggatattgccctgaccaaacttcatctggaaatgg

SEQ ID NO: 321535 - DNA, 75 bp, synthetic construct
  source 1..75: mol_type = other DNA
ctgaccaaactgcatctggaaatggcaaccgttcgcgcgccgtttgatggccgggtcatttccctcaaaacctcg

SEQ ID NO: 321536 - DNA, 75 bp, synthetic construct
  source 1..75: mol_type = other DNA
ctgttccgcattgacccgcgcccgtacgaagccaatctggcgaaagctgaagcctccctcgcggcgctggataag

SEQ ID NO: 321537 - DNA, 75 bp, synthetic construct
  source 1..75: mol_type = other DNA
ccaccgttcgcgcaccgttcgatggtcgggtgatttccctcaaaacctcggttgggcaatttgcctccgcgatgc

SEQ ID NO: 321538 - DNA, 75 bp, synthetic construct
  source 1..75: mol_type = other DNA
gcgatacattacgccgcaccgagccattactgaaagaaggttttgtctcagcggaagacgttgaccgtgcaagaa

SEQ ID NO: 321539 - DNA, 75 bp, synthetic construct
  source 1..75: mol_type = other DNA
atgtcgcaggctgctctgaacacgcgaaacagcgaggaagagatttcttctcgccgcaataatggaacacgtctg

SEQ ID NO: 321540 - DNA, 75 bp, synthetic construct
  source 1..75: mol_type = other DNA
gcagaattaaactgctctaccgcccacagggactggttattccgccagaacaggcaccgggtaaattagagttca

SEQ ID NO: 321541 - DNA, 75 bp, synthetic construct
  source 1..75: mol_type = other DNA
gtgactgccgaagaggtgaataacgcacttaaacaagcaaccaccaataacgagtcatttggttatactgaaccg

SEQ ID NO: 321542 - DNA, 75 bp, synthetic construct
  source 1..75: mol_type = other DNA
aactcgggcaaatcccggatgtttcgctaaaacagctcaacgtgcgtgaccaacaggcactgattagcacattga

SEQ ID NO: 321543 - DNA, 75 bp, synthetic construct
  source 1..75: mol_type = other DNA
aagtgcctgggctgtacttcatcggcgaagtgatggacgtcaccggctggctggggggctataacttccagtggg

SEQ ID NO: 321544 - DNA, 75 bp, synthetic construct
  source 1..75: mol_type = other DNA
ctgaaaggtcatgcacaacgcgtacccgtgaaaaccggttcggtgactgaactggtgtctattcttggaaaaaaa

SEQ ID NO: 321545 - DNA, 75 bp, synthetic construct
  source 1..75: mol_type = other DNA
cagtcagccgccagcgccgtcagcggcgtcgatgcgctggtcgcccaacgtgcggcggtcgaagcggatattgcc

SEQ ID NO: 321546 - DNA, 75 bp, synthetic construct
  source 1..75: mol_type = other DNA
ttgttgtcacatacgcgagcaagcatgagagttggcctgacagcagcgcagttacggcagttggcacaggttctg

SEQ ID NO: 321547 - DNA, 75 bp, synthetic construct
  source 1..75: mol_type = other DNA
aaaccaaagagattctcgtccagctttatgcctatacgggcttcccccgtagcctgaatgcgcttagtgaactga

SEQ ID NO: 321548 - DNA, 75 bp, synthetic construct
  source 1..75: mol_type = other DNA
aacaagggatgactcatcgggaattagccaggaaatatggcaattctattcagtggatttatcagattattgccg

SEQ ID NO: 321549 - DNA, 75 bp, synthetic construct
  source 1..75: mol_type = other DNA
gtcctgatacccagataatttctgtttcagaccgtgaaggtgatatttacgacctctttgagagtgcagaaaatg

SEQ ID NO: 321550 - DNA, 75 bp, synthetic construct
  source 1..75: mol_type = other DNA
gaagaggaaagttacgttgttctccggtaacggtaactgtattacttgcaaaggaaataaatgctccagaaagtg

SEQ ID NO: 321551 - DNA, 75 bp, synthetic construct
  source 1..75: mol_type = other DNA
gacattttcgcccgtgataacctcgactggcaaagccgcgagctggcaacggttggcgcattagcggccacgccg

SEQ ID NO: 321552 - DNA, 75 bp, synthetic construct
  source 1..75: mol_type = other DNA
gacctcgaactgggcggccacatggcgtccttccagtcttccgcaaccatttatgatgtgtgctttaaccacttc

SEQ ID NO: 321553 - DNA, 75 bp, synthetic construct
  source 1..75: mol_type = other DNA
cagtcagccgccagcgccgtcagcggcgtggatgcattagttgcccagcgtgcggcagtggaagcggatattgcc

SEQ ID NO: 321554 - DNA, 75 bp, synthetic construct
  source 1..75: mol_type = other DNA
ggtcaaaatcatggtcgataaacctgacccggaaatgttccgtatcggcgcatcagcagtcgctaatcttgagcc

SEQ ID NO: 321555 - DNA, 75 bp, synthetic construct
  source 1..75: mol_type = other DNA
gttactggaatacgaataataaagataccttatatcaggtcggctataatacgagcgtgcatggggtttatttaa

SEQ ID NO: 321556 - DNA, 75 bp, synthetic construct
  source 1..75: mol_type = other DNA
gtgtggtggccggaagatgcagatcatattgcttttattcgcgggcgtattggttttgaactgcctgcctggttt

SEQ ID NO: 321557 - DNA, 75 bp, synthetic construct
  source 1..75: mol_type = other DNA
cttatgtcgtggttgcggcgctgggcgaactggctaaacgtggcgaaatcgataagaaagtggttgctgacgcaa

SEQ ID NO: 321558 - DNA, 75 bp, synthetic construct
  source 1..75: mol_type = other DNA
agagtatccgctgacggatgtggaaggtaagcgagtcgtggtattgggcggtggcgatacgacaatggattgttt

SEQ ID NO: 321559 - DNA, 75 bp, synthetic construct
  source 1..75: mol_type = other DNA
aacttggtgagttcactctaccgaaaaccgaggcaagcacagatcgagtggtgcatcttatccagcccgcaatca

SEQ ID NO: 321560 - DNA, 75 bp, synthetic construct
  source 1..75: mol_type = other DNA
ggatctgaaacggatggaaatctgcgcgaacgcatttaatcgctatgaatctgtcgcaaggaatatggtgccgag

SEQ ID NO: 321561 - DNA, 75 bp, synthetic construct
  source 1..75: mol_type = other DNA
ccattttaaaccagaaattgagtgagtttgccccatccatgccccacgctgtgggatcggatgtaattaaacaag

SEQ ID NO: 321562 - DNA, 75 bp, synthetic construct
  source 1..75: mol_type = other DNA
gaaacggaatggcatgatattgtcatttttggaaagaaagccgaagcagctgggaagtacttcaaaaagggtatg

SEQ ID NO: 321563 - DNA, 75 bp, synthetic construct
  source 1..75: mol_type = other DNA
agcggcacggcgcggggtgcggatcaaactgatcattcagggcgaaccggatatgccgattgtcagagtcggtgc

SEQ ID NO: 321564 - DNA, 75 bp, synthetic construct
  source 1..75: mol_type = other DNA
tgcggtcgggctggtggtcgtcagctatctgatttacggttgctacgacctgctcgcccgtttctactgcggtca

SEQ ID NO: 321565 - DNA, 75 bp, synthetic construct
  source 1..75: mol_type = other DNA
gcgtggagaatcatggcggtacgctccgcatatggttcatctataaaggcagccgggtgcgtgaaagcctcggcg

SEQ ID NO: 321566 - DNA, 75 bp, synthetic construct
  source 1..75: mol_type = other DNA
gtgcatcttatccagcccgcaatcagtatcctgaaaaatcaggctgaaatgacaaggctgggcaggcaatatcac

SEQ ID NO: 321567 - DNA, 75 bp, synthetic construct
  source 1..75: mol_type = other DNA
acgcatctggtttaattttaaaggtaaacgtgtcagggaaaatcttggtgtccctgacactgccaagaacaggaa

SEQ ID NO: 321568 - DNA, 75 bp, synthetic construct
  source 1..75: mol_type = other DNA
cattaccctgacagacctgaaaataggtggaaaggtagttaaaaatcaaatgatttccccctttgataaatacca

SEQ ID NO: 321569 - DNA, 75 bp, synthetic construct
  source 1..75: mol_type = other DNA
tcatacgaaaggatttgctgaccggatatcatgttctgaaacgtgggcaaaaaacacccattaagggacgttccg

SEQ ID NO: 321570 - DNA, 75 bp, synthetic construct
  source 1..75: mol_type = other DNA
gtgtgcttcgcgataaagacaggcaacttcaactatgccgcacagttccctgactcgccgaacctgagaagattt

SEQ ID NO: 321571 - DNA, 75 bp, synthetic construct
  source 1..75: mol_type = other DNA
acacgccgccggacggacgatggaagatattgtggcgcaggtaaaaaacgtcacccagttgatagctcagattag

SEQ ID NO: 321572 - DNA, 75 bp, synthetic construct
  source 1..75: mol_type = other DNA
acatttataacgtcaatgacgacactctggatggcaacgacaccattgtttccgtggcgtcatgcaccactaact

SEQ ID NO: 321573 - DNA, 75 bp, synthetic construct
  source 1..75: mol_type = other DNA
tactgtgagatttaattctccatctaatggagtaacggctgtttcagggtttaaagtgatttcggttgtccctgt

SEQ ID NO: 321574 - DNA, 75 bp, synthetic construct
  source 1..75: mol_type = other DNA
atgagcatagagacggtgatcaaattagaatggaagaggttttattccattcagagcatgaaccaacaaaagatg

SEQ ID NO: 321575 - DNA, 75 bp, synthetic construct
  source 1..75: mol_type = other DNA
ccgttcatggtgcggatctggtcgtcaccgcaatggcagcaggaagacaggcggcacacgatatgttagccatgt

SEQ ID NO: 321576 - DNA, 75 bp, synthetic construct
  source 1..75: mol_type = other DNA
tcgtcctcgtccggtagcgggttcagagtttgaattgcccgccgatgttctcattatggcctttggtttccaggc

SEQ ID NO: 321577 - DNA, 75 bp, synthetic construct
  source 1..75: mol_type = other DNA
ctgttcacggcgcggatctggttgttaccgcaatggccgcaggaaggcaggcggcgcgcgatatgttaactctgt

SEQ ID NO: 321578 - DNA, 75 bp, synthetic construct
  source 1..75: mol_type = other DNA
ggcacgttccgtaacgtgccgtttctcgtcatcgaggagcaaaaacaggctggcggacgtcgcctggttaaacgc

SEQ ID NO: 321579 - DNA, 75 bp, synthetic construct
  source 1..75: mol_type = other DNA
gcggtggacaatctgggggttacgcagactgtcagcggtctgatgggatcgctttctgcgatgaaaggctctgtg

SEQ ID NO: 321580 - DNA, 75 bp, synthetic construct
  source 1..75: mol_type = other DNA
tcgtcatcgaggagcaaaaacaggctggcggacgtcgtctggttaaacgtgagtacccgttacgtgataccggcg

SEQ ID NO: 321581 - DNA, 75 bp, synthetic construct
  source 1..75: mol_type = other DNA
ataaagctatcaacatgggtttagtgaaaacgcctcttgttgcgtggatagattttggctattgggtaatgactc

SEQ ID NO: 321582 - DNA, 75 bp, synthetic construct
  source 1..75: mol_type = other DNA
gtgaagagcaagctcgcctgctggttataccagatgatgaaattattctgaccagaatgtgttttctttgtgata

SEQ ID NO: 321583 - DNA, 75 bp, synthetic construct
  source 1..75: mol_type = other DNA
ggtcaggaccttattcctgtattaagcggtttcggctgtaatgtcgtggcggtttttcagagccgttcgtgttcg

SEQ ID NO: 321584 - DNA, 75 bp, synthetic construct
  source 1..75: mol_type = other DNA
cgcgtctggtcgaaaaccagcgagaaaccggtgtggatggatcaggccgaaaaagcaaccggtgatttttattga

SEQ ID NO: 321585 - DNA, 75 bp, synthetic construct
  source 1..75: mol_type = other DNA
ttctaatctcatttttgcgagttgttatattgaaaattagatatagaaaagccttggacatcaatattttcaggg

SEQ ID NO: 321586 - DNA, 75 bp, synthetic construct
  source 1..75: mol_type = other DNA
cggccggcgggaggaatacggcgcgctacctgggtcgttatctgaagaagccgccgatagcagcctcccggctgg

SEQ ID NO: 321587 - DNA, 75 bp, synthetic construct
  source 1..75: mol_type = other DNA
gtaatgaccttaaagaattgcgggtagctttaaactactctcaaaatccagtttcacctaaagtccgctccctca

SEQ ID NO: 321588 - DNA, 75 bp, synthetic construct
  source 1..75: mol_type = other DNA
gggaagcacttctttaaagctgttggtgatgaactcaaaaatttgcgactagttttaaacgagtcacaaaatgaa

SEQ ID NO: 321589 - DNA, 75 bp, synthetic construct
  source 1..75: mol_type = other DNA
tattttacgctctaactattttaaatggtttggtgcctcttataacaatatcgtttatgtcaagaatattaacaa

SEQ ID NO: 321590 - DNA, 75 bp, synthetic construct
  source 1..75: mol_type = other DNA
gaagttttttaagatggtgaggtacttcgggttccttgccaaccgggtgtgtggagagaagctgccgcaggtgta

SEQ ID NO: 321591 - DNA, 75 bp, synthetic construct
  source 1..75: mol_type = other DNA
atgagtcgtttagtcgtagtatctaaccggattgcaccaccagacgagcacgccgccagtgccggtggccttgct

SEQ ID NO: 321592 - DNA, 75 bp, synthetic construct
  source 1..75: mol_type = other DNA
ggtttcttcttgcatattcctttcccgacaccggaaatcttcaacgcgctgccgacatatgacaccttgcttgaa

SEQ ID NO: 321593 - DNA, 75 bp, synthetic construct
  source 1..75: mol_type = other DNA
cattgcggggctgaatgtatcagggctgaagaaaaatgcgcggaatatcagcctgcggaggtacatccctgactg

SEQ ID NO: 321594 - DNA, 75 bp, synthetic construct
  source 1..75: mol_type = other DNA
acaacggaggggcgagcctgagcttccgttacctggaccacaaaacgggagaaacggcgacggaaacgctgacac

SEQ ID NO: 321595 - DNA, 75 bp, synthetic construct
  source 1..75: mol_type = other DNA
cacaaatggtgaaacagttcctgagtcgtgccccgttcgaatgcgtgctgtgtggcggccggatggtataccgcc

SEQ ID NO: 321596 - DNA, 75 bp, synthetic construct
  source 1..75: mol_type = other DNA
aacagcatactcagcgtactggatgcaaacctaccagccaggacactacaggaactgataaagatatctgcggat

SEQ ID NO: 321597 - DNA, 75 bp, synthetic construct
  source 1..75: mol_type = other DNA
acggagtgagcagacaggagcgaactgaacctgaacgggttaaatcaccgtcacgtggattttctatgggattct

SEQ ID NO: 321598 - DNA, 75 bp, synthetic construct
  source 1..75: mol_type = other DNA
gatatgacgttaagttataaaaattttgacaaaggtttttttaattctcgttttcaaatgcaggtaatgactcca

SEQ ID NO: 321599 - DNA, 75 bp, synthetic construct
  source 1..75: mol_type = other DNA
aaggcattgtgatgttcgagaaggtcgaagtcccggtgctcggtattgttgagaacatgagcgtgcatatttgca

SEQ ID NO: 321600 - DNA, 75 bp, synthetic construct
  source 1..75: mol_type = other DNA
gtggtattgcgctaacgcgtgatgactgtattcgccgcgatgtgattaagtcgctcatctgcaacttccgtctgg

SEQ ID NO: 321601 - DNA, 75 bp, synthetic construct
  source 1..75: mol_type = other DNA
gagcatgggcgtgcaggacttcaacaaagaagtacagcgtctggtcaatcgcgagcaggatgaagaattcatctt

SEQ ID NO: 321602 - DNA, 75 bp, synthetic construct
  source 1..75: mol_type = other DNA
gggaacatgccggaatgggccagggataatccttcccatttctggcaggcggctgaccagtttgaacgtgcgaac

SEQ ID NO: 321603 - DNA, 75 bp, synthetic construct
  source 1..75: mol_type = other DNA
ggcatagcgcgttcgaagagttaaaagagcaatgtagcgccgaactgctgcgtatcaccggggcgaaagctatcg

SEQ ID NO: 321604 - DNA, 75 bp, synthetic construct
  source 1..75: mol_type = other DNA
atgaaaacgcttccgaccgttaacaccctacagcctatcctgcataaccagatccccgttatcactactgaacta

SEQ ID NO: 321605 - DNA, 75 bp, synthetic construct
  source 1..75: mol_type = other DNA
tcacgctaaaatgctcgaaaccgatcaggcgtgggatgtattcgaacggctggaagactgctacttcaaccagaa

SEQ ID NO: 321606 - DNA, 75 bp, synthetic construct
  source 1..75: mol_type = other DNA
cggcgtgggtaaatcctccacggcggtaaacctggcgttggcactggcggcggaaggggcgaaagtcggcattct

SEQ ID NO: 321607 - DNA, 75 bp, synthetic construct
  source 1..75: mol_type = other DNA
cttttgaagacctgaaagagcaatgtagtggtgatctgctccgtatcactggcgcaaaggctattgactggaagc

SEQ ID NO: 321608 - DNA, 75 bp, synthetic construct
  source 1..75: mol_type = other DNA
aggaaaccttgtggccggatctggactatctggtactcgacatgccgccaggaaccggtgacattcagctgacgc

SEQ ID NO: 321609 - DNA, 75 bp, synthetic construct
  source 1..75: mol_type = other DNA
ttatacccagattgcgccaacgtcgcgtggtgatgtgcaagcctatcaggatattcgtcatcagctcgaaaatga

SEQ ID NO: 321610 - DNA, 75 bp, synthetic construct
  source 1..75: mol_type = other DNA
taacccatcgaaacgaccgtggtcggtggcttcagatgactctaacaacagctggaatccggcatacaattgctt

SEQ ID NO: 321611 - DNA, 75 bp, synthetic construct
  source 1..75: mol_type = other DNA
cagccggataggtgtggggaatctttaccgtctgatgcgcggctatgcggaaggtggttatgtgggtggtgccgg

SEQ ID NO: 321612 - DNA, 75 bp, synthetic construct
  source 1..75: mol_type = other DNA
gctggaatccggcctacaattgctttgatcgtccgggtaaaaatgtatctcttttacgctacgcatcaacggcaa

SEQ ID NO: 321613 - DNA, 75 bp, synthetic construct
  source 1..75: mol_type = other DNA
atttccgcacgtgtggcatatcaaccaaaaaatatttttgattttgttaatgtttcacctgtcatggtgagtaat

SEQ ID NO: 321614 - DNA, 75 bp, synthetic construct
  source 1..75: mol_type = other DNA
gccatttttagactccgtggggatggtacttgatgataataaatattatcttttctcacggagaacaaataataa

SEQ ID NO: 321615 - DNA, 75 bp, synthetic construct
  source 1..75: mol_type = other DNA
atggtaccgcattattaccatgtacgaagaccagcagcctgataactggcgcgtacaggcgatactgtatgcgtg

SEQ ID NO: 321616 - DNA, 75 bp, synthetic construct
  source 1..75: mol_type = other DNA
gatcctgccgcctcgctggtaagcgcctggcaaaaagcctgtgctgcgcgttcagacaatcaaccactgtatgcc

SEQ ID NO: 321617 - DNA, 75 bp, synthetic construct
  source 1..75: mol_type = other DNA
attgacctcggcgatgatttctacaccgtcgggcgtccccatccgatgatcgacccaaccttacgcaaccagtta

SEQ ID NO: 321618 - DNA, 75 bp, synthetic construct
  source 1..75: mol_type = other DNA
ttcagacagccaaccgctgtacgccattgccacggtgacaggtaccgaacgtgacccgcaatgccgctcgcagca

SEQ ID NO: 321619 - DNA, 75 bp, synthetic construct
  source 1..75: mol_type = other DNA
tgcgtggcaattcgtagcgaagcggcggatgcggggatcgcgcaggcgattatgcaacagcttgaagaggcgcta

SEQ ID NO: 321620 - DNA, 75 bp, synthetic construct
  source 1..75: mol_type = other DNA
attgccacggtgacgggtactgaacgtgacccgcaatgccgttcgcaacaaattgccacactggaagatgcgggg

SEQ ID NO: 321621 - DNA, 75 bp, synthetic construct
  source 1..75: mol_type = other DNA
aatcagaaaatgttgatgatgtttccgtaatgatgggtacgcccgccaataaagcgttattagataccacaggtt

SEQ ID NO: 321622 - DNA, 75 bp, synthetic construct
  source 1..75: mol_type = other DNA
gtgaccggggcttatttataaaagatatcgtacttaaaatgctgacgccaaaccggctattgtgcgtaattttac

SEQ ID NO: 321623 - DNA, 75 bp, synthetic construct
  source 1..75: mol_type = other DNA
agattgaagagattttagaacttctgccacaccgtttcccgttcttactggtggatcgcgtgctggattttgaag

SEQ ID NO: 321624 - DNA, 75 bp, synthetic construct
  source 1..75: mol_type = other DNA
ttataccatgccgttaccgctcttttcaccaccgctgatctatacggacctgacgttgacaacacatcaacagga

SEQ ID NO: 321625 - DNA, 75 bp, synthetic construct
  source 1..75: mol_type = other DNA
aatacggcgtccatctttctgatgaggaaagcggtctggtcgcggtgatttttggtgcctggctaatgcaggaaa

SEQ ID NO: 321626 - DNA, 75 bp, synthetic construct
  source 1..75: mol_type = other DNA
acgccttgtagctatgagaaaaaacttagaaaggcaaatggtaaatcttcgcgggaaaacacttaatggggatat

SEQ ID NO: 321627 - DNA, 75 bp, synthetic construct
  source 1..75: mol_type = other DNA
aaagctcaagaagataaagcaataagcgaattagcctctagtgctggcaagataatcgatgatgttgctggtgcg

SEQ ID NO: 321628 - DNA, 75 bp, synthetic construct
  source 1..75: mol_type = other DNA
cttcgctggtattgacgaagcgcgcttcaagcgcccggtcgtgcctggcgatcaaatgatcatggaagtcacttt

SEQ ID NO: 321629 - DNA, 75 bp, synthetic construct
  source 1..75: mol_type = other DNA
gatgattttacggacgtattaccccacggcacggcgcagataagcgcaggtgaaccgctgttatccatcattcgc

SEQ ID NO: 321630 - DNA, 75 bp, synthetic construct
  source 1..75: mol_type = other DNA
caatatttggcttaggcatcatctttcgctctatagatacagggagattttataagagtgtttttttgctttttg

SEQ ID NO: 321631 - DNA, 75 bp, synthetic construct
  source 1..75: mol_type = other DNA
gcgtgattttacttattgccgggtatcagctggtcacggttatacgtcatttctggctgactcaagtgacatcgg

SEQ ID NO: 321632 - DNA, 75 bp, synthetic construct
  source 1..75: mol_type = other DNA
caacattaaacatatgtcggtaaaggtatttttgcagacaggcgctccgcgcggcgcggcgcggcgcggcgcggc

SEQ ID NO: 321633 - DNA, 75 bp, synthetic construct
  source 1..75: mol_type = other DNA
aatggtgaaaaaccggagattgccaattgttgtgactgggaggctgccgccatgcttcgcgctttccctctggcg

SEQ ID NO: 321634 - DNA, 75 bp, synthetic construct
  source 1..75: mol_type = other DNA
atcgacagcccgatgaatgatgtaacccgccttcagtgcatgagtgcagctgtaatagcaatcagccgctgggag

SEQ ID NO: 321635 - DNA, 75 bp, synthetic construct
  source 1..75: mol_type = other DNA
tcaaagccgcggcgcaggctgcacttgatggtaatgctgcgggagcagaaagtgcactcaaccgtgccggaacac

SEQ ID NO: 321636 - DNA, 75 bp, synthetic construct
  source 1..75: mol_type = other DNA
gcagaagagcagacggtgccgcagctcaaagccgcggcgcaggctgcacttgatggtaatgctgcgggagcagaa

SEQ ID NO: 321637 - DNA, 75 bp, synthetic construct
  source 1..75: mol_type = other DNA
aaaagcggaacttgcgcggcgcgctgctggcgagtctcccggaaccgacctggtgaaaccgctaattgacaccgg

SEQ ID NO: 321638 - DNA, 75 bp, synthetic construct
  source 1..75: mol_type = other DNA
tgttgatacagataaaacaggacaaattcgtgtcagagtggtggaaggaaaaaaacaccttcgtgccgtccagga

SEQ ID NO: 321639 - DNA, 75 bp, synthetic construct
  source 1..75: mol_type = other DNA
tcaaggcagttacaacgatacgagataattacagtacatgtagatccttccgcatcggtttattctatccagtta

SEQ ID NO: 321640 - DNA, 75 bp, synthetic construct
  source 1..75: mol_type = other DNA
ctctgcttttttcctctgtggcgctggcagaaaaccatcaccctcatacagcccctgaccagccagccgcaatga

SEQ ID NO: 321641 - DNA, 75 bp, synthetic construct
  source 1..75: mol_type = other DNA
taatatcagtgaagaggcactggcatggattctggataatgccgccaacgtacccgtatttgtcgatccggtttc

SEQ ID NO: 321642 - DNA, 75 bp, synthetic construct
  source 1..75: mol_type = other DNA
ttttacggggaaggccgcaatgacctttaaggaagcgtacatccaggctttcaactggatggcggagcttattcg

SEQ ID NO: 321643 - DNA, 75 bp, synthetic construct
  source 1..75: mol_type = other DNA
ttgcagggtgccgacctgactgtgggtgaacagcatattcgcctgcctgagtttatgctgaaagctgtcggtttt

SEQ ID NO: 321644 - DNA, 75 bp, synthetic construct
  source 1..75: mol_type = other DNA
ggactggttttacgaagtgcgtcatctttcgacgtcattaggactggtagaggcgggactggggatttcggcgct

SEQ ID NO: 321645 - DNA, 75 bp, synthetic construct
  source 1..75: mol_type = other DNA
aaatacctcaagttatttatctctactcgataataccggcgaaatgctggttgctataaatgatatgaatattag

SEQ ID NO: 321646 - DNA, 75 bp, synthetic construct
  source 1..75: mol_type = other DNA
aaccttgagtgggattgctttgtcagggcgtgaagatgtggcaaaagttgctgcctggttccatcaacatggcct

SEQ ID NO: 321647 - DNA, 75 bp, synthetic construct
  source 1..75: mol_type = other DNA
catcaggggcgtgtgggagactttgaattcaccaccctggatgtgatagcccgcctcagacaggacaccacaacc

SEQ ID NO: 321648 - DNA, 75 bp, synthetic construct
  source 1..75: mol_type = other DNA
ctgtcctttctgctccccagcgccgctgccagatcttgctgacactatttcagccgtggttgaccgccaccacga

SEQ ID NO: 321649 - DNA, 75 bp, synthetic construct
  source 1..75: mol_type = other DNA
tgtttatggcattgctcttttccatgttgcgggttcccaatccgctgcaggatacccatcagcgcgatcggcaat

SEQ ID NO: 321650 - DNA, 75 bp, synthetic construct
  source 1..75: mol_type = other DNA
atttaaaagagattgagcgttatgtcggaggcgtaaggctgaaagacatgcacccgacagaacgtggtaaagtca

SEQ ID NO: 321651 - DNA, 75 bp, synthetic construct
  source 1..75: mol_type = other DNA
tctgctgacgggcaatgacagcgaaagagaagcctatattgagcagcagttacgtgaactgacgctactgccact

SEQ ID NO: 321652 - DNA, 75 bp, synthetic construct
  source 1..75: mol_type = other DNA
gatcagctttatacccacctcgcccaggcgttaaatcgcagtttgtttgccatcggtattgataacaccctgccg

SEQ ID NO: 321653 - DNA, 75 bp, synthetic construct
  source 1..75: mol_type = other DNA
gatgcgcatcagcgggacagacaactgcgtcagtctatcaaacgtctggtaaaccattttcgtgagctgggaaat

SEQ ID NO: 321654 - DNA, 75 bp, synthetic construct
  source 1..75: mol_type = other DNA
gcagccgatattgcctgcgcaaaatcaggccttaccgccagaagttcgtgcgttccttaatgccgggagaacgcg

SEQ ID NO: 321655 - DNA, 75 bp, synthetic construct
  source 1..75: mol_type = other DNA
ttatccgtgaatgctatagaatcgaagaagatgcattattttcttcaaaatcacattataatgtctctgatagat

SEQ ID NO: 321656 - DNA, 75 bp, synthetic construct
  source 1..75: mol_type = other DNA
gtgctgatgctgatgatctccggctcagcgctggcgaccatcgacgtgttgcagtttaaagatgaagcacaggaa

SEQ ID NO: 321657 - DNA, 75 bp, synthetic construct
  source 1..75: mol_type = other DNA
cgacggcgaaatcgtgtatggtattggcgcgatcaaaggggtcggtgaaggtccgattgaggcgatcatcgaagc

SEQ ID NO: 321658 - DNA, 75 bp, synthetic construct
  source 1..75: mol_type = other DNA
caggtcagctttgatgacttcagcggtgggcttaaaatgaccgctcgcgaagtgatggatattgacgaagcccgg

SEQ ID NO: 321659 - DNA, 75 bp, synthetic construct
  source 1..75: mol_type = other DNA
gcgcaaatataactatatgcgcgccgaacagatctatcgtgatgagcaaggtttaagcctgatgccgcacaccgc

SEQ ID NO: 321660 - DNA, 75 bp, synthetic construct
  source 1..75: mol_type = other DNA
ttgcaggcagacgcctttaccctgcaactgcgtttttcacgcccattacccgtggatattcggctacgcaacgac

SEQ ID NO: 321661 - DNA, 75 bp, synthetic construct
  source 1..75: mol_type = other DNA
tcagcgatgccaacagagctaaactttcggcgtggcttttatataagaatcaggttaaggctgttgatgtaacaa

SEQ ID NO: 321662 - DNA, 75 bp, synthetic construct
  source 1..75: mol_type = other DNA
tttcttctatggtccttcctgcacatgccggtattgttatctacgggacgcgtattatttacccggcagagcaca

SEQ ID NO: 321663 - DNA, 75 bp, synthetic construct
  source 1..75: mol_type = other DNA
cgcgctgtttgtcgtgatcggctggacctcttcagcacaaatcccggtcgtcatttataaactaagcctggtttc

SEQ ID NO: 321664 - DNA, 75 bp, synthetic construct
  source 1..75: mol_type = other DNA
ccgctgaagtacttccgtaaggtatggcctgtgctgacgtttgcctttaccagccgttccagtgctgcgtctatc

SEQ ID NO: 321665 - DNA, 75 bp, synthetic construct
  source 1..75: mol_type = other DNA
gtacaggcagcggtacgggtacaggcactggaacgggtacgggcactggaacgggtacaggcactggaacgggta

SEQ ID NO: 321666 - DNA, 75 bp, synthetic construct
  source 1..75: mol_type = other DNA
gccttcatcattcatttctccattgtggaatatgtggccttctgcgcgtgatttttcactgacaattccacgggg

SEQ ID NO: 321667 - DNA, 75 bp, synthetic construct
  source 1..75: mol_type = other DNA
gccgggcgtcacgttagtcagttgcactggggcggcggtacgccgacgtatctgaataaaacgcaaatcagccgc

SEQ ID NO: 321668 - DNA, 75 bp, synthetic construct
  source 1..75: mol_type = other DNA
acggcgaaaggtcgcttgctgatccgcaacatttgcatgtgctttgatacttatcttcgtcagaaagcgcggatg

SEQ ID NO: 321669 - DNA, 75 bp, synthetic construct
  source 1..75: mol_type = other DNA
ttcctgacgcaatcgggttatcagtttattggtatggatcactttgcccgcccggatgacgagctggctgtggct

SEQ ID NO: 321670 - DNA, 75 bp, synthetic construct
  source 1..75: mol_type = other DNA
ctgaccgtctgagcgtctttaactacgcgcatctgccaactatttttgccgcccaacgcaaaatcaaagatgctg

SEQ ID NO: 321671 - DNA, 75 bp, synthetic construct
  source 1..75: mol_type = other DNA
acggcgaaaggccgcttgctgatccgcaacatttgcatgtgcttcgatacttatctgcgccagaaagcgcggatg

SEQ ID NO: 321672 - DNA, 75 bp, synthetic construct
  source 1..75: mol_type = other DNA
ccgatcgtctgagcgtctttaactatgcgcatctgccgaccatttttgctgctcagcgcaaaatcaaagatgctg

SEQ ID NO: 321673 - DNA, 75 bp, synthetic construct
  source 1..75: mol_type = other DNA
aactggggagtttcgttgtcgcgtcctacctcggtctgatcatcatgtttgcggtccatggcattctgttgggca

SEQ ID NO: 321674 - DNA, 75 bp, synthetic construct
  source 1..75: mol_type = other DNA
tggtggttggcattgcggccagtggtcgcacgccgtatgtaattgccggactggaatacgcacgccagctcggct

SEQ ID NO: 321675 - DNA, 75 bp, synthetic construct
  source 1..75: mol_type = other DNA
tcgccgtggtatttggcgtgcatcagggctttattcctgtttacctcgcgttaatggacagccagggattcaaca

SEQ ID NO: 321676 - DNA, 75 bp, synthetic construct
  source 1..75: mol_type = other DNA
cctcgttaatcaccctgctgatcaccgctacgcttgcgtacctgatcattatgccgctgggtggctggttattcg

SEQ ID NO: 321677 - DNA, 75 bp, synthetic construct
  source 1..75: mol_type = other DNA
gacgcacgggcttattaagatgctgtggcctaattacctgcgtccggttccggcaatgacccttattgaatatac

SEQ ID NO: 321678 - DNA, 75 bp, synthetic construct
  source 1..75: mol_type = other DNA
gggattctggtggcatggattagcgggttcattttcaccacgctctttggctgccgtgacgtcaatctggactaa

SEQ ID NO: 321679 - DNA, 75 bp, synthetic construct
  source 1..75: mol_type = other DNA
gcttatttcccatcctttcaatggcaggcgcgggccaggtgggcgcggcgctggcactctactggcgggcgcaac

SEQ ID NO: 321680 - DNA, 75 bp, synthetic construct
  source 1..75: mol_type = other DNA
aactgggaagtttcgttgtcgcgtcctacctcggtctgctgattatgtttgcagtgcatggccttctgctgggca

SEQ ID NO: 321681 - DNA, 75 bp, synthetic construct
  source 1..75: mol_type = other DNA
cagacttaagtgttccgcaactcattctgtcctttatcccgaaaaacccgtttgccgatttgactggtgccaatc

SEQ ID NO: 321682 - DNA, 75 bp, synthetic construct
  source 1..75: mol_type = other DNA
actttcgcttttaccagccgttccagcgcagcatccattccgttgaatgtcgaagcgcaaacgcgccgcctgggc

SEQ ID NO: 321683 - DNA, 75 bp, synthetic construct
  source 1..75: mol_type = other DNA
atcctgacgccgctgctgtttattggactgtgctgggcgatggtgaaatttatctatcgcgatatcccactggag

SEQ ID NO: 321684 - DNA, 75 bp, synthetic construct
  source 1..75: mol_type = other DNA
tccgcgctggtttgagatggcctgcatcctgacgccgctgctgtttattggactgtgctgggcgatggtgaaatt

SEQ ID NO: 321685 - DNA, 75 bp, synthetic construct
  source 1..75: mol_type = other DNA
ccgcctctttcggtgcgaccattggtcagaacggctgtgccggtttgtatccggcaatgctggcggtgatggttg

SEQ ID NO: 321686 - DNA, 75 bp, synthetic construct
  source 1..75: mol_type = other DNA
gtgttcttttcgggattatttcaacgaaaaagtgacgcaccggtgaccacgccagcagagctggcggaggctatc

SEQ ID NO: 321687 - DNA, 75 bp, synthetic construct
  source 1..75: mol_type = other DNA
gggttgtcatacgacacctataccggaaagcggatcagcagccagcgggccatgcggctgacggcggtgtattcc

SEQ ID NO: 321688 - DNA, 75 bp, synthetic construct
  source 1..75: mol_type = other DNA
catgaccccccaggagttctgggaactggtcattgtctgtctttgtcttcgcggtaatttttacgcctacaaagt

SEQ ID NO: 321689 - DNA, 75 bp, synthetic construct
  source 1..75: mol_type = other DNA
gtttatcggcgatgaatgtgccgtgccgccatatcgtagcgcatgggttgaggacgcaacggaagcggaagtgcg

SEQ ID NO: 321690 - DNA, 75 bp, synthetic construct
  source 1..75: mol_type = other DNA
aggtggaatcattccttgccgtgattcagtagagtcaatcaaagcaagaatgagtggtcagtggctttataacta

SEQ ID NO: 321691 - DNA, 75 bp, synthetic construct
  source 1..75: mol_type = other DNA
gtgttcttttcgggattatttcaacgaaaaagtgacgcgccggtgacgacgccagcagagctggcagacgctatc

SEQ ID NO: 321692 - DNA, 75 bp, synthetic construct
  source 1..75: mol_type = other DNA
cagccagttcctggaaacccgcaagtttcagctggaagaaatctgtcgtcttttccgcgtgccgctgcacatggt

SEQ ID NO: 321693 - DNA, 75 bp, synthetic construct
  source 1..75: mol_type = other DNA
agccggtggcactgaacgccgaggacagccagttcctggaaacccgcaagtttcagctggaagaaatctgtcgtc

SEQ ID NO: 321694 - DNA, 75 bp, synthetic construct
  source 1..75: mol_type = other DNA
ttgtgccgtacctgacccgtattgaacagcggatcaatacggggctggtcagggagagtaaacaggggagatttt

SEQ ID NO: 321695 - DNA, 75 bp, synthetic construct
  source 1..75: mol_type = other DNA
aaagtgacgcccctgtcactactccggcagaactcgctgaagcagtgggaatgacttacgacacctatacaggga

SEQ ID NO: 321696 - DNA, 75 bp, synthetic construct
  source 1..75: mol_type = other DNA
ttcccggatggctccacggatgtactgagccaggaagatatctggcatgtgcgcacgctgacgctggacggactg

SEQ ID NO: 321697 - DNA, 75 bp, synthetic construct
  source 1..75: mol_type = other DNA
tgcggggaaacttttacgcctacaaagtgaaagcatttggcgaagtggctgaactgctgcccgtcgaccccggtt

SEQ ID NO: 321698 - DNA, 75 bp, synthetic construct
  source 1..75: mol_type = other DNA
tacgttcctttctgagcgcggaatgccgttagcagatacgccggctgatcacatcggtaccttattgcttgccgc

SEQ ID NO: 321699 - DNA, 75 bp, synthetic construct
  source 1..75: mol_type = other DNA
cgatatgctgaacttcctgcccgccacgctggaactggcgggtgcggcgctggtattaattctgctcacctccgt

SEQ ID NO: 321700 - DNA, 75 bp, synthetic construct
  source 1..75: mol_type = other DNA
tattctgtttcagtcaatgcaggttattacgtaacacctaacgcaaaagtttatgttgaaggcgcatggaatcgg

SEQ ID NO: 321701 - DNA, 75 bp, synthetic construct
  source 1..75: mol_type = other DNA
gtgaaatgctggcgtctatttggcggaacagatttctcattaaaacaacaacgatacgagaaattcagggtcgct

SEQ ID NO: 321702 - DNA, 75 bp, synthetic construct
  source 1..75: mol_type = other DNA
gcgtttccatctctattcaataccgatgctgttgtgggcggcgttggtgggatatgttttgttagttatactccc

SEQ ID NO: 321703 - DNA, 75 bp, synthetic construct
  source 1..75: mol_type = other DNA
gctacggagcgtcggctggcgatgtttatggtgctggcggcggcgctgctttctacctttctgaccaacgatgtc

SEQ ID NO: 321704 - DNA, 75 bp, synthetic construct
  source 1..75: mol_type = other DNA
taatgctgcaattattaaaggtgcaattaattgggatttgatgccccagatatctatcggggctgctggctggac

SEQ ID NO: 321705 - DNA, 75 bp, synthetic construct
  source 1..75: mol_type = other DNA
cattatctgctcccgttgcactcaatgctctggccaccactgagcctttcgcttttacccctgaaaaggtcagca

SEQ ID NO: 321706 - DNA, 75 bp, synthetic construct
  source 1..75: mol_type = other DNA
tctggcgcaccatggcacccctgacccgcgatgctatcagtgcaatgtgggacgagctggaagaagattcagaag

SEQ ID NO: 321707 - DNA, 75 bp, synthetic construct
  source 1..75: mol_type = other DNA
cgcttttctttccgaacgaggaatgccattagcagatacgccagccgatcacattggtacactgctgcttgcggc

SEQ ID NO: 321708 - DNA, 75 bp, synthetic construct
  source 1..75: mol_type = other DNA
gaatacagcaaaaatggtgcaggcatagaaaactataatttcatcactactgctggtcttaagtacaccttttaa

SEQ ID NO: 321709 - DNA, 75 bp, synthetic construct
  source 1..75: mol_type = other DNA
gcaggttattacgtaacacctaatgcaaaagtttatgttgaaggcgcatggaatcgggttacgaataagaaaggt

SEQ ID NO: 321710 - DNA, 75 bp, synthetic construct
  source 1..75: mol_type = other DNA
actaacaagaaaggtgatacatctcgttataatagaaacagcaacgtttctgaattcgacaaaaacagtgccggt

SEQ ID NO: 321711 - DNA, 75 bp, synthetic construct
  source 1..75: mol_type = other DNA
tttgaagcgtatgccacggggatcaactgggggatttattcccctaatgactgccgtgatctggaagatatgaat

SEQ ID NO: 321712 - DNA, 75 bp, synthetic construct
  source 1..75: mol_type = other DNA
tggagcagacgtttcgcctcgacgcccagcagtaccacgccctgacagtgggcgataaaggtacgctgagctata

SEQ ID NO: 321713 - DNA, 75 bp, synthetic construct
  source 1..75: mol_type = other DNA
atcccatcatgcatgttgaggaagaaataattgcagaaggccccaattggtatcagtcaaaaatcagattggcaa

SEQ ID NO: 321714 - DNA, 75 bp, synthetic construct
  source 1..75: mol_type = other DNA
atttcacctttcgcagataaggatttcaaaaatgaagttttacaaatttcaaaaaaatatggactagatctgaaa

SEQ ID NO: 321715 - DNA, 75 bp, synthetic construct
  source 1..75: mol_type = other DNA
tgatagcaaacaacctggtattcaattacctggactacttactctggtgtcgtgacagaaataaagcagagatag

SEQ ID NO: 321716 - DNA, 75 bp, synthetic construct
  source 1..75: mol_type = other DNA
tcgttagctgacatgcttatctcatcggtttcggagcttagcacaacagagaaccaaacaacccgcacactggct

SEQ ID NO: 321717 - DNA, 75 bp, synthetic construct
  source 1..75: mol_type = other DNA
tgaagggctgatcaaaggctacgaacttattggcaaggttctacgcgacttgaaattagttggtgactcattaac

SEQ ID NO: 321718 - DNA, 75 bp, synthetic construct
  source 1..75: mol_type = other DNA
gcatactggaatcagcactacatagacacgggcgcggttttttgcggaaatctgacgctaatgcatgtgaaggga

SEQ ID NO: 321719 - DNA, 75 bp, synthetic construct
  source 1..75: mol_type = other DNA
cagcattatatcgacactggtgccgtattttgcggaaacctgacattgatgacagtgaaaggtgatggtgcagca

SEQ ID NO: 321720 - DNA, 75 bp, synthetic construct
  source 1..75: mol_type = other DNA
cgtgaataactggctaatgaatggcggtcaatggttcttcatgctggacgctgatcaggaaatattagccagggc

SEQ ID NO: 321721 - DNA, 75 bp, synthetic construct
  source 1..75: mol_type = other DNA
agagaccatctttcgaatacgaaaaagagtttagagctatttttcaagagaatacctttaacactccacctgtaa

SEQ ID NO: 321722 - DNA, 75 bp, synthetic construct
  source 1..75: mol_type = other DNA
atgcacactgagtatatatggcgataccttgacatagagaaattctctatgttactcgaacaaaatgctttattt

SEQ ID NO: 321723 - DNA, 75 bp, synthetic construct
  source 1..75: mol_type = other DNA
agatggcgtaccccttgcgtacctgtccactaacgttctgcgtaagacaaatggagaaattgctaaaggggtcca

SEQ ID NO: 321724 - DNA, 75 bp, synthetic construct
  source 1..75: mol_type = other DNA
gctcggcagagcagcctgaacaccctctcacgagtttgggatgcttgctccaacatggaacgttatgtccagtac

SEQ ID NO: 321725 - DNA, 75 bp, synthetic construct
  source 1..75: mol_type = other DNA
ctgttcagcaatggcgcggtgacgtcgggtgtgttgcgtacagagcagacgctgtcagatcaggcttatgagcgc

SEQ ID NO: 321726 - DNA, 75 bp, synthetic construct
  source 1..75: mol_type = other DNA
tcatatctggatcatgctcaatccattaacctttattattgaacaagcccgaacggtccttatttgggggggtat

SEQ ID NO: 321727 - DNA, 75 bp, synthetic construct
  source 1..75: mol_type = other DNA
ctgcttttcatcctgagcttgagttcgttgatgaagctgaattgtttcggccagtcgagcaaaagcctgaccatg

SEQ ID NO: 321728 - DNA, 75 bp, synthetic construct
  source 1..75: mol_type = other DNA
atgtttttccaggggctttttcaacgcaaaaataacacccccgtcacaacgcccgggatgcttgcggaagagctg

SEQ ID NO: 321729 - DNA, 75 bp, synthetic construct
  source 1..75: mol_type = other DNA
gaaaaagtgatgagccggtgaccacgccagcagaactggctgatgctatcgggctgtcatacgacacctataccg

SEQ ID NO: 321730 - DNA, 75 bp, synthetic construct
  source 1..75: mol_type = other DNA
catcatcaccattagcagtggtgcgcagtattgccactcactggagtattattctgcagatggctaaacgtgatg

SEQ ID NO: 321731 - DNA, 75 bp, synthetic construct
  source 1..75: mol_type = other DNA
gcatattcgcgtgacgttccaggtcgatgccgacggtcttttgagcgtgacggcgatggagaaatccaccggcgt

SEQ ID NO: 321732 - DNA, 75 bp, synthetic construct
  source 1..75: mol_type = other DNA
ctacgggctggattccggtcaggaaggcgtgatcgccgtttatgaccttggcggcgggacttttgatatatccat

SEQ ID NO: 321733 - DNA, 75 bp, synthetic construct
  source 1..75: mol_type = other DNA
tactcacgtaatagtcgtatatgaactctacatgtcctgttttgaaaaatgccctagctggacaacattcaatac

SEQ ID NO: 321734 - DNA, 75 bp, synthetic construct
  source 1..75: mol_type = other DNA
tcgcttcgatgatcaaagactcaatgagctatgccgagcaggacgtaaaagccgaatgctggcagaacaaaaagt

SEQ ID NO: 321735 - DNA, 75 bp, synthetic construct
  source 1..75: mol_type = other DNA
gctggtgcgtgaacgggtgggtgaatttttcggtcgtccaccgctgacttccatcgacccggataaagtcgtcgc

SEQ ID NO: 321736 - DNA, 75 bp, synthetic construct
  source 1..75: mol_type = other DNA
gcggtgattccgcgctcggcggcgatgatttcgaccatctgctggcggattacattcgcgagcaggcgggcattc

SEQ ID NO: 321737 - DNA, 75 bp, synthetic construct
  source 1..75: mol_type = other DNA
aattatgctgattctaacccggggaagattaaattcacgcccggaggtgtggggcgtaatattgcacataatctt

SEQ ID NO: 321738 - DNA, 75 bp, synthetic construct
  source 1..75: mol_type = other DNA
tggaggtgcgagacaatgttgagcgccgggcttatgaaattgctctggcatcgctggaagcagtatcggatgaac

SEQ ID NO: 321739 - DNA, 75 bp, synthetic construct
  source 1..75: mol_type = other DNA
tggacgtgcgagacaatcttgagcgccgggcttatgaaattgctctggcatcgctggaagcagtatcggatgaac

SEQ ID NO: 321740 - DNA, 75 bp, synthetic construct
  source 1..75: mol_type = other DNA
cctggcgaccatattctggtgatgagcaacggcggttttggtggcatccatcagaaactgctggatggtctggcg

SEQ ID NO: 321741 - DNA, 75 bp, synthetic construct
  source 1..75: mol_type = other DNA
atgtttttatattgcctaccttttatcgttcagaggcccaaccaatctccatcattgaagccatgtactatgggt

SEQ ID NO: 321742 - DNA, 75 bp, synthetic construct
  source 1..75: mol_type = other DNA
gatcatttgagtaaaattcatacactgaaacctaaccgccttgaagctgaaacgctaagtggaattgcactttct

SEQ ID NO: 321743 - DNA, 75 bp, synthetic construct
  source 1..75: mol_type = other DNA
aagctaatgatatagaggattttcttaaaaaatcattcgaacaatcatttacaacaattgatatatctctgaatg

SEQ ID NO: 321744 - DNA, 75 bp, synthetic construct
  source 1..75: mol_type = other DNA
atactggggatcattttaagtcggaattgattcctggcattgtggtgattgcgagaaaaaaatatgctgtgaatt

SEQ ID NO: 321745 - DNA, 75 bp, synthetic construct
  source 1..75: mol_type = other DNA
aaccggaaagttaattatagacacctttttcaagaggttattgattacgcgaaagaaaaatatatcagcggagga

SEQ ID NO: 321746 - DNA, 75 bp, synthetic construct
  source 1..75: mol_type = other DNA
tggatgtgcgagacaattttgagcgccgggcttatgaaattgctctggcatcgctggaagcagtatcggatgaac

SEQ ID NO: 321747 - DNA, 75 bp, synthetic construct
  source 1..75: mol_type = other DNA
tggaagtgcgagacaatattgagcgccgggcttatgaaattgctctggcatcgctggaagcagtatcggatgaac

SEQ ID NO: 321748 - DNA, 75 bp, synthetic construct
  source 1..75: mol_type = other DNA
gttaagttttacaccactaacagtgatatagatgttactcctactgtaacagaaatgcctactgatgaaccaaaa

SEQ ID NO: 321749 - DNA, 75 bp, synthetic construct
  source 1..75: mol_type = other DNA
gaagcctgcgttcagcctgcacactggagtggcgatgtggatacgctggcagatatggtggtgaaaaccgctcag

SEQ ID NO: 321750 - DNA, 75 bp, synthetic construct
  source 1..75: mol_type = other DNA
tgcgcgccagccataagcatccggacgcctatgacatttttcaggtcagcacagtcaccagtaaaatcaaagttt

SEQ ID NO: 321751 - DNA, 75 bp, synthetic construct
  source 1..75: mol_type = other DNA
atcctgcgcaatgcctcgctgccgatgatcaccgccgtggggatgcacattggcgaactgattggcgggacgatg

SEQ ID NO: 321752 - DNA, 75 bp, synthetic construct
  source 1..75: mol_type = other DNA
tggtggtggtttttgtggtctgtaatttgattgtcgatttgctcaacgccgcgctggacccgcgcattcgtcgtc

SEQ ID NO: 321753 - DNA, 75 bp, synthetic construct
  source 1..75: mol_type = other DNA
cgacggacatcagatcctcgacctgggcgatgatttttacaccgtcgggcgtccccatccgatgatcgacccgac

SEQ ID NO: 321754 - DNA, 75 bp, synthetic construct
  source 1..75: mol_type = other DNA
tgaagagtctgacggtgtgcgcctggatatcgatttcacttttgcctgcgaagctgaaatgctgatcttccagct

SEQ ID NO: 321755 - DNA, 75 bp, synthetic construct
  source 1..75: mol_type = other DNA
taaaaattcatttttcataataaatacatttccaatggcttttatttcaatgccttttattcttttttcgaaaaa

SEQ ID NO: 321756 - DNA, 75 bp, synthetic construct
  source 1..75: mol_type = other DNA
cgacaaacgctctaaatttgttcattactgcccgcgtacgctgatcctcaacaaccttgagttcgatcacgccga

SEQ ID NO: 321757 - DNA, 75 bp, synthetic construct
  source 1..75: mol_type = other DNA
tccggggcagggccgtattatctggccggaaaatgacatcaacctgaaacagaccatggcgatgggctgctggag

SEQ ID NO: 321758 - DNA, 75 bp, synthetic construct
  source 1..75: mol_type = other DNA
cgagcaaggtcactggcaggcgaaaaagctgaccactgacgcttccgagtgggaagtgtggctggatggcgaaaa

SEQ ID NO: 321759 - DNA, 75 bp, synthetic construct
  source 1..75: mol_type = other DNA
tggtggtggtttttgtggtctgtaatttgattgttgatttgatcaatgctgcgctggacccgcgtattcgtcgtc

SEQ ID NO: 321760 - DNA, 75 bp, synthetic construct
  source 1..75: mol_type = other DNA
aagtcgtttactggcatcaccgcacaaaaacgtcactgtttcaccggggactggatcattccattgcctttgtcc

SEQ ID NO: 321761 - DNA, 75 bp, synthetic construct
  source 1..75: mol_type = other DNA
gtatgactgcgccttcttcgacaaacgctctaaatttgtccattactgcccgcgtacgctgatcctcaacaacct

SEQ ID NO: 321762 - DNA, 75 bp, synthetic construct
  source 1..75: mol_type = other DNA
ttctggatgggaacattacgaccatagaaataacagaacagtttataaaccagttgctgttgcgctttgaaggta

SEQ ID NO: 321763 - DNA, 75 bp, synthetic construct
  source 1..75: mol_type = other DNA
tgcatgcggcgcttattcagaatgggcacttcgataaaacaagtgccatcaatattgcggaagccatcaacgctg

SEQ ID NO: 321764 - DNA, 75 bp, synthetic construct
  source 1..75: mol_type = other DNA
tcggttatcattgatagcactcacgctgaactgttagaaggccggctggctgtgagcaccgaagaatatttacag

SEQ ID NO: 321765 - DNA, 75 bp, synthetic construct
  source 1..75: mol_type = other DNA
agtatctaaatgaatggccattaaaatattctcgtatcgttcaggctgaagactgcgttttttatggcgtttttg

SEQ ID NO: 321766 - DNA, 75 bp, synthetic construct
  source 1..75: mol_type = other DNA
aagcggataatgggcaagatgtccagtctgagacaatcggatctgatggaagtgccacattgcgttatatggccc

SEQ ID NO: 321767 - DNA, 75 bp, synthetic construct
  source 1..75: mol_type = other DNA
taacgagttacacacatcaaaacaattaaatgcatatcaggctattttaaaagaattgagtgagtctaaaaaaga

SEQ ID NO: 321768 - DNA, 75 bp, synthetic construct
  source 1..75: mol_type = other DNA
ctgagatcgtcattgaagaaacaaaagaagaatctccagcagttgaaccagtggtcgaagaagttaagtcagatg

SEQ ID NO: 321769 - DNA, 75 bp, synthetic construct
  source 1..75: mol_type = other DNA
tgaaaactctacgctgaaagcgccgttttgtataagcggccatggtatgcccggagccacagctgcggatgagtt

SEQ ID NO: 321770 - DNA, 75 bp, synthetic construct
  source 1..75: mol_type = other DNA
cagtaaggtcaaagaccaaaattactattctgttgcagtcaatgcaggttattacgtaacacctaacgcaaaagt

SEQ ID NO: 321771 - DNA, 75 bp, synthetic construct
  source 1..75: mol_type = other DNA
cgctgctggcacgtcgcgtggtgttgagtgtggactggacgctgctgctggtgtttatggcgatgtttatcgacg

SEQ ID NO: 321772 - DNA, 75 bp, synthetic construct
  source 1..75: mol_type = other DNA
gttttactctgtgtccggacgccaatattacccaaacaccgcaggtgtggctccctcccccccgggggggggggg

SEQ ID NO: 321773 - DNA, 75 bp, synthetic construct
  source 1..75: mol_type = other DNA
aatctacccgccgcccacgatatcgtattagcgcaggctgaggtttcgcaggtcagcgctgcgcgcgagaatctg

SEQ ID NO: 321774 - DNA, 75 bp, synthetic construct
  source 1..75: mol_type = other DNA
acgacctggacgctgtccggtttaaccgcaacaaaatcaaccggcggctaagcaaactcggtgatgctgccaact

SEQ ID NO: 321775 - DNA, 75 bp, synthetic construct
  source 1..75: mol_type = other DNA
ggatggacggcgaatgcctggaataaccatgagtcggggcagggagaggacaataacagcgtttatctgggactc

SEQ ID NO: 321776 - DNA, 75 bp, synthetic construct
  source 1..75: mol_type = other DNA
gaccgtgtgcggggtgagcgaaggtgatgcggtggtgacggtgacgacaaatgacggcggacacacggcaacatt

SEQ ID NO: 321777 - DNA, 75 bp, synthetic construct
  source 1..75: mol_type = other DNA
ttacgacgttctaccgggcgttttacggctgtacggggctgacatccataggagagggagtgtttgcaggttgta

SEQ ID NO: 321778 - DNA, 75 bp, synthetic construct
  source 1..75: mol_type = other DNA
caatggtccccccggaattgtttgcagattgtaccggagccacgacgttctatacgacattttaccgttgtaccc

SEQ ID NO: 321779 - DNA, 75 bp, synthetic construct
  source 1..75: mol_type = other DNA
gtacggggctgacgatgttacctgcaggattgtttgataactgtacccgtgtgacgtcgttttaccggacgttcc

SEQ ID NO: 321780 - DNA, 75 bp, synthetic construct
  source 1..75: mol_type = other DNA
gactcactggcagacggggagctccggacaatcagggtgagaacggcggggagtgtcaggttcagggtgtacggg

SEQ ID NO: 321781 - DNA, 75 bp, synthetic construct
  source 1..75: mol_type = other DNA
cgtcaaaagcgctggtcagtgttgctgatgtggtgaactgtcgtgtcagcttcggcgacggatatgttgctgcgg

SEQ ID NO: 321782 - DNA, 75 bp, synthetic construct
  source 1..75: mol_type = other DNA
gcagatcgcgttgctgcccaaatgtattggcaaggtgaagtaatacctggcgaaatcgcattccgcgcagtgtga

SEQ ID NO: 321783 - DNA, 75 bp, synthetic construct
  source 1..75: mol_type = other DNA
gcaaccaactctattggttatctggtcaccgacgacaatgcaatggtgtggcgtggaccgatggccagcaaggcg

SEQ ID NO: 321784 - DNA, 75 bp, synthetic construct
  source 1..75: mol_type = other DNA
cgaaagttggtattttggatgccgatatctatggtccatcaattccaaccatgctgggcgcggaaaaccaacgtc

SEQ ID NO: 321785 - DNA, 75 bp, synthetic construct
  source 1..75: mol_type = other DNA
ctgcaggggactgacggcattgccggaagggatgtttgacagctgcactgccgtgaccacgttcagtaatgcctt

SEQ ID NO: 321786 - DNA, 75 bp, synthetic construct
  source 1..75: mol_type = other DNA
tgatgtggtgaactgtcgtgtcagcttcggcgacggatatgttgctgcggaccagcttgaaacgacaaccagcgg

SEQ ID NO: 321787 - DNA, 75 bp, synthetic construct
  source 1..75: mol_type = other DNA
gttcagttatgcctttggcgactgtgtgagactgaaggcgctgcctgccgggctgtttgaaaactgtagtcgtgt

SEQ ID NO: 321788 - DNA, 75 bp, synthetic construct
  source 1..75: mol_type = other DNA
ccacaattaccgctcatgatgcgggatatataaccagccgctggaaaaaattgttggcctgcaaacggatgcgcc

SEQ ID NO: 321789 - DNA, 75 bp, synthetic construct
  source 1..75: mol_type = other DNA
ataagctgtacgccgacgcatggcttggctttaaaggtacggactggaaaaacgaaattaatatccgcgatttta

SEQ ID NO: 321790 - DNA, 75 bp, synthetic construct
  source 1..75: mol_type = other DNA
ggcgctcccggtgctagatggtggcagttatcgccagcaggtcgaggagcgtatcagtctgtatggctggcactc

SEQ ID NO: 321791 - DNA, 75 bp, synthetic construct
  source 1..75: mol_type = other DNA
gtgcatggtgaccagcccctgatggcctggtgtgtcggcaatgcccgggtggagcctaaaggtaacgccattctt

SEQ ID NO: 321792 - DNA, 75 bp, synthetic construct
  source 1..75: mol_type = other DNA
tgataagtctttagcattaatagtgatgctcatgctatttctgtatgcactcactaaacttttttcatataaaat

SEQ ID NO: 321793 - DNA, 75 bp, synthetic construct
  source 1..75: mol_type = other DNA
tcattccacgcctatggccgtgaaatggacagtgaatttgaatatctgtttaccgatctgcgtaaaacccataac

SEQ ID NO: 321794 - DNA, 75 bp, synthetic construct
  source 1..75: mol_type = other DNA
gtcaccgggatgcatggtgaacctgggcttcagcctgccggcttttggtaaaacggcacagggaacggcgaaaaa

SEQ ID NO: 321795 - DNA, 75 bp, synthetic construct
  source 1..75: mol_type = other DNA
ccagttctgcccggctcctccccctgtttttaaacgtataggtctggctatcggatactgggagccgatggcact

SEQ ID NO: 321796 - DNA, 75 bp, synthetic construct
  source 1..75: mol_type = other DNA
ccagttctgcccggcacctccccccatttttaaacgtatcggactggccatcgggtactgggagccgatggcact

SEQ ID NO: 321797 - DNA, 75 bp, synthetic construct
  source 1..75: mol_type = other DNA
tatgccgctgcgccaggctgcgcgccgctgtttacaggcacaggaaaataacagtgacctgagctcacgcgatga

SEQ ID NO: 321798 - DNA, 75 bp, synthetic construct
  source 1..75: mol_type = other DNA
tgatcccacctggacggacagcagcctgaccaccattctcaacccggaagcggttatttttgccaacccgatagc

SEQ ID NO: 321799 - DNA, 75 bp, synthetic construct
  source 1..75: mol_type = other DNA
tgaccccacctggacagacagcagcctgaccaccatcctcaacccggaagcggttatttttgccaacccgatagc

SEQ ID NO: 321800 - DNA, 75 bp, synthetic construct
  source 1..75: mol_type = other DNA
gcacggtgtaacggtagacaaatggggccgcatcatcgcggatgtggaaagccagtaccgttaccagaccaccaa

SEQ ID NO: 321801 - DNA, 75 bp, synthetic construct
  source 1..75: mol_type = other DNA
ggtgggttgaaactcaattagaaaatatcgttgatattttagactcaatgcgtgtcccggttaataattctgaga

SEQ ID NO: 321802 - DNA, 75 bp, synthetic construct
  source 1..75: mol_type = other DNA
caggaagttcatgccgtagtacaggactggaaagcgcgtggtcgcccacaatatgttgatggcatcacctccgac

SEQ ID NO: 321803 - DNA, 75 bp, synthetic construct
  source 1..75: mol_type = other DNA
tcagcagccacaacagccggttgcaccacagcagcaatatcagcagccgcaacagccagttgcgccgcagccgca

SEQ ID NO: 321804 - DNA, 75 bp, synthetic construct
  source 1..75: mol_type = other DNA
tttcctgatccagatatcagtatgaacaggtattattcatggttgatgaacatactgatcattagcgtgactgga

SEQ ID NO: 321805 - DNA, 75 bp, synthetic construct
  source 1..75: mol_type = other DNA
agcacgtcttgagcaaatcccacaaatcctgaaacgttttcgtcaggcggtgctggctgctgcaacatctggaaa

SEQ ID NO: 321806 - DNA, 75 bp, synthetic construct
  source 1..75: mol_type = other DNA
cagcggtgaaaacagcgccgccgcgttgctggagaaaatcaaagctgaacgcgcagccagcgggggtaaaaaagc

SEQ ID NO: 321807 - DNA, 75 bp, synthetic construct
  source 1..75: mol_type = other DNA
gttgctcacattacaaaagggctgggaatacatgacataataaatagcttgcctatggggtattattcccaggtg

SEQ ID NO: 321808 - DNA, 75 bp, synthetic construct
  source 1..75: mol_type = other DNA
acgtggtggcgcggctgcgtaccaaactcccggcgctacaggtggaatatttcccggagaagccggaagagttcc

SEQ ID NO: 321809 - DNA, 75 bp, synthetic construct
  source 1..75: mol_type = other DNA
atgaaagcgggtttacccaatgaagatgcgccgggcgtttatgacgcgctgccgttcctcattgccaacactaaa

SEQ ID NO: 321810 - DNA, 75 bp, synthetic construct
  source 1..75: mol_type = other DNA
cgcctgcagctgaacaacctgtgcaacaaccttactacgctcctgcggcggaacaacctgttcagcaaccgtatt

SEQ ID NO: 321811 - DNA, 75 bp, synthetic construct
  source 1..75: mol_type = other DNA
gccagtaatcgtacccgtcgcgatgatacctgggtcgatgaagatgagtatgaagacgacgaagagtatgaagat

SEQ ID NO: 321812 - DNA, 75 bp, synthetic construct
  source 1..75: mol_type = other DNA
tgacgatgaacccggcctatcccactctctatccagaagacctgcagatttttggggtgatgacagccttcatac

SEQ ID NO: 321813 - DNA, 75 bp, synthetic construct
  source 1..75: mol_type = other DNA
gataaaatgtgtgacgggaattttgttaacccgatcagcgatatctgctgggagtgcatttttccgatgagcatc

SEQ ID NO: 321814 - DNA, 75 bp, synthetic construct
  source 1..75: mol_type = other DNA
atctgagtttcctcgcgaacgtttacaaccagaaagcgcgtgaattttatcatcgctatggtgtgcagctgattg

SEQ ID NO: 321815 - DNA, 75 bp, synthetic construct
  source 1..75: mol_type = other DNA
accgaaccgctggctaacggcgatggactgaacgtaatgattaagcgtgaagtcgtcggctttcgtgccaacacg

SEQ ID NO: 321816 - DNA, 75 bp, synthetic construct
  source 1..75: mol_type = other DNA
catcacccactaaaccgtaatcttgatcataactgggcagcaggcactgacaaaaacctccagcgaacgtcgggt

SEQ ID NO: 321817 - DNA, 75 bp, synthetic construct
  source 1..75: mol_type = other DNA
ttaccgtattcgcgaagaccgctttagttattctttcaatccaacgttgtcacagtcactgggcgggccggaaga

SEQ ID NO: 321818 - DNA, 75 bp, synthetic construct
  source 1..75: mol_type = other DNA
agcagatttgcacaaaattcgcccgcatcacccactaaaccgtaatcttgatcataactggcagcaggcactgac

SEQ ID NO: 321819 - DNA, 75 bp, synthetic construct
  source 1..75: mol_type = other DNA
tctgtgcccgaaacaggcgaaaggcaatatcaaaagctggaaggcaacgccaatgcaactggttaacggcgatga

SEQ ID NO: 321820 - DNA, 75 bp, synthetic construct
  source 1..75: mol_type = other DNA
attctgaaaatgccgttaccggggagtgttgtcgcctccgtaagcccggatgaactgatgaaaacattgccgaag

SEQ ID NO: 321821 - DNA, 75 bp, synthetic construct
  source 1..75: mol_type = other DNA
agaacgtggcgatctggcgcgcgcttcatcaggtcgtactgaacatttctttgttccatcgacggaaaagacttt

SEQ ID NO: 321822 - DNA, 75 bp, synthetic construct
  source 1..75: mol_type = other DNA
aactgttaagcccggcacgcgatgccgccattgcccgcgaagctattttgcacggtgccgatgctgtttatatcg

SEQ ID NO: 321823 - DNA, 75 bp, synthetic construct
  source 1..75: mol_type = other DNA
atgccgccattgcccgcgaagcttattttgcacggtgccgatgctgtttatatcggcggccctggttttggtgcc

SEQ ID NO: 321824 - DNA, 75 bp, synthetic construct
  source 1..75: mol_type = other DNA
gatcaccaagcattgtctgcgctttgccttcaatctgtgtccgaaacaggcaaaaggtaacatcaaaagctggaa

SEQ ID NO: 321825 - DNA, 75 bp, synthetic construct
  source 1..75: mol_type = other DNA
ttgattgccgtccgtgtgagatgcacgtcatcggcaaaattaaaaatcacattctgaaaatgccgttaccgggaa

SEQ ID NO: 321826 - DNA, 75 bp, synthetic construct
  source 1..75: mol_type = other DNA
ttcaacgatctgcgccctgccctgcgcgatacgccaaaaccggcatatcaacctgcgcctgaatctgaaggattg

SEQ ID NO: 321827 - DNA, 75 bp, synthetic construct
  source 1..75: mol_type = other DNA
ccgacagcgaaagcgaaggtggtgcgggtggtttcgatggcgctgaagaactggatccgttgttcgatcaggcgg

SEQ ID NO: 321828 - DNA, 75 bp, synthetic construct
  source 1..75: mol_type = other DNA
cgtgaagcccagcgcaatcagtacgattctggcgatcagtataacgatgatgaaatcgatgcgatgcagcaggat

SEQ ID NO: 321829 - DNA, 75 bp, synthetic construct
  source 1..75: mol_type = other DNA
acaaatcatcctttcgtaaagcttgtgaagaatgacattaatttaggtccagcagcaagtcgaaataaaggtgtt

SEQ ID NO: 321830 - DNA, 75 bp, synthetic construct
  source 1..75: mol_type = other DNA
gattgcacagggggcctgtgctgcagatgcgattaaaacggtgaaggggaaacccatcaatgcgttgttctggtg

SEQ ID NO: 321831 - DNA, 75 bp, synthetic construct
  source 1..75: mol_type = other DNA
atgcaccggatacggataacccgtccatgcccctgcagatttgtcctctggtaccggtgggctaccgtatcggca

SEQ ID NO: 321832 - DNA, 75 bp, synthetic construct
  source 1..75: mol_type = other DNA
agatacctttgcgcttgaacaaatggctcgcctggtggaagcgcgtctggctgatttccgtattaaagccgatgt

SEQ ID NO: 321833 - DNA, 75 bp, synthetic construct
  source 1..75: mol_type = other DNA
aacttaccgccctgaagtataacgcgggctttgacgcgccagaaattcagctacgcgataagacgctgtatatgt

SEQ ID NO: 321834 - DNA, 75 bp, synthetic construct
  source 1..75: mol_type = other DNA
actggaacccgccgacgctcaatggcgtactgatgaaactcagcgttgggcaatatctggcaaaagataaagggg

SEQ ID NO: 321835 - DNA, 75 bp, synthetic construct
  source 1..75: mol_type = other DNA
tttcaatttcggtgctgtgtatcgtgctgccagctgggcagatcttaaccttagctacgagcgcggtaacacatt

SEQ ID NO: 321836 - DNA, 75 bp, synthetic construct
  source 1..75: mol_type = other DNA
ttgttgcttctccggaggagaatatcttacgctgggaatttgatcgttccagaggtacaggtactctcagtcagg

SEQ ID NO: 321837 - DNA, 75 bp, synthetic construct
  source 1..75: mol_type = other DNA
gttcaggtcggggtcgacaaaaaacatgagctggacggactggatttgtttaccggtttcactgtcacacacact

SEQ ID NO: 321838 - DNA, 75 bp, synthetic construct
  source 1..75: mol_type = other DNA
atgtctggtcagcaatacaaataccgtgactctcgcgaagcggtcgatcgtgccaaccggattctggtgaataac

SEQ ID NO: 321839 - DNA, 75 bp, synthetic construct
  source 1..75: mol_type = other DNA
catggtgcgtggtgtctgcgcagggattgccaattattttgatgtgcccgtaaaactggtgcgtattctcgtggt

SEQ ID NO: 321840 - DNA, 75 bp, synthetic construct
  source 1..75: mol_type = other DNA
tgcctgtattcatcaacggcgtcgccacgccgctgcccggttttcagcgaacccgaatgatgggtgaagcgattg

SEQ ID NO: 321841 - DNA, 75 bp, synthetic construct
  source 1..75: mol_type = other DNA
ttctatgacgtgatgccaccgttctgtttaggcgttggggcgacggcaattggtgatttcggcagtgcggcagga

SEQ ID NO: 321842 - DNA, 75 bp, synthetic construct
  source 1..75: mol_type = other DNA
cgcctgggttacgcgcctgacgaatccgctttttacaatattcagtcaggaaatttccgcccgtgatttgatcct

SEQ ID NO: 321843 - DNA, 75 bp, synthetic construct
  source 1..75: mol_type = other DNA
tcagattgtgctcaggcagtcgtggagcgggcaacagaacgcgccctttgtgaccggctgacacgtaagcgccgg

SEQ ID NO: 321844 - DNA, 75 bp, synthetic construct
  source 1..75: mol_type = other DNA
attgcgcattatctcgatgtgcctgtgaaactggtgcggatcctggtggtactgtccatcttttttggtctggcc

SEQ ID NO: 321845 - DNA, 75 bp, synthetic construct
  source 1..75: mol_type = other DNA
caaagttacctgaaccggcaacggggatcgctcagccgactccgccgcaaagtggtgctcaaccgcctgcgcgtg

SEQ ID NO: 321846 - DNA, 75 bp, synthetic construct
  source 1..75: mol_type = other DNA
tctgtgaatatatcttctactacgtgaaaggtcaggatttccgtcacgtcggcggcgatgaactggataaactgc

SEQ ID NO: 321847 - DNA, 75 bp, synthetic construct
  source 1..75: mol_type = other DNA
gcaagcgagtacgaaaccggtgaacagtgggataaacccaacggctgggcaccgttacaatggatggcgattcag

SEQ ID NO: 321848 - DNA, 75 bp, synthetic construct
  source 1..75: mol_type = other DNA
gccggacaacatggcctttggtgagcagctaccttccagcagcgaattgctggatgaagtcgaccgtgaactggc

SEQ ID NO: 321849 - DNA, 75 bp, synthetic construct
  source 1..75: mol_type = other DNA
atggcgggcattaatctcaataaaaaattatggcgtattccgcagcagggcatggtccgtggcgtctgcgccggg

SEQ ID NO: 321850 - DNA, 75 bp, synthetic construct
  source 1..75: mol_type = other DNA
tgttgctgaaaaacagtgaactgctgatgcttggacaatacaaacaggagaacgcgcgtctgcgcgaactgctgg

SEQ ID NO: 321851 - DNA, 75 bp, synthetic construct
  source 1..75: mol_type = other DNA
cagaaaatttttctgcgtgggtcattgaatcttgccgccgggagctggcagcagacataaaatatgcccgtcagt

SEQ ID NO: 321852 - DNA, 75 bp, synthetic construct
  source 1..75: mol_type = other DNA
tggactatcttaaggacaagatcgcaacggctaaagaagcgcgtgaaaatgcgattgaagcattcgccaagaacg

SEQ ID NO: 321853 - DNA, 75 bp, synthetic construct
  source 1..75: mol_type = other DNA
gcctcttatggactagatagtgtcacggcatctattgctacggcctataatgacaaaaaaattgcttcatcagag

SEQ ID NO: 321854 - DNA, 75 bp, synthetic construct
  source 1..75: mol_type = other DNA
gcatctaagaaattccgtcaggaatacagagccgcgagttttgatgaaaagaaagaaattatattaaatagagaa

SEQ ID NO: 321855 - DNA, 75 bp, synthetic construct
  source 1..75: mol_type = other DNA
gctctgcgtttgggctgcgggcctgacgctgttcaccggttggtcatgggtgaccattgctgaaaaactcggcgg

SEQ ID NO: 321856 - DNA, 75 bp, synthetic construct
  source 1..75: mol_type = other DNA
gctgattagtgataaagataaaattgcgttaggtcttgagcttgccgcagaaaagtacaaagggaagattcagct

SEQ ID NO: 321857 - DNA, 75 bp, synthetic construct
  source 1..75: mol_type = other DNA
gctgattagcgataaagataaaattgcgttaggtcttgaacttgccgcagaaaagtataaagggaaaattcagct

SEQ ID NO: 321858 - DNA, 75 bp, synthetic construct
  source 1..75: mol_type = other DNA
tcattgaatcttgccgccgggagctggcagcagacataaaatatgcccgtcagttgactataaaaaagaatgata

SEQ ID NO: 321859 - DNA, 75 bp, synthetic construct
  source 1..75: mol_type = other DNA
tatatggatatgacatgtctgttattagtcgttggcaaacggaaggattagacctatccgcaccagatgccgatg

SEQ ID NO: 321860 - DNA, 75 bp, synthetic construct
  source 1..75: mol_type = other DNA
ggcaagtgaaacgcgtttacgcgagatggaacgttatgtcacttccgatactttcacgttacgtagccgtttccg

SEQ ID NO: 321861 - DNA, 75 bp, synthetic construct
  source 1..75: mol_type = other DNA
tattattactgagttagtaataacctttctaatgattattttcttttatattgaactccgaaaaattaaatcata

SEQ ID NO: 321862 - DNA, 75 bp, synthetic construct
  source 1..75: mol_type = other DNA
ctcatacaggtctgccagcaaacagtaccgatattgcaccccagatattccgctggctttgtggctgttttcaac

SEQ ID NO: 321863 - DNA, 75 bp, synthetic construct
  source 1..75: mol_type = other DNA
taccgcgattacgactggcgacgcgaacaactggcgctgttttccgctgccgccattgtgccgctctatgtcggt

SEQ ID NO: 321864 - DNA, 75 bp, synthetic construct
  source 1..75: mol_type = other DNA
ggttgaaatattttcatctgtaatttcattaattgtggcgatagttgctgctgctaatcattttggagcatatag

SEQ ID NO: 321865 - DNA, 75 bp, synthetic construct
  source 1..75: mol_type = other DNA
accgctacgtactgctgcctaatgcttatcgcgttatcgtcccgccgatgacctcagagatgatgaacctggtga

SEQ ID NO: 321866 - DNA, 75 bp, synthetic construct
  source 1..75: mol_type = other DNA
ggtgaaacaggcgcgtgaagagctggctgaagcaggattcagtcaggaaagcagtgacaccatgttgtatgcctt

SEQ ID NO: 321867 - DNA, 75 bp, synthetic construct
  source 1..75: mol_type = other DNA
agaaattataacagaagggctattttctctattgatgaacctgcgccaacagtaagaggggttaatagaccgata

SEQ ID NO: 321868 - DNA, 75 bp, synthetic construct
  source 1..75: mol_type = other DNA
atatctagatgttgcagaggtgtttcattttttgattcagagggggtggatttttataactgtgaaatagatgaa

SEQ ID NO: 321869 - DNA, 75 bp, synthetic construct
  source 1..75: mol_type = other DNA
aatatgttgcggtgacaatcatggagtatgaaaaaaaacaagtaaaaggtatttatgataaagaaggctttaggg

SEQ ID NO: 321870 - DNA, 75 bp, synthetic construct
  source 1..75: mol_type = other DNA
ccggagaaacattttaatcgttatacggtgcgttatctgtacctgcttaacataatggcacttgagctaaagtca

SEQ ID NO: 321871 - DNA, 75 bp, synthetic construct
  source 1..75: mol_type = other DNA
ctggtatcgtatgacgggtaaacgtttatcacttaatgtcccgccttttatgctgattccgcgtaatatccggag

SEQ ID NO: 321872 - DNA, 75 bp, synthetic construct
  source 1..75: mol_type = other DNA
ctggtattattgttgaatccattcccagacttgtcatcccggatctgtcatcaacaaatctgctttctggcaagg

SEQ ID NO: 321873 - DNA, 75 bp, synthetic construct
  source 1..75: mol_type = other DNA
ccctgtatcgccgtgcctgtcagctggtgaaacaggcgcgtgaagagctggccgaagcaggattcagtcaggaaa

SEQ ID NO: 321874 - DNA, 75 bp, synthetic construct
  source 1..75: mol_type = other DNA
gttaatcgcgtctggtgttgcggttattttactgaccttattagcttttatgagttttccggatccggatgtcag

SEQ ID NO: 321875 - DNA, 75 bp, synthetic construct
  source 1..75: mol_type = other DNA
aggaagtgcgggaggggaggcgtgtcacagattttaatccatgggcgcagtcttcgtttatttgccgttcagcat

SEQ ID NO: 321876 - DNA, 75 bp, synthetic construct
  source 1..75: mol_type = other DNA
tgtcagccctgaaagaaaagcatgctattcctgcaggactgcgaagttgtcataccgcggttgccggtaatttga

SEQ ID NO: 321877 - DNA, 75 bp, synthetic construct
  source 1..75: mol_type = other DNA
accgttacaatggatggcaattcagggatttaaaatgtatggcgatgaccttctgggtgatgaaatcgcgcgcag

SEQ ID NO: 321878 - DNA, 75 bp, synthetic construct
  source 1..75: mol_type = other DNA
gacccgcaaaattccctgaaagagcatatcgaccagctgtggccggtgctaacccgtgaaccacaggatcacatt

SEQ ID NO: 321879 - DNA, 75 bp, synthetic construct
  source 1..75: mol_type = other DNA
ctaatccagacaaactgacgatcgaggtcgatctctgttatgaactggatccgtatgaattaaaactggatgaga

SEQ ID NO: 321880 - DNA, 75 bp, synthetic construct
  source 1..75: mol_type = other DNA
ccctcgggaaggcggcggcggcgaatacccattacaggatggatttggctggactaatggcgtggtacagcgatt

SEQ ID NO: 321881 - DNA, 75 bp, synthetic construct
  source 1..75: mol_type = other DNA
ttgaagaagatggtgtacgcggtgcgcgccgctatctcgaccacctgaaaatggaatatgccttctggatggacg

SEQ ID NO: 321882 - DNA, 75 bp, synthetic construct
  source 1..75: mol_type = other DNA
aaaacgtttcctgactgcgctcccaaaatggacccgctggatatcttaatccgctatcgtaaagtgcgccgtcat

SEQ ID NO: 321883 - DNA, 75 bp, synthetic construct
  source 1..75: mol_type = other DNA
accacctttgcaataaaggaattgaagaaagcaaaagcattaaaagaccacttcatttcatgcgtggagctatac

SEQ ID NO: 321884 - DNA, 75 bp, synthetic construct
  source 1..75: mol_type = other DNA
tgtcagccctgaaagaaaagcatgctgttcctgctggactacgaagttgtcataccgcggttgtaggtaatttga

SEQ ID NO: 321885 - DNA, 75 bp, synthetic construct
  source 1..75: mol_type = other DNA
gttgttccctgtggggcaaagcgatggaaaaagacgggttcgaagtgcgaactcacgtcatgaatgatcaggcgc

SEQ ID NO: 321886 - DNA, 75 bp, synthetic construct
  source 1..75: mol_type = other DNA
atgctcaatcagaaaattcaaaaccctaatccagacgaactgatgatcgaagtcgatctctgctatgagctggac

SEQ ID NO: 321887 - DNA, 75 bp, synthetic construct
  source 1..75: mol_type = other DNA
atgtgaaactggccgtcgatttgattgtgctgttggaagaaaatcagatcccagcccgcaccgtgctgcgcgcac

SEQ ID NO: 321888 - DNA, 75 bp, synthetic construct
  source 1..75: mol_type = other DNA
atggacagtctcaatcttaataaacatatttccggccagttcaacgccgaactggaaagtatccgcacgcaggtg

SEQ ID NO: 321889 - DNA, 75 bp, synthetic construct
  source 1..75: mol_type = other DNA
gtgcggcacgcactgaatgttcatccccgcctgacggcattgcgggttgacctgcgtttcccggatgtaccggca

SEQ ID NO: 321890 - DNA, 75 bp, synthetic construct
  source 1..75: mol_type = other DNA
caacggacgcagctgtgatatcccgcttcatcaatgccctgaaagcccgaatcgacgcttaccagaaccgtaagc

SEQ ID NO: 321891 - DNA, 75 bp, synthetic construct
  source 1..75: mol_type = other DNA
aacggacgcagctgtgatatcccgcttcatcaatgccctgaaagcccgaatcgacgcttaccagaagcgtaagcc

SEQ ID NO: 321892 - DNA, 75 bp, synthetic construct
  source 1..75: mol_type = other DNA
gaatgttcatccccgcctgacggcattgcgggttgacctgcgtttcccggatgtaccggcagcaacggacgcagc

SEQ ID NO: 321893 - DNA, 75 bp, synthetic construct
  source 1..75: mol_type = other DNA
ccggtgattaccgcgctccgggatcactggccgggatgattaaacaggcgtggtgcagtgccctgggagtggata

SEQ ID NO: 321894 - DNA, 75 bp, synthetic construct
  source 1..75: mol_type = other DNA
aacggacgcggctgtgatatcccgcgtcatcaatgccctgaaagcccgaatcgacgcttatcagaaacgtaagca

SEQ ID NO: 321895 - DNA, 75 bp, synthetic construct
  source 1..75: mol_type = other DNA
aacggacgcagctgtgatatcccgcttcatcaatgccctgaaagcccgaatcaacgcttaccagaaacgtaagcc

SEQ ID NO: 321896 - DNA, 75 bp, synthetic construct
  source 1..75: mol_type = other DNA
catcaatgccctgaaagcccgaatcgacgcttaccagaaacgtaagcatcgggaaggtaaacgcgtgcatcccac

SEQ ID NO: 321897 - DNA, 75 bp, synthetic construct
  source 1..75: mol_type = other DNA
tccggggtcactggccggaatgattaaacaggcctggtgcagtgccctgggggtggatgccgggccttatgccac

SEQ ID NO: 321898 - DNA, 75 bp, synthetic construct
  source 1..75: mol_type = other DNA
aacggacgcagctgtgatatcccgcttcatcaatgccctgaaagcccgaatcgacgcttaccagaaccgtaagcg

SEQ ID NO: 321899 - DNA, 75 bp, synthetic construct
  source 1..75: mol_type = other DNA
aacggacgcagctgtgatatcccgcttcatcaatgccctgaaagcccgaatccacgcttaccagaaccgtaagcc

SEQ ID NO: 321900 - DNA, 75 bp, synthetic construct
  source 1..75: mol_type = other DNA
aacggacgcagctgtgatatcccgcttcatcaatgccctgaaagcccgaatcaacgcttaccagaaccgtaagca

SEQ ID NO: 321901 - DNA, 75 bp, synthetic construct
  source 1..75: mol_type = other DNA
ccctgggagtggatgtcgggtgccatgccacgctggtgcattttccggcctggccggcggtgtggctggcgcgta

SEQ ID NO: 321902 - DNA, 75 bp, synthetic construct
  source 1..75: mol_type = other DNA
cagccagagtatgacgaatacgatcctttattaaatggtgcgccgattaccgagcctgtcgctgccgcagcggct

SEQ ID NO: 321903 - DNA, 75 bp, synthetic construct
  source 1..75: mol_type = other DNA
tgcgtcaacgaaatggagcgtcgttataaactgatgtctgcgctgggtgtgcgtaacctggcgggttataacgaa

SEQ ID NO: 321904 - DNA, 75 bp, synthetic construct
  source 1..75: mol_type = other DNA
tgcacgatcccgctgctacgtgatgacatgaaaaagctgggatatgacacaaaacaccttaaacgatggttagcc

SEQ ID NO: 321905 - DNA, 75 bp, synthetic construct
  source 1..75: mol_type = other DNA
cgacacctgagcctgttgtagaagagacaaagcctgcgcgtcctccgctttactattttgaagaagtggaagaga

SEQ ID NO: 321906 - DNA, 75 bp, synthetic construct
  source 1..75: mol_type = other DNA
agccgaagagcagcaatccgcttttgctccacagtctacaaaccagacggagcaaacttaccagcagccagccgt

SEQ ID NO: 321907 - DNA, 75 bp, synthetic construct
  source 1..75: mol_type = other DNA
cacaatattcgcagcctgcggtgcaatataatgagccgctgcaacagcctgtaccgccacagcagtcgtactata

SEQ ID NO: 321908 - DNA, 75 bp, synthetic construct
  source 1..75: mol_type = other DNA
gcggcctctgcggcggcattaatgactgaaatgcctgcaattatcaaacgcccattgctctgcgcgcccgggaag

SEQ ID NO: 321909 - DNA, 75 bp, synthetic construct
  source 1..75: mol_type = other DNA
attgtgacaccattaaaaaagcccgccgttggctggaaaccaataacatcgactatcgctttcatgattaccgtg

SEQ ID NO: 321910 - DNA, 75 bp, synthetic construct
  source 1..75: mol_type = other DNA
tacgggatatgctgaagcgtgctgactatctcgcgaaagaatacaccaaagtcaacggtaccggtgagcgcaatt

SEQ ID NO: 321911 - DNA, 75 bp, synthetic construct
  source 1..75: mol_type = other DNA
tcgcttctgccgcgcaggtggtgagtagctggggctttagcattacaccagatacgctcaaccagattgccagcg

SEQ ID NO: 321912 - DNA, 75 bp, synthetic construct
  source 1..75: mol_type = other DNA
tcacttattataagggaaagcagaccacaaaaactaaaatgataaagtggatacaaattcttttatataagttag

SEQ ID NO: 321913 - DNA, 75 bp, synthetic construct
  source 1..75: mol_type = other DNA
tcgccgtaacggcgcatctctcggtgagatgatcaaagaagagatgggaccagtaccggggactatcgcgctgtt

SEQ ID NO: 321914 - DNA, 75 bp, synthetic construct
  source 1..75: mol_type = other DNA
tccgggctcactggccggcatgattcaacaggcctggtgcagtgccctgggggtggatgccgggccttatgccac

SEQ ID NO: 321915 - DNA, 75 bp, synthetic construct
  source 1..75: mol_type = other DNA
aaccgaacaacaatatttattgttgcaggtcggttcagacttcacgcgtaaaggtgtcgatcgttccattgaagc

SEQ ID NO: 321916 - DNA, 75 bp, synthetic construct
  source 1..75: mol_type = other DNA
tggtgcagtgccctgggagtggatgccggacgttatgacacgctggcacattttccggtcaggccggcggtgtgg

SEQ ID NO: 321917 - DNA, 75 bp, synthetic construct
  source 1..75: mol_type = other DNA
gtattccgccgatcatcggcgcattgctgccaagtgccagcttcttcgtaatcagcctgtggctgttaatgagaa

SEQ ID NO: 321918 - DNA, 75 bp, synthetic construct
  source 1..75: mol_type = other DNA
ggtgtcgtgccggtgattaccgcgctccggagtctctggccgggatgattaaacaggcgtggtgcagtgccctgg

SEQ ID NO: 321919 - DNA, 75 bp, synthetic construct
  source 1..75: mol_type = other DNA
acgtgctgactatctggcgaaagagcataccaaagctcactgcaccggtgagcgcaattttggctgtagccggag

SEQ ID NO: 321920 - DNA, 75 bp, synthetic construct
  source 1..75: mol_type = other DNA
tgtacgtcaatgcggcagcgaaagatcgcgccaacaaaatggcgacggcgacgaaaacacatctgctgcaacccg

SEQ ID NO: 321921 - DNA, 75 bp, synthetic construct
  source 1..75: mol_type = other DNA
ggcaaatgcccgtcaaaaagggatcgaaaaatacctgtggaacgatcaacaaggctggtatgccgattacgacct

SEQ ID NO: 321922 - DNA, 75 bp, synthetic construct
  source 1..75: mol_type = other DNA
atattgccaccgccaaaagcaatccgaatcgacctgccactgaaatttaccgcgacctgcgctctgccgctgcgt

SEQ ID NO: 321923 - DNA, 75 bp, synthetic construct
  source 1..75: mol_type = other DNA
ggcctggccggcggtgtggctggaacgcgatgatgacactggctttcagcaggtgctggaacgtgctgactatct

SEQ ID NO: 321924 - DNA, 75 bp, synthetic construct
  source 1..75: mol_type = other DNA
tgtactggcctatatggaagaaactaagctggaagggggcgtccggggtatcgtgcagagatcacgccgcttggc

SEQ ID NO: 321925 - DNA, 75 bp, synthetic construct
  source 1..75: mol_type = other DNA
tgttctgcccatccgttggttatcgaagcggcgctggcatttgatcgcaacagcacgcgcaaagtgctgattgaa

SEQ ID NO: 321926 - DNA, 75 bp, synthetic construct
  source 1..75: mol_type = other DNA
ccggtgattaccgcgctccggggtcactggccgggatgattaaacaggcgtggtgcagtgccctgggggtggata

SEQ ID NO: 321927 - DNA, 75 bp, synthetic construct
  source 1..75: mol_type = other DNA
acaaccctgcattacgtctgggcccgggagtttggggagtgcaaaggtaaaaaacactatcatctgatgctgctg

SEQ ID NO: 321928 - DNA, 75 bp, synthetic construct
  source 1..75: mol_type = other DNA
atgacctacaaatacaaccccttctggcaacaacgcatccgtgagatggtgctgtgcgcactggatgttcatccc

SEQ ID NO: 321929 - DNA, 75 bp, synthetic construct
  source 1..75: mol_type = other DNA
tccgggttcactggccggtatgattaaacaggcctggtgcagtgccctgggggtggatgccgggccttatgccac

SEQ ID NO: 321930 - DNA, 75 bp, synthetic construct
  source 1..75: mol_type = other DNA
tccgggatcactggccgggatgattaaacaggcctggtgcagtgccctgggggtggatgccgggccttatgccac

SEQ ID NO: 321931 - DNA, 75 bp, synthetic construct
  source 1..75: mol_type = other DNA
tccgggatcactggccggaatgattgaacaggcctggtgcagtgccctgggggtggatgccgggccttatgccac

SEQ ID NO: 321932 - DNA, 75 bp, synthetic construct
  source 1..75: mol_type = other DNA
gacctgggcatactccccaagctacggcaaaccgctctctgtaccgcaaggcattatcggcctgatgacccgctt

SEQ ID NO: 321933 - DNA, 75 bp, synthetic construct
  source 1..75: mol_type = other DNA
ctgggtgcgggcaacgcctatatgcgtgaagttggcgcggcgctcgatgatggttataaacaaggtgtactgcca

SEQ ID NO: 321934 - DNA, 75 bp, synthetic construct
  source 1..75: mol_type = other DNA
tggtgcagtgccctgggggtggatgccgggccttatgccacgttggcgcattttcctgacacgtcggcggtgtgg

SEQ ID NO: 321935 - DNA, 75 bp, synthetic construct
  source 1..75: mol_type = other DNA
ggccggcggtgtggctggaacgcgatgatgacaccggctttcagcaggtgctggagcgtgctgactatctggcga

SEQ ID NO: 321936 - DNA, 75 bp, synthetic construct
  source 1..75: mol_type = other DNA
atgtcgggtgccatgccacgctggtgcattttccggcctggccggcggtgtggctggcgcgtaatgatgacaccg

SEQ ID NO: 321937 - DNA, 75 bp, synthetic construct
  source 1..75: mol_type = other DNA
atgtcgttgaagtcgctaaaaacaatgctaaagcctccggcggtagcttccgtcaggtcaccagcatggaagaag

SEQ ID NO: 321938 - DNA, 75 bp, synthetic construct
  source 1..75: mol_type = other DNA
ctgcagaagcacagcgccagtcgctgattgatgctgcaatggcttccattagtctgattcaactgaaattacagg

SEQ ID NO: 321939 - DNA, 75 bp, synthetic construct
  source 1..75: mol_type = other DNA
cagcagaagcacagcgccagtcgctgattgattctgcaatggcttccattagtctgattcaactgaaattacagg

SEQ ID NO: 321940 - DNA, 75 bp, synthetic construct
  source 1..75: mol_type = other DNA
tgagaaatgggtgacggatacggatgcacagcatagcggcgcagtagaagcagcagaagcacagcgccagtcact

SEQ ID NO: 321941 - DNA, 75 bp, synthetic construct
  source 1..75: mol_type = other DNA
ccagacttaacgctgtgctggattacattgacgcggtgacggcaacagataccagcaccgcgccggatgtcatct

SEQ ID NO: 321942 - DNA, 75 bp, synthetic construct
  source 1..75: mol_type = other DNA
ccgcagaagcacagcgccagtcgctgattgatactgcaatggcttccattagtctgattcaactgaaatttcagg

SEQ ID NO: 321943 - DNA, 75 bp, synthetic construct
  source 1..75: mol_type = other DNA
atgcgtcccgcgactatcgccccgttaccgccatacgataaatgggatggtgagaaatgggtgacagatactgaa

SEQ ID NO: 321944 - DNA, 75 bp, synthetic construct
  source 1..75: mol_type = other DNA
atgcgtcccgcgactatcgcccccttagcgccatacgataaatgggatggtgagaaatgggtgacagatactgaa

SEQ ID NO: 321945 - DNA, 75 bp, synthetic construct
  source 1..75: mol_type = other DNA
atgcgtcccgcgactatcgcccctttaacgccatacgataaatgggatggtgagaaatgggtgactgatactgaa

SEQ ID NO: 321946 - DNA, 75 bp, synthetic construct
  source 1..75: mol_type = other DNA
tgagaaatgggtgacggataccgatgcacagcatagcgacgcagtagaagcggcagaagcacagcgccagtcact

SEQ ID NO: 321947 - DNA, 75 bp, synthetic construct
  source 1..75: mol_type = other DNA
tgagaaatgggtgacggatactgatgcacagcatagcgtcgcagtagaagccgcagaagcacagcgccagtcact

SEQ ID NO: 321948 - DNA, 75 bp, synthetic construct
  source 1..75: mol_type = other DNA
tgagaaatgggtgacggatacagatgcacagcatagcgccgcagtagaagcggcagaagcacagcgccagtcact

SEQ ID NO: 321949 - DNA, 75 bp, synthetic construct
  source 1..75: mol_type = other DNA
tcaatcttgataaacccggcgcacgcgatccctatgtggagcgcctgttcgaaggcttcgcttttttaatgggcc

SEQ ID NO: 321950 - DNA, 75 bp, synthetic construct
  source 1..75: mol_type = other DNA
cgcaggaacatcctcctatacagggcatatcactctggagcaaaaatcagcactggatatccgcgataattttcg

SEQ ID NO: 321951 - DNA, 75 bp, synthetic construct
  source 1..75: mol_type = other DNA
caagttaaggccaacggaaattcggttctggatgtggcgcataactttgttagcgcatgtcgaatcggcgatcaa

SEQ ID NO: 321952 - DNA, 75 bp, synthetic construct
  source 1..75: mol_type = other DNA
atgacgatgcgctggcgtttgcgtgtattaatcgccagatgatcgctttgcgcataatgcaacaggtgaaggcca

SEQ ID NO: 321953 - DNA, 75 bp, synthetic construct
  source 1..75: mol_type = other DNA
agatggacctgagtatgaagaacaaggatttcagcccgttgattggcagaacagggattgagctgggcaaaacct

SEQ ID NO: 321954 - DNA, 75 bp, synthetic construct
  source 1..75: mol_type = other DNA
gatttggaaacggaaaaaactcatattcccttgttgaccgtaataaccacccttatgttgacttccatgccccac

SEQ ID NO: 321955 - DNA, 75 bp, synthetic construct
  source 1..75: mol_type = other DNA
atatcagaggctggtattgttcgttcagatatctcctatcagatttaccgggattttgcagaaaataaaggactt

SEQ ID NO: 321956 - DNA, 75 bp, synthetic construct
  source 1..75: mol_type = other DNA
cgcaccagaaaatcattatatggccatgaatggcgtcggatgtcgcgccagtgcacgcattatgggcgttggcct

SEQ ID NO: 321957 - DNA, 75 bp, synthetic construct
  source 1..75: mol_type = other DNA
tgtcgcgacatcaggttatttcctgctcagcctgatacagttagtggttagttctgccaaggatggtatcctgat

SEQ ID NO: 321958 - DNA, 75 bp, synthetic construct
  source 1..75: mol_type = other DNA
tttattccgtcgacaacattatttcttcgcgccataccggcagtcaggcgtatgtccccttctccagctttcgtc

SEQ ID NO: 321959 - DNA, 75 bp, synthetic construct
  source 1..75: mol_type = other DNA
aactctcctctgctcaggggccggaagaatgttgtctcgcagtgaaaaaagcactggacaggctgattaaagaag

SEQ ID NO: 321960 - DNA, 75 bp, synthetic construct
  source 1..75: mol_type = other DNA
cgaacgaaaaaacgctccactcgctggcgcatggggcggggcgtaaatgggggcgcaccgagtgtaaagggcgtc

SEQ ID NO: 321961 - DNA, 75 bp, synthetic construct
  source 1..75: mol_type = other DNA
gtcacttaaaaaactcaggccgaagtcggtaacctcgcgcatacatccgggcagtgatgtgattgtctgcgctga

SEQ ID NO: 321962 - DNA, 75 bp, synthetic construct
  source 1..75: mol_type = other DNA
atgcgtcccgcgactatcgccccattatcgccatacgataaatgggatggtgagaaatgggtgactgatactgaa

SEQ ID NO: 321963 - DNA, 75 bp, synthetic construct
  source 1..75: mol_type = other DNA
cgatccgcgaaatcggcaaatgcaaagcgttactcgacgataccgttgcactgacgcccgcgaccgctattcagg

SEQ ID NO: 321964 - DNA, 75 bp, synthetic construct
  source 1..75: mol_type = other DNA
ccgtgaacgtgaacaacttgcggcctggtatcaaccgattccagaaccggttaaagaaccggaaccgatcaaatc

SEQ ID NO: 321965 - DNA, 75 bp, synthetic construct
  source 1..75: mol_type = other DNA
ttgaacagcagcctgttgtggagcctgaacccgttatagaagagacaaaacccacgcgtccgccgctttactatt

SEQ ID NO: 321966 - DNA, 75 bp, synthetic construct
  source 1..75: mol_type = other DNA
tttacctggcttgatgcttacgaagagaagcgtttcgagcagtatttcctgccttaccattctctgggcatggtg

SEQ ID NO: 321967 - DNA, 75 bp, synthetic construct
  source 1..75: mol_type = other DNA
tgccactcaggcgctgaaacgcgcacatgcgctgaacaaaaacccgcagtgtgggcaagccagtttgatccgcgc

SEQ ID NO: 321968 - DNA, 75 bp, synthetic construct
  source 1..75: mol_type = other DNA
catcagagcgtttttccgcccgatgtgactgcggtgtttgatcacggcaaacgcgcagtttccgctttccccatc

SEQ ID NO: 321969 - DNA, 75 bp, synthetic construct
  source 1..75: mol_type = other DNA
gtaaaagcggcgcgcatttctaacttgtcacgggaccttgcccgttcactttcgacggtggcggtgcgtgtcgtt

SEQ ID NO: 321970 - DNA, 75 bp, synthetic construct
  source 1..75: mol_type = other DNA
agccggttacacagcagccgcagtatcagcagccgcaacagccggttgcgccgcagccgcatgataccctgcttc

SEQ ID NO: 321971 - DNA, 75 bp, synthetic construct
  source 1..75: mol_type = other DNA
gatatgctctactctgggccgaactccacgttgccggtacgtgtccatggtgcttttgttcgcgatcaggaagtt

SEQ ID NO: 321972 - DNA, 75 bp, synthetic construct
  source 1..75: mol_type = other DNA
acatcggtatcaaaggagtcttggaacgcttacaacaacccaccaggcaagctatgcaggccgacagcgacctgg

SEQ ID NO: 321973 - DNA, 75 bp, synthetic construct
  source 1..75: mol_type = other DNA
gccgatcatcatggcgcagctgaaagacgttaccgcacacgcggcagcgaccgtcagctcctggggcttcgtgat

SEQ ID NO: 321974 - DNA, 75 bp, synthetic construct
  source 1..75: mol_type = other DNA
gttttggataacgccaaattccgcgataatccgtcgccattaaccgtggtgctgggtaaagatatcgccggtgag

SEQ ID NO: 321975 - DNA, 75 bp, synthetic construct
  source 1..75: mol_type = other DNA
gcgtgttgcacggtatcaatcctgacagactgaccattgagctctccgatgccgacggcaatatcatactgagtt

SEQ ID NO: 321976 - DNA, 75 bp, synthetic construct
  source 1..75: mol_type = other DNA
gcgtacccgtccggatttcagcgaacccggattcattaacatctatacccagaaatatctgggcggtggtgtggt

SEQ ID NO: 321977 - DNA, 75 bp, synthetic construct
  source 1..75: mol_type = other DNA
cgagatctattgcgctgttatcgtacatattaaggacatggcttcctcagcgttgtttgaaaacattctttctgg

SEQ ID NO: 321978 - DNA, 75 bp, synthetic construct
  source 1..75: mol_type = other DNA
gaccaccagcactgacagcggcagggatggcggatataccgtaattcctgagcttgatcgcgaagtcatgcgcca

SEQ ID NO: 321979 - DNA, 75 bp, synthetic construct
  source 1..75: mol_type = other DNA
tgattctgctggtggtactggttgccggcctgtcatcgttggtgctgctggtcaatcctaacgatttccgcagct

SEQ ID NO: 321980 - DNA, 75 bp, synthetic construct
  source 1..75: mol_type = other DNA
tttgttctgagttcaagcgatggatttaacacactggttgaagcagaagtatctaagttcaatttatattatttg

SEQ ID NO: 321981 - DNA, 75 bp, synthetic construct
  source 1..75: mol_type = other DNA
ggttgtgggcgacggtgacaaaaaagcaaaaggttttttatccgtaccccgtgcagagaagaacgacaaagaacg

SEQ ID NO: 321982 - DNA, 75 bp, synthetic construct
  source 1..75: mol_type = other DNA
tgagttatcaggaacatcagccgcaagagttgccgttgccggacgtcgccaaagcgccactggcagcacaagaca

SEQ ID NO: 321983 - DNA, 75 bp, synthetic construct
  source 1..75: mol_type = other DNA
cgccgcaggatgcacgtttgctattcgaacgggatttgctggataagttaaccggtgctgcaccagaaaaacgtc

SEQ ID NO: 321984 - DNA, 75 bp, synthetic construct
  source 1..75: mol_type = other DNA
gagccgatgcatggtttacaggtgatgacaggtttcaccctgcgtcctgaccgggcggcactggaaatcgccagc

SEQ ID NO: 321985 - DNA, 75 bp, synthetic construct
  source 1..75: mol_type = other DNA
caggcggaccccttataggggggtgagggctcccctacccttcactcttgactatgtaaacgataatcattatcg

SEQ ID NO: 321986 - DNA, 75 bp, synthetic construct
  source 1..75: mol_type = other DNA
accgcagaattgctcaatttgtggcatctcactggtcaggcggacaaagcggcagacattctcgccacgcgtaaa

SEQ ID NO: 321987 - DNA, 75 bp, synthetic construct
  source 1..75: mol_type = other DNA
cgtttcccgaatacgctggaagaagtggcggcgctggagagtattgaagagtgctggtttgcccggcatttactg

SEQ ID NO: 321988 - DNA, 75 bp, synthetic construct
  source 1..75: mol_type = other DNA
aagatgcatttctttggcgacagcgaaggacgcattgtgcgcggtctgctggcagtgttgttgaccgccgtggag

SEQ ID NO: 321989 - DNA, 75 bp, synthetic construct
  source 1..75: mol_type = other DNA
atcgccagttgatcatgctggggaaacagcttcctgctttgccagacgagttaaaagcgcaggctaaagagattg

SEQ ID NO: 321990 - DNA, 75 bp, synthetic construct
  source 1..75: mol_type = other DNA
cttctttgggatgacgaaactcctggctactctcatcgtaaaaaggtttatctaaaatcaatcgaaaaagatgag

SEQ ID NO: 321991 - DNA, 75 bp, synthetic construct
  source 1..75: mol_type = other DNA
atggcaaccccagcaactgtatccatagaacccactctggcaactatcagagctcgctggtgttttaattcaagt

SEQ ID NO: 321992 - DNA, 75 bp, synthetic construct
  source 1..75: mol_type = other DNA
atcctctggggttagaagtttttcctagaccattccccttgccaattccatggcccaaaagccctgcacagcagc

SEQ ID NO: 321993 - DNA, 75 bp, synthetic construct
  source 1..75: mol_type = other DNA
tggatataccgtcgcagaaaacggcaggatgcatttctttggtgatagcgaagggcgtattgtgcgcggcctgct

SEQ ID NO: 321994 - DNA, 75 bp, synthetic construct
  source 1..75: mol_type = other DNA
ccatcaggcggcaaactcgtcgcgcgatgtgcgtcgtcagctggacagtggcaaactggatgaagcaatggctcg

SEQ ID NO: 321995 - DNA, 75 bp, synthetic construct
  source 1..75: mol_type = other DNA
gtacccgcgttcttgatgtgattggcgactttaaaggatatacgcatgtcatggtgatcggtggtggcgcaccgc

SEQ ID NO: 321996 - DNA, 75 bp, synthetic construct
  source 1..75: mol_type = other DNA
ggatagctggaacgctaacgttctcatagaaccctactatgacggtagcttttacatagggtttgagaacgtgtc

SEQ ID NO: 321997 - DNA, 75 bp, synthetic construct
  source 1..75: mol_type = other DNA
ctggcggaaaagaaacaactgactcgccggattgaacaagcgtcggctcgtgaagttgagtggcaggaaaaagcc

SEQ ID NO: 321998 - DNA, 75 bp, synthetic construct
  source 1..75: mol_type = other DNA
ctggcagaaaagaaacagttatcgcgtcgtattgaacaggccagcgcccaacaggcagagtggcaggaaaaagca

SEQ ID NO: 321999 - DNA, 75 bp, synthetic construct
  source 1..75: mol_type = other DNA
ttggcggaaaagaaacagttgactcgccgtattgagcaagcgtcggcgcgcgaagttgaatggcaggaaaaagct

SEQ ID NO: 322000 - DNA, 75 bp, synthetic construct
  source 1..75: mol_type = other DNA
atttaacgatttcctaagcaagcaaggaaaaaaattaagaaactcagggttcttagcccgtttattattaattga

SEQ ID NO: 322001 - DNA, 75 bp, synthetic construct
  source 1..75: mol_type = other DNA
gagcgcttatcgaaaactatgagcaagtcgatatcgagaccaaacttttggttcctctgaagaaaacgttcctgc

SEQ ID NO: 322002 - DNA, 75 bp, synthetic construct
  source 1..75: mol_type = other DNA
aacggcgcatagccaatgctcttggcgctctcccctgcattgcctgctatatgcatggagtaatatctgaagagg

SEQ ID NO: 322003 - DNA, 75 bp, synthetic construct
  source 1..75: mol_type = other DNA
gcacctgaaccgcctgagcgccaacctcgccctgctttctgatgtctcgatggcagtgctgggcggcagcctgaa

SEQ ID NO: 322004 - DNA, 75 bp, synthetic construct
  source 1..75: mol_type = other DNA
gactgggacgagatgcaaaatctggttgccggagttttacgcagtatgggctataaaacgcaggtctcacctgcg

SEQ ID NO: 322005 - DNA, 75 bp, synthetic construct
  source 1..75: mol_type = other DNA
gtgcgcttattgagaactacgaacaagttgatatcgagactaaacttttggtgcctctgaagaaaacgttcctgc

SEQ ID NO: 322006 - DNA, 75 bp, synthetic construct
  source 1..75: mol_type = other DNA
aaaacacattgggttctacgctgacggttttccagcttccagaatatgctctagaagagcttttgcaggataaga

SEQ ID NO: 322007 - DNA, 75 bp, synthetic construct
  source 1..75: mol_type = other DNA
gccgattgccggcttcgatcagggttatcgctggtggggacgaggggaattgctcggcatctccattccgatctg

SEQ ID NO: 322008 - DNA, 75 bp, synthetic construct
  source 1..75: mol_type = other DNA
cactatcatcggctccatcatcatgggcattctgattaatggcctggtactgatgaacgtctcggcctactacca

SEQ ID NO: 322009 - DNA, 75 bp, synthetic construct
  source 1..75: mol_type = other DNA
ttatgtaaaattcaccaaatcgaaaatggaggttagagaactggcggagaaaactaacactcctcttttacaatc

SEQ ID NO: 322010 - DNA, 75 bp, synthetic construct
  source 1..75: mol_type = other DNA
cggcgactaacgccatcagcgatatcttcgcgatgggggggcaaaccgattatggcgattgcgatcctcggctgg

SEQ ID NO: 322011 - DNA, 75 bp, synthetic construct
  source 1..75: mol_type = other DNA
agtgcgctgccgccttgccttatcacccttcagcgcgaaaaacgaacgtatggctatttctcgaatggtcgcttt

SEQ ID NO: 322012 - DNA, 75 bp, synthetic construct
  source 1..75: mol_type = other DNA
tttattcttagcgcgcgtctggggagcgccgaggcggtggccgggatctcctttgagttgcgcgtcattgcctcg

SEQ ID NO: 322013 - DNA, 75 bp, synthetic construct
  source 1..75: mol_type = other DNA
aaggattctcattattagaaatgttattagtatttgggattatatcagcgttgatagtgggtgttttcatgattt

SEQ ID NO: 322014 - DNA, 75 bp, synthetic construct
  source 1..75: mol_type = other DNA
ccggatgcgaaaaccgcgtctggctgggatataccatggctgaaaacggcaagatgcatttctttggcgacagcg

SEQ ID NO: 322015 - DNA, 75 bp, synthetic construct
  source 1..75: mol_type = other DNA
caccggagaccacgtccgccgtctgaagacacacgcggaattcaccctgcagaaatcacgctggcgtccggtcgt

SEQ ID NO: 322016 - DNA, 75 bp, synthetic construct
  source 1..75: mol_type = other DNA
agatctcacactggaagctaaccagaagcgcctgacccgtgattaccggggcatgatgctttacgcccttctgtg

SEQ ID NO: 322017 - DNA, 75 bp, synthetic construct
  source 1..75: mol_type = other DNA
tggaaaaactgctcaatgacgggattcatgcacgttccggtaataacgtagtgcagcagaagaaatattctgacc

SEQ ID NO: 322018 - DNA, 75 bp, synthetic construct
  source 1..75: mol_type = other DNA
taagtatccgccggataaaacaccttatgcggttgaactgatactgaagcaggctgaagtggtgtcgaacagctg

SEQ ID NO: 322019 - DNA, 75 bp, synthetic construct
  source 1..75: mol_type = other DNA
cggcggtaaaatcattccgtataaaaaattgctcgacgatgcgataagtcaggcacagcatcagccgcgtcacgt

SEQ ID NO: 322020 - DNA, 75 bp, synthetic construct
  source 1..75: mol_type = other DNA
tgattttgaattcgaaacctattactcgctctcttgccacaactgcccggacgtggtgcaggcgctgaacctgat

SEQ ID NO: 322021 - DNA, 75 bp, synthetic construct
  source 1..75: mol_type = other DNA
aagtcacctttaaagaagataacagcttgccggtgcgtaagccgtctttcctgatcaccaacccaggttccaacc

SEQ ID NO: 322022 - DNA, 75 bp, synthetic construct
  source 1..75: mol_type = other DNA
ttcgggtcataccgatgatttcccttacgccagcggtgagaaaggatatagcaactgggagctttctgccgatcg

SEQ ID NO: 322023 - DNA, 75 bp, synthetic construct
  source 1..75: mol_type = other DNA
atgaaaaaacaggtctgtctcctgctgtccgggctcctgctggcaggctgtgccggacagcaccatcgcccccct

SEQ ID NO: 322024 - DNA, 75 bp, synthetic construct
  source 1..75: mol_type = other DNA
aggcgcaacaccaaccgcgccatgttttgctggtggatcgcgggctggcgaaaatggcgcgcgtcagcgggcggg

SEQ ID NO: 322025 - DNA, 75 bp, synthetic construct
  source 1..75: mol_type = other DNA
aaggcggcctgcatcagattgaaacagcttctggcgcggtactgaaagcacgcagcattatcgtggcgactggtg

SEQ ID NO: 322026 - DNA, 75 bp, synthetic construct
  source 1..75: mol_type = other DNA
caggtgattgaagagctgatccagatggcgaaagcgttccaggaggcgatggcgcgtgatgatgcgttagggctg

SEQ ID NO: 322027 - DNA, 75 bp, synthetic construct
  source 1..75: mol_type = other DNA
tagcggtgaagccgcgcaaagtgtttttgatggcgactatgatgagatagagatccgccaggagtggcaggaaga

SEQ ID NO: 322028 - DNA, 75 bp, synthetic construct
  source 1..75: mol_type = other DNA
cctggaagaagaaaaggccaccgacatcaaactgactgatctggcccttaataacgtaaataagaaagccgaaaa

SEQ ID NO: 322029 - DNA, 75 bp, synthetic construct
  source 1..75: mol_type = other DNA
tgcaatggagcgtgatgatgcgcttggcctgaatcctgacgaaatcgctttctacgatgcactggcagaaaacga

SEQ ID NO: 322030 - DNA, 75 bp, synthetic construct
  source 1..75: mol_type = other DNA
gaatacactgcatgaatgggatgaaggtgaattccagcttgagccgcctctggataccgaagaaggacgcaccgc

SEQ ID NO: 322031 - DNA, 75 bp, synthetic construct
  source 1..75: mol_type = other DNA
aagccattgatgccgctcgcgaggagtttcttgctgataatccaggcctcgaggctgaagatgcgaatgtacagc

SEQ ID NO: 322032 - DNA, 75 bp, synthetic construct
  source 1..75: mol_type = other DNA
gaatacattacatgaatgggacgagggggaatttcagcttgagccaccgctggataccgaggaaggacgcactgc

SEQ ID NO: 322033 - DNA, 75 bp, synthetic construct
  source 1..75: mol_type = other DNA
agtcagtcagagaaaaatacgctactcggtaaaatcctcgataacgccattattgcgacgggcgtggatgatgtg

SEQ ID NO: 322034 - DNA, 75 bp, synthetic construct
  source 1..75: mol_type = other DNA
ccgtagccagtatggcctgagcgccacgctggacagacaaacgggtgtctataaatacggctacgcaaaacatat

SEQ ID NO: 322035 - DNA, 75 bp, synthetic construct
  source 1..75: mol_type = other DNA
tgcgccagacgctgcgtaagtataagtatccgccggacaaaacgccgggcgccgtggaactgattttgaagcagg

SEQ ID NO: 322036 - DNA, 75 bp, synthetic construct
  source 1..75: mol_type = other DNA
ttatcagcaatgaagcgttgattgtcagtgatggttatctggcgcgtgtggggtccctgaccgccacggaagaac

SEQ ID NO: 322037 - DNA, 75 bp, synthetic construct
  source 1..75: mol_type = other DNA
tcccgggtctggaccatcattcgccctgaatgtcaacgacggatgaaaagtgatccacttatatctccaccaacg

SEQ ID NO: 322038 - DNA, 75 bp, synthetic construct
  source 1..75: mol_type = other DNA
cgtgaagacaaaacggttcacgataaagccctgctgatggatttcaaccatcccggcaataaccgctttatggtc

SEQ ID NO: 322039 - DNA, 75 bp, synthetic construct
  source 1..75: mol_type = other DNA
tctctggcgcagacattgatgccgaagcgttccgccataagtggcaagggcaggcgcgtattgaaatggccgata

SEQ ID NO: 322040 - DNA, 75 bp, synthetic construct
  source 1..75: mol_type = other DNA
ctgacagagaaaccggaatggcagctgagactgcaattcccgcaactgaatcttgacaacctcatcccgcttaat

SEQ ID NO: 322041 - DNA, 75 bp, synthetic construct
  source 1..75: mol_type = other DNA
gctgagcgggcaagcacaggtcacgctgacagagaaaccggaatggcagctgagactgcaattcccgcaactgaa

SEQ ID NO: 322042 - DNA, 75 bp, synthetic construct
  source 1..75: mol_type = other DNA
cagttgcagggcgcagacttgccaaaacaaggtattcaggggcaggggagtttccaggcccagtggcaagagcca

SEQ ID NO: 322043 - DNA, 75 bp, synthetic construct
  source 1..75: mol_type = other DNA
aaactgattgatttcctcaaagaaacgccagtaccgctgcgggtttatggcaactggcagcaactcaattacagc

SEQ ID NO: 322044 - DNA, 75 bp, synthetic construct
  source 1..75: mol_type = other DNA
ccgcctgaatgattgggctgaacggaataaagattcgcgcaatggcaaagatgtgaagaagttgctggaaaagct

SEQ ID NO: 322045 - DNA, 75 bp, synthetic construct
  source 1..75: mol_type = other DNA
ggagcgcggcgtcagcacgcacaatgaagatgaagcacgtttaaatcggcggatgtgcgaagtcgcggaacggat

SEQ ID NO: 322046 - DNA, 75 bp, synthetic construct
  source 1..75: mol_type = other DNA
ctgcgacagcaagggagtgtgcaggttaacgatctgtcggcattgtatggcgtatctactgtgacgatccgcaat

SEQ ID NO: 322047 - DNA, 75 bp, synthetic construct
  source 1..75: mol_type = other DNA
cacctttgagattgcccgtctgatgcgcaagcacaccgacgtaattgcgatgaccaacggtatgaacgtggccaa

SEQ ID NO: 322048 - DNA, 75 bp, synthetic construct
  source 1..75: mol_type = other DNA
atggaacaagatccccaacatcgtggctcatttgagttctccgggcgggttaatcgcgatcagcgcgatctcacg

SEQ ID NO: 322049 - DNA, 75 bp, synthetic construct
  source 1..75: mol_type = other DNA
agcgaacggtgaaaacggtgccgcgcagcaggggcagagccaatcaacgttgccgcgcccggtcatttcttcgcg

SEQ ID NO: 322050 - DNA, 75 bp, synthetic construct
  source 1..75: mol_type = other DNA
cgtatctactgtgacgatccgcaacgatctggcgtttctggaaaagcagggaatcgctgtgcgtgcctatggtgg

SEQ ID NO: 322051 - DNA, 75 bp, synthetic construct
  source 1..75: mol_type = other DNA
tctccggtgctgacattgatgcggaagatttccgccataattggcaagggaaggcgcatgttgaaatggccgaca

SEQ ID NO: 322052 - DNA, 75 bp, synthetic construct
  source 1..75: mol_type = other DNA
aacgccttgccggtctgattgccagcctgtcaccggcggcgcgtcggcaaatggcggctgagattgcgaaaaggc

SEQ ID NO: 322053 - DNA, 75 bp, synthetic construct
  source 1..75: mol_type = other DNA
aagaggagattcagtacgagctcagcatttggagtggcagatgaataacctcaattctgcaacagaaaatacgcc

SEQ ID NO: 322054 - DNA, 75 bp, synthetic construct
  source 1..75: mol_type = other DNA
cgagattgcggcggcgcttggcgcgaagcttgcccgacccgggcaaccggtttacgccatggtgggggatggctc

SEQ ID NO: 322055 - DNA, 75 bp, synthetic construct
  source 1..75: mol_type = other DNA
ttgtcgtcaaacgacgtaaagcgaaaagccacggtgcagcacatggatcgtggaagattgcgtatgctgacttta

SEQ ID NO: 322056 - DNA, 75 bp, synthetic construct
  source 1..75: mol_type = other DNA
aagtgttacgtgtcgtcggcatggcggcaacgatgcgcttaagcgatcgcggacctgatgatgctgtcaaccgtc

SEQ ID NO: 322057 - DNA, 75 bp, synthetic construct
  source 1..75: mol_type = other DNA
atgaagaatcaagcgcatccgattattgtcgtcaaacgacgcaaagccaaaagccacggggcagcacatggatcg

SEQ ID NO: 322058 - DNA, 75 bp, synthetic construct
  source 1..75: mol_type = other DNA
gttcgatggtatgaacagatcaatgacatgtttgtactggcatcggtattgattgaaagtctgattcagaatcat

SEQ ID NO: 322059 - DNA, 75 bp, synthetic construct
  source 1..75: mol_type = other DNA
ttcccaatacccaattcttaatcactgaaagtgtggacaactctgatcttaacactgcattaagaatgctggcac

SEQ ID NO: 322060 - DNA, 75 bp, synthetic construct
  source 1..75: mol_type = other DNA
tggtaaagttataagtcgtagcatgctccaaggcattatcagccgtcatgttcccaatacccatttcttaatcac

SEQ ID NO: 322061 - DNA, 75 bp, synthetic construct
  source 1..75: mol_type = other DNA
catgttgaagagaacgctatcgtggttggcgcagccggttcgctgccgggagatttacagcgcctctggcaggtc

SEQ ID NO: 322062 - DNA, 75 bp, synthetic construct
  source 1..75: mol_type = other DNA
aagtctggaatataaaagatgtagattctggcaactatgccgcatttgtttacttaattcagtttgataatggta

SEQ ID NO: 322063 - DNA, 75 bp, synthetic construct
  source 1..75: mol_type = other DNA
ggtgctgtatccggtaaacagtttgcatggaaggaccaggggatgcatctttccatgaaggacaaagactacaat

SEQ ID NO: 322064 - DNA, 75 bp, synthetic construct
  source 1..75: mol_type = other DNA
ttaacgatctgtcagcattatttggcgtttctaccgtgacgatccgcaatgatctggcgtttctggaaaaacagg

SEQ ID NO: 322065 - DNA, 75 bp, synthetic construct
  source 1..75: mol_type = other DNA
ccattcagcaggccatcagacgcaccgaacaatacaacaaccagcttgaacgcgaacggcaggcgcttgcgcgtg

SEQ ID NO: 322066 - DNA, 75 bp, synthetic construct
  source 1..75: mol_type = other DNA
atttgtcagaagaggcaattaaaagactgaacaaactcaggggctggcgtaaagtttcacgatctgcaattttac

SEQ ID NO: 322067 - DNA, 75 bp, synthetic construct
  source 1..75: mol_type = other DNA
tagtgacctgtggtgaacggtatgacctgattcgcggcaatatccgcctgaaagcggcgctggagcgggtggcga

SEQ ID NO: 322068 - DNA, 75 bp, synthetic construct
  source 1..75: mol_type = other DNA
atgaagaaacttcaactctcacccaatggaagaaataccgtgtgctgctgatgcgtgttgatacatcaacagccc

SEQ ID NO: 322069 - DNA, 75 bp, synthetic construct
  source 1..75: mol_type = other DNA
tctccacctttatggtgcatgacaaaattaactacaacattgatgaaccgagcagctctggtaaaacgttatcta

SEQ ID NO: 322070 - DNA, 75 bp, synthetic construct
  source 1..75: mol_type = other DNA
gcgaatggcttgttactccgtccataaaccaaataagtcgcaatgggcgtcaacttaccctggagccgcggttaa

SEQ ID NO: 322071 - DNA, 75 bp, synthetic construct
  source 1..75: mol_type = other DNA
gcaggagatagagcaggaaattaataatgttgaattatcaattatgagtttagatattgaatcaaaaaacataga

SEQ ID NO: 322072 - DNA, 75 bp, synthetic construct
  source 1..75: mol_type = other DNA
tggtgatactggcatcgtcttactccatagccagttatgcaaaagatccctgcaaaacgctcgcttgcatggcag

SEQ ID NO: 322073 - DNA, 75 bp, synthetic construct
  source 1..75: mol_type = other DNA
agcctgtctcagatatcgtgccggaagtacctgtttcaggtgaagaggatgaggtcgtttctaatcctctgcgcg

SEQ ID NO: 322074 - DNA, 75 bp, synthetic construct
  source 1..75: mol_type = other DNA
gacagtgcggcttttattgaatccctgcgtgaccagagcgatatgttgcgccggcaggccactgtaccggagttt

SEQ ID NO: 322075 - DNA, 75 bp, synthetic construct
  source 1..75: mol_type = other DNA
taagggttgtcacattgaacatcactggagatcataaaaaactatctgaattactcgatactgcatttgagattg

SEQ ID NO: 322076 - DNA, 75 bp, synthetic construct
  source 1..75: mol_type = other DNA
aataaaagaataagatatcgttctttagttgattcattcactggttctgccacaatttttaaaacaagtcgcgca

SEQ ID NO: 322077 - DNA, 75 bp, synthetic construct
  source 1..75: mol_type = other DNA
gaactggccggtattttcgtccagattggtctgctgccgaacactaactggctggaaggcgcagtagaacgtaac

SEQ ID NO: 322078 - DNA, 75 bp, synthetic construct
  source 1..75: mol_type = other DNA
gtggtgccagaagtcagtggtcgcattgtggagctggcggttaccgataaccaggccgttaaacagggcgattta

SEQ ID NO: 322079 - DNA, 75 bp, synthetic construct
  source 1..75: mol_type = other DNA
tgcacgccagcacttccgtaaaaatagtgcgaccgcaaccactgaaatccataccacaccagacggtcacccggt

SEQ ID NO: 322080 - DNA, 75 bp, synthetic construct
  source 1..75: mol_type = other DNA
ctattgtggtaatgataatgatcagggcatcaattaattctgcggggagtttccagggggctggagatgttatcg

SEQ ID NO: 322081 - DNA, 75 bp, synthetic construct
  source 1..75: mol_type = other DNA
taccctatgtagcaaatgatattaaagatataattggtaatgggtctgctgtttcaaattttgattctaaatgtc

SEQ ID NO: 322082 - DNA, 75 bp, synthetic construct
  source 1..75: mol_type = other DNA
ccgcagttttactcgcatcaggtatgctgatgtcaactgcggtaaccgctgcgccaggcgatgcatcacaatttg

SEQ ID NO: 322083 - DNA, 75 bp, synthetic construct
  source 1..75: mol_type = other DNA
gcgatacattgcatcgtaccgagccgctactggcagaaggttttgtctctgcggaggacgttgatcgcgcgagaa

SEQ ID NO: 322084 - DNA, 75 bp, synthetic construct
  source 1..75: mol_type = other DNA
cagccgattaaagatgcggtggaaaccgtttatcaacggctggaaggttgggaagggaacggcggattcgcgcag

SEQ ID NO: 322085 - DNA, 75 bp, synthetic construct
  source 1..75: mol_type = other DNA
cgtaacgtgatgggcgttccggccgtattcgtgaatggtaaagagtttggtcaggggcgtatgacgctgactgaa

SEQ ID NO: 322086 - DNA, 75 bp, synthetic construct
  source 1..75: mol_type = other DNA
gggcgaagatcagtatcgcaccaaaggcgtgacctactgcccgcactgcgacggcccgctgtttaaaggcaaacg

SEQ ID NO: 322087 - DNA, 75 bp, synthetic construct
  source 1..75: mol_type = other DNA
taattaacagactcttatttgtagtcctgtttttatctgtctcattttatgccagtgcagaaacagctatgcgca

SEQ ID NO: 322088 - DNA, 75 bp, synthetic construct
  source 1..75: mol_type = other DNA
tttgcgatacgaacaacgttaccagccgtattaccgaggatgagcgaaaagagatcgtccggattgctgagaaaa

SEQ ID NO: 322089 - DNA, 75 bp, synthetic construct
  source 1..75: mol_type = other DNA
ttaagaacatgaaaattgattactggtataaagcgcttacagttgttggcgctgcgttgtttgtctttaatggaa

SEQ ID NO: 322090 - DNA, 75 bp, synthetic construct
  source 1..75: mol_type = other DNA
tcttttattaacggtttggtttttgatgtagatcacaaatatggagcggtcgcatgggacttagttggtttacca

SEQ ID NO: 322091 - DNA, 75 bp, synthetic construct
  source 1..75: mol_type = other DNA
tcagcagccgcaacaaccggttgcaccgcagcagcaatatcagcagccgcaacagccggttgcacagcagccgca

SEQ ID NO: 322092 - DNA, 75 bp, synthetic construct
  source 1..75: mol_type = other DNA
ttgaacagcagcctgttgtggagcctgaacccgttgtagaagagacaaaacccgcgcgtccgccgctttactatt

SEQ ID NO: 322093 - DNA, 75 bp, synthetic construct
  source 1..75: mol_type = other DNA
tattagtctgatgtgtgaaaaagaaccggagttgaaaatagcacagcaactggtactcgagttctaccgtattct

SEQ ID NO: 322094 - DNA, 75 bp, synthetic construct
  source 1..75: mol_type = other DNA
aactcgtcatataaccaaccggactcgcgacacattgctccgcgaagcagcaaaacttgatcccgccaactatac

SEQ ID NO: 322095 - DNA, 75 bp, synthetic construct
  source 1..75: mol_type = other DNA
ttcaaaagctattgtattaaataactatagcaatgctgctaatctactttctctcaatgaagtaagacaaatatg

SEQ ID NO: 322096 - DNA, 75 bp, synthetic construct
  source 1..75: mol_type = other DNA
gaccttgcccgttcactttcgacggtggcggtgcgtgtcgttgaagttattcctggcaaaccctatgtaggtctg

SEQ ID NO: 322097 - DNA, 75 bp, synthetic construct
  source 1..75: mol_type = other DNA
agcagccacaacagccggttacacagcagccgcagtatcagcagccgcaacagccggttgtaccacagccgcagg

SEQ ID NO: 322098 - DNA, 75 bp, synthetic construct
  source 1..75: mol_type = other DNA
tataattaacaaacagagcaactctaacaacccattatcacataatgaaattaggcaaatttgccaaagcgtttg

SEQ ID NO: 322099 - DNA, 75 bp, synthetic construct
  source 1..75: mol_type = other DNA
acagcagccgcagtatcagcagccgcaacagccggttgtaccacagccgcaggataccctgcttcatccgctgtt

SEQ ID NO: 322100 - DNA, 75 bp, synthetic construct
  source 1..75: mol_type = other DNA
taacgaaaaaattgctgaagccgatcgcatgatgcgtccgattccagacccgtactggaagccgggtgacagtat

SEQ ID NO: 322101 - DNA, 75 bp, synthetic construct
  source 1..75: mol_type = other DNA
gcacagccagaagatgtgcgtttcatcatgatcgacccgaaaatgctggagctttcggtttatgaaggcattccg

SEQ ID NO: 322102 - DNA, 75 bp, synthetic construct
  source 1..75: mol_type = other DNA
tgaaaaatatcaccacccgccagggttatgccgaaagtctgccatttgccgataacgcatttgatattgttatca

SEQ ID NO: 322103 - DNA, 75 bp, synthetic construct
  source 1..75: mol_type = other DNA
tcggcggcatcagttacagcgatgatatcgggccgctgggttacaccgttaacgcccaccgtcggcccatctcca

SEQ ID NO: 322104 - DNA, 75 bp, synthetic construct
  source 1..75: mol_type = other DNA
tgcatttgacgactcaaaggaattaaagcaactccttcgcccgggactgtccgtcaccgtcagggttgatgagag

SEQ ID NO: 322105 - DNA, 75 bp, synthetic construct
  source 1..75: mol_type = other DNA
ctatagaggtgcgcgataatcagagcgtaaaaaaaggcgatattatcctgcgtctcgatgatcgggattatcgtg

SEQ ID NO: 322106 - DNA, 75 bp, synthetic construct
  source 1..75: mol_type = other DNA
tattgcaggggcactgtgggatagctcgttcagcgataacagctacgggttccgtcccggtcgttcggcccacca

SEQ ID NO: 322107 - DNA, 75 bp, synthetic construct
  source 1..75: mol_type = other DNA
aggcgttcagtccatatatactagcgtcgcgatttgctacctatacgccgtttttcaatctcaattattttgctt

SEQ ID NO: 322108 - DNA, 75 bp, synthetic construct
  source 1..75: mol_type = other DNA
ctgacgggcggatgttctttcgcagtgatttcgtcaatatgaacgtcggcagtttctccacgaatgccgatggca

SEQ ID NO: 322109 - DNA, 75 bp, synthetic construct
  source 1..75: mol_type = other DNA
aagctgccgaagcccggcaactgaaaaatatcaccacccgccagggttatgccgaaagtctgccatttgccgata

SEQ ID NO: 322110 - DNA, 75 bp, synthetic construct
  source 1..75: mol_type = other DNA
ttattctgctcaccactggcatgatgtcggtgcggcattgcgtgaagtgaatcgggtcttgaagcccggcggtat

SEQ ID NO: 322111 - DNA, 75 bp, synthetic construct
  source 1..75: mol_type = other DNA
tcccaaatgctggatgttgttgcacaggctgcagatacccgacaactgaaaaatatcaccacccgccaggggtat

SEQ ID NO: 322112 - DNA, 75 bp, synthetic construct
  source 1..75: mol_type = other DNA
gaatgcgtacgccagaagcgttagtagacgctattcgcatttaccaacagaagcgcatcgacagaggtgaaaacg

SEQ ID NO: 322113 - DNA, 75 bp, synthetic construct
  source 1..75: mol_type = other DNA
gtacgccagaagcgttagtagacgctattcgcatttaccaacagagcgcatcgacagaggtgaaaacgtattttg

SEQ ID NO: 322114 - DNA, 75 bp, synthetic construct
  source 1..75: mol_type = other DNA
atgctggatgtcgtggcacaagctgctgaagcccggcacctgaaaaatatcgccacccgccaggtatatgccgaa

SEQ ID NO: 322115 - DNA, 75 bp, synthetic construct
  source 1..75: mol_type = other DNA
tgatcaaccaggctatgcgtaagtacgaagttcgtccgtcccagtacgtacttgcttccgaacacacggtaatgt

SEQ ID NO: 322116 - DNA, 75 bp, synthetic construct
  source 1..75: mol_type = other DNA
tccacacgatgaaggcagcgttccggatgaattacgcctcttacattgactcatcccaggctgaaaagctgtcca

SEQ ID NO: 322117 - DNA, 75 bp, synthetic construct
  source 1..75: mol_type = other DNA
tcggaatggcatcagacatcagtccgattagtagggcttttaagtatgcgcttgatggaatcacaaagaaaaaat

SEQ ID NO: 322118 - DNA, 75 bp, synthetic construct
  source 1..75: mol_type = other DNA
atcaatacgtcggctgaacgtgacattattcccttacgctcacgcttaacggtaggtgatagttataccgatggg

SEQ ID NO: 322119 - DNA, 75 bp, synthetic construct
  source 1..75: mol_type = other DNA
ctgagaatacctatattccatcaacggaacgcgtggggcctgattccgatcttaaaagttattcgagggtagacc

SEQ ID NO: 322120 - DNA, 75 bp, synthetic construct
  source 1..75: mol_type = other DNA
agtgcatggcccctgtcaggttgacgagcgggtatttattggattcaacagcgtgttgtttaactgtcatattca

SEQ ID NO: 322121 - DNA, 75 bp, synthetic construct
  source 1..75: mol_type = other DNA
tttgcgaactgcgcggaactggataacaaccagcttaacgagatcatcgagtgggttcggctctatcagcgctga

SEQ ID NO: 322122 - DNA, 75 bp, synthetic construct
  source 1..75: mol_type = other DNA
ggtatcgatattacggttattcctttcaggaatagtcttcatattccttccatcctcaagttcagacgagctatc

SEQ ID NO: 322123 - DNA, 75 bp, synthetic construct
  source 1..75: mol_type = other DNA
gatacatctgattcgatcaggtttggctatggcaccatcaagaaaatcatcaattacagactcattcctatgatt

SEQ ID NO: 322124 - DNA, 75 bp, synthetic construct
  source 1..75: mol_type = other DNA
caaatggctcgtctggtggaagcgcgtctggctgatttccgtattaaagccgatgtcgtcaattactctccgggg

SEQ ID NO: 322125 - DNA, 75 bp, synthetic construct
  source 1..75: mol_type = other DNA
ggtttcgctccggtgattcatggtattgctcgtggcaccgcacaagtgagtgtaaaacagaatggatacgatgtt

SEQ ID NO: 322126 - DNA, 75 bp, synthetic construct
  source 1..75: mol_type = other DNA
gcaacattatcgattcgatcttcggtgcagatagtgaggaaccttttcaggaagaaccgagaaagcgtttaaatc

SEQ ID NO: 322127 - DNA, 75 bp, synthetic construct
  source 1..75: mol_type = other DNA
agagggcatgatgtcatttttattcctttcaggaacagccttcacctgccttccatcctcaggctgcgacagatt

SEQ ID NO: 322128 - DNA, 75 bp, synthetic construct
  source 1..75: mol_type = other DNA
gccatcgtgcattaatatcatcagtggacccagctcgacggcggatattgaacttatcaaggtggttggggtaca

SEQ ID NO: 322129 - DNA, 75 bp, synthetic construct
  source 1..75: mol_type = other DNA
gcctatctgcaaacaattccaggaacatggctacgactttggcctggacgacatctacttctatggtcgtggcga

SEQ ID NO: 322130 - DNA, 75 bp, synthetic construct
  source 1..75: mol_type = other DNA
attagccaacgcccatgtagcacttgagcgcctgatgatggagtccgctaaagagacgcatgaaggcgctggcaa

SEQ ID NO: 322131 - DNA, 75 bp, synthetic construct
  source 1..75: mol_type = other DNA
ccagcaacgggtactgccactaaccgctctccacaaggggttacgccgccgcaaagtggtgctcaaccgcctgca

SEQ ID NO: 322132 - DNA, 75 bp, synthetic construct
  source 1..75: mol_type = other DNA
cagggatatgacttaggtctggatgacatttatttctatggtcgcggtgaaggcatcggtaaagccgggctgatc

SEQ ID NO: 322133 - DNA, 75 bp, synthetic construct
  source 1..75: mol_type = other DNA
gtgatcgcgagcgcgagattatgaatcgggcggcaagcgtcatggctatgaccgtcgatccgaccaccgatgcag

SEQ ID NO: 322134 - DNA, 75 bp, synthetic construct
  source 1..75: mol_type = other DNA
aaataaaaaacgcattttgttccttgccgatcgcaacattctggtcgaccaaaccaaaaataatgatttccagcc

SEQ ID NO: 322135 - DNA, 75 bp, synthetic construct
  source 1..75: mol_type = other DNA
cactgaactgtttgccgataagcgtttcgatggcattcccgaaaaagtcatggataccacaccagaagagattgc

SEQ ID NO: 322136 - DNA, 75 bp, synthetic construct
  source 1..75: mol_type = other DNA
cctggttaatctcaacccggagcaggtgaaaaagaacgacaaatacgtcatgaaaatcaccggcgatgatgaaat

SEQ ID NO: 322137 - DNA, 75 bp, synthetic construct
  source 1..75: mol_type = other DNA
ttgattatttcagttccgccactcaaataggcttaaccgccacgccaaaagagacgcatgaagtttccagcacga

SEQ ID NO: 322138 - DNA, 75 bp, synthetic construct
  source 1..75: mol_type = other DNA
gtcaggtggtagcggtcgcaaaactgaccagccgcgtgctgctgatctgtgacgcgacccatgcgctgccaattc

SEQ ID NO: 322139 - DNA, 75 bp, synthetic construct
  source 1..75: mol_type = other DNA
taaatccacatgcaggggaacatggtttattcggcactgaggaaatcgagattatcgcgcctgcgattgaagcaa

SEQ ID NO: 322140 - DNA, 75 bp, synthetic construct
  source 1..75: mol_type = other DNA
gcgtttgatattgcctggacaggaaaagccaagtctgagagcatggcagtttccatccagttagcaatgcagatt

SEQ ID NO: 322141 - DNA, 75 bp, synthetic construct
  source 1..75: mol_type = other DNA
taaacaaactatttaccgacccggcgcatattgaatttacgcaaaaaacgctgactgaaataaccaatgtactgg

SEQ ID NO: 322142 - DNA, 75 bp, synthetic construct
  source 1..75: mol_type = other DNA
tgcggcatcgctgattacctacggcattatgctcggtgaaaaacctgccgtgctgtcggctatcgttaagtatca

SEQ ID NO: 322143 - DNA, 75 bp, synthetic construct
  source 1..75: mol_type = other DNA
atgctcgggcagagcaacttcctggcgcgtgcttaccagggcgcaccgattgccatcaccgttgaaggggccaac

SEQ ID NO: 322144 - DNA, 75 bp, synthetic construct
  source 1..75: mol_type = other DNA
gcccggcgtttcgtcagataacggaactggtgaaatcccagtcacgcgacggcgatcctgactttacggcctatt

SEQ ID NO: 322145 - DNA, 75 bp, synthetic construct
  source 1..75: mol_type = other DNA
ccttgtttctcgcctctgtgctgatctacgcatggaaagcgggacgtaacacctggtggtttgccgccacgttaa

SEQ ID NO: 322146 - DNA, 75 bp, synthetic construct
  source 1..75: mol_type = other DNA
cgataacccaaccgatgccgacacactggtaattgtgccgccggaacctgtctcaaccaacgaagggaatatcct

SEQ ID NO: 322147 - DNA, 75 bp, synthetic construct
  source 1..75: mol_type = other DNA
ggctaccgctacctgaacctgtcggctaaagacggcaatcgcgacaacgcggtggctgacggcccgtatgttggg

SEQ ID NO: 322148 - DNA, 75 bp, synthetic construct
  source 1..75: mol_type = other DNA
tgaaggttatgcagcggcagttggcggtggtttgcagtggcaaattggtgacagcttccgcttgtttggtgagta

SEQ ID NO: 322149 - DNA, 75 bp, synthetic construct
  source 1..75: mol_type = other DNA
atgctgttggtttctgcatcggtcaatgcaatgagcatcagcggccaggcgggtaaagaatacaccaatattggt

SEQ ID NO: 322150 - DNA, 75 bp, synthetic construct
  source 1..75: mol_type = other DNA
aaatcccttgctttgcactgaccagcccggaagcgggttccgatgcgggcgctatcccggataccgggattgtct

SEQ ID NO: 322151 - DNA, 75 bp, synthetic construct
  source 1..75: mol_type = other DNA
ggttgccgggctgctgaatgtggtgatcttcccgaccggacgtcattatctggcaccgtctgacaagctggatca

SEQ ID NO: 322152 - DNA, 75 bp, synthetic construct
  source 1..75: mol_type = other DNA
taacatgcaggatggcgtgttgaaggttgaccttcctatgtctttgctgccttcactggtgcaacacccgcttca

SEQ ID NO: 322153 - DNA, 75 bp, synthetic construct
  source 1..75: mol_type = other DNA
aacaaaatcaaagcgtccccgtggtttaaagataccgtcatcgtcgtctcttctgaccatttagcgatgaacaac

SEQ ID NO: 322154 - DNA, 75 bp, synthetic construct
  source 1..75: mol_type = other DNA
tgggaagctattaatacgaagcatcaatcgcgattatgacgatgaagaggctgatgaggcagatgtcgagataat

SEQ ID NO: 322155 - DNA, 75 bp, synthetic construct
  source 1..75: mol_type = other DNA
aacaccaacgataagaaaatagttgacggaaagatttacgccattaacgagaacggttggaaacgcattaagatt

SEQ ID NO: 322156 - DNA, 75 bp, synthetic construct
  source 1..75: mol_type = other DNA
ggtgctgggcatgcgactgacctggaacaaacgctacattacgctggcaccgattgcgaccgtgctgggtctggc

SEQ ID NO: 322157 - DNA, 75 bp, synthetic construct
  source 1..75: mol_type = other DNA
ccgaacatcgaagagctgaaaaaacgcatggagcaaagtcgattgcggaaattgcgtggcgatctcgaccagttg

SEQ ID NO: 322158 - DNA, 75 bp, synthetic construct
  source 1..75: mol_type = other DNA
ggacctgatgatgctgtcaaccgtcgaatcagtctgctggtcctgaacagacaggccgagcaggccattttgcat

SEQ ID NO: 322159 - DNA, 75 bp, synthetic construct
  source 1..75: mol_type = other DNA
tggggaactgttgacgcctgggataaaaacacaccgcttcctgctgacgaggttgaagtgccgtttcttaaggat

SEQ ID NO: 322160 - DNA, 75 bp, synthetic construct
  source 1..75: mol_type = other DNA
gtcgttaggtatctgtgtagcactggtagcgttttcaagtcttgatacacgtcttccgatgagcaaatcgcgtat

SEQ ID NO: 322161 - DNA, 75 bp, synthetic construct
  source 1..75: mol_type = other DNA
gcgtaaagaagccgacggcacttacactgttggcatcactgagcacgctcaggagctgttaggcgatatggtgtt

SEQ ID NO: 322162 - DNA, 75 bp, synthetic construct
  source 1..75: mol_type = other DNA
agctgggcgatgaagtaaaaatcgagtacaagcatccgctgccgaagaaatttgatctggtgattaccgccaaag

SEQ ID NO: 322163 - DNA, 75 bp, synthetic construct
  source 1..75: mol_type = other DNA
ccgaacgccacccgttcccgcattggtcgcggtcagtacctgacgccgagcgagcataatccggttggcttgctg

SEQ ID NO: 322164 - DNA, 75 bp, synthetic construct
  source 1..75: mol_type = other DNA
ggtgctggggatgcgtctgacctggaacaaacgctacattacgctggcaccgattgcgactgtgcttgggctggc

SEQ ID NO: 322165 - DNA, 75 bp, synthetic construct
  source 1..75: mol_type = other DNA
aacacagaaatagataacattgttacactaccggaattgaataacctgtccattatatatcaaataaaagcggtc

SEQ ID NO: 322166 - DNA, 75 bp, synthetic construct
  source 1..75: mol_type = other DNA
gttaatgttgctgctgaaccggcgttactggagcaggcgctggggaatttactggataacgccatcgattttacc

SEQ ID NO: 322167 - DNA, 75 bp, synthetic construct
  source 1..75: mol_type = other DNA
ggcgagaacgcgccgatcatcatggcgcagctgaaagacgttaccgcacacgcggcagcgaccgtcagctcctgg

SEQ ID NO: 322168 - DNA, 75 bp, synthetic construct
  source 1..75: mol_type = other DNA
ccatcgcctgtggtgcggtatctggtttccacgcgctgatctcttccggtacgacgccgaaactgctggctaacg

SEQ ID NO: 322169 - DNA, 75 bp, synthetic construct
  source 1..75: mol_type = other DNA
tgtctgcgatgacccagtacattgacggtactggcccgctatggaaaggcgctctgttcccgttcctgttcatca

SEQ ID NO: 322170 - DNA, 75 bp, synthetic construct
  source 1..75: mol_type = other DNA
atgaagaaattactggtaaccgcaaagctctttaatggaagaatcccgttccggattttacagcgttgtcgtgtt

SEQ ID NO: 322171 - DNA, 75 bp, synthetic construct
  source 1..75: mol_type = other DNA
gctgttcggtatctccaaccagatgctggcagccgtagcgctggtactgggcaccgttgtgctgattaagatgaa

SEQ ID NO: 322172 - DNA, 75 bp, synthetic construct
  source 1..75: mol_type = other DNA
tctggccgctttatgctgcaagacctgctgggtaacttcatcccgttcctgaaaaaaaccgactctctggttgcc

SEQ ID NO: 322173 - DNA, 75 bp, synthetic construct
  source 1..75: mol_type = other DNA
caggtgcgcgtccaggaacagctccgggctatcaatcccgttctggcagacccgagcttgtttgtggcaagttca

SEQ ID NO: 322174 - DNA, 75 bp, synthetic construct
  source 1..75: mol_type = other DNA
ggtttctaaaatgactgttaaactcccaaatttgggggttcaagaaaagattggttctattaatagaaactggaa

SEQ ID NO: 322175 - DNA, 75 bp, synthetic construct
  source 1..75: mol_type = other DNA
acacatggtcaaatcgaacgcatcgataaggttgttgattctgaagatggtcttaaattgaaaagaattaagtgc

SEQ ID NO: 322176 - DNA, 75 bp, synthetic construct
  source 1..75: mol_type = other DNA
ctggcagccgtggcgctggtactgggcaccgttgtgctgattaagatgaagcgcacccaatacatctgggtaact

SEQ ID NO: 322177 - DNA, 75 bp, synthetic construct
  source 1..75: mol_type = other DNA
gcaaattgtcgataataagcgactcggtgcagtgctccgattggctcaggataaaatggatgaattggatcgtaa

SEQ ID NO: 322178 - DNA, 75 bp, synthetic construct
  source 1..75: mol_type = other DNA
ccgcatgactggtttgaaggacgtgcgccgaaatgctgcttgctcgtctttgttgatgacgctactagccgcctg

SEQ ID NO: 322179 - DNA, 75 bp, synthetic construct
  source 1..75: mol_type = other DNA
ttcagtatctggtggcttgcattgactcctccggggtgctggtttttcctgttttgcctgcgacactggcagtgg

SEQ ID NO: 322180 - DNA, 75 bp, synthetic construct
  source 1..75: mol_type = other DNA
atgcgtatcggcatgcggttgttgctgggctattttttactggtggcggtggcggcctggttcgtactggctatt

SEQ ID NO: 322181 - DNA, 75 bp, synthetic construct
  source 1..75: mol_type = other DNA
gcgtgggcgtaccattcgccagttcgtgctgggcacgttgattattccgtttaccttcacgctgttatggctctc

SEQ ID NO: 322182 - DNA, 75 bp, synthetic construct
  source 1..75: mol_type = other DNA
attcagtttgccagcgatgtcatgctggcgcgttgtgaactgaccagcgaagcacaggcggcagaagttgcatta

SEQ ID NO: 322183 - DNA, 75 bp, synthetic construct
  source 1..75: mol_type = other DNA
ttaacgttgttgctgaaccggcgttgctggaacaggcgctggggaatttactggataacgccatcgattttaccc

SEQ ID NO: 322184 - DNA, 75 bp, synthetic construct
  source 1..75: mol_type = other DNA
acgttgcgtggtcagtatggtgcgcgcagcacgttgcaaaatcctgccgatcccgaaagttctgtgatgtatgtt

SEQ ID NO: 322185 - DNA, 75 bp, synthetic construct
  source 1..75: mol_type = other DNA
ttaacgttgctgctgaaccggcgttactggagcaggctctggggaatttactggataacgccatcgattttaccc

SEQ ID NO: 322186 - DNA, 75 bp, synthetic construct
  source 1..75: mol_type = other DNA
ctgccgcgtctggcacgtggtcaggagatcccttgctttgcgctaaccagcccggaagcgggttccgatgcgggc

SEQ ID NO: 322187 - DNA, 75 bp, synthetic construct
  source 1..75: mol_type = other DNA
ggttacctgccgcctttcaacccagcaccattacaactgacgctgatcccgcatgatatgcccgatcctcaccat

SEQ ID NO: 322188 - DNA, 75 bp, synthetic construct
  source 1..75: mol_type = other DNA
gatatcatgattgcgacctcagcatttggcgtaggtatggataaaaacgacgtgcgcacagtgatccatgccaca

SEQ ID NO: 322189 - DNA, 75 bp, synthetic construct
  source 1..75: mol_type = other DNA
gaacgtttgcagcaggaatgcaatgccgttgtttgggatccggcgaaaggtgccgagaatatctcgcaggcagag

SEQ ID NO: 322190 - DNA, 75 bp, synthetic construct
  source 1..75: mol_type = other DNA
gtggtcggcgtgggtactggtgcctctggccattatcctcgtgccgtttaactttgcgccaatgcgtaagtcgat

SEQ ID NO: 322191 - DNA, 75 bp, synthetic construct
  source 1..75: mol_type = other DNA
caggctgaacaggcgatggacgatttactgcaaaacttcccgaaccgcgtggttgccgggttgctgaatgtggtg

SEQ ID NO: 322192 - DNA, 75 bp, synthetic construct
  source 1..75: mol_type = other DNA
gtggtgtgctcgatattacgggggccaacagtacttttactgccagcaccacaattgcaaaagacgctgttgtcc

SEQ ID NO: 322193 - DNA, 75 bp, synthetic construct
  source 1..75: mol_type = other DNA
atgccgggcagcgtatcgcgcttaacatcgcgggtgatgcggaaaaagagcagattaaccgtggcgactggctgc

SEQ ID NO: 322194 - DNA, 75 bp, synthetic construct
  source 1..75: mol_type = other DNA
cggaatatctgcaatggctggcgtctcttgcacgggcgcagagcgatgccgatgcgttatctgttcatctggaac

SEQ ID NO: 322195 - DNA, 75 bp, synthetic construct
  source 1..75: mol_type = other DNA
atgtgccgccagagccgttcacgcgggtgattgtcgagcttcaaacccatacgccgctgacccagtggcagccgc

SEQ ID NO: 322196 - DNA, 75 bp, synthetic construct
  source 1..75: mol_type = other DNA
gctggatctgaatccgaagctgaacgaattcaccacgggctgggttgacgatatctggacagcgtttggtgaaaa

SEQ ID NO: 322197 - DNA, 75 bp, synthetic construct
  source 1..75: mol_type = other DNA
agcgcatcattgaccagccgcagcgcttcggtaagcagaaagccaacatcaggggaagctatgtcggtcactggt

SEQ ID NO: 322198 - DNA, 75 bp, synthetic construct
  source 1..75: mol_type = other DNA
cagtgagcgacgtttcataggccaaacgacgaaacgtagtgcggttagcgaacgggcgaacaagggcaaagggga

SEQ ID NO: 322199 - DNA, 75 bp, synthetic construct
  source 1..75: mol_type = other DNA
gaatgtaaaacagaaccgagtttacaaccatattagcgaggaagaaatcttagaaaaatatgaatcgctgaaaga

SEQ ID NO: 322200 - DNA, 75 bp, synthetic construct
  source 1..75: mol_type = other DNA
gacaacacaaatttcacacatctttcaaggataataggagaacaaagacttttgaaacgaaatatggagaatata

SEQ ID NO: 322201 - DNA, 75 bp, synthetic construct
  source 1..75: mol_type = other DNA
tctgctggcgcagcaggtgccagttgttcaggctggcgtgcagattgtaaaccagaattcccggaaaaaacaaaa

SEQ ID NO: 322202 - DNA, 75 bp, synthetic construct
  source 1..75: mol_type = other DNA
tgcgttatctgttcatctggaacgcggagcggttaaccttgctgatttcgcctgggcgcgccagctcaacggcga

SEQ ID NO: 322203 - DNA, 75 bp, synthetic construct
  source 1..75: mol_type = other DNA
atgattattgcgactgccggacacgttgaccacggcaaaacgacattattacaggcgattactggcgtaaatgcc

SEQ ID NO: 322204 - DNA, 75 bp, synthetic construct
  source 1..75: mol_type = other DNA
gcgaacggcaggaacgacccggacggcagattacgcatgcttttcggttccggctccatcaatacccgggtattg

SEQ ID NO: 322205 - DNA, 75 bp, synthetic construct
  source 1..75: mol_type = other DNA
aacgcgcttttgactgggacgagctgaaatcactgtataacggtcgtgcctcccgcgccgtgggtatcaaatcga

SEQ ID NO: 322206 - DNA, 75 bp, synthetic construct
  source 1..75: mol_type = other DNA
tttggcggaaccgatgtctgccctgccgtgggcgatctgccgggcggagacagccaggtacgatcgctctatcag

SEQ ID NO: 322207 - DNA, 75 bp, synthetic construct
  source 1..75: mol_type = other DNA
tcgagcgtattttgtttttagaaggaatccccaacttacaggatttaggcaaactggggattggtgaagatgtcg

SEQ ID NO: 322208 - DNA, 75 bp, synthetic construct
  source 1..75: mol_type = other DNA
acgcgaaaaaacatgcagaacgcagcgccgaagacggctggagaacggcggcagcattaccaggtaaaaacagca

SEQ ID NO: 322209 - DNA, 75 bp, synthetic construct
  source 1..75: mol_type = other DNA
ccaggctgcctactcggtgagattggttattcaccactgttaacggccgaagaagaagtttattttgcgcgtcgc

SEQ ID NO: 322210 - DNA, 75 bp, synthetic construct
  source 1..75: mol_type = other DNA
atgaaatatttttctattttagatgtagtgatggcattgattgaaggtcgagtaagccgaaaccggattctacag

SEQ ID NO: 322211 - DNA, 75 bp, synthetic construct
  source 1..75: mol_type = other DNA
gccaacacagcatacctggtggatttacaggaaatgcagggggataacctgctccgtgaactggtaagaatcact

SEQ ID NO: 322212 - DNA, 75 bp, synthetic construct
  source 1..75: mol_type = other DNA
cgcgctggtcagggcgctgaaatgcgttattgatatcccggatgaatggcttgatgccacatgtctggaactgga

SEQ ID NO: 322213 - DNA, 75 bp, synthetic construct
  source 1..75: mol_type = other DNA
tatccaaagaggcaaacgctggaagaggggttgcagaaaacaaagagccgcgtgtactgaaatgctggatattca

SEQ ID NO: 322214 - DNA, 75 bp, synthetic construct
  source 1..75: mol_type = other DNA
cccggatgtgttttcatcatggtcagatcgctatatcagcacgaaagacgagccatatgcagcggcggcagctta

SEQ ID NO: 322215 - DNA, 75 bp, synthetic construct
  source 1..75: mol_type = other DNA
ctcaggagcgataccaggacaaggaaagcggcgaacaggccgctactgtgcgttttacgctggctgacggcgtgt

SEQ ID NO: 322216 - DNA, 75 bp, synthetic construct
  source 1..75: mol_type = other DNA
ataaacgcgactggaatgatttacacatcgccggaaagctgcgtggccatgatgtgaaaagataccgttattacg

SEQ ID NO: 322217 - DNA, 75 bp, synthetic construct
  source 1..75: mol_type = other DNA
ggtgggcttatccgggagcagatttaagcaaggccaaagaaatctggatttgtgagggcatctttgatgccatca

SEQ ID NO: 322218 - DNA, 75 bp, synthetic construct
  source 1..75: mol_type = other DNA
ttggtattgtgcgccatcggttttctctgctggcgcagcaggtgccagttgttcaggctggcctgtggattgtaa

SEQ ID NO: 322219 - DNA, 75 bp, synthetic construct
  source 1..75: mol_type = other DNA
taaacattttgttatccgtaatatcaaagcccgcaatatcacgccggatttcagtaagaaagcaggtattgataa

SEQ ID NO: 322220 - DNA, 75 bp, synthetic construct
  source 1..75: mol_type = other DNA
gcaaagacgttcgcggcgtctttatggcgaaaaaagaaacactgctgtctcttgcaaatgttcatgcggtgaatg

SEQ ID NO: 322221 - DNA, 75 bp, synthetic construct
  source 1..75: mol_type = other DNA
agcgcccgtaaccagtggttcggcaccatcaccgcccgcgatcatgatgacgttcaacagcatgttgatgtctta

SEQ ID NO: 322222 - DNA, 75 bp, synthetic construct
  source 1..75: mol_type = other DNA
atgccgtttcctttgtggcactgactaacattgtgatgaagcgtgcgtcattggagctgcacaacaagccgcaac

SEQ ID NO: 322223 - DNA, 75 bp, synthetic construct
  source 1..75: mol_type = other DNA
aaatggggcaaagctccgtcgatatcgacaggattaatcaccatattgttaatgtggaaaagattaactttagat

SEQ ID NO: 322224 - DNA, 75 bp, synthetic construct
  source 1..75: mol_type = other DNA
gcgaatatcacgggatcggattgtcggcaactgatccatgttgaaaatggtaaacattttgttatccgtaatatc

SEQ ID NO: 322225 - DNA, 75 bp, synthetic construct
  source 1..75: mol_type = other DNA
tgcggataacatcggaggtgtgtattacaaacaagcccagatttatatcaatggcggatggcgcgcggtatccgg

SEQ ID NO: 322226 - DNA, 75 bp, synthetic construct
  source 1..75: mol_type = other DNA
atgacactggaccaactgcttgaaatccacgaccgcgctgggctgagcacctatgaacaggaaacaattatatct

SEQ ID NO: 322227 - DNA, 75 bp, synthetic construct
  source 1..75: mol_type = other DNA
cctctctaccagatgcgctatcagcagtttgtttcgccaatggtgtatggagagcgaaagatcacatgggatgag

SEQ ID NO: 322228 - DNA, 75 bp, synthetic construct
  source 1..75: mol_type = other DNA
tgagtcgcagtttgtgccgacggtttcaggttactactccgacagcaaaaccggccacttactctcccagccgtt

SEQ ID NO: 322229 - DNA, 75 bp, synthetic construct
  source 1..75: mol_type = other DNA
gtcacttactctcccagccgttcaacagctcgactcccgttctctattacaacaaagacgccttcaagaaagcgg

SEQ ID NO: 322230 - DNA, 75 bp, synthetic construct
  source 1..75: mol_type = other DNA
tcagcaagaaagcgggtattgataacgccacggtagcgatatatggatgtgataactttgttattgacaatatag

SEQ ID NO: 322231 - DNA, 75 bp, synthetic construct
  source 1..75: mol_type = other DNA
acattagaaattgataaagaactagaaaatcatgttcaggaaagcataggcgctgttaacaagaaaataagagac

SEQ ID NO: 322232 - DNA, 75 bp, synthetic construct
  source 1..75: mol_type = other DNA
atgttccttttggggagcgaagcgctggagtcgatgattaagcacgaggcgactcgtccgttggtgttctcatca

SEQ ID NO: 322233 - DNA, 75 bp, synthetic construct
  source 1..75: mol_type = other DNA
atgattaagcacgaagcgacccgtccgttggtgttctcatcaaactactatcagactcgtcaaaacctgctggat

SEQ ID NO: 322234 - DNA, 75 bp, synthetic construct
  source 1..75: mol_type = other DNA
cacaccaattattgactctagcaacagctatttatctgaagcaataaaagagctacaaaatattgattggattaa

SEQ ID NO: 322235 - DNA, 75 bp, synthetic construct
  source 1..75: mol_type = other DNA
tagcggttacctatggtcttgatgttgatgacggattggccagtattatcccttttaataatcccagtaacatat

SEQ ID NO: 322236 - DNA, 75 bp, synthetic construct
  source 1..75: mol_type = other DNA
aaaaggtaaagaaaattatttagttggcgacatttgccctttttgtcaaaaagaaaccattgatgataaattcac

SEQ ID NO: 322237 - DNA, 75 bp, synthetic construct
  source 1..75: mol_type = other DNA
ggataccagcaagccttgctgaaactgttttaaaagaagccgcgaagtacagcattaataacatcacgacctcgg

SEQ ID NO: 322238 - DNA, 75 bp, synthetic construct
  source 1..75: mol_type = other DNA
tttgcgccagggatttcataaccagattatcggtgccaacatcaccaactgtaaatttagtgatttacagggcga

SEQ ID NO: 322239 - DNA, 75 bp, synthetic construct
  source 1..75: mol_type = other DNA
tcgctatttacggttgtgacaatttcgtgattgataatattgaaatgattaatagcgccgggatgttaatcggct

SEQ ID NO: 322240 - DNA, 75 bp, synthetic construct
  source 1..75: mol_type = other DNA
cggaccaaacagaacgtgggttccacggtgaagcgcatttgggatctgtaccagtcgttagccgtcgatattgag

SEQ ID NO: 322241 - DNA, 75 bp, synthetic construct
  source 1..75: mol_type = other DNA
tgacgcaggaagaatgggatcgcctcttacccgcaatgcagacgtttacccacttatcgaccgaaatcggtcatt

SEQ ID NO: 322242 - DNA, 75 bp, synthetic construct
  source 1..75: mol_type = other DNA
ggatacctgagaagctggctaaaaaggttttagctgaagcagcaaaatatagcgttaattctagttctgtacctg

SEQ ID NO: 322243 - DNA, 75 bp, synthetic construct
  source 1..75: mol_type = other DNA
atttccaacctgcgtcgtaaactgccggatcgtaaggatggtcacccgtggtttaaaaccctgcgtggtcgtggc

SEQ ID NO: 322244 - DNA, 75 bp, synthetic construct
  source 1..75: mol_type = other DNA
ggtcttgcgtaatacctttattgagctggcacgtaaagtcgccagccagtgggatcaactctccgataacgatcg

SEQ ID NO: 322245 - DNA, 75 bp, synthetic construct
  source 1..75: mol_type = other DNA
gcgctgtacgtcaggtggcttcattcccgcgtcacaacggtgcgcctgctctctcgcttcccatatcaccctgcg

SEQ ID NO: 322246 - DNA, 75 bp, synthetic construct
  source 1..75: mol_type = other DNA
gttgttggtgttgattgaagtcgaagagtggctgccgccgggggtgccctgggggggtggggggcgggggggggg

SEQ ID NO: 322247 - DNA, 75 bp, synthetic construct
  source 1..75: mol_type = other DNA
aggaggaccaggctctgtttcgccagttgatggcggggactcgcaagattaagcaggacaccattgtccatcggc

SEQ ID NO: 322248 - DNA, 75 bp, synthetic construct
  source 1..75: mol_type = other DNA
aaaggagctgctcgaaatggaaggcttcaacgtgattgttgcccacgacggggaacaggcgcttgagcttctgga

SEQ ID NO: 322249 - DNA, 75 bp, synthetic construct
  source 1..75: mol_type = other DNA
ttggttttctcatactgtgggcatcagttctgcatgctgaagtccgcattgtgatcgacagcggtgtagattccg

SEQ ID NO: 322250 - DNA, 75 bp, synthetic construct
  source 1..75: mol_type = other DNA
gtgatacagatgattataaattcatctcttatggtatgaggttgttagagattagagaacatatccaaaaattga

SEQ ID NO: 322251 - DNA, 75 bp, synthetic construct
  source 1..75: mol_type = other DNA
ggagagtttttcacaattagattcaagttacaggattaatatttcagggaatccattgtcgactcgcgttctgca

SEQ ID NO: 322252 - DNA, 75 bp, synthetic construct
  source 1..75: mol_type = other DNA
cgtttgccctgtctaaaacgggtagcctgaacctgtacgtaatggatttagcttctggtcagattcgtcaggtga

SEQ ID NO: 322253 - DNA, 75 bp, synthetic construct
  source 1..75: mol_type = other DNA
ctgccacagcagccgggtagtgcgcaggaagtacaaccagctgcatggtctgcgctggggatcgacgcagtggtt

SEQ ID NO: 322254 - DNA, 75 bp, synthetic construct
  source 1..75: mol_type = other DNA
agttctgcatgctgaagtccgcattgtgatcgacagcggtgtagattccggtcgtcctattggtgttgttccttt

SEQ ID NO: 322255 - DNA, 75 bp, synthetic construct
  source 1..75: mol_type = other DNA
cgcctgccgtcgtgaacatgtgttttgcgcctgcgtgatgcatggtcatggtaagcatattttgaagcagcaaac

SEQ ID NO: 322256 - DNA, 75 bp, synthetic construct
  source 1..75: mol_type = other DNA
aaaggcagttgttacaaatactgtatgatgctcatccttatgaaatttctgatgatgcgttgcagtctgttcgtg

SEQ ID NO: 322257 - DNA, 75 bp, synthetic construct
  source 1..75: mol_type = other DNA
aagtgatatcagttgtcaggatattcatggagtcagtctgtatgcacctttgccattgaaacaaacatatgaagt

SEQ ID NO: 322258 - DNA, 75 bp, synthetic construct
  source 1..75: mol_type = other DNA
aaccggcgaggaagcgcaatatatctgtagttacagtgagcaggtacgccctgaagccttcataatcgatagtgt

SEQ ID NO: 322259 - DNA, 75 bp, synthetic construct
  source 1..75: mol_type = other DNA
gcactggtggaatctgaactctggtcgcgggatgcagtggaaaggcagatgagtcatcaggaacgcaacagcgtc

SEQ ID NO: 322260 - DNA, 75 bp, synthetic construct
  source 1..75: mol_type = other DNA
tggagcgagatcgatttcaggcacaaaatctggaccatccccgccacccgcgaggcaatcgacaaagtacggttt

SEQ ID NO: 322261 - DNA, 75 bp, synthetic construct
  source 1..75: mol_type = other DNA
ctcacgaacaccggagaaagtttttaaaaacgtggcgctggcgtggcataaaagtaacaggaaatggtcgcagaa

SEQ ID NO: 322262 - DNA, 75 bp, synthetic construct
  source 1..75: mol_type = other DNA
gtgggggtgcgcggtgtggcagataacgccgacaaagcaaaacagggcgacacggtaaaaggttttgttgccggt

SEQ ID NO: 322263 - DNA, 75 bp, synthetic construct
  source 1..75: mol_type = other DNA
caaaagagtatggtggtgatgcggcattgctggtgttgatagaagtagatgagtggctgccgccggaattaccct

SEQ ID NO: 322264 - DNA, 75 bp, synthetic construct
  source 1..75: mol_type = other DNA
tgcgcctgcgtgatgcatggtcacgggaagcatattttgaagcaacaaacaccgctgtggctggcacaacatccg

SEQ ID NO: 322265 - DNA, 75 bp, synthetic construct
  source 1..75: mol_type = other DNA
cattgacgaagtgtttcgacgcataaattccaatggtaaaattttatcaaaacaagaactacgaagtgcggggtg

SEQ ID NO: 322266 - DNA, 75 bp, synthetic construct
  source 1..75: mol_type = other DNA
ttaagccgctggctgttgctgaaaaataccggacaggatatggcaacggacaacagcaccgtgccagtccctccg

SEQ ID NO: 322267 - DNA, 75 bp, synthetic construct
  source 1..75: mol_type = other DNA
tccgcagatgaagggctggcaacaggcgcggcagaatttgcgggactttgcggatctgatgatgaaaaaggagac

SEQ ID NO: 322268 - DNA, 75 bp, synthetic construct
  source 1..75: mol_type = other DNA
ctgtttcgtttattacgccagttagttcacgagcgacagtttaatgtttgctgcgtattgcacgatcttaatctc

SEQ ID NO: 322269 - DNA, 75 bp, synthetic construct
  source 1..75: mol_type = other DNA
attccggaagatgatcctgacgggatgcatctgactgatgacgttcgtctggccatgctgatgctggtcagtcat

SEQ ID NO: 322270 - DNA, 75 bp, synthetic construct
  source 1..75: mol_type = other DNA
tcgagcgtattttgtttttagaaggaatccccaacttacaggatttaggtaagctagggatcggtgaagatgtcg

SEQ ID NO: 322271 - DNA, 75 bp, synthetic construct
  source 1..75: mol_type = other DNA
tgatggtgctggctcttttgatagcattcttaaaattgatcgttacgtcgctatgccggggcaaaatacaacatt

SEQ ID NO: 322272 - DNA, 75 bp, synthetic construct
  source 1..75: mol_type = other DNA
atgattagcattgtattgagaagctttattttattattcataataatagtgtatccggattataataaaaaccca

SEQ ID NO: 322273 - DNA, 75 bp, synthetic construct
  source 1..75: mol_type = other DNA
gtgacaatgttgaagacaggcgaaacagttctggtggtccgtcaatgggcggtcccggttttcgcctgccaagcg

SEQ ID NO: 322274 - DNA, 75 bp, synthetic construct
  source 1..75: mol_type = other DNA
gaagctctatgcaccggatgaaaccattccggacagcgatccggacgggctgcacctgccggatgatattcgtct

SEQ ID NO: 322275 - DNA, 75 bp, synthetic construct
  source 1..75: mol_type = other DNA
gaagtttattttgcgcgtcgcgcactgcgaggagatgttgcctcccgccgccggatgatcgagagtaacttgcgt

SEQ ID NO: 322276 - DNA, 75 bp, synthetic construct
  source 1..75: mol_type = other DNA
caagatgacgatatgaagcagagcatcgtcaaatggctgttcgagctgaacgccaaacagcgtgaagtgctggca

SEQ ID NO: 322277 - DNA, 75 bp, synthetic construct
  source 1..75: mol_type = other DNA
gcctgcgccgtttgcgcgaaatcctgcaaacgcaggggctgaatatcgaagcgctgttccgcagcatctgtcaga

SEQ ID NO: 322278 - DNA, 75 bp, synthetic construct
  source 1..75: mol_type = other DNA
aaacattgccgtcaacgatacccgcccgtcagtctcgttcgcagcgatgaatgaacatgaaagagcggccgtagc

SEQ ID NO: 322279 - DNA, 75 bp, synthetic construct
  source 1..75: mol_type = other DNA
atcataacagtaatgctgtttatgcgaatggtgtgaatgcaacgattgatacacatgggcataccattatcgcaa

SEQ ID NO: 322280 - DNA, 75 bp, synthetic construct
  source 1..75: mol_type = other DNA
ggatcttatcgaagagggcaacctggggcttatccgcgcggttgagaagtttgacccggaacgtggtttccgctt

SEQ ID NO: 322281 - DNA, 75 bp, synthetic construct
  source 1..75: mol_type = other DNA
tttctttcttgtcaaggaaataaaatctcgagacaatatgtgtataagatgtgtaagaaatatagtcacaatatg

SEQ ID NO: 322282 - DNA, 75 bp, synthetic construct
  source 1..75: mol_type = other DNA
ttgcgcaaatgaacctctttctccccagcgattacagtgccgttagacttcgtgttgatgaggctttttccctac

SEQ ID NO: 322283 - DNA, 75 bp, synthetic construct
  source 1..75: mol_type = other DNA
acttctccatgagtgacggacaacagaatacactccatcgccccctggctgatgccgtgacagcatggttcccgg

SEQ ID NO: 322284 - DNA, 75 bp, synthetic construct
  source 1..75: mol_type = other DNA
ccgactggcaggtaaactgtcgctggtcagttttgatgccgcgaaaaatatggcggactcaatgaagcgggaagg

SEQ ID NO: 322285 - DNA, 75 bp, synthetic construct
  source 1..75: mol_type = other DNA
atagccttcagggacggcgtctgactgacaatgtctcgctgacttttcccggcggagaaattgttgccattctcg

SEQ ID NO: 322286 - DNA, 75 bp, synthetic construct
  source 1..75: mol_type = other DNA
attcccggaggtcgttatctatcttcatgaaaatagcggtgcagtacttaacgaaaaactgataaatcatcaact

SEQ ID NO: 322287 - DNA, 75 bp, synthetic construct
  source 1..75: mol_type = other DNA
accgccgcgattgccagcggtatgggcgttgcagtattgccggaatcggccgcgcgttcgttatgtgacgctgtt

SEQ ID NO: 322288 - DNA, 75 bp, synthetic construct
  source 1..75: mol_type = other DNA
aaggtcatcgaaacgatgtacgaaaccggtaaggacatgaacgccaaataccgcgaaacctcacgcggtggtctg

SEQ ID NO: 322289 - DNA, 75 bp, synthetic construct
  source 1..75: mol_type = other DNA
cctgatgctgaagtgaaattgcttggtgcggaactggtggcagagtacaaaattactgaagaagaaagcggagca

SEQ ID NO: 322290 - DNA, 75 bp, synthetic construct
  source 1..75: mol_type = other DNA
atgcgtaaatacatcaccaacagcgaatgggcgctcttttttaatgctataacgggtacgcgcaatgaaatccgt

SEQ ID NO: 322291 - DNA, 75 bp, synthetic construct
  source 1..75: mol_type = other DNA
atggctgatttcgataatctctttgacgaggccatgtcgcgagctgatagcgctatccgtggtgtgatgggcaca

SEQ ID NO: 322292 - DNA, 75 bp, synthetic construct
  source 1..75: mol_type = other DNA
ggtgccgtgcattgaacgtaacgccattgcctctgtgaaagcgatcaatgccgcacgcatggccttacgccgcac

SEQ ID NO: 322293 - DNA, 75 bp, synthetic construct
  source 1..75: mol_type = other DNA
atggaacacaacctcggtctgacctgcgaccccgttgcagggcaagttcaggtgccgtgcattgaacgtaatgcc

SEQ ID NO: 322294 - DNA, 75 bp, synthetic construct
  source 1..75: mol_type = other DNA
gccattaacgagatgaatcagttaagtgagcatattctggttgagcgcgcaacaggcggtaaaggtggaggcggc

SEQ ID NO: 322295 - DNA, 75 bp, synthetic construct
  source 1..75: mol_type = other DNA
cagtctgtgtgataacatataaccaggcgaaatatataaagcaatgcatagaaagcctaatcactcaggactgtg

SEQ ID NO: 322296 - DNA, 75 bp, synthetic construct
  source 1..75: mol_type = other DNA
tgatggtagcgtgaacctgccggaaggtaccctgagtgaggacagtggcaccctgatattccaggggcatccggt

SEQ ID NO: 322297 - DNA, 75 bp, synthetic construct
  source 1..75: mol_type = other DNA
ttcggcgttattcgcgctgtaccagcgaatgattgcgctgcgtaagaaaagtcaggcgttgcgtcgtggcggctg

SEQ ID NO: 322298 - DNA, 75 bp, synthetic construct
  source 1..75: mol_type = other DNA
gcctctatacaggcgagtatttacagcttgaaaaaacagcaacggctggcgcttcctgctcccctaacgggcttg

SEQ ID NO: 322299 - DNA, 75 bp, synthetic construct
  source 1..75: mol_type = other DNA
ctgatagatttatcaaaatttgactcattaagtggtaagctacctacaagtctaaacagtaacctaaattgttct

SEQ ID NO: 322300 - DNA, 75 bp, synthetic construct
  source 1..75: mol_type = other DNA
gtgaacctcgccagcggacgtccgaccgtggtgctcggggatgcccgtcaggtcaatccggataacatttcatgg

SEQ ID NO: 322301 - DNA, 75 bp, synthetic construct
  source 1..75: mol_type = other DNA
aaaatcaccctgagcggtacaccggttaaagatacggctaaccagtatgcccctgctgtatatctgacggacgga

SEQ ID NO: 322302 - DNA, 75 bp, synthetic construct
  source 1..75: mol_type = other DNA
attaaccctttcagaggcattggaaagttttaaaactgcgggtgaagacttcgcggtgatcatgaacgagtacgc

SEQ ID NO: 322303 - DNA, 75 bp, synthetic construct
  source 1..75: mol_type = other DNA
gttccgatattgcctatcagatttatcgtgatttcgctgaaaacaaagggctttttgtacctggtgccacagata

SEQ ID NO: 322304 - DNA, 75 bp, synthetic construct
  source 1..75: mol_type = other DNA
agacggtatcgttgtacttaaccagcaggcagacactgcaggtaatatccaggccttcagttcagtgaacctcgc

SEQ ID NO: 322305 - DNA, 75 bp, synthetic construct
  source 1..75: mol_type = other DNA
cgttgttgttcttgagcaacagccagatgcaaaccagaaacaacaggcgtttagccatatcaatatagccagtgg

SEQ ID NO: 322306 - DNA, 75 bp, synthetic construct
  source 1..75: mol_type = other DNA
aagaactacggcaaactttagttgagcgctgcgacctcaaggctgtcattactctgcccagtggagtgtttaaac

SEQ ID NO: 322307 - DNA, 75 bp, synthetic construct
  source 1..75: mol_type = other DNA
gaaacctcagagcgcactgactaatgcgggaacgtccctcggttatgtggtgaatactgtcgcaccgaaccttta

SEQ ID NO: 322308 - DNA, 75 bp, synthetic construct
  source 1..75: mol_type = other DNA
gcgctgtatcctcctggacgcacaacgttcacgatgaaacagccagccaaagaccagttcggttctgcacttgtt

SEQ ID NO: 322309 - DNA, 75 bp, synthetic construct
  source 1..75: mol_type = other DNA
atccatcgacacaacctccagttccggaatgctgatatttcatctttttggggcactggcagaatttgaacgcaa

SEQ ID NO: 322310 - DNA, 75 bp, synthetic construct
  source 1..75: mol_type = other DNA
gcgctgtatcctccgggacgtactacgttcacgatgaaacagcctgccaaagatcagttcggttcggcacttgtt

SEQ ID NO: 322311 - DNA, 75 bp, synthetic construct
  source 1..75: mol_type = other DNA
caaacctcagagcacctcagggacacctcttggttatgttgtgaacactatcgttcccaatctctaccaagtcac

SEQ ID NO: 322312 - DNA, 75 bp, synthetic construct
  source 1..75: mol_type = other DNA
gtgacattaagccgtggttttgtcgtggctactgacggcaaggcataccctgctggcccctggactcgcgaggaa

SEQ ID NO: 322313 - DNA, 75 bp, synthetic construct
  source 1..75: mol_type = other DNA
gaaatgctgctttcggaaatcgctaccgcaggcaagaacggtcagttccgcactcctcgacacatcatcaagatg

SEQ ID NO: 322314 - DNA, 75 bp, synthetic construct
  source 1..75: mol_type = other DNA
tatcaggacactctgagcaaaagctacaacgaagaatccgcctacgacatcgtgctagccaacccaccctttacc

SEQ ID NO: 322315 - DNA, 75 bp, synthetic construct
  source 1..75: mol_type = other DNA
tatttgaagaagtgcagtacgaacagcctgaagctattctggaacgactaattcaagcagaagtggggaatgtgg

SEQ ID NO: 322316 - DNA, 75 bp, synthetic construct
  source 1..75: mol_type = other DNA
ggttagccgccacgctgatactgctattcgtcgtgtttggcgggtatttcgcgtggctgcaaggccacaaacacg

SEQ ID NO: 322317 - DNA, 75 bp, synthetic construct
  source 1..75: mol_type = other DNA
caagtgcagatacgttagcggaacaggcagcaaaaacggcaagtgggtggatgtcagacgccgtaatagcgatag

SEQ ID NO: 322318 - DNA, 75 bp, synthetic construct
  source 1..75: mol_type = other DNA
acttgtgttagctaaccaacggattgatgacacactggaagtgctttcggagcatattatgctgcttaacgagcc

SEQ ID NO: 322319 - DNA, 75 bp, synthetic construct
  source 1..75: mol_type = other DNA
tctgtttgatcgctgtgagtgcgttcttctctatatcggagatttcacttgccgcttcgcgcaaaatcaaactta

SEQ ID NO: 322320 - DNA, 75 bp, synthetic construct
  source 1..75: mol_type = other DNA
gggcccgtatcatgaacggcgtaggttcagccgatggcgggtacagtgataattacactcacgttcaggtcggct

SEQ ID NO: 322321 - DNA, 75 bp, synthetic construct
  source 1..75: mol_type = other DNA
atatgtaagaagcaaggtgaatatttccccatgaatccgataagttcaaatgataatgatagtgtagacttgcga

SEQ ID NO: 322322 - DNA, 75 bp, synthetic construct
  source 1..75: mol_type = other DNA
acgctgcatgtcgacaccacgggtggcagtacgaagtggattctggatggtttcaggacggaagccgataaagta

SEQ ID NO: 322323 - DNA, 75 bp, synthetic construct
  source 1..75: mol_type = other DNA
cgttaccgggaggaagaaaagccatatttgatggtagtgtaaatattccggaaggcaccctgagtcaggatggtg

SEQ ID NO: 322324 - DNA, 75 bp, synthetic construct
  source 1..75: mol_type = other DNA
acaccgtatccgctgatgccggaaaaacatggacaggagcaggcattattacagacaagggtgctgatgttacct

SEQ ID NO: 322325 - DNA, 75 bp, synthetic construct
  source 1..75: mol_type = other DNA
ttttaaaacaggtggtaccgcaggtgttcctcagatatctgatgcaaccatagtctctgcccccggggaaaccta

SEQ ID NO: 322326 - DNA, 75 bp, synthetic construct
  source 1..75: mol_type = other DNA
taaatgggccaacaaatacagtacaggaaatgagttttggctatcagaaaaataaatatactatagcaggtacaa

SEQ ID NO: 322327 - DNA, 75 bp, synthetic construct
  source 1..75: mol_type = other DNA
tcttgtcggtcgtctggataaagcgcctatgcctgatttcagtagtgtaacgattgatgcggccatgttaagacc

SEQ ID NO: 322328 - DNA, 75 bp, synthetic construct
  source 1..75: mol_type = other DNA
ctgctggcactaaaaaagtcagaattaaagcatggggtgcaggcggtgggggtaagggaacagacgtcgcaggga

SEQ ID NO: 322329 - DNA, 75 bp, synthetic construct
  source 1..75: mol_type = other DNA
cacgccggagaatggcgcggataatacctggatgcctgttctgacatacatgacggaaggctacgatttaaccgg

SEQ ID NO: 322330 - DNA, 75 bp, synthetic construct
  source 1..75: mol_type = other DNA
tcagtcggacaacagccatatagcactgggaagcagtacggtttttgtggataaaaatgacgggacgggaaatga

SEQ ID NO: 322331 - DNA, 75 bp, synthetic construct
  source 1..75: mol_type = other DNA
acatattactgagattaacggcagctttttaacagggggaactgttggggggttgaactcttacagtaacggtca

SEQ ID NO: 322332 - DNA, 75 bp, synthetic construct
  source 1..75: mol_type = other DNA
ccgggttgttcagcgggtataacgcggcgtactacggtgccatcaccggcggtaagggaaacgtcagtatgaata

SEQ ID NO: 322333 - DNA, 75 bp, synthetic construct
  source 1..75: mol_type = other DNA
tttaaaattgaaaaaaacgaattacgcgagtttaagaacagacccgaaacaatcgggttagttggtaaaaatacc

SEQ ID NO: 322334 - DNA, 75 bp, synthetic construct
  source 1..75: mol_type = other DNA
atagtctttcaatgttaccaccaatggttgtagcattgttttataaagaaaaaagcttgttcgttttttttatta

SEQ ID NO: 322335 - DNA, 75 bp, synthetic construct
  source 1..75: mol_type = other DNA
catctcatgtaagagttgtaactcatatgtgtggttttttggtctggctctatagcctctcgatgctgccaccga

SEQ ID NO: 322336 - DNA, 75 bp, synthetic construct
  source 1..75: mol_type = other DNA
cgaccagctgctggtgacccgaatcgacagcaaggccaccgccctttcgccaaaactgcctgacgctaaagataa

SEQ ID NO: 322337 - DNA, 75 bp, synthetic construct
  source 1..75: mol_type = other DNA
gcaccggcgggaacttcagcagagatgtttaaggccggcacccgggggacaggtttcagtcgggtgaccccaacc

SEQ ID NO: 322338 - DNA, 75 bp, synthetic construct
  source 1..75: mol_type = other DNA
caaaaaatatagatgatattggaatatttgcattggcaatgtgtaatggagaatcaattaacgagaataaagaat

SEQ ID NO: 322339 - DNA, 75 bp, synthetic construct
  source 1..75: mol_type = other DNA
gttctcctttattcgcttatgatgccctgcaagaaaaatgggttattgttgctgtattaagggcatatgcaggtc

SEQ ID NO: 322340 - DNA, 75 bp, synthetic construct
  source 1..75: mol_type = other DNA
ctttaaaacaggcggaaccacaggtgttcctctgatatctgatacaacaatagtttctaatcccgggcaaaccta

SEQ ID NO: 322341 - DNA, 75 bp, synthetic construct
  source 1..75: mol_type = other DNA
tggggtttggttatgggaaaaactcatattctctggttgatcgtaatgactatccttcggcagattttcatgccc

SEQ ID NO: 322342 - DNA, 75 bp, synthetic construct
  source 1..75: mol_type = other DNA
gggcccgtatcatgaacggcgccggttcagccgatggcggatacagtgataactacacccacgttcaggtcggtt

SEQ ID NO: 322343 - DNA, 75 bp, synthetic construct
  source 1..75: mol_type = other DNA
ggcatcacgatgacctataccgacagtagtgcggacagtaatgcattcagcggtaaaacaaaatccgtgggcggc

SEQ ID NO: 322344 - DNA, 75 bp, synthetic construct
  source 1..75: mol_type = other DNA
gaacaacctgaacaaacgtatgggtgaactgcgcgacaccaatggtaacgcaggtgcctgggcgcgcatcatgaa

SEQ ID NO: 322345 - DNA, 75 bp, synthetic construct
  source 1..75: mol_type = other DNA
aataaaaaaaatctctctgatttttttgggaagtcacgagtaacgttcaataaaatactttcggacttagaagaa

SEQ ID NO: 322346 - DNA, 75 bp, synthetic construct
  source 1..75: mol_type = other DNA
cgataatttaaaatggttcaaagttcttgctgtcaatgttgatgacaaaagtccatatgaaagaatagttttgga

SEQ ID NO: 322347 - DNA, 75 bp, synthetic construct
  source 1..75: mol_type = other DNA
ctcccaaacagcttgatgttgccgaagaatccgtgatggcggtctaccagcaatttattaatgagattaagagtt

SEQ ID NO: 322348 - DNA, 75 bp, synthetic construct
  source 1..75: mol_type = other DNA
atggccgccgttaatgaatccaatcccgataaggcctttgcaaaaggtatgatcgcacaccatgaaggggcaatc

SEQ ID NO: 322349 - DNA, 75 bp, synthetic construct
  source 1..75: mol_type = other DNA
agtatgaccttattatcttcgatacccctccagaagactcgccaattatctgggccgctgatgaggccgctgacg

SEQ ID NO: 322350 - DNA, 75 bp, synthetic construct
  source 1..75: mol_type = other DNA
ggcaatgttctagagaagaacgaacgtctttgttactacgtttcaaggaagttatcttaccggtactgaagcaga

SEQ ID NO: 322351 - DNA, 75 bp, synthetic construct
  source 1..75: mol_type = other DNA
atgccaaaaacaatatgaccatcgggattggcgcaggccagatgagccgcgtgtactccgcaaaaatcgccggca

SEQ ID NO: 322352 - DNA, 75 bp, synthetic construct
  source 1..75: mol_type = other DNA
ttctatatagaagagaatgtgaaagaagcctccgttgctaccgcaacccaggttcagggtaaagccctctcttat

SEQ ID NO: 322353 - DNA, 75 bp, synthetic construct
  source 1..75: mol_type = other DNA
cctggggatggtcggtgcagaagaactgcgcgtcgtcaccaaacgtcagccgaccgaacaggaactgcgtgatgc

SEQ ID NO: 322354 - DNA, 75 bp, synthetic construct
  source 1..75: mol_type = other DNA
gatttcatgttgacgatcagtgagcgattcaaacaatcgccgagcaagggcgaaaatctaagctggttcaaagtg

SEQ ID NO: 322355 - DNA, 75 bp, synthetic construct
  source 1..75: mol_type = other DNA
agtgaaaggttcctcaatggcttctgacgcgttcttcccgttccgcgacggtattgatgccgccgccgctgcggg

SEQ ID NO: 322356 - DNA, 75 bp, synthetic construct
  source 1..75: mol_type = other DNA
ggccggtatcgtcgaattcgcccaggcactttccgcacgtggtgtggagctgctgtctacagggggcacagcccg

SEQ ID NO: 322357 - DNA, 75 bp, synthetic construct
  source 1..75: mol_type = other DNA
ggcgagaaaatgtcgatcgccattatggccggcgtattagaagcgcgtggtcacaacgttaccgttatcgatccg

SEQ ID NO: 322358 - DNA, 75 bp, synthetic construct
  source 1..75: mol_type = other DNA
gaagatggcgtctgccgcgtgaagattgctgaagtcgacggtaacgatccgctgtttaaagtgaaaaacggcgaa

SEQ ID NO: 322359 - DNA, 75 bp, synthetic construct
  source 1..75: mol_type = other DNA
ggtaaataacgatgacgcgactactggtgtgcgcgttacccaccagatgctattcaataccgatcaggttattga

SEQ ID NO: 322360 - DNA, 75 bp, synthetic construct
  source 1..75: mol_type = other DNA
ataccggaaaccctcaagcgccgggtacgctcattggcgccagtcgtgatgaagatgagttgccggtgaagggaa

SEQ ID NO: 322361 - DNA, 75 bp, synthetic construct
  source 1..75: mol_type = other DNA
cgtgttgatgaggctttttccctacggcggctcacggcaaaagtcattggtgaaattgagtctattgccacgctt

SEQ ID NO: 322362 - DNA, 75 bp, synthetic construct
  source 1..75: mol_type = other DNA
cagttgccatcgcttttacccccttcggcaaaaaggttcgggattcgatgcgtgatgccaaccagccatcacgcc

SEQ ID NO: 322363 - DNA, 75 bp, synthetic construct
  source 1..75: mol_type = other DNA
tcggttacggactggaaggtattattacggatgcacagtccgggaaaattattcgcaacagtattattccggcat

SEQ ID NO: 322364 - DNA, 75 bp, synthetic construct
  source 1..75: mol_type = other DNA
atgcgagtgttgaagttcggcggttcatcagtggcaaatgcagaacgttttctgcgtgttgccgatattctggaa

SEQ ID NO: 322365 - DNA, 75 bp, synthetic construct
  source 1..75: mol_type = other DNA
ttaacgcagagggtgatgttgcagcttttatggcgaatctgtcacagctcgacgatctctttgccgcacgcgtgg

SEQ ID NO: 322366 - DNA, 75 bp, synthetic construct
  source 1..75: mol_type = other DNA
gcgggcaatgacgttacagctgctggtgtctttgccgatctgctacgtaccctctcatggaagttaggagtctga

SEQ ID NO: 322367 - DNA, 75 bp, synthetic construct
  source 1..75: mol_type = other DNA
tctgcgtgttgccgatattctggaaagcaatgccaggcaggggcaggtggcccccgtcctctctgcccccgccaa

SEQ ID NO: 322368 - DNA, 75 bp, synthetic construct
  source 1..75: mol_type = other DNA
cctgcgcgaaggtttccacgttgtcacgccgaacaaaaaggccaacacctcgtcgatggattactaccatctgtt

SEQ ID NO: 322369 - DNA, 75 bp, synthetic construct
  source 1..75: mol_type = other DNA
attgttgactgcacctccagccaggcagtggcggatcaatatgccgacttcctgcgcgaaggtttccacgttgtc

SEQ ID NO: 322370 - DNA, 75 bp, synthetic construct
  source 1..75: mol_type = other DNA
ttaaagctgccgatgaaggtctggaagtcaaaggttcctctatggcttctgacgcgttcttcccgttccgtgatg

SEQ ID NO: 322371 - DNA, 75 bp, synthetic construct
  source 1..75: mol_type = other DNA
ttacactgaacaatgttcgtatcagtgctgatgctctgcagtctgctgcgaaaggtactgttatcaatgttgata

SEQ ID NO: 322372 - DNA, 75 bp, synthetic construct
  source 1..75: mol_type = other DNA
aagaacgcgttaagaccaactacgaccatcccagcgcgatggatcacagcctgttgcttgagcatttacaagcgt

SEQ ID NO: 322373 - DNA, 75 bp, synthetic construct
  source 1..75: mol_type = other DNA
caaaaccgtttcgactctgccatcaccaaccttggcaacaccgtaaacaacctgtcttctgcccgtagccgtata

SEQ ID NO: 322374 - DNA, 75 bp, synthetic construct
  source 1..75: mol_type = other DNA
ctaaaagtaattcatctagaattgaaaataaaaactttcgaccgttctataatggtaaatctttgctggaaatta

SEQ ID NO: 322375 - DNA, 75 bp, synthetic construct
  source 1..75: mol_type = other DNA
tttattcccctggtatgtgtatccaccagtagaacccttcgttgcccgaatgctggcaggaactgttggcagaac

SEQ ID NO: 322376 - DNA, 75 bp, synthetic construct
  source 1..75: mol_type = other DNA
tggcttctattcaggacgaaatcaaatcccgtttgtctgaaattgaccgcgtatccgggcagacccagttcaacg

SEQ ID NO: 322377 - DNA, 75 bp, synthetic construct
  source 1..75: mol_type = other DNA
aacggtaaaggcgctgttgataatgctaaagccactgaagcagatctgaccgctgcgggcttctcccaaggtgca

SEQ ID NO: 322378 - DNA, 75 bp, synthetic construct
  source 1..75: mol_type = other DNA
cttcgcgaaattgaatgatggtgatgttgttactatcaatgatggtaaggatactgcctataaatataatgctgc

SEQ ID NO: 322379 - DNA, 75 bp, synthetic construct
  source 1..75: mol_type = other DNA
gtcacgttaagccgtggtttcgctctggcaacagatggcaaagcatacccggcaggcccatggactcgcgaggaa

SEQ ID NO: 322380 - DNA, 75 bp, synthetic construct
  source 1..75: mol_type = other DNA
gtggtagcccgattctggtaaacgaagatgcagcaaaatcgttgcaatctaccaccaacccgctcgaaactatcg

SEQ ID NO: 322381 - DNA, 75 bp, synthetic construct
  source 1..75: mol_type = other DNA
atctcgtcttgatgaaattgaccgcgtatctggtcagacccagttcaatggcgtgaatgtgttgtccaaagacgg

SEQ ID NO: 322382 - DNA, 75 bp, synthetic construct
  source 1..75: mol_type = other DNA
tctgacggcaacctgactaaaaaccaggccggcgggccagatgcggcaacgttggacggtattttcaacggtgcg

SEQ ID NO: 322383 - DNA, 75 bp, synthetic construct
  source 1..75: mol_type = other DNA
ttatcggggggaaaataaagacaggttcgataaagggctcattggattttgctggacaacggacatttcagtcgc

SEQ ID NO: 322384 - DNA, 75 bp, synthetic construct
  source 1..75: mol_type = other DNA
ctacttcggcagcatggttccggcttatcacggtgaaagcaaagaggccgccggtcgcttcccgcgtacgctgaa

SEQ ID NO: 322385 - DNA, 75 bp, synthetic construct
  source 1..75: mol_type = other DNA
gaccaatgtgaaatacgcccgcatccaccaggaaggcggggaaatcagcattccggcccgcagtcagaaagcctg

SEQ ID NO: 322386 - DNA, 75 bp, synthetic construct
  source 1..75: mol_type = other DNA
taaaattctacagaagagcggtcgactggcagcgagtatcacgcagtacagcacgaatgatgatgcgacggtcgg

SEQ ID NO: 322387 - DNA, 75 bp, synthetic construct
  source 1..75: mol_type = other DNA
aaaccgacccgacctccgcattcggcggcattatcgcctttaaccgcgagctggatgcggaaaccgcacaggcca

SEQ ID NO: 322388 - DNA, 75 bp, synthetic construct
  source 1..75: mol_type = other DNA
cacggtggcattctgggccgtcgcggccaggatgatgccattatggagcagcaccacatcgagcctatcgatatg

SEQ ID NO: 322389 - DNA, 75 bp, synthetic construct
  source 1..75: mol_type = other DNA
tgattgtgaagcacgccaacccttgcggcgtggctatcggcaattccattcttgatgcttacgatcgcgcgtata

SEQ ID NO: 322390 - DNA, 75 bp, synthetic construct
  source 1..75: mol_type = other DNA
acaactggcagacgccatcgccagagcggtttacgcttgcgatccggcattgattctcgtcgggctggcgggaag

SEQ ID NO: 322391 - DNA, 75 bp, synthetic construct
  source 1..75: mol_type = other DNA
cacggcaactacagcagtagcctgttattcgacaccgttccactgaccgatccgctgatgacgctgcaaagtctt

SEQ ID NO: 322392 - DNA, 75 bp, synthetic construct
  source 1..75: mol_type = other DNA
catggcaactacagcagtagcttgttgctcgacactgtcccgctgaccgatccgctgatgacgctacaaagcctt

SEQ ID NO: 322393 - DNA, 75 bp, synthetic construct
  source 1..75: mol_type = other DNA
gcacggcgacggcgagcacgcgctggcattcgcccgccggctacgatctgcatttatcgaaaaagggattattgt

SEQ ID NO: 322394 - DNA, 75 bp, synthetic construct
  source 1..75: mol_type = other DNA
atgaaaattgacctgaacgccgatctgggcgaaggctgtgccagcgacgcagagctattaacgctggtttcctct

SEQ ID NO: 322395 - DNA, 75 bp, synthetic construct
  source 1..75: mol_type = other DNA
ggagaacacgcactggcgttcgcccgccgactacgctctacatttgccgaaaaggggattgttgtcgcagcataa

SEQ ID NO: 322396 - DNA, 75 bp, synthetic construct
  source 1..75: mol_type = other DNA
ccgttctggtgatatcgatccggcgatcatcttccacctacacgacaccctgggcatgagcgttgacgcaatcaa

SEQ ID NO: 322397 - DNA, 75 bp, synthetic construct
  source 1..75: mol_type = other DNA
ggtacccgtcctgcggtggttatcccaaccaacgaagaactggttatcgcacaagacgcgagccgcctgactgcc

SEQ ID NO: 322398 - DNA, 75 bp, synthetic construct
  source 1..75: mol_type = other DNA
gttgacacctctatgggcctgaccccgctggaaggtctggtcatgggtacccgttctggtgatgggtaccgagct

SEQ ID NO: 322399 - DNA, 75 bp, synthetic construct
  source 1..75: mol_type = other DNA
tattcatcaaaatgcaatcgaaatataaatggtttctattttatgctaactttgctttaagctttgcagcagtaa

SEQ ID NO: 322400 - DNA, 75 bp, synthetic construct
  source 1..75: mol_type = other DNA
tttctccagaggctcggagcaatatcaactcgttgaagtccttaaagaatatggagaaacagtaaaaacagttgt

SEQ ID NO: 322401 - DNA, 75 bp, synthetic construct
  source 1..75: mol_type = other DNA
tgggaaactcgcctatcagagaagagtatctgattgtggatcgcgggcaactggccgggaccggggcaaagtctt

SEQ ID NO: 322402 - DNA, 75 bp, synthetic construct
  source 1..75: mol_type = other DNA
tgttcagtatcagggcaaaaacggtagcccggaaggtgaaggcatgaccaacaacggtcgtgaagctctgcgtca

SEQ ID NO: 322403 - DNA, 75 bp, synthetic construct
  source 1..75: mol_type = other DNA
gtctggttgacggcctgaactttgctgttcagtaccagggtaaaaacggtagcgtagatggcgaaggcatgacca

SEQ ID NO: 322404 - DNA, 75 bp, synthetic construct
  source 1..75: mol_type = other DNA
ctgggttgggcgaacaaagcacagaacttcgaagctgttgctcagtaccagttcgacttcggtctgcgtccatct

SEQ ID NO: 322405 - DNA, 75 bp, synthetic construct
  source 1..75: mol_type = other DNA
aagagtcttacctctacgccctgccgtacaacctgtacaaagagcacggcatccgtcgttacggcgcgcacggca

SEQ ID NO: 322406 - DNA, 75 bp, synthetic construct
  source 1..75: mol_type = other DNA
ccaaaaaagatgcgttaagaattctacctaaagttatattaaatattaagtctaaatatttatacatcggtctca

SEQ ID NO: 322407 - DNA, 75 bp, synthetic construct
  source 1..75: mol_type = other DNA
caacgtcacaccgacgcaggttgcagaggcgcgcaagattgccgaaattgtctgtgtgcaaaacgaatacaacat

SEQ ID NO: 322408 - DNA, 75 bp, synthetic construct
  source 1..75: mol_type = other DNA
cggttttggcctgtcgcgttgggatgaaaaaggaaactggcatggcctgtatgatcctacccacgtaatatggac

SEQ ID NO: 322409 - DNA, 75 bp, synthetic construct
  source 1..75: mol_type = other DNA
gttagttgtcttgtttttgtttttttctatttcgcaatcttaatgacagtgtcagcagatatgccgcttgttggc

SEQ ID NO: 322410 - DNA, 75 bp, synthetic construct
  source 1..75: mol_type = other DNA
ccggcactcaaaaagataaatacaaatacaccactcaaagcgacaatgatacagaatgaaaatggtagcttggtc

SEQ ID NO: 322411 - DNA, 75 bp, synthetic construct
  source 1..75: mol_type = other DNA
ctatccaaaaatccagactgggtgaatggttcagctgtgtactgaatcagtggggcgcactctgttattacagtg

SEQ ID NO: 322412 - DNA, 75 bp, synthetic construct
  source 1..75: mol_type = other DNA
ggcagtcttcgaaatccccggacgatccgcctttatgaaagtcttgctcaattcaaatcttcaggcttatgggtt

SEQ ID NO: 322413 - DNA, 75 bp, synthetic construct
  source 1..75: mol_type = other DNA
ggatgaccttcctttaatcaataaagaagaacaaccagataaaggcttcttagccagtatttctcggggagttat

SEQ ID NO: 322414 - DNA, 75 bp, synthetic construct
  source 1..75: mol_type = other DNA
atgaatatgatgatctcatatcaggaacttgttcgcaccttccttagttgtcttgtttttgtttttttctatttc

SEQ ID NO: 322415 - DNA, 75 bp, synthetic construct
  source 1..75: mol_type = other DNA
gggacggggacaggtatacggtctgactacggggcaaaatccggaagggatcaggcttattccagtttctaagca

SEQ ID NO: 322416 - DNA, 75 bp, synthetic construct
  source 1..75: mol_type = other DNA
gcagcagttacccgattactgggggctggcggggatcagcagttcaaaagtgccgggcgttgcggggatcgggcc

SEQ ID NO: 322417 - DNA, 75 bp, synthetic construct
  source 1..75: mol_type = other DNA
ggatgaatatgatgatctcatatcaggaacttgttcgcaccttccctaacgcagatgagtggatgacaacgttta

SEQ ID NO: 322418 - DNA, 75 bp, synthetic construct
  source 1..75: mol_type = other DNA
gcgtcacgcgcacgatcacgactatgttagccgcgtgcgggacatcaatgccgacacgccagcacgttacaacgc

SEQ ID NO: 322419 - DNA, 75 bp, synthetic construct
  source 1..75: mol_type = other DNA
ttttgacaactcttacccaattggttggccctgctcatatcctcaccgaaccgtcaaaaactgcgcgttaccgta

SEQ ID NO: 322420 - DNA, 75 bp, synthetic construct
  source 1..75: mol_type = other DNA
cattaagagtaattgttgtcctggggatgttattcctgctgataatgattgcgggtggtatgtgccgttctcttc

SEQ ID NO: 322421 - DNA, 75 bp, synthetic construct
  source 1..75: mol_type = other DNA
cagctccaaacgtacctgggatcagaacaacactggcctgatcggtactggcgaccgtgctgaaacctacactgg

SEQ ID NO: 322422 - DNA, 75 bp, synthetic construct
  source 1..75: mol_type = other DNA
cacgacctccgaagtgagcgttgcgctaactctcgacaccaccggctcgacctccaccggtgacacattactgac

SEQ ID NO: 322423 - DNA, 75 bp, synthetic construct
  source 1..75: mol_type = other DNA
caggtggtacgctggtgtgcaataaaactgaaaatccgccgctgttccgcgccctggcgcttcgtcgtaatcaga

SEQ ID NO: 322424 - DNA, 75 bp, synthetic construct
  source 1..75: mol_type = other DNA
gaaagtttaatcatcactcagggatttattggcagagaaagtaaaggccgtaccacaacacttggtcgtggcggc

SEQ ID NO: 322425 - DNA, 75 bp, synthetic construct
  source 1..75: mol_type = other DNA
gaatgtgctcggtatagtcctgagtggtcagaaaagtataatttttctcaaatcgactgtgaagttcgaggtttg

SEQ ID NO: 322426 - DNA, 75 bp, synthetic construct
  source 1..75: mol_type = other DNA
cacacacatccagttgatattgtctttcattataaagatccttacttaaataaaattgtttatctaaatactgat

SEQ ID NO: 322427 - DNA, 75 bp, synthetic construct
  source 1..75: mol_type = other DNA
gtgatgacccgggtattaatggacaactgtgggacgtcaaccgtattgatgtcaccgcgcagcaaggaacgtggg

SEQ ID NO: 322428 - DNA, 75 bp, synthetic construct
  source 1..75: mol_type = other DNA
aaaccgtttcatattgaagaggtgatggcgcgaatgcaggcattaatgcggcgtaatagcggcctggcttcacag

SEQ ID NO: 322429 - DNA, 75 bp, synthetic construct
  source 1..75: mol_type = other DNA
tcgataacatcagccatgactggctgctttcccatattccgatggacaggagactgcttaaaaaatggttgaaag

SEQ ID NO: 322430 - DNA, 75 bp, synthetic construct
  source 1..75: mol_type = other DNA
aatgccactcggcatggatgaaatttatatggcgttgtcgatggccgatattttcattgctattggtacatcagg

SEQ ID NO: 322431 - DNA, 75 bp, synthetic construct
  source 1..75: mol_type = other DNA
cgacatctggactgatgtccccggcatttacactaccgatccacgcgtggtgccagaggccagacgcattgatga

SEQ ID NO: 322432 - DNA, 75 bp, synthetic construct
  source 1..75: mol_type = other DNA
aaggtctggcgctggtcgcgttgattggcaatgacctgtcaaaagcctgcggcgttggcaaagaggtattcggcg

SEQ ID NO: 322433 - DNA, 75 bp, synthetic construct
  source 1..75: mol_type = other DNA
gaacgtctgcgttacccgaacgttatccgtgaagagattgaacgtctgctggagaacattactgttctggcagaa

SEQ ID NO: 322434 - DNA, 75 bp, synthetic construct
  source 1..75: mol_type = other DNA
catacacaccctgtcgatgtggtttttagctataaagacccttatttaaataaaactattttattgaatactgac

SEQ ID NO: 322435 - DNA, 75 bp, synthetic construct
  source 1..75: mol_type = other DNA
atgccctgaaagatgcctgtggttttactaacccgatccaggcaactcacgaagaaattgtggcgatttatcgcg

SEQ ID NO: 322436 - DNA, 75 bp, synthetic construct
  source 1..75: mol_type = other DNA
tgaacgtgacaggtaaaaacgacgcggaaggtgcagaagcctgcattaacgctatccgtgaactggcgaagaaag

SEQ ID NO: 322437 - DNA, 75 bp, synthetic construct
  source 1..75: mol_type = other DNA
ttgccatcaataccactgcgggtactgcatcagaaatgactcgtttctgcatcatcaccgatgaagcgcgtcata

SEQ ID NO: 322438 - DNA, 75 bp, synthetic construct
  source 1..75: mol_type = other DNA
aaaccgtttcatattgaagaggtgatggcgcgaatgcaggcattaatgcggcgtaatagtggtctggcttcacag

SEQ ID NO: 322439 - DNA, 75 bp, synthetic construct
  source 1..75: mol_type = other DNA
gcgtaatagcggtctggcttcacaggtcatttcgctcccccgtttcaggttgatctctctcgccgtgaattatct

SEQ ID NO: 322440 - DNA, 75 bp, synthetic construct
  source 1..75: mol_type = other DNA
ggcatcagaaatgacccgtttttgcatcatcaccgatgaagcacgtcacatcaaaatggcgattgtggataagca

SEQ ID NO: 322441 - DNA, 75 bp, synthetic construct
  source 1..75: mol_type = other DNA
tgccgaaggtcaacgtaacttcacgtggaaaatgggacatccagggaaaacagtcctggggtcgactggggatgc

SEQ ID NO: 322442 - DNA, 75 bp, synthetic construct
  source 1..75: mol_type = other DNA
atattcacggcaggctgatggcggggacgctggacagtcagagcagttgcccgtgtaaggcgcgatttattgcgt

SEQ ID NO: 322443 - DNA, 75 bp, synthetic construct
  source 1..75: mol_type = other DNA
acggatgatgtcgccaaacgctgactgggcacccgtactgcccattcgccagaacgcagctactctgtggtatca

SEQ ID NO: 322444 - DNA, 75 bp, synthetic construct
  source 1..75: mol_type = other DNA
gcggttctggcgactaatgccctgaaagatgcctgtggctttactaacccgatccaggcaactcacgaagaaatt

SEQ ID NO: 322445 - DNA, 75 bp, synthetic construct
  source 1..75: mol_type = other DNA
tcgcacctgcggccgatctcggccatgaggtctccgtccacaagggggaacgtattctggttctcgggaccgggg

SEQ ID NO: 322446 - DNA, 75 bp, synthetic construct
  source 1..75: mol_type = other DNA
cgtgttctggttctcgggacaggggaattcgtctgggagccgttcctgcttgctgaacggctcgaagctgccgga

SEQ ID NO: 322447 - DNA, 75 bp, synthetic construct
  source 1..75: mol_type = other DNA
ctttttccggcgacaccaggggaacgaggctgccattaatattctgcaggcgaactaccgtaacgggcaccacgt

SEQ ID NO: 322448 - DNA, 75 bp, synthetic construct
  source 1..75: mol_type = other DNA
ttttgccgcatatgtcatcggaggacaggatattcttttatgagcacagtgaaaaagtgatcggacaacgggcga

SEQ ID NO: 322449 - DNA, 75 bp, synthetic construct
  source 1..75: mol_type = other DNA
tctggaatatattcgcaatcatgcctatcacacttcacgttttcttcgcaaaaatgtggttattgatgaagagcg

SEQ ID NO: 322450 - DNA, 75 bp, synthetic construct
  source 1..75: mol_type = other DNA
cgttgtacgaacatccgctaccgctggtgattgtgggatctgcagggagtggtaagacggcgctggtactggaaa

SEQ ID NO: 322451 - DNA, 75 bp, synthetic construct
  source 1..75: mol_type = other DNA
acggacgactcatcaaactggacaaccggcagatggccatgttcctggtgctcctgatgcaggcgctgttccaca

SEQ ID NO: 322452 - DNA, 75 bp, synthetic construct
  source 1..75: mol_type = other DNA
ttattcccgtccgcgggacaggcaggatcgttcagcggaaatctataagttttttatcaacgcgctctatgttgc

SEQ ID NO: 322453 - DNA, 75 bp, synthetic construct
  source 1..75: mol_type = other DNA
aatctgctcagtcatcagtatctttcgttggcaactccccgttatgatgtcatttttgttgatgaagttcaggat

SEQ ID NO: 322454 - DNA, 75 bp, synthetic construct
  source 1..75: mol_type = other DNA
gccgtggaaaggagtctttgtgaaatcgcctcatataccgggtgacagtcatccggttgagccaacgatgtatta

SEQ ID NO: 322455 - DNA, 75 bp, synthetic construct
  source 1..75: mol_type = other DNA
atgactaccgttttggcgacagcggtccgaaatacctcattcgcggcccgatgtgtgatatgggcgtcgtcatgc

SEQ ID NO: 322456 - DNA, 75 bp, synthetic construct
  source 1..75: mol_type = other DNA
accgataacttcgttcaggctgatgttcgaaaaattgacaccaatctttaccgtgcacggctcaatatccgggac

SEQ ID NO: 322457 - DNA, 75 bp, synthetic construct
  source 1..75: mol_type = other DNA
agtggatatgctgggagggaagaagggtttttacgaacgcagtgaaaagtctgtcggatactgggtgggggggat

SEQ ID NO: 322458 - DNA, 75 bp, synthetic construct
  source 1..75: mol_type = other DNA
ctggcagagtgtgtggttcatcttcctgaagcgttgctgccggaacgccgcaaacgaaggagttatatcagcagc

SEQ ID NO: 322459 - DNA, 75 bp, synthetic construct
  source 1..75: mol_type = other DNA
ccaagaagcaatttataggcgataccgagataacagtgcatctttgcccacaatgttttggaaaaaaggtaatat

SEQ ID NO: 322460 - DNA, 75 bp, synthetic construct
  source 1..75: mol_type = other DNA
cagtggtcgtgagcagttgcaatcaggagctgaaacagcgcaggcaacaattcgggtgtgggtccgtttccggcg

SEQ ID NO: 322461 - DNA, 75 bp, synthetic construct
  source 1..75: mol_type = other DNA
gtgccgttcttaacgttaccgggcctccggttccggatatcaaaggcacccggctggaaattctctgcaaacagg

SEQ ID NO: 322462 - DNA, 75 bp, synthetic construct
  source 1..75: mol_type = other DNA
ctcgaaacgtgggtggacggtcacacactctgggcaagcgtgaacatgatcagcagcaaggaggccatttcatca

SEQ ID NO: 322463 - DNA, 75 bp, synthetic construct
  source 1..75: mol_type = other DNA
atgagaggtaaaatactactttaccagtcaaagtatcactggcaatcgccctctattttttttggttgtttttca

SEQ ID NO: 322464 - DNA, 75 bp, synthetic construct
  source 1..75: mol_type = other DNA
gcgtcacgattcagaattttactaccagccgaaccccttctggtggcgtcattcaggaatggtacgacgttgcga

SEQ ID NO: 322465 - DNA, 75 bp, synthetic construct
  source 1..75: mol_type = other DNA
gttgaagagtggcaggagggaaagaccatatgggcggaagtattgggtatcagcggcagggagcagttgcaatcg

SEQ ID NO: 322466 - DNA, 75 bp, synthetic construct
  source 1..75: mol_type = other DNA
atggccctaacgcttgagaaactgcgtgttgagctggagaccgttaaacagcgggaaaaggatctgtttatggaa

SEQ ID NO: 322467 - DNA, 75 bp, synthetic construct
  source 1..75: mol_type = other DNA
tacagtgggtcaaaggaagagatttagaggaagctataatgctgcttcctgatactcaggttgaaaaggttgtat

SEQ ID NO: 322468 - DNA, 75 bp, synthetic construct
  source 1..75: mol_type = other DNA
gcatttagaaaaccagataaacaataattctcagcgggtgttgcagtcacagccgggggagcgaaatcccgcccg

SEQ ID NO: 322469 - DNA, 75 bp, synthetic construct
  source 1..75: mol_type = other DNA
gagatgatccattttttgattccgttgcttctgcttgcgcggatgcagctgataggttcgctgcccagcttcgaa

SEQ ID NO: 322470 - DNA, 75 bp, synthetic construct
  source 1..75: mol_type = other DNA
tgcgtgatgcggcagtagcaattgaaacagtagcaacgcctcaaaaattgctagcatttcgtatgaaagtcacac

SEQ ID NO: 322471 - DNA, 75 bp, synthetic construct
  source 1..75: mol_type = other DNA
atatgcggatgtcgaagtcatgaaaatagctggagatgcccagctttctactccctgtactgacagcatcataaa

SEQ ID NO: 322472 - DNA, 75 bp, synthetic construct
  source 1..75: mol_type = other DNA
ctactgccatcgatcaaattacaaattggcgatcgcgatcattacggtaattactgggacggtggtcactggcgc

SEQ ID NO: 322473 - DNA, 75 bp, synthetic construct
  source 1..75: mol_type = other DNA
cacacggcgtgctggcggtgtttgggccgtataatttccctggtcatttgccgaacggacatatcgttccggcat

SEQ ID NO: 322474 - DNA, 75 bp, synthetic construct
  source 1..75: mol_type = other DNA
atgccgctgtccatctgaccattcagtcggcgtttgtcacagccggtcaacgctgcacctgcgcccgccgtttat

SEQ ID NO: 322475 - DNA, 75 bp, synthetic construct
  source 1..75: mol_type = other DNA
atcgtcaactggaacaaaccgcttaccggcgctgccagtactgcaccattcggtggcgttggcgcttccggcaac

SEQ ID NO: 322476 - DNA, 75 bp, synthetic construct
  source 1..75: mol_type = other DNA
aggtggtggccgcactgatggccatcgagggagagttgcgcagcttacggcaggtcgtcagggagcagggagcgc

SEQ ID NO: 322477 - DNA, 75 bp, synthetic construct
  source 1..75: mol_type = other DNA
cagtggtcttcctgtgaccgggttcaggtggtggccgcactgatggccatcgagagagagttgcgcagcttacgg

SEQ ID NO: 322478 - DNA, 75 bp, synthetic construct
  source 1..75: mol_type = other DNA
tcagggatgtctggtttattcagcagcccgccagattgaggggattcaccaaccctctcagaaaatggctgatgt

SEQ ID NO: 322479 - DNA, 75 bp, synthetic construct
  source 1..75: mol_type = other DNA
ccggtgctgccagtaccgcgccattcggcggcattggtgcttccggtaaccatcgccccagcgcctggtatgccg

SEQ ID NO: 322480 - DNA, 75 bp, synthetic construct
  source 1..75: mol_type = other DNA
atgactttatggatcaacggtgactgggtaacgggccagggcgcacagcgcgagaagcgtaatccagtatctggt

SEQ ID NO: 322481 - DNA, 75 bp, synthetic construct
  source 1..75: mol_type = other DNA
tgtgaagcgtaatccggtatcgggcgaggtgttatggcaaggcaatgatgccgatgccgctcaggtcgggcaggc

SEQ ID NO: 322482 - DNA, 75 bp, synthetic construct
  source 1..75: mol_type = other DNA
acgaacgctgcttgcaccacgcttactgcgcgcaggaacatcgttgctgacgccggggatcatcgaaatgacggg

SEQ ID NO: 322483 - DNA, 75 bp, synthetic construct
  source 1..75: mol_type = other DNA
ggtgttgaatctggtgcagggggggcgcgaaacgggtcaggcgctgagtgcgctggaagacctcgacggtttgct

SEQ ID NO: 322484 - DNA, 75 bp, synthetic construct
  source 1..75: mol_type = other DNA
gggtaacgggccagggcgcattgcgtgtgaagcgtaatccggtatcgggcgaggtgttatggcaaggcaatgatg

SEQ ID NO: 322485 - DNA, 75 bp, synthetic construct
  source 1..75: mol_type = other DNA
gtgcgttcgcgaagcgagtggcagaccctgattcagcgcggtgttacaggcgggcaaggggattttttcgcgtcc

SEQ ID NO: 322486 - DNA, 75 bp, synthetic construct
  source 1..75: mol_type = other DNA
ctacacccactgaccagcaagtgcttgccgcgcaacaagcggcaacaaaagtggctgagcaagcgccgccaaagc

SEQ ID NO: 322487 - DNA, 75 bp, synthetic construct
  source 1..75: mol_type = other DNA
gcgacatggcgaatggttacatctctgttcaattgcgttgtctgctgagccttcgcgtaccagcgcatttactgc

SEQ ID NO: 322488 - DNA, 75 bp, synthetic construct
  source 1..75: mol_type = other DNA
acagatgagagagaaatgcgacgaattatcgatctcgctcaacgttgcggagcgcttgcagtaacggcgaaaggg

SEQ ID NO: 322489 - DNA, 75 bp, synthetic construct
  source 1..75: mol_type = other DNA
ttactgggacggtggtcactggcgcgaccgtgactactggcatcgcaattatgagtggcgtaaaaaccgctggtg

SEQ ID NO: 322490 - DNA, 75 bp, synthetic construct
  source 1..75: mol_type = other DNA
gatgttgacgctgagaatcatgaaacatatcagagacatttcaatgagattatacgcattctgaattttgctatt

SEQ ID NO: 322491 - DNA, 75 bp, synthetic construct
  source 1..75: mol_type = other DNA
ttcaacgtatctcaaacagtggtcagaggaacactccctcgatgaagagctggtagaggtagtccttccagaatc

SEQ ID NO: 322492 - DNA, 75 bp, synthetic construct
  source 1..75: mol_type = other DNA
atcgttggggagcatgggcggcgagtgatagttcaggagtagactattctcctatagctgcagggtttaaagggc

SEQ ID NO: 322493 - DNA, 75 bp, synthetic construct
  source 1..75: mol_type = other DNA
tgttgggaaccatctatgaatggccgcccagaaccagcagtgcgctggatacgctgctttgtgaaattcagaacg

SEQ ID NO: 322494 - DNA, 75 bp, synthetic construct
  source 1..75: mol_type = other DNA
cccgtgaacagcacagtcgtcttgatacgctgattcgctcttatgccgcacaggacatcaaaaccggccttaata

SEQ ID NO: 322495 - DNA, 75 bp, synthetic construct
  source 1..75: mol_type = other DNA
atgaatttaagggaaaaaaatgtcagccaaagtatggtttttggggatgcggtagtagatctcttgccagaatca

SEQ ID NO: 322496 - DNA, 75 bp, synthetic construct
  source 1..75: mol_type = other DNA
gatcgggatatatgcgccctggcaaaagtgaaccgccccgggtttcctggagagtgttttatctgtgaactcagg

SEQ ID NO: 322497 - DNA, 75 bp, synthetic construct
  source 1..75: mol_type = other DNA
tgaaatatgccctgaccgccgggaaataccgcagcggcaatgaggacagcgacgagccgcagttcggccaggtca

SEQ ID NO: 322498 - DNA, 75 bp, synthetic construct
  source 1..75: mol_type = other DNA
atgtcagtgaaacggtaccaacgttggcgtccgacgaacgaattatgcgcttcaagtttgtgcgttttactaaac

SEQ ID NO: 322499 - DNA, 75 bp, synthetic construct
  source 1..75: mol_type = other DNA
ttttcgcgagaattttaatggttcggcactggctctattccaggcgttccaagtattgctgacactcaatttgta

SEQ ID NO: 322500 - DNA, 75 bp, synthetic construct
  source 1..75: mol_type = other DNA
ttcctttgagctggactatttaattcgagtccttcctgaataccgtagctctaacagtcccgaatgggcaaaagt

SEQ ID NO: 322501 - DNA, 75 bp, synthetic construct
  source 1..75: mol_type = other DNA
cattaacgggaatacctactgcgcctaccgctgcacagggtacgaataacacgcagattgctacgaccgcttatg

SEQ ID NO: 322502 - DNA, 75 bp, synthetic construct
  source 1..75: mol_type = other DNA
aaatgccctggcaggtaagcagcctctcgacgcaaccttaaccgcgctcgctggcctggcgacgggggcaaataa

SEQ ID NO: 322503 - DNA, 75 bp, synthetic construct
  source 1..75: mol_type = other DNA
ttgccagcgaggataaaaaccagcaccaatcacttgatgacattttgaatagtaaccctgctctgcatgtggata

SEQ ID NO: 322504 - DNA, 75 bp, synthetic construct
  source 1..75: mol_type = other DNA
gcccaaaagatattttgctctggaaaaatatgcatagtactggaaaagctaaccttttctactttggggttttag

SEQ ID NO: 322505 - DNA, 75 bp, synthetic construct
  source 1..75: mol_type = other DNA
gttatgatctattattctatttttttaatgtttaattttaaagtgtttaaagatgattattatcacagtcgtaaa

SEQ ID NO: 322506 - DNA, 75 bp, synthetic construct
  source 1..75: mol_type = other DNA
ttgccagcggtcaaactcattcaaaaatcagccttggggatattttcaaagacagctatggctatcgggtaaaga

SEQ ID NO: 322507 - DNA, 75 bp, synthetic construct
  source 1..75: mol_type = other DNA
agtgccggtaagagtacgctttatgccggtgattacttccagacgggatcatcaacaacgggatatgtgatacct

SEQ ID NO: 322508 - DNA, 75 bp, synthetic construct
  source 1..75: mol_type = other DNA
acttctccaacaagattgtctcttattccataaatgataacaccaatagctatgtaaacagcggaaaggcccggt

SEQ ID NO: 322509 - DNA, 75 bp, synthetic construct
  source 1..75: mol_type = other DNA
agattggtcgccgtacctcaatgttatgtttcggttctctggcaaccatttttaccgttcctattctctcagcat

SEQ ID NO: 322510 - DNA, 75 bp, synthetic construct
  source 1..75: mol_type = other DNA
atcggcaaattttaagtaatgacaacatggttattgaggtcggaaatgtgccagagaaaatctccggcacagaag

SEQ ID NO: 322511 - DNA, 75 bp, synthetic construct
  source 1..75: mol_type = other DNA
cagcagagctacattgagagtgtgacgacggataccaccgccaatgtcggctcatccacctccctgaatgcggcc

SEQ ID NO: 322512 - DNA, 75 bp, synthetic construct
  source 1..75: mol_type = other DNA
tgaaggatgcgctaagtttgtctgtcagttcccctgagatgagtatttatgaggctgcctcggtggttcgggagc

SEQ ID NO: 322513 - DNA, 75 bp, synthetic construct
  source 1..75: mol_type = other DNA
cacaaccggcagcacacaacaaatccagggcgcgttacccccaccggatgcgagcggcatggttccccttgccgc

SEQ ID NO: 322514 - DNA, 75 bp, synthetic construct
  source 1..75: mol_type = other DNA
tcggcacaccgggattcttcggtcttggcggtgggatcaacagtgaaaacgacgacaccattctcgtggtgctga

SEQ ID NO: 322515 - DNA, 75 bp, synthetic construct
  source 1..75: mol_type = other DNA
cggtaccatgtcatcaaatggctcatcaggtgggacagcatcggatgccatttccggtgatgccagtaataccca

SEQ ID NO: 322516 - DNA, 75 bp, synthetic construct
  source 1..75: mol_type = other DNA
ggggatgtcagtgtggtgacccagaactctgccgtcaccaaaaacctgacgccggtgccaatgcagatcgccaat

SEQ ID NO: 322517 - DNA, 75 bp, synthetic construct
  source 1..75: mol_type = other DNA
ggtcttggcggtgggatcaacagtgaaaacgacgacaccattctcgtggtgctgatcacgcccaatatcatctga

SEQ ID NO: 322518 - DNA, 75 bp, synthetic construct
  source 1..75: mol_type = other DNA
tggaacaactggaaaatctgaaaaacgaaaaaccacaccagaagcttttgctggttttcccgggaaaaccgcaga

SEQ ID NO: 322519 - DNA, 75 bp, synthetic construct
  source 1..75: mol_type = other DNA
gaccaccaccgtggatatgaagtctgcgctgtatcaggatgtgaaaaatgcggtcacatcaatgctgaccccggg

SEQ ID NO: 322520 - DNA, 75 bp, synthetic construct
  source 1..75: mol_type = other DNA
aatggcatagatcgtaagctctcttatctctatgtccagaatggctggctcaggcggatcgctcacggcgtttac

SEQ ID NO: 322521 - DNA, 75 bp, synthetic construct
  source 1..75: mol_type = other DNA
tcgcctgcggcgttccttcgttaatctcgttcgaacatgccgatgctctgtttcaggggttgaatcttctcagcc

SEQ ID NO: 322522 - DNA, 75 bp, synthetic construct
  source 1..75: mol_type = other DNA
gctgctccagtcatggcttacccgcaacggcatagatcgtaagctctcttatctctatgtccagaatggctggct

SEQ ID NO: 322523 - DNA, 75 bp, synthetic construct
  source 1..75: mol_type = other DNA
ttgcatggattaaacctcattttcaacttgagggcttaagtatgtcattgcgtcttgttgctgatttaccgtcaa

SEQ ID NO: 322524 - DNA, 75 bp, synthetic construct
  source 1..75: mol_type = other DNA
atgctgacgaaatatgcccttgtggcagtcatagtgctgtgttttacggtcctgggatttacgcttctggtcggc

SEQ ID NO: 322525 - DNA, 75 bp, synthetic construct
  source 1..75: mol_type = other DNA
atgctgacgaaatatgcccttgtggcagtcatagtgctgtgtttaacggtgctgggatttacgcttctggtcggt

SEQ ID NO: 322526 - DNA, 75 bp, synthetic construct
  source 1..75: mol_type = other DNA
atgctgacgaaatatgcccttgtggcagtcatagtgctgtgtttaacggttctgggatttacgcttctggtcggg

SEQ ID NO: 322527 - DNA, 75 bp, synthetic construct
  source 1..75: mol_type = other DNA
tgctcaccatgcaccaccgcgccgcttagcgcgattctgctatatatcgcccaaagcggaaacatgtggctgggc

SEQ ID NO: 322528 - DNA, 75 bp, synthetic construct
  source 1..75: mol_type = other DNA
tcctgctactttgcagcacttccgtttttgccggattattcgacacgccaggacgctcacaatttgtcccggctg

SEQ ID NO: 322529 - DNA, 75 bp, synthetic construct
  source 1..75: mol_type = other DNA
ctgacgaaatatgcccttgtggcagtcatagtgctgtgtttgacggtactgggatttacgcttctggtcggagac

SEQ ID NO: 322530 - DNA, 75 bp, synthetic construct
  source 1..75: mol_type = other DNA
gctttcaacacctcacggtttccagcttgagatactgcccaaggttggtaaaaacctcacagcggctaatgcacg

SEQ ID NO: 322531 - DNA, 75 bp, synthetic construct
  source 1..75: mol_type = other DNA
atgcctaattggtgggaaataaaaaatagcacgggtgaagatgactctccggctgaacttttaatttacgggtat

SEQ ID NO: 322532 - DNA, 75 bp, synthetic construct
  source 1..75: mol_type = other DNA
gttcgcgtatctggtatctcaagtatcgcttcagtggtaaagagtcccgcgtcagtctgggcgcatatccgctga

SEQ ID NO: 322533 - DNA, 75 bp, synthetic construct
  source 1..75: mol_type = other DNA
actgggattcacgctgatggtaggcgactcgttgtgtgagttgagtatcagagaacgtggtatggagtttaaggc

SEQ ID NO: 322534 - DNA, 75 bp, synthetic construct
  source 1..75: mol_type = other DNA
agtagggatatagagagcgatctgaacagcttacgcattgagcgtggtatgactcattacagcgagccaatagct

SEQ ID NO: 322535 - DNA, 75 bp, synthetic construct
  source 1..75: mol_type = other DNA
tcctgtacaatgagccccaaactggatcggatggctgcttcagtatccgagaacagcaacgaacacgtgaagcgg

SEQ ID NO: 322536 - DNA, 75 bp, synthetic construct
  source 1..75: mol_type = other DNA
gcaaactcaggcgcatctcaactttacgcaaatcaaaacggtggatgaattaaatcaggcactcgccgaagccaa

SEQ ID NO: 322537 - DNA, 75 bp, synthetic construct
  source 1..75: mol_type = other DNA
ctggttcgtatcgtgcaattgcatggattaaacctcattttcagcttgagggattaagcatgtcattgcgtcttg

SEQ ID NO: 322538 - DNA, 75 bp, synthetic construct
  source 1..75: mol_type = other DNA
gatgttgttgaaattcctggcagtcctggttcatatcgtgcaattgcatggattaaacctcattttcagcttgag

SEQ ID NO: 322539 - DNA, 75 bp, synthetic construct
  source 1..75: mol_type = other DNA
gattttaaagctgcctcagatttcgatcagtcagtactatttaaaaatatttacgaaagcgagtatggaactttc

SEQ ID NO: 322540 - DNA, 75 bp, synthetic construct
  source 1..75: mol_type = other DNA
taatgaacaggctaatgctaatgcaaaattatccagccaacttcaatatatattagccacgtcacgattcgcaca

SEQ ID NO: 322541 - DNA, 75 bp, synthetic construct
  source 1..75: mol_type = other DNA
ttcaggcagacagatgatagtcgttatgttggactgactttgccacagtctctggggcgtatcccatatggtatg

SEQ ID NO: 322542 - DNA, 75 bp, synthetic construct
  source 1..75: mol_type = other DNA
aagctggttcattcaggtgtgactgaaaatgtaaaatacagtgttttgcattgtacaaaacaagagttacttaaa

SEQ ID NO: 322543 - DNA, 75 bp, synthetic construct
  source 1..75: mol_type = other DNA
aatgccggggttatgcttattaatatcagcgcatggaaaaaacataatataacacaaaaagctttagagatgatc

SEQ ID NO: 322544 - DNA, 75 bp, synthetic construct
  source 1..75: mol_type = other DNA
taatgggaggcaagggcgagacagtccactactggagaagttaaaaaatgcagcggaaaaaatacgaccccaatt

SEQ ID NO: 322545 - DNA, 75 bp, synthetic construct
  source 1..75: mol_type = other DNA
ttctatatcaacccaaataaggttgataccgatataacacaccatcagcctaatgggcgacaagggagagacagt

SEQ ID NO: 322546 - DNA, 75 bp, synthetic construct
  source 1..75: mol_type = other DNA
agagtccgcatggattgggctttataagttggttcaagctagcgtaactgataatgtaaaatacagtgtgttaca

SEQ ID NO: 322547 - DNA, 75 bp, synthetic construct
  source 1..75: mol_type = other DNA
atgcatggttactgtagctggggctttgaaatgacaaaccacgaagacaaagcactactggaacgactggaaaat

SEQ ID NO: 322548 - DNA, 75 bp, synthetic construct
  source 1..75: mol_type = other DNA
atcagtctatgctttttaaaagcatttatgaaagtgaatatggtacatttggcggtacaccattttcggtgtttg

SEQ ID NO: 322549 - DNA, 75 bp, synthetic construct
  source 1..75: mol_type = other DNA
tcttcgagtaaatgatttctgcatggaagagatagattattatcttgaacaaagcaatttacatttgatattaaa

SEQ ID NO: 322550 - DNA, 75 bp, synthetic construct
  source 1..75: mol_type = other DNA
agtccgcccgtttgagctgctgacggactatctcggtcagaacgagaacccctacaccgggcagcaatatgtgct

SEQ ID NO: 322551 - DNA, 75 bp, synthetic construct
  source 1..75: mol_type = other DNA
agaaggcggcaaccacgcattcacgggcttcgaagattatttcaacccgatcgtcgattttcttggtctgcacca

SEQ ID NO: 322552 - DNA, 75 bp, synthetic construct
  source 1..75: mol_type = other DNA
aagcctataagcgtaagaactattgatgaagacgatttcaaatatgctttaatttgtggtcaagggagaatagag

SEQ ID NO: 322553 - DNA, 75 bp, synthetic construct
  source 1..75: mol_type = other DNA
ggaaaattccagaagcagcaacaaaggcagcgccaggaaatgtttctggcgtttatttttatatggatggcaaat

SEQ ID NO: 322554 - DNA, 75 bp, synthetic construct
  source 1..75: mol_type = other DNA
cgaatataactattataagttctgatgaactcacgcaaaaaaatatcgatttgaatcagttgctttccttggtcg

SEQ ID NO: 322555 - DNA, 75 bp, synthetic construct
  source 1..75: mol_type = other DNA
ataatattccactcacgtatgccttaagtagatttatagattttttaattcatgatagaataggagaaagtcggt

SEQ ID NO: 322556 - DNA, 75 bp, synthetic construct
  source 1..75: mol_type = other DNA
cggcaaattgttattgcaacatgcccaacggttaatcaatgacatggaaagatcgcaatatgaactggctcgctt

SEQ ID NO: 322557 - DNA, 75 bp, synthetic construct
  source 1..75: mol_type = other DNA
tcacccaacccgcgctttcgaaatggttgtcacaactggaagatgagatcggactcacactttttgagcggcaca

SEQ ID NO: 322558 - DNA, 75 bp, synthetic construct
  source 1..75: mol_type = other DNA
ggacttctgggagcaactgaagccgggctacgactactttgaacagactcgtaagccaccgaccgtttctgtggt

SEQ ID NO: 322559 - DNA, 75 bp, synthetic construct
  source 1..75: mol_type = other DNA
aaagaagcaatagaacagtttgtaaaagaaagatatataatggttagcaggcaaacaggaggtgcaacggcaaat

SEQ ID NO: 322560 - DNA, 75 bp, synthetic construct
  source 1..75: mol_type = other DNA
ggcgctgggtgaacagggtaatctgacccatgtcgcacggatgatgaatatcacccaacccgcgctttcgaaatg

SEQ ID NO: 322561 - DNA, 75 bp, synthetic construct
  source 1..75: mol_type = other DNA
atgagcagcaacacatttactcttgggacaaaaaacgttaaccgtcttggttatggcgcgatgcagctggcaggg

SEQ ID NO: 322562 - DNA, 75 bp, synthetic construct
  source 1..75: mol_type = other DNA
cttccgtgaatgttattggtgctgattcattgaatgatgcaatgaatatgatggcagattatggatttacccgta

SEQ ID NO: 322563 - DNA, 75 bp, synthetic construct
  source 1..75: mol_type = other DNA
acatttatgaaacagaaaatctcagcgatcaaaaattactgcatattgattgccgtagtacaaatgaaatcaaga

SEQ ID NO: 322564 - DNA, 75 bp, synthetic construct
  source 1..75: mol_type = other DNA
atggtccgcacgtcaccaatcagattatccgcgaagcgctttatccatactctgacgacctgacaattgtcacta

SEQ ID NO: 322565 - DNA, 75 bp, synthetic construct
  source 1..75: mol_type = other DNA
taactttggtacgccagaatacaacgaaccgggaagcggcggctttgttggagatacgctgctggtcaacggtgt

SEQ ID NO: 322566 - DNA, 75 bp, synthetic construct
  source 1..75: mol_type = other DNA
ccgcgattatgaaggcgttgactgctctgcaaaaccgcagctgccgatgatcgccatcaacaccacggcgggtac

SEQ ID NO: 322567 - DNA, 75 bp, synthetic construct
  source 1..75: mol_type = other DNA
cgtgactccgctgctttctgtcaatgactcctcgctgatgatcggtatgccgaagtcactgaccgctgcaacggg

SEQ ID NO: 322568 - DNA, 75 bp, synthetic construct
  source 1..75: mol_type = other DNA
ttatgaggcggcgttgaaagcgaataataaggtctatgaggcgtatatttatccgggggttaatcacggattcca

SEQ ID NO: 322569 - DNA, 75 bp, synthetic construct
  source 1..75: mol_type = other DNA
ccataatgattccacgccccgttatgacaaatctgccgccgatcttgcctggcaaaggacgctgaaatggttcga

SEQ ID NO: 322570 - DNA, 75 bp, synthetic construct
  source 1..75: mol_type = other DNA
cccgctgaactgaaaaaggcggtgcatgacaacctgcgaaatctggggcttgatgtgctggatgtggttaacctg

SEQ ID NO: 322571 - DNA, 75 bp, synthetic construct
  source 1..75: mol_type = other DNA
cagtggatgtactcgaagttgaacacattattatctgtggccactacggttgcggcggcgtacaagccgcagttg

SEQ ID NO: 322572 - DNA, 75 bp, synthetic construct
  source 1..75: mol_type = other DNA
atgacggcattagcgttgtttgatttgctcaagccaaattatgcgctggcgactcaggtagagtttaccgacccg

SEQ ID NO: 322573 - DNA, 75 bp, synthetic construct
  source 1..75: mol_type = other DNA
atccgggggttaatcacggattccataatgattccacgccccgttatgacaaatctgccgccgatcttgcctggc

SEQ ID NO: 322574 - DNA, 75 bp, synthetic construct
  source 1..75: mol_type = other DNA
tctttacgtctggcgcaacgctatgccagtcaggggcaactggtgatcctgaacctgccgaagatagaacagaaa

SEQ ID NO: 322575 - DNA, 75 bp, synthetic construct
  source 1..75: mol_type = other DNA
gtagtcttgatgaactgaaagtgagtttggctgggctggaagaagaactggccgaagtaccaaaagtggattcga

SEQ ID NO: 322576 - DNA, 75 bp, synthetic construct
  source 1..75: mol_type = other DNA
atggaaggtaagttaattttttgttccgatgcaatactacggtttcagtccgattacgatgaaaccgctgccgtt

SEQ ID NO: 322577 - DNA, 75 bp, synthetic construct
  source 1..75: mol_type = other DNA
acctttgaacttaattatgctcagatattccagcatctcgagtatacggctaaactctactcaaaaagccatgtt

SEQ ID NO: 322578 - DNA, 75 bp, synthetic construct
  source 1..75: mol_type = other DNA
aaaccgcctgaaaaaatttgttgaaggcgggcagttggggatcttccgcaatggctactggggcacccgcagtac

SEQ ID NO: 322579 - DNA, 75 bp, synthetic construct
  source 1..75: mol_type = other DNA
cgatcatctggtgcacttctatcagcttgccgggatggactggatcgatgtgttagatgcgctgaaagccgaccc

SEQ ID NO: 322580 - DNA, 75 bp, synthetic construct
  source 1..75: mol_type = other DNA
ccgcgaagaccgggtcacgctcaaattccaacccagacaagtggaatatgagtatgaaaccggccatgtctttgt

SEQ ID NO: 322581 - DNA, 75 bp, synthetic construct
  source 1..75: mol_type = other DNA
gcaaaagcacggtcactatcactacggagccagtgaggtaccgccgcccagcggactggggcgtcctcgctcact

SEQ ID NO: 322582 - DNA, 75 bp, synthetic construct
  source 1..75: mol_type = other DNA
aatcagctactgaaccgatattcccgaatacaggcactccgactcgacctgttctatcagaaaggtacagagcgc

SEQ ID NO: 322583 - DNA, 75 bp, synthetic construct
  source 1..75: mol_type = other DNA
gcttacctacactctcgcggtgaaaatattggtgcgttcggtaaccaggatctagttgaatacatcgacgtaggt

SEQ ID NO: 322584 - DNA, 75 bp, synthetic construct
  source 1..75: mol_type = other DNA
tcgaatctttttcgctgtttaatgttgaaacattcgagactttcaaggcaggtattgaagggaagaaggccactg

SEQ ID NO: 322585 - DNA, 75 bp, synthetic construct
  source 1..75: mol_type = other DNA
ttttagtttgtggttatcactataccaactgccatttgccgtcacgataccgtcaaagcaaagcgatcggttgga

SEQ ID NO: 322586 - DNA, 75 bp, synthetic construct
  source 1..75: mol_type = other DNA
actctgccgtcaccaaaaacctgacgccggtgccaatgcagatcgccaatcagcagagttacatcgagagtgtga

SEQ ID NO: 322587 - DNA, 75 bp, synthetic construct
  source 1..75: mol_type = other DNA
agcattattgccatgcccgaagtcagtcactagcgcaatttcgcttttagcaaaagctgaacggccattaattat

SEQ ID NO: 322588 - DNA, 75 bp, synthetic construct
  source 1..75: mol_type = other DNA
cattccctgacatggggcggaaaaatgccgaggttcagttacaggaagcaattgatcgtttgtgggacaggtcaa

SEQ ID NO: 322589 - DNA, 75 bp, synthetic construct
  source 1..75: mol_type = other DNA
tcttattccactattgcgttactggccagaggaaaatctggcgattcaggttaccgttgagtcgctgattcgccc

SEQ ID NO: 322590 - DNA, 75 bp, synthetic construct
  source 1..75: mol_type = other DNA
gcgaaaacagcaagcacggcatctggtataccgacctgccagccgcactggaattgatacaacgtcatcatctgc

SEQ ID NO: 322591 - DNA, 75 bp, synthetic construct
  source 1..75: mol_type = other DNA
gatgcccctccggttcagccgctggatacgggcgtgcagatggcgcgtaccgccgacagtcgctggccggagagc

SEQ ID NO: 322592 - DNA, 75 bp, synthetic construct
  source 1..75: mol_type = other DNA
acccgtcacagcctgagctgaactggaaactggtggagtcgctggcgctggcgatttttaaagccaacggagtgg

SEQ ID NO: 322593 - DNA, 75 bp, synthetic construct
  source 1..75: mol_type = other DNA
ccactgactgcgtatcccaggcgattttgcatttgcttacgaagatgccaactctacacctgaatatcgaagaga

SEQ ID NO: 322594 - DNA, 75 bp, synthetic construct
  source 1..75: mol_type = other DNA
attatctcaacacacgtaggccggataagatgcgccatgaactgaaccccaaaacctggacagtttcagttaacc

SEQ ID NO: 322595 - DNA, 75 bp, synthetic construct
  source 1..75: mol_type = other DNA
gagcgtgcaagtgagtatttacccgttccgtatgaccgacgccaatatgaagcgccataaatattccaactttaa

SEQ ID NO: 322596 - DNA, 75 bp, synthetic construct
  source 1..75: mol_type = other DNA
tacccaaaaaccagggatctgcctgacagtttctgcgccaggattcctcaatggtttgaccgcattggccaacgc

SEQ ID NO: 322597 - DNA, 75 bp, synthetic construct
  source 1..75: mol_type = other DNA
aaaccgttgtcgccgggccgctatgtgaatcgggggatgtttttacccagcaggagggggggaatgtcgaaaccc

SEQ ID NO: 322598 - DNA, 75 bp, synthetic construct
  source 1..75: mol_type = other DNA
gcgaaaacagcaagcacggtatctggtacaccgatctgcccgccgcactggacgtgatacaacgtcatcatctgc

SEQ ID NO: 322599 - DNA, 75 bp, synthetic construct
  source 1..75: mol_type = other DNA
ggtgggctatccattccttatcaacagggagaagaggcggtcgataccaaacattattatggcctgtggaacgcg

SEQ ID NO: 322600 - DNA, 75 bp, synthetic construct
  source 1..75: mol_type = other DNA
cacgatgccgcaggtgaaggagcagatgaaagcggcggggaaagatccggtgctgctggtgccgccgcagctgcg

SEQ ID NO: 322601 - DNA, 75 bp, synthetic construct
  source 1..75: mol_type = other DNA
accgaaaccagcgagcaacaggtcagttgggagactattccgctgatcgaacccatcagtttaagcctcggttac

SEQ ID NO: 322602 - DNA, 75 bp, synthetic construct
  source 1..75: mol_type = other DNA
ctgctggcaagcccgtcggtgctctacaccgccaccgggattatgtttgtgctggcggtggtgccgggaatgccg

SEQ ID NO: 322603 - DNA, 75 bp, synthetic construct
  source 1..75: mol_type = other DNA
actgaaaccagcgagcaacaggtcagttgggaaaccattccgctgatcgagcccatcagcttaagcctcggctac

SEQ ID NO: 322604 - DNA, 75 bp, synthetic construct
  source 1..75: mol_type = other DNA
ccagcgtgattgccacccatgtgaataagattgtgcgcagctatattcctgacctctttaactatgacgatatta

SEQ ID NO: 322605 - DNA, 75 bp, synthetic construct
  source 1..75: mol_type = other DNA
gcctggcgctgcggcgaagcattgcgaagcattacccatccgttcgttcgcaagcaggagctgacggtgtatacg

SEQ ID NO: 322606 - DNA, 75 bp, synthetic construct
  source 1..75: mol_type = other DNA
tatttccgaggtttctgcccgctttaccttagacgcgatgcccggtaaacagatggcgattgacgccgatcttaa

SEQ ID NO: 322607 - DNA, 75 bp, synthetic construct
  source 1..75: mol_type = other DNA
caacaagaagctactttccgatgattcattcactcagctaagtgaaggtgtaatcgtcttcaggctggatgatga

SEQ ID NO: 322608 - DNA, 75 bp, synthetic construct
  source 1..75: mol_type = other DNA
cagtgattatcttgccgccgcagaaatgatgggcatccgcggcaggcgtctgctggctggtcatattttgccatt

SEQ ID NO: 322609 - DNA, 75 bp, synthetic construct
  source 1..75: mol_type = other DNA
tggggaacgacccggcgtacgggatgccggtgacctggatccagcccgcgcagaaggcgaaggcgctgaatatgg

SEQ ID NO: 322610 - DNA, 75 bp, synthetic construct
  source 1..75: mol_type = other DNA
aacccgctcacccagcggattcgcggcgtgcggcaggtgatttctgacggcaacggcgtgctgctgccggagatc

SEQ ID NO: 322611 - DNA, 75 bp, synthetic construct
  source 1..75: mol_type = other DNA
aagcggcggaggcggaagagaaaagcctcgaaacgctaacccgtacgatgacagaaaccagcgagcaacaggtca

SEQ ID NO: 322612 - DNA, 75 bp, synthetic construct
  source 1..75: mol_type = other DNA
atggcgaaaacaactaaatcgttcctcgcgctgctgcgcggcggcaatctcggcgtgccgctggtgatcctgtgt

SEQ ID NO: 322613 - DNA, 75 bp, synthetic construct
  source 1..75: mol_type = other DNA
aagtggttactttgtgcaaggatggagataggtattggtatgtagataaaattataaaaagttacctttttgctg

SEQ ID NO: 322614 - DNA, 75 bp, synthetic construct
  source 1..75: mol_type = other DNA
aaaatattctgcatacgattcttcatggggcggccatgattaaacctgaaatggaagaggttttagttaaggttc

SEQ ID NO: 322615 - DNA, 75 bp, synthetic construct
  source 1..75: mol_type = other DNA
taaaccttctcgggagcagtgtttcttagcgactgcttttcagcgggctagtgagggccaattttttgtctcccc

SEQ ID NO: 322616 - DNA, 75 bp, synthetic construct
  source 1..75: mol_type = other DNA
gatgaagggattgagatattgttcaatccttatattgatcctaaactaaaggaatatagtgaggaagcaatcagg

SEQ ID NO: 322617 - DNA, 75 bp, synthetic construct
  source 1..75: mol_type = other DNA
gaacaaagcatctttgatttattggaagagaaacgtaagcacacagagaatattttatatgaaattcaaactaat

SEQ ID NO: 322618 - DNA, 75 bp, synthetic construct
  source 1..75: mol_type = other DNA
aaataagatcattttctataccaatcaagagtggggacagggaagaaagaacaacgttcttgaagacgagaaagt

SEQ ID NO: 322619 - DNA, 75 bp, synthetic construct
  source 1..75: mol_type = other DNA
atggatcgtgacgatatgcatgcttcgctcacgatgttctacaaagaaatgggctgggacccacagcttggttgc

SEQ ID NO: 322620 - DNA, 75 bp, synthetic construct
  source 1..75: mol_type = other DNA
aaacactatcaataagttggagtcattacctgcagcgtctggggctggaagatattgccgccgatctggcagcac

SEQ ID NO: 322621 - DNA, 75 bp, synthetic construct
  source 1..75: mol_type = other DNA
atggtagtcgctgaacgcatcacccatttttaccgtcagtgcggtgcatatggtggcacggtcattgaactggat

SEQ ID NO: 322622 - DNA, 75 bp, synthetic construct
  source 1..75: mol_type = other DNA
gctgatcttatagaaatgattgagaaaagcaaaaaggcttatccaggattaagtaaaatcattttctatactaat

SEQ ID NO: 322623 - DNA, 75 bp, synthetic construct
  source 1..75: mol_type = other DNA
ttgcaaagatgaaggagtacgggagagatgtcgtctcatcacttgttacccatccaaacgaaaccgaatcagaga

SEQ ID NO: 322624 - DNA, 75 bp, synthetic construct
  source 1..75: mol_type = other DNA
tagtgctcctaggtttgctactacatatgatctgcgtgattacccagatgaaagtgaaccgggaatgtgggatca

SEQ ID NO: 322625 - DNA, 75 bp, synthetic construct
  source 1..75: mol_type = other DNA
gtttacgccattcacccgccgcgttttgcgggttgataattatcctgttattgatgctaattgcgctcttcgcgc

SEQ ID NO: 322626 - DNA, 75 bp, synthetic construct
  source 1..75: mol_type = other DNA
ctgctgatgagcggctggacctttgcggtagcgatttttagtcagcgtattccgctggatattgtggcccgcgta

SEQ ID NO: 322627 - DNA, 75 bp, synthetic construct
  source 1..75: mol_type = other DNA
tttataccactctgattctttatgtcctgacattactaactgtcagctatgttggtgtctatttaacttatgtgg

SEQ ID NO: 322628 - DNA, 75 bp, synthetic construct
  source 1..75: mol_type = other DNA
cgtcgttgcggcgggtccctgcccgttgttgtgtccggtgccattcacctgtttaagcccctgtcgccgggggct

SEQ ID NO: 322629 - DNA, 75 bp, synthetic construct
  source 1..75: mol_type = other DNA
caccatgtttacctggctgatggtgccgtttgcgctgctgcttggtgtcggtcctctggtgcgctggggcgcgat

SEQ ID NO: 322630 - DNA, 75 bp, synthetic construct
  source 1..75: mol_type = other DNA
tgaagagctggaaaacggcgcgtgggctgtgcgtctttactacaaaccgtttgttcgctggatttgggcgggcgg

SEQ ID NO: 322631 - DNA, 75 bp, synthetic construct
  source 1..75: mol_type = other DNA
ttgccgaacttcccgattgaagggcgcgatcttaacccgctgttacaggatccggggctgatcttccatccgcct

SEQ ID NO: 322632 - DNA, 75 bp, synthetic construct
  source 1..75: mol_type = other DNA
atgtcggaaacaataggctccagtggttttggaatcagtattgccccccccctcactcttccggacaaaaaacag

SEQ ID NO: 322633 - DNA, 75 bp, synthetic construct
  source 1..75: mol_type = other DNA
aatgcctgcatgtgatggggtattgcccggagacaggccgtcccgttgaactgacgtaccggggcatgcgtgttc

SEQ ID NO: 322634 - DNA, 75 bp, synthetic construct
  source 1..75: mol_type = other DNA
gttgcacaacactgatgctacggatgatgttaaagcggttcgtgtgcggaaatgcctgcatgtgatggggtattg

SEQ ID NO: 322635 - DNA, 75 bp, synthetic construct
  source 1..75: mol_type = other DNA
gctactgctactgctactgctactgctactgctactgctactgttcttcttttttctgctgctctgattactgcc

SEQ ID NO: 322636 - DNA, 75 bp, synthetic construct
  source 1..75: mol_type = other DNA
atggatttttctcatatttcttcgtacctatcctctgattctcgaagtggctggcgtgaaaagctacttgaagca

SEQ ID NO: 322637 - DNA, 75 bp, synthetic construct
  source 1..75: mol_type = other DNA
ggcacttgacagcgtggcagccagcacagaacaggatgagacagcgcaaccacccacgcgggaaaatctcaccat

SEQ ID NO: 322638 - DNA, 75 bp, synthetic construct
  source 1..75: mol_type = other DNA
cggcgcgcggtatgtttatcctcgcctttatggtgctggtgattggcggttcgctgctgctgtttgccgcgcgtg

SEQ ID NO: 322639 - DNA, 75 bp, synthetic construct
  source 1..75: mol_type = other DNA
accaggggatccagctcgcgcaattagcagagggggcgtagtaatccttgtataccggagtgaagagaaaaatga

SEQ ID NO: 322640 - DNA, 75 bp, synthetic construct
  source 1..75: mol_type = other DNA
aggccttcgatatcgacagcatagagccaggagaaccaacccgcgttatccccgtaggtgatgtcgtgattttgg

SEQ ID NO: 322641 - DNA, 75 bp, synthetic construct
  source 1..75: mol_type = other DNA
cagaaggcaatgaatgcgttttttgagaccttcgatattgacagtatagaaccaggagagccagctcgcgtgatt

SEQ ID NO: 322642 - DNA, 75 bp, synthetic construct
  source 1..75: mol_type = other DNA
caacgctggaacacgctggttttgctgaatctgatctacctgaacttatcaactctcaccatgaattgctggaaa

SEQ ID NO: 322643 - DNA, 75 bp, synthetic construct
  source 1..75: mol_type = other DNA
gcgtcgtgatggcatttagtcggcctgccggggcgttggtgtgtctgcggggtgttttgtgcggtggtgagcgtg

SEQ ID NO: 322644 - DNA, 75 bp, synthetic construct
  source 1..75: mol_type = other DNA
agttagtcgcgcagtctgtcgcaggcaaaatcgtcgccctggaaaatatgattgataagaaagccatgagagaac

SEQ ID NO: 322645 - DNA, 75 bp, synthetic construct
  source 1..75: mol_type = other DNA
tgcagaagcggcgctgcgtatttcacgcggcacgaaaaccaccttcagctattgggggatggtggcggctcacct

SEQ ID NO: 322646 - DNA, 75 bp, synthetic construct
  source 1..75: mol_type = other DNA
acgcgagatggcaagccggaaacagtgctgtatgcagaaaaacgttattacaacactgccgggtcgatgatgacc

SEQ ID NO: 322647 - DNA, 75 bp, synthetic construct
  source 1..75: mol_type = other DNA
atgatgccggaaattggtaacgggctgctgtgcctggcgttagggattgcgctgctgctgtccgtgtatccgcta

SEQ ID NO: 322648 - DNA, 75 bp, synthetic construct
  source 1..75: mol_type = other DNA
cgacctgtatttatgtggtggattctggcggtgcgatgaacatgagcgatatccgtgaccgtttccgcgccctga

SEQ ID NO: 322649 - DNA, 75 bp, synthetic construct
  source 1..75: mol_type = other DNA
ctgacgtgaccctgcgcgacggtatgcacgctattcgtcatcaatattcgctggagaatgtgcgccagatagcca

SEQ ID NO: 322650 - DNA, 75 bp, synthetic construct
  source 1..75: mol_type = other DNA
ttataataccggtatataatgctgaaaaatacttaggcgcatgcattgacagtatattggaacaaacatataaaa

SEQ ID NO: 322651 - DNA, 75 bp, synthetic construct
  source 1..75: mol_type = other DNA
cacgcgtaaggacgttccatccctgcgtttgggcactgtatcaatctcccaggataccgcttcagttttccgtaa

SEQ ID NO: 322652 - DNA, 75 bp, synthetic construct
  source 1..75: mol_type = other DNA
accacgcaggttccttccactatgaaggtcatgatcctggactctggcgacccgaacgggccgttaagccgtgcg

SEQ ID NO: 322653 - DNA, 75 bp, synthetic construct
  source 1..75: mol_type = other DNA
gattagcgccaaagtcttccgttcgttcttcgataacccacaaatggcgttggcgaaagataacgagcaggacat

SEQ ID NO: 322654 - DNA, 75 bp, synthetic construct
  source 1..75: mol_type = other DNA
gacctcagatggcattagctggtaacgccggaatgaaaggactggatggactccagaaattactggcatttaatg

SEQ ID NO: 322655 - DNA, 75 bp, synthetic construct
  source 1..75: mol_type = other DNA
agatggcgaaaacgcctgttatccctgaacgggggcgttttgcccgtgcggctgcatttggcgggaatgccatga

SEQ ID NO: 322656 - DNA, 75 bp, synthetic construct
  source 1..75: mol_type = other DNA
tgccaagcattcgcgctgcggatatccgttccgacgaagatacgtcgaaaacaacggatactgcagcaacgcctg

SEQ ID NO: 322657 - DNA, 75 bp, synthetic construct
  source 1..75: mol_type = other DNA
gggttatgaggatgggagtgacaaaacggtaattgcagtaatgaaagctatcagagccgctggaattaaagagaa

SEQ ID NO: 322658 - DNA, 75 bp, synthetic construct
  source 1..75: mol_type = other DNA
gacggctctgccatgaatcaaatcattaatattgatattgagaatatgcaggccacggcgcaatgtggcgttccg

SEQ ID NO: 322659 - DNA, 75 bp, synthetic construct
  source 1..75: mol_type = other DNA
ccgccaccgaaggtgggctggaaaccgttgtggaaaactcggtggtgctcgacggctccgccatgaatcaaatca

SEQ ID NO: 322660 - DNA, 75 bp, synthetic construct
  source 1..75: mol_type = other DNA
tttatcgacagcagagaagcattagccaaagggtttactgttgattattccaatggcttcggtgatgcaatggat

SEQ ID NO: 322661 - DNA, 75 bp, synthetic construct
  source 1..75: mol_type = other DNA
gcgcgccgctgaatatcaccggtctaacggattatgctcaggagccgtattattcaacggcggtgggattgcttc

SEQ ID NO: 322662 - DNA, 75 bp, synthetic construct
  source 1..75: mol_type = other DNA
atatcattggtgtgggcagctgcccgtcacgtggtatggataaaggcggggttaacgacctcgaatctgtggtca

SEQ ID NO: 322663 - DNA, 75 bp, synthetic construct
  source 1..75: mol_type = other DNA
tgctcgatggtcaggtcgtggcggaagcggtgaataaatacaaccttcaggacggcaacagaggcacgggaggaa

SEQ ID NO: 322664 - DNA, 75 bp, synthetic construct
  source 1..75: mol_type = other DNA
caacaggctaatgcgaagccagaagaacaggttgacccgcgcaaagccgccgtcgaagccgctatcgcccgcgcc

SEQ ID NO: 322665 - DNA, 75 bp, synthetic construct
  source 1..75: mol_type = other DNA
ggaacagcaacaggctaatgcggaaccagaagaacaggtcgatccgcgcaaagctgccgtcgaagcggctattgc

SEQ ID NO: 322666 - DNA, 75 bp, synthetic construct
  source 1..75: mol_type = other DNA
caactgctgcatttctggaatgcggagattccgctcgcccagggcgccgctgtgccgctggtacgcgcaccgcgt

SEQ ID NO: 322667 - DNA, 75 bp, synthetic construct
  source 1..75: mol_type = other DNA
tgggtgaacgcaccaacgtcaccggttccgctaagttcaagcgcctgatcaaagaagagaaatacagcgaggcac

SEQ ID NO: 322668 - DNA, 75 bp, synthetic construct
  source 1..75: mol_type = other DNA
tgaccaggcagctttccggcaaacgtctgttcgttgtcgacgctttctgtggtgcgaacccggatactcgtcttt

SEQ ID NO: 322669 - DNA, 75 bp, synthetic construct
  source 1..75: mol_type = other DNA
aaaagataagtatatcgtccgtgacgataccactcgcgatactttctggtgggcagacaaaggcaaaggtaagaa

SEQ ID NO: 322670 - DNA, 75 bp, synthetic construct
  source 1..75: mol_type = other DNA
atttaaattccccggtattgccggtggcctgctttctttaggtggcactgttacggcactggccaccgcaaccag

SEQ ID NO: 322671 - DNA, 75 bp, synthetic construct
  source 1..75: mol_type = other DNA
attgatttacccggtacattgacccgagctatggaaaacggcattgatccgatagaggcattttcacgccttgct

SEQ ID NO: 322672 - DNA, 75 bp, synthetic construct
  source 1..75: mol_type = other DNA
tatggcggccaaagctaagcaaacatttggactgacagacaacgatcttccggccatgtttaatatggctattgc

SEQ ID NO: 322673 - DNA, 75 bp, synthetic construct
  source 1..75: mol_type = other DNA
gctattgcccgtgccaaagcacgcaagctggaacagcaacaggctaatgcggtaccagaagaacaggttgatccg

SEQ ID NO: 322674 - DNA, 75 bp, synthetic construct
  source 1..75: mol_type = other DNA
aactccttgaaggctttggtgtcggaaagctggttgcagaccgtcaggcgttgatggcgttgttagcctaccgta

SEQ ID NO: 322675 - DNA, 75 bp, synthetic construct
  source 1..75: mol_type = other DNA
caggaaagcgttaacagcacgaaaaaggccgcaaaagagatacagcgtgccgcccgtgcccgggaaacgctcggt

SEQ ID NO: 322676 - DNA, 75 bp, synthetic construct
  source 1..75: mol_type = other DNA
gaaaatgcgtgctgatctttatggctgaaggtaaccctcgcattgcgaaggcgacgggcgaagggattgcggaaa

SEQ ID NO: 322677 - DNA, 75 bp, synthetic construct
  source 1..75: mol_type = other DNA
gaatggcattgaatttactgccgcaggccggacaaaacctggtactggcaggggcgatcctgtcgattatgctca

SEQ ID NO: 322678 - DNA, 75 bp, synthetic construct
  source 1..75: mol_type = other DNA
atggaacagtatgttttttcaccgtcagagaatatgttctatcccctgtccctgcggccggtttatgaggcagca

SEQ ID NO: 322679 - DNA, 75 bp, synthetic construct
  source 1..75: mol_type = other DNA
ctttaccctggcgggtgccgatcacgccattattccggtcatgcttggtgatgcggtagtggcgcagaaatttgc

SEQ ID NO: 322680 - DNA, 75 bp, synthetic construct
  source 1..75: mol_type = other DNA
gtttgatccgttaattctgattcagcaaccgctggcagtgctggcgacgctggcgattattctgtttggtaaatc

SEQ ID NO: 322681 - DNA, 75 bp, synthetic construct
  source 1..75: mol_type = other DNA
tctgcccgcgcgaaaaatccggatattgagattatcgcccgcgcccattatgacgatgaagtggcgtatatcacc

SEQ ID NO: 322682 - DNA, 75 bp, synthetic construct
  source 1..75: mol_type = other DNA
ctggcgcatctggagtgcgcgaaatggttgattctgaccattcctaacggttacgaagctggcgagattgtggcc

SEQ ID NO: 322683 - DNA, 75 bp, synthetic construct
  source 1..75: mol_type = other DNA
catacccctgagcaaattacgcgtgcagtagaagcattcacgcgtattggtaaacaactgggcgttatcgcctga

SEQ ID NO: 322684 - DNA, 75 bp, synthetic construct
  source 1..75: mol_type = other DNA
tcgttccgacgaagaacagacgtcgaccacaacggatactctggcaacgcctgcacgcgtctccaccacgctggg

SEQ ID NO: 322685 - DNA, 75 bp, synthetic construct
  source 1..75: mol_type = other DNA
tatttaacgctaatatacctgcgaatgtttgttctatattgttattagaatattttgatcagctaagcacagaag

SEQ ID NO: 322686 - DNA, 75 bp, synthetic construct
  source 1..75: mol_type = other DNA
aagtggttgagtggctgcgccagcgttctcgtccgtacctgttctccaactcgctggcaccagcgattgtcgccg

SEQ ID NO: 322687 - DNA, 75 bp, synthetic construct
  source 1..75: mol_type = other DNA
agcgcgtgaatccggggcgcgccatgtgttaatcgccaccgatggtgtgttctctatggatggcgtaattgccaa

SEQ ID NO: 322688 - DNA, 75 bp, synthetic construct
  source 1..75: mol_type = other DNA
ccacgtcattaacttttgtgccaataactatctcgggttggcgaaccatcctgagctgattgcggcggcaaaggc

SEQ ID NO: 322689 - DNA, 75 bp, synthetic construct
  source 1..75: mol_type = other DNA
tgggtgagcgtgaaatcgcccgtactatgctggaactgcttgaaacgccaccggcgggtgaggtggtgacggggt

SEQ ID NO: 322690 - DNA, 75 bp, synthetic construct
  source 1..75: mol_type = other DNA
ttaccgtgacggcgatgattgtcagtatggcgttacttgcctgggcaatgaaatcgttaccggtggggacggctt

SEQ ID NO: 322691 - DNA, 75 bp, synthetic construct
  source 1..75: mol_type = other DNA
atgtcctggataatcttagttattgctggtctgctggaagtggtatgggcggttggcctgaaatatacgcacggc

SEQ ID NO: 322692 - DNA, 75 bp, synthetic construct
  source 1..75: mol_type = other DNA
ggcggtaaggtgattgccagcacacaaccggcacaaaccaccgtatatctggagcagccagaagccatcgattac

SEQ ID NO: 322693 - DNA, 75 bp, synthetic construct
  source 1..75: mol_type = other DNA
aaagagtttgcctgggtgatatggcaggcatcgcgctctgctattgaactggatatcgactggcccgaatcgaat

SEQ ID NO: 322694 - DNA, 75 bp, synthetic construct
  source 1..75: mol_type = other DNA
agctattgaactggatatcgactggcccgaatcgaatgacgacttttggaaagatggtgaagaaggtgcttatgc

SEQ ID NO: 322695 - DNA, 75 bp, synthetic construct
  source 1..75: mol_type = other DNA
ctggtttgctggaagtcgtctgggcggtaggcctgaaatacacccacggttttagtcgtctgacgccaagcgtaa

SEQ ID NO: 322696 - DNA, 75 bp, synthetic construct
  source 1..75: mol_type = other DNA
tgggtgagcgagaaattgcccgtacgatgctggagctgctggaaacgccaccggcgagtgaagtggtaacggggt

SEQ ID NO: 322697 - DNA, 75 bp, synthetic construct
  source 1..75: mol_type = other DNA
acccgcgtcgatgaattgcgtgaacgcggcattcgcgccgtattaggtaacgcagcgaacgaagagatcatgcac

SEQ ID NO: 322698 - DNA, 75 bp, synthetic construct
  source 1..75: mol_type = other DNA
tggtgatggtcctgacgctggtattgctaccagcagtagccggaatgatggaacaaggcgatgtgggctttgcta

SEQ ID NO: 322699 - DNA, 75 bp, synthetic construct
  source 1..75: mol_type = other DNA
aaggacgtttcgatacgtatccaaaacgtcgcggcatcacgcgcgttaaagagatgctggagtccggcattaacg

SEQ ID NO: 322700 - DNA, 75 bp, synthetic construct
  source 1..75: mol_type = other DNA
acgatgggagtgtgacaggctttgtgtgcggagaattgaacgccaaaaatgggctttggtgcatacgtgggctat

SEQ ID NO: 322701 - DNA, 75 bp, synthetic construct
  source 1..75: mol_type = other DNA
agggcgtaagcctgaaaaaaaatgaatacgatctctcgtccgttactatcggcctgggttgggatattaatgagg

SEQ ID NO: 322702 - DNA, 75 bp, synthetic construct
  source 1..75: mol_type = other DNA
atgttcgcaaaatgagatcgaccgtctgcgcggcattgcggaaacagctcagtgtggcgcaattctcggtatcgg

SEQ ID NO: 322703 - DNA, 75 bp, synthetic construct
  source 1..75: mol_type = other DNA
ttccggtagcgatcgcaccgactatcgcctctaccgatgcaccgtgcagcgcattgtctgttatctacaccgatg

SEQ ID NO: 322704 - DNA, 75 bp, synthetic construct
  source 1..75: mol_type = other DNA
gtgcaactggcccgggctctgttcccggggcgatacccttcagccccgacagtgactcagcctgtgaaaacagag

SEQ ID NO: 322705 - DNA, 75 bp, synthetic construct
  source 1..75: mol_type = other DNA
gatgcttgccgccgaacagcatgtagtgactccggcgctggagcgcgtgattgaagcgaacacctatttgagcgg

SEQ ID NO: 322706 - DNA, 75 bp, synthetic construct
  source 1..75: mol_type = other DNA
tggtttgaagcacgcgcctgttcccgtagcggcgctaccactatggcgggcggcaagtgcacccaggcggcgctg

SEQ ID NO: 322707 - DNA, 75 bp, synthetic construct
  source 1..75: mol_type = other DNA
aaagcactggcacatttcatgggtgttccggtagcgatcgcaccgactatcgcctctaccgacgcaccgtgcagc

SEQ ID NO: 322708 - DNA, 75 bp, synthetic construct
  source 1..75: mol_type = other DNA
ttaatattcggaaatatcgggatattcctgctgaaatgtcgtatgcgccgggagaacaaattaagggaggtcaag

SEQ ID NO: 322709 - DNA, 75 bp, synthetic construct
  source 1..75: mol_type = other DNA
tgtcgtttcgctgtgtcttaccttttctgtttctgttgtgttttttgtgggggcaattgtgggatggatttcggt

SEQ ID NO: 322710 - DNA, 75 bp, synthetic construct
  source 1..75: mol_type = other DNA
agctttttgccgaggctgattgtcacgctggtggtgctgggcgtgtgcggcaaatggatgattatccagttgcat

SEQ ID NO: 322711 - DNA, 75 bp, synthetic construct
  source 1..75: mol_type = other DNA
aaatgatacagaactggaaatcaaacaaattgaaagggagattgaacgtggttgtgataatgcaaaaaaatactt

SEQ ID NO: 322712 - DNA, 75 bp, synthetic construct
  source 1..75: mol_type = other DNA
ttaatatacggaaatatcgagatattcctgctgaaacgccgtatgcaccgggagaacacattaagggagggcaag

SEQ ID NO: 322713 - DNA, 75 bp, synthetic construct
  source 1..75: mol_type = other DNA
ttaatattcggaaatatcatgatattcctgctgaaacgccgtatgcaccgggagaacacattaagggagggcggc

SEQ ID NO: 322714 - DNA, 75 bp, synthetic construct
  source 1..75: mol_type = other DNA
tgcttcaaccgacgcaccttgtagcgctctttccgttatctacactgacgaaggtgaatttgaccgctatctgct

SEQ ID NO: 322715 - DNA, 75 bp, synthetic construct
  source 1..75: mol_type = other DNA
cgccgtgggtgcacgttttgatgaccgggtgactggcaaactgaacaccttcgcaccacacgccagcgttatcca

SEQ ID NO: 322716 - DNA, 75 bp, synthetic construct
  source 1..75: mol_type = other DNA
accaacctgataaccgggcttgcggacgcactgttagattccatccctgttgttgccatcaccggtcaagtgtcc

SEQ ID NO: 322717 - DNA, 75 bp, synthetic construct
  source 1..75: mol_type = other DNA
acgcgctgttagattccatccccgttgttgctatcaccggtcaggtatccgcaccgtttatcggcactgacgcat

SEQ ID NO: 322718 - DNA, 75 bp, synthetic construct
  source 1..75: mol_type = other DNA
gtgctaccggtaaaacgggcgtgtgtatcgccacttctggccctggcgcaaccaacctgatcaccggacttgcgg

SEQ ID NO: 322719 - DNA, 75 bp, synthetic construct
  source 1..75: mol_type = other DNA
gggcagcaccagatgtgggctgcgcagcacatcgcccacactcgcccggaaaatttcatcacttcaagcggatta

SEQ ID NO: 322720 - DNA, 75 bp, synthetic construct
  source 1..75: mol_type = other DNA
atgaatggcgcacagtgggtggtacatgctttgcgggcacagggtgtgaacaccgttttcggttatccaggtggc

SEQ ID NO: 322721 - DNA, 75 bp, synthetic construct
  source 1..75: mol_type = other DNA
tgaccagataaaagtgctgtgggctgacagtgacggactgtgcctcttcaccaaacgcctggagcggggccgctt

SEQ ID NO: 322722 - DNA, 75 bp, synthetic construct
  source 1..75: mol_type = other DNA
attgtcgataccaaaattgttgctggcgcacctgcacgtctgttagcggcgggtattggcgatgcgctggcaacc

SEQ ID NO: 322723 - DNA, 75 bp, synthetic construct
  source 1..75: mol_type = other DNA
agttttaaagatgccggaatagagatagaaattgcaccgtttggtggtgaatgttcgcaaaatgaaatcaatcgt

SEQ ID NO: 322724 - DNA, 75 bp, synthetic construct
  source 1..75: mol_type = other DNA
cggagccggataataaaatcccggcccccgcacaggaaccagagcagataaatacaccgtccgacagtctgtgtt

SEQ ID NO: 322725 - DNA, 75 bp, synthetic construct
  source 1..75: mol_type = other DNA
cggagccggataataaaatcccggcaccagtgcagatacctgaacagataaatacactgccagacagtctgtgct

SEQ ID NO: 322726 - DNA, 75 bp, synthetic construct
  source 1..75: mol_type = other DNA
ttgtgagctggttctgccggccggaagaggaatgctgcccggcctgtggtggcgaactcagttctctgggatgtg

SEQ ID NO: 322727 - DNA, 75 bp, synthetic construct
  source 1..75: mol_type = other DNA
ataaagcgccggctcgtgaaaaagcattgaaattgctggagcgcgtcgggctttccgcacatgccaataagtttc

SEQ ID NO: 322728 - DNA, 75 bp, synthetic construct
  source 1..75: mol_type = other DNA
aatccgcaaagcgcgggtaaccgacgtattgagattatggtgctgaccaaaagcgcgtccgatacgctgtatcaa

SEQ ID NO: 322729 - DNA, 75 bp, synthetic construct
  source 1..75: mol_type = other DNA
gccaccgagcttggcgagctggcaaccagtatcaccaccattgcccgtgatgcgcatatggaagcgaatctggag

SEQ ID NO: 322730 - DNA, 75 bp, synthetic construct
  source 1..75: mol_type = other DNA
cgaacgcggcagcgcgcagattatgccgttctttaaaacgctgctggtggagctcgcgccagtgttcgactcgct

SEQ ID NO: 322731 - DNA, 75 bp, synthetic construct
  source 1..75: mol_type = other DNA
cagcttgatagtaatttgacaagttctttagggcagcttgaaaggaagtttaataagacctttgacaagattgaa

SEQ ID NO: 322732 - DNA, 75 bp, synthetic construct
  source 1..75: mol_type = other DNA
ctgaaggcttttgagcaaatggcttctaagggcaagattcaggctgaagagcttcgtggacagttaggtgaccgt

SEQ ID NO: 322733 - DNA, 75 bp, synthetic construct
  source 1..75: mol_type = other DNA
ggcgatgatggcgctgtttatgacgctgtggattgtcaacagcgtcagtaaatccgagcgtgaaagcattatcgc

SEQ ID NO: 322734 - DNA, 75 bp, synthetic construct
  source 1..75: mol_type = other DNA
agaactggcgctttctggcctgcgtttgtttattgcagggggcacatgcggcctattacggttttagcgccattt

SEQ ID NO: 322735 - DNA, 75 bp, synthetic construct
  source 1..75: mol_type = other DNA
tcctttatccatgtagatgatgaatcacgcaaaaccgatattttcaaatctgtagtaaatgttattaaatcttga

SEQ ID NO: 322736 - DNA, 75 bp, synthetic construct
  source 1..75: mol_type = other DNA
aagtttctgatatcttcgataattttactggcatcagaattattttcgttgtgaagattgaggatagttattctt

SEQ ID NO: 322737 - DNA, 75 bp, synthetic construct
  source 1..75: mol_type = other DNA
agtgtttgtggggagaagctgccgcaggtgtataaggcgctgggtatggataaaccggcccccgtggcgaaagtg

SEQ ID NO: 322738 - DNA, 75 bp, synthetic construct
  source 1..75: mol_type = other DNA
aagtccacaccagaatggtgaaagaggttctgaaagcggtcgccagagccaataatcacccttatcagtccgtat

SEQ ID NO: 322739 - DNA, 75 bp, synthetic construct
  source 1..75: mol_type = other DNA
tggcgctcggttatttcacgtacttttttagctacggcatttttctacctttctggagcgtctggcttgagggga

SEQ ID NO: 322740 - DNA, 75 bp, synthetic construct
  source 1..75: mol_type = other DNA
cataacaatattcgcgccgagctgtggcgcaagctggccgtcaactgtgtgattaatccactgaccgccatctgg

SEQ ID NO: 322741 - DNA, 75 bp, synthetic construct
  source 1..75: mol_type = other DNA
gattgataaagctggtggatgggaaaagattattaactctactcagacgcagttaggccgcttaagtaattcatg

SEQ ID NO: 322742 - DNA, 75 bp, synthetic construct
  source 1..75: mol_type = other DNA
tactttaaagccacttagacagccaagacagccacgaattagcggcaacagagcaatcacagcggcttattcagc

SEQ ID NO: 322743 - DNA, 75 bp, synthetic construct
  source 1..75: mol_type = other DNA
cagttgcccgttgagcggatagcggctgaggtgggttttctctcacctgtgacctggcgtcagcattttaaatct

SEQ ID NO: 322744 - DNA, 75 bp, synthetic construct
  source 1..75: mol_type = other DNA
ttgagcgcgtcaggcaggaagtgggaatggtctttcagcatttcaatctcttccctcatctgaccgttttacaga

SEQ ID NO: 322745 - DNA, 75 bp, synthetic construct
  source 1..75: mol_type = other DNA
atggcaaaaaataatgcagtaatacacgtacataccccgtttgtgctcacgcttcccgacggttctcggcgcgag

SEQ ID NO: 322746 - DNA, 75 bp, synthetic construct
  source 1..75: mol_type = other DNA
ctaagaagattgaacagaatctaaataaaggtttcaggattaatacaaaacagcttgatagtaatctggcaagct

SEQ ID NO: 322747 - DNA, 75 bp, synthetic construct
  source 1..75: mol_type = other DNA
ctggtagtgttgaaggtggtaaagggaagttatctgtagctgatgcaattaccaaagtaatgattgtcggtatgg

SEQ ID NO: 322748 - DNA, 75 bp, synthetic construct
  source 1..75: mol_type = other DNA
ttgcagaaatacatcaaatctcagttttacgggctatctgctaaagctgggtcaatggataattcaaaattcaat

SEQ ID NO: 322749 - DNA, 75 bp, synthetic construct
  source 1..75: mol_type = other DNA
attaccagagtaatgattgtcggtatgacaactgatgtgattaatgccattgtcaaaccgttctatgaacgtcag

SEQ ID NO: 322750 - DNA, 75 bp, synthetic construct
  source 1..75: mol_type = other DNA
tgttaagtgcattaaagggacttgctggtattgtcgctgtaaggtctggtattggtgctgtaggtggtatctgga

SEQ ID NO: 322751 - DNA, 75 bp, synthetic construct
  source 1..75: mol_type = other DNA
cttatgttcgacggttcacaggaagggttaacagactttacaaggtcactgactaatttacttggttcattaggt

SEQ ID NO: 322752 - DNA, 75 bp, synthetic construct
  source 1..75: mol_type = other DNA
gccacttagacaaccaagacagccacgaattagcggcaacagagcaatcacagcggcttattcagcgaatatgac

SEQ ID NO: 322753 - DNA, 75 bp, synthetic construct
  source 1..75: mol_type = other DNA
gcttcttcaaccatgattgttaacggcaaaaatgttgcacttattggggacaaaatcagctgtccgataataggg

SEQ ID NO: 322754 - DNA, 75 bp, synthetic construct
  source 1..75: mol_type = other DNA
caaagcgcaggttcatgcgttactggaaaaatatcagctacgctacaccgttgactggtggctttccggacagcc

SEQ ID NO: 322755 - DNA, 75 bp, synthetic construct
  source 1..75: mol_type = other DNA
atgtaccggggcgagtccgagtgagttccgtgccggttgtgaagaaaaagtgaatgatgtagctgtcaggttgtc

SEQ ID NO: 322756 - DNA, 75 bp, synthetic construct
  source 1..75: mol_type = other DNA
tgcgccgcgtcaggggattatcgttaaccttgcagagctgcgcctttattattatccgccgggagaaaatatcgt

SEQ ID NO: 322757 - DNA, 75 bp, synthetic construct
  source 1..75: mol_type = other DNA
ataatactggtcctgtgcatataaacaaccagccaagaatgttaagagccagtgttattggtaagttaattgaaa

SEQ ID NO: 322758 - DNA, 75 bp, synthetic construct
  source 1..75: mol_type = other DNA
ctttcagctcactgtcgcgaggtggcgtatattacgctttcctctttcagagtcaaccctgaatttcaggatttt

SEQ ID NO: 322759 - DNA, 75 bp, synthetic construct
  source 1..75: mol_type = other DNA
ctgatggcgctcttcgctgctggcggtactatttatgggatggctgaagaatcactccccttctacacgttgctg

SEQ ID NO: 322760 - DNA, 75 bp, synthetic construct
  source 1..75: mol_type = other DNA
ctgggttatgcgttatgcccgcaaagttcgcaacagtccggaaagctctatcgtggcggataagatggctgaaaa

SEQ ID NO: 322761 - DNA, 75 bp, synthetic construct
  source 1..75: mol_type = other DNA
tgctatggtattccggttgtgaaaggtccggtgcttggtttgccgctggtcgaggaaaaatgtctggcgtggatg

SEQ ID NO: 322762 - DNA, 75 bp, synthetic construct
  source 1..75: mol_type = other DNA
atgtactggggccagcccaagcgagttccgtgctggttgtgaagaaaaagtgaatgatgtagctgtcaggttgtc

SEQ ID NO: 322763 - DNA, 75 bp, synthetic construct
  source 1..75: mol_type = other DNA
gataatcgggtacgcgaggcttgtcagtacatcagcgatcacctggcagacagcaattttgatatcgccagcgtc

SEQ ID NO: 322764 - DNA, 75 bp, synthetic construct
  source 1..75: mol_type = other DNA
tctgagatgggtagcaccgctactgctgattctcacgatgttgaatatgattgtgctgagtatcgccgcgatgat

SEQ ID NO: 322765 - DNA, 75 bp, synthetic construct
  source 1..75: mol_type = other DNA
tgcgcaaagaccgtctggacaacaacgatatgatcgaccagctggaagcgcgcattcgtgcgaaagccagtcagc

SEQ ID NO: 322766 - DNA, 75 bp, synthetic construct
  source 1..75: mol_type = other DNA
cgggtatatcgctaccggataagtaacaggcaacaacatgcggcagtgttatctgaatctcagttcagtgcgccg

SEQ ID NO: 322767 - DNA, 75 bp, synthetic construct
  source 1..75: mol_type = other DNA
ctgacgtcccgtggcatgcgtgtcctggtgccgtcatcactggcaacagccatgatacagcacggaacggctgat

SEQ ID NO: 322768 - DNA, 75 bp, synthetic construct
  source 1..75: mol_type = other DNA
cctggctggcagggattattggctgcttgatgggcgactggatttctttctggctgggttggcgttttaaaaagc

SEQ ID NO: 322769 - DNA, 75 bp, synthetic construct
  source 1..75: mol_type = other DNA
cccggagacaggccgtcccgttgaactgacgtaccggggcatgcgtgttatggtgccatcaccactggcgacagc

SEQ ID NO: 322770 - DNA, 75 bp, synthetic construct
  source 1..75: mol_type = other DNA
atgagaaagaaaaaccaacgaaataaatggcggacacctctgggtatgatcgcattgctgtgcggtctggccggt

SEQ ID NO: 322771 - DNA, 75 bp, synthetic construct
  source 1..75: mol_type = other DNA
atgggtatggtcgcattgctgtgcggtctggctggtaacgtacaggccgtaccggtggcacagaaacctgtacag

SEQ ID NO: 322772 - DNA, 75 bp, synthetic construct
  source 1..75: mol_type = other DNA
ccacgttacacaaactgccggacctggtggagatcctgccggaagcccgtaagttcggtggctgttatgtgtttg

SEQ ID NO: 322773 - DNA, 75 bp, synthetic construct
  source 1..75: mol_type = other DNA
tagaagatattgaatctgatgttcgctatgtaggggatggcttggtcgaactcgcacaacgcttaggcgctgcta

SEQ ID NO: 322774 - DNA, 75 bp, synthetic construct
  source 1..75: mol_type = other DNA
ctggaacgtgtcggcgctgatatcgtgcgtgtgtccgtaccgacgatggacgcggcagaagcgttcaaacttatc

SEQ ID NO: 322775 - DNA, 75 bp, synthetic construct
  source 1..75: mol_type = other DNA
gtcgctggcaatttgatgatgataaactcaacacccttcaccatttaggcgctggcactttcgttaccagcggta

SEQ ID NO: 322776 - DNA, 75 bp, synthetic construct
  source 1..75: mol_type = other DNA
ctgcgcaagaaaaatacgatactctatttggcgaagttgtgtcggcagcggcagacgcgcgggtatttgtcgaag

SEQ ID NO: 322777 - DNA, 75 bp, synthetic construct
  source 1..75: mol_type = other DNA
gcggtgttgacgatgaaacaggtgagcctgttgagcatgttgatgctggcagagtaattctgatgcccccctcag

SEQ ID NO: 322778 - DNA, 75 bp, synthetic construct
  source 1..75: mol_type = other DNA
tgctacggcattccagtagtgaaaggtccggtacttggtttgcctctggtcgaggaaaaatgtctggcgtggatg

SEQ ID NO: 322779 - DNA, 75 bp, synthetic construct
  source 1..75: mol_type = other DNA
ccgcaggacggcagctatgccgatgttcaccatgcgctgatcgacgaagggtatacggattgggcagatagtctg

SEQ ID NO: 322780 - DNA, 75 bp, synthetic construct
  source 1..75: mol_type = other DNA
attgaaggtgaaaacaatattcgaaccggagtccgctatcgtcttaatgaacagcatcagtttgttgagtgctga

SEQ ID NO: 322781 - DNA, 75 bp, synthetic construct
  source 1..75: mol_type = other DNA
cggatgaaaaatgtttatggactggtcagttttggtgaatatcctgctgaagttcctctgagtgtcataaatgaa

SEQ ID NO: 322782 - DNA, 75 bp, synthetic construct
  source 1..75: mol_type = other DNA
caccgtgatgccctgtttcggcgcccgtctggtgcaggaaggcaatcagttgcattaccttgccgaccgtgccgg

SEQ ID NO: 322783 - DNA, 75 bp, synthetic construct
  source 1..75: mol_type = other DNA
cggcgcagctttccggcggtcagcagcagcgtgtggcgatcgctcgcgcattgtgcatggatcctattgccatgc

SEQ ID NO: 322784 - DNA, 75 bp, synthetic construct
  source 1..75: mol_type = other DNA
ttgtgtatggatcctattgcgatgctgttcgacgaaccgacatcggcgctggatccggagatgatcaacgaagta

SEQ ID NO: 322785 - DNA, 75 bp, synthetic construct
  source 1..75: mol_type = other DNA
ggaagaggaagatataaatactgatctaacccatcccaaacccttcccttccggaagggagtttcgggattttgt

SEQ ID NO: 322786 - DNA, 75 bp, synthetic construct
  source 1..75: mol_type = other DNA
aagatatccagttagccagcggcgatctggaaccgtggttcaccaccgttgaaaacgaagtgacttttccacatg

SEQ ID NO: 322787 - DNA, 75 bp, synthetic construct
  source 1..75: mol_type = other DNA
tatggatatcgacccggcagaaatgaacaagctgcgtcaggcgcatgtggcattacaaggcgatttaaacacgct

SEQ ID NO: 322788 - DNA, 75 bp, synthetic construct
  source 1..75: mol_type = other DNA
cagagcggtatcgcttactacaatccagttatacgcactttctataagaggcgtgactgtagtgcatacagggga

SEQ ID NO: 322789 - DNA, 75 bp, synthetic construct
  source 1..75: mol_type = other DNA
agaaatcactgctcaaaatcggtgctgttgaaaccgggatatgtgtcttgcggcgcagtgatatcgcaaggcaca

SEQ ID NO: 322790 - DNA, 75 bp, synthetic construct
  source 1..75: mol_type = other DNA
aagcgttaccagaggaagaggaagaggaagatataaatactgatctaacccatcccaaacccttcccttccggaa

SEQ ID NO: 322791 - DNA, 75 bp, synthetic construct
  source 1..75: mol_type = other DNA
tctattgccatgtatttccgttttgtaattgcagattactttattgatcaacaagataagatcctttacctggat

SEQ ID NO: 322792 - DNA, 75 bp, synthetic construct
  source 1..75: mol_type = other DNA
cgaggaaaaatgtctggcgtggatggagtgtcgcctgctacctgcaacttccgcgcaagaaaaatacgatacgct

SEQ ID NO: 322793 - DNA, 75 bp, synthetic construct
  source 1..75: mol_type = other DNA
atcaccttgcgtgtggtggtgcttgtcatcggctggataatctgcgtgacatgggtgatgcgctatgcccggaaa

SEQ ID NO: 322794 - DNA, 75 bp, synthetic construct
  source 1..75: mol_type = other DNA
gatgtattggctggaagtggtgctgtcgtttcttgtgccttcttcgtccggtctggccgttctgacgatgccgat

SEQ ID NO: 322795 - DNA, 75 bp, synthetic construct
  source 1..75: mol_type = other DNA
acaaactcgataactgcgttgtcgccctggaagatattcagcaaggcgatcgcgtccactatgacggtggtgaat

SEQ ID NO: 322796 - DNA, 75 bp, synthetic construct
  source 1..75: mol_type = other DNA
gtgagccgattcatccccgtcgaattacaccatgccagccgtctgttaaaccacggccccacagttttgataaca

SEQ ID NO: 322797 - DNA, 75 bp, synthetic construct
  source 1..75: mol_type = other DNA
agcatcgccggattgatggcgttgtctgtaattactatcggctgcgcattattgattggattgctgcaaaagagc

SEQ ID NO: 322798 - DNA, 75 bp, synthetic construct
  source 1..75: mol_type = other DNA
ccgatgaccatccgatagtactgttcggtattcgcaaatcacttgagcaaattgagtgggtgaatgttgtcggcg

SEQ ID NO: 322799 - DNA, 75 bp, synthetic construct
  source 1..75: mol_type = other DNA
aacaaggcgcaccgaccgatttgccgaaggctctcgccgcgctgcagaaagggaagaaatttaccccggaaagcg

SEQ ID NO: 322800 - DNA, 75 bp, synthetic construct
  source 1..75: mol_type = other DNA
ctgggtgtcgagaacgatattgctctgctgaattatctctcttctgtgacgttaagtccggcagataaagactaa

SEQ ID NO: 322801 - DNA, 75 bp, synthetic construct
  source 1..75: mol_type = other DNA
gcactgattatcggtatcgcgcgcggtatcgtagtgatcatggataaaggtatgattacccatactattttgcac

SEQ ID NO: 322802 - DNA, 75 bp, synthetic construct
  source 1..75: mol_type = other DNA
gaaatctgcgatgatgaagctgggtgtcgagaacgatatcgccctgctgaattatctctcttcagtgaccttaag

SEQ ID NO: 322803 - DNA, 75 bp, synthetic construct
  source 1..75: mol_type = other DNA
agcggcgagttaagtttctggcacgcctggctggcagggatcgtcggttgcctgctgggcgactggatctccttc

SEQ ID NO: 322804 - DNA, 75 bp, synthetic construct
  source 1..75: mol_type = other DNA
atccgatgacattctggggtcgatcgaatcaggtgttgatattgaacgacgtattcatgagatataccagcactg

SEQ ID NO: 322805 - DNA, 75 bp, synthetic construct
  source 1..75: mol_type = other DNA
cacggattagcaatgataagcgcctcgtgttatcagtggttgtctttaccctttctaatctccttgtatcctcag

SEQ ID NO: 322806 - DNA, 75 bp, synthetic construct
  source 1..75: mol_type = other DNA
catggatgggcgtaaccagaccagctcaaccgaaaacgccggaggaggtgattacccgctggcaggggaaatcaa

SEQ ID NO: 322807 - DNA, 75 bp, synthetic construct
  source 1..75: mol_type = other DNA
aattgttgctggcaaaagtcagtatcggaaatcaggagcaacaacgagagaaactattgaccgccgccgtcacgg

SEQ ID NO: 322808 - DNA, 75 bp, synthetic construct
  source 1..75: mol_type = other DNA
tcgaatcaggcgtcgatattgaacgacgtattcatgagatataccagcactgccgttccgatgagcaaatagaac

SEQ ID NO: 322809 - DNA, 75 bp, synthetic construct
  source 1..75: mol_type = other DNA
agcgatggagctaaaacagccaaaaaaatcagtggtgcactgtccggtaggaagaaaatactgctttccgccacg

SEQ ID NO: 322810 - DNA, 75 bp, synthetic construct
  source 1..75: mol_type = other DNA
gcggcggctctgggctttatctcagccattggcgcagtgggcggcttttttattccgcaggcgtttggcatgtcg

SEQ ID NO: 322811 - DNA, 75 bp, synthetic construct
  source 1..75: mol_type = other DNA
atggcactgcaaaatgagaaaactagtcgttatcttttgcgcgactggaaaccagaaaatccggccttctgggaa

SEQ ID NO: 322812 - DNA, 75 bp, synthetic construct
  source 1..75: mol_type = other DNA
acttgcctaccttcgcatgacaccaatattgcgattgccagcgcttgcgccatcgctgcggcgacatcacaagct

SEQ ID NO: 322813 - DNA, 75 bp, synthetic construct
  source 1..75: mol_type = other DNA
atgaatttacctgtcgcggcatgttcagcgaccagcgccggacagaaatatcgcttttactcaattattatgaaa

SEQ ID NO: 322814 - DNA, 75 bp, synthetic construct
  source 1..75: mol_type = other DNA
cagtgaccagcgtcggacagaaatatcgctttttctcaattattatgaaaattaatcttccgttcataaactggt

SEQ ID NO: 322815 - DNA, 75 bp, synthetic construct
  source 1..75: mol_type = other DNA
cgccgatcaattgcctgtattacaacgtctgcatctctggctgctcagtcttctctatctcgccaccttcggttc

SEQ ID NO: 322816 - DNA, 75 bp, synthetic construct
  source 1..75: mol_type = other DNA
ttatctagtggcgttatcctagccgatgaggtcgggctggggaaaaccattgaggccagcctgattttggcgcaa

SEQ ID NO: 322817 - DNA, 75 bp, synthetic construct
  source 1..75: mol_type = other DNA
tcaggaaggttttcagctgaagtacacggacgaggacaaggcatccacgccggcgcgtcaggcgaaagcggtggt

SEQ ID NO: 322818 - DNA, 75 bp, synthetic construct
  source 1..75: mol_type = other DNA
tcctgccataaaaacgggcatgtgattgatatgccttttaaaggccatgtttcttttaaagggaagaacggtatc

SEQ ID NO: 322819 - DNA, 75 bp, synthetic construct
  source 1..75: mol_type = other DNA
attgtggttactggccgcgcaatgcgccaataatactggtaaggcaacaagtggcaacaatcagcaaaaaaaccg

SEQ ID NO: 322820 - DNA, 75 bp, synthetic construct
  source 1..75: mol_type = other DNA
atgacaacgaactatatttttgtgaccggcggggtcgtatcctctctgggtaaaggtattgccgcagcctccctc

SEQ ID NO: 322821 - DNA, 75 bp, synthetic construct
  source 1..75: mol_type = other DNA
tgctggtggtgaatatgttcctcaccggcttcgacagcccggcgctgaacacgctgtacgtcgataaaaacctcc

SEQ ID NO: 322822 - DNA, 75 bp, synthetic construct
  source 1..75: mol_type = other DNA
aacagcgcgctgggtggtggggcatcgcaggtcggtaaaacgctgagtgattattacatcaagcgggcagagcag

SEQ ID NO: 322823 - DNA, 75 bp, synthetic construct
  source 1..75: mol_type = other DNA
acatcgcccctgctctttgccgttggtctcggcgtctttggggcaagttttggttctgcggaagtggcgataaac

SEQ ID NO: 322824 - DNA, 75 bp, synthetic construct
  source 1..75: mol_type = other DNA
cattggggatgaccgttggacgcttcaccggtggctggttcatcgaccgttacagccgcgttgccgtagtacgtg

SEQ ID NO: 322825 - DNA, 75 bp, synthetic construct
  source 1..75: mol_type = other DNA
gttgggtattgggctgattatttttgtcgatagcgcctgggtcgcaggggtgtctgttgtactttggggactggg

SEQ ID NO: 322826 - DNA, 75 bp, synthetic construct
  source 1..75: mol_type = other DNA
tatctcctttattatctcaaactttttatattggatgagttatgcttccttatttgtgtcgggggggagttgtct

SEQ ID NO: 322827 - DNA, 75 bp, synthetic construct
  source 1..75: mol_type = other DNA
cgcctgcatctctggctgctgagcctgctttatcttgccaccttcggttcgtttatcggtttttctgcgggtttt

SEQ ID NO: 322828 - DNA, 75 bp, synthetic construct
  source 1..75: mol_type = other DNA
atatcgccattcaggcaatccctgacggtacgggcaaaaatgctgccgatggcacccagcatggcgaaaaaggcg

SEQ ID NO: 322829 - DNA, 75 bp, synthetic construct
  source 1..75: mol_type = other DNA
tcttctcctaaaaccgcaaaacgttatatgtcaacgctattcaggacgggtcactttggtgtaaaaagcttccca

SEQ ID NO: 322830 - DNA, 75 bp, synthetic construct
  source 1..75: mol_type = other DNA
gttcggctaagcctgaagctaaagcctataaacttactgacggtgaaggcatggtgttgctggttcaccctaacg

SEQ ID NO: 322831 - DNA, 75 bp, synthetic construct
  source 1..75: mol_type = other DNA
tatgccgtacagaacgattatatcgactcaaacccagccagtgatatggctggtgctttatcgacaaccaaagca

SEQ ID NO: 322832 - DNA, 75 bp, synthetic construct
  source 1..75: mol_type = other DNA
caaggtttagttttaccgccgtttgtggagccgcatattcacctggacaccacgcaaaccgccgggcaaccgaac

SEQ ID NO: 322833 - DNA, 75 bp, synthetic construct
  source 1..75: mol_type = other DNA
tggctaacgaactggccaaaaatctcaaaacccctgaagatctcagtcagttcgatcgcctgctcaagaaatcag

SEQ ID NO: 322834 - DNA, 75 bp, synthetic construct
  source 1..75: mol_type = other DNA
tttttgatatctggtaccgcaatacctctgtagtgaaaccggtggccatcaccggggatatgcacagtgttaaca

SEQ ID NO: 322835 - DNA, 75 bp, synthetic construct
  source 1..75: mol_type = other DNA
cgattcctggtgagcgtgaacccttagaaggtgttaagcattctcagcgtggttcgaagatgcggacacctcatc

SEQ ID NO: 322836 - DNA, 75 bp, synthetic construct
  source 1..75: mol_type = other DNA
ttaatgaacatcgtgaagtggtactcgagcaaacggcgatggaaattgcgaccacattgaacacttctgatgcca

SEQ ID NO: 322837 - DNA, 75 bp, synthetic construct
  source 1..75: mol_type = other DNA
gggttaagagccgtcgccagctacattaatgaacatcgtgaagtggtactcgagcaaacggcgatggaaattgcg

SEQ ID NO: 322838 - DNA, 75 bp, synthetic construct
  source 1..75: mol_type = other DNA
aaacgcactctggaacagtggcttggtccagcccttagttccagcgaaaagatgtctacgacggtgagtaacttg

SEQ ID NO: 322839 - DNA, 75 bp, synthetic construct
  source 1..75: mol_type = other DNA
ggttccggtacgttattcggtacgtggcggcaaggtgattgccagtacacaaccggcacaaaccaccgtatatct

SEQ ID NO: 322840 - DNA, 75 bp, synthetic construct
  source 1..75: mol_type = other DNA
tggggctgcatgtttgtcagttgatgggctacgggcagattaacgacggcctgaatttaatcacccaccatagcg

SEQ ID NO: 322841 - DNA, 75 bp, synthetic construct
  source 1..75: mol_type = other DNA
atgggtttgatgcgctgcgccgtcaggttccggtacgttattcggtacgtggcggcaaggtgattgccagcacac

SEQ ID NO: 322842 - DNA, 75 bp, synthetic construct
  source 1..75: mol_type = other DNA
gtaacgaacaagcaggtattattggtgatgatggcgaagtgttcttatctgggctaaaagaaaaaggtatattga

SEQ ID NO: 322843 - DNA, 75 bp, synthetic construct
  source 1..75: mol_type = other DNA
ggtgcgctggcgcgttctgcaggtggtgcattatctgaccgtctgggcggaactcgtgtcacgctggtgaacttt

SEQ ID NO: 322844 - DNA, 75 bp, synthetic construct
  source 1..75: mol_type = other DNA
atgtatgccaggatccgcattaaccgtggcaaccttcccgccatcaaactgaacacaacgcgacggcgtgccggt

SEQ ID NO: 322845 - DNA, 75 bp, synthetic construct
  source 1..75: mol_type = other DNA
atgtgatgcagcgtactgaaggcaaaaatcgttaccccattgacgtggtgaaaatcccgatggacggaccgctga

SEQ ID NO: 322846 - DNA, 75 bp, synthetic construct
  source 1..75: mol_type = other DNA
ctcctttatggttcctatcttcggtggtcgtcgctggacggcgttcagcaccggtattctgattattccttgtgt

SEQ ID NO: 322847 - DNA, 75 bp, synthetic construct
  source 1..75: mol_type = other DNA
cgggcagggcggaagcttcatggcgttcttcgcggtcttcctggcgctgttcctgacagctgggctgggtagtgg

SEQ ID NO: 322848 - DNA, 75 bp, synthetic construct
  source 1..75: mol_type = other DNA
tccggcttatgcgtctgactgaagacgtaccagatgtgagacaggaatccatctcttatttgtgcgtaagcgtgc

SEQ ID NO: 322849 - DNA, 75 bp, synthetic construct
  source 1..75: mol_type = other DNA
atgaagctcaacgccagacaggtcgagactgcaaagccaaaagacaaaacctacaaaatggccgatggtggcggt

SEQ ID NO: 322850 - DNA, 75 bp, synthetic construct
  source 1..75: mol_type = other DNA
attaaaaaagttgatgccagtggtaagcatgacgttgcgcagcgtcttcagcagcgtgtcacggttattatgcgt

SEQ ID NO: 322851 - DNA, 75 bp, synthetic construct
  source 1..75: mol_type = other DNA
agaccgcaaagccaaaagacaagacatacaaaatggccgatggcggcggtttgtatcttgaggtttcggccaagg

SEQ ID NO: 322852 - DNA, 75 bp, synthetic construct
  source 1..75: mol_type = other DNA
tcagcctgatatccggaatcaatatatcgcgccaggtagtgcgaccacaaaggcgaatcttttgtgatctccttt

SEQ ID NO: 322853 - DNA, 75 bp, synthetic construct
  source 1..75: mol_type = other DNA
cgacattaccccgctttaccctcaagccgattccctgagtttcttgcacgtcttgctgcatatcgtggccgtgta

SEQ ID NO: 322854 - DNA, 75 bp, synthetic construct
  source 1..75: mol_type = other DNA
tgaattacgtttcgcgcgttgggatgagttcgacttcgataagtctctctggcgtatacctgcaaaacgagaaga

SEQ ID NO: 322855 - DNA, 75 bp, synthetic construct
  source 1..75: mol_type = other DNA
cgcaacctgaccatcgataacctcaccgttagccacgctaactacgccatcttacgccagggatttcataaccag

SEQ ID NO: 322856 - DNA, 75 bp, synthetic construct
  source 1..75: mol_type = other DNA
ctggagcttcacaacaagccgcaacacatttttatgcgtaatatcaaagtaatgcaagaatccactgcgggtccg

SEQ ID NO: 322857 - DNA, 75 bp, synthetic construct
  source 1..75: mol_type = other DNA
gcaccttcctgacggcaagctccgcgtttgccttcctccatactcctttcgcccgcgcacttcccgcccgacaaa

SEQ ID NO: 322858 - DNA, 75 bp, synthetic construct
  source 1..75: mol_type = other DNA
aagatgatgtcccttatatctttcttaacacacgcaagtcaggtgaacgcagccgttttgatgccgcacatgaat

SEQ ID NO: 322859 - DNA, 75 bp, synthetic construct
  source 1..75: mol_type = other DNA
gcggcaattggtgcaggtgctttaggggttatgcttagcgattattttaatgctcgctttactcttccttcgcct

SEQ ID NO: 322860 - DNA, 75 bp, synthetic construct
  source 1..75: mol_type = other DNA
atgaccggtatgacgaatgtaacaaaactggccagcgagccgtcaggccaggaatttctggtatttaccctcggt

SEQ ID NO: 322861 - DNA, 75 bp, synthetic construct
  source 1..75: mol_type = other DNA
taacacccaccttgcttataaattgcgcggcatccaaatctctgccgggaatgctgtctcctttgtggcgctgac

SEQ ID NO: 322862 - DNA, 75 bp, synthetic construct
  source 1..75: mol_type = other DNA
atccctcccggtaaaacgttacacatccttggaagcctgcgcggcaacggcagagggcgatttgtcttacaggac

SEQ ID NO: 322863 - DNA, 75 bp, synthetic construct
  source 1..75: mol_type = other DNA
ccgaagaacgaatgatcgctccgcagctgccggagtgcattctgcacgaactcaccgagcgcccgcacccgttcc

SEQ ID NO: 322864 - DNA, 75 bp, synthetic construct
  source 1..75: mol_type = other DNA
ccgtcagccacgctaattacgccattttacgccagggatttcataaccagattatcggtgccaacatcaccaatt

SEQ ID NO: 322865 - DNA, 75 bp, synthetic construct
  source 1..75: mol_type = other DNA
taccaacggcaaaatcaactggggcatcggcataggccttgcgggaagcacttacgataataattacccagaaga

SEQ ID NO: 322866 - DNA, 75 bp, synthetic construct
  source 1..75: mol_type = other DNA
gatgcaggaatcctctgttggacccgcattgagcatgaacttcgacatgcgcaaagacgttcgaggcgtgtttat

SEQ ID NO: 322867 - DNA, 75 bp, synthetic construct
  source 1..75: mol_type = other DNA
gaagaaagtaaacccgtaagttgtcttgcgcattatcaacaaagttcagaagcagaaaaaatagcgcaatctatt

SEQ ID NO: 322868 - DNA, 75 bp, synthetic construct
  source 1..75: mol_type = other DNA
tgaaaggcggtagtgatgagcaagctcagagagaagccgtcaccgaaacggcggcggctctgggctttatctcag

SEQ ID NO: 322869 - DNA, 75 bp, synthetic construct
  source 1..75: mol_type = other DNA
taatggcggattaggaaacttaggtgtaagtgtaatgcagctggttgcaccgctggtcatttttgtacccgtatt

SEQ ID NO: 322870 - DNA, 75 bp, synthetic construct
  source 1..75: mol_type = other DNA
caaaacaaggtagcgcattagggattaatggcggattaggcaatttaggcgtcagcgtgatgcaactggttgcgc

SEQ ID NO: 322871 - DNA, 75 bp, synthetic construct
  source 1..75: mol_type = other DNA
tgaaaccgacctggacctggggcactacgagcgtttcattcgtaccaaaatgagccgccgtaacaactttaccac

SEQ ID NO: 322872 - DNA, 75 bp, synthetic construct
  source 1..75: mol_type = other DNA
gtttacttctactccacgtgatggtcacccgctgtttgcaggctttgtgaaagccgccagcgagttccagaacgt

SEQ ID NO: 322873 - DNA, 75 bp, synthetic construct
  source 1..75: mol_type = other DNA
ggcgcgcgaaatccttgccagaaaaacggcacatgtaaaattccagccttggcaggataataagtggagcagggt

SEQ ID NO: 322874 - DNA, 75 bp, synthetic construct
  source 1..75: mol_type = other DNA
atggtgtttttaaatcgaaaaaatcaagagaagacataccagatgctttcattagcctcagtatcgaaaagttgc

SEQ ID NO: 322875 - DNA, 75 bp, synthetic construct
  source 1..75: mol_type = other DNA
gtgagcaaaacaacctgggcggatgcaccggcacgcgagtttgtgtttgtcgaaaacaactcagacgacaacttt

SEQ ID NO: 322876 - DNA, 75 bp, synthetic construct
  source 1..75: mol_type = other DNA
tcagacaccgtcgcgggagggatatgttggcagcggcgagtcggcactcgatttcggctatatcgtaaccaccag

SEQ ID NO: 322877 - DNA, 75 bp, synthetic construct
  source 1..75: mol_type = other DNA
taatgaggtctgtatggagtttcttttttctttatactctcttcacggtgttttttatactggtgttaaatggta

SEQ ID NO: 322878 - DNA, 75 bp, synthetic construct
  source 1..75: mol_type = other DNA
tggtggaattaagtcacttcgatttcttatacttttcaaacaaagcaaacacgagataaaccagctttctcatcc

SEQ ID NO: 322879 - DNA, 75 bp, synthetic construct
  source 1..75: mol_type = other DNA
tgactacattacgatagaacaactcaaaaagaagggggtgataaccccttttgcaaaatcacagataggttattt

SEQ ID NO: 322880 - DNA, 75 bp, synthetic construct
  source 1..75: mol_type = other DNA
ttttcgtcgcctgttaaaggccatgagcgagccgggcgtgattgtcgccctgcatcagctcaaacgcggctggca

SEQ ID NO: 322881 - DNA, 75 bp, synthetic construct
  source 1..75: mol_type = other DNA
caaggcatggggtgcaggcggagggggtaaggggacagacgtcgcagggactggtgcgcctagtggggcgggtgg

SEQ ID NO: 322882 - DNA, 75 bp, synthetic construct
  source 1..75: mol_type = other DNA
gaaaaccggttatctgccaatcaccaaagcggcgtatgacctgacccgtgagcagggcttttacgagaaaaaccc

SEQ ID NO: 322883 - DNA, 75 bp, synthetic construct
  source 1..75: mol_type = other DNA
ggtcgtggtcatcgctgtacggcggtaattgccgatgtacgcgacccggcgtcagttacggcagcgatcaagcgc

SEQ ID NO: 322884 - DNA, 75 bp, synthetic construct
  source 1..75: mol_type = other DNA
ccgcgccgtccagtgtttaccatgaatcgcgtggaaaccaatcttacctggtttctcctgatgggcatcgcgttg

SEQ ID NO: 322885 - DNA, 75 bp, synthetic construct
  source 1..75: mol_type = other DNA
cgcatgtctgatgatcgcaaaactgttgtactggctttttgaaagcgccggactcattcataaacgtacaaaatc

SEQ ID NO: 322886 - DNA, 75 bp, synthetic construct
  source 1..75: mol_type = other DNA
gtttttgctcacctttttctttggctttccgctgaccagcgtgctggtatttcgctttaatgtcggcgttgcgcc

SEQ ID NO: 322887 - DNA, 75 bp, synthetic construct
  source 1..75: mol_type = other DNA
ccggcggggtcgtatcctctctgggtaaaggcattgccgcagcctctctcgcagccattcttgaagcccgtggcc

SEQ ID NO: 322888 - DNA, 75 bp, synthetic construct
  source 1..75: mol_type = other DNA
gagtttaagaacagacccgaaacaatcgggttagttggtaaaaatgcccgctccctcatcctctggacagaacgc

SEQ ID NO: 322889 - DNA, 75 bp, synthetic construct
  source 1..75: mol_type = other DNA
agttagagagcaatctggctgagctgcgtggcggcagcgattacgcgcaacgtaaaatcaagatagccgctgccc

SEQ ID NO: 322890 - DNA, 75 bp, synthetic construct
  source 1..75: mol_type = other DNA
atgggtaaactcacgggcaagacagcactgattacgggcgcatcgcaaggtattggcgaaggtattgccagaacc

SEQ ID NO: 322891 - DNA, 75 bp, synthetic construct
  source 1..75: mol_type = other DNA
gcgaaggaaaaagaagggcgcattgatatcctggtgaataacgcaggcgtttgtcgtctgggcagtttcctcgac

SEQ ID NO: 322892 - DNA, 75 bp, synthetic construct
  source 1..75: mol_type = other DNA
atcaaaacacaattgaaaacgcggaaatttataatgattatttttccgattattcagatgtctgcaaatacagtt

SEQ ID NO: 322893 - DNA, 75 bp, synthetic construct
  source 1..75: mol_type = other DNA
tgatcatcaaatggttcgactggctgtatgagctgggcaaccgcgaaactaatcgctataaggctgcgatattgc

SEQ ID NO: 322894 - DNA, 75 bp, synthetic construct
  source 1..75: mol_type = other DNA
ttatggtgccgggagtgcagagaaaatatatggcgataatagagatattattggtattagaatggataaaataaa

SEQ ID NO: 322895 - DNA, 75 bp, synthetic construct
  source 1..75: mol_type = other DNA
caacgttggccaatggtaaaaattactggcattgattcgtctccggcgatgattgctgaagcgcgtgcagtgttg

SEQ ID NO: 322896 - DNA, 75 bp, synthetic construct
  source 1..75: mol_type = other DNA
atttgcacttcaccgccgaacggtcgcgaccagcggtagaactgcttgccagagttcctctggaaaacgtccggc

SEQ ID NO: 322897 - DNA, 75 bp, synthetic construct
  source 1..75: mol_type = other DNA
ttcccgtgcaggatgcccagcacagttttcgtcgcctgttaaaggccatgagcgagccgggcgtgattgtcgccc

SEQ ID NO: 322898 - DNA, 75 bp, synthetic construct
  source 1..75: mol_type = other DNA
agaaaggtttcgacgagggttttaaagaaggttttaaacaaggttttaaacaaggggctcttgaagtggcgcggg

SEQ ID NO: 322899 - DNA, 75 bp, synthetic construct
  source 1..75: mol_type = other DNA
tctcaaagccatgaagaggtgacaagcgaagttcgttgtttcaaccagtattatggtgccgggagtgcagagaaa

SEQ ID NO: 322900 - DNA, 75 bp, synthetic construct
  source 1..75: mol_type = other DNA
atgccatttaaaaaactctcccgacgcaccttcctgacggcaagctcggcgcttgccttcctccatacgcctttc

SEQ ID NO: 322901 - DNA, 75 bp, synthetic construct
  source 1..75: mol_type = other DNA
acggtgctgatggggggcttatggggcatttcctggggatgtgcaatgtggtttatctactgggggccgtcagga

SEQ ID NO: 322902 - DNA, 75 bp, synthetic construct
  source 1..75: mol_type = other DNA
taagtatcacggggggttttttgtccggactgctcatggcctctttccactggtggcgcaggaaagttaaccggc

SEQ ID NO: 322903 - DNA, 75 bp, synthetic construct
  source 1..75: mol_type = other DNA
ggattacgtccgtggttacaggatctgaccgagagcgaacagcagcattttcttacgcgctaccatcagatgttg

SEQ ID NO: 322904 - DNA, 75 bp, synthetic construct
  source 1..75: mol_type = other DNA
gaagaacagtatccactgcaggagaacgggcagatactgttggcatttccgcgtctgtttattgttgcccggcgc

SEQ ID NO: 322905 - DNA, 75 bp, synthetic construct
  source 1..75: mol_type = other DNA
gcattgagcatgaacttcgacatgcgcaaagacgttcgcggcgtgtttatggcgaaaaaagaaacactgctgtct

SEQ ID NO: 322906 - DNA, 75 bp, synthetic construct
  source 1..75: mol_type = other DNA
ggccgttatgttcctgtgctggcctgtcgcgcttcctttatatgtcgactatatcggtggcgcaggtaaaaggag

SEQ ID NO: 322907 - DNA, 75 bp, synthetic construct
  source 1..75: mol_type = other DNA
ataccctgatgatgggtgacgcgctggcgatggcagtcatgcaggcgcgcggatttaatgaagaagattttgccc

SEQ ID NO: 322908 - DNA, 75 bp, synthetic construct
  source 1..75: mol_type = other DNA
tatgcgtcgtgacgatgccatcccgcaggtggcgttaaccgccagcgtgatggacgcaatgctggaacttagccg

SEQ ID NO: 322909 - DNA, 75 bp, synthetic construct
  source 1..75: mol_type = other DNA
ttacgagggagtaatcgcggatggaagtaagcgtattgctgaactggagaaaagcgaagagcaactcatcaacga

SEQ ID NO: 322910 - DNA, 75 bp, synthetic construct
  source 1..75: mol_type = other DNA
atacagcctgttatcctttgttaatatcatcagcaatgtatccactaataatctcttttgggccaagtagttctt

SEQ ID NO: 322911 - DNA, 75 bp, synthetic construct
  source 1..75: mol_type = other DNA
acctcagaacgtctttccatttacaaagctaatctggattggcttggtaaccatcctttgtcagctacatttggg

SEQ ID NO: 322912 - DNA, 75 bp, synthetic construct
  source 1..75: mol_type = other DNA
accatgatttttgggagtcaacttttgcggagttgacggaaataaactgccctgttccgctgactagagaacgtg

SEQ ID NO: 322913 - DNA, 75 bp, synthetic construct
  source 1..75: mol_type = other DNA
aaaataggcgtctccatcgaacaacacgagaagttgcccacaaaatccaaattgatgcgatttctttgtggttag

SEQ ID NO: 322914 - DNA, 75 bp, synthetic construct
  source 1..75: mol_type = other DNA
atctcgccactttctggcagcagtggctgaactggcaggctccggttaatcaacgcgcgtgggcgtttcatgatg

SEQ ID NO: 322915 - DNA, 75 bp, synthetic construct
  source 1..75: mol_type = other DNA
agatactagctgctgttgccgaagcggaacgtgaaaggatcttggaacgaactaacgatggacggcaggcagcta

SEQ ID NO: 322916 - DNA, 75 bp, synthetic construct
  source 1..75: mol_type = other DNA
tcataaacatatatacaacactctttttaaagaaccaaataaaaataaattcaccgcacttttcgcacccgaaag

SEQ ID NO: 322917 - DNA, 75 bp, synthetic construct
  source 1..75: mol_type = other DNA
gtacaaaatccgttaaccgtcttggttatggcgcgatgcaactggcaggtcctggggtttttggcccccaagaga

SEQ ID NO: 322918 - DNA, 75 bp, synthetic construct
  source 1..75: mol_type = other DNA
tgcgtgaagcggcagaaaaagcaacgtgtggtgagtggtcgctcgaatatggagagagccgatttgatggtgatt

SEQ ID NO: 322919 - DNA, 75 bp, synthetic construct
  source 1..75: mol_type = other DNA
tgcgtgctaaggcagaaaaagcaacgtgtggcgagtggttgctcgaatatggagagggccgatttgatggtgatg

SEQ ID NO: 322920 - DNA, 75 bp, synthetic construct
  source 1..75: mol_type = other DNA
ttaacccagatgggtcagttgtatggccatgtggcggatgaacttgcgaccccctcctctgctattctcgagatc

SEQ ID NO: 322921 - DNA, 75 bp, synthetic construct
  source 1..75: mol_type = other DNA
ggcagcggcacgcttcaggatgcctttgatctggaggcgctgaaggccctcgacatcatcgtaacctgtcagggc

SEQ ID NO: 322922 - DNA, 75 bp, synthetic construct
  source 1..75: mol_type = other DNA
gggcaaattgttcgtggaagtatccctggacgggaaggctggcttggttgccaacaaactgtgagtgctcttcca

SEQ ID NO: 322923 - DNA, 75 bp, synthetic construct
  source 1..75: mol_type = other DNA
gttttcggacatgtatatgcgcgcgaaggagatcggcttcgaggtgttagctgatgagatcatcgaccttgctga

SEQ ID NO: 322924 - DNA, 75 bp, synthetic construct
  source 1..75: mol_type = other DNA
tgatgctaagaacgttgataaagaccaactacgccgccaccaattaatgattgaaacgcgtaaatggctattggc

SEQ ID NO: 322925 - DNA, 75 bp, synthetic construct
  source 1..75: mol_type = other DNA
aaccggagcatggaaagacgctatttactgggtgctaaaagaggcctgccaggttgtaaacattcgcatcaaagg

SEQ ID NO: 322926 - DNA, 75 bp, synthetic construct
  source 1..75: mol_type = other DNA
cagcggggcacgctgtaaggatcaggcctccggcaactggtatgttcgcaacgtcacccatacgaaagcagcaaa

SEQ ID NO: 322927 - DNA, 75 bp, synthetic construct
  source 1..75: mol_type = other DNA
atgaaaaatgttggttttatcggctggggcggtatggtcggctcccttctcatgcaacgcatggttgaagagcgc

SEQ ID NO: 322928 - DNA, 75 bp, synthetic construct
  source 1..75: mol_type = other DNA
gagcatggaaagacgctgttgactgggtgctcaaagaggcttgccaggttgtaaacactggcatcaaaggagagt

SEQ ID NO: 322929 - DNA, 75 bp, synthetic construct
  source 1..75: mol_type = other DNA
gtaagatggttaactataccctgcaaacaaacggactcagcaacacctcaatccatatattcccggcgatcgcca

SEQ ID NO: 322930 - DNA, 75 bp, synthetic construct
  source 1..75: mol_type = other DNA
agcgcgagaaaatgcttgaggcagagcgcgttaaacagtggagccaacaacaattaaatgcccccgatataaatt

SEQ ID NO: 322931 - DNA, 75 bp, synthetic construct
  source 1..75: mol_type = other DNA
gcgcgacgacctcaaaagcgcacacggcggtgaaaatcgagcagaactacagcggccctacggtgtatgtgcaga

SEQ ID NO: 322932 - DNA, 75 bp, synthetic construct
  source 1..75: mol_type = other DNA
gaaggattagcgccgcgcaaattgcctgagatccccatagcctgccgtttatccggcctggagccgctgaatatt

SEQ ID NO: 322933 - DNA, 75 bp, synthetic construct
  source 1..75: mol_type = other DNA
tggatgtggcgcgtcagcaggtggaaaacggcgcgcagattatcgatatcaatatggatgaagggatgctcgacg

SEQ ID NO: 322934 - DNA, 75 bp, synthetic construct
  source 1..75: mol_type = other DNA
ctacgtcaccgcccacccgaacgccgggctgcccaacgcctttggtgaatacgatctcgacgccgacacgatggc

SEQ ID NO: 322935 - DNA, 75 bp, synthetic construct
  source 1..75: mol_type = other DNA
gtggaccgcgcgcacgccggagaaaccgcgctatgttgccggtgttcttggcccaaccaaccgaacggcgtctat

SEQ ID NO: 322936 - DNA, 75 bp, synthetic construct
  source 1..75: mol_type = other DNA
gaagactatgcccgccgtaaaggaatgagcgttaccgaagttgagcgttggttggcaccgaatctggggtatgat

SEQ ID NO: 322937 - DNA, 75 bp, synthetic construct
  source 1..75: mol_type = other DNA
aagcaggcggtggcctatctcgaaccgtttattgaagccagcaaagagcagggcaaaaccaacggcaagatggtg

SEQ ID NO: 322938 - DNA, 75 bp, synthetic construct
  source 1..75: mol_type = other DNA
tgaataaacgtctggaatactcgctggtcaaaggcattaccgagtttatcgagcaggataccgaagaagcccgcc

SEQ ID NO: 322939 - DNA, 75 bp, synthetic construct
  source 1..75: mol_type = other DNA
tacccgcgcacggaaaatcgagatttgccgtcgggcgtacaaaatcctcaccgaagaggttggcttcccgccaga

SEQ ID NO: 322940 - DNA, 75 bp, synthetic construct
  source 1..75: mol_type = other DNA
gtgagcagcaaagtggaacaactgcgtgcgcagttaaatcaacgtattctggtgctggacggcggtatgggcacc

SEQ ID NO: 322941 - DNA, 75 bp, synthetic construct
  source 1..75: mol_type = other DNA
caggcggagtggcgctcgtgggacgtgaagaaacgcctggagtactcgttggtcaaaggcattactgagtttatc

SEQ ID NO: 322942 - DNA, 75 bp, synthetic construct
  source 1..75: mol_type = other DNA
cgtgatgattttgtcgctcgtacccgcaaggagtacgaaaccgtacgtattcagcacgggcgtaagaaaccgcgc

SEQ ID NO: 322943 - DNA, 75 bp, synthetic construct
  source 1..75: mol_type = other DNA
ggcggcgctgctttccgatactcagcgtgatgattttgtcgctcgtacccgcaaagagtacgaaaccgtacgtat

SEQ ID NO: 322944 - DNA, 75 bp, synthetic construct
  source 1..75: mol_type = other DNA
ccgtgtagcaaatgccaaagatatgaaagaggcccaagacttagcaaacagtattcagttaaaatctgtgatgct

SEQ ID NO: 322945 - DNA, 75 bp, synthetic construct
  source 1..75: mol_type = other DNA
tgtcagcagttcgcgccgccagcgtgctggcatcgtgtaaatttagccatgctgacgctatagagatgacgaaaa

SEQ ID NO: 322946 - DNA, 75 bp, synthetic construct
  source 1..75: mol_type = other DNA
gagatccagaatcaggtaagccaggccctgggagaaatcaacagcctctccaacagagttgcgctagccaaagat

SEQ ID NO: 322947 - DNA, 75 bp, synthetic construct
  source 1..75: mol_type = other DNA
acgaaagaatctcaggaccttgcaaacagtattcagctaaaatccgtcatgctgaacacgcttaccagccagtgg

SEQ ID NO: 322948 - DNA, 75 bp, synthetic construct
  source 1..75: mol_type = other DNA
ttttcgtatgttcgcttgcaagcccgctggcacaggcgggaggtatattagtatttgatgccacggccagactgg

SEQ ID NO: 322949 - DNA, 75 bp, synthetic construct
  source 1..75: mol_type = other DNA
gcgaaaaagtgcttgaggcggagcgtgttaaacagtggaatcagcagcagttaaccgcaccaacagttgatttaa

SEQ ID NO: 322950 - DNA, 75 bp, synthetic construct
  source 1..75: mol_type = other DNA
gtcgaagccgctattgcccgcgccaaagcgcgcaagctggaacagcaacaggctaatgcggaaccagaagaacag

SEQ ID NO: 322951 - DNA, 75 bp, synthetic construct
  source 1..75: mol_type = other DNA
cgctgctggccacttggctgacgctaacttacccggaccagatgagagagtgttttaacaaagtggttgcgtata

SEQ ID NO: 322952 - DNA, 75 bp, synthetic construct
  source 1..75: mol_type = other DNA
ctacaaaaacagcaactagatagggtggttaaagaaaaaaacttaatgctaacgcagctacacttggttcaggaa

SEQ ID NO: 322953 - DNA, 75 bp, synthetic construct
  source 1..75: mol_type = other DNA
ttctggcttgcgtcattgcaagcccactggctcatgctggtattcccgtcgctgttgatgctgaccctatgcggg

SEQ ID NO: 322954 - DNA, 75 bp, synthetic construct
  source 1..75: mol_type = other DNA
atggaactgtggctgacggtgaacggtaaacgcacctgtgccagcgcaccgatggatccgctgacccgtgccgtg

SEQ ID NO: 322955 - DNA, 75 bp, synthetic construct
  source 1..75: mol_type = other DNA
tgccaatccggtacctggaaatcatcatcagcgtcgatatggacgaatataaaaacatttacgttatatcccaaa

SEQ ID NO: 322956 - DNA, 75 bp, synthetic construct
  source 1..75: mol_type = other DNA
ggttcgaagatgaggactcctcatcttgttcctttgtcgcggcaagccttagctattctggaaaacatcaaaagc

SEQ ID NO: 322957 - DNA, 75 bp, synthetic construct
  source 1..75: mol_type = other DNA
cgagggatgcggtagagcggcagatgagtcaccaggagcgtagttctgtacgtgcggcttatatacataaggcgg

SEQ ID NO: 322958 - DNA, 75 bp, synthetic construct
  source 1..75: mol_type = other DNA
aaagcggtggaatcatccggacgactcgaagttgcggctcgtttgcaacagcggactaccgcgattatgcggttt

SEQ ID NO: 322959 - DNA, 75 bp, synthetic construct
  source 1..75: mol_type = other DNA
ttgctggagctggtggatgaatccggcgcagtcacagccgcgcagaccatcaccccgcagggagaaaagcgactt

SEQ ID NO: 322960 - DNA, 75 bp, synthetic construct
  source 1..75: mol_type = other DNA
tcgctttggcggtaaagaaaagatgctggcgttgggaaaatatcccgaagtctcgctggcggatgccagggcacg

SEQ ID NO: 322961 - DNA, 75 bp, synthetic construct
  source 1..75: mol_type = other DNA
gtggaatcatccggacgactcgaagttgcggctcgtttgcaacagcgaactaccgcgattatgcggtttgccgtt

SEQ ID NO: 322962 - DNA, 75 bp, synthetic construct
  source 1..75: mol_type = other DNA
agcaaatatgatgaagtaaattgcgggaaaaaagctcatggcgttcccgaagaaattaagaaaactggccttgtt

SEQ ID NO: 322963 - DNA, 75 bp, synthetic construct
  source 1..75: mol_type = other DNA
tcaaaatatgatgagcatacatctggcaaaaaagggcaccagatggcagacgaattcgttaaagctggtttactg

SEQ ID NO: 322964 - DNA, 75 bp, synthetic construct
  source 1..75: mol_type = other DNA
cgccttatccgtggctggctgggtggcgctgccgccgacagactacaaagccgactgggacgactaccgccagca

SEQ ID NO: 322965 - DNA, 75 bp, synthetic construct
  source 1..75: mol_type = other DNA
ccgctacgcaacagtattcttcggacattactgaaaaatacaggcgctgccggattgcgcttaaagccgttcgcc

SEQ ID NO: 322966 - DNA, 75 bp, synthetic construct
  source 1..75: mol_type = other DNA
ttaagaaagcgtcctgatttccttgtctggctctgtgaaaagctgggggtaatgagaatcccctccatgtttaac

SEQ ID NO: 322967 - DNA, 75 bp, synthetic construct
  source 1..75: mol_type = other DNA
gtgggcgcttatggcagggaaataaacgggtgtattcctgaagaatgccaggaaattaaacattctgaatatgtg

SEQ ID NO: 322968 - DNA, 75 bp, synthetic construct
  source 1..75: mol_type = other DNA
tttttccgggtgatcatgatgcaactaaagttatgagtgagaacacggtaaacagcgcactgcgtgcgatgggat

SEQ ID NO: 322969 - DNA, 75 bp, synthetic construct
  source 1..75: mol_type = other DNA
gcatggatttagaacgatggcgcgtggtgcactgggggagtcggggctatggagcgatgatgcgatagagcgtca

SEQ ID NO: 322970 - DNA, 75 bp, synthetic construct
  source 1..75: mol_type = other DNA
ggagtgatgacgcgatagagaggcaactgagccactcagagcgtaataatgtacgtgcggcatatatccatacct

SEQ ID NO: 322971 - DNA, 75 bp, synthetic construct
  source 1..75: mol_type = other DNA
gtgcgcaaaattgaagaaggtcaggatccgtacgaattactcagtaaatggcaaaaggaaatgtggttattcgcg

SEQ ID NO: 322972 - DNA, 75 bp, synthetic construct
  source 1..75: mol_type = other DNA
gttattgccgtcaggaaccttacattagcctggggcgttatattcatgtcaccgcgcgcaaaccgcagagcaagg

SEQ ID NO: 322973 - DNA, 75 bp, synthetic construct
  source 1..75: mol_type = other DNA
gccttgagcggtaaaggtgaggtgatatttcccagcgatcatgaccctaaaaaagtaatgagtgaaaatacagta

SEQ ID NO: 322974 - DNA, 75 bp, synthetic construct
  source 1..75: mol_type = other DNA
cgaattacgttttgctcgttggagtgaatttgattttaataacgctatttggcgtattccggcaaaacgagagga

SEQ ID NO: 322975 - DNA, 75 bp, synthetic construct
  source 1..75: mol_type = other DNA
gatggtacagtggtgggccgattatcttgaaaaaaacactgttgattatattacaccatacgatttcgcaaaaag

SEQ ID NO: 322976 - DNA, 75 bp, synthetic construct
  source 1..75: mol_type = other DNA
caagcctcacgggggctcgccccgcgccaggaacatttaccgcgactgcaacgataacaattgagattgtacgct

SEQ ID NO: 322977 - DNA, 75 bp, synthetic construct
  source 1..75: mol_type = other DNA
cagtaatgatcaaggcgattggtcaaaagctggcggcggctggtgtacaggatgcaaatttttatcctgagggta

SEQ ID NO: 322978 - DNA, 75 bp, synthetic construct
  source 1..75: mol_type = other DNA
atatcgttccgcttagtcggcaggcgatgattttgctaaaccagttaaagcagattagtggtgataaagagctgc

SEQ ID NO: 322979 - DNA, 75 bp, synthetic construct
  source 1..75: mol_type = other DNA
ccccggtggattactcacagccgatggctgatgtttatattcggggcgatattacagctccgcaaagttgcgaaa

SEQ ID NO: 322980 - DNA, 75 bp, synthetic construct
  source 1..75: mol_type = other DNA
attaaaaaagttgatgccagtggtaagcatgatgttgcgcagcgtcttcagcagcgtgtcacggctattatgcgt

SEQ ID NO: 322981 - DNA, 75 bp, synthetic construct
  source 1..75: mol_type = other DNA
ttacacttatgatatccatacttaactactctgtgcatatggatgcgtttttatatatgcaaaaacaaaagaaaa

SEQ ID NO: 322982 - DNA, 75 bp, synthetic construct
  source 1..75: mol_type = other DNA
atgcaacatgtgatggatgtccgttccgggatgccggtggatgtccgccgtcatcaagtgagcccacaaactctg

SEQ ID NO: 322983 - DNA, 75 bp, synthetic construct
  source 1..75: mol_type = other DNA
ggcgctgttgcaggctaatcccggcgttgatccgtatgtgcctcgtgcgggtagcgtattaaccattccattgca

SEQ ID NO: 322984 - DNA, 75 bp, synthetic construct
  source 1..75: mol_type = other DNA
gtagcgtgttaacgatcccgttgcaaaccctacttccagacgcgccgcgcgaaggcattgtgatcaatattgcgg

SEQ ID NO: 322985 - DNA, 75 bp, synthetic construct
  source 1..75: mol_type = other DNA
cagttcagataggagaaaattacacatcctcactcatattcgactctctgcgatttagcggaatacgcttatttc

SEQ ID NO: 322986 - DNA, 75 bp, synthetic construct
  source 1..75: mol_type = other DNA
atggcaatcgaatagagccgtgtgctgcattggcaaagtctcttgagcacgatgctgaatgctcagtaagaaaag

SEQ ID NO: 322987 - DNA, 75 bp, synthetic construct
  source 1..75: mol_type = other DNA
tgtgcctttgctcgtgttttgcatgttcctgaatgttacttctatgcacaggaagacactttcgccgaagcgatt

SEQ ID NO: 322988 - DNA, 75 bp, synthetic construct
  source 1..75: mol_type = other DNA
cctcggtacctacccctaggtggactcgcgaaatggaagtctatcttgagaaatttaacgctgaacagaccatgg

SEQ ID NO: 322989 - DNA, 75 bp, synthetic construct
  source 1..75: mol_type = other DNA
atcaccatgcctggcaagcccaaagcggtaactgggatcgccaaacgatggtcgacgatattgcacgtggtcttc

SEQ ID NO: 322990 - DNA, 75 bp, synthetic construct
  source 1..75: mol_type = other DNA
aatcaggaaaccctggcactgcgcaaattccggtgacattacccacctgggacgaagtgattggtcgggatgtga

SEQ ID NO: 322991 - DNA, 75 bp, synthetic construct
  source 1..75: mol_type = other DNA
aacggcgcacgtctggtggaagtgcaccagccgctgtcagagaagatagatgacgatccgcaattgttgccgatt

SEQ ID NO: 322992 - DNA, 75 bp, synthetic construct
  source 1..75: mol_type = other DNA
aaagccaacacctggccgctgccgccagcgggtagtcgtctggttggcgaaaacaaatttcatgtggtggaaaat

SEQ ID NO: 322993 - DNA, 75 bp, synthetic construct
  source 1..75: mol_type = other DNA
accgtcataaattcaaactgatggtaatttcaatgatccccaaacgcttaaaagaagccagattgcgggctaaac

SEQ ID NO: 322994 - DNA, 75 bp, synthetic construct
  source 1..75: mol_type = other DNA
ttggtgatgttgcgttccggtgaattttctaaattaccagtgcgggtttcattttgtccgttctgtggtgaaagt

SEQ ID NO: 322995 - DNA, 75 bp, synthetic construct
  source 1..75: mol_type = other DNA
agctgactgcagcaagggtcgccgctgctctggggatgtacatccggaaaggcgacggacagagctatgaaacgg

SEQ ID NO: 322996 - DNA, 75 bp, synthetic construct
  source 1..75: mol_type = other DNA
atcgtgcctggctgaaacaggctgtggcatccggtgttatcaggctaccccgcgatcttgaccgttcttcactgt

SEQ ID NO: 322997 - DNA, 75 bp, synthetic construct
  source 1..75: mol_type = other DNA
agccagactgcgttcaagggcgttaatcatggcctatgaggcggtgaaaccgacccggacacataaagcccggcg

SEQ ID NO: 322998 - DNA, 75 bp, synthetic construct
  source 1..75: mol_type = other DNA
ccgggctgaatcagggggtttttcttgatgagtggggaagaccgaaaaaatatctggtttataaaaattatccgg

SEQ ID NO: 322999 - DNA, 75 bp, synthetic construct
  source 1..75: mol_type = other DNA
cacctgaagttcactcgtcgtctgcatcagacgcgaggctcatccatgttatcgggggtgctgatgcggatcagt

SEQ ID NO: 323000 - DNA, 75 bp, synthetic construct
  source 1..75: mol_type = other DNA
agcgtaagtacgcgatcataaggcgtgatgatcttgcggtaatggtagaaatggaccattttcctgatagcgaaa

SEQ ID NO: 323001 - DNA, 75 bp, synthetic construct
  source 1..75: mol_type = other DNA
gattacgaattataacttatctgacaaaaataacagtcagccaatatgtttctttcttggtcgagataaagggcg

SEQ ID NO: 323002 - DNA, 75 bp, synthetic construct
  source 1..75: mol_type = other DNA
tgatattatctatgattttgagcatagatttatagggaatgaaaagatcaaggcaatagaacaattttttcctat

SEQ ID NO: 323003 - DNA, 75 bp, synthetic construct
  source 1..75: mol_type = other DNA
ttaaaccaatggattatgatagtttatataaattcagtcctgataaaatgatgtcaataattgtttctgatttta

SEQ ID NO: 323004 - DNA, 75 bp, synthetic construct
  source 1..75: mol_type = other DNA
ctggtgagggtgggttacgtgctgattgtgccgattatttattatttttcgtatatgcgattgcgttgctaatga

SEQ ID NO: 323005 - DNA, 75 bp, synthetic construct
  source 1..75: mol_type = other DNA
ctggcagtacagatgccagataactggctggagccgacccatgtgctcatgcgcgaagttgcctgggaacaaaac

SEQ ID NO: 323006 - DNA, 75 bp, synthetic construct
  source 1..75: mol_type = other DNA
ggattatctgcgccgcaatctggacaaacctcatgacctggattcactggccggatttgtcagcatgagccggag

SEQ ID NO: 323007 - DNA, 75 bp, synthetic construct
  source 1..75: mol_type = other DNA
gggttatcggctgatcccgatggtcgattttcagcaggatggcgagttgcttggtcgtattcgcagtattcgcaa

SEQ ID NO: 323008 - DNA, 75 bp, synthetic construct
  source 1..75: mol_type = other DNA
ttactggggctggtgccgggaatgccaaacctggtatttttactgttcacagcgggattgctggggctggcatgg

SEQ ID NO: 323009 - DNA, 75 bp, synthetic construct
  source 1..75: mol_type = other DNA
accattctgttgtttaccacgctgctgcgtctggcgcttaatgtggcttccacgcgtatcattttgatggaaggg

SEQ ID NO: 323010 - DNA, 75 bp, synthetic construct
  source 1..75: mol_type = other DNA
ctgtattcttcttctttagttgtcacgaacggtgcaatagtgatccacacccaacgcctgaaatcagatccaggg

SEQ ID NO: 323011 - DNA, 75 bp, synthetic construct
  source 1..75: mol_type = other DNA
attcacattagttggaggtggaacgccaaaaacttcagttgctgaatattggactgatgagataccttggatttc

SEQ ID NO: 323012 - DNA, 75 bp, synthetic construct
  source 1..75: mol_type = other DNA
cattctcgacttgttgttcacgttcaatattgctctgtcgattatggtgttgctggtggcgatgtttacccagcg

SEQ ID NO: 323013 - DNA, 75 bp, synthetic construct
  source 1..75: mol_type = other DNA
gtggatcactattgcaccgttcgtgacaagcagcgctggagtcgggtcacggacacctacggtgttaagcaccag

SEQ ID NO: 323014 - DNA, 75 bp, synthetic construct
  source 1..75: mol_type = other DNA
cagcggccaggcgctcccgctcacgtatgtctgttgccgggagcaggcagaggacggcgcctgctggcatctgct

SEQ ID NO: 323015 - DNA, 75 bp, synthetic construct
  source 1..75: mol_type = other DNA
attcaactatattaccgggtataacaataggtcgcaatagtatcgttggtgctggctcagtcgttactaaagatg

SEQ ID NO: 323016 - DNA, 75 bp, synthetic construct
  source 1..75: mol_type = other DNA
gggcggactggagccagggctggcggatcgtttactggcgcaaactcaggaagctctatcccgtcaggagatgtt

SEQ ID NO: 323017 - DNA, 75 bp, synthetic construct
  source 1..75: mol_type = other DNA
cggggcgctggctggcaattaaccctggaaccgctgccgggacgttacctggtgaggcgaccgtcgatccggcat

SEQ ID NO: 323018 - DNA, 75 bp, synthetic construct
  source 1..75: mol_type = other DNA
acaatggcagatccttgccggaccgattttgatcctgttgatcttgtcgatgatggtgctgccactgcccgcatt

SEQ ID NO: 323019 - DNA, 75 bp, synthetic construct
  source 1..75: mol_type = other DNA
caggataaagcggttgatctgttcctcgatatgctcaaagaggacaccggcaccgttgaagcccatcttacgctc

SEQ ID NO: 323020 - DNA, 75 bp, synthetic construct
  source 1..75: mol_type = other DNA
aaactgtttatggcgggcatcgcaccgggcatcatgatgggcgtcacgctgatggttacctggtggtggcaggca

SEQ ID NO: 323021 - DNA, 75 bp, synthetic construct
  source 1..75: mol_type = other DNA
ttatagttggggaacagtgatgaggcagaatacaccacctgttttttctgatcttttcatgctggcagcttatct

SEQ ID NO: 323022 - DNA, 75 bp, synthetic construct
  source 1..75: mol_type = other DNA
tggatgatgcgtatagctggttatctaatctttcatcgcaggtatacgacgatgttgccacggatgaggcatttt

SEQ ID NO: 323023 - DNA, 75 bp, synthetic construct
  source 1..75: mol_type = other DNA
tccccttctttgtactggcgggtgagatcatgaacgcgggcggcctgtcgcaacgtatcgtcgacttgccaatga

SEQ ID NO: 323024 - DNA, 75 bp, synthetic construct
  source 1..75: mol_type = other DNA
atttgacgatgcggtaaaaggcgttgcgccttacgtcatggttttattcatgttgttagcattatttatttttat

SEQ ID NO: 323025 - DNA, 75 bp, synthetic construct
  source 1..75: mol_type = other DNA
attaatgccattagtaaaagaagcgggaatagatccggtctatttcggcatcatgtttattatcaactgttcaat

SEQ ID NO: 323026 - DNA, 75 bp, synthetic construct
  source 1..75: mol_type = other DNA
ggaagcacgccagcaatccccggctggctgcgtgatggtattcgccgctcgtattcgtcaggaggtgcgccatga

SEQ ID NO: 323027 - DNA, 75 bp, synthetic construct
  source 1..75: mol_type = other DNA
aagggcgggactcgcacaacctgaataaattcacttggcgctttatcgccctgagtgcggctaaaccgcgcatgc

SEQ ID NO: 323028 - DNA, 75 bp, synthetic construct
  source 1..75: mol_type = other DNA
caattcagcaactggggcgtgattacatggcggcgggtttatacgatcgcgcggaagatatgtttaatcaactga

SEQ ID NO: 323029 - DNA, 75 bp, synthetic construct
  source 1..75: mol_type = other DNA
atgatatcagtggagtggtcgtacgtaaaaatggctcttcggataggcctttgatttatgcaaaagtatctgtta

SEQ ID NO: 323030 - DNA, 75 bp, synthetic construct
  source 1..75: mol_type = other DNA
atatgtcaacaaggcattgtgcgccgcattacgagatcttagtaaaaaccatgatatcagtggagtggtcgtacg

SEQ ID NO: 323031 - DNA, 75 bp, synthetic construct
  source 1..75: mol_type = other DNA
aaaagttgcgactcatcgcaaagacgttatgcaaaccttttcaagaaggttaccctccaggaaaagagaagattt

SEQ ID NO: 323032 - DNA, 75 bp, synthetic construct
  source 1..75: mol_type = other DNA
gcaagccattgccgaagccggatttaccgccactgtaagggcatgtgaggctcatccgctgctcctcgcgctgga

SEQ ID NO: 323033 - DNA, 75 bp, synthetic construct
  source 1..75: mol_type = other DNA
gtctacgccattgtccatgttcgcggcggtggtgagctggggcaacaatggtacgaagacggaaaatttctgaag

SEQ ID NO: 323034 - DNA, 75 bp, synthetic construct
  source 1..75: mol_type = other DNA
tctggtcgctttaaatcgtacgaaggcgtagcgatggaatatgcttttctggtcgcgctggcgcagggaacatta

SEQ ID NO: 323035 - DNA, 75 bp, synthetic construct
  source 1..75: mol_type = other DNA
catggactcaggccatggcggtaaatctggtcgctttaaatcgtacgaaggcgtagcgatggaatatgcttttct

SEQ ID NO: 323036 - DNA, 75 bp, synthetic construct
  source 1..75: mol_type = other DNA
attgttaaaactgggctatggctctccttcgctttgttatgcgatgggcgggagtgcggggggcatgttgatggg

SEQ ID NO: 323037 - DNA, 75 bp, synthetic construct
  source 1..75: mol_type = other DNA
gcaatattacgagtacatgaaaagctacagcccgtatgacaacgtcaccgcacaggcttatccgcatttactggt

SEQ ID NO: 323038 - DNA, 75 bp, synthetic construct
  source 1..75: mol_type = other DNA
aggtggttgaagagcgtcagcgcgggttaaccagtttgcgccaaattaaccgcaagacccgggaagtcattggta

SEQ ID NO: 323039 - DNA, 75 bp, synthetic construct
  source 1..75: mol_type = other DNA
acgcccgatattacgccatacatagaatatgactaccttgaccgtcagggtgtttacaacggcagagataattta

SEQ ID NO: 323040 - DNA, 75 bp, synthetic construct
  source 1..75: mol_type = other DNA
tggcccaatgatcttacagagaatacaacagagattactacagagaataaaacctcttctcgtccggacgcttcg

SEQ ID NO: 323041 - DNA, 75 bp, synthetic construct
  source 1..75: mol_type = other DNA
tcgtcccaaagaaccgaactggacagcatgggcaaacgaaattcgcctgatgtgtgtgcaggatggtcgtactca

SEQ ID NO: 323042 - DNA, 75 bp, synthetic construct
  source 1..75: mol_type = other DNA
atgctaccaaaagccgcccgcattccccacgccatgacgcttcatggcgatacgcgcatcgataattactactgg

SEQ ID NO: 323043 - DNA, 75 bp, synthetic construct
  source 1..75: mol_type = other DNA
atgaaaaaggctaaaatactttctggcgtattattactgtgcttttcgtcaccactaatttctcaagctgcgaca

SEQ ID NO: 323044 - DNA, 75 bp, synthetic construct
  source 1..75: mol_type = other DNA
ttgtggtgattaaaaaaaatactgtaacgcctgacgattttccccgttcccggctgctgtaccgggaacgtattt

SEQ ID NO: 323045 - DNA, 75 bp, synthetic construct
  source 1..75: mol_type = other DNA
cgaagaaaaagacgagaccttttatgtcagcctgcataaaacgacttcgaaccattatgtggtcattcatctcgc

SEQ ID NO: 323046 - DNA, 75 bp, synthetic construct
  source 1..75: mol_type = other DNA
accggcacatatggcgtggtcaattctcgccctgggcttcttctccagcgcgatctataccaccatcatcaccct

SEQ ID NO: 323047 - DNA, 75 bp, synthetic construct
  source 1..75: mol_type = other DNA
atttttattctgaccttcggctgtgagttcccggcgctgggcaaacatgcaccaaaaacggatgctccggtagcg

SEQ ID NO: 323048 - DNA, 75 bp, synthetic construct
  source 1..75: mol_type = other DNA
tgtttctctcgattgctgcgctgtgctacatcctcggtcagctaggttttatctcctgggtgccagagtacgcca

SEQ ID NO: 323049 - DNA, 75 bp, synthetic construct
  source 1..75: mol_type = other DNA
cccggttgggtagtcatgtgggatggctggttcagacttcaggatatggttgagggttacctggtgatgaagtct

SEQ ID NO: 323050 - DNA, 75 bp, synthetic construct
  source 1..75: mol_type = other DNA
tggaatcactgagaatgcagacccgggataacctcgaacgcatggtggttatcaaggcgttcatcgcggtgcggg

SEQ ID NO: 323051 - DNA, 75 bp, synthetic construct
  source 1..75: mol_type = other DNA
tatgaagaggtgtatctcaaagcctacagcaatgttttggatgcgaagaagcaattaaacgcatattttgaattt

SEQ ID NO: 323052 - DNA, 75 bp, synthetic construct
  source 1..75: mol_type = other DNA
ctgaaacaaactgaagtacccggttttgatgcggcgaattaccgcagtgaacacttgtggatcactgcccgggat

SEQ ID NO: 323053 - DNA, 75 bp, synthetic construct
  source 1..75: mol_type = other DNA
gcggaaatggccgatgccgagccgtttgtttttctgccgcgccgcaaagatcacgaatacagccttgatcactac

SEQ ID NO: 323054 - DNA, 75 bp, synthetic construct
  source 1..75: mol_type = other DNA
cgtgatgagctggagtgggaagagttaattccaccgcgcgataacatcatgctggagggctttacgctgtttacg

SEQ ID NO: 323055 - DNA, 75 bp, synthetic construct
  source 1..75: mol_type = other DNA
gcattgagtggtactgggtttatgcctgcatcgggctggtgtatgtcgctatttttattctgaccttcggctgtg

SEQ ID NO: 323056 - DNA, 75 bp, synthetic construct
  source 1..75: mol_type = other DNA
gcctgcgcacatggcgtggtccattctcgcgctgggcttcttctccagcgcgatctataccaccatcattactct

SEQ ID NO: 323057 - DNA, 75 bp, synthetic construct
  source 1..75: mol_type = other DNA
atcggtattgcttttgacgatccggcttacgtcacctggattgcctataatccggaacctgaaacttcgcgattg

SEQ ID NO: 323058 - DNA, 75 bp, synthetic construct
  source 1..75: mol_type = other DNA
tcagccgtgatgatctcatgaccgaagagactgaaagagaggtactttttcacaatatgataggggagcgattgt

SEQ ID NO: 323059 - DNA, 75 bp, synthetic construct
  source 1..75: mol_type = other DNA
cctggttcaacgcagtgtcgatacctttgttggtatgccgttcaacatcgccggttacggcattctcacccactt

SEQ ID NO: 323060 - DNA, 75 bp, synthetic construct
  source 1..75: mol_type = other DNA
catttcgtgttttcactgtggagtcgcgagctggactttgagacccgactgactatggccaccgacattggcata

SEQ ID NO: 323061 - DNA, 75 bp, synthetic construct
  source 1..75: mol_type = other DNA
gctccggcctggttgtggcgcatcttggcaatggcgcgtcaatctgcgcggttcgcaacggtcagagtgttgata

SEQ ID NO: 323062 - DNA, 75 bp, synthetic construct
  source 1..75: mol_type = other DNA
agtgaatatctgagcaagatcgatactttccgtgaacgcgggtacaaagtcgagggatacctgggtatcagtgaa

SEQ ID NO: 323063 - DNA, 75 bp, synthetic construct
  source 1..75: mol_type = other DNA
gcgtcaagggtatgaatgaacctgaagagagcatgattaatcttgttaaaaccagcaatggctggaaagcgatct

SEQ ID NO: 323064 - DNA, 75 bp, synthetic construct
  source 1..75: mol_type = other DNA
gccaacgtcaaaggaatgaatgaatctgctgatggtgccatgaatcttgttaaaaccagtaatggctggaaagcc

SEQ ID NO: 323065 - DNA, 75 bp, synthetic construct
  source 1..75: mol_type = other DNA
ggacacccggaaaacgaacgctgtgatgaactggctcgtgctgcggcaatgaatcccacactggaagatacaggc

SEQ ID NO: 323066 - DNA, 75 bp, synthetic construct
  source 1..75: mol_type = other DNA
agcagacaaaaaaccagtaaaaaatgtcgatctctggcaacgtcttgatgctgcattggggcagcatcaaatcaa

SEQ ID NO: 323067 - DNA, 75 bp, synthetic construct
  source 1..75: mol_type = other DNA
gcgcagctctggcactggcgggatgtggtgagaaaggggattttgagaaggcgatcaatgccaagatagggcagg

SEQ ID NO: 323068 - DNA, 75 bp, synthetic construct
  source 1..75: mol_type = other DNA
cctcgacggttttattgagcagggcctgatggtttttgaacagggctatgactcgaacgtattagggataacaga

SEQ ID NO: 323069 - DNA, 75 bp, synthetic construct
  source 1..75: mol_type = other DNA
gggctggattgacaaaaaagcattcgccagcgttaaagggatgaatgaatctgctgatggtgccatgaatttagt

SEQ ID NO: 323070 - DNA, 75 bp, synthetic construct
  source 1..75: mol_type = other DNA
tggtctgggtcggtgaagcgggcgttcgcgtttactcctccggacaacccggaggggcgcgggcagataaattac

SEQ ID NO: 323071 - DNA, 75 bp, synthetic construct
  source 1..75: mol_type = other DNA
aattgacggcattgccttccagaccaatattctggctttgaacgcggcggttgaagcagcgcgtgcgggtgagca

SEQ ID NO: 323072 - DNA, 75 bp, synthetic construct
  source 1..75: mol_type = other DNA
gagtttgtcacttcattacaggcactgaaagagatcggaataaaagctggcttttctgctttttcagaagaataa

SEQ ID NO: 323073 - DNA, 75 bp, synthetic construct
  source 1..75: mol_type = other DNA
tcgccaactgcagaaattatggggaatagacgacagcgaagtggtggtctttggcgatggcggtaacgatattga

SEQ ID NO: 323074 - DNA, 75 bp, synthetic construct
  source 1..75: mol_type = other DNA
tctcggtgttgctcaaaataatatggttgggaaacctgttcgtttcaggccattaacatttgagagtaattttac

SEQ ID NO: 323075 - DNA, 75 bp, synthetic construct
  source 1..75: mol_type = other DNA
ccatgggcatatgcaacatattgtctcgtgggatgataaaagtgaattgattattggtcagttgcataacatcca

SEQ ID NO: 323076 - DNA, 75 bp, synthetic construct
  source 1..75: mol_type = other DNA
gttatgcggcaattaaaacgactcattagccgtattgcacccagcccatccagcgttatggtggttggtgaaagc

SEQ ID NO: 323077 - DNA, 75 bp, synthetic construct
  source 1..75: mol_type = other DNA
gcggaaatgtattatcaccgtctggaatacgtcgataactttgacaacttagaagatatcttctttaagtttggc

SEQ ID NO: 323078 - DNA, 75 bp, synthetic construct
  source 1..75: mol_type = other DNA
gtgacgtttgtaccactgagcccgatcccattaaaagatcgcacctccatgatcttcctccagtacggtcagatc

SEQ ID NO: 323079 - DNA, 75 bp, synthetic construct
  source 1..75: mol_type = other DNA
gagtttcccacgcggcggtgcatctggccgccacggtgggaacactgctggtctgggtcggtgaagcgggcgttc

SEQ ID NO: 323080 - DNA, 75 bp, synthetic construct
  source 1..75: mol_type = other DNA
acatggacggtactttcttaagcgatcaaaaaagctataaccgtgagcggtttatggctcagtatcagcagatga

SEQ ID NO: 323081 - DNA, 75 bp, synthetic construct
  source 1..75: mol_type = other DNA
cgccagcgggaatcaatattatcagttgatctctttctttcctgaaattgctaatgaaattgcctttgtggctga

SEQ ID NO: 323082 - DNA, 75 bp, synthetic construct
  source 1..75: mol_type = other DNA
tcaaaaaacctataaccgtgagcggtttatggctcagtatcagcagatgaaagcacaaggcattcgctttgtggt

SEQ ID NO: 323083 - DNA, 75 bp, synthetic construct
  source 1..75: mol_type = other DNA
cctttagcgcaggctacacccgcaccaccaacaaccgtatggagttgatggccgctattgtcgcgctggaggcgt

SEQ ID NO: 323084 - DNA, 75 bp, synthetic construct
  source 1..75: mol_type = other DNA
atggggggtgtcgaaagtcatgtaaatcggctaaaaatgctgaaaggccagatgtatggtcgagccggatttgaa

SEQ ID NO: 323085 - DNA, 75 bp, synthetic construct
  source 1..75: mol_type = other DNA
taacaaagaataccgaaaagctgtagagttttatgtagatgaaatgattcgtgatcgtgagaactttaacatcga

SEQ ID NO: 323086 - DNA, 75 bp, synthetic construct
  source 1..75: mol_type = other DNA
cttattaactgatggtcgtaccaatattttctctgaaaatattgaaggaagcttgtcaaaatatgccttatataa

SEQ ID NO: 323087 - DNA, 75 bp, synthetic construct
  source 1..75: mol_type = other DNA
gcgataaagtattaattatttgtcgactttctacaacgcggtatttggctgaaaaaaatccctggccaaacatat

SEQ ID NO: 323088 - DNA, 75 bp, synthetic construct
  source 1..75: mol_type = other DNA
tgctcacaattatcatggtgcattataccggcaaggtgattgcgccctggatccctcgcgaccatagtactgcca

SEQ ID NO: 323089 - DNA, 75 bp, synthetic construct
  source 1..75: mol_type = other DNA
attattgccattatctgtggccatatgctctctggcgctcttgatgcacatcttgatcattacgattccataacc

SEQ ID NO: 323090 - DNA, 75 bp, synthetic construct
  source 1..75: mol_type = other DNA
cgtcagggcgtgctggaagagttcggcgtcaccatgattggtgccactgccgatgcgattgataaagccgaagac

SEQ ID NO: 323091 - DNA, 75 bp, synthetic construct
  source 1..75: mol_type = other DNA
tttgactactctggcgcgcaagcatgtaaagccctgcgcgaagagggttaccgcgtcattctggtgaactccaac

SEQ ID NO: 323092 - DNA, 75 bp, synthetic construct
  source 1..75: mol_type = other DNA
ccgctttggctgaactgtatcaggccgcgcaggaagatcgtttgttcacgcaccatttcaatatgctgcgcacga

SEQ ID NO: 323093 - DNA, 75 bp, synthetic construct
  source 1..75: mol_type = other DNA
ggaacagttttaatgtcaaaaaccatttccggttatggattcaaccaaagcttttgttggaaaagtaaaaagaaa

SEQ ID NO: 323094 - DNA, 75 bp, synthetic construct
  source 1..75: mol_type = other DNA
cgcttcctcgatcaagggaattatctggcttatggactggcagcagtggcggcgtgggtaacaggtatcccgcac

SEQ ID NO: 323095 - DNA, 75 bp, synthetic construct
  source 1..75: mol_type = other DNA
gagctggagcgtcagggcgtgttggaagagttcggcgtgactatgattggtgcgaccgccgatgcgattgataaa

SEQ ID NO: 323096 - DNA, 75 bp, synthetic construct
  source 1..75: mol_type = other DNA
atcagacagaagctgtgaacagcgtcaacatgaccgctggccgcattattcatctgattgataaggacattcgca

SEQ ID NO: 323097 - DNA, 75 bp, synthetic construct
  source 1..75: mol_type = other DNA
gtgtctggaaatataggggcaaatccagtactgctgatcggcctgttagaaatttttgcgcttatctgcggtcac

SEQ ID NO: 323098 - DNA, 75 bp, synthetic construct
  source 1..75: mol_type = other DNA
tgccgataccgtaacgcttaaggaagtgacagaagcattgttgcattgtgcggaacagattcgcgcgcctgaata

SEQ ID NO: 323099 - DNA, 75 bp, synthetic construct
  source 1..75: mol_type = other DNA
cgcccgtggaatatattttaaaagagaataaaaattgcaatatgtggtggacccatacaatgtcttgcctccctg

SEQ ID NO: 323100 - DNA, 75 bp, synthetic construct
  source 1..75: mol_type = other DNA
ccgatggttcgtgtctgggtaatcctggacctgggggttacggcgctattttacgctatcgcggacgcgagaaaa

SEQ ID NO: 323101 - DNA, 75 bp, synthetic construct
  source 1..75: mol_type = other DNA
gatatatttcgcttttctcacaccgcctttgggttttcgtttggtttccgttgtccctgcaatagcagaaactgg

SEQ ID NO: 323102 - DNA, 75 bp, synthetic construct
  source 1..75: mol_type = other DNA
gtgtttatgcttctggtcagcctggaggtgcgcgttcagataagctgctctatcaagcaaaacttgctctggatg

SEQ ID NO: 323103 - DNA, 75 bp, synthetic construct
  source 1..75: mol_type = other DNA
ccccttatcttttcgctatttcctttgtactcttgatcggccttttagaaatttttgcacttatctgcggtcaca

SEQ ID NO: 323104 - DNA, 75 bp, synthetic construct
  source 1..75: mol_type = other DNA
caggctaactgggttggctcaacgcgtgccgactgcacaaaagccggtgcctgttgggtcttcatccacgaacga

SEQ ID NO: 323105 - DNA, 75 bp, synthetic construct
  source 1..75: mol_type = other DNA
cccccgcgcccggcgagccataactcaagccgcgcgatggtgtgggtgcgaaaaaatctgttctccagcttgagc

SEQ ID NO: 323106 - DNA, 75 bp, synthetic construct
  source 1..75: mol_type = other DNA
ccaaagaaacgtgtttcttcttccgacatgccaggttcccatttacgggttgtatgggtatcaccgaccgataaa

SEQ ID NO: 323107 - DNA, 75 bp, synthetic construct
  source 1..75: mol_type = other DNA
catggcattaattaccggtcatcaagccacttcaggtaatccctgcgaaggaaaactcaccgatcaatttggcca

SEQ ID NO: 323108 - DNA, 75 bp, synthetic construct
  source 1..75: mol_type = other DNA
attccacgcgaccatagttcagctattacagaagaagaatatgttggtagcatggcattaattaccggccatcaa

SEQ ID NO: 323109 - DNA, 75 bp, synthetic construct
  source 1..75: mol_type = other DNA
atgtcgcacccaccacgcccgtcgcccgtctgagcgtggcccagcagcagatggtggagattgcccgggcgctga

SEQ ID NO: 323110 - DNA, 75 bp, synthetic construct
  source 1..75: mol_type = other DNA
atgagtaaagtcgtacgcattattttcgaatatagggaggacgttatccgtaaaaacgctgatggaagcgtgcac

SEQ ID NO: 323111 - DNA, 75 bp, synthetic construct
  source 1..75: mol_type = other DNA
ggcttgccagtggttggtggcgggacgaaattttagcaaatagtgcgatcgccggtgtttatgcaaaatctgatg

SEQ ID NO: 323112 - DNA, 75 bp, synthetic construct
  source 1..75: mol_type = other DNA
caggttacagcagtacgtgatgaactgaaggcagagggagacagtctgcgtggtgagataggtggtgtatacaga

SEQ ID NO: 323113 - DNA, 75 bp, synthetic construct
  source 1..75: mol_type = other DNA
gtgcaccggaaacccgccggattataaatgtttcagatggtgttaaggatagtgatgcggccacaaaaggacaga

SEQ ID NO: 323114 - DNA, 75 bp, synthetic construct
  source 1..75: mol_type = other DNA
gtgggggctggtcgtactgaggtagcgcgctgcctgtttggcgccgacgcctttaccactggcagctttgagctg

SEQ ID NO: 323115 - DNA, 75 bp, synthetic construct
  source 1..75: mol_type = other DNA
cctgggaggccctgactcaggggagagcggacatcattgttggcgcgatgcgcgagccgccatcttccagcgaat

SEQ ID NO: 323116 - DNA, 75 bp, synthetic construct
  source 1..75: mol_type = other DNA
ctgcggctatttaccccgttatctggcgcaacgttttctcgatagtggcgcgttaatcgagaagaaagtggtcgc

SEQ ID NO: 323117 - DNA, 75 bp, synthetic construct
  source 1..75: mol_type = other DNA
gttatgctcgcggaaagcagagactttgctgaacttgtggcaatgaaagccagtgcgctcatgaaagatatgaac

SEQ ID NO: 323118 - DNA, 75 bp, synthetic construct
  source 1..75: mol_type = other DNA
ttttatcaacatcatagcgtgacgcgcctgaagtttatcaatggcgtactcggtggttcatgggatgccctgact

SEQ ID NO: 323119 - DNA, 75 bp, synthetic construct
  source 1..75: mol_type = other DNA
ggaacaagtctttgcggtcgcgcctcatcatccgttagcccaggaagaagaaccgttaaaccgtcgtatcattaa

SEQ ID NO: 323120 - DNA, 75 bp, synthetic construct
  source 1..75: mol_type = other DNA
catcatccgttagcgctggaagaagaaccgttaaatcgacgaatcattaaacgatatcgggcgatagtcgtcggt

SEQ ID NO: 323121 - DNA, 75 bp, synthetic construct
  source 1..75: mol_type = other DNA
cagccgttggtggttaccgtgatgagcaggccattgcggtgggcgtgggctaccgtttcacagagaatgtggcag

SEQ ID NO: 323122 - DNA, 75 bp, synthetic construct
  source 1..75: mol_type = other DNA
gccaaagccgcagccgaagcgcagaaaaaagccgaggcagccgcggcggcactgaagaagaaagcggaagcggca

SEQ ID NO: 323123 - DNA, 75 bp, synthetic construct
  source 1..75: mol_type = other DNA
aggtggcgatcccgcactttgtcaggctgcgttggcagcagctaaacttgcgaagatcccgaaaccaccaagcca

SEQ ID NO: 323124 - DNA, 75 bp, synthetic construct
  source 1..75: mol_type = other DNA
ttaagattaattatcgccctgtgttcgagggattcggggctaatctaccaatgaaatttggaaatctttatttgg

SEQ ID NO: 323125 - DNA, 75 bp, synthetic construct
  source 1..75: mol_type = other DNA
atgagttatccctggagcgtgagcgccagctggaaatacaggaacggacactggatggcccttcgctgggatggt

SEQ ID NO: 323126 - DNA, 75 bp, synthetic construct
  source 1..75: mol_type = other DNA
ctgaaaacgcgttttttcccgcagtgctggaagaacaatacaaaaaggctggaacattcccggatgatgccaggg

SEQ ID NO: 323127 - DNA, 75 bp, synthetic construct
  source 1..75: mol_type = other DNA
aaaaagccgaggcagccgcggcggcactgaagaagaaagcggaagcggcagaagcagctgcagctgaagcaagaa

SEQ ID NO: 323128 - DNA, 75 bp, synthetic construct
  source 1..75: mol_type = other DNA
aagtgtgagtctggggcatgatgcacttattgctgactctgaatgggggactgttgcaggaaaagcagcgtcact

SEQ ID NO: 323129 - DNA, 75 bp, synthetic construct
  source 1..75: mol_type = other DNA
tcagtagctggccgttcgtctggtgacataagaaatgtatggttggtgggtgataattcttttttattagattca

SEQ ID NO: 323130 - DNA, 75 bp, synthetic construct
  source 1..75: mol_type = other DNA
cggcgcaagcctgacggaagtgatattacttaaatcaatgttcagaatgccgatgatagctgcattcctgacggt

SEQ ID NO: 323131 - DNA, 75 bp, synthetic construct
  source 1..75: mol_type = other DNA
tctgaacaacatcattgcaagcgatcctgatgcctcagaatcatgcgattattgtgactccgaagagatgacgat

SEQ ID NO: 323132 - DNA, 75 bp, synthetic construct
  source 1..75: mol_type = other DNA
gctgtcgaccgaacccaatttcgagaacgatgtctgtgaaacccattcgtgggggatgctggtgcgttcgcggga

SEQ ID NO: 323133 - DNA, 75 bp, synthetic construct
  source 1..75: mol_type = other DNA
cacgctggattccgtaagcgtcccggaactgtcgctacgcctgactggtaatgaccttgttgcgatgcgccctta

SEQ ID NO: 323134 - DNA, 75 bp, synthetic construct
  source 1..75: mol_type = other DNA
gagctggtactcccatttgaagatgaatactctgcaatgagtttctgggatgaagtcggggtgacattaatatat

SEQ ID NO: 323135 - DNA, 75 bp, synthetic construct
  source 1..75: mol_type = other DNA
ctgaattgtcgctttcaagaattgtgcctgagcagattgctgtcagcctgagagtagcgaaaggtgatgaaaaaa

SEQ ID NO: 323136 - DNA, 75 bp, synthetic construct
  source 1..75: mol_type = other DNA
ggaaaacgatatgcatggcaaactcagcttcattgagcgggcgctggggatcaacaaggcgcgggaactttacca

SEQ ID NO: 323137 - DNA, 75 bp, synthetic construct
  source 1..75: mol_type = other DNA
gggctgatgagtcaggagctgaacgttgattacaacctgctgttgctggacgtcgatccctctgagcaaaaacgc

SEQ ID NO: 323138 - DNA, 75 bp, synthetic construct
  source 1..75: mol_type = other DNA
ccagattactcatgagctggcggacctgccgccggagttgtgggcgtaccttaaagagcatcgtttcttcgcgat

SEQ ID NO: 323139 - DNA, 75 bp, synthetic construct
  source 1..75: mol_type = other DNA
tgatcgtccagatttctaaaacttctgagggtcgccggattaaagaaatccgcgagattcagggttatgaaaacg

SEQ ID NO: 323140 - DNA, 75 bp, synthetic construct
  source 1..75: mol_type = other DNA
gcaaggccgccgtatcaaagagattcgtgaagtgcagggctttgaaggtggggattatgtttcccgccttatcgc

SEQ ID NO: 323141 - DNA, 75 bp, synthetic construct
  source 1..75: mol_type = other DNA
actccgatattcagacgctgcctgacctgtcctgttacgtcacgctgcccgggccgtatccggccgtgaaactgg

SEQ ID NO: 323142 - DNA, 75 bp, synthetic construct
  source 1..75: mol_type = other DNA
tcctggcgatgggcgagaaccgtaaccggcgtgtgtggatcttcgctgacgaacttcccacgctgcacaagctgc

SEQ ID NO: 323143 - DNA, 75 bp, synthetic construct
  source 1..75: mol_type = other DNA
tatcccgatgggtaccaaagaagacccgttctggcagggctccggtcgtactatctttgccgaaggcgcgtacct

SEQ ID NO: 323144 - DNA, 75 bp, synthetic construct
  source 1..75: mol_type = other DNA
agcttcatcgaacgtgcgctggggatcaataaagcacgggaactgtaccaacaggtggaagattgccagctttcg

SEQ ID NO: 323145 - DNA, 75 bp, synthetic construct
  source 1..75: mol_type = other DNA
agcccgaaaattcggtggctgctatgtattcgggattcagtcctacgcccagctggaagatatctatggcgtgaa

SEQ ID NO: 323146 - DNA, 75 bp, synthetic construct
  source 1..75: mol_type = other DNA
taggtcatcaggggaaacaacaaagtgaagatgaagtgacgggaggccgtcagctatcagaaaagccaaaagaag

SEQ ID NO: 323147 - DNA, 75 bp, synthetic construct
  source 1..75: mol_type = other DNA
catgaaggcgctatttttgacatgggtgacgtgcaaagcgaagaccacgcgctggaacccgcacaaaaccgtctg

SEQ ID NO: 323148 - DNA, 75 bp, synthetic construct
  source 1..75: mol_type = other DNA
ccggctactgtgctggggatcccttatgttattgatcaggctattgacgggattggtaccggaaaaaaattcatt

SEQ ID NO: 323149 - DNA, 75 bp, synthetic construct
  source 1..75: mol_type = other DNA
agatgaaagaacaccgtgatggagtacagatcgaagagaatggtattatcgtaggtctgcgacaaagaacagaac

SEQ ID NO: 323150 - DNA, 75 bp, synthetic construct
  source 1..75: mol_type = other DNA
gtgggcgtgttgactcgcaggaaaccggcatcagcactcgctggcatcagcatgtgcaaccgtttagtgaacaaa

SEQ ID NO: 323151 - DNA, 75 bp, synthetic construct
  source 1..75: mol_type = other DNA
aagttgattgctgcggatattgccgaacttaacccggacctggaccgcgataatttaactgcgaaagttgccgct

SEQ ID NO: 323152 - DNA, 75 bp, synthetic construct
  source 1..75: mol_type = other DNA
cggacctggaccgcgataatttaactgcgaaagttgccgctcgcctggtgaccagtattgtccggcgggggaaaa

SEQ ID NO: 323153 - DNA, 75 bp, synthetic construct
  source 1..75: mol_type = other DNA
tctggcttgtggtatcgatcctgagaaaagcaccatttttgttcagtcccacgtaccggaacatgcgcagttagg

SEQ ID NO: 323154 - DNA, 75 bp, synthetic construct
  source 1..75: mol_type = other DNA
gatgtggtgacggaagcggtgcgtctgctggaagagtgtccactgtttaacgccggaattggcgccgtctttacg

SEQ ID NO: 323155 - DNA, 75 bp, synthetic construct
  source 1..75: mol_type = other DNA
ttgggacatcgtgccgccatttactgccgggtttcaacagcggatcagtcttgtgaacgccaggaatttgatctg

SEQ ID NO: 323156 - DNA, 75 bp, synthetic construct
  source 1..75: mol_type = other DNA
atggatcgcatcgaatatttgaaatggcttatagctgaatcaccttctacaactcagcaacttatggcatggctt

SEQ ID NO: 323157 - DNA, 75 bp, synthetic construct
  source 1..75: mol_type = other DNA
tgtagttgttaaacatacaagggagataactgtatctgattgtgtgattccttcttggtatataaagtcttctca

SEQ ID NO: 323158 - DNA, 75 bp, synthetic construct
  source 1..75: mol_type = other DNA
ctggcctcgttgttgggagccgttacccctttctgtagttgctcaacaattccaatgctacgagggttgttgtcg

SEQ ID NO: 323159 - DNA, 75 bp, synthetic construct
  source 1..75: mol_type = other DNA
ggcgacgacattatggtgcagaccaccgccttgcaggtgagcgaccagaccattaacggtcgcgccacgctggac

SEQ ID NO: 323160 - DNA, 75 bp, synthetic construct
  source 1..75: mol_type = other DNA
attaacggtcgcgccacgctggacgacgcctgtaccaccgccgatctccactttaccgatgccgcaggcgatgac

SEQ ID NO: 323161 - DNA, 75 bp, synthetic construct
  source 1..75: mol_type = other DNA
gctgctcaccgccagcgccctgaaaacggctgtcggcacgcccgaacgcttcgccagcggccggcatctgagcgc

SEQ ID NO: 323162 - DNA, 75 bp, synthetic construct
  source 1..75: mol_type = other DNA
aaaggaacttcctgacccatagtgaaatcgaatcactccttaaagcagcaaataccgggcctcatgctgcacgta

SEQ ID NO: 323163 - DNA, 75 bp, synthetic construct
  source 1..75: mol_type = other DNA
tttgcagcaattgcttgggcaaccggtggtgatagccaatgatggtaactgtttcgcgctatcagaagcttgcga

SEQ ID NO: 323164 - DNA, 75 bp, synthetic construct
  source 1..75: mol_type = other DNA
aggtggatttctcgattaatccggcggattacggtatcccgccgggtgattacgacgtctcggtggtgaccaaca

SEQ ID NO: 323165 - DNA, 75 bp, synthetic construct
  source 1..75: mol_type = other DNA
gtggatgaatgacgaccaacgccgtcgaatgcaggatattgccgaccgcctcggacgtggtctggatgagattga

SEQ ID NO: 323166 - DNA, 75 bp, synthetic construct
  source 1..75: mol_type = other DNA
ctgctcgatcagcaaattccaccacgcggatttctggcattattacgtaagcaattgattgttatgcgtcgttat

SEQ ID NO: 323167 - DNA, 75 bp, synthetic construct
  source 1..75: mol_type = other DNA
ctggatgctggatggtagaggcggcgttaaaccgctggaaaatacagatgtgattgatgaagcgcatccctgctg

SEQ ID NO: 323168 - DNA, 75 bp, synthetic construct
  source 1..75: mol_type = other DNA
agccctggccaacaaactggtgcggatctgctgggccgtgtggtgccatgagcggcgcttcaatggcaattggca

SEQ ID NO: 323169 - DNA, 75 bp, synthetic construct
  source 1..75: mol_type = other DNA
ccaagtccgtttaccaagttgccgagagtgtccgttccggccaggtggtgcagcgcaagcggctgaaccgagagg

SEQ ID NO: 323170 - DNA, 75 bp, synthetic construct
  source 1..75: mol_type = other DNA
agatttgtgctgccatgaatcatgccttagtggaagctctcgatggtgtggcaattttcgatcctcaaaaaataa

SEQ ID NO: 323171 - DNA, 75 bp, synthetic construct
  source 1..75: mol_type = other DNA
atgggcagaagagggatgcgagtggttgtttatatccagaaagagcgcttcactgtcacgccagcagttctggaa

SEQ ID NO: 323172 - DNA, 75 bp, synthetic construct
  source 1..75: mol_type = other DNA
agtcatctcgcgattactgaatgccaaggtagatgttaattctgcgacgattaccagtcaggagatacctgaagg

SEQ ID NO: 323173 - DNA, 75 bp, synthetic construct
  source 1..75: mol_type = other DNA
gccgtaaagcgttacaagacatcagaaatgctgcgctttatttttgctaccattgcatacgatcccgatccagat

SEQ ID NO: 323174 - DNA, 75 bp, synthetic construct
  source 1..75: mol_type = other DNA
gacgatgtgcgctacttaggcggcagcgttcatgccacggcgggtacgctccgtcagtccatcgagaatcgctaa

SEQ ID NO: 323175 - DNA, 75 bp, synthetic construct
  source 1..75: mol_type = other DNA
gccgccgaatgtgacggcgaggtggttcgtcccaaagaaccgaactggacagcctgggcaaacgaaattcgcctg

SEQ ID NO: 323176 - DNA, 75 bp, synthetic construct
  source 1..75: mol_type = other DNA
ggggactttaccgatagtgctgagctacatcttgttctgcacgatatatcaggcaatccgctcaaagtttcttaa

SEQ ID NO: 323177 - DNA, 75 bp, synthetic construct
  source 1..75: mol_type = other DNA
cgaacgtcgcgaatgctgaaatcacgctggcagcctcgaaggatccggtgattgccgacaataacgatctcacga

SEQ ID NO: 323178 - DNA, 75 bp, synthetic construct
  source 1..75: mol_type = other DNA
aacaattgcccgtgctttagcagttgcttatgcaaaggctggctggaatgtatgcctgatcgatatggatgtgct

SEQ ID NO: 323179 - DNA, 75 bp, synthetic construct
  source 1..75: mol_type = other DNA
aaccaaaatattgctgcctatgctgcgttatcccaggccgagaacagcgccactaacagcgactatctgtacacc

SEQ ID NO: 323180 - DNA, 75 bp, synthetic construct
  source 1..75: mol_type = other DNA
acgtaccacggagcgttatacctgggatagcgatcaccaacctgattacaacgatattttgtcgcaacgtattca

SEQ ID NO: 323181 - DNA, 75 bp, synthetic construct
  source 1..75: mol_type = other DNA
tagtgtggctcaacagttctatgactaccgcattcaacatcgcagcaatgacattaccgctctgcgcccctattt

SEQ ID NO: 323182 - DNA, 75 bp, synthetic construct
  source 1..75: mol_type = other DNA
tctcccctccgctttaagagtatcacaaagcatccagcaacagcacttccatatcatgtaagacacatgggagta

SEQ ID NO: 323183 - DNA, 75 bp, synthetic construct
  source 1..75: mol_type = other DNA
caggggtttttatctgggatggagttagagttcatgataatgtgtttattggtccttgcgttgcatttactaatg

SEQ ID NO: 323184 - DNA, 75 bp, synthetic construct
  source 1..75: mol_type = other DNA
aacgtgatcggcgacccgctgcgattacagcaaatcatcactaacctggtggggaatgcggtaatgactccaact

SEQ ID NO: 323185 - DNA, 75 bp, synthetic construct
  source 1..75: mol_type = other DNA
tgcaagccaaaggcttcagcatgatggatgttccggttggccgtacttccgcaaatgccattaccgctactctgc

SEQ ID NO: 323186 - DNA, 75 bp, synthetic construct
  source 1..75: mol_type = other DNA
caaaccgataaattgattgccgatatgcaggccagaggcttcagcatgatggatgttccggtaggccgtacttct

SEQ ID NO: 323187 - DNA, 75 bp, synthetic construct
  source 1..75: mol_type = other DNA
gcttatctaccgatgcgctggtcattgatatgtcgaccatccatccgctgcaaaccgataaattgattgccgata

SEQ ID NO: 323188 - DNA, 75 bp, synthetic construct
  source 1..75: mol_type = other DNA
ataaaatgccgggcagagacggcgacactcttgcccggctgacaacgctgccgcaggcgctggccgatcacgcac

SEQ ID NO: 323189 - DNA, 75 bp, synthetic construct
  source 1..75: mol_type = other DNA
cagacgcagtggcaaaccacctggcaacagcattttgccaccgcgccctggatgatgcgtaactggctgatttac

SEQ ID NO: 323190 - DNA, 75 bp, synthetic construct
  source 1..75: mol_type = other DNA
aaatgccgcagagctttccgcgcgcgatgcgatagtaaaccaggtgattttgagtaccctcacgctccgtgattt

SEQ ID NO: 323191 - DNA, 75 bp, synthetic construct
  source 1..75: mol_type = other DNA
tccgtaccggcttaccctgattccggcgtggagctggcccgccgttccctgtatgagcagcaccccgaaaaaatg

SEQ ID NO: 323192 - DNA, 75 bp, synthetic construct
  source 1..75: mol_type = other DNA
atgaaaacaattgattttgaaatccgcacctccgatctgagcgccagtaacaaaaagctggtgggctatgccgtg

SEQ ID NO: 323193 - DNA, 75 bp, synthetic construct
  source 1..75: mol_type = other DNA
aatcacgataacgtcgatgcctgcttatcccgaatccggcgtggagattgcccaccgttcgttgtttgcacagca

SEQ ID NO: 323194 - DNA, 75 bp, synthetic construct
  source 1..75: mol_type = other DNA
tggcatcgcccttgatgtcgccaaccagttgcatgtgccaatgccgctgggggccgcctcacgggaggtttatag

SEQ ID NO: 323195 - DNA, 75 bp, synthetic construct
  source 1..75: mol_type = other DNA
cgaagccctgaatcttcccttcgatgttgccgtcaaagtgatgagcggtaccgccgccggtaaaggtcacttcac

SEQ ID NO: 323196 - DNA, 75 bp, synthetic construct
  source 1..75: mol_type = other DNA
tttcggcagaagccgccgttttgtgcgaagccctgaatcttcccttcgatgttgccgtcaaggtgatgagcggta

SEQ ID NO: 323197 - DNA, 75 bp, synthetic construct
  source 1..75: mol_type = other DNA
atgcgctgctgattcgccagcaaattcagtcgttatgtgccgcagagccgctgctgtcagcgttttcgctgctga

SEQ ID NO: 323198 - DNA, 75 bp, synthetic construct
  source 1..75: mol_type = other DNA
tcgccagcgttgatcaggcgaagctgccatttaatttagtgctacaggggaatgcaggagcgcctgccggaacca

SEQ ID NO: 323199 - DNA, 75 bp, synthetic construct
  source 1..75: mol_type = other DNA
ccgcaatcgttccctgcaaaattacatacaagttggcgaaagaagttaaggagcttcgaaaagacagtgccgaat

SEQ ID NO: 323200 - DNA, 75 bp, synthetic construct
  source 1..75: mol_type = other DNA
ccgaaatccgtcaacgggcagttcaaaaggattatctggctgaagtggctaattacagtaacgaccgctgggaag

SEQ ID NO: 323201 - DNA, 75 bp, synthetic construct
  source 1..75: mol_type = other DNA
ataaaaatcaaattgtcagatataagggtcgagtattgcatacgcaaaatttctcggccctttgtgcatctgatc

SEQ ID NO: 323202 - DNA, 75 bp, synthetic construct
  source 1..75: mol_type = other DNA
cagatagaacgagaaagcttgtgaaggagagggtcggtagctgggaatattatcagaagttgcttgccgatgatg

SEQ ID NO: 323203 - DNA, 75 bp, synthetic construct
  source 1..75: mol_type = other DNA
gatctaggcttgagagaataatgatcgaatttaaggacttgatcgcaatgatagtacaaaaaccaggtagtaatg

SEQ ID NO: 323204 - DNA, 75 bp, synthetic construct
  source 1..75: mol_type = other DNA
ctgaatttgtgcgcaaatttattgcacaacatcctggttcgcctttgtatgtccgcaaggtatggaaaaatgaaa

SEQ ID NO: 323205 - DNA, 75 bp, synthetic construct
  source 1..75: mol_type = other DNA
atgagttttattgaatgttacgaaccggaatatgcgcgcaattttatggcgcaatatcccgattcgcctttatac

SEQ ID NO: 323206 - DNA, 75 bp, synthetic construct
  source 1..75: mol_type = other DNA
gcaatatcccgattcgcctttatacgtccgcaaggtgtggaagaatgagattcgccagagcctggcattgaccga

SEQ ID NO: 323207 - DNA, 75 bp, synthetic construct
  source 1..75: mol_type = other DNA
acggcgtttatcagtcattggtgtcacgcgcttattatcgccttgaaggtgaacacgtaatgatgcgatcacgcc

SEQ ID NO: 323208 - DNA, 75 bp, synthetic construct
  source 1..75: mol_type = other DNA
atgctgcggcgattcgccagcaaattcagtcgttatgtgcggcagagccgctgctttcagcgttttcgctgctga

SEQ ID NO: 323209 - DNA, 75 bp, synthetic construct
  source 1..75: mol_type = other DNA
tttgaacgctggcgagtgagtgaaaatgctgcggcgattcgccagcaaattcagtcgttatgtgcggcagagccg

SEQ ID NO: 323210 - DNA, 75 bp, synthetic construct
  source 1..75: mol_type = other DNA
tgaccgacccgccatatctcgtcggtttccgtgaccgttccgggcgcaccatcgccggcgataaaaccgatgaat

SEQ ID NO: 323211 - DNA, 75 bp, synthetic construct
  source 1..75: mol_type = other DNA
tcacagacccgccatatctcgtcggtttacgtgaccgttccgggcgcaccatcgccggcgataaaaccgatgaat

SEQ ID NO: 323212 - DNA, 75 bp, synthetic construct
  source 1..75: mol_type = other DNA
catcaaaaaagaactggacacaatatatagcgaaagagatatttatctgctgaaattaatcaacaactatcttga

SEQ ID NO: 323213 - DNA, 75 bp, synthetic construct
  source 1..75: mol_type = other DNA
cctggcaaaaggccgtccggcgctgcctcagaagccattacccgacgtgctgggctggaaatattcaggcaatcg

SEQ ID NO: 323214 - DNA, 75 bp, synthetic construct
  source 1..75: mol_type = other DNA
tgcaaccggcctgtaatgaaatgtaccgcgtgctgaaaaaagatgcgctgatggtgagcttctatggctggaacc

SEQ ID NO: 323215 - DNA, 75 bp, synthetic construct
  source 1..75: mol_type = other DNA
gatacatcaaccaaacttgaccaaatagatttactagatgaacactacccgcctatattttgtttatataaagat

SEQ ID NO: 323216 - DNA, 75 bp, synthetic construct
  source 1..75: mol_type = other DNA
tggcgtcaccgggcatggcacgcatctgcctttacggggatttgcaacgatttggccgccgcatcgaccttcgag

SEQ ID NO: 323217 - DNA, 75 bp, synthetic construct
  source 1..75: mol_type = other DNA
ggaatatcagcccgtcttatgaaccgctggcaaatggtgctgtgatccatatcgtgccgggtctggcaggagcca

SEQ ID NO: 323218 - DNA, 75 bp, synthetic construct
  source 1..75: mol_type = other DNA
aaaatatgtttcaagaaaataacaatggttttactgcattattttatggcccgtgtgagttttatggcacattta

SEQ ID NO: 323219 - DNA, 75 bp, synthetic construct
  source 1..75: mol_type = other DNA
cgccttgccgccgtgcaacgggccatgcagcagggggccgcgaatgatgactggtttatgccggaggctgcgtaa

SEQ ID NO: 323220 - DNA, 75 bp, synthetic construct
  source 1..75: mol_type = other DNA
gctgcttgaacagtatcaccgtgccggacagcaacgtctggctgccgtgcaacgggccatgcagcagggggccgc

SEQ ID NO: 323221 - DNA, 75 bp, synthetic construct
  source 1..75: mol_type = other DNA
gtatcaccgtgccggacagcaacgactgaccgccgtgcaacgggccatgcagcagggggccgcgaatgataactg

SEQ ID NO: 323222 - DNA, 75 bp, synthetic construct
  source 1..75: mol_type = other DNA
accgcgtactcaaaaaagacgcgttaatggtgagcttctatggctggaatcgcgtcgatcgctttatgtctgcct

SEQ ID NO: 323223 - DNA, 75 bp, synthetic construct
  source 1..75: mol_type = other DNA
ctgcaaccggcctgtaatgaaatgtaccgcgtgctgaaaaaagacgcgttaatggtgagcttctatggctggaac

SEQ ID NO: 323224 - DNA, 75 bp, synthetic construct
  source 1..75: mol_type = other DNA
caccatcgccggcgataaaaccgatgagtggctgcaaccggcctgtaatgaaatgttccgcgtgctgaaaaaaga

SEQ ID NO: 323225 - DNA, 75 bp, synthetic construct
  source 1..75: mol_type = other DNA
tggaaccgcgtcgatcgctttatggccgcctggaaaaatgcgggattcagcgtggttggccacctggtgtttacc

SEQ ID NO: 323226 - DNA, 75 bp, synthetic construct
  source 1..75: mol_type = other DNA
gcatcgatgttatggcgcgtatccctgataacgccattgatttcatcctcactgacccgccgtatctcgtcgatt

SEQ ID NO: 323227 - DNA, 75 bp, synthetic construct
  source 1..75: mol_type = other DNA
atgaagttaaaacaacaaactgtgcgactttcacgtcgcacattaactgacccgccatatctcgtcggttttcgt

SEQ ID NO: 323228 - DNA, 75 bp, synthetic construct
  source 1..75: mol_type = other DNA
ccggacgccggtatataggtatcgagctgcttgaacagtatcaccgtgccggacagcaacgactgaccgccgtgc

SEQ ID NO: 323229 - DNA, 75 bp, synthetic construct
  source 1..75: mol_type = other DNA
cgactcggcttccgcacctttattcgtactcaggagaaaaacagcggtccgcacggtgacgactttgaacctttt

SEQ ID NO: 323230 - DNA, 75 bp, synthetic construct
  source 1..75: mol_type = other DNA
atcacccgacggaaaagcccgttaccagcctgcaaccactgattgagagcttcacacatccgaacgcgattgtgc

SEQ ID NO: 323231 - DNA, 75 bp, synthetic construct
  source 1..75: mol_type = other DNA
ctggcgataaaaccgatgaatggctgcaaccggcctgtaatgaaatgtaccgcgtactcaaaaaagacgcgctga

SEQ ID NO: 323232 - DNA, 75 bp, synthetic construct
  source 1..75: mol_type = other DNA
gggcaatgttctgcctgttctgtacggtgaactgcgcgtggggtcacgtgtggtctctcaggagatcagcacggc

SEQ ID NO: 323233 - DNA, 75 bp, synthetic construct
  source 1..75: mol_type = other DNA
tgcccgtcttaatgaaccgctggcaaatggtgccgtgatccacgtcgttccgcgtctggcgggtgccaaaagtgg

SEQ ID NO: 323234 - DNA, 75 bp, synthetic construct
  source 1..75: mol_type = other DNA
gcggcgctgattgcggtggcatggtggaaccctgtgggctggctgggggccgcggctgtatcgggtatgtatgca

SEQ ID NO: 323235 - DNA, 75 bp, synthetic construct
  source 1..75: mol_type = other DNA
gcagatcccggcgtttcgtcagaaactgagcgatggctggtatcaggtgcgcattgccgggcgtgatgcaggcga

SEQ ID NO: 323236 - DNA, 75 bp, synthetic construct
  source 1..75: mol_type = other DNA
tttcgccagaaactgaatgagggctggtatcaggtgcgcatttccgggcgtgatgcaggcgaaaatgaattatct

SEQ ID NO: 323237 - DNA, 75 bp, synthetic construct
  source 1..75: mol_type = other DNA
attgccgggcgtgatacaggtgaaaatgaattatctgcccgtcttaatgagccgctggcaaatggtgccgtgatc

SEQ ID NO: 323238 - DNA, 75 bp, synthetic construct
  source 1..75: mol_type = other DNA
ctgatgggcttcggtcaccgcgtgtacaaaaactacgacccgcgcgccaccgtaatgcgtgaaacctgccatgaa

SEQ ID NO: 323239 - DNA, 75 bp, synthetic construct
  source 1..75: mol_type = other DNA
gctgctgttatggcggttgctatatggatgccgggggtaggaattatggcgagcaatctgctgttttctctcggt

SEQ ID NO: 323240 - DNA, 75 bp, synthetic construct
  source 1..75: mol_type = other DNA
ccgtgatccacatcgtaccgcgtctggcgggtgccaaaagtggcggtatttttcaggcagtgctgggtgcggcgc

SEQ ID NO: 323241 - DNA, 75 bp, synthetic construct
  source 1..75: mol_type = other DNA
aaccccccgcacacagacaacggataacggcaaacagaacacctatttctcttcactggataacatggttgccca

SEQ ID NO: 323242 - DNA, 75 bp, synthetic construct
  source 1..75: mol_type = other DNA
gtgtggcgcagatgctggcaccgaaagccaggacgcccacggcagcaagtacagataacggcaaacagaacacct

SEQ ID NO: 323243 - DNA, 75 bp, synthetic construct
  source 1..75: mol_type = other DNA
cctcgctggacaatatgattgctcagggtaatccggtgccggtgccatacggtgaaatgctggttggttcccgac

SEQ ID NO: 323244 - DNA, 75 bp, synthetic construct
  source 1..75: mol_type = other DNA
cagcaatattatgtttgccatggggactgcaatggcgctgggtggggtggcacagatgctggccccgaaggcaaa

SEQ ID NO: 323245 - DNA, 75 bp, synthetic construct
  source 1..75: mol_type = other DNA
cgttatcggtaatcttggggtggccatgatgctgggcggtgtggcgcagatgctggcaccgaaaccgaaaacacc

SEQ ID NO: 323246 - DNA, 75 bp, synthetic construct
  source 1..75: mol_type = other DNA
gacggcgcagtgatacatttgctcccgcggacagccggggcaaaaaacggtggtgtttttcagattgtggccggt

SEQ ID NO: 323247 - DNA, 75 bp, synthetic construct
  source 1..75: mol_type = other DNA
catatattatttgattcgatatttattagggagtgaaaaactaaaaaataaagatatcgatcatgctcaaggtta

SEQ ID NO: 323248 - DNA, 75 bp, synthetic construct
  source 1..75: mol_type = other DNA
cggcgtatttcaggctgtgctgggggcggcgctgattgcggtggcatggtggaaccctgcaggctggctgggtgc

SEQ ID NO: 323249 - DNA, 75 bp, synthetic construct
  source 1..75: mol_type = other DNA
ctgcctttacggggatttccaacgatttggccgccgcatcgatcttcgtgtgaaaacgggggcagaagcaatccg

SEQ ID NO: 323250 - DNA, 75 bp, synthetic construct
  source 1..75: mol_type = other DNA
ctgcctttacggggattttcaacgatttggccgccgcatcgaacttcgtgtgaaaacgggggcagaagccatccg

SEQ ID NO: 323251 - DNA, 75 bp, synthetic construct
  source 1..75: mol_type = other DNA
atctggctgcgccggacatcatcgtacgtaacgaaaaacgtatgctgcaggaagcggtagacgctctgctggata

SEQ ID NO: 323252 - DNA, 75 bp, synthetic construct
  source 1..75: mol_type = other DNA
atgactaacctggaacgccagcagatcctgactgaagagcagtatctggatgcgctggaagagttcggtgatgaa

SEQ ID NO: 323253 - DNA, 75 bp, synthetic construct
  source 1..75: mol_type = other DNA
tgatgcgatcaaaattgctctggcttcgccagacatgatccattcatggtctttcggtgaagttaaaaagccgga

SEQ ID NO: 323254 - DNA, 75 bp, synthetic construct
  source 1..75: mol_type = other DNA
taacgcgggcagctccgacttcctggaaggcgaacaagttgaatactctcgcgtcaagatcgcaaaccgcgaact

SEQ ID NO: 323255 - DNA, 75 bp, synthetic construct
  source 1..75: mol_type = other DNA
taccgcaggtggtaaagatctgcgtccggcactgaaaatcgttgatgctcagggtaacgacgttctgatcccggg

SEQ ID NO: 323256 - DNA, 75 bp, synthetic construct
  source 1..75: mol_type = other DNA
cggataccgcactgaaaacggcgaactctggttacctgacccgtcgtctggttgacgtagcgcaggacctggtgg

SEQ ID NO: 323257 - DNA, 75 bp, synthetic construct
  source 1..75: mol_type = other DNA
taccttgttagttatactgcaactggtatttggtaaaaaagtggcggcaatccgtcaggctgaagcaagtaaata

SEQ ID NO: 323258 - DNA, 75 bp, synthetic construct
  source 1..75: mol_type = other DNA
agcatgtttattcctcgcctgccgatttatgaccgtaactggatcgccgcacctatcggcgcagtagctggcgca

SEQ ID NO: 323259 - DNA, 75 bp, synthetic construct
  source 1..75: mol_type = other DNA
aggggcaactgaacagtctgtcaccgtggcagccggggatcagtccgccatcagagccgtatcgttttcgctttc

SEQ ID NO: 323260 - DNA, 75 bp, synthetic construct
  source 1..75: mol_type = other DNA
ccccgactgcgcacatctggttcctgaaatcactgccgtcccgtatcggcctgctgctcgatatgccgctgcgcg

SEQ ID NO: 323261 - DNA, 75 bp, synthetic construct
  source 1..75: mol_type = other DNA
tcctgcgggaaagccattgcgggtattgccggactgctgctgattatcggcggtggcggcgcattcaagcaggtg

SEQ ID NO: 323262 - DNA, 75 bp, synthetic construct
  source 1..75: mol_type = other DNA
atgatgtcacgaaatataaaaatggcaacggatgcgcagaactggttacaggcgcacgggagtcacgtaaatgaa

SEQ ID NO: 323263 - DNA, 75 bp, synthetic construct
  source 1..75: mol_type = other DNA
ctgcaaactgaaaccgttattaaccgtgacggtcaggaagagaagcaggtatctttcaacagcatctacatgatg

SEQ ID NO: 323264 - DNA, 75 bp, synthetic construct
  source 1..75: mol_type = other DNA
cagcttaccaacaatatcagtggttatggtaatgttcgcaagacgggagcaggtgcactgaacattagcgataac

SEQ ID NO: 323265 - DNA, 75 bp, synthetic construct
  source 1..75: mol_type = other DNA
ggtaatggtcttggtggctcaggaagtagcggaggtgcagggttaagcggggatgatattatagttgataattac

SEQ ID NO: 323266 - DNA, 75 bp, synthetic construct
  source 1..75: mol_type = other DNA
taatcgctggcgtgacaacagtagtcagctgagaacccgggggaatagctacgttgtgttaatagggggagatat

SEQ ID NO: 323267 - DNA, 75 bp, synthetic construct
  source 1..75: mol_type = other DNA
tggtgtttgatgcaaatggcaaaacaggaaatgccgctgacatgagtgcccgtattactggtaccggcgacctgg

SEQ ID NO: 323268 - DNA, 75 bp, synthetic construct
  source 1..75: mol_type = other DNA
caccagaagtagcattccgggctgatgcaggcattcaacttggagagcatggataccgcaatgcatctgctatgt

SEQ ID NO: 323269 - DNA, 75 bp, synthetic construct
  source 1..75: mol_type = other DNA
aaagggttcacggtatctctggaagcaggatattcatggaaggctggagagtttaccgacaattacaagggaagt

SEQ ID NO: 323270 - DNA, 75 bp, synthetic construct
  source 1..75: mol_type = other DNA
aaactttacgctaaataataatggtagtgtttggggaggagatggatataatggtggagttgctgttagtggcaa

SEQ ID NO: 323271 - DNA, 75 bp, synthetic construct
  source 1..75: mol_type = other DNA
tcaccaaagcgtctctggcaaccgagtccttcatctccgcggcatcgttccaggaaaccactcgcgtgctgaccg

SEQ ID NO: 323272 - DNA, 75 bp, synthetic construct
  source 1..75: mol_type = other DNA
gtcgttcatctctgcggcatcgttccaggagaccactcgcgtactgaccgaagcagctgttgcgggcaaacgcga

SEQ ID NO: 323273 - DNA, 75 bp, synthetic construct
  source 1..75: mol_type = other DNA
attatggagcataaatcaggggttgcccgttcagtatggacggcccgcctgaatggttgtcagataatctggaga

SEQ ID NO: 323274 - DNA, 75 bp, synthetic construct
  source 1..75: mol_type = other DNA
attttttctggagggtataattcattagatatttattcagattctgtgattaatggtgatattaaactagctagt

SEQ ID NO: 323275 - DNA, 75 bp, synthetic construct
  source 1..75: mol_type = other DNA
cgtctgtgtactggcctatagcacgccagatctcagtatgaacggcaaaatgatctatgcagcaattacttacac

SEQ ID NO: 323276 - DNA, 75 bp, synthetic construct
  source 1..75: mol_type = other DNA
accggatgacgatcttcagtatgcgctgactttatccgggattctgtcttcagaaaataatgacagtgcagataa

SEQ ID NO: 323277 - DNA, 75 bp, synthetic construct
  source 1..75: mol_type = other DNA
tgctgaaaaaagatgcgctgatggtcagcttctacggctggaaccgcgtcgatcgctttatggccgcctggaaaa

SEQ ID NO: 323278 - DNA, 75 bp, synthetic construct
  source 1..75: mol_type = other DNA
cgcgtcgatcgctttatggccgcctggaaaaatgcgggattcggcgttgttggtcacctggtcttcaccaaaaac

SEQ ID NO: 323279 - DNA, 75 bp, synthetic construct
  source 1..75: mol_type = other DNA
accgacccgccatatctcgtcggttttcgtgaccgtcaggggcgtaccatcgccggcgataaaaccgatgaatgg

SEQ ID NO: 323280 - DNA, 75 bp, synthetic construct
  source 1..75: mol_type = other DNA
cccgctctgcatgcttcggtaggctacaggcgacggaacgcctggttttactacttcctttacatgaagttaaaa

SEQ ID NO: 323281 - DNA, 75 bp, synthetic construct
  source 1..75: mol_type = other DNA
ggaaaaatgcgggattcagcgtggttggacacctggtcttcaccaaaaactacacatcgaaggccgcatatgtgg

SEQ ID NO: 323282 - DNA, 75 bp, synthetic construct
  source 1..75: mol_type = other DNA
ggacagcaacgtctggccgccgtccggcgtgccatgcagtacccggccgctaacgacgagttcccggaggccgcg

SEQ ID NO: 323283 - DNA, 75 bp, synthetic construct
  source 1..75: mol_type = other DNA
gcgtgcgagttatggccacgtttccggacaatgctgtcgatttcatcctcaccgacccgccgtatctcgtcggtt

SEQ ID NO: 323284 - DNA, 75 bp, synthetic construct
  source 1..75: mol_type = other DNA
cctcagaagccattgcccgacgtgctgggctggaaatattcaggcaatcgtcatcacccgacggaaaagcctgtt

SEQ ID NO: 323285 - DNA, 75 bp, synthetic construct
  source 1..75: mol_type = other DNA
tctaactcattccagcgtgtcggattatcgttcgaaagggagtgtcagaggctatagcgcagggctgtatgccac

SEQ ID NO: 323286 - DNA, 75 bp, synthetic construct
  source 1..75: mol_type = other DNA
gctatcgccacgaatgcgcctacatcctggcaaaaggccgtccacgtctgccacaaaaaccgctgccggacgtgc

SEQ ID NO: 323287 - DNA, 75 bp, synthetic construct
  source 1..75: mol_type = other DNA
tccacctgcgtagccgcattgcagtccggaaggcgctatatcggtatcgaactgcttgagcagtaccaccgggca

SEQ ID NO: 323288 - DNA, 75 bp, synthetic construct
  source 1..75: mol_type = other DNA
ctgcaaccggcctgcaacgagatgtaccgcgtcctcaaaaaagacgccctgatggtcagcttttatggctggaac

SEQ ID NO: 323289 - DNA, 75 bp, synthetic construct
  source 1..75: mol_type = other DNA
tgaaatgtaccgcgtactcaaaaaagacgcgctgatggtcagcttctacggctggcaccgtattgaccgctttat

SEQ ID NO: 323290 - DNA, 75 bp, synthetic construct
  source 1..75: mol_type = other DNA
gagaattttaattgtggagttctgtctcctgcgccgggtgggcgtatgtcaaaaccgcagggttttatgttgaat

SEQ ID NO: 323291 - DNA, 75 bp, synthetic construct
  source 1..75: mol_type = other DNA
aatttagaataaaaaacaaaactcatggggttatgctttttatatctatagcaatgcttccttcagtccttgggt

SEQ ID NO: 323292 - DNA, 75 bp, synthetic construct
  source 1..75: mol_type = other DNA
gttttattcttactgcattcagtgccagtgccggacgcataactatgagtaacccagagcagacgaccaccgcaa

SEQ ID NO: 323293 - DNA, 75 bp, synthetic construct
  source 1..75: mol_type = other DNA
actatcttattagcactttcccaagcccattatatttgggtttgataaatgcatcatcagaagatattgcattaa

SEQ ID NO: 323294 - DNA, 75 bp, synthetic construct
  source 1..75: mol_type = other DNA
acttggcacttttttcaattcataagaaatatcctattcgtacattcctttctgtattaattgctagtatattca

SEQ ID NO: 323295 - DNA, 75 bp, synthetic construct
  source 1..75: mol_type = other DNA
tttttggctctgttcagagagttgccgatttttatgggataacccgtgaagctatatacatgtggcgcaaacgtc

SEQ ID NO: 323296 - DNA, 75 bp, synthetic construct
  source 1..75: mol_type = other DNA
aagtcagagtgttaatatcaaaagtaataatgcaaataactggtatctgaccattatcgatgaccacggcaacta

SEQ ID NO: 323297 - DNA, 75 bp, synthetic construct
  source 1..75: mol_type = other DNA
cctggcaaagggcagtccggcccggccccgtaaccctctgccggatgtgctgggctggaaatattcaggcaatcg

SEQ ID NO: 323298 - DNA, 75 bp, synthetic construct
  source 1..75: mol_type = other DNA
gtgggctatcgccacgaatgcgcctacatcctggcaaaaggccgtccacgtctgccacaaaacccgctgccggac

SEQ ID NO: 323299 - DNA, 75 bp, synthetic construct
  source 1..75: mol_type = other DNA
tgacgggagatacaacttacagcgcgatgtttacctcttacaccacagaacaacagctgacgccgtgctccgtga

SEQ ID NO: 323300 - DNA, 75 bp, synthetic construct
  source 1..75: mol_type = other DNA
ggcggtggctactgcccggactacggaccggtaacgggagatgcaacttacagcgcgatgttaatcaccgccagt

SEQ ID NO: 323301 - DNA, 75 bp, synthetic construct
  source 1..75: mol_type = other DNA
aatgaataatattcgttgggagttatacattaaaagaaaagaacaaagactttccagtaacaaagagacaatcaa

SEQ ID NO: 323302 - DNA, 75 bp, synthetic construct
  source 1..75: mol_type = other DNA
ccggcatcctcaccagcaccttcaaaccggtggtggcgaaaatgtccgaagtctacggcattaacggcgcaattt

SEQ ID NO: 323303 - DNA, 75 bp, synthetic construct
  source 1..75: mol_type = other DNA
ggaaccctgcaggttggttgggggctgccgcaattacaggaatgtatggtgcgggggccagtatggtgctcggtg

SEQ ID NO: 323304 - DNA, 75 bp, synthetic construct
  source 1..75: mol_type = other DNA
cggtggtggacgccattgaagcccgctttaaagccctcggcgcgcccgtggaattaatcaaagtacacaacacac

SEQ ID NO: 323305 - DNA, 75 bp, synthetic construct
  source 1..75: mol_type = other DNA
gctgattgccgttacgttgtttattttcggctattccatgtggacgaccattatctgcaccgcgattctggtttc

SEQ ID NO: 323306 - DNA, 75 bp, synthetic construct
  source 1..75: mol_type = other DNA
ggctggcgtgcggcgctgaagatttgtctggtgatggggatgatcgaaatcttcggctgcgtctgggcggtgaaa

SEQ ID NO: 323307 - DNA, 75 bp, synthetic construct
  source 1..75: mol_type = other DNA
ttatctgtaccgcgattctggtttcgctctactggggcattacctccaacatgatgtacaagccgactcaggaag

SEQ ID NO: 323308 - DNA, 75 bp, synthetic construct
  source 1..75: mol_type = other DNA
gatttatggccctgacaaacgggccacaccgcccctggatgatgatctgatagtgaatttatgcaccagtgaacg

SEQ ID NO: 323309 - DNA, 75 bp, synthetic construct
  source 1..75: mol_type = other DNA
ccttgacgactggacggagaatctgaaacggaaatcagaaaaagagctggaggaatggatcatcaaccgtcagaa

SEQ ID NO: 323310 - DNA, 75 bp, synthetic construct
  source 1..75: mol_type = other DNA
cagaggcagagcgcagcactgacggatctgatggatcagtacgtgctcctggcataccgcacaacggttgacgat

SEQ ID NO: 323311 - DNA, 75 bp, synthetic construct
  source 1..75: mol_type = other DNA
gtgatgcaggcgaaaatgaattatctgcccgtcttaatgaaccgctggcaaatggtgccgtgatccacgtcgttc

SEQ ID NO: 323312 - DNA, 75 bp, synthetic construct
  source 1..75: mol_type = other DNA
gaaaaaccggagattgccatcgtaccccagagcctgcaccggctgatttatggccctgacaaacgggccacgccg

SEQ ID NO: 323313 - DNA, 75 bp, synthetic construct
  source 1..75: mol_type = other DNA
tcagaatgacgcaatggcctttggcagccaggcactggcgaccgcattcaacctggattttgtgcactatcgttc

SEQ ID NO: 323314 - DNA, 75 bp, synthetic construct
  source 1..75: mol_type = other DNA
tgaaactcaccggtatgagcgcctggatggggatggcggactggtcgattctggcgccgccaatgatgcagggct

SEQ ID NO: 323315 - DNA, 75 bp, synthetic construct
  source 1..75: mol_type = other DNA
gggttaccggtcaatgggccgcgcgaaatgtccgcgcaggcgtatttaccgcatatgctgcgtgacaagaaagtc

SEQ ID NO: 323316 - DNA, 75 bp, synthetic construct
  source 1..75: mol_type = other DNA
ggtcgctgcgggtatggtgatggcggcgcggacgtcggaacgtctcgggcagtttagttctgccgaaacgcagcg

SEQ ID NO: 323317 - DNA, 75 bp, synthetic construct
  source 1..75: mol_type = other DNA
gcgcggacgtcggaacgtctcgggcagttcagttctgccgaaacgcagcgtattataaccctgctcacgcgggct

SEQ ID NO: 323318 - DNA, 75 bp, synthetic construct
  source 1..75: mol_type = other DNA
attgcggtatgggcggtgatttacccgcttattgtctggtggctaatgtatggtggttttcttggtcttgagcga

SEQ ID NO: 323319 - DNA, 75 bp, synthetic construct
  source 1..75: mol_type = other DNA
gtggctgatgtgggaattgattccaccgttgctgaactgggcttttttgcaggctaactgggttgggtcaacccg

SEQ ID NO: 323320 - DNA, 75 bp, synthetic construct
  source 1..75: mol_type = other DNA
tgttgggtcttcatccacgaacgatttggtcagtttatgtatgggctttacccacacgaccaacgctggcgaatt

SEQ ID NO: 323321 - DNA, 75 bp, synthetic construct
  source 1..75: mol_type = other DNA
tgttgaccggccacatcatgttccagcaggccgggctgattgccgttacgctgtttatcttcggctactccatgt

SEQ ID NO: 323322 - DNA, 75 bp, synthetic construct
  source 1..75: mol_type = other DNA
ccatcgggcaactaatagcggttggtattctggtcgcctgcggttccgcgattctgatcattcctggttttatcc

SEQ ID NO: 323323 - DNA, 75 bp, synthetic construct
  source 1..75: mol_type = other DNA
tgggtagggtacgcggtgctgctggcactggcgctgaacatttgttacgtgctgctgcgtcgtattaccggtatt

SEQ ID NO: 323324 - DNA, 75 bp, synthetic construct
  source 1..75: mol_type = other DNA
agcgcgaatccggcttacgtgctttactgaatctggggcacacctttggtcatgccattgaaactgaaatgggtt

SEQ ID NO: 323325 - DNA, 75 bp, synthetic construct
  source 1..75: mol_type = other DNA
ctggaaaatggtgccgtgatccacatcgtaccgcgtctggcgggtgctaaaagtggcggtatttttcaggcagtg

SEQ ID NO: 323326 - DNA, 75 bp, synthetic construct
  source 1..75: mol_type = other DNA
atctcccagcgcctgatccctggtgcggtcctggcgattgactgtgcggctatttatagcttcgcgccgaacgcc

SEQ ID NO: 323327 - DNA, 75 bp, synthetic construct
  source 1..75: mol_type = other DNA
tgacttaatgaccggaaacaaccttgacgactggacgaaaaacctgaaacacaaatcagaaaaagatctggagca

SEQ ID NO: 323328 - DNA, 75 bp, synthetic construct
  source 1..75: mol_type = other DNA
aatgcagcggattgggtgttaaatagcctggcagacctgccgcaagcgataaaaaagcagcaaaaaccggcgtaa

SEQ ID NO: 323329 - DNA, 75 bp, synthetic construct
  source 1..75: mol_type = other DNA
gggtgagaattgccgaacatgcacagaagtttcccggacagatctccggtggtcagcagcaacgcgttgctatag

SEQ ID NO: 323330 - DNA, 75 bp, synthetic construct
  source 1..75: mol_type = other DNA
acgctggatgtggaggaggaagagcattacgacaacaccgcagcggaaatccgtcaggtggatgcgcatctgaag

SEQ ID NO: 323331 - DNA, 75 bp, synthetic construct
  source 1..75: mol_type = other DNA
ccataatctgacgcccgggtgggtgtcattcaatggtgaaaaaccggagattgccattgttccccagagcctgca

SEQ ID NO: 323332 - DNA, 75 bp, synthetic construct
  source 1..75: mol_type = other DNA
cagcagcgtgaaacatcggctgtggtaaaaaccgtgacaccagctacgccgcgtaaaatggccgtggcagatagc

SEQ ID NO: 323333 - DNA, 75 bp, synthetic construct
  source 1..75: mol_type = other DNA
agacaggcagcgtggccatccgtgcggagcgctggatcaactggcgtcgtcgccgtaccgcggcggtggcggtga

SEQ ID NO: 323334 - DNA, 75 bp, synthetic construct
  source 1..75: mol_type = other DNA
atggtgacatcctggagccggagggcgcggagtttggcagtgcgatcccgtttctctggcagcatgaccattccc

SEQ ID NO: 323335 - DNA, 75 bp, synthetic construct
  source 1..75: mol_type = other DNA
tcatttctgcaaccaaccagaatttagcccagttcattgccgaaggtaaatttcgcgaagatctcttctaccgac

SEQ ID NO: 323336 - DNA, 75 bp, synthetic construct
  source 1..75: mol_type = other DNA
ggctgattcaggcggcgaatacgggcacgctgtttctcgatgaaattggcgatatgccattaatgttgcaggcaa

SEQ ID NO: 323337 - DNA, 75 bp, synthetic construct
  source 1..75: mol_type = other DNA
tttctgcacggaaaccggtggtgaaaatcgcatcttctgccggcgcttcggcacagtcaataacctcttttcata

SEQ ID NO: 323338 - DNA, 75 bp, synthetic construct
  source 1..75: mol_type = other DNA
gggcagggtaaggccagacccctgacgaagtttgattttgaatccatcaccttcagtcatgcgaaggtggcggct

SEQ ID NO: 323339 - DNA, 75 bp, synthetic construct
  source 1..75: mol_type = other DNA
ggatgcagaggcggcgtttggacagtttgtggcagcaaacctgcagcccactggtgctgtctggctgatgtccag

SEQ ID NO: 323340 - DNA, 75 bp, synthetic construct
  source 1..75: mol_type = other DNA
ggaggaatggatcatcgaccgtcagaagcagaacgcagcactgacggatctgatggatcagtacgtgctcctggc

SEQ ID NO: 323341 - DNA, 75 bp, synthetic construct
  source 1..75: mol_type = other DNA
cattgatcggcaggcagaaaaccctgcgttgacccgactgatggacgagtacgtctgctttgcatggcggacgac

SEQ ID NO: 323342 - DNA, 75 bp, synthetic construct
  source 1..75: mol_type = other DNA
gctcatcagtttgttctgccagttcagcggtagcgagttgcgtctgaagctggtctggctgtgctggtacgattt

SEQ ID NO: 323343 - DNA, 75 bp, synthetic construct
  source 1..75: mol_type = other DNA
cactgtggggacctgcgcacggtggtgctaacgaagcggcgctgaaaatgctggaagaaatcagctccgttaaac

SEQ ID NO: 323344 - DNA, 75 bp, synthetic construct
  source 1..75: mol_type = other DNA
gtcagagtgaaccactgacaaatctgatggatcagtacgtgcttatggcataccgtacatcggttgatgccgctc

SEQ ID NO: 323345 - DNA, 75 bp, synthetic construct
  source 1..75: mol_type = other DNA
ggaattatcatggccattttactggccctggcaccggtgatgctggtacaggacaaaatgggcatttttgcctcg

SEQ ID NO: 323346 - DNA, 75 bp, synthetic construct
  source 1..75: mol_type = other DNA
gcagcggtgggttgttcgatctggtacaaaatatgtccccggaacagcagcaaattttgctgcgtgcgtctgccg

SEQ ID NO: 323347 - DNA, 75 bp, synthetic construct
  source 1..75: mol_type = other DNA
ggtgcccacccgttatcgggaagagctgctcgggaacgctgccggtcaaatggtgtgtaccattgacattcatca

SEQ ID NO: 323348 - DNA, 75 bp, synthetic construct
  source 1..75: mol_type = other DNA
aatgtgttgcgaaaatcgaggcaggggttttctgtttcacaggttggaagtatgccagtcgcatacagatggata

SEQ ID NO: 323349 - DNA, 75 bp, synthetic construct
  source 1..75: mol_type = other DNA
ggttcacaatatagcccctgaggttgcctctctgggggctgatgataccggggaattaactggtggcattatttt

SEQ ID NO: 323350 - DNA, 75 bp, synthetic construct
  source 1..75: mol_type = other DNA
ttccctaacgaagcgcaatcgcgggtagaagcccaggaagagaaaggcgattacaactccggtacggtgcgcttt

SEQ ID NO: 323351 - DNA, 75 bp, synthetic construct
  source 1..75: mol_type = other DNA
gcagcaaggtattctggtacgccgttctcgcgagcagctggagatggaaatcgacaaattcaccattattcagcg

SEQ ID NO: 323352 - DNA, 75 bp, synthetic construct
  source 1..75: mol_type = other DNA
acaacgcgcagtatccactggttccaggagcgcggatttaccccggtagatattgatttactgccggagagtaaa

SEQ ID NO: 323353 - DNA, 75 bp, synthetic construct
  source 1..75: mol_type = other DNA
accattaaatcttacgaccgcccgttttctgccgcgtccggcaaccggaaaccggtggtgaaaacagcatcttct

SEQ ID NO: 323354 - DNA, 75 bp, synthetic construct
  source 1..75: mol_type = other DNA
gtgccagcatgatactgggtggtgtggcacagatgctggccccgaaggcaaaaacaccggattaccgcgcaacgg

SEQ ID NO: 323355 - DNA, 75 bp, synthetic construct
  source 1..75: mol_type = other DNA
gtgtccgctctgaagccctggaagtcggcccgtcgtcagtatccggatgacagccgtctgcatcatgtcctgaaa

SEQ ID NO: 323356 - DNA, 75 bp, synthetic construct
  source 1..75: mol_type = other DNA
tctggctgatgtccagcacgaatgccctggcgctgtccatgcgtaaaaatgcgctgggtcagaaggaatacccgg

SEQ ID NO: 323357 - DNA, 75 bp, synthetic construct
  source 1..75: mol_type = other DNA
atggctacatacggcggtcagtttacgcttacggtgatcaccgggattacgtcaacgccttctccggatcgggat

SEQ ID NO: 323358 - DNA, 75 bp, synthetic construct
  source 1..75: mol_type = other DNA
ggtgaaatgcgcgtgggctcccgagtggtatctcaggagatcagcactgcagaggaaggcgatggtggtcaggtt

SEQ ID NO: 323359 - DNA, 75 bp, synthetic construct
  source 1..75: mol_type = other DNA
ggtgaaatgcgcgtgggttcccgtgtggtatctcaggagatcagcactgcagaagaaggcgatggtggtcaggtt

SEQ ID NO: 323360 - DNA, 75 bp, synthetic construct
  source 1..75: mol_type = other DNA
ggtgaaatgcgcgtgggatcccgtgtggtatctcaggagatcagcactgcagatgaaggcgatggtggtcaggtt

SEQ ID NO: 323361 - DNA, 75 bp, synthetic construct
  source 1..75: mol_type = other DNA
tggtatcaggtgcggatagcagggaaagatacaggagagagagagctgtctgcccgtctgcatgagccgcttcct

SEQ ID NO: 323362 - DNA, 75 bp, synthetic construct
  source 1..75: mol_type = other DNA
ggtgaaatgcgcgtggggtcccgagtggtatctcaggagatcagcactgcagacgaaggcgatggtggtcaggtt

SEQ ID NO: 323363 - DNA, 75 bp, synthetic construct
  source 1..75: mol_type = other DNA
aaagcccacctgcccatgaactcccggattatatccactatcacctggaacgggccggagtgatctgtggacggt

SEQ ID NO: 323364 - DNA, 75 bp, synthetic construct
  source 1..75: mol_type = other DNA
ggatgccggggcttagtattgttgcaagtaatctcatgttctctcttggggcaggtatggttttaggcggtgttg

SEQ ID NO: 323365 - DNA, 75 bp, synthetic construct
  source 1..75: mol_type = other DNA
aaccccccgtacacagacaacggataacggcaagcagaatacctatttttcttcgctggataatatgattgccca

SEQ ID NO: 323366 - DNA, 75 bp, synthetic construct
  source 1..75: mol_type = other DNA
ttgtatggtgaaatgcgcgtggggtcacgtgtggtatctcaggagatcagcacggcagatgaaggggacggtggt

SEQ ID NO: 323367 - DNA, 75 bp, synthetic construct
  source 1..75: mol_type = other DNA
agccagaactccccgcacacaggcaacagataacggcaaacagaacacctatttttcttcactggataatatggt

SEQ ID NO: 323368 - DNA, 75 bp, synthetic construct
  source 1..75: mol_type = other DNA
ggctggtatcaggtgcgcattgccgggcgtgatgcaggcgaaaacgaattatctgcccgtcttaatgagccgctg

SEQ ID NO: 323369 - DNA, 75 bp, synthetic construct
  source 1..75: mol_type = other DNA
atggcggttgctatacggatgccgggggtaggaattatggcgagtaatctcctgttttctctcggtgccagtatg

SEQ ID NO: 323370 - DNA, 75 bp, synthetic construct
  source 1..75: mol_type = other DNA
gcgtctggcgggagccaaacgtggtggtgtgtttcaggcagtgctgggcgcggcgctgattgcggtggcatggtg

SEQ ID NO: 323371 - DNA, 75 bp, synthetic construct
  source 1..75: mol_type = other DNA
tttcgtcagaaactgagcgacggctggtatcaggtgcgtattgccgggcgtgatacaggcgaaaacgaattatca

SEQ ID NO: 323372 - DNA, 75 bp, synthetic construct
  source 1..75: mol_type = other DNA
gctgccatgtcgctgggtggtgtggcccagatgctggccccgaaggcaaaaacaccggagtacagggcgacggat

SEQ ID NO: 323373 - DNA, 75 bp, synthetic construct
  source 1..75: mol_type = other DNA
ctgttattgatgctattgaggaatactttttacggaacaatattccgattcagtttgtaaaaataaataatacac

SEQ ID NO: 323374 - DNA, 75 bp, synthetic construct
  source 1..75: mol_type = other DNA
gcggtgtgtttcaggcggtgctgggtgcggcgttgattgctacggcaatctggatgccggggatcagtatcgctt

SEQ ID NO: 323375 - DNA, 75 bp, synthetic construct
  source 1..75: mol_type = other DNA
gggcaatgtcctgcccgttctgtacggtgaaatgcgtgtggggtcgcgggtggtatctcaggagatcagcacagc

SEQ ID NO: 323376 - DNA, 75 bp, synthetic construct
  source 1..75: mol_type = other DNA
gtacggtgaaatgcgcgtggggtcgcggggtgctttctcaggagatcagcacggcagacgggggacggtggtcag

SEQ ID NO: 323377 - DNA, 75 bp, synthetic construct
  source 1..75: mol_type = other DNA
ttcgtcatgagctggcggcactgaaaattaacactccttactggcagtatgcaggccgcccggcagcggcagctc

SEQ ID NO: 323378 - DNA, 75 bp, synthetic construct
  source 1..75: mol_type = other DNA
gggcgctggccacacaacttccgtcgtttcgtcagaaactgagtgacggctggtatcaggtacgtattgccgggc

SEQ ID NO: 323379 - DNA, 75 bp, synthetic construct
  source 1..75: mol_type = other DNA
atggtgctgtgatccatatcgtgccgcgtctggcgggagccaaaagtggcggtgtgtttcaggctgtgctggggg

SEQ ID NO: 323380 - DNA, 75 bp, synthetic construct
  source 1..75: mol_type = other DNA
taactgatatggttatgttatcgttgttaaataatcttgacatatcgtacagatatgtcataaataataaattgg

SEQ ID NO: 323381 - DNA, 75 bp, synthetic construct
  source 1..75: mol_type = other DNA
cagtaacattctcttttctatgggggcagcgatgacgcttggtggtatcgcacagatgctggcccctaaacccaa

SEQ ID NO: 323382 - DNA, 75 bp, synthetic construct
  source 1..75: mol_type = other DNA
tttaatattgcgcgctcggcagctgatggtctctccttccactgccgtttcgatcccacgcgcattgcgctgaat

SEQ ID NO: 323383 - DNA, 75 bp, synthetic construct
  source 1..75: mol_type = other DNA
tgccgggcgtgatgcaggtgaaaccgaattatctgcccgtcttaatgagccgctggcaaatggtgccgtgatcca

SEQ ID NO: 323384 - DNA, 75 bp, synthetic construct
  source 1..75: mol_type = other DNA
tcgtgggatggcgggtctcatcgtccatggaaacgacattcgtgctggatgcactggagcaggcgttatgggccc

SEQ ID NO: 323385 - DNA, 75 bp, synthetic construct
  source 1..75: mol_type = other DNA
agggagtactggcgactcgtatgacaacgcgatggctgagagcatcaatggtctttacaaagcggaggtaataca

SEQ ID NO: 323386 - DNA, 75 bp, synthetic construct
  source 1..75: mol_type = other DNA
ctgtacggtgaaatgcgcgtggggtcacgtgttgtctctcaggagatcagcacggcagacgagggggacggtggt

SEQ ID NO: 323387 - DNA, 75 bp, synthetic construct
  source 1..75: mol_type = other DNA
tcgcctggagcaactctacccgttcccggtcgcagaactgaatgatgttctggcgagttggccgaactgctgcga

SEQ ID NO: 323388 - DNA, 75 bp, synthetic construct
  source 1..75: mol_type = other DNA
gccaggacgcccacggcagccagtacagataacggcaaacagaacacctatttctcctcactggataacatggtt

SEQ ID NO: 323389 - DNA, 75 bp, synthetic construct
  source 1..75: mol_type = other DNA
acacagctcccggcgtttcgtcagaaactgaatgacggctggtatcaggtgcgcattgccgggcgtgatgcaggc

SEQ ID NO: 323390 - DNA, 75 bp, synthetic construct
  source 1..75: mol_type = other DNA
ttgcgctactggtggcgtttgtggtgtggttgagcaccaaagccgtcagccggatgacggcgattgtgctggggg

SEQ ID NO: 323391 - DNA, 75 bp, synthetic construct
  source 1..75: mol_type = other DNA
ctggtcaatggcggcgctgatctttacctggttctgtatgctgcattccggcttgatgattctggaagctaacct

SEQ ID NO: 323392 - DNA, 75 bp, synthetic construct
  source 1..75: mol_type = other DNA
cgtccgacgttttttgcttttgcaaaaggcgcgggtgtgatgggggaagcgggacctgaagccattctgccactg

SEQ ID NO: 323393 - DNA, 75 bp, synthetic construct
  source 1..75: mol_type = other DNA
tagatactaatgacgatgattatataaaagctataagagattatgttcagtatacagctttaaatgaagtgagaa

SEQ ID NO: 323394 - DNA, 75 bp, synthetic construct
  source 1..75: mol_type = other DNA
gctgatgaccttatacaggcattgatagatactaatgacgatgattatataaaagctataagagattatgttcag

SEQ ID NO: 323395 - DNA, 75 bp, synthetic construct
  source 1..75: mol_type = other DNA
atgaatgtagaaaacttaatgaatagtataactatagaatataagctcgaaatactggcaaggtttttttattac

SEQ ID NO: 323396 - DNA, 75 bp, synthetic construct
  source 1..75: mol_type = other DNA
tttgatttattcagagtgtcatgtatctataaaggagaaatagattcgctattaaatataattcgtgaattttat

SEQ ID NO: 323397 - DNA, 75 bp, synthetic construct
  source 1..75: mol_type = other DNA
ggaagtccggcgcagatgcggcgggcggaaggtatccggtttgagcagaacaacagcgtggtgattcagaacgac

SEQ ID NO: 323398 - DNA, 75 bp, synthetic construct
  source 1..75: mol_type = other DNA
tttgtgtccgtaacaaaaaccggaaaatcctttatgccaatggggcctttattgaactcttttccaaagaagata

SEQ ID NO: 323399 - DNA, 75 bp, synthetic construct
  source 1..75: mol_type = other DNA
atgcgattattttctccgcttatttccctgtttgcgttggttgtcagtgcatttggggtattgcctgctcaggcc

SEQ ID NO: 323400 - DNA, 75 bp, synthetic construct
  source 1..75: mol_type = other DNA
ttttctctttttatatgctgggtgttggtcatgcaacaattgccagagaattgggtattacagacagagcatctg

SEQ ID NO: 323401 - DNA, 75 bp, synthetic construct
  source 1..75: mol_type = other DNA
tttcatggcgaaatctatcagataaggatggagaatgtttctttttataatgacgaatctgttgttttatggcaa

SEQ ID NO: 323402 - DNA, 75 bp, synthetic construct
  source 1..75: mol_type = other DNA
ttcagcttcatcgttaagaccgatgatcttattgagattgcttttgaacataaaagagattcgttttggatttga

SEQ ID NO: 323403 - DNA, 75 bp, synthetic construct
  source 1..75: mol_type = other DNA
aatggcgagattctgggcgaggaagttatggggtaacttttccttttttggtcggctcacttagcttaatgaaca

SEQ ID NO: 323404 - DNA, 75 bp, synthetic construct
  source 1..75: mol_type = other DNA
ggttgcgtaaatataagccggaagagtatgagctgataattgctcactttgttgttggcatctcacttcgtgcta

SEQ ID NO: 323405 - DNA, 75 bp, synthetic construct
  source 1..75: mol_type = other DNA
atgaaattgatcgtcgggatgacaggggccactggtgcgcctcttggtgtggcattactgcaggcgctgcgagag

SEQ ID NO: 323406 - DNA, 75 bp, synthetic construct
  source 1..75: mol_type = other DNA
accgctggggagcatgggctgcagcagataacagtagtgtggattggcaacctatagcagcaggcttcaaggggc

SEQ ID NO: 323407 - DNA, 75 bp, synthetic construct
  source 1..75: mol_type = other DNA
ggaatatgagctcatcatagcccactttgttattggtatctcattacgcactattgccaaaaagagaaggtgttc

SEQ ID NO: 323408 - DNA, 75 bp, synthetic construct
  source 1..75: mol_type = other DNA
ccggtagccgctggcttcaaggggcttttacctcatggcaaaaagtcccggattcagtgtgatgatgacgaaggc

SEQ ID NO: 323409 - DNA, 75 bp, synthetic construct
  source 1..75: mol_type = other DNA
ttagtattatccgaaaagccttgcagtgcaggggagacatgagcaagttcagccatgaaaaactgacagtcagca

SEQ ID NO: 323410 - DNA, 75 bp, synthetic construct
  source 1..75: mol_type = other DNA
atgagtcagctcgtctacttctccagtagctccgaaaacacacatcgctttatcaaacgtttagggctgcccgcc

SEQ ID NO: 323411 - DNA, 75 bp, synthetic construct
  source 1..75: mol_type = other DNA
atgagccagctcgtctacttctccagcagctccgaaaatacgcagcgttttatcgaacgtttaggtctgcccgcg

SEQ ID NO: 323412 - DNA, 75 bp, synthetic construct
  source 1..75: mol_type = other DNA
tcgtgctcaaagaaggccgcaaactggtgctggtaccgcgtgaaatgccgcttagcaccatccatctcgaaaata

SEQ ID NO: 323413 - DNA, 75 bp, synthetic construct
  source 1..75: mol_type = other DNA
ggcctcgaacatcctcacgccaggcgctggcaaggattgtcgcagacccggaatttttctcaggagaatgaataa

SEQ ID NO: 323414 - DNA, 75 bp, synthetic construct
  source 1..75: mol_type = other DNA
ccgggctggcttcgtcgcggtgatgaagtactcgacattgtgttaggtgaaatgggcgtctcgccaaataaaggt

SEQ ID NO: 323415 - DNA, 75 bp, synthetic construct
  source 1..75: mol_type = other DNA
tattttatggcaaataaatcagttccctgattatccattcttttgtatgaaaaaagaaaactattatcatcgaga

SEQ ID NO: 323416 - DNA, 75 bp, synthetic construct
  source 1..75: mol_type = other DNA
actttccagcagattgaagattacggcgctgcacatggctggagttctgaacagattcaagccaaaaaaattgag

SEQ ID NO: 323417 - DNA, 75 bp, synthetic construct
  source 1..75: mol_type = other DNA
acgtgccggggcgcgctggttactggccgaaatgctgctgttttttgtccctgccgtggtggcggtggtgaacta

SEQ ID NO: 323418 - DNA, 75 bp, synthetic construct
  source 1..75: mol_type = other DNA
gacttactataaatagatttgttaacgttgataggaaatattcgaataaaacaagagcattagctcattcacttt

SEQ ID NO: 323419 - DNA, 75 bp, synthetic construct
  source 1..75: mol_type = other DNA
aggctaaaaacgacaccggaagttgcacacaatcatcttaagcgcatcagacgacagcttgccggtataacagat

SEQ ID NO: 323420 - DNA, 75 bp, synthetic construct
  source 1..75: mol_type = other DNA
ggtatttgctgaaagatgatggaactcctgtcgtcatcgaccttacccaacagcgccagagattctcagagggga

SEQ ID NO: 323421 - DNA, 75 bp, synthetic construct
  source 1..75: mol_type = other DNA
atcgacagccgtgtacgtgatgccagcgcggcatacatgcgcggcgtcgatttccccaatgcgcctacgcagaac

SEQ ID NO: 323422 - DNA, 75 bp, synthetic construct
  source 1..75: mol_type = other DNA
gtatatgcggggaaaacccttcgcatgactattggcaatattaacgactggaagattgatgatgcgagagccgag

SEQ ID NO: 323423 - DNA, 75 bp, synthetic construct
  source 1..75: mol_type = other DNA
atatccggtttgttcatgaagttattgcttctggccttgatgagacattcgcgcgctccgaccttatcgcttact

SEQ ID NO: 323424 - DNA, 75 bp, synthetic construct
  source 1..75: mol_type = other DNA
tggatggccctgccttacaccctcgtcctgacactcgtcggactgctctgcgtcgagtttacgcttgcccctgta

SEQ ID NO: 323425 - DNA, 75 bp, synthetic construct
  source 1..75: mol_type = other DNA
tactgtgcaacctgaaggggttgttttgggaaaagttttggtaaaagaaatagaaaactctggattcgaaataaa

SEQ ID NO: 323426 - DNA, 75 bp, synthetic construct
  source 1..75: mol_type = other DNA
atgagggttgttagagataaaaagcggaaaatagattttaaggcattttgttgtatttttgatgctataaaagat

SEQ ID NO: 323427 - DNA, 75 bp, synthetic construct
  source 1..75: mol_type = other DNA
gtcgtccgttagatctgttacgaaaatggcacgagaaaattgagacatggatcttaaatgaagcaggtattacca

SEQ ID NO: 323428 - DNA, 75 bp, synthetic construct
  source 1..75: mol_type = other DNA
cgcgctcgccgtaatgcgacaaggtccgatggaaggggtatcctcactgactgacattgaagactttttgcggca

SEQ ID NO: 323429 - DNA, 75 bp, synthetic construct
  source 1..75: mol_type = other DNA
tgaatttcctaacccacctggtgaggctgattttattgcagcttatggcgtcagagaaggaaacctgcgatatac

SEQ ID NO: 323430 - DNA, 75 bp, synthetic construct
  source 1..75: mol_type = other DNA
gcactggtggtgggcaggtgtatatgtcagcactacagcagatcagtgccaacgctccatctgctgccgttgccg

SEQ ID NO: 323431 - DNA, 75 bp, synthetic construct
  source 1..75: mol_type = other DNA
tgatcagcagttaactgctggtgtcagtgcagcacttggtttatcaacaattccaaccaacaccaaacgctatac

SEQ ID NO: 323432 - DNA, 75 bp, synthetic construct
  source 1..75: mol_type = other DNA
tgttctatggcaaattaatatatttcctgactatccattctttcgtgtggacagagtggaagtaatacaaatact

SEQ ID NO: 323433 - DNA, 75 bp, synthetic construct
  source 1..75: mol_type = other DNA
ctggctagtgggtgtggtcacgcaacaaggttcacgcgattttgttttccagtcagaaaaagacctggactggga

SEQ ID NO: 323434 - DNA, 75 bp, synthetic construct
  source 1..75: mol_type = other DNA
gtatggtttgcaaagttacggcgatagtcagtacctggtgaaacttggtactggttatctgctgaaagatgatgg

SEQ ID NO: 323435 - DNA, 75 bp, synthetic construct
  source 1..75: mol_type = other DNA
ttgacgatcgtaagaaaagcccgatcgctgactacatgatttcactgaacaccaagcccgttcatatcgatcacc

SEQ ID NO: 323436 - DNA, 75 bp, synthetic construct
  source 1..75: mol_type = other DNA
ttttggatttgtccattgccacgactgacgcttatgcagatataggcgcgtactctatatctgatgttgccaaac

SEQ ID NO: 323437 - DNA, 75 bp, synthetic construct
  source 1..75: mol_type = other DNA
atgcccagcatgatgagcctctggggctgtttgatacggaatacttcgatcccggctggcttgatgccgttgctg

SEQ ID NO: 323438 - DNA, 75 bp, synthetic construct
  source 1..75: mol_type = other DNA
gcagcagcaggctgaatataaaacgatgattgacagccaggttcgcgatgcgacagctgcgtatatgcgtggcgt

SEQ ID NO: 323439 - DNA, 75 bp, synthetic construct
  source 1..75: mol_type = other DNA
cacagtcatcaaaggggcaagcgtaactgtcaccccagtgttgaaccctgagaccaataagacgggcatcctgtg

SEQ ID NO: 323440 - DNA, 75 bp, synthetic construct
  source 1..75: mol_type = other DNA
gcgcaccgagattatctctcaggctgacggtacaggcgagatcattaatgttggcttcactgaccgctcaggccg

SEQ ID NO: 323441 - DNA, 75 bp, synthetic construct
  source 1..75: mol_type = other DNA
caactgggattaatagccggaggtgaggctggaaaacgggctgcaacggcagtgggtctccgttgcagtgctgat

SEQ ID NO: 323442 - DNA, 75 bp, synthetic construct
  source 1..75: mol_type = other DNA
tcatgtaaatcgcctgaagatgctgaaacgccagatgtatggtcgagtcggatttgaactacttaggcggagggt

SEQ ID NO: 323443 - DNA, 75 bp, synthetic construct
  source 1..75: mol_type = other DNA
aaaattatgcttcccgatttattagtctgatgtgtgaaaaagaaccggagctgaaaatagcgcagcaactggtac

SEQ ID NO: 323444 - DNA, 75 bp, synthetic construct
  source 1..75: mol_type = other DNA
gaaaaccacgcatacctcccttccctttgccggacatacgctgcacattgttgagttcgatcctgcaagttttca

SEQ ID NO: 323445 - DNA, 75 bp, synthetic construct
  source 1..75: mol_type = other DNA
gccttgcgggaatgtggccttaaatgtgtgcccgcaatcggcgatctacgccaacctatgtggcctgcgggggta

SEQ ID NO: 323446 - DNA, 75 bp, synthetic construct
  source 1..75: mol_type = other DNA
ccactgcggggctatggcattggctgtggtatctcgtcaaccaacgggtattgatatcgaagagattctctctgc

SEQ ID NO: 323447 - DNA, 75 bp, synthetic construct
  source 1..75: mol_type = other DNA
cccgatttattagtctgatgtgtgaaaaagaaccggagttgaaaatagcacagcaactggtactcgagttctacc

SEQ ID NO: 323448 - DNA, 75 bp, synthetic construct
  source 1..75: mol_type = other DNA
gtcaatcttgatactcaccgtcccctcgtcctgcttcccggccgtgatcagcgtacgctggcgacctggttcaga

SEQ ID NO: 323449 - DNA, 75 bp, synthetic construct
  source 1..75: mol_type = other DNA
agttgtcgtcggcgccggatacagcatctaccctgctaagggcagacgctatggcttgtattttccgtccgccac

SEQ ID NO: 323450 - DNA, 75 bp, synthetic construct
  source 1..75: mol_type = other DNA
ttaatagtcaatcttgatactcaccgtcccctcgtcctgcttcccggccgcgaccagcgtacgctggcaacttgg

SEQ ID NO: 323451 - DNA, 75 bp, synthetic construct
  source 1..75: mol_type = other DNA
gtctccgttacagtgctgatactcttcttcgcagggttatcaataccccggagacgaaacagtcaggcgcgcttc

SEQ ID NO: 323452 - DNA, 75 bp, synthetic construct
  source 1..75: mol_type = other DNA
gatgccctggagaataaccagggatgaagaaaattatgcttcccgatttattagtctgatgtgtgaaaaaagaac

SEQ ID NO: 323453 - DNA, 75 bp, synthetic construct
  source 1..75: mol_type = other DNA
aatggcgaccatatcgtgcagtggttagtaaggggtaataatgttattaccttgtgcctggtagataaacacccg

SEQ ID NO: 323454 - DNA, 75 bp, synthetic construct
  source 1..75: mol_type = other DNA
tcagcacctgctgccgcgtgatgtggtgcaggcgcatgagcgcggcgatattcactaccacgatctcgattactc

SEQ ID NO: 323455 - DNA, 75 bp, synthetic construct
  source 1..75: mol_type = other DNA
accattaaccgtatcgatgaagtgctggcaccgtttgtcaccgccagctacaacaaacatcgcaagaccgcagaa

SEQ ID NO: 323456 - DNA, 75 bp, synthetic construct
  source 1..75: mol_type = other DNA
ctgttcggcggcgagcatgtttacgacaacgagcagcttcgcgcgaaaggtattgcgattgttgaacgtctgcgt

SEQ ID NO: 323457 - DNA, 75 bp, synthetic construct
  source 1..75: mol_type = other DNA
tcgtcagggatgctgttgccaaatggcgtaaaggctggatcccaccggttactactgccgcagacttccttcagt

SEQ ID NO: 323458 - DNA, 75 bp, synthetic construct
  source 1..75: mol_type = other DNA
ggatatttaggtagcccggatgcacgtccgtttaacgctggtaagcaggaagaagttaagcgccgcgttaaacat

SEQ ID NO: 323459 - DNA, 75 bp, synthetic construct
  source 1..75: mol_type = other DNA
tcctctatatggaaggcgcttgtggcgtgcgtctgaatgctgacgatgatgtttctgaaatcttcaaaaacggtc

SEQ ID NO: 323460 - DNA, 75 bp, synthetic construct
  source 1..75: mol_type = other DNA
gacccatggagggagtggttaaaagagcaacgagaaagtggtaattataatgccagccggatatggcgggaaatg

SEQ ID NO: 323461 - DNA, 75 bp, synthetic construct
  source 1..75: mol_type = other DNA
atggacacctcacttgctcatgagaacgcccgcctgcgggcactgttgcagacgcaacaggacaccatacgccag

SEQ ID NO: 323462 - DNA, 75 bp, synthetic construct
  source 1..75: mol_type = other DNA
gcgcatcaggcagttttgcgtttgtcatcagtctctaatatggtcgacatgaaaactacgcatacctccctcccc

SEQ ID NO: 323463 - DNA, 75 bp, synthetic construct
  source 1..75: mol_type = other DNA
gatgacccgtatcgctcgtctcgaaggcgtgaaagcgcgcgtggccccgatcctctatatggaaggtgcttgtgg

SEQ ID NO: 323464 - DNA, 75 bp, synthetic construct
  source 1..75: mol_type = other DNA
ttcactatcacgatctcgattactcgccgttcttcccgatgttcaactgcatgttgatcgacctgaaaggcatgc

SEQ ID NO: 323465 - DNA, 75 bp, synthetic construct
  source 1..75: mol_type = other DNA
atgacgaaaattattgcagtaaccgcatgtccatctggtgttgcccatacttatatggcggcagaggcgctggaa

SEQ ID NO: 323466 - DNA, 75 bp, synthetic construct
  source 1..75: mol_type = other DNA
cgctggagtaatggtgttgtcgaaggtcatgtaaatcgtctgaagatgctgaaacgccagatgtatggtcgagca

SEQ ID NO: 323467 - DNA, 75 bp, synthetic construct
  source 1..75: mol_type = other DNA
agaggtggtgaatcgtctggttgcaggaccgaacagcaaagcgtatggtcgattaagcgtcatggctcaatacta

SEQ ID NO: 323468 - DNA, 75 bp, synthetic construct
  source 1..75: mol_type = other DNA
gttttcaaaaaacgcggttttaaagtgcgtcagaagccggttaaccgggccttaaaaccggggacggtgaccgcc

SEQ ID NO: 323469 - DNA, 75 bp, synthetic construct
  source 1..75: mol_type = other DNA
gtgaaatcgcagacggccgcgcagaacggcggcgaaggtgtggcaaactggcagtggctggagcaacaccccgcc

SEQ ID NO: 323470 - DNA, 75 bp, synthetic construct
  source 1..75: mol_type = other DNA
gagtacttcgaactgttggagatgatgaagtttatccctcgttttgagaagttcacccgttctgatgtgattcgt

SEQ ID NO: 323471 - DNA, 75 bp, synthetic construct
  source 1..75: mol_type = other DNA
aacgaggcgatcactgctgccgacgtcacgatgcgtaccgatgaaatcaaacgcgagttgatgaagaaaggttaa

SEQ ID NO: 323472 - DNA, 75 bp, synthetic construct
  source 1..75: mol_type = other DNA
agtcaccgcaggaaatcgaggacatcgtgaaattgaatgaggcgatcaccgctgccgatgtcacgatgcgtaccg

SEQ ID NO: 323473 - DNA, 75 bp, synthetic construct
  source 1..75: mol_type = other DNA
ctccaaaacaaacatcacacacatcatagacaaattagaaaaaagaatattgccaaaagaattaataataaaaac

SEQ ID NO: 323474 - DNA, 75 bp, synthetic construct
  source 1..75: mol_type = other DNA
agactttccggttttatctggaaaaacagggatggactcttgttaaccggggcgcaattaaaaatatgactgtgg

SEQ ID NO: 323475 - DNA, 75 bp, synthetic construct
  source 1..75: mol_type = other DNA
aagtagttgcacaatatcagttcgacttcggtctgcgtccgtccgttgcttacctgcaatctaaaggaaaagact

SEQ ID NO: 323476 - DNA, 75 bp, synthetic construct
  source 1..75: mol_type = other DNA
ttcatgtggcaaagcgcgagcttgccctggatgatgagacttatacattcgtgctgctggcagccaccggcaaaa

SEQ ID NO: 323477 - DNA, 75 bp, synthetic construct
  source 1..75: mol_type = other DNA
taatccatgtcgcaaaacgcgatctacagcttgaccatgagacttatacatccgcactgctggccgccaccggca

SEQ ID NO: 323478 - DNA, 75 bp, synthetic construct
  source 1..75: mol_type = other DNA
gcacatcgtccggtatttgtctggccaacgcgcgagcaacgctggaaatacctttccactgccaaactaaaagcc

SEQ ID NO: 323479 - DNA, 75 bp, synthetic construct
  source 1..75: mol_type = other DNA
gcctgaagatgctgaaacgccagatgtatggtcgagccggatttgaactactcaggcagagggtaatgagtccac

SEQ ID NO: 323480 - DNA, 75 bp, synthetic construct
  source 1..75: mol_type = other DNA
cgttacaaaatttacaacgtcaactgggattaattgccggaggtgaggctggaaaacgggcagcaacggtagtgg

SEQ ID NO: 323481 - DNA, 75 bp, synthetic construct
  source 1..75: mol_type = other DNA
ttcccgggatcgctgctggaattatggcgagtactgaaagcctgcgttgctgcggataaaattattctgatgcag

SEQ ID NO: 323482 - DNA, 75 bp, synthetic construct
  source 1..75: mol_type = other DNA
gcatcggttatcggcggtatttgtaacaactccggcggctcgctggtgcaacgtggcccggcgtataccgaaatg

SEQ ID NO: 323483 - DNA, 75 bp, synthetic construct
  source 1..75: mol_type = other DNA
gatcgatggcacctgctaaaaaatattggtgatgagcctgaacgaatgatgtacagacatatgcctctgatacgt

SEQ ID NO: 323484 - DNA, 75 bp, synthetic construct
  source 1..75: mol_type = other DNA
atgaaactttatggtgaacaaggatctaagctgtttttagttatgggtaacgcaatgcactctcttaaaacactt

SEQ ID NO: 323485 - DNA, 75 bp, synthetic construct
  source 1..75: mol_type = other DNA
tccgttgcagtgctgatactctccttcgcagggttatcaataccccggagacgaaacagtcaggcgcgcctcata

SEQ ID NO: 323486 - DNA, 75 bp, synthetic construct
  source 1..75: mol_type = other DNA
ttgagctggcaaaacgtattaccgaggcgctggcgattccggttatcggtattggcgcggggaatgttaccgatg

SEQ ID NO: 323487 - DNA, 75 bp, synthetic construct
  source 1..75: mol_type = other DNA
acgggcaaattctcgtgatgcacgacgcattcggcattaccggcggtcatattcctaaattcgccaaaaatttcc

SEQ ID NO: 323488 - DNA, 75 bp, synthetic construct
  source 1..75: mol_type = other DNA
gactacagctttgctaaactgtttgccgatgaagggcttaacgtgatgctggtgggtgattcgctgggcatgacg

SEQ ID NO: 323489 - DNA, 75 bp, synthetic construct
  source 1..75: mol_type = other DNA
ctggagaaagtgaaattcttccgtccgcattttaccgaccgtgcgatgcaaaaattcggtcacctgttccccagc

SEQ ID NO: 323490 - DNA, 75 bp, synthetic construct
  source 1..75: mol_type = other DNA
tgataccttcgaagcggaaaaaaatcagcaggtgttttatatcggcaccaaccagccggaagtgctgaccgaaat

SEQ ID NO: 323491 - DNA, 75 bp, synthetic construct
  source 1..75: mol_type = other DNA
gaaatcgacagccagttagtgcataaactctattacggccattttatgtgttacgtcttccaccaggattacatc

SEQ ID NO: 323492 - DNA, 75 bp, synthetic construct
  source 1..75: mol_type = other DNA
acctggcgtattgcccaggcgatcattgagttgaaccaggccgatctcgacccacatgctctggcgcgtgaaaaa

SEQ ID NO: 323493 - DNA, 75 bp, synthetic construct
  source 1..75: mol_type = other DNA
tgttgaagtggtgaaaagctggcacggtcgtcgcccaatggctgtcggtacggggagtgaaagcgccatcgctga

SEQ ID NO: 323494 - DNA, 75 bp, synthetic construct
  source 1..75: mol_type = other DNA
atgtacgagcgttatgcaggtttaatttttgatatggatggcactatcctggatacggaaccgacacaccgtaaa

SEQ ID NO: 323495 - DNA, 75 bp, synthetic construct
  source 1..75: mol_type = other DNA
aggaatcgctggcagcaagcgatcgagcaacgcagtttggcgatggctgtttcacgacagccagaattattgacg

SEQ ID NO: 323496 - DNA, 75 bp, synthetic construct
  source 1..75: mol_type = other DNA
aacgagcatgttatcactggatgctctacaaatcagattttcgcaatttcagcttatggacagaagattccaatt

SEQ ID NO: 323497 - DNA, 75 bp, synthetic construct
  source 1..75: mol_type = other DNA
atggagatctcctggggccgcgcactatggcgcaattttttgggccagtcccccgactggtacaaactcgccctc

SEQ ID NO: 323498 - DNA, 75 bp, synthetic construct
  source 1..75: mol_type = other DNA
gctgcggcgtgggtcggatgctggtggagcatgcgctctcaatggccccggaactgacaaccaatgttaatgagc

SEQ ID NO: 323499 - DNA, 75 bp, synthetic construct
  source 1..75: mol_type = other DNA
atggttattagtattcgacgctcacggcatgaggagggggaggaactcgttgcgatttggtgtcgttctgtcgat

SEQ ID NO: 323500 - DNA, 75 bp, synthetic construct
  source 1..75: mol_type = other DNA
gcgccgtttatcgataaagaatttggcgttcaacctcagcaattacccgattattgggggctggcggggatcagc

SEQ ID NO: 323501 - DNA, 75 bp, synthetic construct
  source 1..75: mol_type = other DNA
ggcatgaggaaggggaagaactggttgcgatttggtgccgttctgtcgatgccactcacgattttttatcagcag

SEQ ID NO: 323502 - DNA, 75 bp, synthetic construct
  source 1..75: mol_type = other DNA
tctataagaagttgggatttaaggttacgggacgctctgaggtggacgatttggggaaaccgtatccgttgctga

SEQ ID NO: 323503 - DNA, 75 bp, synthetic construct
  source 1..75: mol_type = other DNA
taagaaggtgggttttaaggttacgggacgctctgaagtggacgatctggggaaaccgtatccgctgctgaatct

SEQ ID NO: 323504 - DNA, 75 bp, synthetic construct
  source 1..75: mol_type = other DNA
caacgcttaatgatcgcctgtgatttctggttgcagcttgaacaagaaatgaaatacctggcagcaaagcagcaa

SEQ ID NO: 323505 - DNA, 75 bp, synthetic construct
  source 1..75: mol_type = other DNA
atgaaaaaacgatttttatctctttccggattgctgatgctgtcgctgtcatacctgccgttgaccgccggggcg

SEQ ID NO: 323506 - DNA, 75 bp, synthetic construct
  source 1..75: mol_type = other DNA
tactccatcctgcgcgatgccaccagcaccactgcgggaacgtcttacttcccgtatatctttatggctttgccg

SEQ ID NO: 323507 - DNA, 75 bp, synthetic construct
  source 1..75: mol_type = other DNA
gattgggcaggtgcctgagcattggaaggtagcgagagtcaagcgactggcgtcattgcgcaatgaacgacgaaa

SEQ ID NO: 323508 - DNA, 75 bp, synthetic construct
  source 1..75: mol_type = other DNA
aggagaatatttattgaaacccttgttgtatctgtttttttacaattatttgcattaataacccccctttttttc

SEQ ID NO: 323509 - DNA, 75 bp, synthetic construct
  source 1..75: mol_type = other DNA
agtaaacagatatcttatttttgatttggagcagcgaaatccccgtgttctcgaacagtctgagtttgaggcgtt

SEQ ID NO: 323510 - DNA, 75 bp, synthetic construct
  source 1..75: mol_type = other DNA
gtgggtggtttacggcaccaccgatattgcacaggcggtgacgcagatacagcagtaccgggaacaacaggaagg

SEQ ID NO: 323511 - DNA, 75 bp, synthetic construct
  source 1..75: mol_type = other DNA
atgatggagcatgaagtgcgtaccgaaggtgggtttcgcctgtataccgaaagcgatctccagcgattgaaattt

SEQ ID NO: 323512 - DNA, 75 bp, synthetic construct
  source 1..75: mol_type = other DNA
aagcgatctccagcgattgaaatttatccgccatgccagacaactaggtttcagtctggagtcgatccgcgagtt

SEQ ID NO: 323513 - DNA, 75 bp, synthetic construct
  source 1..75: mol_type = other DNA
atcctgcgcattacgaccgcttacgtaatgagggagcgacgttggcgttaagcccgattcgcctgggacgtaatc

SEQ ID NO: 323514 - DNA, 75 bp, synthetic construct
  source 1..75: mol_type = other DNA
cgtataaggattccggcgttgagtggattgggcaggtgccggagcattggaagattgcgcagattaagcgaattt

SEQ ID NO: 323515 - DNA, 75 bp, synthetic construct
  source 1..75: mol_type = other DNA
gcccatagcagtgtttattgctcgattcttgaagctcttgaacaaggggcgagtggcgttaagagtggttgttga

SEQ ID NO: 323516 - DNA, 75 bp, synthetic construct
  source 1..75: mol_type = other DNA
atgtatcgcattggtgagctggcaaaaatggcggaagtaacacccgacacgattcgttattacgaaaaacagcag

SEQ ID NO: 323517 - DNA, 75 bp, synthetic construct
  source 1..75: mol_type = other DNA
gtcgccgtttttgatgatgaaaaccgcagtagcggctggcgtcatcaacgcttacctgattacaaagccggtcgt

SEQ ID NO: 323518 - DNA, 75 bp, synthetic construct
  source 1..75: mol_type = other DNA
ttgctcgtctcgctggccggcgctgctgtcgactacgccatcatggcgacggcgcctttcctttgggttctctat

SEQ ID NO: 323519 - DNA, 75 bp, synthetic construct
  source 1..75: mol_type = other DNA
aggcaggtggatgaggaacgtcaggggcagctgcaaggctcactggcggcgctcaccagcctgacctcgatcgtc

SEQ ID NO: 323520 - DNA, 75 bp, synthetic construct
  source 1..75: mol_type = other DNA
tccacatgctgagtgagcagtgcgatcgcctgctccccgaaaacaaccagggcgggggttttgttgtcaccgtct

SEQ ID NO: 323521 - DNA, 75 bp, synthetic construct
  source 1..75: mol_type = other DNA
tgttgaagtggtgaaaagctggcatggtcgtcgcccaatggctgtaggaacggggagtgaaagcgccatcgctga

SEQ ID NO: 323522 - DNA, 75 bp, synthetic construct
  source 1..75: mol_type = other DNA
cccacgctccgttcttcgccgcggcagccttgaacggcctcaatttcctgacgggctgtttccttttgccggagt

SEQ ID NO: 323523 - DNA, 75 bp, synthetic construct
  source 1..75: mol_type = other DNA
agcacgcttggcgacgaagtggatattgacaccgccgtgcagaccgtgacacccacgcagggggccgtggtgatg

SEQ ID NO: 323524 - DNA, 75 bp, synthetic construct
  source 1..75: mol_type = other DNA
gatgacatcacccgcacgccgccggtttacccctgctcacgttcttcccgtttgcagcagttgatgcgcggcgac

SEQ ID NO: 323525 - DNA, 75 bp, synthetic construct
  source 1..75: mol_type = other DNA
ctgcccgtacggcactgcatgacctgatgacaggaaaacgggtggcaacggtacagaaagacggacggagagtgg

SEQ ID NO: 323526 - DNA, 75 bp, synthetic construct
  source 1..75: mol_type = other DNA
ttgggggaaaaattcacgaagtttgcggatgaaaatccccgggttattcgcggcgtcgtcgggcttgctgccggt

SEQ ID NO: 323527 - DNA, 75 bp, synthetic construct
  source 1..75: mol_type = other DNA
agttgtgcgcgccgcaaaggtcatgcacggcaaaacctctccgattacacataacggtgagggcgtatttcgggg

SEQ ID NO: 323528 - DNA, 75 bp, synthetic construct
  source 1..75: mol_type = other DNA
ataaagacattcccggcggccaactgcttggccccacctacgactacacccatcgcctgctcgatttcaccctgc

SEQ ID NO: 323529 - DNA, 75 bp, synthetic construct
  source 1..75: mol_type = other DNA
actgagtgtgaaatggtcaacggttttatcgacccgccggatgagccgccgcacttcacgcgcggctacgggctg

SEQ ID NO: 323530 - DNA, 75 bp, synthetic construct
  source 1..75: mol_type = other DNA
gcgggcagggggaaatcaccggtggctacaactatgacgacgacacgcagcaggttaactacgggctgaaggggg

SEQ ID NO: 323531 - DNA, 75 bp, synthetic construct
  source 1..75: mol_type = other DNA
tctggttgattcgctgatcaacttcggcgatcactaccaggtactggcggattatcgcagctatgtcgattgtca

SEQ ID NO: 323532 - DNA, 75 bp, synthetic construct
  source 1..75: mol_type = other DNA
ggaagcttccggcaccagtaacatgaagtttgcgcttaacggcgcgctgactatcggtacgctggacggtgcgaa

SEQ ID NO: 323533 - DNA, 75 bp, synthetic construct
  source 1..75: mol_type = other DNA
cgatgctgaatatcgctaatatgggctacttctcttctgaccgcacgatcaaagagtacgcggaacatatctggc

SEQ ID NO: 323534 - DNA, 75 bp, synthetic construct
  source 1..75: mol_type = other DNA
tcgcaatttggttttgtgttcaccaaaaaaggtgaagatttaatcaaaagaaaatatagattattgaatgattaa

SEQ ID NO: 323535 - DNA, 75 bp, synthetic construct
  source 1..75: mol_type = other DNA
ttccgatggtcaaccatgcggtgcatcaggcgaagctggagaacaaaaagcgtctggcggagtatatcgcccagc

SEQ ID NO: 323536 - DNA, 75 bp, synthetic construct
  source 1..75: mol_type = other DNA
tcgaagagttgattgatgaggaaaatgacccgggcctcggtaacggcggcctggggcgtctggcggcctgcttcc

SEQ ID NO: 323537 - DNA, 75 bp, synthetic construct
  source 1..75: mol_type = other DNA
acgccgggaggctctcaacccgctcgcttcgttccggtgggcccggggcatgaccgtcgtcgccgccctgatggc

SEQ ID NO: 323538 - DNA, 75 bp, synthetic construct
  source 1..75: mol_type = other DNA
gtgtcggattaactatcaactcactgaacagcaaatgaaagcaccaattacacgaatggatgcgatatgtcagtg

SEQ ID NO: 323539 - DNA, 75 bp, synthetic construct
  source 1..75: mol_type = other DNA
gtcgtaccgggtgcagtattcgaaggattttcagaccaccgacaccagcttcacgctggcggcatatcgctactc

SEQ ID NO: 323540 - DNA, 75 bp, synthetic construct
  source 1..75: mol_type = other DNA
aaaaaaacgcgctggattgaaaccgaagagattctgggagtcgcttacgatcagataatccctggttacgacacc

SEQ ID NO: 323541 - DNA, 75 bp, synthetic construct
  source 1..75: mol_type = other DNA
atgcgggttatggaaacgcgatccagcggttttgatgtcagccatgatgttggctatacgcgctttggcaggtaa

SEQ ID NO: 323542 - DNA, 75 bp, synthetic construct
  source 1..75: mol_type = other DNA
ttgccacccacgagttaagcttgcctgcgttttttgataacgtgaaagtggttaacgttaaaaactgctattttt

SEQ ID NO: 323543 - DNA, 75 bp, synthetic construct
  source 1..75: mol_type = other DNA
cgcaaattatcgatttaaccacacgcgaagcggtggaaaaccgtccggaagtgcatcgtcggtatatcgatattc

SEQ ID NO: 323544 - DNA, 75 bp, synthetic construct
  source 1..75: mol_type = other DNA
atgatttttggacatatcgcgcagccaaacccgtgccgtttgcccgccgctattgaaaaggcgctcgattttctg

SEQ ID NO: 323545 - DNA, 75 bp, synthetic construct
  source 1..75: mol_type = other DNA
ccaatccgtgtcgtttacccgtagccattgaaaaggcgctcgattttctgcgcgctaccgactttagctccctgg

SEQ ID NO: 323546 - DNA, 75 bp, synthetic construct
  source 1..75: mol_type = other DNA
ggcagtaagccacctactcaatgacgcgggtgtacctcatgactgcatgtatggttttgtgcgaaacgaacagac

SEQ ID NO: 323547 - DNA, 75 bp, synthetic construct
  source 1..75: mol_type = other DNA
ctactctgaagtggccaaattgtgcgaccagtggctggcaccgaaacaaggcactgatagcgccctggcgatggc

SEQ ID NO: 323548 - DNA, 75 bp, synthetic construct
  source 1..75: mol_type = other DNA
acgttgccaatgagcttttacaaagaagcattgactacttttcaattgaacatcaaaacgtagttgaatgtttta

SEQ ID NO: 323549 - DNA, 75 bp, synthetic construct
  source 1..75: mol_type = other DNA
gcactggaactggttgatacctccagtgctccagatattgaatggcctacgcctccggcagttcaggccagatga

SEQ ID NO: 323550 - DNA, 75 bp, synthetic construct
  source 1..75: mol_type = other DNA
gctggattacctggacgcactggagctggtcaatgcttccagtgcgccagatattgaatggcctacgcctccagc

SEQ ID NO: 323551 - DNA, 75 bp, synthetic construct
  source 1..75: mol_type = other DNA
atcgtggagaagaccccaattataaagaagcggttgtctggtatcagatagccgcggagagcggaatgtcttatg

SEQ ID NO: 323552 - DNA, 75 bp, synthetic construct
  source 1..75: mol_type = other DNA
ccacaggatgttcatcgaccggcatgtaataaaaatgcccctacggcaatccgcaaaatcgtggttaaagtcgcc

SEQ ID NO: 323553 - DNA, 75 bp, synthetic construct
  source 1..75: mol_type = other DNA
tttatatgttcatagcaatagtttctttcttaaaaacgactacgttcaggatgacattcactatgatatagttaa

SEQ ID NO: 323554 - DNA, 75 bp, synthetic construct
  source 1..75: mol_type = other DNA
atgaataaaactaaaagaaaaaacttgaaagaaagtgagtttataaaatatatagaaaacaatcctgttgtctca

SEQ ID NO: 323555 - DNA, 75 bp, synthetic construct
  source 1..75: mol_type = other DNA
gcaagccacgcagtgaaatgggggtgacttgtgttggtcgccagaaaatgaaattaggcagtaagctactgtatg

SEQ ID NO: 323556 - DNA, 75 bp, synthetic construct
  source 1..75: mol_type = other DNA
cgcgttcctcgatgccttaaccgtcgtggcggtggtgatcagcgttgcagtcggtttttatggtatttatcaccg

SEQ ID NO: 323557 - DNA, 75 bp, synthetic construct
  source 1..75: mol_type = other DNA
gaaaaatgcagcttaaactggacgaattcatcgactgtatggatgaaatgaataaagcagttcagaagcttaaag

SEQ ID NO: 323558 - DNA, 75 bp, synthetic construct
  source 1..75: mol_type = other DNA
tttgcgtggtatccggtagatgaaagtgccgggcatgaaacaatcagtaaaaacgatggggcaaagcatgactaa

SEQ ID NO: 323559 - DNA, 75 bp, synthetic construct
  source 1..75: mol_type = other DNA
tcttgaagtcttgctgttactgatgtttatggtggcgggtatctattttatgaaacagctgttgctgttcatatt

SEQ ID NO: 323560 - DNA, 75 bp, synthetic construct
  source 1..75: mol_type = other DNA
tggtcaccgcgctggctttgcatctggcagaggtcggcttgattggtttgtctgtcattattctggcgacatcac

SEQ ID NO: 323561 - DNA, 75 bp, synthetic construct
  source 1..75: mol_type = other DNA
tactgaccctcgtcgggctgttttgcgttgagtttacgcttgcacctgtaaccgaatggtttatgcaattgggtt

SEQ ID NO: 323562 - DNA, 75 bp, synthetic construct
  source 1..75: mol_type = other DNA
cgcaagaatcagcgcacatggtacagcaagccacgtagtgaaatgggtgtgacttgtgttggtcgccagaaaatg

SEQ ID NO: 323563 - DNA, 75 bp, synthetic construct
  source 1..75: mol_type = other DNA
gcaagccacgtagtgaaatggggttgacttgtgttggtcgccagaaaatgaaattaggcagcaaaccactgtatg

SEQ ID NO: 323564 - DNA, 75 bp, synthetic construct
  source 1..75: mol_type = other DNA
gtgggcaaaattcaggaatgataatggcaacgactggtatagtccgattgcagcatgggcgatttgtgatgtgtt

SEQ ID NO: 323565 - DNA, 75 bp, synthetic construct
  source 1..75: mol_type = other DNA
taagaagaaggacttgagacaagctgaagctatcctgtcattaaggtcagataacgatatacaagacagtgaccg

SEQ ID NO: 323566 - DNA, 75 bp, synthetic construct
  source 1..75: mol_type = other DNA
gtctcttagttttgaagatttaggacgttcagcctttcacggtgaccatctaaaagaaggtggagcactcagggc

SEQ ID NO: 323567 - DNA, 75 bp, synthetic construct
  source 1..75: mol_type = other DNA
gaggataaaagccgtcataaagataatgagcaagccatcttttggctgaaaaaagctgccctacaaggccatact

SEQ ID NO: 323568 - DNA, 75 bp, synthetic construct
  source 1..75: mol_type = other DNA
gggatggcgctgtcgcataaactggcggggcgcaagaatcgggttttttgtattgttggcgatggtgaacttaac

SEQ ID NO: 323569 - DNA, 75 bp, synthetic construct
  source 1..75: mol_type = other DNA
atcgttcatcgaatttacaaaaaaccgattacaagaatgatttgtaatggattgaatacatcgaaagcaagttcg

SEQ ID NO: 323570 - DNA, 75 bp, synthetic construct
  source 1..75: mol_type = other DNA
tttttagttatggtgcaggcgggcactcggcacaagcaaacagactggctgcgcttcttatacctaggttagata

SEQ ID NO: 323571 - DNA, 75 bp, synthetic construct
  source 1..75: mol_type = other DNA
gcgaaactggctatggcagagaaaatcgcttcttatcttgggtgggaatcattacggcacgatacctggccgaca

SEQ ID NO: 323572 - DNA, 75 bp, synthetic construct
  source 1..75: mol_type = other DNA
cgggcgacgcaggatgctccttccatcgcacgcttacgcgctgccggggcgatcctgatgggaaaaaccaatgtg

SEQ ID NO: 323573 - DNA, 75 bp, synthetic construct
  source 1..75: mol_type = other DNA
taacctcactgtgtttgtggactggaacaaacagcagcttgatggtcaactggatgaaattattaatccatttga

SEQ ID NO: 323574 - DNA, 75 bp, synthetic construct
  source 1..75: mol_type = other DNA
cggacaagggcaaacatctaacatcgatttaagcagtgtgcaaaatgtggaagtgctgcgtggccccttctctgc

SEQ ID NO: 323575 - DNA, 75 bp, synthetic construct
  source 1..75: mol_type = other DNA
aaaacatgagtgaaaaccgcaagggttacaataacttccgcctgaatcgcggcgtgccggaatacgggcaaaaag

SEQ ID NO: 323576 - DNA, 75 bp, synthetic construct
  source 1..75: mol_type = other DNA
ttgtatctgtttttttacaattatttgcattaataaccccctttttttcaggtggttatggacaaagtattagtg

SEQ ID NO: 323577 - DNA, 75 bp, synthetic construct
  source 1..75: mol_type = other DNA
acttaacccgtcgcatgcgggcggcgtgattactctgcaacgccattatcagggggtagacagtcgctggacaca

SEQ ID NO: 323578 - DNA, 75 bp, synthetic construct
  source 1..75: mol_type = other DNA
tcgataggtcatgtaccggaagatggctggtatgcaggtacggaagcgcgttatatgggcgatattatggcagat

SEQ ID NO: 323579 - DNA, 75 bp, synthetic construct
  source 1..75: mol_type = other DNA
atcaagcaaactcaggctgggttgcgctatgagcgtagcctgagttcgcgggatgagatgagtgtgatgatgtat

SEQ ID NO: 323580 - DNA, 75 bp, synthetic construct
  source 1..75: mol_type = other DNA
tttttgataaaaagaaggggccaagagatattgaaacgaaagaggttaatttgcgatataaattaccccctttgc

SEQ ID NO: 323581 - DNA, 75 bp, synthetic construct
  source 1..75: mol_type = other DNA
ctttactgaaggtactgacaaaatggatcgtgacgatatgcatgaaccgccccgggtttcctggagagtgtttta

SEQ ID NO: 323582 - DNA, 75 bp, synthetic construct
  source 1..75: mol_type = other DNA
aatgaatattcctcgggtgaaagagtttggcgtgcctggcaccggtggtaacacttgtgtagcaaactttgtcca

SEQ ID NO: 323583 - DNA, 75 bp, synthetic construct
  source 1..75: mol_type = other DNA
tgactcaggaaaaattagatttagctgcagagcgtatctttacgttgcatcgtgcctacacggtaaaactgatgc

SEQ ID NO: 323584 - DNA, 75 bp, synthetic construct
  source 1..75: mol_type = other DNA
catgaacagtaagcaatggcccggtaaagccgctattggtcgtctgaaagatgatgaactggtgcaatataattt

SEQ ID NO: 323585 - DNA, 75 bp, synthetic construct
  source 1..75: mol_type = other DNA
gaacagtaaacaatggcctggtaaagccgctattggtcgtctgaaagatgatgaactggcgcaatataatttgtg

SEQ ID NO: 323586 - DNA, 75 bp, synthetic construct
  source 1..75: mol_type = other DNA
catgaacagtaaacaatggcccggtaaagccgctattggtcgtctggaaggtgacgaactggcgcaatataattt

SEQ ID NO: 323587 - DNA, 75 bp, synthetic construct
  source 1..75: mol_type = other DNA
tctgaatctgtttgatgactacggcctgtggtgtaactacggacaactgcaccgtgactttacgtattgctacag

SEQ ID NO: 323588 - DNA, 75 bp, synthetic construct
  source 1..75: mol_type = other DNA
attcgcgcagcgggggaaaacgggttgccattatggattgacattccacagccaacacatggtgagcttatttct

SEQ ID NO: 323589 - DNA, 75 bp, synthetic construct
  source 1..75: mol_type = other DNA
caggaaccgacgaacaaaaatacatcatggttgcagcattggctgtgatggcgatagaaagggagcggagggaaa

SEQ ID NO: 323590 - DNA, 75 bp, synthetic construct
  source 1..75: mol_type = other DNA
tacgttgcatcgcgcctacacggtaaaactgatgcaaaccaaagatatgcgtaatgaacacgatcttatctgttc

SEQ ID NO: 323591 - DNA, 75 bp, synthetic construct
  source 1..75: mol_type = other DNA
acgcgggaaacattgcagcgattgggactggacgatattgccgccgatctggctgcgcacaacctgctaccggca

SEQ ID NO: 323592 - DNA, 75 bp, synthetic construct
  source 1..75: mol_type = other DNA
gcaaaccaaagatatgcgtaatgagcacgatcttatctgctcatgggtattcgacaaagatccgcagattccggc

SEQ ID NO: 323593 - DNA, 75 bp, synthetic construct
  source 1..75: mol_type = other DNA
gtcgctatccccggctggtgcgtgatctggcgggaaaactcggcaagcaggtagaactgacgctggtgggcagtt

SEQ ID NO: 323594 - DNA, 75 bp, synthetic construct
  source 1..75: mol_type = other DNA
gagcgggaaaaaacgacgcgcggtagcgaatcgaccagcatccgtgtggcggtagaaaaggttgatcaactgata

SEQ ID NO: 323595 - DNA, 75 bp, synthetic construct
  source 1..75: mol_type = other DNA
ccgcgaacaggcggaagccgttgccgcacagtaccggaacgtctttatcgaggatgaccacggggaacattttcg

SEQ ID NO: 323596 - DNA, 75 bp, synthetic construct
  source 1..75: mol_type = other DNA
ggattctctctcggcaatattaccgggcgacatcgccgaagatgacatcacagcggtactctgttttgtgattga

SEQ ID NO: 323597 - DNA, 75 bp, synthetic construct
  source 1..75: mol_type = other DNA
tctggcgggaaaactcggcaagcaggtagaactgacgctggtgggcagttccactgaactcgacaagagcctgat

SEQ ID NO: 323598 - DNA, 75 bp, synthetic construct
  source 1..75: mol_type = other DNA
agaacgcattatcgacccgctgacccacctggtacgcaatagcctcgatcacggtattgaactgccagaaaaacg

SEQ ID NO: 323599 - DNA, 75 bp, synthetic construct
  source 1..75: mol_type = other DNA
cgtcctggcccctggtggacaccgcgccttatttcacccgcaggcattactcgcagagcctaatctggcaacaga

SEQ ID NO: 323600 - DNA, 75 bp, synthetic construct
  source 1..75: mol_type = other DNA
gtaacgtggataaacctgcgaattatcgccagggctacgagtactactggaaaacccacgcacacccaaacatat

SEQ ID NO: 323601 - DNA, 75 bp, synthetic construct
  source 1..75: mol_type = other DNA
aatgaatttgctcagaaagaggctgacaaattcagggatgcgctacttgaaacactgaaaaccatgtatggtaag

SEQ ID NO: 323602 - DNA, 75 bp, synthetic construct
  source 1..75: mol_type = other DNA
atgagcgaatatttcagaatacttcaggggctgcctgatggtccttttacccgcaaacatgccgaagctgttgct

SEQ ID NO: 323603 - DNA, 75 bp, synthetic construct
  source 1..75: mol_type = other DNA
cctggttgtccgtcaggatagcacgttgatctggcgctcctggaattttgaggactgtgccgggtactggatgaa

SEQ ID NO: 323604 - DNA, 75 bp, synthetic construct
  source 1..75: mol_type = other DNA
atggtctggccaatggtctggcgtgaacaatggtctggcgtacctggaattttgaggacggtgccgggtactgga

SEQ ID NO: 323605 - DNA, 75 bp, synthetic construct
  source 1..75: mol_type = other DNA
ggagatattgcggaagacgacattactgcggtgctttgttttgtcattgaggccgatcagattgcctttgaaagc

SEQ ID NO: 323606 - DNA, 75 bp, synthetic construct
  source 1..75: mol_type = other DNA
aatatttggacgcgcagatgttactattaatagcgaaaatgtagttaatatccatggtgggaaattaattaacgc

SEQ ID NO: 323607 - DNA, 75 bp, synthetic construct
  source 1..75: mol_type = other DNA
gaaagctggtctgtgccggcatacaggaagggatatttactcaagaaaaaatgtggcagatgagggaatggttct

SEQ ID NO: 323608 - DNA, 75 bp, synthetic construct
  source 1..75: mol_type = other DNA
tggaacatacaattatgacgaaacaatagaaaatggttatattgaaaatgaagatgcttctattcagataaaaat

SEQ ID NO: 323609 - DNA, 75 bp, synthetic construct
  source 1..75: mol_type = other DNA
gcaagagaattaatggatagtgggtataatatcaaatattataaaaatccacaaactgggttttacaactctatt

SEQ ID NO: 323610 - DNA, 75 bp, synthetic construct
  source 1..75: mol_type = other DNA
aacgagtggaatggagcgctccatcagtgggtgatcccgttaccgttgtttctgagggcggggacacgcggaacg

SEQ ID NO: 323611 - DNA, 75 bp, synthetic construct
  source 1..75: mol_type = other DNA
aattagcgacattccgtaacgatatttctgtcactggagataacggtggaacaggtaatatcacaactcgcggta

SEQ ID NO: 323612 - DNA, 75 bp, synthetic construct
  source 1..75: mol_type = other DNA
tttggatatgcttgatattgaaaaaaagaaaggcttgttgtcagaaaaaacaataaaaaaggtaaaaagagatat

SEQ ID NO: 323613 - DNA, 75 bp, synthetic construct
  source 1..75: mol_type = other DNA
cggcgaatgtaccgctgcgccgtcaggtttccccggtgaaaggggtttatgcggtagaagtgctgggcctcggtg

SEQ ID NO: 323614 - DNA, 75 bp, synthetic construct
  source 1..75: mol_type = other DNA
cttagtaagagaggtgccggacgcgcgaacgtccggcaggacataagcaattataaggggatgattatgacctgt

SEQ ID NO: 323615 - DNA, 75 bp, synthetic construct
  source 1..75: mol_type = other DNA
gcacagtaccggaacgtctttatcgaggatgaccacggagaacattttcgcctggttgtccgtaataacggaaca

SEQ ID NO: 323616 - DNA, 75 bp, synthetic construct
  source 1..75: mol_type = other DNA
cgctccaggaattttgaggacggtgccgggtactggatgaaccagtacatcagggatttcgggattcttaagtaa

SEQ ID NO: 323617 - DNA, 75 bp, synthetic construct
  source 1..75: mol_type = other DNA
agggactgccggacggtccttttacccgcaaacatgccgaagccgttgccgcacagtaccggaacgtctttatcg

SEQ ID NO: 323618 - DNA, 75 bp, synthetic construct
  source 1..75: mol_type = other DNA
ggtgcggtaaaagcttcggtggaagcgggctccgcagctgcagccggtgtgggccaggtgaaatcaactcacgtc

SEQ ID NO: 323619 - DNA, 75 bp, synthetic construct
  source 1..75: mol_type = other DNA
aacaatgcttccgtgattccgagtgggatttgcagttccacattcaggtagccctggcgacgcagaactccgccc

SEQ ID NO: 323620 - DNA, 75 bp, synthetic construct
  source 1..75: mol_type = other DNA
gaagccatcatcatgctggaagtagaaggctatgtagaggtgcgtaaaggctcaggtattcatgtggtttccaac

SEQ ID NO: 323621 - DNA, 75 bp, synthetic construct
  source 1..75: mol_type = other DNA
cgccagctcatcgaaagtaatattgccgagttcgcggcaactcaggtaacgaaacaggacatcatgaaattgatg

SEQ ID NO: 323622 - DNA, 75 bp, synthetic construct
  source 1..75: mol_type = other DNA
tatcgacaaagccaacgtgctgcaatcctctattttatggcgggagatcgttaacgagatcgccacggaataccc

SEQ ID NO: 323623 - DNA, 75 bp, synthetic construct
  source 1..75: mol_type = other DNA
gcccgcatcgcgtttgaatctgctcgcaagcgtcgccacaaagtcacctcaatcgacaaagccaacgtgctgcaa

SEQ ID NO: 323624 - DNA, 75 bp, synthetic construct
  source 1..75: mol_type = other DNA
acgctggcaactgtgtcagcagggctggccggcggtctaaccggaaacagcaccgcatcagcagcagtgggagca

SEQ ID NO: 323625 - DNA, 75 bp, synthetic construct
  source 1..75: mol_type = other DNA
aagtgcgaatgctggtatcagttatctggctgatggtactgtagatccggcaaacgcagccattgcaggctgggt

SEQ ID NO: 323626 - DNA, 75 bp, synthetic construct
  source 1..75: mol_type = other DNA
attgatgacaatacagcggcaaaagccattgcccatgccattctcggtggtgtgacagcagcccttcagggcaac

SEQ ID NO: 323627 - DNA, 75 bp, synthetic construct
  source 1..75: mol_type = other DNA
gctaatgacagtatcagcccgatatttgacaaggagaaagagcagaggcgtctgcagacagtggggcttatcagt

SEQ ID NO: 323628 - DNA, 75 bp, synthetic construct
  source 1..75: mol_type = other DNA
tggaaaaaactgcacgagcatattgattcccgcaccgtcgacaactggtgtgatgaccacgatcaaatcctcaag

SEQ ID NO: 323629 - DNA, 75 bp, synthetic construct
  source 1..75: mol_type = other DNA
aacaatgttttcgtgactccgagtgggatttacagttccatattcaagtggccctggcgacgcagaactctgctc

SEQ ID NO: 323630 - DNA, 75 bp, synthetic construct
  source 1..75: mol_type = other DNA
gttgttgagaataatttacttggcggtagtgaagatgctcaggctgcgtggatacgccagcatggtatcgacatg

SEQ ID NO: 323631 - DNA, 75 bp, synthetic construct
  source 1..75: mol_type = other DNA
gtccggcaaaactgtatcaggggctggaagcattctgtccgctgcgtgcagacattgccgcaaacggcttcgaca

SEQ ID NO: 323632 - DNA, 75 bp, synthetic construct
  source 1..75: mol_type = other DNA
aagtggcacaaatcaccgacatcgtttttgccgctgttaaacctggcattatgatcaaagtgcttagtgaaatca

SEQ ID NO: 323633 - DNA, 75 bp, synthetic construct
  source 1..75: mol_type = other DNA
atgccgtttgacctgctgacggttctgtccactcgcctggatgttgaagtgaatggctttaacggtagtgttctg

SEQ ID NO: 323634 - DNA, 75 bp, synthetic construct
  source 1..75: mol_type = other DNA
tgcccacccgcctggatattgaagtgaatggctttaacggcggtgttctgaacggtgttccttctgcatatcact

SEQ ID NO: 323635 - DNA, 75 bp, synthetic construct
  source 1..75: mol_type = other DNA
agccgacaaaaaagcagcagagaaagctgcagccgacaaaaaagcagcagaaaaagcggctgctgaaaaggcagc

SEQ ID NO: 323636 - DNA, 75 bp, synthetic construct
  source 1..75: mol_type = other DNA
gtgcgtgacgcgctgaactccggttctgcgggtacagaagatgaagttactaccccagcagcggataacgccatt

SEQ ID NO: 323637 - DNA, 75 bp, synthetic construct
  source 1..75: mol_type = other DNA
cacgcatctgggaagtgctctgtttttttcggaagccttcagtgcggcacgactggcagagtgtgtggttcatct

SEQ ID NO: 323638 - DNA, 75 bp, synthetic construct
  source 1..75: mol_type = other DNA
ctattatttctgcggtcatcgcgctggtctgccacgctatcgctcttgaagcccgcattttgcctggcggcgata

SEQ ID NO: 323639 - DNA, 75 bp, synthetic construct
  source 1..75: mol_type = other DNA
cgctgttacagggcttgcaggaagaagggcgcaagcgcaacttaccggtgatggtgatgctttttgaacctcaac

SEQ ID NO: 323640 - DNA, 75 bp, synthetic construct
  source 1..75: mol_type = other DNA
tagacttggcgaattttatcttcatggtagcgatggtaagcctctggattatacaaaggcgagatactggtatga

SEQ ID NO: 323641 - DNA, 75 bp, synthetic construct
  source 1..75: mol_type = other DNA
atgaaccacgatatcccgctaaaatattttgatattgccgatgagtacgcgaccgaatgcgcagagcctgtcgcc

SEQ ID NO: 323642 - DNA, 75 bp, synthetic construct
  source 1..75: mol_type = other DNA
tggtgtggcttctggagtaacgaggatgtatcggtgtggtggaaccgtctgtgtgacaacgtactgccggaaaaa

SEQ ID NO: 323643 - DNA, 75 bp, synthetic construct
  source 1..75: mol_type = other DNA
acaacttcattcaggtggatttcgacacgccgtggtgtcagccggaaagcgacgttattgcagaattaagccgcc

SEQ ID NO: 323644 - DNA, 75 bp, synthetic construct
  source 1..75: mol_type = other DNA
tgctttccttctggttgcttcatcgcggcagtggagaaaaaaatctcaacgtacgtgcagcggcactgcatgtat

SEQ ID NO: 323645 - DNA, 75 bp, synthetic construct
  source 1..75: mol_type = other DNA
cgattattgaaagacagcgtgaatgaattacttgaaggtgcgccggtttcgctggatatcgctgaactgaagcgc

SEQ ID NO: 323646 - DNA, 75 bp, synthetic construct
  source 1..75: mol_type = other DNA
tgccattgccctggtggtgattactattttgattgtttgggaggcgatagaacgttttcgcacgccgcgtccggt

SEQ ID NO: 323647 - DNA, 75 bp, synthetic construct
  source 1..75: mol_type = other DNA
cattgaacgtcttgcggcgctaccggcttgcggatttaaccagaatggctgaaattagtaaaaaagagaatgcca

SEQ ID NO: 323648 - DNA, 75 bp, synthetic construct
  source 1..75: mol_type = other DNA
ttcatcttctgtttgctctacggttttctcaagccgatgttcgataactggtttaaaacaatcatcacagcaata

SEQ ID NO: 323649 - DNA, 75 bp, synthetic construct
  source 1..75: mol_type = other DNA
ccttagaaggggctatagctgaatttctagtatgggcaggaacaatattcatacttatcattgcaaccattgtga

SEQ ID NO: 323650 - DNA, 75 bp, synthetic construct
  source 1..75: mol_type = other DNA
ttctgccttatgtatggtttcctccgccccatgttcaataactggttgcaaaatatatttgcaggaatattaaca

SEQ ID NO: 323651 - DNA, 75 bp, synthetic construct
  source 1..75: mol_type = other DNA
agaatgcgggaataaagtctgcaattccagaatcacgggatattgaggatgacaatgacaatatggatgacgtat

SEQ ID NO: 323652 - DNA, 75 bp, synthetic construct
  source 1..75: mol_type = other DNA
gagtataaggatttcaaagcggcgcagagtgattgctgtatgtaccctggttcagacctggtgtcaacgacggat

SEQ ID NO: 323653 - DNA, 75 bp, synthetic construct
  source 1..75: mol_type = other DNA
gccaatcaagcgaatattgtagaacttggcgctcaagtttgtcttgccggagtatgcgctgcaatactggtgtac

SEQ ID NO: 323654 - DNA, 75 bp, synthetic construct
  source 1..75: mol_type = other DNA
ggtgcaattaaagaaaccaaacgttccacccaggacaacattcagggctggaaggatgcgaatgcaggtaagccc

SEQ ID NO: 323655 - DNA, 75 bp, synthetic construct
  source 1..75: mol_type = other DNA
ctacatcatgtggcgtggataccagactctggctggtaagctctctacgccgatggaagacacgatgtgggacat

SEQ ID NO: 323656 - DNA, 75 bp, synthetic construct
  source 1..75: mol_type = other DNA
ttaaacaatatattgagcggacgttaaaaacgcaggcagctgaagtttggttagccagaatacatgaagttggtg

SEQ ID NO: 323657 - DNA, 75 bp, synthetic construct
  source 1..75: mol_type = other DNA
acaggacgacgtgcagaccatcgcccgtaagctggcatcagccaactgctctggaagcggtaaggctgtttgtat

SEQ ID NO: 323658 - DNA, 75 bp, synthetic construct
  source 1..75: mol_type = other DNA
agagagatgggagagctatgcgtgtgcgatctctgcacggcactggaacagtcacaacccaagatctcccgccat

SEQ ID NO: 323659 - DNA, 75 bp, synthetic construct
  source 1..75: mol_type = other DNA
tcagcccaagatctcccgtcatcttgcaatgctccgggaaagtggtctattgctggaccgtaaacagggcaagtg

SEQ ID NO: 323660 - DNA, 75 bp, synthetic construct
  source 1..75: mol_type = other DNA
gggatattattttcggagcacctgatggcgaactacccgaaggttttgaatttgtgaagccggaaggtcaggagg

SEQ ID NO: 323661 - DNA, 75 bp, synthetic construct
  source 1..75: mol_type = other DNA
ttaagaatctgtctgatgaaacacgtctgggtattgttctcatactcagaactatgggggagttgtgcgtatgtg

SEQ ID NO: 323662 - DNA, 75 bp, synthetic construct
  source 1..75: mol_type = other DNA
tcaaaaacctctccgatgaaacccgtctgagcatcgtgttgctgctcagggagatgggagagctatgcgtgtgcg

SEQ ID NO: 323663 - DNA, 75 bp, synthetic construct
  source 1..75: mol_type = other DNA
agaaatcaacccacgcctcatatatgcttcatcgtcaggtttcggacataccggtccgctaaaagatgctccggc

SEQ ID NO: 323664 - DNA, 75 bp, synthetic construct
  source 1..75: mol_type = other DNA
ctacgataccatcattcaggcaatgagcgggataatgatggaaacaggataccctgatgctccgccagtgcgcgt

SEQ ID NO: 323665 - DNA, 75 bp, synthetic construct
  source 1..75: mol_type = other DNA
tttcgcccaggtacaatggaaaaactcgggttttcatgggaaaggttacaagaaatcaacccgcgccttatatat

SEQ ID NO: 323666 - DNA, 75 bp, synthetic construct
  source 1..75: mol_type = other DNA
tcaaaaatctttccgatgaaacccgtctggggattgtcatgctgctcagagagattggggaagtgtgtgtatgcg

SEQ ID NO: 323667 - DNA, 75 bp, synthetic construct
  source 1..75: mol_type = other DNA
tacaaaaccgctcaagaactaatgaaagtgatgcagcaaaagcattcaaatcacatgcagaagagatcaaaagaa

SEQ ID NO: 323668 - DNA, 75 bp, synthetic construct
  source 1..75: mol_type = other DNA
tgccttgacgaacactggaaaaaacctgaaaaaagcattaactatcgttctccaaaaagagtggtcgctttaatt

SEQ ID NO: 323669 - DNA, 75 bp, synthetic construct
  source 1..75: mol_type = other DNA
tcaggaagaagcagaaaaactgcgtgcgactgccgactatgaagtcaccagaacgctggcagaagcagagcgtca

SEQ ID NO: 323670 - DNA, 75 bp, synthetic construct
  source 1..75: mol_type = other DNA
aattcgatgcgcttgaagctaaatgtgcggcactggaaaacaacgtaataccagtgtcaactgaactgccaccag

SEQ ID NO: 323671 - DNA, 75 bp, synthetic construct
  source 1..75: mol_type = other DNA
aaactggctggatgtaccgtgcagtggaaggccaggtgcactactggtgggttgggctgggtaatgttatcggct

SEQ ID NO: 323672 - DNA, 75 bp, synthetic construct
  source 1..75: mol_type = other DNA
cctggttgattaaattctgggcgcccatccccgcggtcatcgcggcgggtattctctccacttactattttggca

SEQ ID NO: 323673 - DNA, 75 bp, synthetic construct
  source 1..75: mol_type = other DNA
tttagctacccacgtgtattaggtcatgaaatatgcgccgaagcggtttcgcgaggcagccagagccaaacagca

SEQ ID NO: 323674 - DNA, 75 bp, synthetic construct
  source 1..75: mol_type = other DNA
tgcagcactggaaaacaaagtaataccagtgtcatctgaactgcctccagctaatgaaagttttttgttatttga

SEQ ID NO: 323675 - DNA, 75 bp, synthetic construct
  source 1..75: mol_type = other DNA
ccagcaaatgaaagtgttctgttatttgatgctaacggagaaggctggctaattggctggcgttctctctggtac

SEQ ID NO: 323676 - DNA, 75 bp, synthetic construct
  source 1..75: mol_type = other DNA
atgaccacctttacccaaaaagaactgattaaagaaataaaagagcgcatcagcagcctcgacgttcgagacgat

SEQ ID NO: 323677 - DNA, 75 bp, synthetic construct
  source 1..75: mol_type = other DNA
atgaccacctttacccaaaaagaactgattaaagaaataaaagatcgcatcagcagcctcgacgtacgagacgat

SEQ ID NO: 323678 - DNA, 75 bp, synthetic construct
  source 1..75: mol_type = other DNA
tttaattgtcgaacgggatggccgtatttttgctaccgatgcgcttgaggtcgcgattacgtttgtagagtctct

SEQ ID NO: 323679 - DNA, 75 bp, synthetic construct
  source 1..75: mol_type = other DNA
gccgcgctgatgttgattatcggctgggaaaaacgcttcttccgccgtgccgggctacaaacagctaaggagaac

SEQ ID NO: 323680 - DNA, 75 bp, synthetic construct
  source 1..75: mol_type = other DNA
gctgcccatcttccgtattcccgtgaaaatgcagaaagtttctgctgcctcaccgctgacgcaaaaaccggatca

SEQ ID NO: 323681 - DNA, 75 bp, synthetic construct
  source 1..75: mol_type = other DNA
atgaccacctttacccaaaaagaactgattaaagaaattaaagaacgcatcagcagcctcgacgtccgagacgat

SEQ ID NO: 323682 - DNA, 75 bp, synthetic construct
  source 1..75: mol_type = other DNA
ccagtgtcagctgaactgccaccagcaaatgaaagtgttctgttatttgatgctagtggagaaggctggctgatt

SEQ ID NO: 323683 - DNA, 75 bp, synthetic construct
  source 1..75: mol_type = other DNA
acgcaccgcagacgcacctttccacagtctttcctgggggcagcaacgtctggcgctgatcgtccgcgcactggt

SEQ ID NO: 323684 - DNA, 75 bp, synthetic construct
  source 1..75: mol_type = other DNA
attggcatttatcaggccgtttcggatcgccagcaaaaactggtgcagcagtggctggatattctcggcattgat

SEQ ID NO: 323685 - DNA, 75 bp, synthetic construct
  source 1..75: mol_type = other DNA
aatacctttccactggcgagacgcgtaaaaccctgctctgtcaggcgctgatgtcagatcctgatttactgattc

SEQ ID NO: 323686 - DNA, 75 bp, synthetic construct
  source 1..75: mol_type = other DNA
gcaatcaggacgtgatggtcatgagcccggatagcgatttcttccgctacatgaagacgccgacttccgcaacgc

SEQ ID NO: 323687 - DNA, 75 bp, synthetic construct
  source 1..75: mol_type = other DNA
cgcaccatgctgaagatgcacccgcttgtattacccatcgactggagttcgtgccggacgctgggttctatcact

SEQ ID NO: 323688 - DNA, 75 bp, synthetic construct
  source 1..75: mol_type = other DNA
gcttgtattacccatcgtctggagttcgtgccggacggtggactctatcgctatgtgctgacaaaaatatattga

SEQ ID NO: 323689 - DNA, 75 bp, synthetic construct
  source 1..75: mol_type = other DNA
ggcagcggcgaaaccatctgggatatcaaaaagcatatcggttacgtcagcagtagtttgcatctggattaccgg

SEQ ID NO: 323690 - DNA, 75 bp, synthetic construct
  source 1..75: mol_type = other DNA
ggtggatatggctcgtaacgcgatgattgattttgttgatggtgaagttgggccaaacaagaacgttccggggct

SEQ ID NO: 323691 - DNA, 75 bp, synthetic construct
  source 1..75: mol_type = other DNA
aagggtttcttcacgggagatgtgtaccacgagacctgaaagtgaatgaaacggatgctgaatacctggtgcgta

SEQ ID NO: 323692 - DNA, 75 bp, synthetic construct
  source 1..75: mol_type = other DNA
aacgctgcaattgtctcagctaacgttaaacgcgggtgatagttgggcgtttgtcggttcaaatggcagcgggaa

SEQ ID NO: 323693 - DNA, 75 bp, synthetic construct
  source 1..75: mol_type = other DNA
ggctggatattctcggcattgataaacgcacggctgacgctcccttccatagtctttcctggggacagcagcgtc

SEQ ID NO: 323694 - DNA, 75 bp, synthetic construct
  source 1..75: mol_type = other DNA
gcctgtattacccatcgtcttgagttcgtgccggacggtgacctttatcgctatgcgctgacaaaaataaactga

SEQ ID NO: 323695 - DNA, 75 bp, synthetic construct
  source 1..75: mol_type = other DNA
gttcgtgaccagcgggtgaatgaggtctgtcgcatgctggggatacttaaccgtaccactccttatatttcagac

SEQ ID NO: 323696 - DNA, 75 bp, synthetic construct
  source 1..75: mol_type = other DNA
atgcagcagttcacgccgcagcaggtcgccgaactggaagccatccgcatggcctgtgatgcaggcgatttccgg

SEQ ID NO: 323697 - DNA, 75 bp, synthetic construct
  source 1..75: mol_type = other DNA
ggcgtaagcgccgggtgttgaagtttctgaaaaacacgggggtgtttgactcgtttggcgaactgctgtgttcgc

SEQ ID NO: 323698 - DNA, 75 bp, synthetic construct
  source 1..75: mol_type = other DNA
gcctcgtgcagaacagtacgacacgcgaaaaaccatcaagcaaactcaggcagggttgcgttatgagcgcagcct

SEQ ID NO: 323699 - DNA, 75 bp, synthetic construct
  source 1..75: mol_type = other DNA
accagtcaatcccgatggcaccacaacttaccccgtcacacgcaggcggcgtgattacgctgcaacgccattatc

SEQ ID NO: 323700 - DNA, 75 bp, synthetic construct
  source 1..75: mol_type = other DNA
atgctgaggccgttctgaacatattccgtgatgaggcacttgcagataatccagatgaaccgggtgctcaggacc

SEQ ID NO: 323701 - DNA, 75 bp, synthetic construct
  source 1..75: mol_type = other DNA
acaaataccatgaatgctctgaatacagcgatcgcaagacaggaacggcttgggacgtctgccaatcaaagcctg

SEQ ID NO: 323702 - DNA, 75 bp, synthetic construct
  source 1..75: mol_type = other DNA
aggtcgccgaactggaagccatccgcatggcctgtgatgcaggcgatttccggacctatatcctgctgaacggcg

SEQ ID NO: 323703 - DNA, 75 bp, synthetic construct
  source 1..75: mol_type = other DNA
ccgaagcgggcgacatccgcgctgctgtacggcagtatatggctgaagtggagtccggcgtttacccgggcgaag

SEQ ID NO: 323704 - DNA, 75 bp, synthetic construct
  source 1..75: mol_type = other DNA
ctaacgatcaaatcgatttataccgttatcgtgcagaccagatccgccagattagcgacgccttacgtcagggga

SEQ ID NO: 323705 - DNA, 75 bp, synthetic construct
  source 1..75: mol_type = other DNA
ggctggaagcgcccgaaggttcacaattactgttagtggcaaactctgatttctgtcgctggcaacccaacgaga

SEQ ID NO: 323706 - DNA, 75 bp, synthetic construct
  source 1..75: mol_type = other DNA
ttatcgtgctgatcagatccgccagattagcgatgccttacgtcaggggagagtcgtgctgcgccaggggcgctg

SEQ ID NO: 323707 - DNA, 75 bp, synthetic construct
  source 1..75: mol_type = other DNA
acgactacaattttctcaattacttaacgtatcgtgccgtttcgttttccataaatttacaattttattaccatg

SEQ ID NO: 323708 - DNA, 75 bp, synthetic construct
  source 1..75: mol_type = other DNA
gatgaaactaaccagctacttattgcagccaaaaatcgtagtggatggtgtaaaacagatgaggctgcagacaga

SEQ ID NO: 323709 - DNA, 75 bp, synthetic construct
  source 1..75: mol_type = other DNA
atgagccttctgtggtggctattcgtcaggatcgtgccggttcaccgaaaagcgtagctgcagtaggtcatgacg

SEQ ID NO: 323710 - DNA, 75 bp, synthetic construct
  source 1..75: mol_type = other DNA
tttccaatgacttgtccattgacctgggtactgcgaataccctcatttatgtaaaagggcaaggcatcgtattga

SEQ ID NO: 323711 - DNA, 75 bp, synthetic construct
  source 1..75: mol_type = other DNA
ttggtgtgggcgaatacgctggcctggcaagaagcgcgtaaagctcgcattatcctgggtaagacgaatgcgcaa

SEQ ID NO: 323712 - DNA, 75 bp, synthetic construct
  source 1..75: mol_type = other DNA
gttaacatctcatatagatgagaataacaagagcgcatttagtcaaggctcttcaggaagcacttattactctcc

SEQ ID NO: 323713 - DNA, 75 bp, synthetic construct
  source 1..75: mol_type = other DNA
gagacagttatgaatgggtgaccctgaacacccgcttgattaaggaggtgacgcagaattttgcgctggcgtttg

SEQ ID NO: 323714 - DNA, 75 bp, synthetic construct
  source 1..75: mol_type = other DNA
tgctggcgtgcgctacagctccgtgtggtttgattccaacgaccattacgttactccgggtaacggcgatgacag

SEQ ID NO: 323715 - DNA, 75 bp, synthetic construct
  source 1..75: mol_type = other DNA
tacgccagcagcagtaagcgtggtggatggcgaggagatgcgcctggcaacaccgcgcattaacttgtccgaatc

SEQ ID NO: 323716 - DNA, 75 bp, synthetic construct
  source 1..75: mol_type = other DNA
gattcgcggatttggctcccgctccacttacggaattcgcggtattcgcctgtatgtggacggtattcccgccac

SEQ ID NO: 323717 - DNA, 75 bp, synthetic construct
  source 1..75: mol_type = other DNA
ccagatcagtgccgacgtttaatggttgccgagcgcggtgccagtccgtgcaataacacgctggcggcaatcggt

SEQ ID NO: 323718 - DNA, 75 bp, synthetic construct
  source 1..75: mol_type = other DNA
atggcgttagtggttatcgatggcaatcagcgtgtttttcgcagttatggggaaacacgccccggaaataacgtt

SEQ ID NO: 323719 - DNA, 75 bp, synthetic construct
  source 1..75: mol_type = other DNA
ttgctgagcgcggtgccagtccgtgcaataacacgctggcggcaattggcagcggcggcgtctattccacgcctg

SEQ ID NO: 323720 - DNA, 75 bp, synthetic construct
  source 1..75: mol_type = other DNA
ggtcggcgattcactgggcatgacggttcaggggcatgactccacgctaccggttaccgttgccgatatcgccta

SEQ ID NO: 323721 - DNA, 75 bp, synthetic construct
  source 1..75: mol_type = other DNA
agcgtgatgagtggaacagccagctgatgagcgacacctgtcctgaaatcaccctggacaatgtactggcaactt

SEQ ID NO: 323722 - DNA, 75 bp, synthetic construct
  source 1..75: mol_type = other DNA
tcatggaacggaatggcgatttacggtgccctcgctgttggtgctccgcttggcctgttgattcatagccattac

SEQ ID NO: 323723 - DNA, 75 bp, synthetic construct
  source 1..75: mol_type = other DNA
gatgccggaccgttttggcggcgtgaaagtggcgattgtctctctgcttgtagaaacggtgggcttgttgctgct

SEQ ID NO: 323724 - DNA, 75 bp, synthetic construct
  source 1..75: mol_type = other DNA
gaaatcaccctggacaatgtactggcaacttttcgccatctgaatgccagtaagatgcagacatttgaacaggga

SEQ ID NO: 323725 - DNA, 75 bp, synthetic construct
  source 1..75: mol_type = other DNA
ccagctgatgagcgacacctgtcctgaaatcaccctggacaatgtactggcaacattctgccatcttaatgccag

SEQ ID NO: 323726 - DNA, 75 bp, synthetic construct
  source 1..75: mol_type = other DNA
taagatgcagacatttgaacagggactgattgatgtctaccggaaattgtcatgggattacagaaccaataatcc

SEQ ID NO: 323727 - DNA, 75 bp, synthetic construct
  source 1..75: mol_type = other DNA
aaaacatgtttacggcatccggtacggaggtgatcccgtccgtggctattgaccggatcatcgcacagcgtaatg

SEQ ID NO: 323728 - DNA, 75 bp, synthetic construct
  source 1..75: mol_type = other DNA
agactgatatttctgatgtgtctcttgaactgattgccgctatcaaacagggctatctcaccgttaaagcagctg

SEQ ID NO: 323729 - DNA, 75 bp, synthetic construct
  source 1..75: mol_type = other DNA
atagagaccgtcagtgatggttatcagttttttggcttcgatatcgaaaatgactatatcgctggtttcgaccgc

SEQ ID NO: 323730 - DNA, 75 bp, synthetic construct
  source 1..75: mol_type = other DNA
tctggcggggggcgcgttgctgctggcggcgattttgcccgtccccgcaccgttcaaatttgccctgttggtcgt

SEQ ID NO: 323731 - DNA, 75 bp, synthetic construct
  source 1..75: mol_type = other DNA
gtaccggcaatgacgggagaacgcccatcgctgtggagcgttatcgggcttatctggaaaccaggactaggtctg

SEQ ID NO: 323732 - DNA, 75 bp, synthetic construct
  source 1..75: mol_type = other DNA
gtaccggcaatggcgggagaacgcccatcgctgtggagcgttgttgggcttatctggaaaccagggctaggactg

SEQ ID NO: 323733 - DNA, 75 bp, synthetic construct
  source 1..75: mol_type = other DNA
gataaaccggaagaagcgaaaaggaatatcacccgtcttgccgaccggaaaatctgggaccgcctgatgacggat

SEQ ID NO: 323734 - DNA, 75 bp, synthetic construct
  source 1..75: mol_type = other DNA
tggcgaacggccaggcactgaaagaggctcagtgcacctgcggggccagcggcatgtgccgtcatcgcgtgatgc

SEQ ID NO: 323735 - DNA, 75 bp, synthetic construct
  source 1..75: mol_type = other DNA
cggtcagatctataacacgatattcagtgggagacacatgaaagagcttgatgctcttcatgaagttctacagca

SEQ ID NO: 323736 - DNA, 75 bp, synthetic construct
  source 1..75: mol_type = other DNA
attcgcgggttatccgatttgcgagaagaacttgctaaaccagatatagattttggtctattgagagagttgcgg

SEQ ID NO: 323737 - DNA, 75 bp, synthetic construct
  source 1..75: mol_type = other DNA
ttcaaaaatacaagcaggaaaaaaaacgcttcgcgaccattaccgcttacgactacagcttcgccaaattgtttg

SEQ ID NO: 323738 - DNA, 75 bp, synthetic construct
  source 1..75: mol_type = other DNA
ggcgctggctattccggttatcggtatcggcgcaggtaacgtcaccgacgggcagatcctcgtcatgcacgacgc

SEQ ID NO: 323739 - DNA, 75 bp, synthetic construct
  source 1..75: mol_type = other DNA
tcgctgaaacgggcgacatccgcgctgcggtgcggcagtatatggctgaagtggagtccggcgtttatccgggcg

SEQ ID NO: 323740 - DNA, 75 bp, synthetic construct
  source 1..75: mol_type = other DNA
aaaccaaaagaatttgccctgctggaattactgatgcgtaacgctggtcgggtactgccgcgcaaactgattgaa

SEQ ID NO: 323741 - DNA, 75 bp, synthetic construct
  source 1..75: mol_type = other DNA
atatcacccgtcttgccgaccggaaaatctgggaccgcctgatgacggatacgggcatgtacaccttcatgagtt

SEQ ID NO: 323742 - DNA, 75 bp, synthetic construct
  source 1..75: mol_type = other DNA
caataatccctgccgtctgggcaagagaatcattattgaaaacatgctgtaccgctggagtaacgggcgtgtgac

SEQ ID NO: 323743 - DNA, 75 bp, synthetic construct
  source 1..75: mol_type = other DNA
cataccatttgacgtattgcagggtggcgcaagcctgattaatgcaatcagccaggggcttggtggccccaaggt

SEQ ID NO: 323744 - DNA, 75 bp, synthetic construct
  source 1..75: mol_type = other DNA
gccgctggttgatgccctggagaataatcaggggtgaagaaaattatgcttcccgatttattagtctgatgtgtg

SEQ ID NO: 323745 - DNA, 75 bp, synthetic construct
  source 1..75: mol_type = other DNA
agggcagacgctatggcttgtattttccgtccgccactggtactgccgtaacccggcttgttcacgtaaaatttt

SEQ ID NO: 323746 - DNA, 75 bp, synthetic construct
  source 1..75: mol_type = other DNA
tcactcgagtccacgaaagcggatcagcagaatttcggtgcgtggcggcggggatggaagctgatgctgctgcta

SEQ ID NO: 323747 - DNA, 75 bp, synthetic construct
  source 1..75: mol_type = other DNA
tcactcgagtccacgaaagcggatcagcagaatttcggtgcgtggctgcggggatggaagctgatgctgcggcta

SEQ ID NO: 323748 - DNA, 75 bp, synthetic construct
  source 1..75: mol_type = other DNA
tcactcgagtccacgaaagcggatcagcagaatttcggagcgtggcggcggggatggaagctgatgctgcggcta

SEQ ID NO: 323749 - DNA, 75 bp, synthetic construct
  source 1..75: mol_type = other DNA
tcactcgagtccacgaaagcggatcagcagaatttcggggcgtggcggcggggatggaagctgatgctgcagcta

SEQ ID NO: 323750 - DNA, 75 bp, synthetic construct
  source 1..75: mol_type = other DNA
tcactcgagtccacgaaagcggatcagcagaatttcggggcgtggctgcggggatggaagctgatgctgctgcta

SEQ ID NO: 323751 - DNA, 75 bp, synthetic construct
  source 1..75: mol_type = other DNA
tcactcgagtccacgaaagcggatcagcagaatttcggggcgtggcagcggggatggaagctgatgctgcggcta

SEQ ID NO: 323752 - DNA, 75 bp, synthetic construct
  source 1..75: mol_type = other DNA
caactggtactcaagttctaccgtattctgaaaacccaaaataaatcacagccaagcagctggttcactcgagtc

SEQ ID NO: 323753 - DNA, 75 bp, synthetic construct
  source 1..75: mol_type = other DNA
gtatccgcattatgcaggccattattggcggcattatcgccggttttggcgcgcgtctggcaatgggctgtaacc

SEQ ID NO: 323754 - DNA, 75 bp, synthetic construct
  source 1..75: mol_type = other DNA
catccctgcggtcatcgcggcgggtattctctccacttactattttggcatcactggcaccttttgggcagtcac

SEQ ID NO: 323755 - DNA, 75 bp, synthetic construct
  source 1..75: mol_type = other DNA
aaatagcgcagcaactggcactcgagttctaccgtattctgaaaacccaaaataaatcacagctaaggagctggt

SEQ ID NO: 323756 - DNA, 75 bp, synthetic construct
  source 1..75: mol_type = other DNA
aataaatcacagctaagcagcttgttcactcgagtccacgaaagcggctcagcagaacttcggtgcgtggctgcg

SEQ ID NO: 323757 - DNA, 75 bp, synthetic construct
  source 1..75: mol_type = other DNA
aacccaaaataaatcacagctaagtagctggttcactcgagtccacgaaagcggttcagcagaatttcggcgcgt

SEQ ID NO: 323758 - DNA, 75 bp, synthetic construct
  source 1..75: mol_type = other DNA
gtcgaaggtcatgtaaatcgcctgaagatgctaaaacgccagatgtatggtagagccggatttgaactactcagg

SEQ ID NO: 323759 - DNA, 75 bp, synthetic construct
  source 1..75: mol_type = other DNA
gcgagggcttctggacccatggagggagtggttaaaagagcaacgagaaagtggtaattataacgccagccggat

SEQ ID NO: 323760 - DNA, 75 bp, synthetic construct
  source 1..75: mol_type = other DNA
gaagatgctgaaacgccagatgtatggtcgagtcggatttgaactacttaggcagagggtcatgagtccactggc

SEQ ID NO: 323761 - DNA, 75 bp, synthetic construct
  source 1..75: mol_type = other DNA
tcacagctaagcagctggttcactcgagtccacgaaagcggttcagcagaacttcggcgcgtggcggcggggatg

SEQ ID NO: 323762 - DNA, 75 bp, synthetic construct
  source 1..75: mol_type = other DNA
tgctgggcagccaggttctgaaggtgattaacgaatccaccaatcagaatgcggcagtgaagcgtattgagttcg

SEQ ID NO: 323763 - DNA, 75 bp, synthetic construct
  source 1..75: mol_type = other DNA
attgttattgcgctggtggcgatggctatcgcgctgctgtctacgctttacccttcatggcgcgctgccgccact

SEQ ID NO: 323764 - DNA, 75 bp, synthetic construct
  source 1..75: mol_type = other DNA
aattataacgccagccggatatggcgggaaatggtgtcccgggggtttacaggcagtgaaaccatcgtcagggat

SEQ ID NO: 323765 - DNA, 75 bp, synthetic construct
  source 1..75: mol_type = other DNA
tgcggaatacgcccgtattcaaaaggaagaaacatcaaaaatattgtatcaatatcaaggtgccatgaaaaaaca

SEQ ID NO: 323766 - DNA, 75 bp, synthetic construct
  source 1..75: mol_type = other DNA
tagaaaacatgattaaacttcaggataatttcttcaactattgcattgtcaaaggtgttacagagattaatgatg

SEQ ID NO: 323767 - DNA, 75 bp, synthetic construct
  source 1..75: mol_type = other DNA
catgtaaatcgcctgaagatgctgaaacgtctgatgtatggtcgagccggatttgaactacttaggcagagggta

SEQ ID NO: 323768 - DNA, 75 bp, synthetic construct
  source 1..75: mol_type = other DNA
gaagaaaattatgcatcccgatttattagtctgatgtgtgaaaaagaaccggagctgaaaatagcgcagcaactg

SEQ ID NO: 323769 - DNA, 75 bp, synthetic construct
  source 1..75: mol_type = other DNA
gtttctcaatacagaaggaatccaggggttcagactggaaagcgccgtcgctgaaggtatgcgctcagtagcaac

SEQ ID NO: 323770 - DNA, 75 bp, synthetic construct
  source 1..75: mol_type = other DNA
cagtatgcccgcctgctacagcaggggcacgaagacagtaccctagccaagataaatctagctatggatatcaag

SEQ ID NO: 323771 - DNA, 75 bp, synthetic construct
  source 1..75: mol_type = other DNA
ttccagtagctttagtgtttgatccgccaatcccgatgcctacaggaaccaatgttctcggcctggcgtggctcg

SEQ ID NO: 323772 - DNA, 75 bp, synthetic construct
  source 1..75: mol_type = other DNA
acaggtgtgaatgaaagggattatgataaaaatattatttatgtcactctaaaatccggtagcgggggtcagagt

SEQ ID NO: 323773 - DNA, 75 bp, synthetic construct
  source 1..75: mol_type = other DNA
atgaatgttcctgtagaaaatagaattaacatctaccccgattttcataaaaatattgatgcaagtcttggtatg

SEQ ID NO: 323774 - DNA, 75 bp, synthetic construct
  source 1..75: mol_type = other DNA
aaactaccggaaagagtgggaaaagtatcctttaagcatattatttagtgttcccaaagccaataatactgttga

SEQ ID NO: 323775 - DNA, 75 bp, synthetic construct
  source 1..75: mol_type = other DNA
tatagatgctctgaagtttattgaggctatgatacaattaactccaacacttcaggaatattatggcctattaaa

SEQ ID NO: 323776 - DNA, 75 bp, synthetic construct
  source 1..75: mol_type = other DNA
atgaagtatgtctttattgaaaaacatcaggctgagttcagcatcaaagcaatgtgccgtgtgctccgtgtggcc

SEQ ID NO: 323777 - DNA, 75 bp, synthetic construct
  source 1..75: mol_type = other DNA
atagtatttttactaagatcaatacaaggattcctcgagacacaatgcccatccttcgtcgttatcacctatggc

SEQ ID NO: 323778 - DNA, 75 bp, synthetic construct
  source 1..75: mol_type = other DNA
gcaaaggcaatttgtcattgaataatggttatgaagagagcaataccgatgataacaaggtagtttacaacggta

SEQ ID NO: 323779 - DNA, 75 bp, synthetic construct
  source 1..75: mol_type = other DNA
tgaaccagggagatattcgcccggagaaaatctctattcacggtgcatcgccctatcagaatgcctatctgattg

SEQ ID NO: 323780 - DNA, 75 bp, synthetic construct
  source 1..75: mol_type = other DNA
aactggccgcccccctgcatatcagccaggtagatattaacccgcaaattgtctttagctatatcaagagcaagg

SEQ ID NO: 323781 - DNA, 75 bp, synthetic construct
  source 1..75: mol_type = other DNA
aagtgatattgcgtacactttttaccttgcttctctgcgaattgatttgaaaaacgctaatcgacaacctaatca

SEQ ID NO: 323782 - DNA, 75 bp, synthetic construct
  source 1..75: mol_type = other DNA
atataacaacgatggcaaaaccaaaacacattcgtttaacctcagttttgaactggccgaacccctgcatatcag

SEQ ID NO: 323783 - DNA, 75 bp, synthetic construct
  source 1..75: mol_type = other DNA
tgaatgtgctggatagcaaaaccgctgttgatacaacaaccgccggtgtggcgacttacgccagcggtcgtactt

SEQ ID NO: 323784 - DNA, 75 bp, synthetic construct
  source 1..75: mol_type = other DNA
ggtcaaaacagcgttacggtacaccacgccttacgtatgaactgcgtgctcagggttaccactttaacgtaaaaa

SEQ ID NO: 323785 - DNA, 75 bp, synthetic construct
  source 1..75: mol_type = other DNA
agttgtgtcccgttttcagaaactttctaccatgctttcagccctgcctgccagtggaatcatggatttcgacct

SEQ ID NO: 323786 - DNA, 75 bp, synthetic construct
  source 1..75: mol_type = other DNA
atgctctgaagtttattgaggctatgatacaattaactccaacacttcaggaatattatggcctattaaacaaag

SEQ ID NO: 323787 - DNA, 75 bp, synthetic construct
  source 1..75: mol_type = other DNA
acagagcaagtaatagtcagtggagctgatggatttgataatcccatatctggacttatatatacctatcttgaa

SEQ ID NO: 323788 - DNA, 75 bp, synthetic construct
  source 1..75: mol_type = other DNA
atgtgatgttcaacgctggcaggctgtttatccggaagaaaacaacagaccggatgccatactggacaggctgca

SEQ ID NO: 323789 - DNA, 75 bp, synthetic construct
  source 1..75: mol_type = other DNA
aggtttaacgcactttttttaaaaaacatgatcaaactccaggatgacttcttcaaccactgtattgtgaaagga

SEQ ID NO: 323790 - DNA, 75 bp, synthetic construct
  source 1..75: mol_type = other DNA
cgcttctttgacaaaattgtgttgaaagaaaattctctagaagatgttgttactattggaaaaatgattcagaaa

SEQ ID NO: 323791 - DNA, 75 bp, synthetic construct
  source 1..75: mol_type = other DNA
cagccggatggcacagggctcacgaatatttttttagagtctcacacacccagcgaaaacagcgagtattcaaaa

SEQ ID NO: 323792 - DNA, 75 bp, synthetic construct
  source 1..75: mol_type = other DNA
acagggaagatagtcctgaagggattgtcaaggaaattaaagaatggcgagctgctaacggtaagccaggattta

SEQ ID NO: 323793 - DNA, 75 bp, synthetic construct
  source 1..75: mol_type = other DNA
aagaacattataatgaagatgaaattagtgcgaaattaccactagcatatgattacattttaaataaaaaagaat

SEQ ID NO: 323794 - DNA, 75 bp, synthetic construct
  source 1..75: mol_type = other DNA
atcctttaagcattttatccgaaatccctcagaacaataatactgttgtacattcagtcctcaggctcaatggcc

SEQ ID NO: 323795 - DNA, 75 bp, synthetic construct
  source 1..75: mol_type = other DNA
gtggtctggcgggaagcagtcgcggacagcaattcccgtgactggcgtcctccactggaagtgcttaacagtcag

SEQ ID NO: 323796 - DNA, 75 bp, synthetic construct
  source 1..75: mol_type = other DNA
gtaaatcgcctgaagatgttgaaacgccagatgtatggtcgagccggatttgaactactcaagcagagggtaatg

SEQ ID NO: 323797 - DNA, 75 bp, synthetic construct
  source 1..75: mol_type = other DNA
gaaacgctgcactgattattgcgccttataccatcccgttaccgctcttttcgccgccactaattcatacggacc

SEQ ID NO: 323798 - DNA, 75 bp, synthetic construct
  source 1..75: mol_type = other DNA
tcgaattattcattaaaaatccgcttgataacgaacttactcgtggcgaacaaatggaactggcgcggattgcac

SEQ ID NO: 323799 - DNA, 75 bp, synthetic construct
  source 1..75: mol_type = other DNA
gtgcgccagttgcgtcgttctggaatcattacggggcacatgtaactcactggatgcctctaccagaaccgccgc

SEQ ID NO: 323800 - DNA, 75 bp, synthetic construct
  source 1..75: mol_type = other DNA
ttactgcgaaaactatcgccgataagcaggcggatacgaatcaggaacaggctaaaacagaagacgcgaagcgcc

SEQ ID NO: 323801 - DNA, 75 bp, synthetic construct
  source 1..75: mol_type = other DNA
tccccaccaccggagacacaatcgacagccagacactgttaaagatggtcaatgaagcgcgtaagttatgtgggg

SEQ ID NO: 323802 - DNA, 75 bp, synthetic construct
  source 1..75: mol_type = other DNA
acttcatgatcaccaaacaactttaccggagaaaggacaagaacgcggttcaccgtatcctgctgtctgatatcc

SEQ ID NO: 323803 - DNA, 75 bp, synthetic construct
  source 1..75: mol_type = other DNA
acttcatgatcaccaaacaactttaccggagaaaggacaaacacgcagttcaccgcattctgctaaccgatatcc

SEQ ID NO: 323804 - DNA, 75 bp, synthetic construct
  source 1..75: mol_type = other DNA
cacctgaagaagccatcgccgtttcagaaaacacctcgcttccgacgctgccgctggatttacgtgagtttcaga

SEQ ID NO: 323805 - DNA, 75 bp, synthetic construct
  source 1..75: mol_type = other DNA
acggcacaagtgactacatcaaggatggggagtggcctattgataatgggacaattgaagtatacgccgcccctc

SEQ ID NO: 323806 - DNA, 75 bp, synthetic construct
  source 1..75: mol_type = other DNA
ctatagcgcctaatgacgttcgagagcagacagccattccacaagttccggtgactccggatggttggataagct

SEQ ID NO: 323807 - DNA, 75 bp, synthetic construct
  source 1..75: mol_type = other DNA
gcgacattatgctgatggcggagcacttcgccatccagatgtgtcgggaaataaaactgcctctgtttcctggtt

SEQ ID NO: 323808 - DNA, 75 bp, synthetic construct
  source 1..75: mol_type = other DNA
atggcagaacactttgccatccagatgtgtcgggaaatcaagctgcctctgttcccggggtttacggagcgcgcc

SEQ ID NO: 323809 - DNA, 75 bp, synthetic construct
  source 1..75: mol_type = other DNA
atggctgaatacaaagataacttactcggtgaagcgaacagctttctcgaagtgctggaacaggtttcgcatctc

SEQ ID NO: 323810 - DNA, 75 bp, synthetic construct
  source 1..75: mol_type = other DNA
gatgctgaagccgctggtggacggcccgcagagcgccgtcgtgacgggaccggcaggcgaggaaatcttctgtga

SEQ ID NO: 323811 - DNA, 75 bp, synthetic construct
  source 1..75: mol_type = other DNA
atgggtctacgaagctgaaacgggtctattcttcaaccgtgataacaagaacgtcataaaaggcagcctgaccag

SEQ ID NO: 323812 - DNA, 75 bp, synthetic construct
  source 1..75: mol_type = other DNA
gaacagcaccgcctgatccataaaaacgtccgcaaactcattcggctgggccacactcaatggctgcaaccgcaa

SEQ ID NO: 323813 - DNA, 75 bp, synthetic construct
  source 1..75: mol_type = other DNA
caggaaggcgattttaaggtaacgctcacctatcaaaaagcctgctacgtgtatgcatttggcgcttatgacgag

SEQ ID NO: 323814 - DNA, 75 bp, synthetic construct
  source 1..75: mol_type = other DNA
ccctgccagtgatccccgcgctgaaactaaccagccaggggctgtttgatggcgagaagtttaccttcaccacgc

SEQ ID NO: 323815 - DNA, 75 bp, synthetic construct
  source 1..75: mol_type = other DNA
tgacgacagcggcgaactggttaaccttcagttaatcagtgctgacggccataagcgcaccctgaaaggcggaca

SEQ ID NO: 323816 - DNA, 75 bp, synthetic construct
  source 1..75: mol_type = other DNA
ttactcttttccgtcaagatgaatcatacactattaatggttctgttaacattcatttatcttccaataatcttt

SEQ ID NO: 323817 - DNA, 75 bp, synthetic construct
  source 1..75: mol_type = other DNA
tctccactgctcacaatgcaatggattttattcgcaaaaatggcggtaacggctggcagttcttcagcccggcga

SEQ ID NO: 323818 - DNA, 75 bp, synthetic construct
  source 1..75: mol_type = other DNA
tacccaaatcgccgatgagctacggaatgtggtcagcaagccgataatgattgacgataaaccattcccgctcac

SEQ ID NO: 323819 - DNA, 75 bp, synthetic construct
  source 1..75: mol_type = other DNA
tgcagtgcaatcgcgcatttaccgaaatgtttggttactgcattagcgaagccagcggtatgcagcccgattcac

SEQ ID NO: 323820 - DNA, 75 bp, synthetic construct
  source 1..75: mol_type = other DNA
ctacgtccgacaaacaaatttcgtgcgaattaccgctaaaatcgcgtttttctgccgacgcacacgtttgcgtat

SEQ ID NO: 323821 - DNA, 75 bp, synthetic construct
  source 1..75: mol_type = other DNA
aattcttgattcattatctaataatccagcaatacaacttgctgaaaatagggggtatcttaaccctgatttcga

SEQ ID NO: 323822 - DNA, 75 bp, synthetic construct
  source 1..75: mol_type = other DNA
agcaaaatatgatgggcgcggtgttaattaacgaaaatgatgaagtgatgtttttcaaccccgccgcagagaagc

SEQ ID NO: 323823 - DNA, 75 bp, synthetic construct
  source 1..75: mol_type = other DNA
ccctcaagagagggtatctgtgcctgatgcgatggaaatggatgatgactttgacagcgcgtttgaacacggaaa

SEQ ID NO: 323824 - DNA, 75 bp, synthetic construct
  source 1..75: mol_type = other DNA
aattgcgggatgcgttgaaagagtttgcgactgagcaagggcttgaccccgcacgtcgagaggcttttctgcaaa

SEQ ID NO: 323825 - DNA, 75 bp, synthetic construct
  source 1..75: mol_type = other DNA
tacgtcctggcaatcaggtgccgaacgttatataagtttcctgaaagggagcaatgctgtatctggttactttaa

SEQ ID NO: 323826 - DNA, 75 bp, synthetic construct
  source 1..75: mol_type = other DNA
gcctgaccatgccggttggatatacaaatgtcgaaaactatataccactccgccagcgccgatagcgttagaggc

SEQ ID NO: 323827 - DNA, 75 bp, synthetic construct
  source 1..75: mol_type = other DNA
cccgccgagcaggagcggcatggtctggtgctggtggacgacctcagcgagtttgacctggatgacatgaaagcc

SEQ ID NO: 323828 - DNA, 75 bp, synthetic construct
  source 1..75: mol_type = other DNA
agttatctggtaaacttgctgctgaagagttggagttatcggatggcttcgttcctgatggtcgagtcattcggg

SEQ ID NO: 323829 - DNA, 75 bp, synthetic construct
  source 1..75: mol_type = other DNA
tgacggcgctgaaaaagatgcatttcttaagagtgcgtttgaacacttacatgcactaagtaaggctggtgaacc

SEQ ID NO: 323830 - DNA, 75 bp, synthetic construct
  source 1..75: mol_type = other DNA
atgaaacaggtttgcgtcctcggtaacgggcagttaggccgtatgttgcgccaggcaggcgaaccgttaggcatt

SEQ ID NO: 323831 - DNA, 75 bp, synthetic construct
  source 1..75: mol_type = other DNA
atacaaccgcatcgccacctaccagtccatcaatgacgcttatgtcgttgaagactatggcaagtgcgcatggtc

SEQ ID NO: 323832 - DNA, 75 bp, synthetic construct
  source 1..75: mol_type = other DNA
ggtttcaacggcacgtctcacgcagatgagtccaacttcagcaccaacaagctgcttcaggacgttaacgtggga

SEQ ID NO: 323833 - DNA, 75 bp, synthetic construct
  source 1..75: mol_type = other DNA
ccaaggtttgaaatcttaactggtatatggcatggagtaacccactggatgccgctaccggaaccgccgcaggaa

SEQ ID NO: 323834 - DNA, 75 bp, synthetic construct
  source 1..75: mol_type = other DNA
cccgctggagctggctaaagctatcagaaaaggtcctgacatgcccgaattcgatggaccaactccgataacgcc

SEQ ID NO: 323835 - DNA, 75 bp, synthetic construct
  source 1..75: mol_type = other DNA
atctgattggtagcgatgtgaattatgactggctgaaactgccgctggtgcatctgcactggtacgacaaagaag

SEQ ID NO: 323836 - DNA, 75 bp, synthetic construct
  source 1..75: mol_type = other DNA
gaggagggcagtccagcaatgaactgtccttatccgacaagcacccgaaacttcgaaatgatttttgcgggttca

SEQ ID NO: 323837 - DNA, 75 bp, synthetic construct
  source 1..75: mol_type = other DNA
cgtcaaccaataattttcgggaaatcgcggaaacgtcaaccaactatccggtaattcctagtgaggtgttgtccg

SEQ ID NO: 323838 - DNA, 75 bp, synthetic construct
  source 1..75: mol_type = other DNA
catacaactgcatcagggaggcagcagatcaacttccggcatggttcccattagctatggatttagcccttgtaa

SEQ ID NO: 323839 - DNA, 75 bp, synthetic construct
  source 1..75: mol_type = other DNA
ttgaacagtgccgcatggtaagtaggggggattatctaatcagtgccgggattagaaaaacagccctgacggcag

SEQ ID NO: 323840 - DNA, 75 bp, synthetic construct
  source 1..75: mol_type = other DNA
ttcacatatttatcaggaaatatcttggatgacgtaacccactggatgccgctgccagaaccgccggagcaggat

SEQ ID NO: 323841 - DNA, 75 bp, synthetic construct
  source 1..75: mol_type = other DNA
aataaaaaaagtaatggcgaaataacacttgcgctctatcccagctcccaattgggatcaaaacaggatgtcacc

SEQ ID NO: 323842 - DNA, 75 bp, synthetic construct
  source 1..75: mol_type = other DNA
aaccttggtgattggagttacgtatatcatcgagagccagatgattttgagcgcaaacatttagtgatagagggc

SEQ ID NO: 323843 - DNA, 75 bp, synthetic construct
  source 1..75: mol_type = other DNA
aagttattacgccggataagccggaaatattcaggcttgctgagattctgaatattgatccagatgccgcattag

SEQ ID NO: 323844 - DNA, 75 bp, synthetic construct
  source 1..75: mol_type = other DNA
tgtgatggtaaaaacaatcttcatcaaattgattcacttgataagtttctaggtgaatacaatacgcatacaaac

SEQ ID NO: 323845 - DNA, 75 bp, synthetic construct
  source 1..75: mol_type = other DNA
aaaggtaaaatagaggaatcaataaaggatgctctgcaggctataaacacagtacaaagaaaagctaggcttttg

SEQ ID NO: 323846 - DNA, 75 bp, synthetic construct
  source 1..75: mol_type = other DNA
ggtggaaaaaattctgaatcgttcaggcatccagccgttgcaccgtaaatgctcgtttgcgaattaccaggtgca

SEQ ID NO: 323847 - DNA, 75 bp, synthetic construct
  source 1..75: mol_type = other DNA
ggcggatcaacaaatgatagacggtaacgcagattgtaacgctcgtggcgttacaaaaagtgcaatagatcgcat

SEQ ID NO: 323848 - DNA, 75 bp, synthetic construct
  source 1..75: mol_type = other DNA
cgaaaggtgttcggccagagacgttgctccgacagattaacaccgtctcgtttccggacagtgcgatcccgccag

SEQ ID NO: 323849 - DNA, 75 bp, synthetic construct
  source 1..75: mol_type = other DNA
tttacatgaatggtgttgagggggtatgtgagccgtcacactggatgccgctaccagaaccgccgcaggaggtta

SEQ ID NO: 323850 - DNA, 75 bp, synthetic construct
  source 1..75: mol_type = other DNA
cgtgcaacacagcgcgcgggaacaagtcaacgcccaggtgctgaatgccgcgagccaggaaattgaatcgctggc

SEQ ID NO: 323851 - DNA, 75 bp, synthetic construct
  source 1..75: mol_type = other DNA
ctacaacgtcagcgcccagcgtcgcgatgtgttgatggagcttgatgacgcgattggtttcagcagtaaacacgc

SEQ ID NO: 323852 - DNA, 75 bp, synthetic construct
  source 1..75: mol_type = other DNA
cggtggtgccagatgctcgtccgtctttaaataatggcatagtcggctttgatgaaggctggaacgcctgccgcg

SEQ ID NO: 323853 - DNA, 75 bp, synthetic construct
  source 1..75: mol_type = other DNA
atgaccacatttaccgataaagaactgattaaagaaatcaaagagcgtatcagcagcctagaggttcgagacgat

SEQ ID NO: 323854 - DNA, 75 bp, synthetic construct
  source 1..75: mol_type = other DNA
cgcaatggtgaggagttcttcgaaacgcagagccgcaatgtaacccactggataccgctaccggagccgccgcag

SEQ ID NO: 323855 - DNA, 75 bp, synthetic construct
  source 1..75: mol_type = other DNA
cgatattatcgacatcgatccgatggcaatgtcactgcttaccgcctggtcatggccgggaaatattcgagagct

SEQ ID NO: 323856 - DNA, 75 bp, synthetic construct
  source 1..75: mol_type = other DNA
tcaaccggggcagcacaggtgatcatgccgcatgtggtcggttctgtagaggtgtatgaacagcagacctccggc

SEQ ID NO: 323857 - DNA, 75 bp, synthetic construct
  source 1..75: mol_type = other DNA
taatctgcaaaagcggtaccccgtttgtcgcggaagcgatggaagcgcttggtggtattggttattgcgaggaga

SEQ ID NO: 323858 - DNA, 75 bp, synthetic construct
  source 1..75: mol_type = other DNA
gcgcagcagcggcagtggcatgactatcgctacacctttaaggtctatatttcctcacagattgcgaccgccgcg

SEQ ID NO: 323859 - DNA, 75 bp, synthetic construct
  source 1..75: mol_type = other DNA
ttcaaagcacggcgagtatatggcaggacaggtacaaggggaatacgtggagttgagcgacggcactttatcgtg

SEQ ID NO: 323860 - DNA, 75 bp, synthetic construct
  source 1..75: mol_type = other DNA
cagagatggacggcatcaaggcactaaaggagatgcgcagccatgagacccggacacccgttattctgatgacgg

SEQ ID NO: 323861 - DNA, 75 bp, synthetic construct
  source 1..75: mol_type = other DNA
agctttgtcgatgaaaaattgcgggcgctacactccgatattctgtggtcggtaaagacccgggaaggcgatggc

SEQ ID NO: 323862 - DNA, 75 bp, synthetic construct
  source 1..75: mol_type = other DNA
atgttaaagtggtcggctttccctctgaaacatgccacgggtaacaccatgagtgaatatatcgaagaaaaccgc

SEQ ID NO: 323863 - DNA, 75 bp, synthetic construct
  source 1..75: mol_type = other DNA
gcgagcttatcggttggcgcaatgtctttaatgcggcggcggtgatgggcgtgctgtgtattttctggattatca

SEQ ID NO: 323864 - DNA, 75 bp, synthetic construct
  source 1..75: mol_type = other DNA
ttttgctgacgctctcctgcttgctggtttcctttgctaactcattcagtttgcttttaatcggtcgtgcctgtc

SEQ ID NO: 323865 - DNA, 75 bp, synthetic construct
  source 1..75: mol_type = other DNA
aactctgcttgcgcaaatgaacgcagcacgctggtcgccgcaagtcgaactgacactcctgctggtttacccctt

SEQ ID NO: 323866 - DNA, 75 bp, synthetic construct
  source 1..75: mol_type = other DNA
ggcgatgtcggcgtcgctgaccatgcgtctggtaccagcgcgtacggtgccgaaggcgctgtcggtgattttcgg

SEQ ID NO: 323867 - DNA, 75 bp, synthetic construct
  source 1..75: mol_type = other DNA
ttgccgcgccgttaggcagctttttaggcgagcttatcggctggcgcaatgtctttaatgcggcagcggtgatgg

SEQ ID NO: 323868 - DNA, 75 bp, synthetic construct
  source 1..75: mol_type = other DNA
tgcgtctctgctgctgtcggcttacgcgctgactttgcctaaaattcctgttgcgcagaaaaaagtgactacttc

SEQ ID NO: 323869 - DNA, 75 bp, synthetic construct
  source 1..75: mol_type = other DNA
aatatacctttctacaaaggaaatgttggggataaaaggctattagtagaagtatttaataagcatcagattact

SEQ ID NO: 323870 - DNA, 75 bp, synthetic construct
  source 1..75: mol_type = other DNA
ctgcttctgccggaggagtatggcccagccttcccagcaatcgtcgattgttataccagtccacccacgttagtg

SEQ ID NO: 323871 - DNA, 75 bp, synthetic construct
  source 1..75: mol_type = other DNA
aaggaagaacgacaggccaagctcgaagcttttcgtcagcaactccttgaggatggcattgatccagcagaattg

SEQ ID NO: 323872 - DNA, 75 bp, synthetic construct
  source 1..75: mol_type = other DNA
ggtctacagctccaaagggattgctgcgattattatgcctggcattatggggattatcgcggataaatggctgcg

SEQ ID NO: 323873 - DNA, 75 bp, synthetic construct
  source 1..75: mol_type = other DNA
gctgggtgcggtactgcaaattaccaacgtttttggtaatccgttcctacatgatttcgcccgtaacccggagtt

SEQ ID NO: 323874 - DNA, 75 bp, synthetic construct
  source 1..75: mol_type = other DNA
atgctgaaaaagatgatcggggccattaaagccggtcaggcgtatctggggtgggatgatgccctttatcgccag

SEQ ID NO: 323875 - DNA, 75 bp, synthetic construct
  source 1..75: mol_type = other DNA
gtacaggcatcttgcttcagaatctgatttagtacgtgaaatactcagcgcaagaccaaatgaatttaaggagga

SEQ ID NO: 323876 - DNA, 75 bp, synthetic construct
  source 1..75: mol_type = other DNA
tcagacacagtgagctgtatagcaaacttatcacttttatcttacgaagagttggaaaaattgtcttccattgat

SEQ ID NO: 323877 - DNA, 75 bp, synthetic construct
  source 1..75: mol_type = other DNA
ggcaaggaaagcttctcgatgtcccgcatgctggaaggcaccccaagcgatatttacagtaaattaacaccaata

SEQ ID NO: 323878 - DNA, 75 bp, synthetic construct
  source 1..75: mol_type = other DNA
aacgatagctatagcatagcccagcgcctggcggtggaacagttcgccacacaacaggctctcagcctgagccga

SEQ ID NO: 323879 - DNA, 75 bp, synthetic construct
  source 1..75: mol_type = other DNA
cttatattgtggtgttctgtgaccagccatgggtagccgaccaggtatttaccgacctgatgataccatttattg

SEQ ID NO: 323880 - DNA, 75 bp, synthetic construct
  source 1..75: mol_type = other DNA
ggaagacgtcagcttaaatgatatctttgtgcgctgggatcgccctatcagcgatgctgcggcccttctggccga

SEQ ID NO: 323881 - DNA, 75 bp, synthetic construct
  source 1..75: mol_type = other DNA
ccgctgcatgtggcatatcgcgtcgccagctggtcgacggcgcgccattttggtctgaatcacctcggcttactg

SEQ ID NO: 323882 - DNA, 75 bp, synthetic construct
  source 1..75: mol_type = other DNA
atgggtgaagccggattcgcctggtttgcccgctgcgctgaacaggcaaggcagaatcagtatttgcaggtcagt

SEQ ID NO: 323883 - DNA, 75 bp, synthetic construct
  source 1..75: mol_type = other DNA
ccctgcccgtgatcccggcgctgaaactcaccagtcagggtctgtttgatggcgaaaagtttgcttttaccacac

SEQ ID NO: 323884 - DNA, 75 bp, synthetic construct
  source 1..75: mol_type = other DNA
ggtttgctcggcggctttggcctgaatgaaggtgcgctggctgcgacggtcagccatgacagccataatattgtg

SEQ ID NO: 323885 - DNA, 75 bp, synthetic construct
  source 1..75: mol_type = other DNA
ccctgccagttatccccgcactgaaactgaccagccaggggctgtttgatggtgaaaagtttgccttcaccacgc

SEQ ID NO: 323886 - DNA, 75 bp, synthetic construct
  source 1..75: mol_type = other DNA
gtttccgccagcgactttgccctgcaatttacccccggaaaacgctatcgcgttattgaggtaatccataacgaa

SEQ ID NO: 323887 - DNA, 75 bp, synthetic construct
  source 1..75: mol_type = other DNA
agggcgcatctggacgtatgtccgggatgatcgcaatgcgggttcgtcatctcctccggcggtctggttcgcgta

SEQ ID NO: 323888 - DNA, 75 bp, synthetic construct
  source 1..75: mol_type = other DNA
agtcaatgcgcatgagttatttttttcaactccagagcaacccggtatcaaattatcaaaagagcaaatactaat

SEQ ID NO: 323889 - DNA, 75 bp, synthetic construct
  source 1..75: mol_type = other DNA
aaggcacagggcatggttctttgcctcatataaatattaaacgttctgatgggacaatggtgaggatagatatag

SEQ ID NO: 323890 - DNA, 75 bp, synthetic construct
  source 1..75: mol_type = other DNA
atgtcagggggtacaatacccctcagacttattttgttaatcctgcttatttctcttatttcacccgcccgagct

SEQ ID NO: 323891 - DNA, 75 bp, synthetic construct
  source 1..75: mol_type = other DNA
atagaaaaagcgcactaattaatagagttccagaagatttctttgattttattatcgttgatgaagcacatcatg

SEQ ID NO: 323892 - DNA, 75 bp, synthetic construct
  source 1..75: mol_type = other DNA
catttgaaatagataataatggaattgtgatttttcatgaagaaattggattaaatccaatgtgggaaaaattcc

SEQ ID NO: 323893 - DNA, 75 bp, synthetic construct
  source 1..75: mol_type = other DNA
agtgggttaatttctattgcaccatacggtgtatctcaaaaaagagttttgattattacaccaggtcttgttacc

SEQ ID NO: 323894 - DNA, 75 bp, synthetic construct
  source 1..75: mol_type = other DNA
tatttcttttcccgccccctgcccgccgaagaaattccaggctggatgagcagcgtgttaccgctgaaaatctga

SEQ ID NO: 323895 - DNA, 75 bp, synthetic construct
  source 1..75: mol_type = other DNA
gccgtctctccggtggtgtatctcatcggtgttgaccatattcaggatgtgattgatagccttggctatgcgtgg

SEQ ID NO: 323896 - DNA, 75 bp, synthetic construct
  source 1..75: mol_type = other DNA
agaaaccagcgcctttatcgaacgcgtggcagatatcagccagcatatggccgcgctggcgctggaacaggaaaa

SEQ ID NO: 323897 - DNA, 75 bp, synthetic construct
  source 1..75: mol_type = other DNA
acattaataaaataaaaaacactataaatacttgggatggaaagttaacatgggaattgttatgtgagtcagtaa

SEQ ID NO: 323898 - DNA, 75 bp, synthetic construct
  source 1..75: mol_type = other DNA
accccggtggccaccctgaaagctacgccagtggatgcgccgacgcgcccgcgcgtggtgtggccgggggcgatc

SEQ ID NO: 323899 - DNA, 75 bp, synthetic construct
  source 1..75: mol_type = other DNA
catcagcagaagaaattaacctgccgcgtatacaccgaatacagaagcactgcggtggcaggctccctatggtca

SEQ ID NO: 323900 - DNA, 75 bp, synthetic construct
  source 1..75: mol_type = other DNA
attgcgtcgcctgctatcgtcgaagcgaagccgatcaaaacgattaaagacaaagtacgcgcaatgcgtgaactt

SEQ ID NO: 323901 - DNA, 75 bp, synthetic construct
  source 1..75: mol_type = other DNA
gagtttttctgcaagccaggcttgacgctatccgctgccgggatttattcatatactcctggcgacttgtattca

SEQ ID NO: 323902 - DNA, 75 bp, synthetic construct
  source 1..75: mol_type = other DNA
actaacactggccgtaaatgcagcatgattgaacacatcatgcagtcgatgcaattcccggcggaattgattgag

SEQ ID NO: 323903 - DNA, 75 bp, synthetic construct
  source 1..75: mol_type = other DNA
gcctgacgatcaggcgaaagaaggattgctcaatgttgcgccgatcctcgccctgcttggcggacgcttaaaaca

SEQ ID NO: 323904 - DNA, 75 bp, synthetic construct
  source 1..75: mol_type = other DNA
aaccagaagcgcgccgctgaattgctggggttaacctatcatcagttccgcgcgttgttgaaaaagcaccagatt

SEQ ID NO: 323905 - DNA, 75 bp, synthetic construct
  source 1..75: mol_type = other DNA
ccgaattacgggcaaacccaacggcacgcgccgcgttatggcaacaaatttgcacatatgaacacgatttcttcc

SEQ ID NO: 323906 - DNA, 75 bp, synthetic construct
  source 1..75: mol_type = other DNA
ctgcgtcgcaagatgcctgccgagaagattaacgaaaatcttgttcagcgcggcatcatgattttcgccattttg

SEQ ID NO: 323907 - DNA, 75 bp, synthetic construct
  source 1..75: mol_type = other DNA
aagtaccggcattgcacaaatacaaagggatgtctctgtacctgattatcgtcactggtttgttgctttgtgttt

SEQ ID NO: 323908 - DNA, 75 bp, synthetic construct
  source 1..75: mol_type = other DNA
cgtttatttcacttaactgcgccgcgctcaacgaaaatttacttgattccgaactctttgggcacgaagcgggcg

SEQ ID NO: 323909 - DNA, 75 bp, synthetic construct
  source 1..75: mol_type = other DNA
acgcaaccggaaaactggatgttgataccgcttcagcggtgatcagcggcatcgcggaaggttgtctgcaatcgg

SEQ ID NO: 323910 - DNA, 75 bp, synthetic construct
  source 1..75: mol_type = other DNA
ctggcaattgccgcacagtttattagcggtgacggcgcagcgtgggtgaaagtggtcagcgtcattcttaatatt

SEQ ID NO: 323911 - DNA, 75 bp, synthetic construct
  source 1..75: mol_type = other DNA
gtctggtactgatttgcattctggtggcgatctcctcacgcggcgagaaattgttattcaaaatttcgacgggca

SEQ ID NO: 323912 - DNA, 75 bp, synthetic construct
  source 1..75: mol_type = other DNA
atgaccaaaattaactatcaggcactgcgtgaaaaggcagagaaagcaacgtgtggcgtgtggtcgctcgaatat

SEQ ID NO: 323913 - DNA, 75 bp, synthetic construct
  source 1..75: mol_type = other DNA
gatgggcttttcgaactcagaattaaaggcaacgatgggattgcacgtgttttttactgcactctgacagggaaa

SEQ ID NO: 323914 - DNA, 75 bp, synthetic construct
  source 1..75: mol_type = other DNA
gtgaagaggtccggctggaagtcgatcagcttccattgagtatgcgtgtccgatacaaacatctcattgaacgta

SEQ ID NO: 323915 - DNA, 75 bp, synthetic construct
  source 1..75: mol_type = other DNA
atcaaacgccgcgaccaggagaacgaggatattgctcttacggttgggaagctgagagttgagcttgaggaagta

SEQ ID NO: 323916 - DNA, 75 bp, synthetic construct
  source 1..75: mol_type = other DNA
aaaaaatacaatttaaatatttacgacattttcttttatccccagaatgatatcatagaagacaatgtatgtaga

SEQ ID NO: 323917 - DNA, 75 bp, synthetic construct
  source 1..75: mol_type = other DNA
aatggtgggcagttactgacgatggggaagaaccggcatcgaaagtaactcactggatgcctctaccagaaccgc

SEQ ID NO: 323918 - DNA, 75 bp, synthetic construct
  source 1..75: mol_type = other DNA
gacccagcgtgagtgagacgtttagcgtagtcatgaccaaagatccgggtgcggcctgtactgagcagtttaata

SEQ ID NO: 323919 - DNA, 75 bp, synthetic construct
  source 1..75: mol_type = other DNA
atacctaaagaaaatggcagttggctttacctgattgacctagaacacgcattacgcgtcgctggcattcgcatc

SEQ ID NO: 323920 - DNA, 75 bp, synthetic construct
  source 1..75: mol_type = other DNA
aactcacgacaccttaaaacagctggcgaagaaatggccgctggtggcgatcaccaacggtaacgcccagccgga

SEQ ID NO: 323921 - DNA, 75 bp, synthetic construct
  source 1..75: mol_type = other DNA
ccctgctcggcggacgcttaaaacagcgaggtgctgcgtggtacgcgttatttgacgccctgttgcaactggcag

SEQ ID NO: 323922 - DNA, 75 bp, synthetic construct
  source 1..75: mol_type = other DNA
acggtaatggcatacaaagtttctgaagtcatcgctgcaatccgcgccgcaggcattcgcatcaaaggaggtgag

SEQ ID NO: 323923 - DNA, 75 bp, synthetic construct
  source 1..75: mol_type = other DNA
agatatttgcccaataaccggacgtgcatttttcatgtggattgagcatccaacattgggaaatgtgccgacata

SEQ ID NO: 323924 - DNA, 75 bp, synthetic construct
  source 1..75: mol_type = other DNA
tcgtgtgagcgttacgatcatgatttcggtggctgggtagaaagcgaatgtctagggttatatctgattgatgat

SEQ ID NO: 323925 - DNA, 75 bp, synthetic construct
  source 1..75: mol_type = other DNA
cgtttatttcgcttaactgcgcggcgctaaacgaaaatttgcttgattccgaactgtttggtcacgaagcgggtg

SEQ ID NO: 323926 - DNA, 75 bp, synthetic construct
  source 1..75: mol_type = other DNA
ggacaagaaaaagcattcctgaactttcagcacttccaccttcattaagaaagaaaaattttactgacgcatata

SEQ ID NO: 323927 - DNA, 75 bp, synthetic construct
  source 1..75: mol_type = other DNA
ggtgagtgtaccagaggagctcatagtggactgcctttttatcgggtggatggaccgttgcagacgatgaaaata

SEQ ID NO: 323928 - DNA, 75 bp, synthetic construct
  source 1..75: mol_type = other DNA
gaaaaaagcgcgtcgtaaagcccagaccggcgcggcaaaactggcccgcaaaaagtcaatgaaactgcgccgtaa

SEQ ID NO: 323929 - DNA, 75 bp, synthetic construct
  source 1..75: mol_type = other DNA
tattactgatgatggtgacttcaaacaaaaatggcccaaaggtttcttcgaagaaagaaggggagagctttttta

SEQ ID NO: 323930 - DNA, 75 bp, synthetic construct
  source 1..75: mol_type = other DNA
tcggattaactcagatagcacctcttattattgcagccaatatacttcaggatggattaattgctatagagcagc

SEQ ID NO: 323931 - DNA, 75 bp, synthetic construct
  source 1..75: mol_type = other DNA
tagtcaggcgttttctttgcccgctgtgcgtcgtgcttatgggcgtatgcaacgcgttgccagtcgggttattgg

SEQ ID NO: 323932 - DNA, 75 bp, synthetic construct
  source 1..75: mol_type = other DNA
caactgtttggtttccattacaaatcccgtacgcactcgacctacggcaacattgatgtcctgaaggcagcctgc

SEQ ID NO: 323933 - DNA, 75 bp, synthetic construct
  source 1..75: mol_type = other DNA
cccgttgtgccgctgttaagtgcggtgatggtaaaagaaacctgtaccgcaggttgtatctatcgcggcgaatga

SEQ ID NO: 323934 - DNA, 75 bp, synthetic construct
  source 1..75: mol_type = other DNA
tggatcatcgatttcgctgaactgaaagcggcgtttaaaccgacctacgatcgcctcgatcatcattatctcaat

SEQ ID NO: 323935 - DNA, 75 bp, synthetic construct
  source 1..75: mol_type = other DNA
catcgttttttctccattgtttttctcattattctattagtttgcattcattcactgataacaactataaaataa

SEQ ID NO: 323936 - DNA, 75 bp, synthetic construct
  source 1..75: mol_type = other DNA
accttcattaagaaagaaaaattttactgacacatataatgctgcatcttctcatatcgaatactggataggtgc

SEQ ID NO: 323937 - DNA, 75 bp, synthetic construct
  source 1..75: mol_type = other DNA
gatcatggcgattatggacggctggagcggtattaaagaaacctggtctgcggttgtggttgcggtattactgtt

SEQ ID NO: 323938 - DNA, 75 bp, synthetic construct
  source 1..75: mol_type = other DNA
gtgaatcataaattcaggagagagtattatgtttttaacgagcaaaaaatgaccgcggctgttctggcaattacc

SEQ ID NO: 323939 - DNA, 75 bp, synthetic construct
  source 1..75: mol_type = other DNA
gctgaattatcgctggccgggaaatatacgtgaattgaaaaacgtggtggaacgttcagtgtatcgccacggcac

SEQ ID NO: 323940 - DNA, 75 bp, synthetic construct
  source 1..75: mol_type = other DNA
tatctctcctcccgttggcaagggccgtttatttcccttaactgcgcggcgttaaatgaaaatttgctggattcc

SEQ ID NO: 323941 - DNA, 75 bp, synthetic construct
  source 1..75: mol_type = other DNA
gcaggggagatggttgcgttccagctcattcgccatctcaaaaataaagtgccgttgccacctgtgcaggttatg

SEQ ID NO: 323942 - DNA, 75 bp, synthetic construct
  source 1..75: mol_type = other DNA
taaaccgatgtctgtagggttaccgctggatctgcgtgaattccagcagcagcaagagaaagactttctacaaac

SEQ ID NO: 323943 - DNA, 75 bp, synthetic construct
  source 1..75: mol_type = other DNA
cttcattacagcttcagcacgggcgttttgagagctgggccgaacggctgaacgtcgagccaggtaaactcaacg

SEQ ID NO: 323944 - DNA, 75 bp, synthetic construct
  source 1..75: mol_type = other DNA
gtggattatcaaaacggcgcgatcacttcattacagcttcagcacgggcgttttgagagctgggccgaacggctg

SEQ ID NO: 323945 - DNA, 75 bp, synthetic construct
  source 1..75: mol_type = other DNA
atgagtaccgaccttaaattttcactggtaacaactattatcgttctgggtttgatcgtggccgtgggtctgaca

SEQ ID NO: 323946 - DNA, 75 bp, synthetic construct
  source 1..75: mol_type = other DNA
ttttcaacgttacatatcccgagtgaaaataacgtccacgaacgtaacatcatccccattaaaaaaggagccagt

SEQ ID NO: 323947 - DNA, 75 bp, synthetic construct
  source 1..75: mol_type = other DNA
tcatagtactatggcagggactgtttatatggttgttctctcaaatacgaaaaaaacggaatgtgtcggatgagt

SEQ ID NO: 323948 - DNA, 75 bp, synthetic construct
  source 1..75: mol_type = other DNA
gaatacctcgaaaaacgtcagagcctgcaaggtctggtgctgctgatggatattcgccatccgctgaaagatctc

SEQ ID NO: 323949 - DNA, 75 bp, synthetic construct
  source 1..75: mol_type = other DNA
ggcgtttaacggtgatgtgcaggttgaaacgttttcttcgctgaagaaacaaggcgtggacaagctgcggcagaa

SEQ ID NO: 323950 - DNA, 75 bp, synthetic construct
  source 1..75: mol_type = other DNA
aaaagcccataaaggcgcgcttccgtccaagtgctgcaagattagaggaaattacacgccgagctgaaaaatatc

SEQ ID NO: 323951 - DNA, 75 bp, synthetic construct
  source 1..75: mol_type = other DNA
tcgtcgtattgtataagcgggaaaccagcgattcttatgcggtatctatcactgatggaagccagaacatgcacg

SEQ ID NO: 323952 - DNA, 75 bp, synthetic construct
  source 1..75: mol_type = other DNA
gaatgacgaacctgcctctgaactgctcaaacgagttgcgcaggaaaaagctcaactggtgaaagaaggtaaaat

SEQ ID NO: 323953 - DNA, 75 bp, synthetic construct
  source 1..75: mol_type = other DNA
gctgaaaactgggcgcgtattagcgagcatttcgacacactttttaccaccgaagccagcgtggatgcgttaaaa

SEQ ID NO: 323954 - DNA, 75 bp, synthetic construct
  source 1..75: mol_type = other DNA
aatgtcaaacgtgactatgtttcatgtgcaaaggctcattgtggagcaaaaacagttctcaaggtggatataagt

SEQ ID NO: 323955 - DNA, 75 bp, synthetic construct
  source 1..75: mol_type = other DNA
cgtgacaagctgtcaccgtatgacaccgaagagatgcttgaggctatgcgtatttttctggaagaacagggagtt

SEQ ID NO: 323956 - DNA, 75 bp, synthetic construct
  source 1..75: mol_type = other DNA
acatggctgccgaaattgagaagttgcgggcgcagagagacgcattagcggcggagaatgcagccctgaaagaat

SEQ ID NO: 323957 - DNA, 75 bp, synthetic construct
  source 1..75: mol_type = other DNA
gaatgccgataacaacgactggctgaactggcagagtgtgattggctcacgcaaagtgtggcgtttttcgccaaa

SEQ ID NO: 323958 - DNA, 75 bp, synthetic construct
  source 1..75: mol_type = other DNA
atgggttcgccagcaagttccggcacgagtggttgccctgactgggtcttccggcaaaacgtccgttaaggagat

SEQ ID NO: 323959 - DNA, 75 bp, synthetic construct
  source 1..75: mol_type = other DNA
gttccccataaaactggcagaaaaccagttgctgctcgacgactcctacaacgccaatgtcggttcaatgaccgc

SEQ ID NO: 323960 - DNA, 75 bp, synthetic construct
  source 1..75: mol_type = other DNA
atcactaccatatatggaaattaaatttatttgcagaagagtactcaaacaaatattttatacatgattttcttt

SEQ ID NO: 323961 - DNA, 75 bp, synthetic construct
  source 1..75: mol_type = other DNA
cggttctttggctggcgtggcaaaagcgaaaggcgaaatctttagcggcctgccggaaaacggtatcgccattat

SEQ ID NO: 323962 - DNA, 75 bp, synthetic construct
  source 1..75: mol_type = other DNA
ccggaagccgcgctggtcaacaatctggcagcagcgcatctggaaggtttcggttctcttgcgggggtcgcgaaa

SEQ ID NO: 323963 - DNA, 75 bp, synthetic construct
  source 1..75: mol_type = other DNA
attcacccgacattaaaagaacgtagctcgacgctggcagaacccgcttccgatattaaaacttgcgatcattac

SEQ ID NO: 323964 - DNA, 75 bp, synthetic construct
  source 1..75: mol_type = other DNA
ccgcaacccgattaacgctgtcgacctgaattcccgtcagtaccagtgtgagcaggtgaactacgacacgtttat

SEQ ID NO: 323965 - DNA, 75 bp, synthetic construct
  source 1..75: mol_type = other DNA
cccgcaacaagctgggttgctatatggcgcagcaggcgtcgcttaacaatatcccggtttccgcactggtatcgc

SEQ ID NO: 323966 - DNA, 75 bp, synthetic construct
  source 1..75: mol_type = other DNA
ggacgcgcgttcatccctgctggatgaatggcacaaggaagctgacgacctcgtggtgattatggggcgcaacct

SEQ ID NO: 323967 - DNA, 75 bp, synthetic construct
  source 1..75: mol_type = other DNA
gatggacgaatggtacaaagattcgcccaatcttgtggtgatcactggtcgtaacctgacggttagccgttcgtt

SEQ ID NO: 323968 - DNA, 75 bp, synthetic construct
  source 1..75: mol_type = other DNA
atgctgaagctgattaacatctacggcgttaacgatcagaccggtgaaaaaatcggtctgggcgtgagcggcccg

SEQ ID NO: 323969 - DNA, 75 bp, synthetic construct
  source 1..75: mol_type = other DNA
gaaaggcgaaaaaatcctcctggacaccacaggaccgattgcgcgcacgaataccagttatgacggcacaaaacg

SEQ ID NO: 323970 - DNA, 75 bp, synthetic construct
  source 1..75: mol_type = other DNA
gcttgccagcaagctgggtctggatgccttcgtgctgtttaaaaatccacgcatggccatctttttcctctttgc

SEQ ID NO: 323971 - DNA, 75 bp, synthetic construct
  source 1..75: mol_type = other DNA
ggatatgatgttttgggcgatgttagtcaatgcgatggcgtttatgccgactattgcgttatcgaacagcgtctc

SEQ ID NO: 323972 - DNA, 75 bp, synthetic construct
  source 1..75: mol_type = other DNA
taatgtcctttttgcaatattttatctgggggagctggctggttaccctcggctcttacatgattaatacccttc

SEQ ID NO: 323973 - DNA, 75 bp, synthetic construct
  source 1..75: mol_type = other DNA
ggctggtatttgctgcgtatgcactggccttagcggtgatttttgccctgttcttccgttataaacatgaacctg

SEQ ID NO: 323974 - DNA, 75 bp, synthetic construct
  source 1..75: mol_type = other DNA
aaatatccatccattttgctctcggtttcacaaatggcggaagtcggcttcattcttaccattccattccattct

SEQ ID NO: 323975 - DNA, 75 bp, synthetic construct
  source 1..75: mol_type = other DNA
accatggtcaatggcgttggggcgtggattggttctcttctgagtggcctggcagttgactatttcacggttgat

SEQ ID NO: 323976 - DNA, 75 bp, synthetic construct
  source 1..75: mol_type = other DNA
tgcgaatgcgctggcagccgctgcgctctccatgtccgtgggcgcaacgcttgatgctatcaaagcggggctggc

SEQ ID NO: 323977 - DNA, 75 bp, synthetic construct
  source 1..75: mol_type = other DNA
cgagggataattgaagggtatcaagagtttattgcattatatcttaattcgccatctggtataaaagaaatgcaa

SEQ ID NO: 323978 - DNA, 75 bp, synthetic construct
  source 1..75: mol_type = other DNA
gggaaaataaaaaaacaaaaaccactgccgccaattagcgacgaggaaaaacagtttgaactgccggaagggtgg

SEQ ID NO: 323979 - DNA, 75 bp, synthetic construct
  source 1..75: mol_type = other DNA
ttgccgcagggatgggagtgggtgcgattgggcaatatcgctgaatacatccagcgaggtaaaggtccaaaatac

SEQ ID NO: 323980 - DNA, 75 bp, synthetic construct
  source 1..75: mol_type = other DNA
ttggtgacaacggcagtggcaaaagtacgctggcacaactgatggcgggctggtatccggactttctgccaggag

SEQ ID NO: 323981 - DNA, 75 bp, synthetic construct
  source 1..75: mol_type = other DNA
tgcaaccaaaactattaattcttgatgaagcctttagccgcctgacatcacaagccagcgaaattctgttgcagc

SEQ ID NO: 323982 - DNA, 75 bp, synthetic construct
  source 1..75: mol_type = other DNA
taaaagtgaagatttcaataaatcggctggaacgaaatgtataaaaataaccaatgtgggtgtacacgaattcat

SEQ ID NO: 323983 - DNA, 75 bp, synthetic construct
  source 1..75: mol_type = other DNA
tatgtcattccgtatgcgttatatgcgcttgcagccggatttcttgttgcattttttctgttcccaatgtacgaa

SEQ ID NO: 323984 - DNA, 75 bp, synthetic construct
  source 1..75: mol_type = other DNA
accgcaccattcagggcagaactgagtgcgaacccggcagaaacggttgttgagggaccgtttagtaaagacgta

SEQ ID NO: 323985 - DNA, 75 bp, synthetic construct
  source 1..75: mol_type = other DNA
ccaaacaaacttgagtgtatggtcgcaggagcgaatacaagccaacgatgagttgcatacagctctgcatcaact

SEQ ID NO: 323986 - DNA, 75 bp, synthetic construct
  source 1..75: mol_type = other DNA
cacatcagcaactggttgaaaccctgttgggaacacttacagacagccaaaacgtcgaggaactggctgaaaact

SEQ ID NO: 323987 - DNA, 75 bp, synthetic construct
  source 1..75: mol_type = other DNA
aagccgaactggagaaaccggagaccgggcggatcctgcgcggccatatcagtatggacgacgtgattaccgtgc

SEQ ID NO: 323988 - DNA, 75 bp, synthetic construct
  source 1..75: mol_type = other DNA
tctttctcagggagtttagtctccaggatttccggggcggttcacatcggctgggtgaaatcagggacagggggc

SEQ ID NO: 323989 - DNA, 75 bp, synthetic construct
  source 1..75: mol_type = other DNA
tggtatcccgacttcttgccgggtgacatagcaggtacgggaatgctcctcgatacgcccattgggcaacgctca

SEQ ID NO: 323990 - DNA, 75 bp, synthetic construct
  source 1..75: mol_type = other DNA
aactgccagatggttgggagtggactaacttacctaatttgagtgctaattttcaaaatggattatccagtagag

SEQ ID NO: 323991 - DNA, 75 bp, synthetic construct
  source 1..75: mol_type = other DNA
attctttctcaaaacaccattgtacagaaggcaaacacaatcttcaggtaaaggtattggaattaagaatttaaa

SEQ ID NO: 323992 - DNA, 75 bp, synthetic construct
  source 1..75: mol_type = other DNA
agggaaaataaaaaaacaaaaatcgttgccaccgattagcgatgaggaaaaaccgtttgaacttccggaagggtg

SEQ ID NO: 323993 - DNA, 75 bp, synthetic construct
  source 1..75: mol_type = other DNA
tggctcgcttgcgggtgtcgcgaaagcgaaaggtgaaatctttagcggcctgccggaaaacggtatcgccattat

SEQ ID NO: 323994 - DNA, 75 bp, synthetic construct
  source 1..75: mol_type = other DNA
ggtcttatttcttatattgggatttatcataaaacccaactgcaccttgcagatgcactcactgacgcggcgata

SEQ ID NO: 323995 - DNA, 75 bp, synthetic construct
  source 1..75: mol_type = other DNA
tcagaaagaaaattgaaaacttattcattacaactgctggacaaaaaacagtaaaccaaacacatataagttcat

SEQ ID NO: 323996 - DNA, 75 bp, synthetic construct
  source 1..75: mol_type = other DNA
tatgtacgggattatttaggtggaaattctgttggctcaactatgactaaccttaatcattctatattaaacaaa

SEQ ID NO: 323997 - DNA, 75 bp, synthetic construct
  source 1..75: mol_type = other DNA
tttatttgcagaagagtactcaaacaaatattttatacatgattttcttttatccattacagataaaataaaatc

SEQ ID NO: 323998 - DNA, 75 bp, synthetic construct
  source 1..75: mol_type = other DNA
atgcgaccaactggaacaacaatccctgaccagtctggacgcacatcagcaactggttgaaaccctattgggaac

SEQ ID NO: 323999 - DNA, 75 bp, synthetic construct
  source 1..75: mol_type = other DNA
tggttgggagtggactaacttacctaatttgagtgctaattttcaaaatggattatccagtagaggtagcaatgt

SEQ ID NO: 324000 - DNA, 75 bp, synthetic construct
  source 1..75: mol_type = other DNA
gtgatgcaatatcgggggagtggttctatctaatccttaatactctcgatatgtcgaagtatcaatcaggaacct

SEQ ID NO: 324001 - DNA, 75 bp, synthetic construct
  source 1..75: mol_type = other DNA
gctaatgtccaaagaggtgatattaacattgataagcttgaaagattcgaactagaacctcatgagttagctttt

SEQ ID NO: 324002 - DNA, 75 bp, synthetic construct
  source 1..75: mol_type = other DNA
ccgcgcctctgccgtgggcgtgattatgtccttaagccgtattggcaccattgtttcgacctgggcactgccgat

SEQ ID NO: 324003 - DNA, 75 bp, synthetic construct
  source 1..75: mol_type = other DNA
gcgctggggaacgtggtgattagcctgttctttatgctcggctgtattccgccgatgctgtggttaaacactgcc

SEQ ID NO: 324004 - DNA, 75 bp, synthetic construct
  source 1..75: mol_type = other DNA
atgtttgtttcatcccccgtcgaactgttggtgatgcgggtactcatcggcattgtcatcggtgcagattatccc

SEQ ID NO: 324005 - DNA, 75 bp, synthetic construct
  source 1..75: mol_type = other DNA
atgtttgtctcatcccccgtcgaactgctggtgatgcgggtactcatcggcattgtcatcggtgcggattatccc

SEQ ID NO: 324006 - DNA, 75 bp, synthetic construct
  source 1..75: mol_type = other DNA
cgtgattatgtccttaagccgtattggcaccattgtttcgacctgggcactgccaataattacggtatcagtaac

SEQ ID NO: 324007 - DNA, 75 bp, synthetic construct
  source 1..75: mol_type = other DNA
atgtccttaagccgtattggcaccattgtttcgacctgggcactgccgatctttatcaataattacggtatcagt

SEQ ID NO: 324008 - DNA, 75 bp, synthetic construct
  source 1..75: mol_type = other DNA
aggatatccggcatatcctgcgggctttttccctgttgcgtccggggggcgttctggttgccgtctgtctgaacg

SEQ ID NO: 324009 - DNA, 75 bp, synthetic construct
  source 1..75: mol_type = other DNA
ggccttcgtccacacaactcgccgccaggtttcacaatatggcatccgcgttggcgcggtgttgccgggtccggt

SEQ ID NO: 324010 - DNA, 75 bp, synthetic construct
  source 1..75: mol_type = other DNA
atgatgcacttaaaaaatattactgctggcaaccctaaaacaaaagagcaataccagctaacgaaacaatttaac

SEQ ID NO: 324011 - DNA, 75 bp, synthetic construct
  source 1..75: mol_type = other DNA
cctacaagcccgtctggtgagcaatgagtgcctgcgttggcgattccgtttagctgtaaatactcgccggcagta

SEQ ID NO: 324012 - DNA, 75 bp, synthetic construct
  source 1..75: mol_type = other DNA
cgtctggaagagtggatctgcggcgaaggtgccagcgcgcagatcgacacgcaggggattcatttactcgcttga

SEQ ID NO: 324013 - DNA, 75 bp, synthetic construct
  source 1..75: mol_type = other DNA
gcggcagaccgcgcagaatccgcagcggaagtgactgcagagccctgtgcgaatatagtgccgccgctgcctgat

SEQ ID NO: 324014 - DNA, 75 bp, synthetic construct
  source 1..75: mol_type = other DNA
acgactgcaaaataggaagaggaaacgttcagggataagacatattgcaattaatattttgacgaaagataaggt

SEQ ID NO: 324015 - DNA, 75 bp, synthetic construct
  source 1..75: mol_type = other DNA
cgacagtcgcgtcacctttgccggataccgcttctctgaaaaaaactacatgaccatgagcgagtatctggatgc

SEQ ID NO: 324016 - DNA, 75 bp, synthetic construct
  source 1..75: mol_type = other DNA
ctgggcgcgctggcatttgacatcacccactcgcatgtccgcctggatgacaacacagcctacgataaacagacg

SEQ ID NO: 324017 - DNA, 75 bp, synthetic construct
  source 1..75: mol_type = other DNA
ttacgcctgtttaacgcctgacctgatagcgcagcttggcctgaaagaagacattttgaagagcctgcaatggat

SEQ ID NO: 324018 - DNA, 75 bp, synthetic construct
  source 1..75: mol_type = other DNA
cgacgacgacaattccagccaggtcagttattaccagcgcctgaacgatcacagcaactatcaattaagtctggg

SEQ ID NO: 324019 - DNA, 75 bp, synthetic construct
  source 1..75: mol_type = other DNA
tacaacatgaatgctcaggttcgccatcagcagaatgatggcgtcgatgaacatgacatcacggcgaacggtact

SEQ ID NO: 324020 - DNA, 75 bp, synthetic construct
  source 1..75: mol_type = other DNA
acgcaaaacatgggcggcacgcggttgttgattgatgcggacggtgtttctggcgtacccgtagagggtaatggc

SEQ ID NO: 324021 - DNA, 75 bp, synthetic construct
  source 1..75: mol_type = other DNA
gcggcgcgacgctgaccgcgcacggcggggcgctgcaccgcacgcagaatatgggcggcacgcgtctgctgattg

SEQ ID NO: 324022 - DNA, 75 bp, synthetic construct
  source 1..75: mol_type = other DNA
caggatctcgccgattttagctctggtacgctgcatgtgcgcattgaagaggtgaacggtcaggtgcaggagtat

SEQ ID NO: 324023 - DNA, 75 bp, synthetic construct
  source 1..75: mol_type = other DNA
ataaaataagtaatgagacattctatgatgactcaacattaaccatgacgacgccgcaaattgaactgggcaata

SEQ ID NO: 324024 - DNA, 75 bp, synthetic construct
  source 1..75: mol_type = other DNA
taaacttgcgttggctcttggagtatcagcttcatatctagaatatggtgttggagatagagaggaatgtaagga

SEQ ID NO: 324025 - DNA, 75 bp, synthetic construct
  source 1..75: mol_type = other DNA
atgactagcgcgtgtgatgtgagtaatcttctacctatggtagaagaacagaagtatccagatttcgccaagaga

SEQ ID NO: 324026 - DNA, 75 bp, synthetic construct
  source 1..75: mol_type = other DNA
cgccgaatctgcgcggctatgccccggatatttctggcgtggcccatacggcggcgaaagtcaccatcagccagg

SEQ ID NO: 324027 - DNA, 75 bp, synthetic construct
  source 1..75: mol_type = other DNA
caggtaatccaaaaaccgttgaacaatatcagctaacaaagaattttaatgttatctggttatggtccgaagatg

SEQ ID NO: 324028 - DNA, 75 bp, synthetic construct
  source 1..75: mol_type = other DNA
taaatggatgttcaaagatggcgtagtgataaagcgaacttacaccgaggaagagcagaggcaacaagcggaaaa

SEQ ID NO: 324029 - DNA, 75 bp, synthetic construct
  source 1..75: mol_type = other DNA
ttgttgctatggacaaggatgtatcggcaattaatccagaaggtttaagtgtcgttgagttgcctgatattacag

SEQ ID NO: 324030 - DNA, 75 bp, synthetic construct
  source 1..75: mol_type = other DNA
cgggcaatccaaaaaccaaagaacagtacctgttaactaaaaactccagcgttgtctggttattcgatgaagatg

SEQ ID NO: 324031 - DNA, 75 bp, synthetic construct
  source 1..75: mol_type = other DNA
gtgattaagaggatttatacggcagacgaacagcaacaacaggcagaatcacaaaaggccgcgttactttccgaa

SEQ ID NO: 324032 - DNA, 75 bp, synthetic construct
  source 1..75: mol_type = other DNA
aaagctgcagaagtgttagtcgtcgatatccgtaatggtaatattctggcgaaggtagcggcaccggaatctctg

SEQ ID NO: 324033 - DNA, 75 bp, synthetic construct
  source 1..75: mol_type = other DNA
gccacgaacactgtttacatcagcggtattgggaaagagagtgtgatttgggtggttgatggcgagaatatcaaa

SEQ ID NO: 324034 - DNA, 75 bp, synthetic construct
  source 1..75: mol_type = other DNA
catgaaaggtgatgaagctcgtcacacgttgctggcaaccggtgcggcggcggggctggcggcggcctttaacgc

SEQ ID NO: 324035 - DNA, 75 bp, synthetic construct
  source 1..75: mol_type = other DNA
attattacggggcttggcgcaacactattagcacaatttaccggcgggaaaccgctatactcggcaattcttgcc

SEQ ID NO: 324036 - DNA, 75 bp, synthetic construct
  source 1..75: mol_type = other DNA
aaacaccgcaggccgcgcgcctgcgacgcagacaactgattcgccaacttcttgagcgcgataaaaccccgttag

SEQ ID NO: 324037 - DNA, 75 bp, synthetic construct
  source 1..75: mol_type = other DNA
tgtatatcgtggaaagtaaggatggcagtgtgcagattgccgttaatgcaccgtacagcctgaagcgtcagccgg

SEQ ID NO: 324038 - DNA, 75 bp, synthetic construct
  source 1..75: mol_type = other DNA
ggggcgcatatcagctggaactggttcgaaacaaacgcggatgttcatgcccgctcattcacggccgcaaaagcg

SEQ ID NO: 324039 - DNA, 75 bp, synthetic construct
  source 1..75: mol_type = other DNA
cgcccgcatgaaagccatgggactgacagtcagctatggcgcatcgtatatgcacacccatgaagtggatgccgg

SEQ ID NO: 324040 - DNA, 75 bp, synthetic construct
  source 1..75: mol_type = other DNA
atgatgcacttaaaaaatattactgctggcaaccctaaaacaaaagagcaataccagctaacaaagcaatttaac

SEQ ID NO: 324041 - DNA, 75 bp, synthetic construct
  source 1..75: mol_type = other DNA
acaaaaggcaactttgctttccgaagccgaatccgtgattgtgccgctggagcgcgctgtcaggctgaatatggc

SEQ ID NO: 324042 - DNA, 75 bp, synthetic construct
  source 1..75: mol_type = other DNA
gtgcgcggtggtaaggcagcgcagccggacggccacacgctggcgcggctgtggggggcgctgccgccggatatc

SEQ ID NO: 324043 - DNA, 75 bp, synthetic construct
  source 1..75: mol_type = other DNA
tcgatcccggaactggaaacctgggtagaaacctgggcgttctcagaaacgattcattcccgctcctatacccat

SEQ ID NO: 324044 - DNA, 75 bp, synthetic construct
  source 1..75: mol_type = other DNA
taaatggatgttcaaagatggcgtagtgataaagcgaacttataccgaggaagaacagaggcaacaagctgaaaa

SEQ ID NO: 324045 - DNA, 75 bp, synthetic construct
  source 1..75: mol_type = other DNA
atgctctttgcgcagaaagtcgaatctacagacacttccagcctgccagtaacatttcccgaacaacctgaatga

SEQ ID NO: 324046 - DNA, 75 bp, synthetic construct
  source 1..75: mol_type = other DNA
acagagtggatgttctttgcgcagaaagtcgaatctacagacacttccagcctgccagtaacgtttcccgaacaa

SEQ ID NO: 324047 - DNA, 75 bp, synthetic construct
  source 1..75: mol_type = other DNA
accgagtggatgctctatgcgcagaaagtcgaatctacagacacctccagcctgccagtaacattccccgaacaa

SEQ ID NO: 324048 - DNA, 75 bp, synthetic construct
  source 1..75: mol_type = other DNA
tgacgatgcgacagggaaagaacaggtctacatccacgcgcagaagaacatgaacaccgaggtgctgaataaccg

SEQ ID NO: 324049 - DNA, 75 bp, synthetic construct
  source 1..75: mol_type = other DNA
tgatatgactggaggagtgactatttattatgatcctgaaacaggtgattcaatgacttttgatagtagcaatag

SEQ ID NO: 324050 - DNA, 75 bp, synthetic construct
  source 1..75: mol_type = other DNA
tcgagtacatcaccaacatccgcatgcaagctgtcggtttggatctaccgttccagacacgttccaacccgatcc

SEQ ID NO: 324051 - DNA, 75 bp, synthetic construct
  source 1..75: mol_type = other DNA
tgattgcccgtgacgaagccctgcacctgaccggcacccagcatatgctgaatctgctgcgcagcggcgcggatg

SEQ ID NO: 324052 - DNA, 75 bp, synthetic construct
  source 1..75: mol_type = other DNA
atgatgcacttaaaaaatattactgctggcaatcctaaaacagtggagcaataccagctaacaaaacaattcaat

SEQ ID NO: 324053 - DNA, 75 bp, synthetic construct
  source 1..75: mol_type = other DNA
tgggaagacaggaagggagacagaaggcaagacaagaggaaaggcaggaattcgccaagcgtcttttgagtaaag

SEQ ID NO: 324054 - DNA, 75 bp, synthetic construct
  source 1..75: mol_type = other DNA
ggaatgtctcgggaagacgttgcagagatggcaaatttacctcttgctgagattgataaggtaattaaccttatt

SEQ ID NO: 324055 - DNA, 75 bp, synthetic construct
  source 1..75: mol_type = other DNA
atgttgtgattgaacaccaaagcaagccggataagaaaatggcctttcgcatgatgcgttattctattgctgcca

SEQ ID NO: 324056 - DNA, 75 bp, synthetic construct
  source 1..75: mol_type = other DNA
atgacgcggtttttaaacaatttttaatgcatgcggaaacggcccgcgatttcctggagatacatttgccagcgg

SEQ ID NO: 324057 - DNA, 75 bp, synthetic construct
  source 1..75: mol_type = other DNA
gcaaatgctgggtaatcccggctatctgtatgtcgtgattgaacatcaaagcaagccggacaaaaaaatggcctt

SEQ ID NO: 324058 - DNA, 75 bp, synthetic construct
  source 1..75: mol_type = other DNA
gatatcaccatcacaccggatgacgaaatcatgcaacatcggcggattgcgattctcgaactactgcaaaaacat

SEQ ID NO: 324059 - DNA, 75 bp, synthetic construct
  source 1..75: mol_type = other DNA
tcaatatattcgttaccctatgcagccgggagataaggggattgttatccccgcagatacttacattggcggggt

SEQ ID NO: 324060 - DNA, 75 bp, synthetic construct
  source 1..75: mol_type = other DNA
tatgctggaggcgcatagcgacagttccattgttccgttaagcaaaagcacgccggatgtcgaaacgcccagcct

SEQ ID NO: 324061 - DNA, 75 bp, synthetic construct
  source 1..75: mol_type = other DNA
gcgcatcaactgcgctttgccgctcagcgaaacctatcgcgaagcactaaagcaaattggcgatgccgtgtatcg

SEQ ID NO: 324062 - DNA, 75 bp, synthetic construct
  source 1..75: mol_type = other DNA
gcagctgtgccgcatgaaaatccaggtggcggcaggctcgattttctcggcttccggcaaataccgtaattgtct

SEQ ID NO: 324063 - DNA, 75 bp, synthetic construct
  source 1..75: mol_type = other DNA
cgattttctcggcttccggcaaataccgtaattgtctgcgcatcaactgcgctttgccgctcagcgaaacctatc

SEQ ID NO: 324064 - DNA, 75 bp, synthetic construct
  source 1..75: mol_type = other DNA
cgttctcggttatgacttgttagccggtcagcgagtgttgcgagagcaggttgcccgcctgatgctcgacagcgg

SEQ ID NO: 324065 - DNA, 75 bp, synthetic construct
  source 1..75: mol_type = other DNA
ttaaaccttttgatcgtgtagtggttaccggacgtttcaatgccattggcgaggcggtgaaagccgtttcccgtc

SEQ ID NO: 324066 - DNA, 75 bp, synthetic construct
  source 1..75: mol_type = other DNA
gcaacacaaagcccagccgccagtgccgccgatgacgcgtccggtgcaacgtccggtggaaattacccagtggga

SEQ ID NO: 324067 - DNA, 75 bp, synthetic construct
  source 1..75: mol_type = other DNA
ttacctgaaccagaaaagtattgaatggaccacactgctcgaaaaagatgatattttcagagaggttaaggccag

SEQ ID NO: 324068 - DNA, 75 bp, synthetic construct
  source 1..75: mol_type = other DNA
gaagcagaatacgatatcttgaaagacgcttaaatgaaaatgggttttatttaccatcaagcctggccgataaag

SEQ ID NO: 324069 - DNA, 75 bp, synthetic construct
  source 1..75: mol_type = other DNA
tgaaatcccaaccgatccagaaactggcatcagcgttgaagcactggaactggcgctggaacagtggccgattaa

SEQ ID NO: 324070 - DNA, 75 bp, synthetic construct
  source 1..75: mol_type = other DNA
aacgcccagcctgaaaccgctctggcgggagctaagccgggtggtgcagcataatctgcaaaccgtgctcggtta

SEQ ID NO: 324071 - DNA, 75 bp, synthetic construct
  source 1..75: mol_type = other DNA
agccgcgttcgggttattttgtcgcacaacgtaaagcccagccgcctgtaccgccgatgacgcgtccggtgcagc

SEQ ID NO: 324072 - DNA, 75 bp, synthetic construct
  source 1..75: mol_type = other DNA
atgaataatactgttacggcctgtgtagatggttcactttcaacgcggtccgtgtgtgaatatgcggcgtgggct

SEQ ID NO: 324073 - DNA, 75 bp, synthetic construct
  source 1..75: mol_type = other DNA
tgctgaaaaagctgaagctgataagaatcgcgtttttaatggcgtgattgagctgcctaaagagcaagccgtcct

SEQ ID NO: 324074 - DNA, 75 bp, synthetic construct
  source 1..75: mol_type = other DNA
ttcggtaacagcggtaactggcgtgtagttgccgatctctataagtctgatgctgaaaaagcagaaaccgaaaaa

SEQ ID NO: 324075 - DNA, 75 bp, synthetic construct
  source 1..75: mol_type = other DNA
ggttctgaaaacacaggaaagtttgcataagcccattgtgatgggaatacgcccggaagatattcagccgcaagc

SEQ ID NO: 324076 - DNA, 75 bp, synthetic construct
  source 1..75: mol_type = other DNA
cccgcgaatatgtttgttgccggatttattggatcaccggcgatgaattttattcgcggcacgatcgatggcgat

SEQ ID NO: 324077 - DNA, 75 bp, synthetic construct
  source 1..75: mol_type = other DNA
tcgacggctcgccgtcaacccgtccggtctgtgagtatgccgcctgggcggccgctaagcttggtacgccgctgg

SEQ ID NO: 324078 - DNA, 75 bp, synthetic construct
  source 1..75: mol_type = other DNA
tctgacaattaccttgattgcgatgatccagcagcatgaaagcactattagctggatgttcgttgtcgatattct

SEQ ID NO: 324079 - DNA, 75 bp, synthetic construct
  source 1..75: mol_type = other DNA
gtttatctgtccttgagtttgccatggggtgacaacagcaccatcagttacaacggcaattatggcagtggtgcc

SEQ ID NO: 324080 - DNA, 75 bp, synthetic construct
  source 1..75: mol_type = other DNA
agcattcgtttttcacgacgcaacaaaaataattcgttttgataatattgatgaagcaatatctgagtataaatc

SEQ ID NO: 324081 - DNA, 75 bp, synthetic construct
  source 1..75: mol_type = other DNA
aagattatattcaaagaataacgagttaagagataagattgattttgttaaggatttttctgaattaggtaaata

SEQ ID NO: 324082 - DNA, 75 bp, synthetic construct
  source 1..75: mol_type = other DNA
ataggtggtatagatagaccagacaagggggctgtttatacaaacaaaactatttcttggcctgttggaatttct

SEQ ID NO: 324083 - DNA, 75 bp, synthetic construct
  source 1..75: mol_type = other DNA
aatcatatcgcacaccacaaggacgacattatgtatttaaagatttaaatgttgaattaccaagtggtaaaagta

SEQ ID NO: 324084 - DNA, 75 bp, synthetic construct
  source 1..75: mol_type = other DNA
tacgggggctttcatggtggattgctctggcaatttccgggagtccttttaatgtactggcagatgataccattc

SEQ ID NO: 324085 - DNA, 75 bp, synthetic construct
  source 1..75: mol_type = other DNA
attggaggcattgatagaccagataaaggtactgtaattacggacaaaacaatttcttggcctgttggattgtct

SEQ ID NO: 324086 - DNA, 75 bp, synthetic construct
  source 1..75: mol_type = other DNA
gctgatactctgtttcagcagtgcacctttgctggggtggtggcggtatctgaagataacacaatgggtgatgca

SEQ ID NO: 324087 - DNA, 75 bp, synthetic construct
  source 1..75: mol_type = other DNA
aagcgatggccgttctgcgcatggaaaatggcgactatcccccctttggcgcggaagttaaaaacagccaccagc

SEQ ID NO: 324088 - DNA, 75 bp, synthetic construct
  source 1..75: mol_type = other DNA
attggcggtattgaccgccccgatagaggaaagatcatcaccaataaaacgatatcatggcccattgggctcgcc

SEQ ID NO: 324089 - DNA, 75 bp, synthetic construct
  source 1..75: mol_type = other DNA
agtcttatcgcactccagcgggacgatattatgtctttaaagatttgaatatagatattcctacaggcaaaagtg

SEQ ID NO: 324090 - DNA, 75 bp, synthetic construct
  source 1..75: mol_type = other DNA
tcgcctttattggtcgcaacggagcgggtaaatcaacgttactgagaatgattggcggcattgaccgccccgaca

SEQ ID NO: 324091 - DNA, 75 bp, synthetic construct
  source 1..75: mol_type = other DNA
tttattatggtttcgcatagccttcattctttaagtaaatattgtgatgtggctttatttattggtagagataat

SEQ ID NO: 324092 - DNA, 75 bp, synthetic construct
  source 1..75: mol_type = other DNA
tgcgttacgcgggcgcgaaaaattgacggatgcggcacttaccgagcgtctggaagagtggatctgcggcgaagg

SEQ ID NO: 324093 - DNA, 75 bp, synthetic construct
  source 1..75: mol_type = other DNA
aggagctggccctgatggaagatctgacgccactgctgcacaagctccaaggtcgagagatcgccggtctggctg

SEQ ID NO: 324094 - DNA, 75 bp, synthetic construct
  source 1..75: mol_type = other DNA
ctgtttgtggtggaccgcaaagacctggaccgccagacccgcgaggaattcaaccgttttcaggaaggctgcgtc

SEQ ID NO: 324095 - DNA, 75 bp, synthetic construct
  source 1..75: mol_type = other DNA
ccgcagcggtcttttctctgctgggcggcaaagggcttaacgaacgtgttggctcgacgctggaaatagagtccg

SEQ ID NO: 324096 - DNA, 75 bp, synthetic construct
  source 1..75: mol_type = other DNA
gcagcaatttggcctcgggattgtcatcggacttggcggtggttatttactgctgcaaatgattaatcgcatcgc

SEQ ID NO: 324097 - DNA, 75 bp, synthetic construct
  source 1..75: mol_type = other DNA
tgattttcttcgcccgtcctctttcggtatttgccggattgctaccattccgtggcttcaatctgcgtgagcgcg

SEQ ID NO: 324098 - DNA, 75 bp, synthetic construct
  source 1..75: mol_type = other DNA
aggtgatgttttttcggttgattcttcgttggtcattgtgtgcgcctgtaaagcaatgcgccgtagtacctcaca

SEQ ID NO: 324099 - DNA, 75 bp, synthetic construct
  source 1..75: mol_type = other DNA
aagtgggatacgctggcgaaggctgcaaaatggtcgaaggaaaatgccagcgtgctggttgatacccactggatt

SEQ ID NO: 324100 - DNA, 75 bp, synthetic construct
  source 1..75: mol_type = other DNA
agcattcgtttttcacgacgcaacaaaaatagttcgttttaataatattgatgaagcaatatctgagtataaatc

SEQ ID NO: 324101 - DNA, 75 bp, synthetic construct
  source 1..75: mol_type = other DNA
ttttgccgagaagttcctggccaagtgtaccttggggcaaatgatcagccgctacatggtgttggtggccagcga

SEQ ID NO: 324102 - DNA, 75 bp, synthetic construct
  source 1..75: mol_type = other DNA
ccaccgacgacttattcgaacgctgtttgcatcagtacaccatcactcatgctatcgaagatcgcaacgtcttac

SEQ ID NO: 324103 - DNA, 75 bp, synthetic construct
  source 1..75: mol_type = other DNA
gttcgacattttgtcttaccgcgtctgaaaaaagacgctggcctgccgtttttcttcccgttgatcacccattcc

SEQ ID NO: 324104 - DNA, 75 bp, synthetic construct
  source 1..75: mol_type = other DNA
aattcagtgagtatattgcgccactgcaggatgctgtagatctggaaatcgcaacggcggaagaaagatcgttgc

SEQ ID NO: 324105 - DNA, 75 bp, synthetic construct
  source 1..75: mol_type = other DNA
tcaactagacagcatcattcatgaaattataccaaaagagaatgagagtgcagaaactgttctccatcttatgag

SEQ ID NO: 324106 - DNA, 75 bp, synthetic construct
  source 1..75: mol_type = other DNA
atgggggttatcactggtgatttgtatcggtcgagtaccgattacgaacgaggggtttcttacattggcttgatg

SEQ ID NO: 324107 - DNA, 75 bp, synthetic construct
  source 1..75: mol_type = other DNA
tacggggtcgctagttaaggaagagtctgcttcatcagaaacaggtgaacatttagtggagtatacgcattcaaa

SEQ ID NO: 324108 - DNA, 75 bp, synthetic construct
  source 1..75: mol_type = other DNA
ggtaataatccttttatatggaatgtgaatgttacaggtacacttgcttttgcaagaagaatggcaaaagtggca

SEQ ID NO: 324109 - DNA, 75 bp, synthetic construct
  source 1..75: mol_type = other DNA
gcaggatgctgtagatctggaaatcgcaacggcggaagaaagatcgttgctggaggcatggaataaatatcgggt

SEQ ID NO: 324110 - DNA, 75 bp, synthetic construct
  source 1..75: mol_type = other DNA
gccagctttgcgcctcgccatacacgccgtgggcatgaaacgcgttcaggcgtaccggaacatcgccaagtccct

SEQ ID NO: 324111 - DNA, 75 bp, synthetic construct
  source 1..75: mol_type = other DNA
aaccgggtaatcttctggcggatgcgcttgccgcgatgattaacgcagacctggactgtccggtcagcgccacga

SEQ ID NO: 324112 - DNA, 75 bp, synthetic construct
  source 1..75: mol_type = other DNA
taccgtctggccgtcaacaaaggcaaaccgggtaatcttctggcggatgcgcttgccgcgatgattaacgcagac

SEQ ID NO: 324113 - DNA, 75 bp, synthetic construct
  source 1..75: mol_type = other DNA
aaattattcgcggaatcgaaattacggcagcaagtcatgggtatctggtactgattggcgactgtgcacatcaaa

SEQ ID NO: 324114 - DNA, 75 bp, synthetic construct
  source 1..75: mol_type = other DNA
aatctgccgccgatggtgatggcgaacgaatttgcaccggagctggagctgcctacagttcatatcgacaatctg

SEQ ID NO: 324115 - DNA, 75 bp, synthetic construct
  source 1..75: mol_type = other DNA
aaggccgttacgctgattttggacctacgtttgcgtgcgaaaaattgcgcgagatacacggtttatctttatccg

SEQ ID NO: 324116 - DNA, 75 bp, synthetic construct
  source 1..75: mol_type = other DNA
tggttgcccgaccatcaattattgttggccacagtcgtttagggtgcttaccttcaaccagtattttctgggtat

SEQ ID NO: 324117 - DNA, 75 bp, synthetic construct
  source 1..75: mol_type = other DNA
cagaaggatacaaagccatctcagatctgtcgcatcactattttcgtgcagaaggctctagccctccccaatctt

SEQ ID NO: 324118 - DNA, 75 bp, synthetic construct
  source 1..75: mol_type = other DNA
aaggaatatacgacataatcagaagccactatttaagaaactttccatatacgattgaatttgaagcgcttaatg

SEQ ID NO: 324119 - DNA, 75 bp, synthetic construct
  source 1..75: mol_type = other DNA
aatcacggaaggggcatcactgttggtgctcacacccatacactcaataaacaacatactgtctttgatattaag

SEQ ID NO: 324120 - DNA, 75 bp, synthetic construct
  source 1..75: mol_type = other DNA
ggcagcacccgactgcgcgaaggcgatgtgttgtgtgtaattggtcgggaacgcgatctcccggcgctcggtaaa

SEQ ID NO: 324121 - DNA, 75 bp, synthetic construct
  source 1..75: mol_type = other DNA
aagtgagcgcagagagggattatcttgcctgactgaactggcgattaagtttccgcgtacccggcgtttagttat

SEQ ID NO: 324122 - DNA, 75 bp, synthetic construct
  source 1..75: mol_type = other DNA
ttcggatcgggttgcttcgctgaccagttttcttcttcaactgagaataatgagtctgcataatgagcgcattgc

SEQ ID NO: 324123 - DNA, 75 bp, synthetic construct
  source 1..75: mol_type = other DNA
agatggtacagtcggtacttcaaaagattttaagattgagttaataaaatgcgatccgttggtgacaaaactaaa

SEQ ID NO: 324124 - DNA, 75 bp, synthetic construct
  source 1..75: mol_type = other DNA
ttgcgtcaggaactttcctggcagcagtaagtacgagtgtatttgctgtagatactgggattgttaacttcaatg

SEQ ID NO: 324125 - DNA, 75 bp, synthetic construct
  source 1..75: mol_type = other DNA
atagatgttatccctgtagattattgtgctgatgcattgctaatgttgcttgaaagctcgttaattaatggtgag

SEQ ID NO: 324126 - DNA, 75 bp, synthetic construct
  source 1..75: mol_type = other DNA
aatgtgaatattgtcggaaagccatttgaaacaatcagagaatttgactgcatggtaagtgcggcaaatagtttc

SEQ ID NO: 324127 - DNA, 75 bp, synthetic construct
  source 1..75: mol_type = other DNA
gattatgaaggatgggattgttcagcaagttggtgcgccgaaaacggtttataaccaaccagcgaatatgtttgt

SEQ ID NO: 324128 - DNA, 75 bp, synthetic construct
  source 1..75: mol_type = other DNA
attatactgctaatgtcatccagattggtaataacccgccaactgcggggaaatatgcctcatctgcaacgtttg

SEQ ID NO: 324129 - DNA, 75 bp, synthetic construct
  source 1..75: mol_type = other DNA
atgtatcgccagaacgtgtatggcgaaagcgatcccagctatctggatgtggaaaccatctacaccctgtcatac

SEQ ID NO: 324130 - DNA, 75 bp, synthetic construct
  source 1..75: mol_type = other DNA
gcagagcgaatcaaccgagtactttccaccaacgtgacgggatattttctctgctgccgcgaggcggtaaaacgc

SEQ ID NO: 324131 - DNA, 75 bp, synthetic construct
  source 1..75: mol_type = other DNA
caagcaaaactggaatgaccattatcctgatgaagtatcgaaagcacagtcagcaattagcaaagctcttgggga

SEQ ID NO: 324132 - DNA, 75 bp, synthetic construct
  source 1..75: mol_type = other DNA
ttcagttattacttaagcaatccaaaaatagaacaacgacaacatatccagaatggtatgaagctgttaataaag

SEQ ID NO: 324133 - DNA, 75 bp, synthetic construct
  source 1..75: mol_type = other DNA
ctggcgttaacactgggatcaccgctttccggcgcgctgttggagatgcatggatttatggggcatcccggctgg

SEQ ID NO: 324134 - DNA, 75 bp, synthetic construct
  source 1..75: mol_type = other DNA
atggctatagcacttgtgaccggtggcagtcgcggcatcgggcgggcaactgcattactgttggcgcaagaaggg

SEQ ID NO: 324135 - DNA, 75 bp, synthetic construct
  source 1..75: mol_type = other DNA
atgtttacagcaatcgatcagcacgatgaaccgctagcagcgctggtcaataacgccgggatcttgtttacccag

SEQ ID NO: 324136 - DNA, 75 bp, synthetic construct
  source 1..75: mol_type = other DNA
acttaaaaagcgcttttatgacaagctcgcgcctaatttctttgcgggcgatcatgtacgcacgggcacaatgga

SEQ ID NO: 324137 - DNA, 75 bp, synthetic construct
  source 1..75: mol_type = other DNA
acctgcttttttcatatctgcatctgactctttcctccttctgttcctgcgttctcattacctgtcagccggatg

SEQ ID NO: 324138 - DNA, 75 bp, synthetic construct
  source 1..75: mol_type = other DNA
atgataaattcaatcgcgtttagtcttatagcgttatgtataatatatatatcatcactacttaaaaaaagtaac

SEQ ID NO: 324139 - DNA, 75 bp, synthetic construct
  source 1..75: mol_type = other DNA
gctaatgcgccggaaggcgattttgaccgctcattctctgatggcgttctcgaagatatcgccgcccagcttcga

SEQ ID NO: 324140 - DNA, 75 bp, synthetic construct
  source 1..75: mol_type = other DNA
ggactggatgatgccgataccgtaacgcttaaggaagtgacagaagcattgttgcattgtgcggaacagattcgc

SEQ ID NO: 324141 - DNA, 75 bp, synthetic construct
  source 1..75: mol_type = other DNA
ttatcaacgatgccctgcaccacagcgaaactccagctaccgatgctttcctgtctgaagtgcgggcgcaggggg

SEQ ID NO: 324142 - DNA, 75 bp, synthetic construct
  source 1..75: mol_type = other DNA
atgggcgatctgcaatacaaatatattgtgatgccctataccgatgaaccgaacctgaatctgttacgcactgaa

SEQ ID NO: 324143 - DNA, 75 bp, synthetic construct
  source 1..75: mol_type = other DNA
atcacctattggcggcacaaaataaagaacaattttgaattccttacattcctggctattgcacaactgaattta

SEQ ID NO: 324144 - DNA, 75 bp, synthetic construct
  source 1..75: mol_type = other DNA
gacggcatctccacgtttaacgtgaatgatggtggtgaaatgcagattgaacgcatgatcacgatgtaccgcaca

SEQ ID NO: 324145 - DNA, 75 bp, synthetic construct
  source 1..75: mol_type = other DNA
gcggcgaagtttaccggcgagtgttccgtgcatgatgtccggctgaattattattccggtgaagtcacgccagcc

SEQ ID NO: 324146 - DNA, 75 bp, synthetic construct
  source 1..75: mol_type = other DNA
acacaacgttttccgcgccataaactggctgatgacgggacgcccgttcgtgccggtcagaatatcgtgacgccg

SEQ ID NO: 324147 - DNA, 75 bp, synthetic construct
  source 1..75: mol_type = other DNA
ttcagatcgaacgtcaggtgaccatgtatcgccagaacgtgtacggcgaaagtgatcccagctatctggatgtgg

SEQ ID NO: 324148 - DNA, 75 bp, synthetic construct
  source 1..75: mol_type = other DNA
gcgtccggcaaaatatagctacgttgacgaaaacggcgaaactaaaacctggactggccagggccgtactccagc

SEQ ID NO: 324149 - DNA, 75 bp, synthetic construct
  source 1..75: mol_type = other DNA
gcccggtgctggcagtggctcaacgtcaccgcgatgtcgcagaacgtgtgctggagattgtcctggcaagcctgg

SEQ ID NO: 324150 - DNA, 75 bp, synthetic construct
  source 1..75: mol_type = other DNA
acgagccgcgtaagccaaaaccaggtttaacgcgcatcaaacgaaatctctatcgtcgcggcgtcctcagccgta

SEQ ID NO: 324151 - DNA, 75 bp, synthetic construct
  source 1..75: mol_type = other DNA
agctgtatgtcgtgcgtaatacagccgatcaggatcgtcttgatgtgttgtgcggcccgaacctgattaaccagt

SEQ ID NO: 324152 - DNA, 75 bp, synthetic construct
  source 1..75: mol_type = other DNA
ggggaagcaaccccggaaggaatacaggtcgctatagcctatccgaaacaaaaagcggctaacccggatatcacc

SEQ ID NO: 324153 - DNA, 75 bp, synthetic construct
  source 1..75: mol_type = other DNA
ggttgagtttaataactccatggctgtcaccggcactccggcacagcgtcagtgtgtgctgctgtttggtcaggc

SEQ ID NO: 324154 - DNA, 75 bp, synthetic construct
  source 1..75: mol_type = other DNA
agctttctgtcagcttcctgcgtgaacaaggtttccgtactgcctggaaagatgatccgcgcgaagtgcatttcc

SEQ ID NO: 324155 - DNA, 75 bp, synthetic construct
  source 1..75: mol_type = other DNA
gggaaacgggagggaagtctatgatgacgctggcgcagtggtttgaagagaggggaagacaggaggtaagactgg

SEQ ID NO: 324156 - DNA, 75 bp, synthetic construct
  source 1..75: mol_type = other DNA
ctaccggaggagaggttgtcttctcggctgcggttcaaaactttatgcttgcattaaacgtgatcggttggattt

SEQ ID NO: 324157 - DNA, 75 bp, synthetic construct
  source 1..75: mol_type = other DNA
acatttcaggcggaaacggagacatgtcgatgtgcggcgataattgtgtgcgtatatggtttggtcgccgtgatg

SEQ ID NO: 324158 - DNA, 75 bp, synthetic construct
  source 1..75: mol_type = other DNA
aattcgccctgcgtcttctgaataaaggaatgtctcgggaagacgttgcagagatggcaaatttaccccttgccg

SEQ ID NO: 324159 - DNA, 75 bp, synthetic construct
  source 1..75: mol_type = other DNA
gggaaacgggaggggagtctatgatgacgctggcgcagtggtttgaagagaagggaattgagaaggggattgaga

SEQ ID NO: 324160 - DNA, 75 bp, synthetic construct
  source 1..75: mol_type = other DNA
ttcgccctgcgtcttctaagtaaaggaatgtctcgggaagacgttgcagagatggcaaatttacctcttgctgag

SEQ ID NO: 324161 - DNA, 75 bp, synthetic construct
  source 1..75: mol_type = other DNA
gcaacatcggcggattgcgattctcgaactgctgcaaaaacatattcgccagcgcgacttaatgttattgctgga

SEQ ID NO: 324162 - DNA, 75 bp, synthetic construct
  source 1..75: mol_type = other DNA
cagatcatctgggatccagagactccgttcgctgcggtaatcgaagctgcaccttctgttattgatggtgatatt

SEQ ID NO: 324163 - DNA, 75 bp, synthetic construct
  source 1..75: mol_type = other DNA
gtggtttataacggtaatctggtctcttacgatagcgttccagtggcagattttaataacccattaaagatctcc

SEQ ID NO: 324164 - DNA, 75 bp, synthetic construct
  source 1..75: mol_type = other DNA
gcggattcaggcgagaatgtcagtgggaagatcaccgagaaatacgtgggtaaagccgaatccgctaatcttaat

SEQ ID NO: 324165 - DNA, 75 bp, synthetic construct
  source 1..75: mol_type = other DNA
aatgggagttaaagaaatcctggaagctcgataaagtctacgatattactgaacaagtaaaaacctctgtatatc

SEQ ID NO: 324166 - DNA, 75 bp, synthetic construct
  source 1..75: mol_type = other DNA
ataatataaacataaaaggttcagaaaacggtggaaagttactttcacgtaatgaagatggtagtataacaataa

SEQ ID NO: 324167 - DNA, 75 bp, synthetic construct
  source 1..75: mol_type = other DNA
ggcaagacaagaggaaaggcaggaattcgcccagcgtcttttgagtaaagggatgtctcgagaagacgttgcaga

SEQ ID NO: 324168 - DNA, 75 bp, synthetic construct
  source 1..75: mol_type = other DNA
tccgggcactgggttttatgacggaatcggtagctgaagccgtacatcagcgcaccgggaatatgccagcccgtc

SEQ ID NO: 324169 - DNA, 75 bp, synthetic construct
  source 1..75: mol_type = other DNA
ggtaaaaatgacgccggatgtgggctggtcatataaccccggttcggcggcatttggtacggatcaggcactgat

SEQ ID NO: 324170 - DNA, 75 bp, synthetic construct
  source 1..75: mol_type = other DNA
atctgaagctgacgccaacagaaatatgactgaaggcggtcgcgatctgatgaaaagcgtgggcaaagcagaaga

SEQ ID NO: 324171 - DNA, 75 bp, synthetic construct
  source 1..75: mol_type = other DNA
gccacccggatggatgtcctgaccacaatccgtgaggaagtggagcgggctgtcagtgagggtatcacccgtgag

SEQ ID NO: 324172 - DNA, 75 bp, synthetic construct
  source 1..75: mol_type = other DNA
ctatagagtgagcaggaatactctgattgatgctgttcagggaggtaagatggagatcctcgaagggaaattgta

SEQ ID NO: 324173 - DNA, 75 bp, synthetic construct
  source 1..75: mol_type = other DNA
ttaccgggttatcaatatggataagctgaaatcggatatccggggcggaatgcttgaggtactggaaggagatat

SEQ ID NO: 324174 - DNA, 75 bp, synthetic construct
  source 1..75: mol_type = other DNA
tgagtcggtacagcgatacatcgtgaagccgggagaggtccacgccgtaaggccgcacccgttgccatcaggaca

SEQ ID NO: 324175 - DNA, 75 bp, synthetic construct
  source 1..75: mol_type = other DNA
ccgagaaaattaaccatgttttcactcgccccaccagcggcttcattgcccctgatgcaaatgccgggcgctatc

SEQ ID NO: 324176 - DNA, 75 bp, synthetic construct
  source 1..75: mol_type = other DNA
gggaaacgggagggcagtctatgatgacgctggcgcagtggtttgaagagaggggaagacaggaggaaaggcagg

SEQ ID NO: 324177 - DNA, 75 bp, synthetic construct
  source 1..75: mol_type = other DNA
agattcagaacaaaaactggcgctggcaaaagaagaagcccgcgttaagcgagaaaacgaatttatcgatcagga

SEQ ID NO: 324178 - DNA, 75 bp, synthetic construct
  source 1..75: mol_type = other DNA
attgctacgccaaaagagtcaaatccggttcagccgcatccaatgaaatcaggacaggtggcgctctctctttga

SEQ ID NO: 324179 - DNA, 75 bp, synthetic construct
  source 1..75: mol_type = other DNA
tgaaacttttgttcgttcaattgcaacgccaaaagagtctaatccggttcagccgcatccaatgaaatcaggaca

SEQ ID NO: 324180 - DNA, 75 bp, synthetic construct
  source 1..75: mol_type = other DNA
ccgattgcctcgtgttcctggtgctctggcaacctgaagcagaacaaacaggggataaccgggatgttatcccat

SEQ ID NO: 324181 - DNA, 75 bp, synthetic construct
  source 1..75: mol_type = other DNA
acttttgtggctggtacatctcccccctggacggctgacacgtgttgtggccgcttcagtccccggaaagtccac

SEQ ID NO: 324182 - DNA, 75 bp, synthetic construct
  source 1..75: mol_type = other DNA
tttcacgcatcggaccgtagcggcagcccgaaaccgcgccagcgggttcggcggagactggcgggtgcgccagca

SEQ ID NO: 324183 - DNA, 75 bp, synthetic construct
  source 1..75: mol_type = other DNA
ggtggtggcaagtgaactgcacggcgagcagccgcaggcggtgccgggacgcaggggttcaggtaccacgctgaa

SEQ ID NO: 324184 - DNA, 75 bp, synthetic construct
  source 1..75: mol_type = other DNA
ccgcagtggacctttccgatgggggcccgtttaccgcctcacgggacagctgtccgggggcggacgcaaaatttt

SEQ ID NO: 324185 - DNA, 75 bp, synthetic construct
  source 1..75: mol_type = other DNA
cgcgcctgcgtggttcattactgttaggttcattgcttattgcttcatcattcagtacgcaggccgcagaagaaa

SEQ ID NO: 324186 - DNA, 75 bp, synthetic construct
  source 1..75: mol_type = other DNA
aggccacggcgcgacagaggcggcgcgaccggaactgtcgctgcaagcccggggttttcacgcatcggaccgtag

SEQ ID NO: 324187 - DNA, 75 bp, synthetic construct
  source 1..75: mol_type = other DNA
tatatctatgtggtgattgaacatcagagccgtgaggatattcatatggcctttcgcctgatgcgatattccatg

SEQ ID NO: 324188 - DNA, 75 bp, synthetic construct
  source 1..75: mol_type = other DNA
ctttcggcagagcaaatgcaggcattagatcagcccttgcctgaaagcaagcgcgatccatggatcgagtactaa

SEQ ID NO: 324189 - DNA, 75 bp, synthetic construct
  source 1..75: mol_type = other DNA
gttacagggtgcgctaatgacagccagataaccgcgctgttaaattacattttactggctggcgatgaagcgagt

SEQ ID NO: 324190 - DNA, 75 bp, synthetic construct
  source 1..75: mol_type = other DNA
gaaaatatttaggtcaggcggcgaaactgatgattggtatgcctgattacgacaactatgtcgaacatatgcggg

SEQ ID NO: 324191 - DNA, 75 bp, synthetic construct
  source 1..75: mol_type = other DNA
gatgttgattggcattccagactacgacaactacgtcgagcatatgaagaccaaccatcccgacaagccgtacat

SEQ ID NO: 324192 - DNA, 75 bp, synthetic construct
  source 1..75: mol_type = other DNA
ggtcatcccgatgctgttttatcacggtagccgtagtccttacccctggtccctgtgctggctggacgaatttgc

SEQ ID NO: 324193 - DNA, 75 bp, synthetic construct
  source 1..75: mol_type = other DNA
gcttacacgccaccaagtagtaatgaatcgtaatatggcaaggagtcgaggttatccagagcgagcagcttgctt

SEQ ID NO: 324194 - DNA, 75 bp, synthetic construct
  source 1..75: mol_type = other DNA
gaccatcggtggatttactttctatgctcgccctatgtcagtaaaagaatttaacgaacatgttttcaatactga

SEQ ID NO: 324195 - DNA, 75 bp, synthetic construct
  source 1..75: mol_type = other DNA
aacgtccgcagtgaattaatcggtttggttgctcaagcgtcattgatgcaagatccggcagtaattgaaaacgag

SEQ ID NO: 324196 - DNA, 75 bp, synthetic construct
  source 1..75: mol_type = other DNA
cactctctccgaaacgcgaatctctgaccatcggtggattcactttctatgctcgccctatgtcagtaaaagaat

SEQ ID NO: 324197 - DNA, 75 bp, synthetic construct
  source 1..75: mol_type = other DNA
acgttgctcagattgaagggattgttgttgatggtgctgtacgtgatgttggccttgcgacgtttgtatatgaaa

SEQ ID NO: 324198 - DNA, 75 bp, synthetic construct
  source 1..75: mol_type = other DNA
atatagcgcgtcgttcaacgaatctgaaagtgtttattttagatactgattccgcacggtattatccgtttgatg

SEQ ID NO: 324199 - DNA, 75 bp, synthetic construct
  source 1..75: mol_type = other DNA
gggatccaaagactccgttcgctgcggtaatcgaagctgcaccttctgttattgatggtgatattcgccataagg

SEQ ID NO: 324200 - DNA, 75 bp, synthetic construct
  source 1..75: mol_type = other DNA
atgaaatggtttacaccggaacacgttatcgaggcatttaaaaaaggtgagcttacacgccaccaagtagtaatg

SEQ ID NO: 324201 - DNA, 75 bp, synthetic construct
  source 1..75: mol_type = other DNA
catcgccagcgggacgctaccgccctcaaccctgattcactcgtttctgaactggaaatcgctggtggcaattgc

SEQ ID NO: 324202 - DNA, 75 bp, synthetic construct
  source 1..75: mol_type = other DNA
tcatccaggcatttaaaaaaggtgagcttacacgccatcaagtagtaatgaatcgtaatatggcaaggagtcgag

SEQ ID NO: 324203 - DNA, 75 bp, synthetic construct
  source 1..75: mol_type = other DNA
gctaacacgccatcaaatagtaatgaatcgtaatatggcaaggagtcgaggttatccagagcgagcagcttgctt

SEQ ID NO: 324204 - DNA, 75 bp, synthetic construct
  source 1..75: mol_type = other DNA
cgtgatgaactggtaatgcaagcactactggagcgcgtaggcgacagtaaagtccaggttgtcatgtccgatatg

SEQ ID NO: 324205 - DNA, 75 bp, synthetic construct
  source 1..75: mol_type = other DNA
tctggtggaactggcgctagaaatgtgtcgtgatgtattagcgccaggtggcagttttgtagtgaaggtgttcca

SEQ ID NO: 324206 - DNA, 75 bp, synthetic construct
  source 1..75: mol_type = other DNA
gatcgcgtactggcggcgttattcatggtgctggcgaatcggtacgactggcagttatttcttgaggtaacgggg

SEQ ID NO: 324207 - DNA, 75 bp, synthetic construct
  source 1..75: mol_type = other DNA
tgcttgatattccggtaaaagttctcgacgacgccgaaacgaccgtcgcaggagctgcgctgttcggttggtatg

SEQ ID NO: 324208 - DNA, 75 bp, synthetic construct
  source 1..75: mol_type = other DNA
atcacaaattaaaaataaacttctcataaatcttattgatctgaagttaaacaaaaacaatgataaaacagattc

SEQ ID NO: 324209 - DNA, 75 bp, synthetic construct
  source 1..75: mol_type = other DNA
ctgcgcgtattgagagcctggtaacgcccgccgaactcgcgctacggtatcccgtaacgcctggcgtcgccaccc

SEQ ID NO: 324210 - DNA, 75 bp, synthetic construct
  source 1..75: mol_type = other DNA
tcggcactctcctgtccggtaggttttaaaaatggtaccgatggcaacacgcggattgccgtggatgctatccgc

SEQ ID NO: 324211 - DNA, 75 bp, synthetic construct
  source 1..75: mol_type = other DNA
gatgcaaatttttaccccgaaggaatgcacggtcagaaggtggagaactggcgcgaatatcttgcccgtgagcgc

SEQ ID NO: 324212 - DNA, 75 bp, synthetic construct
  source 1..75: mol_type = other DNA
ccgctcatttatttcactggcgcgaaactttgatttcagcaggatgacaaaatcacaaaaacgcattaaaaatca

SEQ ID NO: 324213 - DNA, 75 bp, synthetic construct
  source 1..75: mol_type = other DNA
tagatattcaactggaaggtacgcgcctgattgtaaaaggcacgcctgagcagccaaaagaagagaaaaaatggt

SEQ ID NO: 324214 - DNA, 75 bp, synthetic construct
  source 1..75: mol_type = other DNA
ccacccgtgagctacaacgctggcgattaattcttggcgaagcggcagaaacgaccctttgtgggctggatgaca

SEQ ID NO: 324215 - DNA, 75 bp, synthetic construct
  source 1..75: mol_type = other DNA
gaatacataattgagaatgaaacgccccaggatgtggaaattactcgagtttacaccatgaataatactgacagg

SEQ ID NO: 324216 - DNA, 75 bp, synthetic construct
  source 1..75: mol_type = other DNA
tgtacattaattttagggaaaaatggtgttggaaagtcatcaattttagatttcattagtagctttatttacgat

SEQ ID NO: 324217 - DNA, 75 bp, synthetic construct
  source 1..75: mol_type = other DNA
gccacggtatcgaaactggcgagcacggcgcaccgttaaaacatggtcgcgtgggcatctatttcggtatgaaag

SEQ ID NO: 324218 - DNA, 75 bp, synthetic construct
  source 1..75: mol_type = other DNA
tttgtcagcaaatccgcaatggctctacggcgattgccggaattatggcggaaagtttcctgcgcgaaggaacgc

SEQ ID NO: 324219 - DNA, 75 bp, synthetic construct
  source 1..75: mol_type = other DNA
ataccgcccgtcacctgattggattcagcaacggggtatttgatacccgtacaggtgattttcgggaacacgata

SEQ ID NO: 324220 - DNA, 75 bp, synthetic construct
  source 1..75: mol_type = other DNA
gtgattattttcgctggcagtgatgcgtgggcgcacgcgaaacagtggcaggagcaggagggacgacttgcaggt

SEQ ID NO: 324221 - DNA, 75 bp, synthetic construct
  source 1..75: mol_type = other DNA
gcgcaccgaacttaaaaaaacagccttacgacaagatgaccgaagtcattatttttgcgggtagtgatgcctggg

SEQ ID NO: 324222 - DNA, 75 bp, synthetic construct
  source 1..75: mol_type = other DNA
tgatattcaatttttcggaggttgtaccggagaacgagcgcgaccccatgctggcagaaaaaatagaaggagagc

SEQ ID NO: 324223 - DNA, 75 bp, synthetic construct
  source 1..75: mol_type = other DNA
tggcgtcggtaatgtgtgatggcctgttagtgggtaatgctgaaattgtgccattcagcccacgcaggtatctct

SEQ ID NO: 324224 - DNA, 75 bp, synthetic construct
  source 1..75: mol_type = other DNA
caaaaatgacgagcgtgcttcatctttggcgttgaatcagatgggggccagccagcgcggtgaagttctcctggc

SEQ ID NO: 324225 - DNA, 75 bp, synthetic construct
  source 1..75: mol_type = other DNA
gcataagatcgaacgtcaccctgcatgatgattcagaagactggatgccaatgtgtaccgatacaacaaaagaat

SEQ ID NO: 324226 - DNA, 75 bp, synthetic construct
  source 1..75: mol_type = other DNA
cgcagatttttattgattccgaagtcgcctattcgcagaacgcgattaaatccgctgtcgatacaatgaagctgg

SEQ ID NO: 324227 - DNA, 75 bp, synthetic construct
  source 1..75: mol_type = other DNA
cgcaaattacttttacaggtaaatgagctgggcgtccctaccgcgactgagttcctcgatatggtgaccggtcag

SEQ ID NO: 324228 - DNA, 75 bp, synthetic construct
  source 1..75: mol_type = other DNA
tagtcacaaaaaatagtgacctacccaggccagcactaaatcagatgggagccagccagagaggggaagtattgc

SEQ ID NO: 324229 - DNA, 75 bp, synthetic construct
  source 1..75: mol_type = other DNA
ctggcggcgacaaggtggcaattgatccgaaacataaagccccctactccacacgtattccggcagtagtgcttg

SEQ ID NO: 324230 - DNA, 75 bp, synthetic construct
  source 1..75: mol_type = other DNA
aacaaaaatgactggttgttaaatgccagtgaattaccgttcagcccaccagcagagggggaaacgctggcaaca

SEQ ID NO: 324231 - DNA, 75 bp, synthetic construct
  source 1..75: mol_type = other DNA
atgtctgaactgaacgatcttctgaccacccgtgagctacaacgctggcgattaattcttggcgaagcggcagaa

SEQ ID NO: 324232 - DNA, 75 bp, synthetic construct
  source 1..75: mol_type = other DNA
cgacagcgacggcaccgaaaaacatttccttgagcctgatttgctggtcttgggcaacaccaacaataaagggct

SEQ ID NO: 324233 - DNA, 75 bp, synthetic construct
  source 1..75: mol_type = other DNA
atggcaggcaaagcaacggcacttaacactaaccagcttttcatgtacctgaatcgcggggatattgcggatttt

SEQ ID NO: 324234 - DNA, 75 bp, synthetic construct
  source 1..75: mol_type = other DNA
cgcttccatcagttacttgccgttgcctcaaaaaatccgctttttatgatgttattgcaggcattacatcagcag

SEQ ID NO: 324235 - DNA, 75 bp, synthetic construct
  source 1..75: mol_type = other DNA
cattattcttgatacgatcgacgatccaaatatcccgatcgcggcgttttgctctcctatggtgggcagtaaagt

SEQ ID NO: 324236 - DNA, 75 bp, synthetic construct
  source 1..75: mol_type = other DNA
cgaggttctaattccgaactggaaacggcccttaaagaccttggtgattcggtgagttttaaagggtatatgggc

SEQ ID NO: 324237 - DNA, 75 bp, synthetic construct
  source 1..75: mol_type = other DNA
ataaagataaataacacaatcgacctcaaaagtatgttagttggacaaaaaaagaaaaaaaacgattcgatttct

SEQ ID NO: 324238 - DNA, 75 bp, synthetic construct
  source 1..75: mol_type = other DNA
gatggcggttatgcgcaagctctgctttttcttcccggatgtggtcgccacccgcctgaccgaagcgcttaagaa

SEQ ID NO: 324239 - DNA, 75 bp, synthetic construct
  source 1..75: mol_type = other DNA
ccgacatgtgatcgacagtctggtaaaaaagcccggtgcgttctgccatgcaacgctgagaaatgacatcctgcc

SEQ ID NO: 324240 - DNA, 75 bp, synthetic construct
  source 1..75: mol_type = other DNA
ggtcaactgttacgggtccggttatgggacgatcgtctgagctgttacgttggcagcagcgaggtcatgagctgc

SEQ ID NO: 324241 - DNA, 75 bp, synthetic construct
  source 1..75: mol_type = other DNA
attgtacgtgaagcctatcgctctcttgccgcgctgggcattctggaaacacacagtggcaaagtcccgcgaatc

SEQ ID NO: 324242 - DNA, 75 bp, synthetic construct
  source 1..75: mol_type = other DNA
tgcaacagttccgtcagtgaagggaacgccgaacgctggggcaatctggagagtgagaacggcgatatttccggc

SEQ ID NO: 324243 - DNA, 75 bp, synthetic construct
  source 1..75: mol_type = other DNA
gccgtaagaccgttgcggcgctggtcagcgaacgtaccgggcttgaaagtgaactgatggctgtcagcgaggaaa

SEQ ID NO: 324244 - DNA, 75 bp, synthetic construct
  source 1..75: mol_type = other DNA
ggtaaaaaatggtccgagcatgataaagatatttacgatccaatctatgacatcgaactatacgcagatcaggca

SEQ ID NO: 324245 - DNA, 75 bp, synthetic construct
  source 1..75: mol_type = other DNA
cgtgggtgtcccacaatgccaatacacttgaaatgattattcatttttccgaggtccttgttgcgaagattgatg

SEQ ID NO: 324246 - DNA, 75 bp, synthetic construct
  source 1..75: mol_type = other DNA
cgatggttgaaggcattgagctgacgctgaagtcgatgctggatgttgtgcgtaagtttggtgttgaagtgatcg

SEQ ID NO: 324247 - DNA, 75 bp, synthetic construct
  source 1..75: mol_type = other DNA
aaatcgaaggcgaatatccgcagtttggtaacaacgatcctcgtgtagatgatctggcagttgatctggtagaac

SEQ ID NO: 324248 - DNA, 75 bp, synthetic construct
  source 1..75: mol_type = other DNA
gtggtgacgaatctcgacgtgctggaacgtatgcagccttctgaaagcctgctacgcgccgttttgcacaccaaa

SEQ ID NO: 324249 - DNA, 75 bp, synthetic construct
  source 1..75: mol_type = other DNA
cgaagattttgctgccgtagcagaagatctgattgcacgaaaggtaacctctccgcatcatctgggcattcgtgg

SEQ ID NO: 324250 - DNA, 75 bp, synthetic construct
  source 1..75: mol_type = other DNA
aaggaagctggcaggaagagacgcaaaccaagcagccgctacagtctggcgatcgcgtgattgcactggtcaata

SEQ ID NO: 324251 - DNA, 75 bp, synthetic construct
  source 1..75: mol_type = other DNA
gcccagcgctgcgaagcgtccggcattgtgattgaacgcaacctcatcggcagctactgcacctcgctggatatg

SEQ ID NO: 324252 - DNA, 75 bp, synthetic construct
  source 1..75: mol_type = other DNA
tgcgataacgaccggaaaaaacatcattgagggcgaaggcatagaacgctatgaaatcgactggaaaataccgga

SEQ ID NO: 324253 - DNA, 75 bp, synthetic construct
  source 1..75: mol_type = other DNA
acactaaccagcttttcatgtacctgaatcgcggggatattgcggattttaaattcagccctctgtttaccacgc

SEQ ID NO: 324254 - DNA, 75 bp, synthetic construct
  source 1..75: mol_type = other DNA
tccgttgctaaactgccgttcgcttacgctaaagatggtatctcctacaccttctctatcgttccgaacgcactg

SEQ ID NO: 324255 - DNA, 75 bp, synthetic construct
  source 1..75: mol_type = other DNA
ctaacccgatgcacggtcgtgatcagaaaggtgcagtagcctctctgacttccgttgctaaactgccgtttgctt

SEQ ID NO: 324256 - DNA, 75 bp, synthetic construct
  source 1..75: mol_type = other DNA
acgctgcgccagtgggataacgtcaagggagcgtggcaggaagtgaaacagagcaaaaccgcgctgcaaaacggc

SEQ ID NO: 324257 - DNA, 75 bp, synthetic construct
  source 1..75: mol_type = other DNA
attatctggcaatagcctttaaaaaatggggcgtctcctgggaggccgttggtgcatacaatgccggattcagaa

SEQ ID NO: 324258 - DNA, 75 bp, synthetic construct
  source 1..75: mol_type = other DNA
tacaacgcaggattcaggaaaaccgaacgccagaaccagcggcgtcttgcctatgcatcagatgtttaccggatt

SEQ ID NO: 324259 - DNA, 75 bp, synthetic construct
  source 1..75: mol_type = other DNA
cgccagaaccagcggcgtcttgcctatgcatcagatgtttaccggatttacagcgggataaaaaacagtaagggg

SEQ ID NO: 324260 - DNA, 75 bp, synthetic construct
  source 1..75: mol_type = other DNA
gggcgtcggcatgattggcgcgggcattgtgcatccaccattcgcctgcttcgagaaagccattcttggctggtg

SEQ ID NO: 324261 - DNA, 75 bp, synthetic construct
  source 1..75: mol_type = other DNA
cgcgcaacagcgcgaagtgtttgagtttgttgccagtagcgattacttctccggcccgacgtggatggcgatgtg

SEQ ID NO: 324262 - DNA, 75 bp, synthetic construct
  source 1..75: mol_type = other DNA
gcctgatgtttataaatgagatctgccatgccactgattgctttgatcttgcaggccgggattacaaaatagatc

SEQ ID NO: 324263 - DNA, 75 bp, synthetic construct
  source 1..75: mol_type = other DNA
ttatctggcaatagcatttaaaaaatggggcgtctcctgggaggccgttggtgcatacaatgccggattcaggaa

SEQ ID NO: 324264 - DNA, 75 bp, synthetic construct
  source 1..75: mol_type = other DNA
tgcgcgtaacattggaattcaaagcgggtatctggatgtcttcgacagtgccggaaatctcatctggagtgctgt

SEQ ID NO: 324265 - DNA, 75 bp, synthetic construct
  source 1..75: mol_type = other DNA
actatgacctccaaaacaacacactatcggtgagcctcagctttaatccgtggattctggtcaacaactgccccg

SEQ ID NO: 324266 - DNA, 75 bp, synthetic construct
  source 1..75: mol_type = other DNA
ttatctggcaatagcctttaaaaaatggggcgtcgcctgggaggccgttggtgcatacaatgctggattcaggaa

SEQ ID NO: 324267 - DNA, 75 bp, synthetic construct
  source 1..75: mol_type = other DNA
ttatctggcaatagcctttaaaaaatggggcgtctcctgggaggccgttggtgcatacaatgcaggattcaggaa

SEQ ID NO: 324268 - DNA, 75 bp, synthetic construct
  source 1..75: mol_type = other DNA
ttatctggcaatagcttttaaaaaatggggcgtcgcctgggaggccgttggtgcatacaatgccggattcaggaa

SEQ ID NO: 324269 - DNA, 75 bp, synthetic construct
  source 1..75: mol_type = other DNA
atcgtcgcgctggtgggcggcacggtggaagaagctattgatttctcccgtcagatgcgcgaaatcaccctcggt

SEQ ID NO: 324270 - DNA, 75 bp, synthetic construct
  source 1..75: mol_type = other DNA
tcgtcataatcgcgctcgtggacgccatcaaatcaccgccatgtcggaaatcgtccgtgaacttagccagttggg

SEQ ID NO: 324271 - DNA, 75 bp, synthetic construct
  source 1..75: mol_type = other DNA
gatatggcagtggacttatgcaggtagattcccagcattttaacgaactggcccgctacggaattaaaccggaac

SEQ ID NO: 324272 - DNA, 75 bp, synthetic construct
  source 1..75: mol_type = other DNA
ggcggaacagatggccgcgcagctggaggcggaatacatcccggagaggaaacttcatctttaccactgcgacca

SEQ ID NO: 324273 - DNA, 75 bp, synthetic construct
  source 1..75: mol_type = other DNA
gacagcgacgaagtgctacgcctcaagcaaataaacggcctgcaagagttgtttgccgaccgtagatattcccgt

SEQ ID NO: 324274 - DNA, 75 bp, synthetic construct
  source 1..75: mol_type = other DNA
tcgtccgtgaactcagccagttgggatgggacgataataaaattggcaaagagctgggaatggacagcgacgaag

SEQ ID NO: 324275 - DNA, 75 bp, synthetic construct
  source 1..75: mol_type = other DNA
cgacgaagtgctgcgcctgaagcaaattaacggcctgcaagagctgtttgccgaccgtcaatattcccgcgcctg

SEQ ID NO: 324276 - DNA, 75 bp, synthetic construct
  source 1..75: mol_type = other DNA
tactggcgataacattttctgttaatgcgcaggactgttttgaaatggcgggcagggattataggatcgagccgg

SEQ ID NO: 324277 - DNA, 75 bp, synthetic construct
  source 1..75: mol_type = other DNA
cgagcaacagcgcgaagtgtttgagtttgtcgccagcagcgattacttctccggcccgacgtggatggcaatgtg

SEQ ID NO: 324278 - DNA, 75 bp, synthetic construct
  source 1..75: mol_type = other DNA
agcaacagcgcgaagtgtttgagtttgtcgccagcagcgactacttctccggcccgacgtggatggcgatgtgta

SEQ ID NO: 324279 - DNA, 75 bp, synthetic construct
  source 1..75: mol_type = other DNA
ctgggattcactccgcaggcattctggaatgacgggagattaaggtggctgcagcttggcgcaaacagatacggg

SEQ ID NO: 324280 - DNA, 75 bp, synthetic construct
  source 1..75: mol_type = other DNA
aacttgtttttgcgtggggtgtggtacttttggtggtgagaaccaccaacctgttgagcctttttgtggaatggg

SEQ ID NO: 324281 - DNA, 75 bp, synthetic construct
  source 1..75: mol_type = other DNA
ctgacaacagatccctgcatgaacatttataccggtgcttattatctggcaatagcctttaaaaaatggggcgtc

SEQ ID NO: 324282 - DNA, 75 bp, synthetic construct
  source 1..75: mol_type = other DNA
agaagcggcaactgaagctgatcaggaagcagataaagcgttggagtaccttaaatccgtcccggtgcagtttac

SEQ ID NO: 324283 - DNA, 75 bp, synthetic construct
  source 1..75: mol_type = other DNA
tcccaacacctatcgggtacgttaccctatttcagaaccagccccactggttagtttgcttattcctacccggga

SEQ ID NO: 324284 - DNA, 75 bp, synthetic construct
  source 1..75: mol_type = other DNA
gtgcaacgcgtactgcgcgaatacgaggccaaggatagccgaatcaaagttgtctaccgaaagcacaatggtcat

SEQ ID NO: 324285 - DNA, 75 bp, synthetic construct
  source 1..75: mol_type = other DNA
tctattgtgattcctgtttataatccagcggagatctacttgcgtgcctgtctggattctgtcctggctcaaagc

SEQ ID NO: 324286 - DNA, 75 bp, synthetic construct
  source 1..75: mol_type = other DNA
tggggtgtatctcctgtagtgagtaaaactcaaaatacagttgtggtgccctatctggcaacaaatcaactctcg

SEQ ID NO: 324287 - DNA, 75 bp, synthetic construct
  source 1..75: mol_type = other DNA
tattggtggtgtagctggacactcccataaacattatcctcgccaccatccgggctatttcagccgtttgttgtt

SEQ ID NO: 324288 - DNA, 75 bp, synthetic construct
  source 1..75: mol_type = other DNA
aaactctattacagtaatgatactttacaacatggtggagttattattggtcttggaggggtcgcggggcactcc

SEQ ID NO: 324289 - DNA, 75 bp, synthetic construct
  source 1..75: mol_type = other DNA
tggtgctggcgaatcggtacgactggcagttatttcttgaggtaacggggccgggtggaagcggtaaaagcgtaa

SEQ ID NO: 324290 - DNA, 75 bp, synthetic construct
  source 1..75: mol_type = other DNA
gctggtgatggcgcaggaattaaggccattacaggcggtgacaaggtggcaatcgacccgaagcataaagccccc

SEQ ID NO: 324291 - DNA, 75 bp, synthetic construct
  source 1..75: mol_type = other DNA
cataaacacttccctcgtcatcatccaggctatttcagtcgtttattactgactcaatcactttctgctgtaact

SEQ ID NO: 324292 - DNA, 75 bp, synthetic construct
  source 1..75: mol_type = other DNA
attgactcgtattcaaaaagaacatcaaagctattgtgatatgccgctagaaaaaatcaaagaatccatcttgac

SEQ ID NO: 324293 - DNA, 75 bp, synthetic construct
  source 1..75: mol_type = other DNA
caaggtggcaattgacccgaaacacaaagccccctactcaacgcgtattccggcagtagtgctggcggttaacaa

SEQ ID NO: 324294 - DNA, 75 bp, synthetic construct
  source 1..75: mol_type = other DNA
cgtgccggaaagattgcagagaaaagtctgacgaaggttgcgacattacttgctattgcaggcgtaaaggaagca

SEQ ID NO: 324295 - DNA, 75 bp, synthetic construct
  source 1..75: mol_type = other DNA
gcggggttattgcgtccggggcttgttaataccatcgggcagaaactggcagcggcaggtgtcagggatgctgat

SEQ ID NO: 324296 - DNA, 75 bp, synthetic construct
  source 1..75: mol_type = other DNA
gccattgtgaaagggcttatcgcggtcgtctttattctctacgaccagatgacgccgcaggatattattaatttt

SEQ ID NO: 324297 - DNA, 75 bp, synthetic construct
  source 1..75: mol_type = other DNA
gtgagtcaactttcgctaccaaaactggtcgaacaggtggccttaaatgcctggaaagaggagagcgacaacgca

SEQ ID NO: 324298 - DNA, 75 bp, synthetic construct
  source 1..75: mol_type = other DNA
cgccagcagttgcagcgcgtgcagggagcaaccaaagcaaaaaagagtgaaccggcagccgctacccgcgcgcgg

SEQ ID NO: 324299 - DNA, 75 bp, synthetic construct
  source 1..75: mol_type = other DNA
tcaggaggaaaagaaagtcgattcttttgtatcggaataaaacgagataatgctcaattgccggttcatagtata

SEQ ID NO: 324300 - DNA, 75 bp, synthetic construct
  source 1..75: mol_type = other DNA
gccattgtgaaagggcttattgcggttgtttttattctctatgaccagatgacgccgcaggatattgttaatttt

SEQ ID NO: 324301 - DNA, 75 bp, synthetic construct
  source 1..75: mol_type = other DNA
tacattattgagctgggccagcgtctgccagaattacgcgacgaagacagaagcccacaaaatagcattcagggc

SEQ ID NO: 324302 - DNA, 75 bp, synthetic construct
  source 1..75: mol_type = other DNA
tgtatgtctttccgcaccttgcagaggggaactcaccggtaccgggctacagcacggtgttttcattttacagcc

SEQ ID NO: 324303 - DNA, 75 bp, synthetic construct
  source 1..75: mol_type = other DNA
tgtttttgctggccggatgcagcacctcgcaggaggagctgatgccagtcgaccccgatgccagtatgctctcgc

SEQ ID NO: 324304 - DNA, 75 bp, synthetic construct
  source 1..75: mol_type = other DNA
gattcgtcatctgcttacacggtttgctgatcaggacgaagccagacgccttttatatgagcagcagaaatcaga

SEQ ID NO: 324305 - DNA, 75 bp, synthetic construct
  source 1..75: mol_type = other DNA
tggcggtgttggtcattgccgtggcgcttgtcggctgctcgaccagcaaggaaaaactgctgccccacgatggtc

SEQ ID NO: 324306 - DNA, 75 bp, synthetic construct
  source 1..75: mol_type = other DNA
tctgccggtgccgggatacagtacggtgtttccgttttaccatcaagtgcagtatgccctgccgggtgagcgtgt

SEQ ID NO: 324307 - DNA, 75 bp, synthetic construct
  source 1..75: mol_type = other DNA
ggctacagcacggtgttttcattttacagccagacgcagtatgcgatgcccggtgaacgcacggcagcgttctga

SEQ ID NO: 324308 - DNA, 75 bp, synthetic construct
  source 1..75: mol_type = other DNA
acacagccattgcgcacaaagacgcagggatcggcatgatcggcgcaggaattgttcacccgccgttcacttgtt

SEQ ID NO: 324309 - DNA, 75 bp, synthetic construct
  source 1..75: mol_type = other DNA
taaagcggcgatggatgcggcgcacggcatcgaatacagcaccgtggtgaccactatggcgcgtaacggcgtcga

SEQ ID NO: 324310 - DNA, 75 bp, synthetic construct
  source 1..75: mol_type = other DNA
cctgcctggaaagagtattgcaccatcgccgcattcgccgtcagcgttatcggcatgatgctgatgaatatgctg

SEQ ID NO: 324311 - DNA, 75 bp, synthetic construct
  source 1..75: mol_type = other DNA
attgttatgctgggtgccagtcttgccggcaccggagcgaccggttattacgtgctaattctgtcgctggtatcc

SEQ ID NO: 324312 - DNA, 75 bp, synthetic construct
  source 1..75: mol_type = other DNA
ggcggcgctacaaaaaacccggcttatcagcaacgttaaatctgcgatgataagcctggtcaataaaggcagtta

SEQ ID NO: 324313 - DNA, 75 bp, synthetic construct
  source 1..75: mol_type = other DNA
taactacccgcgacatccaacccagcgtcggttttgccagccgtggttcgctgctgcctggcaaagtcgttgaag

SEQ ID NO: 324314 - DNA, 75 bp, synthetic construct
  source 1..75: mol_type = other DNA
caaccagtgacgctcaggggcatgtgcagctggaaaatgataaaaacgcgcattactgttggcgcgtaaagacgg

SEQ ID NO: 324315 - DNA, 75 bp, synthetic construct
  source 1..75: mol_type = other DNA
tggatggtgcctgggagctgtcagataatcttaaagagctgcgtttacgccacctcgaaccgaaacgtgatttga

SEQ ID NO: 324316 - DNA, 75 bp, synthetic construct
  source 1..75: mol_type = other DNA
atcgtcgcgctggtgggtggcacggtggaagaggctatcgatttctcccgtcagatgcgcgaaatcacccttggc

SEQ ID NO: 324317 - DNA, 75 bp, synthetic construct
  source 1..75: mol_type = other DNA
atgggcccggcgctggaagtgctatatgccttatggcggctggatgaaattagcggtatgcaaggtgcgcagata

SEQ ID NO: 324318 - DNA, 75 bp, synthetic construct
  source 1..75: mol_type = other DNA
acccgttgatgaactccatcagcaaggcgttgggttacgcgcactatctcaacaacccgtggttccagctctacc

SEQ ID NO: 324319 - DNA, 75 bp, synthetic construct
  source 1..75: mol_type = other DNA
attgagactgaacaattttctttgcgtactttacccggtcttattgagaaagtggaacgtattaacaatgataaa

SEQ ID NO: 324320 - DNA, 75 bp, synthetic construct
  source 1..75: mol_type = other DNA
cggaattggtatttcctgatggcttatcattagttgaagctctacaggcaaaaggctttaatgaattagataagt

SEQ ID NO: 324321 - DNA, 75 bp, synthetic construct
  source 1..75: mol_type = other DNA
cggagttagtgtttcctgatggggagacgttgcgtcaaatcttacatacaagagcatttgaaaaattaagcaaat

SEQ ID NO: 324322 - DNA, 75 bp, synthetic construct
  source 1..75: mol_type = other DNA
ttggtgtttcctgatggggagatgttgcgtcaaatcttacatacaagagcatttgacaaattaaacaaatggtaa

SEQ ID NO: 324323 - DNA, 75 bp, synthetic construct
  source 1..75: mol_type = other DNA
actcatgacagcaaaaagtgtgctcgccgacaagaggcaatgtcagtctatggtttctcctccatttcattacct

SEQ ID NO: 324324 - DNA, 75 bp, synthetic construct
  source 1..75: mol_type = other DNA
ggtggatggagatgcatcaattttatatggaagcccatttatccgtagtaatgaacaattattatgggcagtacg

SEQ ID NO: 324325 - DNA, 75 bp, synthetic construct
  source 1..75: mol_type = other DNA
attgagccctgttttttagttattgagtttaacttttttaatttaattttgtttaatatgattttatatacaaat

SEQ ID NO: 324326 - DNA, 75 bp, synthetic construct
  source 1..75: mol_type = other DNA
cggtaccaatgccaattttggtattgggctccgggtaagtcagggctgtattcgtctgcgcaatgacgatatcaa

SEQ ID NO: 324327 - DNA, 75 bp, synthetic construct
  source 1..75: mol_type = other DNA
ttgatgtaaatcgcgcaaatgctgcgttgcaacgtcgatcgggaatgcctgtgcaaattagttctggttcaagac

SEQ ID NO: 324328 - DNA, 75 bp, synthetic construct
  source 1..75: mol_type = other DNA
aatcctatggggttgtacgctatttatatcggcaggttatatgccattcacggtactaatgccaattttgggatt

SEQ ID NO: 324329 - DNA, 75 bp, synthetic construct
  source 1..75: mol_type = other DNA
cgatatgaagaatcgtggatttatgctgtggccgctgtttgaaattgcgccggagctggtgtttcctgatggaac

SEQ ID NO: 324330 - DNA, 75 bp, synthetic construct
  source 1..75: mol_type = other DNA
gggcaactacgccaactatgctggcaaaggagattgttttctgccacggcgagcacgctgtggtagcgctgccga

SEQ ID NO: 324331 - DNA, 75 bp, synthetic construct
  source 1..75: mol_type = other DNA
cgggcgtttatcaacggacaagaggtcgatgtgaatcgcgcgaatgctgcgttgcaacgtcgatcgggaatgcca

SEQ ID NO: 324332 - DNA, 75 bp, synthetic construct
  source 1..75: mol_type = other DNA
catgctgtacgcaatcaatggcggcgttgacgaaaaactgaaaatgcaggttggtccgaagtctgaaccgatcaa

SEQ ID NO: 324333 - DNA, 75 bp, synthetic construct
  source 1..75: mol_type = other DNA
ggttttttattaatctgaaactctcgccgccctggcaactggcttcaggtggcttgatagtaggcttactctctt

SEQ ID NO: 324334 - DNA, 75 bp, synthetic construct
  source 1..75: mol_type = other DNA
tgctcactcctgccgtgtggggcaacggctatagtacggtgcaatcctttttaacagccccgccactgtttatgg

SEQ ID NO: 324335 - DNA, 75 bp, synthetic construct
  source 1..75: mol_type = other DNA
gggttaatcgtgggtctgctttccctgctcactcctgccgtgtggggcaacggctatagtacggtgcaatccttt

SEQ ID NO: 324336 - DNA, 75 bp, synthetic construct
  source 1..75: mol_type = other DNA
ttcatgaccacaccggctggtttaacaacatccggatgaacattctcatggctacccctgtttcgctgatggatg

SEQ ID NO: 324337 - DNA, 75 bp, synthetic construct
  source 1..75: mol_type = other DNA
gttttacaagctcatcaaggatggggcctttccggctcccatcaaacttggccgcagctcccgctggctgaaaag

SEQ ID NO: 324338 - DNA, 75 bp, synthetic construct
  source 1..75: mol_type = other DNA
aactgaccggcctgacagataagtggttttacaggctcatcagggatggggcctttccggctcccatcaagctga

SEQ ID NO: 324339 - DNA, 75 bp, synthetic construct
  source 1..75: mol_type = other DNA
ttaaccgccccgccactgttaatgatcattgccgggatcttcctttgtaaactgtgtgccgtgctggcgagtagt

SEQ ID NO: 324340 - DNA, 75 bp, synthetic construct
  source 1..75: mol_type = other DNA
aagaccagttgattgacatggcatttattaccagcctgctgcagatgacagacaagtggatttacaagcttatta

SEQ ID NO: 324341 - DNA, 75 bp, synthetic construct
  source 1..75: mol_type = other DNA
attactacccgccagacagtaatactgtggaagtctttcctattggtatcggccaggctgggcgagaaaccccgc

SEQ ID NO: 324342 - DNA, 75 bp, synthetic construct
  source 1..75: mol_type = other DNA
tgcatcctggtttgcccaacgttttaccccacgcgaagagtggaaattgtggattgcctgtggcgcggctgcggg

SEQ ID NO: 324343 - DNA, 75 bp, synthetic construct
  source 1..75: mol_type = other DNA
tgggcagtttgattatgccaccagtctggtcaaatctttcgcgtctttgctggtggtgacgagcggcagtgccat

SEQ ID NO: 324344 - DNA, 75 bp, synthetic construct
  source 1..75: mol_type = other DNA
tgctggccagtagtggttccggcgcacctgggggagtgtttacgccgacgctatttatcggactggcaattggca

SEQ ID NO: 324345 - DNA, 75 bp, synthetic construct
  source 1..75: mol_type = other DNA
atgcagcgaatgtcgttattaatgctgtattcagttacgtcaccaatgtatggggatgggcatttgaatggtata

SEQ ID NO: 324346 - DNA, 75 bp, synthetic construct
  source 1..75: mol_type = other DNA
cgaacaaatcctcgccttaaccggctgcgaccgactgactatcgcaccgaatttgctgaaggagctacaggaaaa

SEQ ID NO: 324347 - DNA, 75 bp, synthetic construct
  source 1..75: mol_type = other DNA
agcgcagacctgcagatcaccgacatggcgatcgcacctgcaaccggcgagccggataaatccgctgctgaaacc

SEQ ID NO: 324348 - DNA, 75 bp, synthetic construct
  source 1..75: mol_type = other DNA
ttttgattttgtcgaaatgtcggtggatgaaaccgacgaacggctctcacgtcttgactggagcgccgcacaaag

SEQ ID NO: 324349 - DNA, 75 bp, synthetic construct
  source 1..75: mol_type = other DNA
ctaacgttgtgtatggtaagaaaactggtaacaccccagacggtcgtcgtgctggtgcgccgttcggaccgggtg

SEQ ID NO: 324350 - DNA, 75 bp, synthetic construct
  source 1..75: mol_type = other DNA
ctaattactgaatatgtgcatagtagttctggttttgataaaccgcatgactgtggattgatctcttcaatggtt

SEQ ID NO: 324351 - DNA, 75 bp, synthetic construct
  source 1..75: mol_type = other DNA
ctgattactgaatatgtcaaaagcacctctggttttgataagcctcatgactgtggatttctttcttcaatagtt

SEQ ID NO: 324352 - DNA, 75 bp, synthetic construct
  source 1..75: mol_type = other DNA
gccagacgtatcctcgtccttacaaagtcgccatgctgatgcaagcgccatattacttccaggaagcgcagattg

SEQ ID NO: 324353 - DNA, 75 bp, synthetic construct
  source 1..75: mol_type = other DNA
ttctggggatgggaacagtaatcttttttactggatcagcgccgtctctgttagcgaacgccaggcaagcagaaa

SEQ ID NO: 324354 - DNA, 75 bp, synthetic construct
  source 1..75: mol_type = other DNA
cgataacttctatctcgtcgccttgatcttcgcgatgggcaccagtctgggccttgccacgccgctggtgaccga

SEQ ID NO: 324355 - DNA, 75 bp, synthetic construct
  source 1..75: mol_type = other DNA
gcgcacgttagatctcgacatcatgctgtttggtgatgcggtgattaacactgaacgcctcactgttccgcacta

SEQ ID NO: 324356 - DNA, 75 bp, synthetic construct
  source 1..75: mol_type = other DNA
atgaccaccccagtttcactgatggatgaccagatggtcgacatggcatttatcactcaactgaacggcctgaca

SEQ ID NO: 324357 - DNA, 75 bp, synthetic construct
  source 1..75: mol_type = other DNA
tggcaaaaggctttccgcccatttgcgtcagcgcctgcccggaacacgcattgatctttggtcgcgaagatagcc

SEQ ID NO: 324358 - DNA, 75 bp, synthetic construct
  source 1..75: mol_type = other DNA
gtaaatggttatgtgagtgctaccctaacgggcgcgacggcaagcgtgtgcgcaaacaatttgcgacgaaaggtg

SEQ ID NO: 324359 - DNA, 75 bp, synthetic construct
  source 1..75: mol_type = other DNA
ccagaagggcaatgcacacacgtattacgacatacatttgcaagtcactttatgatgaatggcggaaacatactg

SEQ ID NO: 324360 - DNA, 75 bp, synthetic construct
  source 1..75: mol_type = other DNA
aacagcgcgctgcgcgaagcgatggctatcgttgagacgccccgccgcaagcagcaggatatggcgcgactggag

SEQ ID NO: 324361 - DNA, 75 bp, synthetic construct
  source 1..75: mol_type = other DNA
ggatgaatatgatgatctcatatcaggaacttgttcgcaccttccttagctttgaccctccgcccatgcagggtt

SEQ ID NO: 324362 - DNA, 75 bp, synthetic construct
  source 1..75: mol_type = other DNA
accaacgaaccttaattcaaataaggatctaatggctataacaaccagggaaagatcatcagaagttcacttttt

SEQ ID NO: 324363 - DNA, 75 bp, synthetic construct
  source 1..75: mol_type = other DNA
tgcaggggcggtatatcactcaggatccgattgggctgaaggggggatggaatttttatcagtatccgttgaatc

SEQ ID NO: 324364 - DNA, 75 bp, synthetic construct
  source 1..75: mol_type = other DNA
tgaccttgataaacttagtatgggtgatttggttaaaccgttacaccatcttgtaaaaatagttaaaggtgaatg

SEQ ID NO: 324365 - DNA, 75 bp, synthetic construct
  source 1..75: mol_type = other DNA
accgtcagaaattttattttaccaatctttggcaaaaagtttaaatatcgacttggattattggaatatttcaat

SEQ ID NO: 324366 - DNA, 75 bp, synthetic construct
  source 1..75: mol_type = other DNA
gtccgttctctaaaggaagtacatctagtggtgggacgccaatgttatctaactcaggttttatgaattctgact

SEQ ID NO: 324367 - DNA, 75 bp, synthetic construct
  source 1..75: mol_type = other DNA
aagaatagggggaagttattcaccccatgcagaaaagcctttgagcgtgcagtaaagcgagccggtttagaacta

SEQ ID NO: 324368 - DNA, 75 bp, synthetic construct
  source 1..75: mol_type = other DNA
ccgatataaaaatgacgatgatttacgctcatttttccccagatcatcttgaagatgcagtaactaaaaacccat

SEQ ID NO: 324369 - DNA, 75 bp, synthetic construct
  source 1..75: mol_type = other DNA
gtggcgcaacgggtgttgcgttgaagatagaggacgataaaggaacgcagcaagttcccaaaggctccagcggaa

SEQ ID NO: 324370 - DNA, 75 bp, synthetic construct
  source 1..75: mol_type = other DNA
cggtttcaacagagtcagttgttgatgatgagcatctacagttggacgatgaggaaacagccaatatagacacag

SEQ ID NO: 324371 - DNA, 75 bp, synthetic construct
  source 1..75: mol_type = other DNA
ggtagtgaatgtcgatatctggaatatctggcatatgaccttcaccggcgcgttgctgcatctggcgacgggttc

SEQ ID NO: 324372 - DNA, 75 bp, synthetic construct
  source 1..75: mol_type = other DNA
atttatctcaccggtattttcatgacctggcgtagggctcgcggctttatcaaacaagagaaagctgctatcgca

SEQ ID NO: 324373 - DNA, 75 bp, synthetic construct
  source 1..75: mol_type = other DNA
tcagcgcaaatttggtccatttggcgagcctgtcaccgtgggttttgtgatggggctgattatcggcatcctcgc

SEQ ID NO: 324374 - DNA, 75 bp, synthetic construct
  source 1..75: mol_type = other DNA
aagtaccgctggacgatgcgatcctgcgctggggtggtgatgagcaatcagaaccgaaggacccgtttgcagggc

SEQ ID NO: 324375 - DNA, 75 bp, synthetic construct
  source 1..75: mol_type = other DNA
atgatccaagaacagactatgctgaacgtcgccgacaactccggtgcacgtcgcgtaatgtgtatcaaggttctg

SEQ ID NO: 324376 - DNA, 75 bp, synthetic construct
  source 1..75: mol_type = other DNA
aacacactatggttcccgatgtggttctgatgagcaatgctgcgtttgataaacttagcccggaaaatcaggcag

SEQ ID NO: 324377 - DNA, 75 bp, synthetic construct
  source 1..75: mol_type = other DNA
agaaagaaaaatattttaatttgctcaatgaggttgagaatcaccgtgacatagatgataaaatttcaagggtaa

SEQ ID NO: 324378 - DNA, 75 bp, synthetic construct
  source 1..75: mol_type = other DNA
ttcctagcacaacagctattagccatgcctcttttcaggaaaaggaggcaggtgatggtagtacgcagcacatag

SEQ ID NO: 324379 - DNA, 75 bp, synthetic construct
  source 1..75: mol_type = other DNA
tgcttccgtacgcaacaaggatggagcgcagagttcatttatttacgaagctgaaacaccatatagcaagactcg

SEQ ID NO: 324380 - DNA, 75 bp, synthetic construct
  source 1..75: mol_type = other DNA
gctggtcgatgctatcatcgagaaaatcccaggcgttaaccgaattaaatttagcgccgacgatattcagcgcaa

SEQ ID NO: 324381 - DNA, 75 bp, synthetic construct
  source 1..75: mol_type = other DNA
cctgtggatcgcgacgcaaactattggtttgcacacccaactggcggctaatgctggggcgttaaaagccggggg

SEQ ID NO: 324382 - DNA, 75 bp, synthetic construct
  source 1..75: mol_type = other DNA
ttaagaaaatgcatagcattaatcgtcagcatggctgttgttatgttcgccatatctatgtgaaaacagaaggta

SEQ ID NO: 324383 - DNA, 75 bp, synthetic construct
  source 1..75: mol_type = other DNA
ggggctgctgctcagtcggctgctaaatcatcgatgaccagcactttgttaacggcaccactaaaagcatacggt

SEQ ID NO: 324384 - DNA, 75 bp, synthetic construct
  source 1..75: mol_type = other DNA
tcaggcggcgctaattcagatatcacgatccgcacattagaagcagtgcgtaaatcgaaggaagcgttagacctg

SEQ ID NO: 324385 - DNA, 75 bp, synthetic construct
  source 1..75: mol_type = other DNA
accttgatattaaagaaattagtattgcaactgttatcccgtgggttattggtgcaatcggcatggtgctaggtg

SEQ ID NO: 324386 - DNA, 75 bp, synthetic construct
  source 1..75: mol_type = other DNA
tggcagagggcccggttagtgcagcaggaaataaaattattaataactggatctcgcgtaaagagtcggcaacag

SEQ ID NO: 324387 - DNA, 75 bp, synthetic construct
  source 1..75: mol_type = other DNA
tgatggttagagataaaaccaaatacagcggcaatcagcgattattagcctggttagtatggttcgctaacaggc

SEQ ID NO: 324388 - DNA, 75 bp, synthetic construct
  source 1..75: mol_type = other DNA
ctgctctcctcaccgcacagtctgttcccggtatgtcgcggtgaactggatgaaattatcggcatcgtacgtgct

SEQ ID NO: 324389 - DNA, 75 bp, synthetic construct
  source 1..75: mol_type = other DNA
tgcggtgattaccgcggtcggaatggtcaaccatctgccggtaatgatggctgcggtagtgattgcgatggccgt

SEQ ID NO: 324390 - DNA, 75 bp, synthetic construct
  source 1..75: mol_type = other DNA
agccggatgcggcgtgaacgccttatccggcctacgaatggcacgggaatctgtaggcctgataagcgtagcgca

SEQ ID NO: 324391 - DNA, 75 bp, synthetic construct
  source 1..75: mol_type = other DNA
gcgggcattgtgcatccacccttcgcctgcttcgagaaagccattcttggctggtgcgaacgttacggcgtctga

SEQ ID NO: 324392 - DNA, 75 bp, synthetic construct
  source 1..75: mol_type = other DNA
tctctcctgagtttaagcaggaatgcgcccaacttatcgttgataaaggttactcataccgggaagccagtgaag

SEQ ID NO: 324393 - DNA, 75 bp, synthetic construct
  source 1..75: mol_type = other DNA
cgcctgccgggtcagcagtatgatgaggagtccggcctgtattacaaccgccaccgctattatgacccgctgcag

SEQ ID NO: 324394 - DNA, 75 bp, synthetic construct
  source 1..75: mol_type = other DNA
taaagcggcgatggatgcggcgcacggcattgaatacagcaccgtggtgaccaccatggcgcgtaacggcgtcga

SEQ ID NO: 324395 - DNA, 75 bp, synthetic construct
  source 1..75: mol_type = other DNA
tcaggtggcgctaattcagatatcacgacccgtacaatcgaagcggtgcgtaaatcgaaggaagcgttagacctg

SEQ ID NO: 324396 - DNA, 75 bp, synthetic construct
  source 1..75: mol_type = other DNA
cggaaatgtattatgggcgtaaatggtcgggcatcacgccagaaaagttcatgcagcaagtggatgcttacatca

SEQ ID NO: 324397 - DNA, 75 bp, synthetic construct
  source 1..75: mol_type = other DNA
gttcatgcagcaagtggatgcttacatcagatggtataacgagcggcgtataaaattatcgctgggtgccgtcag

SEQ ID NO: 324398 - DNA, 75 bp, synthetic construct
  source 1..75: mol_type = other DNA
ttccagcttcctgcaggaaaagtctggctgtcacaggtggtggactgcttcgatggaaaagttgtgagctggtct

SEQ ID NO: 324399 - DNA, 75 bp, synthetic construct
  source 1..75: mol_type = other DNA
cgaaacggcggaagacccggcggcagaagtggtgaaagcgcgtgattgggtgaaagcgcgcatggccaaagcagg

SEQ ID NO: 324400 - DNA, 75 bp, synthetic construct
  source 1..75: mol_type = other DNA
tcggcattcgcgtgatccagctggcgggctatgacgtttactaccaggaagccaataacgaaacgcgtcgtcgtt

SEQ ID NO: 324401 - DNA, 75 bp, synthetic construct
  source 1..75: mol_type = other DNA
gacctggcgaataaggctgagccgcaactgctggtcagtggagaaggtgatgtgctgggatggtgggtggtggag

SEQ ID NO: 324402 - DNA, 75 bp, synthetic construct
  source 1..75: mol_type = other DNA
cacgctgcggaactgggcttgcaccgcctttctgaccttgtagatacgctgctggttctgcagaaaaagcaccgg

SEQ ID NO: 324403 - DNA, 75 bp, synthetic construct
  source 1..75: mol_type = other DNA
gaaacctttttgacaaaacccagccagtcctctcctacggagtgctgtcgtctgatgctaatctggataaggttg

SEQ ID NO: 324404 - DNA, 75 bp, synthetic construct
  source 1..75: mol_type = other DNA
gtcgggtacaaaaagtgcagggctggagctggttgatatatatctctggatcttcaaacgctttatgggtaaccg

SEQ ID NO: 324405 - DNA, 75 bp, synthetic construct
  source 1..75: mol_type = other DNA
taaaaatggatacagtgctaacagcaccaacgaaccttaattcaaataaggatctaggtgatgctgccaacttac

SEQ ID NO: 324406 - DNA, 75 bp, synthetic construct
  source 1..75: mol_type = other DNA
ggcctgaccgtggagcagatgaaaaaccagatggacccggtgtacacgccggcgcgaaaaatccacctgtaccac

SEQ ID NO: 324407 - DNA, 75 bp, synthetic construct
  source 1..75: mol_type = other DNA
cgaggttcttttcgccagtcctgtaattccatacttagatgtccgtctatatcagatgggcgtctaagttaccaa

SEQ ID NO: 324408 - DNA, 75 bp, synthetic construct
  source 1..75: mol_type = other DNA
gtttattaaagatatgcgtgatccacgggatatcaataacgaacaaaataaacgggcactggctgctatattctt

SEQ ID NO: 324409 - DNA, 75 bp, synthetic construct
  source 1..75: mol_type = other DNA
ctgttccattaagccccggtgaacgcctgaatggacttaatcacattgcggagttaagggcgaaagtatttggcc

SEQ ID NO: 324410 - DNA, 75 bp, synthetic construct
  source 1..75: mol_type = other DNA
gtcagtgcgttccagttggcctatacattagggcaaccggtgatgggtttctttattgataccgttggtctgaaa

SEQ ID NO: 324411 - DNA, 75 bp, synthetic construct
  source 1..75: mol_type = other DNA
ttaacgcgctggcaaacccgaccaccaactcttacaagcgactggttccgggctacgaagcaccggtaatgctgg

SEQ ID NO: 324412 - DNA, 75 bp, synthetic construct
  source 1..75: mol_type = other DNA
ttcaataccatgaccaaaaaagctgacgaaattcagatctacaaatatgttgtgcacaacgtagcgcaccgcttc

SEQ ID NO: 324413 - DNA, 75 bp, synthetic construct
  source 1..75: mol_type = other DNA
tcgttctgaaatgtgtctggtgatggaacagatgggtctggtggttgaagcccatcaccacgaagtagcgactgc

SEQ ID NO: 324414 - DNA, 75 bp, synthetic construct
  source 1..75: mol_type = other DNA
gacacccagtttgtcattacgccaccgcttttttccatgatacgatgtttatcagactactgttccacccggccc

SEQ ID NO: 324415 - DNA, 75 bp, synthetic construct
  source 1..75: mol_type = other DNA
aacgctattcttttaacgttttgtctgtgactgttttccctgaatctttaccagctgtgacccgggcagatgaaa

SEQ ID NO: 324416 - DNA, 75 bp, synthetic construct
  source 1..75: mol_type = other DNA
aacatccgtcataaacatcctaaaacaaagaaacttttgggggatcggtatttctcgatttttagccgatccggc

SEQ ID NO: 324417 - DNA, 75 bp, synthetic construct
  source 1..75: mol_type = other DNA
ggtgagtattgtcgaaaatccctacatcgccgtattactgattagcattggcgcattctcgcatcaatgtctttc

SEQ ID NO: 324418 - DNA, 75 bp, synthetic construct
  source 1..75: mol_type = other DNA
tgcactcaccggaacgtggtctggtctggcatttatgcgcgccctgatgggtttcagcgaagcgtcggcaattcc

SEQ ID NO: 324419 - DNA, 75 bp, synthetic construct
  source 1..75: mol_type = other DNA
atcctgggggcaattgcgctgtgggcgcttatcaaagtcaaagatgaagaaccgcacgtacaattagctacgagc

SEQ ID NO: 324420 - DNA, 75 bp, synthetic construct
  source 1..75: mol_type = other DNA
aatggacaaaaacctgtatgacctgccgccagaagaagcgaaagagatcccacaggttgcaggctctctggaaga

SEQ ID NO: 324421 - DNA, 75 bp, synthetic construct
  source 1..75: mol_type = other DNA
gttcgtgatgataatgggcgtcctaaactggttactcctccccctgtccctggtgattatttgcataaagaacaa

SEQ ID NO: 324422 - DNA, 75 bp, synthetic construct
  source 1..75: mol_type = other DNA
atccgttgcaggggagatatatcacccaggacccgatagggctgagaggtgaatggaatctgtataaatatccat

SEQ ID NO: 324423 - DNA, 75 bp, synthetic construct
  source 1..75: mol_type = other DNA
tgaatactgagtcagagcttgagaggtttattaaagatatgcttgatccacgggatatcaataatgaacaaaata

SEQ ID NO: 324424 - DNA, 75 bp, synthetic construct
  source 1..75: mol_type = other DNA
cgcagagcatcgcgtcgagcttgtggggcgatcctgaggcgctgcgattaacctggtacggaacggcgctgggga

SEQ ID NO: 324425 - DNA, 75 bp, synthetic construct
  source 1..75: mol_type = other DNA
tggtggcaatccgttcatgatgctgggtatagcgacgtcattatccgcgccattagtcgggctgacaggcgctga

SEQ ID NO: 324426 - DNA, 75 bp, synthetic construct
  source 1..75: mol_type = other DNA
tggtggtaatccgttcatgatgctgggcatagcgacgtcattatccgcgccattagtcgggctggtcggtgctga

SEQ ID NO: 324427 - DNA, 75 bp, synthetic construct
  source 1..75: mol_type = other DNA
gtttattaaagatatgtgtgatccacgggatatcaataacgaacaaaataaacgagcactggctgccatattctt

SEQ ID NO: 324428 - DNA, 75 bp, synthetic construct
  source 1..75: mol_type = other DNA
gctatggcgtctgctgcccctgctcttggagcaatggctgtggtcgctgggccaatgggatatgaccttctcgct

SEQ ID NO: 324429 - DNA, 75 bp, synthetic construct
  source 1..75: mol_type = other DNA
ctgcgtcgcgaagaaaatgaccgcgtgcgtatgactccgcatccggtagagtttgagctgtactacagcgtctaa

SEQ ID NO: 324430 - DNA, 75 bp, synthetic construct
  source 1..75: mol_type = other DNA
gtttattaaagatatgcgtgattcacgggatattaatagcgaacaaaataaacgggcactggctgctatattctt

SEQ ID NO: 324431 - DNA, 75 bp, synthetic construct
  source 1..75: mol_type = other DNA
catagcatcagcattaatgagctgaacactgacgaaaagcgggagctgattaaagcaatgaatcattttcgtgca

SEQ ID NO: 324432 - DNA, 75 bp, synthetic construct
  source 1..75: mol_type = other DNA
aggcatggcttgcgcagtgcgggctgacggcggaacagatggccgcgcagatggaggcggaatacatcccggaga

SEQ ID NO: 324433 - DNA, 75 bp, synthetic construct
  source 1..75: mol_type = other DNA
caataggtcaaccaattatggggttctttattgataatatcggccttaaattaggcttctttatctgtgcagtta

SEQ ID NO: 324434 - DNA, 75 bp, synthetic construct
  source 1..75: mol_type = other DNA
atgatcaatcgtcaactttcacgcctgctgttgtgcagcattctcggcagcacgacgctgatttccggctgtgcc

SEQ ID NO: 324435 - DNA, 75 bp, synthetic construct
  source 1..75: mol_type = other DNA
ggcaaccgaagccgaattgccggtgcttgccgaagagatgtcattactgatgctggatagccgccgcgtgatcca

SEQ ID NO: 324436 - DNA, 75 bp, synthetic construct
  source 1..75: mol_type = other DNA
gccgtcaaagggcaaatcactgaaacacgagaatctctgcgcgcattgactggcgcgggcgccagcgatatgccg

SEQ ID NO: 324437 - DNA, 75 bp, synthetic construct
  source 1..75: mol_type = other DNA
cccgacttttcgggtaatgcaggaagactgctgggccgggctgcgcgatctcaacggcaacatcatgcaggaaag

SEQ ID NO: 324438 - DNA, 75 bp, synthetic construct
  source 1..75: mol_type = other DNA
aagcgttgaattttggcgaggctgagcaggcgctgctgacaggacacgctttccaccctgcgcctaagtctcatg

SEQ ID NO: 324439 - DNA, 75 bp, synthetic construct
  source 1..75: mol_type = other DNA
ttgctgcgctatttcccttattacctgctggttaactccacttttgctgtgaccgctgcgctggggctgccgggc

SEQ ID NO: 324440 - DNA, 75 bp, synthetic construct
  source 1..75: mol_type = other DNA
cgaaaaatcatcagccagcaggtttcttattacgacaccttaagatcgcttgatcctgaaaataaagaggcgtta

SEQ ID NO: 324441 - DNA, 75 bp, synthetic construct
  source 1..75: mol_type = other DNA
acatctccgttttgctcaacgattgtacttaaaaaaacatcaggcaggttttttgtttggcaaaacaaccgtctt

SEQ ID NO: 324442 - DNA, 75 bp, synthetic construct
  source 1..75: mol_type = other DNA
aggtcagtgagcgtttatttattgcagttgaagaggatgatgttgttgatgcagaggtcagcttaccgccaacta

SEQ ID NO: 324443 - DNA, 75 bp, synthetic construct
  source 1..75: mol_type = other DNA
gccgtcaaagggcaaatcactgaaacgcgggaatctctgcgtgcattgattggcgcgggagccagcgatatgccg

SEQ ID NO: 324444 - DNA, 75 bp, synthetic construct
  source 1..75: mol_type = other DNA
ttgttctatccgagctttgatatcaaagcgtttttcggtctggactccatccatctgcataccttattcaaaaaa

SEQ ID NO: 324445 - DNA, 75 bp, synthetic construct
  source 1..75: mol_type = other DNA
ttttcggccttgatgccatccacctggataccttattcaaaaaaaccagtcgccagttcaacttcatcccgggtc

SEQ ID NO: 324446 - DNA, 75 bp, synthetic construct
  source 1..75: mol_type = other DNA
tctgatggctcgtgtacgaacattgctggctgaagtgcgtgaccaggtgactcataaaacctgtctcaactatgt

SEQ ID NO: 324447 - DNA, 75 bp, synthetic construct
  source 1..75: mol_type = other DNA
cggaaacgtcaatcaactctccggtagttcctggtgaggtgttgtccgcaatccgggaggttgccagggttcgtg

SEQ ID NO: 324448 - DNA, 75 bp, synthetic construct
  source 1..75: mol_type = other DNA
gctgagctggagctgatcgttaccattaacaaacatgccagtcagattgcagcaaaaccgtcgcaggaggagaag

SEQ ID NO: 324449 - DNA, 75 bp, synthetic construct
  source 1..75: mol_type = other DNA
tccaaagagttcaagaatctggaagacgatagcctgtctctggaagagctgcgcgagcaactggccagcctggac

SEQ ID NO: 324450 - DNA, 75 bp, synthetic construct
  source 1..75: mol_type = other DNA
catgcccggaataatcgctacttcagcagtacgcgagagttcagggaagcaatatctgtcttttttaaccagaca

SEQ ID NO: 324451 - DNA, 75 bp, synthetic construct
  source 1..75: mol_type = other DNA
tcgcaactggtgtatttaacatggggacatcatttggtgccatgttagccccgcctttgattgcatggtgcatta

SEQ ID NO: 324452 - DNA, 75 bp, synthetic construct
  source 1..75: mol_type = other DNA
ctgatgtcgcgcaagcaattgaaaatctcaggcagaagttagtggaatgcaatcgctataactactgcgcagatg

SEQ ID NO: 324453 - DNA, 75 bp, synthetic construct
  source 1..75: mol_type = other DNA
gaaagcgatcgggaaaaaagatatggagaaaatgaaatccattggcggcgacttcattaagcgagcggaggaagg

SEQ ID NO: 324454 - DNA, 75 bp, synthetic construct
  source 1..75: mol_type = other DNA
gaagatcgcaaggtgctggatggttttgctgctgggtacactcaaggtgttttccagcttgaatcaggcccaatg

SEQ ID NO: 324455 - DNA, 75 bp, synthetic construct
  source 1..75: mol_type = other DNA
ttgcaaaaatcataagcacactgattacagcgggtggaaaagacaacttctatagtgtggtttatccgcacccta

SEQ ID NO: 324456 - DNA, 75 bp, synthetic construct
  source 1..75: mol_type = other DNA
tgggcgatctctatgtcacaggcgtttgcaagaaggttaaagacaaagaaaaagactacaccaaagacgagatcg

SEQ ID NO: 324457 - DNA, 75 bp, synthetic construct
  source 1..75: mol_type = other DNA
tgcgtgacactgcgcgtatttacggtgtcgatgctgcggatatggcggtatcaaaagaactgaagaacgtcgagg

SEQ ID NO: 324458 - DNA, 75 bp, synthetic construct
  source 1..75: mol_type = other DNA
aacggtcgttgctacgactgcgctcttccggccggggccaattcagtcaggcatgttggatgattatgtttctgt

SEQ ID NO: 324459 - DNA, 75 bp, synthetic construct
  source 1..75: mol_type = other DNA
cgttaataaagatgaagcagcaatcggagtaatttgtatgtatgccgaacaaaagcggttgctacgtcagaaatt

SEQ ID NO: 324460 - DNA, 75 bp, synthetic construct
  source 1..75: mol_type = other DNA
gaagtcggagctcaaagagatccgcctggtcaaagtgcgttcagcagcctacaggctgaaggattctgatattgt

SEQ ID NO: 324461 - DNA, 75 bp, synthetic construct
  source 1..75: mol_type = other DNA
aatttccggaacatccaaggaacgaaagcgtacacgccggaaggaagagctgagatcgtttcacgtgagcgcgaa

SEQ ID NO: 324462 - DNA, 75 bp, synthetic construct
  source 1..75: mol_type = other DNA
ggttgtctgcgccattattgctaaacgccgtggttacccactttcagaaagagcaacctttgctcaggcctgtaa

SEQ ID NO: 324463 - DNA, 75 bp, synthetic construct
  source 1..75: mol_type = other DNA
gattatgttgcatttactggtagtggcgctgctggttatgggctggatgagtaagacgctggttcatgtcggcgt

SEQ ID NO: 324464 - DNA, 75 bp, synthetic construct
  source 1..75: mol_type = other DNA
gtggtttactgaatttggccacctgaacagaggtgatatgctcacctcagaacaacacaggtgccataatgaaaa

SEQ ID NO: 324465 - DNA, 75 bp, synthetic construct
  source 1..75: mol_type = other DNA
tggccggaagatgccgcgccgctgattacctgggggctgaccgtaacgcgcggtccgcataaagagcggcagaat

SEQ ID NO: 324466 - DNA, 75 bp, synthetic construct
  source 1..75: mol_type = other DNA
aaaatggggctggatgccacgaataaatggccgggtgaaacccagcgtgaatggggacgtcccatcaaaaaagat

SEQ ID NO: 324467 - DNA, 75 bp, synthetic construct
  source 1..75: mol_type = other DNA
actggaacgatgtgatttgggcgattaccacccgaatggaccccgcgcgggacacggtactggttgaaaacacgc

SEQ ID NO: 324468 - DNA, 75 bp, synthetic construct
  source 1..75: mol_type = other DNA
tgagccaaatcgtaaagagccagctgaagtaaaagtcactttcaccggaattggtggcagtttttctgcaatgtt

SEQ ID NO: 324469 - DNA, 75 bp, synthetic construct
  source 1..75: mol_type = other DNA
actggaaccatcaacccgtaactgcgcgcggagatacttggtataagggtgataagaacatgggacgctcgccgg

SEQ ID NO: 324470 - DNA, 75 bp, synthetic construct
  source 1..75: mol_type = other DNA
ctatataatagaagccttattaaatataatagaaaacaaaaaacaaaatatcgcctttcttatttttctattact

SEQ ID NO: 324471 - DNA, 75 bp, synthetic construct
  source 1..75: mol_type = other DNA
ttttcagatttacggcagatctgccagttcagcaaggtttctatcgcttgtgcaaatctaagcccgaaaatcctc

SEQ ID NO: 324472 - DNA, 75 bp, synthetic construct
  source 1..75: mol_type = other DNA
ctgatattcgggacttaccgtaaatccactggcgcgcctgtattgccacgtgacttcgttgtgcgcttgtatgag

SEQ ID NO: 324473 - DNA, 75 bp, synthetic construct
  source 1..75: mol_type = other DNA
cagtttcgttttcgtgcacagccggtgttcccggcgaacgtgaaggcaggggaatacacaggggcgctgaccttt

SEQ ID NO: 324474 - DNA, 75 bp, synthetic construct
  source 1..75: mol_type = other DNA
ggacagttccgttttcgtgcgcagccagtgtttccggatgacgtgaaggcgggggaatacacgggggcgctgacc

SEQ ID NO: 324475 - DNA, 75 bp, synthetic construct
  source 1..75: mol_type = other DNA
ccagcgaagttttagcaaaatggatttgggatcaagttaaacccgttgtgccgctgttaagtgcggtgatggtaa

SEQ ID NO: 324476 - DNA, 75 bp, synthetic construct
  source 1..75: mol_type = other DNA
gggcagtttcgattcaaggcgcagccgctcataccaaataatgtaaaggcaggggaatatacaggcgctttatct

SEQ ID NO: 324477 - DNA, 75 bp, synthetic construct
  source 1..75: mol_type = other DNA
cagttccgttttcgtgcacagccggtgtttccggcgaacgtgaaggcaggggaatacacaggggcgctgaccttt

SEQ ID NO: 324478 - DNA, 75 bp, synthetic construct
  source 1..75: mol_type = other DNA
aagaaattttatcgtgaaggggtatttgttaacggcgcggcacagggttacctgatcgataagaaaaccgccgac

SEQ ID NO: 324479 - DNA, 75 bp, synthetic construct
  source 1..75: mol_type = other DNA
cttgctgttcagtcgatctctgattggaaaaattactatccaaaagaatgtgatgaatgtactcagaagccttcc

SEQ ID NO: 324480 - DNA, 75 bp, synthetic construct
  source 1..75: mol_type = other DNA
tcttcattgatcacagtagttatagtgagaaaataatctctgccatagacgctgcatacaggtcaggcatacctc

SEQ ID NO: 324481 - DNA, 75 bp, synthetic construct
  source 1..75: mol_type = other DNA
ttgggacttaccgcaagtccacgggagtgtctgtgcccccgcgtgacttcactgtgcgtctgtatgagtccggcg

SEQ ID NO: 324482 - DNA, 75 bp, synthetic construct
  source 1..75: mol_type = other DNA
ctggctggggctgcgaaggtgcgatcaaccaccagcttgccgcgtatgaactgaccaacaccgtgacgcataatc

SEQ ID NO: 324483 - DNA, 75 bp, synthetic construct
  source 1..75: mol_type = other DNA
ggcacagggttacctgatcgataagaaaaccgccgaccagtataaaattaccaacatcgcgcaacttaaagatcc

SEQ ID NO: 324484 - DNA, 75 bp, synthetic construct
  source 1..75: mol_type = other DNA
aaatcactgaaattgctgaccgcactttgcgtgccggtgggcctgcgctgttgttcgaaaaccctaaaggctact

SEQ ID NO: 324485 - DNA, 75 bp, synthetic construct
  source 1..75: mol_type = other DNA
tggaaaaagccagcaaaccatgaagtcatcacaatggcgatcccatgtggtggcattggcgaccgtgacggctgg

SEQ ID NO: 324486 - DNA, 75 bp, synthetic construct
  source 1..75: mol_type = other DNA
tggaaaatctgcgcatcgtggatgaaggacggttatgtgtcatggtcagacgtgccggaaagctggacggcaaac

SEQ ID NO: 324487 - DNA, 75 bp, synthetic construct
  source 1..75: mol_type = other DNA
gtactggaggccgcgcttgtgctttccggtcatgttacaggctgggatgttcaggcgtgccgtgatgcagttcag

SEQ ID NO: 324488 - DNA, 75 bp, synthetic construct
  source 1..75: mol_type = other DNA
cttggaccgaaacaactggcgagcctggaagacacaaaaatcatcgacaaagggcgcaattacgtgcgcgtttat

SEQ ID NO: 324489 - DNA, 75 bp, synthetic construct
  source 1..75: mol_type = other DNA
tccagccgaaagacaaaatgaccgaagtcattatctttgcaggtagtgatgcatgggcacatgcgaaagagtgga

SEQ ID NO: 324490 - DNA, 75 bp, synthetic construct
  source 1..75: mol_type = other DNA
cgctggaaaaaaacggcaaatcatgaagtcatcacgatggcggttccgtgcggtggcattggcgaccgtgacggc

SEQ ID NO: 324491 - DNA, 75 bp, synthetic construct
  source 1..75: mol_type = other DNA
tgtcattggtaacgagcattaccgcgtgatgcgctggacagattcgacaacaaatcggcttgtcactatggccgt

SEQ ID NO: 324492 - DNA, 75 bp, synthetic construct
  source 1..75: mol_type = other DNA
ctgtacggctacagggaaagcgacgggcgttatgacgaacctgttttgttctacgtgctgccggatccgttcggc

SEQ ID NO: 324493 - DNA, 75 bp, synthetic construct
  source 1..75: mol_type = other DNA
gcaacggaaaggatcacgctgacgcattgaaggcggcatggcaagaaaaccacggcgcagcggggcgtgagtgga

SEQ ID NO: 324494 - DNA, 75 bp, synthetic construct
  source 1..75: mol_type = other DNA
acgaggcagaggcacacaacgacgggctgttacccatggatgaaataggtcaggcaggaaacgcgcgggaagtgt

SEQ ID NO: 324495 - DNA, 75 bp, synthetic construct
  source 1..75: mol_type = other DNA
ctcgggcggcgtgacctgggtaatctggaaaacctgcgtattgtggatgatggacggttacgcgccatggtcaga

SEQ ID NO: 324496 - DNA, 75 bp, synthetic construct
  source 1..75: mol_type = other DNA
ctaacgaggcagaggcgcacaacgacgggctgttacccctggatgaaataggccaggccggaaacgcgcgggagg

SEQ ID NO: 324497 - DNA, 75 bp, synthetic construct
  source 1..75: mol_type = other DNA
ggagatcagcaactggcagaactggaaaatctgaacatcattgacgacgggcgctattgtgtccggctgtacaaa

SEQ ID NO: 324498 - DNA, 75 bp, synthetic construct
  source 1..75: mol_type = other DNA
atgaagatgaagaatgccccgaacattaaattcctgccgaaagataaatttaccgaggcgattatctttgcgggt

SEQ ID NO: 324499 - DNA, 75 bp, synthetic construct
  source 1..75: mol_type = other DNA
tacagtatacggctacacaacgttccgggtggtttggtggcatctacatcatgccaaatggtgatgttattggtg

SEQ ID NO: 324500 - DNA, 75 bp, synthetic construct
  source 1..75: mol_type = other DNA
cgttagattactgaatatccctgtatctcgaccaactgaatttcatggatacgaaaatggagagaaacatgcgaa

SEQ ID NO: 324501 - DNA, 75 bp, synthetic construct
  source 1..75: mol_type = other DNA
gccgatcgcgggagcttcaatagctatttcaaaccgcacccagctaccaaggttcttaacaaggatttccatctt

SEQ ID NO: 324502 - DNA, 75 bp, synthetic construct
  source 1..75: mol_type = other DNA
atgaagaatttgtcgctaagctttcaaaacttgttagcaaagatgaagccgctatcggcgtgatatgtatgtatg

SEQ ID NO: 324503 - DNA, 75 bp, synthetic construct
  source 1..75: mol_type = other DNA
ttagaaacgttcattgcctccgcaggacgcaagacaaaagcggggcaactggtgcgcctgctgaatatcccgtta

SEQ ID NO: 324504 - DNA, 75 bp, synthetic construct
  source 1..75: mol_type = other DNA
gataccttccttacccaaacagtgatgagcgtgatttaccgattaaagaccttgccggatacagaaaggggagta

SEQ ID NO: 324505 - DNA, 75 bp, synthetic construct
  source 1..75: mol_type = other DNA
tcaaacactggcgcacggtggcaatcagcaccggagaaatggatgttgagacattcctcaaaagtgagggggtaa

SEQ ID NO: 324506 - DNA, 75 bp, synthetic construct
  source 1..75: mol_type = other DNA
ggttcggtcattggtgattgcgaaaagccagtcctgtttaccggaaaaacggctgctgttaatggttattccgtg

SEQ ID NO: 324507 - DNA, 75 bp, synthetic construct
  source 1..75: mol_type = other DNA
gggtggtataccttaaaggatatgccgaaggacaaaagaaaacctgccagcctgattttacttacgccagagggc

SEQ ID NO: 324508 - DNA, 75 bp, synthetic construct
  source 1..75: mol_type = other DNA
ctgcaacaatgttgaaaatgccagccaactgcatgaagtatggcaaaaaggggctgatgaaaatgccagcacaat

SEQ ID NO: 324509 - DNA, 75 bp, synthetic construct
  source 1..75: mol_type = other DNA
cggtggcattggcgaccgtgacggctggcggttactgaaagaccacggcctgaacgtgacaaccaacggcaaata

SEQ ID NO: 324510 - DNA, 75 bp, synthetic construct
  source 1..75: mol_type = other DNA
aagttatccgaaaccgaagatgatgatcctcggcttcccgtcgaatccaactgcgcaatgcgtggagctggagtt

SEQ ID NO: 324511 - DNA, 75 bp, synthetic construct
  source 1..75: mol_type = other DNA
attttgacgggaaaactattgcgttgccgcaggtgcgtaaaaattacccttttgaggggtttgtagagtggcatc

SEQ ID NO: 324512 - DNA, 75 bp, synthetic construct
  source 1..75: mol_type = other DNA
acccggtgcagcggggggatcctcttgggttgtctggtgagacactggttcttggttctgccacaacagtaacag

SEQ ID NO: 324513 - DNA, 75 bp, synthetic construct
  source 1..75: mol_type = other DNA
gctgcatgaagcgggctggatggtcgaaatgccgaaggcttcgatgtatgtctgggcgaaaatcccggaaccgta

SEQ ID NO: 324514 - DNA, 75 bp, synthetic construct
  source 1..75: mol_type = other DNA
gccatcgtcaccattggctcgaaagaggggctggcgcatctgatgctggcgacgctggatcacggcgacacggtg

SEQ ID NO: 324515 - DNA, 75 bp, synthetic construct
  source 1..75: mol_type = other DNA
attccgcggttacgtcgcgccatttcccgctggtatcaggatcgctacgacgttgaaatcgacccggaatcagaa

SEQ ID NO: 324516 - DNA, 75 bp, synthetic construct
  source 1..75: mol_type = other DNA
agctttaccaccagatgatttacctcggttcttgattgctctatctagcgcttctatacggctcgaaacacgtct

SEQ ID NO: 324517 - DNA, 75 bp, synthetic construct
  source 1..75: mol_type = other DNA
tgcttgccaatggcattgatcctcaagtccataacaacgataaagcaaatgccttaaagaatgctactgaacaca

SEQ ID NO: 324518 - DNA, 75 bp, synthetic construct
  source 1..75: mol_type = other DNA
tctcacagaacgggtgattctcatgcagtggtggagtgactttgtttcgtctcaaaaatacaaaattattgccgc

SEQ ID NO: 324519 - DNA, 75 bp, synthetic construct
  source 1..75: mol_type = other DNA
attttgacgggaaaactattgcgttgccacaggtgcgtaaaaattacccttttgaggggtttgtggagtggcatc

SEQ ID NO: 324520 - DNA, 75 bp, synthetic construct
  source 1..75: mol_type = other DNA
aggcaattgccaacataaaaatctggcacaagggtgaacagcgcgcgccgcataagccattgttattgctatacg

SEQ ID NO: 324521 - DNA, 75 bp, synthetic construct
  source 1..75: mol_type = other DNA
attttgacgggaaaactattgcgttaccacaggtgcgtaaaaattacccttttgaggggtttgtagagtggcatc

SEQ ID NO: 324522 - DNA, 75 bp, synthetic construct
  source 1..75: mol_type = other DNA
gcatgttcgctttgcactgattgaaaaccgcgaccgtattcgtcaggcgattcgtgggattaaagcgatgttccg

SEQ ID NO: 324523 - DNA, 75 bp, synthetic construct
  source 1..75: mol_type = other DNA
actgggcgcatgaagcctgctttatgccgcgtagcaactttcgtcttattcgccaccgcatgctggcacctgaaa

SEQ ID NO: 324524 - DNA, 75 bp, synthetic construct
  source 1..75: mol_type = other DNA
ccgatgcacgtaatctgcacctcgccgcgcaaggcttgttaacaaaatcccgctgccgtgcgttgccgggggata

SEQ ID NO: 324525 - DNA, 75 bp, synthetic construct
  source 1..75: mol_type = other DNA
cgccgtcgagcgtcgttggaagatattctggcaacgatttcccgcatgtccttgctgcaaattgataccatcaat

SEQ ID NO: 324526 - DNA, 75 bp, synthetic construct
  source 1..75: mol_type = other DNA
atgacaacattacttaacccgtattttggtgagtttggcggcatgtacgtgccacaaatcctgatgcctgctctg

SEQ ID NO: 324527 - DNA, 75 bp, synthetic construct
  source 1..75: mol_type = other DNA
aagtcggcaagaacactatttacattttcgcaagcaaccaatgtttcaggtggtgttggtattgtcggtgctttc

SEQ ID NO: 324528 - DNA, 75 bp, synthetic construct
  source 1..75: mol_type = other DNA
ccgtggttcgttgtatctgatgtgtgccaggcgctggaaatcagcaatccaaccagtgccgttgcctctctggat

SEQ ID NO: 324529 - DNA, 75 bp, synthetic construct
  source 1..75: mol_type = other DNA
aacggctggaacgcctgccgacaggcaatgctgacgacggcagaaaaagtacttgatgtgcgaatccctgaatat

SEQ ID NO: 324530 - DNA, 75 bp, synthetic construct
  source 1..75: mol_type = other DNA
tgcgtgacgccgcacaaaataccgtatatggagacaagggatgtgatctggaagcatttcactcccttgccactc

SEQ ID NO: 324531 - DNA, 75 bp, synthetic construct
  source 1..75: mol_type = other DNA
ttctggcgattacaaggcgacggattctggcaattacacaatgccgggctttgctcaacagcagggagcagccga

SEQ ID NO: 324532 - DNA, 75 bp, synthetic construct
  source 1..75: mol_type = other DNA
actgggtattccgcgaggttattccttcaatccgcaaaacggggagttatggtgttccgtttgccatgctgaatg

SEQ ID NO: 324533 - DNA, 75 bp, synthetic construct
  source 1..75: mol_type = other DNA
ggatgccaccgtcagcatgacagacacccagtggtcgatgaacggaaactccacggcaggaaatatgaaacttaa

SEQ ID NO: 324534 - DNA, 75 bp, synthetic construct
  source 1..75: mol_type = other DNA
gccaccctgagtctgaacagccgtcctgatgaggtatctcacacacttttacctgtatacgattatgccggttca

SEQ ID NO: 324535 - DNA, 75 bp, synthetic construct
  source 1..75: mol_type = other DNA
tcgatagggcgacggcacaggcatacgttgaaacttatgatggaatgaaagttgtagctgcttcgatggcaccag

SEQ ID NO: 324536 - DNA, 75 bp, synthetic construct
  source 1..75: mol_type = other DNA
gatcgggtgattgcgctggtcaacaatcttggcgccacaccactttctgagctttacggcgtctataaccgtctg

SEQ ID NO: 324537 - DNA, 75 bp, synthetic construct
  source 1..75: mol_type = other DNA
tccggcttttctatcaccttactgaaagttgatgacgaaatgctggcactatgggacgccccggtccataccccg

SEQ ID NO: 324538 - DNA, 75 bp, synthetic construct
  source 1..75: mol_type = other DNA
atgagatggagtttggcgtcggtattcatggcgagccgggtatcgatcgtcgtcccttctcttcccttgatcaaa

SEQ ID NO: 324539 - DNA, 75 bp, synthetic construct
  source 1..75: mol_type = other DNA
cggtgaacgcagtattggtcaccaggatcccggcgcgacctcggtgatgtttatgatgcaaatgttggcgttagc

SEQ ID NO: 324540 - DNA, 75 bp, synthetic construct
  source 1..75: mol_type = other DNA
aaagcctgacactggaagagctttatcagatgttccgcgatggcgcggacggcgtaatcagtcgcgggaaagccg

SEQ ID NO: 324541 - DNA, 75 bp, synthetic construct
  source 1..75: mol_type = other DNA
agataaagatatcggtttcattctcaagaataccggtatgacgctgctttccagcgtcggtggtgccagtggtcc

SEQ ID NO: 324542 - DNA, 75 bp, synthetic construct
  source 1..75: mol_type = other DNA
tcaagacggatgagaaatctaatgagattacaactatccctgaactgattaacatattggatattaaaggaaaaa

SEQ ID NO: 324543 - DNA, 75 bp, synthetic construct
  source 1..75: mol_type = other DNA
gtcatgaacgtattgccgcaactattcgccataaccgcgcccgtggtcgccatcaaatcacagcaatgtcagaga

SEQ ID NO: 324544 - DNA, 75 bp, synthetic construct
  source 1..75: mol_type = other DNA
aatccgaataacgtcgcgccgccagagaaacgattactacaaaaatcaattgagatcgatggttttacccagcca

SEQ ID NO: 324545 - DNA, 75 bp, synthetic construct
  source 1..75: mol_type = other DNA
tccgcccatggcggtatgtcgcaggggctctgctggccagtgtttttctggccgggagcaacgcgggtctggcac

SEQ ID NO: 324546 - DNA, 75 bp, synthetic construct
  source 1..75: mol_type = other DNA
atggcgttaacacaccgcgaactctgtcagattgcgtataagttccttaagcgcaacgggttcaaggtttgtttt

SEQ ID NO: 324547 - DNA, 75 bp, synthetic construct
  source 1..75: mol_type = other DNA
ttctggtgaccttgattctttgcaagcagaatataattctttaaaagatgcaaggattagcagccaaaaagaatt

SEQ ID NO: 324548 - DNA, 75 bp, synthetic construct
  source 1..75: mol_type = other DNA
atcttggtgcaactccgctttctgaactgtatggcgtctataaccgcctggccacgcgttgccagcaagcgggct

SEQ ID NO: 324549 - DNA, 75 bp, synthetic construct
  source 1..75: mol_type = other DNA
gtaattattctggtgagcgatttttatgagggaggagcatcatcatcactcatccaccaggtgaaacaatgtgtt

SEQ ID NO: 324550 - DNA, 75 bp, synthetic construct
  source 1..75: mol_type = other DNA
aacttattgaacaaccagcgaaaagcgtcattatcctcgtgagcgatttttacgaagggggttcatcatcattac

SEQ ID NO: 324551 - DNA, 75 bp, synthetic construct
  source 1..75: mol_type = other DNA
tgattgagcggctggaaagcgatgccgtactgcgctacggcattgaagatgtggtgacaaatctcgacgtgctgg

SEQ ID NO: 324552 - DNA, 75 bp, synthetic construct
  source 1..75: mol_type = other DNA
tgaatttagtttcgagtgtcacaaaactgctgaggaggctatcgctgctgctgaggctgcaattgacgactatag

SEQ ID NO: 324553 - DNA, 75 bp, synthetic construct
  source 1..75: mol_type = other DNA
ttcctgtctgaagtacgggcgcagggggtggagatgttctcagaaaaattcggaggtggcactccgctttccaat

SEQ ID NO: 324554 - DNA, 75 bp, synthetic construct
  source 1..75: mol_type = other DNA
tttcggttcttcagttggtctatcagtttggccaagaggctggaatgtctaaagagcaagcgaggcattacaaaa

SEQ ID NO: 324555 - DNA, 75 bp, synthetic construct
  source 1..75: mol_type = other DNA
tcatctgctgaccaatatcgccgtggtggagcgtttcttgccggtgcggtttggtttgatagaaacagatggcgt

SEQ ID NO: 324556 - DNA, 75 bp, synthetic construct
  source 1..75: mol_type = other DNA
ttcgctctgcacatgttggctggataagatgcgtcagcatcgcatccggcaaaaaaaacgggcaaggtgtcacca

SEQ ID NO: 324557 - DNA, 75 bp, synthetic construct
  source 1..75: mol_type = other DNA
tgatcaatgatgtgcaagacgtactggacgaacaactggcaggactggcgaaagcgcatccatcgctgacactgc

SEQ ID NO: 324558 - DNA, 75 bp, synthetic construct
  source 1..75: mol_type = other DNA
gctatcttgcaagcccggcggcggtgggggaatatctcgccgaccagctggtactgccaatgccaatggcggggg

SEQ ID NO: 324559 - DNA, 75 bp, synthetic construct
  source 1..75: mol_type = other DNA
ccatctgctgaccaatattgcggtggtggagcgtttcttgccagtgcggtttggtctggtggaggctgatggcgt

SEQ ID NO: 324560 - DNA, 75 bp, synthetic construct
  source 1..75: mol_type = other DNA
atatctcgccgaccagttggtgctaccgatggcgctggcgggcgcgggagaatttacggtcgcccatccttcatg

SEQ ID NO: 324561 - DNA, 75 bp, synthetic construct
  source 1..75: mol_type = other DNA
acaacgtaatgcgctgaactgtgcaggatgcgagctgatttttgaagacaagataagcggtacaaagtccgagag

SEQ ID NO: 324562 - DNA, 75 bp, synthetic construct
  source 1..75: mol_type = other DNA
agataagcggtacaaagtccgagagcctagggctgacactgctgttcttgatgcaaattaaaggatttaatagtg

SEQ ID NO: 324563 - DNA, 75 bp, synthetic construct
  source 1..75: mol_type = other DNA
taagcggatatatcgccaatcaggcgcaaacgccggaagttattatgggcatccgcacatcaattgccttagtac

SEQ ID NO: 324564 - DNA, 75 bp, synthetic construct
  source 1..75: mol_type = other DNA
gatgaaaccaaccgtctgtatcgccagaactactcgctgacctggaacggtggctgggataacggcgtgaccacc

SEQ ID NO: 324565 - DNA, 75 bp, synthetic construct
  source 1..75: mol_type = other DNA
ccgattgatttcctcgttaaccagacgctgacgctgggtacggagtggaatcagcaacggatgaaggacttgagt

SEQ ID NO: 324566 - DNA, 75 bp, synthetic construct
  source 1..75: mol_type = other DNA
ggcgttaacctgaccggtaactccaccagtggtcagcgtggtaataaccgccagattgatattcgcggcatgggt

SEQ ID NO: 324567 - DNA, 75 bp, synthetic construct
  source 1..75: mol_type = other DNA
atttggacgcattttgtgggagcgtagtcaggggattgacgagcgcgacgttaacagcgaacggttgcgaaaatc

SEQ ID NO: 324568 - DNA, 75 bp, synthetic construct
  source 1..75: mol_type = other DNA
tcactggatgaagcctatctcgacgtcaccgatagtgtgcattgccacggttctgcgaccctcatcgcccaggaa

SEQ ID NO: 324569 - DNA, 75 bp, synthetic construct
  source 1..75: mol_type = other DNA
attgcatggcaaaaccaggcgcaggacagagcgtgcataacgactggaaagcgacgcagatcaaagtggaagatg

SEQ ID NO: 324570 - DNA, 75 bp, synthetic construct
  source 1..75: mol_type = other DNA
cagtttaggccatgagattgttacattcctttttatcctggagatatgggggaacgcaggagatgattttttcat

SEQ ID NO: 324571 - DNA, 75 bp, synthetic construct
  source 1..75: mol_type = other DNA
atggaacgcagtaatttcttagtggctattatcaagctaattcttaggtccctagcgattattcctggctggttc

SEQ ID NO: 324572 - DNA, 75 bp, synthetic construct
  source 1..75: mol_type = other DNA
ttctgcgaccctcatcgcccaggaaatccgccagacgattttcaacgagctgcaactgacggcgtctgcgggcgt

SEQ ID NO: 324573 - DNA, 75 bp, synthetic construct
  source 1..75: mol_type = other DNA
gagcgtgatacccgtggcgatacctcctgggtgccacctgagatgatcgaacgtattgaagttttgcgtggtccg

SEQ ID NO: 324574 - DNA, 75 bp, synthetic construct
  source 1..75: mol_type = other DNA
cacgacgacatggtggcggatgatatggaaaaccgccagtcgtatgatgcaccggtggcgctggatagcgatatt

SEQ ID NO: 324575 - DNA, 75 bp, synthetic construct
  source 1..75: mol_type = other DNA
gcatttacgttttgcccaacggttgtatttaaaaaaacaccgggcgggattcttattcggcaaaacgacggtttt

SEQ ID NO: 324576 - DNA, 75 bp, synthetic construct
  source 1..75: mol_type = other DNA
gcacaggttagtttgccgccgactattgcactaagttgtaccaccgaaatcatccatgataattacgcgttatgc

SEQ ID NO: 324577 - DNA, 75 bp, synthetic construct
  source 1..75: mol_type = other DNA
taagatcgcttgatcctgaaaataaagaggcgttactgaaccgccccggttttcctggagagtgttttatctgtg

SEQ ID NO: 324578 - DNA, 75 bp, synthetic construct
  source 1..75: mol_type = other DNA
aaccgcgactaaccggcagggaatttcatgatgtgcgaaaaatcatcagccagcaggtttcttattacgacacct

SEQ ID NO: 324579 - DNA, 75 bp, synthetic construct
  source 1..75: mol_type = other DNA
cagcaggtttcttattacgacaccctaagatcgcttgatcctgaaaataaagaagcgttacagatttcccgcttc

SEQ ID NO: 324580 - DNA, 75 bp, synthetic construct
  source 1..75: mol_type = other DNA
ctattatctggtggatgcgtcttatcagcaggcggtgaatttactgccggaagaaaagcgtaaattgctggtaca

SEQ ID NO: 324581 - DNA, 75 bp, synthetic construct
  source 1..75: mol_type = other DNA
atgtacttgtttgcgatggtgaaagaagtagaaaatcgcccagctgtttcgctgaaaaccagcccggagctggcg

SEQ ID NO: 324582 - DNA, 75 bp, synthetic construct
  source 1..75: mol_type = other DNA
ggaatgcccagaccacgggtgatcttgccggtgcgaactatatcgcaggtgctggcgcgtatacctataacgaac

SEQ ID NO: 324583 - DNA, 75 bp, synthetic construct
  source 1..75: mol_type = other DNA
gttccgcgctcaacgagttgacgcggacgttaccgcaatatcgcaactctattatgacgccgctgcaagcggctt

SEQ ID NO: 324584 - DNA, 75 bp, synthetic construct
  source 1..75: mol_type = other DNA
ctagcggttcccggcatgacttgcgccgcctgcccgatcaggggtctgacgctcagtggaacgaaaactcacgtt

SEQ ID NO: 324585 - DNA, 75 bp, synthetic construct
  source 1..75: mol_type = other DNA
ttggcatggcgctggcagaagagcgtaaagtcgatgcgctggcggccgggttgttatccgttgcagcatttatga

SEQ ID NO: 324586 - DNA, 75 bp, synthetic construct
  source 1..75: mol_type = other DNA
tcaactgccacaatcaaacgaattttacgttgtagcacgtcggctgttgtattccagaagcagttacataactaa

SEQ ID NO: 324587 - DNA, 75 bp, synthetic construct
  source 1..75: mol_type = other DNA
aaataacagagtcaatgattgttagggaaaactcgtgctattttgattgcacatcaggaagtattaaaaatgttc

SEQ ID NO: 324588 - DNA, 75 bp, synthetic construct
  source 1..75: mol_type = other DNA
accaaatctccgaggggatcagttcagcctgattgtgaccacagtagatgacgacgtttcggatcaacgaaaaag

SEQ ID NO: 324589 - DNA, 75 bp, synthetic construct
  source 1..75: mol_type = other DNA
gcaaaccgggtgctggcattagataaactggactttcattttctaaatatatatatatccataaaatccgtagac

SEQ ID NO: 324590 - DNA, 75 bp, synthetic construct
  source 1..75: mol_type = other DNA
ttataaggattctacagccggaaaaattcgtaatccatttggcggtgaattacaggtggggcctagtagtggtac

SEQ ID NO: 324591 - DNA, 75 bp, synthetic construct
  source 1..75: mol_type = other DNA
ggagaattataaagataagaccaaccaacagattaacaatccatttggaggaaaattaagagtggctccttctgg

SEQ ID NO: 324592 - DNA, 75 bp, synthetic construct
  source 1..75: mol_type = other DNA
aggcattaacatgcccgattacattatgcatccctgagcatggtgtgattatgagaaatgctggaaattcagatg

SEQ ID NO: 324593 - DNA, 75 bp, synthetic construct
  source 1..75: mol_type = other DNA
tggcccgcatccttacccgaccattgtgcgtgagtttcagcggatgattggcgaagaaaccaaagcgcagattct

SEQ ID NO: 324594 - DNA, 75 bp, synthetic construct
  source 1..75: mol_type = other DNA
tgaaaatgatgcgcgaaaacccggaaaaagagcagctactggtggttaacctttccggtcgcggcgataaagaca

SEQ ID NO: 324595 - DNA, 75 bp, synthetic construct
  source 1..75: mol_type = other DNA
tccgccggactggatttcccgtctgtcggcccgcaacacgcgtatcttaacagcactggacgcgctgattacgtg

SEQ ID NO: 324596 - DNA, 75 bp, synthetic construct
  source 1..75: mol_type = other DNA
gcctctattgttaatgacctgagagtaattgagtcctggcttgcgccgttggggttatcattgatccgcagccca

SEQ ID NO: 324597 - DNA, 75 bp, synthetic construct
  source 1..75: mol_type = other DNA
tatctgagcaagctaatgcagcaaacatccagcgattattgcaacatgactctgatttcgattgcttaataaagg

SEQ ID NO: 324598 - DNA, 75 bp, synthetic construct
  source 1..75: mol_type = other DNA
atgtactctgactcgttgcaacgattgactccgcatacaacccgacatacttgggcctttttgacattgcaaaaa

SEQ ID NO: 324599 - DNA, 75 bp, synthetic construct
  source 1..75: mol_type = other DNA
taaaggtcaggcgaaagggaccgctattagtccatcagaggctgcagttgcctgcgataatgatagtaatgataa

SEQ ID NO: 324600 - DNA, 75 bp, synthetic construct
  source 1..75: mol_type = other DNA
gctatcgtgatggcaatgatattgccggaagtctgaaaaccaggtttgaagaatacgtattggcagaagctaatg

SEQ ID NO: 324601 - DNA, 75 bp, synthetic construct
  source 1..75: mol_type = other DNA
ctttttgaagaggttttttatgattcagagcttgaaaggcgtaatataacagatagagagatccagtctgttgtt

SEQ ID NO: 324602 - DNA, 75 bp, synthetic construct
  source 1..75: mol_type = other DNA
atccattttcaagtcattcatgctcgaagaaacagaaagatttactaaatcaggcgttcatactcgcattgacaa

SEQ ID NO: 324603 - DNA, 75 bp, synthetic construct
  source 1..75: mol_type = other DNA
ggccagcatcatttggacgaaaaaaatcatatttctgaaatttgtatgaagccacgtagtggaatgactttattg

SEQ ID NO: 324604 - DNA, 75 bp, synthetic construct
  source 1..75: mol_type = other DNA
tgattttcagtcacaccattctagcggtaacacgagtatgggatgctttttcttatttgaattggtttcagataa

SEQ ID NO: 324605 - DNA, 75 bp, synthetic construct
  source 1..75: mol_type = other DNA
agcattttcgagatgattacgagcgtgagctgaggacttacgttgttgaaagtcagaaaaacgcaggaaaaaata

SEQ ID NO: 324606 - DNA, 75 bp, synthetic construct
  source 1..75: mol_type = other DNA
gttgaaaccaagcaaaatcaaaaaagccactgatgggaaaaaacgcactaaaatgcgtattggcaagttcactga

SEQ ID NO: 324607 - DNA, 75 bp, synthetic construct
  source 1..75: mol_type = other DNA
gctatcgtgatggtaatgatattgccggaagcctgaaaaccaagtttgaagaatatgttttggcagaagctaata

SEQ ID NO: 324608 - DNA, 75 bp, synthetic construct
  source 1..75: mol_type = other DNA
gtatccgccatacctcatcagacggatcatgttgcaattcgcctgttagctaatccagaactgaatctatctgaa

SEQ ID NO: 324609 - DNA, 75 bp, synthetic construct
  source 1..75: mol_type = other DNA
atccattttcaagtcattcatgctcgaagaaacagaacgatttaccaaatcaggcgttcatactcgcattgataa

SEQ ID NO: 324610 - DNA, 75 bp, synthetic construct
  source 1..75: mol_type = other DNA
ggtttggatattaccattaccactactgcgaaatctgacgaagaaggccgcgctctgctggctgcctttgacttc

SEQ ID NO: 324611 - DNA, 75 bp, synthetic construct
  source 1..75: mol_type = other DNA
agcgatcgctgacagaaaactgctggatagcgcagcagcagacctggcagcaatctccggtcaaaaaccgctgat

SEQ ID NO: 324612 - DNA, 75 bp, synthetic construct
  source 1..75: mol_type = other DNA
atggaaaacgcccatctggtgctttccgccgccagctttgctgaaagcgacggtacggtgatcaacaacgaaggt

SEQ ID NO: 324613 - DNA, 75 bp, synthetic construct
  source 1..75: mol_type = other DNA
gcggcatttatactccggctctgcgtgaaatcgaatcttacgatgcggtactggtgctgggcgaagacgttaccc

SEQ ID NO: 324614 - DNA, 75 bp, synthetic construct
  source 1..75: mol_type = other DNA
gggcgtaggaacccgtttaatcagtacaaggcgacacaggcgcgcccagcgtctttttttgtgtcattccatcgc

SEQ ID NO: 324615 - DNA, 75 bp, synthetic construct
  source 1..75: mol_type = other DNA
gaacctgagctgcaaagcaaaatcgacgtcatcgtgcaggctctggcgggtgcgaagaaaccgttgattatctcc

SEQ ID NO: 324616 - DNA, 75 bp, synthetic construct
  source 1..75: mol_type = other DNA
gtatgccgcagccgtatatcaaactcaacccggcagatgccgcgaagttgggcgtgaatgcgggtactcgcgtct

SEQ ID NO: 324617 - DNA, 75 bp, synthetic construct
  source 1..75: mol_type = other DNA
atggaaaacgcccatctggtgctttccgctgccagctttgctgaaagcgacggtacggtaattaataatgaaggt

SEQ ID NO: 324618 - DNA, 75 bp, synthetic construct
  source 1..75: mol_type = other DNA
ctcgacctgacgagtggcaagtgtacatgcttgatgtcgggcaagggctggcaatggtcattgcgcgaaacggca

SEQ ID NO: 324619 - DNA, 75 bp, synthetic construct
  source 1..75: mol_type = other DNA
atgttatggatccgaagtccgttaaactgggaacatcatcagccctgtgtgcgtggcgaagcgtggcaatggcaa

SEQ ID NO: 324620 - DNA, 75 bp, synthetic construct
  source 1..75: mol_type = other DNA
atggtttcttgccgaccggtctttggctttacttttctggggttaaagagtttgccggaagggtggatcaacatt

SEQ ID NO: 324621 - DNA, 75 bp, synthetic construct
  source 1..75: mol_type = other DNA
gccgttaaagagcgtgctgcccgtactggccgcaacccgcagaccggtaaagagatcaccatcgctgccgctaaa

SEQ ID NO: 324622 - DNA, 75 bp, synthetic construct
  source 1..75: mol_type = other DNA
atcgccactgccagccagggctatgattcgcgtgcaccttataaaacgggtgccgggattagcctcctgaaaaca

SEQ ID NO: 324623 - DNA, 75 bp, synthetic construct
  source 1..75: mol_type = other DNA
caacaactgattatcccctggctccactggcataatcttgaaccggaaggcgttattttgagtcatgaacatctg

SEQ ID NO: 324624 - DNA, 75 bp, synthetic construct
  source 1..75: mol_type = other DNA
gcctatgaagcacgcctggcacgctgccgtcatgcgctggaaaaaatcgaaaacaggatagcgcgtttaactcgc

SEQ ID NO: 324625 - DNA, 75 bp, synthetic construct
  source 1..75: mol_type = other DNA
atgaacaacgaagacagcaccaggaaaacatccacaggtatgcatctgtgcttctctcccctctccggaaaaatt

SEQ ID NO: 324626 - DNA, 75 bp, synthetic construct
  source 1..75: mol_type = other DNA
tttgtttaacgctgttgatattcacctggctcacacgaaactcgctttgcgagttgcggatgaaagacggaacaa

SEQ ID NO: 324627 - DNA, 75 bp, synthetic construct
  source 1..75: mol_type = other DNA
cccattgttttgtgcatattaatagtttgtttaacgctgttgatattcacctggctcacacgaaactcgctttgc

SEQ ID NO: 324628 - DNA, 75 bp, synthetic construct
  source 1..75: mol_type = other DNA
cgataaacggactacttccttcctacctggcagataatggagttaatacagtggtcatttcaactctgatgacaa

SEQ ID NO: 324629 - DNA, 75 bp, synthetic construct
  source 1..75: mol_type = other DNA
tttgttggtgataagattggtgtaaaaaaagcctttgtagtcggtctaataacttcatttattttcctttgtcct

SEQ ID NO: 324630 - DNA, 75 bp, synthetic construct
  source 1..75: mol_type = other DNA
tcaaaggcagcgaaagcggaactgaaaaagacgctgctgccggatttttccggctggattgacggcacgctcgag

SEQ ID NO: 324631 - DNA, 75 bp, synthetic construct
  source 1..75: mol_type = other DNA
ggagaacaccaagcccagggataaaaataaactccgtagcggctggacaaataccactgctgagtttgagtggat

SEQ ID NO: 324632 - DNA, 75 bp, synthetic construct
  source 1..75: mol_type = other DNA
taatcttgatcttggcgcagtatacgctgaaaaggataaaaaatgggagtttaatgtaaaggaaagtaacatcaa

SEQ ID NO: 324633 - DNA, 75 bp, synthetic construct
  source 1..75: mol_type = other DNA
ataaatttagaaattatccactgactagcgtggtggtagctctaagcatagggttaacgcttggttttattattg

SEQ ID NO: 324634 - DNA, 75 bp, synthetic construct
  source 1..75: mol_type = other DNA
ataatgcggcacgtcacattttttcacgctatttgttggagaacaaacatttattttatcaatattttaaaattt

SEQ ID NO: 324635 - DNA, 75 bp, synthetic construct
  source 1..75: mol_type = other DNA
cttggtattataaagcgtatcaagaaaaaaggcgtgaaagtaattatttatgagccgcttatttctggagataca

SEQ ID NO: 324636 - DNA, 75 bp, synthetic construct
  source 1..75: mol_type = other DNA
gcgtggccttcacctctacccgtgcggcacgagaatggctgattctgaacatggcgggactggagcgtgaagagt

SEQ ID NO: 324637 - DNA, 75 bp, synthetic construct
  source 1..75: mol_type = other DNA
tggaccgggagatattttatggagtaagagatgctgcaaaaaataaaacgggaaagagaattattgaggacgcaa

SEQ ID NO: 324638 - DNA, 75 bp, synthetic construct
  source 1..75: mol_type = other DNA
actggtgaacgcggtgatctccagctctaacgccattgtgggccgcttccattatgagtacgagggtgactggtc

SEQ ID NO: 324639 - DNA, 75 bp, synthetic construct
  source 1..75: mol_type = other DNA
atggctcgttcttttaaagtgttatcgccaacggcaatcctcgggtatggattcccggaagagagcttccgtaaa

SEQ ID NO: 324640 - DNA, 75 bp, synthetic construct
  source 1..75: mol_type = other DNA
ataatcagtaaatatgacaaaagtctggaccgggagatattttatggagtaagagatgctgcaaaaaataaaacg

SEQ ID NO: 324641 - DNA, 75 bp, synthetic construct
  source 1..75: mol_type = other DNA
caagtcaaaagattacgccaccgactcgctgtaattgatgcagcaagctgtcttgctgatatcgatatgccaggt

SEQ ID NO: 324642 - DNA, 75 bp, synthetic construct
  source 1..75: mol_type = other DNA
ggggcaggtggtaactacgaccagcggctggaccagctactggggcatgaagttacgtctgtggcgggcagccat

SEQ ID NO: 324643 - DNA, 75 bp, synthetic construct
  source 1..75: mol_type = other DNA
tcagcggttctaagcatgaagaaacgccgtatgccctgaaactggaaggtgcgcgacgggtgggcttccgctgtc

SEQ ID NO: 324644 - DNA, 75 bp, synthetic construct
  source 1..75: mol_type = other DNA
cgaaacatccgcagccgcgcatacgctgtatgagaaatcggacccgtacttcctgccgggaccaggtggtgttct

SEQ ID NO: 324645 - DNA, 75 bp, synthetic construct
  source 1..75: mol_type = other DNA
tcaatcacgcgtcaattacagaccgggcggatgggaagcgctcaacgtggcatacgcagcagttcacacgggcaa

SEQ ID NO: 324646 - DNA, 75 bp, synthetic construct
  source 1..75: mol_type = other DNA
attcccggaagagagcttccgcaaagcgatggcagaatcgcccgatctgatcgccgttgatgcaggctcttccga

SEQ ID NO: 324647 - DNA, 75 bp, synthetic construct
  source 1..75: mol_type = other DNA
cgaaacgtcagcggctgcacacacactgtatgagaaatccgatccctacttcctgccaggacctggcggcgtgtt

SEQ ID NO: 324648 - DNA, 75 bp, synthetic construct
  source 1..75: mol_type = other DNA
ttcagactgtgcaatgggtatcattgacgacaacggctttacgctgaagacatttaatccacagcgtaaatttac

SEQ ID NO: 324649 - DNA, 75 bp, synthetic construct
  source 1..75: mol_type = other DNA
aagatgataaaatgaatatcatcgtcgatgctgatacagaacaatttatccctttaggttcttgcttacctcctg

SEQ ID NO: 324650 - DNA, 75 bp, synthetic construct
  source 1..75: mol_type = other DNA
tggatatccgtgtccttgaccacctgattgtcggcggcaggcaaatctattcgttcgcagaacacggtctgctgt

SEQ ID NO: 324651 - DNA, 75 bp, synthetic construct
  source 1..75: mol_type = other DNA
acaacgcacggtaaaacgcgccttaacgctgcttgaccgacacctgcgcgaaacaggcgtggcattcacctccac

SEQ ID NO: 324652 - DNA, 75 bp, synthetic construct
  source 1..75: mol_type = other DNA
tggctccggtactcccactaagcgcacaacgcactgtgcaacatgccctggccctgcttgaccgccacctgcgcg

SEQ ID NO: 324653 - DNA, 75 bp, synthetic construct
  source 1..75: mol_type = other DNA
gccctgtaccacaatgccgctgccgtggtgctggcgcacaatcacccgtccggtgaagtcacccccagcaaggca

SEQ ID NO: 324654 - DNA, 75 bp, synthetic construct
  source 1..75: mol_type = other DNA
atcggagaaaaaaaccgcttgatcgccaccagcaaaaatggctatgattcccacgcacctcataaaacgggtgtc

SEQ ID NO: 324655 - DNA, 75 bp, synthetic construct
  source 1..75: mol_type = other DNA
gcgagatgacgccacaggaccggcgtctcatccagcgggcactcagggctctggaccgacacctgcatgagcccg

SEQ ID NO: 324656 - DNA, 75 bp, synthetic construct
  source 1..75: mol_type = other DNA
tggtggagatccgggtgctcgaccaccttatcgtcggtggtacgcagatattgtcgttcgctgaacatggtctgc

SEQ ID NO: 324657 - DNA, 75 bp, synthetic construct
  source 1..75: mol_type = other DNA
ggcagaccgccttatcacggaacgtctggtacaggcactgggcctggtggatatccgggtgccggaccatctgat

SEQ ID NO: 324658 - DNA, 75 bp, synthetic construct
  source 1..75: mol_type = other DNA
aacgctgtccggaccgggacagactcgctggcacttgccattaccatttaccagcgtgacggcaatattcacaac

SEQ ID NO: 324659 - DNA, 75 bp, synthetic construct
  source 1..75: mol_type = other DNA
aaaggcaaagcgaagcagacactgaactttaaagcctggctggtcggcgcagctgatgcgccagacttaggtaat

SEQ ID NO: 324660 - DNA, 75 bp, synthetic construct
  source 1..75: mol_type = other DNA
aaagcggcatgggtattgaccagaaaatagtgaaagacacttctaccaataaaggcaaagcgaagcagacactga

SEQ ID NO: 324661 - DNA, 75 bp, synthetic construct
  source 1..75: mol_type = other DNA
atgggtgatatcggtgccgaaaaactgaaaaataacggcaccaccacgccgaaaaatttccagattcgcctgcaa

SEQ ID NO: 324662 - DNA, 75 bp, synthetic construct
  source 1..75: mol_type = other DNA
tgaacataatctgtcgcgagtgccggaagagtgaggttatgcagcgcgtgttggcgttttatcaggggaaatttc

SEQ ID NO: 324663 - DNA, 75 bp, synthetic construct
  source 1..75: mol_type = other DNA
atggcaaaagtatttacacaagaagagcgggaaaaaattaaggtacaggttgttgaacttgtgcgtctgagcggg

SEQ ID NO: 324664 - DNA, 75 bp, synthetic construct
  source 1..75: mol_type = other DNA
gcccgcaaaaaactatcgagggcaaaggcgaagaaaccggttgtggttgatccggaccttatctggtcattacca

SEQ ID NO: 324665 - DNA, 75 bp, synthetic construct
  source 1..75: mol_type = other DNA
cgcgagacgttacgacaacttgaagctaagacaggtgcgacaagatatttaatgagcgttctcgccagagagctg

SEQ ID NO: 324666 - DNA, 75 bp, synthetic construct
  source 1..75: mol_type = other DNA
gacggcgaaatgcgccgctacgacaggcaccagaacataatttgtcgtgagagcaggaggagcgaagttatgcag

SEQ ID NO: 324667 - DNA, 75 bp, synthetic construct
  source 1..75: mol_type = other DNA
gttgccagtggcgatgtatacaattctggctacgggttattcccgtctgaacaggctcgtaaggactggcaaaac

SEQ ID NO: 324668 - DNA, 75 bp, synthetic construct
  source 1..75: mol_type = other DNA
gtcgtctaaacataatctgtcgcgagtgccggaagagcgaagttatgcagcgtatactaacgttctattggggaa

SEQ ID NO: 324669 - DNA, 75 bp, synthetic construct
  source 1..75: mol_type = other DNA
tgacccaaactcaaaggaaaagattaaaatacttacagacacttctaaattaatttatgatttattcggggttaa

SEQ ID NO: 324670 - DNA, 75 bp, synthetic construct
  source 1..75: mol_type = other DNA
gtgccggaagagcgaagttatgcagcgcattatggcattttatcagggaaatgttaggtattttagacgttacta

SEQ ID NO: 324671 - DNA, 75 bp, synthetic construct
  source 1..75: mol_type = other DNA
tgaacataatctgccgtgagtgccggaaaagcaaggttatgcagcgtgtgctggcgttctatcagggtaattttc

SEQ ID NO: 324672 - DNA, 75 bp, synthetic construct
  source 1..75: mol_type = other DNA
atgtttgtagaaaataacctgaaggccgatcctgataatcagggatgggttctgggttgggctgtagtacgtgac

SEQ ID NO: 324673 - DNA, 75 bp, synthetic construct
  source 1..75: mol_type = other DNA
tccggaccttatctggtcattacctgacggagaaattcgtcgctacgatagtcgccataacatggtttgtcgcga

SEQ ID NO: 324674 - DNA, 75 bp, synthetic construct
  source 1..75: mol_type = other DNA
gatgagcgttctggccagagagctggttgccagtggcgatgtatacaattctggctacgggttattcccgtctga

SEQ ID NO: 324675 - DNA, 75 bp, synthetic construct
  source 1..75: mol_type = other DNA
tgatggaaagtattcgccagggagatgtcgattttggcatcgtcatcgatccaggcccagtgggcgatctgcaat

SEQ ID NO: 324676 - DNA, 75 bp, synthetic construct
  source 1..75: mol_type = other DNA
atgaagtaaaattaactcctgccgctgaatttatcagtaacagtatcaatatcgttatgacaggcaaaggcgggg

SEQ ID NO: 324677 - DNA, 75 bp, synthetic construct
  source 1..75: mol_type = other DNA
ctaatgctgatgctaaactgcatccagtagcggcatttatcacaaacagcattaacgttgtcatgacgggtaaag

SEQ ID NO: 324678 - DNA, 75 bp, synthetic construct
  source 1..75: mol_type = other DNA
attcgtaacacgacaggtttctgcttacctcagaaccccgagttaatatattgttgggagcaactaaaaacatct

SEQ ID NO: 324679 - DNA, 75 bp, synthetic construct
  source 1..75: mol_type = other DNA
gttgataataatcagataatattatttccctgtggatatgaattttatattgcgaattatccagaagcaggtctt

SEQ ID NO: 324680 - DNA, 75 bp, synthetic construct
  source 1..75: mol_type = other DNA
gatgggatgatacaaaactaaaacatgcgttccttcagacccaggttaagatgaagaagctgaaccgccccggga

SEQ ID NO: 324681 - DNA, 75 bp, synthetic construct
  source 1..75: mol_type = other DNA
atgagtcaggttagcctgtcgcaacaactgaaagagggaaatctcttcgctgaacagtgtccgtcgcgcgaggtt

SEQ ID NO: 324682 - DNA, 75 bp, synthetic construct
  source 1..75: mol_type = other DNA
cacgccgctgggcgagcaggtgagcgaaaaggttgctgcactggcggactggattgagttgaatttgcccgaggt

SEQ ID NO: 324683 - DNA, 75 bp, synthetic construct
  source 1..75: mol_type = other DNA
gaaaaggttgctgcactggcggactggattgagttgaatttgcctgaggtgttggcggtgcgggatgaacgtgcg

SEQ ID NO: 324684 - DNA, 75 bp, synthetic construct
  source 1..75: mol_type = other DNA
aaaaacgcagctactgtcagtttgattcgaagctggcgcagatagtccagcagcaggggcgcaacggtcagctgc

SEQ ID NO: 324685 - DNA, 75 bp, synthetic construct
  source 1..75: mol_type = other DNA
ggcgcctgaatataatctgtcgcgagtgccggaagagtgaagctatgcagcgtgtactggctttctatcagggta

SEQ ID NO: 324686 - DNA, 75 bp, synthetic construct
  source 1..75: mol_type = other DNA
aggttgttgaacttgtacgtctgagcggtcgcgagacgttgcggcaactggaagccaggacaggtgcgacaagat

SEQ ID NO: 324687 - DNA, 75 bp, synthetic construct
  source 1..75: mol_type = other DNA
gacgacagaacataatctgtcgcgagtgccggagaagtgaagttatgcagcgagttttgatgttttacaggggta

SEQ ID NO: 324688 - DNA, 75 bp, synthetic construct
  source 1..75: mol_type = other DNA
gctacgacaggcgcctgaatataatctgtcgcgagtgccggaagagcgaagctatgcagcgtgtactggcatttt

SEQ ID NO: 324689 - DNA, 75 bp, synthetic construct
  source 1..75: mol_type = other DNA
caggaataccatagtggagtttattctcgataacaaatatgattttgaaaacctaatttgccattgggataaatt

SEQ ID NO: 324690 - DNA, 75 bp, synthetic construct
  source 1..75: mol_type = other DNA
tacgtcgctacgacagtcgcctaaacataatctgtcgcgagtgccggatgagtgaagttatgcagcgcatactgg

SEQ ID NO: 324691 - DNA, 75 bp, synthetic construct
  source 1..75: mol_type = other DNA
gtggcaaaagtttttacacaagaagagcgggaaaaaattaaagggcaggttgttgagctcgtacgccggagtggg

SEQ ID NO: 324692 - DNA, 75 bp, synthetic construct
  source 1..75: mol_type = other DNA
gtggcaaaagtttttacacaagaagagcgggaaaaaattaaagggcaggttgttgacctggtacgccggagtggg

SEQ ID NO: 324693 - DNA, 75 bp, synthetic construct
  source 1..75: mol_type = other DNA
taactcaattcaagagttcctttgtataaactcactcaagaaaggtgtaattcctaaagagtattacataatcga

SEQ ID NO: 324694 - DNA, 75 bp, synthetic construct
  source 1..75: mol_type = other DNA
aagggcgggactcgcacaacctgaataaagcgggtatgaaaaaccagttgatcgccactgccagccagggctatg

SEQ ID NO: 324695 - DNA, 75 bp, synthetic construct
  source 1..75: mol_type = other DNA
tccgtcacaacctcattatgccggataactttggccgtactgctgccacagtgctgaccgaagaaatctgcaacc

SEQ ID NO: 324696 - DNA, 75 bp, synthetic construct
  source 1..75: mol_type = other DNA
acggttctgctcccgcgatattcggggtgattacttacatcattaatgatgcgaggaacgcggagtttgatgatt

SEQ ID NO: 324697 - DNA, 75 bp, synthetic construct
  source 1..75: mol_type = other DNA
tctatagcattaacaattcactgggggagttctgtaatcgtagctctctattttattgctatttatttatcgaag

SEQ ID NO: 324698 - DNA, 75 bp, synthetic construct
  source 1..75: mol_type = other DNA
agcgggaaaaaattaaaaggcaggtggtggaactcgtgcgccagagcggtcgtgagacgttacggcaactggaag

SEQ ID NO: 324699 - DNA, 75 bp, synthetic construct
  source 1..75: mol_type = other DNA
gttacgggttattcccatctgaacaggctcgtaaggactggcaaaacgcccgcaaaaaaactatcgagggcaaaa

SEQ ID NO: 324700 - DNA, 75 bp, synthetic construct
  source 1..75: mol_type = other DNA
cagggtatggaatattcccttcagcgcaggcacgtaaggactggataaaagccatcgaaaagatgtcgaaagcaa

SEQ ID NO: 324701 - DNA, 75 bp, synthetic construct
  source 1..75: mol_type = other DNA
aatggctggatctgaatgtgctggcggaactgaacggcccggaggcgaaatgtccaccactggcgatggccgtgg

SEQ ID NO: 324702 - DNA, 75 bp, synthetic construct
  source 1..75: mol_type = other DNA
ccaagacaggtgcgacaagatatctgatgagcgttctcgccagagagcttgttgccagtggcgatgtatacaact

SEQ ID NO: 324703 - DNA, 75 bp, synthetic construct
  source 1..75: mol_type = other DNA
cggatattgtcgttttatcagggggatgttcggtatttttttgaagtgacgagattaaagtgcattagttcagat

SEQ ID NO: 324704 - DNA, 75 bp, synthetic construct
  source 1..75: mol_type = other DNA
gttgccagtggcggtgtatacaattctggctacgggttattcccgtctgaacaggctcgtaaagactggcaaaac

SEQ ID NO: 324705 - DNA, 75 bp, synthetic construct
  source 1..75: mol_type = other DNA
tcgtgctgtggggaatggtgttactgctggtgctgtggtcggtgtttatcagtccgtctggcgtgctgagatggg

SEQ ID NO: 324706 - DNA, 75 bp, synthetic construct
  source 1..75: mol_type = other DNA
cggtttgcccacagtatggcgacggtgcgtcgccgggcgggcgtaaacgtcccctggcttctctggagcgggctg

SEQ ID NO: 324707 - DNA, 75 bp, synthetic construct
  source 1..75: mol_type = other DNA
aactggaaggtcagctcgccacgctgcgccagcgttgtgtcccggtggcgcagttcagcacgttaagcgcccgtt

SEQ ID NO: 324708 - DNA, 75 bp, synthetic construct
  source 1..75: mol_type = other DNA
atggcaaaagtatttacacaagaagagcgggaaaaaatcaaggggcaggttgttgaactcgtgcgccagagtggg

SEQ ID NO: 324709 - DNA, 75 bp, synthetic construct
  source 1..75: mol_type = other DNA
ggtgatcgttctcgccagagagctggttgccagtggtgatgtatacaactctggctacgggttatttccgtctga

SEQ ID NO: 324710 - DNA, 75 bp, synthetic construct
  source 1..75: mol_type = other DNA
tgtgtttttaattgagcaaataaatgatctcaaaatgtgggtcaataagtatattgacgattgcactgatgagga

SEQ ID NO: 324711 - DNA, 75 bp, synthetic construct
  source 1..75: mol_type = other DNA
accgggctatttttcatttcgcgattaatagtatatgtaatcccgaggataataaagatgcgacgcccatagaac

SEQ ID NO: 324712 - DNA, 75 bp, synthetic construct
  source 1..75: mol_type = other DNA
aaaacaggttagcgcgtttaacccgctagcaatggagagaatatgtcactggaaaatgcccctgacgatgtcaaa

SEQ ID NO: 324713 - DNA, 75 bp, synthetic construct
  source 1..75: mol_type = other DNA
gggtagccgaagagcagccagcacaatctgaagcaccggatgtgctaaccagggaggtcgaacgaaaagttaccg

SEQ ID NO: 324714 - DNA, 75 bp, synthetic construct
  source 1..75: mol_type = other DNA
accatcgttcactgaaacgcgatctgatgatttgattttgccatcgctgcatttggcaaaccgcgaactgcgtcg

SEQ ID NO: 324715 - DNA, 75 bp, synthetic construct
  source 1..75: mol_type = other DNA
aggcctttcctcagccagcaggtgttgcgttaccagtacaggaagcggcaacacaggaagatattaaaacagaaa

SEQ ID NO: 324716 - DNA, 75 bp, synthetic construct
  source 1..75: mol_type = other DNA
aatggtccgcccgggatgagaaccatccggtgccggaaagtgttacccgtcgcctggctgatgcggcgaaagtcc

SEQ ID NO: 324717 - DNA, 75 bp, synthetic construct
  source 1..75: mol_type = other DNA
gatggtctgattttaccatcgctgcatgtggctaaccgcgagctgcgccgggcaaaaggtcaggttcagaagtgg

SEQ ID NO: 324718 - DNA, 75 bp, synthetic construct
  source 1..75: mol_type = other DNA
ggcggtggtaaccgcaacgggacgcctggcacgcgtaaatcagaacggtaaatttcgttactgcatgccgggcga

SEQ ID NO: 324719 - DNA, 75 bp, synthetic construct
  source 1..75: mol_type = other DNA
ctgacatgatgattgagtttatcgctcaggagggggctaaaacctgtgaagaaatagcgggtaagttcggagtta

SEQ ID NO: 324720 - DNA, 75 bp, synthetic construct
  source 1..75: mol_type = other DNA
cgctggcaatggcaatcagcaaaggacgcctgattcgcgtaaaccagaacggtaaatttcgttactgcatgccgg

SEQ ID NO: 324721 - DNA, 75 bp, synthetic construct
  source 1..75: mol_type = other DNA
gtgacgaaaatttcggagagcgatttaacttcgacgattgaacaacgtggcccacaaacggcggatgaactggct

SEQ ID NO: 324722 - DNA, 75 bp, synthetic construct
  source 1..75: mol_type = other DNA
gattacctcgcgccgggcgaattcatcgctggccatggcaatcagcaaagggcgtctgattcgcgtgaatcaggg

SEQ ID NO: 324723 - DNA, 75 bp, synthetic construct
  source 1..75: mol_type = other DNA
gtcgcgaaaataccggagtgcgatttaaccgcgacgattgaacaacgtggtccactaactgcggatgaactggct

SEQ ID NO: 324724 - DNA, 75 bp, synthetic construct
  source 1..75: mol_type = other DNA
tcgtttactgaaacgcgagcggatgacctggttttaccatcgctgcatatggcaaaccgcgaactgcgtcgggcg

SEQ ID NO: 324725 - DNA, 75 bp, synthetic construct
  source 1..75: mol_type = other DNA
atggggaaggaatgcaataatgaatacaccagtaaagcaaaagccgcattacctgataatgactctcttatgatg

SEQ ID NO: 324726 - DNA, 75 bp, synthetic construct
  source 1..75: mol_type = other DNA
agtttcctagcaattactccaataataatgtagaacacaagcctcataacatattgaaatatataaataatttca

SEQ ID NO: 324727 - DNA, 75 bp, synthetic construct
  source 1..75: mol_type = other DNA
atgccgaatatacagatgaaaacgcagctatgctggcggaaaaatttcataaaatgagccaattcattaatacac

SEQ ID NO: 324728 - DNA, 75 bp, synthetic construct
  source 1..75: mol_type = other DNA
acggattcaaatactctgacttcacacctgcgcgtaagcttagattcgacaggaaaactattagaatgattgaac

SEQ ID NO: 324729 - DNA, 75 bp, synthetic construct
  source 1..75: mol_type = other DNA
caccgtgccggacagcaacgactggccgccgttcatcgggccatgcagcagggggccgcgaatgattactggttt

SEQ ID NO: 324730 - DNA, 75 bp, synthetic construct
  source 1..75: mol_type = other DNA
aaatgctgcagcagataatcaacgcgagcagtcgtccgggagacctggttgcagatttttttatgggttcaggtt

SEQ ID NO: 324731 - DNA, 75 bp, synthetic construct
  source 1..75: mol_type = other DNA
ggcgttataccgacgaggacggaacagaaaaacatttccttgatcctgatttgatggtgcttggcaatacggctc

SEQ ID NO: 324732 - DNA, 75 bp, synthetic construct
  source 1..75: mol_type = other DNA
atctggtaaggccatcccgggaaacatttattcgcagtgagtttctccatcaactgtcggaggacaaacatttta

SEQ ID NO: 324733 - DNA, 75 bp, synthetic construct
  source 1..75: mol_type = other DNA
gtatgatgaggtgtttgagtcttttgaaggtgccgaatcgtttgctcaacatctctcatacgatgtgttcgaact

SEQ ID NO: 324734 - DNA, 75 bp, synthetic construct
  source 1..75: mol_type = other DNA
ggctatctcggcgtgcgaacccttgacggctttgcccgttacagcaaatcaagtcgtcacaaaatatctgcgggg

SEQ ID NO: 324735 - DNA, 75 bp, synthetic construct
  source 1..75: mol_type = other DNA
ttagaaaccgatcaagctgagctatatattcctgactatcaaagggagtttgtttggaacaatatacaaaaatca

SEQ ID NO: 324736 - DNA, 75 bp, synthetic construct
  source 1..75: mol_type = other DNA
ttagaaaccgaccaagcagaactatacatacctgattatcaaagggaatttgtttggagcaatgttcaaaaatca

SEQ ID NO: 324737 - DNA, 75 bp, synthetic construct
  source 1..75: mol_type = other DNA
tgctcgaatcaatcgaggagaatatcctgaattagttcttagatatttcgcatattgtgataactatctccactt

SEQ ID NO: 324738 - DNA, 75 bp, synthetic construct
  source 1..75: mol_type = other DNA
agtacaggaggctgcaacacaggaagatattaaaacagaaacggtggtggacattgtgcaatcgctgccatcgtt

SEQ ID NO: 324739 - DNA, 75 bp, synthetic construct
  source 1..75: mol_type = other DNA
aagcactgaaaagagcctcttcacatgtggtggcagctcgccttggaatcagtcgtgaagaggctgtcaacgagc

SEQ ID NO: 324740 - DNA, 75 bp, synthetic construct
  source 1..75: mol_type = other DNA
ggggctaaaacgtgtgaggaactggcgggtaagttcggtgtcagtactcgcaaggttgcttccacgctggcggtg

SEQ ID NO: 324741 - DNA, 75 bp, synthetic construct
  source 1..75: mol_type = other DNA
acgacaaaacatcatcaaaaatgagaaaataccttcagagcatcaacgagtgcatgctccttataaaaaatatag

SEQ ID NO: 324742 - DNA, 75 bp, synthetic construct
  source 1..75: mol_type = other DNA
aatcagcaaaggtcgcctgattcgcgtaaatcagaacggtaaatttcgttactgcatgccggacgataatttacc

SEQ ID NO: 324743 - DNA, 75 bp, synthetic construct
  source 1..75: mol_type = other DNA
atggaaaccgtattgcatgcactgaaagcgatgggaaaagccaattctgttgaactggcggcgcggcttgatatc

SEQ ID NO: 324744 - DNA, 75 bp, synthetic construct
  source 1..75: mol_type = other DNA
gtgtggcggtcacagtgcagtcacagccgttgttcaccagaaaacatccggatggtctgattttaccatcgctgc

SEQ ID NO: 324745 - DNA, 75 bp, synthetic construct
  source 1..75: mol_type = other DNA
tattgccgaccacaccagtattgaattagtttataaaatatgtgctttcctgccacttcttgggatgttgaccat

SEQ ID NO: 324746 - DNA, 75 bp, synthetic construct
  source 1..75: mol_type = other DNA
atcctcgcttcggcattctctgccattctggtctacgctcaggagctacttccgggacgtatcggtatggtttct

SEQ ID NO: 324747 - DNA, 75 bp, synthetic construct
  source 1..75: mol_type = other DNA
actggcaacgaaacctacatttctgccattaagtcttttctcgacaggcatgaaggaacgaaagcctttcagtgg

SEQ ID NO: 324748 - DNA, 75 bp, synthetic construct
  source 1..75: mol_type = other DNA
aacagccagcgccggcagaactgccggaagaaactaccacggcaacagtcgcgaaaatttcagagagcgatttaa

SEQ ID NO: 324749 - DNA, 75 bp, synthetic construct
  source 1..75: mol_type = other DNA
ggcctgtgggggacagaattggtagaaaatatgtaatttggggttctatcctcggcgttgcgccgtttaccttga

SEQ ID NO: 324750 - DNA, 75 bp, synthetic construct
  source 1..75: mol_type = other DNA
cggcgggcgtcatggcctggcgcaatctatctttcaggtcggcggcaactttggcagttccctgggccccttgct

SEQ ID NO: 324751 - DNA, 75 bp, synthetic construct
  source 1..75: mol_type = other DNA
ggtaaagcctttcctcagccagcaggtgttgcgttaccagtacaggaagctgcaacacaggaagatattaaaaca

SEQ ID NO: 324752 - DNA, 75 bp, synthetic construct
  source 1..75: mol_type = other DNA
taatttaccagcagagccgaaagctgcattggtagcggaaactgatggtaaagcctttcctcagccagcaagtgt

SEQ ID NO: 324753 - DNA, 75 bp, synthetic construct
  source 1..75: mol_type = other DNA
aagcctttcctcagccagcaggtgttgcgttaccagtacaggaagttgcaacacaggaagatattaaaacagaaa

SEQ ID NO: 324754 - DNA, 75 bp, synthetic construct
  source 1..75: mol_type = other DNA
atgtggctaaccgcgagctgcgccgggcaaaaggtcaggttcagaagtgggagcgagtctgcgccgcgctgcggg

SEQ ID NO: 324755 - DNA, 75 bp, synthetic construct
  source 1..75: mol_type = other DNA
aggaacagccagcgccagaagaacagccggaagaaaccaccacggcgacagttgcgaaaatctcaaagtgcgatt

SEQ ID NO: 324756 - DNA, 75 bp, synthetic construct
  source 1..75: mol_type = other DNA
ctgtggcggacatggtgcagtcgttaccatcgctcaccgaaacgcaaggggatgacctgattttaccatcgctgc

SEQ ID NO: 324757 - DNA, 75 bp, synthetic construct
  source 1..75: mol_type = other DNA
acacaggaaaatattaaaacagaaactgtagcggacattgtgcagtcgctgccatcgttcactgaaacacgagct

SEQ ID NO: 324758 - DNA, 75 bp, synthetic construct
  source 1..75: mol_type = other DNA
aatcagcaaggggcgtctgattcgcgtaaatcagaacggtaaatttcgttactgcatgccgggcgataatttacc

SEQ ID NO: 324759 - DNA, 75 bp, synthetic construct
  source 1..75: mol_type = other DNA
cgtattgtgtcggaaaagtgattgccgggggcgcttatggcaaaagtatttacacaagaagagcgggaaaaaatt

SEQ ID NO: 324760 - DNA, 75 bp, synthetic construct
  source 1..75: mol_type = other DNA
gccggaagaaaccaccacggcaacagtgacgaaaatttcggagagcgatttaaccacgacgatagagcaacgtgg

SEQ ID NO: 324761 - DNA, 75 bp, synthetic construct
  source 1..75: mol_type = other DNA
gaaactgtggcggacattgtgcagccgttgccatcgtttaccgaaacgcaagcagatgagctgatttttccgtcc

SEQ ID NO: 324762 - DNA, 75 bp, synthetic construct
  source 1..75: mol_type = other DNA
aatttcgctactgcatgccgggcggtaatttaccagcagagccgaaagctgcattggtagcggaaactgatggta

SEQ ID NO: 324763 - DNA, 75 bp, synthetic construct
  source 1..75: mol_type = other DNA
atggaaaccgtattgcatgcactgaaagcaatgggaaaagccacgtcggtggaactggctacgcgacttgatatc

SEQ ID NO: 324764 - DNA, 75 bp, synthetic construct
  source 1..75: mol_type = other DNA
ggcatcccttgaggaagccggacagcgtgaaaagctggcacaaagcatcatcagtaagcgtcgggcaacagaaca

SEQ ID NO: 324765 - DNA, 75 bp, synthetic construct
  source 1..75: mol_type = other DNA
tcgctgccgctgatgccggatgttttgccacctacatagagaaacagggcggcgtacttgttccacgcaaagact

SEQ ID NO: 324766 - DNA, 75 bp, synthetic construct
  source 1..75: mol_type = other DNA
ctctttcctgcgcaagaagcaggaagccgatcgtcagaaaggcaaaaagagctggcaggcggaacgctacgcgcg

SEQ ID NO: 324767 - DNA, 75 bp, synthetic construct
  source 1..75: mol_type = other DNA
acttatcaaacaccatcttttcaaatggagaaattaataatctcttcattaaaaaaagcaacatatttggagcat

SEQ ID NO: 324768 - DNA, 75 bp, synthetic construct
  source 1..75: mol_type = other DNA
atggcgggactggagcgtgaagaattccgggtgctgtatctgaacaaccagaatcaactgattgccggtgaaacc

SEQ ID NO: 324769 - DNA, 75 bp, synthetic construct
  source 1..75: mol_type = other DNA
ggctgacaccgggttatcgctcccttgccggacgcgaacgcctggatgatttgctttacctgccgcagctcaaca

SEQ ID NO: 324770 - DNA, 75 bp, synthetic construct
  source 1..75: mol_type = other DNA
cgcattatgacgcactgacaacagacaaagaccggaagagcgaaccggacacggagctgctgtcgggtgcaatcc

SEQ ID NO: 324771 - DNA, 75 bp, synthetic construct
  source 1..75: mol_type = other DNA
aacatccccctatctgagtcaggacgcattaagtgaatttcgcgcacagcgcgagaaaacacgcgatttcctgaa

SEQ ID NO: 324772 - DNA, 75 bp, synthetic construct
  source 1..75: mol_type = other DNA
acaccagttaccgtgctttctgacatgctgcgcgccatccgtgacgcagagcacgcacaacgcatcagtgcaacc

SEQ ID NO: 324773 - DNA, 75 bp, synthetic construct
  source 1..75: mol_type = other DNA
actgaacgcgcccaccgcaaagcagacctgctgcgggggcctgaccagtggaaacaaaaaacagacagaaacggg

SEQ ID NO: 324774 - DNA, 75 bp, synthetic construct
  source 1..75: mol_type = other DNA
acaggaaaaacaggacaaagccatcacactggcaagagaagccagaaagcaggcacgcggtgcggtggatgaagc

SEQ ID NO: 324775 - DNA, 75 bp, synthetic construct
  source 1..75: mol_type = other DNA
ccgccgcacgcctagcatccacaattcagcaggaccagaacaccatgaaaactcccgttaccgtgctttctgaca

SEQ ID NO: 324776 - DNA, 75 bp, synthetic construct
  source 1..75: mol_type = other DNA
cagttaaaattggctcgcgagcgattgctttcgttgaaagtgaaattgacgaatggatcaatcagcgtattgccg

SEQ ID NO: 324777 - DNA, 75 bp, synthetic construct
  source 1..75: mol_type = other DNA
tggttttagatccttgcggaaactatctggtgaggattgccataccaaagtacatgcgccatctattcggagggc

SEQ ID NO: 324778 - DNA, 75 bp, synthetic construct
  source 1..75: mol_type = other DNA
ttgttcagagatgctatcgctgttgaatggatacgtttacgggaacaggtcaaaccaagagaagggagtaagatt

SEQ ID NO: 324779 - DNA, 75 bp, synthetic construct
  source 1..75: mol_type = other DNA
acattgacgctatggccgatgagttccgggatcgtattgaagcgacgcaggacgtggataacgccaaagcagttc

SEQ ID NO: 324780 - DNA, 75 bp, synthetic construct
  source 1..75: mol_type = other DNA
atgtgaaagagatcgaaggtgtgctgtgttttgaaatcacacagggaaagacgaaagctgcggcacgtgttgtgc

SEQ ID NO: 324781 - DNA, 75 bp, synthetic construct
  source 1..75: mol_type = other DNA
gcttaaaaactatattgagcttctacgctaccctgaaatagagaaaggcttatcaatcaataaaaaatcaaattt

SEQ ID NO: 324782 - DNA, 75 bp, synthetic construct
  source 1..75: mol_type = other DNA
gaatgccgcctctcctattgagctacagcaatacatcgagctattacgctatccagagattgagaacctgttgac

SEQ ID NO: 324783 - DNA, 75 bp, synthetic construct
  source 1..75: mol_type = other DNA
gttataaaagcaatagatgttgccgatatagtgattagaggaaagagtattgtcaaaaacaggttcgcatgtact

SEQ ID NO: 324784 - DNA, 75 bp, synthetic construct
  source 1..75: mol_type = other DNA
agacgcctgcgccggtggggatttttggccccggctggaaagcgccttctgatatccgcttacagatacgcgatg

SEQ ID NO: 324785 - DNA, 75 bp, synthetic construct
  source 1..75: mol_type = other DNA
caattaaaatcggctctcgttctatcgcttttatcgaaagtgaaatcgacgagtggatcagtcagcgcatcgctg

SEQ ID NO: 324786 - DNA, 75 bp, synthetic construct
  source 1..75: mol_type = other DNA
tcgaaggtatttgtctggcatcgaattcatttgcaataaacattcatagtctgttgtgcgctgcgcaagttttac

SEQ ID NO: 324787 - DNA, 75 bp, synthetic construct
  source 1..75: mol_type = other DNA
gtaaactgacgcggattgtcgtacatgtggatttacagcctattgccgatgagttacatggcgactacatcaatg

SEQ ID NO: 324788 - DNA, 75 bp, synthetic construct
  source 1..75: mol_type = other DNA
tcggagccaatgacggaagctaacttacaacgaaataattatgagggtctctgtctggcaccggattcctttgca

SEQ ID NO: 324789 - DNA, 75 bp, synthetic construct
  source 1..75: mol_type = other DNA
cgtcgctggctgacaccgggttatcgctcccttgccgggcgtgaacgcctggatgatttactttacctgccgcag

SEQ ID NO: 324790 - DNA, 75 bp, synthetic construct
  source 1..75: mol_type = other DNA
tgaactttaaagcctggctggtgggtgaaaccgaagcgccggatctcggccagttcgaaaccctgaccacattcc

SEQ ID NO: 324791 - DNA, 75 bp, synthetic construct
  source 1..75: mol_type = other DNA
ggaatgcaaaaccatgactcctccgttgtgcaactacaacagcgtattgccgggctggagaaacagctcgccgac

SEQ ID NO: 324792 - DNA, 75 bp, synthetic construct
  source 1..75: mol_type = other DNA
cagtccggacgccggtatatcggtatcgagctgcttgaacagtatcaccgtgccggacagcaacggctggcggcc

SEQ ID NO: 324793 - DNA, 75 bp, synthetic construct
  source 1..75: mol_type = other DNA
atgtctgccaaaagacgacttcttattgcgtgtaccctgataacagctatctatcattttcctgcatattcttca

SEQ ID NO: 324794 - DNA, 75 bp, synthetic construct
  source 1..75: mol_type = other DNA
atcggcgatacccatggcaaaggttataaagtgggcgaaaagattgttcagccaatcgtgatggatacttcaacc

SEQ ID NO: 324795 - DNA, 75 bp, synthetic construct
  source 1..75: mol_type = other DNA
cagcaacaactacaccattttcagcaccgaaaccggtatgccatttgagcatgtcagcctggcgatcggtgacga

SEQ ID NO: 324796 - DNA, 75 bp, synthetic construct
  source 1..75: mol_type = other DNA
caccgtgccggacagcaacggctggccgccgtccagcgggccatgcagcagggggccgcgaatgattactggttt

SEQ ID NO: 324797 - DNA, 75 bp, synthetic construct
  source 1..75: mol_type = other DNA
caccgtgccggacagcaacgcctggccgccgtgcagcgggccatgcagcagggggccgcgaatgattactggttt

SEQ ID NO: 324798 - DNA, 75 bp, synthetic construct
  source 1..75: mol_type = other DNA
caccgtgccggacagcaacgtctggccgccgtacatcgggccatgcagcagggggccgcgaatgattactggttt

SEQ ID NO: 324799 - DNA, 75 bp, synthetic construct
  source 1..75: mol_type = other DNA
cagtccggacgccggtatatcggtatcgagctgcttgaacagtatcaccgtgccggacagcaacgcctggccgcc

SEQ ID NO: 324800 - DNA, 75 bp, synthetic construct
  source 1..75: mol_type = other DNA
cagtccggacgccggtatatcggtatcgagctgcttgaacagtatcaccgtgccggacagcaacgactggcagcc

SEQ ID NO: 324801 - DNA, 75 bp, synthetic construct
  source 1..75: mol_type = other DNA
caccgtgccggacagcaacggctggccgccgtgcaccgggccatgcagcagggggccgcgaatgattactggttt

SEQ ID NO: 324802 - DNA, 75 bp, synthetic construct
  source 1..75: mol_type = other DNA
aatgacgcatgtcagactctttgactccgatatgacattctttggcaagatttatggccaatgggataactcatg

SEQ ID NO: 324803 - DNA, 75 bp, synthetic construct
  source 1..75: mol_type = other DNA
ccagttccagttctttggcatcccctcccgtcaggtgtggcgtgaactgcgccgccttgcctgtcagatggcacg

SEQ ID NO: 324804 - DNA, 75 bp, synthetic construct
  source 1..75: mol_type = other DNA
cgaaaatggttttgaccttcagggcggccctgccgccccttggactcgtggcaataactgtccccgtgtacagga

SEQ ID NO: 324805 - DNA, 75 bp, synthetic construct
  source 1..75: mol_type = other DNA
ctggacagccgcgccgtggatggaatcgacccgaaaacgggcaaaccacgcgttgaccacgaaaccggaaaatca

SEQ ID NO: 324806 - DNA, 75 bp, synthetic construct
  source 1..75: mol_type = other DNA
acaggaaaaacaggacaaaaccatcacactggccagagaagccagaaaacaggcacgtggcgcggtggatgaagc

SEQ ID NO: 324807 - DNA, 75 bp, synthetic construct
  source 1..75: mol_type = other DNA
gatacggaactgttaccgggcgcaatccttcgcctgacctgtgcggactggtggaaacgcaaactgtggctgtta

SEQ ID NO: 324808 - DNA, 75 bp, synthetic construct
  source 1..75: mol_type = other DNA
agagcacgcacagagaatcaatgaaaccactaaacatgctcgcaaaaaaatcagtttattgcatcgaacacgata

SEQ ID NO: 324809 - DNA, 75 bp, synthetic construct
  source 1..75: mol_type = other DNA
accttcgagacactctgcgatggctttggcgccagagatggcgagctgaccatggaggtggcgctgaaggcatat

SEQ ID NO: 324810 - DNA, 75 bp, synthetic construct
  source 1..75: mol_type = other DNA
atgagtgagtttgcatggagctggaatgaaccgcagccagctattaatccggatgacttcgcgaacttcagccgg

SEQ ID NO: 324811 - DNA, 75 bp, synthetic construct
  source 1..75: mol_type = other DNA
ttttttgcggcggtccgcaaaaaactgaaccgcgacggcctgcgctggtatggcatccgcacggtggagcctcac

SEQ ID NO: 324812 - DNA, 75 bp, synthetic construct
  source 1..75: mol_type = other DNA
tgtcgacaccacgaccatcgcacaaatcacccgcgaactcgacgcgctgggtgtgcagctgcctgacgcagccat

SEQ ID NO: 324813 - DNA, 75 bp, synthetic construct
  source 1..75: mol_type = other DNA
gtaaggcagaaatgatggccaccatgaaggggctggaacttctggccgaagcccgtggcgacaaagcggtgtttc

SEQ ID NO: 324814 - DNA, 75 bp, synthetic construct
  source 1..75: mol_type = other DNA
tgcgagtggagagaagaacaactccgcgccgcctgtctggtttccagaaaaacatcgccctatctgagccaggac

SEQ ID NO: 324815 - DNA, 75 bp, synthetic construct
  source 1..75: mol_type = other DNA
gtactggcaaccgtactatcgcggtttatgacctgggtggtggtactttcgatatttctattatcgaaatcgacg

SEQ ID NO: 324816 - DNA, 75 bp, synthetic construct
  source 1..75: mol_type = other DNA
aagagcagaagattagccagtctacactggacgcccttgaatccgagctttaccgcaatctgcgccctctgtatc

SEQ ID NO: 324817 - DNA, 75 bp, synthetic construct
  source 1..75: mol_type = other DNA
cctggacgctctggagtccgagctttaccgcaacctgcaacccatctatcccaagacagctatccgcatccgtaa

SEQ ID NO: 324818 - DNA, 75 bp, synthetic construct
  source 1..75: mol_type = other DNA
ctggcatttataagcctcttttttatcttcggtcatctttatctttgcaccacggggcgtacgccacacgtgtca

SEQ ID NO: 324819 - DNA, 75 bp, synthetic construct
  source 1..75: mol_type = other DNA
gttactggcatgctggctcggctttgtgctgatcaatgccgttgggggtaatggtcaccactatcgcattcgtcg

SEQ ID NO: 324820 - DNA, 75 bp, synthetic construct
  source 1..75: mol_type = other DNA
cgacgctgatcgcgaaaaacaccactatcccgaccaagcacagccaagtgttctctaccgctgaagacaaccagt

SEQ ID NO: 324821 - DNA, 75 bp, synthetic construct
  source 1..75: mol_type = other DNA
agctgcaggatattgcatcggatttaccgcgatttacccacgcattagatgaactttcccgccgtctggggttga

SEQ ID NO: 324822 - DNA, 75 bp, synthetic construct
  source 1..75: mol_type = other DNA
atccgacgctggcggtcaccgatggcaaaacgaccattaaatttcatccgtggtccattgaagagatcgttgcca

SEQ ID NO: 324823 - DNA, 75 bp, synthetic construct
  source 1..75: mol_type = other DNA
tacatcagcctgaaaggcaggaactattacaacaaaagagtatcaaacatttaccaacaagtaataatatcgacg

SEQ ID NO: 324824 - DNA, 75 bp, synthetic construct
  source 1..75: mol_type = other DNA
aagagcagaagattagccagtctaccctggacgctctggagtcagagctttaccgcaacctgcaacccatctatc

SEQ ID NO: 324825 - DNA, 75 bp, synthetic construct
  source 1..75: mol_type = other DNA
aagagcaaaaaattagtcaggcaacgttggatgcgcttgaggctgagctgtaccgcaatctgcaacctatttacc

SEQ ID NO: 324826 - DNA, 75 bp, synthetic construct
  source 1..75: mol_type = other DNA
atccgacactggcggtcaccgatagcaaaacgacgattaaatttcatccgtggtccattgaagagatcgttgcca

SEQ ID NO: 324827 - DNA, 75 bp, synthetic construct
  source 1..75: mol_type = other DNA
caaaaacggtaattcgcatccgcaaaggtagctctaacggtgtggaactgactggactgcaactggacgaagaaa

SEQ ID NO: 324828 - DNA, 75 bp, synthetic construct
  source 1..75: mol_type = other DNA
cgctaaccagcacgcaggccggacaggccgtggttaatgccaccgtggacggcagagcggtcagcgcacagtctg

SEQ ID NO: 324829 - DNA, 75 bp, synthetic construct
  source 1..75: mol_type = other DNA
tccggcagggcacgggatacccgtggcaacctctctgatattgcccgtacccgtattctggtctccccggcagta

SEQ ID NO: 324830 - DNA, 75 bp, synthetic construct
  source 1..75: mol_type = other DNA
ttaccgcaggggcaaaaacggggctgacgacacccgcctgaacctcagcctgacataccgtatcggtgaaccgct

SEQ ID NO: 324831 - DNA, 75 bp, synthetic construct
  source 1..75: mol_type = other DNA
tttcaggctgatgagcagtctgtggcacagacggcgatggaggccggacgtgtgctgcagggcagcaacagcggt

SEQ ID NO: 324832 - DNA, 75 bp, synthetic construct
  source 1..75: mol_type = other DNA
atggtaaagacaaatccatcttcttcacaggtaagacgtgccgcagtttatgggctggctggattgcagttcttt

SEQ ID NO: 324833 - DNA, 75 bp, synthetic construct
  source 1..75: mol_type = other DNA
aatgccgccggcacagtcacctggactgcatcctcaccggcagtgagcattaacggcaatgtcatgaccgtgaag

SEQ ID NO: 324834 - DNA, 75 bp, synthetic construct
  source 1..75: mol_type = other DNA
aagagctgaagattagccaggtcacactggaagcccttgaatccgagctttaccgtaatttgcgccctctgtatc

SEQ ID NO: 324835 - DNA, 75 bp, synthetic construct
  source 1..75: mol_type = other DNA
agtggcttaaagcttgatgaagacaaaaagcgggtaatggaaattatgcagcaggtttgggaagacgacagctgg

SEQ ID NO: 324836 - DNA, 75 bp, synthetic construct
  source 1..75: mol_type = other DNA
cctggacgctctggagtccgagctttaccgcaacctgcgccccctgtatcccaaaacggtaattcgtatccgtaa

SEQ ID NO: 324837 - DNA, 75 bp, synthetic construct
  source 1..75: mol_type = other DNA
cctgacgctgaaaaccactgacggtaagcccctttccgggaaaaacgtcacattcaccaccacaaccgggcaact

SEQ ID NO: 324838 - DNA, 75 bp, synthetic construct
  source 1..75: mol_type = other DNA
ttacttcacggataacggctggatgctgggatacaacgtgttttatgacgtggactggcgcaacaccaaccgccg

SEQ ID NO: 324839 - DNA, 75 bp, synthetic construct
  source 1..75: mol_type = other DNA
gggcagtgccaacggcgttgagctgagcgggttaaaactggatgaagataaaaagcgagtgatggaaataatgca

SEQ ID NO: 324840 - DNA, 75 bp, synthetic construct
  source 1..75: mol_type = other DNA
atcagtcacataaagtagacatagagccatttatacatgcagtatgggttgcaggtgcacctcctgaaaatacat

SEQ ID NO: 324841 - DNA, 75 bp, synthetic construct
  source 1..75: mol_type = other DNA
aaattaaaaatcacatgcgcactgtgtacaaaattaaccagcacgaccacgacatggttaacctggtaacatgca

SEQ ID NO: 324842 - DNA, 75 bp, synthetic construct
  source 1..75: mol_type = other DNA
ctgaggcatactggtttaaaaacataccatccatgatgaaaatatttacgccacagttaattgaagatggaattg

SEQ ID NO: 324843 - DNA, 75 bp, synthetic construct
  source 1..75: mol_type = other DNA
atttggcgatcaaaaatacgatcttgcaaaactaagccattctgttatcggactttatgatcatattatatccgg

SEQ ID NO: 324844 - DNA, 75 bp, synthetic construct
  source 1..75: mol_type = other DNA
tgttactgaccggtattgctatcaatgctctgtgcggcgcggcgatcggcgtgctgagttatataggcgatgagc

SEQ ID NO: 324845 - DNA, 75 bp, synthetic construct
  source 1..75: mol_type = other DNA
attcactagattccaaagcatttatagatgaaatcacaataaaagcttctcgtgatatgggggttgtagatgtcg

SEQ ID NO: 324846 - DNA, 75 bp, synthetic construct
  source 1..75: mol_type = other DNA
ggatcttcgagccgctggcgctgacgaccggcgtgcgtatggacgatcacgaaacctacggtgaacactggagtc

SEQ ID NO: 324847 - DNA, 75 bp, synthetic construct
  source 1..75: mol_type = other DNA
ttccacgaagtgatcgcgcaaaccgggcgcttcaaggtgtatcgcgccattatgacccgccaggcgaagaaaggt

SEQ ID NO: 324848 - DNA, 75 bp, synthetic construct
  source 1..75: mol_type = other DNA
ggctttgtgcagttgctatttaccacaagcgagattcagagaattgaacttactaataaagttcagcgggagtac

SEQ ID NO: 324849 - DNA, 75 bp, synthetic construct
  source 1..75: mol_type = other DNA
atttatgccaataatgaaccgcgacgttttggcatcattaacgataaaaaaatgctcgcagattgccagaacctc

SEQ ID NO: 324850 - DNA, 75 bp, synthetic construct
  source 1..75: mol_type = other DNA
tattcaaagcaagaaagttgtgaaaggaacaatgtttctattagttatttttgcctgtgcctaaaaaaattaaac

SEQ ID NO: 324851 - DNA, 75 bp, synthetic construct
  source 1..75: mol_type = other DNA
atatttctaatgaattgagaattgagtttggagttatccctccatgtttattacccatcggtaatcgtactttat

SEQ ID NO: 324852 - DNA, 75 bp, synthetic construct
  source 1..75: mol_type = other DNA
actggcgattcgtaacggtgaactaaagatagatgtcggcaaaattgccgatgcactgatcagcgaagtgcaaca

SEQ ID NO: 324853 - DNA, 75 bp, synthetic construct
  source 1..75: mol_type = other DNA
caatggccaacattactggtcgccagctcattcattctgccagcgattatggcgacaacctgtctcgccggaacg

SEQ ID NO: 324854 - DNA, 75 bp, synthetic construct
  source 1..75: mol_type = other DNA
cgtggtatatggcgcgctataccagcgggaaaatgaaagcgtttttatattgcggtaatgttgccgatgtgggcg

SEQ ID NO: 324855 - DNA, 75 bp, synthetic construct
  source 1..75: mol_type = other DNA
tacgcccgttacgttgaagcgcgcaaactttgggggcagttgatgattgcctcacggtcgttactgcgcgaggta

SEQ ID NO: 324856 - DNA, 75 bp, synthetic construct
  source 1..75: mol_type = other DNA
tttctatcgcggttattttcatgctgccctggtatacgcatctgggcatcaaatttaccctcgcgccgttcagca

SEQ ID NO: 324857 - DNA, 75 bp, synthetic construct
  source 1..75: mol_type = other DNA
cgaatcgcgttattttagatatgcaagcgacgaataaagcggaggcgattgaagaattaactaatcttctcaaaa

SEQ ID NO: 324858 - DNA, 75 bp, synthetic construct
  source 1..75: mol_type = other DNA
ggtgaaactatattacaggctttatccaatagccggacactgaataagttagaggatcgtgttgctttttttgac

SEQ ID NO: 324859 - DNA, 75 bp, synthetic construct
  source 1..75: mol_type = other DNA
cttcacgtccaggtctggggctgtttttactgctgcttggcccgctaatgtggtttggcattgtctatttcggct

SEQ ID NO: 324860 - DNA, 75 bp, synthetic construct
  source 1..75: mol_type = other DNA
attatttccgcattcgcctttaccggttttctcggttatatcctcggcccgattctgaatacttatttgtctgcc

SEQ ID NO: 324861 - DNA, 75 bp, synthetic construct
  source 1..75: mol_type = other DNA
cactgggcggaacggcgttagtgttcttctgctgctctgcatatgtgctgaccacccgcaaagatatgtcgttcc

SEQ ID NO: 324862 - DNA, 75 bp, synthetic construct
  source 1..75: mol_type = other DNA
ggtgtttgccatcgccggaagtttagtggtctgcaccgtcatttttctcatcacacagcgccatcgcgatggcag

SEQ ID NO: 324863 - DNA, 75 bp, synthetic construct
  source 1..75: mol_type = other DNA
aaattcaccctcgcaccgttcagcattctcggtgtcgccatcgccatttttcttggttttcgtaataatgccggg

SEQ ID NO: 324864 - DNA, 75 bp, synthetic construct
  source 1..75: mol_type = other DNA
tgagcaactggtttccctgatttatctgatgacagagcagcttgatggcgtggtacagcgttgccaggatgacct

SEQ ID NO: 324865 - DNA, 75 bp, synthetic construct
  source 1..75: mol_type = other DNA
cattaagcgttggtgttgcttcaacagtaacgactcaatcagaggtcttcacaccaaaagagacgcctcagataa

SEQ ID NO: 324866 - DNA, 75 bp, synthetic construct
  source 1..75: mol_type = other DNA
cgcccgatgcgacgctggcagtagcggaccgcgagatgccaggctttggtgaacagatgcgccagatcagcctgc

SEQ ID NO: 324867 - DNA, 75 bp, synthetic construct
  source 1..75: mol_type = other DNA
gctataacagcgcatggaacacgctggtcaacctggcaactctggttgtgatggctaatggcctgactcgttctg

SEQ ID NO: 324868 - DNA, 75 bp, synthetic construct
  source 1..75: mol_type = other DNA
gaactaaaaaccatgggtgcgctaacacgcagagaatggacgctgattggcctggtactgctcagcttaggtttg

SEQ ID NO: 324869 - DNA, 75 bp, synthetic construct
  source 1..75: mol_type = other DNA
gctaccgctggaaaaagcgggcgcagccaaaattatcgagcagccacagcttagcgtggatgctgtcgccaacac

SEQ ID NO: 324870 - DNA, 75 bp, synthetic construct
  source 1..75: mol_type = other DNA
attttgtaccaactgcgatcctttcgcgtcaggtgggggtgattcgcaaacaggcgctgatccttaacttacccg

SEQ ID NO: 324871 - DNA, 75 bp, synthetic construct
  source 1..75: mol_type = other DNA
ccatacgttgaaacggcaccggaagtggttgctgcattcagaccgaagagtgcaagacgcgacgttagcgaataa

SEQ ID NO: 324872 - DNA, 75 bp, synthetic construct
  source 1..75: mol_type = other DNA
ctacctgataacggaacattgattgctcactgggggcggaaaagtgaaatgtcatgtaaggcgaaaatgccagac

SEQ ID NO: 324873 - DNA, 75 bp, synthetic construct
  source 1..75: mol_type = other DNA
cattcagatggtatgcttcctggtctttattctgttaacacaatagttaacgggaagcataatggtgtatacgaa

SEQ ID NO: 324874 - DNA, 75 bp, synthetic construct
  source 1..75: mol_type = other DNA
gttgatggttacggtctgggatcacccggaactaaccacccccgcagggcaataccgtagcgccagtgataccgg

SEQ ID NO: 324875 - DNA, 75 bp, synthetic construct
  source 1..75: mol_type = other DNA
aaggcacgcacgtgaactatgccggcgcatttgccagtgcattcccgaacggccttccggttgggataggttctg

SEQ ID NO: 324876 - DNA, 75 bp, synthetic construct
  source 1..75: mol_type = other DNA
atgccgcaggttgcagcaaagctgggcgattcagtcactatctggcatcagagcggcaaaggttcgcaacaaacc

SEQ ID NO: 324877 - DNA, 75 bp, synthetic construct
  source 1..75: mol_type = other DNA
tggtgatggccggcggaaccggtggacatgtgttcccgggactggcggttgcgcaccatctaatggctcagggtt

SEQ ID NO: 324878 - DNA, 75 bp, synthetic construct
  source 1..75: mol_type = other DNA
cacgcgccgtctggtcgtgtttatcacgttaaattcaatccgccgaaagtagaaggcaaagacgacgttaccggt

SEQ ID NO: 324879 - DNA, 75 bp, synthetic construct
  source 1..75: mol_type = other DNA
gattcgtgaaggtgatacggtgcgcggttcggcattaatcgggcagaattttaccggcaacggctattttcatgg

SEQ ID NO: 324880 - DNA, 75 bp, synthetic construct
  source 1..75: mol_type = other DNA
ggagcaatctggcggtcagtaaccctgagctggataaactaatagccgcacgcgttgctgcattacgggccgcta

SEQ ID NO: 324881 - DNA, 75 bp, synthetic construct
  source 1..75: mol_type = other DNA
tcgcaaaatacagccaacaaccgctggtgaactatatcggccagccggtcgtcaacgttgtagaactcaatctgg

SEQ ID NO: 324882 - DNA, 75 bp, synthetic construct
  source 1..75: mol_type = other DNA
tgtttatcgtgttcagattgtttggtcgtgaatggtcgtttgacctcaaggacaggaccagaacagacaaccaca

SEQ ID NO: 324883 - DNA, 75 bp, synthetic construct
  source 1..75: mol_type = other DNA
ccgcgctggtgttttgtaccctgcatcctgcatcggtggaggcgttattcagcgaagcgctgcgtctgaatatgc

SEQ ID NO: 324884 - DNA, 75 bp, synthetic construct
  source 1..75: mol_type = other DNA
aatttccagccgggcaaagaggcggattttgtggtgattgacccggcggtcaccccgctgcagcgcctgcgcata

SEQ ID NO: 324885 - DNA, 75 bp, synthetic construct
  source 1..75: mol_type = other DNA
aactgcgtgcgatttcgccacctgccaactggcaggtcaaccgaatgcagacatcgcaggcgggatgtgtcagca

SEQ ID NO: 324886 - DNA, 75 bp, synthetic construct
  source 1..75: mol_type = other DNA
attgagcatgagatcatcatcaaggcagacaaagatgtcgaagagctgcttgagacccgtagcgatcttttttga

SEQ ID NO: 324887 - DNA, 75 bp, synthetic construct
  source 1..75: mol_type = other DNA
tactactgacgctgaaactaaagctgcaaccaccgccgatccactgaaagctctggacgaagcgatcagctccat

SEQ ID NO: 324888 - DNA, 75 bp, synthetic construct
  source 1..75: mol_type = other DNA
gggggacgattggcttaacaaatttaattgggttaaggataagacgggatgtgaagtgatttatttagaaagaac

SEQ ID NO: 324889 - DNA, 75 bp, synthetic construct
  source 1..75: mol_type = other DNA
ccgtcgcttcgtagccgagtgccgacgcacccgcactgtccttcccgcgacatccacgatcgagcggctttgtgc

SEQ ID NO: 324890 - DNA, 75 bp, synthetic construct
  source 1..75: mol_type = other DNA
agtattatcccaccaagtttggccgaaactatgttcttcgtgacgtgagcatcacgctaccgcgtgatcgcaaca

SEQ ID NO: 324891 - DNA, 75 bp, synthetic construct
  source 1..75: mol_type = other DNA
cctccatagcttatttatggtttggtaaccgactgggaatgaatctacgtccggtactgctgatgcttgagcgac

SEQ ID NO: 324892 - DNA, 75 bp, synthetic construct
  source 1..75: mol_type = other DNA
ggtgatgtatctgttgcagacgtgtcaaatcagattaatcgccgaaaggttattattccggttacctgtgggtat

SEQ ID NO: 324893 - DNA, 75 bp, synthetic construct
  source 1..75: mol_type = other DNA
caatgggttggggagtgttattatcatatagggtattggcaatggatattcctgttgaaatcacaggggaaatac

SEQ ID NO: 324894 - DNA, 75 bp, synthetic construct
  source 1..75: mol_type = other DNA
ataataaggatatgaaaatgaaatggtatgaactggctagatccagaatgaaagagctcggcataactcaagaga

SEQ ID NO: 324895 - DNA, 75 bp, synthetic construct
  source 1..75: mol_type = other DNA
catcaaggagcttatctacggcgctaacgtactggggcttatcatgatgggcgcgctatccgcgagctttgtcaa

SEQ ID NO: 324896 - DNA, 75 bp, synthetic construct
  source 1..75: mol_type = other DNA
cctctatcaccgggattaaaaccggcctgatggggccgctggccgggatgggcgactccatcatctgggcggcgg

SEQ ID NO: 324897 - DNA, 75 bp, synthetic construct
  source 1..75: mol_type = other DNA
acttgggagcaatgataatatattagcgaccaatattcagaattttggtatagccctttatcagggagagggaac

SEQ ID NO: 324898 - DNA, 75 bp, synthetic construct
  source 1..75: mol_type = other DNA
aatgattccatgcaatgatagctgttccgtagtagggaaagttatcgccagccagtggcctgaagagacatttag

SEQ ID NO: 324899 - DNA, 75 bp, synthetic construct
  source 1..75: mol_type = other DNA
taaggcaaggctggtgctgacgaaggacggacaaattttctcaacggcacaaaaattcatttgcagggtaaggag

SEQ ID NO: 324900 - DNA, 75 bp, synthetic construct
  source 1..75: mol_type = other DNA
cagaccgtaaccctgaacatgggcagcaactggtttgcgcagagtgcgacggaaagtggttacctcaacattgat

SEQ ID NO: 324901 - DNA, 75 bp, synthetic construct
  source 1..75: mol_type = other DNA
tctggcttgaggttgaaggtaactcaatgaccgcaccaacaggttccaaacccagttttcctgacgggatgttaa

SEQ ID NO: 324902 - DNA, 75 bp, synthetic construct
  source 1..75: mol_type = other DNA
atgccctccatagtaaccatgaagaaaaaaatacaatatgtactttttgaatgcaagcaaaaatacacattgtgc

SEQ ID NO: 324903 - DNA, 75 bp, synthetic construct
  source 1..75: mol_type = other DNA
tcatccggatgcaacactgaaggagaaaggctttgcgcagtacagcaactccaccgacagcgacgcagaagaccg

SEQ ID NO: 324904 - DNA, 75 bp, synthetic construct
  source 1..75: mol_type = other DNA
gtgccattttaccggctatcctgatcagcgtggtcgctgcccgcgttgccatatcccgctacgcctgcgtcgccg

SEQ ID NO: 324905 - DNA, 75 bp, synthetic construct
  source 1..75: mol_type = other DNA
cctccatcgcttatttatggttcggcaaccggttgggcatgaatctgcgcccggtactactgatgttggaacgcc

SEQ ID NO: 324906 - DNA, 75 bp, synthetic construct
  source 1..75: mol_type = other DNA
tgttgctgatgccgtttgcctggggcgaaccgctgttgcatatctggctgttaggcattcgtattgacgccaacg

SEQ ID NO: 324907 - DNA, 75 bp, synthetic construct
  source 1..75: mol_type = other DNA
ctcttttgtagcgttggtgattttaacgacggtgacgttgtcacatcttaatgttgaacagctgtgggagcgatt

SEQ ID NO: 324908 - DNA, 75 bp, synthetic construct
  source 1..75: mol_type = other DNA
attggtgccccacttatcctcgtcacatctattgcttatttgtggtttggcaaccgactggggatgaacttacgc

SEQ ID NO: 324909 - DNA, 75 bp, synthetic construct
  source 1..75: mol_type = other DNA
tcatagtctgcaaaaatgctgggcggcgctgttagcgtcaatcgttttgttgttacctgccaacctgttgcctat

SEQ ID NO: 324910 - DNA, 75 bp, synthetic construct
  source 1..75: mol_type = other DNA
acgaacactggtgtgcgaatcagctcatcagtggaaaacctgcgcgcccggatacatttgtttttgcatatattc

SEQ ID NO: 324911 - DNA, 75 bp, synthetic construct
  source 1..75: mol_type = other DNA
atggcgatattggccccctgcgtccgttcactattaatttgcggacgggtgaagtttccatgttacacgcagtat

SEQ ID NO: 324912 - DNA, 75 bp, synthetic construct
  source 1..75: mol_type = other DNA
tatttcgtttccagaatggtgtggcaatagcgttaaaaaatattcaggccggaaatgctaaaaaattcacgttat

SEQ ID NO: 324913 - DNA, 75 bp, synthetic construct
  source 1..75: mol_type = other DNA
acaggtggtgtgcaggatgtgcgtctgggaggtgccattggtattggacgcggaggaaatgcgccatcaggtcat

SEQ ID NO: 324914 - DNA, 75 bp, synthetic construct
  source 1..75: mol_type = other DNA
tcgcgtacggacgttatcccgacacctttttaccagaccagacggactccgttatcaaggaagttattctgacgc

SEQ ID NO: 324915 - DNA, 75 bp, synthetic construct
  source 1..75: mol_type = other DNA
ggacattcccgacaaagcggcattcaccagaaccatcggcgctgcctgtgcacacagcggaaatatcagtattgg

SEQ ID NO: 324916 - DNA, 75 bp, synthetic construct
  source 1..75: mol_type = other DNA
gttgccctgattgctgctgctcaggaagctgaaacgaaagcggttgaactgacggttcgcgcacaggctgaaaaa

SEQ ID NO: 324917 - DNA, 75 bp, synthetic construct
  source 1..75: mol_type = other DNA
aaaaaagaaaaaaacttatgtttgcttccaagcaccttacctccagaccaaatgatttttgagtttttatataat

SEQ ID NO: 324918 - DNA, 75 bp, synthetic construct
  source 1..75: mol_type = other DNA
atgattattataagccagggagacctggcttataataaatatatggagcttattatgcctctttcccgacgtaat

SEQ ID NO: 324919 - DNA, 75 bp, synthetic construct
  source 1..75: mol_type = other DNA
cggtttgtggtgatccgtatcaggaggcgagacaacgttatatcagtaatggccctggaagcctggcgcaataac

SEQ ID NO: 324920 - DNA, 75 bp, synthetic construct
  source 1..75: mol_type = other DNA
gcagccctgtactcagtgctgcgtttatcaggataaaaattattctgaaggggcggtaattaaagccgaaggaat

SEQ ID NO: 324921 - DNA, 75 bp, synthetic construct
  source 1..75: mol_type = other DNA
aggttaaaacccgtaccgctgagcagaatgcgaaaattgcggcttttgaggccgagcgtcgtcgggaagcagagc

SEQ ID NO: 324922 - DNA, 75 bp, synthetic construct
  source 1..75: mol_type = other DNA
ttactgggcagcaaacttaccggtaaaccgtggacgctggaatttcgacaccattcgctacgattattacctcga

SEQ ID NO: 324923 - DNA, 75 bp, synthetic construct
  source 1..75: mol_type = other DNA
gcgtgtggcgggcgatgccgtggcccagctccgatttacagatttcctggtcatcggaatatatcaactctactt

SEQ ID NO: 324924 - DNA, 75 bp, synthetic construct
  source 1..75: mol_type = other DNA
ataatgctcccggcgtgcaaagtccggttatcgattcactgatcaaccaaattattgccgcccagggaaataaag

SEQ ID NO: 324925 - DNA, 75 bp, synthetic construct
  source 1..75: mol_type = other DNA
ctggtttccgtcgtcaccggtatttcagagccgattgagttcctgttcctgtttatcgcccccgcgctttacgcc

SEQ ID NO: 324926 - DNA, 75 bp, synthetic construct
  source 1..75: mol_type = other DNA
gcgtggccttcacctccacgcatgcggcacgggaatggctgattcttaacatggcgggactggagcgtgaagaat

SEQ ID NO: 324927 - DNA, 75 bp, synthetic construct
  source 1..75: mol_type = other DNA
ctcggtatcgatacctggtggtatgacgtcaataaagcggccaaactgccgtccgccagcaaacagggagagtag

SEQ ID NO: 324928 - DNA, 75 bp, synthetic construct
  source 1..75: mol_type = other DNA
aatgaaggacgaacacgggcggcgctgacagagcagaaccggctgattgatgaacaggccagtcgggtgaaatcc

SEQ ID NO: 324929 - DNA, 75 bp, synthetic construct
  source 1..75: mol_type = other DNA
aaaacgacattgccggattcggcaagtgtaagggagtttgcccggctgcaaatcgccttcgcccactgtttacgc

SEQ ID NO: 324930 - DNA, 75 bp, synthetic construct
  source 1..75: mol_type = other DNA
ctgcaaatcgccttcgcccactgtttacgcatgacattacgcaaacagccacaggcggaagtgctggctcattat

SEQ ID NO: 324931 - DNA, 75 bp, synthetic construct
  source 1..75: mol_type = other DNA
cgttgcaggtaacccgcgcgtagtaaaagccatgctgtcaaatatgcgtgacgagttaagcgacgctctgaagcg

SEQ ID NO: 324932 - DNA, 75 bp, synthetic construct
  source 1..75: mol_type = other DNA
ccattgcctatcagacgcgcgatgtgctggaagcaatgcaggctgactccggtattcgcctgcacgccctgcgcg

SEQ ID NO: 324933 - DNA, 75 bp, synthetic construct
  source 1..75: mol_type = other DNA
gcgcgatgaaatgaaactgattagcgacgccgacgattccgaatactttgccaccaaagtgcaaaataccaacgg

SEQ ID NO: 324934 - DNA, 75 bp, synthetic construct
  source 1..75: mol_type = other DNA
accggtgagaaagcggtgacatcagaaaacggcctgcttacgaccatcgcctgtggcccgactggcgaagtgaac

SEQ ID NO: 324935 - DNA, 75 bp, synthetic construct
  source 1..75: mol_type = other DNA
gtggaaaagcttaagaagtcgctgaaagatgcacgcggcaacggtgcttttaaaaacctgtttgtctacgcggcg

SEQ ID NO: 324936 - DNA, 75 bp, synthetic construct
  source 1..75: mol_type = other DNA
cataccacacccgctattgacccggcaggagttcaccgcctgggtgcaggattatttaattttcggtaactgtta

SEQ ID NO: 324937 - DNA, 75 bp, synthetic construct
  source 1..75: mol_type = other DNA
cggcgaaggtgttttccatcaacgaactggccccgatacaagaaagcctgaaagagttaaacgactggctgggga

SEQ ID NO: 324938 - DNA, 75 bp, synthetic construct
  source 1..75: mol_type = other DNA
cccgccgtggtgtggaagaggatgtttactggtgggtgccgtccttcaacgagccgacagccttcgcgcccggtt

SEQ ID NO: 324939 - DNA, 75 bp, synthetic construct
  source 1..75: mol_type = other DNA
cttctcatggcataaagttagttctggaagccattaatacaaaagatattcccggtttttttgttaacaacacca

SEQ ID NO: 324940 - DNA, 75 bp, synthetic construct
  source 1..75: mol_type = other DNA
caagttaattgccttgcaggaaagcatccaggtggttattcgcatgaacaatgtcatgaaacactggtcgaaaat

SEQ ID NO: 324941 - DNA, 75 bp, synthetic construct
  source 1..75: mol_type = other DNA
gcgtggccttcacctccacccgtgcggcacgggaatggctgattctgaacatggcgggactggagcgggaagagt

SEQ ID NO: 324942 - DNA, 75 bp, synthetic construct
  source 1..75: mol_type = other DNA
ttgcgcgctgtaagctgttccgcccgtttatcccgcccgttgttgatggcaaattgtggcaggattatccgacgt

SEQ ID NO: 324943 - DNA, 75 bp, synthetic construct
  source 1..75: mol_type = other DNA
gcgagcgcgagatagccgctgaactggagtggtttatgcgccagcagggcgcagaaaaagcctctttcgatacca

SEQ ID NO: 324944 - DNA, 75 bp, synthetic construct
  source 1..75: mol_type = other DNA
tcggggataaccgcatcatgacgttattgaataccttatatgatctctactgcccgcaggcggaccccgacaagg

SEQ ID NO: 324945 - DNA, 75 bp, synthetic construct
  source 1..75: mol_type = other DNA
ttcaggaacacttagcaatgggcgttctcctttcattaggcgtaaataatgttaactatttatttttatcagata

SEQ ID NO: 324946 - DNA, 75 bp, synthetic construct
  source 1..75: mol_type = other DNA
gtcattgtgatgagcgtcaacggcgacaaagtgacagaagatggccgtattttaacggacagagggcagcgaatt

SEQ ID NO: 324947 - DNA, 75 bp, synthetic construct
  source 1..75: mol_type = other DNA
gtcgaatcatcacggcgcgctgattcaggcgggggcgacgccggtctatctggaagcttcacgcaacccgtttgg

SEQ ID NO: 324948 - DNA, 75 bp, synthetic construct
  source 1..75: mol_type = other DNA
gcgttctactttcattaggagcacatcatgttaattgtttacttttatcagatagtaaacaatcattaataagtc

SEQ ID NO: 324949 - DNA, 75 bp, synthetic construct
  source 1..75: mol_type = other DNA
attcagggaaccacggcaaatacaacattatctatgatgctgttccagcttctgactgttcaaagttgatagccg

SEQ ID NO: 324950 - DNA, 75 bp, synthetic construct
  source 1..75: mol_type = other DNA
ttgccaaccattaacgaaataaaagtagaagcagttaaatttcgtagattaattgaaagttgtgataaaaagaat

SEQ ID NO: 324951 - DNA, 75 bp, synthetic construct
  source 1..75: mol_type = other DNA
accggaccaggaaaaaacttgcaggccataacagtatctacgtaaacaacgccaacgcggcgctggaaagcctgc

SEQ ID NO: 324952 - DNA, 75 bp, synthetic construct
  source 1..75: mol_type = other DNA
ttattttccctgtggcttcttttgctacaagcgaaaatgtagatcacgtttttataaaggcattccaggctgcaa

SEQ ID NO: 324953 - DNA, 75 bp, synthetic construct
  source 1..75: mol_type = other DNA
aagacaggagaagtaaaaaagggttttcactattagaattgcttttaacgttaggtgttatagctggaataataa

SEQ ID NO: 324954 - DNA, 75 bp, synthetic construct
  source 1..75: mol_type = other DNA
gtattggcatccaaggaaagtacgatctaacaaataacaggactgaaaacatgatccgatggatgggaaaagttc

SEQ ID NO: 324955 - DNA, 75 bp, synthetic construct
  source 1..75: mol_type = other DNA
caggcactgggcctggtggatatccgggtgccggaccatctgatagtgggtggcaaccaggttttctcctttgcc

SEQ ID NO: 324956 - DNA, 75 bp, synthetic construct
  source 1..75: mol_type = other DNA
ctggaccgccatcttcatgaacccggcgtggccttcacctccacccgtgcggcacgggaatggctgcttctgaac

SEQ ID NO: 324957 - DNA, 75 bp, synthetic construct
  source 1..75: mol_type = other DNA
atgcagcaactttcctttctgcccggagagatgacgcccggcgagcgcagcctcattcaacgggccctgaaaacc

SEQ ID NO: 324958 - DNA, 75 bp, synthetic construct
  source 1..75: mol_type = other DNA
tggatatccgtattcctgaccatctgattgttggtggcaggcaaatctattcgttcgcagaacacggtctgttgt

SEQ ID NO: 324959 - DNA, 75 bp, synthetic construct
  source 1..75: mol_type = other DNA
atgtatgataatacaaagatgctatgtattggcatccaaggaaagtacgatctaacaaataacaggactgaaaac

SEQ ID NO: 324960 - DNA, 75 bp, synthetic construct
  source 1..75: mol_type = other DNA
ggcagaccggcttatcaccgaacgtctggtacaggcactgggcctggtggatatccgggtgccggaccatctgat

SEQ ID NO: 324961 - DNA, 75 bp, synthetic construct
  source 1..75: mol_type = other DNA
tctggtacaggcactgggcctggtggatatccgggtgccggaccatctgatagtcggtggcaaccaggttttctc

SEQ ID NO: 324962 - DNA, 75 bp, synthetic construct
  source 1..75: mol_type = other DNA
cagaccggcttatcacggaacgtctggtacaggcactgggcctggtggatatccgggtgccggaccatctgatag

SEQ ID NO: 324963 - DNA, 75 bp, synthetic construct
  source 1..75: mol_type = other DNA
accggcacgattaaccgcaccgaggtgcatccccgggaggtggtcaaacgtgctctgcacttcaacgcggcggcg

SEQ ID NO: 324964 - DNA, 75 bp, synthetic construct
  source 1..75: mol_type = other DNA
ggaagtgattaaacgcgccctgtatcacaatgccgctgccgtggtgctggcacacaatcacccgtccggtgaagt

SEQ ID NO: 324965 - DNA, 75 bp, synthetic construct
  source 1..75: mol_type = other DNA
attctgaacatggcgggactggagcgtgaagaattccgggtgctgtatctgaacaaccagaatcagctgattgcc

SEQ ID NO: 324966 - DNA, 75 bp, synthetic construct
  source 1..75: mol_type = other DNA
agcaaggcagaccgccttatcacggaacgtctggtacaggcactgggcctggtggatatccgggtgccggaccat

SEQ ID NO: 324967 - DNA, 75 bp, synthetic construct
  source 1..75: mol_type = other DNA
cagttgcagaaaaaggggctaaacgcatgaataccttatttaatcagcctttgaaggtcgtgaacgcgggactac

SEQ ID NO: 324968 - DNA, 75 bp, synthetic construct
  source 1..75: mol_type = other DNA
ccctggtgctgttcggtgctagtcagggagcgttaaagatcagttttgatgccctttttgatgaggaataccgcg

SEQ ID NO: 324969 - DNA, 75 bp, synthetic construct
  source 1..75: mol_type = other DNA
tgaaaaaggtaagagccatcccattgagtgcgtgtttactcgcggtttcgtgcgccagtacaacgccgcactcgg

SEQ ID NO: 324970 - DNA, 75 bp, synthetic construct
  source 1..75: mol_type = other DNA
gtgagtttttccgtcgccatccggcaggcaatcagttcgtggaatactttggcgaaatgctcttccgctctgact

SEQ ID NO: 324971 - DNA, 75 bp, synthetic construct
  source 1..75: mol_type = other DNA
accgcacgtaacccgtatggttttatcggtggtattgacgctcactgttttgaagaaagttacctgcgtgagctg

SEQ ID NO: 324972 - DNA, 75 bp, synthetic construct
  source 1..75: mol_type = other DNA
atcgcccacaaacaagcggggggcgggcaaattggtgccgggatcaccactgcgccgatggcctgttttgtcgcc

SEQ ID NO: 324973 - DNA, 75 bp, synthetic construct
  source 1..75: mol_type = other DNA
cgactgatttaccagcggctttccacattgaacaacgcgcccacgcctttccgtggagtgaaaaaacctttgcca

SEQ ID NO: 324974 - DNA, 75 bp, synthetic construct
  source 1..75: mol_type = other DNA
gaagaccatgttcatagcatttaagctcatcgccctcgtacaggaattggtatccaataccaccatattcaggca

SEQ ID NO: 324975 - DNA, 75 bp, synthetic construct
  source 1..75: mol_type = other DNA
ggcaatgcccctttcccgctgttacaccaggataaaaaacccagggcgggcgttatcagctcatcagtcgcctga

SEQ ID NO: 324976 - DNA, 75 bp, synthetic construct
  source 1..75: mol_type = other DNA
cggcgataaggcgatcagtgagttgcagtcagcattcgacacatacaaaacggagcaggcaacgcttgagaacgc

SEQ ID NO: 324977 - DNA, 75 bp, synthetic construct
  source 1..75: mol_type = other DNA
tgcgccagtacaacgccgcgctcggatatgacaacgcatccgtcgacaccggtcattcagacgcaactgccgccg

SEQ ID NO: 324978 - DNA, 75 bp, synthetic construct
  source 1..75: mol_type = other DNA
tgatatcgcgctcagccagttgcagtcagcattcgacacgtacaaaacagagcagacaacgcttgagaacgctgc

SEQ ID NO: 324979 - DNA, 75 bp, synthetic construct
  source 1..75: mol_type = other DNA
cttatcctccgggagtgctgtgtgttgttcctggtgaaatctggggcggtgcggttctgcgttacttcagcgctc

SEQ ID NO: 324980 - DNA, 75 bp, synthetic construct
  source 1..75: mol_type = other DNA
gttttggcattattaacgataaaaaaatgctcgcagattgccagaatctcctcgcggaactgggcatcccactgg

SEQ ID NO: 324981 - DNA, 75 bp, synthetic construct
  source 1..75: mol_type = other DNA
gaatattgtgcaggagattggtcatccggcgacgctgttcccgatggtagccgcaggcatcggcatcagtattct

SEQ ID NO: 324982 - DNA, 75 bp, synthetic construct
  source 1..75: mol_type = other DNA
gcggaaaagttcgggtcgctgccagccagaccatttccgcgcatcttattccgcaatgcattgctgaaagccatc

SEQ ID NO: 324983 - DNA, 75 bp, synthetic construct
  source 1..75: mol_type = other DNA
gaaatcgccaaagcattaagctacgcggcggatgtcctgattatggatgagccgacatcttcgctcagtgataac

SEQ ID NO: 324984 - DNA, 75 bp, synthetic construct
  source 1..75: mol_type = other DNA
ttcccatccttcgctttttaaagaggtcagtttcgctgtgcgtccggggaagtcctcggattttttggcctggtg

SEQ ID NO: 324985 - DNA, 75 bp, synthetic construct
  source 1..75: mol_type = other DNA
gggtaaatcgacattaatgaaaatactcgctggagtttatccgccaactcagggaacgataaaactacgtggtga

SEQ ID NO: 324986 - DNA, 75 bp, synthetic construct
  source 1..75: mol_type = other DNA
cggtcgtcagttagaaactgctgcccgtcattatgaaacgcaactgcgcccgcccttcttccgcgcgctggtcga

SEQ ID NO: 324987 - DNA, 75 bp, synthetic construct
  source 1..75: mol_type = other DNA
ttgatgcgcactgttttgaagaaagttacctgcgtgagctgatcgcggaagtcgcaccgcagcgggcaaaagagg

SEQ ID NO: 324988 - DNA, 75 bp, synthetic construct
  source 1..75: mol_type = other DNA
ccccgtatttcgggtgtctttgagaattgcgaatcgcgacgagaattttatggtcgtcagttagaaaccgcagcc

SEQ ID NO: 324989 - DNA, 75 bp, synthetic construct
  source 1..75: mol_type = other DNA
taatgctttgctatagcgctggatacgctttattgcaaacactggatgggatgggtgtgattagtaccaactttg

SEQ ID NO: 324990 - DNA, 75 bp, synthetic construct
  source 1..75: mol_type = other DNA
ttctatccgctgtttgccgcactggatatcaacgccaaaatgcatgaaggtgtcagcggtcgtaatatgtggatg

SEQ ID NO: 324991 - DNA, 75 bp, synthetic construct
  source 1..75: mol_type = other DNA
agctgatgcgcccctggcggaagtactgccttccatctacaaacagcatgaagagcgctacgccggttataccct

SEQ ID NO: 324992 - DNA, 75 bp, synthetic construct
  source 1..75: mol_type = other DNA
gctggcgttgttttacctgttctatctgttgcggctggacagccagacgcaggacatcctgcaccagctaaacaa

SEQ ID NO: 324993 - DNA, 75 bp, synthetic construct
  source 1..75: mol_type = other DNA
acaaaaatgtagttatcaatcatattgatgaagataagcataataacgaagtaagtaacatcgaatggacggcac

SEQ ID NO: 324994 - DNA, 75 bp, synthetic construct
  source 1..75: mol_type = other DNA
ttcatggcggtgaaacgaactatattcgtgccacggttagcctgtatgtttcgctgtacaacatcttcgtcagcc

SEQ ID NO: 324995 - DNA, 75 bp, synthetic construct
  source 1..75: mol_type = other DNA
atcttgtttgaaaccagcaacatcattcatggcggtgaaacgaactatattcgtgccacggttagcctgtatgtt

SEQ ID NO: 324996 - DNA, 75 bp, synthetic construct
  source 1..75: mol_type = other DNA
gtgagtttttccgtcgccatccggcaggcaatcagttcgtggaatattttggcgaaatgctcttccgctccgact

SEQ ID NO: 324997 - DNA, 75 bp, synthetic construct
  source 1..75: mol_type = other DNA
gctgactccggcagaagatatggccaaacttcagcaacttgttgccctgctggtacgcttcgaaaaactgctgga

SEQ ID NO: 324998 - DNA, 75 bp, synthetic construct
  source 1..75: mol_type = other DNA
tcttctaacaaagtggttttaaacgccctgctgacaccgggtgatctggtgctatttgaccgcaataaccataag

SEQ ID NO: 324999 - DNA, 75 bp, synthetic construct
  source 1..75: mol_type = other DNA
acgctgcttaaacccgtctctgctgagcatcacgaaaataagggcggtttcttcggctggtttaataccaccttc

SEQ ID NO: 325000 - DNA, 75 bp, synthetic construct
  source 1..75: mol_type = other DNA
ggtggctcaacaggggcaatttatcgccagttctctatcactattgtttcagcaatggcgctttcagtactggtt

SEQ ID NO: 325001 - DNA, 75 bp, synthetic construct
  source 1..75: mol_type = other DNA
aaggtgttgttgaagcgacactaatggcagtacgtatgcgtctgcgtcctatcctgatgacctctctcgccttta

SEQ ID NO: 325002 - DNA, 75 bp, synthetic construct
  source 1..75: mol_type = other DNA
taccgtctcgcccttcgcggcaacagcctgaacccaatgattgacgccgccacgccgttgctcggcatggtgatg

SEQ ID NO: 325003 - DNA, 75 bp, synthetic construct
  source 1..75: mol_type = other DNA
tcgcggacgccattctttcgcttgccggagcagaaaacgtcgctacccaccagcagtacaaaagctacagtgcag

SEQ ID NO: 325004 - DNA, 75 bp, synthetic construct
  source 1..75: mol_type = other DNA
gtcgcttgccggagcagaaaacgtcgcaactcaccaacagtacaaaagctacagcgcggaatcgctgattgcagc

SEQ ID NO: 325005 - DNA, 75 bp, synthetic construct
  source 1..75: mol_type = other DNA
tttattccgatgatggcggactgttcgccgctgctactggagcttaatgagaacgatccgggtattctggttacg

SEQ ID NO: 325006 - DNA, 75 bp, synthetic construct
  source 1..75: mol_type = other DNA
agtggcttcagagtggaacctctttttgccagacgttctgtgtcttgtaagggggacactcgaggtgtagctcat

SEQ ID NO: 325007 - DNA, 75 bp, synthetic construct
  source 1..75: mol_type = other DNA
ttatgccaattggcttaatgaacattttggcgagttaagccatgctaagcgtatccctgcatgggtgatgtcgca

SEQ ID NO: 325008 - DNA, 75 bp, synthetic construct
  source 1..75: mol_type = other DNA
gagttcaatgtcggttatgggaagtataaaactccgtatttcccattacaggagatggaagccttcctcggtgcg

SEQ ID NO: 325009 - DNA, 75 bp, synthetic construct
  source 1..75: mol_type = other DNA
tatgtgggggtcgcctcagaaaacggaatctatggtcactcccgtttttgcaacaccgattttgacgacaagttg

SEQ ID NO: 325010 - DNA, 75 bp, synthetic construct
  source 1..75: mol_type = other DNA
acacctgaagggacgggtaaacgatgcgtggacatcactggaatttaaacgtagtgaccattcactcaatatata

SEQ ID NO: 325011 - DNA, 75 bp, synthetic construct
  source 1..75: mol_type = other DNA
gaatggtggtattgctggcaattgcatttttgctgtcagtaaacaagaagaagatcagcctgcgtaccgttggcg

SEQ ID NO: 325012 - DNA, 75 bp, synthetic construct
  source 1..75: mol_type = other DNA
agctgttccagcttgattatcgcgttctgttgcaacaccacgccttgcgtgcccttccgaagaaagaagctgcac

SEQ ID NO: 325013 - DNA, 75 bp, synthetic construct
  source 1..75: mol_type = other DNA
gcagattgaaaaacttggcgtagatgccgtgtcggtcattgccccttacttcgtaccgctgaaacaggaagagtt

SEQ ID NO: 325014 - DNA, 75 bp, synthetic construct
  source 1..75: mol_type = other DNA
ttgcggcggcaccaacggcgaattttttgtgttgaatgaacaggagaagctcagcgttacgcaaacctgcgtgga

SEQ ID NO: 325015 - DNA, 75 bp, synthetic construct
  source 1..75: mol_type = other DNA
aaggatacctggcagtacggaatgcgtttaacaaacaagtctatgatgatttacatcgcgcagcggcgtttttgt

SEQ ID NO: 325016 - DNA, 75 bp, synthetic construct
  source 1..75: mol_type = other DNA
ctggaggctgattccaagttatgggaaatcttccagctagactatcgggtgcttctacagcaacacgcacttcgc

SEQ ID NO: 325017 - DNA, 75 bp, synthetic construct
  source 1..75: mol_type = other DNA
acgattctttaggtcggttacgcaacaaaggcatctcattcaaaagagggaaaagtgctcgtggaagctacaata

SEQ ID NO: 325018 - DNA, 75 bp, synthetic construct
  source 1..75: mol_type = other DNA
cgctgaaattgatgaagacggcaacgtgactgacctgcgccccagaggaaccccggaagagcgccgcagtctgga

SEQ ID NO: 325019 - DNA, 75 bp, synthetic construct
  source 1..75: mol_type = other DNA
cggtggagcacgatattatcatggccgaccccgccgccacggaagagatcctgctggaagcacacaggaaggagg

SEQ ID NO: 325020 - DNA, 75 bp, synthetic construct
  source 1..75: mol_type = other DNA
agcgtctcaaacactaaccttggcacgaaaacgacctcatccttcaattacggcacaaaaacaacaggaagcgcg

SEQ ID NO: 325021 - DNA, 75 bp, synthetic construct
  source 1..75: mol_type = other DNA
acgccttttacctcgaatgtggccgggacgctcgaatgttcggtgtcgcaatattccaatacgacggcaaggctt

SEQ ID NO: 325022 - DNA, 75 bp, synthetic construct
  source 1..75: mol_type = other DNA
aattaagcagcgccacggatagcgattctgaagaagtagcggcaacgccgaaagcggttaaggcaacctatgacc

SEQ ID NO: 325023 - DNA, 75 bp, synthetic construct
  source 1..75: mol_type = other DNA
tttggcgatggctggatggtcggtaaaacgggtaatcagttctttgtcaccaacggcactggctacgtggcaggg

SEQ ID NO: 325024 - DNA, 75 bp, synthetic construct
  source 1..75: mol_type = other DNA
aagaatatcccggaacccacgccgccggaaccggtcacccgcccggtggagctttatatcaatggtgaactggtg

SEQ ID NO: 325025 - DNA, 75 bp, synthetic construct
  source 1..75: mol_type = other DNA
acggtcgggaaaaaggattcacctggattattgatatcaataacgacgattcgctcgatatcagtatcagcctga

SEQ ID NO: 325026 - DNA, 75 bp, synthetic construct
  source 1..75: mol_type = other DNA
cgaaaatcctgttcctcaacaacgccattaaccacggtatcttctcgccgctgggcattcagcagtcccatgaac

SEQ ID NO: 325027 - DNA, 75 bp, synthetic construct
  source 1..75: mol_type = other DNA
aggcggcggtgactggaccgcatacgggccgggctccggggcgaacctgatcgccagagtttcggaacacacaca

SEQ ID NO: 325028 - DNA, 75 bp, synthetic construct
  source 1..75: mol_type = other DNA
cgcactgcctgcaagtgagttgttacccgcaggtgttcccctgccgtggccgtcagataccccgcctagcggtta

SEQ ID NO: 325029 - DNA, 75 bp, synthetic construct
  source 1..75: mol_type = other DNA
cgcaaccacccggacgcaacgctgaaagaaaagggcttcacacagttaagcagcgccaccaccagtacatcagaa

SEQ ID NO: 325030 - DNA, 75 bp, synthetic construct
  source 1..75: mol_type = other DNA
acgaaaagtgaacggccatgccctgaatggagatatcaatgtcacttcacgggatatttttgacggccaggttat

SEQ ID NO: 325031 - DNA, 75 bp, synthetic construct
  source 1..75: mol_type = other DNA
accgcgcagcgctggcaacccttacagctattggtcgcgctattatcgctaagggcagtataaaagatgtcctca

SEQ ID NO: 325032 - DNA, 75 bp, synthetic construct
  source 1..75: mol_type = other DNA
ttgagacttggtattcatttttcgtcttgcgacgttaagaatccgtatcttcgagtgcccacacagattgtctga

SEQ ID NO: 325033 - DNA, 75 bp, synthetic construct
  source 1..75: mol_type = other DNA
cgaaaactactcacatctcaccaagcagtctggtccgaaaaaaaaatacattcgatgtatgtttcaccggattta

SEQ ID NO: 325034 - DNA, 75 bp, synthetic construct
  source 1..75: mol_type = other DNA
tggcgaggtcctggttactgggatacttctggatatgttctgaccgcagccggaaacagcaacaccgatgaattt

SEQ ID NO: 325035 - DNA, 75 bp, synthetic construct
  source 1..75: mol_type = other DNA
tacaggaaacggtaaacagggctggtaacgccgttcagcgttccggcgataaaatgaccggagaactgaaaattg

SEQ ID NO: 325036 - DNA, 75 bp, synthetic construct
  source 1..75: mol_type = other DNA
atgtatttacatatcagaaagtatcaactcgtaaatgcgagatggcgtgatatcattgatctgacagattatgaa

SEQ ID NO: 325037 - DNA, 75 bp, synthetic construct
  source 1..75: mol_type = other DNA
aaagatacgaccacaggattgattattcagtggggatttaccaaccagacaggcggttatcaaaatattacgttc

SEQ ID NO: 325038 - DNA, 75 bp, synthetic construct
  source 1..75: mol_type = other DNA
gacgcaacgctgaaagaaaagggcttcacacagttaagcagcgccaccaccagtacatcagagacacaggcagcc

SEQ ID NO: 325039 - DNA, 75 bp, synthetic construct
  source 1..75: mol_type = other DNA
agacatccccaacaaggagctgttcctgatcaacgtgggcgcaccacgcgtttatgcaaaagacgggtacgtggg

SEQ ID NO: 325040 - DNA, 75 bp, synthetic construct
  source 1..75: mol_type = other DNA
aacactaggtttttctggctggagtcgtgatgaatcaacggggctgattatgcagtggggaaatgttgacaatgc

SEQ ID NO: 325041 - DNA, 75 bp, synthetic construct
  source 1..75: mol_type = other DNA
ccgaaatggcgcggatatcccgaacccggctttgttcatccagaatatcggattgcagcaaacggttgatctggc

SEQ ID NO: 325042 - DNA, 75 bp, synthetic construct
  source 1..75: mol_type = other DNA
cctgcggcgcaaattgttcaccgtcagcccgtcacccgcagcggcgtggtgaatgaaaacagcgtggtgttttct

SEQ ID NO: 325043 - DNA, 75 bp, synthetic construct
  source 1..75: mol_type = other DNA
ccgctggcattatcggaatgatcctcgccattctggcattcctcggcatcggtccgattgttgaagccctgtcca

SEQ ID NO: 325044 - DNA, 75 bp, synthetic construct
  source 1..75: mol_type = other DNA
acgactacatggttattggccttgcgcgtatcgacgaccgtctgattcacggtcaggtcgccacccgctggacca

SEQ ID NO: 325045 - DNA, 75 bp, synthetic construct
  source 1..75: mol_type = other DNA
aaaaaatacctttcaggaagtcttttttcaaaattcagacaagatactattatcccggaggcattgagcaccctc

SEQ ID NO: 325046 - DNA, 75 bp, synthetic construct
  source 1..75: mol_type = other DNA
aaatcaaaaatggtgtaccgacggtaggagtcatcgacacatccggaaaacctgtcgttgtagcccaggacaaac

SEQ ID NO: 325047 - DNA, 75 bp, synthetic construct
  source 1..75: mol_type = other DNA
atgttcgacagaatacgggaggcgtgcgcgtatgtgactggggccgtaactgcttttttcggcgcgataaccatc

SEQ ID NO: 325048 - DNA, 75 bp, synthetic construct
  source 1..75: mol_type = other DNA
atggcggttaaattagaagtaattatctataccgatgaaaaaggctgtgttttaacccagaccacggggagttat

SEQ ID NO: 325049 - DNA, 75 bp, synthetic construct
  source 1..75: mol_type = other DNA
aaccggagcatggaaagacgctgttgactgggtgctcaaagaggcctgccaagttgtaaacactggcatcaaagg

SEQ ID NO: 325050 - DNA, 75 bp, synthetic construct
  source 1..75: mol_type = other DNA
gtggacgaggtactggatattcaccagcgcgacgcggaaaacaccatgcgcgaactggcggtgcgggaagggatt

SEQ ID NO: 325051 - DNA, 75 bp, synthetic construct
  source 1..75: mol_type = other DNA
ggatagatatggatataaaacaaaacgagcattattcaaagatatgaaacattctattatacatcttacaaatgg

SEQ ID NO: 325052 - DNA, 75 bp, synthetic construct
  source 1..75: mol_type = other DNA
aacaaatacagcattagccctgaaagatatctcaaggcagctatagcaattttgtacgctgacaatattttggtg

SEQ ID NO: 325053 - DNA, 75 bp, synthetic construct
  source 1..75: mol_type = other DNA
gcattgcgctggcaatgattgccgcgctgaaaggctatcgcatgaaattgctgatgcccgacaacatgagccagg

SEQ ID NO: 325054 - DNA, 75 bp, synthetic construct
  source 1..75: mol_type = other DNA
cgacaacatgagccaggaacgccgtgcggcgatgcgtgcctacggtgcggagctgattctggtcaccaaagaaca

SEQ ID NO: 325055 - DNA, 75 bp, synthetic construct
  source 1..75: mol_type = other DNA
gcgctggaaatggcaaatcgtggggaaggcaagctgctcgatcagttcaacaatcccgataatccctatgcacat

SEQ ID NO: 325056 - DNA, 75 bp, synthetic construct
  source 1..75: mol_type = other DNA
tggttgccacgggggccaactccatgtcgtgggagtaccgttacaccctgaacgcggtgattgaggatttcagcg

SEQ ID NO: 325057 - DNA, 75 bp, synthetic construct
  source 1..75: mol_type = other DNA
tgaggtggatattctgcgcaacgatgtctgtgatatcagcctcaacctgcaactgacggagcgtgtgctggtcag

SEQ ID NO: 325058 - DNA, 75 bp, synthetic construct
  source 1..75: mol_type = other DNA
ccatgaggatctatcatgtaaatggtcatcctgatgcacggcagttatttcactgttttgatgccgattgtctgt

SEQ ID NO: 325059 - DNA, 75 bp, synthetic construct
  source 1..75: mol_type = other DNA
aacgtggtgatagaggatttcagcggcgaccagaatctgcttatggccccggttttgctgtggctgcgggataac

SEQ ID NO: 325060 - DNA, 75 bp, synthetic construct
  source 1..75: mol_type = other DNA
tgcaaagctttggtcgtttcctcagcaacatggtgatgccaaatatcggcgcgtttatcgcgtgggggatcatca

SEQ ID NO: 325061 - DNA, 75 bp, synthetic construct
  source 1..75: mol_type = other DNA
gggcgctgactgatgccgtcacggtgctgaaaaccagtccagagatgctgcggatattcgtggataacgggagta

SEQ ID NO: 325062 - DNA, 75 bp, synthetic construct
  source 1..75: mol_type = other DNA
cactgacggcagtgtgtcgagtgttgaagctgtagcggaacctgatgaacctgaagaaatgtggacggtgaaacg

SEQ ID NO: 325063 - DNA, 75 bp, synthetic construct
  source 1..75: mol_type = other DNA
acttacgcatcgacccatttactgcggcggtggtcaccatcatgatcaactccggcgcgtacattgcggaaatca

SEQ ID NO: 325064 - DNA, 75 bp, synthetic construct
  source 1..75: mol_type = other DNA
aggcgctgattaacgctgtaccccagctcagaaacaaccccgatatgctgcgtcttttcgccgacaacgggcata

SEQ ID NO: 325065 - DNA, 75 bp, synthetic construct
  source 1..75: mol_type = other DNA
cactgatggcagtgtgtcgagtgttgaagctgtagcggaacccgatgaacctgaagaaatgtggacggtgaaacg

SEQ ID NO: 325066 - DNA, 75 bp, synthetic construct
  source 1..75: mol_type = other DNA
cgttacgggaaaaactattcacctttgaggtggatattttgcgcaacgatgtctgtgatatcagccttaacctgc

SEQ ID NO: 325067 - DNA, 75 bp, synthetic construct
  source 1..75: mol_type = other DNA
gcgccctcgtttttttgccgatcagtaataccgagtggcagggtgtcgacggacaggtggtgacggtatacggtc

SEQ ID NO: 325068 - DNA, 75 bp, synthetic construct
  source 1..75: mol_type = other DNA
ctgggtaaccaatggatcatcagcattaaggacacctcgctgtttattgttatcggcgtagcggaactgacccgg

SEQ ID NO: 325069 - DNA, 75 bp, synthetic construct
  source 1..75: mol_type = other DNA
acctcgcagaaaagaatgggttagtgggcagcagtacagttacgtacttctcgaaaacgtagaagctatggttga

SEQ ID NO: 325070 - DNA, 75 bp, synthetic construct
  source 1..75: mol_type = other DNA
tatttcggtgaatttcgatagctctctggttgaaccgctaatatgctccgcacgctataccggaagcacctttcg

SEQ ID NO: 325071 - DNA, 75 bp, synthetic construct
  source 1..75: mol_type = other DNA
ggcatggaagtttccattgatgtaagcacttgtgatgctgatttaggtaatcgctatttcggcaccgtcaccgag

SEQ ID NO: 325072 - DNA, 75 bp, synthetic construct
  source 1..75: mol_type = other DNA
tgattaaagaaaccaaagagcgtatcagcagcctggaggttcgagacgatattgagcgccgtgcttatgaaattg

SEQ ID NO: 325073 - DNA, 75 bp, synthetic construct
  source 1..75: mol_type = other DNA
ccaattgattacaaaaaatatagagctttcacgtatttatcaggatatatcttggatgacgtaacccactggatg

SEQ ID NO: 325074 - DNA, 75 bp, synthetic construct
  source 1..75: mol_type = other DNA
aactggcacgaattgctctggcatcgctggaagcagagcctattggtgaggtttcagagaagcgactcggccttg

SEQ ID NO: 325075 - DNA, 75 bp, synthetic construct
  source 1..75: mol_type = other DNA
cgtcaaccagctctccggtaactccggctcttctgcctggtggtttcaccattgaggaggcgaaggaattacatg

SEQ ID NO: 325076 - DNA, 75 bp, synthetic construct
  source 1..75: mol_type = other DNA
cactatcgggcaactatccggtaactccggatagttggataagctgtagtgagcgaatgccggataccaaaacag

SEQ ID NO: 325077 - DNA, 75 bp, synthetic construct
  source 1..75: mol_type = other DNA
gacggagagtttttcgatattgtccgcaatggtgatgaatttttcgaaacacagagtcgcaatgtaaccgactgg

SEQ ID NO: 325078 - DNA, 75 bp, synthetic construct
  source 1..75: mol_type = other DNA
gagcatggaaagacgctgttgactgggtactcaaagaggcctgccgcgctgccatgcttcatagtgccgaacctg

SEQ ID NO: 325079 - DNA, 75 bp, synthetic construct
  source 1..75: mol_type = other DNA
ccatatgaatccggcacgagtagcgtgggtcagggcgcagacagggcaggcagcgccggacggactggttaaagc

SEQ ID NO: 325080 - DNA, 75 bp, synthetic construct
  source 1..75: mol_type = other DNA
atgaaaaagaaagatcgcgatgctgatttgcgctggattcatggcgttatagttcaggcagcgtggtttgtaaaa

SEQ ID NO: 325081 - DNA, 75 bp, synthetic construct
  source 1..75: mol_type = other DNA
aacaaatggtgggcagttactgacaatggggaagaaccggcatcgaaagtaacccactggatgccgctaccggaa

SEQ ID NO: 325082 - DNA, 75 bp, synthetic construct
  source 1..75: mol_type = other DNA
agtgccggtaactccggatggttggataagctgtagtgatcgaatgcctgtaattggcgagctaaattggagaac

SEQ ID NO: 325083 - DNA, 75 bp, synthetic construct
  source 1..75: mol_type = other DNA
tggcttggtgatgatatcagcatccctgaatgcgatgtaatcaattggatgccgctaccggaaccgccgcaggag

SEQ ID NO: 325084 - DNA, 75 bp, synthetic construct
  source 1..75: mol_type = other DNA
tacaagttgaacgagctatctggcaactatccggcaactccggatagttggataagctgtagtgagcgaatgccg

SEQ ID NO: 325085 - DNA, 75 bp, synthetic construct
  source 1..75: mol_type = other DNA
gctggaacgcctgccgcgccgctatgcttcagagtcaagatagtggcatcaaagatggttggataagctgtagtg

SEQ ID NO: 325086 - DNA, 75 bp, synthetic construct
  source 1..75: mol_type = other DNA
tacagaacacgattaccggaattgaatcgataatggacgatacatcgtttgtatgtagcgaaatagcattcgaaa

SEQ ID NO: 325087 - DNA, 75 bp, synthetic construct
  source 1..75: mol_type = other DNA
taatcgctgaagcttggcgtttgatggatggacaagaccctaaaaccagcgattggcatagcaaggcttcgaagt

SEQ ID NO: 325088 - DNA, 75 bp, synthetic construct
  source 1..75: mol_type = other DNA
agcccacttgggatgacggtgatggcgaagacctgtatctcaaggaggtaacccactggatgccgctgccagaac

SEQ ID NO: 325089 - DNA, 75 bp, synthetic construct
  source 1..75: mol_type = other DNA
tcgaattattcattaaaaatccgcttgataacggacttacccgtggcgaacaaatggaacttgcacggattgcgc

SEQ ID NO: 325090 - DNA, 75 bp, synthetic construct
  source 1..75: mol_type = other DNA
agatgaaatcgagccagacgatagcaatacgtttgattatgttgatggctggaacgcctgccgcgccgccatgct

SEQ ID NO: 325091 - DNA, 75 bp, synthetic construct
  source 1..75: mol_type = other DNA
ggtaactccggatggttggataagctgtagtgagcaaatgcccgctcaagatgattggattttaatttattcaaa

SEQ ID NO: 325092 - DNA, 75 bp, synthetic construct
  source 1..75: mol_type = other DNA
acgctaatgatggttggataattcctggtgcgtcgtggattccatcacactggatgccgttaccagaaccgccgc

SEQ ID NO: 325093 - DNA, 75 bp, synthetic construct
  source 1..75: mol_type = other DNA
cactggcatcgctggaagcagaaccaattgcttatattttcaaacatccggccgggaaattattctgggctttaa

SEQ ID NO: 325094 - DNA, 75 bp, synthetic construct
  source 1..75: mol_type = other DNA
cgtcgcgcctatcactactggtgatgtggtgctgcaaagcgcacgcagcgtggcggtaggcgtcatgctgggtat

SEQ ID NO: 325095 - DNA, 75 bp, synthetic construct
  source 1..75: mol_type = other DNA
tttactcagctaagcagcgcgaccaacagcacgtctgaaacactggccgcaacgccgaaagcggtaaaggccgca

SEQ ID NO: 325096 - DNA, 75 bp, synthetic construct
  source 1..75: mol_type = other DNA
caaatgaccgcgaaggacactttgtgacggccggtgaggccatgagcgcaccggggcaggtatggagttgcgctt

SEQ ID NO: 325097 - DNA, 75 bp, synthetic construct
  source 1..75: mol_type = other DNA
aaaggtactaataatactcagatcgcaagtacggcttatgtgatggccgcgattgccgcccttgtagactcgtcg

SEQ ID NO: 325098 - DNA, 75 bp, synthetic construct
  source 1..75: mol_type = other DNA
ccagtcggtgcaccaatcccgtggccatcagataccgttccgtctggttatgccctgatgcaggggcagactttt

SEQ ID NO: 325099 - DNA, 75 bp, synthetic construct
  source 1..75: mol_type = other DNA
tactgcggcagacaggtttccgtattttacggggaatgatgtcgccagcctggcaactctgacaaaagtagggcg

SEQ ID NO: 325100 - DNA, 75 bp, synthetic construct
  source 1..75: mol_type = other DNA
tcttcagaaagatcagaacggtgcggatattccgggaaaggataccttcacgaaaaatatcggtgcctgtcgtgc

SEQ ID NO: 325101 - DNA, 75 bp, synthetic construct
  source 1..75: mol_type = other DNA
agccaaatatccgaagctggcgacggcatacacttcaggtactttaccagatttacgcggtgagtttttacgcgg

SEQ ID NO: 325102 - DNA, 75 bp, synthetic construct
  source 1..75: mol_type = other DNA
cacaaaaagggatagtccagctcagtagtgccaccaacagcacgtctgaaacactggccgcgacatcgaaagcgg

SEQ ID NO: 325103 - DNA, 75 bp, synthetic construct
  source 1..75: mol_type = other DNA
cggcagacaagtttccgtattttacggggaatgatgtcgccagcctggcaaccctgacaaaagtcgggcgggata

SEQ ID NO: 325104 - DNA, 75 bp, synthetic construct
  source 1..75: mol_type = other DNA
ctagtaaatgagaaacgtcgggctgcgctgaatatgctctatatcgacccacagaacagcagccagattattgct

SEQ ID NO: 325105 - DNA, 75 bp, synthetic construct
  source 1..75: mol_type = other DNA
tcacgcacgccattggcaataacgtcagtgatgcgctttttcacgctattgaactgtgccaaaagcaccaaacgc

SEQ ID NO: 325106 - DNA, 75 bp, synthetic construct
  source 1..75: mol_type = other DNA
ggggtgcttccacccgtccagtggttgcagaattaggcgatgaggccggatggcatttctatagccagcgaaata

SEQ ID NO: 325107 - DNA, 75 bp, synthetic construct
  source 1..75: mol_type = other DNA
ccgcacaggacgccaccaccgcgcgaaaaggccttgtccagctaagtagcgtcaccaacagcgattctgaaacgc

SEQ ID NO: 325108 - DNA, 75 bp, synthetic construct
  source 1..75: mol_type = other DNA
cgtcattaaagctgacggtctggcagcgggtaaaggcgttatcgtcgcgatgacgctggaagaagccgaagcggc

SEQ ID NO: 325109 - DNA, 75 bp, synthetic construct
  source 1..75: mol_type = other DNA
aatactggtgggatgggggcttactcccctgcgccggtggtcactgatgaagtgcatcagcgcaccatggaacgc

SEQ ID NO: 325110 - DNA, 75 bp, synthetic construct
  source 1..75: mol_type = other DNA
tactgtgcgtcaccgcgctgggtcataccgtggcagaagcgcagaaacgcgcctatgccttaatgaccgatatcc

SEQ ID NO: 325111 - DNA, 75 bp, synthetic construct
  source 1..75: mol_type = other DNA
cgacccggcgcaaaaagatccactaacgccgtatctggtcaatgtgaaacaaactgacctcgagccggggaaata

SEQ ID NO: 325112 - DNA, 75 bp, synthetic construct
  source 1..75: mol_type = other DNA
tctctcttctgagcatggctctcttaacccgcagcaactcccggaaacggcagtcaaactggacggcgttaatcg

SEQ ID NO: 325113 - DNA, 75 bp, synthetic construct
  source 1..75: mol_type = other DNA
gcgggcgcgagcatgcgctggcctggaaagcagcgcagtcgccgctggctgagaaagtgtttgtcgcaccaggca

SEQ ID NO: 325114 - DNA, 75 bp, synthetic construct
  source 1..75: mol_type = other DNA
tacagcgcgaaaaggccttgttcagctcagtagcgccaccaacagcgattctgaaacgctggcggcaacaccaaa

SEQ ID NO: 325115 - DNA, 75 bp, synthetic construct
  source 1..75: mol_type = other DNA
ggtaattacgccacgggtgttaatattcagtgggattataccagtaacgccagcgtaacgattcatacatcacca

SEQ ID NO: 325116 - DNA, 75 bp, synthetic construct
  source 1..75: mol_type = other DNA
cttattgtgcacaggatggcggagcatcaaaaatggtgctgcatttttacacgggtgagggaagttgtccggcaa

SEQ ID NO: 325117 - DNA, 75 bp, synthetic construct
  source 1..75: mol_type = other DNA
caccgaggtagaacctgcgctggcgtatctgcgtgagaaaggcgcgccaatcgtcattaaagcggacggtctggc

SEQ ID NO: 325118 - DNA, 75 bp, synthetic construct
  source 1..75: mol_type = other DNA
caagctggacgagaaaacgtccgagtgggatgaacgcgcttctctcggcgtggtgatggctgcgggtggatatcc

SEQ ID NO: 325119 - DNA, 75 bp, synthetic construct
  source 1..75: mol_type = other DNA
tcgcacaaaacgaaaagattgatctgaccatcgtcggcccggaagcgccgctggtgaaaggcgtggtcgatacct

SEQ ID NO: 325120 - DNA, 75 bp, synthetic construct
  source 1..75: mol_type = other DNA
gggcgatttttagaaaggacagaaaatagcgcagccgcacaaaattatctgattgcgcatgattaccagacaacg

SEQ ID NO: 325121 - DNA, 75 bp, synthetic construct
  source 1..75: mol_type = other DNA
ggaactgcatctgccatcgctatcgcctcacaaccacaggtgaaaaccggtgacttgatgatggtgtcagcggga

SEQ ID NO: 325122 - DNA, 75 bp, synthetic construct
  source 1..75: mol_type = other DNA
gagtttgagcctctctacgagatgaccgagaaagagaaagcggaaatccgcaagattgacgctgacaccgacgcg

SEQ ID NO: 325123 - DNA, 75 bp, synthetic construct
  source 1..75: mol_type = other DNA
gcctcacaaccacaggtgaaaaccggtgacgtgatgatggtctcagcgggagcgggaaccttcaacggtgaatct

SEQ ID NO: 325124 - DNA, 75 bp, synthetic construct
  source 1..75: mol_type = other DNA
aaaatgaggctaatcagcgcactaccacggaacaagggcagaaaatgaatgcactgacaaccgatgtggcagcac

SEQ ID NO: 325125 - DNA, 75 bp, synthetic construct
  source 1..75: mol_type = other DNA
cagcccttttgttttagctggtgataccattgaagcggcggcaacagagctttcagccattaactcgggcatgtc

SEQ ID NO: 325126 - DNA, 75 bp, synthetic construct
  source 1..75: mol_type = other DNA
tgacccgtaagtggataaaggttaaggcggtcggagaaggggacgacagccacgcgtcacgcatagcgcagctta

SEQ ID NO: 325127 - DNA, 75 bp, synthetic construct
  source 1..75: mol_type = other DNA
cccagcggatggagaaaaacatcatggggcttttactcagtcttatcgtgattgttgccgcatttaatatcatca

SEQ ID NO: 325128 - DNA, 75 bp, synthetic construct
  source 1..75: mol_type = other DNA
cgtcgttctggcaacaatactcatctccttattgtccacactgtatccggcatggaaagcagcatccataccgcc

SEQ ID NO: 325129 - DNA, 75 bp, synthetic construct
  source 1..75: mol_type = other DNA
ctgcaggcacagtcgcaggagcacatgtcagcggtttcgagcatcccgctcgtcaaactactgggcattactcca

SEQ ID NO: 325130 - DNA, 75 bp, synthetic construct
  source 1..75: mol_type = other DNA
gctgagcccggatttctacaagccgactcagtggtttgtcatgggccggaccgtacatgcaagccggatgattga

SEQ ID NO: 325131 - DNA, 75 bp, synthetic construct
  source 1..75: mol_type = other DNA
cattcacgccctgcagcagtctgtttttaaagacaacctgaagcgcgtgatggacatcattcagctctctgagtt

SEQ ID NO: 325132 - DNA, 75 bp, synthetic construct
  source 1..75: mol_type = other DNA
agatcgtagccacacaaaaaacgctcgccgcgactggagatacgcaaaatactgcgcattatcaggagatgatta

SEQ ID NO: 325133 - DNA, 75 bp, synthetic construct
  source 1..75: mol_type = other DNA
gaggcgttgaaaaatactcctgataattaccgggagtttttcagggaccgactgaattactggagaggggaacga

SEQ ID NO: 325134 - DNA, 75 bp, synthetic construct
  source 1..75: mol_type = other DNA
tttatcgcgccatcttggcgaagacgaagtttttgatggcttttcggcaatgaaattgcgtaattattatttgct

SEQ ID NO: 325135 - DNA, 75 bp, synthetic construct
  source 1..75: mol_type = other DNA
ggcgattaccgaacagcaggaacaaatcactgccacgcaaaaaaccgttgccgccacgggtgatgtaaagaccgc

SEQ ID NO: 325136 - DNA, 75 bp, synthetic construct
  source 1..75: mol_type = other DNA
cagacttggattgtgaagcatcccttccccgagaagagaagcgtgtcaatacgttcctctcgacacaaaagaagc

SEQ ID NO: 325137 - DNA, 75 bp, synthetic construct
  source 1..75: mol_type = other DNA
aagagtggcgacacagagctgcggctcttcaaaccaagattgaggaggctatgacactagccacctcatctattg

SEQ ID NO: 325138 - DNA, 75 bp, synthetic construct
  source 1..75: mol_type = other DNA
ctctgggatcctggaggcctgatgccagtgaatacagtaatgttaccaacgtttatcgcattacattgaaatccc

SEQ ID NO: 325139 - DNA, 75 bp, synthetic construct
  source 1..75: mol_type = other DNA
aagagatggttaacgccggactgagagcacaaaatgatgcgaatgcgcgtactgcagcagaacaaaaacaaaaaa

SEQ ID NO: 325140 - DNA, 75 bp, synthetic construct
  source 1..75: mol_type = other DNA
ctctgaaaaacgaagttgaggacaatcgtaaagaagccaatgcgggaactgcatcagccatcgctatcgcctcac

SEQ ID NO: 325141 - DNA, 75 bp, synthetic construct
  source 1..75: mol_type = other DNA
ggtcgatttttagaaaggacagggaacagtgctgctacacaaaattatctaattgcacataattacaaaactaca

SEQ ID NO: 325142 - DNA, 75 bp, synthetic construct
  source 1..75: mol_type = other DNA
tgaacaaattcgaaaccttgcgcaagactcggcccaggcacatgagcaaatcgaaagtctgacacaagattctgc

SEQ ID NO: 325143 - DNA, 75 bp, synthetic construct
  source 1..75: mol_type = other DNA
ggcgctggaacgtctgtttagcgcactggtgaattatcgcgagtcacatcagcgtccgctggtgattgtgcacgg

SEQ ID NO: 325144 - DNA, 75 bp, synthetic construct
  source 1..75: mol_type = other DNA
tgaacaaattgacagcctgacacaagacgtaacccaaacgcatcagcagttaagcaacacgcaaaaacgagtagc

SEQ ID NO: 325145 - DNA, 75 bp, synthetic construct
  source 1..75: mol_type = other DNA
cagtactggtcgccgttctctccatcgcactgctgctgtatatggcctgggctgggctaccgactagccgaaatg

SEQ ID NO: 325146 - DNA, 75 bp, synthetic construct
  source 1..75: mol_type = other DNA
gcgttaggtgtaggtcgcgttttccgttcgtggatcaaggggcgcattgaagaatacggcttcacggaaggcgtg

SEQ ID NO: 325147 - DNA, 75 bp, synthetic construct
  source 1..75: mol_type = other DNA
aaaagcctgctggatgccattacatttacagaaaatggccgcgaattaacactcaccgaccgaggaaatggagaa

SEQ ID NO: 325148 - DNA, 75 bp, synthetic construct
  source 1..75: mol_type = other DNA
cgccggagttcctcacaccacggcgctgatagtgattattctgattctttggccttgcggcgctggagttcttcg

SEQ ID NO: 325149 - DNA, 75 bp, synthetic construct
  source 1..75: mol_type = other DNA
ataagctgggtaatcgctctaacgccagttgcgaagtggagtttcaggacgccattggctggttgttggggcagg

SEQ ID NO: 325150 - DNA, 75 bp, synthetic construct
  source 1..75: mol_type = other DNA
gaagcgtttatggaagtgaaaggacaggatcgctattttgatcgcgcggttcgtcgtttacagcagcaactgcgc

SEQ ID NO: 325151 - DNA, 75 bp, synthetic construct
  source 1..75: mol_type = other DNA
cgtggtgtcaggtgatgctagatacgcgcggcgcagagcagatccagaatgatttattgctgcgggcgacagggg

SEQ ID NO: 325152 - DNA, 75 bp, synthetic construct
  source 1..75: mol_type = other DNA
aacggactcaaacccaaacacaccccggtagaatcaaaattgccgcaatggccaagcaatccaaatagcttctga

SEQ ID NO: 325153 - DNA, 75 bp, synthetic construct
  source 1..75: mol_type = other DNA
cactggctctggtcctgatgctgctgattttgggtagcttgctattgcaaggaatgagtcagcaggatcgcagtt

SEQ ID NO: 325154 - DNA, 75 bp, synthetic construct
  source 1..75: mol_type = other DNA
tcagaatataccgattcaatggtcggctttaaaactcccgttttaaatgattttactggtgaatgttttaagcgc

SEQ ID NO: 325155 - DNA, 75 bp, synthetic construct
  source 1..75: mol_type = other DNA
tgagaggagagggattaagcaaagactctcgcttctggcgtgctttttcgcgctggcgctcaattatggataatg

SEQ ID NO: 325156 - DNA, 75 bp, synthetic construct
  source 1..75: mol_type = other DNA
atgactcacaaacaggaaataatgaatataatcttataaaaactggagagccattaaaaaaattgccatataaac

SEQ ID NO: 325157 - DNA, 75 bp, synthetic construct
  source 1..75: mol_type = other DNA
cgcagaagagaaaccgatcctcgacgttcagcatctcggtattggtggtaaggacgatcctgcccgcctgatctt

SEQ ID NO: 325158 - DNA, 75 bp, synthetic construct
  source 1..75: mol_type = other DNA
aaggagaaggtattcgcctgatcctgaaaatgggcgggatgacgcgttttgattgcgccctgggtagccatgcca

SEQ ID NO: 325159 - DNA, 75 bp, synthetic construct
  source 1..75: mol_type = other DNA
acctcgtcattacaggaaatggcggtcgggtctgtcacaaatcatctccacgcaactggaggtgtcacgcgccga

SEQ ID NO: 325160 - DNA, 75 bp, synthetic construct
  source 1..75: mol_type = other DNA
cctttgctgtcagtcatcaatgaaccagcaaaagtgcttttcctcaataacgctatcgatcagggcgtctattat

SEQ ID NO: 325161 - DNA, 75 bp, synthetic construct
  source 1..75: mol_type = other DNA
cgctgatatacctatgttccttggttcaatgattatggggccgctgggcggcctggtgattaaatacatcgataa

SEQ ID NO: 325162 - DNA, 75 bp, synthetic construct
  source 1..75: mol_type = other DNA
gcaacggctatttataccctctactggttaatacacgatataaaacaatccgatagcggagacaaaatgcaatga

SEQ ID NO: 325163 - DNA, 75 bp, synthetic construct
  source 1..75: mol_type = other DNA
gagtcattacgcaaagtctgcgaaattatccgcgatgacattcacgccgatgcggtggcgatgactaataccgat

SEQ ID NO: 325164 - DNA, 75 bp, synthetic construct
  source 1..75: mol_type = other DNA
gcaggcgttatgtaccaatcgggtacacaatctggcctgggaagaagacgctcgctccggcgcatttgtggcgcg

SEQ ID NO: 325165 - DNA, 75 bp, synthetic construct
  source 1..75: mol_type = other DNA
gcgcggtggcgtgcgggtgtcagagcagatccagaatgatttattactgcgggcgacgggaggcgtgtttttgta

SEQ ID NO: 325166 - DNA, 75 bp, synthetic construct
  source 1..75: mol_type = other DNA
ggcggaattggctattgcgaggagagcgagctgccgcgtctttatcgggagatgccggtaaacagtatttgggaa

SEQ ID NO: 325167 - DNA, 75 bp, synthetic construct
  source 1..75: mol_type = other DNA
tgctaaaccggtagaagaagtgaatgcagaaattcggcgtatcgtcgatgatatgttcgagacgatgtacgcaga

SEQ ID NO: 325168 - DNA, 75 bp, synthetic construct
  source 1..75: mol_type = other DNA
aaacaggcattgaagaaggttgcctgtcgatccctgaacaacgtgctttagtgccacgcgcagagaaagttaaaa

SEQ ID NO: 325169 - DNA, 75 bp, synthetic construct
  source 1..75: mol_type = other DNA
agatggatcacctggtcgcaaactgttatggattatctgtcaccgttgaaacaacaacgtattcgtcagaaagtt

SEQ ID NO: 325170 - DNA, 75 bp, synthetic construct
  source 1..75: mol_type = other DNA
ccaggttcgcctaagcttatcaatacgttgctggaaaacggttatctcccggtggttagctccattggcgtaacc

SEQ ID NO: 325171 - DNA, 75 bp, synthetic construct
  source 1..75: mol_type = other DNA
cgggacgtgtacggtgataatccggctgcgctggcgaaggccacatctgcactgaagaacacctggtctgcggag

SEQ ID NO: 325172 - DNA, 75 bp, synthetic construct
  source 1..75: mol_type = other DNA
gcgtgcaacaggcgtcagcaaaggtccggggcagcaggaagccgtcaggagcgccgcgtcggctgaagagctgac

SEQ ID NO: 325173 - DNA, 75 bp, synthetic construct
  source 1..75: mol_type = other DNA
ccagacgtttgttgtgttgtgtgcctgcgcaatattacgctggcagctggggacgcgttggcgttatggattgac

SEQ ID NO: 325174 - DNA, 75 bp, synthetic construct
  source 1..75: mol_type = other DNA
agcaggtcaatttccttgaagtcaccgccggttttctgcggtttgatgatgagctgggtcagccgcgcttccagg

SEQ ID NO: 325175 - DNA, 75 bp, synthetic construct
  source 1..75: mol_type = other DNA
ccgcaacgcgaagcacaacccgctgcaacgctttaaggccaaccctgaaaacgtcttttccgctgccactctggc

SEQ ID NO: 325176 - DNA, 75 bp, synthetic construct
  source 1..75: mol_type = other DNA
gcgtgcaacaggcgtcagcaaaggtccggggcagcagtaagccgtcaggaacgctgcgtcggctgaagagctgac

SEQ ID NO: 325177 - DNA, 75 bp, synthetic construct
  source 1..75: mol_type = other DNA
gcgtgcaacaggcgtcagcaaaggtccggggcagcaggaagccgtcaggaccgcggcgtcggctgaagagctgac

SEQ ID NO: 325178 - DNA, 75 bp, synthetic construct
  source 1..75: mol_type = other DNA
gcgtgcaacaggcgtcagcaaaggtccggggcagcagcaagccgtcaggagcgcggcgtcggctgaagagctgac

SEQ ID NO: 325179 - DNA, 75 bp, synthetic construct
  source 1..75: mol_type = other DNA
gcgtgcaacaggcgtcagcaaaggtccggggcagcagtaagccgtcaggatcgcagcgtcggctgaagagctgac

SEQ ID NO: 325180 - DNA, 75 bp, synthetic construct
  source 1..75: mol_type = other DNA
ggacgcgttggcgttatggattgaccagccgatatgtctggcaacgtcttttctggcttggtttggtgacgccga

SEQ ID NO: 325181 - DNA, 75 bp, synthetic construct
  source 1..75: mol_type = other DNA
aacagatacaacatttccccagagcaatttctgaaaggtgctgtgataatcttgtatgctggcaatattccgatt

SEQ ID NO: 325182 - DNA, 75 bp, synthetic construct
  source 1..75: mol_type = other DNA
ttattgataccgacaccgccatgatgattcaggctttcactgatgtaggtgttagcattgactttgataagttgt

SEQ ID NO: 325183 - DNA, 75 bp, synthetic construct
  source 1..75: mol_type = other DNA
gaaaagattgattatcgagcaaacgaacaaatacagtatttccccagagcaatttttgaaaggtgctgtgacaat

SEQ ID NO: 325184 - DNA, 75 bp, synthetic construct
  source 1..75: mol_type = other DNA
atgaacaattacccaatgcaaattatggttgatgccgacaccgctatgatggtgcaaagcttcgctgatgcagat

SEQ ID NO: 325185 - DNA, 75 bp, synthetic construct
  source 1..75: mol_type = other DNA
aacaaatacagcgttagccctgaaaaatatctcaaagcggctatagcaattttgtgcgctggcaatattttggtg

SEQ ID NO: 325186 - DNA, 75 bp, synthetic construct
  source 1..75: mol_type = other DNA
agcaattgaagattttattcaggaaatagaaactggtgaaccgcgttttatgcttcctgttaccgactcaaacat

SEQ ID NO: 325187 - DNA, 75 bp, synthetic construct
  source 1..75: mol_type = other DNA
tgatcgcgctgttttttattcaacaaggtgcgttgcaaaactttcttccctatcagtcggttacgactgttgaag

SEQ ID NO: 325188 - DNA, 75 bp, synthetic construct
  source 1..75: mol_type = other DNA
tggcaatgatgaccgacgccggacgtagcgccatgctcaaccctggcccgcatggttttagcgaagtgctgtacg

SEQ ID NO: 325189 - DNA, 75 bp, synthetic construct
  source 1..75: mol_type = other DNA
atggctgcgcaagggttcttactgattgccacgtttttactggtgttaatggtgctggcgcgtcctttaggcagc

SEQ ID NO: 325190 - DNA, 75 bp, synthetic construct
  source 1..75: mol_type = other DNA
aacaaatacagcgttagccctgaaaaatatctcaaggcagctatagaaattttgtacgccgacaatattttggtt

SEQ ID NO: 325191 - DNA, 75 bp, synthetic construct
  source 1..75: mol_type = other DNA
aacaaatacagcgttagccctgaaaaatatctcaaggcggctatagcaattttgtacgctgacaatgttttggtg

SEQ ID NO: 325192 - DNA, 75 bp, synthetic construct
  source 1..75: mol_type = other DNA
ttatagcggtgaaaccacgttgagctatttcagccagatggcaggcttaacggtgcaaaactttctttctgccgc

SEQ ID NO: 325193 - DNA, 75 bp, synthetic construct
  source 1..75: mol_type = other DNA
gcggccacgccggtggaaaaaatctgggacgatgttaaaacctggacttctgacgcatgggcatggataggtgat

SEQ ID NO: 325194 - DNA, 75 bp, synthetic construct
  source 1..75: mol_type = other DNA
ctaaaggcgcgtctccgctgtctgcgggcgatgtgactaacgacctgagccacgtccgtaaaatcatcgttgcct

SEQ ID NO: 325195 - DNA, 75 bp, synthetic construct
  source 1..75: mol_type = other DNA
cggtggtaagctggtaggcggcgaacgtggcggcgtagtcggtgccattaccaccatgggcgttatcgtcggcgc

SEQ ID NO: 325196 - DNA, 75 bp, synthetic construct
  source 1..75: mol_type = other DNA
tttgagatgctggtgaataacttctccgctggcatcatcgggatgatcctcgctattctggcgttcctcggcatt

SEQ ID NO: 325197 - DNA, 75 bp, synthetic construct
  source 1..75: mol_type = other DNA
tcgcagatttccggcgtcggcctggtgacgctttccggcggtcagcgtccggctgttcgcgtcaaacttaacgct

SEQ ID NO: 325198 - DNA, 75 bp, synthetic construct
  source 1..75: mol_type = other DNA
tggaattctgccgcacggcaaaacacaaccccctgaaccgcttcaaattaagccctgaaaacctgatttcagtgg

SEQ ID NO: 325199 - DNA, 75 bp, synthetic construct
  source 1..75: mol_type = other DNA
gcgcagaaggtctacacctcaatggaaattcagccgaactttgccaacaccggcaaatgttatctggtgggtctg

SEQ ID NO: 325200 - DNA, 75 bp, synthetic construct
  source 1..75: mol_type = other DNA
atttgccgctcaacagcgcgccagcatcatgcagttcagcaaccgcgccggtgaagttgccatgttcaccgaatg

SEQ ID NO: 325201 - DNA, 75 bp, synthetic construct
  source 1..75: mol_type = other DNA
tgccgttggcggcccttacgtaattggcctggcaatgaccgataccccggcaagtctcggcactgaacgactgaa

SEQ ID NO: 325202 - DNA, 75 bp, synthetic construct
  source 1..75: mol_type = other DNA
ttgcagaaagcagtttcccatcgacaggtctaggtattgaacttcagattgcggaacataaaaacatacctatca

SEQ ID NO: 325203 - DNA, 75 bp, synthetic construct
  source 1..75: mol_type = other DNA
gcttcctcgcaagtctggtagtttcctggcttatcagtatcagcacgccattgctcaccaccaccagcgtgatgt

SEQ ID NO: 325204 - DNA, 75 bp, synthetic construct
  source 1..75: mol_type = other DNA
ctttccgctatggaagccgcgcttaccacctttaaacaggaactgaccggcaagattgaagaaaccagccaggca

SEQ ID NO: 325205 - DNA, 75 bp, synthetic construct
  source 1..75: mol_type = other DNA
aaattggtctgcgttccttatcaagttcagccgcaatctactcgggtttgggtttcgagcgagtgccgcaggagc

SEQ ID NO: 325206 - DNA, 75 bp, synthetic construct
  source 1..75: mol_type = other DNA
gcgatgtatatcgtgctcggcattctgtatgaaagttttattcacccgatcaccattctctcgacgctacccacc

SEQ ID NO: 325207 - DNA, 75 bp, synthetic construct
  source 1..75: mol_type = other DNA
cagggggatctggcgctggctgaatttattcagtcagcctgggaaacgacaaaagatgtccccggcgtcagtgcg

SEQ ID NO: 325208 - DNA, 75 bp, synthetic construct
  source 1..75: mol_type = other DNA
ccgtgtggcggcaggtggcggggttgccgtactggccgcgcttgctgccgctgcctggcaggcagagcaggctga

SEQ ID NO: 325209 - DNA, 75 bp, synthetic construct
  source 1..75: mol_type = other DNA
caatatccgcgcatcggtcgacgatacccagtttgagctgatgatggctatcgcgctggtagtcatgattatcta

SEQ ID NO: 325210 - DNA, 75 bp, synthetic construct
  source 1..75: mol_type = other DNA
gtggtctcactgaccgtcaggcacagcgggagtctgaagagcagcgtcttcgtgacgtgtacggcgataatccgc

SEQ ID NO: 325211 - DNA, 75 bp, synthetic construct
  source 1..75: mol_type = other DNA
aaaatccctgctggctcatgagaaagaaacgctggagtacaaacgccagctggctgagctgggcgacaaggtgga

SEQ ID NO: 325212 - DNA, 75 bp, synthetic construct
  source 1..75: mol_type = other DNA
aaacatttcgcgctatatcgaaaaaggtgaaaaaccgctggcagcggcgctcaagggtgcaggcgaaatcggctt

SEQ ID NO: 325213 - DNA, 75 bp, synthetic construct
  source 1..75: mol_type = other DNA
taccattatctcgctgaccttctcactgattgcagtgttgatcccactgctatttatgggcgatatcgtcgggcg

SEQ ID NO: 325214 - DNA, 75 bp, synthetic construct
  source 1..75: mol_type = other DNA
aatcaataacctgacgctgatggcgttaactatcgccaccggatttgtggtcgatgacgccatcgtggtgatcga

SEQ ID NO: 325215 - DNA, 75 bp, synthetic construct
  source 1..75: mol_type = other DNA
tgctgacgctgtttaccacgccggtgatttatctgctgttcgaccgtctggcattgtggaccaaaagccgctttg

SEQ ID NO: 325216 - DNA, 75 bp, synthetic construct
  source 1..75: mol_type = other DNA
ttggcgttgatggcactaacccgtcgctgaatagtgcacgtttacaaatcaacctcaaaccgttggatgaacgtg

SEQ ID NO: 325217 - DNA, 75 bp, synthetic construct
  source 1..75: mol_type = other DNA
gcggacgtgattttgcaggatccggcagtgcaaagcctgacctcatttgttggcgttgatggcactaacccgtcg

SEQ ID NO: 325218 - DNA, 75 bp, synthetic construct
  source 1..75: mol_type = other DNA
atacgcgctggtgcgtaccgaccagccgggattcagcgcctgtacccgatctcagttaataaacagcattgatat

SEQ ID NO: 325219 - DNA, 75 bp, synthetic construct
  source 1..75: mol_type = other DNA
cgcgggcggcgaagccctgtctgttgcccgtggctgtctggaaaatgttactgacacgcctgcttgaacagcact

SEQ ID NO: 325220 - DNA, 75 bp, synthetic construct
  source 1..75: mol_type = other DNA
tgatatcctccgggcccgccgggcaaccggcctgatgacccgcgacaattacagaacggtaaataacattaccct

SEQ ID NO: 325221 - DNA, 75 bp, synthetic construct
  source 1..75: mol_type = other DNA
atacgcgctggtgcgtaccgaccagccgggattcagcgcctgtacccggtctcagttaataaacagtatagatat

SEQ ID NO: 325222 - DNA, 75 bp, synthetic construct
  source 1..75: mol_type = other DNA
atacgcgctggtgcgtaccgaccagccgggattcagcgcctgtacccgttctcagttaataaacaggatcgatat

SEQ ID NO: 325223 - DNA, 75 bp, synthetic construct
  source 1..75: mol_type = other DNA
atacgcgctggtgcgtaccgaccagccgggattcagcgcctgtacccgttctcagttaataaacagcatggatat

SEQ ID NO: 325224 - DNA, 75 bp, synthetic construct
  source 1..75: mol_type = other DNA
tggcaaaccggtttcgccttgtgcgctacgcgggataaaaattgccaccatcatgcagaacccgcgcagcgcctt

SEQ ID NO: 325225 - DNA, 75 bp, synthetic construct
  source 1..75: mol_type = other DNA
gtagaaacgctgtttaacgcccccaaacatacagtgacgcgcagcctggtttccgctcatctcgccctctacggt

SEQ ID NO: 325226 - DNA, 75 bp, synthetic construct
  source 1..75: mol_type = other DNA
atatcgcgctacaggccgcgcaaccgctggtacacggcgtatcgttaaccctgcaacgcggacgcgtgctggcgt

SEQ ID NO: 325227 - DNA, 75 bp, synthetic construct
  source 1..75: mol_type = other DNA
cccgctctcagttaatcaacagcattgatatcctccgggcccgccgggcgaccggcctgatgacccgcagccact

SEQ ID NO: 325228 - DNA, 75 bp, synthetic construct
  source 1..75: mol_type = other DNA
tgcgggcgacgacgtcatatctgtcgcccgtcgtggtctggcaaatattactggcccgcctgctggagcagcact

SEQ ID NO: 325229 - DNA, 75 bp, synthetic construct
  source 1..75: mol_type = other DNA
ccccgtcgcagttaatcaacagcattgatattctccgggctcgcagggcaaccggcctgatgacccggaacaatt

SEQ ID NO: 325230 - DNA, 75 bp, synthetic construct
  source 1..75: mol_type = other DNA
cctccgggctcgcagggccactggcctgatgagcagcgacaattacagaacggtaaataacattaccctgggtaa

SEQ ID NO: 325231 - DNA, 75 bp, synthetic construct
  source 1..75: mol_type = other DNA
cagcatattgaggccggcatttcactgtgcgatgcagtgaactttcttgttgaaaaatacgcactggtacgtacc

SEQ ID NO: 325232 - DNA, 75 bp, synthetic construct
  source 1..75: mol_type = other DNA
ggcaggcggccggttcacgcccgtctccggttgaaatctggcagacactgcttaccagactgctggaccagcatt

SEQ ID NO: 325233 - DNA, 75 bp, synthetic construct
  source 1..75: mol_type = other DNA
aaagcttgggccgatcgtggttttatagtattgggatttccgtgcaaccagtttcttgagcaagagccgggcagc

SEQ ID NO: 325234 - DNA, 75 bp, synthetic construct
  source 1..75: mol_type = other DNA
cttaagatgaaaacattacctgacacacacgtacgggaggcatcgcgttgcccgtctcccgtcaccatctggcag

SEQ ID NO: 325235 - DNA, 75 bp, synthetic construct
  source 1..75: mol_type = other DNA
tgatattctccgggcacgtcgggcaacaggtctgatgacccgcagcaactacagaacggtaaataacattaccct

SEQ ID NO: 325236 - DNA, 75 bp, synthetic construct
  source 1..75: mol_type = other DNA
ggcctgatggcccgcgacaattacagaacggtaaataacattaccctgggtaagtatcaggaggcgaaacgatga

SEQ ID NO: 325237 - DNA, 75 bp, synthetic construct
  source 1..75: mol_type = other DNA
cctccgggctcgcggggcgactggcctgatgaacagcgacaattacagaacggtaaataacattaccctgggtaa

SEQ ID NO: 325238 - DNA, 75 bp, synthetic construct
  source 1..75: mol_type = other DNA
cctccgggctcgccgggcaactggcctgatgagcagcgacaattacagaacggtaaataacattaccctgggtaa

SEQ ID NO: 325239 - DNA, 75 bp, synthetic construct
  source 1..75: mol_type = other DNA
cctccgggctcgctgggctactggcctgatgaccagcgacaattacagaacggtaaataacattaccctgggtaa

SEQ ID NO: 325240 - DNA, 75 bp, synthetic construct
  source 1..75: mol_type = other DNA
cgcagtcgcgccggaagaaagcggattctatgcgcgcatggtcagcaaaggtcgtgcaccgctgtaccctgatga

SEQ ID NO: 325241 - DNA, 75 bp, synthetic construct
  source 1..75: mol_type = other DNA
ttcagcgtttttccccggatatgacaccggaagatcccatcgtaatagaaagcattaaactggcgttggcgaaat

SEQ ID NO: 325242 - DNA, 75 bp, synthetic construct
  source 1..75: mol_type = other DNA
tagtgaagacaattgacggcgaagcgaccacgctggagaaatatgctggtaatgtgttgctgatcgtcaatgttg

SEQ ID NO: 325243 - DNA, 75 bp, synthetic construct
  source 1..75: mol_type = other DNA
aaagcattatgcaaaaacaagcgccgggaatgctgctggtcacccatgatatgggcgttgtggcgcgtctggcgg

SEQ ID NO: 325244 - DNA, 75 bp, synthetic construct
  source 1..75: mol_type = other DNA
agtgcggtaatcgggttcggattgcagtgagagataccggacacggcattgacccgaaagtcattgagcgagtcg

SEQ ID NO: 325245 - DNA, 75 bp, synthetic construct
  source 1..75: mol_type = other DNA
ttactactgccatgctcaccagataacctcgtcattacaggaaatggcggtcggcctgtcacaaattatctccac

SEQ ID NO: 325246 - DNA, 75 bp, synthetic construct
  source 1..75: mol_type = other DNA
ggcaggccaagctggcgctggatatcgccaacaaaacgctaccgctgtttcgccatgtcaatagcgagtcattac

SEQ ID NO: 325247 - DNA, 75 bp, synthetic construct
  source 1..75: mol_type = other DNA
acgcaacctgtacctgatccgcaccgcatacgaaaccgcagatgaggccaatgattacggggaatttcctcaacg

SEQ ID NO: 325248 - DNA, 75 bp, synthetic construct
  source 1..75: mol_type = other DNA
agtgcggctttgccgcaccttggactcgtggcaataactgtccccctgaccagaatctgaccataaacgacccgc

SEQ ID NO: 325249 - DNA, 75 bp, synthetic construct
  source 1..75: mol_type = other DNA
cgacgtctttgcagctgcaagaaaaaaactcaacaaagaaggtctgagctggtacggggtgcgcaccgttgagcc

SEQ ID NO: 325250 - DNA, 75 bp, synthetic construct
  source 1..75: mol_type = other DNA
cgcgggagtaagtaacccggttcaccgtaaggcagaaatgatggccaccatgaaaggggcggaacttatagccga

SEQ ID NO: 325251 - DNA, 75 bp, synthetic construct
  source 1..75: mol_type = other DNA
ccctatctgagccaggacgcgttaagtgagtttcgcgcacagcgcgagaaaacacgcgattttctgaaaagtttc

SEQ ID NO: 325252 - DNA, 75 bp, synthetic construct
  source 1..75: mol_type = other DNA
gtatggcatccgcacggtggagcctcaccatgacggcaccgtgcactggcatatgatggtctttgctcatccgga

SEQ ID NO: 325253 - DNA, 75 bp, synthetic construct
  source 1..75: mol_type = other DNA
aagcgttgagggcgaaaaggaggccagcgccgcgcggcaggccaagctggcgctggatatcgccaacaaaacgct

SEQ ID NO: 325254 - DNA, 75 bp, synthetic construct
  source 1..75: mol_type = other DNA
aagcgcagcgttggcgtgtcggtattctcggcggtatgttgtgtgaaacgttgaccatgattctggtgattgtct

SEQ ID NO: 325255 - DNA, 75 bp, synthetic construct
  source 1..75: mol_type = other DNA
gtcgaccatcagagggctacgcgcgcggaaccctgcgcaaaatattcgaacgactggaccgcaccgacagccgct

SEQ ID NO: 325256 - DNA, 75 bp, synthetic construct
  source 1..75: mol_type = other DNA
agaacaaaaactggtcgtcccgggaggtgatttgggtgagtggttaaggtcactgacccccacagagcgaaaaca

SEQ ID NO: 325257 - DNA, 75 bp, synthetic construct
  source 1..75: mol_type = other DNA
tacgggaggcatcgcgctgcccgtctcccgtcaccatctggcagacactgctcacccaactgttggaccagcatt

SEQ ID NO: 325258 - DNA, 75 bp, synthetic construct
  source 1..75: mol_type = other DNA
ggcctgatgacacgcgacaactacagaacggtaaataacattaccctgggtaaacatccgggggcgaaacaatga

SEQ ID NO: 325259 - DNA, 75 bp, synthetic construct
  source 1..75: mol_type = other DNA
agccgctggctgacaccgggttatcgcgcccttgccggacgcgaacgcctggacgatttgctttacctgccgcag

SEQ ID NO: 325260 - DNA, 75 bp, synthetic construct
  source 1..75: mol_type = other DNA
gtgattttggggttcgtatgaacggcgaaccggtgtatcaggatggtacccgtaatatcggagaggtcaaaactg

SEQ ID NO: 325261 - DNA, 75 bp, synthetic construct
  source 1..75: mol_type = other DNA
cagcatattgaggccggcatttcactgtgcgatgcagtgaactttcttgttgaaaaatacgcgctggtgcgtacc

SEQ ID NO: 325262 - DNA, 75 bp, synthetic construct
  source 1..75: mol_type = other DNA
tgatattctccgggctcgcagggcgaccggcctgatgacccggaacaattacagaatggtaaataacattacccg

SEQ ID NO: 325263 - DNA, 75 bp, synthetic construct
  source 1..75: mol_type = other DNA
gcaagccttcaccgcatccgtcagttccagtttttcggcattccgccccgccaggtatggcgtgaactccgccgc

SEQ ID NO: 325264 - DNA, 75 bp, synthetic construct
  source 1..75: mol_type = other DNA
cgtacccgtggaacgccccgctgccggttattgatcctgagacattcggcagagcattaccgcagaagccaaccg

SEQ ID NO: 325265 - DNA, 75 bp, synthetic construct
  source 1..75: mol_type = other DNA
cactgacccccacagagcgaaaacaactcaccaggcagctgaaagatgcgccatctgacacaaaaaccgtgaaaa

SEQ ID NO: 325266 - DNA, 75 bp, synthetic construct
  source 1..75: mol_type = other DNA
accattgtgtcccacacccgcgatattgccattcaggaagatcgtcacgagctgggcgatgatattactccgcgc

SEQ ID NO: 325267 - DNA, 75 bp, synthetic construct
  source 1..75: mol_type = other DNA
gcgagaaaacacgcgatttcctgaaaagtttcatgctggaaaacgaagacgggttcacgattgatctcgagacag

SEQ ID NO: 325268 - DNA, 75 bp, synthetic construct
  source 1..75: mol_type = other DNA
tttaaagcggagtacgtcgacggctcaaaaggcacgccaaccagctacatcgccacctacatcggaaagaacctg

SEQ ID NO: 325269 - DNA, 75 bp, synthetic construct
  source 1..75: mol_type = other DNA
atgcacagtcagttaaaagaacgtatcaggctgatgcgcgcagggctggataacgctgcaccggttgctgaaatc

SEQ ID NO: 325270 - DNA, 75 bp, synthetic construct
  source 1..75: mol_type = other DNA
gattcgggataccgcgccggaggccatgtgtgatgcggtggagagcaacagcgggctggtccggtatctgcggga

SEQ ID NO: 325271 - DNA, 75 bp, synthetic construct
  source 1..75: mol_type = other DNA
caggatatccggcatatcctgcgggctttttccctgttgcgtccggggggcgttctggttgccgtctgtctcaac

SEQ ID NO: 325272 - DNA, 75 bp, synthetic construct
  source 1..75: mol_type = other DNA
tgtggcgacttcatggaatggcagccggtgcagtattacagccggattatcatgaatccgccgttcagccacggg

SEQ ID NO: 325273 - DNA, 75 bp, synthetic construct
  source 1..75: mol_type = other DNA
tacctgtataggaaagagactccagaaagctgagggggttgtagatggcatgctgatgctgctggggggggaagc

SEQ ID NO: 325274 - DNA, 75 bp, synthetic construct
  source 1..75: mol_type = other DNA
agcgttggggggcatgggtggcaaataaccacgaagatgttacttggtcgtccattgctgccggatttaaggggt

SEQ ID NO: 325275 - DNA, 75 bp, synthetic construct
  source 1..75: mol_type = other DNA
gtttgccgatgaacgtgtgattgagcagcatattgaagctggcatttcactgtgcgatgcagtgaactttcttgt

SEQ ID NO: 325276 - DNA, 75 bp, synthetic construct
  source 1..75: mol_type = other DNA
ctcacccggttactggaccagcattacagccttacgctgaatgacacaccgttcgcggatgaacgtgtgattgag

SEQ ID NO: 325277 - DNA, 75 bp, synthetic construct
  source 1..75: mol_type = other DNA
ctgtcccgactgctggaccagcactacggcctcacgctgaatgacacactgttcgctgatgaacgtgtgattgag

SEQ ID NO: 325278 - DNA, 75 bp, synthetic construct
  source 1..75: mol_type = other DNA
ccttttccctgttgcgtccgggtggcgtgctggttgccgtctgtctgaacgggccgcgccagcaggagaagctgt

SEQ ID NO: 325279 - DNA, 75 bp, synthetic construct
  source 1..75: mol_type = other DNA
tccggctgatgcgcgcaaggctggataacgccgcgccggttgctgaaatccgggctgaatcccagctttttgtga

SEQ ID NO: 325280 - DNA, 75 bp, synthetic construct
  source 1..75: mol_type = other DNA
acggcctcgcgctgaatgacacaccgttcgctgatgaacgtgtgattgagcagcatattgaagcgggcatttcac

SEQ ID NO: 325281 - DNA, 75 bp, synthetic construct
  source 1..75: mol_type = other DNA
gtccggtatctgcgggaaaattttaacggtgtcagggttcagtgtggcgacttcatggaatggcagccggtgcag

SEQ ID NO: 325282 - DNA, 75 bp, synthetic construct
  source 1..75: mol_type = other DNA
cacgattaaacaagaataatcagtatttgcacgatttgttggtggattattacgtaggtggaatgacatttatgg

SEQ ID NO: 325283 - DNA, 75 bp, synthetic construct
  source 1..75: mol_type = other DNA
taataatcatgaggatgtgacctggtcgtccattgctgccggttttaagggattaatcccttcaaaagtaaaatc

SEQ ID NO: 325284 - DNA, 75 bp, synthetic construct
  source 1..75: mol_type = other DNA
ctgatgatgctgggagtgaggcttgagatggatcggtatgttgagcgtgaattgccgggagggagaacctctgta

SEQ ID NO: 325285 - DNA, 75 bp, synthetic construct
  source 1..75: mol_type = other DNA
ggaaccctcagcgctattctgacctcgctatcaccactgttctggtgattgattacatcgggctgaaagttttcg

SEQ ID NO: 325286 - DNA, 75 bp, synthetic construct
  source 1..75: mol_type = other DNA
ggcaaaccgcgaactgcgtcgggcgaaaaatcatgtccagaagtgggagcgtgtctgcgccgcgctgcgggagct

SEQ ID NO: 325287 - DNA, 75 bp, synthetic construct
  source 1..75: mol_type = other DNA
atgattatatgcgggtgtatggcgcgcctgaaccggaacaatagtgaactgcatgaattgctgcttgattactac

SEQ ID NO: 325288 - DNA, 75 bp, synthetic construct
  source 1..75: mol_type = other DNA
agcggtggggggcatgggttgcgaataaccgcgaggatgtggaatggtcatctattgctgctggattcaaggggc

SEQ ID NO: 325289 - DNA, 75 bp, synthetic construct
  source 1..75: mol_type = other DNA
ttgcccgtaaacatgggcgttctgattgctgggttgggcgtttattgcaaaaggctgaaggtgtagttgatggca

SEQ ID NO: 325290 - DNA, 75 bp, synthetic construct
  source 1..75: mol_type = other DNA
aaagccgagggggtggtggaaggaatgttgatgatgttgggtgtccggttagaaatggacaaatatattgaacat

SEQ ID NO: 325291 - DNA, 75 bp, synthetic construct
  source 1..75: mol_type = other DNA
tggcgcagaagcataattgctctgatggatatatcgggaaaaggttacagaaagcagagggaataatcgaaggta

SEQ ID NO: 325292 - DNA, 75 bp, synthetic construct
  source 1..75: mol_type = other DNA
ccggttttaagggattaattccttcaaaagtaagatctcgtccgcaatgctgtgacgatgacgcgatgatcattt

SEQ ID NO: 325293 - DNA, 75 bp, synthetic construct
  source 1..75: mol_type = other DNA
atggttatctgtggttgcatggctcgtctgaaaaagaacaacagtgatttgcatgatttgctgatagattattat

SEQ ID NO: 325294 - DNA, 75 bp, synthetic construct
  source 1..75: mol_type = other DNA
tcccgtcaccatctggcagacactgctcgcccgactgctggaccagcactacggcctcacgctgaatgacactcc

SEQ ID NO: 325295 - DNA, 75 bp, synthetic construct
  source 1..75: mol_type = other DNA
ggcgtatcagatgctggcccgcatggcgttacatctgcacaccatgccgccgcattacgaagcactgagaacgga

SEQ ID NO: 325296 - DNA, 75 bp, synthetic construct
  source 1..75: mol_type = other DNA
atgcgctcactgaaacggcacgaacgccgggcgctgatgcattcgcttcgtgacaaacaggcaaaaaacagcagt

SEQ ID NO: 325297 - DNA, 75 bp, synthetic construct
  source 1..75: mol_type = other DNA
gcgttacatctgcacacagtgccgccgcattatgacgcactgacaacagacaaagaccggaagaacgaaccggac

SEQ ID NO: 325298 - DNA, 75 bp, synthetic construct
  source 1..75: mol_type = other DNA
ctttgctcatccggaagaaatcgacaccattgtgtcccacacccgcgatattgccattcaggaagaccgccacga

SEQ ID NO: 325299 - DNA, 75 bp, synthetic construct
  source 1..75: mol_type = other DNA
caacccggaaggcccgcaacggctgaaggatgacgcaatggatgcggttcttgctgccgctgatgccggatgttt

SEQ ID NO: 325300 - DNA, 75 bp, synthetic construct
  source 1..75: mol_type = other DNA
catatcggtgaacagcagatgcagcacctgttacggggcggcagtctgtacgttgacggcagcatcattgcaccg

SEQ ID NO: 325301 - DNA, 75 bp, synthetic construct
  source 1..75: mol_type = other DNA
ggaaaaatacgcgctggtgcgtaccgaccagccgggattcagcgcctgtacccgctctcagttaataaacagcac

SEQ ID NO: 325302 - DNA, 75 bp, synthetic construct
  source 1..75: mol_type = other DNA
ctaaacgagcactgaaagccattgaatttatttgtcgacagctctcacgatttgcaaaaatgccccccgttgagc

SEQ ID NO: 325303 - DNA, 75 bp, synthetic construct
  source 1..75: mol_type = other DNA
ctcacccggttactggaccagcactacggcctcacactgaatgacacaccgttcgcagatgaacgtgtgattgag

SEQ ID NO: 325304 - DNA, 75 bp, synthetic construct
  source 1..75: mol_type = other DNA
agcaagcggccagttcacgcccgtctccgcttgaaatctggcagatactgctgacccggctgctggaccagcatt

SEQ ID NO: 325305 - DNA, 75 bp, synthetic construct
  source 1..75: mol_type = other DNA
accggcctgatgacccgcgacaattacagaacggtaaatgacattacccaagggaagcatccggaggcgaaaaga

SEQ ID NO: 325306 - DNA, 75 bp, synthetic construct
  source 1..75: mol_type = other DNA
cagcatattgaggccggcatttcactgtgtgatgcggtgaattttctcgtggaaaaatacgcgctggtgcgtacc

SEQ ID NO: 325307 - DNA, 75 bp, synthetic construct
  source 1..75: mol_type = other DNA
agcatcgtggacatcacccgtgatattgccattcgcgaagaccgccacgagctgggcaatgacataactccgcgc

SEQ ID NO: 325308 - DNA, 75 bp, synthetic construct
  source 1..75: mol_type = other DNA
ccgggcacgccgggcaacaggtctgatgacccgcagcaactacagaacggtaaataacattaccctggggaagca

SEQ ID NO: 325309 - DNA, 75 bp, synthetic construct
  source 1..75: mol_type = other DNA
cgggcaaccggcctgatggcccgcgacaattacagaacggtaaataacattaccctgggtaaacatccgggggcg

SEQ ID NO: 325310 - DNA, 63 bp, synthetic construct
  source 1..63: mol_type = other DNA
atgacccgcgacaattacagaacggtaaataacattaccctgggtaagtatccggaggcgaaa

SEQ ID NO: 325311 - DNA, 75 bp, synthetic construct
  source 1..75: mol_type = other DNA
tgtgtgatgcggtgaattttctcgtggaaaaatacgcactggtacgaactgaccagccgggattcagcgcaggag

SEQ ID NO: 325312 - DNA, 75 bp, synthetic construct
  source 1..75: mol_type = other DNA
ggaaaaatacgcgctggtgcgtaccgaccagccgggattcagcacctgtccccgctctcagttaataaacagtat

SEQ ID NO: 325313 - DNA, 75 bp, synthetic construct
  source 1..75: mol_type = other DNA
acaggtctgatgacccgcagcaactacagaacggtaaataacattaccctgggtaaacatccgggggcgaaacaa

SEQ ID NO: 325314 - DNA, 75 bp, synthetic construct
  source 1..75: mol_type = other DNA
acctgcaacgcgccatccgttactaccttgaggcggacaaaaaggcccgggaagaacaggaagcgaaggaggaag

SEQ ID NO: 325315 - DNA, 75 bp, synthetic construct
  source 1..75: mol_type = other DNA
ggcgcatcgcactgctggcgggtgtgcctcgctgagtgaatacaccgctgaatttaaccgcctttctgccctact

SEQ ID NO: 325316 - DNA, 75 bp, synthetic construct
  source 1..75: mol_type = other DNA
acagtagacgactgctaccgcgtggacttcacaccacacgggctggcgttgcactgcctgacaccacacggagaa

SEQ ID NO: 325317 - DNA, 75 bp, synthetic construct
  source 1..75: mol_type = other DNA
ctgcatattgaggcaggcatttcactgtgtgatgcggtgaactttctcgtggaaaaatacgcgctggtgcgtacc

SEQ ID NO: 325318 - DNA, 75 bp, synthetic construct
  source 1..75: mol_type = other DNA
agcagacctgctgcggggtggcctgaccagtggaaacaaaaaacagacagaaacgggattcacaaatcccgtaaa

SEQ ID NO: 325319 - DNA, 75 bp, synthetic construct
  source 1..75: mol_type = other DNA
atggatgtaacgctgaaggcgtatcggatgctggcccgtatcgcattacgcctgcacatcatgccgccacattac

SEQ ID NO: 325320 - DNA, 75 bp, synthetic construct
  source 1..75: mol_type = other DNA
gaagggaaacgcacgtttaccgaatttatgcgtgaaggtgtgggggttcatgcgtttaacggcgaaatctttgtg

SEQ ID NO: 325321 - DNA, 75 bp, synthetic construct
  source 1..75: mol_type = other DNA
gaagggaaacgcacgtttaccgaatttatccgtgaaggtgtgggcgttcatgcgtttaacggcgaaatctttgtg

SEQ ID NO: 325322 - DNA, 75 bp, synthetic construct
  source 1..75: mol_type = other DNA
gaagggaaacgcacgtttaccgaatttattcgtgaaggtgtgggtgttcatgcgtttaacggcgaaatctttgtg

SEQ ID NO: 325323 - DNA, 75 bp, synthetic construct
  source 1..75: mol_type = other DNA
gataatccgcttattaatattctggagaagttctccagctggtatgacacgaatcacgtgacactgggcggtgtc

SEQ ID NO: 325324 - DNA, 75 bp, synthetic construct
  source 1..75: mol_type = other DNA
gtgaaggggtgggcgttcatacatttaacggtgaaatttttgtccagcccgtatgggatacggaatccacgtcat

SEQ ID NO: 325325 - DNA, 75 bp, synthetic construct
  source 1..75: mol_type = other DNA
gaagggaaacgcacgtttacggaatttatgcgtgaaggtgtgggcgttcatgcgtttaacggcgaaatctttgtg

SEQ ID NO: 325326 - DNA, 75 bp, synthetic construct
  source 1..75: mol_type = other DNA
ctcaatagtggttttacgctcgacacgttagcgtttcgtttgctggaagatgaattgctgattgcgctgccgggt

SEQ ID NO: 325327 - DNA, 75 bp, synthetic construct
  source 1..75: mol_type = other DNA
atgttgcacctgtcgggcgactcggctgatatgaaggatgagatgatacaacggggcatttccgcccttaaagac

SEQ ID NO: 325328 - DNA, 75 bp, synthetic construct
  source 1..75: mol_type = other DNA
gtgcaaataaccgaagcattagtttcagagccgggagacatccggcgtttttttcagcaggcggtggaccactgg

SEQ ID NO: 325329 - DNA, 75 bp, synthetic construct
  source 1..75: mol_type = other DNA
gaagggaaacgcacgtttaccgaatttatacgtgaaggtgtgggagttcatgcgtttaacggcgaaatctttgtg

SEQ ID NO: 325330 - DNA, 75 bp, synthetic construct
  source 1..75: mol_type = other DNA
gaagggaaacgcacgtttactgaatttattcgtgaaggtgtgggcgttcatgcgtttaacggcgaaatctttgtg

SEQ ID NO: 325331 - DNA, 75 bp, synthetic construct
  source 1..75: mol_type = other DNA
gaagggaaacgcacgtttacagaatttatacgtgaaggtgtgggcgttcatgcgtttaacggcgaaatctttgtg

SEQ ID NO: 325332 - DNA, 75 bp, synthetic construct
  source 1..75: mol_type = other DNA
tcgtcgagatgacaaccgggcggtaaatcttcgctgggcctctctttcacaaaacagggctaactcccacaccag

SEQ ID NO: 325333 - DNA, 75 bp, synthetic construct
  source 1..75: mol_type = other DNA
attccctgcaggcaacacagcttcagtcggccattgtgaaggcgatgtatgcagcgacgattgaaagtgaacttg

SEQ ID NO: 325334 - DNA, 75 bp, synthetic construct
  source 1..75: mol_type = other DNA
tagtcggcggtagtggcagcgggaagtcgctgacctgcgccgcgacgctgggcattctgcctgctggcgttcgcc

SEQ ID NO: 325335 - DNA, 75 bp, synthetic construct
  source 1..75: mol_type = other DNA
tgcagatagagagatttttgaacaacgtgatcccaatgaacagattcaagccgcgccgaagctgagcacgcgaaa

SEQ ID NO: 325336 - DNA, 75 bp, synthetic construct
  source 1..75: mol_type = other DNA
gaatttatccgtgaaggtgtgggcgttcatgcgtttaacggcgaaatctttgtgcagccggtctgggatacggag

SEQ ID NO: 325337 - DNA, 75 bp, synthetic construct
  source 1..75: mol_type = other DNA
gtatgggatgcggaatccacgtcattattccggacgaaattcaaaaccatcagcccgaagcgtgtcagtacaccc

SEQ ID NO: 325338 - DNA, 75 bp, synthetic construct
  source 1..75: mol_type = other DNA
gttaccggcccaactggcgctggctggggatgtcggaagccgattcacatgcctttattgaagatgtggaggcgg

SEQ ID NO: 325339 - DNA, 75 bp, synthetic construct
  source 1..75: mol_type = other DNA
ctacgtccggtgatggtgtttatacccgatcagaaacgacaaatcgtggcgcagttccgtcagaactccttgctg

SEQ ID NO: 325340 - DNA, 75 bp, synthetic construct
  source 1..75: mol_type = other DNA
tcgagccggtggaggacgggcagacccgtggggccaatcagttttacagcgtcatggaacggctgaagatgctcg

SEQ ID NO: 325341 - DNA, 75 bp, synthetic construct
  source 1..75: mol_type = other DNA
cgggcgcgttttgatttttatcaggcgcgttcatcctggtcacgggcagagtggattggagacggaagaatggcc

SEQ ID NO: 325342 - DNA, 75 bp, synthetic construct
  source 1..75: mol_type = other DNA
cagggcgcgcagcttggcggtgtcggggtccgctggaatatctggaccggcgagacgcactacgacgcctggccg

SEQ ID NO: 325343 - DNA, 75 bp, synthetic construct
  source 1..75: mol_type = other DNA
gaataacgtgacactgggcggtgtcaaaattccgcaccttttccctggtgatgatctgaaactacagacagcgca

SEQ ID NO: 325344 - DNA, 75 bp, synthetic construct
  source 1..75: mol_type = other DNA
aaagtaaacagcagttttgatggttactttaagacagatgcggaaggaatactgggtatccggtatgacttctga

SEQ ID NO: 325345 - DNA, 75 bp, synthetic construct
  source 1..75: mol_type = other DNA
atgtctggcttgagcccgaagttcgctttttggtgcatcaggcgaagttagcgcagtggagacgatttcatgaag

SEQ ID NO: 325346 - DNA, 75 bp, synthetic construct
  source 1..75: mol_type = other DNA
ttgtcacgaataccaactggcaatcttatagcggtgaaaccacgttgagctatttcagccagatggcgggcttaa

SEQ ID NO: 325347 - DNA, 75 bp, synthetic construct
  source 1..75: mol_type = other DNA
cggtgcaaaactttctttctgccgccagcgggattgcggtgatttttgccctcatccgcgcgtttacccgccaga

SEQ ID NO: 325348 - DNA, 75 bp, synthetic construct
  source 1..75: mol_type = other DNA
tcctgacgctaatgatgggtggataattcctggtgcgtcgtggaaaccgtcacactggatgccgctaccagaacc

SEQ ID NO: 325349 - DNA, 75 bp, synthetic construct
  source 1..75: mol_type = other DNA
tacatgtgggatagcgaaagaaaagatattgatgcccctgggtattatcggactgagcatttagtgttcgctgag

SEQ ID NO: 325350 - DNA, 75 bp, synthetic construct
  source 1..75: mol_type = other DNA
gcaccaaattacccccaggcggatggttcagtaaaactggcagcaggttggcttatcgatcagtgccagctaaaa

SEQ ID NO: 325351 - DNA, 75 bp, synthetic construct
  source 1..75: mol_type = other DNA
attgcagaatgtcacgttaactgcctggtggaaacagatgctcaggcttatgcaaacgctgaatttattgctgcc

SEQ ID NO: 325352 - DNA, 75 bp, synthetic construct
  source 1..75: mol_type = other DNA
tctgactccacatttggctgcgttggccccattggtccgctgaaacatctctcaaaagaggcactggaagccgca

SEQ ID NO: 325353 - DNA, 75 bp, synthetic construct
  source 1..75: mol_type = other DNA
ttctatatggccgcattggagtacgacgacgacgaaccaattgacggtgtaacccactggatgccgctgccagaa

SEQ ID NO: 325354 - DNA, 75 bp, synthetic construct
  source 1..75: mol_type = other DNA
ctttgcctttggcgaagtggcgggcgatcgccgtcaggggcgcatgttgctgtgggcgatgtcggtgatttttgt

SEQ ID NO: 325355 - DNA, 75 bp, synthetic construct
  source 1..75: mol_type = other DNA
gtgagtgcaggcgtgataaccggcgtattgctggtgtttttattactgggttatctgggtttatgccctgatcaa

SEQ ID NO: 325356 - DNA, 75 bp, synthetic construct
  source 1..75: mol_type = other DNA
gggctggcgcggctgattaatgacattcctcttccaggtacagcgggcgttgaacgtatactctttcgtttacct

SEQ ID NO: 325357 - DNA, 75 bp, synthetic construct
  source 1..75: mol_type = other DNA
aggcatggaagtttccattgatgtaagcacttgtgatgctaatttaggtaatcgctatttcggcaccgtcaccga

SEQ ID NO: 325358 - DNA, 75 bp, synthetic construct
  source 1..75: mol_type = other DNA
atggcaattcttgatgatgtgattggtgttttttctcccagctggaaagctgcgaggttgcgctcaagggcgtta

SEQ ID NO: 325359 - DNA, 75 bp, synthetic construct
  source 1..75: mol_type = other DNA
gatcaacaatagcaaagtctacgccgtgaagatgaatggtcaaaccgtaagccgtgatggtgcgcgtaatctcgg

SEQ ID NO: 325360 - DNA, 75 bp, synthetic construct
  source 1..75: mol_type = other DNA
accgataaaaccgttgcgcctgccggtggcgaagcgtttgaagcgcgctttattgaagcgatggacgacgatttc

SEQ ID NO: 325361 - DNA, 75 bp, synthetic construct
  source 1..75: mol_type = other DNA
gcacttaaggagtacgaggattctgagttggttgcagcgcgtgttgctgcggctctggggttatatattcgtaaa

SEQ ID NO: 325362 - DNA, 75 bp, synthetic construct
  source 1..75: mol_type = other DNA
aacgacaaaggaggcaacagtgccggaactgaacgacagcatcagcgcgacaccgaaagccagcatgaagaataa

SEQ ID NO: 325363 - DNA, 75 bp, synthetic construct
  source 1..75: mol_type = other DNA
agtaaatacggtgcggtttccctgcgcgagcaggcccgctttctggatatcaatcatgacctggtgataggcgtg

SEQ ID NO: 325364 - DNA, 75 bp, synthetic construct
  source 1..75: mol_type = other DNA
ttatcaggaaatatcttggatgacgtaacccactggatgccgctgccagaaccgccgcaggaggttaaccgtggc

SEQ ID NO: 325365 - DNA, 75 bp, synthetic construct
  source 1..75: mol_type = other DNA
attgaccgtgaatataacacgttcactggtatgtatcctgacaaagcagaagtcgaacggggggtgcggctgcat

SEQ ID NO: 325366 - DNA, 75 bp, synthetic construct
  source 1..75: mol_type = other DNA
agagcctgtaagccaaacttacaacttgccagaattaatcgaaggcatggaagtttccattgatgtaagcacttg

SEQ ID NO: 325367 - DNA, 75 bp, synthetic construct
  source 1..75: mol_type = other DNA
taccgatatcgacgacaaaatcatcaaacgcgccaatgaaaatggcgaaagctttgtagcgctggtggatcgcat

SEQ ID NO: 325368 - DNA, 75 bp, synthetic construct
  source 1..75: mol_type = other DNA
acgctgccatgcttcagggtagccaacctgtaagccaaacttacaagttgccagttaatacaccttgccaagatg

SEQ ID NO: 325369 - DNA, 75 bp, synthetic construct
  source 1..75: mol_type = other DNA
agtgccggtaactccggatagttggataagctgtagtgagcgaatgccgaaagggtatgctgatgtgttagtgac

SEQ ID NO: 325370 - DNA, 75 bp, synthetic construct
  source 1..75: mol_type = other DNA
tcactggtgtttgtatcgtatcgtgccggtgttgatgcgtattttcctgtgtgtctgcaccggcttaacaaaatt

SEQ ID NO: 325371 - DNA, 75 bp, synthetic construct
  source 1..75: mol_type = other DNA
ggcggacaatgtcgggtggaaaggtgttttcgggttgcccggggtgatacatccggccagtatgttgcgttaaaa

SEQ ID NO: 325372 - DNA, 75 bp, synthetic construct
  source 1..75: mol_type = other DNA
gcctggttcatcagggcaatacgtggcgttaaaaacggctgttcagtctctgatgccacggggtattgcaacaat

SEQ ID NO: 325373 - DNA, 75 bp, synthetic construct
  source 1..75: mol_type = other DNA
caacgggcaacagattcacgcattctgtacttccttttaccgacaggtgcacgaacgtattactgagcgtaatca

SEQ ID NO: 325374 - DNA, 75 bp, synthetic construct
  source 1..75: mol_type = other DNA
tgatgaggggcagattcatgcattctgtacttccttttatgaacgtattactgagcgtaatcacacggccagtcc

SEQ ID NO: 325375 - DNA, 75 bp, synthetic construct
  source 1..75: mol_type = other DNA
gttttcgggttgcccggcctggttcatcagggcaatacgtggcgttaaaaacggctgttcagtcctttatgtcgc

SEQ ID NO: 325376 - DNA, 75 bp, synthetic construct
  source 1..75: mol_type = other DNA
tgtacttccttttaccgacaggtgcatgaacgtattactgagcgtaatcacacgaccattccatcatcgccggtg

SEQ ID NO: 325377 - DNA, 75 bp, synthetic construct
  source 1..75: mol_type = other DNA
gtagcgttaaaaactgccgcattgtctctggggttaccggttgtgaccgccattacccatcgtccggtacagcgc

SEQ ID NO: 325378 - DNA, 75 bp, synthetic construct
  source 1..75: mol_type = other DNA
cgaacagttgtcccgggattactcgaaggtcagttattcaagtgcccgcgcctccgccaatgagtcgtggcgcta

SEQ ID NO: 325379 - DNA, 75 bp, synthetic construct
  source 1..75: mol_type = other DNA
ttgcgggaacaacatggaggagcaacaatgcgatgcctgttgctgctcagccagacgagtatttgtcacccgcga

SEQ ID NO: 325380 - DNA, 75 bp, synthetic construct
  source 1..75: mol_type = other DNA
aggagcacagatacgatgtctgttgctgctcagccagacgagtatttgccatccgcgagtcggcgtcatggctga

SEQ ID NO: 325381 - DNA, 75 bp, synthetic construct
  source 1..75: mol_type = other DNA
tctgaacctgtgggggaatgtgagagttcaagttggtgataaagggtataacgacacctcagccatgctgggtgt

SEQ ID NO: 325382 - DNA, 75 bp, synthetic construct
  source 1..75: mol_type = other DNA
cccgacggctggttacccagacatcccgtatcggctccattggcgtgatgatgagccatgtcagctatgccggtc

SEQ ID NO: 325383 - DNA, 75 bp, synthetic construct
  source 1..75: mol_type = other DNA
gtgacggcattactgacactggaagagatcaaggcacatctgcgtgttgaccatgacgaggacgatgagatgctg

SEQ ID NO: 325384 - DNA, 75 bp, synthetic construct
  source 1..75: mol_type = other DNA
aagagctgattcagggggaactccccttttttgtgtccgtgctgatttacgatttgcgttgtccgacggtgttat

SEQ ID NO: 325385 - DNA, 75 bp, synthetic construct
  source 1..75: mol_type = other DNA
catgcgactgaccgggatgctgtaccggaatccggatcttgcggagcgggaagaactgcttcagggggagctgcc

SEQ ID NO: 325386 - DNA, 75 bp, synthetic construct
  source 1..75: mol_type = other DNA
cgatccggatacggaactgttaccgggcgcaatccttcgcctgacctgtgcggaatggtggaaacgcaaactgtg

SEQ ID NO: 325387 - DNA, 75 bp, synthetic construct
  source 1..75: mol_type = other DNA
cagctcggggcatcagaccccgaagccgccgcacgcctggcatccacaattcagcaggaccagaacaccatgaaa

SEQ ID NO: 325388 - DNA, 75 bp, synthetic construct
  source 1..75: mol_type = other DNA
catctacggaatttgtgccccgtcgctcggcgagcgctacaccatctgcacccatccggacgagtggaaactggt

SEQ ID NO: 325389 - DNA, 75 bp, synthetic construct
  source 1..75: mol_type = other DNA
cggccagtacgttgcgttaaaaacagctgcgttatcatttgcgctgccggttgtgagcggaatcacgaagcaccc

SEQ ID NO: 325390 - DNA, 75 bp, synthetic construct
  source 1..75: mol_type = other DNA
gtgcaaataagcgaggccctaatttcagaaccggggaaaatccagcgttttgttcagcaggcggtggaccactgg

SEQ ID NO: 325391 - DNA, 75 bp, synthetic construct
  source 1..75: mol_type = other DNA
gtgaacggcgttccgcttcgggagagcctcagctacaacggtggcggtgcaggatttggcgggcaaatggcggag

SEQ ID NO: 325392 - DNA, 75 bp, synthetic construct
  source 1..75: mol_type = other DNA
aagagctggtgcagggggaactgccgttttctgtttccgtgttgatttacgatttgcgttgtccgacggtgttgt

SEQ ID NO: 325393 - DNA, 75 bp, synthetic construct
  source 1..75: mol_type = other DNA
ccatgacgcggatgatgacatgctgatggacaaggttcgtcaggctacagctgtgctgctggcctacattcaggg

SEQ ID NO: 325394 - DNA, 75 bp, synthetic construct
  source 1..75: mol_type = other DNA
ccgtgctgctggcctacattcagggcagccgggataaagtgatccgtgaggacggtgaactgatcccgggcgagg

SEQ ID NO: 325395 - DNA, 75 bp, synthetic construct
  source 1..75: mol_type = other DNA
ccgtggggctaatcagttttacagcgtcatggaacggctgaagatgctggattccctgcaggcaacacagcttca

SEQ ID NO: 325396 - DNA, 75 bp, synthetic construct
  source 1..75: mol_type = other DNA
tgaagagcagaacggtcaggtgcaggaatatgacattaacactgcgtcaatgccgttcctgacccgccccggcca

SEQ ID NO: 325397 - DNA, 75 bp, synthetic construct
  source 1..75: mol_type = other DNA
atgaagaaaatggcggggatgacagcaatgaaattagcggcaacgggacggttggggtgaacctcggcgcatggc

SEQ ID NO: 325398 - DNA, 75 bp, synthetic construct
  source 1..75: mol_type = other DNA
gcggcccggctggccacgcagatgttttcctgctggctggaagaggcacttcttcgggggattatccgtccgcca

SEQ ID NO: 325399 - DNA, 75 bp, synthetic construct
  source 1..75: mol_type = other DNA
gctggcaatgtccgggagttatgtcaatgcctgggctgaagatgaaattcagtttgactctcgttttctggaatt

SEQ ID NO: 325400 - DNA, 75 bp, synthetic construct
  source 1..75: mol_type = other DNA
atgcctgaccattctcttttccgactgcgggtacttccctgctgcgttgcattggcaatgtccgggagttatgtc

SEQ ID NO: 325401 - DNA, 75 bp, synthetic construct
  source 1..75: mol_type = other DNA
cggaaaacgccgaagcaacccagtcggtggtacaagccacgctaactgaaggggcgattggctaccgcaaatttg

SEQ ID NO: 325402 - DNA, 75 bp, synthetic construct
  source 1..75: mol_type = other DNA
gaggctgaggcctggaaaatccagattcgtggtggagcggcgacagaatcagactgggtatccggcaggaaacac

SEQ ID NO: 325403 - DNA, 75 bp, synthetic construct
  source 1..75: mol_type = other DNA
ctgaaacccggcgaagaaatcggaatggtgaagtcggatcgccccaatcctaaccttgaaacttttcgtaatggt

SEQ ID NO: 325404 - DNA, 75 bp, synthetic construct
  source 1..75: mol_type = other DNA
ttatcagctaccgtccgaactggcgctggctggggatgcgggagaccgcagcaaaaagctttgtcgatgaggtgg

SEQ ID NO: 325405 - DNA, 75 bp, synthetic construct
  source 1..75: mol_type = other DNA
atgacaagttttttcaagcgtctgtttggtaaggatgataaacctgtaatcgcacgtggcccgctgggacttcat

SEQ ID NO: 325406 - DNA, 75 bp, synthetic construct
  source 1..75: mol_type = other DNA
ggcgagccagagtggttattttcgcgcgcgctgggtgtcgatatcccgctgacatcacttcatattattggttaa

SEQ ID NO: 325407 - DNA, 75 bp, synthetic construct
  source 1..75: mol_type = other DNA
atgtctggttttttccagcgtctgtttggcaaggataataagccagctatcgctcgtggtccgctgggacttcat

SEQ ID NO: 325408 - DNA, 75 bp, synthetic construct
  source 1..75: mol_type = other DNA
ggttcactggacggtaactcgtttcgcgtgagctattccaaagacttcgatgaactgaacagccgcgtcactttt

SEQ ID NO: 325409 - DNA, 75 bp, synthetic construct
  source 1..75: mol_type = other DNA
agcgaaaaaattattaatcacaataccgcagcaggaatgtttatgggaaccgccgcgctggctggcggtattttt

SEQ ID NO: 325410 - DNA, 75 bp, synthetic construct
  source 1..75: mol_type = other DNA
tgctgttaaatggtgaggaatcttttaacgatctcggcgagccagagtggttattttcgcgcgcgctgggtgtcg

SEQ ID NO: 325411 - DNA, 75 bp, synthetic construct
  source 1..75: mol_type = other DNA
taacgatctcggcgatccagagtggttattttcgcgcgcgctgggtgttgatatcccgctgacatcacttcatat

SEQ ID NO: 325412 - DNA, 75 bp, synthetic construct
  source 1..75: mol_type = other DNA
cgtctggggaatgcccgggcagatgatctggtgcgcaataacggtatcgcggctaatgcggtggccctgcataag

SEQ ID NO: 325413 - DNA, 75 bp, synthetic construct
  source 1..75: mol_type = other DNA
acgccgggacacggtatggggaaccgttttctgcgggccggggtggaggtcgatcggcatggacgggccgttgcg

SEQ ID NO: 325414 - DNA, 75 bp, synthetic construct
  source 1..75: mol_type = other DNA
tgatcgatatggccgtgccgttgcgtaccatatctgtgaggatgattttcctcgctccgggagtggacgatggga

SEQ ID NO: 325415 - DNA, 75 bp, synthetic construct
  source 1..75: mol_type = other DNA
ctgccggacccactgccagccgatctgttcaatggcctgttactaccatgtcaacaaacaggggcgatatctcct

SEQ ID NO: 325416 - DNA, 75 bp, synthetic construct
  source 1..75: mol_type = other DNA
tccgtgtgagttattccaaagactttgaccagctcaacagccgcgtcactttcgctggatatcgcttctcggaag

SEQ ID NO: 325417 - DNA, 75 bp, synthetic construct
  source 1..75: mol_type = other DNA
cagaacttccgcgatgcgggtgtttcggtttatctcaactatacccgccatacctactgggatcgcgaggagtag

SEQ ID NO: 325418 - DNA, 75 bp, synthetic construct
  source 1..75: mol_type = other DNA
atgaaacgaatgcctgtcctgattgatgtgaacggtgttccgcttcgggagagcctcagctacaacgggggcggt

SEQ ID NO: 325419 - DNA, 75 bp, synthetic construct
  source 1..75: mol_type = other DNA
cagagtgccgatgcagccctgctgcctgcgttgcgtctggggaatgcccgggcagatgatctggtgcgcaataac

SEQ ID NO: 325420 - DNA, 75 bp, synthetic construct
  source 1..75: mol_type = other DNA
ctaaataaacagccattggcggaagagtacgatatttactggtatgctggtgaagatgacgcgagcaaaagctat

SEQ ID NO: 325421 - DNA, 75 bp, synthetic construct
  source 1..75: mol_type = other DNA
caaccaacgaaagcgttatcccgcagacttgggatcttgccgcagtcgccattattgccggagggcttaaccgtt

SEQ ID NO: 325422 - DNA, 75 bp, synthetic construct
  source 1..75: mol_type = other DNA
ggttgtttcgttgcgtgaagggttcgacctgtctacaccaatcggtgaagcaatgctgggtattatgtcaacact

SEQ ID NO: 325423 - DNA, 75 bp, synthetic construct
  source 1..75: mol_type = other DNA
tcagaggctgtacagacgcttatttcacaaggtaaaacgaggttgcagattcaggaagagctaggaatctctaga

SEQ ID NO: 325424 - DNA, 75 bp, synthetic construct
  source 1..75: mol_type = other DNA
gagaaggtgacaccgtggtggtggtggctgtagaccgtctcggacgcgacacaatcgatgtgttatcaaccgtta

SEQ ID NO: 325425 - DNA, 75 bp, synthetic construct
  source 1..75: mol_type = other DNA
accggtggagacagtggttccggtttctatctgtatgataacgtaaaaaagaatgggttatgcttggtactttat

SEQ ID NO: 325426 - DNA, 75 bp, synthetic construct
  source 1..75: mol_type = other DNA
ggaccctgcagaatggcgggcgtcaggccgctgcggcagccccgggagcggcgacgtgccctggcagactgacag

SEQ ID NO: 325427 - DNA, 75 bp, synthetic construct
  source 1..75: mol_type = other DNA
ggcgtcgctaacaaaacgctgattttcgccatgccgggttcgaccaaagcgtgccgtaccgcatgggaaaatatc

SEQ ID NO: 325428 - DNA, 75 bp, synthetic construct
  source 1..75: mol_type = other DNA
aacgcgtccagaaggaatgattcgtattggttgcagttttggttttggtcgcagttatattgcaccagccattac

SEQ ID NO: 325429 - DNA, 75 bp, synthetic construct
  source 1..75: mol_type = other DNA
acagtacggcacttctaacaccggtcgctttaaaacgctgtaccgtgaagggctgaaaaatcgctacggcgcgct

SEQ ID NO: 325430 - DNA, 75 bp, synthetic construct
  source 1..75: mol_type = other DNA
gctaatgacaggcctgctggtaatcgcaggcctttttatttgggggagagggaagtgaacgatagctaccgacag

SEQ ID NO: 325431 - DNA, 75 bp, synthetic construct
  source 1..75: mol_type = other DNA
aagcaaatatcacttcaataaatcgcttttaaggtcatcacaatcgctctgtggtgaggtaagcacgtgcaaggc

SEQ ID NO: 325432 - DNA, 75 bp, synthetic construct
  source 1..75: mol_type = other DNA
aagacttgcaggtactggtagaaatcgtccatagcggcagttttagtgccgcagcggcgacgcttgggcagacgc

SEQ ID NO: 325433 - DNA, 75 bp, synthetic construct
  source 1..75: mol_type = other DNA
cgcatcttttgacaaaaaataaagaatattatgcgcagcacctgagtatctgcaaaaatatccgcagccacaatc

SEQ ID NO: 325434 - DNA, 75 bp, synthetic construct
  source 1..75: mol_type = other DNA
actggctactgcagagagtgttgatgaagcgattgagcgcgcaaagcacgccgccggacaggtaaaagtacaggg

SEQ ID NO: 325435 - DNA, 75 bp, synthetic construct
  source 1..75: mol_type = other DNA
gcagacgcgccagaaatcgatggcgcagtctatctcaacggcgaaacccacgttaagccaggcgacatcctgcgt

SEQ ID NO: 325436 - DNA, 75 bp, synthetic construct
  source 1..75: mol_type = other DNA
accggacctcatagctacgaacaggttctggagcacgttcatcactacgtccccaaaccgagacacaacccattc

SEQ ID NO: 325437 - DNA, 75 bp, synthetic construct
  source 1..75: mol_type = other DNA
cagcatggtcagcctgtgcgaacagttatcgaaactggggatctggacacgtctgcactatgtttatccttatcc

SEQ ID NO: 325438 - DNA, 75 bp, synthetic construct
  source 1..75: mol_type = other DNA
aggaacagccagcgccggcagaactgccggaagaaactaccacggcaacagtcgcaaaatttcagagagcgattt

SEQ ID NO: 325439 - DNA, 75 bp, synthetic construct
  source 1..75: mol_type = other DNA
atgcctgcaccggtgaagacgacatttgcccccttgagtgcttccgcaatgggtgttcccatgaatgaatttctc

SEQ ID NO: 325440 - DNA, 75 bp, synthetic construct
  source 1..75: mol_type = other DNA
atcccaactctccccatttgtttgcagatttagccgagttactcacggtgattaattatatcggacgtaactctc

SEQ ID NO: 325441 - DNA, 75 bp, synthetic construct
  source 1..75: mol_type = other DNA
ctccgtgaatgcccgtctgaaacaggcatcacagtcatccgatgaatttgcgtcatcacagaaagtgctgatgga

SEQ ID NO: 325442 - DNA, 75 bp, synthetic construct
  source 1..75: mol_type = other DNA
gaagtggcaatcgagtgtcagcgccttggcatagaggtcattgctgtcgatcgctatgctgacgcaccagccatg

SEQ ID NO: 325443 - DNA, 75 bp, synthetic construct
  source 1..75: mol_type = other DNA
atggcagccgtcgtctgggggtagcactggctactgcagagagtgttgttgacgccattgaacgcgcgaagcacg

SEQ ID NO: 325444 - DNA, 75 bp, synthetic construct
  source 1..75: mol_type = other DNA
tgaagaaggttttatcgagaagaacaaacaaaaggcgctgcactggttgaacctgagctgtatggaagggtttga

SEQ ID NO: 325445 - DNA, 75 bp, synthetic construct
  source 1..75: mol_type = other DNA
gggtaaaccggattatccaaaggcgatttcgctgttagaaaacgcctcggaagatctggagaacgactccgccgt

SEQ ID NO: 325446 - DNA, 75 bp, synthetic construct
  source 1..75: mol_type = other DNA
atttcgctgttagaaaacgcctcggaagatttagagaatgataccgccgttgatgcccagatgctgcttggcttg

SEQ ID NO: 325447 - DNA, 75 bp, synthetic construct
  source 1..75: mol_type = other DNA
gaacaaactgtttcgtcttcaaaattatctgaaaattacgaaagggaaattgtcagtgaaataattcttgctgac

SEQ ID NO: 325448 - DNA, 75 bp, synthetic construct
  source 1..75: mol_type = other DNA
atttaaaaccgactcattacctcctgaaataccagccacagtggtcggttccccggaacaacagaaaaaaacagg

SEQ ID NO: 325449 - DNA, 75 bp, synthetic construct
  source 1..75: mol_type = other DNA
cgcagcgttataacgccaggatgaaagagacagaagatgctcgttgcaaccaaccatcgacaaactgtcaacacc

SEQ ID NO: 325450 - DNA, 75 bp, synthetic construct
  source 1..75: mol_type = other DNA
aagtagcgatggtgactctgaagcaaaaaacccattacaacaagctgttaaagatgctcaggcggctttgcaagg

SEQ ID NO: 325451 - DNA, 75 bp, synthetic construct
  source 1..75: mol_type = other DNA
atcaataagcggggtagcgggataaggcggcttattctgctgaattttttcagggctgaagccgagaaaatggtg

SEQ ID NO: 325452 - DNA, 75 bp, synthetic construct
  source 1..75: mol_type = other DNA
gggctcacagtaaaagaatggggctgtgctgtaagaatgattactggcggttacaaatatctgcagcgtatatca

SEQ ID NO: 325453 - DNA, 75 bp, synthetic construct
  source 1..75: mol_type = other DNA
tccgacacagtctggactgtgttaaaaaaacattccctcagttacgggctgaagagggggatatcatgcatttaa

SEQ ID NO: 325454 - DNA, 75 bp, synthetic construct
  source 1..75: mol_type = other DNA
gcgcgtttttccttctcgattctgaatcctctcccgaccctgtttgtcctgatctggtcgggatacggcctgttg

SEQ ID NO: 325455 - DNA, 75 bp, synthetic construct
  source 1..75: mol_type = other DNA
acgtgttccgttgattgtcggtcgcaacccaaataacgaacattatctcgatactaaagccgagaaaatggggca

SEQ ID NO: 325456 - DNA, 75 bp, synthetic construct
  source 1..75: mol_type = other DNA
agaatgcgcaggacatctgcaaacgtctgtacccgatattgaaggaactgaactcatcatacacgagcaagctgt

SEQ ID NO: 325457 - DNA, 75 bp, synthetic construct
  source 1..75: mol_type = other DNA
gtgtgggagtgttaaacattgggtaacgttaaatctggcaaatgaccttggactaccatggtgcgtttttcttga

SEQ ID NO: 325458 - DNA, 75 bp, synthetic construct
  source 1..75: mol_type = other DNA
atgccatatgaatgtactgaaattttacttgatgtagataaggggttagggacagaaactaagtcaatatggggg

SEQ ID NO: 325459 - DNA, 75 bp, synthetic construct
  source 1..75: mol_type = other DNA
atagttttagttgaggggaaatcagatgtaacattccttagacacgcgggaaaatgtttaaaacaatctggagat

SEQ ID NO: 325460 - DNA, 75 bp, synthetic construct
  source 1..75: mol_type = other DNA
atctcattcatgaactcaccggcgtacaggtcacctatacggacacctgtgatgcaaaaaaaattatcggcaggt

SEQ ID NO: 325461 - DNA, 75 bp, synthetic construct
  source 1..75: mol_type = other DNA
ggccttgtgattggcttaatgctggattccattggcccggcggcgaaagcgatggcggaaaatttcgacctgaat

SEQ ID NO: 325462 - DNA, 75 bp, synthetic construct
  source 1..75: mol_type = other DNA
ttcgatgattttctgtcgggaatcgaaaccttcggcgagcgcattcaaccactgatgcagtgccgcgcccatctc

SEQ ID NO: 325463 - DNA, 75 bp, synthetic construct
  source 1..75: mol_type = other DNA
tgtttttgacattctttgcccacgcgaacgactccgagcctggcagccagtatttaaaggcagcagaggccggag

SEQ ID NO: 325464 - DNA, 75 bp, synthetic construct
  source 1..75: mol_type = other DNA
agctatcctcccacatgctgatgttaactttgcgcggattttttgtaagctgcttgagcgtttttctctactcga

SEQ ID NO: 325465 - DNA, 75 bp, synthetic construct
  source 1..75: mol_type = other DNA
aagcattcagtcggcttaataccacaattcataatgttcctttgggtgtacaacgtctcaggacatatcttgacg

SEQ ID NO: 325466 - DNA, 75 bp, synthetic construct
  source 1..75: mol_type = other DNA
cgttgctgcatctggcaaccggttcatggatgatagggatggcgggtgtggtaattcacgcggcgtttgtttata

SEQ ID NO: 325467 - DNA, 75 bp, synthetic construct
  source 1..75: mol_type = other DNA
ttcggtggtggtgcagtccgttctgttctcgcgcgttcgcgtgaattcattctgcaacattgattccgccgtatt

SEQ ID NO: 325468 - DNA, 75 bp, synthetic construct
  source 1..75: mol_type = other DNA
atgtctgtagcccgtaatctctggcgcgttgctgatgcgccgcacattgttccggctgactccgttgagcgtcag

SEQ ID NO: 325469 - DNA, 75 bp, synthetic construct
  source 1..75: mol_type = other DNA
gaggtgatgaataaagcagagtacaaagcaatgcggcaggctttcgattcccttccactggcaaaacagggagag

SEQ ID NO: 325470 - DNA, 75 bp, synthetic construct
  source 1..75: mol_type = other DNA
aaatatttgcagtaatagtaacgtataatccagatatggattctttcattagaaacctatcagcaattttagggc

SEQ ID NO: 325471 - DNA, 75 bp, synthetic construct
  source 1..75: mol_type = other DNA
tcatgatgcctataaagtttataatttgcgcagccattcccccacgaaagaaaagaattttgttcatgttaaaag

SEQ ID NO: 325472 - DNA, 75 bp, synthetic construct
  source 1..75: mol_type = other DNA
agccacggaatgacgctgaactcgctggtttctggcggatgcataatttcaggttcggtggtggtgcagtccgtt

SEQ ID NO: 325473 - DNA, 75 bp, synthetic construct
  source 1..75: mol_type = other DNA
tcggtggattgatgcgttttgtttcacgctcagtggtcacgggattcgttaatgcgcttgcaatactgattttta

SEQ ID NO: 325474 - DNA, 75 bp, synthetic construct
  source 1..75: mol_type = other DNA
aggttgagatacgtgggatgaatgaagccacccgcaccattgttgaccggtttggtgttcacgataaacccgaag

SEQ ID NO: 325475 - DNA, 75 bp, synthetic construct
  source 1..75: mol_type = other DNA
cggcgatatggggaaacttcccgacagcctgccggtattcctgcttcctgacgtgcctttaaatctccagacgct

SEQ ID NO: 325476 - DNA, 75 bp, synthetic construct
  source 1..75: mol_type = other DNA
agaatgcaggtatcaggtctgcgtgatatccctagcccatcaatcactgatgtccccgttggcgtaaaattcttc

SEQ ID NO: 325477 - DNA, 75 bp, synthetic construct
  source 1..75: mol_type = other DNA
ggttgcctggcccggaaagcataatgagccagggttcgcaggtggcggggttcagtaccgattatttaatcgacc

SEQ ID NO: 325478 - DNA, 75 bp, synthetic construct
  source 1..75: mol_type = other DNA
ttgccagcggtggtgtgacagggctggcgcagcgttatgaggcggagtcagcacgctggcgtgatgcgccggaag

SEQ ID NO: 325479 - DNA, 75 bp, synthetic construct
  source 1..75: mol_type = other DNA
ccggtgcgtaaccaagtttcggcagagaagccggactggtctacagtgccgtttatcatggccgatcagggaccg

SEQ ID NO: 325480 - DNA, 75 bp, synthetic construct
  source 1..75: mol_type = other DNA
cccggcgcagtggcattttcgatgctggagaatctggcagtagtgctgattgcccccgcgctaccctgcccggtg

SEQ ID NO: 325481 - DNA, 75 bp, synthetic construct
  source 1..75: mol_type = other DNA
ccatcgaccagcaagggccgtcgctctctggcgaattacatatcttctgctcggtgaccgctgcctacagccatc

SEQ ID NO: 325482 - DNA, 75 bp, synthetic construct
  source 1..75: mol_type = other DNA
gtcgtgctgaccgggatctccatgtggctgcatctggacgtacgcactgtcggcgacatgggtaagttgccggac

SEQ ID NO: 325483 - DNA, 75 bp, synthetic construct
  source 1..75: mol_type = other DNA
aaaaggtggtcactggcgaagcggatctggcgattgcgggtaaaccggaaaccttgccgggcgcagtggcgtttt

SEQ ID NO: 325484 - DNA, 75 bp, synthetic construct
  source 1..75: mol_type = other DNA
aacgccgtttgaactgggcgtgtgtgtgcagaaaaagcggctacatgagccgctgattgaggcgttctggaagat

SEQ ID NO: 325485 - DNA, 75 bp, synthetic construct
  source 1..75: mol_type = other DNA
atatccctagcccatcaatcactgatgtccccgttggcgtaaaattcttcggcatgaaggcaccgcatcaaggcg

SEQ ID NO: 325486 - DNA, 75 bp, synthetic construct
  source 1..75: mol_type = other DNA
tggaaagtgcctccgttgccgcaggtgtggtgaaaaacccgaaacgcaatgtccctatcgccaccattggtgggg

SEQ ID NO: 325487 - DNA, 75 bp, synthetic construct
  source 1..75: mol_type = other DNA
aagaggttatgtggtcatttgtcaccctgatggtcatcaccgccatgtatgcgctgaattacaaccggctgcata

SEQ ID NO: 325488 - DNA, 75 bp, synthetic construct
  source 1..75: mol_type = other DNA
atcggtgctttggctttatcgatggtctacgccaaaatgtcgttcctcgatcccagccctggcggttcatatgcc

SEQ ID NO: 325489 - DNA, 75 bp, synthetic construct
  source 1..75: mol_type = other DNA
aggctgatgagctttatagagctgatgctggtacgctaagttttctggatggggctgatacgccgagaaatcctg

SEQ ID NO: 325490 - DNA, 75 bp, synthetic construct
  source 1..75: mol_type = other DNA
tgacgatattccagctcagcagcatctcgccaaacgccactaaagagtttggactggtttcttccgtgtcggtta

SEQ ID NO: 325491 - DNA, 75 bp, synthetic construct
  source 1..75: mol_type = other DNA
atcggtgcgctggggctctcgatggtatacgccaaaatgtcgttcctcgacccaagtcctggtggttcttacgct

SEQ ID NO: 325492 - DNA, 75 bp, synthetic construct
  source 1..75: mol_type = other DNA
gccacgttctacaacacgcttccactgcatgacggcaaccattatccgggcgtcagcaaaacagcggattacaaa

SEQ ID NO: 325493 - DNA, 75 bp, synthetic construct
  source 1..75: mol_type = other DNA
gttcaagaatttcaactctgcgacctcatacagcggcccggcggcgattcgccagctgtggacaaacttcgcaca

SEQ ID NO: 325494 - DNA, 75 bp, synthetic construct
  source 1..75: mol_type = other DNA
ttcagtagcgattatttaatcgacctcgttactcgctttattaactggcagatgatcggagccatttttgtattg

SEQ ID NO: 325495 - DNA, 75 bp, synthetic construct
  source 1..75: mol_type = other DNA
taggatatttaagttacttcttcccgattctgaaagatccattggtattaaccatcacctgcgtcgtggtgctgt

SEQ ID NO: 325496 - DNA, 75 bp, synthetic construct
  source 1..75: mol_type = other DNA
aattcttcggtatgaagtcaccgcatcaaggcgcgccgattgtcatcgatcaacccagcagtttcctggcaatct

SEQ ID NO: 325497 - DNA, 75 bp, synthetic construct
  source 1..75: mol_type = other DNA
ttgtactgtttgtggcctggttatttctgtcgcagtggattcgcgtcaccatttttgtggtcgctattctggtgt

SEQ ID NO: 325498 - DNA, 75 bp, synthetic construct
  source 1..75: mol_type = other DNA
aagcgggcgaagagctgcgcgttttcgcccagcaaacgctgttgcaatatcagcaattgcgccacaccatcgacc

SEQ ID NO: 325499 - DNA, 75 bp, synthetic construct
  source 1..75: mol_type = other DNA
gactcggtgatgatcagctatgccccaatgaattcagccctgaacatctgggagctgctagggagacaggcctga

SEQ ID NO: 325500 - DNA, 75 bp, synthetic construct
  source 1..75: mol_type = other DNA
aaacgcactcagctattcctgcaatctgtttcaattgggcagaacgaaatccctcgcgaaatgatcgtaggatgt

SEQ ID NO: 325501 - DNA, 75 bp, synthetic construct
  source 1..75: mol_type = other DNA
aagagatcgcataacgctcggcacttttagtgatgtgaaggagtggttgtcgtcatttgaagccgatcgcgccgg

SEQ ID NO: 325502 - DNA, 75 bp, synthetic construct
  source 1..75: mol_type = other DNA
caacgaactgcgtaacgctgcgcgtcgaccgtcaatacttgccacaccgtttcgaggtagtggcgcggtatttga

SEQ ID NO: 325503 - DNA, 75 bp, synthetic construct
  source 1..75: mol_type = other DNA
ggaatgcgagaaaatcgataatccggtggtggtggcacaggaacttgatctgaactacagcgcatcagcggaagg

SEQ ID NO: 325504 - DNA, 75 bp, synthetic construct
  source 1..75: mol_type = other DNA
ggattatggaacgctggggcaatcgggagaatggtattaccgaaaaatcccgtgaaatggggctcagttggaccg

SEQ ID NO: 325505 - DNA, 75 bp, synthetic construct
  source 1..75: mol_type = other DNA
gggatgctggtttcggcgttcatcctgctggtgccgatgatttacattttcgtgcaggcattcagcaaagggctg

SEQ ID NO: 325506 - DNA, 75 bp, synthetic construct
  source 1..75: mol_type = other DNA
ggctcgattcgcggtgaaacgctgtcgctgccgttacaaattgaattgctggagcaggactacaacactgtcggc

SEQ ID NO: 325507 - DNA, 75 bp, synthetic construct
  source 1..75: mol_type = other DNA
gtttggcgcggtgtcggtggtttccggctcgattcgtggcgaaaccctgtcgctgccgttacagattgaattgct

SEQ ID NO: 325508 - DNA, 75 bp, synthetic construct
  source 1..75: mol_type = other DNA
tactggccatctttaagaaaaaaggtcttactccaaccggtaagctggaatttgccactattgatggcattgatt

SEQ ID NO: 325509 - DNA, 75 bp, synthetic construct
  source 1..75: mol_type = other DNA
aaatctggcatgcaccgggcttcagaccggaatacagggcaccttttcttcgtatggccacagtcagtgttttgt

SEQ ID NO: 325510 - DNA, 75 bp, synthetic construct
  source 1..75: mol_type = other DNA
tatgttctcttggccgggaatggtactggtgacgattttcgtcacctgcccgtttgtggtacgcgaattggtgcc

SEQ ID NO: 325511 - DNA, 75 bp, synthetic construct
  source 1..75: mol_type = other DNA
atcgacctgagttcagttaacggcatggctaacccgttcgctcagaagcgtcatggcgggaagataccggtattc

SEQ ID NO: 325512 - DNA, 75 bp, synthetic construct
  source 1..75: mol_type = other DNA
gatgcggcagatgcgatggaaaaggtcgtcactggcgaagcggatctggcgattgcgggtaaaccggaaaccttg

SEQ ID NO: 325513 - DNA, 75 bp, synthetic construct
  source 1..75: mol_type = other DNA
aacaccgtttgaactgggcgtttgtgcgcagaaaaagcggctgcatgagccgctgattgaggcgttctggaagat

SEQ ID NO: 325514 - DNA, 75 bp, synthetic construct
  source 1..75: mol_type = other DNA
cagcaattgcgccacaccatcgaccagcaagggccgtcgctctctggtgaattacatatcttctgctcggtgacc

SEQ ID NO: 325515 - DNA, 75 bp, synthetic construct
  source 1..75: mol_type = other DNA
cgccgcattgaactgtggtttcgacgcaacaaaatcagcaacccaatgatttacgccacggttggcgggcatgaa

SEQ ID NO: 325516 - DNA, 75 bp, synthetic construct
  source 1..75: mol_type = other DNA
tcctgcatctggcggaaagccgccattttggccgcagcgcacgagcgatgcacgtcagcccatccacgctctcac

SEQ ID NO: 325517 - DNA, 75 bp, synthetic construct
  source 1..75: mol_type = other DNA
gatgatttacgccacggttggcgggcatgaggcaatggtatcgatggtggcgcttggctgtggcgtggcgctgct

SEQ ID NO: 325518 - DNA, 75 bp, synthetic construct
  source 1..75: mol_type = other DNA
ggcgctgttctggaaggcgcgcaagttcgtggaaacgctgcccgtcgagtttcgcggttcgtgggacgagaagaa

SEQ ID NO: 325519 - DNA, 75 bp, synthetic construct
  source 1..75: mol_type = other DNA
ctgggataacctggcaacactgcctaaagttgttcctgctggctcaactcctgcatcatctggtgggatcggaga

SEQ ID NO: 325520 - DNA, 75 bp, synthetic construct
  source 1..75: mol_type = other DNA
aaggcgaggctggcgacaatatcggacgtggtgaccgtaccacgctctacctggtggatgaagctgcattcctcc

SEQ ID NO: 325521 - DNA, 75 bp, synthetic construct
  source 1..75: mol_type = other DNA
gtcaaaaaatgccaccggaaaaattcttgtggataagcaacctgacggaacgaaatctccaaacctggctgattc

SEQ ID NO: 325522 - DNA, 75 bp, synthetic construct
  source 1..75: mol_type = other DNA
cttgtggatgaggctgcttttctcctgcgaccattacttattgatgccgcgctttctcagacaacccgatgtcgt

SEQ ID NO: 325523 - DNA, 75 bp, synthetic construct
  source 1..75: mol_type = other DNA
tccgcaaaccggactataccgccgtgtttgagtggagaatggagaggctggagcggatcaggaaagcgcctgtaa

SEQ ID NO: 325524 - DNA, 75 bp, synthetic construct
  source 1..75: mol_type = other DNA
ggtttctaacattgatgagcgtatggcgctgatcgttgacccaatgctggcaaccggtggttccgttatcgcgac

SEQ ID NO: 325525 - DNA, 75 bp, synthetic construct
  source 1..75: mol_type = other DNA
gcgctgatcgttgacccaatgctggcaaccggtggttcagttatcgccaccattgacctactgaaaaaagcaggt

SEQ ID NO: 325526 - DNA, 75 bp, synthetic construct
  source 1..75: mol_type = other DNA
aaagtaactatcgaaggctggaacggcccggtagaaatcgaccagatcaaaggtaagaaaattaccgttgtgcca

SEQ ID NO: 325527 - DNA, 75 bp, synthetic construct
  source 1..75: mol_type = other DNA
atctatagtcatgttactacttctgggaggggcggtttcaatcttttattttttaaaggtgatgggttttatttt

SEQ ID NO: 325528 - DNA, 75 bp, synthetic construct
  source 1..75: mol_type = other DNA
cccagaataattataaagaaataccgaacattacaaggtaaagtcgtatggctatggatattgccatttgttatt

SEQ ID NO: 325529 - DNA, 75 bp, synthetic construct
  source 1..75: mol_type = other DNA
tggacggtgtgctggaaaacgttccgagcgcgcgcatcagcgtagtcggtatgtaccgtaatgaagaaacgctgg

SEQ ID NO: 325530 - DNA, 75 bp, synthetic construct
  source 1..75: mol_type = other DNA
aatgctctctggctatgtttccacgtacaaattaaccgatagcgagcgcgatattgctgccggaatatggaacgc

SEQ ID NO: 325531 - DNA, 75 bp, synthetic construct
  source 1..75: mol_type = other DNA
ctgctgtttgccatggtagagattgaatctgaagaacgctggaatgcggttgccagcactgatgtggtgatgctg

SEQ ID NO: 325532 - DNA, 75 bp, synthetic construct
  source 1..75: mol_type = other DNA
tggtggaaatatatgaccgatgttatgccagctaatgcggataacagcccggtgagtagtgagctgcaagaagtg

SEQ ID NO: 325533 - DNA, 75 bp, synthetic construct
  source 1..75: mol_type = other DNA
ttggcctcttgcatatagtgattatgctgaaggctggaacgactgccgcgaagccatgcttcagggagataaatc

SEQ ID NO: 325534 - DNA, 75 bp, synthetic construct
  source 1..75: mol_type = other DNA
atggttgccgaagggagattgccatatggcgaagcggcaaatttcgatcttgtgggtcagcgcgcactacaaatc

SEQ ID NO: 325535 - DNA, 75 bp, synthetic construct
  source 1..75: mol_type = other DNA
aacggtgtccatacggtacttgccggattcgtcgaagtgggcgaaaccctcgaacaggcggtcgcgcgggaagta

SEQ ID NO: 325536 - DNA, 75 bp, synthetic construct
  source 1..75: mol_type = other DNA
taccgggagaaattaccggaacagatgatgaaagccatgacgcatcagttacgcctggtgctgaaaagaaaatga

SEQ ID NO: 325537 - DNA, 75 bp, synthetic construct
  source 1..75: mol_type = other DNA
cggctctgcaacgggaagcgcaggaacaaaaactcggtttatgggctgacagtaatccggttcctccgtgggaat

SEQ ID NO: 325538 - DNA, 75 bp, synthetic construct
  source 1..75: mol_type = other DNA
ctctgcaacgggaagcgcaggaacaaaagcgtggtttatgggcggacagtaatccggttccaccgtgggaatggc

SEQ ID NO: 325539 - DNA, 75 bp, synthetic construct
  source 1..75: mol_type = other DNA
aatcagttaccgtctcttatacgcagacagaccgctacggacgcattatcggtcgtgtgttcacgacgaacggca

SEQ ID NO: 325540 - DNA, 75 bp, synthetic construct
  source 1..75: mol_type = other DNA
cccgttagttgctctgtttatgcttgcaggatgcgcaaaaccgccaacaactattgaagtttccccgacgattac

SEQ ID NO: 325541 - DNA, 75 bp, synthetic construct
  source 1..75: mol_type = other DNA
aaacacaggcctcgcatcagcgtttcttttaccagggcgattatttcgtcaacatgatgaatttacatgccttac

SEQ ID NO: 325542 - DNA, 75 bp, synthetic construct
  source 1..75: mol_type = other DNA
tcctgcaggaagaagcacgacagcagaaacgtggtctgtgggcagacagcgctcctgttccgccctgggtatggc

SEQ ID NO: 325543 - DNA, 75 bp, synthetic construct
  source 1..75: mol_type = other DNA
ctcacttgagggtcaggaacgcatctggtcttcaccatatttgattgtcgatttcctacccagtctgtattacga

SEQ ID NO: 325544 - DNA, 75 bp, synthetic construct
  source 1..75: mol_type = other DNA
aaattatcagcctggccctacctattattccgtgtcacaacaactggtttataaagtgggtcagtatcgcccgcg

SEQ ID NO: 325545 - DNA, 75 bp, synthetic construct
  source 1..75: mol_type = other DNA
ttcccagtcatcatcgaactatctgacacactctccttcgctgctgttttccaggaaaggaggtgaggagaaaca

SEQ ID NO: 325546 - DNA, 75 bp, synthetic construct
  source 1..75: mol_type = other DNA
caggcgctgcgtcaggcgcgccttgatttattaaccggtaaacgggtggtgtctgtccagaaagatggtcgcaga

SEQ ID NO: 325547 - DNA, 75 bp, synthetic construct
  source 1..75: mol_type = other DNA
ccgcgccacgtgcttatctatggcgctggagtaatcggctgcgaatatgcgtcgatcttccgtggtatggatgtg

SEQ ID NO: 325548 - DNA, 75 bp, synthetic construct
  source 1..75: mol_type = other DNA
tgatcgagctggttgaagaatcaggcatctctgaactggaaatttctgaaggcgaagagtcagtacgcatcagcc

SEQ ID NO: 325549 - DNA, 75 bp, synthetic construct
  source 1..75: mol_type = other DNA
atgatcccgtggctgctggtcgccgaactggtgtgcctgaaaggaaaaacgctgggcgaaatggtgcgcgaccgg

SEQ ID NO: 325550 - DNA, 75 bp, synthetic construct
  source 1..75: mol_type = other DNA
cgtttcaacggctgaattgcaggatgccacacctgccgcgctggtggcgcatgtgacgtcgcgcaaatgctacgg

SEQ ID NO: 325551 - DNA, 75 bp, synthetic construct
  source 1..75: mol_type = other DNA
ctctcttaccgttattgtttacccctgtaacaaacgcccagacgccgcagacacccattctggaaaaccgggctg

SEQ ID NO: 325552 - DNA, 75 bp, synthetic construct
  source 1..75: mol_type = other DNA
ggtgacggaagcgaatcagcaaaaacccctgcttggactgtttgctgacggcaatatgccagtgcgctggctagg

SEQ ID NO: 325553 - DNA, 75 bp, synthetic construct
  source 1..75: mol_type = other DNA
cgcagtaatggtgatgagctacggtaactctgaagaggattcgcaagagcatactggcagccagttgcgtattgc

SEQ ID NO: 325554 - DNA, 75 bp, synthetic construct
  source 1..75: mol_type = other DNA
ccggtaacgtttctaccgcagagttgcaggatgccacgcccgctgcgctggtggcgcatgtgacctcgcgcaaat

SEQ ID NO: 325555 - DNA, 75 bp, synthetic construct
  source 1..75: mol_type = other DNA
gcacaggcgcgtggttatcagttggtgagtgatgctgcctcgctaaatgcggtgacggaagcgaatcagcaaaaa

SEQ ID NO: 325556 - DNA, 75 bp, synthetic construct
  source 1..75: mol_type = other DNA
aaagagttctctcaggatccaggctctgccaaccagggcggcgatcttggctgggcaacgccagatattttcgat

SEQ ID NO: 325557 - DNA, 75 bp, synthetic construct
  source 1..75: mol_type = other DNA
ttcgttccggcgttggcttccatattctgaaagttaacgacctgcgcggcgaaagcaaaaatatctcggtgaccg

SEQ ID NO: 325558 - DNA, 75 bp, synthetic construct
  source 1..75: mol_type = other DNA
tttttgcgctgcccacatcatttattttaacgttgatttttgccgtgccgggaatggcgttaggcttcagaagga

SEQ ID NO: 325559 - DNA, 75 bp, synthetic construct
  source 1..75: mol_type = other DNA
aaaagccgcaggtctggcgaccggtaacgtttctaccgcagagttgcaggatgccacgcccgctgcgctggtggc

SEQ ID NO: 325560 - DNA, 75 bp, synthetic construct
  source 1..75: mol_type = other DNA
ctcagggcgatattactgcacccggcggtgctcgccgcttaacgggtgatcagaccgccgctctgcgtgattctc

SEQ ID NO: 325561 - DNA, 75 bp, synthetic construct
  source 1..75: mol_type = other DNA
gcgattgtcgatcaggcgcgtaacggcgctgatttcggtaagctggcgattgctcattctgccgaccagcaggcg

SEQ ID NO: 325562 - DNA, 75 bp, synthetic construct
  source 1..75: mol_type = other DNA
gccacgcctgcagcgctggtggcgcatgtgacgtcgcgcaaatgttatggtccaggcgctaccagcgagaaatgc

SEQ ID NO: 325563 - DNA, 75 bp, synthetic construct
  source 1..75: mol_type = other DNA
cgatgcgttttcgtctgccgcatcgcccgcatctacgtccggcatggatgattcgtgtcggtctttttatgtacg

SEQ ID NO: 325564 - DNA, 75 bp, synthetic construct
  source 1..75: mol_type = other DNA
aaaactaacgccgtattatcagggtattggcccggcatggacgaaagagagcgtgctaccgggtggcgccatcga

SEQ ID NO: 325565 - DNA, 75 bp, synthetic construct
  source 1..75: mol_type = other DNA
tcctgactgaatcgctggcgcgtcattacgctcgcacttacggcagcaacagcgagctgctgctcggcaatgcgg

SEQ ID NO: 325566 - DNA, 75 bp, synthetic construct
  source 1..75: mol_type = other DNA
gtggcgtcgcacgaaacaaggcatgtggctgaatgcagaacaacaatctcgcgtgagtcagtggttggtggagta

SEQ ID NO: 325567 - DNA, 75 bp, synthetic construct
  source 1..75: mol_type = other DNA
aatgcggatcaacaatctcgtgtgagtcagtggctgggggagtatacgcagcagaagttgtcgctggcgtcgtaa

SEQ ID NO: 325568 - DNA, 75 bp, synthetic construct
  source 1..75: mol_type = other DNA
tggctgaatgcgcagcaacagtctcgtgtaagtcagtggctggtcgagtatacgcagcagaaattgtcgctggcg

SEQ ID NO: 325569 - DNA, 75 bp, synthetic construct
  source 1..75: mol_type = other DNA
gtggtaatgtttggtgctgttgttgccgagcgagataatactcatttgtcgattccctttttagctgatgcgctg

SEQ ID NO: 325570 - DNA, 75 bp, synthetic construct
  source 1..75: mol_type = other DNA
ctgctgtttgccatggtagagattgaatctgaagaacgctggaatgcggttgccagcactgatgtttgccaacgt

SEQ ID NO: 325571 - DNA, 75 bp, synthetic construct
  source 1..75: mol_type = other DNA
gcataacttgcgcgaaacaatggacgatgtgcaggcgttttttgacggcatgggtacgcagtttgccaacgtggt

SEQ ID NO: 325572 - DNA, 75 bp, synthetic construct
  source 1..75: mol_type = other DNA
ggtttatccgtgctgatgctggaggcgcaggatctcgcttgtgcgacctcttccgccagttcaaaactcattcac

SEQ ID NO: 325573 - DNA, 75 bp, synthetic construct
  source 1..75: mol_type = other DNA
atcatctgggtaaacgcaccagcctgccgggatcaactggtttgcgttttggcgcaaattcagtgttaaaaccgg

SEQ ID NO: 325574 - DNA, 75 bp, synthetic construct
  source 1..75: mol_type = other DNA
atgtctttgaaaaagttattgcaagattgtgttacgagaggtcaagaaatgaccaaagcaattgctatcgctcaa

SEQ ID NO: 325575 - DNA, 75 bp, synthetic construct
  source 1..75: mol_type = other DNA
catcacttttgtgtaaaaatgctgaaaatatagaatggtgcataaatagagcgacgttttgtgaagcatttcttg

SEQ ID NO: 325576 - DNA, 75 bp, synthetic construct
  source 1..75: mol_type = other DNA
gaggaagatgcacgtcgtttctatcgttcagaagaaggcatcgtgctggtaacgcgcgaaatgctacggaagtta

SEQ ID NO: 325577 - DNA, 75 bp, synthetic construct
  source 1..75: mol_type = other DNA
atcaaggttacgataccgtagaggctaaccaccagttaggcttcgccgctgatgagcgcgacttcactcttgcga

SEQ ID NO: 325578 - DNA, 75 bp, synthetic construct
  source 1..75: mol_type = other DNA
accacaccgaaagtctgacccagcagcgccgcagcaaagccaccggcggtggcggtgacgccctgatgacgaact

SEQ ID NO: 325579 - DNA, 75 bp, synthetic construct
  source 1..75: mol_type = other DNA
atgagtatggtcgtcgttgttacagaaaatgtccctccgcgcttacgtggacggctcgcgatctggctacttgaa

SEQ ID NO: 325580 - DNA, 75 bp, synthetic construct
  source 1..75: mol_type = other DNA
aaaatgttcctccacgtttacgtggacggctcgctatctggctactggaagtgcgtgccggtgtgtatgtcggag

SEQ ID NO: 325581 - DNA, 75 bp, synthetic construct
  source 1..75: mol_type = other DNA
tcgccacggcgataacccactgaatggttattccatttgcgcattcccagacgccgcagacaaacaaacgccaga

SEQ ID NO: 325582 - DNA, 75 bp, synthetic construct
  source 1..75: mol_type = other DNA
gcttaatagtgacagttttacgttagctggtaataatacagcagtggaaaaaaaaataataataactataaagat

SEQ ID NO: 325583 - DNA, 75 bp, synthetic construct
  source 1..75: mol_type = other DNA
gtcagcgtttaagctatcgcctggtgcgtagcgcagaagagtgcaaaattgctctttcaagcgtagcggaaaccc

SEQ ID NO: 325584 - DNA, 75 bp, synthetic construct
  source 1..75: mol_type = other DNA
ggtcttgtgaaaacaagccgtgttagcacgactggcattcgtctatttgattcagaactggaacatagagactat

SEQ ID NO: 325585 - DNA, 75 bp, synthetic construct
  source 1..75: mol_type = other DNA
cactaaagaagcgctgcgctatcgtacagcgctctatgatggctatacccatcttgaggactatccactctgtac

SEQ ID NO: 325586 - DNA, 75 bp, synthetic construct
  source 1..75: mol_type = other DNA
ctggcgacagtcctttcgcagcgaatgcgttaggtaaactggctgcccaggaaatgttggtggtttacgcggact

SEQ ID NO: 325587 - DNA, 75 bp, synthetic construct
  source 1..75: mol_type = other DNA
ccgcattaacctcgaacacatcaaaagcctctggcctgacagtccgtttaaacgctatggcgacgtgaccgaagt

SEQ ID NO: 325588 - DNA, 75 bp, synthetic construct
  source 1..75: mol_type = other DNA
taacacgtctcgacatgtcaagttccgttatccagcgggccatgccaatgctgaaaagcctgcgggcaagacaat

SEQ ID NO: 325589 - DNA, 75 bp, synthetic construct
  source 1..75: mol_type = other DNA
accctcgacacagccaaagagcttgcgatggttgaacgtaacgaaaaaggtcgccagatccgccgctacttcatc

SEQ ID NO: 325590 - DNA, 75 bp, synthetic construct
  source 1..75: mol_type = other DNA
gatcgatgcgctggagatgtcatggatcctcgaaaccaatacaggcatgaatgaaccgccccgggaatcctggag

SEQ ID NO: 325591 - DNA, 75 bp, synthetic construct
  source 1..75: mol_type = other DNA
cgaaaaaggccgccagatacgccgatacttcatcgagtgcgaaaagaaacttcgcaacattcagccagtacaaac

SEQ ID NO: 325592 - DNA, 75 bp, synthetic construct
  source 1..75: mol_type = other DNA
atcctcctttgctacatgcagctctggatggaaaaagcccaggacctcagcaaacacctgtatcccattatgaaa

SEQ ID NO: 325593 - DNA, 75 bp, synthetic construct
  source 1..75: mol_type = other DNA
cagcaaaacttgatcccgccaactatacggtgcacagggccagaagtatgctggcgcaactaagagcaagacaat

SEQ ID NO: 325594 - DNA, 75 bp, synthetic construct
  source 1..75: mol_type = other DNA
tttccttctgacaggctcttcggcacacggattttcccgtcaaccggctggtttgaacgtccggatatgattaaa

SEQ ID NO: 325595 - DNA, 75 bp, synthetic construct
  source 1..75: mol_type = other DNA
ggcgcagaataccctatcgttgatagaaattgtcaaagcggtaaaaatcaatacggttattccggtggaaagtct

SEQ ID NO: 325596 - DNA, 75 bp, synthetic construct
  source 1..75: mol_type = other DNA
tgattgaacacgaactacaactgatgctgctcgaaggttttgataaatctcctatttccgccaaagcgctgcata

SEQ ID NO: 325597 - DNA, 75 bp, synthetic construct
  source 1..75: mol_type = other DNA
agccctactctgcaatgcccgcaatctgcatgcttttttaggcgtgaaaaaggtgtttgcggcatggattacaaa

SEQ ID NO: 325598 - DNA, 75 bp, synthetic construct
  source 1..75: mol_type = other DNA
ttcagccagtacaagcagaaccacagccgcaattcacagccgaggaaatcatcctcctttgctacatgcagctct

SEQ ID NO: 325599 - DNA, 75 bp, synthetic construct
  source 1..75: mol_type = other DNA
aatatcaggcattgtttctgcctttcctgtcgtggtcggttgattttgcagacagatgctcaggggcgtggtttg

SEQ ID NO: 325600 - DNA, 75 bp, synthetic construct
  source 1..75: mol_type = other DNA
tattcgtaaagaaatgcttgatattccagaaatgcgcgatgccctccactttgttcttgagttaacggatatcta

SEQ ID NO: 325601 - DNA, 75 bp, synthetic construct
  source 1..75: mol_type = other DNA
tattctgctacagcaggccattgccgaaggagcgacatcgctcgatacccatgaggttcagccaatcctgcaagc

SEQ ID NO: 325602 - DNA, 75 bp, synthetic construct
  source 1..75: mol_type = other DNA
tactttattgcgctcggtgacagcctggatatcgacgttgatgaattgctcgactacctggcacgcgacagcaaa

SEQ ID NO: 325603 - DNA, 75 bp, synthetic construct
  source 1..75: mol_type = other DNA
aagggctgaatgccagcttttcgccagtgccaattaagcgcggcaagctggcgtttatttcacaatcggctgctg

SEQ ID NO: 325604 - DNA, 75 bp, synthetic construct
  source 1..75: mol_type = other DNA
ttgcctttagaaaatgtgctggaagttattaccgattatgacatcagcatctgtatcaactgggcgcgctctgcc

SEQ ID NO: 325605 - DNA, 75 bp, synthetic construct
  source 1..75: mol_type = other DNA
cggttttcacagcctcgaatcgctctcgccaactttatgtcagccgtttggtcgtgaccgcgcaggtatcaccat

SEQ ID NO: 325606 - DNA, 75 bp, synthetic construct
  source 1..75: mol_type = other DNA
ccacgggcagccgagcaccacatggcactacgcgcaacaggaactcggcgatccgtcgcgttttctcagccactg

SEQ ID NO: 325607 - DNA, 75 bp, synthetic construct
  source 1..75: mol_type = other DNA
tatatatcttgtcgccttcactatatgccaatgcagaggatatacagggaaaagttattcgtgtacttgacggcg

SEQ ID NO: 325608 - DNA, 75 bp, synthetic construct
  source 1..75: mol_type = other DNA
ggtgcggatcaggctggtaaatattgatgcaccggaaaagaaacaggattatggccggtggtcaacggacatgat

SEQ ID NO: 325609 - DNA, 75 bp, synthetic construct
  source 1..75: mol_type = other DNA
gtgctgaccgataccatcgctgatatgtctcaggacaccagtattcacgaattcatcaagcagaacgcgcgttaa

SEQ ID NO: 325610 - DNA, 75 bp, synthetic construct
  source 1..75: mol_type = other DNA
tactttattgctctcggcgacagcctggatatcgacgttgatgaattgctcgattatctggcgcgcgacagcaaa

SEQ ID NO: 325611 - DNA, 75 bp, synthetic construct
  source 1..75: mol_type = other DNA
tactgcgaccaaaatcgattgcggtaattggcgcatcgatgaaacccaatcgcgcaggttacctgatgatgcgta

SEQ ID NO: 325612 - DNA, 75 bp, synthetic construct
  source 1..75: mol_type = other DNA
cccgcaaaaattgttgtgtatgaagttccgatccgagtccgattgataaacatcgatgcccctgaaaagaaacaa

SEQ ID NO: 325613 - DNA, 75 bp, synthetic construct
  source 1..75: mol_type = other DNA
attgaagggcgcaatacaacgctgccgctgacccacacccaaatggcgaaacaagccggaaaactcggcgcgttg

SEQ ID NO: 325614 - DNA, 75 bp, synthetic construct
  source 1..75: mol_type = other DNA
aacgcagacggcgaactacacaggaaaagatcgtgattgttcagcagagctttgaaccgggaatgacggtctccc

SEQ ID NO: 325615 - DNA, 75 bp, synthetic construct
  source 1..75: mol_type = other DNA
agccagttatttctctggcgtaagcaataccaggaaggaagtcttactgctgtcgccgccggagaacaggttgtt

SEQ ID NO: 325616 - DNA, 75 bp, synthetic construct
  source 1..75: mol_type = other DNA
aataccaggagggaagtcttactgatgtggccgcaggagagcaggtcgttcctgcctctgaacttgctgctgcca

SEQ ID NO: 325617 - DNA, 75 bp, synthetic construct
  source 1..75: mol_type = other DNA
aaaaatcgccattgttcagcagagctttgagcccggaatgaccgtgtcgctggtcgcccgtcagcatggcgttgc

SEQ ID NO: 325618 - DNA, 75 bp, synthetic construct
  source 1..75: mol_type = other DNA
cctttgacacctgtcagaataacaaagcagcatggctgcaacacaaaaatgagctggcagcggccgaacaggaat

SEQ ID NO: 325619 - DNA, 75 bp, synthetic construct
  source 1..75: mol_type = other DNA
atgattgatgcctcaggaccggagaaactcagacggcatactgcacaggaaaagatcgctaatgttcagaagagc

SEQ ID NO: 325620 - DNA, 75 bp, synthetic construct
  source 1..75: mol_type = other DNA
cagtacgactcaaatatctatgacaaatatcgtaaggcaaagcgggcgggtaagggtattcatgaaaatcaggca

SEQ ID NO: 325621 - DNA, 75 bp, synthetic construct
  source 1..75: mol_type = other DNA
gaagagaaggaattctggcgacaattatcagatacccctgatattcgcggtctggaacaaccctgcctggaaaac

SEQ ID NO: 325622 - DNA, 75 bp, synthetic construct
  source 1..75: mol_type = other DNA
gtggcgtactatcgccacctgttcaataaaatcaacgcattgcaggctaataaagtgctcgcactggagctccag

SEQ ID NO: 325623 - DNA, 75 bp, synthetic construct
  source 1..75: mol_type = other DNA
ggaagtcgcttgtggtcagcaaggttacagcgaatattttgacagttttatgcgtcattatctgacggtaaaaac

SEQ ID NO: 325624 - DNA, 75 bp, synthetic construct
  source 1..75: mol_type = other DNA
cccgcagccagagtgttgctgaaaaaggcgtagatcggctggttgaagatattcatatctacgcggagggtaatg

SEQ ID NO: 325625 - DNA, 75 bp, synthetic construct
  source 1..75: mol_type = other DNA
tgaaaaacctgcagacaattgcgaccaaaatgaagcaatacaagttccagggaagatataccggaacggattata

SEQ ID NO: 325626 - DNA, 75 bp, synthetic construct
  source 1..75: mol_type = other DNA
taatggctgaacgtttcccttacgctaaggaaggtgcgaataagtggggaaattcttctcggctgactcagtcat

SEQ ID NO: 325627 - DNA, 75 bp, synthetic construct
  source 1..75: mol_type = other DNA
acgtggccgtattacgtcagggaacatctggcgcaaaagtgcagacaagtacggaaacgggtaatcagcataaat

SEQ ID NO: 325628 - DNA, 75 bp, synthetic construct
  source 1..75: mol_type = other DNA
cccagacctggctgaacagtggttatgaaggtgccattgccggtgcagctctgggaaccggcatcacaggatata

SEQ ID NO: 325629 - DNA, 75 bp, synthetic construct
  source 1..75: mol_type = other DNA
actgtggttcggttggtcctttatgattgctgcaggcattatgtttattaacgctctgtttttataccgttgtac

SEQ ID NO: 325630 - DNA, 75 bp, synthetic construct
  source 1..75: mol_type = other DNA
atgagcctgaatatggcctcgctggagacactttggcagtctaatgccgcgggtgtctcgatagttatctcatcg

SEQ ID NO: 325631 - DNA, 75 bp, synthetic construct
  source 1..75: mol_type = other DNA
ttgtggaagatattaactacacaatgatcaccgatgtgcagattgcagaacgtagtaaagtagcagtcacaacgg

SEQ ID NO: 325632 - DNA, 75 bp, synthetic construct
  source 1..75: mol_type = other DNA
atggatctgcgggagtctcagggatggctgaaccgtggttatgaaggcgcagcagttggtgcagcgttaggtgcc

SEQ ID NO: 325633 - DNA, 75 bp, synthetic construct
  source 1..75: mol_type = other DNA
cggataatgttgccgccctgcgtcagggcacatcaggtgcgaaaattcagaccagtactgaaacaggtaaccagc

SEQ ID NO: 325634 - DNA, 75 bp, synthetic construct
  source 1..75: mol_type = other DNA
atgttcagatcgcggaaagaaccaaaactcaggttcagactgataacgtggccgtattacgtcagggaacatccg

SEQ ID NO: 325635 - DNA, 75 bp, synthetic construct
  source 1..75: mol_type = other DNA
aggttaacctgaaatttgaagaggcgaaacctgttctcgaagaccagttggccaaatcaattgctaatatattgt

SEQ ID NO: 325636 - DNA, 75 bp, synthetic construct
  source 1..75: mol_type = other DNA
atgttgctgctctccgccagggaacctccggtgcaaaagtgcagaccagcacatcaaccggaaatcaacataaat

SEQ ID NO: 325637 - DNA, 75 bp, synthetic construct
  source 1..75: mol_type = other DNA
gcagacaaaatggatctgcgtgaatctcagggatggttgagtcgcggctatgaaggtgcagctgtcggagctgct

SEQ ID NO: 325638 - DNA, 75 bp, synthetic construct
  source 1..75: mol_type = other DNA
ccaacgcccgctttgttggtgttgccgggccacgaatgcaggccgaaggctgcgaagcctggtacgaaatggaag

SEQ ID NO: 325639 - DNA, 75 bp, synthetic construct
  source 1..75: mol_type = other DNA
tgtttttgtcggtattgatgcgcctgacttcaatattacccttgaaggtaacctcaaaaagcagggtatcaaaac

SEQ ID NO: 325640 - DNA, 75 bp, synthetic construct
  source 1..75: mol_type = other DNA
acgcatcaaagctgaagtcgcgccagacctttcagttcatttgctggatggaatgggccgtgaggcgatggtcgc

SEQ ID NO: 325641 - DNA, 75 bp, synthetic construct
  source 1..75: mol_type = other DNA
aatcgctcgcagaggacgcggaaaccctcagtatcagctgtgaggtaacgttccggcacgggacgctccgcttca

SEQ ID NO: 325642 - DNA, 75 bp, synthetic construct
  source 1..75: mol_type = other DNA
ttccgctaataaagttaatctcaagtttgaagaagccaaacctgttcttgaggaacaactggcgaaatctgttgc

SEQ ID NO: 325643 - DNA, 75 bp, synthetic construct
  source 1..75: mol_type = other DNA
tctccaggatttccggggcggttcatcatgacttccccggataaagcttactactggatccaggctaacgttctc

SEQ ID NO: 325644 - DNA, 75 bp, synthetic construct
  source 1..75: mol_type = other DNA
cgatggtggaagatgtgaactataccatgatcacggatgtgcagattgcagagcgtactaaggcaacggtgacaa

SEQ ID NO: 325645 - DNA, 75 bp, synthetic construct
  source 1..75: mol_type = other DNA
accggaaatcagcataaataccaaacccgtgtggtatctaatgccaacaaggttaacctgaagtttgaagaagcg

SEQ ID NO: 325646 - DNA, 75 bp, synthetic construct
  source 1..75: mol_type = other DNA
ttgcaggcaaaaatcagtgatgccgttaaagccaaaggctaccaggttgtgagctcacctgacaaggcatactac

SEQ ID NO: 325647 - DNA, 75 bp, synthetic construct
  source 1..75: mol_type = other DNA
acaatgattacagatgttcagattgccgagcgaaccagaaccagcgtcagaacggataatgttgcagctttgcgt

SEQ ID NO: 325648 - DNA, 75 bp, synthetic construct
  source 1..75: mol_type = other DNA
cagggtgtggtgcgatgagcacagcaatcaagaagcgtaatcttgaagtcaaaactcagatgagtgaaaccatct

SEQ ID NO: 325649 - DNA, 75 bp, synthetic construct
  source 1..75: mol_type = other DNA
caggatcttgacctcaacgaaggtcggataaatattcgccgattgaagaacggattttccactgttcatccgtta

SEQ ID NO: 325650 - DNA, 75 bp, synthetic construct
  source 1..75: mol_type = other DNA
gtgaaagcaaaagggtatcaggtggtgacttctccggataaagcctactactggattcaggcgaatgtgctgaag

SEQ ID NO: 325651 - DNA, 75 bp, synthetic construct
  source 1..75: mol_type = other DNA
tatctttgttaccttcagaataatataaaaaaacatccactcaatgtgatggtaaactggactcgggaaaagtca

SEQ ID NO: 325652 - DNA, 75 bp, synthetic construct
  source 1..75: mol_type = other DNA
atggcccgggtggcagagcagtatggccggaacgatatggcgcttcatctgcttggtgaactcattacccgtgcg

SEQ ID NO: 325653 - DNA, 75 bp, synthetic construct
  source 1..75: mol_type = other DNA
ctatgtgcctaatgctggaggggcgcttagggttatagttgtttataaccaggcaggagagcaagtaacgtggtt

SEQ ID NO: 325654 - DNA, 75 bp, synthetic construct
  source 1..75: mol_type = other DNA
ttgagcgatttgcacgcaaaaacaaaatatccgaccagtcactgcgcgaaattgttaaacaggctgataacgggc

SEQ ID NO: 325655 - DNA, 75 bp, synthetic construct
  source 1..75: mol_type = other DNA
atttcgaaaagctgcgcatcacgttctcaatcttactgatgaacaactggcgcaattgatcctgcagggtcagtt

SEQ ID NO: 325656 - DNA, 75 bp, synthetic construct
  source 1..75: mol_type = other DNA
tgggggatgcggctggcatcggcccggaaattaccgttaaaactattgcatctgaagaggcattcaaatatgcca

SEQ ID NO: 325657 - DNA, 75 bp, synthetic construct
  source 1..75: mol_type = other DNA
ccgcaactgggagatggatttctcgcgttcatagtggctgttgttattgctatagccatttctgttgggttattc

SEQ ID NO: 325658 - DNA, 75 bp, synthetic construct
  source 1..75: mol_type = other DNA
agtaagactgagtggggacgggcgttccgcgaccgtctggcggctaatggcaagaaaggaaaggtgattctcggc

SEQ ID NO: 325659 - DNA, 75 bp, synthetic construct
  source 1..75: mol_type = other DNA
accgtctggcggctaatggcaagaaaggaaaggtgattctcggcgcgatgatgcgcaagctggcacaggtggcgt

SEQ ID NO: 325660 - DNA, 75 bp, synthetic construct
  source 1..75: mol_type = other DNA
ctgggaggagaatacgatgttttactgactaaccggctcatactccaaccatcctatgaggtgaatttctacagt

SEQ ID NO: 325661 - DNA, 75 bp, synthetic construct
  source 1..75: mol_type = other DNA
tacgggttttgtcagtaatggcggaaaagcagcccttcgtctgggaggagaatacgacgttttactgactaaccg

SEQ ID NO: 325662 - DNA, 75 bp, synthetic construct
  source 1..75: mol_type = other DNA
catttatcctggctgttgttatggctatagccctttctgttgggctatatcgctttaataaaaaacaccagataa

SEQ ID NO: 325663 - DNA, 75 bp, synthetic construct
  source 1..75: mol_type = other DNA
taatcaaactgaacctcctgtaattattgccacatcgactaacaatcaggccgtcaccaatattattgaagcctt

SEQ ID NO: 325664 - DNA, 75 bp, synthetic construct
  source 1..75: mol_type = other DNA
cagcgccaacaaagttaacctgaaatttgaagaagccaaaccgattcttgaagatcagttagcaaaatctattgc

SEQ ID NO: 325665 - DNA, 75 bp, synthetic construct
  source 1..75: mol_type = other DNA
cagtgctaacaaagttaacctgaaatttgaagaagccaaaccggttcttgaagaccagttagcaaaatccattgc

SEQ ID NO: 325666 - DNA, 75 bp, synthetic construct
  source 1..75: mol_type = other DNA
gagcgcacttccacgcaggtgacgactgataatgtggctgcgctgaaacagggaacgtcgggctataaagtgcag

SEQ ID NO: 325667 - DNA, 75 bp, synthetic construct
  source 1..75: mol_type = other DNA
acggcaatcaagaagcgtaatcttgaggtgaagactcagatgagtgagaccatctggcttgaacccgccagcgaa

SEQ ID NO: 325668 - DNA, 75 bp, synthetic construct
  source 1..75: mol_type = other DNA
gcattactggattcaggcgaacgtactgaaagccgataaaatggatttgcgggaagcacagggctttctgagtca

SEQ ID NO: 325669 - DNA, 75 bp, synthetic construct
  source 1..75: mol_type = other DNA
cctataactccaattctgccggtgccacgctgggggtaggactggcttctgggctggtcggaatggctgctgatg

SEQ ID NO: 325670 - DNA, 75 bp, synthetic construct
  source 1..75: mol_type = other DNA
aggcgtttgccctgctggaaggggggcagttgtggaaaatccggatgccgctgccggcaggggatacggatgacg

SEQ ID NO: 325671 - DNA, 75 bp, synthetic construct
  source 1..75: mol_type = other DNA
caggatgtgacgctggctctgggggagcgtgtggggcataccattgtctacggcaccacccgtgtcggtaaaacc

SEQ ID NO: 325672 - DNA, 75 bp, synthetic construct
  source 1..75: mol_type = other DNA
aggcatgaagccaaatggggggagccgttataaccctcttgaagctgaaacaatagcagcatggctggtggcaca

SEQ ID NO: 325673 - DNA, 75 bp, synthetic construct
  source 1..75: mol_type = other DNA
cctattttatggctgaacgacagcgaaaccacggagaaacagaccgatgataccccggacacgccgccagctcgt

SEQ ID NO: 325674 - DNA, 75 bp, synthetic construct
  source 1..75: mol_type = other DNA
cagcggcacccttttcggatgcgcaacatggcaccggaggcatgactgtggctgagatgacagcggatactgaag

SEQ ID NO: 325675 - DNA, 75 bp, synthetic construct
  source 1..75: mol_type = other DNA
ggctggccggatatcagtgcccgttataacgccatcggccgttttggccgggtatccgaagtggccgggcgggtt

SEQ ID NO: 325676 - DNA, 75 bp, synthetic construct
  source 1..75: mol_type = other DNA
ttgcactggtcagttccactctggccctttcaggatgtggagccatgggcacagcgatcaaaaaacgaaatctgg

SEQ ID NO: 325677 - DNA, 75 bp, synthetic construct
  source 1..75: mol_type = other DNA
aggttaacctgaagttcgaagaagcacagccggtactcgaggaccaactggccaaatccatcgccaatattctct

SEQ ID NO: 325678 - DNA, 75 bp, synthetic construct
  source 1..75: mol_type = other DNA
actccggctctgccggtgcggcgctgggtgtagggattgccacagggttgattggtatggcagccgatgcaatgg

SEQ ID NO: 325679 - DNA, 75 bp, synthetic construct
  source 1..75: mol_type = other DNA
atgagcaacgatatcgcaatcacatcacagccaggcgctaccgtagggacagcggctgcaatattcagtcctgag

SEQ ID NO: 325680 - DNA, 75 bp, synthetic construct
  source 1..75: mol_type = other DNA
atgagcaatgatatcgcaatcacatcacaaccaggcgcaactgtaggcactgctgcggcaatcttcagcccggag

SEQ ID NO: 325681 - DNA, 75 bp, synthetic construct
  source 1..75: mol_type = other DNA
tgctgatggcctttaccagcgcagcgatgaattacagcactgtctccgaactggataaggcttacaaatacattg

SEQ ID NO: 325682 - DNA, 75 bp, synthetic construct
  source 1..75: mol_type = other DNA
aaaaaaaagtcacctgcaaaatggaaaacaatcgcaatttccctgccagacaatttcattcgctcacgttctttg

SEQ ID NO: 325683 - DNA, 75 bp, synthetic construct
  source 1..75: mol_type = other DNA
aagatcagggcgcaaccaaccttactgacgcgctaaaaaacgtacctggcgtgggcgcattttttgccggtgaga

SEQ ID NO: 325684 - DNA, 75 bp, synthetic construct
  source 1..75: mol_type = other DNA
ggcagcggtaacagtgccaaccgcaccgattttaaaccgcaaaaaagccaacaccagcgagattggcaccaaatg

SEQ ID NO: 325685 - DNA, 75 bp, synthetic construct
  source 1..75: mol_type = other DNA
ccagaccaacctgacctcgacgttctataccggttctatcggtcatgatgtcagtaccggcgtggaatttacccg

SEQ ID NO: 325686 - DNA, 75 bp, synthetic construct
  source 1..75: mol_type = other DNA
ccaaattgggctatcgcgtcaatcgcaacctcgatttccagttaaacgtctacaacctgtttgataccaattacg

SEQ ID NO: 325687 - DNA, 75 bp, synthetic construct
  source 1..75: mol_type = other DNA
cccgcatggcaggtgattggcggatatacccagcaaaaagcgaccattaaaaatggtgcagacgtggctcaggat

SEQ ID NO: 325688 - DNA, 75 bp, synthetic construct
  source 1..75: mol_type = other DNA
gtccgtaactctccgctgtgggaacaggatccacgacagcagcttgcttacctgtgcgttaagcgttgggctcgt

SEQ ID NO: 325689 - DNA, 75 bp, synthetic construct
  source 1..75: mol_type = other DNA
gccgaaaatgcccagaaattcgttttttcaaaatatagctgggaacatgtaactcagtgttttgaggcacaaatg

SEQ ID NO: 325690 - DNA, 75 bp, synthetic construct
  source 1..75: mol_type = other DNA
tcacatgataatactgaaaatttaaggaagaaatttaacatagatgcgaatgatacggtgttattatttgcagga

SEQ ID NO: 325691 - DNA, 75 bp, synthetic construct
  source 1..75: mol_type = other DNA
ggggtactttaaaccctaatgctattttcttcttcacaaacccgacagtgacaagtgaaaatggaggagttcaat

SEQ ID NO: 325692 - DNA, 75 bp, synthetic construct
  source 1..75: mol_type = other DNA
atgatgtattacgtcacatggattttgggcacgccggaagtgtttgtcgcttttctcaccacttattgcgtgggt

SEQ ID NO: 325693 - DNA, 75 bp, synthetic construct
  source 1..75: mol_type = other DNA
tcttttataccgatatttttggcattcctgccggttttgtcggaaccatgtttttggtcgctcgtgcactggatg

SEQ ID NO: 325694 - DNA, 75 bp, synthetic construct
  source 1..75: mol_type = other DNA
gaatattgtgcacagtattggccttcttatgaccgtgttgaaataacaatttctgataatggtataggaatgaaa

SEQ ID NO: 325695 - DNA, 75 bp, synthetic construct
  source 1..75: mol_type = other DNA
gagagcccccagctacttcctgtgactctcgatgcagctgccgaacagccagaatcgctcgcagaggacccggaa

SEQ ID NO: 325696 - DNA, 75 bp, synthetic construct
  source 1..75: mol_type = other DNA
aaaactaacagaaggatttaaggagttgaatcgcagatcatcagtaaaccaggcattttcaagtggtgttagata

SEQ ID NO: 325697 - DNA, 75 bp, synthetic construct
  source 1..75: mol_type = other DNA
taattgccaaaacggatcaatcctcaaaactaaccgaaggatttaaggagttgaatcgcagatcatcagtaaatc

SEQ ID NO: 325698 - DNA, 75 bp, synthetic construct
  source 1..75: mol_type = other DNA
atatcccgcatgctgcaaccggggatatcagttttcagacgatcaatgattacggtgcattaactccgcgtatta

SEQ ID NO: 325699 - DNA, 75 bp, synthetic construct
  source 1..75: mol_type = other DNA
cacggatcactccgtctgaatggtgccatcagcgaaaagctcctgactctgctgatacaggaactgaagcgatga

SEQ ID NO: 325700 - DNA, 75 bp, synthetic construct
  source 1..75: mol_type = other DNA
cggcacgggacgctccgcttcaatggcaatgtcagcgaaaagctcctgactctgctgatacaggaactgaagcga

SEQ ID NO: 325701 - DNA, 75 bp, synthetic construct
  source 1..75: mol_type = other DNA
atgacattgcagggcgcttcaccgggacgtataccggagctgatgcacgatcttgcaagtatgggacaacttgtg

SEQ ID NO: 325702 - DNA, 75 bp, synthetic construct
  source 1..75: mol_type = other DNA
atgagcgcctacacggtatcgcaactggcccataacgctggggtgagcgtacatatcgtgcgcgactacctggtg

SEQ ID NO: 325703 - DNA, 75 bp, synthetic construct
  source 1..75: mol_type = other DNA
gcgcggccttgaaaccggcgcggatgactatatcaccaagccgttttcgccgaaggagctggtggcgcgaatcaa

SEQ ID NO: 325704 - DNA, 75 bp, synthetic construct
  source 1..75: mol_type = other DNA
gccaccaccatttctggactgcttttgcaactccccaccttcagcaatacgcccagcgtggcgatggcggccagc

SEQ ID NO: 325705 - DNA, 75 bp, synthetic construct
  source 1..75: mol_type = other DNA
acctattcggtactggataagccggtggcgagtgctgttcaggataatgaaacggtggttgagtttttttctttt

SEQ ID NO: 325706 - DNA, 75 bp, synthetic construct
  source 1..75: mol_type = other DNA
aactgttgattccgggcgcatcatgctggataacgaggacatcacccacgttccggcggaaaaccgctatgtgaa

SEQ ID NO: 325707 - DNA, 75 bp, synthetic construct
  source 1..75: mol_type = other DNA
gcggacggcgcacaagccgcagcgcagcttgccgtgctgcgccagttggtcgagcggcggcgcgcggcgttggcc

SEQ ID NO: 325708 - DNA, 75 bp, synthetic construct
  source 1..75: mol_type = other DNA
taacacggctttgtatccagtgtggattatttcttttgcaacatggtgcggaaagcgcgttggttgatgagcttt

SEQ ID NO: 325709 - DNA, 75 bp, synthetic construct
  source 1..75: mol_type = other DNA
actgaaacaggtaaccagcataaataccagacccgtgtggtctcaaatgcgaacaaggttaacctgaaatttgaa

SEQ ID NO: 325710 - DNA, 75 bp, synthetic construct
  source 1..75: mol_type = other DNA
taacgacaattcagtcggctggatcacatatgtgcattgagggtaatttactcttctgcacattaaacgcgacac

SEQ ID NO: 325711 - DNA, 75 bp, synthetic construct
  source 1..75: mol_type = other DNA
ctttcttgcgcctgtttctgtaaactcaataacggtggctgggatggtgccgtcatcaccttctttgccagtacg

SEQ ID NO: 325712 - DNA, 75 bp, synthetic construct
  source 1..75: mol_type = other DNA
tcacacggctatgtatccagtgcgggctttttttattacaacacggagcggaaagcgcggtggttgatgaactat

SEQ ID NO: 325713 - DNA, 75 bp, synthetic construct
  source 1..75: mol_type = other DNA
cacaacgtcatcttcatccacaaatcaacttttgccttaccgctttcgccgccaccaccatttccggattgcttt

SEQ ID NO: 325714 - DNA, 75 bp, synthetic construct
  source 1..75: mol_type = other DNA
acaatgcctttcatgcagacagcgtggacgcttttcgtgaaagttatgttgcagcagtaaaatcacttttgaata

SEQ ID NO: 325715 - DNA, 75 bp, synthetic construct
  source 1..75: mol_type = other DNA
cctgtggggctacagccactggcaggaggagcagcggctgcgtcagctgcaggccatgaatctccggcaaatgca

SEQ ID NO: 325716 - DNA, 75 bp, synthetic construct
  source 1..75: mol_type = other DNA
gcgaagacggcgaactcacctggaaaacccgtggccagacctgggccacgcaggcacaacaacctacggagagca

SEQ ID NO: 325717 - DNA, 75 bp, synthetic construct
  source 1..75: mol_type = other DNA
cgtccgttacgccggcgaacgcattgctttcgtggcctgcctgcatgatatgcccgccctcaccggggatgtgac

SEQ ID NO: 325718 - DNA, 75 bp, synthetic construct
  source 1..75: mol_type = other DNA
cgggcaatctggtgaactggaaagccggggcgctgtatcacctgacggaaaacggtaatgtctatattaactatg

SEQ ID NO: 325719 - DNA, 75 bp, synthetic construct
  source 1..75: mol_type = other DNA
atgatgactgcagaagagcgggttgtcatagctgtgtatattatgcgggataaaggcccggagattcctgaaaat

SEQ ID NO: 325720 - DNA, 75 bp, synthetic construct
  source 1..75: mol_type = other DNA
atgtgccgggaaatcccggaagtccgcaatgtgcaccatgtacatgtatggatggtaggcgagaagccggtgatg

SEQ ID NO: 325721 - DNA, 75 bp, synthetic construct
  source 1..75: mol_type = other DNA
aagaaagactatgtatatccttacttgccatgttacaaaaaacgcgaaagtgtaaattcttttatactaacaaat

SEQ ID NO: 325722 - DNA, 75 bp, synthetic construct
  source 1..75: mol_type = other DNA
gctctctggtggtcaacagcaacgcgtcgccattgcccgcgcggtggttaacaagcctcgtctgttgttgctgga

SEQ ID NO: 325723 - DNA, 75 bp, synthetic construct
  source 1..75: mol_type = other DNA
ttcttcgcctgattgcaggtctggaaactgttgattccggacgcatcatgctggataacgaggacatcacccacg

SEQ ID NO: 325724 - DNA, 75 bp, synthetic construct
  source 1..75: mol_type = other DNA
aaagataccgcgtgggaggtcataatccccgtgcgttttatcgcaaatccaacactaaacaaagcgcaacaagag

SEQ ID NO: 325725 - DNA, 75 bp, synthetic construct
  source 1..75: mol_type = other DNA
atttgcataaggtatttgacatcgcctatttggtaagaggcgaagaggtgatgataaggaatgaagatgttcctt

SEQ ID NO: 325726 - DNA, 75 bp, synthetic construct
  source 1..75: mol_type = other DNA
attgggaatcaagcggcatggatcgttggcatatgcagatgttgcttgataatggcctgatatatagaaagccgt

SEQ ID NO: 325727 - DNA, 75 bp, synthetic construct
  source 1..75: mol_type = other DNA
gtagtgcagatgtacttgcaggatgtgacggcttccatgagccgtccagtgaagcagctgaaaggctttgagaaa

SEQ ID NO: 325728 - DNA, 75 bp, synthetic construct
  source 1..75: mol_type = other DNA
gccaccattgcggtggttgggccactggcggacagtaaacgtgacgtgatgggcagctggtcggcggcaggtgtt

SEQ ID NO: 325729 - DNA, 75 bp, synthetic construct
  source 1..75: mol_type = other DNA
cacttcgcgttattttgatgaagctaacggggcgctgtatccgttcggctatggtctgagctacaccactttcac

SEQ ID NO: 325730 - DNA, 75 bp, synthetic construct
  source 1..75: mol_type = other DNA
tcccaggtcaaacagagtcaatttattatcagcaggatgggagctggctgtgtattgcagattacgattcaactc

SEQ ID NO: 325731 - DNA, 75 bp, synthetic construct
  source 1..75: mol_type = other DNA
gtgcgagcactttggttacgaagtgaaaaagctggaacgtacgcgcattatgaacgtcagcttaagcggcattcc

SEQ ID NO: 325732 - DNA, 75 bp, synthetic construct
  source 1..75: mol_type = other DNA
ccgtttccgatcatggcgcaatcaaagaactgattaaacacggtacggcggcagatccggaagatgcggtgcgcg

SEQ ID NO: 325733 - DNA, 75 bp, synthetic construct
  source 1..75: mol_type = other DNA
ggatgtgacggcttccatgagtcgcccggtgaagcagctgaaaggctttgagaaaatcaccctgaaaccgggcga

SEQ ID NO: 325734 - DNA, 75 bp, synthetic construct
  source 1..75: mol_type = other DNA
aacgccgtcagctccctgattctgggtcagtctgaaaactttattgcctataaagatatcctcggcaaaatctcc

SEQ ID NO: 325735 - DNA, 75 bp, synthetic construct
  source 1..75: mol_type = other DNA
ggtatttccttccagggcattctgggctacatcttctatccgattgcatgggtaatgggcgtaccggccagcgaa

SEQ ID NO: 325736 - DNA, 75 bp, synthetic construct
  source 1..75: mol_type = other DNA
gtgtcgccgatcaatctgttactgtgctaacagggattaaaaacgccgtcggtgaaaacggtaaagtgctgtatg

SEQ ID NO: 325737 - DNA, 75 bp, synthetic construct
  source 1..75: mol_type = other DNA
gcgtccgctggcgctggtgaaagaagatcagcaggctgatgcgattctggaaacctggtttgcggggactgaagg

SEQ ID NO: 325738 - DNA, 75 bp, synthetic construct
  source 1..75: mol_type = other DNA
cgctcgccgcaagagatgattgatgaagcggtgcagactgcgaaacaatctgatgtggtggtggctgtggtcggt

SEQ ID NO: 325739 - DNA, 75 bp, synthetic construct
  source 1..75: mol_type = other DNA
agaagacagatttcgaggatataagtgaagccgaaaagcgcgtggctatcaagattaagggaatgatttgtcggt

SEQ ID NO: 325740 - DNA, 75 bp, synthetic construct
  source 1..75: mol_type = other DNA
agcagaaattaaagagctgctgaaacttggcgacctgccgacttctggtcagatccgcctgtacgacggtcgcac

SEQ ID NO: 325741 - DNA, 75 bp, synthetic construct
  source 1..75: mol_type = other DNA
cgtgctgtgctggtagccggtggcgttgaagctgagaagctcgacaaactgccgcgcgatcgctggctagagctg

SEQ ID NO: 325742 - DNA, 75 bp, synthetic construct
  source 1..75: mol_type = other DNA
tgaactggcgcttggtcagaacatgcgcgtagcgttcatgccgtggaatggttacaacttcgaagactccatcct

SEQ ID NO: 325743 - DNA, 75 bp, synthetic construct
  source 1..75: mol_type = other DNA
caacctgttcgtacgtatcgaccgtcgccgtaaactacctgcgaccatcattctgcgtgccctgaactacaccac

SEQ ID NO: 325744 - DNA, 75 bp, synthetic construct
  source 1..75: mol_type = other DNA
gaaggccacttcgtagaagacctggtaacctgccgtagcaaaggcgaatccagtttgttcagccgcgaccaggtt

SEQ ID NO: 325745 - DNA, 75 bp, synthetic construct
  source 1..75: mol_type = other DNA
tctgcgcgtaccaaacggtgtatccggtacggttatcgacgttcaagtctttactcgcgatggcgtagaaaaaga

SEQ ID NO: 325746 - DNA, 75 bp, synthetic construct
  source 1..75: mol_type = other DNA
aaaaaatgaccgcacctgcggtaatgaaaaaagcgttaaatctgatgggcgtacaggcaggtattacccgcagac

SEQ ID NO: 325747 - DNA, 75 bp, synthetic construct
  source 1..75: mol_type = other DNA
tccagcctgattatttcgccattgaacaagtctttatggctaaaaatgccgactcggccctgaagctggggcagg

SEQ ID NO: 325748 - DNA, 75 bp, synthetic construct
  source 1..75: mol_type = other DNA
tgcgttagctatcgcgattacccattgtcacgtcagccagaatgcaatgcagatgagcgaatcgcggctgaacct

SEQ ID NO: 325749 - DNA, 75 bp, synthetic construct
  source 1..75: mol_type = other DNA
gtaaagtgtacgtagaaaaaggccgccgtatcactgcgcgccacattcgccagctggaaaaagacgacgtcaaac

SEQ ID NO: 325750 - DNA, 75 bp, synthetic construct
  source 1..75: mol_type = other DNA
tcggtcagattctggaaacccacctgggtatggctgctaaaggtatcggtgacaagatcaatgccatgctgaaac

SEQ ID NO: 325751 - DNA, 75 bp, synthetic construct
  source 1..75: mol_type = other DNA
aacgtgctgttgccgttgactccggtgtaactgcggtagctaaacgtggtggtgtcgttcagtacgtggatgctt

SEQ ID NO: 325752 - DNA, 75 bp, synthetic construct
  source 1..75: mol_type = other DNA
ggtttccaacgaattcgttgcgatgatggatctgcagaaaattgcctctacgctctctccgcgtgctgaaggcat

SEQ ID NO: 325753 - DNA, 75 bp, synthetic construct
  source 1..75: mol_type = other DNA
cgagttactaatcctggcgatgcactctggttggttcaggcatgggctgaagatgaaaaatatagacgatatagc

SEQ ID NO: 325754 - DNA, 75 bp, synthetic construct
  source 1..75: mol_type = other DNA
gatcaccatggtcgaatacttgataatggtgattatattgatgactcaggaaatattttaggaaacatagaggat

SEQ ID NO: 325755 - DNA, 75 bp, synthetic construct
  source 1..75: mol_type = other DNA
ttttcaaagcgtggtggagggttgtccgcgacattgctaagaatcactcatcacggcttgtcatcgagattaccg

SEQ ID NO: 325756 - DNA, 75 bp, synthetic construct
  source 1..75: mol_type = other DNA
attggctcaagtgatcagtgctttcaggaaaacaaaaattatgtgggtgatgttggttacagcattacgcgcggg

SEQ ID NO: 325757 - DNA, 75 bp, synthetic construct
  source 1..75: mol_type = other DNA
ccgccagccggggtgttcagacagaaactgcagtacgcccgggatgtccgtgacggcaaaattcatgatccgcat

SEQ ID NO: 325758 - DNA, 75 bp, synthetic construct
  source 1..75: mol_type = other DNA
gggatatggtacgacgggacgatgatctggatgacctctgtcaggtgcagacccatatccggaccatcacccatc

SEQ ID NO: 325759 - DNA, 75 bp, synthetic construct
  source 1..75: mol_type = other DNA
tcgcaatcggaatgattcgcggaaccaaaaatgaattatcagtggatgtaataaaaaatgctcgtgcctttttga

SEQ ID NO: 325760 - DNA, 75 bp, synthetic construct
  source 1..75: mol_type = other DNA
ccccaggaacaggcaagacaactatcgcaaaagctttgggggcaaagtatcaggataagtatgtttttgtttatg

SEQ ID NO: 325761 - DNA, 75 bp, synthetic construct
  source 1..75: mol_type = other DNA
cgcaaaagctttgggggcaaaatatcaggataaatatgtatttgtttatgctgatgattactttaaagatgtttg

SEQ ID NO: 325762 - DNA, 75 bp, synthetic construct
  source 1..75: mol_type = other DNA
gacagggaatgcgggtaactcacttccgccacagaacgattattgcttttgccgttgatggcaataaagtcttta

SEQ ID NO: 325763 - DNA, 75 bp, synthetic construct
  source 1..75: mol_type = other DNA
ttgatggcatttttgctactgcgcggacacaagctccccccgctacgtccgctgctcaatgccgcgctgattggc

SEQ ID NO: 325764 - DNA, 75 bp, synthetic construct
  source 1..75: mol_type = other DNA
attaaaaaacttatgtttaaagatggttctggtgcatacaggattcatcttggtcaaaatgaagtggttcatatt

SEQ ID NO: 325765 - DNA, 75 bp, synthetic construct
  source 1..75: mol_type = other DNA
agagtaccttaactctatgcaggatggtgaaattaacgacagtgctaactggacagttcaggatcgcagaactgc

SEQ ID NO: 325766 - DNA, 75 bp, synthetic construct
  source 1..75: mol_type = other DNA
aaatcgaccctaacgtcgaaatctggatgctgtttaccgatattattctgatatatgcggcgctgatgctggtcc

SEQ ID NO: 325767 - DNA, 75 bp, synthetic construct
  source 1..75: mol_type = other DNA
aaaaatcatgggcattttgcagggcgaagcgttgatgaatgacgcctccggcctggtgtcgctgaagtttgccgt

SEQ ID NO: 325768 - DNA, 75 bp, synthetic construct
  source 1..75: mol_type = other DNA
ggctgtggacgatgaaaaagttcagcaaccgcttcctgaagaagaagccgatggagtttggttcgtggaccacac

SEQ ID NO: 325769 - DNA, 75 bp, synthetic construct
  source 1..75: mol_type = other DNA
gaacgcactgtttgccaccgttactggctgggtttggctacagcatctccttccagggcatcctgggctacatct

SEQ ID NO: 325770 - DNA, 75 bp, synthetic construct
  source 1..75: mol_type = other DNA
ggctttggtaaagtcgatggcttcaattttggcagcttcgtggttgccgttattggtgcgattgttgtgctattt

SEQ ID NO: 325771 - DNA, 75 bp, synthetic construct
  source 1..75: mol_type = other DNA
cagaaaatggaggagcgtctggcggcggataccgaagagaatatcgacaaccagttgctcactgaagtcagctct

SEQ ID NO: 325772 - DNA, 75 bp, synthetic construct
  source 1..75: mol_type = other DNA
cgctttaaaacgctgtaccgtgaagggctgaaaaatcgctacggcgcgctgatgcaaaccatttccggcgtgcac

SEQ ID NO: 325773 - DNA, 75 bp, synthetic construct
  source 1..75: mol_type = other DNA
gcgccgattcgtccaaaacgtgtgacccacagcggcgagtcgccttctgatgcgttgttacgtggcggcattgaa

SEQ ID NO: 325774 - DNA, 75 bp, synthetic construct
  source 1..75: mol_type = other DNA
ccgttaccgcaggtgggtaaagatctgttccgcgatctgaaacgcgtcgcgcaaacgctggatagcattaacggc

SEQ ID NO: 325775 - DNA, 75 bp, synthetic construct
  source 1..75: mol_type = other DNA
ccagttgctcacagaggtgagttctcgtgtgattggtaacctgcgtcgtcgcgccgatgggcgtaatgatgttga

SEQ ID NO: 325776 - DNA, 75 bp, synthetic construct
  source 1..75: mol_type = other DNA
gcggctggcgtcattctcttctcgttgtttgtcggcgtggtgatgttgcctattctgctacaacacattgaagtc

SEQ ID NO: 325777 - DNA, 75 bp, synthetic construct
  source 1..75: mol_type = other DNA
attatagaagtcgcaacagtgccgtagccacattcaaattaaagggtctggaatccccggtaaacacggctaagc

SEQ ID NO: 325778 - DNA, 75 bp, synthetic construct
  source 1..75: mol_type = other DNA
agaaagagtatctggtgacggtcgataaaccgattaccgatgaatttattcgtggtatgggggcggggtgccgat

SEQ ID NO: 325779 - DNA, 75 bp, synthetic construct
  source 1..75: mol_type = other DNA
gttgtaaaagtaaacggtcagttgatcgagccgcgggaagccgaagatttagtgcttatcgccctgaataagccc

SEQ ID NO: 325780 - DNA, 75 bp, synthetic construct
  source 1..75: mol_type = other DNA
cggtggtgaaggtagaaaaaacggcggaaaaaggcggtcgcccggcgtccaacggtaagcgttttacctcgccgg

SEQ ID NO: 325781 - DNA, 75 bp, synthetic construct
  source 1..75: mol_type = other DNA
cggcgtgccattccgggtacaggagtacgttttgcactggatagccgtagcaaatgacgagatcacccgactggg

SEQ ID NO: 325782 - DNA, 75 bp, synthetic construct
  source 1..75: mol_type = other DNA
gcggagaaaggtggccgcccggcatcaaacggcaagcgtttcgcctcgccggggcggaagaaaaaaggtcgttaa

SEQ ID NO: 325783 - DNA, 75 bp, synthetic construct
  source 1..75: mol_type = other DNA
atcctgcgtgctggcaatgatcatgaaaaagagtatttggtaacggtcgataaaccgattaccgaggagtttatt

SEQ ID NO: 325784 - DNA, 75 bp, synthetic construct
  source 1..75: mol_type = other DNA
cattgtcggcaagccggatagcgataaaccgtcaatggatatggatcagcatttcaacggtattaaccatacgtt

SEQ ID NO: 325785 - DNA, 75 bp, synthetic construct
  source 1..75: mol_type = other DNA
ggctttttactggcactgtttatcggcttacgcagccgcaaaaaaacgcggcatcactcgctaggtgatgctgcc

SEQ ID NO: 325786 - DNA, 75 bp, synthetic construct
  source 1..75: mol_type = other DNA
ctgtttatcggcttacgcagccgcaaaaaaacgcagcataactcgctaaaggaaaatgtcgctccgggtgggtaa

SEQ ID NO: 325787 - DNA, 75 bp, synthetic construct
  source 1..75: mol_type = other DNA
taatgctgctcgttttgccggattatgggaaagaaataatctcataaacgaaaaattaaaaagagaagaagcttg

SEQ ID NO: 325788 - DNA, 75 bp, synthetic construct
  source 1..75: mol_type = other DNA
tgcaggcggtgtgttacggggcaacgggagccagagattattgtcttattctgttggcatatcggcatgggatgc

SEQ ID NO: 325789 - DNA, 75 bp, synthetic construct
  source 1..75: mol_type = other DNA
attctgcaatccgtgacgctcggtggtacaggtaaaaccagcggcgatcgtcacccgaaaattcgtgaaggcgtg

SEQ ID NO: 325790 - DNA, 75 bp, synthetic construct
  source 1..75: mol_type = other DNA
aaaatttcgcctcggacaaacgccctcgctgacctttgcgccacgggaaatcgccagtgtgaactggcaggaagg

SEQ ID NO: 325791 - DNA, 75 bp, synthetic construct
  source 1..75: mol_type = other DNA
gcagaacgtggttacctggcggatgttgaactgtcgaaaatcggcagcttcgaagccgcgctgctggcttacgtc

SEQ ID NO: 325792 - DNA, 75 bp, synthetic construct
  source 1..75: mol_type = other DNA
gtggatgcttcggcgtttcgcctgtatgccgacgggaaggtgcagggtgatgcggacatggtgttttatggtcag

SEQ ID NO: 325793 - DNA, 75 bp, synthetic construct
  source 1..75: mol_type = other DNA
atgtgtcgcttcgcagggcgttgtatatgcaccagtaagactgagtggagacgggcgttccgcgaccgtctggcg

SEQ ID NO: 325794 - DNA, 75 bp, synthetic construct
  source 1..75: mol_type = other DNA
gcaaccgcgtctgaatccgctgcactgcaatatctggctccgtatgccggttgcgcaatgggtgaatacttccgt

SEQ ID NO: 325795 - DNA, 75 bp, synthetic construct
  source 1..75: mol_type = other DNA
tttacgatgacctgtctaaacaggctgttgcttaccgtcagatctcgctgctgctccgtcgtccgccaggacgtg

SEQ ID NO: 325796 - DNA, 75 bp, synthetic construct
  source 1..75: mol_type = other DNA
gaaatgatctccctgccgggtaaccgttatgctatcgcactgaaccttgagcgcgattctgtaggtgcggtcgtt

SEQ ID NO: 325797 - DNA, 75 bp, synthetic construct
  source 1..75: mol_type = other DNA
actgatcccttcctttaaatccacacgtatccagcacgaaataatatgcaaaagtttgataccaggaccttccag

SEQ ID NO: 325798 - DNA, 75 bp, synthetic construct
  source 1..75: mol_type = other DNA
atgatgatgaactctttctttccggcaatggcgcttatggcgcttatggcgcttatggcgctagtgggttgttct

SEQ ID NO: 325799 - DNA, 75 bp, synthetic construct
  source 1..75: mol_type = other DNA
gcgcctgcacatcagtttgtacagtctcgggctgtgggggccgaacggtccactgccgctgcactacaccgaact

SEQ ID NO: 325800 - DNA, 75 bp, synthetic construct
  source 1..75: mol_type = other DNA
accagtacttcagaggccaggaggaaatggaccgcgcttttggctgggggtttcgctggtccagaggttccaaat

SEQ ID NO: 325801 - DNA, 75 bp, synthetic construct
  source 1..75: mol_type = other DNA
atgaatctgacaccggggggcaatgcccctttaattgctcaggatctccgcgtgaggatcatttctggtggtcct

SEQ ID NO: 325802 - DNA, 75 bp, synthetic construct
  source 1..75: mol_type = other DNA
gcggcaaaacgttataacaccggcgagcaaaaaatcgacgtcaccgcatttgaacagttccaggggagctacgaa

SEQ ID NO: 325803 - DNA, 75 bp, synthetic construct
  source 1..75: mol_type = other DNA
gggcagtattgcgacctttactattccgttgattacggctcatctgtcccaaagaagtattgccgatattatgtg

SEQ ID NO: 325804 - DNA, 75 bp, synthetic construct
  source 1..75: mol_type = other DNA
gaatttctcttacgagatgatccgcctgactgaccgcattctgggcttcacctggaaccgactttatcagggcat

SEQ ID NO: 325805 - DNA, 75 bp, synthetic construct
  source 1..75: mol_type = other DNA
gccgctgcgtatgcttaacggcgtacagaaatttttcgctgtactgtggctcggtcgcgacagttttgtgcgttt

SEQ ID NO: 325806 - DNA, 75 bp, synthetic construct
  source 1..75: mol_type = other DNA
tacgctgattccgatctacatcggttatgagcacgtcatggaagtgggtacttacgccaaagaactgcgcggcgc

SEQ ID NO: 325807 - DNA, 75 bp, synthetic construct
  source 1..75: mol_type = other DNA
aagttcagcctgttaacgcagggcaacccgcgcagcttgcaaaaattacgcgcgttccttatgaccctaacctct

SEQ ID NO: 325808 - DNA, 75 bp, synthetic construct
  source 1..75: mol_type = other DNA
agcacgctggagaaagaaagccgtaccgtagcgcaacgtctctccgtgctgcacggcatcaacgcgccggaattc

SEQ ID NO: 325809 - DNA, 75 bp, synthetic construct
  source 1..75: mol_type = other DNA
gagcaagcggtgctgatgacctactatcgcaacaacattgcgcatatgttggttctgccttcgctgatggcagcg

SEQ ID NO: 325810 - DNA, 75 bp, synthetic construct
  source 1..75: mol_type = other DNA
aaaaagattttcataaggcggatagcgatacagatgccgctatccgctttcacatcagaacgtatactcgacacc

SEQ ID NO: 325811 - DNA, 75 bp, synthetic construct
  source 1..75: mol_type = other DNA
gaaggccacttcgtagaagacctggtaacttgccgtagcaaaggtgaatccagcttgttcagccgtgaccaggtt

SEQ ID NO: 325812 - DNA, 75 bp, synthetic construct
  source 1..75: mol_type = other DNA
cacaaacgtcgtatctccgcactcggccctggcggtctgactcgtgaacgcgcgggcttcgaagttcgagacgta

SEQ ID NO: 325813 - DNA, 75 bp, synthetic construct
  source 1..75: mol_type = other DNA
cgatttaaacaaatccttaatactgtaggaattaatacttctccacttaaagatgataaaatctcgataattata

SEQ ID NO: 325814 - DNA, 75 bp, synthetic construct
  source 1..75: mol_type = other DNA
tcatcagataaatataactttattcaaatgcgctatggaaatacgaattctcatacatggaggatcgaagacgat

SEQ ID NO: 325815 - DNA, 75 bp, synthetic construct
  source 1..75: mol_type = other DNA
atgggaattattgcctggattatttttggcctgatagcgggcgttatcgccaagctgatcatgccgggacgtgat

SEQ ID NO: 325816 - DNA, 75 bp, synthetic construct
  source 1..75: mol_type = other DNA
agaggaaccgccgcaaaactgatgtataaggccgggtctttaaatcatggacaagggcgtgtgtttgttatggct

SEQ ID NO: 325817 - DNA, 75 bp, synthetic construct
  source 1..75: mol_type = other DNA
acaaaaacaggttgctgatgcaatgggaatcagtcagcccgctgtaactcaactggaacagcgcggaaatgattt

SEQ ID NO: 325818 - DNA, 75 bp, synthetic construct
  source 1..75: mol_type = other DNA
ccggaagggcctccgagttgggaattgttcatcaagtcgaggctgcaaccatacccacggaatcgatccgctggt

SEQ ID NO: 325819 - DNA, 75 bp, synthetic construct
  source 1..75: mol_type = other DNA
caccacatccgggccgtcgcttgcctgtggtaaagaaagcgaccacttctgcggggcatcgctgctcaattattg

SEQ ID NO: 325820 - DNA, 75 bp, synthetic construct
  source 1..75: mol_type = other DNA
tcgatcaaactactcagtatctacaccgtgggttcgctgctttgtgtatttattaccgctccactcattcgtaat

SEQ ID NO: 325821 - DNA, 75 bp, synthetic construct
  source 1..75: mol_type = other DNA
acggtgactggtccgtaccactaatgggtgttgcaatactttcactactgatggcgattttcggactttgcgccg

SEQ ID NO: 325822 - DNA, 75 bp, synthetic construct
  source 1..75: mol_type = other DNA
aagatggttgccgaccaggtagccaacgccacagcatcagcagtgatgcaggcaatgaagatagagaacaaaacc

SEQ ID NO: 325823 - DNA, 75 bp, synthetic construct
  source 1..75: mol_type = other DNA
atgaacattattgaagctaacgttgctaccccggacgctcacgtcgccatcactattgcgcgtttcaacaacttt

SEQ ID NO: 325824 - DNA, 75 bp, synthetic construct
  source 1..75: mol_type = other DNA
agctgccgctggcggctggcgcactggctaaaaccggtaaatacgacgcggtgattgcgctgggcacggttattc

SEQ ID NO: 325825 - DNA, 75 bp, synthetic construct
  source 1..75: mol_type = other DNA
ttgaaacaaaaaagaaaaatccaagtgagattgctgattggaaggatttgatcacttcggcaaccatccttcatc

SEQ ID NO: 325826 - DNA, 75 bp, synthetic construct
  source 1..75: mol_type = other DNA
gatgatgatgaaagggctaaatttaacttaggccgtcaaggcgaaaccaatattatcaacgagtcaggcctctac

SEQ ID NO: 325827 - DNA, 75 bp, synthetic construct
  source 1..75: mol_type = other DNA
atgactgctaacgtaaccccatctgtttttcattttgaatcagaagcaaccattcgagccattgttattgatgga

SEQ ID NO: 325828 - DNA, 75 bp, synthetic construct
  source 1..75: mol_type = other DNA
gagtatcaggcaaaattccctgacgatccactctcagtattaagagaaatactaattcatgttcttgaatcgacg

SEQ ID NO: 325829 - DNA, 75 bp, synthetic construct
  source 1..75: mol_type = other DNA
agaatccaatattggtgaactagagcttgagtatcaggcaaaattccctggcgatccactctcagtattaagaga

SEQ ID NO: 325830 - DNA, 75 bp, synthetic construct
  source 1..75: mol_type = other DNA
atggcacgaaaaaccaaacaagaagcgcaagaaacgcgccaacacatcctcgatgtggctctacgtcttttctca

SEQ ID NO: 325831 - DNA, 75 bp, synthetic construct
  source 1..75: mol_type = other DNA
ccaggttcgcacggttaacctgattaaatctgcccgtgttggctatacaaagatgttgctgggggtggtcgggta

SEQ ID NO: 325832 - DNA, 75 bp, synthetic construct
  source 1..75: mol_type = other DNA
ggtttatccccgctggcgcggggaactctcatttcccatgcaaaatgctgcattcctggccggtttatccccgct

SEQ ID NO: 325833 - DNA, 75 bp, synthetic construct
  source 1..75: mol_type = other DNA
atcatcattatgggacgtcccgatgaggaagagacgctgttacgtgtggatgcggcgatcaacaaaaaataccgc

SEQ ID NO: 325834 - DNA, 75 bp, synthetic construct
  source 1..75: mol_type = other DNA
tactggaactcgatgaaaatcagcttcctgaccatggtactgaccctgattagcgttagctttaccgcttacgcc

SEQ ID NO: 325835 - DNA, 75 bp, synthetic construct
  source 1..75: mol_type = other DNA
ccggtcgctgaagctggcggacaaaaaggtcaggtgtttgattacgatctggaggcgctggccttcatcggtaag

SEQ ID NO: 325836 - DNA, 75 bp, synthetic construct
  source 1..75: mol_type = other DNA
tgaaggaatccgtctctgataaagatttaaaagtcaggacagtacgtatgtggcttctgatgcgcaagctgaaga

SEQ ID NO: 325837 - DNA, 75 bp, synthetic construct
  source 1..75: mol_type = other DNA
ctggtgcctgggcggtgctgccgccaaaaactaccgtgaaaaatccgtggacgtggtctgctatgacgaactttc

SEQ ID NO: 325838 - DNA, 75 bp, synthetic construct
  source 1..75: mol_type = other DNA
tttttccgcaaacctacggacttaccgggtcagggaattattgcctttgatatggattccacctttgttgaagag

SEQ ID NO: 325839 - DNA, 75 bp, synthetic construct
  source 1..75: mol_type = other DNA
ctggcctcagaaccattgaactacggtctgctgaatggtcagaaattgattttgataatgccctgtggacaatcc

SEQ ID NO: 325840 - DNA, 75 bp, synthetic construct
  source 1..75: mol_type = other DNA
catcatggctgcgtgatccatcagtctgagcttgaccagagcaacgggcgctggatctgtgaaaacacgggcatg

SEQ ID NO: 325841 - DNA, 75 bp, synthetic construct
  source 1..75: mol_type = other DNA
tggaaaacgctgccattccagatcgccatcatgaacagtatggggaacgaccagatccgcacggttaacctgatt

SEQ ID NO: 325842 - DNA, 75 bp, synthetic construct
  source 1..75: mol_type = other DNA
atgaggacacccttaaacgtgttgatgcggtgatcaggaaaaaataccgccatgctgacggtactgaaatttcca

SEQ ID NO: 325843 - DNA, 75 bp, synthetic construct
  source 1..75: mol_type = other DNA
cgtgtatctgtgtgaagtggggacggacaccgcaaaagaaattctctatgcccgtatgaaagccgatcccacgcc

SEQ ID NO: 325844 - DNA, 75 bp, synthetic construct
  source 1..75: mol_type = other DNA
gggaactcatatacagcaaaccttcagaatgcattccgggcggtttatccccgctggcgcggggaactcgtgacc

SEQ ID NO: 325845 - DNA, 75 bp, synthetic construct
  source 1..75: mol_type = other DNA
cgtctgctgtgggataacaaaaagcggcgtaacgaagcgctggactgcctggtgtatgcctatgcggcattacgt

SEQ ID NO: 325846 - DNA, 75 bp, synthetic construct
  source 1..75: mol_type = other DNA
acgtagcggactgcataacgtcgataacgtctccacgatttcgcgttcgatgatgaataaagctatcgaaaaagg

SEQ ID NO: 325847 - DNA, 75 bp, synthetic construct
  source 1..75: mol_type = other DNA
gcggtttatccccgctggcgcggggaactccacccatcttcccttatcgccgggtcgcggaacggtttatccccg

SEQ ID NO: 325848 - DNA, 75 bp, synthetic construct
  source 1..75: mol_type = other DNA
tacggctctggcctttctgaaatccgcatgggtgaagcgctgtctcagtatccacgtgatgaatacgttctgagc

SEQ ID NO: 325849 - DNA, 75 bp, synthetic construct
  source 1..75: mol_type = other DNA
gtttcggtacagcggtggcaactggaccttgaagcgctggcgagggcacgaagagatgagcaggatgaggatgat

SEQ ID NO: 325850 - DNA, 75 bp, synthetic construct
  source 1..75: mol_type = other DNA
ggagtcttcagccaccatcagcgtgcgttcccatgaagggaaaagcctttcgctttatcgctccggcatcgggaa

SEQ ID NO: 325851 - DNA, 75 bp, synthetic construct
  source 1..75: mol_type = other DNA
gcagggcggcggcaaagcgcggctggaaaaaatggcgcagcagcgtggactgcgcaacatgcaatttttcccgct

SEQ ID NO: 325852 - DNA, 75 bp, synthetic construct
  source 1..75: mol_type = other DNA
acgatcgaagagcagtcactgcgggcctatcagcagtttctggatatcaagtcggatattgcccgccatatctat

SEQ ID NO: 325853 - DNA, 75 bp, synthetic construct
  source 1..75: mol_type = other DNA
acaaaatatcaatattgagaacactttattccatttcaagatcaccaatcttcacttcgagttcaatactggttg

SEQ ID NO: 325854 - DNA, 75 bp, synthetic construct
  source 1..75: mol_type = other DNA
gtcggcgtgaccatccattggccaaaaagcagcttgtagaatggcaggagttagtgggttacaaaatgattggcg

SEQ ID NO: 325855 - DNA, 75 bp, synthetic construct
  source 1..75: mol_type = other DNA
tttatggaccgacgataaagacaacttgtggaccaatatcgtcgaacgccagagacatgcgttacaggaaatagg

SEQ ID NO: 325856 - DNA, 75 bp, synthetic construct
  source 1..75: mol_type = other DNA
gacctgatgcaggtacaggactgcgccaccgttcgtcgtgacccggcgcagcagttacagctcacctccgtgatt

SEQ ID NO: 325857 - DNA, 75 bp, synthetic construct
  source 1..75: mol_type = other DNA
tacctcatgaccgcccagctcgacggtgtggtcgaacgctgcaatcagcagtggctgaccggggagggtaacgta

SEQ ID NO: 325858 - DNA, 75 bp, synthetic construct
  source 1..75: mol_type = other DNA
atgtgtcagggtggtaatggtccattccgcatcatctatcggctgtttaaagccactgactttcactggcatttc

SEQ ID NO: 325859 - DNA, 75 bp, synthetic construct
  source 1..75: mol_type = other DNA
gagatgccatacgatatatggcaaaaaaatactaaagtaatgttgtctcatatcaatattggaacaggtattgac

SEQ ID NO: 325860 - DNA, 75 bp, synthetic construct
  source 1..75: mol_type = other DNA
tttcctgctgattttatatatgaaaatattcttattgaagctaatattatacatgctgcacatgttaacgatgtc

SEQ ID NO: 325861 - DNA, 75 bp, synthetic construct
  source 1..75: mol_type = other DNA
ttaatgaggtcgccgctttatttggcgttaccaggcggacaatattccgctggatgaacaagatccccggctggc

SEQ ID NO: 325862 - DNA, 75 bp, synthetic construct
  source 1..75: mol_type = other DNA
cggcatcggattaggcgtgttagtcagccgcgctaaacgcgtcacggagaacatgatgatggcggccagccgtac

SEQ ID NO: 325863 - DNA, 75 bp, synthetic construct
  source 1..75: mol_type = other DNA
tgctgcgccgcttccacgaggcgacggcacagaatgcaccggacgtggtggtgtggggcagcggtacgccgatgc

SEQ ID NO: 325864 - DNA, 75 bp, synthetic construct
  source 1..75: mol_type = other DNA
cgatcaaactaatcaggctcctttccagtcaccgctggcgcagccgcggtcgcgtttggcgagctggggcggtca

SEQ ID NO: 325865 - DNA, 75 bp, synthetic construct
  source 1..75: mol_type = other DNA
cagccgggcagaccttgaatgtctcgaacatatgcgcaacgtcggccagctcgtcggcgacctgatgcaggtgca

SEQ ID NO: 325866 - DNA, 75 bp, synthetic construct
  source 1..75: mol_type = other DNA
caaacgcgagtatgcggcgcttgggatgaaagcgaacttctcgttgtttgacgataccgatcagcttgctttgct

SEQ ID NO: 325867 - DNA, 75 bp, synthetic construct
  source 1..75: mol_type = other DNA
atgaaggcgaacttttcgctgtttgacgataccgatcagcttgctttgcttaaagagttgaccgaggggctgatt

SEQ ID NO: 325868 - DNA, 75 bp, synthetic construct
  source 1..75: mol_type = other DNA
caaagattacgccattctttatcgcggcaaccatcagtcgcgggtatttgaaaaattcctgatgcaaaaccgcat

SEQ ID NO: 325869 - DNA, 75 bp, synthetic construct
  source 1..75: mol_type = other DNA
gacattttttcggaagaagaggcgcgtcaaatcgtagcggaagaactggtggaaaaggtggttaacggcagggtg

SEQ ID NO: 325870 - DNA, 75 bp, synthetic construct
  source 1..75: mol_type = other DNA
ctgtgcgattacaggcctttcttaacgagccaggcaataccgaaaatattgttgagccggggcacacgtactaca

SEQ ID NO: 325871 - DNA, 75 bp, synthetic construct
  source 1..75: mol_type = other DNA
aaaaattcctgatgcaaaaccgcatcccgtacaaaatttctggtggtacgtcgtttttctctcgtcctgaaatca

SEQ ID NO: 325872 - DNA, 75 bp, synthetic construct
  source 1..75: mol_type = other DNA
cgcgagcgctggcagaacaaaattcgctatctgctggtggatgagtatcaggacaccaacaccagccagtatgag

SEQ ID NO: 325873 - DNA, 75 bp, synthetic construct
  source 1..75: mol_type = other DNA
cggtgatttacctcatgactgcccggctcgacggcgtggtcgaccgctgtaatcagcgctggctgaccggggagg

SEQ ID NO: 325874 - DNA, 75 bp, synthetic construct
  source 1..75: mol_type = other DNA
caggcggcggcagaggcaaagggcgagcgggatcgtatttttgcccattgttatgggctgtatgatgcacacctg

SEQ ID NO: 325875 - DNA, 75 bp, synthetic construct
  source 1..75: mol_type = other DNA
agcgggaccgtatttttgcccattgttatgggctgtatgatgcacacctgaaagcctgtaacgttctcgacttcg

SEQ ID NO: 325876 - DNA, 75 bp, synthetic construct
  source 1..75: mol_type = other DNA
atgaatcctggctgtacgaaacatcgcccagcccgaaagccgccgaaatgcgcatgaagaacgtcaaccaactgt

SEQ ID NO: 325877 - DNA, 75 bp, synthetic construct
  source 1..75: mol_type = other DNA
attgaacaggcagcggaaaagcatcttccggcgctacaacgggtagcaaaacagatcgaagaaggggttgaatcg

SEQ ID NO: 325878 - DNA, 75 bp, synthetic construct
  source 1..75: mol_type = other DNA
tggctggccttttgcccggaacaagaacgcaaggaattaatcgagatgttagcctcccgccccggtgatgactat

SEQ ID NO: 325879 - DNA, 75 bp, synthetic construct
  source 1..75: mol_type = other DNA
tgagcagacggaatacaaaaccgtgcgcggcttaacccgcggtctaatgttattaaatatgttaaataaacttga

SEQ ID NO: 325880 - DNA, 75 bp, synthetic construct
  source 1..75: mol_type = other DNA
ggcaccgaaatgactatttcccgtgtctgctgggacaccggggggatcgatggtgaaattgtttatcagagatca

SEQ ID NO: 325881 - DNA, 75 bp, synthetic construct
  source 1..75: mol_type = other DNA
ccgtgaaaaatctgtggatgtggtctgctatgacgaactctcctcgtttgaaccggatgtggaaaaagaaggctc

SEQ ID NO: 325882 - DNA, 75 bp, synthetic construct
  source 1..75: mol_type = other DNA
gtcaaagggcgaccgtaatccttcctctgtccggattctgattcagttacagcgtaatggccgctgggtgacgga

SEQ ID NO: 325883 - DNA, 75 bp, synthetic construct
  source 1..75: mol_type = other DNA
aaactgctgtgggataaaaaaggacgacgcaacgaagccctcgactgcctggtatatgcctatgctgccctgcgt

SEQ ID NO: 325884 - DNA, 75 bp, synthetic construct
  source 1..75: mol_type = other DNA
ctgatcaaaattattatctgcctaaagagtcgtcatatgttgatggagaatggaagaccctgccgtttcaggttg

SEQ ID NO: 325885 - DNA, 75 bp, synthetic construct
  source 1..75: mol_type = other DNA
acctggctggccttttgcccggaacaagaacgcaaggaattaatcgaaatgttagcctcccgccccggtgatgac

SEQ ID NO: 325886 - DNA, 75 bp, synthetic construct
  source 1..75: mol_type = other DNA
aacagtctgctttttcagcccacggattctgccgctgaagattttatgaagtctcacgtggaggcgacgattcgg

SEQ ID NO: 325887 - DNA, 75 bp, synthetic construct
  source 1..75: mol_type = other DNA
actgtggggaggcgcagtatctgaaatttggcgatgaatccacgccttttggccttaaatgggagaaggacagcc

SEQ ID NO: 325888 - DNA, 75 bp, synthetic construct
  source 1..75: mol_type = other DNA
gcaatcagcggggcgtgtatctgtgtgaagtggggacggacaccgcaaaagaaattctctatgcccgtatgaaag

SEQ ID NO: 325889 - DNA, 75 bp, synthetic construct
  source 1..75: mol_type = other DNA
tcttacaacagctactttaaaggcagcgaagtgttaaacgatctgctgcaaccggcggtcgtcgcgttagcctat

SEQ ID NO: 325890 - DNA, 75 bp, synthetic construct
  source 1..75: mol_type = other DNA
ggaaatcgccgcgtcaatcctgccgaaatcagtcaccacgcctattgcaatggcggttggcggcagtattggcgg

SEQ ID NO: 325891 - DNA, 75 bp, synthetic construct
  source 1..75: mol_type = other DNA
aggaagagacgctgttacgtgtggatgcggcgatcaacaaaaaataccgccatgcagacggaaccgaaatgacta

SEQ ID NO: 325892 - DNA, 75 bp, synthetic construct
  source 1..75: mol_type = other DNA
agctttatctgtggccgattaatgccgatcaacaaggcacgccgcagcaggtacgtaaggttgttgatatggtga

SEQ ID NO: 325893 - DNA, 75 bp, synthetic construct
  source 1..75: mol_type = other DNA
taatattcgtgatgcgttgataaaatacgatccggcaaatgcacaaacctaccaacgtaatgccgatacttataa

SEQ ID NO: 325894 - DNA, 75 bp, synthetic construct
  source 1..75: mol_type = other DNA
tattgacctgcgcccggaatccctgaagaaatacgaggaactggcacagcaggcgcagcagagcgcggaaactgc

SEQ ID NO: 325895 - DNA, 75 bp, synthetic construct
  source 1..75: mol_type = other DNA
atgggcattcattacaacaaaggcgcggagttactcgactttgtgaaaaacaaagaagacttcagcatggttggc

SEQ ID NO: 325896 - DNA, 75 bp, synthetic construct
  source 1..75: mol_type = other DNA
tctgggtcaaacaagcactggaaaaaaatcaaccaggaaagccagtacgggtgataaatcctgatgatgaatcga

SEQ ID NO: 325897 - DNA, 75 bp, synthetic construct
  source 1..75: mol_type = other DNA
atgatccggagattttttcgcagacagaggcgcagcaactggtggcggaagagctggtggagaagtgggaaaaag

SEQ ID NO: 325898 - DNA, 75 bp, synthetic construct
  source 1..75: mol_type = other DNA
cctgcggatgaagccacgtcgtatgccatccgttttcctgatgatccggagattttttcgcagacagaggcgcag

SEQ ID NO: 325899 - DNA, 75 bp, synthetic construct
  source 1..75: mol_type = other DNA
cgatcaacaaggaacaccccagcaggtacgtaaagtggttgatatagtgaagaaaaataatatcccagcggtatt

SEQ ID NO: 325900 - DNA, 75 bp, synthetic construct
  source 1..75: mol_type = other DNA
acgttccatatctggacggcgtacagtccgttcaccacctgggtacagatagtctatgactggctggatgcactg

SEQ ID NO: 325901 - DNA, 75 bp, synthetic construct
  source 1..75: mol_type = other DNA
cggggaacacaaatatggggagcgccgttaatgaaatcaaaacggtttatccccgctggcgcggggaacacgagg

SEQ ID NO: 325902 - DNA, 75 bp, synthetic construct
  source 1..75: mol_type = other DNA
tccgggtgctgccggtaaagggcgcgtctgtctatggcaagccggtgatcaccatgccgaaaacccgcaatcagc

SEQ ID NO: 325903 - DNA, 75 bp, synthetic construct
  source 1..75: mol_type = other DNA
cgctttctaatttggcgcggttatatgattttctggtgctggtcagtaaacctgctgccgccagaatggtacagt

SEQ ID NO: 325904 - DNA, 75 bp, synthetic construct
  source 1..75: mol_type = other DNA
attgcgatgagttgatcagcatccccatggcaggaagcgtttcttccctgaacgtttcggtagcgaccggcattt

SEQ ID NO: 325905 - DNA, 75 bp, synthetic construct
  source 1..75: mol_type = other DNA
cttccgcagttcaccgatgaagccggacgcaaaacattaaaagaattcatcccggttcagggggtgtatgcggca

SEQ ID NO: 325906 - DNA, 75 bp, synthetic construct
  source 1..75: mol_type = other DNA
atatcatgcaaaaaacttcttttagaaatcaccaggttaagcgattcagctcgcaacgttctaccaggcgtaaac

SEQ ID NO: 325907 - DNA, 75 bp, synthetic construct
  source 1..75: mol_type = other DNA
tctgtgaacatcatggctgcgtgatccatcagtctgagcttgaccagagcaacgggcggtggatctgtgaaaaca

SEQ ID NO: 325908 - DNA, 75 bp, synthetic construct
  source 1..75: mol_type = other DNA
tattgttccaaccgacagattcatctgctgaagattttatgaaatctcacgtggagtcaacgttacgggatgtcc

SEQ ID NO: 325909 - DNA, 75 bp, synthetic construct
  source 1..75: mol_type = other DNA
ttaaaggggatgattcggccattgcctgtgacgccagttgagtgggctgacagacattattatctaccaccagag

SEQ ID NO: 325910 - DNA, 75 bp, synthetic construct
  source 1..75: mol_type = other DNA
gcgcggggaactcagtatgcgttcaatcactgtcaggcctacttccggtttatccccgctggcgcggggaactca

SEQ ID NO: 325911 - DNA, 75 bp, synthetic construct
  source 1..75: mol_type = other DNA
gccaccgcgctcaatctcgtaccacatctggacggcatacagcccgttcaccacctgggtacagattgtttatga

SEQ ID NO: 325912 - DNA, 75 bp, synthetic construct
  source 1..75: mol_type = other DNA
ccttgagtcccagggcgtggttatccagttggcgaaccgtcagtatctcgacgagaaaagcgaaggtgccgtgca

SEQ ID NO: 325913 - DNA, 75 bp, synthetic construct
  source 1..75: mol_type = other DNA
cgccggaatggtgcagaaatgtcggtatcccgtatctgctgggatattggcgggattgacccgaccatcgtgtat

SEQ ID NO: 325914 - DNA, 75 bp, synthetic construct
  source 1..75: mol_type = other DNA
tagagatcatgttatctatattaataccaatattttggatgaagcagtctgggtcaaacaagcactggaaaaaaa

SEQ ID NO: 325915 - DNA, 75 bp, synthetic construct
  source 1..75: mol_type = other DNA
ggaagagcttgtggagaagtgggaaaaaggaaagatgcgtctgctgtgggataacaaaaagcggcgtaacgaagc

SEQ ID NO: 325916 - DNA, 75 bp, synthetic construct
  source 1..75: mol_type = other DNA
ataatctgatggctgccgtttcggttgcgctgcagcctctggtcagggttgtaccgatgacggcagttgaatggg

SEQ ID NO: 325917 - DNA, 75 bp, synthetic construct
  source 1..75: mol_type = other DNA
ccattcgcggctcgacgcctaaaatcaaaggcacctgccagatcgaaaaagccgctaacgagtcggcgcatttta

SEQ ID NO: 325918 - DNA, 75 bp, synthetic construct
  source 1..75: mol_type = other DNA
tgcgtttttatgtgccctgtccgcactgtggggaggagcagtatctgaaatttggtgatgattcctcgccttttg

SEQ ID NO: 325919 - DNA, 75 bp, synthetic construct
  source 1..75: mol_type = other DNA
gtcgtctttcaaaaggtcaggcacttggaatgacgcaaactaaagctttattaattaacgataatccagcatttt

SEQ ID NO: 325920 - DNA, 75 bp, synthetic construct
  source 1..75: mol_type = other DNA
cgtcaggcactggcacaaaatcatcacaactgggctgcctgcgcgcggatgctggaaaccgacgtcgccaacctg

SEQ ID NO: 325921 - DNA, 75 bp, synthetic construct
  source 1..75: mol_type = other DNA
atggaactgaagtggaccagtaaggcgctttctgatttggcgcggttatatgattttctggtgctgaccagtaaa

SEQ ID NO: 325922 - DNA, 75 bp, synthetic construct
  source 1..75: mol_type = other DNA
atgaggtatacggttgccctgacgggcggcattggcagtggcaagagcaccgttgcaaatgcatttgctgacctc

SEQ ID NO: 325923 - DNA, 75 bp, synthetic construct
  source 1..75: mol_type = other DNA
actgaaaaatcaggatccgaccaatccgatggagaacaacgagttgacatcgcaactggcgcaaatcagcacggt

SEQ ID NO: 325924 - DNA, 75 bp, synthetic construct
  source 1..75: mol_type = other DNA
cagcaacctgattggtcacggcgtcatgatccccggtaccaccgttcttgttggaaccggcagtgacgaaggggc

SEQ ID NO: 325925 - DNA, 75 bp, synthetic construct
  source 1..75: mol_type = other DNA
aacaacatctcggcaacgacgcgcagtcgctggcgttgcgtcatttccgccatttatttattcaacaacagtccg

SEQ ID NO: 325926 - DNA, 75 bp, synthetic construct
  source 1..75: mol_type = other DNA
agtgggcgccggcgttacatcagttgcaggaacagcgtcagccggtgcaaaaaacggtcaatcccccggttgtca

SEQ ID NO: 325927 - DNA, 75 bp, synthetic construct
  source 1..75: mol_type = other DNA
aggacgcgcgcccggacatgaacgagcgcgagttcttcttcacaaaaatcatctgggcgatggattacacgcaca

SEQ ID NO: 325928 - DNA, 75 bp, synthetic construct
  source 1..75: mol_type = other DNA
atgaaagacgaaattgaacgcctcgtccagcaattccagatcctcgaatcagcagcagccgagaaaactggagcc

SEQ ID NO: 325929 - DNA, 75 bp, synthetic construct
  source 1..75: mol_type = other DNA
gacaatgtgcagcaccgttataaaccacaggcgcagccgcttcgtttgatcattccacggctgcacctgtatgtt

SEQ ID NO: 325930 - DNA, 75 bp, synthetic construct
  source 1..75: mol_type = other DNA
catttatttattcaacaacagtccgaaaatcgcagcagcaaggccgctgtccgtctgcctggcgtgttgtgttac

SEQ ID NO: 325931 - DNA, 75 bp, synthetic construct
  source 1..75: mol_type = other DNA
ataccaaccacgctgacgctgaccagaacctcaacgaaaacctgatgatcctgctcgccaccgcaggctgcaact

SEQ ID NO: 325932 - DNA, 75 bp, synthetic construct
  source 1..75: mol_type = other DNA
ctcagtcatcacggttggctgcatctgccagatcacaaagcgggcttcagcgaagagcagcaggccatctggcaa

SEQ ID NO: 325933 - DNA, 75 bp, synthetic construct
  source 1..75: mol_type = other DNA
gatgcttaacccgccgcgtcgcggtaaacgtaagccggaatatctgcaatggctggcgtctcttgcacgggcgca

SEQ ID NO: 325934 - DNA, 75 bp, synthetic construct
  source 1..75: mol_type = other DNA
aactttaaatcaggaagctaacattgaatatcttcatgagcctacatcgaaatggatgataaaaaatttaacttt

SEQ ID NO: 325935 - DNA, 75 bp, synthetic construct
  source 1..75: mol_type = other DNA
acgctgaaacattaaacatgaccacctatggcgatggttatatctctaacaaagcacaaagttttgaagtagtgg

SEQ ID NO: 325936 - DNA, 75 bp, synthetic construct
  source 1..75: mol_type = other DNA
aaaaatgaacgcactgacaatggtcatctttatggcgctgactacacgcgtgccaatggtgacggtttcggtatc

SEQ ID NO: 325937 - DNA, 75 bp, synthetic construct
  source 1..75: mol_type = other DNA
ccgatatttttggcgttgatgtcaggactatcaccgcctggcagagtcagggggtaccactagtttctggtggag

SEQ ID NO: 325938 - DNA, 75 bp, synthetic construct
  source 1..75: mol_type = other DNA
tgcgagtgcatcaggatttattgcgtcacgatctgcgtattctggttattgaccttgatccgcaggcatccagca

SEQ ID NO: 325939 - DNA, 75 bp, synthetic construct
  source 1..75: mol_type = other DNA
tgaacaaagcagccgcgctggatgaactgataacggggctaaagcgcaggcgctcactatcaacaaggatgaggt

SEQ ID NO: 325940 - DNA, 75 bp, synthetic construct
  source 1..75: mol_type = other DNA
tatctacgcccaccgacagatacctaaatatcgcgatatccataaagaaccctacgttattttcgttgtaaacct

SEQ ID NO: 325941 - DNA, 75 bp, synthetic construct
  source 1..75: mol_type = other DNA
gtgcccaccctcatcttctgatggaagatttaaggattctggttattgaccttgatccgcaatcttcagcaacga

SEQ ID NO: 325942 - DNA, 75 bp, synthetic construct
  source 1..75: mol_type = other DNA
cctaaattaagccgtcgcattgttgaactggctgtaaaagagatggaggatagcgggtacaggttcaataaaaaa

SEQ ID NO: 325943 - DNA, 75 bp, synthetic construct
  source 1..75: mol_type = other DNA
gtgctgctggtgaccggggtaattatctggcgtccgtactttgcgcagtacttcccgatgcaggttgttcgctac

SEQ ID NO: 325944 - DNA, 75 bp, synthetic construct
  source 1..75: mol_type = other DNA
tttgctgtacgatgcgatttcaggcaatagccatcggcgcacttgatgtccggctgggacgtataccagagtcac

SEQ ID NO: 325945 - DNA, 75 bp, synthetic construct
  source 1..75: mol_type = other DNA
atctttatggtgctgactacacgcgtgccaatggtgacggtttcggtatctcctcaacttatgtttatgatggct

SEQ ID NO: 325946 - DNA, 75 bp, synthetic construct
  source 1..75: mol_type = other DNA
catttcgccagaaaatcgccacagcgattgccgaaggcgtgatcagttatttccactggtttgacaaccagaaag

SEQ ID NO: 325947 - DNA, 75 bp, synthetic construct
  source 1..75: mol_type = other DNA
cgtttcgtcagaaaattgcctctgccattgccgaaggcgtgatcagttatttccactggtttgacaaccagaaag

SEQ ID NO: 325948 - DNA, 75 bp, synthetic construct
  source 1..75: mol_type = other DNA
tgaacgccttagagcaattgcagcaggactatatgcagcggctgaaagactgggagagcgccttcacggatttgc

SEQ ID NO: 325949 - DNA, 75 bp, synthetic construct
  source 1..75: mol_type = other DNA
gaaggtcgactggcccgcccactcggcgatgagcagccacgacgcgctgatggtggcgagcggcatcaccaccgt

SEQ ID NO: 325950 - DNA, 75 bp, synthetic construct
  source 1..75: mol_type = other DNA
ggctgcatggcaattttcgttacgtggcacattctgactgggtcagtatggatcaaatctcgccgtggatgggac

SEQ ID NO: 325951 - DNA, 75 bp, synthetic construct
  source 1..75: mol_type = other DNA
cggtttatctgaatattgccgaatttggcgatggtgtgtttggtgttgaagccgcagcgcaacgctatttccata

SEQ ID NO: 325952 - DNA, 75 bp, synthetic construct
  source 1..75: mol_type = other DNA
ctcgccagccacgatgacgccacgcatgcccacgttgccgaatcccaccagcttggcagcgtgatcgccgaattt

SEQ ID NO: 325953 - DNA, 75 bp, synthetic construct
  source 1..75: mol_type = other DNA
cgcgtaagcatggcatgaacgtgctgatgggtgcgccaaatatcgtgcgtggcggctcgcactccggcaatgtgg

SEQ ID NO: 325954 - DNA, 75 bp, synthetic construct
  source 1..75: mol_type = other DNA
atccgcgcctttgccgaaagccagagccgcctgccggaggcgatggacggcgaaggcggctggctgctgccgggg

SEQ ID NO: 325955 - DNA, 75 bp, synthetic construct
  source 1..75: mol_type = other DNA
atcccgatatcgacggagataatggcccgggtcgctctcgcggcggttttggcaccaaaatccatctggcaacag

SEQ ID NO: 325956 - DNA, 75 bp, synthetic construct
  source 1..75: mol_type = other DNA
ggtgaacaacgcgggcgttgatacccagccgagtgcgccgccggaagtttccggtccgttcgaagatttccctga

SEQ ID NO: 325957 - DNA, 75 bp, synthetic construct
  source 1..75: mol_type = other DNA
agagtggtatttcaccaccgaagagtcacgtattctgctggtcaataatatggaagagatcctgtgccgactgga

SEQ ID NO: 325958 - DNA, 75 bp, synthetic construct
  source 1..75: mol_type = other DNA
ttgcgctggttaccttttattgtcattttcctttatgtctatattgagatttcaatctttattcaggttgcccat

SEQ ID NO: 325959 - DNA, 75 bp, synthetic construct
  source 1..75: mol_type = other DNA
tgttggttatattcacgtcagttattggtatgtcgctggtacgtaaccagggatttaagaattttgtgctgatgc

SEQ ID NO: 325960 - DNA, 75 bp, synthetic construct
  source 1..75: mol_type = other DNA
caacgtttcgccgtgaactggaaaatatcctgaaagacccaacgctcagttcagaactgcgtgatgaactggcga

SEQ ID NO: 325961 - DNA, 75 bp, synthetic construct
  source 1..75: mol_type = other DNA
gcgtcactatctatccaccacaaaaagatgtctttaacgcgttccgctttaccgagttgggtgacgttaaagtgg

SEQ ID NO: 325962 - DNA, 75 bp, synthetic construct
  source 1..75: mol_type = other DNA
tgggagaacgccttcgtggaattgcagaaaatgttttcgcttacgcaacgggacaacgcgatgctgaacgggcga

SEQ ID NO: 325963 - DNA, 75 bp, synthetic construct
  source 1..75: mol_type = other DNA
acggagctggaaagacatttgctgaacgcattagagcaactgcaacaggactatatgcagcggctgaacgaatgg

SEQ ID NO: 325964 - DNA, 75 bp, synthetic construct
  source 1..75: mol_type = other DNA
cgtgaagtcgcccgccgagtacccggttctgattatccgttgctcattgcctgcgcctacattggttttctcacc

SEQ ID NO: 325965 - DNA, 75 bp, synthetic construct
  source 1..75: mol_type = other DNA
cggtggtagggataaaattgccagggctggaatttaaaaaccaacgcgtagaagcggcttatcgtaaagagctgg

SEQ ID NO: 325966 - DNA, 75 bp, synthetic construct
  source 1..75: mol_type = other DNA
tttatcgcgaagtgggcgtctttctggggatcgcactgattgcagtggtgataagcgtgctgaacaatttctttg

SEQ ID NO: 325967 - DNA, 75 bp, synthetic construct
  source 1..75: mol_type = other DNA
tttatctacagcccgcatcgttggcaatactggtcaatactcggtactgcactgatcatcttcgtcacctggttt

SEQ ID NO: 325968 - DNA, 75 bp, synthetic construct
  source 1..75: mol_type = other DNA
accctattttcttaatacccttcagaccgtcgccagcgagcggcagtccggcgtcactatctatccgccacaaaa

SEQ ID NO: 325969 - DNA, 75 bp, synthetic construct
  source 1..75: mol_type = other DNA
gtataaagagctggaaaatactattccgggcttcacccgccctaatcatggctatctcgaaagctgggcgcgtca

SEQ ID NO: 325970 - DNA, 75 bp, synthetic construct
  source 1..75: mol_type = other DNA
gtataaagaactggaaaatacgatccctggctttacccgaccggcacatggctatctggaaagctgggcgcgtca

SEQ ID NO: 325971 - DNA, 75 bp, synthetic construct
  source 1..75: mol_type = other DNA
cgatgtacttcagcgaacatggcttcaacatcaccatcaataccgtcaacctgatgtttattcgacagcgaaggt

SEQ ID NO: 325972 - DNA, 75 bp, synthetic construct
  source 1..75: mol_type = other DNA
agcgctcgccgaagaacattttcagcgtggcagaagagattgaactggagtttgaagaagtggaggaaagcagcg

SEQ ID NO: 325973 - DNA, 75 bp, synthetic construct
  source 1..75: mol_type = other DNA
gggcgttctgctactcaatactgtgttgacggttcgcgcaggtcaggcgcattcccacgccagcctcggctggga

SEQ ID NO: 325974 - DNA, 75 bp, synthetic construct
  source 1..75: mol_type = other DNA
ggaggatctatctactacaaacccattcaatgcccgaccggatttatcatgacaggtacacgcatgtatggcatt

SEQ ID NO: 325975 - DNA, 75 bp, synthetic construct
  source 1..75: mol_type = other DNA
caggccgatcaatcaggcgtctatcacgaacgtggcggatggctgaaagggcatcatagtggtatgccatactgg

SEQ ID NO: 325976 - DNA, 75 bp, synthetic construct
  source 1..75: mol_type = other DNA
gcagccttttattggagtggttcttgcgggttatggtgcatggaaattttcaggtgacagtatctcagcattact

SEQ ID NO: 325977 - DNA, 75 bp, synthetic construct
  source 1..75: mol_type = other DNA
cctgtgggaagccctatcccgtggccatctgccactcctccacaaggctatctgttgatggacggccagtcgttt

SEQ ID NO: 325978 - DNA, 75 bp, synthetic construct
  source 1..75: mol_type = other DNA
catattgccgtattgttatcgacagatgaacttagtggtgcagctgaggacactgatcgtctttacagattccag

SEQ ID NO: 325979 - DNA, 75 bp, synthetic construct
  source 1..75: mol_type = other DNA
tcccctaacgggcttgtaggccgcgacagtacaggggcgatactttcgtgccaatccggtatctggacaacggca

SEQ ID NO: 325980 - DNA, 75 bp, synthetic construct
  source 1..75: mol_type = other DNA
gacagcggaacaggaggtggatgaggggaacgaaactgatgctgataccggaatgctccttacgctgttttcggc

SEQ ID NO: 325981 - DNA, 75 bp, synthetic construct
  source 1..75: mol_type = other DNA
gcggactcgagacaattatcattatatgccgctcatggagatgcgatattaactgatggcactttatggatgttg

SEQ ID NO: 325982 - DNA, 75 bp, synthetic construct
  source 1..75: mol_type = other DNA
tacagaatatctgactcttcgtattttcctggatcgctcatctgttgaagtgtttgttaacgatggtgaggcaac

SEQ ID NO: 325983 - DNA, 75 bp, synthetic construct
  source 1..75: mol_type = other DNA
atgctgagagcgaaatttatgatctcgagcctgtcatgcaggcaaaagctcttaaaggacttgaaaagctggaag

SEQ ID NO: 325984 - DNA, 75 bp, synthetic construct
  source 1..75: mol_type = other DNA
ttttctgaaggagagtggttccgggcaggatcgtcgttatgttcagtcgctctttgaacgggcaggtatccataa

SEQ ID NO: 325985 - DNA, 75 bp, synthetic construct
  source 1..75: mol_type = other DNA
agtgaatttatcagatggttaaaagaggggctgagggagggttcactttcggttaacagcgttgattcaaatgtt

SEQ ID NO: 325986 - DNA, 75 bp, synthetic construct
  source 1..75: mol_type = other DNA
catgacggacaaccagtggatacgtgctgttaacaacaaagggatcacaaccggtggtgaaatcaaagggggttc

SEQ ID NO: 325987 - DNA, 75 bp, synthetic construct
  source 1..75: mol_type = other DNA
ttggtgccaagttccagcgtaatattgaagagctgctggttgcacccgtaccgactcacgtgattattgccggat

SEQ ID NO: 325988 - DNA, 75 bp, synthetic construct
  source 1..75: mol_type = other DNA
gatatgcatggcttcagctacatgcagttcatcgtaccggggctgatcatgatgtcggtgatcaccaacgcctac

SEQ ID NO: 325989 - DNA, 75 bp, synthetic construct
  source 1..75: mol_type = other DNA
tgagttgtataagcgggtcggatatgtggacttgcatcgcgatgatgttcccgttgagtgtatggaatgtgaaca

SEQ ID NO: 325990 - DNA, 75 bp, synthetic construct
  source 1..75: mol_type = other DNA
tagcctcggcccgcgcgcgcgggcggaaaggcggccggccgttcaagatgaccgccgccaagctgcggctggcga

SEQ ID NO: 325991 - DNA, 75 bp, synthetic construct
  source 1..75: mol_type = other DNA
taaaaagcatctgggcgaaagagatccatcgctttatgcgtatctgggtgcagacgctggtgccgccggtcatca

SEQ ID NO: 325992 - DNA, 75 bp, synthetic construct
  source 1..75: mol_type = other DNA
actgcttgttggcatgctggtgacggctatttcgctattctttgtgccgtttcaggtgcattcgtgggtatttgt

SEQ ID NO: 325993 - DNA, 75 bp, synthetic construct
  source 1..75: mol_type = other DNA
ctgggacaacggacgtgggctggatggagatcggaacagacatctcctgagttatcaggccgatcaatccggtgt

SEQ ID NO: 325994 - DNA, 75 bp, synthetic construct
  source 1..75: mol_type = other DNA
acgcacggaggcggtttcaccatgacggacagcgaatggatacgtgctgttaacaacaaagggatcacaaccgaa

SEQ ID NO: 325995 - DNA, 75 bp, synthetic construct
  source 1..75: mol_type = other DNA
ctgggataacgggaagggacttgatggtgatcggaacagacaactcctgagttatcaggccgatcaatcaggcgt

SEQ ID NO: 325996 - DNA, 75 bp, synthetic construct
  source 1..75: mol_type = other DNA
ttgaatcctaccctgtcggaagccctataccgtggccatcagccacccctccacaaggctacctggtgatgaacg

SEQ ID NO: 325997 - DNA, 75 bp, synthetic construct
  source 1..75: mol_type = other DNA
ggcaaagcaggctatggtgcggcaggattcagagcgtacagaggtaaaccggggtattcgggaagcatggtctgg

SEQ ID NO: 325998 - DNA, 75 bp, synthetic construct
  source 1..75: mol_type = other DNA
acgaatactgtgtgtagtttttggcttgccaagtcatctcgccgttagagtcaggcatgtcaataggaacgactt

SEQ ID NO: 325999 - DNA, 75 bp, synthetic construct
  source 1..75: mol_type = other DNA
ctattccagtaagtccaatcggagcgcggattaaattcattcgtagcgagattatggaattctacaacaacagag

SEQ ID NO: 326000 - DNA, 75 bp, synthetic construct
  source 1..75: mol_type = other DNA
tcctcgatagtaataacaatgtgatggtatttgatacagactatacacctgttcaaaaaacgacgttaaatcaaa

SEQ ID NO: 326001 - DNA, 75 bp, synthetic construct
  source 1..75: mol_type = other DNA
gggctcccttgcgtctccggaggtggtaagggcgttgaatctgtatttgataccgccacggcaattcagtggtat

SEQ ID NO: 326002 - DNA, 75 bp, synthetic construct
  source 1..75: mol_type = other DNA
ccgaaattttcaaagtggatccgcgaacgattgaacgctggcagtctcaggggctcccttgcgtctccggaggtg

SEQ ID NO: 326003 - DNA, 75 bp, synthetic construct
  source 1..75: mol_type = other DNA
agtactatctgaaaaagatgggggtaactgaaagttctgccaagctggtaagggtaacaggtcaaagcatggaac

SEQ ID NO: 326004 - DNA, 75 bp, synthetic construct
  source 1..75: mol_type = other DNA
aatggggagaaatgactgggtgaattatgttggtgttgtcagtataatattatcattgtcctttgcgggtattgt

SEQ ID NO: 326005 - DNA, 75 bp, synthetic construct
  source 1..75: mol_type = other DNA
agcgcaaaatcagcagcggaagactttgcgaaggctgtatttgatcgcattgagttcattcgtactaacggaggt

SEQ ID NO: 326006 - DNA, 75 bp, synthetic construct
  source 1..75: mol_type = other DNA
ggtactgtttatcgctaccctgatcgttggtgctatcgtgaacttcgtgataggccagctggtggagaaaacggg

SEQ ID NO: 326007 - DNA, 75 bp, synthetic construct
  source 1..75: mol_type = other DNA
cgatgcatacgccactgcgtatcgcctcgatccgaaaaacagtgatgctgcactgggatacgctgaagcgttgac

SEQ ID NO: 326008 - DNA, 75 bp, synthetic construct
  source 1..75: mol_type = other DNA
aagaaagagattgtcgattatatggtggcgcgttacggcaacttcgtcacttacgatccgccgttaacgccgctg

SEQ ID NO: 326009 - DNA, 75 bp, synthetic construct
  source 1..75: mol_type = other DNA
tggtggtgattgaagatgacgagatcctgaaattaatgctgccaaaacagtggggtattgatgatgttccggtga

SEQ ID NO: 326010 - DNA, 75 bp, synthetic construct
  source 1..75: mol_type = other DNA
ctgcaaagccactttgtgattgggttggtggtgggcgggctgtatctggggtttgtcttccacgcaggctatggc

SEQ ID NO: 326011 - DNA, 75 bp, synthetic construct
  source 1..75: mol_type = other DNA
tactcttgaaattcatcttttttattgtgataaatattacacaccacttgtatatatcaccgaacctttcctttt

SEQ ID NO: 326012 - DNA, 75 bp, synthetic construct
  source 1..75: mol_type = other DNA
ccgaaattttcggggtgagcgtccgaacgattcagaactggcaggaacaaggtatgccggttgcccgcggtggtg

SEQ ID NO: 326013 - DNA, 75 bp, synthetic construct
  source 1..75: mol_type = other DNA
gcccgggacgcttctgacaatgggcaagttctgttgtatcgcgggacatctttgcgggactggcatctggagcat

SEQ ID NO: 326014 - DNA, 75 bp, synthetic construct
  source 1..75: mol_type = other DNA
attatcccctgtaaggttacagggtttgcaattactgaccgaaaatgtacaggccgcagaattattggtgacgtg

SEQ ID NO: 326015 - DNA, 75 bp, synthetic construct
  source 1..75: mol_type = other DNA
tctccggcattctgtatggcttcgatcctacatggatttactggatcgggtcggcgctggcgctactgctggtgg

SEQ ID NO: 326016 - DNA, 75 bp, synthetic construct
  source 1..75: mol_type = other DNA
agccagatggggatggcgattgcgccgtttgacaagccgcatccggtaatgcggattcagccgattgccattagt

SEQ ID NO: 326017 - DNA, 75 bp, synthetic construct
  source 1..75: mol_type = other DNA
gctggacggattaacggtacgcaatctgcaactctctatggatccgatgctcgatatgatggggatgcagatgct

SEQ ID NO: 326018 - DNA, 75 bp, synthetic construct
  source 1..75: mol_type = other DNA
atgcaacgtcgtgatttcttaaaatattccgtcgcgctgggtgtggcttcagccttgccgctgtggagccgcgca

SEQ ID NO: 326019 - DNA, 75 bp, synthetic construct
  source 1..75: mol_type = other DNA
ataacgggcgcggttttcaggggactgcggaaacctcagacgatggtgatgtatttgtcgaattcggtggcggta

SEQ ID NO: 326020 - DNA, 75 bp, synthetic construct
  source 1..75: mol_type = other DNA
ccaggggtcgcaaatcgccggcttcagcgccagctatatctgggatctgattgtccgctttatcaactggagcat

SEQ ID NO: 326021 - DNA, 75 bp, synthetic construct
  source 1..75: mol_type = other DNA
cgatgaggttcgtcacgtgacgcgctggaacgacactctcgacggtctggaagatgactgggcgataattacggg

SEQ ID NO: 326022 - DNA, 75 bp, synthetic construct
  source 1..75: mol_type = other DNA
aagaaatgcctgatggtcgtgatgagcttatttattttgatggcggcatgtatgagcttgatacgtcggctggct

SEQ ID NO: 326023 - DNA, 75 bp, synthetic construct
  source 1..75: mol_type = other DNA
gcgccaggaattaagcgaccgtaaatcatttggcgaagatgccgaacgcctggcgaataataaatggcttgataa

SEQ ID NO: 326024 - DNA, 75 bp, synthetic construct
  source 1..75: mol_type = other DNA
aaacatttggcgaagatgccgaacgcctggcgaataataaatggatggataaatttattgcggaggctgaaaaat

SEQ ID NO: 326025 - DNA, 75 bp, synthetic construct
  source 1..75: mol_type = other DNA
caactgggtgtgataaatgaacaggcggcagtgctggcacgtgatgcagggctaaacgtggtgatggatcgctgc

SEQ ID NO: 326026 - DNA, 75 bp, synthetic construct
  source 1..75: mol_type = other DNA
caactgggggtgattaatgagcaagcggcagtactggctcgggatgccggattaaatgtagtgatggatcgctgc

SEQ ID NO: 326027 - DNA, 75 bp, synthetic construct
  source 1..75: mol_type = other DNA
aggggtatggcacgctggcagacgttccggaaaaagtcgatatggtcgatgttttccggaattcagaagcggcgt

SEQ ID NO: 326028 - DNA, 75 bp, synthetic construct
  source 1..75: mol_type = other DNA
tgttactctactgtggttaatcttaaatcgccagtggaaactactaatgctgacctccataattattaccatcgc

SEQ ID NO: 326029 - DNA, 75 bp, synthetic construct
  source 1..75: mol_type = other DNA
tgacgtccatcgtcatttctgttgcagcggcgtgtgtatttgtctataaagctgatcatgctgataaagatagac

SEQ ID NO: 326030 - DNA, 75 bp, synthetic construct
  source 1..75: mol_type = other DNA
atctatcaagtttctcgtgctccaggaacatttaaagcactctataaaaataatcttttttatagtgtcatagca

SEQ ID NO: 326031 - DNA, 75 bp, synthetic construct
  source 1..75: mol_type = other DNA
ttactcaggacgctttagatactttgaagggacttaacggctttaaaattgatatcgcccgactattgagtatta

SEQ ID NO: 326032 - DNA, 75 bp, synthetic construct
  source 1..75: mol_type = other DNA
gtttaccgccgggaaacttacccgcgccagcgtctatcaccaggcggtgatcctggcgctgagtccgtttcataa

SEQ ID NO: 326033 - DNA, 75 bp, synthetic construct
  source 1..75: mol_type = other DNA
gccagtgtctatcaccaggcggtgatcctggcgctaagtccgtttcataatgccgtgtatcagccattgcaggac

SEQ ID NO: 326034 - DNA, 75 bp, synthetic construct
  source 1..75: mol_type = other DNA
caccatataatgcatattatataatcttactatcttttataggttattttgttatccgtggaaacgtagaacaaa

SEQ ID NO: 326035 - DNA, 75 bp, synthetic construct
  source 1..75: mol_type = other DNA
gaaatcaaccacctttaagatgatgtgtggcttgctggtgccgacctctggtcaggcgctggtgctggggatgga

SEQ ID NO: 326036 - DNA, 75 bp, synthetic construct
  source 1..75: mol_type = other DNA
atgaactgccgttgggttttaaacagcggctggcgctggcctgctcgctgatgcatgaaccggacattctgtttc

SEQ ID NO: 326037 - DNA, 75 bp, synthetic construct
  source 1..75: mol_type = other DNA
agcgtctatcaccaggcggtgatcctggcgctgagtccgtttcataatgccgtgtatcagccattgcaggcctga

SEQ ID NO: 326038 - DNA, 75 bp, synthetic construct
  source 1..75: mol_type = other DNA
ggcgggcgtggaaaagagcccgttcgtgctggtgtttgaaaaggtcggtattccttacgcggcggatatttttaa

SEQ ID NO: 326039 - DNA, 75 bp, synthetic construct
  source 1..75: mol_type = other DNA
aagaatatattatccccaatcttttgatgcaatggatcagtcggaacagcaatgagaatgttgttggtatagcct

SEQ ID NO: 326040 - DNA, 75 bp, synthetic construct
  source 1..75: mol_type = other DNA
aatctgatacgccacttacatcaagaagagatatgtttcatattccgttcagtcagcgtcactttgttagagcac

SEQ ID NO: 326041 - DNA, 75 bp, synthetic construct
  source 1..75: mol_type = other DNA
ccgcaaagctaacgtataaacttcaacaaactaatagttcttatcgctatgcaaatggtactcaaggcagcgcac

SEQ ID NO: 326042 - DNA, 75 bp, synthetic construct
  source 1..75: mol_type = other DNA
gatgcggtggtttcggcgttaaacgatctggtcagtcgcctgaccagcacgctggataacgaaaggttgtttacc

SEQ ID NO: 326043 - DNA, 75 bp, synthetic construct
  source 1..75: mol_type = other DNA
gcagtccgggcagccgctctctgcgctgcagtaccgcgcgccgtggtatccgctggtgccggtgcttggttttat

SEQ ID NO: 326044 - DNA, 75 bp, synthetic construct
  source 1..75: mol_type = other DNA
taatcgttcatccaatcacgccacaaccaattggcgtagtgacgatttatccagggatttctgctgacgtcgtgc

SEQ ID NO: 326045 - DNA, 75 bp, synthetic construct
  source 1..75: mol_type = other DNA
aggcttacgaaaaactgcttatcactctcaaccgggcagtactgacaggtgtgatgcctgatggctatggcgaag

SEQ ID NO: 326046 - DNA, 75 bp, synthetic construct
  source 1..75: mol_type = other DNA
cctctgaaagcctgggcgggcgaccagctgcgtgccgatcgttatgaactgcgtaatgccaatacctggggggtg

SEQ ID NO: 326047 - DNA, 75 bp, synthetic construct
  source 1..75: mol_type = other DNA
aggcttatgaaaagctgctaatcagccttaaccgtgccgtgctgacgggtgacatacctgatggctacggtgaag

SEQ ID NO: 326048 - DNA, 75 bp, synthetic construct
  source 1..75: mol_type = other DNA
cagacctggtgaagaagtattttgtagttttccgcgaagcctggtcaataaggaagtcgttagacgctcccaaac

SEQ ID NO: 326049 - DNA, 75 bp, synthetic construct
  source 1..75: mol_type = other DNA
atgtcggcaagtgaaacacttgctcagtattcgccgctggtcctgaacggcgaaggtctggtactaccggaactg

SEQ ID NO: 326050 - DNA, 75 bp, synthetic construct
  source 1..75: mol_type = other DNA
aaacatcgtccttcctgaaatggtcgagtcgctcaaagtagagaaaggcgtgttagccatgtatgccggtacaga

SEQ ID NO: 326051 - DNA, 75 bp, synthetic construct
  source 1..75: mol_type = other DNA
gcgatcttcattttgatgccggaatgacacttgcgcgtgtcgtgggcattttcgttgttccggtgggcagcattc

SEQ ID NO: 326052 - DNA, 75 bp, synthetic construct
  source 1..75: mol_type = other DNA
ctgaagaagtttggctacttttgcaatgtgacaagttatggcagagctggctggtggcgaagaattttgacgatt

SEQ ID NO: 326053 - DNA, 75 bp, synthetic construct
  source 1..75: mol_type = other DNA
gggcaacattaccccggttttgaaacggatattcacggcgcgaaacaggacgaagacggcgtttaccgcgtacga

SEQ ID NO: 326054 - DNA, 75 bp, synthetic construct
  source 1..75: mol_type = other DNA
tgacagcaatgcacagaccctgatgggcgggggacggctgactgtcaccgttatccgtgaaaacggggagggaac

SEQ ID NO: 326055 - DNA, 75 bp, synthetic construct
  source 1..75: mol_type = other DNA
atcatgataaacagcacattgcggaagtgatggatttcctcagcgtgaccgatcagttcttcctcaacctcgcga

SEQ ID NO: 326056 - DNA, 75 bp, synthetic construct
  source 1..75: mol_type = other DNA
tgcaggcgcgatgatccgcgcgggcagcatcgttacggctatgacccgcaacggcaatatgttcgggattcgggt

SEQ ID NO: 326057 - DNA, 75 bp, synthetic construct
  source 1..75: mol_type = other DNA
ggatataggctttgtttcgcccggacaggacgtcgttataaaagtcgagtcattcccttatactcgtcacggtta

SEQ ID NO: 326058 - DNA, 75 bp, synthetic construct
  source 1..75: mol_type = other DNA
cggggagctggagcgactcgaccagacgctgaacctgccgctggtggggtacacctggacccgcgatattcagtt

SEQ ID NO: 326059 - DNA, 75 bp, synthetic construct
  source 1..75: mol_type = other DNA
gtcacttactacggcaagctgggtgcagtcgagccagtgtacaaagaaaccatttcgtacgttgatggcatttaa

SEQ ID NO: 326060 - DNA, 75 bp, synthetic construct
  source 1..75: mol_type = other DNA
gacatttccagctggactaacaccagctttggcgctgcgggtactggcgcaaatccgaacggtaaaaactgggta

SEQ ID NO: 326061 - DNA, 75 bp, synthetic construct
  source 1..75: mol_type = other DNA
tgtaatgcaggactgtcagttgaggatatcaagcgccaggtgatggagaacagtgaagaggaaattgattatcag

SEQ ID NO: 326062 - DNA, 75 bp, synthetic construct
  source 1..75: mol_type = other DNA
caagacggcaagaaagtcgatttcacgctggaggcatacagtattcccggcgcgctggtgcaaaagttgatatcg

SEQ ID NO: 326063 - DNA, 75 bp, synthetic construct
  source 1..75: mol_type = other DNA
tggcgattccgcattaaacctgaaaggtcttgttaccctgaacggtgttcctgtcaacaacgctgccaaaacgtg

SEQ ID NO: 326064 - DNA, 75 bp, synthetic construct
  source 1..75: mol_type = other DNA
ggcatgaaactgaagtggaacatggacaccgacgaacaggtttatatcggtgataacgagctcggcgttgctggc

SEQ ID NO: 326065 - DNA, 75 bp, synthetic construct
  source 1..75: mol_type = other DNA
aatactttgacggacttaatctccatccagagagttgcgagaggatttttagcgcgatctgtattatctggtact

SEQ ID NO: 326066 - DNA, 75 bp, synthetic construct
  source 1..75: mol_type = other DNA
gcggagcaaagcagagcgttatcataatgcgtaccgtgaacaacagatagtgatagaacgtttgccgccagaaac

SEQ ID NO: 326067 - DNA, 75 bp, synthetic construct
  source 1..75: mol_type = other DNA
tgtccagcatcatcgtttcttctgcgggtaaccagtccctgttgacgtaccttcagaccaacaccatcagctatc

SEQ ID NO: 326068 - DNA, 75 bp, synthetic construct
  source 1..75: mol_type = other DNA
acatcgatgagcaggtttatatcggcgacagcgacatgggtatcaccggcctgttgaacctttcccaggtaacgc

SEQ ID NO: 326069 - DNA, 75 bp, synthetic construct
  source 1..75: mol_type = other DNA
cgcaaccaccgatccggatgtgattgttcaggatatcaacctggtactgtctgatggctgggttcgttctggtta

SEQ ID NO: 326070 - DNA, 75 bp, synthetic construct
  source 1..75: mol_type = other DNA
acagcgtgcgtcgcgagctgtctccccgtaccgcgcgtaaacacaaagctgagttcggccagttcatgacgcctt

SEQ ID NO: 326071 - DNA, 75 bp, synthetic construct
  source 1..75: mol_type = other DNA
ttgatacacctgagaaattcgaagccaaacgcgcggaacttgccgagcgtgaatgggcgcgaatgaaagaaaaca

SEQ ID NO: 326072 - DNA, 75 bp, synthetic construct
  source 1..75: mol_type = other DNA
gtgacaccctgatcgagcttggcgagtgggccatgcagcaaggaacgctcacgcaagacctgatcgatagcaagc

SEQ ID NO: 326073 - DNA, 75 bp, synthetic construct
  source 1..75: mol_type = other DNA
gtgacactctgatagagcttggcaagtgggctatgcaacaagaaactctcacgcaagaacatattgacgctaagc

SEQ ID NO: 326074 - DNA, 75 bp, synthetic construct
  source 1..75: mol_type = other DNA
caaggctttcagggatgacgatgtgttgcaggaaaatattatcatccgcctggagcgtggaggccttcaggaggc

SEQ ID NO: 326075 - DNA, 75 bp, synthetic construct
  source 1..75: mol_type = other DNA
gaagcgtctggttctctgctgcctgcttcggaagtgaaagtccttaaacgtgacggcgactggctgcaaattgaa

SEQ ID NO: 326076 - DNA, 75 bp, synthetic construct
  source 1..75: mol_type = other DNA
gtccacgttggcggcgataatatgtccgatcaacctaaaccgctgggcggtggcggtgaacgctatgcctgtggt

SEQ ID NO: 326077 - DNA, 75 bp, synthetic construct
  source 1..75: mol_type = other DNA
gatgccgtcatcgcgcctcgtctgaaatcactggatgaaatcaaagacaaagcgctgatggtccacgttggcggc

SEQ ID NO: 326078 - DNA, 75 bp, synthetic construct
  source 1..75: mol_type = other DNA
tgccacagtatgacgccagtgtatgaagaatataaaaagtcggcgcatttccagaatgcctccggggtacgcgcc

SEQ ID NO: 326079 - DNA, 75 bp, synthetic construct
  source 1..75: mol_type = other DNA
taactacgacgcgatggatcatgcgaagcagcatcctgaagcggcacgtcagatgaaggtagcagcgaaagataa

SEQ ID NO: 326080 - DNA, 75 bp, synthetic construct
  source 1..75: mol_type = other DNA
tctctgctgcctgcttcggaagtgaaagtccttaaacgtgacggcgactggctgcaaattgaaattaccggctgg

SEQ ID NO: 326081 - DNA, 75 bp, synthetic construct
  source 1..75: mol_type = other DNA
atgaaactcactgtgaccgggaacattaaacaccgaaccggcttcatacacttgccagtcggtcgcgtcagcgtg

SEQ ID NO: 326082 - DNA, 75 bp, synthetic construct
  source 1..75: mol_type = other DNA
atggctaaattaatttcgacgcgtgaactggcaacaattattactgcattgctggtaaaaccagaattactgggc

SEQ ID NO: 326083 - DNA, 75 bp, synthetic construct
  source 1..75: mol_type = other DNA
aaggagtattgccctccgccagacatcgtacaaaacagcccaatcagctttcctttgatgtcaggccattactct

SEQ ID NO: 326084 - DNA, 75 bp, synthetic construct
  source 1..75: mol_type = other DNA
tgagcatctttttgcacttgagcagtcggtggcatttttctatttttaccaggaaaagatccgtgaacgtgacga

SEQ ID NO: 326085 - DNA, 75 bp, synthetic construct
  source 1..75: mol_type = other DNA
caaaaactactggagcggggctgtcaggattctcccctagcgagacatatccagacaataccgtaggtgctgcat

SEQ ID NO: 326086 - DNA, 75 bp, synthetic construct
  source 1..75: mol_type = other DNA
caattatctgttcttttatattccggtgtcattatatcttagttattactatagatataatttttttaatctata

SEQ ID NO: 326087 - DNA, 75 bp, synthetic construct
  source 1..75: mol_type = other DNA
atgggggaggttaaaaaggatataaaaataacagtgattgcttttgttatcaattatttgttcttttatatcccg

SEQ ID NO: 326088 - DNA, 75 bp, synthetic construct
  source 1..75: mol_type = other DNA
ctcaattcttagcatgcaccacgaaccgcgccatgtacttatttacggtgctggagtgatcggctgtgaatatgc

SEQ ID NO: 326089 - DNA, 75 bp, synthetic construct
  source 1..75: mol_type = other DNA
caccacctttaactacccgacgatggcggaagcctatcgggtagcagcgctaaatggcttaaaccgcctgtttta

SEQ ID NO: 326090 - DNA, 75 bp, synthetic construct
  source 1..75: mol_type = other DNA
tgattacagcgggaatcggcatattcttgacgccgaagtcgcgaacagtgaggcagaggtaaactggcgttcctt

SEQ ID NO: 326091 - DNA, 75 bp, synthetic construct
  source 1..75: mol_type = other DNA
ctggcactaaaattcgttgccgaatgcggtactgacatgaatcgctggccggatgcgagccattttacctcgtgg

SEQ ID NO: 326092 - DNA, 75 bp, synthetic construct
  source 1..75: mol_type = other DNA
ttgtccattctcatgctgcgggcgttgatattggggccaaatttcacgttgtggccgtaccgcctgatgctgacg

SEQ ID NO: 326093 - DNA, 75 bp, synthetic construct
  source 1..75: mol_type = other DNA
tgccaacggccgcaccggtaataccgattcgctggcactgcataatattggtctggaaactgacagtcgtggtca

SEQ ID NO: 326094 - DNA, 75 bp, synthetic construct
  source 1..75: mol_type = other DNA
tggcgctggttgttgcaaccggcgcacaagctgccagtgaaaaagtcgagatgaacctcgtcacgtcgcaagggg

SEQ ID NO: 326095 - DNA, 75 bp, synthetic construct
  source 1..75: mol_type = other DNA
gactggatgaaaaccgcttcaatcagttgcagaatctggcaaaaatttatcttgagtttggcggggctctagcct

SEQ ID NO: 326096 - DNA, 75 bp, synthetic construct
  source 1..75: mol_type = other DNA
ggggtaaaattgcccgtcagcgtgacgttgctgagtgggcagtccatgccagtgaagaagattttcgtttcgcgc

SEQ ID NO: 326097 - DNA, 75 bp, synthetic construct
  source 1..75: mol_type = other DNA
atgaaaattttatcacctttggctttatgccttaccactgcactctgtgccggttgcacaagtgtgctgaaaagt

SEQ ID NO: 326098 - DNA, 75 bp, synthetic construct
  source 1..75: mol_type = other DNA
cagctccagtatctgcgtcacaacggcccggagcacgtactgacttacgcccctacccgttccggtaaaggtgtg

SEQ ID NO: 326099 - DNA, 75 bp, synthetic construct
  source 1..75: mol_type = other DNA
tgaacccgcagccgctaacggatctgtttcatggaatccgctcgatgagatccgtgtaggcactgaaaatgaagt

SEQ ID NO: 326100 - DNA, 75 bp, synthetic construct
  source 1..75: mol_type = other DNA
atgagaaagccgaataatgccgtagggccgcaggtccgttccaagaataaagccgttaaaggaaagctggtccct

SEQ ID NO: 326101 - DNA, 75 bp, synthetic construct
  source 1..75: mol_type = other DNA
tctttttcatcctgtagctcacatgtctgctaacaatcataatagaatgagagtgttagcagggtatgcgagaga

SEQ ID NO: 326102 - DNA, 75 bp, synthetic construct
  source 1..75: mol_type = other DNA
atgcaagtaaccgtggaatataatcaggatagttttgactattttttctccccggtttttgttgagtttcctgat

SEQ ID NO: 326103 - DNA, 75 bp, synthetic construct
  source 1..75: mol_type = other DNA
tggctttgatccgatcaaaaacgacggcgcgctgcacgccgtgctcggctatatgccgcagaaattcggtctgta

SEQ ID NO: 326104 - DNA, 75 bp, synthetic construct
  source 1..75: mol_type = other DNA
actttccgctgccgttggcctcaacagcgttgaatatgttcaccagcgccagcaacgcaggttacggaaaagaag

SEQ ID NO: 326105 - DNA, 75 bp, synthetic construct
  source 1..75: mol_type = other DNA
agttactggtgagtctgcaacaggaaaatggtccggtactgattggtcgcagcccacaaatacagcaactgagaa

SEQ ID NO: 326106 - DNA, 75 bp, synthetic construct
  source 1..75: mol_type = other DNA
tcggctctggagtgtgatcctaagtggttactactcgggggtgatgttgtcacgaatttcaactacggagcccga

SEQ ID NO: 326107 - DNA, 75 bp, synthetic construct
  source 1..75: mol_type = other DNA
tccttatgttgatgcaatcatggccgaccctgaaaggggcgcaggcgagctgtggatggaaatgacgcagtacgg

SEQ ID NO: 326108 - DNA, 75 bp, synthetic construct
  source 1..75: mol_type = other DNA
gtagagaatgaagatggttctcatgctcctgtttcgcaaccaatcatcattaacgctgctggatatccggtatat

SEQ ID NO: 326109 - DNA, 75 bp, synthetic construct
  source 1..75: mol_type = other DNA
aaggtcaaccgagagcatcacatgctttctgaacacgaaagttgctttttctacattgccgagttttgcgattcc

SEQ ID NO: 326110 - DNA, 75 bp, synthetic construct
  source 1..75: mol_type = other DNA
ctcagtcggcggggcgcacaaggctttattgtaccgatggcagtgagacctggtctgtattattgagtccggtct

SEQ ID NO: 326111 - DNA, 75 bp, synthetic construct
  source 1..75: mol_type = other DNA
atgaaacgttttagtctggctattctggcgctggttgttgcaaccggcgcacaagctgccagtgaaaaagtcgag

SEQ ID NO: 326112 - DNA, 75 bp, synthetic construct
  source 1..75: mol_type = other DNA
gccgatatacatcaccaacttccagttacagaaggtggattacaaccatctcggaaccgatattttcgacccgaa

SEQ ID NO: 326113 - DNA, 75 bp, synthetic construct
  source 1..75: mol_type = other DNA
aatcagggacaaattggtgaatacgatacagctattgccagtatcgccaaacgtgcggatgaagtgcaattcctg

SEQ ID NO: 326114 - DNA, 75 bp, synthetic construct
  source 1..75: mol_type = other DNA
atgagaaagcctaataacgctgtagggccgcaggtccgtaataaaaagaaaactgcgagagggaaactaatcccg

SEQ ID NO: 326115 - DNA, 75 bp, synthetic construct
  source 1..75: mol_type = other DNA
taaagcgcgtctgcgcccgctggttcgcatcatgctgaacatgattgtgcggttactggccgacaaaatggagtt

SEQ ID NO: 326116 - DNA, 75 bp, synthetic construct
  source 1..75: mol_type = other DNA
cagctgcagtatctgcgtcacaacggcccggagcacgttctgacatatgcacctacccgttcgggtaaaggtgtt

SEQ ID NO: 326117 - DNA, 75 bp, synthetic construct
  source 1..75: mol_type = other DNA
cttaagcatcctcaccgccagcagtgttccgctactggaaggtattcagactgctgccgccgtgtcggcaaatcg

SEQ ID NO: 326118 - DNA, 75 bp, synthetic construct
  source 1..75: mol_type = other DNA
cataaatggcgagaatcatccggtggtgggggctgccggtcgtgacatgatggaccgcccggaagaagaagccgg

SEQ ID NO: 326119 - DNA, 75 bp, synthetic construct
  source 1..75: mol_type = other DNA
ccatgcaggaagtacagcgcccgctgctgactgtggacgaatgcctgcgtatgcctggacctaaaaagaatgcag

SEQ ID NO: 326120 - DNA, 75 bp, synthetic construct
  source 1..75: mol_type = other DNA
ttatatcgacaggcaaatcgacgcggtaaaagcatcggggagtgaatatttagaagcactgctggcaacccgtgc

SEQ ID NO: 326121 - DNA, 75 bp, synthetic construct
  source 1..75: mol_type = other DNA
aaatgccatcgactggctttcccgcctgccggatcaaccgctggctggtaaaccggtattgattcagaccagctc

SEQ ID NO: 326122 - DNA, 75 bp, synthetic construct
  source 1..75: mol_type = other DNA
caacccgatcccacaatggagcaggcctttattcagttgatccacgactgggataaggagcatggcaatgagtaa

SEQ ID NO: 326123 - DNA, 75 bp, synthetic construct
  source 1..75: mol_type = other DNA
ggctggagatttttattggtcactgggaaatgcgccatcgcctgactaaccgcgaagaaggtgaaaaagtactgc

SEQ ID NO: 326124 - DNA, 75 bp, synthetic construct
  source 1..75: mol_type = other DNA
gctgcaaagctatgttgaaagccacatccaggaagataacggcctttgcttcgatctgctggatctcctgctaca

SEQ ID NO: 326125 - DNA, 75 bp, synthetic construct
  source 1..75: mol_type = other DNA
aaatagcgatgaagaaacgcagcctgaccccgaaaaagacgtcgaaatattccgccgtgcttacctgaacacgcc

SEQ ID NO: 326126 - DNA, 75 bp, synthetic construct
  source 1..75: mol_type = other DNA
cgtgcagcgaaccgaacccggattatccgcgctggagccgcaagcgtatcgaagaaacctgctgggaactgctga

SEQ ID NO: 326127 - DNA, 75 bp, synthetic construct
  source 1..75: mol_type = other DNA
cggcagcgacgttaccgactacgcggtgggcgacagcgtatgcggctacggcccgctttccgaaacggtcatcat

SEQ ID NO: 326128 - DNA, 75 bp, synthetic construct
  source 1..75: mol_type = other DNA
cgcgtgttgctgcgctggttgagtatgaagatcgggcgattttagccaatgaagtgaagatccgcgtgcgtttcg

SEQ ID NO: 326129 - DNA, 75 bp, synthetic construct
  source 1..75: mol_type = other DNA
ggatgaagcggaatattgcgaccgcatcggcctggtgtaccgcgggaaattaatcgccagcggcacaccggacga

SEQ ID NO: 326130 - DNA, 75 bp, synthetic construct
  source 1..75: mol_type = other DNA
tggcgttgaccctatctcacggcgcgaactgtggcagatggtgcatgagctggcgggcgaagggatgttaatcct

SEQ ID NO: 326131 - DNA, 75 bp, synthetic construct
  source 1..75: mol_type = other DNA
cgcgatcggtcaaattgccattcaactggcaaaacgcgctggcgcgtcggtggtgattggcgtcgatcctatcgc

SEQ ID NO: 326132 - DNA, 75 bp, synthetic construct
  source 1..75: mol_type = other DNA
ttctattccacaagagcatatcaaacctttaaaaaaggctatggaattgtcatcaattctatgtgaagattttaa

SEQ ID NO: 326133 - DNA, 75 bp, synthetic construct
  source 1..75: mol_type = other DNA
gggctatcaggcggcaaaacttttgcatcgcttattagataaagaagagatgccgttgcagcggattttggttcc

SEQ ID NO: 326134 - DNA, 75 bp, synthetic construct
  source 1..75: mol_type = other DNA
gagatatcgcaaatgtgcggttatccatcgctgcaatatttctactctgtttttaaaaaagcatatgacacgacg

SEQ ID NO: 326135 - DNA, 75 bp, synthetic construct
  source 1..75: mol_type = other DNA
cattgctgttcaatgctaataaagcctatgaccgtcaggtagtagaaggcgtaggggaatatttacaggcgtcac

SEQ ID NO: 326136 - DNA, 75 bp, synthetic construct
  source 1..75: mol_type = other DNA
agcaacaagcggtaagttcaaagggactgtagaagctactagttttattggtgatgtatgcaacatgggtgttgc

SEQ ID NO: 326137 - DNA, 75 bp, synthetic construct
  source 1..75: mol_type = other DNA
aattaactacgctattgatctgcagaccgatggcggcacctggcagacggtacttaataccagcgtaaccggcaa

SEQ ID NO: 326138 - DNA, 75 bp, synthetic construct
  source 1..75: mol_type = other DNA
tcaggggttagaaaccgcgccagagaactggcaacacgcgcaaaatcggctggcagactggctacaaacgctgcc

SEQ ID NO: 326139 - DNA, 75 bp, synthetic construct
  source 1..75: mol_type = other DNA
gtagataagatatatttattcccaaaacatgatagtacgatctattgggaatgttctttatcaaccaaaagtcgt

SEQ ID NO: 326140 - DNA, 75 bp, synthetic construct
  source 1..75: mol_type = other DNA
gcgctgggtgaccactgcctatcagtgggcttttgtggacagtggttttctcgactgggtccggcagcagtatgc

SEQ ID NO: 326141 - DNA, 75 bp, synthetic construct
  source 1..75: mol_type = other DNA
cctacacgggcgggaccatcgggatgcagcgttccgagcagggttatattccggtgtcaggtcatctacagcgcc

SEQ ID NO: 326142 - DNA, 75 bp, synthetic construct
  source 1..75: mol_type = other DNA
tatttatccctcatgactcacactttcttatactgcttattactctggttttattgctgggagcccttacgtttg

SEQ ID NO: 326143 - DNA, 75 bp, synthetic construct
  source 1..75: mol_type = other DNA
ggaagcgcgcctgctggcccctgaaggttttgtgatggtatttgttgcacgtatccgcaatcaattgaaatgggg

SEQ ID NO: 326144 - DNA, 75 bp, synthetic construct
  source 1..75: mol_type = other DNA
caggtaagaccggcaatgaagccgccccacaatggttgaataaagaggatgatatttctgaactggagtactaca

SEQ ID NO: 326145 - DNA, 75 bp, synthetic construct
  source 1..75: mol_type = other DNA
ccaaaccgtttgccgaaggttttaacctcggacgcgaagcgcatttcaataacgccaaaattgtcttctctcgcg

SEQ ID NO: 326146 - DNA, 75 bp, synthetic construct
  source 1..75: mol_type = other DNA
gttccaacgcttttaccagcatctcaatggggttccagaagtaattgtctcttcgggtgtgacgcctgtagggat

SEQ ID NO: 326147 - DNA, 75 bp, synthetic construct
  source 1..75: mol_type = other DNA
gactggtaaccagaaacaacatgaaatcattaaccacggaaacagcgctggatattctgattgcgtggctgcagg

SEQ ID NO: 326148 - DNA, 75 bp, synthetic construct
  source 1..75: mol_type = other DNA
ggccgctccgaaagataacacctggtacactggtgctaaactgggctggtcccagtaccatgacactggtttcat

SEQ ID NO: 326149 - DNA, 75 bp, synthetic construct
  source 1..75: mol_type = other DNA
atgcttgatagaggtgtctggctggaattcgacatgattggcctagacattaccttcccgaaagagggaatagcg

SEQ ID NO: 326150 - DNA, 75 bp, synthetic construct
  source 1..75: mol_type = other DNA
gacgctaccgaaacaccggcgacttctgccagctctcatcagttgccggaagacaatacagtgatacagagcgtg

SEQ ID NO: 326151 - DNA, 75 bp, synthetic construct
  source 1..75: mol_type = other DNA
acaggcactgaatatggggcgaattgtcgttgacattgatggtgttaatctcgctgaactgattaataaggccgc

SEQ ID NO: 326152 - DNA, 75 bp, synthetic construct
  source 1..75: mol_type = other DNA
gtgtttttggtggttaccaggttaacccgtatgttggttttgaaatgggttacgactggttaggtcgtatgccgt

SEQ ID NO: 326153 - DNA, 75 bp, synthetic construct
  source 1..75: mol_type = other DNA
agattgagccgcgttatctctatcagaaccagaaccgacagtacattccagcgcagtattttgtcagctctgtct

SEQ ID NO: 326154 - DNA, 75 bp, synthetic construct
  source 1..75: mol_type = other DNA
gcgacttttttgcattcgtggcaaaagttacagcctcacagaccgccgcaacaacagcccttcgtcgtctgcaga

SEQ ID NO: 326155 - DNA, 75 bp, synthetic construct
  source 1..75: mol_type = other DNA
tctgggtggtatggtatggcgtgcagacactaaatccaactttgatggtaaaaaccacgacaccggcgtttctcc

SEQ ID NO: 326156 - DNA, 75 bp, synthetic construct
  source 1..75: mol_type = other DNA
gcgatcactcctgaaatcgctacccgtctggaatatcagtggaccaacaacatcggtgacgcacacaccatcggc

SEQ ID NO: 326157 - DNA, 75 bp, synthetic construct
  source 1..75: mol_type = other DNA
gactgcctggctccggatcgtcgcgtagagatcgaagttaaaggcatcaaagacgttgtaactcagccgcaggct

SEQ ID NO: 326158 - DNA, 75 bp, synthetic construct
  source 1..75: mol_type = other DNA
ccgcgacctggtcagtgcggcaggcgccatactgacccgaatctacaaacccggcatagattatgcgaaggcggg

SEQ ID NO: 326159 - DNA, 75 bp, synthetic construct
  source 1..75: mol_type = other DNA
ctggggtaaatttggcgcgattgttgtggtcggtgtggtcctgatagtggcggtcgtctggctggccggaaaagc

SEQ ID NO: 326160 - DNA, 75 bp, synthetic construct
  source 1..75: mol_type = other DNA
attggcgtactgggtggggtggttacttggattgcagggcctaatacaggtgtattagcgatcgcgaaagctggt

SEQ ID NO: 326161 - DNA, 75 bp, synthetic construct
  source 1..75: mol_type = other DNA
aatgggctggagtgccatggcttggctctgtgatggcatttatgctagcaattggcgtactgggtggggtggtta

SEQ ID NO: 326162 - DNA, 75 bp, synthetic construct
  source 1..75: mol_type = other DNA
tggtggttggcgacattatcgagtgcggcagcgacgttaccgactacgcggtgggcgacagcgtatgcggctacg

SEQ ID NO: 326163 - DNA, 75 bp, synthetic construct
  source 1..75: mol_type = other DNA
gatcaaaacgctgaccggcaagcagggtgccgatgtgattatcgaaaccagcggctacgccgacgcgctgcaatc

SEQ ID NO: 326164 - DNA, 75 bp, synthetic construct
  source 1..75: mol_type = other DNA
gtggtgtccgtcgtattggtgcgtcagtggtgacgttattcactttattcagtctgatgccggcgtatgccgcac

SEQ ID NO: 326165 - DNA, 75 bp, synthetic construct
  source 1..75: mol_type = other DNA
gagcctatgcggcatttgagtgtgcgatggatcccaagctgtcaaaaaagccgctcatcatagccagcaataacg

SEQ ID NO: 326166 - DNA, 75 bp, synthetic construct
  source 1..75: mol_type = other DNA
gtcgatggtgttaatctcgctgaactgattaacaaagtcgctgaaaacggttattcactccgcgtggtggatgaa

SEQ ID NO: 326167 - DNA, 75 bp, synthetic construct
  source 1..75: mol_type = other DNA
agcttcggccagcgtcttaatacactcagcaagctgcatgaggcagtgtcattctttaccgcccgtgccgccgaa

SEQ ID NO: 326168 - DNA, 75 bp, synthetic construct
  source 1..75: mol_type = other DNA
tcacgcaggtttgcccgttcccgttaattgaagcgaaggcggcgatggcggaactggccagcggcgaccagctgg

SEQ ID NO: 326169 - DNA, 75 bp, synthetic construct
  source 1..75: mol_type = other DNA
caaaaccctcgctaaattatgcacctatgcgagcaaacgatgggcagctacaggcggggttgtagttttgactga

SEQ ID NO: 326170 - DNA, 75 bp, synthetic construct
  source 1..75: mol_type = other DNA
cctgtggtgtgggttgttcaagcaccaaaaccctcgctaaattatgcacctatgcgagcaaacgatgggcagcta

SEQ ID NO: 326171 - DNA, 75 bp, synthetic construct
  source 1..75: mol_type = other DNA
cctcgattctggtgccgattctgacttctgtctggtcgcgcaaagttaaagccagagcggcgaaaatcgaaatat

SEQ ID NO: 326172 - DNA, 75 bp, synthetic construct
  source 1..75: mol_type = other DNA
ttccttgattcctggcaaaaagtcggcccggaagaagctcggaagcgagcaaagcgttacctgacggcaatgccc

SEQ ID NO: 326173 - DNA, 75 bp, synthetic construct
  source 1..75: mol_type = other DNA
gcccggaggaagcacataagcgtgcaaaacgttatctgacggcaatgccagcctgggctcataaagcggagagtg

SEQ ID NO: 326174 - DNA, 75 bp, synthetic construct
  source 1..75: mol_type = other DNA
gacggcggtcattgtgacttcgattctggtgccaattcttacctctatctggtcacgtaaagtcaaagccagagc

SEQ ID NO: 326175 - DNA, 75 bp, synthetic construct
  source 1..75: mol_type = other DNA
ctggcggtgtggtttttctgcatgggggcgtcgatcaaattaagcgcgacgggaacggtgttgcgtaaatccggc

SEQ ID NO: 326176 - DNA, 75 bp, synthetic construct
  source 1..75: mol_type = other DNA
aaatcccaggggggatgatgctcatcccgttgttccttggcgcactgtgtcacaccttctcgccaggggcgggaa

SEQ ID NO: 326177 - DNA, 75 bp, synthetic construct
  source 1..75: mol_type = other DNA
aaccggtgttgattcagaccagctcaatgggcgtgattggcggcgcgcgctgtcagtatcacctgcgccagattc

SEQ ID NO: 326178 - DNA, 75 bp, synthetic construct
  source 1..75: mol_type = other DNA
atggttcatcaacattacggaacgcaaaccgttaatcgcggtgcggtcatgccaggaatgctggtcaaacgcaaa

SEQ ID NO: 326179 - DNA, 75 bp, synthetic construct
  source 1..75: mol_type = other DNA
ataccgccacggcgaccatctggcgcaaactggaaggaaatgacgaatacggcgatccgcttggctatgccgaac

SEQ ID NO: 326180 - DNA, 75 bp, synthetic construct
  source 1..75: mol_type = other DNA
ttcaggtgatctgacgtatgagcaggggcgttctgagatttttgcatactacacaaaatcagataccgccgggcc

SEQ ID NO: 326181 - DNA, 75 bp, synthetic construct
  source 1..75: mol_type = other DNA
gggcgttcagagattcttgcatactacactaaagcagatactgccgggcctgtaacagtgggagagatactggta

SEQ ID NO: 326182 - DNA, 75 bp, synthetic construct
  source 1..75: mol_type = other DNA
aaaatccacaaacagcttgaaagtattgcccgaagtcgtggtgtcctcccaaaaaaactgctgaatgaaatgatt

SEQ ID NO: 326183 - DNA, 75 bp, synthetic construct
  source 1..75: mol_type = other DNA
cactgtgccacaccttctcgccgggggcggggaaatattttggatcattcaccaacgggatgattaccggtacgg

SEQ ID NO: 326184 - DNA, 75 bp, synthetic construct
  source 1..75: mol_type = other DNA
gacaggtactgataattatcaaattaacggcactgataactatactgttaatgtagatagtggagcagttcaaaa

SEQ ID NO: 326185 - DNA, 75 bp, synthetic construct
  source 1..75: mol_type = other DNA
cagattatccagcaggccggtaactccgtactggcaaaagccaaccaggtaccgcagcaggttctgtctctgctg

SEQ ID NO: 326186 - DNA, 75 bp, synthetic construct
  source 1..75: mol_type = other DNA
caggttaatggcgataaaccctatatcgaaattatctgcatggattcagaagctgaaattcagaaagcagattaa

SEQ ID NO: 326187 - DNA, 75 bp, synthetic construct
  source 1..75: mol_type = other DNA
ttgaccctaacgcctgggtcgaacgctggaaggcggcgggccattaccaggccgaagcagcgttgttgcagtgca

SEQ ID NO: 326188 - DNA, 75 bp, synthetic construct
  source 1..75: mol_type = other DNA
tttgcgaatacgcccacgcgatgggtaacagtcttggcggcttcgctaaatactggcaggcgtttcgtcagtacc

SEQ ID NO: 326189 - DNA, 75 bp, synthetic construct
  source 1..75: mol_type = other DNA
attgaactgcctgaactgccgcagccggagagcgccggacaactctggctaacggtacgcgtagtgcaaccaaac

SEQ ID NO: 326190 - DNA, 75 bp, synthetic construct
  source 1..75: mol_type = other DNA
tatttatccgttttattgattctcgcggtgaactgttattgcgtgcatcagctatcaatggtgtggccaagacaa

SEQ ID NO: 326191 - DNA, 75 bp, synthetic construct
  source 1..75: mol_type = other DNA
caggttaatggcaatgaaccctatatcgaaattatttgcatggattcagaagctgaaatccagaaagcagattaa

SEQ ID NO: 326192 - DNA, 75 bp, synthetic construct
  source 1..75: mol_type = other DNA
caggttaatggcgatgaaccctatatcgaaattatttgtatggattcagaaactgaaattcagaaagcagattaa

SEQ ID NO: 326193 - DNA, 75 bp, synthetic construct
  source 1..75: mol_type = other DNA
atgactaaagaccatgcacaaggtgtatttatccgttttattgattttcgcggtgagttgttgttacgcgcatcc

SEQ ID NO: 326194 - DNA, 75 bp, synthetic construct
  source 1..75: mol_type = other DNA
tctgaacggcacgcgcctgaccgtagaacttccgtaccagactgtacacgaaatcattagcgaagctgaaaaggc

SEQ ID NO: 326195 - DNA, 75 bp, synthetic construct
  source 1..75: mol_type = other DNA
tatttattcgttttattgattttcgcggtgaactgttattacgcgcatcagctattgatggagtcgttccatccg

SEQ ID NO: 326196 - DNA, 75 bp, synthetic construct
  source 1..75: mol_type = other DNA
ggtgcggcaggttatccgttatgccgacacgtttgagcgcctggcggatgactacgccatcctgacgggagtgta

SEQ ID NO: 326197 - DNA, 75 bp, synthetic construct
  source 1..75: mol_type = other DNA
gacgggctggctcaggccgaagtgaagatcgacgagatttctgtgtcgatggacggcatgacgggcggggtgaag

SEQ ID NO: 326198 - DNA, 75 bp, synthetic construct
  source 1..75: mol_type = other DNA
agcagggcgctactaaaagatggctaagaagtccaaccatgattgtgacaaggggatcaggatcatttagttact

SEQ ID NO: 326199 - DNA, 75 bp, synthetic construct
  source 1..75: mol_type = other DNA
gttgtcagcgtttccgataacggggatggcactttctcaatcaccggcgcatggcacgacccggataaatatgcc

SEQ ID NO: 326200 - DNA, 75 bp, synthetic construct
  source 1..75: mol_type = other DNA
ccggtagcgaagatgatgcaatgctgctggccgatgtgccttatccgcagcgcaaatatcagcagatgggtctta

SEQ ID NO: 326201 - DNA, 75 bp, synthetic construct
  source 1..75: mol_type = other DNA
ggaagcttgataaaggggggacgtttgagaactacggttcgactgctggtgagggagccatgaaactgacaaatc

SEQ ID NO: 326202 - DNA, 75 bp, synthetic construct
  source 1..75: mol_type = other DNA
acaaggcatccatcaacagcctgaaccagacgttctccgactatcagcaggccaccgccacgcagataaacggca

SEQ ID NO: 326203 - DNA, 75 bp, synthetic construct
  source 1..75: mol_type = other DNA
cgttgtttcgtttgatgtcgggctggacggaaacattccgcagcctggctacatcatcgccgtggcagacgagct

SEQ ID NO: 326204 - DNA, 75 bp, synthetic construct
  source 1..75: mol_type = other DNA
cttcacctattcaagcagcaccacgaaaacccgctacaccacagcgctggtttcatggtcagacccgggtaacgc

SEQ ID NO: 326205 - DNA, 75 bp, synthetic construct
  source 1..75: mol_type = other DNA
atggcactttctcaatcaccggcgcatggcacgacccggataaatatgcccgcatcgataccggagccatcattg

SEQ ID NO: 326206 - DNA, 75 bp, synthetic construct
  source 1..75: mol_type = other DNA
gccgcaagggcggcagctcaagttcccgaacccctaccgaacagcctgatgatctgcaatctgtagcgaaggcaa

SEQ ID NO: 326207 - DNA, 75 bp, synthetic construct
  source 1..75: mol_type = other DNA
gattggtaattttatccagtcgaacaattatgttgctggttctgctggctggaagcttgataaaggggggacgtt

SEQ ID NO: 326208 - DNA, 75 bp, synthetic construct
  source 1..75: mol_type = other DNA
tggaccgcattgatgaggtgatcgtcaacgagaaagaggcaacggcgcgttcgctgctgagtttgcagactaacg

SEQ ID NO: 326209 - DNA, 75 bp, synthetic construct
  source 1..75: mol_type = other DNA
gatgaaatttacggcatgggcacgcgcgtggatgcgtccatggtggataagtgggcgctgtattcaatcgcccag

SEQ ID NO: 326210 - DNA, 75 bp, synthetic construct
  source 1..75: mol_type = other DNA
tcacccataacggcctctcgctggatgaggggctggtcactcaggttcttatctgccttttcaccgatgcccgtg

SEQ ID NO: 326211 - DNA, 75 bp, synthetic construct
  source 1..75: mol_type = other DNA
acaccacctgaaggctttgagtcctccggagctgaaaccgcactgggcgtggaagtgacgaaggcaaagccggtg

SEQ ID NO: 326212 - DNA, 75 bp, synthetic construct
  source 1..75: mol_type = other DNA
ctggcgcgccggggagcaggagcagacaccacctgaaggctttgagtcctccggggcggaaccgcactgggcgtg

SEQ ID NO: 326213 - DNA, 75 bp, synthetic construct
  source 1..75: mol_type = other DNA
ttaaaagttcgtcagcaacagggcgattgccctacgggacatgcagtcattactcttgcaggcgatcttcctgcc

SEQ ID NO: 326214 - DNA, 75 bp, synthetic construct
  source 1..75: mol_type = other DNA
agggtgatattaccaaactggccgttgatgttattgttaatgcggcaaatccatcattaatggggggcggcggtg

SEQ ID NO: 326215 - DNA, 75 bp, synthetic construct
  source 1..75: mol_type = other DNA
actattggtgctgattttcttataccagacaatcgtgagcatataataaataatgatattttcgtcattctttgt

SEQ ID NO: 326216 - DNA, 75 bp, synthetic construct
  source 1..75: mol_type = other DNA
cgcgatatttatctcgatggcaccgcacttgagaacgcagatggttcacagaacttcagcggtgtggcatgggag

SEQ ID NO: 326217 - DNA, 75 bp, synthetic construct
  source 1..75: mol_type = other DNA
atcagacgctctccgactatcagcaggccaccgccacgcagataaacggcatcacggcgaccgtgaacgggcata

SEQ ID NO: 326218 - DNA, 75 bp, synthetic construct
  source 1..75: mol_type = other DNA
gacaacggggactggataaacgttccggttaccagcgcgcagggtttctcggttcagggcatttattcgggcagc

SEQ ID NO: 326219 - DNA, 75 bp, synthetic construct
  source 1..75: mol_type = other DNA
gagcgcacgcatggtttaagcaacgaagaacgcctggagctctggacattaaaccaggaactggcgaaaaagtga

SEQ ID NO: 326220 - DNA, 75 bp, synthetic construct
  source 1..75: mol_type = other DNA
tattcagagaactggtcaacacttgtctctcccagccaggtctgaccaccgggcaacttttagagcactatcgtg

SEQ ID NO: 326221 - DNA, 75 bp, synthetic construct
  source 1..75: mol_type = other DNA
gccgtcaccacggcagccggaaatagcgtggctttgccgttcgtgatccagagcgggcagacattcatccgagcc

SEQ ID NO: 326222 - DNA, 75 bp, synthetic construct
  source 1..75: mol_type = other DNA
ttcatcaccagaagctcttgataccctgaatgagcttgccgcagcacttggtaatgaccctaactttgcgacaac

SEQ ID NO: 326223 - DNA, 75 bp, synthetic construct
  source 1..75: mol_type = other DNA
ggtattattgttcaagaaacaggaagtaattcagctgacaatatcggtggtatttattatcgaccggttcaatat

SEQ ID NO: 326224 - DNA, 75 bp, synthetic construct
  source 1..75: mol_type = other DNA
tatagcgcatggctgaatattggtggcgatagtcaggtctggacaaccgcgcaatttatttcgtggctggagagt

SEQ ID NO: 326225 - DNA, 75 bp, synthetic construct
  source 1..75: mol_type = other DNA
cgattagcggggtttataacgctaatattggtggagcatctacgttgattctccatttttatatgggagctggta

SEQ ID NO: 326226 - DNA, 75 bp, synthetic construct
  source 1..75: mol_type = other DNA
taacgtcagtcggtcgcgatattctggccaaaacaagcgtccttgctgttatccaataccttgatttaagagaac

SEQ ID NO: 326227 - DNA, 75 bp, synthetic construct
  source 1..75: mol_type = other DNA
cagccacaaaactgcaaacagcacgcaccattaatggggtttcatttgacggaacggctaatatttcgctgtcac

SEQ ID NO: 326228 - DNA, 75 bp, synthetic construct
  source 1..75: mol_type = other DNA
gaagcgtcgatcagccgcgcaatgacggcgttgatcagcgagcaacattacgcgcgagtgcgcaccttcaaacag

SEQ ID NO: 326229 - DNA, 75 bp, synthetic construct
  source 1..75: mol_type = other DNA
tgccctgcttaccgtcgggcgcgggcagcgtatggggctgtttgccggttccggcgtcggtaaaagtgtgctgct

SEQ ID NO: 326230 - DNA, 75 bp, synthetic construct
  source 1..75: mol_type = other DNA
ccgcagctggagggctatttgcaacaaggcatttttgaacgcgcggactgggaagagtctctccaggggctggag

SEQ ID NO: 326231 - DNA, 75 bp, synthetic construct
  source 1..75: mol_type = other DNA
atcaggacaggttatcgaccatcaggctgtgcagcgctgggcggacagcctcggtactgacgagccgttaccgtt

SEQ ID NO: 326232 - DNA, 75 bp, synthetic construct
  source 1..75: mol_type = other DNA
cgccgctacgggcgattaacccgcgccaccgggctggtgctggaagctaccggattacaactaccgctcggcgca

SEQ ID NO: 326233 - DNA, 75 bp, synthetic construct
  source 1..75: mol_type = other DNA
tataccgtgctcaccgaaggcgatgaccagcaggatccgattgctgactccgcgcgggcaatcctcgacggtcac

SEQ ID NO: 326234 - DNA, 75 bp, synthetic construct
  source 1..75: mol_type = other DNA
caacggtgcgcctggcacactggatacgctgaaagaaatagcggctgcgatcaataacgacccgaattacagcac

SEQ ID NO: 326235 - DNA, 75 bp, synthetic construct
  source 1..75: mol_type = other DNA
ggtattactggtgcattatggcgacggacatcggttggatttactaattttgcatgggtgaatacatccggtgat

SEQ ID NO: 326236 - DNA, 75 bp, synthetic construct
  source 1..75: mol_type = other DNA
aaacttatgttgcagtggggaacggtggcaacacaaaagggagttgatgctatatatgccttaccatttgctttt

SEQ ID NO: 326237 - DNA, 75 bp, synthetic construct
  source 1..75: mol_type = other DNA
tcttctcgcataccttggtttgggagaaacgatagataaagcctccggagctatgcagaaatcagctaatggata

SEQ ID NO: 326238 - DNA, 75 bp, synthetic construct
  source 1..75: mol_type = other DNA
gcaaagtgcgctttgtttatgccagatgcgacgctgacgcgtcttatctggcctacaaagggctaacgtgcaggt

SEQ ID NO: 326239 - DNA, 75 bp, synthetic construct
  source 1..75: mol_type = other DNA
agcgattttgtttccccgtgatggtgctgacattttccccgacgggtggctggaaaatatgacccgtcgggctga

SEQ ID NO: 326240 - DNA, 75 bp, synthetic construct
  source 1..75: mol_type = other DNA
acgtgtttttacaagtgcgaaacgtcagtgtggaatgctctcagccagtcaggcagcgcttttttctcaacgtgt

SEQ ID NO: 326241 - DNA, 75 bp, synthetic construct
  source 1..75: mol_type = other DNA
cagaaaaaccagaatggcgcggatattcctggaaaagataccttcactaaaaatattggtgcatgtcgcgctttt

SEQ ID NO: 326242 - DNA, 75 bp, synthetic construct
  source 1..75: mol_type = other DNA
ccgtacatatccgttcgcggcgggatactgattctgctaactggtctgaatgggcgcaggtctatacgtcaaaag

SEQ ID NO: 326243 - DNA, 75 bp, synthetic construct
  source 1..75: mol_type = other DNA
ctctcgcggcccttgcgactggtgcaaacaaactgccttattttactggtaaggatacggtagctcagactgatt

SEQ ID NO: 326244 - DNA, 75 bp, synthetic construct
  source 1..75: mol_type = other DNA
gtgggcttacttttaaaaatgactcaatccttgcctggattcgaaatactgactgggcgaagattggatttaaaa

SEQ ID NO: 326245 - DNA, 75 bp, synthetic construct
  source 1..75: mol_type = other DNA
aactataaatggggtctcgtttgatggttctaaaaatattgagctaacggcggaagatttaaatctacaggaatt

SEQ ID NO: 326246 - DNA, 75 bp, synthetic construct
  source 1..75: mol_type = other DNA
ggctcaaactctgccgataatattggtggtgtttattacagaccaattcaaaaaaatattaatggcacatggtat

SEQ ID NO: 326247 - DNA, 75 bp, synthetic construct
  source 1..75: mol_type = other DNA
gtaaacccaggctctattattctctccgctgagatgatgctgcgccatatgggttggactgaagccgcagacctg

SEQ ID NO: 326248 - DNA, 75 bp, synthetic construct
  source 1..75: mol_type = other DNA
aacacaaatatggggagcgccgttaatgaaatcaaaacggtttatccccgctggcgcggggaacaccgccgcgga

SEQ ID NO: 326249 - DNA, 75 bp, synthetic construct
  source 1..75: mol_type = other DNA
ggaacacttgttgataaagtggcgcgccaggtgcgtttacggtttatccccgctggcgcggggaacaccggtcgt

SEQ ID NO: 326250 - DNA, 75 bp, synthetic construct
  source 1..75: mol_type = other DNA
tccccgctggcgcggggaacactcgatcaggcggttttgttcttccagcgacgccggtttatccccgctggcgcg

SEQ ID NO: 326251 - DNA, 75 bp, synthetic construct
  source 1..75: mol_type = other DNA
gtgggtgaacggcgtgctggagcagggcaaaggcgcacaggatgacattctgatgacggtcatgctgtggcgtct

SEQ ID NO: 326252 - DNA, 75 bp, synthetic construct
  source 1..75: mol_type = other DNA
aggttcgctacaggtggcaaaggctactgattcagagaatgaatttgaagttctctatatcaaattatttattga

SEQ ID NO: 326253 - DNA, 75 bp, synthetic construct
  source 1..75: mol_type = other DNA
gcgcggggaacacccgttcatattcgtttcctcgtggcgcgatctaggtttatccccgctggcgcggggaacacg

SEQ ID NO: 326254 - DNA, 75 bp, synthetic construct
  source 1..75: mol_type = other DNA
tatccccgctggcgcggggaacactggctctgcaacagcagcacccatgaccacgtcggtttatccccgctggcg

SEQ ID NO: 326255 - DNA, 75 bp, synthetic construct
  source 1..75: mol_type = other DNA
ccggtttatccccgctggcgcggggaacactgttcggcggggcggtagtaccactgttttttcggtttatccccg

SEQ ID NO: 326256 - DNA, 75 bp, synthetic construct
  source 1..75: mol_type = other DNA
ggtttatccccgctggcgaggggaactctcatttcccatgcaaaatgctgcattcctggccggtttatccccgct

SEQ ID NO: 326257 - DNA, 75 bp, synthetic construct
  source 1..75: mol_type = other DNA
tatccccgctggcgcggggaacaccgaatcacgccccgctttttaccgcgtcagcgcggtttatccccgctggcg

SEQ ID NO: 326258 - DNA, 75 bp, synthetic construct
  source 1..75: mol_type = other DNA
cgcggggaacacatttgtcgccgtatgagttttacgcgccgtctcggtttatccccgctggcgcggggaacacgg

SEQ ID NO: 326259 - DNA, 75 bp, synthetic construct
  source 1..75: mol_type = other DNA
tgacgctgcaatgtccttttcctgggcgtcccggtttatccccgctggcgcggggaacacggcagatcgcagcgt

SEQ ID NO: 326260 - DNA, 75 bp, synthetic construct
  source 1..75: mol_type = other DNA
cttcgaacgtctgatggaaggcgctaagctgctgaaatgctcagagtttggtgatgcgatcatcaagaacatgta

SEQ ID NO: 326261 - DNA, 75 bp, synthetic construct
  source 1..75: mol_type = other DNA
aatttacaccggtgaaaaatccacacaggtttatggtcaggatgtctggctacctgctgaaacccttgatctgat

SEQ ID NO: 326262 - DNA, 75 bp, synthetic construct
  source 1..75: mol_type = other DNA
cttcgaacgtctgatggaaggtgctaaactgctgaaatgcagcgagtttggtgatgcgatcatcaagaacatgta

SEQ ID NO: 326263 - DNA, 75 bp, synthetic construct
  source 1..75: mol_type = other DNA
ccgctgagatgatgctgcgccatatgggctggaccgaagcggctgacctgattgttaaaggtatggaaggcgcaa

SEQ ID NO: 326264 - DNA, 75 bp, synthetic construct
  source 1..75: mol_type = other DNA
gggttggaccgaagcggctgatttaattgttaaaggtatggaaggcgcaatcaatgcgaagaccgtaacctatga

SEQ ID NO: 326265 - DNA, 75 bp, synthetic construct
  source 1..75: mol_type = other DNA
tggttcgtgcagcgatcgaatacgcaattgctaacgatcgtgactctgtgaccctggtgcacaaaggcaacatca

SEQ ID NO: 326266 - DNA, 75 bp, synthetic construct
  source 1..75: mol_type = other DNA
atccccctatgtctatccatttatgctgggattcagtgattgataaaaaagtgtatgaaacctggataacgctgg

SEQ ID NO: 326267 - DNA, 75 bp, synthetic construct
  source 1..75: mol_type = other DNA
ccagtatctggcgaagtatgtgcgcggttcgaacggtatggatcacgtccagcgcatcaagatcctcaaactgat

SEQ ID NO: 326268 - DNA, 75 bp, synthetic construct
  source 1..75: mol_type = other DNA
agcggcggctatacccataaattcttccgcgtggcgaaaagtgccgacgacctgcgccagcaacgcgacgccatc

SEQ ID NO: 326269 - DNA, 75 bp, synthetic construct
  source 1..75: mol_type = other DNA
ttcaccgaggaggtcgcactcgcggccatgcgcgctcacgctgccggtgaatctgtggatatccgcctgctgacg

SEQ ID NO: 326270 - DNA, 75 bp, synthetic construct
  source 1..75: mol_type = other DNA
tgatggtgttcgggattattaccggcacggctcatgcgtcatcgaaattggaaatcaccgatcccagagcggcga

SEQ ID NO: 326271 - DNA, 75 bp, synthetic construct
  source 1..75: mol_type = other DNA
tgtatgaacctgaacggtgactacatttctgatgccctggcagcgcaggttggcggtatcggtatcgcccctggc

SEQ ID NO: 326272 - DNA, 75 bp, synthetic construct
  source 1..75: mol_type = other DNA
tggcggtatcggtatcgcccctggtgcaaacatcggtgacgaatgcgcactgtttgaagccacccacggtacagc

SEQ ID NO: 326273 - DNA, 75 bp, synthetic construct
  source 1..75: mol_type = other DNA
gctcttcgggtggtttaattatttatacgaaaaacgcttcctgttctgacatgatggattcatggaaaacattct

SEQ ID NO: 326274 - DNA, 75 bp, synthetic construct
  source 1..75: mol_type = other DNA
gcactggtactgtagacagtgcaagtggtgggttaattatatatacgcgtaataaaaaatgtaatgaaatgatga

SEQ ID NO: 326275 - DNA, 75 bp, synthetic construct
  source 1..75: mol_type = other DNA
caacccacagctacctgcagtcgtttcctgtcgattacatcaaactcgataaagggtttgtacaaatggtcggcg

SEQ ID NO: 326276 - DNA, 75 bp, synthetic construct
  source 1..75: mol_type = other DNA
tccttggagtgagggtaataagataagatatgatctgttaggtaaagcaatgcaaactgctgggattgatagtgg

SEQ ID NO: 326277 - DNA, 75 bp, synthetic construct
  source 1..75: mol_type = other DNA
gcacttgctcacggagagttcagaccttattttcagcccatcatttccgctaaaaatcaccagctgaccggctgc

SEQ ID NO: 326278 - DNA, 75 bp, synthetic construct
  source 1..75: mol_type = other DNA
agccagatcagagctaatttcgcacttggctatatagaaaacattctcaatcagaacaacagcatcagcccggaa

SEQ ID NO: 326279 - DNA, 75 bp, synthetic construct
  source 1..75: mol_type = other DNA
catagccttaatcctgttgcacattttttaccagatcaatttcatattgggatcaatatttcaccagcgcatttt

SEQ ID NO: 326280 - DNA, 75 bp, synthetic construct
  source 1..75: mol_type = other DNA
atgatccctgttgccatcttcggtggaatactcacagcctttctgctgtcccgccgtcgtccatcttccccgctc

SEQ ID NO: 326281 - DNA, 75 bp, synthetic construct
  source 1..75: mol_type = other DNA
cagagttaatttcgcacttggctatatagaaaacattctcaatcagaacaacagcatcagcccggaagcagaaca

SEQ ID NO: 326282 - DNA, 75 bp, synthetic construct
  source 1..75: mol_type = other DNA
tttacttctgaataactgtaacgcagatactcagcgtaaattaagcaatctactgctgaaacgccctcaacttcg

SEQ ID NO: 326283 - DNA, 75 bp, synthetic construct
  source 1..75: mol_type = other DNA
ttgggaaacacggtcctgtcagccagcggaaaaaatgtcactctgctcccggacgacagcggcatacaaaaagaa

SEQ ID NO: 326284 - DNA, 75 bp, synthetic construct
  source 1..75: mol_type = other DNA
ttcgctggcatcaccccgtcagcggaattatcccaccagatcagtttatcccgctggcagagtccaccggattaa

SEQ ID NO: 326285 - DNA, 75 bp, synthetic construct
  source 1..75: mol_type = other DNA
acattgccaatgactggcgatttaaacttagatgggcataatattaacaatgtcgccgcgctcaatgccactggc

SEQ ID NO: 326286 - DNA, 75 bp, synthetic construct
  source 1..75: mol_type = other DNA
tatttttatcacgatacaaggtaaatgcacgatacctaacagtgatacgggggcatgttcttgtccggggtctat

SEQ ID NO: 326287 - DNA, 75 bp, synthetic construct
  source 1..75: mol_type = other DNA
tgcctttagaacatcattttttaaatcaatgctagctttccgcgactcaataaattatatcgacgtcagatatta

SEQ ID NO: 326288 - DNA, 75 bp, synthetic construct
  source 1..75: mol_type = other DNA
gttctccaaatggtgttgtaggaagaacaccagaaggtaaagttatttcttgtgttaatggagtatggagcggat

SEQ ID NO: 326289 - DNA, 75 bp, synthetic construct
  source 1..75: mol_type = other DNA
aggaagcggtattggctgataatgtcgggacacagattaaacagcttggagaagcggttaaccgctatatcagta

SEQ ID NO: 326290 - DNA, 75 bp, synthetic construct
  source 1..75: mol_type = other DNA
acaaggttggatgctaacaggttcggatgcttgtacggaagatgacgataggtgcacaatagataatcttaaatg

SEQ ID NO: 326291 - DNA, 75 bp, synthetic construct
  source 1..75: mol_type = other DNA
taatcgctgaatatgatgaacaacgttgtagtggtagtaagaacgagcattgttatagtaattacagaaggttat

SEQ ID NO: 326292 - DNA, 75 bp, synthetic construct
  source 1..75: mol_type = other DNA
tccccggagctgttgcttactgttcaggctcagaaaaagttgtaggtggtggtggtcagtgtagtactgccgaag

SEQ ID NO: 326293 - DNA, 75 bp, synthetic construct
  source 1..75: mol_type = other DNA
atgctctcctaatggtgttgtaggaagaacaccagaaggtaaagttatttcttgtgttaatggagtatggagcgg

SEQ ID NO: 326294 - DNA, 75 bp, synthetic construct
  source 1..75: mol_type = other DNA
atctgctggaaattatacaacagtattacaagttaatagaaataccaaaatagatcaaaggcttggtttaatggg

SEQ ID NO: 326295 - DNA, 75 bp, synthetic construct
  source 1..75: mol_type = other DNA
gcgaatgtaggatggggatgttctcctaatggattacaaggaagaacgtcagaaggggctattttatcttgtgtt

SEQ ID NO: 326296 - DNA, 75 bp, synthetic construct
  source 1..75: mol_type = other DNA
acaaatgaaacagatcggtgaagcagttaatggctatataaatatccgttatgataaattatcaaccttatccaa

SEQ ID NO: 326297 - DNA, 75 bp, synthetic construct
  source 1..75: mol_type = other DNA
atggatgttagaaatgagggttacaagttggaaagcaggtgttgttacatgggcaagatcgtcttgttttgatta

SEQ ID NO: 326298 - DNA, 75 bp, synthetic construct
  source 1..75: mol_type = other DNA
atgtttcccagattattaaacaaaaaacagactcaagctatggtggcaggtagcctgatatttctgttcattatt

SEQ ID NO: 326299 - DNA, 75 bp, synthetic construct
  source 1..75: mol_type = other DNA
acaacagcacagaaaacagcggcgagcagctggcatctgaagcgcttcgctcttatatgtccatcccccctaccc

SEQ ID NO: 326300 - DNA, 75 bp, synthetic construct
  source 1..75: mol_type = other DNA
agctcgtcattagctaaaaatctgacaccggcaaggctgaaagcaagccgcgccggtgttatggcaaatcccagc

SEQ ID NO: 326301 - DNA, 75 bp, synthetic construct
  source 1..75: mol_type = other DNA
acaacagcacagaaaacagcggtgggcagctggcgtctgaagcactccgctcttacatgtctatcccccctaccc

SEQ ID NO: 326302 - DNA, 75 bp, synthetic construct
  source 1..75: mol_type = other DNA
cccggcatgatttttctcttggagacgatgaatatgttcttgagtttatcaaagataaaaaatatccctatggca

SEQ ID NO: 326303 - DNA, 75 bp, synthetic construct
  source 1..75: mol_type = other DNA
tacgaggttcactatggcttgcatcgaacaggaagtgatgattttgtctgggggagtaacagtcgtttaacccca

SEQ ID NO: 326304 - DNA, 75 bp, synthetic construct
  source 1..75: mol_type = other DNA
ggaagcaagaaagatgggagataagtacgaggttcactatggctcgcatcgaacaggaagtgatgattttgtctg

SEQ ID NO: 326305 - DNA, 75 bp, synthetic construct
  source 1..75: mol_type = other DNA
cacccgcctggagaaccagcctgtgcagggtgaagtatcgtctccggtaatccttccggctcaggcactccggtc

SEQ ID NO: 326306 - DNA, 75 bp, synthetic construct
  source 1..75: mol_type = other DNA
caggaaatggtggataactggcagaagagtgtaaggagtcgtgcgctcccggaagaggcgatgacgggctggagc

SEQ ID NO: 326307 - DNA, 75 bp, synthetic construct
  source 1..75: mol_type = other DNA
tgatatgtatttaatgtcattgtgtaataataatattattgcaaacagcacatatagttggtggggggcatggct

SEQ ID NO: 326308 - DNA, 75 bp, synthetic construct
  source 1..75: mol_type = other DNA
tccggtcagcagataacgcgactgacagaattaccgccggcatacaacctgcaacgcagtgcgcagctgctgcag

SEQ ID NO: 326309 - DNA, 75 bp, synthetic construct
  source 1..75: mol_type = other DNA
atgacttctgaagtgaaactgaaaaccggtggtgaccccaggtcattaccggattatgctgccctgcgcgatgaa

SEQ ID NO: 326310 - DNA, 75 bp, synthetic construct
  source 1..75: mol_type = other DNA
aagaggcgatggcgggctggaacgaaggcatgacccgcttacagcagctggctgagcgcctgaaccgtctggatg

SEQ ID NO: 326311 - DNA, 75 bp, synthetic construct
  source 1..75: mol_type = other DNA
gcgatccggcttccgcactgcttgaagtgctggatccagaacagaacgtggcgttcagcgaccactatctggaag

SEQ ID NO: 326312 - DNA, 75 bp, synthetic construct
  source 1..75: mol_type = other DNA
tggtgtatgtgaatactaaaggaatggacgatccggtacaggagctgcgggcgctgacaggagatgccgggttcg

SEQ ID NO: 326313 - DNA, 75 bp, synthetic construct
  source 1..75: mol_type = other DNA
acgctgacaggagatgccgggttcgatgacgtgtttgtctatgcggcggtgccttcggtcgttgagatggctgat

SEQ ID NO: 326314 - DNA, 75 bp, synthetic construct
  source 1..75: mol_type = other DNA
attaacctgggctgcgtattaccgtatcacggatcttattttgctgcggcgtctctggcagagccgatgtgctgc

SEQ ID NO: 326315 - DNA, 75 bp, synthetic construct
  source 1..75: mol_type = other DNA
tttctgacagcgtttgtttatccacctggaaagcggcgttactcggtagtgaacataaacgcgtccccgacgatt

SEQ ID NO: 326316 - DNA, 75 bp, synthetic construct
  source 1..75: mol_type = other DNA
ctgcgtattaccgtatcacggctcttattttgctgcggcgtcgctggcagagcctatgtgctgcattattggtgc

SEQ ID NO: 326317 - DNA, 75 bp, synthetic construct
  source 1..75: mol_type = other DNA
cccgacgatttagaaaatcatccggtcattaccgggcatgaatgtgccggggttattgtcgaagtgggtaaaaat

SEQ ID NO: 326318 - DNA, 75 bp, synthetic construct
  source 1..75: mol_type = other DNA
cagaaactgaaaatgatgtctccgatgtcggcagaagcgaccgtagtgcgtggttatatcgactggatggtacag

SEQ ID NO: 326319 - DNA, 75 bp, synthetic construct
  source 1..75: mol_type = other DNA
ttttttttgaagcaattgaagcatttaatagattcacggccgccgggctaaagatagcttgccctgcagcaatct

SEQ ID NO: 326320 - DNA, 75 bp, synthetic construct
  source 1..75: mol_type = other DNA
gtcattgccgatctggatattcatccggtgaagcgtattgaggaagttctgactcttgcgctgcaaaatgaaccc

SEQ ID NO: 326321 - DNA, 75 bp, synthetic construct
  source 1..75: mol_type = other DNA
atatgactcagaaacaggaatatttaaatggctaaaaacaaattcagtagtaagagtaaaaggtagtattgctgg

SEQ ID NO: 326322 - DNA, 75 bp, synthetic construct
  source 1..75: mol_type = other DNA
ttagttggcgctggtgctaccgttagctttacattgggtaaaggtagtttgcattatttcaaattcaggagaatg

SEQ ID NO: 326323 - DNA, 75 bp, synthetic construct
  source 1..75: mol_type = other DNA
cggtttgaaagaaaaactgctggcagcgcaccgcggcgggattaaaacagtgttaattccgtttgagaacaaacg

SEQ ID NO: 326324 - DNA, 75 bp, synthetic construct
  source 1..75: mol_type = other DNA
ggaacaacaggcggctcagggagacagggctgcagtatcgcagttacgtggctgggattatcgtgatcgtcgctc

SEQ ID NO: 326325 - DNA, 75 bp, synthetic construct
  source 1..75: mol_type = other DNA
gacgtcaggagctggcacaggatgagattaacccggacgtcctggcgatgagcggccatatcgccagacgctgca

SEQ ID NO: 326326 - DNA, 75 bp, synthetic construct
  source 1..75: mol_type = other DNA
agaatcagagaaggaaaagcttgcgcacctgatcagaactgggcgtagatatggagtttccgtcgctattgtccc

SEQ ID NO: 326327 - DNA, 75 bp, synthetic construct
  source 1..75: mol_type = other DNA
gtgagcagaagcgggtacgtatccccgccatgaaagtcagcgaatggggccactgctccgcgcgcttgaaattga

SEQ ID NO: 326328 - DNA, 75 bp, synthetic construct
  source 1..75: mol_type = other DNA
aggaatgggttttgaaccggaaggctcatatcaacagtttaatgatgtatttgcggaaatggtggcctggcataa

SEQ ID NO: 326329 - DNA, 75 bp, synthetic construct
  source 1..75: mol_type = other DNA
ggcttccggcgcgatcctgagattcgtcgtgagcgccgtgaagcccgtgcagctgcgcgggaagatttgcgtgcg

SEQ ID NO: 326330 - DNA, 75 bp, synthetic construct
  source 1..75: mol_type = other DNA
gccagctgcgtgagcggatgaatgttgccgcactcagtcagcaggacaacggggaggacgacctggcacagaacg

SEQ ID NO: 326331 - DNA, 75 bp, synthetic construct
  source 1..75: mol_type = other DNA
gccacgtctggtgtttgatgtgcagcaggaagccgacattaagagtgtggcagaagccgtcagcgtgctggttaa

SEQ ID NO: 326332 - DNA, 75 bp, synthetic construct
  source 1..75: mol_type = other DNA
gatggtggactgggcagagcggaccacctcaaaagccattcttggcagcacgttaaccacacaggcagacggtaa

SEQ ID NO: 326333 - DNA, 75 bp, synthetic construct
  source 1..75: mol_type = other DNA
atagtaacacttacagagatggaactcagccagttcaggatagtgagaatcgctgggaacctccaacaccggtgt

SEQ ID NO: 326334 - DNA, 75 bp, synthetic construct
  source 1..75: mol_type = other DNA
cgtgatcgccagaacgcttggacacgcggaaaaaaacaaacttttcgcgagtatgtcgcgcagacagcggtcgct

SEQ ID NO: 326335 - DNA, 75 bp, synthetic construct
  source 1..75: mol_type = other DNA
ggacatggaggacatcatcctcaacgggatgagcagtgtcggttacggcttcagctgtcaggaaatcagctgggc

SEQ ID NO: 326336 - DNA, 75 bp, synthetic construct
  source 1..75: mol_type = other DNA
ggcggtcatatcgccagacgctgcagtgagcggaagcgggtgcgtatccccgccatgaaagtcagcgaatggggc

SEQ ID NO: 326337 - DNA, 75 bp, synthetic construct
  source 1..75: mol_type = other DNA
tactcaacctgcgcccgtcaccagagtttgaacgctggctggaaagcatgggcattatggcaaacggtcgcctga

SEQ ID NO: 326338 - DNA, 75 bp, synthetic construct
  source 1..75: mol_type = other DNA
tgatctacggcgcgaagaaaatgccggtaatcaaaaaggccaatacaactattggtattccgggcaccttcagcg

SEQ ID NO: 326339 - DNA, 75 bp, synthetic construct
  source 1..75: mol_type = other DNA
caacgcggacctgatctacggcgcgaagaaaatgccggtaatcaaaaaggccaataccaccatcggtattccggg

SEQ ID NO: 326340 - DNA, 75 bp, synthetic construct
  source 1..75: mol_type = other DNA
atgggaaagagtaagaagaaccgcgctgcgtcgcagaaccagacccagcataaaagccagacttcagccgaagca

SEQ ID NO: 326341 - DNA, 75 bp, synthetic construct
  source 1..75: mol_type = other DNA
atgggtaagcaaaaatcccgtaaagccgctgcgcagaaggccagcaagccacaacaacttaccgccagcgcaccg

SEQ ID NO: 326342 - DNA, 75 bp, synthetic construct
  source 1..75: mol_type = other DNA
catcacagctcaccgatttacgttaagcgcaacgtgctagcgagcacctacattccgcacccgttgctgtcccgt

SEQ ID NO: 326343 - DNA, 75 bp, synthetic construct
  source 1..75: mol_type = other DNA
atgaaaaaacaacagaagaaacccgccacaacgaccgccagcgcaccgcaaaaaatggaggcattcacctttggc

SEQ ID NO: 326344 - DNA, 75 bp, synthetic construct
  source 1..75: mol_type = other DNA
gctggcgtttgaaaacccgctcagtcaccactttgctcataacgatttgttgctggctgacgatgccaccgcatt

SEQ ID NO: 326345 - DNA, 75 bp, synthetic construct
  source 1..75: mol_type = other DNA
aactacatcgcctccgcacggtgtcttgccatcaccgggactcacctttctcatccgcagacccgcgaggcggtg

SEQ ID NO: 326346 - DNA, 75 bp, synthetic construct
  source 1..75: mol_type = other DNA
gacggcattaaaattatcccgctcagtgaagtggcaacgaaggacgatttttttaatatcaaaaaagccagcgcc

SEQ ID NO: 326347 - DNA, 75 bp, synthetic construct
  source 1..75: mol_type = other DNA
aatattgtgcgcggtctgcctgttcctggcggacggcttggtgtgaaaatttacgaaataacgcatggcgggcag

SEQ ID NO: 326348 - DNA, 75 bp, synthetic construct
  source 1..75: mol_type = other DNA
cggaagccattaacgtggatatccggccggaaaaagtggcagaaacggagagtctgaaacagtacgcctgccgtc

SEQ ID NO: 326349 - DNA, 75 bp, synthetic construct
  source 1..75: mol_type = other DNA
taacgactgtggacggcgagccgtcgcgcattatccgggcatggtgtactgggattataactggcgaaaacaggg

SEQ ID NO: 326350 - DNA, 75 bp, synthetic construct
  source 1..75: mol_type = other DNA
ttacaaccgcaaggtaaactgttgttcagtgaaatcaactggcttgctggtcattcgccggatcaagttcagtaa

SEQ ID NO: 326351 - DNA, 75 bp, synthetic construct
  source 1..75: mol_type = other DNA
tcgatggcaggcacaccctgcggcttttacaaccgcaaggtaaactgttgttcagtgaaatcaactggcttgctg

SEQ ID NO: 326352 - DNA, 75 bp, synthetic construct
  source 1..75: mol_type = other DNA
agccaagtgagctcttttataggttaaatcaaacggtaaaacttacatcatctgaagctagaaatgccatcttcg

SEQ ID NO: 326353 - DNA, 75 bp, synthetic construct
  source 1..75: mol_type = other DNA
aaataccgcgaggaaatcagattaacatccgggcaactgatgaggaaagagccgttattgattatgctgcgagcc

SEQ ID NO: 326354 - DNA, 75 bp, synthetic construct
  source 1..75: mol_type = other DNA
aacagctacgacgcgcagcagaactggtaatggataatagccgggccgctgaaacagaagcgatgctgatgcgtc

SEQ ID NO: 326355 - DNA, 75 bp, synthetic construct
  source 1..75: mol_type = other DNA
tgctcgccacgcaaatcctgttattagtcgccattgcggcgatgggttttctcgaaccaggcacccaactccgct

SEQ ID NO: 326356 - DNA, 75 bp, synthetic construct
  source 1..75: mol_type = other DNA
agataaatggctgggctggcagggcatgtactggttgatggcggcgctgttgatcccctgtattatcgcgacgtt

SEQ ID NO: 326357 - DNA, 75 bp, synthetic construct
  source 1..75: mol_type = other DNA
caaaacgcttggcttactggcgaccattgttggcgcattgtacggtgggattttgatgcagcgcctgtcgctgtt

SEQ ID NO: 326358 - DNA, 75 bp, synthetic construct
  source 1..75: mol_type = other DNA
gctccttgaaagcgcaggccattttagccataccttaaaaccgttacagccttttgccttcgcggcggaccaggt

SEQ ID NO: 326359 - DNA, 75 bp, synthetic construct
  source 1..75: mol_type = other DNA
gcattgtacggtgggattttgatgcagcgcctgtcactgttccgggcactgctgattttcggcattttacaaggt

SEQ ID NO: 326360 - DNA, 75 bp, synthetic construct
  source 1..75: mol_type = other DNA
tttcttcggtcgcaataacgcatggctgattctgcttttaatcgtgctgtataagctgggcgatgctttcgccat

SEQ ID NO: 326361 - DNA, 75 bp, synthetic construct
  source 1..75: mol_type = other DNA
ctgtgatgccgtcgtggatcgggtgaatgaccatcttccggggaatatcgacccctggaaagactacaacctctg

SEQ ID NO: 326362 - DNA, 75 bp, synthetic construct
  source 1..75: mol_type = other DNA
acactggacctcggtctgttacaggctggcgcgggcgttaaaggtgaatttgaacagcggctgaaaaatgtcatc

SEQ ID NO: 326363 - DNA, 75 bp, synthetic construct
  source 1..75: mol_type = other DNA
cgccctgctggcggtgcttaaccgctttaccgaagacgtgacggaaaaagcccgcagcgggcgaatcgacccggt

SEQ ID NO: 326364 - DNA, 75 bp, synthetic construct
  source 1..75: mol_type = other DNA
aaatcaacgacagcctgtacgacgccctgaccgccgcctgcctgctgccggacaccggggcgcgcaatatcgaca

SEQ ID NO: 326365 - DNA, 75 bp, synthetic construct
  source 1..75: mol_type = other DNA
ccggaaggttcataccagcagtttaatgatgtgtttgcagaaatggtggcctggcacaatgcagcgggaataacc

SEQ ID NO: 326366 - DNA, 75 bp, synthetic construct
  source 1..75: mol_type = other DNA
catcagtatgtggcagccgttcatacagacacggataacctgcatgtacatgttgcagtgaatcgtgtccaccct

SEQ ID NO: 326367 - DNA, 75 bp, synthetic construct
  source 1..75: mol_type = other DNA
tcacggcactcagcaccacgggtgaggttattgactctgcgcaggatgcgctggacagtgccacatcgccagggg

SEQ ID NO: 326368 - DNA, 75 bp, synthetic construct
  source 1..75: mol_type = other DNA
cagaggcgggattatggatggggatccagcacgggcatctggtactgcatgatggatttgataaacaacagacac

SEQ ID NO: 326369 - DNA, 75 bp, synthetic construct
  source 1..75: mol_type = other DNA
cattaggtgccacatgcaaaaattataactggagttggtcatttattgatgagacgaacaaaagaattatatttg

SEQ ID NO: 326370 - DNA, 75 bp, synthetic construct
  source 1..75: mol_type = other DNA
atatgattaaagcggaaattgagaaggaaaagcatattgccagccttcgaaaaaggcgccgtacatcaatcaact

SEQ ID NO: 326371 - DNA, 75 bp, synthetic construct
  source 1..75: mol_type = other DNA
tgcgcgacggcgaagggcgggaaatcgacttccgcaacaccgtcattctgatgaccgccaatctgggcagcgacc

SEQ ID NO: 326372 - DNA, 75 bp, synthetic construct
  source 1..75: mol_type = other DNA
actggttatctttacataaacggctggccagcgatggtctgtatatcacgatgcaggaaggggaactggtggtga

SEQ ID NO: 326373 - DNA, 75 bp, synthetic construct
  source 1..75: mol_type = other DNA
atgcaaccagttccctcgctgggtatggggtggaggcaaggttcttcctggtctggtcactcgcgccgggaaaga

SEQ ID NO: 326374 - DNA, 75 bp, synthetic construct
  source 1..75: mol_type = other DNA
tgacgtggctgcttcagcctccgggaaagatcaatggaaagaatgtactgcaacacattgaccgccttaacgcca

SEQ ID NO: 326375 - DNA, 75 bp, synthetic construct
  source 1..75: mol_type = other DNA
cggggagcttcctgatgtggaaatttcagataaaggtgtaaagatcaccccactggataacagtgttccttcaac

SEQ ID NO: 326376 - DNA, 75 bp, synthetic construct
  source 1..75: mol_type = other DNA
accaaaatggcagagtcctgtccgggaaccacacgggcttcgctggaaaacatgcaggcatggtacatccgtgat

SEQ ID NO: 326377 - DNA, 75 bp, synthetic construct
  source 1..75: mol_type = other DNA
caaaagcgtcgctggaaagcattcaggcatggtacatcagggatgaaacgtatgcagccgcgcttgccgaactag

SEQ ID NO: 326378 - DNA, 75 bp, synthetic construct
  source 1..75: mol_type = other DNA
attgcgatctggtgatatctgggttagaggatcacgacgctacaggaattttgacgattacctcattcctcctgc

SEQ ID NO: 326379 - DNA, 75 bp, synthetic construct
  source 1..75: mol_type = other DNA
tgtggatatttcagataaaggtgtaaagatcaccccactggataacagcgttccttcagcagtctcacccctggc

SEQ ID NO: 326380 - DNA, 75 bp, synthetic construct
  source 1..75: mol_type = other DNA
agattttgaaaaatcacgcctgaataaccagttacctcttcctattccgaccgactgcaatgaatacatcgagag

SEQ ID NO: 326381 - DNA, 75 bp, synthetic construct
  source 1..75: mol_type = other DNA
catatcttcaggcccgtatgacgcttcttgcatcgcgtctggaagaagttaacgcgatggcgcttgccggtgatt

SEQ ID NO: 326382 - DNA, 75 bp, synthetic construct
  source 1..75: mol_type = other DNA
tattcagcggcactggccgagctggtcaacgcacagaaagagcggcctctggccgcattctggggcgacgggaca

SEQ ID NO: 326383 - DNA, 75 bp, synthetic construct
  source 1..75: mol_type = other DNA
gccagcctcaagcaggccagcgaattgccgctggccgtggccaccgactgcaaccggtacctgaacgaccggctg

SEQ ID NO: 326384 - DNA, 75 bp, synthetic construct
  source 1..75: mol_type = other DNA
cgtgcaagcctacccgacgttgcgcccgctgatcggcggcaccctgaacatcaagcacgtgcgtgcccactggga

SEQ ID NO: 326385 - DNA, 75 bp, synthetic construct
  source 1..75: mol_type = other DNA
cgctccttttcacaccaaggtcatcaatgccactgtgcgagacactacacacgtcctggacgggctgctgtatca

SEQ ID NO: 326386 - DNA, 75 bp, synthetic construct
  source 1..75: mol_type = other DNA
tggcatcaatcgaaaatactatgaattttgtgtactgaatgaactcaagggggcgttacgttccggagatatttg

SEQ ID NO: 326387 - DNA, 75 bp, synthetic construct
  source 1..75: mol_type = other DNA
tttatccccgctggcgcggggaactcatcgtccatattaacaatcgtggtgagttcaacggtttatccccgctgg

SEQ ID NO: 326388 - DNA, 75 bp, synthetic construct
  source 1..75: mol_type = other DNA
aacacctgacgctggctgagaacggtttttctgttcgcggtttatccccgctggcgcggggaacacgcgcgccgt

SEQ ID NO: 326389 - DNA, 75 bp, synthetic construct
  source 1..75: mol_type = other DNA
gcgaaagatattcgttttgaaacgccgctgatgtggattgataaagcggaaacctgggcgctggcagattattac

SEQ ID NO: 326390 - DNA, 75 bp, synthetic construct
  source 1..75: mol_type = other DNA
tcggtttatccccgctggcgcggggaacacaaaaaggcgatttttctctttgattacaccggcggtttatccccg

SEQ ID NO: 326391 - DNA, 75 bp, synthetic construct
  source 1..75: mol_type = other DNA
ctggcgcggggaacactgtgctgctaaaaacggcaaggtcagtggcatcggtttatccccgctggcgcggggaac

SEQ ID NO: 326392 - DNA, 75 bp, synthetic construct
  source 1..75: mol_type = other DNA
acggtttatccccgctggcgcggggaacactacgctgttttgcggcctgctcttccctgtgccggtttatccccg

SEQ ID NO: 326393 - DNA, 75 bp, synthetic construct
  source 1..75: mol_type = other DNA
ttcgtgatccaggtttgcgacgacgtgtacaagctgggctgaataaaggagaagcccgtaatgctcttgcgcgag

SEQ ID NO: 326394 - DNA, 75 bp, synthetic construct
  source 1..75: mol_type = other DNA
gctcttgccggtgagctgccggatgttgatatttcagataaaggagtgaaaatcactccgctggagaacggggtt

SEQ ID NO: 326395 - DNA, 75 bp, synthetic construct
  source 1..75: mol_type = other DNA
tcactgaatttgagaaatcccgacaaaatgaccagttacaactggctgtgcagaccgattgccatgcatatcttc

SEQ ID NO: 326396 - DNA, 75 bp, synthetic construct
  source 1..75: mol_type = other DNA
accaccattctggccgacggcatcaatctggggctgacaaaaatggcggagtcctgcccgggggcaacaaaatcg

SEQ ID NO: 326397 - DNA, 75 bp, synthetic construct
  source 1..75: mol_type = other DNA
gggatgataagtttatcaccaccgactatttgcaacagtgccctcgacagcctgctcatatcagagggtgaacaa

SEQ ID NO: 326398 - DNA, 75 bp, synthetic construct
  source 1..75: mol_type = other DNA
tgagtttgagaaatcccgacataatgaccagttacagttggccgttcagaccgatagccaggcataccttcaggc

SEQ ID NO: 326399 - DNA, 75 bp, synthetic construct
  source 1..75: mol_type = other DNA
acgctggtttgtataataacagaggccagggccaccctgactgacgaagtgattgatctgcacgagcgtatcctg

SEQ ID NO: 326400 - DNA, 75 bp, synthetic construct
  source 1..75: mol_type = other DNA
gctacaggcgcggtttatggagttgaacgaatgggcgggtgaagaaattatccgcttcgaaaaatatagcctcgg

SEQ ID NO: 326401 - DNA, 75 bp, synthetic construct
  source 1..75: mol_type = other DNA
gataccgctgcaaaagcgaattaaagaaattaatgaatggttgagtgatgaaataatttctttccaaccatatga

SEQ ID NO: 326402 - DNA, 75 bp, synthetic construct
  source 1..75: mol_type = other DNA
acaccgcgccagtgcaggaggccgaacagcagaagaatacaactcacgccgaagcgttcagctttggcgatccga

SEQ ID NO: 326403 - DNA, 75 bp, synthetic construct
  source 1..75: mol_type = other DNA
cctgcaccggtcgctccaccgaagccgaaaccggtggaaccgcctaagccgaaagtagaagcaccacctgcgccg

SEQ ID NO: 326404 - DNA, 75 bp, synthetic construct
  source 1..75: mol_type = other DNA
gggatatcgcgtttatacgtcgccgtcgacgccagtgcagggtaaaatcacccgcattctggttgggccggatgc

SEQ ID NO: 326405 - DNA, 75 bp, synthetic construct
  source 1..75: mol_type = other DNA
cctgcaccggtcgccccaccgaagccgaaaccggtggagccgcctaagccgaaggttgaagcaccacctgcgccg

SEQ ID NO: 326406 - DNA, 75 bp, synthetic construct
  source 1..75: mol_type = other DNA
aaacctctggctctgaacatcgtgaaattatgatagaaattgatgcctcgaaatcgacgaacggtaccggtggag

SEQ ID NO: 326407 - DNA, 75 bp, synthetic construct
  source 1..75: mol_type = other DNA
gtttttgaatatcaaaaatgtcagtcgcgatgacatgatggcagcacaccgcgtaccgccgcaaatgatggggat

SEQ ID NO: 326408 - DNA, 75 bp, synthetic construct
  source 1..75: mol_type = other DNA
aaggacggacttcagatcatcccattgtcagaagtcgcggcgaaggatgagtttctgaatatcaaaaatgtcagc

SEQ ID NO: 326409 - DNA, 75 bp, synthetic construct
  source 1..75: mol_type = other DNA
aaggcagcatttttcatctgatggaaccggacattaaccaggagatctacggcctgcccagctatctttctgcca

SEQ ID NO: 326410 - DNA, 75 bp, synthetic construct
  source 1..75: mol_type = other DNA
ggggatgtggagaaagctagtaaggtttttgtgacaaatgaattagtacctctacaaaaaaaaatccatgaattt

SEQ ID NO: 326411 - DNA, 75 bp, synthetic construct
  source 1..75: mol_type = other DNA
atccccctatgtctatccatttttgctgggagtcagtgattgataaaaaagtgtatgaaacctggataacgctgg

SEQ ID NO: 326412 - DNA, 75 bp, synthetic construct
  source 1..75: mol_type = other DNA
taaaaaaagaaaaatttgacattgtgcatacgcattcttcaaaaacaggcgttttggggcgagttgcagccaaat

SEQ ID NO: 326413 - DNA, 75 bp, synthetic construct
  source 1..75: mol_type = other DNA
aagggaaagcagaccaatacccggcgcttcagtcactgatatcaacgaccagcctgaatctgaaagagatcgaaa

SEQ ID NO: 326414 - DNA, 75 bp, synthetic construct
  source 1..75: mol_type = other DNA
ccctgaagcgtaaaggactaaagatcaacgaacaactgctgtcgcatttgtcgccgttaggctgggagcacatca

SEQ ID NO: 326415 - DNA, 75 bp, synthetic construct
  source 1..75: mol_type = other DNA
caggcgattatatctggaaaaacaaccggataccgacttcaggtaagtttcgtcgtttgagaccagttaagatcg

SEQ ID NO: 326416 - DNA, 75 bp, synthetic construct
  source 1..75: mol_type = other DNA
ttggtcaatgcccagaaaaaaagccctctggcggcattctggggcgatggaacaacgtcatcgtctgatggacag

SEQ ID NO: 326417 - DNA, 75 bp, synthetic construct
  source 1..75: mol_type = other DNA
ggcgttgcgctccggggatatctgggttaaaggctcgcgccgctacaaaaattttgatgattacctcatccccga

SEQ ID NO: 326418 - DNA, 75 bp, synthetic construct
  source 1..75: mol_type = other DNA
agaaaaccggaaaatcagagctatcgcgccagtggactgacgctgctgacggctgccatatccctgtggaatacc

SEQ ID NO: 326419 - DNA, 75 bp, synthetic construct
  source 1..75: mol_type = other DNA
tgcagaagcaatgacactgggtgataaaacggtttatacaacgctgaatgcgcaccttgatatcacgcataaatc

SEQ ID NO: 326420 - DNA, 75 bp, synthetic construct
  source 1..75: mol_type = other DNA
atccggggttcccggcgctacaaaaacttcgatgactatcttatgccaggagataatttcgaaaagttattaaat

SEQ ID NO: 326421 - DNA, 75 bp, synthetic construct
  source 1..75: mol_type = other DNA
ttcgtcccggttgttatcggccctgcaactgagggccactccggccgccttatctcttaatgatgccctcgatac

SEQ ID NO: 326422 - DNA, 75 bp, synthetic construct
  source 1..75: mol_type = other DNA
aacctctggctgatgcgctggttgtgatcaaggatatgtaccggaagcagtcacgtaaagttccggcgactgcgc

SEQ ID NO: 326423 - DNA, 75 bp, synthetic construct
  source 1..75: mol_type = other DNA
aaaaatacagcacattacggaaatatgctccgcgtatgttatccaccttgcaattagttgccacaccggcagcac

SEQ ID NO: 326424 - DNA, 75 bp, synthetic construct
  source 1..75: mol_type = other DNA
gaacactgttcatgctggactggttccgcgatccggcgcttcgtcgtagggttcaggcaggtctgaacaaagggg

SEQ ID NO: 326425 - DNA, 75 bp, synthetic construct
  source 1..75: mol_type = other DNA
gcatcgtctggctggcagacagtgccggagcatcacgccccgctctggcagcaggtcagtcaggtggaacattga

SEQ ID NO: 326426 - DNA, 75 bp, synthetic construct
  source 1..75: mol_type = other DNA
aacatttagggatactgatggctataaatataatagcctgtaaagaaaacctatattactctctatatggcgaat

SEQ ID NO: 326427 - DNA, 75 bp, synthetic construct
  source 1..75: mol_type = other DNA
atacgctggggttctcacgtcgcgtccatgtcttcgcggcaccaaagcaggatgctgaacatacctatgagtcac

SEQ ID NO: 326428 - DNA, 75 bp, synthetic construct
  source 1..75: mol_type = other DNA
atggctggcttaccgaacagcagtaacgcgctgcaacagtggcatcatttgtttgaagccgagggtgcaaaacgc

SEQ ID NO: 326429 - DNA, 75 bp, synthetic construct
  source 1..75: mol_type = other DNA
tgcggctggtatttgtcgatggacgttacgtgcccgcgctgagcgatgcaactgaaggcagcggatatgaagtga

SEQ ID NO: 326430 - DNA, 75 bp, synthetic construct
  source 1..75: mol_type = other DNA
tacgcctttgctgccgaactgacggaagcactgcgtgatgaggggcttaaacagcaggtgctggcccgaatcggt

SEQ ID NO: 326431 - DNA, 75 bp, synthetic construct
  source 1..75: mol_type = other DNA
gacgttccatgctgcgttactacatccagcccaaacgtaaaatgcgcccgtcaaaaagaacagttcgcttcgaaa

SEQ ID NO: 326432 - DNA, 75 bp, synthetic construct
  source 1..75: mol_type = other DNA
acacgctgggttactcgcgtcgcctccacgtctttgcggcaccgagccaggatgcggagcacacctacgagtccc

SEQ ID NO: 326433 - DNA, 75 bp, synthetic construct
  source 1..75: mol_type = other DNA
cactcatcgtctgaacaatcgtggtgccgggtggcagactgttccggaacaccatgcaccgctgtggcaacaggt

SEQ ID NO: 326434 - DNA, 75 bp, synthetic construct
  source 1..75: mol_type = other DNA
gctggggttctcccgccgcttccatgtcttcgccgcaccaaaacaggatgctgagcatacctacgaatcactggt

SEQ ID NO: 326435 - DNA, 75 bp, synthetic construct
  source 1..75: mol_type = other DNA
aaaacggttcgcttcgaaactcagcccggttaccagctccagcatgactggggagaagttgaggctgaggttgcc

SEQ ID NO: 326436 - DNA, 75 bp, synthetic construct
  source 1..75: mol_type = other DNA
aatacctcaaggagaacttcttcgttcggtaccgcaggttcgacagcttcactcatgttaatcaacaactggagc

SEQ ID NO: 326437 - DNA, 75 bp, synthetic construct
  source 1..75: mol_type = other DNA
tttctgcatttgacggaaagcctggcacaaagcgtgacgcatatcgccgtgaagcgcagtcaacggccggcaaag

SEQ ID NO: 326438 - DNA, 75 bp, synthetic construct
  source 1..75: mol_type = other DNA
gaaaaagtatcgggtgttgctgaaccgtgttgatacatcaactgcacctgatattgagtggccggaagaaccaga

SEQ ID NO: 326439 - DNA, 75 bp, synthetic construct
  source 1..75: mol_type = other DNA
ggtgacggtgacgcatatattccacctcatacaggtctgcctgcaaacagtacctatattgcaccgccagatatt

SEQ ID NO: 326440 - DNA, 75 bp, synthetic construct
  source 1..75: mol_type = other DNA
tggaaaaaataccgggtattagtgagtcggattgatataaatacagccccggatatcgtatggcctgagctgtga

SEQ ID NO: 326441 - DNA, 75 bp, synthetic construct
  source 1..75: mol_type = other DNA
atgataaagcaaatgcgccagcagggcgcgtacattgtcgatattgcgactcagattggttgctctgaacggacg

SEQ ID NO: 326442 - DNA, 75 bp, synthetic construct
  source 1..75: mol_type = other DNA
tcacatcgcctctgttcagcatcgtctggctggcagacagtgccggagcatcacgcccgctctggcagcaggtca

SEQ ID NO: 326443 - DNA, 75 bp, synthetic construct
  source 1..75: mol_type = other DNA
catcaatcgttttgcgttttatgaacgggcgcaaaaagcctttgcgatcgttatcacaggcgaacgagcgaagta

SEQ ID NO: 326444 - DNA, 75 bp, synthetic construct
  source 1..75: mol_type = other DNA
caaagattccgtacgattcattcatgatataatttttgcatgtggcccattattacagaatgaactaatagaaat

SEQ ID NO: 326445 - DNA, 75 bp, synthetic construct
  source 1..75: mol_type = other DNA
ggatacggacttcgataccagttacttcgacatccgccatgtgtcccgggacagctatatcgaggttggtggtaa

SEQ ID NO: 326446 - DNA, 75 bp, synthetic construct
  source 1..75: mol_type = other DNA
ctcgcttcgaaactcagcctggataccagctccagcacaactggggcgaagttgaggtggaggttgccgggcaac

SEQ ID NO: 326447 - DNA, 75 bp, synthetic construct
  source 1..75: mol_type = other DNA
gaaaaagtatcgggtgttgctgaaccgtgttgatacatcaactgcaccggatattgaatggccagtagcacctat

SEQ ID NO: 326448 - DNA, 75 bp, synthetic construct
  source 1..75: mol_type = other DNA
atgatatgggtctaagtggcggcctcgcgactctcccatttaaaaatactgcaggtcaggtttatatccgtggac

SEQ ID NO: 326449 - DNA, 75 bp, synthetic construct
  source 1..75: mol_type = other DNA
cagattccgttccgtggacgtactaatgccgatattggacaagcgtccaacacgctcatagcaggccacagtgga

SEQ ID NO: 326450 - DNA, 75 bp, synthetic construct
  source 1..75: mol_type = other DNA
tttctggtgataatgccaggttggctgaaaaaataacaaatattttctttcagcttgctatacaggtgaatcttg

SEQ ID NO: 326451 - DNA, 75 bp, synthetic construct
  source 1..75: mol_type = other DNA
aaacctgacaaacccaatattcgcctgacggataagcagattctgatagaaacggtttcaggtgaaaaaatggaa

SEQ ID NO: 326452 - DNA, 75 bp, synthetic construct
  source 1..75: mol_type = other DNA
acagcctacaaaattggtgagaacaatctggatgagaagcgcgtagacagcaaacaagctcgccgcgcgttggcg

SEQ ID NO: 326453 - DNA, 75 bp, synthetic construct
  source 1..75: mol_type = other DNA
gccaaccatgtggagattgtgcagaccttcgcccgcctgaaccggacggcacctgggaaggatgaagtctttatc

SEQ ID NO: 326454 - DNA, 75 bp, synthetic construct
  source 1..75: mol_type = other DNA
aacaacgggaaagtcgtgttcaactccggattcctgttgctggccgaccactataacttcctgccacgggcatgc

SEQ ID NO: 326455 - DNA, 75 bp, synthetic construct
  source 1..75: mol_type = other DNA
cgcgtacattgtcgatattgcgactcagattggttgctctgaacggacggtcagacgctacctcaaataccctga

SEQ ID NO: 326456 - DNA, 75 bp, synthetic construct
  source 1..75: mol_type = other DNA
ggcatcgttactggctgcatggaagacatatcgggtattgttgaatcgtgttgatacaacagtagcagcggatgt

SEQ ID NO: 326457 - DNA, 75 bp, synthetic construct
  source 1..75: mol_type = other DNA
atgataaagcaaatgcgccagcaaggtgcgtatattgttgatattgccactcaggttggttgctctgagcggact

SEQ ID NO: 326458 - DNA, 75 bp, synthetic construct
  source 1..75: mol_type = other DNA
agcaggcggtgattgaaccgaaaaaaccgcaagcaaccgtgaaaacggaaccgaagccggtagcacagacgccga

SEQ ID NO: 326459 - DNA, 75 bp, synthetic construct
  source 1..75: mol_type = other DNA
atctcttctacgccgactcaagggcaaaccccggcggcaacggatggtcaacaacgtgttgaagtgcagggtgac

SEQ ID NO: 326460 - DNA, 75 bp, synthetic construct
  source 1..75: mol_type = other DNA
ctgagcatacctatgaatcactggttcgcgccttccgctacttcggtggttgtgtgaaaacggtgctggttgata

SEQ ID NO: 326461 - DNA, 75 bp, synthetic construct
  source 1..75: mol_type = other DNA
ccagctccagcaagactggggcgacgttgaggtggaggttgccgggcaacggtgcaaaattaactttgcggttaa

SEQ ID NO: 326462 - DNA, 75 bp, synthetic construct
  source 1..75: mol_type = other DNA
agcatcacgccacgctctggcagcaggtcagtcaggtggaacatcggccactgagtgcctgtgaggagctgttgt

SEQ ID NO: 326463 - DNA, 75 bp, synthetic construct
  source 1..75: mol_type = other DNA
gaagaagtatcgagtgctgctgaaccgtgttgatacatcaagagcaccggatattgagtggccagcttccccagt

SEQ ID NO: 326464 - DNA, 75 bp, synthetic construct
  source 1..75: mol_type = other DNA
tgttgaagaccatcggggtaaaacagtttatgacgtggcatcaggggacgcgttatttatttctgaacttggctc

SEQ ID NO: 326465 - DNA, 75 bp, synthetic construct
  source 1..75: mol_type = other DNA
tcagacgctatctcaaataccctgaaccgccagccagaaaaacccgccacaaaatggttaagctgaaaccgttta

SEQ ID NO: 326466 - DNA, 75 bp, synthetic construct
  source 1..75: mol_type = other DNA
aggatggagctaagagatatcgtttttgatgctttcgggaagtatcttgttattgatccaacaaatataggttat

SEQ ID NO: 326467 - DNA, 75 bp, synthetic construct
  source 1..75: mol_type = other DNA
actttattactcaagacaacgggttgtattttgagtgtaataatcttaatagtaggtattggcttttatacttga

SEQ ID NO: 326468 - DNA, 75 bp, synthetic construct
  source 1..75: mol_type = other DNA
aaataaatactatcaatatcagctacctggcgccgggaaaccgcatctgtatcgccggttcggtcgacatttgat

SEQ ID NO: 326469 - DNA, 75 bp, synthetic construct
  source 1..75: mol_type = other DNA
gaatagcccggaatttaattcattgttccgtcagatttctcaatggcattgtgattttgtcataatccgtaaaac

SEQ ID NO: 326470 - DNA, 75 bp, synthetic construct
  source 1..75: mol_type = other DNA
gtacagaagtgcatagagctaccaatttattttcattttactttgataaaaacaaagtgaagtgccctggggatg

SEQ ID NO: 326471 - DNA, 75 bp, synthetic construct
  source 1..75: mol_type = other DNA
gaactgaagacaaaagagatgaatacttgttgaatctgttagagaaagagctgagggaaatttcaaaggcgcagg

SEQ ID NO: 326472 - DNA, 75 bp, synthetic construct
  source 1..75: mol_type = other DNA
tacggaagcagaaaaactattccggatccgggaggcggaagaaacaaaaaaacagcctgatgcaggtagccagtg

SEQ ID NO: 326473 - DNA, 75 bp, synthetic construct
  source 1..75: mol_type = other DNA
acagtcctgaaattattcagtttctctcagcggaatttcaggcatctgtacaggcttttggggcggatgccatca

SEQ ID NO: 326474 - DNA, 75 bp, synthetic construct
  source 1..75: mol_type = other DNA
tcaccggatggggaatatcagaagtgggacggcacatcctgggagaaggataaggaaacagaaaaattgtttcag

SEQ ID NO: 326475 - DNA, 75 bp, synthetic construct
  source 1..75: mol_type = other DNA
tattcccgggtgatgaggtgtttgtcagaaccgttgaaggacacaacatgattaaggttcttggctatgacagag

SEQ ID NO: 326476 - DNA, 75 bp, synthetic construct
  source 1..75: mol_type = other DNA
accccagtttcactgatggatgaccagatggtcgacatggcatttatcactcaactgaccggcctgaccgataag

SEQ ID NO: 326477 - DNA, 75 bp, synthetic construct
  source 1..75: mol_type = other DNA
cagggtaatgaaacgacaaaggatctcacccaggcgatggactggtttcgccgtgccgcagagcagggatacacc

SEQ ID NO: 326478 - DNA, 75 bp, synthetic construct
  source 1..75: mol_type = other DNA
cgttatggcacgtgagtggtatagcaaagcagcggaacaaggtaacgtctggtcctgtaaccagcttggttatat

SEQ ID NO: 326479 - DNA, 75 bp, synthetic construct
  source 1..75: mol_type = other DNA
gcgtcatcacgggcgtacagtcgtcgtggtgttgcatgatctgaattttgccgtgaattatggtgatacgttgat

SEQ ID NO: 326480 - DNA, 75 bp, synthetic construct
  source 1..75: mol_type = other DNA
cgtgtgctgattgaatcaaaagtggattacaacaaagcacagaacctgatcctgacatcggtcattctgatcatc

SEQ ID NO: 326481 - DNA, 75 bp, synthetic construct
  source 1..75: mol_type = other DNA
cagccgctggagtattttgccgcggagtaccagatggggctttccaatatgatggaagcgaacccgggtgtggat

SEQ ID NO: 326482 - DNA, 75 bp, synthetic construct
  source 1..75: mol_type = other DNA
cacatagtgcatcagttcttcgtgtgtcagcggacggtcacggcgtatctggttcgcatacccgacgataaccat

SEQ ID NO: 326483 - DNA, 75 bp, synthetic construct
  source 1..75: mol_type = other DNA
acggtcgcccgtttgatgtaacaactggtcagggctggttcatcgacggagaaattgccggacgcctgattgaag

SEQ ID NO: 326484 - DNA, 75 bp, synthetic construct
  source 1..75: mol_type = other DNA
cgaaacataggggacaaaatggccagaaagattgaacaggccttggatcgtccgtttgggtggctggatagtcca

SEQ ID NO: 326485 - DNA, 75 bp, synthetic construct
  source 1..75: mol_type = other DNA
agggggcctgcgctggctacagcgcgaggcgcaaacattattgcaaaaagggggcattcgaacccccgccgatct

SEQ ID NO: 326486 - DNA, 75 bp, synthetic construct
  source 1..75: mol_type = other DNA
tccttacctggtttttagcacagattcaattatttaagcacttgataaatttgaaaatattaattttcggagaac

SEQ ID NO: 326487 - DNA, 75 bp, synthetic construct
  source 1..75: mol_type = other DNA
gggacatgttgtccgtttatctctccggcccgccgcagacgcagcatgtgtttggtgtatctccgacggcccggg

SEQ ID NO: 326488 - DNA, 75 bp, synthetic construct
  source 1..75: mol_type = other DNA
atggaccgctgccgggcgggtgaaacatggcctccggacctggctgagtttgtggcactgatttcggaaagcgga

SEQ ID NO: 326489 - DNA, 75 bp, synthetic construct
  source 1..75: mol_type = other DNA
tggctgcatggaagacataccgggtattgttgaatcgtgttaatacagcggtagcagcggatgttgagtggccag

SEQ ID NO: 326490 - DNA, 75 bp, synthetic construct
  source 1..75: mol_type = other DNA
gcaacggaggaagaggcatcgttactggctgcatggaagacataccgggtattgttgaatcgtgttaatacagcg

SEQ ID NO: 326491 - DNA, 75 bp, synthetic construct
  source 1..75: mol_type = other DNA
tcgggtgttgctgaaccgtgttaatacaacaactgcaccggatattgaatggccaacagtacccattatcgaata

SEQ ID NO: 326492 - DNA, 75 bp, synthetic construct
  source 1..75: mol_type = other DNA
gtcgcagtaatttcgaatttggtcgcgcgcggatgtttggctgtgttggctgggcgctgtgtgcctcaattgtcg

SEQ ID NO: 326493 - DNA, 75 bp, synthetic construct
  source 1..75: mol_type = other DNA
tccgctaggcgtttagaattaataaatttttctgataaatacttaaagaactgccacttttttcttgcggaatta

SEQ ID NO: 326494 - DNA, 75 bp, synthetic construct
  source 1..75: mol_type = other DNA
aagtatcgagtgctgctgaaccgtgttgatacatcaagagcaccggatattgagtggccagcttccccagtggaa

SEQ ID NO: 326495 - DNA, 75 bp, synthetic construct
  source 1..75: mol_type = other DNA
ctcatacaggtctgccagcaaacagtaccgatattgcaccgccggatattccggcaggcttcgtggctgttttca

SEQ ID NO: 326496 - DNA, 75 bp, synthetic construct
  source 1..75: mol_type = other DNA
cgcaatgaatcctggcgatacgacgggagtgataaatacccgtggccacagcctgtgctgtaccacatctgcctc

SEQ ID NO: 326497 - DNA, 75 bp, synthetic construct
  source 1..75: mol_type = other DNA
ccgggcgggtgaaacatggcctccggacctggctgagtttgtggcgctgatttctgaaagcggagccaatccatt

SEQ ID NO: 326498 - DNA, 75 bp, synthetic construct
  source 1..75: mol_type = other DNA
cattcggtctgacggtggatgctgtgatggaggagtaccgccgctggcgcaatgagtcctggcgatacgacggaa

SEQ ID NO: 326499 - DNA, 75 bp, synthetic construct
  source 1..75: mol_type = other DNA
tactggctgcatggaagacatatcgggtattgttgaatcgtgttgatacaacagtagcagcggatgttgagtggc

SEQ ID NO: 326500 - DNA, 75 bp, synthetic construct
  source 1..75: mol_type = other DNA
tcatttaatgggaagtcagttggaaaaaacaaacttaattgtttgtttagtgagtcagatcgccgagctttggct

SEQ ID NO: 326501 - DNA, 75 bp, synthetic construct
  source 1..75: mol_type = other DNA
aagatctacttaaggctcagcaatcactggagtgtatatatgatgagaaagaattagctgtatacaacgaaatga

SEQ ID NO: 326502 - DNA, 75 bp, synthetic construct
  source 1..75: mol_type = other DNA
gctggagtggccggttgtaatgctggatgaggatttccaggatatcacggatccgctgatgacggaggctgagcg

SEQ ID NO: 326503 - DNA, 75 bp, synthetic construct
  source 1..75: mol_type = other DNA
atttggtaacaacagccgagctgcttttaaacaggcttccgggtgagaatatttacaacgcaaaatcgccagcag

SEQ ID NO: 326504 - DNA, 75 bp, synthetic construct
  source 1..75: mol_type = other DNA
tcatttaatgggaagtcagttgaaaaaaacaaacttaattgtttgtttagtgaatcagatcgccgggctttagct

SEQ ID NO: 326505 - DNA, 75 bp, synthetic construct
  source 1..75: mol_type = other DNA
tataaagattcatttgatgagtcatttatacgcttcattgagagtatgaaaaaagaaataaaagagataagacga

SEQ ID NO: 326506 - DNA, 75 bp, synthetic construct
  source 1..75: mol_type = other DNA
atccattccagttgattcaattcaaatctattgcattaaaattagaaaaaccaactatttttattattaggaaaa

SEQ ID NO: 326507 - DNA, 75 bp, synthetic construct
  source 1..75: mol_type = other DNA
atgattacggaaaccgaacaggcatatatcacccgtattcgtgagtatttcgggaatgaactggtgtctgttgac

SEQ ID NO: 326508 - DNA, 75 bp, synthetic construct
  source 1..75: mol_type = other DNA
ctgggtgccggtgaaggccgtacccgtggtcgtctggtcagtcactgggtgttctacgtcatcggcgacatgctc

SEQ ID NO: 326509 - DNA, 75 bp, synthetic construct
  source 1..75: mol_type = other DNA
gtgcgttggagaaaatgcggaaagtgcgacagcgttgctcggaggttttccgttatgccattgctacaggtagag

SEQ ID NO: 326510 - DNA, 75 bp, synthetic construct
  source 1..75: mol_type = other DNA
aaaatactatacgtggcacttataaccacgcgcaatacattgataatcgtaaatgcatgttgcaaagctatgcgg

SEQ ID NO: 326511 - DNA, 75 bp, synthetic construct
  source 1..75: mol_type = other DNA
tttctaccctaatgcgctaccagcacaagttacctatgtagaactattggacactgatggtatctattatcagtt

SEQ ID NO: 326512 - DNA, 75 bp, synthetic construct
  source 1..75: mol_type = other DNA
tatgagcatagaaagaaattcagcacaccctataatcaattgaaagggaaaaatgcgttgattcaccttattctt

SEQ ID NO: 326513 - DNA, 75 bp, synthetic construct
  source 1..75: mol_type = other DNA
aggatcctgtcagtgccatatcaaaacttaatgatcagtaccattttctgacacttgcgacttataaccagatta

SEQ ID NO: 326514 - DNA, 75 bp, synthetic construct
  source 1..75: mol_type = other DNA
agaaatcttgatcaacagcaggatgaacttaatgctgcactttcatccgggaaaataaatggctctcagtttgat

SEQ ID NO: 326515 - DNA, 75 bp, synthetic construct
  source 1..75: mol_type = other DNA
gcgaagcaaaagccagggggatgctttctcctgaaatgtatgaggagctctcaggaaaactccgtgctatgcgga

SEQ ID NO: 326516 - DNA, 75 bp, synthetic construct
  source 1..75: mol_type = other DNA
ggctatagcaccgtacaatcctttttaaccgctccgccactgttaatgatcattgccgggatcttcctctgtaaa

SEQ ID NO: 326517 - DNA, 75 bp, synthetic construct
  source 1..75: mol_type = other DNA
gtgaggctggaccggaagctattatgccattaacacgaacttccgatggttctcttggtgtcagggcgattaata

SEQ ID NO: 326518 - DNA, 75 bp, synthetic construct
  source 1..75: mol_type = other DNA
ggctttacagcagcgtacatcagaaatccagcaaaatcttgggcttcttgaaaaagcctgggatggtttagctgg

SEQ ID NO: 326519 - DNA, 75 bp, synthetic construct
  source 1..75: mol_type = other DNA
atgggcgtgacttttttactgttacgcgcattgcagggagtattgttcaacgttcccacgctgctggtgtggctg

SEQ ID NO: 326520 - DNA, 75 bp, synthetic construct
  source 1..75: mol_type = other DNA
atgattggtttgctgtgtattggcgcaggtaaagttcgtcttcattatcatgcttatctgacagctgcttcacgt

SEQ ID NO: 326521 - DNA, 75 bp, synthetic construct
  source 1..75: mol_type = other DNA
tttaaaattgaagactttagtcaaaaagagttttgtattgaactgctaaaaaaagactatgattcaaaagactac

SEQ ID NO: 326522 - DNA, 75 bp, synthetic construct
  source 1..75: mol_type = other DNA
gcgcctgaggcgaaaaccgaagatatcgtaccggggccgtcagctccgaataccggtgatcaaaatattggcact

SEQ ID NO: 326523 - DNA, 75 bp, synthetic construct
  source 1..75: mol_type = other DNA
gttcctctgaacaggaactggttaagtggcgtcagcagattgccgacctggagtcacgaccgtcatcgaaattaa

SEQ ID NO: 326524 - DNA, 75 bp, synthetic construct
  source 1..75: mol_type = other DNA
ctctctggcgcgtgaaccgcatgtcgataaggtggagacgccaaaggcagcggtttcaatggcgaagaaaacctc

SEQ ID NO: 326525 - DNA, 75 bp, synthetic construct
  source 1..75: mol_type = other DNA
gattgccgtgcttaacggcttcagaacagaaaaaacctcaccgctttactttgaaaaggcggtcaacggttacac

SEQ ID NO: 326526 - DNA, 75 bp, synthetic construct
  source 1..75: mol_type = other DNA
aacctatgacttcgaacgtctgatggatggcgctaagctgctgaaatgttcagagtttggtgatgcgatcatcga

SEQ ID NO: 326527 - DNA, 75 bp, synthetic construct
  source 1..75: mol_type = other DNA
aacctatgacttcgaacgtctgatggaaggcgctaagctgctgaaatgttcagagtttggtgaggcgatcatcga

SEQ ID NO: 326528 - DNA, 75 bp, synthetic construct
  source 1..75: mol_type = other DNA
tcaacgccaagaccgtaacctatgacttcgagcgtctgatggaaggcgctaatctgctgaaatgttcagagtttg

SEQ ID NO: 326529 - DNA, 75 bp, synthetic construct
  source 1..75: mol_type = other DNA
cttcgaacgtctgatggaaggcgctaaactgctgaaatgttcagagtttggtgacgcgattatcgcgaatatgta

SEQ ID NO: 326530 - DNA, 75 bp, synthetic construct
  source 1..75: mol_type = other DNA
aacctatgacttcgaacgtctgatggagggcgctaagctgctgaaatgttcagagtttggtgaagcgatcatcga

SEQ ID NO: 326531 - DNA, 75 bp, synthetic construct
  source 1..75: mol_type = other DNA
aacctatgacttcgaacgtctgatggagggcgctaaactgctgaaatgttcagagtttggtgaggcgatcatcga

SEQ ID NO: 326532 - DNA, 75 bp, synthetic construct
  source 1..75: mol_type = other DNA
ccgctgagatgatgctgcgccaaatgggttggacggaagcggctgacgtcattgttaaaggtatggaaggcgcaa

SEQ ID NO: 326533 - DNA, 75 bp, synthetic construct
  source 1..75: mol_type = other DNA
gtaaatcctggctctattattctctccgctgagatgatgctgcgccatatgcagtggttcgaagccgcagacctg

SEQ ID NO: 326534 - DNA, 75 bp, synthetic construct
  source 1..75: mol_type = other DNA
aatggtcaggcaacattaaatgcgaaatgtacgcctaatggtctggtggggcgagacagtacaggtagagtgtta

SEQ ID NO: 326535 - DNA, 75 bp, synthetic construct
  source 1..75: mol_type = other DNA
ccgctgagatgatgctgcgccagatgggttggacggaagcggctgacatgattgttaaaggtatggaaggcgcaa

SEQ ID NO: 326536 - DNA, 75 bp, synthetic construct
  source 1..75: mol_type = other DNA
ccgctgagatgatgctgcgccacatgggttggacggaagcggctgacgtaattgttaaaggtatggaaggcgcaa

SEQ ID NO: 326537 - DNA, 75 bp, synthetic construct
  source 1..75: mol_type = other DNA
ccgctgagatgatgctgcgccatatgggttggacggaagcggctgaccttattgttaaaggtatggaaggcgcaa

SEQ ID NO: 326538 - DNA, 75 bp, synthetic construct
  source 1..75: mol_type = other DNA
tgttctgaagaaggcaccaaacgtctggttcgtgcagcgatcgaatacgcaattgctaacgatcgtgactctgtg

SEQ ID NO: 326539 - DNA, 75 bp, synthetic construct
  source 1..75: mol_type = other DNA
ggtctggatacgccggaagcgtttaaggcaatgacggagcaggtgcgcgacctgtcaacagagctgcccatgtcg

SEQ ID NO: 326540 - DNA, 75 bp, synthetic construct
  source 1..75: mol_type = other DNA
taattgataactgggaaaccgttggaccggttattaaaaatgtctgggaagtcattgatggcaccgcccaggcta

SEQ ID NO: 326541 - DNA, 75 bp, synthetic construct
  source 1..75: mol_type = other DNA
cggtgtatatggggtgctggcttctatgatgtgggagcccgtcgaaaatgcacttgaatcaattctgcctgaggg

SEQ ID NO: 326542 - DNA, 75 bp, synthetic construct
  source 1..75: mol_type = other DNA
atccggcccgcttaaaggtatgcagcgtcagcttaaggggtttcagaaagaagtctccagccttgctctgggcgc

SEQ ID NO: 326543 - DNA, 75 bp, synthetic construct
  source 1..75: mol_type = other DNA
ctgtgaagccacggtacattgttgatgaggacgtgcttgctcctcttgatgatttgccggaagaagtagagacgt

SEQ ID NO: 326544 - DNA, 75 bp, synthetic construct
  source 1..75: mol_type = other DNA
atggcgcaggagttcgaaaaagaacatccctggcttgttaaaaattttgtggctgatgcactgaacagtggattt

SEQ ID NO: 326545 - DNA, 75 bp, synthetic construct
  source 1..75: mol_type = other DNA
gaggaagctctgaacgagatccggcaaaaaaacaacctcgcgggattaataaacgattttttcaactgtgctgat

SEQ ID NO: 326546 - DNA, 75 bp, synthetic construct
  source 1..75: mol_type = other DNA
agcgttgcttctattcccgtaaaagttgcaatggagttggcatatctatgttgcgcccgccagggagacattctt

SEQ ID NO: 326547 - DNA, 75 bp, synthetic construct
  source 1..75: mol_type = other DNA
aggataactggatgcctcctcgcgttcgacggggaaaatctgcttatgagtttcgtacaacagatggtcgtaccg

SEQ ID NO: 326548 - DNA, 75 bp, synthetic construct
  source 1..75: mol_type = other DNA
ggcggatgtccggaaagtggtggatggtctggatacgccggaagcgtttaaggcaatgacggagcaggtgcgcga

SEQ ID NO: 326549 - DNA, 75 bp, synthetic construct
  source 1..75: mol_type = other DNA
gcaaacagggaaaaaagctttatgtccagggtattccgttggggttatgaacgaggttatgtccagaggaatcct

SEQ ID NO: 326550 - DNA, 75 bp, synthetic construct
  source 1..75: mol_type = other DNA
aagaacccgcgacagacagcagcatatgaccggaaagttaaagtagtgcccgtagttggtggccagagaaaatga

SEQ ID NO: 326551 - DNA, 75 bp, synthetic construct
  source 1..75: mol_type = other DNA
gttggcgtcgttaccgtcagcctcggcggtatgtaccttatcgtcttgttaattcaggagtctcgcaaaaaatga

SEQ ID NO: 326552 - DNA, 75 bp, synthetic construct
  source 1..75: mol_type = other DNA
atgccgtatcaacttccggttggcgtcgttaccgtcagcctcggcggtatgtaccttatcgtcttgttaattcag

SEQ ID NO: 326553 - DNA, 75 bp, synthetic construct
  source 1..75: mol_type = other DNA
ttgctttagtcgcgccacacattgcccgccgcattagcggcaccgctcgctgggggctgacccaggcggcgctgt

SEQ ID NO: 326554 - DNA, 75 bp, synthetic construct
  source 1..75: mol_type = other DNA
acagcgggtttgtggaatgccggatcgctcaacggcctgacgtgggcaaaaacctcgccttccgcacccatcatt

SEQ ID NO: 326555 - DNA, 75 bp, synthetic construct
  source 1..75: mol_type = other DNA
atgacaatggtggtcaccgaatggcgtttaccgcgggtactaatggcgctgttgattggtgcggcactgggcgtc

SEQ ID NO: 326556 - DNA, 75 bp, synthetic construct
  source 1..75: mol_type = other DNA
ccgacgcattagcggcaccgctcgctgggggctaacccaggcggcgctgtgcggggcgttgttactgctggcggc

SEQ ID NO: 326557 - DNA, 75 bp, synthetic construct
  source 1..75: mol_type = other DNA
tgctggtaaggcggatgcgcttgctggagatgggcgatgacaccgcgtgtgcgttaggcgtcagcgtcgaacgtt

SEQ ID NO: 326558 - DNA, 75 bp, synthetic construct
  source 1..75: mol_type = other DNA
attaagtgagtcgcttggttttcgactatctggagggtacagtaaaacgcaggctgatgcatggaatattaacga

SEQ ID NO: 326559 - DNA, 75 bp, synthetic construct
  source 1..75: mol_type = other DNA
gcagatatcaccctgaacactctcgatccgaaccatatcgatgtgttcttcccggagttcgcccacgctacgcca

SEQ ID NO: 326560 - DNA, 75 bp, synthetic construct
  source 1..75: mol_type = other DNA
tgctggtgcggcgaatgcgcttgctggaaatgggcgatgataccgcgtgtgcgctgggcgtcagcgtcgaacgtt

SEQ ID NO: 326561 - DNA, 75 bp, synthetic construct
  source 1..75: mol_type = other DNA
atgatttacgtctctcgccgattaatcatcacctgtttgctgctaattaccgcctgtgtggttgcaggtatctgg

SEQ ID NO: 326562 - DNA, 75 bp, synthetic construct
  source 1..75: mol_type = other DNA
ggattacgcagcggtgccgtcacgctggaaacctcgcaggtattcgccgcgctgatgggcgatgcgccgcgcagt

SEQ ID NO: 326563 - DNA, 75 bp, synthetic construct
  source 1..75: mol_type = other DNA
gacggtaacgcggatgccggaacgaccctgacaccggatgtcacctggtcaggcatcgactcaacggtgacgatg

SEQ ID NO: 326564 - DNA, 75 bp, synthetic construct
  source 1..75: mol_type = other DNA
atgacgctatttacaaccttactggtgttaattttcgagcgcctgtttaagttgggcgagcactggcagcttgat

SEQ ID NO: 326565 - DNA, 75 bp, synthetic construct
  source 1..75: mol_type = other DNA
atgaaaaaaacgcttgtatcttttttggccattatggctgtcacgtcatccgcctgggctgcagaaaccatgaac

SEQ ID NO: 326566 - DNA, 75 bp, synthetic construct
  source 1..75: mol_type = other DNA
tcgtagcggaggcttttgcctccgttactgaattaccaccaaaacatgcaccgcttatgcgcgaagtcgccacca

SEQ ID NO: 326567 - DNA, 75 bp, synthetic construct
  source 1..75: mol_type = other DNA
ggatgagcggacaaggcaagatgtccaccatgacggtggatgaactactggagcaactgcaaaagtctcgcgccc

SEQ ID NO: 326568 - DNA, 75 bp, synthetic construct
  source 1..75: mol_type = other DNA
attgaccatcagtttggggtgatcgccgccattgaccggcagaagtcatccaagtccaagagcaagcagctctcg

SEQ ID NO: 326569 - DNA, 75 bp, synthetic construct
  source 1..75: mol_type = other DNA
cggtttcaatggcgaagaaaacctcgttcgtggtcgtggtggtgattgcgctactgacgatttacggggcgttgg

SEQ ID NO: 326570 - DNA, 75 bp, synthetic construct
  source 1..75: mol_type = other DNA
ttgataaaaaagtgtatgaaacctggataacgctggcgggagacgtctggatattgatgctcacaccttatacac

SEQ ID NO: 326571 - DNA, 75 bp, synthetic construct
  source 1..75: mol_type = other DNA
cgtatccggtgttacacgtgcatgggtccgccgtagaggaatgggtcccggtaccgttgtgatttacatcatgtg

SEQ ID NO: 326572 - DNA, 75 bp, synthetic construct
  source 1..75: mol_type = other DNA
ggacggtgggtgtttacatcatgacggacggagatgatgaagacaacgccgggggctttcctgacggcacggacg

SEQ ID NO: 326573 - DNA, 75 bp, synthetic construct
  source 1..75: mol_type = other DNA
aaataaaatagatataacggaattcactaacttgatggaaaacggatatctactaaaaaaagaaataataaaact

SEQ ID NO: 326574 - DNA, 75 bp, synthetic construct
  source 1..75: mol_type = other DNA
ttgataaaaaagtgtatgaaacctggataacgctggcgggagacgtctggaaattgatgctcacaccttattcac

SEQ ID NO: 326575 - DNA, 75 bp, synthetic construct
  source 1..75: mol_type = other DNA
tttcgatttatcgtcagggtgcgagctcaacggatgaaggggagcgtattgattaccgtgtcaaaatgtatgacc

SEQ ID NO: 326576 - DNA, 75 bp, synthetic construct
  source 1..75: mol_type = other DNA
tgctgaaaaacgactacagaaggatcagaatggtgctgatatccccgacaagggccgcttcctgaataacattaa

SEQ ID NO: 326577 - DNA, 75 bp, synthetic construct
  source 1..75: mol_type = other DNA
caggtggcacattatctgggggggtaacgtcttctggtgagatcgtttcaaaatatgcaaatggtttccgcattg

SEQ ID NO: 326578 - DNA, 75 bp, synthetic construct
  source 1..75: mol_type = other DNA
gccgcatcgtccgccagttcggcagcgtcatcggcatcatcggcgtctgcttcaaaagatgaggcgaccagacaa

SEQ ID NO: 326579 - DNA, 75 bp, synthetic construct
  source 1..75: mol_type = other DNA
gatcaaagttctgttccacagggcatttaccatcaagttgctatgaactctggaaccagaggtgctaaatcctat

SEQ ID NO: 326580 - DNA, 75 bp, synthetic construct
  source 1..75: mol_type = other DNA
gaagagcagtgctcttccaagcatgactgtgcgaacttcctctgtttcaggtggggatatgggcatgagcttgtc

SEQ ID NO: 326581 - DNA, 75 bp, synthetic construct
  source 1..75: mol_type = other DNA
ccagaagagataccactgatgcggcatggtcagcgtgggcgcaggtatataccgctaaggattcaatccctggtg

SEQ ID NO: 326582 - DNA, 75 bp, synthetic construct
  source 1..75: mol_type = other DNA
ccgaagaaggctgccagaaattcaaggcgctacatgtgattttcccggcaggctgcgcggtgctggcggcaaccc

SEQ ID NO: 326583 - DNA, 75 bp, synthetic construct
  source 1..75: mol_type = other DNA
ggcccgacaaccagtatgcgtatggaaagttttgaacgtgaatttatcgagcagaccggcgtgaaactggtggtc

SEQ ID NO: 326584 - DNA, 75 bp, synthetic construct
  source 1..75: mol_type = other DNA
ctggacagaactcgggatgccagagtcgctgtgggtctgccgggtcaaagagtttggcccgctgattgtctctat

SEQ ID NO: 326585 - DNA, 75 bp, synthetic construct
  source 1..75: mol_type = other DNA
tatagatggcaggcatagaatactacttattatgcagatttataaagtaactgatgttcccgttttttttctgaa

SEQ ID NO: 326586 - DNA, 75 bp, synthetic construct
  source 1..75: mol_type = other DNA
tcaatgtcgacaaatctttgcgtaagatcaaaattctttgaacgtaatgaaagctcttcttatgcaacaactatt

SEQ ID NO: 326587 - DNA, 75 bp, synthetic construct
  source 1..75: mol_type = other DNA
ttatagctggaatcttgatccccattttattaaatggttgctcatcaggaaaaaataaagcttatcttgacccca

SEQ ID NO: 326588 - DNA, 75 bp, synthetic construct
  source 1..75: mol_type = other DNA
gaactgcgaacggcactgacgctgccgcttatctccagaacgacggcacttgggtttgcgcaggcaacggtagtt

SEQ ID NO: 326589 - DNA, 75 bp, synthetic construct
  source 1..75: mol_type = other DNA
ctggtggtttgtgtgatgtatttattcctgcaaaacctgcgcgctacgctgatcccggcgttagccgtgccggtc

SEQ ID NO: 326590 - DNA, 75 bp, synthetic construct
  source 1..75: mol_type = other DNA
tgatgggctgggccaaagcaatggttttacgtttgaattgttagctaacggtggaaccgatcgtgaaacactgct

SEQ ID NO: 326591 - DNA, 75 bp, synthetic construct
  source 1..75: mol_type = other DNA
ggcattgagtctgtatgcagtttctattctggtggttttcctctgccttgcagcactgtacgaaagctggtcagt

SEQ ID NO: 326592 - DNA, 75 bp, synthetic construct
  source 1..75: mol_type = other DNA
actccattttagctacccggcaacagattatcaggctgatattaagcttaatgttctcgaccccaaccatatcga

SEQ ID NO: 326593 - DNA, 75 bp, synthetic construct
  source 1..75: mol_type = other DNA
ttggcccgtcaaactcaaaggctatgttgatgcggaggtctggaacccgggtggagtctgtaacggatggtcgac

SEQ ID NO: 326594 - DNA, 75 bp, synthetic construct
  source 1..75: mol_type = other DNA
tacgctcaaaggatttaaaaaagcttatgtcgatgacgggattccagggtgtgaaggatacgttgcacaaacgga

SEQ ID NO: 326595 - DNA, 75 bp, synthetic construct
  source 1..75: mol_type = other DNA
tggcgttcatgctgaaaatggtcatatggccgtgcagctgtggcacaccggacgcatttctcacgccagcctgca

SEQ ID NO: 326596 - DNA, 75 bp, synthetic construct
  source 1..75: mol_type = other DNA
ttctgagcattggtccacatgaaaatttttatactgaccagaaaaaacaccgaaaagcggatttaaagctcatcg

SEQ ID NO: 326597 - DNA, 75 bp, synthetic construct
  source 1..75: mol_type = other DNA
actggtgcttctgggttacagctggcttgacgataaacttgagctctacctccttagcatcggtccacatgaaaa

SEQ ID NO: 326598 - DNA, 75 bp, synthetic construct
  source 1..75: mol_type = other DNA
cgtgactggattgcgaacccggatctggtcgcccgcttgcagcgcaaagctgagcttaacccacagcgtgccgaa

SEQ ID NO: 326599 - DNA, 75 bp, synthetic construct
  source 1..75: mol_type = other DNA
tcgcccgcttgcagcgcaaagctgagcttaacccgcagcgtgccgaaagtatttatggtggcggtgctgaaggtt

SEQ ID NO: 326600 - DNA, 75 bp, synthetic construct
  source 1..75: mol_type = other DNA
aaaatcgcgctcgtctggtgctggaagttgttgatgccgggattaaagaatggggtgccgatcgcattggtattc

SEQ ID NO: 326601 - DNA, 75 bp, synthetic construct
  source 1..75: mol_type = other DNA
cagggggtcgcgggttcgagtcccgtccgttccgccacttattaagaagcctcgagttaacgctcgaggtttttt

SEQ ID NO: 326602 - DNA, 75 bp, synthetic construct
  source 1..75: mol_type = other DNA
atacctgcctgtcacgcaggggggcgcgggttcgagtcccgtccgttccgccacttattaagaagcctcgagtta

SEQ ID NO: 326603 - DNA, 75 bp, synthetic construct
  source 1..75: mol_type = other DNA
agagtacccgtggctggctgagcgtgacgaagatggtgcagtggtcacgtttaccggtaaggtgcgcaaccataa

SEQ ID NO: 326604 - DNA, 75 bp, synthetic construct
  source 1..75: mol_type = other DNA
agaaaaagaataatggagccagtgtcagcgcactagcgagggagtatggcgtttccagagcgactatagctgcac

SEQ ID NO: 326605 - DNA, 75 bp, synthetic construct
  source 1..75: mol_type = other DNA
atgatcgtccgacagattccaacgggaatctggtggatgcgcatcttcatcctcggcgcacttaatatttcgcta

SEQ ID NO: 326606 - DNA, 75 bp, synthetic construct
  source 1..75: mol_type = other DNA
cctgcctgtcacgcagggggtcgcgggttcgagtcccgtccgttccgccacttattaagaagcctcgagttaacg

SEQ ID NO: 326607 - DNA, 75 bp, synthetic construct
  source 1..75: mol_type = other DNA
tggtaagccagttcctaaagagaatggaggatattgggatcatatgcaggaaatgcaaaatacgctcagaggatt

SEQ ID NO: 326608 - DNA, 75 bp, synthetic construct
  source 1..75: mol_type = other DNA
aattagttggctgcgcctttctttacgtaagccgtcttttattgcaaattattatgatgccctgggtaactacat

SEQ ID NO: 326609 - DNA, 75 bp, synthetic construct
  source 1..75: mol_type = other DNA
attatgatgccctgggtaactacatacgaaatcttcgtgacccgtcacgaccacaggatgcagctacaaaaaatt

SEQ ID NO: 326610 - DNA, 75 bp, synthetic construct
  source 1..75: mol_type = other DNA
aagcgcgaagccacgccggagggcgaccgctgggtcgaagctcgggagagcgatcagcaggcggcaaaacgctgg

SEQ ID NO: 326611 - DNA, 75 bp, synthetic construct
  source 1..75: mol_type = other DNA
tgaaatcgtttttgtcggtgttaccagtgcgcatcgcagcagtgcgtttgaggccgggcagtttattatggatta

SEQ ID NO: 326612 - DNA, 75 bp, synthetic construct
  source 1..75: mol_type = other DNA
atgcgccaggatataggcgggaaagaagctgaggagatagcagccgacggcgctgtgccagccgacaagtttatc

SEQ ID NO: 326613 - DNA, 75 bp, synthetic construct
  source 1..75: mol_type = other DNA
gttggggagaccttctaaaatcgcgtcagaagcccgtagcgcgattgtagagaaaaagaatagcggcgctagtgt

SEQ ID NO: 326614 - DNA, 75 bp, synthetic construct
  source 1..75: mol_type = other DNA
tatatgaactaaccagtgaagaagcactgtcatattttcttcgccatgactcctacacaaccttagaattaccgg

SEQ ID NO: 326615 - DNA, 75 bp, synthetic construct
  source 1..75: mol_type = other DNA
aaatcgatatagaattaagaaaaaaaactaacgaactcaaaataataaactacaaggtagtacgctaccgtgatg

SEQ ID NO: 326616 - DNA, 75 bp, synthetic construct
  source 1..75: mol_type = other DNA
agagttggcttcattcaagaaatcagttgaagattcacataaaagatttggcatggaagcaccaaaatggaaaac

SEQ ID NO: 326617 - DNA, 75 bp, synthetic construct
  source 1..75: mol_type = other DNA
ggcgtcaataaagccattgccgaatggccgaccgggaaagatgaaacgggtaatcagggctttgcggattatgtg

SEQ ID NO: 326618 - DNA, 75 bp, synthetic construct
  source 1..75: mol_type = other DNA
aaatgctgaagtaactaatgatgctgctgaaaaatatgctgaattcgataaaaaccttgggaaacttactaccag

SEQ ID NO: 326619 - DNA, 75 bp, synthetic construct
  source 1..75: mol_type = other DNA
aaacattttctgtaaataatttatggaatattgactggatccaaggaaaagaaacgagccccaataaagccaaga

SEQ ID NO: 326620 - DNA, 75 bp, synthetic construct
  source 1..75: mol_type = other DNA
agttgaaagataacgctgatgctatgaatgctgaacttcagcagaatgagttgttgctgaaaggccatgaggact

SEQ ID NO: 326621 - DNA, 75 bp, synthetic construct
  source 1..75: mol_type = other DNA
gaaattgagccggaagagcgcaaggtgctggaagagattgccggtgttctgggtcttcgtctggagaatcacctg

SEQ ID NO: 326622 - DNA, 75 bp, synthetic construct
  source 1..75: mol_type = other DNA
ggtggccattgcggaggcagacggcgaaattgagccggaagagcgcaaggtgctggaagagattgccggtgttct

SEQ ID NO: 326623 - DNA, 75 bp, synthetic construct
  source 1..75: mol_type = other DNA
atgctggaatcaataattaatctggtatcgagtggcgcagttgacagccacacaccgcaaactgccgttgctgcc

SEQ ID NO: 326624 - DNA, 75 bp, synthetic construct
  source 1..75: mol_type = other DNA
ttgattatctggacgcactggaaatggttgatatttccagtgctccagatattgaatggcctacgcctccggctg

SEQ ID NO: 326625 - DNA, 75 bp, synthetic construct
  source 1..75: mol_type = other DNA
aagtacctaagcaaatactggaagaaaaagattttataaattccggtatgttgacgagagatattcttgattatc

SEQ ID NO: 326626 - DNA, 75 bp, synthetic construct
  source 1..75: mol_type = other DNA
cttggcggtcagtatccggtgatctgcgtggtactgttcaacccggctaacggcacttgctttgcctctttcggc

SEQ ID NO: 326627 - DNA, 75 bp, synthetic construct
  source 1..75: mol_type = other DNA
tcagatttacatcaagagcgcatcagttaccagatgacacctatccgcgcacagcagcatgcatcagtttagatg

SEQ ID NO: 326628 - DNA, 75 bp, synthetic construct
  source 1..75: mol_type = other DNA
gttccagttatctcccgaatcgcaccttagaaaatgccatgtaccatgccctatcccattttggtaccccggaat

SEQ ID NO: 326629 - DNA, 75 bp, synthetic construct
  source 1..75: mol_type = other DNA
catcgattacaccaaagaagaattacgcctgatgcatgcagaaggtgttcttcgcacacaagaaatctggagaaa

SEQ ID NO: 326630 - DNA, 75 bp, synthetic construct
  source 1..75: mol_type = other DNA
accgcagtcgcagcaagcttgccagcagtggctggaagctaactggcatactctgacacccgcgaatttcaccca

SEQ ID NO: 326631 - DNA, 75 bp, synthetic construct
  source 1..75: mol_type = other DNA
cggcaggctgggacgttgtgtgtcagccgcagtcacaggcgtcctgccagcagtggctggaagcccactggcgta

SEQ ID NO: 326632 - DNA, 75 bp, synthetic construct
  source 1..75: mol_type = other DNA
gaaacttctgtgctggcgcattacaggctggcggggacgtgcggaacagcgacaaaaccacacgatatgcaggca

SEQ ID NO: 326633 - DNA, 75 bp, synthetic construct
  source 1..75: mol_type = other DNA
cgcggtcgataacgcgagtcgcgaagtggagtcccgttttgacttccgtaacgttgaagcctcatttgagctgaa

SEQ ID NO: 326634 - DNA, 75 bp, synthetic construct
  source 1..75: mol_type = other DNA
acaagagcatcagcaagttacggacacgcaaccgtatcactgccctatcccgaaaaacgtgacaccgtcaccttt

SEQ ID NO: 326635 - DNA, 75 bp, synthetic construct
  source 1..75: mol_type = other DNA
gaaacgtctgtgctggcgcattaccgactggcgggaacgtgcggaacagcgataaagccacacaatatgcaggca

SEQ ID NO: 326636 - DNA, 75 bp, synthetic construct
  source 1..75: mol_type = other DNA
atggtggacttacgtaaagcggcgcgggggcagatgtgcaccgtcagaattcctggctactgcaatcacgatccg

SEQ ID NO: 326637 - DNA, 75 bp, synthetic construct
  source 1..75: mol_type = other DNA
atcagttgctggatattctgcgtgccaagttgctgaagcgcggcattgaaggcagttcactggatgtaccggaaa

SEQ ID NO: 326638 - DNA, 75 bp, synthetic construct
  source 1..75: mol_type = other DNA
caaactgaaagtgcaggcgcaaattcagggcgatgagatccgtgtgacgggcaaatctcgtgatgatttgcaggc

SEQ ID NO: 326639 - DNA, 75 bp, synthetic construct
  source 1..75: mol_type = other DNA
ggatctgcttcggtcaagacgcgctgtcagtcctggacgagctaaccgcctgtcatgttttgctggttaccgatc

SEQ ID NO: 326640 - DNA, 75 bp, synthetic construct
  source 1..75: mol_type = other DNA
cgctcgcttccagcaaaaactctccgacctcggttttcagattgaagaagcttcctggctgaatccggtgcctaa

SEQ ID NO: 326641 - DNA, 75 bp, synthetic construct
  source 1..75: mol_type = other DNA
aataaaaccacaccggacgcagccgccgcgctcactacgctgatacacgcacttattgatattgaatgcacggca

SEQ ID NO: 326642 - DNA, 75 bp, synthetic construct
  source 1..75: mol_type = other DNA
cacacactccgaagttctggaagctgtgaaaatcgttaaaccggggaaaacgctggacttgggctgtggcaatgg

SEQ ID NO: 326643 - DNA, 75 bp, synthetic construct
  source 1..75: mol_type = other DNA
tcgaaacactggaagcggaaggtttcccaatctttgcttatgacggctcgcttggcggtcagtatcccgtgatct

SEQ ID NO: 326644 - DNA, 75 bp, synthetic construct
  source 1..75: mol_type = other DNA
ctggcaaataacagtatgggcagccatttacgtgaaacgattctttcgttgccaggcagtgagtgggaaaaagaa

SEQ ID NO: 326645 - DNA, 75 bp, synthetic construct
  source 1..75: mol_type = other DNA
ggcaatgagcggcgaagcggcgttttatggcttgcaaccagtagatagcgatctgcacgcgtttgctgcacatca

SEQ ID NO: 326646 - DNA, 75 bp, synthetic construct
  source 1..75: mol_type = other DNA
ttgactcattatctcagtcaatagactgggccgcgtggcaagctgccattaacacaggaaaggttatttatggta

SEQ ID NO: 326647 - DNA, 75 bp, synthetic construct
  source 1..75: mol_type = other DNA
ttctgtttttgtctgcgaaacagaaaaatggggagtcgactcaatggttagtcaagctgttcgcaagttaataaa

SEQ ID NO: 326648 - DNA, 75 bp, synthetic construct
  source 1..75: mol_type = other DNA
aattttgaatgcggtaattataacgacatagaaaactttattgaattaaaaagcgacaagaatgtaattgaggaa

SEQ ID NO: 326649 - DNA, 75 bp, synthetic construct
  source 1..75: mol_type = other DNA
tgccaatatgcaacgttgcactaaacctggcggttacaacctgattgtggcggcgatggataccgctgattatcc

SEQ ID NO: 326650 - DNA, 75 bp, synthetic construct
  source 1..75: mol_type = other DNA
aatgccgctattgaaataaagtcagtcatctataaatttaaatttaatgactcaattaatcacaaaggaattgag

SEQ ID NO: 326651 - DNA, 75 bp, synthetic construct
  source 1..75: mol_type = other DNA
tcttgtaaaaaaagcaggaggacgctacggaattcgttatgacgaattggctatgtttatattaatggcaatgta

SEQ ID NO: 326652 - DNA, 75 bp, synthetic construct
  source 1..75: mol_type = other DNA
gcgttagcccaggccgacacgctggaagttggtcacggtattggtccggttcaccacttccacgcctggtggtga

SEQ ID NO: 326653 - DNA, 75 bp, synthetic construct
  source 1..75: mol_type = other DNA
tcggtgtatcgcattgagcctgattttgtcgccgcccagctcgattcggtgttcagcgatgtgcgaatcgacacc

SEQ ID NO: 326654 - DNA, 75 bp, synthetic construct
  source 1..75: mol_type = other DNA
cattggccaatcaactcaacgaactgcaagcctgcctcggtcgagccagtgggcggcctagcaacagcgttatgg

SEQ ID NO: 326655 - DNA, 75 bp, synthetic construct
  source 1..75: mol_type = other DNA
tgctacttttaggcttgcgtcataataaatggttttctctgttcaaaaagttacagaagttgtttcaacacaaaa

SEQ ID NO: 326656 - DNA, 75 bp, synthetic construct
  source 1..75: mol_type = other DNA
tttaacgctcggaattatcagttggctgattttactggctttaacattcacttccacgcaggcgatgcagcgaaa

SEQ ID NO: 326657 - DNA, 75 bp, synthetic construct
  source 1..75: mol_type = other DNA
agcgttagcccaggcagactcactggaagtcggccacggaattggtccggttcaccacttccacgcctggtggtg

SEQ ID NO: 326658 - DNA, 75 bp, synthetic construct
  source 1..75: mol_type = other DNA
atgatctcgctcccatcagacactcgaatctggctggttgccggcgttactgatatgcgtaaatccttcaacggt

SEQ ID NO: 326659 - DNA, 75 bp, synthetic construct
  source 1..75: mol_type = other DNA
cgatatgcgtaaatccttcaacggtctgggagaacaggtacaacatgtgctggatgagaaccccttctccggtca

SEQ ID NO: 326660 - DNA, 75 bp, synthetic construct
  source 1..75: mol_type = other DNA
tgaatgataatcccttctccggtcacctgtttatcttccgtggccgacggggggacaccgttaaaattctttggg

SEQ ID NO: 326661 - DNA, 75 bp, synthetic construct
  source 1..75: mol_type = other DNA
ctgcgtgtgcctgcagcctttgaggggctttcagttgcggggccaaccgcagcttatgaatttcatgcccgaagc

SEQ ID NO: 326662 - DNA, 75 bp, synthetic construct
  source 1..75: mol_type = other DNA
gcgcaggctgtgatggtggcttacgctatgggcagcgatcttgaccagatcgctgccaactacaacgtgaaacgc

SEQ ID NO: 326663 - DNA, 75 bp, synthetic construct
  source 1..75: mol_type = other DNA
acctgctggatgtggtggagaaagcactgaacagtgagaatgtccgcccggtggctgaccgtctgacggttcgca

SEQ ID NO: 326664 - DNA, 75 bp, synthetic construct
  source 1..75: mol_type = other DNA
taagtacactccgggccagtcgaagaattacacggtggaaagtcagcgcgacaacctgatcaacattatccagaa

SEQ ID NO: 326665 - DNA, 75 bp, synthetic construct
  source 1..75: mol_type = other DNA
gaaacgcctcccgccggaatgtacggactcacaagtcagtccgaccgagaaccgtcctccttgtcagattggacg

SEQ ID NO: 326666 - DNA, 75 bp, synthetic construct
  source 1..75: mol_type = other DNA
tgggaatcatcacgaaatagataagttggatataaagtttgttgactcacttcttcctttaaaaaaagttaaaat

SEQ ID NO: 326667 - DNA, 75 bp, synthetic construct
  source 1..75: mol_type = other DNA
cacagagtcagggggccgccaccgtccccacaccggtaatcagcagtgacagcacgccagcagcaccacagggaa

SEQ ID NO: 326668 - DNA, 75 bp, synthetic construct
  source 1..75: mol_type = other DNA
tcgtatcagggtgaagtgatacaagagcctatcgccaagatgcgagcgatgaccattaccggcctcactctgttc

SEQ ID NO: 326669 - DNA, 75 bp, synthetic construct
  source 1..75: mol_type = other DNA
gactattacaggcctcactctgttcattgatgtgacgcttgaaacatggcgcacatatcgcctgcgagaagattt

SEQ ID NO: 326670 - DNA, 75 bp, synthetic construct
  source 1..75: mol_type = other DNA
gcaaggtatccattacccgttcgcaactggtaatgctcctcgataagctggactggtgtcagccaaaaacatccc

SEQ ID NO: 326671 - DNA, 75 bp, synthetic construct
  source 1..75: mol_type = other DNA
ggccctcctgtatttcaggcaggcgtaagcctgccagggttttccggcggcccggcaggccatacccccgccgga

SEQ ID NO: 326672 - DNA, 75 bp, synthetic construct
  source 1..75: mol_type = other DNA
taagtacactccgggccagtcgaagaattacacggtagaaagtcagcgtgaaaatctgatcaacattatccagaa

SEQ ID NO: 326673 - DNA, 75 bp, synthetic construct
  source 1..75: mol_type = other DNA
taaagcagtttggcgacccgcgtactggtgcggtgagcaatgagcaattcgctgcggcaatcccttatgatgaaa

SEQ ID NO: 326674 - DNA, 75 bp, synthetic construct
  source 1..75: mol_type = other DNA
aatgaaattgacgaaatggctattttgatggagcttcagacaaatacctacgattattatacaagactagaccgt

SEQ ID NO: 326675 - DNA, 75 bp, synthetic construct
  source 1..75: mol_type = other DNA
tttcgatgaatgaggaatgtgagcttgatttgaaactgaagctgcaacgcaaatatttcaaagaccttcgagact

SEQ ID NO: 326676 - DNA, 75 bp, synthetic construct
  source 1..75: mol_type = other DNA
attgccaaagagaaactgatgaaagcaagagaaaatgagattaatttgctgaaatcaagactggctaagctgatt

SEQ ID NO: 326677 - DNA, 75 bp, synthetic construct
  source 1..75: mol_type = other DNA
gtggtatcgcttctgcaatggcaatgaccggtctgccgcaggcttacactccaggtgccagcatggcctctattg

SEQ ID NO: 326678 - DNA, 75 bp, synthetic construct
  source 1..75: mol_type = other DNA
gtactgcaaaaggtgctgatgcggggcagttccacggcggtgtcgatgagctacctgccgggtacgataacaaat

SEQ ID NO: 326679 - DNA, 75 bp, synthetic construct
  source 1..75: mol_type = other DNA
cgataattttgcgttggtggcaaaaaatcacaggttaattgatacgctggctcagcagctcctggaggcgcattt

SEQ ID NO: 326680 - DNA, 75 bp, synthetic construct
  source 1..75: mol_type = other DNA
agcagttcgacaggcaacagaaagcccttcttaagacgattacggacagtgctcaggtacttggaatatcaccaa

SEQ ID NO: 326681 - DNA, 75 bp, synthetic construct
  source 1..75: mol_type = other DNA
tagaaattgacggtgattccggtggcttacagcgggctttacagcaaggtactgaagcagtagaagaatttggtg

SEQ ID NO: 326682 - DNA, 75 bp, synthetic construct
  source 1..75: mol_type = other DNA
aatcgaacccacacagaatatggccatcagcgacatacaggcggcgcgctgtgagtcattcaccatcagcgaagg

SEQ ID NO: 326683 - DNA, 75 bp, synthetic construct
  source 1..75: mol_type = other DNA
gctggcggattcagtactgctatgactggccttgcaggtgctgcggctattggtattggtggacttgctgcactg

SEQ ID NO: 326684 - DNA, 75 bp, synthetic construct
  source 1..75: mol_type = other DNA
caaaattcacgttgccaccgtacagtcgctggtgaaacgcaccctgcaatcggatgaaccgatgccggtagcccg

SEQ ID NO: 326685 - DNA, 75 bp, synthetic construct
  source 1..75: mol_type = other DNA
tgttcctgcgtaaagtacgcagccgtattctgtacgagcagatgaaaggccgcgccacgcgcttgtgcccggacg

SEQ ID NO: 326686 - DNA, 75 bp, synthetic construct
  source 1..75: mol_type = other DNA
agcgcaggcgctgaaagaaaaagtggtgctcgacgacgatgtcttcaaaaccggcaacttccaccgtcgcggcgg

SEQ ID NO: 326687 - DNA, 75 bp, synthetic construct
  source 1..75: mol_type = other DNA
aggcaattgccaatataaaaatctggcataagggtgaacagcgcgcaccgcataaaccattgttattgctatacg

SEQ ID NO: 326688 - DNA, 75 bp, synthetic construct
  source 1..75: mol_type = other DNA
cgcctcgcgcctgcgggaaaaagggccgcactggagcgccgaagtctttaacaaactgcctggctttatcgcccg

SEQ ID NO: 326689 - DNA, 75 bp, synthetic construct
  source 1..75: mol_type = other DNA
accgattcagaaacctataaaatcaccgaagcggatggccgtagctttgccgagcacagccatgaacaactggtg

SEQ ID NO: 326690 - DNA, 75 bp, synthetic construct
  source 1..75: mol_type = other DNA
aactctccatcagcgacagccgcgaaggcgggaaagacttcctgctcaggccttcattcgaggctatgaccagga

SEQ ID NO: 326691 - DNA, 75 bp, synthetic construct
  source 1..75: mol_type = other DNA
gggccggaggctgagcctgtgatggcagaagcaaaagccagcctgcagaaatacatcgccagtcagacgcggctg

SEQ ID NO: 326692 - DNA, 75 bp, synthetic construct
  source 1..75: mol_type = other DNA
ggctgtccgttgcagggccgacgggagcctatgagttccacgccagaagcgccgacgggcgcgtggctgatgcca

SEQ ID NO: 326693 - DNA, 75 bp, synthetic construct
  source 1..75: mol_type = other DNA
gcacgcgcctgtatgttaagccacggttcagggacaaacctggacaacctcgcgggcaatatgaacacaaagcgc

SEQ ID NO: 326694 - DNA, 75 bp, synthetic construct
  source 1..75: mol_type = other DNA
atggcaatgattgacctttcgcagttgcctgcaccgcagattgtggatgtgccggactttgagacgctgcttgcc

SEQ ID NO: 326695 - DNA, 75 bp, synthetic construct
  source 1..75: mol_type = other DNA
atttttgccgccattacaccagtattcgacgcagaacgttttggcattaaggttgtttcatcaccgcgtcacgcc

SEQ ID NO: 326696 - DNA, 75 bp, synthetic construct
  source 1..75: mol_type = other DNA
ggattgctcagagtaacgcgctggtaactattgaacagaatggttttgtggtttatcagaaagaggttcctcctg

SEQ ID NO: 326697 - DNA, 75 bp, synthetic construct
  source 1..75: mol_type = other DNA
gtgcgtcatgtagcaagacacaataaccctgaaacaatcattgccggggagcgtcacctaagggtccatcatatc

SEQ ID NO: 326698 - DNA, 75 bp, synthetic construct
  source 1..75: mol_type = other DNA
gcttcgcagctaacgatgaccgaatttcagatgctgctggccacgaaatacccggaccagaaaggtttcactcgc

SEQ ID NO: 326699 - DNA, 75 bp, synthetic construct
  source 1..75: mol_type = other DNA
ggctttcagttgcggggccaactgcagcttatgaatttcatgcccgaagtgccgacggtcgggtggcggatgcca

SEQ ID NO: 326700 - DNA, 75 bp, synthetic construct
  source 1..75: mol_type = other DNA
cgacagcgcttttggcgggttcaacaacaccgatttcatcgttgtcggcgggcgcccgggcatggggaaaaccat

SEQ ID NO: 326701 - DNA, 75 bp, synthetic construct
  source 1..75: mol_type = other DNA
gcttgagtgtggcggggccggtcggagcatatgagtatcatggtcgcagtgccgacgggcgggtcgctgacgttt

SEQ ID NO: 326702 - DNA, 75 bp, synthetic construct
  source 1..75: mol_type = other DNA
aaagagttgcgttgcccggtcatcgcactggctcagcttaaccgtaaggtcgaagaacgtgctaataagcgcccg

SEQ ID NO: 326703 - DNA, 75 bp, synthetic construct
  source 1..75: mol_type = other DNA
aatcgaccaggagcagggctggcataaaacgctgtccaatgtcggggtaaacggtgttaccggcatcagtgcttc

SEQ ID NO: 326704 - DNA, 75 bp, synthetic construct
  source 1..75: mol_type = other DNA
agtatgaagtgtatgactaccccggacgtttcaagggtgcccacgggcagaactttgcccgctggcagatggacg

SEQ ID NO: 326705 - DNA, 75 bp, synthetic construct
  source 1..75: mol_type = other DNA
ccagaacttccgtatcttccagaacgaggacatcaaaagcatcctcggcacgatgttgcaggaaaacggggtgac

SEQ ID NO: 326706 - DNA, 75 bp, synthetic construct
  source 1..75: mol_type = other DNA
atcggtggcgtcacgtccgacggtaaaaaaacggggatgaaagcgctgctttctgcgcagtcgcagctgaaagtt

SEQ ID NO: 326707 - DNA, 75 bp, synthetic construct
  source 1..75: mol_type = other DNA
gtggaagacggcaccggcgacgacgaagaaacgaaacttgcgcagaccgtttccaatatcatcggcaccaccgac

SEQ ID NO: 326708 - DNA, 75 bp, synthetic construct
  source 1..75: mol_type = other DNA
tatgccaccgcccgtgcacttggtctgcgcgccaaaattgacgagcagaccggatggcacaaaagcctttccaac

SEQ ID NO: 326709 - DNA, 75 bp, synthetic construct
  source 1..75: mol_type = other DNA
tgccggggctggacaccaaagaagtggcggttgcactggcgtcggtctgtattagcctgcgcgcgttttgttaca

SEQ ID NO: 326710 - DNA, 75 bp, synthetic construct
  source 1..75: mol_type = other DNA
tggcgataccgcgtgtgggtcaggaggtgattgtggacttcctcaacggcgatccggaccagccgatcattatgg

SEQ ID NO: 326711 - DNA, 75 bp, synthetic construct
  source 1..75: mol_type = other DNA
gatttaatgtgaatttgaaaaatcaggacacaaataatagttcatttagctacggagataaccgattcgagaagt

SEQ ID NO: 326712 - DNA, 75 bp, synthetic construct
  source 1..75: mol_type = other DNA
ttctcggcgtaccggggctggacaccaaagaggttgccgtcgcactggcatcggtatgccaggaactgaatgcat

SEQ ID NO: 326713 - DNA, 75 bp, synthetic construct
  source 1..75: mol_type = other DNA
tcggtgtgccgggtctcgatcctcaggaagtcgcgaccgcgcttgcgtccgtggctcagaaattacgtgctttcg

SEQ ID NO: 326714 - DNA, 75 bp, synthetic construct
  source 1..75: mol_type = other DNA
gaccaggcaaaacccgtgaccgttgttgtgcgtgtgccgcagggtgaaacggaagacgaaaccacgaccaatatc

SEQ ID NO: 326715 - DNA, 75 bp, synthetic construct
  source 1..75: mol_type = other DNA
cattgtcgacggcattaacgccaaattccgcgagctgaaatcaaacggctacatcgtggacggtgaatgctggtt

SEQ ID NO: 326716 - DNA, 75 bp, synthetic construct
  source 1..75: mol_type = other DNA
tgccaaaatcgaccagaccatcggctggcacaaaaccctgtctaacgttggcgttaacggagtgaccggcgtcag

SEQ ID NO: 326717 - DNA, 75 bp, synthetic construct
  source 1..75: mol_type = other DNA
ctcgcgtccacctgccagagcctgcgcgcctttggctatgtcagtgcgtggggctgtaaaaccatttctgatgcc

SEQ ID NO: 326718 - DNA, 75 bp, synthetic construct
  source 1..75: mol_type = other DNA
atcgactaccgcgagaatttcagccagcgtgagctgatggtcatcttccctgattttctggcatgggacaccacg

SEQ ID NO: 326719 - DNA, 75 bp, synthetic construct
  source 1..75: mol_type = other DNA
attatggggcgcacctaccaccaggaaaaccgcacccccggcagcctgccgggaacaaagacgcagatgaccatc

SEQ ID NO: 326720 - DNA, 75 bp, synthetic construct
  source 1..75: mol_type = other DNA
cggcgaaaagggaagagattaatatctggcgtgatgtgcaggagaatatggaatacatgatggaattcaacggaa

SEQ ID NO: 326721 - DNA, 75 bp, synthetic construct
  source 1..75: mol_type = other DNA
cagttgcagatgaaagcagaggttgaggcgctgacagagctgaaggcgatccgcagttatgctgtcggatggcct

SEQ ID NO: 326722 - DNA, 75 bp, synthetic construct
  source 1..75: mol_type = other DNA
gtcatttccaccgtatccactgccattgtcggcatggtctgcacggccagcgatgcggatgcggaaaccttcccc

SEQ ID NO: 326723 - DNA, 75 bp, synthetic construct
  source 1..75: mol_type = other DNA
acatcgtggacggtgaatgctggttcgacgaggaatcgaatgacaaggaaaccctcaaggccgggaaactgtata

SEQ ID NO: 326724 - DNA, 75 bp, synthetic construct
  source 1..75: mol_type = other DNA
tggacaagcccatcactgcaacgctgattcgcgacatcgttgacggcatcaatgccaaattccgtgagctgaaaa

SEQ ID NO: 326725 - DNA, 75 bp, synthetic construct
  source 1..75: mol_type = other DNA
ggcgtccctgcaggctatcgctgaccagtgcaagccggtcatcgtggccgtgcgtgtggccgaaggtattgaaga

SEQ ID NO: 326726 - DNA, 75 bp, synthetic construct
  source 1..75: mol_type = other DNA
atctgcccagtcacagctcggcgttaaaccgcgcattctcggcgtgccaggtcacgataacaaagccgttgctac

SEQ ID NO: 326727 - DNA, 75 bp, synthetic construct
  source 1..75: mol_type = other DNA
gccgaggggcatatgtgggcgaacgataagcccattaccgcgacactgattcgcgacattatcgacggtattaac

SEQ ID NO: 326728 - DNA, 75 bp, synthetic construct
  source 1..75: mol_type = other DNA
gctattgactgccgaagcagtcaccggcgttaagccgcgcattctcggcgtgccgggtctcgataccaaagaggt

SEQ ID NO: 326729 - DNA, 75 bp, synthetic construct
  source 1..75: mol_type = other DNA
agttcaggacatacgcggcgttctggccgtgtttgctgaacgtcgtcaggaccgcaatggtccctatgtcattct

SEQ ID NO: 326730 - DNA, 75 bp, synthetic construct
  source 1..75: mol_type = other DNA
acaatttattgctgagcgcgaagtggcatcactgaccgaagattcgctgattgagatgatggtgggtcgcaagct

SEQ ID NO: 326731 - DNA, 75 bp, synthetic construct
  source 1..75: mol_type = other DNA
aagaccgtaaacgtgacggtttagtgctgggcatgtcagtaaaagagaatatgtcgctgaccgcgctgcgctact

SEQ ID NO: 326732 - DNA, 75 bp, synthetic construct
  source 1..75: mol_type = other DNA
accggcagataccagtggcacggcagtgtctgtcattacaccggtaaggtagttcctgacattcccggcgtgctg

SEQ ID NO: 326733 - DNA, 75 bp, synthetic construct
  source 1..75: mol_type = other DNA
atgaaaattatcagtaaacgccgggcgatgacaatttaccgtcagcatccggcctcacgcatttttcgatactgc

SEQ ID NO: 326734 - DNA, 75 bp, synthetic construct
  source 1..75: mol_type = other DNA
cgatgacgatatctcgccagcatcctgagtcccgaatctttcgctactgcaccggaaaatatcagtggcacggta

SEQ ID NO: 326735 - DNA, 75 bp, synthetic construct
  source 1..75: mol_type = other DNA
atctgaaaaccgttatggaacagctggcgcagggcaaacgccgttgccagcaacattcacctctcaagaagtgca

SEQ ID NO: 326736 - DNA, 75 bp, synthetic construct
  source 1..75: mol_type = other DNA
tgcgccctggggaaactggcccgtttaacgctggcgcaatggcaatcacagttgttgattcctgtcgcggttaaa

SEQ ID NO: 326737 - DNA, 75 bp, synthetic construct
  source 1..75: mol_type = other DNA
atgcgtaaaacagtggcttttggctttgtcggaacggtgcgcgatttgcgccagctggttgccgaaggcaaattt

SEQ ID NO: 326738 - DNA, 75 bp, synthetic construct
  source 1..75: mol_type = other DNA
ttgagatgatggtgggacgtaagctggaagatcagtatccacacctggacaaagcgccgggggacgtcttactga

SEQ ID NO: 326739 - DNA, 75 bp, synthetic construct
  source 1..75: mol_type = other DNA
aggcaattggtctgctttccggtggcaatcagcaaaaagtggcgattgcccgcggtctgatgacacgccccaaag

SEQ ID NO: 326740 - DNA, 75 bp, synthetic construct
  source 1..75: mol_type = other DNA
atgaaagaaatcttcgagatttgtgatgacgttacggtttttcgtgacgggcaatttattgccgagcgcgaagta

SEQ ID NO: 326741 - DNA, 75 bp, synthetic construct
  source 1..75: mol_type = other DNA
cgatgacgatttaccgtcagcatccggcctcccgcatttttcgatactgcaccggcagataccagtggcatggca

SEQ ID NO: 326742 - DNA, 75 bp, synthetic construct
  source 1..75: mol_type = other DNA
gaaaacaatcagttaggtctctacaaactgacggatctacagcaaaaagataaccttgccgccgccaatccgcag

SEQ ID NO: 326743 - DNA, 75 bp, synthetic construct
  source 1..75: mol_type = other DNA
tccagccggggacttatgacaagttaatttccgcaatggatttttaccctactgctcttgatgctgcagatatct

SEQ ID NO: 326744 - DNA, 75 bp, synthetic construct
  source 1..75: mol_type = other DNA
tgattatcctcacaatccgaataccgaggacttaagccagttctcttatacggtgagaaataatgattactctct

SEQ ID NO: 326745 - DNA, 75 bp, synthetic construct
  source 1..75: mol_type = other DNA
ttctcggtgtgccggggctggataccaaagaggtggctgttgcactggcatcagtctgtcagaagctgcgcgctt

SEQ ID NO: 326746 - DNA, 75 bp, synthetic construct
  source 1..75: mol_type = other DNA
tgagctgctgagtgtggcgcaaagcctgcgtgggtttgcctacctgtcagcatatggctgcaagacggtgcagga

SEQ ID NO: 326747 - DNA, 75 bp, synthetic construct
  source 1..75: mol_type = other DNA
ccagaggggaggaagaagatcgtgtgcgcggtcttgaaaccggcgcggatgattatatcaccaagccgttttcac

SEQ ID NO: 326748 - DNA, 75 bp, synthetic construct
  source 1..75: mol_type = other DNA
gattcaacattggcacttcgtcagtggatgcgcgagaaaggcattcagtttgaaatgcagcaaaacgaaccggaa

SEQ ID NO: 326749 - DNA, 75 bp, synthetic construct
  source 1..75: mol_type = other DNA
cgatggcgatataccgccagtatccgcagtcccggttgtttcccttctgcacgggtaaatacaaatggtctggca

SEQ ID NO: 326750 - DNA, 75 bp, synthetic construct
  source 1..75: mol_type = other DNA
acgatataccgccagcatcctgagtcccgaatctttcgctactgcaccggcaaataccagtggcacggtagcgtc

SEQ ID NO: 326751 - DNA, 75 bp, synthetic construct
  source 1..75: mol_type = other DNA
tttaataccggcagccaaactgcggataactactatgcatcagtttattctgttgatcagggcgtaaaacgtatt

SEQ ID NO: 326752 - DNA, 75 bp, synthetic construct
  source 1..75: mol_type = other DNA
aaacggacagtatgacaatacaattattctctttacctccgataatggtgcggttatcgatggtcctctgccgct

SEQ ID NO: 326753 - DNA, 75 bp, synthetic construct
  source 1..75: mol_type = other DNA
gcatcattaacaccgctggtgacggcgtttcaaacacagagtgaagagactcgaacccaggcctggcagcgtcta

SEQ ID NO: 326754 - DNA, 75 bp, synthetic construct
  source 1..75: mol_type = other DNA
cgttccggggctgattagaggcgcagagatatgcgtaagtattgctgaacagcttcgcaaaggaggcaaccagtg

SEQ ID NO: 326755 - DNA, 75 bp, synthetic construct
  source 1..75: mol_type = other DNA
tgacacactccacgccattgaacgtgagttctttaccaaagagctacctgatgaagagcacgaaggcgaaacatt

SEQ ID NO: 326756 - DNA, 75 bp, synthetic construct
  source 1..75: mol_type = other DNA
agcatcattagaccgtctgtatgtcgctcgtattgatgcgttgatgtgcggggaactgacaaaaattcacctaca

SEQ ID NO: 326757 - DNA, 75 bp, synthetic construct
  source 1..75: mol_type = other DNA
atgcacgcaaaagaagaaggtatcatcagagcactgaaagaaatttcaaagacggaaagcgaagtagcgaaaaaa

SEQ ID NO: 326758 - DNA, 75 bp, synthetic construct
  source 1..75: mol_type = other DNA
agaacgcaatggctgagcgaataaacggtatcctgaaaaatgagtttttactctcgcgtcctgcagacctggcgc

SEQ ID NO: 326759 - DNA, 75 bp, synthetic construct
  source 1..75: mol_type = other DNA
cgctgattatccatgtaccgtcggcttcccgtttgccttcaaagagggggaattacgtcgatattacgaaggctg

SEQ ID NO: 326760 - DNA, 75 bp, synthetic construct
  source 1..75: mol_type = other DNA
cggttgaggcgcgagccagatcggtattgcgtgtgctggaaagagccactgaaaacatcgagagccgtataacag

SEQ ID NO: 326761 - DNA, 75 bp, synthetic construct
  source 1..75: mol_type = other DNA
tccggcagatgctaccacagctcaccgagagtctgccgaaatcggtgaaggtgacggtactttctgaccgtacca

SEQ ID NO: 326762 - DNA, 75 bp, synthetic construct
  source 1..75: mol_type = other DNA
ctaacaaagaacaggccattgtgatgaatgtccagcgccagcccggtgctaacattatctccaccgccgacagca

SEQ ID NO: 326763 - DNA, 75 bp, synthetic construct
  source 1..75: mol_type = other DNA
cagttgaagcaagagccagatcagtgatgagaatgctagataacgctgtagaaaagatagaaaaccggttctgtg

SEQ ID NO: 326764 - DNA, 75 bp, synthetic construct
  source 1..75: mol_type = other DNA
gaggcgttagtacgcggtgcgatcgtcaattacaatgaaaagcaattttcatatcctagtgtagatgagtggagt

SEQ ID NO: 326765 - DNA, 75 bp, synthetic construct
  source 1..75: mol_type = other DNA
acgccaggtcgtcagcaaagaaacggaagcccgttaaaaccacatgaaattgcaccatcggccagactgacccgg

SEQ ID NO: 326766 - DNA, 75 bp, synthetic construct
  source 1..75: mol_type = other DNA
tgacggttctcagaacacaaccagtcaccggactggatttgtctaacaccggacgccttatttacacaattggct

SEQ ID NO: 326767 - DNA, 75 bp, synthetic construct
  source 1..75: mol_type = other DNA
ccctccgatcctatcgaaacttggggactgattgccgcagcactcggcaagagcagcaaccgtggcgcgttccag

SEQ ID NO: 326768 - DNA, 75 bp, synthetic construct
  source 1..75: mol_type = other DNA
tggcgcgatgcttgccgacttcaccaatattcttctgctggatacgaccgccagccgctgcacccggcggttggc

SEQ ID NO: 326769 - DNA, 75 bp, synthetic construct
  source 1..75: mol_type = other DNA
agtctgatattatcggcacaactgatttttctgaaaactatatgcccgtggaaaagcgtgacgactatataatgt

SEQ ID NO: 326770 - DNA, 75 bp, synthetic construct
  source 1..75: mol_type = other DNA
atggcacacgcacttgagctcggtgataaaatgatttcaatcaatctattacctatgaccctggttaacgaacct

SEQ ID NO: 326771 - DNA, 75 bp, synthetic construct
  source 1..75: mol_type = other DNA
acatttactgtaagatactaggtctaaatggaaaacgtaaaagtagattgttcgccaatggttttcctggatggg

SEQ ID NO: 326772 - DNA, 75 bp, synthetic construct
  source 1..75: mol_type = other DNA
acccattctcagaagaattcggcagtgggatggtacacagacaattcactgtgggaagcactatttatgccgttg

SEQ ID NO: 326773 - DNA, 75 bp, synthetic construct
  source 1..75: mol_type = other DNA
atgaaaccgagcaatgttcctggaactgctggagatattggcggttctataggatctgagctaggtggaaaagta

SEQ ID NO: 326774 - DNA, 75 bp, synthetic construct
  source 1..75: mol_type = other DNA
atcatcgaagaacagggtgtggaacttacgcttctcaaaactaaaccagtcaccggactggatttatctgacacc

SEQ ID NO: 326775 - DNA, 75 bp, synthetic construct
  source 1..75: mol_type = other DNA
caccggactggatttatctaacaccggacgccttatttacacaattggctcggagctacagcgatacaccattat

SEQ ID NO: 326776 - DNA, 75 bp, synthetic construct
  source 1..75: mol_type = other DNA
caaagattgactaaagttttgtcaagaggctctaagtgcattgagatggacattgttgaagttgatccacttgac

SEQ ID NO: 326777 - DNA, 75 bp, synthetic construct
  source 1..75: mol_type = other DNA
cgacctaaagacacggctaaaaagacttttcagcgtaatcgcactcgcttcattgatggtgaggacttttttatt

SEQ ID NO: 326778 - DNA, 75 bp, synthetic construct
  source 1..75: mol_type = other DNA
acaaaaatgaaaatagtcttctcagaggtgacggaaggcggcaaagttaccaggataaaatttacctatcagcag

SEQ ID NO: 326779 - DNA, 75 bp, synthetic construct
  source 1..75: mol_type = other DNA
aataaaaatattggtgcagaaaacagatggttttcattaccatttatattaaaatatcctgtatttagagagtat

SEQ ID NO: 326780 - DNA, 75 bp, synthetic construct
  source 1..75: mol_type = other DNA
atgaattatgcgaatgattgtcttcgtgaagcagctttacgaggtagcaaagaagcttcagatgttcttattact

SEQ ID NO: 326781 - DNA, 75 bp, synthetic construct
  source 1..75: mol_type = other DNA
cccgagcttcacgcttatttgatgctatctatccagttcttgagaaaaaactcgaagaaaaactcgcgaaaaaat

SEQ ID NO: 326782 - DNA, 75 bp, synthetic construct
  source 1..75: mol_type = other DNA
ggaatgcttagttcattgttcttagccagcccatcggtagcagaatattttttaccagaacgtaaacctgtcaga

SEQ ID NO: 326783 - DNA, 75 bp, synthetic construct
  source 1..75: mol_type = other DNA
ggttatggataaaacaatatcaacatccccttagagtattgggggggatttttttcggggccgctttgatagcag

SEQ ID NO: 326784 - DNA, 75 bp, synthetic construct
  source 1..75: mol_type = other DNA
atcttgaaaagaacgttaactctgaagaacatttcttaatcgaagatcgtgggtcaagaaaggatttgcatgctc

SEQ ID NO: 326785 - DNA, 75 bp, synthetic construct
  source 1..75: mol_type = other DNA
ccagcgatgcggatgccgcgacatttcccctcaatgagccggtactgattaccaatgtgcagagcgccattgcga

SEQ ID NO: 326786 - DNA, 75 bp, synthetic construct
  source 1..75: mol_type = other DNA
caattacagatgaagtctgaagtccgcgcactgcaaacgctggaggaaatttgcgtatatcggattggctggccg

SEQ ID NO: 326787 - DNA, 75 bp, synthetic construct
  source 1..75: mol_type = other DNA
aatactgtcacggaaagtgcaggcctggatgtgatggaaatcatgtttccggcgcatcctgttgatatggataat

SEQ ID NO: 326788 - DNA, 75 bp, synthetic construct
  source 1..75: mol_type = other DNA
tttgtcggcccgtgggcactgccgtctccgccgtgggggtcggtctggctggatcgcgaatctgtgctgtttggc

SEQ ID NO: 326789 - DNA, 75 bp, synthetic construct
  source 1..75: mol_type = other DNA
ggtcacccagtggcctttatcacaaacgtcattagcgccgctggcaacggcttttaaggaagaatgtgaagagtc

SEQ ID NO: 326790 - DNA, 75 bp, synthetic construct
  source 1..75: mol_type = other DNA
tgcgcgtagccgaaggtaccggcgacgatgccgaagcgcagactatctctaatatcatcggcggcaccgacgaaa

SEQ ID NO: 326791 - DNA, 75 bp, synthetic construct
  source 1..75: mol_type = other DNA
gacagctctttaacagcgacggtgaacaggatgtcggcaacccgctactggcctcctggggcaagttggggcgcg

SEQ ID NO: 326792 - DNA, 75 bp, synthetic construct
  source 1..75: mol_type = other DNA
gtgataacagacagcgtggcacagaaacttgaggagcgcggtttatggcgacgtgcggcgacccgatggtctgac

SEQ ID NO: 326793 - DNA, 75 bp, synthetic construct
  source 1..75: mol_type = other DNA
cgtctgccaccggaaccagtggaaacattcggcggcttaagcaaggcagcgaccagaacacttaacgatatgggg

SEQ ID NO: 326794 - DNA, 75 bp, synthetic construct
  source 1..75: mol_type = other DNA
tggagacgctacaacgattctggtcacatccggtgcgagcatttttccagatgcgcttgcaggtgaacttccgca

SEQ ID NO: 326795 - DNA, 75 bp, synthetic construct
  source 1..75: mol_type = other DNA
ccaaaaagttatcagcggtatgccgaatttaagagaagttttttaacgaaggctgtagcagagattgaaaaaaat

SEQ ID NO: 326796 - DNA, 75 bp, synthetic construct
  source 1..75: mol_type = other DNA
ggattgggcttcacagtttacgaaaatgaagcagcggtttaaaacctgcattgtgaaaatcacaatgcagcttcc

SEQ ID NO: 326797 - DNA, 75 bp, synthetic construct
  source 1..75: mol_type = other DNA
atgtgacctcgcgcaaatgctacggtccgagcgcgaccagtgaaaaatgtccgggtaacgcgctagaaaaaggcg

SEQ ID NO: 326798 - DNA, 75 bp, synthetic construct
  source 1..75: mol_type = other DNA
ccgacactcactccgcgcgacatcatcgtgatggtggccgacatcgacagctacagtccgtttattcaggctgtg

SEQ ID NO: 326799 - DNA, 75 bp, synthetic construct
  source 1..75: mol_type = other DNA
cggtgctggcggcgcggtttgacatcaccgaagaagggctgcgttatttacgccagtgggtcaacgaatccggca

SEQ ID NO: 326800 - DNA, 75 bp, synthetic construct
  source 1..75: mol_type = other DNA
gggtatcgtgaaggaatgtccgcgccgttgctggtgttacctgaaagtggcggcgcatggctaaaaacctgttat

SEQ ID NO: 326801 - DNA, 75 bp, synthetic construct
  source 1..75: mol_type = other DNA
attgtggaaggcgctggtagaatatactgacgagctggggcaacctcgttggcaccgtgccaatctctatcaacg

SEQ ID NO: 326802 - DNA, 75 bp, synthetic construct
  source 1..75: mol_type = other DNA
tcgggcgcggcagtcgcatcctgtacttgaagcgtttatcagcctgttatcactgcctgacagtcgctttgtgtc

SEQ ID NO: 326803 - DNA, 75 bp, synthetic construct
  source 1..75: mol_type = other DNA
acctaccttacgccatttccgaccgtcgggcgcggcagtcgcatcctgtacttgaagcgtttatcagcctgttat

SEQ ID NO: 326804 - DNA, 75 bp, synthetic construct
  source 1..75: mol_type = other DNA
ttatcgccggtaaaaaacactacttcgatccgaaagttattccgtctattgcctataccgaaccagaagttgcat

SEQ ID NO: 326805 - DNA, 75 bp, synthetic construct
  source 1..75: mol_type = other DNA
atggctgtgacctggcgtgctgctttctggtgtctggatatcatggacagtaccggggccgacctgataaagggg

SEQ ID NO: 326806 - DNA, 75 bp, synthetic construct
  source 1..75: mol_type = other DNA
gctcacctcatttctggatattttcagccaccgcataaccacgcagtactaccggatctggcgaaaatatgcgta

SEQ ID NO: 326807 - DNA, 75 bp, synthetic construct
  source 1..75: mol_type = other DNA
tggtttcatccgcgttgacaaacagctgcgcactaacgtaccgcacatctttgctatcggcgatattgtcggtca

SEQ ID NO: 326808 - DNA, 75 bp, synthetic construct
  source 1..75: mol_type = other DNA
gatccgaaagttatcccgtccatcgcctataccgaaccagaagttgcatgggtgggtctgactgagaaagaagcg

SEQ ID NO: 326809 - DNA, 75 bp, synthetic construct
  source 1..75: mol_type = other DNA
ctggctggtatggcgaaaggccgcaaagtcaaagtggtcaacggtctgggtaaattcaccggggcgaacaccctg

SEQ ID NO: 326810 - DNA, 75 bp, synthetic construct
  source 1..75: mol_type = other DNA
gcaaagtgttccttacgcaggcgcagctggcgatgctgctggaaggtatcgactggcgacagcccaagaggctgc

SEQ ID NO: 326811 - DNA, 75 bp, synthetic construct
  source 1..75: mol_type = other DNA
caaccagaccgtttgcaccccggacgtgattgctcggatggaaagggcaggcgccccgccggagagctgttcagc

SEQ ID NO: 326812 - DNA, 75 bp, synthetic construct
  source 1..75: mol_type = other DNA
gtgattgctcggatggaaagggcaggcggccctgccggagagctgttcagcgacatcatgaacttcactctcaaa

SEQ ID NO: 326813 - DNA, 75 bp, synthetic construct
  source 1..75: mol_type = other DNA
atggaggccgtagaaatcccactggttgctgacaatcagacttttgccaccacaattaacggtacggtttatcag

SEQ ID NO: 326814 - DNA, 75 bp, synthetic construct
  source 1..75: mol_type = other DNA
tcaaaaaattcacgcatcagcctgaaaacgcgaacgctgctggggcgtaccggcaccgacgtcaacagccagttg

SEQ ID NO: 326815 - DNA, 75 bp, synthetic construct
  source 1..75: mol_type = other DNA
gtaccgggctgaccgaccggctggccccggatattgcgcggatcaatttttatcgtttttgccagttgctggaac

SEQ ID NO: 326816 - DNA, 75 bp, synthetic construct
  source 1..75: mol_type = other DNA
ctgcgcactaacgtaccgcacatctttgctatcggcgatattgtcggtcagccgatgctggcacacaaaggtgtt

SEQ ID NO: 326817 - DNA, 75 bp, synthetic construct
  source 1..75: mol_type = other DNA
cgcagaaaaaatctatctgcacgcattcctcgacggtcgcgacaccccaccgcgcagcgctgaagcttctctgaa

SEQ ID NO: 326818 - DNA, 75 bp, synthetic construct
  source 1..75: mol_type = other DNA
aaatacgacaccattatctgtaactatccgaacggcgacatggtaggtcacaccggggtgatggaagcggcggtt

SEQ ID NO: 326819 - DNA, 75 bp, synthetic construct
  source 1..75: mol_type = other DNA
gctgaagggctgcaaagcggcaagcagttgccgctcggtccggcgttattaggtcgcgttctggacggcagcggt

SEQ ID NO: 326820 - DNA, 75 bp, synthetic construct
  source 1..75: mol_type = other DNA
aatgcacaggtagccctgctaaatacacagctaagcgagtttgccccaaccatgccccaaaacgaggtggcgcaa

SEQ ID NO: 326821 - DNA, 75 bp, synthetic construct
  source 1..75: mol_type = other DNA
cgccaccgcaaatcatatcagtcgagacatacttatgcctgctggtcgctgacagccggtgccaacccggcattc

SEQ ID NO: 326822 - DNA, 75 bp, synthetic construct
  source 1..75: mol_type = other DNA
aagaacgtgaaagcggttgaaggcggcaaactttctgacatcgcgccgaccatgctctctttaatgggtatggaa

SEQ ID NO: 326823 - DNA, 75 bp, synthetic construct
  source 1..75: mol_type = other DNA
actgggtttgcgtaatgctctggcaattgctggcgcgaaaaatggtatccgtgaagcagagcaggatcgccagat

SEQ ID NO: 326824 - DNA, 75 bp, synthetic construct
  source 1..75: mol_type = other DNA
atggagtacggtaaatacgaaactctcgcaagggctggttattcaggagcagcccgcccacagggtgactggcag

SEQ ID NO: 326825 - DNA, 75 bp, synthetic construct
  source 1..75: mol_type = other DNA
ttcgtacctggaaagagaaagtgatcaatcagctgaccggtggtctggctggtatggcgaaaggccgcaaagtca

SEQ ID NO: 326826 - DNA, 75 bp, synthetic construct
  source 1..75: mol_type = other DNA
cgtcgctacgggcgattaacccgcgctaccgggctggtgctggaagccaccggattacaattgccgctcggcgca

SEQ ID NO: 326827 - DNA, 75 bp, synthetic construct
  source 1..75: mol_type = other DNA
atatcaggaaagatttgctaaccgggtatcagaattcaacgaaaaacaaagcagcagcaaaaggacggagcgtcg

SEQ ID NO: 326828 - DNA, 75 bp, synthetic construct
  source 1..75: mol_type = other DNA
atcaggagaaatttagcaaaagaccgtttcacggtaccaaaaacacaggcgggaaccaatcgggtcattcatctt

SEQ ID NO: 326829 - DNA, 75 bp, synthetic construct
  source 1..75: mol_type = other DNA
caccaaacgtctggaggaagaatttatctggcctgcggtgcgtgacggtaaggtatccattacccgctcgcatgg

SEQ ID NO: 326830 - DNA, 75 bp, synthetic construct
  source 1..75: mol_type = other DNA
cccatggtattcaggaaataatttaatatcaagctctccaggtgacacctataataaatcacagggaccattagc

SEQ ID NO: 326831 - DNA, 75 bp, synthetic construct
  source 1..75: mol_type = other DNA
acccacgccgtaagacaccgtggatatgcgaagtatcttgaggcagataacctcatggatgatgcgtccgacatg

SEQ ID NO: 326832 - DNA, 75 bp, synthetic construct
  source 1..75: mol_type = other DNA
atggatgatgcgtccgacatggtgctgttcgatgaactggtgttcacccgggcccgcgcactttcagtaactaag

SEQ ID NO: 326833 - DNA, 75 bp, synthetic construct
  source 1..75: mol_type = other DNA
attattgatttaaaagataatgttaatcagggggccggatatcttcagtttgctgatgattatacagtaacaacg

SEQ ID NO: 326834 - DNA, 75 bp, synthetic construct
  source 1..75: mol_type = other DNA
tctgaatgcaggtaaaaatctttattttacaggcgaaaatggcattattgatttaaaagataatgttaatcaggg

SEQ ID NO: 326835 - DNA, 75 bp, synthetic construct
  source 1..75: mol_type = other DNA
gggtcgccattatttgcttatgattctctcagtgaaaaatggtctctggctggagtcaccctgcataataatggt

SEQ ID NO: 326836 - DNA, 75 bp, synthetic construct
  source 1..75: mol_type = other DNA
acatgccggacgcctccttcgccggtcagcaggaaaccttcctcaacgttcagggttttgacgccgtactggtgg

SEQ ID NO: 326837 - DNA, 75 bp, synthetic construct
  source 1..75: mol_type = other DNA
aagagctggcgcgtcagggcctgaaacgtggtgaaaatggactgaaaatcatcatgatgtgtgagatcccgtcca

SEQ ID NO: 326838 - DNA, 75 bp, synthetic construct
  source 1..75: mol_type = other DNA
gtcgtacctgtcacgcggcgatcatcgctcgtgaactgggcattccggcggtagtgggctgtggtgatgcaacag

SEQ ID NO: 326839 - DNA, 75 bp, synthetic construct
  source 1..75: mol_type = other DNA
cttccgcgactgcttcgcactggagtgtgaagcagtgaaacgtgtgcgcaacgacatggggctgaccaacgttga

SEQ ID NO: 326840 - DNA, 75 bp, synthetic construct
  source 1..75: mol_type = other DNA
aggcgcgtccagaaaccgtgcgttcacgcggccaggtcacggaacgttataccctgcattcacagggcaagatta

SEQ ID NO: 326841 - DNA, 75 bp, synthetic construct
  source 1..75: mol_type = other DNA
tgtgaagcggtgaaacgtgtgcgcaacgacatggggttaaccaacgttgagatcatgatcccgttcgtgcgtacc

SEQ ID NO: 326842 - DNA, 75 bp, synthetic construct
  source 1..75: mol_type = other DNA
ggggaacagcagtaaagatgtctttaaaggaagtgaacaggcgataggtttcagtaatgtaacgccggtcattac

SEQ ID NO: 326843 - DNA, 75 bp, synthetic construct
  source 1..75: mol_type = other DNA
atgatctcactcccgtcaggcacccgcatctggctcgttgctgggataaccgatatgcgtaagtctttcaacggg

SEQ ID NO: 326844 - DNA, 75 bp, synthetic construct
  source 1..75: mol_type = other DNA
atgatctcactcccatcaggtacccgcatctggctcgttgccggcgttaccgatatgcgtaaatccttcaacggg

SEQ ID NO: 326845 - DNA, 75 bp, synthetic construct
  source 1..75: mol_type = other DNA
ttcacgcgggcggtatcttccataacccacaacttcatcgagaaggtgtggcggcggcagatactcagcccggta

SEQ ID NO: 326846 - DNA, 75 bp, synthetic construct
  source 1..75: mol_type = other DNA
atgatctcacgcccatcaggtacccgcatctggctcgttgccggcgttaccgatatgcgtaaatccttcaacggt

SEQ ID NO: 326847 - DNA, 75 bp, synthetic construct
  source 1..75: mol_type = other DNA
gtatctggctcgtggccggcatcaccgacatgagaaacggcttcaacggactgggagaacaggtacaacatgtgc

SEQ ID NO: 326848 - DNA, 75 bp, synthetic construct
  source 1..75: mol_type = other DNA
tgggctgatgctgatggtctgtgcctgttcaccaaacgcctggaggaaggcctgtttatctggcctgcggtgcgt

SEQ ID NO: 326849 - DNA, 75 bp, synthetic construct
  source 1..75: mol_type = other DNA
tcttcaaccatgaatccccgcgccgtggcgaaaccttcgtgacccgcaaaatcacccgcgcaatcgccaatatcg

SEQ ID NO: 326850 - DNA, 75 bp, synthetic construct
  source 1..75: mol_type = other DNA
ggcatgtacgcctgtaacggtattctcttcaaccatgaatccccgcgccgtggcgaaaccttcgttacccgcaaa

SEQ ID NO: 326851 - DNA, 75 bp, synthetic construct
  source 1..75: mol_type = other DNA
atcacccgcgcaatcgccaacatcgcccaggggctggagtcgtgcctgtacctcggcaatatggattccctgcgt

SEQ ID NO: 326852 - DNA, 75 bp, synthetic construct
  source 1..75: mol_type = other DNA
gtaaggtatccattacccgctcgcagctggcaatgctcctcgataaactggactggcgtcagcccaaaacatccc

SEQ ID NO: 326853 - DNA, 75 bp, synthetic construct
  source 1..75: mol_type = other DNA
gatctgccagcgtatatcctcgatacagaaacgatgctgatggggattaacaggaagaatcgcaacgttaatgat

SEQ ID NO: 326854 - DNA, 75 bp, synthetic construct
  source 1..75: mol_type = other DNA
cctgtttatctttcgtggccggcggggtgacactgttaaaatactctgggccgatgctgatggtctgtgcctgtt

SEQ ID NO: 326855 - DNA, 75 bp, synthetic construct
  source 1..75: mol_type = other DNA
acaaagaaaatgagaattgccaggcgggcagagtctggtggttacatgaaaattaagaatgttagatacgattca

SEQ ID NO: 326856 - DNA, 75 bp, synthetic construct
  source 1..75: mol_type = other DNA
gtgggtgaaggacttcggcacacacgacaaagcgcagagccagattatcagccaggcgacagacttcctcatgca

SEQ ID NO: 326857 - DNA, 75 bp, synthetic construct
  source 1..75: mol_type = other DNA
aaactgcgggatattctgcacggtcacatcaaggggacggagagcccgtacctggcgagtaaaggcctgtctgcc

SEQ ID NO: 326858 - DNA, 75 bp, synthetic construct
  source 1..75: mol_type = other DNA
ttctacccgcgctctccgtatgctgtcgccaaactgtacgcctactggatcaccgttaactatcgtgaatcctac

SEQ ID NO: 326859 - DNA, 75 bp, synthetic construct
  source 1..75: mol_type = other DNA
gcgcgaaatcgggcaaaatcatggctgacgaggcttgcagaggagtaagccagtatacactccgctatcgctacg

SEQ ID NO: 326860 - DNA, 75 bp, synthetic construct
  source 1..75: mol_type = other DNA
ttccctcagattatagaacacagcagctataaaggagtttttcccggcttcagtaagcaaattgtatgggtaaag

SEQ ID NO: 326861 - DNA, 75 bp, synthetic construct
  source 1..75: mol_type = other DNA
gctgttgaagctgtactggcgaaagcgaaagtgactgaaaaagaaaccactttcaacgagctgatgaaccagcag

SEQ ID NO: 326862 - DNA, 75 bp, synthetic construct
  source 1..75: mol_type = other DNA
gggtgacctgatgagccgtaacttcattgacgccatcattaaagaaaaaatcaatccagctggcgcaccgaccta

SEQ ID NO: 326863 - DNA, 75 bp, synthetic construct
  source 1..75: mol_type = other DNA
aagatggttccgtagaaggtctgcgcgctgaagtgcgtaaaaacatggagcgcgagctgaagagcgccatccgta

SEQ ID NO: 326864 - DNA, 75 bp, synthetic construct
  source 1..75: mol_type = other DNA
gcgctccatacgggcttgaggcggcaatgaaaatattacgaaccgctgtagcccgacaaacggaagtgcgtactc

SEQ ID NO: 326865 - DNA, 75 bp, synthetic construct
  source 1..75: mol_type = other DNA
gtgttacaagcgcaacggaaaacttcatgagcgagcatggtgatgcactcactgacgctctggctccttttcttt

SEQ ID NO: 326866 - DNA, 75 bp, synthetic construct
  source 1..75: mol_type = other DNA
cagaaaacctgaaaggtaaagcagcgaaattcgctatcaacctgaagaaagttgaagagcgtgaactgccggaac

SEQ ID NO: 326867 - DNA, 75 bp, synthetic construct
  source 1..75: mol_type = other DNA
cgtgaagtgcagccggatgaagtttataaccttggcgctatgagccacgtcgccgtctcttttgagtcgccggaa

SEQ ID NO: 326868 - DNA, 75 bp, synthetic construct
  source 1..75: mol_type = other DNA
ttaccgccggcgcattctgacccagcttaatcggggagaaagtcgccatgccgttgccagagccatctgtcacgg

SEQ ID NO: 326869 - DNA, 75 bp, synthetic construct
  source 1..75: mol_type = other DNA
caggtttcagtgctggtccgttcattgctgaaaagtgaacgtccttccggactgactcaggcaatcattgaagtg

SEQ ID NO: 326870 - DNA, 75 bp, synthetic construct
  source 1..75: mol_type = other DNA
acatatcaatatgctcggccattattccttcacgctggcagaactggtgaccaaaggtcatctgagaccattaaa

SEQ ID NO: 326871 - DNA, 75 bp, synthetic construct
  source 1..75: mol_type = other DNA
ggatggcggcactggcagtcgttatcgctttttgctcggcctcccaggatatcgtctttgatgcgtggaaaacgg

SEQ ID NO: 326872 - DNA, 75 bp, synthetic construct
  source 1..75: mol_type = other DNA
ctggatttgacgcacttctctttcctgccagctctgctggaagtcggcgttttagtcgccctgggcggcgtcgtg

SEQ ID NO: 326873 - DNA, 75 bp, synthetic construct
  source 1..75: mol_type = other DNA
ggcgcataacgctgaacccagcggtaaatcgtggagtgatcgacattcactccgcgttcagccagcatctcctgc

SEQ ID NO: 326874 - DNA, 75 bp, synthetic construct
  source 1..75: mol_type = other DNA
cggggacgctgagggactctatctttgtgctggaaggtcttctggaacaggagaccgggctgaatccaaccgaaa

SEQ ID NO: 326875 - DNA, 75 bp, synthetic construct
  source 1..75: mol_type = other DNA
caatattgccaggatgtcaccgcagaaaaggatggcggttctggttgcctttgtccttgcatgggaaacgctggc

SEQ ID NO: 326876 - DNA, 75 bp, synthetic construct
  source 1..75: mol_type = other DNA
cctgaagcgtaaaggcctggagagtttcgcaacgaagcccctggtttcgagtgatgggcgaaccctcatcccgat

SEQ ID NO: 326877 - DNA, 75 bp, synthetic construct
  source 1..75: mol_type = other DNA
cacgcctctccccgctttgccacggacatatcaatatgctcggccattattccttcacgctggcagaactggtga

SEQ ID NO: 326878 - DNA, 75 bp, synthetic construct
  source 1..75: mol_type = other DNA
gcgcgattcatggcggctcccggtcatcagtactggcgaggccgatacggtgaccttcgcgggccgggcacgaat

SEQ ID NO: 326879 - DNA, 75 bp, synthetic construct
  source 1..75: mol_type = other DNA
ctcattcgctctttactgaaaagctcgcgcccatcaggactggcacaggcaattatggaagtagggcgtgtaaac

SEQ ID NO: 326880 - DNA, 75 bp, synthetic construct
  source 1..75: mol_type = other DNA
acgctgacgttgacggcatgctggatactctgcgtaaacagcaggcaacctggaaagaaaaagacggcgctgttg

SEQ ID NO: 326881 - DNA, 75 bp, synthetic construct
  source 1..75: mol_type = other DNA
gcttccttcaagcaggaggcgtatccaaaccaatgaatttagatattgaattggttaattgtgatatcacttcat

SEQ ID NO: 326882 - DNA, 75 bp, synthetic construct
  source 1..75: mol_type = other DNA
atgccgggaagcgaccccgtcaataacggtgatctgagtgccgatattcggaggcttgagcacgcgctcaccgcc

SEQ ID NO: 326883 - DNA, 75 bp, synthetic construct
  source 1..75: mol_type = other DNA
agaaatcgtcagccactggcgccgctgttactgaaggcgccttctcagcagttgcgaatttcaacctgacttatc

SEQ ID NO: 326884 - DNA, 75 bp, synthetic construct
  source 1..75: mol_type = other DNA
gctgattaccgttaccgatgccactacgcttgcaaaagaggtgtcctctttactcaccgacgccgattaccgtag

SEQ ID NO: 326885 - DNA, 75 bp, synthetic construct
  source 1..75: mol_type = other DNA
gtgaccgttaccggtagcctgaaatttgatatttctgtaacgccgcaactggctgctaaagcagtgacgctgcgc

SEQ ID NO: 326886 - DNA, 75 bp, synthetic construct
  source 1..75: mol_type = other DNA
cgccagtgggcacctcatcgcccggtatggattgccaccagcactcacgaaggcgaagagagtgtggtcattgcc

SEQ ID NO: 326887 - DNA, 75 bp, synthetic construct
  source 1..75: mol_type = other DNA
cacctcagagagtatggcagaacagaaaaacataaatgcacctttgtttttcaacctgaagtgtcagcgagagta

SEQ ID NO: 326888 - DNA, 75 bp, synthetic construct
  source 1..75: mol_type = other DNA
aaccatagctggaatgtttcaatttgcaacagataatggttatacctcaggaaacccatttaacggtctggctcc

SEQ ID NO: 326889 - DNA, 75 bp, synthetic construct
  source 1..75: mol_type = other DNA
tcattcatcttattaagccagcaatcgacgctctccggagtcagatgacattaacgagactgagcaaagagcata

SEQ ID NO: 326890 - DNA, 75 bp, synthetic construct
  source 1..75: mol_type = other DNA
aaggggccgaaaaatgctggattgtggtgaaggcgctggtcgatgccgacagtcgggagtttccgtcagtcacac

SEQ ID NO: 326891 - DNA, 75 bp, synthetic construct
  source 1..75: mol_type = other DNA
gaactgccggcgctgccagcaatcttcaggacggtgacaataccctacgctatagcgcctgggttaaaaaagcaa

SEQ ID NO: 326892 - DNA, 75 bp, synthetic construct
  source 1..75: mol_type = other DNA
agttgggggcaaaagttcagacccgtagcactttcttgttcgcaggtgaacggctgctacgacccaactgttctg

SEQ ID NO: 326893 - DNA, 75 bp, synthetic construct
  source 1..75: mol_type = other DNA
ccatgacgccaaccggttcggagcgcgtacaatcggctttcgggaaggatgttcagcacgtttatctgccgtacg

SEQ ID NO: 326894 - DNA, 75 bp, synthetic construct
  source 1..75: mol_type = other DNA
cctgcggcctgtttcccgctgtggactttccggggggctggagtaaccacatcccgtttcagcagtccaggggaa

SEQ ID NO: 326895 - DNA, 75 bp, synthetic construct
  source 1..75: mol_type = other DNA
acggtgtgtaaggaaactgcgcctgatggcgcagttgtctgcccttccgccgccacccctgcggcctgtttcccg

SEQ ID NO: 326896 - DNA, 75 bp, synthetic construct
  source 1..75: mol_type = other DNA
gatcaatctattgattttggacaagtatcaaaattatttctggagaatgatggggaaagtcaacccaaatctttt

SEQ ID NO: 326897 - DNA, 75 bp, synthetic construct
  source 1..75: mol_type = other DNA
cacagcggggaactgaagtatttggtttcgtgactaccggaggggaattacttaatggattaattatgtttttcg

SEQ ID NO: 326898 - DNA, 75 bp, synthetic construct
  source 1..75: mol_type = other DNA
ttgaaagagtaagccgggctaaccggtttgaatatggacatattcgggtttcggggtgtgtgggatgggctttat

SEQ ID NO: 326899 - DNA, 75 bp, synthetic construct
  source 1..75: mol_type = other DNA
tgcaccatttctgatttttattctgtccccgttatttaaaataaatatttacattgcatcacttgttgccggtct

SEQ ID NO: 326900 - DNA, 75 bp, synthetic construct
  source 1..75: mol_type = other DNA
gtgaccgttaccggtagcctgaaattcgatatttctgtaacgccgcagttggctgctaaagcagtgacgctgcgc

SEQ ID NO: 326901 - DNA, 75 bp, synthetic construct
  source 1..75: mol_type = other DNA
cattgccgatctcgcttttgttggcggttcattggtcgaacgcggtgggcataatccgctggaagccgccgcaca

SEQ ID NO: 326902 - DNA, 75 bp, synthetic construct
  source 1..75: mol_type = other DNA
ccgccatccgctgaaaccaggcggcattatgctgcactccgtctccgtcggtgaaaccctggcggcgatcccgtt

SEQ ID NO: 326903 - DNA, 75 bp, synthetic construct
  source 1..75: mol_type = other DNA
gcttttactggcccgatagttaatggacattctgatgagctagatacaaatggtggtacgggcacagctatcgta

SEQ ID NO: 326904 - DNA, 75 bp, synthetic construct
  source 1..75: mol_type = other DNA
attatgctgcactccgtctccgtcggtgaaactctggcggcgatcccattggtgcgcgcgctgcgtcatcgttat

SEQ ID NO: 326905 - DNA, 75 bp, synthetic construct
  source 1..75: mol_type = other DNA
cagcacgtctatctgccttacgacttgcccgatgcgctcaaccgtttcctcaataaagtcgaccctaaactggtg

SEQ ID NO: 326906 - DNA, 75 bp, synthetic construct
  source 1..75: mol_type = other DNA
cactggcagtaccaggaagaaacgcgggagtgcgaattttacgagaacgaactggaaaatttgtggttaccgcta

SEQ ID NO: 326907 - DNA, 75 bp, synthetic construct
  source 1..75: mol_type = other DNA
atacgactgtgccagtgtcgcgtgtggaaacttattcgaccatgcacccggagcaggattcaattacggttaatg

SEQ ID NO: 326908 - DNA, 75 bp, synthetic construct
  source 1..75: mol_type = other DNA
cgtcgcaatagcaaaaaacacactcaatgagagtgagctggcaaccctgtatgcctgtgtggaagcagcaaaatg

SEQ ID NO: 326909 - DNA, 75 bp, synthetic construct
  source 1..75: mol_type = other DNA
accgattttgatgcggcgttgcagtcaaacgatatggcccgcgtggatgaagttcggcgacgggcgagcgattat

SEQ ID NO: 326910 - DNA, 75 bp, synthetic construct
  source 1..75: mol_type = other DNA
tattctggtcggaaaaccggctgtatcacggcgtacttcacatcctgataaaaccgctgcgttatttaaacgtgc

SEQ ID NO: 326911 - DNA, 75 bp, synthetic construct
  source 1..75: mol_type = other DNA
gccgattttgatgcggcattgcagtcaaacgacatagcgcgcgtcgatgaagttcgtcggcgggcgagcgattat

SEQ ID NO: 326912 - DNA, 75 bp, synthetic construct
  source 1..75: mol_type = other DNA
atgaaaaaactgtttgccgccctcgccctcgctgccgttgttgcccccgtgtgggccgccacccagaccgtcacg

SEQ ID NO: 326913 - DNA, 75 bp, synthetic construct
  source 1..75: mol_type = other DNA
aaatagattccctatgggaagtgcatcaagtatcattgatgaaatggtggtcaatcagggtggtgagcgtgattc

SEQ ID NO: 326914 - DNA, 75 bp, synthetic construct
  source 1..75: mol_type = other DNA
taaattcaacgtccgtactgcgttctcgtctcagtatctgagccatatgccttcgagtgtgcttaaaaccatgaa

SEQ ID NO: 326915 - DNA, 75 bp, synthetic construct
  source 1..75: mol_type = other DNA
gtatcgacctcggcaccaccaatagtttaattgctgtctggaaagacggcgctgcacaattaattcccaataaat

SEQ ID NO: 326916 - DNA, 75 bp, synthetic construct
  source 1..75: mol_type = other DNA
aaaaccacaaagttaaaaataacattctggttgaatccttcgatgtgccgttgaagaaaaccggggcttatcagt

SEQ ID NO: 326917 - DNA, 75 bp, synthetic construct
  source 1..75: mol_type = other DNA
tcaaaagtgtggctatagccaatgcccggaacctgtgtcgtgctgcattaacagaaccgcaagaaaacattccag

SEQ ID NO: 326918 - DNA, 75 bp, synthetic construct
  source 1..75: mol_type = other DNA
caccgattttgatgcggcgttgcagtcaaacgatatggcgcgcgtcgatgaagttcgtcagcgggcgagcgatta

SEQ ID NO: 326919 - DNA, 75 bp, synthetic construct
  source 1..75: mol_type = other DNA
gagctacatcagcaaatactctcccgcgtgggatgattatatttcagcgatccgccaagaaattattgtcaaggc

SEQ ID NO: 326920 - DNA, 75 bp, synthetic construct
  source 1..75: mol_type = other DNA
gggagctggggagaaacgggtttttgaagtgctgaaagccgctcatgacccccttctgagacctaatggtttact

SEQ ID NO: 326921 - DNA, 75 bp, synthetic construct
  source 1..75: mol_type = other DNA
gcgatgttcaccgaactgtctctgagagacataaaatagtaaacaaatgcctgacagggacagataaaagagaac

SEQ ID NO: 326922 - DNA, 75 bp, synthetic construct
  source 1..75: mol_type = other DNA
aaatcaattacctaaatctatgactacaggaacgttcttgctcctttcagataagcccaaaataggatggcttca

SEQ ID NO: 326923 - DNA, 75 bp, synthetic construct
  source 1..75: mol_type = other DNA
tatgacgatgtcgcgatgaagatcccgctggacaccgcgcagcgcatgatgggtacggatggcgtcagcaaagtg

SEQ ID NO: 326924 - DNA, 75 bp, synthetic construct
  source 1..75: mol_type = other DNA
tgattgaagaattgatttccatagccgaagacgccttgcttgaaattgtcttctcaacgcacagggaatctattg

SEQ ID NO: 326925 - DNA, 75 bp, synthetic construct
  source 1..75: mol_type = other DNA
agccagggttcaggagcaactcagggcaattaacccggttttggcaaatcccgaggaattcagggccagcctaaa

SEQ ID NO: 326926 - DNA, 75 bp, synthetic construct
  source 1..75: mol_type = other DNA
aaaccgtgattctgggtgtcgatacccatcttgatattcatgtcggcgccgttatcagtcaggcaggtaaactgc

SEQ ID NO: 326927 - DNA, 75 bp, synthetic construct
  source 1..75: mol_type = other DNA
tgcggcgcgagcgccctatccggcctacgcagatcacatcaggttatgtttcgtttgtcatcaacctcaaattat

SEQ ID NO: 326928 - DNA, 75 bp, synthetic construct
  source 1..75: mol_type = other DNA
gggagccggtgagaaacgtgtatttgaagtgcttaaagctgctcatgacccctccataatgcccaatggattgct

SEQ ID NO: 326929 - DNA, 75 bp, synthetic construct
  source 1..75: mol_type = other DNA
atacttgattctatgtgtcgggttcttgaggctgattactccgatttgatggtctgtactactcaaaagggctac

SEQ ID NO: 326930 - DNA, 75 bp, synthetic construct
  source 1..75: mol_type = other DNA
ggatgccatccggctgattaatgctcttcgtaatatgcctgctgcggaactggtgcatcagattggttttgtcct

SEQ ID NO: 326931 - DNA, 75 bp, synthetic construct
  source 1..75: mol_type = other DNA
tatcaccaggcgcgcatcagggagctttcagaagaagttaaacataccttttatgatgagtgtcataactttgcc

SEQ ID NO: 326932 - DNA, 75 bp, synthetic construct
  source 1..75: mol_type = other DNA
catcccaactcagggctgcgtactggcgcacgtcaccacccagatcgaagcgattcgtcgcggcgcgcctggcgg

SEQ ID NO: 326933 - DNA, 75 bp, synthetic construct
  source 1..75: mol_type = other DNA
gggggtcgctgatcttgacgaagcctacctgacgctgcaaccgctgttaagcaatgctgccgcgacggtctttgg

SEQ ID NO: 326934 - DNA, 75 bp, synthetic construct
  source 1..75: mol_type = other DNA
aagggatggtgatcccgagtttaccgacctcagaggcggtcttcctggctgcgggtgtgctgggggcgacgatta

SEQ ID NO: 326935 - DNA, 75 bp, synthetic construct
  source 1..75: mol_type = other DNA
ccgtctgtcatgactaaagccgaaatgacattttatctttcattaatatcgactgtaggcgataagtacacagtc

SEQ ID NO: 326936 - DNA, 75 bp, synthetic construct
  source 1..75: mol_type = other DNA
atgcaaacgcgattatctgcatggcgatcgtgtttcgtctgatgttcttcagtaagacaggacgcaggcaccgcc

SEQ ID NO: 326937 - DNA, 75 bp, synthetic construct
  source 1..75: mol_type = other DNA
agcgaaaaagggctgaaagagtttggcgtggaactggcgatgctcgacgaagcgcgcgcagtgggcgcagagttc

SEQ ID NO: 326938 - DNA, 75 bp, synthetic construct
  source 1..75: mol_type = other DNA
gttttggtagcacaccgtttgagcgtggtgacgaagccggaagaagtttttgtaagcccgctcagggtctttcag

SEQ ID NO: 326939 - DNA, 75 bp, synthetic construct
  source 1..75: mol_type = other DNA
gtgggataaaccgccgctgattaacgcccgcgtagaaactgcggccaccagtcgtatgtttaaaccgctctggca

SEQ ID NO: 326940 - DNA, 75 bp, synthetic construct
  source 1..75: mol_type = other DNA
caaagttcttctgctcagtgaacgtgatgaacaccttcatctggatccggttttctggggatatgctcccggatg

SEQ ID NO: 326941 - DNA, 75 bp, synthetic construct
  source 1..75: mol_type = other DNA
ggtcgtctggttctattgggttcaggcagaaattattgcgatggctaccgacctggcggaatttattggtgcggc

SEQ ID NO: 326942 - DNA, 75 bp, synthetic construct
  source 1..75: mol_type = other DNA
ggtgacaccgttaaaattctttgggctgatgctgatggtctgtgcctgttcaccaaacgccttgaggaaggtcag

SEQ ID NO: 326943 - DNA, 75 bp, synthetic construct
  source 1..75: mol_type = other DNA
aaacgcgtgaagattaccttgcgcttctcgcggaagatattgaacgcgatattccctatgatcccgaacccattg

SEQ ID NO: 326944 - DNA, 75 bp, synthetic construct
  source 1..75: mol_type = other DNA
tgagagtagcgcggaaagtcgtaacggtgcgaaagcgttgctcgaacagttggggctggggaaacgtcttgatca

SEQ ID NO: 326945 - DNA, 75 bp, synthetic construct
  source 1..75: mol_type = other DNA
ctggcaaccatgatttatcgccgcctcagtacccctgcttatgcacaggcacggctggaaataggcaaagtcaac

SEQ ID NO: 326946 - DNA, 75 bp, synthetic construct
  source 1..75: mol_type = other DNA
cagagtgaaatttacaggtaagaggctggaaagagagtggcagcaattctgcaaaaaacatgacctaaaaaatga

SEQ ID NO: 326947 - DNA, 75 bp, synthetic construct
  source 1..75: mol_type = other DNA
aagctgttcggcttctctatcatcgccatcactgccctctcggtgatgatgtccgttgattttatggtgccggac

SEQ ID NO: 326948 - DNA, 75 bp, synthetic construct
  source 1..75: mol_type = other DNA
ccctgcaggagaaatttaccgatgtcatcaccggtgttccaggttccggtaaaagcgtgctggccaaccgcctta

SEQ ID NO: 326949 - DNA, 75 bp, synthetic construct
  source 1..75: mol_type = other DNA
tcagcttgaaggtttgaagatcacgcatgacgcgatgctttggcggctgattggtatgcttcagggggatgatga

SEQ ID NO: 326950 - DNA, 75 bp, synthetic construct
  source 1..75: mol_type = other DNA
gaaaacggtctgattcaaattcgtccgcagcgtggcagctacgtgaacaaaatttccatggcccaggtgcgcaac

SEQ ID NO: 326951 - DNA, 75 bp, synthetic construct
  source 1..75: mol_type = other DNA
gcgcatcctgattttggcgttgcactggaacgtaccgtgaccgagttgctgcaaggtcgtggcctgaaagatctg

SEQ ID NO: 326952 - DNA, 75 bp, synthetic construct
  source 1..75: mol_type = other DNA
gcgtggtactgtttaatcctgctaacggcacctgctttgcctctttcggtgcgcatcctgattttggcgtagcac

SEQ ID NO: 326953 - DNA, 75 bp, synthetic construct
  source 1..75: mol_type = other DNA
aacagacaaaactgaacgctttcctgtcagggatcctagatgattacaagactggggttatcactcagatacaag

SEQ ID NO: 326954 - DNA, 75 bp, synthetic construct
  source 1..75: mol_type = other DNA
cttggcggccagtatccggtgatttgcgtggtactgtttaatcctgctaacggtacctgctttgcctctttcggt

SEQ ID NO: 326955 - DNA, 75 bp, synthetic construct
  source 1..75: mol_type = other DNA
atctgcacgcgtttgcggcgcatcagtcgctgttaaaagcctacgaaaagctgcagcgcgccaaagcagcattct

SEQ ID NO: 326956 - DNA, 75 bp, synthetic construct
  source 1..75: mol_type = other DNA
tgatggctatcttcaacaaagaagataaagaagtttatattgccgattacgagcatctgggcgtttatgcttgcc

SEQ ID NO: 326957 - DNA, 75 bp, synthetic construct
  source 1..75: mol_type = other DNA
atccattcatgagttagttcagaggatcctcgatgaaacgttagatcaagatgagtcagataacgaaccatattt

SEQ ID NO: 326958 - DNA, 75 bp, synthetic construct
  source 1..75: mol_type = other DNA
atgatcagaggcagaataacaggactgaataacgctacaacctatcttaatacaacgggtcaacgtctcggacgt

SEQ ID NO: 326959 - DNA, 75 bp, synthetic construct
  source 1..75: mol_type = other DNA
aatgcaagcagatttaaatgattcaattgataaagggggcgtagcctttacaaagaatgctgtactgtactttta

SEQ ID NO: 326960 - DNA, 75 bp, synthetic construct
  source 1..75: mol_type = other DNA
tgtctattctgggcagcgttacattgcttctgacatcgctcaacaaatggcgttaagccagatcgaaccagaaaa

SEQ ID NO: 326961 - DNA, 75 bp, synthetic construct
  source 1..75: mol_type = other DNA
tacctcagcaaaggcgcggctccgcaggaagtcgtgagtgcgattcgttctgtctattcagggcagcgttacatt

SEQ ID NO: 326962 - DNA, 75 bp, synthetic construct
  source 1..75: mol_type = other DNA
ctggaaagagttaagcgagaaagggcttgttttcagaattaatcacgaaattctacatccgttagggctggctat

SEQ ID NO: 326963 - DNA, 75 bp, synthetic construct
  source 1..75: mol_type = other DNA
ttcggtaccgtcatccccgacgaaagcacccgactgaaatccttccggctgcgcgggggcggtaagcgcgcggcg

SEQ ID NO: 326964 - DNA, 75 bp, synthetic construct
  source 1..75: mol_type = other DNA
gactggggccatgccaaagactacgtaaaaatgcagtggatgatgctgcaacaggaacagccggaagatttcgtc

SEQ ID NO: 326965 - DNA, 75 bp, synthetic construct
  source 1..75: mol_type = other DNA
tcaccgggcaagatggctcttatttggctgaatttcttcttgacaaaggctatgaagtgcatggcattaagcgtc

SEQ ID NO: 326966 - DNA, 75 bp, synthetic construct
  source 1..75: mol_type = other DNA
gataccattacttattgatgattgcgaagtacccgcctacatatcaagcaagctccaattcattgattttaagag

SEQ ID NO: 326967 - DNA, 75 bp, synthetic construct
  source 1..75: mol_type = other DNA
gtgtacaccgacgacgccgggagctggtcagaactgcacgacgcgaagctgcaggcgctggacagtattctcacc

SEQ ID NO: 326968 - DNA, 75 bp, synthetic construct
  source 1..75: mol_type = other DNA
acccctaccaagatctcatcatcaatcatcaaatcgacattatgcgctgcaacatctgggcaggtatgggaatgg

SEQ ID NO: 326969 - DNA, 75 bp, synthetic construct
  source 1..75: mol_type = other DNA
gcttctgacatcgctcaacaaatggcgttaagccagatcgaaccagaaaaaaacagaaagcccatttgccagttt

SEQ ID NO: 326970 - DNA, 75 bp, synthetic construct
  source 1..75: mol_type = other DNA
gtccatgaaggacaaggactacaatccgctgattggccgaactggtgtgaatgtgggtaaatccttctctggtaa

SEQ ID NO: 326971 - DNA, 75 bp, synthetic construct
  source 1..75: mol_type = other DNA
acaacatggaacctgaccgggtacaggatggcagaaaatcccgccgcaacccaaagtgcctcaggccttgcatct

SEQ ID NO: 326972 - DNA, 75 bp, synthetic construct
  source 1..75: mol_type = other DNA
ttcttcatcaagctgattgttgcgctgattgtcatcttcatgatcggcaattcgatggcaatgaacattgttgaa

SEQ ID NO: 326973 - DNA, 75 bp, synthetic construct
  source 1..75: mol_type = other DNA
cgcgttgctctgtacgacaaaatactcaaagctgaacaggctcttgaccggaatattgcccgtatcgagtcaatt

SEQ ID NO: 326974 - DNA, 75 bp, synthetic construct
  source 1..75: mol_type = other DNA
gagtggtgccgtaagaaaaagattaattacaacaccgccagaacccgtataaaaatgggcaaaatcgatcatgaa

SEQ ID NO: 326975 - DNA, 75 bp, synthetic construct
  source 1..75: mol_type = other DNA
tgctgccaacggaagcaccgtcattctgggaagttctcgggtctttactgacaagaatgacggaaccggtaatgc

SEQ ID NO: 326976 - DNA, 75 bp, synthetic construct
  source 1..75: mol_type = other DNA
agctgcacgcaaaatattttgaccttgtgctggaaggaaagaaacgcgcagagtttcggaaaaatgaccgtaatt

SEQ ID NO: 326977 - DNA, 75 bp, synthetic construct
  source 1..75: mol_type = other DNA
gtgcgcgcagggatacgacgcattctggaagatataaagggtataaaagtcgtcggtgaggcatcgtgcggtgaa

SEQ ID NO: 326978 - DNA, 75 bp, synthetic construct
  source 1..75: mol_type = other DNA
gctatcagtagcgttatccctatttctggagatattcctttgatcaacgttctacttgttgatgaccacgaactg

SEQ ID NO: 326979 - DNA, 75 bp, synthetic construct
  source 1..75: mol_type = other DNA
aagaaatatcaggcttccaaggatcagtgcctgaaggtccacagaatgatggaagatacactgttcgataccaag

SEQ ID NO: 326980 - DNA, 75 bp, synthetic construct
  source 1..75: mol_type = other DNA
tttaaacaatatcatgcatccaaagatcagagccaaaaggtccacagaatgatggaagatacgctgctcggtacc

SEQ ID NO: 326981 - DNA, 75 bp, synthetic construct
  source 1..75: mol_type = other DNA
aatttaccaaagttggactaaatgtagcgggcacttatgttgagtatcattttaaacaatatcatgcatccaaag

SEQ ID NO: 326982 - DNA, 75 bp, synthetic construct
  source 1..75: mol_type = other DNA
ccccataatattaatttaaaattacaccttcattatggtgacttaacagatacttctaatttgactcgtatatta

SEQ ID NO: 326983 - DNA, 75 bp, synthetic construct
  source 1..75: mol_type = other DNA
atagaggagttgtgggagcttcaatggaccaacgtaaggactccattgactgtagagttgaacgacaagctttat

SEQ ID NO: 326984 - DNA, 75 bp, synthetic construct
  source 1..75: mol_type = other DNA
gcaggaaatcatcaacgcgcgttacgaaagtattctgccaacaattctgatcagcaacctgacgtttgaccagct

SEQ ID NO: 326985 - DNA, 75 bp, synthetic construct
  source 1..75: mol_type = other DNA
gacgcacagagaaatcttgaggcttgtcggcgctatgccagttcatgggagaagtgtcttgctgcgggtaccagc

SEQ ID NO: 326986 - DNA, 75 bp, synthetic construct
  source 1..75: mol_type = other DNA
gactccagcgttagagctctgtgccacaagattctgtccgaattggatagcaagcttggctttgagccgactaag

SEQ ID NO: 326987 - DNA, 75 bp, synthetic construct
  source 1..75: mol_type = other DNA
cctcaccatcctgagtttgccgatgcgcttaccatattgcaaactgcggatgacctttttgagcgaatcggcaat

SEQ ID NO: 326988 - DNA, 75 bp, synthetic construct
  source 1..75: mol_type = other DNA
ctcgcccccttcgaacgagttgagtatctgaccagactgaaagatctacggcaaccattacccatctatctggac

SEQ ID NO: 326989 - DNA, 75 bp, synthetic construct
  source 1..75: mol_type = other DNA
acggctggaaataggcaaagtcaacagcaccctgcaggaaaaagtctctggcctgcgtgtcgtgcaatcgcatgg

SEQ ID NO: 326990 - DNA, 75 bp, synthetic construct
  source 1..75: mol_type = other DNA
cgggcagggctgtatgagatggtgtgcaatctgccgcagggattccggacaccggtgaataacggcggagccgat

SEQ ID NO: 326991 - DNA, 75 bp, synthetic construct
  source 1..75: mol_type = other DNA
gattattcaaatttcaagaaattgtataaataatttcgaccaatactacgattttgaatctgcatacccaactaa

SEQ ID NO: 326992 - DNA, 75 bp, synthetic construct
  source 1..75: mol_type = other DNA
ggtgatgaaatcaccctgggcagcggtctggcgaaaacgttgaatgcgaaatacgacgactggctggatgtgatg

SEQ ID NO: 326993 - DNA, 75 bp, synthetic construct
  source 1..75: mol_type = other DNA
gatacgtgtaaatcctgaatcccttgagatatggggcgtcgtcacctttgcactgaatcagttcagccatgtaca

SEQ ID NO: 326994 - DNA, 75 bp, synthetic construct
  source 1..75: mol_type = other DNA
ccctgacgatcccagagggaatggttgtcgcggtcgtcggtcgcagcggtgcgggtaagtcgacgctgattaagc

SEQ ID NO: 326995 - DNA, 75 bp, synthetic construct
  source 1..75: mol_type = other DNA
tgttctgtgccaacccgccgttcaatcagttgctcagtagaacgcttaaagcggcacgacgggcagaaagcaatg

SEQ ID NO: 326996 - DNA, 75 bp, synthetic construct
  source 1..75: mol_type = other DNA
gatctcagaaatggtcgctaatgatttgcagacagcaaaaaaacacgtactgttgaaatcgcacggttttaatgc

SEQ ID NO: 326997 - DNA, 75 bp, synthetic construct
  source 1..75: mol_type = other DNA
gatttctgaaatggttgccaaagatcttgaagccgctaaaaaacattctcttttaaaatcgcatggtttttctgt

SEQ ID NO: 326998 - DNA, 75 bp, synthetic construct
  source 1..75: mol_type = other DNA
gtgtaactggacaagatggatcttatctagctgagtttttgcttgataaagggtatgaagttcatggtatcaaac

SEQ ID NO: 326999 - DNA, 75 bp, synthetic construct
  source 1..75: mol_type = other DNA
gtgtgcagaaatggttgccagtgatctggcgaaagcaaaacagcatgcacttctgaaaagccatggttacgatgt

SEQ ID NO: 327000 - DNA, 75 bp, synthetic construct
  source 1..75: mol_type = other DNA
gcaacaggcaaacaaatttccgtacgtgaatttgttcgtatgtcagctaaagaagtcggtctggagttagaattc

SEQ ID NO: 327001 - DNA, 75 bp, synthetic construct
  source 1..75: mol_type = other DNA
gtgtcactggtcaagatgggtcatatcttgcggaatttttactcgaaaagggttatgaagtccatggtatcaaac

SEQ ID NO: 327002 - DNA, 75 bp, synthetic construct
  source 1..75: mol_type = other DNA
ttcagttaagacgctgctcaacactcgacacacttgaaaagattattgaaaaaaaccaaaacagcctccctcctt

SEQ ID NO: 327003 - DNA, 75 bp, synthetic construct
  source 1..75: mol_type = other DNA
gatcggtggtactggaataacagtatccaacggggccgaagtacggcggtacagggaaaactggcagtggaaacc

SEQ ID NO: 327004 - DNA, 75 bp, synthetic construct
  source 1..75: mol_type = other DNA
gcaacaggtgcctctgtgttaccggctttacgtgcttcccggctgaatatttctgacgcatttaaattctcatag

SEQ ID NO: 327005 - DNA, 75 bp, synthetic construct
  source 1..75: mol_type = other DNA
aatgattacgcagaaagtatttttgtatttaatggcgaacgtgacgtttcggaaatgctactgactggaaacgct

SEQ ID NO: 327006 - DNA, 75 bp, synthetic construct
  source 1..75: mol_type = other DNA
gcgtagtgacaattaacccgctttcctgcaccagcttcagccgggccgtcggggattttaccagccggaaatatc

SEQ ID NO: 327007 - DNA, 75 bp, synthetic construct
  source 1..75: mol_type = other DNA
aacgcagacggcgtactacacaggaaaagatcgctatcgttcagcagagctttgaaccgggagacaggttatccc

SEQ ID NO: 327008 - DNA, 75 bp, synthetic construct
  source 1..75: mol_type = other DNA
aagatgatgtacgcaccaaaattcgccgctggcgaggtatttgggcttcaggaagcctcaggcatgaaaggcgtt

SEQ ID NO: 327009 - DNA, 75 bp, synthetic construct
  source 1..75: mol_type = other DNA
cgcctgaagttaaatgaaaaagagatgttgattgctaagagtacgactgatacgcatcagtgcctcgctgggggt

SEQ ID NO: 327010 - DNA, 75 bp, synthetic construct
  source 1..75: mol_type = other DNA
gtcaatggcgtgtcggatgcattagtcagcgaggggaatctcctgtctcgcgaaaatgaaagcctcgacaatgaa

SEQ ID NO: 327011 - DNA, 75 bp, synthetic construct
  source 1..75: mol_type = other DNA
gttggtggtgaggagttttgtgtgattctgcctggcgccagcctggagcaggcaaaagaagttgccgaacatatt

SEQ ID NO: 327012 - DNA, 75 bp, synthetic construct
  source 1..75: mol_type = other DNA
atctggaaaacgtagctaacgcgctcgataagcatctgcagtataacgtcgacaaactgatctttttgcgtaatg

SEQ ID NO: 327013 - DNA, 75 bp, synthetic construct
  source 1..75: mol_type = other DNA
agccgctatgttagctgggaacggctggatcatttcgatggcgtattagtgcgtatccatacgcttagtgaaggt

SEQ ID NO: 327014 - DNA, 75 bp, synthetic construct
  source 1..75: mol_type = other DNA
gctcgatttcacttctctgcgcaatgccgttaccgagttcgaacaacgtcgcgatgaacatgcctggcagataga

SEQ ID NO: 327015 - DNA, 75 bp, synthetic construct
  source 1..75: mol_type = other DNA
gctacgtctgtttatgtgggattacgtcggcattgtgcgcacaacgaaacgtctggaacgcgccctgcggcggat

SEQ ID NO: 327016 - DNA, 75 bp, synthetic construct
  source 1..75: mol_type = other DNA
catccgaatattcgcgtgctggaacgcagcaacgcagtcgatctgattatttctgacaaaattggtctgccgggt

SEQ ID NO: 327017 - DNA, 75 bp, synthetic construct
  source 1..75: mol_type = other DNA
agagtcgggggttgcatttcacgctggattatccggaactgctcacccattccggtccgtcgatcctttcccccg

SEQ ID NO: 327018 - DNA, 75 bp, synthetic construct
  source 1..75: mol_type = other DNA
gctctttaccaccatgttactcatctcctggtatgtgattcgccggatggtcagcaacatgtatgttctgcaaag

SEQ ID NO: 327019 - DNA, 75 bp, synthetic construct
  source 1..75: mol_type = other DNA
cggataacagtacgttacgttttcgcctgagtgacttatcgctaggtggcatgggtgcattactggaaacggaaa

SEQ ID NO: 327020 - DNA, 75 bp, synthetic construct
  source 1..75: mol_type = other DNA
atggggcaatggggagtctttcattttgacgctcagttactcaccatcagcgaacacaaaatcatcgatggcaaa

SEQ ID NO: 327021 - DNA, 75 bp, synthetic construct
  source 1..75: mol_type = other DNA
ctgacgagcaggcaacgttagacctgggcgagcggatagccaaagcctgtgatggcgccaccgtaatctatctgt

SEQ ID NO: 327022 - DNA, 75 bp, synthetic construct
  source 1..75: mol_type = other DNA
cgaagaactgaatgaagatattgcctggcgtattgggcgcgcctatggcgaatttctcaaaccgaaaaccattgt

SEQ ID NO: 327023 - DNA, 75 bp, synthetic construct
  source 1..75: mol_type = other DNA
gtagccgaactggtatgcctgaaaggaaaaacgctgggagaactggtgcgcgaccggatggtggcgttcccggca

SEQ ID NO: 327024 - DNA, 75 bp, synthetic construct
  source 1..75: mol_type = other DNA
ggcggcacaccggtgatgtcgaaaaccgggcacgcctttatcaaagaacgtatgcgtaaagacgacgccatctac

SEQ ID NO: 327025 - DNA, 75 bp, synthetic construct
  source 1..75: mol_type = other DNA
ctatgccggatggcggcctgaccacgttgtataccatgcgcgcgacgccgggctggaacttccgcccggagggga

SEQ ID NO: 327026 - DNA, 75 bp, synthetic construct
  source 1..75: mol_type = other DNA
gttgtataccatgcgcgcgacgccgggctggaacttccgccctgaggggatcaccctgttgtctgccaaatacgc

SEQ ID NO: 327027 - DNA, 75 bp, synthetic construct
  source 1..75: mol_type = other DNA
acacaacacgccggacggcaatttccccaacggtattcctaacccgctgctgccggaatgccgcgacgacacccg

SEQ ID NO: 327028 - DNA, 75 bp, synthetic construct
  source 1..75: mol_type = other DNA
ggatctgtataacggagaaatagttgcgtatcagatggcgtcccgtcctcttctgtcgatggtggatgacatgct

SEQ ID NO: 327029 - DNA, 75 bp, synthetic construct
  source 1..75: mol_type = other DNA
aaagacgaatacccgctgctccactcagatcagggctggcaatatcagatggcgcattatcagaaccggcttaag

SEQ ID NO: 327030 - DNA, 75 bp, synthetic construct
  source 1..75: mol_type = other DNA
gtttagcgagcgatttatgacctatggcaaggcttatggcttatgcgaatggttcgaggtagagcagtttcagaa

SEQ ID NO: 327031 - DNA, 75 bp, synthetic construct
  source 1..75: mol_type = other DNA
gaacagcattttagccgcgaggcgctggcggtggatcgcaccgatggcatcagcatgacctttgccgactggcgc

SEQ ID NO: 327032 - DNA, 75 bp, synthetic construct
  source 1..75: mol_type = other DNA
tgaaaggaaaaacgctgggcgaactggtgcgcgaccggatggcggcgtttccggcaagcggtgagatcaacagca

SEQ ID NO: 327033 - DNA, 75 bp, synthetic construct
  source 1..75: mol_type = other DNA
agtttatcgaaggctattacattgtcggcctgctggcagaagcgttcctggagaaaaatccgggcgcaaaaatta

SEQ ID NO: 327034 - DNA, 75 bp, synthetic construct
  source 1..75: mol_type = other DNA
gttcgctgtgcaatgatgcgtaaagagagtcgggggttgcatttcacgctggattatccggaactgctcacccat

SEQ ID NO: 327035 - DNA, 75 bp, synthetic construct
  source 1..75: mol_type = other DNA
aacctggggcgttttcgtaaaacgccgaacgaaggcacgctgttctatggtctggtgcggacggcaatgatatgt

SEQ ID NO: 327036 - DNA, 75 bp, synthetic construct
  source 1..75: mol_type = other DNA
atcgtcagccggtgccattgccgaaagatatgtcgctgtggccgtcggtggatatctttgtcccgacttacaacg

SEQ ID NO: 327037 - DNA, 75 bp, synthetic construct
  source 1..75: mol_type = other DNA
cttcatcaaaaaaagaaataaaagcccttcttgactttcttgaggaagacatttggatttctgggataagtggaa

SEQ ID NO: 327038 - DNA, 75 bp, synthetic construct
  source 1..75: mol_type = other DNA
tatgagagcattctccacagcagaacggcagaggaagcccggcaggcgtttcgtcagctgtcagggcaggttcat

SEQ ID NO: 327039 - DNA, 75 bp, synthetic construct
  source 1..75: mol_type = other DNA
ttatttcatggttcgcagaagaagtatggaatcgactaaaacactctgtagatgatagtgaaaaagccttaagac

SEQ ID NO: 327040 - DNA, 75 bp, synthetic construct
  source 1..75: mol_type = other DNA
gattcaatgggaagctccatcaaatagggcatcggggaaatttaaacacactcatcaacggcgctatgaatggtg

SEQ ID NO: 327041 - DNA, 75 bp, synthetic construct
  source 1..75: mol_type = other DNA
atcacctgcggatgtcgtggaaaaggagaaaagcgactttatgttcgtgctttaccgaacggtgatgcctttatt

SEQ ID NO: 327042 - DNA, 75 bp, synthetic construct
  source 1..75: mol_type = other DNA
ggatggtggcactgggatgctacggagaagactgaataccaggaactccctcatttcccggaagctagacgataa

SEQ ID NO: 327043 - DNA, 75 bp, synthetic construct
  source 1..75: mol_type = other DNA
tacagcaaccgttccagtcgtggtgaactgtcgcaaagtgaacagcaacgtctggtcgaactcaacgatgacgca

SEQ ID NO: 327044 - DNA, 75 bp, synthetic construct
  source 1..75: mol_type = other DNA
aaccgcctggacggaacgcgaagcgcgtaaccgttgcccgtccggttgtgttgctgtatttgccgcccgtattcg

SEQ ID NO: 327045 - DNA, 75 bp, synthetic construct
  source 1..75: mol_type = other DNA
ctctgggcgcgcaggtgaccagtgaactggcgcaccacagaaacgttaaccgcatcctcctggttgggggcgggg

SEQ ID NO: 327046 - DNA, 75 bp, synthetic construct
  source 1..75: mol_type = other DNA
tgccggtaaaattgacgatgtcctgagcaaaattacagaggccatcacctccctgggcgcgcgcgtcaccagtga

SEQ ID NO: 327047 - DNA, 75 bp, synthetic construct
  source 1..75: mol_type = other DNA
actgaatgggcgtctgcgtcaggctgaagggcttgtgggatcaccagccatcagggcaaacgaggacggagcctg

SEQ ID NO: 327048 - DNA, 75 bp, synthetic construct
  source 1..75: mol_type = other DNA
aattcgatgaagtacgtgctgaggctcgcaacgagggtattaactataccgccagccgtcttgctgctgctttca

SEQ ID NO: 327049 - DNA, 75 bp, synthetic construct
  source 1..75: mol_type = other DNA
tccaataagcgattcatagccgcagccaatccggctgctgtgctggtactgctggatgaactggagtattacaaa

SEQ ID NO: 327050 - DNA, 75 bp, synthetic construct
  source 1..75: mol_type = other DNA
acatggtgaatggggttacgaggcaggggcaatctggaatacctgtgatagcggctatgttcagcacatggcagc

SEQ ID NO: 327051 - DNA, 75 bp, synthetic construct
  source 1..75: mol_type = other DNA
ggatatttcctctggtgatggtattgccatggcctggcgcgccggttgccgggttgctaatctcgaatttaatca

SEQ ID NO: 327052 - DNA, 75 bp, synthetic construct
  source 1..75: mol_type = other DNA
cgagggtttgtatgccattggcgaagtgagttataccggcttacacggcgctaaccgcatggcctcgaattcatt

SEQ ID NO: 327053 - DNA, 75 bp, synthetic construct
  source 1..75: mol_type = other DNA
gggttgccaatctcgaatttaatcagttccaccctaccgcactgtatcacccacaggcacgcaatttcctgttaa

SEQ ID NO: 327054 - DNA, 75 bp, synthetic construct
  source 1..75: mol_type = other DNA
ataaatttcaaagaattggtgagaaatttctctctgaacttgataaaagaacacaacaaattggctttattattt

SEQ ID NO: 327055 - DNA, 75 bp, synthetic construct
  source 1..75: mol_type = other DNA
aattcaaaaaatacattaaaaaattacgtgaagaaggtttgttattttatgtttctttcgggtttatatttacat

SEQ ID NO: 327056 - DNA, 75 bp, synthetic construct
  source 1..75: mol_type = other DNA
ccggttaccgggcttcggcctgtggagtattaacagggatggacacggctgtgaacgagtggcgactgggtgtcg

SEQ ID NO: 327057 - DNA, 75 bp, synthetic construct
  source 1..75: mol_type = other DNA
tgaaagaggtgagcaaattaaacctgataaaaaactaaagcgtgatgctctgattgcagcacgaaatggtcaggt

SEQ ID NO: 327058 - DNA, 75 bp, synthetic construct
  source 1..75: mol_type = other DNA
gagttatgatccagttgtaacactacctattgcactcttgctacaggaagcttacgctcttacaaaagagtttat

SEQ ID NO: 327059 - DNA, 75 bp, synthetic construct
  source 1..75: mol_type = other DNA
atcatatgattctgacgtaacatcagttactgagctattgttattaagagcaaaatctttagcagatgagtttaa

SEQ ID NO: 327060 - DNA, 75 bp, synthetic construct
  source 1..75: mol_type = other DNA
gttggcgaactgggtcactgggcgatcggcgcacatgcctttatggtcggcagcagctttctccagagccgtaat

SEQ ID NO: 327061 - DNA, 75 bp, synthetic construct
  source 1..75: mol_type = other DNA
ggcggtaaattgccgatgcatgcttccggtgccggtaaagcctttttggctcaactgagtgaagaacaggtgaca

SEQ ID NO: 327062 - DNA, 75 bp, synthetic construct
  source 1..75: mol_type = other DNA
gatcaaagcgatcacgaagcgattattatcgaccaggtacagtgtacgcatctgatgcgtatgtccgcccctatc

SEQ ID NO: 327063 - DNA, 75 bp, synthetic construct
  source 1..75: mol_type = other DNA
acccctgaaggggcatattatgggacatattcacaaggggggattatggtacaggcaggagttgtgcctaactta

SEQ ID NO: 327064 - DNA, 75 bp, synthetic construct
  source 1..75: mol_type = other DNA
ttttactgctgaccgggctactgagtgcaaccgcctgggcggacgtcacattcagggatgtgaagacttataccg

SEQ ID NO: 327065 - DNA, 75 bp, synthetic construct
  source 1..75: mol_type = other DNA
tggaatggatagccgaatccaatggcagtgtggcactcacggaactggcacagcaagccggattgcctaattcca

SEQ ID NO: 327066 - DNA, 75 bp, synthetic construct
  source 1..75: mol_type = other DNA
acgtacgcgaagagcgccgtattgtcgatgaagtgcgcaaaattatgcaggacgaagggctgatgatttcggcta

SEQ ID NO: 327067 - DNA, 75 bp, synthetic construct
  source 1..75: mol_type = other DNA
ccgccggggttttgttgttcctggtggttgccatcgacttcaccagcaaaatgatgtccatccttgctgatggtg

SEQ ID NO: 327068 - DNA, 75 bp, synthetic construct
  source 1..75: mol_type = other DNA
tcaacatggcaggattcataaaaagccagagcctgacgctgctcgaaaaactggacgcactcgatgctgacgaac

SEQ ID NO: 327069 - DNA, 75 bp, synthetic construct
  source 1..75: mol_type = other DNA
ctcgcccaaacgcgcaaacggggttattcatttgacgatgaggaacatgcgctggggctacgttgccttgcagcg

SEQ ID NO: 327070 - DNA, 75 bp, synthetic construct
  source 1..75: mol_type = other DNA
atgtctgaaggctggaacattgccatcctgggcgcaactggcgctgtgggtgaagccctgctcgaaacgctggct

SEQ ID NO: 327071 - DNA, 75 bp, synthetic construct
  source 1..75: mol_type = other DNA
gggcgaagatattgtgctctctgaagagaacgaattcccgactcaggtaggggatgcttctggtacgccgcatct

SEQ ID NO: 327072 - DNA, 75 bp, synthetic construct
  source 1..75: mol_type = other DNA
tttatagcacagcaaggcctccgcaggcggggccatattattatcaggggccgaatgcgcaccaatcaaattgtc

SEQ ID NO: 327073 - DNA, 75 bp, synthetic construct
  source 1..75: mol_type = other DNA
caaacagttacacgatatggtcgtgcgtgttgataccagcagtatgcagccaatcgattctacttgccggttcca

SEQ ID NO: 327074 - DNA, 75 bp, synthetic construct
  source 1..75: mol_type = other DNA
agaagctatggctgccgggcatagcgttgacgtttactacggttacaacggtgattcgcgtaatattgcgacttt

SEQ ID NO: 327075 - DNA, 75 bp, synthetic construct
  source 1..75: mol_type = other DNA
gtatcagtgaactccagaggggcaaagataggatccacattaggttctacgcagggagcaaaccttgcttggtcg

SEQ ID NO: 327076 - DNA, 75 bp, synthetic construct
  source 1..75: mol_type = other DNA
ttcgtagcctcgggctgatttctgctgattccgatgacgtcacctacattgcggctgacgaagcgaccaagcagg

SEQ ID NO: 327077 - DNA, 75 bp, synthetic construct
  source 1..75: mol_type = other DNA
ttataaggggccggacggtcatgccacactttgtcaaactgtttctgtagcaccttatgatgtttcatggaatga

SEQ ID NO: 327078 - DNA, 75 bp, synthetic construct
  source 1..75: mol_type = other DNA
tctgggtgggcctgtgcgagttttgtatttgaaattattatttctgcggatattgaatcctacttttcttgcccc

SEQ ID NO: 327079 - DNA, 75 bp, synthetic construct
  source 1..75: mol_type = other DNA
acatggtagtgcatgttgataccagcagcagacggccgatcaattccacctgccgcttccagtacacgttgaacg

SEQ ID NO: 327080 - DNA, 75 bp, synthetic construct
  source 1..75: mol_type = other DNA
cgtgtcagttacgccgtatgatgtttcatgggatgaaaactatatcaataaaacgaaaacactgtctttgcaatc

SEQ ID NO: 327081 - DNA, 75 bp, synthetic construct
  source 1..75: mol_type = other DNA
tcaggtcgaactgtatcttgatgttgctgaggtttcgagtgtttactacggtatctattatcaaagtaattatgt

SEQ ID NO: 327082 - DNA, 75 bp, synthetic construct
  source 1..75: mol_type = other DNA
ttcgggggcacaggcggccacaaaaatcgccaccctgataaccccattagcctattccggctatctcacacaaat

SEQ ID NO: 327083 - DNA, 75 bp, synthetic construct
  source 1..75: mol_type = other DNA
tttgtttcgcagatgatcacctttacagcatcaggatgcgatgatgccaaagtgacggtgacgccggttccgcat

SEQ ID NO: 327084 - DNA, 75 bp, synthetic construct
  source 1..75: mol_type = other DNA
gcctgctaatgttgttctttttcagttcagcagtacaggcgaataccattgttgcaacattgtatacccccattg

SEQ ID NO: 327085 - DNA, 75 bp, synthetic construct
  source 1..75: mol_type = other DNA
ctggatgctctggatgccgacgaacaggcggccatgtgcgaacgactgcacgaactcgcagaagaactccagaac

SEQ ID NO: 327086 - DNA, 75 bp, synthetic construct
  source 1..75: mol_type = other DNA
cgacggttatcgcaggtgaagatgcgcagaaagatgttggtgaagcgaaatataatccgttcgctgatttaaaag

SEQ ID NO: 327087 - DNA, 75 bp, synthetic construct
  source 1..75: mol_type = other DNA
cgaccgttatcgcaggggaagatgcgcagaaagatgtcggtgaagcgaagtacaacccattcgctgatttgaaag

SEQ ID NO: 327088 - DNA, 75 bp, synthetic construct
  source 1..75: mol_type = other DNA
atggcaatcattccaaaaaactatgcgcggttagaaagcggctatcgtgaaaaagcgctgaaactctatccgtgg

SEQ ID NO: 327089 - DNA, 75 bp, synthetic construct
  source 1..75: mol_type = other DNA
gaaagcggggtttcatccactcaccggcgactgccgctacaacctgacattccggcaggcaggtaaaaaagaata

SEQ ID NO: 327090 - DNA, 75 bp, synthetic construct
  source 1..75: mol_type = other DNA
atccccgtacgcgccgcatatgcaatctggtatcacacaccaatggtcgctgatttatcagaggtaattatcaat

SEQ ID NO: 327091 - DNA, 75 bp, synthetic construct
  source 1..75: mol_type = other DNA
tttcctgattgttgctgcggccagtattcctgttcgtgtcgcctatgcaatctggttacgcacgccaatggctgt

SEQ ID NO: 327092 - DNA, 75 bp, synthetic construct
  source 1..75: mol_type = other DNA
tattcagacagaaagtgaagtatcaactccggttcacccttcagcatcaatggtcgggctggatgctggcgtggc

SEQ ID NO: 327093 - DNA, 75 bp, synthetic construct
  source 1..75: mol_type = other DNA
aagacagaagacgaatacgttgatttcttcctgtcagggctacgcgggcgattactgaaaaatccccgtctgtac

SEQ ID NO: 327094 - DNA, 75 bp, synthetic construct
  source 1..75: mol_type = other DNA
tagccagtcctcaggggattacatgtttttattattcttccgcacaaggctatcagagtcgcttacaacacacat

SEQ ID NO: 327095 - DNA, 75 bp, synthetic construct
  source 1..75: mol_type = other DNA
gctgtcatgcttgctgcggttattaaaacgcgcggtaacgtcgtgcagatttttaaaataacgaggtctaaacat

SEQ ID NO: 327096 - DNA, 75 bp, synthetic construct
  source 1..75: mol_type = other DNA
atggtaactcatgagctttttttgctaatcaccaatgcagttatttgtactggtatagcaattcgcgttgtcaca

SEQ ID NO: 327097 - DNA, 75 bp, synthetic construct
  source 1..75: mol_type = other DNA
gttcctatccgcacgttctacgggtactacgtcagcgccgactggtcagaagtcatcatcaaagctgtgttcctg

SEQ ID NO: 327098 - DNA, 75 bp, synthetic construct
  source 1..75: mol_type = other DNA
gtggtatggggtggtgagtcgcggctgttttatcatggcattcaaccgttgaaagtggggggcatccactcacca

SEQ ID NO: 327099 - DNA, 75 bp, synthetic construct
  source 1..75: mol_type = other DNA
tgaccatgcgcccgtacatatccgttcgcggcgggatactgattctgccaactggtctgaatgggcgcaggtcta

SEQ ID NO: 327100 - DNA, 75 bp, synthetic construct
  source 1..75: mol_type = other DNA
gttattcccggaaactatggcaattttgattccagatatgtgaaagatgttcgacttggttcacagcaatattat

SEQ ID NO: 327101 - DNA, 75 bp, synthetic construct
  source 1..75: mol_type = other DNA
ttgagcacggctaacacatggagtgcacgccagactttcaacggcgggatcaccggggcgctgacagggaacgcc

SEQ ID NO: 327102 - DNA, 75 bp, synthetic construct
  source 1..75: mol_type = other DNA
tatttccaccctatgccaggcacggaaaataatggtaatcgtacctggatggcggcaactggagaggatgaatat

SEQ ID NO: 327103 - DNA, 75 bp, synthetic construct
  source 1..75: mol_type = other DNA
atgctgacaatccttttccgaatagcgaatttgcccccatcggaattgaagactcagaagagccagcacatggag

SEQ ID NO: 327104 - DNA, 75 bp, synthetic construct
  source 1..75: mol_type = other DNA
gcaaaattattggaaagaggcggagttgaaccgtacaaccatcaccaagctttttgatgagacgtgtgatgcaat

SEQ ID NO: 327105 - DNA, 75 bp, synthetic construct
  source 1..75: mol_type = other DNA
ggatgttacaggagatataacaactaacgcatgggtgtacgcaaaccgccttgcaattaacagcagcacaggcat

SEQ ID NO: 327106 - DNA, 75 bp, synthetic construct
  source 1..75: mol_type = other DNA
aaatatcgacagtcaatgcactgaggatatttaattcatcttttggtgccatttttcgccgttctgaagaatgcc

SEQ ID NO: 327107 - DNA, 75 bp, synthetic construct
  source 1..75: mol_type = other DNA
gccgacagcgatactgattcatacatgtggtttgaaacaggcgacaacggcaatgaatatttcaaatggagaagc

SEQ ID NO: 327108 - DNA, 75 bp, synthetic construct
  source 1..75: mol_type = other DNA
cgtggcgtgtttaacgtgccaagttttgtggccacgctggggttgtggagcgccctgcgcggtatggggctgttt

SEQ ID NO: 327109 - DNA, 75 bp, synthetic construct
  source 1..75: mol_type = other DNA
gagatcggtttgctggtggtgattgccattctttatctggtcttctccctgaatgcgcctggctttatctcattg

SEQ ID NO: 327110 - DNA, 75 bp, synthetic construct
  source 1..75: mol_type = other DNA
tacgcttaatctcagaactggccgcataactatggggcatggtctggatgttacaggagatataacaactaacgc

SEQ ID NO: 327111 - DNA, 75 bp, synthetic construct
  source 1..75: mol_type = other DNA
gccaccagcggcaaagtgttcctgccacaagaaaaagcgttgtcagcgggtaactttaacaatttcgatgaagtg

SEQ ID NO: 327112 - DNA, 75 bp, synthetic construct
  source 1..75: mol_type = other DNA
acaacatcgtttcccgcgaaacgctgctggaggcgaaaaaacatcccgatcagtaccgcgatctggtagtgcgtg

SEQ ID NO: 327113 - DNA, 75 bp, synthetic construct
  source 1..75: mol_type = other DNA
cagggtgtgcggatgctggaacaacatattcgcgacgctaaagctgaactggataaagccggaaaatctcgcgtc

SEQ ID NO: 327114 - DNA, 75 bp, synthetic construct
  source 1..75: mol_type = other DNA
cgcctgcgttccactcagcctaacctcagcgtgcgctaccacgcgggaatgagtaacgatttcctcgatgcctgc

SEQ ID NO: 327115 - DNA, 75 bp, synthetic construct
  source 1..75: mol_type = other DNA
gtgcaggtgatccgctgcggcttcgggatgccggcgttcaacaacgatgaaatagtcatcccggaatttattaaa

SEQ ID NO: 327116 - DNA, 75 bp, synthetic construct
  source 1..75: mol_type = other DNA
acatctcgataagccgatcccggtacgtcgcgcgctggcactggcacatcacctggcgaatcgcaccatctggat

SEQ ID NO: 327117 - DNA, 75 bp, synthetic construct
  source 1..75: mol_type = other DNA
gacattctgacaccacgacgccgggaggattacggtaaggacctgtggagcgcatatcagaccatccaggagaat

SEQ ID NO: 327118 - DNA, 75 bp, synthetic construct
  source 1..75: mol_type = other DNA
acacccgtgccattcacagcatcgacacggacattaagctcaatcgcgcattgtgggtgatggcagaaacgctgc

SEQ ID NO: 327119 - DNA, 75 bp, synthetic construct
  source 1..75: mol_type = other DNA
tgtggagtgcttatcagaccatacaggagaatatgctgaaaggcaggatttccggccgcagtgcaaaaggaaaac

SEQ ID NO: 327120 - DNA, 75 bp, synthetic construct
  source 1..75: mol_type = other DNA
ccgtgatggcgtggaaaaagcagttacagcgacagcgcagcgtatcgctcagtttgagcagcaaatggaagtcgt

SEQ ID NO: 327121 - DNA, 75 bp, synthetic construct
  source 1..75: mol_type = other DNA
ttgatatggtctctttccatttctgcttccctttgtgattactggaatccagtatacacgaaaaagaccaaaaca

SEQ ID NO: 327122 - DNA, 75 bp, synthetic construct
  source 1..75: mol_type = other DNA
gctaccagatgctgccgggttacttcagattcgtctgccagaacggctgcgtctgcggtcagtctctgggggaag

SEQ ID NO: 327123 - DNA, 75 bp, synthetic construct
  source 1..75: mol_type = other DNA
ggccctactgcggtcattggctcggtgggtaaactgcctacggcagcgattctcggcggcgtgctgctcaaccag

SEQ ID NO: 327124 - DNA, 75 bp, synthetic construct
  source 1..75: mol_type = other DNA
gcgcagcaaaccttatccgtcgcgaccgtccgttaacccgtgaagagctgtttcgcgtggtgcccagtgtattca

SEQ ID NO: 327125 - DNA, 75 bp, synthetic construct
  source 1..75: mol_type = other DNA
caaaagctgcgctaacgtatcgctttggtgaggatcaccagccggttactgaatcacagatactctccccgcgcc

SEQ ID NO: 327126 - DNA, 75 bp, synthetic construct
  source 1..75: mol_type = other DNA
taacgggcaggaagttcctgaaattatcctgcttaattcacatgatagttcatccagttatcagatgatccccgg

SEQ ID NO: 327127 - DNA, 75 bp, synthetic construct
  source 1..75: mol_type = other DNA
aacgcatactcgtgccgtgcgtggcattgacggggacgtgaagcttaaccgtgcgctgtgggtgatggctgaaac

SEQ ID NO: 327128 - DNA, 75 bp, synthetic construct
  source 1..75: mol_type = other DNA
ggatgcgatgcagtcgttgctgttgcagcctcctgcgcaacaggcactggcacaggctgcactgacgtaccggtt

SEQ ID NO: 327129 - DNA, 75 bp, synthetic construct
  source 1..75: mol_type = other DNA
gtggaccacgtaccagcgtattcaggagaacctgattaagggcggtctcagtgggcgtaacgccaaaggaggacg

SEQ ID NO: 327130 - DNA, 75 bp, synthetic construct
  source 1..75: mol_type = other DNA
acccgcgctacggtcgtggtccggttggcggcaactattacgcgggtacgtcgtctatctccgctaacgtaccgt

SEQ ID NO: 327131 - DNA, 75 bp, synthetic construct
  source 1..75: mol_type = other DNA
cgtaccgtttggcgcgcaaactatggcaacgccggacgggcgtaaagcccacaccccgctggcagaaggcgcaag

SEQ ID NO: 327132 - DNA, 75 bp, synthetic construct
  source 1..75: mol_type = other DNA
cagtaccgcgatctggtagtgcgtgtcgcgggctattccgccttcttcaccgcgctctctccagacgctcaggac

SEQ ID NO: 327133 - DNA, 75 bp, synthetic construct
  source 1..75: mol_type = other DNA
ctggaagagaacgtgcacgatattctctgctcggcgctggtggatgactgcattgagcgagcgaaaagtatcaag

SEQ ID NO: 327134 - DNA, 75 bp, synthetic construct
  source 1..75: mol_type = other DNA
ggtgaatttcccgctgctgctggaaaaagggcttgatggtctgcgcgagaaagtagcggaacgtcgctcgcgcat

SEQ ID NO: 327135 - DNA, 75 bp, synthetic construct
  source 1..75: mol_type = other DNA
cagtatcgcgatctggtggtacgtgtagcaggctattccgccttcttcaccgcgctctctcctgacgctcaggac

SEQ ID NO: 327136 - DNA, 75 bp, synthetic construct
  source 1..75: mol_type = other DNA
taccggtgatttccgcaggtcacgatacccagttcgccctttttggcgctggtgccgaacaaaatgaacccgtgc

SEQ ID NO: 327137 - DNA, 75 bp, synthetic construct
  source 1..75: mol_type = other DNA
gcgctgacttaccgttatggtgatgaacatcagcccgtcaccactaccgacattctgacgccacgacgccgggag

SEQ ID NO: 327138 - DNA, 75 bp, synthetic construct
  source 1..75: mol_type = other DNA
tggtggacagagtcattgaaggggcttacgaggtggtgggcgtgtttgaccggatagaggagaagcatgatgcca

SEQ ID NO: 327139 - DNA, 75 bp, synthetic construct
  source 1..75: mol_type = other DNA
tgacgaacatcagcccgtcaccactgccgacattctgacaccacgacgcagggaggattacggtaaggacctgtg

SEQ ID NO: 327140 - DNA, 75 bp, synthetic construct
  source 1..75: mol_type = other DNA
ccggggattttcggggaagagaaacacacgtcccgaagccagaactatacgtacatccccaccatcaccgtactg

SEQ ID NO: 327141 - DNA, 75 bp, synthetic construct
  source 1..75: mol_type = other DNA
tacgtcgtgatcgtccgctgacatacgaagaactgatgcgccatgtaccgagtatttttggggaagaccgacata

SEQ ID NO: 327142 - DNA, 75 bp, synthetic construct
  source 1..75: mol_type = other DNA
cacaggcggcactgacttaccgttatggtgacgaacatcagcggccacaacagcggacatcctaacgcaacgacg

SEQ ID NO: 327143 - DNA, 75 bp, synthetic construct
  source 1..75: mol_type = other DNA
acatcccgcaggatatttcgcttatcagcgtgaacgacatccccaccgcgcgatttacctttccgccgctctcaa

SEQ ID NO: 327144 - DNA, 75 bp, synthetic construct
  source 1..75: mol_type = other DNA
tcgaagctggcgtatccctggcgacagtatccagggtcttaaatgacgatccgacattgaatgtgaaagaagaga

SEQ ID NO: 327145 - DNA, 75 bp, synthetic construct
  source 1..75: mol_type = other DNA
acgtatccatacccgtgccattcacagcatcgacaccgacattaagctcaaccgcgcattgtgggtgatggctga

SEQ ID NO: 327146 - DNA, 75 bp, synthetic construct
  source 1..75: mol_type = other DNA
cgatccgccacggcattgaaacccagtgcgaaaagctggcgatcgaactgaccaactgttatgaacacaacggct

SEQ ID NO: 327147 - DNA, 75 bp, synthetic construct
  source 1..75: mol_type = other DNA
atgcgaaaaactggcaatcgagttgaccaactgttatggacacagcggcttgcctgacattaaaaacgtcactgg

SEQ ID NO: 327148 - DNA, 75 bp, synthetic construct
  source 1..75: mol_type = other DNA
gggaagccagggcgttaatctggtgtatgaaaaagctcgcgatggtcgcgcgctgccgctgctagtcttcgttcc

SEQ ID NO: 327149 - DNA, 75 bp, synthetic construct
  source 1..75: mol_type = other DNA
aaggcttccagccgttcttcgcctgccagacccgtgtgcgcgaccagagccgccgggaatataccaaacacatgc

SEQ ID NO: 327150 - DNA, 75 bp, synthetic construct
  source 1..75: mol_type = other DNA
cagcatcgacaccgatattaaactcaaccgcgcattgtgggtgatggcagaaacgatgctggagagcctgcgctg

SEQ ID NO: 327151 - DNA, 75 bp, synthetic construct
  source 1..75: mol_type = other DNA
aggcatcgcaaggcgtcaccgcattacgctctggtctggcggaaggtgaaaaggtggtttccagcggcctgttcc

SEQ ID NO: 327152 - DNA, 75 bp, synthetic construct
  source 1..75: mol_type = other DNA
gacaacgccgacgaggcgctaaaaccgggaatgaacgcctggttgcaactcaacaccgccagcgaaccgatgctg

SEQ ID NO: 327153 - DNA, 75 bp, synthetic construct
  source 1..75: mol_type = other DNA
acccgggccattcacagcattgataccgacattaagctcaaccgtgcattgtgggtgatggcagaaacgatgctg

SEQ ID NO: 327154 - DNA, 75 bp, synthetic construct
  source 1..75: mol_type = other DNA
atgctgaaaggcggaatttccggccgcagtgcaaaaggaaaacgtatccacacccgtgccattcacaacatcgac

SEQ ID NO: 327155 - DNA, 75 bp, synthetic construct
  source 1..75: mol_type = other DNA
tgtttgaccggatagaggagaagcttgatgccatgcagtcgctggtcctggcgccaccggcacgccaggcgctgg

SEQ ID NO: 327156 - DNA, 75 bp, synthetic construct
  source 1..75: mol_type = other DNA
agtgcttatcagaccatacaggagaatatgctgaaaggcgggatttccggccgcagtgcaaaaggaaaacgtatc

SEQ ID NO: 327157 - DNA, 75 bp, synthetic construct
  source 1..75: mol_type = other DNA
tccatacccgggccattcacagcattgataccgacattaagctcaatcgcgcattgtgggtgatggcagaaacgc

SEQ ID NO: 327158 - DNA, 75 bp, synthetic construct
  source 1..75: mol_type = other DNA
tttgaccggatagaggagaagcgtgatgccatgcagtcgctggtcctgccgccaccggcacgccaggcgctggca

SEQ ID NO: 327159 - DNA, 75 bp, synthetic construct
  source 1..75: mol_type = other DNA
accattacagtcctggaaaatctgcagcgggaaggctttcagccgttcttcgcctgccagacccgtgtgcgcgac

SEQ ID NO: 327160 - DNA, 75 bp, synthetic construct
  source 1..75: mol_type = other DNA
ccgtccactgacacatgaagaactgatacgccatgtacccagtatttttggggaagaccggcacacctcccgcag

SEQ ID NO: 327161 - DNA, 75 bp, synthetic construct
  source 1..75: mol_type = other DNA
atccatacccgtgccattcacagcattgacactgacattaagctcaaccgcgcattgtgggtgatggcggaaacg

SEQ ID NO: 327162 - DNA, 75 bp, synthetic construct
  source 1..75: mol_type = other DNA
taatgtggtctatttccccaataccgcgtcttgcggcacggcaacggctgtctctgtgccatgcatgttctcgga

SEQ ID NO: 327163 - DNA, 75 bp, synthetic construct
  source 1..75: mol_type = other DNA
tttcagtaccgtgcatgttctcggatatgccgcgtgagcactacaaagaagagctggcacagcaccaggaaggcg

SEQ ID NO: 327164 - DNA, 75 bp, synthetic construct
  source 1..75: mol_type = other DNA
tacaaagactatgcctcgctgtttcgcaacaacaaagagctggtgaaatccttaagcccgtccaacagcattgtt

SEQ ID NO: 327165 - DNA, 75 bp, synthetic construct
  source 1..75: mol_type = other DNA
cgttaggagaaaacggtatctatctgcacggtctgccgtacgccatcgccccggacagccagaaacaggtgccga

SEQ ID NO: 327166 - DNA, 75 bp, synthetic construct
  source 1..75: mol_type = other DNA
tctccctcaacggctacccgcgtgaaactaacccgcggctggcgaaagataacgtggtctatttccctaataccg

SEQ ID NO: 327167 - DNA, 75 bp, synthetic construct
  source 1..75: mol_type = other DNA
agctgcctgcaaaaacaggcacaaacacagcactattcacaggacaatttattctcaaccctgttgggattaacc

SEQ ID NO: 327168 - DNA, 75 bp, synthetic construct
  source 1..75: mol_type = other DNA
gaaaggcgggatttccggtcgcagtgccagaggaaaacgtatccatacccgtaccattcacagcatcgacaccga

SEQ ID NO: 327169 - DNA, 75 bp, synthetic construct
  source 1..75: mol_type = other DNA
gccgggaggattacggtaaggacctgtggagtgcttatcagaccatcgtaaccggctcatttaaaccgtctggtc

SEQ ID NO: 327170 - DNA, 75 bp, synthetic construct
  source 1..75: mol_type = other DNA
gtcgcagtgcaaaaggaaaacgtatccatacccggccattcacagcattgataccgacattaagctcaatcgcgc

SEQ ID NO: 327171 - DNA, 75 bp, synthetic construct
  source 1..75: mol_type = other DNA
tatgccgcgtgagcattacaaagaagagctggcacagcaccaggaaggcgtgctggatatcattcagcgagcggg

SEQ ID NO: 327172 - DNA, 75 bp, synthetic construct
  source 1..75: mol_type = other DNA
cttaagcccgtccaacagcattgttgccagttggtcgtggtattcccaccagcggtcggctaatctgccactgat

SEQ ID NO: 327173 - DNA, 75 bp, synthetic construct
  source 1..75: mol_type = other DNA
accgccgacattctgacgccgcgacgccgggaggattacggtaaggacctgtggagtgcttatcagaccattcag

SEQ ID NO: 327174 - DNA, 75 bp, synthetic construct
  source 1..75: mol_type = other DNA
gtcagttgtacgccatagaggcggatataaggggaatgccggcagagcagcggcttgctgaacgtcagcgaaaaa

SEQ ID NO: 327175 - DNA, 75 bp, synthetic construct
  source 1..75: mol_type = other DNA
atccaataactaatgatattttagacttatttatagagaacgtagaggttacacttaatgcatgctgctgctttt

SEQ ID NO: 327176 - DNA, 75 bp, synthetic construct
  source 1..75: mol_type = other DNA
gcctgctatcgatgtgttacgacgcctgagtatggagggtttcattgatagtgttggctctgagggtgtaactcg

SEQ ID NO: 327177 - DNA, 75 bp, synthetic construct
  source 1..75: mol_type = other DNA
atgggcgcattactggaaacagcaaagcctgccgaattacacgaaggcatgcgcttcgctcagattgaagtcaac

SEQ ID NO: 327178 - DNA, 75 bp, synthetic construct
  source 1..75: mol_type = other DNA
agatgccggatattgccgcggatgcgaaagccattgcatttggtaacttcaaacggggttacaccatcgttgacc

SEQ ID NO: 327179 - DNA, 75 bp, synthetic construct
  source 1..75: mol_type = other DNA
ctggcggttctgatacgtatttcctatatactccggctctgtttgttgataaacaagtagcggcaccatcagtga

SEQ ID NO: 327180 - DNA, 75 bp, synthetic construct
  source 1..75: mol_type = other DNA
gctcatgaccgctgggaaagccgtaaaatcatcgctagcagtcatttccgtcctattcaggatttcctggctgcg

SEQ ID NO: 327181 - DNA, 75 bp, synthetic construct
  source 1..75: mol_type = other DNA
caaaaaaaacaacgccccacagtgctggaacacatgcagggcgtctaaccacaaacactatagagaggtaaattt

SEQ ID NO: 327182 - DNA, 75 bp, synthetic construct
  source 1..75: mol_type = other DNA
ggtttttataccaccaagcgcaccggcggaatgctggtcgattcgcaggccatcaaactgctgaagattgcagag

SEQ ID NO: 327183 - DNA, 75 bp, synthetic construct
  source 1..75: mol_type = other DNA
gcctttaccaccggcgatggtaccaagaagccgaaagggttcctggcgtatgagtccacggatgaaaccgacaag

SEQ ID NO: 327184 - DNA, 75 bp, synthetic construct
  source 1..75: mol_type = other DNA
tcggtacccgtatcctgcgcgatccgtacaccaataaaccgtttgtgggtttttataccaccaagcgaaccggcg

SEQ ID NO: 327185 - DNA, 75 bp, synthetic construct
  source 1..75: mol_type = other DNA
ggtgatcaccgttggcggttccgactacaaaaaactggtgaatctgggcggcacggcttccggatgggttggcga

SEQ ID NO: 327186 - DNA, 75 bp, synthetic construct
  source 1..75: mol_type = other DNA
gaccgctgatgcgatcattaaactgatttacaccctgcgcaaggcgcaccgcagcggcgcgaagttcatgatgaa

SEQ ID NO: 327187 - DNA, 75 bp, synthetic construct
  source 1..75: mol_type = other DNA
gaaggggcttacgaggtggtgggggtctttgaccggatagaggacaagcgtgatgccatgcagtcgctgctactg

SEQ ID NO: 327188 - DNA, 75 bp, synthetic construct
  source 1..75: mol_type = other DNA
ttgaccggattgaggaaaagcgtgatgccatgcagtcgctggttctgccgccaccggcacgtcaggcactggcac

SEQ ID NO: 327189 - DNA, 75 bp, synthetic construct
  source 1..75: mol_type = other DNA
atgtaaatcagatccgccgggagcgcccgctgacacgcgaagaactgatgtaccacatcccgagtatttttggtg

SEQ ID NO: 327190 - DNA, 75 bp, synthetic construct
  source 1..75: mol_type = other DNA
ccatacccgtgccattcaccgcatcgacactgacattaagctcaatcgcgcgttgtgggtgatggcagaaacgct

SEQ ID NO: 327191 - DNA, 75 bp, synthetic construct
  source 1..75: mol_type = other DNA
aaaatttacgcggcgtcagttatgacggactggatcgtagcgtggacgtggctatttcgcggttaagaaaaaaac

SEQ ID NO: 327192 - DNA, 75 bp, synthetic construct
  source 1..75: mol_type = other DNA
gttcttctaacctctctcgatagcgatatgaaccacatcctggcactggaaatgggtgcctgcgactatattctc

SEQ ID NO: 327193 - DNA, 75 bp, synthetic construct
  source 1..75: mol_type = other DNA
tgatgccatgcagtcgctgattctgccgccaccggcacgccaggcgctggcacaggcggcactgacttaccgtta

SEQ ID NO: 327194 - DNA, 75 bp, synthetic construct
  source 1..75: mol_type = other DNA
tttcgcgtggtgcccagtgtattcagtgaggacaaacacgagtcccgtagtgaacgctacacatacatacccacc

SEQ ID NO: 327195 - DNA, 75 bp, synthetic construct
  source 1..75: mol_type = other DNA
gctggcaggatgagagcaatgatctgtggaccacataccagcgtattcaggagaacctgattaagggcgggctca

SEQ ID NO: 327196 - DNA, 75 bp, synthetic construct
  source 1..75: mol_type = other DNA
ggtcgccgcgagcacacaaagcacatgctgcgcctgcgtcgggaggggcaaattaccggcaagcaagtcccggaa

SEQ ID NO: 327197 - DNA, 75 bp, synthetic construct
  source 1..75: mol_type = other DNA
ccccctgcgcaacaggcgctggcaaaggcggcgctgacgtaccgctttggcgaagagcaccagccggtgacggaa

SEQ ID NO: 327198 - DNA, 75 bp, synthetic construct
  source 1..75: mol_type = other DNA
gcacacccgtgccattaaaggcatcgacggtgatgtcaggctcaaccgcgccctgtgggtgatggctgaaaacat

SEQ ID NO: 327199 - DNA, 75 bp, synthetic construct
  source 1..75: mol_type = other DNA
attactgttcttgaaaatctgcagcgagagggttttcagccgttctttgcctgtcagactcgcgttcgtgaccca

SEQ ID NO: 327200 - DNA, 75 bp, synthetic construct
  source 1..75: mol_type = other DNA
atgacgcggaagtcggttcactgattgccgcgtatttggcgaaacatgatatacaggtaaccattgaacctcgcg

SEQ ID NO: 327201 - DNA, 75 bp, synthetic construct
  source 1..75: mol_type = other DNA
aacggctgcgtctgtggccagtctctgggggaagtgcgtgttccgcaccggggaaatgtcgtggatacagtcatt

SEQ ID NO: 327202 - DNA, 75 bp, synthetic construct
  source 1..75: mol_type = other DNA
aacggctgcgtctgtggtcagtctctgggggaagtgcgtgttccgcaccggggaaatgtcgtggagacagtgatt

SEQ ID NO: 327203 - DNA, 75 bp, synthetic construct
  source 1..75: mol_type = other DNA
aacggctgcgtctgtggtcagtctctgggggaagtgcgtgttccgcaccggggaaatgtcgtggacacagtcatt

SEQ ID NO: 327204 - DNA, 75 bp, synthetic construct
  source 1..75: mol_type = other DNA
gaaggggcttacgaggtggtgggggtatttgaccggatcgaggacaagcgtgatgccatgcagtcgctgctactg

SEQ ID NO: 327205 - DNA, 75 bp, synthetic construct
  source 1..75: mol_type = other DNA
gaaggggcttacgaggtggtgggagtgtttgaccggatggaggacaagcgtgatgccatgcagtcgctgctactg

SEQ ID NO: 327206 - DNA, 75 bp, synthetic construct
  source 1..75: mol_type = other DNA
aacggctgcgtctgtgggcagtctctgggggaagtgcgtgttccgcaccggggaaatgtcgtggatacagtgatt

SEQ ID NO: 327207 - DNA, 75 bp, synthetic construct
  source 1..75: mol_type = other DNA
tgaaaggcgggatttccggtcgcagtgccagaggaaaacgtatccatacccgggccattcacagcatcgacaccg

SEQ ID NO: 327208 - DNA, 75 bp, synthetic construct
  source 1..75: mol_type = other DNA
ggcgcagtgccagaggaaaacgtatccatacccgggccattcacagcattgataccgacattaagctcaaccgcg

SEQ ID NO: 327209 - DNA, 75 bp, synthetic construct
  source 1..75: mol_type = other DNA
tcagaacgagcaaaccacgctgaccaaaggtatacaagaagcacctcttactccttataaggcattgcatttcgg

SEQ ID NO: 327210 - DNA, 75 bp, synthetic construct
  source 1..75: mol_type = other DNA
aacggctgcgtctgtggtcagtctctgggggaagtgcgtgttccgcaccggggaaatgtcgtggaaacagtaatt

SEQ ID NO: 327211 - DNA, 75 bp, synthetic construct
  source 1..75: mol_type = other DNA
aacggctgcgtctgtggacagtctctgggggaagtgcgtgttccgcaccggggaaatgtcgtggatacagtaatt

SEQ ID NO: 327212 - DNA, 75 bp, synthetic construct
  source 1..75: mol_type = other DNA
atgctgccgggttacttcagattcgtctgccagaatggctgcgtctgcggtcagtctctgggggaatgcgtgttc

SEQ ID NO: 327213 - DNA, 75 bp, synthetic construct
  source 1..75: mol_type = other DNA
gaggcttcgaagtccatcctctgccacgagaagattctactggccctttgtagtcggcttctgatgatagaaaca

SEQ ID NO: 327214 - DNA, 75 bp, synthetic construct
  source 1..75: mol_type = other DNA
atattcctgatgagcttttgcaggcgcacgaggaagggcgcgttgtgttcttctgtggggcaggcatttcctacc

SEQ ID NO: 327215 - DNA, 75 bp, synthetic construct
  source 1..75: mol_type = other DNA
cgttcgttctttgtcggcaacgaccatatggttgaagatgtcgaacgctttatccgtgagttcccggacgcgtaa

SEQ ID NO: 327216 - DNA, 75 bp, synthetic construct
  source 1..75: mol_type = other DNA
ggaaatgactttattgtaagagctggaagaaatactcttaacatatgtggaatggagtatatcaccaaattattt

SEQ ID NO: 327217 - DNA, 75 bp, synthetic construct
  source 1..75: mol_type = other DNA
tatttacgattatcaggatgtacaacaggcatttgaagagtcggttaaggaaggtgcgaacaagtccctgatatg

SEQ ID NO: 327218 - DNA, 75 bp, synthetic construct
  source 1..75: mol_type = other DNA
gagcgtgatgaattctctcactggatgagcggaaccggtgatccaggcttcgaggagagtatagatgtcgacatt

SEQ ID NO: 327219 - DNA, 75 bp, synthetic construct
  source 1..75: mol_type = other DNA
tgctaccggtgaactcactgctttgctgtcggcaataaaactgggcgccaagattatccatcgcgatatcaacaa

SEQ ID NO: 327220 - DNA, 75 bp, synthetic construct
  source 1..75: mol_type = other DNA
ctgcggggatcgattttcgcggagcgttccggattttgaatatcagtgaattacatcaacgcaactggtatctgg

SEQ ID NO: 327221 - DNA, 75 bp, synthetic construct
  source 1..75: mol_type = other DNA
tagaatggacgagcaaacaaaatgaaagtgaatacccacgccgtgaacggctgattcaagtatctgcaaacaaaa

SEQ ID NO: 327222 - DNA, 75 bp, synthetic construct
  source 1..75: mol_type = other DNA
ggaagaagatttcctccagcctggtaacaaacaggttgcggcaggttacgtggtatacggctcctctaccatgct

SEQ ID NO: 327223 - DNA, 75 bp, synthetic construct
  source 1..75: mol_type = other DNA
cgtatacctcacgttatatcggttcactggtcgcggatttccaccgtaacctgctgaaaggcggtatttatctct

SEQ ID NO: 327224 - DNA, 75 bp, synthetic construct
  source 1..75: mol_type = other DNA
tcgaaaagcagcacgagttttctcatgctaccggtgaactcactgctttgctgtcggcaataaaactgggcgcca

SEQ ID NO: 327225 - DNA, 75 bp, synthetic construct
  source 1..75: mol_type = other DNA
aataaacacaattaactcaggtgagacgattgattatatatacaaccacatttatgatataatatatggtgttag

SEQ ID NO: 327226 - DNA, 75 bp, synthetic construct
  source 1..75: mol_type = other DNA
ggacaacccgatacccctttgccagggcgacggtgaggaaaccctgtttgtcttccacgcttcagacggcgatat

SEQ ID NO: 327227 - DNA, 75 bp, synthetic construct
  source 1..75: mol_type = other DNA
atgaagcatacggaaaaagtcacgatgaggcagctaaagagtgcctgaatgagattgtggacttccttgatagcc

SEQ ID NO: 327228 - DNA, 75 bp, synthetic construct
  source 1..75: mol_type = other DNA
catggcctggagtatgacccgacaaaagagcatgcttattttcatggcggaataaaacccagccagcaggcttat

SEQ ID NO: 327229 - DNA, 75 bp, synthetic construct
  source 1..75: mol_type = other DNA
atggggggaaacgtggacaagataaaggcgttaatcatcgccgctatcgtttgtgtcgttgttgggcttgttgcc

SEQ ID NO: 327230 - DNA, 75 bp, synthetic construct
  source 1..75: mol_type = other DNA
tgctgttggttttctggctcgacctcttgggggaattgtatttgggcatataggtgataaagtcggaaggaaaaa

SEQ ID NO: 327231 - DNA, 75 bp, synthetic construct
  source 1..75: mol_type = other DNA
cggattttttccggttatcctctatgaagctggtggggtgtggtcattttagccataccctcgatcaccataatg

SEQ ID NO: 327232 - DNA, 75 bp, synthetic construct
  source 1..75: mol_type = other DNA
tattccgtacaccttcacgctgtcatcaaaacggtcgctggtactgaaaatgctgcaaataatgcgtgccgggcg

SEQ ID NO: 327233 - DNA, 75 bp, synthetic construct
  source 1..75: mol_type = other DNA
acccgacaaatcgtcccttctgtaggatacggcaatatcaatattgaacaccccagtggtgcgctcgacgttcat

SEQ ID NO: 327234 - DNA, 75 bp, synthetic construct
  source 1..75: mol_type = other DNA
tcacttttgcatttactatattaataataaacacaattaactcaggtgagacgattgattatatatatagccaca

SEQ ID NO: 327235 - DNA, 75 bp, synthetic construct
  source 1..75: mol_type = other DNA
tgagttactgctcccacacctggctgaagcactgaacagtaatccgggaggcaggaaactgattgttctgcatct

SEQ ID NO: 327236 - DNA, 75 bp, synthetic construct
  source 1..75: mol_type = other DNA
tctctcactatcagggggaatcgcgggttattgacggaagccatgaaatgtttgattaccgggaactaagacgaa

SEQ ID NO: 327237 - DNA, 75 bp, synthetic construct
  source 1..75: mol_type = other DNA
gtaggtgtcgatggctggtctcgcatcatcaatcaacacgaccagtttgatggcatggagtttaagacttcagaa

SEQ ID NO: 327238 - DNA, 75 bp, synthetic construct
  source 1..75: mol_type = other DNA
gtttcaaaggctggcatgatgcgaacaaactattagaagtagttaaaaacatcacgaacgtagacatcaagacat

SEQ ID NO: 327239 - DNA, 75 bp, synthetic construct
  source 1..75: mol_type = other DNA
cgtctggccatcaccctggggtgaagggagacctggctggcatattgaatgttccgcaatgaactgccattacct

SEQ ID NO: 327240 - DNA, 75 bp, synthetic construct
  source 1..75: mol_type = other DNA
cagcaagtgtctccaagttagcaactttgtctcgaagttagagacaaaaaatgtctccaaattagagacactcaa

SEQ ID NO: 327241 - DNA, 75 bp, synthetic construct
  source 1..75: mol_type = other DNA
ttcattatgttcccgcttttcatgcgatacattatgctcatcatgacaatcgaagttttttttcaaaagccttca

SEQ ID NO: 327242 - DNA, 75 bp, synthetic construct
  source 1..75: mol_type = other DNA
gcactggatgaaatcagcttatgaggctggcaactctccggtaactccggatggttggataagctgtagtgagcg

SEQ ID NO: 327243 - DNA, 75 bp, synthetic construct
  source 1..75: mol_type = other DNA
gcgatactcgcgggcaggcgtggtatatggacctgctgtgtctggcgaaaggggctagagaactgcaaagcctga

SEQ ID NO: 327244 - DNA, 75 bp, synthetic construct
  source 1..75: mol_type = other DNA
ttgagctgcagcttattgacgacaagggtgatggggtttcgctgtcggattttaaggtgacgtttaatatccaga

SEQ ID NO: 327245 - DNA, 75 bp, synthetic construct
  source 1..75: mol_type = other DNA
attgccgaagagatgctttcgcacatcagccaggaaaacgacaagctgaacggggcgttagatggtgcagccggg

SEQ ID NO: 327246 - DNA, 75 bp, synthetic construct
  source 1..75: mol_type = other DNA
ctgcaaatcgatctcaatgagccggatctctttctcgatagcgactctctaagccagcttcccaaagatcttctt

SEQ ID NO: 327247 - DNA, 75 bp, synthetic construct
  source 1..75: mol_type = other DNA
cgcttcgaaatgggtaacgacggctggcacagttttgtggcgttaaatgatgaatccgccagcgtagatgccagt

SEQ ID NO: 327248 - DNA, 75 bp, synthetic construct
  source 1..75: mol_type = other DNA
cgcaggatcatttatgctggtacgtttttcagattttgtgcgtgtaaatggcttcgatcaaggttactttatgta

SEQ ID NO: 327249 - DNA, 75 bp, synthetic construct
  source 1..75: mol_type = other DNA
gcatcgtggtcagcgccaggttgctgggttttggctaccagcgattaatgccttcttttgccggagtgcgtttcg

SEQ ID NO: 327250 - DNA, 75 bp, synthetic construct
  source 1..75: mol_type = other DNA
acaaggccatctttcacattacatggtgctgatccagcgcagtggtttaagcaaactgctggagccattgttgtt

SEQ ID NO: 327251 - DNA, 75 bp, synthetic construct
  source 1..75: mol_type = other DNA
tcgagctgcagcttgtggacgggaacggtcagggaattgagctaagtgattttaaagtcacctttacgatcgact

SEQ ID NO: 327252 - DNA, 75 bp, synthetic construct
  source 1..75: mol_type = other DNA
cgcgccgtttgtgacctgtacgctgaccattctttgcggtacgggtcatgtggtttacaccattctgccgatcat

SEQ ID NO: 327253 - DNA, 75 bp, synthetic construct
  source 1..75: mol_type = other DNA
gtttctctgataccacagaccttcagctactggcgtatcgttaccagagtaagggatatgtggagtttgcggatt

SEQ ID NO: 327254 - DNA, 75 bp, synthetic construct
  source 1..75: mol_type = other DNA
gtggtattatctcattctgtcgcaaatgcactccgtttgattattttcacaggagtgcgccgctctgaagcggca

SEQ ID NO: 327255 - DNA, 75 bp, synthetic construct
  source 1..75: mol_type = other DNA
agagaaagaatttccagcagagttatttgatgcaggcaatgagccaagtatttattttaaatacaaagtatctag

SEQ ID NO: 327256 - DNA, 75 bp, synthetic construct
  source 1..75: mol_type = other DNA
ttgcgacaagttaaccgctggttcaaagatcactacggagtgcccgtcagagtcattcgttgggagccggaaaca

SEQ ID NO: 327257 - DNA, 75 bp, synthetic construct
  source 1..75: mol_type = other DNA
tcggatgtggtgggaaaggtgctaatcaagcggtggcggcggctaaattgaattcaaaagtcctgatgctgacta

SEQ ID NO: 327258 - DNA, 75 bp, synthetic construct
  source 1..75: mol_type = other DNA
gcggctgattgccggttacgacggtatcgcgccggaggtggcggcaagcgacgtcgtgaccgtgcgcgaagtcga

SEQ ID NO: 327259 - DNA, 75 bp, synthetic construct
  source 1..75: mol_type = other DNA
gcgcttattaatccgaacatccgggttaacgggctaattcaactggatcaggcttctatctataaaacagcttta

SEQ ID NO: 327260 - DNA, 75 bp, synthetic construct
  source 1..75: mol_type = other DNA
aggggccaggcgtggtacatggatatgatgtgcgaagcgcgtggcgcgcaggatatgccatcgagtacagcattg

SEQ ID NO: 327261 - DNA, 75 bp, synthetic construct
  source 1..75: mol_type = other DNA
agaaagggttcgctctaagtatctagctgaacttactccattttctcctcatgatctgcgtagaagtgttgcgac

SEQ ID NO: 327262 - DNA, 75 bp, synthetic construct
  source 1..75: mol_type = other DNA
agtgacgtgtatgtgatttatctggtcacatctgaacgccatgccttccttctggattattgggatgaaccagca

SEQ ID NO: 327263 - DNA, 75 bp, synthetic construct
  source 1..75: mol_type = other DNA
ggcttattggcatgccgcagcagactatcggtaacggcgtaaacgtccgtgcgctcattaatccgaacatccggg

SEQ ID NO: 327264 - DNA, 75 bp, synthetic construct
  source 1..75: mol_type = other DNA
ttgccgtgggaactcgtggcgcatccaacacttacgattacctgatcatccgcggattcgccgctgacggccaaa

SEQ ID NO: 327265 - DNA, 75 bp, synthetic construct
  source 1..75: mol_type = other DNA
aacgttaaaagaagttattgatgggtgccgagacagaatattaagtccatatctaatccatagtcggcaccagaa

SEQ ID NO: 327266 - DNA, 75 bp, synthetic construct
  source 1..75: mol_type = other DNA
atgtcaccgaggccacgaaaaaacagcactgacgtagccggactttacgaaaaatttgatcgcagaactggcaga

SEQ ID NO: 327267 - DNA, 75 bp, synthetic construct
  source 1..75: mol_type = other DNA
ccgtcgttgatgtgctggaaaaacgtctgataatggcggaacaacttggtgcgacagtggttattaacggcacaa

SEQ ID NO: 327268 - DNA, 75 bp, synthetic construct
  source 1..75: mol_type = other DNA
gaagatgcagggcaacttctataacgatgcggttattgacccatatatgctggagcgcgctgaaatcatgcgtgg

SEQ ID NO: 327269 - DNA, 75 bp, synthetic construct
  source 1..75: mol_type = other DNA
gctttgctgaaaacaaaacctcgcaaaacagcgtttatggttacggcgtctgctccgatccggcgaatgcttaca

SEQ ID NO: 327270 - DNA, 75 bp, synthetic construct
  source 1..75: mol_type = other DNA
cattaacggcgttgggcgggaacatttccgggtaaaaggtattgagttgttgcaagggactacttttagagacga

SEQ ID NO: 327271 - DNA, 75 bp, synthetic construct
  source 1..75: mol_type = other DNA
acgcgaagcgcattatcgaactgcgtgatggcgaaattatctctgatagcggcagttgcgtatctgtaacaaaaa

SEQ ID NO: 327272 - DNA, 75 bp, synthetic construct
  source 1..75: mol_type = other DNA
atgtcattgttaatcaggaaaacgtgggtaaggcccatttgtctattacgccgcaggaagaatcagcgaacgccc

SEQ ID NO: 327273 - DNA, 75 bp, synthetic construct
  source 1..75: mol_type = other DNA
tgactggaaaatttcacggtctcggaacagacaaaggtaaggcagaaaaaatcgcttccacagccaatcagcgaa

SEQ ID NO: 327274 - DNA, 75 bp, synthetic construct
  source 1..75: mol_type = other DNA
ttctgcttctgccagttatgcttttgattccgtgcagacgaatttcgccgtgtcgcagacccgctacgcttatgg

SEQ ID NO: 327275 - DNA, 75 bp, synthetic construct
  source 1..75: mol_type = other DNA
aacgactgtaccgcgcgcagggtattgatacaaaaacattactgggacataaagtccaggcaaccaccgatcgtt

SEQ ID NO: 327276 - DNA, 75 bp, synthetic construct
  source 1..75: mol_type = other DNA
acactggataaagaacagcgcgaaattaacggtatgggattgattatcaccagttttgaaaatgcagaagagagc

SEQ ID NO: 327277 - DNA, 75 bp, synthetic construct
  source 1..75: mol_type = other DNA
ataagacgcgctggcgtcacatcaggcaacggctgtcggatgcagcgtgaacgccttatccgacctactgttcta

SEQ ID NO: 327278 - DNA, 75 bp, synthetic construct
  source 1..75: mol_type = other DNA
ctttcaaactggcgtttgaagtctcgcccattcttttggttgacggcatagcgtcgaaaattcccggcggggtaa

SEQ ID NO: 327279 - DNA, 75 bp, synthetic construct
  source 1..75: mol_type = other DNA
cggtcgtttatcgatacatccggtttctctgagcagaacaagcaagtgcagcatacctggcagattgaatttgag

SEQ ID NO: 327280 - DNA, 75 bp, synthetic construct
  source 1..75: mol_type = other DNA
cacgcgccgcccctttcattacgcggacgttctgatgggggcttctgtcttttcagacctgtcatttgtctgtta

SEQ ID NO: 327281 - DNA, 75 bp, synthetic construct
  source 1..75: mol_type = other DNA
tctacatataacccaaggaaaaactggaatgcgtctggccttacctcttatgaaccgccccggaaatcctggaga

SEQ ID NO: 327282 - DNA, 75 bp, synthetic construct
  source 1..75: mol_type = other DNA
cgccttatccgacctacggttctactcctgcgcaggcctgataagacgtgccatcgtcgcatcaggcaagaccgt

SEQ ID NO: 327283 - DNA, 75 bp, synthetic construct
  source 1..75: mol_type = other DNA
gatgaagagcgattacatcagtatcatacctaaaccggacgtgttaacggcagtaaaaaaccttgcggaggcgtt

SEQ ID NO: 327284 - DNA, 75 bp, synthetic construct
  source 1..75: mol_type = other DNA
cgaacatcatatggagagcattagaaaatttgggaggcttgcagagtataagaacgtattttattatatcgattt

SEQ ID NO: 327285 - DNA, 75 bp, synthetic construct
  source 1..75: mol_type = other DNA
atgatttaaaagggatgagattcacaatcatgtcctctaaaaaggaaatagctaaattaaaagagtgtttcgaaa

SEQ ID NO: 327286 - DNA, 75 bp, synthetic construct
  source 1..75: mol_type = other DNA
gtgtcggatgcggcgtgaacgccttatccgacctacggttctacccctgcgcaggcctgataagacgcgccagcg

SEQ ID NO: 327287 - DNA, 75 bp, synthetic construct
  source 1..75: mol_type = other DNA
tttttaaacttgcgtttcagacatctcctatccttttgcaaggtggaattgcggaaaaaataccgggtggaataa

SEQ ID NO: 327288 - DNA, 75 bp, synthetic construct
  source 1..75: mol_type = other DNA
cctatacgctgccggcagcactgctgctgatggctcctttcgacatcctcgcttcactggcgatggatatttatc

SEQ ID NO: 327289 - DNA, 75 bp, synthetic construct
  source 1..75: mol_type = other DNA
cactacgctgtgatgccattgggataacgttaaaagaagttattgatgggtgccgagacagaatattaagtccat

SEQ ID NO: 327290 - DNA, 75 bp, synthetic construct
  source 1..75: mol_type = other DNA
cgtccggccgacctggggctcgttcgcgcagctcgaaaaagctaacccggactttatggcagagcgcgaggacgt

SEQ ID NO: 327291 - DNA, 75 bp, synthetic construct
  source 1..75: mol_type = other DNA
cttgcttactggcgtggattacctgcgcatgcgtaacgatattgatgcgaactatggtactgcagatccaattag

SEQ ID NO: 327292 - DNA, 75 bp, synthetic construct
  source 1..75: mol_type = other DNA
ggcaatagttacatcgcgccagcgcaaattagccgtgcttatgtacgttcagatgaagatttaaattcattcact

SEQ ID NO: 327293 - DNA, 75 bp, synthetic construct
  source 1..75: mol_type = other DNA
gatgctgtgattgatccttacatgctcgagagggttgaactgatgcgtgggccgacgtctgttctctatggaaaa

SEQ ID NO: 327294 - DNA, 75 bp, synthetic construct
  source 1..75: mol_type = other DNA
atgagaaccgtatcgatattcaaaaatggcaacaaccgcgccatccgtctgcctcgtgatctggattttgagggg

SEQ ID NO: 327295 - DNA, 75 bp, synthetic construct
  source 1..75: mol_type = other DNA
atgagaaccgtatcgatatttaaaaatggtaacaaccgcgccatccgtctgccccgcgatctggattttgagggg

SEQ ID NO: 327296 - DNA, 75 bp, synthetic construct
  source 1..75: mol_type = other DNA
aaaaaaaagaggcatcacacgttgcaataccaattggtgaagagttgaaacggataattgacgatagccgagata

SEQ ID NO: 327297 - DNA, 75 bp, synthetic construct
  source 1..75: mol_type = other DNA
agaaaaaggaggcgtcacatgttgcaatccctatcggtgatgaactaaaacgcatcattgataacagtcgggata

SEQ ID NO: 327298 - DNA, 75 bp, synthetic construct
  source 1..75: mol_type = other DNA
attaaagctatcagatctgacattgccgatctgcgcactggcattgataacggcactatcaggctgcgcgtcaac

SEQ ID NO: 327299 - DNA, 75 bp, synthetic construct
  source 1..75: mol_type = other DNA
ttgctggggaaatcccagacccggaactcactttttactgattttggtttttacggggcagcgctgcgctccaat

SEQ ID NO: 327300 - DNA, 75 bp, synthetic construct
  source 1..75: mol_type = other DNA
cgaatgcgtaacgatattgatgcaaactatggtactgctaatccgattagcatgacggatccacagtacggtaac

SEQ ID NO: 327301 - DNA, 75 bp, synthetic construct
  source 1..75: mol_type = other DNA
aaattagccgtgcttatgtacgttcagacgaagatttaaattcgtttactgttgatacgcaactacagtccaact

SEQ ID NO: 327302 - DNA, 75 bp, synthetic construct
  source 1..75: mol_type = other DNA
acggcaataaccgcgccatccgtctgccccgcgatctggattttgaaggggtaagcgaactcgaaatcatccggg

SEQ ID NO: 327303 - DNA, 75 bp, synthetic construct
  source 1..75: mol_type = other DNA
tggttctattgatgttgatggagatggtaaaggtgacatcgctacatacggtgttggcaccgaggcaactgcaac

SEQ ID NO: 327304 - DNA, 75 bp, synthetic construct
  source 1..75: mol_type = other DNA
acggactccggcatctggtacaggtgctgccggccgcggcggggacgcccggccaccgcgtctgctttcccgtca

SEQ ID NO: 327305 - DNA, 75 bp, synthetic construct
  source 1..75: mol_type = other DNA
tactcaactctaaatcgtctgtacccgatagagaagaaataaaaaaacttatggcagaagtggggagcatcaaat

SEQ ID NO: 327306 - DNA, 75 bp, synthetic construct
  source 1..75: mol_type = other DNA
cgtccagaaggatattaaagaaaagctcgatatgctggcaaagaaaaacggtcgaaaaattaacgaagaactgga

SEQ ID NO: 327307 - DNA, 75 bp, synthetic construct
  source 1..75: mol_type = other DNA
acggcctccggttattcggcatggcgtattggctgttattccagaaacctaccagcatgcacttttagaactcta

SEQ ID NO: 327308 - DNA, 75 bp, synthetic construct
  source 1..75: mol_type = other DNA
aatgccagcgattatagtggtaaatctaactttgtcaccgtagatactgacggagatggatttgcccctatattt

SEQ ID NO: 327309 - DNA, 75 bp, synthetic construct
  source 1..75: mol_type = other DNA
tatctggcactctgctaaaccagaaaaccgcgctaaagttggcggtatcatgatctccgctgcgttgacctcgtt

SEQ ID NO: 327310 - DNA, 75 bp, synthetic construct
  source 1..75: mol_type = other DNA
gcaggcggttccgtctttgcaaacatgccactgatttttgcgatcggtgtcgccctcggctttaccaataacgat

SEQ ID NO: 327311 - DNA, 75 bp, synthetic construct
  source 1..75: mol_type = other DNA
atggtaataaccgcgcgatccgtctgccccgcgatctggattttgagggggtgaatgagctggagattgtacggg

SEQ ID NO: 327312 - DNA, 75 bp, synthetic construct
  source 1..75: mol_type = other DNA
gggtgacccgactgcgggtaaactgtctggtggcttcttgttcaaaatgtacggtctgccagctgccgcaattgc

SEQ ID NO: 327313 - DNA, 75 bp, synthetic construct
  source 1..75: mol_type = other DNA
aagtggatcaggccggcctgaagaaactgggcgcagcgggcgtagtggttgctggttctggtgttcaggcgattt

SEQ ID NO: 327314 - DNA, 75 bp, synthetic construct
  source 1..75: mol_type = other DNA
accaacgcggctggccaggtattccatggcgacattccgcgttacatggcaggcgacccgacggcgggtaaactg

SEQ ID NO: 327315 - DNA, 75 bp, synthetic construct
  source 1..75: mol_type = other DNA
tggctatacgtcattccatcactctacagccggggcatccggttaggattgatatcgtttatggtatcagcgaga

SEQ ID NO: 327316 - DNA, 75 bp, synthetic construct
  source 1..75: mol_type = other DNA
gcatcacccatgaccttctcaataaacctctgcgccgtcgcctgaagccgcatctgttacttgtaatggcgggcg

SEQ ID NO: 327317 - DNA, 75 bp, synthetic construct
  source 1..75: mol_type = other DNA
cggatatttatcaggatctctttggggaaggctcgtttgtgggcaaagggatttacgatgttgatatttttatgc

SEQ ID NO: 327318 - DNA, 75 bp, synthetic construct
  source 1..75: mol_type = other DNA
catttgcccggatggggaatgccaaacgtgcctggcaactctggtcaatgctcaaccctgtaaatcatactctca

SEQ ID NO: 327319 - DNA, 75 bp, synthetic construct
  source 1..75: mol_type = other DNA
gatcaaactgttaacgcctcctttcgacggacacggtccaaatccgggctacatacaggggtacctgcccggtgt

SEQ ID NO: 327320 - DNA, 75 bp, synthetic construct
  source 1..75: mol_type = other DNA
ataaccggcgaagaaagtatcgcctcagtgaccacactgattcaggcacaccgttactggcgacagaaaggactg

SEQ ID NO: 327321 - DNA, 75 bp, synthetic construct
  source 1..75: mol_type = other DNA
cggttattgcaggagttactcaataacgtctgtaaacacgctgaagccagcgaagtgacgattattctgcgccag

SEQ ID NO: 327322 - DNA, 75 bp, synthetic construct
  source 1..75: mol_type = other DNA
aagctggtaaggctgttaggtgatgttcctcgtattgagctgtttgctcgcggtgatttacctgatggctggcat

SEQ ID NO: 327323 - DNA, 75 bp, synthetic construct
  source 1..75: mol_type = other DNA
aatcctgaatcgtgtttgttggccatgtggtgggttccgactcagccagaagaagcgttgctggtggtgaaagca

SEQ ID NO: 327324 - DNA, 75 bp, synthetic construct
  source 1..75: mol_type = other DNA
aacgaaaatctcaggttcgcgctgctcactgattttgctgattctgaaaatgaaccctcgccggaaagtcacgcg

SEQ ID NO: 327325 - DNA, 75 bp, synthetic construct
  source 1..75: mol_type = other DNA
cagcaatattgcacgaaaccgccatgcagggcgcagactggctattgatcgcggtgatattacctctgattatcg

SEQ ID NO: 327326 - DNA, 75 bp, synthetic construct
  source 1..75: mol_type = other DNA
ttaacaacgcatttaaaaaaatcaggaaatgctttttttgggtctggaaagtatcttaatgaaatggattttact

SEQ ID NO: 327327 - DNA, 75 bp, synthetic construct
  source 1..75: mol_type = other DNA
gtatcttaatgaaatggattttactataaatgggtttagtcagaagatgtatgtgatggcggttaataaaattga

SEQ ID NO: 327328 - DNA, 75 bp, synthetic construct
  source 1..75: mol_type = other DNA
gttacggcccagcttcactgtacgactacaaaggtaggggccgcacctttggtctgaactactcagtgctgttct

SEQ ID NO: 327329 - DNA, 75 bp, synthetic construct
  source 1..75: mol_type = other DNA
ggcgatgattgaacgctgccgtcgccatatcgacgcctataaagcgccaacacctgtagaagtaatcgagggtga

SEQ ID NO: 327330 - DNA, 75 bp, synthetic construct
  source 1..75: mol_type = other DNA
catatcgacgcctataaagcgcctacgcctgttgacgttattgaaggtgatattcgtgatattgccattgaaaac

SEQ ID NO: 327331 - DNA, 75 bp, synthetic construct
  source 1..75: mol_type = other DNA
agcggctggcagaactgaccgatttgcgtgatgagctgcaggcagaagccgggcatctggaagcgcagtatcagc

SEQ ID NO: 327332 - DNA, 75 bp, synthetic construct
  source 1..75: mol_type = other DNA
atgcggtcaggtttaatggcgtgttttcagatgtgaatggaagtggatatacgattaacggctataatacagtat

SEQ ID NO: 327333 - DNA, 75 bp, synthetic construct
  source 1..75: mol_type = other DNA
aaaaaaggccagccggaaaccatgatggagtttgaggctggcacaaaaagtggctttaacagcagtaaagatcac

SEQ ID NO: 327334 - DNA, 75 bp, synthetic construct
  source 1..75: mol_type = other DNA
gcatctccggcagcgtggtgactacagcagagagcggcctgctcttcacccgggaccagagcaccaccatgggtg

SEQ ID NO: 327335 - DNA, 75 bp, synthetic construct
  source 1..75: mol_type = other DNA
cgcaggcgtggtggtaatcagaaatcccgctatgaggcacgtctgtcgcaccgttttgacggcacatatctgagc

SEQ ID NO: 327336 - DNA, 75 bp, synthetic construct
  source 1..75: mol_type = other DNA
ctggggttaataagcttaactattatctattgtatgcttcagaatttagttttacatcgaaacgatttgcaattt

SEQ ID NO: 327337 - DNA, 75 bp, synthetic construct
  source 1..75: mol_type = other DNA
tctgccgcacggagtttacctcgctcttcttattttgctctctcgccgttactggcctgcgttggtgctcccccc

SEQ ID NO: 327338 - DNA, 75 bp, synthetic construct
  source 1..75: mol_type = other DNA
tttgctgatgatgttctggctccatagcgaacagctattgaacggttatctcatgctggcaacgccggttattag

SEQ ID NO: 327339 - DNA, 75 bp, synthetic construct
  source 1..75: mol_type = other DNA
tggacgctcagcttttatctgaccaataacggtcaacaggcggtgttgtttctcccgcagggagtttatctcgcc

SEQ ID NO: 327340 - DNA, 75 bp, synthetic construct
  source 1..75: mol_type = other DNA
aaaccaacgtcaccaatgctaatagtaacgctggtcgggtagcttcaaagcttaaaaagtactcagtgaatccga

SEQ ID NO: 327341 - DNA, 75 bp, synthetic construct
  source 1..75: mol_type = other DNA
accatcaacaccgctgttcagcagcgtactaccgtaggtcttgttggcctggcggtggcactttattccggcatc

SEQ ID NO: 327342 - DNA, 75 bp, synthetic construct
  source 1..75: mol_type = other DNA
tctgcttttcttctggatcttttggcgattgccgcgccaccgtccgcgcaaaaaagcgctaattcgcggaacatt

SEQ ID NO: 327343 - DNA, 75 bp, synthetic construct
  source 1..75: mol_type = other DNA
tgccgtcgttgatgaaatccccgtctggcgcagcatttggttccgtgctggggctgatggcgtttttctacttct

SEQ ID NO: 327344 - DNA, 75 bp, synthetic construct
  source 1..75: mol_type = other DNA
aacaagatcctaagtttattcaaaacacacttgaacaaatggttgcacaggtttgttttaatgatgatgattgtg

SEQ ID NO: 327345 - DNA, 75 bp, synthetic construct
  source 1..75: mol_type = other DNA
atgatttttagcaatcaaatccgctacagtggcaaagatggcgtttacttccacttaagagataatgtagatgcc

SEQ ID NO: 327346 - DNA, 75 bp, synthetic construct
  source 1..75: mol_type = other DNA
ccgtttgacgctgttttgcgcggcgtggattgccaccgccgaatataaagacgacccgcgaatgccggggaaaac

SEQ ID NO: 327347 - DNA, 75 bp, synthetic construct
  source 1..75: mol_type = other DNA
tgctgattatgcttggtggaccaaacccggcggaagtgcgtgctggtctggatgcgatggttgcgaatattgaaa

SEQ ID NO: 327348 - DNA, 75 bp, synthetic construct
  source 1..75: mol_type = other DNA
ttcgtagcctcggtctgatttctgccgattctgacgacgtaacctacattgcggctgacgaagcgaccaaacaag

SEQ ID NO: 327349 - DNA, 75 bp, synthetic construct
  source 1..75: mol_type = other DNA
gcggctgacgaagcgaccaagcaggcgatggttgaagtcgtgtatggtcgctcgctgtatgcgggagctgcacac

SEQ ID NO: 327350 - DNA, 75 bp, synthetic construct
  source 1..75: mol_type = other DNA
tcagtttggcgcggccatcacctatttctcgtttttgtcgatgatcccgattttaatggtgtcatttgccgcagg

SEQ ID NO: 327351 - DNA, 75 bp, synthetic construct
  source 1..75: mol_type = other DNA
tctgttctgacgaggatgtgaaatacaacagaggtggatgtagtgctattggtgcatatgctgataaagataaat

SEQ ID NO: 327352 - DNA, 75 bp, synthetic construct
  source 1..75: mol_type = other DNA
acaggaatcttgaagatacgaaagaaggacgcgaatacctgtcagcattctcgagttttgttgccagaagcacag

SEQ ID NO: 327353 - DNA, 75 bp, synthetic construct
  source 1..75: mol_type = other DNA
acagcctcagctaatgagcaggcttcaaaagtgcttaagtcggggaatgctttacgaaagtactctgtgaatccg

SEQ ID NO: 327354 - DNA, 75 bp, synthetic construct
  source 1..75: mol_type = other DNA
ataataagctggtggagaacttcatcgacactcttgaaaactggcgtgaccagaagcagattatttcggtcatct

SEQ ID NO: 327355 - DNA, 75 bp, synthetic construct
  source 1..75: mol_type = other DNA
tcagatgccgctaatgcgcaagcttcaaaggtgcttaagtcgggtaatgctttacggaagtactctataaatccg

SEQ ID NO: 327356 - DNA, 75 bp, synthetic construct
  source 1..75: mol_type = other DNA
aggtgtagaatttcgttcaatcgtagggcaaactgatgtttcagcagctactggcaaaaccgctaccacgaatga

SEQ ID NO: 327357 - DNA, 75 bp, synthetic construct
  source 1..75: mol_type = other DNA
aatctggacagactgtaactgataacgttcaacgtgctccaaagactattactatctctggtgttgttgtagtgg

SEQ ID NO: 327358 - DNA, 75 bp, synthetic construct
  source 1..75: mol_type = other DNA
ggaaattaacttcaaagctattgttggtcaaacagatatttcagcagcaactggaaagacagctactacaaatga

SEQ ID NO: 327359 - DNA, 75 bp, synthetic construct
  source 1..75: mol_type = other DNA
ttccattattacaagctttaaagcctctaaagatgttggaatttctaatggcctaagaatccagctaacttttca

SEQ ID NO: 327360 - DNA, 75 bp, synthetic construct
  source 1..75: mol_type = other DNA
ggaaattaacttcaaagctgttgtggggcagactgatatctcggctgcaactggaaaagccgcgactacgaatga

SEQ ID NO: 327361 - DNA, 75 bp, synthetic construct
  source 1..75: mol_type = other DNA
acagtggcaaagatggcgtttacttccacttaagagataatgtagatgccttcttaactttatcagcaactgaga

SEQ ID NO: 327362 - DNA, 75 bp, synthetic construct
  source 1..75: mol_type = other DNA
caggtgctgcaaaggcactcaaggcgggtaatgctcttcagaaatacagcgtgaatcctaacaagctcggtactt

SEQ ID NO: 327363 - DNA, 75 bp, synthetic construct
  source 1..75: mol_type = other DNA
agtaaagagcataccattgctaatggtcttcgtattcagatgaccttccaaggtgtagaatttcgttcaatcgta

SEQ ID NO: 327364 - DNA, 75 bp, synthetic construct
  source 1..75: mol_type = other DNA
acgggttcagttctattaaccagacaggggcaacttgtagagacctttatttctacggttgaacaatggcgagac

SEQ ID NO: 327365 - DNA, 75 bp, synthetic construct
  source 1..75: mol_type = other DNA
tcaggtgccgctaatgagcaagcttcaaaggtgcttaagtcgggcaatgctctgcgaaagtactctgtgaaccct

SEQ ID NO: 327366 - DNA, 75 bp, synthetic construct
  source 1..75: mol_type = other DNA
ggaccactgaaagctgccccgtcgctgtccttcctcgggctggccgtgatggatgagctctgtgcccgtcatatc

SEQ ID NO: 327367 - DNA, 75 bp, synthetic construct
  source 1..75: mol_type = other DNA
tccaatggaggcagtaaaaactaacgttattggtacagataatgtgttagaagctgcaatagcgaataaagtaca

SEQ ID NO: 327368 - DNA, 75 bp, synthetic construct
  source 1..75: mol_type = other DNA
tgggtatctctaaggcgatgatggagaaagtcatggtcgctaaatcccgaaatgtaaacagcaataaaacggtga

SEQ ID NO: 327369 - DNA, 75 bp, synthetic construct
  source 1..75: mol_type = other DNA
ggtccactcaaagccgcgccgtcgctgtcctttctcgggctggccgtgatggatgagctttgcgcccgtcacatc

SEQ ID NO: 327370 - DNA, 75 bp, synthetic construct
  source 1..75: mol_type = other DNA
ggaccactcaaggccgcgccgtcgctgtcttttctcgggctgaccgtgatggatgaactctgcgcccgtcatatc

SEQ ID NO: 327371 - DNA, 75 bp, synthetic construct
  source 1..75: mol_type = other DNA
tacgtgccgcactttatcgccgcgccgtggcctgtgcgtggctgaccctgtgtgaacatcagcgccgctacccgc

SEQ ID NO: 327372 - DNA, 75 bp, synthetic construct
  source 1..75: mol_type = other DNA
tcctatggaggcagttaagaccaacgtgttaggtactgagaatgtgttggaggctgcaatttctaatggagttaa

SEQ ID NO: 327373 - DNA, 75 bp, synthetic construct
  source 1..75: mol_type = other DNA
agggtctttacttttcgattttttttataaaaaggtcagattccatatagggtgcttgtttataagaaaacaact

SEQ ID NO: 327374 - DNA, 75 bp, synthetic construct
  source 1..75: mol_type = other DNA
atgcctaacattattctcagtgatacaagcgccagtgtcagcgagctgaagaaaaacccgatggcgacagtcagc

SEQ ID NO: 327375 - DNA, 75 bp, synthetic construct
  source 1..75: mol_type = other DNA
tgttgaagggatgaaaacgcttcttttgaaattaccttttattcgtgcactgcgtgcgggtgaacattacgatct

SEQ ID NO: 327376 - DNA, 75 bp, synthetic construct
  source 1..75: mol_type = other DNA
ccattatttgttgatctaatcaaatctggtaaaccattgaccattaccgatcccaatatgactcgtttcatgatg

SEQ ID NO: 327377 - DNA, 75 bp, synthetic construct
  source 1..75: mol_type = other DNA
atgcggaaaaaatacaataatcaaaaattaaagttctatattggtgatgtcagagattaccgtagtattttgaat

SEQ ID NO: 327378 - DNA, 75 bp, synthetic construct
  source 1..75: mol_type = other DNA
gcgcaacatggtgcctggtacggcgtggtcagtaacgccgggatcgcccgcgatgccgcttttccggctttaagc

SEQ ID NO: 327379 - DNA, 75 bp, synthetic construct
  source 1..75: mol_type = other DNA
tgagcggtaaaaaacgctggcaagccagctttggcctggaagagcgtactgccgaaaaaacgccagtacgccagc

SEQ ID NO: 327380 - DNA, 75 bp, synthetic construct
  source 1..75: mol_type = other DNA
gctggcggttctatggtcttgtaggttttggcgcaatagtactgctttccgctggcgtctgggcgttgcaatatg

SEQ ID NO: 327381 - DNA, 75 bp, synthetic construct
  source 1..75: mol_type = other DNA
gaaggtgttttgccggtaagccagactcagcagggcgaagcgcaaatctggcgtcgcgaagtgagttcccgatac

SEQ ID NO: 327382 - DNA, 75 bp, synthetic construct
  source 1..75: mol_type = other DNA
agtggtttaagcaagctgctggagccattgctgtttgctgctaccagcgacagccagttaagcaagacggaaatt

SEQ ID NO: 327383 - DNA, 75 bp, synthetic construct
  source 1..75: mol_type = other DNA
gctgtttaaagatgaccaacaggataccgaagccacggcgatcgcaagtgatttgttgagtggtaaaaaacgctg

SEQ ID NO: 327384 - DNA, 75 bp, synthetic construct
  source 1..75: mol_type = other DNA
tcagaaccatgccgaccgtctgggcattgaaggcagcattcgccgcattgtctatgaacacgatctcacgctgaa

SEQ ID NO: 327385 - DNA, 75 bp, synthetic construct
  source 1..75: mol_type = other DNA
agttaaataataaattcattgtttttcttaggttgaagaagtttgttttgttttttaagcaaggggcggtaatga

SEQ ID NO: 327386 - DNA, 75 bp, synthetic construct
  source 1..75: mol_type = other DNA
cggcgtaatgggcaatcgcggccaggtgaactacagcgctgccaaagccggaattatcggcgcaacaaaagcact

SEQ ID NO: 327387 - DNA, 75 bp, synthetic construct
  source 1..75: mol_type = other DNA
aagcaacccaggagttgttgaagtcagccagacaacttggactggaagccgaaggcgagttattccggtataaac

SEQ ID NO: 327388 - DNA, 75 bp, synthetic construct
  source 1..75: mol_type = other DNA
cgcccggcaatggtggatgtaatacccactgatggcatcgttccgctctatatcaatccacaaggcgtggcgaaa

SEQ ID NO: 327389 - DNA, 75 bp, synthetic construct
  source 1..75: mol_type = other DNA
ggtatgcagactcaaaattgcaaaccccgctgtttgtcggtcagtttgatggcactgccgaacaggcgcaattgc

SEQ ID NO: 327390 - DNA, 75 bp, synthetic construct
  source 1..75: mol_type = other DNA
ttactgatcctatgctcaacgtcgttattgctgaagttaagcgttttaattgcccgcttctttttgtcaaagatc

SEQ ID NO: 327391 - DNA, 75 bp, synthetic construct
  source 1..75: mol_type = other DNA
tggccctgctctacatccagttaaatccacagtggcgtaaagctgaaccacatccccagaccaccactatcaccg

SEQ ID NO: 327392 - DNA, 75 bp, synthetic construct
  source 1..75: mol_type = other DNA
tttttgctggagttgcctgtactcgctaggtttggtagcgccgggatatttctttttactgctttattctttgca

SEQ ID NO: 327393 - DNA, 75 bp, synthetic construct
  source 1..75: mol_type = other DNA
cgtgtcagatagccatgatgacggccagtctgttattcatactggcttcgacggcaactggtctgctttttcttt

SEQ ID NO: 327394 - DNA, 75 bp, synthetic construct
  source 1..75: mol_type = other DNA
atttgataactacagatcctataaaaaaggagtttataaagagcatcgcaagatggctcctcctgtttattatta

SEQ ID NO: 327395 - DNA, 75 bp, synthetic construct
  source 1..75: mol_type = other DNA
aaaagaaactaaataatgatgtttctcgattggaggaaaatattaaaaaaaacaggtgcgagattcagaatgcat

SEQ ID NO: 327396 - DNA, 75 bp, synthetic construct
  source 1..75: mol_type = other DNA
tatcaggaaagaatagcgattattcaaaagaaactaaataatgatgtttctcgattggaggaaaatattaaaaaa

SEQ ID NO: 327397 - DNA, 75 bp, synthetic construct
  source 1..75: mol_type = other DNA
gaatgaagaagtggtcactgaacatgagttaagaagtgaaattttgcggccatatatcagtgaaaaaacagcacc

SEQ ID NO: 327398 - DNA, 75 bp, synthetic construct
  source 1..75: mol_type = other DNA
aatatctggagacgcggtttattaaacccacccgcgaactgatcacccaggtcattcaccatttctgctggcatt

SEQ ID NO: 327399 - DNA, 75 bp, synthetic construct
  source 1..75: mol_type = other DNA
gttttcagacggtgatttaccgccctctgggacaggaagcgatgcgcgccattgtggaaatgaaactggcgcagg

SEQ ID NO: 327400 - DNA, 75 bp, synthetic construct
  source 1..75: mol_type = other DNA
ggctaatctgggcagtgaccacatcatgcagctgctggaggaaaaaccggacgccacggacgcagacctgcatga

SEQ ID NO: 327401 - DNA, 75 bp, synthetic construct
  source 1..75: mol_type = other DNA
tgcacgacgccatcggccatattttgcaattgcgcgataacctgaaagaacgctatcactatgaagcgtttaccg

SEQ ID NO: 327402 - DNA, 75 bp, synthetic construct
  source 1..75: mol_type = other DNA
tgcacgacgccatcggtcatatcctgcaactgcgtgacaatcttaaagaacgctatcactatgaggcatttaccg

SEQ ID NO: 327403 - DNA, 75 bp, synthetic construct
  source 1..75: mol_type = other DNA
tgagaaattgctcggagcaaagaccgaagtggtgaattactgtaccgaagcgccgtttattcaaacgttatgccc

SEQ ID NO: 327404 - DNA, 75 bp, synthetic construct
  source 1..75: mol_type = other DNA
gaaagatatattgcatgttgttcaacgcctgaacaacatgacggagaatccattactgataatgccgcaaatatt

SEQ ID NO: 327405 - DNA, 75 bp, synthetic construct
  source 1..75: mol_type = other DNA
caacctgtaaagtacaagaattagaaagcacgatacataaggtttttagcgattataaaattaactttcctgtaa

SEQ ID NO: 327406 - DNA, 75 bp, synthetic construct
  source 1..75: mol_type = other DNA
gtgaaaatcgaaagttatcacacgaaaaccaagtttcggctatttccactgttaatcatgatattgaagttattg

SEQ ID NO: 327407 - DNA, 75 bp, synthetic construct
  source 1..75: mol_type = other DNA
ttttcctggagagtgttttatctgtgaactcaggctgccagatcattatttccgatggaagcataataagctttt

SEQ ID NO: 327408 - DNA, 75 bp, synthetic construct
  source 1..75: mol_type = other DNA
tgctgtcactgctggatgtggtgcgcaatgtaaaaccagatattctgattggcgtctcaggacagaccgggctgt

SEQ ID NO: 327409 - DNA, 75 bp, synthetic construct
  source 1..75: mol_type = other DNA
aagacgcgataattccgatgattcgttgcacacagacagagaaggacaccatcacccaaaaggcgaacttctttg

SEQ ID NO: 327410 - DNA, 75 bp, synthetic construct
  source 1..75: mol_type = other DNA
attcactcggtgtccagtgtccatatccttttaatgttgattattcagaacatgaaaagcgttatagcgatctga

SEQ ID NO: 327411 - DNA, 75 bp, synthetic construct
  source 1..75: mol_type = other DNA
tacaaaagtattatgccgctgcaaggtttgtgatcatgagtggtcggctaaacctagagacattaagagcgggcg

SEQ ID NO: 327412 - DNA, 75 bp, synthetic construct
  source 1..75: mol_type = other DNA
tattcacttctggctcatcataatcatattaccccttgctggaataatgttatttctctactgagtgaagatgcg

SEQ ID NO: 327413 - DNA, 75 bp, synthetic construct
  source 1..75: mol_type = other DNA
ggcctaccgctcagtctttatgccaggtagtctgagcacggaagacaataactttatcagggctgtgacgtcagg

SEQ ID NO: 327414 - DNA, 75 bp, synthetic construct
  source 1..75: mol_type = other DNA
gatgaaaattggcgtgagcgttagtgagaacaggcgaagaaatatggtattaaatagcgcgcataaagcaggtgt

SEQ ID NO: 327415 - DNA, 75 bp, synthetic construct
  source 1..75: mol_type = other DNA
tccggtgaaattgatgtcagcgttgggccgatggtggcttttgtctcggtgtgcctggcatttttgctgcaattt

SEQ ID NO: 327416 - DNA, 75 bp, synthetic construct
  source 1..75: mol_type = other DNA
tgctggactggctgggcggacaatttctcggtgtgccagtatccgcgctgatcatgatggtgttgtttgcgctgt

SEQ ID NO: 327417 - DNA, 75 bp, synthetic construct
  source 1..75: mol_type = other DNA
tgggctgtaccggaagggaccgtgacgcaggtcattacatcagtacccaaagaccagcctgtaaaatgcacgaac

SEQ ID NO: 327418 - DNA, 75 bp, synthetic construct
  source 1..75: mol_type = other DNA
attggcgcacgtccgtatatgggctttgatgaggtggctgaacaggagatcatggacgaaatcagaaaacgcttt

SEQ ID NO: 327419 - DNA, 75 bp, synthetic construct
  source 1..75: mol_type = other DNA
atgtcatccattgatgcagctgtcgtggtggacgttacgcgtctccagcgggtctttgcccggcttcagtttgtg

SEQ ID NO: 327420 - DNA, 75 bp, synthetic construct
  source 1..75: mol_type = other DNA
gggtgtcaggactcaaagagttttctgacgaagcgattgattttgcacgcatagaacggttcgatgcctatttac

SEQ ID NO: 327421 - DNA, 75 bp, synthetic construct
  source 1..75: mol_type = other DNA
atgctgaaaccaagggattctttgaactggccaaatattcaactgaaagtgagcgacgttctgacatgggcaaat

SEQ ID NO: 327422 - DNA, 75 bp, synthetic construct
  source 1..75: mol_type = other DNA
agatcagcctgtaaaatgcacgaaccttaccgcagggatgccaggtcaggaggcgcaaacgtgggcatcttaccg

SEQ ID NO: 327423 - DNA, 75 bp, synthetic construct
  source 1..75: mol_type = other DNA
gtgtggcgtccagccttctgtcatcgtcagaaatggcgtttgaacaggaaaaagagccggacggcgaacgctggc

SEQ ID NO: 327424 - DNA, 75 bp, synthetic construct
  source 1..75: mol_type = other DNA
ggctgttattaagcatgaccgcaggttcagctatggcagcagcaaattctggtacaaccatcggaactggtacat

SEQ ID NO: 327425 - DNA, 75 bp, synthetic construct
  source 1..75: mol_type = other DNA
gacagaaatgaactggtggataagctgaatctgattgctcctgtattgtttgatcgtgagccaggaatgggtttt

SEQ ID NO: 327426 - DNA, 75 bp, synthetic construct
  source 1..75: mol_type = other DNA
atgtcatccatcgatgcagccgtggtggtggacgttgcgcgtctccagcgggtctttgcccggcttcagtttgtg

SEQ ID NO: 327427 - DNA, 75 bp, synthetic construct
  source 1..75: mol_type = other DNA
tgggtatcagttccaacctttatttatcgattatgtactcatagtgattatctttatagtttactttcaataatg

SEQ ID NO: 327428 - DNA, 75 bp, synthetic construct
  source 1..75: mol_type = other DNA
caaacaaaaattcaaaactatgttgcattatatggtttttgcagaaatatttgtttagtatttgtaattacattt

SEQ ID NO: 327429 - DNA, 75 bp, synthetic construct
  source 1..75: mol_type = other DNA
ctttttgtctatccatcactgaccgtaacctgggacggtagcacaaccaatcccccaaaacgcgcgcatttggtc

SEQ ID NO: 327430 - DNA, 75 bp, synthetic construct
  source 1..75: mol_type = other DNA
atggttacacggacagaccaactactaagaaaagcgatgcggggctatctggaacacctcggcaacatgccgctg

SEQ ID NO: 327431 - DNA, 75 bp, synthetic construct
  source 1..75: mol_type = other DNA
tggcgaacgggatctcgatgaaattattactattgccgggcaagaactgaatgaaaaaggcttccgcgccgatga

SEQ ID NO: 327432 - DNA, 75 bp, synthetic construct
  source 1..75: mol_type = other DNA
cgatgcagttcgaccgcccggaagacctggtacgttatccacggaccttgcaggaagactgcgagaagctaaaca

SEQ ID NO: 327433 - DNA, 75 bp, synthetic construct
  source 1..75: mol_type = other DNA
tagcgttgcgaacttaagggctatggttggcagctatcgcaagcaatacactggtattggcgtgttatatccata

SEQ ID NO: 327434 - DNA, 75 bp, synthetic construct
  source 1..75: mol_type = other DNA
tattggatcactgtcaccgaactggacgtgtgcgcgctgtggttcatcgttcggccaatgcagcggaaggtggtt

SEQ ID NO: 327435 - DNA, 75 bp, synthetic construct
  source 1..75: mol_type = other DNA
aagccgctgcgccttgcgtctgccgtgctggatcactgccaccgaaccgggcgcgtgcgtgctgtggtgcatcgt

SEQ ID NO: 327436 - DNA, 75 bp, synthetic construct
  source 1..75: mol_type = other DNA
tatgggcctggcgggtaacctgccggataccgtggatatcgattccatccctggttttattcaggatgtgaatac

SEQ ID NO: 327437 - DNA, 75 bp, synthetic construct
  source 1..75: mol_type = other DNA
tataagatgaacgcgtcgatttctggtgccgaagtgggttgccagggtgaagttggcgtggcgtgctctatggcg

SEQ ID NO: 327438 - DNA, 75 bp, synthetic construct
  source 1..75: mol_type = other DNA
tgggggcggtacagtcatgatgaccgcgcggaatcgattaaaaatattatgagcaatggcggtaaatggccggtg

SEQ ID NO: 327439 - DNA, 75 bp, synthetic construct
  source 1..75: mol_type = other DNA
caggaagactgcgagaagctaaacaaacgtaaagtggatctggttttcgctccctcggtaaaagagatctatccg

SEQ ID NO: 327440 - DNA, 75 bp, synthetic construct
  source 1..75: mol_type = other DNA
tggcgctcagttctcgtaacggttatctgacggcagaacaacgcaaaattgcgcccggtatgtacaaggttttat

SEQ ID NO: 327441 - DNA, 75 bp, synthetic construct
  source 1..75: mol_type = other DNA
tgctgcgtcagcatatccgccgtctgcgtatggaaggcaagcgcgtggcgctggtgcctactatgggcaatttac

SEQ ID NO: 327442 - DNA, 75 bp, synthetic construct
  source 1..75: mol_type = other DNA
atcagacagcagacccgtttatcggagagccatgatgataattatacgttacggcaggagaaaacatgggagcca

SEQ ID NO: 327443 - DNA, 75 bp, synthetic construct
  source 1..75: mol_type = other DNA
aggcatgcgggatttaataaaatcccagccggtctatgagatccagtattacggcaaaaccttccggatgaacgc

SEQ ID NO: 327444 - DNA, 75 bp, synthetic construct
  source 1..75: mol_type = other DNA
atttaatttaaatcgcttccgtttccgtggtgcgctttccactgccagcatcgatgactttacccgttattctaa

SEQ ID NO: 327445 - DNA, 75 bp, synthetic construct
  source 1..75: mol_type = other DNA
gtaaaatcacgattgaagcaaaccagaccgctgattttgaagataatgacttcagcggcaaacgctccctgatgg

SEQ ID NO: 327446 - DNA, 75 bp, synthetic construct
  source 1..75: mol_type = other DNA
cgggtaaaagccggctcatgtttggctcacgggaacaggcacaggaagtgcaggaaggttttcgatttttaacct

SEQ ID NO: 327447 - DNA, 75 bp, synthetic construct
  source 1..75: mol_type = other DNA
tatccccggatgactggtcagtgctggaagaggctgaacatcagctttactggctacgtgcacttgccggtggac

SEQ ID NO: 327448 - DNA, 75 bp, synthetic construct
  source 1..75: mol_type = other DNA
tttttgtccggtcaggggcgacagttatccccggatgactgggcagcactggaagaggccgaatatcagctttac

SEQ ID NO: 327449 - DNA, 75 bp, synthetic construct
  source 1..75: mol_type = other DNA
tttccactgcctgcatcgatgactttacccgttattctaaagatcttgcagatgaaggcacccgctgctttatcg

SEQ ID NO: 327450 - DNA, 75 bp, synthetic construct
  source 1..75: mol_type = other DNA
caaaagcggctgcggcagtccgtaaaatcacgattgaagcaaaccagaccgctgattttgaagacaatgacttca

SEQ ID NO: 327451 - DNA, 75 bp, synthetic construct
  source 1..75: mol_type = other DNA
tatgccagtggcatttgaatttaaatgcgttccgtttgaaggtctgaaagaacgtccgtttaaattacgcctcag

SEQ ID NO: 327452 - DNA, 75 bp, synthetic construct
  source 1..75: mol_type = other DNA
agcgtaactcccagaagtcactggcagaatggattgaagactgggccgactaccttgtgggctttgatgctaatg

SEQ ID NO: 327453 - DNA, 75 bp, synthetic construct
  source 1..75: mol_type = other DNA
agcagtccaggaagaaatggctaacgaatttcgtgatctgcttgttgagaaattcaaagacagcaaagtagaaac

SEQ ID NO: 327454 - DNA, 75 bp, synthetic construct
  source 1..75: mol_type = other DNA
tccctgatggagtctgtcgaagcgaagaccaaagacattatgccagtggcatttgaatttaaatgcgttccgttt

SEQ ID NO: 327455 - DNA, 75 bp, synthetic construct
  source 1..75: mol_type = other DNA
ccgggaaaacaagactgatgtttgactcaaaagagcaggcactggaagttaaggaagggtacaaatttttaacgt

SEQ ID NO: 327456 - DNA, 75 bp, synthetic construct
  source 1..75: mol_type = other DNA
cacgtaaaaaggccaacgacgctgtgtttaaggctctcgacgaacagcaggaaacactgcaaagcgatgctgata

SEQ ID NO: 327457 - DNA, 75 bp, synthetic construct
  source 1..75: mol_type = other DNA
ctcaatatcaagcgtctcgtgaaaggttgttcgatatgggcgagccaaccgaccgttcagaaaacagggggtttt

SEQ ID NO: 327458 - DNA, 75 bp, synthetic construct
  source 1..75: mol_type = other DNA
caaccggggcgcaagggcaaatggaagctattcaggccgctaaccagcttgccagtgctcaaacgaaccagctgc

SEQ ID NO: 327459 - DNA, 75 bp, synthetic construct
  source 1..75: mol_type = other DNA
cgcgtaaagggcttatgttgcagaaacagcatcatggtcttgtgattgtggatgcgtttaatcatgagctcacac

SEQ ID NO: 327460 - DNA, 75 bp, synthetic construct
  source 1..75: mol_type = other DNA
ccaattcgaccatcaacaaattgttgcaggcgcaggacacccttaattactacaaaaatcaggccgggagtcttg

SEQ ID NO: 327461 - DNA, 75 bp, synthetic construct
  source 1..75: mol_type = other DNA
catcactgagagggattttagcagctaaaaaatcattagcagcttccttcctggcgtccatcatggcattaccgg

SEQ ID NO: 327462 - DNA, 75 bp, synthetic construct
  source 1..75: mol_type = other DNA
ccgggaaaacaagactgatgtttgactcaaaggagcaggcactggaagttaaagaagggtacaaatttttaacgt

SEQ ID NO: 327463 - DNA, 75 bp, synthetic construct
  source 1..75: mol_type = other DNA
agaatacggaaaatggtgggtggatgtagaatatatttcctggggagttccgggtaaaagccggctcatgtttga

SEQ ID NO: 327464 - DNA, 75 bp, synthetic construct
  source 1..75: mol_type = other DNA
aaaatggtggatagatgtcgaatacatttcatggggcgttcccgggaaaacaagactgatgtttgactcaaagga

SEQ ID NO: 327465 - DNA, 75 bp, synthetic construct
  source 1..75: mol_type = other DNA
gcacaggcagaggcagataaagatgcgcagcgtactgctgcatctgcggcaataagagaagggacttacaccaaa

SEQ ID NO: 327466 - DNA, 75 bp, synthetic construct
  source 1..75: mol_type = other DNA
gctgttgccaagcagatccagcagtatcagacgcagctccagcaatatgaaaacatgctgcagaatacggttgcc

SEQ ID NO: 327467 - DNA, 75 bp, synthetic construct
  source 1..75: mol_type = other DNA
gccccggcggcccatatttgggaccaggcgcagcgcaccatcaacgatctgaaccaggcgaccaacacgctcgcc

SEQ ID NO: 327468 - DNA, 75 bp, synthetic construct
  source 1..75: mol_type = other DNA
ggaagaatctcgatccagaattacttaagctggtggcaaaacacgacccggataataaatttgctatgccgtata

SEQ ID NO: 327469 - DNA, 75 bp, synthetic construct
  source 1..75: mol_type = other DNA
atgaaaactgaactgaccctgaatgtcctgcagaccatgaacgcacaggaatatgaagatatccgggcagccgga

SEQ ID NO: 327470 - DNA, 75 bp, synthetic construct
  source 1..75: mol_type = other DNA
gaatgccggtggtgagccgtttgcggtggttcaggtgcagcggcggtttgcaccggaagctgtcagccattcact

SEQ ID NO: 327471 - DNA, 75 bp, synthetic construct
  source 1..75: mol_type = other DNA
ttcgggggctttttccccgtccaggttcgtttcacgccagcccacgaacgtttccacctggcattatgttcgccg

SEQ ID NO: 327472 - DNA, 75 bp, synthetic construct
  source 1..75: mol_type = other DNA
caatcctgaccatccaacagggaatatttttgatcctcgtgaactggccttgctggcgcaggcaatggaacatga

SEQ ID NO: 327473 - DNA, 75 bp, synthetic construct
  source 1..75: mol_type = other DNA
acgccgcctggggcctggtcatgtcgttaatctctgctttatcgtggtattgcttttttccaccttgctcacctg

SEQ ID NO: 327474 - DNA, 75 bp, synthetic construct
  source 1..75: mol_type = other DNA
atggttttcctcaaccgttcagaattgggcggcggcatacttggcaccgtagagatgtagaggcatggttagata

SEQ ID NO: 327475 - DNA, 75 bp, synthetic construct
  source 1..75: mol_type = other DNA
aaaatccatcatgcgaaaattaataatgtcccagagatcgaaatttggggggatggtaattcgcgccgtgagttt

SEQ ID NO: 327476 - DNA, 75 bp, synthetic construct
  source 1..75: mol_type = other DNA
atgcgaatatatatcaagagaaaactctaattatttttataaaacaattatcccatgtaatttatatgggaaata

SEQ ID NO: 327477 - DNA, 75 bp, synthetic construct
  source 1..75: mol_type = other DNA
gcgacactggatgcgcagggatacagtgttaacgacatcatccatatcctgatggcagaaggaggtcaggcatga

SEQ ID NO: 327478 - DNA, 75 bp, synthetic construct
  source 1..75: mol_type = other DNA
ggcactggcggcgtcactggatacgcaggggtacagcgttaacgacatcatccatattctgatggcggaaggagg

SEQ ID NO: 327479 - DNA, 75 bp, synthetic construct
  source 1..75: mol_type = other DNA
gtgagttttcgttccactgagcgtcagacccctaaaaccggcgcgctcggcagcgtcgtttccgcgatgggctgc

SEQ ID NO: 327480 - DNA, 75 bp, synthetic construct
  source 1..75: mol_type = other DNA
gaggcagtagtcacgcgtgaatttattaatacactacccgcactgaagttgattgccgtgtttggtgtggggtat

SEQ ID NO: 327481 - DNA, 75 bp, synthetic construct
  source 1..75: mol_type = other DNA
atggttgaggatattttggctccagggttacgggtcgtgttttgcggtatcaaccctgggctttcatccgccggg

SEQ ID NO: 327482 - DNA, 75 bp, synthetic construct
  source 1..75: mol_type = other DNA
tgcaggccatgaacgcacaggaatatgaagatatccgggctgccggaagtgatgaacgccgtgagctgactcacg

SEQ ID NO: 327483 - DNA, 75 bp, synthetic construct
  source 1..75: mol_type = other DNA
tattacagaccatgagcgcacaggaatatgaagatatccgggctgccggaagtgatgaacgccgtgagctgactc

SEQ ID NO: 327484 - DNA, 75 bp, synthetic construct
  source 1..75: mol_type = other DNA
atgatgaataccgaactgacactgaatgcccaggaatatgaagaaatccgtgctgcgggaagcgatatgcgccgt

SEQ ID NO: 327485 - DNA, 75 bp, synthetic construct
  source 1..75: mol_type = other DNA
gattgaaaaaattgaagattaccaaccacaagcgttggcaattctgggcaaacaggcgtttgagcaaggattcag

SEQ ID NO: 327486 - DNA, 75 bp, synthetic construct
  source 1..75: mol_type = other DNA
actggttttccctttgctcatccggcaaatcgcttctggaaggtgatatatcaggccgggtttaccgaccgtcag

SEQ ID NO: 327487 - DNA, 75 bp, synthetic construct
  source 1..75: mol_type = other DNA
atgaaaactgaactgactctgaatgtattacataccatgaacgcacaggaatatgaagatatccgggctgccgga

SEQ ID NO: 327488 - DNA, 75 bp, synthetic construct
  source 1..75: mol_type = other DNA
atgaaaactgaactgaccctgaatgtattacagaccatgagcacacaggaatatgaagatatccgggctgccgga

SEQ ID NO: 327489 - DNA, 75 bp, synthetic construct
  source 1..75: mol_type = other DNA
atgaaaactgaactgaccctgaatgtattacagaccatgagtgcacaggaatatgaagatatccgtgctgcggga

SEQ ID NO: 327490 - DNA, 75 bp, synthetic construct
  source 1..75: mol_type = other DNA
gcgttatgttcaccgggggacgtctctcaggtctgggtgctggttctggtgaatgccggtggtgagccgtttgcg

SEQ ID NO: 327491 - DNA, 75 bp, synthetic construct
  source 1..75: mol_type = other DNA
caccggaagccgtcagccattcactggcactggcggcgtcactggatgcgcaggggtacagcgtcagtgacatca

SEQ ID NO: 327492 - DNA, 75 bp, synthetic construct
  source 1..75: mol_type = other DNA
tattacagaccatgaacacacaggaatatgaagatatccgggctgccggaagtgatgaacgccgtgagctgactc

SEQ ID NO: 327493 - DNA, 75 bp, synthetic construct
  source 1..75: mol_type = other DNA
gaagaaactaatgagggatatgctattgcgaaaattgctgtagcaaaagcatgcgaatatatatcaagagaaaac

SEQ ID NO: 327494 - DNA, 75 bp, synthetic construct
  source 1..75: mol_type = other DNA
aatatattgataattgtttgtagtgctatattatctgttacatatgggctacgtgttggaataggtaatgattat

SEQ ID NO: 327495 - DNA, 75 bp, synthetic construct
  source 1..75: mol_type = other DNA
atttttattaattatgatatatttgagcgcgttagtttttattttatttatttaaggtttattctattggcaatt

SEQ ID NO: 327496 - DNA, 75 bp, synthetic construct
  source 1..75: mol_type = other DNA
gcactggttcagcaaggtttgaaaaggagtatcccttgcaaataaccgaagcattactttcagagccggagctgt

SEQ ID NO: 327497 - DNA, 75 bp, synthetic construct
  source 1..75: mol_type = other DNA
cagtgatagagctttcggtatcatcaccggtgctcttaccggacaggataaccgcatcttattactgtcacagcc

SEQ ID NO: 327498 - DNA, 75 bp, synthetic construct
  source 1..75: mol_type = other DNA
ttagccactttattaccgaacatattgcgccattctatgaacgtcgctggggtggatttctgcgtgattttaaac

SEQ ID NO: 327499 - DNA, 75 bp, synthetic construct
  source 1..75: mol_type = other DNA
gaatttgggaaatatttgatatgtgtgataatatcaactatttttatgcatttcagttcagcggttttattgctt

SEQ ID NO: 327500 - DNA, 75 bp, synthetic construct
  source 1..75: mol_type = other DNA
gccgccatgcagcgtcacctggacaaaggctatgacagagtcccgctggtggtgccattgctgttttatcatggc

SEQ ID NO: 327501 - DNA, 75 bp, synthetic construct
  source 1..75: mol_type = other DNA
gatacctcccgtttcacccgttttattgaggagattgccgaacgttcaccactacaaaaggagagattaatgact

SEQ ID NO: 327502 - DNA, 75 bp, synthetic construct
  source 1..75: mol_type = other DNA
ataccgacgctgtgcggtgacaggtaagccgctgcgccttgcgtctgccgtgctggatcactgccaccgaaccgg

SEQ ID NO: 327503 - DNA, 75 bp, synthetic construct
  source 1..75: mol_type = other DNA
cgccacgccgatgtggccgccgtccgtgtcttcttatggaactatcaataccgccgctgtgccataacgggcaag

SEQ ID NO: 327504 - DNA, 75 bp, synthetic construct
  source 1..75: mol_type = other DNA
ttgcgccgcgctgatgtggccgctgtccgtgtcttcttgtggaattatcagtatcgacggtgcgccgttaccggg

SEQ ID NO: 327505 - DNA, 75 bp, synthetic construct
  source 1..75: mol_type = other DNA
acctgacgatgagatcatgcaacatcggcgtatagctctgctggaactgattcaaaagcatattcgcgaccgcga

SEQ ID NO: 327506 - DNA, 75 bp, synthetic construct
  source 1..75: mol_type = other DNA
agacaaggagcgttttgttaaccagcgtgcctacgcaaatattatggctcgtgatgccataaagtcaggtcgtat

SEQ ID NO: 327507 - DNA, 75 bp, synthetic construct
  source 1..75: mol_type = other DNA
agccgaagacctggcgggtgacgcgtcatttgcccagggattacgtgcgatgattggcggtattttaaccgcatc

SEQ ID NO: 327508 - DNA, 75 bp, synthetic construct
  source 1..75: mol_type = other DNA
gcgatgcccagcaaaaaggtgagataagtcctgacattaacacggcgatgacctctcgtttattgctggatctga

SEQ ID NO: 327509 - DNA, 75 bp, synthetic construct
  source 1..75: mol_type = other DNA
tgaaagccatctgtaaatcttgcgccattagtcccgggacgctctatcaccatttcatctccaaagaagccttga

SEQ ID NO: 327510 - DNA, 75 bp, synthetic construct
  source 1..75: mol_type = other DNA
ttcttggcgcgttaaccttgtatctggacttcatcaacctgttcctgatgttgttgcggatcttcggcaaccgcc

SEQ ID NO: 327511 - DNA, 75 bp, synthetic construct
  source 1..75: mol_type = other DNA
agctctggttattgtgttatcagcgatgattcaaaagcttagtgctggtgtgacaaccatgctctttatgcttta

SEQ ID NO: 327512 - DNA, 75 bp, synthetic construct
  source 1..75: mol_type = other DNA
tgctggatctgacctacggtgtactggccgatatcgaagcggaagatctggcgcgtgaagcgtcgtttgctcagg

SEQ ID NO: 327513 - DNA, 75 bp, synthetic construct
  source 1..75: mol_type = other DNA
caaacgctggagtggcctggatactctggcacgccgtgccccatacttctcaagcgtactgatagccctggtcgg

SEQ ID NO: 327514 - DNA, 75 bp, synthetic construct
  source 1..75: mol_type = other DNA
aagacatctgtttcgtctggtcacggtaccgggaaatcagacatgacttctatcatgatcatgttgttcataatc

SEQ ID NO: 327515 - DNA, 75 bp, synthetic construct
  source 1..75: mol_type = other DNA
aaatacccgaatataacaatcgcggttgatgctgatggttttggttctgatacgtgtgcgcagttggtgcgtcgt

SEQ ID NO: 327516 - DNA, 75 bp, synthetic construct
  source 1..75: mol_type = other DNA
gaagtgatgcgcctgctgggacgtggttgttttccgctgttcggtctggcatggggaatgaatctggcccggcac

SEQ ID NO: 327517 - DNA, 75 bp, synthetic construct
  source 1..75: mol_type = other DNA
ccgtcctggtattacaccctcccggcggctggactactggtcatctggatacccctgtcgaccgccagctacggc

SEQ ID NO: 327518 - DNA, 75 bp, synthetic construct
  source 1..75: mol_type = other DNA
gttaaacaggccgttctgctagggctcgcggcaacggtatcccacacggccatcgtctggcttatcgcgctcggc

SEQ ID NO: 327519 - DNA, 75 bp, synthetic construct
  source 1..75: mol_type = other DNA
tggtattccagtacgagccggtcgcggctgggctggattacgaagccaccttgcaggaagaaaaacgggtgctgg

SEQ ID NO: 327520 - DNA, 75 bp, synthetic construct
  source 1..75: mol_type = other DNA
cgcgtctcgatcgtgaagccagtctgcttgggcacagtggttgccgtatcggcggtaacgatctggatatcgcgc

SEQ ID NO: 327521 - DNA, 75 bp, synthetic construct
  source 1..75: mol_type = other DNA
ctggagcgtgcagcgaaacgcgccggattccacgacgttgttttccagtatgaaccggtggcggctggactggat

SEQ ID NO: 327522 - DNA, 75 bp, synthetic construct
  source 1..75: mol_type = other DNA
ggattacgaagccaccttgcaggaagaaaaacgggtgctggtggtggatatcggcggtggtacgactgactgttc

SEQ ID NO: 327523 - DNA, 75 bp, synthetic construct
  source 1..75: mol_type = other DNA
tttgaggatctggtctgcgcaatgatgttgcacattcgccaacaagcgcaggcgcaactgccagaaacaattacc

SEQ ID NO: 327524 - DNA, 75 bp, synthetic construct
  source 1..75: mol_type = other DNA
tttgaagatctggtctgcgcaatgatgttacacattcgccaacaagcacaagcgcagttacctgaagcgattacc

SEQ ID NO: 327525 - DNA, 75 bp, synthetic construct
  source 1..75: mol_type = other DNA
cctgctcccgacggctggttacccagacatcccgtatcggctccattggcgtgatgatgagccatgtcagctatg

SEQ ID NO: 327526 - DNA, 75 bp, synthetic construct
  source 1..75: mol_type = other DNA
gcttcttcttatagtaaagcaacgtttggtattcccgaagaacaaattgtgctatgtatgacagcacgttttttt

SEQ ID NO: 327527 - DNA, 75 bp, synthetic construct
  source 1..75: mol_type = other DNA
ttgagatacctttctggcctgtattggttttcatcgctttcttcgctgcaacggtggcgcagatcaaacgagcca

SEQ ID NO: 327528 - DNA, 75 bp, synthetic construct
  source 1..75: mol_type = other DNA
gcgtgaagcggtaagcgaatggctgtaccgccatcatgatgttccggcagacgacgatgaaacgcaggcgctgtt

SEQ ID NO: 327529 - DNA, 75 bp, synthetic construct
  source 1..75: mol_type = other DNA
gattataacggcatgaagctggtgcgcgagggggctcgcccgatcagcggggataccggactgcgcgatgtccag

SEQ ID NO: 327530 - DNA, 75 bp, synthetic construct
  source 1..75: mol_type = other DNA
ccacgatgctggcaggacaacagggcatgagcgttgaacaggcccgggcgattctggccgcggcggcaccgcagc

SEQ ID NO: 327531 - DNA, 75 bp, synthetic construct
  source 1..75: mol_type = other DNA
ttgggaattgaccttcgacaacgtgttatcaggctcagcagcggcaggtttatggaagagccgtgcatctggttc

SEQ ID NO: 327532 - DNA, 75 bp, synthetic construct
  source 1..75: mol_type = other DNA
aaggtcgcaagccagccgctgactacgaccgggttaacgggtatcctggctgatttacagcagacgtcaggtatt

SEQ ID NO: 327533 - DNA, 75 bp, synthetic construct
  source 1..75: mol_type = other DNA
tcacccgtttactggagcagggcgtggatatcaacaccgtccgccaactggcaggccacagcgacatatccacga

SEQ ID NO: 327534 - DNA, 75 bp, synthetic construct
  source 1..75: mol_type = other DNA
ttgcgccagtggtgcaaaccaccgtgttcgatgcgtatattggcggtctggcaccctcggggcggcggggcatca

SEQ ID NO: 327535 - DNA, 75 bp, synthetic construct
  source 1..75: mol_type = other DNA
actggctggccagaccgctaaccgagcgtcaatgcgaatacgcggcggcggacgtctggtatctgttaccgatcg

SEQ ID NO: 327536 - DNA, 75 bp, synthetic construct
  source 1..75: mol_type = other DNA
tttcgatggcgagcatctggcgctaattgatcctctcgggatcaccgactggtcaccgctgaaagcgatcctgcg

SEQ ID NO: 327537 - DNA, 75 bp, synthetic construct
  source 1..75: mol_type = other DNA
gtttgatgcgtatattgccggtctggctccctcggggcgcagaggtatcaccagcctgttaaaccgcagtgccgg

SEQ ID NO: 327538 - DNA, 75 bp, synthetic construct
  source 1..75: mol_type = other DNA
tatttttatttcaaatgcatccataaatatatataccagtagtattacagtaatacttggagcgttaacgtcacc

SEQ ID NO: 327539 - DNA, 75 bp, synthetic construct
  source 1..75: mol_type = other DNA
tctatagccgttgcggaaatgcaacatgaagagtttcagaaaatgacagagcgcgagcaagtacctctattgaaa

SEQ ID NO: 327540 - DNA, 75 bp, synthetic construct
  source 1..75: mol_type = other DNA
attacccattcagacggatcgctttcgtctaatggtgtcgttgtccattctcacaaacatagcggcgtccagtcc

SEQ ID NO: 327541 - DNA, 75 bp, synthetic construct
  source 1..75: mol_type = other DNA
ggaaggggcgcaaataccgcgaaattcatgtggcggatacagtagaaaaggccatccgtgcgtggctgaaagtca

SEQ ID NO: 327542 - DNA, 75 bp, synthetic construct
  source 1..75: mol_type = other DNA
atgaattacgatgaaataacgaaaattaccgaagaacgtattagcgactacatgaccgaagcagttaatactgac

SEQ ID NO: 327543 - DNA, 75 bp, synthetic construct
  source 1..75: mol_type = other DNA
aaggaaaatcgaaatgcaacatgaagagtttggtaatgactccaacttattgatagtgttttatgttcagataat

SEQ ID NO: 327544 - DNA, 75 bp, synthetic construct
  source 1..75: mol_type = other DNA
ttgttttgctttatatcgctggcgcgatcctgatgtcatgttttattaaggttagcgaggccgaccgttgcggat

SEQ ID NO: 327545 - DNA, 75 bp, synthetic construct
  source 1..75: mol_type = other DNA
gcgttcctcgaaaaaaatcccggcgcgaagatcatccacgatccacgtctctcctggaacaccgttgatgtggtg

SEQ ID NO: 327546 - DNA, 75 bp, synthetic construct
  source 1..75: mol_type = other DNA
gttcggttatatcaacgtcaaaaacctcacgccgctcaagctggtgatcaactccgggaacggcgcagcgggtcc

SEQ ID NO: 327547 - DNA, 75 bp, synthetic construct
  source 1..75: mol_type = other DNA
acagcaactggtcaatctgctgttgatgaaaggtaacattggcaagcctggtgcgggtatctgcccactacgtgg

SEQ ID NO: 327548 - DNA, 75 bp, synthetic construct
  source 1..75: mol_type = other DNA
ggcaccgaagagatttatttcgccacgttccatctcggcgtggatggcggcattgaagttactgccagccataag

SEQ ID NO: 327549 - DNA, 75 bp, synthetic construct
  source 1..75: mol_type = other DNA
ggcaccgaagagatttatttcgccacgttccatctcggcgtggatggcggcatagaagttaccgccagccataac

SEQ ID NO: 327550 - DNA, 75 bp, synthetic construct
  source 1..75: mol_type = other DNA
cgtaccgatggcatcagcatgacctttgccgactggcgctttaacctgcgctcctccaacaccgaaccggtggtg

SEQ ID NO: 327551 - DNA, 75 bp, synthetic construct
  source 1..75: mol_type = other DNA
cacgagcttgaggctgcgggacgtctcactcagcctttgaaatatgatgccgtcagcgactgttacaagccatta

SEQ ID NO: 327552 - DNA, 75 bp, synthetic construct
  source 1..75: mol_type = other DNA
aattcaggcaacggcgcagcaggtccggtggttgatgctattgaggcccgttttaaggcattgggagtgccggtc

SEQ ID NO: 327553 - DNA, 75 bp, synthetic construct
  source 1..75: mol_type = other DNA
tatcagcaaatcaatctgcgtgacgcttacgttgatcacctgttcggttatatcaacgtcaaaaacctcacgccg

SEQ ID NO: 327554 - DNA, 75 bp, synthetic construct
  source 1..75: mol_type = other DNA
agcgagattgacatgcaaaaaagcggtgcgcaggcggtaaccgttgaggattcaatgtcgatgattcatgcctcg

SEQ ID NO: 327555 - DNA, 75 bp, synthetic construct
  source 1..75: mol_type = other DNA
taccgcaccgcaaaacccgtttgaaatgctgacgaactctgagactcagttggccagtgcctactataacgtgcg

SEQ ID NO: 327556 - DNA, 75 bp, synthetic construct
  source 1..75: mol_type = other DNA
ccgtgaatacgggagcaataactttcccgactgctccaacatgtgccatgaaccgaccagtgtgggtttggcagc

SEQ ID NO: 327557 - DNA, 75 bp, synthetic construct
  source 1..75: mol_type = other DNA
ggcaccgaagagatttatttcgccacgttccatctcggcgtggatggcggcattgaagttacggccagccataat

SEQ ID NO: 327558 - DNA, 75 bp, synthetic construct
  source 1..75: mol_type = other DNA
tctggcgcaggccggtgttgatatcacgctgatttactcaggggcgcacaaggtggatggcaatcagtttgaagc

SEQ ID NO: 327559 - DNA, 75 bp, synthetic construct
  source 1..75: mol_type = other DNA
caatcagtttgaagctttaccggcagaggtgcgtcaggacatgcagcagcgggttgatgcggcgcaccggatgtt

SEQ ID NO: 327560 - DNA, 75 bp, synthetic construct
  source 1..75: mol_type = other DNA
gcggcggggccggtggtggacgccattgaagcccgctttaaagccctcggcgctccggtggaattaatcaaagtg

SEQ ID NO: 327561 - DNA, 75 bp, synthetic construct
  source 1..75: mol_type = other DNA
tttcgcgcgtcaccgttggtcactgcgatctgaaagacaatctcgacaacattttgaagatgatcgatctcggcg

SEQ ID NO: 327562 - DNA, 75 bp, synthetic construct
  source 1..75: mol_type = other DNA
gcgtatggtgaattcttgaagccgaaaaccatcgtgctcggcggtgatgtgcgtccgacaagtgaggcgctgaaa

SEQ ID NO: 327563 - DNA, 75 bp, synthetic construct
  source 1..75: mol_type = other DNA
tctgcgccaactgttacctgaagaagcgtaaaaatatgacgaaattaacctgttttaaggcctacgatattcgcg

SEQ ID NO: 327564 - DNA, 75 bp, synthetic construct
  source 1..75: mol_type = other DNA
cagcggagataccggactgcgcgacgtccagcgtctggcagaagcgaacgactttccccccgtcgatgaaaccaa

SEQ ID NO: 327565 - DNA, 75 bp, synthetic construct
  source 1..75: mol_type = other DNA
ggcaccgaagagatttatttcgccacgttccatctcggcgtggatggcggcatcgaagttaccgccagccataaa

SEQ ID NO: 327566 - DNA, 75 bp, synthetic construct
  source 1..75: mol_type = other DNA
ggcaccgaagagatttatttcgccacgttccatctcggcgtggatggcggcatcgaagttacagccagccataac

SEQ ID NO: 327567 - DNA, 75 bp, synthetic construct
  source 1..75: mol_type = other DNA
gatctgggtattgcatttgacggcgactttgaccgttgtttcctgttcgatggacagggccagtttattgaaggt

SEQ ID NO: 327568 - DNA, 75 bp, synthetic construct
  source 1..75: mol_type = other DNA
cagcggggataccggactgcgcgacgtccagcgtctggcagaagcaaacgactttccccccgtcgatgaaaccaa

SEQ ID NO: 327569 - DNA, 75 bp, synthetic construct
  source 1..75: mol_type = other DNA
cagcggcgataccggactgcgcgaagtccagcgtctggcagaagccaacgactttccccccgtcgatgaaaccaa

SEQ ID NO: 327570 - DNA, 75 bp, synthetic construct
  source 1..75: mol_type = other DNA
gtgcttctgcgcccgtcaaaaagaaatcatcttttttctctaaactgaccctgcttcgcctggttcgtgcagtga

SEQ ID NO: 327571 - DNA, 75 bp, synthetic construct
  source 1..75: mol_type = other DNA
gctggtttgcttgcaggatggcagcccgctggaaatgcaaaagtagctgaagctacgggatccatgctggtttca

SEQ ID NO: 327572 - DNA, 75 bp, synthetic construct
  source 1..75: mol_type = other DNA
atgaatactgttttaagtgttcagggtgcttctgcgcccgttgaaaagaaatcgtttttttctaaattcacttgt

SEQ ID NO: 327573 - DNA, 75 bp, synthetic construct
  source 1..75: mol_type = other DNA
atgaatgctgttttaagtgttcagggggcttctgcgcccgtcaaaaagaagtcgtttttttctaaattcacttgt

SEQ ID NO: 327574 - DNA, 75 bp, synthetic construct
  source 1..75: mol_type = other DNA
gtgcttctgcgcctgttgaaaagaaatcgtttttttctaaattcactcgtctgaatatgcttcgcctggttcgcg

SEQ ID NO: 327575 - DNA, 75 bp, synthetic construct
  source 1..75: mol_type = other DNA
gatgttcttcccgcaactggcactggccgcccagggggcaggtcaggacctgatggccgggggtaacgcccataa

SEQ ID NO: 327576 - DNA, 75 bp, synthetic construct
  source 1..75: mol_type = other DNA
ggttgtttcagggaaaggaagaaattacaaaaattgcacttatcaatatatcttcgaaattcttaacggtgccat

SEQ ID NO: 327577 - DNA, 75 bp, synthetic construct
  source 1..75: mol_type = other DNA
gcaaaccttacgcctggaacccaccagctttattgaaaaaagtttacgcgcttactactcggatgttttgtggtc

SEQ ID NO: 327578 - DNA, 75 bp, synthetic construct
  source 1..75: mol_type = other DNA
taaaattgccttgcgcatgctggagcagggctttgaacgtgagattgtgctggcgacaacccaactcactgatgc

SEQ ID NO: 327579 - DNA, 75 bp, synthetic construct
  source 1..75: mol_type = other DNA
gaaaagcgccgcgacgacggcattcctggcattactaactatatcttttcagaaactgctgctcgtggaatgtac

SEQ ID NO: 327580 - DNA, 75 bp, synthetic construct
  source 1..75: mol_type = other DNA
caccgacgtgtgtgcagccgtggcgcagttgcgtgaatcaggttgtgacggggtgatcgcgtttggcggcggctc

SEQ ID NO: 327581 - DNA, 75 bp, synthetic construct
  source 1..75: mol_type = other DNA
cattagtctgcgcatccttgctggctctggttagcactggcgtaaacgccgcagaaaaagtggcgttaaagttag

SEQ ID NO: 327582 - DNA, 75 bp, synthetic construct
  source 1..75: mol_type = other DNA
gggcatctggcatttgatatcgatcgctccttattgttaatgctgctgggcaatttttatggtctggagtcttct

SEQ ID NO: 327583 - DNA, 75 bp, synthetic construct
  source 1..75: mol_type = other DNA
gtggctaattttcagctaagtatactctgtctggcaattacgctagttatctattttcttaacaaacgcctttat

SEQ ID NO: 327584 - DNA, 75 bp, synthetic construct
  source 1..75: mol_type = other DNA
gtttttacgtctctctattcgcgaagggatggcgaaaggtgctggattcggcgcggcatctcatggtgccgggac

SEQ ID NO: 327585 - DNA, 75 bp, synthetic construct
  source 1..75: mol_type = other DNA
atgatgagcattgatgccctgacagccatagagaactttgccagcggtatattcagtgcaggcatggagtttctc

SEQ ID NO: 327586 - DNA, 75 bp, synthetic construct
  source 1..75: mol_type = other DNA
gccgcttttgaaaacagcgccactcgtgcttttggtcctgctggttttctcgagcaggatgactcggagaactgg

SEQ ID NO: 327587 - DNA, 75 bp, synthetic construct
  source 1..75: mol_type = other DNA
tggttctgcgcattattcagctggaagcagtacaggaagaaatggctaacgaatttcgtgatctgcttgttgaga

SEQ ID NO: 327588 - DNA, 75 bp, synthetic construct
  source 1..75: mol_type = other DNA
agaaacggccgctcgtggaatgtaccaacgctgggccgatcttctgagtagcgaaagctggcaggaagtgctcga

SEQ ID NO: 327589 - DNA, 75 bp, synthetic construct
  source 1..75: mol_type = other DNA
gccgcccagggggcaggtcaggacctgatggccggggggaacgccaccgtcaaggccaccttcggtaaagactcc

SEQ ID NO: 327590 - DNA, 75 bp, synthetic construct
  source 1..75: mol_type = other DNA
atgaatactgttttaagtgttcagggtgcttctgcgcccgtcaaaaagaagtcgtttttttctaaattcactcgt

SEQ ID NO: 327591 - DNA, 75 bp, synthetic construct
  source 1..75: mol_type = other DNA
gctgccggtggtgccggtcaggacctgatggccagcggtaacggtacggtcaaagccacgttcggcaaggactcc

SEQ ID NO: 327592 - DNA, 75 bp, synthetic construct
  source 1..75: mol_type = other DNA
tttattatgttaattcttgcttcttgtaacatcaaattaaaaattaagagaggctttgctagaggtgagagggta

SEQ ID NO: 327593 - DNA, 75 bp, synthetic construct
  source 1..75: mol_type = other DNA
gtcagttaaaaacggctattgagcaaggggaactgaaacccggcgcaaggctaccttcaagtcgtacctggtcgc

SEQ ID NO: 327594 - DNA, 75 bp, synthetic construct
  source 1..75: mol_type = other DNA
tgcgcgaggcaattgttgattatctacgtgtctcgcgcggaattgagagccagcctgagcaggtatttatcacac

SEQ ID NO: 327595 - DNA, 75 bp, synthetic construct
  source 1..75: mol_type = other DNA
gcaagaaggtaaattagaaggtttgcagcaaggtaaattggagggtttgcagaaaggtaaattagaaggtttgca

SEQ ID NO: 327596 - DNA, 75 bp, synthetic construct
  source 1..75: mol_type = other DNA
gaatgggatggatacaaaatcttactgagaatgaaaaaaagataatagatgattttctggaagaagccgctaagt

SEQ ID NO: 327597 - DNA, 75 bp, synthetic construct
  source 1..75: mol_type = other DNA
agaactgaaaacaacacaacaggctgtcctggaacatctgattcaaaaccacaggctggtgattcagaaccacag

SEQ ID NO: 327598 - DNA, 75 bp, synthetic construct
  source 1..75: mol_type = other DNA
gcatcaaaactggctgcagatcgaaaagagaaacgaagccaaatggcttaaaaagaatacagaacaactcgaatg

SEQ ID NO: 327599 - DNA, 75 bp, synthetic construct
  source 1..75: mol_type = other DNA
tgcacatacagtcgacattggagcacataaccatactgttggtattggtgcacattcacacactgttgctattgg

SEQ ID NO: 327600 - DNA, 75 bp, synthetic construct
  source 1..75: mol_type = other DNA
acaaggctttgaacgtgagattgtgcgggcaacaacccagctaaccgatgccgatctcaccccattaagcctgaa

SEQ ID NO: 327601 - DNA, 75 bp, synthetic construct
  source 1..75: mol_type = other DNA
cgcatgatgcggtatttaaaacctttatgttctcacccgataccgcacgggattttctggaaatacatctaccgg

SEQ ID NO: 327602 - DNA, 75 bp, synthetic construct
  source 1..75: mol_type = other DNA
cttttttctgcaattattggtgtagcgattgcaagagttatatgcttgtggttaagctacattatgagcagggaa

SEQ ID NO: 327603 - DNA, 75 bp, synthetic construct
  source 1..75: mol_type = other DNA
agaataactatcgatatttcatttttttcaataactgttttaaaacggttatttagatatggcgggtgggtaact

SEQ ID NO: 327604 - DNA, 75 bp, synthetic construct
  source 1..75: mol_type = other DNA
acagaataatttgccagagctgatttccggctggcgtggtgcgctgatggcggaagcattacacaatttattgca

SEQ ID NO: 327605 - DNA, 75 bp, synthetic construct
  source 1..75: mol_type = other DNA
tggatgtacgcgtggtttttgccagtggcggcaaaacagctgatggcgatggtgctaggtggtatttgcggtgtg

SEQ ID NO: 327606 - DNA, 75 bp, synthetic construct
  source 1..75: mol_type = other DNA
aagcctggctgccgattgaagtgaaacagaaaatggcgatgtttgctggtggtgccagcggcgtactgtgtctga

SEQ ID NO: 327607 - DNA, 75 bp, synthetic construct
  source 1..75: mol_type = other DNA
tcggtgcgaatccgcatgatctggcacgtcccaatatcaccgcggccaccacacttgccagcgccgccaacatcg

SEQ ID NO: 327608 - DNA, 75 bp, synthetic construct
  source 1..75: mol_type = other DNA
tgctgcgacagcaacaaagctgaaaacagcccgtaaaattaataacgtttcgtttgatggaacatcagatattaa

SEQ ID NO: 327609 - DNA, 75 bp, synthetic construct
  source 1..75: mol_type = other DNA
cgtgctctacatcagcggatttccagttgaaaaaaatcttatagagggtattcgtcgcaaatctaattcgttcat

SEQ ID NO: 327610 - DNA, 75 bp, synthetic construct
  source 1..75: mol_type = other DNA
atttcagcgaacccgcgccagcggtgaaactgactgggggaatgggcggaagtatacaactcaaaatcattactc

SEQ ID NO: 327611 - DNA, 75 bp, synthetic construct
  source 1..75: mol_type = other DNA
tattggctcacacgggcactctattaccgttaatgctacaggtaatacagaaaacaccgtcaaaaacatcgcatt

SEQ ID NO: 327612 - DNA, 75 bp, synthetic construct
  source 1..75: mol_type = other DNA
cggcaggaaggacatcaaattggctggcaagaaggtaaaattgaaggctggcaagaaggtaaattagaaggtttg

SEQ ID NO: 327613 - DNA, 75 bp, synthetic construct
  source 1..75: mol_type = other DNA
aaggctatgacagagttccgctggtggtgccattgctgttttatcatggcgaaacctcgccctacccgtactcac

SEQ ID NO: 327614 - DNA, 75 bp, synthetic construct
  source 1..75: mol_type = other DNA
tccactgatcgtaaacgtgaagtcattgtgagcccttctcaagctaagggagtgaaagaatacggcagtatgatg

SEQ ID NO: 327615 - DNA, 75 bp, synthetic construct
  source 1..75: mol_type = other DNA
atgtaacctcaccaggtatttacagcgttacaggtaaagcgaccaacggtccagtactggacggaaacggcgtga

SEQ ID NO: 327616 - DNA, 75 bp, synthetic construct
  source 1..75: mol_type = other DNA
ggtgaagtcgatggtgatgaccccgcagtattcagaccaatacaaaaatacatcaatggcacatggtataacgtc

SEQ ID NO: 327617 - DNA, 75 bp, synthetic construct
  source 1..75: mol_type = other DNA
tgcaaatcgttttgcaattaatagcagtaccggaatgtggataaatatgcgtgaccagaatgttatttttggacg

SEQ ID NO: 327618 - DNA, 75 bp, synthetic construct
  source 1..75: mol_type = other DNA
tgcaaaaccagagtctggttaccctgaagataaaggcaatggggttctggaagtattcaatgctggtcgctttca

SEQ ID NO: 327619 - DNA, 75 bp, synthetic construct
  source 1..75: mol_type = other DNA
tggtctgtatgacgatgccggaacactgattgcggtcgccaacatggcagaaagctataagcctgaactcgctga

SEQ ID NO: 327620 - DNA, 75 bp, synthetic construct
  source 1..75: mol_type = other DNA
attcccgacggtatggactggggcgtcattgatggcaacctgataaacatctcagtcggtccgagtgatgattct

SEQ ID NO: 327621 - DNA, 75 bp, synthetic construct
  source 1..75: mol_type = other DNA
agtttcagcgcaacaaaaagaaagtcggcctggtcgtcaacgagtatggagacattcaggggctggtgacggttg

SEQ ID NO: 327622 - DNA, 75 bp, synthetic construct
  source 1..75: mol_type = other DNA
cactatgttcccagcatttttggggaagaccggcatacctcccgcagtgaacggtattcgtacatccccaccatc

SEQ ID NO: 327623 - DNA, 75 bp, synthetic construct
  source 1..75: mol_type = other DNA
ccatacccgtgccattcacagcatcgacaccgacattaagcttaatcgcacattgtgggtgatggcagaaacgat

SEQ ID NO: 327624 - DNA, 75 bp, synthetic construct
  source 1..75: mol_type = other DNA
agggcttacgaggtggtgggcgtgtttgaccggatagaggagaagcgtgatgccatgcagtcgctggtcctgccg

SEQ ID NO: 327625 - DNA, 75 bp, synthetic construct
  source 1..75: mol_type = other DNA
gcgtgttccacaccggggaaatgtggtggagaaagttattgaaggggcttacgaggtggtgggcgtgtttgaccg

SEQ ID NO: 327626 - DNA, 75 bp, synthetic construct
  source 1..75: mol_type = other DNA
tctgagctctcagtaaatatcaatacggttctgacgagtcgcttacgattagcaagtcgttttggtcatgtaaac

SEQ ID NO: 327627 - DNA, 75 bp, synthetic construct
  source 1..75: mol_type = other DNA
ccccttaactcgcgaagaactgatgcaagtcgtccccagcgtattcggggaagataagcacacatccagaagcga

SEQ ID NO: 327628 - DNA, 75 bp, synthetic construct
  source 1..75: mol_type = other DNA
atgcgactagccagtcgttttggttatactgcaaaccagatacgccgtgaccgtccactgacacacgaagaactg

SEQ ID NO: 327629 - DNA, 75 bp, synthetic construct
  source 1..75: mol_type = other DNA
ctgacgccacgacgccgggaggattacggtaaggacctgtggagtacttatcagaccatccaggagaatatgctg

SEQ ID NO: 327630 - DNA, 75 bp, synthetic construct
  source 1..75: mol_type = other DNA
tgcgtgttccgcaccggggaaatgtggtggacagagtcattgaaggggcttacgaggtggtgggcgtgtttgacc

SEQ ID NO: 327631 - DNA, 75 bp, synthetic construct
  source 1..75: mol_type = other DNA
gggaggattacggtaaggacctgtggagtacttatcagaccatccaggaaaatatgctgaaaggcgggatttccg

SEQ ID NO: 327632 - DNA, 75 bp, synthetic construct
  source 1..75: mol_type = other DNA
gcaggattcattcgcgatcgtgcatattaatgagggtgccaatgtaaaagtacaaaatgcgcaaggcgtttatac

SEQ ID NO: 327633 - DNA, 75 bp, synthetic construct
  source 1..75: mol_type = other DNA
gaagataaacacacgtcccgaagccagaactatacgtacatccccaccatcaccgtactggaaagcctgcagcgg

SEQ ID NO: 327634 - DNA, 75 bp, synthetic construct
  source 1..75: mol_type = other DNA
agatgccatgcagtcgctgatgctgccgccacctgctcagcaggctctggcacaggccgcgctgacgtaccgctt

SEQ ID NO: 327635 - DNA, 75 bp, synthetic construct
  source 1..75: mol_type = other DNA
ttggcgaggtgcgggtgccgcacaaaggagatgtcgtgagtcaggtgattgagggggcgtatgaagtgctgggta

SEQ ID NO: 327636 - DNA, 75 bp, synthetic construct
  source 1..75: mol_type = other DNA
atgacccgtctggcttcgcgctttggcgcagcaaaccttattcgtcgtgaccgtccgttaacccgtgaagagttg

SEQ ID NO: 327637 - DNA, 75 bp, synthetic construct
  source 1..75: mol_type = other DNA
accgtcctggaaaatctgcagcgggaaggctttcagccgttcttcgcctgccagacacgtgtgcgcgaccagagc

SEQ ID NO: 327638 - DNA, 75 bp, synthetic construct
  source 1..75: mol_type = other DNA
gggaagtgcgtgttccgcatcggggaaatgtggtggacagagtcattgaaggggcttacgaggtggtgggcgttt

SEQ ID NO: 327639 - DNA, 75 bp, synthetic construct
  source 1..75: mol_type = other DNA
ccgtgccattcacagcatcgacaccgacattaagctcaatcgcgcattgtgggtaatggctgaaacgctgctgga

SEQ ID NO: 327640 - DNA, 75 bp, synthetic construct
  source 1..75: mol_type = other DNA
catacccgggccattcacagcatcgacaccgatattaaactcaaccgcgcattgtgggtgatggcagaaacgatg

SEQ ID NO: 327641 - DNA, 75 bp, synthetic construct
  source 1..75: mol_type = other DNA
tgaaaggcgggatttccggtcgcagtgccagaggaaaacgtatccatacccgggccattcacagcattgataccg

SEQ ID NO: 327642 - DNA, 75 bp, synthetic construct
  source 1..75: mol_type = other DNA
gccgacattctgacgccacgacgccgggaagattacggtaaggacctgtggagtgcttatcagaccattcaggag

SEQ ID NO: 327643 - DNA, 75 bp, synthetic construct
  source 1..75: mol_type = other DNA
tacccgtgccattcacagcatcgacaccgatattaagctcaaccgcgcattgtgggtgatggcagaaacgctgct

SEQ ID NO: 327644 - DNA, 75 bp, synthetic construct
  source 1..75: mol_type = other DNA
atgctgaaaggcgggatttccggtcgcagtgcaaaaggaaaacgtatccatacccgtgccattcacagcatcgac

SEQ ID NO: 327645 - DNA, 75 bp, synthetic construct
  source 1..75: mol_type = other DNA
acgaggtagtgggcgtgtttgaccggattgaggaaaagcgtgatgccatgcagtcgctgattctgccgccaccgg

SEQ ID NO: 327646 - DNA, 75 bp, synthetic construct
  source 1..75: mol_type = other DNA
tctgctcaactctcatgacggtacctccagctaccagatgctgccggggtacttcaggttcgtctgccagaacgg

SEQ ID NO: 327647 - DNA, 75 bp, synthetic construct
  source 1..75: mol_type = other DNA
tggtgacgaacatcagccagtcaccaccgctgacattctgaccccccgacgccgggaggattacggtgaggacct

SEQ ID NO: 327648 - DNA, 75 bp, synthetic construct
  source 1..75: mol_type = other DNA
tggtgacgaacatcagccagtcaccaccgctgacattctgacccctcgacgctgggaggattacggtgaggacct

SEQ ID NO: 327649 - DNA, 75 bp, synthetic construct
  source 1..75: mol_type = other DNA
tggtgacgaacatcagccagtcaccaccgctgacattctgaccccacgacgcagggaggattacggtgaggacct

SEQ ID NO: 327650 - DNA, 75 bp, synthetic construct
  source 1..75: mol_type = other DNA
tggtgacgaacatcagccggtcaccaccgctgacattctgaccccacgacgcggggaggattacggtgaggacct

SEQ ID NO: 327651 - DNA, 75 bp, synthetic construct
  source 1..75: mol_type = other DNA
tggtgacgaacatcagcccgtcaccaccgctgacattctgaccccacgacgccgggaggattacggtgaggacct

SEQ ID NO: 327652 - DNA, 75 bp, synthetic construct
  source 1..75: mol_type = other DNA
tggtgacgaacatcagccagtcaccaccgctgacattctgaccccgcgacgcggggaggattacggtgaggacct

SEQ ID NO: 327653 - DNA, 75 bp, synthetic construct
  source 1..75: mol_type = other DNA
gcgtatgctatgcctttccggtcggtaaaaatatcatgctggtttcccgtcattatctgccggagttccagctac

SEQ ID NO: 327654 - DNA, 75 bp, synthetic construct
  source 1..75: mol_type = other DNA
ccaaacgtttcaatatctggtgtcagggctccacgccgtggatgggtgccggtgcatgggatgcctgtgcgctcg

SEQ ID NO: 327655 - DNA, 75 bp, synthetic construct
  source 1..75: mol_type = other DNA
gcttttgctaacctgctgggctttaaagtcagggagtcaggccgccgtaagtacagcagcgcctttattgaggtg

SEQ ID NO: 327656 - DNA, 75 bp, synthetic construct
  source 1..75: mol_type = other DNA
catagataatgatatggcctttgataacacgccagcgagccgcttaatactgaccatgatgggagcagttgccga

SEQ ID NO: 327657 - DNA, 75 bp, synthetic construct
  source 1..75: mol_type = other DNA
ggccgccgggggtacaccaaacacatgctgcgtctgcgccgtgacggggagataaacggacaacatgtccctgaa

SEQ ID NO: 327658 - DNA, 75 bp, synthetic construct
  source 1..75: mol_type = other DNA
ggcacattccaggcagaacatgaggaatttgcatttgatataagcgacagccacaaagagcggcttgcggcgttt

SEQ ID NO: 327659 - DNA, 75 bp, synthetic construct
  source 1..75: mol_type = other DNA
gagaatatgctgaaaggcgggatttccggtcgcagtgccagaggaaaacgtatccatacccgtgccattcacagc

SEQ ID NO: 327660 - DNA, 75 bp, synthetic construct
  source 1..75: mol_type = other DNA
ttatgccatgacggttcattattaccggctgcgggattatgccctgcagcatccggaatgcagcgccattatgcg

SEQ ID NO: 327661 - DNA, 75 bp, synthetic construct
  source 1..75: mol_type = other DNA
gataattactcattgcaggcgcaatctatagaaggtgcgggttatgaaatgttaagtaaaaataaaaagataaaa

SEQ ID NO: 327662 - DNA, 75 bp, synthetic construct
  source 1..75: mol_type = other DNA
taatgttgtgatgcagagtgacgcgaacgccaatatcaagccgaacaagaaaaaatcatccaacaagatagaccc

SEQ ID NO: 327663 - DNA, 75 bp, synthetic construct
  source 1..75: mol_type = other DNA
aggatttttagagaaaagaattcccgccagcgaaataagtcttgaaattttcgatcgttatatcaatgaatttat

SEQ ID NO: 327664 - DNA, 75 bp, synthetic construct
  source 1..75: mol_type = other DNA
atgcaattagccagtcgttttggtcatgtaaatcagatacgccgtgaccgtccgctgacacacgaagaactgatg

SEQ ID NO: 327665 - DNA, 75 bp, synthetic construct
  source 1..75: mol_type = other DNA
gtcgcagtgcaaaaggaaaacgtatccacacccgtgccattcacagcatcgacaccgatattaagctcaaccgcg

SEQ ID NO: 327666 - DNA, 75 bp, synthetic construct
  source 1..75: mol_type = other DNA
ccgtccgctgacacatgaagagctgatgcaccatgtgccggggattttcggggaagagaaacacacgtcccgaag

SEQ ID NO: 327667 - DNA, 75 bp, synthetic construct
  source 1..75: mol_type = other DNA
tattcctgcaatgttgctggcagctcagggaaaaaatggccgccatgtttcatcagcaacgaaatccagtgattg

SEQ ID NO: 327668 - DNA, 75 bp, synthetic construct
  source 1..75: mol_type = other DNA
gtagcaaggatcagaacgtagctcgtcaggtggaagcgcttaaaggacgggtgaatgaagagaatattttgattg

SEQ ID NO: 327669 - DNA, 75 bp, synthetic construct
  source 1..75: mol_type = other DNA
tatcaggctggtgggctttgatacgtggaacgccacgcatctcagaacgcaattacagggggcaggttttgaggt

SEQ ID NO: 327670 - DNA, 75 bp, synthetic construct
  source 1..75: mol_type = other DNA
tgcgtctgcgccgtgacggggagataaacggacaacatgtccctgaaatcattctgctcaactcccatgacggta

SEQ ID NO: 327671 - DNA, 75 bp, synthetic construct
  source 1..75: mol_type = other DNA
gatggccctgttaatgttgaaagcatcagcggattttgaggacatgacaggcgagctaccaattattgtacatta

SEQ ID NO: 327672 - DNA, 75 bp, synthetic construct
  source 1..75: mol_type = other DNA
gaccatctacaaccgtattcaggagaacctgagtaagggcggactggccggtgatgccgcacgttcctgcgaatg

SEQ ID NO: 327673 - DNA, 75 bp, synthetic construct
  source 1..75: mol_type = other DNA
aacctgctcaaaggggggctgccaggacgtactgccaaaggcaaacgcagccatacccgcgcggtgaaaggcatc

SEQ ID NO: 327674 - DNA, 75 bp, synthetic construct
  source 1..75: mol_type = other DNA
gagccgcgctgacgtaccgcttcggggaagagcaccagccggtgacggaagcgcagatactgacaccccgccgct

SEQ ID NO: 327675 - DNA, 75 bp, synthetic construct
  source 1..75: mol_type = other DNA
gcgcagcaaaccttatccgtcgcgaccgtccgttaacccgtgaagagctgtttcgcgtagtgcccagtgtgttca

SEQ ID NO: 327676 - DNA, 75 bp, synthetic construct
  source 1..75: mol_type = other DNA
ggggcgtatgaggtactggggatttttgaccgggtggaggagaaacgggatgccatgcagtcgttgctgttgcca

SEQ ID NO: 327677 - DNA, 75 bp, synthetic construct
  source 1..75: mol_type = other DNA
caccggtaaacaggtcccggaaatcattctgcttaactcccatgatggcaccagctcttaccagatgttgcctgg

SEQ ID NO: 327678 - DNA, 75 bp, synthetic construct
  source 1..75: mol_type = other DNA
ggtgcttacgaagtggtgggcgtgtttgacctgattgaggaaaagcgtgatgccatgcagtcgctgttgctgccg

SEQ ID NO: 327679 - DNA, 75 bp, synthetic construct
  source 1..75: mol_type = other DNA
gtatccacacccgtgccattcacagcatcgacaccgatattaaggtcggcaccatgaatgacagaaacgctgctg

SEQ ID NO: 327680 - DNA, 75 bp, synthetic construct
  source 1..75: mol_type = other DNA
tcgataagctcgatcgtgaagtggtggcgttaggcaatgactatgcgcagggatttatactgccacaacaccaac

SEQ ID NO: 327681 - DNA, 75 bp, synthetic construct
  source 1..75: mol_type = other DNA
tgaagaccaccagccggtcacggtatcgcagttgctgaccccacgtcgccgggaggactacagcgatgacctgtg

SEQ ID NO: 327682 - DNA, 75 bp, synthetic construct
  source 1..75: mol_type = other DNA
acagataaccggtcagcatgtgcctgaaattattctgctcaactcccatgacggttcatccagctaccagatgtt

SEQ ID NO: 327683 - DNA, 75 bp, synthetic construct
  source 1..75: mol_type = other DNA
gggaagataaacacacgtcccgaagccagaactatacgtacatccccaccatcaccgtactggaaagcctgcagc

SEQ ID NO: 327684 - DNA, 75 bp, synthetic construct
  source 1..75: mol_type = other DNA
aatatgctgaaaggcggaatttccggtcgcagtgccagagggaaacgtatccacacccgtgccattcacagcatc

SEQ ID NO: 327685 - DNA, 75 bp, synthetic construct
  source 1..75: mol_type = other DNA
ttcacagcatcgacaccgatattaagctcaaccgcgcattgtgggtgatggcagaaacgctgctggagagtatgc

SEQ ID NO: 327686 - DNA, 75 bp, synthetic construct
  source 1..75: mol_type = other DNA
cagggcgtgcgcatgctggaacagcatattcgtgacgcaaaaactgaactcgataaagccggaaaatctcgcgtt

SEQ ID NO: 327687 - DNA, 75 bp, synthetic construct
  source 1..75: mol_type = other DNA
atgcaagataaaaatcactttaacttccaaaacccaatggagttggataaggatggacaatttagtcttgcaatc

SEQ ID NO: 327688 - DNA, 75 bp, synthetic construct
  source 1..75: mol_type = other DNA
tgaaaggcggaatttcaggtcgcagtgcaaaaggaaaacgtatccacccccgtgccattcacagcatcgacaccg

SEQ ID NO: 327689 - DNA, 75 bp, synthetic construct
  source 1..75: mol_type = other DNA
gaaaaacatcaataaaaatgtggcaccacttaatatcctgcacagctacctcattattcgcgacaaccgctctgc

SEQ ID NO: 327690 - DNA, 75 bp, synthetic construct
  source 1..75: mol_type = other DNA
cggcacgccaggcgctggcacaggcggcactgacttaccgttatggtgacgaacatcagcccgtcaccaccgccg

SEQ ID NO: 327691 - DNA, 75 bp, synthetic construct
  source 1..75: mol_type = other DNA
cgcccatacccgagcagtgaaaggtattgacggtgatgtgaagctcaaccgggccctctgggtgatggctgagaa

SEQ ID NO: 327692 - DNA, 75 bp, synthetic construct
  source 1..75: mol_type = other DNA
accatcctcgaaagcctgcagtgtgaaggctttgagccgttctttgcctgccagacaaaggtccgtgaccagagc

SEQ ID NO: 327693 - DNA, 75 bp, synthetic construct
  source 1..75: mol_type = other DNA
attcttctcaacagccatgacggttcatcaagctatcagatgctgccggggctgtttcgcggcgtctgtaccaac

SEQ ID NO: 327694 - DNA, 75 bp, synthetic construct
  source 1..75: mol_type = other DNA
attggtaatcattgcgaaaaattagatgcttctattgttagcgggaagtttcttttggaaaaagcaggcataaaa

SEQ ID NO: 327695 - DNA, 75 bp, synthetic construct
  source 1..75: mol_type = other DNA
atagataaatctgagaactgcgattatcctaaactggagaaagttgataacgaacttactatcaaagatgttatt

SEQ ID NO: 327696 - DNA, 75 bp, synthetic construct
  source 1..75: mol_type = other DNA
gtgcggtgaatctcgttcgccgtgaccgtccgttaacccgcgacgaactggcgcattatgtgccgagtgtgttta

SEQ ID NO: 327697 - DNA, 75 bp, synthetic construct
  source 1..75: mol_type = other DNA
aaatgtggtggagaaagttatggaaggggcttacgaggtggtgggtgtgtttgaccggatcgaggataagcgtga

SEQ ID NO: 327698 - DNA, 75 bp, synthetic construct
  source 1..75: mol_type = other DNA
ccagtcgttttggtcatgtaaaccagatacgccgtgaccgtccgctgacacatgaagaactgatgcactatgtac

SEQ ID NO: 327699 - DNA, 75 bp, synthetic construct
  source 1..75: mol_type = other DNA
aacaggcaggccggtgtttgacgtggcgctctctcttggatacgacaatgcctcatcgttcgcgacgatgttccg

SEQ ID NO: 327700 - DNA, 75 bp, synthetic construct
  source 1..75: mol_type = other DNA
atttccggccgcagtgcaaaaggaaaacgtatccacacccgtgccattcacagcatcgacaccgatattaagctc

SEQ ID NO: 327701 - DNA, 75 bp, synthetic construct
  source 1..75: mol_type = other DNA
ccagaactatacgtacatccccaccatcaccgtactggaaagtctgcagcgggaaggcttccagccctttttcgc

SEQ ID NO: 327702 - DNA, 75 bp, synthetic construct
  source 1..75: mol_type = other DNA
tggtaatgagcatcagcccgtcaccaccgctgatattctgacaccgcgacgccgggaggattacggtaaggacct

SEQ ID NO: 327703 - DNA, 75 bp, synthetic construct
  source 1..75: mol_type = other DNA
ctggttccaggtggaagatgatggtcctggtattgaaccagagcagcgtaagcacttattccagccgtttgtccg

SEQ ID NO: 327704 - DNA, 75 bp, synthetic construct
  source 1..75: mol_type = other DNA
gaatatggtagtgaacgccgcccgctacggcaatggctggattaaagtcagcagtggaacggagccgaatcgcgc

SEQ ID NO: 327705 - DNA, 75 bp, synthetic construct
  source 1..75: mol_type = other DNA
gggaggattacggtcaggacctgtggagcgcatatcagaccatccaggagaatatgctgaaaggcggaatttccg

SEQ ID NO: 327706 - DNA, 75 bp, synthetic construct
  source 1..75: mol_type = other DNA
gctggagcttggcaccagcgaacggggcgggctttccattcgcgcctggctgccagtgccggtaacgcgggcgca

SEQ ID NO: 327707 - DNA, 75 bp, synthetic construct
  source 1..75: mol_type = other DNA
gaagttcatttgcccgcacgttattgctcatcgtcaccttgctgtttgtcagcctggtgacgacttatctggtgg

SEQ ID NO: 327708 - DNA, 75 bp, synthetic construct
  source 1..75: mol_type = other DNA
gaccgttggtcgatctcgaacatgctgctttgcaggtcggtaaagggattattccgccgccgctgcgtgaatatg

SEQ ID NO: 327709 - DNA, 75 bp, synthetic construct
  source 1..75: mol_type = other DNA
ttgtgcattgaaacctgcattgcgcgtaactggcgtttgtcgatgcaaacacataaatatttaaatattgcctga

SEQ ID NO: 327710 - DNA, 75 bp, synthetic construct
  source 1..75: mol_type = other DNA
agaacgggtgcgtctgtggccagtctctgggggaagtgcgtgttccacaccggggaaatgtagtggagaaagtta

SEQ ID NO: 327711 - DNA, 75 bp, synthetic construct
  source 1..75: mol_type = other DNA
ccatttgtaccaatggactggtctgcggtcagtctctgggagaattgcgtgttccacaccggggaaatgtggtgg

SEQ ID NO: 327712 - DNA, 75 bp, synthetic construct
  source 1..75: mol_type = other DNA
agaaagttatcgaaggggcttacgaagtggtgggggtttttgaccggattgaggaaaagcgtgatgccatgcagt

SEQ ID NO: 327713 - DNA, 75 bp, synthetic construct
  source 1..75: mol_type = other DNA
aaatgtggtggagaaagttatcgaaggggcttacgaggtggtgggtgtgtttgaccggattgaggaaaagcgtga

SEQ ID NO: 327714 - DNA, 75 bp, synthetic construct
  source 1..75: mol_type = other DNA
aaatgtggtggagaaagttattgaaggggcttacgaggtggtgggtgtgtttgaccggatggaggacaagcgtga

SEQ ID NO: 327715 - DNA, 75 bp, synthetic construct
  source 1..75: mol_type = other DNA
aaatgtggtggagaaagttatagaaggggcttacgaggtggtgggtgtgtttgaccggattgaggacaagcgtga

SEQ ID NO: 327716 - DNA, 75 bp, synthetic construct
  source 1..75: mol_type = other DNA
tcatgcgtggctactggaggaactctcgggtaacagactccgtatcctgacacaggaaacgcagaacggagttcc

SEQ ID NO: 327717 - DNA, 75 bp, synthetic construct
  source 1..75: mol_type = other DNA
ccaaaaggaagatgctactcgtttatgcatcgatacgtgcattgcgcgtaattggcgtttgtcgatgcaaacaca

SEQ ID NO: 327718 - DNA, 75 bp, synthetic construct
  source 1..75: mol_type = other DNA
tcttcgcctgccagacccgtgtgcgcgacccgggccgccggggatacacaaaacatatgctgcgtctgcggcggg

SEQ ID NO: 327719 - DNA, 75 bp, synthetic construct
  source 1..75: mol_type = other DNA
cccgcagtaaacgatatgcgtacattcccaccatcaccgtactggaaagcctgcagcgggaaggctttcagccat

SEQ ID NO: 327720 - DNA, 75 bp, synthetic construct
  source 1..75: mol_type = other DNA
tccttatcattgcacctttcgtcattgcgaaagtggaccagtggcgcaaacgcggcattggagacgcctgggcgt

SEQ ID NO: 327721 - DNA, 75 bp, synthetic construct
  source 1..75: mol_type = other DNA
cttcgacaaactcgccaattctgaaacgccgatttccgacgccctgacctggatccccgcactcggcagcaccgc

SEQ ID NO: 327722 - DNA, 75 bp, synthetic construct
  source 1..75: mol_type = other DNA
tcagccgcgaagaaaagctggaaaaaatagctgattatgcaagcctagcgggagtgacagccaaaaatggctggc

SEQ ID NO: 327723 - DNA, 75 bp, synthetic construct
  source 1..75: mol_type = other DNA
ctttggatcgataaagtcttctcgcacggctgggcttacggtcacggcggcacggcgctgcatggcaaacatttg

SEQ ID NO: 327724 - DNA, 75 bp, synthetic construct
  source 1..75: mol_type = other DNA
ggttgggtagttatgtgggatggctggttcagacttcaggatatggttgagggttatccggtgatgaagtctctt

SEQ ID NO: 327725 - DNA, 75 bp, synthetic construct
  source 1..75: mol_type = other DNA
aacaaataccagacagcttgaacgaatcattgtacaagctcagatttgtggtgctctggcgaccacggctaaagg

SEQ ID NO: 327726 - DNA, 75 bp, synthetic construct
  source 1..75: mol_type = other DNA
cctgctggcggcggcaagtcctctgttatgtgcactggcgcagatgccccgcgaactcgcccctggttttatcga

SEQ ID NO: 327727 - DNA, 75 bp, synthetic construct
  source 1..75: mol_type = other DNA
tgatcccgtcaaaggttaaatcacggcctcagtgtaccgatgacgatgcgctgattatcagcaattgcatggcgc

SEQ ID NO: 327728 - DNA, 75 bp, synthetic construct
  source 1..75: mol_type = other DNA
tcgaaatatacagtgtgctgcgcaatctctgtcggcgtggctacgccactcaagtagggcgaatgactaacccac

SEQ ID NO: 327729 - DNA, 75 bp, synthetic construct
  source 1..75: mol_type = other DNA
acccgttccagtgcataaactgcggctgaaaatcctgctggcgaacgaaatcgcccgtggcctgctgacggtgga

SEQ ID NO: 327730 - DNA, 75 bp, synthetic construct
  source 1..75: mol_type = other DNA
gcatgtgctggcggttcgctattgcttgtgtacggcgctggatgaagccgccaacaatacaagctgggggcgacg

SEQ ID NO: 327731 - DNA, 75 bp, synthetic construct
  source 1..75: mol_type = other DNA
ctgagcgccggaatcgccctgctggtgatgctgacgctgtttggcctttacagccaccggatgaacctcgccacc

SEQ ID NO: 327732 - DNA, 75 bp, synthetic construct
  source 1..75: mol_type = other DNA
actgcgggctgaactggctgccaccgtttgccatgcactgtacctttatttgtgacgacgaaaccctcgaagggc

SEQ ID NO: 327733 - DNA, 75 bp, synthetic construct
  source 1..75: mol_type = other DNA
ggcgagctggttacgccaattactggcggttatgcaatcgtggttcgccgcgatgagaaaataatcccccagcac

SEQ ID NO: 327734 - DNA, 75 bp, synthetic construct
  source 1..75: mol_type = other DNA
tgttgaaaaatatttttctccttcttctccgtctacaccttcccttaatgaattaatcaaattaaaagctaagga

SEQ ID NO: 327735 - DNA, 75 bp, synthetic construct
  source 1..75: mol_type = other DNA
cattcattagacagttattttcagcgcattgcagcccctaaatcagtcgcccaggaacagcgtgaggaattccag

SEQ ID NO: 327736 - DNA, 75 bp, synthetic construct
  source 1..75: mol_type = other DNA
ttttctgcttacagataagttccatttccggcggatcgataccaaggataatgattattctgatgatgacgacaa

SEQ ID NO: 327737 - DNA, 75 bp, synthetic construct
  source 1..75: mol_type = other DNA
ctggttaaagtgattggctcagtcaaaacagtcacgatcaacatcagtgatatcaaaaacggcctgacaacgcgt

SEQ ID NO: 327738 - DNA, 75 bp, synthetic construct
  source 1..75: mol_type = other DNA
gcggttatgcaatcgtggttcgccgcgatgaaaaaataatcccccagcacgtcgtgatgaaagaagcaaatgagc

SEQ ID NO: 327739 - DNA, 75 bp, synthetic construct
  source 1..75: mol_type = other DNA
gttggcgatgatcctttcggtcgctttatgtatcagacactgagtaaagaaaatgttgatacacgttatatgtct

SEQ ID NO: 327740 - DNA, 75 bp, synthetic construct
  source 1..75: mol_type = other DNA
gtgatgcggttgttgatttattacccgaaagccaggggagactactacagtgtcctggtggggcgcctgctaatg

SEQ ID NO: 327741 - DNA, 75 bp, synthetic construct
  source 1..75: mol_type = other DNA
gtggttatcaaggcgtttatcgcggtgcgggtgctgggcctgcggcagggcggtatcagtgaagaaacacaaaat

SEQ ID NO: 327742 - DNA, 75 bp, synthetic construct
  source 1..75: mol_type = other DNA
gttcaggtgatccgctgtggtttcgggatgccggcgttcaacaacgacgaaatcgtcatcccggaatttattaaa

SEQ ID NO: 327743 - DNA, 75 bp, synthetic construct
  source 1..75: mol_type = other DNA
atcagcttgatgcagatattagcaaacttaattcttataaaaatacattgcaaagtaaaattggtgatgtgaata

SEQ ID NO: 327744 - DNA, 75 bp, synthetic construct
  source 1..75: mol_type = other DNA
tgattttaaaaatgcaatagaaactggtaactggcgacctttgtttgtcacgctggagaaaagtgcggtcgatgt

SEQ ID NO: 327745 - DNA, 75 bp, synthetic construct
  source 1..75: mol_type = other DNA
accacctttgcaaaaaagacgttgaagaaagcaaagctattgaaagaatgcttcacttcatgcacgggactttat

SEQ ID NO: 327746 - DNA, 75 bp, synthetic construct
  source 1..75: mol_type = other DNA
acggcgctgccggaacaccatccgctgccgtggagcttcgttctgtcgccggggtttctccccattggcggacgc

SEQ ID NO: 327747 - DNA, 75 bp, synthetic construct
  source 1..75: mol_type = other DNA
gccgcagcgtagccgggaactcaccgggctgccggatgcaccggtagtggaactgcccggtgtgcgccacctgcc

SEQ ID NO: 327748 - DNA, 75 bp, synthetic construct
  source 1..75: mol_type = other DNA
cgctgccgtggagttttgtgctgtcgccgggatttttacccattggcgggcgcgatgagtggctgaccggggtgc

SEQ ID NO: 327749 - DNA, 75 bp, synthetic construct
  source 1..75: mol_type = other DNA
cgaccggggccgcgctgggcacagtggctgcgcggcttgcgacgtgtaccgcagcgcagccgggaactgaccaac

SEQ ID NO: 327750 - DNA, 75 bp, synthetic construct
  source 1..75: mol_type = other DNA
acggtgcagccggaacaccatccattgccgtggagctttgtcctgtcgccgggttttttacccattggtgggcgc

SEQ ID NO: 327751 - DNA, 75 bp, synthetic construct
  source 1..75: mol_type = other DNA
gcagcgcagccgggaactcaccggcctgccggacgcaccggtagtggaactgcccggcgtgcgccacctgccgtg

SEQ ID NO: 327752 - DNA, 75 bp, synthetic construct
  source 1..75: mol_type = other DNA
atgtccgaaacaaaaaacgaacttgaagacctgctggaaaaagcagcaaccgaaccggctcaccgcccggccttt

SEQ ID NO: 327753 - DNA, 75 bp, synthetic construct
  source 1..75: mol_type = other DNA
atggaagtgtaaaaggggctttactggctatttctattcaaagtggaattattggtgttgttctttttatatgtt

SEQ ID NO: 327754 - DNA, 75 bp, synthetic construct
  source 1..75: mol_type = other DNA
tccagcccatgaacgcacaggaatatgaagatatccgtgctgcgggaagcgatatgcgccgtaatctcactcacg

SEQ ID NO: 327755 - DNA, 75 bp, synthetic construct
  source 1..75: mol_type = other DNA
gatgtggcgaccggggccgcgctgggcgcagtggctgcgcggcttgcgacgtgtaccgcagcgcagccgggaact

SEQ ID NO: 327756 - DNA, 75 bp, synthetic construct
  source 1..75: mol_type = other DNA
gatgcacctgtcaccgagcgagaaaacggcggtgccggaacaccatccgctaccgtggagctttgtattatcgcc

SEQ ID NO: 327757 - DNA, 75 bp, synthetic construct
  source 1..75: mol_type = other DNA
gttctgccggaaggaacggatgctgcgaagaccggagtaaatgacggttggatgcacctgtcaccgagcgagaaa

SEQ ID NO: 327758 - DNA, 75 bp, synthetic construct
  source 1..75: mol_type = other DNA
gttccacagcgacagtaataatgccgatgtaagtctttaccaccactcagtttgccgtttaacccaattggtgtg

SEQ ID NO: 327759 - DNA, 75 bp, synthetic construct
  source 1..75: mol_type = other DNA
tccatcgtctaccgcagaactatcgctggtctgctggtttcgcaggttcgaaggttgaaccgattccgcaaaatg

SEQ ID NO: 327760 - DNA, 75 bp, synthetic construct
  source 1..75: mol_type = other DNA
aacgcgccgtgattctggtagccgcctggcttggcgacgctcgcctgatcgacaataaaatagtcgaactggcgt

SEQ ID NO: 327761 - DNA, 75 bp, synthetic construct
  source 1..75: mol_type = other DNA
tgctgcgtcagcaaattcgccgcctgcgtatggaaggcaagcgcgtggcgctggtgcctactatgggtaacctgc

SEQ ID NO: 327762 - DNA, 75 bp, synthetic construct
  source 1..75: mol_type = other DNA
gggactgtagatcgttgactcgtgaatctgaagttatgaagggattcagagtatcaggtatgccggagcgtgatg

SEQ ID NO: 327763 - DNA, 75 bp, synthetic construct
  source 1..75: mol_type = other DNA
tcgaaactcagtaagaatgtgcattatcttgataaaaacagtaacaggacattattcgttgatacaggaaatgcc

SEQ ID NO: 327764 - DNA, 75 bp, synthetic construct
  source 1..75: mol_type = other DNA
atcagaagtatggagaaagatatgacgtattccctgccgaacggaaaacaaatcataagtccggtattaatgaag

SEQ ID NO: 327765 - DNA, 75 bp, synthetic construct
  source 1..75: mol_type = other DNA
ttgacggcaaggattccaccggcacggaaatcaacggcaataacggaaaggtgattcaggacggcgatctggatg

SEQ ID NO: 327766 - DNA, 75 bp, synthetic construct
  source 1..75: mol_type = other DNA
aaacccattcttgagcgtataaaacaggagcttgccgacgccccgatgacgctcgtaacagacgtcggcaaacag

SEQ ID NO: 327767 - DNA, 75 bp, synthetic construct
  source 1..75: mol_type = other DNA
tatgcccgcctgttccactggtattgacccgggcgaatgcattccggggaaagtggcagtatttacgggtaaggg

SEQ ID NO: 327768 - DNA, 75 bp, synthetic construct
  source 1..75: mol_type = other DNA
agcgcaaagtggatctggttttcgcgccctcggtaaaagagatctacccgaacggtactgaaacccatacttacg

SEQ ID NO: 327769 - DNA, 75 bp, synthetic construct
  source 1..75: mol_type = other DNA
acgatggccatatgaagctggtcgatgaagccaaagcccgcgccgatgtggtcgtcgtcagtattttcgttaacc

SEQ ID NO: 327770 - DNA, 75 bp, synthetic construct
  source 1..75: mol_type = other DNA
gatcgcgggtaataacgcggtggtgaatcaggacggtacactggatgtcagcggcggcggtcacggtattgatat

SEQ ID NO: 327771 - DNA, 75 bp, synthetic construct
  source 1..75: mol_type = other DNA
acgcttctggttcagggggcccgttcggttttgattggtgcagagaaaaggactgactcattcagccgttgggtt

SEQ ID NO: 327772 - DNA, 75 bp, synthetic construct
  source 1..75: mol_type = other DNA
gaaagtcgaagctcggcaggataacaaaagccggggattcgtatttgcgaacgcttctggtacagggggctcgtt

SEQ ID NO: 327773 - DNA, 75 bp, synthetic construct
  source 1..75: mol_type = other DNA
gaaagtcgaagcttggcgggataacgaaagctggcgattcttatctgagaacacttctggttcagggtgcccgct

SEQ ID NO: 327774 - DNA, 75 bp, synthetic construct
  source 1..75: mol_type = other DNA
aacagcggcaagaagacttctcgatgtttgctatgcacgtagcgatgcatgggaaaaagagaacggcggcactat

SEQ ID NO: 327775 - DNA, 75 bp, synthetic construct
  source 1..75: mol_type = other DNA
atgctctgcgtcatgttgtttctgaccagaaggaaactctgccagtacaggttaggctgtgcattgatgatctat

SEQ ID NO: 327776 - DNA, 75 bp, synthetic construct
  source 1..75: mol_type = other DNA
gtatggccatgatgtccggttgatggctccgaaatttgtctcaccctatcgcatggcgggtaagaccgggaaaaa

SEQ ID NO: 327777 - DNA, 75 bp, synthetic construct
  source 1..75: mol_type = other DNA
tacggcaatggctggatcaaagtcagcagcggaacggagccgaatcgcgcctggttccaggtagaagatgacggt

SEQ ID NO: 327778 - DNA, 75 bp, synthetic construct
  source 1..75: mol_type = other DNA
tctgcgaggattgatatctgaattcggtgtcatcgcgccacaaagtgctgatgccctgcgccacatggtttctgt

SEQ ID NO: 327779 - DNA, 75 bp, synthetic construct
  source 1..75: mol_type = other DNA
actggcgtgccgttgtagccatcgccgccaaaaacgcaaggctgtgctgggcatcattgcattacggtgatgatt

SEQ ID NO: 327780 - DNA, 75 bp, synthetic construct
  source 1..75: mol_type = other DNA
cctggcaatattactgcactggttatctatctgctttcctgctggcgggcgtacaagtttcgcaaaatgttgtgt

SEQ ID NO: 327781 - DNA, 75 bp, synthetic construct
  source 1..75: mol_type = other DNA
cacagcaagtctggtgaatgaactggcaacaaaaatgccaacagaacacatttatctcgggcagtcttccgggag

SEQ ID NO: 327782 - DNA, 75 bp, synthetic construct
  source 1..75: mol_type = other DNA
ttccgtcgggagatctaccgtgagctggggatctctctctattccaacgaagctgccgaagaggcaggtctgcgt

SEQ ID NO: 327783 - DNA, 75 bp, synthetic construct
  source 1..75: mol_type = other DNA
gttagggcaaatctccttcttcccgcgcctcctggcttatgggatctcatcgcctaaagagttcaataacgagcg

SEQ ID NO: 327784 - DNA, 75 bp, synthetic construct
  source 1..75: mol_type = other DNA
accaaccgttgaaatttgagaaaaaagattacggttcattttatctttccggaagtttgaaccgccccgggaatc

SEQ ID NO: 327785 - DNA, 75 bp, synthetic construct
  source 1..75: mol_type = other DNA
atgacacaacaaggggatgctgtagccggggagctggcgacagaaaaagtgggcattaaagggtatctggctttt

SEQ ID NO: 327786 - DNA, 75 bp, synthetic construct
  source 1..75: mol_type = other DNA
gggagggttacggtcaggacctgtggagcgcatatcagaccatccaggagaatatgctgaaaggcgggatttccg

SEQ ID NO: 327787 - DNA, 75 bp, synthetic construct
  source 1..75: mol_type = other DNA
ccagaaggaagatgctacgcgtttatgtatcgatacctgcattgcgcgcaactggcgtttgtcgatgcagacaca

SEQ ID NO: 327788 - DNA, 75 bp, synthetic construct
  source 1..75: mol_type = other DNA
gctgacattctgacaccacgacgtcgggaggattacgggcaggacctgtggagtgcttatcagaccatccaagag

SEQ ID NO: 327789 - DNA, 75 bp, synthetic construct
  source 1..75: mol_type = other DNA
cagccagttaacgtcagccaccgggcctgacgggctggaaatacgccgggaatacgatgaatggggtaaccagct

SEQ ID NO: 327790 - DNA, 75 bp, synthetic construct
  source 1..75: mol_type = other DNA
atgactgcaaactctcccctacaacgtattggacaagaaaaaggtatcgctatgggaagccaggaactccaacgc

SEQ ID NO: 327791 - DNA, 75 bp, synthetic construct
  source 1..75: mol_type = other DNA
caccttcggctccatcatctggtgtcgtaaacgcgacgattacaaaccgctgtggcgtactccggctttcgggct

SEQ ID NO: 327792 - DNA, 75 bp, synthetic construct
  source 1..75: mol_type = other DNA
atcttgctaaaaatgtgttcgctgttcactgcgttgaccaacacggtaaaactgttctggttaaacccaaagtac

SEQ ID NO: 327793 - DNA, 75 bp, synthetic construct
  source 1..75: mol_type = other DNA
aatgcagaacgaactggcgctgcacagtaagaaagagatcgatgactatttcgcgcatgtctggcagaccatgca

SEQ ID NO: 327794 - DNA, 75 bp, synthetic construct
  source 1..75: mol_type = other DNA
gcggctggcggacgcgtagttactgcaccaacaaacggcgcctgtggcatcgttccggctgtgctggcgtattac

SEQ ID NO: 327795 - DNA, 75 bp, synthetic construct
  source 1..75: mol_type = other DNA
cggggcaggattgggcgacgctgggtacgtccgcctggttttctctgggggggggttgtgttagccatttacctt

SEQ ID NO: 327796 - DNA, 75 bp, synthetic construct
  source 1..75: mol_type = other DNA
tggaacacgttgatcgcattgaagctaacatcactgaatatgaccgaattttgtcccgcatagccaaaacagatc

SEQ ID NO: 327797 - DNA, 75 bp, synthetic construct
  source 1..75: mol_type = other DNA
gaaggcgaatatactgcttgcagaacagcaacactaaatcattctgctaatgccaccccgtactgccttgcagga

SEQ ID NO: 327798 - DNA, 75 bp, synthetic construct
  source 1..75: mol_type = other DNA
gctatcttcttataataacacaactggttatgttgataggtattatgccagttcgagcggaaaaccccattgctc

SEQ ID NO: 327799 - DNA, 75 bp, synthetic construct
  source 1..75: mol_type = other DNA
acaccaatggcaagcagcaaatcgccaaaacggtttctgtagatgcgggtgatatcgcggcgtttaacgatctga

SEQ ID NO: 327800 - DNA, 75 bp, synthetic construct
  source 1..75: mol_type = other DNA
ctgtagtagtcataacatccctactaagtggaaccggcgtattccttctcggagtcagagacgggcgcatttctg

SEQ ID NO: 327801 - DNA, 75 bp, synthetic construct
  source 1..75: mol_type = other DNA
ggtgaatgccctggtggatattaaggcaaaagcgggctggctgattgtggtcagtggtcacacggacaatacggg

SEQ ID NO: 327802 - DNA, 75 bp, synthetic construct
  source 1..75: mol_type = other DNA
gttgaaatcagtctggtaccgcaggccgatgcctgtcgtctgccggacgcttcccctgcgccggaagagggcgca

SEQ ID NO: 327803 - DNA, 75 bp, synthetic construct
  source 1..75: mol_type = other DNA
atgtctagcaacggcaggcatttcgggcggctggagaatggctttctacgggttcgctgcgagtcttgccacgcc

SEQ ID NO: 327804 - DNA, 75 bp, synthetic construct
  source 1..75: mol_type = other DNA
caggcggggcgaaaggtgttcactttgcaaactctgccgaccagtggtgatccgttcggtgacgggattggcaag

SEQ ID NO: 327805 - DNA, 75 bp, synthetic construct
  source 1..75: mol_type = other DNA
gggacggatctactccaattcagcaaagtagtaaacctgatgtgtgatcttctttcgtacaaagaagaacagcca

SEQ ID NO: 327806 - DNA, 75 bp, synthetic construct
  source 1..75: mol_type = other DNA
atgccaaatattgttttaagccggattgatgaacgcttgattcacggtcaggtcggcgttcagtgggtcggattt

SEQ ID NO: 327807 - DNA, 75 bp, synthetic construct
  source 1..75: mol_type = other DNA
cgctgcgagtcttgccacgccgagcacctggtcgctttcagctgtaagcgtcgcggtttctgcccgagctgtggg

SEQ ID NO: 327808 - DNA, 75 bp, synthetic construct
  source 1..75: mol_type = other DNA
gtttgccatgcactgcacctttatttgtgacgacgaaaccctcgaagggcaggcgcgtcactataagcaacgtct

SEQ ID NO: 327809 - DNA, 75 bp, synthetic construct
  source 1..75: mol_type = other DNA
aagtgggccgttgatgatggtaagttgctgaaatcgccatgcgaaaatttttttccgtctgatgataaagacaag

SEQ ID NO: 327810 - DNA, 75 bp, synthetic construct
  source 1..75: mol_type = other DNA
gaaaagggaggttgtgaagcaggacagcttatttccggtaatgttaaacgcagcctctgattcgttaatttcata

SEQ ID NO: 327811 - DNA, 75 bp, synthetic construct
  source 1..75: mol_type = other DNA
ccgttttctctggggagtggttgacagtccggtttatgatatcagacatcttactgagcgatgttcagtaaacga

SEQ ID NO: 327812 - DNA, 75 bp, synthetic construct
  source 1..75: mol_type = other DNA
cgggagataaagagtatgcagaggttctcgttgctattacagaactcgctaatactctgcgaagagatttaatgg

SEQ ID NO: 327813 - DNA, 75 bp, synthetic construct
  source 1..75: mol_type = other DNA
tgatgcagctgatgctcaggctatctgcgaagcggttcgtcgcccacatatgcggtttgttccagttaaggacga

SEQ ID NO: 327814 - DNA, 75 bp, synthetic construct
  source 1..75: mol_type = other DNA
ttttaaagaatcagaaaataaatttatcaatcatgcttggcaaacactgataagaactctacttaataactcaag

SEQ ID NO: 327815 - DNA, 75 bp, synthetic construct
  source 1..75: mol_type = other DNA
tcataaggcatcataagcagatgttggcattgcatctttcactattaatattcgttctatttattgcttacattt

SEQ ID NO: 327816 - DNA, 75 bp, synthetic construct
  source 1..75: mol_type = other DNA
tggctttgtggtctggtttacatttaattttagtgcactggaagaactattttatcgtagaaacagaaaaggaga

SEQ ID NO: 327817 - DNA, 75 bp, synthetic construct
  source 1..75: mol_type = other DNA
cagtttgttggggcgaagttattccggtggtgctgctggccgcggcgcgggtggcggaggcggtggtggctggta

SEQ ID NO: 327818 - DNA, 75 bp, synthetic construct
  source 1..75: mol_type = other DNA
gatcgcgatttcctccgggcttatgagagcaaactgcgcacgatcccagcaaaccgtaatttagtcaaagctaaa

SEQ ID NO: 327819 - DNA, 75 bp, synthetic construct
  source 1..75: mol_type = other DNA
ggcaattgaagctctgaaaaaccagaaaattggctcgctggggatggacgtgtatgaaaacgaacgcgatctgtt

SEQ ID NO: 327820 - DNA, 75 bp, synthetic construct
  source 1..75: mol_type = other DNA
tatccaagtgcggcggcgctggagctcggcgtagaatatgtcgatttgccgacgctgttcgctgaatctgacgtt

SEQ ID NO: 327821 - DNA, 75 bp, synthetic construct
  source 1..75: mol_type = other DNA
gcagaagcgctgaccagtatttcccaaactaccctgcaaaacttaagcaatctggaaaaaggcgaaacctgcccg

SEQ ID NO: 327822 - DNA, 75 bp, synthetic construct
  source 1..75: mol_type = other DNA
ctgagtgcggtgcgccgattgttccagtatctttatcgcgaaaagtttcgtgaagacgatcccagtgcgcatctt

SEQ ID NO: 327823 - DNA, 75 bp, synthetic construct
  source 1..75: mol_type = other DNA
gtgaaacaggatctggcacgcatcgagcagtttcttgatgctctgtggctggaaaaaaatctggctgaaaatacg

SEQ ID NO: 327824 - DNA, 75 bp, synthetic construct
  source 1..75: mol_type = other DNA
atgaagtcattattgctgtaggcccggcatttggcctggcgcagaccgtcaatattatcggcattccgcataaaa

SEQ ID NO: 327825 - DNA, 75 bp, synthetic construct
  source 1..75: mol_type = other DNA
ttgctgattttaaaaaggctaccactccggctgaacgtttgatcatgctggcacctggtaaacgtcaacccataa

SEQ ID NO: 327826 - DNA, 75 bp, synthetic construct
  source 1..75: mol_type = other DNA
tccggctgaacgtctgatcatgctggcaccaggcaaacgtcagcccataaaaccagaccagattcgctggttacc

SEQ ID NO: 327827 - DNA, 75 bp, synthetic construct
  source 1..75: mol_type = other DNA
ggagaaaaatctggcagaaaatacgttgaacgcatatcgtcgcgatctgtcaatgatggtggagtggttgcatca

SEQ ID NO: 327828 - DNA, 75 bp, synthetic construct
  source 1..75: mol_type = other DNA
ctgaaaaggcgctggaaacagtacaacaatatgtcgagttactggcgttgtaccaacgggaaaaagcactcaata

SEQ ID NO: 327829 - DNA, 75 bp, synthetic construct
  source 1..75: mol_type = other DNA
atggcccgtcagttgagtgaggccagcgcgtgggaactctttaccgcccaaaatctgaacaatacggatagcaca

SEQ ID NO: 327830 - DNA, 75 bp, synthetic construct
  source 1..75: mol_type = other DNA
tgtggatggcgtttgccctgatggcattgctgactctggtgagtatctttgtaggttggtataacctgcgcgttt

SEQ ID NO: 327831 - DNA, 75 bp, synthetic construct
  source 1..75: mol_type = other DNA
tatcgaagaagaaggcattaaagcccgtgtgattcgctgctttaaatcgtccgatgtcgcattcgtagcagtcga

SEQ ID NO: 327832 - DNA, 75 bp, synthetic construct
  source 1..75: mol_type = other DNA
atcggtgaagcgaagcaaggaacgcagcaggatgaagttgtcatcgccgtaggaccggcattcggcctgtcacaa

SEQ ID NO: 327833 - DNA, 75 bp, synthetic construct
  source 1..75: mol_type = other DNA
atgccaggagcggtggaacgccgcttcggcaacgatcttccgtcgtctccagtggagtggctgacggataatggt

SEQ ID NO: 327834 - DNA, 75 bp, synthetic construct
  source 1..75: mol_type = other DNA
cacgcgccgcgactggtccagaatgccggtgaattatgtctggattggtgacggtcacggcatgaagctgaaatg

SEQ ID NO: 327835 - DNA, 75 bp, synthetic construct
  source 1..75: mol_type = other DNA
cactatatggaaagctaaccaaatctttgtttagatctttggaatctgcgacaacgttctgtaaattacgcgcta

SEQ ID NO: 327836 - DNA, 75 bp, synthetic construct
  source 1..75: mol_type = other DNA
cggcgctggcgcgtggcaccctgcgcaccatcggcgcaaccacctggagcgagtacaaacgccatatcgaaaagg

SEQ ID NO: 327837 - DNA, 75 bp, synthetic construct
  source 1..75: mol_type = other DNA
gcgggtttaggtgacccgcgaaaaccagtgggtgtctttctgctggccgggccgtccggtgtgggtaagaccgaa

SEQ ID NO: 327838 - DNA, 75 bp, synthetic construct
  source 1..75: mol_type = other DNA
gtgatcgacggtggaacccggtttgtggttggctggagtcttgatcttgcggagaacgtgttcgctgttgccggg

SEQ ID NO: 327839 - DNA, 75 bp, synthetic construct
  source 1..75: mol_type = other DNA
attgattgtctgcctgaaataacacgaaaggcactgcgtgaacgctatgtggaacagctggtggctacagagaac

SEQ ID NO: 327840 - DNA, 75 bp, synthetic construct
  source 1..75: mol_type = other DNA
ccgggggaagctagccaggtctttgccggcgaatcaaccggaagcaaatccgcgctggcgaaatactgccaggac

SEQ ID NO: 327841 - DNA, 75 bp, synthetic construct
  source 1..75: mol_type = other DNA
cgaagcatatcgcggttcgccacaactgatggaagaacgcctgaacgcgctgaccgaaaatcagcgtcgggtatc

SEQ ID NO: 327842 - DNA, 75 bp, synthetic construct
  source 1..75: mol_type = other DNA
ctgagtgatcttgagctgcgcgacatgttccgcccgatggtggaacgcccggtaagacggtgcgaaattcagtgg

SEQ ID NO: 327843 - DNA, 75 bp, synthetic construct
  source 1..75: mol_type = other DNA
aacaacccggctttagttgcgctaaggctatccggttcctcgttaacagcctggcacgatcacaactggacgagc

SEQ ID NO: 327844 - DNA, 75 bp, synthetic construct
  source 1..75: mol_type = other DNA
cacgaaacaggggcacgcttgctgattggttatatcgagcagcatattctgccgcaactgtcccgttactggttg

SEQ ID NO: 327845 - DNA, 75 bp, synthetic construct
  source 1..75: mol_type = other DNA
cactatatggaaagctgaccaaatctttatttagatctttggaatccgcgacaacgttctgtaaattacgtgcta

SEQ ID NO: 327846 - DNA, 75 bp, synthetic construct
  source 1..75: mol_type = other DNA
acttaaccgtgatctgcgttcagcgtttaacgccctgcaacaggacaagcctctgaacgaccgccagaaagctgc

SEQ ID NO: 327847 - DNA, 75 bp, synthetic construct
  source 1..75: mol_type = other DNA
gacggataatggttcatgctaccgggccaatgaaacacgacagttggccgggatgttgggccttgaaccgaagaa

SEQ ID NO: 327848 - DNA, 75 bp, synthetic construct
  source 1..75: mol_type = other DNA
aatctgctgaataacccgtatatccaccaggttatctgcgtgaatgacggctccacggataacacgccggcggtg

SEQ ID NO: 327849 - DNA, 75 bp, synthetic construct
  source 1..75: mol_type = other DNA
ggagcagtttggtctgaaaacatcaatgtcgcgtaaaggtaactgttacgacaacgctccgatggaaagcttctg

SEQ ID NO: 327850 - DNA, 75 bp, synthetic construct
  source 1..75: mol_type = other DNA
gaggccatctcagtaatacgggaatacattgagaatttctacaatcgtcagcgtcgtcactctcgtctggggaat

SEQ ID NO: 327851 - DNA, 75 bp, synthetic construct
  source 1..75: mol_type = other DNA
cgatgattgctatgaagcgtacgctacagcagttcctgggtggtgcaccgtttattatcagcggtgcctgcggga

SEQ ID NO: 327852 - DNA, 75 bp, synthetic construct
  source 1..75: mol_type = other DNA
cagtgatggaatgggctatatgctggcagaaattgagcgcggcgctgatgccgttggcggaattccctccaccgc

SEQ ID NO: 327853 - DNA, 75 bp, synthetic construct
  source 1..75: mol_type = other DNA
tagccgtttcggcatcttcagtatcttccctatgctgttggtcgtgatctatggcgttgggatttatctaaccac

SEQ ID NO: 327854 - DNA, 75 bp, synthetic construct
  source 1..75: mol_type = other DNA
cgcgtctttctggtatcaacgtcaataaaatcaaaatcatcgtctattctctttgtggtctgctggcatcgctgg

SEQ ID NO: 327855 - DNA, 75 bp, synthetic construct
  source 1..75: mol_type = other DNA
catcaataacttattcaatattctccagcaaacctcggtgaacgccattatggcggtcgggatgacgctggtgat

SEQ ID NO: 327856 - DNA, 75 bp, synthetic construct
  source 1..75: mol_type = other DNA
gcagtttttccgccgacgctgagggtaaatgggataacaactggggcacctgtacgttgcaggactgtagcggca

SEQ ID NO: 327857 - DNA, 75 bp, synthetic construct
  source 1..75: mol_type = other DNA
gcatacgattaccgggtcatacaggagcagtttggtctgaaaacatcaatgtcgcgtaaaggtaactgttacgac

SEQ ID NO: 327858 - DNA, 75 bp, synthetic construct
  source 1..75: mol_type = other DNA
cgaggttcacagtactgcgcatacgattaccgggtcatacaggagcagtttggtctgaaaacatcaatgtcgcgt

SEQ ID NO: 327859 - DNA, 75 bp, synthetic construct
  source 1..75: mol_type = other DNA
gcgctgtggctgcatctatcgtcggcattgaagtcaacgcgctggtggctgttgctgcggcgttggcattagggg

SEQ ID NO: 327860 - DNA, 75 bp, synthetic construct
  source 1..75: mol_type = other DNA
taagatggcccttatcccggttaaaaacgtggcaacagagcgcgaagccctgctgcgcaagccggaatggatgaa

SEQ ID NO: 327861 - DNA, 75 bp, synthetic construct
  source 1..75: mol_type = other DNA
agaaatagtattggatacaatcgttctaatggaacatcatttaatacaggtgtgtctgcaactgctacagaccga

SEQ ID NO: 327862 - DNA, 75 bp, synthetic construct
  source 1..75: mol_type = other DNA
tattgctgatgagtctactgactgagcctaaagctattctggttaatacggggaatggaaaagagtgcagctttt

SEQ ID NO: 327863 - DNA, 75 bp, synthetic construct
  source 1..75: mol_type = other DNA
tgcgcctgcataaaagacttttatttagccgcttcggtatcttcagtatatttcctatgctgttggttgtgcttt

SEQ ID NO: 327864 - DNA, 75 bp, synthetic construct
  source 1..75: mol_type = other DNA
gacggataatggttcatgctaccgggccaatgaaacacgacagttggccaggatgttgggccttgaaccgaagag

SEQ ID NO: 327865 - DNA, 75 bp, synthetic construct
  source 1..75: mol_type = other DNA
gacggataatggttcatgctaccgggcaaatgaaacacgacagttggcccggatgttgggccttgaaccgaagac

SEQ ID NO: 327866 - DNA, 75 bp, synthetic construct
  source 1..75: mol_type = other DNA
gatgattgttatgaagcgcacgctacagcagctcgtgggcggcgcaccgtttattatcagcggtgcctgcgggat

SEQ ID NO: 327867 - DNA, 75 bp, synthetic construct
  source 1..75: mol_type = other DNA
ggaatggcgtcgctggcggcgttggattgtgggctacgcggtctgtatgcgcctgcataaaagacttttatttag

SEQ ID NO: 327868 - DNA, 75 bp, synthetic construct
  source 1..75: mol_type = other DNA
ggcgatgggctttacccatgctgcatgtggcccgtttgtccgttcttcctaccacgccgatttgcaggcgaaagg

SEQ ID NO: 327869 - DNA, 75 bp, synthetic construct
  source 1..75: mol_type = other DNA
cggtggaacgccgcttcggcaacgagcttccggcgtctccagtagagtggctgacggataatggttcatgctacc

SEQ ID NO: 327870 - DNA, 75 bp, synthetic construct
  source 1..75: mol_type = other DNA
gcgaactttgcgccgcaggaccgttatgcccgttataaccagaagtcacgatatgaaatgcaggtgacacagcgt

SEQ ID NO: 327871 - DNA, 75 bp, synthetic construct
  source 1..75: mol_type = other DNA
ataacggagaaaaactgcgagtcacgttcgcgctggactgctgtgaccgtgaggcactgcactgggcggtcacta

SEQ ID NO: 327872 - DNA, 75 bp, synthetic construct
  source 1..75: mol_type = other DNA
tggtaaagcgatagtcaaacttacttcgactattccgggtcaggtggttatatcggctaaaacagctgaaatggc

SEQ ID NO: 327873 - DNA, 75 bp, synthetic construct
  source 1..75: mol_type = other DNA
gattttgggaccctgaataagactgaagcaacaaccgatcagaatggttatgctactgtaaaattatcatccaat

SEQ ID NO: 327874 - DNA, 75 bp, synthetic construct
  source 1..75: mol_type = other DNA
atcaatttgacaaaccgtggtctcagcaaattgagccgcagtatgttaacgaattaagaacattatcaggcagcc

SEQ ID NO: 327875 - DNA, 75 bp, synthetic construct
  source 1..75: mol_type = other DNA
acagcttactattaccgttctgtcgaatggtcaggtggtcgaccaggttggggtaacggactttacggcggataa

SEQ ID NO: 327876 - DNA, 75 bp, synthetic construct
  source 1..75: mol_type = other DNA
caggatattctttctttgagtattccacatgatattaatggtactgaacacagtacgcagaagattcaattgagc

SEQ ID NO: 327877 - DNA, 75 bp, synthetic construct
  source 1..75: mol_type = other DNA
tgcttggattaaacagacatctagtgagcagagttctggagtatcaagcacttataacctaataacacaaaaccc

SEQ ID NO: 327878 - DNA, 75 bp, synthetic construct
  source 1..75: mol_type = other DNA
tgtataataaatggggcgccgccaatagttatgaaggctataaaggtaaaaaaacaataacagcatggacacagc

SEQ ID NO: 327879 - DNA, 75 bp, synthetic construct
  source 1..75: mol_type = other DNA
atttgacatagttactaaaaatgaaatccctagtaatggaagtaataataaggtcaatgtgacagcagctaatgc

SEQ ID NO: 327880 - DNA, 75 bp, synthetic construct
  source 1..75: mol_type = other DNA
caagatccaaaagttgcatcagttgatgctttaactggtcgagttactttgctgaagaaaggaacaacaaaaatt

SEQ ID NO: 327881 - DNA, 75 bp, synthetic construct
  source 1..75: mol_type = other DNA
tgagaaaattataactgtagaaacacaaaataaagtaatctatagcgttgctgaagcaacatgcagcacgaatag

SEQ ID NO: 327882 - DNA, 75 bp, synthetic construct
  source 1..75: mol_type = other DNA
caattgatgacggtaatattgaaattgttggaaccggagttaaagggaagttacccactgtatggttgcaatatg

SEQ ID NO: 327883 - DNA, 75 bp, synthetic construct
  source 1..75: mol_type = other DNA
agctaaggggaaactacctaatgtatggttgcaatatggccaagttaatctgaaagctagcggaggtaacgggaa

SEQ ID NO: 327884 - DNA, 75 bp, synthetic construct
  source 1..75: mol_type = other DNA
ttcagcacttaatgccagtgcggttatatttgttgatcaaaccaaggccagcattactgagattaaggctgataa

SEQ ID NO: 327885 - DNA, 75 bp, synthetic construct
  source 1..75: mol_type = other DNA
gtccttccccgggtgctgtccggtcatcccgtggaccgtaccattcaggtcagcggtgatgcctccggtcgctac

SEQ ID NO: 327886 - DNA, 75 bp, synthetic construct
  source 1..75: mol_type = other DNA
acgatacacccagactatgtggacaatcggccatctcgccgtgatttcttcaaaatttgtcgccaggcccatgag

SEQ ID NO: 327887 - DNA, 75 bp, synthetic construct
  source 1..75: mol_type = other DNA
gctgattcagtgttaccgcaggcgcggatacgaggttaagaaagccatcagcctcgattatcgtcactggataat

SEQ ID NO: 327888 - DNA, 75 bp, synthetic construct
  source 1..75: mol_type = other DNA
cagggaacaatgtcttcccgcaacaagctagatttatgtccagcaccgcttgataatgacaatcgtataagactc

SEQ ID NO: 327889 - DNA, 75 bp, synthetic construct
  source 1..75: mol_type = other DNA
atgagaacattggacatcacctacggcataccggctgaagtatggccgcgaaactacgaacatgctgaacgcacc

SEQ ID NO: 327890 - DNA, 75 bp, synthetic construct
  source 1..75: mol_type = other DNA
acttctgcatcggcaccatgcacaccaaatcacccggtgaaacctttgcccgcctgctgggattatttcctccgg

SEQ ID NO: 327891 - DNA, 75 bp, synthetic construct
  source 1..75: mol_type = other DNA
atatacatggcgctcagcaaatacagcgattgcttcggtggatgcctcttctggtcaggtcaccttaaaagataa

SEQ ID NO: 327892 - DNA, 75 bp, synthetic construct
  source 1..75: mol_type = other DNA
gtattactgagattaatgctgataaaaaaacagcgaaggcaaatggatctgatgcgattacctatactgttaaag

SEQ ID NO: 327893 - DNA, 75 bp, synthetic construct
  source 1..75: mol_type = other DNA
ctgacttccagttccgcaggtaaagcgactgttagtgcgactgttagtggtgggaatgatgttaaagcacctgag

SEQ ID NO: 327894 - DNA, 75 bp, synthetic construct
  source 1..75: mol_type = other DNA
cacggatacgaggttaagaaagccatcagcctcgattatcgtcactggataatctctgtcaggctcccttattcc

SEQ ID NO: 327895 - DNA, 75 bp, synthetic construct
  source 1..75: mol_type = other DNA
gtggtgcattacaaaaaaattaacaattctgataattcagccgtctttgccagctggcacgggcggcgttctcac

SEQ ID NO: 327896 - DNA, 75 bp, synthetic construct
  source 1..75: mol_type = other DNA
ccctcgattatcgtcactggataatctacgtcaggcttccttactccgaacgcccaccgcgtccgtcccgcacat

SEQ ID NO: 327897 - DNA, 75 bp, synthetic construct
  source 1..75: mol_type = other DNA
ccctcagcctcgattatcgtcactggataatctacgtcaggctcccttattccgaacgcccaccgcgtccgtccc

SEQ ID NO: 327898 - DNA, 75 bp, synthetic construct
  source 1..75: mol_type = other DNA
gaaccgatgactggaaagatggtcgccgcagccgtcactcagatgatacggatgtgcttctccgtatacaccatg

SEQ ID NO: 327899 - DNA, 75 bp, synthetic construct
  source 1..75: mol_type = other DNA
agacgtgggtacgagtttcagaaagacctcagccttgacttccgacactggataatttcagtcaggctcccttat

SEQ ID NO: 327900 - DNA, 75 bp, synthetic construct
  source 1..75: mol_type = other DNA
aggcgcggatacgaggttaagaaagcccttagtctcgactaccgtcactggataatctcagtcaggcttccttac

SEQ ID NO: 327901 - DNA, 75 bp, synthetic construct
  source 1..75: mol_type = other DNA
ggatgttgggacttgaaccgaagagcacggcggtgcggagtccggagagtaacggcatagcagagagcttcgtga

SEQ ID NO: 327902 - DNA, 75 bp, synthetic construct
  source 1..75: mol_type = other DNA
ggatgttgggacttgaaccgaagaccacggcggtgcggagtccggagagtaacgggatagcagagagcttcgtga

SEQ ID NO: 327903 - DNA, 75 bp, synthetic construct
  source 1..75: mol_type = other DNA
tactcctggattgtacagcctgttgcgaacgaaaaaacgctccactcgctggcgcatggggcagggcgtaaatgg

SEQ ID NO: 327904 - DNA, 75 bp, synthetic construct
  source 1..75: mol_type = other DNA
agtccaggcaatcgaagcatatcgcggttctccacaactgatggaagaacgcctgaacgcgttgaccgaaaacca

SEQ ID NO: 327905 - DNA, 75 bp, synthetic construct
  source 1..75: mol_type = other DNA
cgtccattttcaccggaagtcacgtttgttatcgacggtggaacccggtttgttgttggctggagtcttgttctt

SEQ ID NO: 327906 - DNA, 75 bp, synthetic construct
  source 1..75: mol_type = other DNA
gtattaaaggaatgcgcaagcgtgctgaggaaaaaatacgtgatgctgaggatgaaggtattcaggttattgaac

SEQ ID NO: 327907 - DNA, 75 bp, synthetic construct
  source 1..75: mol_type = other DNA
atgataagtgacaggaaagctgaagagctggagtcaaaaaggctatgccggagagctgccacacgatgggcagaa

SEQ ID NO: 327908 - DNA, 75 bp, synthetic construct
  source 1..75: mol_type = other DNA
atgataagggacaggaaagctgaagagctggagttaaaagggctatgccggagagctgccacacgatgggcagaa

SEQ ID NO: 327909 - DNA, 75 bp, synthetic construct
  source 1..75: mol_type = other DNA
tcggctcttggtatggatgaggaagcgagagggtacttcaggcgttatcgtgataaagattgccagagacagtaa

SEQ ID NO: 327910 - DNA, 75 bp, synthetic construct
  source 1..75: mol_type = other DNA
ggatgttgggtcttgaaccgaagatcacggcggtgcggagtccggagagtaacggaatagcagagagcttcgtga

SEQ ID NO: 327911 - DNA, 75 bp, synthetic construct
  source 1..75: mol_type = other DNA
actgatgacgcaaaaagccgatgaatcaccggctccggtggtgacaaaggccagacgctcacctgccgtggttga

SEQ ID NO: 327912 - DNA, 75 bp, synthetic construct
  source 1..75: mol_type = other DNA
tgtttacctgaagtgacgcagcaggcattacgtgaacgttatgccctgcaactgatgacgcaaaaagccgatgaa

SEQ ID NO: 327913 - DNA, 75 bp, synthetic construct
  source 1..75: mol_type = other DNA
aataatatttactacgcgcccgagctgcgtgacgagcatggccgtaaggtgcttatcagctatgacattcatgat

SEQ ID NO: 327914 - DNA, 75 bp, synthetic construct
  source 1..75: mol_type = other DNA
gataatctccgtcaggctcccttattccgaacgtccgccgcgtccgtcccgcacattccagcaacgcatctggag

SEQ ID NO: 327915 - DNA, 75 bp, synthetic construct
  source 1..75: mol_type = other DNA
gcctcgattatcgtcactggataatctccgtcaggctcccttattccgaacgcccaccgcgtccgtcccgcacat

SEQ ID NO: 327916 - DNA, 75 bp, synthetic construct
  source 1..75: mol_type = other DNA
attctgatgattctgccgtctttgccagcaggcacgggcggcgttcccgcactttcaaatctgactggtaccagc

SEQ ID NO: 327917 - DNA, 75 bp, synthetic construct
  source 1..75: mol_type = other DNA
tctaaaactgaaccaatgcctgaatttgcgaaagattcggcattatatttcgatgaaaatgattataatgatatt

SEQ ID NO: 327918 - DNA, 75 bp, synthetic construct
  source 1..75: mol_type = other DNA
cgccagcagagacagccgatggcgcacgataccaaattatacaattctgatgattctgccgtctttgccagcagg

SEQ ID NO: 327919 - DNA, 75 bp, synthetic construct
  source 1..75: mol_type = other DNA
ggatgttggggcttgaaccgaagatcacggcggtgcggagtccggagagtaacggtatagcagagagcttcgtga

SEQ ID NO: 327920 - DNA, 75 bp, synthetic construct
  source 1..75: mol_type = other DNA
gtgttgagtgaaatcacgctgaaacgctggattgcggcctttaacaaggcacagaacgccgctgaacgcctgctt

SEQ ID NO: 327921 - DNA, 75 bp, synthetic construct
  source 1..75: mol_type = other DNA
ggtggcagaggcacgaatcgcgattgtcagcgaggtgctgaaattcgcgcaacaacccggtttcagctgcgctag

SEQ ID NO: 327922 - DNA, 75 bp, synthetic construct
  source 1..75: mol_type = other DNA
atggcgcacgataccagattgcacaattctgccgcccttgccagtaggcaagggcggcgttcgcacgtatttaaa

SEQ ID NO: 327923 - DNA, 75 bp, synthetic construct
  source 1..75: mol_type = other DNA
ccacaaaggctgtggaagttgcgtgcggcagtgtttggtggtggtgcattacagatggtggtttgcggcggcctg

SEQ ID NO: 327924 - DNA, 75 bp, synthetic construct
  source 1..75: mol_type = other DNA
gatcggcatgacgctggcgctctcctctacggcgattgccatgcaggcgatgaatgagcgtaacctgatggtaac

SEQ ID NO: 327925 - DNA, 75 bp, synthetic construct
  source 1..75: mol_type = other DNA
aattcaacggcacggctggcaaggtactgaagaagggaaacatactggcaatatgaccgatgagccagaaaccaa

SEQ ID NO: 327926 - DNA, 75 bp, synthetic construct
  source 1..75: mol_type = other DNA
aagatagcgataatcttttaaatcgaatttatactgaatccagtagcatggttaaagaatataagcgcgaaatat

SEQ ID NO: 327927 - DNA, 75 bp, synthetic construct
  source 1..75: mol_type = other DNA
gttattgcagtttttggattggacatcgattctcgtgaaccgctggattcaaaaaaactgtatgctttattaaat

SEQ ID NO: 327928 - DNA, 75 bp, synthetic construct
  source 1..75: mol_type = other DNA
caggcgttgaaaaaccagagcgtgaaacctttgaaggggcactgaaaaccgggcgtctggcgctggaaagtctgg

SEQ ID NO: 327929 - DNA, 75 bp, synthetic construct
  source 1..75: mol_type = other DNA
gattattgcccgcgcccgcgatgtcgaccactacattcgtttgcgtcaggcaggcgttgaaaagccggagcgtga

SEQ ID NO: 327930 - DNA, 75 bp, synthetic construct
  source 1..75: mol_type = other DNA
accaacctgcaactgacagagatggtgaaagaacatttcccgcatttgcagattattgcccgcgcccgcgatgtc

SEQ ID NO: 327931 - DNA, 75 bp, synthetic construct
  source 1..75: mol_type = other DNA
gctgtcagcccaacaacatgggctgacataataaaacagtccaggaaatcatccgcatcccataacggtcaaaga

SEQ ID NO: 327932 - DNA, 75 bp, synthetic construct
  source 1..75: mol_type = other DNA
aatattcagatggtggaagagatggcaatggttgagaacgacaccaaagcccgcgcagcggtctataaacgcacc

SEQ ID NO: 327933 - DNA, 75 bp, synthetic construct
  source 1..75: mol_type = other DNA
ccatgctgtggctgattgcccgaccattacaggtgccgaataaacaacgtcgctggtttgcggtgttgttagggc

SEQ ID NO: 327934 - DNA, 75 bp, synthetic construct
  source 1..75: mol_type = other DNA
gtgaccgatgccgaatctattctgcactttgccgagattggcgtggtgctgatgctgtttattatcggcctcgaa

SEQ ID NO: 327935 - DNA, 75 bp, synthetic construct
  source 1..75: mol_type = other DNA
aattatcgataaacgcaaaattaatttaaacagcgatgagttacatagactatattacccattggtaaaacagca

SEQ ID NO: 327936 - DNA, 75 bp, synthetic construct
  source 1..75: mol_type = other DNA
ggtcagcgctggaacgacgagaagccagaaaccattcaaccacaatccaaaccatcatccgcaatcaccgtatcg

SEQ ID NO: 327937 - DNA, 75 bp, synthetic construct
  source 1..75: mol_type = other DNA
ctaatccaccactctgagcgaggttcacagtactgcgcatacgattaccgggtcatacaggagcagtttggtctg

SEQ ID NO: 327938 - DNA, 75 bp, synthetic construct
  source 1..75: mol_type = other DNA
gctgaattggttgcccttgtgaattacgtaacaagctctcaaatgaccatgcaggatctgcaaacgcatctcgat

SEQ ID NO: 327939 - DNA, 75 bp, synthetic construct
  source 1..75: mol_type = other DNA
gtacaaaagcacgtttctgctctctggaacttaagcacgatccggtacgcgatcagatagttctccccgcgctag

SEQ ID NO: 327940 - DNA, 75 bp, synthetic construct
  source 1..75: mol_type = other DNA
ccgcagacaatggaatacctggactatcttgaatctttgctcggcccggtaacccgagtgaaggctgattttaat

SEQ ID NO: 327941 - DNA, 75 bp, synthetic construct
  source 1..75: mol_type = other DNA
aatccaaccagaatcaggtggggcaggagctgcccggggtggggcaggagctgcccggggtggggcaggagctgc

SEQ ID NO: 327942 - DNA, 75 bp, synthetic construct
  source 1..75: mol_type = other DNA
tattgtgaaatcatcccacttcactgctcaggttgaaggtgcgtaccgcctgatacgtaacccgtcggtgtcccc

SEQ ID NO: 327943 - DNA, 75 bp, synthetic construct
  source 1..75: mol_type = other DNA
ctgaaaattaagatgttttttattcagtataacgacaaagagaacaagtttagaagagttacagcattatatata

SEQ ID NO: 327944 - DNA, 75 bp, synthetic construct
  source 1..75: mol_type = other DNA
acggcaaattcttttccgctcacgtcaacgtgggtgacaaggtcaatacaggcgatcggctgatttcttttgata

SEQ ID NO: 327945 - DNA, 75 bp, synthetic construct
  source 1..75: mol_type = other DNA
aagacggatttaccgaaaggattcacacgccgggaggcgtcaggtcactggtggagggatcgcacttgatgaaat

SEQ ID NO: 327946 - DNA, 75 bp, synthetic construct
  source 1..75: mol_type = other DNA
gtggagcctgctgctgccgctgatgctggtctttatgatcacctcgctggaaacgattggcgacatcaccgccac

SEQ ID NO: 327947 - DNA, 75 bp, synthetic construct
  source 1..75: mol_type = other DNA
aaactattggcgatatcacggcgacgtctgacgtttccgaacagcctgtatccggtccgctatacatgaaacgtc

SEQ ID NO: 327948 - DNA, 75 bp, synthetic construct
  source 1..75: mol_type = other DNA
agagcggcaaactgcattactggtcgctggatgacgaacaggccgcgattaaagccgaaagctgcgatgactgcg

SEQ ID NO: 327949 - DNA, 75 bp, synthetic construct
  source 1..75: mol_type = other DNA
tgcctttccgcagcttggaacgcggatggagaagaggagcaacgcgatctagctatcgcggccgcgatcaagcag

SEQ ID NO: 327950 - DNA, 75 bp, synthetic construct
  source 1..75: mol_type = other DNA
atgcaatacactccagatactgcgtggaaaatcactggcttttcccgtgaaatcagcccggcatatcgccaaaaa

SEQ ID NO: 327951 - DNA, 75 bp, synthetic construct
  source 1..75: mol_type = other DNA
ggaccgcggagcatcggtatcagccagctatgcgtttgacgcgattcagaccaactttggtgtgtcacgctctta

SEQ ID NO: 327952 - DNA, 75 bp, synthetic construct
  source 1..75: mol_type = other DNA
ggtacaacggccgtgcgccgcttgaagttaatgatgagtatgacgtacaggatttgatttatgcactgctgacgc

SEQ ID NO: 327953 - DNA, 75 bp, synthetic construct
  source 1..75: mol_type = other DNA
tgttgctcgaatatgccggggagcgaatgctctctcacatcgttgccgagcacggcgactaccaggcgaccgaaa

SEQ ID NO: 327954 - DNA, 75 bp, synthetic construct
  source 1..75: mol_type = other DNA
ctgacagagacgacctttgtctcgatcctagacgcattgcacagatggcggacgggcactgttgcaaagttagcg

SEQ ID NO: 327955 - DNA, 75 bp, synthetic construct
  source 1..75: mol_type = other DNA
ctcaccccgccaacccgcgcgatcacaccaacgttttgatgcacgttcagggttattttcgcccgcatattgatt

SEQ ID NO: 327956 - DNA, 75 bp, synthetic construct
  source 1..75: mol_type = other DNA
gaataccgcaaacttggcccgtttgtggctgatattcatcggtggcaaaatctggatgactattacaaccagtac

SEQ ID NO: 327957 - DNA, 75 bp, synthetic construct
  source 1..75: mol_type = other DNA
tgatccagttaaccggtgttgccagccgctatgtcggttttgtcgtcgcgctgatgttgatcgtgctgggtctgt

SEQ ID NO: 327958 - DNA, 75 bp, synthetic construct
  source 1..75: mol_type = other DNA
taccagttgaaagtaacagaagatgctgctgttccgcaaaaagtgaaaatgttgcggggccgtctggaagtcacc

SEQ ID NO: 327959 - DNA, 75 bp, synthetic construct
  source 1..75: mol_type = other DNA
gtcagacacaaatcggcagaaaagattaaagccttgctggctgaatggtatcgggaacgtgccagagatgttttt

SEQ ID NO: 327960 - DNA, 75 bp, synthetic construct
  source 1..75: mol_type = other DNA
ctcaccccgccaacccgcgcgatcacaccaacgttttgatgcacgttcaggggtattttcgtccccatcttgatt

SEQ ID NO: 327961 - DNA, 75 bp, synthetic construct
  source 1..75: mol_type = other DNA
gacgcgcgaatggagcaagaaggctacgcccgcagttccattaacccgttcctgtttccgggtgaaggggagtaa

SEQ ID NO: 327962 - DNA, 75 bp, synthetic construct
  source 1..75: mol_type = other DNA
ggaaagcgacggaacaattaaacagcacattagcccgaacagcttcaaacgcgagtgggcagtctcttttggtga

SEQ ID NO: 327963 - DNA, 75 bp, synthetic construct
  source 1..75: mol_type = other DNA
cggcagggattggcgtaacgaagccgtttggtgagctgggggcgttatccctgagtgcccagacagctaaagctc

SEQ ID NO: 327964 - DNA, 75 bp, synthetic construct
  source 1..75: mol_type = other DNA
cgctccttcgaaccgtttattcgtgcgatccaggcgcaaatttccccatgttgcaattgcatcatcgcggggggc

SEQ ID NO: 327965 - DNA, 75 bp, synthetic construct
  source 1..75: mol_type = other DNA
gacgcgcgaatggagcaagaaggctacgcccgcagttccatcaacccgttcctgttcccgggtgaaggggagtaa

SEQ ID NO: 327966 - DNA, 75 bp, synthetic construct
  source 1..75: mol_type = other DNA
gctgtacgaccatccgctggagatggatctgactgcgcgcattaaagaagccagcgcacaaggtaagcccccgct

SEQ ID NO: 327967 - DNA, 75 bp, synthetic construct
  source 1..75: mol_type = other DNA
caccacattagatatttctcaggtaatggggaaattatcggggatcagtaaaatatacggagattcatctcttgg

SEQ ID NO: 327968 - DNA, 75 bp, synthetic construct
  source 1..75: mol_type = other DNA
gctgtacgaccatccgctggagatggacctgactgcgcgcattaaagaagccagcgcacaaggcaagccaccgct

SEQ ID NO: 327969 - DNA, 75 bp, synthetic construct
  source 1..75: mol_type = other DNA
cgctgattgctgagctgaaaccagaaatgagcggtccggcgctggccgtgattgagaatctggagaaggcatcaa

SEQ ID NO: 327970 - DNA, 75 bp, synthetic construct
  source 1..75: mol_type = other DNA
gatctgactgcgcgcattaaagaagccagcgcacaaggcaagcccccgctggatattcacgttctgccgcgtgat

SEQ ID NO: 327971 - DNA, 75 bp, synthetic construct
  source 1..75: mol_type = other DNA
attgatacgccagaaatattggcacagattatcccctttgatttccatgctctccagggatgcctgtggcctgcc

SEQ ID NO: 327972 - DNA, 75 bp, synthetic construct
  source 1..75: mol_type = other DNA
attattattagacagggataatttcgcaggcgaactattaaaatatccctttattgaactgttgattaatgagaa

SEQ ID NO: 327973 - DNA, 75 bp, synthetic construct
  source 1..75: mol_type = other DNA
ttgttccctcggctcaaaaatttatacaaccgccgcgccgagcgtctgcgcgaactggcagaaaataatccgctg

SEQ ID NO: 327974 - DNA, 75 bp, synthetic construct
  source 1..75: mol_type = other DNA
gccgctgcaaaatcagcttccacatctgcaacaaattgtcagcgtggacaaactggctcccgccacatcgtctct

SEQ ID NO: 327975 - DNA, 75 bp, synthetic construct
  source 1..75: mol_type = other DNA
accttaccgccaggttgcgaaggtgaagaggcctcgcgtggccccaatgtgtttatgggatattttgatgaacct

SEQ ID NO: 327976 - DNA, 75 bp, synthetic construct
  source 1..75: mol_type = other DNA
ctcattaagtcagattatcgccgacaataccccactgaccacggcgataacgacccacggcgatgaattagctgc

SEQ ID NO: 327977 - DNA, 75 bp, synthetic construct
  source 1..75: mol_type = other DNA
agctggctcccgccacctcgtctctctcgttaagtcagattattgccgacaatcccccgctggtcgccgcaacat

SEQ ID NO: 327978 - DNA, 75 bp, synthetic construct
  source 1..75: mol_type = other DNA
gtttatggggtattttgatgaacctgaattaaccgcccgtgcgctggatgaagaaggctggtattacagcggcga

SEQ ID NO: 327979 - DNA, 75 bp, synthetic construct
  source 1..75: mol_type = other DNA
tctctgccgcatggatgaggctggctatataaaaataaccggacgtaagaaagatattattgtccgtggcggcga

SEQ ID NO: 327980 - DNA, 75 bp, synthetic construct
  source 1..75: mol_type = other DNA
aaacgggatgatgaaattgttgttatgcctgtcagcgattacaccgcccggagactgagcaatcttaaagtcggg

SEQ ID NO: 327981 - DNA, 75 bp, synthetic construct
  source 1..75: mol_type = other DNA
gaaatgtcaaaaagagtagttttgttgagcttgccaagtatgtgcaagatccccaaaacaaacaggagcgcgtgg

SEQ ID NO: 327982 - DNA, 75 bp, synthetic construct
  source 1..75: mol_type = other DNA
tttccgggttagctgactacatcactaacccgcaaagcaaacaagagcgtgtgggtgtcattaaagcaactaatt

SEQ ID NO: 327983 - DNA, 75 bp, synthetic construct
  source 1..75: mol_type = other DNA
gcaagggctatggggcgatgcttcgctggccgattactggcagcagaccgctcgtgcgatgccagacaaaattgc

SEQ ID NO: 327984 - DNA, 75 bp, synthetic construct
  source 1..75: mol_type = other DNA
tatccatatcgctataaataaaatccatccacaaactcacaacattcataccccctacaacgattacaaaacccg

SEQ ID NO: 327985 - DNA, 75 bp, synthetic construct
  source 1..75: mol_type = other DNA
gttactacagcaggaagccagccaggaaggaatgatgacacccgtacagggggaagtcgagcagccgaaccaaat

SEQ ID NO: 327986 - DNA, 75 bp, synthetic construct
  source 1..75: mol_type = other DNA
gcccgatgaacgcttaggtgaacgttcatgcgcttatgtcgtgctgaaagcgccgcatcattcattatcgctgga

SEQ ID NO: 327987 - DNA, 75 bp, synthetic construct
  source 1..75: mol_type = other DNA
aagatgactggctgaaacgcggcgtgcgcagcgatgcggcggacctctatcgccagcaggatcttaacgtcaccc

SEQ ID NO: 327988 - DNA, 75 bp, synthetic construct
  source 1..75: mol_type = other DNA
cgcgcaccaaaaccatgccgcgttatccgctgatgaacctgatcccgacggactggaaagaggatgccgccagcc

SEQ ID NO: 327989 - DNA, 75 bp, synthetic construct
  source 1..75: mol_type = other DNA
atacattgagattttctacaatcgtcagcgtcgtcactctcgtctggggaatatctccccgacagccttcaggat

SEQ ID NO: 327990 - DNA, 75 bp, synthetic construct
  source 1..75: mol_type = other DNA
cgatcgcgctaatgcggtggcgaatctggaaaaagccctcgccctggatccgcacagcagcaacaacgacaaatg

SEQ ID NO: 327991 - DNA, 75 bp, synthetic construct
  source 1..75: mol_type = other DNA
ggcactggaaaaccagggcaaatgggcgcaggcggcagcacttcagcggcaacgactggcgctggaccccggcag

SEQ ID NO: 327992 - DNA, 75 bp, synthetic construct
  source 1..75: mol_type = other DNA
taacgcctcgctgaacacacagcggcgcgtggcgctggcacaggcgcagcttggcgataccgcagcggcgcagca

SEQ ID NO: 327993 - DNA, 75 bp, synthetic construct
  source 1..75: mol_type = other DNA
gttttttagcaggtctacagtcaactccatcgcggtatccttcaggttgttatcattcgttgatgatgcgatctg

SEQ ID NO: 327994 - DNA, 75 bp, synthetic construct
  source 1..75: mol_type = other DNA
atgtttatacgtgcgaaattgtcggctacgccatgggagagcgcatgacaaaagagctgacaggtaaagccatgt

SEQ ID NO: 327995 - DNA, 75 bp, synthetic construct
  source 1..75: mol_type = other DNA
atctgctgaaccagacgttcgctcctacagcaccaaatcaggtctgggtggcggacctgacgtatgttgccacac

SEQ ID NO: 327996 - DNA, 75 bp, synthetic construct
  source 1..75: mol_type = other DNA
gctgaaaaatgagagcctgagccactatcgttttaataaccgggatgaagccatcggtgatgctgccaacttact

SEQ ID NO: 327997 - DNA, 75 bp, synthetic construct
  source 1..75: mol_type = other DNA
ccccggcagccttcagggaaaatatccataggttgctggctaaaaaaagaacaaatggtagtgtccgctattgcc

SEQ ID NO: 327998 - DNA, 75 bp, synthetic construct
  source 1..75: mol_type = other DNA
acgattaccgggtcatacaggagcagtctggtctgaaaacatcaatgtcgcgtaaaggtaactgttacgacaacg

SEQ ID NO: 327999 - DNA, 75 bp, synthetic construct
  source 1..75: mol_type = other DNA
agtaaaacgtgatcggctgattgaaaatgcaaagagaacagggaggcttaaacgctctgccatcaagttacttaa

SEQ ID NO: 328000 - DNA, 75 bp, synthetic construct
  source 1..75: mol_type = other DNA
aatgcagaatattcccggtaatctgtatttgatgcggcgaaaatacaagatttcagatacgcaaaagctaattga

SEQ ID NO: 328001 - DNA, 75 bp, synthetic construct
  source 1..75: mol_type = other DNA
ggataaagagaagatcaggggcaatgccccattattgactggagcaggcaaaatcagcctggcgttgttttgcga

SEQ ID NO: 328002 - DNA, 75 bp, synthetic construct
  source 1..75: mol_type = other DNA
gattcaagttctctatttatcaacaatgtgcaggctgaaaagctgcgtagcatgtgggatagagcgcttgcgaaa

SEQ ID NO: 328003 - DNA, 75 bp, synthetic construct
  source 1..75: mol_type = other DNA
catcgccagcacggcctgcaatcaatgccgcgcctgagagtgatgctcaatgaaaaagaatctgcgccgcagctc

SEQ ID NO: 328004 - DNA, 75 bp, synthetic construct
  source 1..75: mol_type = other DNA
tgaaaaagaatctgcgccacaactttgccaccactgtgaagatgcaccctgcgcaacggtctgcccggttaacgc

SEQ ID NO: 328005 - DNA, 75 bp, synthetic construct
  source 1..75: mol_type = other DNA
gtgaatcgttttgtaattgctgactccacgctctgtatcggctgccacacctgtgaggctgcctgttcagagacg

SEQ ID NO: 328006 - DNA, 75 bp, synthetic construct
  source 1..75: mol_type = other DNA
gggggttcgcgctcaggagtctcctgcgcgcgcgggtctgcctgcctgggaagaggatgcggacaatacgcccgg

SEQ ID NO: 328007 - DNA, 75 bp, synthetic construct
  source 1..75: mol_type = other DNA
atgtggaaagggcgatttccttccactaaagccagattttgcacttttgaccttaaacatgagccagtacgtact

SEQ ID NO: 328008 - DNA, 75 bp, synthetic construct
  source 1..75: mol_type = other DNA
tgcagacaccgggcatgagcatccgcagacaatggagtatctcgattatctggagaaccgactcgggccggttaa

SEQ ID NO: 328009 - DNA, 75 bp, synthetic construct
  source 1..75: mol_type = other DNA
tggcctcattaggttcaatgttaaagtgggcctgtaaagaaaattatttaattgccaatccagtggaaaatgttc

SEQ ID NO: 328010 - DNA, 75 bp, synthetic construct
  source 1..75: mol_type = other DNA
ttaacagcattcagtttgacgagaaatttaccgggcagctactggtccatgtggagaacgggcgcatagtgcgta

SEQ ID NO: 328011 - DNA, 75 bp, synthetic construct
  source 1..75: mol_type = other DNA
ccggagcgtgctttgctgcctgagtgggaggaagacgctgacgatacaccgggccttcatgtttatcgtccgatc

SEQ ID NO: 328012 - DNA, 75 bp, synthetic construct
  source 1..75: mol_type = other DNA
ggcgaggaagaaaaccttgtagatcaggaagagtcgccacagaactctctagatgagacgctggccgcttcagag

SEQ ID NO: 328013 - DNA, 75 bp, synthetic construct
  source 1..75: mol_type = other DNA
gaacgtattgcaggccgagttgctgcaccgctcccgccaggcagaaaaagaaggccaggaaccggatcctcgcgt

SEQ ID NO: 328014 - DNA, 75 bp, synthetic construct
  source 1..75: mol_type = other DNA
gctaccagtcacttcaggcgtgtggcatgggtattatcgccaacggcgatctgctcgacaccctgcgccgcgtga

SEQ ID NO: 328015 - DNA, 75 bp, synthetic construct
  source 1..75: mol_type = other DNA
cagaaccgtatcgctatctgatgaaaaacctgcgttctcgcctgatggcgacacaggcatggctggaagcgcgcc

SEQ ID NO: 328016 - DNA, 75 bp, synthetic construct
  source 1..75: mol_type = other DNA
tgcttatggctaaacaccgttacggagacaaactcaccgttaacggcagttttgaatttaaaaaacgcattgtag

SEQ ID NO: 328017 - DNA, 75 bp, synthetic construct
  source 1..75: mol_type = other DNA
attaacagcggtaaacgctatgaaggcaggccgctgggaactcagggagctaatacaaccgttctttatggacgt

SEQ ID NO: 328018 - DNA, 75 bp, synthetic construct
  source 1..75: mol_type = other DNA
ggcgagctgacccgctacctcggtatcggcgactacgaaagctggtcagaggccgacaaacagcgttcctgatcc

SEQ ID NO: 328019 - DNA, 75 bp, synthetic construct
  source 1..75: mol_type = other DNA
gcgctgattatggttggctatgcctcatttacggagtttatccccgcgacggtgcgtggaaaatggtccgcgcgg

SEQ ID NO: 328020 - DNA, 75 bp, synthetic construct
  source 1..75: mol_type = other DNA
ttggcatactgttagcctggtttctctcaggtaaatactttattgagtcgccacgatggctggcagggaaagggc

SEQ ID NO: 328021 - DNA, 75 bp, synthetic construct
  source 1..75: mol_type = other DNA
taaactggatagtgaacgtctgaacaagaagctccagcagtggcagaagattgcaattgctgcctgtgagcagtg

SEQ ID NO: 328022 - DNA, 75 bp, synthetic construct
  source 1..75: mol_type = other DNA
cgaaccagatcctcgcgttgaacaagcgttaatggtcactattgccgggatcgcggcaggtatgcgtaataccgg

SEQ ID NO: 328023 - DNA, 75 bp, synthetic construct
  source 1..75: mol_type = other DNA
ttgagttactccggtaatgtcgtcttagcaaagctggtaagcaatggatggtcaaataatttcctcaatgccgcc

SEQ ID NO: 328024 - DNA, 75 bp, synthetic construct
  source 1..75: mol_type = other DNA
gcctgcgcggttcgggtttcgttaatgccgtcggacggatcgtcgcagtcttcacgccctatggcgttgcggcat

SEQ ID NO: 328025 - DNA, 75 bp, synthetic construct
  source 1..75: mol_type = other DNA
atcgagagcgttaaattccagcatgccagtcgcgtagctcttgttcctgtactggcgtcagaaccgaccggcatc

SEQ ID NO: 328026 - DNA, 75 bp, synthetic construct
  source 1..75: mol_type = other DNA
atgaaattcttacagaatatcccgccttacctgttttttaccggtaagggaggtgtaggaaaaacgtctatttcc

SEQ ID NO: 328027 - DNA, 75 bp, synthetic construct
  source 1..75: mol_type = other DNA
gtttgtggtcatggatacggcaccgaccgggcatacgctattactgcttgatgctaccggggcttatcaccgtga

SEQ ID NO: 328028 - DNA, 75 bp, synthetic construct
  source 1..75: mol_type = other DNA
ggcattaaaagccccatcggcattaaagtttccggcactgtgctggcggatatcgacgcgatggcggagcaaatt

SEQ ID NO: 328029 - DNA, 75 bp, synthetic construct
  source 1..75: mol_type = other DNA
cagttaaagatctgaatcgcttgcgcgagatggtttttgcctgtctctatcccagcatgtttaattcgcgcgttg

SEQ ID NO: 328030 - DNA, 75 bp, synthetic construct
  source 1..75: mol_type = other DNA
tgatatctgccactgaaaatatggcagatattgccaaagcgttacgtctgggcgttgaagatgttttgctgaaac

SEQ ID NO: 328031 - DNA, 75 bp, synthetic construct
  source 1..75: mol_type = other DNA
attgaggctgttaagaatcagcatgctgaccgtatagcgcttgttccggtgctggcgtcagagcccaccggtatt

SEQ ID NO: 328032 - DNA, 75 bp, synthetic construct
  source 1..75: mol_type = other DNA
acgaagggaagagatctggacgaagcagggaaacggctactggaagaggatttacgctctccctgtactgaagaa

SEQ ID NO: 328033 - DNA, 75 bp, synthetic construct
  source 1..75: mol_type = other DNA
ggcctgaaaaaccagtacctggtgattaatggtgtgctgcctgcagccgaagcagagcatgacgccttggctgct

SEQ ID NO: 328034 - DNA, 75 bp, synthetic construct
  source 1..75: mol_type = other DNA
ggcctgaaaaaccagtatctagtgattaatggggttctgcctgcaactgaagcagagcatgacgccctggccgct

SEQ ID NO: 328035 - DNA, 75 bp, synthetic construct
  source 1..75: mol_type = other DNA
atctgatttgccgacagacaacttatacctgcagccgctgaacatggttggtgtatccgcattgaaaggcctgct

SEQ ID NO: 328036 - DNA, 75 bp, synthetic construct
  source 1..75: mol_type = other DNA
cgcctgaaaacttatcgctctctggcctggttgatgatatcgctcgcagtgaacacggtctgattatgctgatgg

SEQ ID NO: 328037 - DNA, 75 bp, synthetic construct
  source 1..75: mol_type = other DNA
gctatatcaacgttgagattaaccgtgaaaaagccgcacgttacggtatgacggtggcggatgtgcagttgtttg

SEQ ID NO: 328038 - DNA, 75 bp, synthetic construct
  source 1..75: mol_type = other DNA
taaccgtattgatatgctctcaacagggatcaaaagcccgataggtatcaaagtgtccggaacggttctgtccga

SEQ ID NO: 328039 - DNA, 75 bp, synthetic construct
  source 1..75: mol_type = other DNA
tcatcctgttatatctggcattccgcagggttgatgaagccctgttgatcctgatgagcctgccgtttgccctgg

SEQ ID NO: 328040 - DNA, 75 bp, synthetic construct
  source 1..75: mol_type = other DNA
gaccaaccatgctgaaaaccgaaaatgcccggccagccagctggatttatgttgatgcccgcggcagggacatgg

SEQ ID NO: 328041 - DNA, 75 bp, synthetic construct
  source 1..75: mol_type = other DNA
gtgaacgtgggttagccatgcaaacttcattcgtggtggaggtcactcccctcgaaccggaagtacttcgtcagg

SEQ ID NO: 328042 - DNA, 75 bp, synthetic construct
  source 1..75: mol_type = other DNA
tggtgtttttcagcttctgccaggacaaaagcctgatactgtgctggcacgtgattatatcgccacctttaaact

SEQ ID NO: 328043 - DNA, 75 bp, synthetic construct
  source 1..75: mol_type = other DNA
gcgtgctggagtatctgaatcaggttcagggaaaactgcctgctggtgtgagttctgaaatcggtcctgatgcca

SEQ ID NO: 328044 - DNA, 75 bp, synthetic construct
  source 1..75: mol_type = other DNA
gggatcaaaagcccgataggtatcaaggtctcagggactgtcctggccgatattgatgcgactgcgcagagtatc

SEQ ID NO: 328045 - DNA, 75 bp, synthetic construct
  source 1..75: mol_type = other DNA
aagctgcagcactcctgcagacgacggacaagttaatcaaaagcgttcctgaagtggcctctgtatttggcaaga

SEQ ID NO: 328046 - DNA, 75 bp, synthetic construct
  source 1..75: mol_type = other DNA
tcagggcaaactgcctgcgggtgtgagctctgaaatcggtccggacgccacgggagtgggctggatatttgaata

SEQ ID NO: 328047 - DNA, 75 bp, synthetic construct
  source 1..75: mol_type = other DNA
tgtccagctcttcgtctcatcagccatcggcggcgcgatggtaggagaaacggtggaaggcgtggcccgataccc

SEQ ID NO: 328048 - DNA, 75 bp, synthetic construct
  source 1..75: mol_type = other DNA
gtgagtttctgccgaagattaacgaaggcgacctgttgtacatgccgtcgacgttgccgggagtctctccggcag

SEQ ID NO: 328049 - DNA, 75 bp, synthetic construct
  source 1..75: mol_type = other DNA
tccgtgatgttgcccgcgtacaaatggggccggaaatgcggcgtggtatcgctgagcttaatggtcagggcgaag

SEQ ID NO: 328050 - DNA, 75 bp, synthetic construct
  source 1..75: mol_type = other DNA
cacctgaaaacttatcgctctctggcctggtcaatgatatcgctcgcagtgaacacggcctgattatgctgatgg

SEQ ID NO: 328051 - DNA, 75 bp, synthetic construct
  source 1..75: mol_type = other DNA
ggcgacaaaaccggaagcggcacggaaggcaatatcggctggctgtccgaccctcacggtctaccctgcatcccc

SEQ ID NO: 328052 - DNA, 75 bp, synthetic construct
  source 1..75: mol_type = other DNA
cgtgtattcccggcgagcgcaaaagtaacgccaaagagtacctgacctcgcagttcctgctggcgggttccggcg

SEQ ID NO: 328053 - DNA, 75 bp, synthetic construct
  source 1..75: mol_type = other DNA
ggccttcgccaatggtgaaagcaccacagtggtcgaggacggcagcatcaccagcgcagtgacgggcaacaacgg

SEQ ID NO: 328054 - DNA, 75 bp, synthetic construct
  source 1..75: mol_type = other DNA
gccagggcgctggcgcgtgacgttgaggtcgcgtggactgaatacgccgaggaccctcactgcacgattgatatc

SEQ ID NO: 328055 - DNA, 75 bp, synthetic construct
  source 1..75: mol_type = other DNA
agttaaagggcaacagagcaacggatgactcgctggccgggctggggattgatgaaccggaagcggcctccggag

SEQ ID NO: 328056 - DNA, 75 bp, synthetic construct
  source 1..75: mol_type = other DNA
gcgtcaccgatccctaccctttcaaggtgctgattggccgcgataacctcaccgccaacggcatcgagctgcccg

SEQ ID NO: 328057 - DNA, 75 bp, synthetic construct
  source 1..75: mol_type = other DNA
ccgcttgatccatgcgccaacgaaatcacttcaacaggccgcccgtgacggggataacgaacgcctgaatattct

SEQ ID NO: 328058 - DNA, 75 bp, synthetic construct
  source 1..75: mol_type = other DNA
gatattgccgttccgcgcgatgttgagccggaagttggcaaactggcgaatgcttatctttatagcgttgacgat

SEQ ID NO: 328059 - DNA, 75 bp, synthetic construct
  source 1..75: mol_type = other DNA
tgactaaccgcttgatccatgctccaacgaaattacttcaacaggccgcccgtgacggggataacgaacgcctga

SEQ ID NO: 328060 - DNA, 75 bp, synthetic construct
  source 1..75: mol_type = other DNA
aagctgctgcgcgtccctctgaaagcggccgacaaaccaccgccgaaacctgacgtgaaggtctacaccctgccg

SEQ ID NO: 328061 - DNA, 75 bp, synthetic construct
  source 1..75: mol_type = other DNA
cagccgacaaaccgccaccaaaacctgacgtgaaggtctataccctgccgcagaacgccacactgaccggatcgg

SEQ ID NO: 328062 - DNA, 75 bp, synthetic construct
  source 1..75: mol_type = other DNA
gcctgggcagataacaatgatggtcagggataccgttgatggcctcgttttggactggtttaagacggcaaaaag

SEQ ID NO: 328063 - DNA, 75 bp, synthetic construct
  source 1..75: mol_type = other DNA
aaagcagcggcagctacggttttatgcagcttggtggtgacttgttcaagcatgataccggtacactttccctaa

SEQ ID NO: 328064 - DNA, 75 bp, synthetic construct
  source 1..75: mol_type = other DNA
tgatgttgaggaaatttttcatgatgctcttggttgtgaaaatactcagggctgtgaatcccttgctcgtaagac

SEQ ID NO: 328065 - DNA, 75 bp, synthetic construct
  source 1..75: mol_type = other DNA
gtcagatgtgcaggtcattattaaaaccagctatcccggacaggctccgcagattgtagaaaaccaggtcaccta

SEQ ID NO: 328066 - DNA, 75 bp, synthetic construct
  source 1..75: mol_type = other DNA
aggcgttgaaatcgtgaccacctacgatcgcagccagttaatcgaccgggcgattgataacctcagttccaaact

SEQ ID NO: 328067 - DNA, 75 bp, synthetic construct
  source 1..75: mol_type = other DNA
cgctggccaatcttccttctgacctttccggtctgccaactgacacgttattcctccaaccactcaatatggtcg

SEQ ID NO: 328068 - DNA, 75 bp, synthetic construct
  source 1..75: mol_type = other DNA
ttatcgatggccgctgaaagtttgtcaaaaatgcatgtctccaatatagtttttcccttcaaggaaagtgaattt

SEQ ID NO: 328069 - DNA, 75 bp, synthetic construct
  source 1..75: mol_type = other DNA
cctggctcttttagagagactgcgggatgaggcaaaggaacaacagcagcagacagagcaggaggagcaggaggc

SEQ ID NO: 328070 - DNA, 75 bp, synthetic construct
  source 1..75: mol_type = other DNA
gtcgcttctgtttttactgaaatcttgttgtttatggtctggtttccggcaattgtctatgggctttatcgtgtt

SEQ ID NO: 328071 - DNA, 75 bp, synthetic construct
  source 1..75: mol_type = other DNA
tcatcggcgcgcttggtttaatggcttttgtcggctggcaatggcgcggaagaatgcgccgtcaggctttgggtt

SEQ ID NO: 328072 - DNA, 75 bp, synthetic construct
  source 1..75: mol_type = other DNA
tcattggcgcgcttggcttaatggcttttgttggttggcaatggcgcggaagaatgcgccgtcaggctttgggtt

SEQ ID NO: 328073 - DNA, 75 bp, synthetic construct
  source 1..75: mol_type = other DNA
cggtggctcatccgttgaaatggccgaagctgagtatatggtccgtgccagcggttatcttcagagcattgatga

SEQ ID NO: 328074 - DNA, 75 bp, synthetic construct
  source 1..75: mol_type = other DNA
cgactggctgctctatcaggacaagttcgttctggtggttacgtccacgaccgggcaaggcgacctgcctgacag

SEQ ID NO: 328075 - DNA, 75 bp, synthetic construct
  source 1..75: mol_type = other DNA
cgactggctgccctatcaggataagtatgttctggtggttacgtccacgaccgggcagggcgaccttcctgatag

SEQ ID NO: 328076 - DNA, 75 bp, synthetic construct
  source 1..75: mol_type = other DNA
ggaaaataatcttcagtggactattcgcagtatggatgaagatcattttaatctggacgcagatggtcccgatat

SEQ ID NO: 328077 - DNA, 75 bp, synthetic construct
  source 1..75: mol_type = other DNA
acctggacgcagatggccctgatatttcagcatgggaaccggaacgaccagagggtgatggctggtttattggtt

SEQ ID NO: 328078 - DNA, 75 bp, synthetic construct
  source 1..75: mol_type = other DNA
atgagcgtaattaaagaaatgccagtggaacgtaatgaatatggctgctggacgcatcctgaatatgaaaaattc

SEQ ID NO: 328079 - DNA, 75 bp, synthetic construct
  source 1..75: mol_type = other DNA
cacccagatgaactcaaaagccgatgacgatgtccgtaaagagcttaatgccattgctgacgtatcagccggccg

SEQ ID NO: 328080 - DNA, 75 bp, synthetic construct
  source 1..75: mol_type = other DNA
attgaaacaggttttcgtggtacggccctgtatgcgacagaaaacatcgccggacgtatcaatgcccgcctggcg

SEQ ID NO: 328081 - DNA, 75 bp, synthetic construct
  source 1..75: mol_type = other DNA
tgccgcctgggaaccggagcgaccagagggtgaaggctggtttgttggctctatccatgacactgaagatggtcc

SEQ ID NO: 328082 - DNA, 75 bp, synthetic construct
  source 1..75: mol_type = other DNA
ccgcctggaggatgagggctttaccgtaaaaatcagttttccggcagtcagccagttacagacccggctcgcggt

SEQ ID NO: 328083 - DNA, 75 bp, synthetic construct
  source 1..75: mol_type = other DNA
aatcaaccaccatcaacgccattgtggggcaggaaattctgcccaaccgtaaccgccccatgacctcggtaccga

SEQ ID NO: 328084 - DNA, 75 bp, synthetic construct
  source 1..75: mol_type = other DNA
tctcagtccggattatgggggaaaatttctcaatggtccggtatcaacaaccagggccgggaggattacaggaaa

SEQ ID NO: 328085 - DNA, 75 bp, synthetic construct
  source 1..75: mol_type = other DNA
accggaacgaccagagggcaatggatggtttattggttcaatacatgacaccgaagatggcccggtttgtgtatg

SEQ ID NO: 328086 - DNA, 75 bp, synthetic construct
  source 1..75: mol_type = other DNA
gcagctttctgcattaatcgatctcaggtttacagaaagcgaagccaaagagttactggccggagatttctgtgg

SEQ ID NO: 328087 - DNA, 75 bp, synthetic construct
  source 1..75: mol_type = other DNA
cctggcaaaccagaggcaaacattcgttcgctgcttaaatcacgcgcctttaagtggagtccaacccgtaatgca

SEQ ID NO: 328088 - DNA, 75 bp, synthetic construct
  source 1..75: mol_type = other DNA
cacccagatgaactctaaagccgatgacgaggtccgtaaagagcttaatgccattgctgacgtatcagccggccg

SEQ ID NO: 328089 - DNA, 75 bp, synthetic construct
  source 1..75: mol_type = other DNA
gtcacgacagataaagatacagataaagaattaaaccccacacataacgcgcgcgtgcgcgagagtgctccgacc

SEQ ID NO: 328090 - DNA, 75 bp, synthetic construct
  source 1..75: mol_type = other DNA
cttatgggggaggtgtattcgaaccgctggacacagaagaacggggccgcaccttcgaagctctggattgcccag

SEQ ID NO: 328091 - DNA, 75 bp, synthetic construct
  source 1..75: mol_type = other DNA
agccatgcagcatcaggtggcacggcatcacgggcagttcaggaaatccgggctgcacgcgaacagtgggaacgt

SEQ ID NO: 328092 - DNA, 75 bp, synthetic construct
  source 1..75: mol_type = other DNA
ggatttatcagcaacggaaacggcctggaagctgtgggagcttatgggggaggtgtattcgaaccgctggactca

SEQ ID NO: 328093 - DNA, 75 bp, synthetic construct
  source 1..75: mol_type = other DNA
cacgtgcagcacgtcagggcacaggtaaaaccagtcagcaagggggtaagccatgcagcatcaggtggcacggca

SEQ ID NO: 328094 - DNA, 75 bp, synthetic construct
  source 1..75: mol_type = other DNA
ggttaaaccagtcagcaagggggtaaaccatgcagcagcaccaggtggcaccgcatcacgggcagttcaggaaat

SEQ ID NO: 328095 - DNA, 75 bp, synthetic construct
  source 1..75: mol_type = other DNA
ccatcaacgccattgtggggcaggaaattctgcccaaccgtaaccgccccatgacctcggtaccgacattgatcc

SEQ ID NO: 328096 - DNA, 75 bp, synthetic construct
  source 1..75: mol_type = other DNA
cacccagatgaactccaaagccgatgatgaggtccgtaaagagcttaatgccattgctgacgtatcagccggccg

SEQ ID NO: 328097 - DNA, 75 bp, synthetic construct
  source 1..75: mol_type = other DNA
cacccagatgaactccaaagccgatgaagatgtccgtaaagagcttaatgccattgctgacgtatcagccggccg

SEQ ID NO: 328098 - DNA, 75 bp, synthetic construct
  source 1..75: mol_type = other DNA
gttcgctgtcggtagcaaatttaggtaatgactccaacttactgatagtgttttatgttcagataatgcccgatg

SEQ ID NO: 328099 - DNA, 75 bp, synthetic construct
  source 1..75: mol_type = other DNA
gcgaaatctctaattttacacaaccagcctccggtcactggtactttacgcttaaagacgataccgcgcaggtgc

SEQ ID NO: 328100 - DNA, 75 bp, synthetic construct
  source 1..75: mol_type = other DNA
aagaaggttgccacggctatgcgccgatggtggattgcgctgctggcgtgagtttccagtctatggcgccggact

SEQ ID NO: 328101 - DNA, 75 bp, synthetic construct
  source 1..75: mol_type = other DNA
ggcatatttcggggagttgcaggcatccattgagcagaatattaaccagcccgtccgccaggagatcgatgattt

SEQ ID NO: 328102 - DNA, 75 bp, synthetic construct
  source 1..75: mol_type = other DNA
ctggtcgatctgcccggcattggtgaaacaccacagcatgatcaggaataccgggcactttaccgtcagctactg

SEQ ID NO: 328103 - DNA, 75 bp, synthetic construct
  source 1..75: mol_type = other DNA
ggtgcattatgggcgaccaccgattccacggttaccgggacgaacagtcttggggatttcttcattgatggcacc

SEQ ID NO: 328104 - DNA, 75 bp, synthetic construct
  source 1..75: mol_type = other DNA
gttcccttcatcatttccggtactctccgttgccgcacctgtcggctggaatcttccggcactggtgtcgctgat

SEQ ID NO: 328105 - DNA, 75 bp, synthetic construct
  source 1..75: mol_type = other DNA
atgtcattcagccattcttccctctcctctcaagtcaaatcagatctgacgtttcttcctgaagaaattcgccag

SEQ ID NO: 328106 - DNA, 75 bp, synthetic construct
  source 1..75: mol_type = other DNA
atgtcattcagccattcttccctctcctcacaagttaaatcacatctgacgtttcttcctgaagaaattcgccag

SEQ ID NO: 328107 - DNA, 75 bp, synthetic construct
  source 1..75: mol_type = other DNA
acgctgccgttgccaggttcagctttccggtctggatgttacatcttctgcgtaaagcccgggatcgcattatcc

SEQ ID NO: 328108 - DNA, 75 bp, synthetic construct
  source 1..75: mol_type = other DNA
tgtgttgtcctgcatagcaatgcgccgtaataccttacaccacggcgctggtgatggttattcctgctctttggc

SEQ ID NO: 328109 - DNA, 75 bp, synthetic construct
  source 1..75: mol_type = other DNA
gcgtcagctattgcatggggtactcgtgcctcaagttttttggattttccattaactgctttcgttgccatatct

SEQ ID NO: 328110 - DNA, 75 bp, synthetic construct
  source 1..75: mol_type = other DNA
ctggctaccgaatgttgaaattattgaaccagtatggctgaaagaagttatgttaacaatgttaggaaaatacct

SEQ ID NO: 328111 - DNA, 75 bp, synthetic construct
  source 1..75: mol_type = other DNA
gattatctggatcctgcgggctgatgaacgtgcgtatgctgccgatattgccatgcatcagtttttactgaatga

SEQ ID NO: 328112 - DNA, 75 bp, synthetic construct
  source 1..75: mol_type = other DNA
cgtgaaatctatagcaggcaaggatgttccaaaagacgcactgcgcgaattaaaatcagtcaaaaagcatgactg

SEQ ID NO: 328113 - DNA, 75 bp, synthetic construct
  source 1..75: mol_type = other DNA
gtgtgtgtgatcccaaacataagcacggggatgatagccgctatcaggctggtgggcaatgcaatcagtctggtt

SEQ ID NO: 328114 - DNA, 75 bp, synthetic construct
  source 1..75: mol_type = other DNA
atgtcattcagccattcttccctctcctcccaagttaaatcaaatctgacgtttcttcctgaagaaattcgccag

SEQ ID NO: 328115 - DNA, 75 bp, synthetic construct
  source 1..75: mol_type = other DNA
accgtccgctgacacacgaagaactgatgcgccatgtaccgagtatttttggggaaaaccgacatacctcccgaa

SEQ ID NO: 328116 - DNA, 75 bp, synthetic construct
  source 1..75: mol_type = other DNA
tacagccttctgttatccgcaccttcagctcccggggagatatgcgtgtggggacttccactgcaggcagcggga

SEQ ID NO: 328117 - DNA, 75 bp, synthetic construct
  source 1..75: mol_type = other DNA
tttgtgatgaagccgaccgacttttgcaactgaacattaatctgctccggcaaatggttgatgaaccggatgtgt

SEQ ID NO: 328118 - DNA, 75 bp, synthetic construct
  source 1..75: mol_type = other DNA
caactgcgtaacacgctgattcagagctctgaagatcataaacgcgatcagcaggcgcaggaacggcttaccggg

SEQ ID NO: 328119 - DNA, 75 bp, synthetic construct
  source 1..75: mol_type = other DNA
aatcgcagggaagcaattgaatatatagaggaaattgagtcaactgtgaccagcctgcaccgtgaggctgaagca

SEQ ID NO: 328120 - DNA, 75 bp, synthetic construct
  source 1..75: mol_type = other DNA
ccggacagccccgaaataaaattcagtgatcgcagggaagcccttgaactgatgacgcaaatcgaatcgaccgtg

SEQ ID NO: 328121 - DNA, 75 bp, synthetic construct
  source 1..75: mol_type = other DNA
gttcccttcatcatttccggtactccccatagccgcccctgccggctggaatcttccggcatttgtgtctctgat

SEQ ID NO: 328122 - DNA, 75 bp, synthetic construct
  source 1..75: mol_type = other DNA
ctgttacagcctgggtggcaaccctgttcccgtcatcatttccggtactccccgttgctgtgcctgtcggctgga

SEQ ID NO: 328123 - DNA, 75 bp, synthetic construct
  source 1..75: mol_type = other DNA
atgtcattcagccattcttccctctcctcccaagtgaaatcatatctgacgtttcttcctgaagaaattcgccag

SEQ ID NO: 328124 - DNA, 75 bp, synthetic construct
  source 1..75: mol_type = other DNA
gtggcgaaaaccggtcaacccgggacaagaatcatgcacaacaggcttttggtgacgccatcggccagagttttg

SEQ ID NO: 328125 - DNA, 75 bp, synthetic construct
  source 1..75: mol_type = other DNA
tctgcccggcattggtgaaacaccgcagcatgatcaggaataccggacactttatcgtcagctgctaccggaact

SEQ ID NO: 328126 - DNA, 75 bp, synthetic construct
  source 1..75: mol_type = other DNA
tctgcccggcactggcgaaacaccacagcatgatcaggaataccgggcactttacagtcagttactgcccgaact

SEQ ID NO: 328127 - DNA, 75 bp, synthetic construct
  source 1..75: mol_type = other DNA
actgggcagtcactacgggcggcttcgacagtgaaacagtacaggacgtcatgctgggagcggtggaacgccgct

SEQ ID NO: 328128 - DNA, 75 bp, synthetic construct
  source 1..75: mol_type = other DNA
gtgaatgcaaagcgtgtttaccggataatgagcgaaaataacctgttgttgttacatgacaaaccatcacgacag

SEQ ID NO: 328129 - DNA, 75 bp, synthetic construct
  source 1..75: mol_type = other DNA
tgggccaggcgtattctcagaaaggcgatcgcgctaatgcggtggcgaatctggaaaaagccctcgcgctggatc

SEQ ID NO: 328130 - DNA, 75 bp, synthetic construct
  source 1..75: mol_type = other DNA
ttgagttccgctgtgataacggagaaaaactgcgggtcacgttcgcgctggactgctgtgatcgtgaggcactgc

SEQ ID NO: 328131 - DNA, 75 bp, synthetic construct
  source 1..75: mol_type = other DNA
gccgccgcagtcgtcacactgatgatacggatgtgcttctccgtatacaccatgttatcggagagctgccaacgt

SEQ ID NO: 328132 - DNA, 75 bp, synthetic construct
  source 1..75: mol_type = other DNA
gatgttggggcttgaaccgaagaacacggcggtgcggagtccggagagtaacggcatagcagagagcttcgtgaa

SEQ ID NO: 328133 - DNA, 75 bp, synthetic construct
  source 1..75: mol_type = other DNA
tacgcgcacaaagcgccagcgaaaccattcgcgattatcgcagccaggctgaacaagttcgcgatgagttaaccg

SEQ ID NO: 328134 - DNA, 75 bp, synthetic construct
  source 1..75: mol_type = other DNA
aaggcatggtggagcgtgcattaaaaagccgtcgcaatcaaccgatgctgctggtggatattgccgttccgcgcg

SEQ ID NO: 328135 - DNA, 75 bp, synthetic construct
  source 1..75: mol_type = other DNA
gtgctgtgtctgtcgcttttgcggcttgtacgctggcgcggcagatctttgaatcgctctctacggtgacggtac

SEQ ID NO: 328136 - DNA, 75 bp, synthetic construct
  source 1..75: mol_type = other DNA
cgccggatggtcgtcaggcactgcaacaggcaagattgcaggcgacgaccggtcatgcagaagaagctgtggcga

SEQ ID NO: 328137 - DNA, 75 bp, synthetic construct
  source 1..75: mol_type = other DNA
gataacgcctcgctgaacacacagcggcgcgtggcgctggcacaggcgcagcttggcgataccgcagcggcgcag

SEQ ID NO: 328138 - DNA, 75 bp, synthetic construct
  source 1..75: mol_type = other DNA
ctgacccgtaacgacgagaaagatgactggctgaaacgcggcgtgcgcagcgatgcggcggacctctatcgccag

SEQ ID NO: 328139 - DNA, 75 bp, synthetic construct
  source 1..75: mol_type = other DNA
gttatcgctcgccacgggaatatctacggcagcaggccagtaatgggttaagtgataacaggtgtctggaaatat

SEQ ID NO: 328140 - DNA, 75 bp, synthetic construct
  source 1..75: mol_type = other DNA
gatgcgcttgcccgtatacaccatgttatcggagagctgcccacgtatggttatcgccgggtgtgggctctgctc

SEQ ID NO: 328141 - DNA, 75 bp, synthetic construct
  source 1..75: mol_type = other DNA
ctgggttatcgctcgccacaggaatatctgcggcagtgggccagtgatgggttaagtgataacaggtgtctggaa

SEQ ID NO: 328142 - DNA, 75 bp, synthetic construct
  source 1..75: mol_type = other DNA
ggcagtttccgctattagttggctattatcatcgcgaactgaaaaatctcattctggtttctgcgggtctgaatg

SEQ ID NO: 328143 - DNA, 75 bp, synthetic construct
  source 1..75: mol_type = other DNA
aggaagaggaaaggctttttcgcgactgggatgcaatggttgataaccctgccgcagcggcgaaattattacagg

SEQ ID NO: 328144 - DNA, 75 bp, synthetic construct
  source 1..75: mol_type = other DNA
taatctcaggccatgacaagccgcagccgccaggctgcctactcgagcgaaaaaccgctgtaccgccatcgaaac

SEQ ID NO: 328145 - DNA, 75 bp, synthetic construct
  source 1..75: mol_type = other DNA
tagcagagagcttcgtgaaaacgataaagcgtgactacatcagtatcatgcctaaaccagacgggttaacggcag

SEQ ID NO: 328146 - DNA, 75 bp, synthetic construct
  source 1..75: mol_type = other DNA
tcgagttccgctgtgataacggagaaaaactgcgagtcacgttcgcgctggactgctgtgaccgtgaagccatag

SEQ ID NO: 328147 - DNA, 75 bp, synthetic construct
  source 1..75: mol_type = other DNA
ttcgcgctggactgctgtgaccgggaggcactgcactgggcggtcactacgggcggcttcaacagtgaaacagta

SEQ ID NO: 328148 - DNA, 75 bp, synthetic construct
  source 1..75: mol_type = other DNA
gtctccagtggagtggctgacggataatggttcatgctaccgggctaatgaaacacgccagttcgcccggatgtt

SEQ ID NO: 328149 - DNA, 75 bp, synthetic construct
  source 1..75: mol_type = other DNA
atgagccggataatgaacgttgggttacgcccgctacgtgttggtgagttttcgacactggtacgccctaaaaat

SEQ ID NO: 328150 - DNA, 75 bp, synthetic construct
  source 1..75: mol_type = other DNA
tatagtgctattctctctcggaacccttgcctgtggtctggctcctggatatgcagtgatgtttattgctcgcat

SEQ ID NO: 328151 - DNA, 75 bp, synthetic construct
  source 1..75: mol_type = other DNA
taaagattatttcaaggcacatgatcgtaatgatgaagagtgccttctcgctgccgcattctcagaacaagtaaa

SEQ ID NO: 328152 - DNA, 75 bp, synthetic construct
  source 1..75: mol_type = other DNA
attggtcagctcgtcattatccctgtttttatggttgacagagaacatgtctggttgctcggattactgatattt

SEQ ID NO: 328153 - DNA, 75 bp, synthetic construct
  source 1..75: mol_type = other DNA
tatctcgctacgcctgtcgcagattttaaaactgaaacccggcgacgtcctgccgatagaaaaacccgatcgcat

SEQ ID NO: 328154 - DNA, 75 bp, synthetic construct
  source 1..75: mol_type = other DNA
acaaccagtgctggcggcgaaagtgatattcgtccgtacgatcccaatacccaacgacgggttgtgcgcgaacgt

SEQ ID NO: 328155 - DNA, 75 bp, synthetic construct
  source 1..75: mol_type = other DNA
tcagtccgggaatatcggcgtcagcggtaaaggcggtgcatcgtactggggaggcggtggacgcgcaggcgctgg

SEQ ID NO: 328156 - DNA, 75 bp, synthetic construct
  source 1..75: mol_type = other DNA
gggcatctgctgttccttgcgatcgaaaagatcaagggcggaccggtatccgagcgggttcaagacttttgttat

SEQ ID NO: 328157 - DNA, 75 bp, synthetic construct
  source 1..75: mol_type = other DNA
tgttatcgcattggctcgattctgctggtgctgttaatggggctcgcacttttcaatgatttctctcggttatga

SEQ ID NO: 328158 - DNA, 75 bp, synthetic construct
  source 1..75: mol_type = other DNA
atttcgcccaggggatcaccataataaaatgctgaggcctggcctttgcgtagtgcacgcatcacctcaatacct

SEQ ID NO: 328159 - DNA, 75 bp, synthetic construct
  source 1..75: mol_type = other DNA
tgtaaagctcgatttacgtcagtgggcgtttgagcctgataaagaagatccagtatcttctttggggattcgtcc

SEQ ID NO: 328160 - DNA, 75 bp, synthetic construct
  source 1..75: mol_type = other DNA
attgccgcaggtccggttgcaaacttcatttttgctatctttgcctactggctggtttttattattggtgtgcct

SEQ ID NO: 328161 - DNA, 75 bp, synthetic construct
  source 1..75: mol_type = other DNA
atgttatcgccctgatcccgttgggcggttatgtcaaaatgctggatgagcgcgcagaaccggtcgttccggaac

SEQ ID NO: 328162 - DNA, 75 bp, synthetic construct
  source 1..75: mol_type = other DNA
tcaacggtcaatatgcgttacggatagaacatttgattaacccgattttaaattctctgaacgaggaacagccca

SEQ ID NO: 328163 - DNA, 75 bp, synthetic construct
  source 1..75: mol_type = other DNA
agcagagagcttcgtgaaaacgataaagcgtgactacatcagtgtcatgcccaaaccagacgggttaacggcagc

SEQ ID NO: 328164 - DNA, 75 bp, synthetic construct
  source 1..75: mol_type = other DNA
agtggagtggctgacggataatggttcatgctaccgggctaatgaaacacggcagtttgcccggatgatgggtct

SEQ ID NO: 328165 - DNA, 75 bp, synthetic construct
  source 1..75: mol_type = other DNA
agtggagtggctgacggataatggttcatgctaccgggctaatgaaacacgtcagtttgcccggatgttgggtct

SEQ ID NO: 328166 - DNA, 75 bp, synthetic construct
  source 1..75: mol_type = other DNA
atgagtcagataatgaacgtcgggctacgcccactacgtgttggtaaattttcgacactgattcgccctaaaaat

SEQ ID NO: 328167 - DNA, 75 bp, synthetic construct
  source 1..75: mol_type = other DNA
tttgtcggattgatagcaccccatatatcacgttttattctacgtggcgggcagacgacattactgctggggagc

SEQ ID NO: 328168 - DNA, 75 bp, synthetic construct
  source 1..75: mol_type = other DNA
acgggcggcttcaacagtgaaacagtacaggacgtcatgctgggagcggtggaacgccgcttcggcaacgagctt

SEQ ID NO: 328169 - DNA, 75 bp, synthetic construct
  source 1..75: mol_type = other DNA
tgatggtattccagcaacgtaacgggcgtattgaccgctatgggcaaaaacatcagccccaaatccgctatctgc

SEQ ID NO: 328170 - DNA, 75 bp, synthetic construct
  source 1..75: mol_type = other DNA
gatgcggcaaaactgccggccacccaggtcaccgtaaaccgcaacgaaaccatcgccatccagtttgtggacggc

SEQ ID NO: 328171 - DNA, 75 bp, synthetic construct
  source 1..75: mol_type = other DNA
cgctgcgcggcacagggctggtggtgttctcaccgagtctggtgtttatcgccgtggataacctgtttggcggcg

SEQ ID NO: 328172 - DNA, 75 bp, synthetic construct
  source 1..75: mol_type = other DNA
agtggagtggctgacggataatggttcatgctaccgggctaatgaaacacgacagtttgcccggatggtgggtct

SEQ ID NO: 328173 - DNA, 75 bp, synthetic construct
  source 1..75: mol_type = other DNA
gaatggcatccgcatagtgcgctgggttatcgctcgccacgggaatatctgcggcagcgggcttgtaatgggtta

SEQ ID NO: 328174 - DNA, 75 bp, synthetic construct
  source 1..75: mol_type = other DNA
catgctgaaaaaaaggggattctcgctggctggatcacgggaacaaatctggattcagcctggcgaaaatccagg

SEQ ID NO: 328175 - DNA, 75 bp, synthetic construct
  source 1..75: mol_type = other DNA
ccttgttgcaggaacagagcgctcagcgggttggcgaaatactgttgattgacgccagtgagaacccggaaccgg

SEQ ID NO: 328176 - DNA, 75 bp, synthetic construct
  source 1..75: mol_type = other DNA
tggcgacagcagctatgtgaatttctgcaacggcggcaagcagttcgatgcgttgcttcaggaacagagtgcgca

SEQ ID NO: 328177 - DNA, 75 bp, synthetic construct
  source 1..75: mol_type = other DNA
tatgtactggtggtaacctccacgaccggccagggcgatcttcccgacagcattgtgccgctctttcagggaata

SEQ ID NO: 328178 - DNA, 75 bp, synthetic construct
  source 1..75: mol_type = other DNA
atgaaaattatcagttttgttctgccttgcttgctggtcctggctggttgttcaaccccttctcagccagaagca

SEQ ID NO: 328179 - DNA, 75 bp, synthetic construct
  source 1..75: mol_type = other DNA
gccatctttatccttgcaccgctgaatgaggaaacgctgttccgggggatcatgctgaacgtcttccgttcacgg

SEQ ID NO: 328180 - DNA, 75 bp, synthetic construct
  source 1..75: mol_type = other DNA
atgattcagtcacgtaataaatatctgcagtttatgctggttatgctggcagcctgggccattgcctggggggcc

SEQ ID NO: 328181 - DNA, 75 bp, synthetic construct
  source 1..75: mol_type = other DNA
attatcatgaacatgcaaaaacccgacgctgcaacgacatcattcatcccgggcgctgttgacgaggccaccctg

SEQ ID NO: 328182 - DNA, 75 bp, synthetic construct
  source 1..75: mol_type = other DNA
gcgggtaaggcgcttgagaacctgaacactaacgcctcccttgagcggatcatcccttacgccccggctctcttc

SEQ ID NO: 328183 - DNA, 75 bp, synthetic construct
  source 1..75: mol_type = other DNA
cagcatgtacaaccttaaagtggatgattatctgctcaaaccagtgaaaaaatgtatcttgaccgacaccatcaa

SEQ ID NO: 328184 - DNA, 75 bp, synthetic construct
  source 1..75: mol_type = other DNA
aaccgcaggggatttttgctaagccacagcaggatcaaacgaacacagcacacaaaggacggataccaccacaag

SEQ ID NO: 328185 - DNA, 75 bp, synthetic construct
  source 1..75: mol_type = other DNA
tatcgccatcagagaactggcgtttagcgcaggtgcattacgcgcggcagtagcgtcttatgtgcagtctccgcg

SEQ ID NO: 328186 - DNA, 75 bp, synthetic construct
  source 1..75: mol_type = other DNA
gaccaccactttctacatggttgttggcattgtgccgcgcgatgcgggcaacatcattattgatgatgacgatat

SEQ ID NO: 328187 - DNA, 75 bp, synthetic construct
  source 1..75: mol_type = other DNA
tatgctgaacgtcttccgttcacggtactgctggacgatgtggctgggggcgctgataacgtcgttgttgttcgt

SEQ ID NO: 328188 - DNA, 75 bp, synthetic construct
  source 1..75: mol_type = other DNA
gcctgtttgaaagctttacgtcctggagacacgctacttgtatggaaactggatcgtcttggacgagatctacgt

SEQ ID NO: 328189 - DNA, 75 bp, synthetic construct
  source 1..75: mol_type = other DNA
taagtttatcaccaccgactatttgcaacagtgcccagctgcgcaacgttggcgtaccgtggctggtcggtgcga

SEQ ID NO: 328190 - DNA, 75 bp, synthetic construct
  source 1..75: mol_type = other DNA
gtgcgatggctgtgctgtatgtcggtgaatttctgctcggtaaggcgctggccctgcctgcagaaccatttatga

SEQ ID NO: 328191 - DNA, 75 bp, synthetic construct
  source 1..75: mol_type = other DNA
ttgatcttacgcatcctgtatgatgcaagcagactaaccctatcaacgttggtattatttcccgcagacatgacc

SEQ ID NO: 328192 - DNA, 75 bp, synthetic construct
  source 1..75: mol_type = other DNA
cgacgtccaatgatgcaatggtgggctgattttgttatggctgctgatcgcggaagtatgattgaaggtggaata

SEQ ID NO: 328193 - DNA, 75 bp, synthetic construct
  source 1..75: mol_type = other DNA
cgggactgaagcgggcactgaagaaactaaaacccggtgacacgctgatggtctggaaactggacaggctggggc

SEQ ID NO: 328194 - DNA, 75 bp, synthetic construct
  source 1..75: mol_type = other DNA
acgctcaaccgctacccggaatgtcagccgaaagcggtgattgaaaattacgcgcaatatgcaggcgtaaaaccg

SEQ ID NO: 328195 - DNA, 75 bp, synthetic construct
  source 1..75: mol_type = other DNA
tagcgcgtgaaaacgtccgcaacctgacgccgtatcagtcggcgcgtcgtctgggcggtaacggcgatgtctggc

SEQ ID NO: 328196 - DNA, 75 bp, synthetic construct
  source 1..75: mol_type = other DNA
atcgcccgtttgctggctaatggcgagtcccgtaaacaaattgcactgatatttgatattggcctttccaccctt

SEQ ID NO: 328197 - DNA, 75 bp, synthetic construct
  source 1..75: mol_type = other DNA
aaactaaaacccggtgacacgctgatggtatggaaactggacaggctggggcgcagtatgcgccaccttgttgcg

SEQ ID NO: 328198 - DNA, 75 bp, synthetic construct
  source 1..75: mol_type = other DNA
tgaacgccaacgaataccccacagccgtggagtttcagcttactcagcaaacgctcaaccgctacccggaatgcc

SEQ ID NO: 328199 - DNA, 75 bp, synthetic construct
  source 1..75: mol_type = other DNA
ttttcgcactctgctggagttaacccgcggtaaagcgattgtggttgccgatgaagcctatattgagttttgccc

SEQ ID NO: 328200 - DNA, 75 bp, synthetic construct
  source 1..75: mol_type = other DNA
ttttgccgcatcttcaaaaaagatactggcatgaccccctctgattatcgaaaagtcgtgtccccgggaattaca

SEQ ID NO: 328201 - DNA, 75 bp, synthetic construct
  source 1..75: mol_type = other DNA
tgccaatgctctggcggataaaaaacagcttcatctacaaaaaatggctgttggcgacagcggagggcaatatta

SEQ ID NO: 328202 - DNA, 75 bp, synthetic construct
  source 1..75: mol_type = other DNA
gtgatgacgaaaccaaagcggctacgccaaaagcggtgaaagcggcactgattgaggctcgaaatcatcgtcata

SEQ ID NO: 328203 - DNA, 75 bp, synthetic construct
  source 1..75: mol_type = other DNA
tgaccaatagagggatggcaaaaattgccagtgctcttgcggataaaaaacaactgcatctgcaaaagatggccg

SEQ ID NO: 328204 - DNA, 75 bp, synthetic construct
  source 1..75: mol_type = other DNA
cggatgttgggacttgaaccgaagaacacggcggtgcggagtccggagagtaacggaatagcagagagcttcgtg

SEQ ID NO: 328205 - DNA, 75 bp, synthetic construct
  source 1..75: mol_type = other DNA
ctgggatgcaatggttgataaccctgccgcagcggcgaaattattacaggaattgcaaccgccggttcagcaggt

SEQ ID NO: 328206 - DNA, 75 bp, synthetic construct
  source 1..75: mol_type = other DNA
ggtatttcgctcgcttctggattcgtggttttcctcattgggagcgacaacggtactggcggctgatggggttga

SEQ ID NO: 328207 - DNA, 75 bp, synthetic construct
  source 1..75: mol_type = other DNA
aaagcaaatacagcgttgaataacaccactgcatctatatcagatgtcagactaggtgctaaatttgatcaggtt

SEQ ID NO: 328208 - DNA, 75 bp, synthetic construct
  source 1..75: mol_type = other DNA
atgacgcagccattggtcggaaaacagattctcattgttgaagatgagccggtatttcgctcgcttctggattcg

SEQ ID NO: 328209 - DNA, 75 bp, synthetic construct
  source 1..75: mol_type = other DNA
tgagatggtttttgcttgtctttatcccagcatgtttaactcccgggttgaggaagaagaaagactttttcgcga

SEQ ID NO: 328210 - DNA, 75 bp, synthetic construct
  source 1..75: mol_type = other DNA
gtggtgcgtgaagtctggcgcgggccactgaatactctgaaaatcgccccggaaaacccggcgtgggtgattgcc

SEQ ID NO: 328211 - DNA, 75 bp, synthetic construct
  source 1..75: mol_type = other DNA
atcagcaatcacgaaatcatcctgatgcgacgctgacacaaaaaggttttacgcagctcagtaatgcaactaata

SEQ ID NO: 328212 - DNA, 75 bp, synthetic construct
  source 1..75: mol_type = other DNA
ccataatcactccctaaccattaataataccggcaacaccgaaaacaccgtcaaaaatatcgcattcaactatat

SEQ ID NO: 328213 - DNA, 75 bp, synthetic construct
  source 1..75: mol_type = other DNA
cggtggaatccattcattatctgccagtcacgctgacaccagatactttgcgtgctgcgttcgaaaaagtggaat

SEQ ID NO: 328214 - DNA, 75 bp, synthetic construct
  source 1..75: mol_type = other DNA
tggacaccgctctccgtctggtataacgatgccggacaagcgctgcattatgagattttcgacgacgccaatttt

SEQ ID NO: 328215 - DNA, 75 bp, synthetic construct
  source 1..75: mol_type = other DNA
aatgcgcaggtcattcgcgacgtcttgttaaacagtagcgaacaggcgcttgccgatcagcaaaatcagcagtta

SEQ ID NO: 328216 - DNA, 75 bp, synthetic construct
  source 1..75: mol_type = other DNA
tgatgtgctggcgcaattaaccggggcgtatcagcgttttcatctgccgactacgctggcggagctggaagtgga

SEQ ID NO: 328217 - DNA, 75 bp, synthetic construct
  source 1..75: mol_type = other DNA
aaagtgattgcccatactttgcgtccggtggagtccattcattatctgccggtcacgctgacacctgatacgttg

SEQ ID NO: 328218 - DNA, 75 bp, synthetic construct
  source 1..75: mol_type = other DNA
gcagcgtggtgattggcgtcggcggcggcgcactgctcgacaccgcgaaagccctcgcccgccgtctcggtctgc

SEQ ID NO: 328219 - DNA, 75 bp, synthetic construct
  source 1..75: mol_type = other DNA
aaattcgcggcgagatcctcacgcagccttacccgacggcattccgggtacgcagcgcgctggatatggaacaaa

SEQ ID NO: 328220 - DNA, 75 bp, synthetic construct
  source 1..75: mol_type = other DNA
attcaatgatgccaataagcgtaccgcgctaaacagtgcgctgttatttctacgccgtaacggggtgcaggtatt

SEQ ID NO: 328221 - DNA, 75 bp, synthetic construct
  source 1..75: mol_type = other DNA
atgtcagatccgggtagggcagaggccattatcgggagagttcaggccagagttgcctacgaagatatcaccgac

SEQ ID NO: 328222 - DNA, 75 bp, synthetic construct
  source 1..75: mol_type = other DNA
tcgtcggcccggctaactacttttcacatccaggaagtttcaatcacctgcacgattttttcactgatgaacaac

SEQ ID NO: 328223 - DNA, 75 bp, synthetic construct
  source 1..75: mol_type = other DNA
cgtcggtggcggcgcactgctcgacaccgcgaaagccctcgcccgccgtctcggtctgccgtttgttgccgttcc

SEQ ID NO: 328224 - DNA, 75 bp, synthetic construct
  source 1..75: mol_type = other DNA
gcaatcacctgctgcccacgctgtttgaccgcctgtgtgatgatgccccaaaccagaaacgcgaccacgatatca

SEQ ID NO: 328225 - DNA, 75 bp, synthetic construct
  source 1..75: mol_type = other DNA
gtcgctggactacctgttgaccaacggcggcgatgaggtggttaaaatgctgaacgacccggtaattcatggcga

SEQ ID NO: 328226 - DNA, 75 bp, synthetic construct
  source 1..75: mol_type = other DNA
atgaatctacagaacattctaaataaactatctccaaaaaaacacgcgtacgaaatcgaaggcgaaactatctat

SEQ ID NO: 328227 - DNA, 75 bp, synthetic construct
  source 1..75: mol_type = other DNA
atggtggtaacaactgatgttctacaaaagtctattgatcttttagaaggtaacgaaagtgcagcattaaactgg

SEQ ID NO: 328228 - DNA, 75 bp, synthetic construct
  source 1..75: mol_type = other DNA
tttacgttgcaatcggaaattatgcgactggtgtaaatattcaatgggattataccagtaatgccagcgtaacga

SEQ ID NO: 328229 - DNA, 75 bp, synthetic construct
  source 1..75: mol_type = other DNA
acagcacttccgagtcacaggcggcaacgccaaaagccgttaaggccgcgtatgacctggctaacgggaaataca

SEQ ID NO: 328230 - DNA, 75 bp, synthetic construct
  source 1..75: mol_type = other DNA
cgcaccaatcccgtggccatcagataccgttccgtctggttatgccctgatgcaggggcagacttttgacaaatc

SEQ ID NO: 328231 - DNA, 75 bp, synthetic construct
  source 1..75: mol_type = other DNA
tcttcaggtcaggctccggtcgttctgaccagcaataaagtcggtacatatacggtgactgcatcgttccataac

SEQ ID NO: 328232 - DNA, 75 bp, synthetic construct
  source 1..75: mol_type = other DNA
ttctgcacgatatatcaggcaatccgatcaaagtttctgaagggctggaatttgtgcagtcaggtaccaacgtgc

SEQ ID NO: 328233 - DNA, 75 bp, synthetic construct
  source 1..75: mol_type = other DNA
gtgtacttcgccttaaaaagcggctctgccacattaacgtcattaacagcggtgaccgatcaaaacggaatcgcg

SEQ ID NO: 328234 - DNA, 75 bp, synthetic construct
  source 1..75: mol_type = other DNA
aacaaccgtcgccgtggtgggtacatttatgggtctgctatcgcaacccatttaatattttactcaccattctcg

SEQ ID NO: 328235 - DNA, 75 bp, synthetic construct
  source 1..75: mol_type = other DNA
gacgccgatgcataaagaacgcatcgtaacgttgctgaagcgcgaagggcatgtggttggctttatgggcgatgg

SEQ ID NO: 328236 - DNA, 75 bp, synthetic construct
  source 1..75: mol_type = other DNA
actgacctaccgacaactacattcccttcgcaggggttcaccggggcgtattatcagttgaataatgacaacttt

SEQ ID NO: 328237 - DNA, 75 bp, synthetic construct
  source 1..75: mol_type = other DNA
actgtcggtattggtgcacacacgcactcggttgcgattggctcacatggacacaccatcaccgttaacgctgct

SEQ ID NO: 328238 - DNA, 75 bp, synthetic construct
  source 1..75: mol_type = other DNA
taaaatcagcgatgacgatccgcattaccacaccgaccacctccactggtggtggaacaactaacgcccagttta

SEQ ID NO: 328239 - DNA, 75 bp, synthetic construct
  source 1..75: mol_type = other DNA
gggcgcacacgcacagtgtgagcggtacagccgcaagtgccggaaaccatactcatagtgtcacaggcgcatcag

SEQ ID NO: 328240 - DNA, 75 bp, synthetic construct
  source 1..75: mol_type = other DNA
ctgaaacggcagcagaacagagtgcctccgcagcagcaggctcaaaaacagcggctgcattatctgccagtgccg

SEQ ID NO: 328241 - DNA, 75 bp, synthetic construct
  source 1..75: mol_type = other DNA
gggagcatttaaccatccatactggatgtgcaagggttcctggtcttatggcaataataaaatcattactgatac

SEQ ID NO: 328242 - DNA, 75 bp, synthetic construct
  source 1..75: mol_type = other DNA
tggacgccagcataaccgcaaaacccttttttgaacgttatggttttcagacagttaagcagcagcgcgttgaat

SEQ ID NO: 328243 - DNA, 75 bp, synthetic construct
  source 1..75: mol_type = other DNA
attaagtctgaatccgaacttacggtggacgcaagcataaccgcaaaacccttttttgaacgttatggttttcag

SEQ ID NO: 328244 - DNA, 75 bp, synthetic construct
  source 1..75: mol_type = other DNA
atgaataacatacaaataagaaactatcagcctggtgattttcagcaactatgcgctattttccttcgagctgtt

SEQ ID NO: 328245 - DNA, 75 bp, synthetic construct
  source 1..75: mol_type = other DNA
ggcagctggcagtgcgacggcggcagctcagagcaaaagtacggcggaatccgcggcaacgcgcgctgagacagc

SEQ ID NO: 328246 - DNA, 75 bp, synthetic construct
  source 1..75: mol_type = other DNA
gcgtcattctgttggtggaaggattcccgccgtcacatgccgggaccatcaccgtgtatgaagattctcaacccg

SEQ ID NO: 328247 - DNA, 75 bp, synthetic construct
  source 1..75: mol_type = other DNA
caacgccaaaagccgttaaggccgcgtatgacctggctaacgggaaatataccgctcaggacgctacgacagcac

SEQ ID NO: 328248 - DNA, 75 bp, synthetic construct
  source 1..75: mol_type = other DNA
tatacgaaatccgtgtgaagagttggtgggtgaacgccggcgaggctttcatgatatacagccttgctgaaaatt

SEQ ID NO: 328249 - DNA, 75 bp, synthetic construct
  source 1..75: mol_type = other DNA
ctgccagacggacagccagtgaatgatattcacaccggactggaagcgttaagccaacaagcccctgcacatcct

SEQ ID NO: 328250 - DNA, 75 bp, synthetic construct
  source 1..75: mol_type = other DNA
ccgctacgtccacgtttcgcggttctcgccagcggcagtttctttagttttttttgggggcggactggtagggga

SEQ ID NO: 328251 - DNA, 75 bp, synthetic construct
  source 1..75: mol_type = other DNA
gcggcgcaaccatggcagcagttcggtgtaaccactgatgaggcactacgcccatcgcaggcaggccagacggta

SEQ ID NO: 328252 - DNA, 75 bp, synthetic construct
  source 1..75: mol_type = other DNA
tgagtggtatcgaagtgatttttttgcggcgcaaccatggcagcagttcggtgtaaccactgatgagacgctacg

SEQ ID NO: 328253 - DNA, 75 bp, synthetic construct
  source 1..75: mol_type = other DNA
gagaacctgtttgccatcggttcggtgctgggcggatttgatcccatcgcccagggatgcggcggcggtgtttgt

SEQ ID NO: 328254 - DNA, 75 bp, synthetic construct
  source 1..75: mol_type = other DNA
ctggatgttctgcgcaacaatgcgactgaattccgcgccgtgaatattgcgcgttttcttgataacgaagaaaac

SEQ ID NO: 328255 - DNA, 75 bp, synthetic construct
  source 1..75: mol_type = other DNA
cagaaagtgatcgtcaaacatctggatgctattcagaactttggcgcaatggatattctgtgcactgataaaacc

SEQ ID NO: 328256 - DNA, 75 bp, synthetic construct
  source 1..75: mol_type = other DNA
atcgaccagctggtgcccggcgatattataaaactggcggcgggggatatgatcccggcagatttacgtatcttg

SEQ ID NO: 328257 - DNA, 75 bp, synthetic construct
  source 1..75: mol_type = other DNA
atgtttaaagaaatttttacccggttcattcgccatttaccttcccgtctggttcatcgtgatccattgcctggc

SEQ ID NO: 328258 - DNA, 75 bp, synthetic construct
  source 1..75: mol_type = other DNA
tgcccgcgaagaaaatatgcgtagtgggaataagtggcctgatggattttcaggcacacctggcggcagcctcgt

SEQ ID NO: 328259 - DNA, 75 bp, synthetic construct
  source 1..75: mol_type = other DNA
tttgctatcaagcgagtaacaaaaatcgatgaacgttttttcgatttgttgtatctgcgtgccgtagttaaggga

SEQ ID NO: 328260 - DNA, 75 bp, synthetic construct
  source 1..75: mol_type = other DNA
accagaccgggcttaaaaacctgctcgatacagcggtgctcgaaggtacggatgaagagtcagcgcgctcgctgg

SEQ ID NO: 328261 - DNA, 75 bp, synthetic construct
  source 1..75: mol_type = other DNA
tcgccagaagtccccgtctggccgctgcccgcgaagaaaatatgtgtagtgggaattagcggactgatggatttt

SEQ ID NO: 328262 - DNA, 75 bp, synthetic construct
  source 1..75: mol_type = other DNA
tgatccgcttctacgtcgcgctacttgccgcgatgggggcaccattgcgcccgcgcccacggctgccggaaatgg

SEQ ID NO: 328263 - DNA, 75 bp, synthetic construct
  source 1..75: mol_type = other DNA
agcaactggctctggcactgctgcgcaaggtcggcgtgcgcatgctggtgatcgacgagctgcacaacgtgctgg

SEQ ID NO: 328264 - DNA, 75 bp, synthetic construct
  source 1..75: mol_type = other DNA
catggctcgctacctgctcacacgcagcgagggcaccataggggaactggcgcacttgctgatggcggcggccat

SEQ ID NO: 328265 - DNA, 75 bp, synthetic construct
  source 1..75: mol_type = other DNA
ttatgagttttcaagctctgcctcctgggtcgatgttgatgctaccggtaaagtgacatttaaaaatgtcggcag

SEQ ID NO: 328266 - DNA, 75 bp, synthetic construct
  source 1..75: mol_type = other DNA
atgagcggtacagtatcagtcaatggtactgacctaccgacaactacattcccttcgcaggggttcaccggggcg

SEQ ID NO: 328267 - DNA, 75 bp, synthetic construct
  source 1..75: mol_type = other DNA
gcgatcaaccaccgcacgctcagcatggccgattacaccggcccaagcgagcggcgtcggcaattcgagcgggaa

SEQ ID NO: 328268 - DNA, 75 bp, synthetic construct
  source 1..75: mol_type = other DNA
gacgactaagtacctatctgtcccggttccattcccgccgccttgggttatatgaagaaaatggtgttgtttact

SEQ ID NO: 328269 - DNA, 75 bp, synthetic construct
  source 1..75: mol_type = other DNA
ttctgatggccgacaccgcgctgaagtccgccaatgtggatgtcgtggcatacagctcccccgctcaaggcacca

SEQ ID NO: 328270 - DNA, 75 bp, synthetic construct
  source 1..75: mol_type = other DNA
tcgccagaagtccccgtctggccgttgcccgcgaagaaaatatgtgtggtcgggataagcggcctgatggatttt

SEQ ID NO: 328271 - DNA, 75 bp, synthetic construct
  source 1..75: mol_type = other DNA
tatgtggacgagctgcaagtcaaagagctttattttgacaaaattaaagccattgacccgctctctcgtcagttc

SEQ ID NO: 328272 - DNA, 75 bp, synthetic construct
  source 1..75: mol_type = other DNA
gtcatggacttaaagcccgtcttaagccgtggacgcagggggaagagtttggctgggtgttcgacaatcgggaag

SEQ ID NO: 328273 - DNA, 75 bp, synthetic construct
  source 1..75: mol_type = other DNA
gcagattcgccggagcgtctggtgaaggacaccaatattgtaacgacgaccctggaggatttagggctgatcgta

SEQ ID NO: 328274 - DNA, 75 bp, synthetic construct
  source 1..75: mol_type = other DNA
ggtggctgaaacggcgtattttttattatacaactccctttttctcttccttgttagctctttataaaggaccaa

SEQ ID NO: 328275 - DNA, 75 bp, synthetic construct
  source 1..75: mol_type = other DNA
caacagtaatgaactggacaaggcgtttcattctgacaccgggctgttctggctgggcagcctggactatggctt

SEQ ID NO: 328276 - DNA, 75 bp, synthetic construct
  source 1..75: mol_type = other DNA
gactgcggagcgtgatgctctgcgagaaaacataggcggtgacaacacccgtgcagctgctgatatttacttcca

SEQ ID NO: 328277 - DNA, 75 bp, synthetic construct
  source 1..75: mol_type = other DNA
cgttcccacacgcagcactggcagcactggcggaacttctagtgcaaaaagaagagaatagttggcgcattatgc

SEQ ID NO: 328278 - DNA, 75 bp, synthetic construct
  source 1..75: mol_type = other DNA
ttgcgcatggctgaaaagacgacttttttattatacaacaccgtttttttcatcgttgctggcctttcataaggg

SEQ ID NO: 328279 - DNA, 75 bp, synthetic construct
  source 1..75: mol_type = other DNA
cccgtaaaagcgttatgttgacatttgatgatggataccttgacaactggtttcaggtatatcctttattaaacg

SEQ ID NO: 328280 - DNA, 75 bp, synthetic construct
  source 1..75: mol_type = other DNA
aataaaaacatggattactcaaaggtgatggcgttctaccatccatttaaagtgcgattttatgaatactattca

SEQ ID NO: 328281 - DNA, 75 bp, synthetic construct
  source 1..75: mol_type = other DNA
tggaagccgcagagaagcgcattgctgagctggagttgcgggaggttgtgcttccgcaatgctatagcatgttgc

SEQ ID NO: 328282 - DNA, 75 bp, synthetic construct
  source 1..75: mol_type = other DNA
tagacttccgtaactggcttaaagttggggcgacgctacttggactgctgtttattatgtccagcgtggtggtga

SEQ ID NO: 328283 - DNA, 75 bp, synthetic construct
  source 1..75: mol_type = other DNA
tgccacctctgtggcgctgatgattctgatattgcagataacggcgcgtggggttctgaggctgtaacagcatgg

SEQ ID NO: 328284 - DNA, 75 bp, synthetic construct
  source 1..75: mol_type = other DNA
ggcagcaatccttaacgctgctaaacgcgcatatgaagaatcagcaagcgcagctggcattcgcatcaaaggaga

SEQ ID NO: 328285 - DNA, 75 bp, synthetic construct
  source 1..75: mol_type = other DNA
tcacgaggattaccaaacggtaatggcatacaaagtttctgaagtcatcgctgcaatccgctccgctggcattcg

SEQ ID NO: 328286 - DNA, 75 bp, synthetic construct
  source 1..75: mol_type = other DNA
ctatgaggttcactacgaacttcgtgacaatgacatttatatagtcgatctctggcataccaaagaagaacgctg

SEQ ID NO: 328287 - DNA, 75 bp, synthetic construct
  source 1..75: mol_type = other DNA
acaaaggcaatacgcctgcgcaggtgccaaaacacatggcttctctgtgggctgactacaccttctttgacggcc

SEQ ID NO: 328288 - DNA, 75 bp, synthetic construct
  source 1..75: mol_type = other DNA
cggcattagcgccagcggataaaggccattatctggcacgtaaatacgtcgttgatgatgagaagctgcaaaact

SEQ ID NO: 328289 - DNA, 75 bp, synthetic construct
  source 1..75: mol_type = other DNA
gccagcagtgtgcagctatagcacctgcggataaaggtcactacctggcgcggaaatacgttgttgatgatgaga

SEQ ID NO: 328290 - DNA, 75 bp, synthetic construct
  source 1..75: mol_type = other DNA
acgctggaactgttcgaaaaagtgctcggtccgaccaccaccacgctggcatggaagaaagcgcgcctgattaac

SEQ ID NO: 328291 - DNA, 75 bp, synthetic construct
  source 1..75: mol_type = other DNA
atctcggctgcggtaatggcgttattggcctgacgctgcttgataaaaacccgcaggcgaaagtggtgtttgtcg

SEQ ID NO: 328292 - DNA, 75 bp, synthetic construct
  source 1..75: mol_type = other DNA
ctgttcgatcgtgaatacgtcgccagctgctttaacacttatggctgcttctggggcgcagaacgtcaggtcgtt

SEQ ID NO: 328293 - DNA, 75 bp, synthetic construct
  source 1..75: mol_type = other DNA
aggcactgttgaaactgatcgaaggtactgttgctgccgttccaccgcagggcgggcgtaagcatccgcagcagg

SEQ ID NO: 328294 - DNA, 75 bp, synthetic construct
  source 1..75: mol_type = other DNA
cattggttttggcgcgacggtaaaagcgaaatctgacaaagcaagtgaaggcgagctgctggcgcaggttgaacc

SEQ ID NO: 328295 - DNA, 75 bp, synthetic construct
  source 1..75: mol_type = other DNA
tccatggaagacgtcgaaaaagtggttatcgacgagtcggtaattgatggtcaaagcaaaccgttgctgatttat

SEQ ID NO: 328296 - DNA, 75 bp, synthetic construct
  source 1..75: mol_type = other DNA
tgctcggatccgctgtataccaaagacgacgatgcactcaaggcgagtccatgtttaagtatcccgcagtcagaa

SEQ ID NO: 328297 - DNA, 75 bp, synthetic construct
  source 1..75: mol_type = other DNA
aattctggatatcaaaaatcagggagttatcgggaacgttaacgctgtattcccggccctctatcgcccaatgct

SEQ ID NO: 328298 - DNA, 75 bp, synthetic construct
  source 1..75: mol_type = other DNA
aatcagctggaagaagaattgggcattcagttgtttgttcgttcccatcgcaaatcaggctgtaattcgtgttgc

SEQ ID NO: 328299 - DNA, 75 bp, synthetic construct
  source 1..75: mol_type = other DNA
cggtatttaatttctttgtgacatccggttctggtcaggcggcgttaaccatgccgttactggcaccgcttggcg

SEQ ID NO: 328300 - DNA, 75 bp, synthetic construct
  source 1..75: mol_type = other DNA
aagcagacccgtctggtgcatgaggtgtggcgacatactgttaatcgcgtcatcctggacgcaacacatcagaat

SEQ ID NO: 328301 - DNA, 75 bp, synthetic construct
  source 1..75: mol_type = other DNA
agcagccacttctgcatccactgcgacgacgaaagcgtcagaagccgccacttcagccagagatgcggcggcctc

SEQ ID NO: 328302 - DNA, 75 bp, synthetic construct
  source 1..75: mol_type = other DNA
aacagtacgtctgaaacgctggcggcaacgccaaaggcagtaaaagcagcctatgaccttgctaacgggaaatat

SEQ ID NO: 328303 - DNA, 75 bp, synthetic construct
  source 1..75: mol_type = other DNA
aatattcaatgggattataccagtaatgccagcgtaacgattcatacgtcaccagcatattctgctaataagccg

SEQ ID NO: 328304 - DNA, 75 bp, synthetic construct
  source 1..75: mol_type = other DNA
ccgtattgtctcaggaacaggacggcattaaatcgcacacccacagcgccagcgcatccagtactgatttgggga

SEQ ID NO: 328305 - DNA, 75 bp, synthetic construct
  source 1..75: mol_type = other DNA
cgaccccgaaagcggttaaagctgctaatgacaatgcaaacgggcgtgtgccctctggacgtaaggttaatggca

SEQ ID NO: 328306 - DNA, 75 bp, synthetic construct
  source 1..75: mol_type = other DNA
gcggatataacactgacgccgaaagatattggtacgcttaactcaacaacaatgtccttcagcggtggtgctggt

SEQ ID NO: 328307 - DNA, 75 bp, synthetic construct
  source 1..75: mol_type = other DNA
ggcactaaatccacgaataacaccggggctcatacgcacagtctgagcggctctacaagctcggccggagcacac

SEQ ID NO: 328308 - DNA, 75 bp, synthetic construct
  source 1..75: mol_type = other DNA
cgccagcagcgcagcttcctcggcaacggcggcaggaaattccgcgaaggcggcaaaaacgtccgagacgaacgc

SEQ ID NO: 328309 - DNA, 75 bp, synthetic construct
  source 1..75: mol_type = other DNA
gtgcagcctcctcggcaacagcggcaggaaattccgcgaaggcggcaaaaacgtccgagacgaacgctaagtctt

SEQ ID NO: 328310 - DNA, 75 bp, synthetic construct
  source 1..75: mol_type = other DNA
tgatgcaggggcagacttttgacaaatctgcatacccgaaacttgcagccgcttatccgtcaggcgtgatccctg

SEQ ID NO: 328311 - DNA, 75 bp, synthetic construct
  source 1..75: mol_type = other DNA
tgcgtctgcttcaaaagatgaggcgaccagacaagcgtcagcagcgaggggcagcgccacgacggcatccacgaa

SEQ ID NO: 328312 - DNA, 75 bp, synthetic construct
  source 1..75: mol_type = other DNA
gtactgcaaatagtgctggcgcacatactcataccgttccattaaggagaccaaacagtggaggtatgaatttcg

SEQ ID NO: 328313 - DNA, 75 bp, synthetic construct
  source 1..75: mol_type = other DNA
ttttttgggagtagcggaagggggagttttaatgcgcctgagtcgtggacaaccatgcccgggaaaagcacttgc

SEQ ID NO: 328314 - DNA, 75 bp, synthetic construct
  source 1..75: mol_type = other DNA
ctggcggcaaccccaaaagcggtcaaagtggtaatggatgaggctcagagcaaattatcaaaggatgaattttta

SEQ ID NO: 328315 - DNA, 75 bp, synthetic construct
  source 1..75: mol_type = other DNA
actctgattggcctgatctttaccatggtgtacgcctcacgagtgaaaaagaatcctcttctgtcacgcgtgcat

SEQ ID NO: 328316 - DNA, 75 bp, synthetic construct
  source 1..75: mol_type = other DNA
gcaatctacgacaccaccatttaaagttcagttcggcagctccgtcagcaatgaaggctggaataccagatatgg

SEQ ID NO: 328317 - DNA, 75 bp, synthetic construct
  source 1..75: mol_type = other DNA
gaaaatcctggcggtgactccgaagagagcggctctgttattaaactggatattccttccggcgaagcgaaacag

SEQ ID NO: 328318 - DNA, 75 bp, synthetic construct
  source 1..75: mol_type = other DNA
aggaaattccgtgaaggcggcaaaaacgtccgagacgaatgctaagtcttctgaaacggcagcggaacagagcgc

SEQ ID NO: 328319 - DNA, 75 bp, synthetic construct
  source 1..75: mol_type = other DNA
cgcgtcaacaagtgccgggcaggcctcagccagtgccaccgctgccggaaaatcggcagaaagcgccgcatcgtc

SEQ ID NO: 328320 - DNA, 75 bp, synthetic construct
  source 1..75: mol_type = other DNA
gaaaaccacatcgtcgtttgattacggcactaaatccacgaataacaccggggctcatacgcacagtctgagcgg

SEQ ID NO: 328321 - DNA, 75 bp, synthetic construct
  source 1..75: mol_type = other DNA
cccgccatcgcatgccgggaccatcaccgtgtatgaagactcacaaccgggtacgctgaatgattttctcggtgc

SEQ ID NO: 328322 - DNA, 75 bp, synthetic construct
  source 1..75: mol_type = other DNA
aacccatgcgactgatgctgcaggctcagcacgcgcagccagcacgtcagccggacaggccgcttcgtcggctca

SEQ ID NO: 328323 - DNA, 75 bp, synthetic construct
  source 1..75: mol_type = other DNA
cgggagtcaacctactggaatgtttccggcagggagtactcaagttagcgggactaatcaggttggtatcagtgg

SEQ ID NO: 328324 - DNA, 75 bp, synthetic construct
  source 1..75: mol_type = other DNA
atgattgcccgaggcgatcaggcggcgaatttttgcgcgcgcgcacggtcgcggcggcgcgcgataaaggcgatg

SEQ ID NO: 328325 - DNA, 75 bp, synthetic construct
  source 1..75: mol_type = other DNA
cgtcgcaaccggacacaggccacgttcaggctgatgagtcagaacttcaggccacaacagatacagtagaaccgg

SEQ ID NO: 328326 - DNA, 75 bp, synthetic construct
  source 1..75: mol_type = other DNA
cagcaacgcaaagaatacctctgccgccaccactgacgaccgaaatgtattagcacaagaacccaatgctgacgc

SEQ ID NO: 328327 - DNA, 75 bp, synthetic construct
  source 1..75: mol_type = other DNA
tgctgtgggcggtgggtgatatactgaattatttctggggaagtaactctttcactttcgtcatgttctcttgtg

SEQ ID NO: 328328 - DNA, 75 bp, synthetic construct
  source 1..75: mol_type = other DNA
aacgtcctgacggctccaggacgattatcgagaaatttgaagcggagtcaggggatgtcagttttgccatcgtgc

SEQ ID NO: 328329 - DNA, 75 bp, synthetic construct
  source 1..75: mol_type = other DNA
ttttgaccgatggaaaacctgaaattgatgatgataccgggctggtgagttatcacgatcagcaaggtaacgcga

SEQ ID NO: 328330 - DNA, 75 bp, synthetic construct
  source 1..75: mol_type = other DNA
gagaatatcagaagtgattaatttgactggcttacccaagtcaacaatttatctaaagataaagaatgatgaatt

SEQ ID NO: 328331 - DNA, 75 bp, synthetic construct
  source 1..75: mol_type = other DNA
atgacggataccctggctatgacgtcgaataccaggactacagcgcggaatatgaggactatgatgccagtgccc

SEQ ID NO: 328332 - DNA, 75 bp, synthetic construct
  source 1..75: mol_type = other DNA
tttatggcgatatgtgtattgtcattaactaatctatcaaaattttctaggatatcggtcattgttatcacgtta

SEQ ID NO: 328333 - DNA, 75 bp, synthetic construct
  source 1..75: mol_type = other DNA
cacagccccggaaacggagctggcgacactggatacaccttatgacatccacactgaagagacagaaaaccaggc

SEQ ID NO: 328334 - DNA, 75 bp, synthetic construct
  source 1..75: mol_type = other DNA
cagacctggaaagagtggtctgacagccaaaaggcggaggacaggcaggaaaaaactctgcaacaggcacaatct

SEQ ID NO: 328335 - DNA, 75 bp, synthetic construct
  source 1..75: mol_type = other DNA
tggtcatcaatgccctgacggataacggtctgcagtttgccggttacggtgaagctgttaaccatgatgagaata

SEQ ID NO: 328336 - DNA, 75 bp, synthetic construct
  source 1..75: mol_type = other DNA
agagaaactctcttacggtattggcgacctggcctctaacatcctgctggatatcggtacgctttatcttttgaa

SEQ ID NO: 328337 - DNA, 75 bp, synthetic construct
  source 1..75: mol_type = other DNA
ggtgtgaacagtgcttcgcaaataaaatataatacaattaatgattttggctcttcaggtgaatatctgactcgc

SEQ ID NO: 328338 - DNA, 75 bp, synthetic construct
  source 1..75: mol_type = other DNA
tgcactagcgagtggggttgggcttagttctactcgggtgatttatgacggtaataagaaagaagcatcgctaac

SEQ ID NO: 328339 - DNA, 75 bp, synthetic construct
  source 1..75: mol_type = other DNA
ggctgaacgagcaattgccctgttcattaatgttactgccgacattaccaccttcagtgctgggcattcgtctgc

SEQ ID NO: 328340 - DNA, 75 bp, synthetic construct
  source 1..75: mol_type = other DNA
aagcaacctcgaggccatgaaacagttacgtttccagcgtcaaaataaccaaattgtggttaataacgactccgc

SEQ ID NO: 328341 - DNA, 75 bp, synthetic construct
  source 1..75: mol_type = other DNA
tctggttcgaaaggggggatctcacactgtacggcaggcggcaaatttgtctgtaatgatggttctattgtaagc

SEQ ID NO: 328342 - DNA, 75 bp, synthetic construct
  source 1..75: mol_type = other DNA
attcgcgagccgattctcggccttgatgtgctacaaaccgctacgcggggtgaatggtataagggcgattttttt

SEQ ID NO: 328343 - DNA, 75 bp, synthetic construct
  source 1..75: mol_type = other DNA
agggtttgcgtcagctcatttttatctggccttgtgcgctggctattattgccgctctgacaatgggattctttt

SEQ ID NO: 328344 - DNA, 75 bp, synthetic construct
  source 1..75: mol_type = other DNA
gaaaattccgcccctttattttatacgctgcggttccggctgcattcattgcgacattacagtttattgctacca

SEQ ID NO: 328345 - DNA, 75 bp, synthetic construct
  source 1..75: mol_type = other DNA
gatttgtaccgtagcatttattccattgcagtcgcttttttctgactccactgtcggttatgcctgcgcggcact

SEQ ID NO: 328346 - DNA, 75 bp, synthetic construct
  source 1..75: mol_type = other DNA
tcgccagaagttcctgtctggccgttgcccgcgaagaaaatatgtgtggtcgggataagcggcctgatggatttt

SEQ ID NO: 328347 - DNA, 75 bp, synthetic construct
  source 1..75: mol_type = other DNA
gggggcttcgattgaattacttaatcattattttgggttgatcccttctcaggtttctgcccgccggcgcttatc

SEQ ID NO: 328348 - DNA, 75 bp, synthetic construct
  source 1..75: mol_type = other DNA
aatgagcgcgcgcagctcgcggcttaccgccagggtggtgcaaccatagggctattgatttgtaccgtggcgttt

SEQ ID NO: 328349 - DNA, 75 bp, synthetic construct
  source 1..75: mol_type = other DNA
atatatttatcatacttgtcgtttctccagttttaactctgttttctctctttgggttatttcctttctatcctg

SEQ ID NO: 328350 - DNA, 75 bp, synthetic construct
  source 1..75: mol_type = other DNA
ctaaatacaccaatgaattaattgtactatctgatgaatatgtaggcattgagccatatctgatagggtttagcc

SEQ ID NO: 328351 - DNA, 75 bp, synthetic construct
  source 1..75: mol_type = other DNA
ctggaggtttatttgggtagcaaatgataatctgtcatcgtttgttgtgtctaaatactccaatgaattaattgt

SEQ ID NO: 328352 - DNA, 75 bp, synthetic construct
  source 1..75: mol_type = other DNA
atagaggcatcttcagaaaacaaatcagcgagcatcactccgaaagatgatttcgaagaacaaaccagacgcaat

SEQ ID NO: 328353 - DNA, 75 bp, synthetic construct
  source 1..75: mol_type = other DNA
aggtttgcaaatccttcaatgtctcgcgcaagccgacaatgcaggattactgggaaaactccctgttgagatgaa

SEQ ID NO: 328354 - DNA, 75 bp, synthetic construct
  source 1..75: mol_type = other DNA
aagcaacagccacaggtatacgaactggcagtatgacgattgattatcacgacgctatacgccgtctggatgctg

SEQ ID NO: 328355 - DNA, 75 bp, synthetic construct
  source 1..75: mol_type = other DNA
cggtttaagaatcatgcaatgtattgctgaagccgatgatgcagggttgctgggacgattttcagtcgatatgaa

SEQ ID NO: 328356 - DNA, 75 bp, synthetic construct
  source 1..75: mol_type = other DNA
actattctggttattctcacgggctatatttactcactggtctttattgcccgcatcgtcagtggattttcggtc

SEQ ID NO: 328357 - DNA, 75 bp, synthetic construct
  source 1..75: mol_type = other DNA
gtccggttatgcgggatttgtatgccgtcgctgtggcatttctcggcccacattgcgtaaatggtggcgcagata

SEQ ID NO: 328358 - DNA, 75 bp, synthetic construct
  source 1..75: mol_type = other DNA
gttcaccatcaacgaaaaccggcacttgcgaagtcgctctgattctggagttacgttctcagcgaaatctggggg

SEQ ID NO: 328359 - DNA, 75 bp, synthetic construct
  source 1..75: mol_type = other DNA
ctacagacaatcccttatttgcggagcagctctttattctgttgacccccgactgttaacgctaatcagcggttt

SEQ ID NO: 328360 - DNA, 75 bp, synthetic construct
  source 1..75: mol_type = other DNA
gcaactggctggcaatgtggattttcctcggggcaatcgctgtagtcgcccttcttggtgctgattcggacctgc

SEQ ID NO: 328361 - DNA, 75 bp, synthetic construct
  source 1..75: mol_type = other DNA
gccgtagtatcgctggtcgcaatgctggggaacgtaacctttgatggtcgtcaccttgagttcctcgacctgctt

SEQ ID NO: 328362 - DNA, 75 bp, synthetic construct
  source 1..75: mol_type = other DNA
agaagggcttgaactccttctggatgaaattattaacgaaatgaatactcatagcatgcaatcagaaacctctat

SEQ ID NO: 328363 - DNA, 75 bp, synthetic construct
  source 1..75: mol_type = other DNA
cttgttataagggccgaacagagcaccgtggtattgcccgactggctgactggcttacccgtaaaatcacgcgcg

SEQ ID NO: 328364 - DNA, 75 bp, synthetic construct
  source 1..75: mol_type = other DNA
cacactaacgctgcagctgatgagatctctagcaggatagataatctcaatattgaaactgatagggtttggtgc

SEQ ID NO: 328365 - DNA, 75 bp, synthetic construct
  source 1..75: mol_type = other DNA
cttggggtggaatttcttgaaaacaatcaaaacatatgtgagcatctttccaagttaattggtaatatttattta

SEQ ID NO: 328366 - DNA, 75 bp, synthetic construct
  source 1..75: mol_type = other DNA
gattttacctgctattcgtcatcgttccgtgatggcggggtcagggctaaaacaatgcctttaccctctgacaaa

SEQ ID NO: 328367 - DNA, 75 bp, synthetic construct
  source 1..75: mol_type = other DNA
attcataattctgacattttcagcctggataatgaaaacgcccgtataacacgtgatgagtatcgttataacgaa

SEQ ID NO: 328368 - DNA, 75 bp, synthetic construct
  source 1..75: mol_type = other DNA
acaagagaagaaaaattcgcaaggaaatcgtgcaaataatcacggatgttattcataattctgacattttcagct

SEQ ID NO: 328369 - DNA, 75 bp, synthetic construct
  source 1..75: mol_type = other DNA
cagagctgcgcatgaagttcggcggtcgctgtgcttattgcggctgcgaacttggcgaaaagtggcatgcagacc

SEQ ID NO: 328370 - DNA, 75 bp, synthetic construct
  source 1..75: mol_type = other DNA
atgaaaatccaataccaggactacggcgccgtggcgaacatcgttatcaccagcacggtgtttgaattccgtaaa

SEQ ID NO: 328371 - DNA, 75 bp, synthetic construct
  source 1..75: mol_type = other DNA
atgaaaatcgaatatcaggactatggcgccgtagcgaacatcgtgatcaccagcactgtgtttgagttccgtaaa

SEQ ID NO: 328372 - DNA, 75 bp, synthetic construct
  source 1..75: mol_type = other DNA
gcaattttcccaagcgtgaagcttgcctcatggcaatgagctacagctatgagcttcaggcgcaggtgtatgacc

SEQ ID NO: 328373 - DNA, 75 bp, synthetic construct
  source 1..75: mol_type = other DNA
gcttctcgataacgcagaactgcatatcgaagataacgaacgtgtttgtctggtggggcgtaacggcgcaggcaa

SEQ ID NO: 328374 - DNA, 75 bp, synthetic construct
  source 1..75: mol_type = other DNA
ttttgatggaaatatgcttcaccaggaacgtgacgatatatcaaacatggttccagcatgccacccatgcaatct

SEQ ID NO: 328375 - DNA, 75 bp, synthetic construct
  source 1..75: mol_type = other DNA
ggatgaggtaaaagccggggtaagtatcacttcgccagttatccggagtgccgttattcagaacggaaactttca

SEQ ID NO: 328376 - DNA, 75 bp, synthetic construct
  source 1..75: mol_type = other DNA
aggcagtggggaatttaaaagaggaaacgctgaaaacgattggcggggtggagagtcgcataaccggcatggact

SEQ ID NO: 328377 - DNA, 75 bp, synthetic construct
  source 1..75: mol_type = other DNA
caggtttacggcgatccggttgatccggggtggtcggggttttactggatacgttttgtgaatgccgctggcgtt

SEQ ID NO: 328378 - DNA, 75 bp, synthetic construct
  source 1..75: mol_type = other DNA
gaacgtgatgacttccgctttaaactaagtagagggaataatgtctattcaggtgctttaggaatgagatgtctt

SEQ ID NO: 328379 - DNA, 75 bp, synthetic construct
  source 1..75: mol_type = other DNA
ttataacaaatggagttgatggctttttagttgacaatcgtaaggaatttattaataaaattattgagttagcag

SEQ ID NO: 328380 - DNA, 75 bp, synthetic construct
  source 1..75: mol_type = other DNA
atagatgaaatgagatgtgatggacgaatacataacgatgttaatgtgattaatttgtatcaatactattctgta

SEQ ID NO: 328381 - DNA, 75 bp, synthetic construct
  source 1..75: mol_type = other DNA
cggcgatccggttgacccgggatggtcgggattttactggatcaggtttgtgaatgctgctggcgttaaaggacc

SEQ ID NO: 328382 - DNA, 75 bp, synthetic construct
  source 1..75: mol_type = other DNA
gatttggttcagttcttctggaatgggatatgccaaattatcggggacactcactgactgaaatctggcggggta

SEQ ID NO: 328383 - DNA, 75 bp, synthetic construct
  source 1..75: mol_type = other DNA
cggatatttctggagtagctctcacgccttcacgtgtcacggtaaagcagaacgggtatatggtgtattctaaaa

SEQ ID NO: 328384 - DNA, 75 bp, synthetic construct
  source 1..75: mol_type = other DNA
ccgtcatagaagagcttcgcaaggaaataaaaaacgcgcaggggcaggctgtaaaggatgcggcaattaagacaa

SEQ ID NO: 328385 - DNA, 75 bp, synthetic construct
  source 1..75: mol_type = other DNA
ggtggtgcgggtacctcatatgcactgaatccaggagttgacattgacagcaccttaatggctgttgattttccc

SEQ ID NO: 328386 - DNA, 75 bp, synthetic construct
  source 1..75: mol_type = other DNA
cgtgaggaactggttggtcttaaactcgcccggcgtcgaacatcgggtggtgcctcatatgcactgaatccgggt

SEQ ID NO: 328387 - DNA, 75 bp, synthetic construct
  source 1..75: mol_type = other DNA
ttgaaatacgtgaaggtgattaccaaataacatcacttgagtatattaaagaacgtgatgacttccgctttaaac

SEQ ID NO: 328388 - DNA, 75 bp, synthetic construct
  source 1..75: mol_type = other DNA
gtaagcgccgtcagtgttgaaccaactacgaaagaagtaaccgtaggcgataacttcacggtaagcgaatcctga

SEQ ID NO: 328389 - DNA, 75 bp, synthetic construct
  source 1..75: mol_type = other DNA
tacttatgaagcccacaagctcggtgttacagagcaaatcaccgtaatggctttcaacggggccaaggtcgcgat

SEQ ID NO: 328390 - DNA, 75 bp, synthetic construct
  source 1..75: mol_type = other DNA
tttgtacgcttaacagtgagccgcttgatgattaccagaaccgcctgatttctgatgccgttgagcgcctgatgc

SEQ ID NO: 328391 - DNA, 75 bp, synthetic construct
  source 1..75: mol_type = other DNA
acttattctacgctaagccttggtgcggcatattttgctcagttgccgggtaactacacactgcggccacgtctc

SEQ ID NO: 328392 - DNA, 75 bp, synthetic construct
  source 1..75: mol_type = other DNA
tgacgcattttctttcaaggaaaaagggtaataaaaatatcttcgaagaacccattaatgatatgaatgaaatat

SEQ ID NO: 328393 - DNA, 75 bp, synthetic construct
  source 1..75: mol_type = other DNA
tatttcaaatgatgtattaaaagtggacgataatgtttattatagtttctttgatgaatttgtttttatagcaag

SEQ ID NO: 328394 - DNA, 75 bp, synthetic construct
  source 1..75: mol_type = other DNA
attgttcctattgtttgctttgtattttttctatttagtatttatttttataatagattaaaaaacataacaaaa

SEQ ID NO: 328395 - DNA, 75 bp, synthetic construct
  source 1..75: mol_type = other DNA
ctttgaaaatggcagcaaaatcattatcaaccgtcaggaaccgctgcaccaggtttggctggcaaccaaacaggg

SEQ ID NO: 328396 - DNA, 75 bp, synthetic construct
  source 1..75: mol_type = other DNA
attttgacttacatcacactttcatggtttaatcaggtgatttatttaatgaaaagagtgtgtttgtggatgtat

SEQ ID NO: 328397 - DNA, 75 bp, synthetic construct
  source 1..75: mol_type = other DNA
cgcagccgttatggcgctactttctgatctgactcgcgaacaaaaccgtaccaaagcgatggcatttatcggcgt

SEQ ID NO: 328398 - DNA, 75 bp, synthetic construct
  source 1..75: mol_type = other DNA
ggggttcccggcggctgaacactggaaggtctatctggcgacgatgctaatcgcctttggctcggtcgtgccttt

SEQ ID NO: 328399 - DNA, 75 bp, synthetic construct
  source 1..75: mol_type = other DNA
tcaggcgctgattgaccagatcaaggaagaagcggcgaattctcctgttgtggaggagttacggcaggaaattaa

SEQ ID NO: 328400 - DNA, 75 bp, synthetic construct
  source 1..75: mol_type = other DNA
gccgctgtcgccgaatttaacgccttcaagcatctgacggaagaaatgcgccgtaaattgctggatatttcccgc

SEQ ID NO: 328401 - DNA, 75 bp, synthetic construct
  source 1..75: mol_type = other DNA
cctacgccacgatgaattatgttgatcgaaaaacattgcagcttgatacctccgtcttattcgacatgccaagcc

SEQ ID NO: 328402 - DNA, 75 bp, synthetic construct
  source 1..75: mol_type = other DNA
aacgtcgatgcagctgtcgccgaatttaacgccttcaagcatctgacggaagaaatgcgccgtactctacaggat

SEQ ID NO: 328403 - DNA, 75 bp, synthetic construct
  source 1..75: mol_type = other DNA
cctgagcctttaccgtacgtctgcggtgctgaagtggttggagaaaggcaaagcgcaggatggtgaaaatgggta

SEQ ID NO: 328404 - DNA, 75 bp, synthetic construct
  source 1..75: mol_type = other DNA
aaattttaacaatctacccttggaggagcagagtgagttaattaaagagaacataaagcattatgtatcttatac

SEQ ID NO: 328405 - DNA, 75 bp, synthetic construct
  source 1..75: mol_type = other DNA
tcaacggcactatcgccaacgaaactactcttctcgttaatgcccgtgatttacatacttttcttggggtaggta

SEQ ID NO: 328406 - DNA, 75 bp, synthetic construct
  source 1..75: mol_type = other DNA
taaaaagagctgtaggtagtgcaactctggcaggagtccgcacaattgcgtttcttaggatgatggcaatcgtct

SEQ ID NO: 328407 - DNA, 75 bp, synthetic construct
  source 1..75: mol_type = other DNA
tggcagtcggttgatatgccggaaattcttcaccactgtcaacgttataaggaaaaatattgtgtacagaaaatt

SEQ ID NO: 328408 - DNA, 75 bp, synthetic construct
  source 1..75: mol_type = other DNA
ttttctggcagtgccagaagtacagggaaaaattcaatgtggaaaaaggtaatgaacaaaattttaaaactgtgt

SEQ ID NO: 328409 - DNA, 75 bp, synthetic construct
  source 1..75: mol_type = other DNA
cagaaattcagcccgtacagcaggcaacccctgaaccaacggcagaagataaaccgaaggaagagcgtccagtgt

SEQ ID NO: 328410 - DNA, 75 bp, synthetic construct
  source 1..75: mol_type = other DNA
caatcgtcagttgaatcttctgctggtccacagcgcagatgatcatctgcagggcgtggtccgtctgaacggcac

SEQ ID NO: 328411 - DNA, 75 bp, synthetic construct
  source 1..75: mol_type = other DNA
caaaaacggcttcgtttttctggtgatgggcttcacaggcaaaaaagcagctgcattcaaggaagcctacattgc

SEQ ID NO: 328412 - DNA, 75 bp, synthetic construct
  source 1..75: mol_type = other DNA
aactgaatcccgaagccacagtggcggagcggatttactgggcagaagatgaatctgtcgcccgcctccatctaa

SEQ ID NO: 328413 - DNA, 75 bp, synthetic construct
  source 1..75: mol_type = other DNA
gaagcttgcccgtcgccgggcttcaggaggtgtctcatacgccctgaatccggggatcgagattgacagtagcct

SEQ ID NO: 328414 - DNA, 75 bp, synthetic construct
  source 1..75: mol_type = other DNA
agttaccaattctcgtctgatggctacatacggcggtcagtttacgcttacaattatgttacgtataaccagctc

SEQ ID NO: 328415 - DNA, 75 bp, synthetic construct
  source 1..75: mol_type = other DNA
tgtatgcttgcttatcacgtaacactggatgaactaccggaagcaagcgcgcgtatccgtagaatgaaagacatt

SEQ ID NO: 328416 - DNA, 75 bp, synthetic construct
  source 1..75: mol_type = other DNA
gcaggcctgtaagtcaggttgcaatttctgcgtcgcagttgtttgtctttgacccgaataatccggataacacag

SEQ ID NO: 328417 - DNA, 75 bp, synthetic construct
  source 1..75: mol_type = other DNA
ttttgttaacgcggcaggagtgaaaggtccatggaatgctgaaaaaggcactcaggcacaaacacagatcggcgt

SEQ ID NO: 328418 - DNA, 75 bp, synthetic construct
  source 1..75: mol_type = other DNA
cggggatcgagattgacagtagcctgatggtcgttgatttcccctcgaagccgcagaattttaaggctaccgggg

SEQ ID NO: 328419 - DNA, 75 bp, synthetic construct
  source 1..75: mol_type = other DNA
actgcggaacgctgcattggatgtggcgcctgcgtgaaagcctgtgctcatcacgcagtaggttgtctgtcatta

SEQ ID NO: 328420 - DNA, 75 bp, synthetic construct
  source 1..75: mol_type = other DNA
cattattggtgtggccagaatgcgttttacggcagaacgttgcatcggatgcggcgcctgtgtgaaagcctgtgc

SEQ ID NO: 328421 - DNA, 75 bp, synthetic construct
  source 1..75: mol_type = other DNA
gtggcgcctgtgtgaaagcctgtgctcaccacgctgtggggtgcctgtcattaaagaacggaaaagccacaaagg

SEQ ID NO: 328422 - DNA, 75 bp, synthetic construct
  source 1..75: mol_type = other DNA
aaagtatatgtgacgttcctcaacgacaaagatgaagacgcggttaaagcgggcatcaaagcgttgcaggaagct

SEQ ID NO: 328423 - DNA, 75 bp, synthetic construct
  source 1..75: mol_type = other DNA
ggacgatgttcgccgcatgcttataaaagcagccatcgaactacaccggtataaagggacgccgtggtcaatccg

SEQ ID NO: 328424 - DNA, 75 bp, synthetic construct
  source 1..75: mol_type = other DNA
ctgggtgagcagttctccctgttcggtgatggctgggagctggccgaatctgacgacgtccgccgcacacttatc

SEQ ID NO: 328425 - DNA, 75 bp, synthetic construct
  source 1..75: mol_type = other DNA
gattcatcgtttgagtgtggcctggatgacattgaggtagtaggccgtgcactgaaaatcattaagagcctttga

SEQ ID NO: 328426 - DNA, 75 bp, synthetic construct
  source 1..75: mol_type = other DNA
agcagcatactcccctcagactcaagcaacctactgctggtgactacttctggtgattcttatttaatagatcgc

SEQ ID NO: 328427 - DNA, 75 bp, synthetic construct
  source 1..75: mol_type = other DNA
cagcaaagtaaaaccactttctgagcttgtatcgccagagatcgataaggctagccttatcggaggttcgttgat

SEQ ID NO: 328428 - DNA, 75 bp, synthetic construct
  source 1..75: mol_type = other DNA
gggtattagctgtgatttggttattgtaaatcagtcactttctaatattgctcgctttctgaaagacaaaataga

SEQ ID NO: 328429 - DNA, 75 bp, synthetic construct
  source 1..75: mol_type = other DNA
aagctgaatgaaatcccgcaggaaaatattcagcgcgagctggatcgcatgaagctggcaacgcttgacgatctg

SEQ ID NO: 328430 - DNA, 75 bp, synthetic construct
  source 1..75: mol_type = other DNA
tctggcttatcaatattgatggaatgattattattgcaaaaattatgcggattcccggcaataagattgtagtaa

SEQ ID NO: 328431 - DNA, 75 bp, synthetic construct
  source 1..75: mol_type = other DNA
cagcagagccttttcaatgctgtgggtatggccttacccgctgccgtcggcaccacactggcaacgcgcattgcc

SEQ ID NO: 328432 - DNA, 75 bp, synthetic construct
  source 1..75: mol_type = other DNA
tgatacatacgacacgatcggaaaacagttacaggatgcccgcagctatgtgaagcctgatgcaggcagccaggg

SEQ ID NO: 328433 - DNA, 75 bp, synthetic construct
  source 1..75: mol_type = other DNA
acgtggtaccgaccgaaaaagcgattgtttaccgcaaattcggcttcgagaacgtactgcgctatatcctgcgcg

SEQ ID NO: 328434 - DNA, 75 bp, synthetic construct
  source 1..75: mol_type = other DNA
cgtcactgtaagaccactttctaagatcgttgctcctagcatcaaacgtgttgaactgaagaacggcgaactgca

SEQ ID NO: 328435 - DNA, 75 bp, synthetic construct
  source 1..75: mol_type = other DNA
tagcatgatggttggcttttcattagcgggtcttggtcttttacactcagtactgagagatcccctcataatttc

SEQ ID NO: 328436 - DNA, 75 bp, synthetic construct
  source 1..75: mol_type = other DNA
ggtaacacagtggtgtggttgtctgagtattcagaaaacaacatcaacatcaacatggataacgtgccggacaat

SEQ ID NO: 328437 - DNA, 75 bp, synthetic construct
  source 1..75: mol_type = other DNA
tgctactccagcaccagatactccctcagaaccagctgaaccccgccactttcaaccgagtggcgtatatcaggg

SEQ ID NO: 328438 - DNA, 75 bp, synthetic construct
  source 1..75: mol_type = other DNA
ggcgctgaaagaactaaacgcgcaaacgtggtttgctggcctgcgccgtgaacaatccggcagccgcgctaattt

SEQ ID NO: 328439 - DNA, 75 bp, synthetic construct
  source 1..75: mol_type = other DNA
gttgccgccgtgacgccgggccagtctgccgtcttctataacggtgaagtgtgcctcggtggcggtattattgag

SEQ ID NO: 328440 - DNA, 75 bp, synthetic construct
  source 1..75: mol_type = other DNA
tctggtgatattattgataatattaaagttttcccgacactggctgaatcgttacacgatgtcgatttcactgtc

SEQ ID NO: 328441 - DNA, 75 bp, synthetic construct
  source 1..75: mol_type = other DNA
gccgaactggaaaaactggacgctgaaggccgcgttgcctgggcgctggataatctgcccggtgaatatgtactt

SEQ ID NO: 328442 - DNA, 75 bp, synthetic construct
  source 1..75: mol_type = other DNA
gatttttatcaaaaatataaaacgttaatgggggaaaaaactagttgctattttctagtaaaaacgcctatgtgg

SEQ ID NO: 328443 - DNA, 75 bp, synthetic construct
  source 1..75: mol_type = other DNA
caagaacaaaataaattctccgatattacgataatcacgcataaaaacaatcaaggggggggcgctgctaggaat

SEQ ID NO: 328444 - DNA, 75 bp, synthetic construct
  source 1..75: mol_type = other DNA
cgtcacgcttcgaccactttccaaaatcgttgcccccagcattaagcaagccgaattgaagaatggggagttgaa

SEQ ID NO: 328445 - DNA, 75 bp, synthetic construct
  source 1..75: mol_type = other DNA
tttcctgctgagtgggtcatccagtgtgcacttgaaacaggggtttcgctgctatggctagccacaggccagggt

SEQ ID NO: 328446 - DNA, 75 bp, synthetic construct
  source 1..75: mol_type = other DNA
tttacagtactttagcggaggaactctctactaccgttcatgcgctggctctgcatacttacactattaaggagt

SEQ ID NO: 328447 - DNA, 75 bp, synthetic construct
  source 1..75: mol_type = other DNA
tattgctgccggatggcgctgcacgcagaggcacagcgccaccgggtatgcagattgttgacaaagtgcgctttg

SEQ ID NO: 328448 - DNA, 75 bp, synthetic construct
  source 1..75: mol_type = other DNA
gctgatgaccgcctatggtttcaacactcaaatagcgttagttgaacatctcgaagcatcaaaaagtaccatggc

SEQ ID NO: 328449 - DNA, 75 bp, synthetic construct
  source 1..75: mol_type = other DNA
cggcaaagttaaacacctttctgaccttgtttctcccgaaattgacaaagtgacactttctagcggctctttggt

SEQ ID NO: 328450 - DNA, 75 bp, synthetic construct
  source 1..75: mol_type = other DNA
acaaatgctcaacacccctgcggtagagtcagctatagagaagttcgaacacgactggaatgccgcatttggcac

SEQ ID NO: 328451 - DNA, 75 bp, synthetic construct
  source 1..75: mol_type = other DNA
cggcggcgtcgagtcactgcgcgctattccgtggattttcgcctggacgcaaaaccgcctgatgctccccgcctg

SEQ ID NO: 328452 - DNA, 75 bp, synthetic construct
  source 1..75: mol_type = other DNA
actgacctgttcctgaaagatattcaggttctggtctccgagttgtcgatggttgaagcaacacctgaactgctg

SEQ ID NO: 328453 - DNA, 75 bp, synthetic construct
  source 1..75: mol_type = other DNA
cgccataccgaagcgctgggcgagctgacccgctacctcggtatcggcgactacgagagctggtcagaagccgac

SEQ ID NO: 328454 - DNA, 75 bp, synthetic construct
  source 1..75: mol_type = other DNA
atcttacccgcctggatcaactgacctggcaactgatgcagaacgagcagtcacgcgaagctgccgatttattgc

SEQ ID NO: 328455 - DNA, 75 bp, synthetic construct
  source 1..75: mol_type = other DNA
aaaactgctcgccaccctccccgccaatgaaatgcttgaggagcgttatgctgtcagcgtggcgacccgtaacaa

SEQ ID NO: 328456 - DNA, 75 bp, synthetic construct
  source 1..75: mol_type = other DNA
cgttgccgcagtgaagttgggcagaatgcgctgcggctggcacagttatctgttgccaaagcgcaactgaacgat

SEQ ID NO: 328457 - DNA, 75 bp, synthetic construct
  source 1..75: mol_type = other DNA
gacgccgatgcataaggaacgcatcgtaacgttgctaaagcgcgaagggcatgtggttggctttatgggcgatgg

SEQ ID NO: 328458 - DNA, 75 bp, synthetic construct
  source 1..75: mol_type = other DNA
ataccaaaggcgactggtgggaagcggcgctgtttgcgctttcggttgctgtgggtttaacgccagaaatgttgc

SEQ ID NO: 328459 - DNA, 75 bp, synthetic construct
  source 1..75: mol_type = other DNA
ctgtgcaacaaagagatcaaatttaaagctttcctcgaatttgccgccgaagatttaggtgccgattatatcgct

SEQ ID NO: 328460 - DNA, 75 bp, synthetic construct
  source 1..75: mol_type = other DNA
ctgatgctcccagcctggctgggtgcgggtactgcgctgcaaaaagtggtcgaagacggcaaacagagcgaactg

SEQ ID NO: 328461 - DNA, 75 bp, synthetic construct
  source 1..75: mol_type = other DNA
ccgccacgccggaacaggaactgggcaaactgccgttaggttcacgcccggcgaaacgtcgcccgaccggtggcg

SEQ ID NO: 328462 - DNA, 75 bp, synthetic construct
  source 1..75: mol_type = other DNA
tggctgtccacctgctattgaaagaagcgggtatcgggtttgcaatgccggtggctccgttgtttgaaactctcg

SEQ ID NO: 328463 - DNA, 75 bp, synthetic construct
  source 1..75: mol_type = other DNA
ctggaatatctggaccggcgagacgcactatgatgcctggccgcacaaagtcagtctcggcgtcgaatatcagca

SEQ ID NO: 328464 - DNA, 75 bp, synthetic construct
  source 1..75: mol_type = other DNA
cactgaatgacaccactgaagtagttattaaacgtgacttcgtagctgccgtcctgccgaaaggcaccatgaagg

SEQ ID NO: 328465 - DNA, 75 bp, synthetic construct
  source 1..75: mol_type = other DNA
acttcccatgttaaataatacaattgatgtgggggggaatgcctggggtagtgatgacaatcgctgggatgatcg

SEQ ID NO: 328466 - DNA, 75 bp, synthetic construct
  source 1..75: mol_type = other DNA
tgctgtcgtggagcgacgagaagttttgccgtgaactccagtcggcctttggctggcgactggggcaaattaccc

SEQ ID NO: 328467 - DNA, 75 bp, synthetic construct
  source 1..75: mol_type = other DNA
gcattactggaaatgcacgcgccagaaagcatggtactggcggctagctttaaaacgccgcgtcaggcgctggat

SEQ ID NO: 328468 - DNA, 75 bp, synthetic construct
  source 1..75: mol_type = other DNA
tttgaaagatatttcatttttcttgtatacgcttcaattgtccatttgttttctgcggttattacaattggtgaa

SEQ ID NO: 328469 - DNA, 75 bp, synthetic construct
  source 1..75: mol_type = other DNA
gtgatgaagttctgacgaacggtggcctggtcggtcgcgtaaccaaagtagcggaaaacggctacattgctatcg

SEQ ID NO: 328470 - DNA, 75 bp, synthetic construct
  source 1..75: mol_type = other DNA
ctgttaaaagaaggtcagtacggcgcagcgcaaaaactgctcgcccccctccccgccaatgaaatgcttgaggag

SEQ ID NO: 328471 - DNA, 75 bp, synthetic construct
  source 1..75: mol_type = other DNA
cctggcagaaaatcagtcttcacgacatgagcaatgaggatctgcttgctgctgccaataccgcccaggcggcag

SEQ ID NO: 328472 - DNA, 75 bp, synthetic construct
  source 1..75: mol_type = other DNA
tagccggttgatgaatgagcggaagaaagagaagcgcgttcttgagctagagcatgagcacatcatgcaggtgac

SEQ ID NO: 328473 - DNA, 75 bp, synthetic construct
  source 1..75: mol_type = other DNA
cgttggcgatgttgccgatgtctgacggacgctgttcgctggtctggtgtcatccactggaacggcgcgaagagg

SEQ ID NO: 328474 - DNA, 75 bp, synthetic construct
  source 1..75: mol_type = other DNA
cgggctgatgacgatggaattattcaccccggcacgcgatgtgctggcgcagcgcaccctcggttgggtggcgcg

SEQ ID NO: 328475 - DNA, 75 bp, synthetic construct
  source 1..75: mol_type = other DNA
gttacaacaggcagaacaacgtggactgggaaacaatgccctctactggtggctgcagcgcaacgttacattcca

SEQ ID NO: 328476 - DNA, 75 bp, synthetic construct
  source 1..75: mol_type = other DNA
atggaactctacaaagaatatcctgcatggcttatctttttacgccgtacttgtgcggttgcagcgggcgttctg

SEQ ID NO: 328477 - DNA, 75 bp, synthetic construct
  source 1..75: mol_type = other DNA
aaaccgctaagtgaagaagttcaggaagtgctggaagaacgcgatgtgttatatcgcgaagttgcgcatattatc

SEQ ID NO: 328478 - DNA, 75 bp, synthetic construct
  source 1..75: mol_type = other DNA
cggaatttaatcgtcactacatgcgcaataacgggattgtggtttatttgtgtgcgccagtagcggtactggtta

SEQ ID NO: 328479 - DNA, 75 bp, synthetic construct
  source 1..75: mol_type = other DNA
ttgagcatccgctggttcgtcacttaacccgccgtctgatttggggcgtttatagcgccgaaaaccagctactgg

SEQ ID NO: 328480 - DNA, 75 bp, synthetic construct
  source 1..75: mol_type = other DNA
ggcgcagcgttcagatacagccaggactcactgactcatgccctgctcaacgcgtcactgtggttcggcatgata

SEQ ID NO: 328481 - DNA, 75 bp, synthetic construct
  source 1..75: mol_type = other DNA
tctttatcttgcatacagcaccgccgctctctacctgtcagcagtacacgacacccggccggccaggccggtggt

SEQ ID NO: 328482 - DNA, 75 bp, synthetic construct
  source 1..75: mol_type = other DNA
ttacgccctgacagaagccgagcgcaacgccagcgaactgacccgctgggcaggcagaaaatgcccgagcggccg

SEQ ID NO: 328483 - DNA, 75 bp, synthetic construct
  source 1..75: mol_type = other DNA
accgaatacgccatgttacattttggactcaaagggttacctgggttagtaaactcacttgcacgctatccacaa

SEQ ID NO: 328484 - DNA, 75 bp, synthetic construct
  source 1..75: mol_type = other DNA
attgctgaaaaaagatgcgcgtaccgtcgcggcccagcaggtagcaaggcttgaatccgccatgtgcctgcgtcg

SEQ ID NO: 328485 - DNA, 75 bp, synthetic construct
  source 1..75: mol_type = other DNA
attaacgctaacaatgaacccagccaggtgatttctgaaattcgtagcgccctggcacagacgatcaattgttga

SEQ ID NO: 328486 - DNA, 75 bp, synthetic construct
  source 1..75: mol_type = other DNA
tgaactgctaccaccgttccgtcagcttgaccgtaacagttacgccctgacagaagccgagcgcaacgccagcga

SEQ ID NO: 328487 - DNA, 75 bp, synthetic construct
  source 1..75: mol_type = other DNA
aactgctaccaccgttccgccagctcgaccgtaacagctacgccctgacagaagccgagcgcaatgccagtgaac

SEQ ID NO: 328488 - DNA, 75 bp, synthetic construct
  source 1..75: mol_type = other DNA
caaaacgttaaatgttgatatctggaactatatgcattttttagttccgggtgctctggcatattttgtgttcga

SEQ ID NO: 328489 - DNA, 75 bp, synthetic construct
  source 1..75: mol_type = other DNA
tggtggttggtattgcggccagcggacgcacgccgtatgtgattgccgggctggaatacgcgcgccaactcggct

SEQ ID NO: 328490 - DNA, 75 bp, synthetic construct
  source 1..75: mol_type = other DNA
gagcgcccagttcctttatattctggttgccgcgtgcctgttctcgaactacccgcgtgaaacgcgcctgcaata

SEQ ID NO: 328491 - DNA, 75 bp, synthetic construct
  source 1..75: mol_type = other DNA
tgaaccgctgcattacgactgggaagcgttgcgtgagtcaatcaaaacgcacggcctgcgtaactccacgctttc

SEQ ID NO: 328492 - DNA, 75 bp, synthetic construct
  source 1..75: mol_type = other DNA
tgatcttctttttatacatgtatgtttgcttcgcgtcggcggtttatatcccggaactttggccaacgcatttac

SEQ ID NO: 328493 - DNA, 75 bp, synthetic construct
  source 1..75: mol_type = other DNA
cattgatgtcgataaatcaatattaatgaccgctgttattatgattggcgctccggtagggatatttattgcggc

SEQ ID NO: 328494 - DNA, 75 bp, synthetic construct
  source 1..75: mol_type = other DNA
caaaaacgctaccggatgtaatgccgaacaagcggaagcggcgttaattgcttgcgagcgcaactgtaaaacggc

SEQ ID NO: 328495 - DNA, 75 bp, synthetic construct
  source 1..75: mol_type = other DNA
acgcacaccgtatgtgattgccgggctggaatacgcgcgccaactcggctgccgtacagtgggaatttcctgtaa

SEQ ID NO: 328496 - DNA, 75 bp, synthetic construct
  source 1..75: mol_type = other DNA
gggcctggtagttggtttgattgctggcggcgaatatgccattcagcacgcggtggaaggcgcggaagatagccg

SEQ ID NO: 328497 - DNA, 75 bp, synthetic construct
  source 1..75: mol_type = other DNA
aaaacgcctgggtgtctttggtgaacctgcaattatcggtgttatcgttggcgcattactcggagttttaacgaa

SEQ ID NO: 328498 - DNA, 75 bp, synthetic construct
  source 1..75: mol_type = other DNA
gatgtacacccgcctgctgaaaggcgaggaaatcaccctgttcagcccatctgatgtaccggggctgtacgacgc

SEQ ID NO: 328499 - DNA, 75 bp, synthetic construct
  source 1..75: mol_type = other DNA
cgcgatcgtgaaatatgtttctcagcgtgcaggtatcggtattaacgctggtcgtattcgtgcgctgggtagccc

SEQ ID NO: 328500 - DNA, 75 bp, synthetic construct
  source 1..75: mol_type = other DNA
gctgcgctcccacattcagttttatgacggtatcaagacctctgacatccacgaaaccattatcaaggctgccgc

SEQ ID NO: 328501 - DNA, 75 bp, synthetic construct
  source 1..75: mol_type = other DNA
gcaacgatgacaccgcccgcaaactgacgccattaatccgcgcctggcctggcgaatctcagcataaacgcgcca

SEQ ID NO: 328502 - DNA, 75 bp, synthetic construct
  source 1..75: mol_type = other DNA
aaacaggatgaagccggaaatatccattttgattccgctggctgtctggaatgcggcacctgcagggtgctgtgc

SEQ ID NO: 328503 - DNA, 75 bp, synthetic construct
  source 1..75: mol_type = other DNA
cccatgacagcactggtgccacactttcgtgccaatccggtatctggtcgaataaccagaagaaaagaacgtttc

SEQ ID NO: 328504 - DNA, 75 bp, synthetic construct
  source 1..75: mol_type = other DNA
tcggttgcgacgtatgattcgaacaggattgtgaagtgtggttactacgatgagtacaatttccacggcggcacg

SEQ ID NO: 328505 - DNA, 75 bp, synthetic construct
  source 1..75: mol_type = other DNA
ctatgtcggtaactggctggcaaaacatggcaaccgcgaaaaattaattatcgcctctaaagtgagcggaccgtc

SEQ ID NO: 328506 - DNA, 75 bp, synthetic construct
  source 1..75: mol_type = other DNA
gggcattaaccttattgacgtcgccgagatgtaccctgtcccgccacgccccgaaactcaggggttaaccgaaac

SEQ ID NO: 328507 - DNA, 75 bp, synthetic construct
  source 1..75: mol_type = other DNA
atcggcgtgtcgaacgaaactgcatttggcgtaatgcgctggcggacaaacacgatctgccgcgtattgtcacca

SEQ ID NO: 328508 - DNA, 75 bp, synthetic construct
  source 1..75: mol_type = other DNA
cagtattcactgactgagctactggcacagtgcgatccgaatgctgatatctcggcagaagaacgagagtggctg

SEQ ID NO: 328509 - DNA, 75 bp, synthetic construct
  source 1..75: mol_type = other DNA
ggggataaaacactgtgtgatgtctgggttccagtcctccacgaagccaaaaagaacctgcaagccggaatgtcg

SEQ ID NO: 328510 - DNA, 75 bp, synthetic construct
  source 1..75: mol_type = other DNA
aaagccgcgttgcctgggcgctggataatctgcccggtgaatatgtactttcttccagcttcggtatccaggcgg

SEQ ID NO: 328511 - DNA, 75 bp, synthetic construct
  source 1..75: mol_type = other DNA
ggcatttaatcatttcatcggcggcgatagcggtggttcgatctactacaaacctgtttcctgccctacaggata

SEQ ID NO: 328512 - DNA, 75 bp, synthetic construct
  source 1..75: mol_type = other DNA
cttgcagacacaaccggccttgtagcccatgacagcactggtgccacactttcgtgccaatccggtatctggcaa

SEQ ID NO: 328513 - DNA, 75 bp, synthetic construct
  source 1..75: mol_type = other DNA
gcgatccgaacgctgaaatctcggcagaagaacgtgaatggctggatgcgccggcggctggtcaggaggaaatct

SEQ ID NO: 328514 - DNA, 75 bp, synthetic construct
  source 1..75: mol_type = other DNA
gcgcaataatgacaagggcatccgcccggatcaggcgctggatcggaagaatatccgcgaagcgctgcatgacag

SEQ ID NO: 328515 - DNA, 75 bp, synthetic construct
  source 1..75: mol_type = other DNA
agaactttaaaaaaatctattccttgtgtggcgaggaaaggtatttatacaatagatttaaatatggattatata

SEQ ID NO: 328516 - DNA, 75 bp, synthetic construct
  source 1..75: mol_type = other DNA
caaactaaccccgcttgtcttggcggtttcggttcttgtcgcctttctatcaatcctgtttattgcaatgcgcat

SEQ ID NO: 328517 - DNA, 75 bp, synthetic construct
  source 1..75: mol_type = other DNA
aattttacgaaatccgtcgagaacaagatgggcggttagtaatggaatcatctgaaaagggggccgaatacaatg

SEQ ID NO: 328518 - DNA, 75 bp, synthetic construct
  source 1..75: mol_type = other DNA
cactggcaggatttgcctgggatctgtttaccgcctggcagaccgctggcgcgccgtcgaaagagagttgggcgt

SEQ ID NO: 328519 - DNA, 75 bp, synthetic construct
  source 1..75: mol_type = other DNA
tatttccacttgaaaagacggtatcaacgctgcctgaaaaaaccgaggcgttttgccatgatttactgctctcat

SEQ ID NO: 328520 - DNA, 75 bp, synthetic construct
  source 1..75: mol_type = other DNA
tcaggcaatgctttgagaaaagaaaactgaatcagccagaatatatcattaagtttgctgagttgctggttgatg

SEQ ID NO: 328521 - DNA, 75 bp, synthetic construct
  source 1..75: mol_type = other DNA
gcgaaaagttaattatcgcctccaaagtgagcggaccgtcgcgcaataatgacaagggcatccgcccggatcagg

SEQ ID NO: 328522 - DNA, 75 bp, synthetic construct
  source 1..75: mol_type = other DNA
ccggctggtgcgcgtaatacgctctttagtcgcttcacccgttatagtggtgagcaaacgcaaaaagctgtcgcg

SEQ ID NO: 328523 - DNA, 75 bp, synthetic construct
  source 1..75: mol_type = other DNA
atgacgtttggtgaacagaacagcgaagccgacgcccacgcacaactcgactatgccgtcgctcagggcattaac

SEQ ID NO: 328524 - DNA, 75 bp, synthetic construct
  source 1..75: mol_type = other DNA
ctggtatcgatagcccggatgtgactgactacaagcgctgcttaaaactctttactgataaggggaaaatcccaa

SEQ ID NO: 328525 - DNA, 75 bp, synthetic construct
  source 1..75: mol_type = other DNA
atcctcgcgcctcatgcgatttatttggtggatgtcaaaggaacgcgtggcaacatcgatgtgtatggctcaaag

SEQ ID NO: 328526 - DNA, 75 bp, synthetic construct
  source 1..75: mol_type = other DNA
agatcattgggatatcataaggtttctaatgtagagattgaaaacttcatcaaggcagggagagagcttgatgcg

SEQ ID NO: 328527 - DNA, 75 bp, synthetic construct
  source 1..75: mol_type = other DNA
acgctctgaataaagtcagcgtggataacaagaataaaaactatatcgtggctgaactggttgtaccgccagaag

SEQ ID NO: 328528 - DNA, 75 bp, synthetic construct
  source 1..75: mol_type = other DNA
ccgctggcccaaaggcgaaagattgattgcagaagcgttagatgttgcgcctgagaacatctggccttcacgcta

SEQ ID NO: 328529 - DNA, 75 bp, synthetic construct
  source 1..75: mol_type = other DNA
ggtgctggtggtattgctggggcgctatgtcacgcgtccggcactgcgttttgttgcccgctctggcttgcggga

SEQ ID NO: 328530 - DNA, 75 bp, synthetic construct
  source 1..75: mol_type = other DNA
tgccagcacagtgatggcggcgcaggattacgtcgatgacaaaatcgcagagcacgagcagtcccgccgccatcc

SEQ ID NO: 328531 - DNA, 75 bp, synthetic construct
  source 1..75: mol_type = other DNA
taacaagaataaaaactatatcgtggctgaactggttgtaccgcccgaagtgggcggcttctggatgcgtgagct

SEQ ID NO: 328532 - DNA, 75 bp, synthetic construct
  source 1..75: mol_type = other DNA
gtacgactatagacctgaatacgcttggagccgctgagcatcttggtttatggcgtaacagtagctcggctatag

SEQ ID NO: 328533 - DNA, 75 bp, synthetic construct
  source 1..75: mol_type = other DNA
gatgcacattgcaacgggcatcgcacaatgtatttccatcattggcattcctgtcggcattgcgaactttaaaat

SEQ ID NO: 328534 - DNA, 75 bp, synthetic construct
  source 1..75: mol_type = other DNA
tcagctacctgaatgaagatattgattttgtgctgaatgagctagaaagaccaaaggcctgtgccgcgtattttc

SEQ ID NO: 328535 - DNA, 75 bp, synthetic construct
  source 1..75: mol_type = other DNA
ctggttcaaaaggtgaccgtggtgcatctgcatctgccagttacgcctttgatgccattcagaccaacctggggg

SEQ ID NO: 328536 - DNA, 75 bp, synthetic construct
  source 1..75: mol_type = other DNA
atggcgctgacgccgacgcgaattgcgctgctgctgttagcggcttgcctgacggcgaccgcgacgatgactatt

SEQ ID NO: 328537 - DNA, 75 bp, synthetic construct
  source 1..75: mol_type = other DNA
gtggcgcgggaatggcgggaaattccccgcatggagcctgacccggaaaccaccccggataacagttaccgcaat

SEQ ID NO: 328538 - DNA, 75 bp, synthetic construct
  source 1..75: mol_type = other DNA
gatagtttgctaggtcaggtttttgaattattaaaagatcgccgcgcctcggtcatgtattttgccgaccacggc

SEQ ID NO: 328539 - DNA, 75 bp, synthetic construct
  source 1..75: mol_type = other DNA
tgccttgcggcaagctgggatgcatcaaatccgcagtgggaaccgtggttaagaatcggtcatcagtcagagagt

SEQ ID NO: 328540 - DNA, 75 bp, synthetic construct
  source 1..75: mol_type = other DNA
ataacagccagttactacgtctacgatacaaacaaagtaaaatctggcgcactacaggcaaccgcattaatcaac

SEQ ID NO: 328541 - DNA, 75 bp, synthetic construct
  source 1..75: mol_type = other DNA
tgtttattaggtggtaagtcatgggatgcatgtgtaaatagctacagaaatgcattggcacaaaatgcaggtgtc

SEQ ID NO: 328542 - DNA, 75 bp, synthetic construct
  source 1..75: mol_type = other DNA
agccagttactatgtatatgataaaaataaagttaaatctggcgcactggaggctactgccttgatcaacgtgaa

SEQ ID NO: 328543 - DNA, 75 bp, synthetic construct
  source 1..75: mol_type = other DNA
ttccaataacagccagttactatgtttatgataaaaacaaagttaaatctggcgcactggaggctaccgcattaa

SEQ ID NO: 328544 - DNA, 75 bp, synthetic construct
  source 1..75: mol_type = other DNA
gagttatgctgcatgttatggcgtgttgtcagcacagcataatttggttgttcagggggattttgcgctaactca

SEQ ID NO: 328545 - DNA, 75 bp, synthetic construct
  source 1..75: mol_type = other DNA
aaaggggatattattctgcgctgtaaaaatttattaggtcagcagaatcaaacatcacggaaaatgcaggtgtat

SEQ ID NO: 328546 - DNA, 75 bp, synthetic construct
  source 1..75: mol_type = other DNA
aattcggtatgaaagtgttttatggcgatgccacgcggatggatttactggaatctgccggagcggcgaaagcgg

SEQ ID NO: 328547 - DNA, 75 bp, synthetic construct
  source 1..75: mol_type = other DNA
taactttgattcccgctatgtgagagatgtcagacttggcacacgtgttgtccagaccatgcagaaaggggtgat

SEQ ID NO: 328548 - DNA, 75 bp, synthetic construct
  source 1..75: mol_type = other DNA
gacggaaatttgtatacccgcaaactcataggaacatggaacggtaatgatggaccatggggaacatggcgccat

SEQ ID NO: 328549 - DNA, 75 bp, synthetic construct
  source 1..75: mol_type = other DNA
aaaaggcagttggaacggtaacgatgtgtactggttgcaacatggaggccttccaactgacgacttcagtaaggc

SEQ ID NO: 328550 - DNA, 75 bp, synthetic construct
  source 1..75: mol_type = other DNA
cgcttcattccattgccataacggcaatggttacagttctaatatcgatcgcgctcatgtttacacgctggaaga

SEQ ID NO: 328551 - DNA, 75 bp, synthetic construct
  source 1..75: mol_type = other DNA
agtttaggtctggggccgtatgaagcgcgagaacgtgccgatgtgttccgccgctttaatattcagatggtggaa

SEQ ID NO: 328552 - DNA, 75 bp, synthetic construct
  source 1..75: mol_type = other DNA
gccccgtaaaccggcatgcggtactgaaagaaatggccggagacccggaattacagaaatggcgggaaaaatatc

SEQ ID NO: 328553 - DNA, 75 bp, synthetic construct
  source 1..75: mol_type = other DNA
aaaatttactatcagaaaattcttggtatgaaagtgcatcatccactaaatttagttccttttaataagaaggat

SEQ ID NO: 328554 - DNA, 75 bp, synthetic construct
  source 1..75: mol_type = other DNA
cttaaaatcaggaattccagatcaagatctagttcaggacgcttcctttttttcatcattatataagtttgctcg

SEQ ID NO: 328555 - DNA, 75 bp, synthetic construct
  source 1..75: mol_type = other DNA
gatgtgttatggatacatctgatccaaacatttcatttgacgataatggccagtgtgattattgttcaaactttg

SEQ ID NO: 328556 - DNA, 75 bp, synthetic construct
  source 1..75: mol_type = other DNA
gattgcaggctgtaccggtagcctgactgacgtcgccttgcgctatgccgggcaagaaggcaccacgctcctgaa

SEQ ID NO: 328557 - DNA, 75 bp, synthetic construct
  source 1..75: mol_type = other DNA
gtgaaagtgaataatgacggtaatttcgtcaatgatttgtcgggcagacgtggaatataccaggcaggtattaaa

SEQ ID NO: 328558 - DNA, 75 bp, synthetic construct
  source 1..75: mol_type = other DNA
ttcatggaatcaggctaattgacacaaggaacggaaactccttgcactcttgggatcttgggctaaaaggcgagt

SEQ ID NO: 328559 - DNA, 75 bp, synthetic construct
  source 1..75: mol_type = other DNA
actggcattgctggaacagcaactgcgcgcattgcgcaaagtagtcacgccggatacacgtattattgccggtgc

SEQ ID NO: 328560 - DNA, 75 bp, synthetic construct
  source 1..75: mol_type = other DNA
tggtgctgatcaaagtaccgaaaacactggcattgctggaacaacaactgcgtgcgctgcgcaaagtggtcacgc

SEQ ID NO: 328561 - DNA, 75 bp, synthetic construct
  source 1..75: mol_type = other DNA
gaaactggaaggtactgactggactatccacaaccatgcgaatgtcttctcccgcaccgggctggatattggcgc

SEQ ID NO: 328562 - DNA, 75 bp, synthetic construct
  source 1..75: mol_type = other DNA
acatcatgagtcccgtttcacccggttttatgaagattattggctgccacgcagatttggttatgagaaacgaag

SEQ ID NO: 328563 - DNA, 75 bp, synthetic construct
  source 1..75: mol_type = other DNA
ctctcgcctgattatgctcagcgaccagtttcactggtcccttcgtaagcgtcaacggagcaccgtattgacgct

SEQ ID NO: 328564 - DNA, 75 bp, synthetic construct
  source 1..75: mol_type = other DNA
tctggactggctgatagcgcaggtgttgcagaaagggcactacggccgccagttcccggttcaaatcaccagacc

SEQ ID NO: 328565 - DNA, 75 bp, synthetic construct
  source 1..75: mol_type = other DNA
agcatcttcatctctgcgtttccgatccacacggcacgatgcttggcggtcatatgatgcccggctgtaccgtgc

SEQ ID NO: 328566 - DNA, 75 bp, synthetic construct
  source 1..75: mol_type = other DNA
atcataaaatgctgtacatcacttgaaattcaagtcagtgctatgggcgtggcaacaccagaagagtggatgtga

SEQ ID NO: 328567 - DNA, 75 bp, synthetic construct
  source 1..75: mol_type = other DNA
gtatgtgaaaggcggcgcgatcccctggcaacgttatcccttcgtcaccatgatttccgtcgagcggaaaagtta

SEQ ID NO: 328568 - DNA, 75 bp, synthetic construct
  source 1..75: mol_type = other DNA
ttattagaaaacggcgtaattaatccacgcattcacccgaatgttgcctcgcgtaaaattcgtaacggtgtaggg

SEQ ID NO: 328569 - DNA, 75 bp, synthetic construct
  source 1..75: mol_type = other DNA
atctgcaacccgcactggcacaactggaaaaggccagagccgcccatcttgagaacgcccgactgatggatgaga

SEQ ID NO: 328570 - DNA, 75 bp, synthetic construct
  source 1..75: mol_type = other DNA
cagcaggtgaaatcatcgctggaacagaaaattaaacagatgcaaatcagcctcaccggcgagccggttctccgg

SEQ ID NO: 328571 - DNA, 75 bp, synthetic construct
  source 1..75: mol_type = other DNA
gccgacggaaacgacgctgacgactggcgcacggtctttcgtgcagccggtggtgtcctgagcgacgagctgaaa

SEQ ID NO: 328572 - DNA, 75 bp, synthetic construct
  source 1..75: mol_type = other DNA
ataccaggcaggtattaaagcctcattcagcagtacgttaagcgggcagtacgttaagcgggcatttaagcgggc

SEQ ID NO: 328573 - DNA, 75 bp, synthetic construct
  source 1..75: mol_type = other DNA
cgcaaagaatttgtcgatgataaccgggtgaaggtgaataatgacggtaatttcgtcagtgatttgtcgggcaga

SEQ ID NO: 328574 - DNA, 75 bp, synthetic construct
  source 1..75: mol_type = other DNA
accgctcgcgcaaaaacaagcgtggagcacatccaagcttagcgcacacggaagatgggcagagtgattcatcag

SEQ ID NO: 328575 - DNA, 75 bp, synthetic construct
  source 1..75: mol_type = other DNA
cgtcctggcggcgtgttttatgtcgcgggagataaagtcggcatcgttcgtctggatgccttcaaaaccagtaaa

SEQ ID NO: 328576 - DNA, 75 bp, synthetic construct
  source 1..75: mol_type = other DNA
acaatttcacatatgtatatgaaaggctgggcaatcccgtggcaacgctatccttttgttaccatgatttccgtc

SEQ ID NO: 328577 - DNA, 75 bp, synthetic construct
  source 1..75: mol_type = other DNA
acggatttttctcaccctcaccttacttcccttgtttgctgttgccgctgatgattgcgcactctcagatccgac

SEQ ID NO: 328578 - DNA, 75 bp, synthetic construct
  source 1..75: mol_type = other DNA
gagcagatcacccgcgaaacctacaaatatgccgatatgctggcgatgtccgccaagaaagatgcgatggtgccg

SEQ ID NO: 328579 - DNA, 75 bp, synthetic construct
  source 1..75: mol_type = other DNA
acatatactcaaacacatatggacttcattattgaagccttcaaacatgtgaaagagaacgcggcgaatattaaa

SEQ ID NO: 328580 - DNA, 75 bp, synthetic construct
  source 1..75: mol_type = other DNA
aaccgttccgcattcgtgttatcgaaccagtaaaacgcacgacccgtgcttaccgtgaagaagcaattattaaat

SEQ ID NO: 328581 - DNA, 75 bp, synthetic construct
  source 1..75: mol_type = other DNA
gaatccgacacgccggaaaaacatattgtccgcgccaccaactcggttatctggcgtatctctattttctatttg

SEQ ID NO: 328582 - DNA, 75 bp, synthetic construct
  source 1..75: mol_type = other DNA
aataacgtgccgtatatcgttgcaaccatcaccagtaactccgcaggtggtcagccggtttcactggcaaactta

SEQ ID NO: 328583 - DNA, 75 bp, synthetic construct
  source 1..75: mol_type = other DNA
ccgagtcagtgaaaaatatctttggttatcaatacaccattccgactcaccagggccgtggtgcagagcaaatct

SEQ ID NO: 328584 - DNA, 75 bp, synthetic construct
  source 1..75: mol_type = other DNA
gcatcaaattcaccctcgcaccgttcagcattctcggtgtcgccatcgccatttttcttggttttcgtaataatg

SEQ ID NO: 328585 - DNA, 75 bp, synthetic construct
  source 1..75: mol_type = other DNA
aacattagacccgctagaacaaataaatatcttattaaactcatttaaagagaattattctaatattattcagga

SEQ ID NO: 328586 - DNA, 75 bp, synthetic construct
  source 1..75: mol_type = other DNA
atggattaaggatgttcaggatattgaattgattttaatgcaagatgtaatggataaagttcatttgtcattaac

SEQ ID NO: 328587 - DNA, 75 bp, synthetic construct
  source 1..75: mol_type = other DNA
gatgcgcggcgacgaagcctacagcggcagccgcagctactatgcgttagccgagtcagtgaaaaatatctttgg

SEQ ID NO: 328588 - DNA, 75 bp, synthetic construct
  source 1..75: mol_type = other DNA
cgcgtggcactggcgcaggcgcagcttggcgataccgctgcggcgcagcagacatttaacaagctgatcccgctg

SEQ ID NO: 328589 - DNA, 75 bp, synthetic construct
  source 1..75: mol_type = other DNA
caaatgggatgacaactggggcacctgtacattacaggactgtagcggcaaccgtagccagtcggattccggtgc

SEQ ID NO: 328590 - DNA, 75 bp, synthetic construct
  source 1..75: mol_type = other DNA
cgctgtataccgcgtcaaggatgctctactccttaagccgtcgcggtgatgcgcccgcggtaatgggcaaaatca

SEQ ID NO: 328591 - DNA, 75 bp, synthetic construct
  source 1..75: mol_type = other DNA
aagtccttccactatgcaaccggacagttgggcaacattgttagcacagtgggcagatcgggcgctgcgttccgg

SEQ ID NO: 328592 - DNA, 75 bp, synthetic construct
  source 1..75: mol_type = other DNA
taccggcgcgaataccattcgtcaggggcgttttgaacaggccgatggcggcacgttattcctcgatgaaattgg

SEQ ID NO: 328593 - DNA, 75 bp, synthetic construct
  source 1..75: mol_type = other DNA
tgtttgggcatgagaaaggcgcgtttactggcgcgaataccgttcgccaggggcgctttgaacaggccgatggcg

SEQ ID NO: 328594 - DNA, 75 bp, synthetic construct
  source 1..75: mol_type = other DNA
gcgatctgttcttcgtgggggcgctcgttgttctggtatggcctgcaattaagccagccaaagagcagcagggcg

SEQ ID NO: 328595 - DNA, 75 bp, synthetic construct
  source 1..75: mol_type = other DNA
agatttaggtgccgattatatcgctaccggtcattacgttcgtcgcgcagatgtcgatggcaagagccgcctgct

SEQ ID NO: 328596 - DNA, 75 bp, synthetic construct
  source 1..75: mol_type = other DNA
cagccagagctggagcggacgttactgaccaccgcgttgcgacatacgcaggggcataaacaggaagcggcgcgg

SEQ ID NO: 328597 - DNA, 75 bp, synthetic construct
  source 1..75: mol_type = other DNA
aaaagccgtcggttcttatcgctcggtactggaattgctcaatattccccatgcgaaattaatcatggactgcgt

SEQ ID NO: 328598 - DNA, 75 bp, synthetic construct
  source 1..75: mol_type = other DNA
gcactcgtgggttcctggcattcccatctggttattttccctcgtcattaccctcgccttaaccggcagtaattt

SEQ ID NO: 328599 - DNA, 75 bp, synthetic construct
  source 1..75: mol_type = other DNA
gaaagccgttggttcttatcgctcggttctggaattgctcaatattccccatgcgaaattaatcatggactgcgt

SEQ ID NO: 328600 - DNA, 75 bp, synthetic construct
  source 1..75: mol_type = other DNA
ctgtaccgtgccaattatggcgcgctggaaaaagctgataatgtggcaaaaaacacccattcataatacgcgctg

SEQ ID NO: 328601 - DNA, 75 bp, synthetic construct
  source 1..75: mol_type = other DNA
gcgcaacagttagaagtgatctccaccgacttattagcaatagggattatctgtaccgtgccaattatggcggct

SEQ ID NO: 328602 - DNA, 75 bp, synthetic construct
  source 1..75: mol_type = other DNA
ttgtccgcgccaccaactcggttatctggcgtatttctatcttctatttgtgctctatttttgtcgtcgtggcat

SEQ ID NO: 328603 - DNA, 75 bp, synthetic construct
  source 1..75: mol_type = other DNA
gctttcccataacaatattgttggagctattaagatcactaaaaacccagacattaaacttgatcctggagaggc

SEQ ID NO: 328604 - DNA, 75 bp, synthetic construct
  source 1..75: mol_type = other DNA
gaagccgccgcactggagctgcccgacctgctgtcgtttgccggtaaggtggtcggttttttgtcaccgagttag

SEQ ID NO: 328605 - DNA, 75 bp, synthetic construct
  source 1..75: mol_type = other DNA
gtgcaagaccttctccatgcattgctcagaccatgggttcaggacatccgcccagaagagtttactccaagttac

SEQ ID NO: 328606 - DNA, 75 bp, synthetic construct
  source 1..75: mol_type = other DNA
actctggtgataaccctgggtgggcgaaaaccggaggcaggacgaaacgaacaaagatgatccgctcactaacgc

SEQ ID NO: 328607 - DNA, 75 bp, synthetic construct
  source 1..75: mol_type = other DNA
ggtgaggccggggcttcaggctggattgacacacattttgcagatcgctttatgggcgcgatgatggttggcatg

SEQ ID NO: 328608 - DNA, 75 bp, synthetic construct
  source 1..75: mol_type = other DNA
acgcttgagcgggaagcccgcgctaaaagggaggccgaacttctcagtgagcaggacgaagagaaagacccggta

SEQ ID NO: 328609 - DNA, 75 bp, synthetic construct
  source 1..75: mol_type = other DNA
atggaaaaaactaacgaaaatatcgtcactctgattaaacccatcaagcgcggcgagcaggtaatttccgatgtc

SEQ ID NO: 328610 - DNA, 75 bp, synthetic construct
  source 1..75: mol_type = other DNA
ccggcaaatcttacccgcctggatcaactgacctggcaactgatgcagaacgagcagtcacgcgaagctgccgat

SEQ ID NO: 328611 - DNA, 75 bp, synthetic construct
  source 1..75: mol_type = other DNA
atgaaggagaataaccttaatcgcgtcatcggatggtctggtttactgctgacgtctttattgagtaccagcgca

SEQ ID NO: 328612 - DNA, 75 bp, synthetic construct
  source 1..75: mol_type = other DNA
gcgcaggacgttcaatatcaataactttaaccgcagaacaatggttcagggcgcaggtttggtcatgcctgactg

SEQ ID NO: 328613 - DNA, 75 bp, synthetic construct
  source 1..75: mol_type = other DNA
acaaagatgatacgctcactaactccgcgcggctttgcccgtgctgtattcatggctaaccatgaccgcgtttta

SEQ ID NO: 328614 - DNA, 75 bp, synthetic construct
  source 1..75: mol_type = other DNA
tttggtgcgggaatggatttaagcagccgctattccgtcctgtgccgatgccagatgaatgggaagacagtaagc

SEQ ID NO: 328615 - DNA, 75 bp, synthetic construct
  source 1..75: mol_type = other DNA
aggtgaaggcggcgcataacgcaaaactggtagaaaaactggcgaatatgcataacgtgccgtggatggtggaaa

SEQ ID NO: 328616 - DNA, 75 bp, synthetic construct
  source 1..75: mol_type = other DNA
ttttgaccctgttgagaacaaagcaattatcaatccaggcgctactggttctggtaatactgtttctgacggtca

SEQ ID NO: 328617 - DNA, 75 bp, synthetic construct
  source 1..75: mol_type = other DNA
gctttatccgccagcttagcattcgcacaccttccactgaacagccgatagagtttctctctggtggcaatcagc

SEQ ID NO: 328618 - DNA, 75 bp, synthetic construct
  source 1..75: mol_type = other DNA
gtgttgctttcacgttggctactgacccgaccgcaatttctgatcctcgatgagccaacccgcggcattgatgtt

SEQ ID NO: 328619 - DNA, 75 bp, synthetic construct
  source 1..75: mol_type = other DNA
atgacgaccgaccaacaccaggaaatcctccgcaccgaaggattaagcaaatttttccccggcgttaaagcgtta

SEQ ID NO: 328620 - DNA, 75 bp, synthetic construct
  source 1..75: mol_type = other DNA
acattaaacttgatcctggcgaggccaacaatatacagcttattaatgatgcaaacacaccgcataataaaatta

SEQ ID NO: 328621 - DNA, 75 bp, synthetic construct
  source 1..75: mol_type = other DNA
tcctccgtaccgaaggattaagcaaattcttccccggcgtcaaagcgttagataacgttgacttcagcttgcgtc

SEQ ID NO: 328622 - DNA, 75 bp, synthetic construct
  source 1..75: mol_type = other DNA
cgcggcattgatgttggtgcgcacgccgagatcatccgcctgattgaaacgctgtgcgctgatggtctggcgctg

SEQ ID NO: 328623 - DNA, 75 bp, synthetic construct
  source 1..75: mol_type = other DNA
gccaccgaactgatggcatcttacggtttcttcctcgacgtgcgcgaaccgcttaaccgcttttcagtcgcgatg

SEQ ID NO: 328624 - DNA, 75 bp, synthetic construct
  source 1..75: mol_type = other DNA
accatgccgatcgcggcacaatctggctggaaggccaggccatctcaccgaaaaacacagcccatgcacaacagc

SEQ ID NO: 328625 - DNA, 75 bp, synthetic construct
  source 1..75: mol_type = other DNA
gcgcacgctttacaacgggggaaactatgaatactaaccaacaccaggaaatcctccgcaccgaaggattaagta

SEQ ID NO: 328626 - DNA, 75 bp, synthetic construct
  source 1..75: mol_type = other DNA
tgaaaacggggcgggaaaatcaacgctaatcaaagcattaaccggtgtctaccacgccgatcgcggcaccatctg

SEQ ID NO: 328627 - DNA, 75 bp, synthetic construct
  source 1..75: mol_type = other DNA
gagtttctctccggtggcaatcagcaaaaagtgctgctctctcgctggctgctgactcgtccacaatttctgatc

SEQ ID NO: 328628 - DNA, 75 bp, synthetic construct
  source 1..75: mol_type = other DNA
gatcctcgatgaacccaccgccagcctcgacacccaggaagtggagctattatttggcctgatgcgtcagttgcg

SEQ ID NO: 328629 - DNA, 75 bp, synthetic construct
  source 1..75: mol_type = other DNA
cgcggatatgggcattgcctttgatggcgattttgaccgctgtttcctgtttgacgaaaaagggcagtttatcga

SEQ ID NO: 328630 - DNA, 75 bp, synthetic construct
  source 1..75: mol_type = other DNA
gggtttttctgctcattattagctccttctgatgccattctatttcaggaaggagtgtccgttaaactcaggcta

SEQ ID NO: 328631 - DNA, 75 bp, synthetic construct
  source 1..75: mol_type = other DNA
ccgccctgccctcgattcctgggatgctgaatatatgcaggaaaaccgctgggatgaggagtctgcttcctttgt

SEQ ID NO: 328632 - DNA, 75 bp, synthetic construct
  source 1..75: mol_type = other DNA
ccgtcgcaaattgtcgcggcgattaaatctcgcgctgatcaactgggtgccagcgtggtggtgtcgatggtagaa

SEQ ID NO: 328633 - DNA, 75 bp, synthetic construct
  source 1..75: mol_type = other DNA
tctcggtggcgtttgcttttgccattgcttctttgttgtgcgggcgtctggacagcacttatgcgcgttttactc

SEQ ID NO: 328634 - DNA, 75 bp, synthetic construct
  source 1..75: mol_type = other DNA
aatgcgttacaaaacgagccagaaacgaaacagcctgaaccagtggcgcaacaggaagtggaaaaagtctgcacc

SEQ ID NO: 328635 - DNA, 75 bp, synthetic construct
  source 1..75: mol_type = other DNA
cgatgtacgcacaatcgttgagctggggaaagccatagacttcgatgccagaactgctatcccattcgaaggtga

SEQ ID NO: 328636 - DNA, 75 bp, synthetic construct
  source 1..75: mol_type = other DNA
aaggtgaacgcaaggaaaccggaaaatacacgtctgttgttgatctcgcccgcgccagaaccaatcaacagtaca

SEQ ID NO: 328637 - DNA, 75 bp, synthetic construct
  source 1..75: mol_type = other DNA
ataatgcacttgatgacgcccgttaccaggcaaaatacgtttcagttatctggcaaaaactgatcccgagtcagg

SEQ ID NO: 328638 - DNA, 75 bp, synthetic construct
  source 1..75: mol_type = other DNA
gctcaggactgcgcttataaatttcttgtctgtgaggataaacccggtacacaccgcccagccctcgactcctgg

SEQ ID NO: 328639 - DNA, 75 bp, synthetic construct
  source 1..75: mol_type = other DNA
cttgatgtctccgacaaatcccccattaacagcattattttttcccatgatgacggcgcacagctcggcgtggaa

SEQ ID NO: 328640 - DNA, 75 bp, synthetic construct
  source 1..75: mol_type = other DNA
tcgcggagtatgccggtgtctcttatcagaccgtttcgcgcgtggtgaatcaggccagccacgtttcagcgaaaa

SEQ ID NO: 328641 - DNA, 75 bp, synthetic construct
  source 1..75: mol_type = other DNA
cattatgaccgatgaaatcccgttagatgatgcactgttacaattgcgggaatttatcgacgaaaactccggtga

SEQ ID NO: 328642 - DNA, 75 bp, synthetic construct
  source 1..75: mol_type = other DNA
tgatgcgcttaatatttgtcagcaaacagcgaaacagttagaaactctggtgactgctgtagtgaacagattttg

SEQ ID NO: 328643 - DNA, 75 bp, synthetic construct
  source 1..75: mol_type = other DNA
catgaatcggaacggaactaccaaaaagcggaacaaaacagcccaaatgcgttacaaaacgagccagaaacgaaa

SEQ ID NO: 328644 - DNA, 75 bp, synthetic construct
  source 1..75: mol_type = other DNA
ctattcctgacgaactggcaacaagggaagaaggcgctgtggctgtggctgtagccacagccattgaagctggcg

SEQ ID NO: 328645 - DNA, 75 bp, synthetic construct
  source 1..75: mol_type = other DNA
aaatgtaatccgggtgccaaatggcccgaaattcaggctgaattacgtaactggaaaaaacggcaggacgcagag

SEQ ID NO: 328646 - DNA, 75 bp, synthetic construct
  source 1..75: mol_type = other DNA
gtatcaagccaaaccagccgatgaacagtcaaaccgttaacgcatcgctaaaacgcgcaggttttagtggagtgc

SEQ ID NO: 328647 - DNA, 75 bp, synthetic construct
  source 1..75: mol_type = other DNA
ggcggagtcattgatcgggacaccattaaatggtggcttaagcaatcacgcgaagcgcaatctgccattatgacc

SEQ ID NO: 328648 - DNA, 75 bp, synthetic construct
  source 1..75: mol_type = other DNA
cgtgcaaacaaactttcaggtctggaaaaggcgctggctgccggggctactgaaatcacgaaagaagaatatttt

SEQ ID NO: 328649 - DNA, 75 bp, synthetic construct
  source 1..75: mol_type = other DNA
gaattgctgatcgaagcgcaaaatcttggtctgggtgcgcagtttggtggtaaatacttcgctcacgacatccgc

SEQ ID NO: 328650 - DNA, 75 bp, synthetic construct
  source 1..75: mol_type = other DNA
aaaattacctggttgagaagatgcgcacgctgggtacggcggcctgtcctccgtatcatattgcgttcgttattg

SEQ ID NO: 328651 - DNA, 75 bp, synthetic construct
  source 1..75: mol_type = other DNA
gcatgatggcgtcttcccgcttgtttgcctggctgctgtttatgtctgtggctggcgcatttctggtgctggtca

SEQ ID NO: 328652 - DNA, 75 bp, synthetic construct
  source 1..75: mol_type = other DNA
tacctttgacgggcatatcgttgaagcactgatgaaaacgcctgaaattaacgctatgtatccggaacgcaaact

SEQ ID NO: 328653 - DNA, 75 bp, synthetic construct
  source 1..75: mol_type = other DNA
aaatcccgttagatgatgcactgttacaattgcgagaatttatcgacgaaaactccggtgaattttttgttcagg

SEQ ID NO: 328654 - DNA, 75 bp, synthetic construct
  source 1..75: mol_type = other DNA
tctggatcgaaaaactggaacataatccaggcaaatatatcccggaagagctgcgcaaagcgggagaaggcgaag

SEQ ID NO: 328655 - DNA, 75 bp, synthetic construct
  source 1..75: mol_type = other DNA
tattttttggccttgtccgtgaacgtccgatcgacattcacaaagaccctgtggcactgaacaaatacattactg

SEQ ID NO: 328656 - DNA, 75 bp, synthetic construct
  source 1..75: mol_type = other DNA
acccgcgattctgtaaaccagaaccagcatgaatcggaacggaactaccaaaaagcggaacaaaacagcccaaat

SEQ ID NO: 328657 - DNA, 75 bp, synthetic construct
  source 1..75: mol_type = other DNA
aagggtaacccatgtgcaggtgtaagtaaattcaaggccaaaaaccgcgaacgatatgtaaccgacaaagaatac

SEQ ID NO: 328658 - DNA, 75 bp, synthetic construct
  source 1..75: mol_type = other DNA
catactcaggttcacaacaaaatactggtgcatctgacacgaccgcacaaccagggtcagtaaaagttaccgctg

SEQ ID NO: 328659 - DNA, 75 bp, synthetic construct
  source 1..75: mol_type = other DNA
taagaacgatggttgctctgggactgatgatggatttcgacgcaagaacgactattccattcgaaggtgaacgcc

SEQ ID NO: 328660 - DNA, 75 bp, synthetic construct
  source 1..75: mol_type = other DNA
tccggtgaattttttgttcaggtctggggaaatggagccaacttcgacaacacgattttgcgccgttcatacgaa

SEQ ID NO: 328661 - DNA, 75 bp, synthetic construct
  source 1..75: mol_type = other DNA
cggcaatcagcatcatgccagcgatagtgaaactggcgaggcgtcagatcccttaattaaggcgaacggtcatca

SEQ ID NO: 328662 - DNA, 75 bp, synthetic construct
  source 1..75: mol_type = other DNA
gccgataaattgcttgctgcatcacgtggtgaatttgttgaagggattagcgacccgaatgatccgaaatgggtg

SEQ ID NO: 328663 - DNA, 75 bp, synthetic construct
  source 1..75: mol_type = other DNA
aggtgaacgccataacgccctgcacgatgcacgttaccaggcaaaatacgtttcagccatctggcaaaaactgct

SEQ ID NO: 328664 - DNA, 75 bp, synthetic construct
  source 1..75: mol_type = other DNA
aagcataaatgtaagcctggtgccaaatggcccgaaattcaggcagagatgcgcatctggaaaaaacgtcgcgaa

SEQ ID NO: 328665 - DNA, 75 bp, synthetic construct
  source 1..75: mol_type = other DNA
acacgtctgttgttgatctcgcccgcgccagagccaatcaacagtacactgaaaattcaacaggaaaaatcagcc

SEQ ID NO: 328666 - DNA, 75 bp, synthetic construct
  source 1..75: mol_type = other DNA
ggcgttactacaacgatcgcgatgtacgcacaatcgttgagctggggaaagccatagacttcgatgccagaacgg

SEQ ID NO: 328667 - DNA, 75 bp, synthetic construct
  source 1..75: mol_type = other DNA
acgcaagaacgactattccattcgaaggtgaacgccataacgccctgcacgatgcacgttaccaggcaaaatacg

SEQ ID NO: 328668 - DNA, 75 bp, synthetic construct
  source 1..75: mol_type = other DNA
attagcgcacaggaattactacaggaagacatggcaacattcggcggacatatcgttgaagcgttgatgaaaatg

SEQ ID NO: 328669 - DNA, 75 bp, synthetic construct
  source 1..75: mol_type = other DNA
cagaaccaacacgaatcggaacaaaacgagccagaaacgaaacagcctgaaccagaagagcaacaagaaccggaa

SEQ ID NO: 328670 - DNA, 75 bp, synthetic construct
  source 1..75: mol_type = other DNA
tagtggttgcatccgtgaaagaagcaccaattggtatcgaggctactccccaccgtgttaccgaatatctgaaca

SEQ ID NO: 328671 - DNA, 75 bp, synthetic construct
  source 1..75: mol_type = other DNA
caaaacgagccagaaacgaaacaacatgaaccagcagcgcaacaggaaccggaaaaagcttgcaccgtctgcggt

SEQ ID NO: 328672 - DNA, 75 bp, synthetic construct
  source 1..75: mol_type = other DNA
gagaacactggcggcaatcagcatcacgatagcgataatgaaactggcgagacggcagatcactcaattaaggtg

SEQ ID NO: 328673 - DNA, 75 bp, synthetic construct
  source 1..75: mol_type = other DNA
cgatgaagagtatcaggttgaagttcaggaagatgatccggaggaaatggaaggcgctgaacatccacacaagga

SEQ ID NO: 328674 - DNA, 75 bp, synthetic construct
  source 1..75: mol_type = other DNA
cagagcgcaactgatactctctcgtcgccagtaccagaaactgatgcagtggaaacggcaattccgggcaacgaa

SEQ ID NO: 328675 - DNA, 75 bp, synthetic construct
  source 1..75: mol_type = other DNA
ttcgacaacacgattttgcgccgttcatacgaacggcaggggatcccctgcccgtggcgttactacaacgatcgc

SEQ ID NO: 328676 - DNA, 75 bp, synthetic construct
  source 1..75: mol_type = other DNA
gtaagaacgatggttgctctgggactggtgatggatttcgacgcaagaacgactattccattcgaaggtgaacgc

SEQ ID NO: 328677 - DNA, 75 bp, synthetic construct
  source 1..75: mol_type = other DNA
atgatgcactattacaattgcgggaatttatcgacgaaaactccggtgaattttgttcaggtctggggaaatgga

SEQ ID NO: 328678 - DNA, 75 bp, synthetic construct
  source 1..75: mol_type = other DNA
atgatccggaggaaatggaaggcgctgaacatccacacaaggagaatgctggcagcgctcaggaccacgccagcg

SEQ ID NO: 328679 - DNA, 75 bp, synthetic construct
  source 1..75: mol_type = other DNA
atggtggcaacagtggcggtctgctcagtttcacgtcggcacataccgacgcctggcgtcagcagggctacgagg

SEQ ID NO: 328680 - DNA, 75 bp, synthetic construct
  source 1..75: mol_type = other DNA
gttattgaaaatattttcagatatatattacctgagagaaagttttacccctcacctgtcaattcactcactgga

SEQ ID NO: 328681 - DNA, 75 bp, synthetic construct
  source 1..75: mol_type = other DNA
catccaccagccgggtgtggcaccatctgatgatcgaccttgaaacgatgggaaaaaatcctgatgcgccaatca

SEQ ID NO: 328682 - DNA, 75 bp, synthetic construct
  source 1..75: mol_type = other DNA
taccagaaactgatgcagtggaaacggcaattccggacaacgaaaaaaccgaatgcgaagtggaagtcgaaccat

SEQ ID NO: 328683 - DNA, 75 bp, synthetic construct
  source 1..75: mol_type = other DNA
gaacgccataacgctctgaacgatgcacgttaccaggcgaaatacgtttcagccatctggcaaaaactgctcccg

SEQ ID NO: 328684 - DNA, 75 bp, synthetic construct
  source 1..75: mol_type = other DNA
ttcgatccgcaaaccggagatatgggaccggaatttagtaagactatcgatctggaaactgctggcggagtcatt

SEQ ID NO: 328685 - DNA, 75 bp, synthetic construct
  source 1..75: mol_type = other DNA
gaattcagcaaaactatcgatctggaaaccgcaggcggggtcatcgatcggggcaccattaagtggtggctgaaa

SEQ ID NO: 328686 - DNA, 75 bp, synthetic construct
  source 1..75: mol_type = other DNA
tcccctgcccgtggcgctactgcaacgatcgcgatgtacgcacaattgttgaactgggaaattccattggctttg

SEQ ID NO: 328687 - DNA, 75 bp, synthetic construct
  source 1..75: mol_type = other DNA
gcattaagccgacccagccaatgaacagccaaacagttaatgcagcccttaagcgtgctggcttaggaggcgttc

SEQ ID NO: 328688 - DNA, 75 bp, synthetic construct
  source 1..75: mol_type = other DNA
atgcgtacggcaagtatcaacttgtccacaagatgtctattcatgtggcaacttctcaccatcacccgtcctgcc

SEQ ID NO: 328689 - DNA, 75 bp, synthetic construct
  source 1..75: mol_type = other DNA
tcaactgcctcaactgatgcagacgatgcgaacagcaaacatcagccaatcaacacgatgcctgttcatgtggca

SEQ ID NO: 328690 - DNA, 75 bp, synthetic construct
  source 1..75: mol_type = other DNA
cgagcaaaaattgagcaaaaaggtaacgctttgggtaacagggtaacacccgaaggtaacaaaaaaactgttacc

SEQ ID NO: 328691 - DNA, 75 bp, synthetic construct
  source 1..75: mol_type = other DNA
tatgtgtgcaaacgttctggataatatttatcctctcattgcctacagtcatagcggcctctgttatcggtatta

SEQ ID NO: 328692 - DNA, 75 bp, synthetic construct
  source 1..75: mol_type = other DNA
tgaagtccgccgagcatataacagaacaacatatttagataaacgtcgtgagttaatgtcatggtggggagataa

SEQ ID NO: 328693 - DNA, 75 bp, synthetic construct
  source 1..75: mol_type = other DNA
ctgaagttcaggaagatgatccggaggaaatggaaggcgctgaacatccacacaaggagaacactggcggcaatc

SEQ ID NO: 328694 - DNA, 75 bp, synthetic construct
  source 1..75: mol_type = other DNA
gtgccgggttttcgctttgatggcccgcaattggcaaaaaccacgggcggtaacggttggataaaaatgttaagg

SEQ ID NO: 328695 - DNA, 75 bp, synthetic construct
  source 1..75: mol_type = other DNA
cagctatccgtttgtctttcaggttgcttatccaaaacctaaaaagctcggtggtggatgggaggttgaggaact

SEQ ID NO: 328696 - DNA, 75 bp, synthetic construct
  source 1..75: mol_type = other DNA
aactcgttcgattcttcggtcgcgcaagagaattcaaaattactccagtacaaataccggataaggtggaagata

SEQ ID NO: 328697 - DNA, 75 bp, synthetic construct
  source 1..75: mol_type = other DNA
aaccgatcccttcgcggttaacgccctgctcccggctgccggaccgaaaggttatggcctgatgatgatgatcga

SEQ ID NO: 328698 - DNA, 75 bp, synthetic construct
  source 1..75: mol_type = other DNA
gtcgataaaaacggagcaccaacaaccgatccattctcggttaacgccctgctgcccgctgccggaccgaaaggt

SEQ ID NO: 328699 - DNA, 75 bp, synthetic construct
  source 1..75: mol_type = other DNA
cttatcacatctacggtgactccctgcgtggttattacatcacccttgatggtctgatgatgcttcagcttgggt

SEQ ID NO: 328700 - DNA, 75 bp, synthetic construct
  source 1..75: mol_type = other DNA
ttaactgtctgggcgatgcacgcgcggtgtgtgtaggcacaactaattactacattaaaggactcagatttaccg

SEQ ID NO: 328701 - DNA, 75 bp, synthetic construct
  source 1..75: mol_type = other DNA
aattctcattgatggtcaggaggtaacttatcagcgcgccggagataattatggtgtgggtagactggccccctg

SEQ ID NO: 328702 - DNA, 75 bp, synthetic construct
  source 1..75: mol_type = other DNA
tgaacctggcgcattattgatgatggtaggaccattttctgagcagcggtttagtcttcctgtcggagcgggaag

SEQ ID NO: 328703 - DNA, 75 bp, synthetic construct
  source 1..75: mol_type = other DNA
ggatggctggtagtgatgattgggaaggttacggcttgcatgacagttacgaaatggcggtcgaggaaggagaaa

SEQ ID NO: 328704 - DNA, 75 bp, synthetic construct
  source 1..75: mol_type = other DNA
atgcaaaaatactcgttagaagtgtggaccgataaatgtgaatgggagcgcatgggcctgtttgatacatatgtc

SEQ ID NO: 328705 - DNA, 75 bp, synthetic construct
  source 1..75: mol_type = other DNA
agaagcaaaatgcgaatacgaaaaagctgcgaaagacttctgcatcgataacctaagctgttttaatggcaaata

SEQ ID NO: 328706 - DNA, 75 bp, synthetic construct
  source 1..75: mol_type = other DNA
caatgatgcaatggtgggctgactttgtgaaaaaggcagatagtggtagcctcactgaagttgaatttacaacat

SEQ ID NO: 328707 - DNA, 75 bp, synthetic construct
  source 1..75: mol_type = other DNA
gtggcacggacaacacgccccctgaccaataccgaagttctgcgcgctaaagccttagagaaagatctaacgctg

SEQ ID NO: 328708 - DNA, 75 bp, synthetic construct
  source 1..75: mol_type = other DNA
atggcctttgagaagcccaaaaagcaaaacatgccgacgttgcggccagaagaattgccgaagctgatgcgttct

SEQ ID NO: 328709 - DNA, 75 bp, synthetic construct
  source 1..75: mol_type = other DNA
ttgagccaataaaagcacgtggggcgcttgagactgtacgtcgactggtgcagcgcattaacgaaatcatgattt

SEQ ID NO: 328710 - DNA, 75 bp, synthetic construct
  source 1..75: mol_type = other DNA
aaaacatgccgactctgcgtccagaagaattgcccaagctgatgcgttctttagtcatgtcaaatctatctgttc

SEQ ID NO: 328711 - DNA, 75 bp, synthetic construct
  source 1..75: mol_type = other DNA
tgaagtacgaagagcttataatcgctctatatatcttccgcaaagaatagaattaatgaattggtggggtaataa

SEQ ID NO: 328712 - DNA, 75 bp, synthetic construct
  source 1..75: mol_type = other DNA
tgaagttgcagaggaacagcagcaaatcgcactggacagtattttttcaacggtcgccgctaactggttccagct

SEQ ID NO: 328713 - DNA, 75 bp, synthetic construct
  source 1..75: mol_type = other DNA
ctgatacggaaatcaaagccgccaaacctaaagataccgattaccagctgtatgatggtgacgggcttactctgc

SEQ ID NO: 328714 - DNA, 75 bp, synthetic construct
  source 1..75: mol_type = other DNA
tggcgatatcagtattacagatattaaagcccatactctggttcaggcagttcaaccggttcaggccagaggagc

SEQ ID NO: 328715 - DNA, 75 bp, synthetic construct
  source 1..75: mol_type = other DNA
gcataggcccttacccgtcagttacccttgccgatgccagaaactaccgtgcagagtcccgctcactcctagcta

SEQ ID NO: 328716 - DNA, 75 bp, synthetic construct
  source 1..75: mol_type = other DNA
tgatgttagaaaagcctataaccgctcaacctatctagagcatcgaaaagaattgatgaactggtggggtatgca

SEQ ID NO: 328717 - DNA, 75 bp, synthetic construct
  source 1..75: mol_type = other DNA
gaagcggcggaagctcggtgggatgaaatcgattttgatgctaaagaatggaaaatcccagcagctcgaatgaag

SEQ ID NO: 328718 - DNA, 75 bp, synthetic construct
  source 1..75: mol_type = other DNA
tgatcaaatccagcgggagtaaaatctggcagtttcgctacattcgccctgtcaccaagaaacgagcgaagaaga

SEQ ID NO: 328719 - DNA, 75 bp, synthetic construct
  source 1..75: mol_type = other DNA
aagcgcattggttatggtgggaagcttgttgctcatggattacgttctatagcaagtacagcactaaatgaagct

SEQ ID NO: 328720 - DNA, 75 bp, synthetic construct
  source 1..75: mol_type = other DNA
gcgtctgccggaactcatgcagcgggtccacacaacctgtttaagccccatgacgcggttattgctgcaatggca

SEQ ID NO: 328721 - DNA, 75 bp, synthetic construct
  source 1..75: mol_type = other DNA
agcccaaatgcgcaacaaaacgagccagaaacgaaacagcgaaccggaaaaagcctgcaccgcctgcggtcagac

SEQ ID NO: 328722 - DNA, 75 bp, synthetic construct
  source 1..75: mol_type = other DNA
aatggcccgaaattcaggctgaattacgtaactggaaaaaacggcaggacgcagagcgcaaagagactggaaaat

SEQ ID NO: 328723 - DNA, 75 bp, synthetic construct
  source 1..75: mol_type = other DNA
agagcagttgccgcaacttatgaacgatttaacgattgccagcatagaacgacaaaccaagttgttgattgagtg

SEQ ID NO: 328724 - DNA, 75 bp, synthetic construct
  source 1..75: mol_type = other DNA
aatattcagcacggcggcgaatgaggaaggatttgagcctgacgtgatcgaagccgcactagcccacgtagacac

SEQ ID NO: 328725 - DNA, 75 bp, synthetic construct
  source 1..75: mol_type = other DNA
gaccagcacttaatcacgcttgcgcaaggcatggatccacaacagcaacaggagcaggcgtcagaacaacgccag

SEQ ID NO: 328726 - DNA, 75 bp, synthetic construct
  source 1..75: mol_type = other DNA
gcaaaaaaagaagttatcgacaacgaccgcgaagactggaagcgcatctcggcatcaatgcgcaaacaacctgat

SEQ ID NO: 328727 - DNA, 75 bp, synthetic construct
  source 1..75: mol_type = other DNA
ttggcgatttcgctatcaacgaccagcaacaaagaaaagaacaatgatggggataggtgctttccccgctctttc

SEQ ID NO: 328728 - DNA, 75 bp, synthetic construct
  source 1..75: mol_type = other DNA
ccaacaccgaagttctgcgcgcgaaagcgttagagaaggatctaacgctgcatgatggcgatgggcttttcctga

SEQ ID NO: 328729 - DNA, 75 bp, synthetic construct
  source 1..75: mol_type = other DNA
gacccgcgattctgtgaaccagaaccagcaagaaacggaacagaacgaccagaaagcggaacaaaacagcccaaa

SEQ ID NO: 328730 - DNA, 75 bp, synthetic construct
  source 1..75: mol_type = other DNA
ccagaaccagcaagaatcggaacagaacgaccagaaagcggaacaaaacagcccaaatacgcaacaaaacgagcc

SEQ ID NO: 328731 - DNA, 75 bp, synthetic construct
  source 1..75: mol_type = other DNA
gcggcaactgccctgattgtggcgcggtgatgggtgacgcaacataccaggaaatattcgatgaagagaatcagc

SEQ ID NO: 328732 - DNA, 75 bp, synthetic construct
  source 1..75: mol_type = other DNA
cttcaggggtatatcaacgcctatttgacggaaactgatcacgagaaccccagcaaggaaactctcacagctgcc

SEQ ID NO: 328733 - DNA, 75 bp, synthetic construct
  source 1..75: mol_type = other DNA
cgcctgcggtcagaccggcggcggcaactgccctgattgtggcgcggtgatgggcgacgcaacataccaggaaac

SEQ ID NO: 328734 - DNA, 75 bp, synthetic construct
  source 1..75: mol_type = other DNA
gaaacgaaactgcttgaaccagtagcgcaacaggaagtggaaaaattttgcaccgcctatggtcagaccagcggc

SEQ ID NO: 328735 - DNA, 75 bp, synthetic construct
  source 1..75: mol_type = other DNA
ataggtgcaatatttttcgatccgcaaaccggagatatgggaccggaatttagtaagactatcgatctggaaact

SEQ ID NO: 328736 - DNA, 75 bp, synthetic construct
  source 1..75: mol_type = other DNA
aaaggtgttttacatgcgactgcttgcgcaggaaaacccaaaaaagtggcgctggttacctgtatacgcaagctg

SEQ ID NO: 328737 - DNA, 75 bp, synthetic construct
  source 1..75: mol_type = other DNA
gaggataatatgctcctgccaatttccggtcaggaactgcccattcgctggcttgcgcaacatggcagcgaaaaa

SEQ ID NO: 328738 - DNA, 75 bp, synthetic construct
  source 1..75: mol_type = other DNA
cactggtggatgccggatgcaatatggtgattgtgtcgcatctgagtgacggttctttatgggatcgtcgggctt

SEQ ID NO: 328739 - DNA, 75 bp, synthetic construct
  source 1..75: mol_type = other DNA
atgctcaccgttaagcagattgaagcagcaaagccgaaagaaaaaccataccgccttctcgatggtaatgatctg

SEQ ID NO: 328740 - DNA, 75 bp, synthetic construct
  source 1..75: mol_type = other DNA
aaggggattgaaacccgcgattcagtgaatcagaaccagcaagaaacggaacagaacggccagaaagcggaacaa

SEQ ID NO: 328741 - DNA, 75 bp, synthetic construct
  source 1..75: mol_type = other DNA
ctcagcgccattaattccgggtattgcaatgatgatcgcaaacaaacttgaaaattttggggtaacagatgatga

SEQ ID NO: 328742 - DNA, 75 bp, synthetic construct
  source 1..75: mol_type = other DNA
ttataaccttcatccggcacacgctaaacgtatcgaggaaattatcgctgaaaataaatcgcccttttctgtttt

SEQ ID NO: 328743 - DNA, 75 bp, synthetic construct
  source 1..75: mol_type = other DNA
ggatgaaaaacttcccgccgttaccgcgctggccatctcaaataaagcagtgcaactcgaaccgctggagattcg

SEQ ID NO: 328744 - DNA, 75 bp, synthetic construct
  source 1..75: mol_type = other DNA
acgcgaagcgcaatctgccattatgaccgatgaaatcccgttagatgatgcactgttacaattgcgggaatttat

SEQ ID NO: 328745 - DNA, 75 bp, synthetic construct
  source 1..75: mol_type = other DNA
accgatgaaatcccgttagatgatgcactgctgcaattacgggaatttatcgacgaaaactccggtgaatttttt

SEQ ID NO: 328746 - DNA, 75 bp, synthetic construct
  source 1..75: mol_type = other DNA
aaagctatcgatctggaaacctccggcggaatcatcgaccgtaaaacaataaagtggtgggcgaaacaatcacgc

SEQ ID NO: 328747 - DNA, 75 bp, synthetic construct
  source 1..75: mol_type = other DNA
acaggaaaaatcaacccggtcattgctgccattcatcgcgaatacaagcagacatggaaaacactggatgacgaa

SEQ ID NO: 328748 - DNA, 75 bp, synthetic construct
  source 1..75: mol_type = other DNA
gaaaaatacggtcgcgcaaacaaactttctggtctggaaaaagcactggccctgggagctacggaaatcacaaaa

SEQ ID NO: 328749 - DNA, 75 bp, synthetic construct
  source 1..75: mol_type = other DNA
atgccattctatttcaggaaggagtgtccgttaaactcaggctacctcaccgagcgtttttatgtgtgcacggat

SEQ ID NO: 328750 - DNA, 75 bp, synthetic construct
  source 1..75: mol_type = other DNA
gcactactgcaattgcgggaatttatcgacgaaaactccggtgaattttttgttcaggtctggggtaatggggcc

SEQ ID NO: 328751 - DNA, 75 bp, synthetic construct
  source 1..75: mol_type = other DNA
ctggtcaggaactgcccgttcgctggcttgcacaacacggcagcgagaaaccggtaacacacgtttcacgggaaa

SEQ ID NO: 328752 - DNA, 75 bp, synthetic construct
  source 1..75: mol_type = other DNA
aaatacggtcgcgcaaacaaactttctggtctggataaggcactggctgccggggctactgaaatcacgaaagaa

SEQ ID NO: 328753 - DNA, 75 bp, synthetic construct
  source 1..75: mol_type = other DNA
tgatgcactactgcaattgcgggaatttatcgacgaaaactccggtgaattttttgttcaggtctggggtaatgg

SEQ ID NO: 328754 - DNA, 75 bp, synthetic construct
  source 1..75: mol_type = other DNA
agccaatatcagccagcctgacgccaataagttgcttgctgtatcacgtggtgaatttgttgcagggattagcga

SEQ ID NO: 328755 - DNA, 75 bp, synthetic construct
  source 1..75: mol_type = other DNA
gaaatgggttaaggggattgaaacccgcgattctgtgaaccagaaccagcccgaatcggaacaaaacgaccagaa

SEQ ID NO: 328756 - DNA, 75 bp, synthetic construct
  source 1..75: mol_type = other DNA
ttccgatggattttaatatttatgaaattccgggcagcgtttatcgtcgcgcaaaagacatcgtcctgaaaagag

SEQ ID NO: 328757 - DNA, 75 bp, synthetic construct
  source 1..75: mol_type = other DNA
ctgacgaagtaaacaaaattatgcaggcagccaatatcagccagcctgacgccaataagttgcttgctgtatcac

SEQ ID NO: 328758 - DNA, 75 bp, synthetic construct
  source 1..75: mol_type = other DNA
ttgagatccgtccccggaaaaggctgaaatatgcaggtgatggtggcaacagcggcggtctgctcagttttacat

SEQ ID NO: 328759 - DNA, 75 bp, synthetic construct
  source 1..75: mol_type = other DNA
gagtgacggttctttatgggatcgccaggcttttccggacaccacaatccttgagatccgtccccggaaaaggct

SEQ ID NO: 328760 - DNA, 75 bp, synthetic construct
  source 1..75: mol_type = other DNA
acgaagtaaacaaaattatgcaggcagccaatatcatccagcctgacgccgataagttgcttgctgcatcacgtg

SEQ ID NO: 328761 - DNA, 75 bp, synthetic construct
  source 1..75: mol_type = other DNA
tcgtgatattgcacatgccaaactgaaagaactgattgacgaaggtaaagagctaccgcagtacattaaagatca

SEQ ID NO: 328762 - DNA, 75 bp, synthetic construct
  source 1..75: mol_type = other DNA
aatcgacctgtacgcggtagatggcgatgagtacaaattcctttgcgttgcgaaaggcggcggctctgccaacaa

SEQ ID NO: 328763 - DNA, 75 bp, synthetic construct
  source 1..75: mol_type = other DNA
gatccagaagccagcgaaaacgacaagtacgtggcgctgcaattcttaagaaactccgaaatcgccgccaaaggc

SEQ ID NO: 328764 - DNA, 75 bp, synthetic construct
  source 1..75: mol_type = other DNA
tcaaatatgttgatgtaggtgcaacctattatttcaacaaaaatatgtcaacttttgttgattacaaaatcaacc

SEQ ID NO: 328765 - DNA, 75 bp, synthetic construct
  source 1..75: mol_type = other DNA
actggcgcgggaatatcccgatctggtgcaggaagcgcgcggcaaaggcatgttgatggcgattgagtttgtgga

SEQ ID NO: 328766 - DNA, 75 bp, synthetic construct
  source 1..75: mol_type = other DNA
ccgattcagggtgaaggtggcgtaattctgccgccgccgggctatctcaccgccgtacgtaagctatgcgatgag

SEQ ID NO: 328767 - DNA, 75 bp, synthetic construct
  source 1..75: mol_type = other DNA
ccatcacgctgaataatgatgacaaaaccacgccgtttctggcgcagtcgtgggtgacggatgctgacggggtga

SEQ ID NO: 328768 - DNA, 75 bp, synthetic construct
  source 1..75: mol_type = other DNA
agccacgcaagcaccttaaaatcaccatcatacactaaatcagtaagttggcagcattaccaagcgggccttgcc

SEQ ID NO: 328769 - DNA, 75 bp, synthetic construct
  source 1..75: mol_type = other DNA
tacttgacaaaaatgatttcaccagaaatcttgatataaacgccgacgatattgttgctgtcggtatggtttacc

SEQ ID NO: 328770 - DNA, 75 bp, synthetic construct
  source 1..75: mol_type = other DNA
gcaaaaatcaaccgcgaaggtatctggatagaaaaactggagcacaacccaggccagtacattccggaagagcta

SEQ ID NO: 328771 - DNA, 75 bp, synthetic construct
  source 1..75: mol_type = other DNA
actgaaaactcagcagaaaaaatcaaccctgccactgctgccattcgtcgcgaatataagcagacatggaaaacg

SEQ ID NO: 328772 - DNA, 75 bp, synthetic construct
  source 1..75: mol_type = other DNA
agatgatgcactactgcaattgcgggaatttatcgacgaaaactccggtgaattttttgttcaggtctggggaaa

SEQ ID NO: 328773 - DNA, 75 bp, synthetic construct
  source 1..75: mol_type = other DNA
tccgatcgacattcacaaagatcccgtagcactgaacaaatacatcactgaatacctgactaccaagggcgtgtt

SEQ ID NO: 328774 - DNA, 75 bp, synthetic construct
  source 1..75: mol_type = other DNA
atgaaaaaaattacagtggcactttctgtggttgcagcatctgttctgatggcagtgtctgctcaagctgcagaa

SEQ ID NO: 328775 - DNA, 75 bp, synthetic construct
  source 1..75: mol_type = other DNA
aattcggtggtgacacctggactcaaactgacgttttcatgactcagcgtgcaactggtgttgcaacttatcgta

SEQ ID NO: 328776 - DNA, 75 bp, synthetic construct
  source 1..75: mol_type = other DNA
tccgatcgacattcacaaagaccctgtggcactgaacaaatacatcactgaatacctgactacaaagggcgtatt

SEQ ID NO: 328777 - DNA, 75 bp, synthetic construct
  source 1..75: mol_type = other DNA
agtggaagatttcccggcgtttatcctggtcgatgacaagggcaacgacttcttccagcagatcgtcaatcaaca

SEQ ID NO: 328778 - DNA, 75 bp, synthetic construct
  source 1..75: mol_type = other DNA
gcaccgccatcatcgtcggtaaaaaaggtcagcgagtgtggaccggcggcggtgatgaagaagccttatcaaaag

SEQ ID NO: 328779 - DNA, 75 bp, synthetic construct
  source 1..75: mol_type = other DNA
gtattgccgacctgccaggataccggcaccgccatcatcgtcggtaaaaaaggtcagcgagtgtggaccggcggc

SEQ ID NO: 328780 - DNA, 75 bp, synthetic construct
  source 1..75: mol_type = other DNA
gaatattttgcccgcaaaaacggcacatactcaggttcacaacaaaatactggtgcatctgacacgaccgcacaa

SEQ ID NO: 328781 - DNA, 75 bp, synthetic construct
  source 1..75: mol_type = other DNA
tattattgactgcattcgtgctgaactgggtgtcggaaccacgaaaaacgccgtttttcagcatatccagagtct

SEQ ID NO: 328782 - DNA, 75 bp, synthetic construct
  source 1..75: mol_type = other DNA
atacttcgctcacgacatccgcgtgattcgcctgcctcgtcacggcgcatcctgcccggtgggtatgggcgtctc

SEQ ID NO: 328783 - DNA, 75 bp, synthetic construct
  source 1..75: mol_type = other DNA
ccatgggaaaaaatcctgatgccccgatcatctcaataggtgcaatatttttcgatccgcaaaccggagatatgg

SEQ ID NO: 328784 - DNA, 75 bp, synthetic construct
  source 1..75: mol_type = other DNA
atgcacttgatgacgcccgttaccaggcaaaatacgtttcagttatctggcaaaaactgatcccgaatcaggctg

SEQ ID NO: 328785 - DNA, 75 bp, synthetic construct
  source 1..75: mol_type = other DNA
gtggcaacgaatattctggtgaccatgaatctggtgggcatggggctgggcgtcactttgatacccggttatatg

SEQ ID NO: 328786 - DNA, 75 bp, synthetic construct
  source 1..75: mol_type = other DNA
cgtctgtttttatgcgggtatgctgatggcgcattcaccagtcattcttttgggcttacaactgcttaatgcgat

SEQ ID NO: 328787 - DNA, 75 bp, synthetic construct
  source 1..75: mol_type = other DNA
aagcgccgcgtcgtaaccgtcgcaatactctgttgctgtttgttatttgtacactgatgtggggatcaaacagcc

SEQ ID NO: 328788 - DNA, 75 bp, synthetic construct
  source 1..75: mol_type = other DNA
aggagaacactggcggcaatcagcatcacgatagcgataatgaaactggcgagacggcagatctctcaattaagg

SEQ ID NO: 328789 - DNA, 75 bp, synthetic construct
  source 1..75: mol_type = other DNA
atgagtaaagtctttatttgcgccgccattctggacgaacaggcaatacaggaagaaggtgccgtcgctgtagct

SEQ ID NO: 328790 - DNA, 75 bp, synthetic construct
  source 1..75: mol_type = other DNA
gggatccagacccgcgatactgtgaaccagaaccagcaagaaacggaacagaacgaccagaaagcggaacaaaac

SEQ ID NO: 328791 - DNA, 75 bp, synthetic construct
  source 1..75: mol_type = other DNA
gcaaaaaatgaagttatcgacaacgaccgcgaagactggaagcgtatctcggcatcgatgcgcaaacagcctgat

SEQ ID NO: 328792 - DNA, 75 bp, synthetic construct
  source 1..75: mol_type = other DNA
cgcgattcagtgaaccagaaccagcaagaaacggaacagaacgaccagaaagcggaacaaaacagcccaaatgcg

SEQ ID NO: 328793 - DNA, 75 bp, synthetic construct
  source 1..75: mol_type = other DNA
acgaagtaaacaaaattatgcaggcagccaatatcagccagcctgacgccaataagttgcttgctgtatcacgtg

SEQ ID NO: 328794 - DNA, 75 bp, synthetic construct
  source 1..75: mol_type = other DNA
gacacatgtgaaaacatcaccgttgatatggttattagcgcacaggaattgttgcaggaagacatggcaacattc

SEQ ID NO: 328795 - DNA, 75 bp, synthetic construct
  source 1..75: mol_type = other DNA
atggcacattcacctgtcattctgttgggcttacagatgctgaatgctatttttatcggtattcttggcggtatt

SEQ ID NO: 328796 - DNA, 75 bp, synthetic construct
  source 1..75: mol_type = other DNA
ggaaatggaaggcgctgaacatccacacaaggagaacactggcggcaatcagcatcacgccagcgatagtgaaac

SEQ ID NO: 328797 - DNA, 75 bp, synthetic construct
  source 1..75: mol_type = other DNA
agaatcagcccaacgtgaaacaaaatgagccagaagcggaacaaaacagcccggatacgcaacaaaacgggccag

SEQ ID NO: 328798 - DNA, 75 bp, synthetic construct
  source 1..75: mol_type = other DNA
acggcaactgtcctgactgtggcgcggtaatgggcgacgcaacataccaggaaacattcaacgaagaaagccagg

SEQ ID NO: 328799 - DNA, 75 bp, synthetic construct
  source 1..75: mol_type = other DNA
cgccagagtcaatcaacagcacactgaaaattcaacagggaaaaatcagcctggtcattgctgccattcatcgcg

SEQ ID NO: 328800 - DNA, 75 bp, synthetic construct
  source 1..75: mol_type = other DNA
aacgtgattttacgccgttcatacgaacgacagggtatcccctgcccgtggcgctacagcaacgatcgcgatgta

SEQ ID NO: 328801 - DNA, 75 bp, synthetic construct
  source 1..75: mol_type = other DNA
cctcgactcctgggatgctgaatatatgctggaaaaccgctgggatgaggcgtctgcttcctttgtcccggtcga

SEQ ID NO: 328802 - DNA, 75 bp, synthetic construct
  source 1..75: mol_type = other DNA
gcgcaaaatcatttgatctgacctcgacggcgtttttaatcgttgcctttctcactggcattgcgggcgctctgc

SEQ ID NO: 328803 - DNA, 75 bp, synthetic construct
  source 1..75: mol_type = other DNA
gaattatcatgcagtgttctggtttgcgatggtgatgattatcgccaccctgttctgcttactgcggattaaaga

SEQ ID NO: 328804 - DNA, 75 bp, synthetic construct
  source 1..75: mol_type = other DNA
cacgctctataccaatacatcacgtgtgggctggattatcgccggttcagtagccggaatagtcgcagagatctg

SEQ ID NO: 328805 - DNA, 75 bp, synthetic construct
  source 1..75: mol_type = other DNA
gcaaaaaatgaagttatcgacaaggatcgcgaagactggaaacgtatctctgcatcaatgcgcaaacaacctgat

SEQ ID NO: 328806 - DNA, 75 bp, synthetic construct
  source 1..75: mol_type = other DNA
ataacgccctgcacgatgcgcgttaccaggcaaaatacgtttcagccatctggcaaaaactgctcccgagtcagg

SEQ ID NO: 328807 - DNA, 75 bp, synthetic construct
  source 1..75: mol_type = other DNA
tcgggacaccattaagtggtggctgaaacagtcacgcgaagcgcaatccgccattcttaccgatgaaatcccgtt

SEQ ID NO: 328808 - DNA, 75 bp, synthetic construct
  source 1..75: mol_type = other DNA
tgtcccggtcgaaccagaatccgatccgatgatcgtcaattttgacaagctgtcccttgaagtacagaacgcggt

SEQ ID NO: 328809 - DNA, 75 bp, synthetic construct
  source 1..75: mol_type = other DNA
ggcgagacggcagatcactcaattaaggtgaacggtcatcaagaaatcacatccaccagcaggacgtgtgaccat

SEQ ID NO: 328810 - DNA, 75 bp, synthetic construct
  source 1..75: mol_type = other DNA
gaggaatacttcgcacgtaaaaacggcacgtactcaggttcacaacaaaatactggtgcatctgacacgatcgca

SEQ ID NO: 328811 - DNA, 75 bp, synthetic construct
  source 1..75: mol_type = other DNA
ctggtaacgatgaatttggtggggatggggcttggcgtaactttgatacccggttatatgaataattttaatacc

SEQ ID NO: 328812 - DNA, 75 bp, synthetic construct
  source 1..75: mol_type = other DNA
aaacccgcgattctgtgaaccagaaccagcaagaaacggaacagaacgaccagaaagcggaacaaaacagcccaa

SEQ ID NO: 328813 - DNA, 75 bp, synthetic construct
  source 1..75: mol_type = other DNA
agccagaaacgaaacaacctgaaccagtagcgcaacaggaaccggaaaaagtctgcaccgcctgcggtcagaccg

SEQ ID NO: 328814 - DNA, 75 bp, synthetic construct
  source 1..75: mol_type = other DNA
ggcggcggtagctgccctgattgtggtgcggtgataagtgacgcaacataccaggaaatattcgatgaagagaat

SEQ ID NO: 328815 - DNA, 75 bp, synthetic construct
  source 1..75: mol_type = other DNA
aacgtctggacatcccctgtccgtggcattacagcaacgatcgtgatgtacgcacaatcgttgagatggggaaaa

SEQ ID NO: 328816 - DNA, 75 bp, synthetic construct
  source 1..75: mol_type = other DNA
gagccggtaaaagttaccgctgacgaagtaaacaaaattatgcaggcagccaatatcagccagcctgacgccaat

SEQ ID NO: 328817 - DNA, 75 bp, synthetic construct
  source 1..75: mol_type = other DNA
gcatcacgtggtgaatttgttgaagggattagcgatccgaatgatccgaaatgggtgaaggggattgaaacctgc

SEQ ID NO: 328818 - DNA, 75 bp, synthetic construct
  source 1..75: mol_type = other DNA
aacatcaccgttgatatggtgattagtgcacaggaattgttgcaggaggacatggcaacattcgacgggcatatc

SEQ ID NO: 328819 - DNA, 75 bp, synthetic construct
  source 1..75: mol_type = other DNA
tgaaactggcgagacggcagatcactcaattaaggtgaacggtcatcaagaaatcacatccaccagcaggacgtg

SEQ ID NO: 328820 - DNA, 75 bp, synthetic construct
  source 1..75: mol_type = other DNA
ttgtctgtgaggataaacccggcatgccccgccctgccattgactcctgggataccgaatatatgcaggaaaacc

SEQ ID NO: 328821 - DNA, 75 bp, synthetic construct
  source 1..75: mol_type = other DNA
cggcgggagaatgttttctccaggacgcgcaggcaatcctggaacaagcggaaaatgccaaacaacgggcgcgga

SEQ ID NO: 328822 - DNA, 75 bp, synthetic construct
  source 1..75: mol_type = other DNA
aacaatgagaatgctggtaacgatcagcatcacaccagcgatagtgaaactggagaggcggcagatcccttaatt

SEQ ID NO: 328823 - DNA, 75 bp, synthetic construct
  source 1..75: mol_type = other DNA
gcggcaactgtcctgactgtggtgcggtgatggggaacgcaaccaaccaggaaacattcgatgaagagaatcagg

SEQ ID NO: 328824 - DNA, 75 bp, synthetic construct
  source 1..75: mol_type = other DNA
cacaaactgatccagtggagacggcggaatccaattctcaaaaaaatgaaatcctggtggaagctgaaccatctg

SEQ ID NO: 328825 - DNA, 75 bp, synthetic construct
  source 1..75: mol_type = other DNA
tacgagcggcaggggatcccctgcccgtggcgttactacaacgatcgcgatgtacgcacaatcgttgagctgggg

SEQ ID NO: 328826 - DNA, 75 bp, synthetic construct
  source 1..75: mol_type = other DNA
caggcagccaatatcagccagcctgacgccaataagttgcttgctgtatcacgtggtgaatttattgaagggatt

SEQ ID NO: 328827 - DNA, 75 bp, synthetic construct
  source 1..75: mol_type = other DNA
aggcgtgcgccaccatgcgctggatgatgcccgtcaccaggcgaaatacgttacagccacgatacaaaaactgat

SEQ ID NO: 328828 - DNA, 75 bp, synthetic construct
  source 1..75: mol_type = other DNA
ggagatggaaagccctggacatccgcatccggaagatgctgacaactatcagcataacgatagcggtgataaaac

SEQ ID NO: 328829 - DNA, 75 bp, synthetic construct
  source 1..75: mol_type = other DNA
ggaaggcgctgaacatccacacaagggggacactagcggcgctcaggaccacgccagcgatagtgaaactggtga

SEQ ID NO: 328830 - DNA, 75 bp, synthetic construct
  source 1..75: mol_type = other DNA
ggaaacggaaggcactgagcatccgcacaaggagaacactggcggcgctcaggaccacgccagcgataataaaac

SEQ ID NO: 328831 - DNA, 75 bp, synthetic construct
  source 1..75: mol_type = other DNA
gtgatgggcgacgcaacataccaggaaacattcgatgaagagaatcaggttgaagctcaggagaatgatccggag

SEQ ID NO: 328832 - DNA, 75 bp, synthetic construct
  source 1..75: mol_type = other DNA
gcgatagtgaaactggcgaggcggcagctcccttaattaaggtgaacagtcatcacaatatcacatccaccagca

SEQ ID NO: 328833 - DNA, 75 bp, synthetic construct
  source 1..75: mol_type = other DNA
cagagcgcaaagagactggaaaatacacgtctgttgttgatcttgcccgcgccagagtcaaccgacatagcactg

SEQ ID NO: 328834 - DNA, 75 bp, synthetic construct
  source 1..75: mol_type = other DNA
gtgggccgggagcgactaatctggtgactgccattgccgatgcgaggctggactccattccgctgatttgcatca

SEQ ID NO: 328835 - DNA, 75 bp, synthetic construct
  source 1..75: mol_type = other DNA
tctgatgaacaacgaagctctggggctggtgcatcagcaacaaagtctgttctacaagcagggtgtttttgctgc

SEQ ID NO: 328836 - DNA, 75 bp, synthetic construct
  source 1..75: mol_type = other DNA
gaccgccattgccgatgcgcggctggactccatcccgctgatttgcatcactggtcaggttcccgcctcgatgat

SEQ ID NO: 328837 - DNA, 75 bp, synthetic construct
  source 1..75: mol_type = other DNA
agaaagcgcagctgcctaccaccatgaccttaatggcgctgggcatgttgccaaaagcgcatccgctgtcgctgg

SEQ ID NO: 328838 - DNA, 75 bp, synthetic construct
  source 1..75: mol_type = other DNA
acggcagtttttgagattgaaacacagcccgctatggcagaaaaagccgccgcccccgcctttagcgaagaaagc

SEQ ID NO: 328839 - DNA, 75 bp, synthetic construct
  source 1..75: mol_type = other DNA
gccaaaattattcatgtcgatatcgaccgcgcagagctgggcaaaatcaagcaaccgcatgtggcaattcaggcg

SEQ ID NO: 328840 - DNA, 75 bp, synthetic construct
  source 1..75: mol_type = other DNA
cgcggcatgaaacgccgtcgtttaaaaaccttgctggctaacgatatcaacctgtatggctggcatctgccgctg

SEQ ID NO: 328841 - DNA, 75 bp, synthetic construct
  source 1..75: mol_type = other DNA
ttttgcgccacgtggcattgcaatgttgaccattgatatgccctcggtggggttttcgtcaaaatggaagttaac

SEQ ID NO: 328842 - DNA, 75 bp, synthetic construct
  source 1..75: mol_type = other DNA
tatcaggctactggaagaacgatccgttcagcccggaagaggactcacgcttaatcacctcatcatctgctgacg

SEQ ID NO: 328843 - DNA, 75 bp, synthetic construct
  source 1..75: mol_type = other DNA
gcgggtgcggcgtttatgacggttccgaaattcatgaagctgtgttgacgttactggcgatatcgcgtagcggcg

SEQ ID NO: 328844 - DNA, 75 bp, synthetic construct
  source 1..75: mol_type = other DNA
ggagtaggtaaaacgcattattggaatagcttttatactaaacattctaaaaaattagattttaatgcatattca

SEQ ID NO: 328845 - DNA, 75 bp, synthetic construct
  source 1..75: mol_type = other DNA
gggaggggctttcccgtttcagcgtcccgctgaaatcggcggcctacctccttttgccctgaatgcagtctatcg

SEQ ID NO: 328846 - DNA, 75 bp, synthetic construct
  source 1..75: mol_type = other DNA
caagaagtggacacctacggcatctctatccccatcaccaaacacaactatctggtcagacatatcgaagagctc

SEQ ID NO: 328847 - DNA, 75 bp, synthetic construct
  source 1..75: mol_type = other DNA
gaagaaaacgaactggtgggtattatcaccggtcgtgacgtgcgttttgttaccgacctgaaccagccggttagc

SEQ ID NO: 328848 - DNA, 75 bp, synthetic construct
  source 1..75: mol_type = other DNA
agtttttacctctatgtgcaacgttgttcagccagaacaagtctgcaattttttgtgctatgtagaagtagcgga

SEQ ID NO: 328849 - DNA, 75 bp, synthetic construct
  source 1..75: mol_type = other DNA
tggatatctggtttaagggtgatgttgtggaacgttatgattttcgtcagactgcaagtaagacctcacgtggtt

SEQ ID NO: 328850 - DNA, 75 bp, synthetic construct
  source 1..75: mol_type = other DNA
gtttcgggagttcatcaacgaatactcagatgaaaaattcgttcaggtatggggtaatggtgcgactttcgataa

SEQ ID NO: 328851 - DNA, 75 bp, synthetic construct
  source 1..75: mol_type = other DNA
tcgtgactggcgtaggtgttccgcagatcaccgccgttgctgacgccgtagaagccctggaaggcaccggtattc

SEQ ID NO: 328852 - DNA, 75 bp, synthetic construct
  source 1..75: mol_type = other DNA
tgcgatgtccaaaggttcttctgaccgttacttccagagtgacaacgctgccgacaaactggtgccggaaggtat

SEQ ID NO: 328853 - DNA, 75 bp, synthetic construct
  source 1..75: mol_type = other DNA
agtagtggtctgaaagaaggagaagaagatcatgataaatatgaacttcttccggaagatctctattttatcttt

SEQ ID NO: 328854 - DNA, 75 bp, synthetic construct
  source 1..75: mol_type = other DNA
atcaactttatgcagattgccgccggattcggcctcgaaacctgtgatttgaataacgaagccgatccgcaggct

SEQ ID NO: 328855 - DNA, 75 bp, synthetic construct
  source 1..75: mol_type = other DNA
cgcattgatgccgaagaaaaagtttacccgatggtgccgccaggtgcggcgaatactgaaatggtgggggaataa

SEQ ID NO: 328856 - DNA, 75 bp, synthetic construct
  source 1..75: mol_type = other DNA
tttcccgcagatgatccggtatcgggttaaagagtgggaaaaagttgccggtgtgcctgttgcagaagtatttta

SEQ ID NO: 328857 - DNA, 75 bp, synthetic construct
  source 1..75: mol_type = other DNA
aaagaaagcagtccctttgcgccgaccagcgattatgagcaactgtcattctcgaagagttgttatttcgggatc

SEQ ID NO: 328858 - DNA, 75 bp, synthetic construct
  source 1..75: mol_type = other DNA
ttttactctgagcaggacctgaccgatccttcccgacgggtagatgtgtataacgccgcggtagccctgttacgt

SEQ ID NO: 328859 - DNA, 75 bp, synthetic construct
  source 1..75: mol_type = other DNA
gaagtgaatttactgccaaaagtattaccgatgtttcgtctcagacagccagacaccttgattgagctggtgagt

SEQ ID NO: 328860 - DNA, 75 bp, synthetic construct
  source 1..75: mol_type = other DNA
gccgtatttacccagggtgcaaatgctgaagctgctaaagctgcaggtgctgaactggtaggtatggaagatctg

SEQ ID NO: 328861 - DNA, 75 bp, synthetic construct
  source 1..75: mol_type = other DNA
tgaactttgacgttgttattgcttctccggatgcaatgcgcgttgttggccaactgggccaggttctgggtccgc

SEQ ID NO: 328862 - DNA, 75 bp, synthetic construct
  source 1..75: mol_type = other DNA
aaagttagcatctccaccaccatgggtgcaggtgttgcagttgaccaggctggcctgagcgcttctgtaaactaa

SEQ ID NO: 328863 - DNA, 75 bp, synthetic construct
  source 1..75: mol_type = other DNA
cacgtcttaaaggcgctgcctaacgtaccgtgggtagatcacactcgcgtcgcggcctttggtttccgtttcggc

SEQ ID NO: 328864 - DNA, 75 bp, synthetic construct
  source 1..75: mol_type = other DNA
gtaaattgttagagatcccatttaactcggtgtatcggaattttgacaaaggtcttcaggaaataacagactgga

SEQ ID NO: 328865 - DNA, 75 bp, synthetic construct
  source 1..75: mol_type = other DNA
ttaatcacctcatcatctgctgacggtaaattgttagagatcccatttaacccggtgtatcggaattttgacaaa

SEQ ID NO: 328866 - DNA, 75 bp, synthetic construct
  source 1..75: mol_type = other DNA
cgttttgcaatcattactggcagagcgagttacaatcccgcccccgatcttgccggtgcgttagctacaccaaag

SEQ ID NO: 328867 - DNA, 75 bp, synthetic construct
  source 1..75: mol_type = other DNA
gagctctggagaaaatgcgtaaggtccgccagcgctgtggagaggtgttccgctatgcaattgttactggtcggg

SEQ ID NO: 328868 - DNA, 75 bp, synthetic construct
  source 1..75: mol_type = other DNA
gaaattatcaattgaaacctcttttgaggcagttagcagagaatggcacgcagcaaaagcagatcgttggactct

SEQ ID NO: 328869 - DNA, 75 bp, synthetic construct
  source 1..75: mol_type = other DNA
cgtggtgactgacccgcagactgttctgccaaccacgactctgcgcgaggtgaaagaactgaccgagcgtaacgg

SEQ ID NO: 328870 - DNA, 75 bp, synthetic construct
  source 1..75: mol_type = other DNA
gacgaactgcgtactaaagcggagtttgtacgtatcagcggtgcgggcatccaggaaagccacgttcacgacgtg

SEQ ID NO: 328871 - DNA, 75 bp, synthetic construct
  source 1..75: mol_type = other DNA
ttccagaaagcggaacgtaaaccgaacgcgtgtaaagatgaacaaggtcgtctgcgtgttggcgcagcggttggc

SEQ ID NO: 328872 - DNA, 75 bp, synthetic construct
  source 1..75: mol_type = other DNA
tccggtaatgccgcaggtcgcttactggcgttgcaatccactgctgactggggacgggtggtttacatcggggaa

SEQ ID NO: 328873 - DNA, 75 bp, synthetic construct
  source 1..75: mol_type = other DNA
cacgaaaaacgcgttgaaaaagcgctggtggttgatgacgaattccacctgatcggcatgatcaccgtgaaagac

SEQ ID NO: 328874 - DNA, 75 bp, synthetic construct
  source 1..75: mol_type = other DNA
cgcgatgtccaaaggttcttctgatcgttatttccagagcgacaacgccgctgacaaactggtaccggaaggtat

SEQ ID NO: 328875 - DNA, 75 bp, synthetic construct
  source 1..75: mol_type = other DNA
gaagaaaacgaactggtgggtattatcaccggtcgtgacgtacgttttgttaccgacctgagccagccggttagc

SEQ ID NO: 328876 - DNA, 75 bp, synthetic construct
  source 1..75: mol_type = other DNA
cttcctcgggaggggctttcccgtttcagcatccggctgaaatctgcggcttacctcctttcgccctgtatgcag

SEQ ID NO: 328877 - DNA, 75 bp, synthetic construct
  source 1..75: mol_type = other DNA
gatcaccgccgttgctgatgcagtagaagccctggaaggcaccggtattccggttatcgctgacggcggtatccg

SEQ ID NO: 328878 - DNA, 75 bp, synthetic construct
  source 1..75: mol_type = other DNA
gacgaactgcgtactaaagcggagtttgtacgtatcagcggtgcgggtattcaggaaagccacgttcacgacgtg

SEQ ID NO: 328879 - DNA, 75 bp, synthetic construct
  source 1..75: mol_type = other DNA
cgcttctcactggagcaggcgggagatgcttacgcgctaatggcgagcggcaaatgcgggaaagttgtgattaat

SEQ ID NO: 328880 - DNA, 75 bp, synthetic construct
  source 1..75: mol_type = other DNA
cgcttctcgctggaacaggctggtgatgcctatgcgctgatggcaagcggcaaatgcggcaaagtcgtgattaac

SEQ ID NO: 328881 - DNA, 75 bp, synthetic construct
  source 1..75: mol_type = other DNA
gaacaggcaggagatgcctatgcgctgatggcgagcggtaaatgcgggaaagttgtgattaacttcccggattaa

SEQ ID NO: 328882 - DNA, 75 bp, synthetic construct
  source 1..75: mol_type = other DNA
gacggtgacaattcgtgataaccaaccggaaaaagtcaccatttcaggcacagcggtgattttgtttcatgccga

SEQ ID NO: 328883 - DNA, 75 bp, synthetic construct
  source 1..75: mol_type = other DNA
cgcggcctttggtttccgtttcggcgctaacgttgccgtgcgtctggcatatcttgaatcgccgcgtctgaaagc

SEQ ID NO: 328884 - DNA, 75 bp, synthetic construct
  source 1..75: mol_type = other DNA
aatgttttaaaggcgttgccgaatgtgccgtgggtagatcacacgcgcgtcgtggcctttggtttccgttttggc

SEQ ID NO: 328885 - DNA, 75 bp, synthetic construct
  source 1..75: mol_type = other DNA
caaaatgcactggaaatccttggtacattcatcgcgggtgtctgggtatccagggttctgggggctttcgggaaa

SEQ ID NO: 328886 - DNA, 75 bp, synthetic construct
  source 1..75: mol_type = other DNA
gagtatcaccgaatgcaatattgaatcttacagatccccggactatgggtgcattgatgcagtcgatggcgcgca

SEQ ID NO: 328887 - DNA, 75 bp, synthetic construct
  source 1..75: mol_type = other DNA
ctccaacgtccagcccgacatccccggcggcggcactcttgctgatcgtaacaataaccccgggaacattcgccc

SEQ ID NO: 328888 - DNA, 75 bp, synthetic construct
  source 1..75: mol_type = other DNA
cttgctcgtcagttaatgttgtacgccggacggggaataaacagcgtggagaaaattgtctctacttgggcgcct

SEQ ID NO: 328889 - DNA, 75 bp, synthetic construct
  source 1..75: mol_type = other DNA
tcgcctgggcgtacagacccgtgatgccagcggtaacatgcgtgacatggccgctatctttacgggcgttggaca

SEQ ID NO: 328890 - DNA, 75 bp, synthetic construct
  source 1..75: mol_type = other DNA
tcgcctgggggtacagacacgggatgccagcggtaacatgcgtgacatggccgctatttttacaggtgtaggcca

SEQ ID NO: 328891 - DNA, 75 bp, synthetic construct
  source 1..75: mol_type = other DNA
tccttgtctcgcttggcttcagtgtggatgatgcaggcgcgaaaaaattcggttctgtcctcgccggtacaactg

SEQ ID NO: 328892 - DNA, 75 bp, synthetic construct
  source 1..75: mol_type = other DNA
cggcttaatcgtatatcggaactgaccgggcttgatttgggcaattttgatgacaggttgctgctgtatgtggcg

SEQ ID NO: 328893 - DNA, 75 bp, synthetic construct
  source 1..75: mol_type = other DNA
gcatgacggctgaaatgatgctggaacagtcgcggttgatgcacctgttggcgcaggatagccgtttgcgggaag

SEQ ID NO: 328894 - DNA, 75 bp, synthetic construct
  source 1..75: mol_type = other DNA
tcggggatattatcgggcggctgttcttcagactgattgaggggacatcaggccttatcacctggtggcaatcgc

SEQ ID NO: 328895 - DNA, 75 bp, synthetic construct
  source 1..75: mol_type = other DNA
tgggcattgacgaaaataccctgatggctatgcgccggggtgtgggtggcttctccgggcagtacagcgcaatgg

SEQ ID NO: 328896 - DNA, 75 bp, synthetic construct
  source 1..75: mol_type = other DNA
tgggcattgacgaaaataccctcatggcgatgcgccggggtgtgggtgatttctccgggcagtacagcgcaatgg

SEQ ID NO: 328897 - DNA, 75 bp, synthetic construct
  source 1..75: mol_type = other DNA
gtacaataagcaatatgaaatatattataggtatcttttttttatactccgggcttatagtagggttgtctgttt

SEQ ID NO: 328898 - DNA, 75 bp, synthetic construct
  source 1..75: mol_type = other DNA
tcaccctcagagagcggctgatgacgatgcagaagcaactggaaggggcgcaggaatatatccgtactcagtgca

SEQ ID NO: 328899 - DNA, 75 bp, synthetic construct
  source 1..75: mol_type = other DNA
ctgaactcgatgccagatatacaaaggaacttgctgatgctaacgcgactatcgaaagtctacgtgctgatgttt

SEQ ID NO: 328900 - DNA, 75 bp, synthetic construct
  source 1..75: mol_type = other DNA
tgcctgtcatgggctgttaatcattaccgtgataacgccatcgcctacaaagagcagcgcgataaagccacatcc

SEQ ID NO: 328901 - DNA, 75 bp, synthetic construct
  source 1..75: mol_type = other DNA
atgaatcagcacaacacccgtcttattcgcctccctgaagttctcaatcgaaccggttatggtaaagcctggatc

SEQ ID NO: 328902 - DNA, 75 bp, synthetic construct
  source 1..75: mol_type = other DNA
actaatgctggttgctctttttctttccatggcctggatgatgttgtcttcgtcggggctgctggggtgaacata

SEQ ID NO: 328903 - DNA, 75 bp, synthetic construct
  source 1..75: mol_type = other DNA
ttcatcctcagagaacggttgatgacaatgcagaagcagctggaaggggcgcaggaatatatccgcactcagtgc

SEQ ID NO: 328904 - DNA, 75 bp, synthetic construct
  source 1..75: mol_type = other DNA
cgcctttatatccggcatggttttggctgaccgtagtcgaaaccttcaactacaccgctatccggctgaatcagc

SEQ ID NO: 328905 - DNA, 75 bp, synthetic construct
  source 1..75: mol_type = other DNA
tcatcctcagagaacggttgatgacaatgcagaagcagctggaaggggcacagctatacattcgtgagcaatgcc

SEQ ID NO: 328906 - DNA, 75 bp, synthetic construct
  source 1..75: mol_type = other DNA
aagcgcagcgcgataaaaaagtcagagagctggagctggcgaacgcgacaattactgatatgcagatacgccagc

SEQ ID NO: 328907 - DNA, 75 bp, synthetic construct
  source 1..75: mol_type = other DNA
cagcgaatgcccgaaaatcgctgctatttttatcaggatttgatgctgccagtcttacttgatagtttgcgcggc

SEQ ID NO: 328908 - DNA, 75 bp, synthetic construct
  source 1..75: mol_type = other DNA
tgaacatccacacaaggagaatgctggcagcgctcaggaccacgccagcgatagtgaaactggcgagacggcaga

SEQ ID NO: 328909 - DNA, 75 bp, synthetic construct
  source 1..75: mol_type = other DNA
ggcccgaaattcaggcagagatgcgcatctggaaaaaacgtcgcgaaggtgaacgcaaggaaaccggaaaataca

SEQ ID NO: 328910 - DNA, 75 bp, synthetic construct
  source 1..75: mol_type = other DNA
gttacttgctgtatcgcgtggtgaatttgttgaggggattagcgaccctaatgatccgaaatgggtcaaagggat

SEQ ID NO: 328911 - DNA, 75 bp, synthetic construct
  source 1..75: mol_type = other DNA
tgtcctgactgtggcgcggtgatgggcgacgcaacataccaggaaacatttgatgaaaaaaatcgggctgaagtt

SEQ ID NO: 328912 - DNA, 75 bp, synthetic construct
  source 1..75: mol_type = other DNA
tttgttgcagggattagcgatccgaatgatccgaaatgggtgaaggggattgaaacccgcgattctgtgaaccag

SEQ ID NO: 328913 - DNA, 75 bp, synthetic construct
  source 1..75: mol_type = other DNA
tgcgttacaaaacgagccagaaacgaaacagcctgaaccagaagagcaacaagaaccggaaaaagtctgcaccgc

SEQ ID NO: 328914 - DNA, 75 bp, synthetic construct
  source 1..75: mol_type = other DNA
ccattccggacgaacaggcaacagcagaaggcgctaaacctgtggccactgccattgaagcaggcgacgaacgcc

SEQ ID NO: 328915 - DNA, 75 bp, synthetic construct
  source 1..75: mol_type = other DNA
gaaccagcaagaatcggaacagaacgaccagaaagcggaacaaaacagcccaaatacgcaacaaaacgagccaga

SEQ ID NO: 328916 - DNA, 75 bp, synthetic construct
  source 1..75: mol_type = other DNA
gcgaatataagcagacatggaaaacactggatgatgaactggcctacgctctgtggcctggtgacattgatgccg

SEQ ID NO: 328917 - DNA, 75 bp, synthetic construct
  source 1..75: mol_type = other DNA
gaaaatcaggctgaagctcaggaggaaatggaaggcagtggcggcgatcactaccacaccacagataatgaaagt

SEQ ID NO: 328918 - DNA, 75 bp, synthetic construct
  source 1..75: mol_type = other DNA
tggaaacctccggcggaatcatcgaccgtaaaacaataaagtggtgggcgaaacgatcacgcgaagcacaatccg

SEQ ID NO: 328919 - DNA, 75 bp, synthetic construct
  source 1..75: mol_type = other DNA
aaacatctggcggaatcatcgaccggaaaacaataaagtggtgggcgaagcgatcacgcgaagcgcaatctgcca

SEQ ID NO: 328920 - DNA, 75 bp, synthetic construct
  source 1..75: mol_type = other DNA
cattgacggcagcatccatcgctgggcaaaaaatgaagttatcgataacgaccgcgaagactggaagcgtatctc

SEQ ID NO: 328921 - DNA, 75 bp, synthetic construct
  source 1..75: mol_type = other DNA
gcgccctcggtaacccttacacaatttccgcttttcatgacaactacatcaatggattaaaacgaattggtttag

SEQ ID NO: 328922 - DNA, 75 bp, synthetic construct
  source 1..75: mol_type = other DNA
gccagacgcgtaacaacgaaaaaataaaacaactgctgaacttcctgaaagaagaaacttacagtgattttaaaa

SEQ ID NO: 328923 - DNA, 75 bp, synthetic construct
  source 1..75: mol_type = other DNA
cgcgcgttgagcgagtggctgaatgaaaataccgatcttgaagtgacttttattgatattcctaatccggcataa

SEQ ID NO: 328924 - DNA, 75 bp, synthetic construct
  source 1..75: mol_type = other DNA
cgtgagttacgcgaagaactgggcatcgaagcaactgtgggtgagtatgttgccagccatcagcgagaagtttcg

SEQ ID NO: 328925 - DNA, 75 bp, synthetic construct
  source 1..75: mol_type = other DNA
ccatcatcgaacgtgatggcaaaattttactcgcgcaacgccccgcccagagcgatcaggcgggattatgggagt

SEQ ID NO: 328926 - DNA, 75 bp, synthetic construct
  source 1..75: mol_type = other DNA
cattgcaatatccgctggctcctgctgatattccactacttcatgcgtttatggctttacgcgccgccagaccag

SEQ ID NO: 328927 - DNA, 75 bp, synthetic construct
  source 1..75: mol_type = other DNA
ttggatattcgatgctgatacggtgttcgacaccgttggcattctggaatgggcgcggcttgcaccagtggaacg

SEQ ID NO: 328928 - DNA, 75 bp, synthetic construct
  source 1..75: mol_type = other DNA
ttgaataccttactgcgtcagggaaaaccagaccgcttgttgatagagccgaccgggctgggccatccgaaacag

SEQ ID NO: 328929 - DNA, 75 bp, synthetic construct
  source 1..75: mol_type = other DNA
gccgcgcccgtgccaaatttgcctggcaatttctcgagcaatatccggcagctcaggattgcgcttataaatttc

SEQ ID NO: 328930 - DNA, 75 bp, synthetic construct
  source 1..75: mol_type = other DNA
cgtcgcttggtgcacgggcggcgggcaaagttttatcgatagcgccgcgcgttttggcgtggatgcttttattac

SEQ ID NO: 328931 - DNA, 75 bp, synthetic construct
  source 1..75: mol_type = other DNA
cgtattgagctgatctccagcggcgaaactgactggaacgccttacaaagcgcgctgttgaagcttcgtttagcg

SEQ ID NO: 328932 - DNA, 75 bp, synthetic construct
  source 1..75: mol_type = other DNA
atggtggcgatcgacaattaattcacagtgagcatgggaaagttgacggtcatcttctggatttgccgcgtcgca

SEQ ID NO: 328933 - DNA, 75 bp, synthetic construct
  source 1..75: mol_type = other DNA
gggcttaagcgggcgaattattacctgtaaagagggaatttattacctggcgaaaatcggtcattacctcctgca

SEQ ID NO: 328934 - DNA, 75 bp, synthetic construct
  source 1..75: mol_type = other DNA
ccttgccgattcactcaatgaaggaaaaccttccgggttaaaagtatttggcgactggccgacgatatatccggc

SEQ ID NO: 328935 - DNA, 75 bp, synthetic construct
  source 1..75: mol_type = other DNA
tgtctggcggtcagcgagcgcgcgttgctctgcttcgcgctcttctcgctcagccaaaagcgttgctactggatg

SEQ ID NO: 328936 - DNA, 75 bp, synthetic construct
  source 1..75: mol_type = other DNA
tgtgatctcttttgacgacgcaatcaaaattggtcgtatcgtgcgtgagcaggtacaggtcggtcgggtcattac

SEQ ID NO: 328937 - DNA, 75 bp, synthetic construct
  source 1..75: mol_type = other DNA
ttctttgccattcctggcttgctgttggcgatcttctggtatctgatggttcgcaataagccggaagaaagccgc

SEQ ID NO: 328938 - DNA, 75 bp, synthetic construct
  source 1..75: mol_type = other DNA
atgatcgaagaaaatttgaattgccaattaaagctcgttctttgacattccattcatcacaagagtatcctcaat

SEQ ID NO: 328939 - DNA, 75 bp, synthetic construct
  source 1..75: mol_type = other DNA
gaaaatgcgcatgttatgccgccagtagtgattgaagatgcttctgatatgctactggctatcaccctggcagga

SEQ ID NO: 328940 - DNA, 75 bp, synthetic construct
  source 1..75: mol_type = other DNA
cggcaccaccggtattgctgtcgggatggcgacggacattccgccacataacctgcgtgaagtcgcacaggcggc

SEQ ID NO: 328941 - DNA, 75 bp, synthetic construct
  source 1..75: mol_type = other DNA
gccgtggctggcggagtccttactgttaccagtaagggggttgcgatttctgctgaatacttagactcgctttta

SEQ ID NO: 328942 - DNA, 75 bp, synthetic construct
  source 1..75: mol_type = other DNA
ggccgtctggctgtggaaaatccactctgttttcatggatgattggtgcgctggccggacagttttcttgtacag

SEQ ID NO: 328943 - DNA, 75 bp, synthetic construct
  source 1..75: mol_type = other DNA
tcggcagaagccgcgcgaggcgaggatggtctggcacacctgtatgtactgccgccgcagagcactctgactatt

SEQ ID NO: 328944 - DNA, 75 bp, synthetic construct
  source 1..75: mol_type = other DNA
atatgctgatggaaagcgacgatcagaaactgttgatggcttccgatgcgggttacggtttcgtctgcaccttta

SEQ ID NO: 328945 - DNA, 75 bp, synthetic construct
  source 1..75: mol_type = other DNA
gtcacattctttgtgagttaccgcatttacaactgccgacgctggagaagttggggcttattaatgctctgggct

SEQ ID NO: 328946 - DNA, 75 bp, synthetic construct
  source 1..75: mol_type = other DNA
atgataaatcggcacagcaacccgcttttcaggtgagctatcgctatccgggcgaagaacgggacaaagcgagcc

SEQ ID NO: 328947 - DNA, 75 bp, synthetic construct
  source 1..75: mol_type = other DNA
gcgtgagctggaggaagaagaaaaaaggctgatacgtgaatatcagcctgagttttactttggtaaccgcattca

SEQ ID NO: 328948 - DNA, 75 bp, synthetic construct
  source 1..75: mol_type = other DNA
ggatgtggatgagaagaataccgtcgctttaagctacggtattcgcggaaatccaaatcatagcgtcgtttctga

SEQ ID NO: 328949 - DNA, 75 bp, synthetic construct
  source 1..75: mol_type = other DNA
gctgtaaagttagcttattctcccgcatcaaaaacttttgaaagttacagagtaatgactcaagttcatacaaac

SEQ ID NO: 328950 - DNA, 75 bp, synthetic construct
  source 1..75: mol_type = other DNA
cagattcagaaagcactgagaaccgcacaaaccccgcgtaattggaactacacgaaatatccaggaaaagacagt

SEQ ID NO: 328951 - DNA, 75 bp, synthetic construct
  source 1..75: mol_type = other DNA
acgatgaagctgttatcagtgccagtcctggctttgatgaagcatgggaagccagagcagatgcaaacagggtta

SEQ ID NO: 328952 - DNA, 75 bp, synthetic construct
  source 1..75: mol_type = other DNA
gtgatggcggatcacggcaacgatccgaccattggtcacagccaccatacccgcgaagtggtgccgctgctggtt

SEQ ID NO: 328953 - DNA, 75 bp, synthetic construct
  source 1..75: mol_type = other DNA
tgcgggctggcaagtagagcgccgtggcgatgagttgcagtttctgtgggttaaccaggccgtggcagttggtga

SEQ ID NO: 328954 - DNA, 75 bp, synthetic construct
  source 1..75: mol_type = other DNA
tcaacgcgccgcgttctggcgcttatgacaacggcttccaggtcgtgcatatgggctacggcgtcgatgagaaag

SEQ ID NO: 328955 - DNA, 75 bp, synthetic construct
  source 1..75: mol_type = other DNA
gggagctacaggcatgtaagcgcaaaaagcgtgagctggaggaagaagaaaaaaggctgatacgtgaatatcagc

SEQ ID NO: 328956 - DNA, 75 bp, synthetic construct
  source 1..75: mol_type = other DNA
ttgatagctttggcgtaggcgcaatgaaagatgtcacgttggtgcgtccgcaggatgccggggcgaatacctgtg

SEQ ID NO: 328957 - DNA, 75 bp, synthetic construct
  source 1..75: mol_type = other DNA
tcgtcatggctgatcatggtaacgacccgacaatcggtcacagccaccatacccgcgaagtcgtgccggtgctgg

SEQ ID NO: 328958 - DNA, 75 bp, synthetic construct
  source 1..75: mol_type = other DNA
ttactgtcagcaccggcgttaaagtttacttctgcgatcctcagagtccttggcagcggggaacaaatgagaaca

SEQ ID NO: 328959 - DNA, 75 bp, synthetic construct
  source 1..75: mol_type = other DNA
tgggttcaacagaactggcggctaatctctttcgagctacccaaacagaagaaaaactcaagcgggatggcgtga

SEQ ID NO: 328960 - DNA, 75 bp, synthetic construct
  source 1..75: mol_type = other DNA
gtggcattattttgcattcaaatacaacaactagacgtgaaatgaaagcattattttatctttctgaaaaaaaac

SEQ ID NO: 328961 - DNA, 75 bp, synthetic construct
  source 1..75: mol_type = other DNA
tcgcttgaacggccactatacttttttagtattatcggcgttttacttgctgctttgtctataattttaggattg

SEQ ID NO: 328962 - DNA, 75 bp, synthetic construct
  source 1..75: mol_type = other DNA
ccggcgacggttgattttcattcttccctgaagtttgtggccagcctccctgccctcattgattcgatcgaaatg

SEQ ID NO: 328963 - DNA, 75 bp, synthetic construct
  source 1..75: mol_type = other DNA
tgccatagtcaggccaaagaggtattcggtgccgatatgctcgacatggttctgccgaggctggatggcttcgag

SEQ ID NO: 328964 - DNA, 75 bp, synthetic construct
  source 1..75: mol_type = other DNA
gtatgactacgactttatcttccttgatagtggtcctcacctcgatgcgttcctgaaaaactgcatcggagcggc

SEQ ID NO: 328965 - DNA, 75 bp, synthetic construct
  source 1..75: mol_type = other DNA
gcagatgcgaagaatgccctgaactttatttcttactgggccggaatgtcggagagaacatttaagagtgttgga

SEQ ID NO: 328966 - DNA, 75 bp, synthetic construct
  source 1..75: mol_type = other DNA
ctggctttgcgtcagtgcggttatcagttcccatccagggaagcagccaacttcctgtctttattacagggagat

SEQ ID NO: 328967 - DNA, 75 bp, synthetic construct
  source 1..75: mol_type = other DNA
gctggtcatggcagaagtacagccgccagcaggcagggaggcagagcagaaagcccgtgctaccaggcgctggtc

SEQ ID NO: 328968 - DNA, 75 bp, synthetic construct
  source 1..75: mol_type = other DNA
tagaattacgtatgaagtatggtgaggttaatacaaaatatggcgagcgacctgaagggagtgtgagcaaactat

SEQ ID NO: 328969 - DNA, 75 bp, synthetic construct
  source 1..75: mol_type = other DNA
aaacttggtaatttacatagtaatgacttcttgtttcgatcccgggtcggtactaaccagcacatatcaacccgg

SEQ ID NO: 328970 - DNA, 75 bp, synthetic construct
  source 1..75: mol_type = other DNA
aagggacatcatgcagaagctcatttttttgataagggaggtcatggatttggtgtatccggaaaaaatggatat

SEQ ID NO: 328971 - DNA, 75 bp, synthetic construct
  source 1..75: mol_type = other DNA
gatgtaatccccgcttccattgacgatgcattccttgctgaaggctggaagggattgtgtgaagaacatctgcca

SEQ ID NO: 328972 - DNA, 75 bp, synthetic construct
  source 1..75: mol_type = other DNA
atcggttggcaattctcccgcagaatgcctcctgaattaaaaaacagactgcattgctggctggtcttttctccg

SEQ ID NO: 328973 - DNA, 75 bp, synthetic construct
  source 1..75: mol_type = other DNA
gaaatcagcgttgctggaaaatatccgaaacttctttctgacgtttgtctggcttcccctgaatttttccccttt

SEQ ID NO: 328974 - DNA, 75 bp, synthetic construct
  source 1..75: mol_type = other DNA
gcccacggtcttgctccgctggcgagccatccactggggctggtcatgctggcgctcatctgctccttcccgctg

SEQ ID NO: 328975 - DNA, 75 bp, synthetic construct
  source 1..75: mol_type = other DNA
atgagcagaaaaacccaacgttactctaaagagttcaaagccgaagctgtcagaacggtttgcaccggcgttaaa

SEQ ID NO: 328976 - DNA, 75 bp, synthetic construct
  source 1..75: mol_type = other DNA
gggcagaagtgggttgagtggggaacgtgcttaagtttggcgattttagctcaggggccgttattcaattattta

SEQ ID NO: 328977 - DNA, 75 bp, synthetic construct
  source 1..75: mol_type = other DNA
cccctgtaattctcggttttgttatcgtaccattattggtatggccgacggttattgccttagccgtacttatat

SEQ ID NO: 328978 - DNA, 75 bp, synthetic construct
  source 1..75: mol_type = other DNA
accacgctcgatcagctgctggatatcgtgcaggggccggattatccgactgaagcggaaattatcacttcgcgc

SEQ ID NO: 328979 - DNA, 75 bp, synthetic construct
  source 1..75: mol_type = other DNA
gcgcgcgttgaatggtttgcttattcatcgagaaaagttaaccccggagcattttacggcgctaaccgactgctg

SEQ ID NO: 328980 - DNA, 75 bp, synthetic construct
  source 1..75: mol_type = other DNA
gcatgactacgactttattttccttgatagtggtcctcaccttgatgcgttcctgaaaaactgcattggggcggc

SEQ ID NO: 328981 - DNA, 75 bp, synthetic construct
  source 1..75: mol_type = other DNA
tctcggcgcttatcggcatcattatggcttccggtcttggcgactggattgcccacggtcttgctccgctggcga

SEQ ID NO: 328982 - DNA, 75 bp, synthetic construct
  source 1..75: mol_type = other DNA
gtcaggacacggttcgcgtcggtgtcccttctgtactggtgagccgctttctgaccggcgcgcctaccgtactta

SEQ ID NO: 328983 - DNA, 75 bp, synthetic construct
  source 1..75: mol_type = other DNA
tggatgggcgtccggcggtgaaaaacctgctggaaatcctttccgaatggctggtgttccgccgtgataccgtgc

SEQ ID NO: 328984 - DNA, 75 bp, synthetic construct
  source 1..75: mol_type = other DNA
ctaagaccgcgccggaagtgattgagcgcgcgctgaatggtttgcttattcatcgggaaaagttaaccccggagc

SEQ ID NO: 328985 - DNA, 75 bp, synthetic construct
  source 1..75: mol_type = other DNA
ctgccctaccacacactgggcatcaacaaatatcacttacttaatcattcattttctgccctaccacacactggg

SEQ ID NO: 328986 - DNA, 75 bp, synthetic construct
  source 1..75: mol_type = other DNA
aacaacctgaatagcgatatgagtgcaggaatgaccagcaatcgctggattaactatcagcaatttatccagacg

SEQ ID NO: 328987 - DNA, 75 bp, synthetic construct
  source 1..75: mol_type = other DNA
ctggtgaaaggcgtggtcgataccttccgcgccgccgggctgaaaatcttcggcccaaccgcaggtgcggcccaa

SEQ ID NO: 328988 - DNA, 75 bp, synthetic construct
  source 1..75: mol_type = other DNA
tttgttacaaaggctatagatgttgcattttcaaggatagaggggttagagcaaagattgaacaaactcgaaaac

SEQ ID NO: 328989 - DNA, 75 bp, synthetic construct
  source 1..75: mol_type = other DNA
accgttttacgatcgcagcggcggcggcttaacactttctggcggagaaccctttatgcagccggaaatggcgac

SEQ ID NO: 328990 - DNA, 75 bp, synthetic construct
  source 1..75: mol_type = other DNA
atgctctgcgtgaaaaatgtttcgctacgtttaccagaaagccgcttgctgacaaacgttaactttacggtggat

SEQ ID NO: 328991 - DNA, 75 bp, synthetic construct
  source 1..75: mol_type = other DNA
agcatcattgatgatactggcaatccttccgaagtggctgtttattccaacggcatcgtcgccatgccgctgtat

SEQ ID NO: 328992 - DNA, 75 bp, synthetic construct
  source 1..75: mol_type = other DNA
gcaataaatcacgtgactttattgtcacggttccccctatggtacgtttaaatcccagtgagcaaattcaaataa

SEQ ID NO: 328993 - DNA, 75 bp, synthetic construct
  source 1..75: mol_type = other DNA
ccctgaaagatctggcagaaaaagaggtggataacgccgcacgtctgttgggtgaaatgcgtcgcggatgtcagc

SEQ ID NO: 328994 - DNA, 75 bp, synthetic construct
  source 1..75: mol_type = other DNA
cgatcttcaggatgttcccgccgatagtcccgttctggatatgacgcaatggtcagaaaattacaacaagctgcg

SEQ ID NO: 328995 - DNA, 75 bp, synthetic construct
  source 1..75: mol_type = other DNA
gcccatcaggctgcggcaaatcaaccctgttttcgtggatgatcggtgcgcttgccggggagttttcctgtagag

SEQ ID NO: 328996 - DNA, 75 bp, synthetic construct
  source 1..75: mol_type = other DNA
gtattgcgacgaatagagaaacgaggagcactagagaagaccagaaaagtgcgccaaagatgcggtgaggtcttt

SEQ ID NO: 328997 - DNA, 75 bp, synthetic construct
  source 1..75: mol_type = other DNA
ggcctatcgagaagaaatcattaagacattcgagcaagatgtcttcccgttcattggtaaacgtcctatcagtga

SEQ ID NO: 328998 - DNA, 75 bp, synthetic construct
  source 1..75: mol_type = other DNA
tcaggaaatgcgctttgccacatggaatgaagtagacctggaaaagggtatatgggaaataccagcagaaagaat

SEQ ID NO: 328999 - DNA, 75 bp, synthetic construct
  source 1..75: mol_type = other DNA
atggttctaaatactggcgaatggcatcattcaaaagccgatcggtggtcattacgctatcgtgatgaaatcatt

SEQ ID NO: 329000 - DNA, 75 bp, synthetic construct
  source 1..75: mol_type = other DNA
atgtcatttggcagctacgatttagtaagccttgcagaagcacgtgagaagcgtgacgtcgcccgtaagcaggtt

SEQ ID NO: 329001 - DNA, 75 bp, synthetic construct
  source 1..75: mol_type = other DNA
tcatgcacaatatttttctcaaaggaaaacgatgattcaatggtactctgattatcttttaggggatttgctatg

SEQ ID NO: 329002 - DNA, 75 bp, synthetic construct
  source 1..75: mol_type = other DNA
ataccatgtcgacaatattgcacgaacaagggtttgatagcgcatggattgaaatacaattggcacatgttgata

SEQ ID NO: 329003 - DNA, 75 bp, synthetic construct
  source 1..75: mol_type = other DNA
tttctaaagaaagtatatcacaagtgatcgaattacttggttataagggacgtgcaacaggccacgggtttagac

SEQ ID NO: 329004 - DNA, 75 bp, synthetic construct
  source 1..75: mol_type = other DNA
gaattacaattggctcatgttgataagaatagtattcgaggcacttataatcatgcccaatatttagaaaagaga

SEQ ID NO: 329005 - DNA, 75 bp, synthetic construct
  source 1..75: mol_type = other DNA
ccggtttgcagggaaagcgcgtttaatgtcatttggcagctacgatttagtaagcctcgcagaagcacgtgaaaa

SEQ ID NO: 329006 - DNA, 75 bp, synthetic construct
  source 1..75: mol_type = other DNA
ctataagctgtctgatggtggcggtatgtatctactcattaacactaatggttctaaatattggcgtatgaagta

SEQ ID NO: 329007 - DNA, 75 bp, synthetic construct
  source 1..75: mol_type = other DNA
gcaagaactacgtttcgcacgctgggaggatatagattttgagacaaaactatgggagatcccggcagaagtgat

SEQ ID NO: 329008 - DNA, 75 bp, synthetic construct
  source 1..75: mol_type = other DNA
tcattatgttaaccggcgtacgaacacaagaactgcgttttgcacgctgggaagatatcgattttgagacaaaat

SEQ ID NO: 329009 - DNA, 75 bp, synthetic construct
  source 1..75: mol_type = other DNA
ccgctttaacaataaaatgccttatcacgttacgctgggttatatcggaacaaatggggtaacgatgttaccaca

SEQ ID NO: 329010 - DNA, 75 bp, synthetic construct
  source 1..75: mol_type = other DNA
ccagcctggcgaggcggcctttatggcgcttaaaaatacaaatgatgatggtcgaattgaagtcacccagatgga

SEQ ID NO: 329011 - DNA, 75 bp, synthetic construct
  source 1..75: mol_type = other DNA
agaaagcgcagctgcctaccaccatgactttaatggcgctgggcatgttgccaaaagcgcatccgttgtcgctgg

SEQ ID NO: 329012 - DNA, 75 bp, synthetic construct
  source 1..75: mol_type = other DNA
gccaaaattattcatgtcgatatcgaccgcgcagagctgggtaaaatcaagcagccgcacgtagcgattcaggcg

SEQ ID NO: 329013 - DNA, 75 bp, synthetic construct
  source 1..75: mol_type = other DNA
ccgcgtcgcctggcgttccatgctgttacaggcttctttcaactacgaacgtatgcaggcttccggctggttgta

SEQ ID NO: 329014 - DNA, 75 bp, synthetic construct
  source 1..75: mol_type = other DNA
ggcgcattatgcttaccgcatgggcgtggcggcgattccactcattaaagctaataccaaaaaagtcggccatgc

SEQ ID NO: 329015 - DNA, 75 bp, synthetic construct
  source 1..75: mol_type = other DNA
cagggcattaagattgtgacgggtattccgggcggttctatcctgcctgtttacgatgccttaagccaaagcacg

SEQ ID NO: 329016 - DNA, 75 bp, synthetic construct
  source 1..75: mol_type = other DNA
cagtttctgcaactaaggaactcgttattaatgcaggaagcacccagcaaactaatattgtagctggtaactatc

SEQ ID NO: 329017 - DNA, 75 bp, synthetic construct
  source 1..75: mol_type = other DNA
ctgtaggggggtttgaagttcacaccatcaacaccgttgttcatacaaatgaaccaactaaaggtgtttttgtga

SEQ ID NO: 329018 - DNA, 75 bp, synthetic construct
  source 1..75: mol_type = other DNA
atgaaactaaagaaaacaattggcgcaatagctctggcgacattatttgcaaccatgggagcatctgcggtcgag

SEQ ID NO: 329019 - DNA, 75 bp, synthetic construct
  source 1..75: mol_type = other DNA
tatggtggcaccatttacttctgcaactcaacacctaagcagcctgccctctaccttccagttaggctttgtggc

SEQ ID NO: 329020 - DNA, 75 bp, synthetic construct
  source 1..75: mol_type = other DNA
tccctttacccgcgctttttcggaaagcccaccccaatgtttttctcctacaccccagccggtcagcaggacctt

SEQ ID NO: 329021 - DNA, 75 bp, synthetic construct
  source 1..75: mol_type = other DNA
caagacatcatattgattatttggataaactaatacaagtccctatccgagtcccaagaacaggccttttagaaa

SEQ ID NO: 329022 - DNA, 75 bp, synthetic construct
  source 1..75: mol_type = other DNA
cgcactggtggcaacctatgttcgtttaagcaccacgctggaaatcacggcgggcgacgcagtggttaagttaca

SEQ ID NO: 329023 - DNA, 75 bp, synthetic construct
  source 1..75: mol_type = other DNA
actattctggatgtcggtgttgatgtgccaagcgttggtgcggtcattcttgctggtggtgggaaagcagaagtt

SEQ ID NO: 329024 - DNA, 75 bp, synthetic construct
  source 1..75: mol_type = other DNA
ttcgagagggaatgatgattgcgcagatcgctactggtggcgggaaatctaacgttgcctgcaaagcagctgcac

SEQ ID NO: 329025 - DNA, 75 bp, synthetic construct
  source 1..75: mol_type = other DNA
ggcgaattgaaataaaagtcacggaaaagtatctgattgatagaggcattctggcaaagccatacttcctttatc

SEQ ID NO: 329026 - DNA, 75 bp, synthetic construct
  source 1..75: mol_type = other DNA
atcccagtgagcaaattcaaataagaatgataactcaggaaaaaattgctcaacttcctaaagacagagaaacgc

SEQ ID NO: 329027 - DNA, 75 bp, synthetic construct
  source 1..75: mol_type = other DNA
tggttatatcaatgattttggtggattaagtttttatgaaataaactgcccgacggttaataactcttgtaatgt

SEQ ID NO: 329028 - DNA, 75 bp, synthetic construct
  source 1..75: mol_type = other DNA
gtatgagcaccgcctaccaaaaggcttatcagttggggatcgtgtataatttgggacgtaacgaggccattgttc

SEQ ID NO: 329029 - DNA, 75 bp, synthetic construct
  source 1..75: mol_type = other DNA
atgaaaccgcaggtttatcacgtcgatgcttttaccgctcaaccgtttcgcggcaattctgccggtgttgttttt

SEQ ID NO: 329030 - DNA, 75 bp, synthetic construct
  source 1..75: mol_type = other DNA
ggaaggtcgaccgctcaaaaccctggtgctcagcacggcaactcgttttaatgatgagcagcaaaccctggtatt

SEQ ID NO: 329031 - DNA, 75 bp, synthetic construct
  source 1..75: mol_type = other DNA
ccctgaccatgttttggttggtacgccgcggctggagtccgctgcgtctgattgcagttaccgtggttctcggca

SEQ ID NO: 329032 - DNA, 75 bp, synthetic construct
  source 1..75: mol_type = other DNA
gaatcaaaccagactacccgacaagcaaaacttaatagtctggcggcaggcaagatagatgttctcattggttca

SEQ ID NO: 329033 - DNA, 75 bp, synthetic construct
  source 1..75: mol_type = other DNA
tggcatcaaatgcgtgcatgttcgcaaggaaaaagctcccgcgctgggtaagccgaatccggtggttaacccatt

SEQ ID NO: 329034 - DNA, 75 bp, synthetic construct
  source 1..75: mol_type = other DNA
tgaagtgccgatttgtggtcacgcgacagtagctgcgcactatgtacgttcgaaggtattaggtttgggaaattg

SEQ ID NO: 329035 - DNA, 75 bp, synthetic construct
  source 1..75: mol_type = other DNA
tgcaaaacttccgcgccacgctgatacccactatcgccgtgccggtggtgttgatgggaaccttctccgtacttt

SEQ ID NO: 329036 - DNA, 75 bp, synthetic construct
  source 1..75: mol_type = other DNA
gaaaggtcagattgaaggggcagtttccagctccgatgcatccactgaaaaactgaaaagccttggcattcacgt

SEQ ID NO: 329037 - DNA, 75 bp, synthetic construct
  source 1..75: mol_type = other DNA
gatcaaaggcggcggcgcggcgctgacccgtgaaaaaatcattgcttcggttgcagaaacatttatctgtattgc

SEQ ID NO: 329038 - DNA, 75 bp, synthetic construct
  source 1..75: mol_type = other DNA
atggtgtttctgttcctgcgtctgccgacgtccttcctgccactggaagaccgtggcatgttcaccacctcggtg

SEQ ID NO: 329039 - DNA, 75 bp, synthetic construct
  source 1..75: mol_type = other DNA
accagctgcaatcggccatgcgtaaactcccacaggcagtacaaaaccagggcgtgacagtacgtaaaactggcg

SEQ ID NO: 329040 - DNA, 75 bp, synthetic construct
  source 1..75: mol_type = other DNA
aacagaccctgaaagtcgttgagcaaatcgagaaatattacttcacccatgaaaaagacaacatcatgtcggtgt

SEQ ID NO: 329041 - DNA, 75 bp, synthetic construct
  source 1..75: mol_type = other DNA
cacgttatacaactataaggacatctgttgtagagtcaacgatgatgatgaaattgatatatcaatatgaaatag

SEQ ID NO: 329042 - DNA, 75 bp, synthetic construct
  source 1..75: mol_type = other DNA
tcgagcgtggcaattccgcaggtgccaagaacgtcaccggcgggcgtctctatgcccacagtctggaacacatta

SEQ ID NO: 329043 - DNA, 75 bp, synthetic construct
  source 1..75: mol_type = other DNA
aagttattccgatggcgcgtagcgcagtagcgcgccagctggtgaaattgggtggccgaccggaataccgtcaag

SEQ ID NO: 329044 - DNA, 75 bp, synthetic construct
  source 1..75: mol_type = other DNA
gagcgcacccaccggtaccattacgacagtcagcaccggctggtgcactacacgcggacacaatatgcagagccg

SEQ ID NO: 329045 - DNA, 75 bp, synthetic construct
  source 1..75: mol_type = other DNA
gaaccttattacggcaatagcgcgtcggtaaaactgctgacgcccactcaggacagcagggatatcattaacgcc

SEQ ID NO: 329046 - DNA, 75 bp, synthetic construct
  source 1..75: mol_type = other DNA
ttaacgcccagtcgctgttgcaaacgcctgaacagttccgcgatatcaccttgcgggtaaatcaggatggttcgg

SEQ ID NO: 329047 - DNA, 75 bp, synthetic construct
  source 1..75: mol_type = other DNA
ggtggaagataacgccgtattgtcgctggcggggaatcaggccgatttacgggcaatgcagagcgatccgcaatc

SEQ ID NO: 329048 - DNA, 75 bp, synthetic construct
  source 1..75: mol_type = other DNA
caataaccaggcatatacatcaacaagttacagtgatggcgatggcggcgcaattgatgtcacagataataatag

SEQ ID NO: 329049 - DNA, 75 bp, synthetic construct
  source 1..75: mol_type = other DNA
gcagctcacgccataacggactatatcgttggatattacagcgcactaagaccgcacgaatataacggtgggtta

SEQ ID NO: 329050 - DNA, 75 bp, synthetic construct
  source 1..75: mol_type = other DNA
atcgccacctgatccgactcccgatcccacgccggctcctgacccaacgcccgtttatcagccgatgctgaatgc

SEQ ID NO: 329051 - DNA, 75 bp, synthetic construct
  source 1..75: mol_type = other DNA
ctgacccaacacccgatccaatccccgcttaccagccggtgctgaatgccaaagttggcggttatctcaataatc

SEQ ID NO: 329052 - DNA, 75 bp, synthetic construct
  source 1..75: mol_type = other DNA
tagtgcgaactctccctatcttattgatatttcggttgatgccggctacagctataacggtggcgttttggtgga

SEQ ID NO: 329053 - DNA, 75 bp, synthetic construct
  source 1..75: mol_type = other DNA
tgggctggaaaacgacgtttacttccaggtgggtttattaacggtcattggtttatcggcgaaaaacgccatcct

SEQ ID NO: 329054 - DNA, 75 bp, synthetic construct
  source 1..75: mol_type = other DNA
gaaaacccggagctaacccgtgtgcgccataacggcctcgacgacagtccgcagttgcagattgatatcgaccag

SEQ ID NO: 329055 - DNA, 75 bp, synthetic construct
  source 1..75: mol_type = other DNA
cgatatcaacgacacattgcaaaccgcgtggggttcaagctatgtgaacgactttatggatcgcggtcgtgtgaa

SEQ ID NO: 329056 - DNA, 75 bp, synthetic construct
  source 1..75: mol_type = other DNA
tcagacagagtatgagccggcgcggaaactgcagggataacagcccaatggaacgcttcttcaggagtctgaaga

SEQ ID NO: 329057 - DNA, 75 bp, synthetic construct
  source 1..75: mol_type = other DNA
cagattgatatcgaccagcgtaaagctctcaggcgctgggcgttgctatcgacgatattaacgacacactgcaaa

SEQ ID NO: 329058 - DNA, 75 bp, synthetic construct
  source 1..75: mol_type = other DNA
tctccgccaccattctggcgatttacttcgtgccgctgttctttgtgctggtacgccgtcgtttccctctgaagc

SEQ ID NO: 329059 - DNA, 75 bp, synthetic construct
  source 1..75: mol_type = other DNA
tcatcgtcggggcagggcttgccggttcggttgccgcactggtgctcgctcgcgaaggggcacaagtgttagtta

SEQ ID NO: 329060 - DNA, 75 bp, synthetic construct
  source 1..75: mol_type = other DNA
tcggtgcggaccatccggtgttgcaacaacagcgtgtggcgaccattcaaaccctcggcggctcgggggcattaa

SEQ ID NO: 329061 - DNA, 75 bp, synthetic construct
  source 1..75: mol_type = other DNA
actgggcttacagtttatgcagggtgcgcgcttctggcacgtcctggatgcctctgccggaaaagatcaggctgc

SEQ ID NO: 329062 - DNA, 75 bp, synthetic construct
  source 1..75: mol_type = other DNA
gctggggttacagtttgtacaaggcgctcgcttctggcatgtactggatgcctctgccggaaaagatcaggcagc

SEQ ID NO: 329063 - DNA, 75 bp, synthetic construct
  source 1..75: mol_type = other DNA
aaactgcctacggcaacgcgctgggcttcagttatgccggacagcagtttcttggctccggtcatgcgctgaaag

SEQ ID NO: 329064 - DNA, 75 bp, synthetic construct
  source 1..75: mol_type = other DNA
ccgttgttctcgacctgttcgcaagaaaaccagtgggctgggccatgtcgttctcgccggacagcaggctcacca

SEQ ID NO: 329065 - DNA, 75 bp, synthetic construct
  source 1..75: mol_type = other DNA
caggaaaaaatcgcaattattcaacagactatggagccaggtatgacggtgtcccacgtggcgcgtttgcatgga

SEQ ID NO: 329066 - DNA, 75 bp, synthetic construct
  source 1..75: mol_type = other DNA
cagttatttctctggcgcaagcaataccaggagggaagtcttactgctgtggccgcaggagagcaggtcgttcct

SEQ ID NO: 329067 - DNA, 75 bp, synthetic construct
  source 1..75: mol_type = other DNA
tttccggggcggttcacccttgttgcccggcaacacggtgtggcagccagccagttatttctctggcgcaagcaa

SEQ ID NO: 329068 - DNA, 75 bp, synthetic construct
  source 1..75: mol_type = other DNA
ccggagaacaggtcgttcctgcctctgaacttgctgccgccatgaagcagattaaagaactccagcgtctgctcg

SEQ ID NO: 329069 - DNA, 75 bp, synthetic construct
  source 1..75: mol_type = other DNA
agaaagaacatttcaaattcaccacctttgatgatgtcgatgatacaaccattgcggaatggacggaattaagcc

SEQ ID NO: 329070 - DNA, 75 bp, synthetic construct
  source 1..75: mol_type = other DNA
aagcggtggagtacgcgcaatcgcgaaaatggatagcgcatgcgcccttgttaccttcggacaaggaagaaccca

SEQ ID NO: 329071 - DNA, 75 bp, synthetic construct
  source 1..75: mol_type = other DNA
ggaaaatgaactcctcaaagaagccgttgaagatggacgggcaaaaaagtggatagcgcacgcgcccttattgcc

SEQ ID NO: 329072 - DNA, 75 bp, synthetic construct
  source 1..75: mol_type = other DNA
agcgcattatcctgtggtcacactctgccatgtgttcggggttcatcgcagcagctacagatactggaaaaaccg

SEQ ID NO: 329073 - DNA, 75 bp, synthetic construct
  source 1..75: mol_type = other DNA
atgtccgaagatatctttgacgccatcatcgtcggtgcagggcttgccggttcggttgccgcactggtgctcgcc

SEQ ID NO: 329074 - DNA, 75 bp, synthetic construct
  source 1..75: mol_type = other DNA
taacggtgggctgacgccggaagagtcagagaacagataccatttttactgtaaaaccgtggccaatattacttg

SEQ ID NO: 329075 - DNA, 75 bp, synthetic construct
  source 1..75: mol_type = other DNA
aaaatgagtggatgccggtgacaggctacaccagcttcagtgaagctgctcaagcgataacgggttatatcgtcg

SEQ ID NO: 329076 - DNA, 75 bp, synthetic construct
  source 1..75: mol_type = other DNA
gtgccgcaaatgctggaagatttcaaacaacatccggccgttgcaccgctgattgcgggcggcaagctggtggaa

SEQ ID NO: 329077 - DNA, 75 bp, synthetic construct
  source 1..75: mol_type = other DNA
ctttataccaatgaaaacaccctgtcactggggctggtttgcggcctgcatcatctgcatgacgcgaagaaatcg

SEQ ID NO: 329078 - DNA, 75 bp, synthetic construct
  source 1..75: mol_type = other DNA
tatgcccacagcctggaacacattattcctggtttcgccgaatccgccccggtagaacgcctgatcacccatgaa

SEQ ID NO: 329079 - DNA, 75 bp, synthetic construct
  source 1..75: mol_type = other DNA
ataacggtggtttgacgccgaatgaatcagaacgattgttctggaaaaactctaaagccgtggccaatttttgtt

SEQ ID NO: 329080 - DNA, 75 bp, synthetic construct
  source 1..75: mol_type = other DNA
attgctgggataacagcccgatggaacgtttttttagaagcctgaaaacggagtgggtaccagataatggatacg

SEQ ID NO: 329081 - DNA, 75 bp, synthetic construct
  source 1..75: mol_type = other DNA
ggaggtttaaatttaaagatgcagtaaagatcaagagtgatggcgctcggattcatttcggtgttggtgcacaaa

SEQ ID NO: 329082 - DNA, 75 bp, synthetic construct
  source 1..75: mol_type = other DNA
tctctacactgacaactcgctgcatctacataattctgcttcgctggagaacgggaagaatatacgtattgatac

SEQ ID NO: 329083 - DNA, 75 bp, synthetic construct
  source 1..75: mol_type = other DNA
gaacagtactgctcacagtgatggaaaagtcactactgaagaagccagtacgcaatgcaaggcagataatggcag

SEQ ID NO: 329084 - DNA, 75 bp, synthetic construct
  source 1..75: mol_type = other DNA
tctggaggggtaagcgctgggcgtacctcgccgttgttctcgacctgttcgcaagaaaaccagtgggctgggcca

SEQ ID NO: 329085 - DNA, 75 bp, synthetic construct
  source 1..75: mol_type = other DNA
aactagaacatgaagataatgccaaaaaaagggcagaactcctagctcagctagaagttataaaacaagaggctg

SEQ ID NO: 329086 - DNA, 75 bp, synthetic construct
  source 1..75: mol_type = other DNA
gtctttgattttgggttttcctataccatatatatttacagcagatgttctctccgaagatcccgatttagatgg

SEQ ID NO: 329087 - DNA, 75 bp, synthetic construct
  source 1..75: mol_type = other DNA
ttcaaacgattgaccacttcagacggagctaatagtcgcgtgaaggtaattgaacgaattgaatatgttcgggat

SEQ ID NO: 329088 - DNA, 75 bp, synthetic construct
  source 1..75: mol_type = other DNA
caaacataatgatgtaatactgaaaaaatcgtatgaagtgatgcatggggaatgcggattcgatccagagctggt

SEQ ID NO: 329089 - DNA, 75 bp, synthetic construct
  source 1..75: mol_type = other DNA
ttcaaacaattaaccacctccgacggagcaaatagtcgcgtgaaggtaattgaacgaattgaatatgtgcgagac

SEQ ID NO: 329090 - DNA, 75 bp, synthetic construct
  source 1..75: mol_type = other DNA
cttagattggctaagctcagaagaattcaaacaattaaccacctccgacggagcaaatagtcgcgtgaaggtaat

SEQ ID NO: 329091 - DNA, 75 bp, synthetic construct
  source 1..75: mol_type = other DNA
gtcactggaaagtctggtccgacagcttctggagatgctggaaatggtcactgatatggaatcaacctacctgac

SEQ ID NO: 329092 - DNA, 75 bp, synthetic construct
  source 1..75: mol_type = other DNA
aatacgaaaaaggtctgtctttgattgaatctgcaatggtgcttgcgcttgctgccaccgttaccgcaggtgtga

SEQ ID NO: 329093 - DNA, 75 bp, synthetic construct
  source 1..75: mol_type = other DNA
tggccgccgttgccagcgtcatggtcgccggctacgctatcgcggatgcaaatgggctcaacactgtgaacgccg

SEQ ID NO: 329094 - DNA, 75 bp, synthetic construct
  source 1..75: mol_type = other DNA
gacatcctgcctggggggatatgcctccaccgacacacgacgaacttattgctgccgctgaacaaattcgccagc

SEQ ID NO: 329095 - DNA, 75 bp, synthetic construct
  source 1..75: mol_type = other DNA
accgacgctttgacgggcctaccgaatcgacgggcgatttttgataatctgacgacgctgttttctctcgcccgc

SEQ ID NO: 329096 - DNA, 75 bp, synthetic construct
  source 1..75: mol_type = other DNA
ttttaccgtctcgtgggattactcgttgtgcaaacgcgccattgatgaaaactgttttttcagcgatgaagttcc

SEQ ID NO: 329097 - DNA, 75 bp, synthetic construct
  source 1..75: mol_type = other DNA
cggctgtcgacaaaatggttcgcgtgaaagatatctttataccgattgagagcaatgccaaacgctacgacgcga

SEQ ID NO: 329098 - DNA, 75 bp, synthetic construct
  source 1..75: mol_type = other DNA
ttgccagaggggatcacctttcctcagataacaatacctgtggccacgttcccgtatatccgtttcccgatacaa

SEQ ID NO: 329099 - DNA, 75 bp, synthetic construct
  source 1..75: mol_type = other DNA
ccgcaaaaaatcgttttgtacggtccggatggcgcgatcctcaaaacagaggacggcagtagctcggtaacggtg

SEQ ID NO: 329100 - DNA, 75 bp, synthetic construct
  source 1..75: mol_type = other DNA
tataccgccaaagagcgccgtttgcagcaacataccagtgcgcagcttcatgcaggcgagacagtgacgttgtaa

SEQ ID NO: 329101 - DNA, 75 bp, synthetic construct
  source 1..75: mol_type = other DNA
gtactgtcatcaatttgatccggtactcaaaacgctgtcaacgcagcatgggttttcggtctttccttacacgct

SEQ ID NO: 329102 - DNA, 75 bp, synthetic construct
  source 1..75: mol_type = other DNA
atgaatacttcaatcaattttatattgcaaggtaaaggtggtgtaggtaaatcctttgccacatcaatactgtct

SEQ ID NO: 329103 - DNA, 75 bp, synthetic construct
  source 1..75: mol_type = other DNA
aaagtaaaaagattaaatgcagatttgatacaaatcactgaaaacagcaaagtaatacaatccaaattcgatcca

SEQ ID NO: 329104 - DNA, 75 bp, synthetic construct
  source 1..75: mol_type = other DNA
tgcaaagcgttatcgatgatctgcgcgaccagatggcggagaaggtgcaggacgctggaaaagaggaggagcagc

SEQ ID NO: 329105 - DNA, 75 bp, synthetic construct
  source 1..75: mol_type = other DNA
ggatattctggaacgtgactgcggtctgcagcctgccgctgtgagccgtgttcagtccattattgatgatctgcg

SEQ ID NO: 329106 - DNA, 75 bp, synthetic construct
  source 1..75: mol_type = other DNA
acggaacactgatgcgcggcctggaacttaacccaaatatgcaaaaagcgggcggcatttttgtccgtgaagaca

SEQ ID NO: 329107 - DNA, 75 bp, synthetic construct
  source 1..75: mol_type = other DNA
tgctggagatgatgctggtgctggcgctggtcgctatcacggcaagtgtggtgctcttcacatatggtcgggagg

SEQ ID NO: 329108 - DNA, 75 bp, synthetic construct
  source 1..75: mol_type = other DNA
tgctggagatgatgctggtgctggcgctggtcgctatcacggcaagcgtggtgctcttcacatatggccgggagg

SEQ ID NO: 329109 - DNA, 75 bp, synthetic construct
  source 1..75: mol_type = other DNA
tcaaagtcatcgcaggtcagtatcgtttataaagcgggaccctgtggttatggactttatcgtcggctggtgaaa

SEQ ID NO: 329110 - DNA, 75 bp, synthetic construct
  source 1..75: mol_type = other DNA
accatagatgaagccagaagttggttaagcaggttcacgcgatggtacaacctggaacacaagcacagcggtatt

SEQ ID NO: 329111 - DNA, 75 bp, synthetic construct
  source 1..75: mol_type = other DNA
gcctgacctatctttccgatgtgacggttaatggtgatctaaccaatatgtccggtacagtcagtctgcaaaatg

SEQ ID NO: 329112 - DNA, 75 bp, synthetic construct
  source 1..75: mol_type = other DNA
cttaatactaacctggaaactgacagcctgacctatctttccgatgtgacggttaatggtgatctaaccaatatg

SEQ ID NO: 329113 - DNA, 75 bp, synthetic construct
  source 1..75: mol_type = other DNA
atgcgacggaaattgaagaagatggcagcactatcagtgacgatgcggtgaagcaacggggtgaaataaaagtgg

SEQ ID NO: 329114 - DNA, 75 bp, synthetic construct
  source 1..75: mol_type = other DNA
gccgctcgaatatgaccggaactcgcgccgataaccagaaccacggttatgccgttgggctgacctcaagctggt

SEQ ID NO: 329115 - DNA, 75 bp, synthetic construct
  source 1..75: mol_type = other DNA
cgggcaggtcagcctggcaaatgacaatcaatacctcggcacaacgcaaattgcttccggtacgctgatggtgag

SEQ ID NO: 329116 - DNA, 75 bp, synthetic construct
  source 1..75: mol_type = other DNA
aaaatggcgtcgctggcgacacgctcacggtaaacggtgattacaccggtggcggtacgttgtttctcgacagcg

SEQ ID NO: 329117 - DNA, 75 bp, synthetic construct
  source 1..75: mol_type = other DNA
acttccagcggcactatcgacatcagcgatggtacggttttgcgcctgaccgggcaggatacttccgtcgccctt

SEQ ID NO: 329118 - DNA, 75 bp, synthetic construct
  source 1..75: mol_type = other DNA
gttaacagtatcgcggaggttttggattcatgccagggatatgatatcaaagcgagttgtcaggccagcaggcaa

SEQ ID NO: 329119 - DNA, 75 bp, synthetic construct
  source 1..75: mol_type = other DNA
ggctggttagcctggcaaacaataatagttacctgggcaccacgcaaatcgcttccggtacgctggtggtgagcg

SEQ ID NO: 329120 - DNA, 75 bp, synthetic construct
  source 1..75: mol_type = other DNA
aagcagggggcctggctggatagctggctgcaatacgcgtggtttagcaatgatgtttccgaacaagaagatggc

SEQ ID NO: 329121 - DNA, 75 bp, synthetic construct
  source 1..75: mol_type = other DNA
cgggtattggtgagccgacatctacaggcattaaagtggttgatttcgcagccgatccaacgcaatttcaaaaca

SEQ ID NO: 329122 - DNA, 75 bp, synthetic construct
  source 1..75: mol_type = other DNA
atgactctgtttgccaataacaccgttacaggagaatataataacggcggggccatatttgctaaagaaaactca

SEQ ID NO: 329123 - DNA, 75 bp, synthetic construct
  source 1..75: mol_type = other DNA
tatgtatatcggtcatagtgtggctgaatttaacattgccgccgataaaacgctggtaataggcaataccagcaa

SEQ ID NO: 329124 - DNA, 75 bp, synthetic construct
  source 1..75: mol_type = other DNA
aatgcactgaatgttattcacgaacatatgaagtgaatgccacgcatgaagaattcaccgttgagtgtgtgatga

SEQ ID NO: 329125 - DNA, 75 bp, synthetic construct
  source 1..75: mol_type = other DNA
ctcccgggtctttcgggtggatgcctcgaatgaagagctaaccgtggagtgtgctgtgaatgccgctaaatgccg

SEQ ID NO: 329126 - DNA, 75 bp, synthetic construct
  source 1..75: mol_type = other DNA
atatgaagtggatgccacggatgaagaaatttctgttgaatgtgatctgaacgcaaatatggcagggattgtaac

SEQ ID NO: 329127 - DNA, 75 bp, synthetic construct
  source 1..75: mol_type = other DNA
acgtcacgccagccgaacgtcatcaaggtaatgacatgaaaatactggcagtcagaaaagcagtataccagctag

SEQ ID NO: 329128 - DNA, 75 bp, synthetic construct
  source 1..75: mol_type = other DNA
agtagcagactggggctgacacgtcttaaggtgtcgcggttactggaaaaaggtcatcagtccggagttattcgc

SEQ ID NO: 329129 - DNA, 75 bp, synthetic construct
  source 1..75: mol_type = other DNA
agctctttaatggaagaatcccgttccagattttacagcgtggtcgtgttctggctgaaggtacattcagtggta

SEQ ID NO: 329130 - DNA, 75 bp, synthetic construct
  source 1..75: mol_type = other DNA
gaacgcttcttcaggagtctgaagaacgaatggatgccggtggtgggttacgtaagcttcagcgaggcagctcac

SEQ ID NO: 329131 - DNA, 75 bp, synthetic construct
  source 1..75: mol_type = other DNA
cggcagttattgtggcgataccagatcaggcagagtatgagccggcgcggaaattgctgggataacagcccaatg

SEQ ID NO: 329132 - DNA, 75 bp, synthetic construct
  source 1..75: mol_type = other DNA
caagtcattatacgagcaggcagtttcggcagttattgtggcgataccagatcaggcagagtatgagccggcgcg

SEQ ID NO: 329133 - DNA, 75 bp, synthetic construct
  source 1..75: mol_type = other DNA
ggaaaaaccgtcctgaaaaaccagacggcagacgggctgtattacgcagtcaggtacttgagttgcataacatca

SEQ ID NO: 329134 - DNA, 75 bp, synthetic construct
  source 1..75: mol_type = other DNA
tgctgggataacagcccaatggaacgcttcttcaggagtctgaagaacgaatggatgtcggtggtgggttacgta

SEQ ID NO: 329135 - DNA, 75 bp, synthetic construct
  source 1..75: mol_type = other DNA
caagattgacggtattaatgatccggctaaacggatggaagcattagaaaaactcaatgaaaaccatcaaaaacg

SEQ ID NO: 329136 - DNA, 75 bp, synthetic construct
  source 1..75: mol_type = other DNA
caagattgatgggatcaccgatccggctaaacggatggaagcattagaaaaactcaatgaaaaccatcaaaaacg

SEQ ID NO: 329137 - DNA, 75 bp, synthetic construct
  source 1..75: mol_type = other DNA
gaagaatatatgcgtcgtgtgaacgataccgagcaaaactattctcagattgaaaattctttacagggaatggat

SEQ ID NO: 329138 - DNA, 75 bp, synthetic construct
  source 1..75: mol_type = other DNA
acagcgttgctcagatgtatcagcagaacccttcaggatttggtgagtttgttgatcaccttgggatggctgcgc

SEQ ID NO: 329139 - DNA, 75 bp, synthetic construct
  source 1..75: mol_type = other DNA
actcaggcggctttcttgccggtatcggtgggcaaaactcaaatgcgccaaaggcaagtgatgtaagtgaggcgt

SEQ ID NO: 329140 - DNA, 75 bp, synthetic construct
  source 1..75: mol_type = other DNA
gtatcgagcttatatgctagaacacgaaaaccaacctttacagcccggaacaggctaccccttagtcaaagcgtt

SEQ ID NO: 329141 - DNA, 75 bp, synthetic construct
  source 1..75: mol_type = other DNA
ggatttaccccaacgggtcaaggtggaggcgtcactggtccaacaaaaaaagaacaagaagaagcagaaaaagcg

SEQ ID NO: 329142 - DNA, 75 bp, synthetic construct
  source 1..75: mol_type = other DNA
caatgaatcttgatttgtctggtggtttatctagtttaagtggaacccttcgcggaactggtggatcgcttgctt

SEQ ID NO: 329143 - DNA, 75 bp, synthetic construct
  source 1..75: mol_type = other DNA
ttgttgttgatatcctgaaagtaccctcggtactggttgggttgattgccttaattggcctggttgcgcagaaaa

SEQ ID NO: 329144 - DNA, 75 bp, synthetic construct
  source 1..75: mol_type = other DNA
ttttggtgattcttataagaaaaatggctctctgattgttgtcgataacggggaacatctaacccgcaaggcaga

SEQ ID NO: 329145 - DNA, 75 bp, synthetic construct
  source 1..75: mol_type = other DNA
ttaacagttttgcaacaaatcagggacaacgagctagaaagccataaacggttacttgatggtaaagctatctcc

SEQ ID NO: 329146 - DNA, 75 bp, synthetic construct
  source 1..75: mol_type = other DNA
aaaagaacaagaagaagccaagaagaaagcggaagaggcagctaaaaaggctaaggaagccgcagaaaaagcaca

SEQ ID NO: 329147 - DNA, 75 bp, synthetic construct
  source 1..75: mol_type = other DNA
gggattgaagctaatggagctagggcaaaaaggtaagccgtcagcagacttaattaagggattaaattctgatat

SEQ ID NO: 329148 - DNA, 75 bp, synthetic construct
  source 1..75: mol_type = other DNA
acgccgtgtttcgcaataacatcgctaatgacggcaaaggtggtgcaatttataccatcaacaatgacgtctatt

SEQ ID NO: 329149 - DNA, 75 bp, synthetic construct
  source 1..75: mol_type = other DNA
cgtggtggttaaccccattaccggcactggtgaaccgacttctacaggtattaaagtggttgatttcactgctga

SEQ ID NO: 329150 - DNA, 75 bp, synthetic construct
  source 1..75: mol_type = other DNA
ggtggggccgtatttttgcaacaaggagcggaattttcactattaccagaaaatgaaactggaatgactctgttt

SEQ ID NO: 329151 - DNA, 75 bp, synthetic construct
  source 1..75: mol_type = other DNA
atgattgcgattgccgatatcttgcaagcaggagaaaagctaaccgatgtggctccttttctggcgggtatccag

SEQ ID NO: 329152 - DNA, 75 bp, synthetic construct
  source 1..75: mol_type = other DNA
gacatgcagaacgccaccacgcgacaggggcagcagctctcatatggcgctcagatggctcgtctgaatcacgat

SEQ ID NO: 329153 - DNA, 75 bp, synthetic construct
  source 1..75: mol_type = other DNA
atacaacgatggccttgaagtcagtggcagcagcggaacggttatcggcagtcaggatgtggtagatcttgcagg

SEQ ID NO: 329154 - DNA, 75 bp, synthetic construct
  source 1..75: mol_type = other DNA
gctgaatcaatgggatatagttcatcaggttatgacacatatgttagtgagcgaaaatcaggaagcgacagcaat

SEQ ID NO: 329155 - DNA, 75 bp, synthetic construct
  source 1..75: mol_type = other DNA
taatgacccgcagggcttccagcactttgcaggtaatctggcactattttctctcggccatgagaagtatttcga

SEQ ID NO: 329156 - DNA, 75 bp, synthetic construct
  source 1..75: mol_type = other DNA
gtaaaggcatggggtatgtcgatgacgcccagcgggatgattttggcaatctggcgctcaaggctcaggtagctt

SEQ ID NO: 329157 - DNA, 75 bp, synthetic construct
  source 1..75: mol_type = other DNA
agtcagtggcagcagcggaacggttatcggcagtcaggatgtggtagatcttgcaggcggaaacgatatgcatat

SEQ ID NO: 329158 - DNA, 75 bp, synthetic construct
  source 1..75: mol_type = other DNA
cggcgatacgcattgccaggacgatccgcaagactgctacggtctgacgatagggagtattgataagtaccagaa

SEQ ID NO: 329159 - DNA, 75 bp, synthetic construct
  source 1..75: mol_type = other DNA
aaatgccagagggtgggcaagcaacaatattgcgcaacaaaatgtcaatcttcgtcggatggaattagaggacaa

SEQ ID NO: 329160 - DNA, 75 bp, synthetic construct
  source 1..75: mol_type = other DNA
cgctatttgtgctgctggttgcctggaacattttcgccagtaacaaaatcgctgccaaagcgcagaagaagagtg

SEQ ID NO: 329161 - DNA, 75 bp, synthetic construct
  source 1..75: mol_type = other DNA
agcatttgattcacatggagccactcactgtagtcaccaacgatttcgttatcgcaaactacttgctcgacaaca

SEQ ID NO: 329162 - DNA, 75 bp, synthetic construct
  source 1..75: mol_type = other DNA
ggtatatcaatatagcgcccttgaaaaaatttctctccggtgctgtctggcccgtatatggtgatgatccccgaa

SEQ ID NO: 329163 - DNA, 75 bp, synthetic construct
  source 1..75: mol_type = other DNA
actgggtacgccgcattaaacgcaagttgagtgtttatcgccgctacccgcgaatgagttaccgcgaactgtata

SEQ ID NO: 329164 - DNA, 75 bp, synthetic construct
  source 1..75: mol_type = other DNA
acccaatgatgtcagaaaaacgcagacagccggttgagaaggtagcccttgatgcacaccgtacagtggtggaaa

SEQ ID NO: 329165 - DNA, 75 bp, synthetic construct
  source 1..75: mol_type = other DNA
acggacagaatgaatgtgtcacatatgaccattcgtcgggatttacaaaaactggagcagcagggcgccgttgtg

SEQ ID NO: 329166 - DNA, 75 bp, synthetic construct
  source 1..75: mol_type = other DNA
ccatgctgcgtagcctgatgattgatcaggcttttatttctgcatcgtcatggagtgtgcggggatctctacgcc

SEQ ID NO: 329167 - DNA, 75 bp, synthetic construct
  source 1..75: mol_type = other DNA
aaagtttatggcctgatgcctggcattttctttctattttcagcggcagcgcatggttaatgaccctgctatggc

SEQ ID NO: 329168 - DNA, 75 bp, synthetic construct
  source 1..75: mol_type = other DNA
gcatgacgccgaagatgtgatttcgccaatggaactgcgtctgttcaactaccttgtcgagcgtaaggatctgat

SEQ ID NO: 329169 - DNA, 75 bp, synthetic construct
  source 1..75: mol_type = other DNA
gccaactggcgcgcgttgaaacaggttcttcagcacggcgacccgcgtcgcgtggcatgggataaaacgacgcat

SEQ ID NO: 329170 - DNA, 75 bp, synthetic construct
  source 1..75: mol_type = other DNA
gttatcagccaggaaacgttggatcgcgtcctgacaattcaacgcgaattacaaaatgcggacattagtcttgga

SEQ ID NO: 329171 - DNA, 75 bp, synthetic construct
  source 1..75: mol_type = other DNA
aatcgcgataacgttagcggtcataatgttcatcagcgggctggacgatttttttattgatgtcgtctactgggt

SEQ ID NO: 329172 - DNA, 75 bp, synthetic construct
  source 1..75: mol_type = other DNA
aactatctggtcgagcgtaaagatctgattcagatcccggtgtatccgttcgaacgcgaatggacgcacttcacc

SEQ ID NO: 329173 - DNA, 75 bp, synthetic construct
  source 1..75: mol_type = other DNA
aacaaagagcgctatgaacaggatccttatctgcttcagcacataatggatgaaaaacttagcgggtacgacatg

SEQ ID NO: 329174 - DNA, 75 bp, synthetic construct
  source 1..75: mol_type = other DNA
ttaccgttaaaactctatattaccccagttggtgcagccggtggagttgtcataaaagcgggggaagtcattgcc

SEQ ID NO: 329175 - DNA, 75 bp, synthetic construct
  source 1..75: mol_type = other DNA
tcagtcgatgcagcactcgaagaattaccgctgggcgtctaatgaccgggtcggcaaaccgcctgcgtatcagtt

SEQ ID NO: 329176 - DNA, 75 bp, synthetic construct
  source 1..75: mol_type = other DNA
tctcggcgagggggaaaactcgatccagcttgccggtacgctttaccctgctattactggcggtcgtatatccct

SEQ ID NO: 329177 - DNA, 75 bp, synthetic construct
  source 1..75: mol_type = other DNA
ccttcctgccagtactgttattgccggttcttggggcgataggctttgctaatacgaccttttccgatgcagatt

SEQ ID NO: 329178 - DNA, 75 bp, synthetic construct
  source 1..75: mol_type = other DNA
ggtgttgattcttccgggtgtcgttcctcacttttttaccggggcggctgctggcgtatttggtaacgctacggg

SEQ ID NO: 329179 - DNA, 75 bp, synthetic construct
  source 1..75: mol_type = other DNA
tgctggtcgtgagttcgttgaaagccagttcagtggtggtcaaaactaccttgtctacgccatcataatggccat

SEQ ID NO: 329180 - DNA, 75 bp, synthetic construct
  source 1..75: mol_type = other DNA
ttctttttccagagtacttgccagttttgccacgaagaaagccaaatacttcaatttatgcagaactattattcg

SEQ ID NO: 329181 - DNA, 75 bp, synthetic construct
  source 1..75: mol_type = other DNA
gatcctgctaaaaaaagcgaagctgaagaagaagaggttttgccaccaaccggtgctgctagctcgccttcaaaa

SEQ ID NO: 329182 - DNA, 75 bp, synthetic construct
  source 1..75: mol_type = other DNA
ccgttatggacgggcaacgatggagatgatcaagcaatacgccatcacagaagttcccactatttatctcatgtc

SEQ ID NO: 329183 - DNA, 75 bp, synthetic construct
  source 1..75: mol_type = other DNA
tcgaactacgggtatatgacactgaagatgaagagaatcatcaggagttcacctgccagccggacatgacctgcg

SEQ ID NO: 329184 - DNA, 75 bp, synthetic construct
  source 1..75: mol_type = other DNA
ccgagttaactcgagcagcagaacgagacggacaactggcgcaattacagggtttacaagattactggcgtaatg

SEQ ID NO: 329185 - DNA, 75 bp, synthetic construct
  source 1..75: mol_type = other DNA
ttctggcattacccatggtgaaatcaacctggtgttaaattcactgcgcgagaaagagcatttcaaattcacgac

SEQ ID NO: 329186 - DNA, 75 bp, synthetic construct
  source 1..75: mol_type = other DNA
ggaaaatgaactccttaaagaagccgttgaatatgggcgtgcaaaaaagtggatagcgcacgtgcccttattgcc

SEQ ID NO: 329187 - DNA, 75 bp, synthetic construct
  source 1..75: mol_type = other DNA
attggtcgacctgatgatgacacccagtggctggttgctggctttaaccgacagctaaagcaacctggcgcgcca

SEQ ID NO: 329188 - DNA, 75 bp, synthetic construct
  source 1..75: mol_type = other DNA
agcgcctgctcggcaaaaaacgatggaaaatgaactccttaaagaagccgttgaatacgggcgtgcaaaaaagtg

SEQ ID NO: 329189 - DNA, 75 bp, synthetic construct
  source 1..75: mol_type = other DNA
ttcgcaaaagttgacctgcgcgtggcgctgatcgaaaacgcagagtttgttgaaggttctgacaaactgctgcgc

SEQ ID NO: 329190 - DNA, 75 bp, synthetic construct
  source 1..75: mol_type = other DNA
tggcaagcgaactggctgacccgcagttgtacaaaaccttcactgatgccgctgaagtgattggtgaagcgtggg

SEQ ID NO: 329191 - DNA, 75 bp, synthetic construct
  source 1..75: mol_type = other DNA
acgatgtttgaccgttatttgccattttcatgcccgctaaatactttcgttactgatgctgtccgctttccacca

SEQ ID NO: 329192 - DNA, 75 bp, synthetic construct
  source 1..75: mol_type = other DNA
taatggaatggcagaacggttcgtgaaaacgatgaaggaagactacatcgcgttcatgccgaaaccgaatgtaag

SEQ ID NO: 329193 - DNA, 75 bp, synthetic construct
  source 1..75: mol_type = other DNA
cttcctcatctaaacgtccctataggaagggcaaccctgtttctgcggcagaacgtcagcagaaagctgttgccc

SEQ ID NO: 329194 - DNA, 75 bp, synthetic construct
  source 1..75: mol_type = other DNA
ggccgcaatgatccaagtaagaccatgagcgaagccagtatcaatcaggtatttaagcgaatcggctatacagga

SEQ ID NO: 329195 - DNA, 75 bp, synthetic construct
  source 1..75: mol_type = other DNA
tccttaaagaagccgttgaatatgggcgagcaaaaaagtggatagcgcacgcgcccttattgcccggggatgggg

SEQ ID NO: 329196 - DNA, 75 bp, synthetic construct
  source 1..75: mol_type = other DNA
aaaactatggaagttgagatcctcaaagaagcggtggagtatgcgcagtcgcgaaaatggatagcgcatgtgccc

SEQ ID NO: 329197 - DNA, 75 bp, synthetic construct
  source 1..75: mol_type = other DNA
ggaagactacatcgcgttcatgccgaaaccaaatgtaagaacggcattgcataaccttgcagtggcgatcgagca

SEQ ID NO: 329198 - DNA, 75 bp, synthetic construct
  source 1..75: mol_type = other DNA
tgacaactatcactcgacgcacagcgaagagaaccgccagttgtcagaacttatctactctcgcctgaaagaaaa

SEQ ID NO: 329199 - DNA, 75 bp, synthetic construct
  source 1..75: mol_type = other DNA
gtgtttggcattatggcctgcttcgcattctgtggtgcggtggtttccgtaatgctggttaagcgaattagccaa

SEQ ID NO: 329200 - DNA, 75 bp, synthetic construct
  source 1..75: mol_type = other DNA
tcatcagtaccgctgcgctcgtactgttgattatgctgccgcacgaaagtatgccggtctatttagggatggcat

SEQ ID NO: 329201 - DNA, 75 bp, synthetic construct
  source 1..75: mol_type = other DNA
tggtcaaattggcaatgctatgtcagtaaactcatttgttacgacggtgggattttttctgtctatttattttgc

SEQ ID NO: 329202 - DNA, 75 bp, synthetic construct
  source 1..75: mol_type = other DNA
cctcaaagaagccgttgaatatggacgggcaaaaaagtggatagcgcacgcgcccttattgcccggggatgggga

SEQ ID NO: 329203 - DNA, 75 bp, synthetic construct
  source 1..75: mol_type = other DNA
agcgccttctcggcaaaaaaacgatggaaaatgaactaattaaagaagccgttgaatatgggcgtgcaaaaaagt

SEQ ID NO: 329204 - DNA, 75 bp, synthetic construct
  source 1..75: mol_type = other DNA
gatggcatgtacgctgggctttggtaagcgtaaagccaatgccgtctgtaacacctgctccttgcagactaaatt

SEQ ID NO: 329205 - DNA, 75 bp, synthetic construct
  source 1..75: mol_type = other DNA
gctgaagtgattggtgaagcgtgggaaagccgcgaatttggtaaagcgatccgcgaaatcatggcgctggctgat

SEQ ID NO: 329206 - DNA, 75 bp, synthetic construct
  source 1..75: mol_type = other DNA
taaaatgcaggagtggtttgaatctggcctgcaacagtgggatatctcccgcgacgcgccatacttcggttttga

SEQ ID NO: 329207 - DNA, 75 bp, synthetic construct
  source 1..75: mol_type = other DNA
tgtcgatgaacaggctccgtgggtggtggcgaagcaggaaggtcgcgatgccgatctgcaggcgatttgctcaat

SEQ ID NO: 329208 - DNA, 75 bp, synthetic construct
  source 1..75: mol_type = other DNA
agacaaaaccatctggcttatcgctttcaatgttttcttcgtttacgcggtgtactgtggcctgacattcttcat

SEQ ID NO: 329209 - DNA, 75 bp, synthetic construct
  source 1..75: mol_type = other DNA
agacaacggagcctggcatgacggtgtcccatgtggtgcatttgcatggtattcagcccagtctgttgtttaagt

SEQ ID NO: 329210 - DNA, 75 bp, synthetic construct
  source 1..75: mol_type = other DNA
gccatgaagcagattaaagaactccagcgtctgctcggcaaaaaacgatggaaaatgaactccttaaagaagccg

SEQ ID NO: 329211 - DNA, 75 bp, synthetic construct
  source 1..75: mol_type = other DNA
aaaacgccatcaggggtacctataatcatgcccagtatctcgatggtcgccgtgaaatgatgcagtggtacgcag

SEQ ID NO: 329212 - DNA, 75 bp, synthetic construct
  source 1..75: mol_type = other DNA
atggccacctttatcgaccatcagaaggccttcatttcgctgtttaatcagaccgcccgttatcacaaacgccat

SEQ ID NO: 329213 - DNA, 75 bp, synthetic construct
  source 1..75: mol_type = other DNA
aagccttcatttcgctgtttaaccggacagccccttatcacaaacgccataaggtgtttgaagactttgtcagct

SEQ ID NO: 329214 - DNA, 75 bp, synthetic construct
  source 1..75: mol_type = other DNA
gtgattttctgggtagtgtgttcatgcaactggaactgggggataaataccggagtcagtttttcacgcccagga

SEQ ID NO: 329215 - DNA, 75 bp, synthetic construct
  source 1..75: mol_type = other DNA
aagctggtgaaatggtcaggctgaaaacgctggaggccatctggattcaggggaagctgcgcatgtggggccgct

SEQ ID NO: 329216 - DNA, 75 bp, synthetic construct
  source 1..75: mol_type = other DNA
cctgtacgctccactatgtgatgcgtttggcacaaatagcgacagatttaaattgcaaagtgagcaagaaagtgc

SEQ ID NO: 329217 - DNA, 75 bp, synthetic construct
  source 1..75: mol_type = other DNA
cagttaatgaggttttacgcagaatgaagaaatccgggctggataaaccggaacttgaggcattttttcgggata

SEQ ID NO: 329218 - DNA, 75 bp, synthetic construct
  source 1..75: mol_type = other DNA
ctgatgcacatcagcagtggctttgacggttttatcgaacacagcaaacaggtctcctcgacctgcctcatcacc

SEQ ID NO: 329219 - DNA, 75 bp, synthetic construct
  source 1..75: mol_type = other DNA
atgaataagccgcaactggcggaatcacagaagaccgctttgcttaccgaggcggagtctgtcatccggccgccg

SEQ ID NO: 329220 - DNA, 75 bp, synthetic construct
  source 1..75: mol_type = other DNA
gcgttttgagcgggaagaggaaattaacgctggaacacgctaaaaaaattggcaacacgattcggcatttctccc

SEQ ID NO: 329221 - DNA, 75 bp, synthetic construct
  source 1..75: mol_type = other DNA
cagaaatatctacacatagttgcacgttatgaaaagaaggatgtagtccgtatggcagaattgctggcccatgtt

SEQ ID NO: 329222 - DNA, 75 bp, synthetic construct
  source 1..75: mol_type = other DNA
ttgggctttaccgggtcttatgaccgagtgtgtgcctttgcccgacagtggaaagattccgaacagttcaaggcg

SEQ ID NO: 329223 - DNA, 75 bp, synthetic construct
  source 1..75: mol_type = other DNA
gtcgatgtgctggctctggtgctgcatcatgacgctgaactagtggagcaagctattacggaagcactgcaaagt

SEQ ID NO: 329224 - DNA, 75 bp, synthetic construct
  source 1..75: mol_type = other DNA
cggcaatatgttcaaccagttactggcctccgggaaagttaccaagacagccatcaacgaagcattacgccggat

SEQ ID NO: 329225 - DNA, 75 bp, synthetic construct
  source 1..75: mol_type = other DNA
agctctcgcaggctacacaggaagcccgttagttgttcttgcggcacgtctgctgatcctcacgggagttcgcac

SEQ ID NO: 329226 - DNA, 75 bp, synthetic construct
  source 1..75: mol_type = other DNA
aacctctatttccgcctgggctggctggagctggagatgctgcgccgctggccgctcggcgcgccgcaggcgatt

SEQ ID NO: 329227 - DNA, 75 bp, synthetic construct
  source 1..75: mol_type = other DNA
ccatgctcaatatctggaggggaggagggcgatgatgcagtggtatggtgattttactagtaatttaggcaagga

SEQ ID NO: 329228 - DNA, 75 bp, synthetic construct
  source 1..75: mol_type = other DNA
tcaggtgtttaaacgtattggatatgcagggcgtgttacggggcatggtttcaggcatacgatgagtacaatcct

SEQ ID NO: 329229 - DNA, 75 bp, synthetic construct
  source 1..75: mol_type = other DNA
gcccgttcttatcggctggcgattgttcacggcaacgggccgcaggtggggctgctggcgttacagaatctggcg

SEQ ID NO: 329230 - DNA, 75 bp, synthetic construct
  source 1..75: mol_type = other DNA
tacaccggactaagcgctgctcaggttgatcgcctgcgtgatgagtttggcgtgtatttgatcgccagcggtcgc

SEQ ID NO: 329231 - DNA, 75 bp, synthetic construct
  source 1..75: mol_type = other DNA
cttcctgtcagttttgacgtttcgcctgatccaattaccccggacacattgccacaggcaacagatattcaggaa

SEQ ID NO: 329232 - DNA, 75 bp, synthetic construct
  source 1..75: mol_type = other DNA
caagcacgcatgattgatctgttcgaaatccgtcttcaagagcttgatgagtatgtggaaaaatatctaagaagc

SEQ ID NO: 329233 - DNA, 75 bp, synthetic construct
  source 1..75: mol_type = other DNA
tgcaatgcgtcttaaagagcgcaggcagaagcttggtttatctcaaggaaaacttgctgaaatctgcggatggac

SEQ ID NO: 329234 - DNA, 75 bp, synthetic construct
  source 1..75: mol_type = other DNA
gagctacagctggctcacgtcgataagaactcaattcgtggaacgtataaccatgctcaatatctggaggggagg

SEQ ID NO: 329235 - DNA, 75 bp, synthetic construct
  source 1..75: mol_type = other DNA
gagcaactgagaaggtccgtaaggttcgccagcgttgtggagaggtctggaagtatgcggttgtgactggcaggg

SEQ ID NO: 329236 - DNA, 75 bp, synthetic construct
  source 1..75: mol_type = other DNA
atatcggccaccgaccaatcaaagatatcaaaccgatggagttgcttgctgttctttcaaagatagaaactcgag

SEQ ID NO: 329237 - DNA, 75 bp, synthetic construct
  source 1..75: mol_type = other DNA
actgtacgacgacagccatccggaagccctggccgtaatacccagaaaattttccgttggctggataaagacacc

SEQ ID NO: 329238 - DNA, 75 bp, synthetic construct
  source 1..75: mol_type = other DNA
ctggaacgcctgcgactgaaaccttatagcgatcgttacccgttgcacctttccggtggtcagcaacaacgtgtc

SEQ ID NO: 329239 - DNA, 75 bp, synthetic construct
  source 1..75: mol_type = other DNA
tcacatcgttgaacaaggcgacgcgcgctgctttaccgagccgcaaaccgaagcatttaaaaactatctctctca

SEQ ID NO: 329240 - DNA, 75 bp, synthetic construct
  source 1..75: mol_type = other DNA
tgtcgcagtggcgatcgctggtttcaaccagatgaatcgtggtggtccggcgggaaatgccgtggtgatgcacta

SEQ ID NO: 329241 - DNA, 75 bp, synthetic construct
  source 1..75: mol_type = other DNA
gcgcagccacagttcagcttattttcgggagctggtggagatgcgggagcgactggtgagagacgctgatgattt

SEQ ID NO: 329242 - DNA, 75 bp, synthetic construct
  source 1..75: mol_type = other DNA
tgaaagatattgatgatttcgttgcatcagcgatcgttctgttcgatcagatgaatcgtggtggcccggcaggaa

SEQ ID NO: 329243 - DNA, 75 bp, synthetic construct
  source 1..75: mol_type = other DNA
ctcttcaatgcggtatccctgatgtccctgaatccggagccgaaaaagaaagaatatgcggtttttttcatataa

SEQ ID NO: 329244 - DNA, 75 bp, synthetic construct
  source 1..75: mol_type = other DNA
gctggggccatgcctgggtgcatgaaaccgcggtggtcagacggaagagtgaggcatcccggtttcaggattttg

SEQ ID NO: 329245 - DNA, 75 bp, synthetic construct
  source 1..75: mol_type = other DNA
ctgttcaatgcggtatccctgatgtccctgaatccggagcccaaaaagaaagaatatgcggtttttttcatataa

SEQ ID NO: 329246 - DNA, 75 bp, synthetic construct
  source 1..75: mol_type = other DNA
tacccaggtgatcgtcacccacgaagttgaagtggcgcgtaaaaccgccagccgtgtggtgtatatggaaaacgg

SEQ ID NO: 329247 - DNA, 75 bp, synthetic construct
  source 1..75: mol_type = other DNA
ttgcataattattctgtcaaaggtactatcttcgacctcaatagctatcagactgccagtatacgaatgtcaatg

SEQ ID NO: 329248 - DNA, 75 bp, synthetic construct
  source 1..75: mol_type = other DNA
gtgacagtggggattgacggcggagggctggatgatctgctggggatgtatgtgattgggcgtgaccgggagacc

SEQ ID NO: 329249 - DNA, 75 bp, synthetic construct
  source 1..75: mol_type = other DNA
tgtcgcggtggtaattgctggtttcaatcagatgaatcgtggtggtccggcgggaaatgccgtggtggtgcattg

SEQ ID NO: 329250 - DNA, 75 bp, synthetic construct
  source 1..75: mol_type = other DNA
atgaaatttgtctcttttaatatcaacggtctgcgcgccagaccacaccagcttgaagccatcgtcgaaaagcac

SEQ ID NO: 329251 - DNA, 75 bp, synthetic construct
  source 1..75: mol_type = other DNA
actatctggaaaccgaactcaaacgcgagaatccggtgctgattatgggtgatatgaatatcagccccaccgatc

SEQ ID NO: 329252 - DNA, 75 bp, synthetic construct
  source 1..75: mol_type = other DNA
agaatgttgcgtagaaaccggcatcgactatgaaattcgcagcatggaaaaaccgtccgatcacgcccccgtctg

SEQ ID NO: 329253 - DNA, 75 bp, synthetic construct
  source 1..75: mol_type = other DNA
gcataacgacagcaagcacaacacgctttatctcaacacccaaaagattttccgttggctggataaagacacccc

SEQ ID NO: 329254 - DNA, 75 bp, synthetic construct
  source 1..75: mol_type = other DNA
tgtcgcagtggcgattgctggtttcaatcagatgaatcgtggcggcccggcgggaaatgccgtggtcgcgcattg

SEQ ID NO: 329255 - DNA, 75 bp, synthetic construct
  source 1..75: mol_type = other DNA
agttgggtatgacgtttcctgaactgtatgacgacagccatccggaagccctggctcgcaatacccagaaaattt

SEQ ID NO: 329256 - DNA, 75 bp, synthetic construct
  source 1..75: mol_type = other DNA
gacggaatatggctcctggcgtaaccgtaagctggtggagtttttcactcgctacgcccgaacctgctttgaatc

SEQ ID NO: 329257 - DNA, 75 bp, synthetic construct
  source 1..75: mol_type = other DNA
agttttccggcggtcagcgccagcgcatctgcattgctcgcgcgttggcattgaatccaaaagtgatcattgccg

SEQ ID NO: 329258 - DNA, 75 bp, synthetic construct
  source 1..75: mol_type = other DNA
gttcagcttattttcgggagctggtggagacgcgggagcgactggtgagagacgctgatgattttgtcgcagtgg

SEQ ID NO: 329259 - DNA, 75 bp, synthetic construct
  source 1..75: mol_type = other DNA
tgaacgccgcgaccaccccataaaattcccggctaaagcgcagttttaccagaacctgcaaaactacctggaaac

SEQ ID NO: 329260 - DNA, 75 bp, synthetic construct
  source 1..75: mol_type = other DNA
agaaaccggcattgattatgaaatccgcagtatggaaaaaccgtcagatcacgccccggtgtgggcgaccttccg

SEQ ID NO: 329261 - DNA, 75 bp, synthetic construct
  source 1..75: mol_type = other DNA
gctactacgcgtctcgctgtgcgtctgccgacatgaacgccaataacaccaacgcggcaaacattgtgaaatcgc

SEQ ID NO: 329262 - DNA, 75 bp, synthetic construct
  source 1..75: mol_type = other DNA
aggagattctggattggttagcccctcaacggtcgaacgcagaatattctcttctgctttgcgatacctcagata

SEQ ID NO: 329263 - DNA, 75 bp, synthetic construct
  source 1..75: mol_type = other DNA
ttaaggagcgggtgatccgcaacagtctgcggccccctgccgtgcccggtatcggacgcactgagaaatacggca

SEQ ID NO: 329264 - DNA, 75 bp, synthetic construct
  source 1..75: mol_type = other DNA
ttaaggagcgggtgatccgaaacagtctgcggccccctgccgtgcccggtatcggacgcactgagaaatacggaa

SEQ ID NO: 329265 - DNA, 75 bp, synthetic construct
  source 1..75: mol_type = other DNA
ttaaggagcgggtgatccgaaacagtctgcggccccctgccgtgcccggtatcggacgcacagagaaatacggta

SEQ ID NO: 329266 - DNA, 75 bp, synthetic construct
  source 1..75: mol_type = other DNA
ttaaggagcgggtgatccggaacagtctgcggccccctgccgtgcccggtatcggacgcacggagaaatacggta

SEQ ID NO: 329267 - DNA, 75 bp, synthetic construct
  source 1..75: mol_type = other DNA
ttaaggagcgggtgatccggaacagtctgcggccccctgccgtgcccggtatcggacgcactgagaaatacggga

SEQ ID NO: 329268 - DNA, 75 bp, synthetic construct
  source 1..75: mol_type = other DNA
ttaaggagcgggtgatccgcaacagtctgcggccccctgccgtgcccggtatcggacgcaccgagaaatacggta

SEQ ID NO: 329269 - DNA, 75 bp, synthetic construct
  source 1..75: mol_type = other DNA
ccagcccctgatggcctggtgtgtggggaatgcccgtgtggagcccagaggtaatgccattcttatcacgaaaca

SEQ ID NO: 329270 - DNA, 75 bp, synthetic construct
  source 1..75: mol_type = other DNA
cggtcttgccctgcgctctgaccgttgggcgggtgcggacttctgggaacaacagggcaggcgcgtcagcctgga

SEQ ID NO: 329271 - DNA, 75 bp, synthetic construct
  source 1..75: mol_type = other DNA
tatccttcagcgagctgaggttgctacggttgggatagatggtggtggccttgatgaccttcttggtctttacat

SEQ ID NO: 329272 - DNA, 75 bp, synthetic construct
  source 1..75: mol_type = other DNA
ggctgctgctggtgatctgcctactgtcatgattgacggtaggaagttcaattgcattgccagcatagccagagc

SEQ ID NO: 329273 - DNA, 75 bp, synthetic construct
  source 1..75: mol_type = other DNA
tgcagaaatgttgggtatcgagcaagaagacgacataggtcttccgagtcgagctgctgacgccatgctcctgga

SEQ ID NO: 329274 - DNA, 75 bp, synthetic construct
  source 1..75: mol_type = other DNA
ccgacggaagagcgaggcgtcccggtttcaggatcttgttgcctgtggagatatgaccattggtaagcgtaaact

SEQ ID NO: 329275 - DNA, 75 bp, synthetic construct
  source 1..75: mol_type = other DNA
gccgcccacactggagagcaaaattatcctcgtgcagggcagtatcccggagatgcagaaagcgctggacagccg

SEQ ID NO: 329276 - DNA, 75 bp, synthetic construct
  source 1..75: mol_type = other DNA
ggtgcgtggatggccttcgcccagaccgatatcaaacgtctgatcgcctacacctcggtttcccacatgggcttc

SEQ ID NO: 329277 - DNA, 75 bp, synthetic construct
  source 1..75: mol_type = other DNA
cattctggccccgaccgtggaggtggcggctaacgccttcaaccctgcccgggatatggtacgacgtgacgatga

SEQ ID NO: 329278 - DNA, 75 bp, synthetic construct
  source 1..75: mol_type = other DNA
ttctgggaagagcagggccgttgtatcagcctggacgatatcctgcgtcgtgctgatgtggtgacggtggggatt

SEQ ID NO: 329279 - DNA, 75 bp, synthetic construct
  source 1..75: mol_type = other DNA
atgcgtttagttgatgacaatattctggatgaactttttcgcactgcagcaaattctgaacgtttgcgcgctcat

SEQ ID NO: 329280 - DNA, 75 bp, synthetic construct
  source 1..75: mol_type = other DNA
tgccagcactgtcgctgttctttgcggtggcaacgcttgggatgccaggcaccggtaacttcgtcggcgaattta

SEQ ID NO: 329281 - DNA, 75 bp, synthetic construct
  source 1..75: mol_type = other DNA
cgattctggatacctcgcactccgcgattggcaatatccagcagtggtttgttaattccgttactactacaaggc

SEQ ID NO: 329282 - DNA, 75 bp, synthetic construct
  source 1..75: mol_type = other DNA
ggtatggtaacgaatcgtggaacgcgctgttattaaccttaactggtggtctgacgctggctcctgtttgccttg

SEQ ID NO: 329283 - DNA, 75 bp, synthetic construct
  source 1..75: mol_type = other DNA
tgctggtgcaaagtctgacagggttgttgcttggcgctggcatccagcggttgcgtgaacttaaccagtcgctgc

SEQ ID NO: 329284 - DNA, 75 bp, synthetic construct
  source 1..75: mol_type = other DNA
tctgcggccccctgccgtgcccggtatcggacgcacggagaaatacggcagccggttgtttgacccgtccgtcag

SEQ ID NO: 329285 - DNA, 75 bp, synthetic construct
  source 1..75: mol_type = other DNA
ccagggctggaagctgggcggtgccattaaaaccaccgagcgaaaactggctgaaggggtactggtgcatggtgg

SEQ ID NO: 329286 - DNA, 75 bp, synthetic construct
  source 1..75: mol_type = other DNA
ggtggcagccgatccgaatacggtgtccggtatcaagtctgtggggacactgattgatgaactgtggctgtttgg

SEQ ID NO: 329287 - DNA, 75 bp, synthetic construct
  source 1..75: mol_type = other DNA
aaaaagaactggcgcgcaatcagcatctggctgaacgtttgttagaaaccgaagagagcgtgcgccgtgatgtgg

SEQ ID NO: 329288 - DNA, 75 bp, synthetic construct
  source 1..75: mol_type = other DNA
tatgaggggatctctcagcgtgaagttcgtgttcgcatggaaggtcagcttttactgaatacgatagacctgatc

SEQ ID NO: 329289 - DNA, 75 bp, synthetic construct
  source 1..75: mol_type = other DNA
catcatgaagagaatatttttacgctgtggcgcagtttacgctttggcgataatctccaggcatggttggagcag

SEQ ID NO: 329290 - DNA, 75 bp, synthetic construct
  source 1..75: mol_type = other DNA
atattacggctgatttgcaagggcgttatccgtggactgaagaagaacccttgctgttgactgatgttagcgtcg

SEQ ID NO: 329291 - DNA, 75 bp, synthetic construct
  source 1..75: mol_type = other DNA
atttttgctttttctatttgggccctttctgctgaggggacaattatttataacatgataaagatattatcatag

SEQ ID NO: 329292 - DNA, 75 bp, synthetic construct
  source 1..75: mol_type = other DNA
acatcgttgatggtggcattaaccggcgtgattggatttgttggcttaatggtgcctcatctgtgtcggcatttt

SEQ ID NO: 329293 - DNA, 75 bp, synthetic construct
  source 1..75: mol_type = other DNA
acgaaagctgtctgcgccatcaggccttctggcatagctggcaggggccgcttgttgaaaggcaacaaagtaaca

SEQ ID NO: 329294 - DNA, 75 bp, synthetic construct
  source 1..75: mol_type = other DNA
ctttaataacctcgcggggcagtactggacggggctggcaaaattgcttcatttctttattaactacgacccctc

SEQ ID NO: 329295 - DNA, 75 bp, synthetic construct
  source 1..75: mol_type = other DNA
gtttcgtctctcattgtgcctgtttttattatctggcaactgaataaaacggatgttgctctttatggtgacgcg

SEQ ID NO: 329296 - DNA, 75 bp, synthetic construct
  source 1..75: mol_type = other DNA
acggaaaaacaccactgtatatatggaaaaattttgattccatgttgctctggaaaataataacagagagtaata

SEQ ID NO: 329297 - DNA, 75 bp, synthetic construct
  source 1..75: mol_type = other DNA
aggaggtgaaacgctcgtgttccctctcaataaggaggcgacctgccatctggttgcgttattgtctgatgaaac

SEQ ID NO: 329298 - DNA, 75 bp, synthetic construct
  source 1..75: mol_type = other DNA
aacgaggagcaagagttcaggcgggtaatgtaatgcgagagttgagtttagcctacgacttcgcgattgcccgac

SEQ ID NO: 329299 - DNA, 75 bp, synthetic construct
  source 1..75: mol_type = other DNA
ttttctatattgatttaaaagcagagagtggtgctaaggatctgcttaaactgattgaaattctgtttccgtctt

SEQ ID NO: 329300 - DNA, 75 bp, synthetic construct
  source 1..75: mol_type = other DNA
aactggaagcgcaggaatctcgttttacctacagctaccagtttggtttattcgataaagctggcgactggacgc

SEQ ID NO: 329301 - DNA, 75 bp, synthetic construct
  source 1..75: mol_type = other DNA
atgtcacagacccaatccgatacttttaagctgtcttaccccttcaccacagctgctggcaccagagttgagcag

SEQ ID NO: 329302 - DNA, 75 bp, synthetic construct
  source 1..75: mol_type = other DNA
atgtcacagacccagccagatacttttacgctatcttatcctttcaccactgctgcaggtaccagaattgaacag

SEQ ID NO: 329303 - DNA, 75 bp, synthetic construct
  source 1..75: mol_type = other DNA
cagcaaaaacccggcagactgggacgaaccgctgattgcccgcagtactggtcttctcccggaagatctcgacaa

SEQ ID NO: 329304 - DNA, 75 bp, synthetic construct
  source 1..75: mol_type = other DNA
ttaacgagtgcaaaaaaaccggtgatgatgtggctgcggtgatcctcgaaccgattcagggtgaaggtggcgtaa

SEQ ID NO: 329305 - DNA, 75 bp, synthetic construct
  source 1..75: mol_type = other DNA
ttgaatacttcaaagagcatgtcaatccggggtttttagagtatcgcaaatctgttaccgctggcggggattacg

SEQ ID NO: 329306 - DNA, 75 bp, synthetic construct
  source 1..75: mol_type = other DNA
ggtcacctgcaaattgctgataatccgcatcgcggcgaaccgggaaccggagaaattaattacgaatatctcttt

SEQ ID NO: 329307 - DNA, 75 bp, synthetic construct
  source 1..75: mol_type = other DNA
tgcgtacagaacagttaacctctttgtttgaatgccatattcagccggagcagacccgactcatcatttcaggaa

SEQ ID NO: 329308 - DNA, 75 bp, synthetic construct
  source 1..75: mol_type = other DNA
ttttagtcgccgttcattatccggagctgatggacgggcgttatatgcttaccgttgtactgatacagagtacga

SEQ ID NO: 329309 - DNA, 75 bp, synthetic construct
  source 1..75: mol_type = other DNA
aactgctgacgacgctgaattttaagctggaaccggcggatgattttcgcgatgaaccggtgaagttaacggcgt

SEQ ID NO: 329310 - DNA, 75 bp, synthetic construct
  source 1..75: mol_type = other DNA
tgggtgacggatgctgacggggtgaaaacggatgcgctgatggcgttgccgccgctgcagcgtattgatgccgga

SEQ ID NO: 329311 - DNA, 75 bp, synthetic construct
  source 1..75: mol_type = other DNA
cttcaacaaaaatatgtctactttcgttgattacaaaatcaacctgcttgacaaaaatgacttcactaaagcact

SEQ ID NO: 329312 - DNA, 75 bp, synthetic construct
  source 1..75: mol_type = other DNA
cgtgagtttcatgagaagctgcgtgagctgctggcgacgctgaatctgaagctggaaccggcggatgattttcgc

SEQ ID NO: 329313 - DNA, 75 bp, synthetic construct
  source 1..75: mol_type = other DNA
tggaaaataataacagagagtaatatacgtacagatatcagactgactgccataccttctcttttgtcaggtatg

SEQ ID NO: 329314 - DNA, 75 bp, synthetic construct
  source 1..75: mol_type = other DNA
tccgctgggtggagaaagacacccctgatgcggttaaaaaaattcaggcgttgttaccggcgatcgaaagggcaa

SEQ ID NO: 329315 - DNA, 75 bp, synthetic construct
  source 1..75: mol_type = other DNA
gcatggcgatgaatgcttgggcgtatccggacggtgagaaagtacctgcagctgaaatagctcgggcttatttcg

SEQ ID NO: 329316 - DNA, 75 bp, synthetic construct
  source 1..75: mol_type = other DNA
ccgatctgtcatggcgagcggttgcgtgtcgataccggcgattcgctgatcgtcaaaagtattgaagttgaataa

SEQ ID NO: 329317 - DNA, 75 bp, synthetic construct
  source 1..75: mol_type = other DNA
ttcatgaaaatcaagcatgaacacatccgcatggcgatgaatgcctgggcgcatccggacggtgaaaaagttccg

SEQ ID NO: 329318 - DNA, 75 bp, synthetic construct
  source 1..75: mol_type = other DNA
gagagacgctgatgattttgtcgcagtggcaatcgccggtttcaatcagatgaaccgtggtggcccggcaggaaa

SEQ ID NO: 329319 - DNA, 75 bp, synthetic construct
  source 1..75: mol_type = other DNA
gtatgacgacagccatccggaagccctggctcgcaatacccagaaaattttccgctggatagagaaagacacccc

SEQ ID NO: 329320 - DNA, 75 bp, synthetic construct
  source 1..75: mol_type = other DNA
gcgcagtcacagttcagcctggtttcgggagctggtggagtcgcgggaacggctggtgagagacgccgatgattt

SEQ ID NO: 329321 - DNA, 75 bp, synthetic construct
  source 1..75: mol_type = other DNA
atacacgggcaacgtggcgctgctgaaagggcgctcaaactacctctgccttgaacgtctcgaacagcaggcgct

SEQ ID NO: 329322 - DNA, 75 bp, synthetic construct
  source 1..75: mol_type = other DNA
tgacgctgttgaaaaaattcaggcgttgttacctgcgatcgaaagggcaatgccacctccgctggtggctcgaat

SEQ ID NO: 329323 - DNA, 75 bp, synthetic construct
  source 1..75: mol_type = other DNA
ctggctcgcaatacccagaaaattttccgctggatagagaaagatacccctgatgcagttgaaaaaattcaggcg

SEQ ID NO: 329324 - DNA, 75 bp, synthetic construct
  source 1..75: mol_type = other DNA
tccggacggtgaaaaagttccggcagctgaaataaccagggcttattttgaactgggtatgacgttcccagaact

SEQ ID NO: 329325 - DNA, 75 bp, synthetic construct
  source 1..75: mol_type = other DNA
gcatggcgatgaatgcctgggcgcatccggacggtgaaaaagttccggcagctgaaataacccaggcttattttg

SEQ ID NO: 329326 - DNA, 75 bp, synthetic construct
  source 1..75: mol_type = other DNA
gtagagaaagacacccctgatgcagttgaaaaaattcaggcgttgttaccagcgatcgaaaaggcaatgccacct

SEQ ID NO: 329327 - DNA, 75 bp, synthetic construct
  source 1..75: mol_type = other DNA
atgccatatatcaaaaaggcagcaggttttattgctggctacaagctaaaattgctaacgatttatcagaatatc

SEQ ID NO: 329328 - DNA, 75 bp, synthetic construct
  source 1..75: mol_type = other DNA
gctttttattttaatgatcactactttatggacaagctggtttctgtttctccaaaactggaggcggcagttaaa

SEQ ID NO: 329329 - DNA, 75 bp, synthetic construct
  source 1..75: mol_type = other DNA
tccgcaacaggaacagcgtctgagcgcattaccctcgtttgttcagggggatgcctggaataattttaaagcggg

SEQ ID NO: 329330 - DNA, 75 bp, synthetic construct
  source 1..75: mol_type = other DNA
gccagtgggtttttatcggtctggttatgtgtctcgtgacctattatgctggttctgttgctgtttatttcctga

SEQ ID NO: 329331 - DNA, 75 bp, synthetic construct
  source 1..75: mol_type = other DNA
tctgattgcgttagatccaaaacaggaattgtggaaaattaccagtaaggtgcgtgaaatactgctgggtaataa

SEQ ID NO: 329332 - DNA, 75 bp, synthetic construct
  source 1..75: mol_type = other DNA
gccagtgggcttttatcggtctggttatgtgtctcgtgacatattatactggttctgttgctgtttacttcctga

SEQ ID NO: 329333 - DNA, 75 bp, synthetic construct
  source 1..75: mol_type = other DNA
ctaccattggcattgccctcggcgtggcggtattgatcgtcggcttaagcgcgatgaacggctttgaacgcgaac

SEQ ID NO: 329334 - DNA, 75 bp, synthetic construct
  source 1..75: mol_type = other DNA
acatcgtctccaccttagtgatggcggtgaaagacaagagcggcgatatcgcagtattgagaacgctgggtgcta

SEQ ID NO: 329335 - DNA, 75 bp, synthetic construct
  source 1..75: mol_type = other DNA
atgacggatgttttcaacgccaataagctggtacgcgatgcgggtgaagtgaccaacagctatgtttatattaaa

SEQ ID NO: 329336 - DNA, 75 bp, synthetic construct
  source 1..75: mol_type = other DNA
tgttgatccacagcaggaacagcaacttagcgcgctgccttcgtttgttcagggagatgcctggaaccattttaa

SEQ ID NO: 329337 - DNA, 75 bp, synthetic construct
  source 1..75: mol_type = other DNA
ggcgtggcggatgcgctgaaagtgaagcagggcgattgggtgtcgatcatgatccccaactcgaatcccgagcat

SEQ ID NO: 329338 - DNA, 75 bp, synthetic construct
  source 1..75: mol_type = other DNA
tttgaacgcgaactgaataaccgcattctggcggtggtgccgcatggtgaaatcgaagcggttaaccagccgtgg

SEQ ID NO: 329339 - DNA, 75 bp, synthetic construct
  source 1..75: mol_type = other DNA
gcggattttgcccgtattgtcggctttaagtatctacgcggtatgcatcttaacgatgcgaaaagtacctttggc

SEQ ID NO: 329340 - DNA, 75 bp, synthetic construct
  source 1..75: mol_type = other DNA
ccgaaaattataaagaaattttctgctcaagatcctcgtataaaattgtattctaacccagtaaattctggtgcg

SEQ ID NO: 329341 - DNA, 75 bp, synthetic construct
  source 1..75: mol_type = other DNA
aagataagccgtcgctgattatctgccgtacggtgattggctttggttcgccgaataaagcaggtaaggaagagg

SEQ ID NO: 329342 - DNA, 75 bp, synthetic construct
  source 1..75: mol_type = other DNA
accccggtagtcacctgatgcaaatttcagaagaggattgcctggcgcgcattgccgaatccatcaacattgcgc

SEQ ID NO: 329343 - DNA, 75 bp, synthetic construct
  source 1..75: mol_type = other DNA
ttaagtatctgcgcgggatgcaccttaacgatgcgaaaagcacctttggcagccgcgttgaccgccatcatagcc

SEQ ID NO: 329344 - DNA, 75 bp, synthetic construct
  source 1..75: mol_type = other DNA
cgtggaagataaatcccgtgtcggcgtctgcattgatacctgccatgctttcgctgccgggtatgatttgcgtac

SEQ ID NO: 329345 - DNA, 75 bp, synthetic construct
  source 1..75: mol_type = other DNA
tcgtctggggaatatctccccggcagccttcagggaaaaatatcatcagatggctgcttaaaaaaagaacaaatg

SEQ ID NO: 329346 - DNA, 75 bp, synthetic construct
  source 1..75: mol_type = other DNA
aacgcttatctggacgctggctattgtcggttgctccacatttttgattggttttattccgacgtatcaggaaat

SEQ ID NO: 329347 - DNA, 75 bp, synthetic construct
  source 1..75: mol_type = other DNA
attcaaaaaacatccgcgaaatattttattagcgctgggcgcgaggctggcagagagtgtctcctccaatattat

SEQ ID NO: 329348 - DNA, 75 bp, synthetic construct
  source 1..75: mol_type = other DNA
cgattcgcgcactcagtatggatgcggtacaaaaagccaactctggtcatcccggcgcgccgatgggcatggctg

SEQ ID NO: 329349 - DNA, 75 bp, synthetic construct
  source 1..75: mol_type = other DNA
agcattgtctcccacatgctggtcactgacaccataacagaggccaccctgtacgaaaacgggctgtatacgcgc

SEQ ID NO: 329350 - DNA, 75 bp, synthetic construct
  source 1..75: mol_type = other DNA
cggaaataactattccatcatcaaaggtaaagtaagctcagtacttctgttattaaaaatgctgcagattaatca

SEQ ID NO: 329351 - DNA, 75 bp, synthetic construct
  source 1..75: mol_type = other DNA
ttactccaacatttaattcggaaaaatttatcattgatacctataaatctatttctgctcaatcgtatattaact

SEQ ID NO: 329352 - DNA, 75 bp, synthetic construct
  source 1..75: mol_type = other DNA
ggcggaggtgttgcaggaggacacgggtgtgacgctaccggcggagctggcggtgatgctggggaggctggagcg

SEQ ID NO: 329353 - DNA, 75 bp, synthetic construct
  source 1..75: mol_type = other DNA
cagtagcgagttaggattgccagacaaactggcgggtttcctgatggggacggcagctggactggaaataccagc

SEQ ID NO: 329354 - DNA, 75 bp, synthetic construct
  source 1..75: mol_type = other DNA
gtttctcgatggcgctttcattaatgctgggagaagcgggattcacgccaacatcgattgataccactgccgatg

SEQ ID NO: 329355 - DNA, 75 bp, synthetic construct
  source 1..75: mol_type = other DNA
aggcgaaggcgcggcaccgtagcctggcggaggtgttgcaggaggacacgggtgtgacgctaccggcggagctgg

SEQ ID NO: 329356 - DNA, 75 bp, synthetic construct
  source 1..75: mol_type = other DNA
tgcaaactattcttgatgaagtccgtagcgctaaactggcgggtatgtgccctgtacagaccgaccagcatgtac

SEQ ID NO: 329357 - DNA, 75 bp, synthetic construct
  source 1..75: mol_type = other DNA
ctttccgcaggcgttacctgcaccaccggatgtactgaaaacattcttcccgaatatcccggtggccacaccgac

SEQ ID NO: 329358 - DNA, 75 bp, synthetic construct
  source 1..75: mol_type = other DNA
ctggaaatcgaatttaaaggagaaacggtcagcaaatgctcgttctctgaaaataaaagcagaatgaatacaggt

SEQ ID NO: 329359 - DNA, 75 bp, synthetic construct
  source 1..75: mol_type = other DNA
ttcccatgattgggctgctgacagggggttcacagacgcaggccaaaacgctggaaatcgaatttaaaggcgaaa

SEQ ID NO: 329360 - DNA, 75 bp, synthetic construct
  source 1..75: mol_type = other DNA
ctggaaatcgaatttaaaggcgaaacggtcagtaagtggacgatctctgaaaacaacagcaagatgaaaaccggc

SEQ ID NO: 329361 - DNA, 75 bp, synthetic construct
  source 1..75: mol_type = other DNA
gctgggggaagcgggattcacgccaacatcgattgataccaccgccgatgtgtcgctggataaagtggatgccgg

SEQ ID NO: 329362 - DNA, 75 bp, synthetic construct
  source 1..75: mol_type = other DNA
cacattgggaaggtgacatcaaacacggtaaagggactgtctccaccgaaagtggcgtgctgaaccaacagccct

SEQ ID NO: 329363 - DNA, 75 bp, synthetic construct
  source 1..75: mol_type = other DNA
acccgcttaggtgaaccggacaccagaacaacactggacagtggcaatgaagaatgggcttattcaatgaataat

SEQ ID NO: 329364 - DNA, 75 bp, synthetic construct
  source 1..75: mol_type = other DNA
ttcttacttcggagcagtttctctcctggggatggcgcattccgttttggctttctgcggtgatgttgatcgttg

SEQ ID NO: 329365 - DNA, 75 bp, synthetic construct
  source 1..75: mol_type = other DNA
gcagataaccgggataaaaacgggaaactgcagaagcctcttgccgccactcagatggggcttatttatgtcaat

SEQ ID NO: 329366 - DNA, 75 bp, synthetic construct
  source 1..75: mol_type = other DNA
ataagaaaatcacgacacgtttcctgaatgacccaaaagcttttgagcaggcatttgcaagagcgtggtttaagc

SEQ ID NO: 329367 - DNA, 75 bp, synthetic construct
  source 1..75: mol_type = other DNA
tgccggagcttatcagtggaaacccaaaaatgcagccaacgtagttcaggacgctcatgacccatcggtgctaca

SEQ ID NO: 329368 - DNA, 75 bp, synthetic construct
  source 1..75: mol_type = other DNA
gttgaaagcctcattgataaagccagtcagctggatctcaccgttcctgaaatgacggcattactgggtggtctg

SEQ ID NO: 329369 - DNA, 75 bp, synthetic construct
  source 1..75: mol_type = other DNA
tcattcagtgtactggagccgacagcagatggattcagaaattattactcaaaaagcagaagtcatatatcgccg

SEQ ID NO: 329370 - DNA, 75 bp, synthetic construct
  source 1..75: mol_type = other DNA
ccctgaatcaaatccctggggggctgattttgattatgccaccagatttcaacagctggatatggaggctctgaa

SEQ ID NO: 329371 - DNA, 75 bp, synthetic construct
  source 1..75: mol_type = other DNA
cagttgcagaaaaaggggctaaacgcatgaataccttatttaatcagcctttgaaggttgtgaacgcgggactac

SEQ ID NO: 329372 - DNA, 75 bp, synthetic construct
  source 1..75: mol_type = other DNA
tctgttgcaggaagaggaagaagggttgccactggtaggtcgtgtggctgccggtgaaccgcttctggcgcagca

SEQ ID NO: 329373 - DNA, 75 bp, synthetic construct
  source 1..75: mol_type = other DNA
ccgcagagcgacactccccaggcggtgagcggggcatctcagccacgctggttacgactcagcaacggaaagcag

SEQ ID NO: 329374 - DNA, 75 bp, synthetic construct
  source 1..75: mol_type = other DNA
ggcattaatgccgcagcgcgactgggatgtgaacgccgcagccgttcgtgctctgcctgttctggagaaaatcca

SEQ ID NO: 329375 - DNA, 75 bp, synthetic construct
  source 1..75: mol_type = other DNA
aggctgcggcttcccttgcgccctgtgcatccccgccttatcgcccggcttttatagaggcacggcaccgcccgg

SEQ ID NO: 329376 - DNA, 75 bp, synthetic construct
  source 1..75: mol_type = other DNA
tacctccgttaacttccccccgatgcaagcctggttgttggaaggacaaaaacccatttttgttcctgacttcgc

SEQ ID NO: 329377 - DNA, 75 bp, synthetic construct
  source 1..75: mol_type = other DNA
cgcgtgcggcgaaaactttaggtgagtgtaccagaggagctcatagtggactgcctttttatcgggtggatggac

SEQ ID NO: 329378 - DNA, 75 bp, synthetic construct
  source 1..75: mol_type = other DNA
aaagcaggtgtaaaactagaaatcccattcaaaccaggaagaactgatgcttctcaggaacagacagatattaca

SEQ ID NO: 329379 - DNA, 75 bp, synthetic construct
  source 1..75: mol_type = other DNA
ggggaaataatggtgcccgcatcaggttacagcccgaaattaactgggaagttaatgagcctgaaaaactgaaga

SEQ ID NO: 329380 - DNA, 75 bp, synthetic construct
  source 1..75: mol_type = other DNA
atgcaaaagcaagctgagttgtatcgtggtaaagcgaaaaccgtatacagcacggaaaacccggacctgttggtg

SEQ ID NO: 329381 - DNA, 75 bp, synthetic construct
  source 1..75: mol_type = other DNA
cctcaacagagctggcaatggcgttgtggcccgttgtgaaaaaacagattgatgatgatccggaggttcatcctc

SEQ ID NO: 329382 - DNA, 75 bp, synthetic construct
  source 1..75: mol_type = other DNA
gacaccttagtggacgtatgggacgagatcgggcaataccttggcacaggcaaagccattgaaactcgcagttgc

SEQ ID NO: 329383 - DNA, 75 bp, synthetic construct
  source 1..75: mol_type = other DNA
tcagatgggcctgatttatgtcaatccagaaggtccggggggaaacccagatcctcttgcctctgcgaaagatat

SEQ ID NO: 329384 - DNA, 75 bp, synthetic construct
  source 1..75: mol_type = other DNA
tcaggagcagacggatgttgcctcattcagtgtactggagccgacagcagatggattcagaaattattactcaaa

SEQ ID NO: 329385 - DNA, 75 bp, synthetic construct
  source 1..75: mol_type = other DNA
gcgctgggcggcaccttgaccatctcctgtttgcacggcacgcgtgtcagtgtttctctacctcaacgttatgtc

SEQ ID NO: 329386 - DNA, 75 bp, synthetic construct
  source 1..75: mol_type = other DNA
aagatttgctgacaacttcccaggattggtggcctgcggattatggtcattatggtcctttctttattcgtatgg

SEQ ID NO: 329387 - DNA, 75 bp, synthetic construct
  source 1..75: mol_type = other DNA
gatgatgaggagactgtggccctgatcgcgggagggcatacatttggtaaagcacatggtgcagcgtctcctgaa

SEQ ID NO: 329388 - DNA, 75 bp, synthetic construct
  source 1..75: mol_type = other DNA
ttcaaaaacctcttgctgccacgcagatgggacttatttatgtcaatcctgaaggccccggtggaaaaccagatc

SEQ ID NO: 329389 - DNA, 75 bp, synthetic construct
  source 1..75: mol_type = other DNA
gagattacacagccctgaatcaaatccctggggtgctgattttgactatgccaccagatttcaacagctggatat

SEQ ID NO: 329390 - DNA, 75 bp, synthetic construct
  source 1..75: mol_type = other DNA
cgccaatctcgatatcgcaaaagccgaaagcaacttgtctatcgccagctacaacaaagcggtggttgaagcggt

SEQ ID NO: 329391 - DNA, 75 bp, synthetic construct
  source 1..75: mol_type = other DNA
ctgggagtggcaaacccaggcggcgttaaacactgtcttgcagcaaatcgaaaaagagcagaacaccattatcgc

SEQ ID NO: 329392 - DNA, 75 bp, synthetic construct
  source 1..75: mol_type = other DNA
cgaaaggcggcggctctgccaacaaaacgtatctctaccaggaaaccaaagccctgctgactcccggcaaactga

SEQ ID NO: 329393 - DNA, 75 bp, synthetic construct
  source 1..75: mol_type = other DNA
ctacaaaacgctcccgatatgcaggtggctgaacagcgtattcaactggctgaagcacaggcgaaagccgtagca

SEQ ID NO: 329394 - DNA, 75 bp, synthetic construct
  source 1..75: mol_type = other DNA
agcccaggcgaaggcagttgccactcaggatggtccgcagatcgacttttctgcggatatggagcggcaaaaaat

SEQ ID NO: 329395 - DNA, 75 bp, synthetic construct
  source 1..75: mol_type = other DNA
accagcaaataccggctgtgcaagttgacaccgcattacctgcggcactgaaaaatggctggccagacagccagt

SEQ ID NO: 329396 - DNA, 75 bp, synthetic construct
  source 1..75: mol_type = other DNA
ctgtttgcggcggggatccatcctgatcggctggcatcatcgctgtcattagcagagtgtgaacttctggcgcgg

SEQ ID NO: 329397 - DNA, 75 bp, synthetic construct
  source 1..75: mol_type = other DNA
agcgtgcagcgccgcgctaaatatctgctgctggagctgccagagggctggattatcatccatctggggatgtct

SEQ ID NO: 329398 - DNA, 75 bp, synthetic construct
  source 1..75: mol_type = other DNA
ctggcccatcttggaccggagccgcttagcgacgatttcaatggtgagtatctgcatcagaagtgcgcgaagaaa

SEQ ID NO: 329399 - DNA, 75 bp, synthetic construct
  source 1..75: mol_type = other DNA
cactgccgacatgatgttaacccatcgctatccgttcgccacgctggcagaaacctacgagcgcgatgtgattaa

SEQ ID NO: 329400 - DNA, 75 bp, synthetic construct
  source 1..75: mol_type = other DNA
catgtggcaacgcgtctggagttgcccgtgctggacccatcagccgaagattttgacgcgcagctgcgggcgcag

SEQ ID NO: 329401 - DNA, 75 bp, synthetic construct
  source 1..75: mol_type = other DNA
aatgttttaatttgccagcagccgaaagaattagtctggaaacaacggagatacctattccgggtgacaatgaag

SEQ ID NO: 329402 - DNA, 75 bp, synthetic construct
  source 1..75: mol_type = other DNA
caaaacccagcaacagctcaacgatgtggcggggaaaatgaaaattatcgaggcgcggttaagcgcgctgaccaa

SEQ ID NO: 329403 - DNA, 75 bp, synthetic construct
  source 1..75: mol_type = other DNA
cttgttttgaaagccaagactccaggaaactatggaatttaattgccgctgcaaaagctgctgtcgctgctaaag

SEQ ID NO: 329404 - DNA, 75 bp, synthetic construct
  source 1..75: mol_type = other DNA
actcactggtgcgctgggcgggggtacaaacgctgatgatatgcgccttctatacttaacgtttgttgagcgtta

SEQ ID NO: 329405 - DNA, 75 bp, synthetic construct
  source 1..75: mol_type = other DNA
agaacgcaccggatatgcaggtggctgaacagcgcattcagctagctgaagcccaggcgaaggcaattgctactc

SEQ ID NO: 329406 - DNA, 75 bp, synthetic construct
  source 1..75: mol_type = other DNA
cagcaacaatcttatgatgtgcttacctacatttaccaggaagcacagaagcagataacagcaactaaacgaaca

SEQ ID NO: 329407 - DNA, 75 bp, synthetic construct
  source 1..75: mol_type = other DNA
aagggttaccgatttttcagcctgtttccctgcgcccacaagaaaatcaacaactggtcgccgatctgcaggctg

SEQ ID NO: 329408 - DNA, 75 bp, synthetic construct
  source 1..75: mol_type = other DNA
acgttcatggttcactgctgccacgctggcgcggtgctgcaccaatccaacgctcactatgggcgggtgatgcag

SEQ ID NO: 329409 - DNA, 75 bp, synthetic construct
  source 1..75: mol_type = other DNA
agcggtgaatgacgtggcgcgggcagcaactcaggttcagacactggcggagaaaaatcagcatcaggcgcaaat

SEQ ID NO: 329410 - DNA, 75 bp, synthetic construct
  source 1..75: mol_type = other DNA
tttgtactgggagtggcaaaccctggcagctttaaacactgtcttgcagcaaatcgaaaaagagcagaacacgat

SEQ ID NO: 329411 - DNA, 75 bp, synthetic construct
  source 1..75: mol_type = other DNA
aaaaccagcatcaggcgcaaattgagcatgatgccctgcgggtagttgggctggcgcaggcgcgttttaacgcgg

SEQ ID NO: 329412 - DNA, 75 bp, synthetic construct
  source 1..75: mol_type = other DNA
gtcggcggaagggttaatggggccgtttgccctgaccgatccggcggcaggtactaccgggccgtggtataccaa

SEQ ID NO: 329413 - DNA, 75 bp, synthetic construct
  source 1..75: mol_type = other DNA
agcttcctgatgaactggggtactccttactggcccggcgggcagatttgcaggcggcgcactggtacgttgagt

SEQ ID NO: 329414 - DNA, 75 bp, synthetic construct
  source 1..75: mol_type = other DNA
cacttccttaattaataacgcactacagaacgcaccggatatgcaggtggctgaacagcgcattcagctggctga

SEQ ID NO: 329415 - DNA, 75 bp, synthetic construct
  source 1..75: mol_type = other DNA
gtgagaatgatgcaggcatcgacaaaatacttatccccggcgctgaaaccaaatgtgccaacgttggcacatttg

SEQ ID NO: 329416 - DNA, 75 bp, synthetic construct
  source 1..75: mol_type = other DNA
tatctggacgcactggaactggttgatacctccagtgctccagatattgaatggcctacgcttccggcagttcag

SEQ ID NO: 329417 - DNA, 75 bp, synthetic construct
  source 1..75: mol_type = other DNA
tatgcgcatgattgtcagttggtggaaaaactccccgttgaagagtgggatatcccactgcctgcggtggttaca

SEQ ID NO: 329418 - DNA, 75 bp, synthetic construct
  source 1..75: mol_type = other DNA
cgtgcaggcctccacccgggatgaaattgaacgactctggaatccgcagggcatggccgcgcagcctgcacaacc

SEQ ID NO: 329419 - DNA, 75 bp, synthetic construct
  source 1..75: mol_type = other DNA
tcattggccgatgcagaacgctttatcgaagaaggtcattttgcgaaaggttctatgctgccgaaagtagaagct

SEQ ID NO: 329420 - DNA, 75 bp, synthetic construct
  source 1..75: mol_type = other DNA
atattggttacgatctgcaaaacgccttacgggaagaactgctttctcgtggcattaataaacccgttgcaacgc

SEQ ID NO: 329421 - DNA, 75 bp, synthetic construct
  source 1..75: mol_type = other DNA
tttcttctctcgatgctggtacacagcgatcatataaagttaccgcgaaagaaacgactgatcctaccctcgtaa

SEQ ID NO: 329422 - DNA, 75 bp, synthetic construct
  source 1..75: mol_type = other DNA
caaccgcaaccggtactatgatccgttgcaggggagatatatcacccaggacccgatagggctgagaggtgaatg

SEQ ID NO: 329423 - DNA, 75 bp, synthetic construct
  source 1..75: mol_type = other DNA
tccgttttttcctacaccctggatggtcagggggatacggcctttcctgaagcattaccggtgccaccggaggtg

SEQ ID NO: 329424 - DNA, 75 bp, synthetic construct
  source 1..75: mol_type = other DNA
atgtctctcactaaatcactgctgttcaccctgttgctgacagccgctgccgtgcaggcctccacccgggatgaa

SEQ ID NO: 329425 - DNA, 75 bp, synthetic construct
  source 1..75: mol_type = other DNA
tttatgcaggggcattgcccttactgtcaccagtttgacccggtactgaagcagctggcacagcagtacggcttt

SEQ ID NO: 329426 - DNA, 75 bp, synthetic construct
  source 1..75: mol_type = other DNA
attgaacgactctggaatccgcagggcatggccgcgcagcctgcacaaccggcagcaggcacgtcagccaggaca

SEQ ID NO: 329427 - DNA, 75 bp, synthetic construct
  source 1..75: mol_type = other DNA
atgcagaccttcttcccgaatattccggtggccacaccgaccaccttcctggtcaacgtcaacacgcttgaggca

SEQ ID NO: 329428 - DNA, 75 bp, synthetic construct
  source 1..75: mol_type = other DNA
aggcacctttcccgatggggaaagacaataccgaatattatctactcacttccgattacgttagcgttgccgact

SEQ ID NO: 329429 - DNA, 75 bp, synthetic construct
  source 1..75: mol_type = other DNA
tgacggaagatgacgaagatcttgccgaactggctgacggcggcacggttgctggaatgactctcgacgatattg

SEQ ID NO: 329430 - DNA, 75 bp, synthetic construct
  source 1..75: mol_type = other DNA
acatttgacctgccggacgagccaacaggcaatgccgcgccttcatggctgactgagccaacgccacagattaac

SEQ ID NO: 329431 - DNA, 75 bp, synthetic construct
  source 1..75: mol_type = other DNA
ccgcgctgcaaaacgtgctgcgtcaggaacatagcggttacatctatctctgggcacgcgaaggcgcggggcgca

SEQ ID NO: 329432 - DNA, 75 bp, synthetic construct
  source 1..75: mol_type = other DNA
accaacgcagcacaacagcgtgttctcgccgacaaaaatgaaaaaatcgactcactctccaccagactggagaag

SEQ ID NO: 329433 - DNA, 75 bp, synthetic construct
  source 1..75: mol_type = other DNA
tggaccagagtgcggaggctatgctggaggcaggtaaacgtttggttatcctgaaggaaaatgaacctcatggag

SEQ ID NO: 329434 - DNA, 75 bp, synthetic construct
  source 1..75: mol_type = other DNA
tttgaccttgatgccgcaccatcgggtaacgatgtccccgcctggctgaccgaaccggagcctgaaatcaaccga

SEQ ID NO: 329435 - DNA, 75 bp, synthetic construct
  source 1..75: mol_type = other DNA
ggcggtggaaatcgcttttctggatgcgctttccggggccatttctccccggactcgtgttgttattgttactga

SEQ ID NO: 329436 - DNA, 75 bp, synthetic construct
  source 1..75: mol_type = other DNA
ccgctggatatgtataaagaagtgaataccggcaccaatctgccagcgcagatcgatctttatgccgttgatggc

SEQ ID NO: 329437 - DNA, 75 bp, synthetic construct
  source 1..75: mol_type = other DNA
acggatggattcttatgtcgattgtaaccaggtgaatcatttgataccgacaagggttttagtgaaaggaggtga

SEQ ID NO: 329438 - DNA, 75 bp, synthetic construct
  source 1..75: mol_type = other DNA
cagttggatcgcgcgtcgattaccgcacagcgtaagctgaccattccgtttgtgaaagaaattctgaagttgtag

SEQ ID NO: 329439 - DNA, 75 bp, synthetic construct
  source 1..75: mol_type = other DNA
aggcgcggggcgcagccatctgctgcacgcggcttgcgcggaattgtcgcagcgtggcgatgcggtgggctatgt

SEQ ID NO: 329440 - DNA, 75 bp, synthetic construct
  source 1..75: mol_type = other DNA
gtgcatgaggcacggttttatatgtcgcagagcgccgaggcaatgctggaagcgggtaagcggctggtgatactg

SEQ ID NO: 329441 - DNA, 75 bp, synthetic construct
  source 1..75: mol_type = other DNA
ccgcgatggtttccagcatctacgcagaagcgggactcgacccaaccttcgttaacggtgggctggtaaaagcgg

SEQ ID NO: 329442 - DNA, 75 bp, synthetic construct
  source 1..75: mol_type = other DNA
tcaccctgaatgcgccaggccgtcataacgcgctgaacgccgcagctgcggttgcggttgctacggaagagggca

SEQ ID NO: 329443 - DNA, 75 bp, synthetic construct
  source 1..75: mol_type = other DNA
attaaccggtaacgacctgattctcgttcagggggctggtaatatcggaaaaattgcccgttctttagctgaaat

SEQ ID NO: 329444 - DNA, 75 bp, synthetic construct
  source 1..75: mol_type = other DNA
tgacggggctaacgcttggtatcgacagccgtttctcccatgaagaaagcagcacaactcaggcgggtgtagtct

SEQ ID NO: 329445 - DNA, 75 bp, synthetic construct
  source 1..75: mol_type = other DNA
ggagacaggtcgtcccgttgagctggcgttacggggtatgcgtgttctggtgccatcatcactggcaacggccat

SEQ ID NO: 329446 - DNA, 75 bp, synthetic construct
  source 1..75: mol_type = other DNA
aggcatacaggaacaccggtgaggatgacgttcggtattctggaacgtatcatgcttctgaagtgtttttacctg

SEQ ID NO: 329447 - DNA, 75 bp, synthetic construct
  source 1..75: mol_type = other DNA
tgcatgcagatgagactaccctgaagatcctgaacacgaagaaaggcggtaaatcctgctccggttatctgtggg

SEQ ID NO: 329448 - DNA, 75 bp, synthetic construct
  source 1..75: mol_type = other DNA
cagaaggtgttcagcggtgaaatgccggcacatatcctcccgaaaagtgccgttgagccatcagtcatcgcacag

SEQ ID NO: 329449 - DNA, 75 bp, synthetic construct
  source 1..75: mol_type = other DNA
ctggaagaaatgctgaaactggttcgtcaacagcgcttcggtaaaaaatgtgaaacgctggctggtatgcaacgc

SEQ ID NO: 329450 - DNA, 75 bp, synthetic construct
  source 1..75: mol_type = other DNA
gtccacgaaaaaccctggcaaggaattggtgtgggtgcggccgttgggctggtactaggactgttgctggcacgc

SEQ ID NO: 329451 - DNA, 75 bp, synthetic construct
  source 1..75: mol_type = other DNA
ggcagtttatcgcgccgatgactacgtccacgaaaaaccctggcagggaattggcgttggcgcggctgttggact

SEQ ID NO: 329452 - DNA, 75 bp, synthetic construct
  source 1..75: mol_type = other DNA
aggtggttctgctttctccgaaataacaggaaaaggaatcgaaaaaatttcgtcttcaaatgctaatggagataa

SEQ ID NO: 329453 - DNA, 75 bp, synthetic construct
  source 1..75: mol_type = other DNA
gatgctcgacccggaacatcgtccgtatatcgtttttctcaccgcgtttgacgaatacgccattaaagcctttga

SEQ ID NO: 329454 - DNA, 75 bp, synthetic construct
  source 1..75: mol_type = other DNA
gccgacatgttcggggaactgcctgcagacccgcagcaggccgaagcacaagtcaggcaagttatgacgtctcct

SEQ ID NO: 329455 - DNA, 75 bp, synthetic construct
  source 1..75: mol_type = other DNA
tgccaatatgggttatcaggctttatgtttgtatatcgataacagctttgcgattaccagaatatcgccactctg

SEQ ID NO: 329456 - DNA, 75 bp, synthetic construct
  source 1..75: mol_type = other DNA
ttacaggtactgtaccggatgccgaagagatcgcgcgtaaagccgcactttttcgtcaacaaacagggattgcgc

SEQ ID NO: 329457 - DNA, 75 bp, synthetic construct
  source 1..75: mol_type = other DNA
cgtctgaccccactatctgaaaagaccatcaagaagcgcagagaaatgaaaccgcccatcctcggcgataagccg

SEQ ID NO: 329458 - DNA, 75 bp, synthetic construct
  source 1..75: mol_type = other DNA
gatgtgctggtgggaatacctgtggacaaggcagggcgtgaggatggttccccgataaataacgcggaactgggc

SEQ ID NO: 329459 - DNA, 75 bp, synthetic construct
  source 1..75: mol_type = other DNA
atgataagaatttataaagccagtaaaggtcagctaaagcatcgtgaaatttttgatgaaataaagaaaaaaatt

SEQ ID NO: 329460 - DNA, 75 bp, synthetic construct
  source 1..75: mol_type = other DNA
ttgcgggtaaaccttcgtctgaagtgagcatgatccatgctcgtggtacttgccagacctacatcctgggtcaac

SEQ ID NO: 329461 - DNA, 75 bp, synthetic construct
  source 1..75: mol_type = other DNA
tgacggtgtgtttaccgctgacccggcgaaagatccaactgcaactatgtacgagcagctgacctacagtgaagt

SEQ ID NO: 329462 - DNA, 75 bp, synthetic construct
  source 1..75: mol_type = other DNA
atgaaccgttagcacgggaaaacctgcgcgtatttttgcaggagcaaagcgatattgaaatcgtcggtgaatgct

SEQ ID NO: 329463 - DNA, 75 bp, synthetic construct
  source 1..75: mol_type = other DNA
gggcaggagcaaatgtcaggacctggtggattgctcagccgagtggcctaacaacgtcatcaatgccagtaatgc

SEQ ID NO: 329464 - DNA, 75 bp, synthetic construct
  source 1..75: mol_type = other DNA
ccaaacacattgatccccgttgatcttcccaccttacggttgccgaagactgaattgctactggcagaagtcacc

SEQ ID NO: 329465 - DNA, 75 bp, synthetic construct
  source 1..75: mol_type = other DNA
ttgtcgcgttagatgatacaggacatgtgatcaacaccggttatcagacctgtgccgaatatgacaccgatccgc

SEQ ID NO: 329466 - DNA, 75 bp, synthetic construct
  source 1..75: mol_type = other DNA
atgctcccctgtatggatatctccgctctcaacaccacgaatgacatcgaaaaactgcgtgctatggcacttgcc

SEQ ID NO: 329467 - DNA, 75 bp, synthetic construct
  source 1..75: mol_type = other DNA
ctttagccccagttggcaacctggattcctacatccgggcagctaacgcgtggtcgatgttgtcggctgacgagg

SEQ ID NO: 329468 - DNA, 75 bp, synthetic construct
  source 1..75: mol_type = other DNA
cgttatcccctgaaagtggtgcgttgggaaggggacccggaacagaatcccttcgggctggcgcttgactgctac

SEQ ID NO: 329469 - DNA, 75 bp, synthetic construct
  source 1..75: mol_type = other DNA
ggtgggaagtgccgcccccgacggtctactcctttgcgttctatatttttcagcagctcaatgcctggccgaaaa

SEQ ID NO: 329470 - DNA, 75 bp, synthetic construct
  source 1..75: mol_type = other DNA
gttcgcaaactttgcccgcattgtcgcctgcagcaaggggaagcaatccgccttccaggcaatttatggtcatcg

SEQ ID NO: 329471 - DNA, 75 bp, synthetic construct
  source 1..75: mol_type = other DNA
gtacgtttacagcaaatgggcgttgctcgctggatgctctcatcagcgcttacgctggtaatagcccagcgtctg

SEQ ID NO: 329472 - DNA, 75 bp, synthetic construct
  source 1..75: mol_type = other DNA
actgatgcgatgcaaggtctggacgaacgtagccaggacatcatccgcgcgcgctggctggacgaagacaacaaa

SEQ ID NO: 329473 - DNA, 75 bp, synthetic construct
  source 1..75: mol_type = other DNA
cgcgtgaatgatgtccgtctgccaggtcgtcttctggaagccgcacaggaaaccctgttgttcagggcgctggat

SEQ ID NO: 329474 - DNA, 75 bp, synthetic construct
  source 1..75: mol_type = other DNA
gtcattcgctcctcaagtgtcaagggggctgacattaacgccggtattattaacccggtgaaagattttgcgacc

SEQ ID NO: 329475 - DNA, 75 bp, synthetic construct
  source 1..75: mol_type = other DNA
ggctgcgtccaaaggctccgatacgattgaagtggcttatctcaacggtgtggatacgccatatattgatcagat

SEQ ID NO: 329476 - DNA, 75 bp, synthetic construct
  source 1..75: mol_type = other DNA
aagaccgcgaccagcatattcagacgctgcgcatcgcctgcgccgtgcttgcctttttccttttattcacctgtg

SEQ ID NO: 329477 - DNA, 75 bp, synthetic construct
  source 1..75: mol_type = other DNA
gggagggggacccggaacagaatcccttcgggctggcgcttgactgctacagcggtacaccacaacggctggaag

SEQ ID NO: 329478 - DNA, 75 bp, synthetic construct
  source 1..75: mol_type = other DNA
aattcatgccctgtcagcctatctgacgccgtcatgccgtgaactgatggagggcgatgcccgtcgccgtaagga

SEQ ID NO: 329479 - DNA, 75 bp, synthetic construct
  source 1..75: mol_type = other DNA
gcgcaagatgggatgctatgggcagagagccgtactttactgcttatggcactacagcaacagatggttacccca

SEQ ID NO: 329480 - DNA, 75 bp, synthetic construct
  source 1..75: mol_type = other DNA
cccggggaaaatagatttagaattaattgaagttcgctctggtgcatatcttgaagaagatgatgttattagatg

SEQ ID NO: 329481 - DNA, 75 bp, synthetic construct
  source 1..75: mol_type = other DNA
tcaacgaacggcttttaaagtcgaacgttttgtcgaaaaaccgaatatggaaaccgcccaggcctatgtggcaag

SEQ ID NO: 329482 - DNA, 75 bp, synthetic construct
  source 1..75: mol_type = other DNA
atgccacgccgtatgctgaaaatggcaagctggtgaccttcggtatcgtgccgaacgtgccggaaaccggctacg

SEQ ID NO: 329483 - DNA, 75 bp, synthetic construct
  source 1..75: mol_type = other DNA
agggcattacacaaagccattgtctatgcgctgtctcatcgcgtggaactgagccgcttcctggaagatggtgcg

SEQ ID NO: 329484 - DNA, 75 bp, synthetic construct
  source 1..75: mol_type = other DNA
gcctgacggcgtcggccctttacagagcggtgatgaactgacggtcactttcgatgggcattctgtgacaactcg

SEQ ID NO: 329485 - DNA, 75 bp, synthetic construct
  source 1..75: mol_type = other DNA
cccggggataattccgctcgatttaattgaagtgcgctccggctcttatctcgaagaggatgatgtggtgcgctt

SEQ ID NO: 329486 - DNA, 75 bp, synthetic construct
  source 1..75: mol_type = other DNA
taagtgttaaaccgggtgagaggctttcattgcaaatgcatcatcatagagctgaacactggatagttgtatctg

SEQ ID NO: 329487 - DNA, 75 bp, synthetic construct
  source 1..75: mol_type = other DNA
ctacaaagtggtgaaaaagatccagcgttctgaaagcgcccgccgacagctcccattattctctatcattgatga

SEQ ID NO: 329488 - DNA, 75 bp, synthetic construct
  source 1..75: mol_type = other DNA
cggtcaacccatctggctggcgctaaaaaataccggtgagtttagcccgctctgtttgcaattagtgagaacagg

SEQ ID NO: 329489 - DNA, 75 bp, synthetic construct
  source 1..75: mol_type = other DNA
tggtaaaattcctcttgagttagttgaagttcgttctggtgcttatattgaagaggacgatattattcgaatcgc

SEQ ID NO: 329490 - DNA, 75 bp, synthetic construct
  source 1..75: mol_type = other DNA
gatggtgattggagtgacgtgggctcttgggcatcattatgggatataactaataaagataataacggaaatgtt

SEQ ID NO: 329491 - DNA, 75 bp, synthetic construct
  source 1..75: mol_type = other DNA
acgataattctgtctgtgacttggattttatccgtattgatgaaaaacaattctcgaattgtctggatttatcta

SEQ ID NO: 329492 - DNA, 75 bp, synthetic construct
  source 1..75: mol_type = other DNA
cggcgcgcagctcaaccagacagtaaaagcgattcaggaagcggaagcgtatccgggaccatcgctgatcatcgc

SEQ ID NO: 329493 - DNA, 75 bp, synthetic construct
  source 1..75: mol_type = other DNA
cgcagatgaagtatggtcgcgcttgccgcaggaagttcaggccgtgttaaaccagaaaaaagcgcgcttctatgt

SEQ ID NO: 329494 - DNA, 75 bp, synthetic construct
  source 1..75: mol_type = other DNA
ggcggaacagttatggaaagatgccgcagccgatctgcaaaaacgctatgacttcctcgcacaaatggcaggaaa

SEQ ID NO: 329495 - DNA, 75 bp, synthetic construct
  source 1..75: mol_type = other DNA
ccgtatattaaattgctgactcagctctatggcgatcggatgttgatcgctaacgctacgggttgttcttcaatt

SEQ ID NO: 329496 - DNA, 75 bp, synthetic construct
  source 1..75: mol_type = other DNA
ggtgataatcctgatgggttctgctattggcacttgtgaagaagtggtagacgaattgctgacccgtggcgaaaa

SEQ ID NO: 329497 - DNA, 75 bp, synthetic construct
  source 1..75: mol_type = other DNA
acaccgtttgtactgcatgtggcggcgcgaaccgtcgctactcatgcgctctctatttttggtgatcattcagat

SEQ ID NO: 329498 - DNA, 75 bp, synthetic construct
  source 1..75: mol_type = other DNA
atgcactctctatttttggcgatcattccgacgtcatggcggtgcgccagacgggttgcgcgatgttgtgtgcgg

SEQ ID NO: 329499 - DNA, 75 bp, synthetic construct
  source 1..75: mol_type = other DNA
atgttattccaataccggcggtcaggcgtcgaaagcaaccccgcttggcgcggtaactaagtttggtgagcacgg

SEQ ID NO: 329500 - DNA, 75 bp, synthetic construct
  source 1..75: mol_type = other DNA
cgatatcggcttcggtggtctggatcatgtattgagcctgacggaaaacgtcaacattctggtactggatacgca

SEQ ID NO: 329501 - DNA, 75 bp, synthetic construct
  source 1..75: mol_type = other DNA
cgagaacaggtcgcagctttacgccagcaactcaacgatgttgccgaagcacatgaactgctgcgtgatgcagat

SEQ ID NO: 329502 - DNA, 75 bp, synthetic construct
  source 1..75: mol_type = other DNA
ggcgaaacagttgtggaaagatgccgcagccgatctgcaaaaacgttatgacttcctggcgcaactggctggaaa

SEQ ID NO: 329503 - DNA, 75 bp, synthetic construct
  source 1..75: mol_type = other DNA
ccctgccagcctgcattcactggatgtaaaatcgcgcgatatgcgcgggcagaaatatgtgttgcaggtcgcacc

SEQ ID NO: 329504 - DNA, 75 bp, synthetic construct
  source 1..75: mol_type = other DNA
cgtataccactgatgcaaacggtcgtggtccggcctgggcgaactcactgtttgaagataatgccgaatttggcc

SEQ ID NO: 329505 - DNA, 75 bp, synthetic construct
  source 1..75: mol_type = other DNA
cgccgggcatcggtgaaatcattggtggttcgcagcgtgaagagcgtctggacgtgctggacgaacgtatgctgg

SEQ ID NO: 329506 - DNA, 75 bp, synthetic construct
  source 1..75: mol_type = other DNA
tctctcttctgagcatgagcgttatctggcggaagaacactttaaagcaccggtagtggttaaaaactatccgaa

SEQ ID NO: 329507 - DNA, 75 bp, synthetic construct
  source 1..75: mol_type = other DNA
ttctttaacgaacaaggtttcttctgggtttctacaccgctgatcaccgcgtccgataccgaaggcgctggcgaa

SEQ ID NO: 329508 - DNA, 75 bp, synthetic construct
  source 1..75: mol_type = other DNA
aatcaataatgcattggctgttttacaagcacagatattaaaacaaccgacgccgccactgacatattatccgca

SEQ ID NO: 329509 - DNA, 75 bp, synthetic construct
  source 1..75: mol_type = other DNA
tcgcgcaggtggattacaccgacgcagtgaccattctcgaaaactgcggcaggaagtttgaaaacccggtttact

SEQ ID NO: 329510 - DNA, 75 bp, synthetic construct
  source 1..75: mol_type = other DNA
tactccagggccgcgtagccgttgacagcgaagtcaccgtgcgcggatgggtacgtacccgccgagattcaaaag

SEQ ID NO: 329511 - DNA, 75 bp, synthetic construct
  source 1..75: mol_type = other DNA
gtgccatgctctgcgccgcaaacgttcaggaagcgcaagactttgctctcattgcgcaaatagctacgctgaaaa

SEQ ID NO: 329512 - DNA, 75 bp, synthetic construct
  source 1..75: mol_type = other DNA
agcctgcattcgctggatgtgaaatcgcgtgatatgcgcgggcagaaatatgtcttacaggtagctccggaagat

SEQ ID NO: 329513 - DNA, 75 bp, synthetic construct
  source 1..75: mol_type = other DNA
atgctattccaataccggcggtcaggcgtcgaaagcaacccctcttggtgcagtaacgaagtttggtgaacacgg

SEQ ID NO: 329514 - DNA, 75 bp, synthetic construct
  source 1..75: mol_type = other DNA
tctgaccaccggctgctcggtcattgtgacgggtaaagtcgtggcgtcgccgggccaggggcaacaatttgaaat

SEQ ID NO: 329515 - DNA, 75 bp, synthetic construct
  source 1..75: mol_type = other DNA
gttaatattcacactcctgacccggaatcgtctgtgcgaagtccggctgaaggacggatacagggaggttacggc

SEQ ID NO: 329516 - DNA, 75 bp, synthetic construct
  source 1..75: mol_type = other DNA
gtgggggccgccccggtggaatggctcttccgccagaccacacagacatggggcgcggaacgttacctgaaggat

SEQ ID NO: 329517 - DNA, 75 bp, synthetic construct
  source 1..75: mol_type = other DNA
accgtcagaatccagagattaaagccatcaatatgatgtctcgcctggaacatgtcgaagaagagaaaatcaatt

SEQ ID NO: 329518 - DNA, 75 bp, synthetic construct
  source 1..75: mol_type = other DNA
atccgaacactcaaccgaaccagtgcatccattgagcgcctgcttgaaaatccattgggtgaaaatattgatctg

SEQ ID NO: 329519 - DNA, 75 bp, synthetic construct
  source 1..75: mol_type = other DNA
ggctttcgtgaagctcagctcatggcatggcagcagtttttcctgcatcagcagcaattggtgaacacacaactt

SEQ ID NO: 329520 - DNA, 75 bp, synthetic construct
  source 1..75: mol_type = other DNA
atcaccttatcctgaaacgtcagcgtctggtgcagcgcttgtttgatacggcaattagctttcggttagcacagc

SEQ ID NO: 329521 - DNA, 75 bp, synthetic construct
  source 1..75: mol_type = other DNA
gtcggctggcagggtaaaaacatcgctgccagcgggcggaccgatggcaacgctggggtgatattcgacactggc

SEQ ID NO: 329522 - DNA, 75 bp, synthetic construct
  source 1..75: mol_type = other DNA
atgacctggatcacaaaccgattttttagctggtgcgaaatcggcatcaaaaccatgattcttttactgttgctg

SEQ ID NO: 329523 - DNA, 75 bp, synthetic construct
  source 1..75: mol_type = other DNA
aaaaagccaaagagccggtgctggagattattcaggcgcggcgctggattgaagcgcgtatgcaggaggccggat

SEQ ID NO: 329524 - DNA, 75 bp, synthetic construct
  source 1..75: mol_type = other DNA
gattttatcggtacagcattcacgaaaaaatattttaaccggagcagactttaaacaaccaagaatgaaaagttt

SEQ ID NO: 329525 - DNA, 75 bp, synthetic construct
  source 1..75: mol_type = other DNA
cggcatcggttcgccctttcaacccgattttatcggtacagcattcacgaaaaaacattctaaccggagcagact

SEQ ID NO: 329526 - DNA, 75 bp, synthetic construct
  source 1..75: mol_type = other DNA
cgggtacgcaggcattaagccgctgtatgaccatggctatctgcttcgctcgatcaccttcgttgtgagaggtaa

SEQ ID NO: 329527 - DNA, 75 bp, synthetic construct
  source 1..75: mol_type = other DNA
gtgcctcactggaacagttgcttgatacggccaacgtagaaaacgtcgatctgatcctgacttcatcaccaatgc

SEQ ID NO: 329528 - DNA, 75 bp, synthetic construct
  source 1..75: mol_type = other DNA
aagcaggtttaaatctgaaaaacagcaatatctccgattttttctcgaatataagagaaaacataagcacacaac

SEQ ID NO: 329529 - DNA, 75 bp, synthetic construct
  source 1..75: mol_type = other DNA
gagatgtggagcgaaacggcggaagacccggcggcagaagtagcgaaagcgcgtgattgggtgaaagcgcgcatg

SEQ ID NO: 329530 - DNA, 75 bp, synthetic construct
  source 1..75: mol_type = other DNA
ggagccggtacataatcaatacgccatcgagcgcaattatttgttcttcgcatggttagccaaccaacgaaatga

SEQ ID NO: 329531 - DNA, 75 bp, synthetic construct
  source 1..75: mol_type = other DNA
atgtttgcagatgaagaacttgttatggagttactggtcaacgcgggacaggctcgttctgatgcgatggaagcc

SEQ ID NO: 329532 - DNA, 75 bp, synthetic construct
  source 1..75: mol_type = other DNA
ggaacttacagcattatgcgaaacagtcgataaaacaatagagcaattagtttttagtgttaataatcgttttgg

SEQ ID NO: 329533 - DNA, 75 bp, synthetic construct
  source 1..75: mol_type = other DNA
gcaggggaagcagctaactcaactattggccttgataaaaacggtaagctgacccaggatgagaaggacattgta

SEQ ID NO: 329534 - DNA, 75 bp, synthetic construct
  source 1..75: mol_type = other DNA
agaaatatgtcttgcaagtcgcgccggaagattgcaccggctgcaacctgtgcgttgaagtttgcccggcgaaag

SEQ ID NO: 329535 - DNA, 75 bp, synthetic construct
  source 1..75: mol_type = other DNA
caaccactgtgtcgccgcttgcccgcactccgctattcgcgcgaaagttgtgccgcctgaagcgatggaaaacgc

SEQ ID NO: 329536 - DNA, 75 bp, synthetic construct
  source 1..75: mol_type = other DNA
ggtagtgatggcagcgtttccgcgaccaaaaacaatatcaagattatcggtaattccacgccgtggtacgcacag

SEQ ID NO: 329537 - DNA, 75 bp, synthetic construct
  source 1..75: mol_type = other DNA
accactgtttccaatggtgtgctgctgttccttgagcgccgctactctgtgggtgtgaagagggctgacctgtga

SEQ ID NO: 329538 - DNA, 75 bp, synthetic construct
  source 1..75: mol_type = other DNA
ggtttcgttactcggcctggaagatgtggtcaaagccacgcagctggcaggcaaaagtacctgggaaccgttcta

SEQ ID NO: 329539 - DNA, 75 bp, synthetic construct
  source 1..75: mol_type = other DNA
atgcatgatgaccgttatcttaaatcaatgagccatgcagaaaacgcactgactaacagtgaatgtttgaggcaa

SEQ ID NO: 329540 - DNA, 75 bp, synthetic construct
  source 1..75: mol_type = other DNA
ccaatactcgccagttgcaggaacataatgcacgcctgaacagccagcagcgtcaaattcgtgagaatcacgaag

SEQ ID NO: 329541 - DNA, 75 bp, synthetic construct
  source 1..75: mol_type = other DNA
tggcgctacaaaaacgattgctgttaatgacggtctcgttgctctgtccggcagaacagaccgtattgatgctgc

SEQ ID NO: 329542 - DNA, 75 bp, synthetic construct
  source 1..75: mol_type = other DNA
gtgggcaagtgtttcggaggattatgttcccggcgatgatgcgttacgccctaccggggattggcaacaactggc

SEQ ID NO: 329543 - DNA, 75 bp, synthetic construct
  source 1..75: mol_type = other DNA
ctggtgaataaaaacttccgccagtcgttgtttgccgcgcaagatgcgcaaagcatcctgacgctgctggaaacg

SEQ ID NO: 329544 - DNA, 75 bp, synthetic construct
  source 1..75: mol_type = other DNA
ttttgcgcgccgccagtttcggcaacgcccagttgatgatcccgatggttcacagcctcgatcagatcttatggg

SEQ ID NO: 329545 - DNA, 75 bp, synthetic construct
  source 1..75: mol_type = other DNA
acgccggaagaagacgttcgcccgctgctggcgctggagaatatcttcgttgatcaggcctttagcaataaagag

SEQ ID NO: 329546 - DNA, 75 bp, synthetic construct
  source 1..75: mol_type = other DNA
atatcagattattagtgagtggaatatttggtgttgttatatggataccttattttcttttttccaaaagaatta

SEQ ID NO: 329547 - DNA, 75 bp, synthetic construct
  source 1..75: mol_type = other DNA
gagctctgactctgcagggagtaaggttggatatggatcctgaagttgtactacctgaaagggttgtgtgcgcac

SEQ ID NO: 329548 - DNA, 75 bp, synthetic construct
  source 1..75: mol_type = other DNA
tccggcgtgggaacttaaagagcagtgcagccagtggcaaagtgaagtcacctttattaaccatcgccagaacgc

SEQ ID NO: 329549 - DNA, 75 bp, synthetic construct
  source 1..75: mol_type = other DNA
acccgattacgccatcgttcctgcgtatgttgcagcaaatcgttactactgcgcatcagcggggaaaatgggtag

SEQ ID NO: 329550 - DNA, 75 bp, synthetic construct
  source 1..75: mol_type = other DNA
cagtttttgagccttgatttaaaaaatcttgcgggcatgattctggagaaaaccgggcgcacctcgcataccctg

SEQ ID NO: 329551 - DNA, 75 bp, synthetic construct
  source 1..75: mol_type = other DNA
tgcgctttgtgggtgagctgttcaccgatggtgaggaaagtcagctccttgaggtggagatgcgcggacgcatca

SEQ ID NO: 329552 - DNA, 75 bp, synthetic construct
  source 1..75: mol_type = other DNA
cgcgtttgccaacggcgcggaaggcgtcgggctgttccgtaccgaaatgctctatatggatcgcgacagcgcgcc

SEQ ID NO: 329553 - DNA, 75 bp, synthetic construct
  source 1..75: mol_type = other DNA
taccagcaggtgctattggcggcgggcgacaagccgattatcttccgcacgatggacatcggtggcgataaaagc

SEQ ID NO: 329554 - DNA, 75 bp, synthetic construct
  source 1..75: mol_type = other DNA
gcggcaacctgggcgttaacgggcgtactgagcatccattcgaactggaagaagatgtctggcagcgggaagaga

SEQ ID NO: 329555 - DNA, 75 bp, synthetic construct
  source 1..75: mol_type = other DNA
aagaggttttgcgtaacaatcctggcgtttcatgttggtggatggcggatgctggcgtggaagatcgcggcgtga

SEQ ID NO: 329556 - DNA, 75 bp, synthetic construct
  source 1..75: mol_type = other DNA
actgaaactcgatgctgcaacattctatctgtccagaaacggccagatgcagggagatattaacgccaccaacgg

SEQ ID NO: 329557 - DNA, 75 bp, synthetic construct
  source 1..75: mol_type = other DNA
tccgggaaaccatacactttactcccctcagtatgtggttaccgccaaacatgtcagcggctctgatacgatgag

SEQ ID NO: 329558 - DNA, 75 bp, synthetic construct
  source 1..75: mol_type = other DNA
tttctttgccggaagtgacaaaagaaagtatcccggagcgtttgagagaattaattggaaaaagaagtgtaaggg

SEQ ID NO: 329559 - DNA, 75 bp, synthetic construct
  source 1..75: mol_type = other DNA
attgccatataactaaaagcctgattgctgtctctgaactggcccgcagagtcacctgtaagagccatcgcagat

SEQ ID NO: 329560 - DNA, 75 bp, synthetic construct
  source 1..75: mol_type = other DNA
tcgaccttcagacattaaaagccagtgacattaatgtaccggttaatactatcaatatttttggggggaaaggat

SEQ ID NO: 329561 - DNA, 75 bp, synthetic construct
  source 1..75: mol_type = other DNA
gaccggggaatggccctgagcatgaaagacaaggattataacccactgattggccgtaccggtgttgacgtggga

SEQ ID NO: 329562 - DNA, 75 bp, synthetic construct
  source 1..75: mol_type = other DNA
atgcggaaaaaaatcaaacaggaagttgatgacagcggcctgacactgatgcagatcctgctgacgcatggtcat

SEQ ID NO: 329563 - DNA, 75 bp, synthetic construct
  source 1..75: mol_type = other DNA
cacggaccattatccacacttggttatgaacgcctgcataatcccttcctgcaagacgaaatgcccgtctggtaa

SEQ ID NO: 329564 - DNA, 75 bp, synthetic construct
  source 1..75: mol_type = other DNA
cgggccacgtggttttctttgataatcagtcaaaacttctgatttctggcgacgtacttttcaaaggtggagttg

SEQ ID NO: 329565 - DNA, 75 bp, synthetic construct
  source 1..75: mol_type = other DNA
cagtaaaaaaaacaacgacggaagctatgaatagctttcagagatcattatctgaaaataaatttattcgattaa

SEQ ID NO: 329566 - DNA, 75 bp, synthetic construct
  source 1..75: mol_type = other DNA
aaagataaattgctgccactgggggatgacgtgacatttattccgggtcacggaccattatccactcttggttat

SEQ ID NO: 329567 - DNA, 75 bp, synthetic construct
  source 1..75: mol_type = other DNA
gctgcactggttgatcctggcggcgatgcggaaaaaatcaaacaggaagttgatgccagcggcctgacgctaatg

SEQ ID NO: 329568 - DNA, 75 bp, synthetic construct
  source 1..75: mol_type = other DNA
ggtcattgaaaagccgaagccgaaacctaagccaaaaccgaagccggtgaaaaaggtacaggaacagccaaaacg

SEQ ID NO: 329569 - DNA, 75 bp, synthetic construct
  source 1..75: mol_type = other DNA
catctgattggtcgggcaacgaaaaccaaaatcgagctggatcaagattacatcgatgaacgtctgcctgtcgca

SEQ ID NO: 329570 - DNA, 75 bp, synthetic construct
  source 1..75: mol_type = other DNA
acataaaaacacatccgcttgccgcgcggaacgtgaaacaacaattattgagcaggatgccggggaaaactggat

SEQ ID NO: 329571 - DNA, 75 bp, synthetic construct
  source 1..75: mol_type = other DNA
tatgactggttcggaccgtgggaaaaaatcatcggaaagtttgaaatcaggaagaacgacaaaggaaaggaatat

SEQ ID NO: 329572 - DNA, 75 bp, synthetic construct
  source 1..75: mol_type = other DNA
ctcctgatttctggaaaacagtccggctgcagcttctgctggtcaccgcgtctgttgtggtgacgctggtccggt

SEQ ID NO: 329573 - DNA, 75 bp, synthetic construct
  source 1..75: mol_type = other DNA
gaatgggcgctggacgtcaccaaaggatcaaagggcgatttactggagctgtactgcggcaacggtaacttttcg

SEQ ID NO: 329574 - DNA, 75 bp, synthetic construct
  source 1..75: mol_type = other DNA
agcaggcagaagccctgcgcgatgcactgcgagcgcagaatctgaatgtgcatctgattggtcgggcaacgaaaa

SEQ ID NO: 329575 - DNA, 75 bp, synthetic construct
  source 1..75: mol_type = other DNA
cccatgcggcagtcagtgtcggactacttgagttttgccaagaaaatgggctatcgcatccgggattcctagttc

SEQ ID NO: 329576 - DNA, 75 bp, synthetic construct
  source 1..75: mol_type = other DNA
gcaccataatgaagcgagatatttaaaactaggacaatgggccgtcttatttttgaccctcaaggagatgttaga

SEQ ID NO: 329577 - DNA, 75 bp, synthetic construct
  source 1..75: mol_type = other DNA
atagttaaaattgaaacgttgttgagtgagctaaataatacagtatcggatcttcgtggtgaagagcaacatcta

SEQ ID NO: 329578 - DNA, 75 bp, synthetic construct
  source 1..75: mol_type = other DNA
tggcgcaggccagaacacgtaactcaacattatgggccgatgatcctcgtcagcagcttgcctatctggcactca

SEQ ID NO: 329579 - DNA, 75 bp, synthetic construct
  source 1..75: mol_type = other DNA
tgggttatgaagcacaactggttaacgctgtgatctctagctcaagtgcaattgtaggccgcttccattacaagt

SEQ ID NO: 329580 - DNA, 75 bp, synthetic construct
  source 1..75: mol_type = other DNA
cgctgtgatctctagctcaagtgcaattgtaggccgcttccattacaagtacgagggagactgggagaaatgctc

SEQ ID NO: 329581 - DNA, 75 bp, synthetic construct
  source 1..75: mol_type = other DNA
tgatcatcgtctgacttacgttcatctcggcattatttcggctatcttgttaaacagcagatctgttgatttcgt

SEQ ID NO: 329582 - DNA, 75 bp, synthetic construct
  source 1..75: mol_type = other DNA
ggacttcagtcgcatttctatacctactgggatatgaatcctcctgtcatcaacagtattgtttccaacccacta

SEQ ID NO: 329583 - DNA, 75 bp, synthetic construct
  source 1..75: mol_type = other DNA
taatggcgtccgtcgctctgttgatgcccagttgaattcgctgacggggggggggcaggcgctggccgcagtggc

SEQ ID NO: 329584 - DNA, 75 bp, synthetic construct
  source 1..75: mol_type = other DNA
ggcattactgtcaccaacagaacctaatgatgcgctcaaacgggcctttaaacgccgtaataatattctatacac

SEQ ID NO: 329585 - DNA, 75 bp, synthetic construct
  source 1..75: mol_type = other DNA
agcagccaaaacgcgatgtcaaacccgtagagtcgcgtccggcatcaccgtttgaaaatacggcacccgcacgcc

SEQ ID NO: 329586 - DNA, 75 bp, synthetic construct
  source 1..75: mol_type = other DNA
atttacctcgccgcttcccctggccgacgttactttcggtctgcattcatggtgctgttgtggcgggtctgctct

SEQ ID NO: 329587 - DNA, 75 bp, synthetic construct
  source 1..75: mol_type = other DNA
cccccccgacgtccgcgtcctgtctgacaggggccatatctgtaaatactgaagctgtattatctcccatgcaac

SEQ ID NO: 329588 - DNA, 75 bp, synthetic construct
  source 1..75: mol_type = other DNA
tgaaccaacaggtgctcccgcattggactgctggtatccactaatgaagcggaatgggtataatgagtggtatga

SEQ ID NO: 329589 - DNA, 75 bp, synthetic construct
  source 1..75: mol_type = other DNA
gggtacagaacagctgctttgatagcttttatattgcaataccaacacctgctgtaatgagcttattttcaggaa

SEQ ID NO: 329590 - DNA, 75 bp, synthetic construct
  source 1..75: mol_type = other DNA
atggttgattaccacgaacgccagcgccagattcaagaagaaattgatcgctgcctggctgaatacaaaacgaga

SEQ ID NO: 329591 - DNA, 75 bp, synthetic construct
  source 1..75: mol_type = other DNA
gactggaagcaaggatcagcacagaactacatgccatgctgaagcgcgctgcagaaatccaggggcgcactatga

SEQ ID NO: 329592 - DNA, 75 bp, synthetic construct
  source 1..75: mol_type = other DNA
ttagaggaaacggaccgattaatggggattggatacttttctgagaacgactatcgcagggttattagtagtatc

SEQ ID NO: 329593 - DNA, 75 bp, synthetic construct
  source 1..75: mol_type = other DNA
tatatattgatgatgtgtcgttttcaggagaaaaggccatcaaatcgataagtaattttgttttaaaatttaatt

SEQ ID NO: 329594 - DNA, 75 bp, synthetic construct
  source 1..75: mol_type = other DNA
ccgtctcgatgatagcgcggagaaaattattcatacccagggctacccgatgtgtcccgacgacgaagtgtgggt

SEQ ID NO: 329595 - DNA, 75 bp, synthetic construct
  source 1..75: mol_type = other DNA
tgacgcgcgggccgtacaccttccgcggttattacaaaagtccgcagcacaatgccagcgcctttgatgccaacg

SEQ ID NO: 329596 - DNA, 75 bp, synthetic construct
  source 1..75: mol_type = other DNA
atcgctgggcgtatttcttgcgggcggcaccgtcgttctggcggccgatcccagtgccacgctctgcttcccatt

SEQ ID NO: 329597 - DNA, 75 bp, synthetic construct
  source 1..75: mol_type = other DNA
ctgaattgtatattaccttttttgcgctgttaaaactgggcgttgcaccggtactggcgctgttcagtcatcagc

SEQ ID NO: 329598 - DNA, 75 bp, synthetic construct
  source 1..75: mol_type = other DNA
tttcgcgctgctgaaactgggcgttgcgccggtgctggcgctgttcagccatcagcgtagtgaactgaacgccta

SEQ ID NO: 329599 - DNA, 75 bp, synthetic construct
  source 1..75: mol_type = other DNA
catcgacggcgagcgtcagttgagttaccggaaactgaatcaggcggcggataatctcgcctgtagcttgcgtcg

SEQ ID NO: 329600 - DNA, 75 bp, synthetic construct
  source 1..75: mol_type = other DNA
ccagattgaaccggtgttactgattgccgatcgccaacatgcgctatttagcggggatgacttccttaatacgtt

SEQ ID NO: 329601 - DNA, 75 bp, synthetic construct
  source 1..75: mol_type = other DNA
gaaagcatcattcttgaagagcatttctttactgcttatgacggcattcgtgctgccaatatgggcgttggcgat

SEQ ID NO: 329602 - DNA, 75 bp, synthetic construct
  source 1..75: mol_type = other DNA
ttcctgacaccgccaaaaaccggaagatcgcaggtgaacttcgcacttccgtttgttttgcaatcagaatgggga

SEQ ID NO: 329603 - DNA, 75 bp, synthetic construct
  source 1..75: mol_type = other DNA
acaactacgccatgagttcgccaggatcgctgggcgtctttctcgctggcggcactgtcgttctggctgccgacc

SEQ ID NO: 329604 - DNA, 75 bp, synthetic construct
  source 1..75: mol_type = other DNA
ggtgatatcgactttgtcatgctggcgaaaaacccgaccatcgacgcctggtggaagctactctcccgcgaggtg

SEQ ID NO: 329605 - DNA, 75 bp, synthetic construct
  source 1..75: mol_type = other DNA
taaccatccggctgaggattttactgccacgccgtcacctgctgatgaagtggcctatttccagctttccggcgg

SEQ ID NO: 329606 - DNA, 75 bp, synthetic construct
  source 1..75: mol_type = other DNA
aacagcacaatattccggtttattacaccgcccagccgaaagagcagagcgatgaagatcgggcgctgttgaatg

SEQ ID NO: 329607 - DNA, 75 bp, synthetic construct
  source 1..75: mol_type = other DNA
gagccgattgcagagtgtcacatgctgctgccgcaggcatatctcggtaacgttattacgctgtgcgtagaaaaa

SEQ ID NO: 329608 - DNA, 75 bp, synthetic construct
  source 1..75: mol_type = other DNA
gccgaccgtagtgtatgaagttgaaaccacgtcaagagaagttatctacgtcgacagcccatccaagctgccagc

SEQ ID NO: 329609 - DNA, 75 bp, synthetic construct
  source 1..75: mol_type = other DNA
ccggtaagttccgacgactatgaagccttccgcgacgcgctgggcaaattgagtctgaacgatgcctctctgttc

SEQ ID NO: 329610 - DNA, 75 bp, synthetic construct
  source 1..75: mol_type = other DNA
cgaagccgatacgtgtctgtatcgctcgaagaaagatgggcgcaaccgtaccagcactatgcgttacggtgagga

SEQ ID NO: 329611 - DNA, 75 bp, synthetic construct
  source 1..75: mol_type = other DNA
tgatggtcgaagccgatacgtgtctgtatcgctcgaagaaagatgggcgcaaccgtaccagcactatgcgttacg

SEQ ID NO: 329612 - DNA, 75 bp, synthetic construct
  source 1..75: mol_type = other DNA
aagcagatcggtaacgtcgagctgccacaggaagcgttcctcgccattctgcacgtcggcaaagacaacaaataa

SEQ ID NO: 329613 - DNA, 75 bp, synthetic construct
  source 1..75: mol_type = other DNA
acaaagactccttacttttaggaaaatatattgagctggaacatattgctaatggcatgttaccaggcctatttc

SEQ ID NO: 329614 - DNA, 75 bp, synthetic construct
  source 1..75: mol_type = other DNA
atgagtgacaaagacattgaatctgaaattcaggctaaaggtttagccgcgccgcgcgttacgccagaccatatc

SEQ ID NO: 329615 - DNA, 75 bp, synthetic construct
  source 1..75: mol_type = other DNA
ccgcaaggggaagtcggacgcctgatgacgcgcgggccgtatacctttcggggttattacaaaagcccgcagcac

SEQ ID NO: 329616 - DNA, 75 bp, synthetic construct
  source 1..75: mol_type = other DNA
gtgctcgacttcttcgatcgcctgaaatctacctcgcgtggttatgcgtctctggattacaacttcaaacgcttc

SEQ ID NO: 329617 - DNA, 75 bp, synthetic construct
  source 1..75: mol_type = other DNA
atgaagaatatacgtaacttttcgatcatagctcacattgaccacggtaaatcgacgctgtctgaccgtattatc

SEQ ID NO: 329618 - DNA, 75 bp, synthetic construct
  source 1..75: mol_type = other DNA
cagatctgcggtggcctgtccgaccgtgaaatggaggcgcaggttctcgattccatggatcttgagcgtgagcgt

SEQ ID NO: 329619 - DNA, 75 bp, synthetic construct
  source 1..75: mol_type = other DNA
gaaggcatcgccatttttaatgcactgaaaacacatggtgcgtccattaccgtttatgtcgacggtgtggcggcg

SEQ ID NO: 329620 - DNA, 75 bp, synthetic construct
  source 1..75: mol_type = other DNA
tgcagtttgccggcgattacagggtgtccgccctgaacggccagacatggatggggggcgggattattaccgata

SEQ ID NO: 329621 - DNA, 75 bp, synthetic construct
  source 1..75: mol_type = other DNA
gattacagctcagaccggtgacatttttaatcccgcgaatggacctctggctaattatctgaatatgggggacag

SEQ ID NO: 329622 - DNA, 75 bp, synthetic construct
  source 1..75: mol_type = other DNA
tttgattccggtgcccatatcgacctgattggtaagtatgttcatcatgataatgagtacaccgcaacctttgcc

SEQ ID NO: 329623 - DNA, 75 bp, synthetic construct
  source 1..75: mol_type = other DNA
tataagacgatattatttctttagaaatgcaatatttttgctacaacaaaattatgttccactatatagcaaaat

SEQ ID NO: 329624 - DNA, 75 bp, synthetic construct
  source 1..75: mol_type = other DNA
gaccggggaatggctctgagcatgaaagacaaggattataacccactgattggccgtactggtgttgacgtggga

SEQ ID NO: 329625 - DNA, 75 bp, synthetic construct
  source 1..75: mol_type = other DNA
tcgaatattcatgcaggaaccactgcgacaaccattaatctgggagacagtgatgctgatgccggaaagacggac

SEQ ID NO: 329626 - DNA, 75 bp, synthetic construct
  source 1..75: mol_type = other DNA
gccggtaaccagagtgattaccgcggaaatgtgacgctggaaaacaaatcatccctgaaaatcatggagaaattc

SEQ ID NO: 329627 - DNA, 75 bp, synthetic construct
  source 1..75: mol_type = other DNA
agcactgaagagtagggggggacgagttgaactgggaggcgggaaagattttgccaccctgcaggtaaaagagct

SEQ ID NO: 329628 - DNA, 75 bp, synthetic construct
  source 1..75: mol_type = other DNA
ctgcagtggaaatatgatgtggctaatggcaccggcaccctgactcagggaaacacgagctgggatatgcatgga

SEQ ID NO: 329629 - DNA, 75 bp, synthetic construct
  source 1..75: mol_type = other DNA
acaatgggaagtttacaacccttacagtggacaaccttactatagatgacagtgcatttgtgctgcgtgcaaatc

SEQ ID NO: 329630 - DNA, 75 bp, synthetic construct
  source 1..75: mol_type = other DNA
aaagaccatataataacacaactcctttttataatgaaactaccggtggggacagtggttccggtttttatctct

SEQ ID NO: 329631 - DNA, 75 bp, synthetic construct
  source 1..75: mol_type = other DNA
tgctgtttttgaccgtgcaggcagctttgtcaacagtagcctgaccctcgaaaaaggagcaaaacttacggctca

SEQ ID NO: 329632 - DNA, 75 bp, synthetic construct
  source 1..75: mol_type = other DNA
aggcacagtgcgtggctgatcctgactgttcgctggaaatggcccgtgaacgtctgctgaatgaaatgggcaagg

SEQ ID NO: 329633 - DNA, 75 bp, synthetic construct
  source 1..75: mol_type = other DNA
tctttctaccgcagcaatggcagcgaaaggggacccgcacgtattgttgacaacctcagctggtaacatcgaact

SEQ ID NO: 329634 - DNA, 75 bp, synthetic construct
  source 1..75: mol_type = other DNA
cagttctttatcaacgttgccgacaatgccttcctcgaccacggtcagcgtgatttcggttacgccgtctttggt

SEQ ID NO: 329635 - DNA, 75 bp, synthetic construct
  source 1..75: mol_type = other DNA
tcgtagctgttttcgctctttctgctctctcacccgtagcaatggcagcgaaaggggacccgcacgtattgttaa

SEQ ID NO: 329636 - DNA, 75 bp, synthetic construct
  source 1..75: mol_type = other DNA
atatcacccacattaatctccacatcaactcaccgggtggcgatgtttttgaaggcatcgccatttttaatgccc

SEQ ID NO: 329637 - DNA, 75 bp, synthetic construct
  source 1..75: mol_type = other DNA
tggagggcttcagtgtggatggcgtgacaacgaaagtgcgtattgacgccggtgtcgcgccagttgatcaccgcg

SEQ ID NO: 329638 - DNA, 75 bp, synthetic construct
  source 1..75: mol_type = other DNA
cttctcagtaactcgccaggcgatcatcaacgacgatctgaaccagcttaccgacgtaccgatgaagatggggcg

SEQ ID NO: 329639 - DNA, 75 bp, synthetic construct
  source 1..75: mol_type = other DNA
tgctggtgatatgcgtgattatgctgatttgctggataaggtggaaaccgtgttagtccctgcttatgccagaaa

SEQ ID NO: 329640 - DNA, 75 bp, synthetic construct
  source 1..75: mol_type = other DNA
ggtgtggggcaatatctgctggaagaggtgttacgtaacaatcctggcgtttcatgctggtggatggcggatgcc

SEQ ID NO: 329641 - DNA, 75 bp, synthetic construct
  source 1..75: mol_type = other DNA
atcgccggtaccggcagtggctgatgaagcgaccattcgcgccggtgttctggcggagcagaaagtccgcatgtc

SEQ ID NO: 329642 - DNA, 75 bp, synthetic construct
  source 1..75: mol_type = other DNA
atgtgaacagcggtttttataacaacactacctttcaccgcgtcattcctggctttatgattcagggcggcggtt

SEQ ID NO: 329643 - DNA, 75 bp, synthetic construct
  source 1..75: mol_type = other DNA
ggctttatgattcagggcggtggatttaccgagcagatgcagcagaaaaaaccaaatccgccaatcaaaaatgaa

SEQ ID NO: 329644 - DNA, 75 bp, synthetic construct
  source 1..75: mol_type = other DNA
atttgaaaatgtcgagaaggataacgcctataacgggatgaccctgcgtgaatgggctcgcatgtcactgacgga

SEQ ID NO: 329645 - DNA, 75 bp, synthetic construct
  source 1..75: mol_type = other DNA
cgactggcttcagtggctgacctgtcgtgccgggcgttcgcgcacatggtgggcaccttccgtgggagagcaggt

SEQ ID NO: 329646 - DNA, 75 bp, synthetic construct
  source 1..75: mol_type = other DNA
gcctggcatctgacattgaaatcatgatgcgtgaacgcttcagtgtgctgaaccatattatctgggcgaagccgt

SEQ ID NO: 329647 - DNA, 75 bp, synthetic construct
  source 1..75: mol_type = other DNA
aaaagatgatggctatgaggcgaagggcagggcactgaaacagcatgtgatggctccgctgatttcttactttcg

SEQ ID NO: 329648 - DNA, 75 bp, synthetic construct
  source 1..75: mol_type = other DNA
aggggcatcaaatccatggtcattgaggctgccgacaacatcaccctgaaaaccagtgagtttgtgctggaggct

SEQ ID NO: 329649 - DNA, 75 bp, synthetic construct
  source 1..75: mol_type = other DNA
catcggaaggtgagcaggtagtgctgctgagtctgggcggcaatctggagactgcctttgcgctgcccgctgtct

SEQ ID NO: 329650 - DNA, 75 bp, synthetic construct
  source 1..75: mol_type = other DNA
gtatgtcaggggcatcaaatctatggtcattgaggctgccgacaatatcaccctgaaaaccagtgagtttgtact

SEQ ID NO: 329651 - DNA, 75 bp, synthetic construct
  source 1..75: mol_type = other DNA
aaaagcagctatggcgctcgggcgtcgtgcaactggtgttgaactggaggcagaacgttttgcgcagaccgttaa

SEQ ID NO: 329652 - DNA, 75 bp, synthetic construct
  source 1..75: mol_type = other DNA
cgtgcaattggcgttgagctggagacagaacgttttgaacagacagtcagggaagtacaggatttaatcagccag

SEQ ID NO: 329653 - DNA, 75 bp, synthetic construct
  source 1..75: mol_type = other DNA
ctggttcagtgccagtcagtggcagctgccgaacgaaagcgattatctgaaattacaggcgctgtttgcccgggt

SEQ ID NO: 329654 - DNA, 75 bp, synthetic construct
  source 1..75: mol_type = other DNA
gctgcgagttaatcaacgctgatttcctggaatttatccagaccttaccggaaaactctgtcgatctgatagtca

SEQ ID NO: 329655 - DNA, 75 bp, synthetic construct
  source 1..75: mol_type = other DNA
cgacagtgaaagcagcgatggcgctgggacgtcgtgcaactggcgttgaactggagactgaacgttttgagcaga

SEQ ID NO: 329656 - DNA, 75 bp, synthetic construct
  source 1..75: mol_type = other DNA
agggcgattggtgttgagctggagaccggacgttttgagcagacagtcagggaagttcaggatttaatcagtcag

SEQ ID NO: 329657 - DNA, 75 bp, synthetic construct
  source 1..75: mol_type = other DNA
accgcctttgcgttgcccgccatctattcgaatcagtttgcaccgccgtcgacgtcggcggatgcctgcgtgaca

SEQ ID NO: 329658 - DNA, 75 bp, synthetic construct
  source 1..75: mol_type = other DNA
ggccgctgacaatatcaccctgaaaaccagtgagtttgtactggaggctgaccgcacgcggattaacagcgaagt

SEQ ID NO: 329659 - DNA, 75 bp, synthetic construct
  source 1..75: mol_type = other DNA
gcccgctgacaatatcaccctgaaaaccagtgagtttgtactggaggctgaccgcacgcgcattaacagcgaagt

SEQ ID NO: 329660 - DNA, 75 bp, synthetic construct
  source 1..75: mol_type = other DNA
gtccgctgacaatatcaccctgaaaaccagtgagtttgtactggaggctgaccgcacgcgtattaacagcgaagt

SEQ ID NO: 329661 - DNA, 75 bp, synthetic construct
  source 1..75: mol_type = other DNA
ggcacgctctgttccgccgggatctgaatacctatcacgaatgccgcatcaacgatgaatggggcggcgtggaaa

SEQ ID NO: 329662 - DNA, 75 bp, synthetic construct
  source 1..75: mol_type = other DNA
cagccacacggatttttcttcctggctgtgagcgaaaccatcgactgcggtcgatacccggtccgcgtgttcgaa

SEQ ID NO: 329663 - DNA, 75 bp, synthetic construct
  source 1..75: mol_type = other DNA
ggccgctgacaatatcaccgtgaaaaccagtgagtttgtactggaggctgaccgcacgcgcattaacagcgaagt

SEQ ID NO: 329664 - DNA, 75 bp, synthetic construct
  source 1..75: mol_type = other DNA
ggggcatcaaatcaatggtcattgagaccgctgacaaaatcaccctgaaaaccagtgagtttgtgctggaggctg

SEQ ID NO: 329665 - DNA, 75 bp, synthetic construct
  source 1..75: mol_type = other DNA
caccggcaccgtgaccgaagtggatcgggaaaactggctttgccgggtgaaaacaggcgacctcgaaaccaactg

SEQ ID NO: 329666 - DNA, 75 bp, synthetic construct
  source 1..75: mol_type = other DNA
gtatgtcaggggcatcaaatccatggttattgaggctgccgacaatatcaccctgaaaaccagtgagtttgtgct

SEQ ID NO: 329667 - DNA, 75 bp, synthetic construct
  source 1..75: mol_type = other DNA
gaccgctgacaatatcaccctgaaaaccagtgagtttgtactggaggctgaccgcacgcgaattaacagcgaagt

SEQ ID NO: 329668 - DNA, 75 bp, synthetic construct
  source 1..75: mol_type = other DNA
gaccgctgacaatatcaccatgaaaaccagtgagtttgtactggaggctgaccgcacgcgcattaacagcgaagt

SEQ ID NO: 329669 - DNA, 75 bp, synthetic construct
  source 1..75: mol_type = other DNA
ggggcatcaaatcaatggtcattgagaccgctgacaaaatcaccgtgaaaaccagtgagtttgtcctggaggctg

SEQ ID NO: 329670 - DNA, 75 bp, synthetic construct
  source 1..75: mol_type = other DNA
tcaacggtaaaagcggcgatggcactggggcgtcgtgcgattggtgttgagctggagaccggacgttttgagcag

SEQ ID NO: 329671 - DNA, 75 bp, synthetic construct
  source 1..75: mol_type = other DNA
gaactggagaagccccaccaccagctgctggagacgtatacttcactgaaccggcagtatgcggaactgcagagt

SEQ ID NO: 329672 - DNA, 75 bp, synthetic construct
  source 1..75: mol_type = other DNA
aacattaccaggggccataccagcccaaaaatgacggttatgcagcaaaggggcgcgagcttaagcaacacgtca

SEQ ID NO: 329673 - DNA, 75 bp, synthetic construct
  source 1..75: mol_type = other DNA
gaactggaaaagccacaccaccagctggtcagcacatacagtgaactgaaccggcagtatacggaactgctgaga

SEQ ID NO: 329674 - DNA, 75 bp, synthetic construct
  source 1..75: mol_type = other DNA
ccgggagacctggttgcagatttttttatgggctcaggttcaacggtaaaagctgcactggcgctcgggcgtcgt

SEQ ID NO: 329675 - DNA, 75 bp, synthetic construct
  source 1..75: mol_type = other DNA
ggtgcaggtgccgtacaccgatgtgtggacgtataaaccggtgcagtactatccagggaaacatccgtgcgaaaa

SEQ ID NO: 329676 - DNA, 75 bp, synthetic construct
  source 1..75: mol_type = other DNA
gatgcgtgaacgtttcaacgtgcttaaccatatcatctgggcgaagccgtccggacgttggaacgggtgcaacaa

SEQ ID NO: 329677 - DNA, 75 bp, synthetic construct
  source 1..75: mol_type = other DNA
taccgatgtctggacgcataagcccgttcagttctacccgggtaaacatccgtgcgagaaaccggcggatatgct

SEQ ID NO: 329678 - DNA, 75 bp, synthetic construct
  source 1..75: mol_type = other DNA
caaaggagaactacagaagatacaacagagattaagttctcttttgcataaaaataagtttcattgctttcatgt

SEQ ID NO: 329679 - DNA, 75 bp, synthetic construct
  source 1..75: mol_type = other DNA
tgatgcgcgcgcggccctggggataacggcaaaacagattgcagatgccacaggaaagaaaaacatggtgtcgca

SEQ ID NO: 329680 - DNA, 75 bp, synthetic construct
  source 1..75: mol_type = other DNA
tttcccagatgaatacctcgttctgggcccagggtaaaacgcgggctgtttatgtgctggagctgggcgatgtgt

SEQ ID NO: 329681 - DNA, 75 bp, synthetic construct
  source 1..75: mol_type = other DNA
ctatgaattaccagaatcatcacaatggtgttatcagttaataaaaaacatgatttctttacattgcagatataa

SEQ ID NO: 329682 - DNA, 75 bp, synthetic construct
  source 1..75: mol_type = other DNA
atggttgatactgtaaaaatatccagttgtgagttaatcaacgctgattgcctggagtttatccaggccttaccg

SEQ ID NO: 329683 - DNA, 75 bp, synthetic construct
  source 1..75: mol_type = other DNA
aaccatatcatctgggcgaagccgtccggacgctggaacgggtgcagtaaggaaagcctgcgggcgtattttccc

SEQ ID NO: 329684 - DNA, 75 bp, synthetic construct
  source 1..75: mol_type = other DNA
gcaacagagcgcattctgtttgccgaacattatcaggggccatatcagccaaaaaatgacggctatgcggcaaag

SEQ ID NO: 329685 - DNA, 75 bp, synthetic construct
  source 1..75: mol_type = other DNA
cgtccgggtgacctggttgcagatttttttatgggctcaggttcaacggtaaaagcagcactggcgctcgggcgt

SEQ ID NO: 329686 - DNA, 75 bp, synthetic construct
  source 1..75: mol_type = other DNA
acgtcactgaaccggcagtatgtggagctgcagagtgaatataagcatctgcggcggtattttggtgtgacggcg

SEQ ID NO: 329687 - DNA, 75 bp, synthetic construct
  source 1..75: mol_type = other DNA
gtggatgattacctgaaatggctggaccagtgtctggcacaattctggcgtgtattaaagcccaccggaagtctt

SEQ ID NO: 329688 - DNA, 75 bp, synthetic construct
  source 1..75: mol_type = other DNA
tttttatggggtcggggtcaacagtaaaagcagcactggcgctggggcgcagggtattaggtgttgagcttgagt

SEQ ID NO: 329689 - DNA, 75 bp, synthetic construct
  source 1..75: mol_type = other DNA
aacatccgtgcgaaaaaccggcagaaatgctgcagcagataatcagcgcgagcagtcgtccgggtgacctggttg

SEQ ID NO: 329690 - DNA, 75 bp, synthetic construct
  source 1..75: mol_type = other DNA
aacattatcagggaccgtatcgcccgaaagatgatggctatgtggcacaggggcgcaggctaaaacagcacgtca

SEQ ID NO: 329691 - DNA, 75 bp, synthetic construct
  source 1..75: mol_type = other DNA
ctggttcagtgccagtcagtggcagctaccggacgaaagcgattatctgaaattacaggcgctgtttgcccgggt

SEQ ID NO: 329692 - DNA, 75 bp, synthetic construct
  source 1..75: mol_type = other DNA
tcgcggaacattatcaggggccgtatcgtccgaaagatgccgggtatgcggcgaagggcagtgcactgaaacagc

SEQ ID NO: 329693 - DNA, 75 bp, synthetic construct
  source 1..75: mol_type = other DNA
gaaagatgccgggtatgaggcgaagggcagggcactgaaacagcatgtgatggctccgctgattgcttactttcg

SEQ ID NO: 329694 - DNA, 75 bp, synthetic construct
  source 1..75: mol_type = other DNA
aacattaccaggggccatatcgcccgaaagatgccgggtatgaggcgaagggcagggcactgaaacagcatgtga

SEQ ID NO: 329695 - DNA, 75 bp, synthetic construct
  source 1..75: mol_type = other DNA
ggcgctcgggcgtcgtgcaattggcgttgagctggagactgaacgttttgagcagacggttcgggaagtacagga

SEQ ID NO: 329696 - DNA, 75 bp, synthetic construct
  source 1..75: mol_type = other DNA
gagaacgcccgggctgtgctggctgcgggatcaggtaaggccgaaccggtctctgcatccacaaccgccctgttt

SEQ ID NO: 329697 - DNA, 75 bp, synthetic construct
  source 1..75: mol_type = other DNA
ctggcggatgaattagtcaatgcgtcggatgccatcagtgtgatggccacggcgctgaacagtaatgtcagagga

SEQ ID NO: 329698 - DNA, 75 bp, synthetic construct
  source 1..75: mol_type = other DNA
gaaaaagcccgcccgatccttgcggctgcaccactggcggatgccggaccctcactccgtgatcagattatggct

SEQ ID NO: 329699 - DNA, 75 bp, synthetic construct
  source 1..75: mol_type = other DNA
tggatgaggcaaaaggggctgaggcgcaggctgaacaactggctgcctgcccgggaatgactgtggagagcgccc

SEQ ID NO: 329700 - DNA, 75 bp, synthetic construct
  source 1..75: mol_type = other DNA
cccgatcctggcggctgcaccactggcggatgccgggccctcgcttcgtgatcagatcatggccctggatgaggc

SEQ ID NO: 329701 - DNA, 75 bp, synthetic construct
  source 1..75: mol_type = other DNA
gggaatgaccgtggagaacgcccgggctgtgctggctgcgggatcaggtaaggcagaaccggtctctgcatccac

SEQ ID NO: 329702 - DNA, 75 bp, synthetic construct
  source 1..75: mol_type = other DNA
atcagccgtaaagatatgctgttgctggcgctgatgtcttcagaaaaccgcgcggcggcaagccttgcgcaccat

SEQ ID NO: 329703 - DNA, 75 bp, synthetic construct
  source 1..75: mol_type = other DNA
agacagaggccgccgtttttgacggtcagtccggtattgaggccgggctggcggatgaattaattaatgcgtcgg

SEQ ID NO: 329704 - DNA, 75 bp, synthetic construct
  source 1..75: mol_type = other DNA
atcacgcagacggcaaaaacggggtcgattggtgtgatgatggcgcataccagttacgagaaacaactggcacag

SEQ ID NO: 329705 - DNA, 75 bp, synthetic construct
  source 1..75: mol_type = other DNA
aacattcttcagagcattaagcccttacgactacacactgtattgcaggaagtgggtaaaaccaaatctgacttg

SEQ ID NO: 329706 - DNA, 75 bp, synthetic construct
  source 1..75: mol_type = other DNA
ccgtggtgaccaatatcattccgtatattctgtcaatggcggcattagtcattattcagaaggtcgctaatgtgc

SEQ ID NO: 329707 - DNA, 75 bp, synthetic construct
  source 1..75: mol_type = other DNA
aaaaacgctgggcgaactggtgcgcgaccggatggcggcgtttccggcaagcggtgagatcaacagcaaactggc

SEQ ID NO: 329708 - DNA, 75 bp, synthetic construct
  source 1..75: mol_type = other DNA
ctgttcaggacgtgctggacaccgaagcggcagtattctccggccaggagtctttggataacggactggcggatg

SEQ ID NO: 329709 - DNA, 75 bp, synthetic construct
  source 1..75: mol_type = other DNA
atccacaaccgccctgtttgaacgcatcatggcgaaccattcaccggcagcggtacagggtggcgtgccacagac

SEQ ID NO: 329710 - DNA, 75 bp, synthetic construct
  source 1..75: mol_type = other DNA
cccgcgggttaatggacgccggtaccgatgtgctggacatcggactgagcggcacggaagagatttacttcgcca

SEQ ID NO: 329711 - DNA, 75 bp, synthetic construct
  source 1..75: mol_type = other DNA
caccttccaccttggggtagatggtggcatcgaggtgacagcgagccacaatcctatgaactacaacggcatgaa

SEQ ID NO: 329712 - DNA, 75 bp, synthetic construct
  source 1..75: mol_type = other DNA
atcagcggggataccggactgcgcgatgtccagcgcctggcagaagccaacgacttccctcccgttgatgaaacc

SEQ ID NO: 329713 - DNA, 75 bp, synthetic construct
  source 1..75: mol_type = other DNA
caatcagtttgaagcgttgccgtcagaggttcgccaggacatgcagcagcggattgatgcggcgcgccggatgtt

SEQ ID NO: 329714 - DNA, 75 bp, synthetic construct
  source 1..75: mol_type = other DNA
aaaagtggacgcacctgttcaggggatgttgaccatcgtaattatccagactggtttggcgctgatgacgattag

SEQ ID NO: 329715 - DNA, 75 bp, synthetic construct
  source 1..75: mol_type = other DNA
aaatcttctgccgatgaagggtacttcccgaaaattttctctcgtgtaaccaaagtagatgcaccggttcaggga

SEQ ID NO: 329716 - DNA, 75 bp, synthetic construct
  source 1..75: mol_type = other DNA
aatacgatgacaccaaaaaatctcaccgttgctgaagcggtgtcccaggaaaatcagcgcgtgatggggatcctg

SEQ ID NO: 329717 - DNA, 75 bp, synthetic construct
  source 1..75: mol_type = other DNA
ccggtcatctggcgcaggccggagtggatatcacgctgatttatgccggggcgcataaggtggatggcaatcagt

SEQ ID NO: 329718 - DNA, 75 bp, synthetic construct
  source 1..75: mol_type = other DNA
gggaacagaggccgccgtttttgaaggtcagtccggcattgaggccgggctggcggatgaattagtcaatgcgtc

SEQ ID NO: 329719 - DNA, 75 bp, synthetic construct
  source 1..75: mol_type = other DNA
tttctttatttagcctggccctgatgctggctgtgccttttgcaccgcaggccgttgcgaaaacggcagccgcta

SEQ ID NO: 329720 - DNA, 75 bp, synthetic construct
  source 1..75: mol_type = other DNA
gctatattcgtcgcggtgaagtatctgcgggtgagcaggatacggtggcctttgaagtggcgcagtttgtcgaaa

SEQ ID NO: 329721 - DNA, 75 bp, synthetic construct
  source 1..75: mol_type = other DNA
gcggcgctggcggcaaaacgtcatagcccggagagcgacccgttaatgctggtgctggcggcggatcatgtgatt

SEQ ID NO: 329722 - DNA, 75 bp, synthetic construct
  source 1..75: mol_type = other DNA
taacgcggtgcaggatgtgaaaaaagtggtcgagcagatcaaagccgacggtcgccatgagcatcgggtgcatcg

SEQ ID NO: 329723 - DNA, 75 bp, synthetic construct
  source 1..75: mol_type = other DNA
actaccgttgtcatggccgtccagtagagcgggtcaacctcttaactcacagggtgacaacggtattgagcccag

SEQ ID NO: 329724 - DNA, 75 bp, synthetic construct
  source 1..75: mol_type = other DNA
gcgacccgttaatgctggtgctggcggcggatcatgtgattgccgatgaagacgcttttcgcaccgccgtgcgta

SEQ ID NO: 329725 - DNA, 75 bp, synthetic construct
  source 1..75: mol_type = other DNA
ggcggatcatgtgattgccgacgaagacgcgttccgtgccgccgtgcgtaatgccatgccgtatgccgaagcggg

SEQ ID NO: 329726 - DNA, 75 bp, synthetic construct
  source 1..75: mol_type = other DNA
tggtggtgttacccagggcggcggtgcaatgagttctaacggaattgtggttgatgcacatcagcatactggcgt

SEQ ID NO: 329727 - DNA, 75 bp, synthetic construct
  source 1..75: mol_type = other DNA
gctgagtctgggaggtaatctggaaacagcctttgcgctgcccgccatctattcgaatcagttcgcaccaccgtc

SEQ ID NO: 329728 - DNA, 75 bp, synthetic construct
  source 1..75: mol_type = other DNA
ggcaaatcgcgcacctggtggaaaccgtctgtgggcgagcaggttgtgctgttcagcctgggtggcaatctggaa

SEQ ID NO: 329729 - DNA, 75 bp, synthetic construct
  source 1..75: mol_type = other DNA
tgccgttgtggtgccgatggatgcgggctggagcgatgtcggttcctggtcttcattatgggagatcagcgccca

SEQ ID NO: 329730 - DNA, 75 bp, synthetic construct
  source 1..75: mol_type = other DNA
ttcaaacgacattgtggttgataaacacggtcatgatggtgtgaaagctggcagtgataaatcaggggggccggt

SEQ ID NO: 329731 - DNA, 75 bp, synthetic construct
  source 1..75: mol_type = other DNA
cgctgcgtgccggtaatgcccgcacatggtggcgaccatcggaaggtgagcaggtggtgctgctgagtctgggcg

SEQ ID NO: 329732 - DNA, 75 bp, synthetic construct
  source 1..75: mol_type = other DNA
tgctcatctgattcgtaagattagatttgttcaaagcgttgctttgacgtcttggaaaggttattttatgtatcg

SEQ ID NO: 329733 - DNA, 75 bp, synthetic construct
  source 1..75: mol_type = other DNA
acgagtacatggccggaggtaaacgaccggcccgtgtttacagggtggtgaacggtattgctgtactgccggtga

SEQ ID NO: 329734 - DNA, 75 bp, synthetic construct
  source 1..75: mol_type = other DNA
agcgaaaggtcgtgaacaactggcggcaacgctggcggcgatgccggagatgacggtggaaaaagcccgcccgat

SEQ ID NO: 329735 - DNA, 75 bp, synthetic construct
  source 1..75: mol_type = other DNA
tcgtgatcagatcatggccctggatgaggcaaaaggggcagaagcgcaggctgaaaaactggcggcctgcccggg

SEQ ID NO: 329736 - DNA, 75 bp, synthetic construct
  source 1..75: mol_type = other DNA
ctgtgccggcagcagcgttgaaaaaaaaaaaaaaaaacccccccaaaggggcggcggcggggcagacggcacaga

SEQ ID NO: 329737 - DNA, 75 bp, synthetic construct
  source 1..75: mol_type = other DNA
ttaccaatgcggcgggccattgtctggtgatgcgtacggttatcaataataaaccggtggcgctggtagtgatgg

SEQ ID NO: 329738 - DNA, 75 bp, synthetic construct
  source 1..75: mol_type = other DNA
cgtgatttaacaaaactgttgattgcgaccaaacagtatccgctgatcgggcagttaagtactacccgggaagat

SEQ ID NO: 329739 - DNA, 75 bp, synthetic construct
  source 1..75: mol_type = other DNA
tttaaggagtgtcgccagagtgccgcgatgaaacgcgtattgagggtatataaaagaacatcaatgggtacacaa

SEQ ID NO: 329740 - DNA, 75 bp, synthetic construct
  source 1..75: mol_type = other DNA
tagaatttggcttgcggatgatgacattgttttggataaggagtgtcttaataacgcaatggagtatgatgatgg

SEQ ID NO: 329741 - DNA, 75 bp, synthetic construct
  source 1..75: mol_type = other DNA
ttaatacatcgacgtgtatttgagcagattggttttcccaaccccgatttttttattttttatgatgatctagat

SEQ ID NO: 329742 - DNA, 75 bp, synthetic construct
  source 1..75: mol_type = other DNA
ggttcgctaccagggaagaacgggaaggaaaggtgagtacgaatctgattttcaaggagtgtcgccagagtgccg

SEQ ID NO: 329743 - DNA, 75 bp, synthetic construct
  source 1..75: mol_type = other DNA
taatggtcgcgtgtcgctgatcgatttctttgccgccccctgttttattggcgagattgagttaatcgataaaga

SEQ ID NO: 329744 - DNA, 75 bp, synthetic construct
  source 1..75: mol_type = other DNA
gtgaaagaaatccacaataatgatcttaagcagcaattgatgagtgagtccgcgtataaggattgcttttcaacg

SEQ ID NO: 329745 - DNA, 75 bp, synthetic construct
  source 1..75: mol_type = other DNA
tttagtccagctcggcgataactgcgccgggttccagctcacctatcatgagccaagaaggccaacaactttaaa

SEQ ID NO: 329746 - DNA, 75 bp, synthetic construct
  source 1..75: mol_type = other DNA
atgtaccaaccgttggatatccctgaagctccatcagtaaacgaagctgcttcgcctccacaaacaccgcttgaa

SEQ ID NO: 329747 - DNA, 75 bp, synthetic construct
  source 1..75: mol_type = other DNA
tcgataacatgcagcgtattctgaatacccgggccggaagccttaaacatcttccggattatgggctgccggata

SEQ ID NO: 329748 - DNA, 75 bp, synthetic construct
  source 1..75: mol_type = other DNA
ctggtaaaacagatctgttcggagtgcccgcaggcaggaatagcgctctaccagtttgtcgatatggttgttcag

SEQ ID NO: 329749 - DNA, 75 bp, synthetic construct
  source 1..75: mol_type = other DNA
tgcatcaggccaagccgttttacttcggagacaacgacacgggctggacggctgattttgattacctgctgagag

SEQ ID NO: 329750 - DNA, 75 bp, synthetic construct
  source 1..75: mol_type = other DNA
tgggcgttgttcagttaaccatactgacgatggtcaacatgatgggctctggcatcatcatgctgccgactaaac

SEQ ID NO: 329751 - DNA, 75 bp, synthetic construct
  source 1..75: mol_type = other DNA
ctcctgcactggtctcgccaactggtgcgtataatatacttcctccagctatagtctgtcagactgatgttatag

SEQ ID NO: 329752 - DNA, 75 bp, synthetic construct
  source 1..75: mol_type = other DNA
acccgggtgggggatacataaaggcgaagtggttattctggctacaaccggtatcagatataatgctatctggga

SEQ ID NO: 329753 - DNA, 75 bp, synthetic construct
  source 1..75: mol_type = other DNA
ggcgctaagtatctcgaaattacggcaacaaaatatgattcaccgcaaatgtatgttgctataggattattatga

SEQ ID NO: 329754 - DNA, 75 bp, synthetic construct
  source 1..75: mol_type = other DNA
ctttcacctgcccacttgcacctccagccattgcagttgtccagtgccagcaagacctgatgctcagcaaaactt

SEQ ID NO: 329755 - DNA, 75 bp, synthetic construct
  source 1..75: mol_type = other DNA
cgtctgatcactggtatgactacgatctggctggagcgtataccaccgggctattagatatcctcacacccgatt

SEQ ID NO: 329756 - DNA, 75 bp, synthetic construct
  source 1..75: mol_type = other DNA
gctgtggcttaatcaggggcagtttcataatcattatcacgaagaatatctgtggcacagcctttttcttacgcc

SEQ ID NO: 329757 - DNA, 75 bp, synthetic construct
  source 1..75: mol_type = other DNA
cgatccggaatcgtcagcgaccaaacagccctgagagcgctgcaggaatacatcaccacgcagtgcctgaagtaa

SEQ ID NO: 329758 - DNA, 75 bp, synthetic construct
  source 1..75: mol_type = other DNA
cgtcgaactctctgcagttgctggacgaaacgttctcggtatccggtccggaatcatcagcgaccaaacagccat

SEQ ID NO: 329759 - DNA, 75 bp, synthetic construct
  source 1..75: mol_type = other DNA
aaatgccctgtgccatcctcagccgaaacctccagcgcctccggcatgggcaatgatgccaccgtcgaactctct

SEQ ID NO: 329760 - DNA, 75 bp, synthetic construct
  source 1..75: mol_type = other DNA
acggcagaatcctacgatgataactacctggatgatgaagacgcggactggacctcgaccgggcagggacagaaa

SEQ ID NO: 329761 - DNA, 75 bp, synthetic construct
  source 1..75: mol_type = other DNA
cgcctggacacgctgcttgatgaaaatggctggcaagtggaacaacagtcatgggcggcattgtgccgattttgc

SEQ ID NO: 329762 - DNA, 75 bp, synthetic construct
  source 1..75: mol_type = other DNA
gtgagcagagtcgccgcgattatttatgctctggttatctgcatcatcgtctgtctgttatgggtggttaatcat

SEQ ID NO: 329763 - DNA, 75 bp, synthetic construct
  source 1..75: mol_type = other DNA
ggcactccggtggtcgttggaggaggcgacgtgcagcttggttgccttgggttaggcgttgtgcgtccggcacaa

SEQ ID NO: 329764 - DNA, 75 bp, synthetic construct
  source 1..75: mol_type = other DNA
gaaaccggagaacgcctggttcgctgggaacggacgcacacaccagacccggaaaagcatgaactcattggtgct

SEQ ID NO: 329765 - DNA, 75 bp, synthetic construct
  source 1..75: mol_type = other DNA
gaacgtgcgcgttaatcctcatgttattcctggcatggtacaagctgaatctataagcttttttaccggactcac

SEQ ID NO: 329766 - DNA, 75 bp, synthetic construct
  source 1..75: mol_type = other DNA
cgttctcggtatccgggacggaatcatcagagaccagacagcactgagaacgcttcaggaatacatcaagacgca

SEQ ID NO: 329767 - DNA, 75 bp, synthetic construct
  source 1..75: mol_type = other DNA
aaagctgaaaatgatgctcttcggcgcaagcttgataatggtggtagggtgctcgtcaaaggaaaatgccctgtg

SEQ ID NO: 329768 - DNA, 75 bp, synthetic construct
  source 1..75: mol_type = other DNA
atgcggatggcgcgtcgaagctggggcttacgtctacacgctggctaaagggaaggggaatgacgagaaaaactg

SEQ ID NO: 329769 - DNA, 75 bp, synthetic construct
  source 1..75: mol_type = other DNA
gcatggtttgcgaatcacaaacagggaaaagctgtcatattctgtagtgaagaagctgaatctgctcatcttttc

SEQ ID NO: 329770 - DNA, 75 bp, synthetic construct
  source 1..75: mol_type = other DNA
cgattatcggccagaccagctcactggctccggcggataaacgtttctacgcgacccgcgatattaccgcaaccg

SEQ ID NO: 329771 - DNA, 75 bp, synthetic construct
  source 1..75: mol_type = other DNA
ctacgcgacccgcgatattaccgcaaccgtggactccatcccgctgatcactgcctcgatcctggcgaagaaact

SEQ ID NO: 329772 - DNA, 75 bp, synthetic construct
  source 1..75: mol_type = other DNA
tccacgcgaaagacgaaaacagctggcaggaagcggcgaaagcggtgaaagcggcaattaaacttgccgataaag

SEQ ID NO: 329773 - DNA, 75 bp, synthetic construct
  source 1..75: mol_type = other DNA
gcgcgctggatgcagcggtgggcgactggatgctaaaaggcgcgccgcttgagatcgatcctgcacgatatatca

SEQ ID NO: 329774 - DNA, 75 bp, synthetic construct
  source 1..75: mol_type = other DNA
gtcgccgtgatgccgatgagggacgctttccacctccgcgtcttggcgatattgctgctccggcagggcttcgaa

SEQ ID NO: 329775 - DNA, 75 bp, synthetic construct
  source 1..75: mol_type = other DNA
aagataccaggaacatgttactgaccctgaatgtctgcgggagctccacgaagccccaatacaggcgctaaatat

SEQ ID NO: 329776 - DNA, 75 bp, synthetic construct
  source 1..75: mol_type = other DNA
taggttttatcgcctgggctgcaacgtttgtcttattttcctcggtcttttactacacgactcgttttatttatg

SEQ ID NO: 329777 - DNA, 75 bp, synthetic construct
  source 1..75: mol_type = other DNA
ggacgataaacatctcggccttctggtagaaaatcacacgctggcttatttacatgcggatctctggtatcaggg

SEQ ID NO: 329778 - DNA, 75 bp, synthetic construct
  source 1..75: mol_type = other DNA
agagatcgcgcataaagccgagctttttcgccaacaaacgggaattgcaccgtttattgtggttttacccgacat

SEQ ID NO: 329779 - DNA, 75 bp, synthetic construct
  source 1..75: mol_type = other DNA
ggagtggcaaatggcgcaggcgtacgcaccaccgcgctgctgaccgacatgaaccaggtgctggcatccagcgct

SEQ ID NO: 329780 - DNA, 75 bp, synthetic construct
  source 1..75: mol_type = other DNA
agcggcacaaaaaggcccaaccgacttcgttgagaactacgcgaagtatctgccgacagcgatgctgacgaaagc

SEQ ID NO: 329781 - DNA, 75 bp, synthetic construct
  source 1..75: mol_type = other DNA
cctaccgacatcttacaataaacgagcgagaaaagataatgattttactcgcacagggcaaaaaacaagcagaaa

SEQ ID NO: 329782 - DNA, 75 bp, synthetic construct
  source 1..75: mol_type = other DNA
gcgctcggtgcaattaacggatgccgcgatggcgctggcgcggtttggctactacagagaaaactccttaactaa

SEQ ID NO: 329783 - DNA, 75 bp, synthetic construct
  source 1..75: mol_type = other DNA
tcggcaaccttagcgcctggggcaatgatgttcccgctgaactgaaactgggcattgaccgtatcgccgccatcc

SEQ ID NO: 329784 - DNA, 75 bp, synthetic construct
  source 1..75: mol_type = other DNA
gcgtttatgaactccatcagcaaatggaaaaagtgggacgagatgctcgcctcgccgtggttcaccgtctacccg

SEQ ID NO: 329785 - DNA, 75 bp, synthetic construct
  source 1..75: mol_type = other DNA
gtgcgtaatcatccgttagggatttatgaaaaagcgctggcgaaagatctctcctggccggagcggctggtgctg

SEQ ID NO: 329786 - DNA, 75 bp, synthetic construct
  source 1..75: mol_type = other DNA
aagatatttcattatgttcatatgaaggactgcatgttttaaaaatcgaaataaaaagtgtcggagaagtctgtc

SEQ ID NO: 329787 - DNA, 75 bp, synthetic construct
  source 1..75: mol_type = other DNA
aaacgacattctgtcttatcagagctatgtcgtgctgcctgatggaaagggtgttcccggaatcctgtaccccgc

SEQ ID NO: 329788 - DNA, 75 bp, synthetic construct
  source 1..75: mol_type = other DNA
gtcaatggctgacctggcatggttacgtgaacactttggttcactggaaaacctgaaaggtaaaaaatcgccatg

SEQ ID NO: 329789 - DNA, 75 bp, synthetic construct
  source 1..75: mol_type = other DNA
atgaatggattcagaaacagttcacggaacggtcaggtctggcgctggcagcgtgccggaagccgggccgtcagc

SEQ ID NO: 329790 - DNA, 75 bp, synthetic construct
  source 1..75: mol_type = other DNA
gcatcatcacggtgaacattgcgcgcagctggcggattatctgcctcagtggcaggccgctggcgcacggttgat

SEQ ID NO: 329791 - DNA, 75 bp, synthetic construct
  source 1..75: mol_type = other DNA
aaagcccgtgaagcgtatctggcagagaacccgcaggcgggaacgcttctggtggcgggatccgtcgggccttac

SEQ ID NO: 329792 - DNA, 75 bp, synthetic construct
  source 1..75: mol_type = other DNA
cctcgccgtggttcaccgtctacccggacgtcggcaacctcagcgcctggggcaatgatgttcccgccgaactga

SEQ ID NO: 329793 - DNA, 75 bp, synthetic construct
  source 1..75: mol_type = other DNA
tatgcatcctgacgacatcaatgctttttttactttttactttcccggcgaaagcgaaaattaatgtcatagcaa

SEQ ID NO: 329794 - DNA, 75 bp, synthetic construct
  source 1..75: mol_type = other DNA
cagaatactgccaacggcgcagcaggggtaaggccggacatccaccacgttcttcaggaggtagtggatgtccgg

SEQ ID NO: 329795 - DNA, 75 bp, synthetic construct
  source 1..75: mol_type = other DNA
aggtgttgcggcaggtaaagcacagatccctgtggtcaccggcaatggtgagtttgcggcggtggcggaaattac

SEQ ID NO: 329796 - DNA, 75 bp, synthetic construct
  source 1..75: mol_type = other DNA
tgcagatccctgtggtgagcggaaatggtcagttcgccgcagtggctgaagtcaccgttactgaagcgggcgctg

SEQ ID NO: 329797 - DNA, 75 bp, synthetic construct
  source 1..75: mol_type = other DNA
ctgttcagccggaaggggcgacggataaaaccttccgcgccacgtcggcgaatcagaattttgcgaccattaccg

SEQ ID NO: 329798 - DNA, 75 bp, synthetic construct
  source 1..75: mol_type = other DNA
agtatcggtaaggcagtgacggcgaaagaagtgatcacccgaacagtgaaagttaccaacgtgggcaaaccttcc

SEQ ID NO: 329799 - DNA, 75 bp, synthetic construct
  source 1..75: mol_type = other DNA
ggttacaggctgacattctgattaacaccgactctgaagaagaaggtgaaatctatatgggttgtgcgggtggta

SEQ ID NO: 329800 - DNA, 75 bp, synthetic construct
  source 1..75: mol_type = other DNA
gatggcgaatgggttaaagcacgcggcacaacgctgggcgcggataacggtattggtatggcctctgcgctggcg

SEQ ID NO: 329801 - DNA, 75 bp, synthetic construct
  source 1..75: mol_type = other DNA
ctggcctggaaaccgggagaagaaggtcagaaagggcttataggctggtttgaaagcggggatgtgcgggcctat

SEQ ID NO: 329802 - DNA, 75 bp, synthetic construct
  source 1..75: mol_type = other DNA
tttgaaagcggggatgtgcgggcctataaaatccgtttcccaaatggcacggtggatgtgttccgtggctgggtc

SEQ ID NO: 329803 - DNA, 75 bp, synthetic construct
  source 1..75: mol_type = other DNA
gcttatgcaaacccgttgtcagacgctgactggcagcgactggctaaggtgaaggatctgacgccgggcgagatg

SEQ ID NO: 329804 - DNA, 75 bp, synthetic construct
  source 1..75: mol_type = other DNA
gacagcagtgagagccgggcctacaaaatccgtttcccgaatggcacggtggatgtgtttcgtggctgggtgagc

SEQ ID NO: 329805 - DNA, 75 bp, synthetic construct
  source 1..75: mol_type = other DNA
cggtaaaaggtgccggtaccactctgtgggtttacaccggcaagggtgatgcttatgcaaacccgttgtcagatg

SEQ ID NO: 329806 - DNA, 75 bp, synthetic construct
  source 1..75: mol_type = other DNA
aatcagcggtgtggggcgtccatatctggcagaggagggcactgaaaccgtgggcgttaccgggctgacggtggc

SEQ ID NO: 329807 - DNA, 75 bp, synthetic construct
  source 1..75: mol_type = other DNA
ctacggttttcatgtcgatggcgccgttcgtcagaacggtgaggtgggttggatgcgcactgacctgtcggcaac

SEQ ID NO: 329808 - DNA, 75 bp, synthetic construct
  source 1..75: mol_type = other DNA
tgcaggcgttgtttgcgcgtgttgcggcagaaaaacatcagcgcggggaactggaaaagccacaccaccagctgg

SEQ ID NO: 329809 - DNA, 75 bp, synthetic construct
  source 1..75: mol_type = other DNA
ggcgttgagctggagactgaacgttttgagcagacggtcagggaagttcaggatttagccagtcagaacggatga

SEQ ID NO: 329810 - DNA, 75 bp, synthetic construct
  source 1..75: mol_type = other DNA
cttgtgaaaaaccggcggagatgctgcggcagataatttgtgcgagcagtcgtcctggtgacatggtggcggatt

SEQ ID NO: 329811 - DNA, 75 bp, synthetic construct
  source 1..75: mol_type = other DNA
attgtgggtatgagcggtgatggccgtacggggcaggtggtcacagtgaccgtggtctctgctgaggagaagggt

SEQ ID NO: 329812 - DNA, 75 bp, synthetic construct
  source 1..75: mol_type = other DNA
aggtgttgcggcaggtaaagcgcagatccctgttgtcaccagcaatggtgagtttgcggcggtggcggagatcac

SEQ ID NO: 329813 - DNA, 75 bp, synthetic construct
  source 1..75: mol_type = other DNA
atggcaacaccaaatcccctggcgccggtaaaaggtgccggtaccactctgtgggtttacaacggcaaggctgat

SEQ ID NO: 329814 - DNA, 75 bp, synthetic construct
  source 1..75: mol_type = other DNA
acctggatgatgaagacgcggactggactgcgaccgggcaggggcagaagtctgcaggagataccagttttacgc

SEQ ID NO: 329815 - DNA, 75 bp, synthetic construct
  source 1..75: mol_type = other DNA
ttggcgctggagctgttcaatgccccgttcagcctaatcgccctgatagggatcatgctattaatcggcatcgtg

SEQ ID NO: 329816 - DNA, 75 bp, synthetic construct
  source 1..75: mol_type = other DNA
accgctgatgcagaagatgatacttatctcgatgatgaagatgcagactggaaaacgacaacccaggggcagaaa

SEQ ID NO: 329817 - DNA, 75 bp, synthetic construct
  source 1..75: mol_type = other DNA
ctggatgatgaagacgcggactggaccgcgaccgggcaggggcagaagtctgcaggagataccggttttacgctg

SEQ ID NO: 329818 - DNA, 75 bp, synthetic construct
  source 1..75: mol_type = other DNA
cctgcgtggaaagcttctttcattcgctgaaagtggaatgtctccacggagaacactttatcagccgggaaataa

SEQ ID NO: 329819 - DNA, 75 bp, synthetic construct
  source 1..75: mol_type = other DNA
tatggttatcaagtcgcggattgattgggatgaggttattgctcgcgttgatcgcgtgaaaaatgctgaaaaggt

SEQ ID NO: 329820 - DNA, 75 bp, synthetic construct
  source 1..75: mol_type = other DNA
atgctgatcatgctggtttcggtgcactggaacctgacgcccgtctccggtcgcgtgagcgacatggtgttcctc

SEQ ID NO: 329821 - DNA, 75 bp, synthetic construct
  source 1..75: mol_type = other DNA
ccagaaagggcttataggctggtttgaaagcggcgatgtccgggcctataaaatccgttttccgaatggcacggt

SEQ ID NO: 329822 - DNA, 75 bp, synthetic construct
  source 1..75: mol_type = other DNA
aaaatgatgcgcgacatcaaaaaaccaaaagagaaaaagataccagccccaatcaggcccatcgcacggagaact

SEQ ID NO: 329823 - DNA, 75 bp, synthetic construct
  source 1..75: mol_type = other DNA
tcagaaagggcttataggctggtttgaaagcggggatgtgcgggcctataaaatccgtttcccgaatggcacggt

SEQ ID NO: 329824 - DNA, 75 bp, synthetic construct
  source 1..75: mol_type = other DNA
acttcgggcgtatgagtctgcccccgatcataaaatttgtgtttcctacggcgcgtgcggtgtcggcggcggtat

SEQ ID NO: 329825 - DNA, 75 bp, synthetic construct
  source 1..75: mol_type = other DNA
tttgacagcagcgagacccgggcctacaaaatccgcttcccgaacggtacggtggatgtgttccgtggctgggtg

SEQ ID NO: 329826 - DNA, 75 bp, synthetic construct
  source 1..75: mol_type = other DNA
tcctcgatgctggaagtgctgggtgaagattacatccgcaccgcgcgcgccaaagggttgacccgcatgcgggtg

SEQ ID NO: 329827 - DNA, 75 bp, synthetic construct
  source 1..75: mol_type = other DNA
acagcgcgatttgatcacctggtttgacagcagcgagaccagagcctacaaaattcgcttcccgaacggcacggt

SEQ ID NO: 329828 - DNA, 75 bp, synthetic construct
  source 1..75: mol_type = other DNA
atgcctgtaccaaatccagtaatgccggtgaaaggggccgggaccacactgtgggtttataaggggagcggtgac

SEQ ID NO: 329829 - DNA, 75 bp, synthetic construct
  source 1..75: mol_type = other DNA
tgaaagggaacacgatcacggtgaaaggtgttgcggccggtaaagcgcagatccctgttgtcaccggcaatggtg

SEQ ID NO: 329830 - DNA, 75 bp, synthetic construct
  source 1..75: mol_type = other DNA
gatatggcaacaccaaatcctctggagccggtaaaaggtgccggtaccacactgtgggtttacaccggcaagggt

SEQ ID NO: 329831 - DNA, 75 bp, synthetic construct
  source 1..75: mol_type = other DNA
agtcaccaatattggtcgtccgtcgctggcggaggacagcggaaccatcacgccggtgacggggatcaccgtcac

SEQ ID NO: 329832 - DNA, 75 bp, synthetic construct
  source 1..75: mol_type = other DNA
agttaccaatgtgggacgcccgtcgatggctgaaaatctcactaaaattacgccggtctccggtgtgaccattaa

SEQ ID NO: 329833 - DNA, 75 bp, synthetic construct
  source 1..75: mol_type = other DNA
gcaagaacagacgttgccatttggcgtgaaattattatgcgtaagtatttgcttttttttaatgagcggatggta

SEQ ID NO: 329834 - DNA, 75 bp, synthetic construct
  source 1..75: mol_type = other DNA
ggcggaacgcggtgtgcaagtgttcttcactcaggttttccgtgacagctttttccatgccgatatgcatccagg

SEQ ID NO: 329835 - DNA, 75 bp, synthetic construct
  source 1..75: mol_type = other DNA
tggaaaacagcgaagcctttcctggagtcgtggattaaagatcaggtcggtattcctgcgctggtgagagcattt

SEQ ID NO: 329836 - DNA, 75 bp, synthetic construct
  source 1..75: mol_type = other DNA
tgattgcgggattgttggctcgctaaacaaagaagataaacgctatctggcggaaaactttatcgccttctttaa

SEQ ID NO: 329837 - DNA, 75 bp, synthetic construct
  source 1..75: mol_type = other DNA
caactggtgttacttcagaaaacgttgctctatatcgaaggcgttggacggcaactttatccacagctcgattta

SEQ ID NO: 329838 - DNA, 75 bp, synthetic construct
  source 1..75: mol_type = other DNA
gatggcaagctggcgaagcagcagattgaagctgcaatgggcggtttgccggtagaagcgtggtttgacgatttt

SEQ ID NO: 329839 - DNA, 75 bp, synthetic construct
  source 1..75: mol_type = other DNA
ccaccagataccaacgttgaagagttcgaatttgccattcgtacggtctgtgaacctatctttgagaaaccgctg

SEQ ID NO: 329840 - DNA, 75 bp, synthetic construct
  source 1..75: mol_type = other DNA
caggaattgtacctgcacagtttgcagctctatcaaccggttctgtctgcaatattacctgcatcagaacagaag

SEQ ID NO: 329841 - DNA, 75 bp, synthetic construct
  source 1..75: mol_type = other DNA
cgatgtcgcgcttacgtcagcgaattgctgagcgtctgctggcttcccaacaaaataatgccattcttaccacat

SEQ ID NO: 329842 - DNA, 75 bp, synthetic construct
  source 1..75: mol_type = other DNA
gtgtttttttcgagtttagtgtttaataaaccattaagtcaagtatttgcttgtttagtgattactaaagataat

SEQ ID NO: 329843 - DNA, 75 bp, synthetic construct
  source 1..75: mol_type = other DNA
agcagttcgccacgctgaacacggtaaagatgcggaaacacatcaccaatatctgacacaggatcagtttatgtt

SEQ ID NO: 329844 - DNA, 75 bp, synthetic construct
  source 1..75: mol_type = other DNA
tgcgaccagatttatacccgaatccaacagacgggttgcctgttggagataaggctaacacaccaaatacaccgg

SEQ ID NO: 329845 - DNA, 75 bp, synthetic construct
  source 1..75: mol_type = other DNA
tcaccggcaaaatatacccgccgtggtgtggaggaggatgtttactggtgggtgccgtccttcaacgagccgaca

SEQ ID NO: 329846 - DNA, 75 bp, synthetic construct
  source 1..75: mol_type = other DNA
tggccctgcaagaactggggccggtatggatcaagttcgggcaaatgttatcaacccgccgcgatctttttccgc

SEQ ID NO: 329847 - DNA, 75 bp, synthetic construct
  source 1..75: mol_type = other DNA
tgcgtggaaggtgaggtatttgacgtggcggtggatatccgtcgttcatcgccaacctttggcaaatgggtgggc

SEQ ID NO: 329848 - DNA, 75 bp, synthetic construct
  source 1..75: mol_type = other DNA
gcgggctgcactatcagctggatccgcacgcacagggcaaactggtccgctgcgtggaaggtgaggtatttgacg

SEQ ID NO: 329849 - DNA, 75 bp, synthetic construct
  source 1..75: mol_type = other DNA
aaattcattaatgttgaatggcctccatatgaaaattatattctttcggctaaagataaaacactaccaccatta

SEQ ID NO: 329850 - DNA, 75 bp, synthetic construct
  source 1..75: mol_type = other DNA
ggttggtatccattatttaaaccaaccgataaattaaccattcaacccggtggcttaatcaatgataaaagtatc

SEQ ID NO: 329851 - DNA, 75 bp, synthetic construct
  source 1..75: mol_type = other DNA
gcatataatctcgcctccgatcagggcgaggttatgctacgtgtgggttataacttcgatatgggcgcgggtatt

SEQ ID NO: 329852 - DNA, 75 bp, synthetic construct
  source 1..75: mol_type = other DNA
atgttaaccaatacctacacctttcagcgagaagatgaactcaaacatggctataatgaaattgaaggttggtat

SEQ ID NO: 329853 - DNA, 75 bp, synthetic construct
  source 1..75: mol_type = other DNA
tttgatgattttattggtttagatactggcgttagccaagatgtatatcaggatgcgactaagtatcaagctaaa

SEQ ID NO: 329854 - DNA, 75 bp, synthetic construct
  source 1..75: mol_type = other DNA
tatgagctcgccataaggtcttctaaaagccttacggtttcagcaaaaaatctcgtcgaagccctcatcgaaggc

SEQ ID NO: 329855 - DNA, 75 bp, synthetic construct
  source 1..75: mol_type = other DNA
ggagatgggtgctgggaaaaaaagaacaacaaatgggagctaaagaaactaaaaataacttcatttgtattgctc

SEQ ID NO: 329856 - DNA, 75 bp, synthetic construct
  source 1..75: mol_type = other DNA
gctgagggttatgccatagaaggcgccacaccgctatttagcgatgtggatgagttatacagtttgttggaagag

SEQ ID NO: 329857 - DNA, 75 bp, synthetic construct
  source 1..75: mol_type = other DNA
tacttccctatctgatattggtcgcgtactaattcctcgactggataaaagcttagaaaacaagcttgctgatta

SEQ ID NO: 329858 - DNA, 75 bp, synthetic construct
  source 1..75: mol_type = other DNA
gcttctaaaagccttacggtttcagcaaaaaatctcgtcgaagccctcatcgaaggccaactgaccgagcaacaa

SEQ ID NO: 329859 - DNA, 75 bp, synthetic construct
  source 1..75: mol_type = other DNA
atgagtcaggacagtaaagttttctttcgtatattcttcggtatcggtctggtactgatcctcatttctgttgtt

SEQ ID NO: 329860 - DNA, 75 bp, synthetic construct
  source 1..75: mol_type = other DNA
ctggcagcggctgcaagcggaaaactggataagctgaccgccacgctgaaagcctcggacggtaaaacggaagag

SEQ ID NO: 329861 - DNA, 75 bp, synthetic construct
  source 1..75: mol_type = other DNA
gttataggggcaatcggccttgttgcgtggccggttattatcggtattaacgccatcatcgctgctgctggcgca

SEQ ID NO: 329862 - DNA, 75 bp, synthetic construct
  source 1..75: mol_type = other DNA
ggcaaagcggggattaatacgcgcaatctgtcgaatgatgaaagccgcctgaaaaactctatcaatgaaactacc

SEQ ID NO: 329863 - DNA, 75 bp, synthetic construct
  source 1..75: mol_type = other DNA
gatggtggtcagttaaacatcagcggtctggtagtagataatacctgtgaaacgcgtgttgatggcggcaataat

SEQ ID NO: 329864 - DNA, 75 bp, synthetic construct
  source 1..75: mol_type = other DNA
tgtctggtcttatgctggcaatggttgcaggtactgcttctgctgatatggacggtggtcagttaaatatcagtg

SEQ ID NO: 329865 - DNA, 75 bp, synthetic construct
  source 1..75: mol_type = other DNA
atgtctaaaaaattaggttttgccctgtctggtcttatgctggcaatggttgcaggtactgcttctgctgatatg

SEQ ID NO: 329866 - DNA, 75 bp, synthetic construct
  source 1..75: mol_type = other DNA
gtgactcattaagttaccttgcccctgtggcgaaaaatgccggggtgagtcttgagcaagccgcggcgattactg

SEQ ID NO: 329867 - DNA, 75 bp, synthetic construct
  source 1..75: mol_type = other DNA
agccaggcgggaatcaatacccgcaccctggcggcagacgagcgccggttaaaaaccagcatcagcgaaacgacg

SEQ ID NO: 329868 - DNA, 75 bp, synthetic construct
  source 1..75: mol_type = other DNA
tgttgcgaaaaatgccggagtgagtcttgaacaagcggcggcgattaccggcacacttcatgataataacatcag

SEQ ID NO: 329869 - DNA, 75 bp, synthetic construct
  source 1..75: mol_type = other DNA
caaaacctccatcagcgaaacgacggcgcagcttaatcgacagcgcgaggcactggcgcgcgtcagtgcgcagca

SEQ ID NO: 329870 - DNA, 75 bp, synthetic construct
  source 1..75: mol_type = other DNA
gcgcacaactggccgtgaccagtcaggcacttgataaggcgaaacgagaagccggtgagctggccgtgcaattta

SEQ ID NO: 329871 - DNA, 75 bp, synthetic construct
  source 1..75: mol_type = other DNA
acgactcacttacatatgttggtccagttgccaaagatgccggtgtcagcctagaagaaaccgccgcgatgctgg

SEQ ID NO: 329872 - DNA, 75 bp, synthetic construct
  source 1..75: mol_type = other DNA
gtctattaacaacccttctgacggcgtgaatatcgctctgcacaatattgatggttccactatcaaacaggttca

SEQ ID NO: 329873 - DNA, 75 bp, synthetic construct
  source 1..75: mol_type = other DNA
acaattcgcggtcgatatgctgttacgcggttgcggccttatgcgtccgctatctgatttaaaacgaatgatgcc

SEQ ID NO: 329874 - DNA, 75 bp, synthetic construct
  source 1..75: mol_type = other DNA
atcgttgttgtaccttattcgcggcgcttcaatgacgctggcgggcggcgacaattcgcgatcgatatgctgtta

SEQ ID NO: 329875 - DNA, 75 bp, synthetic construct
  source 1..75: mol_type = other DNA
ggcggtacatcgagccgccgccaatgactggcgcactcgctgacctgaaagtgtgggtaatggataccggagagc

SEQ ID NO: 329876 - DNA, 75 bp, synthetic construct
  source 1..75: mol_type = other DNA
aatcagcgagttaaagcagaaaaaagaatcaatggaagatctcatagcgagatggattgcggcgcaaaaatgccg

SEQ ID NO: 329877 - DNA, 75 bp, synthetic construct
  source 1..75: mol_type = other DNA
atgatagcgaatcaaacaagctatcactatttattgagttcgaacgccggatcattgttgtgccctgggcgcggc

SEQ ID NO: 329878 - DNA, 75 bp, synthetic construct
  source 1..75: mol_type = other DNA
atgaaaattaaattccataaagcatatgatgcagaatcaaacaagctatcactatttattgagttcgaacgccgg

SEQ ID NO: 329879 - DNA, 75 bp, synthetic construct
  source 1..75: mol_type = other DNA
aatgaaaaagcggccgatttctggcgcgcgctggtggaagctggcgttaagccatgtggcctgggcgcgcgtgac

SEQ ID NO: 329880 - DNA, 75 bp, synthetic construct
  source 1..75: mol_type = other DNA
gacggtggccaattaaatatcagcggtctggtagttgataacacctgtgaaaaccgtgttgatggtggcaacaaa

SEQ ID NO: 329881 - DNA, 75 bp, synthetic construct
  source 1..75: mol_type = other DNA
gtcttacgttcgtgccgtcgcagaccaaacagcaactgctggttatgtaaaaactaacactgcatacaccattac

SEQ ID NO: 329882 - DNA, 75 bp, synthetic construct
  source 1..75: mol_type = other DNA
ggcggtacatcgaaccgccgccaatgactggcgcactcgctgacctgaaagtgtgggtgatggataccggagagc

SEQ ID NO: 329883 - DNA, 75 bp, synthetic construct
  source 1..75: mol_type = other DNA
atgataaccacgattaaattaaggtggcggtacatcgagccgccgccaatgactggcgcactcgctgacctgaaa

SEQ ID NO: 329884 - DNA, 75 bp, synthetic construct
  source 1..75: mol_type = other DNA
ggttaaagagcgccagcgggaagagtttgaagcctgtaaacggacagcctatgccaatgaaggatttgacgaatg

SEQ ID NO: 329885 - DNA, 75 bp, synthetic construct
  source 1..75: mol_type = other DNA
attaaacattaagccggggcatacgcttggcattattgatgcactgttggttcataagatggccagggctttatt

SEQ ID NO: 329886 - DNA, 75 bp, synthetic construct
  source 1..75: mol_type = other DNA
tccggtaatgcaggctgatgtcgcgcaggcaattgaaaaactcaaacggaaattagtggaatgcaatcgctataa

SEQ ID NO: 329887 - DNA, 75 bp, synthetic construct
  source 1..75: mol_type = other DNA
acctatagcgcctaatgacgttcgagagcagacagccattccacaagttccggtaactctggatgcctggataag

SEQ ID NO: 329888 - DNA, 75 bp, synthetic construct
  source 1..75: mol_type = other DNA
ggagagcgacaatactatgtgttagcagctgactttaaaaacaactacccaccaagcatccccaacactcaggtc

SEQ ID NO: 329889 - DNA, 75 bp, synthetic construct
  source 1..75: mol_type = other DNA
agacatctgcctgatgtggctcagcgcctgatacaacatcttgcagagcatggcattaatacctctaagcgctcg

SEQ ID NO: 329890 - DNA, 75 bp, synthetic construct
  source 1..75: mol_type = other DNA
tggctcagcgtctgatacagcatcttgcagagcatggcattcagccagcccggaatatggctgaacatattcctc

SEQ ID NO: 329891 - DNA, 75 bp, synthetic construct
  source 1..75: mol_type = other DNA
tttaatgatggcaatccaacttgggatgacggtgatggcgaagacctgtatctcaaagaggtaacccactggatg

SEQ ID NO: 329892 - DNA, 75 bp, synthetic construct
  source 1..75: mol_type = other DNA
cgccgccatgcttcagtccggaaactttcgggaaaacaagaattcgtcaaccaataattttcgggaaatcgcgga

SEQ ID NO: 329893 - DNA, 75 bp, synthetic construct
  source 1..75: mol_type = other DNA
ccactgccagtacaaaatgaacaatcaagacctctgcctgatgtggctcagcgtctggtgcagcatcttgcagag

SEQ ID NO: 329894 - DNA, 75 bp, synthetic construct
  source 1..75: mol_type = other DNA
accggtagtacctgctgcattacctgagaacgacgatgaggacgggcatgacattgattatcttgagccatctga

SEQ ID NO: 329895 - DNA, 75 bp, synthetic construct
  source 1..75: mol_type = other DNA
gcgtcttggcactccaaaatcaaaatatgtcagcgccgataaggccggaggctattgaaaacgcaatagaataca

SEQ ID NO: 329896 - DNA, 75 bp, synthetic construct
  source 1..75: mol_type = other DNA
tcgaattattcattaaaaatccgcttgataacgggcttacccgtggcgaacaaatggaactggcacgaattgcac

SEQ ID NO: 329897 - DNA, 75 bp, synthetic construct
  source 1..75: mol_type = other DNA
tggccagaagatggcgagttaagcgaattaacgtggtgcagccacaatcagcaccatgatgacacgctatatgtt

SEQ ID NO: 329898 - DNA, 75 bp, synthetic construct
  source 1..75: mol_type = other DNA
gaattaacgtggtgcagccacaatcagcaccatgatgacacgctatatgttcgagctgacttggtaaatggcaat

SEQ ID NO: 329899 - DNA, 75 bp, synthetic construct
  source 1..75: mol_type = other DNA
ggaaaacgccactttacttattgggacaaaatcggcattcgggcttgctgacgataaggcttcccatattgctga

SEQ ID NO: 329900 - DNA, 75 bp, synthetic construct
  source 1..75: mol_type = other DNA
gcagacggccacaaagtatgtgttaaaactcgacggctggatacagaaaaacaaatcactggcgtcaaccatcgg

SEQ ID NO: 329901 - DNA, 75 bp, synthetic construct
  source 1..75: mol_type = other DNA
cagaaagtgaagggctgggactggtttatgcagaattattgaatattggttttaatgatggagttgatgcgctca

SEQ ID NO: 329902 - DNA, 75 bp, synthetic construct
  source 1..75: mol_type = other DNA
caatcctgaaggttgccaagattcgtgccgatttcgatgattttgacggtgacaggcgaggtatcggtgattgtc

SEQ ID NO: 329903 - DNA, 75 bp, synthetic construct
  source 1..75: mol_type = other DNA
agaagcaaatcacccacaaactggcgactggctttacgatgacccgctggagctggctaaagctatcagaaaagg

SEQ ID NO: 329904 - DNA, 75 bp, synthetic construct
  source 1..75: mol_type = other DNA
taaatatcatgcaggacaacctaggcggtgactttaaagagtttcagtccgcttatgaggcggtggggactgacc

SEQ ID NO: 329905 - DNA, 75 bp, synthetic construct
  source 1..75: mol_type = other DNA
tcctcttagcatgtacgcggttgatgctgttgccgctattgcagaggtaagaggctggaacgcctgccgcgccgc

SEQ ID NO: 329906 - DNA, 75 bp, synthetic construct
  source 1..75: mol_type = other DNA
acggtgagtatatggcaggacaggtgcaaggggaatacgtagagttgagcgacggcactttatcgtggttaggga

SEQ ID NO: 329907 - DNA, 75 bp, synthetic construct
  source 1..75: mol_type = other DNA
acatgaaaaccattttcggggaggaggccagctcagccgccgctgtgctgatgactgccgcgtcaaccggaaagc

SEQ ID NO: 329908 - DNA, 75 bp, synthetic construct
  source 1..75: mol_type = other DNA
ctggtaaatatcatgcaggacaacctcggcggtgactttaaggagtttcagtccgcttatgaggcggtggggaca

SEQ ID NO: 329909 - DNA, 75 bp, synthetic construct
  source 1..75: mol_type = other DNA
gccggtgggagaactgttcacgccactgaagccggtgtttgactggctgggcgaaaagttacaggccgcgtggca

SEQ ID NO: 329910 - DNA, 75 bp, synthetic construct
  source 1..75: mol_type = other DNA
tataatataattacctatattagctctgacctgacagttaccggttatttatacaggtatctgtcagattacatc

SEQ ID NO: 329911 - DNA, 75 bp, synthetic construct
  source 1..75: mol_type = other DNA
tcaacattctggtgctggatacgcaatgctattccaacaccggtggtcaggcatcgaaagcgacaccgctgggtg

SEQ ID NO: 329912 - DNA, 75 bp, synthetic construct
  source 1..75: mol_type = other DNA
taaccactgtgtcgccgcttgcccacactcagctattcgcgcaaaagtggtaccgcctgaagcgatggaaaacgc

SEQ ID NO: 329913 - DNA, 75 bp, synthetic construct
  source 1..75: mol_type = other DNA
gccgcgtgccatttattcatttctttgatggtttccgcacatctcacgaaatcaataaaattgtcccgctggccg

SEQ ID NO: 329914 - DNA, 75 bp, synthetic construct
  source 1..75: mol_type = other DNA
accaacatttggacaatgggtaagtattaagttaagtggcgataacaaaaaacaaatttggataccagaagggtt

SEQ ID NO: 329915 - DNA, 75 bp, synthetic construct
  source 1..75: mol_type = other DNA
atcctgtagtttctgctaaagattgttttttaccttcactagcaagtatcaaagaacaaattcttaaaggctgga

SEQ ID NO: 329916 - DNA, 75 bp, synthetic construct
  source 1..75: mol_type = other DNA
cgacaaattattatcatcctgaatcagaaggttgcataaaatgggatgattcttttttgatgattgattggccaa

SEQ ID NO: 329917 - DNA, 75 bp, synthetic construct
  source 1..75: mol_type = other DNA
gagatagcagagtttgtttataagacgacaaattattatcatcctgaatcagaaggttgcataaaatgggatgat

SEQ ID NO: 329918 - DNA, 75 bp, synthetic construct
  source 1..75: mol_type = other DNA
ccttatttcgaattacgttggttagatcgtaagcgtgcagcaagaaccgtattgacggggatgtgttattcagtc

SEQ ID NO: 329919 - DNA, 75 bp, synthetic construct
  source 1..75: mol_type = other DNA
ccttatttcgaattgcgctggttagaccgcaacgtcgagccgtaccaccgcgagcaaaaccagattcgtatcgga

SEQ ID NO: 329920 - DNA, 75 bp, synthetic construct
  source 1..75: mol_type = other DNA
cttacattatcccggtaacggcgtctttcatcggcctgccagttaccatcaatggtattggtaccctcgttcttt

SEQ ID NO: 329921 - DNA, 75 bp, synthetic construct
  source 1..75: mol_type = other DNA
atggattgtactattttgctgaaaataatctctgtaaaagagattacaaaaaattcgcctttgtggtcacactat

SEQ ID NO: 329922 - DNA, 75 bp, synthetic construct
  source 1..75: mol_type = other DNA
taatctctgtaaaggagatcacaaaagattcgcctttgtggtcgcactacctggcgcgatatattgattccggat

SEQ ID NO: 329923 - DNA, 75 bp, synthetic construct
  source 1..75: mol_type = other DNA
cattaagccgctatcttaaagattttaaacacagccagactcattgcgcgcattgccgtaaattactcgatcgca

SEQ ID NO: 329924 - DNA, 75 bp, synthetic construct
  source 1..75: mol_type = other DNA
atgactacttttaccgacaaagaactgattaaagaaatcaaagagcgcataggcagcctggacgtccgagacaat

SEQ ID NO: 329925 - DNA, 75 bp, synthetic construct
  source 1..75: mol_type = other DNA
tcatcttattgttcaggggaaaagccgtaaagcagaactcgacagacaattgcaggtgctaaaacaacaacagga

SEQ ID NO: 329926 - DNA, 75 bp, synthetic construct
  source 1..75: mol_type = other DNA
gaactctatgccaccagtcagaatgccggttttattcagccggggcagcgtgttgcacttcggttcgccgcattc

SEQ ID NO: 329927 - DNA, 75 bp, synthetic construct
  source 1..75: mol_type = other DNA
gccagtacaaaatgaacaatcaagacctctgcctgatgtggctcagcgtctggtgcagcatcttgcagagcatgg

SEQ ID NO: 329928 - DNA, 75 bp, synthetic construct
  source 1..75: mol_type = other DNA
gcgtctgatagaccatcttgctgcacatggtattcagccagcccggaatataacgacatcctcgcctctgactcc

SEQ ID NO: 329929 - DNA, 75 bp, synthetic construct
  source 1..75: mol_type = other DNA
gcatggactgatgatgaggaactgcgtgatgtcaagcagtatggtttcggtgagatatatcagtgtccgccagat

SEQ ID NO: 329930 - DNA, 75 bp, synthetic construct
  source 1..75: mol_type = other DNA
cgctgggccgaatctgggcgatgatgttatttattccggcaccgttgccgctgcaatggaaggccgtcatttagg

SEQ ID NO: 329931 - DNA, 75 bp, synthetic construct
  source 1..75: mol_type = other DNA
aatcaaaggtattcgcgtgacgcgctgcggtacacgacatccggcagatcaggtgatcccgcagcaagatccgcg

SEQ ID NO: 329932 - DNA, 75 bp, synthetic construct
  source 1..75: mol_type = other DNA
gtgatattgctgtgcaaatgggaaccccgaccgattgcgtctatcttggcgtgaatgctctgatgcgtccgcgcc

SEQ ID NO: 329933 - DNA, 75 bp, synthetic construct
  source 1..75: mol_type = other DNA
cagatagaactttatgccgccagtcagaatgccggttttattcagcccggacagcgggtagcactgcgctttgcc

SEQ ID NO: 329934 - DNA, 75 bp, synthetic construct
  source 1..75: mol_type = other DNA
tagctgttgatattcgtaaatcgtcaccaacttttggcaaatgggttggggtgaatttatctgcagagaataagc

SEQ ID NO: 329935 - DNA, 75 bp, synthetic construct
  source 1..75: mol_type = other DNA
gatttaaccgcgcacagcgcgcaagatgtagtttcagactggttagagagcgtgggagttggcacgcaatggtaa

SEQ ID NO: 329936 - DNA, 75 bp, synthetic construct
  source 1..75: mol_type = other DNA
agctgaattgctgagcgaagaccagatgctgggcgcagtagtgttcggtcatgaacaacagcaggttgttattca

SEQ ID NO: 329937 - DNA, 75 bp, synthetic construct
  source 1..75: mol_type = other DNA
ctcgtgacgcgcaggttcttgatgaactgatgggcgaacgtaccgataccttcctgttccactacaacttccctc

SEQ ID NO: 329938 - DNA, 75 bp, synthetic construct
  source 1..75: mol_type = other DNA
gctaaaagagccccctacttttccagcttgttgattggtttagttgggttgtatatgggcgtgcatggtttcatc

SEQ ID NO: 329939 - DNA, 75 bp, synthetic construct
  source 1..75: mol_type = other DNA
gcgattcgtcgtatcgaagagatcactgcagaaatcgaagtgggccgcgtctacaatggtaaagtgacccgtatc

SEQ ID NO: 329940 - DNA, 75 bp, synthetic construct
  source 1..75: mol_type = other DNA
gctaaaggtgcgcgtctgcatatcctgggcgtaatggaacaggcgatcaatgcgccgcgcggtgatatctctgag

SEQ ID NO: 329941 - DNA, 75 bp, synthetic construct
  source 1..75: mol_type = other DNA
atggacgcaggtgtgccgatcaaagctgctgttgcgggtatcgcaatggggctggtgaaagaaggcgacaactac

SEQ ID NO: 329942 - DNA, 75 bp, synthetic construct
  source 1..75: mol_type = other DNA
ggtattgtgcagcgtcttgagttttaccaggttcccgatttgcaatatatcgttagtcgtagcgcgcgttttatg

SEQ ID NO: 329943 - DNA, 75 bp, synthetic construct
  source 1..75: mol_type = other DNA
ctcactaaccttgaaccgcatgacgtgctgtttattgatgagatccaccgtctatcgccagttgttgaagaagtg

SEQ ID NO: 329944 - DNA, 75 bp, synthetic construct
  source 1..75: mol_type = other DNA
gcacgacttctggtccggtgctggaaaaggcgggcgatctggcagcaatgctcactaaccttgaaccacacgatg

SEQ ID NO: 329945 - DNA, 75 bp, synthetic construct
  source 1..75: mol_type = other DNA
ccccagcgccatcttactcggtgcacttcatggtctggagcctgggcactcaaaaacgatgatggcggcgtttat

SEQ ID NO: 329946 - DNA, 75 bp, synthetic construct
  source 1..75: mol_type = other DNA
atcaacagggacaccaggatttatttattctgcgaagtgatcttccgtcacaggtatttattcgaaggatccgcg

SEQ ID NO: 329947 - DNA, 75 bp, synthetic construct
  source 1..75: mol_type = other DNA
taccgcgataacgccatcacttacaaagcgcagcgcgataaaaaagccagagagctggagctggcaaacgcaacc

SEQ ID NO: 329948 - DNA, 75 bp, synthetic construct
  source 1..75: mol_type = other DNA
gttacacgggattatttcaccctcagagagcggctgatgacgatgcagaagcaactggaaggggcgcaggaatat

SEQ ID NO: 329949 - DNA, 75 bp, synthetic construct
  source 1..75: mol_type = other DNA
ctgcctgtcatgggctgttaatcattaccgtgataacgccatgacctacaaagagcagcgcgataaagccacatc

SEQ ID NO: 329950 - DNA, 75 bp, synthetic construct
  source 1..75: mol_type = other DNA
ctgatgtttctgctggtcgtaagcgcctgcaagtcgccgccacctgtgcaaagtcaacgaccggagccagcagca

SEQ ID NO: 329951 - DNA, 75 bp, synthetic construct
  source 1..75: mol_type = other DNA
tcagagcgcgactgataataatgcaaaaacaacttgaaggggcacagctatacattcgagagcaatgcctcagat

SEQ ID NO: 329952 - DNA, 75 bp, synthetic construct
  source 1..75: mol_type = other DNA
ctggcaacaaaccattaccgcgataacgccatcacctacaaagcgcagcgcgataaaaaagtcagtgagctgaaa

SEQ ID NO: 329953 - DNA, 75 bp, synthetic construct
  source 1..75: mol_type = other DNA
ctgatgttgccgctggtcgtaagccctgcggatcaacgccacctgctccggtaccgtgcgtgaagccaccggcac

SEQ ID NO: 329954 - DNA, 75 bp, synthetic construct
  source 1..75: mol_type = other DNA
aagaacagcgcgacaaagccacatccatcatcgctgacatgcagaagcgtcaacgtgacgtagcagaactcgatg

SEQ ID NO: 329955 - DNA, 75 bp, synthetic construct
  source 1..75: mol_type = other DNA
ccgctctggttatctgcatcatcgtctgcctgtcgtggacggtcaatcattaccgtgataacgccatcgcctata

SEQ ID NO: 329956 - DNA, 75 bp, synthetic construct
  source 1..75: mol_type = other DNA
gctttttgcagcgtacaccgcgcgggcgtatggcgacagtgcgggcgtggaaccacttcgggattacaccgccag

SEQ ID NO: 329957 - DNA, 75 bp, synthetic construct
  source 1..75: mol_type = other DNA
ttattaccgtctccgaggtggaatcgacaagataaccgcgcaggttaactacctgcaggattacatcaggacgca

SEQ ID NO: 329958 - DNA, 75 bp, synthetic construct
  source 1..75: mol_type = other DNA
ttattaccgtctccgaggtggaatcgacaagataaccgcgcaggttaactacttgcaggactacatcaggacgca

SEQ ID NO: 329959 - DNA, 75 bp, synthetic construct
  source 1..75: mol_type = other DNA
ttattaccgtctccgacgtggaatcgacaagataaccgcgcaggttaactacgtgcaggattacatcaggacgca

SEQ ID NO: 329960 - DNA, 75 bp, synthetic construct
  source 1..75: mol_type = other DNA
taccaggaaattcgaccgtcgatctacgggaagttgcggtgccgacgccggggattaaccaggtactgatcaaaa

SEQ ID NO: 329961 - DNA, 75 bp, synthetic construct
  source 1..75: mol_type = other DNA
cggaacgtctggcgatggcaaaacagttaggggtgatggatcacggctatttagcaaccaccgaaggtctgccgc

SEQ ID NO: 329962 - DNA, 75 bp, synthetic construct
  source 1..75: mol_type = other DNA
atgaaaacgatgctggcagcttatttaccaggaaattcgaccgtcgatctacgggaagttgcggtgccgacacca

SEQ ID NO: 329963 - DNA, 75 bp, synthetic construct
  source 1..75: mol_type = other DNA
tctgctgccgatgccgattcgcacattggcgctattcaggcgttaagtgaattactgtgcgaagaagaaatactc

SEQ ID NO: 329964 - DNA, 75 bp, synthetic construct
  source 1..75: mol_type = other DNA
gatttttcaatgacatcattgttagcaataaattatgtcaacgagagctacattcaggcaattaaagattcaact

SEQ ID NO: 329965 - DNA, 75 bp, synthetic construct
  source 1..75: mol_type = other DNA
atgcggcttattgattattttccagagtcatctatctcagttatatatgcagcaaaagactggcaggaagctatc

SEQ ID NO: 329966 - DNA, 75 bp, synthetic construct
  source 1..75: mol_type = other DNA
ttattaccgtctccgacgtggaatcgacaagataaccgcgcaggttaactacttgcaggagtacatcaggacgca

SEQ ID NO: 329967 - DNA, 75 bp, synthetic construct
  source 1..75: mol_type = other DNA
ttattaccgtctccgatgtggaatcgacaagataaccgcgcaggttaactacgtgcaggactacatcaggacgca

SEQ ID NO: 329968 - DNA, 75 bp, synthetic construct
  source 1..75: mol_type = other DNA
ttattaccgtctccgatgtggaatcgacaagataaccgcgcaggttaactacctgcaggagtacatcaggacgca

SEQ ID NO: 329969 - DNA, 75 bp, synthetic construct
  source 1..75: mol_type = other DNA
actcctctgcattgcatatagccgctggatttggtgtacctactgaatgcgtgtttaatacaataccgccagaat

SEQ ID NO: 329970 - DNA, 75 bp, synthetic construct
  source 1..75: mol_type = other DNA
gcccggcgcggaactaaagatgaagatttctctgaggaagacatccgcgatatcaatgacagcctgatcctcgat

SEQ ID NO: 329971 - DNA, 75 bp, synthetic construct
  source 1..75: mol_type = other DNA
agaacagcgtgataaaaaagtcagtgagctgaagcaggcgaccgccaccataactgacatgcagcagcgccagcg

SEQ ID NO: 329972 - DNA, 75 bp, synthetic construct
  source 1..75: mol_type = other DNA
ccgcccgcgtggataatgcaaccggcccccgactggcagacaccgctgaacgggattatttcatcctcagagaac

SEQ ID NO: 329973 - DNA, 75 bp, synthetic construct
  source 1..75: mol_type = other DNA
atcaggtgccggatctgcaatatatcgtcagtcgcagcgcacgctttatggggcttgagatgagtgatgacggcg

SEQ ID NO: 329974 - DNA, 75 bp, synthetic construct
  source 1..75: mol_type = other DNA
aactggatatcatgattggtgaaggtccggcggcacgctccattaaaattgatttgccgccgtttaccctgattg

SEQ ID NO: 329975 - DNA, 75 bp, synthetic construct
  source 1..75: mol_type = other DNA
ttattaccgtctcagaagtggaatcgacaagataaccgcgcaggtcaactacctgcaggagtacatcaggacgca

SEQ ID NO: 329976 - DNA, 75 bp, synthetic construct
  source 1..75: mol_type = other DNA
taatattattgctggtagtgactgcagcgctggcatggacaacggaccattactaccgtaacgctgtcacttaca

SEQ ID NO: 329977 - DNA, 75 bp, synthetic construct
  source 1..75: mol_type = other DNA
taagctcgacccggtacgttatcaggcgcgagtcgacagacttcaggctgacctgatgacggcgacgcataatat

SEQ ID NO: 329978 - DNA, 75 bp, synthetic construct
  source 1..75: mol_type = other DNA
gcggcagaattttctcgcgcaggatgcgctggtgaaaggttcggtggcggaacaggcgcaaatccagagccagct

SEQ ID NO: 329979 - DNA, 75 bp, synthetic construct
  source 1..75: mol_type = other DNA
ctgcgctcgatgcaaaatactcgagggaattagccgatgcgagagctgaaaatgaaactctgcgcgctgatgttg

SEQ ID NO: 329980 - DNA, 75 bp, synthetic construct
  source 1..75: mol_type = other DNA
cctccggcgtggataatgcaaccgacccccgactggcagacaccgctgaatgggattatttcactctcagagaac

SEQ ID NO: 329981 - DNA, 75 bp, synthetic construct
  source 1..75: mol_type = other DNA
acgataaggtcgcccatatcggtgatgttctgtcgatgacgatgaacaaaaccgccgccgactttgacggcctga

SEQ ID NO: 329982 - DNA, 75 bp, synthetic construct
  source 1..75: mol_type = other DNA
gcgcacaactggcggtaaccggacaggcactggaaaaggcaaaacaggaagccgccgagctggcggtgcagttta

SEQ ID NO: 329983 - DNA, 75 bp, synthetic construct
  source 1..75: mol_type = other DNA
gcgcagcttaatcgacagcgtgaggcactggcgcgcgtcagtgcgcagcaggcgaaattaagccgcgtgaaagag

SEQ ID NO: 329984 - DNA, 75 bp, synthetic construct
  source 1..75: mol_type = other DNA
atgcgtccgttgttcaccattctgaaagagattcaggccagctttgataaacacaagctgggaacgtctcagaag

SEQ ID NO: 329985 - DNA, 75 bp, synthetic construct
  source 1..75: mol_type = other DNA
ctcggaacggggcagaaatccgaatacatgaaaaccattttcggtgaagaggccagctcggcggccgccgtgctg

SEQ ID NO: 329986 - DNA, 75 bp, synthetic construct
  source 1..75: mol_type = other DNA
ctggtgaaggtcatgcaggataacctcggcggcgattttaaagagtttcagtctgcgtatgaagcggtaggaacc

SEQ ID NO: 329987 - DNA, 75 bp, synthetic construct
  source 1..75: mol_type = other DNA
gccagcgctttgccgaactgctggtcaggcaggagtaccagcggctggagaaagaactcgccttccagcgtgctt

SEQ ID NO: 329988 - DNA, 75 bp, synthetic construct
  source 1..75: mol_type = other DNA
acgcctcggcggcggaaagttaccattattgctggaacaacagggggagcaatggcgtcccgtctctgcgccctg

SEQ ID NO: 329989 - DNA, 75 bp, synthetic construct
  source 1..75: mol_type = other DNA
atctggctggtcagcaacagcaacgacgatgccagcctgcaacgctgggcgcagcgccagcatattgatatgcgc

SEQ ID NO: 329990 - DNA, 75 bp, synthetic construct
  source 1..75: mol_type = other DNA
ggtggcgaaaaatgccggtgtcagcattgaagaaactgccgcaatggtgggcgccctgcatgacgccaaaatcac

SEQ ID NO: 329991 - DNA, 75 bp, synthetic construct
  source 1..75: mol_type = other DNA
ctggtcaaggttatgcaggataacctcggcggcgacttcaaggagttccagtcagcatatgaggcggtcggcact

SEQ ID NO: 329992 - DNA, 75 bp, synthetic construct
  source 1..75: mol_type = other DNA
ctgcaaagggaaatatggtcacctttggtgttgtaccatctcgagcagaaaccggttatggctatatccgcaagg

SEQ ID NO: 329993 - DNA, 75 bp, synthetic construct
  source 1..75: mol_type = other DNA
cgttaaacgccagcagcgggaactggccgctgtgggaattaatacccgcaatcttgcacatgatgagcagggact

SEQ ID NO: 329994 - DNA, 75 bp, synthetic construct
  source 1..75: mol_type = other DNA
aaatgcagtcgttacgcaaacaggcgcgccagctcggtgacaatacagccgcttctgctgatgatgcagccagtg

SEQ ID NO: 329995 - DNA, 75 bp, synthetic construct
  source 1..75: mol_type = other DNA
ggctatgaagtctgcaagtgtccttatggcggcagcggcaagcggaaaactcgataagctaactgccacgataaa

SEQ ID NO: 329996 - DNA, 75 bp, synthetic construct
  source 1..75: mol_type = other DNA
ccgccacacagggtaattcctacatcccggcaaccagcacatatggcggctatcaggcttatcagccagttaccg

SEQ ID NO: 329997 - DNA, 75 bp, synthetic construct
  source 1..75: mol_type = other DNA
ctcggtgtggttttcagtacggtcggcggcgcgattgtcacggccattggcgcaatcagcctgccggtgctggcg

SEQ ID NO: 329998 - DNA, 75 bp, synthetic construct
  source 1..75: mol_type = other DNA
tcgaccagctcaccgccgcgtttaaagcctcggacggtaagactgaggaactggttaaggtgatgcaggataacc

SEQ ID NO: 329999 - DNA, 75 bp, synthetic construct
  source 1..75: mol_type = other DNA
ccagagcaaaagcgaatacaacatcaacctgcagggcggggtcgcgccgggcagtgaccttgaccgccagctccg

SEQ ID NO: 330000 - DNA, 75 bp, synthetic construct
  source 1..75: mol_type = other DNA
tgatgcccggttatgagtttgcgcagaaaaactcagaattacaggctgtgctcggagtggcaaaagactccaccg

SEQ ID NO: 330001 - DNA, 75 bp, synthetic construct
  source 1..75: mol_type = other DNA
cagtatttaccattctgaaagaaatgcaggccagttttgagaaaaaccggctcggtactgcccagcaggccgaat

SEQ ID NO: 330002 - DNA, 75 bp, synthetic construct
  source 1..75: mol_type = other DNA
cgtgccgtgttaagccgcctgcaggcaccgacgggaaaagcgtgggatgcactgaaagagcttggtgtgaaaacc

SEQ ID NO: 330003 - DNA, 75 bp, synthetic construct
  source 1..75: mol_type = other DNA
tcagacagcaaaggcaatacgcgcccgctatttaccatcctgaaagaaatgcaggccagttttaagcgcaacaat

SEQ ID NO: 330004 - DNA, 75 bp, synthetic construct
  source 1..75: mol_type = other DNA
atggaagcagcctcaagcggcaaacttgaccggctcaccgcagcgtttaaagcctcggacggtaaaaccgaggaa

SEQ ID NO: 330005 - DNA, 75 bp, synthetic construct
  source 1..75: mol_type = other DNA
ctgtcgtgccaatgaatgctaattggagcgatgttggttcatggtcttccttatgggaaatttcatcaaaagata

SEQ ID NO: 330006 - DNA, 75 bp, synthetic construct
  source 1..75: mol_type = other DNA
atgaaatgtttagcttgaacgctgccaaagctggagtcgcaataggtttgctattacagcaagcttctgcgttca

SEQ ID NO: 330007 - DNA, 75 bp, synthetic construct
  source 1..75: mol_type = other DNA
cctgcggatcaacgccatctgctccggtaccgtgcgtgaagccaccggcacctccggcgtggataatgcaaccgg

SEQ ID NO: 330008 - DNA, 75 bp, synthetic construct
  source 1..75: mol_type = other DNA
catcatcgctgacatgcagaagcgtcaacgtgacgtagcagaactcgatgccagatatacaaaggagcttgctga

SEQ ID NO: 330009 - DNA, 75 bp, synthetic construct
  source 1..75: mol_type = other DNA
tataacagtgtcaaacaataacagcacttctgacaatatcagcatagcaattaaaaacacagattcatcaaaaac

SEQ ID NO: 330010 - DNA, 75 bp, synthetic construct
  source 1..75: mol_type = other DNA
gatcctttaataaatatgatctttgtcgtagctgccttcatacattgctttggtaacaaggaaaaactaaaacaa

SEQ ID NO: 330011 - DNA, 75 bp, synthetic construct
  source 1..75: mol_type = other DNA
cggaattatttcactctcagagaccggctgatgacgatgcagaagcagctggaaggagcgcagcagtacatccgt

SEQ ID NO: 330012 - DNA, 75 bp, synthetic construct
  source 1..75: mol_type = other DNA
agagctggagctggcaaacgcaaccattactgacatgcagcagcgccagcgtgatgttgcagcgctcgatgccag

SEQ ID NO: 330013 - DNA, 75 bp, synthetic construct
  source 1..75: mol_type = other DNA
ttgttattctactggtggtcagtggtgcgctgttgctggcaatagcccattaccgcgataatgccatcatctaca

SEQ ID NO: 330014 - DNA, 75 bp, synthetic construct
  source 1..75: mol_type = other DNA
acgatctctgatatgcagaagcgtcaacgtgacgtagcagaactcgatgccagatatacaaaggagcttgctgat

SEQ ID NO: 330015 - DNA, 75 bp, synthetic construct
  source 1..75: mol_type = other DNA
gagcggctgatgacgatgcagaagcaactggaaggggcacaggactatatccgcactcagtgtactaagcaggct

SEQ ID NO: 330016 - DNA, 75 bp, synthetic construct
  source 1..75: mol_type = other DNA
ttctattttccaaatgtgctgaagtatgacccggatcagttaaggcaggagttagcaagttcaggtgatgatctt

SEQ ID NO: 330017 - DNA, 75 bp, synthetic construct
  source 1..75: mol_type = other DNA
tcgcccaaatccgtcaacaagccatcaatgatggtctgctggtggaccaatcttccatcggtaaacaagctggtt

SEQ ID NO: 330018 - DNA, 75 bp, synthetic construct
  source 1..75: mol_type = other DNA
gatggcctggttcttctgcaaactgcaacggttgctgaaattaccgctggtgtatctgaaactgctgtcggtgcc

SEQ ID NO: 330019 - DNA, 75 bp, synthetic construct
  source 1..75: mol_type = other DNA
aaacaggcagcaacagttgacgcaacggcaggttatgtcaaaaccaacgccgcttatacagtgacttatcagtaa

SEQ ID NO: 330020 - DNA, 75 bp, synthetic construct
  source 1..75: mol_type = other DNA
atcctatgttcgtgctgtaaatgaccagacggcaactgctggttatgtaaaaaccaataccgcatataccgttac

SEQ ID NO: 330021 - DNA, 75 bp, synthetic construct
  source 1..75: mol_type = other DNA
agttgacattctcccttatactgtcatcgctctttatttttatatctaaatcatcaatttatcttccgttggaat

SEQ ID NO: 330022 - DNA, 75 bp, synthetic construct
  source 1..75: mol_type = other DNA
gatcttcacgtagctcagcggtacatatcagatggcggttatctttggaatagcgggatgtttatgttcagagca

SEQ ID NO: 330023 - DNA, 75 bp, synthetic construct
  source 1..75: mol_type = other DNA
agttctgggagtcgattctggatttgtgaccgttgcgaaccagggaagcacaacaacagctatcatgctgagcat

SEQ ID NO: 330024 - DNA, 75 bp, synthetic construct
  source 1..75: mol_type = other DNA
agggggatatcgctgtgggtgctaatccgtgaccctgcaaataacaatatgtccagctacagaattgatggattt

SEQ ID NO: 330025 - DNA, 75 bp, synthetic construct
  source 1..75: mol_type = other DNA
gttagcaagttcaggtgatgatcttggagatgcattaatagcagtaaaacaaccattcaccttgtcaataagaag

SEQ ID NO: 330026 - DNA, 75 bp, synthetic construct
  source 1..75: mol_type = other DNA
gaagaattattttgatatacattttaaaaaaaccggttatgccgcaaacgcggcatggaaggccacacacaaaaa

SEQ ID NO: 330027 - DNA, 75 bp, synthetic construct
  source 1..75: mol_type = other DNA
gggattttggggctatcggtgacggtattgctgacgacactgcggcgatacagcgggcaattgactcggttccgg

SEQ ID NO: 330028 - DNA, 75 bp, synthetic construct
  source 1..75: mol_type = other DNA
ttccagtaatacagtaatttccgggaacgcattcaggggcaaaatctggattgatgacagcagcaacgtcactgt

SEQ ID NO: 330029 - DNA, 75 bp, synthetic construct
  source 1..75: mol_type = other DNA
ctactatccggtccttcgtggcggtttaacgaatacctcagtgtgtatgcaatggctggtatgggggttgcaaaa

SEQ ID NO: 330030 - DNA, 75 bp, synthetic construct
  source 1..75: mol_type = other DNA
agtcttcataaccttgatacctttaacaattttgtgaatgaaaactatttcaattcacctggagaatatgacgat

SEQ ID NO: 330031 - DNA, 75 bp, synthetic construct
  source 1..75: mol_type = other DNA
cgcaggatctgccgccggtactggctgaaccgcacgcaggatgggtgaatgcactggaacaagaatggttacgcc

SEQ ID NO: 330032 - DNA, 75 bp, synthetic construct
  source 1..75: mol_type = other DNA
ttgcctgatttacgcggtgagtttattcgtggctgggatgacgggagaggcattgaccccggaaggattctattg

SEQ ID NO: 330033 - DNA, 75 bp, synthetic construct
  source 1..75: mol_type = other DNA
ttcgtggctgggatgacgggcgggggattgatacaggtcgctctattttaagtattcagggatatgcaacggagg

SEQ ID NO: 330034 - DNA, 75 bp, synthetic construct
  source 1..75: mol_type = other DNA
cacgagggagtatcggtaatactggcgggagtgagacccgtccacgaaatattgcatttaactttatcgtaaggg

SEQ ID NO: 330035 - DNA, 75 bp, synthetic construct
  source 1..75: mol_type = other DNA
tgcgactttcgcccgtgtcactgcgcccttgtggcaatatcttgatgcactgcatccgtatttatggcgcgaagg

SEQ ID NO: 330036 - DNA, 75 bp, synthetic construct
  source 1..75: mol_type = other DNA
gtgcgtaacgaggggctacattctctcaatgatttttatttgttggcagaacggaaaacattacgttttgtccat

SEQ ID NO: 330037 - DNA, 75 bp, synthetic construct
  source 1..75: mol_type = other DNA
cacgtggtgacagcgggctgcgtgacagaaaaacggtacagaatgatgtgcagctctggcatcagtatgcacctg

SEQ ID NO: 330038 - DNA, 75 bp, synthetic construct
  source 1..75: mol_type = other DNA
atgcgccattgtgggtggttgctgggattgttatcgctgttttctttggcaacacatgccagtgactggcaggaa

SEQ ID NO: 330039 - DNA, 75 bp, synthetic construct
  source 1..75: mol_type = other DNA
cggatggatgctctgctgaaagccggcacattgcgcctgtcgctgacctttaaccccgcgcatgcgcagcaaaaa

SEQ ID NO: 330040 - DNA, 75 bp, synthetic construct
  source 1..75: mol_type = other DNA
ctgattatgctgacgcccgatcccgccgcattaaaagaagcgccggacgatgcgactttcgcccgtgtcactgct

SEQ ID NO: 330041 - DNA, 75 bp, synthetic construct
  source 1..75: mol_type = other DNA
taaccaggacccagtgaaatttatttccagagcaggcgtacccggtatcggtgcttcatttttcgcattagggtg

SEQ ID NO: 330042 - DNA, 75 bp, synthetic construct
  source 1..75: mol_type = other DNA
cgagcgtggatcgcgatggtgctggcccaggaaacggcaattatgctgctcgatgaaccaacgacctggctggat

SEQ ID NO: 330043 - DNA, 75 bp, synthetic construct
  source 1..75: mol_type = other DNA
cgtaccttaagccgcctgatgacgcctgctcacgggcatgtctggctggatggcgagcacattcaacattacgcc

SEQ ID NO: 330044 - DNA, 75 bp, synthetic construct
  source 1..75: mol_type = other DNA
gccgggagatatcaccgtgcaggagctggtggcgcgtgggcgttatccacatcaaccgctgtttacccgttggcg

SEQ ID NO: 330045 - DNA, 75 bp, synthetic construct
  source 1..75: mol_type = other DNA
gaacaggtgatccctgaaaacgagggtggttggtggatacgtgaagtgggcctgtttgatgaatccggggcatta

SEQ ID NO: 330046 - DNA, 75 bp, synthetic construct
  source 1..75: mol_type = other DNA
ggtaaaaccaccacagtagcgaggttgctggcggcgttaattcagatggcaggtggcgaacgttgtcgcattcgc

SEQ ID NO: 330047 - DNA, 75 bp, synthetic construct
  source 1..75: mol_type = other DNA
atcaaccgctgtttacccgctggcggaaagaagatgaagaggcagtcacaaaagcgatgcaggccacgggaatca

SEQ ID NO: 330048 - DNA, 75 bp, synthetic construct
  source 1..75: mol_type = other DNA
tctgtatgaagcgcgggaacaagtgaaacaagggattcgccagttactgccacattcgaaagaggtcggcgtgcc

SEQ ID NO: 330049 - DNA, 75 bp, synthetic construct
  source 1..75: mol_type = other DNA
tttcagctggcgtcgcacgatgctgttgcgttttcagaggatggaggccgcagaagaggtctaccatgaaataga

SEQ ID NO: 330050 - DNA, 75 bp, synthetic construct
  source 1..75: mol_type = other DNA
tggacggcggaagggaagacatcagcagagatagcgatgattttgtcaatctctgagaatacggtcaatttccat

SEQ ID NO: 330051 - DNA, 75 bp, synthetic construct
  source 1..75: mol_type = other DNA
atgaccgaatcagtagcccgtttgcgcggcgaacagttaaccctcggatatggcaaatataccgttgcggaaaat

SEQ ID NO: 330052 - DNA, 75 bp, synthetic construct
  source 1..75: mol_type = other DNA
cgagcgtggattgccatggtgctggcacaggaaacggcaattatgctgctcgacgagccgaccacctggctggat

SEQ ID NO: 330053 - DNA, 75 bp, synthetic construct
  source 1..75: mol_type = other DNA
gtaaacaacaagggcatctataccggcggtcaggtgaaaggcggtactgttcgtgctgatggtcgcctttatact

SEQ ID NO: 330054 - DNA, 75 bp, synthetic construct
  source 1..75: mol_type = other DNA
tctacgcggctatgacaaaagcggggtacttgttcttgttgacggcgtccgtcaactcagtgacatggcaaaaag

SEQ ID NO: 330055 - DNA, 75 bp, synthetic construct
  source 1..75: mol_type = other DNA
tggacgcagttgcaggcaacattactccaggtgcctcatcacggcagtaatacgtcatcatcattgccattcatt

SEQ ID NO: 330056 - DNA, 75 bp, synthetic construct
  source 1..75: mol_type = other DNA
ctcaatattgcatacctggccgacgttatgggtcagaagcccattaaactgggagcatcaccagccctgtgcacg

SEQ ID NO: 330057 - DNA, 75 bp, synthetic construct
  source 1..75: mol_type = other DNA
cactcattatggccaaattacccgtctccagggacggcagctattcccgtcgccaggcatcacactgtatggcga

SEQ ID NO: 330058 - DNA, 75 bp, synthetic construct
  source 1..75: mol_type = other DNA
atcaatgggttgatacctcgcatcaggggcaaataaccgtcgatttttcagcgcaaggctggcaggtacgcagcc

SEQ ID NO: 330059 - DNA, 75 bp, synthetic construct
  source 1..75: mol_type = other DNA
ttgcgttttagcgcccattggccgctacgaggtagcaacgacaagggaaataaccattcgtgtgtggtgaaggta

SEQ ID NO: 330060 - DNA, 75 bp, synthetic construct
  source 1..75: mol_type = other DNA
tgccattaattggcggaatctgctgtgctgctttttatgcctggctgacgggaatgcaacctcctgcattgcgta

SEQ ID NO: 330061 - DNA, 75 bp, synthetic construct
  source 1..75: mol_type = other DNA
aacagcaacggctggcacttcctgctcccctaacgggcttgtaggccgcgacagtacaggggcgatactttcgtg

SEQ ID NO: 330062 - DNA, 75 bp, synthetic construct
  source 1..75: mol_type = other DNA
cttttaaaacaatatacattagcaattattatatatttaattggcgggggaatgcatagttaccatgaagttcta

SEQ ID NO: 330063 - DNA, 75 bp, synthetic construct
  source 1..75: mol_type = other DNA
cgggtaacgtcaccgacaaaactctgcgcgaatttgccgaaacaggcgtggactttatctctgtcggcgcactga

SEQ ID NO: 330064 - DNA, 75 bp, synthetic construct
  source 1..75: mol_type = other DNA
gtacgcagcctaagggagcaaattttacctcgttggtatcatcagtggtttggcgtgccagtggataacgggtag

SEQ ID NO: 330065 - DNA, 75 bp, synthetic construct
  source 1..75: mol_type = other DNA
tgacgagcgtaatggctggcctgttgaacaagtctggaaagaaatgcataagcttttgccattctcaccggattc

SEQ ID NO: 330066 - DNA, 75 bp, synthetic construct
  source 1..75: mol_type = other DNA
gtgcaaatacatcccgactgcagggatatgttggtgggacgctaattagcgtgaatgccagcaataaccctgcat

SEQ ID NO: 330067 - DNA, 75 bp, synthetic construct
  source 1..75: mol_type = other DNA
gcttgatgtcgggcaagggctggcaatggtgatagccagaaacggcaaagcgattctctatgacacaggactggc

SEQ ID NO: 330068 - DNA, 75 bp, synthetic construct
  source 1..75: mol_type = other DNA
atggatctgaatatctcaaccttaacaaacaaggttgtatttaaggtggattttgcatcattacagaaagcacgc

SEQ ID NO: 330069 - DNA, 75 bp, synthetic construct
  source 1..75: mol_type = other DNA
atgttaagactcaagactcaagactcaagcctcaagactcaagtctcaagactcaagactcaagactcaagcctc

SEQ ID NO: 330070 - DNA, 75 bp, synthetic construct
  source 1..75: mol_type = other DNA
tggtggaaatacagcaaatatataaaaggattaacggctgaagaacgccatattgaagcgacgccagccaacaac

SEQ ID NO: 330071 - DNA, 75 bp, synthetic construct
  source 1..75: mol_type = other DNA
tcttattttattcgtaactttaaagagttctttggcattaccccgaaacaattttctttgaaagtcaaaaaacag

SEQ ID NO: 330072 - DNA, 75 bp, synthetic construct
  source 1..75: mol_type = other DNA
cagcttgcgcctctaccagaataacaccactgaaccgggcaatcccactctgacacatggtgacagcggcctgcg

SEQ ID NO: 330073 - DNA, 75 bp, synthetic construct
  source 1..75: mol_type = other DNA
gaacgtttcctatcaaatgtgaaagggcaatgctcccttgtgaataccttagcttttcaaaatactccagtagag

SEQ ID NO: 330074 - DNA, 75 bp, synthetic construct
  source 1..75: mol_type = other DNA
agatcactgctactgacggcatgaccactcattacggtcaaattactcatctacaaggtcgacgtatattccctg

SEQ ID NO: 330075 - DNA, 75 bp, synthetic construct
  source 1..75: mol_type = other DNA
atatcttccgcaagcggtttgtgctggacaactgtggtcaatgaaactcaaagttcgtgcagttcatggtcaact

SEQ ID NO: 330076 - DNA, 75 bp, synthetic construct
  source 1..75: mol_type = other DNA
cgagtgaatggaaaagtggcactcgcatcggcatcgcgctataacgcatggcgactgccctctaacaaagttaag

SEQ ID NO: 330077 - DNA, 75 bp, synthetic construct
  source 1..75: mol_type = other DNA
acctcgctgttgccgcgcgttattgcttatgcttcgtatgccttcctcggctacgaatatattatgacgccggtt

SEQ ID NO: 330078 - DNA, 75 bp, synthetic construct
  source 1..75: mol_type = other DNA
gtttcgcaacggcttttgatagccgcttctacatgaaaaatgcctctcacgatcccagcgaccaactcttcctga

SEQ ID NO: 330079 - DNA, 75 bp, synthetic construct
  source 1..75: mol_type = other DNA
accgggagagagtgggcggcggttatcacccatgttttgcctgtaaatgaaattatcgctgataccgaaaactgg

SEQ ID NO: 330080 - DNA, 75 bp, synthetic construct
  source 1..75: mol_type = other DNA
ttgctgaagtatcgcctgatatctgcttttgttttaatacctgtcgtcatcgcggcgctgtttttattgccgccg

SEQ ID NO: 330081 - DNA, 75 bp, synthetic construct
  source 1..75: mol_type = other DNA
ccgcaacaatatggcgtaaatccaaaacattgcgcattatttttggcgtgctaactattgttcccttcttttggg

SEQ ID NO: 330082 - DNA, 75 bp, synthetic construct
  source 1..75: mol_type = other DNA
accgagagcatgtttaagcgtgaagcaggaattaaggacagcggtcatttaattccaggacacggcggtattttg

SEQ ID NO: 330083 - DNA, 75 bp, synthetic construct
  source 1..75: mol_type = other DNA
caatcaatatcagagcgaaagcctcacagcgtgacctgattgatatggcagcgaatctggtcgcaaaatcgcgca

SEQ ID NO: 330084 - DNA, 75 bp, synthetic construct
  source 1..75: mol_type = other DNA
agcagggctgataggtgagcgcatcagccaggattttcagcggctggaagagtcagtcgcaaacatgaaggcaaa

SEQ ID NO: 330085 - DNA, 75 bp, synthetic construct
  source 1..75: mol_type = other DNA
tttctccgggcaaaacctggcagggctttatcggtggacttgctaccgcagcagtcatctcatggggttatggga

SEQ ID NO: 330086 - DNA, 75 bp, synthetic construct
  source 1..75: mol_type = other DNA
tttgttccctaccctgcaactgtcgggtgcagaaacgggctgtttgtcgtgacactgcacgatttcgaccttgaa

SEQ ID NO: 330087 - DNA, 75 bp, synthetic construct
  source 1..75: mol_type = other DNA
ctgcaaattctgccacaacagataaacggcaatgtgttcagttacacctcgtccggtttcaaaagcgcctggcgt

SEQ ID NO: 330088 - DNA, 75 bp, synthetic construct
  source 1..75: mol_type = other DNA
ctgccgcaacagcttcatggcaatgtcttctcttacacatcgtccggcttcaaaagcgcatggcgtactgcgatt

SEQ ID NO: 330089 - DNA, 75 bp, synthetic construct
  source 1..75: mol_type = other DNA
catcagccgatttttcgaacttggtacattgaatgtcattgaagttgccgctatttcaggccatcgctccctgaa

SEQ ID NO: 330090 - DNA, 75 bp, synthetic construct
  source 1..75: mol_type = other DNA
gaaagcccgtaattacctgcaaatgctgccgacacagcttaacggtaatattttttcttatacctcttcgggatt

SEQ ID NO: 330091 - DNA, 75 bp, synthetic construct
  source 1..75: mol_type = other DNA
gatgacattaccactgttgatattgccaattatcgggatcaacggttggcgcaaattaacccacgaacggggcgt

SEQ ID NO: 330092 - DNA, 75 bp, synthetic construct
  source 1..75: mol_type = other DNA
ggaatgaaaacaatactcgacaggaactacaacgccacagcggcggtgtatcagaaagttgtgacactggaagat

SEQ ID NO: 330093 - DNA, 75 bp, synthetic construct
  source 1..75: mol_type = other DNA
gtagtgctataacgcaaaaagacagaaaatataatagcagttattcaaagttggatcatgtcaaaggtaaagcat

SEQ ID NO: 330094 - DNA, 75 bp, synthetic construct
  source 1..75: mol_type = other DNA
ccactttctccacatgtttttagatctgatcgagtagttcaattcatccccgatcataaaaccatgatgctacaa

SEQ ID NO: 330095 - DNA, 75 bp, synthetic construct
  source 1..75: mol_type = other DNA
agaacgtaaagctgcaacattgagcatgttcgatccatctttgcttgagaaactcagaagcgcacaaacggggta

SEQ ID NO: 330096 - DNA, 75 bp, synthetic construct
  source 1..75: mol_type = other DNA
ctgaaaacatgagcgaaaagattactacgacaatttttactaacaaccctaaaattggtcgtcaggggttactat

SEQ ID NO: 330097 - DNA, 75 bp, synthetic construct
  source 1..75: mol_type = other DNA
ataggcgcgttcagacctgaatggaaatataaactactatggtctgttccctttaaggttggtaaaagcttatgt

SEQ ID NO: 330098 - DNA, 75 bp, synthetic construct
  source 1..75: mol_type = other DNA
ccaaaatcgagctggatcaagattacatcgatgaacgtctgccggtcgcagggaaagagatgatctaccgtcagg

SEQ ID NO: 330099 - DNA, 75 bp, synthetic construct
  source 1..75: mol_type = other DNA
ctttggtggatggctggaccgcttcgacgtcgagcacgcattgcaggcagcggggatcaaattcaaaacagcggg

SEQ ID NO: 330100 - DNA, 75 bp, synthetic construct
  source 1..75: mol_type = other DNA
atgccttgcaacaaccacagggactggtgctggtaactggccctacaggcagcggcaaaacggtcacgctttata

SEQ ID NO: 330101 - DNA, 75 bp, synthetic construct
  source 1..75: mol_type = other DNA
gcgtaccaattgactacctgttagcggcttcgctgatggctattcctggcggtatcctgtttgcacgtattctta

SEQ ID NO: 330102 - DNA, 75 bp, synthetic construct
  source 1..75: mol_type = other DNA
ccgcgtttcatgatatgcagaatgcgatgttgcaatattccatgtatatgacgtcgcaaggaatgactcgcgaaa

SEQ ID NO: 330103 - DNA, 75 bp, synthetic construct
  source 1..75: mol_type = other DNA
gggctgtgcgattgccgctggcgtgggggccgggatttggtcatccatggacgaaacgggcgaacggctggtgcg

SEQ ID NO: 330104 - DNA, 75 bp, synthetic construct
  source 1..75: mol_type = other DNA
aggttaacggacaacgattttcttatgggattaccggtgggaatgtttttgttagttgtcttgtttttgtttttt

SEQ ID NO: 330105 - DNA, 75 bp, synthetic construct
  source 1..75: mol_type = other DNA
tcgatgcccgacgcaagcaaaccagcaagattgctccctattttgttccctacccggcaacggtcgagaacagaa

SEQ ID NO: 330106 - DNA, 75 bp, synthetic construct
  source 1..75: mol_type = other DNA
acgggacaggatgtgtaattgtaataccgtcacacgcgacgctattacaattaccatctggtcagggcttcgccc

SEQ ID NO: 330107 - DNA, 75 bp, synthetic construct
  source 1..75: mol_type = other DNA
gatctttctcggcgatcgtgatcaactggcctcggttgaggctggggctgtgctgggcgatatttgtgcttatgc

SEQ ID NO: 330108 - DNA, 75 bp, synthetic construct
  source 1..75: mol_type = other DNA
gcttgctggcttcacaagcggtcagccggggagatgaaccaacgccgatgatcctctgtggtgatcgtctttatt

SEQ ID NO: 330109 - DNA, 75 bp, synthetic construct
  source 1..75: mol_type = other DNA
actggtggcagaaagatattaacagcacgggtaatgactccaacttactgatagtgttttatgttcagataatgc

SEQ ID NO: 330110 - DNA, 75 bp, synthetic construct
  source 1..75: mol_type = other DNA
tggcgattgatgataaccgccgggcgctggacgatgccgctgtgctaaatgccgcctgttacatgcaggtggttg

SEQ ID NO: 330111 - DNA, 75 bp, synthetic construct
  source 1..75: mol_type = other DNA
acccctatgcgtagcgtactttcactctggtgaactgatgatgaggttcgttttcttctggccgttttttatgtc

SEQ ID NO: 330112 - DNA, 75 bp, synthetic construct
  source 1..75: mol_type = other DNA
ccactggatgagacgctgactcatttgagtggaaaggatgttgccggttttctcgcataccttggtttgggagaa

SEQ ID NO: 330113 - DNA, 75 bp, synthetic construct
  source 1..75: mol_type = other DNA
atgtctgcgtgttttggtctcacaagactatacaccagatagcggggctgttggttatattgcctgtgcaggttt

SEQ ID NO: 330114 - DNA, 75 bp, synthetic construct
  source 1..75: mol_type = other DNA
aatacaggatttaccgctcaggtcatgatgaatattgctgtaaatacaaacacctcagacgccatgtttttagct

SEQ ID NO: 330115 - DNA, 75 bp, synthetic construct
  source 1..75: mol_type = other DNA
tcaggtaaacaaccgctggacaatacgcttaccaatttgagtggaaaggatgtagctggtcttctcacatacctt

SEQ ID NO: 330116 - DNA, 75 bp, synthetic construct
  source 1..75: mol_type = other DNA
tccaactggaaaacgtgttacaggtggcggcggaatatgcacctcacgaactggttacatatggcttaccaggtc

SEQ ID NO: 330117 - DNA, 75 bp, synthetic construct
  source 1..75: mol_type = other DNA
aaggaatgaacgttttttaaaatcttttgtaaaaggtgactactatcagaatttgatcgttgaaaccgatcgtgt

SEQ ID NO: 330118 - DNA, 75 bp, synthetic construct
  source 1..75: mol_type = other DNA
atttattcagcatcaatactgcgacactgggctataaaacgccgttgcccgccatcattgatgcctgcgccgcac

SEQ ID NO: 330119 - DNA, 75 bp, synthetic construct
  source 1..75: mol_type = other DNA
atcctcggtatcatcgtcaccttctcgctgattctggcgttaatctgcgttactcagccgtttaacccgctggcg

SEQ ID NO: 330120 - DNA, 75 bp, synthetic construct
  source 1..75: mol_type = other DNA
aagattccgtcacggcgcaaattctctgacgttgattaacccgacaccctattacctgacggtaacagagttaaa

SEQ ID NO: 330121 - DNA, 75 bp, synthetic construct
  source 1..75: mol_type = other DNA
cggaagcagcataacttatcgaacaataaatgattatggtgcacttaccccaaaaatgaagggcgtaatggaata

SEQ ID NO: 330122 - DNA, 75 bp, synthetic construct
  source 1..75: mol_type = other DNA
gcccgctggcacaacgatctcgaacatcaggcgacctggcttgaaagtaatcaactttcggatttcctcactgcg

SEQ ID NO: 330123 - DNA, 75 bp, synthetic construct
  source 1..75: mol_type = other DNA
cacaactggctttatattcgaacttaacaacaaacgcttcacgcttctcaataccggctccgggtctttagccgt

SEQ ID NO: 330124 - DNA, 75 bp, synthetic construct
  source 1..75: mol_type = other DNA
gatccggtcagccggtgccattgccgaaagatatgtcgctgtggccgtcggtggatatctttgtcccgacttaca

SEQ ID NO: 330125 - DNA, 75 bp, synthetic construct
  source 1..75: mol_type = other DNA
gcgcagagagttgcagggcgaagatcttcagcagatcgcccgtcagcttgccgccagtaacatgagcgtttccgg

SEQ ID NO: 330126 - DNA, 75 bp, synthetic construct
  source 1..75: mol_type = other DNA
cttcagcagatcgcccgccagcttgccgtcaataacatgcgcgtttccggtttatgccgtagcacctactacacc

SEQ ID NO: 330127 - DNA, 75 bp, synthetic construct
  source 1..75: mol_type = other DNA
tgtgcacgctacgtcaggcgctggactggtgtgatgaactcgatcctgatggtgaatttggtctcggcgtggcgg

SEQ ID NO: 330128 - DNA, 75 bp, synthetic construct
  source 1..75: mol_type = other DNA
tggataaatcaaaattgactgagaatacgctacagctcgcaattatcagccgcattaaactgtactatcgcccgg

SEQ ID NO: 330129 - DNA, 75 bp, synthetic construct
  source 1..75: mol_type = other DNA
cggttaaattaccttctgatgcaggaagcaacattacttatcgaacaataaatgattatggcgcacttaccccca

SEQ ID NO: 330130 - DNA, 75 bp, synthetic construct
  source 1..75: mol_type = other DNA
tgccggaactcgggttcttgaaaatgcattggtgcctccaatgggcgaaagcacggttaaattgccttctgatgc

SEQ ID NO: 330131 - DNA, 75 bp, synthetic construct
  source 1..75: mol_type = other DNA
tgccctggtgtgggggctgaatctgtcccgccatgtgcatatccggaagtctgccattaaccggttatggggctg

SEQ ID NO: 330132 - DNA, 75 bp, synthetic construct
  source 1..75: mol_type = other DNA
gtgacctgcagaaagagaaaaccctgggtggagattaaggagccgatactacagatggaaaataccacgcataat

SEQ ID NO: 330133 - DNA, 75 bp, synthetic construct
  source 1..75: mol_type = other DNA
aaaatgatcgtccgtaaaggtgaactatctttttacgatatttttaccctcgctcgcgccgaatcaacatcttaa

SEQ ID NO: 330134 - DNA, 75 bp, synthetic construct
  source 1..75: mol_type = other DNA
agagcggaacgtctggcgctgcttgcatgcctgctggccgttattccggcacttaaccttgcctccagtgatgtg

SEQ ID NO: 330135 - DNA, 75 bp, synthetic construct
  source 1..75: mol_type = other DNA
atgtttctggccgggcgtggagcctttccgttgtttgccctggtgtgggggctgaatctgtcccgtcatgcgcat

SEQ ID NO: 330136 - DNA, 75 bp, synthetic construct
  source 1..75: mol_type = other DNA
ggtcttgtgatgacggtgctgaccgttggtctggtgtcgtgtacagggaaatcattaccccgtttctggcccggg

SEQ ID NO: 330137 - DNA, 75 bp, synthetic construct
  source 1..75: mol_type = other DNA
ggcgaatggtataacacgcgatttgtccctgctgcgctggttgaagccatactgaactcgccgcgtgtcgcgaat

SEQ ID NO: 330138 - DNA, 75 bp, synthetic construct
  source 1..75: mol_type = other DNA
ctggccgggcgtggagcctttccgttgtttgccctggtgtgggggctgaatctgtcccgccatgcgcatatcagg

SEQ ID NO: 330139 - DNA, 75 bp, synthetic construct
  source 1..75: mol_type = other DNA
cgcattctgcatctggaccagacgtggatgtttctggccgggcgtggggcctttccgctgtttgccctggtgtgg

SEQ ID NO: 330140 - DNA, 75 bp, synthetic construct
  source 1..75: mol_type = other DNA
tatcaggttcagtctggctccttgtcgtgctattcatcctgctcaacggtttcttctttttcgatgtctacccac

SEQ ID NO: 330141 - DNA, 75 bp, synthetic construct
  source 1..75: mol_type = other DNA
gcgcgaaaaacgcgacaacaagccccgctttagtatcagttttatccgcaaacatccggggctgtttattggcat

SEQ ID NO: 330142 - DNA, 75 bp, synthetic construct
  source 1..75: mol_type = other DNA
atgaccgaaatacaacgcctgctgaccgaaacaattgagtctctaaatacccgcgaaaaacgcgacaacaaaccc

SEQ ID NO: 330143 - DNA, 75 bp, synthetic construct
  source 1..75: mol_type = other DNA
cggcataaaatcgcacacccacagcgccagcgcatccagtacggatttggggacgaaaaccacatcgtcgtttga

SEQ ID NO: 330144 - DNA, 75 bp, synthetic construct
  source 1..75: mol_type = other DNA
taatggactaaaagttggtggtagtgttactggtaatttgaccggaaacgcagatactgcgaccaagatcaagac

SEQ ID NO: 330145 - DNA, 75 bp, synthetic construct
  source 1..75: mol_type = other DNA
cccagctgttgcgttagctgcgttaacagcaaaagcaattcactcagatgaagatccattattactaatattagc

SEQ ID NO: 330146 - DNA, 75 bp, synthetic construct
  source 1..75: mol_type = other DNA
ctggaaaagctgggcctgaacagtgaagagcaaaaagaagacaccaactatctggatggcattcagggtttgctg

SEQ ID NO: 330147 - DNA, 75 bp, synthetic construct
  source 1..75: mol_type = other DNA
ccgccaggtgttccgctgccgtggccatcagatacaccacctgcaggttatgcaatcatgcaggggcagacgttt

SEQ ID NO: 330148 - DNA, 75 bp, synthetic construct
  source 1..75: mol_type = other DNA
ccttcaaatattggggcattggcattaactggagggactctttcaggtggtttaactgctgctggtgaggttatt

SEQ ID NO: 330149 - DNA, 75 bp, synthetic construct
  source 1..75: mol_type = other DNA
tgcctggagtcaacgctaccggtaatcaaaacactacaggtaatgctgcgaccgccacgaaacttcaggcagcca

SEQ ID NO: 330150 - DNA, 75 bp, synthetic construct
  source 1..75: mol_type = other DNA
tgcgtcgccgcctgaaaggaacgcagggactggtcattgttgacgaagctgatcaccttgacaccgaagcgctgg

SEQ ID NO: 330151 - DNA, 75 bp, synthetic construct
  source 1..75: mol_type = other DNA
aaggtgaacgtgttaatgaagattatctgcgtcaggctttccgtgaattagacctggatgttgatatttcaaccc

SEQ ID NO: 330152 - DNA, 75 bp, synthetic construct
  source 1..75: mol_type = other DNA
aaaaatatcatgcagttgcagaactacctgaaccgccccgctttgtggaaacgcagacggtaaaacaaatctgga

SEQ ID NO: 330153 - DNA, 75 bp, synthetic construct
  source 1..75: mol_type = other DNA
atgatgaaaactgttaaacatcttctgtgctgtgccattgccgccagcgcattaatttccaccggggtgcatgct

SEQ ID NO: 330154 - DNA, 75 bp, synthetic construct
  source 1..75: mol_type = other DNA
tctggtattcgtggtgattttctggcggacacaccatcgcgaccaccgtaactggctggctctacggctattcgt

SEQ ID NO: 330155 - DNA, 75 bp, synthetic construct
  source 1..75: mol_type = other DNA
gtaaaggcgaacgtgttaatgaggattatctgcgtgaggcttacaaagagttagaccaggacgttgatgtttcga

SEQ ID NO: 330156 - DNA, 75 bp, synthetic construct
  source 1..75: mol_type = other DNA
ggatgtttctggtcgggcgtggagccttcccgctttttgccctggtatgggggctgaatctgtcccgccatgcgc

SEQ ID NO: 330157 - DNA, 75 bp, synthetic construct
  source 1..75: mol_type = other DNA
ctctagccgtctacgtgatatgacaacgacagcccgtgatcttactgaccttattaatcgcatggggcaagcggc

SEQ ID NO: 330158 - DNA, 75 bp, synthetic construct
  source 1..75: mol_type = other DNA
catttattgttgttaccagccttgctgaaggtacgaaaacattgccaacaacgatatctgaatctgtcaagtcca

SEQ ID NO: 330159 - DNA, 75 bp, synthetic construct
  source 1..75: mol_type = other DNA
ttgcagatgcagcagatgatgcagctggcgcaatgcagcaaactatcgcgacagctgcaaaagcggccagtcgta

SEQ ID NO: 330160 - DNA, 75 bp, synthetic construct
  source 1..75: mol_type = other DNA
agagcggaacgtctggcgctgttggcctgcctgctggctgttattccggctcttaaccttgccaccagtgatgca

SEQ ID NO: 330161 - DNA, 75 bp, synthetic construct
  source 1..75: mol_type = other DNA
agagcggaacgtctggcgctgttggcctgcctgctggcagttattccggcgcttaaccttgccaccagtgatgca

SEQ ID NO: 330162 - DNA, 75 bp, synthetic construct
  source 1..75: mol_type = other DNA
tctgaatctgtcaagtccaatcatgatatcagtgagcagcgtgctaaatctgtagaaaatctccaggcgtcgaat

SEQ ID NO: 330163 - DNA, 75 bp, synthetic construct
  source 1..75: mol_type = other DNA
agtcgctggaaaacttccagcaggggaatctggagctgtataaacaagacgttcgcagaacgcaggatgatatca

SEQ ID NO: 330164 - DNA, 75 bp, synthetic construct
  source 1..75: mol_type = other DNA
gatgatggctggtttctgggatctgtccacgataccggcgacggacccgtctgctactggtttcgtcataccaca

SEQ ID NO: 330165 - DNA, 75 bp, synthetic construct
  source 1..75: mol_type = other DNA
atatcggaatgtacctttactgttgatattgaaaaacttcactgtactggtgaggtgcttcaatgtccaattaca

SEQ ID NO: 330166 - DNA, 75 bp, synthetic construct
  source 1..75: mol_type = other DNA
attagagcaggtcaaatgcattctataactaacccaggtattgtcccactgataattattgagatacaggcaggt

SEQ ID NO: 330167 - DNA, 75 bp, synthetic construct
  source 1..75: mol_type = other DNA
ggatgtttctggccgggcgtggagcctttccgttgtttgccctggtgtgggggctgaatctgtcccgccatgcgc

SEQ ID NO: 330168 - DNA, 75 bp, synthetic construct
  source 1..75: mol_type = other DNA
tatggctacaacaacgaaagcggccagccgtgcatctgatgttgctgatgatgttgcgagagcctctgaagcggc

SEQ ID NO: 330169 - DNA, 75 bp, synthetic construct
  source 1..75: mol_type = other DNA
agagcggaacgtctggcgctgttggcctgcctgctggctgttattccggcgcttaaccttgcctccagtgatgca

SEQ ID NO: 330170 - DNA, 75 bp, synthetic construct
  source 1..75: mol_type = other DNA
tatctggcaggctttccctggtatgaggggaatatcctgtttgcctttgcagtggcggcacaggtgctgacgtgg

SEQ ID NO: 330171 - DNA, 75 bp, synthetic construct
  source 1..75: mol_type = other DNA
tattccggcgcttaaccttgccaccagtgatgcagcggcggtggccggccttgtgatgacggtgctgaccgttgg

SEQ ID NO: 330172 - DNA, 75 bp, synthetic construct
  source 1..75: mol_type = other DNA
tccgttgtttgcccttgtgtggggactgaatctgtcccgtcatgcgcatatccagcaggtggccattaaccggct

SEQ ID NO: 330173 - DNA, 75 bp, synthetic construct
  source 1..75: mol_type = other DNA
atatccggcagtcggccattaaccggctgtggggatgggcagttttttcccagttctggtattactttgccggct

SEQ ID NO: 330174 - DNA, 75 bp, synthetic construct
  source 1..75: mol_type = other DNA
attaccccgtttctggcccggggattttttcccggtattctacgcctgtcatctggctgtgctgggcgttctggc

SEQ ID NO: 330175 - DNA, 75 bp, synthetic construct
  source 1..75: mol_type = other DNA
gctgtttgccctggtgtgggggctgaatctgtcccgtcatacgcatatccggcagtcggccattaaccggctgtg

SEQ ID NO: 330176 - DNA, 75 bp, synthetic construct
  source 1..75: mol_type = other DNA
agagcggaacgtctggcgctgttggcctgcctgctggcggttattccggctcttaaccttgcctccagtgatgca

SEQ ID NO: 330177 - DNA, 75 bp, synthetic construct
  source 1..75: mol_type = other DNA
agagcggaacgtctggcgctgttggcctgcctgctggcggttattccggcacttaaccttgccaccagtgatgca

SEQ ID NO: 330178 - DNA, 75 bp, synthetic construct
  source 1..75: mol_type = other DNA
agagcggaacgtctggcgctgttggcctgcctgctggccgttattccggcgcttaaccttgcccccagtgatgca

SEQ ID NO: 330179 - DNA, 75 bp, synthetic construct
  source 1..75: mol_type = other DNA
tttgcctttgcagtcgcagcacaggtgctgacgtggtgtgagacgcgcagcctgtggtgtactgcagcggccata

SEQ ID NO: 330180 - DNA, 75 bp, synthetic construct
  source 1..75: mol_type = other DNA
agagcggaacgtctggcgctgttggcctgcctgctggcggttattccggcgcttaaccttgccgccagtgatgca

SEQ ID NO: 330181 - DNA, 75 bp, synthetic construct
  source 1..75: mol_type = other DNA
agagcggaacgtctggcgctgttggcctgcctgctggcggttattccggcccttaaccttgcccccagtgatgca

SEQ ID NO: 330182 - DNA, 75 bp, synthetic construct
  source 1..75: mol_type = other DNA
aataccaggactgcaatctggtgcaacatgcaatggtaaccgcgttatcaacagtgctgcctgcctgtgtactcg

SEQ ID NO: 330183 - DNA, 75 bp, synthetic construct
  source 1..75: mol_type = other DNA
ttacagctgaaaattacatgaatgataacggtagtcctgagcttaattaccaagactatctgaaaatatataggt

SEQ ID NO: 330184 - DNA, 75 bp, synthetic construct
  source 1..75: mol_type = other DNA
ctgacgcacggatgacggcaggggtggtaaacgctattgctgcatatcatctggaactgctgcaggaacaggcac

SEQ ID NO: 330185 - DNA, 75 bp, synthetic construct
  source 1..75: mol_type = other DNA
caggggaaagccattgcgcttaaaaccggagcagccgcggcgaaaagcgaatatctggtgtgtatcgatggcgac

SEQ ID NO: 330186 - DNA, 75 bp, synthetic construct
  source 1..75: mol_type = other DNA
atgccgcctgactacaacctgctggaatatcatcggggggcgattacggccccggccgggtgcggtaaaacacaa

SEQ ID NO: 330187 - DNA, 75 bp, synthetic construct
  source 1..75: mol_type = other DNA
gtgcctgctgaggtagcctgggtaccgttacaggcagaaactgctgttcagcaacgtcttactgccgcccagacc

SEQ ID NO: 330188 - DNA, 75 bp, synthetic construct
  source 1..75: mol_type = other DNA
gtgaagaaaatcatttgtctggtcattacactactaatgacactccccgcttacgcgacgttaacggctcatgaa

SEQ ID NO: 330189 - DNA, 75 bp, synthetic construct
  source 1..75: mol_type = other DNA
catcacggtcgcaagcataaagaagatatggaagcgcgccacgaacagttaaccaaaggcggcaccatcctctga

SEQ ID NO: 330190 - DNA, 75 bp, synthetic construct
  source 1..75: mol_type = other DNA
tcagtgagcaggcactctgcggagcaccatcatggactgatgtggtgcggcaactgcgtcatgcaatcggggacc

SEQ ID NO: 330191 - DNA, 75 bp, synthetic construct
  source 1..75: mol_type = other DNA
gcgacgatgactgttctgagtgtgaaattcccgtcgccactctgagccttactcatcgcttccttcacctcttct

SEQ ID NO: 330192 - DNA, 75 bp, synthetic construct
  source 1..75: mol_type = other DNA
ccgctgcattgcagccatggacgatgcaggctacgacgaggatgatttcaaaaaacccgttcgcgtaaatttccc

SEQ ID NO: 330193 - DNA, 75 bp, synthetic construct
  source 1..75: mol_type = other DNA
gcagaaaatttttgctggtcgatctgttacaatacataattctttcagaaatttttataaaatacgtaatgcaat

SEQ ID NO: 330194 - DNA, 75 bp, synthetic construct
  source 1..75: mol_type = other DNA
ttaggggattcatcagtgcggagtatagaagaaggcgtcatacgccagacgggtaaacctttgccgcctgtggtt

SEQ ID NO: 330195 - DNA, 75 bp, synthetic construct
  source 1..75: mol_type = other DNA
gtaaacctttgccgcctgtggttattgctgatgacggtaaagcgccacaagcggtgccgggtgatgctgccaact

SEQ ID NO: 330196 - DNA, 75 bp, synthetic construct
  source 1..75: mol_type = other DNA
tttctcattctgtttatcgtgttgatgacaccgatatccccgctaatttttgtctggataatcggaaaaataatt

SEQ ID NO: 330197 - DNA, 75 bp, synthetic construct
  source 1..75: mol_type = other DNA
cctcgcttgcagataaggtgacggaagggagggttcttaatgcagaaaaagcaattagcatgttctgcaagaaaa

SEQ ID NO: 330198 - DNA, 75 bp, synthetic construct
  source 1..75: mol_type = other DNA
tattttgatgcaattggtctgacagaaacaaccatgtcgctcacagacaagaataccccggttgtcgtatctgtt

SEQ ID NO: 330199 - DNA, 75 bp, synthetic construct
  source 1..75: mol_type = other DNA
agttctgaatgcagggaaagccattgagtcattttgtaaaaaaaaccgagttaatatattaagttcgtctgggga

SEQ ID NO: 330200 - DNA, 75 bp, synthetic construct
  source 1..75: mol_type = other DNA
gaccagtcgtaaccgataaagtctacgatccgcgcaaggataaggcagaccctgacgccaaagagcaactgatgc

SEQ ID NO: 330201 - DNA, 75 bp, synthetic construct
  source 1..75: mol_type = other DNA
gaacttgtcggcgctgcactttcgcagtaatcaactgcctaatcaggtgtctgatgcaatgcacgcctggggtat

SEQ ID NO: 330202 - DNA, 75 bp, synthetic construct
  source 1..75: mol_type = other DNA
gttttaggcgcagcgctgaaagaagcgattagcaataaccaactgaaactggtttaccagccgcaaatcttcgca

SEQ ID NO: 330203 - DNA, 75 bp, synthetic construct
  source 1..75: mol_type = other DNA
acacagctgatattgtgatgtgttcccttaaaaagcccagcgcggcgaaaaaccgctggaaaaaccacttgcgca

SEQ ID NO: 330204 - DNA, 75 bp, synthetic construct
  source 1..75: mol_type = other DNA
tgttctcattttctggaattgccagagagggaatcaaagataagcgcagcgcggcgcaaaaccgctggaaaaaca

SEQ ID NO: 330205 - DNA, 75 bp, synthetic construct
  source 1..75: mol_type = other DNA
taaaaaaacaagagttaacacatcagtttgataatatgatgaaaagctttattatgtatcttacccttcaggatg

SEQ ID NO: 330206 - DNA, 75 bp, synthetic construct
  source 1..75: mol_type = other DNA
aagtttcataaacgattacggtgggcgcccagtcttacaatttagctgcagtggggatcgttgtacggcggtgaa

SEQ ID NO: 330207 - DNA, 75 bp, synthetic construct
  source 1..75: mol_type = other DNA
ggtcgtgtagccctgatgatttaatggtagagttagtattatcgcagaaaaaaatatgtagtaagcttacttctt

SEQ ID NO: 330208 - DNA, 75 bp, synthetic construct
  source 1..75: mol_type = other DNA
gattactatattaaattaacttcagatacctttaaaaagagtaaattaattgcattaccagaaattaagattgct

SEQ ID NO: 330209 - DNA, 75 bp, synthetic construct
  source 1..75: mol_type = other DNA
cattgcgtattgatgatgaatgttcatttcctgcaatgaggttatcagcgaatagcaaacttaaaaataagattg

SEQ ID NO: 330210 - DNA, 75 bp, synthetic construct
  source 1..75: mol_type = other DNA
cggaatgtttgatgtgtcacatatgaccatcgtcgatcttcgcggcagccgcacccgggagtttctgcgttatct

SEQ ID NO: 330211 - DNA, 75 bp, synthetic construct
  source 1..75: mol_type = other DNA
ccttcaggtgaagttatcgacagcacgctattgccgccaaatctgctgaataatggcacaacggagcaaagtgat

SEQ ID NO: 330212 - DNA, 75 bp, synthetic construct
  source 1..75: mol_type = other DNA
aaggaagttgctgatgaactgggcatcggcattgctacgctctatcgcaagattaagaaatatgagttgttaaac

SEQ ID NO: 330213 - DNA, 75 bp, synthetic construct
  source 1..75: mol_type = other DNA
ttaattcctgccataaaaatgtatctggcgtcaatgataaacgaggttctgccagatgggtaagttcagataatg

SEQ ID NO: 330214 - DNA, 75 bp, synthetic construct
  source 1..75: mol_type = other DNA
atattgttgttgattttgggaatattaatcctgagcacgtggacaactcacgtggtgaagtcacaaaaaccataa

SEQ ID NO: 330215 - DNA, 75 bp, synthetic construct
  source 1..75: mol_type = other DNA
aggggaaatgtttatatccccccatgcaccattaataacgggcagaatattgttgtcgattttgggaatattaat

SEQ ID NO: 330216 - DNA, 75 bp, synthetic construct
  source 1..75: mol_type = other DNA
atttcctgcaatgaggttatcagcgaacagcaaactcagagataagatcgcagagattcatgctgatattcaatt

SEQ ID NO: 330217 - DNA, 75 bp, synthetic construct
  source 1..75: mol_type = other DNA
agttttggtttcaaacagttaaaaacagatacattagtctgcgattttgatggctatacacctaaaaataatgtt

SEQ ID NO: 330218 - DNA, 75 bp, synthetic construct
  source 1..75: mol_type = other DNA
atggacatctttatagttttttaattctgtgtgctatcaacagagtattaccacttatgtcttccttcattaagg

SEQ ID NO: 330219 - DNA, 75 bp, synthetic construct
  source 1..75: mol_type = other DNA
atctttatggtcaggagatggacgaaaccatctctcctttagccgccaacatgggctggactatcgcctgggaac

SEQ ID NO: 330220 - DNA, 75 bp, synthetic construct
  source 1..75: mol_type = other DNA
gcgtttctcacgcctcatggagattaacacgttctagtgaaatagcgaaagttgtcaaacctgagacatatggtg

SEQ ID NO: 330221 - DNA, 75 bp, synthetic construct
  source 1..75: mol_type = other DNA
gctgatagcaaacgtcgcgtgacgttagctcgtattcttactgatccaacaagctttggtacagaagcatcttct

SEQ ID NO: 330222 - DNA, 75 bp, synthetic construct
  source 1..75: mol_type = other DNA
cgagccgaaagtctttgtagaaaatacaatgtgcttttgaaggcattaagtaatcttgggtgctttttttttacg

SEQ ID NO: 330223 - DNA, 75 bp, synthetic construct
  source 1..75: mol_type = other DNA
atatcagtaaacttcctcaggacagggaatcactgttttattttaatctccgggaaataccaccgaggagtgaaa

SEQ ID NO: 330224 - DNA, 75 bp, synthetic construct
  source 1..75: mol_type = other DNA
atggtcaggctgagtaccacaccggatatcagtaaacttcctcaggacagggaatcactgttttattttaatctc

SEQ ID NO: 330225 - DNA, 75 bp, synthetic construct
  source 1..75: mol_type = other DNA
atcaaccgcctgccacaggacagggaatcccttttttacttcagtcttcgggaaattccccctaaaagcgataag

SEQ ID NO: 330226 - DNA, 75 bp, synthetic construct
  source 1..75: mol_type = other DNA
cggggtgaatggtataagggcgatttttttgcgccgcaaccgtggcagcagttcggtgtaaccactgatgagacg

SEQ ID NO: 330227 - DNA, 75 bp, synthetic construct
  source 1..75: mol_type = other DNA
aagctcaccaaaagtggcaaagcgctctactccgggatgttgaatgcctctggcggagtgatagatgacctgatc

SEQ ID NO: 330228 - DNA, 75 bp, synthetic construct
  source 1..75: mol_type = other DNA
cgtctggaagcgggcatgaatctgtatagccaggagatggacgaaactatttctcctttagccgccaatatgggc

SEQ ID NO: 330229 - DNA, 75 bp, synthetic construct
  source 1..75: mol_type = other DNA
ggcgctgatcgacatggcgcgcaaactggaaggggtcacccgtaacgccggtaagcacgccggtggggtggttat

SEQ ID NO: 330230 - DNA, 75 bp, synthetic construct
  source 1..75: mol_type = other DNA
gatgtgcgctttatcgacagcagcgactttgacgcacacgaaatccgcgtcgcgatccacgacggctttaccctc

SEQ ID NO: 330231 - DNA, 75 bp, synthetic construct
  source 1..75: mol_type = other DNA
gtcactggtggcctacgcgttaaaaatcaccgatctcgatccgctggaatttgacctgctgttcgaacgtttcct

SEQ ID NO: 330232 - DNA, 75 bp, synthetic construct
  source 1..75: mol_type = other DNA
gacggtacacggagaggcacataatacccggctggagggaggaaaccagtatgtgcacaaatacggacttgcgct

SEQ ID NO: 330233 - DNA, 75 bp, synthetic construct
  source 1..75: mol_type = other DNA
cacacaccgtctggtacgccgacgatatccgccgcggagaacgcgaggcggcagatgcgctgggactcacactct

SEQ ID NO: 330234 - DNA, 75 bp, synthetic construct
  source 1..75: mol_type = other DNA
cgacaaaccgttaccggaagaggctgcgctggcacgcgaagcatggttaaacgcgggaggcgagatccatgcctc

SEQ ID NO: 330235 - DNA, 75 bp, synthetic construct
  source 1..75: mol_type = other DNA
atgcagaatctgaaaataacagatgtcagaacgatccttactgctcccggtgggatcgatctggttgttgtaaaa

SEQ ID NO: 330236 - DNA, 75 bp, synthetic construct
  source 1..75: mol_type = other DNA
caggaattgtgcgattattacaatgatgctgtgagggcagtgattctggcgagaccggatgctggcgcaagcctg

SEQ ID NO: 330237 - DNA, 75 bp, synthetic construct
  source 1..75: mol_type = other DNA
caaccgcccgtttcttttccggtaaaggatgtcgccgtgctcctctttttactgcgccggctgacgcggcgcggc

SEQ ID NO: 330238 - DNA, 75 bp, synthetic construct
  source 1..75: mol_type = other DNA
tgctctgtgtagccagatctgcgctacattctttaccctcgcggtgcgtgagtggattgcacaggttaatacaga

SEQ ID NO: 330239 - DNA, 75 bp, synthetic construct
  source 1..75: mol_type = other DNA
gcttttgccaggataagcatttgaccttgggtgaagggatcgagctgctaatccagcaggagaaggaacgagcta

SEQ ID NO: 330240 - DNA, 75 bp, synthetic construct
  source 1..75: mol_type = other DNA
tggtttcacctgaggctttggaagccagacgcagggtgatcaaagagaccatcctgagctggcttttggtgaacc

SEQ ID NO: 330241 - DNA, 75 bp, synthetic construct
  source 1..75: mol_type = other DNA
gctgaaattaaccatgcacatttgcagtcaatggcttcattattagaagaagggcagcggcagaaaacctttaag

SEQ ID NO: 330242 - DNA, 75 bp, synthetic construct
  source 1..75: mol_type = other DNA
gcttgcgttgcaaagcagtgagtcgaaattttctcaatcagacctgactattggatggtggatcatatccgcgat

SEQ ID NO: 330243 - DNA, 75 bp, synthetic construct
  source 1..75: mol_type = other DNA
gaacgttactcatcttcttcaggatgcggagcatggtgaagctggtcacttcacttccatcgagcaagaatatcc

SEQ ID NO: 330244 - DNA, 75 bp, synthetic construct
  source 1..75: mol_type = other DNA
cgatattcgacaaaaagaaaaggcccttgatttctcagatcttccgccacagaaagccattgagaaaataatcga

SEQ ID NO: 330245 - DNA, 75 bp, synthetic construct
  source 1..75: mol_type = other DNA
atgacgacgattactgaaatcatcggacgagtgaacacgcaactggttgacccgatgatggtgcgctggcctctg

SEQ ID NO: 330246 - DNA, 75 bp, synthetic construct
  source 1..75: mol_type = other DNA
acatcctgatcaggatgtattaaatatgttgctggcagataaacttatttttgctgatattaaatataacaccca

SEQ ID NO: 330247 - DNA, 75 bp, synthetic construct
  source 1..75: mol_type = other DNA
taagatatagcgcaaaacatatgcttaaaaaacatagatatctaaaagggtttagcaactatcttttttatttta

SEQ ID NO: 330248 - DNA, 75 bp, synthetic construct
  source 1..75: mol_type = other DNA
gcgcaaaacataaatttaaacaaaagcattatatagcaagcattcttaattatttaaaatattataaagaaaaat

SEQ ID NO: 330249 - DNA, 75 bp, synthetic construct
  source 1..75: mol_type = other DNA
aacgagcaaacgtttccactacaactgtgtcacacgtaatcaacaaaacacgtttcgtcgctgaagaaacgcgca

SEQ ID NO: 330250 - DNA, 75 bp, synthetic construct
  source 1..75: mol_type = other DNA
ttgataacgcgtttgaaggcggctacatggccgggcgttatctgattgaacgcggtcaccgcgaaatcggcgtta

SEQ ID NO: 330251 - DNA, 75 bp, synthetic construct
  source 1..75: mol_type = other DNA
ttaaaatataatgaagggagtcgattgtgcttccatgttttcactgattattttggtgatgacgatcgcaaatat

SEQ ID NO: 330252 - DNA, 75 bp, synthetic construct
  source 1..75: mol_type = other DNA
cgttctggaagtcgctggggttcataacgttctggctaaagcatatggttccaccaacccgatcaacgtggttcg

SEQ ID NO: 330253 - DNA, 75 bp, synthetic construct
  source 1..75: mol_type = other DNA
cagtatcccgggaggtgcttgatgcacagtatcccgactggcacatgctgaggggaaaaccggaatgctttatca

SEQ ID NO: 330254 - DNA, 75 bp, synthetic construct
  source 1..75: mol_type = other DNA
cattatcccgggaggtgctggatgcgcagtatcctgagtggcccacaatgaagggcattcctgaatgttttatca

SEQ ID NO: 330255 - DNA, 75 bp, synthetic construct
  source 1..75: mol_type = other DNA
gcaacggcggtcgtgagctgattggggaaaccctgacggcacgcgaggctgaagttactttttgcgaatgttatc

SEQ ID NO: 330256 - DNA, 75 bp, synthetic construct
  source 1..75: mol_type = other DNA
acttgccgatcaactggcagcgctgggtgagagcgatctgctgtttgccctctcgcaacacgcggttgcttttgc

SEQ ID NO: 330257 - DNA, 75 bp, synthetic construct
  source 1..75: mol_type = other DNA
tctggcgaaactcgcccgggaactgggctggaaagatattaaggtcgccgataacgccgacaacgatgcgctatt

SEQ ID NO: 330258 - DNA, 75 bp, synthetic construct
  source 1..75: mol_type = other DNA
atattgggctggataaagccgcgtttcttcatgcatccgacatcatgccgcacaccgaatgtgtggcgggtgaag

SEQ ID NO: 330259 - DNA, 75 bp, synthetic construct
  source 1..75: mol_type = other DNA
attgggtgatatgccggtcagcagattgaataaaaaaagtcttatggattaccgctctgttcgtctacgcgatgg

SEQ ID NO: 330260 - DNA, 75 bp, synthetic construct
  source 1..75: mol_type = other DNA
aaacggaaaatcccgttcggttcctgtggcggattcggtcgtgcctctgattaaaacccgtcgaacggggttatt

SEQ ID NO: 330261 - DNA, 75 bp, synthetic construct
  source 1..75: mol_type = other DNA
tatcagcgcagcaacgatcaaccgggatatttaccgtttgtccgggatgttcagcacgttgataaagctggaaga

SEQ ID NO: 330262 - DNA, 75 bp, synthetic construct
  source 1..75: mol_type = other DNA
ctacttcggatctttatcaaaaaatcgccaaaaacgcccccggcagaaatagatcaggcacttcgcagactggag

SEQ ID NO: 330263 - DNA, 75 bp, synthetic construct
  source 1..75: mol_type = other DNA
cggacatagccagaggcatctgggtataccacaaaggcaataccatcatcatgctccgggttttcatcaagaagt

SEQ ID NO: 330264 - DNA, 75 bp, synthetic construct
  source 1..75: mol_type = other DNA
atatcagagcggtgagcgcatttttttgttgagaattttcattaaaaaatcgcctaaaactccaccggcagagat

SEQ ID NO: 330265 - DNA, 75 bp, synthetic construct
  source 1..75: mol_type = other DNA
tgggcttacagtcatttgccgaagggcttgatttgaaaggtgatctgctcagccaggtgcatatccacaaaatcg

SEQ ID NO: 330266 - DNA, 75 bp, synthetic construct
  source 1..75: mol_type = other DNA
ctctggtttcactgcgtgggaatacgtgtcagcgatcagctggaaaggctgctgtggcgcagtattccgcacatt

SEQ ID NO: 330267 - DNA, 75 bp, synthetic construct
  source 1..75: mol_type = other DNA
gcttttctcgataaacttccagtagctgtgccgcctatcaacatagaagcctggaaatccctcagcgaaatttca

SEQ ID NO: 330268 - DNA, 75 bp, synthetic construct
  source 1..75: mol_type = other DNA
gggcattgaaggctggtcacgcttaaaagtggtggagctgcgcgccctgaaacgcccactggcgcaggcgctggc

SEQ ID NO: 330269 - DNA, 75 bp, synthetic construct
  source 1..75: mol_type = other DNA
agtggtaaaggagaggccctggaaataccccacagccccgaaaaagagccagtcagttgcttaactgactggcat

SEQ ID NO: 330270 - DNA, 75 bp, synthetic construct
  source 1..75: mol_type = other DNA
tttgctgctggtactggatgaaggtcatcacctgccggacgtggcgcgggatgcgctggagatgagcgccgaaat

SEQ ID NO: 330271 - DNA, 75 bp, synthetic construct
  source 1..75: mol_type = other DNA
ctgccgaaacgcatgctgaccggaagaaacaggacatgcgacttgaactgcatacctgcacggcctgcggccgcg

SEQ ID NO: 330272 - DNA, 75 bp, synthetic construct
  source 1..75: mol_type = other DNA
acgctgttgactgggtactcaaagaggcttgtcaggttgtaaacactggcatcaaaggagacctagcccagcctg

SEQ ID NO: 330273 - DNA, 75 bp, synthetic construct
  source 1..75: mol_type = other DNA
aatccgccaaccgaaaccggagcatggaaagacgctgttgactgggtgctcagagaagcttgccagactgtaaac

SEQ ID NO: 330274 - DNA, 75 bp, synthetic construct
  source 1..75: mol_type = other DNA
tgattgctcaacggttggtaaaaaaattatgcccagcctgttcattgcctatttctgaatataagataaggaatg

SEQ ID NO: 330275 - DNA, 75 bp, synthetic construct
  source 1..75: mol_type = other DNA
cttacgactccgaccgtttcctggtctatgcttctccggcagtagccgaagccttgaaaggcgaagagtcacact

SEQ ID NO: 330276 - DNA, 75 bp, synthetic construct
  source 1..75: mol_type = other DNA
tctacacgcttctgacattatgccgcacaccgaatgtgtggcgggcgaggaacaaaagcagttcacggtacgcga

SEQ ID NO: 330277 - DNA, 75 bp, synthetic construct
  source 1..75: mol_type = other DNA
gcgtgttctgcgtgatttcgccgatgccgaactggaccgcattcgcgttgactcacgcctgacttacgaagcatt

SEQ ID NO: 330278 - DNA, 75 bp, synthetic construct
  source 1..75: mol_type = other DNA
cttatatgcggagaaaatgagcgataagaaaacaatagatcctgttaatataggatttcattctgtacacgcaaa

SEQ ID NO: 330279 - DNA, 75 bp, synthetic construct
  source 1..75: mol_type = other DNA
aatagcaaaattagagtcgttaagtaacgagcgaagagaatatttgagaaagttatgttttttagaggacgatta

SEQ ID NO: 330280 - DNA, 75 bp, synthetic construct
  source 1..75: mol_type = other DNA
cgaagacgaacgtgctacagaatataggaaggctattacagctgcattacgctctgatccagatattataatgcc

SEQ ID NO: 330281 - DNA, 75 bp, synthetic construct
  source 1..75: mol_type = other DNA
caggggggaaatttctgtttttgatgctattagtaaagtatcgcgaatagaaaatatacctaaagaaaggcgagc

SEQ ID NO: 330282 - DNA, 75 bp, synthetic construct
  source 1..75: mol_type = other DNA
ttgctttaagaaaaggaataagacatttaaacgaatttaatgttagcatcaagattatcagagcactatacgtaa

SEQ ID NO: 330283 - DNA, 75 bp, synthetic construct
  source 1..75: mol_type = other DNA
gtgattcaggacggcgatctggatgtcagcggcggcggtcacggtattgatatcaccggcgacagcgcaacggtg

SEQ ID NO: 330284 - DNA, 75 bp, synthetic construct
  source 1..75: mol_type = other DNA
aggcgcaggaaaatatcgcacagtccccgtgggcagagcggattaacatccatacggcagatattcagcagtggc

SEQ ID NO: 330285 - DNA, 75 bp, synthetic construct
  source 1..75: mol_type = other DNA
gaactggaaagtgaagctgccgcgcaagcgcaggaaaatatcaaccagtccccgtgggcagagcggattaacgtc

SEQ ID NO: 330286 - DNA, 75 bp, synthetic construct
  source 1..75: mol_type = other DNA
atcgagttggctatttatcaggcgctaagttacgactacgatcctgcccgcgcagcgatgctggcgctgatccag

SEQ ID NO: 330287 - DNA, 75 bp, synthetic construct
  source 1..75: mol_type = other DNA
attccggcacttaaccttgcctccagtgatgcggcggctgtagctggtcttgtgatgacggtgctgaccgttggt

SEQ ID NO: 330288 - DNA, 75 bp, synthetic construct
  source 1..75: mol_type = other DNA
atgattacgctgtggggtcggaataattcaactaacgtaaaaaaagtattgctgacgctcgaagaactggaacta

SEQ ID NO: 330289 - DNA, 75 bp, synthetic construct
  source 1..75: mol_type = other DNA
aaatgctgaagttaactggggtgatattgaaattcagaagctggtacagagtggcggaaatcagaaagactttac

SEQ ID NO: 330290 - DNA, 75 bp, synthetic construct
  source 1..75: mol_type = other DNA
atgttgatcctcgccatgccggggattgtgctggcaacgggcttctttttactgctcaacaacactatcggcctg

SEQ ID NO: 330291 - DNA, 75 bp, synthetic construct
  source 1..75: mol_type = other DNA
ccagggctggctggcatcgctctgccaatcgctcggtctggagtggaccttttcgccctacggcctgcaaggtat

SEQ ID NO: 330292 - DNA, 75 bp, synthetic construct
  source 1..75: mol_type = other DNA
ttcctcgcccgcgccctctatcgcaggcgctttccgggtcggctggcgctgttgcgtctgtgcgcaatgaccttg

SEQ ID NO: 330293 - DNA, 75 bp, synthetic construct
  source 1..75: mol_type = other DNA
ttcgtttcgtcgaatggccgtggttacggcgacaaatcccgccagttgctgcgcttatctttatgctctgtttcg

SEQ ID NO: 330294 - DNA, 75 bp, synthetic construct
  source 1..75: mol_type = other DNA
tcaccgcgttaattctgctactgctctgttttatgctgtttaccgtgattgaaaaactaccggggcgaaatgtta

SEQ ID NO: 330295 - DNA, 75 bp, synthetic construct
  source 1..75: mol_type = other DNA
gttgcgtctgtgcgcaatgaccttgatcctcccggtgttggtcgccgttttcggcattcttagcgtctatggtcg

SEQ ID NO: 330296 - DNA, 75 bp, synthetic construct
  source 1..75: mol_type = other DNA
atgcctgcacatgcggtaccaattgatataaaagaacaaggtgttacctggttattaccaccttatagttggtcc

SEQ ID NO: 330297 - DNA, 75 bp, synthetic construct
  source 1..75: mol_type = other DNA
gttttgcgagaacccggaaaatctccatcagcctgcagtgcgaaaagtgctgggggataatttgctaatggcgat

SEQ ID NO: 330298 - DNA, 75 bp, synthetic construct
  source 1..75: mol_type = other DNA
ttatcggttcgcaatgtctgggaagcgcagaaattgccacgcgccctggtggaaccgagtttgaattaagtacgc

SEQ ID NO: 330299 - DNA, 75 bp, synthetic construct
  source 1..75: mol_type = other DNA
ttaaaagatacaagttattaagcttaaacgaaaacattttaatatgtaatgataaagatagtcaaacaatagtag

SEQ ID NO: 330300 - DNA, 75 bp, synthetic construct
  source 1..75: mol_type = other DNA
atgaaaaagacccgtacagcgaatttacaccatctttatcatgaacccttacccgagaacctgaagcttacgcca

SEQ ID NO: 330301 - DNA, 75 bp, synthetic construct
  source 1..75: mol_type = other DNA
gggggataatttgctaatggcgatgggggcgatgctggaagaagcgcagccaatggtgacggcggaaagcatcag

SEQ ID NO: 330302 - DNA, 75 bp, synthetic construct
  source 1..75: mol_type = other DNA
tacgatcagctgcatccgggcaagtttcatggtgaatttacggaaattctactcgatgatattcaggtttttcgt

SEQ ID NO: 330303 - DNA, 75 bp, synthetic construct
  source 1..75: mol_type = other DNA
actcagcgatgctgcaacgaaaagaaaatcacaactatccagttaggcaggaaacttaatggcaggtatgcagat

SEQ ID NO: 330304 - DNA, 75 bp, synthetic construct
  source 1..75: mol_type = other DNA
atatattgaattcctttaatgatgctgatgagtatcatggtcgtattaaactggaattggatatacctgcttcag

SEQ ID NO: 330305 - DNA, 75 bp, synthetic construct
  source 1..75: mol_type = other DNA
atgctggccgctgacgtcatcatcagccagaaacgcatcggtaacctgccggcggtacgcgtcccgtacttcccg

SEQ ID NO: 330306 - DNA, 75 bp, synthetic construct
  source 1..75: mol_type = other DNA
caccttaaaaaatagcgatattttttatctaatggaacttttcaatactgtgatgataataactgcaagttatat

SEQ ID NO: 330307 - DNA, 75 bp, synthetic construct
  source 1..75: mol_type = other DNA
attcactcctttgaatcctgtggaaccgtagacggcccgggtattcgctttatcacctttttccagggctgcctg

SEQ ID NO: 330308 - DNA, 75 bp, synthetic construct
  source 1..75: mol_type = other DNA
acggaggaggacttgcgtgatggtgatattattttcaggaaaataaggaattttttaaggctgaaagctgttcct

SEQ ID NO: 330309 - DNA, 75 bp, synthetic construct
  source 1..75: mol_type = other DNA
ttcttcgcctgattgcaggtctggaaactgttgattccggacgcatcatgttggataacgaggacatcacccacg

SEQ ID NO: 330310 - DNA, 75 bp, synthetic construct
  source 1..75: mol_type = other DNA
ggcggtcaggataacagcattccgcaggagagcgttgaaaccatgcgccaggcgctgcgggcagcgaacgcgaaa

SEQ ID NO: 330311 - DNA, 75 bp, synthetic construct
  source 1..75: mol_type = other DNA
aggaggctcccgtgcccggtgagggtacggtggtcatcccgcaaccggcaggcgacgagccggtgattaaaaaca

SEQ ID NO: 330312 - DNA, 75 bp, synthetic construct
  source 1..75: mol_type = other DNA
ccgggcatgcattcaacgctgattatcgcccgagctatcatgccgaatctgcgaaagatggctggcagcgtatgc

SEQ ID NO: 330313 - DNA, 75 bp, synthetic construct
  source 1..75: mol_type = other DNA
aagcggatgtgggtcgtcggaaaaaacgagttttaccacaaagaaaccggacgccgccactttgcagaaaatacg

SEQ ID NO: 330314 - DNA, 75 bp, synthetic construct
  source 1..75: mol_type = other DNA
ccgaacgtgataatgtctacaacgggatgaccctgcgtgaatatgcccgtatgtcactgactgaacggggtattg

SEQ ID NO: 330315 - DNA, 75 bp, synthetic construct
  source 1..75: mol_type = other DNA
tctgcagggctgggaagatgcccctgaaacctatgaacagtggacgcggaaaggtcagttgtctgattttaaaat

SEQ ID NO: 330316 - DNA, 75 bp, synthetic construct
  source 1..75: mol_type = other DNA
aaagcctgaaggaaaaactattattatgtgcggttaatgaatttgccgaatatggttatgaaggggccagagtcg

SEQ ID NO: 330317 - DNA, 75 bp, synthetic construct
  source 1..75: mol_type = other DNA
aaatcatttgtttgtccaattaatgatgaaaccgtattaattcattatgtcggcccgacaaaaccctggcattac

SEQ ID NO: 330318 - DNA, 75 bp, synthetic construct
  source 1..75: mol_type = other DNA
cagggtttaagacactggccgacgtgcctgacgccgaggaaatcgacggcgagaatgtgcgcgttttccactacc

SEQ ID NO: 330319 - DNA, 75 bp, synthetic construct
  source 1..75: mol_type = other DNA
ataatccacaactgaaagcagcggtggcatggtacggcaaattaaccggcgataagacgctgaattcaccgaaac

SEQ ID NO: 330320 - DNA, 75 bp, synthetic construct
  source 1..75: mol_type = other DNA
agcgtgcgctgttttcactatttccgcgccgtctgcgccatgaccagcgccacgctgtttgagcgttatcgcggc

SEQ ID NO: 330321 - DNA, 75 bp, synthetic construct
  source 1..75: mol_type = other DNA
tattatattgacaatccctggtttttaaaaattgtacatagtgaaaaccaaagtaaaggtgtgcattatgcaaaa

SEQ ID NO: 330322 - DNA, 75 bp, synthetic construct
  source 1..75: mol_type = other DNA
tcagtaggctatgccagtgaatcatcttttcacaaggcgtttgtccgcgagtttggttgtactccgggagaatat

SEQ ID NO: 330323 - DNA, 75 bp, synthetic construct
  source 1..75: mol_type = other DNA
tctgggcgtccctgccgggtgccggttacggtcagcgtgagcattcactggaaaaactggtcaccgcctggcgta

SEQ ID NO: 330324 - DNA, 75 bp, synthetic construct
  source 1..75: mol_type = other DNA
tctggccgcattaccgcaaacagcttgccctgccggatttcagtccgttgtcacaggacagactcgccattcagt

SEQ ID NO: 330325 - DNA, 75 bp, synthetic construct
  source 1..75: mol_type = other DNA
atatcgccgcgtttctggacatgcttgcctattccgaagggacggcgacgcatccgctgacgaaaaatcgtggtt

SEQ ID NO: 330326 - DNA, 75 bp, synthetic construct
  source 1..75: mol_type = other DNA
atgttcaaggagaggatgacgccagatgaacttgccagactgaccggctactaccgccagaccattaataaatgg

SEQ ID NO: 330327 - DNA, 75 bp, synthetic construct
  source 1..75: mol_type = other DNA
tgccgaaagggttccggggcggcaacgctattaaagtgcaattgtggtgggcagtacaggcaacattatttgcct

SEQ ID NO: 330328 - DNA, 75 bp, synthetic construct
  source 1..75: mol_type = other DNA
caacggatgtttttgttgcaccaggcgttaaaattggagacaattgtgtaattggtgcaagaagctcagttttca

SEQ ID NO: 330329 - DNA, 75 bp, synthetic construct
  source 1..75: mol_type = other DNA
tgatccgcgaacgcggtgcgctggatgacatccgggcgggacgcattgagcgcgccatttcacgctgtcgcaata

SEQ ID NO: 330330 - DNA, 75 bp, synthetic construct
  source 1..75: mol_type = other DNA
gcgattccttttttacaacaggaatccagatcggcaatgccgggagcggatgcactgtgtagccaggtttgcgcg

SEQ ID NO: 330331 - DNA, 75 bp, synthetic construct
  source 1..75: mol_type = other DNA
gtaagttggcatcatcaccgaacgatcgataagaattgcgtgttaggaagtgactggcagcttccacatggtgcc

SEQ ID NO: 330332 - DNA, 75 bp, synthetic construct
  source 1..75: mol_type = other DNA
ggccgtgtccgaagggacggcgaaccatccgctgacgaaaaaccggggctatgacgtgatcgtcaccggactgga

SEQ ID NO: 330333 - DNA, 75 bp, synthetic construct
  source 1..75: mol_type = other DNA
ttcagataccggagagagaaagggagcgacgaaaagagtgcgggttttctctcttaatataaccaaaaacgggaa

SEQ ID NO: 330334 - DNA, 75 bp, synthetic construct
  source 1..75: mol_type = other DNA
aaaaaaaccgtgcaggccgggcttatatcgctcatgaaaatggggcttatttcagataccggagagagaaaggga

SEQ ID NO: 330335 - DNA, 75 bp, synthetic construct
  source 1..75: mol_type = other DNA
gtgaacacggcagcggaagccatccgtgccctgtcgatgcagttgccgggttttcgccgtcagatgaacgaaggc

SEQ ID NO: 330336 - DNA, 75 bp, synthetic construct
  source 1..75: mol_type = other DNA
ggtaccagatacgtattgccggtgatgacacggcaccggaggcggtgtacgcccgtcttcacgaacagctgggtg

SEQ ID NO: 330337 - DNA, 75 bp, synthetic construct
  source 1..75: mol_type = other DNA
gccggctttcgccgtcagatgaacgaaggctggtaccagatacgtattgccggttatgacacggcaccggaggcg

SEQ ID NO: 330338 - DNA, 75 bp, synthetic construct
  source 1..75: mol_type = other DNA
aaatgctggttggctcccggcgaatctcccaggacatcagtacccgtgatgaaggcggtggcggaaaggtcgtgg

SEQ ID NO: 330339 - DNA, 75 bp, synthetic construct
  source 1..75: mol_type = other DNA
tgacctatctggatatccagccagagttcccgccgtggcagagaatgatcctggggggaataacgatagccagct

SEQ ID NO: 330340 - DNA, 75 bp, synthetic construct
  source 1..75: mol_type = other DNA
agccaaaaacaccggaatacagggcaacggataacggtaaacagaacacgtacttttcgtcgctggataacatga

SEQ ID NO: 330341 - DNA, 75 bp, synthetic construct
  source 1..75: mol_type = other DNA
ggattgagatgccggattttcaccgcgaggatgagtggtggcgaaacggtcagaacctgtacctggacaatatgg

SEQ ID NO: 330342 - DNA, 75 bp, synthetic construct
  source 1..75: mol_type = other DNA
tttctgccaccacgatgctgttttcactgggggccagcatgatactgggcggtgtggcccagatgctggcaccga

SEQ ID NO: 330343 - DNA, 75 bp, synthetic construct
  source 1..75: mol_type = other DNA
ctcactgggtgccagcatgatactgggcggtgtggcccagatgctggcaccgaaggcaaaaacaccggattaccg

SEQ ID NO: 330344 - DNA, 75 bp, synthetic construct
  source 1..75: mol_type = other DNA
tggccaatcatgccgccatttactgcggcaacggtgaactgcttcaccatctgcctgaacaactgagtaacggga

SEQ ID NO: 330345 - DNA, 75 bp, synthetic construct
  source 1..75: mol_type = other DNA
ggctctttcttcaccgccggcgcaacgatggcgttatggggttcagccctggcagccggtggtttttctgccacc

SEQ ID NO: 330346 - DNA, 75 bp, synthetic construct
  source 1..75: mol_type = other DNA
tctccggtgtactgatgaccgtcaccgtcttctttggtatttcggcgctgacggttctttcggtgattgcagttc

SEQ ID NO: 330347 - DNA, 75 bp, synthetic construct
  source 1..75: mol_type = other DNA
ggccactggttaccgggaattgttccggtcaacgcggtattaggtggtgcgctgagctatctgatccttaacccg

SEQ ID NO: 330348 - DNA, 75 bp, synthetic construct
  source 1..75: mol_type = other DNA
tggtcgcaatgccaaactggcggtgctggtggcgatggtggcctttttcctcggcaactcgttgatgtttatttt

SEQ ID NO: 330349 - DNA, 75 bp, synthetic construct
  source 1..75: mol_type = other DNA
gccggaggagtattttcgtatcgcgccggaagactggctgcgggcagagatgcagggggagattgtggctctggt

SEQ ID NO: 330350 - DNA, 75 bp, synthetic construct
  source 1..75: mol_type = other DNA
gccggaggagtattttcgtatcgctccggaagactggctgcgggcagagatgcagggggagattgtggcactggt

SEQ ID NO: 330351 - DNA, 75 bp, synthetic construct
  source 1..75: mol_type = other DNA
gctgagctatctgatccttaacccgattttgaatcgcaaaacgacagcagcaatgacgcatgtggaggctaacag

SEQ ID NO: 330352 - DNA, 75 bp, synthetic construct
  source 1..75: mol_type = other DNA
aaatgaagattaaccacagggggttttgtttttattggcccgaaaaaactgtaacgcccgggaatgatatctgcc

SEQ ID NO: 330353 - DNA, 75 bp, synthetic construct
  source 1..75: mol_type = other DNA
cgcgactggccggagccggaaagggcggactgcggattgtgctgggggcggcagccatcgtgggctctttcttca

SEQ ID NO: 330354 - DNA, 75 bp, synthetic construct
  source 1..75: mol_type = other DNA
gtacggggtgacggactgttacacgctgttccgggatgcttaccatctggcggggattgagatgccggattttca

SEQ ID NO: 330355 - DNA, 75 bp, synthetic construct
  source 1..75: mol_type = other DNA
tcccttgtgtgaatatctctgcagagccggaggcgtattttcgtattgcaccggaagactggctgtgggcagaga

SEQ ID NO: 330356 - DNA, 75 bp, synthetic construct
  source 1..75: mol_type = other DNA
atgtcgccggaggactggctgagtgcagaaatgcagggtgagattgtcgcgctggtccacagtcatcccggtggt

SEQ ID NO: 330357 - DNA, 75 bp, synthetic construct
  source 1..75: mol_type = other DNA
ggttcacgacggatatcccaggacatcagcacccgtgatgagggcggagacgggaaagtggtggttatcgggcgg

SEQ ID NO: 330358 - DNA, 75 bp, synthetic construct
  source 1..75: mol_type = other DNA
gccttacggggaaatgctggttggctcccgccgtatatcccaggacatcagtacccgtgatgaaggcgggggcgg

SEQ ID NO: 330359 - DNA, 75 bp, synthetic construct
  source 1..75: mol_type = other DNA
gccttacggtgaaatgctggttggctcccggcgaatctctcaggacatcagtacccgtgatgaaggcggtggcgg

SEQ ID NO: 330360 - DNA, 75 bp, synthetic construct
  source 1..75: mol_type = other DNA
atggctccggaggactggctgcaggcagagatgcagggtgagattgtcgcgctggtccacagccatcccggtggt

SEQ ID NO: 330361 - DNA, 75 bp, synthetic construct
  source 1..75: mol_type = other DNA
agggagcggtcatccacattgtaccgcgactggccggagccgggggaaatggtgtttttcaggtggtgctggggg

SEQ ID NO: 330362 - DNA, 75 bp, synthetic construct
  source 1..75: mol_type = other DNA
gccctggtggctggtcagccagggtgacattcacaaattccgctgcgttccgcacctgaccggacggcgctttga

SEQ ID NO: 330363 - DNA, 75 bp, synthetic construct
  source 1..75: mol_type = other DNA
agcgcactgccctggtggctggtctgccggggtgacattcacaaattccgctgtgtgccacatctgacaggacgg

SEQ ID NO: 330364 - DNA, 75 bp, synthetic construct
  source 1..75: mol_type = other DNA
gcaaccggggttgttgctgactcagcgttcgattcatctgcgtaaacacgctggacaagtggcattccctggagg

SEQ ID NO: 330365 - DNA, 75 bp, synthetic construct
  source 1..75: mol_type = other DNA
gcaacgacgaacgcattcagcctggcgtcaccgccactggcacgtatctgccttcacggggatttacaacgattt

SEQ ID NO: 330366 - DNA, 75 bp, synthetic construct
  source 1..75: mol_type = other DNA
ggataacgctgccggattttgtgcgtgaggatgactggtggcgcaacggtcagaacctgtacctggacaacctgg

SEQ ID NO: 330367 - DNA, 75 bp, synthetic construct
  source 1..75: mol_type = other DNA
agaggtattctgaaaaatggcaacgacggacacattcgatatggcggcatcaccggtggtgtgtttctgccttta

SEQ ID NO: 330368 - DNA, 75 bp, synthetic construct
  source 1..75: mol_type = other DNA
cacaagttccgctgtgtgccgcatcttaccgggcggcgctttgagcacggggtgacggactgttacacgctgttc

SEQ ID NO: 330369 - DNA, 75 bp, synthetic construct
  source 1..75: mol_type = other DNA
cacaagttccgctgtgtgccgcacctgaccggacggcgctttgaacatggtgtgacggactgttacaccctgttc

SEQ ID NO: 330370 - DNA, 75 bp, synthetic construct
  source 1..75: mol_type = other DNA
cgcacacactccctctggcgtcaccaggcatggcacgcatctgcctttacggggatttccaacgatttggccgcc

SEQ ID NO: 330371 - DNA, 75 bp, synthetic construct
  source 1..75: mol_type = other DNA
gtggctggtctgccggggtgacattcacaaattccgctgtgtgccgcacctgaccggacggcgctttgagcacgg

SEQ ID NO: 330372 - DNA, 75 bp, synthetic construct
  source 1..75: mol_type = other DNA
taaaaagcgcactgccctggtggctggtctgccggggtgacattcacaaattccgctgtgtgccacacctgacgg

SEQ ID NO: 330373 - DNA, 75 bp, synthetic construct
  source 1..75: mol_type = other DNA
cagcgaggtgctgacgccggtgttcacgctgtggtatctgcagaaaaatatcacctctgatatcgcgccttatgt

SEQ ID NO: 330374 - DNA, 75 bp, synthetic construct
  source 1..75: mol_type = other DNA
cgacggagacagtgatacggcggttaacccgtatcacgcccagtatatcctgcgccgccgcgacgattacctgga

SEQ ID NO: 330375 - DNA, 75 bp, synthetic construct
  source 1..75: mol_type = other DNA
ctgcgtcgactggccagcgagtatggttatgccgtgaaagtggtcagcgaccagctgattttctctcatctggcc

SEQ ID NO: 330376 - DNA, 75 bp, synthetic construct
  source 1..75: mol_type = other DNA
gaagatctccctctcgctacgatcatgtggcaactgacaaccaaagaactctgcggtcagggcctgctgtgcgtg

SEQ ID NO: 330377 - DNA, 75 bp, synthetic construct
  source 1..75: mol_type = other DNA
tcaccaccgatatcgccccctatgtcacccgcgtaacctacagcgataacatcaaaagcgagtccgataccattg

SEQ ID NO: 330378 - DNA, 75 bp, synthetic construct
  source 1..75: mol_type = other DNA
ggccacctcggttaacagtgccctgcggactaaaaccagtcgtggttttgagaacaccacgctggaagctgttgc

SEQ ID NO: 330379 - DNA, 75 bp, synthetic construct
  source 1..75: mol_type = other DNA
aaccggcggcgggcctggggattaagctggcaaccggcgcgaatgctctcgataccgcgaaagccattaaggcaa

SEQ ID NO: 330380 - DNA, 75 bp, synthetic construct
  source 1..75: mol_type = other DNA
tcgaattgcttttgtatacagttgaggaggagcaattggttagttctgtaataccgatagtcaataatattttaa

SEQ ID NO: 330381 - DNA, 75 bp, synthetic construct
  source 1..75: mol_type = other DNA
cggcctcgatgacagtccgcagttgcagattgatatcgaccagcgtaaagctcaggcgctgggcgttgctatcga

SEQ ID NO: 330382 - DNA, 75 bp, synthetic construct
  source 1..75: mol_type = other DNA
cagcgatgtgctgacgccggtgttcactctgtggtatctgcagaaaaatatcacctctgatatcgcgccttatgt

SEQ ID NO: 330383 - DNA, 75 bp, synthetic construct
  source 1..75: mol_type = other DNA
ttgcatttgccagagcttgacgatgttgcttggatgaagggtgtattgatgctaaatgtaaggtttgattcagaa

SEQ ID NO: 330384 - DNA, 75 bp, synthetic construct
  source 1..75: mol_type = other DNA
tcggcgtgctactggcggcaacactctttaatcaaaaaaatgacgtctactttatggtgggcttgctaacgacaa

SEQ ID NO: 330385 - DNA, 75 bp, synthetic construct
  source 1..75: mol_type = other DNA
gaagatctccctctcgccacgatcatgtggcaactgacaactaaagaactctgcggtcagggcctgctgtgcgtg

SEQ ID NO: 330386 - DNA, 75 bp, synthetic construct
  source 1..75: mol_type = other DNA
tcccgcctgaccaaagaaactatccacctcggcgcactggacgaagacagtattgtttacattcacaaaattgac

SEQ ID NO: 330387 - DNA, 75 bp, synthetic construct
  source 1..75: mol_type = other DNA
ctgggtgaagagcgcgaaatagggataaccgagctgtcgcagcgcgtcatgatgtcaaaaagcaccgtttatcgc

SEQ ID NO: 330388 - DNA, 75 bp, synthetic construct
  source 1..75: mol_type = other DNA
tcctgttattccagcgattaataccaaagcatggatagctttaaccgacatatcgcaaaaactaaatcgcattgc

SEQ ID NO: 330389 - DNA, 75 bp, synthetic construct
  source 1..75: mol_type = other DNA
ataaaaaagaatcacctgaaagtttgttaagaacacattgcatcagtgttaggttgaaccatgaagaactacagc

SEQ ID NO: 330390 - DNA, 75 bp, synthetic construct
  source 1..75: mol_type = other DNA
gatgaacaaccggcggaaatcctgcatggcgatatggtgcagccgctgcgtgtgaaagtggatcgcgaagcacgc

SEQ ID NO: 330391 - DNA, 75 bp, synthetic construct
  source 1..75: mol_type = other DNA
gatgagcagccggcagacattctacatcctgatatggtgcaaccgttgcgtgtgaaagtggaccgtgaagcgcgt

SEQ ID NO: 330392 - DNA, 75 bp, synthetic construct
  source 1..75: mol_type = other DNA
aaccgggataaacgaggacaattttatggtcttgctgcgactctttttacagtaacatgtgcaaccatattgggg

SEQ ID NO: 330393 - DNA, 75 bp, synthetic construct
  source 1..75: mol_type = other DNA
agaaaaggcccttgatggagcgataaaccgggataaacgaggacaattttatggtcttgctgcgactctttttac

SEQ ID NO: 330394 - DNA, 75 bp, synthetic construct
  source 1..75: mol_type = other DNA
actgacctcgcggtgcttgagcggtggtgcgtggcctatgagttctggcgacgtgccgtgaaaaatattgccaga

SEQ ID NO: 330395 - DNA, 75 bp, synthetic construct
  source 1..75: mol_type = other DNA
tctaaatgcactctggatattatagggtcctatgaacctaaggatttttgttattataaagaactaaatagtatt

SEQ ID NO: 330396 - DNA, 75 bp, synthetic construct
  source 1..75: mol_type = other DNA
gcaagaaataatagcattaatacatattcatttaattttaatccaaatattcttaagtctgaacatcaatattct

SEQ ID NO: 330397 - DNA, 75 bp, synthetic construct
  source 1..75: mol_type = other DNA
aagggttcgccggatacctgaacaggacccggtgtttaaactggcgggaattgccccggattatgcggcgcgtct

SEQ ID NO: 330398 - DNA, 75 bp, synthetic construct
  source 1..75: mol_type = other DNA
gcgaacgcgacagtaagaccggcacctcgtttgccattatcgagcgtgcaacaaaggcgtttaaccaaattaaag

SEQ ID NO: 330399 - DNA, 75 bp, synthetic construct
  source 1..75: mol_type = other DNA
gcacggggtgacggactgttatgcgctgttccgggatgcgtaccatctggcggggattgcgctgcctgattttca

SEQ ID NO: 330400 - DNA, 75 bp, synthetic construct
  source 1..75: mol_type = other DNA
tggctgagcgaggccgaccggcggctgcagataaaaagtgcactgtcctggtggctggtctgccggggggacatt

SEQ ID NO: 330401 - DNA, 75 bp, synthetic construct
  source 1..75: mol_type = other DNA
gccggaggggtattttcgtatcgctccggaagactggctgcgggcagagatgcagggggagattgtggcgctggt

SEQ ID NO: 330402 - DNA, 75 bp, synthetic construct
  source 1..75: mol_type = other DNA
caggggccagtatgatcctgggcggtgtggctcagatgctggcaccgaaagccagaactccccgcacacagacaa

SEQ ID NO: 330403 - DNA, 75 bp, synthetic construct
  source 1..75: mol_type = other DNA
gtacttttcgtcgctggacaacatgattgcccaggggaacccgatgccggtgccttacggggaaatgctggttgg

SEQ ID NO: 330404 - DNA, 75 bp, synthetic construct
  source 1..75: mol_type = other DNA
ttcgtcactggataacatgattgcccaggggaacccgatgccggtgccttatggtgaaatgctggttggttcacg

SEQ ID NO: 330405 - DNA, 75 bp, synthetic construct
  source 1..75: mol_type = other DNA
gccggaggtgtattttcgtatcgccccggaagactggctgcgggcagagatgcagggggagattgtggccctggt

SEQ ID NO: 330406 - DNA, 75 bp, synthetic construct
  source 1..75: mol_type = other DNA
gccggaggtgtattttcgtatcgctccggaagactggctgcgggcagagatgcagggggagattgtggctctggt

SEQ ID NO: 330407 - DNA, 75 bp, synthetic construct
  source 1..75: mol_type = other DNA
gccggaggtgtattttcgtatcgcaccggaagactggctgcgggcagagatgcagggggagattgtggcactggt

SEQ ID NO: 330408 - DNA, 75 bp, synthetic construct
  source 1..75: mol_type = other DNA
gccggaggggtattttcgtatcgcaccggaagactggctgcgggcagagatgcagggggagattgtggctctggt

SEQ ID NO: 330409 - DNA, 75 bp, synthetic construct
  source 1..75: mol_type = other DNA
gccggaggcgtattttcgtatcgctccggaagactggctgcgggcagagatgcagggggagattgtggccctggt

SEQ ID NO: 330410 - DNA, 75 bp, synthetic construct
  source 1..75: mol_type = other DNA
gccggaggtgtattttcgtatcgcgccggaagactggctgcgggcagagatgcagggggagattgtggcgctggt

SEQ ID NO: 330411 - DNA, 75 bp, synthetic construct
  source 1..75: mol_type = other DNA
tgccgggattccgccgtcagatgaacgaaggctggtaccagatacgtattcgcggtgaggacacggcaccggagg

SEQ ID NO: 330412 - DNA, 75 bp, synthetic construct
  source 1..75: mol_type = other DNA
gggcggtgtggcccagatgctggccccgaaggcaaaaacaccggattaccgcgcaacggataacggtaaacagaa

SEQ ID NO: 330413 - DNA, 75 bp, synthetic construct
  source 1..75: mol_type = other DNA
aaggcaaaaacaccggattaccgcgcaacggataacggtaaacagaacacgtatttttcgtcactggataacatg

SEQ ID NO: 330414 - DNA, 75 bp, synthetic construct
  source 1..75: mol_type = other DNA
ttttagaaacaatccgtatggagttggtcgggaaagtgaacaacttttgggcgctgttcagagaacattctgctg

SEQ ID NO: 330415 - DNA, 75 bp, synthetic construct
  source 1..75: mol_type = other DNA
ccaatggcattgttgccgggccccgtggcgcggcgacacgattagggatgaagcgcaccacgctgctgtcacgaa

SEQ ID NO: 330416 - DNA, 75 bp, synthetic construct
  source 1..75: mol_type = other DNA
atggctccggaggactggctgcgggcagaaatgcagggtgagattgtggcgctggtccacagtcaccccggtgct

SEQ ID NO: 330417 - DNA, 75 bp, synthetic construct
  source 1..75: mol_type = other DNA
tgaacacggcagcggaggccatccgtgccctgtcgctgcaggtaccgggattccgcggtcagatgaacgaaggct

SEQ ID NO: 330418 - DNA, 75 bp, synthetic construct
  source 1..75: mol_type = other DNA
tacttttcctcgctggataacatgattgcccaggggaacccgatgccggtgccttacggtgaaatgctggttggc

SEQ ID NO: 330419 - DNA, 75 bp, synthetic construct
  source 1..75: mol_type = other DNA
tgccctacggtgaaatgctggttggttcacgacgtatctctcaggacatcagcacccgtgatgaaggcggagacg

SEQ ID NO: 330420 - DNA, 75 bp, synthetic construct
  source 1..75: mol_type = other DNA
tgcagggggagattgtggcgctggtccacagtcatcccggtggtctgccctggctgagcgaggctgaccggcggc

SEQ ID NO: 330421 - DNA, 75 bp, synthetic construct
  source 1..75: mol_type = other DNA
cgaaggcaaagacgccggaatacaaaagtacggataacggtaaacagaacacgtatttttcgtcactggacaaca

SEQ ID NO: 330422 - DNA, 75 bp, synthetic construct
  source 1..75: mol_type = other DNA
gtgcttccgcgcactcggtggtcatcaagcggatagccgagcgtggggagaatattcaggtctggatagaacctg

SEQ ID NO: 330423 - DNA, 75 bp, synthetic construct
  source 1..75: mol_type = other DNA
aatattcaggtctggatagaacctgtggtgtttaatgacctgctgaaatggttaaacgcactggatgaaaaatat

SEQ ID NO: 330424 - DNA, 75 bp, synthetic construct
  source 1..75: mol_type = other DNA
gcgttgcgggtgacacaaattgatgtcagtgccggagaaaaaccagggatggtgaatgtgcagcggctggagttt

SEQ ID NO: 330425 - DNA, 75 bp, synthetic construct
  source 1..75: mol_type = other DNA
gatatttaccgtttgtccgggatgttcagcacgttgataaagctggaagagttcaggaaggataacccctgtaag

SEQ ID NO: 330426 - DNA, 75 bp, synthetic construct
  source 1..75: mol_type = other DNA
acacaacacctggcggggcgttctccgcgtgaaaaaggcatgttactggcagcggcggtgttcctgtttagcgcc

SEQ ID NO: 330427 - DNA, 75 bp, synthetic construct
  source 1..75: mol_type = other DNA
cgcgtgaaaaaggcatgttactggcagcggtagtgttcctgtttagcgccggatattacgtcctcatctggcagc

SEQ ID NO: 330428 - DNA, 75 bp, synthetic construct
  source 1..75: mol_type = other DNA
gctgggacttactgcagaaaatcttccggcgctgggaattatgattgaggttcctgccgcagtcatgattgcaga

SEQ ID NO: 330429 - DNA, 75 bp, synthetic construct
  source 1..75: mol_type = other DNA
gcagcgcaccgtcgattctccgcaagaagagctgtcgcgaatcgagtctgctatcgacattgttgtttgtgaact

SEQ ID NO: 330430 - DNA, 75 bp, synthetic construct
  source 1..75: mol_type = other DNA
cattcctgatagcgtcgttgaaaaattgctggctatgcgtcagcaaagaaaaaaacatcttcacgccatcataga

SEQ ID NO: 330431 - DNA, 75 bp, synthetic construct
  source 1..75: mol_type = other DNA
gcgcttccgcgcactcggtggtcatcaaacggattgccgagcgtggggagaatattcaggtctggatagaacctg

SEQ ID NO: 330432 - DNA, 75 bp, synthetic construct
  source 1..75: mol_type = other DNA
gcgctgcgggtgacacaaattgatgtcagtgctgctgagaagactgggatggtgaatgtgcagcggctggagttt

SEQ ID NO: 330433 - DNA, 75 bp, synthetic construct
  source 1..75: mol_type = other DNA
ctgatgccatgctgcccgctgtcacgcaaggtgggcgtaaaatcagcgtgctggcgaatattggtgacctgcaag

SEQ ID NO: 330434 - DNA, 75 bp, synthetic construct
  source 1..75: mol_type = other DNA
catacaacggttatcaaagatgttctattatggattgaacataatttagatcagtctttactgcttgatgatgtg

SEQ ID NO: 330435 - DNA, 75 bp, synthetic construct
  source 1..75: mol_type = other DNA
accactaccaatctgaatttactgcgccagattgccgaacgtgtggcaatcgctgtcgataacgccctcgcctat

SEQ ID NO: 330436 - DNA, 75 bp, synthetic construct
  source 1..75: mol_type = other DNA
ctccacgagcgggacgatttagccccctatgaacgcatgttgttcgacacctggggcaaccagattcaaaccttg

SEQ ID NO: 330437 - DNA, 75 bp, synthetic construct
  source 1..75: mol_type = other DNA
atgccgcttgtctgcccaccagcctcgttatcgcattctttgaactgcgtcatttatatcaactcatcacgcgta

SEQ ID NO: 330438 - DNA, 75 bp, synthetic construct
  source 1..75: mol_type = other DNA
tggttgccgggcctaaaggcgctgcgcaacgtctggggctgaaacgcacgaccctgctgtcacggatgaagcggc

SEQ ID NO: 330439 - DNA, 75 bp, synthetic construct
  source 1..75: mol_type = other DNA
ttaccggaacctgaaacgccgcctgccgcaacggttgtcgcccaggagggcgaagatgaatatcagttgattgtt

SEQ ID NO: 330440 - DNA, 75 bp, synthetic construct
  source 1..75: mol_type = other DNA
ctggacatggacgaactggtcagcgaagtggcgaaagagatccactactacttcgatatcgacgatatcagtatc

SEQ ID NO: 330441 - DNA, 75 bp, synthetic construct
  source 1..75: mol_type = other DNA
tggtgaccaccaaccggattaacgatccgcaggttgccgacgacattctctcgcgcggcgatgccgatatggtat

SEQ ID NO: 330442 - DNA, 75 bp, synthetic construct
  source 1..75: mol_type = other DNA
ttaaaatcgctcttttcattgataatctcgagacaatccttgatgataacatacgcgaatttgttggtgctttac

SEQ ID NO: 330443 - DNA, 75 bp, synthetic construct
  source 1..75: mol_type = other DNA
acataattgcactgcaacagattctggggcatgcgagcattcagcagacaatgacctatgcgcaccttgcgcctg

SEQ ID NO: 330444 - DNA, 75 bp, synthetic construct
  source 1..75: mol_type = other DNA
atgacagacatagcctcaaggaatagctatgaaaaaatacttgaagcaatactggcgattaatctcgccgtactt

SEQ ID NO: 330445 - DNA, 75 bp, synthetic construct
  source 1..75: mol_type = other DNA
agggctgctattggtcttgacctatgttgtttttcacttccgttgtgtttgttcccggacgctgccctgtctgag

SEQ ID NO: 330446 - DNA, 75 bp, synthetic construct
  source 1..75: mol_type = other DNA
tcggggcgagccgatgagatcaacacctgcattggctgcaatcaggcctgcctcgatcagatcttcgttggcaaa

SEQ ID NO: 330447 - DNA, 75 bp, synthetic construct
  source 1..75: mol_type = other DNA
tcttcatgccatcatagagaaaataaataaccgcatcggcaacaacaccatgcgttttttccccgacttaaccgc

SEQ ID NO: 330448 - DNA, 75 bp, synthetic construct
  source 1..75: mol_type = other DNA
caaatggggcttgaatctgtacctgatgagatgcttgaaatgatctgcccaaacttgaactactctgggcagttt

SEQ ID NO: 330449 - DNA, 75 bp, synthetic construct
  source 1..75: mol_type = other DNA
accgccatcgctggactgtcgaagagtgcagggccatcaaggcggagtatcagcagaaactcaaagacctgcgaa

SEQ ID NO: 330450 - DNA, 75 bp, synthetic construct
  source 1..75: mol_type = other DNA
gatgggtgcgcacacaggacacccgtctggctcccgttctccaaggattattggatctttacatccgtggtcgtg

SEQ ID NO: 330451 - DNA, 75 bp, synthetic construct
  source 1..75: mol_type = other DNA
agcctgctgcatctggaattgagtagtctgcagctgtatatcgcgtccggtgcgtcattgctgctgtcggcttat

SEQ ID NO: 330452 - DNA, 75 bp, synthetic construct
  source 1..75: mol_type = other DNA
ccgggacaacgcttcccgacgacgacaacgaccgctcctggtgggggctaccctgcaccgtaacgccctgtttcg

SEQ ID NO: 330453 - DNA, 75 bp, synthetic construct
  source 1..75: mol_type = other DNA
ttaatatcagaaacctgaatcctgatatctattctgttcttaaaaaagaagccgaaaaaaactgtcgctcacttg

SEQ ID NO: 330454 - DNA, 75 bp, synthetic construct
  source 1..75: mol_type = other DNA
ggagaatgcagacaccctttatttcacagtagacgactgctaccgcgtggacttcacaccacacgggctggcgtt

SEQ ID NO: 330455 - DNA, 75 bp, synthetic construct
  source 1..75: mol_type = other DNA
atcctgcgtgacaagttatcaccgtatgacaccgaagagatgcttgaggctatgcgtatttttctggaagaacag

SEQ ID NO: 330456 - DNA, 75 bp, synthetic construct
  source 1..75: mol_type = other DNA
agctcatatcacaaaggaagattctggcgatttgcaaatgaaacaatgaaagcaagatggggagacagggcggca

SEQ ID NO: 330457 - DNA, 75 bp, synthetic construct
  source 1..75: mol_type = other DNA
atttgcggcaatgctggcgcatcgcactgctggcgggtgtgcctcgctgagtgaatacaccgctgaatttaaccg

SEQ ID NO: 330458 - DNA, 75 bp, synthetic construct
  source 1..75: mol_type = other DNA
ttgtggggaaagcgcaacgaacgtgcgcgcatgttatcgggcgggatgaaacgtcgtttaatgatcgcccgtgcg

SEQ ID NO: 330459 - DNA, 75 bp, synthetic construct
  source 1..75: mol_type = other DNA
gcctcgctgagtgaatacaccactgaatttaaccgcctttccgtcatcttctcgcaggagtggcagcgcgtgacg

SEQ ID NO: 330460 - DNA, 75 bp, synthetic construct
  source 1..75: mol_type = other DNA
cgcgtgaaaagggcatgttactggcagcggtggtgttcctgtttagcgccggatattacgtcctcatctggcagc

SEQ ID NO: 330461 - DNA, 75 bp, synthetic construct
  source 1..75: mol_type = other DNA
ttctcgacgaaccgaccgcaggcgtggatattgaacttcgccgctcaatgtggggctttttgaaggatttaaacg

SEQ ID NO: 330462 - DNA, 75 bp, synthetic construct
  source 1..75: mol_type = other DNA
cgggaaatcaaccactatcggtattatcagctctctggtaaataaaacctccgggcgggtcagcgtatttggtta

SEQ ID NO: 330463 - DNA, 75 bp, synthetic construct
  source 1..75: mol_type = other DNA
accaaattcgagaactggtgaacgagttgcgggatattgcggtttcgtatcacggaacgcagcaattgcgggaga

SEQ ID NO: 330464 - DNA, 75 bp, synthetic construct
  source 1..75: mol_type = other DNA
ggaaaatggcaagtgtgccattcctgatcgtgtagtcgagcaactgttggctatgcgtcagcaaagaaaaaaaca

SEQ ID NO: 330465 - DNA, 75 bp, synthetic construct
  source 1..75: mol_type = other DNA
aagaaaaacagcatgataatctacttgaatgtctgaaggttatttatccagatgagcctggtttaactgttgcta

SEQ ID NO: 330466 - DNA, 75 bp, synthetic construct
  source 1..75: mol_type = other DNA
cgaaaagtatcttaagcagctcgatttatgggagaaacgtaacgaacgtgcgaggatgttatcaggcgggatgaa

SEQ ID NO: 330467 - DNA, 75 bp, synthetic construct
  source 1..75: mol_type = other DNA
ttttttctggttcaggttttcttgacttaggttttgaacactcaggcttcaatgttggcttcgtaaatgaattcc

SEQ ID NO: 330468 - DNA, 75 bp, synthetic construct
  source 1..75: mol_type = other DNA
gggggcagcgattttgcttaccgccgtcgggtttaatctctttggtgatggtattcgcgatctgcttgacccgaa

SEQ ID NO: 330469 - DNA, 75 bp, synthetic construct
  source 1..75: mol_type = other DNA
gaaaagggttaacaaagttcatgacaataagggagggagatgtaagcagaaagtcatataaaagactccatcgaa

SEQ ID NO: 330470 - DNA, 75 bp, synthetic construct
  source 1..75: mol_type = other DNA
aatcaacaacgtgtttcgctgctaacccatacgctcattttattgctgtgtctgggtctggcctggggtgcaata

SEQ ID NO: 330471 - DNA, 75 bp, synthetic construct
  source 1..75: mol_type = other DNA
cgttggcttaatgtacgccgccgctatccccaccagtctgattatcgcattgctggaattgcgtcacttataccg

SEQ ID NO: 330472 - DNA, 75 bp, synthetic construct
  source 1..75: mol_type = other DNA
atccccaccagtctgattatcgcattgctggaattgcgtcacttataccggcagttcacaaatccccccagccga

SEQ ID NO: 330473 - DNA, 75 bp, synthetic construct
  source 1..75: mol_type = other DNA
gagggaaatggaagcctgcatatcccggatgaatcggcagcctggtcagtcgcctacagtaatgagttatctgac

SEQ ID NO: 330474 - DNA, 75 bp, synthetic construct
  source 1..75: mol_type = other DNA
tatcgcatgttgataatgacatcgatggccatatttttcgctgtaaagtgaaagcattacaggaaggtgaaaatc

SEQ ID NO: 330475 - DNA, 75 bp, synthetic construct
  source 1..75: mol_type = other DNA
ggattccgctgttgcgtggcgataatgaacagcaactggcagagcgcgtcagggcacacctttgcgcacaacgtc

SEQ ID NO: 330476 - DNA, 75 bp, synthetic construct
  source 1..75: mol_type = other DNA
gagccgcaaaaggagatttgcataattttcttaaaagatcatttcgaactttatctgataaatcaaaacttgaaa

SEQ ID NO: 330477 - DNA, 75 bp, synthetic construct
  source 1..75: mol_type = other DNA
agctggctgcggcgttgggcaacgacccgaattttgcgaccaccatgactagcgcgcttgcgggcaaccgaaaga

SEQ ID NO: 330478 - DNA, 75 bp, synthetic construct
  source 1..75: mol_type = other DNA
tgtcgggccaatcaccggtacggttgacggaaaaatcggcaacacgccctataaatttatggtgatgcaggtaac

SEQ ID NO: 330479 - DNA, 75 bp, synthetic construct
  source 1..75: mol_type = other DNA
atcctgatgaccggtgaactggcggcgttaattcaaaacctgatcgaaggattgggtggcgaagcacaacgttaa

SEQ ID NO: 330480 - DNA, 75 bp, synthetic construct
  source 1..75: mol_type = other DNA
agaaggccatgaaactaccacgcagctctcttgtctggtgtgtgttgatcgtgtgtctcacactgttgatattca

SEQ ID NO: 330481 - DNA, 75 bp, synthetic construct
  source 1..75: mol_type = other DNA
gtgttgatgcggagcttaaagaagcctttcttcgggccgccaaggccaatgatcgtccggcgtcagttttaatcc

SEQ ID NO: 330482 - DNA, 75 bp, synthetic construct
  source 1..75: mol_type = other DNA
ggcccgtaaagacgggtggcgaataagcaaagacaaaacgcgtgcttttgcgcccgggcataaagttttgaggat

SEQ ID NO: 330483 - DNA, 75 bp, synthetic construct
  source 1..75: mol_type = other DNA
ggtgataacgtcgtggtagctcaggtgcagttgtcacaaaagatgtcccggacaacgttgtcgtgggcggtaatc

SEQ ID NO: 330484 - DNA, 75 bp, synthetic construct
  source 1..75: mol_type = other DNA
tccggtgttcttttacgctaccatgctaataatcaacaccataatcagcccaaccacggagttgaccagctccag

SEQ ID NO: 330485 - DNA, 75 bp, synthetic construct
  source 1..75: mol_type = other DNA
caccgctggtacaccatccggcaccagcggtgactacattgacgatgagctgccggtctatcagggcgaaacgac

SEQ ID NO: 330486 - DNA, 75 bp, synthetic construct
  source 1..75: mol_type = other DNA
cactcattcatcatattcagaaactgacaaaaagggttgaggagcttgaagtaaggttaaagctatccgagttat

SEQ ID NO: 330487 - DNA, 75 bp, synthetic construct
  source 1..75: mol_type = other DNA
caaaattgtggtagatctgttacttcccctctactattcccacgttaaaatagggtgttccctggaaagttgcag

SEQ ID NO: 330488 - DNA, 75 bp, synthetic construct
  source 1..75: mol_type = other DNA
cgtggtagcctcaggtgcagttgtcacaaaagatgtcccggacaacgttgtcgtgggcggtaatccagccagaat

SEQ ID NO: 330489 - DNA, 75 bp, synthetic construct
  source 1..75: mol_type = other DNA
accaggggcaactgactatcgacggcaatctggtgctgggggataacgggccgatcattctgccgcagcacacag

SEQ ID NO: 330490 - DNA, 75 bp, synthetic construct
  source 1..75: mol_type = other DNA
gacgtggcgattcagggcgcgggttacattgcggtgcaggataaaaacggcaacgaagtgtatacccgcaacggc

SEQ ID NO: 330491 - DNA, 75 bp, synthetic construct
  source 1..75: mol_type = other DNA
gaaccgccagtttgaagcgcagatcaagatgatgaaaaccgccgaagatatcagcgacgcgggcaaccgcttatt

SEQ ID NO: 330492 - DNA, 75 bp, synthetic construct
  source 1..75: mol_type = other DNA
gatagtgctcagatcttttacaaatggcttgctgcaaaacatgatatagatatagacaaattaattgctcgaatt

SEQ ID NO: 330493 - DNA, 75 bp, synthetic construct
  source 1..75: mol_type = other DNA
caaacttactatctttcgatgatattgaaatcaatgggcttcatgatatgaactgtatcgtgggaagaaataatg

SEQ ID NO: 330494 - DNA, 75 bp, synthetic construct
  source 1..75: mol_type = other DNA
atggatcgcctgatttataccgccctgagcggggcttcgcagacgttgtatgagcagcagattagcgccaacaac

SEQ ID NO: 330495 - DNA, 75 bp, synthetic construct
  source 1..75: mol_type = other DNA
acggtaagagcatggacatgacccagccagaaggtgagcacagtgcacacgaagggatggaaggcatggacatga

SEQ ID NO: 330496 - DNA, 75 bp, synthetic construct
  source 1..75: mol_type = other DNA
ttttttgccagcgtcattattcttatctgcattattaaaaagaaatatgcagacagagttgtttttatacggtga

SEQ ID NO: 330497 - DNA, 75 bp, synthetic construct
  source 1..75: mol_type = other DNA
tggttagtattttcattgactggcagcactcctgtctcagtcattacgttttttgccagcgtcattattcttatc

SEQ ID NO: 330498 - DNA, 75 bp, synthetic construct
  source 1..75: mol_type = other DNA
tgccggattgctggaaagcgatctatttggtcatgagcgtggggcttttaccggtgccagcgctcagcgcattgg

SEQ ID NO: 330499 - DNA, 75 bp, synthetic construct
  source 1..75: mol_type = other DNA
actggaaccgtcgaatggcagaaccgcaattccggatcatatcggaagaagctttagtccatatcgacttcatgt

SEQ ID NO: 330500 - DNA, 75 bp, synthetic construct
  source 1..75: mol_type = other DNA
caacattgcaaaacagcgaggaagctcagatcgcgtcattaagacgaaagatgggggtgagctgtatgtggtgaa

SEQ ID NO: 330501 - DNA, 75 bp, synthetic construct
  source 1..75: mol_type = other DNA
ttgatcgccttggggttcagcggggcatggatcggcaacctgacggtgctggaaccctatcgcccgatcttcatc

SEQ ID NO: 330502 - DNA, 75 bp, synthetic construct
  source 1..75: mol_type = other DNA
acagcgtctgggactgaaacgtaccacgttgctatcacggatgaagcgactgggaatagataaagctgcattggt

SEQ ID NO: 330503 - DNA, 75 bp, synthetic construct
  source 1..75: mol_type = other DNA
ggaatggccgggcaacgtgcgtgagctggaaaacgtcatcgagcgcgcggtattgctaacacgcggcaacgtgct

SEQ ID NO: 330504 - DNA, 75 bp, synthetic construct
  source 1..75: mol_type = other DNA
cttcaaaattgcccgtcgtctggggcgcaatatcgacagcattcctgccgagacgttgcgcaccttgagcaatat

SEQ ID NO: 330505 - DNA, 75 bp, synthetic construct
  source 1..75: mol_type = other DNA
ctggaaaacgtcattgagcgcgcggtattgctgacacgtggcaacgtgctgcagctgtcattgcctgatattgct

SEQ ID NO: 330506 - DNA, 75 bp, synthetic construct
  source 1..75: mol_type = other DNA
agaatcacactaaatcaccacaccccgcgccacacaaggcttgctggttctaccaggctgcactaactccgccca

SEQ ID NO: 330507 - DNA, 75 bp, synthetic construct
  source 1..75: mol_type = other DNA
aatcgccgcaactaaccgcgatctgaaaaaatggtcgccgaccgtgagttccgtagcgatctctattaccgcctg

SEQ ID NO: 330508 - DNA, 75 bp, synthetic construct
  source 1..75: mol_type = other DNA
taaagggacattatacgcccggtagtgctgctcagttctaccttcggttcggagccatccagcttgcgaaaggaa

SEQ ID NO: 330509 - DNA, 75 bp, synthetic construct
  source 1..75: mol_type = other DNA
ttactgaacatcaggttaaacgacgcatgatcgtagaaacccacagcgccgcgtcagtctgcgcaatggtacggg

SEQ ID NO: 330510 - DNA, 75 bp, synthetic construct
  source 1..75: mol_type = other DNA
tccgttagttcacggtatgccttttgtttctggtgtagggatcgaagcattacaaaataaaattctgactatctt

SEQ ID NO: 330511 - DNA, 75 bp, synthetic construct
  source 1..75: mol_type = other DNA
gatggcggcggaagagattaaagagttatgtcagagccataatatccctgttgaattaatccagtgtcgggttaa

SEQ ID NO: 330512 - DNA, 75 bp, synthetic construct
  source 1..75: mol_type = other DNA
tttgagcgcgtacgtggaagattgcatcccacggtacaaggattacgcctgtttgaagaggtacagcgctcatgg

SEQ ID NO: 330513 - DNA, 75 bp, synthetic construct
  source 1..75: mol_type = other DNA
taacgccggatgattttcacagtgagaactacatcagcctttcccgtactgacagctatcgccagttgctggatc

SEQ ID NO: 330514 - DNA, 75 bp, synthetic construct
  source 1..75: mol_type = other DNA
ctggtgcaggcattcagcgagcatttacagaccggtttaccaaaactggttgccgctcttgaggctattttgtag

SEQ ID NO: 330515 - DNA, 75 bp, synthetic construct
  source 1..75: mol_type = other DNA
cagcattgagctgtcggcttgttttgcgaaagctgacagaaacagaaccggtgattattttcgaaggtatcgaag

SEQ ID NO: 330516 - DNA, 75 bp, synthetic construct
  source 1..75: mol_type = other DNA
aagatggctggcggatcagaaactggccgagttggagcgtttcattgtgaaggaaaaccttcctctgaccatcgt

SEQ ID NO: 330517 - DNA, 75 bp, synthetic construct
  source 1..75: mol_type = other DNA
gcatggactacatggagcaaaagagagctgatgagctggcatacaagctggctactggtcaagcagaggataacg

SEQ ID NO: 330518 - DNA, 75 bp, synthetic construct
  source 1..75: mol_type = other DNA
gaaagtatggctctaccaccataaaagcggaacacgctaaggaaattcttgagcacttcaaggatttcatactat

SEQ ID NO: 330519 - DNA, 75 bp, synthetic construct
  source 1..75: mol_type = other DNA
aaatattgcgaacaaaaatccaagcctgatcattgatgaattatcggaagagttcttcatcacaacatcaaaagg

SEQ ID NO: 330520 - DNA, 75 bp, synthetic construct
  source 1..75: mol_type = other DNA
atatcaatgtgaatatttctgagaaactcaacaaagatgcacttggcaagataataaaagatggaatacgctcca

SEQ ID NO: 330521 - DNA, 75 bp, synthetic construct
  source 1..75: mol_type = other DNA
aacattaaatccatatggcacatcgaagtatatatcagaattgatgattagagatattgcaaaaaaatatagcga

SEQ ID NO: 330522 - DNA, 75 bp, synthetic construct
  source 1..75: mol_type = other DNA
aattctaaaaaaacacaaatttgattgtataatgcattttgccggtgcaaagtctgttgctgaatctttaataaa

SEQ ID NO: 330523 - DNA, 75 bp, synthetic construct
  source 1..75: mol_type = other DNA
aggtatttcaatcctgtcggagcacatccctcaggagaaataggtgaaaatccaaatggagtcccaagtaatatt

SEQ ID NO: 330524 - DNA, 75 bp, synthetic construct
  source 1..75: mol_type = other DNA
cggacgcagggagagctgaatgcgctgaaagtagcgcaggataaatacggacctcttcaggcggatgcgacggaa

SEQ ID NO: 330525 - DNA, 75 bp, synthetic construct
  source 1..75: mol_type = other DNA
aacggagatgatcctcttactggggcgattacaaatggagcgggggccgggtttggatatggggttggtaattat

SEQ ID NO: 330526 - DNA, 75 bp, synthetic construct
  source 1..75: mol_type = other DNA
ttctgttttagagctggtttctatctttgaaaaaatatctggggttagaattccatatgaaattgtttcgagaag

SEQ ID NO: 330527 - DNA, 75 bp, synthetic construct
  source 1..75: mol_type = other DNA
actggttccgcgcctgcaaaaaagaaggcattcatacctgtctggacaccaacggttttgttcgtcgttacgatc

SEQ ID NO: 330528 - DNA, 75 bp, synthetic construct
  source 1..75: mol_type = other DNA
ccctaccatgagctgggcaaacacaaatgggtggcgatgggcgaagagtacaaactcgatggcgtgaaaccaccg

SEQ ID NO: 330529 - DNA, 75 bp, synthetic construct
  source 1..75: mol_type = other DNA
caaactcgatggtgtgaaaccaccgaagaaagagacgatggagcgcgtgaagggcattctcgagcagtatggtca

SEQ ID NO: 330530 - DNA, 75 bp, synthetic construct
  source 1..75: mol_type = other DNA
ctggttatattggttcgcatacggtacttcgcttattagaaaatgaaaatgaaattactgttgtggataatttgg

SEQ ID NO: 330531 - DNA, 75 bp, synthetic construct
  source 1..75: mol_type = other DNA
gttagaagatatgattcgtgatgcatggaattggcagcaaaaaatccaaatggatttaagaaagtttaataaaaa

SEQ ID NO: 330532 - DNA, 75 bp, synthetic construct
  source 1..75: mol_type = other DNA
tccgacccgtctaaagcataccttgaacttggatggaaagcctgtttgggattagatgagatggttcgcgatgcc

SEQ ID NO: 330533 - DNA, 75 bp, synthetic construct
  source 1..75: mol_type = other DNA
aactggcaaacttcatagggcacaatgccggaattaatgataacgatgcagcgaaagccattgctcatgccattc

SEQ ID NO: 330534 - DNA, 75 bp, synthetic construct
  source 1..75: mol_type = other DNA
ctggatgccgggcaatgcttacgcctgcaggttaagccgtggcgcgagaagcgcagcctgtcgcagaacgcgctc

SEQ ID NO: 330535 - DNA, 75 bp, synthetic construct
  source 1..75: mol_type = other DNA
ctggatgccgggcagtgcttccgcctgcaggttaagccgtggcgagagaagcgcagcctgtcacagaacgcgctc

SEQ ID NO: 330536 - DNA, 75 bp, synthetic construct
  source 1..75: mol_type = other DNA
ggggtaaaacgttcgccactccagcttgggtaaaagatgctctcaaacacacatatctcggttatgaaaccaaag

SEQ ID NO: 330537 - DNA, 75 bp, synthetic construct
  source 1..75: mol_type = other DNA
ttttccctcttgtggcgaagtttgcggcggagcagggcattgcgctacgcattgaccgtcaatcggcttttaacg

SEQ ID NO: 330538 - DNA, 75 bp, synthetic construct
  source 1..75: mol_type = other DNA
aattgcatcgcggtaacttcaccgctatcggtcggcagatccagccttatctggaggagggcaaatgctttcgca

SEQ ID NO: 330539 - DNA, 75 bp, synthetic construct
  source 1..75: mol_type = other DNA
taacatcggcgttcaaaaagaggaactcgcgttgtccatattgtgttctggaagccggtaaagtacctgaggagc

SEQ ID NO: 330540 - DNA, 75 bp, synthetic construct
  source 1..75: mol_type = other DNA
ttgtcggccctgcgcttcaccggcgagtttccgaaaaagctgaccctggtcggcgtgatcccggaatcgctggag

SEQ ID NO: 330541 - DNA, 75 bp, synthetic construct
  source 1..75: mol_type = other DNA
gcgcttgagcaggttctggctgcgctgcgcgaatcaggcgtggaagccatcccacgggaggcgattcatgactga

SEQ ID NO: 330542 - DNA, 75 bp, synthetic construct
  source 1..75: mol_type = other DNA
atatgggggggattatcctacggttgatggcacgggagttagagattacatacatgttatggacttagcggaagg

SEQ ID NO: 330543 - DNA, 75 bp, synthetic construct
  source 1..75: mol_type = other DNA
tgggcggtgaatattggctgccacctgactattccgcagagctgcgagttccagcagctccgcgacaaacaggag

SEQ ID NO: 330544 - DNA, 75 bp, synthetic construct
  source 1..75: mol_type = other DNA
aatattgctaaagaaatggagaagctaggaattaaagtaataaggaaagcagataaatatttgccaccaaatgct

SEQ ID NO: 330545 - DNA, 75 bp, synthetic construct
  source 1..75: mol_type = other DNA
tgatatgcagagacatgtggatgaaagtaatggggacagcagtagtgacgaagggacgaaaaatactggtagtgt

SEQ ID NO: 330546 - DNA, 75 bp, synthetic construct
  source 1..75: mol_type = other DNA
ccgcgcctgcaaaaaagaaggcattcatacctgtctcgacactaacggttttgttcgtcgttacgatccagtaat

SEQ ID NO: 330547 - DNA, 75 bp, synthetic construct
  source 1..75: mol_type = other DNA
ctcaatagtgaggaagtcagaatcccatcagagttcgtaatcaataaaaactccttagataaaatccgcaatgtg

SEQ ID NO: 330548 - DNA, 75 bp, synthetic construct
  source 1..75: mol_type = other DNA
ttcccaatctggaggaatatcctattggaaatgcttcatgcccctatggaactactaaagtcatgctggagcagg

SEQ ID NO: 330549 - DNA, 75 bp, synthetic construct
  source 1..75: mol_type = other DNA
accactggaatattacattaataatgtcagtggaacccttaccctgcttgaagttatgaagcaagcaaatgttta

SEQ ID NO: 330550 - DNA, 75 bp, synthetic construct
  source 1..75: mol_type = other DNA
agttacagtggcaggcgaaactttctttagaggatatgttgcgagatgcttggaattggcaaataaataatcctg

SEQ ID NO: 330551 - DNA, 75 bp, synthetic construct
  source 1..75: mol_type = other DNA
tatcaccaagctgatgatgttcaaaaaacagaattaagctacttaagcttcatcaacaaaactacgggacagtct

SEQ ID NO: 330552 - DNA, 75 bp, synthetic construct
  source 1..75: mol_type = other DNA
ttagtagacggtgttattgatttgtatggttcaaaagggaactcagcgcattatggtgtttttattaaaaataaa

SEQ ID NO: 330553 - DNA, 75 bp, synthetic construct
  source 1..75: mol_type = other DNA
gactggatcactgagtttggtaaggctgtccggacagataactggcgtcctttttttgttaaaacagaaaccatc

SEQ ID NO: 330554 - DNA, 75 bp, synthetic construct
  source 1..75: mol_type = other DNA
catcagcctgctgtgcgtaaagtgctgggggataatttgctaatggcgatgggggcgatgctggaagaagcgcag

SEQ ID NO: 330555 - DNA, 75 bp, synthetic construct
  source 1..75: mol_type = other DNA
gcatgctttaacaattaccgcctggcagcagatttatgatcagctgcatcccggcaagtttcatggtgaatttac

SEQ ID NO: 330556 - DNA, 75 bp, synthetic construct
  source 1..75: mol_type = other DNA
atcagttttacaagtaattgatgcctttgaaaaggcaagtgacaagaaagttaactatgaaattgtcgccaggcg

SEQ ID NO: 330557 - DNA, 75 bp, synthetic construct
  source 1..75: mol_type = other DNA
caccggtatttccgtctcccctgccggtcagccggagcgtgacatcatcatgtggcgcgatcaccgcgcacagga

SEQ ID NO: 330558 - DNA, 75 bp, synthetic construct
  source 1..75: mol_type = other DNA
gaacgttttgggttgcttcatattgtagaaaaaccggtcgtcttctggtttgagcagtataacgaacagaaacaa

SEQ ID NO: 330559 - DNA, 75 bp, synthetic construct
  source 1..75: mol_type = other DNA
tccgctctcttattaccagaataacgtcactggcacactggttctgctcgaggaaatgcgtgcggccggcgtaaa

SEQ ID NO: 330560 - DNA, 75 bp, synthetic construct
  source 1..75: mol_type = other DNA
gggctggtgccgctgttgcgtgacgacgaaagtaatttaattctttgggaatcaaacgccattgtccgctacctt

SEQ ID NO: 330561 - DNA, 75 bp, synthetic construct
  source 1..75: mol_type = other DNA
cattggatgagcactgtaatactggtggaacaactaatccttatggaacatcgaaatatctcgttgaacgaatcc

SEQ ID NO: 330562 - DNA, 75 bp, synthetic construct
  source 1..75: mol_type = other DNA
gatccaagtttggcatttgaagagctaaaatggaaggcgactaaaaccttagatgacatggttatggatgcttgg

SEQ ID NO: 330563 - DNA, 75 bp, synthetic construct
  source 1..75: mol_type = other DNA
caaatctggaacgctggtatcagcaactcaccgagcgccctgcggtgcgtaaagtcgtaatgatccccgttagct

SEQ ID NO: 330564 - DNA, 75 bp, synthetic construct
  source 1..75: mol_type = other DNA
acaaagagtgcgatgcattgtttgctcttcttgatgcagaactggcaaaagtgaaatggttctctggcgatgaat

SEQ ID NO: 330565 - DNA, 75 bp, synthetic construct
  source 1..75: mol_type = other DNA
tgcggaagcggaaaaatggatggactgggcaaaccagacgctcagtaatgctcatcgcgggatcctgatgggatt

SEQ ID NO: 330566 - DNA, 75 bp, synthetic construct
  source 1..75: mol_type = other DNA
cgttattttaatcctgttggggctcacacatcaggattattaggggaagatccaagaggaaaacctaataatctt

SEQ ID NO: 330567 - DNA, 75 bp, synthetic construct
  source 1..75: mol_type = other DNA
tcagatccttcaaaagcttatgaagaattaaattggagagctaaaaaagatttagctgatatgattcgagatgct

SEQ ID NO: 330568 - DNA, 75 bp, synthetic construct
  source 1..75: mol_type = other DNA
tagggtatataggttctcatactgtcgtgtcgttattagatgctggctacgaagttatcataattgataatttat

SEQ ID NO: 330569 - DNA, 75 bp, synthetic construct
  source 1..75: mol_type = other DNA
gcccattgaatattatgataataatatttctggaactctgaccttgttgaaggtaatgaattgttttggtgttaa

SEQ ID NO: 330570 - DNA, 75 bp, synthetic construct
  source 1..75: mol_type = other DNA
taccattaacagaacaatgttctgtaggtgcaacaaccaacccatatggaacttcaaagtttatggctgagcgca

SEQ ID NO: 330571 - DNA, 75 bp, synthetic construct
  source 1..75: mol_type = other DNA
gatttcgttttttataaaggtgatattactgatgaaagtttattgtttaaaatatttactgaaaataacatcact

SEQ ID NO: 330572 - DNA, 75 bp, synthetic construct
  source 1..75: mol_type = other DNA
ccgaacgtgagcgtaatgcagtgaacgctgaattaaccatggcgcgtacgcgtgacgggatgcgcatggcacagg

SEQ ID NO: 330573 - DNA, 75 bp, synthetic construct
  source 1..75: mol_type = other DNA
tcacaatgccagcactgcgccgtatcgcacggctttctatctggaagttgagaacgacgccttgcctggtgcggt

SEQ ID NO: 330574 - DNA, 75 bp, synthetic construct
  source 1..75: mol_type = other DNA
ctgatccgcaggcagttaaatcgctctcggcgctggtagtgcccgttgggtcgctggaagatcccgaggcgtacc

SEQ ID NO: 330575 - DNA, 75 bp, synthetic construct
  source 1..75: mol_type = other DNA
gtcaccgcctcttcagaatcaagtgggtggacagcctctccatcagcacaaggaaagctaactttatttgatcca

SEQ ID NO: 330576 - DNA, 75 bp, synthetic construct
  source 1..75: mol_type = other DNA
gaacaagatatcacgaacggtgcaatagtggttcttccgcaacttgggtggaagaaaatggatgaaactttctgg

SEQ ID NO: 330577 - DNA, 75 bp, synthetic construct
  source 1..75: mol_type = other DNA
ggagttggcaaaaatggcggcggacacctttggtcgcgtgccgaacaaagagagcaaaaaccggaaatcaccgtg

SEQ ID NO: 330578 - DNA, 75 bp, synthetic construct
  source 1..75: mol_type = other DNA
taaacggtgtaaaaattgagattgccaccggcctggccaatgttgacttgtcagggttacagaacgcgataactg

SEQ ID NO: 330579 - DNA, 75 bp, synthetic construct
  source 1..75: mol_type = other DNA
attctggcggcggtgaatttgccgcagttatgaaagatatgggactgaatatcgaagagtatgcaaagtttgtta

SEQ ID NO: 330580 - DNA, 75 bp, synthetic construct
  source 1..75: mol_type = other DNA
tcagtcggggatgtctgtaactcaattacagcaattagataaaacgttccgtactactggcttaggaatggaaaa

SEQ ID NO: 330581 - DNA, 75 bp, synthetic construct
  source 1..75: mol_type = other DNA
tttactctatcgtcatgactacggacctctttcatgattacgcctgccaacaaataacacgcgcgcatcatgccc

SEQ ID NO: 330582 - DNA, 75 bp, synthetic construct
  source 1..75: mol_type = other DNA
tcagggaggagaaaaacttcgtcagtacatggacgcggcaaaacagtttggcgttgcccctgacgatgctgatat

SEQ ID NO: 330583 - DNA, 75 bp, synthetic construct
  source 1..75: mol_type = other DNA
cgcacgatggtattgatagcgtcccggaaacaggaacatggttgctccagaaaggtgagcgagttgtgacctctc

SEQ ID NO: 330584 - DNA, 75 bp, synthetic construct
  source 1..75: mol_type = other DNA
tcacaataaaaaaatataacagaggattaatacaagaatgtatagagtgtttagggtatccaaagcaatttactc

SEQ ID NO: 330585 - DNA, 75 bp, synthetic construct
  source 1..75: mol_type = other DNA
tctattgatggtatgcgtaaacatagtggacgtatttttgtcatactttgtacaaatcggctgagagcccttgac

SEQ ID NO: 330586 - DNA, 75 bp, synthetic construct
  source 1..75: mol_type = other DNA
tacaacaaattcctgcgtacacttctggccataaagctggaccagctgcgggctttcctggccggtacgccagcc

SEQ ID NO: 330587 - DNA, 75 bp, synthetic construct
  source 1..75: mol_type = other DNA
cgcagggcggtcaggttgcttttatgcgcctgaaaatgttcctgcagataaataatctgatttcttattatgtca

SEQ ID NO: 330588 - DNA, 75 bp, synthetic construct
  source 1..75: mol_type = other DNA
tggagcaagaagtaccataagagcgttttaccgctctgcaagctcgttgctgagcagtatccgcttgttattttt

SEQ ID NO: 330589 - DNA, 75 bp, synthetic construct
  source 1..75: mol_type = other DNA
cagtgcattgacgatctgagaaaatatcaggggcgtatcgtcgttttcctgtgtactaaccgcttatccgtactt

SEQ ID NO: 330590 - DNA, 75 bp, synthetic construct
  source 1..75: mol_type = other DNA
cgatacagaacgccatgaattgttcacaaaagatctaggtgatatgggattttccccaatcgatgtgctaaaact

SEQ ID NO: 330591 - DNA, 75 bp, synthetic construct
  source 1..75: mol_type = other DNA
cctattcagacgtccagaaacttaacgatctgcagtgttatgtcaccctgcccggtgactatcccgttgtaaaac

SEQ ID NO: 330592 - DNA, 75 bp, synthetic construct
  source 1..75: mol_type = other DNA
tcgatctgcgtttaactgacgatgacaaaagtctaattgaggaagcggcggcgatatctaatcagtccgtcagcc

SEQ ID NO: 330593 - DNA, 75 bp, synthetic construct
  source 1..75: mol_type = other DNA
atgtctgttgttgaaaatcagcatattgcgctgtctttaactgatgatgataaatgtttgtttgaaacggcagct

SEQ ID NO: 330594 - DNA, 75 bp, synthetic construct
  source 1..75: mol_type = other DNA
cagcctgtctataccatccgttattacgaacataagctgcagtacagtgcacgtcagatactgaatgatgattac

SEQ ID NO: 330595 - DNA, 75 bp, synthetic construct
  source 1..75: mol_type = other DNA
accgtatattgcggtcagttgctgaagcaggaactgattattgccggttgcgccgcgctgctggtcgcctttgtg

SEQ ID NO: 330596 - DNA, 75 bp, synthetic construct
  source 1..75: mol_type = other DNA
agcaggaactgatcattgccggttgtgccgcgctgcttgtcgcctttgtggccacatttgccgcgtactggtatc

SEQ ID NO: 330597 - DNA, 75 bp, synthetic construct
  source 1..75: mol_type = other DNA
aattaaatgaactactagacgtattgaatagtaatgatttaggtagtaatacctttatggatcagttgacaggaa

SEQ ID NO: 330598 - DNA, 75 bp, synthetic construct
  source 1..75: mol_type = other DNA
atgaagctgatcatgcctttcccacccagcgtgaacacgtactggcgacaccccaacaaaggggtgtttgctggt

SEQ ID NO: 330599 - DNA, 75 bp, synthetic construct
  source 1..75: mol_type = other DNA
cacctgttttatgagtacgacgctgcggaccggatcatccgctggtccgataacgaccagacgtggagccgtttc

SEQ ID NO: 330600 - DNA, 75 bp, synthetic construct
  source 1..75: mol_type = other DNA
ccccaacaaaggggcgtttgctggtaagagcctgataagcgcggcggggcgaaaattccagagcgcggcgtgcgc

SEQ ID NO: 330601 - DNA, 75 bp, synthetic construct
  source 1..75: mol_type = other DNA
atgaagctgatcgtgcctttccctcccagcgtgaacacgtactggcgacaccccaacaaaggggcgtttgctggt

SEQ ID NO: 330602 - DNA, 75 bp, synthetic construct
  source 1..75: mol_type = other DNA
atgaagctgatcctgcctttccctcccagcgtgaacacgtactggcgacaccccaacaaaggggggtttgctggt

SEQ ID NO: 330603 - DNA, 75 bp, synthetic construct
  source 1..75: mol_type = other DNA
atgaagctgatcttgcctttcccacccagcgtgaacacgtactggcgacaccccaacaaaggggagtttgctggt

SEQ ID NO: 330604 - DNA, 75 bp, synthetic construct
  source 1..75: mol_type = other DNA
atgctggtggagtgggggccagtggtgccgaaaggaaaggttgaaataacgatcagcatttacgaaccggcgggt

SEQ ID NO: 330605 - DNA, 75 bp, synthetic construct
  source 1..75: mol_type = other DNA
atgaagctaatactgccttttccgcccagcgtgaacacgtactggcgacaccccaacaaaggggcgtttgctggt

SEQ ID NO: 330606 - DNA, 75 bp, synthetic construct
  source 1..75: mol_type = other DNA
ttctatggtgaagagattagcgagtcactgtttctgcaagtgctggatgattccagccatcgcggtgaacgttcg

SEQ ID NO: 330607 - DNA, 75 bp, synthetic construct
  source 1..75: mol_type = other DNA
ccgtcatccgctgtatcctgccaccggaagatgaacgcgacagacatcccgatgaatccctgctgaaaaccacct

SEQ ID NO: 330608 - DNA, 75 bp, synthetic construct
  source 1..75: mol_type = other DNA
ggaagacgatagtcaggttaagcggatggctatcgagtgggggccggcagtaaagcctggaagggtagaaataac

SEQ ID NO: 330609 - DNA, 75 bp, synthetic construct
  source 1..75: mol_type = other DNA
caactgttaacacctattaccggtcccctgaccgcggcgcgttaaagggtaagcatctgataagtgagatgggga

SEQ ID NO: 330610 - DNA, 75 bp, synthetic construct
  source 1..75: mol_type = other DNA
atgaagctgattctgccttttccgcccagcgtgaacacgtactggcgacaccccaataaaggggcgcttgcaggt

SEQ ID NO: 330611 - DNA, 75 bp, synthetic construct
  source 1..75: mol_type = other DNA
agggtgcaagtgcaggtcaattccacggtggcgtagacgagctagattcatcaatggataacaagtctttcgtac

SEQ ID NO: 330612 - DNA, 75 bp, synthetic construct
  source 1..75: mol_type = other DNA
cggcccaaaaaatgaagatgagtggaagcagaagaaaaaagctcaggaagcagcagacaaagcgaagaaggcagc

SEQ ID NO: 330613 - DNA, 75 bp, synthetic construct
  source 1..75: mol_type = other DNA
aaagccagatgcctgaacgtaatctcgctgtgatcgagggatttgtttcccgcattgatgttctggattacgacg

SEQ ID NO: 330614 - DNA, 75 bp, synthetic construct
  source 1..75: mol_type = other DNA
tgccccttatttgtctttcttccgctctctgggcagctcctgcaacggtaaatgtcgaagtactgcaagacaaac

SEQ ID NO: 330615 - DNA, 75 bp, synthetic construct
  source 1..75: mol_type = other DNA
ggggaatcaactattcaggctttaagataccggaagcgaaaggggagatcgtcgccgggaccgagcaacctgttt

SEQ ID NO: 330616 - DNA, 75 bp, synthetic construct
  source 1..75: mol_type = other DNA
tatggtagtgatgatgataaacaattccaagaaaaattgaagaaacatcaaaacagtattgtacaggcggtgcgt

SEQ ID NO: 330617 - DNA, 75 bp, synthetic construct
  source 1..75: mol_type = other DNA
gtatcagttcggtcaccctgatggagctgatatatggtgcagaaaaaagccagatgcctgaacgtaatctcgctg

SEQ ID NO: 330618 - DNA, 75 bp, synthetic construct
  source 1..75: mol_type = other DNA
ccccaataaaggggcgcttgcaggtaagagcctgataagcgcggcggggcgaaaattccagagcgcagcgtgtgc

SEQ ID NO: 330619 - DNA, 75 bp, synthetic construct
  source 1..75: mol_type = other DNA
atgctggtggagtgggggaacatcgttaagaaagggaaagtagaaatcaccatccgacgttttcgtgcagttgtc

SEQ ID NO: 330620 - DNA, 75 bp, synthetic construct
  source 1..75: mol_type = other DNA
atgcctgaacgtaatctcgctgtgatcgagggatttgtttcccgcattgatgttctggattacgacgctgctgca

SEQ ID NO: 330621 - DNA, 75 bp, synthetic construct
  source 1..75: mol_type = other DNA
atgctgaaattcatgctggacacgaatatctgtatcttcacgattaagaacaaaccggcgcatattcgggaacga

SEQ ID NO: 330622 - DNA, 75 bp, synthetic construct
  source 1..75: mol_type = other DNA
atgctgaaattcatgctggataccaatatctgtattttcaccatcaaaaataaaccagcgcatatccgggagcgt

SEQ ID NO: 330623 - DNA, 75 bp, synthetic construct
  source 1..75: mol_type = other DNA
ggatatgttcccgaatattgcccgctggctgggttacatcaccctgggcgtgctgtccttcgggttggctggggc

SEQ ID NO: 330624 - DNA, 75 bp, synthetic construct
  source 1..75: mol_type = other DNA
ggatatgttcccgaatattgcccgctggctgggttacatcaccctgggcgtgctgtccttcgggctggccggggc

SEQ ID NO: 330625 - DNA, 75 bp, synthetic construct
  source 1..75: mol_type = other DNA
aggcgctggcgtgggtggaggaaaatatccaggtaccgctgactgaaccgcagaaagcaggtatcgcgtcgttct

SEQ ID NO: 330626 - DNA, 75 bp, synthetic construct
  source 1..75: mol_type = other DNA
atctgccgcggtgcaacgatggtggatggtaagccagtcgtaccaggaatgaaactgtcgaaggaaaaatgcgct

SEQ ID NO: 330627 - DNA, 75 bp, synthetic construct
  source 1..75: mol_type = other DNA
gaaatgacgggatgaaacgcgcccaggaaatggccgaacgaatggctgagccgtgggaacgtatcaaagcgacat

SEQ ID NO: 330628 - DNA, 75 bp, synthetic construct
  source 1..75: mol_type = other DNA
ggcggtaagcaatggaaagggctgatgactcgccgtgagattgagcgtgaagtctgtttgtgggggcagcaatga

SEQ ID NO: 330629 - DNA, 75 bp, synthetic construct
  source 1..75: mol_type = other DNA
cagtcgttatcttgagcgtttacatactgccggactcaacgtgacgcgggttttgccagatggctgctatcttcc

SEQ ID NO: 330630 - DNA, 75 bp, synthetic construct
  source 1..75: mol_type = other DNA
gaaccacagaaagcgggtatagcgtcattctgtccctataacattggccccggtaagtgtttcccgtcgacgttt

SEQ ID NO: 330631 - DNA, 75 bp, synthetic construct
  source 1..75: mol_type = other DNA
gtggcagagactgccgtattcgttcaaacaactgttacggtcaagtatcccgtcgtgaccaggagagcgcgctgg

SEQ ID NO: 330632 - DNA, 75 bp, synthetic construct
  source 1..75: mol_type = other DNA
acggtaagccagtcgtccccggcatgaaactgacgaaggaaaaatgcgctcaggttaatgccattgaacgcgaca

SEQ ID NO: 330633 - DNA, 75 bp, synthetic construct
  source 1..75: mol_type = other DNA
atgggcggcgtttccgggcacgcaggtttgttttccaataccggcgatattgcggtgttaatgcaaacgatgctg

SEQ ID NO: 330634 - DNA, 75 bp, synthetic construct
  source 1..75: mol_type = other DNA
cgcatacgttcaaataactgctatggacaggttattcgtcgtgaccaggaaagcgcattagcctgctgggggata

SEQ ID NO: 330635 - DNA, 75 bp, synthetic construct
  source 1..75: mol_type = other DNA
ggtgtttgcgcaggtctggcaatccattactgacggctgggccgtggtggttgatttctttgccggtctttcccc

SEQ ID NO: 330636 - DNA, 75 bp, synthetic construct
  source 1..75: mol_type = other DNA
gcagcagactggcgttccggcgacgaccttaatcttcgacccgaacaccggtaagctgacttcgccaaccacgcc

SEQ ID NO: 330637 - DNA, 75 bp, synthetic construct
  source 1..75: mol_type = other DNA
ccactcagaacggtgtgcaggtcgatgacgacggtaaagtttacgctacctacagcaacggcgagcgcatgttgc

SEQ ID NO: 330638 - DNA, 75 bp, synthetic construct
  source 1..75: mol_type = other DNA
gctcctaatcagcagtgtttgttatttgacgctaacggtgaaggttgggtcattggttggcgctcagtttggctt

SEQ ID NO: 330639 - DNA, 75 bp, synthetic construct
  source 1..75: mol_type = other DNA
gacaaattaacccgtacatcaaagtcgatataccggaaacaacgcgcggcgctctttactcgttcgtctacaacg

SEQ ID NO: 330640 - DNA, 75 bp, synthetic construct
  source 1..75: mol_type = other DNA
attttgaggacgggaaagagcccgcggtgcattcccgcatgaacattctcggcggagagctggcggcagttgcgt

SEQ ID NO: 330641 - DNA, 75 bp, synthetic construct
  source 1..75: mol_type = other DNA
acccgcgccggatcgtttgaaaccgacaaaaacggctatatcgtcaacgcctcgggcgcttatttgcagggctat

SEQ ID NO: 330642 - DNA, 75 bp, synthetic construct
  source 1..75: mol_type = other DNA
cgttccagatgcagatttctcagctcgattacaacagctatgttggcgttatcggcattggccgcatcaagcgcg

SEQ ID NO: 330643 - DNA, 75 bp, synthetic construct
  source 1..75: mol_type = other DNA
ctcgacgcgaccgacgagcagctggacttcccgatcgtttacgcttctgcgctgaacggtatcgcgggtctggac

SEQ ID NO: 330644 - DNA, 75 bp, synthetic construct
  source 1..75: mol_type = other DNA
gagcgtgtgaggcgcttcgctggtggattaaggacggtggcagagactgccgtatccgctcaaataactgttatg

SEQ ID NO: 330645 - DNA, 75 bp, synthetic construct
  source 1..75: mol_type = other DNA
gcctgatcgataagctgacgcggccattaaagacggcccagtcttcgctgtctggctttgctgaaaaatcgcagg

SEQ ID NO: 330646 - DNA, 75 bp, synthetic construct
  source 1..75: mol_type = other DNA
gcagaggacgcgctgaagcgtatgtccggcgaagccatgcgattcagtatgcgctacggcaaaggggccgttgat

SEQ ID NO: 330647 - DNA, 75 bp, synthetic construct
  source 1..75: mol_type = other DNA
gttatcaacaaagttgaccgccctggcgcgcgtcctgactgggttgtggatcaggtattcgatctgttcgttaac

SEQ ID NO: 330648 - DNA, 75 bp, synthetic construct
  source 1..75: mol_type = other DNA
tggcattcgataaagtgccgctggattttcttggcgaagtcgctctacgcagtctctatacctttgtactggtct

SEQ ID NO: 330649 - DNA, 75 bp, synthetic construct
  source 1..75: mol_type = other DNA
ttattatgttattttcaaccgaaatagtccgttatgaactatcaggcccgcaaggcatcgaacaagcgatccgtt

SEQ ID NO: 330650 - DNA, 75 bp, synthetic construct
  source 1..75: mol_type = other DNA
tcagcatcgctttcatgccgtggcgatgtcggcacacggcaaacccggcatcatgcgtattttcgatcatatctg

SEQ ID NO: 330651 - DNA, 75 bp, synthetic construct
  source 1..75: mol_type = other DNA
ccacaccgcaatttattgtgcagttaccgcagatcctggacttactgcatcgactaaattccccatgggccgaac

SEQ ID NO: 330652 - DNA, 75 bp, synthetic construct
  source 1..75: mol_type = other DNA
gatgagcagtcgccggaaaagcgccccataattttagaggcgcaggatgtgttgataacctacagaggaaaacta

SEQ ID NO: 330653 - DNA, 75 bp, synthetic construct
  source 1..75: mol_type = other DNA
ctggagttttacgaagctgaggcgaaaaagcaggcgaagcagtttttcatggatgttgctgccgggttatgtgaa

SEQ ID NO: 330654 - DNA, 75 bp, synthetic construct
  source 1..75: mol_type = other DNA
gctgcagcgggtacatcagcatcgctttcatgccgtggcgatgtcggcacacggcaaacccggcatcatgcgcat

SEQ ID NO: 330655 - DNA, 75 bp, synthetic construct
  source 1..75: mol_type = other DNA
gaaaggcaaacgtgaaacaccggctccggtgccgacgctttctccgctgcgtgcggaagcggtgagtattatgac

SEQ ID NO: 330656 - DNA, 75 bp, synthetic construct
  source 1..75: mol_type = other DNA
aatgacgctgttggtggtggggaacgtcgatgcgcgttcggttatcgaccaaatcaacaaaacgttcggtgagct

SEQ ID NO: 330657 - DNA, 75 bp, synthetic construct
  source 1..75: mol_type = other DNA
tgctgaaagaagcgctctcttatctggcgaatagctctggcaagctaaccatcacgccagaaacggttaaccatg

SEQ ID NO: 330658 - DNA, 75 bp, synthetic construct
  source 1..75: mol_type = other DNA
tcttctttgaaaaattcccacgactgaaggcggcaatcactgatgatattccccgctggcgtgaggcgctgcgca

SEQ ID NO: 330659 - DNA, 75 bp, synthetic construct
  source 1..75: mol_type = other DNA
tgatgctggccgtcagcgaagagggattgatcgaagagatgatcatcgctctgttggcctcaccgcagttggctg

SEQ ID NO: 330660 - DNA, 75 bp, synthetic construct
  source 1..75: mol_type = other DNA
ggaagaagagttcaatgcgttagtggcgcaaaagaaactggagctgcagaaactgtttgccgcctatgcgcgagc

SEQ ID NO: 330661 - DNA, 75 bp, synthetic construct
  source 1..75: mol_type = other DNA
tatacctttacagaagaaaaacatgctgagatttgcgaaaaactgaagcgtggagaatttcatcattctgtactc

SEQ ID NO: 330662 - DNA, 75 bp, synthetic construct
  source 1..75: mol_type = other DNA
acgcggtgtgcgacagatgtcgctgtttgaagtgttaatcattctcacgctgggttcagcggcgggagatgtggc

SEQ ID NO: 330663 - DNA, 75 bp, synthetic construct
  source 1..75: mol_type = other DNA
gcaatgaggaaaaactcaacgagctgttaggttatatggataattttgaattttggttcaatatagtgacaccat

SEQ ID NO: 330664 - DNA, 75 bp, synthetic construct
  source 1..75: mol_type = other DNA
tctattacaaaaatcgcggcaaaaaaccggtagtggcggttatctatacacacagtcatgtcgatcactacggtg

SEQ ID NO: 330665 - DNA, 75 bp, synthetic construct
  source 1..75: mol_type = other DNA
gcgattctcgaaaccaacgggcaaatcagtgtctatttctttgaagatgacaaggtgaaaccgggtttacttatt

SEQ ID NO: 330666 - DNA, 75 bp, synthetic construct
  source 1..75: mol_type = other DNA
ggggaaaaacaattatgtccgcgctgtgcaaatccagaatggacgaaggcaagtcgggctaaacgggtgacctga

SEQ ID NO: 330667 - DNA, 75 bp, synthetic construct
  source 1..75: mol_type = other DNA
ctggaagatttactggaaggtaagccggttgttattattgaagatggcgagctggcctggtcgaaactcaataac

SEQ ID NO: 330668 - DNA, 75 bp, synthetic construct
  source 1..75: mol_type = other DNA
ccatcaagcgacagagcgtttggcttgcgtgagattgtagctcatcctaactatatcattctgtaccgtgtagcc

SEQ ID NO: 330669 - DNA, 75 bp, synthetic construct
  source 1..75: mol_type = other DNA
ccgccaagcgaacgggtttctggattgagagaaattgtgacccaccctaactacataatcctatacagggtagcg

SEQ ID NO: 330670 - DNA, 75 bp, synthetic construct
  source 1..75: mol_type = other DNA
tgccggaaaagcggcccatcattttagaggcgcaggacgtgttgataacctacaaaggaaagctaccgggaagaa

SEQ ID NO: 330671 - DNA, 75 bp, synthetic construct
  source 1..75: mol_type = other DNA
agatatgtgaatgttaattctgtcaataaagtcaacgtaaagagtaaagttaaaaacagttatatctcacgatct

SEQ ID NO: 330672 - DNA, 75 bp, synthetic construct
  source 1..75: mol_type = other DNA
cgaacgtctccggcgcaccgttaatgttaaccgcgctggcactgttgttctccaactcctatggcggcatggtta

SEQ ID NO: 330673 - DNA, 75 bp, synthetic construct
  source 1..75: mol_type = other DNA
catcactggccaacctggggcaacgataacgtggtcaaactgcttaaaagccagcgtgatttgtatcgttacatc

SEQ ID NO: 330674 - DNA, 75 bp, synthetic construct
  source 1..75: mol_type = other DNA
tgtcagctgccgttctggcgctgattgccgcaggggcttctgcgcctgaaatcctcgaccaatttctggatgaaa

SEQ ID NO: 330675 - DNA, 75 bp, synthetic construct
  source 1..75: mol_type = other DNA
attctcgaccagtttctggatgaaaaggaaggcaatcacaccacggcataccgtgatggtgcaggtatctggacc

SEQ ID NO: 330676 - DNA, 75 bp, synthetic construct
  source 1..75: mol_type = other DNA
tattaaagtactactgaccgaaccacaaaaagcgggtatagcgtcattctgtccctataacattggccccggtaa

SEQ ID NO: 330677 - DNA, 75 bp, synthetic construct
  source 1..75: mol_type = other DNA
gcgattcgctggtggattaaggacggtggcagagactgccgtattcgttcaaacaactgctacggtcaggtatcc

SEQ ID NO: 330678 - DNA, 75 bp, synthetic construct
  source 1..75: mol_type = other DNA
gagaaaaacatcaaagtgccgctgaccgacccccagaaagcggggatcgcgtcattctgtccgtacaacattggc

SEQ ID NO: 330679 - DNA, 75 bp, synthetic construct
  source 1..75: mol_type = other DNA
actgccgtatccgttcaaataattgctacggtcaggtctcacggcgtgaccaggagagcgcgctggcgtgctggg

SEQ ID NO: 330680 - DNA, 75 bp, synthetic construct
  source 1..75: mol_type = other DNA
gattaaggacggtggcagagactgccgtattcgctcaaacaactgttacggtcaggtatcccgtcgtgaccagga

SEQ ID NO: 330681 - DNA, 75 bp, synthetic construct
  source 1..75: mol_type = other DNA
ttgcagttgctattggtggcggggctgttgctatagcatctgtgttaatcactggcccaggtggtaacgatggtc

SEQ ID NO: 330682 - DNA, 75 bp, synthetic construct
  source 1..75: mol_type = other DNA
atctgccgcggtaccacccgagtggatggtaaacctgtcgtcccgggcatgaagttatcgaaggaaaaatgcgac

SEQ ID NO: 330683 - DNA, 75 bp, synthetic construct
  source 1..75: mol_type = other DNA
accaaaggccagaaaaatgggtgctatggtcaggtagagcgacgagaccaggaaagcgcgttaacgtgctggggg

SEQ ID NO: 330684 - DNA, 75 bp, synthetic construct
  source 1..75: mol_type = other DNA
gtatgtcacgggcatacaggaaaagacatcatgctcggtaaaacgtataccaaagcagaatgcaaaacactcttg

SEQ ID NO: 330685 - DNA, 75 bp, synthetic construct
  source 1..75: mol_type = other DNA
cgtatccgctcaaataattgctacggtcaggtatcccgtcgcgaccaggagagcgcgctggcgtgctggggtatc

SEQ ID NO: 330686 - DNA, 75 bp, synthetic construct
  source 1..75: mol_type = other DNA
gatgaagtgggcgttgtcggcttcaaatgcttcgttgcgacctgtggcgatcgcggtatcgacaacgacttccgt

SEQ ID NO: 330687 - DNA, 75 bp, synthetic construct
  source 1..75: mol_type = other DNA
gcaagaacgtgcatgggcagaacagctctatttgagcatgtgtcatgaagtgcagaagcaactggatccgcaaaa

SEQ ID NO: 330688 - DNA, 75 bp, synthetic construct
  source 1..75: mol_type = other DNA
aattggcgatgcctgtgaagagaatggtctgccacatccgacggtgatcaccgaatcgggtcgtgcggtgactgc

SEQ ID NO: 330689 - DNA, 75 bp, synthetic construct
  source 1..75: mol_type = other DNA
gtgaagaaaaccgatcttgatgctgaactgcaacaacagttccttgaagagttcgaggcaggtttgtacggttat

SEQ ID NO: 330690 - DNA, 75 bp, synthetic construct
  source 1..75: mol_type = other DNA
agctacgtcgctggatatacgctggcggtaagcaatggaaaggcctgatgactcgtcgtgagattgagcgtgaag

SEQ ID NO: 330691 - DNA, 75 bp, synthetic construct
  source 1..75: mol_type = other DNA
aatacgccaacaacatcatctgggcgattggtgatgcgtgtgaagaaaatggtctgccgcatccgacggtaatca

SEQ ID NO: 330692 - DNA, 75 bp, synthetic construct
  source 1..75: mol_type = other DNA
tgaaggtactcgttcgcagtccgactgttcggtgaactacggcctcaatgaatacgccaacaacattatctgggc

SEQ ID NO: 330693 - DNA, 75 bp, synthetic construct
  source 1..75: mol_type = other DNA
ctggttgccgtctgcacgtttgccacatcagcagcccggaaggtgttgaggaagtgactcgtgcacgtcaggaag

SEQ ID NO: 330694 - DNA, 75 bp, synthetic construct
  source 1..75: mol_type = other DNA
tgccgctaaaggcaagctgactatcgatgcggcacaactcggtggcctggtgtcttacaacatcgaccgtctgca

SEQ ID NO: 330695 - DNA, 75 bp, synthetic construct
  source 1..75: mol_type = other DNA
gctcaaccagttgccagcaaccgttgatcgcgcatcgattgaactgaagttcgacgccgctaaaggtaagttgac

SEQ ID NO: 330696 - DNA, 75 bp, synthetic construct
  source 1..75: mol_type = other DNA
atttaattgtatctttttctcttttctttgctactggtgattatatatatttatcttttttatttttttattttc

SEQ ID NO: 330697 - DNA, 75 bp, synthetic construct
  source 1..75: mol_type = other DNA
cctgcgcctgaaatcctcgaccagtttctggatgaaaaggaaggtaaccacaccacggcataccgtgatggtgcg

SEQ ID NO: 330698 - DNA, 75 bp, synthetic construct
  source 1..75: mol_type = other DNA
ctggtgtcttacaacatcgaccgtctacatgagctggatgaagtaggcgttgtcggtttcaaatgcttcgtcgca

SEQ ID NO: 330699 - DNA, 75 bp, synthetic construct
  source 1..75: mol_type = other DNA
ggggatcgcgtcattctgtccgtacaacattggtcccggtaagtgtttcccgtcgacgttttacagacgaattaa

SEQ ID NO: 330700 - DNA, 75 bp, synthetic construct
  source 1..75: mol_type = other DNA
atccggtaagtcgcggcgcactgtgcccgaaaggcgccggtttgctggattacgtgaacagcgaaaaccgtctgc

SEQ ID NO: 330701 - DNA, 75 bp, synthetic construct
  source 1..75: mol_type = other DNA
cccgaaaggggccggtttgctggactacgtgaacagtgaaaaccgtctgcgttacccggaatatcgcgctccagg

SEQ ID NO: 330702 - DNA, 75 bp, synthetic construct
  source 1..75: mol_type = other DNA
aaagcgaaagaaagtacttcaagcatttatttatgctggaagctcttttctttgcataacatttgttgctttaat

SEQ ID NO: 330703 - DNA, 75 bp, synthetic construct
  source 1..75: mol_type = other DNA
gcgattcgctggtggattaaggacggtggcagagactgccgtattcgctcaaacaactgttacggtcaggtatcc

SEQ ID NO: 330704 - DNA, 75 bp, synthetic construct
  source 1..75: mol_type = other DNA
tatcttccttggggatcatacaggcgatagattcagtactatttttggtgataaatatatccttactttgctaaa

SEQ ID NO: 330705 - DNA, 75 bp, synthetic construct
  source 1..75: mol_type = other DNA
cggtgccagcaacgaaaccgggatgctgactcaaaaatttgcccgctccctcgggatgctggcggtagacaacca

SEQ ID NO: 330706 - DNA, 75 bp, synthetic construct
  source 1..75: mol_type = other DNA
aaccttctcgaaggcatttgcgctggccaattttaggattggttatatattggcttcacctaaacttatagtttc

SEQ ID NO: 330707 - DNA, 75 bp, synthetic construct
  source 1..75: mol_type = other DNA
tataaggattactattggaacacggactcaaatgaggcaggtgcttaatgttattgaaaatattattggtcaata

SEQ ID NO: 330708 - DNA, 75 bp, synthetic construct
  source 1..75: mol_type = other DNA
ccgtgatggtgcgggtatctggaccatctgccgtggtgccacccgggtggatggtaagcctgtcgtccctggcat

SEQ ID NO: 330709 - DNA, 75 bp, synthetic construct
  source 1..75: mol_type = other DNA
caagatttatggaaagggaattcctcaactgaagaatctaatatcatccgaagataacagggtggttctatattc

SEQ ID NO: 330710 - DNA, 75 bp, synthetic construct
  source 1..75: mol_type = other DNA
tgccgggcatcgcatccagggtaaagcgggcagaaacctcggaaatacgctcggcccctttggtgacgacgataa

SEQ ID NO: 330711 - DNA, 75 bp, synthetic construct
  source 1..75: mol_type = other DNA
taaggcgctggcatgggtggagcgcaatataaaagttccactgaccgagccacagaaagccggtatcgcgtcatt

SEQ ID NO: 330712 - DNA, 75 bp, synthetic construct
  source 1..75: mol_type = other DNA
tgccatcggtgcgcctgcgcctgatattctcgaccagtttctggatgaaaaagaaggtaaccacacaacggcata

SEQ ID NO: 330713 - DNA, 75 bp, synthetic construct
  source 1..75: mol_type = other DNA
cgtattcgctcaaataactgttacggtcaggtatcccgtcgtgaccaggagagcgcgctggcgtgctggggtatc

SEQ ID NO: 330714 - DNA, 75 bp, synthetic construct
  source 1..75: mol_type = other DNA
atggcaaacctgtcgttccgggcatgaagttgtcgaaggaaaaatgcgacccggttaacgccattgagcgtgata

SEQ ID NO: 330715 - DNA, 75 bp, synthetic construct
  source 1..75: mol_type = other DNA
tcaaataactgttacggtcaggttattcgtcgtgaccaggagagcgcattaacctgctgggggatagaacagtga

SEQ ID NO: 330716 - DNA, 75 bp, synthetic construct
  source 1..75: mol_type = other DNA
atctgccgtggtgccacccaggtggatggtaagcctgtcgtccctggcatgaagttgtcgaaggaaaaatgcgac

SEQ ID NO: 330717 - DNA, 75 bp, synthetic construct
  source 1..75: mol_type = other DNA
atgacccgttttcaatcccaacgtaagcaaaaaaatacgatgaatctgagtactaaacaaaaacagcacctgaaa

SEQ ID NO: 330718 - DNA, 75 bp, synthetic construct
  source 1..75: mol_type = other DNA
caggttaacgccattgagcgtgataaggcgctggcatgggtggagaaaaacatcaaagtgccgctgaccgaaccc

SEQ ID NO: 330719 - DNA, 75 bp, synthetic construct
  source 1..75: mol_type = other DNA
tggactgtctgttatggccacactggcaaagatatcatgctcggcaagaagtacaccgaggctgaatgccgtgcg

SEQ ID NO: 330720 - DNA, 75 bp, synthetic construct
  source 1..75: mol_type = other DNA
atagcgttattgcagcgatacccgctggcgctattgctatcgctgcggcgttgattactggcccaacgggtaatg

SEQ ID NO: 330721 - DNA, 75 bp, synthetic construct
  source 1..75: mol_type = other DNA
caaagtgccgctgactgaaccgcagaaagcaggtattgcgtcgttctgcccgtacaatatcggccccggcaagtg

SEQ ID NO: 330722 - DNA, 75 bp, synthetic construct
  source 1..75: mol_type = other DNA
agtggtggatggaaaaaccgtttttcccaatatgaaactgtcgaaggaaaaatgcgaccaggtcaacgccattga

SEQ ID NO: 330723 - DNA, 75 bp, synthetic construct
  source 1..75: mol_type = other DNA
atcataaactctctgccggtgatacgtataacttaattaaaacgctcgatgtttgtaattatgactcagaaaggc

SEQ ID NO: 330724 - DNA, 75 bp, synthetic construct
  source 1..75: mol_type = other DNA
tggtaagcctgtgattcctggcatgaagctgtcgaaggaaaaatgcgcacagattaatgccattgaacgtgataa

SEQ ID NO: 330725 - DNA, 75 bp, synthetic construct
  source 1..75: mol_type = other DNA
aaagtgctggctggcatgtcggaatttttcatcgggtacggattctggctctgcggggccagtttcaccctgact

SEQ ID NO: 330726 - DNA, 75 bp, synthetic construct
  source 1..75: mol_type = other DNA
cgattttccgtccagagtatgcatcaataaactgctcctgaattccgaaagggaggataatgtggcagccatggc

SEQ ID NO: 330727 - DNA, 75 bp, synthetic construct
  source 1..75: mol_type = other DNA
ttttcatcgggtacggattctggctctgtgggaccattttcgccctgacgcttctgatccgtttttcattcagcc

SEQ ID NO: 330728 - DNA, 75 bp, synthetic construct
  source 1..75: mol_type = other DNA
aaattgcttgccggcatgtcggaatttttcatcgggtacggattctggctctgtgggaccattttcgccctgacg

SEQ ID NO: 330729 - DNA, 75 bp, synthetic construct
  source 1..75: mol_type = other DNA
aggaggttttgtcttcttttttattcttaacatgatctctgccatctacagtatcagcgacatgctgaaacaata

SEQ ID NO: 330730 - DNA, 75 bp, synthetic construct
  source 1..75: mol_type = other DNA
ccacagcaatgcgaaattccggttacgattttccgtccagaatatgcatcaataaactgctcctgaactccgaaa

SEQ ID NO: 330731 - DNA, 75 bp, synthetic construct
  source 1..75: mol_type = other DNA
ggtttatattccactgcaacagcatacccctctatcgaattgctaccaactggagcaggcgcaggggctggtttt

SEQ ID NO: 330732 - DNA, 75 bp, synthetic construct
  source 1..75: mol_type = other DNA
aatttatccgtggctgggatgatggacgtggcttggatgctgggcgtgccttgctaagtcttcaggatgactctt

SEQ ID NO: 330733 - DNA, 75 bp, synthetic construct
  source 1..75: mol_type = other DNA
agtgattggccttgatgcttcaaaaattgttccaactgcaaacgaaaaccgcccacgcaacattgcgtttaatta

SEQ ID NO: 330734 - DNA, 75 bp, synthetic construct
  source 1..75: mol_type = other DNA
gtacaactgagcagtgccaccaacagcacctctgaaacgctggccgccacaccaaaggccgtcaaggctgcatat

SEQ ID NO: 330735 - DNA, 75 bp, synthetic construct
  source 1..75: mol_type = other DNA
cgcggtgaatttattcgtggctgggatgacggacgtggtgtggatgccgggcgacaattattatcttcacagggg

SEQ ID NO: 330736 - DNA, 75 bp, synthetic construct
  source 1..75: mol_type = other DNA
agagcctacccgaccctccgttatgagacgacaataactcagtccgcctggcgccgattattctggccggttttg

SEQ ID NO: 330737 - DNA, 75 bp, synthetic construct
  source 1..75: mol_type = other DNA
attatctgttcagcatatcgtcaatgctgcagataaatattccgctttcacaggcgctgctcagaattgaaaaaa

SEQ ID NO: 330738 - DNA, 75 bp, synthetic construct
  source 1..75: mol_type = other DNA
gatcgcaaacaggtgctgacgctgattgccgatttccgcaaagagctggataagcgcacaatcgggccacgcgga

SEQ ID NO: 330739 - DNA, 75 bp, synthetic construct
  source 1..75: mol_type = other DNA
attgaatttatcgtccaggtattccagcttattcgcggcgggcgcgagccgtcgctgcaatcgcgctctttacta

SEQ ID NO: 330740 - DNA, 75 bp, synthetic construct
  source 1..75: mol_type = other DNA
attccggcggcgcattatggtgcgcatcgcctgggcgcaaacgctggcactggttactgaagagagcatattgca

SEQ ID NO: 330741 - DNA, 75 bp, synthetic construct
  source 1..75: mol_type = other DNA
gagtggctgacggaactggaaagccagccgccgcaggccgacgaatggcagcattacgctgcatggttgcagaag

SEQ ID NO: 330742 - DNA, 75 bp, synthetic construct
  source 1..75: mol_type = other DNA
agtgctggcgcatcttagcgaagatgattgcaaacaggtgctgacgctgattgccgattttcgcaaagagctgga

SEQ ID NO: 330743 - DNA, 75 bp, synthetic construct
  source 1..75: mol_type = other DNA
ccagacgcttccttctgatgagcttaatcgtgcgcggctggcgtgggcaatggatttcgctgactggtcgcaact

SEQ ID NO: 330744 - DNA, 75 bp, synthetic construct
  source 1..75: mol_type = other DNA
gacgttccctggctgatgaaaatgatccagcctgactggctgaaatctaatggcttccatgaaatagaagcggat

SEQ ID NO: 330745 - DNA, 75 bp, synthetic construct
  source 1..75: mol_type = other DNA
caataagttgcatgtcgagttacccgaaaatatcgacaagcaaagccccaccatgacgctaatttatgatgagaa

SEQ ID NO: 330746 - DNA, 75 bp, synthetic construct
  source 1..75: mol_type = other DNA
gtgcagggaaccggtgaaattgaaatcaccatacagaccaacggcctgcgccgccgtgtgaaggccacccgcata

SEQ ID NO: 330747 - DNA, 75 bp, synthetic construct
  source 1..75: mol_type = other DNA
gttttcgttatgcgcccaactaacaacgatggtgaaacggcactctacacgctgagcctgtgttctgagatctaa

SEQ ID NO: 330748 - DNA, 75 bp, synthetic construct
  source 1..75: mol_type = other DNA
tcactgttcagaccaatggcctgcgccgccgtgtaaaagccacccgcataagcggatgtacggtctactgggaag

SEQ ID NO: 330749 - DNA, 75 bp, synthetic construct
  source 1..75: mol_type = other DNA
atattgcctcgagtttgtcgaaatttctgcaaggcaaaccgacgagcatctctatattgtggtcgaggatgatgg

SEQ ID NO: 330750 - DNA, 75 bp, synthetic construct
  source 1..75: mol_type = other DNA
attccattaattatttctggcgttcggagaccacttattatccagtggggagtggggcagtttgggggaagtctg

SEQ ID NO: 330751 - DNA, 75 bp, synthetic construct
  source 1..75: mol_type = other DNA
caatctggcaaaggcctaccccaccaataaattaccggatttacggggcgaatttattcgcggctgggatgacgg

SEQ ID NO: 330752 - DNA, 75 bp, synthetic construct
  source 1..75: mol_type = other DNA
accgaaagcggttaaggctgcatatgacctggctaacgggaaatataccgcccagaacgccaccactacacaaaa

SEQ ID NO: 330753 - DNA, 75 bp, synthetic construct
  source 1..75: mol_type = other DNA
ctcagtagcgccaccaacagcacctctgaaacgctggccgccacaccgaaagcggtcaaggctgcatacgatctg

SEQ ID NO: 330754 - DNA, 75 bp, synthetic construct
  source 1..75: mol_type = other DNA
gcagccaccaggaaaagcaataaagccagccagaaaacagccaaaaaagccgccagtaaaagtacgaccaaaagt

SEQ ID NO: 330755 - DNA, 75 bp, synthetic construct
  source 1..75: mol_type = other DNA
cagctttaccgaaaagtgtaccaaacgtaagggctataaatcgcattgtgtgaaagtcaaaaatgccgcgtcagg

SEQ ID NO: 330756 - DNA, 75 bp, synthetic construct
  source 1..75: mol_type = other DNA
cttccgcactcaggggcgcggaaccgccgatcacgttggcgtgtatgtcggcaacggcaaatttattcagtcacc

SEQ ID NO: 330757 - DNA, 75 bp, synthetic construct
  source 1..75: mol_type = other DNA
aacacgacgccgctgggccgcgccgtgactggtaccatgctggttgctgcgatgaaagaagatggcgtgaatatc

SEQ ID NO: 330758 - DNA, 75 bp, synthetic construct
  source 1..75: mol_type = other DNA
ggtggttaacggtttgccaattattactggtattggcgaagagaaagtactggcgcaaattgtttcgatccttaa

SEQ ID NO: 330759 - DNA, 75 bp, synthetic construct
  source 1..75: mol_type = other DNA
aacggcttgccgattattaccggtattggcgaagagaaagtactggcgcaaattgtttcgatccttaaaaagtaa

SEQ ID NO: 330760 - DNA, 75 bp, synthetic construct
  source 1..75: mol_type = other DNA
gcgccaccaacagcacctctgaaacgctggccgccacaccgaaagcggttaaggctgcatatgacctggctaacg

SEQ ID NO: 330761 - DNA, 75 bp, synthetic construct
  source 1..75: mol_type = other DNA
ctgcaaatttacaaaccgtggcttgatactgactttattgatgagttaggcggtcgtcatgaaatgtctgaattt

SEQ ID NO: 330762 - DNA, 75 bp, synthetic construct
  source 1..75: mol_type = other DNA
gtcgttggtttgattcccaggcgttgatgctacgtgactccctgcaacgctgggtcgccagccagattacaggtg

SEQ ID NO: 330763 - DNA, 75 bp, synthetic construct
  source 1..75: mol_type = other DNA
tggtaatgcccgcgctgatgtcgatgcctctggcggcaatagcttcaacgggaaaggtggagccaatgccagcaa

SEQ ID NO: 330764 - DNA, 75 bp, synthetic construct
  source 1..75: mol_type = other DNA
tgagattgaggcgattgaacaacggaatgacggtgtccatgtgcgctggcggcagggagagaatcaagaagaaag

SEQ ID NO: 330765 - DNA, 75 bp, synthetic construct
  source 1..75: mol_type = other DNA
tgtttaagaaaaataaagtgaagcacctgtgcggcctcgcaacgttagaacatgctcaggatgagatttggcaat

SEQ ID NO: 330766 - DNA, 75 bp, synthetic construct
  source 1..75: mol_type = other DNA
tcagcgtaaagacgctattgttggtcgtctgacgatggggattggcctgctatttaagaaaaataacgtgaagca

SEQ ID NO: 330767 - DNA, 75 bp, synthetic construct
  source 1..75: mol_type = other DNA
atgtggcagttatgggggggggggccaggtggttacgtagcggcactgcgggctgcgcagaatgggctttccgta

SEQ ID NO: 330768 - DNA, 75 bp, synthetic construct
  source 1..75: mol_type = other DNA
gcgctgatcccttcggtaatttacacgcaaccggaagtcgcgtgggtaggagaaaatgaggcctcgctgaaagcc

SEQ ID NO: 330769 - DNA, 75 bp, synthetic construct
  source 1..75: mol_type = other DNA
ggaaaacgaggcctcactgaaagccgctggcagagtctttaacaaaggaaattctctgtttgccggtaacggtcg

SEQ ID NO: 330770 - DNA, 75 bp, synthetic construct
  source 1..75: mol_type = other DNA
gagctggtggatgcattccgccatgtgagtgatgtgtttgagcaaaccagcgaaaccatcggcgtgcgcgccaat

SEQ ID NO: 330771 - DNA, 75 bp, synthetic construct
  source 1..75: mol_type = other DNA
ccgaactggttgcctgggccagaaaaaatgacttctccatctcgttgccggtagaccgtctctcttttctgctgg

SEQ ID NO: 330772 - DNA, 75 bp, synthetic construct
  source 1..75: mol_type = other DNA
acgccatttccagcttgttggcgctctctctgtccggttgtgcctggataccgtccacgccgctggtacaggggc

SEQ ID NO: 330773 - DNA, 75 bp, synthetic construct
  source 1..75: mol_type = other DNA
tatggatacggggagggcaatattatcagctcagggcgatgccatacgtaatatctatggtgagttcaagactgt

SEQ ID NO: 330774 - DNA, 75 bp, synthetic construct
  source 1..75: mol_type = other DNA
atgacagtgaaatactacgccattctgactaatcagggcgcggcacgactggctaacgcgacgatgctcggcagt

SEQ ID NO: 330775 - DNA, 75 bp, synthetic construct
  source 1..75: mol_type = other DNA
cagccggcaaggcgcccgtcagccacactcacccgtggagtcagataacgggagtgcctgcggcttcactgacgg

SEQ ID NO: 330776 - DNA, 75 bp, synthetic construct
  source 1..75: mol_type = other DNA
taattgacggcattgccttccagaccaatattctggctttgaacgcggcggttgaagcagcgcgtgcgggtgagc

SEQ ID NO: 330777 - DNA, 75 bp, synthetic construct
  source 1..75: mol_type = other DNA
atggagcaactgaccgcaacggtgaaacagaacgccgagaatgcgcgccaggccagccatctggcattaagtgct

SEQ ID NO: 330778 - DNA, 75 bp, synthetic construct
  source 1..75: mol_type = other DNA
ggctacccggaaaacctggacgatctcacctcacacgcactggtgcattacaccccgaatttagcggtgcatccg

SEQ ID NO: 330779 - DNA, 75 bp, synthetic construct
  source 1..75: mol_type = other DNA
taatgccgtctctgatgaatgcattatttttgatgagtccacagctgaaggcgtgggtggtgatttttacgagat

SEQ ID NO: 330780 - DNA, 75 bp, synthetic construct
  source 1..75: mol_type = other DNA
ccagtgaaattttccgcacaaaaattgctgtaccgtttgatcatcttcctgactggctgagagcctcattcacca

SEQ ID NO: 330781 - DNA, 75 bp, synthetic construct
  source 1..75: mol_type = other DNA
ttcagcaacagcagcgtgaaacatcggctgtggtaaaaaccgtgacgccagctgcgccgcgtaaaatggccgtgg

SEQ ID NO: 330782 - DNA, 75 bp, synthetic construct
  source 1..75: mol_type = other DNA
taacaacattaaatctcttaaaaaggcttatcctaactattttgggtcaacaaatcagttcgggagattccttag

SEQ ID NO: 330783 - DNA, 75 bp, synthetic construct
  source 1..75: mol_type = other DNA
aaggatactggaaagtttcttgtttctgtgaaaccttttaggaaaaaagaatcggaacaagccctccaggaactt

SEQ ID NO: 330784 - DNA, 75 bp, synthetic construct
  source 1..75: mol_type = other DNA
ttgatgatgaagattaccgccggcgcattctgacccagcttaatcggggagaaagtcgccatgccgttgccagag

SEQ ID NO: 330785 - DNA, 75 bp, synthetic construct
  source 1..75: mol_type = other DNA
tccgggaattgagctggaactgagtagccatgaccgtccggtagatattcttcatgatggttttgattgcgtgat

SEQ ID NO: 330786 - DNA, 75 bp, synthetic construct
  source 1..75: mol_type = other DNA
tcatcaaagtcgcggagctggaaagtttttcccgcgcggcggatttctttgctttgccaaagggaagtgtttcgc

SEQ ID NO: 330787 - DNA, 75 bp, synthetic construct
  source 1..75: mol_type = other DNA
aaagtcgctccaagcataaaatcttaaaggaatatgactatttaactccaaagccaagcggatatagtggcattc

SEQ ID NO: 330788 - DNA, 75 bp, synthetic construct
  source 1..75: mol_type = other DNA
aaacccggataaagaaaactatggcctgcctacatggtgggaatacaaggagcgcattaacagtaagaccatagc

SEQ ID NO: 330789 - DNA, 75 bp, synthetic construct
  source 1..75: mol_type = other DNA
gttgccggttccaccaacatcagcaacatcaccgacaccgtttatcactggccgctgagccagagcatcccgctg

SEQ ID NO: 330790 - DNA, 75 bp, synthetic construct
  source 1..75: mol_type = other DNA
caccggcgttatcgttaacaaactgaacgcaccggttgatgagcagggtcgtacccgtccggatctgtccgagat

SEQ ID NO: 330791 - DNA, 75 bp, synthetic construct
  source 1..75: mol_type = other DNA
ggcagccatgaacggcgtagaaatcggtgccctgctgctgactggcggctacgaaatggacgcgcgcatttctaa

SEQ ID NO: 330792 - DNA, 75 bp, synthetic construct
  source 1..75: mol_type = other DNA
gactgccgtgtgctgtatctgcgtgcgcagtgtgccatcaacatcgagtcaccaaacgacaagctgaacagcaac

SEQ ID NO: 330793 - DNA, 75 bp, synthetic construct
  source 1..75: mol_type = other DNA
acagcggggaggtcagagccgagcaacgcaccgatgaacctacccgcattctgggctatggctcggtgttcaaca

SEQ ID NO: 330794 - DNA, 75 bp, synthetic construct
  source 1..75: mol_type = other DNA
ctgaaacagctggtggtgttgcagatgttcgtcggggtgtttattccgtggggacaaatggaaaccttcaccgcc

SEQ ID NO: 330795 - DNA, 75 bp, synthetic construct
  source 1..75: mol_type = other DNA
ggcccagccagtgaagtagaaacggaagaggatgacgatgatgaaggtgaagaaaataatcaggcgaatacctcc

SEQ ID NO: 330796 - DNA, 75 bp, synthetic construct
  source 1..75: mol_type = other DNA
gtgaagaaatatttagcggcgatgagatccgcgaggctgccggatacgatggcccagccagtgaagtagaaacgg

SEQ ID NO: 330797 - DNA, 75 bp, synthetic construct
  source 1..75: mol_type = other DNA
actggctatctcgttcgataaagagattgatttccgttccctggctgcaacatacggttgcgacgttacagagct

SEQ ID NO: 330798 - DNA, 75 bp, synthetic construct
  source 1..75: mol_type = other DNA
catttcgctcaggtacggtgcagcgcctgcatatctcagagcacggcaaaatttgcgcgaaatatccggctaagg

SEQ ID NO: 330799 - DNA, 75 bp, synthetic construct
  source 1..75: mol_type = other DNA
atctgtttagcaagatggcagcgctacgccttatcagtatgccagtagatatatcagtgatatgggacgacctga

SEQ ID NO: 330800 - DNA, 75 bp, synthetic construct
  source 1..75: mol_type = other DNA
tgaatacggattcaaagaagagcttacctatactgatctatataagctgtatcgtcgcggtggtattgctcacgg

SEQ ID NO: 330801 - DNA, 75 bp, synthetic construct
  source 1..75: mol_type = other DNA
acaggatgcggttgacgcggatatcgcgacggatgaggaaaccgccgcgttgtcagaatggaagaaataccgggt

SEQ ID NO: 330802 - DNA, 75 bp, synthetic construct
  source 1..75: mol_type = other DNA
gctccgtaacgatttatttgccaggctggacgtcagcgacacgctccggcgcatggatgaagacgtgcgggcaaa

SEQ ID NO: 330803 - DNA, 75 bp, synthetic construct
  source 1..75: mol_type = other DNA
tgaaggtatcgcgtatcagtgaggcgatttccggtgcgaacggggaatacagccatcagttgcttgcaccggcgg

SEQ ID NO: 330804 - DNA, 75 bp, synthetic construct
  source 1..75: mol_type = other DNA
gcaattcacgacacagaccagcagaccgctgccgcagaatgccgcgggcgcgagcagcagccgaaaaagaaaggg

SEQ ID NO: 330805 - DNA, 75 bp, synthetic construct
  source 1..75: mol_type = other DNA
gttcacgccttaagcgatgcgccctaatcaaagacgaaaacggaaactatatgaaagctaacaccgatggcattg

SEQ ID NO: 330806 - DNA, 75 bp, synthetic construct
  source 1..75: mol_type = other DNA
ggcaatggatgtggcaaatgaagcgaaaacaaaggcagaagaggctgcagcaggaggtggtgttcccggtccgaa

SEQ ID NO: 330807 - DNA, 75 bp, synthetic construct
  source 1..75: mol_type = other DNA
cgggcgggacattcatacgggggccggtgaatggaccacgagtgagtttgtggcctggctgaaagaaaagggggc

SEQ ID NO: 330808 - DNA, 75 bp, synthetic construct
  source 1..75: mol_type = other DNA
ggtatatggtgatccacaattgaccgcgcaatttgacgcggtacgccgggagattatgacgctgccgcgtgaagg

SEQ ID NO: 330809 - DNA, 75 bp, synthetic construct
  source 1..75: mol_type = other DNA
ccgggttaatgcgcgagctgcggctattccggcggcgcattatggtgcgcatcgcctgggcgcaaacgctggcac

SEQ ID NO: 330810 - DNA, 75 bp, synthetic construct
  source 1..75: mol_type = other DNA
aaaaacgaggcctggacgtgggagcatcaggcgctggtgcgtgcgcgtgtagtgtacggcgatccgcagctcacc

SEQ ID NO: 330811 - DNA, 75 bp, synthetic construct
  source 1..75: mol_type = other DNA
cccatgtggaaaattaatgttcccttgaagaataaaagcacctcaaatcacgaactttgcgagcggtggctgctg

SEQ ID NO: 330812 - DNA, 75 bp, synthetic construct
  source 1..75: mol_type = other DNA
cagctaataaacggtctggcctaaatattttaaccgatgatattaaaaatcccatgtggaaagttaatgttcccc

SEQ ID NO: 330813 - DNA, 75 bp, synthetic construct
  source 1..75: mol_type = other DNA
aatgcttgggtgaaaactcacttcaggagcgcgtagtaaaaaaactaataggcctagtatggcttgcaggacagg

SEQ ID NO: 330814 - DNA, 75 bp, synthetic construct
  source 1..75: mol_type = other DNA
gactgataagcctgactcattccgaaggcaacttcggcccccgtgaatccatgcaaaactggaacacaaaccgca

SEQ ID NO: 330815 - DNA, 75 bp, synthetic construct
  source 1..75: mol_type = other DNA
gcattaatcctggtcacgccggtgaatggtctgccgtcttccggtgtggctgacaccctgacaggcggatttgat

SEQ ID NO: 330816 - DNA, 75 bp, synthetic construct
  source 1..75: mol_type = other DNA
agccatcagttgcttgcaccggcggacaatatctccattgcgaaaaacgaactggcggtactggggacgatttca

SEQ ID NO: 330817 - DNA, 75 bp, synthetic construct
  source 1..75: mol_type = other DNA
cttgatgatccgcaaaaatggaaaaggaaaaaatgcaggttgcatatggaattctcccgggatggcacggcgtta

SEQ ID NO: 330818 - DNA, 75 bp, synthetic construct
  source 1..75: mol_type = other DNA
gaaactcttgcattacggaccgattatatgactccgttacgaaaagagccgaattctgatgtttttgatcctctc

SEQ ID NO: 330819 - DNA, 75 bp, synthetic construct
  source 1..75: mol_type = other DNA
ttattcctgcaccctacttgagaatgcaggttattgaagatgcgttgtgcaactggcagaaatcacctgaccgtt

SEQ ID NO: 330820 - DNA, 75 bp, synthetic construct
  source 1..75: mol_type = other DNA
acccgctggacccgatgtggattgcgacgctggtcggtattgttaccgttagttccgcaggcgttgccggtgtcg

SEQ ID NO: 330821 - DNA, 75 bp, synthetic construct
  source 1..75: mol_type = other DNA
cgggggtgtggcgggcatttaaacccgccgcatatattgatctgatgccagaaggaatgcaaggaggaaagaact

SEQ ID NO: 330822 - DNA, 75 bp, synthetic construct
  source 1..75: mol_type = other DNA
gcgcagtgcatgagaaaaagcccgctctgatgttcagccttgaaatgccaggtgaccagatactggaaaaactgg

SEQ ID NO: 330823 - DNA, 75 bp, synthetic construct
  source 1..75: mol_type = other DNA
atcattttcgaagaaataaccagaatgcaccgggagcaaaagccagtagatggcctgacgcttttcgatgaactg

SEQ ID NO: 330824 - DNA, 75 bp, synthetic construct
  source 1..75: mol_type = other DNA
gacggttggcaaacgtcggttggtttaattgctcaggatgcacaaaaagccttgcctgaactggtaactgaagac

SEQ ID NO: 330825 - DNA, 75 bp, synthetic construct
  source 1..75: mol_type = other DNA
gtggagaaaccgggccgatggggccgcccggggcatcagacgggaagagccgggttgtgggtatcaggctgggta

SEQ ID NO: 330826 - DNA, 75 bp, synthetic construct
  source 1..75: mol_type = other DNA
ggaccaaaaggtgacaaaggcgatccgggggtggctggaccagcaggtccggcaggtgcgccggggccgaaaggc

SEQ ID NO: 330827 - DNA, 75 bp, synthetic construct
  source 1..75: mol_type = other DNA
tggctgagcgaggcggaccggcggctgcaggtaaaaagtgcaattccctggtggctggtctgccggggcgaaatt

SEQ ID NO: 330828 - DNA, 75 bp, synthetic construct
  source 1..75: mol_type = other DNA
gttgataacctacaaaggaaagctaccgggaagaattactggttctctgaagactccaccggaatcacaacctta

SEQ ID NO: 330829 - DNA, 75 bp, synthetic construct
  source 1..75: mol_type = other DNA
tgaccgtactgaagatgccacgctggagttttacgaagctgaggcgaaaaagcaggcgaagcagtttttcatgga

SEQ ID NO: 330830 - DNA, 75 bp, synthetic construct
  source 1..75: mol_type = other DNA
gagttttacgaagcggaggcgaaaaagcaggcgaagcagtttttcatggatgttgctgccgggttatgtgaaggg

SEQ ID NO: 330831 - DNA, 75 bp, synthetic construct
  source 1..75: mol_type = other DNA
atgaagaaaaaatacgaactggttgttaaagagataaataattacccggataagattgctgttactgtggcactg

SEQ ID NO: 330832 - DNA, 75 bp, synthetic construct
  source 1..75: mol_type = other DNA
atatcattttttatcccattgattcgtctatcatgtcatcaataaacgattttagagcacagttgaatgaattct

SEQ ID NO: 330833 - DNA, 75 bp, synthetic construct
  source 1..75: mol_type = other DNA
ggctggtatcagccgttaccgcgtgaggtcatttgtctgaaccggtttaccgggcggatatcccgtcgcaggacc

SEQ ID NO: 330834 - DNA, 75 bp, synthetic construct
  source 1..75: mol_type = other DNA
cgttaccagagtcttgctgctgcggaggcgactgggggacttggctcgacagccacaagcaatcaactggctacg

SEQ ID NO: 330835 - DNA, 75 bp, synthetic construct
  source 1..75: mol_type = other DNA
ccggcagaagatgccaaagcgggagatcgcccaattaatctgcgctgtgaactgctgattccgatccgtcgttaa

SEQ ID NO: 330836 - DNA, 75 bp, synthetic construct
  source 1..75: mol_type = other DNA
cgtaaaaattaacggaaagcccgctgccagggccgccgtcacccttccccctcctcccccacctggagcaatacc

SEQ ID NO: 330837 - DNA, 75 bp, synthetic construct
  source 1..75: mol_type = other DNA
aatctctatctggataatctggaggcaacggggctgtatcaggttccgttgtcagcggcgcagccgggcgatgtg

SEQ ID NO: 330838 - DNA, 75 bp, synthetic construct
  source 1..75: mol_type = other DNA
cacaaattccgctgcgtgccgcacctgacgggacggcgctttgagcacggggttacggactgttacaccctgttc

SEQ ID NO: 330839 - DNA, 75 bp, synthetic construct
  source 1..75: mol_type = other DNA
actgacagaagtcatcaatccgcagggcgagtcataccgttatattctggacaactgtggacgggtgacggaaga

SEQ ID NO: 330840 - DNA, 75 bp, synthetic construct
  source 1..75: mol_type = other DNA
tggtgtggcccagatgctggccccgaaggcaaaaacaccggattaccgcgcaacggataacggcagacagaacac

SEQ ID NO: 330841 - DNA, 75 bp, synthetic construct
  source 1..75: mol_type = other DNA
ctcgtctccgaggttctgatcccgaaactcattaacggtcgcgtcgtttatcgttgggacaaccagggccggcga

SEQ ID NO: 330842 - DNA, 75 bp, synthetic construct
  source 1..75: mol_type = other DNA
ttgagataccggattttgtgcgtgaggatgactggtggcgcaacggccagaacctgtatctggacaatatggagg

SEQ ID NO: 330843 - DNA, 75 bp, synthetic construct
  source 1..75: mol_type = other DNA
cagggcaacccgatgccggtgccttatggtgagatgctggtgggttcacgacggatatcccaggacatcagcacc

SEQ ID NO: 330844 - DNA, 75 bp, synthetic construct
  source 1..75: mol_type = other DNA
gtggtggcgcgtctggatacagactttgtggacccgaaaaaagcggcggtggcagatgtctcccctgcgtccatc

SEQ ID NO: 330845 - DNA, 75 bp, synthetic construct
  source 1..75: mol_type = other DNA
cacaattcatcatgccgcaacagccgcaagttatgcagtatgtagtgctcggcgtcaccaccattgtggtcgata

SEQ ID NO: 330846 - DNA, 75 bp, synthetic construct
  source 1..75: mol_type = other DNA
ggcgaggagcaggtcctggtatttggtttcgacggtatcgaatacggcctcaaatgggataacagcctgcagacc

SEQ ID NO: 330847 - DNA, 75 bp, synthetic construct
  source 1..75: mol_type = other DNA
ttgcgcgtgacgataccgatgacgggggttgagtgggctgataaacatttttatcttcccgaaggctcaagccat

SEQ ID NO: 330848 - DNA, 75 bp, synthetic construct
  source 1..75: mol_type = other DNA
gatgacgaacgacgcgataaaaatcgtgtctgttcgcaaatcagctcgtctcggttatacaaaaatactcgtcgc

SEQ ID NO: 330849 - DNA, 75 bp, synthetic construct
  source 1..75: mol_type = other DNA
aacaccatcatgaacaacctgaagccgtttactcctctggctgataagtatgtcggcagcctcgagaacttatcg

SEQ ID NO: 330850 - DNA, 75 bp, synthetic construct
  source 1..75: mol_type = other DNA
aacggtcgggaaaccgaccgtccggggatttaccagattgttgagcgcctgattgccggaatgaacggacataca

SEQ ID NO: 330851 - DNA, 75 bp, synthetic construct
  source 1..75: mol_type = other DNA
taaacaggacagaacatttcccttcattaacgcttccgtctgatacagactgggttgtttggtggtatggttctt

SEQ ID NO: 330852 - DNA, 75 bp, synthetic construct
  source 1..75: mol_type = other DNA
acaccggctacccggacccgcgcggggaactggacccggaagccgcccccggcctgctgtatgcgggacagtggc

SEQ ID NO: 330853 - DNA, 75 bp, synthetic construct
  source 1..75: mol_type = other DNA
tgcggcaacggtgaactgcttcaccatctgcctgaacaactgagtaaacgggagaggtattccgaaaaatggcaa

SEQ ID NO: 330854 - DNA, 75 bp, synthetic construct
  source 1..75: mol_type = other DNA
aacctgtacctggacaatatggaggcgactggtttttacaggatttccctgccttccgcacagcctggcgatatc

SEQ ID NO: 330855 - DNA, 75 bp, synthetic construct
  source 1..75: mol_type = other DNA
tgcatctgctttctgaaaatgacgccgaacaattgcgagtggcatatctgttcctgcggcgtctggaaaacctgc

SEQ ID NO: 330856 - DNA, 75 bp, synthetic construct
  source 1..75: mol_type = other DNA
tcgcgcattaccgccttgctggtggggattgttacccgcaccacctatttagaattgctcagtgaattccctgcg

SEQ ID NO: 330857 - DNA, 75 bp, synthetic construct
  source 1..75: mol_type = other DNA
agccgccgcaggccgacgaatggcagcattacgctgcatggttgcagaaggcgctcagtgatgtaagcgatgaag

SEQ ID NO: 330858 - DNA, 75 bp, synthetic construct
  source 1..75: mol_type = other DNA
tcgcggggatgactggtggcgtaacggtcagaatctctatcttggcaatatggaggcgactggtttttaccgtgt

SEQ ID NO: 330859 - DNA, 75 bp, synthetic construct
  source 1..75: mol_type = other DNA
cggtgagctgctgcaccatattcctgaacaactgagtaaacgagagaggtataccgacaatctgacatcaagagc

SEQ ID NO: 330860 - DNA, 75 bp, synthetic construct
  source 1..75: mol_type = other DNA
tgaggtgtatcatgaagtgattcatgctaagcaatttgcgaaaattggacgagaagcatacgaagcactaggacg

SEQ ID NO: 330861 - DNA, 75 bp, synthetic construct
  source 1..75: mol_type = other DNA
ctcgcaccgtttacacccctagcacagcaatatgtatctcaattgcaaaacctctcaacgctgcaaggtcagggg

SEQ ID NO: 330862 - DNA, 75 bp, synthetic construct
  source 1..75: mol_type = other DNA
agcacctcagtaacgcagtctattgcggaggtggtggcggtgatggcggctcaaaagctcaggcccgcgcaacag

SEQ ID NO: 330863 - DNA, 75 bp, synthetic construct
  source 1..75: mol_type = other DNA
tagcggtggagcttcaggggctatgactggcgctgctcttggctctattgttcccggacttggcactggattagg

SEQ ID NO: 330864 - DNA, 75 bp, synthetic construct
  source 1..75: mol_type = other DNA
ctacagcaacaggaaaccagttggcagcaatcgcacctacactcggtcaaaactggctgtcaggtcagatgaaca

SEQ ID NO: 330865 - DNA, 75 bp, synthetic construct
  source 1..75: mol_type = other DNA
ctgaaaagggcatcgaactgcagcgtgaaatgtggcaaacgaacatgcagaaccttgcaccgttcacgccactcg

SEQ ID NO: 330866 - DNA, 75 bp, synthetic construct
  source 1..75: mol_type = other DNA
aagcaacaggtggattgggttccaccgcaaccagtaatcagttagcaacaatcgcaccaacgcttggtcagcaat

SEQ ID NO: 330867 - DNA, 75 bp, synthetic construct
  source 1..75: mol_type = other DNA
gctggagcacagcttggcagcattgttccaggtattggtactggtattggtgctgctgttggcggcggtcttggt

SEQ ID NO: 330868 - DNA, 75 bp, synthetic construct
  source 1..75: mol_type = other DNA
gccggtgcaggtcttgccagccttttgggaacatcaacaccttggggcgctggcattggtgctggtatgggacag

SEQ ID NO: 330869 - DNA, 75 bp, synthetic construct
  source 1..75: mol_type = other DNA
tggggccgcatcaggtgcaatgattggtagtgcagttcctgttattgggactggtattggtgctcttgctggcgg

SEQ ID NO: 330870 - DNA, 75 bp, synthetic construct
  source 1..75: mol_type = other DNA
taaccagcttcagaacctttccagtttagaaggtcaggggcaggcacttaaccagtattacaactctcagcagta

SEQ ID NO: 330871 - DNA, 75 bp, synthetic construct
  source 1..75: mol_type = other DNA
accagtattacaactctcagcagtacaaagatcttgctggtcaggctcgctatcagagtctggcggcagcggaag

SEQ ID NO: 330872 - DNA, 75 bp, synthetic construct
  source 1..75: mol_type = other DNA
tggcggaggtgcgtctggtgctattgctggggctggacttgcgaaattaattggttcatcaactccgtggggtgc

SEQ ID NO: 330873 - DNA, 75 bp, synthetic construct
  source 1..75: mol_type = other DNA
gcataccatctggcggggataacgctgccggattttgtgcgtgaggatgactggtggcgcaacggtcagaacctg

SEQ ID NO: 330874 - DNA, 75 bp, synthetic construct
  source 1..75: mol_type = other DNA
taacgctgccggattttgtgcgtgaggatgactggtggcgcaacggtcagaacctgtacctggacaacctggcag

SEQ ID NO: 330875 - DNA, 75 bp, synthetic construct
  source 1..75: mol_type = other DNA
tggagacaacggggctgtatcaggtgccgttatcagcggcacagcccggcgatgtgctgctgtgctgtctgggtt

SEQ ID NO: 330876 - DNA, 75 bp, synthetic construct
  source 1..75: mol_type = other DNA
ggactgttacacgctgttccgggatgcctaccatctggcgggaattgatatgccggattttgagcgtgaggatga

SEQ ID NO: 330877 - DNA, 75 bp, synthetic construct
  source 1..75: mol_type = other DNA
ggtctgccggggggaaattcataaattccgctgtgtgccacatctgacaggacggcgctttgagcacggggtgac

SEQ ID NO: 330878 - DNA, 75 bp, synthetic construct
  source 1..75: mol_type = other DNA
gagtgagcacgaagtggcacagtttaaaactgcggtgctggtgttccttggtgccgaatacgcacgtcgcggttg

SEQ ID NO: 330879 - DNA, 75 bp, synthetic construct
  source 1..75: mol_type = other DNA
tatgacatctggctaaaaggcgatcactacaaatggcgcgctatgcgtaccaacggtgtggctgagcgtctgtgt

SEQ ID NO: 330880 - DNA, 75 bp, synthetic construct
  source 1..75: mol_type = other DNA
ctgcgtaataacaacttgcgtcagttcaaactgctggggccggatgtaggctttgactccatcaacgaccgtccg

SEQ ID NO: 330881 - DNA, 75 bp, synthetic construct
  source 1..75: mol_type = other DNA
tcaaactgctggggccggatgttggttttgactccatcaacgaccgtccgatggcagaagagctgtctaaactgc

SEQ ID NO: 330882 - DNA, 75 bp, synthetic construct
  source 1..75: mol_type = other DNA
gacagaacacgtacttttcctcgctggataacatgattgcccaggggaacccgatgccggtgccttacggtgaaa

SEQ ID NO: 330883 - DNA, 75 bp, synthetic construct
  source 1..75: mol_type = other DNA
ggtcagaatctctatcttgacaatatggaggcgactggtttttaccgtgtcgcactgacagaggcgcagccgggc

SEQ ID NO: 330884 - DNA, 75 bp, synthetic construct
  source 1..75: mol_type = other DNA
gatgtgctgctgtgctgttttggtcatcggtgccgaatcatgccgccatttactgtggtgatggcgagctgctgc

SEQ ID NO: 330885 - DNA, 75 bp, synthetic construct
  source 1..75: mol_type = other DNA
ggtcagaatctctatcttgacaatatggaggcgacgggtttttaccgtgtcgcactgacagaggcgcagcctggc

SEQ ID NO: 330886 - DNA, 75 bp, synthetic construct
  source 1..75: mol_type = other DNA
ctgttccgggatgcttaccatctggcgggaattgagatgccggattttcatcgcggggatgactggtggcgtcac

SEQ ID NO: 330887 - DNA, 75 bp, synthetic construct
  source 1..75: mol_type = other DNA
catacaccgctcaggggctgctgtcgggaatattccgccaggatgaacggcgtctgggcatagagtacgaccacc

SEQ ID NO: 330888 - DNA, 75 bp, synthetic construct
  source 1..75: mol_type = other DNA
gtcagcggcgcagccgggcgatgtgctgctgtgctgatttggttcatcggtgccgaatcatgccgccatttactg

SEQ ID NO: 330889 - DNA, 75 bp, synthetic construct
  source 1..75: mol_type = other DNA
tccgctgcccggtgcaaatcatctgcgccagtgatgatctgctggtgccatcagcatgttccagtgaacttcatg

SEQ ID NO: 330890 - DNA, 75 bp, synthetic construct
  source 1..75: mol_type = other DNA
atggcggacacgcctgcaacgtgaccgaccccgaaacgtttaatgctctgttactcaacgggcttgccagcctgt

SEQ ID NO: 330891 - DNA, 75 bp, synthetic construct
  source 1..75: mol_type = other DNA
ggcaataatcccgacacgctggcagaagattacagtatcgcccagatggcagcggaactgcatcaggcgctggta

SEQ ID NO: 330892 - DNA, 75 bp, synthetic construct
  source 1..75: mol_type = other DNA
tgccttacggtgaaatgctggttggctcccggcgaatctcccaggacatcagtacccgtgatgaaggcggtggcg

SEQ ID NO: 330893 - DNA, 75 bp, synthetic construct
  source 1..75: mol_type = other DNA
tggactggacaatggaatacggcccgttcgatttgccggtggcgcgaacggacggcgaaggtcaccgctggcagt

SEQ ID NO: 330894 - DNA, 75 bp, synthetic construct
  source 1..75: mol_type = other DNA
cactgggtgccagcatgatactgggcggtgtggcccagatgctggcaccgaaggcaaaaacaccggagtacaggg

SEQ ID NO: 330895 - DNA, 75 bp, synthetic construct
  source 1..75: mol_type = other DNA
gtgaacacggcagcggaagccatccgtgccctgtcgctgcaggtgccgggctttcgccgtcagatgaacgaaggc

SEQ ID NO: 330896 - DNA, 75 bp, synthetic construct
  source 1..75: mol_type = other DNA
ctcacgacggatatcccaggacatcagcacccgtgatgagggcagtgacgggaaagtggtggttatcgggcgagg

SEQ ID NO: 330897 - DNA, 75 bp, synthetic construct
  source 1..75: mol_type = other DNA
cgcgactggccggggccggaaagggcggactgcagattgtgctgggggcggcagccatcgtgggctctttcttca

SEQ ID NO: 330898 - DNA, 75 bp, synthetic construct
  source 1..75: mol_type = other DNA
tggctgagcgaggccgaccggcgactgcagataaagagtgccctgtcctggtggctggtctgccggggggcgatt

SEQ ID NO: 330899 - DNA, 75 bp, synthetic construct
  source 1..75: mol_type = other DNA
cggcaacggtgaactgcttcaccatattcctgaacaactgagtaaacgggagaggtattccgaaaaatggcaacg

SEQ ID NO: 330900 - DNA, 75 bp, synthetic construct
  source 1..75: mol_type = other DNA
gggacacggacgaatcatgcggtgagcgacctgacgggccgtccgctgatgctctttaacagtgaaggtaaaacc

SEQ ID NO: 330901 - DNA, 75 bp, synthetic construct
  source 1..75: mol_type = other DNA
tacttttcctcgctggataacatgattgcccagggtaacccgatgccggtgccttacggggaaatgctggttggc

SEQ ID NO: 330902 - DNA, 75 bp, synthetic construct
  source 1..75: mol_type = other DNA
ataaccttgaggtattaaagcatatggttaatgcttattctgaaaaggttaaaatgatttatatcgatccgccat

SEQ ID NO: 330903 - DNA, 75 bp, synthetic construct
  source 1..75: mol_type = other DNA
ctttaaaaacatctatgaattaacaaaagaacgactttcaagagcatcccaaagaattaaaaaagaacatcctga

SEQ ID NO: 330904 - DNA, 75 bp, synthetic construct
  source 1..75: mol_type = other DNA
atgcgacgaagtatttgggcaaggtaattttgttgcaaaactccctacaatcatgaatctcaaaggcaatcatga

SEQ ID NO: 330905 - DNA, 75 bp, synthetic construct
  source 1..75: mol_type = other DNA
gggcggtcatccatattgtgccgcgactggccggagccggaaagggcggactgcagattgtgctgggggcggcag

SEQ ID NO: 330906 - DNA, 75 bp, synthetic construct
  source 1..75: mol_type = other DNA
acacggcagcggaggccatccgtgccctgtcgctgcaggtgccgggattccgccgtcagatgaacgaaggctggt

SEQ ID NO: 330907 - DNA, 75 bp, synthetic construct
  source 1..75: mol_type = other DNA
aaatgaaaccacaaacagtaaacagcttgcgattttaaaggcaaactttccacagtgttttgataaaaatggagc

SEQ ID NO: 330908 - DNA, 75 bp, synthetic construct
  source 1..75: mol_type = other DNA
tgaaatgcgcgtggggtcacgtgtggcatctcaggaaatcagtacagctgatgaaggtgatggtggtgaaatcgt

SEQ ID NO: 330909 - DNA, 75 bp, synthetic construct
  source 1..75: mol_type = other DNA
cgaatcctttaagatataaagatttctatgggcttagtaagagttcaataataacgagaggaaagaatgctggtc

SEQ ID NO: 330910 - DNA, 75 bp, synthetic construct
  source 1..75: mol_type = other DNA
atgcatacaaaaagatgaagttataaataaaacaaagaatgcctattctcttggctatagatctatttttgaaat

SEQ ID NO: 330911 - DNA, 75 bp, synthetic construct
  source 1..75: mol_type = other DNA
ctacagaaaagataaaagggttttatctgttttatgcgatgagttaaaaaaaaatactgtttatgatgatatcat

SEQ ID NO: 330912 - DNA, 75 bp, synthetic construct
  source 1..75: mol_type = other DNA
actgacagaagtcatcaacccgcagggtgagtcatatctttatgttctggataactgcggccgggtgacggaaga

SEQ ID NO: 330913 - DNA, 75 bp, synthetic construct
  source 1..75: mol_type = other DNA
tggaccggctttgacggacagaaaaacgcagagaacaacgctcgttatatcgcagctttcaacccagaagtagtg

SEQ ID NO: 330914 - DNA, 75 bp, synthetic construct
  source 1..75: mol_type = other DNA
tttgatggacaggaaaacgcagagaacaacgctcgttatatcgcagctttcaaccctgaagtagtacaggcacta

SEQ ID NO: 330915 - DNA, 75 bp, synthetic construct
  source 1..75: mol_type = other DNA
ttgcggcatgtgttctggctgtccactcttggattaacggctatcgcctggctaacggctccctttgccggggtt

SEQ ID NO: 330916 - DNA, 75 bp, synthetic construct
  source 1..75: mol_type = other DNA
tgttgagtattatgttagagataattttaaagatttcataaagaaaggttttcttgatggtttttgggttgttat

SEQ ID NO: 330917 - DNA, 75 bp, synthetic construct
  source 1..75: mol_type = other DNA
cgggtaagcggtatctgctactggctgttctgtactgcattcggctgcaccgtaaaaacctctgtaaaggtcacc

SEQ ID NO: 330918 - DNA, 75 bp, synthetic construct
  source 1..75: mol_type = other DNA
gaaaaacgttctgctctgccgctgtcgccaccgttctggccacagcgtcaatacctgcagcgtttgctgcgctga

SEQ ID NO: 330919 - DNA, 75 bp, synthetic construct
  source 1..75: mol_type = other DNA
actttataaagaactgcgcggaagcccaccgccgaaaggcatgctgccattctcaaccgactggtttatgacctg

SEQ ID NO: 330920 - DNA, 75 bp, synthetic construct
  source 1..75: mol_type = other DNA
aggatttctatacaaaaaaatatcatgccacatcggtaaagcttgatggtaaacaaagcagaaatgaaaggccta

SEQ ID NO: 330921 - DNA, 75 bp, synthetic construct
  source 1..75: mol_type = other DNA
ctttttccggtacaaaaacgtattcaattgaaaacaatgttgcaattggtcggcgaaaagggaaaagccggtaaa

SEQ ID NO: 330922 - DNA, 75 bp, synthetic construct
  source 1..75: mol_type = other DNA
ctttatatctgctcatattgttgagcagttcttcgcaggccggtcaggaaaactgggatttaaaatgcacaattg

SEQ ID NO: 330923 - DNA, 75 bp, synthetic construct
  source 1..75: mol_type = other DNA
cggtttgtcgaaagcgatttgttgcaattgtccggttgcaactgctgcggcggtaattttatcacccatgctcac

SEQ ID NO: 330924 - DNA, 75 bp, synthetic construct
  source 1..75: mol_type = other DNA
ggtttgtgtaatggcgtcgatgcggtgatcaaagcctaccgtttataccttgaacagtgcccgcaagcagaagaa

SEQ ID NO: 330925 - DNA, 75 bp, synthetic construct
  source 1..75: mol_type = other DNA
gccggatggtcagccgcaccagacaccgtgacggctatcgcccggaaacagagcggttccggtgggacagccgtg

SEQ ID NO: 330926 - DNA, 75 bp, synthetic construct
  source 1..75: mol_type = other DNA
gtcactggtcagcggggcgtccggcgggattgaaaatgccgtgaccggcgtgctgagcggcgtgtcagccggcgg

SEQ ID NO: 330927 - DNA, 75 bp, synthetic construct
  source 1..75: mol_type = other DNA
aatacgcagatgcgctgggtcatccggccacacagcttatcggcgggatggtacccggattcagctgtgattcac

SEQ ID NO: 330928 - DNA, 75 bp, synthetic construct
  source 1..75: mol_type = other DNA
tctggtcagtcaggcatccggcggtgtggagaacgccatcagcagcgggattgcggggttatctgccggcggggg

SEQ ID NO: 330929 - DNA, 75 bp, synthetic construct
  source 1..75: mol_type = other DNA
aggcggtcaggaggctgaaaaaacagaagtatcctccacaggctcaattgagccgggaagtggaagctcttccga

SEQ ID NO: 330930 - DNA, 75 bp, synthetic construct
  source 1..75: mol_type = other DNA
aaaaaatacgcttaaggctactttcaagatcgatttcaatggcgataataagtctgacgtagatgtcaatgccag

SEQ ID NO: 330931 - DNA, 75 bp, synthetic construct
  source 1..75: mol_type = other DNA
atcgttgttatctgaattgagtcattctaataatagacagttaaatcttcatgatgtaccttttttacacttagt

SEQ ID NO: 330932 - DNA, 75 bp, synthetic construct
  source 1..75: mol_type = other DNA
cctgtatggcgcattgaccgccgcgctattccatgtctgggcgctgatcgctgccgatcttggtgctaaaaataa

SEQ ID NO: 330933 - DNA, 75 bp, synthetic construct
  source 1..75: mol_type = other DNA
cgactgcggttatgggatttggctccagcatgggcgctatcattattcccctctgtgttgcggtaaatattgcaa

SEQ ID NO: 330934 - DNA, 75 bp, synthetic construct
  source 1..75: mol_type = other DNA
ttttctcagcacactggacagccttgcctggcgtaccggcatgcctgaatccctgtatcccgaagccatgatacc

SEQ ID NO: 330935 - DNA, 75 bp, synthetic construct
  source 1..75: mol_type = other DNA
tactggctgcactgctcctggtcggggtgtcgggtcagaacgtccgtgaaggtctcacattttatccctgaagca

SEQ ID NO: 330936 - DNA, 75 bp, synthetic construct
  source 1..75: mol_type = other DNA
cggcgcagattattgccagcgccgtgtcgcaaaactgtatcagctggcgtgtcagtggcatctgttactggctgt

SEQ ID NO: 330937 - DNA, 75 bp, synthetic construct
  source 1..75: mol_type = other DNA
atgacaacaccttcccgcatcagaaccacggtttgctcgctggcggttgccactttactgggtacggcaaccgcg

SEQ ID NO: 330938 - DNA, 75 bp, synthetic construct
  source 1..75: mol_type = other DNA
tggatggaaaagttaagagtcatgggactgtaacaattgttaatgatcatgatccaagcagtatggaaaaatata

SEQ ID NO: 330939 - DNA, 75 bp, synthetic construct
  source 1..75: mol_type = other DNA
aatttcagaacatcgacgcttcttcgcaaaataaaccagggcgatatcaaaggcgcatgtgatcaactacgtcgc

SEQ ID NO: 330940 - DNA, 75 bp, synthetic construct
  source 1..75: mol_type = other DNA
atcctcgaccagtttctggatgaaaaagaaggcaaccacaccacggcataccgtgatggtgcgggtatctggacc

SEQ ID NO: 330941 - DNA, 75 bp, synthetic construct
  source 1..75: mol_type = other DNA
gctggtggggccggatctcgacgccgatgggttgctggagcctgcgcggctgctggcgaccaaacgcgtggtggt

SEQ ID NO: 330942 - DNA, 75 bp, synthetic construct
  source 1..75: mol_type = other DNA
aatgttcacgagcagatcagaacctgataatgctaaatattcaaaagacggagtttcgtggagtgggcaaggacg

SEQ ID NO: 330943 - DNA, 75 bp, synthetic construct
  source 1..75: mol_type = other DNA
gagcctgatttggcgagcgtagtaaaaactgccgtagaaggcggttttttacgagcgagcacgacgccagttgaa

SEQ ID NO: 330944 - DNA, 75 bp, synthetic construct
  source 1..75: mol_type = other DNA
cagaatgcaaagccctcctgaataaagaccttgccacggtcgccagacaaattaacccgtacataaaagttgata

SEQ ID NO: 330945 - DNA, 75 bp, synthetic construct
  source 1..75: mol_type = other DNA
acaccacggcataccgtgatggtgcgggtatctggaccatctgccgtggagccacccgggtggatggtaagcctg

SEQ ID NO: 330946 - DNA, 75 bp, synthetic construct
  source 1..75: mol_type = other DNA
tgtcggctgccgttctggcgctgattgccgcaggggcttctgcgcctgaaatcctcgaccagtttctggatgaaa

SEQ ID NO: 330947 - DNA, 75 bp, synthetic construct
  source 1..75: mol_type = other DNA
ttgcagctgctattggtggcggggctattgccatagcgtctgtgctcatcactggtccaagtggtaacgatggtc

SEQ ID NO: 330948 - DNA, 75 bp, synthetic construct
  source 1..75: mol_type = other DNA
ctggcgaatgtcgccacgcctaacgcggtcgttaccaaagggcatcgctttgatatttatgccgggacaccagcg

SEQ ID NO: 330949 - DNA, 75 bp, synthetic construct
  source 1..75: mol_type = other DNA
ctggcgaatgtcgccacgccaaacgcggtagtcactaaagggcatcgctttgatatctatgcaggtacgccagtg

SEQ ID NO: 330950 - DNA, 75 bp, synthetic construct
  source 1..75: mol_type = other DNA
ttgcaggagcgtttacagttaatccacgcctccagcctgacggcgctaaccgatattactccccgcccgcaggtg

SEQ ID NO: 330951 - DNA, 75 bp, synthetic construct
  source 1..75: mol_type = other DNA
gatggagtgcgcctgaatttagcgggtgtcagtggagctgcagacctgagtcagtttcccgtcgctttagtgcag

SEQ ID NO: 330952 - DNA, 75 bp, synthetic construct
  source 1..75: mol_type = other DNA
tgtcggctgccgttctggcgctgattgccgctggggcgcctgcgcctgacattctcgaccagtttctggatgaaa

SEQ ID NO: 330953 - DNA, 75 bp, synthetic construct
  source 1..75: mol_type = other DNA
tctgtccgtacaacattggtcccggtaagtgtttcccgtcgacgttttacagacgaattaatgcaggtgatcgaa

SEQ ID NO: 330954 - DNA, 75 bp, synthetic construct
  source 1..75: mol_type = other DNA
gtgagtaaaaaactccgctacggtttatctgcggtcgttctggcgctgattgccgcaggggcttctgcacctgaa

SEQ ID NO: 330955 - DNA, 75 bp, synthetic construct
  source 1..75: mol_type = other DNA
atattctgaccaataaacttgcacaaccagctgtatattacgccttcatgttcgctatgttttcgatgttatctc

SEQ ID NO: 330956 - DNA, 75 bp, synthetic construct
  source 1..75: mol_type = other DNA
gaagttgtcgaaggcaaaatgcgctcaggttaacgccattgagcgtaataaggcgctggcatgggtggagaaaaa

SEQ ID NO: 330957 - DNA, 75 bp, synthetic construct
  source 1..75: mol_type = other DNA
cgggttaacgccattgagcgtgataaggcgctggcatgggtggagaaaaacatcaaagtgccactgaccgaaccc

SEQ ID NO: 330958 - DNA, 75 bp, synthetic construct
  source 1..75: mol_type = other DNA
tgcagctccatcagcaaaaagggatgataagtttatcaccaccgactatttgcaacagtgccctggaaagtcagg

SEQ ID NO: 330959 - DNA, 75 bp, synthetic construct
  source 1..75: mol_type = other DNA
gtgcagctccatcagcaaaaagggatgataagtttatcaccaccgactatttgcaacagtgccctggaaagtcag

SEQ ID NO: 330960 - DNA, 75 bp, synthetic construct
  source 1..75: mol_type = other DNA
caacttgactggcaagtattcgattttgactgggggataacttatcaatatatgggatcgcgatacgattcggac

SEQ ID NO: 330961 - DNA, 75 bp, synthetic construct
  source 1..75: mol_type = other DNA
gtgtttcccgtcgacgttttataagcggcttaatgccggtgatcgtaaaggtgcctgcgaggcgattcgctggtg

SEQ ID NO: 330962 - DNA, 75 bp, synthetic construct
  source 1..75: mol_type = other DNA
aaatcaccggttatcacccaaccggccagcaatgccttcgccgtaaaccagactcaaccacaaccggcacaagtg

SEQ ID NO: 330963 - DNA, 75 bp, synthetic construct
  source 1..75: mol_type = other DNA
tggactggggtgtaacttatcaatatctgggatcgcgatacgattcggattactcatcctggccctataagtcag

SEQ ID NO: 330964 - DNA, 75 bp, synthetic construct
  source 1..75: mol_type = other DNA
atataatctatggatcaaaaaaggctgggtgacacaatctgaaaatccctgttttgagtgtcaggtgatcccggg

SEQ ID NO: 330965 - DNA, 75 bp, synthetic construct
  source 1..75: mol_type = other DNA
ttccgtgtggctggccgttaacggcatgggcggcctggacgcattaaaagcggtcgttcccgcacaaccgttaga

SEQ ID NO: 330966 - DNA, 75 bp, synthetic construct
  source 1..75: mol_type = other DNA
tcagccactacgttgtttactggcgcccttggttgaggaaatgcgttgtcacggggcggataaaaacgatatttt

SEQ ID NO: 330967 - DNA, 75 bp, synthetic construct
  source 1..75: mol_type = other DNA
ctgacggctattcgttttaaccagctgattaacctgcatattggcgatctggattttgaggagtgtacgatcaca

SEQ ID NO: 330968 - DNA, 75 bp, synthetic construct
  source 1..75: mol_type = other DNA
aaagcctcttctgaaatcactgattaaagagatgcagatacgagggatgcctgatgatgtgccgttatttaatgt

SEQ ID NO: 330969 - DNA, 75 bp, synthetic construct
  source 1..75: mol_type = other DNA
tcaggaacgatcgaaccaggtgatctgctgttcgttgatatcacggttaaatctttcgacggtgatggtatctat

SEQ ID NO: 330970 - DNA, 75 bp, synthetic construct
  source 1..75: mol_type = other DNA
atgttgttagaacaagggtggctggctggcgcgcgccgcgttccctcaccacattacgattgccgcccggatgac

SEQ ID NO: 330971 - DNA, 75 bp, synthetic construct
  source 1..75: mol_type = other DNA
aaagctcatttagctgcctatgagcaatcgaaagcttctgacacttcaacccttaaaccaacccgtcaggcgcca

SEQ ID NO: 330972 - DNA, 75 bp, synthetic construct
  source 1..75: mol_type = other DNA
caatcaccgaaggcgcagtgaacgccactgtccatatcaaaacggatgcgggttttgaaattgtggcagtggtaa

SEQ ID NO: 330973 - DNA, 75 bp, synthetic construct
  source 1..75: mol_type = other DNA
ccaggttcgtcgaatattaatgcgagaacgacttttaatatgagtcatatgagtcgtatgagtcagatggcgact

SEQ ID NO: 330974 - DNA, 75 bp, synthetic construct
  source 1..75: mol_type = other DNA
tgctgttcgttgatatcacagttaaatctttcgatggcgatggtatctatgcgttcctgtacgacgacacagccc

SEQ ID NO: 330975 - DNA, 75 bp, synthetic construct
  source 1..75: mol_type = other DNA
ttcgtataaaagacaaatacaggtgggatttgtgggaaaatgatttcagagttgtcattgcttattcgaaagatg

SEQ ID NO: 330976 - DNA, 75 bp, synthetic construct
  source 1..75: mol_type = other DNA
tatttgctgcgcgtgccggaagatgacgaagagcaacagcttgaggcgctgcgtcagttcaaacaggcgcaactg

SEQ ID NO: 330977 - DNA, 75 bp, synthetic construct
  source 1..75: mol_type = other DNA
catccagtcactgcgtaacatgaaagggatgattgcccgtgaagtgcgtcgtcgcggcctcactgataacatcaa

SEQ ID NO: 330978 - DNA, 75 bp, synthetic construct
  source 1..75: mol_type = other DNA
gagcgatcacttaacctggctggcggaagccatgatagatgctgtcgttcagcaggcgtgggttcaaatggttgc

SEQ ID NO: 330979 - DNA, 75 bp, synthetic construct
  source 1..75: mol_type = other DNA
tgtatgacgcctgctgccgcgagtggggaacgccgtgcaatgcgcagggcgaagcgcaaccgctgctgattttag

SEQ ID NO: 330980 - DNA, 75 bp, synthetic construct
  source 1..75: mol_type = other DNA
cacagaagcatttgccgattatcagaaaaacgaggcctggacgtgggagcatcaggcgctggtgcgtgcgcgtgt

SEQ ID NO: 330981 - DNA, 75 bp, synthetic construct
  source 1..75: mol_type = other DNA
ccagacgctcccagccgatgagcttaaccgtgcgcggctggcgtgggcgatggatttcgctgactggttgcaact

SEQ ID NO: 330982 - DNA, 75 bp, synthetic construct
  source 1..75: mol_type = other DNA
cgtgatgggccgtgaacaccacaccgaatacagcggtcacgacctgccggtgaagatgcgcggccccggcggtca

SEQ ID NO: 330983 - DNA, 75 bp, synthetic construct
  source 1..75: mol_type = other DNA
atgagcgcggcctgctcagcaacatcaccgaccctgccgggcagacgtggacacagctgtgcgatgaacgcggcc

SEQ ID NO: 330984 - DNA, 75 bp, synthetic construct
  source 1..75: mol_type = other DNA
gcgctcagtaatgtgagtgacgaagccgggttaatgcgcgagctgcggctattccggcggcgcattatggtgcgc

SEQ ID NO: 330985 - DNA, 75 bp, synthetic construct
  source 1..75: mol_type = other DNA
tggttggctcccggcgaatctcccaggacatcagtacccgtgatgaaggcggtggcggaaaggtcgtggttatcg

SEQ ID NO: 330986 - DNA, 75 bp, synthetic construct
  source 1..75: mol_type = other DNA
ggtgaggacacggcaccggaggcggtgtacgcccgtcttcacgaacagctgggtgagggaacggtcatccacatt

SEQ ID NO: 330987 - DNA, 75 bp, synthetic construct
  source 1..75: mol_type = other DNA
ggaaacagagcggttccggtgggacagccgggaccagctgaccgggtattgcagcgcacagggtgagcagtggga

SEQ ID NO: 330988 - DNA, 75 bp, synthetic construct
  source 1..75: mol_type = other DNA
tgatgtcattgatgtgattcatgccattgaatacataactgataatgctgtatcgatgtttggaggacgaccagc

SEQ ID NO: 330989 - DNA, 75 bp, synthetic construct
  source 1..75: mol_type = other DNA
gacttcaaaagtaatactgtatgtaaaaacagtactggtgaggatgttgcgcaggtgaaggatgtattccgtatt

SEQ ID NO: 330990 - DNA, 75 bp, synthetic construct
  source 1..75: mol_type = other DNA
aaaacatcaggagccgctgtatcaaagtattgcagttgaatgcctgacggaaatgaaatttgaagatttgcgcgg

SEQ ID NO: 330991 - DNA, 75 bp, synthetic construct
  source 1..75: mol_type = other DNA
tatatatttaagcaattagcgccattccatcgtagggagccgttagatgatgcaatcccaaaagaagagcctgag

SEQ ID NO: 330992 - DNA, 75 bp, synthetic construct
  source 1..75: mol_type = other DNA
tatcttctggcgttggaaatatgtcagacagtacagtgcaaccaatacaatcaactgtcagccattccaaatact

SEQ ID NO: 330993 - DNA, 75 bp, synthetic construct
  source 1..75: mol_type = other DNA
gatggaatttacgctttcctgtacgacgaaacagctcatgttaagcgacttcagaagatgaaagacaaactactg

SEQ ID NO: 330994 - DNA, 75 bp, synthetic construct
  source 1..75: mol_type = other DNA
gccttggcgataaagtaccggaacaccgaacggcagatacaggaagcacagaagcgaatcagcgcacttcaggaa

SEQ ID NO: 330995 - DNA, 75 bp, synthetic construct
  source 1..75: mol_type = other DNA
gacagaggcgaagaccccggcccaggctgcggtggacgcgctgccggatggtcaggagaagagcgagctgcagaa

SEQ ID NO: 330996 - DNA, 75 bp, synthetic construct
  source 1..75: mol_type = other DNA
tgcaggatcgtgtggatgcactggacggtatccaggtaccggaagtgaacgatcaggacggtaacggcaaggcgg

SEQ ID NO: 330997 - DNA, 75 bp, synthetic construct
  source 1..75: mol_type = other DNA
gcacatcacagcgcaccggctacgacgaacgcgggcgggtgaatgtcaccactcagggccgacgggccattgaat

SEQ ID NO: 330998 - DNA, 75 bp, synthetic construct
  source 1..75: mol_type = other DNA
ttttctgccaccacaatgctgttttcactgggtgccagcatgatactgggcggtgtggcccagatgctggccccg

SEQ ID NO: 330999 - DNA, 75 bp, synthetic construct
  source 1..75: mol_type = other DNA
agccctcagagcaatggaatggcagaaaggttcgtgaaaacgatgaaagaagactacatcgcgttcatgccgaaa

SEQ ID NO: 331000 - DNA, 75 bp, synthetic construct
  source 1..75: mol_type = other DNA
gtggctggtctgccggggggaaattcataaattccgctgtgtgccgcacctgaccgggcgtcgttttgagcacgg

SEQ ID NO: 331001 - DNA, 75 bp, synthetic construct
  source 1..75: mol_type = other DNA
catccgctgtatcctgccaccggaagatgaacgcgacagacaccccggtgaatccctgctgaaaaccacgtaccg

SEQ ID NO: 331002 - DNA, 75 bp, synthetic construct
  source 1..75: mol_type = other DNA
atgattaaaaaagcttcgctgctgacggcgtgttccgtcacggccttttccgcttgggcacaggataccagcccg

SEQ ID NO: 331003 - DNA, 75 bp, synthetic construct
  source 1..75: mol_type = other DNA
catattttcgtattgccccggaagactggctgcgggcacagatgcagggggagattgtggcactggtccacagcc

SEQ ID NO: 331004 - DNA, 75 bp, synthetic construct
  source 1..75: mol_type = other DNA
atgggcggttactacgctggcccctggcagatgctgtttaacgcatggtgtcacaaccgtgtacccaacattgcc

SEQ ID NO: 331005 - DNA, 75 bp, synthetic construct
  source 1..75: mol_type = other DNA
gtggactggagcgtggtcacgcctctgcccgggtcttccgtttcatccgcgacatgctcgacgatctggatctgt

SEQ ID NO: 331006 - DNA, 75 bp, synthetic construct
  source 1..75: mol_type = other DNA
ggggacaaactggagtgcagtgcggcgatcgtggaaggttcgccggacgtctttattgggggtgagcaggtcacc

SEQ ID NO: 331007 - DNA, 75 bp, synthetic construct
  source 1..75: mol_type = other DNA
ctcccaggcagcaacacgtgaggacactttccacgatacgtttttacgtgtctgcagcgactggctggcacaaac

SEQ ID NO: 331008 - DNA, 75 bp, synthetic construct
  source 1..75: mol_type = other DNA
cggaggccaccggctgaaacaggccggaaacacgcagtatgactatgacgccgcaggccggatggtcagccgcac

SEQ ID NO: 331009 - DNA, 75 bp, synthetic construct
  source 1..75: mol_type = other DNA
ttgcagtctcctcattggtattcagttcggcgtcgtttgccgctgatctggaagacaatatggaaaccctcaacg

SEQ ID NO: 331010 - DNA, 75 bp, synthetic construct
  source 1..75: mol_type = other DNA
ggctttaattctgcttacagaacgtcatcaaccagcgacacggtatcgatgaattacagttggtgggctgttggt

SEQ ID NO: 331011 - DNA, 75 bp, synthetic construct
  source 1..75: mol_type = other DNA
ggctggctgaaatgcaacggtgcacctttttctgccgaagagtacccaaaactggcaaaggcttacccaaagtta

SEQ ID NO: 331012 - DNA, 75 bp, synthetic construct
  source 1..75: mol_type = other DNA
gcaacatccgcgctgcgtgtggaacttgctgaaacagcacgtttcccgctacacgccagatgtggttgaaaacat

SEQ ID NO: 331013 - DNA, 75 bp, synthetic construct
  source 1..75: mol_type = other DNA
taaaaaagaaggcgtgaacagcaccgaatccggcctgcaattccgcgtgatcaaccagggcgaaggcgcaattcc

SEQ ID NO: 331014 - DNA, 75 bp, synthetic construct
  source 1..75: mol_type = other DNA
gaatctggcctgcaattccgcgtgatcaaccagggtgaaggcgcaattccggcacgtaccgaccgcgttcgtgtt

SEQ ID NO: 331015 - DNA, 75 bp, synthetic construct
  source 1..75: mol_type = other DNA
ctggttgcagaaaaacgccgcgccgcgctgaatatgctttatatcgatccacagaacagtagccagattattgct

SEQ ID NO: 331016 - DNA, 75 bp, synthetic construct
  source 1..75: mol_type = other DNA
aacccgggcggcgcttaatgccagtgatgaacggtcctggtcgcaacttttatttagcacggagcagttctggca

SEQ ID NO: 331017 - DNA, 75 bp, synthetic construct
  source 1..75: mol_type = other DNA
tcctggcttcagttaacgccagagcaattgcagaacacgccggggatagcgaaaagcaaaagcgagcagttatgg

SEQ ID NO: 331018 - DNA, 75 bp, synthetic construct
  source 1..75: mol_type = other DNA
ttggtggcgtggaaatatcaacccgtggcacaggttgccgaagtgaatgcgattcagtttgcggtgggtaagagc

SEQ ID NO: 331019 - DNA, 75 bp, synthetic construct
  source 1..75: mol_type = other DNA
tggtttgcaggtagggcaacaactgagtgaatctggtctggaagggttactgccagaagcactggttgcaggcat

SEQ ID NO: 331020 - DNA, 75 bp, synthetic construct
  source 1..75: mol_type = other DNA
tggttcgtaggtatgctcaccttgcgcctaatcatttgacagagcatgcgaggaaaatagacgacatttttggtg

SEQ ID NO: 331021 - DNA, 75 bp, synthetic construct
  source 1..75: mol_type = other DNA
tctatcacgatggaaaactcagtcaggcgatcagtcgtggcaatggtctgaagggtgaggactggacgcagaaag

SEQ ID NO: 331022 - DNA, 75 bp, synthetic construct
  source 1..75: mol_type = other DNA
gcactgtatttgacagctctgttgctcgtggcgaaccggctgaattcccggtgaacggcgtgatcccaggctgga

SEQ ID NO: 331023 - DNA, 75 bp, synthetic construct
  source 1..75: mol_type = other DNA
gtatcagcccgatatttgacaaggagaaagagcagaggcgtctgcagacagtggggcttatcagtgacataggca

SEQ ID NO: 331024 - DNA, 75 bp, synthetic construct
  source 1..75: mol_type = other DNA
cagttaatcaaggggatatttatagtataggtgctcatggcggagcctcgatcggattatcctttggcccgtatt

SEQ ID NO: 331025 - DNA, 75 bp, synthetic construct
  source 1..75: mol_type = other DNA
attccatgccgattttgccgccatcaccctgaacacgctgggcattccgcagcttggcctgcgcgagcatattca

SEQ ID NO: 331026 - DNA, 75 bp, synthetic construct
  source 1..75: mol_type = other DNA
gctgcctgagcaagctgaagtacatggtggtaatcgatccgctggtgactgaaacttctaccttctggcagaacc

SEQ ID NO: 331027 - DNA, 75 bp, synthetic construct
  source 1..75: mol_type = other DNA
cccgtcggtttccgctgggcgatggaagcgaaaaacaacaacgatgcaaccttgatcgttgtcgatccccgtttt

SEQ ID NO: 331028 - DNA, 75 bp, synthetic construct
  source 1..75: mol_type = other DNA
ggctggccggcggtcttaccggaaacagcaccgcatcagcagcagtgggagcacaaagcgggaagaatgctgttg

SEQ ID NO: 331029 - DNA, 75 bp, synthetic construct
  source 1..75: mol_type = other DNA
cctttatgacgatgacggcattctgattgccgtggcgaactgcccggagacctacaaaccgcaactgcaggaggg

SEQ ID NO: 331030 - DNA, 75 bp, synthetic construct
  source 1..75: mol_type = other DNA
cggcactcgtggggttgcttctgacaatgcagcgaatattggcactgaaacccgcccgcgcaacatagcatttaa

SEQ ID NO: 331031 - DNA, 75 bp, synthetic construct
  source 1..75: mol_type = other DNA
aataaattgcctgatttacgtggtgagttcattcgtggctgggatgacggaagaggaatagatactaaccgtagc

SEQ ID NO: 331032 - DNA, 75 bp, synthetic construct
  source 1..75: mol_type = other DNA
tggtatctgactgaactaagtcgcggctggaacaaactgctggaagcggaaaaccgtatgcaggcctggcagttt

SEQ ID NO: 331033 - DNA, 75 bp, synthetic construct
  source 1..75: mol_type = other DNA
cgtggcgcaacgatcgtcgctataaagcagaatacgattactgtgcagaggatttgcagcagacgctccagccaa

SEQ ID NO: 331034 - DNA, 75 bp, synthetic construct
  source 1..75: mol_type = other DNA
tctctatgatgatgccggtgtgcttattgccgtggcgaactgcccggaaacctacaagccgcaactgcaggaggg

SEQ ID NO: 331035 - DNA, 75 bp, synthetic construct
  source 1..75: mol_type = other DNA
tacactcgcgcagtcaaaaatgctgatgaggttgagcggatacgtaatgagtggtggaaaacagcgttacccttt

SEQ ID NO: 331036 - DNA, 75 bp, synthetic construct
  source 1..75: mol_type = other DNA
tggctgtgggataactggtacggcaaatctcgccgtgtaatgcagcgttctttctcttatcaatcacggcagaat

SEQ ID NO: 331037 - DNA, 75 bp, synthetic construct
  source 1..75: mol_type = other DNA
gcagaaacggctgtttattcgtaacttctttacgcttcaggatcggctggatttaacccatgagtatctgcacct

SEQ ID NO: 331038 - DNA, 75 bp, synthetic construct
  source 1..75: mol_type = other DNA
acgtccacggcgtgaagaggtggataccgcggcatggataccgtcgctaaccacggataaacaaggcaaagcgta

SEQ ID NO: 331039 - DNA, 75 bp, synthetic construct
  source 1..75: mol_type = other DNA
atccggcctacagaccggagccaaacatgcaaaccatcaccatcgccccacccaagcgtagctggttctcgcttc

SEQ ID NO: 331040 - DNA, 75 bp, synthetic construct
  source 1..75: mol_type = other DNA
ctctgcgctacggccaggtagaagtaccgctgccgccgggagccgatgttgagcgtacaacctggggcatttcgg

SEQ ID NO: 331041 - DNA, 75 bp, synthetic construct
  source 1..75: mol_type = other DNA
agatggaagagtacggcggcgtggacgttcgcctgtatcgtattcctgacccgatggcatttttgcgccagcaga

SEQ ID NO: 331042 - DNA, 75 bp, synthetic construct
  source 1..75: mol_type = other DNA
tggcgggcagggaagtttccgcctgccagaaaatgccgttgccggaggttatgagttacgtcttgcttaccgcaa

SEQ ID NO: 331043 - DNA, 75 bp, synthetic construct
  source 1..75: mol_type = other DNA
cgaccaggcgctctccagcgaacctgttgcgcctggcgcgactaaccgcagcgagcggcgagtgaaaatgctgga

SEQ ID NO: 331044 - DNA, 75 bp, synthetic construct
  source 1..75: mol_type = other DNA
aagagatcctcattgaacgtggtctggcgcattacactttgagcaccgccgcacaatacagcaatagcggtgaat

SEQ ID NO: 331045 - DNA, 75 bp, synthetic construct
  source 1..75: mol_type = other DNA
cagggtggttttgctggctggttaaccgatggtacaccgctgtgggttactggcagtggcaccagcaaaacggta

SEQ ID NO: 331046 - DNA, 75 bp, synthetic construct
  source 1..75: mol_type = other DNA
caggcgtgaccaaagtctcagcattacctgactcgctcaccacgccgttagggagtttgtggaaactgtatgttt

SEQ ID NO: 331047 - DNA, 75 bp, synthetic construct
  source 1..75: mol_type = other DNA
ctatccgctggggcgtaacaatgtgcgtaccagctccagtctgtcgtttatcagctacgaccaggcgctctccag

SEQ ID NO: 331048 - DNA, 75 bp, synthetic construct
  source 1..75: mol_type = other DNA
aataccttcctttcgaagtccgttccggtgatgttgatctgggtagcttctttactcttcaagaactggatgaag

SEQ ID NO: 331049 - DNA, 75 bp, synthetic construct
  source 1..75: mol_type = other DNA
taccgaacacgcacggcaaatagactcgattctgaacccatcggtcccaaatttgtcccagtcaaaaaataagga

SEQ ID NO: 331050 - DNA, 75 bp, synthetic construct
  source 1..75: mol_type = other DNA
tgaaaaaacaaatcgggaatcatcaccgttgggtatttgtgtacaaggaaagcgccaacggtcaggaagatgcgg

SEQ ID NO: 331051 - DNA, 75 bp, synthetic construct
  source 1..75: mol_type = other DNA
attgatgatgacaagagcattatatcgttctggatgttgcacttcagagaaaccattctctctgacataacaaca

SEQ ID NO: 331052 - DNA, 75 bp, synthetic construct
  source 1..75: mol_type = other DNA
gtacgtaaaatggcggataaaaatgcgttaaggctgtggatgcgtgaacgcagcgatctttgggtgcaaccaaaa

SEQ ID NO: 331053 - DNA, 75 bp, synthetic construct
  source 1..75: mol_type = other DNA
aggacgatagcgacacgctgaattctctgggcgtttttgtctgggcatggccggatggaccgcagttaatgaccg

SEQ ID NO: 331054 - DNA, 75 bp, synthetic construct
  source 1..75: mol_type = other DNA
tggcaatgcgatcggagttcctcttaacgaaaccgcatgccagatattaagaaaacagcaggggctccataagag

SEQ ID NO: 331055 - DNA, 75 bp, synthetic construct
  source 1..75: mol_type = other DNA
gattacggtaaacaacccgctcaggaagccccagaacaagatgaagaagatgaggaagacgaagactacgctcca

SEQ ID NO: 331056 - DNA, 75 bp, synthetic construct
  source 1..75: mol_type = other DNA
gtaaacaacccgctcaggaagccccagaacaagatgaagaagatgaggaagacgaagactacgctccaatctgtt

SEQ ID NO: 331057 - DNA, 75 bp, synthetic construct
  source 1..75: mol_type = other DNA
cgctcaggaagccccagaagaagacgaacaagacgaagatgacgatgactatgcaccaatcgctttttcttctca

SEQ ID NO: 331058 - DNA, 75 bp, synthetic construct
  source 1..75: mol_type = other DNA
agagggtttacaagagtcgaaagtcctgtagatggtatcgtgtctgaggtttatgtaggtacaaaaaatcagata

SEQ ID NO: 331059 - DNA, 75 bp, synthetic construct
  source 1..75: mol_type = other DNA
aatggccaagaaagcctttaaggcttgtttaatgtggtgtaatgaacaagaaaaatacactacatataaagaaaa

SEQ ID NO: 331060 - DNA, 75 bp, synthetic construct
  source 1..75: mol_type = other DNA
aatggccaaaaaagcctttaaggcttgtttaatgtggtgtaatgaacaagaaaaatacgctacatataaagaaaa

SEQ ID NO: 331061 - DNA, 75 bp, synthetic construct
  source 1..75: mol_type = other DNA
gcgtgacatctgaagagcaaaacgtatttcggctctgtccgtcctttttatctctgacactgatgtctgttttat

SEQ ID NO: 331062 - DNA, 75 bp, synthetic construct
  source 1..75: mol_type = other DNA
cttacgatgttcaggcccgcaggtcgcgtaactacattaatgatacggaaatccaggtacagcgccgacagacgg

SEQ ID NO: 331063 - DNA, 75 bp, synthetic construct
  source 1..75: mol_type = other DNA
aggcccgcaggtcgcgtaactacattaatgatacggaaatccaggtacagcgccggcagacggcggcctggcgac

SEQ ID NO: 331064 - DNA, 75 bp, synthetic construct
  source 1..75: mol_type = other DNA
gccgcagatcaccggttggctgaaatcgtaactggacaattatttgataaaattcctaaaaatgtctggaagctg

SEQ ID NO: 331065 - DNA, 75 bp, synthetic construct
  source 1..75: mol_type = other DNA
aaggccaaagagccagatctgcggttattcctccttgagaacgacatcatgtatcgccttggcggaacgatgacc

SEQ ID NO: 331066 - DNA, 75 bp, synthetic construct
  source 1..75: mol_type = other DNA
agcaggaattatatctgggaatggattacggcgaggtgggcggagccggcagtgagtatctggtggggcgtcatc

SEQ ID NO: 331067 - DNA, 75 bp, synthetic construct
  source 1..75: mol_type = other DNA
atgcaaacacaaaaaccgactctcgaactgctaacttgcaaaggcgcttatcgcgacaacccgactgcgcttttt

SEQ ID NO: 331068 - DNA, 75 bp, synthetic construct
  source 1..75: mol_type = other DNA
tcaccgctggcggcctattacgtgctgaaaaagagtaatcccagcccgtatatgttttttatgcaggataatgat

SEQ ID NO: 331069 - DNA, 75 bp, synthetic construct
  source 1..75: mol_type = other DNA
ggtatcgccaccgtgcaggccggtgctggcgtggtccttgattctgttccgcagtcggaagccgacgaaacccgt

SEQ ID NO: 331070 - DNA, 75 bp, synthetic construct
  source 1..75: mol_type = other DNA
tccggcagagcagtggccagcgtacggaaaaaacattttccctgccggtgatgctctaccgcggtgtgttcagag

SEQ ID NO: 331071 - DNA, 75 bp, synthetic construct
  source 1..75: mol_type = other DNA
cggcggtgatgcactgtatcttcagcagcagaactacagtctggaggcgctgtcccgtcgtgatgcccgtgagga

SEQ ID NO: 331072 - DNA, 75 bp, synthetic construct
  source 1..75: mol_type = other DNA
gtatctggctggttgccggtatcaccgatatgcgaaatggctttaacggcctgcctcaaaagttcagaacgtcct

SEQ ID NO: 331073 - DNA, 75 bp, synthetic construct
  source 1..75: mol_type = other DNA
aacgacgtaagggtgattgccgaacgcacaggcatcagtgcggaggatttacgccaggcgctgaccgtggagagt

SEQ ID NO: 331074 - DNA, 75 bp, synthetic construct
  source 1..75: mol_type = other DNA
aatggtaagaatgagagggtttgaagatatggccaatgaagaagggctggccggtgagttttacaccatcaccgc

SEQ ID NO: 331075 - DNA, 75 bp, synthetic construct
  source 1..75: mol_type = other DNA
tcgtcaatgcctggcggcgtgaaacctttgcgcctggcactccttcagatgcaacgatcacagaacgccgtttgt

SEQ ID NO: 331076 - DNA, 75 bp, synthetic construct
  source 1..75: mol_type = other DNA
cgaaacatcagattgataaccccggttatgcgcacaaatcgttttactatctgggcgggttgactgaaggcagcg

SEQ ID NO: 331077 - DNA, 75 bp, synthetic construct
  source 1..75: mol_type = other DNA
tcgacattctgaagcggggtggcggtctcaaatttggccgatctgccctgatttacagggaagggaggttgcagg

SEQ ID NO: 331078 - DNA, 75 bp, synthetic construct
  source 1..75: mol_type = other DNA
gtgctagaccgccatcttcatccccgaattaaacctttgttgcatcagtgtgtgaaggtgctggataaacccggc

SEQ ID NO: 331079 - DNA, 75 bp, synthetic construct
  source 1..75: mol_type = other DNA
tttgatatttggtcagggggcactgatttaccgtaacgggcggcttaaagagactcaaaacgagccattgcagga

SEQ ID NO: 331080 - DNA, 75 bp, synthetic construct
  source 1..75: mol_type = other DNA
ttgcgtggcattcccggcgctttcagccattgaaggtaagcgtcaacggagcaccgtattgacgcttatttattg

SEQ ID NO: 331081 - DNA, 75 bp, synthetic construct
  source 1..75: mol_type = other DNA
ttgcgtggcattcccggcgctttcagccattgaagaagggtttgatgtctttgtcgtgactgacgcgtcagggac

SEQ ID NO: 331082 - DNA, 75 bp, synthetic construct
  source 1..75: mol_type = other DNA
gggacctttaatgaaattacccggcattcggcatgggatcgcatgtcgcaagctggtgcgcaattgatgacatgg

SEQ ID NO: 331083 - DNA, 75 bp, synthetic construct
  source 1..75: mol_type = other DNA
tatctggcggcgctgattgccattttgctcaacaggttgcttgatggactggacggcgcgctggcgaggcgcaga

SEQ ID NO: 331084 - DNA, 75 bp, synthetic construct
  source 1..75: mol_type = other DNA
ttgtctggagattcagggggccagtctactgccgttttgcttgttgatcaccaggctggtttactttcccttgta

SEQ ID NO: 331085 - DNA, 75 bp, synthetic construct
  source 1..75: mol_type = other DNA
tggcgcaacgatatcgaaggtctggcgacgctgttctctaaccacattcctgattatcgtaatttgatgaccagt

SEQ ID NO: 331086 - DNA, 75 bp, synthetic construct
  source 1..75: mol_type = other DNA
atgcaaacacaaaaaccgactctcgaactgttaacctgcgaaggtgcttatcgcgataatccgaccgcgcttttt

SEQ ID NO: 331087 - DNA, 75 bp, synthetic construct
  source 1..75: mol_type = other DNA
tgtcgagaaaagaattacagattgtcttaatgaaactttaaggattatcaaagctgttgaacatggctttgtacg

SEQ ID NO: 331088 - DNA, 75 bp, synthetic construct
  source 1..75: mol_type = other DNA
atacttcgttcgacaaagtaacctttgattacgatgtagatatcgataatttaaattgtatgttggatctctaca

SEQ ID NO: 331089 - DNA, 75 bp, synthetic construct
  source 1..75: mol_type = other DNA
cctgaatgtatgcgtgtcctggcagagacgatgtcggcaatctcgaaacaatgggttgcaggcatgcatcaatat

SEQ ID NO: 331090 - DNA, 75 bp, synthetic construct
  source 1..75: mol_type = other DNA
cgtaacctgatggaacatggtgcatcgctcactaacggcatattacagatgtcaaagggagctgaaatgcattat

SEQ ID NO: 331091 - DNA, 75 bp, synthetic construct
  source 1..75: mol_type = other DNA
tatattttaggcggagaattaaaaaaagacgactggaaatatccagccgataaatgctcgaatgttaatgcagag

SEQ ID NO: 331092 - DNA, 75 bp, synthetic construct
  source 1..75: mol_type = other DNA
atgagagagattatgaaaataccggaacagaattaagagcatatttcgagcttttaggaaatgactctaatctaa

SEQ ID NO: 331093 - DNA, 75 bp, synthetic construct
  source 1..75: mol_type = other DNA
attttgtctcgctgcatcttccggaggaataccgtcagttgtgtgatttatcgacgctgcggctggagccctgta

SEQ ID NO: 331094 - DNA, 75 bp, synthetic construct
  source 1..75: mol_type = other DNA
cgaaccagtcggacatgacgcggaccggtaacgacaaagagatgtatacgatcacctataaccagaactttgccg

SEQ ID NO: 331095 - DNA, 75 bp, synthetic construct
  source 1..75: mol_type = other DNA
caaccggaccgtttatcatgcagccggaagggatgggacgcctgtttgccatcaacaaaatggcggaaggtccgt

SEQ ID NO: 331096 - DNA, 75 bp, synthetic construct
  source 1..75: mol_type = other DNA
aatgttaaagctattgatgaacggcagccttttgccgcgcagctggcggcggtaatgtcggaggggcgttttact

SEQ ID NO: 331097 - DNA, 75 bp, synthetic construct
  source 1..75: mol_type = other DNA
acccacacgttgtggaaagttgaagcgcaagagtggcgttttaccgcactggcactggtcgctgcagttagcgcc

SEQ ID NO: 331098 - DNA, 75 bp, synthetic construct
  source 1..75: mol_type = other DNA
aacagagctgcaagtgacccggccaaggctctgggcacggttcagacctactggggcattctcagcttcttcctg

SEQ ID NO: 331099 - DNA, 75 bp, synthetic construct
  source 1..75: mol_type = other DNA
ggtgggggcgttttctgcggttgcgccacaccgtgcgccggaaatcgcccagcttggtttacgcgcgctggcggc

SEQ ID NO: 331100 - DNA, 75 bp, synthetic construct
  source 1..75: mol_type = other DNA
cttgatcgttgtcgatccccgttttacgcgtaccgcttctgtagcggatatttacgcacctattcgttccggtac

SEQ ID NO: 331101 - DNA, 75 bp, synthetic construct
  source 1..75: mol_type = other DNA
aagcgaaaaacaacaacgatgcaaccttgatcgttgtcgatccccgttttacgcgtaccgcttctgtagcggata

SEQ ID NO: 331102 - DNA, 75 bp, synthetic construct
  source 1..75: mol_type = other DNA
attgccggaacacgtccacgcggtcgtcgtgccgatggttcactggatagagacctcgacagccgcatcgaactg

SEQ ID NO: 331103 - DNA, 75 bp, synthetic construct
  source 1..75: mol_type = other DNA
ataacatgtccaatgtcgtaatcgattattttaagaaaggccacaagattactcctgcacaggtaaatgaaatgc

SEQ ID NO: 331104 - DNA, 75 bp, synthetic construct
  source 1..75: mol_type = other DNA
atggttgcctattgtgacagcatcaaacggcatagtattcataatatcgataataccggaaaacgcgacattggt

SEQ ID NO: 331105 - DNA, 75 bp, synthetic construct
  source 1..75: mol_type = other DNA
ctagcaaggtgaaaggattggatattctgattaccgggcatgcccacgtcggaacgccagaaccaatcaaagtcg

SEQ ID NO: 331106 - DNA, 75 bp, synthetic construct
  source 1..75: mol_type = other DNA
gtttattgattcaccacaacggttagcggcagtgcgaaatgccagcaccgacgatgctctttttacgttggtatc

SEQ ID NO: 331107 - DNA, 75 bp, synthetic construct
  source 1..75: mol_type = other DNA
ttgcaagggcgcaacagctgatggcgaaacacggtatcacggagcaggatgcgggactttcttcggtgcagacgt

SEQ ID NO: 331108 - DNA, 75 bp, synthetic construct
  source 1..75: mol_type = other DNA
tgtggcggcgtatgcctttgatgttctctgccggcagatgcaaaaggcaacaaaggcgtatctttcaacccagag

SEQ ID NO: 331109 - DNA, 75 bp, synthetic construct
  source 1..75: mol_type = other DNA
ggaatatgaacaatcaccaaactgccgcgtactgcgcttcccgcctgtcagtccactgctggatgaagacgcccg

SEQ ID NO: 331110 - DNA, 75 bp, synthetic construct
  source 1..75: mol_type = other DNA
atgaagatgatagctgctgttggccgtaattatgagatcggtatagcgaacgaactgccctggcgttgctctacc

SEQ ID NO: 331111 - DNA, 75 bp, synthetic construct
  source 1..75: mol_type = other DNA
ccaaaaacgccactgtcgtgatgggacgtaagacgatggaaagtctcaaacgcccgctgccagagcgccataacc

SEQ ID NO: 331112 - DNA, 75 bp, synthetic construct
  source 1..75: mol_type = other DNA
tttaaaagtacagtaccctgagagaaggcttttaggatttactaaggatattagtaacttgaacttgggtgttta

SEQ ID NO: 331113 - DNA, 75 bp, synthetic construct
  source 1..75: mol_type = other DNA
gccggaggtacgttatgctgagcggcggctattgggtttcaacgatgaagctactcttcaaattaaaacaatttt

SEQ ID NO: 331114 - DNA, 75 bp, synthetic construct
  source 1..75: mol_type = other DNA
ggtgattgcctcccctgttgagcggctgacccgcaatactgatatcaatttcgataaacaacagcggcaaaccag

SEQ ID NO: 331115 - DNA, 75 bp, synthetic construct
  source 1..75: mol_type = other DNA
aaattgctgggtttaaatgaacatactgaaaatgaagtaagagatttacttttaaagtatttattgatgaaaaat

SEQ ID NO: 331116 - DNA, 75 bp, synthetic construct
  source 1..75: mol_type = other DNA
attgcccgcgttcaccattacggcctacgtgatcgcgtcagccgcaaaggacctgagatccgttacgcagagaga

SEQ ID NO: 331117 - DNA, 75 bp, synthetic construct
  source 1..75: mol_type = other DNA
caggatgcagcgcaaccctgatggcagcagttatgaaccgcgcaaggtcacagcgcgcagtaaaaaaggccgtat

SEQ ID NO: 331118 - DNA, 75 bp, synthetic construct
  source 1..75: mol_type = other DNA
acagtgctgttgtgctttactatccgccgaaatcaaaaaatgctctggctaaaaagatttcagaagagattgggg

SEQ ID NO: 331119 - DNA, 75 bp, synthetic construct
  source 1..75: mol_type = other DNA
gcatttttcccgactcgaacatgatgagatataatggcttttctcaggataatctcttctatttaaacgactttg

SEQ ID NO: 331120 - DNA, 75 bp, synthetic construct
  source 1..75: mol_type = other DNA
caaaggaagaatcaatgttgttcagcatgttaagcgtgtattacgttataaacaaaattttacaagaaagggaac

SEQ ID NO: 331121 - DNA, 75 bp, synthetic construct
  source 1..75: mol_type = other DNA
gcagtttgaagggaaagttcaacggattgcacgggtacatcattacggtcttcgtgatcgagtaagccgtaaggg

SEQ ID NO: 331122 - DNA, 75 bp, synthetic construct
  source 1..75: mol_type = other DNA
cgtggctaacagccctgctggcaagcctcgccccggcagaaagaaagcggatgctgcgcgagctggcgcagcagc

SEQ ID NO: 331123 - DNA, 75 bp, synthetic construct
  source 1..75: mol_type = other DNA
tgaagaacaacaatttttttcttcattacctttatttaatgatggttctaaaaaaggcactgttgcaaatagtcg

SEQ ID NO: 331124 - DNA, 75 bp, synthetic construct
  source 1..75: mol_type = other DNA
attgcccgcgttcatcactacggcctgcgcgatcgtgtcagtcgtaagggaccggaggtccgttacgcagagcgt

SEQ ID NO: 331125 - DNA, 75 bp, synthetic construct
  source 1..75: mol_type = other DNA
cggttaaagtcactattttgacaccggggatggacgagcagggcaatatgagcgaggaggggatcccggcggcgc

SEQ ID NO: 331126 - DNA, 75 bp, synthetic construct
  source 1..75: mol_type = other DNA
ctgttgatgatgaacgatgtagtgccagtctggctgaaaccgacgcgtaatgcgttggggattctgggtgggatc

SEQ ID NO: 331127 - DNA, 75 bp, synthetic construct
  source 1..75: mol_type = other DNA
gataacattacaccgccgttcacgaaagccttgtttacctacgtcaaagagcggaagtacaccttttgtacgccg

SEQ ID NO: 331128 - DNA, 75 bp, synthetic construct
  source 1..75: mol_type = other DNA
tggctgccggcgttgctccagcaattgcccgccgtgcgtcaggatgccgacgatgaagaccgtaacgacaaaggc

SEQ ID NO: 331129 - DNA, 75 bp, synthetic construct
  source 1..75: mol_type = other DNA
ggaggggatcccggcggcgctggtggcaaaattcctcgacgaacgtgggatcgtagtagagaaaaccggccctta

SEQ ID NO: 331130 - DNA, 75 bp, synthetic construct
  source 1..75: mol_type = other DNA
acacctggaagcggaagagtacatcgcgcggacttttggcgcggaacagagttatatcgttaccaacggaacatc

SEQ ID NO: 331131 - DNA, 75 bp, synthetic construct
  source 1..75: mol_type = other DNA
tgcgccggacacagcagcagaatatcaggatgcagcgcaatccagatggcagcagttatgaaccgcgcaaggtca

SEQ ID NO: 331132 - DNA, 75 bp, synthetic construct
  source 1..75: mol_type = other DNA
ccgccaatcctgattctgccagcgtcgagtttaccgggcaggtgcagcggattgtccgggtacatcattacggct

SEQ ID NO: 331133 - DNA, 75 bp, synthetic construct
  source 1..75: mol_type = other DNA
tgcgcaggacacaacagaagaacatcaggatgcagcgcaatccagatggcagtagttatgaaccgcgacgggtaa

SEQ ID NO: 331134 - DNA, 75 bp, synthetic construct
  source 1..75: mol_type = other DNA
aatcgacacccctgagaagaagcaaccctacggctctaaggcgaaacaagtattgtccgatctggtgtttggtcg

SEQ ID NO: 331135 - DNA, 75 bp, synthetic construct
  source 1..75: mol_type = other DNA
tgcgtgatcgcgtcagtcgaaaaggaccggaggtccgttatgcagagcgtcgtttgttaggcattgctgaaaaag

SEQ ID NO: 331136 - DNA, 75 bp, synthetic construct
  source 1..75: mol_type = other DNA
tgcgtgatcgcgtcagtcgcaaaggaccggagatccgttacgcagagcgcaaattgttgggtttcagttcagttt

SEQ ID NO: 331137 - DNA, 75 bp, synthetic construct
  source 1..75: mol_type = other DNA
gagaaatctatcaaaaccactagcaaaagcataaaagaacgcacatttaaacccaaagattttcagtatatttct

SEQ ID NO: 331138 - DNA, 75 bp, synthetic construct
  source 1..75: mol_type = other DNA
ataatgatatcaacaatgtagtttctgtattttggcataaaaattcatttatcacccaccaaaagacaaaattaa

SEQ ID NO: 331139 - DNA, 75 bp, synthetic construct
  source 1..75: mol_type = other DNA
ttagagataatctatattatgacttaaacgctttcattaaagaaaaaaaagtggatttgattatattttctgaaa

SEQ ID NO: 331140 - DNA, 75 bp, synthetic construct
  source 1..75: mol_type = other DNA
tttatatcgctttttagtattggtctttgtttttttattaacatataaatctccagggaatataacacataatcc

SEQ ID NO: 331141 - DNA, 75 bp, synthetic construct
  source 1..75: mol_type = other DNA
ttttcctggccgttctgtttaccggtgttagcgctacagttgatgccgcaacggttcaacaagcatttaaatgcg

SEQ ID NO: 331142 - DNA, 75 bp, synthetic construct
  source 1..75: mol_type = other DNA
tacagccgcatgaccggtctgaatgaatcatcagaaatatcagaggaaacttataatgaaagaaaaaagaaatga

SEQ ID NO: 331143 - DNA, 75 bp, synthetic construct
  source 1..75: mol_type = other DNA
aagagccagtgttcattaacccgcaggatgccagcgcgcgcggtattcgtaacggtgatgtggtacgcgtcttta

SEQ ID NO: 331144 - DNA, 75 bp, synthetic construct
  source 1..75: mol_type = other DNA
ggtcaaaatgacaagttttctctccctcaatggagcgttctatacagagatttttgttcccctatccattattct

SEQ ID NO: 331145 - DNA, 75 bp, synthetic construct
  source 1..75: mol_type = other DNA
tgtcgtttcgctgtgccttaccttttctgtttctgttgtgttttttgtgggggcaattgtgggatggatttcggt

SEQ ID NO: 331146 - DNA, 75 bp, synthetic construct
  source 1..75: mol_type = other DNA
aacgctatcgtcgtgcgcttaatatcaagctcaacgctcccgaacagccagttcgtacactatctggcggtaatc

SEQ ID NO: 331147 - DNA, 75 bp, synthetic construct
  source 1..75: mol_type = other DNA
aaaacaccgcatctgtttttaattctaattcattagattttgaattggaatctcaacaattaacgcaaaaaaatt

SEQ ID NO: 331148 - DNA, 75 bp, synthetic construct
  source 1..75: mol_type = other DNA
tataaaggaaagaactaaacatctcttaaagcaattaaaagataatcgattccactacaaatatgggatattaat

SEQ ID NO: 331149 - DNA, 75 bp, synthetic construct
  source 1..75: mol_type = other DNA
atgaaagtaattatcccactccaaacatgctcgacgcgcgtaccaaagaaaaacataattccattttataatgga

SEQ ID NO: 331150 - DNA, 75 bp, synthetic construct
  source 1..75: mol_type = other DNA
tgggaatacatcacgacgctttataacccgcagacccatgtcgtggtaggttactattacaacgtcgacccaggt

SEQ ID NO: 331151 - DNA, 75 bp, synthetic construct
  source 1..75: mol_type = other DNA
gcaacctgaccatctggaaaggttctgtttcgctgaaggaagatccggcgggcaactacattcactacggggtgc

SEQ ID NO: 331152 - DNA, 75 bp, synthetic construct
  source 1..75: mol_type = other DNA
aaaccaccaccggtccgctggggcaagggctggcgaacgcggtcggactggcgatagcagagcgtacgctggcag

SEQ ID NO: 331153 - DNA, 75 bp, synthetic construct
  source 1..75: mol_type = other DNA
aagagctgaagaacttccgtcagttgcattcaaaaaccccaggtcacccggagattggctatacgccaggtgttg

SEQ ID NO: 331154 - DNA, 75 bp, synthetic construct
  source 1..75: mol_type = other DNA
gaaatcggctatacgcccggtgttgaaaccaccaccggtccacttggacaaggtttggcgaacgccgtcggactg

SEQ ID NO: 331155 - DNA, 75 bp, synthetic construct
  source 1..75: mol_type = other DNA
caccgaatttcagtacctggcgaccgtgcgatcaggtcgaagcggcggtgggctggaaactggcggtcgagcgcc

SEQ ID NO: 331156 - DNA, 75 bp, synthetic construct
  source 1..75: mol_type = other DNA
ctgggatgcccgcgaaaaaggcgaaaaagcgcagcagagctggaatgaaaagtttgcagcttataaaaaagccca

SEQ ID NO: 331157 - DNA, 75 bp, synthetic construct
  source 1..75: mol_type = other DNA
actggcgggaacgctgggactcggtaagctgattggtttttacgatcacaacgggatttcgattgatggtgaaac

SEQ ID NO: 331158 - DNA, 75 bp, synthetic construct
  source 1..75: mol_type = other DNA
agatggtccgacgcaccaggctgttgagcaactggccagtctgcgcttaacgccaaatttcagcacctggcgacc

SEQ ID NO: 331159 - DNA, 75 bp, synthetic construct
  source 1..75: mol_type = other DNA
tatctagtttggtttggtgatatcggcgttaatgaattcgcttatctggttaagaaatacgtagctacggttaac

SEQ ID NO: 331160 - DNA, 75 bp, synthetic construct
  source 1..75: mol_type = other DNA
gtgcgatcaggtagaagcggcggtgggctggaaactggcggttgagcgccataacggaccgacggcgctgatcct

SEQ ID NO: 331161 - DNA, 75 bp, synthetic construct
  source 1..75: mol_type = other DNA
ccgcacggtgattggctttggctcgcctaataaagcgggtaaagaagaggcgcacggcgccccactgggtgaaga

SEQ ID NO: 331162 - DNA, 75 bp, synthetic construct
  source 1..75: mol_type = other DNA
ggcatgttgtctacgaaatcgacggtcacgatccgcaagcggtgaaggaagctattctcgaagcacaaagcgtga

SEQ ID NO: 331163 - DNA, 75 bp, synthetic construct
  source 1..75: mol_type = other DNA
gctgaaaggctggcagcggtcagcaggtgctaaggcagaactggcactggcggagaagctggggcatgcagttat

SEQ ID NO: 331164 - DNA, 75 bp, synthetic construct
  source 1..75: mol_type = other DNA
aggctggcagcagtcggcaggtgcaagggctgagctggcactggcggagaaactgggccatgcggtgatttttca

SEQ ID NO: 331165 - DNA, 75 bp, synthetic construct
  source 1..75: mol_type = other DNA
tattactacaaaggcgttttgtggagtcctggctattttgccagtagctgcggaggtgcgccaatatccgtcatc

SEQ ID NO: 331166 - DNA, 75 bp, synthetic construct
  source 1..75: mol_type = other DNA
actgcggcgcatgtggcgcctggtttaaaagcgtccatgtccagtagcggtgaagcgaattgcgcgatgattggt

SEQ ID NO: 331167 - DNA, 75 bp, synthetic construct
  source 1..75: mol_type = other DNA
tagtagtgaaccagttcagcaggcaactgcggcgcatgtggcgcctggtttaaaagcgtccatgtccagtagcgg

SEQ ID NO: 331168 - DNA, 75 bp, synthetic construct
  source 1..75: mol_type = other DNA
gtgccgctttattgttatcggcgtgtagtagcgaacctgttcagcaggcaacggcggcacatgttgcgccaggtt

SEQ ID NO: 331169 - DNA, 75 bp, synthetic construct
  source 1..75: mol_type = other DNA
caagcaatacactgattcacttacagacaacaaacatcactggttctgcctgcacgaaatattcaaatacgagca

SEQ ID NO: 331170 - DNA, 75 bp, synthetic construct
  source 1..75: mol_type = other DNA
ccgataaactctttcatgatgtgggatatccgtagtgccagtattaaaaatgattacaaattttatgagttcctg

SEQ ID NO: 331171 - DNA, 75 bp, synthetic construct
  source 1..75: mol_type = other DNA
cgaatcttcatttactgaatcattctcagaatataagtaaacaggatacttccctgaaacaatggctatctcagc

SEQ ID NO: 331172 - DNA, 75 bp, synthetic construct
  source 1..75: mol_type = other DNA
gctgaaaggctggcagcggtcagcgggcgctaaggcagagctggcactggcggagaaattggggcatgcagttat

SEQ ID NO: 331173 - DNA, 75 bp, synthetic construct
  source 1..75: mol_type = other DNA
tccctgaaacaatggctatctcattcatcaaacaactatacgccatcaatgttgttagtttcagatgacaatatt

SEQ ID NO: 331174 - DNA, 75 bp, synthetic construct
  source 1..75: mol_type = other DNA
ccgacttactgatgtcaatagcggtagcacactggcagggggatttcagaagagaactggatgaactgacaaaaa

SEQ ID NO: 331175 - DNA, 75 bp, synthetic construct
  source 1..75: mol_type = other DNA
gctgaaaggctggcagcggtcagcaggtgctaaggcagaactggcgctggcggagaaactggggcatgcagttat

SEQ ID NO: 331176 - DNA, 75 bp, synthetic construct
  source 1..75: mol_type = other DNA
agttaactggagggggcgaagactggcgttgggttggtcagggcgtgccggacattctctcttttggtgacgaat

SEQ ID NO: 331177 - DNA, 75 bp, synthetic construct
  source 1..75: mol_type = other DNA
aaaaatgacttaatgaaaaggttaaatgtctgtaataatatagaattgttttacaaaggagttttgctatctatt

SEQ ID NO: 331178 - DNA, 75 bp, synthetic construct
  source 1..75: mol_type = other DNA
gttttctggcagatccgcgttccacgcattctggctgccctgttgctgggtgctgcactggctggggccggaacg

SEQ ID NO: 331179 - DNA, 75 bp, synthetic construct
  source 1..75: mol_type = other DNA
ggaagacacccgcgatatcaatgacagcctgatcctcgatacaccggaatctccactggcagatgcggtggcaaa

SEQ ID NO: 331180 - DNA, 75 bp, synthetic construct
  source 1..75: mol_type = other DNA
agccgcagcaaggggtaaaactggaaggcgcatccagcaatttcatctcgccgcagccgggtaacatctatattc

SEQ ID NO: 331181 - DNA, 75 bp, synthetic construct
  source 1..75: mol_type = other DNA
catgccgtcagcggtaagggcagcacggcgcatacgggtacggtagatatcgtggcggataaaacgctgtaccag

SEQ ID NO: 331182 - DNA, 75 bp, synthetic construct
  source 1..75: mol_type = other DNA
aggctggcagcggtcagcgggcgctaaggcagagctggcactggcggagaaactggggcatgcggtgatttatca

SEQ ID NO: 331183 - DNA, 75 bp, synthetic construct
  source 1..75: mol_type = other DNA
aaatgcctggggcgttgctgcgggatttcagacaatgaacttcttcggttttgaaatcgccatgattggctatca

SEQ ID NO: 331184 - DNA, 75 bp, synthetic construct
  source 1..75: mol_type = other DNA
gatatctgcatggcgatgatccgtagtgtggatgcggtttacttgctgaaaaactggtaccagtcagcgggtgcg

SEQ ID NO: 331185 - DNA, 75 bp, synthetic construct
  source 1..75: mol_type = other DNA
acaacagaaatcccgctcggcattctgaccgcttttgttggtgcaccattttttctgctgttgttgttacgcgga

SEQ ID NO: 331186 - DNA, 75 bp, synthetic construct
  source 1..75: mol_type = other DNA
tggcacaattaggaaggaactgcaaactgcaatggggtttgttgatggctgtttagcaatgttagcttatagtat

SEQ ID NO: 331187 - DNA, 75 bp, synthetic construct
  source 1..75: mol_type = other DNA
tgttttttataaaggtaatgacattgatttcatccgaaaactagccaactcaagcaaaatgtatacaaaaataac

SEQ ID NO: 331188 - DNA, 75 bp, synthetic construct
  source 1..75: mol_type = other DNA
tgacgtccggttcaaagtaaaaaacttcacttcagaggaggtcggtaagatacaacagcaatggtctgaaataaa

SEQ ID NO: 331189 - DNA, 75 bp, synthetic construct
  source 1..75: mol_type = other DNA
ttgcatctgcagggcatgacggttccggattatacggtgaaggtgagaaagtggttttgtgtgatgtgtgacgaa

SEQ ID NO: 331190 - DNA, 75 bp, synthetic construct
  source 1..75: mol_type = other DNA
tgagggggaaaagtgctgcccgagttgtggtaccggggtatacagcagggagggggggcaggagggcaactggaa

SEQ ID NO: 331191 - DNA, 75 bp, synthetic construct
  source 1..75: mol_type = other DNA
tacggcgaaagaagcagcgaagcacaaccgccgggacgttttgtgctgtgtgtcctgtggatgcccgttaacact

SEQ ID NO: 331192 - DNA, 75 bp, synthetic construct
  source 1..75: mol_type = other DNA
gtgatgtgtgacgaagattatgagggggaaaagtgctgcccacgctgcggtaccggggtatacagcagggcgtgg

SEQ ID NO: 331193 - DNA, 75 bp, synthetic construct
  source 1..75: mol_type = other DNA
gagaaaagtgctgcccgcgttgtggtaccggggtatacagcagggaggggggagctgcaggaaggcaactggaag

SEQ ID NO: 331194 - DNA, 75 bp, synthetic construct
  source 1..75: mol_type = other DNA
ggtgaaggtgagaaagtggttttgtgtgatgtgtgacgaagattatgaaggagaaaagtgctgcccacgctgcgg

SEQ ID NO: 331195 - DNA, 75 bp, synthetic construct
  source 1..75: mol_type = other DNA
tgagttgttccccaaaaggatttttggatgttaaaaatagtttctatttccagttaagattcagtgcgaaacact

SEQ ID NO: 331196 - DNA, 75 bp, synthetic construct
  source 1..75: mol_type = other DNA
cggcctacctggtttggttcggcgaaattggcgtgcatgaattcgcgtatctggtgaaaaactacgtagctgcgg

SEQ ID NO: 331197 - DNA, 75 bp, synthetic construct
  source 1..75: mol_type = other DNA
acgtttacatacccttatgttatttctggcggttctgttcacgggctttaactttaacgcagaagcggctaccgt

SEQ ID NO: 331198 - DNA, 75 bp, synthetic construct
  source 1..75: mol_type = other DNA
cgttaacacttcagcggggcaatgacggacaaccaccgtggtttgaacatgaccagatgactgtcgctgagaaaa

SEQ ID NO: 331199 - DNA, 75 bp, synthetic construct
  source 1..75: mol_type = other DNA
agtgctgcccacgctgcggtaccggggtatacagcagggcgtgggggcggcaggaggtgccgtcggaagatgcca

SEQ ID NO: 331200 - DNA, 75 bp, synthetic construct
  source 1..75: mol_type = other DNA
gtatggattcgatgaaataatcgatatctttctgaatacattagccactccaatagcactaagagcttttaaaca

SEQ ID NO: 331201 - DNA, 75 bp, synthetic construct
  source 1..75: mol_type = other DNA
agggtatgacggttccggattatacggtgaaggtgagaaagtggttttgtgtgatgtgtgacgaagattatgaag

SEQ ID NO: 331202 - DNA, 75 bp, synthetic construct
  source 1..75: mol_type = other DNA
atgtattttgctgctggcagctatcagtatcactttgccgccgtaagtggggcttatcatctcgatatgcagcaa

SEQ ID NO: 331203 - DNA, 75 bp, synthetic construct
  source 1..75: mol_type = other DNA
atggctatttctcaaaactttaaaacgcaggttgtattcggggggcgaatagacccgtcgtttcggcgcggtaca

SEQ ID NO: 331204 - DNA, 75 bp, synthetic construct
  source 1..75: mol_type = other DNA
acgggtcgcgcaaaaggggctgcaaaatggggcggtggagcgactgcaagaacgataaaggcaacaggaaaaggc

SEQ ID NO: 331205 - DNA, 75 bp, synthetic construct
  source 1..75: mol_type = other DNA
attcatttttcaaagaaacatcttgaaaaattagattatattgcgaactcaccggagaacctcagcttttatgaa

SEQ ID NO: 331206 - DNA, 75 bp, synthetic construct
  source 1..75: mol_type = other DNA
gtatgattcccctgatgatattttatttaacgttgtcgtaccagaacttgaaaaaagagatctcatttccagtga

SEQ ID NO: 331207 - DNA, 75 bp, synthetic construct
  source 1..75: mol_type = other DNA
atgagctgatgcttcgcgctggcgaagccgcattccaggtgtgtcgttcggcttatcctgacgcccgccactggc

SEQ ID NO: 331208 - DNA, 75 bp, synthetic construct
  source 1..75: mol_type = other DNA
catttaccaataattgaaggtactttaaatttaattatatctttagctttggttaatttttatggtgtcaaaggt

SEQ ID NO: 331209 - DNA, 75 bp, synthetic construct
  source 1..75: mol_type = other DNA
tgccctatttagtaaaagataatataaattggcatgatatttacataccatgggttttttatgtaattgcaacag

SEQ ID NO: 331210 - DNA, 75 bp, synthetic construct
  source 1..75: mol_type = other DNA
tcgctgaaaaaatcctgctgcgatgtacctggcttgacccggcagagaaagaggcccgtcgtttgcatctgcagg

SEQ ID NO: 331211 - DNA, 75 bp, synthetic construct
  source 1..75: mol_type = other DNA
aggggaactcgcgccgacgtttgacgctatgcgagacgggctggcatcctggtttaaagagaatcaagggggggt

SEQ ID NO: 331212 - DNA, 75 bp, synthetic construct
  source 1..75: mol_type = other DNA
tggtgcgctggcaatgaatgcagagacgtcagaaaaactcggtctggcgaagtcctacggcgttggcgtcgaaaa

SEQ ID NO: 331213 - DNA, 75 bp, synthetic construct
  source 1..75: mol_type = other DNA
gggcattaatctgcgcgaaatcggcgcggcgattcagaaatttgtcgaagcagaaggcttctccgtcgttcgtga

SEQ ID NO: 331214 - DNA, 75 bp, synthetic construct
  source 1..75: mol_type = other DNA
cgatgtctgcttccagttactccagcaaatctacggcgagaaacgctttccggcaccgggcaagctgacgcagcc

SEQ ID NO: 331215 - DNA, 75 bp, synthetic construct
  source 1..75: mol_type = other DNA
cgcaatgaacacattccgtttgatgagaagattccactcggcattatgctggaagtaccatcggtgatgttcatt

SEQ ID NO: 331216 - DNA, 75 bp, synthetic construct
  source 1..75: mol_type = other DNA
ataaaaatcatctgaaaggtctgttgctgaaaagcggcggcactacctcacacacagtgatccttgcccgttcgt

SEQ ID NO: 331217 - DNA, 75 bp, synthetic construct
  source 1..75: mol_type = other DNA
tactggaagctcaccgatccctggctggcgatacttctttacgtcagcacttactggcaggcgtcagcgagggat

SEQ ID NO: 331218 - DNA, 75 bp, synthetic construct
  source 1..75: mol_type = other DNA
caacttgatagccgtgagtgccgcaagttgctcaacaggcaatggcctgccgtacttcgctggaagtggaacatc

SEQ ID NO: 331219 - DNA, 75 bp, synthetic construct
  source 1..75: mol_type = other DNA
taagctgcgccgaagcaattgttgccagcgcgaatcacttttgcgaagagttttcccgttccagcagcagctacc

SEQ ID NO: 331220 - DNA, 75 bp, synthetic construct
  source 1..75: mol_type = other DNA
ctgaaatgctctatatggatcgcaccagtgcaccgggcgaaagcgagctgtacaacattttttgtcaggcgctgg

SEQ ID NO: 331221 - DNA, 75 bp, synthetic construct
  source 1..75: mol_type = other DNA
cactgaccaacctgaatccgcgaattatccgcgcccgcaccgtatgcagcggtagcgcaggcggcattctgacgc

SEQ ID NO: 331222 - DNA, 75 bp, synthetic construct
  source 1..75: mol_type = other DNA
tagggctggatgaactcagcatgagcgcaccatcaattccggcggcgaaagcgcggatggcgcaacttgatagcc

SEQ ID NO: 331223 - DNA, 75 bp, synthetic construct
  source 1..75: mol_type = other DNA
ttactggctggcgtcagcgccggattaagctgtgccgaagcaattatcgccagcgcgaatcacttttgtgacgag

SEQ ID NO: 331224 - DNA, 75 bp, synthetic construct
  source 1..75: mol_type = other DNA
tgcgcgatgaatttccccactgcgatgcaccgctggcggaagtaaaatctgacgagctggagccgctaccgattt

SEQ ID NO: 331225 - DNA, 75 bp, synthetic construct
  source 1..75: mol_type = other DNA
atgatcccgatgatctcctcaatggaagagatcttatgggtgaaagaaaaactggcggaagccaaacagcaactg

SEQ ID NO: 331226 - DNA, 75 bp, synthetic construct
  source 1..75: mol_type = other DNA
ctgctggtcggtttagggctagatgaactcagcatgagcgcgccgtcaattccggcagcaaaagcgcggatggcg

SEQ ID NO: 331227 - DNA, 75 bp, synthetic construct
  source 1..75: mol_type = other DNA
gaaagtggtgattgccgggcgtcctaacgccggtaaatcgagcctgctaaacgcgctggcgggccgtgaagccgc

SEQ ID NO: 331228 - DNA, 75 bp, synthetic construct
  source 1..75: mol_type = other DNA
ttccccgatgaagagatcgatttcctctccgacggcaaaattgaagcccagctcaatgacgtgattgccgatctc

SEQ ID NO: 331229 - DNA, 75 bp, synthetic construct
  source 1..75: mol_type = other DNA
tacagtaacgaccgctgggaagcaccgcaacgtgccgcacgcctggctgccagcgtaaagcgttacaagacatca

SEQ ID NO: 331230 - DNA, 75 bp, synthetic construct
  source 1..75: mol_type = other DNA
tccacattgacggaatgccgctgcatatcatcgataccgccgggctacgtgaagccagtgacgaagtagaacgta

SEQ ID NO: 331231 - DNA, 75 bp, synthetic construct
  source 1..75: mol_type = other DNA
gagcatttgcagcaaggtaaagcgcaactgttaggtgcctgggcaggcgaactgctggcggaagagttgcgcctg

SEQ ID NO: 331232 - DNA, 75 bp, synthetic construct
  source 1..75: mol_type = other DNA
cctacaggcgctggaacaagcggcggaacatctacaacagggtaaagcgcaactgttgggagcctgggctggcga

SEQ ID NO: 331233 - DNA, 75 bp, synthetic construct
  source 1..75: mol_type = other DNA
tgtgcaaggcattgttcggcagaaccggaagccagtggctggttgttgaagtttttggggagaaggggcgtcagc

SEQ ID NO: 331234 - DNA, 75 bp, synthetic construct
  source 1..75: mol_type = other DNA
ccgcgcttggcatttacgacaccgagatggcgctgatcattaccatggtgacgcaaactctgcccaccgccgtgt

SEQ ID NO: 331235 - DNA, 75 bp, synthetic construct
  source 1..75: mol_type = other DNA
atgagtagccgaaacagcggtcttaagcccataggcgcggtaataggcgactctggcgggctactggaacgcctt

SEQ ID NO: 331236 - DNA, 75 bp, synthetic construct
  source 1..75: mol_type = other DNA
tactctattagatgcatacgagcgccttcctgcagatatccgatgccatacgccgcttgtggtaagtggatttag

SEQ ID NO: 331237 - DNA, 75 bp, synthetic construct
  source 1..75: mol_type = other DNA
gggcggcaactctggcggaaattgagcgggtaaagcgcaactatcagacccaggttaaggcatccaggaagggag

SEQ ID NO: 331238 - DNA, 75 bp, synthetic construct
  source 1..75: mol_type = other DNA
gtgagacgtttgtgcaaggcattgttcggcagaaccggaagccagtggctggttgttgaagtttttggggagaag

SEQ ID NO: 331239 - DNA, 75 bp, synthetic construct
  source 1..75: mol_type = other DNA
actgtcttgataatgcggtaatggagaatttctttggtcacctgaaagaagaaatttactatcgccgggactaca

SEQ ID NO: 331240 - DNA, 75 bp, synthetic construct
  source 1..75: mol_type = other DNA
agggtagtttgttgcgcgaagggatgaaagtggtgattgccggacgtcctaacgccggtaaatcgagcctgttaa

SEQ ID NO: 331241 - DNA, 75 bp, synthetic construct
  source 1..75: mol_type = other DNA
atggaagaggtggctgctattaaggatattggcaatcactttgagcgtgccgagtacatcaagtggaacgctttc

SEQ ID NO: 331242 - DNA, 75 bp, synthetic construct
  source 1..75: mol_type = other DNA
caggccatgtcagaagcatctgcagatgaacgtctgacggcagggatgcaggtgtttatggagtgtctggcaaaa

SEQ ID NO: 331243 - DNA, 75 bp, synthetic construct
  source 1..75: mol_type = other DNA
ttcaatatcggtctggtctttatttctgtttttctgggctggctgaccacacgtattggtctgaaaccgctacgg

SEQ ID NO: 331244 - DNA, 75 bp, synthetic construct
  source 1..75: mol_type = other DNA
gtggacgtcctgtctatgcgcaacccgtctcgccgcgggtatcttacaacacaccaaatctggctggacgctggt

SEQ ID NO: 331245 - DNA, 75 bp, synthetic construct
  source 1..75: mol_type = other DNA
tatcatcgataccgccgggctacgtgaagccagtgacgaagtggaacgtattggtatcgagcgcgcgtggcagga

SEQ ID NO: 331246 - DNA, 75 bp, synthetic construct
  source 1..75: mol_type = other DNA
tgctaagcttgattatcagatcagccgtcagctggatgctgtgcttcatcatccggaatttcagaaagtggaatc

SEQ ID NO: 331247 - DNA, 75 bp, synthetic construct
  source 1..75: mol_type = other DNA
gcattacctgaaaatcatccagcgcgagaatatcggtaccaccaaagacagacgcgtgctggaactggaactgaa

SEQ ID NO: 331248 - DNA, 75 bp, synthetic construct
  source 1..75: mol_type = other DNA
gtggcgttgctgaaaaatatttcccgggtggcagcatccgcacatatgccgtttattggttctgttggtccggct

SEQ ID NO: 331249 - DNA, 75 bp, synthetic construct
  source 1..75: mol_type = other DNA
ttcgcctttgccgccaatatggtgaagagctttgtgaataatggctggtgcgtgcagatccgtggtccacaagca

SEQ ID NO: 331250 - DNA, 75 bp, synthetic construct
  source 1..75: mol_type = other DNA
ggtgcgcagtttgtcaccaacggctggtgtgttcagaaccgcgggcctcaggccggtggtgcggtgcaggacttg

SEQ ID NO: 331251 - DNA, 75 bp, synthetic construct
  source 1..75: mol_type = other DNA
ctggtgtgttcagatccgtgggcctcaggccggtggtgcggtgcaggatttgccaatccatttgtatgatctggg

SEQ ID NO: 331252 - DNA, 75 bp, synthetic construct
  source 1..75: mol_type = other DNA
tgcgcacaccagtcagtaatctgatgatgcagacgcagtttgcactggctaaggaaagggatgtttcgcattacc

SEQ ID NO: 331253 - DNA, 75 bp, synthetic construct
  source 1..75: mol_type = other DNA
tatcgcgcaaaaaatcgccgagctgaacaagaatacagggaaagaagtctctgaaattcgcttcaccgcacggga

SEQ ID NO: 331254 - DNA, 75 bp, synthetic construct
  source 1..75: mol_type = other DNA
tattgcgcaaaaaatcgccgaattgaataaaaacacagggaaagaagtctctgaaattcgctttactgcgcggga

SEQ ID NO: 331255 - DNA, 75 bp, synthetic construct
  source 1..75: mol_type = other DNA
ggcgcacagaacgcaccaccgcgaagcgattaaccgaccgtgaccgcgaggtcatggaatgttttcgcaatcgct

SEQ ID NO: 331256 - DNA, 75 bp, synthetic construct
  source 1..75: mol_type = other DNA
gctttacccccaaagtgcgctgctgcttagcagcgcactgcttggtggggggggatcggcatcattcaggcagtg

SEQ ID NO: 331257 - DNA, 75 bp, synthetic construct
  source 1..75: mol_type = other DNA
accggatgccgccaggcagccgggagccgaaggtgtccccgcctccggaaatcagaacaacagaaacgacataac

SEQ ID NO: 331258 - DNA, 75 bp, synthetic construct
  source 1..75: mol_type = other DNA
gtgaaagccagcggtaaagaggtgaaagagtggctggagtgctccgccggacagtttaaccagattgatcctgac

SEQ ID NO: 331259 - DNA, 75 bp, synthetic construct
  source 1..75: mol_type = other DNA
atattttcctgctgtcccgcattgcgcattacctgaaaatcatccagcgcgagaatatcggtaccaccaaagacc

SEQ ID NO: 331260 - DNA, 75 bp, synthetic construct
  source 1..75: mol_type = other DNA
ggagtacgatacgccgggtggcgaacctgtagcctcattaatatccagctatgaatttgataacagcccgcagga

SEQ ID NO: 331261 - DNA, 75 bp, synthetic construct
  source 1..75: mol_type = other DNA
aaggtaaagttgcagttgtcaccggttgtgacactgggctggggcagggaatggcgttgggtctggcgcaagcgg

SEQ ID NO: 331262 - DNA, 75 bp, synthetic construct
  source 1..75: mol_type = other DNA
ttgctggcgtattagaatcggtttcgttcttggtttacccgctgttttatagcctctttggtatcggtcttgcgc

SEQ ID NO: 331263 - DNA, 75 bp, synthetic construct
  source 1..75: mol_type = other DNA
ttctatggtgcggttcaatcattggcgtaggatctgccaatgttattgcagacaaaacggcttcggaattagcga

SEQ ID NO: 331264 - DNA, 75 bp, synthetic construct
  source 1..75: mol_type = other DNA
aaagtacctgtggacaaacgcctcgttcgcctttgccgccaatatggtgaagagctttgtgaataatggctggtg

SEQ ID NO: 331265 - DNA, 75 bp, synthetic construct
  source 1..75: mol_type = other DNA
agtttttttaactccgtgtactgtcggttatttgaccaccgctcgcttactcccgagcggctttttatctttagc

SEQ ID NO: 331266 - DNA, 75 bp, synthetic construct
  source 1..75: mol_type = other DNA
gtttcgaacaagccgactggcatgctgtccagcaggcgatgaaaaaccgtatccatctttacgatcatcacgttg

SEQ ID NO: 331267 - DNA, 75 bp, synthetic construct
  source 1..75: mol_type = other DNA
ccattccgcgcccactggcgaaagacttctaccccgagcatggctgggaagcgctgctgatgcgagtcctcagtg

SEQ ID NO: 331268 - DNA, 75 bp, synthetic construct
  source 1..75: mol_type = other DNA
ctggagaagcggcatatttccccggcattaatggaattactgctccaggaagcagcggaaaaaatcaccgatctt

SEQ ID NO: 331269 - DNA, 75 bp, synthetic construct
  source 1..75: mol_type = other DNA
cattcgtggaatggtgatgctggtgttcacgctaccgggttttgatcgggtattcaaagtgatcaaagataaatt

SEQ ID NO: 331270 - DNA, 75 bp, synthetic construct
  source 1..75: mol_type = other DNA
gctggcagaataaaagccgtgacattcattacatcattcgccatctgacggaaacgctggggacagacaacctcg

SEQ ID NO: 331271 - DNA, 75 bp, synthetic construct
  source 1..75: mol_type = other DNA
cacggcaaagcgggtttttcgggcgatggttatggctgcagaagatggcgtactgcctgaggtctccggggcagg

SEQ ID NO: 331272 - DNA, 75 bp, synthetic construct
  source 1..75: mol_type = other DNA
acgactcaatccttgcctggattcgaaatactgactgggcaaagattggatttaaaaatgatgccgacagcgata

SEQ ID NO: 331273 - DNA, 75 bp, synthetic construct
  source 1..75: mol_type = other DNA
tgctgaatgcacgttcgcgtattgaacaggaactcaacaccttacaggatatcaatatcggtattgattcccacc

SEQ ID NO: 331274 - DNA, 75 bp, synthetic construct
  source 1..75: mol_type = other DNA
caagaagcattgaactgttactgaataagtctccagtaaacttggcaaataacaataccgcttctactaactttt

SEQ ID NO: 331275 - DNA, 75 bp, synthetic construct
  source 1..75: mol_type = other DNA
cgtaaaaatgtgccgttccagcagtacatcaatgcggggtatttcacggtgaaagaagtggtgctggatgatgaa

SEQ ID NO: 331276 - DNA, 75 bp, synthetic construct
  source 1..75: mol_type = other DNA
cctaaagtcgattttgccgaccgggtatcagtagctaaagggatcctgattgggaattttgcaaaggttgttgga

SEQ ID NO: 331277 - DNA, 75 bp, synthetic construct
  source 1..75: mol_type = other DNA
gctgaattcatcgccagtgaataggactatggaaagaggtgctgttcattcgaatagacctgatttacctcctgt

SEQ ID NO: 331278 - DNA, 75 bp, synthetic construct
  source 1..75: mol_type = other DNA
tgggggccgcaacgccaggcaaacggtgagctgaccgcacgcgctattgctatgttgcctattttgacgggcaat

SEQ ID NO: 331279 - DNA, 75 bp, synthetic construct
  source 1..75: mol_type = other DNA
gtgcaagtcaatgaagccgatgctttttataccaaccccgttcaggcgcgtgaatttgccgaggcaaccgggatt

SEQ ID NO: 331280 - DNA, 75 bp, synthetic construct
  source 1..75: mol_type = other DNA
gctatggaaagaggtgctgttcattcgaatagacctgatttacctcctgttgattatgcaccgccagagttaccg

SEQ ID NO: 331281 - DNA, 75 bp, synthetic construct
  source 1..75: mol_type = other DNA
atgcagcatgtccctgaaagcgtgattcaggcaccagaatcacccgacgccccggaggcgctgccggggtgtcgt

SEQ ID NO: 331282 - DNA, 75 bp, synthetic construct
  source 1..75: mol_type = other DNA
atccgcgacggcgtccggggcaaagataaactggatgtgcccattaagttcatctggaacttcaaggacttgaag

SEQ ID NO: 331283 - DNA, 75 bp, synthetic construct
  source 1..75: mol_type = other DNA
cgatcatggtccgcaaatgacggcaatccgcgacggcgtccgcggcaaagataaactggatgtgcccattaagtt

SEQ ID NO: 331284 - DNA, 75 bp, synthetic construct
  source 1..75: mol_type = other DNA
acttcgacgcaggaattaaccgaagaactacaccgacttgaagccagtaaaggcaacccttacgctttgctcgaa

SEQ ID NO: 331285 - DNA, 75 bp, synthetic construct
  source 1..75: mol_type = other DNA
gggtaacgctgtagtatatgaagatgctgaggatgcaacaaaagtcctgaagatgtttactgcatctcaaagcaa

SEQ ID NO: 331286 - DNA, 75 bp, synthetic construct
  source 1..75: mol_type = other DNA
atatgtttgatagactggagcaaaaaggaattctttttgttgatacaacagaaaccaatgtcttatatgatcgcg

SEQ ID NO: 331287 - DNA, 75 bp, synthetic construct
  source 1..75: mol_type = other DNA
atgtttgacaggctggagcaaaaaggagttctttttatcgatacaacagagacaaatgtcttatatgaccgtgta

SEQ ID NO: 331288 - DNA, 75 bp, synthetic construct
  source 1..75: mol_type = other DNA
agttttgcgttacaagagaaagtcatagtggttgttttactaatctgttgcacaggttgggatggcctaagggag

SEQ ID NO: 331289 - DNA, 75 bp, synthetic construct
  source 1..75: mol_type = other DNA
gtttttctttcaggagttactgctttccgcggaaagaaagaaaagggctgcgggttcttgcccaccagaatggac

SEQ ID NO: 331290 - DNA, 75 bp, synthetic construct
  source 1..75: mol_type = other DNA
gagaatcagggtgtttcattaactcacctttcggaaaaaacaggcatcctgaaaggaacgatttttcccatcctc

SEQ ID NO: 331291 - DNA, 75 bp, synthetic construct
  source 1..75: mol_type = other DNA
aatggctgagttacgtcattgagaatatccaggactggccggcaaaccgggtacgcgatctgttgccctggaaag

SEQ ID NO: 331292 - DNA, 75 bp, synthetic construct
  source 1..75: mol_type = other DNA
atgtctctttttcaatgtttgcttgttttttatgctgttatggcagtaatcgcctttcttattacctggtttctt

SEQ ID NO: 331293 - DNA, 75 bp, synthetic construct
  source 1..75: mol_type = other DNA
gacactgtcacctgcagattatgcagaacgtctggcggcactgacgcaaaaatgtggccttgatggtgtggtgtg

SEQ ID NO: 331294 - DNA, 75 bp, synthetic construct
  source 1..75: mol_type = other DNA
gaagccaaagattataatgactatcacgatctgattaatgataaagacgttgaagtggtcatcattaccgcatca

SEQ ID NO: 331295 - DNA, 75 bp, synthetic construct
  source 1..75: mol_type = other DNA
gtatcggcatgatcggctccgatcacttaagacgtctggccaacaccgtgtcgggtgtagaggttgttgccgtat

SEQ ID NO: 331296 - DNA, 75 bp, synthetic construct
  source 1..75: mol_type = other DNA
tcggtgcgttagcgtttgccgttaccaatgtctatgccgctgaattgatgactaaagcggaatttgaaaaagtcg

SEQ ID NO: 331297 - DNA, 75 bp, synthetic construct
  source 1..75: mol_type = other DNA
ggcgggaaatcgccaccgcgcgcggtcttgctcaggcgaaacagttttcgtgggagaactgtgcgacccagacca

SEQ ID NO: 331298 - DNA, 75 bp, synthetic construct
  source 1..75: mol_type = other DNA
cgccgtgaccacgtttcatgacatatccatttttacctgcccggaatatcatccaaaagatcgggttcgctatat

SEQ ID NO: 331299 - DNA, 75 bp, synthetic construct
  source 1..75: mol_type = other DNA
ggccgaaaatctgtctgctctggaaaaagatattaccaatctggaaaaagcagcggcattaagtatcgccagaat

SEQ ID NO: 331300 - DNA, 75 bp, synthetic construct
  source 1..75: mol_type = other DNA
cctgtgctgttacgaactctcctgtcgttgttgccctcgattataataatcgtgatgctgcgttggcatttgtcg

SEQ ID NO: 331301 - DNA, 75 bp, synthetic construct
  source 1..75: mol_type = other DNA
ctctaaagaactggcgtcagcggagcaggatattaccactcttgcaaaaagcgcggcattaaacgtttcacgagt

SEQ ID NO: 331302 - DNA, 75 bp, synthetic construct
  source 1..75: mol_type = other DNA
caattaaatacccattaacgggcatcggtcggtattccctggagctggttaagcggctggcggttgcccgtgaaa

SEQ ID NO: 331303 - DNA, 75 bp, synthetic construct
  source 1..75: mol_type = other DNA
tgagaaacctgaaactgaccggcatggcggatgccgtgcaacaacaactggaacatgcgagtacctacgaagggc

SEQ ID NO: 331304 - DNA, 75 bp, synthetic construct
  source 1..75: mol_type = other DNA
gctcatatgcggcaggttatttttcgacgtatcagactaatgagcgcgcaatccattccattgtaacaagcctta

SEQ ID NO: 331305 - DNA, 75 bp, synthetic construct
  source 1..75: mol_type = other DNA
ccgttaccaatgtctatgccgctgaattgatgaccaaagcggaatttgaaaaagttgaatcgcagtatgaaaaaa

SEQ ID NO: 331306 - DNA, 75 bp, synthetic construct
  source 1..75: mol_type = other DNA
accgctgatgcgaaagaagatttgcttaaaaaagctgatgaaaaaggtgctgatgtgttagtgctgacctccggc

SEQ ID NO: 331307 - DNA, 75 bp, synthetic construct
  source 1..75: mol_type = other DNA
ggcacaaaccgtacaactggtttcacatattgggactcgtctgcctgctatctattctgcgctgggaaaagccat

SEQ ID NO: 331308 - DNA, 75 bp, synthetic construct
  source 1..75: mol_type = other DNA
caaataccgctgcccgtaatgcatcatttaacttgtggggaaattcgtcaagaccaactgttgcagagcttggtg

SEQ ID NO: 331309 - DNA, 75 bp, synthetic construct
  source 1..75: mol_type = other DNA
gacgtatcagactaatgagcgcgcaatccattccattgtaacaagccttaaagaagatgatgtatgcagcgtttt

SEQ ID NO: 331310 - DNA, 75 bp, synthetic construct
  source 1..75: mol_type = other DNA
ttttcttattctgtctcccggcaactgccgccgtaaacagtaacacactggatagctgctttattcaggcaggaa

SEQ ID NO: 331311 - DNA, 75 bp, synthetic construct
  source 1..75: mol_type = other DNA
ccacacatattcccgggctgaaaaaaatgggcattatccggagtgagaaagatctgttgaataatgtctgcctga

SEQ ID NO: 331312 - DNA, 75 bp, synthetic construct
  source 1..75: mol_type = other DNA
ttattcactccgcgtggtcgataaatccgaccaacacgcaaccagtgcgtattttcatgaaaggagatcactcaa

SEQ ID NO: 331313 - DNA, 75 bp, synthetic construct
  source 1..75: mol_type = other DNA
tatttcaaccagcaatgaaatgtcgaccgcagacgcgaaagaagatttgatcaaaaaagcggatgaaaaaggggc

SEQ ID NO: 331314 - DNA, 75 bp, synthetic construct
  source 1..75: mol_type = other DNA
tgatgtgttggtactgacctccggtcaaactgacaataagatccacggcacggcaaatatttataagaagaagta

SEQ ID NO: 331315 - DNA, 75 bp, synthetic construct
  source 1..75: mol_type = other DNA
atcataacagaaatgccagcggaaaaattatcagcacagattatggcctgatgcagattaattccacacatattc

SEQ ID NO: 331316 - DNA, 75 bp, synthetic construct
  source 1..75: mol_type = other DNA
gctgttaaaagaactggagccgacgtaagaggtccagtgccaatgcctacaaagattaaacgctatacagtgtta

SEQ ID NO: 331317 - DNA, 75 bp, synthetic construct
  source 1..75: mol_type = other DNA
ttaccgtcggaaaagaaacactccgctgcacgctgagtggcgaaatcccgacatgggaaaatgcgaacgagggca

SEQ ID NO: 331318 - DNA, 75 bp, synthetic construct
  source 1..75: mol_type = other DNA
acaacgaagggctgatgctggttcaaattaatctggcagaaacatcacccgaagaaatcatcaatcacctgaaag

SEQ ID NO: 331319 - DNA, 75 bp, synthetic construct
  source 1..75: mol_type = other DNA
actgctccaggaagcagcggaaaaaatcaccgatctcggcgaacaaattgtgattcgccatctttatatcgagcg

SEQ ID NO: 331320 - DNA, 75 bp, synthetic construct
  source 1..75: mol_type = other DNA
cgctaaaaccgaaagttaccgtgaatatctgatttatctgcaaggctgtaatgagcaatttattgaagcgccggg

SEQ ID NO: 331321 - DNA, 75 bp, synthetic construct
  source 1..75: mol_type = other DNA
cgcaggtccgtggtccgatcccgctgccgacacgcaaagagcgcttcactgttctgatctccccgcacgtcaaca

SEQ ID NO: 331322 - DNA, 75 bp, synthetic construct
  source 1..75: mol_type = other DNA
cctcctgaaagccgtcgcaggcatcagaactattacgaagaactgattgaaggtaaggtcgtgtttggtgatgtt

SEQ ID NO: 331323 - DNA, 75 bp, synthetic construct
  source 1..75: mol_type = other DNA
ctgataacagttccagtatttattgtaggacttttggccagtaataaatttatggttttgtggatgggacctgaa

SEQ ID NO: 331324 - DNA, 75 bp, synthetic construct
  source 1..75: mol_type = other DNA
cgcctcactcttattatttttttttagtggtcatatcgcattgctactgaacattagtgagactttttttcataa

SEQ ID NO: 331325 - DNA, 75 bp, synthetic construct
  source 1..75: mol_type = other DNA
ttgacagtggaacagcttttccaagagatagagaacaggattgtcgcgtatcgtatggaacaaaaccgggctgag

SEQ ID NO: 331326 - DNA, 75 bp, synthetic construct
  source 1..75: mol_type = other DNA
tttctattggagaattaatcgaccacatttccagacttcagaacgacgtaaatactctaatgatcgcattttcat

SEQ ID NO: 331327 - DNA, 75 bp, synthetic construct
  source 1..75: mol_type = other DNA
cacacatcaggggctatgggaggtggcgggttatgtggctgctttcgataaatacgttaacccggaaggaaaacc

SEQ ID NO: 331328 - DNA, 75 bp, synthetic construct
  source 1..75: mol_type = other DNA
gttgctgctcggtaacatgggtatggccggtggcggcgtgaacgcattgcgtggtcactccaacattcagggcct

SEQ ID NO: 331329 - DNA, 75 bp, synthetic construct
  source 1..75: mol_type = other DNA
gatcgatcaagcaaccgcggaaatcgtcgagactgccaagcgcactggtgcgcaggtccgtggtccgatcccgct

SEQ ID NO: 331330 - DNA, 75 bp, synthetic construct
  source 1..75: mol_type = other DNA
atgacgccttcgcaacacagcattcagcactccaacctggacaaactacttaatcggctagacgccatctccagc

SEQ ID NO: 331331 - DNA, 75 bp, synthetic construct
  source 1..75: mol_type = other DNA
tttacgggataatatgatggcccataagttatgggatgaagatatggagaaccttcacataatgtcaagtaatat

SEQ ID NO: 331332 - DNA, 75 bp, synthetic construct
  source 1..75: mol_type = other DNA
gaatggtggtattgctgacgattgcgtttttgctgtcggtgaataagaagaagatcagcctgagaaccgtcggcg

SEQ ID NO: 331333 - DNA, 75 bp, synthetic construct
  source 1..75: mol_type = other DNA
tctctttcaccgaaacaccgccaaaaagcattattgaagccgccgcgacaggggcgatgaccgggctgaaaatcg

SEQ ID NO: 331334 - DNA, 75 bp, synthetic construct
  source 1..75: mol_type = other DNA
tcacagttgaaagctcgaaaaggcctaactaaaaaagatggaacgatgcttgacttcatgggaagcgaagagctc

SEQ ID NO: 331335 - DNA, 75 bp, synthetic construct
  source 1..75: mol_type = other DNA
aatacgcttggatgggcctgggcgtggccgctcaaccgtcgcgtgctgtacaaccgtgcttcggcggatatcaac

SEQ ID NO: 331336 - DNA, 75 bp, synthetic construct
  source 1..75: mol_type = other DNA
atcaagtatttcaacatgatggacgaaggcaaagtcaccggttatttctgccagggctttaacccggttgcgtcc

SEQ ID NO: 331337 - DNA, 75 bp, synthetic construct
  source 1..75: mol_type = other DNA
agcctgccaggttatctgacgctgccgtcagaaaaacaggttgatttgcagtcgtatctggaagcgaacacgccg

SEQ ID NO: 331338 - DNA, 75 bp, synthetic construct
  source 1..75: mol_type = other DNA
gctaacactctgacgccgaatgtcggtgatgccaactcgcaaacgccggaatataaagcgtttttagttaacatc

SEQ ID NO: 331339 - DNA, 75 bp, synthetic construct
  source 1..75: mol_type = other DNA
acggtgagtcgaacgatgtcgatccggcgtctattcagactgaagtattccgtctgccttcgacctgctttgctg

SEQ ID NO: 331340 - DNA, 75 bp, synthetic construct
  source 1..75: mol_type = other DNA
atatcaacggtaaaccgtgggatccgaaacggatgctgatccagtggaacggcagcaagtggacgggtaacgata

SEQ ID NO: 331341 - DNA, 75 bp, synthetic construct
  source 1..75: mol_type = other DNA
cagacccgttaatggatgccgatgaagtggcggacgcctttaaacatctgcatcagagcggcaaagtgcgtcatt

SEQ ID NO: 331342 - DNA, 75 bp, synthetic construct
  source 1..75: mol_type = other DNA
tggctattatcttcaattgccacctcctcctgaggatttgctgaagcaacatctttctgtgatggcgaaaaatac

SEQ ID NO: 331343 - DNA, 75 bp, synthetic construct
  source 1..75: mol_type = other DNA
tgttggcattatttttgtttcaatattgccaggtgttttcgaatttattcgtcacaaacgcgctgcggcacgcgc

SEQ ID NO: 331344 - DNA, 75 bp, synthetic construct
  source 1..75: mol_type = other DNA
ttgtaccgatcgtcagaacgttcgcgccgtttgttgcgggaatgggccacatgtcgtaccgtcatttcgccgctt

SEQ ID NO: 331345 - DNA, 75 bp, synthetic construct
  source 1..75: mol_type = other DNA
tgttgaaaaaaaagacgacttttcacgtgttccagaggagctgatgaaaggttttggtcaaccgcaacttgcgat

SEQ ID NO: 331346 - DNA, 75 bp, synthetic construct
  source 1..75: mol_type = other DNA
atgttttgtgtgatctatcgaagtagcaaacgtgaccagacctatttatatgttgaaaaaaaagacgacttttcg

SEQ ID NO: 331347 - DNA, 75 bp, synthetic construct
  source 1..75: mol_type = other DNA
ccgccaccacccgaagatttgctgaagcaacatctttccgtcatggggcagaaaacagacgacactaacaaataa

SEQ ID NO: 331348 - DNA, 75 bp, synthetic construct
  source 1..75: mol_type = other DNA
acgattacccatccggcgtatggcaatagtatgacgtttaaagcgccagcggattttgaatcgtcacgctggcgc

SEQ ID NO: 331349 - DNA, 75 bp, synthetic construct
  source 1..75: mol_type = other DNA
cggcggcgttgatgattaaccagcaatgggcgcatctcgatgatcttctttgccatgaaaacgctgagaatcatg

SEQ ID NO: 331350 - DNA, 75 bp, synthetic construct
  source 1..75: mol_type = other DNA
atagcaatacaagggatatctgcatttatcctctatggatcaagcttatacctattgtatcaaggcgcgacattt

SEQ ID NO: 331351 - DNA, 75 bp, synthetic construct
  source 1..75: mol_type = other DNA
ctgtgccgggtcgtctggaagagcacaaagacagcgtgatgacgcgcattcagcgtgattatccgcaggcggaat

SEQ ID NO: 331352 - DNA, 75 bp, synthetic construct
  source 1..75: mol_type = other DNA
cgcaggaaccctggttggttatcctgtatcaggatgaccatattatggtggtcaacaagccgagcggtttgttgt

SEQ ID NO: 331353 - DNA, 75 bp, synthetic construct
  source 1..75: mol_type = other DNA
accaaagccgcggagcgggagttaaaacgccagttccgcgagcgcgagccgaaaaagcagtatgtggcccgcgtc

SEQ ID NO: 331354 - DNA, 75 bp, synthetic construct
  source 1..75: mol_type = other DNA
tgttgaacaggctgcttgatggtctggacggtgcgctggcgcggcgcagagagcttaccgacgcgggcggctttc

SEQ ID NO: 331355 - DNA, 75 bp, synthetic construct
  source 1..75: mol_type = other DNA
acctgtgggcctctcccggtgtgccatcgcagtgctgtcgtaaagccttacggctggtcagtcagtatcatcgtg

SEQ ID NO: 331356 - DNA, 75 bp, synthetic construct
  source 1..75: mol_type = other DNA
ctgctgagccgtaaccggggagagacctgggaactgctcagccatgagcgttataacagcgccagacgtaaatga

SEQ ID NO: 331357 - DNA, 75 bp, synthetic construct
  source 1..75: mol_type = other DNA
atcgatctcggcccgttctggcgtctgctgagtcgcaacgaaggccgttcgtggcttcttctcagccacgaacgc

SEQ ID NO: 331358 - DNA, 75 bp, synthetic construct
  source 1..75: mol_type = other DNA
atgccggagaaattctgggtctggctgggctggtgggggccggacgcacagaactggccgagacgctctatggtc

SEQ ID NO: 331359 - DNA, 75 bp, synthetic construct
  source 1..75: mol_type = other DNA
ttataaacagtattcaggggtcaatgtcctgaaaggcatcgattttacgttgcatcagggggaggtccacgccct

SEQ ID NO: 331360 - DNA, 75 bp, synthetic construct
  source 1..75: mol_type = other DNA
caggtacgagcgaaggttgccgcagctcgcgctgataagcggccgggaatgagtatcgcgcaactgcgccaacaa

SEQ ID NO: 331361 - DNA, 75 bp, synthetic construct
  source 1..75: mol_type = other DNA
catcggttccttatcctgcccaaacgggccccctgatttctattttaatgacaacatacaataccggtaggcggg

SEQ ID NO: 331362 - DNA, 75 bp, synthetic construct
  source 1..75: mol_type = other DNA
gcgccagattaacgcggcaagggtaaaacattgcggtgcttctgcgatggtttgcgaagagtgtgacgcgccaat

SEQ ID NO: 331363 - DNA, 75 bp, synthetic construct
  source 1..75: mol_type = other DNA
atggtttgcgaagagtgtgacgcgccaatacctgctgcccgtcgtgcggcttatccgtcagccacgcgttgtgtt

SEQ ID NO: 331364 - DNA, 75 bp, synthetic construct
  source 1..75: mol_type = other DNA
tgatcgtccgggtaaaaaatgtatctcttttacgctacgtatcaacggcaaagatcacgatttgttagcgggtga

SEQ ID NO: 331365 - DNA, 75 bp, synthetic construct
  source 1..75: mol_type = other DNA
tcttttacgctacgcatcaacggcaaagatcacgatttgttagcggtggataaaatacatgtcgatttaaactgg

SEQ ID NO: 331366 - DNA, 75 bp, synthetic construct
  source 1..75: mol_type = other DNA
gagtttgtgacatgccatgactcagatgactggtcccatcctgaaaaattatttagacagatatcacctttattg

SEQ ID NO: 331367 - DNA, 75 bp, synthetic construct
  source 1..75: mol_type = other DNA
cctgatggttggcgcggcaattggtctggggagcattcttacaccatacgccaccggacccagtccgatttacta

SEQ ID NO: 331368 - DNA, 75 bp, synthetic construct
  source 1..75: mol_type = other DNA
gataccttgcgccgctggcggtcatcgccattattgctctacttccgcttcccgcagggctggagagtcatacct

SEQ ID NO: 331369 - DNA, 75 bp, synthetic construct
  source 1..75: mol_type = other DNA
gctatgcggtgatgttctccgagctgatcctcgcacctgtaacaccgtccaactcggcgcgtggtgcggggatta

SEQ ID NO: 331370 - DNA, 75 bp, synthetic construct
  source 1..75: mol_type = other DNA
catttatattagggtttcataaaacattatatttaaattttagctgtttttcattttggacagcaattaaattcc

SEQ ID NO: 331371 - DNA, 75 bp, synthetic construct
  source 1..75: mol_type = other DNA
ttttttaacaggtgttgagggagcatattatgaaaaaggtgaaataaaaaagccatcaattttatttagtcctgt

SEQ ID NO: 331372 - DNA, 75 bp, synthetic construct
  source 1..75: mol_type = other DNA
ccgcgatggttggttacagcgtagtggcactgatgctgcttctgcgcattatctgctgggacgacattgtcagta

SEQ ID NO: 331373 - DNA, 75 bp, synthetic construct
  source 1..75: mol_type = other DNA
tgagattcagctttttaccgaagaaacccgcacccctgttactgttcgggatgcgctggagtactggcttgttaa

SEQ ID NO: 331374 - DNA, 75 bp, synthetic construct
  source 1..75: mol_type = other DNA
ctatctaaacaggcgctacgcttctgcaatgttcggcgttatgcggttagtgatgcgctgatacatttgacgatt

SEQ ID NO: 331375 - DNA, 75 bp, synthetic construct
  source 1..75: mol_type = other DNA
gtaagcatatttatccgcgtcttggccactatccgttatcccggtgtgaaacgcgtcactgggtggcatgttttg

SEQ ID NO: 331376 - DNA, 75 bp, synthetic construct
  source 1..75: mol_type = other DNA
ggctctactttgccgtttttactggcgtgatcgttggactgatcctcgaacccgtgccgggtgccgtggtggcga

SEQ ID NO: 331377 - DNA, 75 bp, synthetic construct
  source 1..75: mol_type = other DNA
agggagacacgacccgaacgcattaagctgggaagttatcctgatctgagcctgaaagcagccagggaaaaagcc

SEQ ID NO: 331378 - DNA, 75 bp, synthetic construct
  source 1..75: mol_type = other DNA
ttattgctgggggaagtgaaacaggaggccagcgtatcgcagtatggaagattagcgtacaggaggcttaatcac

SEQ ID NO: 331379 - DNA, 75 bp, synthetic construct
  source 1..75: mol_type = other DNA
aagaaaattgttaaagaacgtactgttatatctggtgaattaaataagatagtgcgagaaaatatattgtggaaa

SEQ ID NO: 331380 - DNA, 75 bp, synthetic construct
  source 1..75: mol_type = other DNA
tcttgaagcactgaaggagcaatacaaactgaccgggcatcatcgcaaaagcgaaatcactttttatcatcggga

SEQ ID NO: 331381 - DNA, 75 bp, synthetic construct
  source 1..75: mol_type = other DNA
tgccgtttactccgggcttcgtcacggggaactggcagctctggcgtgggaggatgtggatttcgagaagggaat

SEQ ID NO: 331382 - DNA, 75 bp, synthetic construct
  source 1..75: mol_type = other DNA
gaccttcagcccggcaccattgattacgaacgctaccgactgacgaaggcacaggcagatgcacaggaactgaaa

SEQ ID NO: 331383 - DNA, 75 bp, synthetic construct
  source 1..75: mol_type = other DNA
gcgaacagccgtattaatgcccgtcttccctatattttcctgctgtcccgcattgcgcattacctgaagatcatt

SEQ ID NO: 331384 - DNA, 75 bp, synthetic construct
  source 1..75: mol_type = other DNA
atgctgatgtctgtacagaaagaaaagaacgtcgcagagagtgtggtatctgaaacgcataccgacgacagcgta

SEQ ID NO: 331385 - DNA, 75 bp, synthetic construct
  source 1..75: mol_type = other DNA
ctgaaatttttaatgtcgatatacgcacgattgatcgctggcaaacccaggggctccctcagatatctggtggag

SEQ ID NO: 331386 - DNA, 75 bp, synthetic construct
  source 1..75: mol_type = other DNA
ttaatccaccgaccagacccgttaatggatgccgatgaagtggcggacgcgttcaaacatctgcatcagagcggc

SEQ ID NO: 331387 - DNA, 75 bp, synthetic construct
  source 1..75: mol_type = other DNA
gagaatacttgttacttacccctgactatcctgaatctaacgattttcaggtgaatctctcaacggaggacgtga

SEQ ID NO: 331388 - DNA, 75 bp, synthetic construct
  source 1..75: mol_type = other DNA
ccaacgaagagatagcggaacgtttgggaattgctccagattggatggaaaccgtagaccccagcaaacttacct

SEQ ID NO: 331389 - DNA, 75 bp, synthetic construct
  source 1..75: mol_type = other DNA
aacggcgaagccctgctggcactactggataacgccctgcctgcgggtgtggaaaatgaacaatcaccaaactgc

SEQ ID NO: 331390 - DNA, 75 bp, synthetic construct
  source 1..75: mol_type = other DNA
tgaatgtgccgaaggaagaacgagaagcgatgttctttggcggcctgttctcttacgacctggtcgcaggatttg

SEQ ID NO: 331391 - DNA, 75 bp, synthetic construct
  source 1..75: mol_type = other DNA
attgccggaacacgcccacgcggtcgtcgcgccgatggttcactggacagagatctcgacagccgtattgaactg

SEQ ID NO: 331392 - DNA, 75 bp, synthetic construct
  source 1..75: mol_type = other DNA
tgaattagaacttagcgcagaagaaaaccttaaccccgtaactgtccatgatgcccttgaatattggctaattca

SEQ ID NO: 331393 - DNA, 75 bp, synthetic construct
  source 1..75: mol_type = other DNA
tgcggtcataaactggcgaaacgtcaggtgatgctggtgtcgtttatctgctacgccttcaacctgacgcttagt

SEQ ID NO: 331394 - DNA, 75 bp, synthetic construct
  source 1..75: mol_type = other DNA
tcatggaaattcgccctcgctcagatgctgatttccagcgttaactggatggtaatgggggcgattatctggctg

SEQ ID NO: 331395 - DNA, 75 bp, synthetic construct
  source 1..75: mol_type = other DNA
gtggtcgtcagttatctgatttacggttgctacgacctgctcgcccgtttctactgcggtcacaaactggcgaag

SEQ ID NO: 331396 - DNA, 75 bp, synthetic construct
  source 1..75: mol_type = other DNA
attaccgggtagcactattacacggattttctcgctgagtattaccaccaactggctgggctatattttgctcgc

SEQ ID NO: 331397 - DNA, 75 bp, synthetic construct
  source 1..75: mol_type = other DNA
tggaagcggtgtttattgcgctactggcaggggaacatacatcaaaaggaacgattatcgccgccctgctcgctt

SEQ ID NO: 331398 - DNA, 75 bp, synthetic construct
  source 1..75: mol_type = other DNA
catattccggcggggattggtgtgctggaagcggtgtttatcgcgctactggctggggagcatacatccaaaggc

SEQ ID NO: 331399 - DNA, 75 bp, synthetic construct
  source 1..75: mol_type = other DNA
cttcaatgccaccgtttcaaccaagcagttccaggtcttcagcgagcagaacaccagtagctactcggcagagcc

SEQ ID NO: 331400 - DNA, 75 bp, synthetic construct
  source 1..75: mol_type = other DNA
ttgctggttcgacaatgattggttacgccgcactgggcgtacctgtggaatatctgctggcggcatcgttaatgg

SEQ ID NO: 331401 - DNA, 75 bp, synthetic construct
  source 1..75: mol_type = other DNA
atgagaagtgttctgggaatggtggtattgctggcaattgcgtttttgctgtcagtaaacaagaagaagatcagc

SEQ ID NO: 331402 - DNA, 75 bp, synthetic construct
  source 1..75: mol_type = other DNA
ccgatgctgaccgaccagtggtacgttcgtgccgatgtactggcgaaaccggcagttgaagcggttgagaacggc

SEQ ID NO: 331403 - DNA, 75 bp, synthetic construct
  source 1..75: mol_type = other DNA
tcagcgacccgacctatttcaatgattttgataataaatatggttccagtaccgatggctacgccacgcaaaaat

SEQ ID NO: 331404 - DNA, 75 bp, synthetic construct
  source 1..75: mol_type = other DNA
tatgacaacgcaatcggctttaacatcgaacttcgcggcctgagctccaactacggtctgggtacgcaagagatg

SEQ ID NO: 331405 - DNA, 75 bp, synthetic construct
  source 1..75: mol_type = other DNA
cgtgatttctatctggaattcaatacttctccggcgattcgtatgctggtaaaagcgatggcgaataaatttggc

SEQ ID NO: 331406 - DNA, 75 bp, synthetic construct
  source 1..75: mol_type = other DNA
tggcggcgttatgctctattttccgccgggaaaatgggcggtagagcaggcggcgttaggcgtacataaagtcat

SEQ ID NO: 331407 - DNA, 75 bp, synthetic construct
  source 1..75: mol_type = other DNA
ggcgtttgtcgcaattattgcgctgattaatggcattatcggcggaattggcggctggtttggttttgccaatgc

SEQ ID NO: 331408 - DNA, 75 bp, synthetic construct
  source 1..75: mol_type = other DNA
atggcgtttgtcgcaattattgcgctgatcaacggcattatcggcggaattggcggctggtttggtttcgccaat

SEQ ID NO: 331409 - DNA, 75 bp, synthetic construct
  source 1..75: mol_type = other DNA
ctcgacgggcagaagctgcatcgtcttactctgggacgatacccggatatgagcctcaaagaggcccgttcttcg

SEQ ID NO: 331410 - DNA, 75 bp, synthetic construct
  source 1..75: mol_type = other DNA
atgggacttaagtggaccgatagccgcgaaattggcgaagcactgtacgatgcgtatcccgatattgatccgaaa

SEQ ID NO: 331411 - DNA, 75 bp, synthetic construct
  source 1..75: mol_type = other DNA
cgacacgatgactccgctctctcaggacggggaagagaaacccttcactccgttctggtgccgccgtcttaatga

SEQ ID NO: 331412 - DNA, 75 bp, synthetic construct
  source 1..75: mol_type = other DNA
tagaaacggataccgaaggctatctcaaagaaagcagccagtggagtgagccgctggcagtggtgattgcagaga

SEQ ID NO: 331413 - DNA, 75 bp, synthetic construct
  source 1..75: mol_type = other DNA
tagaaacggataccgaaggctatctcaaagaaagcagccagtggagtgaaccactggcagtggtgattgcagaga

SEQ ID NO: 331414 - DNA, 75 bp, synthetic construct
  source 1..75: mol_type = other DNA
tttgtacgtgatttctacctggaatttaatacctctccggcaattcgtatgctggtaaaagcaatggcgaataaa

SEQ ID NO: 331415 - DNA, 75 bp, synthetic construct
  source 1..75: mol_type = other DNA
ttcctcgggcaaaacgagatcccggcgatcgtgaaaccgtttatcgatcgtctgaaccgcaacgaactgtttact

SEQ ID NO: 331416 - DNA, 75 bp, synthetic construct
  source 1..75: mol_type = other DNA
gtactcccggcgattatcttcgtcactgcgctcatcagtctgctgtactacattggcgtgatggggctgctgatt

SEQ ID NO: 331417 - DNA, 75 bp, synthetic construct
  source 1..75: mol_type = other DNA
gcaaacgggcggcacgctggacgtgaaaactgttgccattatctcctttgcgctttgtggttttgctaactttgg

SEQ ID NO: 331418 - DNA, 75 bp, synthetic construct
  source 1..75: mol_type = other DNA
cgcacggaggagtgcttcatgccgtccggccagatgcgcgcaccggtatacctgcagctcatcaccccgctgcac

SEQ ID NO: 331419 - DNA, 75 bp, synthetic construct
  source 1..75: mol_type = other DNA
ttcccatcagcggcacgctgaacacgctctttctcagctctgccacggtcggggaatgcccgctgttccgcttcc

SEQ ID NO: 331420 - DNA, 75 bp, synthetic construct
  source 1..75: mol_type = other DNA
cacaccctgtttgtcggccttcccggcctgcctgaagaggcatggggcatcaggccggaacagaccattaccgta

SEQ ID NO: 331421 - DNA, 75 bp, synthetic construct
  source 1..75: mol_type = other DNA
aactgtccgaacgcaacatggaagtccgtgaggtcgtccagcgctgcgaggtggttgaactgctgccgctggaca

SEQ ID NO: 331422 - DNA, 75 bp, synthetic construct
  source 1..75: mol_type = other DNA
aaaggaatcggcccgtgccgggttctcacattgccttgttatcgaagaggcgcactcgctgccggtgccgacgct

SEQ ID NO: 331423 - DNA, 75 bp, synthetic construct
  source 1..75: mol_type = other DNA
tgtacaggtcgcggccacgccccgtacagcgggtaccacagataaaacgagcctcagtgaggaagagaatatgtt

SEQ ID NO: 331424 - DNA, 75 bp, synthetic construct
  source 1..75: mol_type = other DNA
caccctcattagagagttggaactgtcaaaagtctggtatcaaatcctactggatgaagagttttcactgatggt

SEQ ID NO: 331425 - DNA, 75 bp, synthetic construct
  source 1..75: mol_type = other DNA
tcacttattctgctgccacaattgagcggcgcttcaccctcattagagagttggaactgtcaaaagtctggtatc

SEQ ID NO: 331426 - DNA, 75 bp, synthetic construct
  source 1..75: mol_type = other DNA
tggatgaagagttttcactgatggttatagcagaaaaattggctatgccgaatgaccggcacaaggtcatagcca

SEQ ID NO: 331427 - DNA, 75 bp, synthetic construct
  source 1..75: mol_type = other DNA
cggctcgctgattgcgattgtggcgctgattggcatttttatcgtctggccgagcatcgccatttttatcccgat

SEQ ID NO: 331428 - DNA, 75 bp, synthetic construct
  source 1..75: mol_type = other DNA
aaagctacaccgcaaaaatggtcgggcaggccagtaaagatgagctttcagtcgttatcaaacacctattaaatc

SEQ ID NO: 331429 - DNA, 75 bp, synthetic construct
  source 1..75: mol_type = other DNA
tggtttcagtttttttattgagtacatcagttaatgctgcagcggttaaattaccccggacagtaattgatgtga

SEQ ID NO: 331430 - DNA, 75 bp, synthetic construct
  source 1..75: mol_type = other DNA
tatcaaccgcgagaatgcgccggtgattgttatcgagccatatatcatcgccatggaagacaacgatgtgaaagg

SEQ ID NO: 331431 - DNA, 75 bp, synthetic construct
  source 1..75: mol_type = other DNA
ccggaagtgggttacaccgctggtgtggaaaccaccaccggtccgctggggcaggggattgccaacgcagtcggt

SEQ ID NO: 331432 - DNA, 75 bp, synthetic construct
  source 1..75: mol_type = other DNA
tcaggacgcccgctttcgccaggtgcatcgcgtcctgaaagacagcggccaggcggggttcagccacgttctggt

SEQ ID NO: 331433 - DNA, 75 bp, synthetic construct
  source 1..75: mol_type = other DNA
accactccggacattcgctacgtgcgtgaggcgctgtaccagacagcccgtcatggggggtttatggccgtcatc

SEQ ID NO: 331434 - DNA, 75 bp, synthetic construct
  source 1..75: mol_type = other DNA
gtttacagaaaaccctggatggctttttttctggcagaactgattgcggccattctcgttctgtttggcgcatac

SEQ ID NO: 331435 - DNA, 75 bp, synthetic construct
  source 1..75: mol_type = other DNA
atgtttacgaaggcgttatcggttgtcttattaacgtgtgcgctgttctcaggacaactcatggcagggcacaaa

SEQ ID NO: 331436 - DNA, 75 bp, synthetic construct
  source 1..75: mol_type = other DNA
gtagagcaggtcgcttctctgcgcgtgaccccgaacatgtctacatggcgcccgtgtgaccaggttgaatccgcg

SEQ ID NO: 331437 - DNA, 75 bp, synthetic construct
  source 1..75: mol_type = other DNA
ttgtatgcggtgatcggcggactgcgcgcaatggcagtggcagactccattaacggtattgggctggttattggc

SEQ ID NO: 331438 - DNA, 75 bp, synthetic construct
  source 1..75: mol_type = other DNA
ctgattggcatttttatcgtctggccgagcatcgccatttttatcccgatgttcaccaacgacgcgggagagctc

SEQ ID NO: 331439 - DNA, 75 bp, synthetic construct
  source 1..75: mol_type = other DNA
acctcagtgaggaagagaacatgttactcaaaaaacaggtgttattcccggcaaccaaaaaagcgtttggtcttt

SEQ ID NO: 331440 - DNA, 75 bp, synthetic construct
  source 1..75: mol_type = other DNA
accacaccggacattcgctacgtgcgtgaggcgctgtaccagacagcccgtcatggtgggtttatggccgtcatc

SEQ ID NO: 331441 - DNA, 75 bp, synthetic construct
  source 1..75: mol_type = other DNA
gtggtcgaacttctgcctctggacaataaccttgaagcgtttctgacgttcaaactgcaacgggccggtaaacaa

SEQ ID NO: 331442 - DNA, 75 bp, synthetic construct
  source 1..75: mol_type = other DNA
ccacgccgttcaccttcaaagatgcgtttgcggtggacatgaaaccgtggaaaaacgtcaagatcgcgtcaattg

SEQ ID NO: 331443 - DNA, 75 bp, synthetic construct
  source 1..75: mol_type = other DNA
agaatgtcgttaaatcaccaaatctgtggctggcctcattttgtatattctttgtgtactccgcatattgtgggc

SEQ ID NO: 331444 - DNA, 75 bp, synthetic construct
  source 1..75: mol_type = other DNA
atgctggtggtgccatctacaaaggggcaattgctttttgtgacaacccggcgcggtacgaccggagatatggtg

SEQ ID NO: 331445 - DNA, 75 bp, synthetic construct
  source 1..75: mol_type = other DNA
agtcctgttacgcagaacgcaaacagatcagtaccggccgtctcgattccatgtggataaattttgttacctccc

SEQ ID NO: 331446 - DNA, 75 bp, synthetic construct
  source 1..75: mol_type = other DNA
tgctggcgcgcgttcgtgagttgtttggggcaaccctgcggcaggtggaacccattaccggcacatggactaacg

SEQ ID NO: 331447 - DNA, 75 bp, synthetic construct
  source 1..75: mol_type = other DNA
gtatgagcggtggccgtgtagaagggaaagtgatttacgaaacccagtccactcacaaactgctggcggcgttct

SEQ ID NO: 331448 - DNA, 75 bp, synthetic construct
  source 1..75: mol_type = other DNA
tcaaaaatgaccgttttgttatctccctttgccacggtccggcggcttttctggcacttcgccacagcgataacc

SEQ ID NO: 331449 - DNA, 75 bp, synthetic construct
  source 1..75: mol_type = other DNA
tgctggctggtgggcgctctttctgtttagcgatacggcggtcgatagtattccgcattttctgatattgagatt

SEQ ID NO: 331450 - DNA, 75 bp, synthetic construct
  source 1..75: mol_type = other DNA
gcattcatcggcgaacgtattttccccgtcgtgctgacggacaaggaaggcgtgcgtgtaccgaccttcgggaaa

SEQ ID NO: 331451 - DNA, 75 bp, synthetic construct
  source 1..75: mol_type = other DNA
accatgggtgccggcgtgatggcgctgctgaaattccacccggcacttcaggcggctataggggccaacgaacgc

SEQ ID NO: 331452 - DNA, 75 bp, synthetic construct
  source 1..75: mol_type = other DNA
agcgtgccgtcggggcggacagcaacgttctggtccgtgagaaaaccggcacactggacctggtactgggtgagc

SEQ ID NO: 331453 - DNA, 75 bp, synthetic construct
  source 1..75: mol_type = other DNA
caaaaaatgctttctatccgtttgagctaaaaacttcatacgaagcaacagactcatggccggaggatggagttg

SEQ ID NO: 331454 - DNA, 75 bp, synthetic construct
  source 1..75: mol_type = other DNA
tgaaggcactacctggaccaaagcaccatggcggtttgaagccggtacacccaataccgggggcatcattggtct

SEQ ID NO: 331455 - DNA, 75 bp, synthetic construct
  source 1..75: mol_type = other DNA
gatcgctgggccggtggtaagggggaccccatcggggtgattgaagccggtatggaagcggtccgtacggccacg

SEQ ID NO: 331456 - DNA, 75 bp, synthetic construct
  source 1..75: mol_type = other DNA
aggtgacgtaaacgaagaaacctttaacgaagcctacatgatgcacaccaccacttctcctcactacggtatcgt

SEQ ID NO: 331457 - DNA, 75 bp, synthetic construct
  source 1..75: mol_type = other DNA
atatctctggtctggcgttgttaagtcatctcccgaaaggcatggcgacgatcatgctttctgtccacgatagcc

SEQ ID NO: 331458 - DNA, 75 bp, synthetic construct
  source 1..75: mol_type = other DNA
aaaccagaaagaaaccacgaataaaaaagacactggagcagcaattagcatctgctcagatgcgtttaaatcgtt

SEQ ID NO: 331459 - DNA, 75 bp, synthetic construct
  source 1..75: mol_type = other DNA
gggtggtgattttcgccgcgttgtttctcggtgaacgcctgcgacgtgggcaatatttcgcgattctgattgccg

SEQ ID NO: 331460 - DNA, 75 bp, synthetic construct
  source 1..75: mol_type = other DNA
ttagatgagcaagggctgccgacagcgaaaagcactgcggtgtttaatatgttcaaacacctggcacacgtgctc

SEQ ID NO: 331461 - DNA, 75 bp, synthetic construct
  source 1..75: mol_type = other DNA
atggatgaagtgatttttacttataacgaagaagcagcactgaccgccgggcaaggtggtttcattaccgaaaca

SEQ ID NO: 331462 - DNA, 75 bp, synthetic construct
  source 1..75: mol_type = other DNA
ctggcgcaaggaatggcggtgaaagagattgccgccgaactgggcttgtcgccgaaaacggtacacgtccatcgc

SEQ ID NO: 331463 - DNA, 75 bp, synthetic construct
  source 1..75: mol_type = other DNA
atgaaaagtgccatgctggcaattctctccggtgttagttggggggcgagcgcgattgttgctaaacgtctgtat

SEQ ID NO: 331464 - DNA, 75 bp, synthetic construct
  source 1..75: mol_type = other DNA
ctactgatgctttgttccgtagggcaacattaccccggttttgaaacggatattcacggcgcgaaacaggacgaa

SEQ ID NO: 331465 - DNA, 75 bp, synthetic construct
  source 1..75: mol_type = other DNA
atactgctagagataccgcatctacatccagatgataaaaaaagatttaaaaaaaatgggctgttgtttctggca

SEQ ID NO: 331466 - DNA, 75 bp, synthetic construct
  source 1..75: mol_type = other DNA
ctcgttttattcatcgtccttttattacgtggtcgcggtatgcgtccgacgccgtttaaatacactttagctatt

SEQ ID NO: 331467 - DNA, 75 bp, synthetic construct
  source 1..75: mol_type = other DNA
agcggtattgtgctgattgtgttggcactggcgctggtgagtcggaagaaacgggaacgcgtagtggccaggcgc

SEQ ID NO: 331468 - DNA, 75 bp, synthetic construct
  source 1..75: mol_type = other DNA
tactcttttcctggtggctgctcggtgaaaatccgggggccgttgaaggtagcggtattgtgctgattgtgctgg

SEQ ID NO: 331469 - DNA, 75 bp, synthetic construct
  source 1..75: mol_type = other DNA
ttctggttcttctggtctcgttggcatgactgttgatgaagcaaaagcagagggatacattacggctggggatga

SEQ ID NO: 331470 - DNA, 75 bp, synthetic construct
  source 1..75: mol_type = other DNA
tgcagcagcgcattcgcggatatttctcttgattcggcatggcgtccggcacagaacaacaaccttgttggggcc

SEQ ID NO: 331471 - DNA, 75 bp, synthetic construct
  source 1..75: mol_type = other DNA
tctctgctgatgaaaacctccgggacaggcagccgtggtatctgggccacagggaaagggagcaatgtcctggct

SEQ ID NO: 331472 - DNA, 75 bp, synthetic construct
  source 1..75: mol_type = other DNA
cactgcagacagaaacgggagcgcacattcagcttgatagcggtagtgtactaacggtcagcggcacgcagcgtc

SEQ ID NO: 331473 - DNA, 75 bp, synthetic construct
  source 1..75: mol_type = other DNA
ccgagagcgaatgcccagggactgcagacagatcttggcgcacagttaacgggggcaggggatctggccatcgaa

SEQ ID NO: 331474 - DNA, 75 bp, synthetic construct
  source 1..75: mol_type = other DNA
tgatggcagcatactgacaggagaagtgactgcaggaaatggcaataacaatgtaacgctcaatggtaaggctga

SEQ ID NO: 331475 - DNA, 75 bp, synthetic construct
  source 1..75: mol_type = other DNA
cccatactggatgtgcaaatgttcatggtcatacggcaataataaaattattaccgatactggctgtggaactat

SEQ ID NO: 331476 - DNA, 75 bp, synthetic construct
  source 1..75: mol_type = other DNA
caatctggcaaaggcctaccccaccaataaattaccggatttacggggagaatttattcgtggctgggatgatgg

SEQ ID NO: 331477 - DNA, 75 bp, synthetic construct
  source 1..75: mol_type = other DNA
caactgtaacaatgccacaagccagttccgtggtttacataagcctgattggtggcgcagggtttaacgttggct

SEQ ID NO: 331478 - DNA, 75 bp, synthetic construct
  source 1..75: mol_type = other DNA
acggcaccttcactctcagcgacccgaatgagaactttaccctcaataccgaactggtcgatgttagcccgaata

SEQ ID NO: 331479 - DNA, 75 bp, synthetic construct
  source 1..75: mol_type = other DNA
tgtacagcagcgccatccccatttgttgctggaggtttatcaaaaaaaccaaccggcgatagatttttaccatgc

SEQ ID NO: 331480 - DNA, 75 bp, synthetic construct
  source 1..75: mol_type = other DNA
cacattctggctgtacgaaagagtacactgttgcaaatcgacacacttatccgacaactggctgaagtatctcgg

SEQ ID NO: 331481 - DNA, 75 bp, synthetic construct
  source 1..75: mol_type = other DNA
gaacagtgccggattacaggtcataaacggaggccagatagcgtctgacggtactgtaaatgttggtggcgtgga

SEQ ID NO: 331482 - DNA, 75 bp, synthetic construct
  source 1..75: mol_type = other DNA
cgtgtgctgaaagccgcgcaatatttacatcaacaaggtctggcaacgcccattctggtcgccaatccgtttgaa

SEQ ID NO: 331483 - DNA, 75 bp, synthetic construct
  source 1..75: mol_type = other DNA
gcagtggtttgctgaatttatacagtgaactcaatattagatcgaccagcgatctcagtggtctgagcgcaacca

SEQ ID NO: 331484 - DNA, 75 bp, synthetic construct
  source 1..75: mol_type = other DNA
gctgataacgccatcaacggcgattttgatacgttgaccgtcgccggaatggaggcaagaaaagtcgacttcctg

SEQ ID NO: 331485 - DNA, 75 bp, synthetic construct
  source 1..75: mol_type = other DNA
cagcgtggtgccacagccgacggcggcgcaactggcggatatcgcgcttgccagtgccgaaacctggcgcgccat

SEQ ID NO: 331486 - DNA, 75 bp, synthetic construct
  source 1..75: mol_type = other DNA
ttcctgatgctgccacagtacagcggtccggcgttgggctttgccgattgcagcgtggtgccacagccgacggcg

SEQ ID NO: 331487 - DNA, 75 bp, synthetic construct
  source 1..75: mol_type = other DNA
atgattattgaacgttgtcgtgaactggcgttgcgagcgcccgccagagtagtttttccggatgcgttagatcaa

SEQ ID NO: 331488 - DNA, 75 bp, synthetic construct
  source 1..75: mol_type = other DNA
taagagcggagataatgctaaccgtacgacggggattaaagcttctggtgctaaaacaaccgtcaatatgactgc

SEQ ID NO: 331489 - DNA, 75 bp, synthetic construct
  source 1..75: mol_type = other DNA
tattaacggcgggggctcagttaagttccacccaggataaagtgaccgggtatatcgcccgtaatggggccactc

SEQ ID NO: 331490 - DNA, 75 bp, synthetic construct
  source 1..75: mol_type = other DNA
caggggcagggggcgattggcgttgaggtcagtgaacagggaacggtgaatcttgaggggactgccattcctaag

SEQ ID NO: 331491 - DNA, 75 bp, synthetic construct
  source 1..75: mol_type = other DNA
atgacagacaacatagttacagtagcggcatggcgatctctgcctacagcggcagccccctcgataagggggcga

SEQ ID NO: 331492 - DNA, 75 bp, synthetic construct
  source 1..75: mol_type = other DNA
ggtcataatcgctggaaggacagtagttcacaactgaatacgcaaagcaaccgctatgttgtgcaactgggtggc

SEQ ID NO: 331493 - DNA, 75 bp, synthetic construct
  source 1..75: mol_type = other DNA
gacaaaaccggagacaaaaccggagacaaaaccggagacaaaaccggagacaaaaccggagacaaaaccaacacc

SEQ ID NO: 331494 - DNA, 75 bp, synthetic construct
  source 1..75: mol_type = other DNA
gatacaggttccaactctgccgataatatagcgggcgtttattacagacccgtccaaaagtatataaatggcacc

SEQ ID NO: 331495 - DNA, 75 bp, synthetic construct
  source 1..75: mol_type = other DNA
aggcattattagcgggtttgttaattggtattagtggtttttgcggcgatgtagtgatgtcagccatcaaacgag

SEQ ID NO: 331496 - DNA, 75 bp, synthetic construct
  source 1..75: mol_type = other DNA
ttttcgcgttgttaattttagcaacgctgataaaccgttttctggtatggcggttaccggagagaaaagggggtg

SEQ ID NO: 331497 - DNA, 75 bp, synthetic construct
  source 1..75: mol_type = other DNA
ccgagtcaaacgatattgcacagtatttatgggggaaatcctgcggcagaagaaaagtggtccccaaagtcagcc

SEQ ID NO: 331498 - DNA, 75 bp, synthetic construct
  source 1..75: mol_type = other DNA
tccccaaagtcagcccgggaaaaacgctggaaggtctggttggaggagtaatcaccaccatgattgcgtcactga

SEQ ID NO: 331499 - DNA, 75 bp, synthetic construct
  source 1..75: mol_type = other DNA
ataccgtgagcgccattttttggggctggataatgaccgttttcgccttgagtcatgccgcctggttattaatgt

SEQ ID NO: 331500 - DNA, 75 bp, synthetic construct
  source 1..75: mol_type = other DNA
atgagaaaatataaattctctttaccccggcttgatattacgggtatgtgggtattttccctgggggtctggttt

SEQ ID NO: 331501 - DNA, 75 bp, synthetic construct
  source 1..75: mol_type = other DNA
tgtgaaacagtcagaataaaaccaatggtgaaccaggttgagctgcatccctattttgcacaaccagaggcgctg

SEQ ID NO: 331502 - DNA, 75 bp, synthetic construct
  source 1..75: mol_type = other DNA
cctttgaaaataatctgcttcagagtattgcagatgcccatcaaaaatcgatttctcaggtcattctgcgttgga

SEQ ID NO: 331503 - DNA, 75 bp, synthetic construct
  source 1..75: mol_type = other DNA
tattagccacctggcgagtttttgtgggtgacccctccggttttctgcataccgtgagcgccattttttggggct

SEQ ID NO: 331504 - DNA, 75 bp, synthetic construct
  source 1..75: mol_type = other DNA
aaggtaatatagagagtaatcaaaaattgattgttcttggcaatttgacagtcaaaggtaatatttccactttct

SEQ ID NO: 331505 - DNA, 75 bp, synthetic construct
  source 1..75: mol_type = other DNA
ctgcatgcgcatctttttctggtgaccgggctggtcagtgacggtccggtccgtatttctgcagacgcacaggag

SEQ ID NO: 331506 - DNA, 75 bp, synthetic construct
  source 1..75: mol_type = other DNA
tcatgctgcgctggtctgaggtcagggaaatgagccggagcgggctggtcgagtttcatctgcacacacataccc

SEQ ID NO: 331507 - DNA, 75 bp, synthetic construct
  source 1..75: mol_type = other DNA
gaaatgcttgcggcaacgccaaaggcggttaagacagcgtatgaccttgctaatgggaaatacactgcacaggat

SEQ ID NO: 331508 - DNA, 75 bp, synthetic construct
  source 1..75: mol_type = other DNA
tttactcagttaagcagtgcgaccaacagcacgtctgaaacactggctgcaacgccaaaggcggtaaaggccgca

SEQ ID NO: 331509 - DNA, 75 bp, synthetic construct
  source 1..75: mol_type = other DNA
gcctgggtacgcgtgttgttcaattgatggcgcgtggtggtcgctatgaaaaagccggacacgcaattaccggat

SEQ ID NO: 331510 - DNA, 75 bp, synthetic construct
  source 1..75: mol_type = other DNA
taactttgattcccgttatgtgaaagatgttcgcctgggtacgcgtgttgttcaattgatggcgcgtggtggtcg

SEQ ID NO: 331511 - DNA, 75 bp, synthetic construct
  source 1..75: mol_type = other DNA
gcctatgacaatgctgagaaacgtcttcagaaagatcagaacggcgcggatattcctgataaaagattattcctg

SEQ ID NO: 331512 - DNA, 75 bp, synthetic construct
  source 1..75: mol_type = other DNA
accttgctaacgggaaatacactgcacaggacgccaccacagcgagaaaaggccttgtccagctcagtagcgcca

SEQ ID NO: 331513 - DNA, 75 bp, synthetic construct
  source 1..75: mol_type = other DNA
aagcaaccggcttttgcattagggaaaacaggaaatacggttgcaaataataaagcggtaggatggaactgggac

SEQ ID NO: 331514 - DNA, 75 bp, synthetic construct
  source 1..75: mol_type = other DNA
gaaggctacgtgacaacattccgcgacgtctcaactcaggaaggtgacgatcgcacgttccagctttacaacccg

SEQ ID NO: 331515 - DNA, 75 bp, synthetic construct
  source 1..75: mol_type = other DNA
atgagcgatgaagataccagcaaaggtgtcagcatgaagcaaatcgaactggtcatggctgccgctggttttaaa

SEQ ID NO: 331516 - DNA, 75 bp, synthetic construct
  source 1..75: mol_type = other DNA
tgcgccaaaagggactaataatactcagatcgcaagcacggcttatgtgatggccgcgattgccgcacttgtaga

SEQ ID NO: 331517 - DNA, 75 bp, synthetic construct
  source 1..75: mol_type = other DNA
gccaccaacagcacgtctgaaacactggctgcgacaccgaaagcggttaaggcggtaatggatgaaacaaataag

SEQ ID NO: 331518 - DNA, 75 bp, synthetic construct
  source 1..75: mol_type = other DNA
cagcgcgaaaagggcttgctcagctcagtagcgccaccaacagcgattctgaaacgcttgcggcaacgccaaagg

SEQ ID NO: 331519 - DNA, 75 bp, synthetic construct
  source 1..75: mol_type = other DNA
atgaaaagaacattactcatagctgtatgggccattggcctgatgagcgacagtgcaatggctttaaccctgaac

SEQ ID NO: 331520 - DNA, 75 bp, synthetic construct
  source 1..75: mol_type = other DNA
tatggattattggtctggtgagcagtagtgcgatggcattaaccctgaatgaagccagaagtcaggggcgggtag

SEQ ID NO: 331521 - DNA, 75 bp, synthetic construct
  source 1..75: mol_type = other DNA
cgagttatgtccgggcgaaacgccgcctatgtttaccacctcggccattgcgagcgtaacgcttgatgaaagcgg

SEQ ID NO: 331522 - DNA, 75 bp, synthetic construct
  source 1..75: mol_type = other DNA
atgtatgaggagtgtgtgacatttttcatgacagtaaaacaggtgataacctcctttcgtaaggggaattcacag

SEQ ID NO: 331523 - DNA, 75 bp, synthetic construct
  source 1..75: mol_type = other DNA
atgtatgaggagagtgtgacatttttcatgatagtaaaacaggtgataacctcctttcgtaagggggattcacag

SEQ ID NO: 331524 - DNA, 75 bp, synthetic construct
  source 1..75: mol_type = other DNA
atgtatgaggagagtgtgacatttttcatgaaagtaaaacaggtgataacctcctttcgtaaggggtattcacag

SEQ ID NO: 331525 - DNA, 75 bp, synthetic construct
  source 1..75: mol_type = other DNA
atgaagaaaacattacttctttgtgcgtttcttgttgggctggtaagcagcaatgtaatggcattgactctggat

SEQ ID NO: 331526 - DNA, 75 bp, synthetic construct
  source 1..75: mol_type = other DNA
gagaaattagtaaccgacattaatgccgaacgtaaagcgagttaccaacaactggcaaagcaaaataatgtgtcg

SEQ ID NO: 331527 - DNA, 75 bp, synthetic construct
  source 1..75: mol_type = other DNA
tcgattgatgaagcgacagaacaactttgtaaactgaatcgccctcatctgatcaaaattcgcaaagttgagggg

SEQ ID NO: 331528 - DNA, 75 bp, synthetic construct
  source 1..75: mol_type = other DNA
ctgccggagttgacgccctgcggcgatgttggtctggtcagtgcttatcttcaggcattgaccaacgagggtgtc

SEQ ID NO: 331529 - DNA, 75 bp, synthetic construct
  source 1..75: mol_type = other DNA
gcgacgcagccctcgatgccgctagtgattcggttcgtcctctgaccactaacggttgtgacgaatctcgcctga

SEQ ID NO: 331530 - DNA, 75 bp, synthetic construct
  source 1..75: mol_type = other DNA
actgatgagatagcaaaattggcagggcaaaaaatggttgctcgcgcgaagccgggagaatatgtgcaggggatt

SEQ ID NO: 331531 - DNA, 75 bp, synthetic construct
  source 1..75: mol_type = other DNA
aacaaaatgagcaagccaagcaatgctgggatgccattggtaaagtaatgcttggtcgcgctaacaaagatcgcg

SEQ ID NO: 331532 - DNA, 75 bp, synthetic construct
  source 1..75: mol_type = other DNA
tgatgaagtgctggagatctgccagcggctggcgaaactgaccgagatgctgcgtggcctggcagaactgttcct

SEQ ID NO: 331533 - DNA, 75 bp, synthetic construct
  source 1..75: mol_type = other DNA
aaaccatgcgctggtgatggcggcgatggaaagcgaagccgtattgcctgacccgaaaaatttactgctggtgct

SEQ ID NO: 331534 - DNA, 75 bp, synthetic construct
  source 1..75: mol_type = other DNA
gcggcgttaatgatgtgagtcaggtaaggagtcgtaaatggactatcgcaaaatcattaaagagatcgggcgcgg

SEQ ID NO: 331535 - DNA, 75 bp, synthetic construct
  source 1..75: mol_type = other DNA
aagagcgcgaagggcagctacacctctggtttcactgcgtgggaatacgtgtcagcgatcagctggaaaggctgc

SEQ ID NO: 331536 - DNA, 75 bp, synthetic construct
  source 1..75: mol_type = other DNA
tgcgtggtctggcagaactattccttaacgatttaagcgagaaaaccggcagccatgacattgtgcgcctgcatc

SEQ ID NO: 331537 - DNA, 75 bp, synthetic construct
  source 1..75: mol_type = other DNA
aaaggcgatctgctcagccaggtgcatatccacaaaatcgcttttccgcccatcgacagtccggtggtgatcacc

SEQ ID NO: 331538 - DNA, 75 bp, synthetic construct
  source 1..75: mol_type = other DNA
gagaggtctcccccgtcagtgatgtgaatgcctgtacccgtgacgtgttgcgcttccggctgcgcagcggtcgtc

SEQ ID NO: 331539 - DNA, 75 bp, synthetic construct
  source 1..75: mol_type = other DNA
tggtgtcaaccataatgcgctgtctgcctgaccgcgccaccagtccggtggcgacgcagttacacgggaggttct

SEQ ID NO: 331540 - DNA, 75 bp, synthetic construct
  source 1..75: mol_type = other DNA
cggtatgcagaattacgctcagtacagcaaaatcaaagctctgcgtgaggctggcggcgatgtgatgctgtctat

SEQ ID NO: 331541 - DNA, 75 bp, synthetic construct
  source 1..75: mol_type = other DNA
ccattgaaaaaccactgtcttcactgcccctcgtcattggcgagcagattctaaaacacatacacaagctggcgc

SEQ ID NO: 331542 - DNA, 75 bp, synthetic construct
  source 1..75: mol_type = other DNA
ttaccagcagcaggtgctgtttgtgctgaatcaggccgacaaaatcgaaccctgccacgaatgggatatccgtac

SEQ ID NO: 331543 - DNA, 75 bp, synthetic construct
  source 1..75: mol_type = other DNA
cctgccacgaatgggatactcgtaccagcacaccttcatcacagcaaaaggcaaacctaaaggagaaaaaggatg

SEQ ID NO: 331544 - DNA, 75 bp, synthetic construct
  source 1..75: mol_type = other DNA
ggaaagcgaaatactggactttaaatatcgaagaggctcatcggttcaattcgattgatgaagcgacagaacagc

SEQ ID NO: 331545 - DNA, 75 bp, synthetic construct
  source 1..75: mol_type = other DNA
agtgccggtgcgcaccaacacaagagttccggtgcatttggtggcacgaacacgagcattttccctaatggttat

SEQ ID NO: 331546 - DNA, 75 bp, synthetic construct
  source 1..75: mol_type = other DNA
gacgggggaagcggcgctgcgtgctggcgctggtttagtcagagtgctgacccgcagtgaaaacattgcgccgct

SEQ ID NO: 331547 - DNA, 75 bp, synthetic construct
  source 1..75: mol_type = other DNA
ggccagcaagagtggggaaaaaagcactgcaaaaagttgagaattttcgcaaaccgatgttgtgggatgccgatg

SEQ ID NO: 331548 - DNA, 75 bp, synthetic construct
  source 1..75: mol_type = other DNA
acaactatcattattagataactcaaatatattatctataggtgaattaacttcaacaagaggatttgctaatga

SEQ ID NO: 331549 - DNA, 75 bp, synthetic construct
  source 1..75: mol_type = other DNA
tcagaacggtgcggatatccctggcaaagacacctttacgaaaaatattggtgcctgccgtgccttcggtgggtc

SEQ ID NO: 331550 - DNA, 75 bp, synthetic construct
  source 1..75: mol_type = other DNA
accgtctatgaaggttccagacccggtacgctgaatgattttctcggtgccatgacggaggatgatgtccgaccg

SEQ ID NO: 331551 - DNA, 75 bp, synthetic construct
  source 1..75: mol_type = other DNA
aggctcagtaggtatgtctacgggggcgttagctaataccagtacagatggtaatcatagccactcactgtccgg

SEQ ID NO: 331552 - DNA, 75 bp, synthetic construct
  source 1..75: mol_type = other DNA
agtggcagcacgaatgcagctggtaatcacagccatagagatggccgtcgatttaaccccagtgtttttaaagat

SEQ ID NO: 331553 - DNA, 75 bp, synthetic construct
  source 1..75: mol_type = other DNA
aatattggtgcatttgccctacgtgcgacgggggcttatgcggattcggatggagccgttccgtggaatgctgaa

SEQ ID NO: 331554 - DNA, 75 bp, synthetic construct
  source 1..75: mol_type = other DNA
gcgctggcacgcgatgcatggttaaacgcgggaggcgagatccatgcttcgaatattgtctggcccgagtcagta

SEQ ID NO: 331555 - DNA, 75 bp, synthetic construct
  source 1..75: mol_type = other DNA
cgctccagttagggaccgccgcaacacgagatgttggagcagataatgcctcgaagttactgggtttagacagct

SEQ ID NO: 331556 - DNA, 75 bp, synthetic construct
  source 1..75: mol_type = other DNA
ccagcacatcagcccgtgaggcggcaacccatgcgactgatgctgcaggctcagcacgcgcagccagcacatcag

SEQ ID NO: 331557 - DNA, 75 bp, synthetic construct
  source 1..75: mol_type = other DNA
tcttaagcttgtagcggctagtgagtgtaatgatgaagagaaggggctggctctgcagtgggtttctgaattgac

SEQ ID NO: 331558 - DNA, 75 bp, synthetic construct
  source 1..75: mol_type = other DNA
gcgaacctgtagtaaagcaaatgaatgcaccagtggtggtgaagagcagcagtctggtgcgatcgccggaaccgg

SEQ ID NO: 331559 - DNA, 75 bp, synthetic construct
  source 1..75: mol_type = other DNA
agatgttccggaatgcagaagaggccgcgaaggcggtggtgaaggtgctgggtgatcgtaccatgcgcacctgta

SEQ ID NO: 331560 - DNA, 75 bp, synthetic construct
  source 1..75: mol_type = other DNA
gggtaatcagcttaacggcgtgaccgaaggttttaaaaatctgatgggggatgtgattcagggggcgaccggcgc

SEQ ID NO: 331561 - DNA, 75 bp, synthetic construct
  source 1..75: mol_type = other DNA
cagggggccaccggcgcggtggccagtctgccggcgatggtcattcagcgggccaaccccggtctgtatgacatg

SEQ ID NO: 331562 - DNA, 75 bp, synthetic construct
  source 1..75: mol_type = other DNA
agtctggtgcgatcgccggaaccggattcacgccgatgctggaagaagcggtgaaagtgaatacggagcaactgg

SEQ ID NO: 331563 - DNA, 75 bp, synthetic construct
  source 1..75: mol_type = other DNA
cgtcaacaagtgccgggcaggcctcagccagtgccaccgctgccggaaagtcggcagaaagcgccgcatcatccg

SEQ ID NO: 331564 - DNA, 75 bp, synthetic construct
  source 1..75: mol_type = other DNA
catggaatgccgaatcaggcgcttacaatgtcacccgctctggcgacagctatattctggttaacttctataccg

SEQ ID NO: 331565 - DNA, 75 bp, synthetic construct
  source 1..75: mol_type = other DNA
cgaatgataggtggggagtatggtgcattatggcgtaatgatggcgctaaaacttacctgctgcttaccaatcaa

SEQ ID NO: 331566 - DNA, 75 bp, synthetic construct
  source 1..75: mol_type = other DNA
gtgatacagcgtgcgaatcccggcctctacgacatgatcacgaatggtgtgttacaggcaaacgtggcgttcgac

SEQ ID NO: 331567 - DNA, 75 bp, synthetic construct
  source 1..75: mol_type = other DNA
tatcaagcttgtagcggctagcgagtgtgatgatgcagaaaagcagctggctcttcagtgggcttctgagttgac

SEQ ID NO: 331568 - DNA, 75 bp, synthetic construct
  source 1..75: mol_type = other DNA
atttcgcaccattctgaccgtatccagcactgccactgtggcgcttaccgtggataacaccatggtgatggccac

SEQ ID NO: 331569 - DNA, 75 bp, synthetic construct
  source 1..75: mol_type = other DNA
gggtctccacactggaacagaccactgaaaaccagcgccgagaaattgaagcagccggttttaccgttaaacccc

SEQ ID NO: 331570 - DNA, 75 bp, synthetic construct
  source 1..75: mol_type = other DNA
cgcaccccgagcaccaccgtgattgagatggtggttaacgacaccgatggcgcacagaccctccagcaattgctg

SEQ ID NO: 331571 - DNA, 75 bp, synthetic construct
  source 1..75: mol_type = other DNA
gccgcgatgtttgagctgaaatatcatcgcccgcaaaactggcaggaacttgaagcggcgcttgccgacgcctgg

SEQ ID NO: 331572 - DNA, 75 bp, synthetic construct
  source 1..75: mol_type = other DNA
atgtctcgaatttatgcttactgtcgggtatcaactctggaacagacaaccaaaaatcaacgtcgggaaatcgaa

SEQ ID NO: 331573 - DNA, 75 bp, synthetic construct
  source 1..75: mol_type = other DNA
gatttgcttcttgagcgtacacattcaggtattgcgagagcgaaagcagccgggaagcggtttggtcgaccttct

SEQ ID NO: 331574 - DNA, 75 bp, synthetic construct
  source 1..75: mol_type = other DNA
ttgctgcggtgcatacggttgccacgggcggctgttatctgacgccggatattgccattaaactggcatccggtc

SEQ ID NO: 331575 - DNA, 75 bp, synthetic construct
  source 1..75: mol_type = other DNA
aggcaatgccaaagcgaccagcgaactgcaacaggcgcaaattgtggtgcaactgggaagcagcctgacggggaa

SEQ ID NO: 331576 - DNA, 75 bp, synthetic construct
  source 1..75: mol_type = other DNA
ggcgagatggacgacactgggcttagctggcaacagcgtctgggtgactggtggcaggatgataagccgtggctg

SEQ ID NO: 331577 - DNA, 75 bp, synthetic construct
  source 1..75: mol_type = other DNA
cgcactccaaccgccacggtaattgaaatggtggttaatgataccgacggcgcgcagactctccagcaactgctg

SEQ ID NO: 331578 - DNA, 75 bp, synthetic construct
  source 1..75: mol_type = other DNA
ctgcccgtttgctgaaccgttgtatggcgagatggacgacaccgggcttggctggcaacaacgtctgggcgactg

SEQ ID NO: 331579 - DNA, 75 bp, synthetic construct
  source 1..75: mol_type = other DNA
ttcgcctctcaccccatgcatagtatttcactaccgcgtccgacgcaggatattcccgctcgctggctggtatcg

SEQ ID NO: 331580 - DNA, 75 bp, synthetic construct
  source 1..75: mol_type = other DNA
gctggcgttcagcgggccagtggcaaaccgacgctggcgattgtgggcgatctctcagcactttacgatctcaac

SEQ ID NO: 331581 - DNA, 75 bp, synthetic construct
  source 1..75: mol_type = other DNA
atgtctcgaatttttgcctattgtcgggtctccacactggaacagacgaccgaaaatcaacgtcgggaaatcgaa

SEQ ID NO: 331582 - DNA, 75 bp, synthetic construct
  source 1..75: mol_type = other DNA
tgaattatgcatatataccaaatgctacattcagccagaatatcccggacgaaatattaagattgcgtgaatcag

SEQ ID NO: 331583 - DNA, 75 bp, synthetic construct
  source 1..75: mol_type = other DNA
gcgcaggacaaaaacgtttacccggcatcgtccgttaaagcactggcagctgctgaacgctgggtcggtggtaaa

SEQ ID NO: 331584 - DNA, 75 bp, synthetic construct
  source 1..75: mol_type = other DNA
tgtgaccgtgccgaccttcggtaaatccgcttttgtggagtatgacaccgagcgtgccgtgggggctgacagtaa

SEQ ID NO: 331585 - DNA, 75 bp, synthetic construct
  source 1..75: mol_type = other DNA
tatcgcccgtggctataaaaatgccgcattcatcggcgaacgtattttccccgtcgtgcagacggacaaggaagg

SEQ ID NO: 331586 - DNA, 75 bp, synthetic construct
  source 1..75: mol_type = other DNA
accatgggggccagcgtcatgtcgctgctgaagttccacccggcgattcaggccgcgattggagccaacgagcgc

SEQ ID NO: 331587 - DNA, 75 bp, synthetic construct
  source 1..75: mol_type = other DNA
gtggcattgaggcggtacgtaacaaaaccggcctgcgcccaaacctgatgaccatgggggccagcgtcatgtcgc

SEQ ID NO: 331588 - DNA, 75 bp, synthetic construct
  source 1..75: mol_type = other DNA
cagttgttcggttcacagtacgcgatgcgtatctggatgaacccgaatgaactgaacaaattccagttaacgccg

SEQ ID NO: 331589 - DNA, 75 bp, synthetic construct
  source 1..75: mol_type = other DNA
gccaaaggcgatcacggggaaggtaaaaaaggcttcttcggttggtttaaccgcatgttcgagaagagcacgcac

SEQ ID NO: 331590 - DNA, 75 bp, synthetic construct
  source 1..75: mol_type = other DNA
ggtgctgtatctgatcatcgtggtcggcatggcctatctgttcgtgcgtctgccaagctccttcttgccagatga

SEQ ID NO: 331591 - DNA, 75 bp, synthetic construct
  source 1..75: mol_type = other DNA
tatcaaagtgcattgcttagcattggggggcgttgacctgaccagtccaccaggaaaaatgatgatgcaagtaat

SEQ ID NO: 331592 - DNA, 75 bp, synthetic construct
  source 1..75: mol_type = other DNA
tgcaggacgtggtcagaacacgggtattgcgttcgtttcgttgaaggactgggctgaccgtccgggtgatgagaa

SEQ ID NO: 331593 - DNA, 75 bp, synthetic construct
  source 1..75: mol_type = other DNA
actgaacaaataccagttaacaccagttgatgtcattaccgcaatcaaagcgcagaacgcccaggtcgcggccgg

SEQ ID NO: 331594 - DNA, 75 bp, synthetic construct
  source 1..75: mol_type = other DNA
accatcgaccacgctctcggtacgcttcatgctggtggagtccatatcaactgcccgtttgctgaaccgctgtat

SEQ ID NO: 331595 - DNA, 75 bp, synthetic construct
  source 1..75: mol_type = other DNA
agaacattacggacgttcattattgggcgcgcctttgatctggtttccggccccagccgccagtcacgaaagtgg

SEQ ID NO: 331596 - DNA, 75 bp, synthetic construct
  source 1..75: mol_type = other DNA
gacgaaaattcttccgtcgtcaccctctcctgcgcattacgcacattaaccccttctctgcgccgccatcatgtc

SEQ ID NO: 331597 - DNA, 75 bp, synthetic construct
  source 1..75: mol_type = other DNA
gccagtgaaaagtatctctttgcaatggcgaatttactgcgctggcatcctaaagatgcaattcgccggtcgtaa

SEQ ID NO: 331598 - DNA, 75 bp, synthetic construct
  source 1..75: mol_type = other DNA
gcctgggtggtctcattccacgatccactggcctgtattgaagatcccagacacagcgaattaggtgaatggctg

SEQ ID NO: 331599 - DNA, 75 bp, synthetic construct
  source 1..75: mol_type = other DNA
tgaccagcgtcggctatgaaacgcccggctccttcggcagttggtgtgctgatctgaacttgcactgtattaccg

SEQ ID NO: 331600 - DNA, 75 bp, synthetic construct
  source 1..75: mol_type = other DNA
tggctctttcggcagttggtgtgcagatctcaacttgcattgcatcaccgcagagtttccgcccatctcctccga

SEQ ID NO: 331601 - DNA, 75 bp, synthetic construct
  source 1..75: mol_type = other DNA
gtaaatcttaaagtgaagcaggctgccattagcgcaatgttcagcccccatcacccggtctgtgtggtgtcagca

SEQ ID NO: 331602 - DNA, 75 bp, synthetic construct
  source 1..75: mol_type = other DNA
tttttagtcgtagagatgcttgccaataggataattagcggggaattaaactctgctatttatatagcgccaact

SEQ ID NO: 331603 - DNA, 75 bp, synthetic construct
  source 1..75: mol_type = other DNA
cccggcggattttgttttgataactcgctgttatgaaaaaatgctcgccgccagcgagagtaacaaagcgatttc

SEQ ID NO: 331604 - DNA, 75 bp, synthetic construct
  source 1..75: mol_type = other DNA
tcatccggtctgcgtggtgtcagcgttgaccggctggggcgtggaagcgatggtggcaaccatgatgcgctgtct

SEQ ID NO: 331605 - DNA, 75 bp, synthetic construct
  source 1..75: mol_type = other DNA
gaccgggcgctgtcggtggacgagcagttctggttcggcgtgatgcagccttaccagcagcaggtactgtttgtg

SEQ ID NO: 331606 - DNA, 75 bp, synthetic construct
  source 1..75: mol_type = other DNA
tggtgtgggtgaaagcgagcaacgcgatgaagaatacactgcactgtatcgccgcatcctacccgaactggattt

SEQ ID NO: 331607 - DNA, 75 bp, synthetic construct
  source 1..75: mol_type = other DNA
caatggtgtggatctaaacagaaactttccggcggcgaactggaaggaaggtgaaactgtgtaccgctggaacag

SEQ ID NO: 331608 - DNA, 75 bp, synthetic construct
  source 1..75: mol_type = other DNA
tcaatatcgccattggttataaccctagcagctatgcatcgattaagtgagctatgtcggtatgacccacttaag

SEQ ID NO: 331609 - DNA, 75 bp, synthetic construct
  source 1..75: mol_type = other DNA
atcccttggccaagccaaacgattattgcggtcaggcggagaaatgatgattgtcatcggagataataaaacgac

SEQ ID NO: 331610 - DNA, 75 bp, synthetic construct
  source 1..75: mol_type = other DNA
tttaaagccgggtcgatatgctgcgctcgtaattggagattctgtatatgataaaaagacatatgacccagcaga

SEQ ID NO: 331611 - DNA, 75 bp, synthetic construct
  source 1..75: mol_type = other DNA
aactcttggctggccgctgattggcgatgtgctgtcacaaaccgggcagccgctgccgtgtgccgatctttggtt

SEQ ID NO: 331612 - DNA, 75 bp, synthetic construct
  source 1..75: mol_type = other DNA
cgtaatgcaatggatatcaggaaaacagtggagcaactgaccgaatctggcatcagggtgcattgcctggcatta

SEQ ID NO: 331613 - DNA, 75 bp, synthetic construct
  source 1..75: mol_type = other DNA
aggagtatccttttcttctcatcatggggtttgtaaagcaagaggcgattcatatacaaacaccgatttatctac

SEQ ID NO: 331614 - DNA, 75 bp, synthetic construct
  source 1..75: mol_type = other DNA
tatgaaaatagctgggagcaaatattcagcgcaggtgttggtgcctcctggcaaaaacattatggcacggatgtc

SEQ ID NO: 331615 - DNA, 75 bp, synthetic construct
  source 1..75: mol_type = other DNA
gcagaagtgatcgagccacgtaatattaatctggaggttgaacaagcctggacagcattaacgttacaagaatgg

SEQ ID NO: 331616 - DNA, 75 bp, synthetic construct
  source 1..75: mol_type = other DNA
atagtggtaaacatgatgtcgacttaaccaccatcgtttattcaccaccgctgaatgataactggcgcggttttg

SEQ ID NO: 331617 - DNA, 75 bp, synthetic construct
  source 1..75: mol_type = other DNA
tgaatatggcgaagttcatccaggggcagtcccttttgttgctggataagctgaatgagctcaatctcgacattg

SEQ ID NO: 331618 - DNA, 75 bp, synthetic construct
  source 1..75: mol_type = other DNA
tgttctggcacagggtgatgaaaaatcatcgccagcaggtactgttcgtcatcaatcaggcggacaaaatggaac

SEQ ID NO: 331619 - DNA, 75 bp, synthetic construct
  source 1..75: mol_type = other DNA
gcaaaaacattatggcacggatgtcgtcacccaactcggctacgggcaacgcattagttggaatgacgtgattga

SEQ ID NO: 331620 - DNA, 75 bp, synthetic construct
  source 1..75: mol_type = other DNA
caaagaacttggcgaattattacaggcgctggataaaaaaatattcccgccctactacagcgcactaatccgcct

SEQ ID NO: 331621 - DNA, 75 bp, synthetic construct
  source 1..75: mol_type = other DNA
gcgttaaagcctgtaacggttggcgatgcgctcacctattggcttgagtcgtacgcaaaggaaaagcgcacagat

SEQ ID NO: 331622 - DNA, 75 bp, synthetic construct
  source 1..75: mol_type = other DNA
caggcgtgtaaacaggcgcttaagttctgccgtaaacgtcgctacgcagtcagtaacgttctggatgatctcaac

SEQ ID NO: 331623 - DNA, 75 bp, synthetic construct
  source 1..75: mol_type = other DNA
cgaattattgcaggcactggacaaaaaaatattttccccttactacgtcgcgttaatccgcctcctgattgtctt

SEQ ID NO: 331624 - DNA, 75 bp, synthetic construct
  source 1..75: mol_type = other DNA
caggcaaagcgggacgcgttgaatctgtgggttgagcgtctcgatgtgctggctggaaatcatgaaaatattgtt

SEQ ID NO: 331625 - DNA, 75 bp, synthetic construct
  source 1..75: mol_type = other DNA
agagagacacgaccggaacgtattaagctgggaaattatcctgatctgagtctgaaagcagccagggaaaaagcc

SEQ ID NO: 331626 - DNA, 75 bp, synthetic construct
  source 1..75: mol_type = other DNA
accgtttcccacgtcccgtccactggacccgtgagtatactcacgagtgcgtggaaaaaataaaaaccctgtttc

SEQ ID NO: 331627 - DNA, 75 bp, synthetic construct
  source 1..75: mol_type = other DNA
cccgcccactggaccagagagtatactcacgagtgcgtggaaaaaataaaaaccctgtttcctcatcttcgtgat

SEQ ID NO: 331628 - DNA, 75 bp, synthetic construct
  source 1..75: mol_type = other DNA
ggcgcgaaaaatccacctgtaccactgcgaccatcgcggcctgccgctggtgcttatcagcacggaaggggcaac

SEQ ID NO: 331629 - DNA, 75 bp, synthetic construct
  source 1..75: mol_type = other DNA
aataatgtttttaacatcccatccttacaaccagaaactaaaaaaacgtcagggcgttgataataatgaatacca

SEQ ID NO: 331630 - DNA, 75 bp, synthetic construct
  source 1..75: mol_type = other DNA
gtggcggacgttgggaaaaaaccggatataagcgagcgtgtcttaagcaccaaagaactgggcgaattattgcag

SEQ ID NO: 331631 - DNA, 75 bp, synthetic construct
  source 1..75: mol_type = other DNA
atggccggggaggaggactggtcggggcgcagaaccgtctatatccgcgatgaacagggcagactggcagaaaaa

SEQ ID NO: 331632 - DNA, 75 bp, synthetic construct
  source 1..75: mol_type = other DNA
tgccagggatgcaacgagtctataaccattcccgttatctggatgcgaaacgtgatgcgctggatatgtggacgg

SEQ ID NO: 331633 - DNA, 75 bp, synthetic construct
  source 1..75: mol_type = other DNA
ccggatgaaatgtattggcaggatgcgccagttgaaggcagcagcaaagcggctgcatacgctacaggctggaac

SEQ ID NO: 331634 - DNA, 75 bp, synthetic construct
  source 1..75: mol_type = other DNA
gtcatgggagtaccgttacaccctgaacgtggtgattgaggatttcagcggagaccagaatctgttgatggcccc

SEQ ID NO: 331635 - DNA, 75 bp, synthetic construct
  source 1..75: mol_type = other DNA
ggttttgctgtggctgcgggataaccagcccgatgccatcaataatccggcgttacgggaaaagttattcacctt

SEQ ID NO: 331636 - DNA, 75 bp, synthetic construct
  source 1..75: mol_type = other DNA
gtgaacaaaccacaatccctgcgccacgcactcaataaagcggtgacttatgtccgcaataacccggacaaactg

SEQ ID NO: 331637 - DNA, 75 bp, synthetic construct
  source 1..75: mol_type = other DNA
catctgtttgtggagaacggttcgctggttgctacgggggccagctccatgtcatgggagtaccgttacaccctg

SEQ ID NO: 331638 - DNA, 75 bp, synthetic construct
  source 1..75: mol_type = other DNA
cactgacggcggtatatcaacggtcaaggcaaagccggaacctgacgagccagaagaaacgtggacggtgaaacg

SEQ ID NO: 331639 - DNA, 75 bp, synthetic construct
  source 1..75: mol_type = other DNA
acgcactcaataagtcggtgcagtacatccgggagaacccggacaagctgcatatgttcgtggacaaaggcgcag

SEQ ID NO: 331640 - DNA, 75 bp, synthetic construct
  source 1..75: mol_type = other DNA
ggtatgctgcgcgcgctggatttaagcgctgaagagaaagcggctattcgttacctgagcttcctgacgctgaaa

SEQ ID NO: 331641 - DNA, 75 bp, synthetic construct
  source 1..75: mol_type = other DNA
agcagctggggcaggtacgtctggcgattctcgaaaccaacgggcaaatcagtgtctatttctttgaagatgaca

SEQ ID NO: 331642 - DNA, 75 bp, synthetic construct
  source 1..75: mol_type = other DNA
cactgacggaagtgtgtcgagcgttgaagcagtagcggaacccgatgaacctgaagaaatgtggacggtgaaacg

SEQ ID NO: 331643 - DNA, 75 bp, synthetic construct
  source 1..75: mol_type = other DNA
cagcccgatgccatcaataatccggcgttacgggaaaaactattcacctttgaggtggatattctgcgcaacgat

SEQ ID NO: 331644 - DNA, 75 bp, synthetic construct
  source 1..75: mol_type = other DNA
ggggccgcattaattcagttccctgacatgccgccaattgctattaacggcgttggcgcggcattggggattgtg

SEQ ID NO: 331645 - DNA, 75 bp, synthetic construct
  source 1..75: mol_type = other DNA
cgtctcgagcttctccagaacaatgatgaaaaaatcgttgttatgaccccgcgaatttacacccaaaattcttga

SEQ ID NO: 331646 - DNA, 75 bp, synthetic construct
  source 1..75: mol_type = other DNA
ctgatgatgttaacgcagatgatattaattccatcatatcagcaacacaaacttctcgacgcttttcatatcgtg

SEQ ID NO: 331647 - DNA, 75 bp, synthetic construct
  source 1..75: mol_type = other DNA
ataaacaacgatccattactggtctttggtaactatcacaacgggaaaatagcctgctttatgagtgactgttca

SEQ ID NO: 331648 - DNA, 75 bp, synthetic construct
  source 1..75: mol_type = other DNA
ggtgggccggacagggcgctgtgtcattatcctcgcgagcattatctctactgggcgcgggaatttcctgaacag

SEQ ID NO: 331649 - DNA, 75 bp, synthetic construct
  source 1..75: mol_type = other DNA
gaaccaacaacgacttctcaataaaaagatatgcaagatgtccaaagcgtacagcaatttgtgtctctggtatga

SEQ ID NO: 331650 - DNA, 75 bp, synthetic construct
  source 1..75: mol_type = other DNA
aagctttttttcattacctaaagcatttactaaccatttgcataaaatatcaaatacacttcaatcttatagtaa

SEQ ID NO: 331651 - DNA, 75 bp, synthetic construct
  source 1..75: mol_type = other DNA
cggcgtaacgtcagtttcagcgataccgatttttttggtctcgatgtgactcagcctatcagtattaccctgaca

SEQ ID NO: 331652 - DNA, 75 bp, synthetic construct
  source 1..75: mol_type = other DNA
gcgctgaagagaaagcggctattcgttacttgagcttcctgacgctgaaaccaacaatgtacatcgccaacgtca

SEQ ID NO: 331653 - DNA, 75 bp, synthetic construct
  source 1..75: mol_type = other DNA
tgggactggaagagccgggtctgaaccgtgtgatccgtgccggttataaactgctgaacctgcaaacttacttca

SEQ ID NO: 331654 - DNA, 75 bp, synthetic construct
  source 1..75: mol_type = other DNA
ggtatgctgcgcgcgctggatttaagcgcagaagaaaaagctgctattcgttacctgagcttcctgacgctgaaa

SEQ ID NO: 331655 - DNA, 75 bp, synthetic construct
  source 1..75: mol_type = other DNA
gaagcggaacatgtgattgttccagcccagagagtggagaaggagaccttagtccatccagcaaacccacgaaat

SEQ ID NO: 331656 - DNA, 75 bp, synthetic construct
  source 1..75: mol_type = other DNA
aaccatgctgaacgatttaggcgtggatccgcatattgtcgaacagcttactgcccaccagatgccaggaatgca

SEQ ID NO: 331657 - DNA, 75 bp, synthetic construct
  source 1..75: mol_type = other DNA
ttcgcgagagggtacacagtaacagcgaattaaaggaaattttacgcgctatcgatggtgatgtgttcgcgcctt

SEQ ID NO: 331658 - DNA, 75 bp, synthetic construct
  source 1..75: mol_type = other DNA
aggcacacagggttattactcggggaactgaaacaggaagccagcgtgtcacaatacggcagatttacgcacaaa

SEQ ID NO: 331659 - DNA, 75 bp, synthetic construct
  source 1..75: mol_type = other DNA
aggaatgggattttaaagaaatgctctggaccgttccgaaggagcacagcaaaacgaaggtagcaatattccggc

SEQ ID NO: 331660 - DNA, 75 bp, synthetic construct
  source 1..75: mol_type = other DNA
atctatgggtagaccgtctcgagcttctccagaacaatgatgaaaaaatcgttgttatgaccccgcgaatttgca

SEQ ID NO: 331661 - DNA, 75 bp, synthetic construct
  source 1..75: mol_type = other DNA
cctggctggcggaggggaaaaatccacgccatgagcttaatcacacagtgcaggaagcgttagcacctgtaacgg

SEQ ID NO: 331662 - DNA, 75 bp, synthetic construct
  source 1..75: mol_type = other DNA
tgattggtacacaattagagacaaaagacggcattctgaccggcagaatcagtggtcataattgcaggtgctcgc

SEQ ID NO: 331663 - DNA, 75 bp, synthetic construct
  source 1..75: mol_type = other DNA
tccgcctgctaccgctggctgccctcgtgctcactgcctgttccgttaccacaccaaaaggccccggcaaaagcc

SEQ ID NO: 331664 - DNA, 75 bp, synthetic construct
  source 1..75: mol_type = other DNA
ggtaacgtgcagttagtcgacaataaaggtcagcgttataccgccgatgacgccgaagagatgattggcaaattg

SEQ ID NO: 331665 - DNA, 75 bp, synthetic construct
  source 1..75: mol_type = other DNA
aaaccaccctgaccacaccggcaggacgtgagggactttctccccgggtcagttacggaaaggaggctgagggtt

SEQ ID NO: 331666 - DNA, 75 bp, synthetic construct
  source 1..75: mol_type = other DNA
aaccatcaccactttgctacccgcgctaccagtcagcgctatgccgatcggcggctggaagctggatccttatca

SEQ ID NO: 331667 - DNA, 75 bp, synthetic construct
  source 1..75: mol_type = other DNA
ggatattcatgccacccagggcacttcgacacttgaaccaatgcaaattagctatacgccgcagacgcctgccac

SEQ ID NO: 331668 - DNA, 75 bp, synthetic construct
  source 1..75: mol_type = other DNA
acgagaagggctttcaccccgggtcagttacggaaagggcactgaggatttttcactcgtctggacagcacctgg

SEQ ID NO: 331669 - DNA, 75 bp, synthetic construct
  source 1..75: mol_type = other DNA
tgagcagggaattccggttgcactgccggcgttgaccattttattgggtaaaaccaccctgaccacgccggcagg

SEQ ID NO: 331670 - DNA, 75 bp, synthetic construct
  source 1..75: mol_type = other DNA
ccccggctggatgcagacaatgacggtgacggtttcagaggggctaagtcgtttcaatgatgtctccctgcgtca

SEQ ID NO: 331671 - DNA, 75 bp, synthetic construct
  source 1..75: mol_type = other DNA
tatgcttttctttatggcttttgaccggatgctctgcacaggaaatcgcagaatggaatcagaaaatcagtgacc

SEQ ID NO: 331672 - DNA, 75 bp, synthetic construct
  source 1..75: mol_type = other DNA
ggaaggtagcaaaaagccctcgtccgacacgccaacgcatctggcgctttaccgtcgctacgccgaaatcggtgg

SEQ ID NO: 331673 - DNA, 75 bp, synthetic construct
  source 1..75: mol_type = other DNA
ggaaggtagcaaaaagccctcgtccgacacgccaacgcatctggcgctttaccgtcgctatgccgaaattggtgg

SEQ ID NO: 331674 - DNA, 75 bp, synthetic construct
  source 1..75: mol_type = other DNA
atgggtaaaattttgcttgtcgtatcagataagggtggcgtaggcaaaagcacctatgtggctaacacaggttca

SEQ ID NO: 331675 - DNA, 75 bp, synthetic construct
  source 1..75: mol_type = other DNA
ctggcggcacaaactggtgaacgcaaagttggacgtaatgatccttgcccgtgcggttctggtaaaaaatacaag

SEQ ID NO: 331676 - DNA, 75 bp, synthetic construct
  source 1..75: mol_type = other DNA
caacgggagtatgacgtggttatccctgttgatattgatacagccgcagcccgtctgcgccgttattatggtttt

SEQ ID NO: 331677 - DNA, 75 bp, synthetic construct
  source 1..75: mol_type = other DNA
tggtaaatacccttaaccttgccgatctgatgccaaccagtacaatctggccgggcgaaaataaagccccaagcc

SEQ ID NO: 331678 - DNA, 75 bp, synthetic construct
  source 1..75: mol_type = other DNA
atggaagttggcggatgttccttcatgggtggataaaaaagcattcgcaaacgtcaagggtatgaatgaacctga

SEQ ID NO: 331679 - DNA, 75 bp, synthetic construct
  source 1..75: mol_type = other DNA
gcgtcaggggaatgactgaacctgctgaaggtcttatttctcttgtaaagaccagtaatggttggaaagcaaact

SEQ ID NO: 331680 - DNA, 75 bp, synthetic construct
  source 1..75: mol_type = other DNA
cccggagctgtgtgcaggtcgcgcgtttgccgaaagatgtgaagctggaaattgaagccatcgcagtacgtagtg

SEQ ID NO: 331681 - DNA, 75 bp, synthetic construct
  source 1..75: mol_type = other DNA
gcgcagctatggcactggcgggatgtggtgaaaaaggtgattttgagaaagcgatcaatgccaagatcgggaaga

SEQ ID NO: 331682 - DNA, 75 bp, synthetic construct
  source 1..75: mol_type = other DNA
atgacctggtcgacaaagccgtatctcatcggtgttgaccatattcaggatgtgattgatagccttggctatgcg

SEQ ID NO: 331683 - DNA, 75 bp, synthetic construct
  source 1..75: mol_type = other DNA
atgcgtaaatttttagccattgcgggccttaccgtgttgttatcaggctgcggtgaaaaaggtgattttgagaaa

SEQ ID NO: 331684 - DNA, 75 bp, synthetic construct
  source 1..75: mol_type = other DNA
attgaacaccttatgaacatggatcagaaatacgcactacctgtgctgctctatctctttcgtcgcattgaagaa

SEQ ID NO: 331685 - DNA, 75 bp, synthetic construct
  source 1..75: mol_type = other DNA
aatacgccattcagacttaatctgcatgttcgtgacctcggccacgctttcatgttcggaccaagccgtgccggt

SEQ ID NO: 331686 - DNA, 75 bp, synthetic construct
  source 1..75: mol_type = other DNA
ctcgcgcattttcactttcgataaaggtctgtcgatgtttgctacctgcaaggccgtaggcgggaagcatttcac

SEQ ID NO: 331687 - DNA, 75 bp, synthetic construct
  source 1..75: mol_type = other DNA
tgtgctggaagacggcacagaagccacgatggatcagcagttagagtatttgcaatattgcattactggcctgca

SEQ ID NO: 331688 - DNA, 75 bp, synthetic construct
  source 1..75: mol_type = other DNA
gcatttgctccattatcacgccttgatacgccatcgcgccgcagctgggctatggaatggattgaatcaatactg

SEQ ID NO: 331689 - DNA, 75 bp, synthetic construct
  source 1..75: mol_type = other DNA
gtggtcaggagttttaccccggcatcattccacgtatcgggaaaaactttgtgcaggttgttgctcttgaaggtt

SEQ ID NO: 331690 - DNA, 75 bp, synthetic construct
  source 1..75: mol_type = other DNA
cgtaaatatctggaaaataatattaatttgttagatggggccgcagggagacatatgacaccgagagagaaacgc

SEQ ID NO: 331691 - DNA, 75 bp, synthetic construct
  source 1..75: mol_type = other DNA
tgcgctggctgccacggcagtgttacagattgccagcggtgcgctgaataatcagcaggttcttgaggagaaaac

SEQ ID NO: 331692 - DNA, 75 bp, synthetic construct
  source 1..75: mol_type = other DNA
tttatgggccgtgttacgtataattccccgtatgttaccaacccaattattaaaggtgatttataaaaaacttag

SEQ ID NO: 331693 - DNA, 75 bp, synthetic construct
  source 1..75: mol_type = other DNA
gatggttttctctatttgaaaatagaagatgaagagttgagtgatatgactccaacgtttccaaagatgaagcga

SEQ ID NO: 331694 - DNA, 75 bp, synthetic construct
  source 1..75: mol_type = other DNA
gggtggtgcttgtcacaaccccgaatcgccctggcgcgactggtactcgtttagtgacgatggcacggcgctcga

SEQ ID NO: 331695 - DNA, 75 bp, synthetic construct
  source 1..75: mol_type = other DNA
gcggctgtcaggtgctgtatgcggaagataacgtggtggtatttgtccgcgtgctgaatcagcagcgtgtactgg

SEQ ID NO: 331696 - DNA, 75 bp, synthetic construct
  source 1..75: mol_type = other DNA
tattttatggaagattataacttgtggcttcgggttatcgctgctgggtataaaacttataatattccagaagtg

SEQ ID NO: 331697 - DNA, 75 bp, synthetic construct
  source 1..75: mol_type = other DNA
actgcgccggtgtggggcttctacgacgtctcctttaaaggtgagtcgttccgcttccagcgtccgtacggttct

SEQ ID NO: 331698 - DNA, 75 bp, synthetic construct
  source 1..75: mol_type = other DNA
atggtggcgatcccactgctgttcgggcgtttaacggcggcagattacgaagacaaggttgcgcaagataaacgt

SEQ ID NO: 331699 - DNA, 75 bp, synthetic construct
  source 1..75: mol_type = other DNA
tggcgcgatgatccgctggctcgatttcaacgatacctggctggcggcggagtgggggcatccttccgacaacct

SEQ ID NO: 331700 - DNA, 75 bp, synthetic construct
  source 1..75: mol_type = other DNA
tgcgctggctgccacggcggtgttacagattgccagcggcacgctgagtaatcagcaggtttttgaggagaaaac

SEQ ID NO: 331701 - DNA, 75 bp, synthetic construct
  source 1..75: mol_type = other DNA
atgtcagctcaaatcaacaacatccgcccggaattcgaccgcgaaattattgatatcgtcgattacgtaatgaac

SEQ ID NO: 331702 - DNA, 75 bp, synthetic construct
  source 1..75: mol_type = other DNA
gctctcgaatacccggcctgtaaaaaactgctggggccaattgttcctggcaccgtcgtacctaacggcgtgcgc

SEQ ID NO: 331703 - DNA, 75 bp, synthetic construct
  source 1..75: mol_type = other DNA
gtaccctgtatttattacggtgatgaagtggggctggatggcaataacgatccattttgccgtaagccattcccg

SEQ ID NO: 331704 - DNA, 75 bp, synthetic construct
  source 1..75: mol_type = other DNA
ctctggtaacggtgtttaccggtacaggtgtagcgcaggctgctgacgtaacagctcaggctgtagcgacctggt

SEQ ID NO: 331705 - DNA, 75 bp, synthetic construct
  source 1..75: mol_type = other DNA
ccatgctggcacatcccgaactggactataacctgcagtacagccattacaacggcacggtacggaaccagctgg

SEQ ID NO: 331706 - DNA, 75 bp, synthetic construct
  source 1..75: mol_type = other DNA
ttaacaaaactcgtgaagacattgccgccaaacgtggcaaaaacactgatttgacccgcttaaaagacggcatca

SEQ ID NO: 331707 - DNA, 75 bp, synthetic construct
  source 1..75: mol_type = other DNA
aactcctgaggagaagggatacctctggtcttatataattgatggcgaaaactcactaatgtgtggtcctgaaga

SEQ ID NO: 331708 - DNA, 75 bp, synthetic construct
  source 1..75: mol_type = other DNA
ggtatgcgttttcactgccgaaaatgaaagccaataaagaagttacaacggacgatgaattacgtatctggaaat

SEQ ID NO: 331709 - DNA, 75 bp, synthetic construct
  source 1..75: mol_type = other DNA
tcaccgcgcaacgtttacacccaatgcaatatttgctagtggggctttcattggtgatgttttatttgctcttgc

SEQ ID NO: 331710 - DNA, 75 bp, synthetic construct
  source 1..75: mol_type = other DNA
taatcagctcgacagccacgatactgcgcgatttaaaacgctgctcggtcgggatgttgcgcgcctgcccctggc

SEQ ID NO: 331711 - DNA, 75 bp, synthetic construct
  source 1..75: mol_type = other DNA
aaccacagtggtgactctcatgcctggtttgaccggcacaatcgtggaacgggcggcgcttgtcacaaccccgaa

SEQ ID NO: 331712 - DNA, 75 bp, synthetic construct
  source 1..75: mol_type = other DNA
gattgcgctgcgtaagaagagtcaggcactgcgtcgcggtggctgtcaggtgctgtacgcggaagataacgtggt

SEQ ID NO: 331713 - DNA, 75 bp, synthetic construct
  source 1..75: mol_type = other DNA
aactgatagagctgccgaccacggtcttcgacgatatctgcaaagcaatcgccgaagacatcgctgacgatatcg

SEQ ID NO: 331714 - DNA, 75 bp, synthetic construct
  source 1..75: mol_type = other DNA
aaactctcttcaaatcctggtttgtggattttgatccggtgattgataacgctctggatgcaggaaatccaatcc

SEQ ID NO: 331715 - DNA, 75 bp, synthetic construct
  source 1..75: mol_type = other DNA
aaaattaccgctactggtgttaaaaattcctcaacgcgattatcagttgctggagatatattaattgcaagtgct

SEQ ID NO: 331716 - DNA, 75 bp, synthetic construct
  source 1..75: mol_type = other DNA
ggataaagcggcaaacagtaaccagccgctggcgcacacggttgtggtgctcaatagtggaggcgacgccaccca

SEQ ID NO: 331717 - DNA, 75 bp, synthetic construct
  source 1..75: mol_type = other DNA
cgatgcgctgtatctcgatgaaatcacgcttaccagcgagcaggatgcagttctgcgctatggtcaggtggaagt

SEQ ID NO: 331718 - DNA, 75 bp, synthetic construct
  source 1..75: mol_type = other DNA
ggcgcattactctctaagcacctccgcacaatacagtaatagcggcgagtcggttgttttccgttatgccgcgct

SEQ ID NO: 331719 - DNA, 75 bp, synthetic construct
  source 1..75: mol_type = other DNA
ttgctgtcgccgcgatcgcggtatttgcacttttacgggagcactggtcacatctggccggctactggccttatc

SEQ ID NO: 331720 - DNA, 75 bp, synthetic construct
  source 1..75: mol_type = other DNA
ttaccttcccggagccaattgatgaagcattattgacgctggaacgcgatcgcgtggaacagcagtcgctgctat

SEQ ID NO: 331721 - DNA, 75 bp, synthetic construct
  source 1..75: mol_type = other DNA
accgctgccgccgggggctgacgttgagcggacaacgtggggcatttcggtcaataaacccaacgccgcgaaaca

SEQ ID NO: 331722 - DNA, 75 bp, synthetic construct
  source 1..75: mol_type = other DNA
ggcgtgattccattgtcaggtggcgagattttgctggatggcgtacctgttcagaaacttagccatcaccagcgc

SEQ ID NO: 331723 - DNA, 75 bp, synthetic construct
  source 1..75: mol_type = other DNA
ggcctggcccccaccataggcgctttttccgttcccggtaagcaagaacgcctgaaagccacggagcaactggaa

SEQ ID NO: 331724 - DNA, 75 bp, synthetic construct
  source 1..75: mol_type = other DNA
actcgttgcaggaagcacaggatattgcacgtagcattctggagcgcgacgtgcgtatcaacagcaatgaggaac

SEQ ID NO: 331725 - DNA, 75 bp, synthetic construct
  source 1..75: mol_type = other DNA
taaaagatgccagcgtgcagttaagtttgcgcgctcagcaactttcgatggttggtaacgatttgcgttatgccg

SEQ ID NO: 331726 - DNA, 75 bp, synthetic construct
  source 1..75: mol_type = other DNA
ttttcgcgtagccaactacatcaaaccacattttgagattggcttagccctcgacaaaaaagatttcaaaactgg

SEQ ID NO: 331727 - DNA, 75 bp, synthetic construct
  source 1..75: mol_type = other DNA
aaaccttcccgttatgtacagaacagccagttttcaccgctgaaaaaatatccacttgtggaacagttccgctat

SEQ ID NO: 331728 - DNA, 75 bp, synthetic construct
  source 1..75: mol_type = other DNA
agcaagcttgtgctgttgtcggtgggcaaacagcaatggctaggcttttaggtgtatcacctccaagcgtaaatc

SEQ ID NO: 331729 - DNA, 75 bp, synthetic construct
  source 1..75: mol_type = other DNA
ccccggacagactggcagcagtttgcccgaaaaagggctgcacactgccaccggcgctgccggggaagggggtaa

SEQ ID NO: 331730 - DNA, 75 bp, synthetic construct
  source 1..75: mol_type = other DNA
atctacaggatctggtactctgtttatgtctgtagcacaggcaaaggcagatggctacattacgtccggagatga

SEQ ID NO: 331731 - DNA, 75 bp, synthetic construct
  source 1..75: mol_type = other DNA
ctataccgatgtgtttactggtgagaagaaagcaacaagtatgtggatgcgtcatatcggcggtcataatcgctg

SEQ ID NO: 331732 - DNA, 75 bp, synthetic construct
  source 1..75: mol_type = other DNA
aacaactggtcggcctttccgggcaggcctacaaaagcggcatgtcggtgatgggctgggaagtgacttcagcgg

SEQ ID NO: 331733 - DNA, 75 bp, synthetic construct
  source 1..75: mol_type = other DNA
gaagcatggaataaccaacaaggtggtaataaatatcaggttattttcgatggcaaaatttatgaaaatgcctag

SEQ ID NO: 331734 - DNA, 75 bp, synthetic construct
  source 1..75: mol_type = other DNA
atgaaaaacgaaattaaagatctgcaaatagatattcagcgcgacgagcgtgatttagccacagtccgacaaatt

SEQ ID NO: 331735 - DNA, 75 bp, synthetic construct
  source 1..75: mol_type = other DNA
gaattttgaacatgtcgggctgaagaacagttcacttgtcactctgaaggaagctcttgtgctgaccgatggggg

SEQ ID NO: 331736 - DNA, 75 bp, synthetic construct
  source 1..75: mol_type = other DNA
gtcggtcacgggattgagaaccgtgcagaaattgaaggcattcagttaaccaatacgactgaaattaatgtggct

SEQ ID NO: 331737 - DNA, 75 bp, synthetic construct
  source 1..75: mol_type = other DNA
atgaaaaatagcttgtttagtactgattcgaatactggggtcacctttaccatctcgcctcacggccagggatgt

SEQ ID NO: 331738 - DNA, 75 bp, synthetic construct
  source 1..75: mol_type = other DNA
ccacaaccgcagccgcagccacaaccgcagccacagccacaccccacgccggataaacctgtacagaaggtctat

SEQ ID NO: 331739 - DNA, 75 bp, synthetic construct
  source 1..75: mol_type = other DNA
cgggtcaggttaataaccagggaacactggcatcactgaatgctctctcaggttatgaaacggcagaggcgagca

SEQ ID NO: 331740 - DNA, 75 bp, synthetic construct
  source 1..75: mol_type = other DNA
agtgatcgcctggcgattgatatcgccgacggtagcggagtcagcagtaacctgagtaaatcgctttccggagaa

SEQ ID NO: 331741 - DNA, 75 bp, synthetic construct
  source 1..75: mol_type = other DNA
aaaggtatccataccctggagcatctgtttgctggttttatgcgcaaccatcttaacggcaacggcgttgagatt

SEQ ID NO: 331742 - DNA, 75 bp, synthetic construct
  source 1..75: mol_type = other DNA
acgatgaagcccttaacagtcagcgaacatcggaagaattgcatcattattacgagattgtctgggacgaagagc

SEQ ID NO: 331743 - DNA, 75 bp, synthetic construct
  source 1..75: mol_type = other DNA
cggattggttttctctgtgatatccgccaggtgatcttcaaccctaatttgttcccttacgagaacatggaaggg

SEQ ID NO: 331744 - DNA, 75 bp, synthetic construct
  source 1..75: mol_type = other DNA
gacatctgaagagttgcatcattattacgagattgtctgggacgaagagcagacgcacaaattcaagaatatctc

SEQ ID NO: 331745 - DNA, 75 bp, synthetic construct
  source 1..75: mol_type = other DNA
accagcaggagggcagcgtgctgagcattgatttaggcgcggatgccagtagcccaatcattaccgccgacagcg

SEQ ID NO: 331746 - DNA, 75 bp, synthetic construct
  source 1..75: mol_type = other DNA
actcgcgtcaccgaaggcacattgtggctgacggataccggagtaattggcgtgccggatgtgtctggcctgggg

SEQ ID NO: 331747 - DNA, 75 bp, synthetic construct
  source 1..75: mol_type = other DNA
tggaccaggagaactgcctcaactttcagggattgcgctgcgatgtttgttatcgcgaatgcccgaaaattgatg

SEQ ID NO: 331748 - DNA, 75 bp, synthetic construct
  source 1..75: mol_type = other DNA
actgggcgatgttggcgcgacatctgcgcattacggtgcatgggcgcaggccgcgcaggaagatatttgtctgcg

SEQ ID NO: 331749 - DNA, 75 bp, synthetic construct
  source 1..75: mol_type = other DNA
cgccttcgtgccggatgtcgcggcgcaaaaagcgcctgccagcccgctacagggcaaagcgaatgtaatggtttt

SEQ ID NO: 331750 - DNA, 75 bp, synthetic construct
  source 1..75: mol_type = other DNA
accaccggatgcgctggataaactcaccgatccgctgatgttcgccgccgcgatggtcagcgcggataaagcaga

SEQ ID NO: 331751 - DNA, 75 bp, synthetic construct
  source 1..75: mol_type = other DNA
gcgcggcgctgtgcttttttattgccagagtgatgggccgcgaagtggtagaaaagttaacgggtaaaaccgtgc

SEQ ID NO: 331752 - DNA, 75 bp, synthetic construct
  source 1..75: mol_type = other DNA
atgaaagataaaaaccgtaaaatctggctctggcgtggcgttattgtcatcctgttgtttgccacgctgctcgca

SEQ ID NO: 331753 - DNA, 75 bp, synthetic construct
  source 1..75: mol_type = other DNA
tgtcggttattgccttttgtccctttcgatccaatcagctatgctgccggtttgacttcaatacgttttcgctcg

SEQ ID NO: 331754 - DNA, 75 bp, synthetic construct
  source 1..75: mol_type = other DNA
ccgcttacccatgccccttacgccttcacgctgatcgatgccgacagcgctattagtggggactttgacgacctg

SEQ ID NO: 331755 - DNA, 75 bp, synthetic construct
  source 1..75: mol_type = other DNA
aaccacacaggttttagaaaaaaatcactacacaactatgacaaagcaggctgtgtccaaggccttagcgtctgt

SEQ ID NO: 331756 - DNA, 75 bp, synthetic construct
  source 1..75: mol_type = other DNA
cgctggaaacgatgaaaaccaccgtcgtgctcacagcccttcccttcctcgtcattttactggtgaaagtcggcg

SEQ ID NO: 331757 - DNA, 75 bp, synthetic construct
  source 1..75: mol_type = other DNA
attaccggcgttcgcccgcaaggcccgtggggaaaactggtcgatttgatgttcctgatcgccactgtcggtgcg

SEQ ID NO: 331758 - DNA, 75 bp, synthetic construct
  source 1..75: mol_type = other DNA
gcctgcagacgtagcggatcttcgcaatctggctcgaaagatggtcgactctaagctttcagacaataagaagaa

SEQ ID NO: 331759 - DNA, 75 bp, synthetic construct
  source 1..75: mol_type = other DNA
ctggctcgaaagatggtcgactctaagctttcagacaataagaagaaattgctggtacttcagcattatggctac

SEQ ID NO: 331760 - DNA, 75 bp, synthetic construct
  source 1..75: mol_type = other DNA
tccaagcggccgaagaagtcctctcctgcaaaaggagtaactataaattcacagcgtaagctcggttattgcgag

SEQ ID NO: 331761 - DNA, 75 bp, synthetic construct
  source 1..75: mol_type = other DNA
gcacccgtttcgcatcatcaagcggccgttcggcttcgtgaaagccagatacagggggatgctgaaaaacgataa

SEQ ID NO: 331762 - DNA, 75 bp, synthetic construct
  source 1..75: mol_type = other DNA
ccaggttgttggtgagacaggaagccataactataacgatcttaatggcagtctgaacctgcgttacagttggta

SEQ ID NO: 331763 - DNA, 75 bp, synthetic construct
  source 1..75: mol_type = other DNA
tgggcgtgatgattattttccttgcctcgcatatggatgcggtggcctacactatggcggcgaccagtacgcgaa

SEQ ID NO: 331764 - DNA, 75 bp, synthetic construct
  source 1..75: mol_type = other DNA
gccgttcaagtattagttttactggctatggggttagtgatttatttagccaccagcaaatacggcaatattcgt

SEQ ID NO: 331765 - DNA, 75 bp, synthetic construct
  source 1..75: mol_type = other DNA
tccccgcgttgcgggatcgtataagcatccgtgccaaggtggagcacccgtttcgcatcatcaagcggcagttcg

SEQ ID NO: 331766 - DNA, 75 bp, synthetic construct
  source 1..75: mol_type = other DNA
aaaatcatatcagtcgagacatacttatgcctgctggtcgctgacagctggtgctaacccggcatttatagcaaa

SEQ ID NO: 331767 - DNA, 75 bp, synthetic construct
  source 1..75: mol_type = other DNA
tgctggtgaataaaaacatcgccgatagcttcctgcctgtgttaagcaaacagatggctgaaagcggtgtgacgt

SEQ ID NO: 331768 - DNA, 75 bp, synthetic construct
  source 1..75: mol_type = other DNA
cgcacgtggcccaatggggctggaagcactgaccacttacaagtggatcggcattggtgattacaccattcgtgc

SEQ ID NO: 331769 - DNA, 75 bp, synthetic construct
  source 1..75: mol_type = other DNA
aggcgcggtggaaaacaatcattgttttgctgatgttggctggtgcatttcttgccgggaacatctggagtgagc

SEQ ID NO: 331770 - DNA, 75 bp, synthetic construct
  source 1..75: mol_type = other DNA
attgaacaagggcgcattattgcccgtgatgaggctgtaaaagatgctcaagctaaagccgccaaagccgctgcc

SEQ ID NO: 331771 - DNA, 75 bp, synthetic construct
  source 1..75: mol_type = other DNA
cttgacgatgccatcgcccatattcgtgaacacggcacacaacactccgatgcgatcctgacccgcgatatgcgc

SEQ ID NO: 331772 - DNA, 75 bp, synthetic construct
  source 1..75: mol_type = other DNA
ttgatcggttttgatgccggaaatattctggttgtggctcgagttacagatatggcatttgtcgaggctgataaa

SEQ ID NO: 331773 - DNA, 75 bp, synthetic construct
  source 1..75: mol_type = other DNA
tatctgctattgggtatgtcgttggtctggagggcgaaaaaataaggataaatcttcatgaaggattgcaaggta

SEQ ID NO: 331774 - DNA, 75 bp, synthetic construct
  source 1..75: mol_type = other DNA
acatcatttatagtattgataaagaagaactcccaaaagcggttgaattaggtgtggattctcgaactaaaaccg

SEQ ID NO: 331775 - DNA, 75 bp, synthetic construct
  source 1..75: mol_type = other DNA
atacatcgacatgctgatcccgcgcggtggggctggtttgcataaactgtgccgcgaacagtcgacgatcccggt

SEQ ID NO: 331776 - DNA, 75 bp, synthetic construct
  source 1..75: mol_type = other DNA
tgtttgctgaagttctctttcttagggggcaaaacaaagcttttccaaccgtgttacttcttgaagaggcgcacc

SEQ ID NO: 331777 - DNA, 75 bp, synthetic construct
  source 1..75: mol_type = other DNA
taaacgagatgcttttagctatggtaatgttctgccattgattaagataattcaacagttatcagaggattctag

SEQ ID NO: 331778 - DNA, 75 bp, synthetic construct
  source 1..75: mol_type = other DNA
gaagcgaacgcgcagactgccgcacgctggattgaacaagggcgcataattgcccgtgatgaggctgtaaaagat

SEQ ID NO: 331779 - DNA, 75 bp, synthetic construct
  source 1..75: mol_type = other DNA
ccttgttggcagcgttttcaggctttgttcaggctgatgacgcggcaattcaacaaacgttagccaaaatgggca

SEQ ID NO: 331780 - DNA, 75 bp, synthetic construct
  source 1..75: mol_type = other DNA
caacaaacgttagccaaaatgggcatcaaaagcagcgatattcagcccgcgcccgtagctggcatgaagacagtt

SEQ ID NO: 331781 - DNA, 75 bp, synthetic construct
  source 1..75: mol_type = other DNA
cgctatcctgacgcgggatatgcgtaacgcccagcgttttgttaacgaagtggattcctccgctgtatatgttaa

SEQ ID NO: 331782 - DNA, 75 bp, synthetic construct
  source 1..75: mol_type = other DNA
cggtaattccatgctgagtgcaggaaccgcattcgtgaatgttggtggaggagagcctgaccgatgttttgtgcg

SEQ ID NO: 331783 - DNA, 75 bp, synthetic construct
  source 1..75: mol_type = other DNA
cgacgtaatgtcagtttcagcgacaccgatttttttggtctcgatgtgagtcagcccatcagcattaccctgacc

SEQ ID NO: 331784 - DNA, 75 bp, synthetic construct
  source 1..75: mol_type = other DNA
tctggtgtgcgaaagataaaaacaaagcgtttgatgatgtgatggccggtaaaagcgtcgcaccagccagttgcg

SEQ ID NO: 331785 - DNA, 75 bp, synthetic construct
  source 1..75: mol_type = other DNA
atgcaatctattaacttccgtaccgcacgcagcaatcttaccgaagtgctcaacaatgttgaagccggagaagag

SEQ ID NO: 331786 - DNA, 75 bp, synthetic construct
  source 1..75: mol_type = other DNA
gcagtaattgtcagcaaggcgactttcgaagcctacaaaaaagcggcgctggatgccgaatttgcatccctgttt

SEQ ID NO: 331787 - DNA, 75 bp, synthetic construct
  source 1..75: mol_type = other DNA
ctgccactgttagccagttgcgtaccgaagcaacaaagcttgccgcccggctggacgccgcaaagcacaccgcaa

SEQ ID NO: 331788 - DNA, 75 bp, synthetic construct
  source 1..75: mol_type = other DNA
cgcgcgcggcccgatggggctggaagcgctgaccacctacaagtggatcggcattggtgattacaccgttcgtgc

SEQ ID NO: 331789 - DNA, 75 bp, synthetic construct
  source 1..75: mol_type = other DNA
gcgcggtggcaaagaaacctgtcgcactaacgctgcaacggtggcggtgattcaggacgccctgaaatcctgcgg

SEQ ID NO: 331790 - DNA, 75 bp, synthetic construct
  source 1..75: mol_type = other DNA
ccgaacaatgtcggcaggccgtgctggcgatacgacaaaacagaatatgtgcgaaagagggcagcgcctcagatc

SEQ ID NO: 331791 - DNA, 75 bp, synthetic construct
  source 1..75: mol_type = other DNA
gtttaaaagtttagcgactttggttgctgaatttggatgtgtagctgctgaccgttctaatggaagtaaacgtga

SEQ ID NO: 331792 - DNA, 75 bp, synthetic construct
  source 1..75: mol_type = other DNA
aagaagagctaaattatacactgagggttgtccgtaatggttatccgctgaaggcaggagattattacgccatat

SEQ ID NO: 331793 - DNA, 75 bp, synthetic construct
  source 1..75: mol_type = other DNA
cgcttgcataaggctgtcattcatggtgtaacagtttatccctcggataaactgagttaccttgtagatcgctat

SEQ ID NO: 331794 - DNA, 75 bp, synthetic construct
  source 1..75: mol_type = other DNA
atgagactgcaattctctgctctgtttttctttctttactgtgtgtttgttcgtggtgtttttgccggtccgttt

SEQ ID NO: 331795 - DNA, 75 bp, synthetic construct
  source 1..75: mol_type = other DNA
gggcaggtgattgctccggcctgcacgctggccatggaagacacctggcaggcgattgatatgggggagaccccg

SEQ ID NO: 331796 - DNA, 75 bp, synthetic construct
  source 1..75: mol_type = other DNA
acggctacgcaactgtgagcttacaggtgcaggaaagcaggtctatacggcaacccgggtgcgtgtgacttttga

SEQ ID NO: 331797 - DNA, 75 bp, synthetic construct
  source 1..75: mol_type = other DNA
tactctgcgggttgtccggaatggtgagccgttaaaggcaggagattattacgcggcattacgtttcagggtgga

SEQ ID NO: 331798 - DNA, 75 bp, synthetic construct
  source 1..75: mol_type = other DNA
caataaaatggaaggtattagaacgtcagctatttatattcccagaaaaagtaaaacaagagcagttactggaag

SEQ ID NO: 331799 - DNA, 75 bp, synthetic construct
  source 1..75: mol_type = other DNA
cggctatcacacctgttacatcggcaaatggcatctcgacggtcatgactatttcggcactggcgagtgtccgcc

SEQ ID NO: 331800 - DNA, 75 bp, synthetic construct
  source 1..75: mol_type = other DNA
ggcattgccaccatccccgattttctggaggaacgttatgataaaacgacgcgtattatcatcgacttctgcttc

SEQ ID NO: 331801 - DNA, 75 bp, synthetic construct
  source 1..75: mol_type = other DNA
gttcgtgatttacaggacagttctgtcggtcctgaaaagaaattccgtctgcggttgcgtaactgtgaactggcg

SEQ ID NO: 331802 - DNA, 75 bp, synthetic construct
  source 1..75: mol_type = other DNA
aaggtatcagtctgcagatactggataatcagggctatccagcccgagtcgataaagtgatgccgccgttattac

SEQ ID NO: 331803 - DNA, 75 bp, synthetic construct
  source 1..75: mol_type = other DNA
gcgcatcccatggcagcgtaaaaacctatatgacaggctttatcctgtcgatcattctgacggtgattccgttct

SEQ ID NO: 331804 - DNA, 75 bp, synthetic construct
  source 1..75: mol_type = other DNA
ttcttattagtggcgcagtcactggcgcatttcgttctgctattggaggaacccagcgagcgttaaacgatctcc

SEQ ID NO: 331805 - DNA, 75 bp, synthetic construct
  source 1..75: mol_type = other DNA
tagcgccacatatccgcaagggtggaaaaatagtggtaagcggtcgcctggatgttcggcaatatgaccggaacg

SEQ ID NO: 331806 - DNA, 75 bp, synthetic construct
  source 1..75: mol_type = other DNA
gcggcatgcaaaaaggggtcattacccagcaagagatgaaacgggcgctcattattaccgtcgtgctcatctgtc

SEQ ID NO: 331807 - DNA, 75 bp, synthetic construct
  source 1..75: mol_type = other DNA
ccggactggcgctggtcgcagtagcgtgccatacgctgaccgattttgtcggcttcctgattctgggcggtttgt

SEQ ID NO: 331808 - DNA, 75 bp, synthetic construct
  source 1..75: mol_type = other DNA
tctcggctattggatacgttgtaggattagaaggggaaagaattaggataaacctgcatgaggggttgcaaggca

SEQ ID NO: 331809 - DNA, 75 bp, synthetic construct
  source 1..75: mol_type = other DNA
gctgagctggacaagctgattgaacgggatgacacgctttcccgacttgctgttctcaggcaggatgcgcaggac

SEQ ID NO: 331810 - DNA, 75 bp, synthetic construct
  source 1..75: mol_type = other DNA
ggagtcgacgctgggcgcccactacggagcgctcgccaccgcaggagggtgcgcggtgttagccgggaatttact

SEQ ID NO: 331811 - DNA, 75 bp, synthetic construct
  source 1..75: mol_type = other DNA
gctgggctgacattaaagaggcttttaacggcggtatcgtggggattggtaaactgctgattaactggtcgccgg

SEQ ID NO: 331812 - DNA, 75 bp, synthetic construct
  source 1..75: mol_type = other DNA
gtggccagtgaattttcagtcggcgtcattattggcggcattgtcgggagcagcttccgctcagccgtcagtggc

SEQ ID NO: 331813 - DNA, 75 bp, synthetic construct
  source 1..75: mol_type = other DNA
ttgcggctaaaggtattacgggtaaggaagcgattaaagaaattgtcgcctctctcgaagctgcaaaaggctctg

SEQ ID NO: 331814 - DNA, 75 bp, synthetic construct
  source 1..75: mol_type = other DNA
tggcgatgcgaccaatgctggaacgtactgtcaagggagcgttactgactaacctgctgtttgttttagggatat

SEQ ID NO: 331815 - DNA, 75 bp, synthetic construct
  source 1..75: mol_type = other DNA
ggtaaaatactcggtggcggactcctgcgcggtctgatgatggcaggacgcgcggtgttgtttttgggccgggcg

SEQ ID NO: 331816 - DNA, 75 bp, synthetic construct
  source 1..75: mol_type = other DNA
gttcaaggaaaagctgggtatccattcgccgagccgcgtgtttatgggctttggtgacaacatcgcgcagggtgc

SEQ ID NO: 331817 - DNA, 75 bp, synthetic construct
  source 1..75: mol_type = other DNA
cctggtaccgcttgatgttcccggtgcgatgatttcagttactacatctttaagcccatctatgcaagccaaacg

SEQ ID NO: 331818 - DNA, 75 bp, synthetic construct
  source 1..75: mol_type = other DNA
atctgcgcgaagtaaaagacgcgccggaagatgaacgcgtactggcggcaaaagagtgcaccaatatctacgcgc

SEQ ID NO: 331819 - DNA, 75 bp, synthetic construct
  source 1..75: mol_type = other DNA
ggcaaatccttgacgacgaactggaacatttggggatcagtctgaaggaagcagaaaaatatctgctgccgcgtt

SEQ ID NO: 331820 - DNA, 75 bp, synthetic construct
  source 1..75: mol_type = other DNA
tggcaagggttgatcgctcatggtctaaattcaatgacatgatgggaagaacgcgcgttcaaaaggcaatagcca

SEQ ID NO: 331821 - DNA, 75 bp, synthetic construct
  source 1..75: mol_type = other DNA
ttcggacaatcgaagcacacggagcaggggctttggaaatacaggggaatgtattgaagttaaaacaaatgaacc

SEQ ID NO: 331822 - DNA, 75 bp, synthetic construct
  source 1..75: mol_type = other DNA
taacctgcaggtgctggggcgcgtgctgggtaagctcaatcaggtgccggacgttatcgacgcgcgtcggttgca

SEQ ID NO: 331823 - DNA, 75 bp, synthetic construct
  source 1..75: mol_type = other DNA
caacttgcaggtgctggggcgcgtgctgggtaaactcaatcaggtgccggatgttatcgatgcgcgtcggttgca

SEQ ID NO: 331824 - DNA, 75 bp, synthetic construct
  source 1..75: mol_type = other DNA
aaaatcgacaatgattttgaaccgaagctaattcagaccgtacgcggcgtgggctatatgcttgaggtgccggat

SEQ ID NO: 331825 - DNA, 75 bp, synthetic construct
  source 1..75: mol_type = other DNA
cagctattaccagagtttgtgagaactaatcgctcactaaaagaattttggggatttataaaaaagactgaaaag

SEQ ID NO: 331826 - DNA, 75 bp, synthetic construct
  source 1..75: mol_type = other DNA
cgtcggatcaggaacgagctagacatttagagaacttattaattaaggttgctcgaggaggacctcgagataata

SEQ ID NO: 331827 - DNA, 75 bp, synthetic construct
  source 1..75: mol_type = other DNA
agcgtcatctgacactgttgataaagatacgctccagaaagccagcgatattatctacaaggcatatacggcgga

SEQ ID NO: 331828 - DNA, 75 bp, synthetic construct
  source 1..75: mol_type = other DNA
tcgcctctccacagtatcaggcgttagcaccagaacaaaaagtgcaggctcaggagcaatacttcaatgaagtcg

SEQ ID NO: 331829 - DNA, 75 bp, synthetic construct
  source 1..75: mol_type = other DNA
ttgacagcgacaccaacgcaattgatgtggcggtgaagcgactgcgcggcaaaatcgacaatgattttgagccaa

SEQ ID NO: 331830 - DNA, 75 bp, synthetic construct
  source 1..75: mol_type = other DNA
tgatgacaccgagtagtggcggtggtatttgggatattactcccatgcctaatactgatgtctgcataaaaatgc

SEQ ID NO: 331831 - DNA, 75 bp, synthetic construct
  source 1..75: mol_type = other DNA
aggttgatggctgcggggaaagcacagggtttgttttttggcctgccaacaatggcaacggccaatgccatgtac

SEQ ID NO: 331832 - DNA, 75 bp, synthetic construct
  source 1..75: mol_type = other DNA
tgcggcctggtttgccgacagtaacaagaaggcgttgctggctgaaattggcgtcggcacgctggatcaggcgat

SEQ ID NO: 331833 - DNA, 75 bp, synthetic construct
  source 1..75: mol_type = other DNA
aagatgcgctggcaaaacgtccaggctttcgttcattccgctgccaggattccagcctgctggcctttgattttg

SEQ ID NO: 331834 - DNA, 75 bp, synthetic construct
  source 1..75: mol_type = other DNA
aaaagtcctcatttgtactcaggtcctggagcagagcgtcgactgcgacctggacgaaatgatttccgaccttgc

SEQ ID NO: 331835 - DNA, 75 bp, synthetic construct
  source 1..75: mol_type = other DNA
gatttagtcgggtcagaagaaccggatgaacaaacgttcagtcagggatgtgcggcctggtttgccgacagtaac

SEQ ID NO: 331836 - DNA, 75 bp, synthetic construct
  source 1..75: mol_type = other DNA
tgctgaacttcaggcccggctatgccgccaatatcaacgattacctcccggaaaaactgtcgacacgtctggctg

SEQ ID NO: 331837 - DNA, 75 bp, synthetic construct
  source 1..75: mol_type = other DNA
gcttctccacacaatcagtcccatggaaactggaagccggaacgccaaatgtcgctggtgtcattggattaagcg

SEQ ID NO: 331838 - DNA, 75 bp, synthetic construct
  source 1..75: mol_type = other DNA
gacacgctccagaaagccagcgatattgtctacaaggcatatacgctggatatgagaagggcagtagcccagaaa

SEQ ID NO: 331839 - DNA, 75 bp, synthetic construct
  source 1..75: mol_type = other DNA
tgatgacgccgagtagtggtggtggaatttgggatattactcctatgcctaatacagatgtctgcataaaaatgc

SEQ ID NO: 331840 - DNA, 75 bp, synthetic construct
  source 1..75: mol_type = other DNA
ttcgcgcccagtttcccgcgctacaggatgcgggcgtctatctcgacagcgccgcgaccgcgcttaaacctgaag

SEQ ID NO: 331841 - DNA, 75 bp, synthetic construct
  source 1..75: mol_type = other DNA
ctgaatgcaccggatgataaaactatcgtctggacgcgcggcaccactgaatccatcaacatggtggcacaatgc

SEQ ID NO: 331842 - DNA, 75 bp, synthetic construct
  source 1..75: mol_type = other DNA
ttacagcctgagcgccggaaacgtccatcgcagccagtttgccgaagcccaacgcctgaccgcgcgttatgaagc

SEQ ID NO: 331843 - DNA, 75 bp, synthetic construct
  source 1..75: mol_type = other DNA
cagtcgcgccgggaaccgcattttattgaccagtaaggagttcagtctgctggagtttttccttcgtcatcaggg

SEQ ID NO: 331844 - DNA, 75 bp, synthetic construct
  source 1..75: mol_type = other DNA
agtattccctacggtcggggcctgcgcaaccagccagtatacgtgctaaatgcgcaactggaggaatgtccggtc

SEQ ID NO: 331845 - DNA, 75 bp, synthetic construct
  source 1..75: mol_type = other DNA
cgctgccgtgcatcacagctccccgattgcagtaaaatgcaacattctgaccagtacctacatccctcacccgct

SEQ ID NO: 331846 - DNA, 75 bp, synthetic construct
  source 1..75: mol_type = other DNA
gatcgctggtatgagccgcccgtcagctttaatggactggcgcgcaccttccgcgccgccgtgcatcacagttcc

SEQ ID NO: 331847 - DNA, 75 bp, synthetic construct
  source 1..75: mol_type = other DNA
ggatttcagccgcctcgtgctggattatctggtctttgccaacggctatcttgagaagcgcatgagcgtgaccgg

SEQ ID NO: 331848 - DNA, 75 bp, synthetic construct
  source 1..75: mol_type = other DNA
aaggacgggcttcagattatcccgttatcagaagtcgcagcgaaggatgagtttctgaatatcaaaaatgttagt

SEQ ID NO: 331849 - DNA, 75 bp, synthetic construct
  source 1..75: mol_type = other DNA
tggctcggtcaggaggtcatccgctttaaaaactacttgcgtattttcatgaaaggagatcactcaataacttcc

SEQ ID NO: 331850 - DNA, 75 bp, synthetic construct
  source 1..75: mol_type = other DNA
aggatgtttactggtgggtgccgtccttcaacgagccgacacctttcgcgcccggctccgtgtttcacctgctgg

SEQ ID NO: 331851 - DNA, 75 bp, synthetic construct
  source 1..75: mol_type = other DNA
tgctgccgtgcatcacagctccccgatttacgtcaaacgcaatattctggcctcgacatttatcccgcatccgtg

SEQ ID NO: 331852 - DNA, 75 bp, synthetic construct
  source 1..75: mol_type = other DNA
tacatcatgtacgtcactgatgccgtgcaggatcgcaacgatatcgaaatgctccgcgaaaacatggtgaagtcg

SEQ ID NO: 331853 - DNA, 75 bp, synthetic construct
  source 1..75: mol_type = other DNA
tgtacgtcaccgatgccgtgcaggatcgcaacgatatcgaaatgcttcgcgaaaacatggtcaagtcgaaaggcc

SEQ ID NO: 331854 - DNA, 75 bp, synthetic construct
  source 1..75: mol_type = other DNA
cctttcagttgatgggtggcaagccggagaacgtcgggtcactgggcgatattgagaaagtggcaaaggtctttg

SEQ ID NO: 331855 - DNA, 75 bp, synthetic construct
  source 1..75: mol_type = other DNA
atttacgtcaaacgtaatattctggcctcgacatttatcccgcatccatggctttcccagcaggatttcagccgc

SEQ ID NO: 331856 - DNA, 75 bp, synthetic construct
  source 1..75: mol_type = other DNA
ctccccttgatgaacactatctgattgaaccgggggaaatggtagaagaaggtacaattcctgacgaagaactgg

SEQ ID NO: 331857 - DNA, 75 bp, synthetic construct
  source 1..75: mol_type = other DNA
aatggcgaaagtcggtctgcgggaacagaaccgactttcaggtgcaaatcgtaacacactcattgcgggaggaat

SEQ ID NO: 331858 - DNA, 75 bp, synthetic construct
  source 1..75: mol_type = other DNA
caggatagcttcatggctaggttggctgaaatggaaaaggaactcagtgaggcaaaacaggctgtcattctcaac

SEQ ID NO: 331859 - DNA, 75 bp, synthetic construct
  source 1..75: mol_type = other DNA
attctgaaaaataccgaaataacgtgcgtgaactgaccccggcaattctggcggtactaccgctggaatatcgcg

SEQ ID NO: 331860 - DNA, 75 bp, synthetic construct
  source 1..75: mol_type = other DNA
cacgtaaactccaggcccgtagcgctaagggggcattgacggtcagtttactacccagtttcgccatccactggc

SEQ ID NO: 331861 - DNA, 75 bp, synthetic construct
  source 1..75: mol_type = other DNA
ggacgtcttgtttgcccgtttaatgatgttctggtcagtaaaaacgctttttatctggtttgtcatgacagccag

SEQ ID NO: 331862 - DNA, 75 bp, synthetic construct
  source 1..75: mol_type = other DNA
gcagaactgggaaaaatccccccctttcgcaaatggatcctggcaaaagccgctgctgaacaagaaaaattccgc

SEQ ID NO: 331863 - DNA, 75 bp, synthetic construct
  source 1..75: mol_type = other DNA
atggttaccacacaacaggcgcgggaatatctcgaaagccaggggattgaaataccagacgtggttttatctttg

SEQ ID NO: 331864 - DNA, 75 bp, synthetic construct
  source 1..75: mol_type = other DNA
aaggacgatttttttaatatcaaaaaagccagcgccgctgacctgctggacgcgcaccgcatcccctttcagttg

SEQ ID NO: 331865 - DNA, 75 bp, synthetic construct
  source 1..75: mol_type = other DNA
atcctcttgatgaaaactatctgattgaaccgggggaaatggtagaagaaggtacaattcccgaagaagaactgg

SEQ ID NO: 331866 - DNA, 75 bp, synthetic construct
  source 1..75: mol_type = other DNA
cggtatcggtctggcgctggtagtggcggatattgtggcgttaatttggcttttgaccaatcgacgtttacgcgc

SEQ ID NO: 331867 - DNA, 75 bp, synthetic construct
  source 1..75: mol_type = other DNA
aatatctcgaaagccaggggattgacctgccagacattatcttatctttgctggtggagcaggctaatagcgtaa

SEQ ID NO: 331868 - DNA, 75 bp, synthetic construct
  source 1..75: mol_type = other DNA
ctttatcttattggcctgttaggacttacccaggctaacaagtacgtttcctcgcaaactggtccgaacggtgca

SEQ ID NO: 331869 - DNA, 75 bp, synthetic construct
  source 1..75: mol_type = other DNA
aagaggaaatgaaaaattgtttgttgatgtttatgccaaatttatagaaccattaattattaaaaacacaggaat

SEQ ID NO: 331870 - DNA, 75 bp, synthetic construct
  source 1..75: mol_type = other DNA
gtcttatctttattagtagtgaagattcctgtggagagggtgtactggttaaaaatggaaatttgattactggtg

SEQ ID NO: 331871 - DNA, 75 bp, synthetic construct
  source 1..75: mol_type = other DNA
acctggagcaaaaccggttactacatggcggcggagattcagcgcttacgccagcagttgatcgcccctttaagt

SEQ ID NO: 331872 - DNA, 75 bp, synthetic construct
  source 1..75: mol_type = other DNA
atttatgaagaacctcgttgccccccgtggatctatgacgtcatcagggccatcactctgttcgtaagcgtaaac

SEQ ID NO: 331873 - DNA, 75 bp, synthetic construct
  source 1..75: mol_type = other DNA
atccgcgttggcggtggcgagtgggtagcgccaatcattaagacgacgcgagaaacaattaaaatatttcttgat

SEQ ID NO: 331874 - DNA, 75 bp, synthetic construct
  source 1..75: mol_type = other DNA
tctgtgaagcctgtggcacggggatttattgcagagcggcatgtacgaagtatgtttacagataccagccagatt

SEQ ID NO: 331875 - DNA, 75 bp, synthetic construct
  source 1..75: mol_type = other DNA
tctgatgtgattgctagtagtgaccataaaaacacacagtgccccgccactgatgatgagatggaccccttcgat

SEQ ID NO: 331876 - DNA, 75 bp, synthetic construct
  source 1..75: mol_type = other DNA
ggctggcttcggatattcatggccgcccgctacccagcgcccgtacgcgtaccctgctgacgctgttccgtaacg

SEQ ID NO: 331877 - DNA, 75 bp, synthetic construct
  source 1..75: mol_type = other DNA
actttcgaccagcggctctgcgtattgtgtccgcgtgtagtgcaccagccggtgccggctgtcgtaatggtaccg

SEQ ID NO: 331878 - DNA, 75 bp, synthetic construct
  source 1..75: mol_type = other DNA
atggacaaaagtggaaatatgacactcagtgtggaaaaagaggattttgttcgcgcaataacgattttaaataat

SEQ ID NO: 331879 - DNA, 75 bp, synthetic construct
  source 1..75: mol_type = other DNA
cttttacaccaaaaaagaaaactcacaccgagccaaagaaagaaaaagttaaagtcagacgtgtttatggtggag

SEQ ID NO: 331880 - DNA, 75 bp, synthetic construct
  source 1..75: mol_type = other DNA
tttgatgatagtgacgatgattttacttttacaccaaaaaagaaaactcacaccgagccaaagaaagaaaaagtt

SEQ ID NO: 331881 - DNA, 75 bp, synthetic construct
  source 1..75: mol_type = other DNA
gggccaactgattgcagccgcctgtctttactggaatcactgaaaaaggggagcccgcagaattcggaaaaaatc

SEQ ID NO: 331882 - DNA, 75 bp, synthetic construct
  source 1..75: mol_type = other DNA
caggtcaaagtaaaagatatctggcgagtaatcgaatcgctggatatgttcctgtcttatgacgtggctacgcag

SEQ ID NO: 331883 - DNA, 75 bp, synthetic construct
  source 1..75: mol_type = other DNA
atggcgtagaagaaaaatggacatataacccattatttagaatgtccagagacaagagtaagcactattcattgg

SEQ ID NO: 331884 - DNA, 75 bp, synthetic construct
  source 1..75: mol_type = other DNA
aggcgcttaacgagctgcgtcaggacggcacctacgacaagatggcgaaaaagtatttcgactttaatgtctacg

SEQ ID NO: 331885 - DNA, 75 bp, synthetic construct
  source 1..75: mol_type = other DNA
tcaccatcctgtcggctgtggcacaggctgaacgccggaggatcctagaacgcacgaatgagggccgacaggaag

SEQ ID NO: 331886 - DNA, 75 bp, synthetic construct
  source 1..75: mol_type = other DNA
aaccactgcctctccagcagacaaggaaataaccaattacttcttaacctatttattccctttaattagtggccc

SEQ ID NO: 331887 - DNA, 75 bp, synthetic construct
  source 1..75: mol_type = other DNA
accgcaccgccatgataacgacgaaggctcagacactggtgaaaccaccgaaacccggcatcccgcagacaagga

SEQ ID NO: 331888 - DNA, 75 bp, synthetic construct
  source 1..75: mol_type = other DNA
cgacggagcacagcaatggctgaaacaacatcgctacgtccgcagtgggctggtctggctgtatgcacatgacct

SEQ ID NO: 331889 - DNA, 75 bp, synthetic construct
  source 1..75: mol_type = other DNA
ctcacggatgacgtgataccacgccgccatgataacgatgaaggctcagatactggtgaaaccaccgaaaccact

SEQ ID NO: 331890 - DNA, 75 bp, synthetic construct
  source 1..75: mol_type = other DNA
gcgttcacagctggagatgctgctggggccaactgattgcagggcactgttgcaaatagtcggtggtgataaact

SEQ ID NO: 331891 - DNA, 75 bp, synthetic construct
  source 1..75: mol_type = other DNA
gctctccattaccgataaacgtcagcaggagattgctttctccgacaagttgtacgccgcagattctcgtttgat

SEQ ID NO: 331892 - DNA, 75 bp, synthetic construct
  source 1..75: mol_type = other DNA
gatcctctggctgattctgcttcccatgacgatcggctttctgtggatgtggtttcagcatccggcccagccccg

SEQ ID NO: 331893 - DNA, 75 bp, synthetic construct
  source 1..75: mol_type = other DNA
cagaagacccgatgaacatatggtatatcgttggcaccatatgtctgctctttgcgcttctcatctggctctttt

SEQ ID NO: 331894 - DNA, 75 bp, synthetic construct
  source 1..75: mol_type = other DNA
tccagcaacgcctccacggcaatttttgctcaaaagggtagcttattgaatagttttgaaggtgatgcaaccgac

SEQ ID NO: 331895 - DNA, 75 bp, synthetic construct
  source 1..75: mol_type = other DNA
tcgatggggggcatgaccgcgctaagttgcatgatctcgaccatcgttgaaggattgctcggtggcctggtacac

SEQ ID NO: 331896 - DNA, 75 bp, synthetic construct
  source 1..75: mol_type = other DNA
tattgccaatacccgtgcgataggcgcggtaatgggcggcttactcggcggtccggtcgtcggtgggctggttgg

SEQ ID NO: 331897 - DNA, 75 bp, synthetic construct
  source 1..75: mol_type = other DNA
gaatggttcggcagtgccatgcgtaacagtgcatatgtctatcccgatcatgggcgaatctggctgacgcagcgt

SEQ ID NO: 331898 - DNA, 75 bp, synthetic construct
  source 1..75: mol_type = other DNA
cctgtccctggcctcgccagcggaggctgcatgccatgcactgcttcgtttcattgaacgtgagattcttgagaa

SEQ ID NO: 331899 - DNA, 75 bp, synthetic construct
  source 1..75: mol_type = other DNA
atcgttccagcagtttttgctgacgcactaccatatggatcacgtccaggggctgttcccgctgcgctggggcgt

SEQ ID NO: 331900 - DNA, 75 bp, synthetic construct
  source 1..75: mol_type = other DNA
tggcgatccgatcccggtttacggcccgccggatgaacagggctgcgacgatctgtttaaacatccgggcctgct

SEQ ID NO: 331901 - DNA, 75 bp, synthetic construct
  source 1..75: mol_type = other DNA
agtaaatggtgtgcgactgacaccgcgtggctggtttgaatttaccgaagcctggcttcccgcgccgtcgcaatg

SEQ ID NO: 331902 - DNA, 75 bp, synthetic construct
  source 1..75: mol_type = other DNA
ggatggctggagtggcaggcgcaatcaggacgcggaaaacgcgggcacctgcgttttctggtgacaccgggatcc

SEQ ID NO: 331903 - DNA, 75 bp, synthetic construct
  source 1..75: mol_type = other DNA
ataactccaccgctttttgaaaaagatttgggaaccagttgccagcatccagtgcaaatcactatcggtaaaccc

SEQ ID NO: 331904 - DNA, 75 bp, synthetic construct
  source 1..75: mol_type = other DNA
tcaactatcactatcgcattagtgcccctcccggcgtgaacggtgtgcgactgacaccgcgcggctggtttgaat

SEQ ID NO: 331905 - DNA, 75 bp, synthetic construct
  source 1..75: mol_type = other DNA
ccactggatcaagcagacctcatgatgggcgacagattaattggcgaagcaccggaatatacccttgaacagtgg

SEQ ID NO: 331906 - DNA, 75 bp, synthetic construct
  source 1..75: mol_type = other DNA
cgctggtttatcacctacccgtggaacttcacgccatggcagaacagctacgaacgacgctggcagaagaaggtt

SEQ ID NO: 331907 - DNA, 75 bp, synthetic construct
  source 1..75: mol_type = other DNA
caacacttatgcccgttgagcatgaggctgttgatatcaaggagtttctcgacgccatgaaactaaatcagtgtg

SEQ ID NO: 331908 - DNA, 75 bp, synthetic construct
  source 1..75: mol_type = other DNA
accctgatcgacgccgggcggcacgatctcgccgatcgctggtcgcccggatcgttccagcagtttttgctgacg

SEQ ID NO: 331909 - DNA, 75 bp, synthetic construct
  source 1..75: mol_type = other DNA
tggtgattgattgcagccacccaccgcgcgaggatgcaccgcgtaatcactgtgatttaaacaccgtgctggcgc

SEQ ID NO: 331910 - DNA, 75 bp, synthetic construct
  source 1..75: mol_type = other DNA
atctcaccgatcgctggtcgcctggatcgttccagcagtttttgctgacgcactaccatatggatcacgtccaag

SEQ ID NO: 331911 - DNA, 75 bp, synthetic construct
  source 1..75: mol_type = other DNA
atggataagttgctgaacaaaaagataaaagttaagcagtctaacgagcttaccgaagctgcttactacctctcg

SEQ ID NO: 331912 - DNA, 75 bp, synthetic construct
  source 1..75: mol_type = other DNA
aggatggctcagtaattggggcggctaataataaacaaacaatttatgcctctgcttcggcacaaggcacaaggc

SEQ ID NO: 331913 - DNA, 75 bp, synthetic construct
  source 1..75: mol_type = other DNA
aaatgaaaaaggtagtgcgacagggatatctctggaagcgaccacgggaaataatttaacgctcaatggtacaac

SEQ ID NO: 331914 - DNA, 75 bp, synthetic construct
  source 1..75: mol_type = other DNA
tttcttgatgatccgatggtatgtgcaccaattactttctatctgctgtatcgcattacgcagcttctggacggt

SEQ ID NO: 331915 - DNA, 75 bp, synthetic construct
  source 1..75: mol_type = other DNA
tcctgtcgtccctcttactgtggttgcaggggcgttatttctggcgggggtttatatcagcaagctgatctggct

SEQ ID NO: 331916 - DNA, 75 bp, synthetic construct
  source 1..75: mol_type = other DNA
gatgcaagcgtatgtgcgccaatctcgttttatctgctgtaccgcattaccagcctgcttgacgggcgacgcctg

SEQ ID NO: 331917 - DNA, 75 bp, synthetic construct
  source 1..75: mol_type = other DNA
tcttcatctatcgtctttcacgcgaagttagctgggatactgcagaagtaaatgcagcccttagcaagtttgtgt

SEQ ID NO: 331918 - DNA, 75 bp, synthetic construct
  source 1..75: mol_type = other DNA
cgaagtgctgccccgctcgcttatcgcctcgcaggtatgggacatgaattttgacagcgataccaacgctattga

SEQ ID NO: 331919 - DNA, 75 bp, synthetic construct
  source 1..75: mol_type = other DNA
agcattcagcgattttgtctataacaagctgaaaacaattcgtaagctgaacgggctggttattccggcaactca

SEQ ID NO: 331920 - DNA, 75 bp, synthetic construct
  source 1..75: mol_type = other DNA
ttgattatctatatcacacagagcttagagaggcactttctcttcgtgaaaacgtatatggcttgagtggacatc

SEQ ID NO: 331921 - DNA, 75 bp, synthetic construct
  source 1..75: mol_type = other DNA
aaatccgaagcttatcaacaaaaattgtgggaaaaaattgacgctgacacacgtgctcaggcgaaagccatgggt

SEQ ID NO: 331922 - DNA, 75 bp, synthetic construct
  source 1..75: mol_type = other DNA
gccgcagttcagcctctgtttgacgacttcaaaaaaagatccaaaacaagctgctttgttagagaagttcgacaa

SEQ ID NO: 331923 - DNA, 75 bp, synthetic construct
  source 1..75: mol_type = other DNA
tagatttagaaaaagctgtaaaattgttagagcaggctacaattacagaaaaaatgactcagatggttggaaagc

SEQ ID NO: 331924 - DNA, 75 bp, synthetic construct
  source 1..75: mol_type = other DNA
tcgaaaaatgtgtaatcagttacttaaaatcagcagggcttgggaagcgactagccttaaaggaaaaagtgaaag

SEQ ID NO: 331925 - DNA, 75 bp, synthetic construct
  source 1..75: mol_type = other DNA
ccgttactcctgcggcgatagagatcgaaaaacgcgcgattgaaagagagaaaaaagggcaattccgcattgccg

SEQ ID NO: 331926 - DNA, 75 bp, synthetic construct
  source 1..75: mol_type = other DNA
ccaccagcaactctctgcggcgttaacgggttacgcgctggtactgccacaagaagatgaagaagagagctggtt

SEQ ID NO: 331927 - DNA, 75 bp, synthetic construct
  source 1..75: mol_type = other DNA
ggcgttaatcaggcccggctattaacgctggaaaaagaagtgaaaaagctcggcgaagaaggtgcggcgctacgt

SEQ ID NO: 331928 - DNA, 75 bp, synthetic construct
  source 1..75: mol_type = other DNA
acaacaatcgctaaactggttaacgcgtctggacgaattgcagcaagaagccagccgccgtcagcaggccttgca

SEQ ID NO: 331929 - DNA, 75 bp, synthetic construct
  source 1..75: mol_type = other DNA
gaacagacactaacgcaactggaacagctcaagcagaatctggaaaaccagcgtcgtcaggcgcaaacgctggcc

SEQ ID NO: 331930 - DNA, 75 bp, synthetic construct
  source 1..75: mol_type = other DNA
gcagccgcaggacgatattcaaccatggcttgccacccaggaagagcatgaaaagcaactgcaattactcaatca

SEQ ID NO: 331931 - DNA, 75 bp, synthetic construct
  source 1..75: mol_type = other DNA
agtgcaatcgctgacagaaagtttgcaggcacttactgacgaagaaaaacagttacttgtcgcgcaacagcaaga

SEQ ID NO: 331932 - DNA, 75 bp, synthetic construct
  source 1..75: mol_type = other DNA
cggtggaacttttggcttttctgcattagcgattgagttaccgctttcaacaacaattatgcttcgttcagttgc

SEQ ID NO: 331933 - DNA, 75 bp, synthetic construct
  source 1..75: mol_type = other DNA
aaatctcttaacgagtgcacgttctgatgtgcaatctctacaatatagaactatttcagaaatatcccttggtaa

SEQ ID NO: 331934 - DNA, 75 bp, synthetic construct
  source 1..75: mol_type = other DNA
ttgctagtgcgaacgcgagtacttcgacatcgacagtctatgacttaggcagcatgtcgaaagacgaagtagttc

SEQ ID NO: 331935 - DNA, 75 bp, synthetic construct
  source 1..75: mol_type = other DNA
gagtagctctgacaagaatgcgaaagctcaacttcctgatgaagtgatttcatatataaatgatcctcgcaatga

SEQ ID NO: 331936 - DNA, 75 bp, synthetic construct
  source 1..75: mol_type = other DNA
gcgtgttaacccctcggattacggtaactttgattcccgttatgtgaaagatgttcgacttggttcacagcaata

SEQ ID NO: 331937 - DNA, 75 bp, synthetic construct
  source 1..75: mol_type = other DNA
aatcgcaagcacggcttatgttatggctgcgatcgctgccctcgtggactcgtcgcctgacgcactgaatacgct

SEQ ID NO: 331938 - DNA, 75 bp, synthetic construct
  source 1..75: mol_type = other DNA
gtattgtctggtattaatgttcaggatacagggtctaactctgccgataatatagcgggcgtttattacagaccc

SEQ ID NO: 331939 - DNA, 75 bp, synthetic construct
  source 1..75: mol_type = other DNA
tggaagcggtaccgggtatccggccggttaatacacatctgcccgggaaaatcaccacactctatccgtcagagc

SEQ ID NO: 331940 - DNA, 75 bp, synthetic construct
  source 1..75: mol_type = other DNA
cccgtgaaggcttcaaaattgcccacgacatcagctcctacagcttcgttgcaatggcaaaagcttgccgctcca

SEQ ID NO: 331941 - DNA, 75 bp, synthetic construct
  source 1..75: mol_type = other DNA
ttctggtaaccggtgttgccagcaaactatccatcgcctacggtatcgctcaggcgatgcaccgcgaaggagctg

SEQ ID NO: 331942 - DNA, 75 bp, synthetic construct
  source 1..75: mol_type = other DNA
aaatctcttaacaagtgctcgtgccgatatgcagtcactgcaatacagaactatttcagcaatagcccttggtaa

SEQ ID NO: 331943 - DNA, 75 bp, synthetic construct
  source 1..75: mol_type = other DNA
atttttgccgataaaaacgtgagggtgggctttccgccggcactgaacggcaggctgcgggtgcagagcaccggc

SEQ ID NO: 331944 - DNA, 75 bp, synthetic construct
  source 1..75: mol_type = other DNA
gcgtatcgtgtatgacggagacgtgagtacggtcagccgtgctgccgggagtgatgtacagactgtgaaaagtcg

SEQ ID NO: 331945 - DNA, 75 bp, synthetic construct
  source 1..75: mol_type = other DNA
agcgatgaaagagcgtattcctgtgcagatcaaagtgaagaagatcaacggcctgggctacagcaaactggaaag

SEQ ID NO: 331946 - DNA, 75 bp, synthetic construct
  source 1..75: mol_type = other DNA
aacaactaccagaagatgatgaagatcctaacgagggcggcgaagtcgatcctacctccgaagaaacaactaccc

SEQ ID NO: 331947 - DNA, 75 bp, synthetic construct
  source 1..75: mol_type = other DNA
acattatcacaatacttctatcaattaagacaagtattaagaagtattcccacatcaagttatgttgaactattt

SEQ ID NO: 331948 - DNA, 75 bp, synthetic construct
  source 1..75: mol_type = other DNA
accggtggtgcgcttggcgcggcgcgtctggcttgtctagccgcaggtaaaccgctgacggcggtctgcgaaaaa

SEQ ID NO: 331949 - DNA, 75 bp, synthetic construct
  source 1..75: mol_type = other DNA
ctcgcccgccatccgcagattcagcagcgcgccctgaaccggctctggatatgggccggggtggcgcagggcggc

SEQ ID NO: 331950 - DNA, 75 bp, synthetic construct
  source 1..75: mol_type = other DNA
taatgcgggaattagcccctcagaaagaaatgatacggaatatcagtccattcattatttttctaaagatgcaga

SEQ ID NO: 331951 - DNA, 75 bp, synthetic construct
  source 1..75: mol_type = other DNA
aatccccgtagcagtagtgcagcaaactttatcccaatacttctaccaactaagacaagtattaagaagtatccc

SEQ ID NO: 331952 - DNA, 75 bp, synthetic construct
  source 1..75: mol_type = other DNA
aacagctcatcacttatctgctcgtgttatgtcattaagtgcattaactacgagttattctgatttctggaaatc

SEQ ID NO: 331953 - DNA, 75 bp, synthetic construct
  source 1..75: mol_type = other DNA
ccgaagagattaggtgatttgcagggacaatatttatccctggaaatgtggcatgaaactaaccagcaaaaagac

SEQ ID NO: 331954 - DNA, 75 bp, synthetic construct
  source 1..75: mol_type = other DNA
caaaaggtgtggctcatactaacggagtgagaacatattgttttaattcatatgatctacttattcgtgtatcgg

SEQ ID NO: 331955 - DNA, 75 bp, synthetic construct
  source 1..75: mol_type = other DNA
gcagcattttgcacgtattgcgacggtgttactgccgaaagactatttgcgcttcaaaatgactggcaaaaaagt

SEQ ID NO: 331956 - DNA, 75 bp, synthetic construct
  source 1..75: mol_type = other DNA
ggcgcattatcactagaaaagggattgctggtattttgcatcctgagggtatatatgatgatccaaaaggtggtg

SEQ ID NO: 331957 - DNA, 75 bp, synthetic construct
  source 1..75: mol_type = other DNA
ctcgaagagctgcttaccatttatcgcgttcagttcccggttatgcgccagtacaaagcggatacctggtacgat

SEQ ID NO: 331958 - DNA, 75 bp, synthetic construct
  source 1..75: mol_type = other DNA
tcccccttgtggtggtggccgactgctggctgcagcgtctgcttgtgtggacgccgggccagaccgaccttatca

SEQ ID NO: 331959 - DNA, 75 bp, synthetic construct
  source 1..75: mol_type = other DNA
gttgaggactggggttatcttaattcgctgattggctccaaagagggtgacaaattccgtaaattcgcccagggg

SEQ ID NO: 331960 - DNA, 75 bp, synthetic construct
  source 1..75: mol_type = other DNA
tggctctcactgtgacggtggagcagattcagcaagagttagcgcaaactcaccaaaagttgcgtgaaaacacca

SEQ ID NO: 331961 - DNA, 75 bp, synthetic construct
  source 1..75: mol_type = other DNA
tccggcggagagagttttctcgtcagtctggcactggcgctggcgctttcggatctggtcagccataaaacgcgc

SEQ ID NO: 331962 - DNA, 75 bp, synthetic construct
  source 1..75: mol_type = other DNA
agcctggcgttaatcagtctcgattactggcgctggaaaacgaagttaaaaagctcggcgaagaaggtgcggcgc

SEQ ID NO: 331963 - DNA, 75 bp, synthetic construct
  source 1..75: mol_type = other DNA
aggaaaatgaagaagagagctggttagcgacacgtcagcaagaagcgcagagctggcaacagcgtcagaacgaat

SEQ ID NO: 331964 - DNA, 75 bp, synthetic construct
  source 1..75: mol_type = other DNA
aaacgttgcagcaacaggaggctctggcagcgcaaagtctgcaaaaagcccaggcgcagtttgacaccgcgctac

SEQ ID NO: 331965 - DNA, 75 bp, synthetic construct
  source 1..75: mol_type = other DNA
gtttagtttaaattatgaattaaaaaaatcatttgtttgtccaattaatgatgaaaccgtattaattcattatgt

SEQ ID NO: 331966 - DNA, 75 bp, synthetic construct
  source 1..75: mol_type = other DNA
ttgccatgtatttccgttttgtaattgcagattactttattgatcaacaagataagatcctttacctggatgctg

SEQ ID NO: 331967 - DNA, 75 bp, synthetic construct
  source 1..75: mol_type = other DNA
gctaaagcgatgtcgatgcttgctgataaagccgtcgtttcccgtttaacctatatggatcaagatatccttaat

SEQ ID NO: 331968 - DNA, 75 bp, synthetic construct
  source 1..75: mol_type = other DNA
gtgggtaggatcaaagaactgcgttttgcacgctgggaagatatcgattttgagacaaaattgtgggagatcccg

SEQ ID NO: 331969 - DNA, 75 bp, synthetic construct
  source 1..75: mol_type = other DNA
ttctcaccacattattcgcagcggagaaccattgtctgtcaccttcagagataagccagaaacttcagtttacca

SEQ ID NO: 331970 - DNA, 75 bp, synthetic construct
  source 1..75: mol_type = other DNA
gtcgcaagcatttaattattacgcatggtaatagatactatgcgtctgtgctattgagcaacgtttctgggatac

SEQ ID NO: 331971 - DNA, 75 bp, synthetic construct
  source 1..75: mol_type = other DNA
gaaaacatggtcaagtcgaaaggccgcaacaactttaaaaatctgtttctctatgccccacagggaaaagccgac

SEQ ID NO: 331972 - DNA, 75 bp, synthetic construct
  source 1..75: mol_type = other DNA
ctgatgtggtatttaccatcgcatccgatgacttgtggatcgaaagttcagcgatccaacaattacacaccacgg

SEQ ID NO: 331973 - DNA, 75 bp, synthetic construct
  source 1..75: mol_type = other DNA
gatgtttactggtgggtgccgtccttcaacgagccgacacctttcgcgcccggctccgtgtttcacctgctggag

SEQ ID NO: 331974 - DNA, 75 bp, synthetic construct
  source 1..75: mol_type = other DNA
ggcctggctgttagtcgccctattgagtacgacgctggcgttgttgctgtactgtgcagcgttatcctctcctca

SEQ ID NO: 331975 - DNA, 75 bp, synthetic construct
  source 1..75: mol_type = other DNA
gttgtgttcctaaacactatattatctggctgcttatttccgtattgctggcagtaaaagcattcgctttttcac

SEQ ID NO: 331976 - DNA, 75 bp, synthetic construct
  source 1..75: mol_type = other DNA
tttgtgctggattttctggtgttcggtaatgcatttctggaaaagcgttacagcaccaccggtaaggtcatcaga

SEQ ID NO: 331977 - DNA, 75 bp, synthetic construct
  source 1..75: mol_type = other DNA
ccctgtatctcgatggccgccgtgaaatgatgcaatggtacgctgattacattgattcactctccagccgggaaa

SEQ ID NO: 331978 - DNA, 75 bp, synthetic construct
  source 1..75: mol_type = other DNA
gcaaaaccaggaggatgtgaacaacctccgcaacgcgatgaaaagcgccaaaggtccaggcaacttccgcaacct

SEQ ID NO: 331979 - DNA, 75 bp, synthetic construct
  source 1..75: mol_type = other DNA
ttcctggttcggggaagtcctatgaagttgtcagtaatgtgattgtgcctgccatttgtgaagggcgtcgtgttg

SEQ ID NO: 331980 - DNA, 75 bp, synthetic construct
  source 1..75: mol_type = other DNA
cagcatccgtggcgcagctcgctgggttccatcggcggcggcaatcacttcgctgaactgcaacagattgatcaa

SEQ ID NO: 331981 - DNA, 75 bp, synthetic construct
  source 1..75: mol_type = other DNA
ctggaaacctcaccggcaaaatatacccgccgtggggtggaggaggatgtttactggtgggtgccgtccttcaac

SEQ ID NO: 331982 - DNA, 75 bp, synthetic construct
  source 1..75: mol_type = other DNA
aaagggacgttccacgaagtctggtcgctgcgctgggaaccggcactggcaatgaacatcattaccgccagccgt

SEQ ID NO: 331983 - DNA, 75 bp, synthetic construct
  source 1..75: mol_type = other DNA
gcagaaccaggaagatgtgaacaacctccgcaacgcgatgaaaagcgccaaaggtccaggcaacttccgcaacct

SEQ ID NO: 331984 - DNA, 75 bp, synthetic construct
  source 1..75: mol_type = other DNA
gctacaggcacggttcatggagttgaacgagtgggcgggtgaagaaattatccgcttcgaaaaatatagcctcgg

SEQ ID NO: 331985 - DNA, 75 bp, synthetic construct
  source 1..75: mol_type = other DNA
gcacccgcttttatcacaacaggatttcagccgcttcgcactcgatttcctggtgtttggcaacgcctttttaga

SEQ ID NO: 331986 - DNA, 75 bp, synthetic construct
  source 1..75: mol_type = other DNA
ctcggcgacatcgagaaggtggcgaaggtgtttgtccgtaacgagctcataccgttacaggaccggatgcgcgag

SEQ ID NO: 331987 - DNA, 75 bp, synthetic construct
  source 1..75: mol_type = other DNA
acaacacaggaggatttggagatgtaacaaaagcagcacaagtctttgtacgcaacgagctaacgttcctccaag

SEQ ID NO: 331988 - DNA, 75 bp, synthetic construct
  source 1..75: mol_type = other DNA
taatatcaaaaaagccagcgccgctgacctgctggacgcgcaccgcatcccctttcagttgatgggtggcaagcc

SEQ ID NO: 331989 - DNA, 75 bp, synthetic construct
  source 1..75: mol_type = other DNA
tgagcgaagtcgccacgaaggatgacttttttaatatcaagaaagtcagcgccgctgacctgcttgacgcacacc

SEQ ID NO: 331990 - DNA, 75 bp, synthetic construct
  source 1..75: mol_type = other DNA
cgatgacctgtggatcgaaagttcagcgatccaacaattacataccacggcaaatttacccaacatgcaacgcgt

SEQ ID NO: 331991 - DNA, 75 bp, synthetic construct
  source 1..75: mol_type = other DNA
gggcgtaaatgggggcgcaccgagtgtaaagggcgtctggcagcgaaatacacggcgacgcaactctcgcgtact

SEQ ID NO: 331992 - DNA, 75 bp, synthetic construct
  source 1..75: mol_type = other DNA
ggagatgtggagaaggccagtctggtatttgtacgtaatgaattaatttatctacaagggcgattaaaagaagtt

SEQ ID NO: 331993 - DNA, 75 bp, synthetic construct
  source 1..75: mol_type = other DNA
gtaacgcctacctggagaaacgcacgaaccgattcggtgaagttatcgcccttgagcctgccctggcaaaataca

SEQ ID NO: 331994 - DNA, 75 bp, synthetic construct
  source 1..75: mol_type = other DNA
cgcagcgctggtgagatcccggaagacgagcatatctcacgcctgtcgccactgatgtacggtcatatcaacatg

SEQ ID NO: 331995 - DNA, 75 bp, synthetic construct
  source 1..75: mol_type = other DNA
gcaaaaccaagaggatgtgaacaacctccgcaacgcgatgaaaagcgccaaaggtccgggcaacttccgcaacct

SEQ ID NO: 331996 - DNA, 75 bp, synthetic construct
  source 1..75: mol_type = other DNA
ggcggttttgtttaaaccgcaggttattcttttgtttatttttcttatattgctttctgtttatctcttctttag

SEQ ID NO: 331997 - DNA, 75 bp, synthetic construct
  source 1..75: mol_type = other DNA
cgtagaaatacgtgttaagacacacaaacaatcaacagctaaaacaaaaaaagacgtagacgatattgctaaaaa

SEQ ID NO: 331998 - DNA, 75 bp, synthetic construct
  source 1..75: mol_type = other DNA
atgttagaccttaccgtcagccgcttatcaaacgttgtcaccttccaggttgatcgaccatcattagagaaagca

SEQ ID NO: 331999 - DNA, 75 bp, synthetic construct
  source 1..75: mol_type = other DNA
ctaatctcactcctgatcaatataaaggcgctggcaccggaacaactaagccagataacagcaattccctggtta

SEQ ID NO: 332000 - DNA, 75 bp, synthetic construct
  source 1..75: mol_type = other DNA
agcagcacgtaaagagaaagcagaattaaaactcctcgatgtgtcaagctctatcagtgcaatgcaccgcctttc

SEQ ID NO: 332001 - DNA, 75 bp, synthetic construct
  source 1..75: mol_type = other DNA
aggatctaaaagacttcgctaataatccggcaggtttaataagtaaagcaacacaaggaatggtggcgaaaggtt

SEQ ID NO: 332002 - DNA, 75 bp, synthetic construct
  source 1..75: mol_type = other DNA
acaccggataatagtaactctctgtttaatactattaagggattgtttgttagtggtgatgattcttcttccagt

SEQ ID NO: 332003 - DNA, 75 bp, synthetic construct
  source 1..75: mol_type = other DNA
ctcctgacggatgtggtcaatttgcttgtgaaacgcgccgtttttcataagcaaatcaccaccgtagatgaatta

SEQ ID NO: 332004 - DNA, 75 bp, synthetic construct
  source 1..75: mol_type = other DNA
ttctggcattaccgctgttatgcacaacagcgcaggcaaacagttttcttcattatgctggggagtttaacttcc

SEQ ID NO: 332005 - DNA, 75 bp, synthetic construct
  source 1..75: mol_type = other DNA
cagggaacgaataatacccaaatcgcaagcacggctttcgttatggctgcgattgccgcccttgtagattcgtca

SEQ ID NO: 332006 - DNA, 75 bp, synthetic construct
  source 1..75: mol_type = other DNA
cgctggcgctacgtatatggctatgagcaaagcctctgaatttatggctaatagctttgcgaatgctgaaacaga

SEQ ID NO: 332007 - DNA, 75 bp, synthetic construct
  source 1..75: mol_type = other DNA
cctgctgtccgttcagctggttccgcagttcgtcaaaatcatcccgccggagaaagcccgtggtgcccttgccat

SEQ ID NO: 332008 - DNA, 75 bp, synthetic construct
  source 1..75: mol_type = other DNA
gctcgtcaggatgcactgaaagactacatcagtatcataaaacaccctgaagcagatttaatttatcgggctatt

SEQ ID NO: 332009 - DNA, 75 bp, synthetic construct
  source 1..75: mol_type = other DNA
gcgctctgttatttggaggcgctacagcggctgctggcgtgatggctatgagtaaagcaaacgaattcgttgcta

SEQ ID NO: 332010 - DNA, 75 bp, synthetic construct
  source 1..75: mol_type = other DNA
cgttttatttgctctatctggggagtaaaattctctacgcgaccctgaagggtaaaaataacgaggccaaatccg

SEQ ID NO: 332011 - DNA, 75 bp, synthetic construct
  source 1..75: mol_type = other DNA
cgtcgcgatgtcccgtttcaaaaaaccgcctggtttactcccactcgcaaaatgaatgccgacgatgtggtgttt

SEQ ID NO: 332012 - DNA, 75 bp, synthetic construct
  source 1..75: mol_type = other DNA
atacccttgccgcccagttttatgatcgactgctggatgtcgatccctatacctatcgcctgatgccagaacttg

SEQ ID NO: 332013 - DNA, 75 bp, synthetic construct
  source 1..75: mol_type = other DNA
gacggttccagaaccacaaaggcaacgcatctttcaaattatgtctgccgttacagtaaagatatttacccgctt

SEQ ID NO: 332014 - DNA, 75 bp, synthetic construct
  source 1..75: mol_type = other DNA
attcctttggctgctgaagccatcgagaaaggcgcggcggcgcttaatccacgcggcgaacgttacactccagcg

SEQ ID NO: 332015 - DNA, 75 bp, synthetic construct
  source 1..75: mol_type = other DNA
tcgtacgctgcgcgtcgcggcaggtttcgacgttgccgataacgaaattgtccggcagtgtgaagcgggcgattt

SEQ ID NO: 332016 - DNA, 75 bp, synthetic construct
  source 1..75: mol_type = other DNA
tagagttgtgtgatatccccgatattgatgaaactttaaaaaataaaattcaacaatcaattcgttcattacacg

SEQ ID NO: 332017 - DNA, 75 bp, synthetic construct
  source 1..75: mol_type = other DNA
ggtgatcaaggggctagaaaatacctggatcagatgaaagatgttagggaacgtgccgcaaaatcctacagtgaa

SEQ ID NO: 332018 - DNA, 75 bp, synthetic construct
  source 1..75: mol_type = other DNA
ggggctagaaaatacctggatcagatgaaagatgtgcgtgaacgtgccgcaaaatcttacagtgaagctgaatta

SEQ ID NO: 332019 - DNA, 75 bp, synthetic construct
  source 1..75: mol_type = other DNA
tggcagcgcgtattgaagcctatgacgaagcgcagagtattctggcgcaggaattacctattctgccgctggcgt

SEQ ID NO: 332020 - DNA, 75 bp, synthetic construct
  source 1..75: mol_type = other DNA
cgacccattatgcttcggtcatgtcggcagaatatgcagggaagttagagaaagaagatcgccaggagcaactcg

SEQ ID NO: 332021 - DNA, 75 bp, synthetic construct
  source 1..75: mol_type = other DNA
gataatgaggctaagattaccgaatacaatccggcaaaatcgcgcgaacaactgaaagcgttagggctggaaaac

SEQ ID NO: 332022 - DNA, 75 bp, synthetic construct
  source 1..75: mol_type = other DNA
ggcatatcagtacctcaagcttcgctggatcttagtgaatatactaagttagcccccgataatcttgagtacgat

SEQ ID NO: 332023 - DNA, 75 bp, synthetic construct
  source 1..75: mol_type = other DNA
ataagcaagacagccaaaaaggacggcaaggtgcgagatggggccaagagcgtcgccttgaatttattgattatc

SEQ ID NO: 332024 - DNA, 75 bp, synthetic construct
  source 1..75: mol_type = other DNA
aggtcttgaattacttaagcttgatccagagtcacttaaacaatcatttggcgacaagcttgttgatgcagccaa

SEQ ID NO: 332025 - DNA, 75 bp, synthetic construct
  source 1..75: mol_type = other DNA
aaatgacagcattacgaatggcgtggaaaggtttcgcgcaacgtgatgatgagcagatggccgcgtttcgccagt

SEQ ID NO: 332026 - DNA, 75 bp, synthetic construct
  source 1..75: mol_type = other DNA
tatagtccgtcttctcgccgctggttgaacgtgatttatatcgacgttaacggcgttgaggattttcaacttagc

SEQ ID NO: 332027 - DNA, 75 bp, synthetic construct
  source 1..75: mol_type = other DNA
cgtatctgatttacgagctgggaccatcccgcgagcaccgggcggagcatgtgaaatgggcgcgtctgtgtctgc

SEQ ID NO: 332028 - DNA, 75 bp, synthetic construct
  source 1..75: mol_type = other DNA
caattttgacaccactgaaaacctctttattgaaggtgataaccttgatgcgctaaagatgttacaagaaacatt

SEQ ID NO: 332029 - DNA, 75 bp, synthetic construct
  source 1..75: mol_type = other DNA
ctcattcactgggatttcggcgtatccagtatcaacggtcagttgatctcagagcaactgaaagaggtgttcccg

SEQ ID NO: 332030 - DNA, 75 bp, synthetic construct
  source 1..75: mol_type = other DNA
gaaaaaagcaccggaagattatttcattccgctaattcatcctgtaacagggaaggagtgccctgttcctgagcg

SEQ ID NO: 332031 - DNA, 75 bp, synthetic construct
  source 1..75: mol_type = other DNA
tttttaatgaaactgttggtaaaacttttgcgtttctttatgagtcatttccccgaaaagtaaccattgatgttt

SEQ ID NO: 332032 - DNA, 75 bp, synthetic construct
  source 1..75: mol_type = other DNA
gctgagtcgattgtggaaggaccgcaagaacgctaccacctgaactggcccggtaagcgcgaagccttgctcgcg

SEQ ID NO: 332033 - DNA, 75 bp, synthetic construct
  source 1..75: mol_type = other DNA
gtaagcggcataaacactatcaatacgttgacaagcgaggtatctattttgcaagtgatcttcgcaaaccacagc

SEQ ID NO: 332034 - DNA, 75 bp, synthetic construct
  source 1..75: mol_type = other DNA
tagccgtggcttgcagcgttacatcgccgacagtaacagcgccctgttagggctacagccagaagactggctgga

SEQ ID NO: 332035 - DNA, 75 bp, synthetic construct
  source 1..75: mol_type = other DNA
ccgccagatggtatgcatcccggaacagggtgtaacagtccgtcacaccgtgttcaaagcgccgtccggtcaggt

SEQ ID NO: 332036 - DNA, 75 bp, synthetic construct
  source 1..75: mol_type = other DNA
tgccgcgcatctcacacccgcgcatgcacttgctgcatctgtccttacggatatccgtggtgggttgtcgaactc

SEQ ID NO: 332037 - DNA, 75 bp, synthetic construct
  source 1..75: mol_type = other DNA
tatatcgaatacaggaaaatgtataatgaagtgcctattttatgtgactttagtctcgcatctataagagatata

SEQ ID NO: 332038 - DNA, 75 bp, synthetic construct
  source 1..75: mol_type = other DNA
agatattaaaaatgagaaaattatagtgctttataacttatatgttttaggtgtattagctatggttgcattgag

SEQ ID NO: 332039 - DNA, 75 bp, synthetic construct
  source 1..75: mol_type = other DNA
aggaaaccgccaaaattagccaccatgccgcgcatctcacacccgcgcatgcacttgctgcatctgtccttacgg

SEQ ID NO: 332040 - DNA, 75 bp, synthetic construct
  source 1..75: mol_type = other DNA
cggaaacctggtgtgaccgtgaactgtattgcctgaaagcgtcggttggcgcgccgccggatatcctcggcccgt

SEQ ID NO: 332041 - DNA, 75 bp, synthetic construct
  source 1..75: mol_type = other DNA
aaactggcgacgcaagctttccgcaacgcttgagacgatgtttgccgatgatggcgtgaacaagttgctgaagga

SEQ ID NO: 332042 - DNA, 75 bp, synthetic construct
  source 1..75: mol_type = other DNA
gaagatttccatcttagcgaagaggctcaggcctggtggcagttgccgaccacgcaacagacgctgcaacaggcg

SEQ ID NO: 332043 - DNA, 75 bp, synthetic construct
  source 1..75: mol_type = other DNA
ttgccagatgggaactgaccgcagaacaggctgtcgcacagcagttaaaaaatcaggtgtcaaaaggaaatctta

SEQ ID NO: 332044 - DNA, 75 bp, synthetic construct
  source 1..75: mol_type = other DNA
cgatttttacatatcgtatctgagaagaagtaaaaacgatgtgcctgatggcgatagcgaagaagactatgaaga

SEQ ID NO: 332045 - DNA, 75 bp, synthetic construct
  source 1..75: mol_type = other DNA
tgctaagggggcaaatcagtgtgcgcgggcgggggataaattaccggatttactcgatgaatatatcagagcaac

SEQ ID NO: 332046 - DNA, 75 bp, synthetic construct
  source 1..75: mol_type = other DNA
caggagaaagatttacaaaaaccagcgtatacaggatataatcgcagaggttcgaaagacagccagttacgttaa

SEQ ID NO: 332047 - DNA, 75 bp, synthetic construct
  source 1..75: mol_type = other DNA
ccggtcagccgtatcgaacagatccgccgcgaaatcatgggcattgcccgtgaactggaagaggcgggcgaaatt

SEQ ID NO: 332048 - DNA, 75 bp, synthetic construct
  source 1..75: mol_type = other DNA
atgagcgaattgacaataaataagagcaacagctacctcgaacaggcggcgatcctgctgctgtgtctgggcgaa

SEQ ID NO: 332049 - DNA, 75 bp, synthetic construct
  source 1..75: mol_type = other DNA
ctaagacgtaaagactttaaagagctagttacgctcaccaagcaaaatagcgcccctggcgaatggaaaacagag

SEQ ID NO: 332050 - DNA, 75 bp, synthetic construct
  source 1..75: mol_type = other DNA
gctcgaaggtgaaaggcatcaaacaggcggcggatatcgtcaaccgcttccagggtaaccagcaggtgatcctcg

SEQ ID NO: 332051 - DNA, 75 bp, synthetic construct
  source 1..75: mol_type = other DNA
aaaacgaaattctctaccgggtggcgaaactcaacgacgtcaaccgcgacgtggtggatgaactggacaggctga

SEQ ID NO: 332052 - DNA, 75 bp, synthetic construct
  source 1..75: mol_type = other DNA
atgggcatcgcccgtgaactggaagaggcgggcgaaattcagctacagctctttgcggaacagacggcggagtaa

SEQ ID NO: 332053 - DNA, 75 bp, synthetic construct
  source 1..75: mol_type = other DNA
ggatttgaagattataaccactacgttggttatctcgccaccaatggcctaaataatttagttcctgaattccaa

SEQ ID NO: 332054 - DNA, 75 bp, synthetic construct
  source 1..75: mol_type = other DNA
tactatgagagaaattgcaatatcagcacgtccagaattacatgagataaatgaaaaggaactttcaaatacact

SEQ ID NO: 332055 - DNA, 75 bp, synthetic construct
  source 1..75: mol_type = other DNA
tccgttcgccattgccattcgccatttcgcccctacctccttctggcaactggcgcacagtagcgcagacaattt

SEQ ID NO: 332056 - DNA, 75 bp, synthetic construct
  source 1..75: mol_type = other DNA
gggggtgtatggtcgccgggtggcggtgcatgaatacccgtaccgcgatacggtctgggtggaagacctggggcg

SEQ ID NO: 332057 - DNA, 75 bp, synthetic construct
  source 1..75: mol_type = other DNA
tcggttatctcgccaccaatggcctaaataacttagttccagaattccatattctagataatgctgatcactatg

SEQ ID NO: 332058 - DNA, 75 bp, synthetic construct
  source 1..75: mol_type = other DNA
ttggttatctcgccacaaatggcctaaataatttagtcccagaattccatattctagataatgttgatcactatg

SEQ ID NO: 332059 - DNA, 75 bp, synthetic construct
  source 1..75: mol_type = other DNA
aaaacgaaattctctaccgggtggcgaaactcaacgacgtcaaccgcgacgtggtggatgagctggaccgcctga

SEQ ID NO: 332060 - DNA, 75 bp, synthetic construct
  source 1..75: mol_type = other DNA
atggagccatgaagaagaccatcgaaatgagactgtttactcaacagaaaatggcgcagctgttacagtggatta

SEQ ID NO: 332061 - DNA, 75 bp, synthetic construct
  source 1..75: mol_type = other DNA
aaaattcatgcggatatccgtggcaggagcagccgggagcggatgcagtccggtgcggaaatggcgcaggcggaa

SEQ ID NO: 332062 - DNA, 75 bp, synthetic construct
  source 1..75: mol_type = other DNA
aaaggggatgataagtttatcaccaccgactatttgcaacagtgccggcgtaagtatgcccgcctgttccactgg

SEQ ID NO: 332063 - DNA, 75 bp, synthetic construct
  source 1..75: mol_type = other DNA
caaggtaaggacgtgttctttgtcgatggcaatgtgctggcagcctgcttcgacaccagcggcagcatcgacgaa

SEQ ID NO: 332064 - DNA, 75 bp, synthetic construct
  source 1..75: mol_type = other DNA
ttgcaatacgcccttgattcactgagaaatggaaaaggcaaagtcaatctgattaaacattactcctccgttgaa

SEQ ID NO: 332065 - DNA, 75 bp, synthetic construct
  source 1..75: mol_type = other DNA
cgggaagagtggcagtatttacaggtaagggatggagctatgaagaagaccatcgcaatgagactgtttactcaa

SEQ ID NO: 332066 - DNA, 75 bp, synthetic construct
  source 1..75: mol_type = other DNA
tgttgtcggggtgcccgtgccggatgcgaccggcgggcgcctggaaattctttgtcggctgggaggggaaaaatg

SEQ ID NO: 332067 - DNA, 75 bp, synthetic construct
  source 1..75: mol_type = other DNA
tgacatcattctgtgggccgtacgctggtactgcaaatacggcatcagttaccgtgagctgcaggagatgctggc

SEQ ID NO: 332068 - DNA, 75 bp, synthetic construct
  source 1..75: mol_type = other DNA
aacggcgcatcgcgatccatgttgcagggcattctcaacaaagccctcggcaccgagatcgccagcagcgtgatc

SEQ ID NO: 332069 - DNA, 75 bp, synthetic construct
  source 1..75: mol_type = other DNA
gaccctggcgaaaacattctgggaagagtggcagtatttacaggtaagggatggagccatgaagaagatcatcgc

SEQ ID NO: 332070 - DNA, 75 bp, synthetic construct
  source 1..75: mol_type = other DNA
caactgaaattacaggctgggcggaagctgacgcagccagaaaacacccgacttaacgctgtgctggattacatt

SEQ ID NO: 332071 - DNA, 75 bp, synthetic construct
  source 1..75: mol_type = other DNA
aacatgtttatgatcccgatgggtattgtaatccgcgacttcgcatctccggaattctggaccgctgtcggttct

SEQ ID NO: 332072 - DNA, 75 bp, synthetic construct
  source 1..75: mol_type = other DNA
aaccggtaactacaaagttcgtatcgacaacgcaactggtgctggttctatcgctgactacaacggcaacgagct

SEQ ID NO: 332073 - DNA, 75 bp, synthetic construct
  source 1..75: mol_type = other DNA
attacttgaatcatgattacgctagcggttctgttaaccaggtagatatcagcaattcagtaattcatgggtcaa

SEQ ID NO: 332074 - DNA, 75 bp, synthetic construct
  source 1..75: mol_type = other DNA
catgggtaagctacttcggtggtaacttcaacggcgacaacggcaccatcaactatgatcaggatgttaacggca

SEQ ID NO: 332075 - DNA, 75 bp, synthetic construct
  source 1..75: mol_type = other DNA
ttgtctggagattcagggggccagtctagcgatttcgataccgtctttaaaggcgataccgttaacggtaccatt

SEQ ID NO: 332076 - DNA, 75 bp, synthetic construct
  source 1..75: mol_type = other DNA
aaagccggttacgacttcaaactgggtgatgctggttacgtgactccttacggcagcgtttctggtctgttccag

SEQ ID NO: 332077 - DNA, 75 bp, synthetic construct
  source 1..75: mol_type = other DNA
gttgttctgcaacagatggagctgaccgactacgctaacatggcactgagcatcccgtctgcgaacaccaatatc

SEQ ID NO: 332078 - DNA, 75 bp, synthetic construct
  source 1..75: mol_type = other DNA
gccaccgcgctatgttactgttcaggatattcgtcatactctgcggcgccagtatggcagattctggggacgtaa

SEQ ID NO: 332079 - DNA, 75 bp, synthetic construct
  source 1..75: mol_type = other DNA
ttaattaacgccatccgccagcaggattacgcagccatttccgccggagtgatggtgtgtggctcactggtcatt

SEQ ID NO: 332080 - DNA, 75 bp, synthetic construct
  source 1..75: mol_type = other DNA
tgcgccaacaactgaagtgatccgcctgatgcgtatcagcactatcgaagtgtatgaccagaactatgtaaaagc

SEQ ID NO: 332081 - DNA, 75 bp, synthetic construct
  source 1..75: mol_type = other DNA
cagcaacagtctcttgcagaacgtctgcaggcgttgctgaatctgcagaaatccctggcccgccttcagtaccgg

SEQ ID NO: 332082 - DNA, 75 bp, synthetic construct
  source 1..75: mol_type = other DNA
ctgccggaaatggttttcgaactctccggtacgtcagcgtttacaggcaatgacgaagatgccggggattccgtg

SEQ ID NO: 332083 - DNA, 75 bp, synthetic construct
  source 1..75: mol_type = other DNA
aagaactggtcagccagagcaggactctgctgcttcgccatctgggaacacagaacagcgatgccatgctgtatc

SEQ ID NO: 332084 - DNA, 75 bp, synthetic construct
  source 1..75: mol_type = other DNA
gaggagggcttgttggcatcgttgccctaatttctcttgccatactgagtttgatactgcatttcggccctcagt

SEQ ID NO: 332085 - DNA, 75 bp, synthetic construct
  source 1..75: mol_type = other DNA
ccggaattaccacacaacacaatcaacatcatcacacagaacaaacgcccccaacacaaataccgcaatccgaat

SEQ ID NO: 332086 - DNA, 75 bp, synthetic construct
  source 1..75: mol_type = other DNA
atgtggtaatcgatatcgaaagcaatggctcaccacatcataacccatcaaattatgttgatacctttgatataa

SEQ ID NO: 332087 - DNA, 75 bp, synthetic construct
  source 1..75: mol_type = other DNA
ctctggtaaatatggtgttcagatgaacattgtaaaaccagatatacatcccacaaccgggaactatgtcttaca

SEQ ID NO: 332088 - DNA, 75 bp, synthetic construct
  source 1..75: mol_type = other DNA
tgggcaagcagcagggcatgccatacagtgtaatacccccggattaaagccagacactattttatggtgggctgg

SEQ ID NO: 332089 - DNA, 75 bp, synthetic construct
  source 1..75: mol_type = other DNA
cgttaaaaaatgcattaagcaacagtaatatatcaaccactgcagtgtcgactattgcatctgctgcatccactg

SEQ ID NO: 332090 - DNA, 75 bp, synthetic construct
  source 1..75: mol_type = other DNA
ccacatcctgaagatgtggtcatcgatatcgaaagctctccacataataatccatcaaattatgttgatacggtt

SEQ ID NO: 332091 - DNA, 75 bp, synthetic construct
  source 1..75: mol_type = other DNA
ctaaggagactactgcctctgtgcgaatgagcgttgctgaaaaaagatcggcagaaatcagagctaaatccttag

SEQ ID NO: 332092 - DNA, 75 bp, synthetic construct
  source 1..75: mol_type = other DNA
atacaacgaaggataagaaaaaaatggatatggttcgtaagtgtacgccttggaagccggaatgttcacaacaat

SEQ ID NO: 332093 - DNA, 75 bp, synthetic construct
  source 1..75: mol_type = other DNA
tttgttgtgctatttttgctggaagcgcgatagctgataataaattgccagattggctttctacctcaaagaaag

SEQ ID NO: 332094 - DNA, 75 bp, synthetic construct
  source 1..75: mol_type = other DNA
tggtaaatatggtgttcagatgaacattgtaaaaccagatattcaccccacaaccgggaattattttttacagtt

SEQ ID NO: 332095 - DNA, 75 bp, synthetic construct
  source 1..75: mol_type = other DNA
aattttcacaccatgtgctgcacaggtaatggaagaagcagtccctctagtagctgatggtggggccgctcgtcc

SEQ ID NO: 332096 - DNA, 75 bp, synthetic construct
  source 1..75: mol_type = other DNA
aaatcggcaaccccagatccgaaaaaatgcagagaaacacgccctgtatctctttttcacaaaacaaacttcggc

SEQ ID NO: 332097 - DNA, 75 bp, synthetic construct
  source 1..75: mol_type = other DNA
ggcttcgctaaaggtgacatgaatgaccgttctggtcaggtagatcaagacagccagactgcctacatctactct

SEQ ID NO: 332098 - DNA, 75 bp, synthetic construct
  source 1..75: mol_type = other DNA
ggctgccgaatccaatcgcggtaatgagtggaccggcaatcctgatattgataacgcaatcatcatgctcgaccg

SEQ ID NO: 332099 - DNA, 75 bp, synthetic construct
  source 1..75: mol_type = other DNA
aagcaaaacctgattgcaaattacctgatagggcgatggattatcttttgcgaaacggactggtaagtgcggagg

SEQ ID NO: 332100 - DNA, 75 bp, synthetic construct
  source 1..75: mol_type = other DNA
ggacaggtacaaggggaatacgtggagttgagcgacggcactttatcgtggttagggaacgccttgttctggatg

SEQ ID NO: 332101 - DNA, 75 bp, synthetic construct
  source 1..75: mol_type = other DNA
cgctgatgagtctttatgacggacgaacactggttcagaccgtaacgggatcgctggcgtgcggcgttcttgcca

SEQ ID NO: 332102 - DNA, 75 bp, synthetic construct
  source 1..75: mol_type = other DNA
gagcactaggtaagttgatgccgggcgaagaagaggtggctgagaaccctcgtgcccgtagttcagttctgcgta

SEQ ID NO: 332103 - DNA, 75 bp, synthetic construct
  source 1..75: mol_type = other DNA
cgaactggttaaccgtctccacgatacagcgatcaagtgtgctggcacccagcaattacgagaaagaattagccg

SEQ ID NO: 332104 - DNA, 75 bp, synthetic construct
  source 1..75: mol_type = other DNA
gctgacagagaacagttctagagatgttcaaattgcatttgctaatgagctttcaatgatatgtgatagattaaa

SEQ ID NO: 332105 - DNA, 75 bp, synthetic construct
  source 1..75: mol_type = other DNA
gtgaagaaaagcgatcgcgcgccgcttaatttcgatgactttaacgatgcctttatgatgcacggcacgacctca

SEQ ID NO: 332106 - DNA, 75 bp, synthetic construct
  source 1..75: mol_type = other DNA
accgatcgtatcccactcgacgtcttaaaagaggtcagcgaatatgtttatctgttctctgaatccgcagccttc

SEQ ID NO: 332107 - DNA, 75 bp, synthetic construct
  source 1..75: mol_type = other DNA
aatagaagtagtcaagactgtagtggctataggaagatcaattgacggaggaatcgatattgattacgtcggaga

SEQ ID NO: 332108 - DNA, 75 bp, synthetic construct
  source 1..75: mol_type = other DNA
ggatatggtaaaacgtcagtgataaatcttataaaaggtgctttgaatgaaaaggagttcttaccaataataata

SEQ ID NO: 332109 - DNA, 75 bp, synthetic construct
  source 1..75: mol_type = other DNA
gatcagtcggtaaaaatgggcacttatgatgctaatgaatttttaaatgtaggtgatgtttctccgagtcaaacg

SEQ ID NO: 332110 - DNA, 75 bp, synthetic construct
  source 1..75: mol_type = other DNA
gcagaagaaattatccgtattcaaaaagatgagttttcgtcgcattacgaacacttaaaacaaactgtttcagaa

SEQ ID NO: 332111 - DNA, 75 bp, synthetic construct
  source 1..75: mol_type = other DNA
gacaaatgatggctgagattggtaatgaaatggatttttataccgtcgcaggggagttgcctgaccgtgaggact

SEQ ID NO: 332112 - DNA, 75 bp, synthetic construct
  source 1..75: mol_type = other DNA
gcggggctgaatgtaaacgcggtgaggctgtaaacaaagcgattgcagcagcgcttgttgggggggctacaggtg

SEQ ID NO: 332113 - DNA, 75 bp, synthetic construct
  source 1..75: mol_type = other DNA
gagcaggaaaagttcggtactggtagtgatatccagcgtggcattcaggcggcaacggccgcgcttcagggcctg

SEQ ID NO: 332114 - DNA, 75 bp, synthetic construct
  source 1..75: mol_type = other DNA
ctgctgctaacaaagctgacctgggtgcatacacctatcaggctgaacagcgcggtaacaccgttgttctgcaac

SEQ ID NO: 332115 - DNA, 75 bp, synthetic construct
  source 1..75: mol_type = other DNA
aatgcaactacttataatacattcgggtatcacgatgacgcagtcactctattcaattggggcgacaatactaaa

SEQ ID NO: 332116 - DNA, 75 bp, synthetic construct
  source 1..75: mol_type = other DNA
actgaggcaattaaagagaaagcctcagatattcatattgaaacgtacgaacgccatctacaggttcgctttcgc

SEQ ID NO: 332117 - DNA, 75 bp, synthetic construct
  source 1..75: mol_type = other DNA
aaaaaccatgcgagttacgggcctgtaagccaggcgagatatgatctatatcaatttctcatctataatgctttg

SEQ ID NO: 332118 - DNA, 75 bp, synthetic construct
  source 1..75: mol_type = other DNA
taactgttttagcggaggatgcggaaaaaattcaactcatttgttaatttttaaaatttatttttatttggataa

SEQ ID NO: 332119 - DNA, 75 bp, synthetic construct
  source 1..75: mol_type = other DNA
tctatagcaatagaagagttgttcttaaaaagttttctaacgttaggctaaaattacatcataatcgaaaagaat

SEQ ID NO: 332120 - DNA, 75 bp, synthetic construct
  source 1..75: mol_type = other DNA
aaactgcgtgatacgccggaatacaaaaaggaacaggaaaagtatggtaccggtagcgatatgcagcggggtatc

SEQ ID NO: 332121 - DNA, 75 bp, synthetic construct
  source 1..75: mol_type = other DNA
atgtcggataaccggattatcagtcaccatcaaccggcccggatatttccggaatgtgtcacgcctgttccggag

SEQ ID NO: 332122 - DNA, 75 bp, synthetic construct
  source 1..75: mol_type = other DNA
ccggtcgcgatgtttgttgccagcggttttgagcacagtatcgcaaacatgtttatgatccgatgggtattgtaa

SEQ ID NO: 332123 - DNA, 75 bp, synthetic construct
  source 1..75: mol_type = other DNA
tagcctcgcggcataagctgaagatggcactgggtaaagagctgtcggataagctcgtagagcatatagaccaga

SEQ ID NO: 332124 - DNA, 75 bp, synthetic construct
  source 1..75: mol_type = other DNA
cttaatcgcacttatgccaaccggagcaatgcagagcgcgcagcaaaaatgcaatgggaacgtctgcagcgtggg

SEQ ID NO: 332125 - DNA, 75 bp, synthetic construct
  source 1..75: mol_type = other DNA
tcatccgacaggggcagggtaaaagcgccagtggtaaaccactaccggttatcactatcacacgtaaggacggcg

SEQ ID NO: 332126 - DNA, 75 bp, synthetic construct
  source 1..75: mol_type = other DNA
acaccatctgcttggttatatgtcgaagacgcgtcgtgttaacctggcaattaccgccgggagcacgcccaaagg

SEQ ID NO: 332127 - DNA, 75 bp, synthetic construct
  source 1..75: mol_type = other DNA
tggcggcgaaaaacttgctgataattgtcagtggcgcaggtaaagcgcaggcactgaaaaatgttctgcaaggtc

SEQ ID NO: 332128 - DNA, 75 bp, synthetic construct
  source 1..75: mol_type = other DNA
ctcactattgataactaccgcgagcatgatcagaaactggcgcgtgaaggcggcctggatttggtggtgttggga

SEQ ID NO: 332129 - DNA, 75 bp, synthetic construct
  source 1..75: mol_type = other DNA
tactccggagccggtggccgcgatccactattccttgctgaacactttattccgttcctctacacgcatatcaat

SEQ ID NO: 332130 - DNA, 75 bp, synthetic construct
  source 1..75: mol_type = other DNA
ccagctataagaaagatagcttcacgactcttaatctctcaaaaaaaattaatatactttatggtcacaacggtt

SEQ ID NO: 332131 - DNA, 75 bp, synthetic construct
  source 1..75: mol_type = other DNA
gccgcgctgatctactggatcttctgtttcagcatgtcacgttatagccaacatctggaaaaacgttttaacacc

SEQ ID NO: 332132 - DNA, 75 bp, synthetic construct
  source 1..75: mol_type = other DNA
gtgaatttcagctctgaattgcttaacaaaggcaacaaaactcccgcattcagcatcagtattgaaggcaaggat

SEQ ID NO: 332133 - DNA, 75 bp, synthetic construct
  source 1..75: mol_type = other DNA
catcgcgcaggttggtacaaccactatggacgtgtctgggtgctgaaaaccgccccgggcgcaggtaacgtcttt

SEQ ID NO: 332134 - DNA, 75 bp, synthetic construct
  source 1..75: mol_type = other DNA
gccccatgcgctgattaataacgtcgaagagaaactgggctttaaaggtgaaaaactgcgcgaatatgtccgctg

SEQ ID NO: 332135 - DNA, 75 bp, synthetic construct
  source 1..75: mol_type = other DNA
gtccctacaacctccccccggtcacaacctgtagctgctgcgacacatcacgttcaggaaaccagaactggttga

SEQ ID NO: 332136 - DNA, 75 bp, synthetic construct
  source 1..75: mol_type = other DNA
tcggggctttgaagcggatcagcttgatctggagctggacgacgccgatggaaaaatagcgctgccgcgccgtgg

SEQ ID NO: 332137 - DNA, 75 bp, synthetic construct
  source 1..75: mol_type = other DNA
tttaaacagccgatagataatgcggaatggaccattacgactctgacacataccgtcagcccggataacggtttt

SEQ ID NO: 332138 - DNA, 75 bp, synthetic construct
  source 1..75: mol_type = other DNA
aatggaccattaccaccctgacacataccgtcagcccggataacggttttacgaccagtatggagcttgaagtga

SEQ ID NO: 332139 - DNA, 75 bp, synthetic construct
  source 1..75: mol_type = other DNA
ccatctcaaaacttgctcttgaaaatggcattaacgccaatctgttgttcaaatggcaacaacaatggcgcgagg

SEQ ID NO: 332140 - DNA, 75 bp, synthetic construct
  source 1..75: mol_type = other DNA
gcagtgggaacgcctgcaacgcggtgttgcgtcattctcactacaactggcagaagggcgggcggatctctacac

SEQ ID NO: 332141 - DNA, 75 bp, synthetic construct
  source 1..75: mol_type = other DNA
cccgcgaacccacgaagaaagaaagcactacagtgaagcgtaagcgcaggactaaggcccagaagaaagagccgg

SEQ ID NO: 332142 - DNA, 75 bp, synthetic construct
  source 1..75: mol_type = other DNA
aatgagagtgacggcagttttttgatgcggctggcgcgccagtacggtgccattgcatcggtgaaaaatggcaat

SEQ ID NO: 332143 - DNA, 75 bp, synthetic construct
  source 1..75: mol_type = other DNA
ggaatggaccattacgactctgacgcataccgtcagcccggattacggttttacgaccagtctggagcttgaagt

SEQ ID NO: 332144 - DNA, 75 bp, synthetic construct
  source 1..75: mol_type = other DNA
gcggtaaaccactgccggtgatcactatcacacgtaaggacggcgacagtcaccgctttaccttggcagatcgcg

SEQ ID NO: 332145 - DNA, 75 bp, synthetic construct
  source 1..75: mol_type = other DNA
ccgtgaaaaatcgtggcacaagaccacggtcggggaagtggtgaaggaaatagccgcgcgtcacaagctgaagat

SEQ ID NO: 332146 - DNA, 75 bp, synthetic construct
  source 1..75: mol_type = other DNA
taccgtcagcccggataacggttttacgaccagtctggagcttgaactgaggattgatgatttcgaaatggaatg

SEQ ID NO: 332147 - DNA, 75 bp, synthetic construct
  source 1..75: mol_type = other DNA
agatgatgcggaatggaccattacgactctgacgcataccgtcagcccggataacggttttacgaccagtctgga

SEQ ID NO: 332148 - DNA, 75 bp, synthetic construct
  source 1..75: mol_type = other DNA
ctcggtgattactgccgtcggcatggtcgaccatctggcggtgatgatggcggcggtgattattgccatcagcct

SEQ ID NO: 332149 - DNA, 75 bp, synthetic construct
  source 1..75: mol_type = other DNA
aggcgtggagatagttacaacatacgatcgcagccagctcattgaccgcgccatcgacaacctcagcggcaagct

SEQ ID NO: 332150 - DNA, 75 bp, synthetic construct
  source 1..75: mol_type = other DNA
tgcgtgatgttgcgaaggtccagattggcccggagatgcgccggggcattgccgaactgaacggcgaaggcgaag

SEQ ID NO: 332151 - DNA, 75 bp, synthetic construct
  source 1..75: mol_type = other DNA
cggtggcgaaccgttttctggtgctgatgggcgcgttgtttctgagtatctggggcacctggaccatcattaaca

SEQ ID NO: 332152 - DNA, 75 bp, synthetic construct
  source 1..75: mol_type = other DNA
tggcccggagatgcgccggggcattgccgaactaaacggcgaaggcgaagtggcgggcgggggggggatcctgcg

SEQ ID NO: 332153 - DNA, 75 bp, synthetic construct
  source 1..75: mol_type = other DNA
aatcattgaggaactggataacaccgtgcgtctgccggggctggcgaatctgtgggtgccgccaattcgtaaccg

SEQ ID NO: 332154 - DNA, 75 bp, synthetic construct
  source 1..75: mol_type = other DNA
ctccggcaaaaacgcccgtgaagtgatcgccgccgtgaaggacaaactggaaacgctgaaaagtagtctgccgga

SEQ ID NO: 332155 - DNA, 75 bp, synthetic construct
  source 1..75: mol_type = other DNA
ttcacttcggtacgaaagagtcgatgaaaacgctggcgagcgagcgcgttgctgagctgaaaacccgcggttacg

SEQ ID NO: 332156 - DNA, 75 bp, synthetic construct
  source 1..75: mol_type = other DNA
ttcacttcggtacgaaagagtcgatgaaaacgctggcgagcgagcgcgtggcggagctgaaaacccgcggttacg

SEQ ID NO: 332157 - DNA, 75 bp, synthetic construct
  source 1..75: mol_type = other DNA
tattgctggcccaggtgacagtcatgtcactgacagtgattttcctggctgctgacaggcgttttttttcatggg

SEQ ID NO: 332158 - DNA, 75 bp, synthetic construct
  source 1..75: mol_type = other DNA
ggacaaaatcattgaggaactggataacaccgtgcggctgccggggctggcgaatctgtgggtgccgccaattcg

SEQ ID NO: 332159 - DNA, 75 bp, synthetic construct
  source 1..75: mol_type = other DNA
ggcggcgctttcggtgctgacggttctctggccgctcaataaagttggcggggaatttttaccgcagatcaatga

SEQ ID NO: 332160 - DNA, 75 bp, synthetic construct
  source 1..75: mol_type = other DNA
tttgtggctcgctgttgccgcagtgttttctggtgcgggaatgattatattctactggttgctccatgcatcaga

SEQ ID NO: 332161 - DNA, 75 bp, synthetic construct
  source 1..75: mol_type = other DNA
tccccagcgcctggcgcaatatggcatcagtctcgctgaagtgaaaagcgcgctggatgcctcaaaccaggaagc

SEQ ID NO: 332162 - DNA, 75 bp, synthetic construct
  source 1..75: mol_type = other DNA
gctgagctgaaaacccgcggttacgacaatgcgggtctgtacgatccggcaggcgtcggtggtacacacgtcatg

SEQ ID NO: 332163 - DNA, 75 bp, synthetic construct
  source 1..75: mol_type = other DNA
ttctttggttaagtttgagtttaaggcttgttcggagaaatctttaaatgaataccataaggttgatgttgactc

SEQ ID NO: 332164 - DNA, 75 bp, synthetic construct
  source 1..75: mol_type = other DNA
ctacaagcttttgaaataaaaagtgattttgactctcttaagcgcttggatggtcagttaaaaatttttaaatct

SEQ ID NO: 332165 - DNA, 75 bp, synthetic construct
  source 1..75: mol_type = other DNA
gtcacgatatcgagcacatcgacctcagcgcgccggaaagcgaaattcgcgcgctgctggagaaaaaccagcata

SEQ ID NO: 332166 - DNA, 75 bp, synthetic construct
  source 1..75: mol_type = other DNA
tgtcggtaccgcctcgctgctggtggaccaggacgatcagcaaatcttcgacccgcaggaacggcggatgattga

SEQ ID NO: 332167 - DNA, 75 bp, synthetic construct
  source 1..75: mol_type = other DNA
tgactacgctctcggtcagggggccggattctatgttaatgcaacccaggagccctgggcgacacattacaaaat

SEQ ID NO: 332168 - DNA, 75 bp, synthetic construct
  source 1..75: mol_type = other DNA
ataataccctgcccgctgacaaaattatcccaggagatggccgtactctcgtagttcacttcgacgaacgcggca

SEQ ID NO: 332169 - DNA, 75 bp, synthetic construct
  source 1..75: mol_type = other DNA
atcggaggatgccgttatggctactatcactaccctttctcacccttgtgtaaccatcgaaaatggtcgcgctgt

SEQ ID NO: 332170 - DNA, 75 bp, synthetic construct
  source 1..75: mol_type = other DNA
gcttgaaaatttaagcctggcgatctgcaccccacccctttacgctcaccgccgacagtgtgcaatggatcgatt

SEQ ID NO: 332171 - DNA, 75 bp, synthetic construct
  source 1..75: mol_type = other DNA
cgcataaccgcgctcaggcggtttttttatgcgtcaagcacagccacattcagattatggtggggcgtgcagggc

SEQ ID NO: 332172 - DNA, 75 bp, synthetic construct
  source 1..75: mol_type = other DNA
tcaccgaaaccgttcctgatggcgcactggtctgtaccctggagactttccggttttatctggaaaaacagggct

SEQ ID NO: 332173 - DNA, 75 bp, synthetic construct
  source 1..75: mol_type = other DNA
cgtctcaccacccttatggtcgtggaaaaccttggtggtgagttatttaaactgactatcgaggctgccatcatg

SEQ ID NO: 332174 - DNA, 75 bp, synthetic construct
  source 1..75: mol_type = other DNA
ccgccgccaccccgaactccaaccggctccacagtcaagtctatcccgctcatgaccgggacgcctgtcaaaccg

SEQ ID NO: 332175 - DNA, 75 bp, synthetic construct
  source 1..75: mol_type = other DNA
atgccaaatcatgatcgattcgaatgccaaactgcgatcgattcagatgccattttgcaccagccggtgctgact

SEQ ID NO: 332176 - DNA, 75 bp, synthetic construct
  source 1..75: mol_type = other DNA
caataaaactcgtgacatcagattgtctgctaagtgtttgcaacaaattatcgctaatgaaagtcagtctcgttt

SEQ ID NO: 332177 - DNA, 75 bp, synthetic construct
  source 1..75: mol_type = other DNA
caacctgcaggtgctgggtcgcgtgctgggtaaactcaaccaggtgccggatgttatcgacgcgcgtcggttgca

SEQ ID NO: 332178 - DNA, 75 bp, synthetic construct
  source 1..75: mol_type = other DNA
acatctggggatcagcctgaaagaagcagaaaaacatctgctgccgcgttacaacttcaatgatgtcgacgagtt

SEQ ID NO: 332179 - DNA, 75 bp, synthetic construct
  source 1..75: mol_type = other DNA
ttcaccagggggtagtgcaaataattcactatctggtgcagcaaattcaccaggtagtgcaggagttgcacctgg

SEQ ID NO: 332180 - DNA, 75 bp, synthetic construct
  source 1..75: mol_type = other DNA
aaaaaataccggggagtttagcccgctctgtttgcaattagtgagaacaggagaggcatccggctcgctggacct

SEQ ID NO: 332181 - DNA, 75 bp, synthetic construct
  source 1..75: mol_type = other DNA
acttggaacggcacgagataaaggcgtgcatatattcatggcttttcaggcgatagacgatctgcgtgactgccc

SEQ ID NO: 332182 - DNA, 75 bp, synthetic construct
  source 1..75: mol_type = other DNA
tcagcaatttatgaaaaaggaatgacactttatgatttatttaacactgattttgttcagtcattacgtcaagct

SEQ ID NO: 332183 - DNA, 75 bp, synthetic construct
  source 1..75: mol_type = other DNA
aatcctgcacagtggcgtggagacaaaagtgcggaagtcattcatcaactggcgacactactcaaagccgggtta

SEQ ID NO: 332184 - DNA, 75 bp, synthetic construct
  source 1..75: mol_type = other DNA
ggcagggcgttacccacgaaggccacgcgcaagatggaacgctctgggcggaaagtcgtgccttgctgcttttgg

SEQ ID NO: 332185 - DNA, 75 bp, synthetic construct
  source 1..75: mol_type = other DNA
gagaggcatccggttcgctggatctcatgttagacaacctcgcccgtcatcatcgggataacaccatggcgctgg

SEQ ID NO: 332186 - DNA, 75 bp, synthetic construct
  source 1..75: mol_type = other DNA
aagtcggtcgttaaccttattcacggcgtgcgtgatatggcggcgatccgccagctgaaagcgacgcacactgat

SEQ ID NO: 332187 - DNA, 75 bp, synthetic construct
  source 1..75: mol_type = other DNA
cgcaatggcgtggggaagataccgcatggctggctgccaccacggatgccaatgttaaaacactgtttgggattg

SEQ ID NO: 332188 - DNA, 75 bp, synthetic construct
  source 1..75: mol_type = other DNA
cggcacacaatttgtgaaacaggctgtcacgttctttggtccggatcgtcatttcgaagaattctgggaagttcc

SEQ ID NO: 332189 - DNA, 75 bp, synthetic construct
  source 1..75: mol_type = other DNA
tggaagcgtaaaaacctggattacctgatcaccgaacggtgctatgtcgctgtcaaagaggcgcgggcaaatgac

SEQ ID NO: 332190 - DNA, 75 bp, synthetic construct
  source 1..75: mol_type = other DNA
actttttacctttccgttatcgccgataccccgtcttcacaggcattaacccatctggtgggcggcctttgcttt

SEQ ID NO: 332191 - DNA, 75 bp, synthetic construct
  source 1..75: mol_type = other DNA
cgggcgtgcatcctcatgacagcagccagtggcaagctgcgaccgaagaagcgattattgagctggccgcgctgc

SEQ ID NO: 332192 - DNA, 75 bp, synthetic construct
  source 1..75: mol_type = other DNA
ctgccccatattctgcaacgtattgcatactggcgaggggaggatgctgcgtggctggcggctaccacagatgcg

SEQ ID NO: 332193 - DNA, 75 bp, synthetic construct
  source 1..75: mol_type = other DNA
cgtcatctgcctgatgagtttgacgattatgtcgcaaacccaaaacctaacggttatcagtcgattcataccgtt

SEQ ID NO: 332194 - DNA, 75 bp, synthetic construct
  source 1..75: mol_type = other DNA
tttgacgaccgggtgtacgtctttacgccgaaaggtgatgtcgttgatttgcctgcgggatcaacgccgctggac

SEQ ID NO: 332195 - DNA, 75 bp, synthetic construct
  source 1..75: mol_type = other DNA
acgttcgccggatgttgctggcgatggtcgatgacttccgttgcgtggtcatcaaactggcggagcgaattgctc

SEQ ID NO: 332196 - DNA, 75 bp, synthetic construct
  source 1..75: mol_type = other DNA
tttaccggggaatagtgcaaataattcgctacattgtgcatcagatgcatcgggtagcgcaggagttgcacctgt

SEQ ID NO: 332197 - DNA, 75 bp, synthetic construct
  source 1..75: mol_type = other DNA
taacctgcaggtgttggggcgcgtgctgggtaaactcaaccaggtgccggatgttatcgatgcacgtcggttgca

SEQ ID NO: 332198 - DNA, 75 bp, synthetic construct
  source 1..75: mol_type = other DNA
cgccacctgccggatgagtttgacgattacgtcgctaacccgaaaccaaacggttatcagtctattcataccgtg

SEQ ID NO: 332199 - DNA, 75 bp, synthetic construct
  source 1..75: mol_type = other DNA
cgaggctgtttttgtagaagatccaaaagatgatgaatgggcaccacatgtactcagggaagcatgtaaaaaagc

SEQ ID NO: 332200 - DNA, 75 bp, synthetic construct
  source 1..75: mol_type = other DNA
tcccgataagaatggtagcccggatatggaagcaaaatccggtgctgaaggtgcattatctcgactcaatacccc

SEQ ID NO: 332201 - DNA, 75 bp, synthetic construct
  source 1..75: mol_type = other DNA
caggaaaaaccgatttgattaagggatttaaaaagaaaagcggtggaacgtatgatacagttcttgttcttgagg

SEQ ID NO: 332202 - DNA, 75 bp, synthetic construct
  source 1..75: mol_type = other DNA
gttcattcaggcgaccccgatgatgaaggatgtttgctggttgatgagattctgggttatgccggaaacaagaaa

SEQ ID NO: 332203 - DNA, 75 bp, synthetic construct
  source 1..75: mol_type = other DNA
ctgatgaacttttaaaaactcttgaggagaaaaaacagaagtacaacgcaatttatgaagaattagcgcgaaaga

SEQ ID NO: 332204 - DNA, 75 bp, synthetic construct
  source 1..75: mol_type = other DNA
gtgccggatggttcaaactggcaactgtaacaatgccacaagccagttctgtggtttacataagcctgattggtg

SEQ ID NO: 332205 - DNA, 75 bp, synthetic construct
  source 1..75: mol_type = other DNA
attttgcatgggtgaatacatccggtgatacctatgacatttatgtagaaataggtaattacgccacaggtgtta

SEQ ID NO: 332206 - DNA, 75 bp, synthetic construct
  source 1..75: mol_type = other DNA
cttttcgttagtgcctgacagctacgtgacgatggggccgaaaagcatcatggcggcgaaaaacttgctgataat

SEQ ID NO: 332207 - DNA, 75 bp, synthetic construct
  source 1..75: mol_type = other DNA
gttaatcgacgagctggacaggaacggaatttcgatttcttcaaatgccacgtcctgcccggtctgtaacaacgg

SEQ ID NO: 332208 - DNA, 75 bp, synthetic construct
  source 1..75: mol_type = other DNA
cggatatctccgctctgtgggctgaaaagcagtctcagatcaaagccggagagctgacggttgaggagtttatta

SEQ ID NO: 332209 - DNA, 75 bp, synthetic construct
  source 1..75: mol_type = other DNA
aagcgacccgcgctggcatccttgaaaagcttgcagctaatacagggttagtttctatcgagaaagagaaaggct

SEQ ID NO: 332210 - DNA, 75 bp, synthetic construct
  source 1..75: mol_type = other DNA
cttctaactatcggtgggacggtaacccttttattatgggagggagaactctttcaggtgagcagtttgatttat

SEQ ID NO: 332211 - DNA, 75 bp, synthetic construct
  source 1..75: mol_type = other DNA
gaaccacttgaaatattcaccatctcaccaacggcggcagcagaaataccagatgtaacaccgatactcgatttt

SEQ ID NO: 332212 - DNA, 75 bp, synthetic construct
  source 1..75: mol_type = other DNA
ggtaaaggggttgccgccggcatattactttatcaaagtattctggccggtgaaggtgtttttgttatggacccc

SEQ ID NO: 332213 - DNA, 75 bp, synthetic construct
  source 1..75: mol_type = other DNA
ttctggtggatgacgaactccgtaaggctaaaacagataatatgctcacggaaaccatcgacagtgagcgcacaa

SEQ ID NO: 332214 - DNA, 75 bp, synthetic construct
  source 1..75: mol_type = other DNA
ttcggcaggcggaaagctattacatcgacagcaatatgctccagaacctgccgaagttcgtcagctatatcttca

SEQ ID NO: 332215 - DNA, 75 bp, synthetic construct
  source 1..75: mol_type = other DNA
gcgcagttcgtgaaggataatccgggcgcaaccgtgcgggatatttataacggcgattatgttcagggcattggc

SEQ ID NO: 332216 - DNA, 75 bp, synthetic construct
  source 1..75: mol_type = other DNA
cagtttgtcagcaaaaatcccggagcaacaattcgcgatatttataacggtgaatatgtacaagggattggcgac

SEQ ID NO: 332217 - DNA, 75 bp, synthetic construct
  source 1..75: mol_type = other DNA
atgacaacgagttgcaatacaccgatgagctgtacgccgaaaccccgtgggctgacgatgtgaaagcgtttctct

SEQ ID NO: 332218 - DNA, 75 bp, synthetic construct
  source 1..75: mol_type = other DNA
tttttactggcctgacgctgctcgacacgctgcaaaatgttatcggcgcgccttcgctgatgcccgatgcactca

SEQ ID NO: 332219 - DNA, 75 bp, synthetic construct
  source 1..75: mol_type = other DNA
cgataaaaacgtctattttgtgcccagccccactttttttaaagtggctgaacagcataaacaaatcctgcgtat

SEQ ID NO: 332220 - DNA, 75 bp, synthetic construct
  source 1..75: mol_type = other DNA
atgccaaattcaaactggtttatcgcgtcatggacccggatacggcggaatgggtggcaagaatgtcaggcacta

SEQ ID NO: 332221 - DNA, 75 bp, synthetic construct
  source 1..75: mol_type = other DNA
accagtccattgccgatttaaaagactgcccggcagatttgaaaggtgacgccgttgtcggtgcggtcgttgaaa

SEQ ID NO: 332222 - DNA, 75 bp, synthetic construct
  source 1..75: mol_type = other DNA
aaagcgtttctctgttacaacgccaataaagccttaatgaatctgggatacgaaccgttatttccagcagaaatg

SEQ ID NO: 332223 - DNA, 75 bp, synthetic construct
  source 1..75: mol_type = other DNA
cttccgtgtcctgacccgtcagggccagctcactgctttagggacagaatttaccgtccgtcagcaggataattt

SEQ ID NO: 332224 - DNA, 75 bp, synthetic construct
  source 1..75: mol_type = other DNA
gtgtgccgagtgaagccggttgtatgccggaactgcttacccgtctgcgcggcaagctgccgattattggcattt

SEQ ID NO: 332225 - DNA, 75 bp, synthetic construct
  source 1..75: mol_type = other DNA
cctcaggagtggaaagaaggggatgaaccatattatccaataaatgatgctaaaaatatggagctattcaaaaaa

SEQ ID NO: 332226 - DNA, 75 bp, synthetic construct
  source 1..75: mol_type = other DNA
ctggtttatttggggcggtttgtgctcacgaacttaataaaaaagggaaaaaaacgcttgttattgatagaagag

SEQ ID NO: 332227 - DNA, 75 bp, synthetic construct
  source 1..75: mol_type = other DNA
tgatttctggatttggataggcctgtggttcgcaggcatgctggtgcttttctcactggcgggtaagaatctact

SEQ ID NO: 332228 - DNA, 75 bp, synthetic construct
  source 1..75: mol_type = other DNA
atgcggaaagtgaatttaccgggaacgagcaaaaaattgctgactttctgcgggccaacgtgagtgagctgaaat

SEQ ID NO: 332229 - DNA, 75 bp, synthetic construct
  source 1..75: mol_type = other DNA
gaaactagagccaaccaacacgctgcaaccgattctggaaaaactgtatcaggcacagacgcttagccaacaaga

SEQ ID NO: 332230 - DNA, 75 bp, synthetic construct
  source 1..75: mol_type = other DNA
cagcggcgggatggatgaagtttcattacacgcgccgacaatcgttgccgaactgcatgacagcgaaattaagag

SEQ ID NO: 332231 - DNA, 75 bp, synthetic construct
  source 1..75: mol_type = other DNA
aggcacagacgcttagccagcaggagagccacctgttattttcagccgtagttcgcggcgaactgaagtccgaac

SEQ ID NO: 332232 - DNA, 75 bp, synthetic construct
  source 1..75: mol_type = other DNA
tgtgaatggaaaaaaggtgatgaaccttactatccagtaaatgacgatctgaacatggaattattcaaaaaatat

SEQ ID NO: 332233 - DNA, 75 bp, synthetic construct
  source 1..75: mol_type = other DNA
cggggttgtttggggctgtttgtgcgcatgagttgaataaaaaagggaaaaaattattggtaattgatcgaaggg

SEQ ID NO: 332234 - DNA, 75 bp, synthetic construct
  source 1..75: mol_type = other DNA
cagagagtattatctctctcaagctaagcatgttatatacacagggcctattgacgaatattacagttataggtt

SEQ ID NO: 332235 - DNA, 75 bp, synthetic construct
  source 1..75: mol_type = other DNA
cgttcacgtaccacacccatcgcgctggaaaacctgctgcactatctggtggcgctgttagaccatccggcctgc

SEQ ID NO: 332236 - DNA, 75 bp, synthetic construct
  source 1..75: mol_type = other DNA
gtgaagccgatgtgcctgttactgaattgcgtgccggaattatcgtcggagccgggtcagcggcgttcgaagtca

SEQ ID NO: 332237 - DNA, 75 bp, synthetic construct
  source 1..75: mol_type = other DNA
tggaaaacttgctgcactatctggttgcgttgttagatcatccggccagcgaacaccgcatcttcgaagccgccg

SEQ ID NO: 332238 - DNA, 75 bp, synthetic construct
  source 1..75: mol_type = other DNA
aaaggcgactatcgcactattgatgtacgcgccttctggcatcctcacggtatgccagggttgttttactggcta

SEQ ID NO: 332239 - DNA, 75 bp, synthetic construct
  source 1..75: mol_type = other DNA
agcatgggcgaaggcggtgattttatcgctcaggagcgccaggtggctctcaacgtccgcgatgcgctgcgcgaa

SEQ ID NO: 332240 - DNA, 75 bp, synthetic construct
  source 1..75: mol_type = other DNA
acgacgctcaggcctttgcccgctggcgaccagaatacggttatttcgccaaacaggcggggtttaccgttaaaa

SEQ ID NO: 332241 - DNA, 75 bp, synthetic construct
  source 1..75: mol_type = other DNA
ggcgttgttagatcatccggccagcgaacaccgcatcttcgaagccgccggaccagaggtgctcagttatcagca

SEQ ID NO: 332242 - DNA, 75 bp, synthetic construct
  source 1..75: mol_type = other DNA
agtgttaacgccgccacgctgggtacgttcacgcaccacgcccatcgcgctggaaaacttgctgcactatctggt

SEQ ID NO: 332243 - DNA, 75 bp, synthetic construct
  source 1..75: mol_type = other DNA
tcagttcgttgcaggccccgccacatgagcagtcggatcatctgcgtgctcgtcaggctacggcggacattcttc

SEQ ID NO: 332244 - DNA, 75 bp, synthetic construct
  source 1..75: mol_type = other DNA
atgacgctcaggctttcgcccgttggcgaccagaatatggctatttcgctaaacaggcagggtttacagtaaaaa

SEQ ID NO: 332245 - DNA, 75 bp, synthetic construct
  source 1..75: mol_type = other DNA
gctacgagcgggaattattattggcgccggatcggctgcattcgaagtcatgcgcgatatggtttacaacttgcc

SEQ ID NO: 332246 - DNA, 75 bp, synthetic construct
  source 1..75: mol_type = other DNA
acccgggcgttgatggaccgcgcgatcggtcataagctggcgaaaggccgcccggagcgtgaatatttgcagacc

SEQ ID NO: 332247 - DNA, 75 bp, synthetic construct
  source 1..75: mol_type = other DNA
tggtgacttatcagcatgtggcggatatcccgctggagaaatacgacgggacggggacgagcggtaaaccaggcg

SEQ ID NO: 332248 - DNA, 75 bp, synthetic construct
  source 1..75: mol_type = other DNA
atgaacagggaaattcagcagcggctacagtgggtaaaactctatgaaacgtctagtgacgcggggttcgtatgc

SEQ ID NO: 332249 - DNA, 75 bp, synthetic construct
  source 1..75: mol_type = other DNA
actctgatggagcgctacttcgaacttgcagagcaaacacgagcctgttgtcctgatagctttgtgacagcagcc

SEQ ID NO: 332250 - DNA, 75 bp, synthetic construct
  source 1..75: mol_type = other DNA
agcgttcaccatcaacgaaaaccggcacttgcgaagtcgctctgattctggagttacgttctcagcgaaatctgg

SEQ ID NO: 332251 - DNA, 75 bp, synthetic construct
  source 1..75: mol_type = other DNA
gtcaccagtgcgaaggccacgggaccatggaaaacccggcctttgaaaatggattcacccaatcagaaatggctg

SEQ ID NO: 332252 - DNA, 75 bp, synthetic construct
  source 1..75: mol_type = other DNA
tacagtgggtaaaactctatgaaacgtctggtgacgcagggtttgtatgccgtcgctgcggtatttcccgcccca

SEQ ID NO: 332253 - DNA, 75 bp, synthetic construct
  source 1..75: mol_type = other DNA
ggcagcattactataactgggaacgtcctcatagcgctcacaacggtaaaactccgatggaacgctactttgaac

SEQ ID NO: 332254 - DNA, 75 bp, synthetic construct
  source 1..75: mol_type = other DNA
gcataccagaatcttttgagccagtaagctttgatagtggcatcaatatcatcttaggtgaaaaagatgtttcat

SEQ ID NO: 332255 - DNA, 75 bp, synthetic construct
  source 1..75: mol_type = other DNA
gcagtaggctttcgaaaatacccaataccgttttttctgataagacatatgtttgtctggatttctttattaata

SEQ ID NO: 332256 - DNA, 75 bp, synthetic construct
  source 1..75: mol_type = other DNA
cgtgtcattaccgcctgtcagggaagacggtaaaagcatcacgcagccgggagtcgatcagacgccgcacaacca

SEQ ID NO: 332257 - DNA, 75 bp, synthetic construct
  source 1..75: mol_type = other DNA
ttcccgtccagaggaagtgatcgacgaattaaaaaaccagggcgtaacgctgatggatatcaatgatgcaaacag

SEQ ID NO: 332258 - DNA, 75 bp, synthetic construct
  source 1..75: mol_type = other DNA
gacctgaaggaactgatggcggaatggcagcattactataactgggaacgtcctcatagcgctcacaacggtaaa

SEQ ID NO: 332259 - DNA, 75 bp, synthetic construct
  source 1..75: mol_type = other DNA
tgccgttcacgcaagctatcagcccaatgaggagcatattcaggaacagaattacaagcttgaactgagaaaatt

SEQ ID NO: 332260 - DNA, 75 bp, synthetic construct
  source 1..75: mol_type = other DNA
ccgttatccggaaagagatcctggcagagcaggcggaacccggatttatagatccagattattttgatgaaacct

SEQ ID NO: 332261 - DNA, 75 bp, synthetic construct
  source 1..75: mol_type = other DNA
taggccgtgaaggacataacgtgacgaaagtcagtcgccgtgatttaccttttgtcgttgccgcaggaaaaaatg

SEQ ID NO: 332262 - DNA, 75 bp, synthetic construct
  source 1..75: mol_type = other DNA
tattctcgatttaggcttaaccaccgaatatttagaaactttcggtgtgccgttaattggctatcagaccaaagc

SEQ ID NO: 332263 - DNA, 75 bp, synthetic construct
  source 1..75: mol_type = other DNA
gagtatttagaaaccttcggtgtgccgttaattggctatcagactaaagcgctgcctgcgtttttctgccgtacc

SEQ ID NO: 332264 - DNA, 75 bp, synthetic construct
  source 1..75: mol_type = other DNA
aaactgtcagcagatcgggaaaatggctcgccaggctggcagtaagcagtctcatttttgccattctctcttttg

SEQ ID NO: 332265 - DNA, 75 bp, synthetic construct
  source 1..75: mol_type = other DNA
tagctggactctggttaaccagcaaacaagctggctcattcgcagtgccgcacatgccttcaacgaactggatga

SEQ ID NO: 332266 - DNA, 75 bp, synthetic construct
  source 1..75: mol_type = other DNA
agaaagtacgccattcctgctggcgcgcgttgctgagctgaccggcggtgacagcctgaaatccaacatccagct

SEQ ID NO: 332267 - DNA, 75 bp, synthetic construct
  source 1..75: mol_type = other DNA
ggaaacgctgaaagccactgacgaggcgcagcgcacggcgttgtacaccaaagcagagcaacagttggataaaga

SEQ ID NO: 332268 - DNA, 75 bp, synthetic construct
  source 1..75: mol_type = other DNA
cgtgggttggtggttataccggtaaagatccattggataacacctacacccgaaatatgtacattgtgaaacact

SEQ ID NO: 332269 - DNA, 75 bp, synthetic construct
  source 1..75: mol_type = other DNA
atatatcaagaaaaacaaaaagatcgtgaatgcgtttgcagggttaagcgatccggttgtcatgctgaaattaat

SEQ ID NO: 332270 - DNA, 75 bp, synthetic construct
  source 1..75: mol_type = other DNA
gcaaaatgcccagaccgcaattgaagtagaagaaactattcgtcaacagggcgctgtaccagccactatcgctat

SEQ ID NO: 332271 - DNA, 75 bp, synthetic construct
  source 1..75: mol_type = other DNA
gaaaccgtgggttggggggtataccggcaaagatccgctggataatacctacaccagaaatatgtacattgtgaa

SEQ ID NO: 332272 - DNA, 75 bp, synthetic construct
  source 1..75: mol_type = other DNA
tatcgttcttgagcgcagcccgacttactggaacaatgcgaaaacggttattaatcaggtgacttatttgccgat

SEQ ID NO: 332273 - DNA, 75 bp, synthetic construct
  source 1..75: mol_type = other DNA
aactggctatgcacgggcagacccacgttaacaaaatctacgacccagccgcaggttccggttcgctgttgttac

SEQ ID NO: 332274 - DNA, 75 bp, synthetic construct
  source 1..75: mol_type = other DNA
cacagtcagcaacatagaccagttacgcaaagatattgatgcgattgtagctgaaattgaaagctgcgaggtgca

SEQ ID NO: 332275 - DNA, 75 bp, synthetic construct
  source 1..75: mol_type = other DNA
gtatcttcgttgctatcgaaagttctgcttacggctacccttcagaagcagacatcaaaggtttgtttgctgatt

SEQ ID NO: 332276 - DNA, 75 bp, synthetic construct
  source 1..75: mol_type = other DNA
gcacaacatcaactacgacaaatttgatatcagactggggaataccctgactgagcctcactttggcgatgaaaa

SEQ ID NO: 332277 - DNA, 75 bp, synthetic construct
  source 1..75: mol_type = other DNA
ctgagctgaaaaccacggtcagcaaaatcgaccagttgcgcaaagatattgatgcgattgtggctgaaattgaag

SEQ ID NO: 332278 - DNA, 75 bp, synthetic construct
  source 1..75: mol_type = other DNA
cgttgccgctaaagcgaacaccaacgacaggctgaatgctgatttaaacagtatcttcgtcgctattgaaagctc

SEQ ID NO: 332279 - DNA, 75 bp, synthetic construct
  source 1..75: mol_type = other DNA
aataactatgtcgaaaccgtgatttcactcgcaccgaacctgttctttggcaccaccattgccgtcaatattctg

SEQ ID NO: 332280 - DNA, 75 bp, synthetic construct
  source 1..75: mol_type = other DNA
aattacaccgtcagatctggcaaattgctaacgatgtcaggggttcagtcgatggatgggattttaagcagtacg

SEQ ID NO: 332281 - DNA, 75 bp, synthetic construct
  source 1..75: mol_type = other DNA
aacaacgtgctgactgatgcccatatcgaacagattatgcaggtctttgagagcaaggcagatactgactatctg

SEQ ID NO: 332282 - DNA, 75 bp, synthetic construct
  source 1..75: mol_type = other DNA
cgatgaacgttttgccccggctggcgttctggcccccaaatccaaagctgactttgcgtttgtattacatgcgct

SEQ ID NO: 332283 - DNA, 75 bp, synthetic construct
  source 1..75: mol_type = other DNA
cagcacgtctccaagctgattgcacaactggctatgcacgggcagacccacgttaacaaaatctacgacccggca

SEQ ID NO: 332284 - DNA, 75 bp, synthetic construct
  source 1..75: mol_type = other DNA
gtatcttcgtcgctattgaaagctcagcctacggctacccgtcggaggccgacatcaaaggcctgttcgccgatt

SEQ ID NO: 332285 - DNA, 75 bp, synthetic construct
  source 1..75: mol_type = other DNA
taacaccgttaaagataaaaatgcccgcctggctgcggttctgaaaggggttgaagggttaaagcttggcgactt

SEQ ID NO: 332286 - DNA, 75 bp, synthetic construct
  source 1..75: mol_type = other DNA
gctgcgattgtctgcttcccgggtattttttaccgtggcggcgcggagcagaaaatccgtcagtatctggtcgat

SEQ ID NO: 332287 - DNA, 75 bp, synthetic construct
  source 1..75: mol_type = other DNA
aacaacattctgaccgatgctcatatcgaacagattatgcaagtatttgccagcaaggaagatgttgctcatctg

SEQ ID NO: 332288 - DNA, 75 bp, synthetic construct
  source 1..75: mol_type = other DNA
tatcagcgaaaatttttccagccatatggaaaatggtgatgacagcatctgttatgcaaaactggatgacaacgt

SEQ ID NO: 332289 - DNA, 75 bp, synthetic construct
  source 1..75: mol_type = other DNA
tggagcttatcgaagcgggtaacccacagctaaaaggtgtgttgccgaaagtctacgctcgccagaacctcgacg

SEQ ID NO: 332290 - DNA, 75 bp, synthetic construct
  source 1..75: mol_type = other DNA
tgctattcgtggcataaactctgaacacgtcaggtggaacagtgaaggctcgttcctgaatgatgcccataaaga

SEQ ID NO: 332291 - DNA, 75 bp, synthetic construct
  source 1..75: mol_type = other DNA
aatctgctaaaaatgacgtgtaatcagacagataagaaaactctgttttctctcataccttcaacaacaggtgcg

SEQ ID NO: 332292 - DNA, 75 bp, synthetic construct
  source 1..75: mol_type = other DNA
ctgggtaacaccgttaaagataaaaatgcccgcctggctgcggttctgaaaggggttgaagggttaaaacttggt

SEQ ID NO: 332293 - DNA, 75 bp, synthetic construct
  source 1..75: mol_type = other DNA
gatactcgcgaaattatcgatatcgctgagctgaatgctgacctgaaaaccacagtcagcaacatagaccagtta

SEQ ID NO: 332294 - DNA, 75 bp, synthetic construct
  source 1..75: mol_type = other DNA
atgactataacctgtcggtgagcagttatgtggaagtgaaagataaccgcgaaattatcgatattgctgagctga

SEQ ID NO: 332295 - DNA, 75 bp, synthetic construct
  source 1..75: mol_type = other DNA
gatggatgggattttaagcaatacgttctgggcgcacttttctaccgttttatcagcgaaaatttttccagttat

SEQ ID NO: 332296 - DNA, 75 bp, synthetic construct
  source 1..75: mol_type = other DNA
cgatgagcgctttgctccagctggtgtactggccccgaaatcaaaagcggactttgcatttgtcctacatgcgct

SEQ ID NO: 332297 - DNA, 75 bp, synthetic construct
  source 1..75: mol_type = other DNA
tgttcggtgatgcctatgagttcctgatttctaactatgcggcaaatgccggtaagtcaggcggcgagttcttta

SEQ ID NO: 332298 - DNA, 75 bp, synthetic construct
  source 1..75: mol_type = other DNA
tgatccttgccgcgggcaaaggcactcgcatgtattccgatcttccgaaagtgctgcacacccttgccgggaaag

SEQ ID NO: 332299 - DNA, 75 bp, synthetic construct
  source 1..75: mol_type = other DNA
atctcactaagccagcggtgctggaagtgattaccccaacgcaggttcgtctgaccatcagcgaagggcgttatc

SEQ ID NO: 332300 - DNA, 75 bp, synthetic construct
  source 1..75: mol_type = other DNA
ctatttcattagttggtcgagatatctacgaaactctaataaaagaatatactgaaaagcagtggggacgttcct

SEQ ID NO: 332301 - DNA, 75 bp, synthetic construct
  source 1..75: mol_type = other DNA
gcggactctttggttcagtatttgccttcgaagcaaataagcgtggttattctgtaaaggttattgaaaaaagaa

SEQ ID NO: 332302 - DNA, 75 bp, synthetic construct
  source 1..75: mol_type = other DNA
gcctcagggctatgtttgttccacggatgacccggatcacccaacggtgctctattttcttgatgaacctgtagc

SEQ ID NO: 332303 - DNA, 75 bp, synthetic construct
  source 1..75: mol_type = other DNA
ctgaccattagcgaagggcgttatcatcaggtgaaacgcatgtttgccgctgtgggtaaccacgtggtagagctg

SEQ ID NO: 332304 - DNA, 75 bp, synthetic construct
  source 1..75: mol_type = other DNA
gcctcagggctatgtttgctccacggacgaccctgatcacccaacggtgctctattttcttgatgaaccggtagc

SEQ ID NO: 332305 - DNA, 75 bp, synthetic construct
  source 1..75: mol_type = other DNA
tgactctcggtcatcgcgtgaaaatcggcaccggttgcgtgattaaaaacagcgtgattggcgatgattgcgaaa

SEQ ID NO: 332306 - DNA, 75 bp, synthetic construct
  source 1..75: mol_type = other DNA
aaaaaagcgcgtctgggtaaaggttcaaaagccggtcatctgacttatctgggcgatgcggaaatcggtgataac

SEQ ID NO: 332307 - DNA, 75 bp, synthetic construct
  source 1..75: mol_type = other DNA
gtgaagcgggtgtcccggtgaccgaattgcgtgccggaattatcgttggtgcaggttcagcggcgttcgaagtca

SEQ ID NO: 332308 - DNA, 75 bp, synthetic construct
  source 1..75: mol_type = other DNA
ccaaaagaattcgaagaaggcgatgagtattactatcctgtcaatgatgaaaaaaatatgcaaatctataaaatg

SEQ ID NO: 332309 - DNA, 75 bp, synthetic construct
  source 1..75: mol_type = other DNA
gatcaacaccggcattctgatcgccaacggcgcagatatgaaacgctggctggctaaactgaccaacaataacgc

SEQ ID NO: 332310 - DNA, 75 bp, synthetic construct
  source 1..75: mol_type = other DNA
agcgtgattggcgatgattgcgaaatcagtccgtataccgttgtggaagatgcgaatctggcagcggcctgtacc

SEQ ID NO: 332311 - DNA, 75 bp, synthetic construct
  source 1..75: mol_type = other DNA
actgggatggataaccagatcttctcgttgtatgccaaagggatgaccacccgtgagatcgctgctgcgttcaaa

SEQ ID NO: 332312 - DNA, 75 bp, synthetic construct
  source 1..75: mol_type = other DNA
cgggagaaaccgtgaacgacggaacactgacaaatcatgacaaccagattgtcttcggtacggccaacggaatga

SEQ ID NO: 332313 - DNA, 75 bp, synthetic construct
  source 1..75: mol_type = other DNA
taacgaacatcagattgacctgttcggcgatgcctatgagttcctgatttctaactatgccgcgaatgctggtaa

SEQ ID NO: 332314 - DNA, 75 bp, synthetic construct
  source 1..75: mol_type = other DNA
ccaaagttcagtttattgacgccagcgaactgttcaaaaaagagactaacaacaacattctgaccgatgcccata

SEQ ID NO: 332315 - DNA, 75 bp, synthetic construct
  source 1..75: mol_type = other DNA
cggcaccggttgcgtgattaaaaacagcgtgattggcgatgattgcgaaatcagtccgtataccgttgtggaaga

SEQ ID NO: 332316 - DNA, 75 bp, synthetic construct
  source 1..75: mol_type = other DNA
tcgataccaccagtaaccgcctgggtaacaccgttaaggataaaaatgcccgcctggctgcggttctgaaagggg

SEQ ID NO: 332317 - DNA, 75 bp, synthetic construct
  source 1..75: mol_type = other DNA
ccaaagttcagtttattgatgccagcgaactgttcaaaaaagagactaacaacaacattctgaccgatgctcata

SEQ ID NO: 332318 - DNA, 75 bp, synthetic construct
  source 1..75: mol_type = other DNA
actcccgtaatggctattccacgaaaaccgtcaccattaccgacgggccgatggaattacgtactccacgtgatc

SEQ ID NO: 332319 - DNA, 75 bp, synthetic construct
  source 1..75: mol_type = other DNA
ataaccagatcctgtcgttgtatgccaaagggatgaccacccgtgagatagctactgcgttcaaagaactgtatg

SEQ ID NO: 332320 - DNA, 75 bp, synthetic construct
  source 1..75: mol_type = other DNA
aaacagttacaggctctggctaacgaactggccaaaaacctcaaaacccctgaagacctcagtcagtttgatcgg

SEQ ID NO: 332321 - DNA, 75 bp, synthetic construct
  source 1..75: mol_type = other DNA
atgacaagccttcagcagcgtgcagagctacaccgtcaaatctgggccatagccaatgatgtcaggggctcagtg

SEQ ID NO: 332322 - DNA, 75 bp, synthetic construct
  source 1..75: mol_type = other DNA
ttttttaccgtggcggcgcagagcagaaaatccgtcagtatctggtcgataataactatgtcgaaaccgtaattt

SEQ ID NO: 332323 - DNA, 75 bp, synthetic construct
  source 1..75: mol_type = other DNA
ccgcgaaattacctcagtcttcaaagaaatgtacgatgcagacgtctctccggcgctgatatcgaaagtcaccga

SEQ ID NO: 332324 - DNA, 75 bp, synthetic construct
  source 1..75: mol_type = other DNA
cgcggctgttttatcatggcattcaaccgttgaaagtgggggttcatccactcaccaccgactgccgctacaacc

SEQ ID NO: 332325 - DNA, 75 bp, synthetic construct
  source 1..75: mol_type = other DNA
atgcttttttctgtacattcagggaaaaagttgaacaactgcgtaacacactcattcagagctctgaagatcata

SEQ ID NO: 332326 - DNA, 75 bp, synthetic construct
  source 1..75: mol_type = other DNA
cccgtccgcaatttattaagcacactgcaacaaaaactcgacaccccggcaggacagcaagtcgcacagaccctg

SEQ ID NO: 332327 - DNA, 75 bp, synthetic construct
  source 1..75: mol_type = other DNA
atggatatgctcaatcttggcaataatgaatctctggtgtgcggagtattccccaaccaggacggcacgtttacc

SEQ ID NO: 332328 - DNA, 75 bp, synthetic construct
  source 1..75: mol_type = other DNA
gtcagcatggatactatcgatcttggcaacagcgaatctctggtatgtggcgtgttccccaaccaggacggtacg

SEQ ID NO: 332329 - DNA, 75 bp, synthetic construct
  source 1..75: mol_type = other DNA
atgcaaaaaatcgacctcggcaataacgaatccctggtgtgcggcgtattccccaaccaggacggtacgttcacc

SEQ ID NO: 332330 - DNA, 75 bp, synthetic construct
  source 1..75: mol_type = other DNA
cacattccagagctgcggcactggcggttgattctgccgccgcaaaactgatgcagaatgcggaaaatgtcagcg

SEQ ID NO: 332331 - DNA, 75 bp, synthetic construct
  source 1..75: mol_type = other DNA
tcgtacggagaattatgccatgacggtccattattaccggttgcgggattacgccctgcagcatccggaatgcag

SEQ ID NO: 332332 - DNA, 75 bp, synthetic construct
  source 1..75: mol_type = other DNA
cggatatccaggagattgagaaatgtcagaatcaggtgactggtgatgtcaaaattgccatggataacatcaata

SEQ ID NO: 332333 - DNA, 75 bp, synthetic construct
  source 1..75: mol_type = other DNA
tcgtcaaaggtattgaaactggttttcgtggtacggccctgtatgccgcagaaaagattgccggacgtatcaatg

SEQ ID NO: 332334 - DNA, 75 bp, synthetic construct
  source 1..75: mol_type = other DNA
aagtgatgtcactgacccgggcatatttcggggagctgcaggcatccattgagcaggatattaaccagcccgtcc

SEQ ID NO: 332335 - DNA, 75 bp, synthetic construct
  source 1..75: mol_type = other DNA
ctgcctgcctctcgtgtttatcccggatcctcacgccaggcatacctggctaaccgtgcgcttcatgagttacgg

SEQ ID NO: 332336 - DNA, 75 bp, synthetic construct
  source 1..75: mol_type = other DNA
atggatactatcgatcttggcaacaacgaatctctggtatgtggcgtgtttcccaaccaggatggaacgttcacc

SEQ ID NO: 332337 - DNA, 75 bp, synthetic construct
  source 1..75: mol_type = other DNA
gcgatgacgtataccaaaagcaaaacgtttaaaaccgaaaatggtgcccgtcgctggctggaaagaaacccaggt

SEQ ID NO: 332338 - DNA, 75 bp, synthetic construct
  source 1..75: mol_type = other DNA
cctcacacaaaccaaaggtacgtaagattccttcatggtgcttagataaattaccatgtgacgcacagattttag

SEQ ID NO: 332339 - DNA, 75 bp, synthetic construct
  source 1..75: mol_type = other DNA
tcaaggcagtttgtgaaaaacttaaaaaccaaccacacaagccgaagttgagaattaaaagcaaacgtcaagtta

SEQ ID NO: 332340 - DNA, 75 bp, synthetic construct
  source 1..75: mol_type = other DNA
atgcaaaaaatcgacctcggcaacaacgaatccctagtgtgtggcgtgttccccaaccaggatggaacgttcacc

SEQ ID NO: 332341 - DNA, 75 bp, synthetic construct
  source 1..75: mol_type = other DNA
acgaatctctggtatgtggcgtgttccccaaccaggatggaacgttcaccgccatgacttataccaaaagcaaaa

SEQ ID NO: 332342 - DNA, 75 bp, synthetic construct
  source 1..75: mol_type = other DNA
acgaatctctggtgtgcggcgtgtttcccaaccaggacggcacgttcacggcgatgacgtataccaaaagcaaaa

SEQ ID NO: 332343 - DNA, 75 bp, synthetic construct
  source 1..75: mol_type = other DNA
ggacaactatgtgctggaaaataatctgttccgggtaatcaaagaggccagagtacctggtgatgtactatctat

SEQ ID NO: 332344 - DNA, 75 bp, synthetic construct
  source 1..75: mol_type = other DNA
tcggcctaccgcttgggctcagtagtgtttcatcaagctgagagcgatgcagaaaaccgactggatatcgtcgat

SEQ ID NO: 332345 - DNA, 75 bp, synthetic construct
  source 1..75: mol_type = other DNA
aacccgacttgctgaattggaacgtcaggatttgcaggaagcgctaatccagctaaagccctccgttgaaggttt

SEQ ID NO: 332346 - DNA, 75 bp, synthetic construct
  source 1..75: mol_type = other DNA
atgtttgaagagcgtctagagactattcggtctgtttgtgaaaacttaaagttacaagccaatccagccttaaga

SEQ ID NO: 332347 - DNA, 75 bp, synthetic construct
  source 1..75: mol_type = other DNA
atgacgtataccaaaagcaaaacgtttaaaaccgaagctggcgcgcgtcgctggttagccagaaatactgactga

SEQ ID NO: 332348 - DNA, 75 bp, synthetic construct
  source 1..75: mol_type = other DNA
tattcatttacccaaccgggcgagccgatcaaaatgaaaaatgtcgggcgtatgataggtaatgctgttcctgta

SEQ ID NO: 332349 - DNA, 75 bp, synthetic construct
  source 1..75: mol_type = other DNA
cgcaacagagccaggctatcgggaaactgtttcgtgctgctgttgcagcaattgcagcgtttaacctggcgttct

SEQ ID NO: 332350 - DNA, 75 bp, synthetic construct
  source 1..75: mol_type = other DNA
gtggaatatattcccatcgcgattgtgctgatgctgtttatggaaatgaatggcgcagaaacctggatggtgcat

SEQ ID NO: 332351 - DNA, 75 bp, synthetic construct
  source 1..75: mol_type = other DNA
ataccggaccaataacgcttttctcacctatgtggaaacagtgatttcttcattgaatttccgcgaaacagggct

SEQ ID NO: 332352 - DNA, 75 bp, synthetic construct
  source 1..75: mol_type = other DNA
taacgcacgcgatagtgctccgaccagtgagcaggaagttttgtcgttacaggctgcgccccctgtattcctgga

SEQ ID NO: 332353 - DNA, 75 bp, synthetic construct
  source 1..75: mol_type = other DNA
gcgcacaaacgcgggtccaacaactggaatatcgtttagcggaaaacatgcgcgcgcagcttagtgccatgcgcg

SEQ ID NO: 332354 - DNA, 75 bp, synthetic construct
  source 1..75: mol_type = other DNA
gctgcactacatgatattttgcatgtgttaaaacgtcgcgatccttctctgccggtgatcatctaccccaccgcc

SEQ ID NO: 332355 - DNA, 75 bp, synthetic construct
  source 1..75: mol_type = other DNA
gaatcagcgaaacgagtgcgacgtgttaatcgtcgggcgcggcggcggttcgctggaagatttgtggagttttaa

SEQ ID NO: 332356 - DNA, 75 bp, synthetic construct
  source 1..75: mol_type = other DNA
ttggtactgttaataaaaacagtaccgaaaatggttatgtttcagcacaaaacagacccaaaaacggaactctta

SEQ ID NO: 332357 - DNA, 75 bp, synthetic construct
  source 1..75: mol_type = other DNA
ttattatctattttgcttttttaactctggggactaaattaagtgtgtataggttatttatacttgccggagcat

SEQ ID NO: 332358 - DNA, 75 bp, synthetic construct
  source 1..75: mol_type = other DNA
atccagtaagtctgtattgacctggcttgctgatatgtgcggtgccgatttgtgtgcatacccgtctgtatctgc

SEQ ID NO: 332359 - DNA, 75 bp, synthetic construct
  source 1..75: mol_type = other DNA
gaactcttagctgcatggaaaataaccaaagacacccaaattttccatcaaagacacccaaaaacggatcacgga

SEQ ID NO: 332360 - DNA, 75 bp, synthetic construct
  source 1..75: mol_type = other DNA
tggcctgagcgaacccatcggaaaatttccgatgaccgatagctggtatccgtcacgggattttcgacgacgggc

SEQ ID NO: 332361 - DNA, 75 bp, synthetic construct
  source 1..75: mol_type = other DNA
caccaggtggcaccgcatcacgggcagttcaggaaattcgggcagcacgtgagcagtgggaacgtgaaaacggat

SEQ ID NO: 332362 - DNA, 75 bp, synthetic construct
  source 1..75: mol_type = other DNA
attacatcacatggctgggtattcgtgcggacgaaccccgtaggctgaaaccgaaaccgggcgtccggtatcttg

SEQ ID NO: 332363 - DNA, 75 bp, synthetic construct
  source 1..75: mol_type = other DNA
aatggcaaaccggtttgaacggcggcctggtagtggcgaatccgatcccggaacagtttgcgatgccggaggaat

SEQ ID NO: 332364 - DNA, 75 bp, synthetic construct
  source 1..75: mol_type = other DNA
ccatggcctctgcggcggcgggtagcaacagttgggtgcaggtgaaaacgcaccgcaccattggcgatgccgtcg

SEQ ID NO: 332365 - DNA, 75 bp, synthetic construct
  source 1..75: mol_type = other DNA
agcatgttgccggaagcagagcaacaacgcctgttgtttgaaggcggctatccggtgctggcgaaagtcgcaaaa

SEQ ID NO: 332366 - DNA, 75 bp, synthetic construct
  source 1..75: mol_type = other DNA
atagcctgaaatccaatatccagctggtgttcaacaacgccattctggcgagtgaaattgccaaagaataccagc

SEQ ID NO: 332367 - DNA, 75 bp, synthetic construct
  source 1..75: mol_type = other DNA
aaccggcggtgatagcctgaaatccaatattcaactggtctttaataacgccattctggcgagcgaaattgccaa

SEQ ID NO: 332368 - DNA, 75 bp, synthetic construct
  source 1..75: mol_type = other DNA
tgggccgtgaaggacataacgtgaccaaagttagtcgtcgcgatttaccttttgttgttgccgccggaaaaaatg

SEQ ID NO: 332369 - DNA, 75 bp, synthetic construct
  source 1..75: mol_type = other DNA
atgttaaaaaaatgccgcttgatcgcgtcaccaagatctgtttctgcggcgatcacgatgatcttacgcgtttgc

SEQ ID NO: 332370 - DNA, 75 bp, synthetic construct
  source 1..75: mol_type = other DNA
ccgagctatctgattttgataagtcggatgttatccggtggtggcataaacaaccttttgatttgcaaatcccgg

SEQ ID NO: 332371 - DNA, 75 bp, synthetic construct
  source 1..75: mol_type = other DNA
accgaaagacaaataaagacgttatgtaccgtggtcatctgagccttgacgggattgccagaatgtatgccgaca

SEQ ID NO: 332372 - DNA, 75 bp, synthetic construct
  source 1..75: mol_type = other DNA
cggcatggtgcagtcgcttaatgtctccgtcgcctccgcacttattctttacgaagcccagcgtcagcggcaaaa

SEQ ID NO: 332373 - DNA, 75 bp, synthetic construct
  source 1..75: mol_type = other DNA
atcgtgatgatttacctgcggatgtcgcggagctggtgctgtatcagcaatgggatacccgagccagcatgcata

SEQ ID NO: 332374 - DNA, 75 bp, synthetic construct
  source 1..75: mol_type = other DNA
ggtttatcgttgcgcgattgcatggcctttggtgatgcgatgaacgatcgcgaaatgttaggctgcgtcggtagc

SEQ ID NO: 332375 - DNA, 75 bp, synthetic construct
  source 1..75: mol_type = other DNA
atctctgctatttattagtgcagccacaaaattaattgcaagaggtaaatggaaatcatatatttttgattacaa

SEQ ID NO: 332376 - DNA, 75 bp, synthetic construct
  source 1..75: mol_type = other DNA
tgcagaaagcccgttttccgggagttatgattaatatacgttttcctttaccggaaaatgcaactcaaagaacct

SEQ ID NO: 332377 - DNA, 75 bp, synthetic construct
  source 1..75: mol_type = other DNA
agcgaagccggactgcaaactgccggataaggcgatggactacctggagcgaaacggactgacaagcgtggagga

SEQ ID NO: 332378 - DNA, 75 bp, synthetic construct
  source 1..75: mol_type = other DNA
aaggtaagaaaatcagcaatgtgaatgaagctctagctgcttttgaaaaatacaaggatgttttaaataagaaat

SEQ ID NO: 332379 - DNA, 75 bp, synthetic construct
  source 1..75: mol_type = other DNA
ttatagagcgagaaacgaaagaagtaattaaacatttcgaatttgataattatagaaaagctgaccgcgtcgaag

SEQ ID NO: 332380 - DNA, 75 bp, synthetic construct
  source 1..75: mol_type = other DNA
acaccattcatgcgtcttatcagttcgctaatgtgatggatatggagaactttaatatttacctcgggacgtatt

SEQ ID NO: 332381 - DNA, 75 bp, synthetic construct
  source 1..75: mol_type = other DNA
ctggataaagaaaaccaggatttattacaactagaaggcaggaagcgcctggctgcgttgatgattgtagatatg

SEQ ID NO: 332382 - DNA, 75 bp, synthetic construct
  source 1..75: mol_type = other DNA
tatgttgcttttagatattcccgttgatgttgttgaggaaggttggtggaataaatcattacatgcatcactttc

SEQ ID NO: 332383 - DNA, 75 bp, synthetic construct
  source 1..75: mol_type = other DNA
aaatatgtggggattattgccggatattatccgttccccggaaaacaacatatgttgcttttagatattcccgtt

SEQ ID NO: 332384 - DNA, 75 bp, synthetic construct
  source 1..75: mol_type = other DNA
tgaggaaagtgaagccggactgtaaattgccggataaggcgatggactacctgaagcggaacgaactgataagcg

SEQ ID NO: 332385 - DNA, 75 bp, synthetic construct
  source 1..75: mol_type = other DNA
gcacatataagatggatattgctgttctggaaatcgcactggcatcgctggcagcagagccagtcggtaaattgc

SEQ ID NO: 332386 - DNA, 75 bp, synthetic construct
  source 1..75: mol_type = other DNA
accggataaggcgatgagttatctggagcggaacggactgataagcgtggaggatatttacgatgacctggcctg

SEQ ID NO: 332387 - DNA, 75 bp, synthetic construct
  source 1..75: mol_type = other DNA
tcacatgcatctggtgtgtatcactggcggattaccatcaggttctacactagacaaaccattacaggtcatgaa

SEQ ID NO: 332388 - DNA, 75 bp, synthetic construct
  source 1..75: mol_type = other DNA
atggcattactggaagaacgcctagaagtttcagaaaagaggtcggaaaaagcagagagaatgttaaagagtttt

SEQ ID NO: 332389 - DNA, 75 bp, synthetic construct
  source 1..75: mol_type = other DNA
cgtaagcttgataatggttatttcgctggattttcagcacagccactggcgaatatacacggttcagtgaatatt

SEQ ID NO: 332390 - DNA, 75 bp, synthetic construct
  source 1..75: mol_type = other DNA
tatatctatatgatgaaagagggacgcggtcgttctgacgctggtggtaatttcctcatcagtaaacaactcgat

SEQ ID NO: 332391 - DNA, 75 bp, synthetic construct
  source 1..75: mol_type = other DNA
tcaaactgaacatgccagtgtcattcccggaaaaccgggcagccggcgaaaccgtcgcgcagctgcttcacaaat

SEQ ID NO: 332392 - DNA, 75 bp, synthetic construct
  source 1..75: mol_type = other DNA
aacgttaagaagtgtgatatcaaaaaatgaagaattgatagcaattgatcctaaaaagagaatgtcatctttaaa

SEQ ID NO: 332393 - DNA, 75 bp, synthetic construct
  source 1..75: mol_type = other DNA
tacttgaagacggaacatctttatataataacggtaattatcatggacgatatatggagcagcagaaaaatgtcg

SEQ ID NO: 332394 - DNA, 75 bp, synthetic construct
  source 1..75: mol_type = other DNA
gtcacgaaccgttcacccgagaatggtacgctggttctgcgggctatctctcattacaacaaagcgaattctgcg

SEQ ID NO: 332395 - DNA, 75 bp, synthetic construct
  source 1..75: mol_type = other DNA
aaacacaggtgttggaaacgttaaattaacaacctcactaatgataaatcctgagctcaataccgagcataatct

SEQ ID NO: 332396 - DNA, 75 bp, synthetic construct
  source 1..75: mol_type = other DNA
gctcccaggtaagatcgctgattttcctgatgaatggattgagcaaaattatcttgaagacatcatgtttagtgg

SEQ ID NO: 332397 - DNA, 75 bp, synthetic construct
  source 1..75: mol_type = other DNA
gataacccgactggcaacgcgttgcatacgcccataagcacgacgcacagcgggcaaagaaaacgcctgactaag

SEQ ID NO: 332398 - DNA, 75 bp, synthetic construct
  source 1..75: mol_type = other DNA
ggcacttcagcccctgcttgatgacgggcgggcaaaatccattaccgttgacacgaaagcgggccagcgcggctg

SEQ ID NO: 332399 - DNA, 75 bp, synthetic construct
  source 1..75: mol_type = other DNA
gttaagctggcgaccgaaacgatagcggaaggtgaactggataaagtcgtgctggcgcgggcgaccgatttgcat

SEQ ID NO: 332400 - DNA, 75 bp, synthetic construct
  source 1..75: mol_type = other DNA
gttgaagatggttggtggaataaatcattacatacatcattgtctcctctttttaaaaagatatttctgggtaaa

SEQ ID NO: 332401 - DNA, 75 bp, synthetic construct
  source 1..75: mol_type = other DNA
gcgatgacgcataccaaaagtaaaaagtttaaaaccgaagctggcgcgcgtcgctggttagccagaaacactgac

SEQ ID NO: 332402 - DNA, 75 bp, synthetic construct
  source 1..75: mol_type = other DNA
acgaatctctggtgtgcggcgtcttccccaatcaggacggcacgtttaccgcgatgacgtataccaaaagtaaaa

SEQ ID NO: 332403 - DNA, 75 bp, synthetic construct
  source 1..75: mol_type = other DNA
atcaagccatgcccgtgctgacagaagtaatctactgcaccgcaggcttttaacacctgcaacggttgatggcag

SEQ ID NO: 332404 - DNA, 75 bp, synthetic construct
  source 1..75: mol_type = other DNA
gccatgacatataccagaagcaggacgtttaaaactgaaagtgacgcacgccgctggttagtcaaaacattagcg

SEQ ID NO: 332405 - DNA, 75 bp, synthetic construct
  source 1..75: mol_type = other DNA
ccccaacctggacggcacgtttaccgcgatgacgtataccagaagcaaaacgtttaaaactgaagctggcgcgcg

SEQ ID NO: 332406 - DNA, 75 bp, synthetic construct
  source 1..75: mol_type = other DNA
gcaacagcgaatctctggtatgtggcgtgttccccaaccaggacggtacgtttaccgcgatgacgtataccaaaa

SEQ ID NO: 332407 - DNA, 75 bp, synthetic construct
  source 1..75: mol_type = other DNA
ctcaaagacgataccgcccaggtgcgctgcgcaatgttccgtaacagcaaccgccgggtagcctttcgcccacag

SEQ ID NO: 332408 - DNA, 75 bp, synthetic construct
  source 1..75: mol_type = other DNA
agtatgcagcccgccggggaaggtttactgcagcagaagtacgaacagctaaaagcaaagttacaggctgaaggt

SEQ ID NO: 332409 - DNA, 75 bp, synthetic construct
  source 1..75: mol_type = other DNA
accgcgatgacgtataccaaaagcaaaacgtttaaaaccgaatctggcgcgcgtcgttggttggtaagacattca

SEQ ID NO: 332410 - DNA, 75 bp, synthetic construct
  source 1..75: mol_type = other DNA
caaaatccgcagccgcgtattcaccgcgcacagacgcgaattcaacaactggaatatcgcctggcagaaacgttg

SEQ ID NO: 332411 - DNA, 75 bp, synthetic construct
  source 1..75: mol_type = other DNA
agtatgcagcctgccggtgaagggttgctgcaacaaaaatacgaacagcttaaaacgaaattgcaggctgaaggt

SEQ ID NO: 332412 - DNA, 75 bp, synthetic construct
  source 1..75: mol_type = other DNA
tctgcccgccagcggctggagatggcgatggattattatctcgccaaccgtacccggcgctttacgcagattcat

SEQ ID NO: 332413 - DNA, 75 bp, synthetic construct
  source 1..75: mol_type = other DNA
acgaatccctggtgtgcggcgtgttccccaaccaggatggaacgttcaccgccatgacttataccaaaagcaaaa

SEQ ID NO: 332414 - DNA, 75 bp, synthetic construct
  source 1..75: mol_type = other DNA
atgaatgaaggcgacaatgttatcaccctggtgcagccaaaatcagaggaggaagggctccttaacgttgtgata

SEQ ID NO: 332415 - DNA, 75 bp, synthetic construct
  source 1..75: mol_type = other DNA
gccagtggcggtggagaaattacagtaggcgggcagacggtccgtatcacatatagtgaaacggatggtcgcttt

SEQ ID NO: 332416 - DNA, 75 bp, synthetic construct
  source 1..75: mol_type = other DNA
agagccttcagtgtccatccgaggcggttcgatgcccaattatactggataaaccagaagaaggtgtgtttgtta

SEQ ID NO: 332417 - DNA, 75 bp, synthetic construct
  source 1..75: mol_type = other DNA
tggtaaagttgatggtattcttaaagttgataaatacatagcaatgccggggcaggagataacactacatataga

SEQ ID NO: 332418 - DNA, 75 bp, synthetic construct
  source 1..75: mol_type = other DNA
cgcagcctcaagtacaaccaaaagtattatgcgcctcgcgccacaccgttccgcatcaatacgacagctcagggg

SEQ ID NO: 332419 - DNA, 75 bp, synthetic construct
  source 1..75: mol_type = other DNA
ggcaccaccggttctcgtatggcaaacggcagttatgcgccgcacctggcgttagagaaagagattgccgagttt

SEQ ID NO: 332420 - DNA, 75 bp, synthetic construct
  source 1..75: mol_type = other DNA
acgaatctccggtgtacggcgtgttccccaaccaggacggcacattcaccgccataacgtataccaaaagcaaaa

SEQ ID NO: 332421 - DNA, 75 bp, synthetic construct
  source 1..75: mol_type = other DNA
gcgatgacgtataccaaaagcaaaacgtttaaaactgaagctggcgcgcgtcgctggcttatcaaaaataccagc

SEQ ID NO: 332422 - DNA, 75 bp, synthetic construct
  source 1..75: mol_type = other DNA
actatcgatcttggcaacagcgaatctctggtatgtggcgtgttccccaaccaagacggtacgttcaccgcgatg

SEQ ID NO: 332423 - DNA, 75 bp, synthetic construct
  source 1..75: mol_type = other DNA
gttaaaggtaagccctggtacgataactgctatttctataatttcgatgaaattccatttcgcggcaaagaggga

SEQ ID NO: 332424 - DNA, 75 bp, synthetic construct
  source 1..75: mol_type = other DNA
tggggctaatgcgttctacgaaggcatcgataacgaggggaatatggttcgcgttcctgccagttcaatcgcagc

SEQ ID NO: 332425 - DNA, 75 bp, synthetic construct
  source 1..75: mol_type = other DNA
ctgattggatgattcagacaggtatccagaatccagagcagctatcacacatgctgactactatgtctctcggtg

SEQ ID NO: 332426 - DNA, 75 bp, synthetic construct
  source 1..75: mol_type = other DNA
atgtactgtactgttaaagaaatcatccgcgaagtgctggatacagacgtgccggacagtgaatgcgtttttgcc

SEQ ID NO: 332427 - DNA, 75 bp, synthetic construct
  source 1..75: mol_type = other DNA
gccggacagtgaatgcgtttttgccgtagtgctgacccgtggggatgtgcgccatatggctcaggactggaacct

SEQ ID NO: 332428 - DNA, 75 bp, synthetic construct
  source 1..75: mol_type = other DNA
tgtatcagcgcagccggataccatgattcaggatgcggctgatctggtcaccgttgtggcactggtgacgctgca

SEQ ID NO: 332429 - DNA, 75 bp, synthetic construct
  source 1..75: mol_type = other DNA
tcgttgctgaccatcctcaacgatattctcgattattccgctatcgaagcaggtggcaagaatgtttcggtcagc

SEQ ID NO: 332430 - DNA, 75 bp, synthetic construct
  source 1..75: mol_type = other DNA
catcgcccagttcgcgcagtttagtagcgaagtcagtcagctggtcgacaccattgagctgcgtaatcagcacgg

SEQ ID NO: 332431 - DNA, 75 bp, synthetic construct
  source 1..75: mol_type = other DNA
aaaattctgcaacgtcggcaaatacgcattgaagatccgggtgttcgtgcgcaggtcgcaacaacgttaactacc

SEQ ID NO: 332432 - DNA, 75 bp, synthetic construct
  source 1..75: mol_type = other DNA
attatggcgctggtttccgcctgtatcatcgatccgggcgtgtattttgccatgaacagcccgatggcggtgctg

SEQ ID NO: 332433 - DNA, 75 bp, synthetic construct
  source 1..75: mol_type = other DNA
tagctggggctttgcgattaccccggatacgctaaatcagattgccagcgaagtgggggaacagtcgatcatttc

SEQ ID NO: 332434 - DNA, 75 bp, synthetic construct
  source 1..75: mol_type = other DNA
cccgtgcgggcggtgcgccgacgttggcggtggggatggcttacatcctgcacggtgcgctgggtggtatgatgg

SEQ ID NO: 332435 - DNA, 75 bp, synthetic construct
  source 1..75: mol_type = other DNA
aggcggtacgtctggacgatttgcgtttgctgttaattgaagataacccgctcacccagcgaattactgtcgaaa

SEQ ID NO: 332436 - DNA, 75 bp, synthetic construct
  source 1..75: mol_type = other DNA
ttctcgattattcggctatcgaagcaggcggcaagaatgtttcggtcagcgatgaaccctttgaaccgcgcccgc

SEQ ID NO: 332437 - DNA, 75 bp, synthetic construct
  source 1..75: mol_type = other DNA
actgcgccagcaacaacagcaactcagtcagcagatagtcgccgccgccgatgaaatcgcacgcctggcgcaagg

SEQ ID NO: 332438 - DNA, 75 bp, synthetic construct
  source 1..75: mol_type = other DNA
agaagatccacgaatggctggtattatttacacaacatgccctgccgcttctcgatgaaatcgacattgcccgcg

SEQ ID NO: 332439 - DNA, 75 bp, synthetic construct
  source 1..75: mol_type = other DNA
ctcaaggaattacagcaaaatacgccacgcaatgatatttgggcgaagttttttctgaggcaggaaaacagctcc

SEQ ID NO: 332440 - DNA, 75 bp, synthetic construct
  source 1..75: mol_type = other DNA
agcatggtgcggatgtcagcgttgttcacgacgttgttcgtgaactgatggaagaaaagcgcgccagccgtcagg

SEQ ID NO: 332441 - DNA, 75 bp, synthetic construct
  source 1..75: mol_type = other DNA
ggagcgagaacgggggcgacggtgacgcattcgtcagggaagaacgcgaagcaatggacgttgtgttacaggcgc

SEQ ID NO: 332442 - DNA, 75 bp, synthetic construct
  source 1..75: mol_type = other DNA
ccgctaacccagcggattaccgttgagatgttgaacagcagtggggcgcaggtcgttgcggtaggaaatgccgcg

SEQ ID NO: 332443 - DNA, 75 bp, synthetic construct
  source 1..75: mol_type = other DNA
tgaccatcctcaacgatattctcgattattccgctatcgaagcaggtggcaagaatgtttcggtcagcgatgaac

SEQ ID NO: 332444 - DNA, 75 bp, synthetic construct
  source 1..75: mol_type = other DNA
ctcccctttcccggaaaccgctggcgtacgggagctggacaccatcgggcggctgatggatgcgtttcgcagcag

SEQ ID NO: 332445 - DNA, 75 bp, synthetic construct
  source 1..75: mol_type = other DNA
atggcgttgctaaccctgaccagtactctggtgggatggtacaacctgcgttttgtcagccaggtagaaaaagcc

SEQ ID NO: 332446 - DNA, 75 bp, synthetic construct
  source 1..75: mol_type = other DNA
tgctgcgcatcagttgaaaagcagttgtgccagtctgggcatgcgtagtgccagtcagttatgtgaacaacttga

SEQ ID NO: 332447 - DNA, 75 bp, synthetic construct
  source 1..75: mol_type = other DNA
gatgctcagttaatggggacggagaagatccacgaatggctggcattatttaaacaacatgccctgccgcttctc

SEQ ID NO: 332448 - DNA, 75 bp, synthetic construct
  source 1..75: mol_type = other DNA
actggcggcattgaaagagtcgaagccgacggcgaaagaaacgccgtatgagccgatgccggaaaatgttgagga

SEQ ID NO: 332449 - DNA, 75 bp, synthetic construct
  source 1..75: mol_type = other DNA
agtcagctatccattttgcgtgacgacccacgcttgcgtttaacgctgcgtcctgggatgaatgtcgcctatctg

SEQ ID NO: 332450 - DNA, 75 bp, synthetic construct
  source 1..75: mol_type = other DNA
tccactgaaaaccgccgaactgattcaggcggatatggcacaggttggcgtaaaagtggtgattgtgccggtaga

SEQ ID NO: 332451 - DNA, 75 bp, synthetic construct
  source 1..75: mol_type = other DNA
aaccacgaagataacgatccggtggatatcctcatcaccatggcggcggtcgatgccaacactcaccaggaagtg

SEQ ID NO: 332452 - DNA, 75 bp, synthetic construct
  source 1..75: mol_type = other DNA
tggagctggctgaccttgaaggtttctaccgcgatgcgaaaaagcattacgacgaagatgaagagtttgccgagc

SEQ ID NO: 332453 - DNA, 75 bp, synthetic construct
  source 1..75: mol_type = other DNA
aagttgtcatctgccacgctgactacccgcacaacgaatatgagttcgacaagccagtgccagaggaaatggtca

SEQ ID NO: 332454 - DNA, 75 bp, synthetic construct
  source 1..75: mol_type = other DNA
tcaccatgacgcagaaccagatcacctacgatcgtctgaacgtgacgttgacccgcgatgacgtcatgggtgaaa

SEQ ID NO: 332455 - DNA, 75 bp, synthetic construct
  source 1..75: mol_type = other DNA
gacggtaaaccattcaaaacccgcgctggcggtacggtgaaactggcagatctgctggatgaagcactggaacgc

SEQ ID NO: 332456 - DNA, 75 bp, synthetic construct
  source 1..75: mol_type = other DNA
ttattggtgacgcagcagtgcgtactctggagttcctcggtcacaaagtgattcgcgcaaaccacgtcggcgact

SEQ ID NO: 332457 - DNA, 75 bp, synthetic construct
  source 1..75: mol_type = other DNA
tggcggcggacgttgtcgagccgcgctattaccaggcgattctggatggcgtggaacagtttggcccttatttcg

SEQ ID NO: 332458 - DNA, 75 bp, synthetic construct
  source 1..75: mol_type = other DNA
gtcaaagaagagatggggccaaccgccggggtgattgcgctggtggcctgctttatgatcatggtcattatcctt

SEQ ID NO: 332459 - DNA, 75 bp, synthetic construct
  source 1..75: mol_type = other DNA
ttttgcggccattgccggagcaggtccgttggtggggccggtactggcggcgcaaatgggctacctgccggggat

SEQ ID NO: 332460 - DNA, 75 bp, synthetic construct
  source 1..75: mol_type = other DNA
gttctggtatcacttcgccattttgtttgaagcactgtttattctgacggcggtggatgcaggtacgcgtgctgc

SEQ ID NO: 332461 - DNA, 75 bp, synthetic construct
  source 1..75: mol_type = other DNA
tcatcgatccgggcgtgtacttcgccatgaacagcccgatggcggtgctggctccggcagggacggcggatgtgg

SEQ ID NO: 332462 - DNA, 75 bp, synthetic construct
  source 1..75: mol_type = other DNA
attatggcactggtttccgcctgtatcatcgatccgggcgtgtacttcgccatgaacagcccgatggcggtgctg

SEQ ID NO: 332463 - DNA, 75 bp, synthetic construct
  source 1..75: mol_type = other DNA
cttgccggtgcggtgcaggacttcatggtgctgtttgtttccacgcgccgcgatggtcgctcgttgggtgaactg

SEQ ID NO: 332464 - DNA, 75 bp, synthetic construct
  source 1..75: mol_type = other DNA
ccacgaagataatgaccctgtggatatcctcatcaccatggcggcggtcgatgccaacacgcaccaggaagtagg

SEQ ID NO: 332465 - DNA, 75 bp, synthetic construct
  source 1..75: mol_type = other DNA
gttgaacaacacggcccgtactttgtgctcgcaccgggcctggcaatgccgcatggtcgcccggaagagggcgtt

SEQ ID NO: 332466 - DNA, 75 bp, synthetic construct
  source 1..75: mol_type = other DNA
ccacgaagataacgatccggtggatatcctcatcaccatggcggcggttgatgccaacacccaccaggaagtggg

SEQ ID NO: 332467 - DNA, 75 bp, synthetic construct
  source 1..75: mol_type = other DNA
cattatctctggcggctgggtggcagaaagtccgacctgggcaccgtactttgactttaccggcgtgcagctgac

SEQ ID NO: 332468 - DNA, 75 bp, synthetic construct
  source 1..75: mol_type = other DNA
tggattgccatagaatcactcaaatgtgaaagcgatgattatttaaaaaccataattaaaacaactcagctttct

SEQ ID NO: 332469 - DNA, 75 bp, synthetic construct
  source 1..75: mol_type = other DNA
ccatcgatactatatccggtaacgtgcgtcgtgcctttataggtctgtatgaagagaagcgcctattcggcggac

SEQ ID NO: 332470 - DNA, 75 bp, synthetic construct
  source 1..75: mol_type = other DNA
atatatcgatgcggggttttataaccgggtaacaggcgaggaaaaaacggagacgcacgacgaggaattaattgc

SEQ ID NO: 332471 - DNA, 75 bp, synthetic construct
  source 1..75: mol_type = other DNA
gcaacgggtaaaaatgtacattgccgacaacaacgtattcggcgtggacttgaacccggtggcggtggaactggc

SEQ ID NO: 332472 - DNA, 75 bp, synthetic construct
  source 1..75: mol_type = other DNA
ttcaggtttctctggtatgactgcctctttgccatcagtttcagagcagccgacatctaaaaacagaaaggaatt

SEQ ID NO: 332473 - DNA, 75 bp, synthetic construct
  source 1..75: mol_type = other DNA
ctgaaacacattatcgccttacttttggaagacgcaaaacgtctacagcaactggaaccaaatgcaggcacagag

SEQ ID NO: 332474 - DNA, 75 bp, synthetic construct
  source 1..75: mol_type = other DNA
cggcggcgataaaagcattccttatctgaatattccccaggaagagaacccgttcctcggctatcgcgcggtacg

SEQ ID NO: 332475 - DNA, 75 bp, synthetic construct
  source 1..75: mol_type = other DNA
atggacttttttgagaaagatttgcgcggtcgagtgaaagtacgcgttcacgtagaccctaaaacaggtaaacga

SEQ ID NO: 332476 - DNA, 75 bp, synthetic construct
  source 1..75: mol_type = other DNA
agaaatgcgggagatggtcagaacagaagctaaaaacccccaggaagggggcttatcaggcggcgggagtcgctt

SEQ ID NO: 332477 - DNA, 75 bp, synthetic construct
  source 1..75: mol_type = other DNA
gaagatgcggaggaaatcaaattttttattcataaaaattatgtgcatcttttttacccttcggaatccggcagt

SEQ ID NO: 332478 - DNA, 75 bp, synthetic construct
  source 1..75: mol_type = other DNA
tggtcattataaggtggatgagatagttgattttaccgaacctggtgatgctatgggaatgaagatcacgcaggt

SEQ ID NO: 332479 - DNA, 75 bp, synthetic construct
  source 1..75: mol_type = other DNA
gtgatcatgctgacgctgggtgctaacgaagggatgaatcatgtgaaagtcttctcgcagctggcgcgtaaactg

SEQ ID NO: 332480 - DNA, 75 bp, synthetic construct
  source 1..75: mol_type = other DNA
tattgaacgtaatacgcagtttccaaaagatgcgtcacaatgggtattgtctggcccgcatttttatgttggaaa

SEQ ID NO: 332481 - DNA, 75 bp, synthetic construct
  source 1..75: mol_type = other DNA
accccagagtggcagcgtaactgcgccttacgctccgactacagccgccgtcaggcgctggtggaaatcgacgta

SEQ ID NO: 332482 - DNA, 75 bp, synthetic construct
  source 1..75: mol_type = other DNA
tgaaacaaaccagcagaaagacggcactattgaacgtaagactcagttccctgaggatgcatcacaatggatact

SEQ ID NO: 332483 - DNA, 75 bp, synthetic construct
  source 1..75: mol_type = other DNA
ggcaggatttgttcacccagagggggtatatgacgatcctaagggagggctcttcagagaagagatctatccaag

SEQ ID NO: 332484 - DNA, 75 bp, synthetic construct
  source 1..75: mol_type = other DNA
ggtattgtctggcccgcacttctttgttgggacgccgttctacaagactccgcgcgaaaactgtacgcttaacag

SEQ ID NO: 332485 - DNA, 75 bp, synthetic construct
  source 1..75: mol_type = other DNA
acaggagtatgcaaagcgcaccccacgggtttcgtggaaagagcaggatgaagacgagccgaggaaggtgacgga

SEQ ID NO: 332486 - DNA, 75 bp, synthetic construct
  source 1..75: mol_type = other DNA
ttgccactctttatgatgaagagggaacgccggctcttgaagctcgactcccagcgcttcatgctgaacctcttg

SEQ ID NO: 332487 - DNA, 75 bp, synthetic construct
  source 1..75: mol_type = other DNA
gttggaatggagcgacttgcactatttgccagtctttatgatgaagagggtacgccggctcttgaggctcgactt

SEQ ID NO: 332488 - DNA, 75 bp, synthetic construct
  source 1..75: mol_type = other DNA
gtttcactcactaataattacaagcagctgtgggatagtgttgatttacaactggcaatgcaccaacgctggagc

SEQ ID NO: 332489 - DNA, 75 bp, synthetic construct
  source 1..75: mol_type = other DNA
aaggtggaatggcaggaagctggcgtgctgggcgactacgagccggagtttgtactgcgtaagctgagcgcctcg

SEQ ID NO: 332490 - DNA, 75 bp, synthetic construct
  source 1..75: mol_type = other DNA
tgttggaacaccgctttataagacgccgagagaaatttgcacagagaaaggacattatgactgcctggacttgct

SEQ ID NO: 332491 - DNA, 75 bp, synthetic construct
  source 1..75: mol_type = other DNA
caattcccggaagacgcatcccaatggattctgtctggtccgcacttctatgttggaacaccgctttataagacg

SEQ ID NO: 332492 - DNA, 75 bp, synthetic construct
  source 1..75: mol_type = other DNA
acgaaaccgactcatggaacgaatcaggacaccaaagccgcatattgaaagtatcgttagagcggctttctgaac

SEQ ID NO: 332493 - DNA, 75 bp, synthetic construct
  source 1..75: mol_type = other DNA
agaaatgcgacacgatcttagaaaagatttaaaaaaaacaaggtcaggggcctttccagtatctgatggggaatg

SEQ ID NO: 332494 - DNA, 75 bp, synthetic construct
  source 1..75: mol_type = other DNA
ggttatcggtacttctcttgacccggatatgaatgacgagctgcgcgtaaccgttgttgcgacaggtatcggtat

SEQ ID NO: 332495 - DNA, 75 bp, synthetic construct
  source 1..75: mol_type = other DNA
gatatgaacgacgaactgcgtgtaaccgtggttgcaacaggtatcggcatggacaaacgtcctgaaatcactctg

SEQ ID NO: 332496 - DNA, 75 bp, synthetic construct
  source 1..75: mol_type = other DNA
agtgtacgagttctcgaaggcgcgtatcgggcgtcgtatctgggcgacaaaaggtgagtccgccactggcggcaa

SEQ ID NO: 332497 - DNA, 75 bp, synthetic construct
  source 1..75: mol_type = other DNA
gacagacgatgagctggaaaccgtcatgcagcgactggacgatgcctttgagcatggtgcggatgtcagcgttgt

SEQ ID NO: 332498 - DNA, 75 bp, synthetic construct
  source 1..75: mol_type = other DNA
agcatggtgcggatgtcagcgttgttcacgacgttgtccgtgaactgatggaagaaaagcgtgccagccgtcagg

SEQ ID NO: 332499 - DNA, 75 bp, synthetic construct
  source 1..75: mol_type = other DNA
ccacgaagataacgatccggtggatatcctcatcaccatggcggcggtcgatgccaacactcaccaggaagtggg

SEQ ID NO: 332500 - DNA, 75 bp, synthetic construct
  source 1..75: mol_type = other DNA
atgaaattacgtgattcgctggctgaaaataaatctatccgcctgcaagcggaagcagagacatggcaggacgca

SEQ ID NO: 332501 - DNA, 75 bp, synthetic construct
  source 1..75: mol_type = other DNA
gaagaaaagcgagccagccgtcaggtgacagttccggcggtgatgctggaaaaagtgatggtgatggctggtagt

SEQ ID NO: 332502 - DNA, 75 bp, synthetic construct
  source 1..75: mol_type = other DNA
gacagacgatgagctggaaaccgtcatgcaacggctggacgatgcatttgaaaatggtgcggatgtcagcattgt

SEQ ID NO: 332503 - DNA, 75 bp, synthetic construct
  source 1..75: mol_type = other DNA
ggcagacgatgagctggaaaccgtcatgcagcggctggacgatgcttttgtatatggcgcatgtgacagagttgt

SEQ ID NO: 332504 - DNA, 75 bp, synthetic construct
  source 1..75: mol_type = other DNA
atttagttcggcagctggcgcttaacggtaagacgcgcgcaatacgggaacaagcgatgagaaaacttgatgggt

SEQ ID NO: 332505 - DNA, 75 bp, synthetic construct
  source 1..75: mol_type = other DNA
tcgccgaatggctgagggtgaaggacgatccgctgatgcgccagacattcatcaataccacgctgggcgagcctt

SEQ ID NO: 332506 - DNA, 75 bp, synthetic construct
  source 1..75: mol_type = other DNA
gaccgttatcacaggcgacggtctactggaactgcgtactcgcgcgatcgtgacggtaccttcgaaccacaacgg

SEQ ID NO: 332507 - DNA, 75 bp, synthetic construct
  source 1..75: mol_type = other DNA
cagagaaaatgttgccaatggcacattctgtcagacgtttacacagggaaagcggactatttcacaacaccgcct

SEQ ID NO: 332508 - DNA, 75 bp, synthetic construct
  source 1..75: mol_type = other DNA
cagattattcagtgctgttattgattgctgaaaacggggcatccataccagaaagcttctctcatcctgatggcg

SEQ ID NO: 332509 - DNA, 75 bp, synthetic construct
  source 1..75: mol_type = other DNA
attgggatactttcattgcactggttaggctcatgaacgcagtacataatggtgaagaatctaaatgccacgccg

SEQ ID NO: 332510 - DNA, 75 bp, synthetic construct
  source 1..75: mol_type = other DNA
caacattgctaatgatggaacacagagcgaacttacacggcttgtagctgaaccggtcaaaacactttcaaggct

SEQ ID NO: 332511 - DNA, 75 bp, synthetic construct
  source 1..75: mol_type = other DNA
tattccacaaagaccgttatcacaggcgacggtccactggaactgcgtactccgcgcgtgatcttacccagcaat

SEQ ID NO: 332512 - DNA, 75 bp, synthetic construct
  source 1..75: mol_type = other DNA
aacaggaacgcgtggctcaatcagctaataggcacgtatatcactacaacgcagtgagcaatgttagtggcatta

SEQ ID NO: 332513 - DNA, 75 bp, synthetic construct
  source 1..75: mol_type = other DNA
acgaggatgcaggcgagtttgcgatgagtgaacagcggctgattgcccgtgtcgaggtctggggagcggaggtgc

SEQ ID NO: 332514 - DNA, 75 bp, synthetic construct
  source 1..75: mol_type = other DNA
ccttccgccccgtcattctgggggtgaactccgcgaaggacgacatcaggcaccggctccatattgagccggatc

SEQ ID NO: 332515 - DNA, 75 bp, synthetic construct
  source 1..75: mol_type = other DNA
aagattatggcgtaagaaaattgcaatacgattattgttgtatattcaagataatgtgaccttaattgtcttttt

SEQ ID NO: 332516 - DNA, 75 bp, synthetic construct
  source 1..75: mol_type = other DNA
tttgaaggcccattaattactaaaagcgttgtcgagaaaattggtttcccgaacgaaaaattctttatatttaat

SEQ ID NO: 332517 - DNA, 75 bp, synthetic construct
  source 1..75: mol_type = other DNA
ttgcggatactttattgactggcctggcattgatgggcaaaggaatgctggtgctaatgcccgttatatcgcggc

SEQ ID NO: 332518 - DNA, 75 bp, synthetic construct
  source 1..75: mol_type = other DNA
aaccgtgataagaactgctcttacgactacctgctgcacccggcaatttctatttctaaaatcattggcggttgc

SEQ ID NO: 332519 - DNA, 75 bp, synthetic construct
  source 1..75: mol_type = other DNA
ctatccggatattccggatagttcggtgtcagcgccagcaaagggcgtcaccggtgaacgtatccgcattaagcc

SEQ ID NO: 332520 - DNA, 75 bp, synthetic construct
  source 1..75: mol_type = other DNA
atggccagagccgcagaatttgctacggttatagtaagtcacctgtgggaaaacgctatgcgcaaatatcgtcta

SEQ ID NO: 332521 - DNA, 75 bp, synthetic construct
  source 1..75: mol_type = other DNA
ggcgatgccgtcgtccggtatgcttttattgaacatcgcgccgaagtttttgattttgccagtgttgaaggtaat

SEQ ID NO: 332522 - DNA, 75 bp, synthetic construct
  source 1..75: mol_type = other DNA
aacggataacacctggatcgataatagtgaaatcagccagggtgcacatataagtgacaacgtcacgattaaaga

SEQ ID NO: 332523 - DNA, 75 bp, synthetic construct
  source 1..75: mol_type = other DNA
aggcttaacgcccgaccatcaactcctgctacaaatttatgatcgcgcaagggttagcgcctcgcgtattgtcca

SEQ ID NO: 332524 - DNA, 75 bp, synthetic construct
  source 1..75: mol_type = other DNA
actgtgctggcacaagaaggaaattgctggatttacgaccagaatgccatcgcgtttgccggaacggtgataacc

SEQ ID NO: 332525 - DNA, 75 bp, synthetic construct
  source 1..75: mol_type = other DNA
gcacgttgtaatacaaggtgagagccgtatttcaggtgcggtgataaaaccatgtggagttaaccgaccacgccg

SEQ ID NO: 332526 - DNA, 75 bp, synthetic construct
  source 1..75: mol_type = other DNA
atcaacaattactcgaaaaattaccggatggcgcgtatctcctcaacctggcgcgtggtgttcatgttgtggaag

SEQ ID NO: 332527 - DNA, 75 bp, synthetic construct
  source 1..75: mol_type = other DNA
caaccaattctggaaaaactgtatcaggcgcagacgcttagccagcaggaaagccaccagcttttttctgcggtg

SEQ ID NO: 332528 - DNA, 75 bp, synthetic construct
  source 1..75: mol_type = other DNA
attgccgaaacgctgcgcgtactggggtatcaacgtgcggcggttgtgcatagcggtggaatggatgaagtttcc

SEQ ID NO: 332529 - DNA, 75 bp, synthetic construct
  source 1..75: mol_type = other DNA
aatggcatggtgatggcggtacgtcatgatacggatcgcgtttgcggtttccagttccatccagaatctatcctc

SEQ ID NO: 332530 - DNA, 75 bp, synthetic construct
  source 1..75: mol_type = other DNA
gccataatgctggagtatatgaaagtgaaccgccccggttttcctggagagtgttttatctgtgaactcaggctg

SEQ ID NO: 332531 - DNA, 75 bp, synthetic construct
  source 1..75: mol_type = other DNA
ttggtaagcgtcatgcggacgtattgagggcgctgaaaaattgtcattgctctgaagatttccggagagcgcact

SEQ ID NO: 332532 - DNA, 75 bp, synthetic construct
  source 1..75: mol_type = other DNA
agtacatgaaagagaaggatgttgccagcatgtcaggtcgcctgcttaatcgctggggaaaaattaagaagcctc

SEQ ID NO: 332533 - DNA, 75 bp, synthetic construct
  source 1..75: mol_type = other DNA
aaaatagttaaaaaactagcaggtccgtatggtataaaaagatacgagaaggataattatcagtcggcaaatttt

SEQ ID NO: 332534 - DNA, 75 bp, synthetic construct
  source 1..75: mol_type = other DNA
tgtattaattaatctgttaccgaatacgcctgaaaccgtcggcattattaatcaacaattattagaaaaattacc

SEQ ID NO: 332535 - DNA, 75 bp, synthetic construct
  source 1..75: mol_type = other DNA
gggaagattttaccattggcatcatgggtgctggtgtgttgggcagtaaagtggcagggagcttacaagtctggc

SEQ ID NO: 332536 - DNA, 75 bp, synthetic construct
  source 1..75: mol_type = other DNA
aggtttaaccatcaatgcccattttaatggcatggtgatggcggtgcgtcatgatgcggatcgcatttgcggttt

SEQ ID NO: 332537 - DNA, 75 bp, synthetic construct
  source 1..75: mol_type = other DNA
caaccgattctggaaaaactgtatcaggcgcagacgcttagccaacaagaaagccaccagctgttttcagcggtg

SEQ ID NO: 332538 - DNA, 75 bp, synthetic construct
  source 1..75: mol_type = other DNA
agaatagtcaaagcacacttcaacaaatagttccgctggtttgctttaaagacgatgaaccttctcagttaagta

SEQ ID NO: 332539 - DNA, 75 bp, synthetic construct
  source 1..75: mol_type = other DNA
atgagtggaccggcaatcctgatattgataacgccatcatcatgctcgatcgcatagatacgctggaaagttgcg

SEQ ID NO: 332540 - DNA, 75 bp, synthetic construct
  source 1..75: mol_type = other DNA
cggcgctcaatgcagaactgactgaccatctcggtcatgagaaaaatgctcctaaatcaggctctaatacccgta

SEQ ID NO: 332541 - DNA, 75 bp, synthetic construct
  source 1..75: mol_type = other DNA
gatgcacggtacccgcagataagtcgcagctggcgggcaaactggccgaatattgccaccttcttcgtttacccg

SEQ ID NO: 332542 - DNA, 75 bp, synthetic construct
  source 1..75: mol_type = other DNA
actgaaaaaccgtggcctgaacgatatcctcatcgcctgtgttgacggcttaaaaggcttcccggacgctattaa

SEQ ID NO: 332543 - DNA, 75 bp, synthetic construct
  source 1..75: mol_type = other DNA
gatggcctgaaaggcttcccggatgccatcaacacagtatatccgaaggcccgcatcccgttatgcatcgtgcat

SEQ ID NO: 332544 - DNA, 75 bp, synthetic construct
  source 1..75: mol_type = other DNA
tgtagaatggcaaaaccgaccactggatgctgtttaccccattgtttatcttgactgtatcgtcctgaaagttcg

SEQ ID NO: 332545 - DNA, 75 bp, synthetic construct
  source 1..75: mol_type = other DNA
ccacaaagaccgttatcacaggcgacggtccactggaactgcgtactccgcgcgatcgtgacgttaccttcgaac

SEQ ID NO: 332546 - DNA, 75 bp, synthetic construct
  source 1..75: mol_type = other DNA
caactcgttggaaaggaactgtttgcgcgtcacggccgcaataagctgctaaccgaacatggcattcagcttctt

SEQ ID NO: 332547 - DNA, 75 bp, synthetic construct
  source 1..75: mol_type = other DNA
gtaaagaaaaatcagacccgtattaccgggatggataaccagatcctctctttgtatgccaaagggatgaccacc

SEQ ID NO: 332548 - DNA, 75 bp, synthetic construct
  source 1..75: mol_type = other DNA
aaaaccatagccgatacctatcataactggcgtaacaaaggtggcgactacgaagacgtcgctggtttctgtgcg

SEQ ID NO: 332549 - DNA, 75 bp, synthetic construct
  source 1..75: mol_type = other DNA
atggacgaaaagaaacttaaagcccttgcgactgaactggccaaaggccttaaaaccgaagccgacctcaaccag

SEQ ID NO: 332550 - DNA, 75 bp, synthetic construct
  source 1..75: mol_type = other DNA
ggcactggaagcgttcgctgcggccagggacagtcgctatcctcagataagccgaagctggcaggctaactggcc

SEQ ID NO: 332551 - DNA, 75 bp, synthetic construct
  source 1..75: mol_type = other DNA
atccagttatgcatcgtgcatatggtgcgcaacagcctgcgcttcgtgtcatggaaggactacaaagccgtcact

SEQ ID NO: 332552 - DNA, 75 bp, synthetic construct
  source 1..75: mol_type = other DNA
ctgaaagttcggcaggacagtcgcctcatcaacaaatcggtgttcctggcactgggcatcaatatcgaaggtcag

SEQ ID NO: 332553 - DNA, 75 bp, synthetic construct
  source 1..75: mol_type = other DNA
ggttgtgctgggtggtgagagcttctctgctctggctgaaggtctgcaggaagccctcggacaactgggcggagt

SEQ ID NO: 332554 - DNA, 75 bp, synthetic construct
  source 1..75: mol_type = other DNA
atctggcagcctgagttcacagataaaacactctccaggaaacccggggcggttcattatgctgctctctgtcag

SEQ ID NO: 332555 - DNA, 75 bp, synthetic construct
  source 1..75: mol_type = other DNA
ctcagccggtatagtgaaggtaaccctgctataccgggtatgtacgacgtcagtgtttatgtggctttgttgaat

SEQ ID NO: 332556 - DNA, 75 bp, synthetic construct
  source 1..75: mol_type = other DNA
tagtatggggggagacttttcaacgcattatatagttatagcattccttcttaaattacaaccaaacattttgaa

SEQ ID NO: 332557 - DNA, 75 bp, synthetic construct
  source 1..75: mol_type = other DNA
aatgacatcctgccagacgatgaatggcggaggctgtggcgtcgcttatgtaatcatctggagcccgacatggca

SEQ ID NO: 332558 - DNA, 75 bp, synthetic construct
  source 1..75: mol_type = other DNA
gacctgaaagcgatttatcaggcacccacggaagaggcaggccagcaggcactggaagcgttcgctgcggcctgg

SEQ ID NO: 332559 - DNA, 75 bp, synthetic construct
  source 1..75: mol_type = other DNA
tggctaacgaactggccaaaaacctcaaaacctctgaagacctcagccagtttgaccgtctactgaaaaagatca

SEQ ID NO: 332560 - DNA, 75 bp, synthetic construct
  source 1..75: mol_type = other DNA
cggcgctgatatcgaaagtcaccgatgccgcaatcgaccaggttgtagaatggcaaaaccgtcctctggatgcga

SEQ ID NO: 332561 - DNA, 75 bp, synthetic construct
  source 1..75: mol_type = other DNA
attcagtatcgctacgcggacgacaagctgggagaagcctggtatcaggacgccatcatttactcggtcaaattt

SEQ ID NO: 332562 - DNA, 75 bp, synthetic construct
  source 1..75: mol_type = other DNA
tgtagcgggttgggttgcgggttacagctttaccctgggccgtgaaaaattcactctcactaactggaacgagta

SEQ ID NO: 332563 - DNA, 75 bp, synthetic construct
  source 1..75: mol_type = other DNA
gggctgaaagcggtatatcaggccccgacagaggaagctgcgttgatggcgttggataagtttgcaggcgtctgg

SEQ ID NO: 332564 - DNA, 75 bp, synthetic construct
  source 1..75: mol_type = other DNA
aggataaactgatgactattgccgaacgtcttgagcagcaaggaatacagaaaggaatacagcagggaatacagc

SEQ ID NO: 332565 - DNA, 75 bp, synthetic construct
  source 1..75: mol_type = other DNA
cagcgttaagtccgtttatgatcggctggttgaaagatttgaccggcagctttaacagtggattgtggtttgttg

SEQ ID NO: 332566 - DNA, 75 bp, synthetic construct
  source 1..75: mol_type = other DNA
ttcaacctttcactttctgcgtccgtgtatgaacaccagctacgtcagattttattactttgcgaagattttggc

SEQ ID NO: 332567 - DNA, 75 bp, synthetic construct
  source 1..75: mol_type = other DNA
acctgtccacgctgaagctggaacccgccacctttgttgagccggacctgcatcagtacgccagcgatatcctct

SEQ ID NO: 332568 - DNA, 75 bp, synthetic construct
  source 1..75: mol_type = other DNA
tatttatatgaagactacgcactgtggattaagatgcttaaaaatggatttttgactaaaaatattccagaggcg

SEQ ID NO: 332569 - DNA, 75 bp, synthetic construct
  source 1..75: mol_type = other DNA
attgcgcgtcagcttcagaaaacgggaatgccatctgcacaaatctgtcagatcaccggactttccgaagctgaa

SEQ ID NO: 332570 - DNA, 75 bp, synthetic construct
  source 1..75: mol_type = other DNA
cagacgagcaggtgcgtgttctgattcattacatcgttaacgcaggggactctgtatcaccggaatttatgcggg

SEQ ID NO: 332571 - DNA, 75 bp, synthetic construct
  source 1..75: mol_type = other DNA
acctgtatcagaacatgcgggccaatgcgttgactgacgcggaattacggcgcaaggctgccgatgaactggcct

SEQ ID NO: 332572 - DNA, 75 bp, synthetic construct
  source 1..75: mol_type = other DNA
ttacagccctggtcccagaactcccagacccggacgagtgagatgcagatggttacgcacggtctgacactctcc

SEQ ID NO: 332573 - DNA, 75 bp, synthetic construct
  source 1..75: mol_type = other DNA
acgggcatcaaaccaatgcagttatacacctcacgtgtcgtccttctggacgaatctcggtatcccttgtgcctc

SEQ ID NO: 332574 - DNA, 75 bp, synthetic construct
  source 1..75: mol_type = other DNA
acaatcgcagaacgtcttgagcagaaaggtgcgcttgaaaaagccctggccattgcgcgtcagcttcagaaaatg

SEQ ID NO: 332575 - DNA, 75 bp, synthetic construct
  source 1..75: mol_type = other DNA
accgggggtgaagacggctatgtttatacgctcatcgagcaccagagcaccgaaaatctgtacatgcctttccgc

SEQ ID NO: 332576 - DNA, 75 bp, synthetic construct
  source 1..75: mol_type = other DNA
cattgaacgtcttgcggcgctaccggctttcggatttaaccagaatggctgaaatgagtaaaaaagagaatgcca

SEQ ID NO: 332577 - DNA, 75 bp, synthetic construct
  source 1..75: mol_type = other DNA
gcgccaagtcgcagaagcgatcgagcgtggcgataacgacagtattcaagacggagccaaccgcttatcagcaat

SEQ ID NO: 332578 - DNA, 75 bp, synthetic construct
  source 1..75: mol_type = other DNA
cgctgatacccgtgtcgaaacggaaacaggtctgcaatataccttcaacgaaacggttgccttgcgagtgaacta

SEQ ID NO: 332579 - DNA, 75 bp, synthetic construct
  source 1..75: mol_type = other DNA
ctgcgcacaggccgaggaaaagaacgactggcactttaatatcggtgcgatgtacgaaatagaaaacgtcgaggg

SEQ ID NO: 332580 - DNA, 75 bp, synthetic construct
  source 1..75: mol_type = other DNA
ggtacgggtgggacggtgacaggctgacgacgatacagaccggcaccacgcgtatccagacggtgtaccagccgg

SEQ ID NO: 332581 - DNA, 75 bp, synthetic construct
  source 1..75: mol_type = other DNA
caacaatttatcaccgtatcgacggtaccaaatacaggaatgtctgggttgttggtgatctgcatggttgctaca

SEQ ID NO: 332582 - DNA, 75 bp, synthetic construct
  source 1..75: mol_type = other DNA
gcgtttgagtgggaagatcatgacgaaggcgacagcgataaattccattatgcaggtgtcggcgtaaattactcg

SEQ ID NO: 332583 - DNA, 75 bp, synthetic construct
  source 1..75: mol_type = other DNA
ccaacgatctgaatacgactggctatgctgatacccgtgtcgaaacggaaacgggcctgcaatataccattaatg

SEQ ID NO: 332584 - DNA, 75 bp, synthetic construct
  source 1..75: mol_type = other DNA
gccggaagcgtggcctgtatccggacgcagagtcttatccatggaaatcaaacgcgcactactggttggttacca

SEQ ID NO: 332585 - DNA, 75 bp, synthetic construct
  source 1..75: mol_type = other DNA
gtggtgtactgcaggcggatgctgtcacgaacggtgcaatagtgatccacacccaacgcctgaaatcagatccag

SEQ ID NO: 332586 - DNA, 75 bp, synthetic construct
  source 1..75: mol_type = other DNA
acaggtcatattagccaggcacttcattatctcaatattggaagattaccagctctcgtcgtcctctgcttactc

SEQ ID NO: 332587 - DNA, 75 bp, synthetic construct
  source 1..75: mol_type = other DNA
ttcccggcgagcctggctaaccgggaccagaacgaactgaacgaaatccgccgccagtgggtgctggctttccgg

SEQ ID NO: 332588 - DNA, 75 bp, synthetic construct
  source 1..75: mol_type = other DNA
tgcgcttactgatgcggaattacggcgcaaggctgccgatgaactgacctgtatgacagcgcgaattaaccgtgg

SEQ ID NO: 332589 - DNA, 75 bp, synthetic construct
  source 1..75: mol_type = other DNA
ggttaagcccgcatctttacctggcgaccaacagcgcacaggggccgtggtggatactcggctggtcagagcggg

SEQ ID NO: 332590 - DNA, 75 bp, synthetic construct
  source 1..75: mol_type = other DNA
gtgaataaatcaatgttggcgggtatcgggattggtgtcgcagctgcgctgggcgtagcggcagtggccagtctg

SEQ ID NO: 332591 - DNA, 75 bp, synthetic construct
  source 1..75: mol_type = other DNA
atgatctggcagcctgagttcacagataaaacactctccaggaaacccggggcggttcagaatgaattaattgcg

SEQ ID NO: 332592 - DNA, 75 bp, synthetic construct
  source 1..75: mol_type = other DNA
aggatggggtgatgcttttggttatgtcctacaccaaaaaagaagcaatgcgtatcaaaattgcttacatcaacg

SEQ ID NO: 332593 - DNA, 75 bp, synthetic construct
  source 1..75: mol_type = other DNA
tgaaaatcacatcgccggttcggttctgggcgctgtggcgggcggggttatagggcatcagtttggcggtgggcg

SEQ ID NO: 332594 - DNA, 75 bp, synthetic construct
  source 1..75: mol_type = other DNA
ttggcattggtgtggcggctgcgcttggcgtagcagcggtggccagtctgaatgtgtttgaacgcggtccgcaat

SEQ ID NO: 332595 - DNA, 75 bp, synthetic construct
  source 1..75: mol_type = other DNA
tcgggattggtgtcgcagctgcgttgggcgtagcggcagtggccagtctgaacgtgtttgaacgtggcccgcaat

SEQ ID NO: 332596 - DNA, 75 bp, synthetic construct
  source 1..75: mol_type = other DNA
ttggcttggttggatctttacgtgttgcctgtacagcaggtagcgcagatcatcaacggtgtgttcagccagtta

SEQ ID NO: 332597 - DNA, 75 bp, synthetic construct
  source 1..75: mol_type = other DNA
gaccattcctgccatcacccgggcagtttgtggcctggtgccgggaagaagcatccgttaacgccgggctgccaa

SEQ ID NO: 332598 - DNA, 75 bp, synthetic construct
  source 1..75: mol_type = other DNA
cgattgaagaacacggcatgaaactgctggtggatattcagcacggacacaaaacgggctactacctggaccagc

SEQ ID NO: 332599 - DNA, 75 bp, synthetic construct
  source 1..75: mol_type = other DNA
gcaaggctcgttacccgagttacatcaggcatggcaggcggtagatgagcgaacccatgcaaaccgctttttatc

SEQ ID NO: 332600 - DNA, 75 bp, synthetic construct
  source 1..75: mol_type = other DNA
ggccgccgatcatccggtgatcgctacctacccggaagggctatatctgaaagggtttgcctgtcgcgtcatgta

SEQ ID NO: 332601 - DNA, 75 bp, synthetic construct
  source 1..75: mol_type = other DNA
gctggcgcggaataccagcgtgcggcattaattagcgccctgcaaacgctctacccggaatgtgcgatttacgat

SEQ ID NO: 332602 - DNA, 75 bp, synthetic construct
  source 1..75: mol_type = other DNA
cgccctgcaaacgctgtacccggaatgtgctatttacgatcgcagcgacgtcgcggtacgtaaaaaagaagggat

SEQ ID NO: 332603 - DNA, 75 bp, synthetic construct
  source 1..75: mol_type = other DNA
cgcagcgacgtggcggtacgcaaaaaagagggaatggaactgacccaggggccagtgactggagaactgccgcct

SEQ ID NO: 332604 - DNA, 75 bp, synthetic construct
  source 1..75: mol_type = other DNA
atccatcgacattgcctttttcacccgtcgtttgcagcaggcgcaaaagtggcgcgactggctggcgcaaaaaga

SEQ ID NO: 332605 - DNA, 75 bp, synthetic construct
  source 1..75: mol_type = other DNA
gggacatagaacgggtgctggagcgaagcggggaagccccggtctacggaccaaacctgcgcgcctcctgccgcc

SEQ ID NO: 332606 - DNA, 75 bp, synthetic construct
  source 1..75: mol_type = other DNA
catgacgtatcaggcctgccgtggggattttgtggtacgtctcgacggcagcacatgtctgcagttatggaataa

SEQ ID NO: 332607 - DNA, 75 bp, synthetic construct
  source 1..75: mol_type = other DNA
ggagggcgatccgctggaagtggcgcagtggctgcaggcctgtcacgatgaacgaatagaagttcgtgtacaggt

SEQ ID NO: 332608 - DNA, 75 bp, synthetic construct
  source 1..75: mol_type = other DNA
ggggaagccccggtctacgagccaaacctgcgcgcctcctgccgtcgtctggaggatgccggctggctgcgtacc

SEQ ID NO: 332609 - DNA, 75 bp, synthetic construct
  source 1..75: mol_type = other DNA
ctgcgcgcctcctgccgtcgtctggaggatgccggctggctgcgtaccctgcgcgccccgaatctgcagctggca

SEQ ID NO: 332610 - DNA, 75 bp, synthetic construct
  source 1..75: mol_type = other DNA
ggaagccccggtctacgggccaaacctgcgcgcctcctgccggcgcatggaagcatccagctggctgcgcaccct

SEQ ID NO: 332611 - DNA, 75 bp, synthetic construct
  source 1..75: mol_type = other DNA
atgactcagagccgccgaccgtcgccactgcagcgaagaatgctgattattgtgctggctgcccttgatgaaaaa

SEQ ID NO: 332612 - DNA, 75 bp, synthetic construct
  source 1..75: mol_type = other DNA
caacaacctcgacaaattgaaagccaaggcgctggaaactggtgactggacgccgtatttcgccgctaaaaaggc

SEQ ID NO: 332613 - DNA, 75 bp, synthetic construct
  source 1..75: mol_type = other DNA
atggaccagatggcagaaaacacaccagaagttgaaatcgaaaccgacgcgtcagagcagattcctgatgatgtc

SEQ ID NO: 332614 - DNA, 75 bp, synthetic construct
  source 1..75: mol_type = other DNA
ataaagaaggcagggtggtacgcctggagggcgatccgctggaagtggcgcagtggctgcaggcctgtcacgatg

SEQ ID NO: 332615 - DNA, 75 bp, synthetic construct
  source 1..75: mol_type = other DNA
agacggcacttctgccactgatctggcggtacagctgaacggcataacgtatcaggcctgccgtggggattttgt

SEQ ID NO: 332616 - DNA, 75 bp, synthetic construct
  source 1..75: mol_type = other DNA
ctgcaggcctgtcatgacgtaggaatggagattcgtgtgcaggttaatgaaagtactgtcacgcaaggggacccg

SEQ ID NO: 332617 - DNA, 75 bp, synthetic construct
  source 1..75: mol_type = other DNA
cagcgtgcggcagaagtcgtcgtactgccgctggtcccggcagcaggtctgcccgcagatggcacttctgccact

SEQ ID NO: 332618 - DNA, 75 bp, synthetic construct
  source 1..75: mol_type = other DNA
gaactttaatttgtttccgcatcgcacggtgctggaaaatattattgaagggccggtgatcgtcaaaggcgaacc

SEQ ID NO: 332619 - DNA, 75 bp, synthetic construct
  source 1..75: mol_type = other DNA
ggggtagcaaaagcgttatttgctgatcctcagcagcctcgcccccgccagttcctggagaagtttctgctgcaa

SEQ ID NO: 332620 - DNA, 75 bp, synthetic construct
  source 1..75: mol_type = other DNA
tggcaatgcgtcctgaggtgattttgtttgacgagccaacgtcggcgctggatccagagctggtgggcgaagtcc

SEQ ID NO: 332621 - DNA, 75 bp, synthetic construct
  source 1..75: mol_type = other DNA
ccaacttcaactgctgtatgccgcacgtgatatgcagccgatgtgggaaaaccgtgatgcggtaaaagccttcca

SEQ ID NO: 332622 - DNA, 75 bp, synthetic construct
  source 1..75: mol_type = other DNA
ctattggtccagccacacgtgattggctcaatgtgacacctgcacagcgtgcaggtgtgttggcgctcaacatcc

SEQ ID NO: 332623 - DNA, 75 bp, synthetic construct
  source 1..75: mol_type = other DNA
caatcaggtgctggattcgcgagtcattgtcggtcgccccgatcgcaaaacgccgatgatgagcagtgcccttaa

SEQ ID NO: 332624 - DNA, 75 bp, synthetic construct
  source 1..75: mol_type = other DNA
ttcagcgagacatcattctctgggcagtacgctggtactgcaaatatggcatcagctatcgtgagctgcaggaaa

SEQ ID NO: 332625 - DNA, 75 bp, synthetic construct
  source 1..75: mol_type = other DNA
agttatggaataaagaaggcagggtggtacgcctggagggcgatccgctggacgtggcgcagtggctgcatgcct

SEQ ID NO: 332626 - DNA, 75 bp, synthetic construct
  source 1..75: mol_type = other DNA
cccgttgtcagttccgcccgcagaaggcacttctgccaaagacctgccggtggcgctgggcggcatgacgtatca

SEQ ID NO: 332627 - DNA, 75 bp, synthetic construct
  source 1..75: mol_type = other DNA
acgcacgaaatgagctttgcccgggatgttgcggaccgggcgatctttatggaccaggggcggatagtcgagcag

SEQ ID NO: 332628 - DNA, 75 bp, synthetic construct
  source 1..75: mol_type = other DNA
gtgaagcctggcgaagtggtggcaattatcggtccgagtggttccggcaaaaccacgttgctacgcagcataaat

SEQ ID NO: 332629 - DNA, 75 bp, synthetic construct
  source 1..75: mol_type = other DNA
ccgtgccgttgacagcaaaggccgcaccatcgatttctatctctctcctcgtcgtaacagcaaagctgcatatcg

SEQ ID NO: 332630 - DNA, 75 bp, synthetic construct
  source 1..75: mol_type = other DNA
cagaagttgaaatagaaaccgatgcgtcagagcagattcctgatgatgtcgaactggctgaagaagtcgaaacag

SEQ ID NO: 332631 - DNA, 75 bp, synthetic construct
  source 1..75: mol_type = other DNA
ccagcgtgaaatgaaggaagaactgaataacctgaatgatttacgctcagtcagagcgatgctgattagcagtaa

SEQ ID NO: 332632 - DNA, 75 bp, synthetic construct
  source 1..75: mol_type = other DNA
tgaagtgacctccggtagctcagtgatggtggtatgggaaggaacgcgtccgctgctggtggagatccaggcgct

SEQ ID NO: 332633 - DNA, 75 bp, synthetic construct
  source 1..75: mol_type = other DNA
agcaaaaccgtctggcaatcctgctggctgtcttgcaccgtcacggtggtctgcaaatggccgatcaggatgtgt

SEQ ID NO: 332634 - DNA, 75 bp, synthetic construct
  source 1..75: mol_type = other DNA
atcgcaatgacgagatttatcagcgtcagcgggagatgaagcaagagctgaataacctggaggatttgcattcaa

SEQ ID NO: 332635 - DNA, 75 bp, synthetic construct
  source 1..75: mol_type = other DNA
agtaatcaccggggtaatgaaatcagcatctgcatccctcgtcatgccagccatcaatttcagttgtttatgtcc

SEQ ID NO: 332636 - DNA, 75 bp, synthetic construct
  source 1..75: mol_type = other DNA
gccgttcacgttcgaatggaacggtcgtacctggaatgctggccccgactcaatggcccgtctttatcctgtggt

SEQ ID NO: 332637 - DNA, 75 bp, synthetic construct
  source 1..75: mol_type = other DNA
ttgttaacgtggtcggcggcgtgaaggtgacggaaaccagcgccgacttagcgttactgctggcgatggtttcca

SEQ ID NO: 332638 - DNA, 75 bp, synthetic construct
  source 1..75: mol_type = other DNA
tgaagtgacctccggtagctcagtgatggtagtgtgggaaggaacgcgtccgctgctggtggagatccaggcgct

SEQ ID NO: 332639 - DNA, 75 bp, synthetic construct
  source 1..75: mol_type = other DNA
gcctgcgtgacagaccgctgccacaggatctggtggtgtttggtgaagtcgggctggcaggggagatccgcccgg

SEQ ID NO: 332640 - DNA, 75 bp, synthetic construct
  source 1..75: mol_type = other DNA
ctcaatatgttgtctgaaaccagcatcgaacaaatctgcctgattgccgaagaagagcagccgaagctgatggtg

SEQ ID NO: 332641 - DNA, 75 bp, synthetic construct
  source 1..75: mol_type = other DNA
agaagagcaaccgaagctgatggtaattgactccatccaggtgatgcatatggcggatgtacagtcatcgcctgg

SEQ ID NO: 332642 - DNA, 75 bp, synthetic construct
  source 1..75: mol_type = other DNA
ttgtttgtaatgaatgtggggcagattatccgcgctggcagggacagtgcagcgcctgccatgcctggaatacca

SEQ ID NO: 332643 - DNA, 75 bp, synthetic construct
  source 1..75: mol_type = other DNA
gccgttcacgtttgaatggaacggtcgcacctggaatgctggcccagactcactggcccgtctctatccggtggt

SEQ ID NO: 332644 - DNA, 75 bp, synthetic construct
  source 1..75: mol_type = other DNA
acaggaccgcctccgggcagaacagcgtgcggcagaagtcgtcgtactccgctggtcccggcgcaggtctgcccg

SEQ ID NO: 332645 - DNA, 75 bp, synthetic construct
  source 1..75: mol_type = other DNA
ttttgtggtgcgtctcgacggcagcacctgtctgcagttatggaataaagaaggcagagtggtacgcctggaggg

SEQ ID NO: 332646 - DNA, 75 bp, synthetic construct
  source 1..75: mol_type = other DNA
taaaagagggcgatcccctgatggtggccagctggtatcagacctgttttgatgctggcctgccggtcaccatcc

SEQ ID NO: 332647 - DNA, 75 bp, synthetic construct
  source 1..75: mol_type = other DNA
tctactttggtgacgaaaagctggattcgccaaccagcgaagatggcgcagagcatggactggtaaaacacctgc

SEQ ID NO: 332648 - DNA, 75 bp, synthetic construct
  source 1..75: mol_type = other DNA
ctggatatcgacgtgatcttgctggatctcaatatgaaaggcatgagtggcctggataccctcaatgccttgcgc

SEQ ID NO: 332649 - DNA, 75 bp, synthetic construct
  source 1..75: mol_type = other DNA
tgatgattgtggatgatcatccacttatgcgacgcggtgttcgtcagttactggagcttgattctggctttgaag

SEQ ID NO: 332650 - DNA, 75 bp, synthetic construct
  source 1..75: mol_type = other DNA
accggtactgcatttttcacatgttgcaccaatcgattgtttaattcaaaaattacaacagcgcctgcgtgattg

SEQ ID NO: 332651 - DNA, 75 bp, synthetic construct
  source 1..75: mol_type = other DNA
ttatacgcaactgaaatcgatctccgatgaagaggtccgtgaggcgattttggcggtggggcaatcggtgccgct

SEQ ID NO: 332652 - DNA, 75 bp, synthetic construct
  source 1..75: mol_type = other DNA
gtgtgggacttcggcttaatgtcaaagtattatgcgatgctaaaagacagctatcgcaacaggatactatctagg

SEQ ID NO: 332653 - DNA, 75 bp, synthetic construct
  source 1..75: mol_type = other DNA
gcacaccggggagcaccgttgcggccgcagagcgcattgtggcctggctgaaaacagcacttcaggggaaaaccc

SEQ ID NO: 332654 - DNA, 75 bp, synthetic construct
  source 1..75: mol_type = other DNA
gtcgagctgacggacgccggccggaccgtggcacagcctctgctgctggcagagcaggaccgcctccgggcagaa

SEQ ID NO: 332655 - DNA, 75 bp, synthetic construct
  source 1..75: mol_type = other DNA
ggaggttctgcctaatcgcaatcgcccaatgactgcgctgccaacgcttattcgccatacgcccgggcaaaaaga

SEQ ID NO: 332656 - DNA, 75 bp, synthetic construct
  source 1..75: mol_type = other DNA
tggttgatagcctggcaaaacaacatcgctgggcggcgacgggtgtatcagattatccacctcgcgacccgttag

SEQ ID NO: 332657 - DNA, 75 bp, synthetic construct
  source 1..75: mol_type = other DNA
atgacccgcgccgctgttccggcaattccgtatcggaggtgctggataaattcagaaaaaactacgatcggataa

SEQ ID NO: 332658 - DNA, 75 bp, synthetic construct
  source 1..75: mol_type = other DNA
ggtggcggcgatggcccccattggtgccgtgtttacctttattgccctggttaccggctctgcatggggaaaacc

SEQ ID NO: 332659 - DNA, 75 bp, synthetic construct
  source 1..75: mol_type = other DNA
aaactacctcgccagcgccccggcagcactggaacacggcgtatttatcggtgccgcgggcgatggcaaaattgc

SEQ ID NO: 332660 - DNA, 75 bp, synthetic construct
  source 1..75: mol_type = other DNA
cctctgtcaaaaggtgagtttaaatacttactcagcttgctgtatgaccacccagcgattgaattcgctgccgat

SEQ ID NO: 332661 - DNA, 75 bp, synthetic construct
  source 1..75: mol_type = other DNA
acgtctgtacaccaacacgctgcgcaccataggtcatattttagatggagcgttaaaagacgataccagcagtgc

SEQ ID NO: 332662 - DNA, 75 bp, synthetic construct
  source 1..75: mol_type = other DNA
gcaatatcgatcgcagcatctggcgcgatctcatgctgaagtccgggatgttgactctgatggatgccgaagctc

SEQ ID NO: 332663 - DNA, 75 bp, synthetic construct
  source 1..75: mol_type = other DNA
ccattcccgataaccggcatgatgttgcgattcggtttatggacttcgttagtgctcacccgcatgagcaggtat

SEQ ID NO: 332664 - DNA, 75 bp, synthetic construct
  source 1..75: mol_type = other DNA
atgctttacctgctggatggcaaaaccattcctgacaaccggcatgatgtctctatccgatttatgaattttgtt

SEQ ID NO: 332665 - DNA, 75 bp, synthetic construct
  source 1..75: mol_type = other DNA
gactttcacgtttcttattttgcaacagagataaagaccaacctagataagacgatgttccaagaagctgctgca

SEQ ID NO: 332666 - DNA, 75 bp, synthetic construct
  source 1..75: mol_type = other DNA
gccgtggcccggcctgcaccgcgctggtctatgttgatgatgcaaccagcaaactgatggaactgttgtttgtta

SEQ ID NO: 332667 - DNA, 75 bp, synthetic construct
  source 1..75: mol_type = other DNA
ggtccgggctggtttatggatcccccgtaaacaacgcgccgcaaggatccctcaaccacggtaccggcgtccttg

SEQ ID NO: 332668 - DNA, 75 bp, synthetic construct
  source 1..75: mol_type = other DNA
gccaacttggtcaccatgttattaactccttactgaaaaccgttcctgccagccaaatagtggctatcgcacgta

SEQ ID NO: 332669 - DNA, 75 bp, synthetic construct
  source 1..75: mol_type = other DNA
gattgcgctgctggcagatagcccacgcggttatgaaatgcttaacgatgcggtgaacgatagcggcaaacgcgc

SEQ ID NO: 332670 - DNA, 75 bp, synthetic construct
  source 1..75: mol_type = other DNA
cgcagttgcattacagcagattaaagagcgtggcgctttaccgatgatcgatagcggtgatatccgtcaggcaat

SEQ ID NO: 332671 - DNA, 75 bp, synthetic construct
  source 1..75: mol_type = other DNA
cggtgaataactgtattaccttccagccggtgcagaatcacgtggtgattggcgatgactccaccatcgacttct

SEQ ID NO: 332672 - DNA, 75 bp, synthetic construct
  source 1..75: mol_type = other DNA
cttcccggcgattaacctgaccgtgaccgatgatggcagcaccattcagggtaaagatgccgacatcatgatcgt

SEQ ID NO: 332673 - DNA, 75 bp, synthetic construct
  source 1..75: mol_type = other DNA
ttgtggtatgcgctggcaaaccatccgattctgctggcggtgctggcggctatcagtgtgatattgctggcatgg

SEQ ID NO: 332674 - DNA, 75 bp, synthetic construct
  source 1..75: mol_type = other DNA
aaaaaaaatttttgagtttaaaactattccattagttaaatcgtcaacaagaatggataatctcatacataaata

SEQ ID NO: 332675 - DNA, 75 bp, synthetic construct
  source 1..75: mol_type = other DNA
atgataatcattatcgctttacgggtcctttccggtgatccgacaggttacggggcggcgacctcgcggtttttc

SEQ ID NO: 332676 - DNA, 75 bp, synthetic construct
  source 1..75: mol_type = other DNA
tatgacctggctaacgggaaatacaccgcacaggatgcaacaacagcacagaaagggataatccagctaagcagc

SEQ ID NO: 332677 - DNA, 75 bp, synthetic construct
  source 1..75: mol_type = other DNA
taatggtgactgcagaagcgaagaaagagaacattattgctgcggcgcaagcgggggccagtggctatgtggtga

SEQ ID NO: 332678 - DNA, 75 bp, synthetic construct
  source 1..75: mol_type = other DNA
gcgggggccagtggctatgtggtgaagccatttaccgccgcgacgctggaaggaaaaactcaaacaaaatctttg

SEQ ID NO: 332679 - DNA, 75 bp, synthetic construct
  source 1..75: mol_type = other DNA
gataaagccatgccggtgatcacccgaaatatcgatcgcagcatctggcgcgatctcatgctgaagtctgggatg

SEQ ID NO: 332680 - DNA, 75 bp, synthetic construct
  source 1..75: mol_type = other DNA
gccaccatcaaaggtattgaggtgatgcgtgcactacgcaaaggccaggcctcagcattttattatggtgatccc

SEQ ID NO: 332681 - DNA, 75 bp, synthetic construct
  source 1..75: mol_type = other DNA
gcgtatctgtaccgggccgtcgacagccggggccgcactgtcgatttttatctctcctcccgtcgtaacagcaaa

SEQ ID NO: 332682 - DNA, 75 bp, synthetic construct
  source 1..75: mol_type = other DNA
agaagtggcagatcccgcgattcatcaacacggataaagcgcccgcctatggtcgcgcgcttgctctgctcaaac

SEQ ID NO: 332683 - DNA, 75 bp, synthetic construct
  source 1..75: mol_type = other DNA
tttgcctgggtatcgaataccctggggttaaaatggggatttgcagcgatctcatttggttatttgcaaatcgct

SEQ ID NO: 332684 - DNA, 60 bp, synthetic construct
  source 1..60: mol_type = other DNA
atggagctgcacatgaacccattcaaaggccggcattttcagcgtgacatcattctgtgg

SEQ ID NO: 332685 - DNA, 75 bp, synthetic construct
  source 1..75: mol_type = other DNA
attaagtaccggaacaacgtgattgaatgcgatcatggcaaactgaaacggataatcggcgccacgctgggattt

SEQ ID NO: 332686 - DNA, 75 bp, synthetic construct
  source 1..75: mol_type = other DNA
caaactgaaacggataatcggcgccacgctgggatttaaatccatgaagacggcttacgccaccatcaaaggtat

SEQ ID NO: 332687 - DNA, 75 bp, synthetic construct
  source 1..75: mol_type = other DNA
aaacgcgaaggccggtgcccgtctgacgttgaacaccgacagatggcactgttgcaaatagtcggtggtgataaa

SEQ ID NO: 332688 - DNA, 75 bp, synthetic construct
  source 1..75: mol_type = other DNA
tgcagatggtcgtacccagtatcgtacagatatttacaattatgatctgcctgcgcgatccagctcgcaaattgt

SEQ ID NO: 332689 - DNA, 75 bp, synthetic construct
  source 1..75: mol_type = other DNA
tgcaggagatgctggctgaacgcggagtgaatgtcgatcactccacgatttaccgctgggttcagcgttatgcgc

SEQ ID NO: 332690 - DNA, 75 bp, synthetic construct
  source 1..75: mol_type = other DNA
aagtgatatttttgcgctgatagacgctggcgccgacggctatctgttgaaagatagcgatccagaagtgctgct

SEQ ID NO: 332691 - DNA, 75 bp, synthetic construct
  source 1..75: mol_type = other DNA
acggcttacgccaccatcaaaggtattgaggtgatgcgtgcactacgcaaaggccaggcctcagcattttattat

SEQ ID NO: 332692 - DNA, 75 bp, synthetic construct
  source 1..75: mol_type = other DNA
attttgtggtttattccggtcggcctttgcgcggcggaaatggccaccgtggaaggctgggaagaaggcggcgta

SEQ ID NO: 332693 - DNA, 75 bp, synthetic construct
  source 1..75: mol_type = other DNA
ctgtattttcagccctgaccctgggtgttgcgacaaatgcgtcggctgccaccacggttaatggtggcactgttc

SEQ ID NO: 332694 - DNA, 75 bp, synthetic construct
  source 1..75: mol_type = other DNA
gtcactggttcccctgccgtgctgcaaagcccgcaggtgcaggcaaaagttcgcgctactctgttggctggcatt

SEQ ID NO: 332695 - DNA, 75 bp, synthetic construct
  source 1..75: mol_type = other DNA
acgccagctcgaacacttcgatttacagtccgaaacgctgatgagcgcgatggctgccatctatgttgatgttat

SEQ ID NO: 332696 - DNA, 75 bp, synthetic construct
  source 1..75: mol_type = other DNA
gacaaagcgatgccggtgatcacccgcaatatcgaccgcagtatctggcgcgatctcatgctgaagtccgggatg

SEQ ID NO: 332697 - DNA, 75 bp, synthetic construct
  source 1..75: mol_type = other DNA
atcactttcaaacgtttggatctggtggagaagatgaatgatatcgtggcgaagcaatttccgtcagcgttatca

SEQ ID NO: 332698 - DNA, 75 bp, synthetic construct
  source 1..75: mol_type = other DNA
atgcaaatagaagctgaagtcttaaccgatcataacgaactaattcgctcgaccagtattgagcgtatcgtgacc

SEQ ID NO: 332699 - DNA, 75 bp, synthetic construct
  source 1..75: mol_type = other DNA
gatccggtaacaaaaaccattgcggcactcatcattctttgggttctggcattaactcagtttggcggtactaaa

SEQ ID NO: 332700 - DNA, 75 bp, synthetic construct
  source 1..75: mol_type = other DNA
tcttaaatggccagcactgaatgaagatccggtaacaaaaaccattgcggcactcatcattctttgggttctggc

SEQ ID NO: 332701 - DNA, 75 bp, synthetic construct
  source 1..75: mol_type = other DNA
tgctgtttattggctacattgtgttagtcattaaacatcctgatttaaaacgtacatttaatatcccgggcggta

SEQ ID NO: 332702 - DNA, 75 bp, synthetic construct
  source 1..75: mol_type = other DNA
ccccgcattgccctggacgccatcgacgttgtctggaaagcaggaggccgcgccggggtgacgctgtcgggcact

SEQ ID NO: 332703 - DNA, 75 bp, synthetic construct
  source 1..75: mol_type = other DNA
ggttgaaatggggatttgcagctatctcatttggctatctgcaaatcgctatcggctttattccaatgctctatt

SEQ ID NO: 332704 - DNA, 75 bp, synthetic construct
  source 1..75: mol_type = other DNA
agaagcttccgcaactcacgtcaatgaaatgagcaaccccgggcgcgactatccactggctatgttactgctgat

SEQ ID NO: 332705 - DNA, 75 bp, synthetic construct
  source 1..75: mol_type = other DNA
cgtgctgggttagtggttgccgatttatccggcgaaacggaagacccgcgttccgtttgtgaacattactattca

SEQ ID NO: 332706 - DNA, 75 bp, synthetic construct
  source 1..75: mol_type = other DNA
acagtaggtgaatactgggtttacctcccagcatggaacaacggcatgaaactcgcatatgaaagtcgcccgaaa

SEQ ID NO: 332707 - DNA, 75 bp, synthetic construct
  source 1..75: mol_type = other DNA
gctactaaaaatggtcgtcaggtactggcacgtcgtcgtgctaaaggccgtgctcgtctgaccgtttctaagtaa

SEQ ID NO: 332708 - DNA, 75 bp, synthetic construct
  source 1..75: mol_type = other DNA
ggcggtgctgcaccgtcacggtgggttgcaaatggccgatcaggatgtatttgttaacgtggtcggcggcgtgaa

SEQ ID NO: 332709 - DNA, 75 bp, synthetic construct
  source 1..75: mol_type = other DNA
ggtcgatcactcgatgatggcgaatccacgccgcgtggcagtcgggctggagcaaaaccgtctggcaatcctgct

SEQ ID NO: 332710 - DNA, 75 bp, synthetic construct
  source 1..75: mol_type = other DNA
gaattgttatcagtaaaatacccgtcatgcaagcagggctgaaagaggtcataaagacccatttccctgaatatg

SEQ ID NO: 332711 - DNA, 75 bp, synthetic construct
  source 1..75: mol_type = other DNA
aggcacggaggtgccaaacaataccgtgcagcaaaagccgatactgctgcatgggaaaatgctctgagaccaaaa

SEQ ID NO: 332712 - DNA, 75 bp, synthetic construct
  source 1..75: mol_type = other DNA
taccgtcctcccgtgcgaaaacggtaccgattagcgctttcgcttgataaaagagaggagatatccagaggagtg

SEQ ID NO: 332713 - DNA, 75 bp, synthetic construct
  source 1..75: mol_type = other DNA
atccccacccggggatttgtgatgtctgtcagtctgctttagggggactctttccatccggtagtttccttcctc

SEQ ID NO: 332714 - DNA, 75 bp, synthetic construct
  source 1..75: mol_type = other DNA
atgaaacgcacttttcaaccgtctgtactgaagcgcaaccgttctcacggcttccgtgctcgtatggctactaaa

SEQ ID NO: 332715 - DNA, 75 bp, synthetic construct
  source 1..75: mol_type = other DNA
ttcagcaagcggatgatgataacgacgtggcggtatcgttggttattgcgttgattgtggaaaatccgcagcagc

SEQ ID NO: 332716 - DNA, 75 bp, synthetic construct
  source 1..75: mol_type = other DNA
aaaaaatccctcttctccagtgccccctccgaacccagagtgtattttcatttattgatgaaatttgctgtttgc

SEQ ID NO: 332717 - DNA, 75 bp, synthetic construct
  source 1..75: mol_type = other DNA
tctggacggcgatgccgactcccgtttccgcaccttacgcagccataaaaaccgtttcggcgcggtgaatgagct

SEQ ID NO: 332718 - DNA, 75 bp, synthetic construct
  source 1..75: mol_type = other DNA
cttgcggagcttaaaggtgctgcctttggcaatcccccatacagtcgcgccagtcagcatgaggggcaatacatc

SEQ ID NO: 332719 - DNA, 75 bp, synthetic construct
  source 1..75: mol_type = other DNA
gctggcgcatgactggtcagaacgccttgcggagcttaaaggtgctgcctttggtaatcccccatacagccgcgc

SEQ ID NO: 332720 - DNA, 75 bp, synthetic construct
  source 1..75: mol_type = other DNA
caccggctggacgcgcaactgcaatattcaaaacgatagcgcgttgcagcaagcctgcacagacgtcttccgctt

SEQ ID NO: 332721 - DNA, 75 bp, synthetic construct
  source 1..75: mol_type = other DNA
gcgctgcctggccatccgggaccgacggtgggagaaaaaacaggccgctctggccggggcgatgggcggtgagga

SEQ ID NO: 332722 - DNA, 75 bp, synthetic construct
  source 1..75: mol_type = other DNA
cccgtttgttctggatctgttcactgacggtgataacgccaaatgtgccgcgtattacacggcggaagacaacgc

SEQ ID NO: 332723 - DNA, 75 bp, synthetic construct
  source 1..75: mol_type = other DNA
agagagagataggcggggaatagttaatggacttcaaaatgacgcagcaacagatctaaacaccatgtctacagt

SEQ ID NO: 332724 - DNA, 75 bp, synthetic construct
  source 1..75: mol_type = other DNA
gctcgtgctgatatcaaaacgataattccactatttatgtattatgcaataatgtatctaattataagcactgct

SEQ ID NO: 332725 - DNA, 75 bp, synthetic construct
  source 1..75: mol_type = other DNA
atgcgtgactgccattcttcagatgataaagacgtcattgcaattgatggaaaaacgctccggcattcttatgat

SEQ ID NO: 332726 - DNA, 75 bp, synthetic construct
  source 1..75: mol_type = other DNA
ataaagacgtcatcgcaattgatggaaaaacgctccggcattcttatgacaagagtcgtcatatcattagtgcgt

SEQ ID NO: 332727 - DNA, 75 bp, synthetic construct
  source 1..75: mol_type = other DNA
ttatcgaactgatggttgttatcggcatcattgccattttaagcgctatcggcattcccgcatatcagaactacc

SEQ ID NO: 332728 - DNA, 75 bp, synthetic construct
  source 1..75: mol_type = other DNA
atagtttattaaatctgaataaaaatgacaattcacttccgggtcgtcttttatttttaattgttatagtgctgt

SEQ ID NO: 332729 - DNA, 75 bp, synthetic construct
  source 1..75: mol_type = other DNA
cagtcagcatgaggggcaatacatcaccggcatgcgttacatcatgaagcatgccagtgccatgcgtgataaagg

SEQ ID NO: 332730 - DNA, 75 bp, synthetic construct
  source 1..75: mol_type = other DNA
ttatattgcaagtctgatctgtgatggcagtatagtttgcaatggtaacaccaactcctcccgtagtagctacta

SEQ ID NO: 332731 - DNA, 75 bp, synthetic construct
  source 1..75: mol_type = other DNA
ctatgggatgttctacaacgttatcagcatgttccggcgcttttgcaacgccctggctggtatcgggcgtggcct

SEQ ID NO: 332732 - DNA, 75 bp, synthetic construct
  source 1..75: mol_type = other DNA
ctgtgggatgttctacagcgctatcagcatgttccggcgcttttgcaacgcccgggctggtaccgtaagtggcct

SEQ ID NO: 332733 - DNA, 75 bp, synthetic construct
  source 1..75: mol_type = other DNA
atggaagacgactgcgacattattattatcggtgccggcattgcgggcaccgcttgtgcgttacgctgcgcgcga

SEQ ID NO: 332734 - DNA, 75 bp, synthetic construct
  source 1..75: mol_type = other DNA
ggcgcagtacgctgcatgaagatggcgatgcacggcgttgataccccaatcgattacctgaactctcacggtact

SEQ ID NO: 332735 - DNA, 75 bp, synthetic construct
  source 1..75: mol_type = other DNA
gcggcggtatggtagtcgttgaagagctggaacacgcgctggcgcgcggcgcgcacatctacgctgaaatcgttg

SEQ ID NO: 332736 - DNA, 75 bp, synthetic construct
  source 1..75: mol_type = other DNA
tggcgataagagcccggcgatttctgcaaccaaggcaatgaccggtcactctctgggcgcggcaggcgtacagga

SEQ ID NO: 332737 - DNA, 75 bp, synthetic construct
  source 1..75: mol_type = other DNA
gttgggtttacacgagcagagcaacagctgcatgtaatgtggtacggtgatccgtctttctttttaagcgaatgt

SEQ ID NO: 332738 - DNA, 75 bp, synthetic construct
  source 1..75: mol_type = other DNA
atctccgaccattttacaggtagagcagattcaggctgaaacggtaatttacgaagcaaagctggcgcgtcagaa

SEQ ID NO: 332739 - DNA, 75 bp, synthetic construct
  source 1..75: mol_type = other DNA
cgcaatacggcgcgccgttacgtacggtcgaagtggtggcgatggcagaagaagaaggcagccgcttcccgtatg

SEQ ID NO: 332740 - DNA, 75 bp, synthetic construct
  source 1..75: mol_type = other DNA
ctcaatttcacctgaccgcgccccttgagcgacgtatcactcacgaaagcctttctctgttaacgcccgatggcg

SEQ ID NO: 332741 - DNA, 75 bp, synthetic construct
  source 1..75: mol_type = other DNA
tacttttcttgatgacgatgatttgtttttagaaaataagatatcaaagcaaattgattttttagaaaaagaaca

SEQ ID NO: 332742 - DNA, 75 bp, synthetic construct
  source 1..75: mol_type = other DNA
ttattattccaacatatgggcggtgtgacactttaaatcttgctgtccaaagtgtactaaaacaggattataaaa

SEQ ID NO: 332743 - DNA, 75 bp, synthetic construct
  source 1..75: mol_type = other DNA
ccgagcatcaacattgaagagctggacgagcaggctgcgggtctgaacatcgtgaccgaaacgaccgatcgcgaa

SEQ ID NO: 332744 - DNA, 75 bp, synthetic construct
  source 1..75: mol_type = other DNA
gggcggcctttgacccgtacaccagtcttgagacggcggcagtcattctgcaggagtgccgtcagcgccatcccg

SEQ ID NO: 332745 - DNA, 75 bp, synthetic construct
  source 1..75: mol_type = other DNA
atccgcgaatgccgtccgctgtccaagactaaatcctggacgctggttcgcgttgtagagaaagcagttctgtaa

SEQ ID NO: 332746 - DNA, 75 bp, synthetic construct
  source 1..75: mol_type = other DNA
agtgctgtatgccgtctccctgacagagaccgccatggcacccggtgatatggccggcgtcatgcagtattcccg

SEQ ID NO: 332747 - DNA, 75 bp, synthetic construct
  source 1..75: mol_type = other DNA
gagttacgcgctgcgttcgcgcaaggctacgtatttcccacactctcccagctttttatgcagacatctgcgggc

SEQ ID NO: 332748 - DNA, 75 bp, synthetic construct
  source 1..75: mol_type = other DNA
ctggacatggacaatgggagttcgccaatactggctttcttcaaagttgacgcgtggtgacggagtatcatatac

SEQ ID NO: 332749 - DNA, 75 bp, synthetic construct
  source 1..75: mol_type = other DNA
gattctgacatttcaataccaagacacactgaaagaaactgcatttatgaagaagcaaacacatgtttagaactc

SEQ ID NO: 332750 - DNA, 75 bp, synthetic construct
  source 1..75: mol_type = other DNA
gatttctgcaaccaaagcaatgaccggtcactcactgggcgctgctggcgtacaggaagctatctactctctgct

SEQ ID NO: 332751 - DNA, 75 bp, synthetic construct
  source 1..75: mol_type = other DNA
cggcgataagagcccggcgatttctgcaaccaaagccatgaccggtcactcactgggcgctgcgggtgtgcagga

SEQ ID NO: 332752 - DNA, 75 bp, synthetic construct
  source 1..75: mol_type = other DNA
tcagctccgcgtgtgcgacttccgcacactgtatcggtaatgcggtagagcagatccaactgggcaaacaagaca

SEQ ID NO: 332753 - DNA, 75 bp, synthetic construct
  source 1..75: mol_type = other DNA
ccgttcccgctcatttaccggcagtcagtacagatcgggctgtatcgtttgtgtggatagaaccggagaacaaaa

SEQ ID NO: 332754 - DNA, 75 bp, synthetic construct
  source 1..75: mol_type = other DNA
gtcaatgatgagtttagtttaacagatgatgaaatcaattcttttaaagaaacgttagtcctttcctctattgat

SEQ ID NO: 332755 - DNA, 75 bp, synthetic construct
  source 1..75: mol_type = other DNA
accgctatggcgtcacgatcaattgctgcggtggtcagacagaagacaaatctgcctgcggtgagtcgtccctgg

SEQ ID NO: 332756 - DNA, 75 bp, synthetic construct
  source 1..75: mol_type = other DNA
acccatgcactcgcggaactcctccctcagtttcatctgaccgcgcctcttgaacgatgcatcactcacgaaagc

SEQ ID NO: 332757 - DNA, 75 bp, synthetic construct
  source 1..75: mol_type = other DNA
tgttccaccgctgcgccagttattctggcgtcatggcctgtggcatctggcgggcgatgttatcaggagtgttcg

SEQ ID NO: 332758 - DNA, 75 bp, synthetic construct
  source 1..75: mol_type = other DNA
ttgcactggagatgttgttaccggttggcctgtatgtgtcggttggcgtgacgcttgggcagatgtataccgact

SEQ ID NO: 332759 - DNA, 75 bp, synthetic construct
  source 1..75: mol_type = other DNA
agcaggtgaaactgtcgatgcagaaactggatgagctgcttactgcaatggcgcaggcacaggtcgatcgcaatg

SEQ ID NO: 332760 - DNA, 75 bp, synthetic construct
  source 1..75: mol_type = other DNA
atgagatttacctgcgccagcgtgagatgaaaaacacgctggccacactgaataacattgctgcaattagggcat

SEQ ID NO: 332761 - DNA, 75 bp, synthetic construct
  source 1..75: mol_type = other DNA
cgtacctggaatggtggtgcagactcaataagtcgtattgcgcccgtggcaatggcgacaaaggttgcaggtacg

SEQ ID NO: 332762 - DNA, 75 bp, synthetic construct
  source 1..75: mol_type = other DNA
gccgctgtggtggtcggcagcatggtggcggtggccattaccgatattcctgccggggagaccggtgacgggttc

SEQ ID NO: 332763 - DNA, 75 bp, synthetic construct
  source 1..75: mol_type = other DNA
gatcagaccatcctgagcggtgctgcggtggtggtcggcagtatggtggccgtggccattaccgatattcctgcc

SEQ ID NO: 332764 - DNA, 75 bp, synthetic construct
  source 1..75: mol_type = other DNA
caaatcaggtctgggtggcggacctgaaccgccccggttttcctggagagtgttttatctgtgaactcaggctgc

SEQ ID NO: 332765 - DNA, 75 bp, synthetic construct
  source 1..75: mol_type = other DNA
attttcgccagctactcctcacagcgttatctgaccgaagcggcaaatgggacattagctcttgatgttgtgctg

SEQ ID NO: 332766 - DNA, 75 bp, synthetic construct
  source 1..75: mol_type = other DNA
atgccgttgccgcaggcatcgcctgggaagatgcaccggcaaacaccaccgttgttgaagtgaagattaatgtct

SEQ ID NO: 332767 - DNA, 75 bp, synthetic construct
  source 1..75: mol_type = other DNA
gctgcgagaagccaagcggctgctgctgttttctgataacgccgtgaacaatattgcctggcaactcggttttaa

SEQ ID NO: 332768 - DNA, 75 bp, synthetic construct
  source 1..75: mol_type = other DNA
tgtcagcccgctaggctgtggcgcgctggcgggaacggcctatgaaatcgaccgtgaacagttagcaggctggct

SEQ ID NO: 332769 - DNA, 75 bp, synthetic construct
  source 1..75: mol_type = other DNA
atgaaaattcttgatatcaaaaatgcgcattaccttgaaagcggtgcgattgactgcgaggttttgtttgagggt

SEQ ID NO: 332770 - DNA, 75 bp, synthetic construct
  source 1..75: mol_type = other DNA
atgacgagatttatctccgtcagcgtgagatgaagcaagaactgaatagtctggaggatttgaattcggttagga

SEQ ID NO: 332771 - DNA, 75 bp, synthetic construct
  source 1..75: mol_type = other DNA
tttcgtcgctgcgcgtcattcaggcaggcggcgcccggctcgacccgacgcttgctgagcaggttatcgccacct

SEQ ID NO: 332772 - DNA, 75 bp, synthetic construct
  source 1..75: mol_type = other DNA
ggtggggcacgtaaccaaagatggttcgctggctggccctaaagtgctggaacactgtatcgactgttcggtgct

SEQ ID NO: 332773 - DNA, 75 bp, synthetic construct
  source 1..75: mol_type = other DNA
tgaagtgacctctggtagttcagtgatggtggtatgggaaggaacgcgtccgttgctggtggagattcaggcgct

SEQ ID NO: 332774 - DNA, 75 bp, synthetic construct
  source 1..75: mol_type = other DNA
caaactggcccagcagatgaaaacgctgtatgtcactggcgaagagtcgctgcaacaggtggcaatgcgcgctca

SEQ ID NO: 332775 - DNA, 75 bp, synthetic construct
  source 1..75: mol_type = other DNA
aacgccgggaaattgaagcatggcgtacagagcaggaagcgcagccattcatttttgaatggaacggccatagct

SEQ ID NO: 332776 - DNA, 75 bp, synthetic construct
  source 1..75: mol_type = other DNA
atgccgggttacacgcacctgcaacgcgcccagccggtgactttcgcgcactggtgcctggcctatgttgaaatg

SEQ ID NO: 332777 - DNA, 75 bp, synthetic construct
  source 1..75: mol_type = other DNA
cgcaccatattgtgggtgaagctgtggtggaagccattcgtcagggcaaagcgctggaagatctgccgctcagtg

SEQ ID NO: 332778 - DNA, 75 bp, synthetic construct
  source 1..75: mol_type = other DNA
tccatagctgggtggaaggcaaactgatcgacaaagtgggccagttaggcaaaaagctgcataccgggcgtagcc

SEQ ID NO: 332779 - DNA, 75 bp, synthetic construct
  source 1..75: mol_type = other DNA
ttgccccgttcaccgcatcacctgaacttatcgcagcagcaaaggacgccaaaaaacgggaaattgaggcatggc

SEQ ID NO: 332780 - DNA, 75 bp, synthetic construct
  source 1..75: mol_type = other DNA
gcccccactacaccgaatccggtgcgattgactgcgaagttttatttgaagggatggatgaagccgttccgtaca

SEQ ID NO: 332781 - DNA, 75 bp, synthetic construct
  source 1..75: mol_type = other DNA
ggtggcggcaatctgcttaagctctgttggcggtttgtctattgcgatggtcattccgggtaatgaaatcaacct

SEQ ID NO: 332782 - DNA, 75 bp, synthetic construct
  source 1..75: mol_type = other DNA
gcgattggcctgaacttagcgcctatcgcagtgaaaaatgtatcggcttcggcctttgatagctggatggcgtga

SEQ ID NO: 332783 - DNA, 75 bp, synthetic construct
  source 1..75: mol_type = other DNA
tgaggcatgcggaaatcctattccggaagcccggcggaaaatatttcccggtgtgacgttatgtgttgaatgtca

SEQ ID NO: 332784 - DNA, 75 bp, synthetic construct
  source 1..75: mol_type = other DNA
tcttattccggaagcccggcgaaaaatatttcccggcgtgacgttatgtgttgaatgtcaggcatatcaggaaaa

SEQ ID NO: 332785 - DNA, 75 bp, synthetic construct
  source 1..75: mol_type = other DNA
aaacgcgacgattatactcagggtcttttcattggctatagccataatgttacagagtcaggtcagctatcgttt

SEQ ID NO: 332786 - DNA, 75 bp, synthetic construct
  source 1..75: mol_type = other DNA
caagaagaaactacccgacttaacgttgtgctggattatatcgaggctgtgacggcaacagataccagcaccgca

SEQ ID NO: 332787 - DNA, 75 bp, synthetic construct
  source 1..75: mol_type = other DNA
gcggtaatgacggtgctgtgtattgggctggtggccgtatttacccgtggcatgatccagcgattattgattctc

SEQ ID NO: 332788 - DNA, 75 bp, synthetic construct
  source 1..75: mol_type = other DNA
atgacggcctggggtttttgatggaagtcactagggtagagcagagaagtgatgaggttgacgcgaattatcccc

SEQ ID NO: 332789 - DNA, 75 bp, synthetic construct
  source 1..75: mol_type = other DNA
ataacgagagtagcgaggcgttagccaagggtaaaaaagacagtaatcaccagattatttatcgggaccaggtgc

SEQ ID NO: 332790 - DNA, 75 bp, synthetic construct
  source 1..75: mol_type = other DNA
gaaaaagaaaaaacacagtttcccacgtccctcccactggaccagagagtatactcacgagtgcgtggaaaaaat

SEQ ID NO: 332791 - DNA, 75 bp, synthetic construct
  source 1..75: mol_type = other DNA
gcaaaatgcgtttaacaatcgcgaaaatgtgaggaaaattgcaaaaaatcctcataacgcgcttgcttttcaatg

SEQ ID NO: 332792 - DNA, 75 bp, synthetic construct
  source 1..75: mol_type = other DNA
tcacggcttaccgagctatgccgacgttttgccaatcaatcgccgaagagattgattttcgaacgagtgagccgg

SEQ ID NO: 332793 - DNA, 75 bp, synthetic construct
  source 1..75: mol_type = other DNA
ccttgatcttggctacaaagatcccgcctatttcgcccgttttttcaaccgaatgatgggttgctcaccaacaca

SEQ ID NO: 332794 - DNA, 75 bp, synthetic construct
  source 1..75: mol_type = other DNA
catttattttatcatcatttatagtctctccagttagcgctgatatcattacactttcattaactaatgatgatg

SEQ ID NO: 332795 - DNA, 75 bp, synthetic construct
  source 1..75: mol_type = other DNA
tgcccgctcaagatgactggattttaatttattcaaagcacggcgagtatatggcaggacaggtacaagaggaat

SEQ ID NO: 332796 - DNA, 75 bp, synthetic construct
  source 1..75: mol_type = other DNA
gcggaagacaacgcgctggcgcatgactggtcagaacgtcttgcggagcttaaaggtgctgcctttggtaatccc

SEQ ID NO: 332797 - DNA, 75 bp, synthetic construct
  source 1..75: mol_type = other DNA
gacggtgataacgccaaatgtgccgcgtattacacggcggaagacaacgcgctggcgcatgactggtcagaacgt

SEQ ID NO: 332798 - DNA, 75 bp, synthetic construct
  source 1..75: mol_type = other DNA
gcttcttcgccggtatcctgttacctgcatttattttgatcgcattagcggctatttatctgcactccggtgccc

SEQ ID NO: 332799 - DNA, 75 bp, synthetic construct
  source 1..75: mol_type = other DNA
gacgtatgttgccacacaggagggatggttgtactcgctggcatcaaagatgtttatacgtgcgaaattgtcggc

SEQ ID NO: 332800 - DNA, 75 bp, synthetic construct
  source 1..75: mol_type = other DNA
caaatggaactggcacggattgctctggcatcgctggaagcaaaaccaataggtgcattccacattgcagaacag

SEQ ID NO: 332801 - DNA, 75 bp, synthetic construct
  source 1..75: mol_type = other DNA
ccgaacaaccacaaaacgcacaacaaaatattccggaaaatattcccggtggcaactctccggtaactccggatg

SEQ ID NO: 332802 - DNA, 75 bp, synthetic construct
  source 1..75: mol_type = other DNA
ttggagggtatgccacttccaatctatctggtgcatacaatatgttttctgagttctggaatgttgctgtctcag

SEQ ID NO: 332803 - DNA, 75 bp, synthetic construct
  source 1..75: mol_type = other DNA
gaatgccagaaattagacaaacagttattggatggaatggatatgcagttagacaatgcgtatatacaaggaatg

SEQ ID NO: 332804 - DNA, 75 bp, synthetic construct
  source 1..75: mol_type = other DNA
ccggaagatgccgagcatattacttttattcgcgggcgtattggttttgaactgcctgactggtttatcccgaag

SEQ ID NO: 332805 - DNA, 75 bp, synthetic construct
  source 1..75: mol_type = other DNA
ccggaagatgccgaacatattgcttttattcgcgggcgtattggttttgaactgcctgactggtttatcccgaag

SEQ ID NO: 332806 - DNA, 75 bp, synthetic construct
  source 1..75: mol_type = other DNA
ccggaagatgcagaccatattccttttattcgcgggcgtattggttttgaactgcctgactggtttatcccgaag

SEQ ID NO: 332807 - DNA, 75 bp, synthetic construct
  source 1..75: mol_type = other DNA
aacaggccagccggtcaggatttattatgaacccggagtatggacgtatcctccttttgtgaaggcattaacgtc

SEQ ID NO: 332808 - DNA, 75 bp, synthetic construct
  source 1..75: mol_type = other DNA
gtgagaagttatattgataatgaaaaactgaagacaatcagcgactgtcttagcttgctggcaaaaataaaagaa

SEQ ID NO: 332809 - DNA, 75 bp, synthetic construct
  source 1..75: mol_type = other DNA
gcaaatatttcaggtaacttgattaaaaacgaagcaaccaacacacctatagcgactaatattggtatgggcatc

SEQ ID NO: 332810 - DNA, 75 bp, synthetic construct
  source 1..75: mol_type = other DNA
ctaaattttgaccaacagtgctggcagcctgcggatgcgataaaactcaatcagatgctttccctgcaaccttgt

SEQ ID NO: 332811 - DNA, 75 bp, synthetic construct
  source 1..75: mol_type = other DNA
gaacatttgtcagccacgcgaagctggctaaaggtacgcgtccactaacgctaaattttgaccaacagtgctggc

SEQ ID NO: 332812 - DNA, 75 bp, synthetic construct
  source 1..75: mol_type = other DNA
catcagcgcggtattcgtattctctttgatgtcgtgatgaaccacaccggctatgccacgctggcggatatgcag

SEQ ID NO: 332813 - DNA, 75 bp, synthetic construct
  source 1..75: mol_type = other DNA
taatcttgaaagcgctatggagcagggagcggtgccggatggtgacactattctgtggtggttaagacaaagctc

SEQ ID NO: 332814 - DNA, 75 bp, synthetic construct
  source 1..75: mol_type = other DNA
aacgcttgccgccgatcagggcattggcaagggtatgcggtacttcttctcgccgctgattaacgttctgccttt

SEQ ID NO: 332815 - DNA, 75 bp, synthetic construct
  source 1..75: mol_type = other DNA
aaaggtattacagaaaggtggggaagattacgcaaccgaatccctgcacagtgataaatggcttccggcctcatt

SEQ ID NO: 332816 - DNA, 75 bp, synthetic construct
  source 1..75: mol_type = other DNA
gtcgattttacggccaccgtattagctaccacttgtacgataaccatcgtacaagatggtggcccagttgtgacg

SEQ ID NO: 332817 - DNA, 75 bp, synthetic construct
  source 1..75: mol_type = other DNA
acctcccggagttaccggaaaactccggcggttcaggtaacggtcggggacgttttatagggaaaatcctcggtc

SEQ ID NO: 332818 - DNA, 75 bp, synthetic construct
  source 1..75: mol_type = other DNA
aataccggcggtctgccggatgcaccggattcatcgcgcaatccccgtaaatcccgcaactcacgtggaccaaag

SEQ ID NO: 332819 - DNA, 75 bp, synthetic construct
  source 1..75: mol_type = other DNA
ctgaaacaaggttatggatttgtccgtgaacatggcgacgataaagtgatggttgtctgggcggggcaacagtaa

SEQ ID NO: 332820 - DNA, 75 bp, synthetic construct
  source 1..75: mol_type = other DNA
cttgttccgcgaagggggcgataaagccgcagagttattgttactggcgccaggtgcggtacaaatcttttatgg

SEQ ID NO: 332821 - DNA, 75 bp, synthetic construct
  source 1..75: mol_type = other DNA
gttagatgacaatcctttctggatgactggcgaagcctggggtcacggcgtgatgaaaagtgactactatcacca

SEQ ID NO: 332822 - DNA, 75 bp, synthetic construct
  source 1..75: mol_type = other DNA
ggatgttagcggtaaatctgccgccagcgttgcgcactggcaacgcctcggtcagttccgcgcccgccatccagc

SEQ ID NO: 332823 - DNA, 75 bp, synthetic construct
  source 1..75: mol_type = other DNA
cagaatccaccaccgcctctggcctgcctgtattctatcaaaacaagtcagatacccacgccaaagccattgacg

SEQ ID NO: 332824 - DNA, 75 bp, synthetic construct
  source 1..75: mol_type = other DNA
ctatgccacgctggcggatatgcaggagtatcagtttggcgcgttatacctttctggtgatgagctgaaaaaaac

SEQ ID NO: 332825 - DNA, 75 bp, synthetic construct
  source 1..75: mol_type = other DNA
atgaaccacaccggctatgccacgctggcggatatgcaggagtatcagtttggcgcgttatatctttctggtgac

SEQ ID NO: 332826 - DNA, 75 bp, synthetic construct
  source 1..75: mol_type = other DNA
tggtggggaaaaaactggatcagaacggatatcggcgattacgacaatcctggattcgacgatctcaccatgtcg

SEQ ID NO: 332827 - DNA, 75 bp, synthetic construct
  source 1..75: mol_type = other DNA
gcagcaaatggcggagaaattgcaggatttcaacgtgttgagctacctctcgtcgcatgatacccgcctgttccg

SEQ ID NO: 332828 - DNA, 75 bp, synthetic construct
  source 1..75: mol_type = other DNA
caggcgcggtacaaatcttttatggtgatgaatcctcgcgtccgttcggccccaccggttcggatccgctgcaag

SEQ ID NO: 332829 - DNA, 75 bp, synthetic construct
  source 1..75: mol_type = other DNA
cccacattatgcctaccacggttactacacccaggactggacgaatcttgatgccaatatgggcaacgaagccga

SEQ ID NO: 332830 - DNA, 75 bp, synthetic construct
  source 1..75: mol_type = other DNA
ccaacattgatgatttcgatccaaaacactgccgaaccaatagcaaaccagatccgtgaatgcccaaaatgggat

SEQ ID NO: 332831 - DNA, 75 bp, synthetic construct
  source 1..75: mol_type = other DNA
atgaaacttgccgcctgttttctgacactccttcccggctttgccgttgccgccaactggacttcgcaggggttc

SEQ ID NO: 332832 - DNA, 75 bp, synthetic construct
  source 1..75: mol_type = other DNA
cgacatccgtattatagatctgcaacagcggcgctctgcacagacggttgcgctgaccatgatgcagggggatat

SEQ ID NO: 332833 - DNA, 75 bp, synthetic construct
  source 1..75: mol_type = other DNA
atggcggggatttccgaaccggcgttatacggcgtggcgatccgcctgaaacgtccgcttatcgccagtcttatc

SEQ ID NO: 332834 - DNA, 75 bp, synthetic construct
  source 1..75: mol_type = other DNA
acgcacaacacgacaaagcgcaattgctcaaccgcagggcggaactggaggaggagatgcagtttgcccgtgtcg

SEQ ID NO: 332835 - DNA, 75 bp, synthetic construct
  source 1..75: mol_type = other DNA
ggccttatcgatcctgctggatgcgtgaagggcgcgggtgttgcgaaaaacatggcgaataccacacacatattc

SEQ ID NO: 332836 - DNA, 75 bp, synthetic construct
  source 1..75: mol_type = other DNA
ctgctggtaatgaccgggatgcaccgcgtctttacgccaaccatcattcagaccattgccgaaaccggcaaagaa

SEQ ID NO: 332837 - DNA, 75 bp, synthetic construct
  source 1..75: mol_type = other DNA
cgctggcaatcctgctgattggcccgattggtatctggatcggtagcgccatttcggcgctggtttacaccattc

SEQ ID NO: 332838 - DNA, 75 bp, synthetic construct
  source 1..75: mol_type = other DNA
ctcaatggcagcgccggggctatttaccagcgtgcagttcttcgatccggcgaatccaatgagcatcgtctgggt

SEQ ID NO: 332839 - DNA, 75 bp, synthetic construct
  source 1..75: mol_type = other DNA
gagtgtgagaaacacgggaaatacgcacgtctggtgttgaaagggcctgatgttcgtggggaaaccatcaaacgg

SEQ ID NO: 332840 - DNA, 75 bp, synthetic construct
  source 1..75: mol_type = other DNA
gtaacgctatccggctattagccagcggcgctatcaaagtcaaaccgatgatcacgcatcgtatcggcctgtcgc

SEQ ID NO: 332841 - DNA, 75 bp, synthetic construct
  source 1..75: mol_type = other DNA
atgcacgggttgccaccgctgtgaaatctcttgtaccaacttcaacgatggctcagtagggacattcttctcccg

SEQ ID NO: 332842 - DNA, 75 bp, synthetic construct
  source 1..75: mol_type = other DNA
tcctgcgggaaacacggaaaatacacgcgctatgtgctgactggcccggatgtaagggggaaagctgtcaaacgg

SEQ ID NO: 332843 - DNA, 75 bp, synthetic construct
  source 1..75: mol_type = other DNA
atctccgcgcgcctgacgccgcagcagggggaaattcactacgagaaccgttcgctgtatgcaatgagcgaggcc

SEQ ID NO: 332844 - DNA, 75 bp, synthetic construct
  source 1..75: mol_type = other DNA
cgcctgctcgacctgctgcgcggcctggtggtggagctgaacctcgcggtggtgattgtcacccatgatttaggc

SEQ ID NO: 332845 - DNA, 75 bp, synthetic construct
  source 1..75: mol_type = other DNA
gcaacgtgctggataacgcctgtaaatattgcctcgagtttgtcgaaatttctgcaaggcaaaccgacgagcatc

SEQ ID NO: 332846 - DNA, 75 bp, synthetic construct
  source 1..75: mol_type = other DNA
agatgatgatcccaaactacggagaaatgcgccggtatgatgagccggtttcaacagcgtttgtagaatcaacaa

SEQ ID NO: 332847 - DNA, 75 bp, synthetic construct
  source 1..75: mol_type = other DNA
gatcgccaacacgattttgttcctcgcctctgacctcgccagccatatcaccctacaggatattgtggtagatgg

SEQ ID NO: 332848 - DNA, 75 bp, synthetic construct
  source 1..75: mol_type = other DNA
gggtaactggcgcggggaaaggtatcggctacgccacggcgctggcatttgttgaggcgggagcgaaagtcaccg

SEQ ID NO: 332849 - DNA, 75 bp, synthetic construct
  source 1..75: mol_type = other DNA
atatatagaggttgactttttccagagtcatttaaaatgtttgtttagggcaggtgtctggcttagggctatgga

SEQ ID NO: 332850 - DNA, 75 bp, synthetic construct
  source 1..75: mol_type = other DNA
cgctgtgggtgagcgatgacgccgaagagcagcgtattcgcggctttggcgagcagtttaaactcggcattccgc

SEQ ID NO: 332851 - DNA, 75 bp, synthetic construct
  source 1..75: mol_type = other DNA
atggatgttgccgatgctgcgcaggtggcgcaggtatgtcagcgactgttagctgaaacggagcgactggacgtg

SEQ ID NO: 332852 - DNA, 75 bp, synthetic construct
  source 1..75: mol_type = other DNA
gctcatcgatccgagaactgaccctgcctgaagatgatgttgaggcaagcgtttatgtcaggctggctgtaaagg

SEQ ID NO: 332853 - DNA, 75 bp, synthetic construct
  source 1..75: mol_type = other DNA
aatgaacccgaaaacgggaatatacccgaaaacgggaatatacccaaaaacgggatgttgaatgatcccaaaaac

SEQ ID NO: 332854 - DNA, 75 bp, synthetic construct
  source 1..75: mol_type = other DNA
cagtgggcggcaggcaaaaacgatatcggctggtactcgctggacgaaggtgataaccaacaagagcgtttcgcc

SEQ ID NO: 332855 - DNA, 75 bp, synthetic construct
  source 1..75: mol_type = other DNA
tcaggagggaaggagttttcttttcctatcccattgatctcgattttgccatgttgctcgcctttccaaccgctt

SEQ ID NO: 332856 - DNA, 75 bp, synthetic construct
  source 1..75: mol_type = other DNA
aagctgccttcagaatttggccgctatcgggagtaatttggggagcaccaatggtgctaatgctgctcagcttac

SEQ ID NO: 332857 - DNA, 75 bp, synthetic construct
  source 1..75: mol_type = other DNA
ttgcggaagagatgggtgtttcccttgatccatcattcgttcccgtcgttccgctcggtggacggtttgttgtgg

SEQ ID NO: 332858 - DNA, 75 bp, synthetic construct
  source 1..75: mol_type = other DNA
ttatgcccgtttacaatggggccaaaactataatctcatcagtagaatcaattatacatcaatcttatcaagatt

SEQ ID NO: 332859 - DNA, 75 bp, synthetic construct
  source 1..75: mol_type = other DNA
gaagctactcatttttcgttgagcaactggcgcaggggcagcaaaccacgttcagtatgggcgacgacgcctttt

SEQ ID NO: 332860 - DNA, 75 bp, synthetic construct
  source 1..75: mol_type = other DNA
gccataccgcgccgtccataaagcgtactcatatggaacttggaggcaaagcgccagtgatagtttttgatgatg

SEQ ID NO: 332861 - DNA, 75 bp, synthetic construct
  source 1..75: mol_type = other DNA
gcgaacaagtttgccggaattcgcgcggtcgtttgtagcgaaccttattccgcgcaactttcgcggcagcataac

SEQ ID NO: 332862 - DNA, 75 bp, synthetic construct
  source 1..75: mol_type = other DNA
ctataatttcatcagtagaatcgattataaatcaatcatatcaagactttgttttatatatcattgacgattgta

SEQ ID NO: 332863 - DNA, 75 bp, synthetic construct
  source 1..75: mol_type = other DNA
aataaaattaaagctgcaaaatggacatggagtatatatagagaacatttacatttgtcctttccaaaaacatta

SEQ ID NO: 332864 - DNA, 75 bp, synthetic construct
  source 1..75: mol_type = other DNA
ctgcgtagtgcttaaaccatcagaaattaccccgctgacagcgttgaagttggcagagctggcgaaagatatctt

SEQ ID NO: 332865 - DNA, 75 bp, synthetic construct
  source 1..75: mol_type = other DNA
cgatggcggaaggtaaactgatttacacctgtggtcaggcggtcgccatcgacggcggcttaagtatgccgcgct

SEQ ID NO: 332866 - DNA, 75 bp, synthetic construct
  source 1..75: mol_type = other DNA
ctcgcacaggcattcagtaaacgtctgctcgcacagccaaaaccagaaacagaattcccgcaccgctcaattatt

SEQ ID NO: 332867 - DNA, 75 bp, synthetic construct
  source 1..75: mol_type = other DNA
gcgcacctggagcgcgtcagcaaagcggtagaagaggcgaaagcgacagggcatatcaaagtgatcactggcggc

SEQ ID NO: 332868 - DNA, 75 bp, synthetic construct
  source 1..75: mol_type = other DNA
attatgcgcctacactgctggcgggtgcgttacaagaagatgctatcgtccaaagagaggtatttgggccggtag

SEQ ID NO: 332869 - DNA, 75 bp, synthetic construct
  source 1..75: mol_type = other DNA
tggcagagctggcgaaagatatcttcccggcaggcgtgattaacgtactgtttggcagaggcaaaacggtgggtg

SEQ ID NO: 332870 - DNA, 75 bp, synthetic construct
  source 1..75: mol_type = other DNA
gtcaatttacagaacaatattacatatgaacaatgccaaagcatcattttactttcttttctatatctataatgc

SEQ ID NO: 332871 - DNA, 75 bp, synthetic construct
  source 1..75: mol_type = other DNA
atcgaaacccggcagaacttatcccgtatgagatgaacgccaaaaaacatgacgaacagcagatccgcgacctgg

SEQ ID NO: 332872 - DNA, 75 bp, synthetic construct
  source 1..75: mol_type = other DNA
ccttgccggtttaatttttacgcaaaacttgggcaacgtcttattggggctcgtgaactggttgatgtcattctt

SEQ ID NO: 332873 - DNA, 75 bp, synthetic construct
  source 1..75: mol_type = other DNA
atgatgatgatcgctcagcaaacagcccctttttctggcttgcttcttttcgccgtttccaggtatagttttccc

SEQ ID NO: 332874 - DNA, 75 bp, synthetic construct
  source 1..75: mol_type = other DNA
acccctgctgaagaggcaagcatatttgttaatggtggcgatgtctttatttcaactaataccgataaaccaatc

SEQ ID NO: 332875 - DNA, 75 bp, synthetic construct
  source 1..75: mol_type = other DNA
accgggagaagaaacagagctttacatagtccgggataaattgttcaaggaacgcgaggcccgggttacaaccag

SEQ ID NO: 332876 - DNA, 75 bp, synthetic construct
  source 1..75: mol_type = other DNA
tgaccgaagagatggaaacaggctctctggtgctcgatctgggtgaagagacggaacgccagaaagaagagcaca

SEQ ID NO: 332877 - DNA, 75 bp, synthetic construct
  source 1..75: mol_type = other DNA
gattaaaccgcgaggcaccagtaaaggggaggctattgctgcatttatgcaggaagttcccttcatcggccggaa

SEQ ID NO: 332878 - DNA, 75 bp, synthetic construct
  source 1..75: mol_type = other DNA
taacgagattgattgtaatgaggtggcggtgctggagattattctgcaggaactgaaccgcctgtcaccctcacc

SEQ ID NO: 332879 - DNA, 75 bp, synthetic construct
  source 1..75: mol_type = other DNA
ttattgatgattacgaaggtgaaaagttcacattgatgacggctatatatccagtcttgatagcgatgttttcca

SEQ ID NO: 332880 - DNA, 75 bp, synthetic construct
  source 1..75: mol_type = other DNA
atgatgatgcccgttctgcaaaaactccctttttctggcttgcctttttccggcatttgcggatatagtttttcc

SEQ ID NO: 332881 - DNA, 75 bp, synthetic construct
  source 1..75: mol_type = other DNA
gtgagaacccgtgtagctcgaaggcgacatatgacgcgccatgcgtctttttttgtgtcgcaatcaacgccacag

SEQ ID NO: 332882 - DNA, 75 bp, synthetic construct
  source 1..75: mol_type = other DNA
tgtcgccagcgatgagtctcatgcacgtctttcactggtccatgaatatgtgctttgccttgctgctcgcctgcc

SEQ ID NO: 332883 - DNA, 75 bp, synthetic construct
  source 1..75: mol_type = other DNA
atgaagtccactcgtcccgttgccgtgattaccggagccgcacgtggtattggaaaaggctgtgcgctggaactt

SEQ ID NO: 332884 - DNA, 75 bp, synthetic construct
  source 1..75: mol_type = other DNA
tcaatcgaactattccggcagatgctacgactacggtcatgaattctcgtatgttatcggaatggcgagagacgt

SEQ ID NO: 332885 - DNA, 75 bp, synthetic construct
  source 1..75: mol_type = other DNA
ggttgcaaaccatcagccctaacaaagtccgccctgaaatccgcgacaatgtaatccagtatcaagaagagtgtg

SEQ ID NO: 332886 - DNA, 75 bp, synthetic construct
  source 1..75: mol_type = other DNA
gtggcgcttgaggatgcaagcacgacgaaaaaggggatagtacagctaagcagtgcgactaacagcacttccgag

SEQ ID NO: 332887 - DNA, 75 bp, synthetic construct
  source 1..75: mol_type = other DNA
aatggacgcttgaagggatcgaaacccgtgcgcagttactggattccgacggtctgcttcgtcagtcgtccgatc

SEQ ID NO: 332888 - DNA, 75 bp, synthetic construct
  source 1..75: mol_type = other DNA
tgcggggatggcgaatccgaaactgcaacgtactgaacctcaccgttttggtagtacgctcggtcactatggcgt

SEQ ID NO: 332889 - DNA, 75 bp, synthetic construct
  source 1..75: mol_type = other DNA
caacttcaatgtattagacccgtatattgttcgaccggtcgctgtcgcctggcgtgattatgttccgcaaccggc

SEQ ID NO: 332890 - DNA, 75 bp, synthetic construct
  source 1..75: mol_type = other DNA
gaacgtgttcgcgttgtatttgggacgaaaggtgggcggccgagagagacaacagttttcaatcgtgaaaaagtt

SEQ ID NO: 332891 - DNA, 75 bp, synthetic construct
  source 1..75: mol_type = other DNA
atcgtcgccgcgatttgcgcgacaccagctacggtgttggtgccgcatgatattttcccgattggcaatatgacc

SEQ ID NO: 332892 - DNA, 75 bp, synthetic construct
  source 1..75: mol_type = other DNA
atgagcgcatcggcactggtctgcctcgcccttggtagtgaagagactgaagcggtcaccaccatcgacctgttg

SEQ ID NO: 332893 - DNA, 75 bp, synthetic construct
  source 1..75: mol_type = other DNA
ttcctggagagtgttttatctgtgaactcaggctgccagatcatcgtttccgatggaagcataataagctttttc

SEQ ID NO: 332894 - DNA, 75 bp, synthetic construct
  source 1..75: mol_type = other DNA
gttgacacctatacaaactgcaattcaggatttggaaacaccgtcacatgcaacagtagcagcaacattagataa

SEQ ID NO: 332895 - DNA, 75 bp, synthetic construct
  source 1..75: mol_type = other DNA
tcagttcgtagaatctataaattactgctactgatgctgccggggaaaggcgtaacgaaaaaacagcctccgtta

SEQ ID NO: 332896 - DNA, 75 bp, synthetic construct
  source 1..75: mol_type = other DNA
tgttcgtacaaagaaatcagtgaggagcagtttaccgaagctctgtcacttgctgctcgcgttccgcttgaagga

SEQ ID NO: 332897 - DNA, 75 bp, synthetic construct
  source 1..75: mol_type = other DNA
atctgccgtcaagcggacgtggagccggggatattcacggtaatccacacatggggacgagaccagcagtggcat

SEQ ID NO: 332898 - DNA, 75 bp, synthetic construct
  source 1..75: mol_type = other DNA
gttcccgactgcgcccgtggcagcatattgtgttcacacttccctgccagtactggtccctgatattccacaacc

SEQ ID NO: 332899 - DNA, 75 bp, synthetic construct
  source 1..75: mol_type = other DNA
caagaatgtatagctgaaggcgtggaagtgatttgcttccctgccgatgtcggcgatctctccttgcatgaagag

SEQ ID NO: 332900 - DNA, 75 bp, synthetic construct
  source 1..75: mol_type = other DNA
gcctttgcaatgaacaaattggcgtttatgaagtgcgccctggcctaatcaaaaccgatatgaccattccggcaa

SEQ ID NO: 332901 - DNA, 75 bp, synthetic construct
  source 1..75: mol_type = other DNA
attttctacgcaatactgatatgactcaaaacgatgcgaaagatacagagtcggcttatggtggacggctggaga

SEQ ID NO: 332902 - DNA, 75 bp, synthetic construct
  source 1..75: mol_type = other DNA
cggcgaatatgacctttttgacttaatggctcatgttactgaagagaacctgcacgccccggtggattctggccc

SEQ ID NO: 332903 - DNA, 75 bp, synthetic construct
  source 1..75: mol_type = other DNA
acattgaccatatcgcaacgctgcgcaatgcacgcggtactgcttatccggacccggttcaggccgcatttattg

SEQ ID NO: 332904 - DNA, 75 bp, synthetic construct
  source 1..75: mol_type = other DNA
ctcacgagatgttgatatcaatgagccagacggaccaacgaatctttccgcatggatgagacttaagaataaaga

SEQ ID NO: 332905 - DNA, 75 bp, synthetic construct
  source 1..75: mol_type = other DNA
gcatctcagataccgcaagccgtagagtacatccacagggtagtgcttgaaggtgagttcatcggcaaacaagag

SEQ ID NO: 332906 - DNA, 75 bp, synthetic construct
  source 1..75: mol_type = other DNA
ccccctcccaggagcaggttcgtgtaaaaactatgcttaatagcaccatttcgatgggttacccggatgttgtaa

SEQ ID NO: 332907 - DNA, 75 bp, synthetic construct
  source 1..75: mol_type = other DNA
ccgagcaggcgggtgcggatggcattaccgtgcatttgcgcgaagatcgtcgccacattaccgaccgcgatgtgc

SEQ ID NO: 332908 - DNA, 75 bp, synthetic construct
  source 1..75: mol_type = other DNA
accgaagagatgctggcgatcgccgttgagacgaagccacatttttgctgcctggtaccggaaaagcgtcaggaa

SEQ ID NO: 332909 - DNA, 75 bp, synthetic construct
  source 1..75: mol_type = other DNA
atagggatcgtaatggtaaagcgaagccgcataagcattcagggatcccaacacttacaggtaaatggcgtcacc

SEQ ID NO: 332910 - DNA, 75 bp, synthetic construct
  source 1..75: mol_type = other DNA
tcatcgggtaatgcagggggatgatccagaaggaatcgtctggttcccggactgttatccacaaatttactacta

SEQ ID NO: 332911 - DNA, 75 bp, synthetic construct
  source 1..75: mol_type = other DNA
ccggaacaagcggaaactatgcaggataaccagccgcaaggtgataaagctgatagcagtagcgatagccttgat

SEQ ID NO: 332912 - DNA, 75 bp, synthetic construct
  source 1..75: mol_type = other DNA
aaagctatgcttccgacaacaatcatgggaacatgtaatacggcacctgttcctggttgcttttgtccattctgt

SEQ ID NO: 332913 - DNA, 75 bp, synthetic construct
  source 1..75: mol_type = other DNA
agtgcattacccggaacaaccatcacagggacatgtgacgcctcccccgtcccgggatgcacctgtccgttttgt

SEQ ID NO: 332914 - DNA, 75 bp, synthetic construct
  source 1..75: mol_type = other DNA
acgccagtttacccgtgtgggactgtacctgacggtgatcggctacctgttgttgctactgtttgccgccacctg

SEQ ID NO: 332915 - DNA, 75 bp, synthetic construct
  source 1..75: mol_type = other DNA
gatacagctaaatattgaaggttactcgctaccacagattatggaaatggggaactggtcgaatgaagaaatggt

SEQ ID NO: 332916 - DNA, 75 bp, synthetic construct
  source 1..75: mol_type = other DNA
aagcccgagagcaaaaagtgactcgtcaggcaacgccattcctagtctccgacctgaaagctttgattaaagccc

SEQ ID NO: 332917 - DNA, 75 bp, synthetic construct
  source 1..75: mol_type = other DNA
gatcgggaaaaatggaaagcccattattgtcgatgatgagggtatgctcagtaaaaacacattgctccgggcctt

SEQ ID NO: 332918 - DNA, 75 bp, synthetic construct
  source 1..75: mol_type = other DNA
ggatgataaacatggcgaactgaaatcaatgcgtaccgcgccaaattatttacgtcggggtgtcgccagtctgat

SEQ ID NO: 332919 - DNA, 75 bp, synthetic construct
  source 1..75: mol_type = other DNA
aaccgtttgctgattatcgatttgatccacacagtcgatttttatcattgacgctatgcgaaaataatgaattgc

SEQ ID NO: 332920 - DNA, 75 bp, synthetic construct
  source 1..75: mol_type = other DNA
tctatatgggaagggaaacatcttgcaggaattggtgcactgaaattgctcgatgataagcatggcgagctgaaa

SEQ ID NO: 332921 - DNA, 75 bp, synthetic construct
  source 1..75: mol_type = other DNA
gcccgtctggagcctgcttccggaaatgagcaaaaaattattcgtcttatggttacacagcaactggagcaggta

SEQ ID NO: 332922 - DNA, 75 bp, synthetic construct
  source 1..75: mol_type = other DNA
tgcatgtacctgcggcgatctggtcgatgggcatttatgcatcaatggcggtggcggcgtttattggccttgtct

SEQ ID NO: 332923 - DNA, 75 bp, synthetic construct
  source 1..75: mol_type = other DNA
tccgtggagtggtggaacaccctgcatcagggatcaacgcggatgcagcaaagcatcgatccggcaatgcgttct

SEQ ID NO: 332924 - DNA, 75 bp, synthetic construct
  source 1..75: mol_type = other DNA
gattgccctgtggcacgccttcgacgaccgtcgtctggcgggccgtgcggcaggtatcctggtgctgattggcgt

SEQ ID NO: 332925 - DNA, 75 bp, synthetic construct
  source 1..75: mol_type = other DNA
cgcattacaggacgatgccatcgtgcaaaaagaggtatttggtccggtagtgagtgttacgctcttcgacaacga

SEQ ID NO: 332926 - DNA, 75 bp, synthetic construct
  source 1..75: mol_type = other DNA
ccgaggcatccgcagagcaggtcgatgctgctgttcgcgcggcagatgcagcatttgccgaatgggggcaaacca

SEQ ID NO: 332927 - DNA, 75 bp, synthetic construct
  source 1..75: mol_type = other DNA
gccggacaggattgtactgcggcttgtcggatctacgcgcaaaaaggcatttacgatacgctggtggaaaaactc

SEQ ID NO: 332928 - DNA, 75 bp, synthetic construct
  source 1..75: mol_type = other DNA
tgatttggcaaatgttaactatgtaggtgatacaactgaatcagtgaacactctatcggaaaaatacaaaaaggt

SEQ ID NO: 332929 - DNA, 75 bp, synthetic construct
  source 1..75: mol_type = other DNA
gaacgagccgagatcatccgtgaaaaaggcactaaccgcagccagttcttccgtggtcaggtcgataaatatacc

SEQ ID NO: 332930 - DNA, 75 bp, synthetic construct
  source 1..75: mol_type = other DNA
acgtagtcgtggacggggacaatactagcaaccaggccgggtcctacacgctgaacatggacggtggctactggg

SEQ ID NO: 332931 - DNA, 75 bp, synthetic construct
  source 1..75: mol_type = other DNA
gtttacttagtgcctttctggtggggataacctggccaataagtctgcctgtagcattactcttttctctttttt

SEQ ID NO: 332932 - DNA, 75 bp, synthetic construct
  source 1..75: mol_type = other DNA
ctttaatattctttttagtaattttggcgagttgttttatctgatgaaaaaaactaatgcaacgccacataaagc

SEQ ID NO: 332933 - DNA, 75 bp, synthetic construct
  source 1..75: mol_type = other DNA
atgtcattaaggagaatgacatctggtgaattaacattagccagatcgatttttgagaatacaattgattataac

SEQ ID NO: 332934 - DNA, 75 bp, synthetic construct
  source 1..75: mol_type = other DNA
gatgaacttccagccgtatgacagcgatgctgactgggtgattactggcgtgccgttcgatatggccacttctgg

SEQ ID NO: 332935 - DNA, 75 bp, synthetic construct
  source 1..75: mol_type = other DNA
tactgattactccgatcatcctcgcaaacttgtcacgctaaaccccaaactcaaatcaacagccgccggacgtta

SEQ ID NO: 332936 - DNA, 75 bp, synthetic construct
  source 1..75: mol_type = other DNA
cgaccgttgcagcaatatctgggcttcgttgccgggcgctggttacggtcagtatgaacataaaattggtgacct

SEQ ID NO: 332937 - DNA, 75 bp, synthetic construct
  source 1..75: mol_type = other DNA
gcgggcttcccgttcagccggatggcggatctgtcgcaaaccatcaccgtgatgccgaaagcgcctaacgaagca

SEQ ID NO: 332938 - DNA, 75 bp, synthetic construct
  source 1..75: mol_type = other DNA
cggtcacctttggtgaactgaaaacctatgaagaacagttacaatccagcggtcttgagccagcagcgattaacg

SEQ ID NO: 332939 - DNA, 75 bp, synthetic construct
  source 1..75: mol_type = other DNA
ataacgaccagcgcagcgtgattgctctcctggctgacagtccgcgcggttacgaaatgcttaacgatgcggtga

SEQ ID NO: 332940 - DNA, 75 bp, synthetic construct
  source 1..75: mol_type = other DNA
tcagcttctttcacgctggtgggatgcctaccgtaagcagcttgctctgaaaaacttctcccccaaaagccagga

SEQ ID NO: 332941 - DNA, 75 bp, synthetic construct
  source 1..75: mol_type = other DNA
gtcagaaggaacggataacgggcgacaaccgacacgtaaccacggttatgacgttattgtcggtggtgaactgtt

SEQ ID NO: 332942 - DNA, 75 bp, synthetic construct
  source 1..75: mol_type = other DNA
aagctttccttgatatggtggcatggtcagaaggaacagataacggacggcagaaaaccagaaaccacggttatg

SEQ ID NO: 332943 - DNA, 75 bp, synthetic construct
  source 1..75: mol_type = other DNA
atgcggttccgtcaacatatctatatgcttcacgtagagcaacacgtgtagcaagcctaaaaacatctggagatg

SEQ ID NO: 332944 - DNA, 75 bp, synthetic construct
  source 1..75: mol_type = other DNA
gaaattatttttgtccaatgactacggctgcagtaaaaaggatggacagctttttgatttaattcttgatgaatt

SEQ ID NO: 332945 - DNA, 75 bp, synthetic construct
  source 1..75: mol_type = other DNA
gatttactatctgctaatcatccaagctatgttgtccaaaataggcctctaatagaatatttaatatgtcataca

SEQ ID NO: 332946 - DNA, 75 bp, synthetic construct
  source 1..75: mol_type = other DNA
ccgagaagctgctggctgccggtaagcgtatgctctccttcggtggtgaccactttgttacgctgccgctgctgc

SEQ ID NO: 332947 - DNA, 75 bp, synthetic construct
  source 1..75: mol_type = other DNA
gactatcagcagcccgcacaacaactacctggtcgttataacaaggctgcagcggatgcacttgctgcagtatat

SEQ ID NO: 332948 - DNA, 75 bp, synthetic construct
  source 1..75: mol_type = other DNA
cttccgcccggaaagcaatattggtcaccgtcgtgcatttttagagttagttcatcaaggtgcaattcagtttgc

SEQ ID NO: 332949 - DNA, 75 bp, synthetic construct
  source 1..75: mol_type = other DNA
attctgcgctcttttgcatgtaaaaatataaagataataaactttaatataaatgatcaaataaattgctttggt

SEQ ID NO: 332950 - DNA, 75 bp, synthetic construct
  source 1..75: mol_type = other DNA
cttggtccgcacatggtgatttgaatttttataaaaatgctgttcaaaatcatctaatcccacaaggtaatattc

SEQ ID NO: 332951 - DNA, 75 bp, synthetic construct
  source 1..75: mol_type = other DNA
atgcaggtactaaattcccagcgtaaagctttcctcgatatggtggcatggtcagaaggaacggataacggacgg

SEQ ID NO: 332952 - DNA, 75 bp, synthetic construct
  source 1..75: mol_type = other DNA
ttagaagacaggtttggtattaatgtaacgaagataactcaggaacaatgggaagaggctggctttataggtcct

SEQ ID NO: 332953 - DNA, 75 bp, synthetic construct
  source 1..75: mol_type = other DNA
tctttattagccggattaacagcacaaaagatttttgatagtgaaagtgatccgggtgctaaaaagagccatttc

SEQ ID NO: 332954 - DNA, 75 bp, synthetic construct
  source 1..75: mol_type = other DNA
ttaccagactttgaggaaagaatcgctaaacattctgtcatttatattaacaagaaaccaaccccttgcacactc

SEQ ID NO: 332955 - DNA, 75 bp, synthetic construct
  source 1..75: mol_type = other DNA
ggtgcgccaggagatgtataaccgttacggcgaaagcgcctatgaagatggttatcgcatttacactaccattac

SEQ ID NO: 332956 - DNA, 75 bp, synthetic construct
  source 1..75: mol_type = other DNA
ctttgatgatcaccgtcgtaatctcggtcatacaacggcttccggagcgattaaagatcagatctcaggttacga

SEQ ID NO: 332957 - DNA, 75 bp, synthetic construct
  source 1..75: mol_type = other DNA
cagccgacacaacaggcggtgcacgaggtgggaacgaccattatcgataatggcgaagcacaggaattgttctga

SEQ ID NO: 332958 - DNA, 75 bp, synthetic construct
  source 1..75: mol_type = other DNA
gcatcacggcgttgacccggtggggatcttccgtgcggcaagcgtggcgctgttctccggccacgcgtcacaagg

SEQ ID NO: 332959 - DNA, 75 bp, synthetic construct
  source 1..75: mol_type = other DNA
atggataaaggtctgacgctggcaagtatgttgaacgatgtgccaatttcccgctgggatgcaggtgccggttct

SEQ ID NO: 332960 - DNA, 75 bp, synthetic construct
  source 1..75: mol_type = other DNA
gctgccgacctatggtccgctgctgcctgccgcagtcaccagcgccaatcctcaggaagcgacggcgatgctggc

SEQ ID NO: 332961 - DNA, 75 bp, synthetic construct
  source 1..75: mol_type = other DNA
atagagaggatcttgttatcctggatataattaatgatagtttcagcatagtgcctgacgcaggtagcttgctaa

SEQ ID NO: 332962 - DNA, 75 bp, synthetic construct
  source 1..75: mol_type = other DNA
tcggctcgcgggtgatgcgtcgtgattacggctcgttgctggcgtcaatgattgaccagccgcagaccccggcgc

SEQ ID NO: 332963 - DNA, 75 bp, synthetic construct
  source 1..75: mol_type = other DNA
attgatatgccgcaaaacccggcgctcaggttgcaaattatggtggcgtgctattcggctatccagaagtgggag

SEQ ID NO: 332964 - DNA, 75 bp, synthetic construct
  source 1..75: mol_type = other DNA
atgtcaacatcccgttggtggtttcaaccatcacaggtcaggatgggcagacgcgtgtcaccactgtacaaacca

SEQ ID NO: 332965 - DNA, 75 bp, synthetic construct
  source 1..75: mol_type = other DNA
accaggcaaaaacactggcagcagaaaaaggttgggggtttaaggccgacggcagctacttccgtcgcgtggtgc

SEQ ID NO: 332966 - DNA, 75 bp, synthetic construct
  source 1..75: mol_type = other DNA
tgaagaagtgtgttatttttaaacaaataaggcttaagaaaaagggggggtataaaatttttgttctgatgatat

SEQ ID NO: 332967 - DNA, 75 bp, synthetic construct
  source 1..75: mol_type = other DNA
aaaagattaccgatacgctgaaggcgctgccgacctatggtccgctgctgcctgccgcggtcacccgcgccaacc

SEQ ID NO: 332968 - DNA, 75 bp, synthetic construct
  source 1..75: mol_type = other DNA
actcacgttggcgtgacggcttcttctgataccttctacccaggtcaggaacgttacgatacttactctggtcgc

SEQ ID NO: 332969 - DNA, 75 bp, synthetic construct
  source 1..75: mol_type = other DNA
gataaggcgcgccagcttttcgatacggcttctcaggtctgccagcttatcgatggcgttcggcagtgtctgcag

SEQ ID NO: 332970 - DNA, 75 bp, synthetic construct
  source 1..75: mol_type = other DNA
gcgcgccagcttttcgataccgcttctctggtctgtgaaattgtcgacggtgttcggcagtgtctgcagaactga

SEQ ID NO: 332971 - DNA, 75 bp, synthetic construct
  source 1..75: mol_type = other DNA
agtggtttaatgagtccaaaggattcggtttcattactctggaagacggcagcaaagacgtgttcgtacacttct

SEQ ID NO: 332972 - DNA, 75 bp, synthetic construct
  source 1..75: mol_type = other DNA
agcaaagatgtgttcgtacacttctctgcaatccagactaatggttttaaaactcttgctgaaggtcagcgcgta

SEQ ID NO: 332973 - DNA, 75 bp, synthetic construct
  source 1..75: mol_type = other DNA
atggcaaagattaaaggtcaggttaagtggttcaacgagtctaaaggttttggcttcattactccggctgatggc

SEQ ID NO: 332974 - DNA, 75 bp, synthetic construct
  source 1..75: mol_type = other DNA
gcttacgtcaggggctgggtcagtcgaaaaacgtggtgatggtacgcgcaatgcgggcgatgggcgtcgactacg

SEQ ID NO: 332975 - DNA, 75 bp, synthetic construct
  source 1..75: mol_type = other DNA
aaatcgaacgtgctggaaaacagcgacgttgaagacgtggctatctctcgcgaacagcagaatgtttctgtgcca

SEQ ID NO: 332976 - DNA, 75 bp, synthetic construct
  source 1..75: mol_type = other DNA
gcgagaaacttcttcctgagtccagaacgcacgctaatgcgtaaaattaaggaagtcttcctcgcaattcgtatt

SEQ ID NO: 332977 - DNA, 75 bp, synthetic construct
  source 1..75: mol_type = other DNA
tagcgatactggtgccttttttattggtgggatgcgtcagcctggataaagcgcgccagcttttcgataccgctt

SEQ ID NO: 332978 - DNA, 75 bp, synthetic construct
  source 1..75: mol_type = other DNA
aacactggaagatggtggtggtactactggctatctgtggcgcgatgctgttactgcgttgggcagcaatgattt

SEQ ID NO: 332979 - DNA, 75 bp, synthetic construct
  source 1..75: mol_type = other DNA
aaccagcagatcaatagtattgtaccaaacagtccacattatcgaaattacttatatttttctatgttagagaaa

SEQ ID NO: 332980 - DNA, 75 bp, synthetic construct
  source 1..75: mol_type = other DNA
cgcaatctgctgtttatgctgattggtctggaaatcatgattaacgcctctgcgctggcctttgtggtcgccgga

SEQ ID NO: 332981 - DNA, 75 bp, synthetic construct
  source 1..75: mol_type = other DNA
ctgggaacacaatcgcttcccatggaatttcgacatgcgtgagcgcctgaacgtggtggactgcggcgacctggt

SEQ ID NO: 332982 - DNA, 75 bp, synthetic construct
  source 1..75: mol_type = other DNA
gcctgccaggtgaacgatcgcagcgtggatgacgttatcgctcaagtgaaacagattgtaggtgatatgccggtt

SEQ ID NO: 332983 - DNA, 75 bp, synthetic construct
  source 1..75: mol_type = other DNA
gctccggcatacgatcagtcggaaatcaccgctctggctgcggcaacgctggcgctggagatgctgtatattcag

SEQ ID NO: 332984 - DNA, 75 bp, synthetic construct
  source 1..75: mol_type = other DNA
atcccgatagcgacagtatctgcagtgcacttgtcaccgcagactggttaaacatgcttgggaagtttgcaaccc

SEQ ID NO: 332985 - DNA, 75 bp, synthetic construct
  source 1..75: mol_type = other DNA
aactcttctggcattggcgttgaattattacctgtcgagatgacgctggatgagcggccttaccccgctttttac

SEQ ID NO: 332986 - DNA, 75 bp, synthetic construct
  source 1..75: mol_type = other DNA
gctgctgcgtgctcatgcgaagcatttcggcaaaatggcgctggtacactttgacgcccacaccgatacctacgc

SEQ ID NO: 332987 - DNA, 75 bp, synthetic construct
  source 1..75: mol_type = other DNA
tattaccattacctgtaatcagtccggttttcatttaaccagggacgggcagcgactgttcactgaacgttatat

SEQ ID NO: 332988 - DNA, 75 bp, synthetic construct
  source 1..75: mol_type = other DNA
ttgccaatacggttatgccgtttggcaagtataaggggcgtcgcttaatcgacttgccggaagagtatctgctgt

SEQ ID NO: 332989 - DNA, 75 bp, synthetic construct
  source 1..75: mol_type = other DNA
gacctgccggaggagtatctgctgtggtttgcccgcaaagatgaattcccggcagggaagctcggtgagctaatg

SEQ ID NO: 332990 - DNA, 75 bp, synthetic construct
  source 1..75: mol_type = other DNA
cgtgagatgagcgagaagctgcaggcgcacgccgagaagctgctggctgccggtaagcgtatgctctccttcggt

SEQ ID NO: 332991 - DNA, 75 bp, synthetic construct
  source 1..75: mol_type = other DNA
tgttatatctccattacccgtaataaacccggcttccagttaataaaaaccggagaagagatattgtcggaaagt

SEQ ID NO: 332992 - DNA, 75 bp, synthetic construct
  source 1..75: mol_type = other DNA
tgattatgaacccgttatttaacgatattcagatgcgtcttttttatctgaaccattcgccgtactcctggcact

SEQ ID NO: 332993 - DNA, 75 bp, synthetic construct
  source 1..75: mol_type = other DNA
tgacttgcgagacgagactgcgtatcgtcaccgcatccagtcagcagctcgcaagctggcgaataacgttgagtt

SEQ ID NO: 332994 - DNA, 75 bp, synthetic construct
  source 1..75: mol_type = other DNA
actctgtctggcaagtgccgtattgctgtgtggtattcagcatgtgctgtacgaccagaggcaattggtgttggt

SEQ ID NO: 332995 - DNA, 75 bp, synthetic construct
  source 1..75: mol_type = other DNA
tgacctgcgtgatgagcgttcttaccgtcgccgcatccaggcatccgccaaaaaactggcgaataacattgagtc

SEQ ID NO: 332996 - DNA, 75 bp, synthetic construct
  source 1..75: mol_type = other DNA
gctactggtgtaactgtttctggtgcgcagaagtttaagccgcaggcatacactcttgataccgatggtaacaaa

SEQ ID NO: 332997 - DNA, 75 bp, synthetic construct
  source 1..75: mol_type = other DNA
ccacggcgcgcagctttgacggtcgaatgacagttacgttaaccggccagcataacgacaccggtcagccacttt

SEQ ID NO: 332998 - DNA, 75 bp, synthetic construct
  source 1..75: mol_type = other DNA
ttgtctttatttcatatccgtcatacgggacgtcaattctacgactggagtcgtcgcgcttcggataacgatttc

SEQ ID NO: 332999 - DNA, 75 bp, synthetic construct
  source 1..75: mol_type = other DNA
gttgagcaggaagcgccgactcaaactggttgggatttaactggtaaagaaactggcgtactggaactgtccgtt

SEQ ID NO: 333000 - DNA, 75 bp, synthetic construct
  source 1..75: mol_type = other DNA
agcgttatcatcgatccagctcctgcactcaatgtactgacagtgggcagcatcgttaggcataacgcaacgcac

SEQ ID NO: 333001 - DNA, 75 bp, synthetic construct
  source 1..75: mol_type = other DNA
ctgtccggcctgtgccgtatcgcgctgtggtatggcgtaaacgcgacacgcccggaagcaatcggtgttggcctg

SEQ ID NO: 333002 - DNA, 75 bp, synthetic construct
  source 1..75: mol_type = other DNA
cggatgcaatcggcactaataccgctgatgcctggaactttgtggccgacgcagaagaaatcatgttctcccgcg

SEQ ID NO: 333003 - DNA, 75 bp, synthetic construct
  source 1..75: mol_type = other DNA
gcgtcagattgctggctttgatgaaattcttcgctcaccgaaacttccggcagttaccaagtcaaccgctactgg

SEQ ID NO: 333004 - DNA, 75 bp, synthetic construct
  source 1..75: mol_type = other DNA
cgatcgtgataacgaacaggctcaactttatacacaaattcaggcgcagatccgtgaacaggaacgcgcgcgagc

SEQ ID NO: 333005 - DNA, 75 bp, synthetic construct
  source 1..75: mol_type = other DNA
gggaaagtactgaacgagcgggctgaattcaatgccgaaacgattgaaagcacactaacagccgccgtcgcgtat

SEQ ID NO: 333006 - DNA, 75 bp, synthetic construct
  source 1..75: mol_type = other DNA
gatgcggtttacggcgcggtagcgggctatggggtgctgtggtgtgtttactggggcgtctggttagtttgtcac

SEQ ID NO: 333007 - DNA, 75 bp, synthetic construct
  source 1..75: mol_type = other DNA
gtcgtaatatagttgttaatcactgcaaatgtgcatgtggttgtagggttatcagttctcaactagaaaatagta

SEQ ID NO: 333008 - DNA, 75 bp, synthetic construct
  source 1..75: mol_type = other DNA
aggaatcaaaaatcagaagaattaaacgggatattgagcgcagttgtgataatgccgaaaaatacttcttgcttt

SEQ ID NO: 333009 - DNA, 75 bp, synthetic construct
  source 1..75: mol_type = other DNA
acttctgcaacgccggactataaccactatcgcattcggcccgtggcttgcgctcggcagcatgataaacctggg

SEQ ID NO: 333010 - DNA, 75 bp, synthetic construct
  source 1..75: mol_type = other DNA
gctgcaggcgcgtggtgtggctggcaaacgttgccaatgatactgctgattgcctcgctgggtggcattggttac

SEQ ID NO: 333011 - DNA, 75 bp, synthetic construct
  source 1..75: mol_type = other DNA
gtgcccctgatactttgcgttgctgctgctatcgcctgcgccctggcacctttcacgcccatcgtgactggcgca

SEQ ID NO: 333012 - DNA, 75 bp, synthetic construct
  source 1..75: mol_type = other DNA
tggaggtacgttgttgatgacgccgcttaagggcgttgacagtcaggtgtatgcgctggcgcagggcaatattct

SEQ ID NO: 333013 - DNA, 75 bp, synthetic construct
  source 1..75: mol_type = other DNA
tcgctgcggtaatggtgacagcgtcacttcctccgtttggacgtcaggggcaaaccatcgatgtggtggtttctt

SEQ ID NO: 333014 - DNA, 75 bp, synthetic construct
  source 1..75: mol_type = other DNA
acagctgggaattaccgttccgacgggcaccaatatgcagctaaaaaacgtcgctgcggtaatggtgacagcgtc

SEQ ID NO: 333015 - DNA, 75 bp, synthetic construct
  source 1..75: mol_type = other DNA
gtcggtttttagtggcttttaaccgccgtgggtatttctcgacaaaatcttcaagggcaaattttttagcttttg

SEQ ID NO: 333016 - DNA, 75 bp, synthetic construct
  source 1..75: mol_type = other DNA
gcgaagcacgcgcccagctgccgcacgcacatcttatttttgtcgcccgtatccgtcaggaggtgactcatgctt

SEQ ID NO: 333017 - DNA, 75 bp, synthetic construct
  source 1..75: mol_type = other DNA
gatacggtaacgcgacggcgttagatgcgcggactattcaggtacgcgtgccgagtggcaacagttcccaggtgc

SEQ ID NO: 333018 - DNA, 75 bp, synthetic construct
  source 1..75: mol_type = other DNA
ttatgtcggtgagttttacaccctgacagcaccgtctaaatatcacgccaccaccaaagcaggctaccgtaacag

SEQ ID NO: 333019 - DNA, 75 bp, synthetic construct
  source 1..75: mol_type = other DNA
atgacgggtgtagtttacgcgtttccgtggaatgccccacggtcggcattagccagcccatatcttacctatgac

SEQ ID NO: 333020 - DNA, 75 bp, synthetic construct
  source 1..75: mol_type = other DNA
ctcggagttctgtcaataactgtacgggaagcgaaagcgatccaccggaactcgatttatcaaaacccctgagtc

SEQ ID NO: 333021 - DNA, 75 bp, synthetic construct
  source 1..75: mol_type = other DNA
caccgttggtgttggcactccgattttaacccggctcacgcaatggaaaattgttccgaagcgtgccgttgattt

SEQ ID NO: 333022 - DNA, 75 bp, synthetic construct
  source 1..75: mol_type = other DNA
gttgagccgacgctgggtatcggcgcaccaaccgacaaagtgtttatgatcgaagaagcccagcgtccgggcgag

SEQ ID NO: 333023 - DNA, 75 bp, synthetic construct
  source 1..75: mol_type = other DNA
acaggctaacgccgtgaactgggcgacggtgaaattctggcagcaaatgggcctgacccgcgtgatcctctctcg

SEQ ID NO: 333024 - DNA, 75 bp, synthetic construct
  source 1..75: mol_type = other DNA
tactcacgacgattatcagaactacgaatacggttattccgtttctgaccgccagcagtttgttggtgagtttac

SEQ ID NO: 333025 - DNA, 75 bp, synthetic construct
  source 1..75: mol_type = other DNA
gagaaaggtgctttctctccagcctgagtgcgtgcgttttgacgtttatcgcaccgctgcagtgctggagcaaaa

SEQ ID NO: 333026 - DNA, 75 bp, synthetic construct
  source 1..75: mol_type = other DNA
caataactgtacgggaagcgaaagcgatccaccgatactggatttaacaaaaccgctgagtcggcgtgaaagacg

SEQ ID NO: 333027 - DNA, 75 bp, synthetic construct
  source 1..75: mol_type = other DNA
gctggctttatttccctccaatttaacgttatcccaccacattgggagcgggttgaaaaaaaatatgtcggtgcg

SEQ ID NO: 333028 - DNA, 75 bp, synthetic construct
  source 1..75: mol_type = other DNA
gttgccggaagacgtcgagcgcgtgcgcctcatcattcgcgattatgcgtgggaggaagaccgtcacgaactgag

SEQ ID NO: 333029 - DNA, 75 bp, synthetic construct
  source 1..75: mol_type = other DNA
gacggtaaatggttgcgaggaacggccacaggagaaatatttaccacggcgccatcacatcaggcgaaagttaag

SEQ ID NO: 333030 - DNA, 75 bp, synthetic construct
  source 1..75: mol_type = other DNA
ggtaaatggttgcgtggaacagctaaaggagaggtattttccgcagcaccgtcacaacagtctcaagccagaaag

SEQ ID NO: 333031 - DNA, 75 bp, synthetic construct
  source 1..75: mol_type = other DNA
aaacattacgggatggggcgaaactgccacctgttcgaaatgacgcgcaaatgggcttacagggcgattcgtcag

SEQ ID NO: 333032 - DNA, 75 bp, synthetic construct
  source 1..75: mol_type = other DNA
gtgataacaggtgtctggaaatataggggcaaatccaatggagatggtaaaggtgacatcgctacatacggtgtt

SEQ ID NO: 333033 - DNA, 75 bp, synthetic construct
  source 1..75: mol_type = other DNA
ttggcttgcactctggctatcacctctcaggctaatgcagcgaccaacgatatttctggtcaaacttacaatact

SEQ ID NO: 333034 - DNA, 75 bp, synthetic construct
  source 1..75: mol_type = other DNA
taattcaacgatcgatgacaactacgagcattatacttacaacggtacctataataatgccgctgacactcatgt

SEQ ID NO: 333035 - DNA, 75 bp, synthetic construct
  source 1..75: mol_type = other DNA
cttcggtgaaagaagtggcgaactttgtcaccaaatccaaccttgaagatggcgtggcgtttgctattgagaagt

SEQ ID NO: 333036 - DNA, 75 bp, synthetic construct
  source 1..75: mol_type = other DNA
cagctttgctgtacctgcaggtacttcctatcagataacatcctatccaacagaaaatacatcatgtggtgccgg

SEQ ID NO: 333037 - DNA, 75 bp, synthetic construct
  source 1..75: mol_type = other DNA
gtgataacaggtgtctggaaatataggggcaaatccaactacgaacactacacatataacggcacttacaataat

SEQ ID NO: 333038 - DNA, 75 bp, synthetic construct
  source 1..75: mol_type = other DNA
gatgctgccattggcattgtgacactaggtattctggttttctggccacgtctgggcattcgtttaccgggtcat

SEQ ID NO: 333039 - DNA, 75 bp, synthetic construct
  source 1..75: mol_type = other DNA
cgcctctggctggaactactgggtactgtacgttttagttgccatggcagagctgactgctgtgggtaaatacat

SEQ ID NO: 333040 - DNA, 75 bp, synthetic construct
  source 1..75: mol_type = other DNA
tacggcattgtgcgtactgattaactaccttgccccagagtccgcattcggactgttaatggcgctggtggtatc

SEQ ID NO: 333041 - DNA, 75 bp, synthetic construct
  source 1..75: mol_type = other DNA
ctattacaacggcgatatctacccggtcattaataacgctaccgttaacggcgtgatttctacctactatctgga

SEQ ID NO: 333042 - DNA, 75 bp, synthetic construct
  source 1..75: mol_type = other DNA
atgatctggcagcctgagttcacagataaaacactctccaggaaacccggggcggttcagatttctgactctatc

SEQ ID NO: 333043 - DNA, 75 bp, synthetic construct
  source 1..75: mol_type = other DNA
tcgcaattccactacgttctggcagatggttctcagggtaacggtattccgcaactgctgccgcaactggtacta

SEQ ID NO: 333044 - DNA, 75 bp, synthetic construct
  source 1..75: mol_type = other DNA
taaactgggtgtaaccagagaaccgcttttgctgcttgagaatgtgcggggacttgagctgctgccgtttcacgc

SEQ ID NO: 333045 - DNA, 75 bp, synthetic construct
  source 1..75: mol_type = other DNA
tgctaacaaagctgacctgggtgcatacacctatcaggctgaacagcgcggtaacaccgttgttctgcaacagat

SEQ ID NO: 333046 - DNA, 75 bp, synthetic construct
  source 1..75: mol_type = other DNA
cgcttcaaacattgatactttagctataaataatggctctgaagtcaatgttacgaattcttccttactttctga

SEQ ID NO: 333047 - DNA, 75 bp, synthetic construct
  source 1..75: mol_type = other DNA
tcttaactggaccaatatggataatccgggtactgtagatggtaactatgtgaattatagtggctttgtctacta

SEQ ID NO: 333048 - DNA, 75 bp, synthetic construct
  source 1..75: mol_type = other DNA
aagagcaactacagctaacggtctgccaacgtctgattgcagaaaagagctatttttcccaagaggagcttcgcc

SEQ ID NO: 333049 - DNA, 75 bp, synthetic construct
  source 1..75: mol_type = other DNA
tgcaggtattgcattatctcaaggtaatacttacaacgaaacttatactaccgaatctcatacttgggataacaa

SEQ ID NO: 333050 - DNA, 75 bp, synthetic construct
  source 1..75: mol_type = other DNA
atggtgaagttgctactgaccacctgacagttgatagctatagtactgttaatttaaccgaatctactggttgga

SEQ ID NO: 333051 - DNA, 75 bp, synthetic construct
  source 1..75: mol_type = other DNA
tggcggtgctggaaccggagttatgcattcttgatgagtcggactccgggctggatattgacgcattaaaagtgg

SEQ ID NO: 333052 - DNA, 75 bp, synthetic construct
  source 1..75: mol_type = other DNA
atgctggttcccctgaaatcagaaaaacgaccaaaaggcgaacccgtgtatcgtgacccggataacccttttaat

SEQ ID NO: 333053 - DNA, 75 bp, synthetic construct
  source 1..75: mol_type = other DNA
ggcacgttctctgtaaaaatggcggagatctctggtgaaatggtgaaagagaaagtcgggcatattatggatgtt

SEQ ID NO: 333054 - DNA, 75 bp, synthetic construct
  source 1..75: mol_type = other DNA
gctgaccgactacgctaacatggcgctgagcatcccgtctgcgaacaccaatatctggaacctggaacaagacac

SEQ ID NO: 333055 - DNA, 75 bp, synthetic construct
  source 1..75: mol_type = other DNA
cgatggcaaacgttcattcatcattgttacgcactaccagcgcattctcgactacatcaaaccggatttcgtcca

SEQ ID NO: 333056 - DNA, 75 bp, synthetic construct
  source 1..75: mol_type = other DNA
gttacgcactaccaacgcattctcgactacatcaagcctgattacgtccatgtgctatatcagggacgaattgtg

SEQ ID NO: 333057 - DNA, 75 bp, synthetic construct
  source 1..75: mol_type = other DNA
ggaagaagagacgacccggccaacccttaaagaactggcagcgaagctgtccggaggagtgaatgattacagtcg

SEQ ID NO: 333058 - DNA, 75 bp, synthetic construct
  source 1..75: mol_type = other DNA
ccattcgcggctcgacgcctaaaatcaaaggctcctgccagatcgaaaaagccgctaacgagtcggcacacttca

SEQ ID NO: 333059 - DNA, 75 bp, synthetic construct
  source 1..75: mol_type = other DNA
ggggcgtgtatctgtgtgaagtgggaacggacaccgcaaaagaaattctctatgcccgtatgaaagccgatccct

SEQ ID NO: 333060 - DNA, 75 bp, synthetic construct
  source 1..75: mol_type = other DNA
ggggatcgatggtgaaattgtttatcagagatcaaaaaaacacggtgttttccgggtgctgccggtaaaaggcgc

SEQ ID NO: 333061 - DNA, 75 bp, synthetic construct
  source 1..75: mol_type = other DNA
accattaaacctcacagaagacatcacgtctacttatccgacaaaggcgaattatctcattcatcctttgcgata

SEQ ID NO: 333062 - DNA, 75 bp, synthetic construct
  source 1..75: mol_type = other DNA
gctgttacgtgtggatgcggcgatcaacaaaaaataccgccatgcagacggaaccgaaatgactatttcccgtgt

SEQ ID NO: 333063 - DNA, 75 bp, synthetic construct
  source 1..75: mol_type = other DNA
gcgacggctggtatcaggtacgcattgccgggcgtgatacaggtgaaacggaattatcagcccgtcttaatgaac

SEQ ID NO: 333064 - DNA, 75 bp, synthetic construct
  source 1..75: mol_type = other DNA
ctttgttggcctggcggcggtgctggttggatttaacagctacctgcaccatgacgcgggcatggaaccgattct

SEQ ID NO: 333065 - DNA, 75 bp, synthetic construct
  source 1..75: mol_type = other DNA
gggccagatactggcaacgtcggctggatcttactggcgatggtcatcggcggcgcaatcggcatccggctggcg

SEQ ID NO: 333066 - DNA, 75 bp, synthetic construct
  source 1..75: mol_type = other DNA
ttatgcactggcggcgcttcgtatcagcatatcccgctggcagctaaatcttgattcacttctggccagcctgct

SEQ ID NO: 333067 - DNA, 75 bp, synthetic construct
  source 1..75: mol_type = other DNA
atgaaattacgttctgtaacctacgctttattatttgccggggtggcggcgttcagcacatcttctctggcggca

SEQ ID NO: 333068 - DNA, 75 bp, synthetic construct
  source 1..75: mol_type = other DNA
gccaaagccagcgtggatgcaatcctgaaagctctgtacccctgccggcctctgctgaggccgtcactctttatt
